United States Patent Application Publication US 2005/0228172 A9 - sequence listing, part 8

SEQ ID NO: 25678 - DNA, 993 bp, Homo sapiens
cttttaaagtgagattacactccctacaggatatgttgtacatgctgacagccaagtttccaaggttttcattcaacctaatactcatttttggtcatattacggctttgagcaaaatgctgaacatgaagaagctgaattgaagatgatactaagtggtgacagatagtaatccccaggatgcatcttggttgtatcaaagagatacaaaagaaacttaaagacagaggttttaaagtcagagcaatcatagattgccaataacttactaataatatgtaaatttaaaacatgtcaaacacaggtaggacaacctcagggaagcatagaaatcagggagtcaaagtggcaagcattgataatgttcacccaccacaaacgagggctgagggtcctccctttgagaggcaaagctcaaaagagaagggttaggattggtcaagttattacagtttatggccattaagccaatgtttaacattgttttccctagaatgccagtgttgttctaatattgtcctgtgaaagttttgatgccggcagtattttcttctaaaatgtatttaaaatatattgaagcatacggtaattaggaggccagagatctagcaactgaagcagcatatggccaagccgtgtggggtgcgcctgagacgggaggcctgtaaacaggtggagatcttcaggcagaatcttttccaggaggctgaggaattcctctacagattcttgccacagaaaatcatatacytgaatcagctcttgcaaggtactgcctcaatgtggctgacctgacttccctccgggccccactggacatctcatcccaggccctccacccaaggatgatgagatggaaacagataagcaggagatgaaagaagtccctaagagtggatttctccctaggaatgagaaggtcctgttcctgcttgccctggttaagccaggagtctgtagtctcaaagagaaatgcattctagtgatcacagg

SEQ ID NO: 25679 - DNA, 995 bp, Homo sapiens
ccccagcggctcttgctcctccatgtcctgattcaacgctaggctccgttccacaccactcactcgaagcatgagagacacacactagtggtgaaccaagaggactgcggggcagcctccaaggccacaggcgttactcctgcctctacagagctggcgcggtggcttgagctccaggcatgtgagcgacactggccgacaacctccttgaaaccccctcctctcctgccaccattcctcctggtttctttcttcccttctgcccttcctccctccctttatccctccctcctgccttgctttcctcctttcttatttttaacactttttaaatttattacttccaataaagtgcagaatctcagcgcattgtgcacacatatacacccacacagccacccctggaggaagacctgggatgctgccagcactcagaagtcggcctgtgacccgctcctgtcagggactcccacagggcagcctcgactctgmcctcctgtcgccactgaagactttggtttggttttagcttttacatgaatggaaccccaagtgtgctctctgtcgtgtccaccttcctctgttcacacaacccgtgaacctcgctgctctcttcctctccacccaccttgttcagtcttggttatcccccattctatttcctcactcccacacgaccctctgaacaatgtcgcagacacccctggtttctgcagccacctgtatattcggtctcgagttttaactccagtccagatccctcgccttctcctcagaccgaatgcttatgggattcctcacctagaagacccataggcaacccacattctccaaagaaacacgccctgccttgtttacccccaggttctgtactccactccccactcacccagaagccaagctgcaccatcctgggggtaccccagagacaacctcccctctccagggacgggcagttgtcacactgagttcactctgccttcctcgcgcccctg

SEQ ID NO: 25680 - DNA, 596 bp, Homo sapiens
aaaatggaatgaactgcataaaactgatatatcagatcattattttacttagaaaaaagggaatttaatatggttctatctaaaaataaagtgtgagtaagataataccataaaaggaattgtgctgaagaaaaatagtgagaggtgaagccagttggacttcctgggtcgagtggggacttcgagaacttttctgtctagctataggatcgtaaatgcaccaatcagcgctctgtgtctaactaaaggattgtaaatgcaccaatcagcactctttaaaaatgcaccaatcagcactctgcgtctagctaaaggattgtaaatgcaccattcagcactctgtctagctaaaggattgtaaatgcaccaatcatcactctgtaaaaacgcaccaatcagcactctgtgtctagctaaaggattgtaaatgcacaaatcagcmctctgtaaaaacaccccaatcagcactctgtgtctagctaaaggattgtaaacacaccaatcagcactctgcaaaaacgcaccaatcagtgctctgtgtctagctaaaggtttgtaaatgcaccaatcagcaatctgtaaaacgaaccaatcag

SEQ ID NO: 25681 - DNA, 1783 bp, Homo sapiens
cttactcaccctgcacgattagaatgagcattaaataagacagtatggacaaaagtgcttcataaaaaccagataggtgctgctctagtgaaaagtattattatgatacaatgaaatatactttggggaatcactttattataatcagccatatataaattcatactctgtgtggtgacatcataaacataatgacagcaaacatttattgagttcttaatctgtgccaagcactgaagttttgtttacattctctcatctaatgctcatatcagccttttggggcacttagttttacctctcattttatagatgaggacacagatgmtcaaggagcatcacttagtttccgatcgctgttgtaacgaatttccacaaacgcattggcctaaagccacacagatgtattattttagttctggaggtcagaagtctgaaacgggtttccctgagctaaaatccagatagcagctccaggagagaatgtgtccttgccttttccagcttctcaggctgtcttcatttcttctcacacgtgacccttttcctccatcttcaaagccagcaatcctatgactgagacttcttccatagtcacttctccctctccgactcttctgcctctctcttccatcttcaaaggacccttgtggttagcttcggaccactcagataatccagaataatctccctattttaatatccattacttaattataatgcagagtccctctcgccatgtaaggcagcatatttacccattccagggattacggcatggacatctttgaggggtgtggacattattcttcctcccacagtgaagtaccttgctaggagcgtgcggccagagtcagaattcacacccaaggctgtcacttcaaagtccagcatctcaattactcactataaacccttcgatttaatcagtgaagcaaacaataaaatcatagaatgtgagtggtgagaaaagccctgttgcttttagactaatccattggggacttttaaatataatcatcatagtagtaacaacacaaacattgacctcctgatcttcaagtcctgctttgtacatggagtcgttcatttatttcttctcagggtgtatattatttatccaattaaccagatttacagggatccctgaatccatttgtctttcactggataactgaaggaacaaggagcattttgggggccaagggaccactttggaggtctataggaatgtgttttaatggaactactagttcagcaaagggtagttgaagaaggatggcaggggcagttgggccatcattttctggctctggcactgccccttggcagattggatggggtttgtcaggtaagatcaccccactccatctgctgatagccaagtccatttccagcctgtgaggattgatacccacagaggccaatcagaaaatccagagcctatattctgctaggtttccaaagaactgtagaaagctatcagagatccctccctcactctcttacccatctctcccgctcttctcttcactacacacttagctaatctctggtttaatgtaactttaaagttcaaaatgtgtgctcattactgaaaaggctgtcagagcaattcgaaaaaggagctgagagtctggaagaacacagcctagctgaactgttagacaaccagattatctgtggacaaggactggccttgctagccttagttttctccttaggacaaagagaggtggtgatgggcgggagagagtctatatgacctccagagttctttcta

SEQ ID NO: 25682 - DNA, 609 bp, Homo sapiens
tcggcactatcgaggatcacaaaagcctgttagttatggagtcttccagcaataggcttacagtcaagaatgggaaacaacacatatgcacgtaatttgattgaaatgtaggaagtcttaaggatgataggaggagttcagataaagactagaaagttctcaggtgccagattgcttccagccaacagatcagaggaactgccatagaggaggtggctgtgtgtgccctggacctcaaaggagagagatgatattcagacgtgtagcagtgatgggcagaagcacattttaagtggagggaatgaaacaggataagcaagactggtgattgaaaaactctgtttgyctgtgcagaaaagagaaatcttagtttgactggagcctctggcacatgaaagggatttagagtttgccgtttctgtgaacctgtccatcttcaccctcatgctgttctcctttcctcttttaacctgtatcttctctctctttgttttgttgactttctcttttttgttttctgttgtccttttttatgagtggagcatttcagtgcaagagcaaatgggagtggagtggggttctgtggaatgtcagaaatgcatgctcaac

SEQ ID NO: 25683 - DNA, 555 bp, Homo sapiens
aaaagacaaccttcctcaaagccctcccacacttttgctcagattctactggccagaattgagtcacgtgtctatgctctcactgtaggagagactggaaaaggaagtattttgcattttcaggctctgtaggtggaggtgaccactcccagcaagttagaagtaggggtaggtgggtggatggttagtaggtagacagccaaatatgctgatcctccacacatctctttatccttatataaagacacagtatttstgtgtctatatagatatagatatggatatgtactcaggaatgggatgatatcatacatgctctttactatggtcatcctccctgtcacattctgttattgttgttattaccattttgacttcccgcactttactcagtaacatacgttaacacttggtgtttatcctttaataatttcctcaatgcttacataaatcatagaatatacatatacttatagaatggaagtgtgtcattatttatttaccacaataatattatgctgtatattaggacaatccttttaagtatgtagaaac

SEQ ID NO: 25684 - DNA, 555 bp, Homo sapiens
aaaagacaaccttcctcaaagccctcccacacttttgctcagattctactggccagaattgagtcacgtgtctatgctctcactgtaggagagactggaaaaggaagtattttgcattttcaggctctgtaggtggaggtgaccactcccagcaagttagaagtaggggtaggtgggtggatggttagtaggtagacagccaaatatgctgatcctccacacatctctttatccttatataaagacacagtatttctgtgtctatatagatatagatatggatatgtactcaggaatgggatgatatcatacatgctctttactatggtcatcctccctgtcacattctgttattgttgttattaccattttgacttcccgcactttactcagtaacatacgttaacacttggtgtttatcctttaataatttcctcaatgcttacataaatcatagaatatacatatacttatagaatggaagtgtgtcattatttatttaccacaataatattatgckgtatattaggacaatccttttaagtatgtagaaac

SEQ ID NO: 25685 - DNA, 1327 bp, Homo sapiens
ttttcttccacagactaaaattgaagcatggttaaacatgcagaatctaggtggaagtctgggatctcagaagatacaaaagaagctttcccttgcactgcaagatcacatatggcaaaggcttcaataaatatctctaatgggcctactctcttccttataactcatctgacatttttgtgatacaagggagaacagttgaattgtttgaaaaacttgcctcagaaagggtgagacagaaagctcactggtgaattgaaaaggttttcattgtaccgttatgggactgtttttaaaagactctatgttccttgtaaaattcattcttgaatcagatttgatttttagcaaacaatttcttacctaatctcaacctccagactttaatattctaacaattacataagtccattgcattaaaaagttctcaatagttatttttttagttttgataagttttaacaagacaaaaagctgacaagtcttaaatttggtaaaaggagattttgaaaaggagactccaaaaataatgcatttaaaatctaatttatatggtgcctcagaagagtttcaaacaaatgaatagtcttctaagaagttataaattcatgtccgggatagaaatatctgtgaatcactaaattatttctctcatatttgctggtgtaaaactagggaatagccaagcagcttacattatcaactgcttatgaggatgctaaaatgatatacttaactgatatttccatctagaggcactgtataattttgtcaccaaaaataactatagactcaagaatataaggaggaatattttatatagtggcatacaaagttatgacatttatctgtcatttycccatattatttatcctcaaaagagtttgtttctttacatcatgtggaaggataattggtcccataaagaagtaattatttatatcaacgaggtaataataaaagagaatggctcataatctactggacgttgcatggcctgtgatgtctctttccttctagtcactttcgaaagctcaaataccaacacctttgtaacttcctccttttcccccatatacatagtcaattcttcttttgtactccctcaaatgttaatttgtacattgattttcacatttacattactgtattataattacctacttacgtttatgacctgtctgatcaattttaaattagcattttcttctcccttgtgtctcggtacattgtatgctgacatagagcagattctcaatggatgtttgttaaaggatgcattttatttcctcagtaaaaccattttatgtcattagacaaattcaag

SEQ ID NO: 25686 - DNA, 1327 bp, Homo sapiens
ttttcttccacagactaaaattgaagcatggttaaacatgcagaatctaggtggaagtctgggatctcagaagatacaaaagaagctttcccttgcactgcaagatcacatatggcaaaggcttcaataaatatctctaatgggcctactctcttccttataactcatctgacatttttgtgatacaagggagaacagttgaattgtttgaaaaacttgcctcagaaagggtgagacagaaagctcactggtgaattgaaaaggttttcattgtaccgttatgggactgtttttaaaagactctatgttccttgtaaaattcattcttgaatcagatttgatttttagcaaacaatttcttacctaatctcaacctccagactttaatattctaacaattacataagtccattgcattaaaaagttctcaatagttatttttttagttttgataagttttaacaagacaaaaagctgacaagtcttaaatttggtaaaaggagattttgaaaaggagactccaaaaataatgcatttaaaatctaatttatatggtgcctcagaagagtttcaaacaaatgaatagtcttctaagaagttataaattcatgtccgggatagaaatatctgtgaatcactaaattatttctctcatatttgctggtgtaaaactagggaatagccaagcagcttacattatcaactgcttatgaggatgctaaaatgatatacttaactgatatttccatctagaggcactgtataattttgtcaccaaaaataactatagactcaagaatataaggaggaatattttatatagtggcatacaaagttatgacatttatctgtcattttcccatattatttatcctcaaaagagtttgtttctttacatcatgtggaaggataattggtcccataaagaagtaattatttatatcaacgaggtaataataaaagagaatggctcataatctactggacgttgcatggcctgtgatgtctctttccttctagtcactttcgaaagctcaaataccaacacctttgtaacttcctccttttcccccatatacatagtcaattcttcttttgtactccctcaaatgttaatttgtacattgattttcacatttacattactgtattataattacctacttacgtttatgacctgtcygatcaattttaaattagcattttcttctcccttgtgtctcggtacattgtatgctgacatagagcagattctcaatggatgtttgttaaaggatgcattttatttcctcagtaaaaccattttatgtcattagacaaattcaag

SEQ ID NO: 25687 - DNA, 605 bp, Homo sapiens
gattcctattttgatttggtggtggaaacacaagaaatggaagaagacagaaataatatgtaacagaataaatgacttacttcataagtaaactttccaagttcacgtaggtgatgaagtcagtagcttccttttaagcacttgcaarttgaatactgtgataaaccttttacctgcatcatctcatttcatctgcacaaagtaacaaagactatattatgacaaatattttcacaagttcacagagttgcccaagtttatacagacaataaaaggcagagccagcgttggaacccaggggaatctgattctgaaacgcatgcctttaaccacattgccttccatgtcatgtactccacagcccagttagaagaaactccagctgcctgggaagcgtgagatttaaaaaaaaacaacagcttcactaagacataattcacataccatacaattcatccatctaatatgtataatttgctgtgttttggtatagtcacagagtttagcaaccatcaccataatcaatttcaggacattttatcacttctaaaagaaaccctgtacccattagcagttgctcaccatttcccctacttgccatccct

SEQ ID NO: 25688 - DNA, 605 bp, Homo sapiens
gattcctattttgatttggtggtggaaacacaagaaatggaagaagacagaaataatatgtaacagaataaatgacttacttcataagtaaactttccaagttcacgtaggtgatgaagtcagtagcttccttttaagcacttgcaaattgaatactgtgataaaccttttacctgcatcatctcatttcatctgcacaaagtmacaaagactatattatgacaaatattttcacaagttcacagagttgcccaagtttatacagacaataaaaggcagagccagcgttggaacccaggggaatctgattctgaaacgcatgcctttaaccacattgccttccatgtcatgtactccacagcccagttagaagaaactccagctgcctgggaagcgtgagatttaaaaaaaaacaacagcttcactaagacataattcacataccatacaattcatccatctaatatgtataatttgctgtgttttggtatagtcacagagtttagcaaccatcaccataatcaatttcaggacattttatcacttctaaaagaaaccctgtacccattagcagttgctcaccatttcccctacttgccatccct

SEQ ID NO: 25689 - DNA, 605 bp, Homo sapiens
gattcctattttgatttggtggtggaaacacaagaaatggaagaagacagaaataatatgtaacagaataaatgacttacttcataagtaaactttccaagttcacgtaggtgatgaagtcagtagcttccttttaagcacttgcaaattgaatactgtgataaaccttttacctgcatcatctcatttcatctgcacaaagtaacaaagactatattatgacaaatattttcacaagttcacagagttgcccaagtttatacagacaataaaaggcagagccagcgttggaacccaggggartctgattctgaaacgcatgcctttaaccacattgccttccatgtcatgtactccacagcccagttagaagaaactccagctgcctgggaagcgtgagatttaaaaaaaaacaacagcttcactaagacataattcacataccatacaattcatccatctaatatgtataatttgctgtgttttggtatagtcacagagtttagcaaccatcaccataatcaatttcaggacattttatcacttctaaaagaaaccctgtacccattagcagttgctcaccatttcccctacttgccatccct

SEQ ID NO: 25690 - DNA, 605 bp, Homo sapiens
gattcctattttgatttggtggtggaaacacaagaaatggaagaagacagaaataatatgtaacagaataaatgacttacttcataagtaaactttccaagttcacgtaggtgatgaagtcagtagcttccttttaagcacttgcaaattgaatactgtgataaaccttttacctgcatcatctcatttcatctgcacaaagtaacaaagactatattatgacaaatattttcacaagttcacagagttgcccaagtttatacagacaataaaaggcagagccagcgttggaacccaggggaatctgattctgaaacgcatgcctttaaccacattgccttccatgtcatgtactccacagcccagttagaagaaactccagctgcctgggaagcgtgagatttaaaaaaaaacaacagcttcactaagacataattcacataccatacaattcatccatctaatatgtataatttgctgtgttttggtataktcacagagtttagcaaccatcaccataatcaatttcaggacattttatcacttctaaaagaaaccctgtacccattagcagttgctcaccatttcccctacttgccatccct

SEQ ID NO: 25691 - DNA, 1064 bp, Homo sapiens
gatcttgagtaggctcagccttcagtttaattttaaaaaactttcagtgcagggctgggtggctcatgcctgtaatctcagcactttgggaggccaaggtgagaggactgcttgaactaggagttcaagaccagcctgggcaacatagtgagacccgggttactaccaaaaaaaaaaaaaagccaggcacaatggtgtggacctatggtcccagctactggggaggatgaggtgggaggactgcttgagcccaggaagtcaaggctgtagtgagccatgatcgtgccactcactccagtctgggcagaagagtgagaccttacctcaaaaaaaggaaaaaaaaaatttttagtttagttttaattctctgttaaaaaaaaaaaaaaattataaacacacacagagaaagagggagaaagagagagagaaccaagtacctgccatgtagaaatgagagcaaatgtaagaatttgaagcaamgtgcagtgagcagcagcaggaccatgcaagcactggcccagtttcattcttttctggtcctgggagttgcattctcaagttcattcttttcaaagaaaccaatgttgctcaagtgccatttagaagaaataaaatgttctggctgatgggtggattatagtggctggcctgagcaacacctctctttaagtgctgtattttgtcccatatcatattgtcactagaggtgatcgtgagacttttttagttattccagtatattttttctagataaatatataaaatttattccatggaatgtctggtcttgaaaaagtactatttcaaagtaccaggtccttctacctgtttcccaaatcattccttcatcttctttttaagttcagacaagacttgggggccctgtcctctatagtccttcctgcctccctccatcctagtcaaagctgacacccatggtgcagccaccttcttatctgattctttgtcctctaatttctccctctttcctggctttggtgaatcagaaaatcagaacatggatctttcacaatataatatagttcctgtccaggcagcacaac

SEQ ID NO: 25692 - DNA, 611 bp, Homo sapiens
taattagcttatatttggtataaaatcaaaattcaccatatttacaaatttaatttatcagatatataagaattactttaagtacagaggaaaatttgttggataaatacaattgaaatacttaaaaagtatactgaatatgttaaatttataaatttagttgtaacacttgaacattaagaatcaatattatccaaagagctcttaaaagtgattgttaaaatctgctacagttaccaataaaataatacttgtaagctgaacttaaaagtttaaggaataatcaagtttctgtattcttttttaaatgtgtgacaggcgttcagaggatcatttagaatccttggttcataacacattctcatcattggtccattcttggtatttatttggttggtaactttaataaaattaactcacttactattaatttttatatccaaagtaaactctgaatagtcttttctttattccaaaactgtctgtgagcccataaaaatctcacatattcataggatgaaggtgggatgtggaaagggtstaaaatgtgttttcgtgaataaaaatgattgtttagaaatagtagcatttagcctagttattaaagacag

SEQ ID NO: 25693 - DNA, 922 bp, Homo sapiens
aacaagcatgacttaggaaaacaaaacatgasagcaaaagatctatctcatatgttaagtaacatataccctttatggatgagagatacacaatagcactgcagaggaagatgggcatagcatagattaggcaactgatatttgtgggtgtgttggggaaggaaaagtttgtgattaaagcataattaaggcagcattgtgccacatgcattgaagactcctgacggagataagaaagataaggaactaaatttatactctgcaattgtactatttttatgatagtggccaaagtttattgagattttcctacatgcaaagtctgtgctaaatcctttatgtacattgtctcatttaatcatctggaaaaccctgtgtagtgggtacgataaggaagaagcttaagaagatatgtgatgaggacatcaggaagatggcagactaggaagttttaggtccttgttttcccaaggaaatgttaaataagagactgattaaacaattttatagaagctctgggaatcagtcaaaaatttataagaacgaagcaaatacccaactaagaaaaatccacattaaacatggcaggaaattttattgcatttttactcacccttgccccaccctgccccaaggcagcatggcagtctgggggatgtgatggcctgctgcccaatttccttctgcaaattggagagatttagaccatatttgcaatgttctaccctgtatgacagaagcctgggagattgacctctgcgttgcttaactaggagctcagacagctaaaagtggcacagtttggatttcaggctagaggaagataggagaagaagcaggcatggcttgtgaaaatcacaagggttttatagacccacagatatctggggcaagagatctttgagcaatacaatagaacagg

SEQ ID NO: 25694 - DNA, 922 bp, Homo sapiens
aacaagcatgacttaggaaaacaaaacatgacagcaaaagatctatctcatatgttaagtaacatataccctttatggatgagagatacacaatagcactgcagaggaagatgggcatagcatagatyaggcaactgatatttgtgggtgtgttggggaaggaaaagtttgtgattaaagcataattaaggcagcattgtgccacatgcattgaagactcctgacggagataagaaagataaggaactaaatttatactctgcaattgtactatttttatgatagtggccaaagtttattgagattttcctacatgcaaagtctgtgctaaatcctttatgtacattgtctcatttaatcatctggaaaaccctgtgtagtgggtacgataaggaagaagcttaagaagatatgtgatgaggacatcaggaagatggcagactaggaagttttaggtccttgttttcccaaggaaatgttaaataagagactgattaaacaattttatagaagctctgggaatcagtcaaaaatttataagaacgaagcaaatacccaactaagaaaaatccacattaaacatggcaggaaattttattgcatttttactcacccttgccccaccctgccccaaggcagcatggcagtctgggggatgtgatggcctgctgcccaatttccttctgcaaattggagagatttagaccatatttgcaatgttctaccctgtatgacagaagcctgggagattgacctctgcgttgcttaactaggagctcagacagctaaaagtggcacagtttggatttcaggctagaggaagataggagaagaagcaggcatggcttgtgaaaatcacaagggttttatagacccacagatatctggggcaagagatctttgagcaatacaatagaacagg

SEQ ID NO: 25695 - DNA, 1203 bp, Homo sapiens
tccaatatttatggttttaattattagctaatgtcattgcaagaaattaaacagactgatgggctgacatgcttttaatagagtcataatacagagaaatccttaattgggagaacaagagcctatgaaagttcaacatataaagtatataaggtaatttctaggtccccatagccatagcagtgacagggagcagagcaactgcatactccccagatgaccactgatggaaattcagagggtgcaaaaaataaaccaaaaactgttgtaagccattgagattttcaggttatctgttaccatataacaacctaccaccacttgatatcctgttttataatttccttttacttttgatttccagatatcatttaatcataggttgatactcctggaagagaattatatgttctttactattcaggatgaaacaattttattctcacttccatattcccatgtggaagactgtctttagaataaaacatgcctggtttttctgtctcctcaatcatggacttcctccatgggcagaagaaccaacttatgaaaatgagattggttgaagaaactgagcatgcagggctcgtcttcttccctctgttctctataggatgttttttattttggagaacatctgcttcggttggttcttggccatatggtaacctgaaaacaagccctgtacctgccagggaaggcctactgctgcctgccccaccctgggactctgaataactctgattaattcaggagagaagtaatagcaagtccttgactcagggctaaagctgcatttcctaatttgattttaattagcaataatgtttattttgatatctgtctgtctaactcctgtgtctatctctcagctgagttcaaactcaggagggcaaaaatgaattacacgggtaagtgaygctaggacttccattggatgcagtaatggttgatagttggtgttgtcaccctttagttgctattaccttttgtgggtgatagtttatttttatagacaggaatattctatatttataggaaggaatgtacatagattcttggcagcttaaggtggagtgtagtgaggaaacataggtttttgtaaactcagcatttcttttgtggggaatctgataaaccccattccataagtataatgagattgtcagttaatgttatatctcctctgccctcgccaggcat

SEQ ID NO: 25696 - DNA, 335 bp, Homo sapiens
gaaatcatgttggtatttaggtgtacttatattattaataaatatataacaagttatratgaaattttcatatgaatttaaaattctaaagtaaggagaacatatctttttataatactgagactttttgtcatacaaaatttgtctctccactaaatcatgtatgattttatacccttcaatatcatttttacctacatagagcttcaaacacatttttcaggtattttatatgttgcttacttaagttgacctttgaataatgcagagcctgggggtactgattcccacatagttgaaaatccttttttttttttttttttttgagatgggat

SEQ ID NO: 25697 - DNA, 561 bp, Homo sapiens
tgttactactttgacgaaatagacctattaacgctctactttttcctagytcattctagcaattgtagtaatctgaataataccctccccccaaaaaaattaatgtccatttagaagctcatgtgacctattttggaaatatggtctgtgaaggttttattaaggtaagaatcttgatgaaatcatattgaatcaggttgggccataaagccaataagagtatccttgtaagacacaggaaaggatatagagacacaaaggagagaagggcctgggaaactgagggaaagattgtagttatgctgccacaagccaagaaagcctggagccaccagaagctggaaaagactagcaagtgaagtaggaagccagactggactccagagatggggcttggacactgaaccagattgaggactagctaaaacagggccagcacagaagcagctttcaatcagaaaagcccaccagtgtgctatgtcaatttactgttgccatggcaacacctgggagttactgccctgaccctttccatggcaatgacccaatgatactatccct

SEQ ID NO: 25698 - DNA, 561 bp, Homo sapiens
tgttactactttgacgaaatagacctattaacgctctactttttcctagctcattctagcaattgtastaatctgaataataccctccccccaaaaaaattaatgtccatttagaagctcatgtgacctattttggaaatatggtctgtgaaggttttattaaggtaagaatcttgatgaaatcatattgaatcaggttgggccataaagccaataagagtatccttgtaagacacaggaaaggatatagagacacaaaggagagaagggcctgggaaactgagggaaagattgtagttatgctgccacaagccaagaaagcctggagccaccagaagctggaaaagactagcaagtgaagtaggaagccagactggactccagagatggggcttggacactgaaccagattgaggactagctaaaacagggccagcacagaagcagctttcaatcagaaaagcccaccagtgtgctatgtcaatttactgttgccatggcaacacctgggagttactgccctgaccctttccatggcaatgacccaatgatactatccct

SEQ ID NO: 25699 - DNA, 889 bp, Homo sapiens
tatagcaaaaagtcaactgcagtgtaatcaaaaaatattgaaaactttgtctcagggcacctgggttcatttcctaattctatcacttattaactttgggatcttacacaagctaaaacttctccaagtatcagctcatttatctgttaaattgaaataataataacttgggattattattgttttaattgtatacaataatatatttgtttttacttcatactttaaagtataatcctttaaaaataataatgtataacctatataaataaaaagcattacaatggtttataaaacattttgaataggttgttttgaaatttatttctttcaaaaatataaaataaatatgaaattgagattaactataagggagtcagaaaaaatgtatatttgattcctcacttcttgtttttttgctgattataggccttatatgacaggtattattaatagcattgttttgtcaagccagtaaaaacagtgaagttaaatgagcaagatataagtcaaatttgattttccaaaaagwgtttaattaaatggcatttcttactattgataataaacatcaattctgttccctcatactccagagtatgttaaaagaattagaatcctggaacccttcatcactgaataccacacccagatatttctgaaaaatagctactgcagaagagatcctctcagtgagtgaactcttaattaattctagagtctctggaccctttgtggtctcctaccttgctggctaaaggaacacagatcccattggcctctcttccttggtttttgtccttgagccataaccacatagtaaagtgaaaatcctatgcatggaaaagtccttccccctagagcacagcttcccttgtttctttcccgt

SEQ ID NO: 25700 - DNA, 889 bp, Homo sapiens
tatagcaaaaagtcaactgcagtgtaatcaaaaaatattgaaaactttgtctcagggcacctgggttcatttcctaattctatcacttattaactttgggatcttacacaagctaaaacttctccaagtatcagctcatttatctgttaaattgaaataataataacttgggattattattgttttaattgtatacaataatatatttgtttttacttcatactttaaagtataatcctttaaaaataataatgtataacctatataaataaaaagcattacaatggtttataaaacattttgaataggttgttttgaaatttatttctttcaaaaatataaaataaatatgaaattgagattaactataagggagtcagaaaaaatgtatatttgattcctcacttcttgtttttttgctgattataggccttatatgacaggtattattaatagcattgttttgtcaagccagtaaaaacagtgaagttaaatgagcaagatataagtcaaatttgattttccaaaaagagtttaattaaatggcatttcttactattgataataaacatcaattctgttccctcatactccagagtatgttaaaagaattagaatcctggaacccttcatcactgaataccacacccagatatttctgaaraatagctactgcagaagagatcctctcagtgagtgaactcttaattaattctagagtctctggaccctttgtggtctcctaccttgctggctaaaggaacacagatcccattggcctctcttccttggtttttgtccttgagccataaccacatagtaaagtgaaaatcctatgcatggaaaagtccttccccctagagcacagcttcccttgtttctttcccgt

SEQ ID NO: 25701 - DNA, 889 bp, Homo sapiens
tatagcaaaaagtcaactgcagtgtaatcaaaaaatattgaaaactttgtctcagggcacctgggttcatttcctaattctatcacttattaactttgggatcttacacaagctaaaacttctccaagtatcagctcatttatctgttaaattgaaataataataacttgggattattattgttttaattgtatacaataatatatttgtttttacttcatactttaaagtataatcctttaaaaataataatgtataacctatataaataaaaagcattacaatggtttataaaacattttgaataggttgttttgaaatttatttctttcaaaaatataaaataaatatgaaattgagattaactataagggagtcagaaaaaatgtatatttgattcctcacttcttgtttttttgctgattataggccttatatgacaggtattattaatagcattgttttgtcaagccagtaaaaacagtgaagttaaatgagcaagatataagtcaaatttgattttccaaaaagagtttaattaaatggcatttcttactattgataataaacatcaattctgttccctcatactccagagtatgttaaaagaattagaatcctggaacccttcatcactgaataccacacccagatatttctgaaaaatagctactgcagaagagatcctctcagygagtgaactcttaattaattctagagtctctggaccctttgtggtctcctaccttgctggctaaaggaacacagatcccattggcctctcttccttggtttttgtccttgagccataaccacatagtaaagtgaaaatcctatgcatggaaaagtccttccccctagagcacagcttcccttgtttctttcccgt

SEQ ID NO: 25702 - DNA, 1185 bp, Homo sapiens
tggacatcggtgagtctcctggccaggagaggccaggcaaggctcgaggcacccaggccacattgggttcttcctggatgccacccggacctatgccgagaaggcgttttagcttgcacctgctctgtgtaaaaccccgcgggagcttgcagagctgaccatacactgggtcctgccctcgaggagtcccctttttcagtggaaaagaaaggtctgtggaattgagagacctgctcacagggagttcagggaaggctttgcggaaggatggtgccttaaaggattttgataagtgttgaagacaaccgtgagcatcacagagatagatgggcaatggaaatggaattctggggcctcagggactggcccacagtcctttacccataatccttgtggccaggtgggttttggaattcagaagctagaatgacaatacgatgtgtgtacccagagcatcagggaacatctccaacaggcagccaagcacggtcatatttctgtagcaaaataaaatgacggttcatacaaaacggsgtgaagacaacacagcgcttgtggttcaggtcaggctttccgtccagtaagttatgcaaaactttttcagagcttttggcattgcaaattggggcgaaggaattgggacctgtaacaggggtctttccctaaatatttgggagaggctgacaattgcactttctgtatgtgtgtgtgtgtatgcagatattccactgtctgttggtatcttggaccccagggccagcccgacccagctgaatgcagtcgagtttttgtgggaccctgcgaagagagcttctgcattcattcaggtgggccacagggagcttgccctccaggggaagacctagtctttggggtggcctgcgtgcagtttctcaaaactaacccatctgggagggtctggatgagcttctgctccctgtcactgggaaggaaactgcaggagagagagaatgagtgttgcaaagagtcacagagctcattggtccatatttagggaaaggagtggggagggttttagaattctatctgggttttgcccgtagaatatataagctttttataaatgagtatttcccaacagaaatcatttgaaagtaaacattttttctattatagtttctattgttgaatgaattattttgttatcaagcactggtgtggatc

SEQ ID NO: 25703 - DNA, 1185 bp, Homo sapiens
tggacatcggtgagtctcctggccaggagaggccaggcaaggctcgaggcacccaggccacattgggttcttcctggatgccacccggacctatgccgagaaggcgttttagcttgcacctgctctgtgtaaaaccccgcgggagcttgcagagctgaccatacactgggtcctgccctcgaggagtcccctttttcagtggaaaagaaaggtctgtggaattgagagacctgctcacagggagttcagggaaggctttgcggaaggatggtgccttaaaggattttgataagtgttgaagacaaccgtgagcatcacagagatagatgggcaatggaaatggaattctggggcctcagggactggcccacagtcctttacccataatccttgtggccaggtgggttttggaattcagaagctagaatgacaatacgatgtgtgtacccagagcatcagggaacatctccaacaggcagccaagcacggtcatatttctgtagcaaaataaaatgacggttcatacaaaacggggtgaagacaacacagcgcttgtggttcaggtcaggctttccgtccagtaagttatgcaaaactttttcagagcttttggcattgcaaattggggcgaaggaattrggacctgtaacaggggtctttccctaaatatttgggagaggctgacaattgcactttctgtatgtgtgtgtgtgtatgcagatattccactgtctgttggtatcttggaccccagggccagcccgacccagctgaatgcagtcgagtttttgtgggaccctgcgaagagagcttctgcattcattcaggtgggccacagggagcttgccctccaggggaagacctagtctttggggtggcctgcgtgcagtttctcaaaactaacccatctgggagggtctggatgagcttctgctccctgtcactgggaaggaaactgcaggagagagagaatgagtgttgcaaagagtcacagagctcattggtccatatttagggaaaggagtggggagggttttagaattctatctgggttttgcccgtagaatatataagctttttataaatgagtatttcccaacagaaatcatttgaaagtaaacattttttctattatagtttctattgttgaatgaattattttgttatcaagcactggtgtggatc

SEQ ID NO: 25704 - DNA, 1644 bp, Homo sapiens
ctcaccacctcctaactttatgaccttggaatgacctctctgtacctcagcttcctcacaagaaaatggaaataataatatttatccttcaggtaacattaaatgggataatataaagtaagcagttcagtgcctcacacatagtaaaccctcaagtagatgttaaccattatcgtaaatttattccccagaaagaagcaagttgcaagtgcccccaggacaaggcatgggtgctttttcctgtgcactgatacagttattttacctcctgtcaacttgttggctatgaaacattcttagccaggcatgtttggaatactttagcgcacagtgaaaaaagtatttatagatattatcagcaccacctaacaagctgtcatgtccaggcaagttctttcattaaaatgtaatttaccttcctcatcgacacacttccttctccatctccattttaagaatataaataacccacagctatgaaattcatctcaaagctcttttctccgctgaaaggttggtgatcctgagctcagaggaagtctgctgtgaacatcgcagaaccacccacggcacctttttgtggcaccctcaccatggatccagtgtctaaaggcagtttctccaagttaggcaaacagagaggtggcagcccacgtgtgtttcaaggggacacaaagtcacccctcttgtcccctcctgcctcctacctggctggcctcccttttcctgcgggctaaagactgtttactcagctgccttctggcaggaaggcctctggcaaggcagctcagcgttgggccacttcatgtgctcacgtgcgcacacacttttcagaaaatgcttccaagatttctcaagcgaacagttatttctgggactattttatttgcattttaccacacacacacttgtcctcagaaacatgggcatttgcacttctagtgatttttaaatttatagttattgattataagtcatataaatacacattattgaccttagagatttatttgaatttcaactgcaatccttcaagagaattattactattattattattattattattattattatttgagatggagtctcactctgtcacccaggctggagtacagtggtgcaatctcagctcattgcaacctccacctcccaggttcaagagattcttctgcctcagcctcccaagtagttgagattacaggtgcctgctaccacatctggctaatttctgtatttttagtagagatggggtttcaccatgttggtcaggctggtcttgaactcctgacctcaagtgatctacccaccttggcctcccaaagtgctgggattacagatgtgagccactgcacccggccaaaagtattatttttaaaatatcttaaaataaaatttaaaaaatgaagatggaaataatagacactgagtactccaaaatgcgggagggttgggagggggagggttgaaaaattacccactgggtgcaacattcactactgggtgatgggtacacgaraagccaagtccctacccattaacaagcatgcccatgtacccccaaatctaaaacaaaataaaatgtaaaaaaaaatgtctcagaagtctggtctttaatgctgccagaagtccctctcggaagca

SEQ ID NO: 25705 - DNA, 1148 bp, Homo sapiens
aggagtaatacaagtgtaaaacattgaaacgatggtagctaatgaggtcgcagagataaaggagggaaacttcgaaatttaaatgagaaatgcaggaggtagctggaaatatttggaggagattattagaatcgtgagcttgcttgagaatcaacaatacttaaatattaaatgactatgaaaaaccaatctcagtttgtgtttttcattgaggtattcaggtgattaaatgcactgtgtaagccactgtgggtcatccgtttttttaggtggcactgtctagcaataataaatgtactgaaatatgtaacagacgtggagttcacaaatgaaatggggtagaaactatatttagaattttcttctatgaagaatgttttactactcctggatttagatatttgatattttctatttaattatggaaatctctagtgaatttgagacagtgaccagagtcgggcgatatgcagattttgtctggtaatgattgattgcatacggaatcatgctttagtgaccatgatttaggtaccgatataatatctgtgaataaataccaaagctgaagaagagtcattctgctaattaaaagctaaaagcatgcagttaggagtaaaatttaaggctaaatcagccttgaaataggttttgaaggtatatggtggtaggttacaaaatttggcatctctaagtaaatgccattagatgataagaacatagctcaaattaaagtcttgcaacaaacagttattcaaacagagcttgaccatggtcaactctgtccattactcaggctcattcattggcattctgtgtaagttgtggtaacttacctgccagttgatgatgaaagcgctgtttatcttaaagtatctaaaaccgtgccgatcaaactacacttcagggactctgtgattacaatggatattctcagcttcctsctagtccacaatcaggcaatttatttatttatttgaaatttagcagctggtagccttgatttgccagggaggcaaataggcaaaagaaaagtttccagaaataatcgcagttgggcattcctgaagggatgggactcaacgttcagagtcagggcccagggaacagaagggttcctatcgtgtctgttgctctttgcacccaga

SEQ ID NO: 25706 - DNA, 601 bp, Homo sapiens
gatgtataaagctttccctattttcctttgaaaacatcattacatttctatcttatgtaatctcaaaagctaaacaaataaacaaacaccaaaactgaagtgatcattttcctgggctctctttttccttccttcctttttctttctttmtttttctttcttaaaaaacaataacaacaataacaacaacaacaacaacaaaaacacctttccacccataaaaggtaaataatttgaacaatgtttcagagcacaaggaaactttaagtttctgtattcagaataccagtgttaggatcagttctccacaggtctctcatgcttctaagcatcttgtgagcagaggcactggctgcttttgttctgcaccatcttttcaaggacattggatagcaaagcagctttggaagacagagagagaaaagaaggagattttaccctacttgcaagccggcaagttagtttgccgtagtttcatggatgtgtgtagtataatgaagatcatgtcttactgtggagcaaaggacaggcaggcttagtgcctgttaaaaaaaggtttacattccctaagctcagaggtcctctcttgtagcacagttca

SEQ ID NO: 25707 - DNA, 1196 bp, Homo sapiens
atcttcttgtcctaaaccagggttcaagaaactacggctggtgggagaaatctggcccactgcctgtctctgtaaataaagttttgttggcacacagcatgcccattcattgatgccatctcaatacagcagcagagttgaatcgttgtgaaggagacacayaaagcctaacaatttaccattggccctttggaggaagtttgctgatccctgccttaaatcatgaggctacataaaaaatattatagattaggaatcctaattcagtttagtgtaaaattcttgccttataatgaaaatatatttacagagaaaatcagatctcgtacctaagaatctaccagggaataataccagctactcaataccatacttaattgggctgcttttttttttttttttaagatttggaggaaactcagaaactgagaagagtcgagtctggtgcctctctcaagaacacaggaagggtagggatggggaattagaaaagatgaggggcatgatatttaaaagacagcaagcaatccccaaggaccatggatttagcacacaataggatactggctaatttgtcccccatccattagccaggaccccaggaccttgaggaaggacatatgtcttatttttctgctgtgtctggcagtgccatgggctcctcggaggcaagggggcgtcccctgggctggcagcctcctgtgttgggagcacagcgggctgtctgaggtggcagtcctgctggggcacatctgtccctcttgatattcacactgctaatgtctcactgtggtgacaaatgcaaattgggctgcttcgtccaaacatgtcagcctatttagcaggtgcatagggattggcacaaggcaccggctgtcccagtttcttctgttcttaacctccatccgctcagcagtctcccgtccttcaggattgctgatggggtagtctagttgtggagaaccggcaggaaaaccctttctaagaaaagaaaggtctagggttattaggagacgtttatcatgggccattctccataaaaacgaattgacttcctctggtcaaatatcgagtaaaaccagacaagaatataccttgatcttaaagaaaatgtatggcacttactatgcccccaggtaagaatggtatatacaattacaactctggagattcaaaagaagacaacttggattttt

SEQ ID NO: 25708 - DNA, 1196 bp, Homo sapiens
atcttcttgtcctaaaccagggttcaagaaactacggctggtgggagaaatctggcccactgcctgtctctgtaaataaagttttgttggcacacagcatgcccattcattgatgccatctcaatacagcagcagagttgaatcgttgtgaaggagacacataaagcctaacaatttaccattggccctttggaggaagtttgctgatccctgccttaaatcatgaggctacataaaaaatattatagattaggaatcctaattcagtttagtgtaaaattcttgccttataatgaaaatatatttacagagaaaatcagatctcgtacctaagaatctaccagggaataataccagctactcaataccatacttaattgggctgcttttttttttttttttaagatttggaggaaactcagaaactgagaagagtcgagtctggtgcctctctcaagaacacaggaagggtagggatggggaattagaaaagatgaggggcatgatatttaaaagacagcaagcaatccccaaggaccatggatttagcacacaataggatactggctaatttgtcccccatccattagccaggaccccaggaccttgaggaaggacatatgtcttatttttctgctgtgtctggcagtgccatgggctcctcggaggcaagggggcgtcccctgggctggcagcctcctgtgttgggagcacagcgggctgtctgaggtggcagtcctgctggggcacatctgtccctcttgatattcacactrctaatgtctcactgtggtgacaaatgcaaattgggctgcttcgtccaaacatgtcagcctatttagcaggtgcatagggattggcacaaggcaccggctgtcccagtttcttctgttcttaacctccatccgctcagcagtctcccgtccttcaggattgctgatggggtagtctagttgtggagaaccggcaggaaaaccctttctaagaaaagaaaggtctagggttattaggagacgtttatcatgggccattctccataaaaacgaattgacttcctctggtcaaatatcgagtaaaaccagacaagaatataccttgatcttaaagaaaatgtatggcacttactatgcccccaggtaagaatggtatatacaattacaactctggagattcaaaagaagacaacttggattttt

SEQ ID NO: 25709 - DNA, 710 bp, Homo sapiens
agaacttacagtataatttatttwaaaaaaaagatactatgacaattaggtactctttttgggaaaaatcacattgaagtctcaactcacattatatcaacagacaaattctggaggaattaaagagtggaacttacacaaatatcattatgaacatctacttgatctttgaatggagaagggcttaaaaacaaaaaggatcactaaggaaaatattaataaatttagctacctaaagactgaataattgcatggcaaaaatatatcttaagaaaagaaaacactggaaaatctttgtaacaaatataaaaggtgaaagtttagtacctctaatatatgaagagctcattgaaatgaaaaaagaaaacttcagtagatgattggcaaagaaaatggaaagataacactcaaaagaaaaatataaatagctaatagcaagtaatgttcagttttactggcaatcaggcaatcatgagattatagttttaattatctaaagttagcaaaattagtaaacattaaataatttattttttaagagacagggtctcactctcacccaggctggagtgcagtggtgggatcatactcaccgaaatctcaaactcctggcatccagcaatcctcctgcctcagcctctggagtaagtgggactacgagcatgcactgtttccatggctaatttttaaatttttatgtagagatgagg

SEQ ID NO: 25710 - DNA, 506 bp, Homo sapiens
ggtagggaaaggaggaaggtctgagctgggccttagaaaatgtacagaatctacatgagaatataatataacagtcatgagtatggtctctggagtctgatagacttgattcaaatcctggatctgttaccaactagstttgcaactttgggcaagttacttaaatgtctgtacttatttcctcatctaaaaaatgtggataataataggagacctacctcacagagctgttatgaggatttaatgagttaacatacataatgccgagaatactgtctggcacattgtaagtactacatatgtgtttttattactattaagaggaaggaccagccagaggaatggcctcagcaaaggtgcagagtgggaaggtacaaaggttatctagagaccagggaacagacttactgagctgacacagggggctcatgaaggagaattgtctggcaagacagtttacagatgaccagtcagaggcagggaaagtggcttgccaaacacctgga

SEQ ID NO: 25711 - DNA, 593 bp, Homo sapiens
ggaaaaagggttgaatctatttaggattctgagagctgaaaagaaaagataaagagaggctcagaattacccggggacttgttgcaaatttacttgcaggttgttaaaatttatccctaataattactcagatttttaatggaaaatttaaaagctttcccatgaagctttggctgtgaaaattccatttacatccttttggcctctggaatacttctgcatttaaatgtatcactggctgctcctagctttccttatataagagtgtctgtaaatagtgttgtcttgatgcaagttcagcttgaatgatgggtgacttgacataaatatctttcatagctctagctgcagatgagctgggagaagagaggataggacttttttttcatttttttctttttttccttgctgcttgagggttgttccgtgcttggataacagaggttagtgtaatggataggaagccaggttgttaactgtcattgagctttcataatgtagaaaagctgagktgagggtgtaaggatggatacaaagagacagagttttacacacaaggaaattataatattgttggtctgcaagatagatgc

SEQ ID NO: 25712 - DNA, 561 bp, Homo sapiens
gatatttatagtggataggtggaatttgatgagattgagaaatagaaataaaagagaataaacaagtaaggtaaggaaaccttgcataggctgatgatgtaaatgggccatgaaccgaggatggaagtgaactttgcaatgaaagagagagtgagtgagagagagggaatgaatttgaaagcaatgtaaaacacaatcagtcctgaggcatacaatataataattttccaagtaaacacactgtatcaarcccaaactactccaaatatatatgggtattttccattccctcagtttcaatagctctcttagtacactaatttctagggcttctctaagtacgtgagtgagagcagtgtttaccaggtctttggtaatattgcaaggcagtatctgctggtctccacggtaaatattccaactagattattttttctagatctagcctaaagccaataagactactgatactttttggtagcatttaacagaagagctcggtaagtaggttttcactgttacatggaagagaaaagaatacaggcaaaactaatatcctat

SEQ ID NO: 25713 - DNA, 561 bp, Homo sapiens
gatatttatagtggataggtggaatttgatgagattgagaaatagaaataaaagagaataaacaagtaaggtaaggaaaccttgcataggctgatgatgtaaatgggccatgaaccgaggatggaagtgaactttgcaatgaaagagagagtgagtgagagagagggaatgaatttgaaagcaatgtaaaacacaatcagtcctgaggcatacaatataataattttccaagtaaacacactgtatcaagcccaaactactccaaatatatatgggtattttccattccctcagtttcaatagctctcttagtacactaatttctagggcttctctaagtacgtgagtgagagcagtgtttaccaggtctttggtaatattgcaaggcagtatctgctggtctccacggtaaatattccaactagattattttttctagatctagcctaaagccaataagaytactgatactttttggtagcatttaacagaagagctcggtaagtaggttttcactgttacatggaagagaaaagaatacaggcaaaactaatatcctat

SEQ ID NO: 25714 - DNA, 368 bp, Homo sapiens
tataccaactgttccagaacctcccaccctcaaaaggtgcacatgccttgcagttaaaaataaggaaaatatggctgggttcggtggctcacgcctgtaatcccagcactttgggaggccgaggcgggcagatcaccaggtcaggagattgagaccatcctggctaacacagtgaaascccgtctctactaaaaacacaaaaaaattagcctggcatggtggcacgcgcctgtagtcccggctacttgggaggctgaggcaggagaatagcttgaacttgggaggcggaggttgcagtgagccgagatcacaccactgcactccagcctgggcaagaagagcgagactccgtctcaaaaaaaaaaaat

SEQ ID NO: 25715 - DNA, 276 bp, Homo sapiens
gtactttatgtttrtgctctatatacagatgtaattagttgtttatgttatatataatataaacatgatgtatattcttattttcctgtgaggacccactgtcttcttaatacactgtcttctgaccaaagtcttccacacaaatcagcagttactatatatatatataatatttatatacacatatacacatacatacacacatatgtatattttaatagctaatatcttacactgatatatttatattacatatagtaatatactaatattttt

SEQ ID NO: 25716 - DNA, 1222 bp, Homo sapiens
tcctgccttggcctcctaaagtgctgggattacaggcatgagccactacacccagccagtatgactattccaaaggcagaaagtctgcattctgtagacagatctccatatataagttgattctgtgtttgatcctttttttaatctaaagttagataacctactgtcgtgcacatatacatacgcacctaatgttaagaagcttttaggaaatatcttgtactctttacttggatcaaattacctataagattgtgaaaataacttttttattttcattatttgtttttcaagttgagatcaattaatatttcctaatagttgcattgttaatcttaccagagtcattccatttttaaaatagttttgtatactttaaatgagtagaatacatatattttctcatgcatggatggttcataggaaaacttacatctaatccccatagttttatttggcttttaggattatcccacaaagtaaacaactttccttgtattaagttctcatgaatttagtcattctagtactttttgtactctttgaaaaatattggccaagtattgccaaaagaatattaaaacaaaaatgaccctgtatattaaccacctggcccgatttccctgcccccgaacccacagaaagtaarattctttctgctttttcctctgcagtcctcatacaggtgaacctttttccaccaggctttcttacctgaaattcctcttaggaattacagaataagctgaaatgagtgactgttttctcattcctcccaaaggtgcttcataactagtaccattctaggtgcataagcaagaaattgattcattatatacaaactgtgccctatggctgtaggacttaattatcttatagaatcctggttgaacaagagtagaactatgttaaagaattgaactggattttaagcccaaagacattggtgggaaatttggtatatgtaggcatgaaagaatttttgtgtctaaagtattaaactcttactcattagggatttgtaaatatttttgcctggcaatgaataaggaaaagaagtgttatttgtattcctgttatattaaagcaagaatctttagggttcaccttttctcctacaaaacaacagtaatgtattcagtgaggttagtgctgtagatatatggacttcgtctatttagcacatacccagagtatcagttgttaaagtatccctttcaga

SEQ ID NO: 25717 - DNA, 1123 bp, Homo sapiens
acctggttcagcttcccaaaatgctgaaattacaggtgtgagccatcgaactttgtcaatttcatgttttctagcagaaagttctctttcacttttggtatcagggaaaattttawttattttttttttttgagacagagtttcactcttgttgcccaggttggaatgcaatggtgcgatcttgactcactgcaacctctgcctcccgggttcaagcgattctcctgcctcagactcccgagtagctgggattgcaggcacccgtcaccacacccggctaattttttgtatttttagtagaaacagggtttcatcatgttggccacgctggtcttgaactcctgacctcaggtgattcgcctgcctcagcctcccaaagtgctgggattacaggcttgagctactgcgctcagccaattttacatttttttaaaaaaatttatgtttacggttacacaagcacctaccagagtatctggcacacagtaggtgttcaatgaatgaaagaatgaatgaacattgaatcccttccttctggagagccggacttcctctgagctgcctgggttcaaggaacaaactcccagctcctggtgcttcctgctataactgcagtttttttttttttttttttttttgagacagagtcttgctcttgttgcccaagctggagtgcaatggtgttatcttggctcactgcaacccctgcctcccaggttcaagcgattctcctgcctcagccttctgaatagctgggactacaggcgcccaccaccacgtccggctaatttttgtatttttggtagagacgggggtttcaccatgttggtcaggctggccttgaactcctgacctcaggtgatccacctgccttggccttccaaagtgctgggattataggcatgaaccaccgcgcctggctgactgcagttttctgcggaggcactcggcctccccacctgctgctcctggcttttcctccaggactctgccagagggcagatgagaccaggaggcaacaggacctccaggagatgggaaggagccctcccctatcagagtggaggagaaacctggattggatgagcagagagccctctgtaaaggtccggaggccctggtg

SEQ ID NO: 25718 - DNA, 1123 bp, Homo sapiens
acctggttcagcttcccaaaatgctgaaattacaggtgtgagccatcgaactttgtcaatttcatgttttctagcagaaagttctctttcacttttggtatcagggaaaattttatttwttttttttttttgagacagagtttcactcttgttgcccaggttggaatgcaatggtgcgatcttgactcactgcaacctctgcctcccgggttcaagcgattctcctgcctcagactcccgagtagctgggattgcaggcacccgtcaccacacccggctaattttttgtatttttagtagaaacagggtttcatcatgttggccacgctggtcttgaactcctgacctcaggtgattcgcctgcctcagcctcccaaagtgctgggattacaggcttgagctactgcgctcagccaattttacatttttttaaaaaaatttatgtttacggttacacaagcacctaccagagtatctggcacacagtaggtgttcaatgaatgaaagaatgaatgaacattgaatcccttccttctggagagccggacttcctctgagctgcctgggttcaaggaacaaactcccagctcctggtgcttcctgctataactgcagtttttttttttttttttttttttgagacagagtcttgctcttgttgcccaagctggagtgcaatggtgttatcttggctcactgcaacccctgcctcccaggttcaagcgattctcctgcctcagccttctgaatagctgggactacaggcgcccaccaccacgtccggctaatttttgtatttttggtagagacgggggtttcaccatgttggtcaggctggccttgaactcctgacctcaggtgatccacctgccttggccttccaaagtgctgggattataggcatgaaccaccgcgcctggctgactgcagttttctgcggaggcactcggcctccccacctgctgctcctggcttttcctccaggactctgccagagggcagatgagaccaggaggcaacaggacctccaggagatgggaaggagccctcccctatcagagtggaggagaaacctggattggatgagcagagagccctctgtaaaggtccggaggccctggtg

SEQ ID NO: 25719 - DNA, 530 bp, Homo sapiens
ggcttagaaggaaaaagcaacaaaaattttgtagcatactggctcttgtgaattaaaaaaaaaaaaaaaaaaaaaaagacatgttaatggtaaggctaggttaatgggagaaaggtgatwttacaaacagagacagagaagctgaaataacaagacagctttgatggaaaaaagcaagttccactgtgatagaatggcacagaaatgccacttgagaataaagtgaaaatgttcactaggtaactgggaaaaatatcaagagcaatggttttcaaccctagatccttttcaacctacacacttttaaaaaatagagatgcccatttctacctcccaaattttgtgttattacttagtagccactagatttcataaggaactatggctgtaacctttggttttccaaccaccagaagccttgtaggagtagtgttgagtgaactaacgttttacactggcatgtctcttctcatgcagacttcaagaacatggctcccaatacactaagtgtctgagtttctgactccaat

SEQ ID NO: 25720 - DNA, 812 bp, Homo sapiens
tacccagctctggactggtactgggggttgtctgcacaaagtcctgtgatgtgaactgtttatgggtctctcagctgtggataccagcgcctcttccagtggagttggcagagggtgcaatggactccatgagtgtccttagctttggtggtttaatgctctatttttgtgcttgttggcctcctgccaggagatggcgcttttcataaaggatcagctgtagcagtgtggagagggactggtggtgggcatggctctagaactcccaagattatatgccctttgtcttccagtaccagggtgggaagggaaggactatcaggtggtggtggtgctaggtgtgtctgagctcagaccctccttgggcgggtcttgctggagttgctgtgggggatgggggtgggattcccaggttactggagttgtgtacctaggaggattatggctgtctctgctgagtcatgcaggttgtsagggaagtgggggaaagctgaaagtcacaggcctcacccagctcccacacaaaccgaagggccagtctcactcccacggtgcactcccccgtccgcccgcccgccgccctgccaacagccccaagtctgtttccaggaagagcctcccagctgtgaaagaaaagaactttagttctttcccaacctgagaagtctgcaagctggatttgcgccctcccccgagttctggtcaggaggcttctcaccctgttcaccctgttcaagttgttacaaagttcagctagagaattcttctccctgtggagttttaccccctgcgactctggccactcacctgat

SEQ ID NO: 25721 - DNA, 812 bp, Homo sapiens
tacccagctctggactggtactgggggttgtctgcacaaagtcctgtgatgtgaactgtttatgggtctctcagctgtggataccagcgcctcttccagtggagttggcagagggtgcaatggactccatgagtgtccttagctttggtggtttaatgctctatttttgtgcttgttggcctcctgccaggagatggcgcttttcataaaggatcagctgtagcagtgtggagagggactggtggtgggcatggctctagaactcccaagattatatgccctttgtcttccagtaccagggtgggaagggaaggactatcaggtggtggtggtgctaggtgtgtctgagctcagaccctccttgggcgggtcttgctggagttgctgtgggggatgggggtgggattcccaggttactggagttgtgtacctaggaggattatggctgtctctgctgagtcatgcaggttgtgagggaagtgggggaaagctgaaagtcacaggcctcacccagctcccacacaaaccgaagggccagtctcactcccacggtgcactcccccgtccgcccgccsgccgccctgccaacagccccaagtctgtttccaggaagagcctcccagctgtgaaagaaaagaactttagttctttcccaacctgagaagtctgcaagctggatttgcgccctcccccgagttctggtcaggaggcttctcaccctgttcaccctgttcaagttgttacaaagttcagctagagaattcttctccctgtggagttttaccccctgcgactctggccactcacctgat

SEQ ID NO: 25722 - DNA, 812 bp, Homo sapiens
tacccagctctggactggtactgggggttgtctgcacaaagtcctgtgatgtgaactgtttatgggtctctcagctgtggataccagcgcctcttccagtggagttggcagagggtgcaatggactccatgagtgtccttagctttggtggtttaatgctctatttttgtgcttgttggcctcctgccaggagatggcgcttttcataaaggatcagctgtagcagtgtggagagggactggtggtgggcatggctctagaactcccaagattatatgccctttgtcttccagtaccagggtgggaagggaaggactatcaggtggtggtggtgctaggtgtgtctgagctcagaccctccttgggcgggtcttgctggagttgctgtgggggatgggggtgggattcccaggttactggagttgtgtacctaggaggattatggctgtctctgctgagtcatgcaggttgtgagggaagtgggggaaagctgaaagtcacaggcctcacccagctcccacacaaaccgaagggccagtctcactcccacggtgcactcccccgtccgcccgcccgccgccctgccaacagccccaagtctgtttccaggaagagcctcccagctgtgaaagaaaagaactttagttctttcccaacctgagaagtctgcaagctggatttgcgccctcccccgagttctggtcagraggcttctcaccctgttcaccctgttcaagttgttacaaagttcagctagagaattcttctccctgtggagttttaccccctgcgactctggccactcacctgat

SEQ ID NO: 25723 - DNA, 1187 bp, Homo sapiens
taattaagtaaaattcaatgtgtctttttattttcagtaactattttttttatagttgtagttttgatttaaagggggggaaacaagttgacatttgtcatttgtggctttctttcttatcatcatggcacagattctgtacatgtattaacaatgcagtttgctgcatgcctggaaactgcaagatggggagggagggggcgggtcttgctcgaatgttctcactcactatcttgtctctcatacacatatccatctgcagaccatggtccctaaacctgcagtttcttcctgctggtgcagtacrcacacacacacacacacacacacacacacacacacacactccataccatttccattcaactcaatctgcttagttcgggtttgatccatttttctcctctccatagttctaccacccttcactgctagtgtacagctcacagcatctctcctaccaccctgggaaaagtcacattctaggctggattctactgaagtagaggcctggtggtttaacagccgaagacacacgcctagggatgagcaccctctttgtgacacttcatcctgatgccaagattttttggagaacatctgcactttcttatatatatatataatattaaaaaaagcaactgggtatatatcactaacagctttgtaggaagcacttttaatgttttctctctcacacacaaagattcaaaagaaatgtgcatatatttattctgtaatttcagtgattataaattgtaaaggtaatgtttaatcattgtatagtgattatgcctctggtatagctttcctaataaaaagtttttgaaaaacataatacattatatatagaggatacaaagcttgaaccttaaactccagctatgccatgcctttcgtgcttccattttagaaatgatttcttttacttgttacacagaaagtaatttattaacgggtttgatgcactgtgatgttgataaatcttatatcccaccatctctagtccaaaccaggatacaattgagacttaaaatgtgacttacggtttacttttttttccttgaattatgaatttcagtcttagtaaccagtgatgcactgtttcccaggcaagatgcaagggggagaaaataaagtaactagatcgctaagaagtacaggattaattaggagaagataatcta

SEQ ID NO: 25724 - DNA, 1187 bp, Homo sapiens
taattaagtaaaattcaatgtgtctttttattttcagtaactattttttttatagttgtagttttgatttaaagggggggaaacaagttgacatttgtcatttgtggctttctttcttatcatcatggcacagattctgtacatgtattaacaatgcagtttgctgcatgcctggaaactgcaagatggggagggagggggcgggtcttgctcgaatgttctcactcactatcttgtctctcatacacatatccatctgcagaccatggtccctaaacctgcagtttcttcctgctggtgcagtacayacacacacacacacacacacacacacacacacacacactccataccatttccattcaactcaatctgcttagttcgggtttgatccatttttctcctctccatagttctaccacccttcactgctagtgtacagctcacagcatctctcctaccaccctgggaaaagtcacattctaggctggattctactgaagtagaggcctggtggtttaacagccgaagacacacgcctagggatgagcaccctctttgtgacacttcatcctgatgccaagattttttggagaacatctgcactttcttatatatatatataatattaaaaaaagcaactgggtatatatcactaacagctttgtaggaagcacttttaatgttttctctctcacacacaaagattcaaaagaaatgtgcatatatttattctgtaatttcagtgattataaattgtaaaggtaatgtttaatcattgtatagtgattatgcctctggtatagctttcctaataaaaagtttttgaaaaacataatacattatatatagaggatacaaagcttgaaccttaaactccagctatgccatgcctttcgtgcttccattttagaaatgatttcttttacttgttacacagaaagtaatttattaacgggtttgatgcactgtgatgttgataaatcttatatcccaccatctctagtccaaaccaggatacaattgagacttaaaatgtgacttacggtttacttttttttccttgaattatgaatttcagtcttagtaaccagtgatgcactgtttcccaggcaagatgcaagggggagaaaataaagtaactagatcgctaagaagtacaggattaattaggagaagataatcta

SEQ ID NO: 25725 - DNA, 1089 bp, Homo sapiens
catgatttcctttgaaaccagagaacctgtctcaattacatcacgtatggaagacatctatcacagatatttttggggaaactagcactgccctctacaatgtatctctcaatatcttgctgaataaagtttctttttaaaatacctttgaggaatgggtactggtaacacattataaagctgatctaacattcatatgtccctaatactttggattctttattttgctttagacaasaacaattttgtcattgcaaatcattgaacacactgaccaccatttagtccaaatttttgtcaatcaaagagtaatatatgaaagctactttaagctaagttaaacacactaaatccagcatgaaaggtaaactcacttttgtgtataaatttgtcctggtactctgaggtactctgttatctttatattgagaaacttagaatccatttgcatgcatatttcttaggtttctgctaaaataataaataaaattataaattagcaaaactttacagtttttgtgaagtgaaagctgtttcctcccatgtatattttacttctatcctggagtatgttaagatataaccatagttatatacttggaggcaacaacagtgtgttggggtttgtttgctgtttttgaggatagtaagcatgacctcacaagacctttgtcaccagatgaggatattatggagtttttaagcaagggacatttgcctcctcagacttgagagagaacaagttgcttctgcttacaaagaaggctcagtgcaactaaagttttcaacattctcagcttcattttagtccacacaaatgttatcattctatgtctcaaggtcataattcctcccaattaattacccctgagtttcacatgagagaattgacaaggtttggaattcaacttatattgtaattctgcaacccacacaattgaagtttacgtatgtgattaagtaatatcagctctatgaatacgagacagaaattacagaaagcaactagcgccccaaagactggagaaaaataaggaaagaagttgtaactattgaaaactagagtagataggggttccttggagatgg

SEQ ID NO: 25726 - DNA, 1089 bp, Homo sapiens
catgatttcctttgaaaccagagaacctgtctcaattacatcacgtatggaagacatctatcacagatatttttggggaaactagcactgccctctacaatgtatctctcaatatcttgctgaataaagtttctttttaaaatacctttgaggaatgggtactggtaacacattataaagctgatctaacattcatatgtccctaatactttggattctttattttgctttagacaacaacaattttgtcattgcaaatcattgaacacactgaccaccatttagtccaaatttttgtcaatcaaagagtaatatatgaaagctactttaagctaagttaaacacactaaatccagcatgaaaggtaaactcacttttgtgtataaatttgtcctggtactctgaggtactctgttatctttatattgagaaacttagaatccatttgcatgcatatttcttaggtttctgctaaaataataaataaaattataaattagcaaaactttacagtttttgtgaagtgaaagctgtttcctcccatgtatattttacttctatcctggagtatgttaagatataaccatagttatatacttggaggcaacaacagtgtgttggggtttgtttgctgtttttgaggatagtaagcatgacctcacaagacctttgtcaccagatgaggatattatggagtttttaagcaagggacatttgcctcctcagacttgagagagaacaagttgcttctgcttacaaagaaggctcagtgcaactaaagttttcaacattctcagcttcattttagtccacacaaatgttatcattctatgtctcaaggtcataattcctcccaattaattaccmctgagtttcacatgagagaattgacaaggtttggaattcaacttatattgtaattctgcaacccacacaattgaagtttacgtatgtgattaagtaatatcagctctatgaatacgagacagaaattacagaaagcaactagcgccccaaagactggagaaaaataaggaaagaagttgtaactattgaaaactagagtagataggggttccttggagatgg

SEQ ID NO: 25727 - DNA, 618 bp, Homo sapiens
caaaggcagaaacccattctcaaagaaaataagtttatctggggtctcaaaatggaaaatgtaaacaagagattccaaaactctcattgaaaagtctgctagtgtaggttatatatatatatatgtgtgtgtgtgtgtgtgtgtgtgtgtgtgtgtgtrtatagacacatatatacacacatatatatatacaggttgatatataggttatatcaatatatattatatatatctatatattatatcaatatatctatctgtatatataatcagtctcaaaatggtgaacattttattaatggtttaataaaaatccctttgaagacaatctattataagaatttaaacaactatattaaatgttagttccctgtccctcactgaagtcagatagtacaaaagtgtaccaaaacaaaatacaaaaactaaaaagcaatagcaatgacaaagaaaccagagcacttagtagaaaatcatacctgatgaggggagcagaattttttgtcactggtcagtctgtttccatccatggagaaaaggaagctgcttcttttgacgctgtcttcagattcggatttgggaaagctgtctctctctcctttgttgtttccttcaagg

SEQ ID NO: 25728 - DNA, 618 bp, Homo sapiens
caaaggcagaaacccattctcaaagaaaataagtttatctggggtctcaaaatggaaaatgtaaacaagagattccaaaactctcattgaaaagtctgctagtgtaggttatatatatatatatgtgtgtgtgtgtgtgtgtgtgtgtgtgtgtgtgtgtakagacacatatatacacacatatatatatacaggttgatatataggttatatcaatatatattatatatatctatatattatatcaatatatctatctgtatatataatcagtctcaaaatggtgaacattttattaatggtttaataaaaatccctttgaagacaatctattataagaatttaaacaactatattaaatgttagttccctgtccctcactgaagtcagatagtacaaaagtgtaccaaaacaaaatacaaaaactaaaaagcaatagcaatgacaaagaaaccagagcacttagtagaaaatcatacctgatgaggggagcagaattttttgtcactggtcagtctgtttccatccatggagaaaaggaagctgcttcttttgacgctgtcttcagattcggatttgggaaagctgtctctctctcctttgttgtttccttcaagg

SEQ ID NO: 25729 - DNA, 618 bp, Homo sapiens
caaaggcagaaacccattctcaaagaaaataagtttatctggggtctcaaaatggaaaatgtaaacaagagattccaaaactctcattgaaaagtctgctagtgtaggttatatatatatatatgtgtgtgtgtgtgtgtgtgtgtgtgtgtgtgtgtgtatasacacatatatacacacatatatatatacaggttgatatataggttatatcaatatatattatatatatctatatattatatcaatatatctatctgtatatataatcagtctcaaaatggtgaacattttattaatggtttaataaaaatccctttgaagacaatctattataagaatttaaacaactatattaaatgttagttccctgtccctcactgaagtcagatagtacaaaagtgtaccaaaacaaaatacaaaaactaaaaagcaatagcaatgacaaagaaaccagagcacttagtagaaaatcatacctgatgaggggagcagaattttttgtcactggtcagtctgtttccatccatggagaaaaggaagctgcttcttttgacgctgtcttcagattcggatttgggaaagctgtctctctctcctttgttgtttccttcaagg

SEQ ID NO: 25730 - DNA, 618 bp, Homo sapiens
caaaggcagaaacccattctcaaagaaaataagtttatctggggtctcaaaatggaaaatgtaaacaagagattccaaaactctcattgaaaagtctgctagtgtaggttatatatatatatatgtgtgtgtgtgtgtgtgtgtgtgtgtgtgtgtgtgtatagacayatatatacacacatatatatatacaggttgatatataggttatatcaatatatattatatatatctatatattatatcaatatatctatctgtatatataatcagtctcaaaatggtgaacattttattaatggtttaataaaaatccctttgaagacaatctattataagaatttaaacaactatattaaatgttagttccctgtccctcactgaagtcagatagtacaaaagtgtaccaaaacaaaatacaaaaactaaaaagcaatagcaatgacaaagaaaccagagcacttagtagaaaatcatacctgatgaggggagcagaattttttgtcactggtcagtctgtttccatccatggagaaaaggaagctgcttcttttgacgctgtcttcagattcggatttgggaaagctgtctctctctcctttgttgtttccttcaagg

SEQ ID NO: 25731 - DNA, 618 bp, Homo sapiens
caaaggcagaaacccattctcaaagaaaataagtttatctggggtctcaaaatggaaaatgtaaacaagagattccaaaactctcattgaaaagtctgctagtgtaggttatatatatatatatgtgtgtgtgtgtgtgtgtgtgtgtgtgtgtgtgtgtatagacacatatayacacacatatatatatacaggttgatatataggttatatcaatatatattatatatatctatatattatatcaatatatctatctgtatatataatcagtctcaaaatggtgaacattttattaatggtttaataaaaatccctttgaagacaatctattataagaatttaaacaactatattaaatgttagttccctgtccctcactgaagtcagatagtacaaaagtgtaccaaaacaaaatacaaaaactaaaaagcaatagcaatgacaaagaaaccagagcacttagtagaaaatcatacctgatgaggggagcagaattttttgtcactggtcagtctgtttccatccatggagaaaaggaagctgcttcttttgacgctgtcttcagattcggatttgggaaagctgtctctctctcctttgttgtttccttcaagg

SEQ ID NO: 25732 - DNA, 618 bp, Homo sapiens
caaaggcagaaacccattctcaaagaaaataagtttatctggggtctcaaaatggaaaatgtaaacaagagattccaaaactctcattgaaaagtctgctagtgtaggttatatatatatatatgtgtgtgtgtgtgtgtgtgtgtgtgtgtgtgtgtgtatagacacatatatacacacatatatatatacaggttgatatataggtyatatcaatatatattatatatatctatatattatatcaatatatctatctgtatatataatcagtctcaaaatggtgaacattttattaatggtttaataaaaatccctttgaagacaatctattataagaatttaaacaactatattaaatgttagttccctgtccctcactgaagtcagatagtacaaaagtgtaccaaaacaaaatacaaaaactaaaaagcaatagcaatgacaaagaaaccagagcacttagtagaaaatcatacctgatgaggggagcagaattttttgtcactggtcagtctgtttccatccatggagaaaaggaagctgcttcttttgacgctgtcttcagattcggatttgggaaagctgtctctctctcctttgttgtttccttcaagg

SEQ ID NO: 25733 - DNA, 1268 bp, Homo sapiens
tgcatccatgtcttcaaggtccagggagggaacactgcctaccagcttccttcatcctccccatctctctcactagcctcatcacctgggaagcctgatgcttgcaatgatgctaggayactgtttgggcttcagttaaccatgggtacagtccccatttgttgaggattccaccacattgtccatgctcatcctttgtcttctgccacccaggaggtcaaggccaaagctgacccagattattttcctcactggaaggaggccaagccatttttttttccttatttgtacacatccctgaactctcctgtaattcgacttctgcctgctcaggacatttattagattcctatattcagggtagggcccagttgtgtgggtgctgtttaaggcttgtgaggagtggccctgatgtcctgcctccctcatgggctggaggatcccctgcactgagggacagggccagggccctctgatgcctttgcttcctgcctgttatcctttttggacacatacatttccctcaggaactcaccatgaggtggaattgtgggctaaactaggattttatattcttggatctcctaatcatggttacattttaacgctaagaaaatgtcagataacaactcttaacaagttattcaattttctatgtctgaatgtcccatttttaaaatgggaaggaaattgacataattgtgttttaaaaaaggatcaaatgaggtctaatgtgtgaagagtcagccacaggaagccacttttagttttgtagttttttctgagacagagtctgttctgttgctcaggctggagtgcagtggtgcaatctcagctcaccgtctcctgggttcaagtgattctcatgcctcagcctcccaagtagctgagattacaggcaagcaccaccatgcccagctaatttttgtattttcaatagaaatggtgtttccccatgttggccaggctggtctgaaactcctgacctcaagtgatccacctgcctcagcctcccaaagtgctgggattacaggtggaaccactgggcttggccgacttttgcttattaaacaatgcttactccaggcctgaggaagcttcacagtacccctggttgctacataaaaagtcatcagcaggtattgaagtttctcttcctgaacatcatgttaatctttatatcacagaccatttttctgcaatcttcccttctgcttgtgaagagctagaattaatatggaatttttgtatttagttctatattttat

SEQ ID NO: 25734 - DNA, 1675 bp, Homo sapiens
ggtttggggatttaaaaacaggatactttttagttgcatatatatataaaatttatgtttcataaactgagtttattatattcaattataaagatgcttttgttcataatccaaacgtagatgaacatatatctttaatatgcatattggagaaaagtatatgaactgcagaaattctaattaatttggggatttggagagtgacattaaacttaaccacttttgggggttgctcatacggccgtctacctcaccttggtttgaaaagcaagcacaattcatctctatttggaatctagtcctaaaaccggacaattaatagtctagtagactattgctatttcagatcacatgtgattataattctgcaactgggctctttaatagaagagaataattggctcatttggtaaataaatcattaggcttttggttttcctttgtgtatttatgcaaaacctaagccacatacaatttgtgggtattattgttgttttataactaatcctgaccttggcacttcagccaggggtgaatggctaagtcatctttgctctgctcttgtatcctcagcatttccatatccctctcctctcctctcctctcctctctctctgctcctctccttcctaggtatgctgcaaaaggtcatggtatcacgccgtaagttgttcaaagcccgttactacgctttgtgactgctcaggttacaaatacttgtatttggcagtcctcttgtttgaggactttcactttctctttcacgttacatttgttcttgtttcccactattgctatagtgtatatatatttgaacatatataaggcagggcgtggtggctcacacctgtaatcccagcattttgggaggccaaggtgggtggatcacctgaggccaggagtttgagatcagcctgaccaacatggtgaaaccctgtctctactaaaaatacaaaattagctgggcatggtggcacatgcctgtaatctcagctacttgggagacagaggcaggagaatcgcttgaacccaggaggtggaggttgcagtgagccaagatcacaccactgcacttcagcctgggcgacagagctagactctgtctcaaaaaataaaagaatatatataaataggtttttgcacattgcttttagtaccctgggagaaagcccaaacttgtgctgctgtaaccattaaagctgtatactatttgctgtggcattatttgacatcaagttacaaactctttgctttgaaggaagagttctgtaaattattgttacactcagtaaacctcgttatttaggagggcaaagagcacctactcagccagattctacacaaagattaccatcccttgtagcgaagcaacatgggttccagttgttcctgacctattcttactaagatcaacactggccacaactagactagacgttaaaggaagatgagaccaatagaaacaagtgcctagcaatttctaacgttttactgtggttgaagtgcagattacacccatcacaagctacacctggattttcctctgaaataaaaaagaacacagtgtcctaggcaatgttccatgtgcaactgagaagactgtgtgctctattgttgctgggtgractgttctataggtgtctgtaaggtgtatgtgagtgggcatgaacatgca

SEQ ID NO: 25735 - DNA, 476 bp, Homo sapiens
  misc_feature (1)...(476): n = A,T,C or G
ttaaattcccctctgtgcacagctccctatgaagtactgacaaattccatcagcccgtgatctttgaggtttatagtctatataattagtgaaaaaatcctgaaatttctttttttgaaatggggtctcagtctgttgcccaggctggagtgcaatggcatgatcacagctcactgcagcctgnatctccctgggctcaggtaatctaccatctcagccttcctagtagctgagactacaggtatgcaccaccacacctggctaatttttgtattttttttgcagagacagcattttgccatgtggcccaggctggtctcaaactcttgggttcaagcaatccacttgccttggcctcccaaagtgstaggattacaggcatgagccactgtgcctggctgaaatttttaatctttggtctgaatgacttagattggctggtcacatacttcaaattccggtggaaaataatacaa

SEQ ID NO: 25736 - DNA, 645 bp, Homo sapiens
catcttagccttccataatcagagttcaaaagtatcaatgttactgtgtttgagtatgagtattatcattaaaaataaatatgtaaactttgctaatttgatagctgtctcattttgttttgtatttttggtactggtgattctaaacattctcctatattcttttaaccasttacactgtgtttttttcaatatgggtattatcattaaaaataaatacatcaactttgctcaaatttgatagaaaaaatgctgtctcatcttgttttgcatttttggtattagtgagtctaaacattttcctatattttaacaagttgcatttttttaacttatagaaaagttgtaagaataagtcagagaattcctgtatacctttacctggatttataaatttttaatatattgccatattggtttttctatccatttatctatataatttacttttctaaatttgagggtatgttgcgtgcatacatcgtggccttttatctctttaatagtctagtgtgtatttactaaaaacaagcctatccttttatgtaactacaaggcaattagtagatgcaatactttaatcatattgtgttgattttcctagtaatgtcctttatcacatttactttcttccagtacaggatc

SEQ ID NO: 25737 - DNA, 542 bp, Homo sapiens
gtgttttggggaggaatccacagaggtgaagcatcaggggcacttgctgtcagtgcagcctggcaccrtggccctgaccgtgggctcctggctgaggtcgtgcttgctgggtctccactggaagctgctcttcctctttccagaaagccccatgcacaccacagcctttatgttcctttgttgagtaagaattgtctgactgtttagaggattttgtttaaggaaattcggttgcttgatattaaaaaatgatcagttgaaattaaatagtaataaataataatgaccatttctggaaattcatagaattccttttgtccatcagagacatcagcagcagttctcattgcatttccttctggaaacagcattgtggggatacctggaggtgaatgaacaaagcccctctgggtttcatgtgcagctgtttcagatctgggaaggtttgtggcttctcacaaaaggctctctgcatgggttgcagagctgctttctagattggcttctctgggtactggggaaagctccctcccctccggtag

SEQ ID NO: 25738 - DNA, 536 bp, Homo sapiens
ctttctagatttggtgtcagcatttggattttcccccaaagatttagtccatattctcaataaggagaggcttgggattgggaggggtggagaattagagatgkagtgttgagagcacacacaacagagcaagctctggagtcagacaacgttggcttccgatcctggctgtaccgctaatgactgtgtgatcttaggcaagtattttagcctctctgagcctcagtctcctgtcctgcaaaagtaagcttgacatcgtcgttctcacattgttgtgcagattaaatgaaatgacatatgcaaaggtgcataacacacagccctggaatgtcatagaaaacactcgccaaatgttagtttccttccttttcaaattacctatttagaatttctgaatgtattcgtactgagaagtactgttgagaagggtgtcttcaattatactttatagagaatatgaaacatatgggaggaagatattgatcccaagctgccaaaattatttttgtggaaagaaaattcagaatcactccaga

SEQ ID NO: 25739 - DNA, 536 bp, Homo sapiens
ctttctagatttggtgtcagcatttggattttcccccaaagatttagtccatattctcaataaggagaggcttgggattgggaggggtggagaattagagatgtagtgttgagagcacacacaacagagcaagctctggagtcagacaacgttggcttccgatcctggctgtaccgctaatgactgtgtgatcttaggcaagtattttagcctctctgagcctcagtctcctgtcctgcaaaagtaagcttgacatcgtcrttctcacattgttgtgcagattaaatgaaatgacatatgcaaaggtgcataacacacagccctggaatgtcatagaaaacactcgccaaatgttagtttccttccttttcaaattacctatttagaatttctgaatgtattcgtactgagaagtactgttgagaagggtgtcttcaattatactttatagagaatatgaaacatatgggaggaagatattgatcccaagctgccaaaattatttttgtggaaagaaaattcagaatcactccaga

SEQ ID NO: 25740 - DNA, 562 bp, Homo sapiens
gaaaagaagcaagcctattgaaacaggcggtgtctagcatatttcactgtcccttgggttcagtattttcttacacggtgtctctgtgattctctccattttctttctcttgctgttatccagggtgctaaggaggcactggatttggggatcacaggcccagaaggaatcgagatcagccgtccagaggaggtgagaaacacttcctgtagcctttgtcagcgtctctcatgtagattgacagaatcttccaggatggaggagacatcaaacatacaaattagccaggcacaagggctcatgtctgtaatcccaacatttgggaggctgaggtgggtggatggcttgaacccaggaatttaagaccagcctgggcaacatggtgaaactccgtctctactaaaaatacaaaaaaaattagctgggcatagtggtgcatgcctgtagtcccagctaactacttgggaggctgaggcaggaggatcacctgagcccaggaggttgaggctgcagtgagccgtgatgatgccactgcaatccagccaaggtgatagagtrtata

SEQ ID NO: 25741 - DNA, 541 bp, Homo sapiens
cagtagaaacggtactttgaattttgaactttgaccatttcccaggctggcaatatatagtatgatacactatattataaaatagtctctgggtcagatgattttgcatgactttaggtttatgttmagtgttctgagcctgcttaaggtaggctaggccaagcttcgatgctcagtaggtttggagtattaaatgcatttttcatttacagtatttttaacttattatgggcttacaggaacctggctcccatcataaatcaaggagcatctcttttggttgtggcattgtatctgtcctcacacaacccctgtgggtcttgaccaccatcccaggccccagagcccctgcctcagactgacccttgcacctcttcccacctgcaggtgtgattgctgctgtggccatcgtcctagtctccctcctcttcgtcatgctgcgctacatgtaccggcacaagggcacgtaccacaccaatgaggccaagggcacggagtttgctgagagtgcagatgcagccctgcagggagaccctgccct

SEQ ID NO: 25742 - DNA, 541 bp, Homo sapiens
cagtagaaacggtactttgaattttgaactttgaccatttcccaggctggcaatatatagtatgatacactatattataaaatagtctctgggtcagatgattttgcatgactttaggtttatgttaagtgttctgagcctgcttaaggtaggctaggccaagcttygatgctcagtaggtttggagtattaaatgcatttttcatttacagtatttttaacttattatgggcttacaggaacctggctcccatcataaatcaaggagcatctcttttggttgtggcattgtatctgtcctcacacaacccctgtgggtcttgaccaccatcccaggccccagagcccctgcctcagactgacccttgcacctcttcccacctgcaggtgtgattgctgctgtggccatcgtcctagtctccctcctcttcgtcatgctgcgctacatgtaccggcacaagggcacgtaccacaccaatgaggccaagggcacggagtttgctgagagtgcagatgcagccctgcagggagaccctgccct

SEQ ID NO: 25743 - DNA, 541 bp, Homo sapiens
cagtagaaacggtactttgaattttgaactttgaccatttcccaggctggcaatatatagtatgatacactatattataaaatagtctctgggtcagatgattttgcatgactttaggtttatgttaagtgttctgagcctgcttaaggtaggctaggccaagcttcgatgctcagtaggtttggagtattaaatgcatttttcatttacagtatttttaacttattatgggcttacaggaacctggctccyatcataaatcaaggagcatctcttttggttgtggcattgtatctgtcctcacacaacccctgtgggtcttgaccaccatcccaggccccagagcccctgcctcagactgacccttgcacctcttcccacctgcaggtgtgattgctgctgtggccatcgtcctagtctccctcctcttcgtcatgctgcgctacatgtaccggcacaagggcacgtaccacaccaatgaggccaagggcacggagtttgctgagagtgcagatgcagccctgcagggagaccctgccct

SEQ ID NO: 25744 - DNA, 532 bp, Homo sapiens
cattgcactacttctgcacacttcctgaggagtagctgtcactcaaaatcacagagtaacaggaagagaagatgaactggttaaccatccccttccaggcgagtttttccaagattcccaacagctcagctgtcactccaaggaccagcagctatgaggttaaagactgcacgccaggtgctggggtcacctaggtactccctggggctcaggattcttgaggctgcaccatctccacttgggagttggcagaaaggtcccaaagatctccctgggaggattacrgggaatgtgagctcagtggggggtccacctgtcagaggagctggcaatcctggggccgtggtgggggagatgagctgggagctcacagaagcagtgatggcagaagcctggtccaaaagtgagaccttttcctggtgacccgagctcgcaggccttcatctatgaaataaagggcttggctgtatctgcatggcccacactgatcttcagaacaccagtgtggcaaaaatggcgataaataggccca

SEQ ID NO: 25745 - DNA, 974 bp, Homo sapiens
ttttttagtttcttatagttgtttatttcagatctttcttaaatgtagacatttattactataaacttccctcttagtactgtttttgctgaagctcttctgtgcttttataaaaggaagaaacaccctcaatatatcaagaggtgaaaaaatgtactacttctgctggcaaggaagttttagtgggattaagttctcattacttagagtcacccaaattctctcaaggtttccacattcttctaaagaaagttatatatttctcttggcaaggatgtaaattttaaacccaattttcattaatcagagctgctgcaatatatatatatggcacttaaaaaaataaaagaagcttcttgattctctgacaaagccttgcattggtcttttcaaatctttaaattttcattttatcatctttcctaattagaaggaatcagccctttccatagtcttgaatttcctatggcccttaaactgtcaaataatagtatcctgtatgtctagagaaggtttacaactttccacccatcttctttggcgacataaaaaaaaaaaaaaatctttaccaaatcttctcaacttctaactagaattgcacagtcctcaagcccattcaagtcagaaaccatcacttctttatttgtatcgtactaggcctctaatgtcttcattgctccctgctatcttagctggacaacatagaatacattcttgctagtttaagaaaataataatttactaaaatatatagacaagagaataagacttggattatgtgtggcagaaaatggccagaagaaacactggtgccattgttataaaacttgttttgcaaccacctggaagtagtcacctctgataagtcattatggtatataagtcattattaactytatttcactgacagctaaatgaatggaaatttttttcttatttcaggacacagagatccatttaaaacattcattttg

SEQ ID NO: 25746 - DNA, 1033 bp, Homo sapiens
ttgcatatgtgctctagaagatgctcctggaacagaaggatatttttttaagacataggcaattatctctggctctttctgcttagatacactcaacttcaccacaaatgtttgttttttttgtggctacctaagtgcaatcccttgagcctcttgacattgatttcttcctatttctgtgctatccaaccctgtctacaactaggtcggtgggatctcataaaattctttcttttgcaaacacattgcttctctgcctcctattggcacaagtaatcatttatgttttaaaaatcaaaggacaaggcaaggaatggcattcgtctggttcagaatgtccaataattgtgaaataaagataattattaaaaacataatattgagacaaaattaactttgtaattatgtagtctaagtgattttcaagctatggttattggaatctcaagattcttgagagatgccatagggagtaattgcgggacttgtaccccatttaaagcagcgttactttcaaatgattggtatatttaaacgccatatttgttgaaaagctgttgaataaagttttaaaaccaccaatccatccagcttacttatttggtttgtgrgaaaactgagaatgtaagtggcatgaatcaattaaaaaatgaagtttatttagttttcagaatggagcaaagaagacagtgattacgatataacaaatacttaagggaaataggactttttaatccacagaaacaaagactttcaggaagaagggaatgttgctttatatatgtggctgtcatggccaagacactttagagttatttttacttctcaacgaaaagtaagctacagatggatagagctttttccttctaattgtaaggcttgtcaagattagatggatagtgtttggtggtgatgatttacatataattggatttcaagcattgactatatatgcacttggtctctaccatatgatatggtagaggctctatagaagtgtaacttcattaaaacttatatctacattttccac

SEQ ID NO: 25747 - DNA, 2676 bp, Homo sapiens
atatatgacattttatatcatctataatataaaatccatatataaatttttatttattaaataacataaatatatataaatatataatataaaatatttggtaacatttatttatatatttgtatagatatataactttatactataaagcattacaatatctaataagaaatatttaatattttccacaaagtaaatcaagtaaatgctaaatgcatctacaatagtgaaggtatagcaatcttcttcagtttattttcttattgtaatactgtggctcctccgtacacttttgttttctagttaatcttcagtttaggtaccaggccaacaggaataaggaaaaacattattggtggtgctataaggaaacagggttgatggtcatttaagaagcagcatcgtcattgtttcattgttccttttaaaagcaatgaaggactaaataatattaataagcaaaagattaaataaagatctttaaaattacacaaacaacaactggtgctaaaaatagtttattacctagtaacaaaaataattactactattttatctcttaataaatatatgtcaggaatgtgttctgtgtttacataagatatttcattaatccatacaatggcaatgtcatgaaattattaattttctcatgtttcaagatatgaaaacaacaatcaagaatctgagacataactgtaaatcctaaggttttttgtttttgtttttctttttctttttgtgagacagaatcttggtctgtcacccaggctggagtgcagtagcataatctgggttcactgcaatctccacctccagggttcaagcaattctcccacctcagcctctggagtggctgggaccacaggcacacaccaccatatctggctaatttttgtatctttagtagagacagggtctcatcatgttgcccaggctggtctcgaactcttgacctcaagggatccaccgcctctgcctcccaaagtgctgggattacaggcrtgagccattgcctggcctaaagcctaaggttttaatttttaatcagtttgcatatttattaagtctaagaaatcatagacaaaagttacaacagataaaaatctagctggaaatattgccttttcttcaatgttacacaaactgggcagagtttatataattgcaacttcgtattattaaatatagaaactagacatttctgggctgcaatgtagttgaatcggctgccaattaagaccattgattttgaaccattttaggtttcacttaagcattgcatgtgtgcatgtgtgtacatttaattttcaggcttttaaaaattgttttcctaatcacaatgctctttgagtcctcagcagcgaactctatgcaggttttgttagttccctgacttcaatgttatacttcaattatcagataactttgccaatcataaaatttcaaaaacaaaagtttttaaactttttaagctgaatgaattcaccatgcgtagaaatatactaaaattatttgggatgtaatgtacaatacccagttcatttaattataaactaataatttttatgtttctttcaataggctaggaaatccatgcaaaaaactgtacctctcccatttatttagcatcccttagcactcccatggcaatgccaccaaacaaattaatttgaatctaaattaattttattgaccactcattaggttttgtgctaagtactgagaagttgaagactaacttttgcactcaaagggctttcagactggtagataaaaatgagtaaaaataagagatgtaaagatatgaatatatgcatgaatagaagtcttttgatatgtattattctgagtatctgaactctcatgctaaactgcctgagtttttacttactagtaagtggtctaacgcaacctgtaaaaatctctcaatttttttcacatataaaattaaataataattgtttttgtcactgagttctagaaagttagatattaaattgacagcatcaaaatggagggaacctggatcctgagtcactgaaaagaaaaacctcagaacacctatctttaattttatctgagcaagaaataatcgtctgtgtactaagtcatgcaatttgggggtttatttggtttccttggacccacagtgtgccccagcttaacaatatggaaagtggcatcttgatgttttgtgctgctataataaaattctaaactaggtgaaactggcttggtaactgaggagtagtttgcaacaagctgattgagctcttctattaagttattgcctttttaccccaagactgcctcctttatgttttactcaaaatgtgcctcattcaaaaaataataaaatactgtttacaaaaatcaaggatttggatatcttaaaaataaacaagacattatcccacttcaagaagcatacaagataaagaagatagatatgcaggaaaataattgaaatttagaataattggaatctagagtatttccctatgaagtaatagaataagtgctaagagagtatagagggtgtgccataaactaaatctgcaggtattaaggagtgctctgcagaaagggaagcaattaaataatattttagaggaaaaacaagaatttgacagactaaaatgaccataagcttctgcaaagagagtaaacagc

SEQ ID NO: 25748 - DNA, 2676 bp, Homo sapiens
atatatgacattttatatcatctataatataaaatccatatataaatttttatttattaaataacataaatatatataaatatataatataaaatatttggtaacatttatttatatatttgtatagatatataactttatactataaagcattacaatatctaataagaaatatttaatattttccacaaagtaaatcaagtaaatgctaaatgcatctacaatagtgaaggtatagcaatcttcttcagtttattttcttattgtaatactgtggctcctccgtacacttttgttttctagttaatcttcagtttaggtaccaggccaacaggaataaggaaaaacattattggtggtgctataaggaaacagggttgatggtcatttaagaagcagcatcgtcattgtttcattgttccttttaaaagcaatgaaggactaaataatattaataagcaaaagattaaataaagatctttaaaattacacaaacaacaactggtgctaaaaatagtttattacctagtaacaaaaataattactactattttatctcttaataaatatatgtcaggaatgtgttctgtgtttacataagatatttcattaatccatacaatggcaatgtcatgaaattattaattttctcatgtttcaagatatgaaaacaacaatcaagaatctgagacataactgtaaatcctaaggttttttgtttttgtttttctttttctttttgtgagacagaatcttggtctgtcacccaggctggagtgcagtagcataatctgggttcactgcaatctccacctccagggttcaagcaattctcccacctcagcctctggagtggctgggaccacaggcacacaccaccatatctggctaatttttgtatctttagtagagacagggtctcatcatgttgcccaggctggtctcgaactcttgacctcaagggatccaccgcctctgcctcccaaagtgctgggattacaggcatgagccattgcctggcctaaagcctaaggttttaatttttaatcagtttgcatatttattaagtctaagaaatcatagacaaaagttacaacagataaaaatctagctggaaatattgccttttcttcaatgttacacaaactgggcagagtttatataattgcaacttcgtattattaaatatagaaactagacatttctgggctgcaatgtagttgaatcggctgccaattaagaccattgattttgaaccattttaggtttcacttaagcattgcatgtgtgcrtgtgtgtacatttaattttcaggcttttaaaaattgttttcctaatcacaatgctctttgagtcctcagcagcgaactctatgcaggttttgttagttccctgacttcaatgttatacttcaattatcagataactttgccaatcataaaatttcaaaaacaaaagtttttaaactttttaagctgaatgaattcaccatgcgtagaaatatactaaaattatttgggatgtaatgtacaatacccagttcatttaattataaactaataatttttatgtttctttcaataggctaggaaatccatgcaaaaaactgtacctctcccatttatttagcatcccttagcactcccatggcaatgccaccaaacaaattaatttgaatctaaattaattttattgaccactcattaggttttgtgctaagtactgagaagttgaagactaacttttgcactcaaagggctttcagactggtagataaaaatgagtaaaaataagagatgtaaagatatgaatatatgcatgaatagaagtcttttgatatgtattattctgagtatctgaactctcatgctaaactgcctgagtttttacttactagtaagtggtctaacgcaacctgtaaaaatctctcaatttttttcacatataaaattaaataataattgtttttgtcactgagttctagaaagttagatattaaattgacagcatcaaaatggagggaacctggatcctgagtcactgaaaagaaaaacctcagaacacctatctttaattttatctgagcaagaaataatcgtctgtgtactaagtcatgcaatttgggggtttatttggtttccttggacccacagtgtgccccagcttaacaatatggaaagtggcatcttgatgttttgtgctgctataataaaattctaaactaggtgaaactggcttggtaactgaggagtagtttgcaacaagctgattgagctcttctattaagttattgcctttttaccccaagactgcctcctttatgttttactcaaaatgtgcctcattcaaaaaataataaaatactgtttacaaaaatcaaggatttggatatcttaaaaataaacaagacattatcccacttcaagaagcatacaagataaagaagatagatatgcaggaaaataattgaaatttagaataattggaatctagagtatttccctatgaagtaatagaataagtgctaagagagtatagagggtgtgccataaactaaatctgcaggtattaaggagtgctctgcagaaagggaagcaattaaataatattttagaggaaaaacaagaatttgacagactaaaatgaccataagcttctgcaaagagagtaaacagc

SEQ ID NO: 25749 - DNA, 2676 bp, Homo sapiens
atatatgacattttatatcatctataatataaaatccatatataaatttttatttattaaataacataaatatatataaatatataatataaaatatttggtaacatttatttatatatttgtatagatatataactttatactataaagcattacaatatctaataagaaatatttaatattttccacaaagtaaatcaagtaaatgctaaatgcatctacaatagtgaaggtatagcaatcttcttcagtttattttcttattgtaatactgtggctcctccgtacacttttgttttctagttaatcttcagtttaggtaccaggccaacaggaataaggaaaaacattattggtggtgctataaggaaacagggttgatggtcatttaagaagcagcatcgtcattgtttcattgttccttttaaaagcaatgaaggactaaataatattaataagcaaaagattaaataaagatctttaaaattacacaaacaacaactggtgctaaaaatagtttattacctagtaacaaaaataattactactattttatctcttaataaatatatgtcaggaatgtgttctgtgtttacataagatatttcattaatccatacaatggcaatgtcatgaaattattaattttctcatgtttcaagatatgaaaacaacaatcaagaatctgagacataactgtaaatcctaaggttttttgtttttgtttttctttttctttttgtgagacagaatcttggtctgtcacccaggctggagtgcagtagcataatctgggttcactgcaatctccacctccagggttcaagcaattctcccacctcagcctctggagtggctgggaccacaggcacacaccaccatatctggctaatttttgtatctttagtagagacagggtctcatcatgttgcccaggctggtctcgaactcttgacctcaagggatccaccgcctctgcctcccaaagtgctgggattacaggcatgagccattgcctggcctaaagcctaaggttttaatttttaatcagtttgcatatttattaagtctaagaaatcatagacaaaagttacaacagataaaaatctagctggaaatattgccttttcttcaatgttacacaaactgggcagagtttatataattgcaacttcgtattattaaatatagaaactagacatttctgggctgcaatgtagttgaatcggctgccaattaagaccattgattttgaaccattttaggtttcacttaagcattgcatgtgtgcatgtgtgtacatttaattttcagscttttaaaaattgttttcctaatcacaatgctctttgagtcctcagcagcgaactctatgcaggttttgttagttccctgacttcaatgttatacttcaattatcagataactttgccaatcataaaatttcaaaaacaaaagtttttaaactttttaagctgaatgaattcaccatgcgtagaaatatactaaaattatttgggatgtaatgtacaatacccagttcatttaattataaactaataatttttatgtttctttcaataggctaggaaatccatgcaaaaaactgtacctctcccatttatttagcatcccttagcactcccatggcaatgccaccaaacaaattaatttgaatctaaattaattttattgaccactcattaggttttgtgctaagtactgagaagttgaagactaacttttgcactcaaagggctttcagactggtagataaaaatgagtaaaaataagagatgtaaagatatgaatatatgcatgaatagaagtcttttgatatgtattattctgagtatctgaactctcatgctaaactgcctgagtttttacttactagtaagtggtctaacgcaacctgtaaaaatctctcaatttttttcacatataaaattaaataataattgtttttgtcactgagttctagaaagttagatattaaattgacagcatcaaaatggagggaacctggatcctgagtcactgaaaagaaaaacctcagaacacctatctttaattttatctgagcaagaaataatcgtctgtgtactaagtcatgcaatttgggggtttatttggtttccttggacccacagtgtgccccagcttaacaatatggaaagtggcatcttgatgttttgtgctgctataataaaattctaaactaggtgaaactggcttggtaactgaggagtagtttgcaacaagctgattgagctcttctattaagttattgcctttttaccccaagactgcctcctttatgttttactcaaaatgtgcctcattcaaaaaataataaaatactgtttacaaaaatcaaggatttggatatcttaaaaataaacaagacattatcccacttcaagaagcatacaagataaagaagatagatatgcaggaaaataattgaaatttagaataattggaatctagagtatttccctatgaagtaatagaataagtgctaagagagtatagagggtgtgccataaactaaatctgcaggtattaaggagtgctctgcagaaagggaagcaattaaataatattttagaggaaaaacaagaatttgacagactaaaatgaccataagcttctgcaaagagagtaaacagc

SEQ ID NO: 25750 - DNA, 2676 bp, Homo sapiens
atatatgacattttatatcatctataatataaaatccatatataaatttttatttattaaataacataaatatatataaatatataatataaaatatttggtaacatttatttatatatttgtatagatatataactttatactataaagcattacaatatctaataagaaatatttaatattttccacaaagtaaatcaagtaaatgctaaatgcatctacaatagtgaaggtatagcaatcttcttcagtttattttcttattgtaatactgtggctcctccgtacacttttgttttctagttaatcttcagtttaggtaccaggccaacaggaataaggaaaaacattattggtggtgctataaggaaacagggttgatggtcatttaagaagcagcatcgtcattgtttcattgttccttttaaaagcaatgaaggactaaataatattaataagcaaaagattaaataaagatctttaaaattacacaaacaacaactggtgctaaaaatagtttattacctagtaacaaaaataattactactattttatctcttaataaatatatgtcaggaatgtgttctgtgtttacataagatatttcattaatccatacaatggcaatgtcatgaaattattaattttctcatgtttcaagatatgaaaacaacaatcaagaatctgagacataactgtaaatcctaaggttttttgtttttgtttttctttttctttttgtgagacagaatcttggtctgtcacccaggctggagtgcagtagcataatctgggttcactgcaatctccacctccagggttcaagcaattctcccacctcagcctctggagtggctgggaccacaggcacacaccaccatatctggctaatttttgtatctttagtagagacagggtctcatcatgttgcccaggctggtctcgaactcttgacctcaagggatccaccgcctctgcctcccaaagtgctgggattacaggcatgagccattgcctggcctaaagcctaaggttttaatttttaatcagtttgcatatttattaagtctaagaaatcatagacaaaagttacaacagataaaaatctagctggaaatattgccttttcttcaatgttacacaaactgggcagagtttatataattgcaacttcgtattattaaatatagaaactagacatttctgggctgcaatgtagttgaatcggctgccaattaagaccattgattttgaaccattttaggtttcacttaagcattgcatgtgtgcatgtgtgtacatttaattttcaggcttttaaaaattgttttcctaatcacaatgctctttgagtcctcagcagcgaactctatgcaggttttgttagttccctgacttcaatgttatacttcaattatcagataactttgccaatcataaaatttcaaaaacaaaagtttttaaactttttaagctgaatgaattcaccatgcgtagaaatatactaaaattatttgggatgtaatgtacaatacccagttcatttaattataaactaataatttttatgtttctttcaataggctaggaaatccatgcaaaaaactgtacctctcccatttatttagcatcccttagcactcccatggcaatgccaccaaacaaattaatttgaatctaaattaattttattgaccactcattaggttttgtgctaagtactgagaagttgaagactaacttttgcactcaaagggctttcagactggtagataaaaatgagtaaaaataagagatgtaaagatatgaatatatgcatgaatagaagtcttttgatatgtattattctgagtatctgaactctcatgctaaactgcctgagtttttacttactagtaagtggtctaacgcaacctgtaaaaatctctcaatttttttcacatataaaaytaaataataattgtttttgtcactgagttctagaaagttagatattaaattgacagcatcaaaatggagggaacctggatcctgagtcactgaaaagaaaaacctcagaacacctatctttaattttatctgagcaagaaataatcgtctgtgtactaagtcatgcaatttgggggtttatttggtttccttggacccacagtgtgccccagcttaacaatatggaaagtggcatcttgatgttttgtgctgctataataaaattctaaactaggtgaaactggcttggtaactgaggagtagtttgcaacaagctgattgagctcttctattaagttattgcctttttaccccaagactgcctcctttatgttttactcaaaatgtgcctcattcaaaaaataataaaatactgtttacaaaaatcaaggatttggatatcttaaaaataaacaagacattatcccacttcaagaagcatacaagataaagaagatagatatgcaggaaaataattgaaatttagaataattggaatctagagtatttccctatgaagtaatagaataagtgctaagagagtatagagggtgtgccataaactaaatctgcaggtattaaggagtgctctgcagaaagggaagcaattaaataatattttagaggaaaaacaagaatttgacagactaaaatgaccataagcttctgcaaagagagtaaacagc

SEQ ID NO: 25751 - DNA, 2676 bp, Homo sapiens
atatatgacattttatatcatctataatataaaatccatatataaatttttatttattaaataacataaatatatataaatatataatataaaatatttggtaacatttatttatatatttgtatagatatataactttatactataaagcattacaatatctaataagaaatatttaatattttccacaaagtaaatcaagtaaatgctaaatgcatctacaatagtgaaggtatagcaatcttcttcagtttattttcttattgtaatactgtggctcctccgtacacttttgttttctagttaatcttcagtttaggtaccaggccaacaggaataaggaaaaacattattggtggtgctataaggaaacagggttgatggtcatttaagaagcagcatcgtcattgtttcattgttccttttaaaagcaatgaaggactaaataatattaataagcaaaagattaaataaagatctttaaaattacacaaacaacaactggtgctaaaaatagtttattacctagtaacaaaaataattactactattttatctcttaataaatatatgtcaggaatgtgttctgtgtttacataagatatttcattaatccatacaatggcaatgtcatgaaattattaattttctcatgtttcaagatatgaaaacaacaatcaagaatctgagacataactgtaaatcctaaggttttttgtttttgtttttctttttctttttgtgagacagaatcttggtctgtcacccaggctggagtgcagtagcataatctgggttcactgcaatctccacctccagggttcaagcaattctcccacctcagcctctggagtggctgggaccacaggcacacaccaccatatctggctaatttttgtatctttagtagagacagggtctcatcatgttgcccaggctggtctcgaactcttgacctcaagggatccaccgcctctgcctcccaaagtgctgggattacaggcatgagccattgcctggcctaaagcctaaggttttaatttttaatcagtttgcatatttattaagtctaagaaatcatagacaaaagttacaacagataaaaatctagctggaaatattgccttttcttcaatgttacacaaactgggcagagtttatataattgcaacttcgtattattaaatatagaaactagacatttctgggctgcaatgtagttgaatcggctgccaattaagaccattgattttgaaccattttaggtttcacttaagcattgcatgtgtgcatgtgtgtacatttaattttcaggcttttaaaaattgttttcctaatcacaatgctctttgagtcctcagcagcgaactctatgcaggttttgttagttccctgacttcaatgttatacttcaattatcagataactttgccaatcataaaatttcaaaaacaaaagtttttaaactttttaagctgaatgaattcaccatgcgtagaaatatactaaaattatttgggatgtaatgtacaatacccagttcatttaattataaactaataatttttatgtttctttcaataggctaggaaatccatgcaaaaaactgtacctctcccatttatttagcatcccttagcactcccatggcaatgccaccaaacaaattaatttgaatctaaattaattttattgaccactcattaggttttgtgctaagtactgagaagttgaagactaacttttgcactcaaagggctttcagactggtagataaaaatgagtaaaaataagagatgtaaagatatgaatatatgcatgaatagaagtcttttgatatgtattattctgagtatctgaactctcatgctaaactgcctgagtttttacttactagtaagtggtctaacgcaacctgtaaaaatctctcaatttttttcacatataaaattaaataataattgtttttgtcactgagttctagaaagttagatattaaattgacagcatcaaaayggagggaacctggatcctgagtcactgaaaagaaaaacctcagaacacctatctttaattttatctgagcaagaaataatcgtctgtgtactaagtcatgcaatttgggggtttatttggtttccttggacccacagtgtgccccagcttaacaatatggaaagtggcatcttgatgttttgtgctgctataataaaattctaaactaggtgaaactggcttggtaactgaggagtagtttgcaacaagctgattgagctcttctattaagttattgcctttttaccccaagactgcctcctttatgttttactcaaaatgtgcctcattcaaaaaataataaaatactgtttacaaaaatcaaggatttggatatcttaaaaataaacaagacattatcccacttcaagaagcatacaagataaagaagatagatatgcaggaaaataattgaaatttagaataattggaatctagagtatttccctatgaagtaatagaataagtgctaagagagtatagagggtgtgccataaactaaatctgcaggtattaaggagtgctctgcagaaagggaagcaattaaataatattttagaggaaaaacaagaatttgacagactaaaatgaccataagcttctgcaaagagagtaaacagc

SEQ ID NO: 25752 - DNA, 1605 bp, Homo sapiens
tatttcaataatcttggattgcatgttgaaataatgttaaatacatattatttaaatgttatatattaaaaataattctacctcctttattggcttttaagaaatattatatttagaaaattcaaaattacatatgtggtttcagtatttttctactggatgataatggcctaaagttaaaatatatactatgtaaaagtttaaagcaaatatctttctaacgagtaggacataaacctaaattactattgataaaacaytaattatgtcataggtttttatttttttctggtcaaaatgaaactggcactatctttcttaaaactgcagtctaatactgtctaaggtgcgtacacatagggtttgctgataaaatcttttggtaaaaattaaagaaaatattatcaataccagtaagagtatgcttttattctccactaagaaaaatattttcaataccagataattgcttttataacaaatagcaaatatgtttaatatgttgttctttgaagtcaatttgctactaaaaatatttatttttatagtagagccaactaaatggtccttttttcattgacaagctctcactcacatttgcacttgcctctccttgacctctcctttattacagaacaactgtagtgtaaaatactatatataaaacaatgggttattttaattccccttattatcaagaggacaatgaacagattaaatgaatgactcctttttcaactttcaatttactcagtgtgaggaagttatagtgttatggactgaattgtgttctcccaaatttcgtatgttgaagccttaaccattgatgttgtggtatttggaactaggtcttctgggaagaagttagggtaagatgggatcataagggtggatccctcataatgagatgactgtccttgtgaaaagagacaccagaaggcttactttgtctttgccatgtgaggatatagcacagaagtggttgtctgcaagttaggaagtgggccctcactggaacctaaaaaggctagcatcctgatctcagacttctggcctccagaactgtgagaaaataaatgtctattgtttaagccaccgaatatgtgatttttttttattgcatgctgaacagatggagacatatggtaattgaattcataataaatagcatttatggtgaattcattcatgttaaatactgagaaaactcttgagaattaactggattttagggtaaaagttttgttattttttaaaaattacatgtaattgctcaatgagttgggattatacatattttactgaaaaattcttgaaaaatttttactctttcaagaaagtatgtgagaagaaattaggatttcccgtaacatttgatggttttggttaattgtatacggtttgagtaatcaaaagcagaagtttcataacataattttcttacatattactgtttactgttcatgaaatttttgcttccaagaaagtcctcgacaatttacagattggcctgaaatttatttttatatttatccatttccaggatttgaattatgtttaattaccatcatcttcctacctgattaactaaattttctttttaaa

SEQ ID NO: 25753 - DNA, 1605 bp, Homo sapiens
tatttcaataatcttggattgcatgttgaaataatgttaaatacatattatttaaatgttatatattaaaaataattctacctcctttattggcttttaagaaatattatatttagaaaattcaaaattacatatgtggtttcagtatttttctactggatgataatggcctaaagttaaaatatatactatgtaaaagtttaaagcaaatatctttctaacgagtaggacataaacctaaattactattgataaaacactaattatgtcataggtttttatttttttctggtcaaaatgaaactggcactatctttcttaaaactgcagtctaatactgtctaaggtgcgtrcacatagggtttgctgataaaatcttttggtaaaaattaaagaaaatattatcaataccagtaagagtatgcttttattctccactaagaaaaatattttcaataccagataattgcttttataacaaatagcaaatatgtttaatatgttgttctttgaagtcaatttgctactaaaaatatttatttttatagtagagccaactaaatggtccttttttcattgacaagctctcactcacatttgcacttgcctctccttgacctctcctttattacagaacaactgtagtgtaaaatactatatataaaacaatgggttattttaattccccttattatcaagaggacaatgaacagattaaatgaatgactcctttttcaactttcaatttactcagtgtgaggaagttatagtgttatggactgaattgtgttctcccaaatttcgtatgttgaagccttaaccattgatgttgtggtatttggaactaggtcttctgggaagaagttagggtaagatgggatcataagggtggatccctcataatgagatgactgtccttgtgaaaagagacaccagaaggcttactttgtctttgccatgtgaggatatagcacagaagtggttgtctgcaagttaggaagtgggccctcactggaacctaaaaaggctagcatcctgatctcagacttctggcctccagaactgtgagaaaataaatgtctattgtttaagccaccgaatatgtgatttttttttattgcatgctgaacagatggagacatatggtaattgaattcataataaatagcatttatggtgaattcattcatgttaaatactgagaaaactcttgagaattaactggattttagggtaaaagttttgttattttttaaaaattacatgtaattgctcaatgagttgggattatacatattttactgaaaaattcttgaaaaatttttactctttcaagaaagtatgtgagaagaaattaggatttcccgtaacatttgatggttttggttaattgtatacggtttgagtaatcaaaagcagaagtttcataacataattttcttacatattactgtttactgttcatgaaatttttgcttccaagaaagtcctcgacaatttacagattggcctgaaatttatttttatatttatccatttccaggatttgaattatgtttaattaccatcatcttcctacctgattaactaaattttctttttaaa

SEQ ID NO: 25754 - DNA, 1575 bp, Homo sapiens
tttcttagggaaaattattgttttatgtttatttatccagtcttgtccaaataaaggcataattaatttgaagaaagcttggaattttaagttgccttgctattgaaagttttttcttattccttaatatttactttctctttatgatagtgacagaaacatttaatttataaaagaaattcttagcaatgctttccaaatggattctgcaaactgtgattcaatagagatgacacctataattacatttgaatattctcttgcatatgttctgacaagattgcattaaatcacactcattgcccctaggtactctttagtgtttttgtttctagcctagattcctacctagaaaaccaatgaattcttcattctacatgaaaccgtattaatagataattctctattatctttcctgtttctgtgttcactagtctttaagggttgagtgarcccccttgtcattgtaattattacatctcacaaatatgtataagattgaatagagataaaatagccttccatagtctgatgtcaaagatattttttctctactttcattctgaaatcgaactaagatattaattctatttctttttggcaaggaagcctttgtctctaacatcttactgaagcaaaaacccaacttttcagtggatttttaaaaattgtagctccctgatgaaatataaaagtaaaaatgaaatttttttgcactaatgaaattatagtatttctgtcaatctaggatccaagtccataaatattaagttcattctaaagtaatttgtcaatgaggcctagaaagtaaatcataataaacaaaattaaaagaagaaaatactggttttccagatccaaaattctattgctaattctaaatgcagcctctctacattagctaactgaaataagtgcctgcaaatagactttctgtaggacacatcagtttcattagtagtgattagttcatataagtgtacattatttcctaaatatcatgtgaaattagaatgtaagattgaattcagaaatatgttatattattttaatgcttgcaataacagatgatcaatttgaaagatggtcttttcttcaacaaagaactgagtaataatattttgcctgtaatttggtagcttttctttccccaatgataaacgtcttttcacttgaaaaacctattgcctctttctcactatttttccacacagaaaaccatacattaggtcacatggcaacttatagtcagtcaccacttaagttaattacaagaaaatattttactatttagccctgaaattttataatgttaaaaaaattgaaaaaaaagttaaaatggaatccaatgcaaattcttctttgtttttcttctttctgagttttccttgaaaacatttcaaagaattgcaaatctttttgttcatgtatcctctgtgtcatgaaaatatagttttcataacatatttataaccaagaacttttattggttataaatagaagacaaatatattcaattaatgtatcaataatttgtacctattaagatgtattaccttatataacattactatt

SEQ ID NO: 25755 - DNA, 1575 bp, Homo sapiens
tttcttagggaaaattattgttttatgtttatttatccagtcttgtccaaataaaggcataattaatttgaagaaagcttggaattttaagttgccttgctattgaaagttttttcttattccttaatatttactttctctttatgatagtgacagaaacatttaatttataaaagaaattcttagcaatgctttccaaatggattctgcaaactgtgattcaatagagatgacacctataattacatttgaatattctcttgcatatgttctgacaagattgcattaaatcacactcattgcccctaggtactctttagtgtttttgtttctagcctagattcctacctagaaaaccaatgaattcttcattctacatgaaaccgtattaatagataattctctattatctttcctgtttctgtgttcactagtctttaagggttgagtgaacccccttgtcattgtaattattacatctcacaaatatgtataagattgaatagagataaaatagccttccatagtctgatgtcaaagatattttttctctactttcattctgaaatcgaactaagatattaattctatttctttttggcaaggaagcctttgtctctaacatcttactgaagcaaaaacccaacttttcagtggatttttaaaaattgtagctccctgatgaaatataaaagtaaaaatgaaatttttttgcactaatgaaattatagtatttctgtcaatctaggatccaagtccataaatattaagttcattctaaagtaatttgtcaatgaggcctagaaagtaaatcataataaacaaaattaaaagaagaaaatactggttttccagatccaaaattctattgctaattctaaatgcagcctctctacattagctaactgaaataagtgcctgcaaatagactttctgtaggacacatcagtttcattagtagtgattagttcatataagtgtacattatttcctaaatatcatgtgaaattagaatgtaagattgaattcagaaatatgttatattattttaatgyttgcaataacagatgatcaatttgaaagatggtcttttcttcaacaaagaactgagtaataatattttgcctgtaatttggtagcttttctttccccaatgataaacgtcttttcacttgaaaaacctattgcctctttctcactatttttccacacagaaaaccatacattaggtcacatggcaacttatagtcagtcaccacttaagttaattacaagaaaatattttactatttagccctgaaattttataatgttaaaaaaattgaaaaaaaagttaaaatggaatccaatgcaaattcttctttgtttttcttctttctgagttttccttgaaaacatttcaaagaattgcaaatctttttgttcatgtatcctctgtgtcatgaaaatatagttttcataacatatttataaccaagaacttttattggttataaatagaagacaaatatattcaattaatgtatcaataatttgtacctattaagatgtattaccttatataacattactatt

SEQ ID NO: 25756 - DNA, 1798 bp, Homo sapiens
tgagctcataacaattactcatccttaaattctagtttgattggaaggcatcagaagtgctgatgccttctgcaaatgcaaagacatttccaaagaccacttgtgttgtttacaagatcattttcttatagtgttaagaaaaaacacttagtaatgtaatctgtttaaaaagatttttgaagaatcgtggtgtgtaatgaaaaaataaaaaataagataaaataaaataaaaagttattttacatgttgggatcattcacatcattttaaatgaacccactgataaggtagtcagtgcctgtctgtgcatcatgctttattcctttactactttctatcaactgctaggcatgatggaataaaatatttcaggccttttttatttcacataaatgttctaaaaaattttagcatgatgcagcagaatatagaattcaaagtgggacaggtgtygtggttcatgcctgtaatcctagcactttgggaggccaaggtggtaggatcgcttgaggccagaagttccagactaccctgggtaacatgccaagacctggtctctaaaaaagaaaaaaaattagcctgatgcagtggcttgcacccgtagtcccagctactcaggacattgaggcgggaggatcacttgagctcaggagttcaagattaccatgagctatgattgtgtcactgcactccagcctggacagcagagtgagattctgtctctaaaaaaaaaaaaaaaaaatagtgaaaggaacctgagcctgggtttagatctgggctccaccattaattgtaagatattgagaaagatagttaatcttcctgagcttcagttccttcatatgtaaaatgtttgtatctcatagggcctttcatgaggattcaacatgacaccaaatataaaagtgcccaccaataattggcactttacaggcaatgagtaaacgttagtgttcttccttccactcccgcacaccatgactgcaaaagtcatggaaaaaaatactttgaagaaaatgcatctaggaaggcagagtttattatgctcaaaagaagtcatctgtcttctatggagatgcactaccatatttagccaaaagtaaagcaggaaaagaaacattttttgcttgaagatttgcagccccatttaggccaaaaaaaaaaatctatgtttatttcttagtgtattattcatcataagtattacctaacattcggaatatgaagggtcagtaatagctactgtgaacaaaatacatgtcgtttgtgatctgaaaagattctcctgtaaggggaccaaagcacctgaaccacagattcttatttacctgctttctataacctgtatttacaagtacagctataaatctaaatttattttatcggaggaactcaaacaattttaggattggaaactagaagttatctaactgtcatatatactttttttgagacagagtcttgctctgttgcccaggctggagtgcggtggtgaatctcagctcactgcaacctccgcctcctgtgttcaagctattctcctgcctcagcctcccaagtagctgagaccataggtgtgcgccaccaagcccagttaatttttgtatttttagtacagacagggtttcaccatattggcgaggccggtctcgaactcctgacctcaagtgatccacccccggcttggcctccccaagtgctgggattacaggcatgagccaccgcacccggcctcatatatacttttcaactaccatttccttcaagaattccttcaaacaatttatatttcatgtct

SEQ ID NO: 25757 - DNA, 1798 bp, Homo sapiens
tgagctcataacaattactcatccttaaattctagtttgattggaaggcatcagaagtgctgatgccttctgcaaatgcaaagacatttccaaagaccacttgtgttgtttacaagatcattttcttatagtgttaagaaaaaacacttagtaatgtaatctgtttaaaaagatttttgaagaatcgtggtgtgtaatgaaaaaataaaaaataagataaaataaaataaaaagttattttacatgttgggatcattcacatcattttaaatgaacccactgataaggtagtcagtgcctgtctgtgcatcatgctttattcctttactactttctatcaactgctaggcatgatggaataaaatatttcaggccttttttatttcacataaatgttctaaaaaattttagcatgatgcagcagaatatagaattcaaagtgggacaggtgttgtggttcatgcctgtaatcctagcactttgggaggccaaggtggtaggatcgcttgaggccagaagttccagactaccctgggtaacatgccaagacctggtctctaaaaaagaaaaaaaattagcctgatgcagtggcttgcacccgtagtcccagctactcaggacattgaggcgggaggatcacttgagctcaggagttcaagattaccrtgagctatgattgtgtcactgcactccagcctggacagcagagtgagattctgtctctaaaaaaaaaaaaaaaaaatagtgaaaggaacctgagcctgggtttagatctgggctccaccattaattgtaagatattgagaaagatagttaatcttcctgagcttcagttccttcatatgtaaaatgtttgtatctcatagggcctttcatgaggattcaacatgacaccaaatataaaagtgcccaccaataattggcactttacaggcaatgagtaaacgttagtgttcttccttccactcccgcacaccatgactgcaaaagtcatggaaaaaaatactttgaagaaaatgcatctaggaaggcagagtttattatgctcaaaagaagtcatctgtcttctatggagatgcactaccatatttagccaaaagtaaagcaggaaaagaaacattttttgcttgaagatttgcagccccatttaggccaaaaaaaaaaatctatgtttatttcttagtgtattattcatcataagtattacctaacattcggaatatgaagggtcagtaatagctactgtgaacaaaatacatgtcgtttgtgatctgaaaagattctcctgtaaggggaccaaagcacctgaaccacagattcttatttacctgctttctataacctgtatttacaagtacagctataaatctaaatttattttatcggaggaactcaaacaattttaggattggaaactagaagttatctaactgtcatatatactttttttgagacagagtcttgctctgttgcccaggctggagtgcggtggtgaatctcagctcactgcaacctccgcctcctgtgttcaagctattctcctgcctcagcctcccaagtagctgagaccataggtgtgcgccaccaagcccagttaatttttgtatttttagtacagacagggtttcaccatattggcgaggccggtctcgaactcctgacctcaagtgatccacccccggcttggcctccccaagtgctgggattacaggcatgagccaccgcacccggcctcatatatacttttcaactaccatttccttcaagaattccttcaaacaatttatatttcatgtct

SEQ ID NO: 25758 - DNA, 1099 bp, Homo sapiens
ggatcctgggatgatacagaagtgtcagagttcctgggtcttgtaggagttccaatgagcatcaatcaaaagtttgattgtaaggcacagaaatcaacttggaccagctaaagcaaaaagaccatttttagggaaatagggatgtgtcacaaagaactgcatctaggtactggaaatcaacaaaaagttccccatctgatctcagcttctctgtgtgtctactacatacactatctttctcctcttttctttcctctctaccccctacctccctcctctctcttttttttttttttgttttttggtttttttatgtttgtttgtttgyttttggagacacggtctccctctgtcacccaggctggagtgcagtggcttaattactgcagcctcaatctcctgggctcaagtgaccctcccacctcagcctcctgaatagctgggaccacaggtgcaagccacagtgctcagctaattaaaaaaaatttttttttcagagatggggtctcactatgttgtccaggctggtctcaaactcctaggctcaagcagtcctcccgtttcagcctcaaaaagtgctgggattacaggtgtgagccatcgcactccactttctctatagttactgagtttgcgtgttacactgagtttacatcttacatttctagccatatcagaaacgacctctgcacctctctttcccaatttgagatttctaatagaaagaatcttgttcacccagcttgggactcattgagttatgaccagtgggatagattttagaagataaacatgtctatagggacttaccgtgtgaattagtgggggagccgcttaccaggcagaggggtctgctgtaaagtgatactgtgactttaaattgaaagtaagcttctagaagagttgaagaggagtggattattgttgaatggatgtataactaatgaagctttaaaggaagtttattagaaagtccatgtccttgtctctttcccaaactcctttagttcccaagtcctgaaagaatctatggataagggaagcagaatactatagtggttaagagcacatgctcgaggttaaactgtctgtattttgg

SEQ ID NO: 25759 - DNA, 1099 bp, Homo sapiens
ggatcctgggatgatacagaagtgtcagagttcctgggtcttgtaggagttccaatgagcatcaatcaaaagtttgattgtaaggcacagaaatcaacttggaccagctaaagcaaaaagaccatttttagggaaatagggatgtgtcacaaagaactgcatctaggtactggaaatcaacaaaaagttccccatctgatctcagcttctctgtgtgtctactacatacactatctttctcctcttttctttcctctctaccccctacctccctcctctctcttttttttttttttgttttttggtttttttatgtttgtttgtttgtttttggagacacggtctccctctgtcacccaggctggagtgcagtggcttaattactgcagcctcaatctcctgggctcaagtgaccctcccacctcagcctcctgaatagctgggaccacaggtgcaagccacagtgctcagctaattaaaaaaaatttttttttcagagatggggtctcactatgttgtccaggctggtctcaaactcctaggctcaagcagtcctcccgtttcagcctcaaaaagtgctgggattacaggtgtgagccatcgcactccacyttctctatagttactgagtttgcgtgttacactgagtttacatcttacatttctagccatatcagaaacgacctctgcacctctctttcccaatttgagatttctaatagaaagaatcttgttcacccagcttgggactcattgagttatgaccagtgggatagattttagaagataaacatgtctatagggacttaccgtgtgaattagtgggggagccgcttaccaggcagaggggtctgctgtaaagtgatactgtgactttaaattgaaagtaagcttctagaagagttgaagaggagtggattattgttgaatggatgtataactaatgaagctttaaaggaagtttattagaaagtccatgtccttgtctctttcccaaactcctttagttcccaagtcctgaaagaatctatggataagggaagcagaatactatagtggttaagagcacatgctcgaggttaaactgtctgtattttgg

SEQ ID NO: 25760 - DNA, 1165 bp, Homo sapiens
agcagggcctgggtggggctgaaatcctagttcctgctggctcgggctcctccctccagaacattctctccccatttcgtgcctgcttcttggattgccccttcctgctgttcattagcagagctcatggggagaatgttggtgccactgggctgtctgtcacagggctgccgagattggacaaatgaatcaaggtctccacagccctcawgtcagaccctaagcgctttgcctccctcaatcccactgcattttttaaccctggggaggctctgacttggctgctgtgaacagtttcccctccattcctcctgcaccagccatcgccacagattgtggcctcttcctcttctccaacatcccaggccccggagtttctctcgccaaatgccgcaagtctcaattggcttcttgagaagctcataaatgcttggtgacatcacggtccccaagttggggagcaagagtgcatcagaggccaacatttctgaggaggagaagtcacaggctctgggattgcctaacaaaggcaccctgtgtgagcgtggtcacagtaccactgttgccgccaccacagaactggaaccgagatggccagggcttccccaaagtctgtctctggttttatgcaacccagtaatgttccccactaaaggcctgagcagatcatcctgcagtgagggccaggaggccctgctggtgctcttgctgtggcccactctggggggtcccccaggctgctgggagaaaacagttaccccagggctcctcaggggtaaggagtggacaggaggcaacagagaagcagccgtgcccagggtgggtggaagctgcacgcacccagctctggggctccagctgtgccccaggctccagctctcctacccgccccccttggcgtccggcccttggggaagctgagagaaagtctcgcctgttctggatgccgcaggcaggatcggccacagtgatctccttcatgtgtcaccgctggctgtaagcgctgtgtttggtttggcaaaacagctatttaaatagcagtgaaatgtgtcactggaaaaaaaattagctcatgtttcctttgccatttcttcatgatttccattaaaagtgtaaccaagggtaataaataacaagatctgtaaaagagaccataggaaaccat

SEQ ID NO: 25761 - DNA, 1165 bp, Homo sapiens
agcagggcctgggtggggctgaaatcctagttcctgctggctcgggctcctccctccagaacattctctccccatttcgtgcctgcttcttggattgccccttcctgctgttcattagcagagctcatggggagaatgttggtgccactgggctgtctgtcacagggctgccgagattggacaaatgaatcaaggtctccacagccctcatgtcagaccctaagcgctttgcctccctcaatcccactgcattttttaacccyggggaggctctgacttggctgctgtgaacagtttcccctccattcctcctgcaccagccatcgccacagattgtggcctcttcctcttctccaacatcccaggccccggagtttctctcgccaaatgccgcaagtctcaattggcttcttgagaagctcataaatgcttggtgacatcacggtccccaagttggggagcaagagtgcatcagaggccaacatttctgaggaggagaagtcacaggctctgggattgcctaacaaaggcaccctgtgtgagcgtggtcacagtaccactgttgccgccaccacagaactggaaccgagatggccagggcttccccaaagtctgtctctggttttatgcaacccagtaatgttccccactaaaggcctgagcagatcatcctgcagtgagggccaggaggccctgctggtgctcttgctgtggcccactctggggggtcccccaggctgctgggagaaaacagttaccccagggctcctcaggggtaaggagtggacaggaggcaacagagaagcagccgtgcccagggtgggtggaagctgcacgcacccagctctggggctccagctgtgccccaggctccagctctcctacccgccccccttggcgtccggcccttggggaagctgagagaaagtctcgcctgttctggatgccgcaggcaggatcggccacagtgatctccttcatgtgtcaccgctggctgtaagcgctgtgtttggtttggcaaaacagctatttaaatagcagtgaaatgtgtcactggaaaaaaaattagctcatgtttcctttgccatttcttcatgatttccattaaaagtgtaaccaagggtaataaataacaagatctgtaaaagagaccataggaaaccat

SEQ ID NO: 25762 - DNA, 1165 bp, Homo sapiens
agcagggcctgggtggggctgaaatcctagttcctgctggctcgggctcctccctccagaacattctctccccatttcgtgcctgcttcttggattgccccttcctgctgttcattagcagagctcatggggagaatgttggtgccactgggctgtctgtcacagggctgccgagattggacaaatgaatcaaggtctccacagccctcatgtcagaccctaagcgctttgcctccctcaatcccactgcattttttaaccctggggaggctctgacttggctgctgtgaacagtttcccctccattcctcctgcaccagccatcgccacagattgtggcctcttcctcttctccaacatcccaggccccggagtttctctcgccaaatgccgcaagtctcaattggcttcttgagaagctcataaatgcttggtgacatcacggtccccaagttggggagcaagagtgcatcagaggccaacatttctgaggaggagaagtcacaggctctgggattgcctaacaaaggcaccctgtgtgagcgtggtcacagtaccactgttgccgccaccacagaactggaaccgagatggccagggcttcyccaaagtctgtctctggttttatgcaacccagtaatgttccccactaaaggcctgagcagatcatcctgcagtgagggccaggaggccctgctggtgctcttgctgtggcccactctggggggtcccccaggctgctgggagaaaacagttaccccagggctcctcaggggtaaggagtggacaggaggcaacagagaagcagccgtgcccagggtgggtggaagctgcacgcacccagctctggggctccagctgtgccccaggctccagctctcctacccgccccccttggcgtccggcccttggggaagctgagagaaagtctcgcctgttctggatgccgcaggcaggatcggccacagtgatctccttcatgtgtcaccgctggctgtaagcgctgtgtttggtttggcaaaacagctatttaaatagcagtgaaatgtgtcactggaaaaaaaattagctcatgtttcctttgccatttcttcatgatttccattaaaagtgtaaccaagggtaataaataacaagatctgtaaaagagaccataggaaaccat

SEQ ID NO: 25763 - DNA, 1053 bp, Homo sapiens
tgagtgcccggacctgcgctcccagctggggagaggaggcagcctgtcctctgtcctggagggtctcctggtacagctggagagaacagccctcacctgtaccccagtgacagaaccaagacacgagtgggaaaagagccagaaggactggttcacaggccagggctgctggaggtcagaggagggagggatcagcaagggctgaggcctcagaggaggtgggcgtgggagttcagacctggagaatcctgcaaaactggagccctggggcaggagggccctctgagatcatttcaagtatgggccgcaggctggtgccagttcacatgctgcaggcagaacccagagaagaaaagggaccaattccaagtctcaccaccagtttgtggccaagctgggcctagaacctagacccttatggtttcccayggtgtgctgagctgaacagaagggcaggatttaactgaacagagggaaggaggatgttttgtttcaacccagacatagacagattccaagcctcccccagacaaggctgagggcctttcatcctggcagacagtctgagccgcctgttgtccagacattctctcaaagagagcgctaatccctacgactggccaccgctcccctctggccttaggatcggaccttaatgagtgccagggaagagcccctgaggccaacagagttagctgtcagccgtcagctaaagaggggaggggccttcagccaccccttcctgttcctaccacacatgtgtgtgcatgtgtgtgtatgtgtgcatgtgtgtgtgtctcccctcactgcagcccctcgttcctctttccacccttttccttttgtcacaaggcctacctcagttggaaatctggagtcagcaggtgacttgcgagcaggcaattcataccagacccatgttccctgaatggaaaagggcaggttgccagcctgaagccatgcaatcagggagaggtggtctggacccagtgcaagatgtagatggtatcgggctgtgctgcagtcagtgctgttagagctcacaggcaatcc

SEQ ID NO: 25764 - DNA, 1053 bp, Homo sapiens
tgagtgcccggacctgcgctcccagctggggagaggaggcagcctgtcctctgtcctggagggtctcctggtacagctggagagaacagccctcacctgtaccccagtgacagaaccaagacacgagtgggaaaagagccagaaggactggttcacaggccagggctgctggaggtcagaggagggagggatcagcaagggctgaggcctcagaggaggtgggcgtgggagttcagacctggagaatcctgcaaaactggagccctggggcaggagggccctctgagatcatttcaagtatgggccgcaggctggtgccagttcacatgctgcaggcagaacccagagaagaaaagggaccaattccaagtctcaccaccagtttgtggccaagctgggcctagaacctagacccttatggtttcccatggtgtgctgagcygaacagaagggcaggatttaactgaacagagggaaggaggatgttttgtttcaacccagacatagacagattccaagcctcccccagacaaggctgagggcctttcatcctggcagacagtctgagccgcctgttgtccagacattctctcaaagagagcgctaatccctacgactggccaccgctcccctctggccttaggatcggaccttaatgagtgccagggaagagcccctgaggccaacagagttagctgtcagccgtcagctaaagaggggaggggccttcagccaccccttcctgttcctaccacacatgtgtgtgcatgtgtgtgtatgtgtgcatgtgtgtgtgtctcccctcactgcagcccctcgttcctctttccacccttttccttttgtcacaaggcctacctcagttggaaatctggagtcagcaggtgacttgcgagcaggcaattcataccagacccatgttccctgaatggaaaagggcaggttgccagcctgaagccatgcaatcagggagaggtggtctggacccagtgcaagatgtagatggtatcgggctgtgctgcagtcagtgctgttagagctcacaggcaatcc

SEQ ID NO: 25765 - DNA, 1053 bp, Homo sapiens
tgagtgcccggacctgcgctcccagctggggagaggaggcagcctgtcctctgtcctggagggtctcctggtacagctggagagaacagccctcacctgtaccccagtgacagaaccaagacacgagtgggaaaagagccagaaggactggttcacaggccagggctgctggaggtcagaggagggagggatcagcaagggctgaggcctcagaggaggtgggcgtgggagttcagacctggagaatcctgcaaaactggagccctggggcaggagggccctctgagatcatttcaagtatgggccgcaggctggtgccagttcacatgctgcaggcagaacccagagaagaaaagggaccaattccaagtctcaccaccagtttgtggccaagctgggcctagaacctagacccttatggtttcccatggtgtgctgagctgaacagaagggcaggatttaacygaacagagggaaggaggatgttttgtttcaacccagacatagacagattccaagcctcccccagacaaggctgagggcctttcatcctggcagacagtctgagccgcctgttgtccagacattctctcaaagagagcgctaatccctacgactggccaccgctcccctctggccttaggatcggaccttaatgagtgccagggaagagcccctgaggccaacagagttagctgtcagccgtcagctaaagaggggaggggccttcagccaccccttcctgttcctaccacacatgtgtgtgcatgtgtgtgtatgtgtgcatgtgtgtgtgtctcccctcactgcagcccctcgttcctctttccacccttttccttttgtcacaaggcctacctcagttggaaatctggagtcagcaggtgacttgcgagcaggcaattcataccagacccatgttccctgaatggaaaagggcaggttgccagcctgaagccatgcaatcagggagaggtggtctggacccagtgcaagatgtagatggtatcgggctgtgctgcagtcagtgctgttagagctcacaggcaatcc

SEQ ID NO: 25766 - DNA, 491 bp, Homo sapiens
gaaaaaaccaaaaccaaaacaaaacaaaataaaaacaatagctactgtgttgtatctcacagttgtgtgggttgcttgggcacagaggggcagttatttttctggtctcacttgaaacatcttatgtagatatcatcagatggtgggtgagaccaaagtcacaaccacaggcatgactgagacactgggagagctgggcmtcattccttacccatgtaacaccagagcatctcctctccatatggatcattgacaatatctcagggtttccgaaaagcacaaaagtgaaagccgctgagccaccttaaagatcaatcctagccgtgcaaaatgccacgtctgcgaaattccactgataaatcaagtcactttatcaaaatcaaggatgaattcaggagacaggtatcattgggagtcgacactttgaaaatcagctaccacactgcagtagctgctctgtttcagacactgagataggcatacaagactaa

SEQ ID NO: 25767 - DNA, 894 bp, Homo sapiens
catgtattttttcaccttttcccttatatcaggaataaaagagaaacttagcaatactaagcatattcttcttttattacaaaagaacagttgttctgatacacatttgtcgaaaggaaaccctcagaatttttagtttactaatagaattggtagaaactgtaagaaaatgttcaaaatattttaagtgcacagtcaggaaagaaaaactttcttttctatatgtgaataattatattgtctaatcttacttaaaaactttttagctcagattttaaaattacatgttacataatattaacmtactcatgatacacatttttatcccatggagcaagttgatgtgattgatctctggaatattatttgacttcatgaagtagacttgtcctctatgcttctaagagtagatttctaattttgttcagttttgttgatatctgtactagactgtaagacttagtaggttaaaacataaagtaaaataactccaattttgtgtaataacattttaaaatgcagtaaaatttccaacaattattaaaaatcaggtgtttttcctgcttaaatattttagccatgtttgaggtgaaccagttagtcctcatgaagtactgtggccaataaaggggctttaatatgtatgatatataaagaatgtactttcatgattaagtatactattaaatttatgtagctttgttcatgtgattgattaaaatcccttttattttatgatagtgcatatgagaataatcttgttaactcagaccctattcattcagaatgcgtgataattaaaaagaggtttgagattatatcctcagttacatgtgaagaaatcttttgctgagcatggggtatgggggaaatattttttttctttttaaataa

SEQ ID NO: 25768 - DNA, 903 bp, Homo sapiens
tggaatgatttctgcttcatctgtaaaggtgaccccttccaaaggcagagcccttttcccaggggttgcagctcccccatctttgcatgagcactgaccattctctccctctcctgtagtgtctggaggcagcagagtgccctgagggccaggagtcagcttccccacctccgggctgaaggctggggctggcttcactcacttaatttggagaatttccatagcccttttagcatattttgcttgggctagcttatttacgccaaccatacatcttatcactgtcataaatttttattcctatggacatgtctaaacttatgggttgaaataacgtaatttacatgctgtttagtatgcagattgggttaatctgcttctgcagattcaccaccaggcctgtgtagcctctctctccctccaggacctcagcctgatttgaatattgcattctgttttgtgtggggcggtgaaagatgtgtggatcacaagcctcccctrgacagctccagcaccccactccctgcgcctgcggtccaccctgcacacagctcccccaggcagaggcctccttcccactgcatgtcactcccacagactccccatctcaaggctaaaaagccatcagcaaccaggtgagctctcttttgtcttaggctgcattctgagatgaggatttcaatgtgaatgaatccagggggcattgaacccaggaagcactggcaggtacagaagggaagaaagccaaaacaatgtgtcctggagcaggttaaccctgtgggcatgtgggctcagtcccactggggactccgggagatggttttgaacatgactcagagttgtcccatagaaagggtgaagaagccagggtctttattctttaactcctcaccatcatttgct

SEQ ID NO: 25769 - DNA, 942 bp, Homo sapiens
tcagtgccttcttgaatctgtctggtctcccatttgggtccctagttacctccattagactgaagctgctgctctgacactgccagctctgtccagcagggcacattttgcctgggacgctgccctctgcttgtgcccctgcctgtgcctcctgtgttaacccagcagaggctttccttcttccaactcaagaccctcctgacttgaacctggaatagtcctctcacctgcctgcctccctggctatgcatgcttggtttgctgaccactaaatgtcagttaaaacttattctcttctcagataaacttgctctgcaccccttgtgcatccacatctcactcatctacttccaggcagtcttgagagctgacaccctctttccctggctgggtcacactgtttccttcccaggatcagaaatagacacgacctccatttttacctgtaaatcccattcttccttttacactcaccctctggtctcctggatggagagtggagtcatcctgtttatagcaacaagttggcaattgcagcaatgccctaagcatcctccrtgcctcaggcctcccaggccctcatctgtattccacagttcagcagggaaagagctttccatagtgcatgtcttgtgcaactaacccagcctcacattcctggcctcccattgttctcacagaatacctatgtctgattcacagccaacagcaccctgtgtgaggcattccccacctgccttcccagtctcaatcctgggcactccccatcattcaccttccctccagccattctagttagagggtcccaaatgcaccctgcttttcaccggcccttctgcttcctgcctgccctactccatacactgaaggaatgtttactcaacctccaccaggaaaccctctttgacctccctcaacagagacagccacatcattctctgt

SEQ ID NO: 25770 - DNA, 942 bp, Homo sapiens
tcagtgccttcttgaatctgtctggtctcccatttgggtccctagttacctccattagactgaagctgctgctctgacactgccagctctgtccagcagggcacattttgcctgggacgctgccctctgcttgtgcccctgcctgtgcctcctgtgttaacccagcagaggctttccttcttccaactcaagaccctcctgacttgaacctggaatagtcctctcacctgcctgcctccctggctatgcatgcttggtttgctgaccactaaatgtcagttaaaacttattctcttctcagataaacttgctctgcaccccttgtgcatccacatctcactcatctacttccaggcagtcttgagagctgacaccctctttccctggctgggtcacactgtttccttcccaggatcagaaatagacacgacctccatttttacctgtaaatcccattcttccttttacactcaccctctggtctcctggatggagagtggagtcatcctgtttatagcaacaagttggcaattgcagcaatgccctaagcatcctccgtgcctcaggcctcccaggccctcatctgtattccacagttcagcagggaaagagctttccatagtgcatgtcttgtgcaactaacccagcctcacattcctggcctcccattgttctcacagaatacctatgtctgattcacagycaacagcaccctgtgtgaggcattccccacctgccttcccagtctcaatcctgggcactccccatcattcaccttccctccagccattctagttagagggtcccaaatgcaccctgcttttcaccggcccttctgcttcctgcctgccctactccatacactgaaggaatgtttactcaacctccaccaggaaaccctctttgacctccctcaacagagacagccacatcattctctgt

SEQ ID NO: 25771 - DNA, 942 bp, Homo sapiens
tcagtgccttcttgaatctgtctggtctcccatttgggtccctagttacctccattagactgaagctgctgctctgacactgccagctctgtccagcagggcacattttgcctgggacgctgccctctgcttgtgcccctgcctgtgcctcctgtgttaacccagcagaggctttccttcttccaactcaagaccctcctgacttgaacctggaatagtcctctcacctgcctgcctccctggctatgcatgcttggtttgctgaccactaaatgtcagttaaaacttattctcttctcagataaacttgctctgcaccccttgtgcatccacatctcactcatctacttccaggcagtcttgagagctgacaccctctttccctggctgggtcacactgtttccttcccaggatcagaaatagacacgacctccatttttacctgtaaatcccattcttccttttacactcaccctctggtctcctggatggagagtggagtcatcctgtttatagcaacaagttggcaattgcagcaatgccctaagcatcctccgtgcctcaggcctcccaggccctcatctgtattccacagttcagcagggaaagagctttccatagtgcatgtcttgtgcaactaacccagcctcacattcctggcctcccattgttctcacagaatacctatgtctgattcacagccaacagcaccctgtgtgaggcattccccacctgccttcccagtctcaatcctgggcactccccrtcattcaccttccctccagccattctagttagagggtcccaaatgcaccctgcttttcaccggcccttctgcttcctgcctgccctactccatacactgaaggaatgtttactcaacctccaccaggaaaccctctttgacctccctcaacagagacagccacatcattctctgt

SEQ ID NO: 25772 - DNA, 594 bp, Homo sapiens
gtcattgaaataaatcatagaaatgatttagatatacattattccttgtgagtaggattatcatcaatttaatctagtttagataattttataagcaagaagcaagcatgcttaaaggtatttaatatggggaaaatcaatattttgctcataactttttgtttatttataaataaagaatgacaaaaaaagtttgagccaagcatggtggctyacgcctgtaatcccaacaatttggaaggcacagactagaggatttcttgagcacaggagttcaagaccaatcttgacaacatagtgagactttatctctacaaaaaataaaaaattagcaggcatagtggtgcatgcctgtagtcccagctatgaaggaacctgaactgggaggattgcttgggtccaggaagctgaggctgcagtgagtgatgatcatgccactgcaattcagcctaggcaacagagtgagaccctgtctcaaaaaagaaacctaaaaaaccttgagtgtaatagtgatttttaaattaatcatctaatgtatactttcagtgaacaaagtgtacagttttaaaaatcttttttctatatttttcttga

SEQ ID NO: 25773 - DNA, 1104 bp, Homo sapiens
ctgaggccgccwgagcctaggtttagtggtagcagagcaagctagaaaaggaggtcagccccagtgatccaagacctcactcatataccaggccaggaacagggaaggggtcagacaaatcccaggcatgagtcccagccccatcactgatcagtcatgtgactttggtggagagagctaaccttgctgagccacggtttccttctctgtaacataagtgcccaccttccagcctcgttgtgagggttacaagcaatggccatgcacagaagcacaaggcacagcgcccagcttagctgattccctgggcctcaggtggaagtcggagcctgccttgaacagggattctgaaaattctgatgcaggtatatattaatctgcattctccagagaagcagaaccagtaggatatatataaatatacaaaaagggatttagtatgagggattggcttatgcaattatggaggctgagatgtcccacaatctaccatctgtaagcaaaagtcccaggaaatccagtgacagagttccagtccaagcccaaaggcctgaacccagaggagccaatggtacaagtccttgcctgagtctgaagatccaagaaccaggagtggcaatgcctgagggcaggagaaaatggatgtcccagctcaagcagagagagagaatctgtccttcctctgcctttttgttctaattggtccctcaacagattggatgacccccatccacacttggagagagatcttcttactcagtctatggattccaatgcttacacctactagaaaggcactcatagacacacccagaaataatgttttatcagctatctgggcatcccttagctcagtcaagttgacacatgaaattaagcatctaaggtatctctgagactgggtagaaaaccatgtgagggtcatggacagactctcatcttccctctcctttctggttttagaaaacaccagcatgatctgccaccccactcctatccctccaggaagagccagtccagccaaaggaaaggtagcaggcacgaagtgctgtgagcaaaccaagtgccagccgacaccagtcagaggatagtgagatgagggat

SEQ ID NO: 25774 - DNA, 1104 bp, Homo sapiens
ctgaggccgccagagcctaggtttagtggtagcagagcaagctagaaaaggaggtcagccccagtgatccaagacctcactcatataccaggccaggaacagggaaggggtcagacaaatcccaggcatgagtcccagccccatcactgatcagtcatgtgactttggtggagagagctaaccttgctgagccacggtttccttctctgtaacataagtgcccaccttccagcctcgttgtgagggttacaagcaatggccatgcacagaagcacaaggcacagcgcccagcttagctgattccctgggcctcaggtggaagtcggagcctgccttgaacagggattctgaaaattctgatgcaggtatatattaatctgcattctccagagaagcagaaccagtaggatatatataaatatacaaaaagggatttagtatgagggattggcttatgcaattatggaggctgagatgtcccacaatctaccatctgtaagcaaaagtcccaggaaatccagtgacagagttccagtccaagcccaaaggcctgaacccagaggagccaatggtacaagtccttgyctgagtctgaagatccaagaaccaggagtggcaatgcctgagggcaggagaaaatggatgtcccagctcaagcagagagagagaatctgtccttcctctgcctttttgttctaattggtccctcaacagattggatgacccccatccacacttggagagagatcttcttactcagtctatggattccaatgcttacacctactagaaaggcactcatagacacacccagaaataatgttttatcagctatctgggcatcccttagctcagtcaagttgacacatgaaattaagcatctaaggtatctctgagactgggtagaaaaccatgtgagggtcatggacagactctcatcttccctctcctttctggttttagaaaacaccagcatgatctgccaccccactcctatccctccaggaagagccagtccagccaaaggaaaggtagcaggcacgaagtgctgtgagcaaaccaagtgccagccgacaccagtcagaggatagtgagatgagggat

SEQ ID NO: 25775 - DNA, 1111 bp, Homo sapiens
tctctccagtttgagggaacccaccttgagaatgccagtaactgataacgggaagggggacagggaagtgctgggtagagaagagtggggtccccggcgagggctccacactcgggccttatgccctcggaccttatgccctcggacctaagtgaaaacaggcactcctgttttcgcctcaatgttgcattttctgagaccactctagctgtcacgtcccccccatcctgtgcccatataaacctgagaccttagcgggcacacacacaagcggctgaatgtcgagaggaacagagtggcagagaatagcagagagcggcagagagtggtggagagcagcagrgcagcacggcagagaaggagggaagaggcgtctgaacatcaagaggagttgcgtccagaacggcggaactccaggggaagattatccccacacccctccaccttcccggaattccagctccccatcccgctgaaagtcacctccactgttcaacaaagtctcagcattcattacctttcaaacagttcatatgacctgatttgtccagtactctggaaaagaatggaggtggggaggttaacactcagctgtccccggacagcaaggctaaaggagctcactataacacatgcccacttgggctctggcacctttccgtctgcgtgctcccccttccctcaggggtttgagcagcggcgggggaggggaccaaacaggtgagccacacccctgccgcacgtcctgcaaggggaatcagaaaaccttcccattttataaccacatgaaagatgacatcgcctgcatcttccatggcttccaatactcggtgccagaatggttctgactgcagagtggtgaatgttcctcctcctaattccctactggccttgatcacctaggcgtggagtttgatacctgcccttaaaagagccagccacttaaagaacatacttctgttcaaaacgtgcacatgtgaggcaccccttcagggattccctggaaaaccttacgagcctttttgaagggggggtaaagctgaaggccctctgggtgtaggtggagctgaaattctgtgccgttgatgactatgcaaatttatttggatcc

SEQ ID NO: 25776 - DNA, 546 bp, Homo sapiens
cactgcctggggttggtggcgcaggccagccactctgagtgcagggcctgctgagcccttgcccacccggaactcacacttgcccgcaagctccgtgtgcagycccagttcccacctgcgcctctccctccaacctcgccacaagcagagggagccagctctggcctcgaccagcccagagaggggctcccacagtgcagaggtgggctgaagtgctcctcaagtgtggccagagtgggcgccaaggctgaggggcgccgagagcaagcaagggctgccagcacactgtcacctctcagcgtgatctcagctcactgcaacctctgcctcccaggttcaaatgattttcctgtctcagcatcccgagtagctgggattacaggtttgtgccaccatgcctggccaatttttgtatttttagtagagacggggtttcatcatattggtcaggctggtctcgaaccccttttttcttaaaaccgtgttattcactatttccatgatggttgaatagagattatcctgctagaatattcccacattcca

SEQ ID NO: 25777 - DNA, 1337 bp, Homo sapiens
tgcatgctatgatgtactcttccaattaactcctgaaatcctttcagtcacatccatccccaagcatcacaccaggaagccatcactgaataagtgrtggcaagagggtcatttcccctaccatctctataaacccaggaagcaattttctcagtccacaaccacaagccacgagctcaaaagcccatgtatatcataaagacagtgtttctgagcaccaccccggccctgaggttagctatgaatggtgcataactctctgtgtgagacgatccatccaatcgcaggtgtgtgtcagtataggcaactaaatagtggctttcaggggctcttttcagcttaagagacaggaacatcataaagcaaaacaggaagagactacgtcctaccggtgtggctgagcctgtttgggagaagttcgatctacaacaccaccccagacatgaaagaacttagacacaccaccctacccccacccccacccccacccagatacacatatacagtctatgataaccgaaggcctgcacccccatcccgggatcctcagtggattcggggccactccactgtgggcaagaccactcccctaagacctctcacagacctattccaacccacagatctactccaacccactgttcctctctgattccctggacttctgggtcccacctcaagctgccttgccccagagaccacagacgcccctctccagccctgactcctgtttttgttctgccttagcatgaggatccctggcttcccagatgctaatgccgaaccctcacacagaccttggagaagaccttgtaggaaaagtcctcaacaaattcacaagaggaaggtctgcatatcaggtcactatgttctaagaaacaatgatcaaactggcttttaagcaatggagggggcttagtggcttatttaactaagaagtcttgttccaacagcttagatggcatcattaccaatctgcctcccaataggttacttagtggttccaaccagtaaccagtcctgcacatgtgtgggattcttatgaaagaaaactgctcccatatagaactcatgtcctcaccctacaccatccacaggatgtgtgattctcttctgaaagcttcagcgaaagaaagctttactttcccagcagccccagaaagatatctcctctatctcactggatgtgactggtcaggcaccatccctcaatcaatcgccgtggacatagctgttttaggcttatatcaatcacggtctacttccagagttgcaagggacgtcatcccacctgaatcatacaatgagccagtgagagggctggcctctatgcattt

SEQ ID NO: 25778 - DNA, 1337 bp, Homo sapiens
tgcatgctatgatgtactcttccaattaactcctgaaatcctttcagtcacatccatccccaagcatcacaccaggaagccatcactgaataagtggtggcaagagggtcatttcccctaccatctctataaacccaggaagcaattttctcagtccacaaccacaagccacgagctcaaaagcccatgtatatcataaagacagtgtttctgagcaccaccccggccctgaggttagctatgaatggtgcataactctctgtgtgagacgatccatccaatcgcaggtgtgtgtcagtataggcaactaaatagtggctttcaggggctcttttcagcttaagagacaggaacatcataaagcaaaacaggaagagactacgtcctaccggtgtggctgagcctgtttgggagaagttcgatctacaacaccaccccagacatgaaagaacttagacacaccaccctacccccacccccacccccacccagatacacatatacagtctatgataaccgaaggcctgcacccccatcccgggatcctcagtggattcggggccactccactgtgggcaagaccactcccctaagacctctcacagacctattccaacccacagatctactccaacccactgttcctctctgattccctggacttctgggtcccacctcaagctgccttgccccagagaccacagacgcccctctccagccctgactcctgtttttgttctgccttagcatgaggatccctggcttcccagatgctaatgccgaaccctcacacrgaccttggagaagaccttgtaggaaaagtcctcaacaaattcacaagaggaaggtctgcatatcaggtcactatgttctaagaaacaatgatcaaactggcttttaagcaatggagggggcttagtggcttatttaactaagaagtcttgttccaacagcttagatggcatcattaccaatctgcctcccaataggttacttagtggttccaaccagtaaccagtcctgcacatgtgtgggattcttatgaaagaaaactgctcccatatagaactcatgtcctcaccctacaccatccacaggatgtgtgattctcttctgaaagcttcagcgaaagaaagctttactttcccagcagccccagaaagatatctcctctatctcactggatgtgactggtcaggcaccatccctcaatcaatcgccgtggacatagctgttttaggcttatatcaatcacggtctacttccagagttgcaagggacgtcatcccacctgaatcatacaatgagccagtgagagggctggcctctatgcattt

SEQ ID NO: 25779 - DNA, 638 bp, Homo sapiens
cacagacctacatttaaaacatacaactataaactcttagaacaagacacaggagaaaattttcaggacctwgggctaggcaatgagttctcagactcaacaccaaaagcatgactcacaaaaggaaaaactaataaataagacctcatcaaaattaaaactttcgctgttaaaagttttgctctgctaaaagttcttttgctttgcccatgagaaaagatgaaaagataagctacagataaggagaaaatctttgcaaaccacatatccaaaaaagggagttgtatctagaaaaaagaattccaaaaacacaacagtaacaacataaaccctccaattagaaaacgaacaaaagacatgaacagacatttcactgaagaggatatacagatggcaaataagcacatgaaaagatgttcaacatcgttagtctttaaggaaatgcaaattaaaaccacatgaggtatcaattacacacctatcacaatgaaaataaacaatggtgatgacaccaaatgctggtgaggatgcagagaaactagattgcaggtgagaatgtaaagtggtacaactactctggaaaacacttgggcagtttaaaagaaaaaaatactgaatgtacaaataccatatgagcc

SEQ ID NO: 25780 - DNA, 638 bp, Homo sapiens
cacagacctacatttaaaacatacaactataaactcttagaacaagacacaggagaaaattttcaggacctagggctaggcaatgagttctcagactcaacaccaaaagcatgactcacaaaaggaaaaactaataaataagacctcatcaaaattaaaactttcgctgttaaaagttttgctctgctaaaagttcttttgctttgcccatgagaaaagatgaaaagataagctacagataaggagaaaatctttgcaaaccacatatccaaaaaagggagttgtatctagaaaaaagaattccaaaaacacaacagtaacaacataaaccctccaattagaaaacgaacaaaagacatgaacagacatttcactgaagaggatatacagatggcaaataagcacatgaaaagatgttcaacatcgttagtctttaaggaaatgcaaattaaaaccacatgaggtatcaattacacacctatcacaatgaaaataaacaatggtgatgacaccaaatgctggtgaggatgcagagaaactagaytgcaggtgagaatgtaaagtggtacaactactctggaaaacacttgggcagtttaaaagaaaaaaatactgaatgtacaaataccatatgagcc

SEQ ID NO: 25781 - DNA, 703 bp, Homo sapiens
catagaacaacaataacaaccccaagccaatgatacgtaagtgaactaacaagtgcagagctgccagataaaacggggaacccagttaactcacatctcaaatgaacagcaaatactttttcagtacatatgaacatatataccaaatactgtataggacatgtacaccaaaaaagtattcactgtttatttgaaatgcaaatttaactgggcaacctgataaatctgacaactctacttatcaagaaacctttaccacagagaataaaaactgagacttaccctcaaattctcattgctgtaaaaggcatcatatgtccaagacactttaggtagggaaaatgaagttgcaggaaacacttggagcataatccctttttagtaaaaacaagtgatgtatatgtatacgtataatggttgtagatacatacgtawaagtctaaaaggatacattccaaattttgggatctggctgaccacaggcatgtatgtgtgcaaggaggatctcactttttattctatattcttttcaactgctcaaactattcataacaaacctgcatcacttttttaatttaaaaagtaaattaacatggggtggactggggggtaggaggtaccgtggatctttacctgcacatggagagggggtctctcacaccaccaagggcctaggttcagttttaagcaactgactgagatc

SEQ ID NO: 25782 - DNA, 1169 bp, Homo sapiens
tgaggaggggtgggcactgacaactacgggctggtcccagcccacgtggggagagctcttcctggaccatagtgtctcagggcctggaggagaaaggagcattacactgaggtcccagaaggcatcccctttttattgtgtacttaggcccctggcaggaaagagactggcttttcggatctgggagaggtggaagcaccccattcccaccttaagtattagcagtcatccagctggaagcaagaagtggacccctcttccttcatggtattgaaggctgagctgtggtcctccttgcctgagaaagggcggcacaggtgatcctctagcccatttcattctagccagccctgtagtaggatggctagtagacaaatcctactgatgccttgggggcaagagaagaaagatcagtaaactggaaataagggctatttcgggataaaagaaaggaaaycttgcctatatgctgtaaaaaaaaacttgcattgtttggcctagagaaggagagcctgaagcatgtcccacactttgcctagaagtggtgactgcttgacctcagaggttcaaaggcagatgccacagcacaaggaattcaggctgtctttccagcacatcccattgaactggaatgaggcttggtggtttgatccctacctggctgctggtccctctcagtttatggaacaactgcctctgcctggggtgtgctaccacctgcaggcagggaccacagcggtgaaggacctcccactgggaggtcatggtggggcctgggtaatagcccctgctgcagatgcgatctcttaactctgtctgccatctctctgttcccagcgtcaagccttttgtgcagcaggcctaccccatccagccagcggtcacagcccccattccaggtgagtgtccctgaaactcctttttgggagcacagccccacacagctgacagctgggtctggcactttgttcccagagtcaagagatgctcaactttgccacagccgcacattgcccctgacttgcaggatccttgggtagcctgtagctcaggagggccacagggtcccgattcccatcagtcatctcccaagagcttttcagatggtttgtttaagaaacaggaagcctcctcactttcactgaagacgctggattatcctcagaagg

SEQ ID NO: 25783 - DNA, 2803 bp, Homo sapiens
aatagaagaaggactcactctggagcttaacttgagcctggagccagtttaggttcctctggccccttgctgtcacctcttagagaaaagggggctgaggtcagaagggtgccttctcccagacacctggatccggcaggaagctgtcctaaatcccaggcttcctgggagagagtcatgaggcacacctatgagtttgctcgtctgtagtcctcatctacaatcctttatgatgtgaagccccacatcagagttaaaggaaacgatgttgacaattataaaataccaaatatagctgagtatatttaaaaatgaacaatggtaaaagccttgaaaatttttccttggatgtgaatggagtctttggcatttggaaatacaataaaatgaattaattgctgcttattaggcagcgagtcaggagaagcatgaatgtgccttctgtcctctgcgttagctgttacctgactgaagtagtctccttttgtatttactcctgccttttctaatgataagcaaattagagatcatagctagaaaaaaaatcaagtgccctccatcctttttccaaaaccataatatagttctgtgatgtttatctgctcaaggggtatggctaataattgcagaggtcatgtggagccacatagtgcaagattagaaagaacatctgcaagattacttcttaggaaagtattttgtgttttgtctttttctgaaaaagtgattgtgcaagcaaattgctgtctttcctcccttgcactatattgctggttaaagcatatttgaagaaaaaccatttaataactatcaagagtttttgaatccatggtcgtttttttgactttactattttttctgacgtatttgatggacttctatatgaataaattacattggaatcctatctttaaattctgaaatcatggcccatgaataaactgtttggaatatattgattatgctgttcattaaaattccatatatggcagctatcatatattgtatatgcaagcatgtaacctttttatgttatctttaaagtttgttcatggtaatacctatagaatatgagataattgattttgcagaataatcaaaagctgagaagcagaaggaagagaagggaacaagactcctctgatatccagactgatccgtgagatgtccttgagttttaagagtacaccactccagccatgtgcatttgtgatattgctgtcctcctgtcatgtatattacatgtagatattttccaaacattgtgtccatttcaaccataaaaaggaggcaatcagcagaacagagagctatagcagcagtagccttgctctccttcatgaaatatgaaagcctgtttttacttagaacaataacaatttgtaaggcttcaggctgaggagtttatgcatgacacagcctgctggaccatgtagcagaggcagcgagaccattgagtgtggtgtgttggaaattggttaatgataaaagtagggtagatgatgagacaggcatcccgagtctcaggtcagttggaccgtttgttcttagaacccatcctctttcccatcaaaagtccatagaccacccatagttcctgctccatgagtgttttctgcattgcaggtcatgggcttgggttggggttcagttggaaaagggagatttcccttttctttccccactccccaaaacatttggctttttatgtcctcattctttgtaatcttagggatagagggacggaaaatcagcaataagtagtcagtgtgaacttgtccaaacatttttctaggatgcaattttcttattcttgctcatatgcacacgcacgcacacatacacactcagaatatttcctgtaacctragacttcacagagcataattccgtattaacctaacagtttttcagcatcaaacaatgtgctcacctttgtaaatctcatccacatctcagaaatgttggtgtgaagacatcttaaaattagtgtggtgtacaaatgtagcatgtgtttgaatttacctagcttcgcttgtttggatagattagcctcctcccctttagagtgaggatgagtagtgaggatagagtcgaatgctttaaagtctgggatattaaaccagagtgacacagaggagcagttcactcaggtctgacacttagagttattttttcaaagccaggcaggtatctctgggctgcaaatgacaatttagaggtccttccattgaaatctcttagcttggcattctttcaaattcccgtttcaggataagtgggtctgtaggcagacccttggttctgatttcaagatatccctggtggtgcttattatttccagggtcacattagattttaaacaaaaacattttaatccttttaattttcaatatatattgtagataaaggggagatgttataaaaattaaatgagtagtcagagtagctcgaccacaaaaggtaggaaatcactggtatagacattttagtccatttgcagaaaattgcctattctcaaataggtaggtcaagtgcagaaagaacctctacttgagatgaaatttcctttctacacttagctttctattaggacagcagaccaaagctgcccaaattttaacatcctgctgtcttctcactagtagtttccttgactatatgcattgaaaagtatctgtttataatggaatttaccctcatagctacaaatacctttaaacccagaaggacattaggcagtaatgtgcaacttttaattttataaataaagaaacttcgaagtcattaaatgacttgatcc

SEQ ID NO: 25784 - DNA, 2803 bp, Homo sapiens
aatagaagaaggactcactctggagcttaacttgagcctggagccagtttaggttcctctggccccttgctgtcacctcttagagaaaagggggctgaggtcagaagggtgccttctcccagacacctggatccggcaggaagctgtcctaaatcccaggcttcctgggagagagtcatgaggcacacctatgagtttgctcgtctgtagtcctcatctacaatcctttatgatgtgaagccccacatcagagttaaaggaaacgatgttgacaattataaaataccaaatatagctgagtatatttaaaaatgaacaatggtaaaagccttgaaaatttttccttggatgtgaatggagtctttggcatttggaaatacaataaaatgaattaattgctgcttattaggcagcgagtcaggagaagcatgaatgtgccttctgtcctctgcgttagctgttacctgactgaagtagtctccttttgtatttactcctgccttttctaatgataagcaaattagagatcatagctagaaaaaaaatcaagtgccctccatcctttttccaaaaccataatatagttctgtgatgtttatctgctcaaggggtatggctaataattgcagaggtcatgtggagccacatagtgcaagattagaaagaacatctgcaagattacttcttaggaaagtattttgtgttttgtctttttctgaaaaagtgattgtgcaagcaaattgctgtctttcctcccttgcactatattgctggttaaagcatatttgaagaaaaaccatttaataactatcaagagtttttgaatccatggtcgtttttttgactttactattttttctgacgtatttgatggacttctatatgaataaattacattggaatcctatctttaaattctgaaatcatggcccatgaataaactgtttggaatatattgattatgctgttcattaaaattccatatatggcagctatcatatattgtatatgcaagcatgtaacctttttatgttatctttaaagtttgttcatggtaatacctatagaatatgagataattgattttgcagaataatcaaaagctgagaagcagaaggaagagaagggaacaagactcctctgatatccagactgatccgtgagatgtccttgagttttaagagtacaccactccagccatgtgcatttgtgatattgctgtcctcctgtcatgtatattacatgtagatattttccaaacattgtgtccatttcaaccataaaaaggaggcaatcagcagaacagagagctatagcagcagtagccttgctctccttcatgaaatatgaaagcctgtttttacttagaacaataacaatttgtaaggcttcaggctgaggagtttatgcatgacacagcctgctggaccatgtagcagaggcagcgagaccattgagtgtggtgtgttggaaattggttaatgataaaagtagggtagatgatgagacaggcatcccgagtctcaggtcagttggaccgtttgttcttagaacccatcctctttcccatcaaaagtccatagaccacccatagttcctgctccatgagtgttttctgcattgcaggtcatgggcttgggttggggttcagttggaaaagggagatttcccttttctttccccactccccaaaacatttggctttttatgtcctcattctttgtaatcttagggatagagggacggaaaatcagcaataagtagtcagtgtgaacttgtccaaacatttttctaggatgcaattttcttattcttgctcatatgcacacgcacgcacacatacacactcagaatatttcctgtaacctaagacttcacagagcataattccgtattaacctaacagtttttcagsatcaaacaatgtgctcacctttgtaaatctcatccacatctcagaaatgttggtgtgaagacatcttaaaattagtgtggtgtacaaatgtagcatgtgtttgaatttacctagcttcgcttgtttggatagattagcctcctcccctttagagtgaggatgagtagtgaggatagagtcgaatgctttaaagtctgggatattaaaccagagtgacacagaggagcagttcactcaggtctgacacttagagttattttttcaaagccaggcaggtatctctgggctgcaaatgacaatttagaggtccttccattgaaatctcttagcttggcattctttcaaattcccgtttcaggataagtgggtctgtaggcagacccttggttctgatttcaagatatccctggtggtgcttattatttccagggtcacattagattttaaacaaaaacattttaatccttttaattttcaatatatattgtagataaaggggagatgttataaaaattaaatgagtagtcagagtagctcgaccacaaaaggtaggaaatcactggtatagacattttagtccatttgcagaaaattgcctattctcaaataggtaggtcaagtgcagaaagaacctctacttgagatgaaatttcctttctacacttagctttctattaggacagcagaccaaagctgcccaaattttaacatcctgctgtcttctcactagtagtttccttgactatatgcattgaaaagtatctgtttataatggaatttaccctcatagctacaaatacctttaaacccagaaggacattaggcagtaatgtgcaacttttaattttataaataaagaaacttcgaagtcattaaatgacttgatcc

SEQ ID NO: 25785 - DNA, 513 bp, Homo sapiens
agatgtcactaaacagtatcttcttcacaaaagagtaatcaccgtcagtgtgataaaagccagagtttttgtgtctagaagtcactaaaccaggtaagrctttgtgtgtgtgtgtgtgtgtgtgtgtgtgtgtgtgtgcgcgcactttctttttaaatcactgtatgacaaaggccagagttttagtttttgtgctttttttttttttttttttttttaaggcagtgtctgggggaacttatcttcccacagtcagcccatggctgaccagctttgatttttgcagggtgtctttgggcctgaatgtttgagcctccctacaggagatggctagagcctagccctcatgctctggaagttagttctggtaaaagctttgcagttggcgctgtggatgccctgtgctacttaacagtggttcctcctttaaaacttggaagacatgtgccaatagggaggaaggttctctgctaaaatgcatttatttgtgaacacctctcacagtgttttttt

SEQ ID NO: 25786 - DNA, 513 bp, Homo sapiens
agatgtcactaaacagtatcttcttcacaaaagagtaatcaccgtcagtgtgataaaagccagagtttttgtgtctagaagtcactaaaccaggtaagastttgtgtgtgtgtgtgtgtgtgtgtgtgtgtgtgtgtgcgcgcactttctttttaaatcactgtatgacaaaggccagagttttagtttttgtgctttttttttttttttttttttttaaggcagtgtctgggggaacttatcttcccacagtcagcccatggctgaccagctttgatttttgcagggtgtctttgggcctgaatgtttgagcctccctacaggagatggctagagcctagccctcatgctctggaagttagttctggtaaaagctttgcagttggcgctgtggatgccctgtgctacttaacagtggttcctcctttaaaacttggaagacatgtgccaatagggaggaaggttctctgctaaaatgcatttatttgtgaacacctctcacagtgttttttt

SEQ ID NO: 25787 - DNA, 513 bp, Homo sapiens
agatgtcactaaacagtatcttcttcacaaaagagtaatcaccgtcagtgtgataaaagccagagtttttgtgtctagaagtcactaaaccaggtaagactttgtgtgtgtgtgtgtgtgtgtgtgtgtgtgtgtgtgcgcgcactttctttttaaatcactgtatgacaaaggccagagttttagtttttgygctttttttttttttttttttttttaaggcagtgtctgggggaacttatcttcccacagtcagcccatggctgaccagctttgatttttgcagggtgtctttgggcctgaatgtttgagcctccctacaggagatggctagagcctagccctcatgctctggaagttagttctggtaaaagctttgcagttggcgctgtggatgccctgtgctacttaacagtggttcctcctttaaaacttggaagacatgtgccaatagggaggaaggttctctgctaaaatgcatttatttgtgaacacctctcacagtgttttttt

SEQ ID NO: 25788 - DNA, 513 bp, Homo sapiens
agatgtcactaaacagtatcttcttcacaaaagagtaatcaccgtcagtgtgataaaagccagagtttttgtgtctagaagtcactaaaccaggtaagactttgtgtgtgtgtgtgtgtgtgtgtgtgtgtgtgtgtgcgcgcactttctttttaaatcactgtatgacaaaggccagagttttagtttttgtgcyttttttttttttttttttttttaaggcagtgtctgggggaacttatcttcccacagtcagcccatggctgaccagctttgatttttgcagggtgtctttgggcctgaatgtttgagcctccctacaggagatggctagagcctagccctcatgctctggaagttagttctggtaaaagctttgcagttggcgctgtggatgccctgtgctacttaacagtggttcctcctttaaaacttggaagacatgtgccaatagggaggaaggttctctgctaaaatgcatttatttgtgaacacctctcacagtgttttttt

SEQ ID NO: 25789 - DNA, 791 bp, Homo sapiens
ggagcccttgtttttaggatattcaacaagtgtttgaggagaattattctggaggctctatctcccataaggaggctgacactacaacacttctggtaggagatgaggagggcttgaactaggtcagaggttatgggagtgacaaggaggggatggatgggaaggacattttacatcagtatattagagattaggcatttagattaggtgtattagagatgagagggctctgtagggttttctgatgagggagaagatgaagatttttcatctgcatggatggcagtgccatttatagacacagttgtacagcaggggagayaagttgtaagggccagagttggggtaatgagttttgagttgtatggagtttgcagtgctttggggcacttcatggggagggcgccagcaggcactgggcaattcagcattctggatttgagaacagtttggaaaacatcatcacagggtttggagttgagaccctggaagtggataagcttgtctaggagacagagggaaaggacagaaaggaagaaaggctaggatagaatccattggaagcattaagagtcattgtcttgagtaagcatcttccatgtcatatgaaaccttacagatgcaggagcaggggagtctgaattcacgtatgtttactaagtgtgctgaagtatttgtctcctggtggtgtgttgatggaagcagatgattttcttgcaagttccaggggtgctgatgtcttggcatgttcctttctgtggccccctagggtgagttaatgggtcagccca

SEQ ID NO: 25790 - DNA, 791 bp, Homo sapiens
ggagcccttgtttttaggatattcaacaagtgtttgaggagaattattctggaggctctatctcccataaggaggctgacactacaacacttctggtaggagatgaggagggcttgaactaggtcagaggttatgggagtgacaaggaggggatggatgggaaggacattttacatcagtatattagagattaggcatttagattaggtgtattagagatgagagggctctgtagggttttctgatgagggagaagatgaagatttttcatctgcatggatggcagtgccatttatagacacagttgtacagcaggggagataagttgtaagggccagagttggggtaatgagttttgagttgtatggagtttgcagtgctttggggcacttcatggggagggcgccagcaggcactgggcaattcagcattctggatttgagaacagtttggaaaacatcatcacagggtttggagttgagaccctggaagtggataagcttgtctaggagacagagggaaaggacagaaaggaagaaaggctaggatagaatccattggaagcattaagagtcattgtcttgagtaagcatcttccatgtcatatgaaaccttacagatgcaggagcaggggagtctgaattcaygtatgtttactaagtgtgctgaagtatttgtctcctggtggtgtgttgatggaagcagatgattttcttgcaagttccaggggtgctgatgtcttggcatgttcctttctgtggccccctagggtgagttaatgggtcagccca

SEQ ID NO: 25791 - DNA, 791 bp, Homo sapiens
ggagcccttgtttttaggatattcaacaagtgtttgaggagaattattctggaggctctatctcccataaggaggctgacactacaacacttctggtaggagatgaggagggcttgaactaggtcagaggttatgggagtgacaaggaggggatggatgggaaggacattttacatcagtatattagagattaggcatttagattaggtgtattagagatgagagggctctgtagggttttctgatgagggagaagatgaagatttttcatctgcatggatggcagtgccatttatagacacagttgtacagcaggggagataagttgtaagggccagagttggggtaatgagttttgagttgtatggagtttgcagtgctttggggcacttcatggggagggcgccagcaggcactgggcaattcagcattctggatttgagaacagtttggaaaacatcatcacagggtttggagttgagaccctggaagtggataagcttgtctaggagacagagggaaaggacagaaaggaagaaaggctaggatagaatccattggaagcattaagagtcattgtcttgagtaagcatcttccatgtcatatgaaaccttacagatgcaggagcaggggagtctgaattcacgtatgyttactaagtgtgctgaagtatttgtctcctggtggtgtgttgatggaagcagatgattttcttgcaagttccaggggtgctgatgtcttggcatgttcctttctgtggccccctagggtgagttaatgggtcagccca

SEQ ID NO: 25792 - DNA, 1020 bp, Homo sapiens
tactttgaagaattggttttggaacactaaagtggataatggaagcagctatttcattcttacagctctggagtaaaatggcgatgatctttggtctaccccaaaactgtcttaaatttcgcttgctttggctaactctgataggaaatagctatgggagagtaggaagggaatggggcttagagcccataattcaaaccctactaccacttctaggtatgagctgtgtaaccctgcacaggttacttatctccgttttctagattttatgcggtccatttggcatgtcctaagcacccagtacatgttcattaattattttttctcttctcaccaggtctggtctatgtcatgttcatctctatcctcattagcgtgatagtctctttgagattatttgatgaccaaattaatggggctggagtgtaacagcttaagagcaggtacattctgaagagtgagaataaactttgtctgtgtattatttactgtttaagaaaaaagaaaaaaacagccctcatggtgttgatggattttgggtaatcaagggagatttggaatatccctctcttttcgacatgtgacagcctgtctaggtgagggccagggtcacaatgatggttctgattgttcctctccaggagggcccctgaactttgacatcatctcctaacgcagttctgccggaggccttcctgtcagagcctcctgggccagaatgggcctctgtggcgagccgggcctgtaactgttcccactcataatgagcagagctgctcctgcaacccggcaggagcacccgagtgggtgtgcatgcacataatgggcccagctgctgtggctgcagcctgtgaatgccttccaagaggccagatgcctggacacatctctcagcagctacttttcctttaagggggatgmtaactccctggcgcttatccctagtacctctgacaaggaaaggaaatccatcctgccctgaacagcagggtgagcaccttcacctgattcagtctcatg

SEQ ID NO: 25793 - DNA, 1020 bp, Homo sapiens
tactttgaagaattggttttggaacactaaagtggataatggaagcagctatttcattcttacagctctggagtaaaatggcgatgatctttggtctaccccaaaactgtcttaaatttcgcttgctttggctaactctgataggaaatagctatgggagagtaggaagggaatggggcttagagcccataattcaaaccctactaccacttctaggtatgagctgtgtaaccctgcacaggttacttatctccgttttctagattttatgcggtccatttggcatgtcctaagcacccagtacatgttcattaattattttttctcttctcaccaggtctggtctatgtcatgttcatctctatcctcattagcgtgatagtctctttgagattatttgatgaccaaattaatggggctggagtgtaacagcttaagagcaggtacattctgaagagtgagaataaactttgtctgtgtattatttactgtttaagaaaaaagaaaaaaacagccctcatggtgttgatggattttgggtaatcaagggagatttggaatatccctctcttttcgacatgtgacagcctgtctaggtgagggccagggtcacaatgatggttctgattgttcctctccaggagggcccctgaactttgacatcatctcctaacgcagttctgccggaggccttcctgtcagagcctcctgggccagaatgggcctctgtggcgagccgggcctgtaactgttcccactcataatgagcagagctgctcctgcaacccggcaggagcacccgagtgggtgtgcatgcacataatgggcccagctgctgtggctgcagcctgtgaatgccttccaagaggccagatgcctggacacatctctcagcagctacttttcctttaagggggatgataactccctggcgcttatccctagtacctctgacaaggaaaggaaatccatcctgccctgaacagcagggtgagcaccttcrcctgattcagtctcatg

SEQ ID NO: 25794 - DNA, 1020 bp, Homo sapiens
tactttgaagaattggttttggaacactaaagtggataatggaagcagctatttcattcttacagctctggagtaaaatggcgatgatctttggtctaccccaaaactgtcttaaatttcgcttgctttggctaactctgataggaaatagctatgggagagtaggaagggaatggggcttagagcccataattcaaaccctactaccacttctaggtatgagctgtgtaaccctgcacaggttacttatctccgttttctagattttatgcggtccatttggcatgtcctaagcacccagtacatgttcattaattattttttctcttctcaccaggtctggtctatgtcatgttcatctctatcctcattagcgtgatagtctctttgagattatttgatgaccaaattaatggggctggagtgtaacagcttaagagcaggtacattctgaagagtgagaataaactttgtctgtgtattatttactgtttaagaaaaaagaaaaaaacagccctcatggtgttgatggattttgggtaatcaagggagatttggaatatccctctcttttcgacatgtgacagcctgtctaggtgagggccagggtcacaatgatggttctgattgttcctctccaggagggcccctgaactttgacatcatctcctaacgcagttctgccggaggccttcctgtcagagcctcctgggccagaatgggcctctgtggcgagccgggcctgtaactgttcccactcataatgagcagagctgctcctgcaacccggcaggagcacccgagtgggtgtgcatgcacataatgggcccagctgctgtggctgcagcctgtgaatgccttccaagaggccagatgcctggacacatctctcagcagctacttttcctttaagggggatgataactccctggcgcttatccctagtacctctgacaaggaaaggaaatccatcctgccctgaacagcagggtgagcaccttcacckgattcagtctcatg

SEQ ID NO: 25795 - DNA, 1010 bp, Homo sapiens
cctctgggttctttctttataccrtgtaccctcagagcacttaaatgacacatctacttctaaaacaccttgcctgctcctccctcaaaagctcagtaccataatcacaggcactgtattctatgtctgcatgtttgaattctggagtgatgttgataagccttttgcaaataacttatgctagaatatttgcagtcagagatgctccatatgcctctcttctgacatacatcttttttaaatatactatgaggtgtggggatttctgtttgaatttataggagattttcataaggagtggaggtggaggtttttccagacccacagttcttgaaattgtgataaaaaatattatgaaccttcaattagattagcacatgattaaaacggtctgaaacctccccgggacatctctgagccattctcaaaacccagttgctccctcaggactctgtagcaggccaggaactgaacatggaaatagtacaaagcaagactgggtttcgtttcctgagccctgttgcacagcgcattacaggtcagaggcaacgcaggctgagctgggctcattctggtaaggtgctgaatttcacacaaggagtcagtgtgtctccggaaaatgcagagggtaactggggcgggggacaccccacaggcctgctctccacccgtgcaccgtgtccacacctagatacccacagaaaaaagcattccagagagaagatgcagaaaactcatctttctgtaacacttgccgaaattccaaaactgaatcctggtttatttcagaggtgctgatgagggaagcaaaccaaggggacagaaggaacaaggcaatgaacagaagcagcaagcaggtgtgagccgctgacagcagcatctcgttcacactttcggaactgtcttgctgcctttgcccctgcatgtagcaaaaggccccgagaaagtggagtgagagacagttcctttgatgacaaggtgagaaggaagaacacagctttgtcagcagg

SEQ ID NO: 25796 - DNA, 1010 bp, Homo sapiens
cctctgggttctttctttataccgtgtrccctcagagcacttaaatgacacatctacttctaaaacaccttgcctgctcctccctcaaaagctcagtaccataatcacaggcactgtattctatgtctgcatgtttgaattctggagtgatgttgataagccttttgcaaataacttatgctagaatatttgcagtcagagatgctccatatgcctctcttctgacatacatcttttttaaatatactatgaggtgtggggatttctgtttgaatttataggagattttcataaggagtggaggtggaggtttttccagacccacagttcttgaaattgtgataaaaaatattatgaaccttcaattagattagcacatgattaaaacggtctgaaacctccccgggacatctctgagccattctcaaaacccagttgctccctcaggactctgtagcaggccaggaactgaacatggaaatagtacaaagcaagactgggtttcgtttcctgagccctgttgcacagcgcattacaggtcagaggcaacgcaggctgagctgggctcattctggtaaggtgctgaatttcacacaaggagtcagtgtgtctccggaaaatgcagagggtaactggggcgggggacaccccacaggcctgctctccacccgtgcaccgtgtccacacctagatacccacagaaaaaagcattccagagagaagatgcagaaaactcatctttctgtaacacttgccgaaattccaaaactgaatcctggtttatttcagaggtgctgatgagggaagcaaaccaaggggacagaaggaacaaggcaatgaacagaagcagcaagcaggtgtgagccgctgacagcagcatctcgttcacactttcggaactgtcttgctgcctttgcccctgcatgtagcaaaaggccccgagaaagtggagtgagagacagttcctttgatgacaaggtgagaaggaagaacacagctttgtcagcagg

SEQ ID NO: 25797 - DNA, 1010 bp, Homo sapiens
cctctgggttctttctttataccgtgtaccctcagagcacttaaatgacacatctacttctaaaacaccttgcctgctcctccctcaaaagctcagtaccatawtcacaggcactgtattctatgtctgcatgtttgaattctggagtgatgttgataagccttttgcaaataacttatgctagaatatttgcagtcagagatgctccatatgcctctcttctgacatacatcttttttaaatatactatgaggtgtggggatttctgtttgaatttataggagattttcataaggagtggaggtggaggtttttccagacccacagttcttgaaattgtgataaaaaatattatgaaccttcaattagattagcacatgattaaaacggtctgaaacctccccgggacatctctgagccattctcaaaacccagttgctccctcaggactctgtagcaggccaggaactgaacatggaaatagtacaaagcaagactgggtttcgtttcctgagccctgttgcacagcgcattacaggtcagaggcaacgcaggctgagctgggctcattctggtaaggtgctgaatttcacacaaggagtcagtgtgtctccggaaaatgcagagggtaactggggcgggggacaccccacaggcctgctctccacccgtgcaccgtgtccacacctagatacccacagaaaaaagcattccagagagaagatgcagaaaactcatctttctgtaacacttgccgaaattccaaaactgaatcctggtttatttcagaggtgctgatgagggaagcaaaccaaggggacagaaggaacaaggcaatgaacagaagcagcaagcaggtgtgagccgctgacagcagcatctcgttcacactttcggaactgtcttgctgcctttgcccctgcatgtagcaaaaggccccgagaaagtggagtgagagacagttcctttgatgacaaggtgagaaggaagaacacagctttgtcagcagg

SEQ ID NO: 25798 - DNA, 620 bp, Homo sapiens
gttcttttagccaacttcttccttatttagtgacattcataacaaatcaatacaaattaaaaccataaacaaaccaatagttaaaacaacatacatttattctctcccagtgctggaggccagaaccctgagatcaaggtgttggcaaggccagcctccctctgaaggctccagaggagaatccttcctcccctcttccagctcctggtagctcctggcagtcctgggtgtccttggcttgtggtgcatcacwccagtctctgccttctccgtgtgtcctctcctctgttgtaaggtcaccagtctttggacttaggacccatcctgatctagtatgacctcaccccagcttaactaattatatctgcaaacaccctatttccaaacaaagtcacattgtgaggttctgggaggatatgaattttagaggacactattcaacccatgagagataccaaaggacaaaattacattatgtcctgtcatttgggcagcagcctttattgaggactggaggtagagaagtaacccactctgaatcacagatgtgctcaggatactttgtcaagaaaacagccattaatttggtttgataaccaatagttgtggataacccatag

SEQ ID NO: 25799 - DNA, 590 bp, Homo sapiens
gtccgcctcgtgtggcctcgctgcatggaagggagacagcagagctcatgctttggcgaggctttccacatgttggaaatgtgacagctgcctggactgctcgtcctggkctttggcaacactgaccacctgtgtgtgaagcagcaggtcattcagtgtctttgagcctcaggatttctctgtaaaaatgaggatatatattcacaatatgaatctcagacaatattagctttgaagtttttagatataaaattgtttatgccatctgtccatggccactcatagaattaaatgaagatctaggagggcaggcgtgtgtctgaggccctctgtgtccccatggagctgtccaaccttgctgtcacacacagtcagtgttttaaaatggaattgactccttgacgatgtgctgccgtttctctttcagtctctctctcatggtttagatacctcgagcctagatggccagggcagtgcattgcgtgcagtgcagacagatgagcattcaaaaggtggcacggtgggggctcctggacattgcatgggctctggagtcagaatgaattctgtccttgctctgtgtgaccttc

SEQ ID NO: 25800 - DNA, 746 bp, Homo sapiens
gaattctgtaccacatttcaaccttgtttattttagtttaatggaatatacattcttagtattgcctgattatttaaatttgttgagggggattgcatgttgctttattggcctgtaaaaatagctagtttggtaagatttggtctcgcaccttccatctttgctaccacattaaagatgagcttgttaaaaaggaaagcatatttctctgattgcccttatggagaaataaagataaaattcaaagaaacaaatgatatgtgttggcatttcttgatgcatagttgcatctttgttattcgacatctctgatccttttagaccccattacataggaaatgatgtcttctatgaagayagggaccttgttttgttcctggctatatctcatgacttaaacattccctggcaaatagtgagtgcttaataattgcttgccgaatgaacaaatataagatctcaagtattcttttttccttcatcccagttggtatagtggttggcttttcctctccttgcccaagcccactataacaaaaatagtaggtatataaatttataggtatgattctgaaagaataaaacttgaatggataaaatggataaaatgtttatctttcatggtagattaaatgctttaaaatgcttataaatagaaatttgacattgcttcaaagaaacctgattttaatcataagtaattttggaagattgacttcaagtagagccacattttgagattttga

SEQ ID NO: 25801 - DNA, 746 bp, Homo sapiens
gaattctgtaccacatttcaaccttgtttattttagtttaatggaatatacattcttagtattgcctgattatttaaatttgttgagggggattgcatgttgctttattggcctgtaaaaatagctagtttggtaagatttggtctcgcaccttccatctttgctaccacattaaagatgagcttgttaaaaaggaaagcatatttctctgattgcccttatggagaaataaagataaaattcaaagaaacaaatgatatgtgttggcatttcttgatgcatagttgcatctttgttattcgacatctctgatccttttagaccccattacataggaaatgatgtcttctatgaagatagggaccttgttttgttcctggctatatctcatgacttaaacattccctggcaaatagtgagtgcttaataattgcttgccgaatgaacaaatataagatctcaagtattcttttttccttcatcccagttggtatagtggttggcttttcctctccttgcccaagcccactataacaaaaatagtaggtatataaatttataggtatgattctgaaagaataaaacttgaatggataaaatggataaaatgtttatctttcatggtagattaaatgctttaaaatgcttataaatagaaatttgacattgcttcaaagaaacctgattttaatcataagtarttttggaagattgacttcaagtagagccacattttgagattttga

SEQ ID NO: 25802 - DNA, 1039 bp, Homo sapiens
ctgcagcctcggtggagcagcctcagctgatgccatgtggaacagagatgaactgccgctgccgagctctgcccacgttgcagaatcatgagcaaatgtgagttttgtggttttaagccacgaagtttagaggtggtttgcaatagaatggaggggactgcttttcttctgagtttcggattgaattctgctttactataacttatttattatatatttgtaacaattctgtctccacccatcagtattcacccgcctaagggcacwgaggcaccaggactctgggaaccttccttgatgtctggatctactgcagtgactcttagtgcagcagttaaaagccagactgtcctagtgtgaatccggccttggctattcattggctggaagacctgagccaagcctgtgcctctgtccgggcatctgggtagatgtcctaggagtccactaagaagaaaactgaggccagtgagaggcagagttgaggcaaggcgcaactctattcccctgctggggaaagcagctctgcccctcggtctgccctgctgaccaggcatgacacaccacctcatcagcagggcccacggcacccagacctggcctggaggggctgagacagcattgctaggggtcagatggtcacagaataagcaacctgagacctggaagggcataagcatcttcccctacctggaatcagaggcatagctgaggtcaaacatcagggcaggagggcctggagggggtcggaaccagaggtcacccgggtgtttggttgggaggggcgtccatctttatcttatccatcaccatcaccattattgctaaacatacagtgagcattactatgtgccgagcactcatctaagccctttatacttctaaacttctaaacttatcctcatagccacttttggacaccagtacattattgtctccacatcatagctgaggactcaagggacagaggggttttgtaacctgctgaagaacatgcagcagctgcatagcatagccaggatttgaaccctggcagcct

SEQ ID NO: 25803 - DNA, 1039 bp, Homo sapiens
ctgcagcctcggtggagcagcctcagctgatgccatgtggaacagagatgaactgccgctgccgagctctgcccacgttgcagaatcatgagcaaatgtgagttttgtggttttaagccacgaagtttagaggtggtttgcaatagaatggaggggactgcttttcttctgagtttcggattgaattctgctttactataacttatttattatatatttgtaacaattctgtctccacccatcagtattcacccgcctaagggcacagaggcaccaggactctgggaaccttccttgatgtctggatctactgcagwgactcttagtgcagcagttaaaagccagactgtcctagtgtgaatccggccttggctattcattggctggaagacctgagccaagcctgtgcctctgtccgggcatctgggtagatgtcctaggagtccactaagaagaaaactgaggccagtgagaggcagagttgaggcaaggcgcaactctattcccctgctggggaaagcagctctgcccctcggtctgccctgctgaccaggcatgacacaccacctcatcagcagggcccacggcacccagacctggcctggaggggctgagacagcattgctaggggtcagatggtcacagaataagcaacctgagacctggaagggcataagcatcttcccctacctggaatcagaggcatagctgaggtcaaacatcagggcaggagggcctggagggggtcggaaccagaggtcacccgggtgtttggttgggaggggcgtccatctttatcttatccatcaccatcaccattattgctaaacatacagtgagcattactatgtgccgagcactcatctaagccctttatacttctaaacttctaaacttatcctcatagccacttttggacaccagtacattattgtctccacatcatagctgaggactcaagggacagaggggttttgtaacctgctgaagaacatgcagcagctgcatagcatagccaggatttgaaccctggcagcct

SEQ ID NO: 25804 - DNA, 835 bp, Homo sapiens
cttgagcccaaggagttcaaggctgcagtaagccgtgattgtgtcactgcactccagcctgggcagtagagtgagaccttgtctctttctctctaacaaaaagagaaaaatctctggagtttcttagttttttccttctttctcccttcatagcacctggcactgcccaagacctgtgactattatgactctttcatccaggatctccttaaacagctgtagttttaaaaattctgtttcatcatccacctagaccattaaaatagttcagaagttctaccattttggcatctaaactctactcgctgtctcatacctagaagtaattaaaaactattttgttcatttatgttggaaagagctttgggaaatacagtgactgggtttctcaggatagagtgcagtgcagcagcactttcatcaccagaaaargaagggccatttgctgtggctcaaaggtcctggctgttcagaacagctccaacttctaatactccgtcccaacagtcaaactcataggttctaaattttgattttgaaaatatatctccatagctgggaggcagttacttttctttagggacaaggacttcttgcctggttggaggtccccagggaagattagaggcagtactgtgaagttgctgtgagatttcacacagggaaaatgagacttgcccttttcattattatttttttcttctacagttacttcttcaacttttttttttctctgaagacagagactaaaatgtagcagtgggttcaatttagacattgacttagaaaataaaatgagcctcaggtaccagcaagtttgaatcaacccccaagg

SEQ ID NO: 25805 - DNA, 835 bp, Homo sapiens
cttgagcccaaggagttcaaggctgcagtaagccgtgattgtgtcactgcactccagcctgggcagtagagtgagaccttgtctctttctctctaacaaaaagagaaaaatctctggagtttcttagttttttccttctttctcccttcatagcacctggcactgcccaagacctgtgactattatgactctttcatccaggatctccttaaacagctgtagttttaaaaattctgtttcatcatccacctagaccattaaaatagttcagaagttctaccattttggcatctaaactctactcgctgtctcatacctagaagtaattaaaaactattttgttcatttatgttggaaagagctttgggaaatacagtgactgggtttctcaggatagagtgcagtgcagcagcactttcatcaccagaaaaagaagggccatttgctgtggctcaaaggtcctggctgttcagaacagctccaacttctaatactccgtcccaacagtcaaactcataggttctaaattttgattttgaaaatatatctccatagctgggaggcagttacttttctttagggacaaggacttcttgcctggttggaggtccccagggaagattagaggcagtactgtgaarttgctgtgagatttcacacagggaaaatgagacttgcccttttcattattatttttttcttctacagttacttcttcaacttttttttttctctgaagacagagactaaaatgtagcagtgggttcaatttagacattgacttagaaaataaaatgagcctcaggtaccagcaagtttgaatcaacccccaagg

SEQ ID NO: 25806 - DNA, 1315 bp, Homo sapiens
taagggaggcctgctgccacgtctggccctgcctcccatggccctgcctcccactccttagtttgagatgctgaatgcagagttagaggaaaaccaggaactggccaacagccgtatggcagagctggagaaactgcaggccgaacttcagggggctgtgcggaccaatgagcgcctcaaggtgggctgctgtaggggctgagaggtcctgggcctgtaagggagggactgagccctgaatcctgttgctgatcccatttgggcatccctgccccaggtggccctgcggagccttcctgaggaggtagtgcgggagacgggggagtaccgcatgctgcaggcccaattctcactgctctacaacgagtctctgcaagtgaagacccagctagacgaggctcggggcctgctgctggccacaaagaactcccacctgcgacacatcgagcacatggaggtatggccctggaacaggcgttagggctgggctaagggccaaaccgttagtgttgacgtgtttgtgccttccgaggccctgtgtgccagccaggggtccctggggaatagattcttcctaagatactgagtcctgaggtgggaccgaggggctgtgtgggtccttaacacatcaacccacagagcgacgagctggggctgcagaagaagctacgcacagaggtcattcagctggaggacacgctggcccaggtacgcaaggagtatgagatgctgcgcatcgagtttgagcagaatctggcggccaacgagcaggcgggtatgtggtgaggatagggcggaggtggggccttatctgggagtgctgggccctggtgtggggctgctgcttatccagatgcaagaggctaaggccttttttttcacagagcctcggcttcctatgcaaaacagggcctgcactgcttggctcccaggcacagtgagggtccgccagctggggtggctgatggagcaggcacatgcagagtctgagctgtcagccctgtcctcattcttctggtctgatgacgtctctgtctctcagatacttgtgttacaaagatttatcaaatgccacctctgagccaggctctgttctagggtttggggttatgccagtgaacaaaacagaattcctgccatgtggagcaacattctggtagaagacagactagaggaagacgaactagtagaagaaaaatggaaaatgtgttagctcttgacarataggaaagtaaagcagaaaaggaagataggaagtatcaggagaaagggtgttgcaattttgaataggaggccagggaaatgtactgggaag

SEQ ID NO: 25807 - DNA, 879 bp, Homo sapiens
  misc_feature (1)...(879): n = A,T,C or G
aaaaagnnnnnnnnnnnnnnnnnnnnnnnnnnnnnnnnnnnnnnnnnnnnnnnnnnnnnnnnnnnnnnnnnnnnnnnnnnnnnnnnnnnnnnnnnnnnnnnnnnnncattagtgtaatattatctccaagagtgtaaaagcgcctcgttacctgaaaaaggttgaattaggctaggctggaaatggaggtcgtggcaccatgcttctaataccatacgctttaagaatagtttaacttctatcagtactggagtaggataagcctatggatggtgtgtagtgttcattcctttctcataccaaggaagggtgtggggtaggaaaaaaagcatgacttttaaacacatctaggtgtgtgtacagtcagctttctattttaattttttaaatttttctataaaaagggtttctttattgtgtcatccttgcacaggggccatgctaatcttttctgtatcctcccagttttagtatatgtgttgccaaagtgagcagtacagtaagcttttcatgtttgtaaagttggtatttatagttttcctgagaaactggggaaatttgtgacatacagtcttgtcatttagccgaggtaggaatttgagtggcgcagtgtaaggcttatgtcctggagtgaatttgtgaattccctgagtatccacctttcagtaggactttgttttccatttttttcttttctttttttttttttttgaaatggagtgtctttctktcagccaggctggaatgcaatggcgcgatctcggctcactgcaacctccgcctcctgatttcaaacagttctcctgcctcagccttgcgagtagctgggattataggcacccaccatcatgcctggctagtttttatatttttgtagag

SEQ ID NO: 25808 - DNA, 568 bp, Homo sapiens
atttgggtatatttaaacgtctcaaaaaactggagtaaataatacgctttgatggatgtttcaggtgtgattcccttcagtacggcggcaccgtggaagtgcagactttcacagggggtgtggtctcagctcacacaggtgagggatctgctaccattttgtgtgctgatgctaatgggagaaatgtttgagataaagcaattataggtccgtattggggattttcactctagagaagcatgggaatgtttgcatgtgatttttctgtagagggtttgattatagtacaacaacagaactgaggctgtgggttgaggaaaacgtggtcaacctggctctaccaggaagagtagcaggttttccttggttttggcatcagactgtggattgaagccctcctaycacttttttactgtgtaaccttccgcaaatcataaggtcttaacttcgtaacttacaaaacagattatattagaatgtaagctacatttaggtcgggaatcctttctgcatggctctatccgttgtgtgtaggaggaagtcaatatttgttatgctgtgaaaagca

SEQ ID NO: 25809 - DNA, 1340 bp, Homo sapiens
  misc_feature (1)...(1340): n = A,T,C or G
gctaattcaatatgatgggtgctcctattaaaagaggaaatttggagacagacacgcatacaagaagaacattatgtaaacataaagatgaccacctactaagcaagtagagatgcctggatcaactccttctctcacagtcctaagaaagaaacaactgtcaaaccttgattttgaaattccagcttccagacctgtaagataaaaaagttctgttatttaagccactcactctgtggtactttgttatggtagcactagaaaactagttcaaatatttgactgtttgatttgttaatgccaaaaaaattgtactcactatggaataattaagttcatttatgaaactgtttaaaaaataaaatcaaagcttcatagttcactgttagttaattaagcttgaagcccatggaaactgctatcttcaaacaataagtaaattgtagtttgcaagtcttgacaggaaaaaagttatactctgaactcaattttttctgcagtatatctaggctgtgcatgtagacttagtttgaaaaattctattaagactttaaatggaattacgcaaataggtacaaaattcaaaagcaaatannnnnnnnnnnnnnnnnnnnnnnnnnnnnnnnnnnnnnnnnnnnnnnnnnnnnnnnnnnnnnnnnnnnnnnnnnnnnnnnnnnnnnnnnnnnnnnnnnnnctaccatgatctacttcttcctttttccgatagcatatcaacatctagtaaatatatttgtttatttattatatatattttttaaccgcctcctctgctactcaaaaggacagaaatttctgtctttttctttttcactgatccacagtacaaataatagtgcctggaccatagaggcactcaataaatatttattgaataaatggctactattaaccctaatttatagatgaagaaactgagacaaaattagtgggcagctggacacagtaagaagaacaggctgccataaggaaaatatgtctgatccttccatatcctctaacatcctccttttaaaaatacaaagaggtcaggcacggtggctcatgcctgtaatcctagcactttgggaggctgaggcaggtgaatcatgaggtcaggagtttgagaccagcctggccaacatggtgaaaccctaaaaatacaaaaccctaaaaatacaaaaaattacctgggcgtggtggcaggtgcctgtaatcccagctactcgggaggctgaggcaggagaactgcttgaacccgggaagcgaaggttgcagtgagctgagatcaagccaatgcactccagcccaggcaacagtgcragactccatctcaaaataaa

SEQ ID NO: 25810 - DNA, 924 bp, Homo sapiens
ctggaacagagaaacagcattacagaaaaacgaagaagatctaaataaagtataaacttttgttaatagtaatgtatcaatatagattcattttatcatataatgtaagatgttaataatcggaaaaactagatgtgtgacatatgggaaactcagtactattttctgaatttttccgtaaatttaaaactgttctataaaataaagtctattttttaaaatgtctatytagccagggtaggtatatattagaatcaataccagaagagaatctttaaaggtggactttatccaagttttatttattgctctatttgtagttattaatttatttattaatatttcctcctgaactgaaaaaggtaaagctgatatattttccctgttttaatcctcaatgtgcttctaatacctactcaacaaatattgaattcctttgagttaaatcagggatgattaaaaattacagagaaagaaagctagttgctaatgtggaataaaaactttctcccatgattattttaagtgttccaatgaaaattttggaagttgctttaaagagtacaatacatttttatgccacagagatatatgcgtccatgtaattatttgtagtgtccatgacattgcttggggcatcttatttaataggctccatttatatcgtcagttatcttttcactatatagcattcattgttgtaacaaaatgtttcaaaatgattatcagaatgtgaacagttagcactggcatcaaaagccaccaaagttggagtaggttgctgtgaggcaaccagagttggtactgcataatgacagacagatgcatagcttactccagagaatagcaaagaagcccattcataagataagcttactaagaaactgagatgtcaagggaaaatcacagccaaggaataaacaa

SEQ ID NO: 25811 - DNA, 924 bp, Homo sapiens
ctggaacagagaaacagcattacagaaaaacgaagaagatctaaataaagtataaacttttgttaatagtaatgtatcaatatagattcattttatcatataatgtaagatgttaataatcggaaaaactagatgtgtgacatatgggaaactcagtactattttctgaatttttccgtaaatttaaaactgttctataaaataaagtctattttttaaaatgtctatctagccagggtaggtatatattagaatcaataccagaagagaatctttaaaggtggactttatccaagttttatttattgctctatttgtagttattaatttatttattaatatttcctcctgaactgaaaaaggtaaagctgatatattttccctgttttaatcctcaatgtgcttctaatacctactcaacaaatattgaattcctttgagttaaatcagsgatgattaaaaattacagagaaagaaagctagttgctaatgtggaataaaaactttctcccatgattattttaagtgttccaatgaaaattttggaagttgctttaaagagtacaatacatttttatgccacagagatatatgcgtccatgtaattatttgtagtgtccatgacattgcttggggcatcttatttaataggctccatttatatcgtcagttatcttttcactatatagcattcattgttgtaacaaaatgtttcaaaatgattatcagaatgtgaacagttagcactggcatcaaaagccaccaaagttggagtaggttgctgtgaggcaaccagagttggtactgcataatgacagacagatgcatagcttactccagagaatagcaaagaagcccattcataagataagcttactaagaaactgagatgtcaagggaaaatcacagccaaggaataaacaa

SEQ ID NO: 25812 - DNA, 1187 bp, Homo sapiens
atccttttgactcaatcacctcctaaaggccccacttcttttaactgccatattggggattagatctcaaaatatgaattttggggagacactaacgtttgaaccatagcagcggccaacataagattgtcaattttttaatataagaagatttaaaaagagcagctgtggccaaacaaacatatgacaaaaagctcatcatcactggtcattagaggaatgcaaatcaaaaccacaatgagataccatctcatgccagttagaatggtgatcattaaaaactcaggaaacaagagatgctgtagaggatgtggagaaataggaaacttttacactgttgggagtgtaaattagttcaagcattgtggaagacagtgtggcgattcctcaaggatctagaaccagaaataccatttgacccagcgatcatacccaaaggattataaatcattctactacaaagacacatgcacatgtatgtttactgctgcactattcacaataacaaagacttggaaccaacccaaatgcccatcaatgatagactagataaagaaaatgtggcacatatacaccatggaatactatgcaaccattaaaaaggatgagttcatgtcctttgcagggacatggatgaagctggaaagcctcattctcagcaaactaacacaagaacagaaaactaaacactgcatgttctcactcacaagtggaagttgagcaatgagaacacatgaacacagggaggggaatatcacacactggggcctgtcagggggtgggggactaggggagggacagcattaggacaaatacctaacataggtgatgggttgatgggtgcagcaaaccaccatggcacgtgtatacctatgtaacaaacctgcgcattctgcacatgtatgccagaacttaaagtaaaattaaaaaaagagcagctatttttcattatcatcaccctttcagaaaagaaatccattataataccttataattacaagtctataaactcagaaaaaaggataatccttcttaagagagaattaagatataatgtactttaatatttgtgtttatgggaaatattaatggatrgagacgcagaaaacttgcaatttaaaattagatttcactgagtgcagtggcttaggcctgtaatcccagcactttgggaggcttaggtagga

SEQ ID NO: 25813 - DNA, 547 bp, Homo sapiens
tgtcttgatggagttctttgcccaagggtacacctgttcttaccacctatttttccctcactgagaggtaacccctgctcttccttgaagccaccagctccagcttgctgctgccaaccctatkgagcctgatcctttctttgttgggggtaccgcatcatctcccagcaaccctcagcttgctttaatgtgggaaataaaatgtgtttcctaagcaaaacacagagccttccctccagctcctgctgcagcctcatggtagatgcattgctgggatcagatggggaaagtatgatcagtaggttggcttcaactttcctgcctcaaccgtctccccttcctcttaaggaaaatttattggtgttgaattcatcagattagcataattctgattgaattttattcttttttttttgagacagtcttactatgtcacgcagggtggagtgtggtgttgcgatcttggctcactgcaacccccacctcccaggttcaagtgatcctcctgcctcagcctcctgagtagctaggactccatgcccggcta

SEQ ID NO: 25814 - DNA, 782 bp, Homo sapiens
gaattcatcatggtctatccctttggggatctcatgtctactaggggtaggggcaggtaaatgaatcagtaatctcaaggtttttcagtaactctacagatgtccaagatgccatggagaagcagagcaggcagtcactggcactggtggtggtatcaaggaaattttctcatgaggtggcattttatgtgtctggaaaattggagtggtagtgagaagtgacagcgtgctggcagtcctcacagccctcgctcgctctccgcgcctcctctgcctgggctcccactttggcggcacttgagcccttcagccccgccgctgcactgtgggagcccctttctgggctggccaaggccggagccggccccctcagcttgcggggaggtgtggaaggagaggcgcgggcgggaaccggggctgcgcgcagtgcttgcgggccagcgtgagttccgggtgggtgtgggctcggcggaccccgcacttggagcggtcggccggctccaccggcccagggcagtgaggggcttagcacctgggccagcagctgctgtgctcaatttctcgaggggccttagctgccttcccgcggggcagggctcggracctgcagcccgccatgcctgagcctccccctgttccgtgggctcctgtggggcccgagcctccctgacgagcgccgccccctgctccacggagcctagtcccatcgaccacccaagggctgaggaatgcgggcgcacggcgcgggactggcaggcagctccacctgcagccccggtgcg

SEQ ID NO: 25815 - DNA, 782 bp, Homo sapiens
gaattcatcatggtctatccctttggggatctcatgtctactaggggtaggggcaggtaaatgaatcagtaatctcaaggtttttcagtaactctacagatgtccaagatgccatggagaagcagagcaggcagtcactggcactggtggtggtatcaaggaaattttctcatgaggtggcattttatgtgtctggaaaattggagtggtagtgagaagtgacagcgtgctggcagtcctcacagccctcgctcgctctccgcgcctcctctgcctgggctcccactttggcggcacttgagcccttcagccccgccgctgcactgtgggagcccctttctgggctggccaaggccggagccggccccctcagcttgcggggaggtgtggaaggagaggcgcgggcgggaaccggggctgcgcgcagtgcttgcgggccagcgtgagttccgggtgggtgtgggctcggcggaccccgcacttggagcggtcggccggctccaccggcccagggcagtgaggggcttagcacctgggccagcagctgctgtgctcaatttctcgaggggccttagctgccttcccgcggggcagggctcggaacctgcagcccgccatgcctgagcctccccctgttccgtgggctcctgtggggccsgagcctccctgacgagcgccgccccctgctccacggagcctagtcccatcgaccacccaagggctgaggaatgcgggcgcacggcgcgggactggcaggcagctccacctgcagccccggtgcg

SEQ ID NO: 25816 - DNA, 968 bp, Homo sapiens
tttcctgaagccataatagaatcattctaaaacagggtttgtgtttttagggctttgataaataatttctgacctaagatacagaaagtccatggcttcagaatcacaaggagaagggtttaaagctggactcagacctgtctcttcacctcttgaagcatctcctctgtatgttagtggtacctccccaactgggcagtgttggaaggtctggtgtacatttagggaatggcaactggtgttaactgtagttgttaagccttttcccagtaatatcttattcctcctaataagatctaaggaagaagatttttgcagatgagaatgagctattacagcaagaagcaaataaactgctggtaggtagggcggttgggctgccctcacctccaccctagtacacatcacacgcactcacacacacacacatatacatgcattcacatttacacactcactcatgctcacacagagcagctttgcttttctatatttttacattgaatatttacatacaatttttgtttaataaaggagttctactggacgggtgtggtggctcaagcctgtaatcccagcactttgggaggccgaggtgggcagatcacgaggtcaggagattgagaccatcctggctaacacggtgaagccccgtctatactaaaaatacaaaaaaaattagccaggcgtggtggcggacgcctgtggtcccagctactcgggaggctgaggcaggagaatggcgtgaacccgggaggcggagcttgcagtgagccgagatcgcgtcactgcactccagcttggtgacaragcaagattccatctcaaagaaaaaaataaaataaaataaaaaataagtaaaggagttctactggtaaatggggaaaaaaagagaatttaaaaatcaatgctctactcattggtttgtttccctacaccaagtacaggaaacttttggcaacttcatg

SEQ ID NO: 25817 - DNA, 556 bp, Homo sapiens
cgtttaaagttccctttttttttaataagatgtttggaaaggagagaagatctaaactgtcctgtgggcagtactgttacccttctcttgtaccaaaaatatgtttataatactaccatgaagtcagatttatgtgcacatgatcttgaaataatccagaaattcccatgtgagaagccagattttcattttactttgaagacaaagcttaaaaatgtaaatggacttagaagagtttacatcttaacttcagtgaacaatagatataatactgtattagtccattatcatattgctatgaagaaattccccaaactgggtcacttataaagaaaaagagatttaacagactcacagttccacatggctgaggaggcctcaaaacatggtggaaggcaaaggaggagcaaaggcatgtcttacatggcaggaggcaagagagcatgtgcaggtgaactgtcctttataaaaccatcagatctcgagacttwttcactgtcacaagaataacatgggaaacacctgctcccatgattcaattacctcccaacaggtc

SEQ ID NO: 25818 - DNA, 556 bp, Homo sapiens
cgtttaaagttccctttttttttaataagatgtttggaaaggagagaagatctaaactgtcctgtgggcagtactgttacccttctcttgtaccaaaaatatgtttataatactaccatgaagtcagatttatgtgcacatgatcttgaaataatccagaaattcccatgtgagaagccagattttcattttactttgaagacaaagcttaaaaatgtaaatggacttagaagagtttacatcttaacttcagtgaacaatagatataatactgtattagtccattatcatattgctatgaagaaattccccaaactgggtcacttataaagaaaaagagatttaacagactcacagttccacatggctgaggaggcctcaaaacatggtggaaggcaaaggaggagcaaaggcatgtcttacatggcaggaggcaagagagcatgtgcaggtgaactgtcctttataaaaccatcagatctcgagactttttcactgtcacaagaataacrtgggaaacacctgctcccatgattcaattacctcccaacaggtc

SEQ ID NO: 25819 - DNA, 586 bp, Homo sapiens
catggcttaataaacattgattaaaataactgaatgtctgaaaaaatagagatctacagttataagaaatgattaaatatatgtaaaatacttctgatgaaagaacagtactgccttatttctagaaaataatcttctgttgtgttgttacttattatatttgtgtaacttcattattcctataacttcaaattccagttacaacaaaataaccattgttgccttgctttacaaaatgctgtttggtatacataaccgttcatttgtctttctggttttctttctctagattttatctttctgggatttgaataaacacrtaaaagttttaaaaattaaaaatatatactaaacgataagataaaaaggatcaattgatacaattgagaaggtccaattcctcacagatatgagtaaataaaacaactatcaaagaacaacagcaacaaaggagaattgcttcaaagtaaaaacttaaatcatagatggaaagggccactgtgcaccaattacaatgaaggaatatcattcagtactgcacattcttgtaacatgtaatattataattgatgaaataatcatcaaa

SEQ ID NO: 25820 - DNA, 1136 bp, Homo sapiens
tgggctggttaataataaatagaaaataaattttaatgaaaaactagtaaaattatttcccccataagttattgaaataaaatagggtttctaagccatatttgagttatggtagttgtaagcattatttttagaggctttgacaacaaaaggtcaagtaaaatattgctgatacatgttttctttctttgtttctctcttgcagattcacaacacataataggtaacttaaaggatctgaaatactttataataaaaactacttacattttagtgtcaataatttaaaaaacaaagacaagatttatacactttggaactgacattttaaaaattacctatttacactatttcgaataatttttcttagcattaactatagcaaagtagaaagtatagtcagtgagtgcaaacacctattggacttcatttcgtctttcatcaacgatctaatggcaactcaaattgtaagatttagcaacataatacatagcaaaaattttgaatccatacaagctattcttagtctatggttcttgatgcagtataacttgtactagctatatttttacaacttggcgaataactgcttggcaaataaactttaacttgttatcaattcctaatgcccaccatctgccttgttcattaagaactgtgaagtttatgggtagtcttataactatgtgatcatcagttatctctggtggcccagatcagaaactttcttacttttaaaactgagtattttgaaatattcttaaacgttttacttaattttaagcttaacaattctcaatctaggataattataatctttggtctttcatttctttttcatttcattttcttcttacctttctattaactcccacccatcaaaaagcaaatcacacatcgcattatttgattggaccatatattcaacattctaarcatgcatatgaaaaagggtgacatttacttacattccaacttcagatgttttactaacttttcatattacacagaccaactctgaattacatcctagattgattttacaatgtatacgtattcaattctgcattaactagttttccgacaggtcaataacaccattccctttaatttattttaaattagatatgcataaa

SEQ ID NO: 25821 - DNA, 553 bp, Homo sapiens
gcacaaaaaccatggaatagaaatttctaaaatgtatttaatagagtaacctttaatctaaatggaaagtcatgctacacagggtgatatgttaatrtatttcctacaaccgtacgtattaaattattaacttccagcacattctcctttaaattacaattttgaagttcgttgtaattcttctttaatagatctatgccttttgattttcacatggatactaatatcactgttactcactttactttgctcatcaaatttctcttttaaaatagtgaataatttattattaaagttgattttcattttttaaaatccatttcttctaaaggggttatttttccaaaaactaataggtgttaggattaaaatataaggactatcgagagtttttcagaaataggatgaaccgtgagacagaaacattagaggccaggaaatttatgagttctggccagcagtcagttaacatcaagtaggtctgtcagcagttatgtcatctattggacttgaatttaggacaaatttatttcattgtagtaaaggaaatctg

SEQ ID NO: 25822 - DNA, 553 bp, Homo sapiens
gcacaaaaaccatggaatagaaatttctaaaatgtatttaatagagtaacctttaatctaaatggaaagtcatgctacacagggtgatatgttaatgtatttcctacaaccgtacgtattaaattattaacttccagcacattctcctttaaattacaattttgaagttygttgtaattcttctttaatagatctatgccttttgattttcacatggatactaatatcactgttactcactttactttgctcatcaaatttctcttttaaaatagtgaataatttattattaaagttgattttcattttttaaaatccatttcttctaaaggggttatttttccaaaaactaataggtgttaggattaaaatataaggactatcgagagtttttcagaaataggatgaaccgtgagacagaaacattagaggccaggaaatttatgagttctggccagcagtcagttaacatcaagtaggtctgtcagcagttatgtcatctattggacttgaatttaggacaaatttatttcattgtagtaaaggaaatctg

SEQ ID NO: 25823 - DNA, 586 bp, Homo sapiens
tgggggcaggggtggtaggtttgtaggacatccccaactcctgggcactggggaagccagcaggctgctcttcgggggttggctgcgggaccgctcagcagcgatctgattggcaagcgggctgcacgccccctggtaaatctatattaaackttttaactgcaatttgtattaatctaaatacagttcaaatattctccatgaaaatttcacatttgagttgagacatcctaaaatgtaaaatacacaatggatttcaaagatttcatatgaaaaaagaatgcaaactatctctaataatttttatattgattacatattgacccaatattttggatatatattgggttaaataaaatatataatttaaaaaaattatgctacatttttgttaaaaaatttaaataaactatatatgaaattatttcttgggatagaaaaggggacatgattaaatatttacttaaacttttttcaaaaacatatctttaaaacacattttcaaacacaacaaaagtattttaattttgaataggtaaaataaacttattcctgctgaaattcaatcatggcatgatttcctttg

SEQ ID NO: 25824 - DNA, 586 bp, Homo sapiens
tgggggcaggggtggtaggtttgtaggacatccccaactcctgggcactggggaagccagcaggctgctcttcgggggttggctgcgggaccgctcagcagcgatctgattggcaagcgggctgcacgccccctggtaaatctatattaaactttttaactgcaatttgtattaatctaaatacagttcaaatattctccatgaaaatttcacatttgagttgagacatcctaaaatgtaaaatacacaatggatttcaaagatttcatatgaaaaaagaatgcaaactatctctaataatttttatattgattacatattgacccaatattttggatatatattgggttaaataaaatatayaatttaaaaaaattatgctacatttttgttaaaaaatttaaataaactatatatgaaattatttcttgggatagaaaaggggacatgattaaatatttacttaaacttttttcaaaaacatatctttaaaacacattttcaaacacaacaaaagtattttaattttgaataggtaaaataaacttattcctgctgaaattcaatcatggcatgatttcctttg

SEQ ID NO: 25825 - DNA, 586 bp, Homo sapiens
tgggggcaggggtggtaggtttgtaggacatccccaactcctgggcactggggaagccagcaggctgctcttcgggggttggctgcgggaccgctcagcagcgatctgattggcaagcgggctgcacgccccctggtaaatctatattaaactttttaactgcaatttgtattaatctaaatacagttcaaatattctccatgaaaatttcacatttgagttgagacatcctaaaatgtaaaatacacaatggatttcaaagatttcatatgaaaaaagaatgcaaactatctctaataatttttatattgattacatattgacccaatattttggatatatattgggttaaataaaatatataatttaaaaaaattatgctacatttttgttaaaaaatttaaataaactatatatgaaattatttcttgggatagaaaaggggacatgattaaatatttacttaaacttttttcaaaaacatatctttaaaacasattttcaaacacaacaaaagtattttaattttgaataggtaaaataaacttattcctgctgaaattcaatcatggcatgatttcctttg

SEQ ID NO: 25826 - DNA, 405 bp, Homo sapiens
ctgctcatcctccccacaggtcaactccttacctgtacacagttatgtccacccagggcctacttggacacctgcacctgatgttcaccaggggcctaggaatccacttggggcctgggatcctacaggggcctaatgttaccctgcagattgagtagccacctggggaccaggtatcaacctggggactgtggttgacctgtgggttaatgtccacctggggactggttattcagctgaggcctgatgcgtacctggggccgaatgtccccctcagggtgaattccacctcagayctgtatgtccacctggggcctgatgtctgccttagatctatgtcccactggggccttgtgatcaccggggactggtatccagctgtggcctgatgacctactgcatcct

SEQ ID NO: 25827 - DNA, 632 bp, Homo sapiens
tgaagccaagcatttagcaggccctttcaaggccaagggcaaatctctacattaaacagaaccaacgccttctcagcatcacccactcccaagccccttcatgattgttatgtttactatcactttttaggtaatattgacagagcaaccccaagtcatgttgatttcctcctggacacttaactgtctttgaggtagctgccaccaggtgagagtagagtcttcagtcatggctgcactttgccagatrtagatgagaatgagtgagagagagtcaattgttgcttacattttttttctattaaagtaatagctatattaagtattattatgagtagttaactatgttttaattactaagccctttctcaaacctttattttacaacctcagtattctgctgttgaaagaaggtaacacacccttcctactccagacttttgataaagcgcaaattcaatagactatgttgagaaggcaacaaatttaagatttaaaaagggattttattagaaaaagaaaacatatactttgagaatggttgtgttctgttgtgagcagtggattgaacaagatgaagataagacttaggttaggaggaagggccaactggagtgggccaggacaagatg

SEQ ID NO: 25828 - DNA, 632 bp, Homo sapiens
tgaagccaagcatttagcaggccctttcaaggccaagggcaaatctctacattaaacagaaccaacgccttctcagcatcacccactcccaagccccttcatgattgttatgtttactatcactttttaggtaatattgacagagcaaccccaagtcatgttgatttcctcctggacacttaactgtctttgaggtagctgccaccaggtgagagtagagtcttcagtcatggctgcactttgccagatgtagatgagaatgagtgagagagagtcaattgttgcttacattttttttctattaaagtaatagctatattaagtattattatgagtagttaactatgttttaattactaagccctttctcaaacctttattttacaacctcagtattctgctgttgaaagamggtaacacacccttcctactccagacttttgataaagcgcaaattcaatagactatgttgagaaggcaacaaatttaagatttaaaaagggattttattagaaaaagaaaacatatactttgagaatggttgtgttctgttgtgagcagtggattgaacaagatgaagataagacttaggttaggaggaagggccaactggagtgggccaggacaagatg

SEQ ID NO: 25829 - DNA, 632 bp, Homo sapiens
tgaagccaagcatttagcaggccctttcaaggccaagggcaaatctctacattaaacagaaccaacgccttctcagcatcacccactcccaagccccttcatgattgttatgtttactatcactttttaggtaatattgacagagcaaccccaagtcatgttgatttcctcctggacacttaactgtctttgaggtagctgccaccaggtgagagtagagtcttcagtcatggctgcactttgccagatgtagatgagaatgagtgagagagagtcaattgttgcttacattttttttctattaaagtaatagctatattaagtattattatgagtagttaactatgttttaattactaagccctttctcaaacctttattttacaacctcagtattctgctgttgaaagaaggtaacacacccttcctactcyagacttttgataaagcgcaaattcaatagactatgttgagaaggcaacaaatttaagatttaaaaagggattttattagaaaaagaaaacatatactttgagaatggttgtgttctgttgtgagcagtggattgaacaagatgaagataagacttaggttaggaggaagggccaactggagtgggccaggacaagatg

SEQ ID NO: 25830 - DNA, 632 bp, Homo sapiens
tgaagccaagcatttagcaggccctttcaaggccaagggcaaatctctacattaaacagaaccaacgccttctcagcatcacccactcccaagccccttcatgattgttatgtttactatcactttttaggtaatattgacagagcaaccccaagtcatgttgatttcctcctggacacttaactgtctttgaggtagctgccaccaggtgagagtagagtcttcagtcatggctgcactttgccagatgtagatgagaatgagtgagagagagtcaattgttgcttacattttttttctattaaagtaatagctatattaagtattattatgagtagttaactatgttttaattactaagccctttctcaaacctttattttacaacctcagtattctgctgttgaaagaaggtaacacacccttcctactccagacttttgataaagcgcaaattcaatagactatgttgagaaggcaayaaatttaagatttaaaaagggattttattagaaaaagaaaacatatactttgagaatggttgtgttctgttgtgagcagtggattgaacaagatgaagataagacttaggttaggaggaagggccaactggagtgggccaggacaagatg

SEQ ID NO: 25831 - DNA, 817 bp, Homo sapiens
cagggaattaaataatgtaatcaaaacactgaaatctgtttcaaagcagtactagttcaccgataaccaaaaaaaaaggagaaaaggggaagttccccctgcttaatgcwtacaaaaaggacttttctatattgctttcacactacattataggtttccacattaccaggactagagaatgaaagaagggtatgaacatatatggaggatatgaccattttaagttttacttttgggataagacatatcagagtaacgcaaaggcaaatttgagtatttcctctcaacatgatatgattggcaaatatatacatacaattagtaatatatatgattaataatatagaaatgtaaggccttgattacaaaaaattacactgggaaatttaatgtacttctttcagaatctgacacatctagtaaaaatataggtaaagatacagacaatttgagtaacataatcaagaaactcaatttaataggaaactgaatcatcctaaatgtaatagttgaatcagatgatgattattgatggatgctaaaaacagtgggtaaaagattgttagaaacaggatatttatactgtccttaagtatcctcccacagattaaaaactaattacaaaggtaaaaatatacctttgcaactgaggttaacactgtcaccacatgaacaaacttagcattaccaatggtggaacaacctgacctcatgtgcccattagcacacaacagtatcgatgaatattcttgccaaaaatattcaacctgaatttcaagccttgacctaatttctagtttacaggaaatatagcacc

SEQ ID NO: 25832 - DNA, 817 bp, Homo sapiens
cagggaattaaataatgtaatcaaaacactgaaatctgtttcaaagcagtactagttcaccgataaccaaaaaaaaaggagaaaaggggaagttccccctgcttaatgcatacaaaaaggacttttctatattgctttcacactacattataggtttccacattaccaggactagagaatgaaagaagggtatgaacatatatggaggatatgaccattttaagttttacttttgggataagacatatcagagtaacgcaaaggcaaatttgagtatttcctctcaacatgatatgattggcaaatatatacatacaattagtaatatatatgattaataatatagaaatgtaaggccttgattacaaaaaattacactgggaaatttaatgtacttctttcagaatctgacacatctagtaaaaatataggtaaagatacagacaatttgagtaacataatcaagaaactcaatttaataggaaactgaatcatcctaaatgtaatagtygaatcagatgatgattattgatggatgctaaaaacagtgggtaaaagattgttagaaacaggatatttatactgtccttaagtatcctcccacagattaaaaactaattacaaaggtaaaaatatacctttgcaactgaggttaacactgtcaccacatgaacaaacttagcattaccaatggtggaacaacctgacctcatgtgcccattagcacacaacagtatcgatgaatattcttgccaaaaatattcaacctgaatttcaagccttgacctaatttctagtttacaggaaatatagcacc

SEQ ID NO: 25833 - DNA, 1027 bp, Homo sapiens
cagaagggaatggtttccttagtatacattccgaattcctttgtaagggaaaaatccacttcatctggtctaagaatacrtaagaacaaatgaaaatgttgtggctggagatgttcctgagttaatatcaggatgtttgcctgctggtttctgttttaccaaacaaaacatagctgccaattcatccatctgtaaaagtgctccttgtggaccccctcaagagaagtactggttattttatttgcagaaaacgttttattgggagttgtttactttctgtgactgaagtggggaacatgagggtccctttacggagccctcatattccatgtgtactctgtattttattgaggctgtttcccagtcagaacagcgtctctctttgtttgtcattccaaatctttcagtgtctttagagctctgagggccctggagagcctcacccaacctctcatccttccatggctgtccccacctctgtgcacttatgagtcaatgttgccgcacttcattacatgctgttcatattacagcattataagattttttcttttaaaagcctatcttcttcaatcgggtagtaagaccattgtgggttgaggcatgtttcatacttcccacataatcactccagacttaaaacagaaccggaaatacatgaaataaaaaattatttttctgttctcaaataaaaattattgttctgttctctacaaatctccaagtgcataatgcagcaaatatgcaggttattctgatattctacactattatttgatgaaaaagaagatttttaaatatgcagtaatagggaaaatcctgtggtcatttaatgattctggtaagtcaaggagaaaaaggtataattaatgagtaaaaccaaagtgcacaaactatgtaaccaggaagagaaattgaaaattgaataacagagacttagatggtgggggatgcaattgtctgggaggggaatttttaaagcaacttctttggattttataaaagttataagcttcaagaaagagga

SEQ ID NO: 25834 - DNA, 1027 bp, Homo sapiens
cagaagggaatggtttccttagtatacattccgaattcctttgtaagggaaaaatccacttcatctggtctaagaatacgtaagaacaaatgaaaatgttgtggctggagatgttcctgagttaatatcaggatgtttgcctgctggtttctgttttaccaaacaaaacatagctgccaattcatccatctgtaaaagtgctccttgtggaccccctcaagagaagtactggttattttatttgcagaaaacgttttattgggagttgtttactttctgtgactgaagtggggaacatgagggtccctttacsgagccctcatattccatgtgtactctgtattttattgaggctgtttcccagtcagaacagcgtctctctttgtttgtcattccaaatctttcagtgtctttagagctctgagggccctggagagcctcacccaacctctcatccttccatggctgtccccacctctgtgcacttatgagtcaatgttgccgcacttcattacatgctgttcatattacagcattataagattttttcttttaaaagcctatcttcttcaatcgggtagtaagaccattgtgggttgaggcatgtttcatacttcccacataatcactccagacttaaaacagaaccggaaatacatgaaataaaaaattatttttctgttctcaaataaaaattattgttctgttctctacaaatctccaagtgcataatgcagcaaatatgcaggttattctgatattctacactattatttgatgaaaaagaagatttttaaatatgcagtaatagggaaaatcctgtggtcatttaatgattctggtaagtcaaggagaaaaaggtataattaatgagtaaaaccaaagtgcacaaactatgtaaccaggaagagaaattgaaaattgaataacagagacttagatggtgggggatgcaattgtctgggaggggaatttttaaagcaacttctttggattttataaaagttataagcttcaagaaagagga

SEQ ID NO: 25835 - DNA, 1027 bp, Homo sapiens
cagaagggaatggtttccttagtatacattccgaattcctttgtaagggaaaaatccacttcatctggtctaagaatacgtaagaacaaatgaaaatgttgtggctggagatgttcctgagttaatatcaggatgtttgcctgctggtttctgttttaccaaacaaaacatagctgccaattcatccatctgtaaaagtgctccttgtggaccccctcaagagaagtactggttattttatttgcagaaaacgttttattgggagttgtttactttctgtgactgaagtggggaacatgagggtccctttacggagccctcatattccatgtgtactctgtattttattgaggctgtttcccagtcagaacagcgtctctctttgtttgtcattccaaatctttcagtgtctttagrgctctgagggccctggagagcctcacccaacctctcatccttccatggctgtccccacctctgtgcacttatgagtcaatgttgccgcacttcattacatgctgttcatattacagcattataagattttttcttttaaaagcctatcttcttcaatcgggtagtaagaccattgtgggttgaggcatgtttcatacttcccacataatcactccagacttaaaacagaaccggaaatacatgaaataaaaaattatttttctgttctcaaataaaaattattgttctgttctctacaaatctccaagtgcataatgcagcaaatatgcaggttattctgatattctacactattatttgatgaaaaagaagatttttaaatatgcagtaatagggaaaatcctgtggtcatttaatgattctggtaagtcaaggagaaaaaggtataattaatgagtaaaaccaaagtgcacaaactatgtaaccaggaagagaaattgaaaattgaataacagagacttagatggtgggggatgcaattgtctgggaggggaatttttaaagcaacttctttggattttataaaagttataagcttcaagaaagagga

SEQ ID NO: 25836 - DNA, 1192 bp, Homo sapiens
taagtaaggggtggcatcacagcatcataggtttgagagctgcagcaatgaaaacatttcatagcttatgccaaaggaggtaaatgatacacagcacacaatggaacaccagaagtagacatggactcagagggggaattgtgaatatattaaaaagagcatttaaaattcctggtgaagagattgtttatgcaatgactttgtagatacttgtggaaaacaaatattgatatctacctttatatcaaaataaattcttgctcgacaaaatttttatttgataggcacagaaacagacatgggatgatcgctcctgatgtgttcagggaataatatgtaaattagtcaggctgtgcagtgggatcaggttggcacagcagatagaggcccatttgtaaagaatcttgaatgcagggcttgagagttgagacttggcagggtgtggcagtggggagattcgcatggaatcgtcctgggtggagctatggtctaggaggatgctcattcttttcacatgctaacctggtgtattacattcttatatagtattatgaagctcctaagtacactgtgattttagagtcttttagctcttctaggagagcctttcatttgtctatttaacatatcaagtgaatgaaaacttgcctaatggaatgttatataaacaaaatgcttattggtgttgtttttagttttctaaagatcagacacggtgcttgatttttttctcggtagtctactagttcctgaagaagaagtttctcattttattcatctctatatttacactgcttgttacaatgcctggcacatccaacaaacatttataatcgccttctgtgccaagacacgagtgcaggaacttagaaaacactgattagcatttattttcctccaagttttgaagtctgacgcagtccctgcccttaacagagcctgtggcccagcaggggagaccagcaactcggtgaggataactccgggatggaaaggctcgacagtgccatgggaaaaagtgcaggaggactgactttggtccagggtgaggatcagsgaagagttcctagaggaagcgtcctatattctgtgtgccagtcatgcggttcctaattctcaactccaatgctgtcctcaaggatctgggatgctggagaaggaaatctgcaaacctcgtttgtcctcagacaga

SEQ ID NO: 25837 - DNA, 2003 bp, Homo sapiens
caatgaaaatgctaaaagggccaattattgcatcataatggacacacctttaacataaagatacatttgtcattttgtggtgttcatctatatttaaatgaaggatacgaatcatcattgtaatggcaactttagctgtcagggatcctgttgcagctctgcctcagccagtctgtgcacagagcatggagcaccagggccatggagcatgtgggctatggaatcgggttgcctattttcatcttgactccatcacttgctgggcaaccttgagtaagtggcttaaccattttctgagcctcaatttcttcacctataaagtgggggtcatactagtgtgtccctgtaattatggggattaatggagataacatgtgaatcacacatagcaatgttaggcataaagtaagtgcctaaggagtatcggtttctttagtgttggatttgttgccatcttgagctccgtgtatccagaatttaaaatggagatcattcttcccagcaatgttttaaaacttgtagagctgagttcttctaggaagacagagtaaaaggacaccatttcagaagaattattgtatctcaggaacctagggcctaagctggtcatggcctctatttctgctgtctaacacacattccagttgtgtccaagttttcttcctccacctccaggaacatccacatattaggaggcctaaattgaattgycatcattattttgccaaggctaccactccaactcaaaattcattagtaccaagggccttagtctgaaaatctgacatgaatctttttggtaaaagagaatctttgagatgttttctttgatggcctcaggctggggcagtaacatgtgtctgagtcctcctcagttcgaggtgggccaaatataagatacttgtggatgtcggccagactgaagtgaggattattctgggtaatcctgatcatggggtcacatcccattcctttcaccgttggagtttagcagacatctacatttgggtagagttttattctcactacatagtggacagctcttctgtctgcccacaggcagactttgctggttctgaatgcttgaaaggtttgactttgcagtctgcttctgctgaggatttcctactcctgagccctagaacactcagatgttaagatgccagaaagatgaggaaacaataaagaaaactgagaagcaaccagtcaaaggaggaagataaaaccctaggagagtgtaggatccaggaggccaagggaaaaaagcgttttgagaatcagagaggggtcaaggacatcaaatgctgctaatggataaagtaagaatgaagactaaacatcattcgttgttggcaatattgattatattagtttggtgcattagttttattctccctttaattataaaatctccatggcattaattattatgcttttttttttttttttttttgcaaaccaagaagctaagattcaagatatataaactgtccagattcacaaagatggggaaaagtcgcagaattgaggtctgcactcaggttttctgaccatgattttccttatctctgataccacatatttatactttggtttaactttaaatcatagatttccttttcctaggaaataacattttaagactcattatacattgtgtatataagattttgttcaacttttaaacttataagtatcaggaatctgatggggatagtatttttagaaaactcctaccctggctgggaatcaagctaggcctgtgcatgaccaccttcaacatttggcccttctaagaatctctggatattttgtggaaagtagaatgggaagagaaaaacatgaaaagtagagacctgatacgtcctcaagcgtagtcctctcccagatcatgtttagctagcttcccctgaagagacttctgagcaagtcaacatgtatcggccagggtcattcagcattctgggcaatggcacaggcattaattctgggacagattaact

SEQ ID NO: 25838 - DNA, 635 bp, Homo sapiens
aactaaaagtaaaaataaatgggacggtgaaattttgtttgtgccttaagggaactcccttttaccctcccactatgttgatgatgtcatgtttgttctaacatatcatctaacaattccctccattcattttttttctccttatttyttttcctttcaagtaacagtatcttcaacaatcgttcggctgttcagaaacttaaaaatcatgagacgattcttaaaggataggaactaacattgatcacacagtgtgtaatcccacatctatatactggcaaatgatggcacaaacaccataaaatctcagcttgctttgtagccattctggattgctgagttctaggcaagtaagagctggtccttcaaagcaccaaaagaaagaaaggaaggaaggaaagaagggaggtgggcagagagggagggaagaaggaaggagagggacggagggagagagagagaaagaaaaagaaagaaagaaagaaagaaagaaagaaagaaagaaaaaagaaagaaagaaagaaagaagaaaaagaaagagagaaagaaagaaaaagaaagaaagagaaaaaagaaagggggagagagaaggagggagggagggagaaaggaaggaaggaagggaaggaaagaaa

SEQ ID NO: 25839 - DNA, 635 bp, Homo sapiens
aactaaaagtaaaaataaatgggacggtgaaattttgtttgtgccttaagggaactcccttttaccctcccactatgttgatgatgtcatgtttgttctaacatatcatctaacaattccctccattcattttttttctccttatttcttttcctttcaagtaacagtatcttcaacaatcgttcggctgttcagraacttaaaaatcatgagacgattcttaaaggataggaactaacattgatcacacagtgtgtaatcccacatctatatactggcaaatgatggcacaaacaccataaaatctcagcttgctttgtagccattctggattgctgagttctaggcaagtaagagctggtccttcaaagcaccaaaagaaagaaaggaaggaaggaaagaagggaggtgggcagagagggagggaagaaggaaggagagggacggagggagagagagagaaagaaaaagaaagaaagaaagaaagaaagaaagaaagaaagaaaaaagaaagaaagaaagaaagaagaaaaagaaagagagaaagaaagaaaaagaaagaaagagaaaaaagaaagggggagagagaaggagggagggagggagaaaggaaggaaggaagggaaggaaagaaa

SEQ ID NO: 25840 - DNA, 1098 bp, Homo sapiens
agcaagcattcatctcacatagctcgggttttactgagttggttcctctgcctgcttctctgacttgtttacccgtggagtacacgagaactacaacccccagcatgcactgcggtcagtggcttcctccggggcttcccatccagaatcctttattcccaccagtcaccactctaccctctccccgaagcaatttccagccatctakctgggaactgtaatctttccacgtcagggaaaaagacgatatagaaggttggatgggtagtattcagactccctcggaaaacaaagcacactcatacaggaccagaaaccccgtttactgactgggaccgcctgtgggtctcagagtcagagagccaagagggagtaggaggcaaaaccaatgtcttcctaccttttcaggaggtcacctggctcagtgagtttcagcagatgagagagagtatgctcttctccctttctctctttttaaaaatccaactccacctcctttattttgaatggaaatccctcctgattgtgctgtgtgcccagaggaagacagcgactgaaccctacaagataagttttccctctagtgaagctaatgagggcttgcaaagagcagtagaaagacatgaaggttttaaatgccttccttcttggttccatcaaacaggcttatccatgcccttccagtgcaatcagccactgctgcagctgccacagctgctgctactggtcagatctagcagcctgctaaagcggattatgctgagaaacacacacgcacacgcacacattcacacatacatgcatgcacgcaggcacacacacacatgcacacacacaacaactatatttccttccacgatagggagttgaaggttgagttagaagggagagaacaaaaagggagagaacatgtaaggacaataatatatgtggggtagactcatctttacagccttgaagttgtccaaactgcagacaaaagggggaacactttcaatccaattggaaacctttctctggtgctcttgtttatagcaagtaggtgtgttatataagggcctggctcaacaccagcctcctttaggagtcggctttctg

SEQ ID NO: 25841 - DNA, 754 bp, Homo sapiens
agtttgtagctacccaaaagtttcattactagagaactggctaatttgaccaagaaacaagaaaaaaagatccaactactaaaatctgaaataagtgggaaggcattcctgctaacctataaaaatgcaaagaattataagggaataccgaaaacattatagaaaaaaatcaaaagaatacacacaaatacagctatatctcaataacatgttcaatatagttgaaggattctggagcaacattgtgaataagttgccttgtagacactaaaaattaacaatgcaagaccagattgaaagcaattccatttgcaaaagatatcaaagcattcaaaacaagaatacatttaacatgataagtgcaaggcttgtaaactgaaaactgcattaaaggtaattttcaaagacctaaataaatggacaaatttttcgcattcatgaattggaaacttaatgttggtaagatggcaatatttctaaaccaatttaatgattcaacacataccctatcaaaatctcagctgcaatgtttttggagaaacaagcragttgttcctaatattcatatggaaatgaaaggaatccagaataaaccaaacaatgttgaaaataataacaaaagttggaggactcaaattgcttcatttaatgttattacatacctatggtgatcaagatactgtggtgctgctataaagatcaaaatataaattaataaagaaaattactacaaaatgaactccagacaaccaaa

SEQ ID NO: 25842 - DNA, 1661 bp, Homo sapiens
atatattatatactatatattatatataaaatatawatatattatatactatatattatatataaaatatatatatatatataaatatgtatatatattagacagagtctcaccctgtagccccagctggagttcagtggcacaatctcagctcactgcaacctccgcctcccagattcgagccattctcctgtctcagcctcccaagtaggtgggattacaggcacacaccaccacacccagctaatttttgtaattttagtagagatggtgttttaccatgttgatcaggttggtctagaactgctgacctcaagtgatccacccactttggcctcccaaagtgctggagttacaggtgtgagccactgcccctggccaacatgtatttcaaatataggaaaatcatagccacaacaggtattgaccttgtgaagataaatttcaagtggcaatatctgatatacacaagttacgtaaaaagaagtcatgttaaaattagtttccataaatagaaaatagaaaacattgatctaattggtaaaattggtgatttgagttagttatgaatcttaatcaaaggaatgcaaaaatgtatttttcaagtgattagtaatctaacctaattaattattatctaataaatgttttaatcagtagataggaaaagttctgatgggttacaattgcctttgtaaataggtgattttaaaatgcttgaaacatttcaactatttttaaccccagcccactcttataatgtttaaaatatacaatttgcagccaaacctgttagttgagattttcattaaaaatatattcttaacatatgcaaataagctaggctagctttccttgttttgttactcttgggatccctatactgttgttaatgtaaagtaaatgtgttcaaaaatatgcccttttacattctttctctgctccccctcttactttttttttgtagattctctttcttttacctcttgtgtttctgcacagttaaatattgattctgcagatcctcctcaaagcagaactttgttgcagaagaaagcctatgtaattgttcagaagacctaaactgagtccaccattactgcagttttcttgcactcatgcaattgtagactgagaaaatttgcatcttgttttcagattttcctgaaacttttttgccaattgaagaattcttcattttatgagttagtatctttggaagcctgttttgtttttttgctttttatttattgattttttaaatttttaacttttatttcaatttcatggatacgagtgccagtttgttacacaggtaaatttgtgttatgagggtttgttgtacagattattccatcacccaggtatgaagcatagtatccactcattatttttcctgattatgtgctttctctcactctctaccctccagaaggccccagctatattgctcctctctgtgtccacgcgttctcatcatttagctcctaccaataagtgagaacatgcggcatttggttttctgtttctgtgttagtttgctgaggataatggcctccagctatatcaatgtccctgcaacagaaataatctcattctttttgatggctgcatagtattccatgttgtatatgtaccacattttctttatccagtctatc

SEQ ID NO: 25843 - DNA, 1661 bp, Homo sapiens
atatattatatactatatattatatataaaatataaatatattatatactatatattatatataaaatatatatatatatataaatatgtatatatattagacagagtctcaccctgtagccccagctggagttcagtggcacaatctcagctcactgcaacctccgcctcccagattcgagccattctcctgtctcagcctcccaagtaggtgggattacaggcacacaccaccacacccagctaatttttgtaattttagtagagatggtgttttaccatgttgatcaggttggtctagaactgctgacctcaagtgatccacccactttggcctcccaaagtgctggagttacaggtgtgagccactgcccctggccaacatgtatttcaaatataggaaaatcatagccacaacaggtattgaccttgtgaagataaatttcaagtggcaatatctgatatacacaagttacgtaaaaagaagtcatgttaaaattagtttccataaatagaaaatagaaaacattgatctaattggtaaaattggtgatttgagttagttatgaatcttaatcaaaggaatgcaaaaatgtatttttcaagtgattagtaatctaacctaattaattattatctaataaatgttttaatcagtagataggaaaagttctgatgggttacaattgcctttgtaaataggtgattttaaaatgcttgaaacatttcaactatttttawccccagcccactcttataatgtttaaaatatacaatttgcagccaaacctgttagttgagattttcattaaaaatatattcttaacatatgcaaataagctaggctagctttccttgttttgttactcttgggatccctatactgttgttaatgtaaagtaaatgtgttcaaaaatatgcccttttacattctttctctgctccccctcttactttttttttgtagattctctttcttttacctcttgtgtttctgcacagttaaatattgattctgcagatcctcctcaaagcagaactttgttgcagaagaaagcctatgtaattgttcagaagacctaaactgagtccaccattactgcagttttcttgcactcatgcaattgtagactgagaaaatttgcatcttgttttcagattttcctgaaacttttttgccaattgaagaattcttcattttatgagttagtatctttggaagcctgttttgtttttttgctttttatttattgattttttaaatttttaacttttatttcaatttcatggatacgagtgccagtttgttacacaggtaaatttgtgttatgagggtttgttgtacagattattccatcacccaggtatgaagcatagtatccactcattatttttcctgattatgtgctttctctcactctctaccctccagaaggccccagctatattgctcctctctgtgtccacgcgttctcatcatttagctcctaccaataagtgagaacatgcggcatttggttttctgtttctgtgttagtttgctgaggataatggcctccagctatatcaatgtccctgcaacagaaataatctcattctttttgatggctgcatagtattccatgttgtatatgtaccacattttctttatccagtctatc

SEQ ID NO: 25844 - DNA, 592 bp, Homo sapiens
ccgagtggctgttgccattttacctcttcaaggagcctgaatctaaagccaacacagcaaaaggcagacccaagaggtggagagagatcagctgctgctgacatcctttcagtcctgaatcaagtttgttcactagattcttaactacaagagacagagaggaaaacaaaacccctttgctcaggccagttggagtcagggttttctaacatttttgcaagcgaacaagtctcaagtgattcgccctactatttaaaaatgcatatgagaggctgggcgcggtggctcacgcctttaatcccagcactttgggaggccgaggagggcgaatcacgaggtcaggagatcaagaccatcctggctaacacggtgaaatcccgtctctactaaaaatayaaaaaaattagccgggcatggtggtgggcgcctgtagtcccagctactccagagggtgaggcaggagaatggtgtggacccaggaggcagagcttgcagtgagtgagccgagatctcgctactgcattccagcctgggtgacagaggagactccgtctcaaaaaaaaaaaaaaaaaaaatgcctatgaatgacggc

SEQ ID NO: 25845 - DNA, 560 bp, Homo sapiens
ctgatgtcaaattccttttgactttttttggatatcctttaattatttactagagtagrgatgttttaaggcatggaagggcgggtggagggaagaaagctgacatatctgaacaagtgagtaatttataatggaactaaaatattcataaaatgtcaactcagatagttcaattaacacaatccattctatttccacttcaaattgtaaattgaagcctcaaataatgtttgttttgcaatggacaatgcattgctaaactaaacaagaaatgtgaagtcactacctttgtgcttagttgatctctttagatctggagtgggaaatagactgtttattatacatcagtataaatagcaaaaatgagaactctgttaagtgaattcattttctaagccaatgattcttcagtatttttcaggaagacaggtcactgatttagcttggttacttgacaacatttttcataggtttgttaggtttttactctttgtatttttgtaggagagaaggctaaggtgcacaaaattggatgactcataatccttaatttatgatac

SEQ ID NO: 25846 - DNA, 553 bp, Homo sapiens
gtgccacagtgttattgccatgagctgtattttgttatttatagaggctataaaagtacacagcactttacaaaccacaaaacgcaggcaccagagcctggaggaactcagcctaaattacatacaaacagtggtggggaaaacagaaaaatacatagttgcaccaaattttggcaatagcaattctgggagacggtaagataagaaaaaaactatttttttttttttttttttttttttttttggaaacaaagtctcgctttgtcacccaggctggagtgcagkggcgccatctcggctcactgcaagctccgcctcctgggttcacgccattctgcctcagcctcctgagtagctgggactacaggtgcccgccaccacgcccggctaattttttgtatttttagtagagacggggtttcaccacgttggccaggatggtcttgatctcctgacctcgtgattcgcccgccttggcctcccaaagtgctgggattaaaggcatgagccatcgcgcccggcctaagataagaaaagaactattaaatagtaa

SEQ ID NO: 25847 - DNA, 604 bp, Homo sapiens
attatctgaagattaaacccatttcagtatcatcctgtgaatgcacttgtaggatgggaagggcccagagaggagtttgcctggtccttgaatggtcccattgtgttgggtggggaagaaaaaaaaggaagggggagcttattaaaattattacctagaacttgtattaatagcatcattgaagataaaggctggctgggcatggtaggtcatgcctgtaatcatcctagcactttaggaggccaaggcaggcagatcgcttgaacccaggagttcgagaccagcctgggaaacatggtaaaaaccccttctctaaaaacaatataaaaaattagcctagtgaggtggcatgcaactctgccacctacttgggtcccagctacttgggaagctgagataggaggatygcttgagctcaggaggacaaggctgcagtgagtgagttctgactgtgccactgcactccagcctgtgtgcaacacgagactctgtctcaaaaaaaagggttacattttcaaaacaatggattatacattatggttctatcacaatcatgaccaaaaaaaatgtagagctcatgcagggctcacaaactgctcatgcg

SEQ ID NO: 25848 - DNA, 626 bp, Homo sapiens
cacgataagccattacatttcaagagtttcagtggagaaagaacagagagagagagctaaagagtgagagagacagagagagcgagagagagagacagagagagagcgagagacacagagagcgagacagagcgaaagagcgagagagacagagcaagagagtgagagagagacacacagagagagcgagagacacagcraaagagcgagagacagagagagcaagacagagagagtgagacagagtgagacagagtgagacagagtgagagcaagagagacagacagggagagtgaaagagacagagcaaaagagtgagacagagcaagcaagagagagacagagcgagagagtgagacagagagagtgagacagagcgagagagacagagagcgagagagagacaggaagagtgaaagagacagagggaaagagtgagacagagagcaagcaagagagagacagagcgagagagcgagacagagcaagagacagagagcaagagacaaagagcgagagagacagcgaaagagcgagagagagcaagagagacagagcgagacagagagcgagagattcagggagagactgagagagacagagtgaaagagacagagagacagag

SEQ ID NO: 25849 - DNA, 733 bp, Homo sapiens
aggagcctccaagttaagccccattggccaggaaaggccctacatgagttatgtgctcattctccaacagattaaggtagcgaggaggatggaatgtgatgattaacttagctaagtcatcacctgtaactcctctagagcccaggaatttacgcagcttcacctgaaggacagaaccacttctcacccatgtggtggctttgtagaaattgaaaaaaaaaagatgccccttctttgtaagaaaacatagccccacggtctctcagaatcaagacaggctggaatttagccctttcttgtcctcttagttgtgtgcctttgtgcagtgcacaaactagacagtcytattctgtggcccactgtacatgaaagggcagtagggcagagtggttctcaacccaggggaccaaggaccacgctttgggaaattttatcctaaggccttactgcaataatttagaaccaggagtctcaactgagactagagaagcatctgatgcaagagaaaattcaggtaaatgttgtttcctgagatgtgcccgtttacatgactccagccacggctcatggcagtttattatggtgggaagagcaaagggttaagagttaagccacactagaactggctgtctctgcctcaaactggctgggtgacatttagcctacagtgtcagagcctttgttttcttttctccgggatttgaggattaaattagttaagatatgtgatgca

SEQ ID NO: 25850 - DNA, 733 bp, Homo sapiens
aggagcctccaagttaagccccattggccaggaaaggccctacatgagttatgtgctcattctccaacagattaaggtagcgaggaggatggaatgtgatgattaacttagctaagtcatcacctgtaactcctctagagcccaggaatttacgcagcttcacctgaaggacagaaccacttctcacccatgtggtggctttgtagaaattgaaaaaaaaaagatgccccttctttgtaagaaaacatagccccacggtctctcagaatcaagacaggctggaatttagccctttcttgtcctcttagttgtgtgcctttgtgcagtgcacaaactagacagtcttattctgtggcccactgtacatgaaagggcagtagggcagagtggttctcaacccaggggaccaaggaccacgctttgggaaattttatcctaaggccttactgcaataatttagaaccaggagtctcaactgagactagagaagcatctgatgcaagagaaaattcaggtaaatgttgtttcctgagatgtgcccgtttayatgactccagccacggctcatggcagtttattatggtgggaagagcaaagggttaagagttaagccacactagaactggctgtctctgcctcaaactggctgggtgacatttagcctacagtgtcagagcctttgttttcttttctccgggatttgaggattaaattagttaagatatgtgatgca

SEQ ID NO: 25851 - DNA, 512 bp, Homo sapiens
tgaattagcctttccaaaagcttatccttatacatacaagtattgagacttgtacaaagggagtgtttttacaagggtagaaaatgatatgtacccttccttttttgataattcaaggacaagttgcaccaaagctgtgagcagtatcagatatttaacactctatcttccaagtgatgacgtgtacgatctagttctcccttcctggagagagacagagacagcgcaagaacaagcaagtgagagcacccagggacagggaagcagtgaggtggacatcctcccaccgagatgttgatgtctaaggcaggccagagttactggatttcacactgtgtcttccataccaacccacsatttcctatcacccacactatcacactattccaaggaagaagaatgatgctctgatggataagcgtttgaggtttcataaccacagaagtcatttgtctaatatagttaaagagacaaatatttatataaatcaaagcatttctttttctgagaag

SEQ ID NO: 25852 - DNA, 610 bp, Homo sapiens
ctgaatatgtgttccaagttagggcatccaggagtagccaacccagagattcattccttgtctgtgaagaacatctgagcccccatcctgttctgttgaacacaagctgtatggaggattggggccctgagttttgggttaaatgaaggttgcaaggtggaggtcgttaaggggagggtgttaagtgaaaacgctgtatataaactgcatgctgtttgcaagtggttgtggttttcctacccagcctgccaacactgcgccgtgaggttatgctttccagcctgccaccactggaccatatgtaaggtggttatcttgtccagcccactgccactggactctctttcctttatgtaagccactaataaaaccccatgtgtcattcgcttgctctgggtctctcctttggcctcttgaacttggtgcctttcctattgaggttaatagaggttccacacrgtacttgcaactttctttgaaaagggaatacgttatcattaacatcaatactgtcaacactatcagtaaatgttgatgtacttacctttctacataccttccatttgctaagtgagatctaggcttagtcaacacatttactattcagaaa

SEQ ID NO: 25853 - DNA, 630 bp, Homo sapiens
accatcaaccacttaactcagaaacatatagtttccccacttgtccctctagccaatttaacgctcccctcccctggacctcagctcaccctccttctggctctgaactgaggtcttgctcccagcatcccccttacctgggacaagccctgtgggcagaaaaggcctccagcccatccaccacagcttgcaggctgtcttggttgggccactgcactatcagagagcccagatggagaaaccggaagggccaggcctgcaccaaggccttcagagcctttctgtgccccttggcaaatgcagcagtgagtagtggcgggaaaaggttcactgtgagctgttccaacaccagtggaactgaagcctcattgctcagcaggctgtgggctgcaagttccaagaggctgaggggtgctgggtggttcacctccatggacctggagcagaagaaggtagaaatcctcagaagactaatggctcagcatcactcccaggccartgtgggagatgcaggcctttcgcatctgtcacagaaccaaatgctggctcctccctccattcaagaccaaaactccacaattcaggtcttgtaagcctgagaccctggagccctaagaccctggggacatg

SEQ ID NO: 25854 - DNA, 931 bp, Homo sapiens
cccttcctgctcccactctggcctatctccaaaacagccctgggccggcctcccgcatcttggcccttctctttcctcccctgaacaccgctagagccccaacaggtgtccctcctgccatctggtcaccacgtccaggctcacagacctggtggcttcactccctcacctcagagccctcctggctgctcgggacccgtgatcaggttgaaccccctcacctacctcagtgcctggcctcggcatccctgtcctgctcgtctctggccacgctggccaccctctgccaggaacagtcttcctcctctgtcacttcttgacaatgtccacccagctgctgctcctggcaccayctcctgagaccggatctctggatgcccacaagtccccacctggactcatgtcaaaacagtggccagggttgtccctccaccctctagtggccctgaaccatgaggccatgcacctgccacatggtgcttgcaggtgggcacctgcattgctggtgccatggccccctgattctgctgactctgacatttctccccagggtgaagcctggagaccctcttgccctggcctagctgcaggcccccgggatgctttgggcatgtcctctggagccccacagaagagcagcccaatggccagtggagctgaggagaccccaggcttcctggacacgctcctgcaagacttcccagccctgctgaacccagaggaccctctgccatggaaggccccagggacggtgctcagccaggaggaggtggagggcgagctggctgagctggccatgggctttctgggcagcaggtaggcctgtgcacccccaaaggggacggggagtaagggcacggcaccagggccgacaagggatgtggctgctgctcccctacacgtccagccccacacggggatctgcagcccc

SEQ ID NO: 25855 - DNA, 998 bp, Homo sapiens
aattctggacccacattgcatttaatagtcgtgtctccttagtctcgtctgatctgtgccaattcagtctttcactatcacccatgaccttaaccacttttaaggagcacaggttagctttttgtacactgtttctcaatttggatttgactgatattttcccatcagtcaaatttgaagttatgcatttttggcaagaatatcccagaagtgatgtacctttctcagcacatcacattagggggcatatgatgtcaatatgttgtactgattgaccccaggtttctccactatgaagttactcttttagtcttttctctgtggtaggggtagtactctggggctatgttagaatatcctgtttatcctcaaatttttgtatcatatagcagtggatttgtatagtrtcacatactatacaaataaatacagtatttattgtatcatataggactggatcatgtctgcaacaatgattactgtggtattctgatggtgattttctgattccctcatgattttttaaatgcatgaaaagcaaagaagcccctatcttttcttactgcagtttctatatacaagcctttgggaaatgaatcaaaagtagctgagattaagttggcaactgacacacttttgttaaaactgactctaaaggttttaatgacactgtggccactgagtatttttttcccgggaaaaaaaaaattaggacactcttaaacacaatctgaacattgcccagtgaatgatgtaatgttacatggatcagatcagccagcgtgaagttatcaagaaaagcatttcattgttttctatcagttgccatcattttgtaatttactttttgctgaggtcatggaaggttttcattcttcatgctgtaagaagagaataggcattggagctgtcacacggacatttggttcctcctgtcccttcaacccttcagatgattccaccagcccttaaatgtgactctattagagaaactgtgg

SEQ ID NO: 25856 - DNA, 998 bp, Homo sapiens
aattctggacccacattgcatttaatagtcgtgtctccttagtctcgtctgatctgtgccaattcagtctttcactatcacccatgaccttaaccacttttaaggagcacaggttagctttttgtacactgtttctcaatttggatttgactgatattttcccatcagtcaaatttgaagttatgcatttttggcaagaatatcccagaagtgatgtacctttctcagcacatcacattagggggcatatgatgtcaatatgttgtactgattgaccccaggtttctccactatgaagttactcttttagtcttttctctgtggtaggggtagtactctggggctatgttagaatatcctgtttatcctcaaatttttgtatcatatagcagtggatttgtatagtgtcacatactatacaaataaatacagtatttattgtatcatataggactggatcatgtctgcaacartgattactgtggtattctgatggtgattttctgattccctcatgattttttaaatgcatgaaaagcaaagaagcccctatcttttcttactgcagtttctatatacaagcctttgggaaatgaatcaaaagtagctgagattaagttggcaactgacacacttttgttaaaactgactctaaaggttttaatgacactgtggccactgagtatttttttcccgggaaaaaaaaaattaggacactcttaaacacaatctgaacattgcccagtgaatgatgtaatgttacatggatcagatcagccagcgtgaagttatcaagaaaagcatttcattgttttctatcagttgccatcattttgtaatttactttttgctgaggtcatggaaggttttcattcttcatgctgtaagaagagaataggcattggagctgtcacacggacatttggttcctcctgtcccttcaacccttcagatgattccaccagcccttaaatgtgactctattagagaaactgtgg

SEQ ID NO: 25857 - DNA, 998 bp, Homo sapiens
aattctggacccacattgcatttaatagtcgtgtctccttagtctcgtctgatctgtgccaattcagtctttcactatcacccatgaccttaaccacttttaaggagcacaggttagctttttgtacactgtttctcaatttggatttgactgatattttcccatcagtcaaatttgaagttatgcatttttggcaagaatatcccagaagtgatgtacctttctcagcacatcacattagggggcatatgatgtcaatatgttgtactgattgaccccaggtttctccactatgaagttactcttttagtcttttctctgtggtaggggtagtactctggggctatgttagaatatcctgtttatcctcaaatttttgtatcatatagcagtggatttgtatagtgtcacatactatacaaataaatacagtatttattgtatcatataggactggatcatgtctgcaacaatgattactgtggtattctgatggtgattttctgattccctcatgattttttaaatgcatgaaaagcaaagaagcccctatcttttcttactgcagtttctatatacaagcctttgggaaatgaatcaaaagtagctgagattaagttggcaactgacacacttttgttaaaactgactctaaaggttwtaatgacactgtggccactgagtatttttttcccgggaaaaaaaaaattaggacactcttaaacacaatctgaacattgcccagtgaatgatgtaatgttacatggatcagatcagccagcgtgaagttatcaagaaaagcatttcattgttttctatcagttgccatcattttgtaatttactttttgctgaggtcatggaaggttttcattcttcatgctgtaagaagagaataggcattggagctgtcacacggacatttggttcctcctgtcccttcaacccttcagatgattccaccagcccttaaatgtgactctattagagaaactgtgg

SEQ ID NO: 25858 - DNA, 815 bp, Homo sapiens
ctgggggacccagtacaccctccacagccgctggcccaggtgctaagcccctcactgcctggggccggtagggcccgcccgccgctctgagtgcggggcccgccaagcccacgcccacccagaactccagctggcccacaagcgccgcgcgcagccccggttcctgctagcgcatctccctccacacctccctgcaagctgagggagccggctctggccttggccagcccagaagggggctcccacagtgcagcggcgggccgaagggctcctcaagtgccgccaaagtgggaacccaggcagaggaggcgccgagagcaagcgagggctgtgacgactgccagcacgctgtcacctctcaatatgagttaatcaactgaggtaaagttaaatgtaggagctttggctgctttttctttaaggtagccggttttttaaataggatgcctgttttgtaaaagtttatcatggatgacatgatatgccaacccaaactaagtttggaamcaaaaaaaattacaaagtttattcctcaaatacaaaaggcattactttacataaatattacacccattttggtatataaaagctcagtagtaactaataattgtgtagcaatgcattttttattaatatttcaatgttgaaagcttcttagacattatttttagacatgttttatataccttcttgcatgagtggatcaaaaaatttaagatggctaaactacgggatataagaaatgtaggcctatcagtaagctcaagtaggtatgaaaaaaatgaagatttttatgaactattttgtgtaagtgt

SEQ ID NO: 25859 - DNA, 1351 bp, Homo sapiens
gcatgccaccatggcctggctaatttttgtatttttaaaaagtagagatggggtttcrccatgttgcccaggctggtcttgaactcctgatctcaagtgatccacctgcctcagcctctcaaagtgctaggattataggcatgagccaccctgcccagcttcatcattttaaagtgcacaattcggtggcattaaatacatttacgctgttatgcaaccatcaccactatctagttctagaacatctttattacccaaaaagaaaatctcatcccccttaaccagtcactctcattttccctccctatagtccctggcataaccactaatctgttctctatctctatagatttgcctgttctggatattgtgtgtaaatggattcatacaatatgtggccttttgttattggtttctttcacttagcgtagtgttattagtataaggtttatccatgttgtagcatgtactagtactccattcctttttatggctcagtaatattccattgcatggatataccacattttgtttatcccattcatctgttggtggacatttgggttgtttctaccttttggtattgcaaatagtgacagctgccttttaaattatgcacgaagcagcagcaagttaagaaacatttgagacaggcattgaggttatgtactgcatcatctcagctcttagtcgggcatagtggcgtgcacctgtaatcccagctactcaggatgctgaggcaggagaattgcttgaaccaaggaggcagaggttgcactgagccaagatcatgccactgcactcgagcctgggcaacagagcaagactctgtctcaaaataaaataaaataaaataaaacaaaacggttaaaatggtaaaatttgccaggtgtggtggctcatatctataatcccagcactttgggaggccaaggcaggatcatcactggaggtcaggagttcgagaccagcctggccaacatggggaaaccccgtctctactaaaaatacaaaaattagccaggtgttgtggcacacgcttgtaatctcagctactcaggaggctgaggcgggaggattgcctgaacccaggaagtggaggtcacggtgagccgagatcacgtcactgcactccaggctgggccacagagtgagactacatctcaaaaaataaaataaataatataatggtaaaatttatgttatgtgtattttaccgcacacaaacacacacacacacacacaagctggctgcatggagtgtgccagttttctgggtgtgtatgtgtgtgtccttacccaggcataggtctagctgtggtcccaaagaaatctggtcccaaagaaacgc

SEQ ID NO: 25860 - DNA, 1788 bp, Homo sapiens
gaactgaatgattatacaaggtttcttgggattccaagttctatcattgtcaatacattttattattctaatctaacatgtggtgggggggttttcttgggagtgttcaacttaacttctgaatgagataaatccccagatcctgagacactctttgattggagagtatcactcaaattcctatggaaacatcacagtggggatggagcaggttatgcaaatgacaaagaaacagaggagtagagatcatttgatttagttgctccatagcctgaaggaaaaagcrtatatcattctttatatttctctcaaattttgtcactagaaacaatagtttctattgggacatatttctctcaaattatgtcactagaaacaatagaaaaaattgtacttctgaaatattatagtttatccaagctttatgtttttattcaaaactgaaatgagccctcaaagaactaaaaacagaactaccatttgatccagcaattccattactgggtatacacccaaagaaacataaatcattctaccaaaaagacgcatgcattcctatgtttatcacagcactgttctcaatagcaaagacatggaatcaaaccaggtgcttatcagtggtggattggataaagaaaatgtggttcttacaccccatggaatactatgcaatcataaaaaagaacaaaactatgtcctttgcagcaacatggatgcagctgaaggtcattatcttaagcaaattaacataggaacagaaaaccaaataccacacattctcacttacaagtggaaactaaacgttgggtactcatggacataaagatggcaacaatagacactggagaccaccagagggaggaggaggaaagggaaaagaggggcaggggttgaaaaactaactgctgggtactatgcacactcctgagtgatgggatcacttgcacccatacctcagcatcatgcaatatacccatgtaacaaacctgcacatgtacccctgaatttaaaaataaaagttaaaatttttaaaaaaagaaaactaaaatgagcaataggccaaagagaggactgcatgattccagtagtttttgtcacggagctttaaggcaactaaagctgtgagttaggtagagcaattgaacatctttagtgggcaaattagaaaggaaaaatggtagaggaaagaagatggccatttttttttttaatccaaacatattttccatccttacagaggtaatccatgggcaaaggaagaattatccccttctaaaaccctcaaatgctggctcatagtatataactttgaatgtatacatgggtgtggggttaaaaaaaaaaaacagacaaagcattgtatctttgggtggctaacacaacccagccccagtggcttgtgcttatgaggcatatttcttaggaggctggctgagcttcatccatgactatacaggaggccaggtgctaaaacctagataggtacagtattggatctaaaggcaagtggaggttgggcgcagtgactcacgtctgtaatcctagcactttgggaggccaaggtgggtggattgcctgaggtcaggggttcgagcccagcctggccaacatggtgaaaccccgtctctactaaaaatacaaaaattagccgggcattgtggtgcatgcctgtagtcacagccacttgggagactgaggcaggagaatcgctggaacccaggaggcagaggttgcagtgagccgagatcatgccactgcactccagcctgggccggacacctgagggag

SEQ ID NO: 25861 - DNA, 526 bp, Homo sapiens
tttctaaaagtgtgacatcctgtatcttagtggtgtgaaactgaaacaaaccaatacaagaggttccaattgtaagaatatacaattttgaattagtcacacagatgacagaagtgtaaaaatgttttttggcccaacgttacaaaatatttgtaaaaaaaaaaaatacaaaggrcgttaaatgaaaacatattgctacatcagttgaggaatttatttattttcatttagttaattttctaatttctttatttacttttcatagaattccccaggaaacatctttggaactgtaaaattgaatatattaaaaggtaggtttttgtagtttatgtagtctatatcaacgcaaaggactttttttttccattgtagtttactttttgcatagctgaggcatgtacttgcctacatttcgcctgccaatttttctcttgggctcacggtaagcagaagagaacttaggaaaaaagtacctcctttaacaagaaacctccttttcttgttaaaaagaaataaacttgtt

SEQ ID NO: 25862 - DNA, 526 bp, Homo sapiens
tttctaaaagtgtgacatcctgtatcttagtggtgtgaaactgaaacaaaccaatacaagaggttccaattgtaagaatatacaattttgaattagtcacacagatgacagaagtgtaaaaatgttttttggcccaacgttacaaaatatttgtaaaaaaaaaaaatacaaagggcgttaaatgaaaacatattgctacatcagttgaggaatttatttattttcatttagttaattttctaatttctttatttacttttcatagaattccccaggaaacatctttggaactrtaaaattgaatatattaaaaggtaggtttttgtagtttatgtagtctatatcaacgcaaaggactttttttttccattgtagtttactttttgcatagctgaggcatgtacttgcctacatttcgcctgccaatttttctcttgggctcacggtaagcagaagagaacttaggaaaaaagtacctcctttaacaagaaacctccttttcttgttaaaaagaaataaacttgtt

SEQ ID NO: 25863 - DNA, 1014 bp, Homo sapiens
aaggcctttctccactgagcaatttcaggaaagacttggctaccctttagactgagctgggtctacgtggaaagggtccttgcacctcagtttgaagccccctgcaagggagatcttagttcacaagattacayctgtactcaaggtcctgcaggtgattcttacctggggacagtgatgatacttacgtgaaggcagtgacatgtgatgccaggtgtgtgctctgcatactgccaggctttgctgcctccctgcagacttgggggtgtcctgccccacgtcttcctcactccggctcatcagtcccctcctcttctcaaggagaatccagagtcagcacctagagtcctcggtgggggtggggaatggccaagagtctggacagctggcagtctgctccctggtccactggggtgggtcctgggaggcttagggcccaaggaatggggtgcagggcatcctgggtttccagacctggagctgacacagacttccgggctcctgggaggtgggaaatgagcttccaagcctgtctttcctgaaaatcctgccctggattccttccctggggagaatgcaggcttcctggggagtggagggggatgcttctgtggcctcatttgtacccctgagagcatagggctcagccgttcctgtccatgtttttcctgccaccccgcacaaatgtccctgggatttgaagaatctgctccactcccctcttcccgtacaggggcctgcaaactagaggcatttgcccctgggccagccgggctcctgtctgacccctcctcacgaggtggacaggtcccccaggaaagggaccacgccttgctcctgtctgcatttcaaggtcctacagtggccccaagcatggaccaggggactttggcaggggaagatactgacccgatggcgtcgctactgcccctcgtcttggttctggactttccctccctcgagggtcattcagctccagtggctgaacttgccgaaggtcgtgtggcccagctg

SEQ ID NO: 25864 - DNA, 1014 bp, Homo sapiens
aaggcctttctccactgagcaatttcaggaaagacttggctaccctttagactgagctgggtctacgtggaaagggtccttgcacctcagtttgaagccccctgcaagggagatcttagttcacaagattacacctgtactcaaggtcctgcaggtgattcttacctggggacagtgatgatacttacgtgaaggcagtgacatgtgatgccaggtgtgtgctctgcatactgccaggctttgctgcctccctgcagacttgggggtgtcctgccccacgtcttcctcactccggctcatcagtcccctcctcttctcaaggagaatccagagtcagcacctagagtcctcggtgggggtggggaatggccaagagtctggacagctggcagtctgctccctggtccactggggtgggtcctgggaggcttagggcccaaggaatggggtgcagggcatcctgggtttccagacctggagctgacacagacttccgggctcctgggaggtgggaaatgagcttccaagcctgtctttcctgaaaatcctgccctggattccttccctggggagaatgcaggcttcctggggagtggagggggatgcttctgtggcctcatttgtacccctgagagcatagggctcagccgttcctgtccatgtttttcctgccaccccgcacaaatgtccctgggatttgaagaatctgctccactcccctcttcccgtacaggggcctgcaaactagaggcatttgcccctgggccagccgggctcctgtctgacccctcctcaygaggtggacaggtcccccaggaaagggaccacgccttgctcctgtctgcatttcaaggtcctacagtggccccaagcatggaccaggggactttggcaggggaagatactgacccgatggcgtcgctactgcccctcgtcttggttctggactttccctccctcgagggtcattcagctccagtggctgaacttgccgaaggtcgtgtggcccagctg

SEQ ID NO: 25865 - DNA, 583 bp, Homo sapiens
taaagttttattggcacccagccgtgctcatctctttccacgttgtgtgtggcagagttgaatcgttgtgacagactgcatgctctgcaaagttgagagtagttaccagctggacttttacagaaaattttgtgggccttgttctaaatgatctcagcgcattgcctagaaccatgccacttttctctgaygtgattctgagaaatgctctctcctcatctggcttctctaaatgctggtatgtgggacattgcacgtgatggtgtcctcgtggtctgaagcttgcccacagagccttgggtaagctccgttacattcttctgcgatgtctgtgtaggatgctgaccacctgtggggtgcacagatgccactctctctgggtgccctacagagaaggctgcttgggactccttcctgctgggggctgcagaagagggaggcattcaggcacagtctccagcagtgctggaagaacgaggctgggttgagtggcaggacagcaagtctggggcttccttcccagttagttacgcccagtgctgtttatgctgccactgcaacttgtgtctggttcaggggtcat

SEQ ID NO: 25866 - DNA, 583 bp, Homo sapiens
taaagttttattggcacccagccgtgctcatctctttccacgttgtgtgtggcagagttgaatcgttgtgacagactgcatgctctgcaaagttgagagtagttaccagctggacttttacagaaaattttgtgggccttgttctaaatgatctcagcgcattgcctagaaccatgccacttttctctgatgtgattctgagaaatgctctctcctcatctggcttctctaaatgctggtatgtgggacattgcacgtgatggtgtcctcgtggtctgaagcttgcccacagagccttgggtaagctccgttacattcttctgcgatgtctgtgtaggatgctgaccacctgtggggtgcacagatgccactctctctgggtgccctacagagaaggctgcttgggactccttcctgctgggggctgcagaagagggaggcattcaggcacagtctccagcagtgctggaagaacgrggctgggttgagtggcaggacagcaagtctggggcttccttcccagttagttacgcccagtgctgtttatgctgccactgcaacttgtgtctggttcaggggtcat

SEQ ID NO: 25867 - DNA, 574 bp, Homo sapiens
agaactgtaagccaattaaacctctcttcttcaaaaattacctagtctcaggtatttctttatagcagtgtgaaaacaggctaataaagtgagcaacaagaaaccttcaatcctttgcgttttattagaagagatggatttctttttttattattaattttttttttgagatggagtctggctctgtcgtccaggctggtgtgcagtggtgcattctcggctcactgcaagctccacctcctgcgttcgtgccattctcctgcctcagcctccagagtagctgggactacaggcgcccgccactatgcccagctaattttttgtatttttagtagagacgggttttcaccatgttagccaggatggtcttgatctcctgacctcgtgatctacccaccttggcctctcaaagttctgggattacaggcatgagccacagcacctggacagatttatttcttagttgatgcagagaaattaattgggggtttaaaaaaaacatcgcggcccagcatggtggctcacgcctgtaatcccaacactttgggatgccgaggtggrtggatcacctgag

SEQ ID NO: 25868 - DNA, 744 bp, Homo sapiens
tgtttgcaactaccattaccagctgttcttccctaaggtactaactacactgatgacagcatatacaaaattttctatcatcagccccatgagttcaaaagggyttctcttgaatgttggttgccaggtggggtacccctttctgtcctcaatgtaacttcatttcaggaatctcattgccctttccagagactgggattgagtcagtgccacacagctctatgtcagcagagactaggtattagttctttctctcccagaaggcgctggacatcttgtgtaaactgatctcctccccaggaaccagctttacagagcagaatacaagtgcattctcagggagtggcagacttctattaatgaagtcagaaagttttctgctctatgacaatgattgtgtacctgctctatatttgctaaactaagaaagttattcaagtaatacagaagataagcacttctagatttaaatatctgctcttctccccacccaacacctaaaaaaatcataaatcaaattctaccaagtcagtgttcaacactatttcaatagttgtttgttgcttttaggataaaaatccaaaattcttccccaaatcctcaaaaaaataaagtatattacatggctccttctcacctctccagatacatcatgagccactccatctccctccatagcaggctcacaggccttctttcagttctttggtgaacatattataaaagccaactttttcctgctgc

SEQ ID NO: 25869 - DNA, 744 bp, Homo sapiens
tgtttgcaactaccattaccagctgttcttccctaaggtactaactacactgatgacagcatatacaaaattttctatcatcagccccatgagttcaaaagggtttctcttgaatgttggttgccaggtggggtacccctttctgtcctcaatgtaacttcatttcaggaatctcattgccctttccagagactgggattgagtcagtgccacacagctctatgtcagcagagactaggtattagttctttctctcccagaaggcgctggacatcttgtgtaaactgatctcctccccaggaaccagctttacagagcagaatacaagtgcattctcagggagtggcagacttytattaatgaagtcagaaagttttctgctctatgacaatgattgtgtacctgctctatatttgctaaactaagaaagttattcaagtaatacagaagataagcacttctagatttaaatatctgctcttctccccacccaacacctaaaaaaatcataaatcaaattctaccaagtcagtgttcaacactatttcaatagttgtttgttgcttttaggataaaaatccaaaattcttccccaaatcctcaaaaaaataaagtatattacatggctccttctcacctctccagatacatcatgagccactccatctccctccatagcaggctcacaggccttctttcagttctttggtgaacatattataaaagccaactttttcctgctgc

SEQ ID NO: 25870 - DNA, 744 bp, Homo sapiens
tgtttgcaactaccattaccagctgttcttccctaaggtactaactacactgatgacagcatatacaaaattttctatcatcagccccatgagttcaaaagggtttctcttgaatgttggttgccaggtggggtacccctttctgtcctcaatgtaacttcatttcaggaatctcattgccctttccagagactgggattgagtcagtgccacacagctctatgtcagcagagactaggtattagttctttctctcccagaaggcgctggacatcttgtgtaaactgatctcctccccaggaaccagctttacagagcagaatacaagtgcattctcagggagtggcagacttctattaatgaagtcagaaagttttctgctctatgacaatgattgtgtacctgctctatatttgctaaactaagaaagttattcaagtaatacagaagataagcacttctagatttaaatatctgctcttctccccacccaacacctaaaaaaatcataaatcaaattctaccaagtcagtgttcaacactatttcaatagttgtttsttgcttttaggataaaaatccaaaattcttccccaaatcctcaaaaaaataaagtatattacatggctccttctcacctctccagatacatcatgagccactccatctccctccatagcaggctcacaggccttctttcagttctttggtgaacatattataaaagccaactttttcctgctgc

SEQ ID NO: 25871 - DNA, 1141 bp, Homo sapiens
cactgataaacgcacatattcctgtatcctcaactcttcaagtgtaaacagattatgtgtcctttaaaaaaaacaattcatgaatacaaagatttatgttttgctatattattttagaagggtagagaaattggctgaaattgctaagaaaacttaaaaatgtagacagtaatattttatcttctgttgaaaatgttaaaaatgtactttctatttttaacaaaggtttttcttcccttttcttaacattaaattagttctcaattcacagcaacaattactatattctttccagaaacaaaatcagtatcctacagaggttatgagaaactcttttctttatgagttatattataatgtaactcatacttaaacagtttatttagttcagagtgttttcaaatcttccatctcaatagatcttcacactagaatatgaagtaggtgctattattatccccagtaaacgtacaagaaaactgaatcgcagaaaacagaattatttgagcaaaatcacacagctaataagtaagttgaagagcagggcttaggttttgttttttgctttgccctctaaatactgtgtttcttcatccctttgaaaagtgagtccagaagggtaattttacattttagtgaaatagagtgagtggctacctaattttgacagttctcatttatctgtctcattagcatggacagaccagatggacaacccaccatatagaaagaaattctgctgtcatttcctgccaaaccaaagtgattcttctctcccatgttaaccaactgtgttcacaaccaaactgctctctgagttttctgtttccaaacctatgagaaacaatagyggcatggtgagtactaacttctgatatgtcaggttgatatgacagtagtactagcccatcattgtgacgttaaatctattgaaaaataaaccttaaatacagcatttgttgttgctgctattgttgttgctgtctaattttctcttttttgttgagggagaagggggagaaggtctataaagaagagtcttggttgggtgtcatggctcatgcctgtagtcccaacagtttgggagcctgggtagatcacttgagcccactggttcaagacgagcctgggcaacatagtg

SEQ ID NO: 25872 - DNA, 1141 bp, Homo sapiens
cactgataaacgcacatattcctgtatcctcaactcttcaagtgtaaacagattatgtgtcctttaaaaaaaacaattcatgaatacaaagatttatgttttgctatattattttagaagggtagagaaattggctgaaattgctaagaaaacttaaaaatgtagacagtaatattttatcttctgttgaaaatgttaaaaatgtactttctatttttaacaaaggtttttcttcccttttcttaacattaaattagttctcaattcacagcaacaattactatattctttccagaaacaaaatcagtatcctacagaggttatgagaaactcttttctttatgagttatattataatgtaactcatacttaaacagtttatttagttcagagtgttttcaaatcttccatctcaatagatcttcacactagaatatgaagtaggtgctattattatccccagtaaacgtacaagaaaactgaatcgcagaaaacagaattatttgagcaaaatcacacagctaataagtaagttgaagagcagggcttaggttttgttttttgctttgccctctaaatactgtgtttcttcatccctttgaaaagtgagtccagaagggtaattttacattttagtgaaatagagtgagtggctacctaattttgacagttctcatttatctgtctcattagcatggacagaccagatggacaacccaccatatagaaagaaattctgctgtcatttcctgccaaaccaaagtgattcttctctcccatgttaaccaactgtgttcacaaccaaactgctctctgagttttctgtttccaaacctatgagaaacaatagtggcatggtgagtactaacttctgatatgtcaggttgatatgacagtagtactagcccatcattgtgacgttaaatctattgaaaaataaaccttaaatacagcatttgttgttgctgctattgttgttgctgtctaattttctcttttttgttgagggagaagggggagaaggtctataaagaagagtcttggttgggtgtcrtggctcatgcctgtagtcccaacagtttgggagcctgggtagatcacttgagcccactggttcaagacgagcctgggcaacatagtg

SEQ ID NO: 25873 - DNA, 566 bp, Homo sapiens
ataaagaaagggtttttatcaagctgttaccaacacttcttacaaaacacgaataactctcccttgcttaacctcagagagaaggcaggtgcccccctctctgtcacatccagtgctatattcacagctacaagctctggccaggcacattacagccccagtgaatgaatgaatatcctcccctccgcaggggggcatccttagaattaaagagataaggtgggatccaaaataggtgtagccttgtagcagtgtgcactgaaattgagtargtctaacatttaagtctttaatccatgttgaattaatttttgtataaggtgtaaggaagggatccagtttcagctttctacatatgtacatagagtaggtgtcacaccctctaactgtgtcgggcagggccacacactgagggcccaagcagaaactgtaaatgagggaagggggctgggaggggagacaacagggaggggtgggaacttgcttaaccagaggatacacacccattttgaagcactaaaatgatcaatattaaacactgcgcaggtcagaacaaacaaggtctg

SEQ ID NO: 25874 - DNA, 581 bp, Homo sapiens
ctagaggtgtgagtaactgcgcccggctgagataatgcaaattaatcagcaatctaggtttgtatgaccagcagaaaggaaaaggatatattttcctgagtctcatttcctgtgatgaaataattggcgcctggtggataaatgtgtgatatggatcgtgcgtggagagaataatcagaaaggaaccaattccattgggttgacatgaacaaagtgtcctttttgagggtcagaatggttgactatgggcaggcaattccacatggctcaatggaatacttccatgagctactgatctgaacgtggtattggacagcttgtgggactgacgggaaaggggcgcatcactgcctcatggacagaaagcctggtgccctgctctagtggcaggygcagcagaaagcagcttcaaagccaggagcgacaggagcacagcagagagacagccacagagaccagtcagcaactgctgtgaaagccaaccccccaggccaaaagccaagacacacaggacaaggaggagaagaagatgcaaaaagagatgggagagggaagcaaaaaggaggattttttttttccaa

SEQ ID NO: 25875 - DNA, 993 bp, Homo sapiens
tgaaacctgaccrgagagatgagaccatcctgcatgcaggccatagagacggtaaactaagtaccacactatgtggcacaggttttaaatgttatgagttctagtgacagggattaatgaaaatagaggctgtcagaaaatgagattttagctgatcccagaggggagattagagttttaatatgtggaggagagaaaagtggacttttccagataaagaacagaggagtgaaagcagagagaggactgtttatgggtgggaccccaaagaagctggcctgaggaaacatttctccacccacgcaatggaccatggagctccagtacagacttaaaattatttattttgagacagagtcttactttattacccaggttggagtgcagtggcacaatcttggctcactgcagccttgacttcctgggctgaagccatcctcccacctaagcctccctaggagctgggatcacaggcatgtgcaaccatgcccagctaatttttgtatttttagtagagacagggtttcacaatgttgcccaggctggtcttgaactcctgacttcaagcaatctgcccgcctcggcctcccaaactgctgggattacaggcatgagccactgcaacgggtcccagacttacattattatctattaaaatgttactgaaatatgtacccaaaaagctatgtataagttgttttatgtttgtatagctataaatacacattagcataattctatttatactattaaaatttcaaaataagtctctaaggataaacgaaacccatacaccaataatactctaattcatattaatcctctttgccagatgatgctgttttgctgaaactaaagaataaatttgttttaactaagtattcattaatgaaattggaaaaaacattttaacaaaaggaatttctattgcatattaagaattacacctgtttataaggaactgttacaagatggcacctatagagaagaaag

SEQ ID NO: 25876 - DNA, 993 bp, Homo sapiens
tgaaacctgaccagagagatgagaccatcctgcatgcaggccatagagacggtaaactaagtaccacactatgtggcacaggttttaaatgttatgagttctagtgacagggattaatgaaaatmgaggctgtcagaaaatgagattttagctgatcccagaggggagattagagttttaatatgtggaggagagaaaagtggacttttccagataaagaacagaggagtgaaagcagagagaggactgtttatgggtgggaccccaaagaagctggcctgaggaaacatttctccacccacgcaatggaccatggagctccagtacagacttaaaattatttattttgagacagagtcttactttattacccaggttggagtgcagtggcacaatcttggctcactgcagccttgacttcctgggctgaagccatcctcccacctaagcctccctaggagctgggatcacaggcatgtgcaaccatgcccagctaatttttgtatttttagtagagacagggtttcacaatgttgcccaggctggtcttgaactcctgacttcaagcaatctgcccgcctcggcctcccaaactgctgggattacaggcatgagccactgcaacgggtcccagacttacattattatctattaaaatgttactgaaatatgtacccaaaaagctatgtataagttgttttatgtttgtatagctataaatacacattagcataattctatttatactattaaaatttcaaaataagtctctaaggataaacgaaacccatacaccaataatactctaattcatattaatcctctttgccagatgatgctgttttgctgaaactaaagaataaatttgttttaactaagtattcattaatgaaattggaaaaaacattttaacaaaaggaatttctattgcatattaagaattacacctgtttataaggaactgttacaagatggcacctatagagaagaaag

SEQ ID NO: 25877 - DNA, 993 bp, Homo sapiens
tgaaacctgaccagagagatgagaccatcctgcatgcaggccatagagacggtaaactaagtaccacactatgtggcacaggttttaaatgttatgagttctagtgacagggattaatgaaaatagaggctgtcagaaaatgagattttagctgatcccagaggggagattagagttttaatatgtggaggagagaaaagtggacttttccagataaagaacagaggagtgaaagcagagagaggactgtttatgggtgggaccccaaagaagctggcctgaggaaacatttctccacccacgcaatggaccatggagctccagtacagacttaaaattatttattttgagacagagtcttactttattacccaggttggagtgcagtggcacaatcttggctcactgcagccttgacttcctgggctgaagccatcctcccacctaagcctccctaggagctgggatcacaggcatgtgcaaccatgcccagctaatttttgtatttttagtagagacagggtttcacaatsttgcccaggctggtcttgaactcctgacttcaagcaatctgcccgcctcggcctcccaaactgctgggattacaggcatgagccactgcaacgggtcccagacttacattattatctattaaaatgttactgaaatatgtacccaaaaagctatgtataagttgttttatgtttgtatagctataaatacacattagcataattctatttatactattaaaatttcaaaataagtctctaaggataaacgaaacccatacaccaataatactctaattcatattaatcctctttgccagatgatgctgttttgctgaaactaaagaataaatttgttttaactaagtattcattaatgaaattggaaaaaacattttaacaaaaggaatttctattgcatattaagaattacacctgtttataaggaactgttacaagatggcacctatagagaagaaag

SEQ ID NO: 25878 - DNA, 993 bp, Homo sapiens
tgaaacctgaccagagagatgagaccatcctgcatgcaggccatagagacggtaaactaagtaccacactatgtggcacaggttttaaatgttatgagttctagtgacagggattaatgaaaatagaggctgtcagaaaatgagattttagctgatcccagaggggagattagagttttaatatgtggaggagagaaaagtggacttttccagataaagaacagaggagtgaaagcagagagaggactgtttatgggtgggaccccaaagaagctggcctgaggaaacatttctccacccacgcaatggaccatggagctccagtacagacttaaaattatttattttgagacagagtcttactttattacccaggttggagtgcagtggcacaatcttggctcactgcagccttgacttcctgggctgaagccatcctcccacctaagcctccctaggagctgggatcacaggcatgtgcaaccatgcccagctaatttttgtatttttagtagagacagggtttcacaatgttgcccaggctggtcttgaactcctgacttcaagsaatctgcccgcctcggcctcccaaactgctgggattacaggcatgagccactgcaacgggtcccagacttacattattatctattaaaatgttactgaaatatgtacccaaaaagctatgtataagttgttttatgtttgtatagctataaatacacattagcataattctatttatactattaaaatttcaaaataagtctctaaggataaacgaaacccatacaccaataatactctaattcatattaatcctctttgccagatgatgctgttttgctgaaactaaagaataaatttgttttaactaagtattcattaatgaaattggaaaaaacattttaacaaaaggaatttctattgcatattaagaattacacctgtttataaggaactgttacaagatggcacctatagagaagaaag

SEQ ID NO: 25879 - DNA, 1104 bp, Homo sapiens
ggaaggacctcctgggagatgattgaatcatgcggtttcccccatgctattctcgtggtagtaagtgagttcccacaagatatgatggctttataagcatctggcatttcccctgcttgcacttctttctctcctgctgccttatgaagaagatgcctgctttcccttccactgtgattataagtttcctgaagccaccccagccatgcagacctgcttgtcaatgaaacctacttcctttataaattacccggtctcagggaagttctttatagcagtgtgagagtggactaacacatacaactttagtgatactgttacttggtacttagtagcatagcgcagggcttgcagcttagagttgaaaaaaatagttcaagaactattcctgtatatttatatctaaaaattagctgtgttcaaaaaactacatcataataatagaataaattaatgtagggagtttcaataatatcaaaaatcaattggcttgttttaaaagacacacaaatagagtaatacatgcaacattgcattgtacctaaagcacttcattttgggtattgatcaattaaattttcatgcatattttccatgaacaatgacagagttttrttagtggttataaaactctatttggggtaaataagtcacatagatggggggcattgtcctgggcaccataatccagaatattatcttgcagatatgttttgtggtctggaatatgcattttatatttttcaccaaataatttttattcagttggcaatatattattccatagtacttataattaagttaaccccccttgttatgcatacaagacacttttgtgagtctcttgtataagagtgtacaatagtggcaatcctgcctctattttttctgtggtgctaacttcaaatgctatttgaaatagcaatgtttgtactgtgatttctgcctttggcatacacagggttttaaagtttttttttgatggcagtgatttaacaaatcacatatatggacaatcagctcatttgattaaggaacattgctaatcacagggatattgctaatcacacccagtttattttggtattattagtgtgattcctt

SEQ ID NO: 25880 - DNA, 1104 bp, Homo sapiens
ggaaggacctcctgggagatgattgaatcatgcggtttcccccatgctattctcgtggtagtaagtgagttcccacaagatatgatggctttataagcatctggcatttcccctgcttgcacttctttctctcctgctgccttatgaagaagatgcctgctttcccttccactgtgattataagtttcctgaagccaccccagccatgcagacctgcttgtcaatgaaacctacttcctttataaattacccggtctcagggaagttctttatagcagtgtgagagtggactaacacatacaactttagtgatactgttacttggtacttagtagcatagcgcagggcttgcagcttagagttgaaaaaaatagttcaagaactattcctgtatatttatatctaaaaattagctgtgttcaaaaaactacatcataataatagaataaattaatgtagggagtttcaataatatcaaaaatcaattggcttgttttaaaagacacacaaatagagtaatacatgcaacattgcattgtacctaaagcacttcattttgggtattgatcaattaaattttcatgcatattttccatgaacaatgacagagttttattagtggttataaaactctatttggggtaaataagtcacatagatggggggcattgtcctgggcaccataatccagaatattatcttgcagatatgttttgtggtctggaatatgcattttatatttttcaccaaataatttttattcagttggcaatatattattccatagtacttataattaagttaaccccccttgttatgcatacaagacacttttgtgagtctcttgtataagagtgtacaatagtggcaatcctgcctctattttttctgtgktgctaacttcaaatgctatttgaaatagcaatgtttgtactgtgatttctgcctttggcatacacagggttttaaagtttttttttgatggcagtgatttaacaaatcacatatatggacaatcagctcatttgattaaggaacattgctaatcacagggatattgctaatcacacccagtttattttggtattattagtgtgattcctt

SEQ ID NO: 25881 - DNA, 1104 bp, Homo sapiens
ggaaggacctcctgggagatgattgaatcatgcggtttcccccatgctattctcgtggtagtaagtgagttcccacaagatatgatggctttataagcatctggcatttcccctgcttgcacttctttctctcctgctgccttatgaagaagatgcctgctttcccttccactgtgattataagtttcctgaagccaccccagccatgcagacctgcttgtcaatgaaacctacttcctttataaattacccggtctcagggaagttctttatagcagtgtgagagtggactaacacatacaactttagtgatactgttacttggtacttagtagcatagcgcagggcttgcagcttagagttgaaaaaaatagttcaagaactattcctgtatatttatatctaaaaattagctgtgttcaaaaaactacatcataataatagaataaattaatgtagggagtttcaataatatcaaaaatcaattggcttgttttaaaagacacacaaatagagtaatacatgcaacattgcattgtacctaaagcacttcattttgggtattgatcaattaaattttcatgcatattttccatgaacaatgacagagttttattagtggttataaaactctatttggggtaaataagtcacatagatggggggcattgtcctgggcaccataatccagaatattatcttgcagatatgttttgtggtctggaatatgcattttatatttttcaccaaataatttttattcagttggcaatatattattccatagtacttataattaagttaaccccccttgttatgcatacaagacacttttgtgagtctcttgtataagagtgtacaatagtggcaatcctgcctctattttttctgtggtgctaacttcaaatgctatttgaartagcaatgtttgtactgtgatttctgcctttggcatacacagggttttaaagtttttttttgatggcagtgatttaacaaatcacatatatggacaatcagctcatttgattaaggaacattgctaatcacagggatattgctaatcacacccagtttattttggtattattagtgtgattcctt

SEQ ID NO: 25882 - DNA, 1104 bp, Homo sapiens
ggaaggacctcctgggagatgattgaatcatgcggtttcccccatgctattctcgtggtagtaagtgagttcccacaagatatgatggctttataagcatctggcatttcccctgcttgcacttctttctctcctgctgccttatgaagaagatgcctgctttcccttccactgtgattataagtttcctgaagccaccccagccatgcagacctgcttgtcaatgaaacctacttcctttataaattacccggtctcagggaagttctttatagcagtgtgagagtggactaacacatacaactttagtgatactgttacttggtacttagtagcatagcgcagggcttgcagcttagagttgaaaaaaatagttcaagaactattcctgtatatttatatctaaaaattagctgtgttcaaaaaactacatcataataatagaataaattaatgtagggagtttcaataatatcaaaaatcaattggcttgttttaaaagacacacaaatagagtaatacatgcaacattgcattgtacctaaagcacttcattttgggtattgatcaattaaattttcatgcatattttccatgaacaatgacagagttttattagtggttataaaactctatttggggtaaataagtcacatagatggggggcattgtcctgggcaccataatccagaatattatcttgcagatatgttttgtggtctggaatatgcattttatatttttcaccaaataatttttattcagttggcaatatattattccatagtacttataattaagttaaccccccttgttatgcatacaagacacttttgtgagtctcttgtataagagtgtacaatagtggcaatcctgcctctattttttctgtggtgctaacttcaaatgctatttgaaatagcaatgtttgtactgtgatttctgcctttggcatacacagggttttaaagtttttttttgatggcagtgatttaacaaatcacatatatggacaatcagctcatttgattaaggaayattgctaatcacagggatattgctaatcacacccagtttattttggtattattagtgtgattcctt

SEQ ID NO: 25883 - DNA, 1315 bp, Homo sapiens
tcctcacccaaatctcatcctgaattataatccaaactgtaattgccacgtgttgggggagaaaccttgtgcgaggtgattagctcatggaggtggctcccccatgctgttctcatgatagtaagtgagttctcatgagatctaatggttttataaggggcttttcacactttacttagcacttctstttcctcttgccctgtgatgaaggacgcgtttgcttccccttctgccgtgattgtaagttttctgaggctcccccagccatgggaaatgtgagtctatttaaacctcttttctttataaatgacccagtctcaggaagttctttatagcagcactaatacaatctgaaaaatgagattcagctacaaaatattaaaacatttttttatgcgtacgtatctgtataaaattaatttaacaaatgtatatactgtctgtacaaaaaatcactatttctgagtgatcttaaaatgcttgatttataaaatagttcagaatttatctagaaacaaactgaatcttaaaaaattagcaaaacactaactatactttgaattataaagtagaatctttttttttttgtctttttttttgggagatggagtctctttctgtcgcccaggcaggagtgcagtggtgcgatctcagctcactgcaacctccacctcctgggttcaaatgattctcctgcctcagcttcctgagtagctgggattacaggtgcctgccaccacacccagccaattttcatattttcagtagagacagggtttcaccacattggtcaggctggtcttgctctgctgacctcatgatctgcccacctcgacctcccaaagtgctgatattacaggcataagccaccgtgctttataaagtagaatcttaaaaataatacagaataaatcatgttgaatatttaaacaacttattctaccaagttttataatagtataatttaaattcctctaatatgttagaattttacagcataattataactttttatttttgccaaatttttaaaaactttactcattttctcagtggcttcattcattgtttatattcaagtcattttcctttgaaatacccatcacgtcactacgcttgtaaatgtcatcacttcattgtggttggcttttcagttatccagaattgtttgtattaatttaataaaatcctgcatattttataaaatattttgttttctattgcagaataattgctttgtatttgcattagattgcagaatgtttccatcatccccaaatcagctatgatagcccagaaagactctaacctatgc

SEQ ID NO: 25884 - DNA, 659 bp, Homo sapiens
tacactcctccacctcctgcaatattgcaatatttggctattatttactggaagaaatcagagaaccacttgtcagaatgaacctaagggtgcttgaccaatgaagctgaatataatgctgagtaggggatggacataagagctggtgaatagaaggctggctgaaaaatcatgacttctcactgagtttcaaatgtaatccagttctcattgattgaagaggaggctgtgtctgctttaggaaggactctgcaataccactgcttatatggatgatatttaatatcccattacttttccacaggggcctgtggtgacttatgagaaaaactgtattccagagaaaggagcctgcctrtcattaccaatggttattggtagagtgtctgaattaggattgatatcagtcagtgctctggaataggcatagtagcacctagaatgtggactactggtaggcagattttaagtggagtactgacccaagttaatctcatactaagttccataggtaaatgactcatcccagaacctttatttgtaattgggatatagagtttggcagaactctgccgttggtatcttaacctgtgaaataaaagccagttcccctactcctgttacatgggattactgcccaaagaaactacctgtacaca

SEQ ID NO: 25885 - DNA, 1020 bp, Homo sapiens
taggcaggtagcaaggcgctttagaggcttggccagaagcccccatcccttttgcagctacagtaagatgtattccaaaaagcctaaaagggtttatcctggcttcctctttagctccacttaggacctttattaagtggccctaycagaagaattatgccacctttgtccagagatccaaataatttctgtgtatctgaaaacacttatcttccaaaattggattatgttacctattgacataagaattaaatctgatcaatgtattctcacctaagtttttttttttcctggattcgtattgcctaaagacaacattccaaattcttgacatgccatatttaaaattatacattttcacttggcatggtagttaacatctgtaatcccagcactttgggaagccaaggcaggcagatcacttgagctcaggagttcaagaccagcccgggcaacacagcaacaccccatctctacaaaaacaaaatacaaaaaattagccaggcatgatggtgtgtgcctgttttttcagctactcaggaggctgaagtgggaggatcacttgagcctgggagctcaaggccacaatgagacaagatcatgccactgcactccagactgggcaccagagcaagaccctgtcttaaaaaaaattatacagtttccttccaatctgacattccatccatagctacaattacattctggccacttcccaaataaactatgttccttgataaattgtttttacttcagtctgaaataactttctctgttgataacctatgtatatattcaatccaatcaaaatgttacttttccaggtggcctttctaaatccgtgggcacatactagtccctttcttctcaagaaagggagaggatgtgcctctcaagaaaggggtcctatgtaattttttattattactattattattatcactactaccagacctagcttttgtcaccacactttatacaaatggcttgtagtaaattttgctttgtttatttaatgca

SEQ ID NO: 25886 - DNA, 1020 bp, Homo sapiens
taggcaggtagcaaggcgctttagaggcttggccagaagcccccatcccttttgcagctacagtaagatgtattccaaaaagcctaaaagggtttatcctggcttcctctttagctccacttaggacctttattaagtggccctaccagaagaattatgccacctttgtccagagatccaaataatttctgtgtatctgaaaacacttatcttccaaaattggattatgttacctattgacataagaattaaatctgatcartgtattctcacctaagtttttttttttcctggattcgtattgcctaaagacaacattccaaattcttgacatgccatatttaaaattatacattttcacttggcatggtagttaacatctgtaatcccagcactttgggaagccaaggcaggcagatcacttgagctcaggagttcaagaccagcccgggcaacacagcaacaccccatctctacaaaaacaaaatacaaaaaattagccaggcatgatggtgtgtgcctgttttttcagctactcaggaggctgaagtgggaggatcacttgagcctgggagctcaaggccacaatgagacaagatcatgccactgcactccagactgggcaccagagcaagaccctgtcttaaaaaaaattatacagtttccttccaatctgacattccatccatagctacaattacattctggccacttcccaaataaactatgttccttgataaattgtttttacttcagtctgaaataactttctctgttgataacctatgtatatattcaatccaatcaaaatgttacttttccaggtggcctttctaaatccgtgggcacatactagtccctttcttctcaagaaagggagaggatgtgcctctcaagaaaggggtcctatgtaattttttattattactattattattatcactactaccagacctagcttttgtcaccacactttatacaaatggcttgtagtaaattttgctttgtttatttaatgca

SEQ ID NO: 25887 - DNA, 1020 bp, Homo sapiens
taggcaggtagcaaggcgctttagaggcttggccagaagcccccatcccttttgcagctacagtaagatgtattccaaaaagcctaaaagggtttatcctggcttcctctttagctccacttaggacctttattaagtggccctaccagaagaattatgccacctttgtccagagatccaaataatttctgtgtatctgaaaacacttatcttccaaaattggattatgttacctattgacataagaattaaatctgatcaatgtattctcacctaagtttttttttttcctggattcgtattgcctaaagacaacattccaaattcttgacatgccatatttaaaattatacattttcacttggcatggtagttaacatctgtaatcccagcactttgggaagccaaggcaggcagatcacttgagctcaggagttcaagaccagccygggcaacacagcaacaccccatctctacaaaaacaaaatacaaaaaattagccaggcatgatggtgtgtgcctgttttttcagctactcaggaggctgaagtgggaggatcacttgagcctgggagctcaaggccacaatgagacaagatcatgccactgcactccagactgggcaccagagcaagaccctgtcttaaaaaaaattatacagtttccttccaatctgacattccatccatagctacaattacattctggccacttcccaaataaactatgttccttgataaattgtttttacttcagtctgaaataactttctctgttgataacctatgtatatattcaatccaatcaaaatgttacttttccaggtggcctttctaaatccgtgggcacatactagtccctttcttctcaagaaagggagaggatgtgcctctcaagaaaggggtcctatgtaattttttattattactattattattatcactactaccagacctagcttttgtcaccacactttatacaaatggcttgtagtaaattttgctttgtttatttaatgca

SEQ ID NO: 25888 - DNA, 736 bp, Homo sapiens
agtcctttctctgggaattgactgggctatctctgcagagaactgcctgaaaagtcacaactaatgccaaagccctgttgctgtaaaggaattaacacaattccaaatccctgcttgtctggagcaacagaatacaaggtgctctcaaaaaggctcatctggatacctcagcatacaatattttatttttattttttgagacggagtttctcttgctccccaggctggagtkcaatggcgcgatctcagctcacggcaacctccgcctcccgggtgcgagcgattctcctgcctcagccccctgagtagctgggattacaggcatgcaccaccacacccagttagtttggtctttttagtagagatggggttttgctatgcttggtcaggctggtctccaactcccgaagcatacaatttttatcctttccttattaagtcaagaattttcaccttttcacttaaaggaagtgatggcagcggcagccatttggagtgtcccctgcaaagatgccagccacagcaggagaggcacagctagggttgtgcactccacccagtgggagccaggaacaggcaggacattcagcccctaccgagttggcgggaagggagccctgtgctcccaggcacagctgcatatgtccagttgcaactccggacccaggcatccctgtgctctcaggggcccaggaaactaccccccacagcagtcttggaaatgcctgcacccact

SEQ ID NO: 25889 - DNA, 606 bp, Homo sapiens
aaataatcaaatctactgtcttgtctagcatttgtmtcttggcaagcactatgctgagatataaaaagacacacagagggggttgggaggagagagagagggaagaaagagaaagaaattagaaaaaagatgtctcaaaaatataacctctctactgttatcctcagaaatgaaactaaactctatgttataaggcttttttttttctcccaagccatctaattataggcaatataaaaacgcttgtggttgaacttcacactgtgtgaagagacagctacagagaggaagatgcacagtggtatatggtatatagaaaggggctttacttcctgaacccttatatgccccacagtgagcaccatcatagaagtctcaagaccctgtcctggcagggaggttggcttgtatgacaataggaaatgaagaggcagaaaacatgaataaagcatttgaccccaaactcttaacaatatctgcttttcatctttcccattattttaaaaaagtaacttctaagagtgggtagaataattcatgttactaagccactgaatctctaacaaatgggttaaagcatcttcattttacagggaagtataatag

SEQ ID NO: 25890 - DNA, 606 bp, Homo sapiens
aaataatcaaatctactgtcttgtctagcatttgtatcttggcaagcactatgctgagatataaaaagacacacagagggggttgggaggagagagagagggaagaaagagaaagaaattagaaaaaagatgtctcaaaaatataacctctctactgttatcctcagaaatgaaactaaactctatgttataaggcttttttttttctcccaagccatctaattataggcaatataaaaacgcttgtggttgaacttcacactgtgtgaagagacagctacagagaggaagatgcacagtggtatatggtatatagaaaggggctttacttcctgaacccttatatgccccacagtgagcaccatcatagaagtctcaagaccctgtcctggcagggaggttggcttgtatgacaataggaaatgaagaggcagaaaacatgaataaagcatttgaccccaaactcttaacaatatctgcttttcatctttcccattattttaamaaagtaacttctaagagtgggtagaataattcatgttactaagccactgaatctctaacaaatgggttaaagcatcttcattttacagggaagtataatag

SEQ ID NO: 25891 - DNA, 585 bp, Homo sapiens
tccagttgcagttggctattttaaccctcacctctgaatactattagaaagcagattgaatcttgtgtgataacctgcatgaaataggtttttttgttcacttgctcattttgtttttatttcattggtttactttcctttatttttggcaaacaccaccaaggtaatagattagattactgttaaacctattatatattattktagcagtgcctataagacactaataaagagaaaatgcaatagtattggcatgattaagtgaaaactattaataaaagaaagagttcatcatagttattggatttgaatgtattagaaagaagcacagtatgttgggggatggcaaaattgcgttacaaagtcattcaaattctatatggatttttttagtgagtaattagtttttaaaaccatggatactgacaaaaataaaggagtagatgatgcaaagcagatggatcatttaatttatttctcaattacagttgacaggttgggcacagaaatctgcaagtcgtctatttctttatggtccattttgcagctgtgtttattgtcataataaataaatacattatctca

SEQ ID NO: 25892 - DNA, 650 bp, Homo sapiens
ttttagtatatctgttggccccagactcagtcctctaatgtctcaacccagtaggactcttgttttgtgttctaatcactctatgccctgagccagagaggatacccaaggtaaactgttgtgtcaatctgaataatctccattataatttctttaaggttcaacttctttccagattttgctaactttttcttgcctgctcatgccttcaaatagattttaaaaacatatttatcattgtgtacatttattgtttatggaagggttatgctaataaaatcaacacctttattacaagaattagaactccstttagtagacttttgcttataaaatcatgttctcaaaataaagaaaaaaatgaattttttctaatcttgggtcacatcagttgtgttttgtacattattatttattctttaaaatatatcactgtagattttgcattttccagggctatttggaggtgcttaagtcaaaatttactgcttctctctattatgatgtcttattattttttaacatataaaacagaaaaatagccagccgtaagagatgacttttaatataaataacaattcttacaatgccaaaatatcttttacaaaaggtggttataaggtatcattcttagattaggcatttcatta

SEQ ID NO: 25893 - DNA, 517 bp, Homo sapiens
tttgaaatgattacaaaggtaatgtaatttcagttgacatttttgaattatttaatataaacattgtattaaatattgtagtaatagattttaacttttgagaataagatggtgttagagggactcagtttttttctctttactgaaacaactaaaaatcaggaaactatatggaataatgattctcagaacattgaaacaatgtagtttttttcyccctagggaaatactacccatagaaaaccactcaacatcattagccattagggaaatgaaaatcaagaccacagagagagattaccttacacccactaagatggttttaatcaaaaaggctagacaataacaaggattgacaataatttggagaaactagaaacctcatggttgctaatgggaatgtaagatggtaggaccactttggaaaacagttgtgcagttcctgaaaatgttagacagaattactttatgactcagcaattctgctaggtatttacctacaaacaaaaatatatgt

SEQ ID NO: 25894 - DNA, 1026 bp, Homo sapiens
tcaactatttgaccaaggatcatctctgccacaggtkctagggttgttttatgtaaggttatttatcaatcatgcacagttctgctgtagcaattgtgctcttagggaatgtatattagcataaaattactatcaacaaaaaagtgttgggagatagaggccttcataattgaaataataaaattaaattttctccaaaattttttaaattttccattaatgtgaatgtagctaaaaggtgagttaggtgagtagcaataaagcttaaatatatccacaatatgaattgacctagttttgcctaagaaaaatggtctttacttttctctcaacggcagcattattttaattacatattgtcgtacatatttgtattaccttttcagttattgtctttatatgaaaaaaatgaaataaatacttgcaatttgtgttgctggaaacaactttactttttctctatatacctagagctaattacattcatgattatattaatatgtaatgcagagttgttctaagaggagtgctgaagtacaattcaattaacctcatgaaagctcagcaacaggaaaatttcttatgctcactgacagtgtggtctgttactaacattgatggatatgaaactacagatacatggcagacaaaccctacagtaatcctcaatgatgtctgcctactggtgttcatgcttttgtataatcccttctgtttgggtgtgattggagcctgtgacttgttcctagccaatagaaaatggcaatgatgtaggaatatctctcccatacctaggttacattttataacaaaggtgatgagatatcactcctatgatgctattatgttctgtaaatctctgtcactagagttgctcttgctccttgctggctctgaagaagcaagtcattgtgttatgaattacctacagagaagcttccaaggcaaaaaactacaggttacctgtaagagctgaaggtctcaatcttacagtcacaatgtaataaattctgctaacaacctgaa

SEQ ID NO: 25895 - DNA, 1026 bp, Homo sapiens
tcaactatttgaccaaggatcatctctgccacaggtgctagggttgttttatgtaaggttatttatcaatcatgcacagttctgctgtagcaattgtgctcttagggaatgtatattagcataaaattactatcaacaaaaaagtgttgggagatagaggccttcataattgaaataataaaattaaattttctccaaaattttttaaattttccattaatgtgaatgtagctaaaaggtgagttaggtgagtagcaataaagcttaaatatatccacaatatgaattgacctagttttgcctaagaaaaatggtctttacttttctctcaayggcagcattattttaattacatattgtcgtacatatttgtattaccttttcagttattgtctttatatgaaaaaaatgaaataaatacttgcaatttgtgttgctggaaacaactttactttttctctatatacctagagctaattacattcatgattatattaatatgtaatgcagagttgttctaagaggagtgctgaagtacaattcaattaacctcatgaaagctcagcaacaggaaaatttcttatgctcactgacagtgtggtctgttactaacattgatggatatgaaactacagatacatggcagacaaaccctacagtaatcctcaatgatgtctgcctactggtgttcatgcttttgtataatcccttctgtttgggtgtgattggagcctgtgacttgttcctagccaatagaaaatggcaatgatgtaggaatatctctcccatacctaggttacattttataacaaaggtgatgagatatcactcctatgatgctattatgttctgtaaatctctgtcactagagttgctcttgctccttgctggctctgaagaagcaagtcattgtgttatgaattacctacagagaagcttccaaggcaaaaaactacaggttacctgtaagagctgaaggtctcaatcttacagtcacaatgtaataaattctgctaacaacctgaa

SEQ ID NO: 25896 - DNA, 590 bp, Homo sapiens
gccaacactagaaccacgctggtgtcatcttaccccggttttttccaagcacatcagctttgtttcattcgatctgttatttgaaatacagcactttttgaatcccagcamgaagctgtcttcagcaattttatcataagctacaagtacctatttacataacattatgggagttggcatttttattcattttgaacccatgcttttatgatttctacctcataattatttatagtgtttttttaaaacaaatatatttagaaattgtattgtgcctcttccagtccccccatcaaggaggatgagataagagaaaagaggaaaggaaggcactaaaacccctaaaacccaaagcacagggatggtgccaaagaaaaatgggaaggccggattgataaaagggttgggtcaactcccaggtatgccttgtgggtcaagagagtgggcagtgggagttgggtgaagcactattggcagcagggtgatggtagtctggggtcctagacaccagggacccggggtttcctccttgtctaatgaggcagaactggattcaggattaaggggctaaccaatattccccatcagta

SEQ ID NO: 25897 - DNA, 590 bp, Homo sapiens
gccaacactagaaccacgctggtgtcatcttaccccggttttttccaagcacatcagctttgtttcattcgatctgttatttgaaatacagcactttttgaatcccagcaagaagctgtcttcagcaattttatcataagctacaagtacctatttacataacattatgggarttggcatttttattcattttgaacccatgcttttatgatttctacctcataattatttatagtgtttttttaaaacaaatatatttagaaattgtattgtgcctcttccagtccccccatcaaggaggatgagataagagaaaagaggaaaggaaggcactaaaacccctaaaacccaaagcacagggatggtgccaaagaaaaatgggaaggccggattgataaaagggttgggtcaactcccaggtatgccttgtgggtcaagagagtgggcagtgggagttgggtgaagcactattggcagcagggtgatggtagtctggggtcctagacaccagggacccggggtttcctccttgtctaatgaggcagaactggattcaggattaaggggctaaccaatattccccatcagta

SEQ ID NO: 25898 - DNA, 549 bp, Homo sapiens
tttaaagctgatatcgttgtaatctgagataatctagaagagctcatagtcagttcttttttttcccagtcaagtgaaatgctcttgactatgtcatttatatttgaaaataattaacaaatgcaagtttttaaaatgcytgttaaaataggcataacttgagcataaaaaatctgctttaaagcatattaaatccagttccacagataaatttgacagggaaatgatgaaaaaataagttaacagcagcgatgggggtattaataaaagtgttaagaaaatatggaatgacgtttggcaaacagtgtggtctcaaactcttgaagtaactcaacctatattctcttttgataaggggtagtcttttagaactttatattagttttcagtataaaataatagtatttcattctaagaaagaggaacataaaatagagttatccataatcttcccaagcctatagcactgttgttaccatctagtggaattcattcctccatttattttacttaggaaatcacacagcacataaaactttctatcttgct

SEQ ID NO: 25899 - DNA, 2255 bp, Homo sapiens
ttctctccatctgcctgctgtcagcctagataaggacatgttacttctggacaagaatacagaagtaacctcctcactggtttttctggctacaatctcttctctcagaccatccttcccttgttcagaattaaagcatagctcagagtataccgtcctcctgctcaacacccttccacttacagaataatgtccaaattccttagcatggcattcatgaccctccataatccagctcccatccatccatcatccagctttgtcttcccacaatgtatatttcacctttgcaagattttagctacatcagagtactcaaggctcccattccctctgactttgtacaacctctttacctcttgggatgccttcccaccattttatctacctaaaccctacctgtccttcagagtataattcatcacatgtcttccatgattctttcaccactctctcaactggaagaaaactcttcccttcctgtgtattcacggtgctttggacctattatatactgtaatataaaactgaagctcttaggttggtgtatgactacctccctccttgtggctgagataatgtcttgctcatatttatataatttgtacattcttatacacttacagaatacctactatctttaaggtgttacaagttataaaaatatatttgaactttacattgacattttcaaataaaaatttaaagctaaaaattaatacagtgtaatattgcagcacttttcaatagcataaagaaaagggtaagagactttcccctacgccttttttggcagccattcttgggtaaatctatgagtataccctaatttaatagtttttaaactttttcacatcaagaaccactttgcaaatcttatgaaagctttgaatgcccctcatacacatacaattcaaatataaaaatacatggaaaaattataacttgaaaaattttacagtttccaacccaaataaagcctaatgtactcccaaaatctgaggttaggaacccatacttttaggcttagcccactttttaccccataagtggaaaagttggcttttaattacaggttgactttcccttttctgacttttctaaaccctctgctatttactgtctactagttaatctaataagtggttaataatccccatatgtcaccaagatgaagcatgaatttttataaaactatcataggataataaaatgcatgtaacatcaaggcagtggtgaacacaggcataaagtaaactatggataacctagtcggtacttgaggaacttgcagcatctcagagttatcaagaacaccagttggtttaccctagatctgtggcagcctggtttaaaaaatatatgtacttttagataaaacagtgacaactagaggatttattatactattaaaaataaacaagtagtcattatttaaatcagtagaaaatactgtctcagttctcaagacacttaggaatatgtttgggagataagagaatggaacagctaaagaataaggcggtctccaccattaggatataaatcactgatagatttattttgtacaatatattggtgtttaccagtagacattattcagcacctagtctatgacactcttagatactgggctcataagatgagaggaacccaggggaagggagacatgggtggggacaagcatgtgagcagcaaggtcatagagacaatagggtcaagagcactgatgggaggtgagccttggataggaaaaggaagacctctgtgactgagaggaagccagcaaggtactgatgtgttcagggtgagcttgccaggaaattgaaggctttcatacctggcgacctggttttgagaatgaagatgtgatctgctgaaaataagggagtggaggaggatgtggaataatcactgaggaaaccagaagtggacagtgaccaaagacaagttaaatgttacacagtggaatgctgtgcagttgttttattgtcctattttacagatgagagaaataaatgtatcctatctttgagaagttttagaactttttttttttttctgagccaatcttgcaaaccctgttacccaggctagagtgcaggactgcagtttcagctcactgcaacctccacttcccagattgaaaggatccttcggcctcagcctctcgagyagctaggaatacaggtgcgcactaccacatccagctaattttgtagagatggggtctcaccatgttgcccatgctggtc

SEQ ID NO: 25900 - DNA, 2255 bp, Homo sapiens
ttctctccatctgcctgctgtcagcctagataaggacatgttacttctggacaagaatacagaagtaacctcctcactggtttttctggctacaatctcttctctcagaccatccttcccttgttcagaattaaagcatagctcagagtataccgtcctcctgctcaacacccttccacttacagaataatgtccaaattccttagcatggcattcatgaccctccataatccagctcccatccatccatcatccagctttgtcttcccacaatgtatatttcacctttgcaagattttagctacatcagagtactcaaggctcccattccctctgactttgtacaacctctttacctcttgggatgccttcccaccattttatctacctaaaccctacctgtccttcagagtataattcatcacatgtcttccatgattctttcaccactctctcaactggaagaaaactcttcccttcctgtgtattcacggtgctttggacctattatatactgtaatataaaactgaagctcttaggttggtgtatgactacctccctccttgtggctgagataatgtcttgctcatatttatataatttgtacattcttatacacttacagaatacctactatctttaaggtgttacaagttataaaaatatatttgaactttacattgacattttcaaataaaaatttaaagctaaaaattaatacagtgtaatattgcagcacttttcaatagcataaagaaaagggtaagagactttcccctacgccttttttggcagccattcttgggtaaatctatgagtataccctaatttaatagtttttaaactttttcacatcaagaaccactttgcaaatcttatgaaagctttgaatgcccctcatacacatacaattcaaatataaaaatacatggaaaaattataacttgaaaaattttacagtttccaacccaaataaagcctaatgtactcccaaaatctgaggttaggaacccatacttttaggcttagcccactttttaccccataagtggaaaagttggcttttaattacaggttgactttcccttttctgacttttctaaaccctctgctatttactgtctactagttaatctaataagtggttaataatccccatatgtcaccaagatgaagcatgaatttttataaaactatcataggataataaaatgcatgtaacatcaaggcagtggtgaacacaggcataaagtaaactatggataacctagtcggtacttgaggaacttgcagcatctcagagttatcaagaacaccagttggtttaccctagatctgtggcagcctggtttaaaaaatatatgtacttttagataaaacagtgacaactagaggatttattatactattaaaaataaacaagtagtcattatttaaatcagtagaaaatactgtctcagttctcaagacacttaggaatatgtttgggagataagagaatggaacagctaaagaataaggcggtctccaccattaggatataaatcactgatagatttattttgtacaatatattggtgtttaccagtagacattattcagcacctagtctatgacactcttagatactgggctcataagatgagaggaacccaggggaagggagacatgggtggggacaagcatgtgagcagcaaggtcatagagacaatagggtcaagagcactgatgggaggtgagccttggataggaaaaggaagacctctgtgactgagaggaagccagcaaggtactgatgtgttcagggtgagcttgccaggaaattgaaggctttcatacctggcgacctggttttgagaatgaagatgtgatctgctgaaaataagggagtggaggaggatgtggaataatcactgaggaaaccagaagtggacagtgaccaaagacaagttaaatgttacacagtggaatgctgtgcagttgttttattgtcctattttacagatgagagaaataaatgtatcctatctttgagaagttttagaactttttttttttttctgagccaatcttgcaaaccctgttacccaggctagagtgcaggactgcagtttcagctcactgcaacctccacttcccagattgaaaggatccttcggcctcagcctctcgagcagctaggaatacaggtgcgcactaccacatccagctaattttgtagagatggggtctcaccatgttgcccaygctggtc

SEQ ID NO: 25901 - DNA, 959 bp, Homo sapiens
gggatccagaaccaaccacaagtctccctcaaactgttgcatgatactttctgctccagtaggcctagagatctctcactagccacagatgaggaatttgcaaggtatctgacagtcatcagatcctaagcttgccagtgcctttgcattttagaagttaggtcgtttgggagcataccaacttctaaatgcttaattttcaactgaagagccaccaatacaggcagaagatggattctgtaactatattttattttattttatttattttgagatggagtttcactcttgttgcccaggctagagtgcaatggcgtgatctcagttcactgcaacctccacctccccagttcaagcgattctcctgactcagcctcctgagtagctgagattacaggcacatgccaccatgcccggctaattttctgtatttttagtagagacagggtttcaccatgctggccaggctggtctcaaactcctgacctcagatgatccacccgcctcagtctcccaaagtcctgggattacaggcgtgagccgctgcgcccggccaacagtttttaatgtatactattctacatctattgtcgaacatttaaggtggtttccaattatctgcttctaccaattaggctgttaccaataaggggtgtacttttgctacatgaaattgagatgtcttagtttatttttttgttattcattcttagtctcatttcatttgttgtcaaggaatgaagcctacaccattctccatttggaaatttgaggccaggggcatcatgtattttggtaatttcccatggacatttgaaaagttgggacgttctctctaagttcataatgtacatttccagccagagatgaaaacgtacaaatgagtctgttcaytggcccaggggcccagagagtgtgcgtctctccttaaccccctgttaggcctcattgggtaggat

SEQ ID NO: 25902 - DNA, 959 bp, Homo sapiens
gggatccagaaccaaccacaagtctccctcaaactgttgcatgatactttctgctccagtaggcctagagatctctcactagccacagatgaggaatttgcaaggtatctgacagtcatcagatcctaagcttgccagtgcctttgcattttagaagttaggtcgtttgggagcataccaacttctaaatgcttaattttcaactgaagagccaccaatacaggcagaagatggattctgtaactatattttattttattttatttattttgagatggagtttcactcttgttgcccaggctagagtgcaatggcgtgatctcagttcactgcaacctccacctccccagttcaagcgattctcctgactcagcctcctgagtagctgagattacaggcacatgccaccatgcccggctaattttctgtatttttagtagagacagggtttcaccatgctggccaggctggtctcaaactcctgacctcagatgatccacccgcctcagtctcccaaagtcctgggattacaggcgtgagccgctgcgcccggccaacagtttttaatgtatactattctacatctattgtcgaacatttaaggtggtttccaattatctgcttctaccaattaggctgttaccaataaggggtgtacttttgctacatgaaattgagatgtcttagtttatttttttgttattcattcttagtctcatttcatttgttgtcaaggaatgaagcctacaccattctccatttggaaatttgaggccaggggcatcatgtattttggtaatttcccatggacatttgaaaagttgggacgttctctctaagttcataatgtacatttccagccagagatgaaaacgtacaaatgagtctgttcactggcccaggggcccagagagtgtgcgtctctccttaaccccctgttaggcctcaytgggtaggat

SEQ ID NO: 25903 - DNA, 2173 bp, Homo sapiens
tcagatagttgacatttttatgtactcacgataasaaggtgaatgaaaaatgtactttttgtctcagtgatcctatcccacttctgggaatccatcctatagagaataccaatacatagagtacgagaatgtctattgttaacaacctgtacattgtgaatataagttaattgttaaagatgtatttttatttgttaaaaatatcagtgaaacatttttggattacatatggtacattcaaactatgggatgtcatgcagctatattaaaataattggatcaccgtacacttgggaaaatgtacatgatatttttgaagtgagcaaagaaagttgtagatatgtaggtacatataaatatatggtcatgtatttcatataattttgctgaaaaaaatacaaaaatgcatatgtttgtatatttttgtgtacttgtagaaaaaataaggatatttccctagggtgagctagtgtatcttgctggagaggtggatgtgaaatgaatatgaatattacatttgtcattttaaaagtatcagtagaattttacatataaattttggccattttactttagggaaacatgctattttgaaatgagtcagaattacacattttttgaacaatgtattactgaacctagaggtaaatatacagaattacagaatctgtccttgtatttccctcgcattttgacgtagtcacagtggagattgaatctctttttgatgatgaaaaatttgtctagagttttttaagggaggtatgaattttgaagtagaatatagctttgaatgatactcaaaactaaatttaatggccattcccaatttttaagcaagacatacattcaaccttaaagttttcaacttgattcctgtgctttgttaataactctgccttagagtaattagggagtctgaattgcatttactcttaaaaggcagaggttggagccagaaacttctgtcttgtcatgttgtattctgtctggctgacatggggccaaatcactcttgtggttctgggactcagtttctccctttctcaattggaatgataatattgaaaattaactggttttttagattagtttgagttctgcataaaaatgtgctgtagtcccagctactagggaggctaaggcaggagaatcgcttgaaccaggaggcggaggttgcggtaagctgagattgcgcctttgcactccagcctgggcaacaagagtgaaattccatctcaaaaaaacagaaaagtgccgtaatggcagccttagagatgtcatgtcatgttctgttaattgtcttattattgaatgctataacaaacttgttacagattaacagtcatcactctgtaatagtgtgctaacttagaaaagtttatccttgctttttgaattataagattcttgtaataatatatcatcgcagtttggtcttttcataatgttaaatccagaaggaaccttgaagatgaggatgcatcagcattttaaagatgttcaaactgaggtgaattacttgtccctggttacacagctggctaatgagggagcttatgcttgatgcttcatttgagcaacattctggggagtatttctggcataaaaccaatttacaaatgagattactctaaatctagtgctctatctacagcatttatacattttgtttttcattattatcaaatggaataaatatttaaaagtatacataatctctatcagtaaaactagtatctaaaaaagtataccctttagaagctgtgtagctttgcattcatttttaatttttttcttcgaaacaaatttctttaggatattctataaactacattaaatgggtcaatttttgcagaaggcaaatataaataatatttacttatttgcatattttattttaattagatcattatctagtaatttcctttaactgtgatttttaaaattatatatatatatatataaaatatggtgctatataatactgctttaaaagctggacgcggtggttcacacctgtaatcccagcactttgggaggctgaggcgggtggatcacgaggtcaggagctaagaccagcctggccaacatggtgaaaccccgtctctactgaaaatacaaaaattaaccaggtgtggtggcaagtgcctgtaaatcctagctactcggt

SEQ ID NO: 25904 - DNA, 535 bp, Homo sapiens
ctaattgttttattttgctactcacctagactgaaatcatgaaaaccaatttagtttgactcatagttggaaaattccaatgctcagagcactgataagctagaaatgatgcaagttatgcttcacaaggttaacttctgatcaattctgtattttagtgtgattattctgaatttgcaaatgcacgcaggagagccatgttttgtttttttctcagtttgagcacttaatttctcaccacatgcatatgagggggttgtgcattcctgattatttgttaaaggcttttagtcagatttttgccagcagctggcaaaatgaagtcattttatgcaacagaataaaaggaaaatattttggccttactttcagggtaaacctatgttcattaacaacaaagaagaatatatggtaccaagaaggaaaaaaaaatcaaatgcgtactacttcctttcaaacagacttatgaaaaattamgaaaaaaaatctgaaaacacatcctaatgtattaaaaaaatatggtgaagtagaaaaa

SEQ ID NO: 25905 - DNA, 535 bp, Homo sapiens
ctaattgttttattttgctactcacctagactgaaatcatgaaaaccaatttagtttgactcatagttggaaaattccaatgctcagagcactgataagctagaaatgatgcaagttatgcttcacaaggttaacttctgatcaattctgtattttagtgtgattattctgaatttgcaaatgcacgcaggagagccatgttttgtttttttctcagtttgagcacttaatttctcaccacatgcatatgagggggttgtgcattcctgattatttgttaaaggcttttagtcagatttttgccagcagctggcaaaatgaagtcattttatgcaacagaataaaaggaaaatattttggccttactttcagggtaaacctatgttcattaacaacaaagaagaatatatggtaccaagaaggaaaaaaaaatcaaatgcgtactacttcctttcaaacagacttatgaaaaattaagaaaaaaaatctgaaaacacatcctaatgtattaaaaaaayatggtgaagtagaaaaa

SEQ ID NO: 25906 - DNA, 509 bp, Homo sapiens
ctgtgcagtgggcaagaagaacctgtcgggcaattacaaagcccaacatgacttggttatgcttaaagatttggagcatgttctttcatctagctagctttgataaatttgtggttgggggagagaggccacagatacattgtttgcatggagtgtttctcttagctattagagtgaaatacatatcacaatgctgtttgtcaactcctccaatccctgaaattccatttgctttgaacaaatgccctcagataaataccttctcaacatgccttccttatactaggctcttctctcacctctttacacttgtccatatacaataatattttgcccaaactgctatcttcatacttagtatttccccaactatctgtaaattccttaaagattctatacttatcttgctgactttgacctgttagaatacagaaaatagtctctacatattcttagtcagttctgtatctccagaacctactcmttataggtagtgagtgtatcttacg

SEQ ID NO: 25907 - DNA, 816 bp, Homo sapiens
aattcagaattgcacactgtaatctgttgttgtgtgcctgttgtgtaatctgttgttgtgtgtcctataatccagcatagtcccttagtctatccttgtctttcatgacatgaacacttctgaagaataagggctgacgatttcatagactgacccttagttgggctttgtctgatgtctctcgtgatcagattcagatactgcatgtttcgcaggaatgccactcaagtgatgggtgtcctccatgcatcgtatcaggaggcacgtgatgcccatttgttccattaccggtaatgttaacattgatcacttggctaaggtggtgttggcctgctctcttcactatgttattatttttccctttaaaactaatagtatcttatggctagagcaattttttttttaaatggcaatctgatgacgtcacctcctttcctaaccccagctgaaatcctaactccttatcttggtgtgcccagccctatgtgatctggcacctgctgagctctgtgatgtcatctcytatcacattcttcactccccctcctcccacccggttggggaactccaggcacattggccttcctgctctttctagaacatacctctctcattccagcctcagggcctttgtactagctcttctcttggccttgaatgctcttcctccaataatcacatgctggcttctttgtgtcctcccaatctcagcttacatttcaccagagggagctccccaggcactccaccacagcaccctggtttggttcttagcataggactttctaccaattgacatttgtacatttatttgtt

SEQ ID NO: 25908 - DNA, 901 bp, Homo sapiens
gagccaatgttttttgaaatgtctatatcccagcttttctagtgaagtgcaaggcacagagaggggatycaataaacttttgaggcatgatgggggaggatggaggagaggatggaaggaaagcagcaggaaaggagaaatggaggacaacagcgtagagtctagagaagagctagaagctcagtgtagtgggaagctcaagtgatgaagagagaagaggccggagagatggttggagggagaccctgaagggcttggttcgatgagtaataagtcatttaagctccatcctgtgggttgtcagctccctcagagccaggggtcgcatcccttccactctttgtatctccagaaccaagcccagtgccttatgcatactaagtgctcagacctgttgttgaatcagcacaaactcctagtgagtgaccaggacatcttcggtgcattaggaacaccctgtgggcatgcccagaccacctggattgcctcagaaccacaccccactctgcttttctacttctgattatgcgaagggcaccaggaggtgagagaccccacatctgtatgtgcacctatggggactgatgtgtttttctgcacacgattgccacaagtggaatggaggtatggctggatgaagtgggtgacattcttccctccccatctccttcctctataacactgtcatgggtttgtcaccagccaaaggaggctggaaacaaaggacatggaggtagcctccaagctgtctgcattagccccaaactaaagcttaccgtttgcaaaagctatgtatttagagagcacatctcactgacaaattactttctaccaaattttaatgcggcagcatcctctgctgtttgccagcccagcctccaggggctagaacaggctggat

SEQ ID NO: 25909 - DNA, 901 bp, Homo sapiens
gagccaatgttttttgaaatgtctatatcccagcttttctagtgaagtgcaaggcacagagaggggatccaataaacttttgaggcatgatgggggaggatggaggagaggatggaaggaaagcagcaggaaaggagaaatggaggacaacagcgtagagtctagagaagagctagaagctcagtgtagtgggaagctcaagtgatgaagagagaagaggccggagagatggttggagggagaccctgaagggcttggttcgatgagtaataagtcatttaagctccatcctgtgggttgtcagctccctcagagccaggggtcgcatcccttccactctttgtatctccagaaccaagcccagtgccttatgcatactaagtgctcagacctgttgttgaatcagcacaaactcctagtgagtgaccaggacatcttcggtgcattaggaacaccctgtgggcatgcccagaccacctggattgcctcagaaccacaccccactctgcttttctacttctgattatgcgaagggcaccaggaggtgagagaccccacatctgtatgtgcacctatggggactgatgtgtttttctgcacacgattgccacaagtggaatggaggtatggctggatgaagtgggtgacattcttccctccccatctccttcctctataacactgtcatgggtttgtcaccagccaaaggaggctggaaacaaaggacatggaggtagcctccaagctgtctgcattagccccaaactaaagcttaccgtttgcaaaagctatgtatttagagagyacatctcactgacaaattactttctaccaaattttaatgcggcagcatcctctgctgtttgccagcccagcctccaggggctagaacaggctggat

SEQ ID NO: 25910 - DNA, 1135 bp, Homo sapiens
agcaccaccagccatcagcctggtaggagtagagctcctggcctcctccatcttggcagcattcatcagcctgagcgtgagtcccaactcatttgcaatcattggcatcaaagtcagcactgcagagagtcactcagtgtgtgtcccagacctacccttgtgcagcacctgtggggctcagggctctaccctccaaccactgaactatacacacttggtgtagggtggctatgtacatccaggtgcggaaggtatgacctgaattgccaaaaagaatgtcttataagtattgctctaaaaacagtctgtgaaatgctggagccaacatgaagcttgtacaaggtyggcagggcagtgatctggagagtgggatagcatagggggctggagccactcctgggtgcaggcaagccttgtcaatcccggacttatgacccagggcaatcctgctcgtttggagtctcatccccaggaatcctgaacggcagggcagggaggaaggactggacatcccgctgcctcaggcactgtggctgtgtgtctgtgtatgcatgtgtgcctaggtattgtctgtgtgtgtgtgcattgtgtgtgtgtgcatatgccttgatcagagatcctgtgttaggcagattaaaactctacctgacattttctgttcctttgagaatatatgtaattctcaaattctagaaatgatcattagacattaacaatatgataaacttgagaaaatagaacttgaaatacatttatggcttctttaaaaccacacgcacacacacacgccttccattggctcacacgtacaaactggggtttgcatcaggactcccatccagttgtatacattacttggcaaagctgctcaatgggggaactccaaaacctttgctctgagcgtgggcagggcctgtacaatggccgaggtgattgatggggcatcccatctgtgattgcattacgcacctaagactgtcttgctagcagactcactctagagactccctcttgctggcttggaagaataagtggccatgttgggagacccagagggcaaggagctaagggtcactcatagttgctaagaacagcctccgtccgatgccagcaagaagctggggccatcagttct

SEQ ID NO: 25911 - DNA, 986 bp, Homo sapiens
tgctggggtccacttctggagccctctctggcaggtctggggtacggagctggaatgtgggtctttccacacccctcaaggagctcctctaagggggaaggtggggatgtggccttgcacactcagctgttggtgtttgctgctgagacagcagaagacagagcctcctccgcaccctagatggtttgagagcaaaagcagacggcaggctccacactggatcccacgacaggcagggtggccaccagaggtgaaaagggcttctaagattcatggcctggagccctaaagtcacctggaggtggccaatgtggcccaagtaccctgtgtgtgtggccatgtgtgtgcatgtgtgtgcatatgtgtgtgygcacgtgttatgaattctcacatgaaatggtcagtcaggtgcagccacacagtagacacagaaaaggctcaggaaaacacagtttgccatgctcacaggtcctagaggccggaggccgagtgctccacacgggccctatgggagagaaccaaggggtcaggaggcagggctggagagaggggaaggcttcagacatcggcgctgttggggctcctgggggaaaggcaggcagagcaaggcagctctaagccactaggctgtccccagttgcctggcacctgccccccagatcatgaaggcagaggaaggtggtctcctgggtgtcctgccacatccagaggcggctctggatgggtgagcttgaacatcaagaaagctgtcttctcattttcccaccatcttagagtccacgggaaagaactcagccttatttggcactgagcggcagacacagaggcatcagatggctgaggccagggctgtgggatgcggtgtgggaggaggctctggagggcagtggggccgttgcattgcttctgttagaggcgcacagatggcttgagtgcagaagtttgagagcagcctgagaaaaatggtgaaaccccttctctacaaa

SEQ ID NO: 25912 - DNA, 986 bp, Homo sapiens
tgctggggtccacttctggagccctctctggcaggtctggggtacggagctggaatgtgggtctttccacacccctcaaggagctcctctaagggggaaggtggggatgtggccttgcacactcagctgttggtgtttgctgctgagacagcagaagacagagcctcctccgcaccctagatggtttgagagcaaaagcagacggcaggctccacactggatcccacgacaggcagggtggccaccagaggtgaaaagggcttctaagattcatggcctggagccctaaagtcacctggaggtggccaatgtggcccaagtaccctgtgtgtgtggccatgtgtgtgcatgtgtgtgcatatgtgtgtgcgcacgtgttatgaattctcacatgaaatggtcagtcaggtgcagccacacagtagacacagaaaaggctcaggaaaacacagtttgccatgctcacaggtcctagaggccggaggccgagtgctccacacgggccctatgggagagaaccaaggggtcaggaggcagggctggagagaggggaaggcttcagacatcggcgctgttggggctcctgggggaaaggcaggcagagcaaggcagctctaagccactaggctgtccccagttgcctggcacctgccccccagatcatgaaggcagaggaaggtggtctcctgggwgtcctgccacatccagaggcggctctggatgggtgagcttgaacatcaagaaagctgtcttctcattttcccaccatcttagagtccacgggaaagaactcagccttatttggcactgagcggcagacacagaggcatcagatggctgaggccagggctgtgggatgcggtgtgggaggaggctctggagggcagtggggccgttgcattgcttctgttagaggcgcacagatggcttgagtgcagaagtttgagagcagcctgagaaaaatggtgaaaccccttctctacaaa

SEQ ID NO: 25913 - DNA, 501 bp, Homo sapiens
cagaccccggccatccagctgtgctggacaacaccgaaccctgacgccccttgatgtctcaccctgctcctctccctcctccatcccccaaccattcccygccatcatcatcacccgattgatccatttcaatggaaactggattttgtaagtccagtcaaacatcttcagtggcttttatcaactgcagggcaaaattggagccctcgccttggcagaagaccccaggttctgtcctccgcccccaacacccttgtggctccagccggtgcggctccaggccaatactccctggtgctgcttgctgttctgggaaagcccctccccgccgcacacctggatgaggctgcaggaggtttccccaggtgagggggctgcggcgccagagtcctttcctgaagccccaggctgagccagatgttccctgtggggctcgctctgaggctgtgcctctccgtaatagagtcgtttgtctctgagccgactgctccacagaccagg

SEQ ID NO: 25914 - DNA, 501 bp, Homo sapiens
cagaccccggccatccagctgtgctggacaacaccgaaccctgacgccccttgatgtctcaccctgctcctctccctcctccatcccccaaccattccccgccatcatcatcacccgattgatccatttcaatggaaactggattttgtaagtccagtcaaacatcttcagtggcttttatcamctgcagggcaaaattggagccctcgccttggcagaagaccccaggttctgtcctccgcccccaacacccttgtggctccagccggtgcggctccaggccaatactccctggtgctgcttgctgttctgggaaagcccctccccgccgcacacctggatgaggctgcaggaggtttccccaggtgagggggctgcggcgccagagtcctttcctgaagccccaggctgagccagatgttccctgtggggctcgctctgaggctgtgcctctccgtaatagagtcgtttgtctctgagccgactgctccacagaccagg

SEQ ID NO: 25915 - DNA, 501 bp, Homo sapiens
cagaccccggccatccagctgtgctggacaacaccgaaccctgacgccccttgatgtctcaccctgctcctctccctcctccatcccccaaccattccccgccatcatcatcacccgattgatccatttcaatggaaactggattttgtaagtccagtcaaacatcttcagtggcttttatcaactgcagggcaaaattggagccctcgccttggcagaagaccccaggttctgtcctccgcccccaacaccctygtggctccagccggtgcggctccaggccaatactccctggtgctgcttgctgttctgggaaagcccctccccgccgcacacctggatgaggctgcaggaggtttccccaggtgagggggctgcggcgccagagtcctttcctgaagccccaggctgagccagatgttccctgtggggctcgctctgaggctgtgcctctccgtaatagagtcgtttgtctctgagccgactgctccacagaccagg

SEQ ID NO: 25916 - DNA, 501 bp, Homo sapiens
cagaccccggccatccagctgtgctggacaacaccgaaccctgacgccccttgatgtctcaccctgctcctctccctcctccatcccccaaccattccccgccatcatcatcacccgattgatccatttcaatggaaactggattttgtaagtccagtcaaacatcttcagtggcttttatcaactgcagggcaaaattggagccctcgccttggcagaagaccccaggttctgtcctccgcccccaacacccttgtggctccagccggkgcggctccaggccaatactccctggtgctgcttgctgttctgggaaagcccctccccgccgcacacctggatgaggctgcaggaggtttccccaggtgagggggctgcggcgccagagtcctttcctgaagccccaggctgagccagatgttccctgtggggctcgctctgaggctgtgcctctccgtaatagagtcgtttgtctctgagccgactgctccacagaccagg

SEQ ID NO: 25917 - DNA, 192 bp, Homo sapiens
ccccccagctatggackaacggctactggggccgcctcctccaggcggggcccggggggggcctgggattggtgagtggggagcctgggggccctggcgagcctcctggtggcggagaccccggtgggggtagcggggggttcccgggaggccgagggaagcaagacatcggggacattctgcagcagataa

SEQ ID NO: 25918 - DNA, 546 bp, Homo sapiens
gtaatccactctgcaccatgtagcctggcaggcagggccttctgggaactggccccactgtcttctcactggtctcctcctaatttctccatgctgccccagacgtcaatgtatccagctcttctggagtccatgtgctctctggarcatgcagctcactctccccatctattaccatcatgcctttctccccagtgccaccttagaagagtctactcactgggctgggttctgaggccatctcctaccatcttctgaggctatcttccttgagcctcccaactgatttttttcctcccttaatatccttaatgcagaaaccagcccctgtcttgataagatgacattacatatcaggagttggaaaaagagaggtggaatttagcactacgacagctcaggaaggttttactggacaaactctgggacttctttcaaatatatgttatcaacaaccccttcacctattttttatttttaggtctaacgttcacctttccctctcatattgaatctcatgagatcttccctgagagttgtgagggc

SEQ ID NO: 25919 - DNA, 603 bp, Homo sapiens
attttaaactatacctgcttttttaaattttaattttaatgtctttttttgagatgggggtctcactctgttgcccaggctggagtgcagtggcatggtctcgactcactgcagcctctgcctcctgggctcaagcaattctcccacctcagtctcccaagtagctgggattacaggggcaygccaccatgcttggataatttttgcatttttagtagagatgggtttcaccatgttggccaggctggtcttgaactcctgacctcaggtgatccacctgcctcggcctcccagaatgctgggattacaggcatgagccactgtgcctggcctatacctgcttatttttgaacatggctaataggagactgaacgctacccatgtagcttgtgttatatttgtctgtcagcactgatagtgtaatgtcttgggaggaagtatactaccatattactttttggattttttttcttttagcaataactgcaatgtgctctgatgattggttgttagtcagaatgaaaataaggccttttgataagaacacagacattagaattggcgacatacacctgagagataactgtcctgtaacaagactg

SEQ ID NO: 25920 - DNA, 519 bp, Homo sapiens
aaaatagtattccacaaaactggtccctggtgccaaaaagattgggactgctgatttaattctcacaactagaaaaaaaaaaaaaaacagaatcttattatctctactttataaatgaagaaacaaattgggcaaagagagcttcaagtagggtccagatgggaccaacgttcttgctcttagtcattctcttgacttgctctgagctttgtgattaattccataatggaggccaatcaggttatagatgcaaataggatccagattatggactctgaaaattttgatgattaaagcgggggcagcataacacatgaacctccttgaagcaggaaatgaaaagaaggggagaatggatataaaccaaaaagtgtgtctgaggcaggtgtcaatcaattcagaggtttatttcactatgtttgaggatccatctaggaaaaaagacacaagstacagcaggatgtgtgacctgtgttttttccaaaaaggctttgaggacttcaatatttaagggggaaa

SEQ ID NO: 25921 - DNA, 649 bp, Homo sapiens
tatgcataataatgggcattgcagcaccatttataaaattaaaagcaatataaatactcatagataggatatggggaaatttttgtccatgtagttaatataatacaatacaatataatataatataattaaaccataaaaatgacagcagttgaaaaatgcttcttggctagatacagtaaaaatggtatttatataaaacaatctttgatctgtaaatayacaaaaagtgtatgtattatacatgtacatatatatacacacatgaatattagactgaaatttttgatacagaaatgaacatagttgtttaagggcgctgggattattaatgcccttgtttttcacatttcaagtagtatctaagtaattgcctaaatatgacagcatagcttcccctcctaagagagacttacccaggaagccccagggtaatctgtgctttaggtaattttgaaatagggaaagaaagttaaagtagtcaaagactcaccaaagctccaccaggtggtcaggcactgggaaaattgacctagcacagtgtctagagctagctttctctagacttgctgttggacctgatgcagcatttcttaccttcctcgaggatgctgttaagaaagaactggctactcgaaagtgaagctct

SEQ ID NO: 25922 - DNA, 1750 bp, Homo sapiens
actaagaagtgcatgaggcactggaactggtgaggagagaagcaatatgttagtgtgtttcctgaggaaatgggacaagtaactrtattgatttcgactgctactacgacaaattacaagaaatttagcagcttgcttaacacaaatttattccagagacgagaagtccaaaatgggtctgtcttggctaaaatcaaggtgtcggcccggctgtgttccttctggaagctctaggggagaatctgttttctagcctttcccagcttacagaggcctctcacattctttggctcatggccccatccttcatcttctaagccagtagtgtagcatctcccagtgtctctgtctccggcccctgcttccaccattgcctctcctcctgcctccctcttagaagaacccttgcaaatacactggtctctggaataacccaggataatcttccaaggtttttaacttcatcacagctgcaaaatctcttttgccatgtaagctactatgttcacagatttcagggattaggatgtggacatctttggggggataatattctaccaacactgtagctagccaagaataagtaaaagaattgaaaaaagcactcaggtgtggcagaggctggagaccatgaagttattgtggctgaaatctgtaatttaggacttttaggaattggaatccgggaacgaagttggcagactgtaggtctaggccagggtgtggaaattttctttgaatatagcaggacagggatacagggagtaggggctttgagaaaagtgtaacttatttgctaaatagcaggattcaggctgagtaagaaagggaggaagaatgcttacggaggggaggacataaaagtatcaaacgatggtaaaatgtataatccaaggtttcagatatgagacagtatgacaaatggctgctaacaactttgaagaaaaatttttattataggggatcctctcctctttcattctagcacatgtcaattcattaattagactcaaggcagaattttcttagttttttctgtttattttattttattattattatttttttgagacggagtctaactgttgcccaggctggagtgtagtggcacaatctctgcttgctgcaacctccccctcctgggttcaagcaattctccttcctcagtctcccaagtagctgggattacaggcacccaccaccacaccaggctaatttttctgtatttttagtagagatagggtttcaccatgttggccaggctggttttgaactcctggcctcaactgatccacccacctcagcctcccaaagggctaggattacaggagtgtgccaccacccccagcctcaaggcagaattttctgacaccttatctttcgtctaaaggaatgcatttcatctactcttgatactggtcagaggtctcagaataaaaacgaagtccgtcttctaatgcagtaatttattgcagttcttttgttgcatctaattttttttttattatactttaagttctagggtacatgtgcgttgcatgcaggtttgttacatatgtatacatatgccatgttggtgtgctgcacccattaacttgtcatttacattaggtatatctcctaatgctatccctccccccttcccccaccccacaacaggccctggtgtgtgatgttccccatcctgtgtccaagtgttcttattgttcaattcccacctatgagtgagaacatgcggtgtttggttttc

SEQ ID NO: 25923 - DNA, 1750 bp, Homo sapiens
actaagaagtgcatgaggcactggaactggtgaggagagaagcaatatgttagtgtgtttcctgaggaaatgggacaagtaactgtattgatttcgactgctactacgacaaattacaagaaatttagcagcttgcttaacacaaatttattccagagacgagaagtccaaaatgggtctgtcttggctaaaatcaaggtgtcggcccggctgtgttccttctggaagctctaggggagaatctgttttctagcctttcccagcttacagaggcctctcacattctttggctcatggccccatccttcatcttctaagccagtagtgtagcatctcccagtgtctctgtctcyggcccctgcttccaccattgcctctcctcctgcctccctcttagaagaacccttgcaaatacactggtctctggaataacccaggataatcttccaaggtttttaacttcatcacagctgcaaaatctcttttgccatgtaagctactatgttcacagatttcagggattaggatgtggacatctttggggggataatattctaccaacactgtagctagccaagaataagtaaaagaattgaaaaaagcactcaggtgtggcagaggctggagaccatgaagttattgtggctgaaatctgtaatttaggacttttaggaattggaatccgggaacgaagttggcagactgtaggtctaggccagggtgtggaaattttctttgaatatagcaggacagggatacagggagtaggggctttgagaaaagtgtaacttatttgctaaatagcaggattcaggctgagtaagaaagggaggaagaatgcttacggaggggaggacataaaagtatcaaacgatggtaaaatgtataatccaaggtttcagatatgagacagtatgacaaatggctgctaacaactttgaagaaaaatttttattataggggatcctctcctctttcattctagcacatgtcaattcattaattagactcaaggcagaattttcttagttttttctgtttattttattttattattattatttttttgagacggagtctaactgttgcccaggctggagtgtagtggcacaatctctgcttgctgcaacctccccctcctgggttcaagcaattctccttcctcagtctcccaagtagctgggattacaggcacccaccaccacaccaggctaatttttctgtatttttagtagagatagggtttcaccatgttggccaggctggttttgaactcctggcctcaactgatccacccacctcagcctcccaaagggctaggattacaggagtgtgccaccacccccagcctcaaggcagaattttctgacaccttatctttcgtctaaaggaatgcatttcatctactcttgatactggtcagaggtctcagaataaaaacgaagtccgtcttctaatgcagtaatttattgcagttcttttgttgcatctaattttttttttattatactttaagttctagggtacatgtgcgttgcatgcaggtttgttacatatgtatacatatgccatgttggtgtgctgcacccattaacttgtcatttacattaggtatatctcctaatgctatccctccccccttcccccaccccacaacaggccctggtgtgtgatgttccccatcctgtgtccaagtgttcttattgttcaattcccacctatgagtgagaacatgcggtgtttggttttc

SEQ ID NO: 25924 - DNA, 580 bp, Homo sapiens
ccagcacctggggggccactgtgagcaatggaggctgccttgagcctctgagcacggcggccgaggccaatcttctcattgtaatggccgtcaacacagtcactgatttagatgccacttccctgggcccttgctgcacaggaagggagaagacctttcccaagccagtcaggatacgtcccttcccatctctctagtggtgcgctcaggctttttgcttccactccctcccagccaatcctacgagctctcagcacaaatgccccgtagactgggctgagagctcggagaaccgwtctgcataggggagtaccccatgtttcctccgttctgtgacatgactccgggaagcagatgctctggccacctcttcccttgggaagagcccacctgacagtcagtaggggcacttgtctgactgtccctgagtttgctcaagagtgtctgttcttaccctagaaatgctccccaaagcgcttgatcgctgctgctgtgaggagctgtgtcctgcctgtgagaagctccacttcccacggaggcatctggggctggtgttcatgctgggacttctatcaaggga

SEQ ID NO: 25925 - DNA, 587 bp, Homo sapiens
gtaaaaggtgactgcamctttcccagccccacccagtgcaggggacctacaggtgttgtctcagcggatggcaaaacaaccctgtaaagtgggcacctttaggacccccctttgcagatggagatgagctaggtggggactcccacttgtccgggttcctgcagggagaggggatttgagccctgctctgtgtgcaaacccagacagaagggcaggaaactgtatggccacatgctttctttggggctctccttcttgttggcttcctgcaaagtgctcagaagttcacattctctttctcccacttcggaggccttgttttcccctctctgtcaaatgggcgtattcggaggctttggggccaaggagagctgagttttgacaccagctctgcacttacccaaagtggggctggggacagtcccttgttgagtctccatttattattctgataaatagagatgatggccgggtgcagtggctcatgcctgtcatcccagcacttcgggaggccaaggcaggcggatcatttgaggtcaggagttcgagatcagcctggccaacatggcgaaaccccatctctacta

SEQ ID NO: 25926 - DNA, 602 bp, Homo sapiens
gaaatgataatttatctaccctcagttcgttagagtgaggacatttatttgaattaaaggacatgctcctggaagttgtgtttgtaccaaactttagtttaataaaataatgtttaaaatgcccatgaaatggatcagcaagaatccaatgtcttcaaaagggaatgacaatccatttcttcttggacactaaatttctagtgagataacagtgcttgaaagcaaattagatggcttaggccacaaaggcattaagtgagaaaggcttccctaggctattgctgcggacaacttaacaccaaagtaaagcttcactgttgtctttaaatatgggactgtcagagaaatcatcaccagctggcactagttctgaaaaacagattttttttctwtttttttttactgcttttgagaatattgaagtttcaattgctgtcatgggtcagtaatgtaagaataacagacaacatacccgaattgtgtttttcagttacaataaacatttgccactgacgatgaggtgacttatcttcacttcatgtttacaagcatgcagaaagtaagattgctgggttacaatttaaggattaacacatgatagg

SEQ ID NO: 25927 - DNA, 766 bp, Homo sapiens
tagctaagataaaattacccgtcaggctctgtttcaagcccttggacatcaaatgggaatttttaagcaattagagtggcagcactcttgccactcaaaagcaagagtgggatctctcttgcttttgagatccccgaagcaataagttgatgcttaaactatttttaattcagtagtggctgaaaggacaaatttctatgtatttcttgtaacacaaccacattaggttcttcctttagatattcttcaattgtcatagaatagcttccatcatgtccattcctggtgtggattttagatcctcaaatatcagttaataaaagatttcacaggcctttggttgtaaatatattttcaataccaaaaatattagaaactggattttgaaatgtgaatcattaaaaaaaaaaagaaaattcaccttaggaaaaataatctcctaatggtgaaggaatggggaaatctccaagtaacatccttaatgtgggttgatttttctaatgcatgggctagtagytgcaagaagtattacaaaattagaacatagaaataacggcaacttctagtttgcctctgttttaatcagaccatgtttttctcatttgctcctttttctctattctcaaaacttccttgagtatgagccttttagccaggactggctacataatttggggagctcagtgaaaaatgaaaatgtggggtttttgttctaaaattattaaaaatttcaagatggcaacagcagaactttaaactaagtgca

SEQ ID NO: 25928 - DNA, 645 bp, Homo sapiens
  misc_feature (1)...(645): n = A,T,C or G
cttgttttcccacttgaatgttgctttttggcctgccccacaccccatcctgtacccataaaaaccccaggctccaccactggcagaggggcagcagagcaggagagcaactgagcagcagagcagagcagcagaggagagaagagaaaaagcagctggatgccagagggtagcagcttgacttcagagggccagcttgacagcaggactttggagaagtgttcgaccatggacaaactcaataaacccgccccacattcaccacccttcaattccttcatasgacctgactcttcctcagcactggacaagaacttgggtaccaagagggcgggtgcaaaaggctgtcacctgaccttccaccgagctgttaaacaagccatccatggacggcaaagctaaaagagcacagtgcaactactcctgccggtgcccagaagcactcatgctggcccctgcacctgctcactcacctacatgctccccgtcctgttagggattgaaagctgtgggctgagtaaattagcaaacccaagggaaccatcccatttcaactaagccattaaaagaagatatgatcaggaggaattatcaagggaaaattaaatgacattatntcagttgctgttagagctttagtgctaa

SEQ ID NO: 25929 - DNA, 1053 bp, Homo sapiens
actaggatcatccagaataatctccctatctcaaggtccttaccttaatcacatctgcaaaatcccctttgtcatgtaaggtaacacataaacaggactgggaattaggacatggactgtttgggggacttcattctgcttaccacagcagtcttgctatcgagtcctcggacccgccatgcatccacagttgcaagcctctgagcagaagacctgggacttgaatcctgcagtccagacccctggagaatgaatattcctttccatacagctctttgatggccatgtcsagtttgccttctttgtcttccctgttcaccaaggcagggttttaaaattctccctttgtaggtcacagccctttctcactgcttcccttctgctcatctgtgctgggcaggtgtggaatcgctttacagacccagcacctttctggggaatggccaagagctgggacagtgcaagggactacaatttgaggcagcagatagaattctagatatgtggtttgtgtccgtcagtggcacttatatttggccttggtggacactttccagccctttctctagggacactgctctgcaccaggaggctctgaggaggcggttcaggagaggctggtgcaggatggagcctgaacctgttacagcacagcatttcctgacacacagtcatggcccatgagtcaatggagtgccggtagagatttaaaaacaatgtgaacaagagccctgatctgtagcatttgccgatttccttggtgtaaacactcccgcgaaggccgatgtcaaatgctaagctgtatgctgagtcggcacctgggactaggtggctccaaccatactgcttgtgactgaagccaggcaattggacccttgttaggcaaccctttcccttctgaactggaggaggaggagtccttgctgttctctaggaatgcaagctttgtttgtgaccatggaggtgctgacaatcatactctctgccatgtggagaggcccaggagaccacagcttatattgatggagaaatattgagttgttatgcagcttt

SEQ ID NO: 25930 - DNA, 1945 bp, Homo sapiens
gagtgatgacagcgccctgaggcagtgttctgttgtctgtgactccctaaagcatattctgggggcaaagaagagtcagggggacatacctgcaggagaaacactgcaccattcacccccaaatagggtataggatgtggctggcagccaggcaccaaggctgactgcataactggactgtgccaggcttgtaagctgccataatatgaccatgaatgggattctctttataaacgctaaatgggcaaaggcatttatgaagcaccctgggcatgcagggcaggtggaggcctctgtggctggttggttgcgctgagcagaaagggttagtgataatgtgtgtaaactgcctgggacatgatggatcctcagtaagtgctggcagatactgaccacaggaaagaagtttgggggttggagggtggaggggtggcattagggtatgtgagccgctccccatgcttcacctcccctctcccctcaagcactgggagccacacgctcagagcaccaccaacttacattggtgattatgtcgccgttgagttcggtcacagacttgatgtttttgaaagttgtcaccagtttattgtcaccttccaactgaaccactgtctgcagggaacagagaggtgacctgtgaggaaggggtggtggggggcaagagccttgctaatgaagttgcttcctttgcacaggtctcagctcataacaaccaaaatgctctggttcctatgatcccaagcctctagttctctggctccaaatagaagtgaggtgcatttaagaactaaataaaatgtcacgacttcttttgtcagaactttaattcatggcatgtgatctagaaatgagcatggaacacctaagtggccccaaatacaaatgctaaaatcaaatcaagtaaaatctcaattctcccaagctaatggagggaggtagtggcaaaattcaaatattgaccagtagagaatacatattttgctttggtatgtattcttctttttttttttttttaattgagatgaggtcttgctatgttgcccaggctggtcttgaactcctaggctcaaacagtcctttcacttcagcctcccaaagtgctgggattgtaggcatgagccacccgcccaaccaggtatgtattattcttcccagagcgttaacttttcatattgtggcctccttccaagcccttatacatcctggaagagaygacaggaacccagcagggagccaaagaccctgggcaacattaaacattttgcctccaaaaagaaaatttggaaaaggcccatagttaaatcccttgaccatgagcacatcaagaatattatcctcctaaaatcatcctgacctgtaatgttctaattggagaggcagaaataaagagtgaccagaagagataaaaagcaaacacgcccagcccaatgaacagagctgtccacggggaggagagaagagggctgctagagcatggagtgtttcagagggaggaggagacgggcacccccattgccaggatccccctgccaccatctgccaaccactcacacagcccacaccccagctgtcattgcacaccatgagttgtgcccagcagaagtgatgctgccctgcactgccttcagtctagggaggttgactgttcttattttacagatggggtggctgaagccagagactttgtgaccacccctgaaggcagggtctgagcacctgtctggggccctggtattctggtattgctagcacctccttcaagaagtctctccctatcaccaccagctctaggttcagtgaaggccagttgactttgggctcagttaagggtttttcacaaactcccacttgccccactcctgggccctgcttagaggactcttagtgctaggagcactgggcctgggagaacctgagacttagaatcctgctgtatgcctgg

SEQ ID NO: 25931 - DNA, 682 bp, Homo sapiens
tttgatgggatccccacatccttcggggtctggccccaaatttaatctgtttccccattccccaaaatagttgtacactctccacatactaacacttttatcatccctgaacctacttgtgccatttatccatgcttttcgtgtatctctgtatttacttggccaaagttttattcatcctccaggtctagttatgccatgatgtctcccagaagccttcatctgtgtacccccacagcactcagttcaggcctccattatagtacttgtgctatactatgtatttaccaatctgcttctgcaactagattataagatcccagagagcaagttcatgatgttgtgtccagagttcttttgccagtgyttaacactatacttagcagagaggaaacactgcaagtctgaagaatgaaaatgtaatgaatgaaattttataatgaatgaaataatttgtttatgagaggttgggggaaaaaaagagtcttcctaagagtcagagtgctttacaacatcaaacctgagacctgatatgagtttttacatttgctaaagaaaaatttcctttagtaatttcaacaatagttaaattagtggattcaggaatcagaagtaagttaatggctagtcaggaaaggtatttactccacggaacataccaatttacacaccagatattgtg

SEQ ID NO: 25932 - DNA, 1025 bp, Homo sapiens
tcaaatatttcgacttccctctccttttctatgtactttatacagccttctaccccataccccactctaccttgaatcattgatctgtattgttcataactagattgtcagagctggtaacatctttttcttgtctacatcttggagagttctttcgaatccttacagatattattggtactattgacagtgtttgtagcattaaggtattttatgctaaaaccaggctctttcagaaattaagggcatacagcaggcattaaatgaaaaacaaagacaaaggatagatattcatcctgacttttycacattgtgtatcatagcatcatggaacattcgaattcagaatggtataaagattgatattttattagtagcattaagttactttttcaaaccgaatatatatgtagcccttaaatatgtaatagatatgaacagagctagtcagataggtattggggggtctctagtgacctgatcatttccaccatcacccaaataaaccatgtgaattcaaaactttgggttctgtggagcacgatctgaaaacactaatcgaagtaacctcccatattttataagttaaaaatagaggtaagagatcaaaggatttgcccaaatcagcattttaataccagatttaagattagctgacttccaattcttgtgatccctatatattctcctttgtttgacatgatttattttctttcatgtctaatactttttatgttaaaaatagcttacctatgtccatttttctttataaaatttccaggaagataaagaaatatttgatttagtgcttccatatttgaactttttaaataaaagtaagtttattttatttttgtaggttggaagtttcattctagttacttttctttctaatcattatattattaatatttttaaacattttacttattatatttgcttggtgactggtattttatatgcatttttacccaccccaaatgtatactttgcgtaagtcagtccatttttctcttgatgtctgt

SEQ ID NO: 25933 - DNA, 1025 bp, Homo sapiens
tcaaatatttcgacttccctctccttttctatgtactttatacagccttctaccccataccccactctaccttgaatcattgatctgtattgttcataactagattgtcagagctggtaacatctttttcttgtctacatcttggagagttctttcgaatccttacagatattattggtactattgacagtgtttgtagcattaaggtattttatgctaaaaccaggctctttcagaaattaagggcatacagcaggcattaaatgaaaaacaaagacaaaggatagatattcatcctgactttttcacattgtgtatcatagcatcatggaacattcgaattcagaatggtataaagattgatattttattagtagcattaagttactttttcaaaccgaatatatatgtagcccttaaatatgtaatagatatgaacagagctagtcagataggtattggggggtctctagtgacctgatcatttccaccatcacccaaataaaccatgtgaattcaaaactttgggttctgtggagcacgatctgaaaacactaatcgaagtaacctcccatattttataagttaaaaatagaggtaagagatcaaaggatttgcccaaatcagcattttaataccagatttaagattagctgacttccaattcttgtgatccctatatattctcctttgtttgacatgatttattttctttcatgtctaatactttttatgttaaaaatagcttacctatgtccatttttctttataaaatttccaggaagataaagaaatatttgatttagtgcttccatatttgaactttttaaataaaagtaagtttattttatttttgtaggttggaagtttcattctagttacttttcttyctaatcattatattattaatatttttaaacattttacttattatatttgcttggtgactggtattttatatgcatttttacccaccccaaatgtatactttgcgtaagtcagtccatttttctcttgatgtctgt

SEQ ID NO: 25934 - DNA, 1025 bp, Homo sapiens
tcaaatatttcgacttccctctccttttctatgtactttatacagccttctaccccataccccactctaccttgaatcattgatctgtattgttcataactagattgtcagagctggtaacatctttttcttgtctacatcttggagagttctttcgaatccttacagatattattggtactattgacagtgtttgtagcattaaggtattttatgctaaaaccaggctctttcagaaattaagggcatacagcaggcattaaatgaaaaacaaagacaaaggatagatattcatcctgactttttcacattgtgtatcatagcatcatggaacattcgaattcagaatggtataaagattgatattttattagtagcattaagttactttttcaaaccgaatatatatgtagcccttaaatatgtaatagatatgaacagagctagtcagataggtattggggggtctctagtgacctgatcatttccaccatcacccaaataaaccatgtgaattcaaaactttgggttctgtggagcacgatctgaaaacactaatcgaagtaacctcccatattttataagttaaaaatagaggtaagagatcaaaggatttgcccaaatcagcattttaataccagatttaagattagctgacttccaattcttgtgatccctatatattctcctttgtttgacatgatttattttctttcatgtctaatactttttatgttaaaaatagcttacctatgtccatttttctttataaaatttccaggaagataaagaaatatttgatttagtgcttccatatttgaactttttaaataaaagtaagtttattttatttttgtaggttggaagtttcattctagttacttttctttctaatcattatattattaatatttttaaacattttacttattatatttgcttggtgactggtattttatatgcatttttacccaccccaaatgtatactttgygtaagtcagtccatttttctcttgatgtctgt

SEQ ID NO: 25935 - DNA, 557 bp, Homo sapiens
ggcgcccgccaccatacccggttaattttttgtatttttagtacagacggggtttcaccgtgttagccagggtggtcctgatcttctgaccttgtgatccacccgcctcggcctcccaaagtgctgggattacaggtgtgagccaccgcgctctgcctaactcactgttctcaaaacccttgctcagaagcacacacttatttgattgactgcttttcttgggatgaatgatctgctgccataatttgcataactccatataaatacaaaaatgttgagatagggtatgttatggttctagtggctatatctaggaatagcacatttggaactgattctttaragatgtcagccatacaaagaaaagattgcaatccagtcacgtcctggggcaggctatatgctgactacaggtggaagtatacagctatcgactgaacttgagagtttcaatttataggagtgtaagaaatattatatctagtctctgtgtattttttccattaggaatgtgagatatagtccaaatgatatcaattactttgtgtttcagatga

SEQ ID NO: 25936 - DNA, 550 bp, Homo sapiens
ccaaaattgctgagtttacaggtgtgagccaccatgcatcgcttaaactattttttgtgaggatttctagttttatttacttaaaatatttcaatattacttagaatattagatgaaaatgttagaataaataaatacttagaatatttgatgaaaagggcatgttgatagtgctggataattttttggttgtcacagtatttctggaaagatgtttggcagaatgtttgaacaaaagcgatacagaatgttagaggctatttgagccgatgaaattgcacgccaaaaaaatttggtaaactcaagcactatacaagaattgttatttagttcagatgaatgttatgacattttatttctcattgtctgtgtcaacrcccatctgtttcatctatttgagggtctatttcacagaaaccaattatctccatgtttactttctactcccttcctcaatcttaataattgcaatcatttattgttttatctctgtgtttattaattatccatattctgagaataccatagtatcttctattatacaaacatg

SEQ ID NO: 25937 - DNA, 550 bp, Homo sapiens
ccaaaattgctgagtttacaggtgtgagccaccatgcatcgcttaaactattttttgtgaggatttctagttttatttacttaaaatatttcaatattacttagaatattagatgaaaatgttagaataaataaatacttagaatatttgatgaaaagggcatgttgatagtgctggataattttttggttgtcacagtatttctggaaagatgtttggcagaatgtttgaacaaaagcgatacagaatgttagaggctatttgagccgatgaaattgcacgccaaaaaaatttggtaaactcaagcactatacaagaattgttatttagttcagatgaatgttatgacattttatttctcattgtctgtgtcaacgcccatctgtttcatctatttgagggtctatttcacagaaaccaattatctccatgtttactttctactcccttcctcaatcttaataattgyaatcatttattgttttatctctgtgtttattaattatccatattctgagaataccatagtatcttctattatacaaacatg

SEQ ID NO: 25938 - DNA, 569 bp, Homo sapiens
tgtatgcagagacctctataaatacaagacatgttgtttgcagcacaatttattatctggccatagtatttgggtacattatcaggtaccgatttaacaccatgtaacctctcttgacacagagcaacccaaaaagaaaactttaaaatgtgcracagcaataaatatcaagctttgtcatctaaaatgtataaatataaaatatcagtcatttctggaaacatcttaagaaaatccggcaaccacatgtccatgagtaggtgtctgatgttgacggtgcttacattcagaacatatcacctcagatccaacacaattatttttatgtcttttaccaacacatgtttgcatatctaggaaagaaaaaattggttttaccatatgtttgatttcaccataatgtttaccatatgattttctttagggaggaagtatagatttcctaattttaatttgttcctgatttttaaaatatttccaatcagaacaaatacaatcacatttattcattttcaacaacaacaaaaatatttacaggggttgccaaataattttcattttaagtaaat

SEQ ID NO: 25939 - DNA, 513 bp, Homo sapiens
ttgatttgctatagaatgtctttcaatcttccttggccagacagatcatgtacagagcggtaagccaatgagtagagcatttttcttgaaccatccttttcctttaatatgcttcatgccatctataagcctcatgctgtcttggctcaaatttcatgcagctatttcaaatgctaaactttcctcattctgctttttaggagtgtgtcatgtttattgatacacttttctttttgttttttgcttgatcattttaatttcttttcctgcatgcttgtttgtatcacccattccacagatgaaaattaagtttgttcaaaacctgcagtttttattctgagacaggggaaggtgaaacaaagaaagtatgtggtcgcgagttggcaggttatctgctttggtgctcatttgcttctatctcccgcctagcagcagagaaaattatagcacctaaaaataggcaccgttcatggttcaaaatttttgttaatttgtgkacattatgtaatttta

SEQ ID NO: 25940 - DNA, 809 bp, Homo sapiens
aaataacccacagcaacaggcaggccccctcagtggctgcaagcttcagatgtaccccagtgctgcagtagcctcagcagctgtgggctttgggtgcacccaagtgctgcaccagcctcagcagccacaggattccatcccagtrctaagtcagcttcagtgactacgggatttcagcgtggcactgtgctggtcacagtagggagtacatagcactccctagagctggaagggctgcagtggtcacaggctcggagaccacaccaaatgacctgcctagaatctctggacaggcttactgttagaggatgttcccagacaaagccagattgtgagggctggaataagtaactgcttcttgaatgcacacacactgacacatgaccacaagaacaatcggggaatcatgacatcactaaacagacaaaataagatgccagtcatagaccctaaagacacagatatatcaactatctgccaaggaattcaaaacagctgttttaaagaagctcaaagaacttcagaaaatacagagaaacaagtcaacaaaattaggaaaataataaatggtcagatgagaaatttaccagataaattgaaataataaaatcagaccaattttggagctgaaaaatacaatgaatgtaaaaatgtaatagagagcatcaagagcaggattgatcaatcagaaaaagaatctgtaaacttgaagacaggttatatgaaaatatacagaggagaagaaaggaaaaagagtggaaaggaataaagaaactttatagggtttatgggatagtatcaaaagagca

SEQ ID NO: 25941 - DNA, 968 bp, Homo sapiens
ccttataaaaacaaaatcatgctttttaaatctgtgtaatgcgtargtatagtttttgggcaaattttgtgacactcaatgcaaaagaggatggtttttcattttatcaaaacatttctgactgggcacaatggctcacatctgtaatcccagtgctttgggaggctgaggtgggcagatcacttgaggtcaggagttcgagaccagcctagccaacatggtgaaaccccatctctactaaaaatacaaaaattagccaggcgaggtgatgcgtgcctgtagtcccagctacttgggaggctgaggtgagaaaatcacttgaacccaggacatggaggctacgatgagccaagatcacaccactgcaatccagcctgggtgacagagtgagaccctgtctctaaaaaagaaaaaaaaaagaaaaacagatttctaactgaaatatgaactcttaagacgatgttgtgtttgaacgtctcctagatacttcagagaaaagagaagctacttagcatgtttgtgtcatgaaatcttgatcaccaccctaattcagaagggaaaagttaccatttatattggacaataaagaatagttttacatgcctagggcaacatttggtacatgtaatggtaccaccagagcttttctctagacttcttgctgaccagcccagagtaatcaaataagtttcatcattccttcctttttagaagctatggagatattttgcatagaatgaaggatctctgcagatacatgaacaactttgatagtgaagcacatgcaaaatataaaaaccaagtggtgtattccaccatgctggtcttctttaagaatgcattccagtatgtcaacagcatacagccatctctcttccaaggttggtttacaaattttagagtgtccaaaaagccagttcatactgtggggatggtaaggaagatgaaagtgtttatccagtattgct

SEQ ID NO: 25942 - DNA, 968 bp, Homo sapiens
ccttataaaaacaaaatcatgctttttaaatctgtgtaatgcgtaagtatagtttttgggcaaattttgtgacactcaatgcaaaagaggatggtttttcattttatcaaaacatttctgactgggcacaatggctcacatctgtaatcccagtgctttgggaggctgaggtgggcagatcacttgaggtcaggagttcgagaccagcctagccaacatggtgaaaccccatctctactaaaaatacaaaaattagccaggcgaggtgatgcgtgcctgtagtcccagctactygggaggctgaggtgagaaaatcacttgaacccaggacatggaggctacgatgagccaagatcacaccactgcaatccagcctgggtgacagagtgagaccctgtctctaaaaaagaaaaaaaaaagaaaaacagatttctaactgaaatatgaactcttaagacgatgttgtgtttgaacgtctcctagatacttcagagaaaagagaagctacttagcatgtttgtgtcatgaaatcttgatcaccaccctaattcagaagggaaaagttaccatttatattggacaataaagaatagttttacatgcctagggcaacatttggtacatgtaatggtaccaccagagcttttctctagacttcttgctgaccagcccagagtaatcaaataagtttcatcattccttcctttttagaagctatggagatattttgcatagaatgaaggatctctgcagatacatgaacaactttgatagtgaagcacatgcaaaatataaaaaccaagtggtgtattccaccatgctggtcttctttaagaatgcattccagtatgtcaacagcatacagccatctctcttccaaggttggtttacaaattttagagtgtccaaaaagccagttcatactgtggggatggtaaggaagatgaaagtgtttatccagtattgct

SEQ ID NO: 25943 - DNA, 968 bp, Homo sapiens
ccttataaaaacaaaatcatgctttttaaatctgtgtaatgcgtaagtatagtttttgggcaaattttgtgacactcaatgcaaaagaggatggtttttcattttatcaaaacatttctgactgggcacaatggctcacatctgtaatcccagtgctttgggaggctgaggtgggcagatcacttgaggtcaggagttcgagaccagcctagccaacatggtgaaaccccatctctactaaaaatacaaaaattagccaggcgaggtgatgcgtgcctgtagtcccagctacttgggaggctgaggtgagaaaatcacttgaacccaggacrtggaggctacgatgagccaagatcacaccactgcaatccagcctgggtgacagagtgagaccctgtctctaaaaaagaaaaaaaaaagaaaaacagatttctaactgaaatatgaactcttaagacgatgttgtgtttgaacgtctcctagatacttcagagaaaagagaagctacttagcatgtttgtgtcatgaaatcttgatcaccaccctaattcagaagggaaaagttaccatttatattggacaataaagaatagttttacatgcctagggcaacatttggtacatgtaatggtaccaccagagcttttctctagacttcttgctgaccagcccagagtaatcaaataagtttcatcattccttcctttttagaagctatggagatattttgcatagaatgaaggatctctgcagatacatgaacaactttgatagtgaagcacatgcaaaatataaaaaccaagtggtgtattccaccatgctggtcttctttaagaatgcattccagtatgtcaacagcatacagccatctctcttccaaggttggtttacaaattttagagtgtccaaaaagccagttcatactgtggggatggtaaggaagatgaaagtgtttatccagtattgct

SEQ ID NO: 25944 - DNA, 968 bp, Homo sapiens
ccttataaaaacaaaatcatgctttttaaatctgtgtaatgcgtaagtatagtttttgggcaaattttgtgacactcaatgcaaaagaggatggtttttcattttatcaaaacatttctgactgggcacaatggctcacatctgtaatcccagtgctttgggaggctgaggtgggcagatcacttgaggtcaggagttcgagaccagcctagccaacatggtgaaaccccatctctactaaaaatacaaaaattagccaggcgaggtgatgcgtgcctgtagtcccagctacttgggaggctgaggtgagaaaatcacttgaacccaggacatggaggctacgatgagccaagatcacaccactgcaatccagcctgggtgacagagtgagaccctgtctctaaaaaagaaaaaaaaaagaaaaacagatttctaactgaaatatgaactcttaagacgatgttgtgtttgaacgtctcctagatacttcagagaaaagagaagctacttagcatgtttgtgtcatgaaatcttgatcaccaccctaattcagaagggaaaagttaccatttatattggacaataaagaatagttttacatgcctagggcaacatttggtacatgtaatggtaccaccagagcttttctctagacttcttgctgaccagcccagagtaatcaaataagtttcatcattccttcctttttagaagctatggagatattttgcatagaatgaaggatctctgcagatacatgaacaactttgatagtgaagcacatgcaaaatataaaaaccaagtggtgtattccaccatgctggtcttctttaagaatgcattccagtatgtcaacagcatacagccatctctcttccaaggttggtttacaaattttagagtgtccaaaaagccagttcatactgtggggatggtaaggaaratgaaagtgtttatccagtattgct

SEQ ID NO: 25945 - DNA, 859 bp, Homo sapiens
acamaaaaaaaaagccctgtaaatgttactttagcctcagtaattccacttctgataatccatccccaaatactaataaagctttatatgaagagactccattaaagtattacttatgagtaaaaagttgaaataaccagtgcaatgtgtgttttaaggatgttcagctatgctgtagagaacaagacaacaaaaccaaatgggacagatgaaacgcctaaggtgtgtgaagtacagaaagtaaacaagcacacagctgagagacatcagccatagatgaagacagaagagcgtatgcagtctgaacacagattggaagggatagaaaaaccaagtggtggctcagtcttcatcgatatccaagatcagccacccagtggtgacattctgacccgacttgtttgcctgagacatgccaaaaaaaaaaaaaaaaaaaagcaagctctggatacactcaagaagggctgtcaataagtgatacctttgccagacatagcccctgcatttctctaacagaggaagtatgtgggctcctggcaccttctgtctcttgagtacccttgctcattctcagatctggccctcaggaccatgccactggtgtggaacagagtgtcgcagacatagagtctggacatgcccaagccaggatacaagcagtgtggtccatctaccctgatggacctaagtttgttaacctactccgtctccttcctcttgcttctccttgtatgcttaaattcacttaatcaatcgaatgactcaatcaccttaatctgatctgtaagcctttctgttagtgacttctgggatagtgtccttggaggctaccatagcattaagataatttcccactatg

SEQ ID NO: 25946 - DNA, 781 bp, Homo sapiens
ggatccagtgggactacactgtgagaatcactgcaaaatggccagaatttatgtttgtgggaaaatctgagtaattattgaatgactacccagcattgccaattaaaacaaaacttggatgagaccagtcttccaattctgtctgatgaaacataaacggaaagcctttataatgtaatattactgcctgagtgattattttcagaatacaatgatcagccaaatggcttctaattgatctcaaaatatttactgagcctctcagtgtgataatgttctgctgagttgctgatttacccccaaaagaagacagtaagaatatgagcattccaagactaataagatacacatgccgtgaatggttaaatatataaatataggccaggcgcagtggctcacgcctgtaatcgcagcactttgggaggccgaggtgggtggatcacgaggtcaggagtccaagaccagcctggccaatatggtgaaaccccgtctctactaaaaatacaaaaattagctgggcatggtggtgcatgcctgtagtcgcagctacttgggaggctgaggcaggagaatcacttgaacctggcagggtgaggttgcagtgagttgagattgtgccgctgcactccagcctgggtgacagagcaagactccgtctcaaaagcaaacaaagaaaatwtaaatatagaatgcacaactccatgaatgacatgaaggtatacacaggggtcctcttttgctccttttcttcactttttctaaaacagtcctttggtatctt

SEQ ID NO: 25947 - DNA, 514 bp, Homo sapiens
aaaaaaaaaaawatatatatatatatatactgcattccccccactgacacacacatactcagaaaagcttataaatatcccattgttgcctgcataattcccccagaggaggagagatgcatgcaggagctgctaatttgtgcttgtctgcttgctagagactcaccagcagcaaacccagacaagctgttaataagtgttaaacaccccagagtctgcatgctgggtgaagtcccagccaacactcaggagacaaaaacctttcccttgaggtagcctgtcttgattgctatggtgaataaagttcataaataccattttgagaagtatttacgatattcttttggtacagtaaaatttcattagtttgggataatgaaagtcatctaacttagaagatatagggacaatttaaaaacattaaagtatatacataataaattgcactagactgacagatgatatttctaaaagaggtttctgaaatatgatctatgacacaaatttaaggcat

SEQ ID NO: 25948 - DNA, 514 bp, Homo sapiens
aaaaaaaaaaaaatatatatatatatatactgcattccccccactgacacacacatactcagaaaagcttataaatatcccattgttgcctgcataattcccccagaggaggagagatgcatgcaggagctgctaatttgtgcttgtctgcttgctagagactcaccagcagcaaacccagacaagctgttaataagtgttaaacaccccagagtctgcatgctgggtgaagtcccagccaacactcaggagacaaaaacctttcccttgaggtagcctgtcttgattgctatggtgaataaagttcataaataccattttgagaagtrtttacgatattcttttggtacagtaaaatttcattagtttgggataatgaaagtcatctaacttagaagatatagggacaatttaaaaacattaaagtatatacataataaattgcactagactgacagatgatatttctaaaagaggtttctgaaatatgatctatgacacaaatttaaggcat

SEQ ID NO: 25949 - DNA, 537 bp, Homo sapiens
caagccagccactctccagcaggctttaatgtggccatggcccaggtatcataaatgtaatggctcagagatcctgggtgtccttctggctcccctcacccaggtcacggtggctctgtagggacagcctggaaataatgaaccttacgaaagtctccaaaagcaatcaaacgtgttgwctcccggtgccgtgtcctgctcattaacttattgtggagattcattaatccagtgtaaaactgtaattaaaaataatctccttttcttggagaagtcgggagggaaggggtccagaatgaagcagcaaataactaggccaattaccacagtcagaacatgatgagagcaattcacctttctctacctttctgtaaatttctctttattggggaagctgcaggctctcatattgaacaattttcctttaaataagtgtgtttatggctttatggtgttttgactcccatccccccctcagtctcatttgcttctctgaccctatctgagaggtcggtgaggaggctatggtgaccccca

SEQ ID NO: 25950 - DNA, 537 bp, Homo sapiens
caagccagccactctccagcaggctttaatgtggccatggcccaggtatcataaatgtaatggctcagagatcctgggtgtccttctggctcccctcacccaggtcacggtggctctgtagggacagcctggaaataatgaaccttacgaaagtctccaaaagcaatcaaacgtgttgactcccggtgccgtgtcctgctcattaacttattgtggagattcattaatccagtgtaaaactgtaattaaaaataatctccttttcttggagaagtcgggagggaaggggtycagaatgaagcagcaaataactaggccaattaccacagtcagaacatgatgagagcaattcacctttctctacctttctgtaaatttctctttattggggaagctgcaggctctcatattgaacaattttcctttaaataagtgtgtttatggctttatggtgttttgactcccatccccccctcagtctcatttgcttctctgaccctatctgagaggtcggtgaggaggctatggtgaccccca

SEQ ID NO: 25951 - DNA, 537 bp, Homo sapiens
caagccagccactctccagcaggctttaatgtggccatggcccaggtatcataaatgtaatggctcagagatcctgggtgtccttctggctcccctcacccaggtcacggtggctctgtagggacagcctggaaataatgaaccttacgaaagtctccaaaagcaatcaaacgtgttgactcccggtgccgtgtcctgctcattaacttattgtggagattcattaatccagtgtaaaactgtaattaaaaataatctccttttcttggagaagtcgggagggaaggggtccagaatgaagcagcaaataactaggccaattaccacagtcagaacatgatgagagcaattcacctttctctacctttctgtaaatttctctttattggggaagctgcaggctctcatattgaacaattttcctttaaataagtgtgtttatggctttatggtgttttgactcccatycccccctcagtctcatttgcttctctgaccctatctgagaggtcggtgaggaggctatggtgaccccca

SEQ ID NO: 25952 - DNA, 1192 bp, Homo sapiens
gggatcctcccacctgacggcctcccggcctcctgagtagctgggactacaggtacgcaccaccacacccgctactttttaattattttttttttttgagacggagactcgttctgttgcccaggctggagtgcagtggcacgatcttggctcactgcaagctccgcctcccgggttcacgccattctgcctcagcctcctgcgcagctgggactacaggcacccgccaccacgcccggctaatttcttgtatttttagtagagaagggttttcactgtgttagccaggatggtctcaatctcctgacctcgtgatccacccgcctcggccacctaaagtgctgggattacaggcgtgagccaccgcgcccagccctactttttaaattttttgtagagcggggtctcactatgttggccatgctggtctcgaattcctggcctcaagcgatcctcccgccttggcctcccaaaagctgggattacaggtgtgaaaccccgcgccggtctgaacctcaatgtttgaaccaccaaattttacctgtattgacacaggccccgtcttgttgtttttctaaatctcatgtcattgtttgcatattggttacccgtggttggctttggagctgaaggtggacagagctaacatcaggttgcacacaggaacacagtgaggtcgcgaaaaagtagcgcgagctgcctccatggcccagggcgacctcaccggcgtttcctgtctgggactgcgcccacgcggtcacgtggtggcccggaggacgcgcggcggcagcggcgcacgcgcacggagaggaggctacttgccaggtgagcgagctgagtggggcgccggggcggtaggagggtgctgttcgctgagctggagtccgggctccggtccccgccacggaccttgagagggtacccggggtcagacctggcaggtgggaaccgggagtggggaggacccagggcaggggcgggatgcgcagattcgtggaaactctgcaggttgtggacaaactgcccaaatccttttccctgaatgccagtttaatggcctcgtctgataagaaaaaaataagaaatagatttcagagaccctatttctctctctgcctctccacctgctttactttttttctcttctgttaattttgagccttayaaaactatagcgccagtatcctggttt

SEQ ID NO: 25953 - DNA, 562 bp, Homo sapiens
tggtgctggcagaagttcttcaatctcattatctaggccatatcccacacagattcctcacttactgaaggcaaaagtcacttttgctaacagagaaccaagcgagcaacagattttaaagaccctgtgtttcacaaaattaatgggtttatctaagaggccatttcaaagagttgcagaaaaacaaaccaccaagctccccctgaggatcactgttgtctgtattatagytgagaggactccattacacagtccaaaaggccttatactccagccaactagatcatttcctgagaaagggaggcgagaccctgtagcagtgactgggaaagggtgataggagtgtccatctttggtggaacaagcagctctgcagcaaacaggagcttcaagtgatgctccagcaatgccagctccctccctattactctcctgctgctacagattttaggagcagattacaaagccacctgaccctgtctgtgagacccataaacctacagaacaccaccaagcagtcaacaaattttgttacttactcactaggaatataactacaatg

SEQ ID NO: 25954 - DNA, 562 bp, Homo sapiens
tggtgctggcagaagttcttcaatctcattatctaggccatatcccacacagattcctcacttactgaaggcaaaagtcacttttgctaacagagaaccaagcgagcaacagattttaaagaccctgtgtttcacaaaattaatgggtttatctaagaggccatttcaaagagttgcagaaaaacaaaccaccaagctccccctgaggatcactgttgtctgtattatagctgagaggactccattacacagtccaaaaggccttatactccagccaactagatcatttcctgagaaagggaggcgagaccctgtagcagtgactgggaaagggtgataggagtgtccatctttggtggaacaagcagctctgcagcaaacaggagcttcaagtgatgctccagcaatgccagctccctccytattactctcctgctgctacagattttaggagcagattacaaagccacctgaccctgtctgtgagacccataaacctacagaacaccaccaagcagtcaacaaattttgttacttactcactaggaatataactacaatg

SEQ ID NO: 25955 - DNA, 770 bp, Homo sapiens
acaggcaaagataaacatgagagggacgaggaagggccattatgccacattcccaaacatgccacttcagagggcctgccgaggaggaaatgagaaccatacctttcacaagcaaaagagcagccatgagtcccacgggcacccacttccacatcaggctgtgcagaggaggggagtcactaagatcaatggggaccactgtcaccaggaagctgcttgtgggattctcttgaggaatagccacataaatggtttccaccaaagagtatgggacctgaccgctccccttcgccttgtatctgatcctcctccagtgtcccagagcccagacagtggcrccacacactatccagtttgtgcaagtcagaaacctcctcccagctgccatgacaattcatcactgctgggcgatggaagaggaagctgcttcctctctccacgtcctctgccacctcccagctcaggcatcatctcctctcacctgggtacagcgacaacttcctgttggcctccctgtgcctgttcgtgctccctataatccattcttcagtcagagccaagatgatctgaaaatgcagatcagattgtggctttcactgcttagaccctgctgatggcttctcattaaccttgaatggagtccagtggattgagcaaggactgaaacagccacctgattgatctccataacctttggagccccaccctgcaattcccccacttactttgtctgagccatctggtcatctttctctcttatgaacacaaaa

SEQ ID NO: 25956 - DNA, 602 bp, Homo sapiens
ggcgtggtggtgggtgcctgtagtcccagctactcgggaggctgaggcaggagaatggcgtgaacccaggaggcggagcttgcagtgagccgaggtcgtgccactgtgctccagcctgggcgacagagtgagactccgtctcaaaaaaaaaaataaaataaataaaaataagaactatcagttacttgagaatttctataagaaccttttaatgtttgtattacctagtgaacctcactaaatccattaattttcactaatccattccttatgaacacagaagtttctactgagcaaatattagcacttaacatgtgaactgtctatcaacggtgtttttaaaagatttacaggccgggctcaatggctcatgcctgtaatcccagcacttygagaggccgagtcaggtggatcacgaggtcagaagatcgagaccatcctggctaacatggtgaaaccccatctctattaaaaaatacaaaagattagccaggcatggtggtgtgtgcctgtaatcccagatacgtgacagactgaagcaggagaatcacttgaacccaggagacacaggttgcagtgagctgagattgcgccactgcact

SEQ ID NO: 25957 - DNA, 1013 bp, Homo sapiens
cctattaaaggggagactagtaggatgtgctcttctgaaaccaaacagcgttgtgggccttggctcacctctccatgggataacatgaggatggtaccttcttttttcccggccctgtaaatttgtatttcctccagtgaagctcattccttaacccatgctatgtagctttgtggattcaccctgaagggtggtgtatgacagctgatgacccagaagacccatcttgcatgccaatggagacctagcacaacagctcctaattgatctctctgcatccatgttgattctcttcaattgtagtcttcatcttgcagctagaatgggtctttctaaacagacttgcccaccttcctcccacaacccaattgaaaacacaatagctccccattggtcttaagacataccaaaatacccaaatctttaatatggtttaatgagactcaagatgatctggcctctgcctttttctccagccttatttcccaccgttcatccctctctggactgcagccaaatattttctcagtcacttgtagtaaacacgtttcctcctgcccttgaccatgtcctgttccttttgtctgaaataccttgctttgcttaattaactccagctcctagtcatgttcccaaaacaatgaactcagttgaaattttacatttatctgtatgattatttggttactgttttccacactagaccataagatccatagatctcttttaaaccagtagcctagtttatattcaaagtgcctagcataaagtgagtgcttaatgaaattagttgaacacatttttaggtataatgtagaaagaagccaggatccaaataccacatastgtatgattatataaaatgtctcgagaaggcaaatctataaagaccgacagatgattagtggtttgccaggggctagggttggcaacgctgagtggctataaactggcatgaggaattttattgaggttatggaaatgttctaaaactgcacaactcagtaaattta

SEQ ID NO: 25958 - DNA, 1992 bp, Homo sapiens
ttccctttcttcatttctgcctcctggtttcccctcactaacttgtaaagctggccccagcatctccacacaatgtggtccccctttggacaatcacttgtaacagggttggggtgggaggttggcagaagggaacatggagcgggagggcctgctgcctcgagcartgtgcccagatcagccctgtcactgcagcaggagactagataggcatctggggctgaagtcatagctgataatgtcaagcatttgtccactgtcctctgtgtgcacgtaccttggggtctttaggggacagtgcaactgagatggtcagaagtttctggaaatgggagatttgatttctgtttttccaagagtgatagaactaacaatagctgatacagctagcaaataaatgtaggacaaagttcagaatcagactggtttcaaagttaaatcaggcaagtctagagcatgagatggagatttgagactgggaaactccattatagaactggtttggaggaactcctttagctttgaacatcaatactaggtctgctagatatatttaatatacaaataactgcctaatctgtatataaggtttgcataactatatttatatataatatataaaatataaaatatgcatctatagctttaatattacataattatgtgtttacgagtccatattagatatgtaaaaatgtacttctgtggtatatgtgtgtgtatatataaatccttatttgccattgatattattgtggctcatttttgtatcttaacatttttagtggcaaaacacccttctttttttcattttgatgtgttccctattgatttaatccatactgttcatgaacatttagttcagttttgggcaaaaggaagcatgcctgacacactggctattgcaggatctggccagcagcccgcaatgcaacggggctctctgttcccaggcggattggcaggttgagaaataatagacacacacaagatagtgaaagctgggtccaggggtgtcaccgctttctggtcccacggtgccaacaatgcactggatataccagcatttattattaagtttagtgagggcgggggtaggttagtgagagatttagggtcatttgattgtgagatgagatggtcacatggggatgaagtaattctttaacataacatttgtatgtagaagtacagtacatttgtatgtagaagtacagtgtacagagataagaatttacaatatagtgtgtgcgtcaataatttctaacagaatcttaaaatagaaacacaatctttccataacctatgattagcaagatattaatcaacagtaacagttgccacaaaagctggttacaaacaatccatggaaacaggaggtgaagctagacaaccagttagaccagaaattctcagaagggagtatgccttaaccctaaagaggcctagaagagctgtggcaagatgagggcatttatagccctatcttatccatatggacaggcgccccccatgtgtccgtttataggctttccacaagggtcgcattccattcccagagctatgaacatctgcttttctgggataggaatgttggtgatgtgcaacctccctgactgcacgtccgttcataggctgtctgcagggggaagcacatcatgcgctgttggctcgttctggcagcccaacctggcattgtctttacacaatcctgcatgcaattttgtatttacaataatcaggagcatttcatcttttattccgtagcaatagtttcagggggtctccctacatctggctgtcctcttttcagtcacattgactagagaaatgatgcccctggtcacaacagagtcctctgagaacacctgtcactcaaaaccctacaatattttgtccctttattcttacatcctatattcttattttatcaataagatttcaactgaaggagagaaggggctctatcacagggaataagatatatatgca

SEQ ID NO: 25959 - DNA, 1992 bp, Homo sapiens
ttccctttcttcatttctgcctcctggtttcccctcactaacttgtaaagctggccccagcatctccacacaatgtggtccccctttggacaatcacttgtaacagggttggggtgggaggttggcagaagggaacatggagcgggagggcctgctgcctcgagcagtgtgcccagatcagccctgtcactgcagcaggagactagataggcatctggggctgaagtcatagctgataatgtcaagcatttgtccactgtcctctgtgtgcacgtaccttggggtctttaggggacagtgcaactgagatggtcagaagtttctggaaatgggagatttgatttctgtttttccaagagtgatagaactaacaatagctgatacagctagcaaataaatgtaggacaaagttcagaatcagactggtttcaaagttaaatcaggcaagtctagagcatgagatggagatttgagactgggaaactccattatagaactggtttggaggaactcctttagctttgaacatcaatactaggtctgctagatatatttaatatacaaataactgcctaatctgtatataaggtttgcataactatatttatatataatatataaaatataaaatatgcatctatagctttaatattacataattatgtgtttacgagtccatattagatatgtaaaaatgtacttctgtggtatatgtgtgtgtatatataaatccttatttgccrttgatattattgtggctcatttttgtatcttaacatttttagtggcaaaacacccttctttttttcattttgatgtgttccctattgatttaatccatactgttcatgaacatttagttcagttttgggcaaaaggaagcatgcctgacacactggctattgcaggatctggccagcagcccgcaatgcaacggggctctctgttcccaggcggattggcaggttgagaaataatagacacacacaagatagtgaaagctgggtccaggggtgtcaccgctttctggtcccacggtgccaacaatgcactggatataccagcatttattattaagtttagtgagggcgggggtaggttagtgagagatttagggtcatttgattgtgagatgagatggtcacatggggatgaagtaattctttaacataacatttgtatgtagaagtacagtacatttgtatgtagaagtacagtgtacagagataagaatttacaatatagtgtgtgcgtcaataatttctaacagaatcttaaaatagaaacacaatctttccataacctatgattagcaagatattaatcaacagtaacagttgccacaaaagctggttacaaacaatccatggaaacaggaggtgaagctagacaaccagttagaccagaaattctcagaagggagtatgccttaaccctaaagaggcctagaagagctgtggcaagatgagggcatttatagccctatcttatccatatggacaggcgccccccatgtgtccgtttataggctttccacaagggtcgcattccattcccagagctatgaacatctgcttttctgggataggaatgttggtgatgtgcaacctccctgactgcacgtccgttcataggctgtctgcagggggaagcacatcatgcgctgttggctcgttctggcagcccaacctggcattgtctttacacaatcctgcatgcaattttgtatttacaataatcaggagcatttcatcttttattccgtagcaatagtttcagggggtctccctacatctggctgtcctcttttcagtcacattgactagagaaatgatgcccctggtcacaacagagtcctctgagaacacctgtcactcaaaaccctacaatattttgtccctttattcttacatcctatattcttattttatcaataagatttcaactgaaggagagaaggggctctatcacagggaataagatatatatgca

SEQ ID NO: 25960 - DNA, 1992 bp, Homo sapiens
ttccctttcttcatttctgcctcctggtttcccctcactaacttgtaaagctggccccagcatctccacacaatgtggtccccctttggacaatcacttgtaacagggttggggtgggaggttggcagaagggaacatggagcgggagggcctgctgcctcgagcagtgtgcccagatcagccctgtcactgcagcaggagactagataggcatctggggctgaagtcatagctgataatgtcaagcatttgtccactgtcctctgtgtgcacgtaccttggggtctttaggggacagtgcaactgagatggtcagaagtttctggaaatgggagatttgatttctgtttttccaagagtgatagaactaacaatagctgatacagctagcaaataaatgtaggacaaagttcagaatcagactggtttcaaagttaaatcaggcaagtctagagcatgagatggagatttgagactgggaaactccattatagaactggtttggaggaactcctttagctttgaacatcaatactaggtctgctagatatatttaatatacaaataactgcctaatctgtatataaggtttgcataactatatttatatataatatataaaatataaaatatgcatctatagctttaatattacataattatgtgtttacgagtccatattagatatgtaaaaatgtacttctgtggtatatgtgtgtgtatatataaatccttatttgccattgatattattgtggctcatttttgtatcttaacatttttagtggcaaarcacccttctttttttcattttgatgtgttccctattgatttaatccatactgttcatgaacatttagttcagttttgggcaaaaggaagcatgcctgacacactggctattgcaggatctggccagcagcccgcaatgcaacggggctctctgttcccaggcggattggcaggttgagaaataatagacacacacaagatagtgaaagctgggtccaggggtgtcaccgctttctggtcccacggtgccaacaatgcactggatataccagcatttattattaagtttagtgagggcgggggtaggttagtgagagatttagggtcatttgattgtgagatgagatggtcacatggggatgaagtaattctttaacataacatttgtatgtagaagtacagtacatttgtatgtagaagtacagtgtacagagataagaatttacaatatagtgtgtgcgtcaataatttctaacagaatcttaaaatagaaacacaatctttccataacctatgattagcaagatattaatcaacagtaacagttgccacaaaagctggttacaaacaatccatggaaacaggaggtgaagctagacaaccagttagaccagaaattctcagaagggagtatgccttaaccctaaagaggcctagaagagctgtggcaagatgagggcatttatagccctatcttatccatatggacaggcgccccccatgtgtccgtttataggctttccacaagggtcgcattccattcccagagctatgaacatctgcttttctgggataggaatgttggtgatgtgcaacctccctgactgcacgtccgttcataggctgtctgcagggggaagcacatcatgcgctgttggctcgttctggcagcccaacctggcattgtctttacacaatcctgcatgcaattttgtatttacaataatcaggagcatttcatcttttattccgtagcaatagtttcagggggtctccctacatctggctgtcctcttttcagtcacattgactagagaaatgatgcccctggtcacaacagagtcctctgagaacacctgtcactcaaaaccctacaatattttgtccctttattcttacatcctatattcttattttatcaataagatttcaactgaaggagagaaggggctctatcacagggaataagatatatatgca

SEQ ID NO: 25961 - DNA, 1992 bp, Homo sapiens
ttccctttcttcatttctgcctcctggtttcccctcactaacttgtaaagctggccccagcatctccacacaatgtggtccccctttggacaatcacttgtaacagggttggggtgggaggttggcagaagggaacatggagcgggagggcctgctgcctcgagcagtgtgcccagatcagccctgtcactgcagcaggagactagataggcatctggggctgaagtcatagctgataatgtcaagcatttgtccactgtcctctgtgtgcacgtaccttggggtctttaggggacagtgcaactgagatggtcagaagtttctggaaatgggagatttgatttctgtttttccaagagtgatagaactaacaatagctgatacagctagcaaataaatgtaggacaaagttcagaatcagactggtttcaaagttaaatcaggcaagtctagagcatgagatggagatttgagactgggaaactccattatagaactggtttggaggaactcctttagctttgaacatcaatactaggtctgctagatatatttaatatacaaataactgcctaatctgtatataaggtttgcataactatatttatatataatatataaaatataaaatatgcatctatagctttaatattacataattatgtgtttacgagtccatattagatatgtaaaaatgtacttctgtggtatatgtgtgtgtatatataaatccttatttgccattgatattattgtggctcatttttgtatcttaacatttttagtggcaaaacacccttctttttttcattttgatgtgttccctattgatttaatccatrctgttcatgaacatttagttcagttttgggcaaaaggaagcatgcctgacacactggctattgcaggatctggccagcagcccgcaatgcaacggggctctctgttcccaggcggattggcaggttgagaaataatagacacacacaagatagtgaaagctgggtccaggggtgtcaccgctttctggtcccacggtgccaacaatgcactggatataccagcatttattattaagtttagtgagggcgggggtaggttagtgagagatttagggtcatttgattgtgagatgagatggtcacatggggatgaagtaattctttaacataacatttgtatgtagaagtacagtacatttgtatgtagaagtacagtgtacagagataagaatttacaatatagtgtgtgcgtcaataatttctaacagaatcttaaaatagaaacacaatctttccataacctatgattagcaagatattaatcaacagtaacagttgccacaaaagctggttacaaacaatccatggaaacaggaggtgaagctagacaaccagttagaccagaaattctcagaagggagtatgccttaaccctaaagaggcctagaagagctgtggcaagatgagggcatttatagccctatcttatccatatggacaggcgccccccatgtgtccgtttataggctttccacaagggtcgcattccattcccagagctatgaacatctgcttttctgggataggaatgttggtgatgtgcaacctccctgactgcacgtccgttcataggctgtctgcagggggaagcacatcatgcgctgttggctcgttctggcagcccaacctggcattgtctttacacaatcctgcatgcaattttgtatttacaataatcaggagcatttcatcttttattccgtagcaatagtttcagggggtctccctacatctggctgtcctcttttcagtcacattgactagagaaatgatgcccctggtcacaacagagtcctctgagaacacctgtcactcaaaaccctacaatattttgtccctttattcttacatcctatattcttattttatcaataagatttcaactgaaggagagaaggggctctatcacagggaataagatatatatgca

SEQ ID NO: 25962 - DNA, 1992 bp, Homo sapiens
ttccctttcttcatttctgcctcctggtttcccctcactaacttgtaaagctggccccagcatctccacacaatgtggtccccctttggacaatcacttgtaacagggttggggtgggaggttggcagaagggaacatggagcgggagggcctgctgcctcgagcagtgtgcccagatcagccctgtcactgcagcaggagactagataggcatctggggctgaagtcatagctgataatgtcaagcatttgtccactgtcctctgtgtgcacgtaccttggggtctttaggggacagtgcaactgagatggtcagaagtttctggaaatgggagatttgatttctgtttttccaagagtgatagaactaacaatagctgatacagctagcaaataaatgtaggacaaagttcagaatcagactggtttcaaagttaaatcaggcaagtctagagcatgagatggagatttgagactgggaaactccattatagaactggtttggaggaactcctttagctttgaacatcaatactaggtctgctagatatatttaatatacaaataactgcctaatctgtatataaggtttgcataactatatttatatataatatataaaatataaaatatgcatctatagctttaatattacataattatgtgtttacgagtccatattagatatgtaaaaatgtacttctgtggtatatgtgtgtgtatatataaatccttatttgccattgatattattgtggctcatttttgtatcttaacatttttagtggcaaaacacccttctttttttcattttgatgtgttccctattgatttaatccatactgttcatgaacatttagttmagttttgggcaaaaggaagcatgcctgacacactggctattgcaggatctggccagcagcccgcaatgcaacggggctctctgttcccaggcggattggcaggttgagaaataatagacacacacaagatagtgaaagctgggtccaggggtgtcaccgctttctggtcccacggtgccaacaatgcactggatataccagcatttattattaagtttagtgagggcgggggtaggttagtgagagatttagggtcatttgattgtgagatgagatggtcacatggggatgaagtaattctttaacataacatttgtatgtagaagtacagtacatttgtatgtagaagtacagtgtacagagataagaatttacaatatagtgtgtgcgtcaataatttctaacagaatcttaaaatagaaacacaatctttccataacctatgattagcaagatattaatcaacagtaacagttgccacaaaagctggttacaaacaatccatggaaacaggaggtgaagctagacaaccagttagaccagaaattctcagaagggagtatgccttaaccctaaagaggcctagaagagctgtggcaagatgagggcatttatagccctatcttatccatatggacaggcgccccccatgtgtccgtttataggctttccacaagggtcgcattccattcccagagctatgaacatctgcttttctgggataggaatgttggtgatgtgcaacctccctgactgcacgtccgttcataggctgtctgcagggggaagcacatcatgcgctgttggctcgttctggcagcccaacctggcattgtctttacacaatcctgcatgcaattttgtatttacaataatcaggagcatttcatcttttattccgtagcaatagtttcagggggtctccctacatctggctgtcctcttttcagtcacattgactagagaaatgatgcccctggtcacaacagagtcctctgagaacacctgtcactcaaaaccctacaatattttgtccctttattcttacatcctatattcttattttatcaataagatttcaactgaaggagagaaggggctctatcacagggaataagatatatatgca

SEQ ID NO: 25963 - DNA, 330 bp, Homo sapiens
actctttatagcgtcctatttacctgaatgtaatgaaactaggagaaaaacatatttgaaggggtggttaggcactgaaaggaagcaacaccacatttctctcatgggttgagatttataaaagggaatatattgatagattttactgccatttccaacatgcaaaatcctaattacattgcccstatattatgaaattctttcttccaagagccacgtaatatttaatttccaacaatggaaattaaatatttatactaatacaatgattactataaaaatgcatttgtgatagaaataaaatattacaaatcaagctttatactataa

SEQ ID NO: 25964 - DNA, 519 bp, Homo sapiens
tagatgaatactaattaaataattgaatggaatggtttcaattatcaaacttgttttactatttcttataataggaacctttaatgttcacagctcatggaggtaagtgcagcattagaaataaagaagacatgatgtactttaacaaaccaaaccataacttattctttcatagcacacagctaaatagcacagtttcttttgtatcactgagatgaccagagtaataacatttgttactgactctaatgattatacccatgcccttctattgagaccctttaataactattttctgagggagagcttatttttaaaggggaatgattttataataaatatcttataaagctctctctgagctcttcttaaaattcgacttattaatggtggactttaatacagggacctctgtaactctaaaaggaggaggaattatatggtctagaaagatatagttagctactctatcagtgcacagtactayctctttgtgtttaaatttgtacatctctgttt

SEQ ID NO: 25965 - DNA, 1189 bp, Homo sapiens
ctgacttcccagtcgcagctatagccacccaacccatggctgtggacccaggcatctcttcactcttggggacccaggaagcctccctgcccacacgggctcagaaatgcctggtcctgctgcttagcctctccctgcttcccgcgccagatctcaaagcaaaggtgaggctgatccagggcgctgtcacaacctggccaggtgaacacacgctcacggcagcgctgagatgccagctccctgctgcctcagccccctctggactttgggcaccgatgagcatgggagggaggctgaagtggggctgagggcagcttggcactggcctacagctgccccttagcataagcctgggcactatgaacagcggtcggaggcagacaggttcctgggcagaaaggggcaggtccctcgtgaagccccaccttcaagccagggcggcttgaaggctgggggcctggctgcagactggagtgagaacttatggctcttttttcaggcccacccatggctgcctatggacgagtcagcatacacttttcccctctgaaacccrtaaaaaacccagactcatccagacaagcaaaactcaggcaaaggcaccagtggccatagagttttctggctggtgaagcaacaccccaagtttccctaaacaatatgctcgtggcttttgggctttcttttaacattttattttctttgccctagagagtatgaacgtgctacctaagattctataagaatatgagaagtgctttttggattttatttttcttttttggactaaattacttcaaaaacatggacatgtggcaggatgaggtaacttctctaataaccaaaacaaccattgcatgaaatataagttttagacattctccactttacaaagaattcttacaggctggatactcatggttaccgtgctacttaggttatgtcaattttagggactttttttttttttttgagacagagtctcgccctgtcaccctggctagagtgcagtggcacgatctcggctcactgcaacctccacctcccaggttcaaatgattctcctgcctcacactcctgagtagctgggattgcaggcaccccccaccatgcccagctattttttgtgtttttagtagagacaggatttcaccatgttggcctggttggtcttgaactcctgacctcg

SEQ ID NO: 25966 - DNA, 531 bp, Homo sapiens
aaagttcccctttcttggtgttgatctaaaaaatggaagaagggattgataaaatgactgacataaggcaagaaatataggtcttattacaatttctgttatcacatatcacacactgttgaatatgggatatattaatacaaccagacttcaagttgctgtaagagaaagaagaaagagctggttccaacctcataccttgggcagcccacaggtagtgactttgattgccaggcagtaagcatcctctaaatttctgcttttttttttttttttttgagatggagtctcactctgttgtccaggctgraatgcagtggcgcaatctcggctcactgcaacctctgcctcccaggttcaagtgattctcctgcctcagcctcccgagtagctggattataggtgccttccaccacgcccagctaatttttgtatttgtagtagagacggggctttgccatgttggccaggctggtctcgaactcctgacctcaggtgatccacccacctcagccttccaaaatgttggga

SEQ ID NO: 25967 - DNA, 805 bp, Homo sapiens
tgttccagtggaggtggcagggggatgcattggattctgtgagggttcttagctttggtggtttaatgctctatttttgtgctggttggcctcctgccaggaggtggtgctttcccaaaagcatcagctggggtattatggagaggaactggaggtgggtggggccctagaactgccaagattatatgccctttgtcttcacctaacagggtgggtagggaaggaccatcaggtgtggtcagagctaggcatgtctgagctcaggctctccttgggtgggtcttgctgtggctgctgcggaggatgtgggtgtcaatttagagagccaagagaaatacaggggtacaggaagcaacagaaaggccaggtcaatggaagttgtgtacctacgaggattatggctgcctctgctgagtcttgcaggttgtcggggaagtgggggaaagctggcaatcacagacatccagctcccatgcaaactgaagggcatgtctcactcctgctgtgccccacctaacagccctgagtctattttcaggcagtgggcgagccagacttgagaacttgccccaggctatccgcctcccaactgcagagggaaaaagggcttgtttcttcccctgcctgtggagtctgcatgctrgattcacgccctcccttgagttctggctgggaggcttcttgcccctttcaaattgttacaaagttcagctggagatatccttctggctgtggtgttcccgccaccgccccccaccccgctgccccccctcctactcctctggatgccctccagatggatccc

SEQ ID NO: 25968 - DNA, 514 bp, Homo sapiens
tttgaaatgacaattttttggagtagtcagtatttgtagttattcaatacatccttggctttaaaactttaaaaattttattctgaatagtatgctatacagagcccggtcaggaataaatttttgagaagtgtagcataaattgatagcaatattactcttaatgcagaataactgaaattgaaacaaaatttgatgtgtggagtagaaattcctttttttctaaagtaaatactttattaacaccaatgagacatcattgttattatacaagaaagaaaataaaacattattttatgtatatattttatgtaatctaagtctgggaatgcaagttcatgagattcccacataaacctatgggtcaatttttagggaaatatttctatttctatataaagctatctgatacyatgttaagcaataaattcaaatctcgttttactgtttatattgatggccacaatttctcacttaaatatatattaatattaaactgtattacacataatga

SEQ ID NO: 25969 - DNA, 746 bp, Homo sapiens
ccgggcatggtggctcacttttagtttccaattttagtataagtgctgctgaagtaagcacagtgtacatgtttttaatattctgtgacacaaaatgagaagcacatataaagtacttctgctgtgtaccaaagcatgacagttgtcaggaggataagaacttttgtagttatttgtgttaatctctgtaatcctagcactttgggaggccgaggcaggcgaatcacctgaggtcaggagttagagaccagcctggacaatatggtaaaactctgtctctactaaaaatacaaaattagctgggcatggtggcatgcatctgtaatcccatctacttgggagactgaggcaggagaatcacttgaaccagggaggcagaggttcctgtgagccaagatcgtgccactgcactccagcctgggcaacaagagggaaactctgtctcaaaaaccaaccaaccaaacaaaccaaaaaaacccatcaggatggggggtcaccttatcctacagtgacccaacttataataatgcaacttcttttcattttattttgctctggcttctgtagccaagtctataaactcaaggccawctggagttggaatgaggcatctgctggcctggccatctgccatgctcttgagcatctttgtgctacagacaaacaaaccagaacaaagggattcactgcagagagacagtgctccaaccctatgacatggctatcattgccccacgaaagcctta

SEQ ID NO: 25970 - DNA, 1328 bp, Homo sapiens
atctagcctttatgaagaataaaactggggaaattcctatttctagatgcgttttatagccaaaagaccagagatgttataacaaaacctgataatgaagggatgttttggattattttatagatgggtaaattgaggttaaaagagaggaaatggtttgtcttgtggtgatctcatagcagaatgtggatcagaacccaggtctcttgaccctcattctggagatctgtctgctgtggtcctcttctttgtaatagtaaatgtctgactttaaatacttgcacaaaactaatttgtgtgggtttattcttttctccagggccaagtgctttcggggcaaaaaagtccttggagattatgatatcaaggtggaacaggtaatcagcctgaagcccagagctgcatccccgtcatcacagtttcctcttgacatgccagagtgaaccatctcgttctgctgagtggaatactgtgtccatcattgggttctggactctgcatctcctctctctcctatcctttccccaggacctttctgtctgtgaggcatggtcctggagtctgcatcttttcatttctctgattcctttttatggctctagtgtctgtagatgagcaagcagtttggttcttagcaccctcttgcagtgtaaggttcccagactgaggaaaactttagagggcttcccagaatattgcacgttacctccgtattgttggtggcaagatatttctcggtaggcacatgtctgcctttcaggtatgctgccccgagtgatggctcctttgggcctgaggctatactttagaggaaacttagaaaagaacacttccttgttttaatacagtgaatcactgaaagtccaattttttttttttttttaaccttcctccatcctttgcttcataataaatagtgattgggtccatttggggaagaggaggacgttcagtttcaacaatgcatgtatttcctatgtgataaaagaagtttctcatcattcattatacagtgtgttatgacttactgactgttttcaaacaacttgttacataggcaagattgataaaaattattcccattttgtagatcagggaaatggaaacctagagagtacaagtaacttgcttaatgttttwtgcagctaggtaaggggaaagcagaactaaaaactagttgcctaaatttagacctagtgcttttatgttgaaactgataaaaagacatttgtctcagtccacattctcgctctgtagagaggcagcacaaaggatgctgggctgggagttagaggacctgagttttgctcctttctctgccaatgata

SEQ ID NO: 25971 - DNA, 585 bp, Homo sapiens
gtaatctgctcacacgggctgttccagcacatcactgtttcatactcatgaaaacgttatgccatatcagtgacagttcatccatagaggcaaagtccacgtgtgcccagagcccatcaagaaacaacagcaaagtagaagcaacacattctaatcattgctctgtttacataagggrctgtatgaattatttcacactttatgtttaggaaagagctataaaagataaacattgctgtgatatgccctgaccagaggacattatccaggaagcaaagccctacttgaagttgtaaaataggcagttttttttttctgatgtatcctcagctttccctttctaatttgattctgccctacagattccttcctgctatccaagcacccactaactttatgctttcctcttttaaaatatcttttcaaggacagttgtcaactcatctgtataagcattaaatgactgataactcatagtattatccctcccagaggaatacatattttaataagagacagagtcttaagttgggcaaattgtgtttttagggcagagttctaggcatcaagagcagatgatttgtg

SEQ ID NO: 25972 - DNA, 600 bp, Homo sapiens
gcttgctccttcttatcatctggatctccgctcagatcacatctctttggaaaagtattccccaatcagctaaaataaaaattgtgtgcacatttttacacacacagagtcaatcactatcctggcatcttcattttaactttcttcacagcacttttcactacctgaaattattctgttcatttatttctttatgtgtccactgcttgtcctcacaactagaatttaatctccataaaagcagagatttttgcctattctgctccctgcttattcccaggggctagaaggatgcctgacacttaggagttactctaataaacatctgaaagatgaatggataaatacacaaatgaatctaaaaaggcaagtagagagactcaaaccaatagaggtgcctcctagatcyaggagttgcagggaggcttttgcagaagggctgcaaaggcatggtgagttcggtgataacctctcatctctgagagctgagtcctggcttagctctgttcaggagtgtcctttccagctgaagtggccagaaaaccttgggattcatccaaaccactgctcttgcaatgactgatcacactgaggaaagga

SEQ ID NO: 25973 - DNA, 510 bp, Homo sapiens
tctgtctgaccttaaataccccaaatgctttacatccttggctttcttctctttcggtcttacaccttcttgatgaatgtgagattctcagactctgctatygcttcaagaacccttatctctatgcaatttccaaatccatacctccaactctgtatgaacttccctcacagatactagatcaatatttcttgttttgactttaaatacacacctaaaatgaaattttcctttcttacccccatctcaacttctttctgtcctatatttatttattcacttgtttattcactcattccacaaatagctaacaagtaccaggcattattactgcctggtacttactattgaccacttgttcttccaaatagacatgtaagaatcaaccttcattctcctcagtcctttacttgctcaggtcaactgtgtgtactaactcacacaggtgccttagattcagcccttttcttcatccccactaacatttcagccctagccctcatcctctct

SEQ ID NO: 25974 - DNA, 1179 bp, Homo sapiens
aactctgatttcattaagatttgttctgttgccagtggccatcagtggaagatccgcttttaaactggaaaaccactcaaaccttttgaagttggtcctcagcaaagtccaatcagagggaacgtaagggttgatttttttttcttttaaagaaaagagtgctctgtgtgtgtgtgtgtgtgtgtgtgtgtgtgtgtttccccccaaagaaagcgtttcaaatgctcattaggcaaaaatatctattttacatgcactgtaattgttctatctaagatgaaatatattatttttcttaagtaaagctacaggcagtttattagcagagcttattaacccacaatcaggaactggctcacctctaatcacaacctgcctgcattcttcacaggcaatgtggtagtgctacagcacttatatttataaatatgtgcaatgcaatatgaactatatttatggggacagcatcaatttttttagccacaaaacctgacctccctaaaacagatggtgagagaactggactgccgatctagggctggagatggagactcttcatctctttagcaagagctttttttttaaaaaaaaacaaaaacaaaaacaaaacaacctattatcctgttaggccttttccttccartgagtatttccaagtgaagggttgtctagtgcactgtgtgttgcaagccagctgtctcctggtgggtgggcatcagcctcttcttcacctccctcagttcctcactgcagggaatgaatgaaggtagccccagtgagactggcaggtgtcttggccaagggagattgtctgaggaaggtgaacaggtctgctggggcttgggcaaaggtcaagctgaaggaattcctcccagcattcagggaactctgccagtcaaggcagaaattgtcccattggtggtaggtggcacatattaggttagtttaaagggatatctgccagagaccttggaatgctcatgtcttgacccaacaacgatgctttggcagggttttaagacattgagtgggagtagagaaccaaataggaataaagaatcacttttgctggactctatgataaagagtgccttaaagcctgaaagcacatcttaggtgttcactaactgtggccagctgaacagaaggcattgaaagaaaaacagccaggtcccaaga

SEQ ID NO: 25975 - DNA, 1175 bp, Homo sapiens
tattctttatgtggctgcttgggcttcctcatagcatggaggcttaatttccaagagcaagcatcccaaaagagccaggcacagctgtatctccctttagagtcccatagtgtcacttctgctataggcacaagactcyatctcttgatggatgaagtttcaaagttatattgtgagaagagcatgtgggatgaaagatattctggcctctttggaaaatacagcatgccacatgggattatagatagccttgaaaaacggtccttagtctcaagtactgtgcagaagaagtagtgaaccatcagacctgcctgaatgagccatacagagaaacagtgaatgcttcaagtgtaatctgagtggacagatggccagcagcattcctcacaccgtctatctccccaccatgtgttggcacaacttagaacccaggaaccctgacctaatcccagggagtatggagggcaggaaagcctcaagaaggactaagatcacatttctgccaaccaggcaaaaggaggctcaagattagaaattaggtagagttttggaatgcacgtttgaaaatatcttgcacacttggagcttatggtgtgaactttgcacttgttctgcattcattcatctctacaaagatggaaccaaggagataaggaacaaatgtgtaaacatggaggcaggatgaagttctaagtcaggcttcaggcctccccaagtctcaggttactccccgggcatggtgagattgtatgatgtagggtacatgacgcatgggatgcccgcatgggatgccctcatgggatgcacgctacagctccgtgcccgaaacatgctgaaactcaatgcacacgagccattgttactgttctttaggccaagcactaaggcgtcagtcccaagctggagagtggcctcacctgagatagagagactcctattccttcccccagggcctctgaaggtcgtgcagaatcactcatctcttccctgtcatgtgaaagcaacctgattatgtccaggtcattggttctcaatgagaggtgattttccccctcaccccagaggacttttagcaacatctggtgacatttttcatgtcacaactgggaaggaaggagggtgctactttggcatttagagaatagaggccaggaatgcttctaaacatcccacaa

SEQ ID NO: 25976 - DNA, 633 bp, Homo sapiens
atatagtctggcaaataatatgttataaggtctgctctattcaccaaactactaaagaatgaaaagaggtggaaaaggacattttcccattcccacttgtcaaatacagctagtctaatttactaactgatgtaaacttaccttgtgtgtatgatagacaaagcctctaaactgaaataggtgtagaaatgtaaaaaagagctacagatttgaatggaactttaaaggttactgagttcagtagaaatgggttttgaaatgaggcatttggactctggaataaaggaaggaaccagcactataggattgaggacacagaacaactgcatagaaagctcacacaatgggccgggcacggtggctcatgcctgtaatcccagcactttgggaggccaaggcgggtagatcatgaggtcacgagatcgagaccagcctgaccaatatggtgaaaccccatctctagtaaaaatagaaaaattagctgggcgtggtggcatgcgcctgtaatcccagctactcgggggctgaggcaggagaattgcttgaacctgggaagtggaggttgcagtgagctgagatcrtgccactgcactccagcctgctgacagagcaagactccatctcaaaaaaaaa

SEQ ID NO: 25977 - DNA, 536 bp, Homo sapiens
agccaagattgtgccattgcactccagtctaggtgacagagtgagactttgtctcaaaaaaaaaaaaaaaaattcgggttttaatatcctccaattccaagattyaatagtaaagcgcagtggtcatggcacctttaatgagtcttgtgttcatacagtgccttaccttttcacatattctatgcaggtatggtggatttttgctaccttggggccacacttgggcaataagattattttgcaacaacacaaatggataaatctgcaagacatgccaaacaatctttcctattcaaagtgtaccagatcccccatggtgttgctgaaaacatggatacaggttccctcttttctgggggctgttggaacacacagacctatctctccttctccacctgcaaaggtgaagcaaaatatttcccatcaacctctccaaagaatagtgtctctcctatggatccatttccttatgtctctcaaatatgtgtaagacaagattttggaggtaaaggctatatttctcttttcagtcatgc

SEQ ID NO: 25978 - DNA, 877 bp, Homo sapiens
aagacagtttgctattggaggggacctccaagcatggaaggtcagagtcaagtgaaaagaaatatggaaatggtaatttattccccttctaaaactagtggctattgccaacagtgaggataagtaggttggtaaatcattggtgtttaaatattcaagaagacacattgtccatatttatagcsgtctcaaattttcttttatttaataaagaagattgttttcacagaaataaactatcagcagttattaaggatgaaaagttgtgaacattattggagatttgattatcaatcactggggaaaataccccatgaaataccatatattatgctgcaaagtacctatttctggtacactccacatcctgaagaatgactaagcttggtatctaattcatcagtacctcctatggcttattttatctttcattctccatctctcccttgtaaattttcaaacagcatacagagccagaaatcttgttcttttgaagttgagacatctaattctaatactagggttgccatcaaattttctacttatcaggtatgcccttagtatttttaatttctaaaacatggaaagagatctgattttcctttaataaaaattaaatttaaatctgctattcataaagtacaggaagaaattatatctaggtttgattaattagcgatgaagatgatttgttataaatctttgcctgtaattcttcatgtaaaaaaattgacctgaagccaagttatcagcaagaattcaatgctctttactgttgtacttatttgaagctaagtcttggattgaagccaccgatgaaaaagctgttgtacatggctcatgatggaagggcgtaccgcagacaatagggacactt

SEQ ID NO: 25979 - DNA, 642 bp, Homo sapiens
acaaaaggaagcttcagtgtcttttatgccctagtcaacaaagtcccacagtcactttctctttattctattcactaaaagcagtttactaagtccagctcacactccaggggkgactataggcacatggcaacatgcctgggtaatttttttattttttgtagagatggggatttgccatattgaccaggctggtctcaaactccttggctcaagcaatctgcccaccttggcctcccaaagggctggattacaggtgtgagccaacacacccggtcatgatttctattttggtgctttgaatctcagttttatatatcttctatcatagattgtatcaactctgaaagataagtttgaaaaaggagtcttatggaaataggaccacaaggaaggtgctcaataaatgtataactccaggtggaaatacgactggatatttaaaatgtaagtttgactctagtagaaacaataagttttaatatatatttatgacatatatatgtatatgtatacatatatgtatacagagatagcaagagagagacagagtattgctctattgcctaggctggagtgcagtgatgtgatcacagttcactgtaacctcaagcttctgggctcaagtgatcctcctgcctc

SEQ ID NO: 25980 - DNA, 584 bp, Homo sapiens
agtagccgcaggagaaaagagttgggggctatttcatcatgtggctacatcatctcatggttacatcatttcatggctacataactagggcaaaaggaaaaaaggcataaatcttttttttttttcttttttgagacggagtgtcgctctgccacccaggctggagtgcagtggcgcgatctcggctcactgcaacatccgccttctggattcaytccattctcctgcctcctcccaagcagctgggactacaggtgcccgccaccacacccggctaattttttgtatttttagtagagacggggtttcaccgtgttagccaggatggtctcgatcttctgaccttgtgatctgcccgccttggcctcccaaagttctgggattacaggcataagccaccgtatccggctcttttttttttttttcttttaatttgagacagagttttgctcttgttgcccaggctggagttcagtggcgcaatctcgggtcactgcaacctccgcctctcgggttcaagcgattctcctgcctcagcctcccaagtagctgggattataggcatgcaccaccacccttggcta

SEQ ID NO: 25981 - DNA, 1865 bp, Homo sapiens
atgcaagcaggaaaggacatggaaggaggagatagccaaaccaatcaagtttctcccctctgagagtcccattgcttccccaaaatactgaaaggaaactgcaggcaaagaaaaaatatattccatttcttggtctaaaaagtgtcattctggcacccactgccttctggagataagctctgcgctggcaagggacagaattatgccaggaaattgaggatgtgcgggtattttcccaagctgtattaacacttctcatgctttgcagagattagaacttttatcactggctcacacacattaaagaaattgtattaagctgtaattttttagggcagaatggaccaaaattgttccctttctaaggatgctgtgagatgacatggctgaatattgacaaggaatccaaaccctaagtcaaagctctcccactttaaagtggatgcacctttctcataatggcaagactcttgaaggagtggaatggaagaaagacgtcaccatttccttttgatgacaggcctctggacagaagagaagcaggggtcaccaagataatgccaactgaaaaaggtagttgcggaagttaggacaagagcatgcagctatgagaggtaagaacagggttaagagctgtgcacagtggcatgtgcctgtagtaccacctactcaggaggctgatgtgagaggatccctcgaacccagaagtttgagtccagcatgggcaacatagcaagactctgtctcttaaaaaaaaaaagagagagagagagagagggaaagagagaaggggttcaaatatctgagctggcaagccgtggggaagggtgggagtcagagagaataacagacaaaatgtacaaaaggccagacagatgggagtaggggcaggcacagaccaagaggctatgatgtgagaacaccatgattttgatgtggccatttatkgaaggcttgccattgactacatttctttccagtgctttaaatccatgatctcatttattcctcatcattacaggaagcagctattataattctatattctacaggtaaggaacatccacatcacagaagtcaaatagctagtgtggaagtcagtccctctaactccgcagcccatgccatgatgtgacccaggcctccatgctgtcccaccccacccccacctgacagggagcatccacaatcttgcccaagcagaggacggtccaggggcaatcagcctgaatctttgggttgagactgacaacacaacaaagccttccagggcaaggacaatgtgttggtgttttctatttccccagcacccagtctggtggaaggtcagtacccagctgtcattgtaggtgcacccatagaacccttgctggcaggaggacaggtaagaaagtctaggccatggggctgctgttggtccaggctgtggtagagagctgccactgccagttacccagtctacccgatggctggctgcctgactgaactcctacaaatcagagatgttatttagtgctaaaacaaataaagcaggctttaactacccgtgaagaacaattaggcattcccagaagagcaccaaggtttgtaatccaactagaaagtggggctaccatctgtctttatgattagcccttttccaagcaggagagaaaagagtcattgcaggggttggctcaatccacaaggaggagctccaactaaatgtgggatggtgcaggagagatacaaagggcaaggtatgcctctgacctctaaagttcagtctatcaagagtgagaaggacattaacaacccaagggaccatatcaatgccaaccaagtttgtatagttatgagccagtccagagcagtaagagatcact

SEQ ID NO: 25982 - DNA, 1560 bp, Homo sapiens
ttttaagccataataacttcagaaggataaatgctataaacttaaaacagcatcatttggaaatctatttaaatgtaatatatacttacttagttttatgaactttgaaatattacttttttcggtcaatgttttccacattcaatcagagggactaaaactaaaaattacaaattacaaatgtatttttgagaataatctaaaactgaactaagtctctggggacactatgtatatatttttaatacttagcattctctgatattattctctattctacttaatcgacactattgtattcaatttgtcttttcttaatgctagtctcactccaataaattggtttcatgacccattaatgaaaaccacaactctagaaggcaggagtgtatgattaggtaagaaaaacttagtccttccttgattcaagagctcagtcatcctgggctcagtgatttccatgtgcattcattttacagatatgctagtgagggaaagccattaaagctacggtaggatgaagttggggaccccatggctatgagtgttgcttcagaaagtcatcactttaacaaggtctgaaagcaatggatccttgggatgcaatgattctgggacacaatggaatattttctggactcaagaaacatctgaaaatattttacttgttaacagcaaatcttgtcccctgccagcactctctgctccccatttcccaaccttggtaacagaataatggtcttaatgaaaaacatccaaaacagaaatgacactcttttaaacaccaatcatcaagtttaggtacctggaataggggaaaaataaaatcacatcctctgtcacataatctctggctaacgatgcctgtttctaatcactgacgttatacctattactctccagcatatgatactacaaggctcctaattttccactcatgctccactagttctaacttttatttttttagctctgatcacatgtgctttgcctttcacctacactacacttcacctaagctacaactatctcaagacttctgtgctctatctcttgtacatttcattctgtttcagagtgttttcagctgcaagtaaacagacaagtaataaacgttggcacattaaggacattgttatgatctgatatggtctagctgtgtccccacccaaattttgtcttgaattgtagcccccacatttcccacgtgttgtgggagggacctggtgggaggtaattgaatcatggaggtgggtctttctcaagatgttctcatgayagtaaataagtctcacgagatctgatggttttataaaggggagtttccctgcacaacctctctcttctcttttctgccaccatgtgagatgtgcctttcacttttcaccatgattgtgaggcctcccaagccatgtggaactgtgagtccattaaacctttttccttgtaaattatccagtctcaggtatgtctttatcagcagcatgaaaacggactaatacatgatctcaacagagatgaatttcctagggtcagtgacacatgatgtcaacaaggatc

SEQ ID NO: 25983 - DNA, 581 bp, Homo sapiens
tgggttaagactttgggggactttggggaaggtatgattggttttgaaatgtgaggacatgagatttgggaggggtcaggggtagaatgacatgatttggctgtgtccccacccagatctcatcttgaattcccatgtgttgtgggagggacatggtgggaggtaattgaatcatgggggcaggtccccagccatgtggagctataagtccattaaacsctttttccttttaaattaccaagtctcatgtatgtctttatcagcagtgtgaaagtggactaatacaaggacaactgggtcagttttaaaggcagagaatccactctcccaggtgctaacctaagcaagctgaatgctgattgggccatggtgccagcagatgagtccctgcatatggaaatggttattaaacatagtggtgctgctctgcttctccctataggtgacaggaagggtaagagggcctggcacttttttgctgagttggaagcttggctgccttgcttttctcttgtctctctcttgcactcatactgctaaaccagtttctgtcttgctacctcagggcaggcctagtcaaa

SEQ ID NO: 25984 - DNA, 932 bp, Homo sapiens
tggcatattcagtatcagcaacagagagagtagtatgtgatgaggtcagtgaggaagggccraggagatcaggtgggagccggtggccactgcaaggatgttggctttcgtttgagtgagatggagcaacaatgcagggtttagatcagaggagtgacatgatttgagctgggatttaaacaaattttggaaaatagggaccacgtcttagtcacttttgtaatgctagtgtcagaaaattttttggaacctgagaaatgcttaacaaacttgagcagagttgcagtacattactaaagccaagcaaaaaaaaaaaaaaaaaaaaaaaaaagcactgtcccaggtcattgataagagcactagttgtgtttgaggtagaagataaaaagattcgtttggggaatattgtatttattattttaaagtcttaatatttacattctgtccaggacttcaatgcccacatgccaatagctcatccctcaaagggtatctgtcatattgataaaacctcctacagctcaagagtctctgtgtctaccttgcacctctacctggccaggactgattggctttcaacaatttagtttccaatcttcaggttttgagaaatgtgaagcacattcagatgtgaattgtattgataatccaggccattattattataatccctaggaaatcatgaagccaaaagagctttttcattcagcaacaaaaaagcttttatcctctatccccagctgacatactttcatagaggacttgtctttgatctgccctctttgttttttgtttgtttgagatgggtttgtttcttcattcgtcaaggctgtgagctcactaaagacaaacttcaggaaggaaagcaaatgaagttctgattgtgaattcctggtctcttatggcaattccggaactgccccttttcaaaa

SEQ ID NO: 25985 - DNA, 932 bp, Homo sapiens
tggcatattcagtatcagcaacagagagagtagtatgtgatgaggtcagtgaggaagggccaaggagatcaggtgggagccggtggccactgcaaggatgttggctttcgtytgagtgagatggagcaacaatgcagggtttagatcagaggagtgacatgatttgagctgggatttaaacaaattttggaaaatagggaccacgtcttagtcacttttgtaatgctagtgtcagaaaattttttggaacctgagaaatgcttaacaaacttgagcagagttgcagtacattactaaagccaagcaaaaaaaaaaaaaaaaaaaaaaaaaagcactgtcccaggtcattgataagagcactagttgtgtttgaggtagaagataaaaagattcgtttggggaatattgtatttattattttaaagtcttaatatttacattctgtccaggacttcaatgcccacatgccaatagctcatccctcaaagggtatctgtcatattgataaaacctcctacagctcaagagtctctgtgtctaccttgcacctctacctggccaggactgattggctttcaacaatttagtttccaatcttcaggttttgagaaatgtgaagcacattcagatgtgaattgtattgataatccaggccattattattataatccctaggaaatcatgaagccaaaagagctttttcattcagcaacaaaaaagcttttatcctctatccccagctgacatactttcatagaggacttgtctttgatctgccctctttgttttttgtttgtttgagatgggtttgtttcttcattcgtcaaggctgtgagctcactaaagacaaacttcaggaaggaaagcaaatgaagttctgattgtgaattcctggtctcttatggcaattccggaactgccccttttcaaaa

SEQ ID NO: 25986 - DNA, 932 bp, Homo sapiens
tggcatattcagtatcagcaacagagagagtagtatgtgatgaggtcagtgaggaagggccaaggagatcaggtgggagccggtggccactgcaaggatgttggctttcgtttgagtgagatggagcaacaatgcagggtttagatcagaggagtgacatgatttgagctgggatttaaacaaattttggaaaatagggaccacgtcttagtcacttttgtaatgctagtgtcagaaaattytttggaacctgagaaatgcttaacaaacttgagcagagttgcagtacattactaaagccaagcaaaaaaaaaaaaaaaaaaaaaaaaaagcactgtcccaggtcattgataagagcactagttgtgtttgaggtagaagataaaaagattcgtttggggaatattgtatttattattttaaagtcttaatatttacattctgtccaggacttcaatgcccacatgccaatagctcatccctcaaagggtatctgtcatattgataaaacctcctacagctcaagagtctctgtgtctaccttgcacctctacctggccaggactgattggctttcaacaatttagtttccaatcttcaggttttgagaaatgtgaagcacattcagatgtgaattgtattgataatccaggccattattattataatccctaggaaatcatgaagccaaaagagctttttcattcagcaacaaaaaagcttttatcctctatccccagctgacatactttcatagaggacttgtctttgatctgccctctttgttttttgtttgtttgagatgggtttgtttcttcattcgtcaaggctgtgagctcactaaagacaaacttcaggaaggaaagcaaatgaagttctgattgtgaattcctggtctcttatggcaattccggaactgccccttttcaaaa

SEQ ID NO: 25987 - DNA, 932 bp, Homo sapiens
tggcatattcagtatcagcaacagagagagtagtatgtgatgaggtcagtgaggaagggccaaggagatcaggtgggagccggtggccactgcaaggatgttggctttcgtttgagtgagatggagcaacaatgcagggtttagatcagaggagtgacatgatttgagctgggatttaaacaaattttggaaaatagggaccacgtcttagtcacttttgtaatgctagtgtcagaaaattttttggaacctgagaaatgcttaacaaacttgagcagagttgcagtacattactaaagccaagcaaaaaaaaaaaaaaaaaaaaaaaaaagcactgtcccaggtcattgataagagcactagttgtgtttgaggtagaagataaaaagattcgtttggggaatattgtatttattattttaaagtcttaatatttacattctgtccaggacttcaatgcccacatgccaatagctcatccctcaaagggtatctgtcatattgataaaacctcctacagctcaagagtctctgtgtctaccttgcacctctacctggccaggactgattggctttcaacaatttagtttccaatcttcaggttttgagaaatgtgaagcacattcagatgtgaattgtattgataatccaggccattattattataatccctaggaaatcatgaagccaaaagagctttttcattcagcaacaaaaaagcttttatcctctatccccagctgacatactttcatagaggacttgtctttgatctgccctctttgttttttgtttgtttgagatgggtttgtttcttcattcrtcaaggctgtgagctcactaaagacaaacttcaggaaggaaagcaaatgaagttctgattgtgaattcctggtctcttatggcaattccggaactgccccttttcaaaa

SEQ ID NO: 25988 - DNA, 1172 bp, Homo sapiens
agtgatctcttactgctctggactggctcataactatacaaacttggttggcattgatatggtcccttgggttgttaatrtccttctcactcttgatagactgaactttagaggtcagaggcataccttgccctttgtatctctcctgcaccatcccacatttagttggagctcctccttgtggattgagccaacccctgcaatgactcttttctctcctgcttggaaaagggctaatcataaagacagatggtagccccactttctagttggattacaaaccttggtgctcttctgggaatgcctaattgttcttcacgggtagttaaagcctgctttatttgttttagcactaaataacatctctgatttgtaggagttcagtcaggcagccagccatcgggtagactgggtaactggcagtggcagctctctaccacagcctggaccaacagcagccccatggcctagactttcttacctgtcctcctgccagcaagggttctatgggtgcacctacaatgacagctgggtactgaccttccaccagactgggtgctggggaaatagaaaacaccaacacattgtccttgccctggaaggctttgttgtgttgtcagtctcaacccaaagattcaggctgattgcccctggaccgtcctctgcttgggcaagattgtggatgctccctgtcaggtgggggtggggtgggacagcatggaggcctgggtcacatcatggcatgggctgcggagttagagggactgacttccacactagctatttgacttctgtgatgtggatgttccttacctgtagaatatagaattataatagctgcttcctgtaatgatgaggaataaatgagatcatggatttaaagcactggaaagaaatgtagtcaatggcaagccttcaataaatggccacatcaaaatcatggtgttctcacatcatagcctcttggtctgtgcctgcccctactcccatctgtctggccttttgtacgatttgtgctgtattctctctgactcccaccgcttcccacggctggccagctcagaatattggacccctttctctctttccctctctctctctctctctttttttttttaaaagacagagtcttgctatgttgcccatgctggactcaaccttctgggttcgag

SEQ ID NO: 25989 - DNA, 1172 bp, Homo sapiens
agtgatctcttactgctctggactggctcataactatacaaacttggttggcattgatatggtcccttgggttgttaatgtccttctcactcttgatagactgaactttagaggtcagaggcataccttgccctttgtatctctcctgcaccatcccacatttagttggagctcctccttgtggattgagccaacccctgcaatgactcttttctctcctgcttggaaaagggctaatcataaagacagatggtagccccactttctagttggattacaaaccttggtgctcttctgggaatgcctaattgttcttcacgggtagttaaagcctgctttatttgttttagcactaaataacatctctgatttgtaggagttcagtcaggcagccagccatcgggtagactgggtaactggcagtggcagctctctaccacagcctggaccaacagcagccccatggcctagactttcttacctgtcctcctgccagcaagggtkctatgggtgcacctacaatgacagctgggtactgaccttccaccagactgggtgctggggaaatagaaaacaccaacacattgtccttgccctggaaggctttgttgtgttgtcagtctcaacccaaagattcaggctgattgcccctggaccgtcctctgcttgggcaagattgtggatgctccctgtcaggtgggggtggggtgggacagcatggaggcctgggtcacatcatggcatgggctgcggagttagagggactgacttccacactagctatttgacttctgtgatgtggatgttccttacctgtagaatatagaattataatagctgcttcctgtaatgatgaggaataaatgagatcatggatttaaagcactggaaagaaatgtagtcaatggcaagccttcaataaatggccacatcaaaatcatggtgttctcacatcatagcctcttggtctgtgcctgcccctactcccatctgtctggccttttgtacgatttgtgctgtattctctctgactcccaccgcttcccacggctggccagctcagaatattggacccctttctctctttccctctctctctctctctctttttttttttaaaagacagagtcttgctatgttgcccatgctggactcaaccttctgggttcgag

SEQ ID NO: 25990 - DNA, 1048 bp, Homo sapiens
ctggagcccaggagttcaagaacagcctgggcaacatagcacgactctgtctctacaaaaagtaataaattaaaaaaatgagacatggtttagagatgcatacgtggttggcaaaactataatgaaataaaaaagtattaggctgatcaaaagtaattacagtttttgccattaaaagtaaggccacccatgtatgcatctctaaacaaggtgctttagcgtgtgttttactggcaaaaaccacaattacttttgcaccaacctaataattgtcattgaagtcgggacagtggtgacttttgggacagagaaagggtgggctcaggaagaccccacaggacagtgtctggcaatggtctatttctgggcagcagctatgcaagtgttcacttcataattattcatcacaccacatcttcatgtcatatgtactattctggacatacattctatttcacaataagaaaagtaaagaaagaaagacagtaaaaagaaatgtatgaccaaatgggtaaataggcaacagaggcccccttcacaaggtttttatgacgactatagagaacttacattaaatgcctagaatgatacatagcatgcaactggtagttattactaacatyaataacactgacgacgacaacacttattgcagcacatgcaaagtaatttttaggtttattttctttcatctgtgtgataaaaactgcattgatactataacatattccaaaaatgaggctatagtaggaatttctctctaaagacccagtgacaggcctagaggaaatattaactataaatctggcattgccaagcttaaatcaagttacccaggtggagagatggtcttgatcatgcaagtgcttcccgaggggttttggtggtaggacacctataagatttacaacagcacttctgcagctgaggaaatgcgacaggaagatgaagtttttttcattaatgtctggagtggccatcaatcccctaaaatgcaagctagcaccaagtcaccctgagaagtgtgtagctgggctgggggagggcg

SEQ ID NO: 25991 - DNA, 898 bp, Homo sapiens
aatggaatatatatatacatatataccatattacttataaccaaatgaagactaaataattaggatgaaaaaaagtgtatggcaataggaatatcattaagatgaaaatgatctaaagtgtaccccttctggaatattgcctcttaagatataaataatatagttacgatgtgataaccactgctaccctgagtttcccaacaaacacctttggtgtgtctgagaatctaagttaatcagttcaaaacttctatgaaatgagcttggccacaaagaaacagtgatgtttagaaaagttacaatgcwaggcagtatttaagaatgagtaccaccaaacaacacgacaaaactcatatataaatatgttaaggtacaaagtcaaggacaccttaggactttaagttttatagtcagaaacctttagggttaaattaggagattacgacgtgcatgtataactgtaaagataatgtatatacagaatataaaatgctggaaaatcatttaaattcctttggaactcaatgattaatgtaatgctggaggtctcttgaaagacagcaaccttgagtaacataccacagaagaggaggaacctcgtaagttaagttccatcccttttatatccaaaggccttgaggatggggctttccagcaaaacagtataaaatatgtagatagaaagatgaacctcgacactatttgacacatttcagagtttataggaaaatgtgcaatctaatgtaaaacattatttcactcagatgaagtgttttacttatgaaacagggtgaataaaatcatcaacatacatttataaatttttagaaaattaaaaattcaatgtttttagacaggaagacccactccagaatcaaaaataagcacttctgtatat

SEQ ID NO: 25992 - DNA, 954 bp, Homo sapiens
taattatctgattatttgtataatcattaatgttttccaataatatttcctactatataacttacatttcttatttccatagctatacttctttaaataacaaaaaatgactacatacatttwaaataaaaatagatttaatgctctaacagcaattaaaaatatataattaagtagtcctttttatatatcttgtatataggctctaatgtatggcacaaaaaataatatactatatataatttaggtgattagttcaagcctatgtctgaaatatcagttttgtgcattttacctgtgtaaatttggcaccattgtcaaatctacacataaacattctagcataaacatctcttttaatttatgtaacttaaaatacatgaaaaagagggaaactacaatttcattgaacttactctttaacaggtatgagagctgtaaaatatagatatggcaacaaatacataaagcactggaatagagagaaaaattactacacatgaagcaaataatctctcacttattacaaagtgggaaaatcaggaaaggttagctgttggtatcttagataagtgcttgacatagctcatacaacatatttgaaaagagaaattttaaaaaaacctagaaattagattgcatcaataaaataggtgccgatgttaattataacctcattttctaagcctttaaagtatgtgcatttctcttgaaccaccataaaggagaataaaaaatagaaaaaaacttctattaaacttctattagtgtttagaatgactcaacatcataaataggtcagcttttataaggaaagttataaatgtaatgtcatcacaataaaaataccaaaaaatgcttgtgaggagcaagagaagttaataatgaagttcacaggggaagaagcatgcaaaactgttaagaaatcaatgaaaaagaaaactgtaaggaatg

SEQ ID NO: 25993 - DNA, 937 bp, Homo sapiens
cctcctttcttcccagctgggtcttacaggagcacaaggtatcattcaagctttcttgagattttgcccacaccctatgcctacatatatatgtgcaagctcatttatctaaagagaaaagaactagaaagctaggctttcatcatttgaatgcacatttaagagtggcagctcggagaaaataatgtgcatataaattattcaaagcttgtctcgtggtatcccaataagggtagttaccttgcagtgggcaggcttatcactgatcttcagtaatgataataaaagctaacacttgttgatcataaacagttttttagggaatatttcaagcatttcataaatggtatctcattaaatctttacaacagttttgtgaaagaagtactaaattggtattatcctcattttacaggtgaagaaattaagacttgcagaaattagtttatcaaaggtaacaatattcttaaatggatgtcagagtccagagatgaaacttttaaacacttcaatgtggtcttcttataaaaaatacattgtcttctccatttggcagatgagaaaaaacgtgggtacaagaagttaagtcatttgtctgaagtgttatagccggtrcatctgaaatgaaaatcctgatctgttttcccttaaagctaaattctttttatagcacctgactgcaaatttgtttctacaggggcccaggtgatgacagcaatggaggaaagtgggtagctggctctttgaggatccagcagatcaaaaaaaaaaaaaagaggttgaattatgaataataacctcaatggtttgtccaagagtttgctaaacccacactagcctgactatgcctgagtttaaatttgggagccctttctttccttttgacgctgagattctgtgagcaagacactgccctcagctccatgggtgtagggac

SEQ ID NO: 25994 - DNA, 1875 bp, Homo sapiens
taactgtttgcacaaacttgggataaatgattttgggataacgatctaccagaatagggatatttcacccttggttctgagatgcaaaccaaagaatatcatgaccagctttcaggcctcctgaagtatatctctcacattgtcctgttctcttgctgaggagcctgagatccctgtgtggggattagacagtggactgttacgggtgtaggtgaattggcttattttgtctgtccctgtctgaatgtattgcaggaattaaaaaggaccaagaagaggaagaagaccaaggcccaccatgcyccaggtaactgagcaattgtgaacagcttcttctgtgttgacatctggagactcctggttcagggaaaacagggcgggctgacattatcgattacatcttttcaaccgagcctgaattattcctactaacattgctgttggttttcattgcagtagatatttaggtttccatttcttcctccccttatcatttactaacctactgtaggtggaccagacttcaaaaactgtattctcatggcgactgcatggaaacttgagcacattttatggaaaattattgagcacagtcctttcctgatcactgtatgctgtgtgtcctgagggcactaactcagagtgtcctgttactccctcatcagtgtgtcacctggacaattcactgagctcattctctctctctgtgtgtgtgtgtgtgtgtgtgtgtgtgtgtgtgtgtgtctatctgtctttctctttcattcttttccatttggccctgttctgtcccaacatgaaggcaataatttgttacctcattaatggatctatccttttacttttttaaccacttccttatgctacccatgaaacctagttggggctctgttgtgtctgatttcccctggcttattctttactttttcctccttttccaggctcagcagggagctgctggaggcagtagagcctgaagtcttgcaggactcactggatagatgttattcaactccttccagttgtcttgaacagcctgactcctgcctgccctatggaagttccttttatgcattggaggaaaaacatgttggcttttctcttgacgtgggaggtgagtacctttctatgaaggtgataaggatccactgagtcttccatataaagatcatattcctgctccaagtggccattactgagctgagagatgtcattgctgcagtgaggacctataggcacatgtaggttgaatgaaactctagttctaactggaagcccagacatgggatgggtcagtgagcatggctctcttcctagtctcaggccatgcctgtggcactctgattctactctcatgacattggacctgggcagatgtgacaaattcagagaactatgattttgactcaagggtttgtagatttcctttttcactctaatttcagtgtctaaagtcctcacaaccatgaacaatctgagtatttgatgagacagggctaaatattgcagtttttctcctagaaatcatttgagggtatttgctttaaattgattggaaaaatatggcataactgtttgcacaaactcgggacaaatgatattgggataacgatctactagaatagggacattttacccacagtttctgggagaaaaaccgaggaatttctatcatgaccagccttcaggcctcctgaaatatatctctcacagtctcctattcttatgctgaggagcctgaggtccctgtgtgagggttagacagtggattgttatgtgtgtaggggaatcagcttaatgtgtctgtccatgtctgaatttattgcagaaattgaaaagaaggggaaggggaagaaaagaaggggaagaagatca

SEQ ID NO: 25995 - DNA, 1875 bp, Homo sapiens
taactgtttgcacaaacttgggataaatgattttgggataacgatctaccagaatagggatatttcacccttggttctgagatgcaaaccaaagaatatcatgaccagctttcaggcctcctgaagtatatctctcacattgtcctgttctcttgctgaggagcctgagatccctgtgtggggattagacagtggactgttacgggtgtaggtgaattggcttattttgtctgtccctgtctgaatgtattgcaggaattaaaaaggaccaagaagaggaagaagaccaaggcccaccatgccccaggtaactgagcaattgtgaacagctwcttctgtgttgacatctggagactcctggttcagggaaaacagggcgggctgacattatcgattacatcttttcaaccgagcctgaattattcctactaacattgctgttggttttcattgcagtagatatttaggtttccatttcttcctccccttatcatttactaacctactgtaggtggaccagacttcaaaaactgtattctcatggcgactgcatggaaacttgagcacattttatggaaaattattgagcacagtcctttcctgatcactgtatgctgtgtgtcctgagggcactaactcagagtgtcctgttactccctcatcagtgtgtcacctggacaattcactgagctcattctctctctctgtgtgtgtgtgtgtgtgtgtgtgtgtgtgtgtgtgtgtctatctgtctttctctttcattcttttccatttggccctgttctgtcccaacatgaaggcaataatttgttacctcattaatggatctatccttttacttttttaaccacttccttatgctacccatgaaacctagttggggctctgttgtgtctgatttcccctggcttattctttactttttcctccttttccaggctcagcagggagctgctggaggcagtagagcctgaagtcttgcaggactcactggatagatgttattcaactccttccagttgtcttgaacagcctgactcctgcctgccctatggaagttccttttatgcattggaggaaaaacatgttggcttttctcttgacgtgggaggtgagtacctttctatgaaggtgataaggatccactgagtcttccatataaagatcatattcctgctccaagtggccattactgagctgagagatgtcattgctgcagtgaggacctataggcacatgtaggttgaatgaaactctagttctaactggaagcccagacatgggatgggtcagtgagcatggctctcttcctagtctcaggccatgcctgtggcactctgattctactctcatgacattggacctgggcagatgtgacaaattcagagaactatgattttgactcaagggtttgtagatttcctttttcactctaatttcagtgtctaaagtcctcacaaccatgaacaatctgagtatttgatgagacagggctaaatattgcagtttttctcctagaaatcatttgagggtatttgctttaaattgattggaaaaatatggcataactgtttgcacaaactcgggacaaatgatattgggataacgatctactagaatagggacattttacccacagtttctgggagaaaaaccgaggaatttctatcatgaccagccttcaggcctcctgaaatatatctctcacagtctcctattcttatgctgaggagcctgaggtccctgtgtgagggttagacagtggattgttatgtgtgtaggggaatcagcttaatgtgtctgtccatgtctgaatttattgcagaaattgaaaagaaggggaaggggaagaaaagaaggggaagaagatca

SEQ ID NO: 25996 - DNA, 1763 bp, Homo sapiens
attgaatgatctttggttacttttcttagagaaagaaaggtttgaatatttgagtggtgtgttaatttgggttcttcaaagaacatatgtcaagataggattagacatgcaagatttttattggaggaatatctgtgaagaataggaggagccagcagaagtagaagagaagagctttcagaccaaaatacatttatgacacctgtgaaagtagaggaagaagaaaggtttgtgtaggaagagtctcagaycaaaaatcacttctatgaaagtttcagccagggccaatggtgagttctggaggagtcacccattggagaagtcctgcaccctgcagaaataaacttgcactaatatccctgctgtggttactcattggcattggcatgaacacagtagatccagaacaatggtagctggggttgtcaatttcctcaacgaacaatatgtaaatggagcattttcatggttgccaccatgcattttcatggtgaccagagaggttgactatgtcagaaacagtcatttctcaactaatataaaacttcctttgataatagaaattctgatttgtggccaggtgcggtggctcacgcctgtaatcccaaaactttgggaggctgaggtgggtggatcattgaggccaggagttcaaaaccatcctggccaacatggcaaaaccccatctctactaaaaataaaaaattagcaagacgtggtggcacatgcctgtaatctgagctacttgggaggctgaggcatgagaattgcttgaacccaggaggcggaggttgcagtgagccaagattgtgccactgtactccagcttgggtgacagagcaagactctgtctccaaaaaaaaaagaaaagaaattctgatttgttgccaggcatgtggctgactaactgaagactacaagttctaatgtctcttgcagttaggtgtggacatataaccaatttctggccagtgatttttgagcaaaatggataggtgccaattttctgtcacatatttgcctcatacccactttcacatggctgcaatatgatcaaaatggtgacaatggaaacagcaaccctgggaccagatatgaaaaccatgtattggagatgatagagctaccctatctttcctgaattgcctgtggattttttaaatgaggtataaataagcgtacaccttgtcaaagcaacttagtctgtatgctagctcaataagcaagcatacacctccatgagtggataaatccagaaaaatcaccagatttaggaaaagctaccaaaaattttaacaacagaaataacatcctcgttatgattttttggttaatcaagaaattaaagaatttatggttaattgacttaaagtataatttttaaaaacaagaacaatggaaaagaacataatatctatgaatctatagcaaatagtaatgaagagaaaaatatgtaaaattaaggagaattgaaccaataaatttatggtcacaatttaaaatagcaatggaagcagtaaacaacagattatacactacagaaaattcaattagtgagactgaattcatatttaaaaaattgtcatgtaattttgaggaactagagttatttttaagtcagaatagaatctataagaaataaaaaaatcacatatatttaatacacatatcatgagaatgttagaataagagaacaaaagaaatagaacataaatgattgccactaacataatataataaaatgttctgagctaaagaaaacc

SEQ ID NO: 25997 - DNA, 884 bp, Homo sapiens
tacaatagaggtcaccccttgaaaagtccaatgaccttcagatccatgctacatttcggcatgtcgacactggttattaaatactctttagtttcccatttcctcccccatccccacccagctgctcattaatccaattatgagtttcctttatccaatcaaagttcctgccaagttgcagagctcttgtagtgattcatgatgcatttgtctttagtgattagaaaacccagtagaagatgctgtctcattcagacatctctgtaatttggaatgacctcagtttggtagtgccacaccccacatgtgccctgtgaacacactacaagaacctccttcccagtttctgccctgcaattggagccttgcccctgtgtcwctccccagcctctccagcaaggcattcaggaggctcctgaatcacgtctggctctgaaggcagtgcccagccccttcattttggtctctgggtccttgaacagcaagctcatttgctggcaggagcatctgtctccatatggggagaaagtcttcagatcttccttgctcttcccttcattaagacatcagcctcagtcagccttgctcttggctgccagatgcactgacaagccagcaggaaaagttccatctagaagaggtctgctaccttctgaaggcaggaaagtaccgctttgcctgctgggactagacccatgcagcctttgtgggcctccttccagcagagcctttaaaacatttcatgagtgctgattctaggcctgcaggtagagtctcagggtggtgccatctgcagcgttccaagtgtctcccttgctttcactcaaggggggtggaatccctccacctccttggccattttcatctgtctcctgggtgtgtgc

SEQ ID NO: 25998 - DNA, 884 bp, Homo sapiens
tacaatagaggtcaccccttgaaaagtccaatgaccttcagatccatgctacatttcggcatgtcgacactggttattaaatactctttagtttcccatttcctcccccatccccacccagctgctcattaatccaattatgagtttcctttatccaatcaaagttcctgccaagttgcagagctcttgtagtgattcatgatgcatttgtctttagtgattagaaaacccagtagaagatgctgtctcattcagacatctctgtaatttggaatgacctcagtttggtagtgccacaccccacatgtgccctgtgaacacactacaagaacctccttcccagtttctgccctgcaattggagccttgcccctgtgtctctccccagcctctccagcaaggcattcaggaggctcctgaatcacgtctggctctgaaggcagtgcccagccccttcattttggtctctgggtccttgaacagcaagctcatttgcyggcaggagcatctgtctccatatggggagaaagtcttcagatcttccttgctcttcccttcattaagacatcagcctcagtcagccttgctcttggctgccagatgcactgacaagccagcaggaaaagttccatctagaagaggtctgctaccttctgaaggcaggaaagtaccgctttgcctgctgggactagacccatgcagcctttgtgggcctccttccagcagagcctttaaaacatttcatgagtgctgattctaggcctgcaggtagagtctcagggtggtgccatctgcagcgttccaagtgtctcccttgctttcactcaaggggggtggaatccctccacctccttggccattttcatctgtctcctgggtgtgtgc

SEQ ID NO: 25999 - DNA, 1228 bp, Homo sapiens
cttgagcccaggagtttgaggctgtaatgggctatgattgagccactgcactccagcctgggcaatagagsaagacctcatctgaaaagaaaatgggacagtttgtaaagcaattgaataaataaaatgaatacaaaattatggataaagaaaacaaaattaatccagagtgagaatattatataaactctacgcactgtggggtttgggatactttcttgagatgggacagagtggtagtaagagaacaagaataagttctagaaaggtgttgattaaaaaaaatcaggacccatattaattttctgtgctacaaaacaaattaccacaaatttagcagctgagaaacaacatatgcattcgttacctcacagtgtcattgggtcaggagtctgatacagcctagtggggtgctctgctcagaatgtggcaaggttgcaatcagtgtgtcagccaggctgccttttttgaaaaattcagttacttgtgggtataggactgaggtccgtggcttgctggctaagagccaaggatcattctcaactcattgaggcctcccttaggtcttgacttgtagctcgtctcataacatggcaacttacttctttaaaaccaacgggggaatctccctgatctcagagaatgcctctggccttctttgaaagggctcatctgattaggtcaggaccagagaagaaaagcttgcttttgattagctctcagaaacttgattagggacgctgaccctaattacatctacagaatcctctttgcatataacgtaatgtaatcatgggaatgatagcatatcgtatttctgggtcccatacaaggggagggtattgtaccagagcatgagtcatctgagaattgtgtctaccacaggatattatactgaagagtaagtttttcagtacattcttatttcttcttacagtcgcttagagagttctttccttttcagggatttatgcttcctcaatgttaaatttaaataaattattaatagatagtgtctagtttaaaaattttatagtgttaagttctattttataacctttggttagaaataattgactacacataaatcaatacaaatctcagtacttattgaagtcaacttttaaattgaaatagatgtttaggagactgtacacggattgcactgctgcgcatatagagtcagaggagcatatctgccttcaatacctgtgtagtagtgtaggag

SEQ ID NO: 26000 - DNA, 1230 bp, Homo sapiens
tccaacgtaacatgtaaagctctattatttctttctgaaagtagggcactttctaaaagttaagaagaagatgggaacaaagtatacaacttaaggattaatgcaaaaggcaaaggagaaatttttttaaaagatggattatgacttcagggctcattttattgcttactgttaagaagttttgttagtaatatatttgatacttgatcttgatgtagaatgaatgcgaaagagaaatttgatggaaatacacttcacaaaagaaagaaattacaaaactttgctgagggccaaaagaaaggtctatctaaagtatgggtgtccaatcttttggaatccctgggccacagtggaaaaataattgtcttgggccacatataacgctaacaatagctgaagagcaaaaaaagcaaaacaaaactcataatgttttaagaaagtttatgaatttgtcctgggccacatgcagcccgcgggcagtggcttgaacaagtttggtaaagaaaagctaggcgctatttctggatgggaaggcaatttaatatgcagaaattatgaggtctgggatttttctcttctttgcacttcattctctagcttttccacattgagcaccttgttttctcatttctcctgtattttgtaattttcaaatgggagcttaaaaaattttaataatggttttaagctagccttttcattttgtgttcaaaaagggcagagagggaaagaaggtgagagagggatctaggaggaccatctccaaaccacagcacccacgggcaygatcctcagccaccacagctgtgccccaacccagagggctgtcagtgctctgggctcattctccatgcctcagtttccccacctatgaaatggagagaacatctcccctcttcacgcctcactgcaggatagttgggtgctgcttctcctgcccaaaatgagggctgcatttcagcatctacactggtgggtgggggtggggtgggaacgcaggcaaggtgaagcctaaggagggcagagagcgcttccgttgggatagtggggtcctctcattgaattaagaacctaggatagaaattctgttttttaaataattaggatgcactggggtaagggagcagggaatcagaattaaattccacagaacagcaaaagaaaccaaaagaaaaaaagaaaaagatcctgatttggcaatgtatgagttttgctgagaagccctgttta

SEQ ID NO: 26001 - DNA, 1230 bp, Homo sapiens
tccaacgtaacatgtaaagctctattatttctttctgaaagtagggcactttctaaaagttaagaagaagatgggaacaaagtatacaacttaaggattaatgcaaaaggcaaaggagaaatttttttaaaagatggattatgacttcagggctcattttattgcttactgttaagaagttttgttagtaatatatttgatacttgatcttgatgtagaatgaatgcgaaagagaaatttgatggaaatacacttcacaaaagaaagaaattacaaaactttgctgagggccaaaagaaaggtctatctaaagtatgggtgtccaatcttttggaatccctgggccacagtggaaaaataattgtcttgggccacatataacgctaacaatagctgaagagcaaaaaaagcaaaacaaaactcataatgttttaagaaagtttatgaatttgtcctgggccacatgcagcccgcgggcagtggcttgaacaagtttggtaaagaaaagctaggcgctatttctggatgggaaggcaatttaatatgcagaaattatgaggtctgggatttttctcttctttgcacttcattctctagcttttccacattgagcaccttgttttctcatttctcctgtattttgtaattttcaaatgggagcttaaaaaattttaataatggttttaagctagccttttcattttgtgttcaaaaagggcagagagggaaagaaggtgagagagggatctaggaggaccatctccaaaccacagcacccacgggcatgatcctcagccaccacagctgtgccccaacccagagggctgtcagtgctctgggctcattctccatgcctcagtttccccacctatgaaatggagagaacatctcccctcttcacgcctcactgcaggatagttgggtgctgcttctcctgcccaaaatgagggctgcatttcagcatctacactggtgggtgggggtggggtgggaacgcaggcaaggtgaagcctaaggagggcagagagcgcttccgttgggatagtggggwcctctcattgaattaagaacctaggatagaaattctgttttttaaataattaggatgcactggggtaagggagcagggaatcagaattaaattccacagaacagcaaaagaaaccaaaagaaaaaaagaaaaagatcctgatttggcaatgtatgagttttgctgagaagccctgttta

SEQ ID NO: 26002 - DNA, 1873 bp, Homo sapiens
ccttgctttgtttgacctcagtagggaactgcgtgtcaggcaactcacatttttcacagctttgcacatgtctgcaaatgaccacagaagcaccacgagtactcagttttgaggtttcaagtgcatttcagagagtaggtgactttgtggctgagcgcgatggctcacgactgtaatcccagcactttgggaggctgaggtgggtggatcacaaggtcaggagttcaagaccagcctggccaaaatggtgaaacccagtctcgactaaaaatacaaaaaattagctggrcgtggttgcaggtgcctgtaatcccagatactcagaaggctgaggcagagaattgcttgaacccgggaggcggaggttgcagtgagccgagatggtggcactgcacttcagcctgagagacagagcaaaactccgtttcaaaaaaaaaaaaagagagtaggtgactttgcaaatgtggatttcatgactaatgtggatagactatatgtatgtatgtatgtgtgtacatatatggcattgtctatgaaagtttaacatgtacacacacacatttctgtgcatatgcatgtatttaaaaagtaaaacttaaatgcatttacacccacaggctccaggatggatgaggaggcatgaccctaaggctcccctcagtgctgccttttccagctgcctgcagcaatctctggttacttggcttcaagactccttggagtagaaatttccaaaccccgcactgcctcaatcagaccatccttgcttatgtagcaattgccaggggcccttgttacaaatggatcctaattccattcctgacctactcaaacagaatccaagggaggaaaggctggagccttggaatgtgaatgtgtacttgacaccatttacaaagctcacaattcaagtttgagaatcactgtgaataggttcccaggcagctggagaaatcagcagctgacactgtttggaccctgggacaagaggcaaatcgccagtgtaggccaccctgcccctcttgcgagcagacgaaatcagccaaaagtgttgtatgcttcgtgaaagaccacaggcagtttcgtttaaagctgtataacctagggcgaaaaaaataaataaataaaaataaaataaaagaattgtgtgtgcttaatgagaggaaaaaaataattaagctgggaacccagggaaggttatgtaacatccctgtgtgtcatgtttaaagtgaatgtaatagtagttctctcttaaggctgtcaaagatgttaaaaatgtgtgttgagcagcacttcccatgtgggaacagttaacaaccacttattattatcaccatcagctgttgttccctggacctgagctgacccccggagtatgctctttcctcctgctcactttctcagccaccggaatctcaccttttttcagacctttcctgtttcagtctggatgtttctttttcaaatgattactttgcaaaagtatgtacttaatagaaaagtaggactgtgcacccacctggacggcaagaacccagtgttggcaaggacacagagcaagtgggggctttgctgctggaaatataaatttcactttgtcaaactttttgacattatctatgaaagttaaacatacacacacactgtgacccagcaattctcctaaattcatagatacagtcaccgaaagacatgacaagaatgtgatttgtaataataaaaaattagaagcaaactaaaagtttatcaacagcagaacttgtatccccacaatggtggacagtaagcagctagcgtggactaactgcagtcttctcggtgcggaggaatcccatgaacacaaggttaggtgggaggagacactaaagaatgc

SEQ ID NO: 26003 - DNA, 1873 bp, Homo sapiens
ccttgctttgtttgacctcagtagggaactgcgtgtcaggcaactcacatttttcacagctttgcacatgtctgcaaatgaccacagaagcaccacgagtactcagttttgaggtttcaagtgcatttcagagagtaggtgactttgtggctgagcgcgatggctcacgactgtaatcccagcactttgggaggctgaggtgggtggatcacaaggtcaggagttcaagaccagcctggccaaaatggtgaaacccagtctcgactaaaaatacaaaaaattagctggacgtggttgcaggtgcctgtaatcccagatactcagaaggctgaggcagagaattgcttgaacccgggaggcggaggttgcagtgagccgagatggtggcactgcacttcagcctgagagacagagcaaaactccgtttcaaaaaaaaaaaaagagagtaggtgactttgcaaatgtggatttcatgactaatgtggatagactatatgtatgtatgtatgtgtgtacatatatggcattgtctatgaaagtttaacatgtacacacacacatttctgtgcatatgcatgtatttaaaaagtaaaacttaaatgcatttacacccacasgctccaggatggatgaggaggcatgaccctaaggctcccctcagtgctgccttttccagctgcctgcagcaatctctggttacttggcttcaagactccttggagtagaaatttccaaaccccgcactgcctcaatcagaccatccttgcttatgtagcaattgccaggggcccttgttacaaatggatcctaattccattcctgacctactcaaacagaatccaagggaggaaaggctggagccttggaatgtgaatgtgtacttgacaccatttacaaagctcacaattcaagtttgagaatcactgtgaataggttcccaggcagctggagaaatcagcagctgacactgtttggaccctgggacaagaggcaaatcgccagtgtaggccaccctgcccctcttgcgagcagacgaaatcagccaaaagtgttgtatgcttcgtgaaagaccacaggcagtttcgtttaaagctgtataacctagggcgaaaaaaataaataaataaaaataaaataaaagaattgtgtgtgcttaatgagaggaaaaaaataattaagctgggaacccagggaaggttatgtaacatccctgtgtgtcatgtttaaagtgaatgtaatagtagttctctcttaaggctgtcaaagatgttaaaaatgtgtgttgagcagcacttcccatgtgggaacagttaacaaccacttattattatcaccatcagctgttgttccctggacctgagctgacccccggagtatgctctttcctcctgctcactttctcagccaccggaatctcaccttttttcagacctttcctgtttcagtctggatgtttctttttcaaatgattactttgcaaaagtatgtacttaatagaaaagtaggactgtgcacccacctggacggcaagaacccagtgttggcaaggacacagagcaagtgggggctttgctgctggaaatataaatttcactttgtcaaactttttgacattatctatgaaagttaaacatacacacacactgtgacccagcaattctcctaaattcatagatacagtcaccgaaagacatgacaagaatgtgatttgtaataataaaaaattagaagcaaactaaaagtttatcaacagcagaacttgtatccccacaatggtggacagtaagcagctagcgtggactaactgcagtcttctcggtgcggaggaatcccatgaacacaaggttaggtgggaggagacactaaagaatgc

SEQ ID NO: 26004 - DNA, 592 bp, Homo sapiens
gcattatttgacaaggtaatgtatttgatgacgttaataacaatgtcaaggtcctgctccctcctgtgtccaaatttccatgagtagacacgacaaaactttgcagtttctttctgttgaaaatggracatacgattaaatgcctgaaatgtcttaaacagggttcttatcctccaaagtattgacatttagggccagataattatttgttgttgagggctatcccgtgtttagcagcatccttgacctttactcaccagacatcaatagcactcctcccatccagtcaaccagttgtgacaacacaaatgtctccagacattgccaggtgtcccatggagggataagttgtccctcctttggaactgctggtctaatacactgctttcctgggcatgattgatagagaatttatttatggagctctgtagacaattcctatgtgcttgctgctttcttgtaactcatgtaaaatgggattcctagaacagttttgcaaggatattgacttctgctcaaactaagcttcaccattctgttgtgctcaatactttgttgtctccgttttataaattcattattaaacaacaag

SEQ ID NO: 26005 - DNA, 1172 bp, Homo sapiens
cagggctgggtcccctccttgcggaagaggggtttgagttgcaccttaaaggtggtctttgagggccacctgaagtttgggaagccccaagaggctgagaatggcctggtgtggacaagccctgggtccccaggatgtgtgagaggatgctcagcggctgcctgcagccgcatctgctctgctgggcctctgggcctgggcacttcttctggccacttcttctggccactatgccgcccggcacctggggagggtgtgtgcactgggtcttggggacaaggagactctggggcccctggaartcctgaacctgtgcctgatgtgaccggggtggtggcctgtgtgtgtgattccagagctggggagcctggaggagctagagaagaagagggtgtgccgaatcatcaccaccgacttcccgctgtacttcgtgatcatgtcacggctctgccaggactacgacaccatcggtcccgaagggggctccctgaagagcaagctggtgcccctggtacaggcaacgttcccggagaatgccgtcaccaagagagtgaagctggctctgcaggtgacagccctcctccccgccaggtcctgggggtggactgaactccaggcctccgggaaggccaccctcttccccaggacatccccacacttttgtctggtgctttgaaatgccacagtggagatctgagtttaaagctcaaaggagagttaagtgggaaggggtgaggtggaagctccctgataagttgcagaacccctggtaacccatcaagctgcacggcccagtctgtgcagcatgcaggaaccgcatgacctccgggagttgactgtggtgctagcaaagatgcaccagccctgggagtaagaagcagaggagaaggggagaaagggctcaggaaggcaagctccaccgtgtcggttctgtggtccaacagcagggcgggaccccgtgcactgacggccactctcaccaggcatggagctgcctcccgtctgattagcccctctcctgcttgggcctgagtgtcctgcctctgtcatttcacaggcccagcctgtcccggatgagcttgtcactaagctcctgggcaaccaggccacattcagccccattgtcaccgtggagccccggcgccggaagttccaccgccccattgggcttc

SEQ ID NO: 26006 - DNA, 1172 bp, Homo sapiens
cagggctgggtcccctccttgcggaagaggggtttgagttgcaccttaaaggtggtctttgagggccacctgaagtttgggaagccccaagaggctgagaatggcctggtgtggacaagccctgggtccccaggatgtgtgagaggatgctcagcggctgcctgcagccgcatctgctctgctgggcctctgggcctgggcacttcttctggccacttcttctggccactatgccgcccggcacctggggagggtgtgtgcactgggtcttggggacaaggagactctggggcccctggaagtcctgaacctgtgcctgatgtgaccggggtggtggcctgtgtgtgtgattccagagctggggagcctggaggagctagagaagaagagggtgtgccgaatcatcaccaccgacttcccgctgtacttcgtgatcatgtcacggctctgccaggactacgacaccatcggtcccgaagggggctccctgaagagcaagctggtgcccctggtacaggcaacgttcccggagaatgccgtcaccaagagagtgaagctggctctgcaggtgacagccctcctccccgccaggtcctgggggtggactgaactccaggcctccgggaaggccaccctcttccccaggacatccccacacttttgtctggtgctttgaaatgccacagtggagatctgagtttaaagctcaaaggagagttaagtgggaaggggtgaggtggaagctccctgataagttgcagaacccctggtaacccatcaagctgcayggcccagtctgtgcagcatgcaggaaccgcatgacctccgggagttgactgtggtgctagcaaagatgcaccagccctgggagtaagaagcagaggagaaggggagaaagggctcaggaaggcaagctccaccgtgtcggttctgtggtccaacagcagggcgggaccccgtgcactgacggccactctcaccaggcatggagctgcctcccgtctgattagcccctctcctgcttgggcctgagtgtcctgcctctgtcatttcacaggcccagcctgtcccggatgagcttgtcactaagctcctgggcaaccaggccacattcagccccattgtcaccgtggagccccggcgccggaagttccaccgccccattgggcttc

SEQ ID NO: 26007 - DNA, 1172 bp, Homo sapiens
cagggctgggtcccctccttgcggaagaggggtttgagttgcaccttaaaggtggtctttgagggccacctgaagtttgggaagccccaagaggctgagaatggcctggtgtggacaagccctgggtccccaggatgtgtgagaggatgctcagcggctgcctgcagccgcatctgctctgctgggcctctgggcctgggcacttcttctggccacttcttctggccactatgccgcccggcacctggggagggtgtgtgcactgggtcttggggacaaggagactctggggcccctggaagtcctgaacctgtgcctgatgtgaccggggtggtggcctgtgtgtgtgattccagagctggggagcctggaggagctagagaagaagagggtgtgccgaatcatcaccaccgacttcccgctgtacttcgtgatcatgtcacggctctgccaggactacgacaccatcggtcccgaagggggctccctgaagagcaagctggtgcccctggtacaggcaacgttcccggagaatgccgtcaccaagagagtgaagctggctctgcaggtgacagccctcctccccgccaggtcctgggggtggactgaactccaggcctccgggaaggccaccctcttccccaggacatccccacacttttgtctggtgctttgaaatgccacagtggagatctgagtttaaagctcaaaggagagttaagtgggaaggggtgaggtggaagctccctgataagttgcagaacccctggtaacccatcaagctgcacggcccagtctgtgcagcatgcaggaaccgcatgacctccgggagttgactgtggtgctagcaaagatgcaccagccctgggagtaagaagcagaggagaaggggagaaagggctcaggaaggcaagctccaccgtgtcggttctgtggtccaacagcagggcgggacccygtgcactgacggccactctcaccaggcatggagctgcctcccgtctgattagcccctctcctgcttgggcctgagtgtcctgcctctgtcatttcacaggcccagcctgtcccggatgagcttgtcactaagctcctgggcaaccaggccacattcagccccattgtcaccgtggagccccggcgccggaagttccaccgccccattgggcttc

SEQ ID NO: 26008 - DNA, 1172 bp, Homo sapiens
cagggctgggtcccctccttgcggaagaggggtttgagttgcaccttaaaggtggtctttgagggccacctgaagtttgggaagccccaagaggctgagaatggcctggtgtggacaagccctgggtccccaggatgtgtgagaggatgctcagcggctgcctgcagccgcatctgctctgctgggcctctgggcctgggcacttcttctggccacttcttctggccactatgccgcccggcacctggggagggtgtgtgcactgggtcttggggacaaggagactctggggcccctggaagtcctgaacctgtgcctgatgtgaccggggtggtggcctgtgtgtgtgattccagagctggggagcctggaggagctagagaagaagagggtgtgccgaatcatcaccaccgacttcccgctgtacttcgtgatcatgtcacggctctgccaggactacgacaccatcggtcccgaagggggctccctgaagagcaagctggtgcccctggtacaggcaacgttcccggagaatgccgtcaccaagagagtgaagctggctctgcaggtgacagccctcctccccgccaggtcctgggggtggactgaactccaggcctccgggaaggccaccctcttccccaggacatccccacacttttgtctggtgctttgaaatgccacagtggagatctgagtttaaagctcaaaggagagttaagtgggaaggggtgaggtggaagctccctgataagttgcagaacccctggtaacccatcaagctgcacggcccagtctgtgcagcatgcaggaaccgcatgacctccgggagttgactgtggtgctagcaaagatgcaccagccctgggagtaagaagcagaggagaaggggagaaagggctcaggaaggcaagctccaccgtgtcggttctgtggtccaacagcagggcgggaccccgtgcactgacggccactctcaccaggcatggagctgcctcccrtctgattagcccctctcctgcttgggcctgagtgtcctgcctctgtcatttcacaggcccagcctgtcccggatgagcttgtcactaagctcctgggcaaccaggccacattcagccccattgtcaccgtggagccccggcgccggaagttccaccgccccattgggcttc

SEQ ID NO: 26009 - DNA, 545 bp, Homo sapiens
gacccygagcacatcagagcctcaaggctccacctgaaaagctgctacaatggaatgacctctgcaattctttccaggtctcacttctggaggacgggtgaattgggagcaaaggcagggaggctggcagaggtttctggaagtcagtggggcagggccagcgctagagaagaggaggctttgaggcttgtcttggcttaggccttctcctcctcctgggcaccaccctgaactgaccctacccccccagacactgctgcggcctggctgccctggggagggcaggccagggccagcaagacctgggagcctctgcggcccacgacacctacagttttagaatctggagagcagatgcctctggcttgctaagcaactcatgaaacaaacagcttgcttcagggctttcttttttgaagctgactttgttgtttgggtggggagatgtgtgtatagataagcttctcaaagtgatgacatcacaagaataataaaaatgccacattgcaccctgtgtctttcacctcccaggcacgttttcaaaa

SEQ ID NO: 26010 - DNA, 545 bp, Homo sapiens
gaccccgagcacatcagagcctcaaggctccacctgaaaagctgctacaatggaatgacctctgcaattctttccaggtctcacttctggaggacgggtgaattgggagcaaaggcagggaggctggcagaggtttctggaagtcagtggggcagggccagcgctagagaagaggaggctttgaggcttgtcttggcttaggccttctcctcctcctgggcaccaccctgaactgaccctacccccccagacactgctgcggcctggctgccctggggagggcaggccagggccagcaagacctgggagcctctgckgcccacgacacctacagttttagaatctggagagcagatgcctctggcttgctaagcaactcatgaaacaaacagcttgcttcagggctttcttttttgaagctgactttgttgtttgggtggggagatgtgtgtatagataagcttctcaaagtgatgacatcacaagaataataaaaatgccacattgcaccctgtgtctttcacctcccaggcacgttttcaaaa

SEQ ID NO: 26011 - DNA, 520 bp, Homo sapiens
ttggttttcacgtaagtgctgggctttgaagcattttttatttttttaagacacaggatctcactgcgtacactggcgtaccctggtgtgattatagctcactgcaacctccaactcctgggactaagcaagtctcccagctcagcctgtagctgagctaccacgtctggcctgaagcatttctagttctagtttgaaaaaaaaaaaaaacaaaaacacatttagaaccctggttaattgttacatcgttttgtcttccgattttccgattcctcaatgctgattcttggcctagggtatgtatagtggaaatggtgctaagaatggaggtgctgtgtttatctgtgtctgaaatatctggcgctgtacagatgggggaagtagggagtaaaacctttccagatgtaaacctctgtgttttagcaaaataacrttatggattctatattagtttcctgtgtctgctgtaacaaattaacacgaacttggtgacttaaaacaatggaaatggattctgtca

SEQ ID NO: 26012 - DNA, 520 bp, Homo sapiens
atcatttcttacctatgaggttggcagacatccaagagtttgacaacgtactctcttggagttgcaggggaagcgtcaatgcagggggcttcacctccatgggaaggagtttacagtatctagcaaaacaagatagactttgactccaaatcttatgaatttattctaaggatacattggcaaaaatgtgaaaatatgcacatatacacacagttgttttttggcatagcaaaagactagaaacaacccagatgcccatcagtttgtgccagtttaaagaaactgggatatccacacaatgcagcactatagctataaaaatgaatgttcactatctctaagactgtggtaatcttcaggatgtcttgttaagtaaaaagagcaaggtggagtttattcaatatgttaaatgtcaattccattggacttttataaaaacaatggaaatttaaatgataaaaaaattttaagtggttacctatagtagaagaaagsgggggaaaaggtcgggggtacagat

SEQ ID NO: 26013 - DNA, 567 bp, Homo sapiens
ggcatttgctaaaagtcaagtgactggtggggtggagaggccagggccacagtagttagtatgctgtgacaaagagtggtggagtggtcatctcaagtcttcactgccatagctcacccgctccccaaaccctactgctgcaggaggtcacacgccacctgyggatggagcaaacacatgcagacaagacaggccccccgccactgctggcacacaggacacccacccagcctatggtcctgtctctggctggacaacgtaatcagaataacaggtaatccttactgagcactaactatgtggcagacacatgtccaacaattaatatatagtaaagtgtttaattcttacagcaatattgtgaagtaggtactgctatttagtttatatttcttacctttttccttttatttttaattcttttctgaagtgttaatttctaagttttcctaacttagatttatgttattacttcatatctcctatttactcccttaaggtcttgagcttgttctgaaactgtaggctacagcttttatctgtttcgtggtcatgtctctgtggtat

SEQ ID NO: 26014 - DNA, 567 bp, Homo sapiens
ggcatttgctaaaagtcaagtgactggtggggtggagaggccagggccacagtagttagtatgctgtgacaaagagtggtggagtggtcatctcaagtcttcactgccatagctcacccgctccccaaaccctactgctgcaggaggtcacacgccacctgcggatggagcaaacacatgcagacaagacaggccccccgccactgctggcacacrggacacccacccagcctatggtcctgtctctggctggacaacgtaatcagaataacaggtaatccttactgagcactaactatgtggcagacacatgtccaacaattaatatatagtaaagtgtttaattcttacagcaatattgtgaagtaggtactgctatttagtttatatttcttacctttttccttttatttttaattcttttctgaagtgttaatttctaagttttcctaacttagatttatgttattacttcatatctcctatttactcccttaaggtcttgagcttgttctgaaactgtaggctacagcttttatctgtttcgtggtcatgtctctgtggtat

SEQ ID NO: 26015 - DNA, 567 bp, Homo sapiens
ggcatttgctaaaagtcaagtgactggtggggtggagaggccagggccacagtagttagtatgctgtgacaaagagtggtggagtggtcatctcaagtcttcactgccatagctcacccgctccccaaaccctactgctgcaggaggtcacacgccacctgcggatggagcaaacacatgcagacaagacaggccccccgccactgctggcacacaggacacccacccagcctatggtcctgtctctggctggacaacrtaatcagaataacaggtaatccttactgagcactaactatgtggcagacacatgtccaacaattaatatatagtaaagtgtttaattcttacagcaatattgtgaagtaggtactgctatttagtttatatttcttacctttttccttttatttttaattcttttctgaagtgttaatttctaagttttcctaacttagatttatgttattacttcatatctcctatttactcccttaaggtcttgagcttgttctgaaactgtaggctacagcttttatctgtttcgtggtcatgtctctgtggtat

SEQ ID NO: 26016 - DNA, 567 bp, Homo sapiens
ggcatttgctaaaagtcaagtgactggtggggtggagaggccagggccacagtagttagtatgctgtgacaaagagtggtggagtggtcatctcaagtcttcactgccatagctcacccgctccccaaaccctactgctgcaggaggtcacacgccacctgcggatggagcaaacacatgcagacaagacaggccccccgccactgctggcacacaggacacccacccagcctatggtcctgtctctggctggacaacgtaatcagaataacaggtaatccttactgagcactaactatgtggcagacacatgtccaacaattaatatatagtaaagtgtttaattcttacagcaatattgtgaagtaggtactgctatttagtttatatttcttacctttttccttttatttttaattcttttctgaagtgttaatttctaagttttcctaacttagatttatgttattacttcatatctcctatttactcccttaaggtcttgagcttgttctgaaactgtaggctacagcttttatctgtttcgtggtcatgtctytgtggtat

SEQ ID NO: 26017 - DNA, 555 bp, Homo sapiens
aactgaacgctctccaaaccccgtcattttgggggttgtatagaggttccattaagtagaaaasattgatgaagtcattggcctttggtgagtggactcaatccccagcccctctgccctctccagaggtccagggatggggctgagaggtttcaccctctactcacagggctggttcttttaacagccagttcccacctcgcagctatctaggggcccccagccaccagtcatctcagcacacaaaaagacacttatcaccctggagattccaaaggtgttagaagctcttgtaccattaactggagattaagaccaaatattacagcaaaagatgctcctctcacccctatcatggagaaattacaaggattctaggagctctttgccaggaactgaagatgaggaccaaatgtatacttcttgttatttcattatatcatcattacttcgatagaaaaccgacttagcataaattgtcatttttacgttgcaatatgtttgcctgggtcttcaacattaatttttttcacctgttctgcaagacaacctttc

SEQ ID NO: 26018 - DNA, 572 bp, Homo sapiens
ggaaagaattatgtgaataccctcctctctacaggtttcctgttccctttttctttttttgttaatgtcagrcttattgaggtaaaatgcacatacagccaaattttgacaaatatacagtagtgtaaccatcacaacaattaacatggaacatttccatcaccccaaaaagttctctcatatccatttgtagttagttcctatccccagcctcagccattggcagtctctgattcatatcctatccctacagtcttgccttttcccgaatatcttataaatgaaattatacagtttttagccttttaagattgagtggtattcaaagacctgggaacttttgctagaactctgggagccacgattgtcaaagaaagtacaccttaaataggagactaaaaagtgtggccagagaggtagacggtatacagagaggttgtcttacgtttaaataaagagatgcaaacacttcgagaggaaaaggagaaatagtgatagggatagagattgtgatagacaaagacagagacttcacaagagagacagaattagagagagagagagagatggac

SEQ ID NO: 26019 - DNA, 513 bp, Homo sapiens
cgacaagttcagagacatgttgcagtgactctaatatcctactcacagcatattcttacatattttagaatcaaataaaggtgaaattcaagcgaagaacacagtattgcctcttcctgattatgggtcaccccaaactgacacaagatgaaacaaaaccaacarcaacctttggagagaaagcccaaggtgacaatgcctttctcagttggggttccctgtggtaacatgactttaaccatatataagcacagactgcacaatccacacagttaagaaacaagaggatgtgaggtggaagaggggtaaaaaatgtaaatctttcatttttatgacttagtgggcaatttcttcggacagacccacacatctttgaccttcatacctttgggggaatgcttacaacacccgctgaacagagcccagtggggaaatgtgacttagagaatccaaccaggttcctacctttctgcttgatgcaaaaatggcgcaccctttatgcgattatctact

SEQ ID NO: 26020 - DNA, 1467 bp, Homo sapiens
ctaagagaagatccmtccaaggttagctgtccagaacctcaggtcattgttaaaaggtactctcaagaaaccagcaaaattaataaaaagtaaactgaagagtatgtactgttttataatagcatattccttctacgtactcagtcactgctagcagatccccccaatgcatctatatctaagtgtacaatgactcttccagaatgaacatgacaaaggcccccagatgtcttatctgctagggacaagcctaagattttcctgctactgagcttgatgtagtgtacacttgctcaaacctcaatgcaaagtatggagtgtagggtctctaaatttaataataataataaacacaggaaaaaaccactagaacaccctctctgtatatatatgtactgctctgtttcggtcttctgccataaaccccacaggaagtgactattttgcacaagagctcacttgaggaaatgcaaagtcaaacccccttcccctggtaccactgaagtgaatcactgcagctcaggcaactctttcagctcaaatccttgagtggtttttagtgtcttgaaggcataagttttaagtactctaggaaagagaagagtcaggtgtcactgaaaaataaacctgagctgatcccttgaggtgctaaaacttgacgtgctgacagcagcgatggatcagggtctgcagaggggtggcacgctccactagaggcaggtaatcttgttactttctagagaggcttggcctggtctcagcaataggccattccttttactcctcagtcctttgtaatgctcacaggtaaaaccagcaagtgaacaacgcatgcttggcaggagggatgaaatgcaatttgaactcaggacataaaaggctctccttaaagggttcttgtcgaggatgattgttccagtgggtctgatactccttcctgcttcccctcatggtagaactcttctttcccatggggagctcattcctggtggttcaagtggaaccaatccagcaactccaccaattctcctccactggtccagctcttccaccaacccaaatggatgggctggtgcccaggctcggacaaatcctctccctggtcataatgaccaattcagtgatgggcatttgacctatagtgggccagagtcatccctaggaattatctgttacattttcccaaaaacccctctttccttcaggttcctaagctagaagaaggaattgggctaccaggggccatttcatcaaccaggtacaaagagctcaataaataagcacagccgatgggcaaagctgaggcaggcctggtcctgattcactgtctgaccacctggatccagctgtgcttgaggtgtacccctggattgcccaaggccatgagcccatacatttccttttttgttacagctacttttgagtctgtttctgtcacttttagtccaaaggcacaattgtggaatt

SEQ ID NO: 26021 - DNA, 1107 bp, Homo sapiens
tgtgtcatttctggaggcttgtctgggatctgtgcaagggtaagagtggacctcttacactttcatttctgaggcttcttgccttcacattttttttccaaaaacggatraagcactgggcgtctgtcagccagttaagagcgaatggcacagctgcaaaggacaggcttgctggggaagattttgtcaagcctctgccatcaccctcgggtactgggaatgttggctttgtttcaatccagtctcccttcacagaggtctagccaatgcataggatcggaataaggtcctcgggcaactgaaggcatctggctgaggctacacctcagtgttacctgaaggctcctggactggccccaatccccaacagcccgttcgggtgtcagtcaagacctccagtctttcctatagcattttctttctctcttcctggctcctatctcttcttcatacacaacgttaagggtgttgctgcaaaccacagtgataatattattgagtggaatgagcattttgcttagtcatcagcagtgtaattcagaacaacttggtttttgtctgttcttagaagcaagaaggatgcaatgactgagagttttctttcccctgttgaaggaatccatttgcattgggcaagaggttatttccctcaggcaacttcccctacctgcgtttaagttgtttccgcccccgcaatcatgtcaggagtcagcacagtcctatgactacagggagctttgctatgtaagagactgatttttttccctcttgggaggcaacttattaggccaggcctccccttcctttcttagtgtgactgtgagggatgtctcaggaaagcctttaatctgatatttttcccaaccccttagttatagttgaggggaccttttgtttacccatgccttttaaatcatgcctgaaagcccaactcctctgctaggcagggctattttagctggtacgggacccatcatccttatggctccaggacagactctttgtctcaccctagtgcagaccaatattaattaacccagaagtctgggcaactgaaaggaaaattggtgcagccacaactgccatactggtctaggtccaccttaa

SEQ ID NO: 26022 - DNA, 1107 bp, Homo sapiens
tgtgtcatttctggaggcttgtctgggatctgtgcaagggtaagagtggacctcttacactttcatttctgaggcttcttgccttcacattttttttccaaaaacggataaagcactgggcstctgtcagccagttaagagcgaatggcacagctgcaaaggacaggcttgctggggaagattttgtcaagcctctgccatcaccctcgggtactgggaatgttggctttgtttcaatccagtctcccttcacagaggtctagccaatgcataggatcggaataaggtcctcgggcaactgaaggcatctggctgaggctacacctcagtgttacctgaaggctcctggactggccccaatccccaacagcccgttcgggtgtcagtcaagacctccagtctttcctatagcattttctttctctcttcctggctcctatctcttcttcatacacaacgttaagggtgttgctgcaaaccacagtgataatattattgagtggaatgagcattttgcttagtcatcagcagtgtaattcagaacaacttggtttttgtctgttcttagaagcaagaaggatgcaatgactgagagttttctttcccctgttgaaggaatccatttgcattgggcaagaggttatttccctcaggcaacttcccctacctgcgtttaagttgtttccgcccccgcaatcatgtcaggagtcagcacagtcctatgactacagggagctttgctatgtaagagactgatttttttccctcttgggaggcaacttattaggccaggcctccccttcctttcttagtgtgactgtgagggatgtctcaggaaagcctttaatctgatatttttcccaaccccttagttatagttgaggggaccttttgtttacccatgccttttaaatcatgcctgaaagcccaactcctctgctaggcagggctattttagctggtacgggacccatcatccttatggctccaggacagactctttgtctcaccctagtgcagaccaatattaattaacccagaagtctgggcaactgaaaggaaaattggtgcagccacaactgccatactggtctaggtccaccttaa

SEQ ID NO: 26023 - DNA, 548 bp, Homo sapiens
tctcatctacaagagaggaatcatagtccctttcttagagaattgctatgaagattaaatggaataaggcctgcgaagggttcagcatagttcttagctcatagtaagtgctcaataaatggaagcaataattaatgttatcactaaatattgtaccaagtgtaatggcataaagaaggaagaggaggacatgagttactcacgatagttaggtacttctaactactttatatcattatctcattttgtcgcctcaacaaatccagcaggaaagcactagaaaggggttaagagctaaatggagatagaagcgttttgtgagccataaagagtttccctgacacagaagatttttaatgtcattattatttgtctcatttaactaaaaccctcttgaagagagtctgctaatagtatctcagtgatgttctctgcctccccactcctggcctccctgatctatcttcattcctcactcatctgaaaaacaagtaaaatgaaagcctacagcaagtgcttcctggctttcctacctmactggcagagca

SEQ ID NO: 26024 - DNA, 546 bp, Homo sapiens
tcagaaggtctcaggacatataggggtcaggagaagaataggcatttagtgcatggagtgtcataaaagcacaggagaagcccaggctttactcaggtgttacagtgccttaggacctggaccaagagacctrgtgacttgcacttttctagaagaggagggtacattagcctgccaacactatgttatttttttctgtcttgtggaaattttctcattctgactacagccccaaacagttcttatttgtggagtatgaaaatcaaatatccctgcatgggtcctattatgtgatagtgcctgtgatatcagccctttgtgtaacactatgcaaggagagtcatgtcagggatgtcccctgtggttatcacttttcttttcagaccactgtgtgcagtgtgaagaagcagcctgattttgccacttcaggccaatgggaagtggtcactgaatctgaagggaaaaaggagatgaatgtctttgatggagtcatggtttgcactggccatcacaccaatgctcatctacctctggaaagcttccctg

SEQ ID NO: 26025 - DNA, 546 bp, Homo sapiens
tcagaaggtctcaggacatataggggtcaggagaagaataggcatttagtgcatggagtgtcataaaagcacaggagaagcccaggctttactcaggtgttacagtgccttaggacctggaccaagagacctagtgacttgcacttttctagaagaggagggtacattagcctgccaacactatgttatttttttctgtcttgtggaaattttctcattctgactacagccccaaacagttcttatttgtggagtatgaaaatcaaatatccctgcatgggtcctattatgtgatagtgyctgtgatatcagccctttgtgtaacactatgcaaggagagtcatgtcagggatgtcccctgtggttatcacttttcttttcagaccactgtgtgcagtgtgaagaagcagcctgattttgccacttcaggccaatgggaagtggtcactgaatctgaagggaaaaaggagatgaatgtctttgatggagtcatggtttgcactggccatcacaccaatgctcatctacctctggaaagcttccctg

SEQ ID NO: 26026 - DNA, 521 bp, Homo sapiens
ttcactcataggatggtgcttgaattttcctttacactccccaaatggaaaaaagtatcaattttatcttcccaaagacaatgtgggtatccgtatagcgtccaaactgtagcacatgcaagcagcttgccctggcctttgcatacagttaggtaactcagataacattcattctaaagcaattatatctccttggctttttgttttgtttgttktggtttttgtatagcagactttgaactgagaagcaagtgtcttcactataaattcctggaaaaagacatgccaatattgtattttgttattaatgtctgtgttgaatcaaactctattggcaataggtaaatgtcttggttgttctttagtaactttaattaagccatgcttctctataaagatgttttaaattgttttattttaattagaagcttagtgctacaattctgttaaatgactcttactcagcaactttgtttgaaaaacacttcttctcattgctatcctcatctataaccacaaaa

SEQ ID NO: 26027 - DNA, 519 bp, Homo sapiens
tgaattaccaaattttcagctgtttggttttttttttttcacataactttttaattataaaggtaatctgttgcaaaaagtttaaacattacagaaacatatgtttagatggtgaaagtttccaataagcgtgctctttggagatttaaatactgtggataatctttccagataaattgtataatgtatatattttattttcttacatatccaaattttgatatgtatatgttgatttattgaggtaaattgtaaaattgtaaaaaattgtaatatgcgtttaatgtaagtgggactgtcttataagaatattgtttttttgttttgttttgttttgtttttttttgsagatagagtcttgctctgttgcccaggctggaatgcagtagtgtaatctcagctcacggcattctccccttccgtggctgaagtgattctcctgtctcagcctcccgagtagctgggattacaagcgcatgccaccatgcccagctaatatttgtaattttagtagggact

SEQ ID NO: 26028 - DNA, 631 bp, Homo sapiens
catactttccaaatggcttacttgtagctcctcacctccaccctactcataaaagcactggcttgaagcaacaaacctggaatcttgtcttagctttatgctgactcttatcatactgggaaggccaattgggttaaacagatactgtgtgcctaacatgtgcaacagattgtcgcgaggatggaatgctgacaaacggaacagatgtgttccctactcttcacaggctctgtgtctcagttttccatcattcacttaactttacacartgcccattatgcgctaggcactgaaggtacgatggcaaacacatcagatacggtcatccatgtcttcatgaagcatcagtctagtgggaaaaacaagtatcgttgcactgtaccagagttattttttatttttttccgagacgcagtcttgctcagttgaccaggctggagtggagtggtgtgctttcggctcagtgcaacctccacctcctgggttcaagcgattcttctgcctcagcctcccgagtagctgggattacaggcatgcaccaccacacccagctaatttttgtatttttagtaaggacgaggggtgggggtctcaccatgttggccaggctggtgtcaaactcctgacctca

SEQ ID NO: 26029 - DNA, 552 bp, Homo sapiens
tgctgcccccaaggccattggaatgtgagggtgggggtactatcaagaggccacagggtcctggggtgggaagatggagaccagaccacctraatggaggaggggacagaccaccgtgagagagacacaagttctagccctttcattgagtcgcaggctgcagcaatagaatcctgaaattcccaacccccttaggtccttaggggtcttcccggtctcctggtaggattagagcttcggggaaaaccttggtgctcatctagcccagctttctcattttacagacttggaaaccgaagccccaggtgagtgacctgcccaaggacatggctggtcctccagtctgggcaggtaagggagtctctggtttatcaggcttctgaaccctggccttccccagtgcctcactcttcactgccctctggttcagaaaggaggagtcttatatggtcctcccctaggaaacactggcgtgcatgttctatttttctttttcttttcttttttgagacagggtctcactctgtcacccaggctggagttcagtggtgc

SEQ ID NO: 26030 - DNA, 552 bp, Homo sapiens
tgctgcccccaaggccattggaatgtgagggtgggggtactatcaagaggccacagggtcctggggtgggaagatggagaccagaccacctaaatggaggaggggacagaccaccgtgagagagacacaagttctagccctttcattgagtcgcaggctgcagcaatagaatcctgaaattcccaacccccttaggtccttaggggtcttcccggtctcctggtaggattagagcttcgggraaaaccttggtgctcatctagcccagctttctcattttacagacttggaaaccgaagccccaggtgagtgacctgcccaaggacatggctggtcctccagtctgggcaggtaagggagtctctggtttatcaggcttctgaaccctggccttccccagtgcctcactcttcactgccctctggttcagaaaggaggagtcttatatggtcctcccctaggaaacactggcgtgcatgttctatttttctttttcttttcttttttgagacagggtctcactctgtcacccaggctggagttcagtggtgc

SEQ ID NO: 26031 - DNA, 535 bp, Homo sapiens
tgtaacattgcaaggcaccttactatactggttaattttcacaacaggccttatctactttttttttttttttttttttttgagacagagtcttgctctgtcacycaggctggagtgcagtgacgcaatctcggctcactgcagcctctgcctcccgggttcaagcagttttcctgccttagcctccctgtagctgggattacaggcacacaccaccatgcctggctcatttttgtatttttatttttattttatttctttcttaaattttttttttgagctggagtctcgctctgtcacctaggctagagtgcagtggtgcaatctcagctcattgcaacctctggctcactgcaacctctgcctcccgggtacaagcaattctcctgtcttagcctcctgagtagctgggattacaggcgcatgccaccacacctggctaatttttgtgtttttagtagagatggggttttaccatgttggccaggctggtcatgaactcctgacctcaagtgatctgcccaccttggccttc

SEQ ID NO: 26032 - DNA, 685 bp, Homo sapiens
tgcctaatattatgcaaatgggcacttgtggcttgggggaacaacatagtaaatgcaccacacacagatgtaaacttaaaccttgaactacaggtgtaagtacaatttgaaacagtatggatgactctcatgagcataatattgactaaaataaactagacacaaaaaacacttacataaaattcaaaagcaggcacctttaaactgctgtggtaggagtcagggttctggtttccctctgaagaggaaaagggcggggcttctggggcactggttggtaatgagtgcaagggtcgttctgttggctcactttgagcaaaatcaataagccaaacacggatgatttgtgcctttttctgtatatgtatgttttacttcagtgaaactttttttttttttttkttgagacggagtctcgctctgtcgcccaggctggagtgcggtggcgccatctcggctcactgcaggctccgcctcccgggttcacgccattctcctgcctcagcctcccgagtagctgggactacaggcgcccgccaccacgcccggctaattttttgtatttttagtagagatggggtttcaccgtgttagccaggatggtctccatctcctgacctcgtgatccgcccgcctcggcttcccaaagtgctgggattacgggtgtgagccaccacgcctggcc

SEQ ID NO: 26033 - DNA, 685 bp, Homo sapiens
tgcctaatattatgcaaatgggcacttgtggcttgggggaacaacatagtaaatgcaccacacacagatgtaaacttaaaccttgaactacaggtgtaagtacaatttgaaacagtatggatgactctcatgagcataatattgactaaaataaactagacacaaaaaacacttacataaaattcaaaagcaggcacctttaaactgctgtggtaggagtcagggttctggtttccctctgaagaggaaaagggcggggcttctggggcactggttggtaatgagtgcaagggtcgttctgttggctcactttgagcaaaatcaataagccaaacacggatgatttgtgcctttttctgtatatgtatgttttacttcagtgaaacttttttttttttttttttgagacggagtctcgctctgtcgcccaggctggagtgcggtggcgcsatctcggctcactgcaggctccgcctcccgggttcacgccattctcctgcctcagcctcccgagtagctgggactacaggcgcccgccaccacgcccggctaattttttgtatttttagtagagatggggtttcaccgtgttagccaggatggtctccatctcctgacctcgtgatccgcccgcctcggcttcccaaagtgctgggattacgggtgtgagccaccacgcctggcc

SEQ ID NO: 26034 - DNA, 581 bp, Homo sapiens
attcaaagttaggaagccattggtttgggtcagtagctcaaaaatttagtgccaatctactcttgccttctccccatggtcataatatgattgttgcacctccagccatcatatctgaatgtatctggactcaaaacattttaaaagagaaaaagtaaagaggtggactactgcctatctcattagtaaaatcggtgccaatttttcaatgtcttaatacaaagaagctttataaatgatttcaccgtgtataacctctatcatagatttgccaagggagaaargaggttgataaaacccacatctatagttgtaatacttgatttgaggttttattccaagttaatagtacaaaattattgtattgtgcttttattatatgacattacataagttaaaaaaaaagttaacatttaaatacaggtgggtctagttttaaattatggttcaaaccacacactttgtgaccttttaaaagatatagcctctagagtttagtttcctagttcgtacaatttggtcacaaggattagagatgatgtttataaaggatctagaaacctacctgttactcaataaat

SEQ ID NO: 26035 - DNA, 620 bp, Homo sapiens
acatctaagcacctacctgatcatatagcttccacattgattctctaacacaatcagatattctctctgaatttactaattccccaaatcccaaatcttggaattatttcctctatcttcaacttccttatcctcacagattttcatatgatatcctcatggatactccctgttcaatttctctcacattgatgcattcgctaatttttcccttcacatgtagataagcttaatttgggggaagtaatgtaattatttcttatctaatcctcttatctgaaaactcattcattttaatacttatatacccaataccaggggttttcaaactggtggttatgacccaatgtataatcacaaaaataatttaaaaataaaatgatatagaacaaaaatataagacaacagaataacaacacaggtaaaaacatttcttataagtatagataagtaattcatatgcaaatttttgtgttacatgtatatgtctatacaagatactgatgacataaaatatatttctttctgtggttctcagccaaataaaaaaaagcatggcagtatatgccactgwcatattcgtatttttaatgcacagatcatagcttatcagttcttgg

SEQ ID NO: 26036 - DNA, 594 bp, Homo sapiens
atagctgttttgttaaacagaccaagttcaataggctataagtagaaaataggcttattctttcccctgctgttctgtatagtttattacttcctcaatccctggacgaaattttaggtgtgtcccataacttttccagtcatcattggataacacaaataattcatcagtcattttcaatgtgtgctaggaaaagacatatgaaacttctaaatactcctaatttataatttttcatataaatggagcaaaagtcctatttaagctcacttgaaggagcaggttacaaagagaaacataactttgtttyagagtgtcatatagagctttttaaaaatcagctttgctgagaaataataatttacatacaataaaatttagcaattttatttctacaatctagtttcactgaaatttttttgagataattgtaattaaattacaattatcactgaaaaatttcactgaaatttttttgagataattgtaaaaattgtcttacacatgcagttgtaagaaatattacagagagatcctatatacccttaaccagttttcccctagttgtagcactaatgatacactaatgtaaca

SEQ ID NO: 26037 - DNA, 583 bp, Homo sapiens
caaaaatctgcaatagctcataaaaataaagtgagcgaattcataaactccctattttcaaccccatctccagagagtctttacctgaagagtgggataatcacataggaatcaaaatttttaaaaataatccccaggtaattttaatacagattgtatgtgtcccacattttgagacacactgccatttgggaattggaattcctctgcatttcactttatcaattacccctttctcacttgtcactctatactctaatggttttttaatgtataaaatcttctttgtttctactacataaacawaatcgcttcctccacagctctatctttgtaatatactgttctatctctttctgtttttaaaaaaagtttctcaacacaagtcttaagcttttcactttatcaattacccctttctcacttgtcactctatactctaatgtttttttaatgtataaaatcttctttgtttctactacataaacaaaatcccttcctccacagctctatctttgtaatatactgttctatctctttcttttttttaaaaaagtttctcaacaaaagtcttaagcttgca

SEQ ID NO: 26038 - DNA, 583 bp, Homo sapiens
caaaaatctgcaatagctcataaaaataaagtgagcgaattcataaactccctattttcaaccccatctccagagagtctttacctgaagagtgggataatcacataggaatcaaaatttttaaaaataatccccaggtaattttaatacagattgtatgtgtcccacattttgagacacactgccatttgggaattggaattcctctgcatttcactttatcaattacccctttctcacttgtcactctatactctaatggttttttaatgtataaaatcttctttgtttctactacataaacaaaatcgcttcctccacagctctatctttgtaatatactgttctatctctttctgtttttaaaaaaagtttctcaacacaagtcttaagcttttcactttatcaattacccctttctcacttgtcactctatactctaatgtttttttaatgtataaaatcttctttgtttctactacataaacaaaatcccttcctccacagctctatctttgtaatatactgttctatctctttctttttttwaaaaaagtttctcaacaaaagtcttaagcttgca

SEQ ID NO: 26039 - DNA, 813 bp, Homo sapiens
agactcccatcccttcagttgtatctaataattgtaacctagggacgaggctcttgaaaaaatttgaggacctagagcagaggtttaccctgagtggtggcgattagggtagagaatgagaatccagtgtgtagttccaaagaatatctgtctcgatatattttcccaaaagtcaccagaagtgatccaagctaaagcctgagattatttttccctcttttcccactttgcatttgcagtcaagtagtaggatcttgctttttatttgcaggcattctgccattttagttaccattcgcagaaagctttaatggcataatagwgtgcagcactactgtagataataaatttaattggcatggcctcaaattagcaaaactgctaatttaatcagtcattgaaattgaaacaattctgttgactatgaatctttcactgctatggtaactgtaaagcacaaagataaaattttaaattgtagtagcattattggcagaaatgagcacaacattcttgtgagtgcttttaaagcctatttcccttggacattttagaagtgaaatttccacatttaaacaggccaaggtcagcttcttgaataatgtagactccaggccatctttcgcatgggcttggtaatgccctcacactgtgcatgtgataaacaagcttaaggtgactgcaccccctgagtaagatcagcgtctctgctcccaagcattgtttgagaaccatttcatatggtaggtgccaattcttgatagtttgtttatgcatttcagctacaggaaataatgtaatagcttgattgga

SEQ ID NO: 26040 - DNA, 813 bp, Homo sapiens
agactcccatcccttcagttgtatctaataattgtaacctagggacgaggctcttgaaaaaatttgaggacctagagcagaggtttaccctgagtggtggcgattagggtagagaatgagaatccagtgtgtagttccaaagaatatctgtctcgatatattttcccaaaagtcaccagaagtgatccaagctaaagcctgagattatttttccctcttttcccactttgcatttgcagtcaagtagtaggatcttgctttttatttgcaggcattctgccattttagttaccattcgcagaaagctttaatggcataatagtgtgcagcactactgtagataataaatttaattggcatggcctcaaattagcaaaactgctaatttaatcagtcattgaaattgaaacaattctgttgactatgaatctttcactgctatggtaactgtaaagcacaaagataaaattttaaattgtagtagcattattggcagaaatgagcacaacattcttgtgagtgcttttaaagcctatttcccttggacattttagaagtgaaatttccacatttaaacaggccaaggtcagcttcttgaataatgtagactccaggccatctttcgcatgggcttggtaatgccctcacactgtgcatgtgataaacaagcttaaggtractgcaccccctgagtaagatcagcgtctctgctcccaagcattgtttgagaaccatttcatatggtaggtgccaattcttgatagtttgtttatgcatttcagctacaggaaataatgtaatagcttgattgga

SEQ ID NO: 26041 - DNA, 506 bp, Homo sapiens
agtcttactcccacctccaaaaccaaaattaaaaatccagccagcctcccctatcctgctcttgagcagttaatcatttgatcccaaacaatggaccacagcattaataggaataaacgtgctcttgtattcagcctgtgcttccagcccatggagcctcaatgctccaaaattgagatccaagtcaatcttgtcatcctaccccttcttcccttatcacctccagccaccaactctgcagtgttcactcaaatccttgagcagacccctggagcctttgctttctctgggaaggtggagggatgtttgcccagtccttcacccctgtaactaatcccagctgggaaattccacagggatgcagctaagggaaaactactgattctgagccccagtgtggcagatggagctggaaatacacaggtaggcagctcagaattatgytggctatagtgggttcagcattgctgcaccaaaaggcccctgctagaaacggatcccttaaa

SEQ ID NO: 26042 - DNA, 632 bp, Homo sapiens
cattgagcattgagaatatactttatctgaacattagtaataataaaaataaacttttttggaattttagactctacttgccaacgtaaccaaactcaggtccagctgcttgccactggaaaaccaaaattaaagaagcaagatgctttgaaaagaaagcaactgtattcaaaggctagcagctaggagatggttgggctcaagtcccaaaggaaccatctcaaaactttaggcaagtgagtgtgttcaaaaagtgaagttggcatgggaagcatgcgggagtggtgcagggtctgtatgtcttgttctgactgccatcttcagttattgtccacctggagcgtgggctggtgccatctsaaggtgacaatggctgtgttgcagactaactgccttgaggtaatctctacatggggaggattctgcagctgggtctctatgcctgatttatttcaagattagcccctgtaatttataagcaagcacatagttagataagcaagtgcagtgcaagggaccttgccaactttgttacttcatttgtacataagtgcattggcattacttgttacccaaaaatcaacacaccttttcttaggctttattttaaataaatcctttttgtttaaaaa

SEQ ID NO: 26043 - DNA, 632 bp, Homo sapiens
cattgagcattgagaatatactttatctgaacattagtaataataaaaataaacttttttggaattttagactctacttgccaacgtaaccaaactcaggtccagctgcttgccactggaaaaccaaaattaaagaagcaagatgctttgaaaagaaagcaactgtattcaaaggctagcagctaggagatggttgggctcaagtcccaaaggaaccatctcaaaactttaggcaagtgagtgtgttcaaaaagtgaagttggcatgggaagcatgcgggagtggtgcagggtctgtatgtcttgttctgactgccatcttcagttattgtccacctggagcgtgggctggtgccatctcaaggtgacaatggctgtgttgcagaytaactgccttgaggtaatctctacatggggaggattctgcagctgggtctctatgcctgatttatttcaagattagcccctgtaatttataagcaagcacatagttagataagcaagtgcagtgcaagggaccttgccaactttgttacttcatttgtacataagtgcattggcattacttgttacccaaaaatcaacacaccttttcttaggctttattttaaataaatcctttttgtttaaaaa

SEQ ID NO: 26044 - DNA, 582 bp, Homo sapiens
aactgcaaaagtgctatgtttctcaaagtagcatttttgtaaaggcttggagatgtaaagatagagtaataaatacctagaagacagttttcttttttgtggtttgtttgtttgtttgtttgtttgttttttgagatggagtctcactcttgttgcccaggctggagtgcagtggcccgatctccgctcactgcaagctctgcctcctgggttcacgccattctcctgcctcagcctcccgagtagctgggactacaggtgcccgccaccatgcccagctaattttttgtagttttagtagagacagggtttcactgtgttagccaggatggtctcgatctcctgacctcgtgatccacccacctcggcctcccaaagtgctgggattacaggcgtgagccaccatgcccagccgacatttctttatatcctgcttatttccaacaaaaagcagaactacagggttaagsaatgagagacagtaattttttcacaaagatagatatcatgctaagcatgggatttagatctgagtttgttgtcagttaacacaaaaaaggaaaacaaatcagtagtgggaag

SEQ ID NO: 26045 - DNA, 2028 bp, Homo sapiens
tccgaggatgtgagggtgtctgcgtaactggcatcggaatcgaaaggccccgcctcccccatgcacgggtgcgcgcacacactcacaccctccctccctcctgctcccccaaagggactcgaatgaaaggcgtaaatacaccgtgtctgcctacccgagggctgctgtgagtgtcagatgagaaaacgcctggggtagtggcccgagactgaagcgcgctccacgcctaccaagtgccgctcaaccccaattctgctctcggggagagaagagaactcctgccagacccgagtgttttcagaagtttgtcagtttagactttcctttttttcctttccaaagctccgctcacccaagagaataatgtaaacattcatgatggcgttttcatagtcccggaggcattgatcatgattgtgaatctgaaaagagctgagttattcatgtttgacaattcagtcatgcagcactccacatgttacaatctttaatggtgaacattgcttttactttccaagcactttctcatctgttgtctcataggggaggagttattctcccaattagggcaatcagaaaacagggatcaaggccaggcacgacggctcatgcctgtaatcccaacactttggggggccggggcaggaggatcacctgaaatcaggaatttgagaccagcctggtcaacatgatgaaaccccatatctactaaaaaaaaaaaaaaaaaaaaaaaaaaaaaaaaggttgggtatggtggcatgcacctgtaatcccagctactcaggaggctgaggcaggagaattgcttgaacccgagagggggaggttgcagtgagccgagatggcaccactgcactccagcctgggtgacagagcaagactctgagagaaagaaagaagcaagaaagagagagagagagaagaaagagagagagagagaaagaaagaaaaaaaaagaaaaagaagaaagaaagaaagaaagggaagaggaaggggaaagtgaagaggaagggaagaaaggggaagggaagggaaagcagaggtcaaaaaggatcaggccactcgcctactgggggatagcgcatggaggaatcagaccccacagcctgctcttcttccccctagaaccctcaccactgccagatcactgggctatgcactgcttccctcaaaatgccttcagctttctttccccaacccctgagacttaaggatcccacctccctccagaggcctgtgtcccgtccccatttgttcctcatttccctggggtctttttgcatctcccttctctccctctgcacagccaccgtcctgcctccctatacaaaccccaaagtaacctactctccccacagatcctccagacagacagacacccacctgctgccttggcatgggctcccctgaaagcagtgtctggggctcgagctggtgggcaggcatgaatttgtgtctgcaggggtttgaactgtgttctccaagcgatcatacccccagcaactgtaaatgtgaccttattctggaatagcatctttgcagacgtaatcaaattaaggcgaggtcatagggtgggacttcagtccaaagrctggcatccttaaaataaagagaatttttttttattttttatttttgagacagtgtctcgctctgttgcccaggctggagtgcagtgactcaatctcagctcactgaaatctccatctttccggttcaagtgattctcatgcctcagcctcccgagtagctgggattacaggcacctgccaccacgcccagctaatttttgtatttttagtagagatggggtttcaccatgttggccaggctggtctccaactcctgacctcaggtgatccgccctcctcagcctcccaaagtgctgggattacaggagtgagtcgccacgtctggccagaaagggaaatttggacacagagacacacgcatgagaccaccaaggcagagactggagtctacaagccaaggaacgctgaggcctgcaggcaagcgccggaagcaaga

SEQ ID NO: 26046 - DNA, 2028 bp, Homo sapiens
tccgaggatgtgagggtgtctgcgtaactggcatcggaatcgaaaggccccgcctcccccatgcacgggtgcgcgcacacactcacaccctccctccctcctgctcccccaaagggactcgaatgaaaggcgtaaatacaccgtgtctgcctacccgagggctgctgtgagtgtcagatgagaaaacgcctggggtagtggcccgagactgaagcgcgctccacgcctaccaagtgccgctcaaccccaattctgctctcggggagagaagagaactcctgccagacccgagtgttttcagaagtttgtcagtttagactttcctttttttcctttccaaagctccgctcacccaagagaataatgtaaacattcatgatggcgttttcatagtcccggaggcattgatcatgattgtgaatctgaaaagagctgagttattcatgtttgacaattcagtcatgcagcactccacatgttacaatctttaatggtgaacattgcttttactttccaagcactttctcatctgttgtctcataggggaggagttattctcccaattagggcaatcagaaaacagggatcaaggccaggcacgacggctcatgcctgtaatcccaacactttggggggccggggcaggaggatcacctgaaatcaggaatttgagaccagcctggtcaacatgatgaaaccccatatctactaaaaaaaaaaaaaaaaaaaaaaaaaaaaaaaaggttgggtatggtggcatgcacctgtaatcccagctactcaggaggctgaggcaggagaattgcttgaacccgagagggggaggttgcagtgagccgagatggcaccactgcactccagcctgggtgacagagcaagactctgagagaaagaaagaagcaagaaagagagagagagagaagaaagagagagagagagaaagaaagaaaaaaaaagaaaaagaagaaagaaagaaagaaagggaagaggaaggggaaagtgaagaggaagggaagaaaggggaagggaagggaaagcagaggtcaaaaaggatcaggccactcgcctactgggggatagcgcatggaggaatcagaccccacagcctgctcttcttccccctagaaccctcaccactgccagatcactgggctatgcactgcttccctcaaaatgccttcagctttctttccccaacccctgagacttaaggatcccacctccctccagaggcctgtgtcccgtccccatttgttcctcatttccctggggtctttttgcatctcccttctctccctctgcacagccaccgtcctgcctccctatacaaaccccaaagtaacctactctccccacagatcctccagacagacagacacccacctgctgccttggcatgggctcccctgaaagcagtgtctggggctcgagctggtgggcaggcatgaatttgtgtctgcaggggtttgaactgtgttctccaagcgatcatacccccagcaactgtaaatgtgaccttattctggaatagcatctttgcagacgtaatcaaattaaggcgaggtcatagggtgggacttcagtccaaaggctggcatccttaaaataaagagaatttttttttattttttatttttkagacagtgtctcgctctgttgcccaggctggagtgcagtgactcaatctcagctcactgaaatctccatctttccggttcaagtgattctcatgcctcagcctcccgagtagctgggattacaggcacctgccaccacgcccagctaatttttgtatttttagtagagatggggtttcaccatgttggccaggctggtctccaactcctgacctcaggtgatccgccctcctcagcctcccaaagtgctgggattacaggagtgagtcgccacgtctggccagaaagggaaatttggacacagagacacacgcatgagaccaccaaggcagagactggagtctacaagccaaggaacgctgaggcctgcaggcaagcgccggaagcaaga

SEQ ID NO: 26047 - DNA, 1010 bp, Homo sapiens
gggaatgcagccgagggaggagggcctgcgagctgcaggtcctgcccaggaccaggtgccttcagcctggcggtgctcccagcctccctgtcctcccctccctcccgctctccaaatgctctgagtgcagaggggaaagctgggcatggcacagacccctcccacgcgtgtggctgtgcacggtccccaccactcccatctttaaaatgaggcagatgccagcaccttacaggcttgctggcataaggcttagaaaaaaacgaatgcaaacttgtgaaatagcagcaccaccgctcttgatcttctctccaacttctttgggagagccaaggcccatgagggccacgtgcatcccgtaatcgcttctcttcattcttagtgtttaaaaatcatgttgccatttccctcagtcgtctccgtgcacccttatctctgtcacaaagcgtggagaaggccaaagggcccccttgtgcaccgagtgcaggcacaggccctggagtgatggacagagccctccagtgattaccagggggaatccagtgacctttccggaaccagctccggccaggtgggcgtatctgtgtcacggaatgagccccaccgttcttgtctgactcacttctgcccatttattatttctgcctcctaacgactgatcactgggaaagaacaaatgcaaagatgtttttaaagcactaatcctagttctcaatagagggtaaacagtcttgcttgtaggatagatttttgcaaaattttcyctttaatgaccctcactcatccctgtggaacctcctcctgctcgtacaacagaccttcccttttctaggttgctcatattccactgctttttccaggagctagtgacctccccatccttgtcaagctgcgaacctagagccaatggagtgtctcctcccacactcaccgcccagctcactgcccatacctttgagagttctggttgatctcaaggtgttccctattggaacaccataggttccctggat

SEQ ID NO: 26048 - DNA, 610 bp, Homo sapiens
tgacaactcaacaattatttttctttttctttttttcttagagacagactcttgctatgttgcccaggctggtcttaaattcctgggctcttgctctgcatattctcagtgcaataaaaaaargaaaaaaaagtggcagtcaccaattttattttttggtgtttttttttattttgttttgtttgtttgtttgaaatggagtctcgctccgtcacccaggctggagtgcagtggtgcgatctcagctcactgcaacctctgcctcctgggttcaagcaattctcctgcctcagcctccggagtagctgggattacaggcttgcaccaccacgctcgtctaatttttgtatgtttattagagagagggtttcaccatgttggccaagccagtcttaaactcctgacctcaggtgatctgcctggctcggcctcccaaagtgctgggattacaggcctgggccaccgtgcctggctgtagtcactgattttaaattacgcttccaactgcctctggtgaccccataagtctgtgacatgcagtaatttgtaaacctgagcccccccgccccaagaaagtgatcctcagcatgctcaaatccccagctcccag

SEQ ID NO: 26049 - DNA, 614 bp, Homo sapiens
  misc_feature (1)...(614): n = A,T,C or G
acacaacactgactgaagtttgcaaacaatttcaagaggttcatgcttgggcctctcttgtgccttttcaggaatccctgattcagagcctccaatttagaggaygctggaccctgcagagatccatccaagcagaagaccagagatcctgccaagcaaattgaaccactgagaagtatgctcctggtgtgagctgagatccaaagaaaatgctggaatatcttgattttttttctcatgaagcatcttttgagcctggtgtgagtttaaatccaaagaaaatgctggaatatcttgattttttttctcatgaagcatcttttgagcctagtgttatacagagcacatgctgggatctgaccaagatgagctatgaagttccttccagcttcaacatcccttgtctctagaaaccctaagcatcaagaagataagtggctttcctaaaatgaaggatgagaaaaattattcaggagcaaagagaggcaaaaataaaaggcactttgctcattaatagaataggagaggcntcagtgcgtgccactctcctccccacccnttctgtcaggccctgctctccaagcaactacattttgtgggacccatctttgctc

SEQ ID NO: 26050 - DNA, 1195 bp, Homo sapiens
tcctgccttggcctcccaaagtgctgggattacagttatgagccaccatgcctggccttgtttactgtatcttamagcctcctctacactttgcattttatgtctgaatttttgcacatgaatattggccatgcggggtggtctttcctgaaggcagattggatctatctgaaaagaatgctaatttctcctgttagtctccaagggaagagatgattcctaaggcagaaaaaggaagcagtaattcagaaagtgaatcttaggcacaagtctgtccttagaactcatctgtccaccacatgggagccagtccagggctagggagatagggagtctgcaatccccagggatcaagtttttttttgttttttaaagaaaattgttcatattcatgtggttctctctattccccttttgtttatcatctaggatttatcaccttttcactagttgttccaacttctttctcatctctgggctcaaggctattccgtttcttcaagaagcctttattgagcaccatttctggggtgggaactgtgttaagcaaccagagtacaaagatgaataagacacagtcccaccttcagggtattccccggaggaaagaaaaatataaaataaatgtctaggataatgcagtagatgatattgcaacatgtggaaagtaaaaagaaaaggaaagaaaggaaaggtggtaataaagcatgctagacataggaaatattgatcagagtcacagaggtaggaactgatcatggtaggacataacaagccctgttacacctgcttcattcatttaatctttacccctgtgaggcaggggactattaatgtgcccattcaacaaatgagtatactgagagtcagagaagctgaataacaagctgacattcatgcatctgttaagcagcagagccaggactcggggccttcagcctggctcatgacttcatgtcttactgccttgccatgctgggatattctcattggccaggcctgggtcatgggcccaccccagaagtggattgagggctagtaggtttcccacagaaaaatcctactgttaaaatcattaaaagaaaaactgaatgttgggcgaacaataacagtagttgtccattgcagaatcacttcaaaaatacagcttttcctttctcttgcattatttgcttgagataaattttcacagatg

SEQ ID NO: 26051 - DNA, 1195 bp, Homo sapiens
tcctgccttggcctcccaaagtgctgggattacagttatgagccaccatgcctggccttgtttactgtatcttaaagcctcctctacactttgcattttatgtctgaatttttgcacatgaatattggccatgcggggtggtctttcctgaaggcagattggatctatctgaaaagaatgctaatttctcctgttagtctccaagggaagagaygattcctaaggcagaaaaaggaagcagtaattcagaaagtgaatcttaggcacaagtctgtccttagaactcatctgtccaccacatgggagccagtccagggctagggagatagggagtctgcaatccccagggatcaagtttttttttgttttttaaagaaaattgttcatattcatgtggttctctctattccccttttgtttatcatctaggatttatcaccttttcactagttgttccaacttctttctcatctctgggctcaaggctattccgtttcttcaagaagcctttattgagcaccatttctggggtgggaactgtgttaagcaaccagagtacaaagatgaataagacacagtcccaccttcagggtattccccggaggaaagaaaaatataaaataaatgtctaggataatgcagtagatgatattgcaacatgtggaaagtaaaaagaaaaggaaagaaaggaaaggtggtaataaagcatgctagacataggaaatattgatcagagtcacagaggtaggaactgatcatggtaggacataacaagccctgttacacctgcttcattcatttaatctttacccctgtgaggcaggggactattaatgtgcccattcaacaaatgagtatactgagagtcagagaagctgaataacaagctgacattcatgcatctgttaagcagcagagccaggactcggggccttcagcctggctcatgacttcatgtcttactgccttgccatgctgggatattctcattggccaggcctgggtcatgggcccaccccagaagtggattgagggctagtaggtttcccacagaaaaatcctactgttaaaatcattaaaagaaaaactgaatgttgggcgaacaataacagtagttgtccattgcagaatcacttcaaaaatacagcttttcctttctcttgcattatttgcttgagataaattttcacagatg

SEQ ID NO: 26052 - DNA, 1195 bp, Homo sapiens
tcctgccttggcctcccaaagtgctgggattacagttatgagccaccatgcctggccttgtttactgtatcttaaagcctcctctacactttgcattttatgtctgaatttttgcacatgaatattggccatgcggggtggtctttcctgaaggcagattggatctatctgaaaagaatgctaatttctcctgttagtctccaagggaagagatgattcctaaggcagaaaaaggaagcagtaattcagaaagtgaatcttaggcacaagtctgtccttagaactcatctgtccaccacatgggagccagtccagggctagggagatagggagtctgcaatccccagggatcaagtttttttttgttttttaaagaaaattgttcatattcatgtggttctctctattccccttttgtttatcatctaggatttatcaccttttcactagttgttccaacttctttctcatctctgggctcaaggctattccgtttcttcaagaagcctttattgagcaccatttctggggtgggaactgtgttaagcaaccagagtacaaagatgaataagacacagtcccaccttcagggtattccccggaggaaagaaaaatataaaataaatgtctaggataatgcagtagatgatattgcaacatgtggaaagtaaaaagaaaaggaaagaaaggaaaggtggtaataaagcrtgctagacataggaaatattgatcagagtcacagaggtaggaactgatcatggtaggacataacaagccctgttacacctgcttcattcatttaatctttacccctgtgaggcaggggactattaatgtgcccattcaacaaatgagtatactgagagtcagagaagctgaataacaagctgacattcatgcatctgttaagcagcagagccaggactcggggccttcagcctggctcatgacttcatgtcttactgccttgccatgctgggatattctcattggccaggcctgggtcatgggcccaccccagaagtggattgagggctagtaggtttcccacagaaaaatcctactgttaaaatcattaaaagaaaaactgaatgttgggcgaacaataacagtagttgtccattgcagaatcacttcaaaaatacagcttttcctttctcttgcattatttgcttgagataaattttcacagatg

SEQ ID NO: 26053 - DNA, 1195 bp, Homo sapiens
tcctgccttggcctcccaaagtgctgggattacagttatgagccaccatgcctggccttgtttactgtatcttaaagcctcctctacactttgcattttatgtctgaatttttgcacatgaatattggccatgcggggtggtctttcctgaaggcagattggatctatctgaaaagaatgctaatttctcctgttagtctccaagggaagagatgattcctaaggcagaaaaaggaagcagtaattcagaaagtgaatcttaggcacaagtctgtccttagaactcatctgtccaccacatgggagccagtccagggctagggagatagggagtctgcaatccccagggatcaagtttttttttgttttttaaagaaaattgttcatattcatgtggttctctctattccccttttgtttatcatctaggatttatcaccttttcactagttgttccaacttctttctcatctctgggctcaaggctattccgtttcttcaagaagcctttattgagcaccatttctggggtgggaactgtgttaagcaaccagagtacaaagatgaataagacacagtcccaccttcagggtattccccggaggaaagaaaaatataaaataaatgtctaggataatgcagtagatgatattgcaacatgtggaaagtaaaaagaaaaggaaagaaaggaaaggtggtaataaagcatgctagacataggraatattgatcagagtcacagaggtaggaactgatcatggtaggacataacaagccctgttacacctgcttcattcatttaatctttacccctgtgaggcaggggactattaatgtgcccattcaacaaatgagtatactgagagtcagagaagctgaataacaagctgacattcatgcatctgttaagcagcagagccaggactcggggccttcagcctggctcatgacttcatgtcttactgccttgccatgctgggatattctcattggccaggcctgggtcatgggcccaccccagaagtggattgagggctagtaggtttcccacagaaaaatcctactgttaaaatcattaaaagaaaaactgaatgttgggcgaacaataacagtagttgtccattgcagaatcacttcaaaaatacagcttttcctttctcttgcattatttgcttgagataaattttcacagatg

SEQ ID NO: 26054 - DNA, 1195 bp, Homo sapiens
tcctgccttggcctcccaaagtgctgggattacagttatgagccaccatgcctggccttgtttactgtatcttaaagcctcctctacactttgcattttatgtctgaatttttgcacatgaatattggccatgcggggtggtctttcctgaaggcagattggatctatctgaaaagaatgctaatttctcctgttagtctccaagggaagagatgattcctaaggcagaaaaaggaagcagtaattcagaaagtgaatcttaggcacaagtctgtccttagaactcatctgtccaccacatgggagccagtccagggctagggagatagggagtctgcaatccccagggatcaagtttttttttgttttttaaagaaaattgttcatattcatgtggttctctctattccccttttgtttatcatctaggatttatcaccttttcactagttgttccaacttctttctcatctctgggctcaaggctattccgtttcttcaagaagcctttattgagcaccatttctggggtgggaactgtgttaagcaaccagagtacaaagatgaataagacacagtcccaccttcagggtattccccggaggaaagaaaaatataaaataaatgtctaggataatgcagtagatgatattgcaacatgtggaaagtaaaaagaaaaggaaagaaaggaaaggtggtaataaagcatgctagacataggaaatattgatcagagtcacagaggtaggaactgatcatggtaggacataacaagcmctgttacacctgcttcattcatttaatctttacccctgtgaggcaggggactattaatgtgcccattcaacaaatgagtatactgagagtcagagaagctgaataacaagctgacattcatgcatctgttaagcagcagagccaggactcggggccttcagcctggctcatgacttcatgtcttactgccttgccatgctgggatattctcattggccaggcctgggtcatgggcccaccccagaagtggattgagggctagtaggtttcccacagaaaaatcctactgttaaaatcattaaaagaaaaactgaatgttgggcgaacaataacagtagttgtccattgcagaatcacttcaaaaatacagcttttcctttctcttgcattatttgcttgagataaattttcacagatg

SEQ ID NO: 26055 - DNA, 1195 bp, Homo sapiens
tcctgccttggcctcccaaagtgctgggattacagttatgagccaccatgcctggccttgtttactgtatcttaaagcctcctctacactttgcattttatgtctgaatttttgcacatgaatattggccatgcggggtggtctttcctgaaggcagattggatctatctgaaaagaatgctaatttctcctgttagtctccaagggaagagatgattcctaaggcagaaaaaggaagcagtaattcagaaagtgaatcttaggcacaagtctgtccttagaactcatctgtccaccacatgggagccagtccagggctagggagatagggagtctgcaatccccagggatcaagtttttttttgttttttaaagaaaattgttcatattcatgtggttctctctattccccttttgtttatcatctaggatttatcaccttttcactagttgttccaacttctttctcatctctgggctcaaggctattccgtttcttcaagaagcctttattgagcaccatttctggggtgggaactgtgttaagcaaccagagtacaaagatgaataagacacagtcccaccttcagggtattccccggaggaaagaaaaatataaaataaatgtctaggataatgcagtagatgatattgcaacatgtggaaagtaaaaagaaaaggaaagaaaggaaaggtggtaataaagcatgctagacataggaaatattgatcagagtcacagaggtaggaactgatcatggtaggacataacaagccctgttacacctgcttcattcatttaatctttacccctgtgaggcaggggactattaatgtgcccattcaacaaatgagtatactgagagtcagagaagctgaataacaagctgacattcatgcatctgttaagcagcagagccaggactcggggccttcagcctggctcatgacttcatgtcttactgccttgccatgctgggatattctcattggccaggcctgggtcatgggcccaccccagaagtggattgagggctagtaggtttcccacagaaaaatcctactgttaaaatcattaaaagaaaaactgaatgttgggcgaacaataacartagttgtccattgcagaatcacttcaaaaatacagcttttcctttctcttgcattatttgcttgagataaattttcacagatg

SEQ ID NO: 26056 - DNA, 847 bp, Homo sapiens
aggtgtgagccaccatgcctggtcgagtattaccatttttaataatggtaatgggtaatataaaataatgttattttaggaaacaattctaaagcttcattttcaggagactgagattttagaagctacttctttaattcttatgacatagagtcggattagacacaaaataaatgttatgaaaatgctactactgttctttgaaggctgtttatagtttgtagatgctgagaatatggtgaaatggtaaactatgcatagccttaacttacggagtgctagagttttgggctgaggagctggtcaccattgggcatctgacaactgattgtttgggcttctgggactgtttctggaggggcctggatctcagcacactgtgtcaggtaggagaggaaaaaaacgttatctgtttgctcctaagctcattggttgaagattcgccccacaagcttcaatttctctgcacttacttttttctctgacttattgtgggtttctcaagcataggggccaggggtcctgtgaggtgggtgccatttgggatgccacatggagctggcagtgtccacagacagctggtttctgcagtggcagcagggtggagtaagcgtccaacggtgtccaaagatttggagtggtacttaagaggtgtttacacgagcaacaaggtaagtagagataactgggccttcaatacagaggttgatggaaacacatctgcaagtgtacctgattcaaatcatcacacagtaacccctccaggggaatgtcaaattctgtactgtttttaatgctcagctgacacattgctctagtccagtggttctagaamtttttgagctta

SEQ ID NO: 26057 - DNA, 567 bp, Homo sapiens
aaaaagtaatgagttacattttcactatttccactttattaaaaatatataactttcaaataatttatcctggccttgaaaaaaatttgtaaaatcattaggtcaccataattccacaaactatcaagtattaataccaataaacagcatttgcttcctgttttcctagaattataacccattatgcyagaggagaaagtttctctaggtcatctagtttagctcttattttatgtatgaagacactgaggcttacaatcgttaaatagcttgtccaaattcccagccaattaatggtagaattatttcaacattccagttacttattcattcttttttgttttctgggtatttacggcataccaggcactttgacaggcactactttgactcatacgaaaggcaaactgtagacaatctaattaaaccataaacagaatctcaaaataaagaatacagtgctactgaatgtaaagttatagataaattataagtagaatatttttactttactcaaagaattgaagacataagatattactatgccaacaaaagattttagcaaag

SEQ ID NO: 26058 - DNA, 771 bp, Homo sapiens
ggatccaagggtcaagtgtcttcaaaagccaacagctttgaatttgctcttaacccctcttggacataggcttctgcgscataaaggcagtaaagtcactggcccagtgctcagtaccagttgatattcattaaatgtcaatttccttcatctcttcagtttttaatctctaactaaatagagagatgctgctcagacgctctacattgtggaggcataatcaaatataaaccacttgatcaaaagtaaaaacagaagaaggaagcctacatgaaaagaaagcacagaaatctttcttggccacaagtacatagaaacaccatttgctcttgcctgattctgctgttgtccttagtgtatggttactgttagaccttgatactggtgttttcttttgttttgttttgtgttgttttgttttgttttgttcgagacagggtcttgcctgtcactcaggctagagtgcagtggcacaatctcagctcactgcagcctcgacatgccaggcttcaagcgctcctcctgcctcagcctcctgagtagctgagattacaggcacacactaccatgcccagctagtttttttattttttgtagagatggggtcccactgtgttgcccaggctgttctcaaacttctgggctcaagcaatcctcccacctcagcctcccaacgtgctgggattacaggcgtgagccactatgcctgttccttgaaattgttttgatctcttcagaaatcattttaaggaagcaaaggccagctcacaa

SEQ ID NO: 26059 - DNA, 771 bp, Homo sapiens
ggatccaagggtcaagtgtcttcaaaagccaacagctttgaatttgctcttaacccctcttggacataggcttctgcgccataaaggcagtaaagtcactggcccagtgctcagtaccagttgatattcattaaatgtcaatttccttcatctcttcagtttttaatctctaactaaatagagagatgctgctcagacgctctacattgtggaggcataatcaaatataaaccacttgatcaaaagtaaaaacagaaraaggaagcctacatgaaaagaaagcacagaaatctttcttggccacaagtacatagaaacaccatttgctcttgcctgattctgctgttgtccttagtgtatggttactgttagaccttgatactggtgttttcttttgttttgttttgtgttgttttgttttgttttgttcgagacagggtcttgcctgtcactcaggctagagtgcagtggcacaatctcagctcactgcagcctcgacatgccaggcttcaagcgctcctcctgcctcagcctcctgagtagctgagattacaggcacacactaccatgcccagctagtttttttattttttgtagagatggggtcccactgtgttgcccaggctgttctcaaacttctgggctcaagcaatcctcccacctcagcctcccaacgtgctgggattacaggcgtgagccactatgcctgttccttgaaattgttttgatctcttcagaaatcattttaaggaagcaaaggccagctcacaa

SEQ ID NO: 26060 - DNA, 771 bp, Homo sapiens
ggatccaagggtcaagtgtcttcaaaagccaacagctttgaatttgctcttaacccctcttggacataggcttctgcgccataaaggcagtaaagtcactggcccagtgctcagtaccagttgatattcattaaatgtcaatttccttcatctcttcagtttttaatctctaactaaatagagagatgctgctcagacgctctacattgtggaggcataatcaaatataaaccacttgatcaaaagtaaaaacagaagaaggaagcctacatgaaaagaaagcacagaaatctttcttggccacaagtacatagaaacaccatytgctcttgcctgattctgctgttgtccttagtgtatggttactgttagaccttgatactggtgttttcttttgttttgttttgtgttgttttgttttgttttgttcgagacagggtcttgcctgtcactcaggctagagtgcagtggcacaatctcagctcactgcagcctcgacatgccaggcttcaagcgctcctcctgcctcagcctcctgagtagctgagattacaggcacacactaccatgcccagctagtttttttattttttgtagagatggggtcccactgtgttgcccaggctgttctcaaacttctgggctcaagcaatcctcccacctcagcctcccaacgtgctgggattacaggcgtgagccactatgcctgttccttgaaattgttttgatctcttcagaaatcattttaaggaagcaaaggccagctcacaa

SEQ ID NO: 26061 - DNA, 812 bp, Homo sapiens
  misc_feature (1)...(812): n = A,T,C or G
gaaagaatcttttaaaatttgattctgggtcatatatcactagaaaaaataattttgatgatttttcaatttttccaaaagcaatactgataaagaccccacattatcccccnnnnnnnnnnnnnnnnnnnnnnnnnnnnnnnnnnnnnnnnnnnnnnnnnnnnnnnnnnnnnnnnnnnnnnnnnnnnnnnnnnnnnnnnnnnnnnnnnnnngttttcctatatgtaaaactaattctacactttgtaaaatacattaaattcagacaatagagaagtgcaaaagaaaaaacagggaaatgggatcatgttatacatctagtttgccaatttgttttctcgattaaaccatttatcttgggtatctcttcatgcccctccttcccatggcaaacaccctcaatgcatttaaagtcctgagatttggttaaaaggtgaaagtggacgagtgatgtttacgccaacattccttcagcgctgacagctaattccagaccaggtttcatgagtgtgggcagaaacatgcaggtccaaggaactcatctgggcagagatgtgcccagggaggtgtgagttttccaagctttattcagagctggttccctacaagggcgtctttgtggcaggaacctgcacgtgaatactgccagagaggagaatgcgaattacttgagtatgacggtagctgtctgcatggagagaaatcacttatcatggagcttctggatgtgtcaactcaaagctcagagcaattaaacaaggaagtgggactgagtytcagacacgggcgggtacaccagggtgaggatccct

SEQ ID NO: 26062 - DNA, 979 bp, Homo sapiens
agccgcaacagtgacagaggagggaatgagaggtttcctgtctgaggcagacctttgctttcctttcaagaccccttatctctggcaagttgtgtctgcctccattcacctaacagcttgcctggctctggtttttagcttctgaattgactccagcaccagacagcatccttgcctgccctgcctttgacccacaacatcttttgatttcctaagcacrcaacctgtgtccccaacttcagccactttactgtgtctcccaccagggaacagggaggtattgtacacacaggttgtaaataaccgtgaggtcaaaaacaagtattgaaatttgagtagaacagacatggaaaatggaattagctagatggatggagttaataagtgaatatttatctggatgaggtggaagaacaaatttgtgtcggatggagaatgagagaaggagccagctaaaaggttatatttgggaacgtgaagtaccaaattcaagatctcgaaggccagcgctaagaaggagaagcagggaggaaataaacacgcatttattgaatgccttctgtgttccaggagctccgcagatatgatctcatttaattctcttgactgtcccacattttacagatgaggactctcaagctcatgggactaaatatcttgccaaagacacagagctgataagtggagaggctgggattaggggtaatcatagagaggtgaatggtgggttgaaggtgagactggagagacagaagcttcatgtaacttgtcagctccaagtgagtttggggaagtgggaaataggtgctgattagaggaagtaacaccttcatctacttggttactcatgccagaaaaagcgtatcccttctatcagcaagtcttgtcaattctatttcccccccaaaaaaaaaaaaaaaaaaaccgtatttaatctccatcctcttcctctccattgcgatcaccttagcccaagctg

SEQ ID NO: 26063 - DNA, 979 bp, Homo sapiens
agccgcaacagtgacagaggagggaatgagaggtttcctgtctgaggcagacctttgctttcctttcaagaccccttatctctggcaagttgtgtctgcctccattcacctaacagcttgcctggctctggtttttagcttctgaattgactccagcaccagacagcatccttgcctgccctgcctttgacccacaacatcttttgatttcctaagcacgcaacctgtgtccccaacttcagccactttactgtgtctcccaccagggaacagggaggtattgtacacacaggttgtaaataaccgtgaggtcaaaaacaagtattgaaatttgagtagaacagacatggaaaatggaattagctagatggatggagttaataagtgaatatttatctggatgaggtggaagaacaaatttgtgtcggatggagaatgagagaaggagccagctaaaaggttatatttgggaacgtgargtaccaaattcaagatctcgaaggccagcgctaagaaggagaagcagggaggaaataaacacgcatttattgaatgccttctgtgttccaggagctccgcagatatgatctcatttaattctcttgactgtcccacattttacagatgaggactctcaagctcatgggactaaatatcttgccaaagacacagagctgataagtggagaggctgggattaggggtaatcatagagaggtgaatggtgggttgaaggtgagactggagagacagaagcttcatgtaacttgtcagctccaagtgagtttggggaagtgggaaataggtgctgattagaggaagtaacaccttcatctacttggttactcatgccagaaaaagcgtatcccttctatcagcaagtcttgtcaattctatttcccccccaaaaaaaaaaaaaaaaaaaccgtatttaatctccatcctcttcctctccattgcgatcaccttagcccaagctg

SEQ ID NO: 26064 - DNA, 979 bp, Homo sapiens
agccgcaacagtgacagaggagggaatgagaggtttcctgtctgaggcagacctttgctttcctttcaagaccccttatctctggcaagttgtgtctgcctccattcacctaacagcttgcctggctctggtttttagcttctgaattgactccagcaccagacagcatccttgcctgccctgcctttgacccacaacatcttttgatttcctaagcacgcaacctgtgtccccaacttcagccactttactgtgtctcccaccagggaacagggaggtattgtacacacaggttgtaaataaccgtgaggtcaaaaacaagtattgaaatttgagtagaacagacatggaaaatggaattagctagatggatggagttaataagtgaatatttatctggatgaggtggaagaacaaatttgtgtcggatggagaatgagagaaggagccagctaaaaggttatatttgggaacgtgaagtaccaaattcaagatctcgaaggccagcgctaagaaggrgaagcagggaggaaataaacacgcatttattgaatgccttctgtgttccaggagctccgcagatatgatctcatttaattctcttgactgtcccacattttacagatgaggactctcaagctcatgggactaaatatcttgccaaagacacagagctgataagtggagaggctgggattaggggtaatcatagagaggtgaatggtgggttgaaggtgagactggagagacagaagcttcatgtaacttgtcagctccaagtgagtttggggaagtgggaaataggtgctgattagaggaagtaacaccttcatctacttggttactcatgccagaaaaagcgtatcccttctatcagcaagtcttgtcaattctatttcccccccaaaaaaaaaaaaaaaaaaaccgtatttaatctccatcctcttcctctccattgcgatcaccttagcccaagctg

SEQ ID NO: 26065 - DNA, 979 bp, Homo sapiens
agccgcaacagtgacagaggagggaatgagaggtttcctgtctgaggcagacctttgctttcctttcaagaccccttatctctggcaagttgtgtctgcctccattcacctaacagcttgcctggctctggtttttagcttctgaattgactccagcaccagacagcatccttgcctgccctgcctttgacccacaacatcttttgatttcctaagcacgcaacctgtgtccccaacttcagccactttactgtgtctcccaccagggaacagggaggtattgtacacacaggttgtaaataaccgtgaggtcaaaaacaagtattgaaatttgagtagaacagacatggaaaatggaattagctagatggatggagttaataagtgaatatttatctggatgaggtggaagaacaaatttgtgtcggatggagaatgagagaaggagccagctaaaaggttatatttgggaacgtgaagtaccaaattcaagatctcgaaggccagcgctaagaaggagamgcagggaggaaataaacacgcatttattgaatgccttctgtgttccaggagctccgcagatatgatctcatttaattctcttgactgtcccacattttacagatgaggactctcaagctcatgggactaaatatcttgccaaagacacagagctgataagtggagaggctgggattaggggtaatcatagagaggtgaatggtgggttgaaggtgagactggagagacagaagcttcatgtaacttgtcagctccaagtgagtttggggaagtgggaaataggtgctgattagaggaagtaacaccttcatctacttggttactcatgccagaaaaagcgtatcccttctatcagcaagtcttgtcaattctatttcccccccaaaaaaaaaaaaaaaaaaaccgtatttaatctccatcctcttcctctccattgcgatcaccttagcccaagctg

SEQ ID NO: 26066 - DNA, 979 bp, Homo sapiens
agccgcaacagtgacagaggagggaatgagaggtttcctgtctgaggcagacctttgctttcctttcaagaccccttatctctggcaagttgtgtctgcctccattcacctaacagcttgcctggctctggtttttagcttctgaattgactccagcaccagacagcatccttgcctgccctgcctttgacccacaacatcttttgatttcctaagcacgcaacctgtgtccccaacttcagccactttactgtgtctcccaccagggaacagggaggtattgtacacacaggttgtaaataaccgtgaggtcaaaaacaagtattgaaatttgagtagaacagacatggaaaatggaattagctagatggatggagttaataagtgaatatttatctggatgaggtggaagaacaaatttgtgtcggatggagaatgagagaaggagccagctaaaaggttatatttgggaacgtgaagtaccaaattcaagatctcgaaggccagcgctaagaaggagaagcagggaggaaataaacacgcatttattgaatgccttctgtgttccaggagctccgcagatatgatctcatttaattctcttgactgtcccacattttacagatgaggactctcaagctcatgggactaaatatcttgccaaagacacagagctgataagtggagaggctgggattaggggtaatcatagagaggtgaatggtgggttgaaggtgagactggagagacagaagcttcatgtaacttgtcagctccaagtgagtttggggaagtgggaaataggtgctgattagaggaagtaacaccttcatctacttggttactcatgccagaaaaagygtatcccttctatcagcaagtcttgtcaattctatttcccccccaaaaaaaaaaaaaaaaaaaccgtatttaatctccatcctcttcctctccattgcgatcaccttagcccaagctg

SEQ ID NO: 26067 - DNA, 559 bp, Homo sapiens
acctttgactagtccaggccaagaagatattctaagatttcctctttaagttttatcattttatctgcacatttaattctaagatgttcctaaaatgggtttattaaatgatgtgaaggttcaagatgcattttttctatatgaatattcaattgaccaatttattgaaagaaccacttttcacagtaaatggcttggtaaaaaaaaaaagtaaataattgtaattttcattaaaactattatcctatattactagtccccaaaattcaaaagaacaaggagaaaatgattttagaattattatataatgaatatacattgagaaacaaaaaatatagccatcaccaaaataagtattgtaggaaattaaaatttttgtcaaacaaggaaaaacattatgtttgacctaagtggcaaatagascagagtttaaatgttaatttattaaaaaacacctttaagcaaaacagtgtatagcaggtcctcaaataacatcatttcattataataacgagaaaaaaaatttggtttcattatatgtcacttcacttataatcag

SEQ ID NO: 26068 - DNA, 800 bp, Homo sapiens
ttgagcccaggagtttgaggtgatcttgagcaacataagaagaccccatctcataaataagtaaataaatatttttttttaaaggaagtgacattggatctgtgtcttgaaagatcagtagaaattcacaatcttggggacactgcctaactcttgcaagcctgagttgccttagtttaaaggattgttgtaaagattagggagaaagttatgtgcagtgcttataattggcattcaacaaactataatcagcaaaactattgttggaaatagagtgtgtatcagtcaggattcccatcttcctgctcctgtagcttctctcatgatcaggaaggaagacagaaaaccacataagcagcacttaactccaggcctttgggaaacaccattattttcttcaatcctaaacagaaggatctaactttctattttyttcaggtgaataatttgctcctagcaccactccaccctttccaacctgcctagtgtctcagatcgtcagtgaaggggaccctgtagacataaactggccctgattgccttggagatagcagcagggggggacaactgccggataacgtcggagggaagacgctccagagacgtacttttttattcctcttccgaggtagaggattccaatgcagaagttcctcggtgatgaccttccatgttccacagtgaccaaataaaacatactgagggcgatcattcaagtagcctgaggactatcaagatactcagtccagttctgcctccctttcctggtgtgaaaagctgagagaacagagaggcccagc

SEQ ID NO: 26069 - DNA, 607 bp, Homo sapiens
tggtcatacaccgacctggagtcaaaatggcargtttagccccaactgtgcctacgccaggtgtctgagtagcttctctttgcatctcagtgttcttctctgagaggtgaaggccgtagcccctggcctgctgccctctgggaatctgggaacatactccatagtgaatttgtaaattccatttatttatttatttataaattaaaaaaatttttttgagacaaggtctccctctgtcacccaggctggagtgcaatggcgcaatctcagctcactgcaacctccaccttccgggttcaagtgattctcctgcctcagcctcctgagtagctgggaatattggcatgtaccaccatgcccggctaatttttgtatttttagtagagacggggtttcaccatattggccagactggtcttgaactcctgacctcaaatgatccgcccgccttggcctcctaaagtgctgggattaggggcacgagccactgtgcccagcctggaagttccatttaaatggcaacttgcagtcagaatttaaggggcagttgacagggagacccacccggagctgtgtcctcaagccacattctcttgtcctgcccatc

SEQ ID NO: 26070 - DNA, 568 bp, Homo sapiens
agtgcaggttctgagggctccttggcttgtggggtcttctctgtctgtctctctccctctcttcttccttgctctcatccctttcttttccagttacccctgaagacccacctcggccctcttggggcccctggggactagagtgaccactgacccctcattctacagctttaagggaaatgctcacagggtatttttgtctacctcaaatatatagtttttagagcaaaggagaataatttatatagctaagatatatgagaaagtatttatattatttatatagttgctatatttcacagacagcacaggtggggtttgtgtattttcccggaaaccctctgtctggggagatacagcctgacctgaccgggtcccccactgagcaggaggccgggtcgctgggaaggaggacaaacctgtattccatgactgggtctgtctcggagctggtaagcacatgtccsctctgtgatgagccctggtgggctccatccagaccctccttgtgatgtttttgtagattttctgcccttctgggtccaggcccccttcttctgctctggca

SEQ ID NO: 26071 - DNA, 515 bp, Homo sapiens
ttacaagaaagctacatgaaaaggaagcatacagaatgacatctatcagttttgtattgatatttctaaccctgctggcatctgtggcattatggtagttcctacagtgtactgagagaggaragtttgtatcaggtatgattcacagatgcatggatgtcatttttttgtgttagcaaaatcatgaactgattctgcactacggcttaactcatgagtggctctaaataataaaagggaaataactcttcctgagaaatgttccaagctgtgaacatgattaccgacactgttatcaagagacatgatctgagataagaatataactggtattgtgacctatgaagaactattttgttgtgactttaaaagagtaagatttgaaaaacgagggacactgatgtcagagaaagaggtgtgtggataaacatacgggagtgtacagggaatggaaaggtcacatcaatgcccagtctcctaggaggcattcagttaccagattttctaggtgagtc

SEQ ID NO: 26072 - DNA, 1476 bp, Homo sapiens
tgaaattttagatttttttaaatctactatttaaggcaatggacccttattccaaagatctgctaacaataactgttttactaataggtgttttgtgaaagacagaaatcttaacacagctgcttaaaattcagtagagacccccagtagatccatgtacgaagtgtctctggtgctcatgcagtgtacacgcttcatcctgctcatttctgttggcagttcatacagcattaacacacgggtgaccagttactgcctcaaatcaatgcttaggtgtatgtatgtaaattaaccttgctttacagctatgtataagagcttcaagtgggcatatgcaaaaaactaaaagcaacgtacttatatttttttaagtaaatattgcacatattaaccttaaaataatccgtagaggatcctcaaaacagtggccttagcctttctcactaaagcagcacttagattaagcacagcaaaacaaaaatgtctttcacgttaatgaaatatgcctaaatattgcattgttaatatgaaaaaactgaaactttcccacaggaaagccttaaattcagtggcactcaaatgcttattattctgatctgatattaactaaaacagaataacttgctttaaattcaacatggtattatatataattataccccaactggcactttcaagttttcaataagggaattagaataataaaattagcaaataacttgaagagcagcactttactctgaaattatgcaatattttcatatcattagctctaatctccaaaacctccctgaaaatgtaatatcagagttacaatagggtcatttattttcagacataagaattcttacctttctattcgaatttcaagtgcagttccagttttggaattttctggcacatgttcaattctcaaaacagtatctataaaagtgacttttactcttcttagtactaaagtaaacaagtaattgtcaacgtaagagaccacatatatgctaaataaaaacctccaaagaaataaataagtactagtttgataagaacttttgtttacaaaataaagaagctgaatttctttccattaaaatccttaaatcctgagttttgtaataaatattttgtcttactgagcacttaaccatgttacatctcaacagatgcttgggacaacgactaacactatctgttrtattctaatccattcactatgcaagcataataaatggagaaactaaggtacaaaaaaaaaaacaacatgcaattaaatggaatatttaaaatacctcaattctaaagttctgaagtgggaacagtaattcttttaaaaatccattccaatggatttgccttatacaaagcttattacatgaaggtacaaaactactaaatcaaatctaaatttttgaaaattctcagtaacaccaaacctgtttcaatggtttcagcaaacttttcaagtccttcaaaaggctg

SEQ ID NO: 26073 - DNA, 545 bp, Homo sapiens
taaggaaattcatcagcttatgtagctagtggcccagaagtggaaccggcttcagagctgatccacaggctccagctcctcttcctgccccttcctgggctctgccctccttgagggatgactttatcttcaggctggcagtaaggctgcaacagtccagggccttagttcatacacagtgacgctctggcaaagcaaacttccagaaggtctcagagaaaggacgatggacattgccagcagtccytggcaagcatctctttgagtctcactgtcgtgaatggaatcattgtccctttcctgagccagtcacttacccttagatcaattaggctcatcctttaagccagaagagggagttaatttcccgcaggctgaggagtatctgaagcaaaattggggttctgttggagaaaaggaagaggaaatgtaagtttgtagacaacgaatagtgtcttttatcccgttcattatgcactcgccttccatcaaagctgaaaacctcagagagctgtgggctcttcccttgcccttgactcctgaat

SEQ ID NO: 26074 - DNA, 1002 bp, Homo sapiens
gtgtggccaggaacaggggagggaactgaagagagagcagcctctcctccaaaaccccctccctggccagtgtagaccatactcacacagaagagcaacctgaggtcgggacgggcatgtttctgtcaccactaagtccctagtgtccatcatttgttaattcactcactcactctttcatccattstttcaacaaatatttatgaaacacctactgagtgttccagccactgggaatacaacagtgaaaaagacaggactcctgccctctcagagcttaccttctaacaaggagcggcaggtcatgaatacagtaagcaaatcatgacagagtgaagagaataataatggagtcaagacagtatctggggcaatctggaaaggcctagctgaggcggtggccctgagctgagctaaggcatagagggaaccgccggaagaactatgagaacacattccaggcaggggagcaagcgcaggacctaaagtgggagagcccagaagcgacctgctgcagcccgcttaccccagctagtgaactcccatttcatctccacgtagaagtcctgggcctggaggacgaaggggagagaggctaagtctgcactggagaagggctcaagggctcccgtggaggctgagaggctgggcctcaccttgcgcagcttctccaggagcacggggatgcccgccagccgcttcaccacccgctggtagtcccggtaccgaagcaccagctgcaccagctccaggtcccgggtactcacagcctcctggagcactgggggagggcgaggcaaggtcacagggcaggacccttcagccaaccataggtctatgatgctggggaggccccggctgtggggctggggtgagcagggctgcccacctgtccagccgctgcgattctccctgcccacgtctgcgccgtgcgccaggagcacacgggcacactcaaggtgccccagcgtggtggccaggtgcaggggagtccggccgcgg

SEQ ID NO: 26075 - DNA, 612 bp, Homo sapiens
ccagaattgcaagaaagtgcatttctgtttttaagctgcttagtctgtggtgttttgttacacagccacagcaaactgatacagctggacccaaggagatttgtcttgggcatcagcacattaggggttacgaggcactcttctcagcctagaggccttgaagaaggcagcaaggagtgcagagcactctaggaaccgaaaatcagtgccaaccctcctactccccaacccagccaaactgctcagagtcacttatgcaataactggagtcagccagcgccacaacttttcactaaactaagtcagatagatgattacaagaaatgctctgcatttaaatatcccccaacactgtgcacagccccayaaccacgaacaattctgggagtctttgctaagcaatagatataaaaaaaaatctgcagggttatttctacttatttatttccactatataaccagagatgccctttattctactctggaaaatcctcccaagtcattattttccactgaggaaggggttaatgtgctggtcattcctcctccttctgagtgtaacacagtaccagatactccctgagaattcacatggtatactctggctttcaa

SEQ ID NO: 26076 - DNA, 612 bp, Homo sapiens
ccagaattgcaagaaagtgcatttctgtttttaagctgcttagtctgtggtgttttgttacacagccacagcaaactgatacagctggacccaaggagatttgtcttgggcatcagcacattaggggttacgaggcactcttctcagcctagaggccttgaagaaggcagcaaggagtgcagagcactctaggaaccgaaaatcagtgccaaccctcctactccccaacccagccaaactgctcagagtcacttatgcaataactggagtcagccagcgccacaacttttcactaaactaagtcagatagatgattacaagaaatgctctgcatttaaatatcccccaacactgtgcacagccccataaccacgaacaattctgggagtctttgctaagcratagatataaaaaaaaatctgcagggttatttctacttatttatttccactatataaccagagatgccctttattctactctggaaaatcctcccaagtcattattttccactgaggaaggggttaatgtgctggtcattcctcctccttctgagtgtaacacagtaccagatactccctgagaattcacatggtatactctggctttcaa

SEQ ID NO: 26077 - DNA, 612 bp, Homo sapiens
ccagaattgcaagaaagtgcatttctgtttttaagctgcttagtctgtggtgttttgttacacagccacagcaaactgatacagctggacccaaggagatttgtcttgggcatcagcacattaggggttacgaggcactcttctcagcctagaggccttgaagaaggcagcaaggagtgcagagcactctaggaaccgaaaatcagtgccaaccctcctactccccaacccagccaaactgctcagagtcacttatgcaataactggagtcagccagcgccacaacttttcactaaactaagtcagatagatgattacaagaaatgctctgcatttaaatatcccccaacactgtgcacagccccataaccacgaacaattctgggagtctttgctaagcaatagatataaamaaaaatctgcagggttatttctacttatttatttccactatataaccagagatgccctttattctactctggaaaatcctcccaagtcattattttccactgaggaaggggttaatgtgctggtcattcctcctccttctgagtgtaacacagtaccagatactccctgagaattcacatggtatactctggctttcaa

SEQ ID NO: 26078 - DNA, 612 bp, Homo sapiens
ccagaattgcaagaaagtgcatttctgtttttaagctgcttagtctgtggtgttttgttacacagccacagcaaactgatacagctggacccaaggagatttgtcttgggcatcagcacattaggggttacgaggcactcttctcagcctagaggccttgaagaaggcagcaaggagtgcagagcactctaggaaccgaaaatcagtgccaaccctcctactccccaacccagccaaactgctcagagtcacttatgcaataactggagtcagccagcgccacaacttttcactaaactaagtcagatagatgattacaagaaatgctctgcatttaaatatcccccaacactgtgcacagccccataaccacgaacaattctgggagtctttgctaagcaatagatataaaaaaaaatctgcagggttatttctacttatttatttccactatataaccagagatgccctttwttctactctggaaaatcctcccaagtcattattttccactgaggaaggggttaatgtgctggtcattcctcctccttctgagtgtaacacagtaccagatactccctgagaattcacatggtatactctggctttcaa

SEQ ID NO: 26079 - DNA, 478 bp, Homo sapiens
tcacaccactgcactccagcctgggcaacaagagtgaaactccgtctcaaaaaagatatctccagattttcataaaatcaatattcgtatgcaaaagtttaacaatgtctccctttttgcattatttgaactaaatgcagttggccttctacctgttctcctggcagaaggcgaaggtggaatgtcccagctgcctactaggcaatagtgcctatggcgaaaacagctcctggctggcagggggaagctgatttgggaggcgccatcactaagtaatggaagagagctatgctatgggtgtggtgattcctgctaggggcaccctggggctcctggagagactggtttctgcagggaatgagcttccaggccaggcggcctccacacgtggagatgtgagtgsgctctgtcctccctcgcagccggctgtgtggactctgtaagggctcctgaggaagaggaatccgggggaccggtt

SEQ ID NO: 26080 - DNA, 1520 bp, Homo sapiens
gggacattttaccaagtgtgttatatgtcatagccaacatgtaattaaaaaaaaaaaacgtagagatttgtgaatcagagtcctctgttcaaataccagcccttccacttagccacacaatctttggtaggttacttcatcttcttgagactgggtttcttcatctgtatatgcatatgaagcacctgagtgctttttaaatgtttagtaattgtgttctataagtgtacatgtaagttatgaaacttagttttgaaatctaaaacttaacaactcagatgcgaaatctttccaatgtttaacttttgaactgtctctttcatctgatttgtagatcctgtgttgccataagcccttggcccacatttaagtgggaatgcagctagcttggatgtctgaaactttgtaggcgcctctgtctgaatcctgaacacaggcaccaggactactgagagctcgtcatctgtgcaggatagccacacagcaaacatgtttgcaaaactgaagaagaaaattgcagaagagactgctgttgctcagaggccaggaggtgctactaggatcccacggtctgtgagcaaggaatcagttgcctcaatgggagctgactcaggagatgactttgtaagtacctttacttaagaaataaagatacttttgcagggtattcttccaataaatattttaaattgcttgattatttcatacctttcatggtttatagctgtacaagagcctgtacatctgattcttcttactctgaggtacctttttgttaatgtttggtttgtaaatgttaaggtactctatatttttttscttatttttctgtgagttcctctccatattctctccagtgtcctcttgtactgtttttccgtctatataccttatacatcttcttttgcatttcatttctgaaaatgtctgggcctgttttcattgcagacatatatacttatataacaactaagtcattgctgcttaacaaggtctctgagttgtggtatggggttagcaagagtgcattgttgtattgggacgattgttggaaagatggccccagtgattacagtatgttgctttttttcttttttctttcttttttttttttttttgagatggattctcgctctgtagcccaaagtggagtgcagtggcctgatcttggttcaccacaacctctgcctctggggctcaagcaattctcgtgcctcagcctcccgagtagctgggactacaggtgtgttccaccatgcctggctaattttttgtattttagtagagacaggtttttaccatgttgcccagggtggtctcaaactcctgagctcaggcgatccgcccaccttggcctcccaaagtgctgggattacaggcgtgagccaccatgcccagcctacaatatgtttcttattagtaaaatacatttgtgactataagatttcaaaaaatgaagatgttgctatatgagggaaatgtcatgcttaaaaaataaagtgtggcttttgcatatgaca

SEQ ID NO: 26081 - DNA, 599 bp, Homo sapiens
actaattctgtttcccagacgttattcaaagctgctatagtactaaacccattttcaggcttttagatcttatccgcaggatataacgaagctatagcctgtgaatctaacatctgaattgcatttattattttatctgataccactttctacttttttccagctgttgtattaattattgcaatactccaaagcacttccagcttaagtattgggactgagtggtatagctactattattatgccctgtttacaggagaaaaaataaaggcacgcagagcttaattaacttgcctaaggttataaagttagtgagagagccggatttaatcttagccgtctacgtctacaatctgtgctcataacttcataactctttgctttactgtctcttcaaattattgtcatttgagaggtttaggtagtagatattgttatggattcataataggggcagtacagttagagtttatggagaagtgagtttcagctgattcttaaaatagagaataggtttgaatatgtgaaaaagagcattccaagatgtacagaataagcaaaggttcagagacaggactaaccrgagtatgttcagggaa

SEQ ID NO: 26082 - DNA, 595 bp, Homo sapiens
tgaggtcaggagtttgagaccagcctggccaacacagtgaaacctgtctctactgacaatacaaaattagccaggcatggtggtgcacgcctgtagtcccagctacttgggctgaggcaggagaatcgcctgaaccaatgagccgagattgcaccattgcactccagcctgagcaacaagagtgaaactccgttaaaaaaaaaatttttgacacagcctgggcaggtttaatcagctgtgatccagagccgccctctgttctgggagatggggaccagtctggacccctttcttgccccatcatcaggtgcacttggtcaaatccccaccataccccttcccccayaactaggcagaaggaccaaggaaggccccctgacactacatgggcctggcgtggccccctgtgtccctcagtcataccccccagcctggccaatgcccagatggcttttgggacagtgcccatcatgccccccagcagatggcacacctgcgggagggctggggatccaggcacacctgcgggagggctgggggtccaggcacacctgcgggagggctagggatccaggcacacctgcgggagggctgg

SEQ ID NO: 26083 - DNA, 595 bp, Homo sapiens
tgaggtcaggagtttgagaccagcctggccaacacagtgaaacctgtctctactgacaatacaaaattagccaggcatggtggtgcacgcctgtagtcccagctacttgggctgaggcaggagaatcgcctgaaccaatgagccgagattgcaccattgcactccagcctgagcaacaagagtgaaactccgttaaaaaaaaaatttttgacacagcctgggcaggtttaatcagctgtgatccagagccgccctctgttctgggagatggggaccagtctggacccctttcttgccccatcatcaggtgcacttggtcaaatccccaccataccccttcccccacaactaggcagaaggaccaaggaaggccccctgacactacatgggcctggygtggccccctgtgtccctcagtcataccccccagcctggccaatgcccagatggcttttgggacagtgcccatcatgccccccagcagatggcacacctgcgggagggctggggatccaggcacacctgcgggagggctgggggtccaggcacacctgcgggagggctagggatccaggcacacctgcgggagggctgg

SEQ ID NO: 26084 - DNA, 595 bp, Homo sapiens
tgaggtcaggagtttgagaccagcctggccaacacagtgaaacctgtctctactgacaatacaaaattagccaggcatggtggtgcacgcctgtagtcccagctacttgggctgaggcaggagaatcgcctgaaccaatgagccgagattgcaccattgcactccagcctgagcaacaagagtgaaactccgttaaaaaaaaaatttttgacacagcctgggcaggtttaatcagctgtgatccagagccgccctctgttctgggagatggggaccagtctggacccctttcttgccccatcatcaggtgcacttggtcaaatccccaccataccccttcccccacaactaggcagaaggaccaaggaaggccccctgacactacatgggcctggcgtggccccctgtgtccctcagtcataccccccagcctggccaatgcccagatggcttttgggacagtgcccatcatgccccccagcagatggcacacctgcgggagggctggggrtccaggcacacctgcgggagggctgggggtccaggcacacctgcgggagggctagggatccaggcacacctgcgggagggctgg

SEQ ID NO: 26085 - DNA, 1149 bp, Homo sapiens
ccagaggttacagattcaagtctcataaaaagaagttcaaacagagccattgcccatttccaaaaaggcaaaggaagtggctgtctctctgaagcaaagctttcctcctcttccaacaatgcaacccatagagcttctcagggaacacagcaaggaaaggatttctagctagaaatggtcaagacttgatttaattacaacttagaaatagcatctttcaagagaaaaagtggtaaccttctggaaagaattcatcatttagacgccattaagaacattcatgattcatgggaggtggtcaaaatatcataaatatgagtttggaagaagctgatttcaaccctcataaatgactttgagaggttcaggacttcgggggaggaatacactacagaagtggtggaaatagcaagagaaagcctgtaatcccagcacattgggaggctgaggtgggaggatcacctgaggccggaagttcgagaccagcctgaccaacatggagaaaccctgtgtctactaaaaatacaaaattagccggttgtggtggttcatgcctgtaatcccagctactcgggaggctgaggcaggagaatcgcttgaaaccgggaggtggaagttgctgtgagccaagatggcgtcattgtactcccgcctgggcaacaggagcgaaactccatctcaaaaacaaacaagcaaacaaaaccaaagaggttggagcctgaagatgggacygaattgctacaacctcatgaccaaacctgaatgtatgagaagttgcttcttatggctgagcaggatgatggagcaggatgaggaactgaagcttctctggagtggaagataaggtctttggagataaatgcaagggcaccaagagacgggtggcagtaggagtgctgagtttatgtgagacaatggtgggagaaaaggactctgaggcaggtttcctcatcctgagcgggtgggaaagcccaggaaaggatgggcctctgcccccagtaggaggtgaagagggtggtagggatgaatgggatggaaatcaaaggtccaatggaatgggagtcaaaggcttcctagagaggctgaagcataaataagcatctggaggagcaatgaagcttctgcaaggagaactccaactccatctct

SEQ ID NO: 26086 - DNA, 572 bp, Homo sapiens
ttgctggatgaaaaagagagagagaagtaaatacagaaaagtcaataaatttagtttttaatactattcattcaaaatactgattttaaaatgcacctwtggaaagaagcctacacaatcatatacattttattttaaatgcttaagaggagtttacaagttttaaggagaaatatcactatttgcattttttgtcctttccagcaatatagccagcttctcacttttgttgttaactaaaaaaaaaaaaattcaaggtgatattataatttttaaaaacacagggtattttcttttaaaatttaactaagattgaaagcaaaagtctttcttacaggataattcaccatcgatacaatttttttttatgaaatttctcaaatagaattcatattgttttgccaaagaccacttacagtcacatgaaattcaagttttagaataaattttgaaagtactatcaaatgctcagtattaactgcaaaaagaacatttgaaatttaaaatcttaacatttactggttataatacttagagctgaaattctaccctcacattcggaagagaaatac

SEQ ID NO: 26087 - DNA, 1155 bp, Homo sapiens
  misc_feature (1)...(1155): n = A,T,C or G
gctttggcctatctgcatgcaagatgggaagaaaagtgaggtgttagggagcaaatgtcaacaggtgctttctcccctcgctggaagctgctccaggaaacccccaaaggcagccatttacccttttccccccagaacttgctaaatagccttctgaggatgagaagcatcatctccaacagccagaccagagcctccaaaggttctaagcctgtgaaataaacgaagtctgctgggacacggaggaagacagacagcatctcttgcatctctgcgagctctgcaaaggacaccactctgtgctctggaactgcagcgtgcagctgcctcttcagctggggcctctgccccgctcactacagcccgaggtggggctggggaacttgaacttcttcctgactgttccaggaagcctggcattgatccttctcgctcacactgtggtccctagagtagcagcatcaactgcaccgggagcttataagaaatacagagtctagaagcaaatcacacacctatgggatcagactntggagcaaggtccccaggtgctttgtgtgccaagggaaagattcagaatcagtgacttgggtaatagatagtatagtttcacttccagttcaaatgaaccctttcctaaaatattctgtgtaacctgaaactgggtaagaagagttttatgaaaaacctcggccactggatagagatccatacacgagatctgacacccttatttaaatgtagataggatgctggggttcgcaagataagtggtacaaggcggtgagagtctcagatttgggaggggagtacacagcaacagagaagagagacaggacacagaagcactcgtagtgaaccatgccttgtgcctctgcccgtaggcaggtgggtggtgtactttgtgcacactggcaaggtcctcttcccactgcagggcaggtacggtggggtttggaacacggatcaagcctttgaaaatacacccaggaaaacctgcaacccacaaggctaggagtccagccgttcgttccacttygctgatctcttaagccagtaaagctccttatttgcacagaaacttgcaatttcactaccccccaaaccctccaccttcaagtcatttccaaggaggccctggggccccaggcagca

SEQ ID NO: 26088 - DNA, 1060 bp, Homo sapiens
ctgcagctgcctccgtagctcagctgcacgtgcaaggtggaccctttaacctccagctcaggggagacagaaataaacaagaaaagaggaaaatagagttgtgaggtgctgggaaagtggcaggatgaagggcagtacacagttaaggagacaaacagacgcttaactattaatacaactccaagccctaagtttgtgttttcttaaaagttatttagaacccgcaagcagtatttatctaagaaaaagaaagaaataagaaaaagaagaaatgtgaatttacctctggggcagactgatgctttgtttcaagaagaacaccgaaagtggtctttgattactaagtgtacagcaaacagccactgtggttccagacaccactgctctgaaggcagatgttttagcctgggaagctacaccttctgtgcggaagaaatggcagaatcagaactgtttctgaaaaaaaaaagttacttagtttataactcattatattcattaaagggctcgaaaatatttcttatcccaggtgcatgtgcagcggctgcccctgaactgcattgtttctagggtgcaggatgcgtgctcactcctttgaatgggcatctgcaggagaccagggccggggtggagaatccatgagaagggaaggaggccctgtcctctcctcagccctgcccagggcatgggtgggactggctgtgtctcaggggtggagaaggctgtgccctgagcctgctgcttcctaaggctggagtcccactgggtgcccattatgttctgagaccaatggcaggcgagcagccgcgaggctgagacrgggcgcccgtccagcacagcgagcattcctgccacctgggcagaggctggtcctgtgacaggaaatgcggacacggaggccagcccctcaggctggagccacggctgctactcggggcctcctggcagctgggctggaccccaggtcagggacaacacaaagctctcctaggaaaggcaggagggcggggccgctccttcacataagtgccacctggaggccaggtggggtcccttgcag

SEQ ID NO: 26089 - DNA, 1124 bp, Homo sapiens
ctctttagattgtgaatgatctcagctcactgcaacccctgcctcctgggctcaagcaattctcctggctcagcctcccaaataggtgggattacaggcatgcactaccacacccggctgattcttttatttttagtagagatggggtttcgccatgttggccaggctggtctygaactcttgacctcaagtgatccacccacccaccttggcctccgaaagtgctgggattacagtcgtgagccaccgagcccagcagggacgtgtgtcttattcttccagctaatagtaaggctttctggcaggatgagagtaactgggctttggattcagataggtcagtgttcagctctcagctctgccacttgctagatgtgtaactttgtgctttacctcaatgaactcagtttttttcatttatgtaatgtgaaaataacacttcttgcaagttattctgaggattatatttgagaaggaaagttgcatatttggctcaaggaaggcagttactaaataagagcttttattttgatgggtagccccagattgtagcaccatgtttaaaacattgtaagcgctcaacaattgattatcattattattatttgagacagagtctcgctctgtcacccaggctagaatgcagtggtgcgatctcggctcactgcaacctctgcctcctgggttcaagtgattctcatgcctcagcctcccaagtagctgggattacaggcgcatgccaccatgcccagctaatgtttgtatttttaatagagatgaggtttcgccatgttggttaggctggtcttgaactcctgacctcaagtgatccgcctgccttggcctcccaaagtggtgggattacaggcgtgagccactgcgcttagccgacaattgattattgaatgaaaatggcattacatgccgggcaccatatgcggcaaagagcacatgttaacacacatttactctttatgtgtatcatttcacttcattctggcaaatactctgtggaggaggctctgttattatctccagtttacacagaagaaattggaggcttaggttagtttaacaaagttttcatagctagaatgtggcagagctgagatctgaacacctta

SEQ ID NO: 26090 - DNA, 546 bp, Homo sapiens
tggggtcctcaaacatttatataaataaccaggggacttccatcatcaaatacaataacagcatctcaggcaacctaaattcacattcttggaaggattaccacagcattttaggaacttctgaccaactgtgacaattctattctttcagtcctcaaggggattctaaaaaactagtgacaaagtagggaagcagctgagctggaaaggagttctgaggacgatggaaccttgggtaaggaggaagaaggckgcccacccgcccttttctggcagccaccctccctcacactgtccgttccttgatgacacagctgatgtgattaagatcgtccccaaatcgcttcacagcagccctcagcatctctatttccgtctccgtccacttcgcgctgtcagaaggggagaggggggatagcaaaaatgggagggggggtgtggagcccgcccacaggctatgcatcccacagccaaccagccgcctccttccgatttctgggaccccttccacggatgcataaagaggtcctccgtaaggggaggcgg

SEQ ID NO: 26091 - DNA, 1647 bp, Homo sapiens
tgagacggagtttcactcttgttgcccaggctggaatgcaatgggatgatctcggcacactacaacctctgcctcctgggttcaagagattctcctgcctcagtccccgagtggctggggttacaggcacccgccaccatacccggctaattttcgtatttttagtagagatggggttttgcgacgttggccaggctgatctcaaactcctaacctcaggtgatccacctgcctaggcctcccaaattgctgggattacaggcataagccaccgcacccagccagatatttattttttttatccaaggtgttttgtgtgtgtgttactctgttttaaaaaaaattaacatggtttaaataaagatagcagtgctcatgccctgtaattattttaccaaaaaaaattaaagatagcgaatggctgggggagacacaccatgagctcagggcccagaggcacttggtgctgtggggaaggagaagccagccccggctcagcccagggatcccctgggtctcacagtctttttccaacactaatgacatgtcacgctccatacccatccagggccctcggttctgttccagctttgagaggaaagcaaggtccccagcttggaaggaaaggaatgaattttttaaaccctcaaaacaaggcagtgtggtgtgggagaaacagctccagacctagtgtggggcagacaagctactaactcgtggccctgctgctgacaagctgcatgggttggtcactcagcctctgagcctcagtttctatatctataaaatgggagaaatataagccactctgcaaagtggctgtagaataggacatgacgtacgtgctgtgtccagagcaaggtgagacacgaaatgtcctctgtcaatggggattgtgatgatcatcgatccttcctcccagccctggctccgtgctcgctccctgctcctgcccagcctgccaccaggcacaaagcccgtctcctctctccagcacagccctatcctgtgcttgcttcagctccagaaccccacagtcttccaagggagaacagaggccaggaaatgtctccaggggctgggggaagacacagcttaatcgaggccaggcagagaagaccttggcacaggtccatccccgggggcttaaaatgacgctggaggtcagggcataaaggaggagaggagcatagctctagcatgtgaactgcaccacctcacttcctttggaagctccatgtgctagagggacccctagctgcagagaggcctggcaatgttccttccaactcaaaattctgacataaaagactatcttggagaaatgatattgtcaagttcatgagcctcrctgtcccctactgagcccttctctccttcccctggaaaaagggacccaggataaggctcgtgcatcctcagcatccttccagctccctcctgcacgtgctgctggcctggctcatctccactcctactcagagccagtgaatcattcagcacagtgtcccccagcacacgctgccatgcccgttcctgcagccccagcctcaggaacgtggcgtgccccaagctggaaggacatgccatatccagaacacttctgcaacccccttggccacagcatcccagggtccagaaaaccaa

SEQ ID NO: 26092 - DNA, 620 bp, Homo sapiens
ctggacatcactggtacttacctccgtaaccctctatttcctcatcagtgaaatgggttaataaatatttycttgccactctggtctagagtaaggattcaaggagataaactatgaaaggaccttcatggttgaggtccccaaaatgatggagtccttctgccatctcatccttcatggtgttcaggaccccatagaaacttcactgctatccccacagtcacagcttggctctgtctatgggttctgctgaagggagaggacagaagcacctgtctgctttctctcacctccactaaacccccacctaggtttatctctggcctttggtgaaggaagagaaactggactttcttgctttttcttgacctctggttccttgtggctctctattcctgccccaacccatggaaatcggcctgaactgtcatagaatcgtgcattttagcaagaaacacgtgtcgaagttcatctggaccagctgccctcacatctaccttctacacattcagattacctttccacctttccaagagctcgggatgcaagtggcttctaaaaaaacctttggggtcagacaccaggatgaataaatcttttctaaatcatcttggttaaag

SEQ ID NO: 26093 - DNA, 1008 bp, Homo sapiens
cacttctttgggtgtatttccacatatttccattcccctggggaaaaacctgagtggaattgttaggtcacatgttaggcatacatttaactttataagaaaatggcagcaatttttttaaccaatagaacactttttatcattatttgccacaattcaaggatgaggaaaaaataaatttagcccaatcctacttgaattaagttagtgggtcctgaattaaaaagattaagtaattataaaatgttagtctaaaaaatatttctataaaaagtgtttctaaaaaagtatgatgtacaccaagggggggaaatttttgtgaacttggtatattttctccagaaatgaccagcacaacattgttattttattaatgggattcaattatataatgtacaactgtgaagggctccacacacatacatggggtattgtcattttactctaatggaagctgttaggggacttgcagcattgttttgcttataaaatcatgtggacccaatgtatgctgggatatcatccttctgagttcactcagccagaaagttgagcatgtatgttgccaggtaagccggcaacttggaaaattatagctccactgttcttaagggttcccctgtggttgggagccttaacattgcccccaaggggcctaacatctccaggatcagcctaatcattggctcagtaatttctttagaagctgattgacagcaggtgccaatctagataatcaccagagagctccaattaaaagctctacccatcgatcccaaccgccaggacttgggactttaatacaaatccacaagtaaaaaaagttaccccctaagaaaaaaaaaragcagcatttttgtggatgcaccatattatatggcgaggttatacattatttataattcatagatgcatttttaatttatcctcctaaatgttgcattgttagtctaataaggttggtattcagatcctttctttttcaattctccaccttggaaagggaca

SEQ ID NO: 26094 - DNA, 583 bp, Homo sapiens
cactcttgtctctgttctgactctaactctcttttccctttttcttcctgtctctcttcttccctctatcaccccaatatgaacaacaggaacaggaaacacaattttcacctaaacaatatagaatcgtatgacgtgctattctctaagctcagctggttccaattcttgacctatatttaaatatgttactcaaactgtgggttttggccttcactgatatagttgcagagggatgggaacaccagactgggaagtaggtcatggctggtgggagggcargtgccctcctgactttccagagagagagaaaaaaagtaaaggataaggattagtggtgtaacagaactgttaaaaattcaactgagattggaggtacaaatataaaacccattcctctgggcaccctttcagatattttaaacacaccctgtctatgttttgtcctgaaatacacatttaacttttgatggggtgttgttttctaattagataagataattttgtttttaatttcaaagtcattcaaattttctgaagcaaattaatactcctgtttgtctttaaataaacacatatttca

SEQ ID NO: 26095 - DNA, 575 bp, Homo sapiens
caccattgaaacgcgtagcatggcaaccatgtacggtgtgcagcagagagaatcattttggaccttcccatcatcatagaagaaaaacatcaagtgattcaggaatagaccctactggtggtgatagaaaaatcacatcctttaccttcagtgaacttcggtgttaattcttaatataactcatgttttaatttgtttctgctcaagttaattgttctgttgactgacaggcctttcccattagagccaccaccataagggaaacttcagtaaagtgggttataggactgaacctggaaactgcagtggacacctggaattcttgtgcaattcattgaagccatcgttttatgtacttagtgaaacacacttagatttgactggcctttatccattgacttgatcatttgcttcagtttgatatagtaatggttgcagagggcaacraaaggaaacagtcttgctaaattttgtaaaattgtttatgtatcttactatgattcattctgaattttaagaggcaaaggaattctccacttgtatttatctgtttgtttcttaatcatcacaccata

SEQ ID NO: 26096 - DNA, 520 bp, Homo sapiens
gtgtgcaagagtgtgcatgtgtgtgtgtgtgcacgcatgcatgtgtgtgtgtccccacaaggcttctgggtagctcctgaaatgggccaggagatgcaggagcagctgagcaccctttatccttccagccctttatcctgcctgccatgcacccgctctgcatcttgctcccctccttctccctggatctgttggctctctctcctctgggggaccagagagaccctttggtggctgccaggagaagcagcggcggccagcrgtttaggctgaaggggagagatggggcgatgtcagatccctccctgctgacattcactccccactccctgcctgcagttcccttgagactcctgggcttcatggccatgactcggcttcagtccccaggcggcgcgtcaggctgggccggatgagtcagcatggatgttacatctgctcctcctgggtacccaagggcctctgagtcacagcccctggcagccccctcagtggcctgccaaaggcaggggccattctg

SEQ ID NO: 26097 - DNA, 1086 bp, Homo sapiens
tctcaaattgctacttcctttagagctttgtgtgcagatcaaggagtctttggtgagtgctgtggggatataatacatataaaccaaacaggggcccttttctgggttatctcttggccagtaagttgatctgattgctttgaacattgcctgtcaggagtcatggaatggcttggcagcaaatcaagaaagactcagaataggtgatggtgggaggtggtggtgacaaaaaacaaacaaaaaaacactgatatagcwcttagatttaacaccttttgtccaaatattttacctttaagggtacttttgacattaattgggaattgacttaatttatatgaaaatattcattgggggctggcaagaagttacagaggtagacagcctgatttgcctctgcaggtgataagtgagcatgctcatgatttggagtctgtcagacctggatttaaatcatagctccactcttctttgcttctttggactaagtactttttttcaatttccaatgcagaaattctcttgctatgttctactagataatggctattcatccactggatgttatcttaaacaataccttttctgagatgcctcacaagatcctttagtctaggttaaatcttcctcctctaattacaggcctccttcagtaacatgtatcttatatgaggacaaagattttgatcttcctcaccatggtatcttcagcatctagcagcatgtcttgtatctgaattgtaatttttgaatgaatcacttaaattcaccttacagaatttacattttcagcgtggggccaagatgggcgaatagaagcagtggccatcagaggctcccatcgaaaagaatcacaattagagtgtgaatcctgaactggcaattaaggtatccagtttctctcatcagaactgactaggcgatggcatgatccacacagagggaggaaaagcagtgtggtgccgtggcccacctgagagccacacagggcaggggagcccccacccccagccaagggaggtggtgaataagcatgctacccagccagggaaaccatgcttgttccacagaactgtgcaacccatg

SEQ ID NO: 26098 - DNA, 568 bp, Homo sapiens
aaaacacattggacctcaattaaaaaaaaaaaagaaagtaaaaaaaacagtgtaatattggacatttgtgtatcttctattacatctaagttcaaaagttggtatataaccatttcagacaatatatgcagaaaagttacgccttgagcatgtgaggctgggcgcagtggctcacgcctgtaaccccagagccttgggaggctgaggtgggaggattgttagagttcaggagttcgagatcagcctgggcactacagtaagaccccaactgtacaaaaaaaatttctggtttgagttggtgtctggaaacaaaacaaacaacaaaaatttagcatgtggaattgttgctttgtgcagcaatactaaaatattttggtctgctcttttataaaattacaaaagcatattagagaaaattatttgtggacaacacycatctgctttaagagatatattttaacccaagatttgaattttgcttctaagtcacacctttgccaaccttaatatgaagctattgataataataataataatggtaataataacagtagtaacttatatttat

SEQ ID NO: 26099 - DNA, 611 bp, Homo sapiens
cttattcactatcatgagaataatacgtgagaaactgcccccatgattcgattatctcccaccaagtccctcccataacatgtggggattatgggagctacaattcaagatgagatttgggtggggacacagtgaaaccatatcacccaccttttggaggattctgaggatgccagacgtgaaaagtgcctggcacagtgcttggtatgtaggaggcatgggatgaactgtgttagccagtggcctgcacaagcttatcttcaccctgtcaaataaagtgagtcttaattaaccatataatatgtaaaaagataattacacatttggaacttttgctttaaggcagattcactttgtttagcccacacagtgcttcttaaaaacacttcaaattagttgccaatattttaacaacaggagattctacacaaattctggatttctggctatttgaaaaatcaacagatctggaagccctaggccaccattctctggctcactgtggttcctgggcaagggatgtagctgtgtcacctgctggcccatgyagcattgaatctgtaacctagaccctaatgtataaactgatttttataaataaaaatacatac

SEQ ID NO: 26100 - DNA, 576 bp, Homo sapiens
ttgtaggcctgagttgttttatggtccacatcaggaattgtctttgccaayaggggctgataaaaacttatctcatatttctaaaatgaaattcaaaatgtataatttcagttcataattcttcatgcatcctgaattcagcatttgtcattgtagatattctttaagaaaatttaataaaaatttttaaaaagactttcctccatgaaaaaagcttaaaaaaattaaaatgtcttctaactacattttatataaaaaactggtgttgaatctaatctcatttcagttcttaaaaaaatctggattttgacagctagaccttctaaactagtctcatactagtatattattttagaatatcatatatggcatttggatatgtgattgatagtaagtcccaagaagtttttggacttttcataggcttattggatgaataatatatttctgtaagacagaagacttattgtcatttattttctcataaaaacagcagatttataagtagatacaaagtttgcctgagtcagttatacttaagtcttaaccacattaaccaattaaactaagagaatg

SEQ ID NO: 26101 - DNA, 576 bp, Homo sapiens
ttgtaggcctgagttgttttatggtccacatcaggaattgtctttgccaacaggggctgataaaaacttatctcatatttctaaaatgaaattcaaaatgtataatttcagttcataattcttcatgcatcctgaattcagcatttgtcattgtagatattctttaagaaaatttaataaaaatttttaaaaagactttcctccatgaaaaaagcttaaaaaaattaaaatgtcttctaactacrttttatataaaaaactggtgttgaatctaatctcatttcagttcttaaaaaaatctggattttgacagctagaccttctaaactagtctcatactagtatattattttagaatatcatatatggcatttggatatgtgattgatagtaagtcccaagaagtttttggacttttcataggcttattggatgaataatatatttctgtaagacagaagacttattgtcatttattttctcataaaaacagcagatttataagtagatacaaagtttgcctgagtcagttatacttaagtcttaaccacattaaccaattaaactaagagaatg

SEQ ID NO: 26102 - DNA, 576 bp, Homo sapiens
ttgtaggcctgagttgttttatggtccacatcaggaattgtctttgccaacaggggctgataaaaacttatctcatatttctaaaatgaaattcaaaatgtataatttcagttcataattcttcatgcatcctgaattcagcatttgtcattgtagatattctttaagaaaatttaataaaaatttttaaaaagactttcctccatgaaaaaagcttaaaaaaattaaaatgtcttctaactacattttatataaaaaactggtgttgaatctaatctcatttcagttcttaaaaaaatctkgattttgacagctagaccttctaaactagtctcatactagtatattattttagaatatcatatatggcatttggatatgtgattgatagtaagtcccaagaagtttttggacttttcataggcttattggatgaataatatatttctgtaagacagaagacttattgtcatttattttctcataaaaacagcagatttataagtagatacaaagtttgcctgagtcagttatacttaagtcttaaccacattaaccaattaaactaagagaatg

SEQ ID NO: 26103 - DNA, 611 bp, Homo sapiens
tagctatgttggtaaagagttctcttttagagatacatattagaattatcaacaaaacagtatcaagggatttgcttgaaattaaaacagctgggagtgaataatgtaggagggtatagataaaataagagtagccatgaggtagtgactgcagtaactactcatggatggttcattatattcttctccttttatacctgaaaatgtccacagcgaaaaagttaaaaactgaacarcaaacacacttctctagttaaatgttttggtttgaaatgcaaagttagggttatcagagtacgaaatgggggcaagtagaattccaactattagcgagaaggaccaaaatgtcagaaataagcacaaaatgcttctgatgtataaaaacaattgtcactctagcacatatacacaattactctcaagtgagggttacagtcatgttagctgactcatactttacatagaatgctaatgtgtgtggctactgaatttctgagtgcacagcctgcaactagaaaggaagctaatcaggagttcaatacgagcctgttaacttagccacattacttcctcttacttttctccccagaaaaatgagagtggtggctaca

SEQ ID NO: 26104 - DNA, 569 bp, Homo sapiens
attcacttttgcagctagcagaggcacaggctrggaacagattacttctttctagtgcttgcatgatcagaagcttggcttcagtcactgtgagaaatcacttctcagattcactcttattcctacagtgaaaccctttgaggtcccaataaaagcttgagctattttccagagctcctcctccttagcaaaatatgaatttcacagctctttgagttttccaaaaactccactcagcttttcagcttcccagatgagacttttaattcagcaaatgcctgaatgggaaaagttgctccttttctgggttaccttctccctggaatattggccccacaaattcttgctatcttgtagatctcaatactttcaaattgatatccctccccacttccagattttctatttgttctaaatggagaatggtctgaaacaagcacattaaccattactgaaaacagaattactagactgttatttaaaagctcaagaacaaagcccagaatcttaaggcactatttcattttctcccaaataacatatatcttcaaatacaccttgggacaaaa

SEQ ID NO: 26105 - DNA, 773 bp, Homo sapiens
ttccaaaggatatttgcattgtttcctgggcctctagtgtatgctgtmcaatatggtagtctccagccacaggtgactgctgagtaatttaaagatggctagtctaaattaataagcactgtaagcatatgaaaaacacactggaagcctgggtatggtggctcacgcctgtaatcccagcactttgggagactgaagcaggtggatcacctgaggtcaggagtttgagaccagcctggacaatatggtgaaatcccatctctactaaaaatatggacaaaaaaaaattagctgggcatggtggcggacgcctgtaatcccaactacttgggaggctgagacaggagaatcacttgaacctgggaggccgaggtaaaagtgagctgagatcaagccactatactccggcctgggcaacaagaatgagactccatctaaaaaaaaaaaaaaaaaaaagaaatacacattggattttggacacctactatcaaaaaaagaatgtaaaaatatcttattaatcatgttttatattgattatattttgaaatgacagtattttacatatatcaggttaaataaaatatattcaaagttaatttcatctgtttctttttagtgtttcttaatgtagcatctagaaaattttaaattatgtttgtggcttgcattatattccttttcacacagtgctgccctagtgtatgtttgaaaagccaggcaagctactccagaggctgaggcacaagaatctttcgaacccgggatgtggaggt

SEQ ID NO: 26106 - DNA, 773 bp, Homo sapiens
ttccaaaggatatttgcattgtttcctgggcctctagtgtatgctgtccaatatggtagtctccagccacaggtgactgctgagtaatttaaagatggctagtctaaattaataagcactgtaagcatatgaaaaacacactggaagcctgggtatggtggctcacgcctgtaatcccagcactttgggagactgaagcaggtggatcacctgaggtcaggagtttgagaccakcctggacaatatggtgaaatcccatctctactaaaaatatggacaaaaaaaaattagctgggcatggtggcggacgcctgtaatcccaactacttgggaggctgagacaggagaatcacttgaacctgggaggccgaggtaaaagtgagctgagatcaagccactatactccggcctgggcaacaagaatgagactccatctaaaaaaaaaaaaaaaaaaaagaaatacacattggattttggacacctactatcaaaaaaagaatgtaaaaatatcttattaatcatgttttatattgattatattttgaaatgacagtattttacatatatcaggttaaataaaatatattcaaagttaatttcatctgtttctttttagtgtttcttaatgtagcatctagaaaattttaaattatgtttgtggcttgcattatattccttttcacacagtgctgccctagtgtatgtttgaaaagccaggcaagctactccagaggctgaggcacaagaatctttcgaacccgggatgtggaggt

SEQ ID NO: 26107 - DNA, 773 bp, Homo sapiens
ttccaaaggatatttgcattgtttcctgggcctctagtgtatgctgtccaatatggtagtctccagccacaggtgactgctgagtaatttaaagatggctagtctaaattaataagcactgtaagcatatgaaaaacacactggaagcctgggtatggtggctcacgcctgtaatcccagcactttgggagactgaagcaggtggatcacctgaggtcaggagtttgagaccagyctggacaatatggtgaaatcccatctctactaaaaatatggacaaaaaaaaattagctgggcatggtggcggacgcctgtaatcccaactacttgggaggctgagacaggagaatcacttgaacctgggaggccgaggtaaaagtgagctgagatcaagccactatactccggcctgggcaacaagaatgagactccatctaaaaaaaaaaaaaaaaaaaagaaatacacattggattttggacacctactatcaaaaaaagaatgtaaaaatatcttattaatcatgttttatattgattatattttgaaatgacagtattttacatatatcaggttaaataaaatatattcaaagttaatttcatctgtttctttttagtgtttcttaatgtagcatctagaaaattttaaattatgtttgtggcttgcattatattccttttcacacagtgctgccctagtgtatgtttgaaaagccaggcaagctactccagaggctgaggcacaagaatctttcgaacccgggatgtggaggt

SEQ ID NO: 26108 - DNA, 773 bp, Homo sapiens
ttccaaaggatatttgcattgtttcctgggcctctagtgtatgctgtccaatatggtagtctccagccacaggtgactgctgagtaatttaaagatggctagtctaaattaataagcactgtaagcatatgaaaaacacactggaagcctgggtatggtggctcacgcctgtaatcccagcactttgggagactgaagcaggtggatcacctgaggtcaggagtttgagaccagcctggmcaatatggtgaaatcccatctctactaaaaatatggacaaaaaaaaattagctgggcatggtggcggacgcctgtaatcccaactacttgggaggctgagacaggagaatcacttgaacctgggaggccgaggtaaaagtgagctgagatcaagccactatactccggcctgggcaacaagaatgagactccatctaaaaaaaaaaaaaaaaaaaagaaatacacattggattttggacacctactatcaaaaaaagaatgtaaaaatatcttattaatcatgttttatattgattatattttgaaatgacagtattttacatatatcaggttaaataaaatatattcaaagttaatttcatctgtttctttttagtgtttcttaatgtagcatctagaaaattttaaattatgtttgtggcttgcattatattccttttcacacagtgctgccctagtgtatgtttgaaaagccaggcaagctactccagaggctgaggcacaagaatctttcgaacccgggatgtggaggt

SEQ ID NO: 26109 - DNA, 1982 bp, Homo sapiens
tgttaccctgggttaggaaaatattaaggttatatcagctagtgctggctgacttgcacatttcaaaaggcgacatggcatgaaacatgttaaacctgcatgcaatgcaggttctgctgatcaggagtcttccgaagaattttaaaaatacctgttaagtgttgtacaggaaaggggttgtgtggaagagtggttttcaatgtcaatgagattggcttgttaaacaagaatattggcaaaaaaccttacataacacatacggcctccaagtcccctggtttgagtcattcaaagaccatgcaaataatcatttgtaaaaaaaaatatgtattaagtaatgtgtgtttaaacagaaacacacacaaaacaaaagttcagatgctctcaggaacctaaccctgtatttcttctaggagcaatggttttgtattcaatgttcatgatagctttgtagaacgtaactaccataactaatgagagtcaacatagatgtttataagcatttacatgtgtttaagaaacattattaagtttctatattctttctgattttttaaatctaagttgctatctttccaggtaaatatcaaattacaaattactttttgtttatatttagttataatttattcacatatttatgtacttgtataaaactttcaaaacttaaaagtgcagttgtcaagaactataaagaacctgagatttcattcttaggacaagataatagtgaatttgtcagaattttgtagatgctggtaggaggggtaagactcctgggttacagatcaaagacagtttattacaacagttgcaggatccagaatacagtagtctcccccttatctgcaatttcattttccacagctttagttacctacagtcaaccaccatccaaaaatattaaatggaaaattttagaaataaacaattcattagttttgaattgtgtgccgttttgagtagcgtgatgaaatctcacaccatcccgctcagtcctgctcaagaggtgaatcatctctttgtccatatccgtatccatatccatgttctagacacaacctgcctgttagtcacacagtaaccatctcagttatcagatagaaaaaacacagtacatattacattagggtttggtactatccacggtttcaggcatccactggggaacttgggatgtatcccctgcacgagagggggaattactgtattactatttttgtgccagtttctgaatcccaattcctacagcatgacgtgaagagggttgtattattataggaaaagaaccgtgagcttagagaatcaggttttttttwaataatattaagacagtaagtatgctttccctttggaaaaagtatactttcccttcctcctatggaaggagaccctatctcttatcttccaaggttgtttgctttacaaacatccttggaaagatagtttatcaaaaaggacaatcgttgtctctcttgcagggcatacaaaaatgcaagaaacccatgggggtcccaaaatcaattacttatactttaatttgtatgtagttgcatttgtttatatgtttttaaaacatatttgtgttttctttacttgatatatacttggtacataatgctaacatttatatgttatatttgtgttatatatatataacacaaatataatatatttgtgttcctatttgtgtttatttttacttacatgaaatagttccagtattactagtattatatgttgaaatatgtacatctgtttacatttatattgtttctaatgtttctatatgtgttggtatttatattaatttttttatgttttcaaggttagttgaggtggggctgggcagggctcacaagccaattccaggctgcctcctatatcctgccagccctgtcaaaaggttgtatgagtgaaatggcattggctccacctgggtgctaacccatcatggcccatccctagccccacaggagaca

SEQ ID NO: 26110 - DNA, 1891 bp, Homo sapiens
tcaaaattcaaaacagtgccaccaaggtgcttctgttccaggaggagagggagccatgaagatatggtcgtcctctgcagcgtgatcagtgctaccaggaggatcagctgcgcgcagggaagaactgcaggcagcatcctggtaactgaaccgcaggaagtgctactgtcgttgaatgctaaggggtgcatgatcaggagacctccggggaagcccacggatgacagcacccaaccgcagagacagtggatggctggggctcatgaagggcagaaagaacccagggtcgtaggctccaatgcctgaaggcaggggctgggggaaacctggctgccccatgcgtacacaaaagctggaggaccctctgtgtggcagcctcagccccgggacccccagtgattctctggaggaccgtctgtgtggcagcctcagccccgggaccctcagtgattctctggaggaccctctgcgtggcagcctcagccccgggaccctcagtgattctctggaggaccgtctgtgtggcagcctcgcagcctcagccccgggaccctcagtgattctctggaggaccctctgcgtggcagcctcgcagcctcagccccgggacccccagtgattctctggaggaccctctgcgtggcagcctcagccccgggaccctcagtgattctctggaggaccctctgcgtggcagcctcagccccgggacccccagtgattctctggaggaccgtctgtgtggcagcctcgcagcctcagccccgggaccctcagtgattctctggagggccctctgcgtggcagcctcagccccgggaccctcagtgattctctggaggaccctctgcgtggcagcctcagccccgggaccctcagtgattctctggaggaccctctgcgtggcagcctcagccccgggaccctcagtgattctctggaggaccctctgcgtggcagcctcagccccgggaccctcagtgattctctggaggaccctctgcgtggcagcctcagccccgggaccctcagtgattctctggaggaccctctgcgtggcagcctcagccccgggacccccagtgattctctggaggaccgtctgtgtggcagcctcgcagcctcagccccgggaccctcagtgattctctggaggaccctctgcgtggcagcctcgcagcctcagccccgggacccycagtgattctctggaggaccctctgcgtggcagcctcagccccgggaccctcagtgattctctggaggaccctctgcgtggcagcctcagccccgggaccctcagtgattctctggaggaccctctgcgtggcagcctcagccccgggaccctcagtgattctctggaggaccctctacgtggcagcctcagccccgggaccctcagtgattctctggaggaccctctgcgtggcagcctcagccccgggacccccagtgattctctggaggatcctctgcgtggcagcctcagccccgggaccctcagtgattctctggaggaccctctacgtggcagcctcagccccgggaccctcagtgattctctggaggaccctctgcgtggcagcctcagccccgggaccctcagtgattctctggaggaccctctgcgtggcagcctcagccccgggaccctcagtgattctctggaggaccctctgcgtggcagcctcagccccgggaccctcagtgattctctggaggaccctctacgtggcagcctcagccccgggacccccagtgattctctggaggatcctctgcgtggcagcctcagccccgggaccctcagtgattctctggaggaccctctgcgtggcagcctcagccccgggaccctcagtgattctctggaggaccctctacgtgg

SEQ ID NO: 26111 - DNA, 1891 bp, Homo sapiens
tcaaaattcaaaacagtgccaccaaggtgcttctgttccaggaggagagggagccatgaagatatggtcgtcctctgcagcgtgatcagtgctaccaggaggatcagctgcgcgcagggaagaactgcaggcagcatcctggtaactgaaccgcaggaagtgctactgtcgttgaatgctaaggggtgcatgatcaggagacctccggggaagcccacggatgacagcacccaaccgcagagacagtggatggctggggctcatgaagggcagaaagaacccagggtcgtaggctccaatgcctgaaggcaggggctgggggaaacctggctgccccatgcgtacacaaaagctggaggaccctctgtgtggcagcctcagccccgggacccccagtgattctctggaggaccgtctgtgtggcagcctcagccccgggaccctcagtgattctctggaggaccctctgcgtggcagcctcagccccgggaccctcagtgattctctggaggaccgtctgtgtggcagcctcgcagcctcagccccgggaccctcagtgattctctggaggaccctctgcgtggcagcctcgcagcctcagccccgggacccccagtgattctctggaggaccctctgcgtggcagcctcagccccgggaccctcagtgattctctggaggaccctctgcgtggcagcctcagccccgggacccccagtgattctctggaggaccgtctgtgtggcagcctcgcagcctcagccccgggaccctcagtgattctctggagggccctctgcgtggcagcctcagccccgggaccctcagtgattctctggaggaccctctgcgtggcagcctcagccccgggaccctcagtgattctctggaggaccctctgcgtggcagcctcagccccgggaccctcagtgattctctggaggaccctctgcgtggcagcctcagccccgggaccctcagtgattctctggaggaccctctgcgtggcagcctcagccccgggaccctcagtgattctctggaggaccctctgcgtggcagcctcagccccgggacccccagtgattctctggaggaccgtctgtgtggcagcctcgcagcctcagccccgggaccctcagtgattctctggaggaccctctgcgtggcagcctcgcagcctcagccccgggacccccagtgattctctggaggaccctctgcgtggcagcctcagccccgggaccctcagtgattctctggaggaccctctgcgtggcagcctcagccccgggaccctcagtgattctctggaggaccctctgcgtggcagcctcagccccgggaccctcagtgattctctggaggaccctctrcgtggcagcctcagccccgggaccctcagtgattctctggaggaccctctgcgtggcagcctcagccccgggacccccagtgattctctggaggatcctctgcgtggcagcctcagccccgggaccctcagtgattctctggaggaccctctacgtggcagcctcagccccgggaccctcagtgattctctggaggaccctctgcgtggcagcctcagccccgggaccctcagtgattctctggaggaccctctgcgtggcagcctcagccccgggaccctcagtgattctctggaggaccctctgcgtggcagcctcagccccgggaccctcagtgattctctggaggaccctctacgtggcagcctcagccccgggacccccagtgattctctggaggatcctctgcgtggcagcctcagccccgggaccctcagtgattctctggaggaccctctgcgtggcagcctcagccccgggaccctcagtgattctctggaggaccctctacgtgg

SEQ ID NO: 26112 - DNA, 1891 bp, Homo sapiens
tcaaaattcaaaacagtgccaccaaggtgcttctgttccaggaggagagggagccatgaagatatggtcgtcctctgcagcgtgatcagtgctaccaggaggatcagctgcgcgcagggaagaactgcaggcagcatcctggtaactgaaccgcaggaagtgctactgtcgttgaatgctaaggggtgcatgatcaggagacctccggggaagcccacggatgacagcacccaaccgcagagacagtggatggctggggctcatgaagggcagaaagaacccagggtcgtaggctccaatgcctgaaggcaggggctgggggaaacctggctgccccatgcgtacacaaaagctggaggaccctctgtgtggcagcctcagccccgggacccccagtgattctctggaggaccgtctgtgtggcagcctcagccccgggaccctcagtgattctctggaggaccctctgcgtggcagcctcagccccgggaccctcagtgattctctggaggaccgtctgtgtggcagcctcgcagcctcagccccgggaccctcagtgattctctggaggaccctctgcgtggcagcctcgcagcctcagccccgggacccccagtgattctctggaggaccctctgcgtggcagcctcagccccgggaccctcagtgattctctggaggaccctctgcgtggcagcctcagccccgggacccccagtgattctctggaggaccgtctgtgtggcagcctcgcagcctcagccccgggaccctcagtgattctctggagggccctctgcgtggcagcctcagccccgggaccctcagtgattctctggaggaccctctgcgtggcagcctcagccccgggaccctcagtgattctctggaggaccctctgcgtggcagcctcagccccgggaccctcagtgattctctggaggaccctctgcgtggcagcctcagccccgggaccctcagtgattctctggaggaccctctgcgtggcagcctcagccccgggaccctcagtgattctctggaggaccctctgcgtggcagcctcagccccgggacccccagtgattctctggaggaccgtctgtgtggcagcctcgcagcctcagccccgggaccctcagtgattctctggaggaccctctgcgtggcagcctcgcagcctcagccccgggacccccagtgattctctggaggaccctctgcgtggcagcctcagccccgggaccctcagtgattctctggaggaccctctgcgtggcagcctcagccccgggaccctcagtgattctctggaggaccctctgcgtggcagcctcagccccgggaccctcagtgattctctggaggaccctctacgtggcagcctcagccccgggaccctcagtgattctctggaggaccctctgcgtggcagcctcagccccgggacccycagtgattctctggaggatcctctgcgtggcagcctcagccccgggaccctcagtgattctctggaggaccctctacgtggcagcctcagccccgggaccctcagtgattctctggaggaccctctgcgtggcagcctcagccccgggaccctcagtgattctctggaggaccctctgcgtggcagcctcagccccgggaccctcagtgattctctggaggaccctctgcgtggcagcctcagccccgggaccctcagtgattctctggaggaccctctacgtggcagcctcagccccgggacccccagtgattctctggaggatcctctgcgtggcagcctcagccccgggaccctcagtgattctctggaggaccctctgcgtggcagcctcagccccgggaccctcagtgattctctggaggaccctctacgtgg

SEQ ID NO: 26113 - DNA, 1891 bp, Homo sapiens
tcaaaattcaaaacagtgccaccaaggtgcttctgttccaggaggagagggagccatgaagatatggtcgtcctctgcagcgtgatcagtgctaccaggaggatcagctgcgcgcagggaagaactgcaggcagcatcctggtaactgaaccgcaggaagtgctactgtcgttgaatgctaaggggtgcatgatcaggagacctccggggaagcccacggatgacagcacccaaccgcagagacagtggatggctggggctcatgaagggcagaaagaacccagggtcgtaggctccaatgcctgaaggcaggggctgggggaaacctggctgccccatgcgtacacaaaagctggaggaccctctgtgtggcagcctcagccccgggacccccagtgattctctggaggaccgtctgtgtggcagcctcagccccgggaccctcagtgattctctggaggaccctctgcgtggcagcctcagccccgggaccctcagtgattctctggaggaccgtctgtgtggcagcctcgcagcctcagccccgggaccctcagtgattctctggaggaccctctgcgtggcagcctcgcagcctcagccccgggacccccagtgattctctggaggaccctctgcgtggcagcctcagccccgggaccctcagtgattctctggaggaccctctgcgtggcagcctcagccccgggacccccagtgattctctggaggaccgtctgtgtggcagcctcgcagcctcagccccgggaccctcagtgattctctggagggccctctgcgtggcagcctcagccccgggaccctcagtgattctctggaggaccctctgcgtggcagcctcagccccgggaccctcagtgattctctggaggaccctctgcgtggcagcctcagccccgggaccctcagtgattctctggaggaccctctgcgtggcagcctcagccccgggaccctcagtgattctctggaggaccctctgcgtggcagcctcagccccgggaccctcagtgattctctggaggaccctctgcgtggcagcctcagccccgggacccccagtgattctctggaggaccgtctgtgtggcagcctcgcagcctcagccccgggaccctcagtgattctctggaggaccctctgcgtggcagcctcgcagcctcagccccgggacccccagtgattctctggaggaccctctgcgtggcagcctcagccccgggaccctcagtgattctctggaggaccctctgcgtggcagcctcagccccgggaccctcagtgattctctggaggaccctctgcgtggcagcctcagccccgggaccctcagtgattctctggaggaccctctacgtggcagcctcagccccgggaccctcagtgattctctggaggaccctctgcgtggcagcctcagccccgggacccccagtgattctctggaggaycctctgcgtggcagcctcagccccgggaccctcagtgattctctggaggaccctctacgtggcagcctcagccccgggaccctcagtgattctctggaggaccctctgcgtggcagcctcagccccgggaccctcagtgattctctggaggaccctctgcgtggcagcctcagccccgggaccctcagtgattctctggaggaccctctgcgtggcagcctcagccccgggaccctcagtgattctctggaggaccctctacgtggcagcctcagccccgggacccccagtgattctctggaggatcctctgcgtggcagcctcagccccgggaccctcagtgattctctggaggaccctctgcgtggcagcctcagccccgggaccctcagtgattctctggaggaccctctacgtgg

SEQ ID NO: 26114 - DNA, 1891 bp, Homo sapiens
tcaaaattcaaaacagtgccaccaaggtgcttctgttccaggaggagagggagccatgaagatatggtcgtcctctgcagcgtgatcagtgctaccaggaggatcagctgcgcgcagggaagaactgcaggcagcatcctggtaactgaaccgcaggaagtgctactgtcgttgaatgctaaggggtgcatgatcaggagacctccggggaagcccacggatgacagcacccaaccgcagagacagtggatggctggggctcatgaagggcagaaagaacccagggtcgtaggctccaatgcctgaaggcaggggctgggggaaacctggctgccccatgcgtacacaaaagctggaggaccctctgtgtggcagcctcagccccgggacccccagtgattctctggaggaccgtctgtgtggcagcctcagccccgggaccctcagtgattctctggaggaccctctgcgtggcagcctcagccccgggaccctcagtgattctctggaggaccgtctgtgtggcagcctcgcagcctcagccccgggaccctcagtgattctctggaggaccctctgcgtggcagcctcgcagcctcagccccgggacccccagtgattctctggaggaccctctgcgtggcagcctcagccccgggaccctcagtgattctctggaggaccctctgcgtggcagcctcagccccgggacccccagtgattctctggaggaccgtctgtgtggcagcctcgcagcctcagccccgggaccctcagtgattctctggagggccctctgcgtggcagcctcagccccgggaccctcagtgattctctggaggaccctctgcgtggcagcctcagccccgggaccctcagtgattctctggaggaccctctgcgtggcagcctcagccccgggaccctcagtgattctctggaggaccctctgcgtggcagcctcagccccgggaccctcagtgattctctggaggaccctctgcgtggcagcctcagccccgggaccctcagtgattctctggaggaccctctgcgtggcagcctcagccccgggacccccagtgattctctggaggaccgtctgtgtggcagcctcgcagcctcagccccgggaccctcagtgattctctggaggaccctctgcgtggcagcctcgcagcctcagccccgggacccccagtgattctctggaggaccctctgcgtggcagcctcagccccgggaccctcagtgattctctggaggaccctctgcgtggcagcctcagccccgggaccctcagtgattctctggaggaccctctgcgtggcagcctcagccccgggaccctcagtgattctctggaggaccctctacgtggcagcctcagccccgggaccctcagtgattctctggaggaccctctgcgtggcagcctcagccccgggacccccagtgattctctggaggatcctctgcgtggcagcctcagccccgggaccctcagtgattctctggaggaccctctrcgtggcagcctcagccccgggaccctcagtgattctctggaggaccctctgcgtggcagcctcagccccgggaccctcagtgattctctggaggaccctctgcgtggcagcctcagccccgggaccctcagtgattctctggaggaccctctgcgtggcagcctcagccccgggaccctcagtgattctctggaggaccctctacgtggcagcctcagccccgggacccccagtgattctctggaggatcctctgcgtggcagcctcagccccgggaccctcagtgattctctggaggaccctctgcgtggcagcctcagccccgggaccctcagtgattctctggaggaccctctacgtgg

SEQ ID NO: 26115 - DNA, 1882 bp, Homo sapiens
tagtggtggtatgtataaatcaaaatctcattttataatttaccaagacttttaaagaggatttagtattatttttgaccagcacaaggcattgcacactttaagtgcaactgaattttacaattcaattaacattttaattccaaattataaaaatattttgtaataaaatatacactgaaatataaactttatactaaaaatattttataatacttttcaaatgccagctaatattttgaaggaagcagcttaaaatcatgctaggtaacagagaaacaacactgagatttttattttttgaaataaaagttggttataaaaataaaaagcccaccaagctgattacaaccagacaagaaaaacgtaaggcttatgtctaaaaaaattttcaaaagtctcaatctaagaattctcagtaacaaaggagaccaaagttaaaatctgccaatagcaacagtcatagctaaagatatatttaagtgttcatattaatatttcaaatttggtttattaatgtgggacctaaggtcacgttgaagtaaatgtaactgctggtaactatgcatatgtcttcctctccccgatgccttagctgtttatacttctcattagccrtcttcctattctttcttttggagctctatttcctgggcctcttactacctagctcataatttcttcttgtctggctagaaacagatggggtcttgaaagctgacattcttcttaaagaacaggaacaattatacaggctcttcactccctccccgcccatctgtcccttctaaggagaatgtacccaggcaggctcctgggtggtacaatttatgcacaggtataattctgtatatttgtatagcaccctattttatgtgatactttcacatacatcattccactttagtcttgtgcctggttttattatctccagtttatggacaaaaaaactaagattcagagaggttagatgatttgccctcagtctagactccaaagccagccaatgataggagcaggacaagaacctaggtctcctaattcctagcttaggagctatttatcactgtacaaaactgctgatataaatggttatagtggacagtttttttttctccctgaatgagaaattacatgagttgtcacaggtagaatgctttagggcattgctatggactgaatgtttatgccctcctccaaccccaattcatgtggtgaagcctaaatcctaactgtaatggtatttggaggtagggcctttgggaagtatgagggtcatgagggtggagcccacatgaatgggttcagtgccctcataaggtacatgagaaagatgatctcttcttctgccgtatgaggatacatcaagaaagtgtctatggaccaaaaagagggtcctcaccagactactgccttgatgtttggtcttcccagcttccagaactctgagaaatagatgtttgttgtttcatccatccaatctatggcattttgttttagcagccccagcggagacaacactctacctggacattttatttgctgtaatgttcttacgagttgcaagcctggtccactttttacttcacaactaatgtggaagagaacacatctgattccaaggagaggagactcatctcttgtcctcaataacaaatgaggaatctgaagagcttgttttaaacaattttggtggtcttacaacccactggcatagaatctcgagtgtacttctttctattcaccatgccacctacttctactgcagacatgaaattaatcaagatcacgtagaaatccattggcttgggaggacagaacaatcttattcatagaaacatgatgttactttattagtaaacaaattcagtataaatatgca

SEQ ID NO: 26116 - DNA, 795 bp, Homo sapiens
tgggaaggataaaagcaatgacagtcccatccaacaacgcctctttgagcgctttagagcaatgttccccacagcggaccagggaggcatgtaaggtggtgatgtaatcacatttagtctccgtgagagaactcctttcagttctttttttcttttgagacggagtctcactctgttgcccaggctggagtgcaatggtgcaatctctgctcactgcaaccttcacctccagggttcaaacgattctcctgcctcagactcccgagtagcctgattacaggcgtgcaccaccacacccagctaatttttgtattttgggtagagacrgggtttcatcatgttggctaggttggtctcgagctcctgacctcaggtgatccacccacctcggcctcccaaagtgctgggattgcaggtgtgagccaccgcacccggccctttcagttcttttggttcttctgcttctgtcaggagaatctccatatggtgctggcccgtgtctcacccctgacactttctactccctctttcctggcaaggagagagccaccttcctgctgcaccttctgtaggcaacagtgtctggcagactttaacacagctttgctttgttgccactgcatttattaaatattactttatacctatggcaaaaatacaactttttctgtttacaaaagtgaactagcctccataaggaaattccaagaaattcaagagaacaaactgcagtggtcaggtgtgaattcagctgatgtgtaagtgggccataggtcgcgccagggccaggtgccg

SEQ ID NO: 26117 - DNA, 1169 bp, Homo sapiens
agaatgtataaaatctttcaaaactcagtaataagcaaaccaacaacccatgtaaaagtcagaaaactattttaatagacccttagttaaagaagacacatggtgggcaaatatacatctaataaggttttcaacatcattagccattaggaaaatacagattaaaaccataatgagataccattacgtgctcactagaatggctaagataaaaaaaactcactgttcctagtgttagaactctcacacactgctggtggaactataaaatgaatatccactttggaaaaaccatttggcaggttttatttattttttatttttaaagttaaacctatccctactgtgtgacccagccattcccttcctgggtattttcccaagagaaaataaagcatatatccaaacaaagacttgtatatgaatgtgcatagcagcttttttttttttttatgttttaattattttaatggtactttttccctgcattttgaacaaggagaatcccattttcattttgcactgggctctgcaaattatatagccagagaaaatgccctttgttttttggctacatggctgcagctgctatttggttaatctgccccttatatttgtaggctactcaagttttcttttctcaaaaagcaatccaataaaccaattttgtatttctgctagaatattttccaacttcctccagaggtgaagtgatgtttgaagctaggtcaggtgcttttttccttttaacccaggtttgccccatttgagttagcttatggaaatcctttttacagaccaattaattaggttaatagaataagctttttactcagctggatctgaatgtgaattctgactccactctctatttrcaatgtcatcttgagcaagttacctatcctccttaaatctgtttgccaagctctaccctcagagactctgaggcagtctgactttataatcaattgactaagtgcttatatgtagatagtatgcatactgctacttgggatttcctggataggataatttttaatttgcctttttatcctttgagttcatgattctatgaagtacacaagctcctcaggtccttgctgtgtatatgccttagaatgaggtattttctgtttcctataaaaagagccaaattcctcattaagatg

SEQ ID NO: 26118 - DNA, 738 bp, Homo sapiens
aacccccttgtttgccacattagtggcagatcctacttccccctccccgattcctgcaggggctctccaaaaacccagcctgaaatctaagcattaggaaagagcccagccaatcacatcccagtggtatccccacccttcttcacctctcccagactctagccttgccccaccctctcagccaccagagacactcacagggaatcttgtttatctcattgaataacttctccttcagtttggcaaacatgtcctcctgrctctccccagcacccccactctcagtggagttgtccacgggtccaatgggcatcgtggcggtggtggtggcaggagccacaataggctcctggttcctcttgaaaatgttcctcatggtggcagaggaaacagctggggacgagaggtgaagagggcagggtgagcatccagaggtcgtcttaccctgagaaagccctgcccaaaggaccaggagaagctctttatagatcaaagatattttgcataatattaacaactgtagtaaaccaataataatagacatcatccaattagtacacagtcagcctgagcagcatagcaagaccctatctttagaaattttttttttttagttaggcatagtgggggctgaagtgatagaggatcacttgagtccaggagtttgaggttacatgagctatgggtgattaagtaaggttctgtctcttaaaaaaaatagtacatatatgtgccaag

SEQ ID NO: 26119 - DNA, 532 bp, Homo sapiens
acagatggcagacagttacacaagaacaccgccaagcttttgagatggtgcagcaccaccacgctgctcaccacactgctgagatgctgaggtgcctcattctgactgtttggcatatggggaaactgaggccctggggtgaaggcagctccgtgcagggactgcaatgtctcagagagtgggaatttccttccaggaatgattttcttctcaaatcattattttgtcctctactcaagtgaggaagatttcctgggcctatggaagctgtcaagggaatccagttttgctaggtgtcattagctgatccatccagagatcatatcagatatcagtttgggttgtcaaacagtaaatatcattaggactgaagtagatttcaagtgggacttcaaacatctggaagtgaagtgagtgtccatgcggggcctagttctgtaggtctctccaggaacccagtctatccaggggtcccccatgctcaggaatatatttgaaacrctttaataaccagctttaagcctgggcaaca

SEQ ID NO: 26120 - DNA, 1188 bp, Homo sapiens
tgtaatcccagctacttgggaggctgaggcaggaatgttgcttgaacctgggaggtggaggttgcagtgagccgagattgcaccactatgctccagcctggcgacagagagagactccgtctcaacaaaaccaaaacgaaacaaaaacaagtcacaatataaaaatttgcaacaggctagtaggaagaaatctacagaaaaaacataaaatccctgctaatcaggaaaatcaaatttaatgaacaatgagaaaaagtgtgtgtatgtattcatgtgtgtatgtgtgcatgtgtgtgtgtgcctgtgtgtgtgtagggctagtctagattaagaaagaattgagacacaacaacctgatgtaatacgtgatattgactggatcctgactcaaagaacaatgaygactataacaggcattttgaggacaattagagatactagaatataaacagggtattaaataatgttacggaattatttttaatgtttaaaagtatgttgaaagagtatcatggttatgtataagaatatccatattttcttgggtaaaatgtcaaaatgtgtgtgtatatatcactgagatgtcataatgtctgtgtatttatatatatgaacaacgtaaaagtgaaacacatgtatgcatatgtatgtgtgtatatgtgtgtttataatgaagatgaagaaaaatctctagaactaaaggacgtgaatttgtgtaattaaatggccctcccaaaaagcaaacccacatgagtgtatgtcataatgaagtattagagtactagcattaaaaaagtcctacaaattattagagagaaaatacaggttgcacgcaaagcataaagaatgagaatggcataagacatcttaacagtgccacagaaactaaaaagtagttctgagtaaaaatgaactatttacccagccaaaccgttaattaggtataaaggtagagttaagacatttatagacatacaagatattaagattactgagtcaattgatattcaacaggggtgcaaatggagaaaaagtcttttcaacaaatagtggtgggacaaatggatagccacatgcaaaagaacatatatataagagctaaaaccataatgcttttagaagaaaatatagggtttatcttcatgaccttgaatttgacaaaggattcttggacatgacaccaaaagc

SEQ ID NO: 26121 - DNA, 800 bp, Homo sapiens
tcctctggaaccagcatccccagaggacagggctcctgctgtctcagggctgcctgacttgtgtggcgttggacctcggggattgctggtggataacacactgtggtcttgcctggtggcgagttttgacggccatggacagggtttggctccagtggtggtgcacgtggcctccgtggtatggacctagtggcttctccatcccacccaaggtaacagtgtctcacttcgtcccactaactgctagggagagagcatctgagatttttctttggggtggcattttattttattttattttttgtcttttgtagcagggaaagggtatgatgaccgggaggacagttcttttaagggttggagggtgccaaccagaggataggggtgagtgtgccctcattttgtttctactttaatttctgtgtatctgccatattgaactgcgagactaagagctgtctgcaatacaatacctgtattaaaaataacaaaaataaggcccgattctgtttctagaaaaaaaaaaaagctgccgccatgaacgacagggtgaagcaggcatgttttttcctttataagaaaatagaaaagagaattagaaaaggagaaacaaacaactgtataggaaagttacaattcaaatatgatgcaaacgaaaatgtagcatgattttgagcaattactgtagatakagaaaaaataatacatttgacttggatgcttggaatattttccttttaattgccgggggttatgatatctgatcctctatcaattagagtttggctacaagtgacaga

SEQ ID NO: 26122 - DNA, 604 bp, Homo sapiens
aatacctgacctcaagtgacctgcctacctcggcctctcaaagtattgggattacaggcgtgagccacagtgcccagcctgaagcctttagccaaaacaaatactttaataaatctcttcttacttccaagaaaaaaaagacattttgttattttgacatgctctttgttgtttatacaatcagtgaaatactcttgtaaaatgagtaagttttggaatccagagcttaggtctgacattaattagctatgaggaaagaggtggatcaaataaaaaattacaataagaaagaatttaacagacacactatattatgcaggaacaacactctcaaattaattttaacagtatttaacatatattggatcattgtttaaatgaatgagtataacaaattcaccatgaatcctgttatagaagwgttagtgtctgaagtgcctgcagccattaagtggtgatattacttatgaggattccagtggcatattccttaagcatggaatgttttatgccactcacttactgcatgtggcactggatcttttaagtgcttaaatgattcccactatgtctttttaaaaaatagattattgtttacttggca

SEQ ID NO: 26123 - DNA, 1087 bp, Homo sapiens
catgctgcrgggaagaatgggatacaagattttgtaagcatggagaaggaatcaaagatgtgactccaacttctcttgtggctagctcagctagagttgagaagtggaggctgacaagacactgacttcaattaatatcagaagagaatcagcactcagcattggcagaaatttctgaccaggcccagtactcttgttaactgaggcagcttattaaaaacaccaccaggccaggtgcagtggctcatgcctgtaatcccagcactttggaaggccaaggcaggtggatcacctgaggccaggagtttgagaccagccaggccaacatggtgaaacctcgtctctactaaaaatacaaaaaattagccaggtgaggtggcaggtgcctgtaatcccagctactcggaaggctgaggcaggagaagtgcttaaacctggagatgggaggttgcagtgagctgagatcatgccactgtactccagtctggtgacagagtaaggctctgtctcaaaaaaaaaaaaaaaaaaaaaaaaaaagtgaccacctgcacaggacacagtaggttggaaagagtttgttttagttagtgcttatggtaggcactcccccaaagatatccacatcctaatctcaggaccctgcaaatgtgttgccttacatggcaaaaagaccttttcagacacaattaaagatcttgagacggggaggttacctcgactatccaagtggtcccaatgtaaatcatgagtctttgatagtggagaacctttcctagctgctgtgaacaggatagacaacagtatgagaaggacttgtcttactgtcacaggctttgaagatggaaaggggctgtgagccaaggaattgggtggcctctagaagttgtacaaggcaaggaaatggattttctagaggctcaagaaggaatgcagccctgtccacatctttattttagtccattgagaccatattggacttctaatctccagactatcagataataaatttttgttgtttcaagcctctaagtttgttgtaatttgttacagcagcaatagaaaactcatacagtgccaccagctgaaa

SEQ ID NO: 26124 - DNA, 1087 bp, Homo sapiens
catgctgcagggaagaatgggatacaagattttgtaagcatggagaaggaatcaaagatgtgactccaacttctcttgtggctagctcagctagagttgagaagtggaggctgacaagacactgacttcaattaatatcagaagagaatcagcactcagcattggcagaaatttctgaccaggcccagtactcttgttaactgaggcagcttattaaaaacaccaccaggccaggtgcagtggctcatgcctgtaatcccagcactttggaaggccaaggcaggtggatcacctgaggccaggagtttgagaccagccaggccaacatggtgaaacctcgtctctactaaaaatacaaaaaattagccaggtgaggtggcaggtgcctgtaatcccagctactcggaaggctgaggcaggagaagtgcttaaacctggagatgggaggttgcagtgagctgagatcatgccactgtactccagtctggtgacagagtaaggctctgtctcaaaaaaaaaaaaaaaaaaaaaaaaaaagtgaccacctgcacaggacacagtaggttggaaagagtttgttttagttagtgcttatggtaggcactcccccaaagatatccacatcctaatctcaggaccctgcaaatgtgttgccttacatggcaaaaagaccttttcagacacaattaaagatcttgagacggggaggttacctcgactatccaagtggtcccaatgtaaatcatgagtctttgatagtggagaacctttcctagctgctgtgaacaggatagacaacagtatgagaaggacttgtcttactgtcacaggctttgaagatggaaaggggctgtgagccaaggaattgggtggcctctagaagttgtacaaggcaaggaaatggattttctagaggctcaagaaggaatgcagccctgtccacatctttattttagtccattgagaccatatkggacttctaatctccagactatcagataataaatttttgttgtttcaagcctctaagtttgttgtaatttgttacagcagcaatagaaaactcatacagtgccaccagctgaaa

SEQ ID NO: 26125 - DNA, 822 bp, Homo sapiens
tccattgcgaaggggagtgagagtaatggaagaggatgaaatgggcctttcatgatttattctgtatacccctgtacctctggtttaaaaaaataagcatgcaggctggacgcggtggtgcacacctgtaatcccagtgctttgggaggtcgaggcgggcagatcacctgaggtcaggagatcaagaccatcctggctaacatgatgaaactccatctctactgaaaatacaaaaaattagctgagcatggtggcgggtgcctgtagtcccagctactcgggaggctgaggcaggagaatggcgtgaacccgggaggcggagcttgcagcaagctgagatcactccagccttggagacagagcaagactccgtctcaaaaaaaaaagcatgcgtttacacagtacctttgtaatgaccagttaataaagaacatggaatatgaaagaattagaaggcctgccactgagttgttcaasaaatgtaattttatgaatgcgtaaatgaatacctgtgatgactgaatcagataacttacatgcaccattcatatcctcctggcctcacccttctcagcacctctcctccagcctgtactgcaaacctcttgcctcccatcctggggtttgagaccagcctggccaacatggtgaaaccccgtctctactaaaaataaaaaattagctgggtgtggtggtgggtgctgtaatcccagctacttgggaggctgaggcaggagaatcgcttgatcctgggaggcagaggttgcagtgagctgagatcacaccattgcactccagcctgggcaaaaagagcaaaactcc

SEQ ID NO: 26126 - DNA, 642 bp, Homo sapiens
gagtattagtcctctttaaatatacatattctatcctcgattcttttttcccactccaataactctcctcaaataagtctggacacttagctccaatgatcagggaggattcaatttttttgaaggcagaaatttatgcaattttgaagaagaaagcaaagttgcaaatacgaaattaggtatgaaagtgaaggtttactaagaataagaaaagaaaacacaacacattggtgggtaggtcattgctggtcctaagtgctacccaccaggccccttctaccgtcagaagatttagaccggggctgccactgctaccaaaactacgaggcctaccctcactcccactctgtcgatttccatttttcacataattgtgctttagaaaatttccccttttgcaaataatgtgcctagttagttgagagatttcactaatgcttatgggtcttttgtgcaatatttcattaagctgttgtatatcctgtttgataactacraaaggaaatgaacacagttattacaatttaaaaaaatctttcggacaaatctttagtttcttttttccaagagttctattttcttttacatacatttctaaaccacaaccacatgtaaaaatgaattttattttaaaggctcacc

SEQ ID NO: 26127 - DNA, 1208 bp, Homo sapiens
atctgagtatgtgtatttaaaacacacgtaggctgggtgtaatggctcacacctgtaatcccagcactatgggaggctgaggtgggcagatcacttgagctcagaagttcgagaccagcttaggcaactggtgaaacccaaaaatgcaaaaaattagctgggcgtggtggtgtgtgcctgtggtgccagctactcaggaggctgaagtggaaggattgcctgagcctgggaggtggagcctgcagtgagctatgattgcgccactgcattccagcctggcgacagagtgagacctcatctcaaaaacaacaacaacaacaacaaaaacacactgggaaaaataggatctgaatacatgcactattctttaattgtttttccaattaaaaagaatcctttcttgttggtttagataaataaacctttctttttcagacagctgccctgtgtcatcatttaccttcatcccaagttcattctagaaggcagcttaccttgagtcttcagggaactagcctgcctagatcagccagaaaggtggagagtcagctyccacctcaagaactcagggcctggcagccgagatgggcacacatctttgaagcccttacttattcccacaaagcagttaatcagctccagtcacagaatcaccggtcccagtgctatccttaagaatctcgtgcttaaggccaggctcggtggctcatgcctgtaatcccagcactttgggaggccgaggcgggtggatcacttgaggccaggagttcaagaccagcctggccaacatggtgaaatgccgtgtctactaaaaatacataaattagccaggcgtggtggtgcatgcctgtaatcccagctactcgggaggctgaggcaggagagtcacttgaacctgggagatggaggttgcagtgagccaagattgtgccactgcactccagcttgaccaacagactgaaactctgtctcaaaaaaaaaaaaaaacaaacagaaaaaacagcaacaacaaaaaacaaccttgtggttgattaactgcaggagtggtcataacataaagaagacccccattagggtgtggccccaaagcacatgctggggggaccccacagcggttcactgacagcctcagggcttgccagaaatctgacccacacctcccctcagctccctctcagcgccgtgttggcctgcctgctgccaagaca

SEQ ID NO: 26128 - DNA, 1098 bp, Homo sapiens; identical to SEQ ID NO: 25840

SEQ ID NO: 26129 - DNA, 549 bp, Homo sapiens
gatcatgatttatttaaccagtgttgcactgatggacacttaagctgttttgtgtttgttttgttttgctgttacacatgtgacagagtatgtctgtgagtktagatgtagcttctctgtctgtctgtcccttggtacctttatggatatgtctgtatgtcaaagtcctagcagggtcaagaggtatgtacagctttaattttggtagaaattgacaaattgctctctaagcaggttgcaggaattggcactattgccaattgtgtgtgtgagtcaggcatgtatagttaatcacacacaccaagtagccaggcctcccaaggtgagtctgttgacatgtccggtttggccacagacattttttgtccttcttaatgttagcatgataactgtggtcttttggcttactccagagaactgagtcataaatagatttcaaccactggaatagtatctttacaattaatatggtacaggaagaaattttaaatttctaaaatcacccatgtggttttattttctagcgatatttgccgaaggatttcttag

SEQ ID NO: 26130 - DNA, 549 bp, Homo sapiens
gatcatgatttatttaaccagtgttgcactgatggacacttaagctgttttgtgtttgttttgttttgctgttacacatgtgacagagtatgtctgtgagtttagatgtagcttctctgtctgtctgtcccttggtacctttatggatatgtctgtatgtcaaagtcctagcagggtcaagaggtatgtacagctttaattttggtagaaattgacaaattgctctctaagcaggttgcaggaattggcactattgccaattgtgkgtgtgagtcaggcatgtatagttaatcacacacaccaagtagccaggcctcccaaggtgagtctgttgacatgtccggtttggccacagacattttttgtccttcttaatgttagcatgataactgtggtcttttggcttactccagagaactgagtcataaatagatttcaaccactggaatagtatctttacaattaatatggtacaggaagaaattttaaatttctaaaatcacccatgtggttttattttctagcgatatttgccgaaggatttcttag

SEQ ID NO: 26131 - DNA, 563 bp, Homo sapiens
gacaagcatcagactaacttttctgagaagcaaatttaatcttgccccacattttttggtgtcccatacaaactgcgagatgaagataaaacctttaacaatctcacttctactttgctatgcagcctgtaccctgtaggcttcatgcactaagagtactgaaaaactgtgactctttcagggtatcaaactttatccacacagtttcttctccctaaaatgcctttgccaccatttcttgactcctgtaagcacacctaagtgctttcctctctaggagaaagttttcaggccagaaaccatgtctaaaaagactgaaaccagtcttttgtagacttccatcaactagcccagagggtcttcagcaaatcttaattgaataagagattaatgtttggcaatatggtcattctaatattttatttcgatgtgtacacygagacttattttaaatttattagatataaaagaaaacagatattgcctttgatgttttcaataaaaatgaagagatttgtaagggaatggggcagctgtgttcacactggctctcaatttggcct

SEQ ID NO: 26132 - DNA, 467 bp, Homo sapiens
aaattgacttattagatattttgaacatattttattgttcccttatcatttttcttgaaataygtgacagatatattttaccttttggaaccttaatactgagactgaagaattactatctgccactgttaaaatgcatgcttattttctttttttgtaggacattcttctacataatgttgcgtcagtagaataattttctcaccaagtgataggtaagcagattccagtaaggatgaaggataagattgtcagaacttttattcctacctcaaactatgggccatagttattttggttaacactgaattgctgtttcatttacctagcttagaaaatataaaccatgtaaaaacttgtttctctgctgccttaatttaatacttagtatagaagccttaactacagcatttgacccttgcgtttcaaatggtgagaaggaaggggaaaacttaaagtaaaaaact

SEQ ID NO: 26133 - DNA, 467 bp, Homo sapiens
aaattgacttattagatattttgaacatattttattgttcccttatcatttttcttgaaatacgtgacagatatattttaccttttggaaccttaatactgagactgaagaattactatctgccactgttaaaatgcatgcttattttctttttttgtaggacattcttctacataatgttgcgtcagtagaataattttctcacmaagtgataggtaagcagattccagtaaggatgaaggataagattgtcagaacttttattcctacctcaaactatgggccatagttattttggttaacactgaattgctgtttcatttacctagcttagaaaatataaaccatgtaaaaacttgtttctctgctgccttaatttaatacttagtatagaagccttaactacagcatttgacccttgcgtttcaaatggtgagaaggaaggggaaaacttaaagtaaaaaact

SEQ ID NO: 26134 - DNA, 467 bp, Homo sapiens
aaattgacttattagatattttgaacatattttattgttcccttatcatttttcttgaaatacgtgacagatatattttaccttttggaaccttaatactgagactgaagaattactatctgccactgttaaaatgcatgcttattttctttttttgtaggacattcttctacataatgttgcgtcagtagaataattttctcaccaagtgataggtaagcagattccagtaaggatgaaggataagattgtcagaacttttattcctacctcaaactatgggccatagttattttggttaacactkaattgctgtttcatttacctagcttagaaaatataaaccatgtaaaaacttgtttctctgctgccttaatttaatacttagtatagaagccttaactacagcatttgacccttgcgtttcaaatggtgagaaggaaggggaaaacttaaagtaaaaaact

SEQ ID NO: 26135 - DNA, 467 bp, Homo sapiens
aaattgacttattagatattttgaacatattttattgttcccttatcatttttcttgaaatacgtgacagatatattttaccttttggaaccttaatactgagactgaagaattactatctgccactgttaaaatgcatgcttattttctttttttgtaggacattcttctacataatgttgcgtcagtagaataattttctcaccaagtgataggtaagcagattccagtaaggatgaaggataagattgtcagaacttttattcctacctcaaactatgggccatagttattttggttaacactgaattgctgtttcatttacctagcttagaaaatataaaccatgtaaaaacttgtttctctgctgccttaatttaatacttaktatagaagccttaactacagcatttgacccttgcgtttcaaatggtgagaaggaaggggaaaacttaaagtaaaaaact

SEQ ID NO: 26136 - DNA, 534 bp, Homo sapiens
ttaaaaggtttatgtaaaattagtacacaattttaaattaaagatatctacataaactgatatttagaaaagtgacataatyggttaaatttctaagtgtatttaacacaaatattttcctacttatttacttctcataatgtcagttttcaaattaagtaagatttacatttaccatctgttcacttttagtaggcctgttagagaattaaaaatgtatcctaatctgcagtcttctaagtaccagatgtttattatgtggcactagaaacaaaaaatcaataaattaagaaaatataaatctagtgattctagatttctcaaaataacaatgttttagtcaaggatcttccccctgaaaattatgtgtaattttaagtgtttacttctaaatcatgcattttcagtttcatcaaagtgcctcaaaatacctaaattttattcatcacatgcatatttcaccagcagcatggttacaaataaaaagataacatgaaattcaaccccgattttgtctaacataacacattaccc

SEQ ID NO: 26137 - DNA, 1224 bp, Homo sapiens
caaggtcaggagatcgagaccatcctggctaacacagtgaaaccccgtctctactaaaaccacaaaaaattagccgggcgtggtggcgggctccggtagtcccagctactcgggaggctgaggcaggagaatggcatgaacccaggaggcggaggttgcagtaagccgagatcgcaccactgcactccagcttgggcaagagagtgagactcagtctccagaaaagaaaaagaaaactttgcttttggataacgaagttacaagtattatggggtctgcatgagccccttgagaaaggctggggttagtggtgggcagaaatagagagagagagaaaggggatagagaatgagtcaggggctgggccagcaaagcagagtaagaatccctaactctcagcagaacacactaccagtgaccatccccaytgtagggttagctgagaggccctattaggtacagaaatggctactattttaattttgtccatgcatctccatttacttcaagcttctagtaaaggtctctgtttctgcactctcccctccacatttctatacgacttttaaaatgtagttttttttcaaatcattttcccccatgatattttctctagtatctctacgccacttaactaaattttcctttgttcataatttgttagaacaaatatttactgagcatctactatgagccagatgaatgttagacttactagaaacacaaccataaataagacagacaggtagctgctcttggaatccacattacaatagaaagacaaaatgcatgattagatacacagacagataaagcagtcaaatgaacaaaataagttttaatagtacacacaggaaaaaaggagctgagacagagaataacaaatagggcttgaactgtgaactggggacagaggaagctcttctgataaagcgaccttgcaatgcaacatgtataaaggagctgactacaaaactgggtttagaatcaggaagacggggcagagttctcagcacaggccaagaactaaaggcagaaagagtgtagccttggggacgtggaagcccagagcatttggaagacgcaaacaagggagaggggagcagctgacaatggaagggaaggggaccatcatgcagcacactggacctgggtcagcaaacttctgtaaaggggaaagtagtgaatgccttaggcttcgtgggccgtaaggtctctgccaca

SEQ ID NO: 26138 - DNA, 1224 bp, Homo sapiens
caaggtcaggagatcgagaccatcctggctaacacagtgaaaccccgtctctactaaaaccacaaaaaattagccgggcgtggtggcgggctccggtagtcccagctactcgggaggctgaggcaggagaatggcatgaacccaggaggcggaggttgcagtaagccgagatcgcaccactgcactccagcttgggcaagagagtgagactcagtctccagaaaagaaaaagaaaactttgcttttggataacgaagttacaagtattatggggtctgcatgagccccttgagaaaggctggggttagtggtgggcagaaatagagagagagagaaaggggatagagaatgagtcaggggctgggccagcaaagcagagtaagaatccctaactctcagcagaacacactaccagtgaccatccccattgtagggttagctgagaggccctattaggtacagaaatggctactattttaattttgtccatgcatctccatttacttcaagcttctagtaaaggtctctgtttctgcactctcccctccacatttctatacgacttttaaaatgtagttttttttcaaatcattttcccccatgatattttctctagtatctctacgccacttaactaaattttcctttgttcataatttgttagaacaaatatttactgagcatctactatgagccagatgaatgttagacttactagaaacacaaccataaataagacagacaggtagctgctcttggaatccacattacaatagaaagacaaaatgcatgattagatacacagacagataaagcagtcaaatgaacaaaataagttttaatagtacacacaggaaaaaaggagctgagacagagaataacaaatagggcttgaactgtgaactggggacagaggaagctcttctgataaagcraccttgcaatgcaacatgtataaaggagctgactacaaaactgggtttagaatcaggaagacggggcagagttctcagcacaggccaagaactaaaggcagaaagagtgtagccttggggacgtggaagcccagagcatttggaagacgcaaacaagggagaggggagcagctgacaatggaagggaaggggaccatcatgcagcacactggacctgggtcagcaaacttctgtaaaggggaaagtagtgaatgccttaggcttcgtgggccgtaaggtctctgccaca

SEQ ID NO: 26139 - DNA, 1224 bp, Homo sapiens
caaggtcaggagatcgagaccatcctggctaacacagtgaaaccccgtctctactaaaaccacaaaaaattagccgggcgtggtggcgggctccggtagtcccagctactcgggaggctgaggcaggagaatggcatgaacccaggaggcggaggttgcagtaagccgagatcgcaccactgcactccagcttgggcaagagagtgagactcagtctccagaaaagaaaaagaaaactttgcttttggataacgaagttacaagtattatggggtctgcatgagccccttgagaaaggctggggttagtggtgggcagaaatagagagagagagaaaggggatagagaatgagtcaggggctgggccagcaaagcagagtaagaatccctaactctcagcagaacacactaccagtgaccatccccattgtagggttagctgagaggccctattaggtacagaaatggctactattttaattttgtccatgcatctccatttacttcaagcttctagtaaaggtctctgtttctgcactctcccctccacatttctatacgacttttaaaatgtagttttttttcaaatcattttcccccatgatattttctctagtatctctacgccacttaactaaattttcctttgttcataatttgttagaacaaatatttactgagcatctactatgagccagatgaatgttagacttactagaaacacaaccataaataagacagacaggtagctgctcttggaatccacattacaatagaaagacaaaatgcatgattagatacacagacagataaagcagtcaaatgaacaaaataagttttaatagtacacacaggaaaaaaggagctgagacagagaataacaaatagggcttgaactgtgaactggggacagaggaagctcttctgataaagcgaccttgcaatgcaacatgtataaaggagctgactacaaaactgggtttagaatcaggaagacggggcagagttctcagcacaggccaagaactaaaggcagaaagagtgtagccttggggacgtggaagccyagagcatttggaagacgcaaacaagggagaggggagcagctgacaatggaagggaaggggaccatcatgcagcacactggacctgggtcagcaaacttctgtaaaggggaaagtagtgaatgccttaggcttcgtgggccgtaaggtctctgccaca

SEQ ID NO: 26140 - DNA, 1224 bp, Homo sapiens
caaggtcaggagatcgagaccatcctggctaacacagtgaaaccccgtctctactaaaaccacaaaaaattagccgggcgtggtggcgggctccggtagtcccagctactcgggaggctgaggcaggagaatggcatgaacccaggaggcggaggttgcagtaagccgagatcgcaccactgcactccagcttgggcaagagagtgagactcagtctccagaaaagaaaaagaaaactttgcttttggataacgaagttacaagtattatggggtctgcatgagccccttgagaaaggctggggttagtggtgggcagaaatagagagagagagaaaggggatagagaatgagtcaggggctgggccagcaaagcagagtaagaatccctaactctcagcagaacacactaccagtgaccatccccattgtagggttagctgagaggccctattaggtacagaaatggctactattttaattttgtccatgcatctccatttacttcaagcttctagtaaaggtctctgtttctgcactctcccctccacatttctatacgacttttaaaatgtagttttttttcaaatcattttcccccatgatattttctctagtatctctacgccacttaactaaattttcctttgttcataatttgttagaacaaatatttactgagcatctactatgagccagatgaatgttagacttactagaaacacaaccataaataagacagacaggtagctgctcttggaatccacattacaatagaaagacaaaatgcatgattagatacacagacagataaagcagtcaaatgaacaaaataagttttaatagtacacacaggaaaaaaggagctgagacagagaataacaaatagggcttgaactgtgaactggggacagaggaagctcttctgataaagcgaccttgcaatgcaacatgtataaaggagctgactacaaaactgggtttagaatcaggaagacggggcagagttctcagcacaggccaagaactaaaggcagaaagagtgtagccttggggacgtggaagcccagagcatttggaagacgcaaacaagggagaggggagcagctgacaatggaagggaaggggaccatcatgcagcacactggacctgggtcagcaaacttctgtaaaggggaaagtagtgaatgccttaggcttcrtgggccgtaaggtctctgccaca

SEQ ID NO: 26141 - DNA, 984 bp, Homo sapiens
ttgctagtgtctgcctatcctcgctggagcactctgacttctcccacaagatactgatggatyctgggcctcacaccccataactccctccccgggaacggagctcactctctgcccagcattggtttagaaattatagagaggttctctgattggccagtccgatcaaggtacccaagaatggctggaagcagggtttcccgaagaatgggatgatgagggcagataaaagggatgtttcttacaggcctcatgagaagctgggaaaggtgtccttgcctcttatatccacatggcagttcttagtgatataaaaggacaagccagccaacatccctgatgagcagctctccagtctctttcctctacctgctggcttaaaattgtgatccctctccacccttaagtcggagaagggcagagtgccccccagtcctccgctcagaagcaataagaacagaaaaactgcaggccaggttgagcctcactttgaacatggcaatggctgtttaacaaatgccacaggggcttcttgtgacagggacgaaaagagtgagagggccagggacgctgctgaggggttctgggaagctcaccagggcctttcaggaattgaggctgcctgactgcccggagcctggccctgagagtgggcaggtgtgctgcctgtataatgcccttgatctctaagagaaacagtggcaaaccaatcagatggcaacctcctgccaaggactccattagcccgctctggtggctgcttctgaagtggcggctgctggctccactcgctcccctgttcagagaggacatatgggccaggcagtgatcaatgagggaacatctggcacaggagcaaatcaaacagcaccgatgactaatttaggagtgttgccttgccattgttctttctgtggccccatgcaaaggtcacccagtgtggcaggctcagagaagctgctgcttcaccttcagcagtcccca

SEQ ID NO: 26142 - DNA, 893 bp, Homo sapiens
ggaataaataatgaataaataggaattggtaaaggaggaagaaactaacaacaaacaggtagataaagaatggttggttggatagatggatggataaactaatgttcattattctctgcaggccatagctttctgtttgttttgatgtaactttctcatttatgtaggcctctctggcttaagaaattatttttctacttaaagagtgagaattacaaaaaataggtgctgaatatatggaaaaagtgataggagacatgacagcatctgctccactgattacagtcttggccacatggaaagtttcctgaagcatgtccctcaagttgaactgaagacaaggccaatgcttttctccctcactaaagttcatctttcaaagtcatgataagaaggtgaaaggcatcacccaagtccaattttacatgtgcagaagtatacagaatgcttgggaatttttccttatttacttctctttttcacttctttttttttttttttttttttttttgagacggagtctcgctctgtcgcccaggctggagtgcagtggcgcgatctcggctcactgcaagcttccgcctcccgggttcacgccattctcctgcctcagcctcctgagtagctgggactacaggcaggcgcccaccaccgcgcctggctaattttttttttttttttttttttgtatttttagtagagacggggtttcaccatgttagccaggatggtctcgatctgctgacctcgtgatctgcctgccttggcctcccaaagtgctgggattaaaggcgtgagccaccacgcctggcctctttcctctttttaaaaaagtccctatttaataartggtgctgggaaaactggctagccatatgtagaaagctgaaact

SEQ ID NO: 26143 - DNA, 542 bp, Homo sapiens
gaatacaaaggctaagtcctggaaattgcttacattgtatagttttattctctcagttctctaaagtggctttatttcacaaataatgtagttttacccagaaagaaaagctcagtttaaattcaggggctctttcttgactcaggtatatcatatagtcaagctcttacaacttttctgagaatataccttcaaccctgctatgtctttatttctgacgtctcccgctccttggaaatgaatttaagargtagtcttaactcttaatttcagtggtgcactggttaacattcattctacaactggctctcaacgattggtagcatttgccgatttctgtggtgtgaatgctctgactgtagtcaattgcaagctaccaacttgctatctctcaaaacaatgctgggaagagatatgagctgctattaagggccatgccattcagctccaccacaccgctagatctgagggatattcacctagaagtttttattttcttttcttacctaaaatttgggttgcccttgcctctgtctatgttt

SEQ ID NO: 26144 - DNA, 1018 bp, Homo sapiens
ggatccctgtgagcagagtctaagagtttggtgtctgatgtgcaccaaacaccacttccactttccccaccccagtggcccctgtctttccacttckagactgttctgctctgcagagagagtctaggtgacttttttgctgggagagaggtctcaatttctccctttaaaaaaaaccacacaagttactctcatttccctggttcctttggaagaaaatgtgctgaacacttggttctcgcaagtggcctcctgcctgctttttgcacatttaagggagaaacagagcttaaatcaggaggcagcaaactttggcctgtgggccaaatcctactgctacctattttagtaaataaagttttattagaacatagccatacccattaatttacttgttgaccctagctactttttagctacaaaggcagagttgagtagctgcaacagggattgtatggaatacaaaggtgaaagcattttctattcggccccttatggaaaaagttttctaactccctgcttaaataaaggagacagagcagctaaataaatggatcaaagctgctgaaacatgggtcagagcagctgaaaaataggaacttcaaaaattaaaggaggacaactagatttctgatcctgagagcaaaaaagcaagagaaatggctggtttgcaatacatgaaggaatacatactgggtacttttcatgtgcctgactactgtgccaagcactttacatacattctctcttttaaattctacaagtgaggtatattactgtcatcattttacagctgtgaaaactgaggcctggagatgttgagtcacttgctctggtcatccagctgataagtggtagggtgagaattggaacacaggggtgactttagagcccaaagtcttgaccatgaggctatcctgttgacaggctccatgtcataggaaacacggaatggctgctttttcaactgctcaaatcagtgacacccaaagtcttagcatgggctgcagctacagca

SEQ ID NO: 26145 - DNA, 1018 bp, Homo sapiens
ggatccctgtgagcagagtctaagagtttggtgtctgatgtgcaccaaacaccacttccactttccccaccccagtggcccctgtctttccacttctagactgttctgctctgcagagagagtctaggtgacttttttgctgggagagaggtctcaatttctccctttaaaaaaaaccacacaagttactctcatttccctggttcctttggaagaaaatgtgctgaacacttggttctcgcaagtggcctcctgcctgctttttgcacatttaagggagaaacagagcttaaatcaggaggcagcaaactttggcctgtgggccaaatcctactgctacctattttagtaaataaagttttattagaacatagccatacccattaatttacttgttgaccctagctactttttagctacaaaggcagagttgagtagctgcaacagggattgtatggaatacaaaggtgaaagcattttctattcggccccttatggaaaaagttttctaactccctgcttaaataaaggagacagagcagctaaataaatggatcaaagctgctgaaacatgggtcagagcagctgaaaaataggaacttcaaaaattaaaggaggacaactagatttctgatcctgagagcaaaaaagcaagagaaatggctggtttgcaatacatgaaggaatacatactgggtacttttcatgtgcctgactactgtgccaagcactttacatacattctctcttttaaattctacaagtgaggtatattactgtcatcattttacagctgtgaaaactgaggcctggagatgttgagtcacttgctctggtcatccagctgataagtggtagggtgagaattggaacacaggggtgactttagagcccaaagtcttgaccatgaggctatcctgttgacaggctccatgtcataggaaacacggaatggctgctttttcaactgctcaaatcagtgrcacccaaagtcttagcatgggctgcagctacagca

SEQ ID NO: 26146 - DNA, 564 bp, Homo sapiens
ccgaaacactaactgggacttcccagaatacacttgatgttgatwaatggtaagaggcctccctgttctcttcctttgagtataggaaaacccctgtctctggagatctgatctgctggctggaagagttattctttattatactggagaccctcaagtggtaaaagattccagctctcatggagacctagattggagaatctaacccaagggctagccaatggcactcacgtcaccacatccgtactgtttgagtccagctgttaaattggaatggttccttctcatattggtcacaagactaccgtcttcatgatggaatcaactcacccaaaggatgggaaacaaacttcccaagaaaggcactctctacccctccaaccacgtcactcttaattcagggccagaaaatccagcacaaacttcttttatatgcaggggaggcaaaacctgacatcgaaagcaggttaaaaaaaaaaaaagagagagaatgtaagtactattttggattactggactggcaagatggctgaataggaacagctctggtctgtagctcccagg

SEQ ID NO: 26147 - DNA, 613 bp, Homo sapiens
tcctcatcactctttaccagtagtaattctttgcattgggattaacgctatttgatatttccgtgtttgtttgcttactgtcttgctccgcacagaacacatttagaatgyaaccttttagagcagaaaatgtatcaccaatgcctggcacataatggaatcttgacaaatgtttgaataagtgtagcacaaacccagacaaacagattggaaggcaaaactcccttcagtgttggtatggatgctgatttgaaaaaaaaaaaaaaaaaaggattgcgggggagattatgaaaaaactatttcttccttcctggcattgttttattaccattccccacttccattaactgccctctcacctagcgtagtcagtattcatctttttatttgtatgtccttgcaaggcagtagctttattatatatttaaatttgcctaaatgattatatatatataattctgtttctttgttcattcagtaacatattcttagacatattcttggtcataatttcatatgtagcgtattatttctagcagccacatgctgttctatagcatgccttcaccaaaccttacatttcctttctcttgtgctgagaaactccctgctg

SEQ ID NO: 26148 - DNA, 600 bp, Homo sapiens
tcttttttgtaacttctgccaaccattgcttctgtttttactggtagaacatttaagcgtatttggatgctattatgttgatgtgtgcctaaagacaacgctatatttgtagttgatccatagatctcttacttccccaaaacatggcatatgccacaatgctatgaatgttccatcaatatttgtctttagattagaaccacaaacataaattttcttcactgtttaaattttaattgtatttatagtggtattagtaataatgtcagatgtgtgtctttgacaggacaaaactccccaagctttccccgattgtatttaacaaatgataagaacaatttaacaattattggaattatcctgttttttattgttttttttttctgttaatttgaaagatgagacattatcagacgtttgtaaaggtctttttttttcctaatggagccaacgcagtcacagctatgcttttatttttaatttactcagttttggtacatgcacaagaaaaattgaatttaaaatgaggaaaataaatttagaataatmattgatctaaataaaaagcaatgtttcacactttctgtaattgggaatgtt

SEQ ID NO: 26149 - DNA, 513 bp, Homo sapiens
ggaagaggatagactgaaggctgtgcgatttgggtgggatggtcacggaaggcctccctgagggggtgacatttgagcagggactgattgaagtgagcggggaagccgtgccactctctgggggggaagagcttcccaggaatattacaactgaaatatatctctgtaagctttattgcagattagattcaggctgctcttttggggcttgggacattattcggttgatattctaatataatactgggtgtccaggcaagacacagggctgggatgtgcrtcctttgaaagcagcctaggagaatgagctgaaactcaaccagggtcagagaggagggtgaagcacctgaatcgggggacatcactgaattccagctgctcaacacagaaccacctgcagacaggccaaggactgaccgctcagagggccaaggactgaccactgttcactcagcacatcccttgtctccgccttgatcctagccccatcaatgactctgccaacatggctca

SEQ ID NO: 26150 - DNA, 781 bp, Homo sapiens
aaaaaccacagctaattttttcctccttttatcaaattgcaactctccaacactttctcaatgcatttatcttactatatttagtgccataatcatttgtatattagtcttacaaatcctctttatcaggctatgtatttctgaggaacaggaaggaagccactcagactgagtagagatcatatattgaggaccagccatagaggaagggttttccatccttgcacttcttcctcataagtccacgagcagtacgtactgtgttcactgttttgcagatggagaaattaaaattaacttgcatgttgaaagctcgaaaaggttaaatgactattgggaaatttgggtaagtggcagaatttgaagccaggtctgttagattattaagtttgtgttctgaatcacaagactgcaactcgccatctggattctcatccctgtaccttcagtacagaaggtgctcaagacattttagataacgtgaacaacagaggctaagattatagtaacgtctggcagtggccatgtgggcaagtcttctgggacaaaaggaaaagcatggatttgtagtcattagaaggcttggcacctttcctgcttctccatctgccaccagagagagactggggtaggctgagtctctgcctacgttccctcactggcccattatagttgcaacctacagtaacaaccagcacatggccaaccttaggagacctgcycctgactgtggtggccagggcagctgtttgcactcacccgcagggttgtgatggtggca

SEQ ID NO: 26151 - DNA, 549 bp, Homo sapiens
tgaatagctgggccagtattttcacccccactatgttgaccctctatttcatagtaaaaattggtcatttattgaatacctatcatgtgctccatttctcacaaacctaaggcatgagatttatgaggaatggcactgaacaactcaggtaactgaacaattgacctaggtatcaatatggagttttctcttccacttaccagcctcccctactctaactccatctatccatgagccctgcctctaaaatatatgtcaaatcaacgcatatatccctatctacctacctacactagcataagccactgttgtctctcaccactgtgactgcaataatctcatctggtctccattcattcttgctcttttatacagtaygaacccttcaacatgtaattcaaatatcattccttccctgataaaaaacattccagtagcttcccactaaactcagaataaaatccaagttatttaacttggcctataagattctgcgtgatctggaacctgtctccatctttgttatccagtcttgtcacgcttccctaa

SEQ ID NO: 26152 - DNA, 549 bp, Homo sapiens
tgaatagctgggccagtattttcacccccactatgttgaccctctatttcatagtaaaaattggtcatttattgaatacctatcatgtgctccatttctcacaaacctaaggcatgagatttatgaggaatggcactgaacaactcaggtaactgaacaattgacctaggtatcaatatggagttttctcttccacttaccagcctcccctactctaactccatctatccatgagccctgcctctaaaatatatgtcaaatcaacgcatatatccctatctacctacctacactagcataagccactgttgtctctcaccactgtgactgcaataatctcatctggtctccattcattcttgctcttttatacagtacgaacccttcaacatgtaattcaaatatcattccttccctgataaaaaacattccagkagcttcccactaaactcagaataaaatccaagttatttaacttggcctataagattctgcgtgatctggaacctgtctccatctttgttatccagtcttgtcacgcttccctaa

SEQ ID NO: 26153 - DNA, 1187 bp, Homo sapiens
ttttaaaaatcctgctatagaccagggaaggctttgctgaagaattagttaagatctgaaagaggaagactatgaactaacttggcaaagaggtgtggagacatgtgttcagtgtgtacagaggtcctgtggcaggagagagtatgacatgttggaggaattctaagaaggccactatttatgaagcccagagagtgaagtggagcatggagtaagcaaggctgggaagggtagcagaagcctcacctttcagaagtccagtctctgaatatgagatagaggacttatctgggagaagccagctggactctagggatacttcaactttgaccttggtcctaacaaccctgtacagtggcttcattttatttgtcaaccaagttgaagccctgttagagtcgattccctaattaagggaccaggtagcctcaactcttggcttccaggttctagcactcattactaccatggacagcagcttccttttaattcagtgggattctgccaggcaggcttccaggggagctgtggggtctagtacaagtttctcccctgttgctgcttcagtggctttcaccctgcccaatacatatttaatatgacaccatgtgtctctttgtcagtctcctcatattgagcctaggaattggcaaacactccatgaatatttacacattgacttttttttaagctcttaagagaggaatatcccttggagtcctctttggagatttccagtgtctcatcatcaagcaacatgtcctttcagctaataagatctttatgtttcataatcattgcttaatatccaaagattaaatttagaccatggaaaggraaaaagatctcaaagcaactcatgtccctaaaaggaaatcacactcatcaaacaaatacgctgtgttcacacaaagatattactattttctaccttcagtactggcagactttaagtgggatatgaaaagcctcagctgcttttgaatgtgggtactttaccctggtaaacatagattccactcttcagcttggccaatgtttataatactcagccctgcagaaaagcgtcctacttggctgtcttatcctccattggcttagacaggaattggggaaatacgcatgtcagtattagcaaaatcagcagcaaagggacagaggcatatgaaagtcacctcacaaaggca

SEQ ID NO: 26154 - DNA, 604 bp, Homo sapiens
gagtaagatcaatgggaaatgttaagaatgaaaattgcattcatcctacaaagaagtttcctaaatcattacgaattgttctaccttgagtgtagtgagttatctgacactggaggatttaaaccaatggtagatcattacatagtagagatatgaacatgagctaaagcatgagggcagcaaagaggggagaactttgtttcacctaaatggctcttcaaaccttttttagcattagtttctgctttgrtatactctattaaaatttgggggataattgataaatcttccaggtggtttatggatggccagggaggaaatttgccattgttttaattatttaattttatttgcctctgtttttacacttggtaaaaatttggaagtgtttcagatagtgaagaaaaaaaagaattaagaaaaacattccaggccaggtacaggctcatgcctgtaatcccagcactttgggaggctgaggcaggcatatttcttgagctcaggaatttgacaccagcctggccaacatggtgaaactccagctctacaaaaatacaaaaattagccgggtgttggtggctcgcgcctgtagtctcagctactt

SEQ ID NO: 26155 - DNA, 604 bp, Homo sapiens
gagtaagatcaatgggaaatgttaagaatgaaaattgcattcatcctacaaagaagtttcctaaatcattacgaattgttctaccttgagtgtagtgagttatctgacactggaggatttaaaccaatggtagatcattacatagtagagatatgaacatgagctaaagcatgagggcagcaaagaggggagaactttgtttcacctaaatggctcttcaaaccttttttagcattagtttctgctttgatatactctattaaaatttgggggataattgataaatcttccaggtggtttatggayggccagggaggaaatttgccattgttttaattatttaattttatttgcctctgtttttacacttggtaaaaatttggaagtgtttcagatagtgaagaaaaaaaagaattaagaaaaacattccaggccaggtacaggctcatgcctgtaatcccagcactttgggaggctgaggcaggcatatttcttgagctcaggaatttgacaccagcctggccaacatggtgaaactccagctctacaaaaatacaaaaattagccgggtgttggtggctcgcgcctgtagtctcagctactt

SEQ ID NO: 26156 - DNA, 616 bp, Homo sapiens
  misc_feature (1)...(616): n = A,T,C or G
agccatggataattaatgctgtattcagcatacattttttcacttcttgttagatagaaggaatagttcaaaaggaatcaagtataatcagccaataaccccaaaccctatctctttcttctctactaaaactgtctttgccttctacactgaaaaagaaccatcccttaattaactgcaaaaggcaacatttaaaaatagaagtagaaatagtcaattgcaaaaagtaaaaaatggaaataaagataatgtaaacaataatgaatttttataattataacttaaaatagggccacaggtaaatggctactattttcaatratagaaaacatttgggttttattttcatttgtaagcaattacacactttatattttcactaactttactagatccataactcttgacatttctctgacaacttacatttagctagttttaaattaatgatccatttcaggggagcaattttttacctgctgctcacgtagaagacaaaaaaaaatggtggtagannnnnnnnnnnnnnnnnnnnnnnnnnnnnnnnnnnnnnnnnnnnnnnnnnnnnnnnnnnnnnnnnnnnnnnnnnnnnnnnnnnnnnnnnnnnnnnnnnnnt

SEQ ID NO: 26157 - DNA, 883 bp, Homo sapiens
gttacttcagaattttttatacattgattttgagtcactaataatgtatatcaactacagtttaagtacatttttctttcaaaatcttatgtttgatgtttcactactctctcattccatttgccctgtttcctttttaatatatatttttgtaatatattcagtctccatttccaattatatctaatacgattatatgttgccataataatcactatctaaactcattttggtgcctcatatataccaaacaagatatttaaaaattctcatcaattttttgttggttcctcccaattgatagcctataaaaattaattataaccaccgtgggaagcaggaactgagcacatcttattctagattttccttacgtgatctggaaactattctttatctgaacattatgtcttttaaatgagattggctaatggcttgggttgagactagaaagaagacagagaggtttagataagtacaagggcagtgcttcttgaatccctttgtttatacactctccccttgttaggccattaattctactgctatgatcttgtcacccagcacgggagcttttattctcctactgtcaactcagccagatccaacaagtagcactgccattctacttattactcagaatttagtgtgtgtcattaggcaataaatatctttaagtttctgcccccctccattctttctcattttcctctagattccattttattagctgttaatcagccacctcagccaggaggcatttcagcagaactgaacaccatgactcagcatcaggagacttctaagatatataggtagtaatatctccttcctttwttcccctccctaaggaaaaacttcaggtgtgagtttcctcttatac

SEQ ID NO: 26158 - DNA, 713 bp, Homo sapiens
gaacacttactaggtatgtataagagaaatgacctaaatttatgcaaatgagttcccccttaccaccacttccctagtatttacatttctaatgtattaggttggtgcaaaagtaattgcggtctaatagtactacattataatagaaaaagatttgaacgaatggatggaataatgttataaggctgtgataaaaataagtactagattcagagcaagcagaaaggagaaactagaataacctccctgaaggggtggggaaggagaaggtcagaaaatgtttcattcatctaagtgctgggacaagagtagatattttccaggtggcagacaggggagtgattccaggaagaggaagccacataaaagaagtactaaaggatgacacagcttggcttatgctctttgaagaatgctagagtaaggcataatttagagtgacagaaagagataagggcattattgtttttcttataagtttaaaatgttgatgtcagagtccaaagtgtttcatgatctggttccacattacatatacaacctgatttttttttttttttccccacaagtaggtgctgacggggacaaaatgtgtaatttctttccctaactctcataggttcttagytgggacacttctgtaacaaaagacagactaacaggggaaaaaagcatacaaatttctcttaatgtgcatatggacaccggaacta

SEQ ID NO: 26159 - DNA, 800 bp, Homo sapiens
gtagtcccagctacttgggaggctgaggtcggaagatcacttgaacccagaagttcaacactgtagtgtgcaatgatcatgcctgtgaatagctacttcactccagcctggacaacatagcaggactctatctctaaaaacagttttaaatctcataaaaaataagtaaatctggccgggcatgctgacttgtgcctgtaatcccaacactttgggagggtgaggcgggtggatcacctgaggtcaggagttcgagaccagcctggccaacatggcaaaaccctgtctctactaaaaatacaaaaattagctgggtgtggtggcaggtgcctgtaatcccagctacttgagaggctgaggcaggagaatctcttgaacctgggagttggaggttgcagtgagctgagatcrcgtcactgctctccagcatgggcaaagagagtgaaactatctcaaaaaaaaaaaaaaaaaaagtaggtaaatttatgactcagggctaactagttcataaaatattaaaagtttagctggttaaaccaaagattttaaagatatgtatatttatatcaaacattgatcatgtatctattgtgtgtaaaacagcatgttaggcaatgttgatatactttctgaaatattaaagattaattgaaattgaaagattaaattaaaaaaaatatgtcattgagatgagtgatcaggaaaggcctcttttttagaagtgacatataacatgagcccggaattataaaaggaaccagcctttcacaatgaaaagagcactcctgacagtgggagca

SEQ ID NO: 26160 - DNA, 800 bp, Homo sapiens
gtagtcccagctacttgggaggctgaggtcggaagatcacttgaacccagaagttcaacactgtagtgtgcaatgatcatgcctgtgaatagctacttcactccagcctggacaacatagcaggactctatctctaaaaacagttttaaatctcataaaaaataagtaaatctggccgggcatgctgacttgtgcctgtaatcccaacactttgggagggtgaggcgggtggatcacctgaggtcaggagttcgagaccagcctggccaacatggcaaaaccctgtctctactaaaaatacaaaaattagctgggtgtggtggcaggtgcctgtaatcccagctacttgagaggctgaggcaggagaatctcttgaacctgggagttggaggttgcagtgagctgagatcacgycactgctctccagcatgggcaaagagagtgaaactatctcaaaaaaaaaaaaaaaaaaagtaggtaaatttatgactcagggctaactagttcataaaatattaaaagtttagctggttaaaccaaagattttaaagatatgtatatttatatcaaacattgatcatgtatctattgtgtgtaaaacagcatgttaggcaatgttgatatactttctgaaatattaaagattaattgaaattgaaagattaaattaaaaaaaatatgtcattgagatgagtgatcaggaaaggcctcttttttagaagtgacatataacatgagcccggaattataaaaggaaccagcctttcacaatgaaaagagcactcctgacagtgggagca

SEQ ID NO: 26161 - DNA, 1245 bp, Homo sapiens
tgcctgtagttccaggtacctgggaagctgaggcaggagaatcatttgaacctgggaggtggaggttgcaatgaaccaagattgtgtcattgcactgcagcctggtcaacaagagcaaaactctgtctcaaaaaaaataagtaaataaaataaaaaataaagatattcactgaacctgttactatgatatatttaagcaagacagggtgaacctaaaaattagagatcattgaagaccaaagtaacaacatgtggtcattatttctcaaattgaagtacataaaatatataaaataaataaatttaattgcatgcttaggtaagaaaatattgataaaaatgattgaatatttttatcttatttcataattctaagcagggatttatcacaatatgaaaactagattattcatgtaatcaaaataaaagacaatttttattctaattttaactcagaaaatattttgcttatttaacaattttactgaaaggtaaacgagttaaataggacagattataattacctaacattgctatggtaacttatgtacaaatagctgttcgtcactgaaagtaaaaaaagtaaccagcactgaaacttaagatggatcatacaacagaaattagtaccaagttaccttatcttataatattatgttattaaaatgacattttaaaacaacaccaaaaattaagttggggctatacaaagtgtgcagaaaagatttcatataacaggctagagaattccatccttagaaagggctgcatgcaaggctggcccttggctggtgtttaggaaattgaaattaggagggtttccaccattccctgagaagagtggctcactgtgtctaaagtgtttatagaaacagtgtgttttctctgaacagctgctttccttgtaagagtctggaatttgggtacatgagagggagagtaacctccatagaaaaacttgggcacttagtctctaatgagactctagtactggtagacatcgctgcacatatgttgtcaaaatgtgagcctgggagaattaagcagatcctgggaactccacaggacagaactcctggagrcttgtgcctcgtttcctccagaattgaccacatgcactttttcctctactaattttgcttgtcccttttcttgttatcaattaaagatctgagtatgactatttgctgagtcctgtgagtccttctaatgaaccaacaaacctggggtggtcttgggaaacct

SEQ ID NO: 26162 - DNA, 559 bp, Homo sapiens
tgaaccttgaaattctgtgacttctccccccgccccsaaatctctggcaaagtttggggtttgtttttttttttttgaccttttaatacattggatgtacattaacaacaatatacctttccaaattcttctttcttttttcctaaattttaatctgaaaagatttgcttttttaaactctctttttttttaggttggcagtcaacaatcacctttttaaaaactatgcttgattttgttcatatatatatattttattcattaaaacatagtttcaaccccatatggtaactggctcctgagaatagggaaactagtccccaagcttcagcctccccacaaaccttgtatcaacatttttactgatgagtaataaaattaacagatttgagctgtaacattctgaacactggaaaaagcattactgaactgtaaaatagacctgcagagaaatctggcagaggaggaggagtgtgcgttagcctgtgacaatgaggcactgacttactatgcactattttaacagagaattgaatagttttgctatttagatatttta

SEQ ID NO: 26163 - DNA, 484 bp, Homo sapiens
tgggctgtgagcctcttggtccgcttcttcatgaagatcagggactccttcccgctgcccatcaggtccagaaggtgggacaggttgcttcggaaaactgcctggaggggtccagacctcagctctctgcccctcaacctgcggccaccatcattccccgctggcctggggacasgggctggcaccctcccatgaggctggggcctgctccagcttctcctgcactttctaaggggctcattagcccccaaaaccagggagccctgcccgccctgtcaacacaccctccccagcccagctctaaccatgggcccctagcccttccacggaggtggccaaccatagcagtttccaggttcccagccatgacagggaggcagtgagggtggtggtcatagccaggactccgatggcaggggacagacgtggccaccacagcaactatgcgcctcgaacccattaattcaattgtaaacctcagatg

SEQ ID NO: 26164 - DNA, 484 bp, Homo sapiens
tgggctgtgagcctcttggtccgcttcttcatgaagatcagggactccttcccgctgcccatcaggtccagaaggtgggacaggttgcttcggaaaactgcctggaggggtccagacctcagctctctgcccctcaacctgcggccaccatcattccccgctggcctggggacaggggctggcaccctcccatgaggctggggcctgctccagcttctcctgcactttctaaggggctcattagcccccaaaaccagggagccctgcccgccctgtcaacacaccctccccagcccagctctaaccatgggcccctagcccttccacggaggtggccaaccatagcagtttccaggttcccagccatgacagggaggcagtgagggtggtggtcatagccaggactcygatggcaggggacagacgtggccaccacagcaactatgcgcctcgaacccattaattcaattgtaaacctcagatg

SEQ ID NO: 26165 - DNA, 484 bp, Homo sapiens
tgggctgtgagcctcttggtccgcttcttcatgaagatcagggactccttcccgctgcccatcaggtccagaaggtgggacaggttgcttcggaaaactgcctggaggggtccagacctcagctctctgcccctcaacctgcggccaccatcattccccgctggcctggggacaggggctggcaccctcccatgaggctggggcctgctccagcttctcctgcactttctaaggggctcattagcccccaaaaccagggagccctgcccgccctgtcaacacaccctccccagcccagctctaaccatgggcccctagcccttccacggaggtggccaaccatagcagtttccaggttcccagccatgacagggaggcagtgagggtggtggtcatagccaggactccgatggcagrggacagacgtggccaccacagcaactatgcgcctcgaacccattaattcaattgtaaacctcagatg

SEQ ID NO: 26166 - DNA, 1109 bp, Homo sapiens
ccaagtaagaagatgggagacagaaaaagacttaatgttaaaaacatagggtagatgcagtgactcatgcctgtaatcccagcactttgggaggccacagcggtctgatcacctgaggcgaggagttcgagaccatcctggccaacatggtgaaaccctgtctctactaaaaatacaaaaaattaactgggcatggtggcatgcacctgtaatcccagctacttgggaggctgaggcaggagaatcacttgaacccaggaggcaaaggttgcagtgagccaagatggcaccattgcactccagcctgggcaaaaagagcgaaactctgtcccctccccaaaataaaatacatamaaataataataataagactccttagttgaagaagtgccttaatcctcagataaacatctttgaagctaatactgttccacctgaatatttttcttcagtctaccacaaattagccacaattaagtcggaagaaaagcataagctttaagaatcaaataaataaagccgacctgagaattatccatgaagaaaactttgtaggattttactgacattttgaaatgcctgcaacaaacagatcagaaacctactacatttttttgagggaattattttgtcaaagaagcaacgaatcaagtataagaaacacttggacgtttttacttcaatcctttgtgtttagagttgcacaagtaagaagagcatgataaagactatactccaccaaactgatcgttttccttccaaagtacactcacttcagatatgcctatagagggtaacaaacaagaaggagtatctgagaagacaaaacaagaagtcaaagaacaatgcatgaagagggaaaattaggatggtctgattaaggtgtttctccagcaaagtagaagttcctataatgtctggactccaacattttattattattctggaaaagtgatttcggtgtgtttctcattctccactttgccaagtggggctttttgtcaaggttattcatccccttctcctctgtggaagtgcacagatataaaatgagacatataaggagatagacaaaatgtcttttggtttacgggttatcagacaataag

SEQ ID NO: 26167 - DNA, 1109 bp, Homo sapiens
ccaagtaagaagatgggagacagaaaaagacttaatgttaaaaacatagggtagatgcagtgactcatgcctgtaatcccagcactttgggaggccacagcggtctgatcacctgaggcgaggagttcgagaccatcctggccaacatggtgaaaccctgtctctactaaaaatacaaaaaattaactgggcatggtggcatgcacctgtaatcccagctacttgggaggctgaggcaggagaatcacttgaacccaggaggcaaaggttgcagtgagccaagatggcaccattgcactccagcctgggcaaaaagagcgaaactctgtcccctccccaaaataaaatacatacaaataataataataagactccttagttgaagaagtgccttaatcctcagataaacatctttgaagctaatactgttccacctgaatatttttcttcagtctaccacaaattagccacaattaagtcggaagaaaagcataagctttaagaatcaaataaataaagccracctgagaattatccatgaagaaaactttgtaggattttactgacattttgaaatgcctgcaacaaacagatcagaaacctactacatttttttgagggaattattttgtcaaagaagcaacgaatcaagtataagaaacacttggacgtttttacttcaatcctttgtgtttagagttgcacaagtaagaagagcatgataaagactatactccaccaaactgatcgttttccttccaaagtacactcacttcagatatgcctatagagggtaacaaacaagaaggagtatctgagaagacaaaacaagaagtcaaagaacaatgcatgaagagggaaaattaggatggtctgattaaggtgtttctccagcaaagtagaagttcctataatgtctggactccaacattttattattattctggaaaagtgatttcggtgtgtttctcattctccactttgccaagtggggctttttgtcaaggttattcatccccttctcctctgtggaagtgcacagatataaaatgagacatataaggagatagacaaaatgtcttttggtttacgggttatcagacaataag

SEQ ID NO: 26168 - DNA, 1109 bp, Homo sapiens
ccaagtaagaagatgggagacagaaaaagacttaatgttaaaaacatagggtagatgcagtgactcatgcctgtaatcccagcactttgggaggccacagcggtctgatcacctgaggcgaggagttcgagaccatcctggccaacatggtgaaaccctgtctctactaaaaatacaaaaaattaactgggcatggtggcatgcacctgtaatcccagctacttgggaggctgaggcaggagaatcacttgaacccaggaggcaaaggttgcagtgagccaagatggcaccattgcactccagcctgggcaaaaagagcgaaactctgtcccctccccaaaataaaatacatacaaataataataataagactccttagttgaagaagtgccttaatcctcagataaacatctttgaagctaatactgttccacctgaatatttttcttcagtctaccacaaattagccacaattaagtcggaagaaaagcataagctttaagaatcaaataaataaagccgacctgagaattatccatgaagaaaactttgyaggattttactgacattttgaaatgcctgcaacaaacagatcagaaacctactacatttttttgagggaattattttgtcaaagaagcaacgaatcaagtataagaaacacttggacgtttttacttcaatcctttgtgtttagagttgcacaagtaagaagagcatgataaagactatactccaccaaactgatcgttttccttccaaagtacactcacttcagatatgcctatagagggtaacaaacaagaaggagtatctgagaagacaaaacaagaagtcaaagaacaatgcatgaagagggaaaattaggatggtctgattaaggtgtttctccagcaaagtagaagttcctataatgtctggactccaacattttattattattctggaaaagtgatttcggtgtgtttctcattctccactttgccaagtggggctttttgtcaaggttattcatccccttctcctctgtggaagtgcacagatataaaatgagacatataaggagatagacaaaatgtcttttggtttacgggttatcagacaataag

SEQ ID NO: 26169 - DNA, 1109 bp, Homo sapiens
ccaagtaagaagatgggagacagaaaaagacttaatgttaaaaacatagggtagatgcagtgactcatgcctgtaatcccagcactttgggaggccacagcggtctgatcacctgaggcgaggagttcgagaccatcctggccaacatggtgaaaccctgtctctactaaaaatacaaaaaattaactgggcatggtggcatgcacctgtaatcccagctacttgggaggctgaggcaggagaatcacttgaacccaggaggcaaaggttgcagtgagccaagatggcaccattgcactccagcctgggcaaaaagagcgaaactctgtcccctccccaaaataaaatacatacaaataataataataagactccttagttgaagaagtgccttaatcctcagataaacatctttgaagctaatactgttccacctgaatatttttcttcagtctaccacaaattagccacaattaagtcggaagaaaagcataagctttaagaatcaaataaataaagccgacctgagaattatccatgaagaaaactttgtaggattttactgacattytgaaatgcctgcaacaaacagatcagaaacctactacatttttttgagggaattattttgtcaaagaagcaacgaatcaagtataagaaacacttggacgtttttacttcaatcctttgtgtttagagttgcacaagtaagaagagcatgataaagactatactccaccaaactgatcgttttccttccaaagtacactcacttcagatatgcctatagagggtaacaaacaagaaggagtatctgagaagacaaaacaagaagtcaaagaacaatgcatgaagagggaaaattaggatggtctgattaaggtgtttctccagcaaagtagaagttcctataatgtctggactccaacattttattattattctggaaaagtgatttcggtgtgtttctcattctccactttgccaagtggggctttttgtcaaggttattcatccccttctcctctgtggaagtgcacagatataaaatgagacatataaggagatagacaaaatgtcttttggtttacgggttatcagacaataag

SEQ ID NO: 26170 - DNA, 1109 bp, Homo sapiens
ccaagtaagaagatgggagacagaaaaagacttaatgttaaaaacatagggtagatgcagtgactcatgcctgtaatcccagcactttgggaggccacagcggtctgatcacctgaggcgaggagttcgagaccatcctggccaacatggtgaaaccctgtctctactaaaaatacaaaaaattaactgggcatggtggcatgcacctgtaatcccagctacttgggaggctgaggcaggagaatcacttgaacccaggaggcaaaggttgcagtgagccaagatggcaccattgcactccagcctgggcaaaaagagcgaaactctgtcccctccccaaaataaaatacatacaaataataataataagactccttagttgaagaagtgccttaatcctcagataaacatctttgaagctaatactgttccacctgaatatttttcttcagtctaccacaaattagccacaattaagtcggaagaaaagcataagctttaagaatcaaataaataaagccgacctgagaattatccatgaagaaaactttgtaggattttactgacattttgaaatgcctgcarcaaacagatcagaaacctactacatttttttgagggaattattttgtcaaagaagcaacgaatcaagtataagaaacacttggacgtttttacttcaatcctttgtgtttagagttgcacaagtaagaagagcatgataaagactatactccaccaaactgatcgttttccttccaaagtacactcacttcagatatgcctatagagggtaacaaacaagaaggagtatctgagaagacaaaacaagaagtcaaagaacaatgcatgaagagggaaaattaggatggtctgattaaggtgtttctccagcaaagtagaagttcctataatgtctggactccaacattttattattattctggaaaagtgatttcggtgtgtttctcattctccactttgccaagtggggctttttgtcaaggttattcatccccttctcctctgtggaagtgcacagatataaaatgagacatataaggagatagacaaaatgtcttttggtttacgggttatcagacaataag

SEQ ID NO: 26171 - DNA, 1081 bp, Homo sapiens
ctgttgcaactactcaaccctgccactgcagctgtagacaacatgcaaatgaatgggtatgcctgtgttccagtggaactttatttggaaaacagtcagtgggttagatttggcccacaggccatagtttgttacccctggcctgaaggcctttgaatcacaagcctggtgtaagggtgggagacggagtggaaaggtagtgatggagcacgaggtggtaattgctgcggcaaactgccaagtaggaacttacctctctgtggtggatgttctcaactcccagggtgcccttcctgtaaaagcaacagatcaaaccatgcctctgggtgcaagtcttggagaacctgaactatgcagttcagagtcctgagactccggctgctgccacagcttttctggctatcagtggagaaagtgctggtatccgttagcccactgggggtgggctttcaggttatttcakcagcatttatgtgtgatgggggactattatgcagataatggtctgcattcaacagcactagaatcccaagataaaaccagaacttctcaaactgggttccaaagaacactagtgttccctgggatgccagtgggtgtgccactcaaaaagcgttgtggaaacagatggatttgaaatgtcaggataaatttactatatttctttactaaagaatcttcattttttaaaaaatctttaaagacactcatggttttcaattctcagtttaaataccttgtactcagagaggatttctctgacagcccaattagctaccgggtcactgtatgccccacctctctcatttacttgtctgcatattctctaatatttgtttttgtgctccttttcttcttccatcatggttggaatcttatctgtcttgcttactctttttccatactacctaaagcactgtctggtacatggtaggtgctcaataaatgtttgttgattgactaataaaatgaatgtgcatagtatattaataagtttgagacataatatatgtcattttgaaaccatcttggaaataaaaatttttttggcaaaacccactagtatttcataggacattag

SEQ ID NO: 26172 - DNA, 1081 bp, Homo sapiens
ctgttgcaactactcaaccctgccactgcagctgtagacaacatgcaaatgaatgggtatgcctgtgttccagtggaactttatttggaaaacagtcagtgggttagatttggcccacaggccatagtttgttacccctggcctgaaggcctttgaatcacaagcctggtgtaagggtgggagacggagtggaaaggtagtgatggagcacgaggtggtaattgctgcggcaaactgccaagtaggaacttacctctctgtggtggatgttctcaactcccagggtgcccttcctgtaaaagcaacagatcaaaccatgcctctgggtgcaagtcttggagaacctgaactatgcagttcagagtcctgagactccggctgctgccacagcttttctggctatcagtggagaaagtgctggtatccgttagcccactgggggtgggctttcaggttatttcatcagcatttatgtgtgatgggggactattatgcagataatggtctgcattcaacagcactagaatcccaagataaaaccagaacttctcaaactgggttccaaagaacactagtgttccctgggatgccagtgggtgtgccactcaaaaagcgttgtggaaacagatggatttgaaatgtcaggataaatttactatatttctttactaaagaatcttcattttttaaaaaatctttaaagacactcatggttttcaattctcagtttaaataccttgtactcagagaggatttctctgacagcccaattagctaccgggtcactgtatgccccacctctctcatttacytgtctgcatattctctaatatttgtttttgtgctccttttcttcttccatcatggttggaatcttatctgtcttgcttactctttttccatactacctaaagcactgtctggtacatggtaggtgctcaataaatgtttgttgattgactaataaaatgaatgtgcatagtatattaataagtttgagacataatatatgtcattttgaaaccatcttggaaataaaaatttttttggcaaaacccactagtatttcataggacattag

SEQ ID NO: 26173 - DNA, 1186 bp, Homo sapiens
ctgtagtccccctctcaattttctccacaagtctagatccaattttactagactgggaaaaaaacagtccatcccctcgcactttgagtagtgcccctgatctcacagaaatagagtgcttatgccctgccagactgaaagaacaagcccataacattttatttcttagcctctaaagaataagacagaacctttccaaactcatgagccaagagctcaggacacagctcatagcccaaggaaaccatattgccaaaaataaatttgttcttccagtcatgcagtttgaacactcactagagatggtccactggttaaataaaagacattattaaatttgaagttgttaatgaatgactgaagggagcactaatcacaaacttcaattactaaaaatggttatataacaccaaaaatagtgaccagccgctctctgtcttcacacaagaggaaacaggcagaaactgcatgattagaaatttagtataagttgaaggaaaacatttcctggagaggttgaaatgagttcataagaaagaagtgttttagaagactatgggctgaataactatgatatttgtttcaataatggtgggggttggcatggaaatactgaagacatataagaaagacgtctgctatcactacagaagctgggtggtaggtaatgtggttttgtaacaaaatgttaagatataaaataaamcaaaataaaaaaataaatggcatatactattttctgactggagtatcttagatggaaccttgaaaacaacctcaacaagatctttgctgagagttctccagccccagaatttgacaaatgtcccaaccacacattgagtcttatataatgaattgtcaaggatatcaatgatcctcctcggtaaaaagggtattcacggtctagaacaaggtaaagatagaatgtagtctgtttttcatttatttggtagatgtttgttgagcatttgctatgtaccaggaactgcgctaggtgctacgaatacatagacagcatgtatacagacagtccttgttcttacaaagcttcgaagttagttggggagggatgtattgtgcagagtcacccagatataaaagtgcaaccaggaataggtgccgggtttattgtgacatgtgagcataaaatagagttatttgatgtgaatcagaaaaggatccc

SEQ ID NO: 26174 - DNA, 620 bp, Homo sapiens
tgaaacaagggattggagaggttttaaaagcgagaatgggagaatgataggccatctgtgtttgttaattggcttttccccaaggaaaagtaaactttctcttatcttcatgacaggaggcactgttaccamtgaagttgggctcctaccctctctaggacactgggaggtaggggcattattactttccttgatgattacatttcagaggaatggcttccaggtccttgaggaagacattcctaaactgtaaaactggagaggggctttttaaaaatgtacaactcagcgcagtggcccaagcttgtaatctcaagcactttgggaggccaggctgagaggatcatgtgagtccgggagtttgagaccatcctgcgcaacatggtgagacctcatctcttaaaataaataaattaataataacaataataataatagaaaacaaaaatttacaactccaagggccagagaaggaaattacaatgacaagttttctaaagtaaatgctctaagaaaagggagggctgtagcctggcatcaggaaggaggctgtctaaagtttagtaaatctgagggaaactttgaggccctcttggacacaaggatgaagggaaaaagag

SEQ ID NO: 26175 - DNA, 620 bp, Homo sapiens
tgaaacaagggattggagaggttttaaaagcgagaatgggagaatgataggccatctgtgtttgttaattggcttttccccaaggaaaagtaaactttctcttatcttcatgacaggaggcactgttaccaatgaagttgggctcctaccctctctaggacactgggaggtaggggcattattactttccttgatgattacatttcagaggaatggcttccaggtccttgaggaagacattcctaaactgtaaaactggagaggggctttttaaaaatgtacaactcagcgcagtggcccaagcttgtaatctcaagcactttgggaggccaggctgagaggatcaygtgagtccgggagtttgagaccatcctgcgcaacatggtgagacctcatctcttaaaataaataaattaataataacaataataataatagaaaacaaaaatttacaactccaagggccagagaaggaaattacaatgacaagttttctaaagtaaatgctctaagaaaagggagggctgtagcctggcatcaggaaggaggctgtctaaagtttagtaaatctgagggaaactttgaggccctcttggacacaaggatgaagggaaaaagag

SEQ ID NO: 26176 - DNA, 1434 bp, Homo sapiens
tgacatggggcagttggaaaaaaaaaatgttcctcttaatggtttatgactatcctgtaatgcgggtagatgttttacttggaagtcagaaaaatagaaaaaaaccccaaaaacctgaagacccatcatccagacaaccgacacacctgtaatcccaacactttgaggggccgaggcgggaggcatttttatttttctctgtcttcccatttctctctcctccttttcatgtttatatagtttttagtttaatgacttttggaaaggaagcgaattctattttccgccaaaaggagatcatgyggaaaattgctctagaacgttcctggctgtgtgcgagttgctgataatgagaactaactccggaacaggcaggggctggaagggacaacaagggagagaaaccccagggccctatcctatttagagcacagggctgtcaaaccagggggaaaatgttcttaggtcaaagagaaacgtgaacagatggcgatggaaatgggttacaagagttatttctccccctgcctccctcccctccgcttttctttgttttaaattgagcataaacatacgtgaaaatttttaaaaagagatctttcttttagagcccaaaagcccctcttgaccctaacaggtgccagggatgcaggggaaagcctggggcggggtgactgcatttgttcctcgctagctccattctgcagaggtcgggttgggtttcttccaggacctcctgctcctcacagggtaggggcctagggctcccgaggggtcacaaagttgaactcgccaacccagctccctccccactgccggatcccctagtgaaccctgggggaggttcagcccagacccgtacgctggtccttatctgctcttccccttgtgccaaactagatgcaggtggcacaatctccatgttggggacagcaagactctggggactcatctggccctggccgggtgaccaagttacttaatttttcagatttttccacatcggaacagcagcagggagtcacagcacctccccgtggagccagtgttaggggtgcaggagccacagaagccagctgcccgcccgcccagcccataagcctgtgccccatctttaattttggagacccaaaagtgaggtttccaaatgaaagaattggctccattgggacccttctgcgctggggcagtcctgacgcttttgtgttatccttcaggggctccacgtggaaggcttatgctagagcgaaactacctcccaacaacattcagaacaaccagcctcccttgtcaagagccagttgtgcactgcaggaaatactcagaagcgcctgccctgtgctaggctcagttctaagggaactcaaatccagtgcctgacctcagggagtttaccttctagtcaggaagacaacgaacacacagacattagta

SEQ ID NO: 26177 - DNA, 744 bp, Homo sapiens
ctcctggcccaggcttcaggaagggcagcaccctgtccctcactscctcaccttttaagcccaggtccctatgccatgctgcttctgtagcttctctgcagctcagctgcccctgggtcagggcaaagtatcccagccattgagtcgtacttgctttcctgcaaccttggaggacttggagatcttgtctgcattattaataacagtgataatagctagcatctattgctcacttaacagatgcctggcactattctgagtgctttatatgaatgaattcatctcatctttacaagcctggtgaggtatgtaatgaaattgtccccactatggggagaggttagggacttgctggctgccacgcaagcagtaggtagtacagctaggatttgaatgcaggaagtttgatctcagagctcatttttttccccttggttttacaattatggcaaaatatatataacaaaaaaggcaccaccttcaccatttttaagtataaagttcagtggcatcagtacactcgcactgctgtgctaccatcaccactgtccatccacagaactctcttcagcttgcaaaactgaaaccgtcccctcgaaacaccaacttccctacttccccttcatcagcccggcaaccaccattctactctctgttcagagccctttcttatttatttatctgtagcaaccttacccaagaagtaggaacctcttcttttaatttcctgtctctggaacttag

SEQ ID NO: 26178 - DNA, 1011 bp, Homo sapiens
caggtcaggcccgctcatatctggcttggtggattataggttgtttttctgtgatgccaaagagaaataaggtcaatttgcaatctgtaaagttggacttgggccttatcaaacacagagctgggaggcagattagccagagaagcacctactctctgcccccactgagaagtctctgcccagactgagcgtctggcgtcagcagagccagcctgcccctgcagtgaagctgccagtgctctgggacarcctgactcaggtgctgctctatgcctgggtccggcgggtcacacagggcagcccctcaccctggcctgcagatgcctagctcagcttcagaggtggaggacccgggccgggttccctggccatggctccctttgcactgagaaattggccttcctgggcaaggtctgcacgccctcactgtttggctggggccggcgcagggcctcagttctcactagaggtgagggcactctcatccctcctgcagggggtcagagccctgcttccagctccaaggtcacactccccattgttcccaccattgagacatccctggtccccctctgagtgccaagtggaaccagagactcctcttgcccttgaggcacaacgcgagagtttttccagcacagctaacgagccacagctggtagtggcgcctcccaggagccacagaaaagacattatcctcagggatgttcaaaaataggctgaaaggaaggctctgagagtgtgggggtggaaggggtaatgaaggagaaaggaaagaggaaagagaagatcagagaatggaagataacgggcgtgggtgagtgacaccaaaaggcagagacagaacgtgcgagggcttccccatcatccactctgctctgtaaacctgaggcctcaccacctgggccttctcttgaaacagggaggctcagctctcccaacacggtgaccagaagccagggctggggaaggccaggaacaaagttggggtcaagcttgcaccaagccagg

SEQ ID NO: 26179 - DNA, 1011 bp, Homo sapiens
caggtcaggcccgctcatatctggcttggtggattataggttgtttttctgtgatgccaaagagaaataaggtcaatttgcaatctgtaaagttggacttgggccttatcaaacacagagctgggaggcagattagccagagaagcacctactctctgcccccactgagaagtctctgcccagactgagcgtctggcgtcagcagagccagcctgcccctgcagtgaagctgccagtgctctgggacagcctgactcaggtgctgctctatgcctgggtccggcgggtcacacagggcagcccctcaccctggcctgcagatgcctagctcagcttcagaggtggaggacccgggccgggttccctggccatggctccctttgcactgagaaattggccttcctgggcaaggtctgcacgccctcactgtttggctggggccrgcgcagggcctcagttctcactagaggtgagggcactctcatccctcctgcagggggtcagagccctgcttccagctccaaggtcacactccccattgttcccaccattgagacatccctggtccccctctgagtgccaagtggaaccagagactcctcttgcccttgaggcacaacgcgagagtttttccagcacagctaacgagccacagctggtagtggcgcctcccaggagccacagaaaagacattatcctcagggatgttcaaaaataggctgaaaggaaggctctgagagtgtgggggtggaaggggtaatgaaggagaaaggaaagaggaaagagaagatcagagaatggaagataacgggcgtgggtgagtgacaccaaaaggcagagacagaacgtgcgagggcttccccatcatccactctgctctgtaaacctgaggcctcaccacctgggccttctcttgaaacagggaggctcagctctcccaacacggtgaccagaagccagggctggggaaggccaggaacaaagttggggtcaagcttgcaccaagccagg

SEQ ID NO: 26180 - DNA, 555 bp, Homo sapiens
cagcctcccgagtagctgggactacaggcacgggccaccacgcctggctgatttttgtatttttagtagaaacggggtttcaccatgttggccaggctggtctcgagctcttgacctcatgatccacctgcctcrgcctcccaaagtgctgggattacaggcgtgagccactgcacccagctggcaagaaactattgatgggaaaagaacagcatatttgaaatgcagccatttcgggaaacaaccaccacccagaacataggatcacattcagaggagacacaaagtaaacacagatgaggaaatgaaggtcttcgtggctcacaggcgataaccacgcagcctcctgtggcgcggtccccagctctccaatggcagggacagtctacgggtcgtgtgtccagacatcagttctggtcccaccctacactggcctggttccaccttctgattccgtcagaaggaggcgatggcctttgctgctgtctgttagctgaaagcatgggcagcccatccacgctgccccagggcactgacaagacctggcatggtggg

SEQ ID NO: 26181 - DNA, 595 bp, Homo sapiens
gggctggggctggggctggccaggtccctccaggatggcaggccttcaactagtctccttgagaaggccaaggttggaaataaagcctagtccctgaaaacaagggggagaaggtggcatctgtgttgacaccacccttgaatttccatttgtaatataacttttgtttgtatccattaagtcaactgccaaggtttgaatgtttgtcctctcccaaactcctgttgmaacttaatccccatggtgacagtaagaggataggaaatctgcctctgctattggagagttggaagctttgggatgtgattaggattagatgaggtcgtgagggtgggaaggagcagctttccaaggggagaaagggagggcttgacttgcaggctcagcctcctcactctgagatgcctgcacccccatgagaccttgcagagtccccaccaacaggaaggctctcaccagatgccgccccttctggagacttcccagcttccagaactgtaagaagtaagttcctgcacccccatgggaccttgcagagagtccccaccagcaggaaggccctcaccagatgctgccccttctggagacctcccag

SEQ ID NO: 26182 - DNA, 589 bp, Homo sapiens
cactagacactagaaggataactttaacatcatccagatgcatataacttctttcagtaaccatattctcccgaacaaactctgcaatgctttatacaaaagtctagacttattgcacagtttgttcaggaggatgtggctaatgaaataagttatttgcatctggatgatattaaagtgatcctatgattctaacagaagagttatagaagtcaatttcgttgacagggcatacagctgtcactgtatagtaagagatgaacaaacacacttctttatgttaaaggcaagtgtattcaatggaaaagcaacttttcctgagaggtaagaggcactttgccccagccctatttagcagcatcagttggttatcagcaaagataacctcagaatggcatgtgtgttcttcctgtggtggccctgcaaaggaactgttactgaataccaagaaagtgctacaattcaaagggactattaaacgaaagttctggtcaattgagctggctgtttggctagggarattataaaaatgaagagcacaagtttatgcgtagtttaataaaataaagttaaccaaaaaaaaaaaata

SEQ ID NO: 26183 - DNA, 625 bp, Homo sapiens
tcctttgtatctcacacaaagcctatcccacccgaggaggagcctgagagaaagtcacttcaattcaattttggtaatttagagattttgcttggcacgcagtctccttccaatacttgtctctataaacattgatcttctctacctctctgagggtctctacccttggtatgtcgctgttcctcatcatttagtagctgggaaatataaaggcagaagtcctaaatctgtggcaactttagaacttctaaatagtagagccctggaggtagtagcacagttggagggaggtggctggacactctaagttgtgtctacatagtacttaacacaagagtgagaaggtgtcaggtgtgtgaatcaaagaatgggctactgataagtgacttagccctgaggaagggtaatgaatagtgaccaggctccaaagaaaatgtgcccagtgccctaatccttgggtctctgcttaacmtcagcatgccttcagacacagaggaattgctttcagtgattgagttatcatcaatattctatctcagatggagggaaccaggatcttgaaaagacagaaaacttttatgactattattcttttgttcatgacatttatgtttctgaaatgcct

SEQ ID NO: 26184 - DNA, 593 bp, Homo sapiens
gatgatttctttagagtcagtgcatcctaaaggaagagttcctctgtgacctggaggaccgctccatccctccttgcctcctccacccaaccaccaagaaaggaaaagataagaaaccagaggccggagcttgatcccaaggtttactaaagcttgaaccagaaaagactgatacttatgtgagttctgaacccagaattgttggcacacataygatctttccagaaatatcaaatcttactgtgaggtgaaatcaaatctcatcagataaggcagcatggacatgtcacaactatctgttatagttacactcttgtaaataaatatgaaaaattatatctgggcttaaaacagtatttgatttttttaaatgtcttctatctaaattaaaataataaaaggtttgcaaagtacagttaccctgaagccctcaaataatgttatagctattagaaatccaaactttgaatttattaacacatatgtgtataagctactccttatacagcggtagacattttaaaaatcacctaaacaacaacaaaaacatcaattttgccacgtcaaccaccactgctttttctgtatgtaat

SEQ ID NO: 26185 - DNA, 607 bp, Homo sapiens
gatggagcgttgctttgtcgcccagactggagtgcagtagtgccatctcagctcactgcaacctccacttcccaggttcaagcaattctcctgccccagcctcctgagtagctggggctacaggtgcatgccaccacacccagctaatttttgtatttttagtagagatggggtttcaccatgttggtcaggcttgtctcgactacctgacctcaggtgatccacccgcctcggcctcccaaagtgctaggattacaggtgtgagccaccgcgcccggcaattactcagtgtgtaatgtgaaccacaggcactttgagttcgtggtctctaattactgacagagtcattcagggcaggtatcctcaattctcatttccagctgagaaagaatgagatttgggagacaaagtaacttggtagaaattacacagccaataaatgaaagttcctggatgtgaacacaggtttatcttctgactgagcmatattgcttcccattcttcttgctgtttttcaaagcaccgtttttgatgaggtaggtcctggggtcataaagagaaaggaattttgttcattttactcttccctggactgtgtgaaatattt

SEQ ID NO: 26186 - DNA, 571 bp, Homo sapiens
  misc_feature (1)...(571): n = A,T,C or G
ctggtggcaytaccattgctattttgccagtaattcagaatcagttgaaaacacagaaggtagcttacattcattcaaacatacatatgtgcatggaaagaaagaaatatttcctttggattactgtatttcagaatgccaagaacaccatgggattaatgtctagcctgagaatggagagaagaactaactttttatcgagtgttattttatgttaaaagaagcactactttttcattttccccagtcacttgcaccacatttatgaaattatgaaccaataaatatttttgagttcccactaaatcatttatagcacggaagacccacttcataaaagagatccaggctagaattttttaaattgtctacaataaagatcacatgagctgaaatttatgaatactggaggctttacaagttgaatcctgagcaagctggaagatctccactattccctgccacctaattttttgaggatgaaaaattgtccccacacnccaggaggtgagaattttatttccctgtaaaacaaaaagaagaggaacattgacctgtgagcaacccaaag

SEQ ID NO: 26187 - DNA, 579 bp, Homo sapiens
tttttttaactcttctttttcagtgctgccaaataaacagtgtgcttcattctcagtcctttgcattcatattacccagagataccaaatggcctctgcatacccatcagggttttacctgccttgaaggggtgattgcaaggcatatattactttttaggatgggaacagcctgggtaaaatgagagtcattcatgaaaattccatgcattttgcagaacttaacaaactgatcactcacaccttttctttttctggtcaaggtagtaagtggttttcaggatttggcctgagwttcatcagagtcccatgcatcgtgacaccctctattgctaggcttctaaaaccctgtgtattttcacaggtcctctgtggacagtgagctggactgacctcacaaccctccagtatgtgcagtggctgagaatgacccactcccagcaactttctgcagccaaggggttaatcctccctgagctgaagcctgacatggggtgagccacaacctccccctcacagctgttttagcatttcatgtgcctgacaagaagcatttacgtctgacctaaacctcacctg

SEQ ID NO: 26188 - DNA, 480 bp, Homo sapiens
  misc_feature (1)...(480): n = A,T,C or G
agcacctgggagactcagctctgccttgcccagcacctgagcacagtgcacatcagtccatggccctggatctggggtttcctcatttgtgaaaggtactgtgtcattactagcttcccctccagctccaaagttctgggatcagctacaagaatccttaaacaacaagttcttcccatgtgttttattttattttattttattttattttattttattttattttattttattttattatttgagacggagtctcactctgtcacccaggctgsagtgcaatggcgcaatctcagctcactgcaaccactacctcatggttcaagcaattctcctgcctcagcctgcagagcagctgggataacaggcatgcacccccnnnnnnnnnnnnnnnnnnnnnnnnnnnnnnnnnnnnnnnnnnnnnnnnnnnnnnnnnnnnnnnnnnnnnnnnnnnnnnnnnnnnnnnnnnnnnnnnnnnnt

SEQ ID NO: 26189 - DNA, 480 bp, Homo sapiens
  misc_feature (1)...(480): n = A,T,C or G
agcacctgggagactcagctctgccttgcccagcacctgagcacagtgcacatcagtccatggccctggatctggggtttcctcatttgtgaaaggtactgtgtcattactagcttcccctccagctccaaagttctgggatcagctacaagaatccttaaacaacaagttcttcccatgtgttttattttattttattttattttattttattttattttattttattttattttattatttgagacggagtctcactctgtcacccaggctggagtgcaatggcgcartctcagctcactgcaaccactacctcatggttcaagcaattctcctgcctcagcctgcagagcagctgggataacaggcatgcacccccnnnnnnnnnnnnnnnnnnnnnnnnnnnnnnnnnnnnnnnnnnnnnnnnnnnnnnnnnnnnnnnnnnnnnnnnnnnnnnnnnnnnnnnnnnnnnnnnnnnnt

SEQ ID NO: 26190 - DNA, 1193 bp, Homo sapiens
aatttcacttattattgtttttctctttataaatcacatttccgtattctccgtttttcaggtagaaagattgacagagtgcctaagaagaaaacctctcaatatatatttttctcattagagtcaaagatgagaagaccaagtcacccatttatgagaacacaaatctaatgaactgcccagagatttatcgtcagattataggaatgggaagggctttcggagttgtagaattcatcactcagtctccagagacacttcaactaaatcacttaggacaaacaaatatttgactcattttaagatttctctgagaaaagatttctcattccaacatgtgattgtttttgttgaaaagtttcccctcagcctagtcatggaattatgctcatttcccttatattgacccctacagggaattaacttattgtaataataatttgcatgtgtagcgcaaatctccccagacattctaaccccaaattaatttaagttaatgttgcagataaaggttttgaacctgactccataaagacttttactggcctatagaacatttacctctcttctggactacgtcatcacattgatgagccaatagtagttatcattaatggcataaagaatattgaggttcttttttttcarttgaaagacattgcattcagttgatgtgaaggacctcttcaaggagaactacaaaccactgctcaatgaaataaaagaggacacaaacaaatggaagaacattccatgctcatgggtaggaagaatcagtattgtgaaaatggccatactgcccaaggtaatttatagattcaatgccatccccatcaagctaccaatgactttcttcacagaattggaaaaaaaactactttaaagttcataaggaaccaaaaaagagcccacattgccaagtcaatcctaagccaaaagaacaaagctggaggcatcacactacctgacttcaaactatactacaaggctacagtaaccaaaacagcatggtactggtaccacaacagagatgtagaccaatggaacagaacagagccctgggaaataatgccgcatatctacaactatctgatctttgacaaacctgacaaaaacaagaaatggggaaaggattccctatttaataaatggtgctgggaaaactggctagccatatgtagaaagctgaaact

SEQ ID NO: 26191 - DNA, 1223 bp, Homo sapiens
gtggcaatgtaatgagctttagaatcgcacaattaaaaagaaatagtttataattcttgttccttagtaatgaagtcctggtttctctgacccaattatagcacaaggaaggaaaattctgtctaaggaaatggaaggcgatggcagtaatgaaatcttgagtctgtactatggaccagaccctgtccaagtaactcagacaaaacttacggcccctccttgcaaggaagagatgtactatggcaatatatttttccttttttaaaaagtaaataaaatatgtcccctgttactgtttatttctccaaagtacctttaacttttatgcttatacaatatgttaactgtagaagaatagaaaatttgggaaataaacctaagcaaaaaatcaaatcaaatcaaattacctatgaccagtgttgaagatttcatgtaataccttctactattatatttcttattaaagttagatcccttgagcatctgattggcccatagccacaggacagatgagctgtgtgttatccttcttgtgtgaattgtagccagggtcaggggaaaggacccaggtttctactgaattctatgtgtttgggtaggtagggagtgctcaggacaaagaaacctatgagaacctctggattcagaggagagtgaggaattgtacttgaagcagaccagcatgagaaacaagaatggtagtcaacacctagcagcaagctgggagctgggtcaagagactctgagttttttccttaatatataggccatgcagggctggcagcagagcaaataagtccctgatgactgggagaagctgaaatatttggaagtgcatttatccctgttaatatttttgagaaagcttgttatagcttaatcactacttttgattttcagatgtatatctgcctttaaaaaatatctctactatttcctactgaactgaccagtttatatcagttattttatagtttgtataacagacctacaatgtagatgttttacaagctaagttttcagatgggattagagaagttgttcagagaggctaagaattttgtccctgcttacatacctaagatgtggcagagctggatttccttgtctgtcttagcatcaataccactctaccttaatgataatgacttcgtagaaaaytggatacatggtaggacaaggacctccctccccagtcccgccctgtggttctttctttcccc

SEQ ID NO: 26192 - DNA, 1338 bp, Homo sapiens
catagctcatacagagccccttccttatcagatgcaggtctgatgagttccaggtgttaaatatctggggactcagggtctgttctggacatttccccacacaggtggatctggttggctcagaccacctgccaacattaggccacccatcctgaagcaagcccatcctgctctttctggatggcccttctagtcaggaaaaggagttggatactgagaaggccagtggttgggaggagatgaggtctgtgtgttcttgtggagcaagcaagaggctaacctggtatggactctcgtctttgttctggctcccctgatatgcctgtgcaaaggccttgagcatgtcatttctcctttctggtccttgttcacaacagaggtatgggcctcggctttcctgtcttcagaggtgagtaaatggtgaaatgattgccaattgccaaagagtctctaaaggggaagaaaagctaaagcaaaatagtgtgagatcagtttctgggctcatgaccgttttaatttattggttcagagtgaacagagaactctactcagccatgacttaataacttcctccttccaagctgcctgagatggtcatgtctccaggtaatgagctatatctgctcctgtggacttcatgtctgggtgttgttttctattttttaattcttcagtttttagtttttttttctctagatataaaataaagctattctcattgaagaaaatttgcaaactactgtaaagtacaaatgaaaaaagtatcatcattatatctccaatcaaaagcaactacttaaaatattttggaatatatttcttaccagggtgtttttcaatgcaccgtttaatagaattaatgttagaaaaatataataatgttagtgactatataatagtttacttatatataaagactattrgaaacctttccctcattaggtttttaagttgatccagttacattattttaaacaattgatacatacctttgagcataagtatttatgattatttccttaggagaaatttaaagaaggagcattgctggattaaagaagaaatatttccagctttcttccgtattacatataattctacctttatgttaccctaaaaatctaagttaaaagataggacaaaatataatgttttctatgtaaggaattggtatgatccttggtctgcaagtaggacccacccactccttgaagtttctctgaagaagaagaagtctatgctttcttttagctacccactgtggcaggggtgactgagatttcattttatttggttattagggagtagctgcatttagtgttgaatattgtggtggtg

SEQ ID NO: 26193 - DNA, 570 bp, Homo sapiens
cataatgtgcttaaccactgccttttaaaactttaaattaaataaaacattggggttgattcaatttggccatctgtgtgtgtttctttatagatacatgggctaaacaatactatttcacagtttatgcttttttaaagtgcttttacatccatggtcccacttctaatagcctttttaaggacaggtagagtacatggagggttastgaaaaggtcatttatccagaagttacctctctggcaaagcaaaaaaatcaggaattacgtcttaaaggcctttcagctgccagaggagatgtcacaaagtttcttgcaacttacttatgggagagatcttcaagaatatcactcttagactctgaactgaaatttgcatacgcttccaacatgttttattagctggctttgaagctcacaaaagaatggcaaagaaagaggctgctagattgaaggcaggcatactgaaagaagaaaaaggccaactgaaaactagatagtgagatgagaagaataaaacttcaagacatagcaaatctgggactgtctacttaccaaaggatactctagt

SEQ ID NO: 26194 - DNA, 829 bp, Homo sapiens
ttttatttaaatggattttattattccatttatctatccatatgtagacatatgtatatgcacacacacgcacacacacaaatgcttcagaatttacaaaacaaaacgcaaagcctactcattactttaaggcttcaaatattaaaatggacagtgtgatggtatgtatatagaacaatacactaatctctttttttttgctctttcataaaacttggtgttgaaaacagtgaagtactttgcagagaaaaagtcagcttttaattgtcatctcttatgcagtggagtggaagaaagagctcgttattctaactgaaagtaaaaatgagaaaaaatctaagctttggatttttcaggagtacctatctttctaattttcagtgcgacacataatacacagcagttatagaaactggagaaaacaactgctatttcttgaggctgctgtattttagagtgatgggggatactctggtgaaaactctgggcttgcggtagccttctgtgattrggcgcaggcagagtcgatggctgcatatgggaggtgattttaggctcgccgtttgcaatgcactttacacatgattaccagaaactgatatgataaggctccagtggcccctgaaagcacaggcaccagccggctttgcagagtctggcctctactcagcagatttgagattctttatatatatgcagaaaggcaggatattattttcagagcttttgttaatattagggtggccatataatatattgtccaacttggaattttttgggtgagtgaaagggggttattaataattttgccgtggcaatgtcacctatg

SEQ ID NO: 26195 - DNA, 829 bp, Homo sapiens
ttttatttaaatggattttattattccatttatctatccatatgtagacatatgtatatgcacacacacgcacacacacaaatgcttcagaatttacaaaacaaaacgcaaagcctactcattactttaaggcttcaaatattaaaatggacagtgtgatggtatgtatatagaacaatacactaatctctttttttttgctctttcataaaacttggtgttgaaaacagtgaagtactttgcagagaaaaagtcagcttttaattgtcatctcttatgcagtggagtggaagaaagagctcgttattctaactgaaagtaaaaatgagaaaaaatctaagctttggatttttcaggagtacctatctttctaattttcagtgcgacacataatacacagcagttatagaaactggagaaaacaactgctatttcttgaggctgctgtattttagagtgatgggggatactctggtgaaaactctgggcttgcggtagccttctgtgattaggcgcaggcagagtcgatggctgcatatgggaggtgattttaggctcgccgtttgcaatgcactttacacatgattaccagaaactgatatgataaggctccagtggcccctgaaagcacaggcaccagccggctttgcagagtctggcctctactcarcagatttgagattctttatatatatgcagaaaggcaggatattattttcagagcttttgttaatattagggtggccatataatatattgtccaacttggaattttttgggtgagtgaaagggggttattaataattttgccgtggcaatgtcacctatg

SEQ ID NO: 26196 - DNA, 614 bp, Homo sapiens
ttttatatgaatgccaggatcatatactttcatttcaattcattatttctggccttagcatgacctttaggttttatttttattgcccttttctcaaccatcaacaatcctggttttattgcaatagaacaataatgtaacatactttggaaaataaggtaattaagacttactttagtttcaacgtgtgttctttgaaccacaaagtcagtacatttttcaaagcatttagagtgtccaatcatcacatataaaaatgagcatgtgaaatgacataggtttgcaatataaaagtatagataatattttccttggcctctgtttctgttggaaatagaaggcatctttgactctctccattctgtaatcaacagcattttggggtcctggaactccatggtcccaaagcagaagatgtgaatcaaaactttgagcatcttttttataaatatttttatgtaatagttgaattacctttcgatattggtcatagatattattattgctctggaaaatagctgcatttaataactttttttcattttccactataaggaattaacagaagcaaaamccttggagagagagagagagagaataatctaaaaagtcat

SEQ ID NO: 26197 - DNA, 1157 bp, Homo sapiens
aaataacagcatagttattaaggcagtagcctcgttttgtccacttctcgtcattcctttttacttaaataacaattagatttgctcatcttaacccctttacagagctacagctagagcttttaagtgtttttggtggaacttccttaagcaattaactagtcctaataaaaagtgtgagaattagattgggaatgttggatacatatataactaaacaccgattaagtaagttatctaaaaaataaagtggcattcagatatgaaaaccaccataaaaatgagtgccaaaaactaatggtagtatttttgcttgtgcacaaagaagactagatcaaaatcaaatgaataattcctcagttttcaaaaaatattttatggtcttttgagggcataatattagtgcatgtaaaaactagaacsctttatgatttgaaaagaggagaagatgctgagagagacactcttggaagctgggcaggaaatccagccatgcattgcctcaaggtctgtcattagatcaaaagcactcaggggacgatggtctgtgtaagaggtcctaatgctattcacgaactctcctgacattcattagtttccaagacattgattcttattctttaactttttagcacatttatcattttcacttatacatgtatgctaatagcaatcttatgtgaacttttacctcttatatgaccagaattgattaaaaatgttggcaagtaagtttgttatttaatatctctgaactttctctattttacattgaatatttgctacattgtaagcattacagtatgactagattcttctttttttctaacttctcccctgttgataattattcttatataactataatgccatgttaatcaaactattgtttatgaattataacagtaaatgcccctggttaatagattaatcaacctgccttagatgcttttgaagtctgtgaggacattgcttaatttcacctacatataattacatatcatttgacactctctaaatcgagctgtttattgtagttctcaaaatttagtgtgaataaaaattatttgggaaaactattaaaatgcagacgtttaaatactagattatagatcctgtaaccttccagatactctgatttagttaagtgtagagtg

SEQ ID NO: 26198 - DNA, 1157 bp, Homo sapiens
aaataacagcatagttattaaggcagtagcctcgttttgtccacttctcgtcattcctttttacttaaataacaattagatttgctcatcttaacccctttacagagctacagctagagcttttaagtgtttttggtggaacttccttaagcaattaactagtcctaataaaaagtgtgagaattagattgggaatgttggatacatatataactaaacaccgattaagtaagttatctaaaaaataaagtggcattcagatatgaaaaccaccataaaaatgagtgccaaaaactaatggtagtatttttgcttgtgcacaaagaagactagatcaaaatcaaatgaataattcctcagttttcaaaaaatattttatggtcttttgagggcataatattagtgcatgtaaaaactagaacgctttatgatttgaaaagaggagaagatgctragagagacactcttggaagctgggcaggaaatccagccatgcattgcctcaaggtctgtcattagatcaaaagcactcaggggacgatggtctgtgtaagaggtcctaatgctattcacgaactctcctgacattcattagtttccaagacattgattcttattctttaactttttagcacatttatcattttcacttatacatgtatgctaatagcaatcttatgtgaacttttacctcttatatgaccagaattgattaaaaatgttggcaagtaagtttgttatttaatatctctgaactttctctattttacattgaatatttgctacattgtaagcattacagtatgactagattcttctttttttctaacttctcccctgttgataattattcttatataactataatgccatgttaatcaaactattgtttatgaattataacagtaaatgcccctggttaatagattaatcaacctgccttagatgcttttgaagtctgtgaggacattgcttaatttcacctacatataattacatatcatttgacactctctaaatcgagctgtttattgtagttctcaaaatttagtgtgaataaaaattatttgggaaaactattaaaatgcagacgtttaaatactagattatagatcctgtaaccttccagatactctgatttagttaagtgtagagtg

SEQ ID NO: 26199 - DNA, 1157 bp, Homo sapiens
aaataacagcatagttattaaggcagtagcctcgttttgtccacttctcgtcattcctttttacttaaataacaattagatttgctcatcttaacccctttacagagctacagctagagcttttaagtgtttttggtggaacttccttaagcaattaactagtcctaataaaaagtgtgagaattagattgggaatgttggatacatatataactaaacaccgattaagtaagttatctaaaaaataaagtggcattcagatatgaaaaccaccataaaaatgagtgccaaaaactaatggtagtatttttgcttgtgcacaaagaagactagatcaaaatcaaatgaataattcctcagttttcaaaaaatattttatggtcttttgagggcataatattagtgcatgtaaaaactagaacgctttatgatttgaaaagaggagaagatgctgagagagacactcttggaagctgggcaggaaatccagccatgcattgcctcaaggtctgtcattagatcaaaagcactcaggggacgatggtctgtgtaagaggtcctaatgctattcacgaactctcctgacattcattagtttccaagacattgattcttattctttaactttttagcacatttatcattttcacttatacatgtatgctaatagcaatcttatgtgaacttttacctcttatatgaccagaattgattaaaaatgtyggcaagtaagtttgttatttaatatctctgaactttctctattttacattgaatatttgctacattgtaagcattacagtatgactagattcttctttttttctaacttctcccctgttgataattattcttatataactataatgccatgttaatcaaactattgtttatgaattataacagtaaatgcccctggttaatagattaatcaacctgccttagatgcttttgaagtctgtgaggacattgcttaatttcacctacatataattacatatcatttgacactctctaaatcgagctgtttattgtagttctcaaaatttagtgtgaataaaaattatttgggaaaactattaaaatgcagacgtttaaatactagattatagatcctgtaaccttccagatactctgatttagttaagtgtagagtg

SEQ ID NO: 26200 - DNA, 606 bp, Homo sapiens
acactccacttctgattacaatttctgtgtaaggagtctatcgtgatataaagaaatacccaaagacttagtggaaaaatataatattcatttatttttgtcataattgattgaccattgagaaggcctatatatatatatacacacacacatgtatgtataatatacacacatacgtataattggctgagtttacatatgcagttatggtcagttgccaggtagatgggagggggctgtcctggatggtcttgctcatatctagctagtggctggactgttaaacagggtaccttgattttctccttgtaggttagctcagcttcttcatayagtaactaatttttattttgtaaatttaattttattttagactctgggtacatgtgcaggtttgttacatgaacatattgtgtaatggtggagtttgggcttctagtgtgcacataacccaaacggcgacttttgtacccaataggtaatttttcaaccctcacctccctctcaatctgcccctttttggaatccccagtctctattgtttccatatttatgtccatatatttccattgttgagctcccacttttttttattatactttatgt

SEQ ID NO: 26201 - DNA, 606 bp, Homo sapiens
acactccacttctgattacaatttctgtgtaaggagtctatcgtgatataaagaaatacccaaagacttagtggaaaaatataatattcatttatttttgtcataattgattgaccattgagaaggcctatatatatatatacacacacacatgtatgtataatatacacacatacgtataattggctgagtttacatatgcagttatggtcagttgccaggtagatgggagggggctgtcctggatggtcttgctcatatctagctagtggctggactgttaaacagggtaccttgattttctccttgtaggttagctcagcttcttcatacagtaactaatttttattttgtaaatttaattttattttagactctgggtacatgtgcaggtttgttacatgaacatattgtgtaatggtggagtttgggcttctagtgtgcacataacccaaacggcgacttttgtacccaataggtaatttttcaaccctcacctccctctcaatctscccctttttggaatccccagtctctattgtttccatatttatgtccatatatttccattgttgagctcccacttttttttattatactttatgt

SEQ ID NO: 26202 - DNA, 608 bp, Homo sapiens
aatttattatcattttgctgaatatactaacacatgctccaaaaatatttgggattttgattggcttcatgttaaaatcatggaaaaattcaaaaagattaaaacattttaatttattattggagagactcaatcgtcttgataactaaagactatacctccaaaaatgaacatcttattgcgctagtgggaaatggtgttaaggttttctgagtttagaataaggcatttctataccccagctagtttttaagagtttaacaaagaatggcagtatggattttcaactaatttccctgacctaagtgctctttttagtttgcggacaaaagagcaggaggaaacgagtcaggaagggaggaaatgggtgtgaatcatatatttgtatatttgaattggtcttgaattcctttctaccactattttttatatagttaaaaaagtctcacaactttgcagaatattaatcttataatttgcatgcttgattattgtgcatttaytaattcacttttgttctttattttgctaaccttcaaatatcctgaaattttttttcttctggaagccaaagaattgttattgtcataggctaggttttgggacca

SEQ ID NO: 26203 - DNA, 648 bp, Homo sapiens
ttatacagacacattttatatatataatatatatataatggaatgttattcagccctctaagaggagatcctgctatttgccacaacatggatggacctagaggacattatgctaaatgaaataagccagatacagaaaaatattgcatgatctcatttatgtgtagatttwaaaaaaaaaaaaaaggagttcaaatacacagagaatgaaacagtgggatgcagtgaggaagaggaaacagggaggtgtaggtcaaaggatacaaaacagcatgtatgtaagatgaataagtttagagatctaatgtaggaggaaagttaataaaaattgtattatattaggcgttttttgttaaataagtagatcatagctgctcttgtcacaaaaaggtaactaagtaagagggtagatctattaatctgctttactagagtaaccattttactatctacttttctagatctttttaaagaattctaattccatattgtctatctggccattttgcaagcacaagaacatactgatatgattagacatcatgattttcaattgctgccatttttgctttttaactttaaacttcttttagttaagcttattatgattcacctcatttgttgtgggctattgtacaggctattgtg

SEQ ID NO: 26204 - DNA, 648 bp, Homo sapiens
ttatacagacacattttatatatataatatatatataatggaatgttattcagccctctaagaggagatcctgctatttgccacaacatggatggacctagaggacattatgctaaatgaaataagccagatacagaaaaatattgcatgatctcatttatgtgtagatttawaaaaaaaaaaaaaggagttcaaatacacagagaatgaaacagtgggatgcagtgaggaagaggaaacagggaggtgtaggtcaaaggatacaaaacagcatgtatgtaagatgaataagtttagagatctaatgtaggaggaaagttaataaaaattgtattatattaggcgttttttgttaaataagtagatcatagctgctcttgtcacaaaaaggtaactaagtaagagggtagatctattaatctgctttactagagtaaccattttactatctacttttctagatctttttaaagaattctaattccatattgtctatctggccattttgcaagcacaagaacatactgatatgattagacatcatgattttcaattgctgccatttttgctttttaactttaaacttcttttagttaagcttattatgattcacctcatttgttgtgggctattgtacaggctattgtg

SEQ ID NO: 26205 - DNA, 446 bp, Homo sapiens
agtaagtgtgctgagtataatacattggatataaaaacaaaagtaaaatacagtcttgtttcttgtagaattagcaatggaatgccttgaaaaaggatttaagggaaaaaaaagaacagaatactgcaattggctttagatgcatagaatttgaaagtgattaagtctgcctgaggctgtagctacctggagctttgaaaaaccatcatatgyccaagttctttaagtcgtggagaacccttgacacataatacaaagcagattaaagtttatatttcctatgttgaatataatcatgtataattataggcatggtattacatgttatagacatttaattaaatattaatttcaacattaaattattttttaaatttagagtcattatgtacattttttagaatttcaagagttttggtagagctgcaaaagacttattaacctta

SEQ ID NO: 26206 - DNA, 446 bp, Homo sapiens
agtaagtgtgctgagtataatacattggatataaaaacaaaagtaaaatacagtcttgtttcttgtagaattagcaatggaatgccttgaaaaaggatttaagggaaaaaaaagaacagaatactgcaattggctttagatgcatagaatttgaaagtgattaagtctgcctgaggctgtagctacctggagctttgaaaaaccatcatatgcccaagttctttaagtcgtggagaacccttgacacataatacaaagcagattaaagtttatatttcctatgttgaatataatcatgtataattataggcatggtattacatgttatagacatttaattaaatattaatttcaacattaaattattttttaawtttagagtcattatgtacattttttagaatttcaagagttttggtagagctgcaaaagacttattaacctta

SEQ ID NO: 26207 - DNA, 552 bp, Homo sapiens
ggttcttgttgatgcatcactggttccaaaagccaatcacttaattctgagctcacattaaaagaaattacattttaaaaaataaacatcagtggaattggttgttggactttctttcctgcaaaagactttatcttacagagctatgactttgctctacaccaccacataccacacccttagtaggaacacttccactcacagcccttaatcatcttatttgaagctagaaccaaattaatcttctcaggaactaggaacaaaaaatgtcttcatgccgtttctattatgagataactatgctaaaacaaatgaaagaaaacaatggttattatcacctactcattaggtttccaattaaagaaaatcttcactctgacagactttgactagttcttctccattcttctgtttctgaaaagacgcttttcttaatcacaaaacctttgacaatttcagaatattgtgaaatgaagataacattagaatatamctcatagtgttttctgagaattaaaaaactgtagagaggttagaatataagtatcaggg

SEQ ID NO: 26208 - DNA, 1908 bp, Homo sapiens
ttacccatcaccgtaagtgatgactgacctggagacaccatgggccctgctcctttaccctcttcccagcactcctgccactcacttcccacctcatctgcccccatctccccattgtctttcttccctctctctcccagcaagagcccattagaaaccctccacagatacttcagtggcctctccaactgatgcctaagttgtcactaaataaatgagcccagggcagccacggtgctaggcccttcatatgggcgatctctattctgccacaggccacactgagatttacagccaggtttgccccacagccctgtcccccaggagctgggccgggcctcctgggcaggacaggccgagtgtgagcagagggctctgagaggggtgtgtctgtggtgctgcctggacccaaggccaggagccgcctctcttgctagcacttggcttcccgtttgtagcaaggcttcgtgcctgacctccctctggtcctcacagtggggcctcacatgcagccccaggcccggttttcccaccctgcagggcgacggagatgctctctgcaaatggtgtgtcaggaggacagtggctgctgccacccgtggcacctttttgtttgtgtttttctgcggcgttccatatgagagaagtcagagtgtgtgtggccactcatctcctcttgtcactgttttttgtccctctctagtaacttcaggtctgcattagcaggggaaggacaagctgctgtggcactacctgagtagacatcatttatatggggatgttcaggggagcaaggggggcatcccagagaggggtgttcctgagcagctcgtctctcctaggcctgtggacacccatgcaggttctggggatcctgaggaccccctgctcttcctctcccctgtgctacagggcttcttgggggccacgtggctctacccttgcctaccccctgactcatcgacccattttccttagcaacaggtctgagatgggatgttttctttgccatatcttgcctccagcatgtatctgcactgccttccaggagccgggctgtttctggcagcaggtccccatcagactcaagattttctgctgtcatctttttttttaagcttttaactgtatttttgtcttattctcaaagcaatatataacctttgtagaaaatctagaaggtatagtaaaatataggtgattaaggaaagaaactacctataatccccattatccagaggtaacaacttttttttttttttttttttttttactttttggcatcattcttgctagtctttttcatttttttggtcttatttttaacttttattttttaaaagaggataccataaaatcgaccttttttttttttttaatcacatgtatagatttgtgtaactatcatgccacgaagggccttcatgctgtcattttattttattcatttatttatttctgttttttttcttttctttttttagagacagggtctcactatgttgctcaggctggcctcaaactcctgggcttaaatgatccttccacttcagccycctgagtagctgggactacaggcacgggccaccacacctggctaattttttggatttctttttgtagaaatggagtctccctatgttgctcaggctggtcttgaactcctgggctcaagtgattctcctgcctcggcctcccaagcagctgggattataggcatgagccactgcacttggccacttgtattttctaattgcacaaataatttaagaataatattaacagcattcttgttatcagcagtgcaaggttcaagggatacataagaatatagtgcagacagtgaaaatccctcactctccacgccgtgccccttctcagggctggtcaccactcacagtagaggat

SEQ ID NO: 26209 - DNA, 778 bp, Homo sapiens
actggtcttggaactgaattctgcttgcatgcagacgtcccagggcgtcagaatttgaacttctgtttctgggctgggaactggatcagtcgtatcctaaactaataaatgatttggggtttgaggaatcttttctttttctctttaaactmatctcagaacaatactgaatcgtaaggtcgttgtcaacagcttgctcaatttgtccttttaaagaacctttccttcctggcttggccagctgcagcctcttgactcgaatgtgctgtcttggatctgctctggaattcagtctggcctcacatctcagctgactttataattcaaatgtaattgctgatgcacattcaaaaatcttcaggaaactataaatgcttattttagcttataaaagtggtgatatttatatttgaagaatgttaacatgactactagaaaaatgcaaatttatcatcctctaccatctaggactctgttagcaggtctcatctggggataaaggtttgaagagggttttgtctatttatcttggatcttaaaaagcacaaagtgccaaaacagggtgtgcaacatagtcggtaaaaataggagtccgaagtatgttttaatccaagacttagcgttgactaataaaacaaccatcctcgttattttctccctcatccttaaatagctataagatctgacagtatgtcccaaccatcattggcctctagtgagaatgagctactatgggccacagcccaccatccctgggagttcacatcacagattctgg

SEQ ID NO: 26210 - DNA, 519 bp, Homo sapiens
gcatgcctgtagtcccagctactcaggaggctaaggtaggagaatcacttgagcacaggtcttactctgggaggcagaacaagaccctgtttttgttygtttgtttgtttgtttctttgtttataaaaggaaacaagaaggaatatatatttgtactgtaatattttatacatgaaaaattggggtcagataaataaggaactggtaagtagttagctatttaggggaggggatgggaacttggtgggtgtaagacagtgggtgggagaaacaggaaggaaacttttcacaagacagtttgtcatattttattgtgtttgaacagcataaatatagcacatattcaaaaatctaaaaattttggaaaatccctatcaaaagccatgggaaatgcatgtttttaagtagaaagtatcccagacagtcttatatcccttattcttgctgtggagtttcagaatcaattctattacttaccagtttcgctaaaaatgaaactgaaactctgcatacttctca

SEQ ID NO: 26211 - DNA, 776 bp, Homo sapiens
cctgcaccttgcatggggattcggtaagaaggtagaaggaaggaggatcagtcaagtctgatgacttgaactgaataagggtcggactgggaggagcggggcagaccgtccctcagtagcagattatattttccaaagacrgcatcaaccatatcttccatcccacatacgtttctacaatttgaccttgccagtcctcccatcaaaaggggggtgtatgtcctctccccttgaattctgggtggtctaatactgcctcaatcaatagaatacagtggaagtgagattcagtgactttcaggctaggttataaaaggtgatccagcttccatctcgttggctggaacatttgcttttggagcccaaagctgccatgcaagaagtccaaccatcccgaggttggcaagctatgaggaagcccaggccacatggagaagccctgtgtaggtgctttgattccagcctcagctgaggtcccagctgacagccagcatcaacccccagacatgtgagggaagcagccttcacatgacccagctcccagccaccaagtcttcccagctaaggccccagacatcatggagcagacatcagccatctcctctgtgccttatctgaattcctgacctcacagattccacgagcacaatgaaatggttgctttaaactgctaagattttaggtaatttgtcacacctctcctctactctttttgataacctggctcctccaccaggcccttgaggaggctcagcccagtccttcaggcagggaca

SEQ ID NO: 26212 - DNA, 696 bp, Homo sapiens
agaaactgctaatggaaagttccttggttaagaacaatctttagtattcaggtgacaatttttttttcgtttgtttttttttttcttttttgagatggagtctggctctgtcgcccaggctggagtgcagtggcacgatctcctctcacgacaatctccgcctcccgggttcatgccattctcctgcctcagcttcccgagtagctgggactacaggcgcccaccatcacacctggctaattttttgtattttttagtagagacggggtttcaccgtgttagccaggatggtcttgatctcctgatccgcccgcctcagcctcccaaagtgctgggattacaggcgtgagccaccgcacccggctgacaaattttttttaatggtaaagaggacacatgatgatgtcaaataaggagatggtggccaaaaggcatggttgtttttggccagtggttcttaaatcgtgctgcacattaatatcaacgaggacttttttaaaaatccagatacccaggacatatcccaaaccaatgaaatcagaattgctggagtaaaaggcagaygccagtattctttaaagttctccatgtaattctgataatgcagccaaggttgagaaggactaatttaggccacagtaagaaatttaaattttagtctaattacataagcagcctttggaagataaagatttc

SEQ ID NO: 26213 - DNA, 1269 bp, Homo sapiens
tccagcaaccttctccttccatccatcttcctggccaaaactgagtcacaccaccacttctggctgtatttaaggctgtgaaatcaaatatccagcaaaaggagaggggaatgtcatactggcttaaacctaatgcaattctttaactgggtcatcttgaataaccttcccctaaacaaaatgagcaagaaagacgtaaggaagtaactgggtagatggcacccttgcctgtcttgtctagtcacagctttctactaacttttatagtcccttgcatcatattttacaataagaccttcccttgataatcaacaacaaggtcctttgctaataccctgtagccccagcattgatcaaattgcttatggcagtttcttgttctggaggatttttatcatgtccattagaggaagtatctctctactgggtaatgaaacttccagaccagcagatttcagctgcaatggtgagactgcatcatcaggcataaacatgagggtcatgcttacagtcatgccatggtgagactgcaacatcaggcataaacatgagattcatacttatggtcgtgccatggtgagactgcatcatcaggaataaacatgagggtcatccccacctccacccagagattcctgkgtcttttcccctcattatgggaggagacagcaccatataagataacctaaaaccattaatgtatttaccattgttttgctctcattatatctttgctcaaccaatcatcccaaaacaagagttatgtaagtgtgtgagaaataattttgacttcaaaaagggttcctcacactcaaaggaggttggatccttgctggtacagtgggaggagctccaggagttcagagacttttgtgcaaaacctggctctgcagctaggtaaccagctttgtgaccacggagaaaccatatcctctctctggatctgttttgtgctctgtaggatcggcatgttggaccagataactgcgaaggccgcttctagcttgcaacattttctgctaatttattaggatcatgcaactctaaaatcctgcggtcctattactttcagcgtttaaacttcttgttcttcttagtttgtcttcatttcagacactaaagatggatgtctcatttccactaaaaagaacgagctttcactttaattacctagaatgttgtagtagcatgtaaaaagactccccgtggtcgtcatgctatattatttacaacttctattttcaaacatttaaaaaaggaaggaaaagg

SEQ ID NO: 26214 - DNA, 512 bp, Homo sapiens
tccacccacagcagctggttgccactattttcatctgtgcccttcttcagagtctgcggggcttcctcagtggtttccttattctagccccatagtctgsctcatatttacctttaaattgcctctttttatgcaccataagaatgacctaaataaacttcctctttcactcatcagtatttttaagggaaaaattaggtccgtcacggttgaataacctgctggcccaagttcacacaattctgggactccttaatcctaatacatggtaatcttaacccaagagaggcaaaaaaacctgagaactgtggctgattgcaagacatgacatttgctttctaagcaatctgaacaattttatttgtctttggcttagactcctgaggtgggactctcaagcgtggcttagggaactccaaaactctgttcttacctttgtggcggttactgtcctattctgccgattttgatacattatttccatgtgtctgatatctaactctcccatgggg

SEQ ID NO: 26215 - DNA, 492 bp, Homo sapiens
tttatttgcttttggaaatgcttgtcccagatctgacaagtggccacatgtgaccagttatgatgaaatgcaggaaataacttacgataaccctgacttaagaatgtgaacatcctccagcatgcttaagtccagcctactgggttctttttggagtctaaggtcagctacagctttttgatccatagaacttgatgtccatttctggggaaggataatatggtttagaaattccattaaatggctagaatggttactgttctttttcaagtccaggtataaagacagaattaaatacttttccttgtcattatccatacttaactttcacagtttcatattattaaaaataaattgtgatttacctctaccaacttccaaaaagaaatcaaagcagaatgcaaaagcattgtcaatgcagtgyctcatgttgatgccactgtcctaagatcttccttgcaaagaaaggatgaatttttttctcagcaaatt

SEQ ID NO: 26216 - DNA, 1829 bp, Homo sapiens
ctckctctgatgctgtttgattccaggtggcagagccagggaggagggggacaggcacaggggtcccacaggagggtccgtgctgagcgccaaacttcaagatgagcagggccagcctcaagggccacagacggccatctggcccctccctctgtgtgatctgtgagtctgtgggagatggtctggaactgtcagaactggaaaggttaatcgtgggcacacagaggagctgggttcagagaaagaaggaagagaatccactcatctctgcccttcgtgcagtgcctggctcaggataaggtggggtgaggacaggcccagagacaggacggggagcgggccaggcaaagaaaggagggaagagcagagaagggagagccactcatctcaccaccttcccacaatgcctcgtaatcacaggatgacagggatgcgtggcaggaagaaagacagggtgatgagcgctggggccaccctggaagggcagagcccacgcctcttggagcaccggccagtggcagggagtgagtgtggcagggctcccccaggcttccaaagaacagctgggtggcgtcattgctggaggcacacctctccattctcaagccaggcacaggtccctacaactcctcacccacattcccttcgttgacataaatgtgagtctatggaggagtcccccttcccagatagaaagactgccacactcgcaaggtccttcagtgcaaggctgataacaccaggacctacagcactcaggcccgagatgtgagggtcgaaaggacccccaaaggcagctccgcagagcacaagggcttggtgtgtggagtggctgaagcccagtcacaaactcaggtgtggttgagttcccactttatttccacaaaatcttctttactccgcagacagttcctgcactggtaagaaagtccacttggttgttgttcggggtcttctccccctcccagatctcaccaggacctgactcgtgactgtggctgccgagggactcactgcccaagcccacgtgaccttgtcatggagccacctctgcagagccctggccacctcctagagttctccttgtgggatccctgggcctcttttcccttcctagtgaggaggggactcacgagaatcttcctcccccatcccagtctgtcttctttcctgtcataatcagttcccttccagcctcactcaaggactcagcataaccactccctttcacaggcttccagctttgggaaaaggaaagtcaaaaggtagagatggctattgctggcaacttctgctttggtttggccataaatgtcccctcgggtaagaaaatgtgaagcctacttgcctctgccaggaggccatgggaatacacagctcaacaaatgaccctgccctgcctgcactttcccccaacagaggaaagggattcatagaggatcacattatagagctgaatcttgaacacaaccttggaagggttaaggttcaggggccaatctatccaaggtcatagcagagctgaggttctggtgccaatctattcaaggtcatagcagagctgaggttctggtgccaatctattcaaggtcatagcagagctgaggttcagtggccaatgtattcaaggtcataacaaggctgaggttaaggggtcaatctatccaaagtcataacaaggtcaaggttcagcggccagtctatccaaggtcatggcagagctgaggttcaggggccagtctatccaaggtcatacatctggaaaatggcagtgcagggatggaaacctaagtatgccttgggtatacccagcttcacaaagggaaggg

SEQ ID NO: 26217 - DNA, 599 bp, Homo sapiens
atatactcccctcctctgtcccgtttcttcaaacttaccccctacaaatgggaatttgttccttccttctctctgttcccaaaacatttcatttaaatctaatttacaacatcttttcaatkaagatattatagtatacttgtttgagtatatgtctctctctgtactaagagaacagtgttaaaaggtatggacattaaatgcaggactcaatataaggtccggcaaagaataaacccttaatagctcttggatggaaataaaggatgatatgagattatgaatgtcctaaaggaatcaggcagaagaaaatctcttctcaattccatgagaactttcctaggtcttggttctctaaaccatggtgaaaatgaggatactagatattaagtgagtgactatttttggtgttgaaaattagagttctagaaaatatttcagatattataaaaattaatacatcataaaacataatgtccaacattttcttagccaattgcctagggttttatttttgttttgatgtactttttacttgtcttttataggtagagaatttttgttttgttttttaaaagtaaacatagcagcttcctccc

SEQ ID NO: 26218 - DNA, 643 bp, Homo sapiens
gttccctgcagcttaaagcccatcagtggtgccttgtcttcytcaggataaagtctacactctttaaaatggcacaaaagactgtgtccgtcatatcagtctcattcttcgcctagtacttaaatccaccaacaccaaaccacttctaattctgtgcaagcaccctatggtttcttgcctcaaggcttttgcttgtgacaaaaactctgtccttccacttcatcatccattgactgattagtgcttattcccctttgaagacgaagttcaggggtcatcacgaataatcctttgcagattttctttccatccactctattcatttgggatagaagtgccccctttgagtttccttacactttgtacacagctctgttactgccttttactatactctagcacctgtggtttactcatctttgaagtcccaacttctagtacttggaacatagcaggtacctaattaatgtttattaatgaatgaatggataagtccaaagctttccatgatttctcccctgcagcctcatcttaccaccaccacaagccctccaaaccacatgatctagccatactgaatgattccagtgtgccaagtgcacattgcttttgtacacctctgcttttgtatattgtttcttct

SEQ ID NO: 26219 - DNA, 643 bp, Homo sapiens
gttccctgcagcttaaagcccatcagtggtgccttgtcttcttcaggataaagtctacamtctttaaaatggcacaaaagactgtgtccgtcatatcagtctcattcttcgcctagtacttaaatccaccaacaccaaaccacttctaattctgtgcaagcaccctatggtttcttgcctcaaggcttttgcttgtgacaaaaactctgtccttccacttcatcatccattgactgattagtgcttattcccctttgaagacgaagttcaggggtcatcacgaataatcctttgcagattttctttccatccactctattcatttgggatagaagtgccccctttgagtttccttacactttgtacacagctctgttactgccttttactatactctagcacctgtggtttactcatctttgaagtcccaacttctagtacttggaacatagcaggtacctaattaatgtttattaatgaatgaatggataagtccaaagctttccatgatttctcccctgcagcctcatcttaccaccaccacaagccctccaaaccacatgatctagccatactgaatgattccagtgtgccaagtgcacattgcttttgtacacctctgcttttgtatattgtttcttct

SEQ ID NO: 26220 - DNA, 643 bp, Homo sapiens
gttccctgcagcttaaagcccatcagtggtgccttgtcttcttcaggataaagtctacactctttaaaatggcacaaaagactgtgtccgtcatatcagtctcattcttcgcctagtacttaaatccaccaacacyaaaccacttctaattctgtgcaagcaccctatggtttcttgcctcaaggcttttgcttgtgacaaaaactctgtccttccacttcatcatccattgactgattagtgcttattcccctttgaagacgaagttcaggggtcatcacgaataatcctttgcagattttctttccatccactctattcatttgggatagaagtgccccctttgagtttccttacactttgtacacagctctgttactgccttttactatactctagcacctgtggtttactcatctttgaagtcccaacttctagtacttggaacatagcaggtacctaattaatgtttattaatgaatgaatggataagtccaaagctttccatgatttctcccctgcagcctcatcttaccaccaccacaagccctccaaaccacatgatctagccatactgaatgattccagtgtgccaagtgcacattgcttttgtacacctctgcttttgtatattgtttcttct

SEQ ID NO: 26221 - DNA, 643 bp, Homo sapiens
gttccctgcagcttaaagcccatcagtggtgccttgtcttcttcaggataaagtctacactctttaaaatggcacaaaagactgtgtccgtcatatcagtctcattcttcgcctagtacttaaatccaccaacaccaarccacttctaattctgtgcaagcaccctatggtttcttgcctcaaggcttttgcttgtgacaaaaactctgtccttccacttcatcatccattgactgattagtgcttattcccctttgaagacgaagttcaggggtcatcacgaataatcctttgcagattttctttccatccactctattcatttgggatagaagtgccccctttgagtttccttacactttgtacacagctctgttactgccttttactatactctagcacctgtggtttactcatctttgaagtcccaacttctagtacttggaacatagcaggtacctaattaatgtttattaatgaatgaatggataagtccaaagctttccatgatttctcccctgcagcctcatcttaccaccaccacaagccctccaaaccacatgatctagccatactgaatgattccagtgtgccaagtgcacattgcttttgtacacctctgcttttgtatattgtttcttct

SEQ ID NO: 26222 - DNA, 643 bp, Homo sapiens
gttccctgcagcttaaagcccatcagtggtgccttgtcttcttcaggataaagtctacactctttaaaatggcacaaaagactgtgtccgtcatatcagtctcattcttcgcctagtacttaaatccaccaacaccaaaccacttctaattctgtgcaagcaccctatggtttcttgcctcaaggcttttgcttgtgacaaaaactctgtccttccacttcatcatccattgactgattagtgcttattcccctttgaagaygaagttcaggggtcatcacgaataatcctttgcagattttctttccatccactctattcatttgggatagaagtgccccctttgagtttccttacactttgtacacagctctgttactgccttttactatactctagcacctgtggtttactcatctttgaagtcccaacttctagtacttggaacatagcaggtacctaattaatgtttattaatgaatgaatggataagtccaaagctttccatgatttctcccctgcagcctcatcttaccaccaccacaagccctccaaaccacatgatctagccatactgaatgattccagtgtgccaagtgcacattgcttttgtacacctctgcttttgtatattgtttcttct

SEQ ID NO: 26223 - DNA, 643 bp, Homo sapiens
gttccctgcagcttaaagcccatcagtggtgccttgtcttcttcaggataaagtctacactctttaaaatggcacaaaagactgtgtccgtcatatcagtctcattcttcgcctagtacttaaatccaccaacaccaaaccacttctaattctgtgcaagcaccctatggtttcttgcctcaaggcttttgcttgtgacaaaaactctgtccttccacttcatcatccattgactgattagtgcttattcccctttgaagacgaagttcaggggtcatcacgaataatcctttgcagattttctttccatccactctattcatttgggatagaagtgccccctttgagttkccttacactttgtacacagctctgttactgccttttactatactctagcacctgtggtttactcatctttgaagtcccaacttctagtacttggaacatagcaggtacctaattaatgtttattaatgaatgaatggataagtccaaagctttccatgatttctcccctgcagcctcatcttaccaccaccacaagccctccaaaccacatgatctagccatactgaatgattccagtgtgccaagtgcacattgcttttgtacacctctgcttttgtatattgtttcttct

SEQ ID NO: 26224 - DNA, 1815 bp, Homo sapiens
tccctccatggaagaagggatgggcagaagagagtgtgggaggatgacagagagggagccgtcatcctggagcccaaagatttcaggcagtcactggttcttaactctggcacctgccaagtggagccgggcactcatcaccagatcttgctcctaaagtaatttaagatccttgagtgacagctgcaacattagcaggaagtattatttataccacattacattgaaggtgatgggagacaaccccagagcacagataacaaacacgggttctttgtggcaataatattaggttgaaaaaatatatattaacattcaagataaaggaaactacaaaatttacacttaattcaagccctcatttcctccccaacctacctgcttttcattcttccaattccttctcaaaccttcataatcattccagtcaacaactcctgagtactcaccaggtaggacattgggcatgagggatatatagatcaagaatgtcccaaccctcaaagagctacgtggccatacagctggccatgatatgttaagatatgtgttttacattatgatcctccaaacctgtgtttttcaacttttgtatgttacattgccatctagtacatgtgcatacactcttaactgaagtaaatgtttcaaaaagtaattgtcaccatcactatgtgtgatgtcctctgatatttcctatttctttttctgccagtgacccacccgacggatttcatgacccactaataagtttcagcctgagtttaaaaaacgttgactctgggggagcccgtaagaaagagtagtcagttcttactggggtgatcagagaaagcttcattaggagttgaatttgcactttgccttgaaaaataaaaaatgtttgagtggataaagtggccccaggagggcataattagagtgcagcattctcccaaatagatttagattataaataggcaaaataggcaagcccaaatatttaccatttgaaaaaaaaaaactacacatttaaaatccatttaactattttcactaaatctgaattcttagaatttgagaatgccaactaggcttagttagagacagtgaagaaaaaagtctaagttaaaacaactcaaaatatccttttccattcccagttctcttactaaatagctatgttatagaccatttctctagaagcctaactgtcctcacttaaaaaatgaaatggctttaaaaattggtgatttttttttttttttgagacagagtcttgctctgttgcctaggctggagtgcagtggtgcaatctcaactcactgcaacctctgcctccygggttcaagccattctcctgcttcagcctcctgagtagctgggactacaggtgcccgccaccgcgcccggctaatttttcattgttttagtagagacagggtttcacagcgttagccaggatggtctcgatctcctgaccttgagatccgcccgccttggcctcccaaagtgctgggattacaggcatgagccaccgcgtctggccaaaattagtgatttttaaggccctttcctggtctaagctcttcaaggtgataacccagttaatatcacctccattttgctcaaggggagccaggctgccagagtttagataagtgtttaatcatgctttggctgtctacttagattcctttatcaggtaaaataatttcataaaagttttacaggaagtaaaactgtgtatgaatccagggtattcttatgcatcctagatttctgttggacatttatgcttatttcctccatgatatcttgttcttctatctctct

SEQ ID NO: 26225 - DNA, 1815 bp, Homo sapiens
tccctccatggaagaagggatgggcagaagagagtgtgggaggatgacagagagggagccgtcatcctggagcccaaagatttcaggcagtcactggttcttaactctggcacctgccaagtggagccgggcactcatcaccagatcttgctcctaaagtaatttaagatccttgagtgacagctgcaacattagcaggaagtattatttataccacattacattgaaggtgatgggagacaaccccagagcacagataacaaacacgggttctttgtggcaataatattaggttgaaaaaatatatattaacattcaagataaaggaaactacaaaatttacacttaattcaagccctcatttcctccccaacctacctgcttttcattcttccaattccttctcaaaccttcataatcattccagtcaacaactcctgagtactcaccaggtaggacattgggcatgagggatatatagatcaagaatgtcccaaccctcaaagagctacgtggccatacagctggccatgatatgttaagatatgtgttttacattatgatcctccaaacctgtgtttttcaacttttgtatgttacattgccatctagtacatgtgcatacactcttaactgaagtaaatgtttcaaaaagtaattgtcaccatcactatgtgtgatgtcctctgatatttcctatttctttttctgccagtgacccacccgacggatttcatgacccactaataagtttcagcctgagtttaaaaaacgttgactctgggggagcccgtaagaaagagtagtcagttcttactggggtgatcagagaaagcttcattaggagttgaatttgcactttgccttgaaaaataaaaaatgtttgagtggataaagtggccccaggagggcataattagagtgcagcattctcccaaatagatttagattataaataggcaaaataggcaagcccaaatatttaccatttgaaaaaaaaaaactacacatttaaaatccatttaactattttcactaaatctgaattcttagaatttgagaatgccaactaggcttagttagagacagtgaagaaaaaagtctaagttaaaacaactcaaaatatccttttccattcccagttctcttactaaatagctatgttatagaccatttctctagaagcctaactgtcctcacttaaaaaatgaaatggctttaaaaattggtgatttttttttttttttgagacagagtcttgctctgttgcctaggctggagtgcagtggtgcaatctcaactcactgcaacctctgcctcctgggttcaagccattctcctgcttcagcctcctgagtagctgggactacaggtgcccgccaccgcgcccggctaatttttcattgttttagtagagacagggtttcacagcgttagccaggatggtctcgatctcctgaccttgagatccgcccgccttggcctcccaamgtgctgggattacaggcatgagccaccgcgtctggccaaaattagtgatttttaaggccctttcctggtctaagctcttcaaggtgataacccagttaatatcacctccattttgctcaaggggagccaggctgccagagtttagataagtgtttaatcatgctttggctgtctacttagattcctttatcaggtaaaataatttcataaaagttttacaggaagtaaaactgtgtatgaatccagggtattcttatgcatcctagatttctgttggacatttatgcttatttcctccatgatatcttgttcttctatctctct

SEQ ID NO: 26226 - DNA, 559 bp, Homo sapiens
tttgcatggcttattaaatgttccttacagcatctttaaaaagcgatttataacttttctattagtatacaggagcaaagatattgaaaatatttattcagtaattcagggcaaacctgaataaggacaagaggtgtttttcataagtcaatttgtgctcaatttacctgtcacagagttggttttcttctgttgagctgatctgaaacatttttactgattagggttttgcaacagaggatttcaaaatgcaaatgtatctacagcaagatgtgccaaggtaagaaaacttctagtttggggttctaggtagacaggtgtgttcccaactctaccttctcccgtttcctctttaattattcgtcagttggagttagatcctccaaagsttataactagtactttgaataaaacatggcctttgtgaaagttctaatttagtgtttcattttgttaggcaaatgtaatttaaaatgatcatttaaaaaataataatagttgaatagcaggcataagattttagccacacagaacagttatgcttaggtgtgaccctttt

SEQ ID NO: 26227 - DNA, 585 bp, Homo sapiens
gaaaatgagctcttacctaattcacacattctatttctgatatggttcaggtataatctctctgctctgacatctctaaccttttaatattatagagcccaaaatccctttgtctacaaaattctgatattttccacagagatactcccctatgtcaagcatctgtatatttaaacaatatatccagatattcacttgccttgtctcagtctatgtcagccttttcccagaaataatgaatgccactgattcactgaccaaatagcctcagtatgatgggaaaatttttatttcttaaaaaaaaamaaaacaaaactcagttatctcaaagtattattatgttgttagatcttatattaatttgcaaatttgaaattcttttggcaagtaaaatgcatattttatgcatggagacagaatctacccaaatatctcaattatagctagaaataatgataataaccctaaattgcaaacactttttagcacttgcattcacacaaataagatagaacatttataatgctaccattgtgggatctggatagactatttataaactaagttaattagtgggcaaagttc

SEQ ID NO: 26228 - DNA, 585 bp, Homo sapiens
gaaaatgagctcttacctaattcacacattctatttctgatatggttcaggtataatctctctgctctgacatctctaaccttttaatattatagagcccaaaatccctttgtctacaaaattctgatattttccacagagatactcccctatgtcaagcatctgtatatttaaacaatatatccagatattcacttgccttgtctcagtctatgtcagccttttcccagaaataatgaatgccactgattcactgaccaaatagcctcagtatgatgggaaaatttttatttcttaaaaaaaaaaaaaacaaaactcagttatctcaaagtattattatgttgttagatcttatattaatttgcaaatttgaaattcttttggcaagtaaaatgcatattttatgcatggagacagaatctacccaaatatctcaattatagctagaaataatgataataaccctaaattgcaaacactttttagcacttgcattcacacaaataagatagaacatttataaygctaccattgtgggatctggatagactatttataaactaagttaattagtgggcaaagttc

SEQ ID NO: 26229 - DNA, 585 bp, Homo sapiens
gaaaatgagctcttacctaattcacacattctatttctgatatggttcaggtataatctctctgctctgacatctctaaccttttaatattatagagcccaaaatccctttgtctacaaaattctgatattttccacagagatactcccctatgtcaagcatctgtatatttaaacaatatatccagatattcacttgccttgtctcagtctatgtcagccttttcccagaaataatgaatgccactgattcactgaccaaatagcctcagtatgatgggaaaatttttatttcttaaaaaaaaaaaaaacaaaactcagttatctcaaagtattattatgttgttagatcttatattaatttgcaaatttgaaattcttttggcaagtaaaatgcatattttatgcatggagacagaatctacccaaatatctcaattatagctagaaataatgataataaccctaaattgcaaacactttttagcacttgcattcacacaaataagatagaacatttataatgctaccattgtgggatctggatagactatttataaactaakttaattagtgggcaaagttc

SEQ ID NO: 26230 - DNA, 532 bp, Homo sapiens
tgaactttagaaaatgtatacagtaaacatattctatgttacctaacaatcccagcagggcttggggcagagccatgtaatcaaaaatatttmttcaataaagtatataatcacactaagtggcatagatcaagactagaaatcacttcacatcactgcaatccagattttcttgcccagaaggtacccaatttaccaaattattttcagttttcagaatattttaaatgttagacctgtagatataggttatgcaataatatatgataatttccaatttgtaagcataacttccattcagtgtcttgactacttgtttttactcttacatagcatgaatctgtattttccactttcatataataccattgtacacccattacctttgtgaaagctagttaattgcataatgagtaatatttatttttatgtatatctacattttattgtttaaatttacttttattatggtaacatcacaaaaataaatttatatggtgggttaactgagttgactgagaattagtaaatt

SEQ ID NO: 26231 - DNA, 587 bp, Homo sapiens
ccataattcctacacgttgtgggagggagggacctggtggaagatagtttgaatcatgggggcagtttcccccatactgttctcgtggtactgaataagtctcacgagatctgatggttttcatcaagtgtttccgcttttacatcttcctcattttcccttgctgctgccatgtaagaaatgcctttcacctcctgccatgattctgaggcctccgcagccatgtgaaactgtaagtccaattaaacctctttttcttgccagtctcgggtatgtcttttatcagcagcacgaaaacagactaatacactgaccttcagcttattcgtcacctcttcattttgagtaggtggaaaagtgagcagtactttttcaatggacttcacaatgtctctacccagaaagatgtaacttaaaatattagtgttttcacaagaccctttatactgactttttagaaggcatcctggtggtaaagctgtacaaaggcccaggcaagaaggaaaacrcaaagttacaggtggtctttagcaaaccacccacttttattatggagtcaagggaaccttctccaggtgttaacagca

SEQ ID NO: 26232 - DNA, 548 bp, Homo sapiens
gactcactaataaagattattctccttttgccatccaaggaaagtcttgcttcwataatcataaattcttattggcctctggataggattgccctcctcatttgcaaattttcagaaaattaaaaaaaaaaaaaaaacttggcaggttgtatggaaactagggatttccagaacatttcctaaacaaaagagtaaataattagtgctcttctaagtagaggaagaatttaagacagcttacataaataaaataaaataagcaagtgaagacactgagacaaaaaggaagtgattgttaaaaatatagggtcttaattgtcatagccaacagcaacttaaggatacatgatattaaatataatgtaaatcctagatgggattctggaatagcaaaagggcattaagtaaaaattaagaaaatctgaatagaatatggactttagttaatcataatgtgtcaatagtagtttattaattgtattgtaataaaatgtaccattttaatgttagatgttaatagaggaaactgagtatgagttataaaggaa

SEQ ID NO: 26233 - DNA, 627 bp, Homo sapiens
atgacaaaaaacaaattttaagatagttatgctctaatatattttctaattatgcaatatattaatgagtataaagtataaatttttcacactagttttagtcagtacttatcagttcacttctaaaaatagaagctaaaaaacaattagggtcgtgatatggttaggttttatatccccacccaaatctcatctggaattgcaatccccataatccccataatccccacatgtcaagggagaggccaggtggaggtaattgaatcatgggggcagtttcccccatgctgttttcttttcagagtgagttctcatgagatctgatggttttataaggggctgttttcccttcactaggcacttctccttcctgctgccttgggaagaaagcaccttgcttccccttcaccttccaccatgattgtaagtttcctgagacctccccaaccatgctaaactgtgagtcaattaaacctcttttctttataaattacccagtcttgggcagttctttatagcagtatgaaaatgaattaatrcaagtgggcattaggatatacagacagaaaaaactactaagatagatagatagatactcataggacatattttgaccatctaaccatc

SEQ ID NO: 26234 - DNA, 547 bp, Homo sapiens
gtattaatcatttatcatcacaacaaagggtctttgttgtgatgataatcttactaatagtcgcagtgtcttggagaaaattatttggttatttatgattcattatctataatacacatcactactaggccaccatacattgttttttataaccatagagtagagctctgtgggggcaaaagagaaaacgcccattgactctaaatccaaaatactgagtaaaatcccagcaccaccattaagagccactttatcttcctgctcctcaatgttttcatgtttaaaatgagaatactgcctagtgacaggattgctacggtatttgagcaagttgtcattctgaaagtactttgaacttggtcaacattgctggatgacataactggggagtcttgggttctagctccctgcaagtgaagccacccaaatgactttgcaaagactgctacagttgtttgtacttgtgattcaacattatcattttttaastcatttagggggtagggtcaaacgaccatttaagaagctttagtcatcagcctcattg

SEQ ID NO: 26235 - DNA, 557 bp, Homo sapiens
gccacgttcattccatagaggaacccaccacctataaaaccagaaaagagacaaagccagaagtgcagggtggatttcttaacacaagctcactgcgacctctactcctcatcacgctgacactaagcttaaacccagacccttctacagttttgtctacaaagcacaatttgcccaaagcctttacaaacaccaacagcctttctttcagatatggcagcagggtcacatcttacacggccctgaccacattttgtctcctctgccatccccatctctctgactcagtcytcgcttgcagccataaaaaaggatgagttcatgtcctttgtagggacatggatgaagctggaaaccatcattctcagcaaactatcgcaaggacaaagaaaccaatcactgcatgttctcactcacaggtgggaattgaacaatgagaacacatggacacaggaaggggaacatcacacaccagggcctgtcgtggggtggggggaggggggggagggataggattaggaggtacacctaatgtaaatgatgagttaatgggtgca

SEQ ID NO: 26236 - DNA, 557 bp, Homo sapiens
gccacgttcattccatagaggaacccaccacctataaaaccagaaaagagacaaagccagaagtgcagggtggatttcttaacacaagctcactgcgacctctactcctcatcacgctgacactaagcttaaacccagacccttctacagttttgtctacaaagcacaatttgcccaaagcctttacaaacaccaacagcctttctttcagatatggcagcagggtcacatcttacacggccctgaccacattttgtctcctctgccatccccatctctctgactcagtcttcgcttgcagccataaaaaaggatgagttcatgtcctttgtagggacatggatgaagctggaaaccatcattctcagcaaactatcrcaaggacaaagaaaccaatcactgcatgttctcactcacaggtgggaattgaacaatgagaacacatggacacaggaaggggaacatcacacaccagggcctgtcgtggggtggggggaggggggggagggataggattaggaggtacacctaatgtaaatgatgagttaatgggtgca

SEQ ID NO: 26237 - DNA, 1036 bp, Homo sapiens
ctccttcggcttccccagcaattcccgaccccggagcgagcccggctgggcgaggggcgaggggcagggggcagggggcaggggagacttagcgcggggcgcagataccatgtccgcgggaaagcccccttgctagggcgcaagactcctctgaactcgctgccccacccgatgcgcaggctttctctagaggggttggggctggggtgcccgctcaggagaccgggaaacagaggctgctacccgaggcaggccctcgtccagcgaatgggcgaggtgtgcagaagcgcaaagccaggccttgraagggggagtttgtgcctccttccccccttcgtgggctcccgttttaggaggaatgttactgtttaaagagaccccactgaactatttcgtgctcagtgtcacctctccttcgctctcctcgcgtaagttctcaccgaaaggtaataaaacaaccgctgccgacaccgcttggcgctgggccgggcggggaaagcgccccgagtcccactagtccggaccacccggccagccccgaccttctcccaccttccgtgaaagcaatgacacagcagaaaccacgcacacgcctggcacactcgatgcgcgcgctgacctcggcaacaagtcctgtttttataagagagcgaggaggacacttctcagaaggggttgttgtgcttgtgcatatttccgtccatttccctctgtgcgcgcgcaccttccttttccagatggtgagagccgcggggacacccgacgccggggcaggctgatccacgatcctgggtgtgcgtaacgccgcctggggctccgtgggcgagggacgtgtggggacaggtgcaccggaaactgccagactggagagttgaggcatcggaggcgcgagaacagcactactactgcggcgagacgagcgcggcgcatcccaaagcccggccaaatgcgctcgtccctgggaggggagggaggcgcgcctggagcggggacaggtgaggccgcgcgaacgttccagcctggcgcggctgcggga

SEQ ID NO: 26238 - DNA, 1036 bp, Homo sapiens
ctccttcggcttccccagcaattcccgaccccggagcgagcccggctgggcgaggggcgaggggcagggggcagggggcaggggagacttagcgcggggcgcagataccatgtccgcgggaaagcccccttgctagggcgcaagactcctctgaactcgctgccccacccgatgcgcaggctttctctagaggggttggggctggggtgcccgctcaggagaccgggaaacagaggctgctacccgaggcaggccctcgtccagcgaatgggcgaggtgtgcagaagcgcaaagccaggccttgaaagggggagyttgtgcctccttccccccttcgtgggctcccgttttaggaggaatgttactgtttaaagagaccccactgaactatttcgtgctcagtgtcacctctccttcgctctcctcgcgtaagttctcaccgaaaggtaataaaacaaccgctgccgacaccgcttggcgctgggccgggcggggaaagcgccccgagtcccactagtccggaccacccggccagccccgaccttctcccaccttccgtgaaagcaatgacacagcagaaaccacgcacacgcctggcacactcgatgcgcgcgctgacctcggcaacaagtcctgtttttataagagagcgaggaggacacttctcagaaggggttgttgtgcttgtgcatatttccgtccatttccctctgtgcgcgcgcaccttccttttccagatggtgagagccgcggggacacccgacgccggggcaggctgatccacgatcctgggtgtgcgtaacgccgcctggggctccgtgggcgagggacgtgtggggacaggtgcaccggaaactgccagactggagagttgaggcatcggaggcgcgagaacagcactactactgcggcgagacgagcgcggcgcatcccaaagcccggccaaatgcgctcgtccctgggaggggagggaggcgcgcctggagcggggacaggtgaggccgcgcgaacgttccagcctggcgcggctgcggga

SEQ ID NO: 26239 - DNA, 580 bp, Homo sapiens
tacttcatccactgtacctcccagtagatcaagttagcgctctttccattgctatgctgaccacaggctcttccatagtctcacaggactcagatcttagaccctgttcagtggcaatgtggaatctggatggcgtcgtgccaccctgtcagccacaatgtgtcctcccgcctgtgttccctctttctctccctttattcaggaaagagaggggaggtgtggggataaaagatggggtgagtggaagagtctgtttcattttatgcttccttgctcttcattctaagatttatttctggaccacaggagtggagggtggcatatgagaaaattatttcaattgtatcataatcttcccaaggtgtgattaaattgaggcatagggaagagaggtgacctcttccagagtcagacaccacttgatttagaaccagagggccctaattttcagcttggagctttatcaattagatatctccaatcctaccacggctggtcttaggtgtagctggccaaactccatgaacaaatggaggaagtgttccaaaatcttctagcakcttcttcaaatcatcttttt

SEQ ID NO: 26240 - DNA, 1104 bp, Homo sapiens
aggagcagattcaccttctaagcctttccctatccttctcctcaaccctgccctgccccattgtgttctgggatggagctgtcagttcctttccatgagaatactgtagcttttctttctttctttctttctttctttctttctttctttctttctttctttctttctttcttgcttgctttcttgctttctttcttgctttctttctctctctttctccctttctttccttccttctttcctctttctttctctctctctttctctttctctcttttcttctttctctcttttctttctttctttctttctttctttccttccttcctttctttcttctttctttccttctttctttctctctctttctttcttccttccttcctttcttcctttctttcttgctttccttctttctttctttccttctttccttctttcttccttccttccttccttccttccttccttccttccttccttccttycttctttctttctttctttctttctttctttctttctttctttctttctttccttctttctttctttctttctttccttctttctttccttccttccttctttgacagagtctggctctgtcacccagcctggagtgcatggcaggataatagctcggtgcagcctcaaactcctgggttcatgccatcctcctgcctcagcctcccaagtagctcggactgcaagcatgtaccattgtgctgggcttattattattattattgtttttagggatggggtcttgctatgttgctccggctggtcttgaattcctagcctccagcaatcctcctgcctcagagtcccaaagtgttgggattacaggcatgagacagtgtacctgcctcagtagcttattttctaaggggaacattttgaagaactgggggaatagaattagggtttaacattagggagttttctttgctagaaactgagagtggggtgaggtgggaaagctcgtacaatctctttttctgggaaattgggagaataggaggaattcccatataggtgaagggctgggttagtggacatttagcacatggggaagggatatggaaatgtttggatccc

SEQ ID NO: 26241 - DNA, 923 bp, Homo sapiens
atttaaccggattctgctacaaagaatctttgtgtgtgtgtgtgtgtgtgtgtgtgtatgtgtgtgtgtgtgtgtgtgtgtgtgtgtatgtgtgtgtgtatgtgtggttttgagtagttattaaaatcaatgtgtggcattttatagttttcactttagaatttctctactagtaagaataaaagaatgtgttacagatgacctygcctaatccatacatatctactgtgaattacctaaggacctagaaacattgtgttggaaaaatagcaatttaaaataactttcatgatacctttggccaagaaattatgaggaacaattccattctaagcaggtatttgcatgactgtgttagattatgaaaatagaaaggcatgaaaacagtagagtttcaacaggcattactcctgatggaaaccccaaattcaaaattcatgcctgcatctgagtcttaactccatgtgccctgtgctaggaagggtctcatcctcctctttcaatctacattctcctagtatttttgcctatccaaagtcccataatctcccattttttcctgactcattttggtgtttttccttaaagcatgcagattctacacccacaaagagttgcattctgattccaaggtgtttttcaatccatctatacatatatgtataatctcaatcatagagattaaaagtataattatagtaagataccttctcctgtgctgtgtgtgtatgtgtgtgtatatatatgtatatctgttttaaatatcatagacatgtacatatgtgggtatatatagtatatatctatatatctataatattttaaacctttaaaacatatttatatgtactatttaaaaatgatactacagggcttctgtatataactacatagcttgtgcacagtaaactgtacttagccct

SEQ ID NO: 26242 - DNA, 923 bp, Homo sapiens
atttaaccggattctgctacaaagaatctttgtgtgtgtgtgtgtgtgtgtgtgtgtatgtgtgtgtgtgtgtgtgtgtgtgtgtgtatgtgtgtgtgtatgtgtggttttgagtagttattaaaatcaatgtgtggcattttatagttttcactttagaatttctctactagtaagaataaaagaatgtgttacagatgacctcgcctaatccatacatatctactgtgaattacctaaggacctagaaayattgtgttggaaaaatagcaatttaaaataactttcatgatacctttggccaagaaattatgaggaacaattccattctaagcaggtatttgcatgactgtgttagattatgaaaatagaaaggcatgaaaacagtagagtttcaacaggcattactcctgatggaaaccccaaattcaaaattcatgcctgcatctgagtcttaactccatgtgccctgtgctaggaagggtctcatcctcctctttcaatctacattctcctagtatttttgcctatccaaagtcccataatctcccattttttcctgactcattttggtgtttttccttaaagcatgcagattctacacccacaaagagttgcattctgattccaaggtgtttttcaatccatctatacatatatgtataatctcaatcatagagattaaaagtataattatagtaagataccttctcctgtgctgtgtgtgtatgtgtgtgtatatatatgtatatctgttttaaatatcatagacatgtacatatgtgggtatatatagtatatatctatatatctataatattttaaacctttaaaacatatttatatgtactatttaaaaatgatactacagggcttctgtatataactacatagcttgtgcacagtaaactgtacttagccct

SEQ ID NO: 26243 - DNA, 923 bp, Homo sapiens
atttaaccggattctgctacaaagaatctttgtgtgtgtgtgtgtgtgtgtgtgtgtatgtgtgtgtgtgtgtgtgtgtgtgtgtgtatgtgtgtgtgtatgtgtggttttgagtagttattaaaatcaatgtgtggcattttatagttttcactttagaatttctctactagtaagaataaaagaatgtgttacagatgacctcgcctaatccatacatatctactgtgaattacctaaggacctagaaacattgtgttggaaaaatagcaatttaaaataactttcatgatacctttggccaagaaattatgaggaacaattccattctaagcaggtatttgcatgactrtgttagattatgaaaatagaaaggcatgaaaacagtagagtttcaacaggcattactcctgatggaaaccccaaattcaaaattcatgcctgcatctgagtcttaactccatgtgccctgtgctaggaagggtctcatcctcctctttcaatctacattctcctagtatttttgcctatccaaagtcccataatctcccattttttcctgactcattttggtgtttttccttaaagcatgcagattctacacccacaaagagttgcattctgattccaaggtgtttttcaatccatctatacatatatgtataatctcaatcatagagattaaaagtataattatagtaagataccttctcctgtgctgtgtgtgtatgtgtgtgtatatatatgtatatctgttttaaatatcatagacatgtacatatgtgggtatatatagtatatatctatatatctataatattttaaacctttaaaacatatttatatgtactatttaaaaatgatactacagggcttctgtatataactacatagcttgtgcacagtaaactgtacttagccct

SEQ ID NO: 26244 - DNA, 613 bp, Homo sapiens
aggcttcctctaatggcctcctctgcaaagcaggacactaggaaaactgctaacctgttgaacggacaacagcactcagaaggtgatggaagcaataaaggaaactgctgaatgagccagcaaatgaggagatgtggctgcagctaactgcataagtcagaatattagcttagagcttattcgatggggcaaatgcagtcagacctggcaactggagctgcttcaatataatggaatgttcagggcacagcccagcactcagaacaagggcttcatctcctaagtcaccgggacatggagaatggccaaggctgccacatggaacacacaatctaaggcatcccccmacgggtgaccataaatgccccctggttgggggtaaggaaagaaagtgtaggacagctcaaacacatcccaccatgcaggatggactcaggactgaggtagggacccagacttaggaaaaacagaatgacagaggatgttagaaggtgaactatgtcaggaatagtcgaaggaactgggaaggcttggccagagaagacaagatctgggcatgagaagggtgagtggcttaaggggagagatagaaactcttttcctatttttgaaa

SEQ ID NO: 26245 - DNA, 613 bp, Homo sapiens
aggcttcctctaatggcctcctctgcaaagcaggacactaggaaaactgctaacctgttgaacggacaacagcactcagaaggtgatggaagcaataaaggaaactgctgaatgagccagcaaatgaggagatgtggctgcagctaactgcataagtcagaatattagcttagagcttattcgatggggcaaatgcagtcagacctggcaactggagctgcttcaatataatggaatgttcagggcacagcccagcactcagaacaagggcttcatctcctaagtcaccgggacatggagaatggccaaggctgccacatggaacacacaatctaaggcatcccccaacgggtgaccataaatgccccctggttgggggtaaggaaagaaagtgtaggacagctcaaacacatcccaccatgcaggatggactcaggactgaggtagggacccagacttaggaaaaacagaaygacagaggatgttagaaggtgaactatgtcaggaatagtcgaaggaactgggaaggcttggccagagaagacaagatctgggcatgagaagggtgagtggcttaaggggagagatagaaactcttttcctatttttgaaa

SEQ ID NO: 26246 - DNA, 616 bp, Homo sapiens
tgcagagatgccacagctggtaaggggtggaaccagagcccaamtgggactcacattgaagcttttccatgctcttcccaggagctatccctgaattggtgcaatacttcagttaggtcttagcccctgtaaacttgaggctaaaaagcagaataaagaaggctttattctgtgaccctgagcaaccactccccacccctcctgacccttctcgcctggcccctgctggctcccgccatgacctgaggccaccatgtgcaggctgggaagggcgacttatctcttcctgcatcaccagacatcaccggttgccactaggggagaaggctgcaggctcaatcaagtgtgctgtcattttggttttcttgcaagaaatgttggcacttacctcctgcagcctttgtgtttcattctcaaggtatctgttggaaagcctttttctctttagttttacattttctttttcatcatttaacatataaaaccaggtttttcctggtccctttctctctctccctccgttccttcctctcatcatataattaaaagtcctttcagcctgtcttcaccttatcatttcaaatacattgaaaaaagatcccacttcctgcccttg

SEQ ID NO: 26247 - DNA, 579 bp, Homo sapiens
aatagaggggcaccctacgtaacactgaccagtactgctcaacactgtcgaggtcatamgaagtgaggaaagtctatgaaaaagccacaactgtgaggagcctaaggcaacatggcgacgaaacgtgatgtggggttggatggtatcctgggagagacaaaaaacattaggtaaaaactaaggaaatatgaataaccatggactttaaataatcataatgtagcgatattggctcattcattttaacaaatgcaccatagtaatgtaagatgttacaaacaaagaaactgggaattctttacactatcttggcaatttttctgttcatataaaactattctaaaggatgaactttatttaaaaatccaaatggcaatcacaacgcataaatatcacagccaaccacaccccaccccacagtaagttgcttttataaaccaacagctgctggttgctgcagaatccccagggccaggctcaggggctgtgtccccactatacccagggcaagcccctgagctgccactgccagggattcaatcccccacccaaattaatttacatgtggtgtgagtttta

SEQ ID NO: 26248 - DNA, 579 bp, Homo sapiens
aatagaggggcaccctacgtaacactgaccagtactgctcaacactgtcgaggtcataagaagtgaggaaagtctatgaaaaagccacaactgtgaggagcctaaggcaacatggcgacgaaacgtgatgtggggttggatggtatcctgggagagacaaaaaacattaggtaaaaactaaggaaatatgaataaccatggactttamataatcataatgtagcgatattggctcattcattttaacaaatgcaccatagtaatgtaagatgttacaaacaaagaaactgggaattctttacactatcttggcaatttttctgttcatataaaactattctaaaggatgaactttatttaaaaatccaaatggcaatcacaacgcataaatatcacagccaaccacaccccaccccacagtaagttgcttttataaaccaacagctgctggttgctgcagaatccccagggccaggctcaggggctgtgtccccactatacccagggcaagcccctgagctgccactgccagggattcaatcccccacccaaattaatttacatgtggtgtgagtttta

SEQ ID NO: 26249 - DNA, 1214 bp, Homo sapiens
tccttgcttttcccaggacttccttgggaaggggcaagccctcttctccgcatgcaacttcattgctaagctctcacttgtgtctcagggagggaggaaccctgtactggatctcttctgcagatcttggggaacccatggcctctgattaccctccagtcctggaagcatgcttgctgtggttattagtccaagggagggagctgcagtggggtgggggtgggatcagagaggcggggcctgtgtaaacccagctccccaggactcctacagtcacctgtttctctctttatggttgttatctccctcaagaccaccagttatgtatacatggggtctttcttgtctgccttgaatatttttattttttctctaatttattttttttccatttcaacgtgttcagttttctcataacctattcgcattgtccctgtctggatattagctttgtcagctctctttgtggacatacctctgtcctgtgcatatatctctactttaggctaaagcgtagtctggaagaatgaggtttctgtcatcttgcgtggtatagcaagtggggaagtgctctgggttaaatatggagaacacagccactttagagtaggagatgctttaaggcaggggttcccaaaccccaggctgtggaccagtaccagttcgtggcctgttaggaacctggccgcacagcaggaggtgagtggcaggcgagtgagcattactgcccgagctccacctcctgtcagataagcggcagcattagattctcatagggatgtgagccctactgagaactgcaggcggggatcctcaaaccaccctcccactcccgcaccttccatagaaacattgtcttccccaaaactggtccctagtaccaaaaaggttggggaccgctgctttaatttatattccaaattgtgtaaaactcctttctgcaaaggtaaatcaccagattgattagctcatttgtactttttttttttttttctttgagacggartcttgctctgtggcccaggctaaagtgcagtgacacaatcttggctcactgtaagctctgcctcttgggttcaagcgattcctgcctcagcctcccgagtagctgggactacaggcacccgccaccaggcctggctaatttttgtatttttagtagagatggggttccgccatgttggccaggctggtctggaactcctgacctcaag

SEQ ID NO: 26250 - DNA, 526 bp, Homo sapiens
agctcctcttcccagacaatctccccccaccctcagtttccccacagttactgcaggatgcgctgtgaggacagcatgaaggcactgtcttgggcatggcagygaaccccaaagaattccattccctagaatacctggacttggcatggtgtgcaggcagtggagcgggggtggagggtgtggaccccacactccatctctccattaagagagttgctcagcatggccaacttccacacttccccgagtgtgaagtaagccatgctgcaggattagagccaagccaaggacagaggggacggcctggacagagcgatgcccacagcagctcacacctgcttctgggcctgcttgcatccccactctctgcctgggacctgggggaacccttcctggttctaagagtcaataaatttggccgggtgtggtggctcatgcctgtaatcccagcactttgggaggccgaggcgggcggatcacaaggtcaggagatcgagaccatcctggctaaaacggtgaaaccctg

SEQ ID NO: 26251 - DNA, 526 bp, Homo sapiens
agctcctcttcccagacaatctccccccaccctcagtttccccacagttactgcaggatgcgctgtgaggacagcatgaaggcactgtcttgggcatggcagtgaaccccaaagaattccattccctagaatacctggacttggcatggtgtgcaggcagtggagcgggggtggagggtgtggaccccacactccatctctccattaagagagttgctcagcatggccaacttccacrcttccccgagtgtgaagtaagccatgctgcaggattagagccaagccaaggacagaggggacggcctggacagagcgatgcccacagcagctcacacctgcttctgggcctgcttgcatccccactctctgcctgggacctgggggaacccttcctggttctaagagtcaataaatttggccgggtgtggtggctcatgcctgtaatcccagcactttgggaggccgaggcgggcggatcacaaggtcaggagatcgagaccatcctggctaaaacggtgaaaccctg

SEQ ID NO: 26252 - DNA, 526 bp, Homo sapiens
agctcctcttcccagacaatctccccccaccctcagtttccccacagttactgcaggatgcgctgtgaggacagcatgaaggcactgtcttgggcatggcagtgaaccccaaagaattccattccctagaatacctggacttggcatggtgtgcaggcagtggagcgggggtggagggtgtggaccccacactccatctctccattaagagagttgctcagcatggccaacttccacacttccccgagtgtgaagtaagccatgctgcaggattagagccaagccaaggacagaggggacggcctggacagagcgatgcccacagcagctcacacctgcttctgggcctgcttgcatccccactctctgcctgggacctgggggaacccttcctggttctaagagtcaataaatttggccgggygtggtggctcatgcctgtaatcccagcactttgggaggccgaggcgggcggatcacaaggtcaggagatcgagaccatcctggctaaaacggtgaaaccctg

SEQ ID NO: 26253 - DNA, 526 bp, Homo sapiens
agctcctcttcccagacaatctccccccaccctcagtttccccacagttactgcaggatgcgctgtgaggacagcatgaaggcactgtcttgggcatggcagtgaaccccaaagaattccattccctagaatacctggacttggcatggtgtgcaggcagtggagcgggggtggagggtgtggaccccacactccatctctccattaagagagttgctcagcatggccaacttccacacttccccgagtgtgaagtaagccatgctgcaggattagagccaagccaaggacagaggggacggcctggacagagcgatgcccacagcagctcacacctgcttctgggcctgcttgcatccccactctctgcctgggacctgggggaacccttcctggttctaagagtcaataaatttggccgggtgyggtggctcatgcctgtaatcccagcactttgggaggccgaggcgggcggatcacaaggtcaggagatcgagaccatcctggctaaaacggtgaaaccctg

SEQ ID NO: 26254 - DNA, 526 bp, Homo sapiens
agctcctcttcccagacaatctccccccaccctcagtttccccacagttactgcaggatgcgctgtgaggacagcatgaaggcactgtcttgggcatggcagtgaaccccaaagaattccattccctagaatacctggacttggcatggtgtgcaggcagtggagcgggggtggagggtgtggaccccacactccatctctccattaagagagttgctcagcatggccaacttccacacttccccgagtgtgaagtaagccatgctgcaggattagagccaagccaaggacagaggggacggcctggacagagcgatgcccacagcagctcacacctgcttctgggcctgcttgcatccccactctctgcctgggacctgggggaacccttcctggttctaagagtcaataaatttggccgggtgtggtggctcatgcctgtaatcccagcactttgggaggccraggcgggcggatcacaaggtcaggagatcgagaccatcctggctaaaacggtgaaaccctg

SEQ ID NO: 26255 - DNA, 1024 bp, Homo sapiens
tcaagcttcaatagcaccacakttcaacgactaccttctatccagtcctactttcttcttcataggcgttggtctcaaaggaattccctaataaacttcttgcacgcaactgcatatggcagggtctgtttttcaggtgaccccacctaagacaactaataaagttgcatttatgacaaaaatgctgctgtgagcaactgaggctcaattcttccaggacccctcaaaaaactgcataaacctcagcaatgacctatcatggagccggaaggctggggtgtttatccagcagcttctgtccttcattggttgagggatgctcccaacgctgtaatgttctggcacttctagcctgtctctaggtggccagcccagagaatgctgtcaggcagagatgctggaagataccagctcaaggggacttgtctgcaggcaactctaagagtggaccaatgggatctgggcagagaacaccaacagcatctgctacaattccccctccccaagaatcgcctatggctccgcatttcctacagcaaggatcaagctcacagagcagttgtcagccactgatgtgactggtcggttggaaaaatgcagcattttgacattctaaatttaaacagggaaatcacattcagagacttcacacatttgctacttatgcaacctctgaaaacttttcagatctggacacttggtctagaaaataagtccagatttttttgactacacacttggcagcatttgtgacctgttatcaagcaagctttctaatcctgtgttcttctaatctacttcttccacacagattggtctgtcttgtgtgtgtgtgtgtgcatgtgtggtgtgtgtaaaacaaaattctaatcatgcaataccttccagaaactttccactgaccagatcaacttcaaattcctttgtaaggaaacgagggctcccactatctggctaacccctttacaaggatatattatacatagtcatgccatccctaggtactcacgggggattggttcca

SEQ ID NO: 26256 - DNA, 538 bp, Homo sapiens
ggggagtcctgcaactagacctttggatcttgtctttatttgaattttgtggattttttggcattaattttgactttaaaaaaaaaagcatgaaaatattatttttcttaaattgtgtgcctaacagtgagtcccaataaatacttcctttaggaaatacttaaaggagttaaacaacttttgacttgctgatccttctgcattgagggaggagacatctcagaagcatgccctttgaaaagtatcagaatactaggcatcctcctgtgcctcccacaacccccgcaaaaaagaatactagccctcccaaaggccrgatgggatttctgcatcaaagagaagacatcaacggagagataacctagtcattcagaggccgcaggtgaggagagagggacagtggacagcaatgcccagagaaggcaatttgagtgcatgaccatcagcccatgccaagggcagcctgcagagttcctccctctgttgattcatttggctaggatgagttctagacctgaacacgtcctccccatcatac

SEQ ID NO: 26257 - DNA, 554 bp, Homo sapiens
ttaaactataaattaaagcagagaattaaatcaattcttttgccaaaaaggtacaactggtaactgttccaatacattttctcaggggctacttttgcagaattacaaggcaagcaatattgtgtccggaattggtgggttcttggtctcactgacttcaagaatgaagccgcggaccctcgcgctgagtgttacagctcttaaagcgcgtgtctggagttgttcgttcctcctagtgggctcatggtctcgctggctcaggagtgaagctgcagaccttcgcagtgtgctcataaaagcagtgtggacccaaagagygagcagtagcaacatttattgcaaagcgtgaaagaacaaatcttccacagtatggaaggggacctgagcaggttgccactgctgactggggcagcctgcttttattctcttatctggccccacccacatcttgctgattggtagagcccagtggtctgttttgacagggcgccgattggtgcgtttgcaatccctgagctagatacaaatgttctccacgtccccatcagattagt

SEQ ID NO: 26258 - DNA, 596 bp, Homo sapiens
tttatgttatatatgttatatatgtatatgtatatgtaacatataatatatatgttacatatattatatgttatatattatatattattagttatatatattatacaatttctatcttttagcaaatcccatgaaagaaatgatataaaattgttgctgtataattgcctgagcaattgagacatatgtttataacactgtgcaggttttaaagaaattatcatcttgtgaaatcacattaacacaatcaaataattaataatagcacatcgtggtatataattttactaaagtggtgtggttgatgtcrttgcataacaagggaaattagtgtgatttctaatagtcagggaagatattatttttgaataaggacatggtcagaagcttatcttaacaaatgagtcttttacttttaaaaaaattctcaaatataagctttcattaatacattttaggaatatcacactttttatcttaaaaaaatgatggttgggagtgagcatgtgtttccctcatattgagaaaaataaaggcaattattggttaatgctcatgtactttaaggaagaggacatacgttggtagattaaaaa

SEQ ID NO: 26259 - DNA, 596 bp, Homo sapiens
tttatgttatatatgttatatatgtatatgtatatgtaacatataatatatatgttacatatattatatgttatatattatatattattagttatatatattatacaatttctatcttttagcaaatcccatgaaagaaatgatataaaattgttgctgtataattgcctgagcaattgagacatatgtttataacactgtgcaggttttaaagaaattatcatcttgtgaaatcacattaacacaatcaaataattaataatagcacatcgtggtatataattttactaaagtggtgtggttgatgtcattgcataacaagggaaattagtgtgatttctaatagtcagggaagatattatttttgaataaggacatggtcagaagcttatcttaacaaatgagtcttttacttttaaaaaaattctcaaatataagctttcattaatacattttaggaatatcacactttttatcttaaaaaaatgatggttgggagtgagcatgtgtttccctcatattgagaaaaawaaaggcaattattggttaatgctcatgtactttaaggaagaggacatacgttggtagattaaaaa

SEQ ID NO: 26260 - DNA, 808 bp, Homo sapiens
ggtgggcgggatgaccacggctgcgtggacccccagcgagcacggctcctcgatctgctgcagcacgaagcaggacaccttgctgtggtatgcctgcttgcaccacgagcagctgatggccacaatctccttgctgtggaaggtgaacttctgctggaatcccttcccacagtgccgacacttgcygtcctggcgtcgtctgtgtacccagtggtgccatacaaaggttggctcgaggacattcctggagcctgattcacggaaggatggcttacagcggaaatttatcttctccagctgctcgatgcagggcgtgtgcaccacaatcttgcaggctgcgcactttcttcgagacactgacttctgcagcatcctggctacacagtactgctccccaacgtagcagaagtccccggacacgttggtctcgaaccagatgtgctccccatatgtcgccgactcgctccagtccactgtactccggatctgccgctctgactcgctgcaccgggccccaggggtgggcggagggggggccaggtgctggaggccagacttggtgatggctttcctgtgcccgaagagccgcagccccgggaagcgccgcttgttgagtcgccgcggcgccttgtccggctcgggaccggcgtcgcgctcggagccgctggacgaggcggaagccgactcgcagtcgctgctccgggcctccgggctaccgtcccgcggctccatccggccctagccccggccagcggagggcccgcgggagacgcccatgccgggccggcggccggggctcagcacgccc

SEQ ID NO: 26261 - DNA, 808 bp, Homo sapiens
ggtgggcgggatgaccacggctgcgtggacccccagcgagcacggctcctcgatctgctgcagcacgaagcaggacaccttgctgtggtatgcctgcttgcaccacgagcagctgatggccacaatctccttgctgtggaaggtgaacttctgctggaatcccttcccacagtgccgacacttgccgtcctggcgtcgtctgtgtacccagtggtgccatacaaaggttggctcgaggacattcctggagcctgattcacggaaggayggcttacagcggaaatttatcttctccagctgctcgatgcagggcgtgtgcaccacaatcttgcaggctgcgcactttcttcgagacactgacttctgcagcatcctggctacacagtactgctccccaacgtagcagaagtccccggacacgttggtctcgaaccagatgtgctccccatatgtcgccgactcgctccagtccactgtactccggatctgccgctctgactcgctgcaccgggccccaggggtgggcggagggggggccaggtgctggaggccagacttggtgatggctttcctgtgcccgaagagccgcagccccgggaagcgccgcttgttgagtcgccgcggcgccttgtccggctcgggaccggcgtcgcgctcggagccgctggacgaggcggaagccgactcgcagtcgctgctccgggcctccgggctaccgtcccgcggctccatccggccctagccccggccagcggagggcccgcgggagacgcccatgccgggccggcggccggggctcagcacgccc

SEQ ID NO: 26262 - DNA, 808 bp, Homo sapiens
ggtgggcgggatgaccacggctgcgtggacccccagcgagcacggctcctcgatctgctgcagcacgaagcaggacaccttgctgtggtatgcctgcttgcaccacgagcagctgatggccacaatctccttgctgtggaaggtgaacttctgctggaatcccttcccacagtgccgacacttgccgtcctggcgtcgtctgtgtacccagtggtgccatacaaaggttggctcgaggacattcctggagcctgattcacggaaggatggcttacagcrgaaatttatcttctccagctgctcgatgcagggcgtgtgcaccacaatcttgcaggctgcgcactttcttcgagacactgacttctgcagcatcctggctacacagtactgctccccaacgtagcagaagtccccggacacgttggtctcgaaccagatgtgctccccatatgtcgccgactcgctccagtccactgtactccggatctgccgctctgactcgctgcaccgggccccaggggtgggcggagggggggccaggtgctggaggccagacttggtgatggctttcctgtgcccgaagagccgcagccccgggaagcgccgcttgttgagtcgccgcggcgccttgtccggctcgggaccggcgtcgcgctcggagccgctggacgaggcggaagccgactcgcagtcgctgctccgggcctccgggctaccgtcccgcggctccatccggccctagccccggccagcggagggcccgcgggagacgcccatgccgggccggcggccggggctcagcacgccc

SEQ ID NO: 26263 - DNA, 799 bp, Homo sapiens
ccaaaaatcagcatgcatagcaacaggtaccatgggaaccaactcacaggtgcccctggttatatctgattgtacaaaccttcatataaatcagtaggagatcttattttgtgaccctttctaaactatagcctatacttcctaaatttagatattcaacaaagctgtaaaatgcattagcaatccacaccttctgcatgtgtctgataacttgatatctgagccacgatgaagttcacatccctggttgttaaaatctctttgggatttaactaggcccatctacttcrggcaactaataattaatttctgttttctacacagaaaaagaggaaggttctctcttctattcagttttagtaggaaggacaagtagcaggttagccagtcactagtagccttaaaaaccttccgtagttcatggccagaggtgaaccctcactctgtttgtataaattagaccaagaaaatcattctttgtgctgttctctgaatgcatttcaacttttcatattatccatgaaatcagctgttgagagcaccaataaaagggtttatgaacatgttcataaaatataaaaatgcagtccaattttttgcccttcatagaaccaaagaccataaacctgatgtaaagttcatgctgcctaaaccagacaaagctttttacttacaagcattagaaagataagacgttgagttgtctaaccattgctagtaaacagttctccagatttcacgttaaaaactggaaataatcatctggaaataaaattatccttccacaatatagtaaaaa

SEQ ID NO: 26264 - DNA, 582 bp, Homo sapiens
tggcttgctggcaacaccacgcttcatgagtgaccattttgtgaatgctcatcctttgtctttcttggcacaataagatgtccaatgggaaacagaggaagytgcttttcatttcagatattctgcctccccacttcaggcttcaaggaatcttcatctatcataagacaatgatgagagagttattgtataaattccacttactaaatgctgctgctgctttttacccccaaatccttggctttgggtatttctgcagcattacaacaattcatccgaagccattgctcggtcaaaacaaacacacaaacaaacacacattacaataattcggaaaaagtggttgttctatctgcttctgtgcaaccagcatcttagggacaaccatagaactggagctctccactctggccccctggctcctctcctcctggcaagcctgtgcttgttccagtctctctgccaaacagagagacacacacagggtgaccccttaaaatccagacattttcttcccaagtggctggatttcatctgttttctcactctggatcaatatgatgggggaatttagcactaatt

SEQ ID NO: 26265 - DNA, 612 bp, Homo sapiens
agaaatttttcatgacttaaatggaaaaagaatgaatcaatttaatgtttgctgaagaggttaagacctgcctattttagactttgttttcttaaataatttgggcacaaaaaaaaaaaagaaattctgttcttaaccccaatttctcttcttttctcaaaaacaaacaaaacaaattccctaaatactggactagaagggcaagagtccctgaagcaaattcaaactgttggcttttctgggccataaattccagaagaatggattttcccaggggctcttgagcttgtgatgggactttgtgcctccccaccaaccagcttccaaacaatgcctgtggtaaaaacccaaatgcctgtgaaaaacactctcctgatgccatatttgtttgtatgtaattacccccagcccctgaattctcaacaaatgagagtgtttgacagcatattcctaagatrttttctttaagtaaaggtttttatacttaaggaatcatattcaggtgtcgtggaaatgtctagctatttaaaccctccatggcctatacaaatctcaaatatttttctgactaccaaggttctactacatccttttggcctggcttaagtctca

SEQ ID NO: 26266 - DNA, 612 bp, Homo sapiens
agaaatttttcatgacttaaatggaaaaagaatgaatcaatttaatgtttgctgaagaggttaagacctgcctattttagactttgttttcttaaataatttgggcacaaaaaaaaaaaagaaattctgttcttaaccccaatttctcttcttttctcaaaaacaaacaaaacaaattccctaaatactggactagaagggcaagagtccctgaagcaaattcaaactgttggcttttctgggccataaattccagaagaatggattttcccaggggctcttgagcttgtgatgggactttgtgcctccccaccaaccagcttccaaacaatgcctgtggtaaaaacccaaatgcctgtgaaaaacactctcctgatgccatatttgtttgtatgtaattacccccagcccctgaattctcaacaaatgagagtgtttgacagcatattcctaagatattttctttaagtaaaggtttttatacttaaggaatcatattcaggtgtcgtggaaaygtctagctatttaaaccctccatggcctatacaaatctcaaatatttttctgactaccaaggttctactacatccttttggcctggcttaagtctca

SEQ ID NO: 26267 - DNA, 582 bp, Homo sapiens
gtggcacacatgtgtggtcccagctacctggggggctgaagggggaagatggcttgagcctgagaggtcaaggcctcagtgagcctagattgtgcctctgcactccagcctgagtgacagagcaagaccctgtctgtttaacaacaacaacaacaaaaaaacccacttcatatattgtatgaaaacttcatattttttgataggtggatatttgaaagtcagacttctttaaatgccacaaaaacagcactgggttaagagtcattgtttttcatttgaatccttgtcttgcactttcgtgcagtgtggtgagttgggtacctctctgggctgacgttttctcatctcaaaaaagaaggcattggatttgaaagtgcttttgcaagattataatttttaaaaaagcaatacttgtaaaacaggagwaaagaaccagttccattttcttgttaacatcaatagattaaatctctgaatctctcaaaaagacacttcgaggcttttgggccaaatctagagattggatggctcaattatttggatgaacataacatgtaagtctaacacattgtgggtccgtcc

SEQ ID NO: 26268 - DNA, 572 bp, Homo sapiens
cctttgatcctacgctcagatttgaatactagtgaaagggcggtagtagagtagtaggcccagttgcaatcttgtgctagtctcatgggtagggaagggtatgggccctggttactgtcccatcagactgtgtcttataggaaaaaagtaatttctcaaaaggaattagagtggtaatagaaagaagatggatgctggacaatccaaaaatccacagacatgaaattgatattccttatttcttcagtttrgggtagaaaatgtatatagactcagtgattctgagcccttttaccctgtgctatggtctgaatgtttatgtttctcctaaattcaaatgttgaatcccttaccctcaagggatggtattaggacatgcggactttgtaaggtgattaggtcatgagggtaggacccttgtgagtgggattaatgcccttataaaagaggcctgaggattgctccttccaccatgtgaggacacaatgaaaatccaccatctatgaaccagaaagcaggccctcatcccacaccaaatctgttggtgcctagatcttgaacttcccagcctc

SEQ ID NO: 26269 - DNA, 511 bp, Homo sapiens
gcagaacgtgagggtctggaaacctccactccrgcttgtggatgccccatggcacagcgggcccagaggagccagttgggctttttttttttttttcatggaagccagagctgcatgttttcatgggcagtcttttgcttttttaaatcttagcaaataatttgagtttaaaaataaaaccctataggccaccagtgggcagccccttatgcaacacttaggataggatgcttgagtttgtgagtgacagtaaatgactccatgaccctccaggccgagtggggcttcacgggaagatgctggaccccagaaggcctggggtctcagaagcctctggacacccccatatagggtgaacgttggagtctaggggttcgatctgcctttgaaccctcagggtctgccgtccctgagtgtcagcctcttcacctgcaagtgggatgctgcagttccaccttgcaggcagtcatgaggctcaggggaggcagtttatgaagaccttggctaattc

SEQ ID NO: 26270 - DNA, 540 bp, Homo sapiens
cttctgaaaatataaggaaaaaataaaacaagaacacagacttccctgaagagctaacaattgtgctccaagagaaagccaacagttgtattgcctgctccccaagggttccattcrctaaccagtgtaatccagaggggtagcaacaatcaggaaggagagtctgtttgtacaggagttgaccttgccatttttttttattaaatccaattccaaaaacgtacaaatacaaaagagaggaaaggggaaatttaaaaatagctttgcccctactctgaggtgtgaaatgaaagaagagcttgaaattccctgcaggtttgtggaagccagtcctgacctgctcaagtagggaggaaaaatagaggaatgcaggtttaaactgactacactggcatatcttaattattgaaaattacaagaaaactatgagatctgcctaagataagaaaggaaacccaacagatcatgatgaaagaaaaagattgggggaaaaaactacaatgtgttgtgtttgtgccttcttgagttcaagcagtttaa

SEQ ID NO: 26271 - DNA, 540 bp, Homo sapiens
cttctgaaaatataaggaaaaaataaaacaagaacacagacttccctgaagagctaacaattgtgctccaagagaaagccaacagttgtattgcctgctccccaagggttccattcactaaccagtgtaatccagaggggtagcaacaatcaggaaggagagtctgtttgtacaggagttgaccttgccatttttttttattaaatccaattccaaaaacgtacaaatacaaaagagaggaaaggggaaatttaaaaatagctttgcccctactctgaggtgtgaaatgaaagaagagcttgaaattccctgcaggtttgtggaagccagtcctgacctgctcaagtagggaggaaaaatagaggaatgcaggtttaaactgactacactggcatatcttaattattgaaaattacaagaaaactatgagatctgcctaagataagaaaggaaacccaacagatcatgatgaaagaaaaagattgggggaaaaaactacartgtgttgtgtttgtgccttcttgagttcaagcagtttaa

SEQ ID NO: 26272 - DNA, 1231 bp, Homo sapiens
tgcatttccatagttcactttgaattacagaggttcaatttctatgttcccttgttctggtttcaaaaaaataatgttaaatataaggagaatgattctttggagaaggcaaagttcttttctatgagatttataaagcctgggtgttgtttttttcccccactctgggcattgcaaattgcttctgtgatcctagtaaaatatctccagagacttactagcaacaggcatggctaattaacacagccagggaatgtggcgccttccctgggtttctgagyctttaatccagagcaaggcccactcttcttttcgcgtccccaaggccattaagtacttatcagagatccaagaactttagatctgggccaagaggcaaagccaaacaaggaacattgaattggacactgtccctaaaccttcaaaaattaaaatgtgtatgacaactcagaaaacatggtttatggaaaattttgaaaaaggtagacaaaggaaggcctaaggaaaatgaagacagatttatagcatgacttaatagggggtagagggatgataaaatgacctatccaggtcccatctaaccttatagctatgcaacaactggggcagagccattatttttatttattttttggcctcacataaatttaacttcatcatcctagactcagaggccttgttcctacaagaaatgccataacgagttagtatatgtgaatcttgggtcatatcatgttaacattatatgtgacatacaatattaagctgcaaatagaaactacagaagcactattcctgcctgaatatttgttgaaaatcagaataccattattctagtgaaacgttaaagaaataatctgttgtgtctttattgacagaatagagaacaattcctttgttggatttttgtaggtaatgggacaagttaaacacaaaggcagacataattttgcagtaatccccaaggtgcagtcaccagttccatgcttgctcacctctgtcctctccaacacagaaggccagcttgtcaactttaagaaggcacaaagctgggaagaataataactaagcttgatgacaaaatcagggttttgatgatagggtttgtgttgaaggaggtacttacaaaactgtatttaacaagcctaaatgcaaagacattcagaaagccatcttcacaaggactggttgaagttgatccacttggcatcactgatgtgaaaaggaccca

SEQ ID NO: 26273 - DNA, 1231 bp, Homo sapiens
tgcatttccatagttcactttgaattacagaggttcaatttctatgttcccttgttctggtttcaaaaaaataatgttaaatataaggagaatgattctttggagaaggcaaagttcttttctatgagatttataaagcctgggtgttgtttttttcccccactctgggcattgcaaattgcttctgtgatcctagtaaaatatctccagagacttactagcaacaggcatggctaattaacacagccagggaatgtggcgccttccctgggtttctgagcctttaatccagagcaaggcccactcttcttttcgygtccccaaggccattaagtacttatcagagatccaagaactttagatctgggccaagaggcaaagccaaacaaggaacattgaattggacactgtccctaaaccttcaaaaattaaaatgtgtatgacaactcagaaaacatggtttatggaaaattttgaaaaaggtagacaaaggaaggcctaaggaaaatgaagacagatttatagcatgacttaatagggggtagagggatgataaaatgacctatccaggtcccatctaaccttatagctatgcaacaactggggcagagccattatttttatttattttttggcctcacataaatttaacttcatcatcctagactcagaggccttgttcctacaagaaatgccataacgagttagtatatgtgaatcttgggtcatatcatgttaacattatatgtgacatacaatattaagctgcaaatagaaactacagaagcactattcctgcctgaatatttgttgaaaatcagaataccattattctagtgaaacgttaaagaaataatctgttgtgtctttattgacagaatagagaacaattcctttgttggatttttgtaggtaatgggacaagttaaacacaaaggcagacataattttgcagtaatccccaaggtgcagtcaccagttccatgcttgctcacctctgtcctctccaacacagaaggccagcttgtcaactttaagaaggcacaaagctgggaagaataataactaagcttgatgacaaaatcagggttttgatgatagggtttgtgttgaaggaggtacttacaaaactgtatttaacaagcctaaatgcaaagacattcagaaagccatcttcacaaggactggttgaagttgatccacttggcatcactgatgtgaaaaggaccca

SEQ ID NO: 26274 - DNA, 1053 bp, Homo sapiens
agaggggccacttttcctcttcccagtgggagctactggttggcattaaaggtaatgtattattccaagaatgaattggaagcygaacgtctaccagtgtcaaaatagttgaataaagtatggtacattcatactgaatatttttgcagctattacacaggatggaatagtctgtattaaactagaaagaagtccgtgatgcattgttaagggagaaatgcatgaaaacattttatagtatgatgtaaatataggtgtgtgcatatgtttgaataggattgtatgatcatacagtataaggaaagacatgcttcaaactgccaacattggttacattaagcatgccttattctcataattaacaattgatagttaaagagcaagcaatggtattcagaagttaatttcaagaccaaatatgtagctgtagataaacaataaagataggagatactgtagaaaaaatattactttaatggcttaggaaaatgtttacaaaaatggagatctctttttttgatattctgttgaatgcttatatatgcatagaaataagtgtgtaaagatttagaacaaaatgttaacaataataatttctggatggcagatttttctctcttggcttctctgtattctgcaatttcacaacaatgagcatgctttattttcataagagaaataaattatttctaaaaatagaagatagtacataaaaattggtaccattaagctgtctattatctggatacctaagacttgaaaaaacaacaattgtatgaaattattacaaaatgaatccacttgagaacagcagtttccatgtaacattttattcttttctttagcaaagactgaagggagagaaggaagccaagcgggctcttttggatgcgaggcataactacttatttgcaattgtggcttcctgtttggacctgaacaaaaccgaagtggaggatgccattcttgaagggaatcaggtgggatgcgtttcacttctcactgacttgatgatggagggcacagatggtctgttgacacagtcctgtggca

SEQ ID NO: 26275 - DNA, 1053 bp, Homo sapiens
agaggggccacttttcctcttcccagtgggagctactggttggcattaaaggtaatgtattattccaagaatgaattggaagctgaacgtctaccagtgtcaaaatagttgaataaagtatggtacattcatactgaatatttttgcagctattacacaggatggaatagtctgtattaaactagaaagaagtccgtgatgcattgttaagggagaaatgcatgaaaacattttatagtatgatgtaaatataggtgtgtgcatatgtttgaataggattgtatgatcatacagtataaggaaagacatgcttcaaactgccaacattggttacattaagcatgccttattctcataattaacaattgatagttaaagagcaagcaatggtattcagaagttaatttcaagaccaaatatgtagctgtagataaacaataaagataggagatactgtagaaaaaatattactttaatggcttaggaaaatgtttacaaaaatggagatctctttttttgatattctgttgaatgcttatatatgcatagaaataagtgtgtaaagatttagaacaaaatgttaacaataataatttctggatggcagatttttctctcttggcttctctgtattctgcaatttcacaacaatgagcatgctttattttcataagagaaataaattatttctaaaaatagaagatagtacataaaaattggtaccattaagctgtctattatctggatacctaagacttgaaaaaacaacaattgtatgaaattattacaaaatgaatccacttgagaacagcagtttccatgtaacattttattcttttctttagcaaagactgaaggragagaaggaagccaagcgggctcttttggatgcgaggcataactacttatttgcaattgtggcttcctgtttggacctgaacaaaaccgaagtggaggatgccattcttgaagggaatcaggtgggatgcgtttcacttctcactgacttgatgatggagggcacagatggtctgttgacacagtcctgtggca

SEQ ID NO: 26276 - DNA, 1053 bp, Homo sapiens
agaggggccacttttcctcttcccagtgggagctactggttggcattaaaggtaatgtattattccaagaatgaattggaagctgaacgtctaccagtgtcaaaatagttgaataaagtatggtacattcatactgaatatttttgcagctattacacaggatggaatagtctgtattaaactagaaagaagtccgtgatgcattgttaagggagaaatgcatgaaaacattttatagtatgatgtaaatataggtgtgtgcatatgtttgaataggattgtatgatcatacagtataaggaaagacatgcttcaaactgccaacattggttacattaagcatgccttattctcataattaacaattgatagttaaagagcaagcaatggtattcagaagttaatttcaagaccaaatatgtagctgtagataaacaataaagataggagatactgtagaaaaaatattactttaatggcttaggaaaatgtttacaaaaatggagatctctttttttgatattctgttgaatgcttatatatgcatagaaataagtgtgtaaagatttagaacaaaatgttaacaataataatttctggatggcagatttttctctcttggcttctctgtattctgcaatttcacaacaatgagcatgctttattttcataagagaaataaattatttctaaaaatagaagatagtacataaaaattggtaccattaagctgtctattatctggatacctaagacttgaaaaaacaacaattgtatgaaattattacaaaatgaatccacttgagaacagcagtttccatgtaacattttattcttttctttagcaaagactgaagggagagaaggaagccaagcgggctcttttggatgcgaggcataactacttatttgcaattgtggcttcctgtttggacctgaacaaaaccgaagtggaggatgccattcttgaagggaatcaggtgggatgcgtttsacttctcactgacttgatgatggagggcacagatggtctgttgacacagtcctgtggca

SEQ ID NO: 26277 - DNA, 1312 bp, Homo sapiens
ttttcttttaagctcattcaattttcggttacattttgttccatgttatatgtgtttgcacagaatggaaagctcttttatcttgttgctaaacagtaaattcccaattctattgttcatcatcagattttattctgttttagaacgagttgcggaagttcatggatgttrcatttgcaaagattcaaaacacaaatcaagctctaagaatgttgaagaaatttgaaaggtaaaattttcaagaaattgtctattttctaaaattgggatagtttagcttttattgttgttattcctattattattatttcatattctgatggaaaggaaaacctctcttggcaatttgggtcacaaggtcatagtttttaagtttttcagaggattaatccttttaaggattcaggatttattttatttctacaaatagagaatactcttagctttgaagtaccttgtgactgcctataataatatttcctaatgtatagataatttgaaaaatgtcttcccaagttaatagttttgcctacattttatggatgagttttatttttattcttttaatattccatgtaaatatctcattcttttccattagcattttaaaaaataaatattaataaatgagattactagatatttttattgtgtattttatttattttattccattaattcaagcttttaactttttaaaaaaatcagattgaatatacctaatcttggtattgatgacaaatatcaacttatccttgagaactatggggctgacattgatatgatttcaaagctgtatacaaagcagaaatacgatcctcctctggctcgaaaccagcctcccatcgctggaaagattttgtgggcccgccagctcttccataggattcagcagcccatgcagcttttccagcagcacccagctgtgctaagcacggcagaagccaaacctataattcgcagttacaacaggatggccaaggtcctcctggagtttgaggtcctcttccacagggcgtggcttcggcaagtgagtccctaaatttatactcttcccattgttggaatcatgggaacccctcttctagcatttgacagtgttatttctttagaaagctggatttgtaggtgttttgtaaggcagatgggttgaatctaagcgttcagagtgtaatatgtccacaaagaaaaataattattagatttgaaaagaaaccacaagccaggtaacagaaccccatttttatttaatttacgaactccaaagtgagaagatcttgtttattggttcctatgcccaatctattaggat

SEQ ID NO: 26278 - DNA, 527 bp, Homo sapiens
atagttaagttccttgatccttcccttgtgaatgattcactggaggcctagtccagctattctgccatcttccacactgaagtctacatacacatgtggatttctgacttcctcaattcttttccaagttacctttattactattggagtttgctgtttatttcagtaccctccttccaccccctttgttcttctttacttacacacacacatacacacacacacacacacacacacacacacacacasagagagagatacacacctgctatgaacaaccaaaagaattctggacctgggcagtaagtttgaagatgtcagcaatgcctacctcaaactccagcactgaacagttgtggatccccgataactaaagtcagcctgtgggacctcctctgctgcctattcgccaacccttctctaccatcagtaacttgtttctacaacatcttgccctcctttcactataatgaacacacaggtccaaacaccaagcatctaccccttttctcctacatcattacttc

SEQ ID NO: 26279 - DNA, 1223 bp, Homo sapiens
cttgattctactgagagtgaagtacaacctctgactcttttgcccttgaactaaagacctcatggaagccaggtgtcatggctcatgcttgtaatccccagcactttgggaagccaaggtgggtggatcacttgaggtcaggagttcaagaccagcctggccaacatggtgaaaccctgtctctagtaaaactacaaaaattagccgggcatggtggcatgtgcctgtaatcccagttactctggaggctgaggcaggagaaccgcttgaatccaggaggcagaggttgcagtgagccaagatcgccactgcactgcagcctgggcgacagagcaagactcagtcaaaaaaaaaaaaaaaaaaaaagagacctcatggaaagacatgccagccaacatctggtgcaggatgcagagctcaggctgcaaatctgccactgcatagtcactgttgatctctatttccaggcacccagaggagcccaggttttcaagcctctcttcactgaacttgcgtcacctacagaggcaaaaatgaattttagaaagctgtagaaattcaaagccaaccataacaacccatgtccctgaaggtatttgaatttagcttctgatgaaaataaggccatttcaatgacataatacagccacatttatatcatcctgccatctccatttggagacagctcagtgcttgtccccagccaaaactaacagccggacttyttttgcaatgtttagaaggcactcttttatttagtgctgagaaatcctctctaaaggaatgtttcatagaactatgctcaacatcctgctcttttgtaggaaaataaatccaggatggttgcaaggataatcaattatcatagagtaaaaatgcatacttttaaacaaggctattgtttcagcagatgtttagcttatatcattataaaggcttcaaataaaacaatttggtaatgctttttcttttaacctctctttctgtcaataaataaatgctggatatcatagtccacatgacgagtttattctcctctataccaagctgttattcacgtgacttttattgagcatctactgtatgtaggcctctattctgggtgccatggcaaatgtaaagttgaaaaagatattctttgcctctcaagaggagactgggaagatatcatcatatatgaaacatctcaataaaccaggtgacaatcagtactagctgaagga

SEQ ID NO: 26280 - DNA, 1223 bp, Homo sapiens
cttgattctactgagagtgaagtacaacctctgactcttttgcccttgaactaaagacctcatggaagccaggtgtcatggctcatgcttgtaatccccagcactttgggaagccaaggtgggtggatcacttgaggtcaggagttcaagaccagcctggccaacatggtgaaaccctgtctctagtaaaactacaaaaattagccgggcatggtggcatgtgcctgtaatcccagttactctggaggctgaggcaggagaaccgcttgaatccaggaggcagaggttgcagtgagccaagatcgccactgcactgcagcctgggcgacagagcaagactcagtcaaaaaaaaaaaaaaaaaaaaagagacctcatggaaagacatgccagccaacatctggtgcaggatgcagagctcaggctgcaaatctgccactgcatagtcactgttgatctctatttccaggcacccagaggagcccaggttttcaagcctctcttcactgaacttgcgtcacctacagaggcaaaaatgaattttagaaagctgtagaaattcaaagccaaccataacaacccatgtccctgaaggtatttgaatttagcttctgatgaaaataaggccatttcaatgacataatacagccacatttatatcatcctgccatctccatttggagacagctcagtgcttgtccccagccaaaactaacagccggacttcttttgcaatgtttagaaggcactcttttatttagtgctgagaaatcctctctaaaggaatgtttcatagaactatgctcaacatcctgctcttttgtaggaaaataaatccaggatggttgcaaggataatcaattatcatagagtaaaaatgcatacttttaaacaaggctattgtttcagcagatgtttagcttatatcattataaaggcttcaaataaaacaatttggtaatgctttttcttttaacctctctttctgtcaataaataaatgctggatatcatagtccacatgacgagtttattctcctctataccaagctgttattcacgtgacttttattgagcatctactgtatgtaggcctctattctgggtgccatggcaaatgtaaagttgaaaaagatattctttgcctctcaagaggagactgggaagatatcatcatatatgaaacatctcaataaaccaggtsacaatcagtactagctgaagga

SEQ ID NO: 26281 - DNA, 394 bp, Homo sapiens
gcctgcgggaactactggttcccttgtattcagtcagagttctgaaaactcagagacaacggctttggtagactcatcagctgggcttgagagggcatctgtgatgccactaaccacaggaagccagggtatggcyagctctggaggaatcagaagtgggtccactcactcaactggaaccaaaacattttcttctctccctctgaccatgaacccaggtgaggttacagccatgtctgaaatcaccacgaacagactgacagctactcaatcaacagcacccaaagggatacctgtgaagcccaccagtgctgagtcaggcctcctaacacctgtctctgcctcctcaagcccatcaaaggcctttgcctcactgactacagctcccccaact

SEQ ID NO: 26282 - DNA, 2136 bp, Homo sapiens
ggcctttgtgcaaggttgtggcttttggaatcttttgtgatagttgttatcaggcataccagcatgagaaccctcctttcatggccctccgtgactctatttgcccccttcattcatgcaacacatatttattgcacaactactatgtgccaggtactgcaacaggctgcatttggcaatgtctgaagacatttttggttggtgggagtgctgctgccatcccgttgtagggaacctgggatactgtttagcacttgaccaatatatgggacagcccaccctacctccccaaaggattatgagacccaaatccattgacatttgtgctgggattgagaaacctcgcttcagtgggattggtccaggttgtagcatacagggttgttgccatggagacaggcagataacgaacctgttcagtgggttgagagcagcatcccaaataaataaataaataagagaatataatagaattaaaaggcatcaggggctgggcacggtggctcacgcctgtaatcccaacagtttgggacgctgaggtgggtggattacctgaggtcaggagtttaagaccagcctggccacatggtgaaaccccatttctactaaaaatacaaaaaattagccaggcatggtggtgggcaccggtaatcccagctactcgggaggctgaggcaggagaattgcttgaacccaggaggcagaggttacagtgagccgagatcgcgccattgcgctccagcctgggcaacaagagtgaaacatcttctcaaaaaaaaaaaaaaagaaaagaaaaaagaaaaaagtattttcatcatgcatctataagcaaaactggtcacaatggtaggaagtggtactggtacactggtacacaatacattgcacactggtacacaatgtgcaatgtatttcttaccatggatcccagtctaaaaagactattagactttttagctaatagctaataattaatgttagctcctgcatcagctcatcgtctgatrggcagcacctgccttcctccctacctcatctctttgcctcgttctctcaatactgggagtcactgagaaagaggatgtctcagatcacaggggagctgggtcagaatcactagggtcttacagacccagtctgcccagggtcaaagcccagccctaccacatagcagctatgtgcccttggacaggttgcataactaactgcgccttggtttccttttctgcaaaatggaaatgataataggacgtacctcctattgtcctccaagttgttatgaggatttaatgaattcatatctgtaaagagcttaaaagagtgcctggtacatgttagtgttccctgttagctattatcattatcatgacttgctctagaatagcacttaccccagagtgtaattctttttattattaggggaagggggcaatgtgggttcagagtcactgagagggggtggatcagagccaggataaggatgagaagcccggctcagattcactgtgtgttggggacagggttggcagagctgcaagtgctaggacaagtgcaccaaacaggtctgacaagggttaaatgaagcagatgggattgttcagggtgggatgaaaggtccagggagggtggggacaatcaggcaggctgcctccctgcaccgcagtgtttgtttccttgacaggtgggaggcccagctccactcaggtatgtggccagaccagccagggcagccccctggacctctcatcccaggcagagatgaggagagggacagggtggggccctccagcccaggatggccccggcccacctcctctctcccacccaggaagggctgagccactttggacaatgggctgagtccctggccccattcagccccactggcctggcctgtccccacagggactgctggaggtccttggggggatgttggcaccaactgctcctttgtcttgctacttaccctagaaagaacaagctaagggctctcctccccaatctgaggaaagcaggatattttgccacgagcggcaaaggaggacccctgctgccccagaggaagaggagggaaaacatatttacccacacatgcacacacacaaacactcatgcacacatctctcacacttatgc

SEQ ID NO: 26283 - DNA, 2136 bp, Homo sapiens
ggcctttgtgcaaggttgtggcttttggaatcttttgtgatagttgttatcaggcataccagcatgagaaccctcctttcatggccctccgtgactctatttgcccccttcattcatgcaacacatatttattgcacaactactatgtgccaggtactgcaacaggctgcatttggcaatgtctgaagacatttttggttggtgggagtgctgctgccatcccgttgtagggaacctgggatactgtttagcacttgaccaatatatgggacagcccaccctacctccccaaaggattatgagacccaaatccattgacatttgtgctgggattgagaaacctcgcttcagtgggattggtccaggttgtagcatacagggttgttgccatggagacaggcagataacgaacctgttcagtgggttgagagcagcatcccaaataaataaataaataagagaatataatagaattaaaaggcatcaggggctgggcacggtggctcacgcctgtaatcccaacagtttgggacgctgaggtgggtggattacctgaggtcaggagtttaagaccagcctggccacatggtgaaaccccatttctactaaaaatacaaaaaattagccaggcatggtggtgggcaccggtaatcccagctactcgggaggctgaggcaggagaattgcttgaacccaggaggcagaggttacagtgagccgagatcgcgccattgcgctccagcctgggcaacaagagtgaaacatcttctcaaaaaaaaaaaaaaagaaaagaaaaaagaaaaaagtattttcatcatgcatctataagcaaaactggtcacaatggtaggaagtggtactggtacactggtacacaatacattgcacactggtacacaatgtgcaatgtatttcttaccatggatcccagtctaaaaagactattagactttttagctaatagctaataattaatgttagctcctgcatcagctcatcgtctgataggcagcacctgccttcctccctacctcatctctttgcctcgttctctcaatactgggagtcactgagaaagaggatgtctcagatcacaggggagctgggtcagaatcactagggtcttacagacccagtctgcccagggtcaaagcccagccctaccacatagcagctatgtgcccttggacaggttgcataactaactgcgccttggtttccttttctgcaaaatggaaatgataataggacgtacctcctattgtcctccaagttgttatgaggatttaatgaattcatatctgtaaagagcttaaaagagtgcctggtacatgttagtgttccctgttagctattatcattatcatgacttgctctagaatagcacttaccccagagtgtaattctttttattattaggggaagggggcaatgtgggttcagagtcactgagagggggtggatcagagccaggataaggatgagaagcccggctcagattcactgtgtgttggggacagggttggcagagctgcaagtgctaggacaagtgcaccaaacaggtctgacaagggttaaatgaagcagatgggattgttcagggtgggatgaaaggtccagggagggtggggacaatcaggcaggctgcctccctgcaccgcagtgtttgtttccttgacaggtgggaggcccagctccactcaggtatgtggccagaccagccagggcagccccctggacctctcatcccaggcagagatgaggagagggacagggtggggccctccagcccaggatggccccggcccacctcctctctcccacccaggaagsgctgagccactttggacaatgggctgagtccctggccccattcagccccactggcctggcctgtccccacagggactgctggaggtccttggggggatgttggcaccaactgctcctttgtcttgctacttaccctagaaagaacaagctaagggctctcctccccaatctgaggaaagcaggatattttgccacgagcggcaaaggaggacccctgctgccccagaggaagaggagggaaaacatatttacccacacatgcacacacacaaacactcatgcacacatctctcacacttatgc

SEQ ID NO: 26284 - DNA, 565 bp, Homo sapiens
gaagagcaggctgcacctgacaaccggtcccctgcccactgccccattcccaactctgccaaaagtggaagtggggccccagcatggccccagtgaagcagagcttctgcaggtgcatgaggggtgggggtcccagcaaagcagaacttctgcaggcaaggcgcatgaggggcaggggccaaggaggccctggccaggagggtggtgcctgctaacccaggggcgtgggcttctcatgcaggggagaccacgtacctatggcagcctgcgtcctcactccaagatttcccatttccttcaggtggacccgctgcaggtggaccccctgccccagccacaggaarcgtgagctagcgcccatagggtggaacacagaaacctcattactcctccccagcccactgcagagatgacgtgccaagggaaagcatgaattctctttgatgtcttcattgaaatcagaaataaaggactgagcgtgacagagccctgtggcatgccaccggagacctttctccagagtgctgaattcagtcaaacggcatcatttggatcctaccatttt

SEQ ID NO: 26285 - DNA, 1089 bp, Homo sapiens
cttctgtgtccctcaagccatctgtgaccgtcccacttcataaaagcaaaggtcacttgctcattgaaacttcctctgtgccaggcaagagctgcatcgccccaacaggcccctcaagcaagatgctattatcattatcatgatgcccttttttgcagatggggaaaagtgaggctcagaaagaccaagtccgcaggccccatctctactgaaaatacaaaaacatkagcgcccgtaatcccagctactccggaggctgaggcaggagaattgctgagatcgcgccattgcactccagcctgggcgacaagaccaaaactctgtctcaaaaaaaaaaagaaaaagaaagtaaagggggagaaggaaaggaagagggtggttgggaacacagaagaggtgacattgggtagggactcaagctggaaagggggacaaagtggaagctgggtgcagtggctcatgcctgtaatcccagcactttgggaggccaaggcgggaggatcacttgtgcctgggagttctagaccaacctggccaacacagggagacctcgtctctgcaaaatatttaaaaacaattagctgagctaggtggcacacatctgtggtcccagctacttgggaggctgaattgggagaagcacttgagtttggaggtctaggctgctgtgagccgtgatcatgccaccatactccagcctgggcaacagagcaagatcctgtcaaaaaaaggaaggaaggagtggggttgacatgcaaggccatttgaggatgggctgggacattgtggactcatttccctcctccccagaggaccagaaggagcaagagatccccttacctgtgggcagcaggtatctcagcattagtaacaccagggcccaccgccggcctccaggggcaccctgccacaggccagccattcacggcttcaggaagacttgggggctgctctttgccctcgttccagccccccagccaagcccagagacatgtccagcagctccaggcggccaggtgcctaagatctggcgggtatcaaatgtgcccagtcagcctaatccctgcgaggctgggcggggctgggaag

SEQ ID NO: 26286 - DNA, 1089 bp, Homo sapiens
cttctgtgtccctcaagccatctgtgaccgtcccacttcataaaagcaaaggtcacttgctcattgaaacttcctctgtgccaggcaagagctgcatcgccccaacaggcccctcaagcaagatgctattatcattatcatgatgcccttttttgcagatggggaaaagtgaggctcagaaagaccaagtccgcaggccccatctctactgaaaatacaaaaacattagcgcccgtaatcccagctactccggaggctgaggcaggagaattgctgagatcgcgccattgcactccagccwgggcgacaagaccaaaactctgtctcaaaaaaaaaaagaaaaagaaagtaaagggggagaaggaaaggaagagggtggttgggaacacagaagaggtgacattgggtagggactcaagctggaaagggggacaaagtggaagctgggtgcagtggctcatgcctgtaatcccagcactttgggaggccaaggcgggaggatcacttgtgcctgggagttctagaccaacctggccaacacagggagacctcgtctctgcaaaatatttaaaaacaattagctgagctaggtggcacacatctgtggtcccagctacttgggaggctgaattgggagaagcacttgagtttggaggtctaggctgctgtgagccgtgatcatgccaccatactccagcctgggcaacagagcaagatcctgtcaaaaaaaggaaggaaggagtggggttgacatgcaaggccatttgaggatgggctgggacattgtggactcatttccctcctccccagaggaccagaaggagcaagagatccccttacctgtgggcagcaggtatctcagcattagtaacaccagggcccaccgccggcctccaggggcaccctgccacaggccagccattcacggcttcaggaagacttgggggctgctctttgccctcgttccagccccccagccaagcccagagacatgtccagcagctccaggcggccaggtgcctaagatctggcgggtatcaaatgtgcccagtcagcctaatccctgcgaggctgggcggggctgggaag

SEQ ID NO: 26287 - DNA, 1089 bp, Homo sapiens
cttctgtgtccctcaagccatctgtgaccgtcccacttcataaaagcaaaggtcacttgctcattgaaacttcctctgtgccaggcaagagctgcatcgccccaacaggcccctcaagcaagatgctattatcattatcatgatgcccttttttgcagatggggaaaagtgaggctcagaaagaccaagtccgcaggccccatctctactgaaaatacaaaaacattagcgcccgtaatcccagctactccggaggctgaggcaggagaattgctgagatcgcgccattgcactccagcctgggcgacaagaccaaaactctgtctcaaaaaaaaaaagaaaaagaaagtaaagggggagaaggaaaggaagagggtggttgggaacacagaagaggtgacattgggtagggactcaagctggaaagggggacaaagtggaagctgggtgcagtggctcatgcctgtaatcccagcactttgggaggccaaggcgggaggatcacttgtgcctgggagttctagaccaaccyggccaacacagggagacctcgtctctgcaaaatatttaaaaacaattagctgagctaggtggcacacatctgtggtcccagctacttgggaggctgaattgggagaagcacttgagtttggaggtctaggctgctgtgagccgtgatcatgccaccatactccagcctgggcaacagagcaagatcctgtcaaaaaaaggaaggaaggagtggggttgacatgcaaggccatttgaggatgggctgggacattgtggactcatttccctcctccccagaggaccagaaggagcaagagatccccttacctgtgggcagcaggtatctcagcattagtaacaccagggcccaccgccggcctccaggggcaccctgccacaggccagccattcacggcttcaggaagacttgggggctgctctttgccctcgttccagccccccagccaagcccagagacatgtccagcagctccaggcggccaggtgcctaagatctggcgggtatcaaatgtgcccagtcagcctaatccctgcgaggctgggcggggctgggaag

SEQ ID NO: 26288 - DNA, 1089 bp, Homo sapiens
cttctgtgtccctcaagccatctgtgaccgtcccacttcataaaagcaaaggtcacttgctcattgaaacttcctctgtgccaggcaagagctgcatcgccccaacaggcccctcaagcaagatgctattatcattatcatgatgcccttttttgcagatggggaaaagtgaggctcagaaagaccaagtccgcaggccccatctctactgaaaatacaaaaacattagcgcccgtaatcccagctactccggaggctgaggcaggagaattgctgagatcgcgccattgcactccagcctgggcgacaagaccaaaactctgtctcaaaaaaaaaaagaaaaagaaagtaaagggggagaaggaaaggaagagggtggttgggaacacagaagaggtgacattgggtagggactcaagctggaaagggggacaaagtggaagctgggtgcagtggctcatgcctgtaatcccagcactttgggaggccaaggcgggaggatcacttgtgcctgggagttctagaccaacctggccaacacagggagacctcgtctctgcaaaatatttaaaaacaattagctgagctaggtggcacacatctgtggtcccagctacttgggaggctgaattgggagaagcacttgagtttggaggtctaggctgctgtgagccgtgatcatgccaccatactccagcctgggcaacagagcaagatcctgtcaaaaaaaggaaggaaggagtggggttgacatgcaaggccatttgaggatgggctgggacattgtggactcatttccctcctccccagaggaccagaaggagcaagagatccccttacctgtgggcagcaggtatctcagcattagtaacaccagggcccaccgccggcctccaggggcaccctgccacaggccagccattcacggcttcaggaagacttgggggctgctctttgccctcgttccagccccccagccaagcccagagacatgtccagcagctccaggcggccaggtgcctaagatctggcgggtatcaaatgtgcccagtcagcctaatccctgcgaggcygggcggggctgggaag

SEQ ID NO: 26289 - DNA, 1052 bp, Homo sapiens
cagtgtcaatccctttggggtcccatccaactactaatacagaaacaagcatcccagtaaacagcgcaggtccacctggcttgtccacagtagcatcagatgtaattgacacaccttcagatggggctgagagtattcccactgtctccttttccccctcccctgatactgaagtgacaactatctcacatttcccagaaaagacaactcattcatttagaaccatttcatctctcactcatgagttgacttcaagagtgacacctattcctggggattggatgagttcagctatgtctacaaagcccacaggagccagtccctccattacactgggagagagaaggacaatcacctctgctgctccaaccacttcccccatagttctcactgctagtttcacagagaccagcacagtttcactggataatgaaactacagtaaaaacctcagatatccttgacgcacggaaaacaaatgagctcccctcagatagcagttcttcttctgatctgatcaacacctccatagcttcttcaactatggatgtcactaaaacagcctccatcagtcccactagcatctcaggaatgacagcaagttcctccccatctctcttctcttcagatagaccccaggttcccacatctacaacagagacaaatacagccacctctccatctgtttccagtaacacctattctcttgatgggggctccaatgtgggtggcactccatccactttaccaccctttacaatcacccaccctgtcgagacaagctcggccctattagcctggtctagaccagtaagaactttcagcaccatggtcagcactgacactgcctccggagaaaatcctacctctagcaattctgtggtgacttctgttccagcaccaggtacatggrccagtgtaggcagtactactgacttacctgccatgggctttctcaagacaagtcctgcaggagaggcacactcacttctagcatcaactattgaaccagccactgccttcactccccatctctcagcagcagtggtcact

SEQ ID NO: 26290 - DNA, 1052 bp, Homo sapiens
cagtgtcaatccctttggggtcccatccaactactaatacagaaacaagcatcccagtaaacagcgcaggtccacctggcttgtccacagtagcatcagatgtaattgacacaccttcagatggggctgagagtattcccactgtctccttttccccctcccctgatactgaagtgacaactatctcacatttcccagaaaagacaactcattcatttagaaccatttcatctctcactcatgagttgacttcaagagtgacacctattcctggggattggatgagttcagctatgtctacaaagcccacaggagccagtccctccattacactgggagagagaaggacaatcacctctgctgctccaaccacttcccccatagttctcactgctagtttcacagagaccagcacagtttcactggataatgaaactacagtaaaaacctcagatatccttgacgcacggaaaacaaatgagctcccctcagatagcagttcttcttctgatctgatcaacacctccatagcttcttcaactatggatgtcactaaaacagcctccatcagtcccactagcatctcaggaatgacagcaagttcctccccatctctcttctcttcagatagaccccaggttcccacatctacaacagagacaaatacagccacctctccatctgtttccagtaacacctattctcttgatgggggctccaatgtgggtggcactccatccactttaccaccctttacaatcacccaccctgtcgagacaagctcggccctattagcctggtctagaccagtaagaactttcagcaccatggtcagcactgacactgcctccggagaaaatcctacctctagcaattctgtggtgacttctgttccagcaccaggtacatggaccagtgtaggcagtactactgacttacctgccatgggctttctcaagacaagtcctgcaggagaggcacactcacttctagcrtcaactattgaaccagccactgccttcactccccatctctcagcagcagtggtcact

SEQ ID NO: 26291 - DNA, 1052 bp, Homo sapiens
cagtgtcaatccctttggggtcccatccaactactaatacagaaacaagcatcccagtaaacagcgcaggtccacctggcttgtccacagtagcatcagatgtaattgacacaccttcagatggggctgagagtattcccactgtctccttttccccctcccctgatactgaagtgacaactatctcacatttcccagaaaagacaactcattcatttagaaccatttcatctctcactcatgagttgacttcaagagtgacacctattcctggggattggatgagttcagctatgtctacaaagcccacaggagccagtccctccattacactgggagagagaaggacaatcacctctgctgctccaaccacttcccccatagttctcactgctagtttcacagagaccagcacagtttcactggataatgaaactacagtaaaaacctcagatatccttgacgcacggaaaacaaatgagctcccctcagatagcagttcttcttctgatctgatcaacacctccatagcttcttcaactatggatgtcactaaaacagcctccatcagtcccactagcatctcaggaatgacagcaagttcctccccatctctcttctcttcagatagaccccaggttcccacatctacaacagagacaaatacagccacctctccatctgtttccagtaacacctattctcttgatgggggctccaatgtgggtggcactccatccactttaccaccctttacaatcacccaccctgtcgagacaagctcggccctattagcctggtctagaccagtaagaactttcagcaccatggtcagcactgacactgcctccggagaaaatcctacctctagcaattctgtggtgacttctgttccagcaccaggtacatggaccagtgtaggcagtactactgacttacctgccatgggctttctcaagacaagtcctgcaggagaggcacactcacttctagcatcaactattgaaccagccactgccttcactccycatctctcagcagcagtggtcact

SEQ ID NO: 26292 - DNA, 815 bp, Homo sapiens
agcctagcaaagaggctgctccggatggggaggggatgaaaaccctgcgggtccgacgcccatgcccacgttgcccaggccttcacagacccccaaactggaaccgccgggacgacgactgccaaccggccacacgacycaggcagagacgcggggagacgctgaccagaagaaaggccgacgtgcaagaaacccaccctccggcgcacagggcccatgtgtcccaaggcgcacgcacacacagacggacagagacagaaagagagggcgaccgaaagagcgagaagggagagagagagagagagagagagagagagagagagagagagagagagagaggtaagagagagacagaagtcggcacacagacacgcactgcgcgcgcacacacacagacacacacacagacgcatccccccaacacacacacacacacccataacgaacacacacgtacagcagggaacacccacccgcagcagcccctgaagctgccgggttctgctctccgcgactaagagccaccggtgagagagcagcccacgggcacacaggcggacctgtgctcgtcatcacaagggctccacttttggggagactcacccgcacaccgtccgcgcacgcctgaggctgggatgccgcgctgcctcgccggcgatctgtctgagttttcttcctcctggggtttcttcctgctggtggaccctccgcgaatcccggcctccggagaccgtcctggtaactgccctggccaggactggtctcagcccagactcagacgcacgatcacacagggctcctacttcgccaagtgt

SEQ ID NO: 26293 - DNA, 815 bp, Homo sapiens
agcctagcaaagaggctgctccggatggggaggggatgaaaaccctgcgggtccgacgcccatgcccacgttgcccaggccttcacagacccccaaactggaaccgccgggacgacgactgccaaccggccacacgactcaggcagagacgcggggagacgctgaccagaagaaaggccgacgtgcaagaaacccaccctccggcgcacagggcccatgtgtcccaaggcgcacgcacacacagacggacagagacagaaagagagggcgaccgaaagagcgagaagggagagagasagagagagagagagagagagagagagagagagagagagagaggtaagagagagacagaagtcggcacacagacacgcactgcgcgcgcacacacacagacacacacacagacgcatccccccaacacacacacacacacccataacgaacacacacgtacagcagggaacacccacccgcagcagcccctgaagctgccgggttctgctctccgcgactaagagccaccggtgagagagcagcccacgggcacacaggcggacctgtgctcgtcatcacaagggctccacttttggggagactcacccgcacaccgtccgcgcacgcctgaggctgggatgccgcgctgcctcgccggcgatctgtctgagttttcttcctcctggggtttcttcctgctggtggaccctccgcgaatcccggcctccggagaccgtcctggtaactgccctggccaggactggtctcagcccagactcagacgcacgatcacacagggctcctacttcgccaagtgt

SEQ ID NO: 26294 - DNA, 815 bp, Homo sapiens
agcctagcaaagaggctgctccggatggggaggggatgaaaaccctgcgggtccgacgcccatgcccacgttgcccaggccttcacagacccccaaactggaaccgccgggacgacgactgccaaccggccacacgactcaggcagagacgcggggagacgctgaccagaagaaaggccgacgtgcaagaaacccaccctccggcgcacagggcccatgtgtcccaaggcgcacgcacacacagacggacagagacagaaagagagggcgaccgaaagagcgagaagggagagagagagagagagagagagagagagagagagagagagagagagagaggtragagagagacagaagtcggcacacagacacgcactgcgcgcgcacacacacagacacacacacagacgcatccccccaacacacacacacacacccataacgaacacacacgtacagcagggaacacccacccgcagcagcccctgaagctgccgggttctgctctccgcgactaagagccaccggtgagagagcagcccacgggcacacaggcggacctgtgctcgtcatcacaagggctccacttttggggagactcacccgcacaccgtccgcgcacgcctgaggctgggatgccgcgctgcctcgccggcgatctgtctgagttttcttcctcctggggtttcttcctgctggtggaccctccgcgaatcccggcctccggagaccgtcctggtaactgccctggccaggactggtctcagcccagactcagacgcacgatcacacagggctcctacttcgccaagtgt

SEQ ID NO: 26295 - DNA, 991 bp, Homo sapiens
tcctccatatgctgaacgctggttccccgggtccccttatttctttctctatactttgtctctgtgtctttttcttttccaaatctctcgtcccaccttacgagaaacacccacaggtgtgtaggggcaacccacccctacacgcccagctaatttttgtatttttaatagagatggggtttcgcaatgttggccaggctggtctcgaactcccgacctcaggtgatctgcccaccttggcctcccaaagtgctgggattacaggcgtgagccaccatgcctggccaacttcttgctctttttgccactacttttaagctgatatatttggaactgaggtagcctcattctacaggtttagatctgaagtattttaactattgcttcttccagtgtattttctggtttgcaggccagtttcttctttaactcatcagtgacacagtggtttgtatggcttttaatttcaaagaatattttttcaatttgcttttttgttttttgctgatttttatctatgctaattttaactagacatgttcccttgatgggcatgactagattttttcttccccactgcgtttataatttagatggattttcacatctcaagccagttaagagtgtggaaaataggactccttaaagcacagataatgacaagtggttcagatttacragggtaactcaggtgagagtgtatcattgtacttggcacacagcactgagtaactatcacctttcatttaaatgaatgcagctgtaaatgctttcctagatgtcttgttgatgtttgttaatttctgtagagtttcattctgcccctttcactgtttatcacttgatccttatcacttgagagtccccttattacttgacctgctgttacattatgtttgatttattacaaataccccatcagcctgggtctctctttactccctttgtacacctacatctaaacatagtgatttggattatctcaggatcc

SEQ ID NO: 26296 - DNA, 819 bp, Homo sapiens
ccagcctagcaaagaggctgctccggatggggaggggatgaaaacccctgcgggttcgacgccgatgcccacgttgcccaggccttcacagacccccaaactggaactgctgggacgacgactgccaaccggccacacgacccaggcaragacgcggggagaggctgaccagaaggaaggccgacgtgcaagaaacccaccctccggcgcacagggcacatgtgtcccaaggcgcacgcacacacagacggacagagacagacagagagggcgacggaaacagcgagaagggagagagagagagagagagagagagacagagagagacgtgagagagagacagaagtcggcacacagacacgcactgcgcgcgcacacacacagacacacacacagacgcatccccccaacacacacacacacacccataacgaacacacacgtacagcagggaacacccacccgcaggcagcccctgaagctgccgggttctgctctccgcgactaagagccaccggtgagagagcagcccacgggcacacaggcggacctgtgctcgtcatcacaagggctccacttttggggagactcacccgcacaccgtccgcgcacgcctgaggctgggatgccgcgctgcctcgccggcgatctgtctgagttttcttcctcctggggtttcttcctgctggtggaccctccgcgaatcccggcctccggagaccgtcctggtaactgccctggccaggactggtctcagcccagactcagacgcacgatcacacagggctcctacttcgccaagtgtcagggacccatccc

SEQ ID NO: 26297 - DNA, 819 bp, Homo sapiens
ccagcctagcaaagaggctgctccggatggggaggggatgaaaacccctgcgggttcgacgccgatgcccacgttgcccaggccttcacagacccccaaactggaactgctgggacgacgactgccaaccggccacacgacccaggcagagacgcggggagaggctgaccagaagraaggccgacgtgcaagaaacccaccctccggcgcacagggcacatgtgtcccaaggcgcacgcacacacagacggacagagacagacagagagggcgacggaaacagcgagaagggagagagagagagagagagagagagacagagagagacgtgagagagagacagaagtcggcacacagacacgcactgcgcgcgcacacacacagacacacacacagacgcatccccccaacacacacacacacacccataacgaacacacacgtacagcagggaacacccacccgcaggcagcccctgaagctgccgggttctgctctccgcgactaagagccaccggtgagagagcagcccacgggcacacaggcggacctgtgctcgtcatcacaagggctccacttttggggagactcacccgcacaccgtccgcgcacgcctgaggctgggatgccgcgctgcctcgccggcgatctgtctgagttttcttcctcctggggtttcttcctgctggtggaccctccgcgaatcccggcctccggagaccgtcctggtaactgccctggccaggactggtctcagcccagactcagacgcacgatcacacagggctcctacttcgccaagtgtcagggacccatccc

SEQ ID NO: 26298 - DNA, 867 bp, Homo sapiens
agcctagcaaagaggctgctccggatggggaggggatgaaaacccctgcgggttcgacgccgatgcccacgttgcccaggccttcacagacccccaaactggaactgccgggacgacgactgccaaccggccacacgacccaggcagagacgcggggagaggctgaccagaagaaaggccgacgtgcaagaaacccaccctccggcgyacagggcacatgtgtcccaaggcgcacgcacacacagacggacagagatagaaagagagggcgacggaaacagcgagaagggagagagagagagagagagagagagagagacagagagagacgtgagagagagacagaagtcggcacacagacacgcactgcgcgcgcacacacacagacacacacacagacgcacccccccaacacacacacacacacccataacgaacacacacgtacagctgggaacacccacccgcaggcagcccctgaagctgccgggttctgctctccgagactaagagccaccggtgagagagcagcccacgggcacacaggcggacctgtgctcgtcatcacaagggctccacttttggggagactcacccgcacaccgtccgcgcacgcctgaggctgggatcccgcgctgcctcgccggcgatctgtctgaggtttcttcctcttggggtttcttcctgctggtggaccctccgcgaatcccggcctccggagaccgtcctggtaactgccctggccaggactggtctcagcccagactcagacgcacgatcacacagggctcctacttcgccaagtgtcagggacccatccccgggcaacggtggctttcactgtgacccaagcggcggcttgggcct

SEQ ID NO: 26299 - DNA, 867 bp, Homo sapiens
agcctagcaaagaggctgctccggatggggaggggatgaaaacccctgcgggttcgacgccgatgcccacgttgcccaggccttcacagacccccaaactggaactgccgggacgacgactgccaaccggccacacgacccaggcagagacgcggggagaggctgaccagaagaaaggccgacgtgcaagaaacccaccctccggcgtacagggcacatgtgtcccaaggcgcacgcacacacagacggacagagayagaaagagagggcgacggaaacagcgagaagggagagagagagagagagagagagagagagacagagagagacgtgagagagagacagaagtcggcacacagacacgcactgcgcgcgcacacacacagacacacacacagacgcacccccccaacacacacacacacacccataacgaacacacacgtacagctgggaacacccacccgcaggcagcccctgaagctgccgggttctgctctccgagactaagagccaccggtgagagagcagcccacgggcacacaggcggacctgtgctcgtcatcacaagggctccacttttggggagactcacccgcacaccgtccgcgcacgcctgaggctgggatcccgcgctgcctcgccggcgatctgtctgaggtttcttcctcttggggtttcttcctgctggtggaccctccgcgaatcccggcctccggagaccgtcctggtaactgccctggccaggactggtctcagcccagactcagacgcacgatcacacagggctcctacttcgccaagtgtcagggacccatccccgggcaacggtggctttcactgtgacccaagcggcggcttgggcct

SEQ ID NO: 26300 - DNA, 867 bp, Homo sapiens
agcctagcaaagaggctgctccggatggggaggggatgaaaacccctgcgggttcgacgccgatgcccacgttgcccaggccttcacagacccccaaactggaactgccgggacgacgactgccaaccggccacacgacccaggcagagacgcggggagaggctgaccagaagaaaggccgacgtgcaagaaacccaccctccggcgtacagggcacatgtgtcccaaggcgcacgcacacacagacggacagagatagamagagagggcgacggaaacagcgagaagggagagagagagagagagagagagagagagacagagagagacgtgagagagagacagaagtcggcacacagacacgcactgcgcgcgcacacacacagacacacacacagacgcacccccccaacacacacacacacacccataacgaacacacacgtacagctgggaacacccacccgcaggcagcccctgaagctgccgggttctgctctccgagactaagagccaccggtgagagagcagcccacgggcacacaggcggacctgtgctcgtcatcacaagggctccacttttggggagactcacccgcacaccgtccgcgcacgcctgaggctgggatcccgcgctgcctcgccggcgatctgtctgaggtttcttcctcttggggtttcttcctgctggtggaccctccgcgaatcccggcctccggagaccgtcctggtaactgccctggccaggactggtctcagcccagactcagacgcacgatcacacagggctcctacttcgccaagtgtcagggacccatccccgggcaacggtggctttcactgtgacccaagcggcggcttgggcct

SEQ ID NO: 26301 - DNA, 901 bp, Homo sapiens
cttgtttgtggaagacactgagccacgctaagaagccgccaggcttctcagagacggggcagacacagcaagagggaggtcagagcagaggccagagcccaggcaggatacgggggggccatgccaccaccaccggcatccggggaggagtgtcaaacgggtgactcggccaggaaggccagcctttgagagacagacatgcttgccccatccccttgccggcttccttctccgtccctgcgtcgagctgtggctacatttctcgatgagggcagagkgcgacaggcgtgacaaccaccttcttgaagctctgcgggcaccctcctgcgggtggacaatgagcgcctgggaggccgttgtccttggttggggagcgctcgtctggatccagcctagcaaagaggctgctccggatggggaggggatgaaaacccctgcgggttcgacgccgatgcccacgttgcccaggccttcacagacccccaaactggaactgccgggacgacgactgccaaccggccacacgacccaggcagagacgcggggacacgctgaccagaagaaaggccgacgtgcaagaaacccaccctccggcgcacagggcacatgtgtcccaaggcgcacgcacacacagacggacagagacagacagagagggcgacggaaacagcgagaagggagagagagagagagagagagagagagagagagagagagagagagagaggtgagagagagtcagaagtcggcacacagacacgcactgcgcgcgcacacacacagacacacacacagacgcacccccccaacacacacacacacacccataacgaacacacacgtacagcagggaacacccacccgcaggcagcccctgaagctgccgggttctgctctccgc

SEQ ID NO: 26302 - DNA, 901 bp, Homo sapiens
cttgtttgtggaagacactgagccacgctaagaagccgccaggcttctcagagacggggcagacacagcaagagggaggtcagagcagaggccagagcccaggcaggatacgggggggccatgccaccaccaccggcatccggggaggagtgtcaaacgggtgactcggccaggaaggccagcctttgagagacagacatgcttgccccatccccttgccggcttccttctccgtccctgcgtcgagctgtggctacatttctcgatgagggcagagggcgacaggcgtgacaaccaccttcttgaagctctgcgggcaccctcctgcgggtggacaatgagcgcctgggaggccgttgtccttggttggggagygctcgtctggatccagcctagcaaagaggctgctccggatggggaggggatgaaaacccctgcgggttcgacgccgatgcccacgttgcccaggccttcacagacccccaaactggaactgccgggacgacgactgccaaccggccacacgacccaggcagagacgcggggacacgctgaccagaagaaaggccgacgtgcaagaaacccaccctccggcgcacagggcacatgtgtcccaaggcgcacgcacacacagacggacagagacagacagagagggcgacggaaacagcgagaagggagagagagagagagagagagagagagagagagagagagagagagagaggtgagagagagtcagaagtcggcacacagacacgcactgcgcgcgcacacacacagacacacacacagacgcacccccccaacacacacacacacacccataacgaacacacacgtacagcagggaacacccacccgcaggcagcccctgaagctgccgggttctgctctccgc

SEQ ID NO: 26303 - DNA, 825 bp, Homo sapiens
gtctggatccagcctagcaaagaggctgctccggatggggaggggatgaaaaccctgcgggtccgacgcccatgcccacgttgcccaggccttcacagacccccaaactggaaccgccgggacgacgactgccaaccggccacacgacccaggcagagacgcggggacacgctgaccagaagaaaggccgacgtgcaagaaacccaccctccggcgcacagggcccatgtgtcccaaggcgcacgcacacacagacggacagagacagaaagagagggcgaccgaaagagcgagaagggagagagacagagagagagagagagagagagagacgtgagagagagacagaagtcggcacacagacacgcactgcgcgcgcacacacacagacacacacacagacgcatccccccaacacacacacacacacacccataacgaacacacacgtacagcagggaacacccacccgcaggcagcccctgaagstgccgggttctgctctccgcgactaagagccaccggtgagagagcagcccacgggcacacaggcggacctgtgctcgtcatcacaagggctccacttttggggagactcacccgcacaccgtccgcgcacgcctgaggctgggatgccgcgctgcctcgccggcgatctgtctgagttttcttcctcctggggtttcttcctgctggtggaccctccgcgaatcccggcctccggagaccgtcctggtaaatgcctggccaggactgtctcagcccagactcagacgcacgatcacacaggctcctacttcgccaagtgtcagggacccatccccg

SEQ ID NO: 26304 - DNA, 582 bp, Homo sapiens
cagatgtgattgtcagaggagcgatggcatttcctctgaatgggagggtatgttcctccaacttggatgctagcatgatgagcaatgaaagtgtgctttgttccctagccttcacatgctctccatactggcagttatcatttactggtatttttgaaatcaaacactatcccatcccccggatggacgctgcctcagtgccgcttttgagctgggccatacagtcagctgttcataaatatccagctccatgagctaaaaataagtgccacaggccaaatgctttgccttttgacttaatgcaactctatacctacccacacaaacattcccatacatacacatacacccctggctttctctgtgggtgcctcgggtgctcagcccaaggacgtgttctcttagcaycaacgcccctcagatagctctccaacccccagacacccattaattgactgcaaatgcaactttattgcaaaatgactgcagctttattaagcaactggatttacaggcaataacataatcaatataacattaatatagcacataattaaataagattcctacaaggtcctgcct

SEQ ID NO: 26305 - DNA, 646 bp, Homo sapiens
aacttagacaggcccatctccaggagtgaaggaaggaatcttgaggatttctaattgatatcatcgtccccaaaatatcccaaatgaaaatcaagttctcgccctggatgaaaatcaagttctcgccctggatgaaaatcaagttctcgccatggataaaaatcaagttctcgccatggataaaaatcaagttctcgccctggatgaaaatcaagttctcgccatggataaaaatcaagttctcgccctggatgaaaatcaagttctygccctggatgaaaatcaagttcttgccatggataaaaatcaagttctcgccatggatgaaaatcaagttctcgccatggataaaaatcaagttctcgccatggatagaaatcaagttctcaccctggatgaaaatcaagttctcgccatggttggagacacagcttccagacacattctctaatcttctgcccgcagccccagcacagagatttcagaaatggtgcttgttatccaccagctcaatccgagactgaccacccaactcctcacaggagcaaaaggcatgcagacctagggaaaggttctcccatcgcccctctgaggaccaaggtgccctcaccagcagggaaatgtgagctccgattttcactgattc

SEQ ID NO: 26306 - DNA, 885 bp, Homo sapiens
gggatcccagggacttcacagaaattaagctttcaatcccaaatttgtgatgctgtgccaatttgtaataaggagtttaggaaaaactctctaagcwgggagggacaggctctgccatcacaagtcagtggagttacacagagagccataactttacactttaggatttatccaaatgttaaaagaaagtaaacatttcagcttggtggcccatgtgatctctgtcacaactattcagttctgccgttgtggcctcaaaacagccattgatgcattgtaaataaatgcacgtggctgtgtgccaagaaaacattatttacaaaaataggctttaggctggattttccatgcctgctgtgtctgaacattttctcttctccagtgataaccagtcgttctgctcagtggtgggggtggtatttgccgagccagaatgtgtgtgctgttttaggaatccgtcacctttgaggatgtggccgtggagttcatccaggagtgggcattgctggacagcgcacggaggagcctgtgcaaatacaggatgcttgaccagtgcaggaccctggcctccaggggtaaggctggcgtcacctggctccttcctgtacgcaggcactaaatgcttcttaagcgcctgccatgtgaagaagacagacgtggcttaggctttgtggcacttagcgtccacaggatgacaaagcttcatctgttgcattgacttctttccctctgtagtaaggccctgtttgggtctccttgaatttggccccaggcttctgaggtgagacagcctcagccccttggggcagaggggagggtgtttgtgggttgggtcctgagttcattagctattgggcaagatccctttgctacccatcacacttg

SEQ ID NO: 26307 - DNA, 885 bp, Homo sapiens
gggatcccagggacttcacagaaattaagctttcaatcccaaatttgtgatgctgtgccaatttgtaataaggagtttaggaaaaactctctaagcagggagggacaggctctgccatcacaagtcagtggagttacacagagagccawaactttacactttaggatttatccaaatgttaaaagaaagtaaacatttcagcttggtggcccatgtgatctctgtcacaactattcagttctgccgttgtggcctcaaaacagccattgatgcattgtaaataaatgcacgtggctgtgtgccaagaaaacattatttacaaaaataggctttaggctggattttccatgcctgctgtgtctgaacattttctcttctccagtgataaccagtcgttctgctcagtggtgggggtggtatttgccgagccagaatgtgtgtgctgttttaggaatccgtcacctttgaggatgtggccgtggagttcatccaggagtgggcattgctggacagcgcacggaggagcctgtgcaaatacaggatgcttgaccagtgcaggaccctggcctccaggggtaaggctggcgtcacctggctccttcctgtacgcaggcactaaatgcttcttaagcgcctgccatgtgaagaagacagacgtggcttaggctttgtggcacttagcgtccacaggatgacaaagcttcatctgttgcattgacttctttccctctgtagtaaggccctgtttgggtctccttgaatttggccccaggcttctgaggtgagacagcctcagccccttggggcagaggggagggtgtttgtgggttgggtcctgagttcattagctattgggcaagatccctttgctacccatcacacttg

SEQ ID NO: 26308 - DNA, 885 bp, Homo sapiens
gggatcccagggacttcacagaaattaagctttcaatcccaaatttgtgatgctgtgccaatttgtaataaggagtttaggaaaaactctctaagcagggagggacaggctctgccatcacaagtcagtggagttacacagagagccataactttacactttaggatttatccaaatgttaaaagaaagtaaacatttcagcttggtggcccatgtgatctctgtcacaactaytcagttctgccgttgtggcctcaaaacagccattgatgcattgtaaataaatgcacgtggctgtgtgccaagaaaacattatttacaaaaataggctttaggctggattttccatgcctgctgtgtctgaacattttctcttctccagtgataaccagtcgttctgctcagtggtgggggtggtatttgccgagccagaatgtgtgtgctgttttaggaatccgtcacctttgaggatgtggccgtggagttcatccaggagtgggcattgctggacagcgcacggaggagcctgtgcaaatacaggatgcttgaccagtgcaggaccctggcctccaggggtaaggctggcgtcacctggctccttcctgtacgcaggcactaaatgcttcttaagcgcctgccatgtgaagaagacagacgtggcttaggctttgtggcacttagcgtccacaggatgacaaagcttcatctgttgcattgacttctttccctctgtagtaaggccctgtttgggtctccttgaatttggccccaggcttctgaggtgagacagcctcagccccttggggcagaggggagggtgtttgtgggttgggtcctgagttcattagctattgggcaagatccctttgctacccatcacacttg

SEQ ID NO: 26309 - DNA, 843 bp, Homo sapiens
atgcaccgagtggccaggaggcgacacaacaagaggctgctgggccacctctaagcgagggagagaacacagaaggaaccaaccttgccaacaacttagccttggactcttaagctccagagcagggagaagacgaacgtctgctattgaagcccccggtccctgggactttgcttcagcactcccagccaaggcacacaggtggacaggattctgcagcctctctcaaacctggctctaccatcagcagcatctgagaaggaaatcactgacaagggggatgcagaagtcctccttcccccaaagagtgattgggaaggaagctgcttctcccctaaacctccagcaaaagtgtgggtgtcccctaggagctttgggtgactgctctatggccccttattaaaatgtagatgttctctctgcaggagattaagctaacctatccctgtcaattaacaaatatcctaggtcatattagaatctttgattcgtctgccagtccctcagtttattcccaagagaatggaccacaggccccatcaatcttcactggaggtggcgggagcccaaaaatgggtcataggtggcattgaaggtcaacccaggcagcctgccatcagcatgaggacctttagggcgggctctaaaataggggggtttgggaagggcatctggaggaatgcagaggactgagaagaggaacttcccgatctggggattttgcctagattgggstcctcttggtcacaggtgtattatgttctaggggctaaattccccactggaaatgtgtctgggagaagaaaatgtttcctcttcttcctctcttctcttccaccccca

SEQ ID NO: 26310 - DNA, 812 bp, Homo sapiens
agggagaaggtggagggacggacgctgatacaaagacttaaaggtagtttctagaagaaccactgactgaaatgcagcaggggtttgatggtcagtgaattaatgccttctatgcctgagcttcctctttctgctgaactaggaaaagtgacatcaggcgaccatcaaacatgaagtttttgcaataatagtatcagtaactgtaacatcaaaaacaatagctactacttgctaagcttctgttacattatcaggcactaagctgacttatctatgtaccttatctcatttctttttctttttcttttttgaggaagggtcttgctctgtcacccaggctgcagtgcagtaacaccaccttggctcactgcaacctccacctcctgggttcaagtgatcctcccaccttagcctccagaacagctgggattacaggtgcatatcaccacaactggctaatttttagtttttttgtagagatgagatcttactctgttgcccaagctgatctcaaactcttgggctcaagcaatcctccygcctcagactcccaaagtgctgggattgtaggcatgaaccaccacacccagccacctcatttcatttcaacctcctaacacgccagtgcagtaggtctcctcatcttacaggcctggaggacttaagtacaagttcaaggtcacatggccagtaatggcagacccagggtatggaggaatgaccatctgactctgtattagtccgttttcacgctgctgataaagacgcacccacgactgggaagaaaaagaggtttacttgacttacagttc

SEQ ID NO: 26311 - DNA, 602 bp, Homo sapiens
tgaacccgtgaagaagcatccactggttgagggagggtaccacccgcacatcgtttacaggaggcagaaagttccagaaaccaaggagccaacctgtggattaaagggtattgtgactcacatgtcctcctgggttgaagaatctgttttgttcttttggtwgttttattaaaacatgacctattcttactcaagtctcttatctcctctgtattcttttttttttaatatcttcatgacattcaaatctcttctgtattctcttgccagaaagtgtacattctttttgcttgtataaaccctttcacttgtcaatactcgagtctctgcatattcttaatgagaaggaaataaaagcatctttgccacattaattgatgatgctcataagacatttacaatgaattttttttaaaaaactcttctgaatagtctacaggaaaataattaaaataaagacgtaatgattttcagtattagcagtgttataatacattagtatggaatattaccagacagctcatcacatctgcatatggaaggcagatttaaatgtttgatgatgccgataataatgtgtgaagaaaaactgaaaaaaatta

SEQ ID NO: 26312 - DNA, 591 bp, Homo sapiens
tttcctcagcactggatagtcttttggtatgttccttcatcacttcaggtgtctgggtttccatgccccaataaggagacggctctccaggaaacacaacatctgcttgtcttatctcctccaggatgctctgtgctgagcccatcctgtcacagtggcagaggctgcagaactgaactagaacagccaagagcactgtgggaggcattctaaggtgggagggtgcctttggawcaatatgagcaaaggatcagtttcacctgatagatggttcttttgtaggacagaaagtcttaatactaaataaatgttacttgatgtgttcactatctaagctctctggcatttcccacaactctgcagggcaatgaataagtagctttgagttttcccttcatcattcctgtgctgccatctgccttgggtggaggcaggaggaggcttgttctgttctgacccaccttctggcttcatcctgcaaaggcctgagagagcctctgagctttccacccctcacccatagagtcatcagaagttctgatgagaaagtgagattcactctaaagaaaacccccaaagatctgggtacag

SEQ ID NO: 26313 - DNA, 718 bp, Homo sapiens
aattgctaccttccagctgggtgaacttggttaagtaccttmatctcacttaacattggtttcctcatctgtaaactctgcctcatagggttgtgagaattcaattagttaatacatgcaaaaatcatagaatagtgcaggtacataaaaaacattcaataaagactagctatggacaaaaataccatcatcatgaaaaagactaccttatgttcaggatgatctaattaataaggcaggaaagtaaataacaaaggtatggaagatcttcatccaaaattattaaaacaaaatgttttggttttgtagagagctgtttttaattatctggaaaattcatgtgaaatactccattgaaaagcaaatctgcagagctgaggacagtgttctgtgaaacactggaattagagtgcctggacacgagtttcagctctgccagttgccagctgtgtagcactgggcaagacacttaagcatgcttcagttttctcatccataaaattaagatcatagaaaagttgttatcagaactatattatgacttccatgggccctgggtacatttgcctttatgagttgcttcctccctaaaataatattaaaagttgtttgtaccactgactgaactgctgtaaagacaaatataatctaggctggtgatatggtttgattgtctccccaaaatctgatgttgaaatgtaatctcaaagatggctga

SEQ ID NO: 26314 - DNA, 718 bp, Homo sapiens
aattgctaccttccagctgggtgaacttggttaagtaccttaatctcacttaacattggtttcctcatctgtaaactctgcctcatagggttgtgaraattcaattagttaatacatgcaaaaatcatagaatagtgcaggtacataaaaaacattcaataaagactagctatggacaaaaataccatcatcatgaaaaagactaccttatgttcaggatgatctaattaataaggcaggaaagtaaataacaaaggtatggaagatcttcatccaaaattattaaaacaaaatgttttggttttgtagagagctgtttttaattatctggaaaattcatgtgaaatactccattgaaaagcaaatctgcagagctgaggacagtgttctgtgaaacactggaattagagtgcctggacacgagtttcagctctgccagttgccagctgtgtagcactgggcaagacacttaagcatgcttcagttttctcatccataaaattaagatcatagaaaagttgttatcagaactatattatgacttccatgggccctgggtacatttgcctttatgagttgcttcctccctaaaataatattaaaagttgtttgtaccactgactgaactgctgtaaagacaaatataatctaggctggtgatatggtttgattgtctccccaaaatctgatgttgaaatgtaatctcaaagatggctga

SEQ ID NO: 26315 - DNA, 718 bp, Homo sapiens
aattgctaccttccagctgggtgaacttggttaagtaccttaatctcacttaacattggtttcctcatctgtaaactctgcctcatagggttgtgagaattcaattagttaatacatgcaaaaatcatagaatagtgcaggtacataaaaaacattcaataaagactagctatggacaaaaataccatcatcatgaaaaagactaccttatgttcaggatgatctaattaataaggcaggaaagtaaataacaaaggtatggaagatcttcatccaaaattattaaaacaaaatgttttggttttgtagagagctgtttttaattatctggaaaattcatgtgaaatactccattgaaaagcaaatctgcagagctgmggacagtgttctgtgaaacactggaattagagtgcctggacacgagtttcagctctgccagttgccagctgtgtagcactgggcaagacacttaagcatgcttcagttttctcatccataaaattaagatcatagaaaagttgttatcagaactatattatgacttccatgggccctgggtacatttgcctttatgagttgcttcctccctaaaataatattaaaagttgtttgtaccactgactgaactgctgtaaagacaaatataatctaggctggtgatatggtttgattgtctccccaaaatctgatgttgaaatgtaatctcaaagatggctga

SEQ ID NO: 26316 - DNA, 635 bp, Homo sapiens
caaaatgataatgaagtcaatgatgaagcaacggggactttaagtagttaacgtccctctgtaagtgccaaaatcactgtatcagggatttgtccacacaaggaattcagctttttatttcttacaaataatgtgctgccatgaagagaaacacaaatactcattctgaaatactctatagcaaaatctgcaaagcttaacatctgcaaattttctccttaacatctatttttcatatgctccattgctcctttttatttttgaataataaaaaaatgcaaaagaaaataacagcaaattaagcagagatccagaattggcatgcaaaatacctggtgttttcaaccaacattatcttcaccccattgtggagagctcaataaatgctatttgaatatgttatcaatcatctaacatattagcgtggagagatgatgccaaactgctttcacytttaaaatacctaattctggaaaggacacgtgactgtacataaaacgacctcattttcccccattaattagacctgggcagatcatttaatggcaggaaattatgatggagttcattttatcatttagcagttcaattatacagcaattcacatatataggcatatatgtgttactatatat

SEQ ID NO: 26317 - DNA, 635 bp, Homo sapiens
caaaatgataatgaagtcaatgatgaagcaacggggactttaagtagttaacgtccctctgtaagtgccaaaatcactgtatcagggatttgtccacacaaggaattcagctttttatttcttacaaataatgtgctgccatgaagagaaacacaaatactcattctgaaatactctatagcaaaatctgcaaagcttaacatctgcaaattttctccttaacatctatttttcatatgctccattgctcctttttatttttgaataataaaaaaatgcaaaagaaaataacagcaaattaagcagagatccagaattggcatgcaaaatacctggtgttttcaaccaacattatcttcaccccattgtggagagctcaataaatgctatttgaatatgttatcaatcatctaacatattagcgtggagagatgatgccaaactgctttcacttttaaaatacctaattctggaaaggacacgtgactgtacataaaacracctcattttcccccattaattagacctgggcagatcatttaatggcaggaaattatgatggagttcattttatcatttagcagttcaattatacagcaattcacatatataggcatatatgtgttactatatat

SEQ ID NO: 26318 - DNA, 527 bp, Homo sapiens
cacattaactgctaacatgtgtttcgarctatttgctatttcctgagttacacgcatgcacacacacatgcacatgcacacacacacacttttctgaaaccagaatataagcccagctttgtctgtttggtctgaacagaaacttagcaaaatgcttaactaagacatctttaattcaaggctttacatttttttttcacatatcttcattctttaaagagctattttctctctcagtgttcagcctggggaatttattgagacaagccagaaccaagtgcagcaaatgaaggtatgagtgggaaaaaaacaagagaaccctgactggaaactaaaacagtaagagaaactttgaacggaggccgtgagaaatgagcagacatttcccatcaggttacatggcatctttcgttcttttcagatgtctgacatttgtgctgtacttcattggcactaacttactgcaaatatacccccatccaaaaaataaaatgctgttttagggaaagaatgtgctacagtaacta

SEQ ID NO: 26319 - DNA, 807 bp, Homo sapiens
ttgacttgggaggtgtatgttgcattgagctgagatggcaccactgcactgcagcctgggtgacagagccagatcctgtcccaaaacaggaaaaaaacaaaaaccaaaaacttgataactttggcttctctgcatgtgtatgtttgtgtgtttaactattagcttttcttagccatatactccggggcatgatgttattagaactttgaatgtatatatgtaacaatatctaggctgggtgcggtggctcatgcctgtaatcccagcactttgggaggccgaggygggcggatcacaaggtcaggagtttgagaacagcctgaccaacatggtgaaacctcatctctactaaaaatacaaaaattagtcaggcgtggtggcacgcacctgtaatcccagctactcaggaggctgaggcaggagaatcgcttgaacccgggaggcagaggttgcagtgagccaaggtcacaccactgcacaccagcctgggtgacagagtgagattccatctcaaaaaaaacaaacaatattttatgatgtccagaaaaaagcatttttttaaaactccaactaattttaagtaatgttttcatttttcaggatataagatacaaatgaatgcaagaaaaactataatgtcattttaaaatcctttttgtgatactagttttgggggcctaaacttagaaacaatgttttcagaagaagtagtcagttgtataaacattgatttgtgattttttaaatgatatagatatactctttagaatacctgcatcaggaataagaactatttcctcatggaaa

SEQ ID NO: 26320 - DNA, 966 bp, Homo sapiens
taggacaatggctcccttttactgtggacccttagattggcctctgagagagatctgactgccattttcccaaaacaatgccccctgtcagcatgaagcagttaagagcagtcatagcccctatccaaacagcagttagatatacctcttcagagcagggatagaaagtgacaggagacagacgaattcctaggaagacaaggacaagtgcctgatgaaacccagccttcaagccaaagacagctagaagcctgaattgtgagctgttggttctggatagagtccacatcagagtaagaacttccttgatgctttttaaccaatcaagttatggtttwtccaagaccacccatggaccaataagcacacactcctccattctgggcccacaaaaaccccagactcagacacagagacaactacctctcttaggtcccactccaccgacagctttccttctgtcactcaatagaattgttctttgccctactcactctttggtgtctgtgtacctcaatcctcttgatcatgggacaagaactcaggtgagctgggggtggggggaacgaacaaactgtaactctcccttctgtccacccagctgtgggcaatgggaataaaagagccatagcatgctcctgctcaccgaatggtgggggtaaaaaagctgctgagtgccacacacttctgctcactgagctgtaagtagtgggaataaaagggcttgtaacttgctcctgctcatcaagccacaggattaaagagctgccacatttattgggagctcagacttagggactcctcaagcaagagctgcagcttcccttggggcttcacagttgctcgcatttctgagttttcaggcaccaccgcgttcccctcatctagatgctggtgcccaatgcggaagccactttcagcatgctgggtccagctgcaggctgaacacgaagccacggcggtatg

SEQ ID NO: 26321 - DNA, 966 bp, Homo sapiens
taggacaatggctcccttttactgtggacccttagattggcctctgagagagatctgactgccattttcccaaaacaatgccccctgtcagcatgaagcagttaagagcagtcatagcccctatccaaacagcagttagatatacctcttcagagcagggatagaaagtgacaggagacagacgaattcctaggaagacaaggacaagtgcctgatgaaacccagccttcaagccaaagacagctagaagcctgaattgtgagctgttggttctggatagagtccacatcagagtaagaacttccttgatgctttttaaccaatcaagttatggtttttccaagaccacccatggaccaataagcacacactcctccattctgggcccacaaaaaccccagactcagacacagagacaactacctctcttaggtcccactccaccgacagctttccttctgtcactcaatagaattgttctttgccctactcactctttggtgtctgtgtacctcaatcctcttgatcatgggacaagaactcaggtgagctgggggtggggggaacgaacaaactgtaactctcccttctgtccacccagctgtgggcaatgggaataaaagagccatagcatgctcctgctcaccgaatggtgggggtaaaaaagctgctgagtgccacacacttctgctcactgagctgtaagtagtgggaataaaagggcttgtaacttgctcctgctcatcaagccacaggattaaagagctgccacatttattgggagctcagacttagggactcctcaagcaagagctgcagcttcccttggggcttcacagttgctcgcatttctgagttttcaggcrccaccgcgttcccctcatctagatgctggtgcccaatgcggaagccactttcagcatgctgggtccagctgcaggctgaacacgaagccacggcggtatg

SEQ ID NO: 26322 - DNA, 535 bp, Homo sapiens
tgcagagtttgtgaaacctaaaatatttactctctttttataagaaagtttgtcaaacccctgatttatataaaataaaatattatttaagcttttccctaattccagkactctaatattcagtactaatttttaaagtagatttgaattttaaaaagtatactcagttttacttacatatagtttaaaataaagagtcataatagttgatgacagaaacagtaattgtatacaatgctgaatatgacaatgggtagcttagatatttcagaggcacaaaaataattatactgaatttaagacatattattatagaaaaacctttcaaatggtcatgggaaaataggactcatttctatatattttacttttaaatagtcattatggaaaaaattcaaatatctttcaagtagccaacatggggaaatatatttaggcttattttcatgtttttaataagtaaatcttattttattataaattatgtttttgggtacaacatatcagtgcttaatgcttacaaaagcctctatct

SEQ ID NO: 26323 - DNA, 506 bp, Homo sapiens
actagagctaaagtttttataacagcctctatcttttccaattgtttataaaactttaaaattaggaaaagactggaataatttagaaatgcattaaggcagttatttcccgattggttgcattaagttaccacagcttctaacatctgtttctttcaatatgttagcaaactgcaccatctcaggtcgttaggacaggaagtggccagggcatcccattttgcctttaaagtagttccagtgtcctccaggatgtaaggattccaacattaaacaatagctaatggtagctatgctgccaggaagaaagatttcaaaacaacagattaagcaagaagacatactcttttatggttcaaagaatgtaaartataagatggtgtaaatattgaatgaaagagaattgttttcatctgattggaaacttagtactaaatctctcaactgagatgagttcagtagtgttgcagatttgaatgattctgacctgattgctgcttccttca

SEQ ID NO: 26324 - DNA, 1055 bp, Homo sapiens
ttacactgcataatacagaatacaaaggattctgttttccatgattgctgaaatttcaaatgtgtacatataaagtaacattataaataagaaactgatgttttcacataatagtatcccaaaggctatgtctctatagtggcagagaaaagataaaaactatcaacccaccaaacaaaaccaataaataaatgtgtgcatgcacctgtatgtgtatgtgtcgggggttggtttaagatgtgaatgtaggagtagaagttgctccttaaagaaacaggtcttttgctctaatgaaaagatgtttttccgtgaaagacaaagaaaaaccaagcaagccttttttcttctttggcttctacccctaggtttaccaaatgatcctcttgccaggaaacacagaggtacaagtgaggaaatgtggtgcctgaattctgtcattcactagacaaattccttaactatttgaagtttcaataagcctatatatcaagcagggttgcctgatggcctgggggatattggcagggcccagttgccactgctgaagctgaaaagatatttatgtttcccagactgcttgtaacagtgcaataagcatgtcagatttcagatttccgtgtgtgtgtgtgtgtgtgtgtgtgtgtgtgtgtgtgtgtgtgygcttagtatggagagacagagaaagatacaaaattgcatgatggtcaatggagactttatcctggcagtgattactgagcaacgttcagtgtccagtcacgtgtgttctcagtagacaagacttccagaatttctgctagtttttcaaatctggttcttcattgttaacactgattctaggagcttctcattatgtttttattaaccttacaaataacttaaagcatttatatatgctaaagaatatctagaaacataatttaatgaagggtaagcagtcacacacatccctaagtaaccactattatcttcagaagtaagacattaagcaagatatggtgtattataaaatagaagagaagcttttgaatatccttaccacaaagaaatgataa

SEQ ID NO: 26325 - DNA, 334 bp, Homo sapiens
tggtgtcagctgggctccttctggcatgtgtggtcagctgctggtgcactagcaggttctcctaagggtgagctggctgttaactaaagcacgtgggttcttcttcatgtggtatctcctcctctagtaggctaatatgggcctgttctcatggaagatggcagggctttctgctgaatgctgccaacttggtttccaccacacagctggagtggcagcagttggtgggcaccaggctcttcacaatgggtctctgcrgctcgtgccacaacttgatgccctgggtggctgacagcaggagcttcttgtctgtccactacagccagtgcagtaa

SEQ ID NO: 26326 - DNA, 1178 bp, Homo sapiens
  misc_feature (1)...(1178): n = A,T,C or G
aaattcctatccactcaaaagatgagctatatactaggaagcagatgagcttaaaatatacagagcctcaatttttcctgttggagaagtttaactttttgtaccagcctgaggaatcattttctgttgattctgttgtgtttttaaatacaacttgactggaaagaacagtttactcatcttcaaaacaggagttgagctggaactacagtttatgtaacttgctggcaggaagcccaaggatgcttcagggtagcaaaacaaaatgactgggaagyggggtggggtgtggctgctgctgaatgggtgaggccagaggtctcctctctcacccgctccagctaagaacattaccttttaagtttttttttaaatttgagattctgtgtgagagttcatttgaagatgaaatttcactagaccctgctttcggaagtccctgtgctctagcattctctgtctcttaagacttctggatgacagcataatatagagattaacatgtgagttttggtgtcagactctgttctactcacttatccattcaactgaaatgaccttgagcaagttattgcttcacggaatttacgttgctgtgaaggtaaaatgagtaatacgtttagcagaaaaataagtgctctggtattgatgcaaaaacagacacataaaccaatggaacaaatagagagcccagaaataaagctgcatccctactaccaactaatcttcaacaaagttgacaaaacaagtaatgagaaaaagacnnnnnnnnnnnnnnnnnnnnnnnnnnnnnnnnnnnnnnnnnnnnnnnnnnnnnnnnnnnnnnnnnnnnnnnnnnnnnnnnnnnnnnnnnnnnnnnnnnnnattaaaatatttagatataaaaccaaaaaacctataaanaacgctgggatgataacctgggaaaataccattccggacaatggccctggcaaagaattcatgacaaagatgacagaagcaattgcaacaaaaccaaagattgacaaatggacctaattaaactaaagagtttctgcacagcaaaagaaactattaacagagtaaataaacagactacctacagaatgggagaaagcatttgtgaaatatgcatctgacaaaggtctaatatccagaatctatgtggaacttaaacaaattaagaaaaaaaaacc

SEQ ID NO: 26327 - DNA, 533 bp, Homo sapiens
aaatgcttaaatattatttcctcagaatatatcacatagtgaaactacaggttcaaaggcctcacataattttaaggcctttgtcactttttctctaaaaattgaataatgtaaatctcccagctaagtgtgaagttgttctatgtcccaagattcttgtcaacaagattgtctactatrtttttcaatctttctcagtttcacagatttaaataagtaaacaattattatttaaatttttatctctaaattagaattatgttcattgcctattgatataaagataccatatttccgttcatgttttaaaatatactcatccttaatccccagtgacaattcagcttgatacaaaattctaggttaacacttattttctctttgcacttcaaatttcgatgtcttctttcatctaatgttagagagaccactagccagactaataaagaagagagaagaatcaaatagacacaataaaaaatgataaagcgaatatcacccctgatcccacagaaatacaaactaccatcaga

SEQ ID NO: 26328 - DNA, 545 bp, Homo sapiens
tgacacataacgttggttaacttggttttttgactccctaagcaaaggtcttattcatttttggttttaagatctggtattctacttgataagggtttccataaaaatccacaaatacataatatctaggttttgctaggaaaataggaattacaggatagtgttgtgactaaaggatatttttctctgttatcgctttaataactataaaaggaaataccatggtttaagtttagttttgataagctaaatttaagtttatatcctcttttcgcttttacattctgttgtttcatttgttttaaaaaaaagaacactcaagtgatttctaagcctcttagtaaaacaagctygttaaagactgttttataacatctttcacattcctctgaagtactttgtagaattaaccctttaccctaactttggaaaccacctgtgtgctcactggctatgcctggtctagttttctttttgttctggtgaatattgtgcagctgcggatagaataacattcctcgtatcagtctttactcagctgttca

SEQ ID NO: 26329 - DNA, 562 bp, Homo sapiens
taaagggctctccctcagacggttctggtaaccaacattttctccacctcattacttgcaagtcttcacagttccgccatttggctatggctaaagttcatccctcaggccccaaacaagaagagttgacaattagtagagtacagggcttactcacaggacaccatctgtattagtccattctcatactgctaataaagacatacccaagactgggtaatttataaagaggtttaattgacccacagttttgcatggctggggaggcctcaggaaacttacaattatggcagaagaggaaccaaacacatccttctttacatggtggtaggagaaagaagaatgcgggttttataagggggaaggcccttatgaaaccatcagatctcgtgaggacttactatcacgagaatagcacaggggaaaccatccgcataattcaattacctcccactctgtccctccyatgacacagggggatttgggaactacaattcagcaaaatcctgtctctaccccccaaaatataaaaattagctaggtgtgatggtgcatgcctgta

SEQ ID NO: 26330 - DNA, 637 bp, Homo sapiens
tgacagaaaatattatgaaaagcatgtgacttttgtarttcaaaaatgtagaaatggatgatgtaataaaggtagaaatggatgatgtaataaaagtagaaatggatgatgtaataaaagcagaatgttagaaaaaatgggcttaatctaaggtagaaatattagagactgaaagcagagagaagttaggaagttggtgttgtcagcccagagtgacactatagacacctagaccagagcggtggcaggtacaagatggaaatcatttagcatgaggataaatgaacagggaaatatcagaggcagcataaggacagaagaacagaggggccatggcaaaatggcagagggtatctgtggggaaatcctgagggatttgatcagtggggtttgtataaaaagaggataatcactgtcctttagaagtcagaatcagagggagccgtaggtggtaagaagaccttgcttccttgtgtcaggagggacatggaggttaaggggatgaggatgcttttacacttggaagtggtaatcacacttgctcactggggattctggtcctacatataagatgcttccctccagaactcctcccaaatgagagagctgcccacatcccgggatcctccctgaataa

SEQ ID NO: 26331 - DNA, 637 bp, Homo sapiens
tgacagaaaatattatgaaaagcatgtgacttttgtaattcaaaaatgtagaaatggatgatgtaataaaggtagaaatggatgatgtaataaaagtagaaatggatgatgtaataaaagcagaatgttagaaaaaatgggcttaatctaaggtagaaatrttagagactgaaagcagagagaagttaggaagttggtgttgtcagcccagagtgacactatagacacctagaccagagcggtggcaggtacaagatggaaatcatttagcatgaggataaatgaacagggaaatatcagaggcagcataaggacagaagaacagaggggccatggcaaaatggcagagggtatctgtggggaaatcctgagggatttgatcagtggggtttgtataaaaagaggataatcactgtcctttagaagtcagaatcagagggagccgtaggtggtaagaagaccttgcttccttgtgtcaggagggacatggaggttaaggggatgaggatgcttttacacttggaagtggtaatcacacttgctcactggggattctggtcctacatataagatgcttccctccagaactcctcccaaatgagagagctgcccacatcccgggatcctccctgaataa

SEQ ID NO: 26332 - DNA, 637 bp, Homo sapiens
tgacagaaaatattatgaaaagcatgtgacttttgtaattcaaaaatgtagaaatggatgatgtaataaaggtagaaatggatgatgtaataaaagtagaaatggatgatgtaataaaagcagaatgttagaaaaaatgggcttaatctaaggtagaaatattagagactgaaagcagagagaagttaggaagttggtgttgtcagcccagagtgacactatagacacctagaccagagcggtggcaggtacaaratggaaatcatttagcatgaggataaatgaacagggaaatatcagaggcagcataaggacagaagaacagaggggccatggcaaaatggcagagggtatctgtggggaaatcctgagggatttgatcagtggggtttgtataaaaagaggataatcactgtcctttagaagtcagaatcagagggagccgtaggtggtaagaagaccttgcttccttgtgtcaggagggacatggaggttaaggggatgaggatgcttttacacttggaagtggtaatcacacttgctcactggggattctggtcctacatataagatgcttccctccagaactcctcccaaatgagagagctgcccacatcccgggatcctccctgaataa

SEQ ID NO: 26333 - DNA, 637 bp, Homo sapiens
tgacagaaaatattatgaaaagcatgtgacttttgtaattcaaaaatgtagaaatggatgatgtaataaaggtagaaatggatgatgtaataaaagtagaaatggatgatgtaataaaagcagaatgttagaaaaaatgggcttaatctaaggtagaaatattagagactgaaagcagagagaagttaggaagttggtgttgtcagcccagagtgacactatagacacctagaccagagcggtggcaggtacaagatggaaatcatttagcatgaggataaatgaacagggaaatatcagaggcagcataaggacagaagaacagaggggccatggcaaaatggcagagggtatctgtggggaaatcctgagggatttgatcagtggggtttgtataaaaagaggataatcactgtcctttagaagtcagaatcagagggagccgtaggtggtaaraagaccttgcttccttgtgtcaggagggacatggaggttaaggggatgaggatgcttttacacttggaagtggtaatcacacttgctcactggggattctggtcctacatataagatgcttccctccagaactcctcccaaatgagagagctgcccacatcccgggatcctccctgaataa

SEQ ID NO: 26334 - DNA, 270 bp, Homo sapiens
ttaattgagtttaatttcaccaatttcccttagaacacattttatcttcacaggatgtgtrgccttttccacctggtccccagccgccccccaccatgtcatatccatgtggattaactgcctgcctcagccagctcacaaagggctgtgaagtggatggaatgcccatgaagcactatgtgattctgagcatcatttagcacataaagatgtgcctcccccatcgccattccttgttatctgagtagctaactatccttgatgtaataa

SEQ ID NO: 26335 - DNA, 1016 bp, Homo sapiens
cttcgttctaagttggcttttttgggattctctggtctgatagttgcagcagcttgaagcagcactgcctgacgccatgcacacaaagctggagaaaaggagacagcaaaaatggaacattttcccccttgcccctctctaatcagggtaaaaaatgaatccataatttcctagaagacttatccttgtgtttcattggccagaactggtcacatgctcacctctacccttacccctcaactcactggtggagggactcataattcactcctcgttcctgagcacattgtcgtcagacactattctcttagcaagaaacgatagagaagaggtgttagctggacatgaaacaggcctgctatagtggaaagttggccactgccctgtggaatgttctgagccttccatgtgaagagtctgtcctgtcttccctctgctctgttggagaggctctccatgggtgtgtgtgtgtgtgtgtgtgtgtgtgtgtgcgcgcgcgcgcgcgcatgcactcacgcacgcatttytgggtcttgtgggcaacttttaccatggcccctgttccatccaaccagaggagaaggttacatctaaagagaatgggagctctgcctataagcggtctctggtgacctgtgaaagtggtttactgttcacttgacgcagaaaacccccacaaaatcatgcacatcaagagttttaaatctttgtgttcactttaagaacactcctagaccatgacaggtgtgtgtatctggaaagccaccaagtgtctgaaaggtgtatcttaaccgaagcaatgtgtgtcattctgtcttatgatggtggagttgagaggtgtgcccaggccaacagtagggctggatgcagggtcagtggctccaaaagagtgtggaatttttgccacagttgcttaaaaatgcagagagtaatgctgaacttaagggtttagatataaattctctggtcaatgaacatctctaggtgaacaaagtacccaagatattagataccaa

SEQ ID NO: 26336 - DNA, 528 bp, Homo sapiens
ccccactggactttccagtctcccacttgctagtctttggctacaaaaaaaaaaatgtaacttctctgcatggtactaagtcttatgcctccacacctttgtatataccatttcttttgcctgaaatgccctgtcctgtgcccctaactgctactcaattacccagaggactcctatttatcctacaaaacccagtatagatttcacttttgggracaagccttcctggattgtgtgttctctccttcacaatgatgttggccctttcttctgctatgcttccctagatcttgtatgtgcatgtccctttgtcttcacaccatgatgccccttgatgcgactgtccctccaccagaccatgcatgagctccttaaacgcagtatctaaatcatctctgcttccccagaacttactacagggcctggcacactgtagatggccatgaaagttttattaagaagaaataaaagacatactggaggagacagcctttctgcccccaaactcaaagcgatttacagccatct

SEQ ID NO: 26337 - DNA, 528 bp, Homo sapiens
ccccactggactttccagtctcccacttgctagtctttggctacaaaaaaaaaaatgtaacttctctgcatggtactaagtcttatgcctccacacctttgtatataccatttcttttgcctgaaatgccctgtcctgtgcccctaactgctactcaattacccagaggactcctatttatcctacaaaacccagtatagatttcacttttgggaacaagccttcctggattgtgtgttctctccttcacaatgatgttggccctttcttctgctatgcttccctagatcttgtatgtgcatgtccctttgtcttcacaccatgatgccccttgatgcgactgtccctccaccagaccatgcatgagctccttaaacgcagtatctaaatcatctctgcttccccagaacttactacagggcctggcacactgtagatggccrtgaaagttttattaagaagaaataaaagacatactggaggagacagcctttctgcccccaaactcaaagcgatttacagccatct

SEQ ID NO: 26338 - DNA, 569 bp, Homo sapiens
tatttcactcggagcctaaggctgaagctcttcctctcaggcctcgcctgccaccccctccttgttcagctttagccacatgggcctcctggctgctcctccaacgtaccaggcacacttctgcccaaggactatgccccgtggcctgcaacatcaccccagcaggccaccggcccctctcccctccttccagctctgctcacatagcactcactctgcaagtcctcctggaccatcttcaaacctgcacccccaccgcccacgcttgctttcctttgcgccttagcactcctgatcctctcaacgcccactatgactcactgctgtattttgtttaagtctgccccaactgggctgtacccatgggggcaggaattttcatctgctttgttcactgatactcaaaatcttgggcaggaggatgtgggtgctgccccattggaacagaatctgcagttggcacctggtaaggctgcacccgtgggtatcggctgcacctggttggtgrgggggggaggtgctggacaagcatgtgctgagttgccagagggaggaagggcatggggtgg

SEQ ID NO: 26339 - DNA, 904 bp, Homo sapiens
gcagagctgagatgtcccccaagggcctcaatcctctggggcctcgttttttcgatagaatcacccacatggtaagaggaacagaacactttttcatcccccaggaaactcggggagctttccctctttctttcattgcttgcttctgctaaagttataactcccgctctgcattccatctcctgcaaatgtatactatctatatacatattatatatatatgtacatatacacatattaatttctgacaccactagtatcagacattgaagttgtgtgaaatcttttwcaactatatatcaatgctccatgagcattctatctgatcatttacttctctgaacaaatttgcttagcctggattcctataagtaaaattattggataaaaagccgtgaacagttaaaatgataacctcttgatgtatatcagcaactttccttccaaaatgcttaagaaaatcattttaaaagtctctgcatcagggcttgatgacacctacctttgtgcaccttcagtactatgaataggattttgttttgcatagctttgattaatggtggattaagtgtttttttatacttattgactgtaacatttttggatatttactatatgtatcatttgtctgtttttctattggcatttttaaagagctatttacctttttaaatatttttttctctaaatgctaatggaaaatatttccagtttcctttttatttggtgtttgcttttattattattatttagtgctttactttttcttttggaatctatacataatttccttttcttttgtgagctcacttgttattttacgcttggtcattgtatctcgttcctgatctgacttgcttaataagtcatcaatacatggcttgggtttggattgaaagaagct

SEQ ID NO: 26340 - DNA, 598 bp, Homo sapiens
aaaggatattttttttctctcctacatgtgcaagtatcactgttatttccagagcttttttaaaatctcaaatcataacactacccattaaacaatacctccccattctttcctcccagcctctggtaatcacgattccacttcttgtctctgtgaacttgactattctagatatataagtggaatcatacaatgttgattctgttgtggctggcttatttacttagcgtaacaataatgttttcaggcttcatccacgtttgcagcatgtatcagaatttccttccttttttaaggctgaataatattccattacatgtatatactgcattttgtttatccattcatctgttggtggacatttggtttgctcctatcatttggctattataatrgtgctgctatgaacatgggtgtacaagtatcagtttgggttcttgctttcagttcttttggatattgaatctcaagatttgataagaagtgcagcatatgatttttccaataaaacttacattttcctttttcgaccctttcgtgtcttctttccagtcataacccttgtagttcatttcctctgtgtggctattttctgcca

SEQ ID NO: 26341 - DNA, 558 bp, Homo sapiens
tgtgcaacctcccaattgccagacaccaaaatcacagttacgaatacatgagatctgagaagttttatggctttgaatagmtcagcctcctctcaaatattaatctctggaccactgaacatggtagtactttgccgaatagcagcttagcaaggctttctggccagtaaaaaagaacctcaggaggaggagctgaggggcaagactgcactcagcaaggccaacactgaggaggccagcaactaggaggcttgtctttagaacctctggcttgctttcctttctccctacagtatccacatttttcctttagaagtaagtttatttcttattttttcctcctccactctggtttcagaaaaggtatgttcacctccctcactcactaaatcaggacccataaatgcctggcacatatgccaccaacaccaccagtcatcctgtgcccaggtggacatctctaatccatcactctattctctcctgttgagctgaggtgtagcctcatcattcttcctaacagcactcttgacagccatagccacttttagagttggc

SEQ ID NO: 26342 - DNA, 558 bp, Homo sapiens
tgtgcaacctcccaattgccagacaccaaaatcacagttacgaatacatgagatctgagaagttttatggctttgaatagatcagcctcctctcaaatattaatctctggaccactgaacatggtagtactttgccgaatagcagcttagcaaggctttctggccagtaaaaaagaacctcaggaggaggagctgaggggcaagactgcactcagcaaggccaacactgaggaggccagcaactaggaggcttgtctttagaacctctggcttgctttcctttctccctacagtatccacatttttcctttagaagtaagtttatttcttattttttcctcctccactctggtttcagaaaaggtatgwtcacctccctcactcactaaatcaggacccataaatgcctggcacatatgccaccaacaccaccagtcatcctgtgcccaggtggacatctctaatccatcactctattctctcctgttgagctgaggtgtagcctcatcattcttcctaacagcactcttgacagccatagccacttttagagttggc

SEQ ID NO: 26343 - DNA, 558 bp, Homo sapiens
tgtgcaacctcccaattgccagacaccaaaatcacagttacgaatacatgagatctgagaagttttatggctttgaatagatcagcctcctctcaaatattaatctctggaccactgaacatggtagtactttgccgaatagcagcttagcaaggctttctggccagtaaaaaagaacctcaggaggaggagctgaggggcaagactgcactcagcaaggccaacactgaggaggccagcaactaggaggcttgtctttagaacctctggcttgctttcctttctccctacagtatccacatttttcctttagaagtaagtttatttcttattttttcctcctccactctggtttcagaaaaggtatgttcacctccctcactcactaaatcaggacccataaatgcctggcacatatgccaccaacaccaccagtcatcctgtgcccaggtggacatctctaatccatcactctattytctcctgttgagctgaggtgtagcctcatcattcttcctaacagcactcttgacagccatagccacttttagagttggc

SEQ ID NO: 26344 - DNA, 1681 bp, Homo sapiens
atattaatataagttgttttacgaagaagaatcctataatagcagacttacttgtagtccgtttaaagaaaatgatccatactttccataacagtttgtacaaatcctgcctgattttaaaaggctgcttagcagttaattttatgtaatacttttttttaaataagaaaaggatgaaaaaaagtttgagttcagcttttcccttttgtttctgccctcttatttgtgcatataactgtatatttgtttcttttcttttttcttttttttgagacagcgccatgctctgtcgcccaggttggagtgcagtggtaagacctcagctcactgcagcctctgccttccgggcttgagtgatcctcccacctcagccacccgtgtaggtgagacttcaggcacgtgccaccaccctggctaatttttgtatttttgtatttttttttttttttttgtagaggtgaggtttcatgttgcccagggtggttttgaacccctgggctcaagtgatccacctgccttggcctcacaaagtgctgggattacaggtgtgatccatttatttattttattaaattaagttttaattattttaaagttccactgaacaaaataatgagaaaatgcaaacaatattactttgaatggatccttaggtgtatatattcaggccatttgaaaaaatacagtgtttttaaaggcctgatatgtctgatggtaatgtttatgttttatagttttaaaaaaaattggctttcttctaatttgtgacggagccaatttggagtccttgttcatccagaaatgaggtctctcgctctttactaggattgtctgttacatcctgttgtacagttttgtagtgtttttcatatgggtttatacaccattcttgtcaggcttaataccttggaataactatatagctatttttgttgctttggggaaagtgatcttttttccattgtacttttaaacatgttattattggatatttaaaagtatttaagccaggcgtggtggcttatgcctgtaatcccagcactttgggaagctgaggtgggtggatcacctgaggtcaggaattcgagaccggcctggccaacgtggtaaaaccctgtctttactgaaaatacaaaaattagccagktgtggtggtgtgtgcctatagtcctagctgctcgggaggctgaggcagcaaaattgcttgaacctgggagatggaggttgcagtgagtcgagatcgtgccactgcacttcagcctgggtgacagactgagactccatctcaaaaaaacaaaaaacacaaaagtatttattgataggaaaatatagctactgcaccgaaatggggttaatggatttttgagtttagttctcttagattttattttatatatcatataattttatattttgtgttatataagatataaatatatatttcatatataaaatacatattttatatatgttagatatataaaatttgttagatatgtaatatgcaaatatactatatattttgtaagatacttaattctatatacaataaagataatatgtatatactgtacataaatataacaatatatgcattatatatagtaaatatgcattatatattgtaatatatagtaattaattagcagtatctttatgtcttatttagtatacatttcag

SEQ ID NO: 26345 - DNA, 1681 bp, Homo sapiens
atattaatataagttgttttacgaagaagaatcctataatagcagacttacttgtagtccgtttaaagaaaatgatccatactttccataacagtttgtacaaatcctgcctgattttaaaaggctgcttagcagttaattttatgtaatacttttttttaaataagaaaaggatgaaaaaaagtttgagttcagcttttcccttttgtttctgccctcttatttgtgcatataactgtatatttgtttcttttcttttttcttttttttgagacagcgccatgctctgtcgcccaggttggagtgcagtggtaagacctcagctcactgcagcctctgccttccgggcttgagtgatcctcccacctcagccacccgtgtaggtgagacttcaggcacgtgccaccaccctggctaatttttgtatttttgtatttttttttttttttttgtagaggtgaggtttcatgttgcccagggtggttttgaacccctgggctcaagtgatccacctgccttggcctcacaaagtgctgggattacaggtgtgatccatttatttattttattaaattaagttttaattattttaaagttccactgaacaaaataatgagaaaatgcaaacaatattactttgaatggatccttaggtgtatatattcaggccatttgaaaaaatacagtgtttttaaaggcctgatatgtctgatggtaatgtttatgttttatagttttaaaaaaaattggctttcttctaatttgtgacggagccaatttggagtccttgttcatccagaaatgaggtctctcgctctttactaggattgtctgttacatcctgttgtacagttttgtagtgtttttcatatgggtttatacaccattcttgtcaggcttaataccttggaataactatatagctatttttgttgctttggggaaagtgatcttttttccattgtacttttaaacatgttattattggatatttaaaagtatttaagccaggcgtggtggcttatgcctgtaatcccagcactttgggaagctgaggtgggtggatcacctgaggtcaggaattcgagaccggcctggccaacgtggtaaaaccctgtctttactgaaaatacaaaaattagccaggtgtggtggtgtgtgcctatagtcctagctgctcgggaggctgaggcagcaaaattgyttgaacctgggagatggaggttgcagtgagtcgagatcgtgccactgcacttcagcctgggtgacagactgagactccatctcaaaaaaacaaaaaacacaaaagtatttattgataggaaaatatagctactgcaccgaaatggggttaatggatttttgagtttagttctcttagattttattttatatatcatataattttatattttgtgttatataagatataaatatatatttcatatataaaatacatattttatatatgttagatatataaaatttgttagatatgtaatatgcaaatatactatatattttgtaagatacttaattctatatacaataaagataatatgtatatactgtacataaatataacaatatatgcattatatatagtaaatatgcattatatattgtaatatatagtaattaattagcagtatctttatgtcttatttagtatacatttcag

SEQ ID NO: 26346 - DNA, 1681 bp, Homo sapiens
atattaatataagttgttttacgaagaagaatcctataatagcagacttacttgtagtccgtttaaagaaaatgatccatactttccataacagtttgtacaaatcctgcctgattttaaaaggctgcttagcagttaattttatgtaatacttttttttaaataagaaaaggatgaaaaaaagtttgagttcagcttttcccttttgtttctgccctcttatttgtgcatataactgtatatttgtttcttttcttttttcttttttttgagacagcgccatgctctgtcgcccaggttggagtgcagtggtaagacctcagctcactgcagcctctgccttccgggcttgagtgatcctcccacctcagccacccgtgtaggtgagacttcaggcacgtgccaccaccctggctaatttttgtatttttgtatttttttttttttttttgtagaggtgaggtttcatgttgcccagggtggttttgaacccctgggctcaagtgatccacctgccttggcctcacaaagtgctgggattacaggtgtgatccatttatttattttattaaattaagttttaattattttaaagttccactgaacaaaataatgagaaaatgcaaacaatattactttgaatggatccttaggtgtatatattcaggccatttgaaaaaatacagtgtttttaaaggcctgatatgtctgatggtaatgtttatgttttatagttttaaaaaaaattggctttcttctaatttgtgacggagccaatttggagtccttgttcatccagaaatgaggtctctcgctctttactaggattgtctgttacatcctgttgtacagttttgtagtgtttttcatatgggtttatacaccattcttgtcaggcttaataccttggaataactatatagctatttttgttgctttggggaaagtgatcttttttccattgtacttttaaacatgttattattggatatttaaaagtatttaagccaggcgtggtggcttatgcctgtaatcccagcactttgggaagctgaggtgggtggatcacctgaggtcaggaattcgagaccggcctggccaacgtggtaaaaccctgtctttactgaaaatacaaaaattagccaggtgtggtggtgtgtgcctatagtcctagctgctcgggaggctgaggcagcaaaattgcttgaacctgggagatggaggttgcagtgagtcgagatcgtgccactgcayttcagcctgggtgacagactgagactccatctcaaaaaaacaaaaaacacaaaagtatttattgataggaaaatatagctactgcaccgaaatggggttaatggatttttgagtttagttctcttagattttattttatatatcatataattttatattttgtgttatataagatataaatatatatttcatatataaaatacatattttatatatgttagatatataaaatttgttagatatgtaatatgcaaatatactatatattttgtaagatacttaattctatatacaataaagataatatgtatatactgtacataaatataacaatatatgcattatatatagtaaatatgcattatatattgtaatatatagtaattaattagcagtatctttatgtcttatttagtatacatttcag

SEQ ID NO: 26347 - DNA, 487 bp, Homo sapiens
cacttagagaggaactcaagcaagtatggaagtctctcctgggtgctgatcagtggtaggcaaagctgctattctgtgggcagtccttcccacagtcaggagaaagctttcagatttctcatgggccaagattccaaaatctcctccgaaattccctgtcccttgttcttttatgattctctgcaggtgtgctcactgtctcactgttatctcagtcactgggtctcaactggcactgagccacagcaggtgttatctcatcaycttagtctattacacatatgcttatcatggggagtaagcacaccacatggccccaagagaagcaagagagagatgggggagatgccacccacttttcaatgaccagatcttgcaagaagtcactcactatcttgaggacagcactaaggagataattttaaaccactgatgagaaatccaccctcatgatcaaatcaccttccaccaggccccacttccaaca

SEQ ID NO: 26348 - DNA, 1210 bp, Homo sapiens
tacaggtctcctactggatgcccacaaatggctgaaaactgccatttgatttgatttattctctatacactagaagttctctatgtggtttgttgggctaatgagcctaaggagattgtattagggttctccagagacaaaacaaataggatgtcgagagagagagagaaaaaagagagaaagatttgaaggaattggctcacatgattgtgagactggcaaatccagtctacaggagaggctggaggcccaggcacagttgatgtagctaaaggccaagggcagtctgaaggcagaattccctcctccttgggggaccaaatgttttaacttctttaactcattgggtaaagcccacccccattatggagcagactctgctttactcacatctactgatccaactgctaatcacatctgaaaaacaccttcacagagacttccagattggtgtttggacaactgggtaccgtgaattagccacattgacacgtaaaataaatcttcccaragattcatgtagaattcccagagaagggaaaggttgcatcaaaagtgagtggagtggctgagccgagacaagtgtgttcacttctgcagggcatgcctttttcactgcttgctgaggctgaggggatgatgctctcggcagaggagccagtatccagtccctcggaaggggaaggctcagggcatagcccccagcctgactcctcctgactagcctacaccctacccacactagtctttcctaggcatggaggcaggtaaaggagaagaaagatgcccctatgttgccactcaagtgctggtaagcttcacaggcattttgtgagaaaatgtgtgtgatcttggagatctgagcaactgcgattgtctagactgggaccaacgctggccctgcagctgagcagagcagccctcccacatgttgatgacagcctcaggccaaacaacctgccacagagggtagagagcaatggacaaagcccaggattcagtgaactgaactggaaaatctttcatagagatgacaggtgcccagacccgagatgggggtctatggaattggaaactgacaaagtggatgtaaactgtgtcctgctggcctcattgtcctctgctaattcagaatcctgatgcctacaaggcccccagcagcctccagacaccaggagaggtggagtctttctctttcctctcctgggat

SEQ ID NO: 26349 - DNA, 1210 bp, Homo sapiens
tacaggtctcctactggatgcccacaaatggctgaaaactgccatttgatttgatttattctctatacactagaagttctctatgtggtttgttgggctaatgagcctaaggagattgtattagggttctccagagacaaaacaaataggatgtcgagagagagagagaaaaaagagagaaagatttgaaggaattggctcacatgattgtgagactggcaaatccagtctacaggagaggctggaggcccaggcacagttgatgtagctaaaggccaagggcagtctgaaggcagaattccctcctccttgggggaccaaatgttttaacttctttaactcattgggtaaagcccacccccattatggagcagactctgctttactcacatctactgatccaactgctaatcacatctgaaaaacaccttcacagagacttccagattggtgtttggacaactgggtaccgtgaattagccacattgacacgtaaaataaatcttcccaaagattcatgtagaattcccagagaagggaaaggttgcatcaaaagtgagtggagtggctgagccgagacaagtgtgttcacttctgcagggcatgcctttttcactgcttgctgaggctgaggggatgatgctctcggcagaggagccagtatccagtccctcggaaggggaaggctcagggcatagcccccagcctgactcctcctgactagcctacrccctacccacactagtctttcctaggcatggaggcaggtaaaggagaagaaagatgcccctatgttgccactcaagtgctggtaagcttcacaggcattttgtgagaaaatgtgtgtgatcttggagatctgagcaactgcgattgtctagactgggaccaacgctggccctgcagctgagcagagcagccctcccacatgttgatgacagcctcaggccaaacaacctgccacagagggtagagagcaatggacaaagcccaggattcagtgaactgaactggaaaatctttcatagagatgacaggtgcccagacccgagatgggggtctatggaattggaaactgacaaagtggatgtaaactgtgtcctgctggcctcattgtcctctgctaattcagaatcctgatgcctacaaggcccccagcagcctccagacaccaggagaggtggagtctttctctttcctctcctgggat

SEQ ID NO: 26350 - DNA, 550 bp, Homo sapiens
cagccaagcagctaccagttttctcctggtcatcccatgacagcacagttgttttttcattctctttacttgtttttttcttgcctaaaatccctaggtgtgtttttaaacccttcactggcagtggacagcccactctgtgtgcctttctgggttagcarggactaagtcagggcctggcgtgtgtgagactgggatgtgggctgtgctccttctctttttttcccacttctcccaagagtaaatgtcctgtctttgtgaagagctgatcccagatcgatgtgttcacagagctagaccagcttgtttcatgctgacttagatgttgggttaccatagacagttatttaaagcacctcagagagaaagaaaggcggccaagataatgaagtaatcattatcatctgcgcctgccctggagggacactggccccaaaaggacaaggtcattctaatgcaccccaaaacccagcctggcatctcacaagggacagatctggcatgaaaatgtggggggatgaacacagctctattaactagaaaaagaacc

SEQ ID NO: 26351 - DNA, 456 bp, Homo sapiens
acagttacagtgcagctttgtttacccactctgcctatctgcgtttctgaaattggattccttggctctgtgaactagttagccttcctttagagtgcttggaattgaaagcatgycagagagaacacagtcacgtatatcttagttggatgtgtgtgtcctgtcactgttaggacttggtggcataaaggaattaataatgagaagtgagctgggaatggtttatcagtggaaatatctggaataggtttttaggtctatttgtgtcatggacatttcgaagtctcatagtcacaatgttaacattttttatttgtggaacaaagacttctttatttaatagatagaaccttgattatgagaaagatctaattttactctgaaggttcttttaaagagtactacctctgaggagcatctgttttgtaaaatttgggggacattgtttcacctaat

SEQ ID NO: 26352 - DNA, 473 bp, Homo sapiens
ggaggcagagcttgcagtgagccgagatcgcgccactgtactccagcctgggcgacagagcgagactgtctcaaaaaaaaaaaaaaaaaaaaaagaaaaagaaataaggaaaggagaggaaaccctccttgcagaagacagtgagttcagacaactctttcaaggagttttgaaatacagtggagcagaagaatgaggctctacagggttgtgaggtgatggaaaagttttggggttagggattggggaatggaagaccatgtgtcatggatcacccagccagcatctggcggggaacagccgtggggtcagagacctcatagctgcaamcttgccagcctagggttgcccataactactccgtgtcattttggctgtggccagcgctggctgtcatgtctccaaacctgatggccccctaggtgggaatctcccaggatgtgggtgcagcagccacccagacttcccagtag

SEQ ID NO: 26353 - DNA, 610 bp, Homo sapiens
agtcagaaccctggtttattactttcaattaagtatgtattttcctattgttcacaggagagtaccccagccctgaaatatctctagatagtgaggatgatttccgaaggagtgccttccccatcacaactctcaaaccgctgaaccttatagaaaggagatttgcttttctggataattatcaacacctttaggctgcagtagaagtgatgattctgtttgctttttgaaaaaaaaaaaaaaaggaagcagagttgaattgatgctgttcccagtgtctgtaaactttgagaagtatgaattcattgttttagttagaaaaaaatctacttatataggtagacctcattaaacaaaaccaatgcaaggaccgctcctcagtggagcagattgctttttgaggtagagaacattcaagcagctgctagattgatttttgtactgggttagttggcattttcactaggagtgaaaactgtgagactaaacagtttaatttacttagaatgtccctctttctctctstgtgtgtgtgtgtgtgtgtgtgtgtgtgtgcccgtgcgtcgggggggggggcagtggtgattctcaactttctaggaatttatta

SEQ ID NO: 26354 - DNA, 610 bp, Homo sapiens
agtcagaaccctggtttattactttcaattaagtatgtattttcctattgttcacaggagagtaccccagccctgaaatatctctagatagtgaggatgatttccgaaggagtgccttccccatcacaactctcaaaccgctgaaccttatagaaaggagatttgcttttctggataattatcaacacctttaggctgcagtagaagtgatgattctgtttgctttttgaaaaaaaaaaaaaaaggaagcagagttgaattgatgctgttcccagtgtctgtaaactttgagaagtatgaattcattgttttagttagaaaaaaatctacttatataggtagacctcattaaacaaaaccaatgcaaggaccgctcctcagtggagcagattgctttttgaggtagagaacattcaagcagctgctagattgatttttgtactgggttagttggcattttcactaggagtgaaaactgtgagactaaacagtttaatttacttagaatgtccctctttctctctgtstgtgtgtgtgtgtgtgtgtgtgtgtgtgcccgtgcgtcgggggggggggcagtggtgattctcaactttctaggaatttatta

SEQ ID NO: 26355 - DNA, 645 bp, Homo sapiens
tgcatgagcattgttaaagctgttggtacatattgccaaattgtgttccaaaaagcattcctaataaccaagtggaggttgtccatcttatcacacccttgtcaatactgattattatagattaaaaactatagtagtttttcataagtgaaacgtgcctcatttctttaattttcacttttattattagggatgttaaacatgtcttaaaacgttattagctacatgtatttcatcttttggaattatctgtttgtgactcttatctactkattgtttttgtcttatatttcttttcaaaatttatttatttatttaattttttgtgacatggtctcactctgttgctaagtctggagtgtagtggtgtgagcttggctcactgcagccttcactacttgagctcaaataatgctcccacctcagcctcctgagtagctgggactatcaccacacctggctaattttggggtttagagacaggattttgctatgttgcccacgcgggtctcgaactcctgggctcaagcaatctgcctgcctcaaccctccaaagtgctggattcacaggcgttagccaccacacctggcccttagtatacttcttgttgtttagatgacgtctttatattttaaggatgttaa

SEQ ID NO: 26356 - DNA, 761 bp, Homo sapiens
tttgaagttagaggtgtgaagttggatgtgtgatgagagaaagatggagtccaggatgtctccaaagcttttgcctgaattaactggaatgatcaagtttctttcaagtgagatggaaaaagacttcaggaagaacarattttctggggaagatacggaattcaattttggtcagcttaagtttgagatacctagtaaatattcaagacaagctttcaagtaggcagtctgtgtgcatgagtctagtgctcaggaggaaggctcacacaggagatataaatttgggactcattgtcatatgatgatatttcaagcaataagaccaaatgagatcacccaaaaagtaaatgtagagagaaagagaagaggaccaatgcctgagcactggacccctccaatgttaaaagctggaaaggagaggaacagacaaacgagattttaaaaattctatcagtgagatacgaagaaaacccaggaaatgggatatccaggaggctaatgggaccaaaaaatatggtatataaaaaaggatgtgatcacatgttttttaaaggtttgctgatatgtcagatcaaataaggactgggaatttatgagtggatttagtgatgggaagatcggctgaagcctggggacatgttttttggtgttcaacgatattatgaagtacacttcattaattccagtgaggttcaatgaatatctgagcattcctgaggctgaatacaatgcagcctttctcaaaaagatgggggaaggta

SEQ ID NO: 26357 - DNA, 761 bp, Homo sapiens
tttgaagttagaggtgtgaagttggatgtgtgatgagagaaagatggagtccaggatgtctccaaagcttttgcctgaattaactggaatgatcaagtttctttcaagtgagatggaaaaagacttcaggaagaacaaattttctggggaagatacggaattcaattttggtcagcttaagtttgagatacctagtaaatattcaagacaagctttcaagtaggcagtctgtgtgcatgagtctagtgctcaggaggaaggctcacacaggagatataaatttgggactcaytgtcatatgatgatatttcaagcaataagaccaaatgagatcacccaaaaagtaaatgtagagagaaagagaagaggaccaatgcctgagcactggacccctccaatgttaaaagctggaaaggagaggaacagacaaacgagattttaaaaattctatcagtgagatacgaagaaaacccaggaaatgggatatccaggaggctaatgggaccaaaaaatatggtatataaaaaaggatgtgatcacatgttttttaaaggtttgctgatatgtcagatcaaataaggactgggaatttatgagtggatttagtgatgggaagatcggctgaagcctggggacatgttttttggtgttcaacgatattatgaagtacacttcattaattccagtgaggttcaatgaatatctgagcattcctgaggctgaatacaatgcagcctttctcaaaaagatgggggaaggta

SEQ ID NO: 26358 - DNA, 507 bp, Homo sapiens
tttctcaatatttatttttctgtattcattaggataaattctaaaggaatggtttccaaaccgtgtatcacagattctggagactctgcagacctaacttagaggctaatagaagcaaagacccagtgggtggcattctatctctcctctggcagagcaggtccactttccacttttttctttttatgttgagaatattctgtcttttgaaggcggctgctattttgcttgcggaggacaaacacttctgagattggtatctcaaccctttgactctatcagaaattttcaaagatggacagaatgagccacacaatctgtaggtcacatgcaaaattaaaatgcaggtctcttcaaaaattattaggaatttgaagacagcagaayattaaaccaaatcaggggctcttctgagtgtagggccctctgtgactgcacaggttgcaggctcatgaagccagccctaaagatgggacaggaagaggcctgggtggacacatatgcata

SEQ ID NO: 26359 - DNA, 527 bp, Homo sapiens
ttattccactgggcatcacaaaaaggaaatgaatttaaattgcactgtgagatatttaagtcagacataaagagatatttccaggtagcgagagagtgtggtttaaaaaattaactttctccggaggtcattaaatatatgccatcttaattgggttaagcctaatgtctctaattttctatcacgtgttttcttcactgctgttatgttactatccctgttattttggcattataacagattatatttttattaggatgggacatatttctttgactggctttcactctctccttttaaaatgtgtataacatacaaggaatacmaccaaaatgacttgtgccagcccaatgtatttttctttgttcttttgtgtaaagatattttagagaatatgcttactccacgttgatttttcacttttagaaaaggttaggacagtttgtttgctcctagaaagactaaaatctgggagaaaatacaacaatatcccaaatactcattaaaccagttttatatacagttta

SEQ ID NO: 26360 - DNA, 1021 bp, Homo sapiens
tcgaatatttactgagtgaatgaatgaatggcaaaaaaataaaaataaaaatagctcagtgtgattggaacaaccagtctgtggaaatgacactgaggggttttcagccaaggagtgacatgatgagaggtgctttctagaaaggtcactctggctgctggaggaggtgggaggggagcagaggcatataccaacttgaaggacatttgaatgggacatggtgatgagtgagacacacaggaggctgagraacggaggcatcagcgatcaaaaactccactgcagttcatcctacactgcccagatccatggattgtgttgcaaccgatatcaacattttaattcaccaactaaacgtactctgtgtattttagaaccagaaacttctcttctacttctctccccatatttctctctactcccaaaaaacagattgcacagcactatgcccacaatgagtgcccactgcataaatacatggagcttctagaaggtgaaagatctgacattccctctgtaagatgcaaagggagcaatgataaagcattgcggttttggccaagcgcagtggctcatgcctgtaatcccagcactttgagaggctgaggcaggtagatcgcttgagctcaggagttttgagactagcccggacaacatggtgagacacagtctctacaaaaaaaaaaataaataaaaattatctgggcatggtggtgtgtgcctgtcctgtagtccagctactcgagggggctgaggcaggaggattgcttaagcccgggaggtcgaggctgcagtgagctgagatcgtgccattgcactccagcctggttgacagagtgagacactgtctttaaaaaaaaaaagaagaagaagaagaattgcagttctggagtcagacagacctgcttacgctacatgcaacacctgggcacgctggttagcttttgggcctcaacatcttcatctgtgaaacagggatattgggagcctctatctcagaggattctcgcaaaattacaag

SEQ ID NO: 26361 - DNA, 1021 bp, Homo sapiens
tcgaatatttactgagtgaatgaatgaatggcaaaaaaataaaaataaaaatagctcagtgtgattggaacaaccagtctgtggaaatgacactgaggggttttcagccaaggagtgacatgatgagaggtgctttctagaaaggtcactctggctgctggaggaggtgggaggggagcagaggcatataccaacttgaaggacatttgaatgggacatggtgatgagtgagacacacaggaggctgaggaacggaggcatcagcgatcaaaaactccactgcagttcatcctacactgcccagatccatggattgtgttgcaaccgatatcaacattttaattcaccaactaaacgtactctgtgtattttagaaccagaaacttctcttctacttctctccccatatttctctctactcccaaaaracagattgcacagcactatgcccacaatgagtgcccactgcataaatacatggagcttctagaaggtgaaagatctgacattccctctgtaagatgcaaagggagcaatgataaagcattgcggttttggccaagcgcagtggctcatgcctgtaatcccagcactttgagaggctgaggcaggtagatcgcttgagctcaggagttttgagactagcccggacaacatggtgagacacagtctctacaaaaaaaaaaataaataaaaattatctgggcatggtggtgtgtgcctgtcctgtagtccagctactcgagggggctgaggcaggaggattgcttaagcccgggaggtcgaggctgcagtgagctgagatcgtgccattgcactccagcctggttgacagagtgagacactgtctttaaaaaaaaaaagaagaagaagaagaattgcagttctggagtcagacagacctgcttacgctacatgcaacacctgggcacgctggttagcttttgggcctcaacatcttcatctgtgaaacagggatattgggagcctctatctcagaggattctcgcaaaattacaag

SEQ ID NO: 26362 - DNA, 1021 bp, Homo sapiens
tcgaatatttactgagtgaatgaatgaatggcaaaaaaataaaaataaaaatagctcagtgtgattggaacaaccagtctgtggaaatgacactgaggggttttcagccaaggagtgacatgatgagaggtgctttctagaaaggtcactctggctgctggaggaggtgggaggggagcagaggcatataccaacttgaaggacatttgaatgggacatggtgatgagtgagacacacaggaggctgaggaacggaggcatcagcgatcaaaaactccactgcagttcatcctacactgcccagatccatggattgtgttgcaaccgatatcaacattttaattcaccaactaaacgtactctgtgtattttagaaccagaaacttctcttctacttctctccccatatttctctctactcccaaaaaacagattgcacagcactatgcccacaatgagtgcccactgcataaatacatggagcttctagaaggtgaaagatctgacattccctctgtaagatgcaaagggagcaatgataaagcattgcggttttggccaagcgcagtggctcatgcctgtaatcccagcactttgagaggctgaggcaggtagatcgcttgagctcaggagttttgagactagcccggacaacatggtgagacacagtctctacaaaaaaaaaaataaataaaaattatctgggcatggtggtgtgtgcctgtcctgtagtccagctactcgagggggctgaggcaggaggattgcttaagcccgggaggtcgaggctgcagtgagctgagatcgtgccattgcactccagcctggttgacagagtgagacactgtctttaaaaaaaaaaagaagaagaagaagaattgcagttctggagtcagacagacctgcttacsctacatgcaacacctgggcacgctggttagcttttgggcctcaacatcttcatctgtgaaacagggatattgggagcctctatctcagaggattctcgcaaaattacaag

SEQ ID NO: 26363 - DNA, 599 bp, Homo sapiens
tgaacccaggaggcagaggttgcagtgagctgagatcgcaccattgcactccagcctgggcaacaagagtgaaactcagtctcaaaaaaaaaaaaaycttttttttattttattattattatactttaagttttagggtacatgtgcacaatgtgcaggttagttacatatgcatacatgtgccatgttggtgtgctgcactcattaactcgtcatttaacattaggtatatctcctaatgctatccctcccctctcccccgaccccacaacagtccccagagtgtgatgttccccttcctgtgtccatgtgttctcattgttcaattcccacctatgagtgagaacatgcggtgtttggttttttgtccttgcgatagtttactgagaatgatgatttccaatttcatccatgtccctacaaaggacatgaactcatcattttttatggctgcatagtattccatggtgtatatgtgccacattttcttaatccagtctatcattgttggacatttgggttggttccaagtctttgctattaaaaaaaaaaaatctaaaaatctaatggtgtattaacatttttcattcatttgccat

SEQ ID NO: 26364 - DNA, 599 bp, Homo sapiens
tgaacccaggaggcagaggttgcagtgagctgagatcgcaccattgcactccagcctgggcaacaagagtgaaactcagtctcaaaaaaaaaaaaaccttttttttattttattattattatactttaagttttagggtacatgtgcacaatgtgcaggttagttacatatgcatayatgtgccatgttggtgtgctgcactcattaactcgtcatttaacattaggtatatctcctaatgctatccctcccctctcccccgaccccacaacagtccccagagtgtgatgttccccttcctgtgtccatgtgttctcattgttcaattcccacctatgagtgagaacatgcggtgtttggttttttgtccttgcgatagtttactgagaatgatgatttccaatttcatccatgtccctacaaaggacatgaactcatcattttttatggctgcatagtattccatggtgtatatgtgccacattttcttaatccagtctatcattgttggacatttgggttggttccaagtctttgctattaaaaaaaaaaaatctaaaaatctaatggtgtattaacatttttcattcatttgccat

SEQ ID NO: 26365 - DNA, 599 bp, Homo sapiens
tgaacccaggaggcagaggttgcagtgagctgagatcgcaccattgcactccagcctgggcaacaagagtgaaactcagtctcaaaaaaaaaaaaaccttttttttattttattattattatactttaagttttagggtacatgtgcacaatgtgcaggttagttacatatgcatacatgtgccatgttggtgtgctgcactcattaactcgtcatttaacattaggtatatctcctaatgctatccctcccctctcccccgaccccacaacagtccccagagtgtgatgttccccttcctgtgtccatgtgttctcattgttcaattcccacctatgagtgagaacatgcggtgtttggttttytgtccttgcgatagtttactgagaatgatgatttccaatttcatccatgtccctacaaaggacatgaactcatcattttttatggctgcatagtattccatggtgtatatgtgccacattttcttaatccagtctatcattgttggacatttgggttggttccaagtctttgctattaaaaaaaaaaaatctaaaaatctaatggtgtattaacatttttcattcatttgccat

SEQ ID NO: 26366 - DNA, 1318 bp, Homo sapiens
gccctgattggtggattttattattattattcttttgcagtaggagttcatatattttttccctaaaaaataatttttcttaaggtaaaaatgaaatattttgaaattaaaatttcaggcttttagaaagcctaaaaatcctggttttgctcatatttttggatgcaatgttgataacgccattatacattcagtggmtggattacctttggcggtacctcagtttcagattactatgacttgtcaggtgactcttggctttagtatgaggtagttctgctggacttttataggatcacatatgtaagttttcttatccctagattgctataaccttaagttaactttatttcaaggagaaaaataaagtccttccaagatgaaatctttgtggttggaggtcttagtaccaccacagataccggattaggtaaactgcataaggagataaaaattcttatgactttactcatgaaactgttggactagagagaagataatatagttttgaaaggtaaggcatacattctcaaaagaaggattttgttgttttgctgcaaaggttaggtcataattatgatactttttaaaaagtggttttaaatcttgggggaaaaagggtctcatagtatccattgacttctggaacttttttttcctcactcaatattatatctctggattcattcatactgtatgtagttgtagttcactgactttcactgcagtaaaatattccattatgtgtcttataacgcagtatgtttctcttttctcctctctgaccatttttttttttttttgagatattgcagtgttgctctgattattgttgtttcctgggcacacgtgccagtgtttctcttgggttaataccaaggaataaaattgctggtttgtaggttatgtgaatattcagcttattaagtattgccaaattatattcccaaatggttgtactaatttacataaaccagggaaacaaccaaatacaaacactaaataaaaacatgcacttctgttttgcatatatgtctgttgaaatacatatctttttagaaagcaagagaatgatgaacgtaaaacttagaatggcagttatcttttatatggactggagggtagcatgtggggaggaacacacacatggatgtttgttattgataatgacctagtccttgggtttcatggtgagtttctaggtgatcattgtacagtaattcccccgttatccaaagggagtatgttccaagttccctagtagatgcctgaaacctccgatggtgccaaaccctatgtatatgcttcttttccatgc

SEQ ID NO: 26367 - DNA, 1318 bp, Homo sapiens
gccctgattggtggattttattattattattcttttgcagtaggagttcatatattttttccctaaaaaataatttttcttaaggtaaaaatgaaatattttgaaattaaaatttcaggcttttagaaagcctaaaaatcctggttttgctcatatttttggatgcaatgttgataacgccattatacattcagtggctggattacctttggcggtacctcagtttcagattactatgacttgtcaggtgactcttggctttagtatgaggtagttctgctggacttttataggatcacatatgtaagttttcttatccctagattgctataaccttaagttaactttatttcaaggagaaaaataaagtccttccaagatgaaatctttgtggttggaggtcttagtaccaccacagataccggattaggtaaactgcataaggagataaaaattcttatgactttactcatgaaactgttggactagagagaagataatatagttttgaaaggtaaggcatacattctcaaaagaaggattttgttgttttgctgcaaaggttaggtcataattatgatactttttaaaaagtggttttaaatcttgggggaaaaagggtctcatagtatccattgacttctggaacttttttttcctcactcaatattatatctctggattcattcatactgtatgtagttgtagttcactgactttcactgcagtaaaatattccattatgtgtcttataacgcagtatgtttctcttttctcctctctgaccatttttttttttttttgagatattgcagtgttgctctgattattgttgtttcctgggcacacgtgccagtgtttctcttgggttaataccaaggaataaaattgctggtttgtaggttatgtgaatattcarcttattaagtattgccaaattatattcccaaatggttgtactaatttacataaaccagggaaacaaccaaatacaaacactaaataaaaacatgcacttctgttttgcatatatgtctgttgaaatacatatctttttagaaagcaagagaatgatgaacgtaaaacttagaatggcagttatcttttatatggactggagggtagcatgtggggaggaacacacacatggatgtttgttattgataatgacctagtccttgggtttcatggtgagtttctaggtgatcattgtacagtaattcccccgttatccaaagggagtatgttccaagttccctagtagatgcctgaaacctccgatggtgccaaaccctatgtatatgcttcttttccatgc

SEQ ID NO: 26368 - DNA, 1417 bp, Homo sapiens
caagaaatatagttggagtatgtgatctttaccatkatgtacctgaggctgactctccagatcttagccaaaccacttagtggccaggcctcttgggcacttaacttttctgagcttctatttcttcacttgaaaaacaggaacagtatctacagccagtggcagttgtcaaagtgcatatgacactttctgatggtcctgttccttatgataatcttcccagaacagatctgcccagcaatgtttccttttccaaatactgccacactcaagtttcagctggaccttgccaccatacttttgattcaaaatcgcatatgtatttggggatggtggcacattcaacattattaaagttagtatttaatggcattaatactagtaatttaatggcattaatacagtaacacatattatattctaaaacatgtcccaatatttcttattgattttgcacatctctcagtagactggtagctgcgtcagcataggaaaatgtgtctgatttattctaaactctatccaaagcccacagaggacctggaaagtgggaggaattcaagaggtataatgtcataaagaagtgagcgaatggttttcctaccacctataaaatttccatcaacaacatgtgctagtaaatgcatcctcattaacaggcatgttatcataatgatagcatttccaaggaatgatagcaatacaaatgagccagaagaaatgtgtaaaataaaattcaaaattgtgcaaatggaaaaacaaaggcatttggcaaattcttaagttattaatgtgccaaattaatgtttattttttcttttaagaaaaaatatgaattacagtggtaaaaatcagacctactaacagaaacataaataaaccccaaacaacaacaacaatcagctatcaagatcacaaagcaagatgtttaaatgacatttttgcagcgccatgttcctgtctgagcaccatgagataaaactctcagaaccacatgctctggaggccaccctgttccagagagctgaaagtcaaggaaatccccatatgtgattaccaagcatcttaaacagagacatctcacattaaattgcattcaggagacaaaggtttgtctagtacagccactgctcacaaatgctcacaaatggcttccatatggtgatgtcttcaaggcagtaggatccttggttcttgcatgtgactcccctttctacaacttgaattccgaactgaattaaaattaaagcttaaaggtaaaattgtcatttctcttctatttttatgctaaaatgttttatgaaaagcaggcctttttttcttagtttggagaattgtatttttattcattcatatgctaacaagctggatatagaaaacatatcactatgctaagtgtgagacaatatactgactt

SEQ ID NO: 26369 - DNA, 905 bp, Homo sapiens
gtgcaactgaaaaataatttttctggattcccttgacaacagggtcacctatatatttcacagttgcataacatttcatatatgtatatacagtgtactgtattatccataaaatatgtattttgtgtcaagcagaaatgctatagaggtgtgtaaatttattaagaatatatttcttaaactctaaagaatagaagaataagaataaaaattataaagcttggaattttattctttagatttttattttgcattaaatagttatatgtccacttgattgatagaatggtctgaattgctagaaaaagaaaataactttttttttcagacttactccataatatttaactcatgttttggagacatgtgtagtgagtaagaaaatattgcccaatatataaacttccatgaaaaaagcattgcccaatacatgaaagatggctaggtatcagacaataattcaaactcaggttgctggaagattgtccattcaaaatataaatatatatttgaaaatatctcaacaaatatatagattctagtatataatcttcttattttatatctgctatcaatttgtttccatttaaactcccccaaaatatttctgttaagatgtgataaataaacatagaatataattatattgtgggaagatatatctgcttcccacatttatttttaaatagcacatgtttgggtgcatagtcattttaattctcaaaatcgaactccaatgttgctactgtggccatttccatcrttgagtcccccaaaaatatatctaaatattattttttgttgatagtaagatgtcatgctttcattcattgttttggatataataaatagcatgtttagcaagtatgtgaagtatgttaaaaatactacccataaaaaattgc

SEQ ID NO: 26370 - DNA, 2368 bp, Homo sapiens
  misc_feature (1)...(2368): n = A,T,C or G
annnnnnnnnnnnnnnnnnnnnnnnnnnnnnnnnnnnnnnnnnnnnnnnnnnnnnnnnnnnnnnnnnnnnnnnnnnnnnnnnnnnnnnnnnnnnnnnnnnntcgtgatccacccaccttggcctcccaaagtgctgggattacaggcgtgagccaccgcgcccggccaatccagttcttaatgaacatcttttgtacaactctgtccatgctggtgccacggggtctgatgctggtcatcttatacaggaaaagaaaaagattttggtggtagtcagactattcccctccaagcaatcagaatcactgcaggtaagacatttctgccaagatttcacacgggctgggctacacagtaatgaagcctggtcagggactgctataaaaaagttggtgagcagaaagttgatatgaaacttaagtggctaaatgactatagtctcatgactaatttctgtgctgatgggggcaagggactgaagctacaaccaggtaattrcttctggaagaaaaacaactcttgtaaaaatttatccatttgcatggttttgggtagctagaagccttttcttccaaagttccaaaacagcaatgaggatcctgaataagaactgcctctcttctcctgggaccaagtggcaggcagtggcctgggaggtgggcagccagggggaggtggcaccatcccccgctgctggcttaggcccagagcagacgtctcccgtcctgcaccacagaatccgcggagcctatgggaacatggctgccccctgaaccaggacggtgtcaatgtgaaagggacaaaacgtcactgcgcctaaccgtcctctaaagaagtgagcaatggcaaaagctagaggaatgcaggatggggaggtggactccacatctgaactccacctgctcagcggcacagctgctcacaccacctgatgaagggatgtgggaaatcgaaacatgatagtgattctaacccccagctgccctgagatgggaatcacactttgctcctggtaagcatcgatctgtcatgtctgcacagaaaggacggtccctgtgaattcctgaggaaagaacggagcctcttttctctcttcggttaaaaacatattcaaaggcttctaaagactgctccagacaaaaggaccagttaaagccttgagaacttacttttatcacgcaaagtccttcagaatgcagctttccctgatatagtgcttgagtctcgaccaaattcgtcaacatgcaaaataattccactcccttctgaaacctcaagcccaaacttgtcaaaattatcactctaggctcctgctggagacagaggtgtttgtgagttgctcggccttttgaaactctgggatcaaacttcacggtagcttaggcctaaagagtaggggagcaaaaacacgaacatcttgagaggcatatagtacaacagtgatacttgagcacactggccaggttccagtttacgttctgctacttcttagctgtgtgaccttggacacaagaccttggacattaagaccttggttcttaatctctctgtgccttaattcatttctctgtagagataataatggtatcaacttcacaggccgtggtaagaatggaaagaactgatacacgtaacgtgcttagaatggtgtctggcatgtataagtgctctgtaactgttgctgctgttacatcatgactctgaaagggggttttagttaaaatggatcccatccactattatagctcaaagtccagcttgcaaaaagactttgattctagtaactaagtggaagccagtgtttggaccaggaaatatcagctgccacctccctgcaagggcatcttcctcagggtccagtgagggggtcagttgctctccatcttccaccccacccgccccacccttcagtcacatgggaatgctgactcctccagccttgcaattgctcctggggatggagacaactttttgtgctgactgagctttcctaaagaatagcctggcttcaggattttgcctacagggaggttttggtccccaaaggcagggagacttctatggcccctgtatcaatgccctggttatggtgtgaagatgccacaggatctagttcggagaggaaccagcagaagcctggacggagacagggtctgcacggcgtctctagtcccattctctgggccaggacaggacctgatgcatgtttggaggaggaggtccaggatctggctaaggtacctgggatggcactgggcaacagggaaggggaggtcctgagagtgccatggtgacactgcaaaagtcctattaatcttcccaatggggcagtggtgggaacccccaccactcctctgagggctgaccc

SEQ ID NO: 26371 - DNA, 1265 bp, Homo sapiens
ttaaaaaattaactcttattttttgaacagaaatgcaaaatttacttaaaatttcaaaaatatgtaagataattaactgcatttaaattttcctgagaaaattataatcaccttaatagatgcagacataggatccaagtaaattcaacaaaatcagtattcaaaaaccttagaaatttaggaataaagggaacttctttaaggtgatgaaggcacttgccaaaagctttattcatatagcataattgataatggagcagtagtaatattccctttaaaatcagcactgagataaggaatcagagtgaagtagcttgagtatacacaacactagagataacagttgtttttgtttttagctgttgttgttttatacttgaagctctggggtacatgtgcagaaggtgcaggtgtgttacataggtatacacgtgccatggtggtttgctgcacccatcaaccsgtcatctacattaggtatttctcctaatgctatccctcccctagcccccaacctcctgacaggcgccattgttcagctcccacttatgagtgagaacatgcagtgtttggttttctgttcttgtgttactttgctaagaatgatggtttccagcttcatccatgtccctgcaaaggacatgaactcatcctttttttacggctgcatagtagtccatggtgtatatgtgccacattttctttatccagtctatcattgatgggtatttgggttggttccaaatctttctaatccattctaatcagtgttctctaactacataaagtggttaaggaatagaatgatagtatttctaagaatactttttgggtcaaacaatatatattttttagacaatactactacctgttttttacatattaaaatgttggtcctataaacaccttggaagcattgattaagctaattaccttcatcaacatgaattcatctctgaaaaaaaattattgcattaaatggcaaatcttataacaatgcccatactgcaaaggttaaaatgaatacaaacctgagtatttattggagtaaagtttgttctaaaatgttttttttttttaaagctaactgtacagctgccagtcatttacatgagagtgattaaagtcctaccttggaagcaaatgctgccatcaacatggtatacttgattcaccctcacctggaggagttttctgaatgacttttctatagttgaaatgaaggcactaacctacctgccttgatctgtgtttataggaatgca

SEQ ID NO: 26372 - DNA, 763 bp, Homo sapiens
ccatgtatgtagtgtgcagggtctgttccagccatcactgtctctgccyggctccctgtaggctgtgggagggttctgggagaggtcgggaatgccaggaggaggaattggtgaagcaaagaaaaggcaaaagcccactgagaggtctaatgagccccaggtgcacacacttgtgttgtgtgtggctttcttcaggccctgggcaaatgtggcagcctggggtgtattgggagcatcagaacccaggtcaagtcctgactctgcaatccataaaccagttccgtgaccttgcccaggtccttccttagtttcctcaccagtgtggtgagaataacaaagatctcttctcaaaccgtctccctgggagttaagagattcccccatatctggtgatcccaggtaaagcacatggaaaaccaccaagtcctaaagcagagaagttctgagcagagcaggcctgagcttgtatggggcctggtgctgtggggcaccatggcagattccagcctgtggtcattattgggttgcctggtgtccccatggctctctagcgctgatggaaaacagccttatatcactaagtgtggacaataaccccttcaggctgagaacttggttcagacttgtgtagtcagagacatcttcctggaggcagtggacttgagccaagctttggaggctgcaataattgagtaagtcggccaggctcacacctataatcctagcactgtgggagccaaggcaagtggatcacctgaggtca

SEQ ID NO: 26373 - DNA, 1027 bp, Homo sapiens
ctgctcagagctccgccattgtcccccatcacagtgaatggatgtaagctcacccactctgtgcccctrcctccctgctactctttggggataataataaaacaaaaaccattaccatcagtcagtctgtccacccactggcatgtaccaagccagacactctgccgtgttctgggctttacaacagaggatgagagtggtcctttctctcagtctaataaagcacttcccatgatgtgttctatgggactcgattagaggagtcccacagaggcatccaggagatgctttacacagtggagctctctgatcaagtaaatgcagggaattctgctttctacatcctctcataagagaaccacagcccagctcagcatatgagtgactctgaggttttctgaagtaaggcaacttgttgaattgtatttagccatgcatcgacccaatttttacactgcatccttttcccccatataacttttggagaaacccactttaggatacatcttccacctcataggatgccaggaaatcaactgagttcaaagatgagaaacaactttgaaaagttaaataaaagaaatttaaatttaaagaaactcctcacttagtaaggaatatatgaccaaatagaaatacatgtatcttgaagaattgaagaatcaggctttaacgtggaagaggcctggatgttatccaacccatcatcttagtgtagcaatggggaggctcaggcccagagtgggcgagagagttgtctcctgcgactcagcagcattggaggcagagatggggcaagaacctagggctctgactcaccgtgcagcttctcttccagcaggagatgggttggggcagaaaaggttgaatagggtgaaggagcaaaccacagactccagtgggagactgtggggtcatcctccttgtagggcatgagcccagcagggctgggagacaaggctgtgctgttacttctggcacagtaggaagaaagagagacaaaatgcctgagatcagggggttctct

SEQ ID NO: 26374 - DNA, 1027 bp, Homo sapiens
ctgctcagagctccgccattgtcccccatcacagtgaatggatgtaagctcacccactctgtgcccctgcctccctgctactctttggggataataataaaacaaaaaccattaccatcagycagtctgtccacccactggcatgtaccaagccagacactctgccgtgttctgggctttacaacagaggatgagagtggtcctttctctcagtctaataaagcacttcccatgatgtgttctatgggactcgattagaggagtcccacagaggcatccaggagatgctttacacagtggagctctctgatcaagtaaatgcagggaattctgctttctacatcctctcataagagaaccacagcccagctcagcatatgagtgactctgaggttttctgaagtaaggcaacttgttgaattgtatttagccatgcatcgacccaatttttacactgcatccttttcccccatataacttttggagaaacccactttaggatacatcttccacctcataggatgccaggaaatcaactgagttcaaagatgagaaacaactttgaaaagttaaataaaagaaatttaaatttaaagaaactcctcacttagtaaggaatatatgaccaaatagaaatacatgtatcttgaagaattgaagaatcaggctttaacgtggaagaggcctggatgttatccaacccatcatcttagtgtagcaatggggaggctcaggcccagagtgggcgagagagttgtctcctgcgactcagcagcattggaggcagagatggggcaagaacctagggctctgactcaccgtgcagcttctcttccagcaggagatgggttggggcagaaaaggttgaatagggtgaaggagcaaaccacagactccagtgggagactgtggggtcatcctccttgtagggcatgagcccagcagggctgggagacaaggctgtgctgttacttctggcacagtaggaagaaagagagacaaaatgcctgagatcagggggttctct

SEQ ID NO: 26375 - DNA, 1027 bp, Homo sapiens
ctgctcagagctccgccattgtcccccatcacagtgaatggatgtaagctcacccactctgtgcccctgcctccctgctactctttggggataataataaaacaaaaaccattaccatcagtcagtctgtccacccactggcatgtaccaagccagacactctgccgtgttctgggcttwacaacagaggatgagagtggtcctttctctcagtctaataaagcacttcccatgatgtgttctatgggactcgattagaggagtcccacagaggcatccaggagatgctttacacagtggagctctctgatcaagtaaatgcagggaattctgctttctacatcctctcataagagaaccacagcccagctcagcatatgagtgactctgaggttttctgaagtaaggcaacttgttgaattgtatttagccatgcatcgacccaatttttacactgcatccttttcccccatataacttttggagaaacccactttaggatacatcttccacctcataggatgccaggaaatcaactgagttcaaagatgagaaacaactttgaaaagttaaataaaagaaatttaaatttaaagaaactcctcacttagtaaggaatatatgaccaaatagaaatacatgtatcttgaagaattgaagaatcaggctttaacgtggaagaggcctggatgttatccaacccatcatcttagtgtagcaatggggaggctcaggcccagagtgggcgagagagttgtctcctgcgactcagcagcattggaggcagagatggggcaagaacctagggctctgactcaccgtgcagcttctcttccagcaggagatgggttggggcagaaaaggttgaatagggtgaaggagcaaaccacagactccagtgggagactgtggggtcatcctccttgtagggcatgagcccagcagggctgggagacaaggctgtgctgttacttctggcacagtaggaagaaagagagacaaaatgcctgagatcagggggttctct

SEQ ID NO: 26376 - DNA, 1027 bp, Homo sapiens
ctgctcagagctccgccattgtcccccatcacagtgaatggatgtaagctcacccactctgtgcccctgcctccctgctactctttggggataataataaaacaaaaaccattaccatcagtcagtctgtccacccactggcatgtaccaagccagacactctgccgtgttctgggctttacaacagaggatgagagtggtcctttctctcagtctaataaagcacttcccaygatgtgttctatgggactcgattagaggagtcccacagaggcatccaggagatgctttacacagtggagctctctgatcaagtaaatgcagggaattctgctttctacatcctctcataagagaaccacagcccagctcagcatatgagtgactctgaggttttctgaagtaaggcaacttgttgaattgtatttagccatgcatcgacccaatttttacactgcatccttttcccccatataacttttggagaaacccactttaggatacatcttccacctcataggatgccaggaaatcaactgagttcaaagatgagaaacaactttgaaaagttaaataaaagaaatttaaatttaaagaaactcctcacttagtaaggaatatatgaccaaatagaaatacatgtatcttgaagaattgaagaatcaggctttaacgtggaagaggcctggatgttatccaacccatcatcttagtgtagcaatggggaggctcaggcccagagtgggcgagagagttgtctcctgcgactcagcagcattggaggcagagatggggcaagaacctagggctctgactcaccgtgcagcttctcttccagcaggagatgggttggggcagaaaaggttgaatagggtgaaggagcaaaccacagactccagtgggagactgtggggtcatcctccttgtagggcatgagcccagcagggctgggagacaaggctgtgctgttacttctggcacagtaggaagaaagagagacaaaatgcctgagatcagggggttctct

SEQ ID NO: 26377 - DNA, 1027 bp, Homo sapiens
ctgctcagagctccgccattgtcccccatcacagtgaatggatgtaagctcacccactctgtgcccctgcctccctgctactctttggggataataataaaacaaaaaccattaccatcagtcagtctgtccacccactggcatgtaccaagccagacactctgccgtgttctgggctttacaacagaggatgagagtggtcctttctctcagtctaataaagcacttcccatgatgtgttctatgggactcgattagaggagtcccacagaggcatccaggagatgctttacacagtggagctctctgatcaagtaaatgcagggaattctgctttctacatcctctcataagagaaccacagcccagctcagcatatgagtgactctgaggttttctgaagtaaggcaacttgttgaattgtatttagccatgcatcgacccaatttttacactgcatccttttcccccatataacttttggagaaacccactttaggatacatcttccacctcataggatgccaggaaatcaactgagttcaaagatgagaaacaactttgaaaagttaaataaaagaaatttaaatttaaagaaactcctcacttagtaaggaatatatgaccaaatagaaatacatgtatcttgaagaattgaagaatcaggctttaacgtggaagaggcctggatgttatccaacccatcatcttagtgtagcaatggggaggctcaggcccagagtgggcgagagagttgtctcctgcgactcagcagcattggaggcakagatggggcaagaacctagggctctgactcaccgtgcagcttctcttccagcaggagatgggttggggcagaaaaggttgaatagggtgaaggagcaaaccacagactccagtgggagactgtggggtcatcctccttgtagggcatgagcccagcagggctgggagacaaggctgtgctgttacttctggcacagtaggaagaaagagagacaaaatgcctgagatcagggggttctct

SEQ ID NO: 26378 - DNA, 1027 bp, Homo sapiens
ctgctcagagctccgccattgtcccccatcacagtgaatggatgtaagctcacccactctgtgcccctgcctccctgctactctttggggataataataaaacaaaaaccattaccatcagtcagtctgtccacccactggcatgtaccaagccagacactctgccgtgttctgggctttacaacagaggatgagagtggtcctttctctcagtctaataaagcacttcccatgatgtgttctatgggactcgattagaggagtcccacagaggcatccaggagatgctttacacagtggagctctctgatcaagtaaatgcagggaattctgctttctacatcctctcataagagaaccacagcccagctcagcatatgagtgactctgaggttttctgaagtaaggcaacttgttgaattgtatttagccatgcatcgacccaatttttacactgcatccttttcccccatataacttttggagaaacccactttaggatacatcttccacctcataggatgccaggaaatcaactgagttcaaagatgagaaacaactttgaaaagttaaataaaagaaatttaaatttaaagaaactcctcacttagtaaggaatatatgaccaaatagaaatacatgtatcttgaagaattgaagaatcaggctttaacgtggaagaggcctggatgttatccaacccatcatcttagtgtagcaatggggaggctcaggcccagagtgggcgagagagttgtctcctgcgactcagcagcattggaggcagagatggggcaagaacctagggctctgactcaccgtgcagcttctcttccarcaggagatgggttggggcagaaaaggttgaatagggtgaaggagcaaaccacagactccagtgggagactgtggggtcatcctccttgtagggcatgagcccagcagggctgggagacaaggctgtgctgttacttctggcacagtaggaagaaagagagacaaaatgcctgagatcagggggttctct

SEQ ID NO: 26379 - DNA, 555 bp, Homo sapiens
atataaagaactggtataattgacaaataaaaagttaagcaatctaatttttttagagacagggtctcacctatgttgcctaggctggagtgcagtggctattcacaggtgcaatcacagtgcaaggcagccttgaactcctgggctcaagagatcctcctgcctcagcctcccgagttaacaatctaatttttaaaatgggctggctttctgggatgatggtgacgaggtctcagtgcctggaaagggggtggcattaccctcaaggatgctgggaggctttttccagggagctgacagtagtgacaaaggacatctgatatggaacatcaggggaaagagagcaggacttcacctcataaggacaaccactaggaggtgcctctgacaccagccatggstttcagcacctgaagtgttttaagggctgtatctgaggcacctgttcattcacctgtcaccctatgttgtcgtatccagaatggaacctctattagggcaggagtcgtcttgcctttccgagcttctcactattcagggacacataataggtca

SEQ ID NO: 26380 - DNA, 539 bp, Homo sapiens
gggggcactaattgccatggtggagggagtgaggtggtggtagtggtgtggctgaagtagtgagtatggtggcaatggtggtacccgtgatggctgatggtgatggtgctagcagtgacagccatggtgatagtagcagtggggatggtggtaggggtggcagttgtggcgacagtcttattccaaccccaaatagaataccctggggtcagaactaaggagagccatgaagaaaagagccttttgtccctctgtgtccctccctccctttcctggaaagtataaagtgccaatttacctcacaggccccttgcaaagactcaacttatttagggcaactttattcttctccaggtctgtgcttgatgtagccccgcagttctcatcctaggttgagccgagcctggagtctaaaatttatgaccctgggagtggttttggtctgagcatatgccrggaagcatctacaatctgaaagtgtttgactgacaataaccagtgtctcacagcatttatgagcatgccaaataaacaattga

SEQ ID NO: 26381 - DNA, 539 bp, Homo sapiens
gggggcactaattgccatggtggagggagtgaggtggtggtagtggtgtggctgaagtagtgagtatggtggcaatggtggtacccgtgatggctgatggtgatggtgctagcagtgacagccatggtgatagtagcagtggggatggtggtaggggtggcagttgtggcgacagtcttattccaaccccaaatagaataccctggggtcagaactaaggagagccatgaagaaaagagccttttgtccctctgtgtccctccctccctttcctggaaagtataaagtgccaatttacctcacaggccccttgcaaagactcaacttatttagggcaactttattcttctccaggtctgtgcttgatgtagccccgcagttctcatcctaggttgagccgagcctggagtctaaaatttatgaccctgggagtggttttggtctgagcatatgccgggaarcatctacaatctgaaagtgtttgactgacaataaccagtgtctcacagcatttatgagcatgccaaataaacaattga

SEQ ID NO: 26382 - DNA, 552 bp, Homo sapiens
gcagcccatcctcaccttcttgtgtgtccactaagtgccaattcaaacactgtgcttcacttctcccattcaaaatgctagttcctagaccaggatctgatgctctaagctggcctcaagtctctccgagggaaaacatgatataaatggagctgacggcaaagcagctaggaagccccagctgcagggacaggcagctgtgatttttttttttctttcttactccatgtccctgtcttcagtttgtccttcaatagtggatttgaatggccttcatttcattttgttttaatatcaagaaatttcataaacttagtagccaaatctccaaaataaaacaaaaaggaaatattttccagtcacatctactgacttatttccagcaaaatctgatacaatggtaatcaaayaggacaaaagagtaacacactccctctctctcaaaaacaaaacaaagcaaaccaaaacatacccagtctgtatttttcataattacagttgtcagggatttgagtccatagaaaacaatatgcaaatgtaaacaacatgcaa

SEQ ID NO: 26383 - DNA, 650 bp, Homo sapiens
acaacatctcagcaaagaaattgttgaaagtacaggcctttttcaaaatggagtctcttatgtctttcctttctacatagacacagtaagagtctgattgctctttctttagcctacactcactgaactgcccttcccctccgctgggccatgaccatggagaacaggtccactgtcctccctgcgtggtgcaccatggaggctcagactccgtcctcgaggctggcaagaagacagggtaagacatgagcctcctgatacaggagatgtctgtggagcccacaggactgcaacctcacactgcagggctggaggcacagactgactatttactattctgtggcctggggggctcaaggcacagagctcctcattagccaaagtcacccaagttcccaacctctaaggatttcctcataataatgcaagaagaagaaaagtgagwgcccgtagaagctttggggctcttcctctaatcaggagaaagctggtgtgtattcttcacttctttcttttctttttaaacatccaactgctttaattttcatcttttattatgggaaaatatatcacttataaatattaaaaaaaacccacaaaaataacagatgctggcaagaatgtgtagataaggaaactcacgtactgtt

SEQ ID NO: 26384 - DNA, 560 bp, Homo sapiens
cgaggtcaagagatcgacaccatcctggccaacatggtgaaaccccatctctactaaaaatacaaaaattagctgggcgtggtggcatgcgcctgtagtcccagctacttgggaggctgaggcatgagaattgcttgaacccaggaggcagaggttgcggtgagctgagattgggcctctgtgctccagcctggtgacagagcgagactccgtctcaaaaaaaaaaaaactttaagcactgcttcatttaaatttcacttaaaatgtacccttctcttaaaatcccataataattattcttttttttcttttttggtaggatgtgtcacagctccactggcatgcagtctccctcattgtgataaatcaatgaatgtaacttgttggattataaggttgttcctggtggttttggctggttggttgaggacagtggtaaacaagyagcaaagacaatattgccgcagggggaaatgctggcatcagtgctgctatctagcaaatgagtcttgggctcaatgtagttggaagttggctcttagacttgcacattaacttgg

SEQ ID NO: 26385 - DNA, 560 bp, Homo sapiens
cgaggtcaagagatcgacaccatcctggccaacatggtgaaaccccatctctactaaaaatacaaaaattagctgggcgtggtggcatgcgcctgtagtcccagctacttgggaggctgaggcatgagaattgcttgaacccaggaggcagaggttgcggtgagctgagattgggcctctgtgctccagcctggtgacagagcgagactccgtctcaaaaaaaaaaaaactttaagcactgcttcatttaaatttcacttaaaatgtacccttctcttaaaatcccataataattattcttttttttcttttttggtaggatgtgtcacagctccactggcatgcagtctccctcattgtgataaatcaatgaatgtaacttgttggattataaggttgttcctggtggttttggctggttggttgaggacagtggtaaacaagtagcaaagacaatrttgccgcagggggaaatgctggcatcagtgctgctatctagcaaatgagtcttgggctcaatgtagttggaagttggctcttagacttgcacattaacttgg

SEQ ID NO: 26386 - DNA, 520 bp, Homo sapiens
ctttacttcatttaacccgcacaatagcctcatgaggtagatatcatcaccattttgcagatgagaaagctgaagctaagcaaagttgacctgaccaaaatcacatagcaaktaagataggagtccagcttcgtctcattccaatatgagtgcgttttcctcttttccattggctctcaaagtttggtcttaaaggagctgtatcagcatcacctgggaacttattagaactgcaccttctcagccctaccccaaacccactgggtcagaaactctggggttggggcctagccatctgtgtttcacactcagactgacacacgatcatttctgataaccactgctctatgacatgcgtttcctcttcagttaggatccgactccttattttgtatttaacaaggagtatgaaacaaagcccgggctctgaatttgtattcctcagcaataatgtgtcaagtaatcttaaacaagcaaacccctggcccattccagcccatagtgcatgtgcggaagaaaa

SEQ ID NO: 26387 - DNA, 824 bp, Homo sapiens
tggttggggaaaaaagagtcatagtacctaagtattgggcttagcagtatgtcaaatcaccccattgcaaagactcaggcagaagaaaagattcacatcacttaagacacaggctcagatatatgacccaatgtctcaagtaaggagggctcaggcagaagggtagagtcatatcacataggggcttccctaggtatataacacaatctaacatatgaggtgaaagctggcaaaagagccacatcgccttgatgtgggctcttgagatatatcacacaagcctcccttaagacagcacccatgcaagagtgttataacaaataggtgcgggttgtaccattatgtcacaatgctccacgtgggcagggctcaaaaagatagtcagatcacctaggtaataggccagagatatgttacgatatccttcttaaggcatggctcgggcaaaagagtaccatcacctgtttgcctagcctagtaatgtgtcactatcarggtaagcagggcccaggcaggagagcaaaatcacctaagtgatagtaccagagatttgtcacaatgccctcattaggacacggctctaataaaagattactgtcatctacgtgcctgacccagccatatgatactatcccccactgtgtgcagggcccattgtcatgaggagagttacatcacctaagtggttgtatgacatacgacacagtgatatgtcacaatgatgtctgtgggaatggcacaggcaaaaatttaacatgacttgggtggtggacctagtgatatgtcatgacccttaccgagagcaggacccaggcaggagagtc

SEQ ID NO: 26388 - DNA, 824 bp, Homo sapiens
tggttggggaaaaaagagtcatagtacctaagtattgggcttagcagtatgtcaaatcaccccattgcaaagactcaggcagaagaaaagattcacatcacttaagacacaggctcagatatatgacccaatgtctcaagtaaggagggctcaggcagaagggtagagtcatatcacataggggcttccctaggtatataacacaatctaacatatgaggtgaaagctggcaaaagagccacatcgccttgatgtgggctcttgagatatatcacacaagcctcccttaagacagcacccatgcaagagtgttataacaaataggtgcgggttgtaccattatgtcacaatgctccacgtgggcagggctcaaaaagatagtcagatcacctaggtaataggccagagatatgttacgatatccttcttaaggcatggctcgggcaaaagagtaccatcacctgtttgcctagcctagtaatgtgtcactatcagggtaagcagggcccaggcaggagagcaaaatcacctaagtgatagtaccagagatttgtcacaatgccctcattaggacacggctctaataaaagattactgtcatctacgtgcctgacccagccatatgatactatcccccactgtgtgcagggcccattgtcatgaggagagttacatcacctaagtggttgtatgacatacgasacagtgatatgtcacaatgatgtctgtgggaatggcacaggcaaaaatttaacatgacttgggtggtggacctagtgatatgtcatgacccttaccgagagcaggacccaggcaggagagtc

SEQ ID NO: 26389 - DNA, 615 bp, Homo sapiens
cctaaagttttaaaagtattgagttaggtttaacaacatctctgcattttctaaaaagaaataaaatatttagagaaggcccagttttaggaaaccacaaaaaactgtcactgaaaaccactgtgtttttacattatgaggygccaagcagatgtgataaactgtttatctaagggcctatccgcagaagtcttgtggattagataaaacctatgaaacctaccgtgttcactgtgcgagagtgagaagtcattttgcttccttggagaaatctatatgggagcacagacttttgcatacttgattgtcatgtgtgtcacctagggatgaaaaagataggacggacccagggcagcttttggatgagacagagagcctggcaagaagcaaggaggtgattacaggggtttgagcaagaaaccacagaggagcaagtagaatgatgaaaagtcatggaattggccccgcaggagagagagagagaagaaagatgttcattatctatggaaagggagaaggttgaatggagacctaatcttcaaggaaaagaaatattgcttatggaacaatgagcagtggccttttctgttaactgagagaatgagttagaatttt

SEQ ID NO: 26390 - DNA, 1118 bp, Homo sapiens
aagtgtttctgggaatccctgagaaatgctgacatgttccacaagtatgagccactttttgttgatcatctcagctggccgacatgctctggtccactgcttttgtttcctcagttctcctctcactaacttgaccttgaatcctaacttagaaattgatctaggactttcgtcgtcttgatttaaaacaaaaacaaaacaaaaaagtaaacaaatcaactccaaaatatctgagctatagttgtcatcatattgctggagataaaaggctatattcacctttggaaaccagaactcttgttttgtaaataatactttagtggatctttggctgtgaaaaagtaaatctaacaagagatggggtaaatatagcatacagcatattatttaaaagctaaattgtggccagaaatgagctaaaagagttaagtgagctcttctgtcaaaataagactaggtctaaccacgtttaactggaagtttcaggatatcagaaagaatttataataatggtcgagagaaaaacattaaaactagatatcgtgagctgcacagtggtcccctaaatgacacatcctaatccctgaaacttgtgatgttaccttattcggaaaagaggactttatagatgtgatattaagttaagcatcttaaaaggagaagcttatcctggattatccaggtgggcaattgcgtgtatccttataaaagagagggatattatatcaaaaaagcacaggagacagacacacaaacaagaggaggaggcaatgtgaccaggaaggcagaggttagagtattgcagctacaaaccaaaaaaggcctatacmcactagaagctggaagaagcaagctatggattctcctctagagccttgggagggaggacaccttgattttggacttctggcctctatattgtgagagaatgcatttctgttgttttaagtcacctagtgtgtggcaatttgttagagtagccctagaggaactaatacagtagatacaactatatatgagcccgtgagcttccacagagtatcctctaatggccacctccatccttagcccctggtctgtggcaaggttgtaggaccagcttgctctctcatggtcta

SEQ ID NO: 26391 - DNA, 580 bp, Homo sapiens
tcccatgcataaagctgagagagttaactttacaaagaagtaatcaaatagatgaaaaataccccctaccaaggtagcccatgtaagaactaaggaaccaccaaaatcacgcatatcagttcaggagagaaagttatcatttagctgtttgacacgttgaatcttttccaaaagcaatgaagctagytcttggagtgcagaagctctcttgtgctgggccacttccctggtctcaaccaagagagagttggctccactaaagcagaaattctcagtcccatccacaatcactgacttcttctaacaagtcttctgaaaatctctttactaatttctgaaatgaaattcagaaataatataacctacctatgcatataatttttaaaatcagtgtaaggtctaaattgaaacataaagtagaaataatttacactaatacatatataacattaataatgaataattattatattaatagccttacaataaataaattggtttttaaatacagtatattcaactaaacattgttggctcatttgtagctgacattttaagataaaagtgcgtgtgtgtgtgt

SEQ ID NO: 26392 - DNA, 598 bp, Homo sapiens
tccacctgacctgcagcctggacttctccgcgtaacgaggctctgctartatggcaggaaaggtgtcataccgaggagaagctgctcggcaagatgtaaagatgaacggctgggcattaatcggctggtgcctggcaggtatctagaatattctaactacaaaacctgcctttgcaagatttttcttcccagagattctatttccttgaacaagctgtgtatccattcattctaccacctcactccaccccatcccacctgaagcaagttacagccagagaatagtgaaagggacggctttatccttatagaaaggaaatttaaagtgccggctgttgttaatgagcccattactcctaattggggaaaattgcaaccagaagaaaggggatatgtcagggaaacatgtgacaggtaatgtgctcagggctggctgaatccaagggcaaggcacctcgggaaatgaaatgggaagagaaggttcttggaaaataaaaaacgagtccttccctgggtccaagaacactgctgggtggtgtggttggagctgacaggtggagggggagaacgggcagcagccggacacccctgccttgta

SEQ ID NO: 26393 - DNA, 1395 bp, Homo sapiens
agcagggcagaggccagcaggggaattcagggaagagcctcagggctgacaatggggacacctgactacagtcaaggggattcaaagcacagcctggaacctggaggaatcccctggaacatggacacagaaatgcggacagctgaagccatgaccttgaccacaggtagggagcttgcagttagggacaggagccaactttacttagacataactcaaattcatttcatttctgaaggaaatgaaatttccttcattttcacctggttggaatttattgctctctccttaatggtgcatagcaccttgtttatttatgctttgagtaattgtaatatgccttgttttatagtatttttatacatttctacttcaactcttgattataaatttgttaaggcagggaatatctatctatctgtctatcttatctatctatcatctacacacactaatggtattttagctatagcatacataaatacataggtacattttgttgaattgaaattaagtgaattaatcccatcctctttcagaatagaaattatgttttctgggagctagaaactattgtgagagatgttagtattgttgaaatttaaaaggggctgtccagttcagttgtggcctggtgtgtactgaatgacatccaaattctaagtaagtggaattgctatcagatctgaaataaattagccatgctcgtgagaagatgtagagtgaggaattccttccacaaatgctctgtttatctgattattggttagccagtgatttcctgtcatccacaaaaaaagaggaaatagtaagagaaaagtaaatactaggtgaagtgctttgagccaaagggagtccatataagaagtgatggatggctctgttgggatcccggcagtagtgcatgatgatgttgttgtataaatacgtcagctcctttaaccctcgggggaccctgaagcatgtgtttttcatgggcccctagcgtgctcatgygggattaagtttcagttgcctactgtggtaattggcttgagaagcctatctttattaattttctcctcttccttgtcttatttctcttctcccctacctgtgttctcttcattcccttcctccctacaaaataaactatgtgagtttgaattcttgtttcaggattcaagtttgctcctggggaaccaaattaagactaaagaatatgtattctctttcttctcatttggcgttgagacattttaaagcctcaacaattttccctatataagcagttccaattatttgtgcctgacttataaaaagtaggtaatgagaaaattaaggcttgcagacaaatcttacacaattgcagcagaatatctcagaaatgtgcccaattctgagacagaaagaaaa

SEQ ID NO: 26394 - DNA, 531 bp, Homo sapiens
tattttacgctatagagtaaattagtaagaatttaactcagaaaacaaagagctcaaagaggataaaataaaatggaaaaaaactgaaaaggaatttgtaattttccagacaaaaattgagaagccacatagttaaatayatatcattaaataattcataaattagaaatggcaaggaagagaatagtcatccctaaaaatattttgctgacagaataaaatctggtagcaatcacaatgattcgtaaaacaaagactaaggttaaagaaattagtctaagtatccccagttctatttactgatccacaacaaaatagattacctgcaacattctagccattctcctctggttgagctctgggtggcctatgtctcactaaaagtgtggtgcccagagtggaatagtgtcctagttattgtcagactgacagacagtagggcagaactctcacattacttgttcgtattggtgtaaaccaagggtaataattggtttatctaaattaatgcaagaaaacagatcctgctgg

SEQ ID NO: 26395 - DNA, 531 bp, Homo sapiens
tattttacgctatagagtaaattagtaagaatttaactcagaaaacaaagagctcaaagaggataaaataaaatggaaaaaaactgaaaaggaatttgtaattttccagacaaaaattgagaagccacatagttaaatatatatcattaaataattcataaattagaaatggcaaggaagagaatagtcatcccyaaaaatattttgctgacagaataaaatctggtagcaatcacaatgattcgtaaaacaaagactaaggttaaagaaattagtctaagtatccccagttctatttactgatccacaacaaaatagattacctgcaacattctagccattctcctctggttgagctctgggtggcctatgtctcactaaaagtgtggtgcccagagtggaatagtgtcctagttattgtcagactgacagacagtagggcagaactctcacattacttgttcgtattggtgtaaaccaagggtaataattggtttatctaaattaatgcaagaaaacagatcctgctgg

SEQ ID NO: 26396 - DNA, 531 bp, Homo sapiens
tattttacgctatagagtaaattagtaagaatttaactcagaaaacaaagagctcaaagaggataaaataaaatggaaaaaaactgaaaaggaatttgtaattttccagacaaaaattgagaagccacatagttaaatatatatcattaaataattcataaattagaaatggcaaggaagagaatagtcatccctaaaaatattttgctgacagaataaaatctggtagcaatcacaatgattcgtaaaacaaagactaaggttaaagaaattagtctaartatccccagttctatttactgatccacaacaaaatagattacctgcaacattctagccattctcctctggttgagctctgggtggcctatgtctcactaaaagtgtggtgcccagagtggaatagtgtcctagttattgtcagactgacagacagtagggcagaactctcacattacttgttcgtattggtgtaaaccaagggtaataattggtttatctaaattaatgcaagaaaacagatcctgctgg

SEQ ID NO: 26397 - DNA, 1248 bp, Homo sapiens
gcataggacaatggactttatataatgtttctttttggtccttacctctgatcaaacaagaaaatatagagtcatcctgtctactcttggaaggagtaatcaatattcaccaaaggatcagtaaacagaaggtcagtacacaagtcacctgtgtcttgaaggtttgcggtaataaatgttgtacagaagggtcagaggaactaaatggcaggtgggtgaagactaagaagctactcagagaaggattttgaaggaaggctgtggttgggagtggtgtatgtgtggaaagggacagcggcttctagtcgttggggtatttgagagagagaacggggacaatgactgaggttcctaagyggttagacgaagggtcaatctggccacagcatttgggatatgggaagcagtgggggtctgagctcaggccttagaacccagggagaagcacagatagaaaggagcactgtgggaatggagtcaccagtgacacaccctcctccatagaaccccactgctgagtgtggggacctgccccagcaaccaccagacaggaaaggagaatgatcgacagcaccttctgtcagggagagaggagttggcagcaccagcagtcctggctcccctaagcaccaggctctcttattcctagaacctccacatttgaatggtgtgtgtcttccttaatcaaaagctggactttctggcagtttgtggtttaatttaatttgcacggtatttcataatagttactgttacattaactggtatataacattggggaaaataaggtttttctctgacgataattgcctttttaaatgatgataattgccctttaaaaacaagtaatattctcgcaatactccttctttttcatgttggctggtctttttcatgttggctggtccagtatgactatactttaaaataaagaatcaaatcctagtttccattcttcagttaatactactttgttgcaatatttttatgatttttttcagttacaattagttttttgcaagggctgactgatttgttgattttctaactgttttaattacttggttaggtgttccatgtagaattttatttttttttttaaagtctggattaatgccacgtattttatacttgccaccgcttttcccacatcctacatggttattggtttttatctctggtatatttatcttctctagatagtttagtgccttgtttttaaaatttgtgatgatgaagttattgagt

SEQ ID NO: 26398 - DNA, 1248 bp, Homo sapiens
gcataggacaatggactttatataatgtttctttttggtccttacctctgatcaaacaagaaaatatagagtcatcctgtctactcttggaaggagtaatcaatattcaccaaaggatcagtaaacagaaggtcagtacacaagtcacctgtgtcttgaaggtttgcggtaataaatgttgtacagaagggtcagaggaactaaatggcaggtgggtgaagactaagaagctactcagagaaggattttgaaggaaggctgtggttgggagtggtgtatgtgtggaaagggacagcggcttctagtcgttggggtatttgagagagagaacggggacaatgactgaggttcctaagcggttagacgaagggtcaatctgkccacagcatttgggatatgggaagcagtgggggtctgagctcaggccttagaacccagggagaagcacagatagaaaggagcactgtgggaatggagtcaccagtgacacaccctcctccatagaaccccactgctgagtgtggggacctgccccagcaaccaccagacaggaaaggagaatgatcgacagcaccttctgtcagggagagaggagttggcagcaccagcagtcctggctcccctaagcaccaggctctcttattcctagaacctccacatttgaatggtgtgtgtcttccttaatcaaaagctggactttctggcagtttgtggtttaatttaatttgcacggtatttcataatagttactgttacattaactggtatataacattggggaaaataaggtttttctctgacgataattgcctttttaaatgatgataattgccctttaaaaacaagtaatattctcgcaatactccttctttttcatgttggctggtctttttcatgttggctggtccagtatgactatactttaaaataaagaatcaaatcctagtttccattcttcagttaatactactttgttgcaatatttttatgatttttttcagttacaattagttttttgcaagggctgactgatttgttgattttctaactgttttaattacttggttaggtgttccatgtagaattttatttttttttttaaagtctggattaatgccacgtattttatacttgccaccgcttttcccacatcctacatggttattggtttttatctctggtatatttatcttctctagatagtttagtgccttgtttttaaaatttgtgatgatgaagttattgagt

SEQ ID NO: 26399 - DNA, 1248 bp, Homo sapiens
gcataggacaatggactttatataatgtttctttttggtccttacctctgatcaaacaagaaaatatagagtcatcctgtctactcttggaaggagtaatcaatattcaccaaaggatcagtaaacagaaggtcagtacacaagtcacctgtgtcttgaaggtttgcggtaataaatgttgtacagaagggtcagaggaactaaatggcaggtgggtgaagactaagaagctactcagagaaggattttgaaggaaggctgtggttgggagtggtgtatgtgtggaaagggacagcggcttctagtcgttggggtatttgagagagagaacggggacaatgactgaggttcctaagcggttagacgaagggtcaatctggccacagcatttgggatatgggaagcagtgggggtctgagctcaggccttagaacccagggagaagcacagatagaaaggagcactgtgggaatggagtcaccagtgacacaccctcctccatagaaccccactgctgagtgtggggacctgccccagcaaccaccagacaggaaaggagaatgatcgacagcaccttctgtcagggagagaggagttggcagcaccagcagtcctggctcccctaagcaccaggctctcttattcctagaacctccacatttgaatggtgtgtgtcttccttaatcaaaagctggactttctggcagtttgtggtttaatttaatttgcacggtatttcataatagttactgttacattaactggtatataacattggggaaaataaggtttttctctgacgataattgcctttttaaatgatgataattgccctttaaaaacaagtaatattctcgcaatactccttctttttcatgttggctggtctttttcatgttggctggtccagtatgactatactttaaaataaagaatcaaatcctagtttccattcttcagttaatactactttgttgcaatatttttatgatttttttcagttacaattagttttttgcaagggctgactgatttgttgattttctaactgttttaattacttggttaggtgttccatgtagaattttatttttttttttaaagtctggattaatgccacgtattttatacttgccaccgcttttcccacatcctacatggttattggtttttatctctggtatatttatcttctcyagatagtttagtgccttgtttttaaaatttgtgatgatgaagttattgagt

SEQ ID NO: 26400 - DNA, 565 bp, Homo sapiens
gcaaattctattttgaggaaaacaaaactgaaataaaatcatggcaatgatacttctacttcaggcaaaatcttgttcaattcaactgcagacccactctgcaattatggaagtcacagaacttgacaagtattgtatcaaaaatcattccatgccaaaagaycaagtttaatatttttttcataattcatcttggcctgaggctacaacaagtcctattgttatatactctgcctctagagaatgaggctgctaacagaccttggaatggtgcctggcacacaggctcaagaaatatttgttgaatgaattgtaattaacacctcctgttgtggggatacataaaagatgttacatgaaaaatgccatctaacatgcagcaacaaatctcttcccattaagcagtaaatctacttaacaatgatatatttttggcaaggcatctgcctctgaatgatcctatagtactgaaaattctttttaaactgaaatatttttcaagatattatattattgaccttatgaaagcttttttaacatatgaaattggggttatttggctatg

SEQ ID NO: 26401 - DNA, 565 bp, Homo sapiens
gcaaattctattttgaggaaaacaaaactgaaataaaatcatggcaatgatacttctacttcaggcaaaatcttgttcaattcaactgcagacccactctgcaattatggaagtcacagaacttgacaagtattgtatcaaaaatcattccatgccaaaagaccaagtttaatatttttttcataattcatcttggcctgaggctacaacaagtcctattgttatatactctgcctctagagaatgaggctgctaacagaccttggaatggtgcctggcacamaggctcaagaaatatttgttgaatgaattgtaattaacacctcctgttgtggggatacataaaagatgttacatgaaaaatgccatctaacatgcagcaacaaatctcttcccattaagcagtaaatctacttaacaatgatatatttttggcaaggcatctgcctctgaatgatcctatagtactgaaaattctttttaaactgaaatatttttcaagatattatattattgaccttatgaaagcttttttaacatatgaaattggggttatttggctatg

SEQ ID NO: 26402 - DNA, 565 bp, Homo sapiens
gcaaattctattttgaggaaaacaaaactgaaataaaatcatggcaatgatacttctacttcaggcaaaatcttgttcaattcaactgcagacccactctgcaattatggaagtcacagaacttgacaagtattgtatcaaaaatcattccatgccaaaagaccaagtttaatatttttttcataattcatcttggcctgaggctacaacaagtcctattgttatatactctgcctctagagaatgaggctgctaacagaccttggaatggtgcctggcacacaggctcaagaaatatttgttgaatgaattgtaattaacacctcctgttgtggggatacataaaagatgttacatgaaaaatgccatctaacatgcagcaacaaatctcttcccattaagcagtaaatctacttaacaatgatatatttttggcaaggcatctgcctstgaatgatcctatagtactgaaaattctttttaaactgaaatatttttcaagatattatattattgaccttatgaaagcttttttaacatatgaaattggggttatttggctatg

SEQ ID NO: 26403 - DNA, 576 bp, Homo sapiens
ttttactttatgaattggaaaaattaaatttgcatgtagtttgtaaaaaaaaaataaagaaagaaagaaaaaagaaattgattgagattatttcagcagccagaagtgtgggacaggcagggcagttattcctccttctcagtttggaaactgaagctcagagagtaaacttgtcagtgayacagttattcaagaagttgtcttcagttgagagatacgtttttcacctgtagcttctggtattggaacagtacctttttagactaaacaaattacggttaaaattataagggtattttcggagtacctggaaaaaatcagcattttgcttttctagttccatttagtaggaagacaggaaagtttggtatacctgaattacatgtgagttatttctatttttctaaaaattcttataaattgtgtaaggtaaaaatgactacttcttgttttatggtaaatatagttatatcctttcaagccactgctgtacaaagttgtgaaatctccctgaggctttttccctcatgtcagcttcaggtatccagtatcacttatgcttgataatgattgtat

SEQ ID NO: 26404 - DNA, 704 bp, Homo sapiens
acgtatgtttattgcggcactattcacaatagcaaagacttggaaccaacccaaatgtccatcaatgatagattggattaagaaaatgtggcacatatacaccatggaatactatgcagccataaaaaaggatgagttcatgtcctttttagggacatggatgaagctggaaaccatcattctcagcaaactatcacaaggaaaaaaamcaaacaccgcatattctcactcataggtgggaattgaacaatgagaacacttggacacaggaaggggaacatcacacactgggtcctgttgtgcggtgggggtatggggggggatagcattaggagatatacctaatgtaaatgacgagttaatgggtgcagcaaaccaacatggcacatgtatacatacgtaacaaacctgcacgttgtgcacatgtaccctagaacttaaagtataataaaaatatatatatatttaaaaaataacaaaaaataaagtgctaattgtaaaaaacaacaaaaatatttccaatttagtttgaaccttcaatgtataccttaagcaagtgacttgaaggaaatttgaatgctgcgttccttctcccagctctgcctcactgaggatgggaatccagtggcacctgagactcctggatgtagtgcctgggtgacattcctgtggagaaaagcactttagggccagtctctagatgt

SEQ ID NO: 26405 - DNA, 1129 bp, Homo sapiens
tggtctagtcactatgcacactttatgccagagagagtgtgagtgagtgagtgtgtgtgtgtgtatgtagcatttcctttgtggaaggtatactgctaagagttttatgtgctttatctccgttcatcttcataagaccctatgacctggatagaattattacctcaattttactgataagaaaattgaggtgtattgttatattacctattttacttgtttctgaggttctgttgaataagagatgtattaatgatagcttttggggggagaagaaaactacaaaattaaacatacatactgattttaacacacctatttgaaaagaatgtaaatgtgaaatagaggatatgtrtataattgtctccattttacagatagggaaaccaaagactaaggttaaattactgcagaagatgatgtcaaagactgtcttcctaaactacatgttatagtgcctctcactgtgggtgaaattgtgatgacactttgtgattaataatagtctaggaaatcagccaggtgtggtggctcatgcctgtaatcccagcactttgggatgcccaggcaggcgtatcatctgaggtcaggagttcgagaccagcctggctaacatggcgaaacctcatctctgctaaaaatacaaaaattagctggatgtggcggcaggtgcctttcatcccagctctttgggaggctgagggagggagaattgcttgaagttgggaggcagaggttacagtgagccgagatcttgccactgtattcagcctgggcaacagagtgagattccatcaaaaaaaaaaaggtctacaaagtctgaattatgtgcttatattgctatgcagttacaagagaaaggctgtgtagtactgaaattggcttttttttttaagcctctcccttgacttccatcctgaccaccaggctaccctcatctcctgaaactggtgctattagatcctataatccagttaggctgaaacattcactcttccccaagtacattgtcttcttccttgcctcataccttagtagctgccaggagtgttttattatacttttgtacctgtctacctccatctccactcctctttctgtcctcagatactgtaaggccctggcaaat

SEQ ID NO: 26406 - DNA, 722 bp, Homo sapiens
tgaggctcagtatattaggagggggacccttctgcagcctagtgtgcttctcccttcctgccccctccttctccctcctcagggcccctttagcccctcctctctgccagcaacagcccccmgctgttcactctggaatggagtgaagtcagtgggaaaccacagagacaccctgactggccaactcgtgatcctcagcatggggccagggtgcagccttagggccctggcaacaccaggtgtgtgccaggaatgtgggaaagcaggcagtggcaatcacctcagccaccacagcctctctcctcctcaaccagtctgttcctcagcctccactccacctgccccagcctgaaggtggcatcaagggcaaggagggctatgctagggatgctggctagataaatggacccatgagttgggagcaagaaaattgtccttcaaacaccaaagatttcaaggattgggggaagggagggtgtgtgtcagtcagcctcatttcccagagaacaagagcaactcaagccacaccagaaagaggcaggaaaggggggagaggttctattcccagcttctgatctggagccagcagacaggctgggagatggggaactgagagggggaagttagagcagctgacttggtctcagccggattagcagagggcagctaaagaaaggttgtacccaaggccactgcaggcagagtccaagctgggggagggg

SEQ ID NO: 26407 - DNA, 509 bp, Homo sapiens
aacagtgttacctaaaacctttcattaaatcaaaaatgtaacttgtatattctgaaataacctggagtcttagaagacagaggcttctgcttccctctcccgtgaccccaacaatcccttcccacaggcttggcacagaagttcagtgctttctctacgtctcatgttgtcagaaataggttctcaccataatagacagtggtgaaatttccattgttcctactgagaagtccatttttaaggcatcaraggtgaatgtgtatttagggatggaggaggcatattacaacaaagctgtatttaaaataacacaatcatatcatgctataaacaatagcagttccagaatggctactaaggattttggactgccagactttggaaattggcaagccttataccttgtccaatgaagttaagtacatttgagtgacagttcaacatacaagcaaaaaaatatatagaagacattgtacatttgttattaatggacatgtttactttacatg

SEQ ID NO: 26408 - DNA, 526 bp, Homo sapiens
gtcttactgggcagaggaacacagattaaaagaaaaaatccaaaaataaacaaaaatgcatgaggataattagcatatgaaaaagcaggcatagcatctcagtaaagaaagracagattgctcaatagattttccgaacaagtgagtatccatctaggaagaaaaatacagttgaatccttatctcattcattaaataattccacctggattaaaaattgaaacataaaagttaaaatcattacagtactaaaggaaaacagtagaatatttgtatgaactaagaatggaagaagtcttcaaaagcatgaactaaacccagaagccataaatgaaaagactgaaaaattagatttcataaaaataaaaatttctgcatggtaaaatataccaccagtaaaaagttggggctccggggaaggagaaacactgccaactcatttcacagatcctacagcttgtgattgatataacagtttctgtcatttgtgtaatcgagttttccatgctattttacttaaattacc

SEQ ID NO: 26409 - DNA, 526 bp, Homo sapiens
gtcttactgggcagaggaacacagattaaaagaaaaaatccaaaaataaacaaaaatgcatgaggataattagcatatgaaaaagcaggcatagcatctcagtaaagaaaggacagattgctcaatagattttccgaacaagtgagtatccatctaggaagaaaaatacagttgaatccttatctcattcattaaayaattccacctggattaaaaattgaaacataaaagttaaaatcattacagtactaaaggaaaacagtagaatatttgtatgaactaagaatggaagaagtcttcaaaagcatgaactaaacccagaagccataaatgaaaagactgaaaaattagatttcataaaaataaaaatttctgcatggtaaaatataccaccagtaaaaagttggggctccggggaaggagaaacactgccaactcatttcacagatcctacagcttgtgattgatataacagtttctgtcatttgtgtaatcgagttttccatgctattttacttaaattacc

SEQ ID NO: 26410 - DNA, 526 bp, Homo sapiens
gtcttactgggcagaggaacacagattaaaagaaaaaatccaaaaataaacaaaaatgcatgaggataattagcatatgaaaaagcaggcatagcatctcagtaaagaaaggacagattgctcaatagattttccgaacaagtgagtatccatctaggaagaaaaatacagttgaatccttatctcattcattaaataattccacctggattaaaaattgaaacataaaagttaaaatcattacagtactaaaggaaaacagtagaatatttgtatgaactaagaatggaagaagtcttcaaaagcatgaactaaacccagaagccataaatgaaaagactgaaaaattagatttcataaaaataaaaatttctgcatggtaaaatataccacyagtaaaaagttggggctccggggaaggagaaacactgccaactcatttcacagatcctacagcttgtgattgatataacagtttctgtcatttgtgtaatcgagttttccatgctattttacttaaattacc

SEQ ID NO: 26411 - DNA, 969 bp, Homo sapiens
taatttttgtatttttagtagagatggggtttcaccatgttggccaggctggtctcgaactcctgacctcaagtgatccaccygcctccacctcccaaagtgctaggattacaaggcttgagccactgcgcccagccaaaaaaatttttttttcaaaaaaggcttcatagtcaaaccaagcagtttggccacagtcccttaatctttaaaataaaaatattttctttttattcacctgcaggtttccagacagattacacaagaaaactcaggttgagaagaaaatctgtctcaaggatagtgttgattaattggctgccccatttttacaagttaatgatctacacctggtgaacatgtcactcccttttgggacttcctatgactctgtggctctgtccgtgctgtgtgacagccacaaggccactgctgctgcagcgagcctcctcctccctgagggcccctgcgcctcctgccgcacttgggcaccacctcactccgcttctccacacatagcaggaggcctcgcgtcatgggtgctgagatcaggtgcggcagctcgcttattccaggcttcacacctgaagtttaggtctatttgatccttttccttcatgtgagaggagagtgggagctgagattttatgatgaaaaccaaataatgacaagcatcatttgcctatttgcaggcgtactatttaaaggttaaatatttattacatgcaagtttcaaatatcactcagttatacaaatggctagttctacatattcattctcaatgaacttcctaagggaaagtttggccacacttgccaacccccttgtggcagctggcctctgcaccgagaggggcagccagggagcccagtgcagtgaggggcaactattcaccaaggtgccagggcctgcctcctcatcagaaccagtgagttacagtgagtggcacactgaatctacatctctgcagc

SEQ ID NO: 26412 - DNA, 605 bp, Homo sapiens
tggtaattccatagcaagattcttcactcgagtcagctgtctgctcacatgttgctcccaaagctcttatagaagcacatttgagataagatggtcaaggttaactgtgtgtaktattactgctgggcagctattggcatagtatctaaatttcaggtagttgttttggtaacacatttgatacctggagaacattaatgggagtcatcaatgttagcgatattttctttgtagtctcctagcctcaggcatagtggagatagtgtttaggctgagctatgaccttcactgctttaagaattaaaaagtttgcagtgtcaagggaatgagaagacaagccacagactgggagaaaatatctgcaaaagacatatctgataaataacaattatacaaaatatacaagaaaactcttaaaactcaacaataagaatacaaacaatttggttaaatagtaggtaaaagaccttaacagacaacttaccaaaggatatattcagttggagaataagcctatgaaaagatggtctacattttatgttatcatggaaatgaaaattaaaatgacaaagagatatcactatgcacctattagaatggccaaa

SEQ ID NO: 26413 - DNA, 1696 bp, Homo sapiens
ccaatgcggagaagctctgggtgagttaactcagcagctgagatgtcaaggagaatccaggttacttctgtgtgtctgccctgtgattatcttgttggcttagtccttgcttacctcctccccaaagctgccacaactgcaggaatctatgtggatgtgatagtgtccagtagaattagagtaaaaaaaattaagtctctcctgcagaccctccctcacattttattgccagaactgaattacatgatcactcttaatccaatctctatgtggatgagactatcataatggtcacaaattcattagtacacttacaggagggagacaccagaacaaaattataacaaggacgtcaatagacacagcctgaagttgaaacagttaaacaaacgtaatgactctcattcctggcagtttttcataatctgctttatgaattgaaaaaggcttttcaagacaccaatatttcaatatctcatgctggaagaaacattcagctaaagttcagcaattgagattctttttcttcattcatatcaataatgatatttttagtttaataacatgcaaactataagctcaaatttttaaaaagaaattcaaatggtagaaacttttactaaaacaaataacatgagaagcaattatcttatataaatataaactgcctatatatatcattacctttggccatcaatacttttgtctaaattaaccaagttagtgtatctatcacattggaaaacaaaagagcacagtttgggaagaaagaagagttcagaaagtttatagagctgaaagggacgcagtggttgggaggaggtacaggggatccctagcagctcttgggtggcagggcaattcttggagccatgtgggagggccacgtgacagctgggcagatgattttctgtatccttccctactaaatgcacagaaaggctcttataaaacactcaaggtctgaaccagagtgtctatttaatattgacgatatggccttgggcccaaacttgatgataaaaagatgaatacgrctcagtccctgacctcaagcattcagtctaatgggaacgatgaactcataaaaagcaatttcgagtgcaagaacagaggtgtaatggtatgagatacagcgattgcccaaagcggggagtgattaattcagtgtggaaagtcagagacaactctagagaaaaaaagtaaaaatcaaaggacgtcttcaaattcaccaagtatatggcagagcaaaggacttttcagaaactgagaagtttgaagtagtgtggcccgcttggggacccataagatgactgatggtaacagtgtggcagtggggaaaataaagctggaggggaagccaggaactagacttcagaggaccttgcttgactcacaagggagaatgaagcttatcctatggatgatgagagccactaaaatttaattaaagaaatgtcccaatttgtgtttttagaaattgaccttgagggtttcatgtagaacacattgtcaagatggaaggccacaggcttatcaggggtataatgcaggtaacagagaccggagcctgaaccagggaagtaacaagaagaaatgaaagtaggacaatagtcattgactgtctttgagggttgatggaaagaaagcagtaaaattaatatgcaggtctctggatggagaagctaggtaggta

SEQ ID NO: 26414 - DNA, 517 bp, Homo sapiens
tgtatgagatttggaggataaaagtgaagctgtagtaattattctctgaaagccataatgttcacatatgstggcagatatagacaagagccccagctactatctgttttgcatccagtttgtcttcccagctgctggccctgttgaccaatagaagccttgaatgattttaagtgcttggctgagaagctacacaggtgttaaatacatagacgcacttaggatagcttgttagcttcttcaaccaatttaatgatgatacatctaacttttcactaaccttttttccaactcactatcatcactccttctaatcttaacagattgactattgcttctcataaccatagcgagccaatatcacctctccaaagagtcattcccattaaaaaaaaaactttaccatctcaatactaatttccctacaaatattataaattataacatttcctgccacagaattatcatattttatatcctctttgaagccacactagtccccaccctagttattatt

SEQ ID NO: 26415 - DNA, 1090 bp, Homo sapiens
ctcatagtttggtgcgatcttcatgatagtgagttcttgcaagatctggtcatttaaaagtatgtggcacctcccccttctctctctctttctctgtctctctggcacttgctcctgctttcaccatgtgatgtgcctgctctcccttcaccttctgccaggattgtaarcttcctgagggctccctagaacgagatagatgccagcaccatgcttcctgtacagcctgaagaatcatgagccaattaaacctgttttctttataaattacgcagtctcgggtatttatagcaaggcaaaaatggcctaatacaacaaataatatatgtataaatatatattccctaaatacattttgagaatttaagatttaagttgctaagtgagagtttattggcgaaaaccagagttgttctaagcatactactattggtcgtggcaaaccgccaaaaggctgcttagatgctatgattagatttgatggaacaaacttattcctaacctaatgtgtgagcttataaaaagtaatgaaagaatgaaagcacctcatcgatcaatattggtctttcacccacaaagaaatatattaaagcttacttttcctcaagctacaaagcaagctaccattgaggaaaactgaatatacagtctttgaacttgacatgatttacattcagtgcataaaacagaaaatagtgggcattatattaaagctttatcatgtttctattaggaagaccaacagacatggaaaccagatgccttcaaaaaacaaaacaaaactctaaagtgattccatcaacagaaaaatggccctgtctccttccctcaagcctgcttttctatttcagaatcatttgctcaaatattcttgcccttgcccattatcaagcaataagctatctttgagtctggtttttggtccataccaccaatccagaccacatgggaatcaggaagagctagagattagcagatgaagggccatctggaataaagttctgaggatatttccaagccacagcactgaggaccaactggcagaatagtcttggcctcagacaaagaaaccacctggcaagtgtaggtg

SEQ ID NO: 26416 - DNA, 1144 bp, Homo sapiens
actcccatgacccaaacacctcccaccagccccacctccaacatttcaacatgagatttggagatctggaggggacaaacacccaaacaatatcactgtgcaacccamaaatcctctctttctctcagctatgagtgacttctgtttctttaccaattacatctttagcttcacttcagtctgtcctttctatagataagatttattgagattccccatcatataattcctccacttcctggtaacattcaagccacagcaaagccccatatccttgaccctcccttgaattacccagtcaaaacctccatcctgttgtgggttctttctcaccctccccctgagagcccctgctggtggagatgtgctggacagcacagagaggaatctccaggaggaagccaggataggagacagggctctctcatcccagaccagtagttaagcacctgctcagctacttagcaggcatacttccgtcacctactatatgtaggatgctgagcagcttaggattaatgctgaggtgcagacaaaccaatccgaaggcacgatccccaccttgcagggttttatgatcttatcagggaagagaacatacacttacgggaaacagctcagatcagtttgagctcctgccctgagccctgggctgctgctgttctgtcttttccctcagctctgtgaagccacagagtgtttgcacctccgtcaaacttaatgaaatatttaaatttacttttgtcttattaaaaaaaaaggcactacacactgctaataaatatgtgtaagaatctcttctggaaatatattctgggtaattttatgtggtataaaacacctctgataatcaagtttaagatcatcagtgatgtcatgtcgatagtttataccttgatgcaatgtgtcaagaatggcatttcacttctgtggtcttcctctcaaaaacccataatgcaagtcaaactataaaggaagcacaaactataaacaagcccaaattgaagcacattttagaaaatactttgtcaatactcctaaaaaatgtcaaggtcatgaaaaagaaagaagtcgggaaaatgccacagccaagacgagtctacggagacatgatgactaattgttatgcagtatcccaaatggg

SEQ ID NO: 26417 - DNA, 876 bp, Homo sapiens
cagtgctcaggtctgtaccctgatcctttgcttctcaccagctgctgctggcccactcacaatgtggccaccacggagaccactccaccttttcccacctctcgactccctgcttggggcctgccctgagccagctaggcccttttcctaacaccagcacctcatggagcgctgatccattaacttgatatgatacattcagatgcaagtgcttgacacagccactctttatctcaacattttatttgaaaataacttcacacttacagaaaagttccatgagtaatacaaagaacacccataggccctaaacccagactcacattttctctttatcacttgtgctctctctctccatatatattctctttattctcagtagcgayatcctataacttcaccgtgacctctgaaggcacatacagaaccattgctcctacgtgaaatattgagttaggttcccctaagcttctggtcacaatattttgtccactgatctgtacataaccttatttctgcttaaaaacacctttttgataggtattatttatccattgatacatattattgatcactgaactcacggttgagagcgttataactcatgccagaacaaagcttacctaacacacacagtttctctgtaaagcacatcacagccttcttgtgcttcggcacattagagagcatgttggcattatgtttgggggctattttaaacagcaaaatcaccaacagaacacagaaaaatgttaaaaacatggcactaaatagaccacgataaggacacgtgtttataggatgagagctgaaacaagaaagaaggcggagtgtcatcttgctctgcctcagctgagcatgtgtgcatcaggtgac

SEQ ID NO: 26418 - DNA, 1280 bp, Homo sapiens
tgaggctcagggcacatagcactgaggctgcaacagcaccaaagccatgattcagacctagatctgtgacttcagagtccagattctgcttatcagtgggggtggccccctcagyctgcactgccccagagtcaccttggggatcagctgaaattaggcctgccaggggaccaccaagccaaccttctcgagaactgagacagcgagggtggagccagcacgagcctgcatctgggtggaccattagacatgtcagtgcccaatccaacttcacaggggcagagaggctggccttctactcccactcggccacctccagctctgcaaccgtgggcaagtcacatgacttccttgagtctcagtttcctggtctgtaaaatggagataatgaaatctgccttgcaggcttgctggatgtattgcacgtagtaggcgttctgcaaatgctgacgactttgtcagcagcagcagcatccctgtggcagcagccacagagttaacacagcagccatgcagtgacacctcagtttactttatccattctcccttttcccctcttccttacttccattctttcttacttcccctaaccaccatgctgacccttgggcctggtcctgaaatcccatccaagggctttgccagggatctcccactagggagggagggaaagagggaagaggaaggatcctgctaaggagaggcctttcctggcactgcctgcagcctcctggggcaaggacccaatcacagtcagcaggccagaaccaacatcgggaagaagcataggcgtcctccactgcagcggagtcagccgtgaggccgggctcctgctccttgttgctgctgccgctggtcgctaacatgtgcacagcacacacacacacaaacacacacacacgaggaaaaggggctttggttggttgtcctacttacccagagtcccctgcttgtgcctcatgcccagacacagaaggacatgcccagctgcaccctccagcctcggccactgtgggcaggatgtccagggaccctctcctgttctgcaggtgggtggatggacaggcccgagcacttatggctggggtctgccttgcagggtgccaggcccaggatcattctgggcagtgggaagctgtgtgggtcaagaaatgtcttagctcacataactgagaaggccaaggatactagctttagacagagggactcaagtcaagaaactggctcatcctctctcagctctgatgttctctgtatcatcttccttcttgggctctccc

SEQ ID NO: 26419 - DNA, 1280 bp, Homo sapiens
tgaggctcagggcacatagcactgaggctgcaacagcaccaaagccatgattcagacctagatctgtgacttcagagtccagattctgcttatcagtgggggtggccccctcagtctgcactgccccagagtcaccttggggaycagctgaaattaggcctgccaggggaccaccaagccaaccttctcgagaactgagacagcgagggtggagccagcacgagcctgcatctgggtggaccattagacatgtcagtgcccaatccaacttcacaggggcagagaggctggccttctactcccactcggccacctccagctctgcaaccgtgggcaagtcacatgacttccttgagtctcagtttcctggtctgtaaaatggagataatgaaatctgccttgcaggcttgctggatgtattgcacgtagtaggcgttctgcaaatgctgacgactttgtcagcagcagcagcatccctgtggcagcagccacagagttaacacagcagccatgcagtgacacctcagtttactttatccattctcccttttcccctcttccttacttccattctttcttacttcccctaaccaccatgctgacccttgggcctggtcctgaaatcccatccaagggctttgccagggatctcccactagggagggagggaaagagggaagaggaaggatcctgctaaggagaggcctttcctggcactgcctgcagcctcctggggcaaggacccaatcacagtcagcaggccagaaccaacatcgggaagaagcataggcgtcctccactgcagcggagtcagccgtgaggccgggctcctgctccttgttgctgctgccgctggtcgctaacatgtgcacagcacacacacacacaaacacacacacacgaggaaaaggggctttggttggttgtcctacttacccagagtcccctgcttgtgcctcatgcccagacacagaaggacatgcccagctgcaccctccagcctcggccactgtgggcaggatgtccagggaccctctcctgttctgcaggtgggtggatggacaggcccgagcacttatggctggggtctgccttgcagggtgccaggcccaggatcattctgggcagtgggaagctgtgtgggtcaagaaatgtcttagctcacataactgagaaggccaaggatactagctttagacagagggactcaagtcaagaaactggctcatcctctctcagctctgatgttctctgtatcatcttccttcttgggctctccc

SEQ ID NO: 26420 - DNA, 1280 bp, Homo sapiens
tgaggctcagggcacatagcactgaggctgcaacagcaccaaagccatgattcagacctagatctgtgacttcagagtccagattctgcttatcagtgggggtggccccctcagtctgcactgccccagagtcaccttggggatcagctgaaattaggcctgccaggggaccaccaagccaaccttctcgagaactgagacagcgagggtggagccagcacgagcctgcatctgggtggaccattagacatgtcagtgcccaatccaacttcacaggggcagagaggctggccttctactcccactcggccacctccagctctgcaaccgtgggcaagtcacatgacttccttgagtctcagtttcctggtctgtaaaatggagmtaatgaaatctgccttgcaggcttgctggatgtattgcacgtagtaggcgttctgcaaatgctgacgactttgtcagcagcagcagcatccctgtggcagcagccacagagttaacacagcagccatgcagtgacacctcagtttactttatccattctcccttttcccctcttccttacttccattctttcttacttcccctaaccaccatgctgacccttgggcctggtcctgaaatcccatccaagggctttgccagggatctcccactagggagggagggaaagagggaagaggaaggatcctgctaaggagaggcctttcctggcactgcctgcagcctcctggggcaaggacccaatcacagtcagcaggccagaaccaacatcgggaagaagcataggcgtcctccactgcagcggagtcagccgtgaggccgggctcctgctccttgttgctgctgccgctggtcgctaacatgtgcacagcacacacacacacaaacacacacacacgaggaaaaggggctttggttggttgtcctacttacccagagtcccctgcttgtgcctcatgcccagacacagaaggacatgcccagctgcaccctccagcctcggccactgtgggcaggatgtccagggaccctctcctgttctgcaggtgggtggatggacaggcccgagcacttatggctggggtctgccttgcagggtgccaggcccaggatcattctgggcagtgggaagctgtgtgggtcaagaaatgtcttagctcacataactgagaaggccaaggatactagctttagacagagggactcaagtcaagaaactggctcatcctctctcagctctgatgttctctgtatcatcttccttcttgggctctccc

SEQ ID NO: 26421 - DNA, 570 bp, Homo sapiens
ggactgaattttattctcagcatgttttagagcacaggacaattctaaccgagagtggtactgggaaacagttcaaagtcatagtttagagtttaatgatatgggaatatgctgctgatttaaaaaaatagagtatgtaactgaatacttgacatgttcccaattttggttttaaagacatgtggagatgaattgcagactcaccagaatgaaacttacctgcgtgtcagcagtagcagcccctgggcgaccggtggttttcatttttctctttgtacctttcagccctttccatgttttcaggaaaggaaagtaatatccttaaaatgcatgcttctgagtgcgctgaygggttggagcagagcagagaagggggtggggaggaagcagcagccggcctcaaggttgggccccctggggtgccttgactgactgaaccgcctccttctagttcgagggctgctcgaaggcctactcccgcctggagaacctgaagacacacctgcggtcccacaccggggagaagccatatgtgtgtgagcacgagggctgcaacaaagccttctccaa

SEQ ID NO: 26422 - DNA, 570 bp, Homo sapiens
ggactgaattttattctcagcatgttttagagcacaggacaattctaaccgagagtggtactgggaaacagttcaaagtcatagtttagagtttaatgatatgggaatatgctgctgatttaaaaaaatagagtatgtaactgaatacttgacatgttcccaattttggttttaaagacatgtggagatgaattgcagactcaccagaatgaaacttacctgcgtgtcagcagtagcagcccctgggcgaccggtggttttcatttttctctttgtacctttcagccctttccatgttttcaggaaaggaaagtaatatccttaaaatgcatgcttctgagtgcgctgacgggktggagcagagcagagaagggggtggggaggaagcagcagccggcctcaaggttgggccccctggggtgccttgactgactgaaccgcctccttctagttcgagggctgctcgaaggcctactcccgcctggagaacctgaagacacacctgcggtcccacaccggggagaagccatatgtgtgtgagcacgagggctgcaacaaagccttctccaa

SEQ ID NO: 26423 - DNA, 2420 bp, Homo sapiens
ccttccctggatcaccagcctccagcacggaggtccactggatatcaggacgttgaacttgttgagcacttctcacccgcagtggaggctcagcccttccagcccgccggcctctccctaccccccgggaaggagtgtcagctatacccttcactgaggagggtgtgggtctgtcagacgccgaggccatagtttcaggaacatgaaggtttggtgttgctctcacccctccgatggaggacccttaacttcctgatgaaggatttctctccatgaaccccttgcttgggtcctatctgcatctggtgtgttgtaggcagactgcttgccacttcctggcttccctctccatcattttatcttcagcctcccacatccctgtttcaaagccatgtctctcatgagcggttcatagttggtctgttgttggatcactcaggtcagggtgggactctggaatcaacgaatgtgtgttcattttttccaaagaaacaaaagcacaggccaggcacggtggctcacacctgtaatcccagcactttaggaggccaaggcaggcagatcacaaggtcaggagtttgagaccagcctggccaatatggtgaaaccccatccctactaaagatacaaaaattggtggggcgtggtggcaggtgcctgtagtcctagctacttgggaggctgaggcaggataatcgcttgaactcaggaggcggaggttgcagtgagttgagattgcgccagtgcacttcagccagattttatctaaaaaaaaaaaaggggggcaagggtccttatgtgatatctctcagttcttcccttttgcaaatctgaatttgtatatctgggcctggtaacccgttttcctggggagcccatcgccagctgtgtggagatagcagccttaggggagcaggaatgctggctgtggccaggcttcttggacaagctttcagtcctgtgaaccctgggccgtttcctcatagcagggtgagtgtgatgatcccgtggcctcatggctgtgtttctgggcagcgtctccagctgtctgagatggcagcagtgtcctattgaaggagctccagggtctttgtgagggaggagagtgatgggatcctagagtggccggttgaatgcctccaggcattgagtgagattctccttcaagggcttgtgaggcatttaaagtacactgaggccgagctgcacttggcctcaataagcacatgatgtttgattaagattggagattgcctacgctttagaatctgaccacctgtgaccactggaactcacctagagtgggggctcctgctgagcactggccctctctccgtctcctgccccatctcccacctgcccacagtacccccactgcccagacacagtgcagccgccctccttcctccccttggcctgttagtcatcagcgtctgccgtcctggctcgtgtggcctgagctagagccgggaggccaagagatggctggtgcccaggaccaacttccccgtgatcagtgtgtggcaatttgctggccatgctgccagaccctctggcacagaaaccagggacaggaggaggcaggatgcgagcaccctggtgagctgccaggcggcctgctggggtgggcacaggtcagtgctaggagtatccatctcgtaggccttcctggtgccactcagcagagacatgtgaagcccttcccagggccaggcaccagctggggtcagaggtgcccagcagagcataacgcagaacctggacctgtgggcgacgactgtggagaaaagtggggatctgctgagggggcagggcaggcaggagccggctgagggcaacgggaaagtcaccaggtaccgtcctccacacctagctttgccagattgacgtttcagagggtgaataatcaccctgtggctgcccctggccccagggacagagctctgccccttcagggatctcagatgcaggttgtgtaaggacagccttgtgccaggttggaagccaggcctggaagcagtgtgctcagagcagcccaggcggcccacaggcgagtggaggggaacaactagggaagtctggccaggaggaggtgactgcactgaggggctggctggcaggggtctctgcctggaggctgagaggagctcaggttatttatgaaggcagtatagacctatgtggagcttgaagcccagtgtctggatcagagtctgctgggctgtgggcccagagctgggagccagccactcactyctgcagtgtccgaagtgatgaggaggggctgggctggagccagtcttgcctgctggccgtggccacagggggtcctttctgctctgactcctggcttctgctgccagggcttggaggcttggaggtggcctctgtcccaacaagagtcctcaaaatcctcagtt

SEQ ID NO: 26424 - DNA, 623 bp, Homo sapiens
  misc_feature (1)...(623): n = A,T,C or G
cnnnnnnnnnnnnnnnnnnnnnnnnnnnnnnnnnnnnnnnnnnnnnnnnnnnnnnnnnnnnnnnnnnnnnnnnnnnnnnnnnnnnnnnnnnnnnnnnnnnnctgcagctagcatctgaaaatcggagtctcctttcagttgggacaggtgggstgggtctagctgggaggtggtgggtctagctgggaggtggtggggccaggcctgcctcagggaccacgcccagcccgcccccgtgccagggcttcttagggctggtggagtgatcgactacaggggtgtggggtcggggtaccaaggccagctgacccagtagctgctctgagccttcagtgggcctggtgtccatcaggaggacaggtggacagggccggggacgggctggcctggccgggcccacaggcacaggacttggctgaggcagcccggagaacacgcaggcatggctcgatgctgcgtcctcagcagtgcaggccacttcctgtgcccctcttgaggttcaaccactccacagctgcctctgataaatgtctccccagagggaggcctgccctccccctcagctccacagctatctccaaagtgcaaaggggatttggggcttcagctgtgctcctttgagg

SEQ ID NO: 26425 - DNA, 623 bp, Homo sapiens
  misc_feature (1)...(623): n = A,T,C or G
cnnnnnnnnnnnnnnnnnnnnnnnnnnnnnnnnnnnnnnnnnnnnnnnnnnnnnnnnnnnnnnnnnnnnnnnnnnnnnnnnnnnnnnnnnnnnnnnnnnnnctgcagctagcatctgaaaatcggagtctcctttcagttgggacaggtgggctgggtctagctgggaggtggtgggtctagctgggaggtggtggggccaggcctgcctcagggaccacgcccagcccgcccccrtgccagggcttcttagggctggtggagtgatcgactacaggggtgtggggtcggggtaccaaggccagctgacccagtagctgctctgagccttcagtgggcctggtgtccatcaggaggacaggtggacagggccggggacgggctggcctggccgggcccacaggcacaggacttggctgaggcagcccggagaacacgcaggcatggctcgatgctgcgtcctcagcagtgcaggccacttcctgtgcccctcttgaggttcaaccactccacagctgcctctgataaatgtctccccagagggaggcctgccctccccctcagctccacagctatctccaaagtgcaaaggggatttggggcttcagctgtgctcctttgagg

SEQ ID NO: 26426 - DNA, 623 bp, Homo sapiens
  misc_feature (1)...(623): n = A,T,C or G
cnnnnnnnnnnnnnnnnnnnnnnnnnnnnnnnnnnnnnnnnnnnnnnnnnnnnnnnnnnnnnnnnnnnnnnnnnnnnnnnnnnnnnnnnnnnnnnnnnnnnctgcagctagcatctgaaaatcggagtctcctttcagttgggacaggtgggctgggtctagctgggaggtggtgggtctagctgggaggtggtggggccaggcctgcctcagggaccacgcccagcccgcccccgtgccagggcttcttagggctggtggagtgatcgactacaggggtgtggggtcggggtaccaaggccagctgacccagtagctgctctgagccttcagtgggcctggtgtccatcaggaggacaggtggacagggccggggacgggctggcctggccgggcccacaggcacaggacttggctgaggcagcccggagaacacgcaggcatggctcgatgctgcgtcctcagcagtgcaggccacttcctgtgcccctcttgaggttcaaccactccacagctgcctctgataaatgtctccccagagggaggcctgscctccccctcagctccacagctatctccaaagtgcaaaggggatttggggcttcagctgtgctcctttgagg

SEQ ID NO: 26427 - DNA, 1027 bp, Homo sapiens
gggtgccggggggtggctctygcaggtcctggggaatgagctgccctggccccaggcctgacctcccgccagggtggctgcctgagcgtggggacgccttgggggactgggggttggctccagcagaccccggacttgcaggatttgtaagggggacatgtttttcccattataaaaatgttccccaagaggcagcataacatggggtgtccccaaagtcagaccacccacgtgtgtggctgctcagccagtcacaggtggtggaatttggggccggtgtctgccgtctcagtgtcggtggaacggggtcaggccaggcccagcccgcactcccctgcagaggtcagctggtcccggccacggagcctggcgggtttgctgctggctgtgatcatgatcaatgcattgatgggaatgtgaagagttatggaaattccactttgttttttaaagaaacagcatcggtcacccatagtccaccgctgccagcgtttctgcacactccagctccccgtcatggggctttaccatgtcgagggcacctcacactgctccttggcaccatggcaccccacttccctggggctctcattgtcagcggtttcattgtatcccccagagtgtgagctgcagaggacggggcatgttctgtccccacctgcctgtcacttccacctgcgttgggttttttgtgtgtttctgtcctgatgcagcctgcttgaaccacctcacaaacaataaacccgtgtttggtctcagggctgtgggaccccctgaggatgggaggagccatcgaggtttgccgggctcagtgggtgctggagcagctggcccccgccaggcctgactcagtgtgacttgaggccatcgaccctctgtcctgctacccaaacccagtgtccaccccatagctcccaccacacaggatgatcccaagagctgtcgattccacagcatctgctgtgcactgcagcccgggtgccttcctcgggccctgctcagctatgaccacggccaggagctagga

SEQ ID NO: 26428 - DNA, 598 bp, Homo sapiens
caatcatgtcatcattactttgtaaaaatatgtatagtggaaataatagatacaatgatgataactaatgaactaaggataatgacaargagtaaattaaaatgcagaagccaactaagcagagggtaaaggttttaaggaccaaaagtctacataaaaacaatgaaaaaataaatgggtaaaatatccattataaacaagcttccttttccctaatattagcccctggcttgcaaggtggtatttacacttggttgtgagaccacatcatagccccagcaacataacgtgtagcaattatacaaatttccatatactcagcactcaacataagtaacaagggccacctccaaatcaccaatttcattcaacactttcaaataaacaataagtggtttgacaatatatgggtttgcccttccttttgctttaataaagtggtcaacaaagtgctattagtgcaatttacagtctccgagtcaatgtgaataattagaaagtaggttagaggtatttttaaaatatagttttttcttcactccaaccaaacaaaaaagttagagccttaattgaaatggttacttgtatacaatattaa

SEQ ID NO: 26429 - DNA, 643 bp, Homo sapiens
cacgttttcattcttcaaatttcaccttgcacgcagtaacagacagtgcacaaagccacttccttatggacggaaattctgaaatccttttatgcctggcctttccatccttcatcttcccctctcccacrctgtgaaggatcgtattggacatttttgttttaatgtcagtgacaggggaacacaggtagctctaatatagctgtgacccagatgcttctgtttctagcacgtatttattttgcagcaaacatttacatccatgatgttttactgtcttttgaaaataattaggcaatatctcatctgaggtaggatgtttctaggggttgtgttctgagggaggaaaactaatctgttctctttccactgcattctaggaacagtaagaggaccttgtgcatgaataatttgtttccacactacagagtgggtaataagcagattagtaaaaacaattctgcttcacttcaataacagcctcctccaactcattttttctcaacaaacttatttttccagcagaagaatcccagacttcttagagaacccagtgactttttgcaccttaaatctgtgaaatcctcatgttttcttctgccgtatccatagttcaaacaaagatgaggcaaagctagatgca

SEQ ID NO: 26430 - DNA, 724 bp, Homo sapiens
gtagtcatagaaattatcatccaaagtgggatattcttgagagaaaaaggaggttctatttataattatggtgggataacaaacttaagatgaacagctctagacaaactgggttgtatggtccctggaaaacaaggattactgtaaatgtgagtcccgccttgtgcttctctctgtcccaccaagaaaatatgatcttgatacagatgttcattgtgtcaaggcaaccatggcaaccatgatctagatacactgttcaagttttatgctgatcctacctatatatgtctcaggagctttccagagtttcctttgagtgcttctaaattttgcataaatggtatgttgtcccttgtctctttttaaaaccagtaagccattttcccttattttcctggaaaattaaaggaacaaggaccaggaaataacaatgtattagctaaggttctgttgattgaaagcaacagaacctaattctggctagcttaaaccatgctaggatttaatgaagaatactgcagaatcttagatatcttatgactgggaaagaggaggtycaggcagttcctgggatgtcagcaacaggtagctgtcaattaactgcccccacaccacccactgctgccgtcatcaatatagcacaccacaatggctcccagcctctgtacgtctgggttccggtgttcaaattctagagacagcaagagaaatcccattgagtcag

SEQ ID NO: 26431 - DNA, 648 bp, Homo sapiens
gtacaataaatatttgttgaattaatgaatggagaataatgaatgcatgatgaatggcttctctgggagaaataccttgaaggggggcaagagcagaaagaggaatatcagacgggagactcttcaagtcaagtgttgatagagtcttggactaggctagagccaacagaaatgaaaattagtcatttggtttgagatacatttttggaaggaggatsaacagaatatgcaggtgggctggaatatggaagagaggggctgtggtaaatagcctccaaaatggccccaatggtccttgtcttttggcatttgtgcctttttgtggtcccctcccacactgaacgatgcagatctgggtaatcagtatatattgcagaagtgattgtgtgtgacttccatggtgaggccataaatggcatggacacttctgccctgctctcttggacagcttattttgggagaggccagccgccatgtcatgaagacactcaagaagccctgtgaagaggaagcaaggcctgccaacaacagacagcaccaactttccagccaagggattgagccatctcacagtggatcctccagcccccaccaagccttcatatgaccaaaccaacaccaacatgtaactgtgacctcatgtgagtc

SEQ ID NO: 26432 - DNA, 648 bp, Homo sapiens
gtacaataaatatttgttgaattaatgaatggagaataatgaatgcatgatgaatggcttctctgggagaaataccttgaaggggggcaagagcagaaagaggaatatcagacgggagactcttcaagtcaagtgttgatagagtcttggactaggctagagccaacagaaatgaaaattagtcatttggtttgagatacatttttggaaggaggatgaacagaatatgcaggtgggctggaatatggaagagaggggctgtggtaaatagcctccaaaatggccccaatggtccttgycttttggcatttgtgcctttttgtggtcccctcccacactgaacgatgcagatctgggtaatcagtatatattgcagaagtgattgtgtgtgacttccatggtgaggccataaatggcatggacacttctgccctgctctcttggacagcttattttgggagaggccagccgccatgtcatgaagacactcaagaagccctgtgaagaggaagcaaggcctgccaacaacagacagcaccaactttccagccaagggattgagccatctcacagtggatcctccagcccccaccaagccttcatatgaccaaaccaacaccaacatgtaactgtgacctcatgtgagtc

SEQ ID NO: 26433 - DNA, 648 bp, Homo sapiens
gtacaataaatatttgttgaattaatgaatggagaataatgaatgcatgatgaatggcttctctgggagaaataccttgaaggggggcaagagcagaaagaggaatatcagacgggagactcttcaagtcaagtgttgatagagtcttggactaggctagagccaacagaaatgaaaattagtcatttggtttgagatacatttttggaaggaggatgaacagaatatgcaggtgggctggaatatggaagagaggggctgtggtaaatagcctccaaaatggccccaatggtccttgtcttttggcatttgtgcctttttgtggtcccctcccacactgaacgatgcagatctgggtaatcagtatatattgcagaagtgattgtgtgtgacttccatggtgaggccataaatggcatggacacttctgccctgctctcttggacagcttattttgggakaggccagccgccatgtcatgaagacactcaagaagccctgtgaagaggaagcaaggcctgccaacaacagacagcaccaactttccagccaagggattgagccatctcacagtggatcctccagcccccaccaagccttcatatgaccaaaccaacaccaacatgtaactgtgacctcatgtgagtc

SEQ ID NO: 26434 - DNA, 648 bp, Homo sapiens
gtacaataaatatttgttgaattaatgaatggagaataatgaatgcatgatgaatggcttctctgggagaaataccttgaaggggggcaagagcagaaagaggaatatcagacgggagactcttcaagtcaagtgttgatagagtcttggactaggctagagccaacagaaatgaaaattagtcatttggtttgagatacatttttggaaggaggatgaacagaatatgcaggtgggctggaatatggaagagaggggctgtggtaaatagcctccaaaatggccccaatggtccttgtcttttggcatttgtgcctttttgtggtcccctcccacactgaacgatgcagatctgggtaatcagtatatattgcagaagtgattgtgtgtgacttccatggtgaggccataaatggcatggacacttctgccctgctctcttggacagcttattttgggagaggccagccgccatgtcatgaagacactcaagaagccctgtgaagaggaagcaaggcctgccaacaacagmcagcaccaactttccagccaagggattgagccatctcacagtggatcctccagcccccaccaagccttcatatgaccaaaccaacaccaacatgtaactgtgacctcatgtgagtc

SEQ ID NO: 26435 - DNA, 796 bp, Homo sapiens
tgggtccctcttctccccagtgagctgccctgtggcctgggggacaggtaggcaccaatgagacaaacagagcgggtgccagggaaggaggggccttctccccgcccccccgcacccaactctgtgcctacccagagggaggggratggagtggtgggcccagaacctcaccaggaccccacttcccactccaggagcctgccgctcccccttgcttgccgggggccccggccaagcttcttgtttctccagttctatttcagctgaccggggctacagggaggccaagaaagagaccctcctcacctgccgccgcctcacaccccaccgtgtatcctgcggcccagaccccagcaaaggagggcacagggctggcctggggtggactggggtggaccctgccagtggctgctgacctcccaggccacctgggctttcctggcctgcgcagtctcccggaactgcttccgctggcccagggcctgggagtgccccacactcgggcagggccctggcagccgaagggagggtctttctgagccagtggctttgggacgtgcagggaaggggctggcgtaccgaggtcacactgagtctcccttcaccacgagacaggagaggcctccctgatggtggctctggactcagggctgaggcagctatgcaggatggctggagctctgcggtgctcactgtggccagatgccaccaggtagtggcgggcatcagccgggcagttgctggtgtcatgaagatatcagcccacctccatccacctgcccaggcctgtccgggt

SEQ ID NO: 26436 - DNA, 1914 bp, Homo sapiens
ctggaggatcccctccaagcctaaaaggttgttaatagttggaggtgattccagtgaagatattttatttcctttgtcctttttcaggagaattagatttctataggatttttctttaggagatttattttttggacttcaaagcaagctggtattttcatacaaattcttctaattgctgtgtgtcccaggcagggagacggtttccagggaggggccggccctgtgtgcaggttccgatgttattagatgttacaagtttatatatatctatatatataatttattgagtttttacaagatgtatttgttgtagacttaacacttcttacgcaatgcttctagagttttatagcctggactgctacctttcaaagcttggagggaagccgtgaattcagttggttcgttctgtactgttactgggccctgagtctgggcagctgtcccttgcttgcctgcaggcccatggctcagggtggtctcttcttggggcccagtgcatggtggccagaggtgtcacccaaaccggcaggtgcgattttgttaacccagcgacgaactttccgaaaaataaagacacctggttgctaacctggccctgtgctttctgtctccagttctgggataggggagggaggggtcactttgccaggtggtcccagttgcgcgggatggatgctggcagcagcaccgaaagtcactggtgggctgggagccccaagagcaaggaatgtttatgggaggggcctggcggaagggagcagggtgcctgggggtgcactgccctggctgctcccagcttgtgggttcctgaggtggtggtggtggtggggagggtcctttctcactagctctgaggcagaccttctctcatcaccccactcctggcatccgccttcccagtcagctggggagctttctgggcatccctctatggagccaaaagcaagcaaagccctcatggggcgccctgggggctacacaggcggtcactctcctccagatcagctctctgccctcccaggccgggcaaccagtgcccccactgccttgggctccatcagggtcccctacagtgataaagcacctttgggcagatgaggtgctgagaacccagagatggaaccaggcccttgcccaagttcatagccctagcagggtgggaggacaacatggtgagagcaagtctgggaaggcttcctggaggaggtgtgccgtctctcctgactccccaccaccctctttgctgtcctcccttctgctatcctccctctcttgtcctcccgtttttcccatctctgctgtccccacctctgtcgtcctcctcctgctctcctccccccatcccctctgctctccctacctctgctgtcccctctgccgtcctccctctgctctcctcccctctgctggctcaagagcagggtttcccaaccatgagctgcatgaactctagcttctaaaatgctctggctacaaactcacctttcaggtcagggggyactgctggcccgtttcctgggcaggcaagggtttaactcaaccccattcagggaagcacgtgtgggcgcaggcctggtggaagtggccttacaagggactctgcatccctaatgcccccacttgcccagaaaccctatgctgggccccagaggcaggcctggccatgggacgcctggtgacagtggcaggatggggaggccacatgggcctgaaggctgaggcctgcagggcagtggggggaccaggccaacaggcaggcagtgccagcatccacaccaaggcaggcagagcatggggctcgaagcgcgggccgggagcgccccctagcgctggctgggcagtgtccctgctacaaacccaaggcccctctcctgtcagggctctggtggacctctggtgggcacagtg

SEQ ID NO: 26437 - DNA, 675 bp, Homo sapiens
cattccttgggctgtctctggcacccatcgtttcggttgcctcctcatcctgaacgtttgcttttcttttctcaagaggaagttcagaagcagaaggaactttccaaagctgaaatccagaaagttctaaaagaaaaagaccaacttaccacagatctgaactccatggagaagtccttctccgacctcttcaagcgttttgagaaacagaaagaggtgatcgagggctaccgcaaggtatgtctccgccaccctggtgtcctcacctcggaggctgatggactcatggtccaagccagcggrgctacaagctgctgtctttgcaccttggtccttggccaagcctccccttgccacgggggcatgggatgacctgtgaacgagacagggtgcaggagtcacagcatagctggtttgcgaggcagctgagggcggcaggaggcagagtgagcagggaggccatctgagccgtccgctgttgtgtgacagacgactcggctatgatcaggcatctgtgagatttgagacagcgctggtgcaccggggcctggggcacctcggaaaggtgtctgggctgtccgagcgcttgggtcccaagggttggggacccagggcatgcagtatccaaggcgggaggcccactgaaaggtggtcacggctgtgcaaggccaccct

SEQ ID NO: 26438 - DNA, 643 bp, Homo sapiens
  misc_feature (1)...(643): n = A,T,C or G
aagcagggagaagccccgcaactcatcttcctcctccagactaaagagaacgaggagctgaccaggatctgcgacgacctcatctccaagatggagaagatctgacctccacggagccgctgtccccgcccccctgctcccgtctgtctgtcctgtctgattctcttaggtgtcatgttcttttttctgtcttgtcttcaacttttttwaaaactagattgctttgaaaacatgactcaataaaagtttcctttcaatttaaacactgaagccgctctggtcttgatgaagcaaaggtttcccagctctagcctgaggctgagccgacccgcaggtgccctcccttcccctcagagctggccacttggtccctgcctaccccaggctcaggcnnncnacccgaggggcagggacagccagtggatagaggaggctcaggcctgcccagtctgccccggcacctcgggttggctacatggtcctggcctcaggtacacacatcaaagtccaaatggactcgtttttttgtttgtttttttgttnnnnnnnnnnnnnnnnnnnnnnnnnnnnnnnnnnnnnnnnnnnnnnnnnnnnnnnnnnnnnnnnnnnnnnnnnnnnnnnnnnnnnnnnnnnnnnnnnnnnc

SEQ ID NO: 26439 - DNA, 544 bp, Homo sapiens
ttaacagctcttttaaaaacagaaaaaattttttaaaaaatttaaaaatgtccgtttacagccgggcgtggtggctcatgcctgtaattccagcactttaggaggctgaggcgggcggatcacgaggtcaggagatggagaccgtcctggctaacacggtgaaaccctgtctctactaaaaatacaaaaaaaattaacygggcgtggtggtgggcacctgtagtcccagctacttgggaggctgaggcaggagaatggcgtgaacccgagaggcggagcttgcagtgagccgagatcgcgccactgcactccagcctgggtgactgtgcgagactccatctaaaaaaataaaaaattgtccatttactcagttgaattttgttaggttttaataaaactgtgcttattttaatcactagaaagaaaacactggggaaaggtagaacgtgctgcagtgatgaaaatgggggatattattgccgaattctcacgtgtcagtcacagtattgaaacttctctttcctgtcagttgcagtattctgcg

SEQ ID NO: 26440 - DNA, 544 bp, Homo sapiens
ttaacagctcttttaaaaacagaaaaaattttttaaaaaatttaaaaatgtccgtttacagccgggcgtggtggctcatgcctgtaattccagcactttaggaggctgaggcgggcggatcacgaggtcaggagatggagaccgtcctggctaacacggtgaaaccctgtctctactaaaaatacaaaaaaaattaactgggcgtggtggtgggcrcctgtagtcccagctacttgggaggctgaggcaggagaatggcgtgaacccgagaggcggagcttgcagtgagccgagatcgcgccactgcactccagcctgggtgactgtgcgagactccatctaaaaaaataaaaaattgtccatttactcagttgaattttgttaggttttaataaaactgtgcttattttaatcactagaaagaaaacactggggaaaggtagaacgtgctgcagtgatgaaaatgggggatattattgccgaattctcacgtgtcagtcacagtattgaaacttctctttcctgtcagttgcagtattctgcg

SEQ ID NO: 26441 - DNA, 563 bp, Homo sapiens
gaggaatagccctcttttctcccagaagcaataaaggtctgtccctaaccttgcaatttcagcagcctaggcagagcctcttgatggcattgtaacaattatgttaagtggtagtcagatgctggacagcttagaagagggattctgataagggagaagcaaaagccaattcttctttccctaaaacccatattcttccaaattcaagattagttaaagctaaacaagaagcacagcactgcaaagatgttctctaagtaaagatcttggcaggtcactgttgggtctagttgtacctgggtgctgaaaagttccaattagtagctagtgatagtcaagatggcatagtggttaagagcayggctctagagttagcctgcctggactcatatcctatcttcaccagttagcagcaggatggagctgggtaagcctgtttgttcatctttaaagtggaaatactaataacttcatcatatatagctggttctgaggactaaataagacaatgtattgaaagctttctatgcttggcacacagaaagcacttaagaagtgtagct

SEQ ID NO: 26442 - DNA, 503 bp, Homo sapiens
tgcaggcccctgcaccgagctgtgctcatcacagggacatttggctgcttcatgcatctctctgggcgtgtgtcccccttctgcaggcccctgcaccgagccatgctcatcacagggaaattccactgctgtgtacgtctctctgggcatgtgtyccccctcctacaggctccattccaagccccctacctcgtcatctccccggatgcttccgcctgcagagtccctaacccagcatctcacaatctaacgtctcactatgtccagtatttcccatctgcccgcactctggcccttctccctcccacagaagcccttcctccagacgcctgggcttcatcccgtccccagccctcccctctcctcctccacgctactccagccacacccaccctcagggaggcactggacccgggagtggccgaagtcgcagtggccttcagtctacggaggaggtagcccccaggcgtggaggggaggagctgggggagcaacagctaggg

SEQ ID NO: 26443 - DNA, 546 bp, Homo sapiens
gaaatccataaaagttgagtaatacagatctcatatttatattatataaacacttttcctaacctcatagagatctgctcccaaaattacaactttgaatatgtccagattttagagcggaattctaagcctttcttttcccagctgagcttttctcctctcaccgtaacagcccaccccatggaggtgagaatgagacttggtgactgctttctcttttagycaagcttctaggagggttccctgttatttgctgctgatgtcaagtagcaagaacagcagggctgctccttgtgctgaagatccataatcctattacgcctaccttgagactttcgcattagctgcctctatagtagtagatggatgaaggtgactcgattgacttttaaatccccaagagtcccagtttcaaaatccccatgtccaagtcaagtagtagatgagggctctggccgagaaggcctggctcctttagagcccctgtggccacagcttttcttcagcatctttatgggtcccatactttctgggttccaccataag

SEQ ID NO: 26444 - DNA, 1132 bp, Homo sapiens
tgtgattctcctgcctcagcctctcaagtagctgggattaaagctgggcgccaccacatcaggctaagttttgtatttttagtagagacggtttttcaacatgttggccaggctggtctcgaactaccgacctaaagtgatccatctgcctcagcctcccaaagttctgggattacaggtctgagccattgcacccagcctgcttctctttataactgaaacattaactgaaagtccaaggctgaaatatgcttcgatatggttgtagaatctaagacttcacctcaatggtaagtttgacagttctgccttcaattgtcttgaaaacaaatcacatttttattttttttctgcctacatagctctattttcaagtatttttggatttcaaatatttttgattaccaagacagacctaaactatctaatatgaattgtttattgattttctcaatttttctcctactgacaaatgaaagtagggttttcaaaataattggtggacacctcctctattccaccttcagtctcctctagggtgtatgcataatgaataaaagagaatmcaaacgcagggtgagtatgaagtgatcaatttgctgcagggcagagctgatctaggttttcagacacaatgaccctctgattctactggatgtggttcctgtgtaagctccacagggagcagagatgacattactgcttttaaattgcctctatgtctctatgtgcttgttgctagcctccagagtccactacaataggcatctttttttttttttttttttttttttttttttgatggagtctcgctctgtcacctgggctggagtacaatggcatgatcttggctcactgcaacctctacctcctgggttcaagtgattctcctgcctcagcctcctgagtagctgggactacagttctgtgccaccatgctcagctaattttttttttgttgttatttttagtagagacggggtttcatcatgttggccaggatggtctcaatctcttgacctcgtgatccgcctgcttcggcctaccaaagtgctgggattgtaggcgtgagtcactgcacccggccttacaataggcatctttaaattacattattttctaataccagaag

SEQ ID NO: 26445 - DNA, 1132 bp, Homo sapiens
tgtgattctcctgcctcagcctctcaagtagctgggattaaagctgggcgccaccacatcaggctaagttttgtatttttagtagagacggtttttcaacatgttggccaggctggtctcgaactaccgacctaaagtgatccatctgcctcagcctcccaaagttctgggattacaggtctgagccattgcacccagcctgcttctctttataactgaaacattaactgaaagtccaaggctgaaatatgcttcgatatggttgtagaatctaagacttcacctcaatggtaagtttgacagttctgccttcaattgtcttgaaaacaaatcacatttttattttttttctgcctacatagctctattttcaagtatttttggatttcaaatatttttgattaccaagacagacctaaactatctaatatgaattgtttattgattttctcaatttttctcctactgacaaatgaaagtagggttttcaaaataattggtggacacctcctctattccaccttcagtctcctctagggtgtatgcataatgaataaaagagaatacaaacgcagggtgagtatgaagtgatcaatttgctgcagggcagagctgatctaggttttcagacacaatgaccctctgattctactggatgtggttcctgtgtaagctccacagggagcagagatgacattactgcttttaaattgcctctatgtctctatgtgcttgttgctagcctccagagtccactacaataggcatctttttttttttttttttttttttttttttttgatggagtctcgctctgtcacctgggctggagtacaatggcatgatcttggctcactgcaacctctacctccygggttcaagtgattctcctgcctcagcctcctgagtagctgggactacagttctgtgccaccatgctcagctaattttttttttgttgttatttttagtagagacggggtttcatcatgttggccaggatggtctcaatctcttgacctcgtgatccgcctgcttcggcctaccaaagtgctgggattgtaggcgtgagtcactgcacccggccttacaataggcatctttaaattacattattttctaataccagaag

SEQ ID NO: 26446 - DNA, 576 bp, Homo sapiens
  misc_feature (1)...(576): n = A,T,C or G
ttttgaaactattcccgtgttgtaatgttattaaattccaacacagtttccttcacaaattctcaatactagcatataataattntttatttttttttggttgggaagatattttgttatatttctagttgcaattacaagtcccatgttttactgtgacattgtgaaaagtagtgatttaatgaacttgaagtacaatgagttcagctgtaaatcttgttctgaaaacacaatrtgttccacagttgcggaacacaaaacacatttgccacaaaattctacattcgtttacacacaatttcatccataagaaacactaggtgaacacagacaactgcatcccactgaatacacaaaatgtatgtatttgtaggtgcgcgcacataaataggcatcttaaacatctacgctggctatctcattgcatgtgtaatgagccaccaacatccatatctggtgttccaactttccatcaaattttgaacaactttccttccattacttaacaattcacaagctgtaactcttccaaaacctactatcacataaaaacttcaggtttttgcaaggtaaggt

SEQ ID NO: 26447 - DNA, 576 bp, Homo sapiens
gcagtggcacaatctcggctcactgcaatttccccttctagggcccaagcgattctcctgcctcagcctcccgagtagctgggattacaggcacccactaccacgcctggctaattttttgcatttttagtagaaacggggtttcaccatgttggccaggctggtcttgaactcctgacctcgtgattcgcccacctcggcctcccaaagcgctgggattacaggcgtgagccaccgcaccagtcctcttcctcccatttcttgctctgcctcctgctcctcctctgtagactggaggtgcgttttagcacatgttttgtctggcttgtgtagttttcatcckccagggatcattgtcctgttttcagcaggtggagtccccagcaggcttgcattcagtgcaggggtccttaggaaatccatcctcctggaaacagacgatctgtgaaaaagggaacaggataatttcagataagcgctggagggaaacccaaataggggtgatgcttagaatgtgtttggcgtgtgaggggcttgcttcctctaatatctgagcagagacctggaagacaaaaa

SEQ ID NO: 26448 - DNA, 1250 bp, Homo sapiens
tgcattatgatatgccattaatttaatagaattgtgcagagaattcagggtattagagagattgcagttgtatgtaggagctttggttctcggactagagaaaactcataattagacatattaggtaaattagccaacgttatacaactatgtcatatttcaacactggatgataaagttaccttattaaccttgaagtgtgattgcctttattaatactcttgggcctgatagtagwtctccaatgtttagaaatttatgagacaaaatcttgatgccatatttttattaatatacttggagctcttggcaaggtgtcttagtgtccatagagtctaagtgatgaataaccctaggcttacagcacttctggtcagatgtgtatcttctattctctatgaatttaaattaccctctgttggactacagaaaacaattattcctaagttaaattaagtccctccaacaatttttttaattaaaaaaaattctatatctgatcctttcttcatatatcacatactacccccctactccaaaacagaagatctctcatgcaggcttgagcaataatgtcttacactcctggtttattataattcgttttcttaaagcaactagattgcatttttaaaaataccaatcagacaatcttctctctctctttctaaatgcctccttggccttccagcctaccaggaataaaagccaaaattcttcctgttacccactgtgcccttcataatttgttttctcatctcttaaattctcccactggtttatttttctccagacctagtagacatcttgctgctccttaaacacataaggcgtgatctgtcagcagggtctttgcacttgttcttcagacttctggaaacggttttctctaagatattccaacatgttcttttttacctttaatcacatctcaaactcgtacctcttcagagatagatttctttatcatctcacctaaaaatgcaccctttgcatatcttcttcctttattgtagatgacaacatacgctaatttgcatctcctcaatgtttgcgatatccataattctaaaagagaaagaaataaagaaaatatgatggtagagagagagagagctaaactaaataaaagcattgagcgaataacactagcatttttgaactatattattttattgggagtgagtaaactaggaatcaggatagacaagtttagtagtttcctggcagaaatttattatgtttaatgt

SEQ ID NO: 26449 - DNA, 1250 bp, Homo sapiens
tgcattatgatatgccattaatttaatagaattgtgcagagaattcagggtattagagagattgcagttgtatgtaggagctttggttctcggactagagaaaactcataattagacatattaggtaaattagccaacgttatacaactatgtcatatttcaacactggatgataaagttaccttattaaccttgaagtgtgattgcctttattaatactcttgggcctgatagtagttctccaatgtttagaaatttatgagacaaaatcttgatgccatatttttattaatatacttggagctcttggcaaggtgtcttagtgtccatagagtctaagtgatgaataaccctaggcttacagcacttctggtcagatgtgtatcttctattctctatgaatttaaattaccctctgttggactacagaaaacaattattcctaagttaaattaagtccctccaacaatttttttaattaaaaaaaattctatatctgatcctttcttcatatatcacatactacccccctactccaaaacagaagatctctcatgcaggcttgagcaataatgtcttmcactcctggtttattataattcgttttcttaaagcaactagattgcatttttaaaaataccaatcagacaatcttctctctctctttctaaatgcctccttggccttccagcctaccaggaataaaagccaaaattcttcctgttacccactgtgcccttcataatttgttttctcatctcttaaattctcccactggtttatttttctccagacctagtagacatcttgctgctccttaaacacataaggcgtgatctgtcagcagggtctttgcacttgttcttcagacttctggaaacggttttctctaagatattccaacatgttcttttttacctttaatcacatctcaaactcgtacctcttcagagatagatttctttatcatctcacctaaaaatgcaccctttgcatatcttcttcctttattgtagatgacaacatacgctaatttgcatctcctcaatgtttgcgatatccataattctaaaagagaaagaaataaagaaaatatgatggtagagagagagagagctaaactaaataaaagcattgagcgaataacactagcatttttgaactatattattttattgggagtgagtaaactaggaatcaggatagacaagtttagtagtttcctggcagaaatttattatgtttaatgt

SEQ ID NO: 26450 - DNA, 608 bp, Homo sapiens
taacaggcagagtcagtcacatgtatggagccgttcctcctkgggcaggctgtatttctctagatctctctgtactttgagcatcgctgtgtgccgggcccagagcagcgggagatacagcagggagtacagaggtaggaacaagctactgttagcaccagccagagttacacagacctctctatgaatcactttctgtctctgtgactcagacaagttattccaagcttctgtttgctcctttgtaaaattaagcttcaatttcattaaatggcatagggcacttcgcatggtgctggcagatagtaagctctgcacaactgtgatgatgatgatgatgaccatgatgatgaggtcccactcattcacttgggtagctttccatttaggatggagatgaaactgcaattcaagggagaaaataaaatcaagagggcatggatgaagaactctgggcagtgggggtaagggagaaacttcttctccgtggggtgatgagggaagactttgaggggaagatagaacttagcagggcttttgaggtcaggagttcagtgtgccacagtgagagaaggatgtttctaggggaggaagcaccatgagcaaaa

SEQ ID NO: 26451 - DNA, 536 bp, Homo sapiens
agcatgaaattccaagacgtgctgcattaactccatctgtagcaacggacatgtcaggaagccctgagtttacattatcaatatacaaacacrcttgcatccctgctcacttacacagacagccagttaagtaattatgggcagagatgcctacacttgtcctcacctgagtgtgtttattatgtcatgggtaccaaagacaagtgaaataggtccctgctctctgggagcttctagcctaactcaaggtgtaggttagagaggatgtatacaatatggagagccctggcccagccagttgacttgctgctgagacaatctcattttgctacaatttcaaaaatgataaaccacctgcctgatgaattgtgagctccttaggcaaactagcgggatgattgggatgaaaaacactcaacttcattaatcccagtatcttcaattgtgtgacttaagctaaacctgtgtttttattgccattagtctatttttgtctttatcatagtaaaatccattttacaatgtgattttataaa

SEQ ID NO: 26452 - DNA, 536 bp, Homo sapiens
agcatgaaattccaagacgtgctgcattaactccatctgtagcaacggacatgtcaggaagccctgagtttacattatcaatatacaaacacgcttgcatccctgctcacttacacagacagccagttaagtaatyatgggcagagatgcctacacttgtcctcacctgagtgtgtttattatgtcatgggtaccaaagacaagtgaaataggtccctgctctctgggagcttctagcctaactcaaggtgtaggttagagaggatgtatacaatatggagagccctggcccagccagttgacttgctgctgagacaatctcattttgctacaatttcaaaaatgataaaccacctgcctgatgaattgtgagctccttaggcaaactagcgggatgattgggatgaaaaacactcaacttcattaatcccagtatcttcaattgtgtgacttaagctaaacctgtgtttttattgccattagtctatttttgtctttatcatagtaaaatccattttacaatgtgattttataaa

SEQ ID NO: 26453 - DNA, 535 bp, Homo sapiens
caacattatctttctcaaacaatatcctcagcacactattccctgcttaaggccttcctatcaataattrtggggaaaagcaagacagatcagcctgttactgtgtctgtgtagaaagaagtagacataggagactccattttgttctgtactaagaaaaattcttctgccttgagattctgttaatctttgaccttacccccaaccccatgctctctgaaacatgtgctgtgtcaaactcagggttaaatggattaagggctgtgcaagatgtgctttgttaaacaaatgcttgaaggcagcatgctccttaagagtcatcaccacttcctaatctcaagtacccagggacacaaacactgcggaaggccgcagggacctctgcctaggaaagccaggtattgtctaaggtatctccccatgtgatagtctgaaatatggcctcgtgggaagggaaagacctgaccgtcccccagcctgacacccgtaaagggtctgtgctgaggaagattagtataagaggaaggcatgcctc

SEQ ID NO: 26454 - DNA, 555 bp, Homo sapiens
ttttgaatttttgagcaggtagctattaatgccaagaggtccacaattcaaacttttcttcaactaagtactcaaaacatcagtaggaggcaatattagaatagctgtagacaggcaatgctgagaataaaataaccagctcatcttcagaccaaagtgttttcaagatgcaaaacactccttttgcaaccttaaccaattatttatctcaaaggcccaatgccaatgagaagcaataatataatagaaagcacttaaaaacaaagggaaactgaatgttagtctcttctctgaagaccagtgaccaagtttctttgaatccaatcctgataartatctgagactcactttttccaatcataaaagaatggcctgtttattctacaagcatattgacagaatgtaatcatatattaggttacatagcaccgttcctctataaatattaagatattaaagtgtatcgtggtccagtgtccactctctacttggtacatgatttacatattctacccttcagcccagtgaactgctacatcccaacatccaaaaatg

SEQ ID NO: 26455 - DNA, 967 bp, Homo sapiens
agggttccttaacctsctagccccacatctacccagcaaacctggcttgtggagcctagagtgatctgaaaatccaggcatcgtctcttcctcccggctcaccccacaacttcagggaaccctgttctcctgcacctctgttcctgaaaagaaatattggggaaggggggaaagaggaaatatagaaaagatattgatgagattgacagcatgagaggtggggacgataagggcagaggggcaagagaaattgggtgttgagagatggagagaacgggcagaaaggagaacccagaccaggtcgaggaaatggtagaaaccgaaaacacccgcaggccacaagcccgggatctgtctcccgaggctggtggctggctctgactgtgactgagatggcgctgggtggtctcgatgtccctgctgaccccgctgctttgctcccgcacttgcagggagaacaacgagaactccaattctaacagccacaacccgctgaatggcagcggcaagtcggtgttaggcagctcggaggatgagaagactccatcggggacgccagaccactcatcatccagccccgcactgctcctcagcccgccgccccctgggctgccgtccctgcacagcctgggccaccctccgggccccagcgcagtgccagtgccggtgccaggcggaggtggagcggacccactgcaacaccaccatggcctgcaggactccatcctcaaccccatgtcagccaacctcgtggacctgggctcctagaacccatttgccttgatgagcttgccttttgtgacttgacactggggacgtggagtggcggtgtccaggggcgccccgcccctgcggccccaccaggtactgaaagacccgcaggctgagcgggtagaacagccgggtagggcagatagctgtctatgttggttcttgtttgggatttattttcaacaagttactttta

SEQ ID NO: 26456 - DNA, 535 bp, Homo sapiens
atttttggtagaaatggagtttcaccatgttgcccaggctggtctcgagctcctgggctcaatcaattctcccaccttggcctcccagaattctgggattacagacgtgagccactgtgcccattccttttttaaaatcctacagggaatccaaagcaggtagtttgagcatttaaagagttttaacttatttcagatcttatttcagctggaatgctgcttacctaattcgctggatgtcagcatttcagacaagatttacmtttccaagggacttcaggacatttaaagagtattttctgatattgggtcagtaagtcattagtgccattaattaatgctagtttacaaaaaacttgttaaatctgtatttttataacctcagtaattttattctcattctgtagttgttttatttgtttcttctgttctaaatcttaatacatttcttcctttttgaccatcggttttccaattaactgtttaattgcctaaacaatggtcagctaagcaacccaaaatctgcaccctcaaa

SEQ ID NO: 26457 - DNA, 1158 bp, Homo sapiens
tcattcagtaagttgtatgtttactctgttatttcttttcctgtgcaaatttttagtttaagtcaaatttgtctagttttatttttgtggcctttgtttttgcagccttagtcgtaaattctttgcctaggccaatgtccagaagagttcttgtttgtttgtttgtttgttttcagttttttttaggttttcttttaagaattttgtagtttcaggtcttatatttgagactttaattcatattgagataatttttgtatatggtgagagacatgggtccagtttcatttttttgcatatagctatctatgattaatatttttggaaaaaaggagtttgtctgtccactctagagagaataggttagaagaaaactagagtgaaagggggagaaaaattactgacatggcataatctaatgatgatggtgaattggggccagttacaatttaaaaagaaacagattccagatatattttataggttttatctatggtctccttttaatttttactttttaattttctcagcatcaagagaactatgtaagcttttttaaaaaaagcacaaatcaaatgacagttacgaggagagtaacacactacatatgtttttttwaaaaaaaagtatagtctaataaaacagtctccagcttaaagattccatctattggactgatatggtttggttctatgtccccaccgaaatctcatctcaaattgtaatccccatgtgtcacgggagggacctggtgggaggtgactggatcataggggcggatttcccccttgctgttctcatgacagtgagtgagttctcacgagatctggtagtttgataagtgtccagagctccctccttcttgctctctatctcctgccaccatgtaaaattgtccttgcttcccttttgccttctaccataactgtacttttcctgaggcctctgcagctatgtggaactgtgaatcaatcaaacttcttttctttataaattacccaatcccaggtagtatctttatagcagtactagagaactcaattactataataatgctgagataataagtgagtcatgaagagccaagccagtcttctcaagggtagagagagggaagagacaacactctctttcttctgtttttaaggactatttaat

SEQ ID NO: 26458 - DNA, 1150 bp, Homo sapiens
caaactgctttctaaaaagtgttattccaatatacattgctaccaaaaacatataaacatatcatttatcaacatatcttttcctacattaagtattaatatgaaaaaataatggcaaatttcaacaaataggaacatttaaaaatgattttaattcaagacacagttctctctctttgttgcttttttcttttttttttttttttttttttttttttggagacagagtcttgctctgtcgcccaggctggagtgcagkggcacaatctcggctcactgcaagctccgcctcctgggttcacgccattctcctgcctcagcctcccgagtagctgggactacaggcgcccatcaccacgcccagctaattttttgtatttttagtaaaaacggggtttcactgtgttagccaggatggtctcgatctcctgacctcgtgatccgcccgcctttgcctcccaaagtgctgggattacaggcgtgagccaccgcgcccggcctgttgcttctttcttgctataaaaacagccattagatttttatactgtataatctgacatagttcatctgtataatctgaaatagttcatctatcttcaaatttctgcccaacaattacaatgacttatgtatgcagaatgttctgcattgcagaaaatgcttttgaggcatgtatgattctcatttaacaaaggaaaaagctgatttcagaaagcataagggtattgctatgaaatggtagagcttatacttttgatttctagtccaagaccccttctagttatttatttatttatttatttatttttatgtttgcttcattttttttttttttttttttgcttcaacataggtgcaaatccaacctcatcatattaacactgacttgaaagacaaatcccaaaaagaattaacgaaggcttagaagaaacaaattagcggaaggaaacaaattttgtacaggcacagtggctcacacctgtaatcacagcagtttggcaggttaaggcaagaggatcacttgagctcaggagttagagacaagcctgggcaacgcagcgcaaccccatttctactgaaatccaaaaaatttagctgggcctggtggtgcatgcctgtagccccagctacttggggagatgaggcagga

SEQ ID NO: 26459 - DNA, 1150 bp, Homo sapiens
caaactgctttctaaaaagtgttattccaatatacattgctaccaaaaacatataaacatatcatttatcaacatatcttttcctacattaagtattaatatgaaaaaataatggcaaatttcaacaaataggaacatttaaaaatgattttaattcaagacacagttctctctctttgttgcttttttcttttttttttttttttttttttttttttggagacagagtcttgctctgtcgcccaggctggagtgcaggggcacaatctcggctcactgcaagctccgcctcctgggttcacgccattctcctgcctcagcctcccgagtagctgggactacaggcrcccatcaccacgcccagctaattttttgtatttttagtaaaaacggggtttcactgtgttagccaggatggtctcgatctcctgacctcgtgatccgcccgcctttgcctcccaaagtgctgggattacaggcgtgagccaccgcgcccggcctgttgcttctttcttgctataaaaacagccattagatttttatactgtataatctgacatagttcatctgtataatctgaaatagttcatctatcttcaaatttctgcccaacaattacaatgacttatgtatgcagaatgttctgcattgcagaaaatgcttttgaggcatgtatgattctcatttaacaaaggaaaaagctgatttcagaaagcataagggtattgctatgaaatggtagagcttatacttttgatttctagtccaagaccccttctagttatttatttatttatttatttatttttatgtttgcttcattttttttttttttttttttgcttcaacataggtgcaaatccaacctcatcatattaacactgacttgaaagacaaatcccaaaaagaattaacgaaggcttagaagaaacaaattagcggaaggaaacaaattttgtacaggcacagtggctcacacctgtaatcacagcagtttggcaggttaaggcaagaggatcacttgagctcaggagttagagacaagcctgggcaacgcagcgcaaccccatttctactgaaatccaaaaaatttagctgggcctggtggtgcatgcctgtagccccagctacttggggagatgaggcagga

SEQ ID NO: 26460 - DNA, 1150 bp, Homo sapiens
caaactgctttctaaaaagtgttattccaatatacattgctaccaaaaacatataaacatatcatttatcaacatatcttttcctacattaagtattaatatgaaaaaataatggcaaatttcaacaaataggaacatttaaaaatgattttaattcaagacacagttctctctctttgttgcttttttcttttttttttttttttttttttttttttggagacagagtcttgctctgtcgcccaggctggagtgcaggggcacaatctcggctcactgcaagctccgcctcctgggttcacgccattctcctgcctcagcctcccgagtagctgggactacaggcgcccatcaccacgcccagctaattttttgtatttttagtaraaacggggtttcactgtgttagccaggatggtctcgatctcctgacctcgtgatccgcccgcctttgcctcccaaagtgctgggattacaggcgtgagccaccgcgcccggcctgttgcttctttcttgctataaaaacagccattagatttttatactgtataatctgacatagttcatctgtataatctgaaatagttcatctatcttcaaatttctgcccaacaattacaatgacttatgtatgcagaatgttctgcattgcagaaaatgcttttgaggcatgtatgattctcatttaacaaaggaaaaagctgatttcagaaagcataagggtattgctatgaaatggtagagcttatacttttgatttctagtccaagaccccttctagttatttatttatttatttatttatttttatgtttgcttcattttttttttttttttttttgcttcaacataggtgcaaatccaacctcatcatattaacactgacttgaaagacaaatcccaaaaagaattaacgaaggcttagaagaaacaaattagcggaaggaaacaaattttgtacaggcacagtggctcacacctgtaatcacagcagtttggcaggttaaggcaagaggatcacttgagctcaggagttagagacaagcctgggcaacgcagcgcaaccccatttctactgaaatccaaaaaatttagctgggcctggtggtgcatgcctgtagccccagctacttggggagatgaggcagga

SEQ ID NO: 26461 - DNA, 924 bp, Homo sapiens
tgcatcaaacaaatccaaacagaatgacatcctacaaaatactaccagttttttcattgaagtgactctctttaatcatttttgagaaaatttttatcaaatgtacaagtctcaatatcaattatccatctgacattagttcaagtgaaaaatggtgttctataaaaaatattgtctattttagttctcagctagaacaaacaacgcaaccattataatttttagacagcagggtgctctatgtgaacttccccgttgtcacatagaacaggaaaatgacttgtactcaagaaccaagactaaatacgtaatatwtttactgctttctcaagaatgtcttttagcaaaactttttttttcagtttggtggtgaagtaaatatggactgtgaataaaatttgatactctgcttagattttggtaagataccatgattgtatctactaccattggttttgcgtcattttagataatatcaacagagaaaacataaaaatgatgtcttagtattattgaaatatttttaccttgtgtactccctgaaatgatcgagagacgcactttgagaacctttaatccagggcaatgagaaggaatcccaaaaccatttagattactaaagaataataccaaagaatacagaaagctgctccctagattctgttacatgtgggactctgactgcattttcttatttctcatttcaattatataaatttcataaaaagcaaaaaacaaaattgatttaaatatttttaattttctactctttggtagacataaaatgtaatagatttgtagcagcattctacaaaacttagaatatcagatctcataaattattcttgatttctaaaaaaaattcatggtatatacactttcgagattacgtattgcacttataaaaatggctacatgtatgca

SEQ ID NO: 26462 - DNA, 644 bp, Homo sapiens
ctctgtctatctataaaagtttaccagtgccaaaatgctgttgtgagatacagtagaacaatcattgcagtaaaatgcacttggaattgtgtctgcccatattatttttcagtgcaaaattagtgttagttataatagattctttatgttcacagattgagcatagcttccgttatcaacatcttcaacaaatattttctggattagtggttataaaatctatggccatattactaatttttctttaattctgttttcaagctagttgcctttgagccagaattgtcgacagagaaagcaatatctcttgaattcttttartaatgttaagataaaataagtattcaatctgtataaatatgagctggctaaaaaattgtaggggctttagatatacaaacattatttatactttttgaaaataattaagtgttccattatgaaacttccagtttcatatatttcagaaatattctttctgtagataacatatgtgatttattagtttatgtaaatatattatattggtttaaatgaattgtgttagctcagaaaaataactaaatgaaagtaatcagaataaacaattccaccctctgccacagcccttttggaaatgagtacggagagggagaaataatgca

SEQ ID NO: 26463 - DNA, 556 bp, Homo sapiens
gaacctgggaggcggaggttgcagtgagccragatcgtgccatggcactccagcctgggcgacagagcgaggctccatctcaaaaaaaaaaaaaaaagaaaaagaaaaagaaaaaaaagaaaagagaaaggatctcagcttgggaggccgaggcgggcggatcacgaggtcaggagatcgagaccatcccggctaaaacggtgaaaccccgtctctactaaaaatacaaaaaattagccgggcgtagtggcgggcgcctgtagtcccagctacttgggaggctgaggcaggagaatggcgtgaacccgggaggcggagcttgcagtgagccgagattgcgccactgcactccagcctgggcgacagagcgagactccgtctcaaaaaaaaaaaaaaaaaaaaaaaaaaaaaagaaaggatctcagcatacctgtgtttgtcaagcagcctgacttcccacctttgccccatctttgcatttctgaaaagtttctttagagagtaaacacagttcagtcaagagccatgtcctctccccacacatgtggctcacagc

SEQ ID NO: 26464 - DNA, 481 bp, Homo sapiens
ttttaaaataaaatatttagaattacaggaaaaraggactatattcaaagatgtcctaacttatcattatgcaatgatttatattttagtaaatcaatttatgtcactattctgttcaatggaaccttattaaactaaaagaaaaactaaactacttatcattatcaactagatttaactacctgcctctcccatatctattattctctcccttgcttaccagtctctggctaaatatatttcctttctttcaacatccaaaccctttccttcctcatggttattaaattcgatgttccttatttttgtttcacatgtcacctcaccttaaatcttctgacagtactatttattattgtacattcaatttccataaaataaaggtgcataaagtgttggttctaatcctcttattgattaaattagaaatgacaaatataaaactgtcattgcattcaaaggctatttgttgtaagctttg

SEQ ID NO: 26465 - DNA, 481 bp, Homo sapiens
ttttaaaataaaatatttagaattacaggaaaagaggactatattcaaagatgtcctaacttatcattatgcaatratttatattttagtaaatcaatttatgtcactattctgttcaatggaaccttattaaactaaaagaaaaactaaactacttatcattatcaactagatttaactacctgcctctcccatatctattattctctcccttgcttaccagtctctggctaaatatatttcctttctttcaacatccaaaccctttccttcctcatggttattaaattcgatgttccttatttttgtttcacatgtcacctcaccttaaatcttctgacagtactatttattattgtacattcaatttccataaaataaaggtgcataaagtgttggttctaatcctcttattgattaaattagaaatgacaaatataaaactgtcattgcattcaaaggctatttgttgtaagctttg

SEQ ID NO: 26466 - DNA, 913 bp, Homo sapiens
ccattcaggggccatctggagccaggagatgtgtgctatcaggacttcctctctcacctgagtgtctgcagatctctctctagcgcatgttggagaagatgcctaaggctcacagagcccaaactcagagctcccgatttccaaagaacagcctctctgacttgcattttcaattcccagygaaggctctccagggtccaggtggggtcatctgacacaccagagggccagtcatctctgctggggctcaggacacacagtggctcccaagctactagagagaagggttcagttcacagaggaagcaggtgtgtgtgtgcgtctgtgtgtgtgtgtgtgtgtgtgtaagatagggaggagttgaaaaaagcagagagagagaatatgggcatagaaataaattggcgccactacacaggttatttttataattacgtaaagaaattgtctttttaataaaagtgacatcttaggacagtgcttaaatctccatcgcatttcttaaactacgatttgttacatttagtaattcctagatttaatagatttaatgatgatgcatgcttgaattatttccatttttctctaaaaatctgatggagttgccaggaatggcgtagttcttctttcttttcctttctttctttctttctttctttctttctttctttctttctttctttctttctttctttctttctttcttccttccctttctctctccctccctccctccatctccctttctctctccctttctctcttttctctttctttctttctttctttcttttctttcccccttccttccttccttccttctttctttccttccttccttccttccttccttctttctttccttccttccttccttccttccttccttccttccttccttccttccttcctt

SEQ ID NO: 26467 - DNA, 540 bp, Homo sapiens
ttatatctactatgtatcaaatattaagtttagagtaataaataagatagatatggttccttcagcatggagattagaacttgggatatagataatcaaccattgcacagttaattaattaattattaatttttacaattttgcaaagtgaaacaaaagaagcagcacagggtgttattatgctatataatagggttccagcctaatttggtgtggtcagaaaaggcttctgagagaaattaacgtttaagcagaggcttcaggaataagtatgccatagtcatgggttgtgaagactcttctagacagaaagaattgcaaatgcaaaggtctgtgaaatgggatgccttgaggaactgggattggctgtagcatgagggagcagggcttagtgtgagatgcaactggcgaattccatagaaactgtcacagagccttgcagatttrcttggggacttgtggactttatttcaaaagtagagtgcgaaatgatcagatacgaatttttaaaagattcctttggctgcagtgtgatgagtg

SEQ ID NO: 26468 - DNA, 522 bp, Homo sapiens
caagcaatmttcctgcctcagcctcccaaagtgctgggattacaggcatgaaataccttgcctaggccagattggtttagaagagatgtttgggaggttgtgtcttcaggcattgaaagaaaatgaacattttttttcttgaaagactcccattcatatttactatccacctttattttatccaaaaccatttggatggatgacctttattttacgagcaaattattgaggctcccaacatgggtttaaacatgttgtggtgaacaggtctttgcattacaactccatgaatctaatcctgaattttaaactctagggcacaaatgattttcgaactaggttgaagccaagtttccagactggggttctgaatgtagaaatgcatagtgtgggggagtctgaggttatataataaaggcagaggcaaaccttagcaaggccatgtggagagaagcacctggaagctgtaatgattgcttggcttcctgtcctgcagtcctttaattctccaggtgcagccac

SEQ ID NO: 26469 - DNA, 1111 bp, Homo sapiens
gaattctgctactgaagtttacagattttagagtcactgattgaatattttcttcttgtataaaattttcactaagtaaaaatgaatttcttaaagcatctgcttctagaaatagtgggaaaattccatttggaatctgtcattgacaatccttttttttttttttcttaacatttatgtgtatgagactttgtaaatcacaacattttccaaatgggtttatgaacttgaattttgctgccttttctcagatttaattgaagagaatggttagcactgattcagtaggagagatgactgtgaatcactcctgatagagacctgaaaggtgattaaacaaacagcagtaaccttaaaaataagcaccgttgtatgttctttcatgatacttcaatgttttgttggtcattcccattgctcaaaacactgttgtataagtgatttacacatttgaaaccattttctcttttacattagtcattaactgggaaaatgaacatgttccttccttttctttcacagaagttttacttaagtacctttgccagtaaccacataaaattctgtgtcctggactaatgctttaaaccacttgttggtaaaagatgaaaaaggaaaatgagaaggtcttaatgcagcagtggattcctagatgtgtactttttttttttttttttgagacagagtctcacgacgtgtactttctacaccaagactgaatgtactgtattagcagagtttgaataagtacttaaaaataaggacatgtttttcttctcactgtagtacatagagtactttcagtctacctagagatttctaagtttattaagaaaatgtttatcctcattatactgtataattcacaaatcagttgagtaacaacatagaaagcwaatcgcaagttccaaaaacattagtattagtactttagtgcaactatgttggtctgaacatctctagggaaacctgaaaccttcaactgagttccagataatgaggaaactgccctggctgtttaaggggaaataaaacaaaaattgtactcaagcctgtggggggagagaatgccactacaggggcagtaagggagtttaagaaagcaaataaa

SEQ ID NO: 26470 - DNA, 1062 bp, Homo sapiens
acagtgaaggactttggcctttactcctacatattgtctgattatcccattatacctcgggttcccaggggagagtgatgtcctcatggctgacatggtaccaggcccatggcacgcacctaatacatgtttattgagtgaaatactcatccaagtaagtatttttcttgagaccaacttttgatccctccaatgagaccaccattgatgagagcccacatgggatttatgtgctgtgaaaagtcataatttgtatatcagttgtggactcagcagcaagggacaaaaaacctgcctcatggtggcttaaacaaagaggggcttatttttctcacataacaagaaatctgaaggcaggtggctccatgataggaggttcagcatctctgagactttcttggcctcatgatcacaaggggctgctgttgttccagacattacatccgtgttcaaggtaggaaggacaggaagaaagttggagaagagaaaaaggtgagaccatctgtagttattctcttttgtacagaacgcaagactttccctagaaacctctagcaaactaacatctccttggctagaactgtggctgttgctggctgtaagtgtgtatagaacggatcacattgctttcttgaagtaaatggtcctgctataaaggagaaaaggggagagtgcatattgrgtagtaaaaagcttcatccgccaaacatagtcttctttcagcgaattatttgagcaatatagtagccagcttgatcatctctttagtaaccatatttaattgtttttcttccccctacccccacccaccccaaatcggtcatttcccagaatcttgcccctgcaagcataaccagcatcttttaatgtcacactgtagctgtttattcattcaacagtatttactgagtgcttctcaagctgggggatggtagagatgggcagcacagagaagaactagcccagtgtctgcctcaggtcccgttgatggggtagagtcagacccgcagctgcccagtaagcaagatgagaagagggcagcccaggctcactatgaaagga

SEQ ID NO: 26471 - DNA, 1062 bp, Homo sapiens
acagtgaaggactttggcctttactcctacatattgtctgattatcccattatacctcgggttcccaggggagagtgatgtcctcatggctgacatggtaccaggcccatggcacgcacctaatacatgtttattgagtgaaatactcatccaagtaagtatttttcttgagaccaacttttgatccctccaatgagaccaccattgatgagagcccacatgggatttatgtgctgtgaaaagtcataatttgtatatcagttgtggactcagcagcaagggacaaaaaacctgcctcatggtggcttaaacaaagaggggcttatttttctcacataacaagaaatctgaaggcaggtggctccatgataggaggttcagcatctctgagactttcttggcctcatgatcacaaggggctgctgttgttccagacattacatccgtgttcaaggtaggaaggacaggaagaaagttggagaagagaaaaaggtgagaccatctgtagttattctcttttgtacagaacgcaagactttccctagaaacctctagcaaactaacatctccttggctagaactgtggctgttgctggctgtaagtgtgtatagaacggatcacattgctttcttgaagtaaatggtcctgctataaaggagaaaaggggagagtgcatattgggtagtaaaaagcttcatccgccaaasatagtcttctttcagcgaattatttgagcaatatagtagccagcttgatcatctctttagtaaccatatttaattgtttttcttccccctacccccacccaccccaaatcggtcatttcccagaatcttgcccctgcaagcataaccagcatcttttaatgtcacactgtagctgtttattcattcaacagtatttactgagtgcttctcaagctgggggatggtagagatgggcagcacagagaagaactagcccagtgtctgcctcaggtcccgttgatggggtagagtcagacccgcagctgcccagtaagcaagatgagaagagggcagcccaggctcactatgaaagga

SEQ ID NO: 26472 - DNA, 1062 bp, Homo sapiens
acagtgaaggactttggcctttactcctacatattgtctgattatcccattatacctcgggttcccaggggagagtgatgtcctcatggctgacatggtaccaggcccatggcacgcacctaatacatgtttattgagtgaaatactcatccaagtaagtatttttcttgagaccaacttttgatccctccaatgagaccaccattgatgagagcccacatgggatttatgtgctgtgaaaagtcataatttgtatatcagttgtggactcagcagcaagggacaaaaaacctgcctcatggtggcttaaacaaagaggggcttatttttctcacataacaagaaatctgaaggcaggtggctccatgataggaggttcagcatctctgagactttcttggcctcatgatcacaaggggctgctgttgttccagacattacatccgtgttcaaggtaggaaggacaggaagaaagttggagaagagaaaaaggtgagaccatctgtagttattctcttttgtacagaacgcaagactttccctagaaacctctagcaaactaacatctccttggctagaactgtggctgttgctggctgtaagtgtgtatagaacggatcacattgctttcttgaagtaaatggtcctgctataaaggagaaaaggggagagtgcatattgggtagtaaaaagcttcatccgccaaacatagtcttctttcagcgaattatttgagcaatayagtagccagcttgatcatctctttagtaaccatatttaattgtttttcttccccctacccccacccaccccaaatcggtcatttcccagaatcttgcccctgcaagcataaccagcatcttttaatgtcacactgtagctgtttattcattcaacagtatttactgagtgcttctcaagctgggggatggtagagatgggcagcacagagaagaactagcccagtgtctgcctcaggtcccgttgatggggtagagtcagacccgcagctgcccagtaagcaagatgagaagagggcagcccaggctcactatgaaagga

SEQ ID NO: 26473 - DNA, 562 bp, Homo sapiens
gacgttgaaactggcttctatcacaggcacatctgctggaaacaagtggggtcaggaggaaaatgtccatcagtgtccaatgacagacatttggttttggatgcaacagggcatagaggaaagggtacaggcttccagattggggaggtctggctctgggtcagagcctgcttcttccagtcatggaaacttggaccaatcatgtggctcctgcaaccctcccttttgtcttctgagaaaaagtaatgattataatggataatggactttaggttcttatgtgagaataagggggcaaacaatgttcagccctcagcatggtacctggcgtgtggatggcctttttctttccttttttttttttaatttggtaaacttcaacattcattggtggaaaaaaaaagctctaaagaaagtagggcctagaaggaactctctcgacctgataaaaagcatttaccaaaaacatacaaaaacattttatataatgctgaaagattaaatgcttttcmaaagtagaaacaaggcaaagatatgactcttgccacacctatacacatca

SEQ ID NO: 26474 - DNA, 551 bp, Homo sapiens
tgggacttagtatgttcagaagttcagaaagaacagggtggaagaaatgaggagccatctgtcctctcattgggcggagattctcaagggtagggaccttgccctttgctcatcctcatcctcagatcccaacacaagacagtgccctttgcatgggtgatatattacyccataacatgctgagtttactgtgaaaatgtatgcgccagagcaattgaaagatgaacttcaatgcgtcgatcttaggaattctccttagtttttatttttaattatattctctgtaattcatagtagaattgtgtattaggcagttctctcactgctataaagaaatacctgagactgggtaatttataaagaaaagaagtttaattggctcatggttctgcaggctgcacagaaactgtagctgcttctgcttctgaggaggcctcaggaaatttacaatcatggtagaaggcaaagcgttaccaaagatgtcttacatggcaggagcaagatgaaggaggagaagtgctacacacttttaaacaatcagatttcatgaa

SEQ ID NO: 26475 - DNA, 551 bp, Homo sapiens
tgggacttagtatgttcagaagttcagaaagaacagggtggaagaaatgaggagccatctgtcctctcattgggcggagattctcaagggtagggaccttgccctttgctcatcctcatcctcagatcccaacacaagacagtgccctttgcatgggtgatatattaccccataacatgctgagtttactgtgaaaakgtatgcgccagagcaattgaaagatgaacttcaatgcgtcgatcttaggaattctccttagtttttatttttaattatattctctgtaattcatagtagaattgtgtattaggcagttctctcactgctataaagaaatacctgagactgggtaatttataaagaaaagaagtttaattggctcatggttctgcaggctgcacagaaactgtagctgcttctgcttctgaggaggcctcaggaaatttacaatcatggtagaaggcaaagcgttaccaaagatgtcttacatggcaggagcaagatgaaggaggagaagtgctacacacttttaaacaatcagatttcatgaa

SEQ ID NO: 26476 - DNA, 1021 bp, Homo sapiens
ttcctaggggatgggggaagccctggctgcaggcagccttccaggcaatatgaagataggaggcccacgggcctggcagtgagaggtgtggccccacaccgatttatgatattaaaatctcaactcccactgcctgcctcttaaattactacagtactggaatggggatggggagggcwgtgaagtgttgccacctgagtaaatcccagcctgggagaggggagagaaaagaaagcttatggcttttgtagaagaaaaggtcctccagggccctgtgggctccagtgagcctgtggttttacatctgctgggtgggctgtgtggaggagtgctgatggaacacagcttggggacagactgctttctctctgaattggagtcacttaagggctcccccttccctcaccatctccctcatggaagtcctgaactactctgaagcccctccctccacccatctggtctgggtggggtaactgtggccaaggggagctgaggggggtaagccggatgtggactttggtttattggagactggcaaacagaaggggaggaaggagagcccatatagcaaaaacagccactctggccagggttaggctgcggccaaggtggcctggaggggatggatgaccgggctctcggtttgggggagggacttatcctggggagtacacacccattccctatgcagaccagagggacaacaacgtcagacctttccactgacctctccgttcggcctggggctactccggacagttaggagggggtggtgctgccttatctggggtgtgcaggagggtggtagcctccccctaagtaatcccccactagggtccgggtgtcgttctctcctgccctcctccgcgcacaaacaggtttgctcactcttagtgcgggaggatgctccgcggtctcccactcagttctggcctcagagtgagactgcggccgggggctcgggaaagaaggggacgcggctgggcggggcggtgactaaggtgaggggctgctcgcg

SEQ ID NO: 26477 - DNA, 777 bp, Homo sapiens
tattgattacttatgagataattcacacattgaaaaagcactagccaactgttctgtatattcccttaaaaatcgatggacccagaagaggactccaccagggacacgactccttcattcgtcgaatcttggacattttgcaagagaacacctccctctagcttatcttcctgctggcccattccaactattactaataagcataattgaaatcatgttgctggaccacaacttattataataatgatgagaataacactagtaatgtcctagctaacttttatgtatcttttacgcaccatgcactgtgttaaatgcataatacattttaccttatttgatctttactataatcctgggaatttgggtctaataatatcattgctttatcaktgatgaagctgaagttttgataggttaaaggatttaccccagttcacaaacctagtgtacattgaggcagggattccaactcagtgatgtgatactgctccaggatcttgagtctttatcgcctgtggacctaccatgctttttacctggttccctttgacagtcttttgcatctgacactcacgctctcaccgcattctttcacttctataagcagctgtgaagtgaatatctttgtatgtagacattggcatacttttttgctataccttcaggaacatttccattgaggaatttggggatgaagaggcatcttcatttacattgttacgtttctccaattatcccccctgaaaatttatataaacctcagtggaacatgaa

SEQ ID NO: 26478 - DNA, 777 bp, Homo sapiens
tattgattacttatgagataattcacacattgaaaaagcactagccaactgttctgtatattcccttaaaaatcgatggacccagaagaggactccaccagggacacgactccttcattcgtcgaatcttggacattttgcaagagaacacctccctctagcttatcttcctgctggcccattccaactattactaataagcataattgaaatcatgttgctggaccacaacttattataataatgatgagaataacactagtaatgtcctagctaacttttatgtatcttttacgcaccatgcactgtgttaaatgcataatacattttaccttatttgatctttactataatcctgggaatttgggtctaataatatcattgctttatcattgatgaagctgaagttttgataggttaaaggatttaccccagttcacaaacctagtgtacattgaggcagggattccaactcagtgatgtgatactgctccaggatcttgagtctttatcgcctgtggacctaccatgctttttacctggttccctttgacagtcttttgcatctgacactcacgctctcaccscattctttcacttctataagcagctgtgaagtgaatatctttgtatgtagacattggcatacttttttgctataccttcaggaacatttccattgaggaatttggggatgaagaggcatcttcatttacattgttacgtttctccaattatcccccctgaaaatttatataaacctcagtggaacatgaa

SEQ ID NO: 26479 - DNA, 532 bp, Homo sapiens
taaaaggtcatgggagctcttgggaagattctcatagggagacaattgccacgatgataaaatgtgataattrccatgatgggcacagcaactttgggctgggtaatgtcgcaatatagtttcagttcttatatccattagttgtaacaataaagcagttatatgctaattcctatctttaataaggtgaaaaatgctttgaatttttaaaaatcaccatttaaattcaaataattattctctgcgttctcctcccaattctacaggacttctcctaagtgcatttacgtttggaccccaacacatagattgagaatctattcgtttttattaggccaggtagtttgactaatagagacacttaaggagatgttcagaataaacaacttacaaaaatctgagttaactggccaaataaatgtttaaacattttcaaagttaaataatcaattatttattactcaaaggaaaatttgacagcacaatatgagctttaatgattcaattaatgacaaattataataaaatttct

SEQ ID NO: 26480 - DNA, 532 bp, Homo sapiens
taaaaggtcatgggagctcttgggaagattctcatagggagacaattgccacgatgataaaatgtgataattgccatgatgggcacagcaactttgggctgggtaatgtcgcaatatagtttcagttcttatatccattagttgtaacaataaagcagttatatgctaattcctatctttaataaggtgaaaaatgctttgaatttttaaaaatcaccatttaaattcaaataattattctctgcrttctcctcccaattctacaggacttctcctaagtgcatttacgtttggaccccaacacatagattgagaatctattcgtttttattaggccaggtagtttgactaatagagacacttaaggagatgttcagaataaacaacttacaaaaatctgagttaactggccaaataaatgtttaaacattttcaaagttaaataatcaattatttattactcaaaggaaaatttgacagcacaatatgagctttaatgattcaattaatgacaaattataataaaatttct

SEQ ID NO: 26481 - DNA, 523 bp, Homo sapiens
attttctcacagttctggaagctggaatttcaagatcgaggtgccagcaagcttgctttctggtgaggcctctcttcctggcttgaagacagacaccttctccctgcgtcctcacatggcctttctctgtgtgcgtgtgctctcctgctctctcccactgctcataaggacgccagccctatgggattaagtccccagtcttatgacctcatttaaccttaattaccttcctaaaggccctgtctctacattcagtcaccttgggagttagggctttggcatatgagttttgggagaggacacaattcaaaacaaaaacrtagattaaacgacaggacagacatgattatcatcattttacaaatggaaaggctgaggttggaactgttaaactgcttgtacagttacagagagagcatttgaaacgaactgatagagtgaaaaggacaattatacctgcctataaggtacaacctgaacaacaatagcaacaacagcataacataagtcaacagaaaattag

SEQ ID NO: 26482 - DNA, 1124 bp, Homo sapiens
taaaatgcagcctctctgtgcctcagtttctttacctataaaatgagaataataacacgtgatgtgaaggttgttataattgtaatcctgttgcaaccatggcccatatagcctgagttaagaataatgtcatggtccaagaacacagtccagcaattgaaaagtaattttaaaacaaatcatgggaggccgaggcgggcggatcacgaggtcaggagatcgagaccatcctggctaacacggtgaaaccccgtctctactaaaaatacaaaaaattagccgggcgcggtggtgggcgcctgtagtcccagctactcgggaggctgaggcaggagaatggtgtgaacccaggaggtggagcttgcagtgagccaagatagcgccactgcactccagcctgggtgacagagcgagactctgtctcaaaaaaaaaaccaaaaaaacaaaaaaaaaccaaaaaaacacaaatcacctacttgttttttaagtcactatagcaatacaatacatgatggagaaacagtcacttcctgcaccctccaagtagtcttcagtcacctagcactaggcctgcagtgccccaaatgttttcacccctctctcttcccaactccycttttttgtgtctgtggtagtggagggaccatctccaaagagtgaagaaagagaagaaactgagtgggcaagtccaagaccctttttagtggtaaatggaaagtaaggcagggaaaagtgatgtcctttgtttttatctgttatcactgtcacaggttgggttctccttgaagcagacatcgagacagagtttaacctgttacatgtttattaaggcaagtgcttggaacagacaccgtggaaggaaagggaagaaagaagaagtgggtagaaggagaggttgggctgcatgtaggtctaatggctcaacaaagctgtcctaaattgggctgaaatgatacgggctttatggattcttctggatcagccattggttgtgagtccccagggaagggtgtgatcttggggaaggcagctctctgcaactgaggcaagtcctgaaggggctgatgagagaaggctgtctgccaataggacttccatcagctgcagcagcagcttgaagggga

SEQ ID NO: 26483 - DNA, 1114 bp, Homo sapiens
tggaattaaccagctacttcccaatggtcgtttattttaaacaaaaattaagatcaagctatttatttacagaggaaataattaaccatacacaacacacagctacattaaaagatctcagttttccagaaatcaagtagcgaaggaagttttcgtcatcatcttacaccctaggatcatgctstcctccaaacaagtagcattaagctgtttccatgtaaaaatagaaaacctgaagagctgtaccttatgaactgagtggggaagtgcttgtgtgacagcttccaacctctgtgagagtttaatccttatgaactgtatctttacccatatgactttctattccaaagagcaagagtctgacttcttccgttttatactctgctgggttttgaaaattggaagcacattgttcaattaagaaccaattaatgtgacattccagcatgaaagaagtgttaggcaagaggaacccgctgcaaactaatcagtttaaagtttcattgactcatgatctgctgtttcttaaaggcatgagtgttttgcatttatatcacctccagctcttggaacttgactgactttataaactatgcagggtcaagttgagtcaggattgcatggcgaccttcccagagtagcccaatttctgcaaaaatgtgcataccatgggtgtgttctttctctcacattggtactaagtcgttgttttgcagctgatactcctatttaccatgtgactcaaagataaatagcaaccaaaatctcaaaggacctgcattgtagtctagttctctcaaacacagtttgtgctcatgaacttcagtttcctcatctcttaaatggaagcaacaggatctgttaaatggaactaagttgctgtgtcactcactgtctgaaaagaataagccctggttttttgaataaatgccagcctcagcaattagtccatcaacttaaattcttcttgcagtttcaattagattagaacccttccctggtttccactcaggctgttgtgcaacatttttgcaaggctaacagctgtcttattctacccttgagagagctctatttcagctactcatgcattcctagttcataaagcgctcca

SEQ ID NO: 26484 - DNA, 556 bp, Homo sapiens
tttataagagattgtgcatgtttttaagaagtcacagttactaaaaatgaatatacagctcactttatttgctttccttatggtaaaacattgtattatttcttctttaataacactaataccaacagataactgtagaaatgaaaatttactttgaatgaatgcaatgctattcatgtttcagaataaagaattcctaatttagattttggaaaatgaaaaaaagatttcagatttaggattcatattcatcattttattggacatttttaaaaatcatactttaagttctgaggtacatgtgcagaatgtgcaggtttgttacacagatacacacgtcccatggtggtttgctgcacccatcaacacgtcacctacattaggtatttctcctaatgctctccctcccctagccccacccccaacaggccccagtgtgtgatgttcccctccctgtgtccatgtgttckaattgttcaactcccacttatgagtgagaacatgctatgtttggttttcctgttcttgtgttagtttgctgagactgatggtttcc

SEQ ID NO: 26485 - DNA, 556 bp, Homo sapiens
tttataagagattgtgcatgtttttaagaagtcacagttactaaaaatgaatatacagctcactttatttgctttccttatggtaaaacattgtattatttcttctttaataacactaataccaacagataactgtagaaatgaaaatttactttgaatgaatgcaatgctattcatgtttcagaataaagaattcctaatttagattttggaaaatgaaaaaaagatttcagatttaggattcatattcatcattttattggacatttttaaaaatcatactttaagttctgaggtacatgtgcagaatgtgcaggtttgttacacagatacacacgtcccatggtggtttgctgcacccatcaacacgtcacctacattaggtatttctcctaatgctctccctcccctagccccacccccaacaggccccagtgtgtgatgttcccctccctgtgtccatgtgttcgmattgttcaactcccacttatgagtgagaacatgctatgtttggttttcctgttcttgtgttagtttgctgagactgatggtttcc

SEQ ID NO: 26486 - DNA, 991 bp, Homo sapiens
taaggagctctggcaatggattatcgacttcagatttctatctgttaaagcacactgctccatgatagctttggaattcatttttcctttmctggttacaaattttaggaagtgcttccctcctgactaatcttggtaagcagagagggagttatttaaaaacttaagacttatccttctccagttcacagaaaagcccgaagagatttattttctttcctttctttttcccttcagctcctcctcttttccttcttctccccacccaatacaaagatggtaattgtaatgtattcacatactcacaatccaaatgaagagcaaagtatgaaacccagtctaaggggaaggagcacactgggtgccatgtgctatcacctgtagtcccagttctgcaatgtcctagcagtatgattttgagttgctccttctgacatttgtgacgaaagctatggtttatctatgtcacaagggcgttctaaagactaaatcagaggacagatgaagaagcgcatcttaaattataaagagctacccaagtataatagagtgaataccagatggcagattccatcagtagaaggtccaagagaacgaggcaagaacccagctgctgctgatctcttaatagaggcaagaattccatcaaagagcaaagactccagggcctgagatttttggggccccaaggtcgggggggtggggggccaacaacaagactggagcttgagttggagagctagtgggaatccttttatttattttgtagaggccgatttgatctctgtggttgctgcagatctaaacttaaaagaaatcttactctactcgctcttttctatggctaaaggagcaaagagttaattaccttgttacattcatctctccttccaaattttccaggagcttttcccttcattagccatcagatgaaactgaagaatatttattatttattgtgtgtgttaaattttatgtcttttcttcttaa

SEQ ID NO: 26487 - DNA, 991 bp, Homo sapiens
taaggagctctggcaatggattatcgacttcagatttctatctgttaaagcacactgctccatgatagctttggaattcatttttcctttcctggttacaaattttaggaagtgcttccctcctgactaatcttggtaagcagagagggagttatttaaaaacttaagacttatccttctccagttcacagaaaagcccgaagagatttattttctttcctttctttttcccttcagctcctcctcttttccttcttctccccacccaatacaaagatggtaattgtaatgtattcacatactcacaatccaaatgaagagcaaagtatgaaacccagtctaaggggaaggagcacactgggtgccatgtgctatcacctgtagtcccagttctgcaatgtcctagcagtatgattttgagttgctccttctgacatttgtgacgaaagctatggtttatctatgtcacaagggcgttctaaagactaaatcagaggacagatgaagaagcgcatcttaaattataaagagctacccaagtataatagagtgaataccagatggcagattccatcagtagaaggtccaagagaacgaggcaagaacccagctgctgctgatctcttaatagaggcaagaattccatcaaagagcaaagactccagggcctgagatttttggggccccaaggtcgggggggtggggggccaacaacaagactggagcttgagttggagagctagtgggaatccttttatttattttgtagaggccgatttgatctctgtggttgctgcagatctaaacttaaaagaaatcttactctactcgctcttttctatggctaaaggagcaaagagttaattaycttgttacattcatctctccttccaaattttccaggagcttttcccttcattagccatcagatgaaactgaagaatatttattatttattgtgtgtgttaaattttatgtcttttcttcttaa

SEQ ID NO: 26488 - DNA, 847 bp, Homo sapiens
gggccccgcaagagagctatctggcaaattcctatattctggaaagtccccaggccattttttcaagctgtcacttctttccagtcggctcaagtcagaaagtctttactgacctctggggtgagcacagacctgtgcacacagtgatgtggctcctttggaaacttccataaacctggggaatggggagaaggatccctcagagccacagaaccaggagcaatttccaaagcaaaggaggcttgccaggcaaggcggaggttgtcctggatcatttggagtgtgatggcttcctattgacttccttctgcgtggcgtttcaagggacactactcaaagggggtttatgaagagcagccccttcacaacttgctgttacaacttctcttcaaacatcctttccaaaagactccttttcactggggtcagccagagaagctgcctccaagcccacttcttactctcaatgtgcatttacaaggtggcaaagaggttcccgcattttgtgaaaaatatcagtgacctgctctgacctggctctggctgctgaccgccaccttcctgcyggcctcgcctgccatcttgtggacaaaagcagtactgctgccagagagacgatcttgggcccaggtttctaaagcaaacttgaaaatcaaccaggggagggccatgaagaaaattactcttgaatggcaagaaatcaataatgataggtttcactttctccagccaagacgcacttctttgccatttccagcatgtcttatctcacttatcatccaacaagcatgcaggtgagcacctgctgtgtcccaggtgccatgctaggcacaggggtagacatgaa

SEQ ID NO: 26489 - DNA, 536 bp, Homo sapiens
gtggaattggtggtgggaggataataaggaatctctagtctgatcgcgatttccccagtgatatatgaggctgtcagaggtttgaagagatacaagtatgaaatagtcactagaaggtcagactgatcgatgatcwgtatcagaagctcaggtgagatttatggtcatgaactggcccatggacaattgtgttttcttctagccacactgttctactctaatggagactgaatgggtgggtagttgagtttaccaggttgtggttcagccaggacggtatgtttaagggagtgaggaaagtttccagtaggatgactattacgatggatcactaagttgtgtgagaaggaaagaaaaaatgaataggttcatgatcaatgaaaaaaatggcaggctcagtgaattggaggtcttagtgaggtcacagtggtcagtgtgatatgttagagaaaggaaccatgtggatggggcacagttgtcagaggagaggaaacttacagttgagatctcacatacataggacccagcaatgacca

SEQ ID NO: 26490 - DNA, 344 bp, Homo sapiens
gattataaaacatagcaatagttacaaaattcttcgtctacatttctccatttgaaatagttttggtgtagaatgaagtgttaaatattcttgcatgttcatccaatgggaagttgtaaacattagttcatrtcagactgtgtttgagatacattctcttgctgtgagaaacacgtgactgctgtttcctacaatcattgtccaataagcagagtaaagccatggaggtttctttcttttacatgaaatataccaattctaaaacatgattttctttttgtaatagaaaggccagagtgtaagtttttaatcctgagttgtgcattagatcaattgttttcatt

SEQ ID NO: 26491 - DNA, 635 bp, Homo sapiens
tgcttctgctgtcaccctccatagtccactctccacaaagcctcagccttaaacagtaaattagatcatgtcatgcctctccttgacccctataatgccttcccattgcacttagaataaatactaactacataccagagtcagcaacttaccccagtggctctcaacsttatgatgtagcgtcacctggaattttttttttttacaggttttaaaaaataaccttcactttttaaaagctaatgtgtgcattacaggaaactgaaaaccactagaagcaaagaacaaagccatccacaatcacaagcaatttagtttcacatgtccttctaagtcctgtttgtgtagatacaacatccaacttgatggacttgagatcatatgttatgtatcatgccttttcacacatcatgaatatttaccaattcaaaatcttaaagctatgtgagtattctgatactcagcaacacattacagcaacttcatctgttagaaaaaatgtaatcctccctttcttaggacaaaaatttcatagaagacccaaatgacaacatgcctctacataaaagcattagcagagttctgattaaaatactgcgttttcttaatgctcaatttaaaatgaaacataaagc

SEQ ID NO: 26492 - DNA, 635 bp, Homo sapiens
tgcttctgctgtcaccctccatagtccactctccacaaagcctcagccttaaacagtaaattagatcatgtcatgcctctccttgacccctataatgccttcccattgcacttagaataaatactaactacataccagagtcagcaacttaccccagtggctctcaaccttatgatgtagcgtcacctggaattttttttttttacaggttttaaaaaataaccttcactttttaaaagctaatgtgtgcattacaggaaactgaaaaccactagaagcaaagaacaaagccatccacaatcacaagcaatttagtttcacatgtccttctaagtcctgtttgtgtagatacaacatccaacttgatggacttgagatcatatgttatgtatcatgccttttcacacatcatgaatatttaccaattcaaaatcttaaagctatgtgagtattctgatactcagcaacacattacagcaacttcatctgttagaaaaaatrtaatcctccctttcttaggacaaaaatttcatagaagacccaaatgacaacatgcctctacataaaagcattagcagagttctgattaaaatactgcgttttcttaatgctcaatttaaaatgaaacataaagc

SEQ ID NO: 26493 - DNA, 1274 bp, Homo sapiens
gagaaacttcataacaaaatggcagtcagcctactgcttcattttcttagccaagaaaggatctaaacccttcacacaacaggaaggggcatgccagcccaggtacttaaaccaatattagcattcaccaaaaagtactggggcaccgtagccccctttcatagtgctgtgagcttaggcttcctttgggatatagctagtgctctgtttcttactcagaccttcacattcggcagaccctgtaccccagttctgcccctggaatgggaytcccaattgccttgtgcccagctgagttccagctagagagtcaagttccctagaccccatccctgtcttctggtgtccacgattctgacaagcaggcacatggccataggcggccttcaacacagcaccccctcccccagtgttcctaagttattgtcaccctaatttaccccacaatctgaccgttggagggatccctaacacctttaaggaaacctaaagaacttttaccagtgacctcaatattgtagatcaaggccagggcatacctccctttctcccgtctccctggagaaaacagtgcctagaaatacacgtgcaggggccccaggctgtgcacatcccccacagggcccgataccacctgtttggtgttcccaaaagctttttccagatggagccacgcaggcgtttctagtcccttaaatcctaaaccttaaacactaactttaattcaactgggtttatacatcatatcaattttactggagttgttgaacatttcattacatggaaaaaaccaccctgtgttggcctaatagactatccagactaatactggccctctgatacctgtcccagctctactcagcttaagattggtccttccccaaactcccgccaacactggttctgcctctgcacatgtctgcttcctgtgggtcacactctgagcgacagccctaagtctctgatttgtctctaattagccctgctgtctcccctttactaaactgaaagctccttctaggggggcctgggtcaaggaccagagaaactggcactggataggggcacatagcaggtgctcactagggacttgcggaatgaaactggaacagagacattaccaaacaccctgaaagccctgaatagtctaataggaatgtcatccctgacctcatatgtaacacccaattcaagtaatttgtcatatagtgtctcccagttattagcttctgcaatgtggctggtaggcatagtcccctttgccagatcatcta

SEQ ID NO: 26494 - DNA, 1274 bp, Homo sapiens
gagaaacttcataacaaaatggcagtcagcctactgcttcattttcttagccaagaaaggatctaaacccttcacacaacaggaaggggcatgccagcccaggtacttaaaccaatattagcattcaccaaaaagtactggggcaccgtagccccctttcatagtgctgtgagcttaggcttcctttgggatatagctagtgctctgtttcttactcagaccttcacattcggcagaccctgtaccccagttctgcccctggaatgggattcccaattgccttgtgcccagctgagttccagctagagagtcaagttccctagaccccatccctgtcttctggtgtccacgattctgacaagcaggcacatggccataggcggccttcaacacagcaccccctcccccagtgttcctaagttattgtcaccctaayttaccccacaatctgaccgttggagggatccctaacacctttaaggaaacctaaagaacttttaccagtgacctcaatattgtagatcaaggccagggcatacctccctttctcccgtctccctggagaaaacagtgcctagaaatacacgtgcaggggccccaggctgtgcacatcccccacagggcccgataccacctgtttggtgttcccaaaagctttttccagatggagccacgcaggcgtttctagtcccttaaatcctaaaccttaaacactaactttaattcaactgggtttatacatcatatcaattttactggagttgttgaacatttcattacatggaaaaaaccaccctgtgttggcctaatagactatccagactaatactggccctctgatacctgtcccagctctactcagcttaagattggtccttccccaaactcccgccaacactggttctgcctctgcacatgtctgcttcctgtgggtcacactctgagcgacagccctaagtctctgatttgtctctaattagccctgctgtctcccctttactaaactgaaagctccttctaggggggcctgggtcaaggaccagagaaactggcactggataggggcacatagcaggtgctcactagggacttgcggaatgaaactggaacagagacattaccaaacaccctgaaagccctgaatagtctaataggaatgtcatccctgacctcatatgtaacacccaattcaagtaatttgtcatatagtgtctcccagttattagcttctgcaatgtggctggtaggcatagtcccctttgccagatcatcta

SEQ ID NO: 26495 - DNA, 1274 bp, Homo sapiens
gagaaacttcataacaaaatggcagtcagcctactgcttcattttcttagccaagaaaggatctaaacccttcacacaacaggaaggggcatgccagcccaggtacttaaaccaatattagcattcaccaaaaagtactggggcaccgtagccccctttcatagtgctgtgagcttaggcttcctttgggatatagctagtgctctgtttcttactcagaccttcacattcggcagaccctgtaccccagttctgcccctggaatgggattcccaattgccttgtgcccagctgagttccagctagagagtcaagttccctagaccccatccctgtcttctggtgtccacgattctgacaagcaggcacatggccataggcggccttcaacacagcaccccctcccccagtgttcctaagttattgtcaccctaatttaccccacaatctgaccgttggagggatccctaacacctttaaggaaacctaaagaacttttaccagtgacctcaatattgtagatcaaggccagggcatacctccctttctcccgtctccctggagaaaacagtgcctagaaatacacgtgcaggggccccaggctgtgcacatcccccacagggcccgataccacctgtttggtgttcccaaaagctttttccagatggagccacgcaggcgtttctagtcccttaaatcctaaaccttaaacactaactttaattcaactgggtttatacatcatatcaattttactggagttgttgaacatttcattacatggaaaaaaccaccctgtgttggcctaatagactatccagactaatactggccctctgatacctgtcccagctctactcagcttaagattggtccttccccaaactcccgccaacactggttctgcctctgcacatgtctgcttcctgtgggtcacactctgagcgacagccctaagtctctgatttgtctctaattagccctgctgtctcccctttactaaactgaaagctccttctaggggggcctgggtcaaggaccagagaaactggcactggataggggcacatagcaggtgctcactagggacttgcggaatgaaactggaacagagacattaccaaacaccctgaaagccctgaatagtctaataggaatgtcatccctgacctcatatgtaacacccaattcaagtaatttgtcatatagtgtctcccagttattagcttcygcaatgtggctggtaggcatagtcccctttgccagatcatcta

SEQ ID NO: 26496 - DNA, 659 bp, Homo sapiens
ggaacttcgacacagtcaccatttattgtaattgttagtggtggtggtggtggtggtggtagtggtggtggtggtggtggtggtggtggtggtggtgrtggtgataatgatggtggttcaagaagaagattgcacttttagtgacaggcactgcaggaatccatgttataggtaaggttatttatcagatgcagtctttgtattcaggtgaacattctgggcagaagacacagctttgtgtacctcagtagtcttgtgagataacatggacaatcccactgcatagcccctgtgtcactggctttgaggtgaagtgggctcaagcgacgtagccatatagcctgggagcatatatagtgctggggatgatgaagtcagatacgtgcttcaccctggtgaatgaagcacatccgtaacataactccataagcactgggaaaaccctactgtcctagaaaataacttggcatccctacataatagaaaagagattttttttaagcttaagattttgatccttgttacagtgagaagaaatcctctggaaggggtaattcagccttatcctttattcattatcttggtttaaatgagtttcaggtaattttctgaaggtactaacctttggacaaaagaagagggggagaaacacaaggaat

SEQ ID NO: 26497 - DNA, 659 bp, Homo sapiens
ggaacttcgacacagtcaccatttattgtaattgttagtggtggtggtggtggtggtggtagtggtggtggtggtggtggtggtggtggtggtggtggtgrtgataatgatggtggttcaagaagaagattgcacttttagtgacaggcactgcaggaatccatgttataggtaaggttatttatcagatgcagtctttgtattcaggtgaacattctgggcagaagacacagctttgtgtacctcagtagtcttgtgagataacatggacaatcccactgcatagcccctgtgtcactggctttgaggtgaagtgggctcaagcgacgtagccatatagcctgggagcatatatagtgctggggatgatgaagtcagatacgtgcttcaccctggtgaatgaagcacatccgtaacataactccataagcactgggaaaaccctactgtcctagaaaataacttggcatccctacataatagaaaagagattttttttaagcttaagattttgatccttgttacagtgagaagaaatcctctggaaggggtaattcagccttatcctttattcattatcttggtttaaatgagtttcaggtaattttctgaaggtactaacctttggacaaaagaagagggggagaaacacaaggaat

SEQ ID NO: 26498 - DNA, 659 bp, Homo sapiens
ggaacttcgacacagtcaccatttattgtaattgttagtggtggtggtggtggtggtggtagtggtggtggtggtggtggtggtggtggtggtggtggtggtgataatgatggtggttcaagaagaagattgcacttttagtgacaggcactgcaggaatccatgttataggtaaggttatttatcagatgcagtctttgtattcaggtgaacattctgggcagaagacacagctttgtgtacctcagtagtcttgtgagataacatggacaatcccastgcatagcccctgtgtcactggctttgaggtgaagtgggctcaagcgacgtagccatatagcctgggagcatatatagtgctggggatgatgaagtcagatacgtgcttcaccctggtgaatgaagcacatccgtaacataactccataagcactgggaaaaccctactgtcctagaaaataacttggcatccctacataatagaaaagagattttttttaagcttaagattttgatccttgttacagtgagaagaaatcctctggaaggggtaattcagccttatcctttattcattatcttggtttaaatgagtttcaggtaattttctgaaggtactaacctttggacaaaagaagagggggagaaacacaaggaat

SEQ ID NO: 26499 - DNA, 659 bp, Homo sapiens
ggaacttcgacacagtcaccatttattgtaattgttagtggtggtggtggtggtggtggtagtggtggtggtggtggtggtggtggtggtggtggtggtggtgataatgatggtggttcaagaagaagattgcacttttagtgacaggcactgcaggaatccatgttataggtaaggttatttatcagatgcagtctttgtattcaggtgaacattctgggcagaagacacagctttgtgtacctcagtagtcttgtgagataacatggacaatcccactgcatagcccctgtgtcactggctttgaggtgaagtgggctcaagcgacstagccatatagcctgggagcatatatagtgctggggatgatgaagtcagatacgtgcttcaccctggtgaatgaagcacatccgtaacataactccataagcactgggaaaaccctactgtcctagaaaataacttggcatccctacataatagaaaagagattttttttaagcttaagattttgatccttgttacagtgagaagaaatcctctggaaggggtaattcagccttatcctttattcattatcttggtttaaatgagtttcaggtaattttctgaaggtactaacctttggacaaaagaagagggggagaaacacaaggaat

SEQ ID NO: 26500 - DNA, 659 bp, Homo sapiens
ggaacttcgacacagtcaccatttattgtaattgttagtggtggtggtggtggtggtggtagtggtggtggtggtggtggtggtggtggtggtggtggtggtgataatgatggtggttcaagaagaagattgcacttttagtgacaggcactgcaggaatccatgttataggtaaggttatttatcagatgcagtctttgtattcaggtgaacattctgggcagaagacacagctttgtgtacctcagtagtcttgtgagataacatggacaatcccactgcatagcccctgtgtcactggctttgaggtgaagtgggctcaagcgacgtagccatatagcctgggagcatatatagtgctggggatgatgaagtcagatacgtgcttcaccctggtgartgaagcacatccgtaacataactccataagcactgggaaaaccctactgtcctagaaaataacttggcatccctacataatagaaaagagattttttttaagcttaagattttgatccttgttacagtgagaagaaatcctctggaaggggtaattcagccttatcctttattcattatcttggtttaaatgagtttcaggtaattttctgaaggtactaacctttggacaaaagaagagggggagaaacacaaggaat

SEQ ID NO: 26501 - DNA, 1013 bp, Homo sapiens
tgagccagccctggtcctgccatcagacagaccttggtcatcctccagctgggtgaccgtgagccagttaccaagcctcagtttcctcttctgtaatacaggttagtaacagtctccccctcacagagctcctgtgaagatgcggggagcgaggcatggccagggccggggagagaaagtgctcggtgagtgtgagtctggggtcttcaggctggttccagccgctcctacccttcacagcccagctgggaaatctgtcgcgtttacgatgctctgtttcatttaatcccaataagctctggctatgtagccactattattactcccagtttacagatgaggatgctggagtcccatgaggtagaagagccaggacagatccagcttcacactcagacttgggctgtttctcctgatgctctacagcctcctcccaaatgttagagctggtgggtctcagagatgggtaactcttcatttaatacatgaaataaagcccagagaggttgaggracttgcctaaggtcacacagctagttaggggcagagctggagcttgaccaagggtcctgactggcggtcttgctctctttcctgcatagcatacaagactcccctcccaggcagcccagcctgaccactgtgggggctctgtttcccttctctgtcttgtggcactgactgcccggggtggcggctgggtgcctctgggactccttggaggtcctcttctctcagctgagagtctgggggagtgctgcctgctaagggctttggggaacttcctgtcttctgcccatctcctccccccacgctccctccgcctctgcctctgcctctgcctctgcctctgcctgggtctctaccgcccctgctcatcagctgtcccttcccctttcccactccaaggctgtcagtgtttgggggagattatgcagtgttgacattggaatatgaattaggcgagagcggcagccaaatattggaattagggaaggcaggagcccaggcgg

SEQ ID NO: 26502 - DNA, 1037 bp, Homo sapiens
ggatccccaccagcatgctaccgatgaatcctgctctctttcagatgaawttttattttttttccaataaggccagccctaccctggaatctggaaccagttctggcccagggtagaaaggctaccaagcacctatggtagaagccctggtgtccaggcatgccttggaccttattattgaccttctctgaccttggcactgcagttccatgatgtctggtcttgttgctgagttcctttgtcgacttattccaaagatacatatgacttaaggatgaaaagttttattgaaaacaagaagtatgattttctgtggtattacattccatttctagcactgaagataagggaaatggattaggaaggttttgtttagttttatttttataaattttaagaaatacaaaatacatggacaaagttaaaaattcagacaatatagtaagagtactcagtgaaaaagtaagtctccttcctcaattcctcattcccaaagtaaccactcttgtgagtttcttatctgtggaaggtaactaatttttacatatagcaggtcattgaataatgttatttcattcaacatcattttgctagaatattgatgtaaaaaaaaaaattgtttcctggctggggccactgtccatgaggaatttgtatgttctcccatgtctgtgtgagttctcccaaggtactctggtttcttcccatatcctagagttgtgccccttagatgaactggcatgtctacatggttccagtctgagtgggtgtgtgtgagtgcaccatggggatgagatggtgtcctgtccaaggtgggtttccaccttgtgccctgagctgtcaggatagggtccagacacctgtaaccctgaactggaataagtgggttggaaaatcaataaatgaatacaaattactgtcaaataaataaaccccaatttgaatgttacatctcaccatgctactcaggttgaagggcccaggtatttaaattcattagtgataaaagtgaagataaattatttaggtttgagtta

SEQ ID NO: 26503 - DNA, 1037 bp, Homo sapiens
ggatccccaccagcatgctaccgatgaatcctgctctctttcagatgaatttttattttttttccaataaggccagccctaccctggaatctggaaccagttctggcccagggtagaaaggctaccaagcacctatggtagaagccctggtgtccaggcatgccttggaccttattattgaccttctctgaccttggcactgcagttccatgatgtctggtcttgttgctgagttcctttgtcgacttattccaaagatacatatgacttaaggatgaaaagttttattgaaaacaagaagtatgattttctgtggtattacattccatttctagcactgaagataagggaaatggattaggaaggttttgtttagttttatttttataaattttaagaaatacaaaatacatggacaaagttaaaaattcagacaatatagtaagagtactcagtgaaaaagtaagtctccttcctcaattyctcattcccaaagtaaccactcttgtgagtttcttatctgtggaaggtaactaatttttacatatagcaggtcattgaataatgttatttcattcaacatcattttgctagaatattgatgtaaaaaaaaaaattgtttcctggctggggccactgtccatgaggaatttgtatgttctcccatgtctgtgtgagttctcccaaggtactctggtttcttcccatatcctagagttgtgccccttagatgaactggcatgtctacatggttccagtctgagtgggtgtgtgtgagtgcaccatggggatgagatggtgtcctgtccaaggtgggtttccaccttgtgccctgagctgtcaggatagggtccagacacctgtaaccctgaactggaataagtgggttggaaaatcaataaatgaatacaaattactgtcaaataaataaaccccaatttgaatgttacatctcaccatgctactcaggttgaagggcccaggtatttaaattcattagtgataaaagtgaagataaattatttaggtttgagtta

SEQ ID NO: 26504 - DNA, 2293 bp, Homo sapiens
cgcttctgacaccatgttaaaagaaaaacttcagccaaattaaatttaaaaaagtttaattgagcaatgaacgattcacaaattgggcagccctcagaatcacagcagattcagagagactccagggttgcctcgtggacagaacaratttatagacaaaaaaaaaaaggaagtgacttgcagaaatcagaagtgaggtacagaacagctggattggttacagctcggcgtttgccttatttgaacacagtttgaacactgagtggtgtatgggtggttgaagtatggctgctgggattggccaggactcagcgattgttacaggtgcatactcctaagttagattttcaatcttgtccacctattaagttaggttgcagttcatccacaaggactcaaacatagaagtacagagtccttctcaagccatatttagtttgctttaacagcttattaaagtggggtttgtgaaagataaagtagccccaatattcaccagcatggtacacgttccctgcttgtcttagcctctgtttctcattatttatcaaaaggcatcacaggcaacagctagctggagggtccctcctgcagccaggctgattgtgatctcatggactccctctagtgggcagaccatccccgctgaaaggaggaggctccttggtagacttggatgactaggcagcctctctcccagggacctggctgtttgcaatgtaggcagacatcttggggtgaagggtttcttactctaggttctttaggctgtggtttaaaacaaggagaagatggtccctttggctttggcccctgtaattgttgcaattgaaaagacataagcttattagctttttgtgctttttcttattctggagtcctttgaaaatgctcagctaaagccacgaattcaaccatgtctgtcattccccatccaagttcatgcttcttaatgcaactgctaaattcgggacaacgtttgtttataaatagagcagttaatgccattttagtccctacaggaaattctccttgctgtcttttgagtgcagaatgtttcacaaatagtgtttctaaaccagctctgcaatatgaaatgggtccgtccttttttcacctgcaagactgtctgacagatggatcctttttttgtggagaagacttaggaactgaatttaaaaggttttcagtgttcttccagcttgttgtagcaagaaggttttttaaggtctttaatatcccctcgggttctctctattctgctgctttcatacacctttgagctttaccaagtcccaaaatcaagtgaataaattgataaagtcagaagttcctggatcataagctcctatggggattctaaattcctaggtaaacatttgaggattttctcttgcatcaggaaagtatcttatgaaggctctaagttcagcttcagagcatggagtaaaagtggttacagcaggcaggcctaggtgttcagagggtctcactttgtaagacagttgtccaacctctccttttcattttcctcaagatggaaaggtacttgagcaaaacaatcagtggactcagggtattgaagtaatggcaaagacagcaaggagcagtcagagttaattcaattcaatgagcggcagtcctccttcctctggtcctcagtttgctgattaagctttttatttgtctcctgggaagaaacctttaagtcagacactctttgtttaatcttttacatgtttctgcataccaattaaaaatgcattccgttgttcttgtgggttttttctctttgtatttctaatttttccctgaaaataaacaattttatctaaattaaaacttctcagccaggcacagtggctcatccttgtgatccaagcactttgggaggctgagggggatggatcacttgagaccaggagttcaagacaagcctgggcaacagggtgaaaccccatctctacaaaaaatacaaaaattagctgggggcggggggtggtgtgcacctgtaatctcagctacttgggaggctaagacagaataatcccttgagcccaggaggcagaggttgcagtgagccgagatcgcaccattgcactccagtctgggtaaaaggagtaaaactctgtctcatcaaacaagcaaacaaacttccccactgtggctgctgtaactctaaattatttttggtaaggctcacccatttctccagaaaagccctgattctgggtccatagttcatatacaagaaattgactagagtcccagatgggggagttctaagctcctt

SEQ ID NO: 26505 - DNA, 2293 bp, Homo sapiens
cgcttctgacaccatgttaaaagaaaaacttcagccaaattaaatttaaaaaagtttaattgagcaatgaacgattcacaaattgggcagccctcagaatcacagcagattcagagagactccagggttgcctcgtggacagaacaaatttatagacaaaaaaaaaaaggaagtgacttgcagaaatcagaagtgaggtacagaacagctggaytggttacagctcggcgtttgccttatttgaacacagtttgaacactgagtggtgtatgggtggttgaagtatggctgctgggattggccaggactcagcgattgttacaggtgcatactcctaagttagattttcaatcttgtccacctattaagttaggttgcagttcatccacaaggactcaaacatagaagtacagagtccttctcaagccatatttagtttgctttaacagcttattaaagtggggtttgtgaaagataaagtagccccaatattcaccagcatggtacacgttccctgcttgtcttagcctctgtttctcattatttatcaaaaggcatcacaggcaacagctagctggagggtccctcctgcagccaggctgattgtgatctcatggactccctctagtgggcagaccatccccgctgaaaggaggaggctccttggtagacttggatgactaggcagcctctctcccagggacctggctgtttgcaatgtaggcagacatcttggggtgaagggtttcttactctaggttctttaggctgtggtttaaaacaaggagaagatggtccctttggctttggcccctgtaattgttgcaattgaaaagacataagcttattagctttttgtgctttttcttattctggagtcctttgaaaatgctcagctaaagccacgaattcaaccatgtctgtcattccccatccaagttcatgcttcttaatgcaactgctaaattcgggacaacgtttgtttataaatagagcagttaatgccattttagtccctacaggaaattctccttgctgtcttttgagtgcagaatgtttcacaaatagtgtttctaaaccagctctgcaatatgaaatgggtccgtccttttttcacctgcaagactgtctgacagatggatcctttttttgtggagaagacttaggaactgaatttaaaaggttttcagtgttcttccagcttgttgtagcaagaaggttttttaaggtctttaatatcccctcgggttctctctattctgctgctttcatacacctttgagctttaccaagtcccaaaatcaagtgaataaattgataaagtcagaagttcctggatcataagctcctatggggattctaaattcctaggtaaacatttgaggattttctcttgcatcaggaaagtatcttatgaaggctctaagttcagcttcagagcatggagtaaaagtggttacagcaggcaggcctaggtgttcagagggtctcactttgtaagacagttgtccaacctctccttttcattttcctcaagatggaaaggtacttgagcaaaacaatcagtggactcagggtattgaagtaatggcaaagacagcaaggagcagtcagagttaattcaattcaatgagcggcagtcctccttcctctggtcctcagtttgctgattaagctttttatttgtctcctgggaagaaacctttaagtcagacactctttgtttaatcttttacatgtttctgcataccaattaaaaatgcattccgttgttcttgtgggttttttctctttgtatttctaatttttccctgaaaataaacaattttatctaaattaaaacttctcagccaggcacagtggctcatccttgtgatccaagcactttgggaggctgagggggatggatcacttgagaccaggagttcaagacaagcctgggcaacagggtgaaaccccatctctacaaaaaatacaaaaattagctgggggcggggggtggtgtgcacctgtaatctcagctacttgggaggctaagacagaataatcccttgagcccaggaggcagaggttgcagtgagccgagatcgcaccattgcactccagtctgggtaaaaggagtaaaactctgtctcatcaaacaagcaaacaaacttccccactgtggctgctgtaactctaaattatttttggtaaggctcacccatttctccagaaaagccctgattctgggtccatagttcatatacaagaaattgactagagtcccagatgggggagttctaagctcctt

SEQ ID NO: 26506 - DNA, 2293 bp, Homo sapiens
cgcttctgacaccatgttaaaagaaaaacttcagccaaattaaatttaaaaaagtttaattgagcaatgaacgattcacaaattgggcagccctcagaatcacagcagattcagagagactccagggttgcctcgtggacagaacaaatttatagacaaaaaaaaaaaggaagtgacttgcagaaatcagaagtgaggtacagaacagctggattggttacagctcrgcgtttgccttatttgaacacagtttgaacactgagtggtgtatgggtggttgaagtatggctgctgggattggccaggactcagcgattgttacaggtgcatactcctaagttagattttcaatcttgtccacctattaagttaggttgcagttcatccacaaggactcaaacatagaagtacagagtccttctcaagccatatttagtttgctttaacagcttattaaagtggggtttgtgaaagataaagtagccccaatattcaccagcatggtacacgttccctgcttgtcttagcctctgtttctcattatttatcaaaaggcatcacaggcaacagctagctggagggtccctcctgcagccaggctgattgtgatctcatggactccctctagtgggcagaccatccccgctgaaaggaggaggctccttggtagacttggatgactaggcagcctctctcccagggacctggctgtttgcaatgtaggcagacatcttggggtgaagggtttcttactctaggttctttaggctgtggtttaaaacaaggagaagatggtccctttggctttggcccctgtaattgttgcaattgaaaagacataagcttattagctttttgtgctttttcttattctggagtcctttgaaaatgctcagctaaagccacgaattcaaccatgtctgtcattccccatccaagttcatgcttcttaatgcaactgctaaattcgggacaacgtttgtttataaatagagcagttaatgccattttagtccctacaggaaattctccttgctgtcttttgagtgcagaatgtttcacaaatagtgtttctaaaccagctctgcaatatgaaatgggtccgtccttttttcacctgcaagactgtctgacagatggatcctttttttgtggagaagacttaggaactgaatttaaaaggttttcagtgttcttccagcttgttgtagcaagaaggttttttaaggtctttaatatcccctcgggttctctctattctgctgctttcatacacctttgagctttaccaagtcccaaaatcaagtgaataaattgataaagtcagaagttcctggatcataagctcctatggggattctaaattcctaggtaaacatttgaggattttctcttgcatcaggaaagtatcttatgaaggctctaagttcagcttcagagcatggagtaaaagtggttacagcaggcaggcctaggtgttcagagggtctcactttgtaagacagttgtccaacctctccttttcattttcctcaagatggaaaggtacttgagcaaaacaatcagtggactcagggtattgaagtaatggcaaagacagcaaggagcagtcagagttaattcaattcaatgagcggcagtcctccttcctctggtcctcagtttgctgattaagctttttatttgtctcctgggaagaaacctttaagtcagacactctttgtttaatcttttacatgtttctgcataccaattaaaaatgcattccgttgttcttgtgggttttttctctttgtatttctaatttttccctgaaaataaacaattttatctaaattaaaacttctcagccaggcacagtggctcatccttgtgatccaagcactttgggaggctgagggggatggatcacttgagaccaggagttcaagacaagcctgggcaacagggtgaaaccccatctctacaaaaaatacaaaaattagctgggggcggggggtggtgtgcacctgtaatctcagctacttgggaggctaagacagaataatcccttgagcccaggaggcagaggttgcagtgagccgagatcgcaccattgcactccagtctgggtaaaaggagtaaaactctgtctcatcaaacaagcaaacaaacttccccactgtggctgctgtaactctaaattatttttggtaaggctcacccatttctccagaaaagccctgattctgggtccatagttcatatacaagaaattgactagagtcccagatgggggagttctaagctcctt

SEQ ID NO: 26507 - DNA, 2293 bp, Homo sapiens
cgcttctgacaccatgttaaaagaaaaacttcagccaaattaaatttaaaaaagtttaattgagcaatgaacgattcacaaattgggcagccctcagaatcacagcagattcagagagactccagggttgcctcgtggacagaacaaatttatagacaaaaaaaaaaaggaagtgacttgcagaaatcagaagtgaggtacagaacagctggattggttacagctcggcgtttgccttatttgaacacagtttgaacactgagtggtgtatgggtggttgaagtatggctgctgggattggccaggactcagcgattgttacaggtgcatactcctaagttagattttcaatcttgtccacctattaagttaggttgcagttcatccacaaggactcaaacatagaagtacagagtccttctcaagccatatttagtttgctttaacagcttattaaagtggggtttgtgaaagataaagtagccccaatattcaccagcatggtacacgttccctgcttgtcttagcctctgtttctcattatttatcaaaaggcatcacaggcaacagctagctggagggtccctcctgcagccaggctgattgtgatctcatggactccctctagtgggcagaccatccccgctgaaaggaggaggctccttggtagacttggatgactaggyagcctctctcccagggacctggctgtttgcaatgtaggcagacatcttggggtgaagggtttcttactctaggttctttaggctgtggtttaaaacaaggagaagatggtccctttggctttggcccctgtaattgttgcaattgaaaagacataagcttattagctttttgtgctttttcttattctggagtcctttgaaaatgctcagctaaagccacgaattcaaccatgtctgtcattccccatccaagttcatgcttcttaatgcaactgctaaattcgggacaacgtttgtttataaatagagcagttaatgccattttagtccctacaggaaattctccttgctgtcttttgagtgcagaatgtttcacaaatagtgtttctaaaccagctctgcaatatgaaatgggtccgtccttttttcacctgcaagactgtctgacagatggatcctttttttgtggagaagacttaggaactgaatttaaaaggttttcagtgttcttccagcttgttgtagcaagaaggttttttaaggtctttaatatcccctcgggttctctctattctgctgctttcatacacctttgagctttaccaagtcccaaaatcaagtgaataaattgataaagtcagaagttcctggatcataagctcctatggggattctaaattcctaggtaaacatttgaggattttctcttgcatcaggaaagtatcttatgaaggctctaagttcagcttcagagcatggagtaaaagtggttacagcaggcaggcctaggtgttcagagggtctcactttgtaagacagttgtccaacctctccttttcattttcctcaagatggaaaggtacttgagcaaaacaatcagtggactcagggtattgaagtaatggcaaagacagcaaggagcagtcagagttaattcaattcaatgagcggcagtcctccttcctctggtcctcagtttgctgattaagctttttatttgtctcctgggaagaaacctttaagtcagacactctttgtttaatcttttacatgtttctgcataccaattaaaaatgcattccgttgttcttgtgggttttttctctttgtatttctaatttttccctgaaaataaacaattttatctaaattaaaacttctcagccaggcacagtggctcatccttgtgatccaagcactttgggaggctgagggggatggatcacttgagaccaggagttcaagacaagcctgggcaacagggtgaaaccccatctctacaaaaaatacaaaaattagctgggggcggggggtggtgtgcacctgtaatctcagctacttgggaggctaagacagaataatcccttgagcccaggaggcagaggttgcagtgagccgagatcgcaccattgcactccagtctgggtaaaaggagtaaaactctgtctcatcaaacaagcaaacaaacttccccactgtggctgctgtaactctaaattatttttggtaaggctcacccatttctccagaaaagccctgattctgggtccatagttcatatacaagaaattgactagagtcccagatgggggagttctaagctcctt

SEQ ID NO: 26508 - DNA, 2293 bp, Homo sapiens
cgcttctgacaccatgttaaaagaaaaacttcagccaaattaaatttaaaaaagtttaattgagcaatgaacgattcacaaattgggcagccctcagaatcacagcagattcagagagactccagggttgcctcgtggacagaacaaatttatagacaaaaaaaaaaaggaagtgacttgcagaaatcagaagtgaggtacagaacagctggattggttacagctcggcgtttgccttatttgaacacagtttgaacactgagtggtgtatgggtggttgaagtatggctgctgggattggccaggactcagcgattgttacaggtgcatactcctaagttagattttcaatcttgtccacctattaagttaggttgcagttcatccacaaggactcaaacatagaagtacagagtccttctcaagccatatttagtttgctttaacagcttattaaagtggggtttgtgaaagataaagtagccccaatattcaccagcatggtacacgttccctgcttgtcttagcctctgtttctcattatttatcaaaaggcatcacaggcaacagctagctggagggtccctcctgcagccaggctgattgtgatctcatggactccctctagtgggcagaccatccccgctgaaaggaggaggctccttggtagacttggatgactaggcagcctctctcccagggacctggctgtttgcaatgtaggcagacatcttggggtgaagggtttcttactctaggttctttaggctgtggtttaaaacaaggagaagatggtccctttggctttggcccctgtaattgttgcaattgaaaagacataagcttattagctttttgtgctttttcttattctggagtcctttgaaaatgctcagctaaagccacgaattcaaccatgtctgtcattccccatccaagttcatgcttcttaatgcaactgctaaattcgggacaacgtttgtttataaatagagcagttaatgccattttagtccctacaggaaattctccttgctgtcttttgagtgcagaatgtttcacaaatagtgtttctaaaccagctctgcaatatgaratgggtccgtccttttttcacctgcaagactgtctgacagatggatcctttttttgtggagaagacttaggaactgaatttaaaaggttttcagtgttcttccagcttgttgtagcaagaaggttttttaaggtctttaatatcccctcgggttctctctattctgctgctttcatacacctttgagctttaccaagtcccaaaatcaagtgaataaattgataaagtcagaagttcctggatcataagctcctatggggattctaaattcctaggtaaacatttgaggattttctcttgcatcaggaaagtatcttatgaaggctctaagttcagcttcagagcatggagtaaaagtggttacagcaggcaggcctaggtgttcagagggtctcactttgtaagacagttgtccaacctctccttttcattttcctcaagatggaaaggtacttgagcaaaacaatcagtggactcagggtattgaagtaatggcaaagacagcaaggagcagtcagagttaattcaattcaatgagcggcagtcctccttcctctggtcctcagtttgctgattaagctttttatttgtctcctgggaagaaacctttaagtcagacactctttgtttaatcttttacatgtttctgcataccaattaaaaatgcattccgttgttcttgtgggttttttctctttgtatttctaatttttccctgaaaataaacaattttatctaaattaaaacttctcagccaggcacagtggctcatccttgtgatccaagcactttgggaggctgagggggatggatcacttgagaccaggagttcaagacaagcctgggcaacagggtgaaaccccatctctacaaaaaatacaaaaattagctgggggcggggggtggtgtgcacctgtaatctcagctacttgggaggctaagacagaataatcccttgagcccaggaggcagaggttgcagtgagccgagatcgcaccattgcactccagtctgggtaaaaggagtaaaactctgtctcatcaaacaagcaaacaaacttccccactgtggctgctgtaactctaaattatttttggtaaggctcacccatttctccagaaaagccctgattctgggtccatagttcatatacaagaaattgactagagtcccagatgggggagttctaagctcctt

SEQ ID NO: 26509 - DNA, 2293 bp, Homo sapiens
cgcttctgacaccatgttaaaagaaaaacttcagccaaattaaatttaaaaaagtttaattgagcaatgaacgattcacaaattgggcagccctcagaatcacagcagattcagagagactccagggttgcctcgtggacagaacaaatttatagacaaaaaaaaaaaggaagtgacttgcagaaatcagaagtgaggtacagaacagctggattggttacagctcggcgtttgccttatttgaacacagtttgaacactgagtggtgtatgggtggttgaagtatggctgctgggattggccaggactcagcgattgttacaggtgcatactcctaagttagattttcaatcttgtccacctattaagttaggttgcagttcatccacaaggactcaaacatagaagtacagagtccttctcaagccatatttagtttgctttaacagcttattaaagtggggtttgtgaaagataaagtagccccaatattcaccagcatggtacacgttccctgcttgtcttagcctctgtttctcattatttatcaaaaggcatcacaggcaacagctagctggagggtccctcctgcagccaggctgattgtgatctcatggactccctctagtgggcagaccatccccgctgaaaggaggaggctccttggtagacttggatgactaggcagcctctctcccagggacctggctgtttgcaatgtaggcagacatcttggggtgaagggtttcttactctaggttctttaggctgtggtttaaaacaaggagaagatggtccctttggctttggcccctgtaattgttgcaattgaaaagacataagcttattagctttttgtgctttttcttattctggagtcctttgaaaatgctcagctaaagccacgaattcaaccatgtctgtcattccccatccaagttcatgcttcttaatgcaactgctaaattcgggacaacgtttgtttataaatagagcagttaatgccattttagtccctacaggaaattctccttgctgtcttttgagtgcagaatgtttcacaaatagtgtttctaaaccagctctgcaatatgaaatgggtccgtccttttttcacctgcaagactgtctgacagatggatcctttttttgtggagaagacttaggaactgaatttaaaaggttttcagtgttcttccagcttgttgtagcaagaaggttttttaaggtctttaatatcccctcgggttctctctattctgctgctttcatacacctttgagctttaccaagtcccaaaatcaagtgaataaattgataaagtcagaagttcctggatcataagctcctatggggattctaaattcctaggtaaacatttgaggattttctcttgcatcaggaaagtatcttatgaaggctctaagttcagcttcagagcatggagtaaaagtggttacagcaggcaggcctaggtgttcagagggtctcactttgtaagacagttgtccaacctctccttttcattttcctcaagatggaaaggtacttgagcaaaacaatcagtggactcagggtattgaagtaatggcaaagacagcaaggagcagtcagagttaattcaattcaatgagcggcagtcctccttcctctggtcctcagtttgctgattaagctttttatttgtctcctgggaagaaacctttaagtcagacactctttgtttaatcttttacatgtttctgcataccaattaaaaatgcattccgttgttcttgtgggttttttctctttgtatttctaatttttccctgaaaataaacaattttatctaaattaaaacttctcagccrggcacagtggctcatccttgtgatccaagcactttgggaggctgagggggatggatcacttgagaccaggagttcaagacaagcctgggcaacagggtgaaaccccatctctacaaaaaatacaaaaattagctgggggcggggggtggtgtgcacctgtaatctcagctacttgggaggctaagacagaataatcccttgagcccaggaggcagaggttgcagtgagccgagatcgcaccattgcactccagtctgggtaaaaggagtaaaactctgtctcatcaaacaagcaaacaaacttccccactgtggctgctgtaactctaaattatttttggtaaggctcacccatttctccagaaaagccctgattctgggtccatagttcatatacaagaaattgactagagtcccagatgggggagttctaagctcctt

SEQ ID NO: 26510 - DNA, 2293 bp, Homo sapiens
cgcttctgacaccatgttaaaagaaaaacttcagccaaattaaatttaaaaaagtttaattgagcaatgaacgattcacaaattgggcagccctcagaatcacagcagattcagagagactccagggttgcctcgtggacagaacaaatttatagacaaaaaaaaaaaggaagtgacttgcagaaatcagaagtgaggtacagaacagctggattggttacagctcggcgtttgccttatttgaacacagtttgaacactgagtggtgtatgggtggttgaagtatggctgctgggattggccaggactcagcgattgttacaggtgcatactcctaagttagattttcaatcttgtccacctattaagttaggttgcagttcatccacaaggactcaaacatagaagtacagagtccttctcaagccatatttagtttgctttaacagcttattaaagtggggtttgtgaaagataaagtagccccaatattcaccagcatggtacacgttccctgcttgtcttagcctctgtttctcattatttatcaaaaggcatcacaggcaacagctagctggagggtccctcctgcagccaggctgattgtgatctcatggactccctctagtgggcagaccatccccgctgaaaggaggaggctccttggtagacttggatgactaggcagcctctctcccagggacctggctgtttgcaatgtaggcagacatcttggggtgaagggtttcttactctaggttctttaggctgtggtttaaaacaaggagaagatggtccctttggctttggcccctgtaattgttgcaattgaaaagacataagcttattagctttttgtgctttttcttattctggagtcctttgaaaatgctcagctaaagccacgaattcaaccatgtctgtcattccccatccaagttcatgcttcttaatgcaactgctaaattcgggacaacgtttgtttataaatagagcagttaatgccattttagtccctacaggaaattctccttgctgtcttttgagtgcagaatgtttcacaaatagtgtttctaaaccagctctgcaatatgaaatgggtccgtccttttttcacctgcaagactgtctgacagatggatcctttttttgtggagaagacttaggaactgaatttaaaaggttttcagtgttcttccagcttgttgtagcaagaaggttttttaaggtctttaatatcccctcgggttctctctattctgctgctttcatacacctttgagctttaccaagtcccaaaatcaagtgaataaattgataaagtcagaagttcctggatcataagctcctatggggattctaaattcctaggtaaacatttgaggattttctcttgcatcaggaaagtatcttatgaaggctctaagttcagcttcagagcatggagtaaaagtggttacagcaggcaggcctaggtgttcagagggtctcactttgtaagacagttgtccaacctctccttttcattttcctcaagatggaaaggtacttgagcaaaacaatcagtggactcagggtattgaagtaatggcaaagacagcaaggagcagtcagagttaattcaattcaatgagcggcagtcctccttcctctggtcctcagtttgctgattaagctttttatttgtctcctgggaagaaacctttaagtcagacactctttgtttaatcttttacatgtttctgcataccaattaaaaatgcattccgttgttcttgtgggttttttctctttgtatttctaatttttccctgaaaataaacaattttatctaaattaaaacttctcagccaggcacmgtggctcatccttgtgatccaagcactttgggaggctgagggggatggatcacttgagaccaggagttcaagacaagcctgggcaacagggtgaaaccccatctctacaaaaaatacaaaaattagctgggggcggggggtggtgtgcacctgtaatctcagctacttgggaggctaagacagaataatcccttgagcccaggaggcagaggttgcagtgagccgagatcgcaccattgcactccagtctgggtaaaaggagtaaaactctgtctcatcaaacaagcaaacaaacttccccactgtggctgctgtaactctaaattatttttggtaaggctcacccatttctccagaaaagccctgattctgggtccatagttcatatacaagaaattgactagagtcccagatgggggagttctaagctcctt

SEQ ID NO: 26511 - DNA, 553 bp, Homo sapiens
gcagatcacctgaggtcaggagttcaagaccagcctgggccatcatggtgaaacctcgtctctactaaaaatacaaaaattagccgggtgcggtggccggttcctgtaatctcagctactcaggaggctgagacaggagaatcacttgaacctgggaagtgacggttgcagtgagccgagaccgcaccactgcactccagtttgggggacagagtgagactccatctcaaaaataaataaataaatwaattaattaattaattgatccctacatacatgagtttatctgtaagataaattctattaataataagtgaaactgctaaatcagggcaggtgcagtagctcatgcctgtaatcccagcactttgggaggccgaggcaggaggaacgctttaagccaggagtttaagaccagcctggacaacaaagtgagaccctgtctctaaagaaaaataaaaagatcaattgggtgtgatagcatgcacctgcagtcccagctgagacaggattgcttgagcgcaggagttggaggctgcagtgagctatgatt

SEQ ID NO: 26512 - DNA, 977 bp, Homo sapiens
tattatgcatccaggatggagaacgacttgtctcacaggccaactccttagaaagagcctcaccacagtcacacttaggataaaggcacattgattagactcttctcctataacaaagtagagacttttgtcatctgtatagtgtgacagctgcagttgcataaaacacacttaaaattatttgrcagaatatgagaatgatgggagggttgtttaatgagaagggaatggaggtgattagagcgagacctggagagtgctttaaaagaggggataatgacatggaagatttatttctggtccacaagaggcacttgtggtggctttctgatgctgagactcagcaataattaaaagacttgggctggcactatctggtaaactaagtgtttgtagcatccatctaaggcagcctgtggcggatatctctgggccaccctgatggactagaatcctccagcccaggacctatgggagctgtccagggagttgggaagtatgctcctcgccaggaggcaccaggtccacaaacactgaactgctattgatgagcaaagagtgatggtcacttccaacctcctccatccctctttggttcagcttttttaacattggctcaaaggtttttctttcctctcttatggaaagcttttccagcactgatttggcacattcagcctcactagtcaattctaggcactctgaggtttccttgattatctctgttgggtcttgtggctgcctatctgccttgagagactagagaaaggaaagaaaatcaattaaatttagtacacattgtctgagcatctactccgtgccacaaaccgtgattggcaccagagctacatagatgagcaagacaaaaatcctcgcccttcccaactgttgtgagtcagcccagtgagtctctgccaggcatcaagagctgtgaaggctacagggaagacagcaattcattccacccaagggctcgg

SEQ ID NO: 26513 - DNA, 977 bp, Homo sapiens
tattatgcatccaggatggagaacgacttgtctcacaggccaactccttagaaagagcctcaccacagtcacacttaggataaaggcacattgattagactcttctcctataacaaagtagagacttttgtcatctgtatagtgtgacagctgcagttgcataaaacacacttaaaattatttggcagaatatgagaatgatgggagggttgtttaatgagaagggaatggaggtgattagagcgagacctggagagtgctttaaaagaggggataatgacatggaagatttatttctggtccacaagaggcacttgtggtggctttctgatgctgagactcagcaataattaaaagacttgggctggcactatctggtaaactaagtgtttgtagcatccatctaaggcagcctgtggcggatatctctgggccaccctgatggactagaatcctccagcccaggacctatgggagctgtccagggagttgggaagtatgctcctcgccaggaggcaccaggtccacaaacactgaactgctattgatgagcaaagagtgatggtcacttccaacctcctccatccctctttggttcagcttttttaacattggctcaaaggtttttctttcctctcttatggaaagcttttccagcactgatttggcacattcagcctcactagtcaattctaggcactctgaggtttccttgattatctctgttgggtcttgtggctgcctatctgccttgagagactagagaaaggaaagaaaatcaattaaatttagtacacattgtctgagcatctactccgtgccacaaaccgtgattggcaccagagctacatagatgagcaagacaaaaatcctcgcccttcccaactgttgtgagtcagcccagtgagtctctgccaggcatcaagagctgtgaaggctacagggaagacagcaaktcattccacccaagggctcgg

SEQ ID NO: 26514 - DNA, 798 bp, Homo sapiens
cctagcaccatcatgggtttcctcactcagaagcgggatgacagcctgttccctgaagcgtcttggggcccacagcaaccattcttgtttcagaggaggaaacagaggcttggaggcttggtaacataagcagagtcacacagccacgyagggacagccccatttgagactcctcagaggtgctctcctggctccctcagctcctgtcaacctgggaacagtcacaagggtccccgagactcatggcaaagaccaagctcctcaaaacaggcccctgttggctcagggcagaagcccattctggggaacgggtgggatcagttctgtccgagttcagaaagggaaagtgagtgctggccaggctggggcggacagaacacttcgacgggctccggagcccagattcagccaggaacccacaggcaactcggcctacccccagctgaggccctttttggacccgcaggggagagatcttaaacccagcgctttggtcccacccacccgctcccacactgggaggagaccatggctccacacacagcccctgccaggcccacaggggcgggcatgggggcccacctgcctcctgcatgtgtggacagggtcctggagagtgaggagggccgcagggagtacctggcgtttcccaccagcaagagctcgggccagaaggggcggaaggagctgctgaagggcaacggccggcgcatcgactacatgctgcatgcagaggaggggctgtgcccagactggaaggccgtgagtcaggagggcccagcagccagggccatgcaa

SEQ ID NO: 26515 - DNA, 798 bp, Homo sapiens
cctagcaccatcatgggtttcctcactcagaagcgggatgacagcctgttccctgaagcgtcttggggcccacagcaaccattcttgtttcagaggaggaaacagaggcttggaggcttggtaacataagcagagtcacacagccacgtagggacagccccatttgagactcctcrgaggtgctctcctggctccctcagctcctgtcaacctgggaacagtcacaagggtccccgagactcatggcaaagaccaagctcctcaaaacaggcccctgttggctcagggcagaagcccattctggggaacgggtgggatcagttctgtccgagttcagaaagggaaagtgagtgctggccaggctggggcggacagaacacttcgacgggctccggagcccagattcagccaggaacccacaggcaactcggcctacccccagctgaggccctttttggacccgcaggggagagatcttaaacccagcgctttggtcccacccacccgctcccacactgggaggagaccatggctccacacacagcccctgccaggcccacaggggcgggcatgggggcccacctgcctcctgcatgtgtggacagggtcctggagagtgaggagggccgcagggagtacctggcgtttcccaccagcaagagctcgggccagaaggggcggaaggagctgctgaagggcaacggccggcgcatcgactacatgctgcatgcagaggaggggctgtgcccagactggaaggccgtgagtcaggagggcccagcagccagggccatgcaa

SEQ ID NO: 26516 - DNA, 798 bp, Homo sapiens
cctagcaccatcatgggtttcctcactcagaagcgggatgacagcctgttccctgaagcgtcttggggcccacagcaaccattcttgtttcagaggaggaaacagaggcttggaggcttggtaacataagcagagtcacacagccacgtagggacagccccatttgagactcctcagaggtgctctcctggctccctcagctcctgtcaacctgggaacagtcacaagggtccycgagactcatggcaaagaccaagctcctcaaaacaggcccctgttggctcagggcagaagcccattctggggaacgggtgggatcagttctgtccgagttcagaaagggaaagtgagtgctggccaggctggggcggacagaacacttcgacgggctccggagcccagattcagccaggaacccacaggcaactcggcctacccccagctgaggccctttttggacccgcaggggagagatcttaaacccagcgctttggtcccacccacccgctcccacactgggaggagaccatggctccacacacagcccctgccaggcccacaggggcgggcatgggggcccacctgcctcctgcatgtgtggacagggtcctggagagtgaggagggccgcagggagtacctggcgtttcccaccagcaagagctcgggccagaaggggcggaaggagctgctgaagggcaacggccggcgcatcgactacatgctgcatgcagaggaggggctgtgcccagactggaaggccgtgagtcaggagggcccagcagccagggccatgcaa

SEQ ID NO: 26517 - DNA, 798 bp, Homo sapiens
cctagcaccatcatgggtttcctcactcagaagcgggatgacagcctgttccctgaagcgtcttggggcccacagcaaccattcttgtttcagaggaggaaacagaggcttggaggcttggtaacataagcagagtcacacagccacgtagggacagccccatttgagactcctcagaggtgctctcctggctccctcagctcctgtcaacctgggaacagtcacaagggtccccgagactcatggcaaagaccaagctcctcaaaacaggcccctgttggctcagggcagaagcccattctggggaacgggtggratcagttctgtccgagttcagaaagggaaagtgagtgctggccaggctggggcggacagaacacttcgacgggctccggagcccagattcagccaggaacccacaggcaactcggcctacccccagctgaggccctttttggacccgcaggggagagatcttaaacccagcgctttggtcccacccacccgctcccacactgggaggagaccatggctccacacacagcccctgccaggcccacaggggcgggcatgggggcccacctgcctcctgcatgtgtggacagggtcctggagagtgaggagggccgcagggagtacctggcgtttcccaccagcaagagctcgggccagaaggggcggaaggagctgctgaagggcaacggccggcgcatcgactacatgctgcatgcagaggaggggctgtgcccagactggaaggccgtgagtcaggagggcccagcagccagggccatgcaa

SEQ ID NO: 26518 - DNA, 550 bp, Homo sapiens
tgaggccaggagtttgagatcagcctggccaacatagtgaaacctcatctctactaaaaacacaaaaattagccaggtgtggtrgcacacgcctatagtcccaactacttgggaggctgacgcaggagaatcactcaaacccaggaggcggaggttgtagcgagccaaaatcgcaccactgtactctagcatgggcaacaaagcaagacaccatctctggggggggagggaaatttgcaggagtttaagtacgacacagctgcactaaagctatttaaatcaacatcaactctaaacatttcttattggtagtagaattttggctgggttttagtggcttggtttaactaaatcacaaagtcagtagacaggaaaggtgtgagagggagagaaatggaaaacaaaagtaccacaaaatggctgggcacggtggctcacacctgtaatcccagcactttgggagggtgaggcaggtggatcacaaggtcaggagttccagaccagcctggccaagatggtgaaaccccgtctctactaaaaatacgaaaat

SEQ ID NO: 26519 - DNA, 550 bp, Homo sapiens
tgaggccaggagtttgagatcagcctggccaacatagtgaaacctcatctctactaaaaacacaaaaattagccaggtgtggtggcacacgcctatagtcccaactacttgggaggctgacgcaggagaatcactcaaacccaggaggcggaggttgtagcgagccaaaatcgcaccactgtactctagcatgggcaacaaagcaagacaccatctctggggggggagggaaayttgcaggagtttaagtacgacacagctgcactaaagctatttaaatcaacatcaactctaaacatttcttattggtagtagaattttggctgggttttagtggcttggtttaactaaatcacaaagtcagtagacaggaaaggtgtgagagggagagaaatggaaaacaaaagtaccacaaaatggctgggcacggtggctcacacctgtaatcccagcactttgggagggtgaggcaggtggatcacaaggtcaggagttccagaccagcctggccaagatggtgaaaccccgtctctactaaaaatacgaaaat

SEQ ID NO: 26520 - DNA, 507 bp, Homo sapiens
catttgtactccaagcctcaacaacacacaatttatccatataagagacctgcacatgtacccccagaacctaaaataaaagtagaagaagataaaaaataaaaaacataaactcaggtgaacctgatggacagtgggttgttccctcccaattttccccttttctgcttagttgttctgagcacaagttattcctattcatttggtgaggattccaccacttgcaaccattgtgcctgggaagagacaaacacacttttgaatcataaacgtgtaaacctaaacttaaaatattgtaacatcagaaaaggtcaagggtcgaggctatttcaactctagtatgctgtcagccaaaggggaatctggtttctacccttggaaaggtcgttctatcccagagcatctctgctgtctggacaacatttgtgccaagcaacctccctagwgtgaaaagcaccaggactcccctgaggcccatgaaccaaatgtttttgtgcctgaaatctc

SEQ ID NO: 26521 - DNA, 575 bp, Homo sapiens
cttcagaagcctctgaaataatcagaacaaggcattcagtaaaatcactccaagtcctcactgtaccctgggccaaaaatttatcctgattgtattttccatctcaaatttcaagccacactgtccaatatagctcagtagaggaagctgtgccacaaacatcacatgacagcataaaaataccccaatgagcacaataccagcaacttaaaaataccctgaacttcagccttctggagccctctcctttattaaattctaggaggaaaatcaaagttcaaaaccagagctcccttccctttgcaaatcaaaatccaaagaaatgaaaggcctttcctccctgagacttggagtcyccctcgtctcaaccagggtagcttccctgctggagtctgagtgtctcctttgggagcagctgctcactgcgtgtctacccagaatgggtgtgactcctgaagcaacaaggaggtcggacttatccaatcccaaggccctcatgtgtcctggtttgcaagggatatgaaagtcaatagggtacacaagaatatcgcagccccagccccaaacctaccaaa

SEQ ID NO: 26522 - DNA, 575 bp, Homo sapiens
cttcagaagcctctgaaataatcagaacaaggcattcagtaaaatcactccaagtcctcactgtaccctgggccaaaaatttatcctgattgtattttccatctcaaatttcaagccacactgtccaatatagctcagtagaggaagctgtgccacaaacatcacatgacagcataaaaataccccaatgagcacaataccagcaacttaaaaataccctgaacttcagccttctggagccctctcctttattaaattctaggaggaaaatcaaagttcaaaaccagagctcccttccctttgcaaatcaaaatccaaagaaatgaaaggcctttcctccctgagacttggagtctccctcgtctcaaccagggtagcttccctgctggagtctgagtgtctcctttgggagcagctgctcactgcgtgtctacccagaatgggtgtgactcctgaagcaacaaggaggtcggacttatccaatcccaaggccctcatgtgtcctggtttgcaagggatatgaaagtcaatagggtacacaagaatatcgcagccccagccccaaamctaccaaa

SEQ ID NO: 26523 - DNA, 530 bp, Homo sapiens
ggtagatggatacataaatacacacagtttatatgtgtgtgtgcatatatgtagaagaaatgtacaaatgtactctaaaataatgaaaaattatagtatagtaagtacataaaccagtaacatagtcatctattatcattaagtactatgtactactcataattatatatgttataattttatatgtctggcagcaaagtagatttgtttacatcagcatcaccacaaatatgtgagtaatgtgttgcactaggcgataaaaactttttagttttattataatcttatggaactacmattatatatgtaccttcattgttgactgaaatgttatttcagtcaacatgtatacagtgcatgactctatacaaatatagattttcatatataaactttacataaattggcttatatgctcacttttaaaatcaagtaattattgaactctgtttggatttttgtgtacctctcccctattccaatagacacatcttatatagccaatatattaacagcttacctaaatattc

SEQ ID NO: 26524 - DNA, 552 bp, Homo sapiens
ggcacttcactgttctattttgagaactgcaatggtgtaggacaaagaatattggaccttatttgtctcccatctctgccacttacgagccttgtaaatgtaccacttaagtttttagaacctctgttgcttggaatggagataattgatcggctgtggtgatgatcaaattagatgatatatttgtacacatttagttaatggctgytatcactagataacatactctctagtagacgtattcagatggagcttttaatttgctgccaatccgtggctttgggttgcttctacatattgattcaagtacagccattgcttcaataattttaagctggctgcaagttagcaaaagtcagtttttttttcagatagatgttagtgtttagtatctagcaaaaacacagtctagaaatctaaggaaacagaattcctagcttccatacctatatttcattaacttgccgtgaaaccttgagataatcttaaaatttgctgcacctcaattatttcacctaagaaatgggtcttctctacccaagaacacaatgt

SEQ ID NO: 26525 - DNA, 475 bp, Homo sapiens
ctttaaataggattttgaaataaagagtattttatgaaattttcaaacaacggcaatattcccacaggagctatagtactcttaaagccactgtcacatttttctaaatttaattcatactcattctttctggattattaaaaacaatggcactttgattttaattaaacacttcatttgaaagccatgactaataaatgtcaaatgctaaaggtgaatttatgttaaatggatatcagaagatttttcatagcatgaaaggaattcaggtctgagggtttttagttttacaatcaccaataaggagcacagacaagaaaggtaaaattaactacctcaatctagatgcttgtgttaatttattttcatgttgggaatcagtgagctcaacaatgggttcagtgggtgaggcattccttaattctctaagcctcaaaagacatttttttwaaaaattaggtttgttgcttacatg

SEQ ID NO: 26526 - DNA, 556 bp, Homo sapiens
  misc_feature (1)...(556): n = A,T,C or G
gtttggaagaaggaatagtacttccaggtaaagaaggcggaaaagctgaaaacacaaaagacaattgaccttgtccttggagaacaggtaaaataagaacaagacaggaccgtggcattcctagtgagagaaatggcataagaaaaagtgtggagtcaggaaaatgtgtgatgtttatagaaacattgagtggttcagtttggctggaaatatacgagcattcatcaaaacctcttttatttagccagtgattactccatgcttgttcaagtactcattccaaagctgttagcacatttacagatgaaacagagagatcgagaggttcctccanaatcacacagaaaacctccagggcatgacacatacaagtcaatcccattttcttttggaagctagatgctgctgactcttcaaaacaakttttgccatccttgagaaataagaatgcttttatctctgtttttcagtttaactgtctttgaaaaagccactatttcttcaataaatggaagaaatgtattaggccctaatttttagtgaacatacatgtagg

SEQ ID NO: 26527 - DNA, 532 bp, Homo sapiens
atgacagtgggacctattagtcactaagtgtcatgtataatgtaaccattgctctaggagcttttatgctttggccctgcagtgcagagggccttgtgacaagtaaagccagaagtcaaggatgctaaggagacacaggctaaaagagttctccagcctcccttggaatctagtaaygctgagaaacctgagactcttttttgtgagacagagtcttgctctgttgcccaggctggagggaagtggcacgatcttggttcactacaccccaccacctcccgggttcaagtgattctcctgccttagcctcgagtagctgggactacaggtgtgcaccactatgcctggctaatttctgtattttgagtagagatgaggtttcaccatgttgcccaggctggtctcgacctcccgggcacaagtgatcctcctgcctcggcctcccaaagtgctgggatcacaggcgtgagccaccatgccagctagatacttgagactcttgaagaaactcttgggtttgtaaatacaggga

SEQ ID NO: 26528 - DNA, 507 bp, Homo sapiens
gaaagtataaataayctgtggaacaatcacataatgcaaagctttacagaaaggagagtgaatgattgacaactatacttaatatggatgaatctcccaatgttcagcaacataaataaacacaaaagtatatacaccatgtgaacccctgtatataaagtagaaaaatgggcaaaccaaactatgttgttaaaagtcagaagactggttatccttggtcaataatgtggctggaagatagcttgggggtacttttagggagactgataatgtaacttttattaaacctatgggtgatggttatatggatgtatttactttgagaaaacatgttcttcaattatgacatgtatactgtgcgtgtgtgtgtgtatatatatatatatataaaatacttcaataaaattttcaaaagtcaaatgacataatgtgttcaccacagaacaaagcagctattcaacaaacatatattgaatggaggaaataaagctaaatattgttttatct

SEQ ID NO: 26529 - DNA, 487 bp, Homo sapiens
atctttccaacaaccctatgaaacaagcataattttgcctccatttaaggccaggaaactaagacctaaagaggtgaagcagtgggctccrtattaaacagtcaaaaataagtaagcagaattgggattatgaactggttctggctgaccatgaagctggtgttcttaacctctcttctttgcagcacactagtcagcagcacacaatgtgctgcaaagaagagctgaaattgctctgcttgctgagggctggatactggcctttacccacagggactggtccctcagggcagatgtaggcagagccactccctgccaggaaagcatggcttggcgacacttgcaaaccctcaggagatggtcttgccttctgatgacttccatttcctttatctgctacagtaacaatgcagccaccagactccccacaaagcatcaggattctcccactatgcttgtgacatatacagaaatgtctgccccttca

SEQ ID NO: 26530 - DNA, 1039 bp, Homo sapiens
tgcataaccacctcctggattaagaagttaaatgttacgagcaccctagggccacttctgtgcccctcatcacaacacccttcctcactatcctgaacaccatagatttattttgcctatttttgatgcttctaaaactggaatcatatagtatgtactccttcgggtatggctgcttttcagttcactgtatgtgtttgagatttacttaggatgttgagtgtaactgttccttttcattgctgtacaatattcactgtatgcttatgctataatattttttatccattctggtgttgatggacatgagttgctgaacatatgcatgtatatatctcttggttaggtagctaagagtgtaattgttggatcataaattatatttacttatgtctagtagatattgccacactgtatttcagagtggttctgcgtgttcataagtttggattaatgggagttggttcctaaatttgtatacaaaaacatttatacacacacaaagcacactatatatgcatgtataaatgtgtatatattaatagataccatcatacctacatacagttcatcctcttatgaaacctttttttctgggatgggtaaatgtttgatccttaactatggtacatgttttcagggactgttccatatatgacactgatttgcttagtaggatcattttgtacacctctttcacttgcccccgatgagccatattaaaaatcacctgggctgggctcagtgactcacgcctgtaatcccagcactttgggaggccacagtgggtggatcgcttgagcccaggagtttgagaccagcatgggcmtcatggaaaaaccctgtctctactaaaaaaaatacaaaaaattagccaggcattgtggcacacacctgtagttccagctacccgggaggctgaggtgagagcctcagagcctgggaagtcaaggctacagtgagccgtgattgcaccactgcattccagcctaggcgacagagtgagaccctatctcaaaaaaagaaaaaaaaaatcacc

SEQ ID NO: 26531 - DNA, 853 bp, Homo sapiens
tcaggttttactgccagcaacacctcaatttagtggaatctggactgtaatcatcttggtgatttgtaaagctgtttttcttgtcaatctttaccatttctggcatcaaaaagatggaagtattttgagagtctttgtgatgctcctggactctagtacgtgcttgggttcaagtcccagctctgtcacttttgatttgggtatcccgggggaagttataacttctctgtgctttggtgtctttatctgtatgatagggatgacgataaagcctttcgtaaaggttggttttgaggattaaaataagtctatgtctaaagcatttaaaactgttctatcacataagcgtttagttaattttaactgcttttttttcttttttttttttgagacggagtcttgctctgttgcccaggctggagtgcagtggcacgattttggctcactgcaacctctgcctcccgggttcaagcaattctcctgcctcagcttcccaagtagcttgggactacaggcgtgcaccaccacgtctagctaatttttgtattatttagtagagcggggtttcactatatgttggccaggctggtctcgagctcctgacctctagtgacccacctgccttggcctcccaaagtgctgggattacaggcttgagccaccgtgcccggtcctaattttaactttttattggcacctgtcatacagtgtttattcttctgtccttattctctagcctagggtgagaaaaattccagtctttatccttaccttgttaaacwttgctagagtcaccatggtatttgcttcaacacctaggacacaatatctgaatccttctcaacattataat

SEQ ID NO: 26532 - DNA, 635 bp, Homo sapiens
tcttttcccctacgttgacgtcatctcttctgtttcctgagagattagaagagggtgtcccagctgaaagtcatgctatgaaggaagattgtcatggaaaatacctacagctgttgcacaaatctttgcttttatcccagcaattcctgttagcacctttcacagcttttacctaaatgttattaattcttaaggcctcttaattttagctaagtaatgtcagtatgtaatgaaaatcccattttcttccttaaatggtggcctacctcatggtgaaatgtacatttctagaacactgaagctagtagaggactttgagatcttttactccascctctttcctcttagagatgcgaaagccaagacccattgtgtgaattccagagttctttaggccaggggtgtttgtggtaaaaaccagcatggggatgaaaaagagtaaagcaaacagagtgagagaaggagtcactcctaagcagcactcaaaagtattcattgacaagttccattgagaaatagcaacagcaataacaagggcatcactgtggtatggaagagagacttcttctaagtagaggtggagttaggttgtactacaaatgagaaagggaagtctggatcacctggttcttctt

SEQ ID NO: 26533 - DNA, 1938 bp, Homo sapiens
tctagacaactgtctgatcatctttataggtaaggccatcaaggctcagagacttgctcaagatcacccagctggaaagtggcaagtctggctggctccaagcactgtgtgctttctggaatagtgggtgcccccagccacagagccrtaccacccaacttctcagccttccaaagagagctgccctgaggacccaatcagcccacagcctgcagctgctgtgcctgcaaaacctgccaagtagccaggctgaggccacactctgctagccaaaagcccagtgtggcagcagtaccagggcctgggcattcctgctcagcttggggctcctctgtggacagtctatcagggagtcccactgggccggagagattttctcagagctgtgctgcaggctaacactcttcttacccaatctgcctgccttattctctcttcttagaaggctcaaacccacagtatggtctcaggcaatccccacccactcctgctccttctcctctggatttcttgcaggtgattcctgccataaatcccttgcacttcttgctccgtcatcttggcatctgcttttcagtgttcctaactggcacgacacatcatccaaaccacaaggaagacttctcagttatggaatcatgcagtacatggcatatgagggtggctcctctgtgcttctaaggttccagtggtggagaaacctctgacagctaaagcctggagccctctgaccatttgcacagcagcctggctcaggggagcaggtccaggctgagagtcagacagggcttggtgtccctgcagcagctccttcggctctctgggcctcagtcttcctcatctataaaataggcgtgctgacactttccccgtagtactgtcttaagaactggataaagcacctgctttgaaggtcagataaccaggagtgtgggattttagatccatgtcactagagtctagatgatcagagttggaaaatgtcatagagccctacattttcattatttgtgtagggaactgggaacatggaagggaagatcttaggcaagcagggacggcaggccacagcagaggcaggccaggtcccgtggcccagcccggagcctcagaatgccttccattcccattcagcaccagctttgcccgcaaccacagggagcccaggccaggatcccaacctcccccctttccccaggcaacccagggggcatggtgggaccagagggagaacccagtaagacctggcattaacatgaagactatctgtgggcagtcagaggcgcccagcctgcaacagaggccaaagggcaggcgaaggtggaggaggcggggtgctttttctccgctggtcccatcactgctaatgtggtctcagggcctcctctctggaagagcaaactgacctccggagaaaacagttggaacaggaaaaacagagagatgccagggacccaaggggcactcagagacagggtcagcccttattggagttagagaggcagacagaagacagagaggcccagggatggagaggggaagtgcaaaacagatggccggggagggatgcggaggagaggcggaggtgtgcgctgggggagaggactaccgacggcgctggcggtcgggatgggctggagcgggctgcagtcggggctgcatcgccgggtcccagcatagcgcaggctcggcgccgcacccgcagcctttgtcctgagctgcagagggttcccgcgggccgccagcgccccctgccgcccccagagcgccgcgccgcagccgagcggcccctagctgtgcagaggggaccgagcccgagaagggaccgagcccgagaggggaccgcgagggcgggagggaagctccgcgagccggcgccagcgccacggcccaaaccccagcctctacaggtgctcactgcgcgactgcctgtcccag

SEQ ID NO: 26534 - DNA, 814 bp, Homo sapiens
ggttaagtttaaaaaataacaaaagagaataccatatgtaacaaccctggcacagaacactttctttaagaaaactcccttaacgttaacggcaaaaaaatactcttcccatttcactatggtaactaataaaaattttttcttcacactgaaaaataaaatctttatttaatctaattctgtaagtgccaaaaactctgattattttatcaagttattaaatatgttattcagtagtgagccttattgattttccttttgattagaaaaattaccaaaaaaatccagctctacagttcataacctgagaatggtagaaacccaagacgtagagcacattatgcaacactcttaaacaaatstgcctcttgggatctctctccttttatagaaagagactctccagcagcccctagagacattcccatactaagtgagtcagctaaataaaattaagcaactaataaaacaatatgtcatcttgttctcattgtcataattaaaatcctttttctttaagatgaaaggtggcagctatagagtagccttcaaaatcataggctatgccgaagcaggatcttctctccaacgctgtacagacaacgcagctgtccctgacatcaccacttgaaattattccctatttgatatttttgacattaaaaggctgaagtcttttttcttctgcaagttacttccatgcttgcttattaagcattccaagttggtctctcacccaatagccttagaaagcagaccatcattatttagggcaaaggtttccagaggcagtcagaggcaggataaggatggg

SEQ ID NO: 26535 - DNA, 814 bp, Homo sapiens
ggttaagtttaaaaaataacaaaagagaataccatatgtaacaaccctggcacagaacactttctttaagaaaactcccttaacgttaacggcaaaaaaatactcttcccatttcactatggtaactaataaaaattttttcttcacactgaaaaataaaatctttatttaatctaattctgtaagtgccaaaaactctgattattttatcaagttattaaatatgttattcagtagtgagccttattgattttccttttgattagaaaaattaccaaaaaaatccagctctacagttcataacctgagaatggtagaaacccaagacgtagagcacattatgcaacactcttaaacaaatctgcctcttgggatctctctccttttatagaaagagactctccagcagcccctagagacattcccatactaagtgagtcagctaaataaaattaagcaactaataaaacaatatgtcatcttgttctcattgtcataattaaaatcctttttctttaagatgaaaggtggcagctatagagtagccttcaaaatcataggctatgccgaagcaggatcttctctccaacgctgtacagacaacgcagctgtccctgacatcaccacttgaaattattccctatttgatatttttgayattaaaaggctgaagtcttttttcttctgcaagttacttccatgcttgcttattaagcattccaagttggtctctcacccaatagccttagaaagcagaccatcattatttagggcaaaggtttccagaggcagtcagaggcaggataaggatggg

SEQ ID NO: 26536 - DNA, 744 bp, Homo sapiens
acctcattctcaccagtttcttccctgtctcctaaaaagatgttcagggattacatatacttaataacctttcctcatcaaactctaatcacctattcatttaataaatatgtattatatacttgccatattccaaatactattctagtggtaaatatgacagaccagccctctgctctcatgtagtattctaggcacagggtgcatattgcaagcagtagagactacaagccagtcaacaaggaaaaatattctgattgtgacttgaaggaaatgatcaaaatscaagaacaggaagggacttggaggaggcagaagtggctgcctaagtgtcaaaggaaaggggaatctcacgtttgatctgcgagttgaatgataagaagtccactgtatgtgactatatggggataaaatgttccagatggaggaaacagcaattgccaaggcaagaatgatctcaagatcttagaggaatggaaagaagagtgtggggtggagcctaacagcaggcagcaaggcagaggtgaggagatgggtttgaaagatgagcagggatcagatcatacaaggtcttgtgtggcgtttcacttaatgagaaactcgtgataacaaagattcaagctccagagtgttcagggtctaaatttgactttcaaaaaaagattttactattgtacattaaaaatcatctcaggacgcctggtgtggtggctaatacctctcatttgggagaccaaagcagaa

SEQ ID NO: 26537 - DNA, 744 bp, Homo sapiens
acctcattctcaccagtttcttccctgtctcctaaaaagatgttcagggattacatatacttaataacctttcctcatcaaactctaatcacctattcatttaataaatatgtattatatacttgccatattccaaatactattctagtggtaaatatgacagaccagccctctgctctcatgtagtattctaggcacagggtgcatattgcaagcagtagagactacaagccagtcaacaaggaaaaatattctgattgtgacttgaaggaaatgatcaaaatccaagaacaggaagggacttggaggaggcagaagtggctgcctaagtgtcaaaggaaaggggaatctcacgtttgatctgcgagttgaatgataagaagtccactgtatgtgactatatggggataaaatgttccagatggaggaaacagcaattgccaaggcaagaatgatctcaagatcttagaggaatggaaagaagagtgtggggtggagcctaacagcaggcagcaaggcagaggtgaggagatgggtttgaaagatgagcagggatcagatcatacaaggtcttgtgtggcgtttcacttaatgagaaactcgtgatawcaaagattcaagctccagagtgttcagggtctaaatttgactttcaaaaaaagattttactattgtacattaaaaatcatctcaggacgcctggtgtggtggctaatacctctcatttgggagaccaaagcagaa

SEQ ID NO: 26538 - DNA, 592 bp, Homo sapiens
tcttaattatgtgttcttttggaatttttttttttttttttttttttttttttttttttttagacagcgttttgctcttgtcacccaggctggagtgcaatggtgtgatctaggctcactgcaacatctgcctcccaggttcaagcaattctcctttctcagcctcccaagttgctgggattacaggcgcccataccatgctcatctaattttttgtatttttaatagagacagggtttcaccatgctggccaggctggcctcgaactcctgacttcaggtgatccaccctcctcggccttccaaagtgctgggattacaggtgtgagccactgtgcccagctgcttttggaatcttcttttaaaatttttttcatcagtcaaawgttatgaagaaattcacttatattattcatattggtactatattttacttttcatatttaagttcttcatctaccttcagtttgtctcttgttgtataaagttgtactctattttttacactaaatttgagtcagttctcttaagcacttttttttaaactaaatagtatctctaatgctttgcaatgtctctatagcaatggttct

SEQ ID NO: 26539 - DNA, 982 bp, Homo sapiens
aaatagttgcatcaatttacacttcaagtataaatggatgagtgttcccattgcttcctatttttgtctatattagaacggattcacttttttatatttatccctaactattacatttccaagaagataaaagcttctcctaaaagggaagttttgcagaggtgacatttatgtttggtctctataatatgatagcattagattaccagagctagcacaaaagaggattagagttaaaagaacatcaccacttaattaaagaagtgacaaacagggttgggagcagaactgtttggaaaattgggtagctaaaaatagcagtctcggtgtggcaacattagaaggacaggtcatttcctccttcttaaacaatttgaaagccttaaaaaattttattattcatttgtatttttttgtgaaatgcaagtaatgagctgcatttttttcattttgtagcttatctttatagactccatatagtgtttttgataaacagataattttaatatacaaattataaatatttttctttttgcttaaacatgttgttttctaaaagaaattcatactttcatctcaaaaagcccacttttttttaagttcttcctttgacatttatatccacaattcactttgaactatttttttcaaatatttaaagtttaaggaggaaaaattacattttttccaaatgtataattgtattggtcttcttggattgctataacagaataacataaactgtatggtttaaacaacagaaattatttacacagctctgaagcatggaaaatctaagatcaggtttccggctgattcrgttctgtggtcaccttcatctaaatctaattacctcccaaaagcctcatctccacacatcatgacattggggattaggacttcgacatataaatttgggggaggaggacacaacattcaatccataataaacaattattcatacataaattattgaataggc

SEQ ID NO: 26540 - DNA, 1062 bp, Homo sapiens
caaggaagggggtgtttgggaaaggccaaacaccagaccaggaagcagcctttctygtctggctgggaagttccaggtaggattagtggctctgcattctttggagagagatgtggagccagtggagagatgtgcaccggtggagacaacagcgaagctccaaggattgggccacacctcaccaagaggagagaaaggagaaagcaagggacaagcttgcatctttgactgggtgggccgagacagagcaggaaggcatggctgtatgctgagcttccttctggatcttctttccattcatactacctgggagaggcacgggctgagggataatagtgcatgtggccccagcttgccccactcagtgctgaccatagccagtgaaggaagacactctgcttttggcccgggatggttcttacagccctggtaggcagagcacacttacgtggcaatacctctctgcctcagcacagaaggataggtgttactgtagtgccattttgatcaagtgggaaaaataaggtacaaaaatgaaattaatgtttaatctttggggaataagaaagcgctgatgataacacaaaggtgccagttttcgtcatgtccactcaaatcttaccatcagagaccttgaacttgtttcttctctttcattagtggttgcatgctgcctggcatctcttcacctgagtccctgggtgctctctggagcacgcagcttggcatgtgcctctgtgaggatcttggcttctggaccctgtgccctgcttctagcctcgaggagggtcaggttcccttgtaggagttggccagaggagttttacctttctgggaatgttacttgaaaccagtagaaagagcactttaccagctcagttaactgagctgcatttgtagatgccggactcagtcagccaaattggtctaaggctgcttaaggtaaagacctggtctcctgacctgctggctgatgctggattgctgcctcccgcttattcacgtgaattttgaggtgactcaagcagatggggttagaacagagcagctgagagccttccc

SEQ ID NO: 26541 - DNA, 612 bp, Homo sapiens
agcttctcaggaggttaaggcaggaggatctcttgagcctagaggagttcaagattgcagtgagctatgattgttccagtgcatttcagcctggggacagaacgagacctcatctatttacaaaaaaagaaatctactaamtgagtttaattttatttggcatttaacttgtagcctctgaattgtgaatttggaaaaaatttaatattgcaagtggacattgatataggactcttagcccaaggaatctctgttgtttctagatgatatatttctatcccaattataatatggaagcttcctatatggtcagttttagaagcttttctacataatataattagattctcttaggagatgttttaaagaactagctcatcaggaaaagttcatcaggacatggaagattaaagtcatatagattccttgtagttttgttcttatacagaaattctgcattgcaatttggaaacaatgaatgtaaatataaaaacccaatccaggcctttcccgtaccccatcagttgctggtctgtacttggagtgtgctgaccagctttgagagatgtgtccatgataccaaaaactaaagttcaaaggaatataaagaaa

SEQ ID NO: 26542 - DNA, 548 bp, Homo sapiens
tatctttaaatataaatatctactagcaagggrcactaagcaaaagaaactgcataagcaaaagtagcaaaagtataatatgttccaaaataaaagtagtcaaactgagtagtatatgatataggctgtatattagtttgctagaactgccataacaaaatgccatagactgtgtggcttaaacaacggaaatttattttcctgtaaatctggaagctggaagtccaagatcaaggtgtcatcagggttggtttcttgtacagcctctctccttggtatgtaggtggctgtcttctccctgtgacttcacatggtcttctctctgtatgtgtctatgtccacaactcttcttcctataaggacaccagtcatattagattgggaccacactgatgacctcgttttaactgaattacctctttgaagaccctgtctccaaatacagtgacattctgaagtatcggaggttaggatttcaacgtgtgtattttgggaagacacaattcagccccaaataggccattatatttcaggatcttggaagaaat

SEQ ID NO: 26543 - DNA, 548 bp, Homo sapiens
tatctttaaatataaatatctactagcaagggacactaagcaaaagaaactgcataagcaaaagtagcaaaagtataatatgttccaaaataaaagtagtcaaactgagtagtatatgatataggctgtatattagtttgctagaactgccataacaaaatgccatagactgtgtggcttaaacaacggaaatttattttcctgtaaatctggaagctggaagtccaagatcaaggtgtcatcagggttggtttcttgtacagcctctctccttggtatgtaggtggctgtcttctccctgtgacttcacatggtcttctctctgtatgtgtctatgtccacaactcttcttcctataaggacaccagtcatattagattgggaccacactgatgacctcgttttaactgaattacctctttgaagaccctgtctccaaatacagtgacattctgaagtatcggaggttaggatttcaacgtgtgtattttgggaagacacaattcmgccccaaataggccattatatttcaggatcttggaagaaat

SEQ ID NO: 26544 - DNA, 676 bp, Homo sapiens
tagatctctttgtgcttcagtttccacgtatgtaaaaatggggataatcttaatttctattcgtagggttgtgayggtaaaatgaaaaaaaatgtatgtcaagcacttagcagagtgtctggtacgttataagttctccagaagtgtgctaattattattaataatatatttttgaaaagattattccttaacgacgtaatttgtaggaaactggctttccccttatctctctaggcttccatgagaatctatttcttgtgtgtagtgtttgggattaaggaagaggctctttctttatgttccaggatggagacactagtagttctcacggttttgctagtgcacgtccgaataccctgcggggcttgttaagcactgactgctgtgctgcccctgcccttcagagcttctctttctgtctggtgaggggcagagtatttgcatctttaacaagttcccaggtgatgctgaggccactcatctgggaaccacactttaagaacccctgctctaggacagtactttccagtggaaatataatgtaagccacacataaaatcatacattttctagcagtcacattaaaaaagtgaaaagaagtggatgaaattaattttaatattgtattttatttaatccaatctatcaaatgctatcatttcaacatatagtcga

SEQ ID NO: 26545 - DNA, 676 bp, Homo sapiens
tagatctctttgtgcttcagtttccacgtatgtaaaaatggggataatcttaatttctattcgtagggttgtgatggtaaaatgaaaaaaaatgtatgtcaagcacttagcagagtgtctggtacgttataagttctccagaagtgtgctaattattattaataatatatttttgaaaagattattccttaacgacgtaatttgtaggaaactggctttccccttatctctctaggcttccatgagaatctatttcttgtgtgtagtgtttgggattaaggaagaggctctttctttatgttccaggatggagacactagtagttctcacggttttgctagtgcacgtccgaataccctgcggggcttgttaagcactgactgctgtgctgcccctgccctycagagcttctctttctgtctggtgaggggcagagtatttgcatctttaacaagttcccaggtgatgctgaggccactcatctgggaaccacactttaagaacccctgctctaggacagtactttccagtggaaatataatgtaagccacacataaaatcatacattttctagcagtcacattaaaaaagtgaaaagaagtggatgaaattaattttaatattgtattttatttaatccaatctatcaaatgctatcatttcaacatatagtcga

SEQ ID NO: 26546 - DNA, 765 bp, Homo sapiens
agggttgccccaggtgcatttgggtgtttaacagggttttgggtgatgactgtgtaaaaggaacaatattagagtttttgaccagagtgactgaggagctcacaggagtacagggtgtataagtcccaccaaagattccatgtgccttgggactgccccatcccattgggaattccagtctggcttcttggcaatgggtgcctgggcaacagagcaacagagcaacagagcaaggtggaggagagaagccctcctggtacccatccccacaccagcaagagggagcgccagactcacagcctcccatcccctccagccccagcccacctgacctacatcagccaccttctgattgattctgttttttcctggggaaaaggccaaaaagccatctaggcctcaaccccagcatctctgaacctctgacccagccctggacttccaaatttcagacttctttcaggtgagacaagcaaaccacatgttttttaagcctctgctattcaggytttccattgtttgcagcctaacggagccctggctgctcctgtctggagatggggcacgtggacgaggccttggagaggccagcatctctcacctcctttctagcccacagctccaggcacgcagactcttcctgtgactatatagaagtcatctatcttcctaaagccataaccagacagaccttctgtcaaaaggcaggagagttgggaacgggctctttgaggccacagatggacactgtcattgacccctcca

SEQ ID NO: 26547 - DNA, 611 bp, Homo sapiens
ttcaaagactacctattcctgaaaatattgcctgattgtctcagaacatacagtcaaattattttgtagagattgctctcagagcagttcacatatcatgggggttcagtacttaaatgatagtcttctgaggtggtagcccctggcatccactggcgagggaacaggaggtcaacagagagcaaaggactggagccggaggccagtcatcactctagcatcttgtccaatttgagaggtcataaccagaatggcagaaatattgatcatccagaccctgtgcttgaagctcgacctttgaagaacgccagagagatgaagacattttttttgcaataataacaacaagcatttactgaaggtgtgttatatagcaggcactctactaaaaatatgatcttattgaggaatgtccatctcttacctaataaaagacagagctagtgtgcaagcatcaatctgacarattgcaaagcttgtgcttttaaacaacatgctgtattgtctcttgtaaaacagcatttatataagaaagggccaagccagcattaaacccaaatacacacacacacacacacacacacacacacacacacacagacaccacagac

SEQ ID NO: 26548 - DNA, 611 bp, Homo sapiens
ttcaaagactacctattcctgaaaatattgcctgattgtctcagaacatacagtcaaattattttgtagagattgctctcagagcagttcacatatcatgggggttcagtacttaaatgatagtcttctgaggtggtagcccctggcatccactggcgagggaacaggaggtcaacagagagcaaaggactggagccggaggccagtcatcactctagcatcttgtccaatttgagaggtcataaccagaatggcagaaatattgatcatccagaccctgtgcttgaagctcgacctttgaagaacgccagagagatgaagacattttttttgcaataataacaacaagcatttactgaaggtgtgttatatagcaggcactctactaaaaatatgatcttattgaggaatgtccatctcttacctaataaaagacagagctagtgtgcaagcatcaatctgacagattgcaaagcttgtgcttttaaacaacatgctgtattgtctcttgtaaaacagcatttatataagaaagggccaagccagcattaaacccaaatacacacacacacacacacacacacacacacacacacacasacaccacagac

SEQ ID NO: 26549 - DNA, 716 bp, Homo sapiens
aggaaaacaacattccgattccctctggcatcatttcagaaataaggtcttagatttgagaaatctgggactgactctgggggaagggcacatttttggtgtctgyagtcaggaagggaggaaataagagtttcaggtcagtccagatccctctcagagactgggcctgcctcagagctcaggcagctctgaggcctagagactcagcggctgtggtggtgttgggagcccagggcagaggtaggcaggcagcgtcaatgcttacttcctgtctggccagcacaatctctcacagccctcactgtgctgacgtcataaacttgagctttcggaggagccagcagtgtctgcttctgtcttcatctgattcccaggagatcaacagatgactttgttttaaagcactgagaaaactccctgatcttacaggctggggcatagggctagctttcatgtggctgccttattggtccctgccttcccccttaactctgcttggcgtgacagcaacagcacaagtagcatagtgaccccaacccagaggtcctctgcctcatggggtgtgacctgaactgagacatgctgtctctacgtggtctcctaaatgccagcatccttctaggtcccacgtgaggctccttcttatgacttccgtaactccagtctccttccaccctgccctcctcccggctcctatggcactgtctggatcatgc

SEQ ID NO: 26550 - DNA, 716 bp, Homo sapiens
aggaaaacaacattccgattccctctggcatcatttcagaaataaggtcttagatttgagaaatctgggactgactctgggggaagggcacatttttggtgtctgtagtcaggaagggaggaaataagagtttcasgtcagtccagatccctctcagagactgggcctgcctcagagctcaggcagctctgaggcctagagactcagcggctgtggtggtgttgggagcccagggcagaggtaggcaggcagcgtcaatgcttacttcctgtctggccagcacaatctctcacagccctcactgtgctgacgtcataaacttgagctttcggaggagccagcagtgtctgcttctgtcttcatctgattcccaggagatcaacagatgactttgttttaaagcactgagaaaactccctgatcttacaggctggggcatagggctagctttcatgtggctgccttattggtccctgccttcccccttaactctgcttggcgtgacagcaacagcacaagtagcatagtgaccccaacccagaggtcctctgcctcatggggtgtgacctgaactgagacatgctgtctctacgtggtctcctaaatgccagcatccttctaggtcccacgtgaggctccttcttatgacttccgtaactccagtctccttccaccctgccctcctcccggctcctatggcactgtctggatcatgc

SEQ ID NO: 26551 - DNA, 716 bp, Homo sapiens
aggaaaacaacattccgattccctctggcatcatttcagaaataaggtcttagatttgagaaatctgggactgactctgggggaagggcacatttttggtgtctgtagtcaggaagggaggaaataagagtttcaggtcagtccagatccctctcagagactgggcctgcctcagagctcaggcagctctgaggcctagagactcagcggctgtggtggtgttgggagcccagggcagaggtaggcaggcagcgtcaatgcttacttcctgtctggccagcacaatctctcacagccctcactgtgctgacgtcataaacttgagctttcggaggagccagcagtgtctgcttctgtcttcatctgattcccaggagatcaacagatgactttgttttaaagcactgagaaaactccctgatcttacaggctggggcatagggctagctttcatgtggctgccttattggtccctgccttcccccttaactctgcttggcgtgacagcaacagcacaagtagcatagtgaccccaacccagaggtcctctgcctcatggggtgtgacctgaactgagacatgctgtctctacgtggtctccyaaatgccagcatccttctaggtcccacgtgaggctccttcttatgacttccgtaactccagtctccttccaccctgccctcctcccggctcctatggcactgtctggatcatgc

SEQ ID NO: 26552 - DNA, 778 bp, Homo sapiens
ctgtgtttgcatagtccccagcctctgggctcattctggatcatccagctaggtaggcatttgtttggcaggattcctgcccactaagagcttaccatgagtgtcatggtgggaatgagctgggtatttttagagctyggcagcctagcactgcggcttgctcttccccgaggtctgtggattagcctaggggtagcatatgcctacgctttgcttgcctggtcctggtacatggtcctgtgtactgttaagaaaacagattgtcccaggtagatatgtagccagatatttttttctctgtttcctttttttttttttttttttttggagctgctccaccccctggtatggtgcagcttctcctggggctcctctgtaattttacagcagcttctgagctagtgaagaaggcgggatttgctcacttgcagttaagtctggccagacagctgttagttgttgccacaaacatcttatgtgtttgcaatcttgcctgtcctcctgggtaggcagaatgcacaatctctcctcaggggaagtgagaagatctagaaggcccaaggaacaattatttttggcatcattgctcctccatactcattatccacatctgttgagcattcctgtggcccagaagctgatggcagtgtcactgtggcaccctagctttgatgtacttattgtcagaagctctggatagggaccaccaacaatgcactttgctgcataggtgctgtgagtctccatgggaaggaaagctggagatttgcataaaaaa

SEQ ID NO: 26553 - DNA, 778 bp, Homo sapiens
ctgtgtttgcatagtccccagcctctgggctcattctggatcatccagctaggtaggcatttgtttggcaggattcctgcccactaagagcttaccatgagtgtcatggtgggaatgagctgggtatttttagagcttggcagcctagcactgcsgcttgctcttccccgaggtctgtggattagcctaggggtagcatatgcctacgctttgcttgcctggtcctggtacatggtcctgtgtactgttaagaaaacagattgtcccaggtagatatgtagccagatatttttttctctgtttcctttttttttttttttttttttggagctgctccaccccctggtatggtgcagcttctcctggggctcctctgtaattttacagcagcttctgagctagtgaagaaggcgggatttgctcacttgcagttaagtctggccagacagctgttagttgttgccacaaacatcttatgtgtttgcaatcttgcctgtcctcctgggtaggcagaatgcacaatctctcctcaggggaagtgagaagatctagaaggcccaaggaacaattatttttggcatcattgctcctccatactcattatccacatctgttgagcattcctgtggcccagaagctgatggcagtgtcactgtggcaccctagctttgatgtacttattgtcagaagctctggatagggaccaccaacaatgcactttgctgcataggtgctgtgagtctccatgggaaggaaagctggagatttgcataaaaaa

SEQ ID NO: 26554 - DNA, 778 bp, Homo sapiens
ctgtgtttgcatagtccccagcctctgggctcattctggatcatccagctaggtaggcatttgtttggcaggattcctgcccactaagagcttaccatgagtgtcatggtgggaatgagctgggtatttttagagcttggcagcctagcactgcggcttgctcttccccgaggtctgtggattagcctaggggtagcatatgcctacgctttgcttgcctggtcctggtacatggtcctgtgtactgttaagaaaacagattgtcccaggtagatatgtagccagatatttttttctctgtttcctttttttttttttttttttttggagctgctccaccccctggtatggtgcagcttctcctggggctcctctgtaaytttacagcagcttctgagctagtgaagaaggcgggatttgctcacttgcagttaagtctggccagacagctgttagttgttgccacaaacatcttatgtgtttgcaatcttgcctgtcctcctgggtaggcagaatgcacaatctctcctcaggggaagtgagaagatctagaaggcccaaggaacaattatttttggcatcattgctcctccatactcattatccacatctgttgagcattcctgtggcccagaagctgatggcagtgtcactgtggcaccctagctttgatgtacttattgtcagaagctctggatagggaccaccaacaatgcactttgctgcataggtgctgtgagtctccatgggaaggaaagctggagatttgcataaaaaa

SEQ ID NO: 26555 - DNA, 460 bp, Homo sapiens
atatatwtaaatatataaatatatatttatataaatatatataaaaatatatataaatatatataaatatatatttatataaatatttattttgaagtacatgaatatatatatttatataaatatatatataaatattcatttacttcaaaatttatatctataccccagaccatttctctggccttctgatttacacgtggagattaccatctctctcttagttaatggcattatttctactcaggagaaatctgttattattatctctttctcctcctcacctgtccaaccaatccatcatttatgtcctattgaattttgctattctgtacatctttactgctagcttcttagtccaaagccaccaatgtctgatacaacttaataccagccttcctgcttctactactccatcctctttcttccattctgcatagagttacaagaatgagttttc

SEQ ID NO: 26556 - DNA, 460 bp, Homo sapiens
atatatatawatatataaatatatatttatataaatatatataaaaatatatataaatatatataaatatatatttatataaatatttattttgaagtacatgaatatatatatttatataaatatatatataaatattcatttacttcaaaatttatatctataccccagaccatttctctggccttctgatttacacgtggagattaccatctctctcttagttaatggcattatttctactcaggagaaatctgttattattatctctttctcctcctcacctgtccaaccaatccatcatttatgtcctattgaattttgctattctgtacatctttactgctagcttcttagtccaaagccaccaatgtctgatacaacttaataccagccttcctgcttctactactccatcctctttcttccattctgcatagagttacaagaatgagttttc

SEQ ID NO: 26557 - DNA, 460 bp, Homo sapiens
atatatataaatatataaatatatatttatataaatatatataaaaatatatataaatatatataaawatatatttatataaatatttattttgaagtacatgaatatatatatttatataaatatatatataaatattcatttacttcaaaatttatatctataccccagaccatttctctggccttctgatttacacgtggagattaccatctctctcttagttaatggcattatttctactcaggagaaatctgttattattatctctttctcctcctcacctgtccaaccaatccatcatttatgtcctattgaattttgctattctgtacatctttactgctagcttcttagtccaaagccaccaatgtctgatacaacttaataccagccttcctgcttctactactccatcctctttcttccattctgcatagagttacaagaatgagttttc

SEQ ID NO: 26558 - DNA, 545 bp, Homo sapiens
tgcaaaaaatgtccaggtttcagaataactgtctatttaaaaatatatatatagaaggtacttaaagtaaaaacccataaagaaacaaaaaatgttaccaaagttagtctgttcaaggttggaaaataaaaattcattcacttgatttttatatctgcaagggtcaaaggtcatcatatatctcyagttatcagtatttcaaaagtcagagaggtagcaacttaagaaagggctcaaggcttcactactgaggaattagtgctctgtgggatgttttgctctttaaagtttatctgaggatataaagtatctttcttcccaactgttatctgaggtgtgtaaccacaatggcagcagagcaaggtgtccattttgcccactcagtgtctgtttctggtcatttcatctccaaagtgaagatttaaccacacaaatttgtttagctattttctaattcagtatcactaatttgatgttttctttatttagttggttttatttatttaaaaatgtactggttgatatggttaacaaactaaatccat

SEQ ID NO: 26559 - DNA, 545 bp, Homo sapiens
tgcaaaaaatgtccaggtttcagaataactgtctatttaaaaatatatatatagaaggtacttaaagtaaaaacccataaagaaacaaaaaatgttaccaaagttagtctgttcaaggttggaaaataaaaattcattcacttgatttttatatctgcaagggtcaaaggtcatcatatatctctagttatcagtatttcaaaagtcagagaggtagcaacttaagaaagggctcaaggcttcactactgaggaattrgtgctctgtgggatgttttgctctttaaagtttatctgaggatataaagtatctttcttcccaactgttatctgaggtgtgtaaccacaatggcagcagagcaaggtgtccattttgcccactcagtgtctgtttctggtcatttcatctccaaagtgaagatttaaccacacaaatttgtttagctattttctaattcagtatcactaatttgatgttttctttatttagttggttttatttatttaaaaatgtactggttgatatggttaacaaactaaatccat

SEQ ID NO: 26560 - DNA, 927 bp, Homo sapiens
atccctgtctcctggctgtccccagcacccatggcttctaaaagcaggcacatttcgagatattcaggaggaagaaggaagctgagcctagatctgcaatctcctactaaaatgaaagcgattttacagaaagcttaagccacagtgctcacgcagcaggcaaatgactgggtggccaccgggctcggctgcaggtgaggaggtgggggctcagggaggtcgagagcagcagaggaggacccaagcccagctctgcctgcccctcggccctggctctttctattgttgggggcgcctccgaggttttgtcactcactcactcactcgctcagtcactcattccattattcctccagaaaacatgactgaggacctatcaggagcctggcctctgggaagattgggtccagtaaagacggcagagaagacagcaggaggtccagagggctggggaggagcggggagaggatgacacctgtctgccttcggggmttgaggacagagaatggggtgctctgctgggagggactgaaacccactggggctggcttaaatcatacctgggacctgattccctggagacgtctggtggagcctgggcctactggaggggaccgctctccctccttccctccctccctctctggtcccagctccatgctgtctctctcctgccctccctccaccttcttccttccctcactagggtcctacaggcgccctgggcccaggtccggctctcgggccaaccctgagctgattggtctgccttgggtcaggtgtctgccccagtccagccagctgtggcaagggcgtggccacacaacacgtgcaagtgcggggcgggggtcatctccgggtccagaagaggtgggggtaggggtgatggtaggggtggggggtggcaccccaagaaggcactggccg

SEQ ID NO: 26561 - DNA, 927 bp, Homo sapiens
atccctgtctcctggctgtccccagcacccatggcttctaaaagcaggcacatttcgagatattcaggaggaagaaggaagctgagcctagatctgcaatctcctactaaaatgaaagcgattttacagaaagcttaagccacagtgctcacgcagcaggcaaatgactgggtggccaccgggctcggctgcaggtgaggaggtgggggctcagggaggtcgagagcagcagaggaggacccaagcccagctctgcctgcccctcggccctggctctttctattgttgggggcgcctccgaggttttgtcactcactcactcactcgctcagtcactcattccattattcctccagaaaacatgactgaggacctatcaggagcctggcctctgggaagattgggtccagtaaagacggcagagaagacagcaggaggtccagagggctggggaggagcggggagaggatgacacctgtctgccttcggggattgaggacagagaatggggtgctctgctgggagggactgaaacccactggggctggcttaaatcatacctgggacctgattccctggagacgtctggtggagcctgggcctactggaggggaccgctctccctccttccctccctccctctctggtcccagctccatgctgtctctctcctgccctccctccaccttcttccttccctcactagggtcctacaggcgccctgggcccaggtccggctctcgggccaaccctgagctgattggtctgccttgggtcaggtgtctgccccagtccagccagctgtggcaagggcgtggccacacaacacgtgcaagtgcggggcgggggtcatctccgggtccagaagrggtgggggtaggggtgatggtaggggtggggggtggcaccccaagaaggcactggccg

SEQ ID NO: 26562 - DNA, 573 bp, Homo sapiens
gggaatcacatgatgtcaagagggattgacacatctggtgggtgagccggtgttcagtgactcttggcccaagcaccaagcatgacccaaagatgaaattttctttgactatgatcagtggatcctcctacatcactctccccttgggacccttagaaccactgccagycatgagtgatctcaacgagcacacgcaacccttcctcccagcaataggctgctggaccatgacaattctgtgcctcttccccctaaccccccaaattagagaataggaaggggctctgcaccctctctgcacccatcctgctggctcagtgaccccagtccactctgagagcaagaacaacccagtctccctggtccataggcaggagtagggtgcaatttacaggcagaccaagctgtggaatcagggagaccagttgggcaacttcgccaataatctaggcaggaaatgatggtgggagcatcaggaaacctcccctctgcagggtggagctgtgggttcgaaatagtgaactttttccaaaagtctccaggacagcgctgggcagacacgacagtcagcct

SEQ ID NO: 26563 - DNA, 573 bp, Homo sapiens
gggaatcacatgatgtcaagagggattgacacatctggtgggtgagccggtgttcagtgactcttggcccaagcaccaagcatgacccaaagatgaaattttctttgactatgatcagtggatcctcctacatcactctccccttgggacccttagaaccactgccagccatgagtgatctcaacgagcacacgcaacccttcctcccagcaataggctgctggaccatgacaattctgtgcctcttccccctaaccccccaaattagagaataggaaggggctctgcaccctctctgcacccatcctgctggctcagtgaccccagtccactctgagagcaagaacaacccagtytccctggtccataggcaggagtagggtgcaatttacaggcagaccaagctgtggaatcagggagaccagttgggcaacttcgccaataatctaggcaggaaatgatggtgggagcatcaggaaacctcccctctgcagggtggagctgtgggttcgaaatagtgaactttttccaaaagtctccaggacagcgctgggcagacacgacagtcagcct

SEQ ID NO: 26564 - DNA, 821 bp, Homo sapiens
tatggggatgctgcggtgacaggcactgactgtgcccagccttgccttccctgcccccaccacaaacacagcataggcctcaggcagccttctgctcagcccagaacttcaagtgctattagctgaggtttgtggttctctttcttcctgatgaatatgtaagtgccccctaggatgggcagagatgacagttgtaataaaattggttcattacttccctctacacggagccatttaatgaacatgcagctgaaggcaccaaggcccctgagcaaatgcaaatgaaacaggttccacagtatcgtttaatttgctcagagtgggggtctgggaagtagaggagagagtatagcacagaggcagagaaagcagggtgagggagggagggcatcaggagggggcagagaggatgagggagggcaggaaggaggggagagagggggaaggaaagggagagtgagcaaggaagaagggaagaggagagatggctcccttcattattttgtatttgactttccaaagcccccttgcatggaaggcagggttgggcagyctcattattctcactggaaaagtgaggacaccaagtcctaccatgtgctgtgcagggcattgagtgctggggacccacagtggatgagacagacagggtcctgcctctgtgagattcagtctggtggaggagacagacacgaagcaaataattatgttgataatacatggaagtgcaagtcaggccatgtgagccttgcatgatgatgtatagaagaaggtagacagccttgttagaggtgagctctgaagagtgatggcctgggctg

SEQ ID NO: 26565 - DNA, 898 bp, Homo sapiens
ttctttccaagtttttagcaaggccaagtctcctgatggaatagggggagctaacgatttcctttgtgggatgtcctttttaatttcttccagtggccttcttacttacaaacggcacactgattttggcctggagctcttgagtggggtactgtcaactragcaccccagatgccaatctcagcacatttccttgaggtgggtaaccctgaggcagctggggccctaatttagcagctaacaattgttttctggccaattcttttggtttttgcctcttgttctgccctgtccctattactgtaaatcccaaaagcaatgtcttagccagaagatagaactctctatcctggggatgttaatgacaaatccagcaaccatgaagatgattcctcgatgctataattgttgaaatatttactatagagttatatttccacccacactggatgattgtaattgggagagcaaacaggattgacagtgacagcacggggtctggtcaggccttagagtggcctctacacccaatgaagacaaaagaggtgcttcccgagaggtcccattgctactttttgtaactttctcctaatgtcaggggcagactgagtaataaaatgcacacctaggagaactttcccttccgggaggtcggggtctgtattagattacttcctgagtgcctcaactaaacaaccctgaattagaatgagattttcatcttcctcctgagttatttttctcactttaactggcttaatcacatactgtttcatgctgtctatgaaacaagttagcatatgatttctgcattcaagatcttgagatcctctctggtcattcgactgagggtccagaactgcatctcctcccacacgataaatggcatggcctggct

SEQ ID NO: 26566 - DNA, 527 bp, Homo sapiens
tgtgatctttgtacctactccatgttcgtacaccacctccccttttgaattccttaataaaaatttgctacttttraggctcaggcggacatcaccatactaccaacacgttatgtcacccctgtggcccagctgtaaaattcctctctttgtattctttctctttatttctcagctggccgacacttaaccaaaaatagaaagaaactacgttgaaatatggggggtgggttcccctgatatcagatgacatttaattgcaactttataggagtccctatgccagaggactcagctcatctgctcctggattcctgacacacagaacctgtgatgtcaataattaagttgctaagttttaaggggatgttttaatgtagcaatagattacaaatatgaaaatcatatctcaaaactggaaacaattttaatattcaacactatgggcttggtcagtcaacttaactgagacctatgttttaagaaagatgagtcagtgccacacatctgtaatcccagaactttga

SEQ ID NO: 26567 - DNA, 524 bp, Homo sapiens
ttcacagagatcagaaaattttatatcagtattctggtgacctcaccaaattcaaaatgtgtattctttcagaaggagcaataataaaagtctcttcagctttataatggaaggctgaacaagaagttcagactcagagaccaaaagacattgagagaaggaagtatttaccaccaatgtatgatacaacaagccatcgagatagtgccgccatgtatttagatttatttagccctccctgtgttctatgtttactgtgcatgcaacttaacacctattgctatcaatgagaatatgtagaagtcaaaaaaagtgttttaaaatagatttatcgttcatctgttagcacctgaaaaccaaagaaaagaagtcagtagtttaacagttttggaagtttctttttttttcctttcctaaaattgatccaaaaaatctatgtgaggttatttataacatctgaagctttgtgcctctaggacaaagtgtgagamtatcaatgttgaaacaaaactttagaggggaaa

SEQ ID NO: 26568 - DNA, 591 bp, Homo sapiens
gaacacttttagtgactttcccctatggcattcccagtcataccccttccctactttctcactaccataagtaaccactattccgattccataaccattgattagtttttgccagtcttaaatttcaaagaaatagaaattattcaggatgtactctctcatgtctggtttctttccttcaacacaataagtttgatccatattgtatgtaccagtagtttatttctttttattgttttacggcactccagttatgaatatataatagcataatgtattcattctcttattgatgaatatttgttctcttcttccagttttcagctgtaataaaaaaaatactacaatgaacactcttgggcaggtcttttctgttggcacatgattgtaaaaagagctctcttttatcccaatcatcaaaaggcaaaaatgaaacaaaatacacacaatcaacatacactcttatgatatttaggagtaacctgtcaattctcaacaaaccaaaaagaaatcagaatagcattagatgtttttgaagaaatgaaagaacatcctacktgatgactgaaccagaacatagatagcatcctg

SEQ ID NO: 26569 - DNA, 1122 bp, Homo sapiens
tcctctcagagcctgcccgaccctgacagccaaggattgtgcccgtcgaaggagcccacaakataaatcaaggggcagagagaagaaaacagcaaagaggagtgggaagacggagaaggagatgttaaccgagagatgagcggaggaattcaagctacaaatgcagcccagatttattgacttcttcttaagggtcaggcctcgtgcaaagtgcattttatttaatccttaccacaatcttattacaacaggtgctattattatctccatcttagagctaaggaaacttggactgtaagcatttaagtaacctgatctaagatgcacaaacttgcataaggcttaagcagttgtggaggtttgggaaaagtgacaactaaggtcagctcttggaactaacccctccctggggttgtgcaggctgtgtgctagcccttcctcagtttctctttgaaatgagaatcattctgctaatctctctccctagcatgttatgccgcacaagttatatgtattaatttgcggcatcactagcctctcagtaattatctccatgaattccctcctttccattgaaattaggtagctgggtatatcatggttccaaatcactacagttgttgatagagcaaatagaatcaagtatataactactatacttggaaaggagacagcttttttgaaatcaaaatcacaatttttttctcttcttttaatttatttttattgtgttggaaatttgcagacttattcctcactcggtcacactttcacaactgcaaggacaaggggaatgaaattactggcctgctttccagctcactgcacactcactgacacacacgtgtgcacacatgtgcatacacgtacacacacgcacatgcaaacacaccatacaggctcccaatccaatccttagttttctggcgtacagggactctgaagaattgcttcagtagtttgagaatgatgaatgacaatgtttttaaaatatatatttactgttggtaaaggaaagctaaggaagggagagagtagacgagaaaagaagagaatgtaagaggaactaaagacaaaaaggtggggacagatgggccaagaggggtaagaaggagagggatc

SEQ ID NO: 26570 - DNA, 1122 bp, Homo sapiens
tcctctcagagcctgcccgaccctgacagccaaggattgtgcccgtcgaaggagcccacaagataaatcaaggggcagagagaagaaaacagcaaagaggagtgggaagacggagaaggagatgttaaccgagagatgagcggaggaattcaagctacaaatgcagcccagatttattgacttcttcttaagggtcaggcctcgtgcaaagtgcattttatttaatccttaccacaatcttattacaacaggtgctattattatctccatcttagagctaaggaaacttggactgtaagcatttaagtaacctgatctaagatgcacaaacttgcataaggcttaagcagttgtggaggtttgggaaaagtgacaactaaggtcagctcttggaactaacccctccctggggttgtgcaggctgtgtgctagcccttcctcagtttctctttgaaatgagaatcattctgctaatctctctccctagcatgttatgccgcacaagttatatgtattaatttgcggcatcactagcctctcagtaattatctccatgaattccctcctttccattgaaattaggtagctgggtatatcatggttccaaatcactacagttgttgatagagcaaatagaatcaagtatataactactatacttggaaaggagacagcttttttgaaatcaaaatcacaatttttttctcttcttttaatttatttttattgkgttggaaatttgcagacttattcctcactcggtcacactttcacaactgcaaggacaaggggaatgaaattactggcctgctttccagctcactgcacactcactgacacacacgtgtgcacacatgtgcatacacgtacacacacgcacatgcaaacacaccatacaggctcccaatccaatccttagttttctggcgtacagggactctgaagaattgcttcagtagtttgagaatgatgaatgacaatgtttttaaaatatatatttactgttggtaaaggaaagctaaggaagggagagagtagacgagaaaagaagagaatgtaagaggaactaaagacaaaaaggtggggacagatgggccaagaggggtaagaaggagagggatc

SEQ ID NO: 26571 - DNA, 1122 bp, Homo sapiens
tcctctcagagcctgcccgaccctgacagccaaggattgtgcccgtcgaaggagcccacaagataaatcaaggggcagagagaagaaaacagcaaagaggagtgggaagacggagaaggagatgttaaccgagagatgagcggaggaattcaagctacaaatgcagcccagatttattgacttcttcttaagggtcaggcctcgtgcaaagtgcattttatttaatccttaccacaatcttattacaacaggtgctattattatctccatcttagagctaaggaaacttggactgtaagcatttaagtaacctgatctaagatgcacaaacttgcataaggcttaagcagttgtggaggtttgggaaaagtgacaactaaggtcagctcttggaactaacccctccctggggttgtgcaggctgtgtgctagcccttcctcagtttctctttgaaatgagaatcattctgctaatctctctccctagcatgttatgccgcacaagttatatgtattaatttgcggcatcactagcctctcagtaattatctccatgaattccctcctttccattgaaattaggtagctgggtatatcatggttccaaatcactacagttgttgatagagcaaatagaatcaagtatataactactatacttggaaaggagacagcttttttgaaatcaaaatcacaatttttttctcttcttttaatttatttttattgtgttggaaatttgcagacttattcctcactcggtcacactttcacaactgcaaggacaaggggaatgaaattactggcctgctttccagctcactgcacactcactgacacacacgtgtgcacacatgtgcatacacgtacacacackcacatgcaaacacaccatacaggctcccaatccaatccttagttttctggcgtacagggactctgaagaattgcttcagtagtttgagaatgatgaatgacaatgtttttaaaatatatatttactgttggtaaaggaaagctaaggaagggagagagtagacgagaaaagaagagaatgtaagaggaactaaagacaaaaaggtggggacagatgggccaagaggggtaagaaggagagggatc

SEQ ID NO: 26572 - DNA, 962 bp, Homo sapiens
agttttaggatgaaaatataggggaaattcaactaaattatcctagtatcaaggtatgtaatattaattgtattttcaataaataagaatgttgagattattcctttaggctaagtttaaaaatstatgaataagcaagttttccctaagtttaaagtgcctttccaaaaatataggatttgtagatagaaataaatttaaaagacagggcctcctggcctagaactgagtaaattaactgggaacacagcagggttttattattgaggaagaaattagctcactgcctttttaaacacaatttgggaaactgtgagttcactagaaggcaaagtaagaaatatatttgaccgtaatgagatgcattaattaactcctgtcaagctctctaatatgttctttaattttcttccactcctccccttttcttccttttctcctccctcctctcctttcctctcttgtcccctcgtctccgctctctttctccttaatgttcctgattcctcatattttacatttagtgcaaaggactaggaccatagtagccattcaaaatgatataggaattatatttcactatcttgtattcaaggaataaataattagtttgtgaactagttaattaatgatccttcatctttcattcacaaaccgttttcttttttctttgtcagttctaccaaacctactcgctctacaaagatgaataaagcaagatatctttttgtcaaggtgctcaggataactagtatagtagcatcgaagcatatgaaagagtataaaaatcacttgtgacgttttaaaatacaagtagtcaagcccaccaagacatactgagtcaaagcctctgggggtagagtccaatgttcatattttctgaaaaggctcacagttaactctaatatttaccaagggatgatgacagctggcaattggagcacaaaaatacataatggagt

SEQ ID NO: 26573 - DNA, 971 bp, Homo sapiens
cctgaggcgggcagatcacctgaagtcaggagtttgagaccagcctggccagcatggtgaaaccccatctctactaaaaatacaaaaattagctgggcgtggtggtatgcccctgtaatcccagctactcaggaggctgaggcaggagaataacttgaacctgggaggcagaggttgcagtgagcygagatcatgccaatgcactccagccttggcaacagagggagaatttgtttcaaaataaaaaaataaaaatgtaactggatagacctcaggttcttgaataagcagaaaataatttaggtaaaaaccaaataataaaccaacattctaagaggtttagtatttggaggcccaaatgtcttagctaaaagtgttcattctaaactcacaggaaaagtgaaatatgaaaatatatagaaaaatcttaggcagtatttttcaattttaagcaacaactatttacaggtttttcaataggcattacattaaaaatgaaatatatagttaataaatatgaaaactgtggatataatcaacacatttattttacttcttgaagtgttaacatgtgctgtctcaaatatcaacagtgtacacgtgggaaaaaacattttacatagattttctgctacagaaaacagcctctcattagatatcccaagttttttcatttggaacacacgcccattccccagtatactaggggtaataataatttataaagtttaattactttttactactagaaaactaattttatgtttggcacaaatttctgaaatgacattccactgcaaagaataatacctatatatggccagaattactttttttctgtaacattaagataatactggtcagcctgagcaacaaagtgagacctcatctctacaaaaaataaataaattagatgggtgtggtggtgatgagggtctgtagtcccagatactcaagaggctgaggtggga

SEQ ID NO: 26574 - DNA, 971 bp, Homo sapiens
cctgaggcgggcagatcacctgaagtcaggagtttgagaccagcctggccagcatggtgaaaccccatctctactaaaaatacaaaaattagctgggcgtggtggtatgcccctgtaatcccagctactcaggaggctgaggcaggagaataacttgaacctgggaggcagaggttgcagtgagccragatcatgccaatgcactccagccttggcaacagagggagaatttgtttcaaaataaaaaaataaaaatgtaactggatagacctcaggttcttgaataagcagaaaataatttaggtaaaaaccaaataataaaccaacattctaagaggtttagtatttggaggcccaaatgtcttagctaaaagtgttcattctaaactcacaggaaaagtgaaatatgaaaatatatagaaaaatcttaggcagtatttttcaattttaagcaacaactatttacaggtttttcaataggcattacattaaaaatgaaatatatagttaataaatatgaaaactgtggatataatcaacacatttattttacttcttgaagtgttaacatgtgctgtctcaaatatcaacagtgtacacgtgggaaaaaacattttacatagattttctgctacagaaaacagcctctcattagatatcccaagttttttcatttggaacacacgcccattccccagtatactaggggtaataataatttataaagtttaattactttttactactagaaaactaattttatgtttggcacaaatttctgaaatgacattccactgcaaagaataatacctatatatggccagaattactttttttctgtaacattaagataatactggtcagcctgagcaacaaagtgagacctcatctctacaaaaaataaataaattagatgggtgtggtggtgatgagggtctgtagtcccagatactcaagaggctgaggtggga

SEQ ID NO: 26575 - DNA, 971 bp, Homo sapiens
cctgaggcgggcagatcacctgaagtcaggagtttgagaccagcctggccagcatggtgaaaccccatctctactaaaaatacaaaaattagctgggcgtggtggtatgcccctgtaatcccagctactcaggaggctgaggcaggagaataacttgaacctgggaggcagaggttgcagtgagccgagatcatgccaatgcactccagccttggcaacagagggagaatttgtttcaaaataaaaaaataaaaatgtaactggatagacctcaggttcttgaataagcagaaaataatttaggtaaaaaccaaataataaaccaacattctaagaggtttagtatttggaggcccaaatgtcttagctaaaagtgttcattctaaactcacaggaaaagtgaaatatgaaaatatatagaaaaatcttaggcagtatttttcaattttaagcaacaactatttacaggtttttcaataggcattacattaaaaatgaaatatatagttaataaatatgaaaactgtggatataatcaacacatttattttacttcttgaagtgttaacatgtgctgtctcaaatatcaacagtgtacacgtgggaaaaaacattttacatagattttctgctacagaaaacagcctctcattagatatcccaagttttttcatttggaacacacgcccattccccagtatactaggggtaataataatttataaagtttaattactttttactactagaaaactaattttatgtttggcacaaatttctgaaatgacattccactgcaaagaataatacctatatatggccagaattactttttttctgtaacattaagataatactggtcagcctgagcaacaaagtgagacctcatctctacaaaaaataaataaattasatgggtgtggtggtgatgagggtctgtagtcccagatactcaagaggctgaggtggga

SEQ ID NO: 26576 - DNA, 1954 bp, Homo sapiens
ggcagcccccgcctggccagccgccccgtccgggaggtgtacccaacagctcattgagaacgggccatgatgacgatggcggttttgtcaaatagaaaagggggaaatgtggggaaaagaaagagagatcagattgttactgtgtccgtgtagaaagaagtagacataggagactccattttgttctgtactaagaaaaattcttctgccttgggatgctgttaatccataaccttacccccaaccccgtgctctctgaaacatgtgctgtgtccactcagggttaaatggattaagggcggtgcaagatgtgctttgttaaacagatgcttgaaggcagcatgctccttaagagtcatcgccactccctaatctcaagtacccagggacacaaacactgcggaaggcggcagggacctctgcctaggaaatccagagacccttgttcacatgtttatctgctgaccttccctccactattgtcctatgaccctgccaaatccccctctccaagaaacacccaagaatgatcaataaatactaaaaaaattaaaagaactgtgagagaacagactcactatttgaatcccccaatgcatggtcctgggtgcccgtgggctgggcagcccgggtgcagtctcattgctattcaggtgtggggcgaacggagcagaacactggccttcagaagacagttcgtggcccaccrttcccaggaggaggcgtagcacaccgcacagtaggccggggaaccccgggcggtcagaggccgaaggagtgagcgagagacatgggaagagccattcttggtggtccactctggagaggcaggatcagcagaccccgggggcagggtctgctccacgttgtcagagcctggcccgggctgattaggacagggggtgattaggtcctgaagggagagtcggagagaggaggcggctgggggtctggatggctttgcacacgcaccacgggagagtgggagagaggggtggctgggggtctggatggcttgcacacacaccacgcacatgctccgagggaattattttctatccctaggaatccgccagccctggagaggcacctcctccagtcagtgagaccccggatgccagggcagcacaaatgcagcgaacaggaaagacagagaacccacacggcctaggcgagcaccccagaggtcaccctccacctgccggcagacggccatcacaccaggggctctgcatctggggtgcccaacagtctgtggggggctcagagctctgggacccctgaacactgtgtgcaaagttctctagggggagggcctgtgtgtgcaaagttctctagggggagggcatggggtcttcatctgatcccaaggaggtcagctccccgcgtctcgggatgattctgaagccctcagcccatcctcgatgtcctgagccccctgctcggccctcagtggggctggctgttctgctgctgctactccattggtttttccttctctcctgcagggcacctcggttcagggacaggtcttgttacctggggcggtaggaggtgctcacagagtgtttggggtactcccgaggtcagggctgagctaccaaggtcaacacagaagaacaagtgcagggtcttggatagaccctacccagcctgggaaggccccgtgctgctgcttcagggacgacgctctgccctgtgccaaacctgcagtcgggactgtgcccagcagcccagcctgggagactgatgggtgaggaggcagggtcctcctgccggccttggagtgcaaaggcaagagggaagccaaggagaaagccccccagaggagggctgggcaccctccccgggcctgcgtgccagacgcaccaggcaggaagcaggagggggcggggcagagcagggcagggcaagagcaggttggagactcctgagcagcctggcctgagtccct

SEQ ID NO: 26577 - DNA, 1954 bp, Homo sapiens
ggcagcccccgcctggccagccgccccgtccgggaggtgtacccaacagctcattgagaacgggccatgatgacgatggcggttttgtcaaatagaaaagggggaaatgtggggaaaagaaagagagatcagattgttactgtgtccgtgtagaaagaagtagacataggagactccattttgttctgtactaagaaaaattcttctgccttgggatgctgttaatccataaccttacccccaaccccgtgctctctgaaacatgtgctgtgtccactcagggttaaatggattaagggcggtgcaagatgtgctttgttaaacagatgcttgaaggcagcatgctccttaagagtcatcgccactccctaatctcaagtacccagggacacaaacactgcggaaggcggcagggacctctgcctaggaaatccagagacccttgttcacatgtttatctgctgaccttccctccactattgtcctatgaccctgccaaatccccctctccaagaaacacccaagaatgatcaataaatactaaaaaaattaaaagaactgtgagagaacagactcactatttgaatcccccaatgcatggtcctgggtgcccgtgggctgggcagcccgggtgcagtctcattgctattcaggtgtggggcgaacggagcagaacactggccttcagaagacagttcgtggcccaccgttcccaggaggaggcgtagcacaccgcacagtaggccggggaaccccgggcggtcagaggccgaaggagtgagcgagagacatgggaagagccattcttggtggtccactctggagaggcaggatcagcagaccccgggggcagggtctgctccacgttgtcagagcctggcccgggctgatkaggacagggggtgattaggtcctgaagggagagtcggagagaggaggcggctgggggtctggatggctttgcacacgcaccacgggagagtgggagagaggggtggctgggggtctggatggcttgcacacacaccacgcacatgctccgagggaattattttctatccctaggaatccgccagccctggagaggcacctcctccagtcagtgagaccccggatgccagggcagcacaaatgcagcgaacaggaaagacagagaacccacacggcctaggcgagcaccccagaggtcaccctccacctgccggcagacggccatcacaccaggggctctgcatctggggtgcccaacagtctgtggggggctcagagctctgggacccctgaacactgtgtgcaaagttctctagggggagggcctgtgtgtgcaaagttctctagggggagggcatggggtcttcatctgatcccaaggaggtcagctccccgcgtctcgggatgattctgaagccctcagcccatcctcgatgtcctgagccccctgctcggccctcagtggggctggctgttctgctgctgctactccattggtttttccttctctcctgcagggcacctcggttcagggacaggtcttgttacctggggcggtaggaggtgctcacagagtgtttggggtactcccgaggtcagggctgagctaccaaggtcaacacagaagaacaagtgcagggtcttggatagaccctacccagcctgggaaggccccgtgctgctgcttcagggacgacgctctgccctgtgccaaacctgcagtcgggactgtgcccagcagcccagcctgggagactgatgggtgaggaggcagggtcctcctgccggccttggagtgcaaaggcaagagggaagccaaggagaaagccccccagaggagggctgggcaccctccccgggcctgcgtgccagacgcaccaggcaggaagcaggagggggcggggcagagcagggcagggcaagagcaggttggagactcctgagcagcctggcctgagtccct

SEQ ID NO: 26578 - DNA, 1954 bp, Homo sapiens
ggcagcccccgcctggccagccgccccgtccgggaggtgtacccaacagctcattgagaacgggccatgatgacgatggcggttttgtcaaatagaaaagggggaaatgtggggaaaagaaagagagatcagattgttactgtgtccgtgtagaaagaagtagacataggagactccattttgttctgtactaagaaaaattcttctgccttgggatgctgttaatccataaccttacccccaaccccgtgctctctgaaacatgtgctgtgtccactcagggttaaatggattaagggcggtgcaagatgtgctttgttaaacagatgcttgaaggcagcatgctccttaagagtcatcgccactccctaatctcaagtacccagggacacaaacactgcggaaggcggcagggacctctgcctaggaaatccagagacccttgttcacatgtttatctgctgaccttccctccactattgtcctatgaccctgccaaatccccctctccaagaaacacccaagaatgatcaataaatactaaaaaaattaaaagaactgtgagagaacagactcactatttgaatcccccaatgcatggtcctgggtgcccgtgggctgggcagcccgggtgcagtctcattgctattcaggtgtggggcgaacggagcagaacactggccttcagaagacagttcgtggcccaccgttcccaggaggaggcgtagcacaccgcacagtaggccggggaaccccgggcggtcagaggccgaaggagtgagcgagagacatgggaagagccattcttggtggtccactctggagaggcaggatcagcagaccccgggggcagggtctgctccacgttgtcagagcctggcccgggctgattaggacagggggtgattaggtcctgaaggragagtcggagagaggaggcggctgggggtctggatggctttgcacacgcaccacgggagagtgggagagaggggtggctgggggtctggatggcttgcacacacaccacgcacatgctccgagggaattattttctatccctaggaatccgccagccctggagaggcacctcctccagtcagtgagaccccggatgccagggcagcacaaatgcagcgaacaggaaagacagagaacccacacggcctaggcgagcaccccagaggtcaccctccacctgccggcagacggccatcacaccaggggctctgcatctggggtgcccaacagtctgtggggggctcagagctctgggacccctgaacactgtgtgcaaagttctctagggggagggcctgtgtgtgcaaagttctctagggggagggcatggggtcttcatctgatcccaaggaggtcagctccccgcgtctcgggatgattctgaagccctcagcccatcctcgatgtcctgagccccctgctcggccctcagtggggctggctgttctgctgctgctactccattggtttttccttctctcctgcagggcacctcggttcagggacaggtcttgttacctggggcggtaggaggtgctcacagagtgtttggggtactcccgaggtcagggctgagctaccaaggtcaacacagaagaacaagtgcagggtcttggatagaccctacccagcctgggaaggccccgtgctgctgcttcagggacgacgctctgccctgtgccaaacctgcagtcgggactgtgcccagcagcccagcctgggagactgatgggtgaggaggcagggtcctcctgccggccttggagtgcaaaggcaagagggaagccaaggagaaagccccccagaggagggctgggcaccctccccgggcctgcgtgccagacgcaccaggcaggaagcaggagggggcggggcagagcagggcagggcaagagcaggttggagactcctgagcagcctggcctgagtccct

SEQ ID NO: 26579 - DNA, 1225 bp, Homo sapiens
cacggcagctttcagagtggataccaagcttttgtccaatgaagaattgaaaacgaacagtatccagattacagccgcttccaataacacggtttttgggaaatgcactcaacttccaggctacgtaagttaagatatctactggattggaaacaataattagtttgcagagggggctctgctggacaatactggaaatcattaacttgaagatggccacattttgccggactaaattaaagcgcatttctcccttttctcggcgtgcacctgctgtgataatcactagatgggggtttgctgtgacaaggtaatctttgctacaaacaatatttgacattttcatgaaagggctgccatgttgaagatccattgtctcacctttcagtttgccttcatcaagatccacaaaggcaagttcatcactcaagccttttaataagatgctggtagcgcaggccatgcccactgatccagttcctgtgatggagacctttctgtgatgaaagggctcctcggaagtgaagcactcaataagctcactcttcacagtcgccatcttgctcacggaggtgaagagccaggtgcccatgagtggcatgcacgctgcctgacggggacacagggccatccccaggcacagaaaattcgctcctgccgagctcactctctggctggcccacacaacaggtacagtccaactcatggctgctcactcaagaagtggagggaaagaatggaaaaaagccgctgaccaaaacgtcgagacgccaagaaagccgtgggcagcaccttcagccctctatggcgggtgcgcaccacccgccccctggccctctactgcggctgcgcggcccttgccagcgcctccaacacgtgctttccgtgggtgctcagactaaggcaatgaagggctgcttctctagcaagtgatttctggagttagttttacaaagagtattctcatcaatagttgacatgcttaagagactaacccagatccctggaattactagtgttttctatttttagkatgaatgtcaaggcaaaatgcttctattaactacagatgaaaatcaggttacatcttctgaactgtgaccctgccgggaaggatagggcactgtgctttgcgtactggtggctgcctgcaccctctcccagtgtcccagaagtgggctcctgctttctggtgtatggcgctggaggcctacttataaaggat

SEQ ID NO: 26580 - DNA, 1087 bp, Homo sapiens
ggatcccaggctgaagccaatcagcacaaggcacaccattgacaacagggacygaaccatgtggctcagtgaaggataccgagacaaggggaattttgatgaggccttctggaaaagaagggtccctgctcttaggagcaagctaccagaaatgttctttctccctctggacctagtgggatagtcagagggaaagcctagaactactacagccactttgccacagcaaaggaagccagtctggggatgaagctgacccaaagggggacacagctgggacagctggggaaaacatggagaaatcatgacagagcccctgtattaaaccccctgaagccttccctctatcagggtgttcaactgcagaagccagtaaattccctcactgcataagttgattgaattgatttgccattatttacagcctaaatcgttgtaactgctgtactgtgacacccctccttactctaacaggcaaacacgaaggtttctaacatctggacttcctgatccttggcatgtgattatcaccgggtttgaggaaagtcgttaaaaatattatctcacatatttcctataggaattaattttcccccaaatctctattaaaaatttcaaacatttagaaacctaccacccttaaacttaccaccttagttttgataattattgacattttgccatatatttgcattatctatttctatattgatatttatctacctacctataatttgctagttattttaaagtgtcaatattttgctgcttcatccttgaatactttagttttagtatatgtctcctaagaaccattagcatactatgaaaatttataattccttaatatcatttaatatcttctatatccacattttccctctttgttccccaaattgtcttttgttgttttttcttatttttgttttttagagatgtggttttgctatgttcctcaggctggtctcgaactcctgggctcaagtgatctgcccacctcagcttcccaaagtgttgggattacaggcacgaaccactgtgctcggtcagctcttttttttgtttttttggttttttttccaggatc

SEQ ID NO: 26581 - DNA, 762 bp, Homo sapiens
acagcacccagccagaaaaaaactttaatagcacattaccttaaatctgtaatttatgcctggaatcctaatagtttaaaaaagtcaaaagccaagaatctggtctgtgtgttctggtctaacatccttcttctagtcaaatgctgtagctgagaaaaygggggatggggaaagagtgaaggtcagaaagcaggaagtgctagtaacaaaagccacattgggtaagatttcaaaataatatcctgatacttgaataagcctttttcggaagctttgaaagaagtgagtaacggagggtgtcgacagcataaggccttggagggaaccgcattaacagtcccgtgccatactccaggcctccaggaacttcttcctggcagtctcctcctcaagctctgtccctttcatagtttgtgagctatttcccttctcagccctacttcccagtctacctccctttctgggacacctacagattctccaaattcagcacattcctttttgtgccaccctcttcttccagaccaaggcttggagtggaaagtgggagttctttcacttttaaagatgccctctaggaatttgcctataaaaggagctattccccaccccacaatgtacaaatgcatgtgaattacacctccttcccattctattatttgaaagcaactgctgtctttttttttttttttttgagacggagtttcgctcttgttgcctaggctggagtgcaatgggtgtgatctaggctcagtgcagcct

SEQ ID NO: 26582 - DNA, 596 bp, Homo sapiens
atagtagcataaccaccagctttaactgattaactttcttcagttaaaactcttaccaaaagtttctagacttcatactcatacactcaacactcttgttgaatggtccagtctatttaaatcaccaggcaaaggaaagatgtaagcagattcatgcttctcttccacttgagcatctcatataaagtaaatataaagattgatgtgtttatatgatcccaaaggtctagaactctacactgcagtgatacatgcagaaaatagagcttattttaaagtaacatctaaactgcattgttgacattgtccaattgacaaacatgtttaatctccaacatctttgataaagctatgtctttcttttcaagatgcaatgtcttctcattagcatttcagttgaatggacagatggatatgttactagtgccagtaaaacttaagcaagttttctcacccttatgaaaatatttctgtagtcatggttaatatcagcatattgacatacaaaaggtgatagaagraaaagacatatgggtcaaagacaataattttttatattttccgattttaaaataatataaatccactgtggaaaa

SEQ ID NO: 26583 - DNA, 554 bp, Homo sapiens
caggattctaaaaccatggaagcttggtagacaatgtctaacagagtatctaacataagcttacattagaacattagaaattatttcctataaggttttccacaaaaacataaagttttaacaaattatatctgtcaaatggcctgtgcatcctccttatttgaccttgttatttgtaagatatacttcagaatgccatctgggtactttggctgtaaagttaaaaggggtcctcaatcaggttgcacataatttggaaaataaatgtatgattcacacagttatgaaaacaaaaatacaaaccacaaactaataactttgattattaatagaaacaaaactgaagtctaatgttctattctattattttaatattattaatattatcctagattaactaagcaccaagaaagcagtctctcattcaagtttgtaamatagaaatcaaacggtaaaacaattaagaatgactttaattaggtcactcaaatatatcaaactaagaaagctactgttgttaaattataattctgtcataattactattttcagga

SEQ ID NO: 26584 - DNA, 643 bp, Homo sapiens
ttggaagcagaccctcccccagtggagccttcaaatgagatagcagccccggcagataccttgactacaagaccttagggcagaggcacccagctaagccaggcccagatccctgacccatagaaaccacaagataataaatgtttaagtcactacattttgtaatttgttacttagtaactgttaactaatatatgaactgattaatctcacccttaaaagaaaaatgattatcaatttggataaaagaaaggaaaaaaaccctaaygacttgctacttagaagaaacccaagcccccatactaatggtcttacagaagaaaagaaatcctttactggacataaatatatagtggactgtctactgttttattttgtttacacaaaatgttgagcattaaatcaaaactttaaaaatacacatacacatacacacacacaaacacgtgtacgtgcgaaaataatgaccctccatatagagataaaatactggaaccagacacattaatggcccagactggaattaatacaaagggactttaaataactatgattaatatgttaaagaacctagtagaaaaaggtaaatatcacgtgtgaagatatagagaatttccacagagtgataaaactatcttgcctc

SEQ ID NO: 26585 - DNA, 251 bp, Homo sapiens
cttctttttaagacaatatttaatgaatgctgcaacagtttaactctcctgactagcaycacattagtgttaatgtaaaatcctaggcatggtgtatttcttacacacaatctgaattaactctgcatcattttaagcctgcccttacagtcctagatcgaaatattctgaactaaacaatatgatatgacccaagacagacactggctgtgtttctaccaagccacgtagaaaactgagggcaaagagca

SEQ ID NO: 26586 - DNA, 514 bp, Homo sapiens
aaatggggaaacatacccatgccttctcttctctgtagacatccaatttgaacctactccagattagtaggaagtaaaatcattatctgatgttctgtggccacatggaaaatacattggtagttgcaaccagactagagtcaacattgagaaaccaatagaaccactaacttgggctggtgaggcacagctactggtcaaaacctgcccaggaggcccagtaccactcacagtcaggatcggggtcatggtaggggaaggtcagcyagcttactgcagcccatctctgatggggaggtgaggacttccagccctgggctgctcattcacctcccctctggagcagtaaacagggaagtagcaagaagctaagctccttttgttaggcattgttaattcctccaaggtgaccattgatgtattttttattcagtaacttagcatatatgtgtgtgcacaattaatagttatatataataaaagtgaatatattaaaatttaaaaaaataaatta

SEQ ID NO: 26587 - DNA, 1151 bp, Homo sapiens
agaaaagtacaatgactgtaaagatacaggtatatacatatatatatatttttttttctctctctcccagttactctttttgtttggtgtttatgtgaaattgcaggaagagtcactattagtgaacatacattgagcgtcaaagacgtgccaagggaattctgaagtacagaaagaaacataatattgtgagccaacagattcatgcacgcacatattttattgtatgtatgctatgatgtttttatgcattgagcccatgttataaatcaagtaaataaacaaatatacttggcaatagctcatgtgcatctgtggactgtttagacaattgcaaatgaaaacgattgctttttctttttgtgtttaccaaacttgttagttttaagatgcggactgcctgcttttttttcccagggtttaaatgttaaaactcttgtgatgaaaacagaataaatgaattgataaactagaaaacagtttatgaaattgaactgcaaaatatgctctttgcctcatatacaatgttatattgtgtttataactgtaaacaccctgcagtcatcgccatgtgcgtgctggattggagaaacagttgaaacttgtacaatggtgatttttttctattgatttacagattgaaataacagaagccatctctgatttttgaaagtacaagctgaagaactgaaaagatgagaactccttcattgcctgggagttagaatcagagataatgacacaactggaaaaccaagaggaaaacatatgagactgatattctcaaagtataatcttgaaaaagaaatgagtcaagcacatgcatggtcaggcaatgtactcatgcrgtggacctctggtgttctggctggccagagtcaccttttccttgttctggtagccatagctttggtttcctgggaggaatcacctcccttaacctcagtgtacactgagattgggcacactccagcacctgaaggagacgtgtaacccaagcttttgccatgaacatatttcctctctttggccacagtgattgtctcaggagaaggcacaaaactccactctggtcagtaataatcagactgagctgcacatgaacccaggagggtgtaagactgaaggtgctgggggccatcctaagaaga

SEQ ID NO: 26588 - DNA, 1151 bp, Homo sapiens
agaaaagtacaatgactgtaaagatacaggtatatacatatatatatatttttttttctctctctcccagttactctttttgtttggtgtttatgtgaaattgcaggaagagtcactattagtgaacatacattgagcgtcaaagacgtgccaagggaattctgaagtacagaaagaaacataatattgtgagccaacagattcatgcacgcacatattttattgtatgtatgctatgatgtttttatgcattgagcccatgttataaatcaagtaaataaacaaatatacttggcaatagctcatgtgcatctgtggactgtttagacaattgcaaatgaaaacgattgctttttctttttgtgtttaccaaacttgttagttttaagatgcggactgcctgcttttttttcccagggtttaaatgttaaaactcttgtgatgaaaacagaataaatgaattgataaactagaaaacagtttatgaaattgaactgcaaaatatgctctttgcctcatatacaatgttatattgtgtttataactgtaaacaccctgcagtcatcgccatgtgcgtgctggattggagaaacagttgaaacttgtacaatggtgatttttttctattgatttacagattgaaataacagaagccatctctgatttttgaaagtacaagctgaagaactgaaaagatgagaactccttcattgcctgggagttagaatcagagataatgacacaactggaaaaccaagaggaaaacatatgagactgatattctcaaagtataatcttgaaaaagaaatgagtcaagcacatgcatggtcaggcaatgtactcatgcagtggacctctggtgttctggctggccagagtcaccttttccttgttctggtagccatagctttggtttcctgggaggaatcacctcccttaacctcagtgtacactgagattgggcacactccagcacctgaaggagacgtgtaacccaagcttttgccatgaacatatttcctctctttggccacagtgattgtctcaggagaaggcacaaaactccactctggtcagtaataatcagactgagctgcacatgaacccaggagggtgtaagactgaaggtgctkggggccatcctaagaaga

SEQ ID NO: 26589 - DNA, 587 bp, Homo sapiens
tgcaggctgttacaagcatcacaccagcatctgctcaacttctggtgaggcttcaggaaacttctactggtggtggaaggtgaagggggagcagatgtgttacatggtgagagaagaagcaagagagatgggaggaggcaccagtctctttttaacaattggatctgtgtgagcaagcaagaactcactcgttacttggtgaggagggaatagggaaaatattgaatcatattctattgtataacatcccccaaaactgcaaattgtctaamttataaaactattgttaagttaaatgtatctttattttttaaaaatcaaaataaagctctcatgtcatagaaaccaatgatgaagaattagcaaattcatttccacattaaaaaataataagtaattagcctggcattgaacttgttctaagttctgggacattttggcatttatacaattaccactatacttttatatggcatcaattacactgtaataggctcatggcaaataagcatatcatgatttctaatataaagaacagaaactactaagtaaccttagtagttaaaattcttgatccacataactag

SEQ ID NO: 26590 - DNA, 1204 bp, Homo sapiens
attaaccatctacccactctttgacaggttgcccttaaacttttgaactccaatagttcccaaagtttttacattctaatttcaaaaatctgtcacatttttccaacctgacaatggttgaactttcaagattcattggtttaaaaaaaaatgcggaaaatccaaagtagttggtaatgctattaaatctatttggattgtatgaatctcaataatatttgtgtaggcttgaaaaacatttgtcaaatacaactatatatttttacgatttgcatatggattcctagactattgcaataacttcaaaagttcctgattcaaatttgtgtattactgtaccaatgcatggcacaattagggccatttaagatgatgccaaattggtctctgtggctggggtcaattttccccacctcctttactatattatgtggtagaaacatgatctgctccctgatgggcattttggaaactcaagattcaaaagagagttaaggctgggcacagtggctcacacctgtaatcccagcactttgggaggccaaggcaggcagatcacctgaggtcaggagttcgagaccagcctggccaacatgatcaaaccctgtctytaccaaaaatacaaaaattagctgggtgtagtgatgggcacctgtaatcctagctactcaggaggctgaggcaggagaatcgcttgaacccaggaggtggaggttgcagtgagccaagatcatgccactgcactccagcctggatgacagagtgagcttcctcccaaaaaaaaaaaaaaagagagagagagaattaagagacatattcagtgcttctcaaaaaataaaatttttgtaaatcacgggaatcttattaaaaatgtagatgctgatttggcaagtctgaaatcaggtgtgggaggttaggcctaggttactggtacagaattaactttttttttgtaaatggttgcttttcaaattttaatgtccatacaaatcaccaagtgatcttgtttaaatgcatattctgattcagcatgtacaggatgggggctgagattctgtatttttatttatttatttgtttttaatttaatttcatttaattttaagttctggtatacatgtgcaggacgtgcaggcctgttacataggtaactgtgtgctatggtggtttgctgcacctatcaacccatcacctaggtattgca

SEQ ID NO: 26591 - DNA, 311 bp, Homo sapiens
accatttctatcagaaagttgaacactttatttgtcctgagaaatcttttgtgtgcctcccatagcatacaatattgacataatctgtgcccactctgaaagattcatcttattctttttatccaccctttataacaycagtcctccaaacttgttccaacctactccttccttatcctgccaaattatttgacagtatatatgaatcagtgaatagcagtccctttgactctgtctccatctaggcaaactggaaaacaaatgcatggttaagtgttcctctgggagggtaaagaagagggcgtgggagg

SEQ ID NO: 26592 - DNA, 1208 bp, Homo sapiens
ctgtcgccatgggagccaattgacttcagcgttgttagcatattaatgacctaccctgatttagagctgggtgggcggggacaccacctggattgtcagtcactgggcctggatcagcttttccatttgcagaatatgttgtttgttatttctttccagacaggcccaggagtaatatttacctaattgactaatccaagtaagcaggaggcccccttgcagcctcaaagggggttggtctcaggtcatagcctcctcccttcctctctccaccccacaggctgggctgctgggccaggcgccccaactggggagacattacatcagaacgactatgtaaccaagaccagatcccgcatcaggcctgggctgccgaagcacgctctggcatggcaggcagaggctggtagatgctgtgcagatgtcaggtctagagctgacagagatccctgaaaagcttttagctacaccccctacatgggtcatggaaaagtagtactaatgtatatcaatgatcattaagaaatgcatgagaacttgcagaacccagcacagacagtgcccagctcagtgggggaagggtatctgggaagggcccagctaatccctgtgcaaaagccatggcatgacaaccaggagccagcagagcacccaggagggagtcatgtctacctggagaggccaagaaggctgatacagcatttgtaggagaaggatttagataattccagaaagaagaaagtgagcattctcagccaaagaaaaagcagtgaagagccctctaattggctcgggggagtggggaggtgtggccatgtcacagtacaaagtgagaaggrgcagtggagggtggagaaaaacaggtttgagcctttccttttctttttttgaaacagagtctctctttgaagcccaggctggagcgcagtggtgcaaccatagctcactgcagcctcaaactcctggtctcaagtgatcctccttcgtcagcctcctgagtaactgggactacaggcatgagccgccatacctggctaacatttcaaaacagttttgtagagacagggttttgttatgttgctcaggctggtcttgaactcctgacctcaagtgatcctcccaccttggcctcccaaagtgctgggattacaggtgtgagccactgtgccaggccaagattggggccttttataaggctttgagtaaca

SEQ ID NO: 26593 - DNA, 1113 bp, Homo sapiens
ctatgcagcycttgatgggactagttgtaaggttgcttcttcagttttagttgatcgccacttcttctgcacaacagcagagttctatgggactgaataatgcaactaaacacaatttgattggacacacatttttcccagagccatagttcagcctgtcactgctatgtcatgaaacttctctgtctccatcctaacccttcccatgccccactcacaggcacgctgggcttcagtcacaccgactgtctgccattcccacatcacaacaggcttgctcagatcacttgcccattcatttatgttagtctctctgcctggaacttccttccttctcttttccacctagaaaatgtgtatgtctcccttaagctaagcataaaagacatctagttctggccaagattcccaagtacagttagtgactctcctttttatgctcctgtagtactgatcagtgatggcatttatccagcctgtatgaattcttctagaatgtaaggtggacttaggtctttttttttccccacaatgttgtagacatagtacctaatagtggttgaagtaatacatctatggctgcatctgacattccatgctcttaaaagagtatagtgccaggaggtttcagaggctctggctattggaggtggccttctcactttggcccacttggagaagggctcagccctcagagagaccgagagaccaggcagcctttatcaacctctctctctctttttttttttttttttgagacagagtctcgctctgtcgcccaggctggagtgcagtggcacgatcttggctcactgcaagctccgcctcccaggttcacaccattctcctgcctcagcctcccgagtggctgggactacaggcgcccgccaccacacctggctaattttttgtatttttagtagagacggggtttcaccatgctagccaagatggtcttgatctcctgacgttgtgatccgcccgcctcggactcccaaagtgctgtgattacaggtgtgagccactgcccccggcctatcaaccactctttaagacacaagaggagctggggagggacaatgctctctttacagacaagcaaaggctgtcgga

SEQ ID NO: 26594 - DNA, 720 bp, Homo sapiens
gaaccctaaattagttaaaaagttccttactactgttcatttagaatattaccaatagtttattactgattatatatgaggcactgctatattttgatagcagacaatgcatgataaaatttaattttcatgttatttgtactttacagttgagatgagaaaatggaggcatataaaatttaataacatatccaaaacgaataaaaaatacatggcctactaaagatttcagtttatctatctctttttctctctmtatataagtatatacacacacacatacacatacacacacacacataaacatatttatacatataaacatatatataataatctgttttgttctctattaaaattcttgttctccatttaaattattttttaaaatttattagtacatgttgccaatatacttccagtaaagtagtgctgtttgtgttcattaagatgaaattgctcaatatgtccctcttcttccttattgatattaattatgaaagtttttattcttggtaatttaaaactccaaataacgtttttctccatttcattttaacatctcttaaactactagatttaaacatatgaaattgaggccgggtgtggtggctcacacctgtaatcccagcactttgggacaccaaggtgggcaaatcacctgaggtcgggagttcaagacgagcctgaccaaggtggagaaaccctgtctctactaaa

SEQ ID NO: 26595 - DNA, 720 bp, Homo sapiens
gaaccctaaattagttaaaaagttccttactactgttcatttagaatattaccaatagtttattactgattatatatgaggcactgctatattttgatagcagacaatgcatgataaaatttaattttcatgttatttgtactttacagttgagatgagaaaatggaggcatataaaatttaataacatatccaaaacgaataaaaaatacatggcctactaaagatttcagtttatctatctctttttctctctatatatawgtatatacacacacacatacacatacacacacacacataaacatatttatacatataaacatatatataataatctgttttgttctctattaaaattcttgttctccatttaaattattttttaaaatttattagtacatgttgccaatatacttccagtaaagtagtgctgtttgtgttcattaagatgaaattgctcaatatgtccctcttcttccttattgatattaattatgaaagtttttattcttggtaatttaaaactccaaataacgtttttctccatttcattttaacatctcttaaactactagatttaaacatatgaaattgaggccgggtgtggtggctcacacctgtaatcccagcactttgggacaccaaggtgggcaaatcacctgaggtcgggagttcaagacgagcctgaccaaggtggagaaaccctgtctctactaaa

SEQ ID NO: 26596 - DNA, 720 bp, Homo sapiens
gaaccctaaattagttaaaaagttccttactactgttcatttagaatattaccaatagtttattactgattatatatgaggcactgctatattttgatagcagacaatgcatgataaaatttaattttcatgttatttgtactttacagttgagatgagaaaatggaggcatataaaatttaataacatatccaaaacgaataaaaaatacatggcctactaaagatttcagtttatctatctctttttctctctatatataagtatatacacacacacatacacatacacacacacacataaacawatttatacatataaacatatatataataatctgttttgttctctattaaaattcttgttctccatttaaattattttttaaaatttattagtacatgttgccaatatacttccagtaaagtagtgctgtttgtgttcattaagatgaaattgctcaatatgtccctcttcttccttattgatattaattatgaaagtttttattcttggtaatttaaaactccaaataacgtttttctccatttcattttaacatctcttaaactactagatttaaacatatgaaattgaggccgggtgtggtggctcacacctgtaatcccagcactttgggacaccaaggtgggcaaatcacctgaggtcgggagttcaagacgagcctgaccaaggtggagaaaccctgtctctactaaa

SEQ ID NO: 26597 - DNA, 2223 bp, Homo sapiens
ttgttcctttgtgtcattaactccaaatcccaaattccaaatgaagcatcagattgatcaagttaatttacttgtctgtttcctatttactaaggagtagggttacttggctctattgatttaatcacttgttcttagtcaacataatgtaaccattttttttttcttttgttttgctttttgagacggagtcttgctcggtctcccaggctggagtgcagtggcgtgatctcggctcactcactgcaagctccgcctcccgggttcacgccattctcctgcctcagcctcccgagtagctgggactacaggcgcccgccatgactcccggctaattttttttgtatttttcataaaggcagggtttcaccgtgttagccagaatggtctcaatctcctgacctcatgctctgcccacctcggcctcccagagtgctgggattacaggcgtgaaccaccgcgcccggccaaccatttttaaaataacagaaaattgactcatcttcattccagaaagagctcaccgaaatctcatcagttggtgcatcaactggttcaaagacaagatctccaagtgaagcaaattccccttcatgttttgtcactaatctgtttccatatcccacaaccatataaacaaaaaaaggctcaccaccacagaagtcccctacttcatagataagcaaaataaaaggaaactaaaagtgaaattagttaaaagaaagaaaggcatgactcagcatggaaagaaagctacgtagaggctgtagtcttcatttctacactgttcacagaggtgtaattaatattttatacttctctttcccactagcatttcacatttcctttgctttcagctaacaccagttttagaatttttgacctggtagtgtgtattaattttctgttgctgctataacaaattactacaaatttagtggttgaaaacaacacaatggtattacttcataattctagaggtcgtaagtctgaaatatgtattactgggataaaatcaagctgtttgcaggcctgaatttctttggaaagcagtaggagataatccatttccttgtgatttccatattctagaggattcctgaattcattggcctgtgatccctttcctcaactttaaaggcagctgcataacatcttcaaatctaaccctaactctgaccttccttcctcccacttatcaaggcctgtgtgattacattagaaatacctggtcaatccaggatacttttccatttcaagatccttacatcgatcacaactgaagttctctttcgccgtgtaagataacgtaatcacccaggttctgcaaattcgaatgtggacatctccgggtgtcattattctgcctaccatatggttatgccaaatcttaattcctgtgtgacctcagaactttttgtccctataatttaaaatagcgttagtaaagcaaaaatataaaatgtaaaaaaaaagggaaaaaggaagctgattgccttggtgagtcaacactgggtattttctgaccactatttgaaacaaaaaaggaaaccactgatattctatgcaaagatctgttcctggaagccactctgaggagacaccaggagaacttttatcaatccttcattgatttgaagtaaaagtgctaaagcaatggttgtgggtggcaacccattagcagatcacaaaatcactgtagtgggtaactaaacaagaggaaacacaagatggcatcctgtgtaactggggttaagcattactctctgaaactcatggcatcagtttcctcttaggctcttccaacagagtataatcatgttcatttcagtttacaatccttgcagtcccatcgatttgtgagattatacccaggtcatccacagtggaggtctgaaaatgttcttagttgtactctaatttcactaactgccaaaaggttttccagaataatctcagttgcttcattcctttaaaggtgaagcccraagaacgcatggcgattactttagaggaacaattagcagcagaggcagggctgtgctgatcccatctggcatcgctgggagctaacacacattaaagacatggcactttgggtccgggtccaggtcctggttcagagcagctgccacaccgtggctactagaggatccttttccggctttggaaactgaggctgactgcaccatttacagaaatttcatcatgaagatccttaca

SEQ ID NO: 26598 - DNA, 2223 bp, Homo sapiens
ttgttcctttgtgtcattaactccaaatcccaaattccaaatgaagcatcagattgatcaagttaatttacttgtctgtttcctatttactaaggagtagggttacttggctctattgatttaatcacttgttcttagtcaacataatgtaaccattttttttttcttttgttttgctttttgagacggagtcttgctcggtctcccaggctggagtgcagtggcgtgatctcggctcactcactgcaagctccgcctcccgggttcacgccattctcctgcctcagcctcccgagtagctgggactacaggcgcccgccatgactcccggctaattttttttgtatttttcataaaggcagggtttcaccgtgttagccagaatggtctcaatctcctgacctcatgctctgcccacctcggcctcccagagtgctgggattacaggcgtgaaccaccgcgcccggccaaccatttttaaaataacagaaaattgactcatcttcattccagaaagagctcaccgaaatctcatcagttggtgcatcaactggttcaaagacaagatctccaagtgaagcaaattccccttcatgttttgtcactaatctgtttccatatcccacaaccatataaacaaaaaaaggctcaccaccacagaagtcccctacttcatagataagcaaaataaaaggaaactaaaagtgaaattagttaaaagaaagaaaggcatgactcagcatggaaagaaagctacgtagaggctgtagtcttcatttctacactgttcacagaggtgtaattaatattttatacttctctttcccactagcatttcacatttcctttgctttcagctaacaccagttttagaatttttgacctggtagtgtgtattaattttctgttgctgctataacaaattactacaaatttagtggttgaaaacaacacaatggtattacttcataattctagaggtcgtaagtctgaaatatgtattactgggataaaatcaagctgtttgcaggcctgaatttctttggaaagcagtaggagataatccatttccttgtgatttccatattctagaggattcctgaattcattggcctgtgatccctttcctcaactttaaaggcagctgcataacatcttcaaatctaaccctaactctgaccttccttcctcccacttatcaaggcctgtgtgattacattagaaatacctggtcaatccaggatacttttccatttcaagatccttacatcgatcacaactgaagttctctttcgccgtgtaagataacgtaatcacccaggttctgcaaattcgaatgtggacatctccgggtgtcattattctgcctaccatatggttatgccaaatcttaattcctgtgtgacctcagaactttttgtccctataatttaaaatagcgttagtaaagcaaaaatataaaatgtaaaaaaaaagggaaaaaggaagctgattgccttggtgagtcaacactgggtattttctgaccactatttgaaacaaaaaaggaaaccactgatattctatgcaaagatctgttcctggaagccactctgaggagacaccaggagaacttttatcaatccttcattgatttgaagtaaaagtgctaaagcaatggttgtgggtggcaacccattagcagatcacaaaatcactgtagtgggtaactaaacaagaggaaacacaagatggcatcctgtgtaactggggttaagcattactctctgaaactcatggcatcagtttcctcttaggctcttccaacagagtataatcatgttcatttcagtttacaatccttgcagtcccatcgatttgtgagattatacccaggtcatccacagtggaggtctgaaaatgttcttagttgtactctaatttcactaactgccaaaaggttttccagaataatctcagttgcttcattcctttaaaggtgaagcccaaagaaygcatggcgattactttagaggaacaattagcagcagaggcagggctgtgctgatcccatctggcatcgctgggagctaacacacattaaagacatggcactttgggtccgggtccaggtcctggttcagagcagctgccacaccgtggctactagaggatccttttccggctttggaaactgaggctgactgcaccatttacagaaatttcatcatgaagatccttaca

SEQ ID NO: 26599 - DNA, 574 bp, Homo sapiens
gctgatcacttgtggtcaggagtttgagaccagcctggccaacatggtaaaaacccatctctaccaaacatacaaaaattagcggagcctggtggccagagcctgtaatcccagctacttgggaggctaaggaaggataattgcttgaacctgggagacagatgttgcagtgagctgagatcttgccaytgcacaccagcctgggtgacagagcaagactctgtaaaaaaacaaaaaggaaaagaaaaaaaggagaaagaaaatgagaaaatgtatattaatatcaaaataggagattaaagatgacagacactggaaatatagacaggagtacagaatggctaatctaccagtaagtagaagcactgcaaagaaaagaaatgtttcgatcacaggtaaattacttaatctctttgagcattaatttcctacatttttaaactggcaatgaaagtaaatatccggatattatatatcaattcagttctgtgttgcccctgaaagtgtcctgcctgtgtaacgtctttgttgtgaagattaatactagtttcatcataaaataggcggtgttcta

SEQ ID NO: 26600 - DNA, 574 bp, Homo sapiens
gctgatcacttgtggtcaggagtttgagaccagcctggccaacatggtaaaaacccatctctaccaaacatacaaaaattagcggagcctggtggccagagcctgtaatcccagctacttgggaggctaaggaaggataattgcttgaacctgggagacagatgttgcagtgagctgagatcttgccattgcacaccagcctgggtgacagagcaagactctgtaaaaaaacaaaaaggaaaagaaaaaaaggagaaagaaaatgagaaaatgtatattaatatcaaaataggagattaaagatgacagacactggaaatatagacaggagtacagaatggctaatctaccagtaagtagaagcactgcaaagaaaagaaatgtttcgatcacaggtaaattacttaatctctttgagcattaatttcctacatttttaaactggcaatgaaagtaaatatcyggatattatatatcaattcagttctgtgttgcccctgaaagtgtcctgcctgtgtaacgtctttgttgtgaagattaatactagtttcatcataaaataggcggtgttcta

SEQ ID NO: 26601 - DNA, 517 bp, Homo sapiens
aaccaaagacaattgacaactcatcattacaacaaaaacacccacaaagtcaggtagagtaaacatgtaagtcataaattcaaaccaagagatcatgaattggcccttgtggttgagatagatgacaaaaaaaaatgaaatactgccagactaaatcatttcaatcactggaatcctcatggcataaatttattctaaaacagtttcatttatggttgatgcagttgctcatgcaggaataatgaataaaagagaaattattaatatctttctgtaggaagttactaatcaaactaacagtcaaatgaaaagcagaggattgaggaagttaccgaacttgccaaagttataaagctacaaaagagyaaaaataggaattcaaatgtggacctctcacccttaagaaataatgctcttttattgctatcttaccatttagggagtgagagatttctcacttaatgatcactaaaaagcagtagtttgaacaaacaaatgtgtaggtggagaacaaaaa

SEQ ID NO: 26602 - DNA, 619 bp, Homo sapiens
cataaatgatattattaaataatttcaaccacaagtgaaataaaaaatttgagaaaattatgacaaagagaggcttatataatacttaaaatgtaaaaatatcctgcttttattatcagtgaagaaattaagtaatgaggccataatatattttttttgaaaatatcacttaactacttttttaaagctatttttagattgtaattttaaaagtgggccgggtgtgatggctcacacctgtgatcccagcagttttggaggccraggcaagtggatcacttgaggtcatgagatcaagaccaggctggccaacatggtgaaaacccatctctactaagaataccaaaaaaaaaaaaaaaaaaaaattgctgagcgtgcacacgcctgtaatcccagctacttcagaggctgaggcaggagaatcacttgaacctgggaggcggagtttgcagtgaaccgaaatcacaccattgcactccagcctgggcgacagagggagactctgtctcaaaaaaaaaagaaaaaaagtgtaagacacaattcaaattcttgcataacagctacaaaatcttcataaaaaacgaatcaggagtcaattattgaagtttatgcttattct

SEQ ID NO: 26603 - DNA, 1137 bp, Homo sapiens
tccagaccttgcatcatgcatctctttctttggctgatcttgatttgtatctgtgacgataaagctgtaataaagaagtatagtgctttcctgagtgctgtgagtcattctcggaaattatcaaacctaaaggggtagtgaaaatcccccaattcttagctagttggtcagaaatgtgtatgtcctggaccctggagcttatgagcttgagagagaactctgccctttacctgtgaaatttgacctatctaccagtagttagcatcagaattgtattgcacccatgaagtaaaacactcacttcaggataaacttgcatgggtgaatccatactgtgggaggccctctcgcatggtggtgaatatctttgcctctggtgagaggtggcccatgttccatcccagctctgccactatccagctcagtgagtttggacaaatagctaaccttcttttcatagctttggcatctattaaatgagaatagtagaagtaacattcttctagggttattaggaaacttaaaataattagtatgtctaaagcacttataaggtaattgcccagtagattctccttgtctgctgcctagatagagcgaatttctcaagacagggggattgcaatagaaaaagagtttaattcatgcagagctgctgtacaggagactcaaattttattattattcaaawtaatctccctgataatttggggatcagcatttttcaggataatttggtgggtagggagtcagaaagtggagaatgctgattagtgaggttggagaaatcacagggggtaaaagtgagtttttcttgccctcttctgttcctggatgggatcacagaactggatgagccagattattggtcccaatggcatcagctggtgcatcggaaccagggtctgccagacttctcaagcactgatcttacgttttacaacagtggtgtttttcccaggagcactttgggggaggttcgaaatcttgcagccagttgctgcatgattcctaaaccacaatttctaattttttttcttttttcttttttttaagataaggtctcactttgtcacccaggctggagtgcagtggtgcgatctcggtttactacagcctggacctcctgggctcaag

SEQ ID NO: 26604 - DNA, 1051 bp, Homo sapiens
ttcgagtccaggagtttgaggctgcagtgagctatgattgtgtcactgcactccagcctgtgtgaaaaagctagactctgtctcaaaaaaagaaaaaaaaaaaaaacctttggtacctttgagtgctcaccattgcctaccgaatgcaaaataaattctgcctgcttttcatggtcctcctttgagtccttgagcagcagtttgtaccaggaactacaccaattagagaataaaggggtcagtggagtctggtttcggctctcatggagcaaaaattctgtatgaggatatgaagaagtaaacaagtaaacagagaatattaatattgtgccgtaagtggtgcagcagaagaaatgccttgtggaaggaagtgctgtgggaggcaaagggacagaatgacccaccctaacagtgtcactggggaggcagtctgcaaagccaccttcaactggccttgaggatgagtcccaataacccatggctgggttctgagccagcatcctgactttggccttctgttcatgttgtttcctctgcctggaatccatcccctcccctccttccagacacgacctgcccaacacaggtcaaacaacatcctcttttatgagcttcgcctaaggtacctagtcagaattaaagtgttcctcctgaaggagagctcacagcaggctgctggttgctctatttagctctcatttgattttctcttgtgttagagtctgtcgtttacatgtgtaagtggactcctgcctcgtccatttccttagttcctacagccctaggtaagaatcattgcatctagtgagcaatcaattaatagccactgaattaaattatattcacagtcaatccttgctcaaagactgcagctgacgttccctcttagactatgcacagagaggattctaggatgtaatacatgattcttttggtgccccacaacctcaggctttctactcatgcccctccatacttccttcaattgctcctccrttaatcaggcctctgtaagcctgactatttcataccctcgaaatgtgtactgctg

SEQ ID NO: 26605 - DNA, 1051 bp, Homo sapiens
ttcgagtccaggagtttgaggctgcagtgagctatgattgtgtcactgcactccagcctgtgtgaaaaagctagactctgtctcaaaaaaagaaaaaaaaaaaaaacctttggtacctttgagtgctcaccattgcctaccgaatgcaaaataaattctgcctgcttttcatggtcctcctttgagtccttgagcagcagtttgtaccaggaactacaccaattagagaataaaggggtcagtggagtctggtttcggctctcatggagcaaaaattctgtatgaggatatgaagaagtaaacaagtaaacagagaatattaatattgtgccgtaagtggtgcagcagaagaaatgccttgtggaaggaagtgctgtgggaggcaaagggacagaatgacccaccctaacagtgtcactggggaggcagtctgcaaagccaccttcaactggccttgaggatgagtcccaataacccatggctgggttctgagccagcatcctgactttggccttctgttcatgttgtttcctctgcctggaatccatcccctcccctccttccagacacgacctgcccaacacaggtcaaacaacatcctcttttatgagcttcgcctaaggtacctagtcagaattaaagtgttcctcctgaaggagagctcacagcaggctgctggttgctctatttagctctcatttgattttctcttgtgttagagtctgtcgtttacatgtgtaagtggactcctgcctcgtccatttccttagttcctacagccctaggtaagaatcattgcatctagtgagcaatcaattaatagccactgaattaaattatattcacagtcaatccttgctcaaagactgcagctgacgttccctcttagactatgcacagagaggattctaggatgtaatacatgattcttttggtgccccacaacctcaggctttctactcatgcccctccatacttccttcaattgctcctccaytaatcaggcctctgtaagcctgactatttcataccctcgaaatgtgtactgctg

SEQ ID NO: 26606 - DNA, 1088 bp, Homo sapiens
ggactagccaagcccttccccttcttcccagaatctcctggtccatgagtctcaacttgaacaccccaagggttcttgttgaaatccttatcatgcagatcctatgtgtgagcagctgacattctatctactcacagattaggattttgccttactctatactctatctagaatgacagcctggtgtttctccaaaatagctgcagtttgttatatattcctgcaattttctctcatgagtctacctccttaatgatctttgaaatttcacagccatctccattcctccagatgcaacccacctcacttgaatctgaaacactctccaatctattcactacagcaggtgcctgcattctgattgaacttccacaggaaaaaatatttcagcatgccctttcaccctcattatctacctatcatctatctatctgtaaatctacctacaatcacttatggttatataaatatagacatcattatcatttcttaatatcccaaggcagaatgtatatttagacaaggtttatcattaatgattatgaatattaagtgcatgctttacttacatttactccacagtgtcacttacttaccctttcaggacattagggaactcctacatggctcggagtcaaactggattcaattactaacttagagatggccgattggtaaggtgtatttctatccctcctacttccagcattcctaagccatgggttggagttcaagttctctccctgctcctcctcctatcactccagcaaagtgtggacatgctccaggaattcacatcatctgcactgggagacagttcactgagacaaccacgaaggacctcataatcctcagctckctgactgccagatttctgcagaattctacaagccagtgtgactggatatggagcctgggctcattagagcagtacctgatccatgccttactgttgcagtgtttctgaatctgagagacaccttgatgctggtctcattcactccctcattttagaggggaaccactgggctgctcctcctcagggtcccctactgggtctttctgctctgttcctcgaggcaccccag

SEQ ID NO: 26607 - DNA, 1088 bp, Homo sapiens
ggactagccaagcccttccccttcttcccagaatctcctggtccatgagtctcaacttgaacaccccaagggttcttgttgaaatccttatcatgcagatcctatgtgtgagcagctgacattctatctactcacagattaggattttgccttactctatactctatctagaatgacagcctggtgtttctccaaaatagctgcagtttgttatatattcctgcaattttctctcatgagtctacctccttaatgatctttgaaatttcacagccatctccattcctccagatgcaacccacctcacttgaatctgaaacactctccaatctattcactacagcaggtgcctgcattctgattgaacttccacaggaaaaaatatttcagcatgccctttcaccctcattatctacctatcatctatctatctgtaaatctacctacaatcacttatggttatataaatatagacatcattatcatttcttaatatcccaaggcagaatgtatatttagacaaggtttatcattaatgattatgaatattaagtgcatgctttacttacatttactccacagtgtcacttacttaccctttcaggacattagggaactcctacatggctcggagtcaaactggattcaattactaacttagagatggccgattggtaaggtgtatttctatccctcctacttccagcattcctaagccatgggttggagttcaagttctctccctgctcctcctcctatcactccagcaaagtgtggacatgctccaggaattcacatcatctgcactgggagacagttcactgagacaaccacgaaggacctcataatcctcagctctctgactgccagatttctgcagaattctacaagccagtgtgaytggatatggagcctgggctcattagagcagtacctgatccatgccttactgttgcagtgtttctgaatctgagagacaccttgatgctggtctcattcactccctcattttagaggggaaccactgggctgctcctcctcagggtcccctactgggtctttctgctctgttcctcgaggcaccccag

SEQ ID NO: 26608 - DNA, 771 bp, Homo sapiens
cagtaggaaacaaatgacacattcaaaatgttaaaggggtttaataaagggtctatttccagaggtgagggcagggtatgagcagaccacaagaatagtgaaatacactgggctataaacagaggggctataacttacccataggcycataccataggataggactagggaaaggagagatgatcagaatctggaagtcttatggagactaccttggccttctgtttgaaggtacagcccaaatgagttgcgagcctacagcaagagcgtaaatactataaacaccttgatctcactttcactcctcctgtagcaatcaaattggagagcaaacctggaaaggtcaacaaactttattcagcacgctgatcttcacccaaatcatgaaacgcatgaatgtccaataactcagtgtttcacagccaacttgacatagatacaatgcatgataggaagcagttgaagacaatttagtgctcttgtaatcacacattttctcatttgtttctgtcagttcccaaggaagcaagcctgttttggtcatcttcccaccaccagcacacaaaccaaaacccagaatacagcatgtgctcagtaaattgtagatgaatgacagtaataacacagtgcgaccttatatgagtcccatgactttttagccctagttttatttaattttttgagaatgagaagctggattggaggatctctaaatttcttgagaacaatggtagtccttatatctatgactctaagaacttccattcatcc

SEQ ID NO: 26609 - DNA, 636 bp, Homo sapiens
ttaggttaaaaaaagtttacacatatttatcaacaacttactttgtgtagtatttactatttctaaataattttgtatctattattcatgtaatttttaaaccaagactgtaaattaggaaagacaaatrttagatttctacaacaccagactaaaaatcatttattcaatattcctattttacacgagagaaattcaaaaacttcagagccaaatctagctagtttgcagacccattagcaccattttaggtttgaataaatagaggattgatgaagttaccaagaacaaagttagcatggtatagtgcagacagctgttcaaaaccaaaccttctatcattaatattctatatttgtttccattttattatttttactttttacttttctttctggagctattcatcatgaactgttgtttccattttatcctatttttttaggttggttttaaatttctgacaaatgtttcttgagttatttaaatcaattaatctggtcctttcatgatagactgttttatttgctcgatttggtatatttttaaatttcacctatcaaagaggaaaccaaatatctcttactatttttacaaaccacgtgctggccaaatcgtgatttgagtagattatag

SEQ ID NO: 26610 - DNA, 636 bp, Homo sapiens
ttaggttaaaaaaagtttacacatatttatcaacaacttactttgtgtagtatttactatttctaaataattttgtatctattattcatgtaatttttaaaccaagactgtaaattaggaaagacaaatgttagatttctacaacaccagactaaaaatcatttattcaatattcctattttacamgagagaaattcaaaaacttcagagccaaatctagctagtttgcagacccattagcaccattttaggtttgaataaatagaggattgatgaagttaccaagaacaaagttagcatggtatagtgcagacagctgttcaaaaccaaaccttctatcattaatattctatatttgtttccattttattatttttactttttacttttctttctggagctattcatcatgaactgttgtttccattttatcctatttttttaggttggttttaaatttctgacaaatgtttcttgagttatttaaatcaattaatctggtcctttcatgatagactgttttatttgctcgatttggtatatttttaaatttcacctatcaaagaggaaaccaaatatctcttactatttttacaaaccacgtgctggccaaatcgtgatttgagtagattatag

SEQ ID NO: 26611 - DNA, 636 bp, Homo sapiens
ttaggttaaaaaaagtttacacatatttatcaacaacttactttgtgtagtatttactatttctaaataattttgtatctattattcatgtaatttttaaaccaagactgtaaattaggaaagacaaatgttagatttctacaacaccagactaaaaatcatttattcaatattcctattttacacgagagaaattcaaaaacttcagagccaaatctagctagtttgcagacccattagcaccattttaggtttgaataaatagaggattgatgaagttaccaagaacaaagttagcatggtatagtgcagacagctgttcaaaaccaaaccttctatcattaatattctatatttgtttccattttattatttttactttttayttttctttctggagctattcatcatgaactgttgtttccattttatcctatttttttaggttggttttaaatttctgacaaatgtttcttgagttatttaaatcaattaatctggtcctttcatgatagactgttttatttgctcgatttggtatatttttaaatttcacctatcaaagaggaaaccaaatatctcttactatttttacaaaccacgtgctggccaaatcgtgatttgagtagattatag

SEQ ID NO: 26612 - DNA, 586 bp, Homo sapiens
ggagggttacagctctttcactcctgctgcctgcagctcagcaaattccaagttcttgtctcacaaccaagaggaataaggtatgcagccactggagagtgagtaaggcagagaagaattctattgagtgacagaaggaaagctctcagctgcaagaggggacctgaaagtgggtgrccatctatgaggctgagtctgaggttcttagtgggcttagaataggggagcatgtgctgattggtccatgagtggccttggaaaaagcacccttcaatggggtaaaaggcatcattccaaaggaactaatcgagagagagtgggtaagacagagacggaagttctcactccagttgcggactctgtctggaactggcagtttggttttcaggttttgaactgtccttggcttgaaggttgggtttcactggggacctgtccttgtctgcctaggaatctatctgtctcctgttactatcagctggatcctatgccagtgcactgaccagtcattgcatgtaggctgccctcggaagaagtagtgtgatcttcagcaggtgaagatgctttttgtaattaagggaaattc

SEQ ID NO: 26613 - DNA, 586 bp, Homo sapiens
ggagggttacagctctttcactcctgctgcctgcagctcagcaaattccaagttcttgtctcacaaccaagaggaataaggtatgcagccactggagagtgagtaaggcagagaagaattctattgagtgacagaaggaaagctctcagctgcaagaggggacctgaaagtgggtgaccatctatgaggctgagtctgaggttyttagtgggcttagaataggggagcatgtgctgattggtccatgagtggccttggaaaaagcacccttcaatggggtaaaaggcatcattccaaaggaactaatcgagagagagtgggtaagacagagacggaagttctcactccagttgcggactctgtctggaactggcagtttggttttcaggttttgaactgtccttggcttgaaggttgggtttcactggggacctgtccttgtctgcctaggaatctatctgtctcctgttactatcagctggatcctatgccagtgcactgaccagtcattgcatgtaggctgccctcggaagaagtagtgtgatcttcagcaggtgaagatgctttttgtaattaagggaaattc

SEQ ID NO: 26614 - DNA, 586 bp, Homo sapiens
ggagggttacagctctttcactcctgctgcctgcagctcagcaaattccaagttcttgtctcacaaccaagaggaataaggtatgcagccactggagagtgagtaaggcagagaagaattctattgagtgacagaaggaaagctctcagctgcaagaggggacctgaaagtgggtgaccatctatgaggctgagtctgaggttcttagtgggcttagaataggggagcatgtgctgattggtccatgagtggccttggaaaaagcacccttcaatggggtaaaaggcatcattccaaaggaactaatcgagagagagtgggtaagacagagacggaagttctcactccagttgcggactctgtctggaactggcagtttggttttcaggttttgaactgtccttggcttgaaggttgggtttcactggggacctgtccttgtctgcctaggaatytatctgtctcctgttactatcagctggatcctatgccagtgcactgaccagtcattgcatgtaggctgccctcggaagaagtagtgtgatcttcagcaggtgaagatgctttttgtaattaagggaaattc

SEQ ID NO: 26615 - DNA, 1299 bp, Homo sapiens
aaaatcaggtttttatccttaaatttaagatcaataatgcctgtactacggattaaaatctgttaaaacatttgcctgtggctttaaaggaaaaaagtgggaatgagacctcatgccaacagtgtcaaaaaattaagcttagctttgagttagctgacttatttcagtgtcagaacgttcagcttttcacaagaaatctcttataaaacctgttttcaaaaagataaaatgtagaacgttcaggcaatgttgctttttcagaatatcatgtttaatatgaaacagaaaaatgatcactttctaatattaattatcttttaaaaaccaatagctattagcaggttagttgttactcaatgtggcacaatatatgtaaaaggaagaataactagttaagaaatacatatgctatataacttgggagaatcctatctatgaaaaaaattagttcaaccaaattcatactgttatttctttaaaactttgagtataagcaaacacctataaaatattccatagtctttgattaaaaagatagccaaattctacattgattgacataatctgttcaaacttgcactagttatctttccatatttgcaaaattccttccttctctctcatttcagttaatgagatctgctctcaccttgtcactcaagccacacccatctcttttctctgagcttcccatataatttttccctttatttaaatatccttcctcactgttaaaagccatggtaaaatgtctccacacttgtgaaacctgttttcctgtcagaaaaaaartgaaaatgtgctttgagactatttaatgtagtttgtttagttgttgatgaatatattttttcgcttgatttatgatctccataaatattgggatgactttgttgaaatattctggtctgtgttaaacagatgtttctccccttgaaagaataacataaaactttaactttattgcatacgtattttttttttttgcaggagggtgtctgatcacctagtgagtggggtaccatataaaaaacatcaaaaactttattatttattataaccaggaagtcttattttggctaaatcagtggaatcacctcctttggatgagaacaaagtcaggttttcctttctctctttcccaatagtattatagagataaacataaagaattttaaaataaaaacttaactgatacatagacatttttcaatagtttatttctagttttcatttttcttcttcataattatggttagttgttcacatttattttttaagatacattttctcaggttt

SEQ ID NO: 26616 - DNA, 530 bp, Homo sapiens
ttaaccatgttaacaataaaagatgatataaagaaaatttaggaccaatgtctagctttataaaatttatttggttgctagagaataagtgacaattctagttttcatccaatttagtggttttattggaggtgaatatgaaatagaacataccttaagttctctctacctttcttgaatgtattagtatacatggtaggggaataacaatcctaaaaaagaagccactttattaaagcaaactttaataaagaatctgaacrtttttattcatatgaaggcactaaatctttccatttctgtcaccatgaatattttttaaagtagttattaagcaccagttggcatatgaggttttaatgaatacattgtatgttaaccagtcgctgtaccttcttctaaagaggcttcctttcccatgaactagtcgaagatgaatgatagtcttttaaagaaaaatatcggcttaatctctggctacgcccagggaaatcagaaacatttgtctcagaatttaggccacccagttc

SEQ ID NO: 26617 - DNA, 1015 bp, Homo sapiens
cttagttctgggtgatttccaaaaaaccacacctttcatggattcagattaactttggaccactcctagaatcctggacatgtctggaaagtgaataggtcattgcatttcattttaggtcaagtcaaccacaaatctggctgaacctgactaatctgagcagagtccaccaaactatggcttctaacctaggttaactccaacagaactggggaaccatttattattctgtgggtgaggccgcatgcatcacaagtcaacagcayatgaatgaaaaccacagaattaaaggtgttactggcaccaagacccaaactaaaagtgctgatccaggaatgacaatttctaaacattttcaggcaagttaggaacacaagtaagactagctctgggcagatcccatttgtgtgactggcaccaacacagaaaatactgtacagtgtgtgcctcatttaccttggcactgaggctgcatcagcccctttgtgccctgactatgccttatgcaaattttaagatacaaagcaattttttgttccaggtttattttaatcatctttagattctccttcccttagcaggttaccttcattgtggtaaaaataaagaaataagtaagtctgtgatccccttgtatagtttaaaaacattctggttgccaggggaaatgcaaatgcagatcctttcttccatagtcttccaggttttcggggtatattaggtcaagtccattaagaagtaggagatttactgggggaaggaggagaaggtggagagatccttcagattgtgtagaagagaaggaagaaaggaagactgggtatgaggagtctcagactgcagtgcagtaccaaggaagatttggccaggttgatggggagtccttgaatcaaagttactgaggagtcctgtatattgccaaaatggacctaccttagtatctctgaggtggtccagaattggctgggaaccaccccccacaacaaaagtatgtccttggggcaaatgcagtgct

SEQ ID NO: 26618 - DNA, 598 bp, Homo sapiens
caaaactgattttccaaaggagcagaaaaccaaacactgcatattctcactatacgtgggaccagtaggaccagtaatatagggcagttaagaccagtaaacaaggaggaaaggtcatcaaagatgattttcttttgaaatgggagattaggagaatagtggggtaactactgatagcagattgagacattagaaagacgtgccattttcagtgtttcttggttttttttcttttttayaaagccatttatcttaagtgccttttgaaaatattaatcctatatttcagttgcattcaatgcagtgttttggcacccattaaagccatgggtatagggagaagtgcaagcgctcccaagtttgtgagagagttctgggtctttggagggagggattcagcctgggaattcctagattcctgcaagcacctctgagtcactaattctttaaatcacatgttccgtcagctaaaataaattaataaataaataacaataagttactctaagaattagaagggatgtagcctcagaaagccctttggaagctctaaagtgtaaaagatatccctcattccttctcattccaaaggaagtca

SEQ ID NO: 26619 - DNA, 598 bp, Homo sapiens
caaaactgattttccaaaggagcagaaaaccaaacactgcatattctcactatacgtgggaccagtaggaccagtaatatagggcagttaagaccagtaaacaaggaggaaaggtcatcaaagatgattttcttttgaaatgggagattaggagaatagtggggtaactactgatagcagattgagacattagaaagacgtgccattttcagtgtttcttggttttttttcttttttataaagccatttatcttaagtgycttttgaaaatattaatcctatatttcagttgcattcaatgcagtgttttggcacccattaaagccatgggtatagggagaagtgcaagcgctcccaagtttgtgagagagttctgggtctttggagggagggattcagcctgggaattcctagattcctgcaagcacctctgagtcactaattctttaaatcacatgttccgtcagctaaaataaattaataaataaataacaataagttactctaagaattagaagggatgtagcctcagaaagccctttggaagctctaaagtgtaaaagatatccctcattccttctcattccaaaggaagtca

SEQ ID NO: 26620 - DNA, 563 bp, Homo sapiens
gtagtctcatctgagccctgctcactcgacggccgccgcttcttacagccttccttctcttctgttttgcagataacggggaatggagaccaactgccgcaaactggtgtcggcgtgtgtgcaattaggtaagaacccccttctcctgcccgggtcatcggacgggaggcgcgccacgtgagggcggcaagagggcactggcctgcggcgaggccccagcgaggggcgcttycccgaggggccagcctgggcaggaaggaaatcagaaccaaatcgccagtggcctctccctgtggcggggcggtggactaggaagcagcggcgcgctgtgtaccgaagccccccagcctactcctcccggctggaaccgccggcaaccggggaggcgcagaaagagtacgccatcctgccccgggttgccagagggtccgggggacggggatgccgtcagctctttcctctaactgggtctttgctctttgtccctctttctcctccggcctgcctcgcccctccccctcctcccgtccccggctcctttcggccgcggtccgggacgcctc

SEQ ID NO: 26621 - DNA, 529 bp, Homo sapiens
ctgcaaaatgggagccttaaactagacagtctcaatttagatcatagaatagtacaagctcagcagcgagatgggctgagttctaatcctggctccttcatgtcctaccaggtggccttgggcagttgcttcatccctgtacctcagttttctcccctgtaaatggggctgagagcggtatcaacccatgagcggctgtgaggttctgtaagcaacacacgcagagcgtccagaagatgctggaacgttcgtgggartcatccgctttttcaatcgttagctccctgtacacctcccctgcagtgctctgaaggatgacagggccacgttaatggtctcttctggccttcctggggcgcggccgggtggcctacaccgaacagagactgtgtggatgtgtcatggggacagacagacatcctggggcccgccgtggtggatggcaagtggcagggagctctggatgtgaagctggctcaggctgcaccgggcagccaagggcgcctttgtccctttgtctcctctcgtg

SEQ ID NO: 26622 - DNA, 559 bp, Homo sapiens
ttacctgaaaccatctcagatagggttcacacatccctttcccgaaccctcccaggagcccctcgtgggcgcccaggtcctgcctgctgttgtggcccaggctcacctggagcaactcgactcttcgttacagcctcgtgaacctttcagttcctaaagctgtctagcctgtgaaaggaaaatgaatctgggggccccaaaatcactaagctaaagggaaaaaagctgggaactgcttagggcaaacctgcctccccatctattcaaagtcacccctctgctcactgagataggttaatatgtgatagcctcctttgcggaggctattcagaaacccgaaagaatacaacagtttgtctctcacctacctgtgacctggaagccccctccctgcttcgagttgtcccgcctttcccgagggaaccaacgttcatcttacatatattgatgtctcctgtctccmtaaaatgtataaaagcaagctgtgtcccgaccacctttggcacatgtcaagacctcctgaggctgtgtcacgggcgtgcgtcctcaaccttggcaa

SEQ ID NO: 26623 - DNA, 419 bp, Homo sapiens
ctgagggtggagctgagggtggaaggggagtgagctgaygctcggaaggtgtcttgagattatcatccgctgagggtggaagcggcccccgcagacgctcggcaggtgtcttgatattatcatctgctgagggtggagctgagggtggaaggggagtgagctgacgctcggaaggtgtcttgagattatcatccgctgagggtggaagcggcccccgcagacgctcggcaggtgtcttgatattatcatctgctgagggtggagctgagggtggaaggggagtgagctgacgctcggaaggtgtcttgagattatcatccgctgagggtggaagcggcccccgcagacgctcggcaggtgtcttgatattatcatctgctgagggtggagctgagggtggaaggggagtgagctgacgc

SEQ ID NO: 26624 - DNA, 419 bp, Homo sapiens
ctgagggtggagctgagggtggaaggggagtgagctgacgctcrgaaggtgtcttgagattatcatccgctgagggtggaagcggcccccgcagacgctcggcaggtgtcttgatattatcatctgctgagggtggagctgagggtggaaggggagtgagctgacgctcggaaggtgtcttgagattatcatccgctgagggtggaagcggcccccgcagacgctcggcaggtgtcttgatattatcatctgctgagggtggagctgagggtggaaggggagtgagctgacgctcggaaggtgtcttgagattatcatccgctgagggtggaagcggcccccgcagacgctcggcaggtgtcttgatattatcatctgctgagggtggagctgagggtggaaggggagtgagctgacgc

SEQ ID NO: 26625 - DNA, 591 bp, Homo sapiens
ttttttttttagaaggagtcttgctctgttgcccttcctggagtgcagtgacgtgatcttggctcactgcaacctccacctcctgggcttgagcgatcctactgcstcagccccccaagtagctgggaggacaggcgcaagccacggcactcagctaatttttgtatttttcgtagagatagggtttcaccatgttgcccaatttggtctcgaactcctgagctcaagtgatccgcccgccttggcctcccaaagtgctgggattacaggcatgagccaccgtgcctggccagaaaattgtaaacacacacaaactctcaagtggcctaattccctctcaccaaaccaatcacaatacagataaaagagaataacttgtgttcatttttgtacaaacaaaaaagatataaattgtgaatgatgcatgatttttaattacaagtaaactgggcaaatgcttctgcattatttaaagctaaaaggtgatcagtggaaactttcctctgttagtactctaatactttttatatttatcggctcactacaacctgtgcctaccaggttcaagcgattctcctgtctcagccacct

SEQ ID NO: 26626 - DNA, 518 bp, Homo sapiens
ttgctaagagtgggccggccagggcagagggctcgctcctgctgatgggcctgtgtccaagggtgcagctgtggcctcagtttgctcctttggaggacgggagagcagaacaccacctcccatgctgttggggtgcgtcggggagttgtggtgcagagcaaggagggagctgtgtgctctctgctgcatggcaggaggcaggcacttgcgaagcctgctctgtccctgcaaagaacagaaactgggtccttggctaggtcacacctcggccctgggccacgtccaggtgtgtttctgccccatctgaggccgattctggtgcccttggcctctggtcctctcattccgagagccgaggagtaccccacacagtcatgcaggagggagagggagtgaggggtgggttaggcctgggccagccccaytggtgggcccagggtggccgcgcccagggacgtgctgctttccctcctgagaagctgttgggacttggctcttgaggacactcgttgtgggaa

SEQ ID NO: 26627 - DNA, 598 bp, Homo sapiens
tgcattacttgattaataatcaagcagcactgtttctttagtccatcctccgtaacagtttctgttcttccaaattcgttcaataggcactgtttataatacaattttgcccgtcctaaaaggtgactctacactagatcccaaaactgtttcaactctcttaataactctactgggtgtcatacacttccctatatgagcgtaacaacaggcatctaaaaaaaaactcatggcattctggcatacaggaatcatttcaagactaatctgtaaaaactaattcaatagtacattatagtcaattagctattacatgaattgatatttaaactctggttcaaatcatgtccttcaygatataaatttccacagtatcattttcattttccacattaacaccttaaaatgtgttcatctgtgtaaaactcctttctctcctactaagcaataagctgcttgtgaatgggtacatcttactcctttctgcgtctaaagcacatagaaggtgctgtacattcagtcacaaatatttactgagcaaataccaatatgccatctataccaaatgatggagtatacaaaggtaacaaagaaaagg

SEQ ID NO: 26628 - DNA, 1034 bp, Homo sapiens
cagagcactttgacccatagtggcgaggtttgccaagaaattcaaattctgaccactgagatgggtgattcccctccagttagatctgatgcaaattattcctttgtgctcaggcactatctgagcccagcacagctttgctctccactgcaaccaggtagcactgagtccaaagtaaagtcctccagttacggtgctctctttcttccaaatgcacggattctttttctgtatcttgcagccactgttggggaagcagggaatggtggctctggcaattcaggactatttctctaaccctcttcaatggctctttcagtgatataaagttagcagactgctgaactgttccagatgttttaagctttttcctggmggaagaagttattatggctggctgtcaggcctcacccttcctagactggtcttgtgaagggagagacgcccagttcctgcaccagtatatgaacctatgtcacgcttttctctgtgttctaaaagtggaggctcctgtctcatttgaactcaggccacatatctcagcttgatacccctaggtggtgtactcagatcctgggaaactgagaccaggactgtgaatttgccctctggccccttggggtcgagcaccagttgtgctcggggtgggggctgaactgctaccaggccagcagcaaaacacttaggcagggcggtaggggctgtgctgtgggcgtgtctgtgagagcagcaaggcaggcagttttgaaagtgactggcaggcaaaggaacacgtggataaaacgtacttcattccagcaacaatggtggccttgctttctcccagcagacagcagctgctgcagccagagtgcaagatggaaagcttaggcggaaggaaagcttagatggaagctgcggctgcactatgcagtgaaaccttctgagatctgcgtgggtttcaggtgtgcctctgcctgatctccaagcagttctctctgccagttcaaaggtagatagatgggagttacagtaactcccgtaaccaggatccc

SEQ ID NO: 26629 - DNA, 1059 bp, Homo sapiens
cttctggttattattgtataggaggcagagagacttttttttttagaaacacaaatcatatttaggtacttaagacctgtcaatggcatctgactgtttttaagataatctttaaattctcaaaatggtcccatgggccctgcatgacatggcctcacccacattttcaggctcatttgcagccatttccccttttgttctctacactccggtcccactgactgtttcacttcctgaactgaaggtgtttaaagccactgctcttcactgagataatcctagatgaatatcccaggggtatccatagagaagagggtgaatgtgacacttgcagatgacattttaattaagattaaaactgacaaatggccccagtctattgctttttgaaaacaaggtcttgggaaagaaccactacttgtccttggagagcctgggcgaattagaaaatggtgcccctccaggtgaatgcagcccccaagctgcatggattggatttcagcgtctgtgcacccagggtgagacactctgtgaaggacatgacctgcacagccagaatggtgacctcctctggagatctcagtcagtttgcttccaaattaaaacaagtttggaagcaaatttggctagratgacattgtatatttacctttccaagccagcatggttctgtctatgatgctagttctgtagctatttttcagagttgaagaccaggtgtgatttacaacctagagtgtctctagctgctggcatctaagtttggcactgagcacttaaagtgcccagaccatgatgttttactgtgtggaggaaggcctcgttggagaggcacaatgttttttcatctgacatgtttgctcttgtggaaatggcttgaagtatttgagtgctggcagcagaaaacatgggaggagacttaattcttgctgagtatgaatgatcctatacaaattaaaactgatcacttttaaaggccgtttcattgctggtataaaactattcatcaatcattagattgctttgatgtatatatcatatatctgtgtgtctctacca

SEQ ID NO: 26630 - DNA, 552 bp, Homo sapiens
aagtaggaaaaaaaaaactgctgttcagtgaggacaaaaagcaaaattggccaagcgtggtggtgcacgcctgtaattccagcactttgggaggctgaggattgcttgagcccagaagttcgggaccagcataggcaacatggtgagaccctgtcactaaaataaataaataaataaataaataaataaataaataaataaataaaaaacagccaagcatgtgcagtgacccgagatcgcgccacttcactccagcctgggcgacagagtgagactccatctaaaacaaacaaacaaacaaacaaamaaaaaaaaccaaaaaaccgccaagcatcgtggtgtgcgcctgtggtcctagttactctggagactgagagaggaggatcacttgagcccaggaggtggaggctacagtaagccatgtttgcgccactgcactccaggttgggcaacaaagcaagaacttatcttaagaaaaacaaaacaaaacaaaactgatctttcttctggttggaggaaattatagcaagaggagagcagtgtttcctccca

SEQ ID NO: 26631 - DNA, 552 bp, Homo sapiens
aagtaggaaaaaaaaaactgctgttcagtgaggacaaaaagcaaaattggccaagcgtggtggtgcacgcctgtaattccagcactttgggaggctgaggattgcttgagcccagaagttcgggaccagcataggcaacatggtgagaccctgtcactaaaataaataaataaataaataaataaataaataaataaataaataaaaaacagccaagcatgtgcagtgacccgagatcgcgccacttcactccagcctgggcgacagagtgagactccatctaaaacaaacaaacaaacaaacaaaaaaaaaaaaccaaaaaaccgccaagcatcgtggtgtgcgcctgtggtcctagttactctggagactgagrgaggaggatcacttgagcccaggaggtggaggctacagtaagccatgtttgcgccactgcactccaggttgggcaacaaagcaagaacttatcttaagaaaaacaaaacaaaacaaaactgatctttcttctggttggaggaaattatagcaagaggagagcagtgtttcctccca

SEQ ID NO: 26632 - DNA, 552 bp, Homo sapiens
aagtaggaaaaaaaaaactgctgttcagtgaggacaaaaagcaaaattggccaagcgtggtggtgcacgcctgtaattccagcactttgggaggctgaggattgcttgagcccagaagttcgggaccagcataggcaacatggtgagaccctgtcactaaaataaataaataaataaataaataaataaataaataaataaataaaaaacagccaagcatgtgcagtgacccgagatcgcgccacttcactccagcctgggcgacagagtgagactccatctaaaacaaacaaacaaacaaacaaaaaaaaaaaaccaaaaaaccgccaagcatcgtggtgtgcgcctgtggtcctagttactctggagactgagagaggrggatcacttgagcccaggaggtggaggctacagtaagccatgtttgcgccactgcactccaggttgggcaacaaagcaagaacttatcttaagaaaaacaaaacaaaacaaaactgatctttcttctggttggaggaaattatagcaagaggagagcagtgtttcctccca

SEQ ID NO: 26633 - DNA, 493 bp, Homo sapiens
ttacacaacagaaacaatgtctgaaggaaaattcaaaatttaagaagagctggagatgggttcttataagatctcgtaagattataatttttctggaattttgaactatagtgattcattctaagraaaagaaatcagttcacaggaaaagaatctccctaagattatttcccatccccacaagcattgaaaaatgctttttgcatattacacagagaagttctgcttgtttttctcaacccctccttgtcagaccaggatgggatggggaagggtggcttacctttgtagaccccctgccagagagccttcccttggcatggaatctaaagtagtctcccagacaatctctagcacatcactgagttatattttcttcatagcagtacctgaaattattttgtttactcattttttcactgactggattacccccactaaatttacgctccatgagaacagattttgtctttttgattcatggctaaacctg

SEQ ID NO: 26634 - DNA, 1182 bp, Homo sapiens
ctgtgatggaaccattctgtgtcttgactgtggtggaggtcatacaaatgtatacctgtgataaaactgcaaagaacaaaatacacacacccacacacacacacacacacacaygagtacctataaaactgatgaaatctgaataaagttgatggattatatcaggattaattttctggcttgattttgtactttagttatgtaagctgtcatcattgggggaaattggatgaagggtatacagaatctctcacaatgcaggtgaatttacaattatctcaaaataaaaagttaaaattaaaattctaggcaagctctgggatatagaactctgagtactagatttgaagaaaggattccagcactgggcaggaggtggggctaaataaataaatgcctgccgggcatggaggctcactcctgtaatcccagcactttgggaggctaaggcgggaggatgacttgagcccaggagtttgagaccagcctgggcaacatagagagacccccattttttaacttgaaaaagaaaaaaagtacatgccaagatttcttccaactcttaggattcttttatttcttttttctttggttctctcctcttccttttttcttccttcttttttcatatttctttccattttgtacttaccaagataagtctttgacattccacgggaatttgttgccattgcttattgattaaaaaaaaaagtgcctcagtttggccccaagaccctttgtaatctagtctctacctaattctctacctgaaagtccaacagttctttgcagcccagaaaatcaaacactggatgctatattgccttctaccccaatcccaccctagctatgctccatttcacttgcctttctctggaagactccatgatggtcttgatttcccttgttccactttcaactaacccactctttgttggattgcttggacagctacccatgcatgaatctataagtggcacaaaacatatctgaaaaaactggaaatttggtgctaggtaaacttagatttttatgtgcatctccttatattataaagggaaaaactgaaattagttcaactcttattttagtgtatataataaaccattattttgaatttgacatgaaagaggaaaatatattattaataattcttcactgacttctaagaaaaatgga

SEQ ID NO: 26635 - DNA, 525 bp, Homo sapiens
gttccttatttctgcttttttttaaccccttttctgcctataaagcccacctcttctgcttagctcatcagatcaccttttctaaattttttattttattkattgattgattttgggtagagatgggggtctctctctgttacacaggctgttctcaaacttctgggatcaagtgatcctcctgccttggcctcccaaagtgttgggattacaggcatgagccatggtgcccagccaccttttctaaatttttatgggagatagtaccctgatccattcatcacaaataaaagccaattagatcacttaactacatttgttgtaattttgtcttttgacagttctcaaaaggaaatgaaaacaacactttattagcagcagcgcatctaaaatggatatttttgagatgcacctgtgcactcttggtcagttgaaacttctgagtcaacagtaggtggcctagtgctgtttcccgagaatgagtggtttaactcaccctttcatatacctctcaaaatgatttct

SEQ ID NO: 26636 - DNA, 640 bp, Homo sapiens
tagtataagagtactaagatactaactataccttattatatattacatattttgtattttactataatcttatctggttcacatatataatgtaatttaatctttataaatgttctgtattttgatcattattttagatagttatttatttttgaaggttatccaataaacatacatgaataacccaaaataaaccaaatactggaattcttagtctgttgttctcttcactctgctacttagcttgatacaggcaataagtattytatggaaatatggaggagaaaactgcaaacaggaaatagtgactggctaaaattttgtcattagaaatgttcaaatttctaatggtataaaaaaagagaaatatgaggagatgacagatactatagcaggcttggaagagaaacaaaactgctaagcactagagaagctactggaaaaaagttaagaaggaaaaaatatagtatttaatgatgaaaataagtacaatgaggaaaatggaataataattggttttggtgatctggcatcattaaatatttttgatagagttgttagagtatcgggggaacccacccccaatatttcaacataggttctttctgttttccataactgtcaacaggctgagaaataa

SEQ ID NO: 26637 - DNA, 530 bp, Homo sapiens
atattatatgattataaaacatgtatatatagtatacaatatgtataatatrcacattacttttatatgtatatgtaatatacaatatactatgtatattgtatataattaagatagatataatatataatatatgtaacatatataatatgtatataataaaatatatgatatatatatgagtttgcagatacacatacagacacctgactaggcaggtagtccttgtaaataaaaaggactgtctatttacctgttcatttgtcaatatttcagcccttctttaggtcttcttcttgatgactctgacttcaaggtttgtgggctcaactggctttcagcagttcccacattgcttagctaccttggctgtctgttacccgactgctcctctgttgatgaatgacaacatcaacctgtgcttgttgcctgctgcaatctggatcctccgacctaaggcacttggagctctcatcaattcatttcttaccttccaagtaacattttgtttgctttttacgtgtttattc

SEQ ID NO: 26638 - DNA, 542 bp, Homo sapiens
tcgcagtgacataaagaaattaaaagccaaagccaaatactagaaaaaaaaatttttaagaaagaaaattgcattgatactaaatattgtggcacttcgggaaaccaatcaacgctaaaaacgatatgactattgttatcttagtctcactgtgatcattaatatttgacctttaaacatttagagctgggcatcctgaaggaattgccctaggactccccaaggcagagccaggaaggttcaaatgttagtcttaatggaagagaagctcagtttttttttacagcagtgtctctctytctctctctctctctctctctctctcactcactcattcactcacaccctcatgctcatttgtgaggtaccaccgatcctcactgtggtttctgttctctcctactgcttctgagtccttatatctcaccctcacctattttattctccctgatggcacttctggcaaaagaaatctgtatgtattactttgtgcttctcagacaggagtgcagacaggaaagggctaagaggagggcctgggc

SEQ ID NO: 26639 - DNA, 542 bp, Homo sapiens
tcgcagtgacataaagaaattaaaagccaaagccaaatactagaaaaaaaaatttttaagaaagaaaattgcattgatactaaatattgtggcacttcgggaaaccaatcaacgctaaaaacgatatgactattgttatcttagtctcactgtgatcattaatatttgacctttaaacatttagagctgggcatcctgaaggaattgccctaggactccccaaggcagagccaggaaggttcaaatgttagtcttaatggaagagaagctcagtttttttttacagcagtgtctctctttctctctctctctctctctctctctcactcactcattcactcacaccctcatgctcatttgtgaggtaccaccgatcctcactgtggtttctgttctctcctactgcttctgagtccttatatctcaccctcacctaytttattctccctgatggcacttctggcaaaagaaatctgtatgtattactttgtgcttctcagacaggagtgcagacaggaaagggctaagaggagggcctgggc

SEQ ID NO: 26640 - DNA, 1875 bp, Homo sapiens
  misc_feature (1)...(1875): n = A,T,C or G
tgtaatgctctagatacttcttctatttcactgtttatgaaattaaatggccttaatctttttatttttctagaaataaatgtgttcacaggtggcatctagaaattcaataaatattcagtctccaggaatatgagccctgcaaggtttggtgtggagcctgctgagaagagcctatgactttctagtggaatttttatgctttgggttagatcatgggaatgaatatccatggttagtttgtgatgcatctaagctgtggaatttcaatgagtatccatcagtttgacagtcaaaaggatatatatgagggccttgggggtgggcagggtgaagcaatttggaaatataagcagtaaattttcacacatcactgattgtgacagtgaaatgattatccatcaattacaaagcagttaagtagatatgtttctgggtttttactgcactgtttatgtatccagttctcctggaagagttgctcctgcatcatagtccatgctggacagcctgcatcagtttcagtgcctgttggagacacagagagactattggatttaggaacaaataaaaggcaaaaaagaagagatgatactgaaagactgttacttttcaaataaatcatgtacctgggaaattataaggaaacaatctccccaaataaaaccatgtcagtctaacaaaaggttatttttttagtgttgcataacataaaagaaaatgccaatttacttatataaaaaagttattaagttgtttataaattcaaagtnnnnnnnnnnnnnnnnnnnnnnnnnnnnnnnnnnnnnnnnnnnnnnnnnnnnnnnnnnnnnnnnnnnnnnnnnnnnnnnnnnnnnnnnnnnnnnnnnnnncattattgccttgttttctatcaccttaactcctttgaagaatactatcaggtattttgtagaatgtcccacaattttggtttgcctgatgttttctcagggttagacttaggttatgartttgggagaataccacagaggtaaagtgcgtgctttgctgtgtcatataaggagccacatgatattaccctgacttatcactagtgatattatctttgttcacttgtataaagtgatatctgtcaggtttctttatggtaaaggtactatttttctttttgtaattaatagatattcagggagatagtttgggtcagtgcttgcattttatctttcactgcagacacctgcttttccctaggttctgagtagttgctggccctacaacctcagcattctgatgggtagaagtttgtaaacttactgtttgtcagtaattttgtcgtaagcttgagaatagcactgtttccatctcagcagaaactggaagtccagtatttggagttcaaataagtgctcttcatattaactgttattgttagttgtcagaagatcaatactccatttcattctagaagatcagtcttagtcaaatttcatcatcccgtttcttctgctagtgatgtgctttggaatcagtatgtgactgacttgtagccaatgagatatgagaggaagcatgctcttgttttcctaaggaaaaattcttttctcttaataggggaaaataagtaaaagatagttcaccttctacctctggacataggtatgtctggatatattgcttaaaactgtggctaccattttgtttccaatatgaaactgaggccaacactgaaaacagcaaaacaaaagcaggaaagaacctggatctttgatcatattactaagctgtcattccaatcaaccatggtactgagcctacctatggatttctagttacgagcaatagtaaatttctttattgtttaagccaatttgagttttggtatttcaattactt

SEQ ID NO: 26641 - DNA, 518 bp, Homo sapiens
cacatgcttaatctgcacgtcagtgtgtatatatatctcagatctatacagaatataaacagaggcatattataaattatcaagtagtgtttctgtttttatggataatatttgaatgttgatagtaatttttaaattaaaaaatgggtttctattatttggaggaataactctaataaggcttaaaattattttaaaacaagataggttacttagtaacaaacatacacaaatataaaaattaaattgtattggctaggcgcagtggctcatgcctgtaatccaggcactttgggaggctggggcgggcagatcacctgaggtcaggagttcgagaccagcctgaccaacatgtctctactaaaagtacaaaattagccaggcatgatggcgcatgcttgtaatcccagctactcrgaaggctgaggcaggagaatcgcttgaacccagggggcggaggttgcggtgagccgagatcgtgatattgcactccagccagggcgacaatagggaaactc

SEQ ID NO: 26642 - DNA, 619 bp, Homo sapiens
ggccatttgcaggaggaagatagtggtgcaggggacggggagagtttatggtgagtgtgaatttcaatttttgttctagatctgatttctgttctttagttttgttaagggagtcttttaggctagctgtgatacttttttttttttttttaaatgtcctttcattctgatcctcccatattggtaacaggacatttgtttaggatgagagctttctgaaaatcctctcaaatttaaaagttgttccaaatcaaaggatctgctgtgtggccattgatgatttagtatctccaaaggtacactttttccaaaatgtgactcataatgaataaacmtattttacggcttaatcgtggacacaggaaacacccccatagagggtgcagaagatgcagctcccatgatccaaaatcaactccaaagacagccaaagagaaggaaagcaaagatcatcattgctataagcagtaagaatgatacttgtgaaaactcctatctccagttgcccataaaaatgatatgactttgatcatgtacctgcgaatccatgactctgggcaggtaatactgagatgggacttctctccactagcaagacaataggaaagagaacttagac

SEQ ID NO: 26643 - DNA, 1200 bp, Homo sapiens
ccacatgccccagaattctgcaacttgtgctgttttgccttctgatgagacagcttgctgacaataaacacttcttgatagaggaccttcactcccaagctgaatgttatttgacctgtgtgttaaattcttttccccccttactattaagccacacatctgtattctccacacaccccatcttgagtagcctgctaaatattctgtcttgtcccaaagaggattgccttctagatgatttcttgtctccttaacacagtcttgtcatgggacctcctgacgcttaaggctgccaagaacaacttgcagttcttgcagtcaacacactccatgctcgtcctggccttctctgacactcagggagccccacctttcctgggcacattccatccctactcatcccacccactccttttttattccttcattgggtggtgccactgaagcttgcaaactgctcttttcccttaggcaagggatttgggcttgacaatgtcatctgttctatgtggtctagggccgaaagttaggatttaagaatccaaaagttgtggcttccaatcttgacattcccaggtaccagcagtgttcaaaatccccaagttaccaacaacccatgtgtaacataaaatccctggctctaccttcattacagggaacacccctcaatatcaactttacctcagtgccttatttcattgcctcgaaacaacagatgtctcctttttatttaatgccccctacctttgcttatttccttctttcattctgccttttatagctgctgttttgtatgtttcatgtatcttcagaaattggttgcaattctttctgattacaaattgtggaaagaataaagggagaaagtgaagaacaaaggaaaaatggaaggaaggagggaaggaaggaacaaaggaggaaaagtaaagaaaagaaagagaggagaggaaaggaaaggagaggagggaggaaaggagggcgaaaggaagaaaggaagaagggagggagggagggaagaaagacaaaaatgcaaamaaaattaagaaatttcagacagaactctgtccatagcagataagttcagaataccttagcaaatttagcttttcttttaagcaaagcaagcagcaaccagagggaggaagcacctaatattcatagataaagaatttaatagctcaaatttcttgcattctatgc

SEQ ID NO: 26644 - DNA, 722 bp, Homo sapiens
ttgcaaagggaaaaatagctatatgtgcacagctgtttatagcaacactatttatcatagtaaacaagtcaagtcagccaaaatactttgcaagttgtgggagggggaactgtgggtcaataaggtgggatatttattatacgtacaagaaaaatggtaaacttgtaaaattactcatacaataatgttaacagcagtgagaagacaaacttgcacatatctgttcaggcagcagwcaatgactgagcaccccgtctgggctacacagctgctccaggtgccagagagatccccatgaacaggaccaagtccacgccctcgtggagggaacattccagaagtgcaccatagggtcaaaggtaaattaaaaccacaggcaagtacttccccaaggcagggagatggacagaaccgagtgttgtccactgcggggtccatccttcctgggctggtgggtcaccagggagtggccccacagaggtctgcaggctcctaaggcaggagccagacccaggatcaaagcgaggggcacctggccaagggcagtgggtcctgccagaccacagggtcttctccccacaggagggaaatttgtcaggctgcttttaggaatcccatgaacctttggggtttgtgcatgaaccaggggaggagcagtccccgagactgtgagctcagttttctactaacctaacaagctaggaagggtcacaactgagggg

SEQ ID NO: 26645 - DNA, 1759 bp, Homo sapiens
tgataactgagaaagtacacaattacaatgacacttcagatgaatgtacacttcacgtctcttaagtggaagggacctaaattgatcagcttggatatatggttggtgaatcctagtagatagtattcattatttataatacccatgtggtgtaataatctgcctacatttcttgtatcctctagtttagccttcagaaattttcttcatccactaatggcaggaaggtataatatataaacctcatctaaaagtacaataaattacacatatttatacaaaatgcaatggctcctggcattagatattaataagcttttacatttggctatcagtccaatattcattgaaaataaccattttaggattcaattaatacatttaacattatttttgtctgcaaaattagtctactctggaatatcattgtattataaagaattttcactaaatagctattttaatgaaaaagcattcggaaaatgctttggaaaaaagctttggaaaaaagctaatatagtcatattaaattttaactcatttgaataactaataaaaaatatatgtctgatgtctgatactaataaacaggaatgaggcactgtggtttatcccaactctagcactccttcctgattccggtagtcatcggagcagtcagaaatcaaatcttctggtatgcaaacattctaaatgcatctgaggtgagttcactcaggtttcctcagcagaaaccccaaaattacagaaataacttcttccttcccctctttcttgccttgcaatccctctttcttgatgaaaatagttactacatcagtggtcactttgtttctcattctccagtgtctacgggttattatgacaacttcctccctctggttttagcagtaycatctgacatctataatttctgttacttcttctctttctccttcccctctccatagaaacatgctctgaaataagagaaaaattatgctgtcccctgatcctcttatgtcttcaactgttttccaatggttcttctatccaatttcaatgtagggaactctataagcttgttactaagatcatgaccaaggaccagcagcatcagcaccacctgacaacttactagaaatgcacaatctcaggcctgctgaatcagaaagtgcattttcaatgacaccccactgatctattcaggggtgggacgttctcttctgtcttgagtgcacatgacattaaatgtgtattgccaaattacctgttccagatttcccaccgcccattattcttgtggcaatattcaaaagagaaactttctttttaaatataacctgaatggaaagagaaacaaaatagtcaatacataatatatatttcataggctatgcaataaataattcaaaatataaatgaaagagtaactaccttctgggccgattgtttctgaggagacactgaaaagtaaaagaaatatataattcatcatatgtaaatatgacaaagtcgtccatacattcatgcagtgttagcatcaagctgtatcctcccgcctgcactagtgtaggatttgatgttttacagtttgtgtctttgggacgggaacatgaggaaatacactgaagaaaataggaatacacgcttccagaaaatatacagtcagaaattacaaagaggtattatgcatcatgtgtgtattactgaaataaaaagtgtcaatatcaatgtggatatgctgaatgatgaaaagaaatgtgatctaaaatcagag

SEQ ID NO: 26646 - DNA, 584 bp, Homo sapiens
tgggaggattgcttgagcccagagttccagagtttgaggctagcctgagcaacaaagcaggaccctatctctacaaaaagaaaaaaattaaaaattagctgggcccagyggcacgcatctgtagttcagctattcaggaggctgtgcccaggaggttgagactgacttgagccatgatcacgccactgcactcaaccctgtctcaaaaaaaaccccaaattcttcacaaaacccaataagtaggcccaagtataggtatcaatcagttttctgtagtcagcataagataaacactgaaattaactaaaattaaagatccaaaatttacatactttataacttctacttacaaactttcctacataacgtttatctttataaatcccctgctaaactccaatggagaatttatccaatgaagacgaacaaatgctgagaaagtgaattcattcattcattcatccatccatccatccatccatccatccatccatccgtccatccattcaacaaatggttgaatgtctatgggtaccaaccaggtgctcttcgagatactagaaatatagcagtgaacaaaacaa

SEQ ID NO: 26647 - DNA, 552 bp, Homo sapiens
  misc_feature (1)...(552): n = A,T,C or G
ggcctccagagcgcatgtcccacaagaaagagaaaaagcttcacattctgcacctacwaaacaggtcgctcaattcctatttcacccaggcaaggagttggcctgcagtacgagtcagtattcagctgccaggtacccctctgtatgtcctgctgatttggacagtgactacacaactcaagtaaggagcagtaaagaagtcccagttttcactcatttctgttgccttccatagtctgctgcatttggaagaaggcttctcatgaagttcagagtcttttactatcaagatgaatcaggtgttggggacatctaaccatctgagtcaagaagaaaaagccaggccaggcgaggtggctcacacctgtaatcccagcactttgggaggccgaagcgggcggatcacctgaggtcgggagttcgagaccagcctgaccaacatgaagaaaccnnnnnnnnnnnnnnnnnnnnnnnnnnnnnnnnnnnnnnnnnnnnnnnnnnnnnnnnnnnnnnnnnnnnnnnnnnnnnnnnnnnnnnnnnnnnnnnnnnnng

SEQ ID NO: 26648 - DNA, 552 bp, Homo sapiens
  misc_feature (1)...(552): n = A,T,C or G
ggcctccagagcgcatgtcccacaagaaagagaaaaagcttcacattctgcacctactaaacaggtcgctcaattcctatttcacccaggcaaggagttggcctgcagtacgagtcagtattcagctgccaggtacccctctgtatgtcctgctgatttggacagtgactacacaactcaagtaaggagcagtaaagaagtcccagttttcactcatttctgttgccttccatagtctgctgcatttggaagaaggcttctcatgaagttcagartcttttactatcaagatgaatcaggtgttggggacatctaaccatctgagtcaagaagaaaaagccaggccaggcgaggtggctcacacctgtaatcccagcactttgggaggccgaagcgggcggatcacctgaggtcgggagttcgagaccagcctgaccaacatgaagaaaccnnnnnnnnnnnnnnnnnnnnnnnnnnnnnnnnnnnnnnnnnnnnnnnnnnnnnnnnnnnnnnnnnnnnnnnnnnnnnnnnnnnnnnnnnnnnnnnnnnnng

SEQ ID NO: 26649 - DNA, 552 bp, Homo sapiens
  misc_feature (1)...(552): n = A,T,C or G
ggcctccagagcgcatgtcccacaagaaagagaaaaagcttcacattctgcacctactaaacaggtcgctcaattcctatttcacccaggcaaggagttggcctgcagtacgagtcagtattcagctgccaggtacccctctgtatgtcctgctgatttggacagtgactacacaactcaagtaaggagcagtaaagaagtcccagttttcactcatttctgttgccttccatagtctgctgcatttggaagaaggcttctcatgaagttcagagtcttttactatcaagatgaatcaggtgttggggacatctaaccatctgagtcaagaagaaaaagccaggccaggcgaggtggctcacrcctgtaatcccagcactttgggaggccgaagcgggcggatcacctgaggtcgggagttcgagaccagcctgaccaacatgaagaaaccnnnnnnnnnnnnnnnnnnnnnnnnnnnnnnnnnnnnnnnnnnnnnnnnnnnnnnnnnnnnnnnnnnnnnnnnnnnnnnnnnnnnnnnnnnnnnnnnnnnng

SEQ ID NO: 26650 - DNA, 1445 bp, Homo sapiens
ttacagcactgaatgaatcccaattataaaattttttattgtaaaaattattttaaagttacaaaataatttctaagtaacctttattcaggtrtttctgaaatgatgtatgatatttactgcattaatttataatttattctctctcagtaacattcatacacatatttatatacatacctaaactctactataacaagaatcttgcaaacccataaaacaattatcaaaatactgtccttgatacagtattatatcataagcagactattcacatttttctaattttctcaataattttttatttttttagtccaggatccaaaataagatgtcatattattgtgttttaagaaggaagaggtttaaagaaattattgccctaaaaagcagatttttccatgaatctgctcttataagtagttaggttttctggtgtgtgtacaaaaataaaagatttctaactgtgcaatgtttgaccataagttctaaatatattattcctatatttgaatatgtgtaattcattatgacaattgctgcataataagtaaattatttaaacagtgtaaaattgaggaacacaaaagactataatggcaaaccaaatatataatgagcaaatatttattctacgtttatgtcagtagtggaagattttgcaactatacctatcataaaacacttaaaactatacctatatttctaatattaaaatacacacacacacacacacacacacacactgaaagtttttctctgagtgaataaactggtcatttggctgtataacaaatagagatgcaaccctacctagctgcctagatagtttaaaatacctaatcaaaatagtcacttttgaaaaccatctcaagaatttttactgccaagtacagttcatatatttaatattattaattctgatgtaaatgtagttaatatataatataaacaccaacaatttatacgtagaaactaatctatttgtagcttaagacagttttatcatcacttcaattttttacttattttattattcagaatgtcaaaatgttaatctttagaagtatattttttagcaaaatataattcacctattaaataaaatgaaggtgggaaatatagaaaatgcaaatatttaaattctccaagtatattaaaattgaattttagacagtactcctaacatacattttaagcaatttgccagttttgctatgatagcaatgacattacttctctttttctatgttactgaatagactagtgacttttctactataggcttaaaatttgttgaaagacccataaatgccagtaccatcaaagagatcttaaatttaaaaaggtcaaggaaaatactattttaaaaaacttttataatcattacgtttgtatttgtttgcagtcctaacatttacttattatatatttatgatatatca

SEQ ID NO: 26651 - DNA, 1445 bp, Homo sapiens
ttacagcactgaatgaatcccaattataaaattttttattgtaaaaattattttaaagttacaaaataatttctaagtaacctttattcaggtatttctgaaatgatgtatgatatttactgcattaatttataatttattctctctcagtaacattcatacacatatttatatacatacctaaactctactataacaagaatcttgcaaacccataaaacaattatcaaaatactgtccttgatacagtattatatcataagcagactattcacatttttctaattttctcaataattttttatttttttagtccaggatccaaaataagatgtcatattattgtgttttaagaaggaagaggtttaaagaaattattgccctaaaaagcagatttttccatgaatctgctcttataagtagttaggttttctggtgtgtgtacaaaaataaaagatttctaactgtgcaatgtttgaccataagttctaaatatattattcctatatttgaatatgtgtaattcattatgacaattgctgcataataagtaaattatttaaacagtgtaaaattgaggaacacaaaagactataatggcaaaccaaatatataatgagcaaatatttattctacgtttatgtcagtagtggaagattttgcaactatacctatcataaaacacttaaaactatacctatatttctaatattaaaatacacacacacacacacacacacacacactgaaagtttttctctgagtgaataaactggtcatttggctgtataacaaatagagatgcaaccctacctagctgcctagatagtttaaaatacctaatcaaaatagtcacttttgaaaaccatctcaagaatttttactgccaagtacagttcatatatttaatattattaattctgatgtaaatgtagttaatatataatataaacaccaacaatttatacgtagaaactaatctatttgtagcttaagayagttttatcatcacttcaattttttacttattttattattcagaatgtcaaaatgttaatctttagaagtatattttttagcaaaatataattcacctattaaataaaatgaaggtgggaaatatagaaaatgcaaatatttaaattctccaagtatattaaaattgaattttagacagtactcctaacatacattttaagcaatttgccagttttgctatgatagcaatgacattacttctctttttctatgttactgaatagactagtgacttttctactataggcttaaaatttgttgaaagacccataaatgccagtaccatcaaagagatcttaaatttaaaaaggtcaaggaaaatactattttaaaaaacttttataatcattacgtttgtatttgtttgcagtcctaacatttacttattatatatttatgatatatca

SEQ ID NO: 26652 - DNA, 613 bp, Homo sapiens
ttaagcccatgataaaatgctaaacattattgaggattaggaaattcaaattacatacacaatgagacacacacacacacacacacacacacacacacaaagagacagagacagagagaggattaataagacctaaagctggggaaatcgaatttattgaatttgtggttaacactatacaagtgattcttgtactattctcacaattgtgtaagtttacatttatatcaaaattaaaagttacaaaataattcttagaaaaacatgccaggtgaggtggctcatgcctgtaatcccagcactttgggaggccaatgttgggggatcacctgaggtcaggagttcgagaccagcctggccaacatggtgaaacccagtctctactaaaatacaaaaacattagccacrcatgatggtgtgtgcctgcaatcccagctactcaggaggctgaagcaggagaatcgcttgaagacagaggttgcagtgagctgagatcacaccactgcactccagcctgggagacagagaaagactccatctcaaaaaaaaaaagaaaaaaaaaagaaagaaaaaatataattatgtagcataaatattttacaatgattatgct

SEQ ID NO: 26653 - DNA, 613 bp, Homo sapiens
ttaagcccatgataaaatgctaaacattattgaggattaggaaattcaaattacatacacaatgagacacacacacacacacacacacacacacacacaaagagacagagacagagagaggattaataagacctaaagctggggaaatcgaatttattgaatttgtggttaacactatacaagtgattcttgtactattctcacaattgtgtaagtttacatttatatcaaaattaaaagttacaaaataattcttagaaaaacatgccaggtgaggtggctcatgcctgtaatcccagcactttgggaggccaatgttgggggatcacctgaggtcaggagttcgagaccagcctggccaacatggtgaaacccagtctctactaaaatacaaaaacattagccacacrtgatggtgtgtgcctgcaatcccagctactcaggaggctgaagcaggagaatcgcttgaagacagaggttgcagtgagctgagatcacaccactgcactccagcctgggagacagagaaagactccatctcaaaaaaaaaaagaaaaaaaaaagaaagaaaaaatataattatgtagcataaatattttacaatgattatgct

SEQ ID NO: 26654 - DNA, 1165 bp, Homo sapiens
cccttgccaccaccttccctcccgaaatccgagccctggagttggagaccagaaggccacaaggaagccccacctgctctcgagtgagcaggaggagcattgcctgcttgcccaggtgctcctgtttaacccagctacctcaccgcaggttccaacaagacgarttacttccatttgtctcctgcgaaaaagaacagttcttgctggaactgagactgtctcattaatgatagtaccagctgatactaatagggcccctgctctgtgctaaatgctttagatgctcacaaagcccctataaggtaggtaaagccatgagaaaccaggcagcggtccggtcaggtgcccaaggccatgccgttagtcaaactctcttctcatcctgactctagaagtacctcttcactaaggagggacccatattcctaacccccttatgggtactgcaatgaatttgtttctttcttttcttttctttcttttttttttttttttgagatggagtcccgctctgtcgcctaggctggagtgcaatagcatgatcttggctcaccaacctttgactcccgggttcaagcgattctcttgcctcagcctcctcagtggctgggattacaggcatccaccaccacacatggctaacttttttttgtattttcagtagagacggggcgaaacagtgttggccaggctggtctcgaactcctgacctcaggtgatctgcccgcctcggcctcccaaagtgctgggattacaggcatgagccactgtgccctgcctgaaatgaatttctaatccatggaagaatagctcattgacgggtgatgaggggtttgggacaaataagtgagaaccatcgtcatttcacaaaggaggaaatagagttaagaagttaaatgacctgccaaggtactggccttgaactctggtgttctccctgggagtctgggttacctattaaataccccactagaacactgctgggaagggcgagtggcaatggccccatgagcatagagtttttggagagggacgaagcaggaagcagttgtatcacgcaatccatttgggtggcagattatcaacaacgcacccccaaataaagctgaccaacactggagtgctcccttcacttgggactaaagggctgaagggccaagaaggg

SEQ ID NO: 26655 - DNA, 1165 bp, Homo sapiens
cccttgccaccaccttccctcccgaaatccgagccctggagttggagaccagaaggccacaaggaagccccacctgctctcgagtgagcaggaggagcattgcctgcttgcccaggtgctcctgtttaacccagctacctcaccgcaggttccaacaagacgaattacttccatttgtctcctgcgaaaaagaacagttcttgctggaactgagactgtctcattaatgatagtaccagctgatactaatagggcccctgctctgtgctaaatgctttagatgctcacaaagcccctataaggtaggtaaagccatgagaaaccaggcagcggtccggtcaggtgcccaaggccatgccgttagtcaaactctcttctcatcctgactctagaagtacctcttcactaaggagggacccatattcctaacccccttatgggtactgcaatgaatttgtttctttcttttcttttctttcttttttttttttttttgagatggagtcccgctctgtcgcctaggctggagtgcaatagcatgatcttggctcaccaacctttgactcccgggttcaagcgattctcttgcctcagcctcctcagtggctgggattacaggcatccaccaccacacatggctaacttttttttgtattttcagtagagacggggcgaaacmgtgttggccaggctggtctcgaactcctgacctcaggtgatctgcccgcctcggcctcccaaagtgctgggattacaggcatgagccactgtgccctgcctgaaatgaatttctaatccatggaagaatagctcattgacgggtgatgaggggtttgggacaaataagtgagaaccatcgtcatttcacaaaggaggaaatagagttaagaagttaaatgacctgccaaggtactggccttgaactctggtgttctccctgggagtctgggttacctattaaataccccactagaacactgctgggaagggcgagtggcaatggccccatgagcatagagtttttggagagggacgaagcaggaagcagttgtatcacgcaatccatttgggtggcagattatcaacaacgcacccccaaataaagctgaccaacactggagtgctcccttcacttgggactaaagggctgaagggccaagaaggg

SEQ ID NO: 26656 - DNA, 530 bp, Homo sapiens
ggtataaggcagctttcaatttgcttagagggcaacattggaaggttagagttcatcagaaacagaattctaaaatgtgagttcaattcaataaatttgaatttctgtaggaagaatcaaatcaccgatttaaagattgcaatatataataatcatttttaaagtattggattaaatctgataggttttccagaaatgaacaaaaatcagctctaaaaccaaagctgatttttagaaaatttgaaaatgtaaatcagccctatccatactatagtttctctaaaactttatctgaaasagtcattttaaaataactattaaacaatgtaactgctatcttaatgttctgaaataagttaaaacattttaaaatatgaatactgtaaaggaaataaacggtgggaaggaaaagtagagaaagaaatgccaattccagtccaaagctttatttgccaagttttcttagaatgaattttaccaatttatgaattcttgtaagcggaatgtaaaacggaaatactgaaagactt

SEQ ID NO: 26657 - DNA, 773 bp, Homo sapiens
cccacttcattatagtggtggaaggggagggtgggagctgaggtatcatagaattccagatgtatattctcctagaaatactataatacatgacagatagggtgaatagtactgttaggactttattgaacagaaaatcaggcctacttggtaagccatagggtatgataaagaagtggtccaggaatctgaaacttaacttggctctgtcaccagcgctctagatgaatcacatccatttacatttcgatgaaaacatctatttacacttccagtgaaatttctgatatctgcccacctcacaagactgtggaggtgtatatggcagaggtacctgacagccacaaatgaggcttactctgagaatgaccccatggtctaagaagaatgtggatttgaagtcccaagctaaggaatcygggagtggccaatcgagagaatcactccttatctgtaagggacatccaaacccctggcctatcccttaaaatgcaggccatataggggattgaggccctttgttttgtgtcaaatagagattgctaggtggagggtgctaagtgaaaatgctatataaactgcatgctttttacaaacaatagtggttctcctgtccacctgctgtcacaggaccagccctgtgtgtaagttctcataggccatagaaccgcccctgtttgtaatcctcacaggccacaggaccgaccctgtgtgtaagtcctcacaggccacgggaccacccctgtatgtaagtcctcacaggccataggacc

SEQ ID NO: 26658 - DNA, 1226 bp, Homo sapiens
cctaactgggtctcttgcatgactacagtcatctcaaggcttgaattggaagggtccacttctgaggtcactcatctgcttggtggcaggaatcagttctgtgcttgttgactggtggactgaggcctcatttcttccagggctgttggctggaggcttcgcctccctaggttccttcccatgtgggcctctaggtagatcatctcacaacatgtcacttggctgcatcagtgctagcatgcaagtgggcgagagagtactagcaaggtggaagacagagtctctcgtgacctgatcatgtaagtgacaccccatcactttagctgtattttctttgttggaggaaagtgactaggtcctgctcacactcgaggggaggggattacacacggtttgaattccaagaggtgtgcatcactgggagcatgtcagtagctgtcttctgtatcactggtgactattaggggtatacttcctgtgatggttaattttaggtgtcaacttgactagattaaggatacctagagaactggtaacacattatatctgggtgtgtctgttggggtgtttccagagaagactggcagtctgtgaactgagtggagggaaatccaccctctatgtggacaggcaccacccaatcacctagaggcccagaaagaaccaaaaaaaagcagaggaaaggtggtttcctctctctctctcctggagctgagacatccatcttctgctcttggacatcagaactccaggctctccagcctttggactctaatacttaaccagcagccccctaggttctcagacccttggtttcagactgagaattaaaccatcagctcccctagttctgaagctttcagatttagactgagccatggtactggcatccagggtctccagcttttggacggcttgttgtgggatttctgagcctgcataaccatgtgagccaacttccctaataaattacctctcatctacctacctttctatctgcagtcataccttggtatctgtgggggactcaggaacctgttagaactgcagatttccaggcctactcaagatctactgagtcagaaactctaggattgaggcccagtatgctgtgttctaagaagcccaccagattattctgagcatcttaaaaatttgagaagtattgccttaaaaacaaagggagcagagctgccrggcctcccaatttccctcttacaagacca

SEQ ID NO: 26659 - DNA, 805 bp, Homo sapiens
ttctatcagcttaggtaaaaacacacaaaataatcattttcaatcaagtattgtaacaatgctcttgaaagcacctatacataatagaaagaatataatgttcagaggtagagaaacctgggtatgaatccaaactttgccaytaattagctgtgtgacctgtagaagttactcaatccctctgagcttccgtgtcatttataaaatagggatatcaccattaaccttatagggttctggtaaagaccaaatgaaatactgtacagtgatattctcacctccatcattaaattccaatacattttagttactgtttctcccatttcctatatctgaatatcaccaaatggataaaagatcaggctaacaatgaaaataaactttaatctcttacctaaggttagttctttaatatgctatgtttatataggtggcccttagtttgaatttaagaaatgataattcatgttgtatccaagtttattggcattgtcatctataacacctgtgattcctagaccatgaaaggctttacaaagctttggttttgatgaactgaaggtacatttatgaatttttgttcagattaagcattagcaacttaatgtaggttttcatgaaaaataaagtaggtagattatggattggctttccaagatgtatagttgtcttagatacattatcatttgggacagaaaggaaattaataacatccagttaattttttcatgttagggttaattgcctcaggaattttgagagggtgcagggtgtttcaaaattggaattggaattaaaagaaaaa

SEQ ID NO: 26660 - DNA, 913 bp, Homo sapiens
ggctctttgctttgggttcttacctaacagagtagaaatctctgactttaggaacaaaacacagagcagatgataatcataacagtaactgccatagctattaataactattaccattattattatcacaggtaacattctttgagtatatcctgcatgtggtaatttagtgcttcatattttaatgtggaaaacctaattaaattattgaagctcctccattgtctttgtctgtttcgtgcttctrtgacaaaatacctgagactaggtaatttgcaaagaacagaagtttatttttcacggttctggaagctgggaagtccatgatcaaagtgctggcatctggtgagggccttcttgctgcatcctcacatggtggaaggcagaaaggcaagaaaaggataaatttcctccataagactttttataagggcacccaatcccattcacagggaaggagtcctcatggcctaatcacctcttaaaggtctcagctcctaatactatcgcactggcaacacctgaattttggagggaacacattcagactatagtacctatgaagcaggtaaacctattattcccattttacagagcataaaattgtgcctcagagtgtttaagtaatttactccaagtaatatagctagaaagtggcaaatgactatacctttaattttgatgcaatattagttccctgctctatgtaaagatacattaattcattcaagtaacaaattatattggatgtatacacagagcactgaggctggggagacaaagcttggcacttgtcttcagggagctgaccagcttgtggagaagataagggactggtgtggaaagggataattacaatagagaggggtcatccttcagtgtgggtgaagcacaaagcattttgagaaaaaaa

SEQ ID NO: 26661 - DNA, 582 bp, Homo sapiens
caccttgaaggatgcacaatttggaagaggccttgtcggagagctggagagttcagagacactcacttggtgccccatataccaactgcctcagaaattccaggagagtcagaggtgcagagaattcagtggggagggaggggaggccagggaagggcatgctggggcagatatgtcagatatcrtgcactgccagcgctgtcaggagatgaaaacgacatcctcaggctagattctgagagggattagacaccatcatcatgaggcttgcttaaatgtcatttaggaatcccatcattagcactataccccaaatatgatttgatcaaaaagaggcagtactccttaagggaaaaaaaggacacaaaaaaagcaaaaatgataaaaggtgaatacccatcaattctgggtggtaatcttgatgtttgttatattatccattgttcttttctgaaagtttttaaagaaaaggcagcagcatagtgtgggaaggagctttatctgtgggcccagacaccttacttcttttcttccctctgcccttcaccacctgtgggtccttatctaagcaaatcccttggg

SEQ ID NO: 26662 - DNA, 579 bp, Homo sapiens
tctccctgagcttgagtgggattccagcgtttactgatacatatcttttgtacagcacagtctctaaatgtaagccaacgactgcagcttttgctcaacaacaatcataaaaacaaaaatcttttgcaacaccagaaaggaaaatgactgcgttggatgtattgaaggatggcttatgcgtttttattccttcaacaaaatatttattttggattttctctgtcctgtttatacatctgggcacttgagataccattgtaaacaaactttatagtcatggcatgtgtttgtgtatgaaaaatggtaagtgtgcttcagaraatggaaatgatatgagagagtgattggggtaacctctttagagtgggagatcaggggcagtctctctgcagatgtgacagtttgacactgggatctgtatggcctgaaggatgaggctgatgagatggacaggggctgggttatgtacaactttgaggctaagattaggaatgtaggtcatacttgaagtgcaactggaggccattgaagtgtttccagcaggaggagatgtgatctgatttccaatccgggcactcc

SEQ ID NO: 26663 - DNA, 1032 bp, Homo sapiens
cacctgtcacattatgaggaagcccaaaccatcctagacagagactatatrgagaggccccacatagggttccagccgacagcccagctgaggttccagtacatgcatgtgagcaaagctgtctctagatgattccaatccccagccatcaagtcatcctcagtcttcgtcatcccagatgaggtcccagcagacacaggccacccctcccgtgtccaaattcctgaccccagaatccatgagcacaccaaaatggttatttttcgcaatgaagttttgcggtgtgtcgttactcagcaagagtagctgaaacatctctatccccagcacacaacccaaacctgggacaaagcaggcactcaataaatatccttgagtgaaagacagcctctggcccagtgtcctcgccttcagaccgaggctaaattccatctcttgccttgtctcaaacaagttctggggaagagcactgcccatgacccgagcccctccaggattcaccaggctccatacatctcagaaatggcaaagaccaggaatgtgaaaccagattatgagctgctaaaccttggcacctattgttgggaaggtgtaaatgcacacagtggtgactccccaaggagcaatcatcgctgttttgtgtcagaaaatgaggagactcagaacccctaactaggctggcttctgttcagcttctgctgtatttcctaaaggactctcttgtcaaggtacacaatggaaagaggatggcaacctaagaatgatgcttttcatatcatgatattgaacaggtttgtgaagctgctacctaaaaaagcaacagtcatttcaaatacaatgaacatgctgggaagggcacacaagtttgcactgctttttaaggtccttggcttagaactttgtcatcaacaactcttctgttgccacttaagcctgagctttgtcagcatatatgccattcagttactaattcatatgcagaagcaaaggtgggctaactgtgacgctaaagacactcacaattcagggatc

SEQ ID NO: 26664 - DNA, 444 bp, Homo sapiens
catgaaactagagatggagaaacacataatggatgtcattatactagaaatacaacaaaaaaatgtccagagaaaaccaattatcaaaggaaaagtcctgactattaatcaaaagataggttatctgaaggagagtgatatatacycagttaaaataaatgcttaaggtgatatgtattaatgacttttggattctatactgttaccaatgtgtccatttaccagctaactactggtgctgcttatattgaataagagagtttcccctctttgcaacagtcacttgggtttcaggagatatatttataataggatcccttggagtagtgatgaatatgttgttccagtcccatttattctcccaacatcttcagctgtaatcaaaactaactgataatgtgcacttccaagattattggctatgcttggcaaagtaactggccc

SEQ ID NO: 26665 - DNA, 598 bp, Homo sapiens
gttaactttyacgtttaaaataaatttgtgtacaatttttgctttgtgttttaatattagaatcaatctaacactaataacctgtactgtaattatcgcctgtttttttttagttgtgacattttggggcctccgtaacaggatccttcctccctttcctttgccctgcccttcttgtcctttcttgttgagcaacaaactggcatgcccaagtggaatgcgccacattcagttgccctttagcctcacgtcggacaccctgtttccaaacacggctgagtcggctggattggctgtctctgtgcgactgcttctttgggggtatgtgtcaccggggctggtgcatgtatgtgtgagtagatggtaactcggtacgtgacaccaggctatgtggaactcaactgtgtaattttgtgtccgttttcttagaaagcgtttcttctgttggtaattaaggccatggaattctagagaactccccagtgttggttttcgttcctgtctctgaagcatagttagtctttcctttcccatcctatgagggtttctctgcttgtccttctctcttctggagatcccctttgctgttcacagcaag

SEQ ID NO: 26666 - DNA, 598 bp, Homo sapiens
gttaactttcacgtttaaaataaatttgtgtacaatttttgctttgtgttttaatattagaatcaatctaacactaataacctgtactgtaattatcgcctgtttttttttagttgtgacattttggggcctccgtaacaggatccttcctccctttcctttgccctgcccttcttgtcctttcttgttgagcaacaaactggcatgcccaagtggaatgcgccacattcagttgccctttagcctcacgtyggacaccctgtttccaaacacggctgagtcggctggattggctgtctctgtgcgactgcttctttgggggtatgtgtcaccggggctggtgcatgtatgtgtgagtagatggtaactcggtacgtgacaccaggctatgtggaactcaactgtgtaattttgtgtccgttttcttagaaagcgtttcttctgttggtaattaaggccatggaattctagagaactccccagtgttggttttcgttcctgtctctgaagcatagttagtctttcctttcccatcctatgagggtttctctgcttgtccttctctcttctggagatcccctttgctgttcacagcaag

SEQ ID NO: 26667 - DNA, 598 bp, Homo sapiens
gttaactttcacgtttaaaataaatttgtgtacaatttttgctttgtgttttaatattagaatcaatctaacactaataacctgtactgtaattatcgcctgtttttttttagttgtgacattttggggcctccgtaacaggatccttcctccctttcctttgccctgcccttcttgtcctttcttgttgagcaacaaactggcatgcccaagtggaatgcgccacattcagttgccctttagcctcacgtcggacaccctgtttccaaacacggctgagtyggctggattggctgtctctgtgcgactgcttctttgggggtatgtgtcaccggggctggtgcatgtatgtgtgagtagatggtaactcggtacgtgacaccaggctatgtggaactcaactgtgtaattttgtgtccgttttcttagaaagcgtttcttctgttggtaattaaggccatggaattctagagaactccccagtgttggttttcgttcctgtctctgaagcatagttagtctttcctttcccatcctatgagggtttctctgcttgtccttctctcttctggagatcccctttgctgttcacagcaag

SEQ ID NO: 26668 - DNA, 540 bp, Homo sapiens
tgaaatactgcataagctttaaatataaacacactcaaaaaatacttatttaatattaataagctttatcggattagactaattcaattcagatgacagtgggcacatctataaggtgttgtgaatgacacaaatggttattctgaacccctgagaaggcaggagagaggaagaacctccaccttgtgcrtgattcattcagcaagtatcagattgacgataagatgagtaggatattgtgccggccacagtgtatataaaggaaaacaaaagctaatttcaccaattcaaaaatactatcaagtgactttactcataataaatttatttatactcatcttttaattcaaatctagagtatcgctattatgaaacatacagagacttagatattctaaatgatgtccaagactctatatattacacaatatttagaacatgacttcattacttttccccaacctttaattataaaaatatttaaaatatacagaataaagaacactacagtgaatgccggtatgcctccatcagaaatga

SEQ ID NO: 26669 - DNA, 559 bp, Homo sapiens
taaagtttaaaacaaacaggaaaaaaagtagaacagtcactggtgaacccagctccaaatatgtaaatgttttaccatgttttctttagatttaaaaaagtgaaatgaatttagtgatatccctgccatrtgaatcctttaatgttaatacattaatatgtgcccatgataatatacagtatttatttcaaatttatattaatggttttgcttactgtttcatgcttattgtctaggatagtagctgccacatagaagattctccaaaaagaataaaaatgtttgactgaatgactgctaacacactgataggttatccctttgcaatttcctttttcactcaatattatgttttttatattgttcatgttcattgttcatgttcagatttttcagatgctacacaatacttgtctgtgactatttaacagtttatttaatcactctgatgttcatttatgttgcttaatttttttaactcctacaaacaatatccaataaactttaaataagaatagcaaattaagttcaacgtcattacactgacaccatgtttaag

SEQ ID NO: 26670 - DNA, 559 bp, Homo sapiens
taaagtttaaaacaaacaggaaaaaaagtagaacagtcactggtgaacccagctccaaatatgtaaatgttttaccatgttttctttagatttaaaaaagtgaaatgaatttagtgatatccctgccatatgaatcctttaatgttaatacattaatatgwgcccatgataatatacagtatttatttcaaatttatattaatggttttgcttactgtttcatgcttattgtctaggatagtagctgccacatagaagattctccaaaaagaataaaaatgtttgactgaatgactgctaacacactgataggttatccctttgcaatttcctttttcactcaatattatgttttttatattgttcatgttcattgttcatgttcagatttttcagatgctacacaatacttgtctgtgactatttaacagtttatttaatcactctgatgttcatttatgttgcttaatttttttaactcctacaaacaatatccaataaactttaaataagaatagcaaattaagttcaacgtcattacactgacaccatgtttaag

SEQ ID NO: 26671 - DNA, 559 bp, Homo sapiens
taaagtttaaaacaaacaggaaaaaaagtagaacagtcactggtgaacccagctccaaatatgtaaatgttttaccatgttttctttagatttaaaaaagtgaaatgaatttagtgatatccctgccatatgaatcctttaatgttaatacattaatatgtgcccatgataatatacagtatttatttcaaatttatattaatggttttgcttactgtttcatgcttattgtctaggatagtagctgccacatagaagattctccaaaaagaataaaaatgtttgactgaatgactgctaacacactgataggttatccctttgcaatttcctttttcactcaatattatgttttttatattgttcatgttcattgttcatgttcagatttttcagatgctacacaatacttgtctgtgactatttaacagtttatttaatcactctgatgttcatttatgttgcttaatttttttaactcctacaaacaatatccaataaactttaaataagaatagcaaattaagttcaacrtcattacactgacaccatgtttaag

SEQ ID NO: 26672 - DNA, 815 bp, Homo sapiens
atatggcactcagtgttaagctgaaattctggtacaagcttgtgtcctcgggttttgacttgtctgtggtttgtacaactagactataaaatatttcaaaaaatgattttattcacaatctggccaaactggcttgttctggctgaagagctacatcaaaagagggtcaccagatgggaaagccttcgtctccggggcatggcctaaaacacagctgaattatccggtgttggcagtagaacaccacggaaccttctgttcaaatgtgccctgaacccattaagtcatgagcctcaggctggtttagagagtggcttctaggcatctcgccttgttttctcctgagcaccacttgtagacctactttctttaggaaagggagacagagccgttggcagctcagatgtgaaatggggtcatggaaagagagcatgcttaggagtcgaaggatttgggcactgttgctggttctcgttttagctgcacggtcatgcacatgtctgttagcctgatgtgaaggtgacgcaggtcactcattccatttaggggtggctgggtgcactaacccagtgtcytcttccttatctgtagaaaaggtgggctttttatggagataagaactctttggccaagagagtagaggtggctccacctccctgccagaacttccaaacaagctctcaagggccttaacatgtcacctcatttctctgagcctccatttcctcatgcttaaaatcaggttgtcttgaagcccaccccacggtggatggaaagtactgcatgggaatcgctggggcatgtattggaatgcc

SEQ ID NO: 26673 - DNA, 815 bp, Homo sapiens
atatggcactcagtgttaagctgaaattctggtacaagcttgtgtcctcgggttttgacttgtctgtggtttgtacaactagactataaaatatttcaaaaaatgattttattcacaatctggccaaactggcttgttctggctgaagagctacatcaaaagagggtcaccagatgggaaagccttcgtctccggggcatggcctaaaacacagctgaattatccggtgttggcagtagaacaccacggaaccttctgttcaaatgtgccctgaacccattaagtcatgagcctcaggctggtttagagagtggcttctaggcatctcgccttgttttctcctgagcaccacttgtagacctactttctttaggaaagggagacagagccgttggcagctcagatgtgaaatggggtcatggaaagagagcatgcttaggagtcgaaggatttgggcactgttgctggttctcgttttagctgcacggtcatgcacatgtctgttagcctgatgtgaaggtgacgcaggtcactcattccatttaggggtggctgggtgcactaacccagtgtcctcttccttatctgtagaaaaggtgggctttttatggagataagaactctttggccaagagagtagaggtggctccacctccctgccagaacttccaaacaagctctcwagggccttaacatgtcacctcatttctctgagcctccatttcctcatgcttaaaatcaggttgtcttgaagcccaccccacggtggatggaaagtactgcatgggaatcgctggggcatgtattggaatgcc

SEQ ID NO: 26674 - DNA, 1244 bp, Homo sapiens
tgagttcacctagtcttaggactattacagtctatttgccagtgactctcaaatttatatctctcgtcagatttctcttataaatgttaaattgaatatcgaaatgccatatcaacatctttatgtggatgtctaatcgacatcccaagccttccatgtccagagctggactctagaacttctccaccttaacctgtttacctttggtctttttctgcccagttgagagaagatttatctgtctagttgtttagcccaaaagttttagaattctttttaatagtttgcttttkctcaaaaaacacacccaatccaacagaaaactcaaaatctgatcacttatttctcactttctccactgccttgaatcttgtctgagaatttccctcttcctggaacgttcttccccagatatccgcaaggcaaactctgtcttccaagtctttcctcaaatctcacctgcctgtcctgataattccacttaaaggcacagcccatgctctctgtgacctaagcccaccagttcttcttcatacttctctcatagtatttatgattatgtaacataatgatggggttcaggatgtgctatccaaaatcaggcgctttggtatactgagtattttaagctgaagggaattgaggaaactgcagaagtaggtcatagaaattagaattacccttgccccttttcccctgaagcaggccttaaactgaactgaccttctgctgacgtaggctgttccagaaatgtcaccgaaggacatagagaccaatttgaacaaacacgccttgctcagttcccccaggtttattatcatcagatcctacccttttgtcctccaatcataattctgcatgactatccacaaaagtagttctccctgttcccatgggtcttcatttctgaaggctcctgtgtcacataaaatttaaataaacttgtatgcttctctcttgttaatcagtattttgtcataagggtctcagccatgaaccctatgatgggtgagaaaaagaatcatttgtttcccctacaatgccatatgttatttatttatttatttttgtttcctttgtctccttttggtagaatgtgaggtacataagagaagtaaagcttatcctttttgtatactatgtatttcaaacatctaaatgaagaggagagccctctttatcaaaaagatattaaatttatagtgattttaaaagtatggtattggtgcaagaacagacaaaac

SEQ ID NO: 26675 - DNA, 830 bp, Homo sapiens
acactagctttcacatggatgcctgggcttccacagcccactctggacaatgaacagacaaaccacaaattaagagaagtgctgaaaagtggagggtagtatgcagaatgactcaccatcccagtatgcccagggctgaggagattccagaaatacagggctttcagttttaaaactggaaaagtcctaggcaaactggaatgagttggtcaccatagcagtatgtgcagtgggatggagagggcaagtatcgccagttatttacagaaaggctgtaagacaaatggtcctggataggagtcatgaagttaaaaataaactcttctagaaccataaggtccaatactaactagataccaaatgtagaaggatagatcaagacttccagagataatagatatgtgaaagaccaaggtgcaccgagaccatccccatcctttatagatacttcaaaccaaaccatgatatatctttatcattcttttcaaataaaaattttatacatgccaacattaagaacttttttttttaggtttcctgatcatccctttggatactcattttttccagtgatatacccacatgtgtgctttggtctgttaggtaacccaatagtgaatgtttgacaaatttcaagacagaactcaaaggaatattatgatcaagaatttctagtagctagtaactttcaaaatgctatgaaagcttcaagayattttttaaaacatacagattatactgcaaaaaaaatcaaaatttgtatatttatggtcaataaaacttgaataaatattagacaaagatttgaattttaaaataaaagcctggct

SEQ ID NO: 26676 - DNA, 471 bp, Homo sapiens
ttacgtgctatatacagctgtttttcaatagggatataaaaattaaaattgtgtaggtagttaaatcccaagcctatcataatgttagatgtgggccataggcaagtttctttatatgtaaagtcatagtgattatctcagagtgttggtaggaatgttaaatgaaattttacccacatatatatatgaatatayataacaaatatataaatgatattctatttgtataaatttaatatacatacacaaagtggtcagtattcaataaatgttaactgttataatgttgttgttatataaacatgaacttaggttaataatggtgatgtagtggattgaaacccagcactttaccctcaaatatatgtgttctgggttacttaaatttctctaaatctcattttcctcatgtgcatatttgggaaaataacctctaaggcttttatgtaaattaaatgaaacgcatcatct

SEQ ID NO: 26677 - DNA, 1082 bp, Homo sapiens
ggatcctaatgagattcaggctgaaaaaaagccaatttatagaacagatgggtggtgagtcaaggggaggaaaggtcattcttaayaggagccagggttccttccatcccctctctgaggccgcctggactgtgccatccgcccaactcaggcgaacttaattaactcaagtgctcgctggcagtctgaagatgcacaggcaagaggattgtatttccaatccgggcaagggctggcttcactgagagaacacattccccggatctggctggagacctggagactcacgggaaagtggacgtgccccaccctgcaagcccacgcctcttgcacatctcacctgggtacttgccgccgcgactcctcttgatgaaacagacgatgagcaggatcagcaccaggagggcgatggcgcacataagcccaatgaaccagccctgggtggcgatgtccgcttggttgttggtgtaagctggcggggagggccggaagcaaacccgtgaatgatttcattggggagatggtgaggagggagatggagggaagaacttcagctatctcatgtggatgtttctcctggagcctaacactaccacctagcagccccctggcccaaactaccccgctaaaggacaaaaagaaaataattaaagagccaaggtcaaaagatcagaaaagaggcaaaggaaaggggtacaaggagcaaataagcagaaggttgaacaggtcctttaggaaggggaaagtgtcatagggatgaagcacggcattcttggaaaccagagggctggtcacagcctaatggggactgagggatggccacggattggccatggaagtatgattccccatggatgagtccagggtggagaaatgggagccggcaagctacccatcagggagtgcaggccgtggccacgttgcaaaaacctgctatgagaacaccttcgcaggcctgcacaggcacacggcagcatccctgcccaccagcatggctctgaagccatccaggcttcctgagggtggggactggaccaagtggaggcccaggatgccctgtcatcttttcacatctctctagt

SEQ ID NO: 26678 - DNA, 1082 bp, Homo sapiens
ggatcctaatgagattcaggctgaaaaaaagccaatttatagaacagatgggtggtgagtcaaggggaggaaaggtcattcttaacaggagccagggttccttccatcccctctctgaggccgcctggactgtgccatccgcccaactcaggcgaacttaattaactcaagtgctcgctggcagtctgaagatgcacaggcaagaggattgtatttccaatccgggcaagggctggcttcactgagagaacacattccccggatctggctggagacctggagactcacgggaaagtggacgtgccccaccctgcaagcccacgcctcttgcacatctcacctgggtacttgccgccgcgactcctcttgatgaaacagacgatgagcaggatcagcaccaggagggcgatggcgcacataagcccaatgaaccagccctgggtggcgatgtccgcttggttgttggtgtaagctggcggggagggccggaagcaaacccgtgaatgatttcatkggggagatggtgaggagggagatggagggaagaacttcagctatctcatgtggatgtttctcctggagcctaacactaccacctagcagccccctggcccaaactaccccgctaaaggacaaaaagaaaataattaaagagccaaggtcaaaagatcagaaaagaggcaaaggaaaggggtacaaggagcaaataagcagaaggttgaacaggtcctttaggaaggggaaagtgtcatagggatgaagcacggcattcttggaaaccagagggctggtcacagcctaatggggactgagggatggccacggattggccatggaagtatgattccccatggatgagtccagggtggagaaatgggagccggcaagctacccatcagggagtgcaggccgtggccacgttgcaaaaacctgctatgagaacaccttcgcaggcctgcacaggcacacggcagcatccctgcccaccagcatggctctgaagccatccaggcttcctgagggtggggactggaccaagtggaggcccaggatgccctgtcatcttttcacatctctctagt

SEQ ID NO: 26679 - DNA, 1082 bp, Homo sapiens
ggatcctaatgagattcaggctgaaaaaaagccaatttatagaacagatgggtggtgagtcaaggggaggaaaggtcattcttaacaggagccagggttccttccatcccctctctgaggccgcctggactgtgccatccgcccaactcaggcgaacttaattaactcaagtgctcgctggcagtctgaagatgcacaggcaagaggattgtatttccaatccgggcaagggctggcttcactgagagaacacattccccggatctggctggagacctggagactcacgggaaagtggacgtgccccaccctgcaagcccacgcctcttgcacatctcacctgggtacttgccgccgcgactcctcttgatgaaacagacgatgagcaggatcagcaccaggagggcgatggcgcacataagcccaatgaaccagccctgggtggcgatgtccgcttggttgttggtgtaagctggcggggagggccggaagcaaacccgtgaatgatttcattggggagatggtgaggagggagatggagggaagaacttcagctatctcatgtggatgtttctcctggagcctaacactaccacctagcagccccctggcccaaactacccygctaaaggacaaaaagaaaataattaaagagccaaggtcaaaagatcagaaaagaggcaaaggaaaggggtacaaggagcaaataagcagaaggttgaacaggtcctttaggaaggggaaagtgtcatagggatgaagcacggcattcttggaaaccagagggctggtcacagcctaatggggactgagggatggccacggattggccatggaagtatgattccccatggatgagtccagggtggagaaatgggagccggcaagctacccatcagggagtgcaggccgtggccacgttgcaaaaacctgctatgagaacaccttcgcaggcctgcacaggcacacggcagcatccctgcccaccagcatggctctgaagccatccaggcttcctgagggtggggactggaccaagtggaggcccaggatgccctgtcatcttttcacatctctctagt

SEQ ID NO: 26680 - DNA, 634 bp, Homo sapiens
tgcatcaaacattctgctatgattcacatagataaaaacaaaatgaatcttggtgtagaacaaaattgaatattgttttttatttgtctctctttggagtgaatgcagtaagacattagcatttatactaaatatataaatatttatcttgcattgactcaatagaccacagcccaacttcaaactttgccatcggtataatttatttcaaagaagagattaaaatagctaagcaaatttcatctatgtttctttttgtctttgaataacattttatactattttttccaaaatattatctatatgttacctaactttatcttcacaacaaacagatcaactgggtagattttgtctttgcacccaatttatcaatgagttatgagaagaagcttgcagcccttaagaatgacaaacatgcttatttctaaatcttcatctcagtctctcccaccttggttacatgtcccatctcctagtttgccacagaccagtcttacagtaaggaagtagtagctagggaaacagttgttaaattataaatctcaaccatccaaccattaccctaaagcaacctgcattgctcaggacmcctgtggtgagactctgctctgacctgtgtaactgttaaatt

SEQ ID NO: 26681 - DNA, 801 bp, Homo sapiens
actacccattcattccatcaccttccaggccttgctccatgacaagcactgggacctgggctctccctggtggcactcactgaccaggggatttcctcctatgagcaagccttccctggtcacggggggataccctacagggagcagccagatctcttctccctgggtgcccctccttggggtctgtcagactgtgaggctagccacctcccctgagccctgcttctctgctgcttggaagagacttgccagggaagatagatctccccgctgcagcagggtctgggggycagcttggggcatggcaccgtagattccaaagcacaggcttgagctagggctgggcagggatggtaggaggatctttttaattttttttaatttttattttttgaaacagggtctcgctctgttgcccaggctggagtgcagtagcgtgatcttgactcactgcaatttccgcctcctgggttcaagcaattctcctgcctcagccttccgagtagctgggactataggtatgtgccaacacgcctggctaatttttatacttttagtagagacggggtttcatcatgttgcccaggctggtcttgaactcctggcttcaagcaatcctcctgcctcagcctcccaaagtgctgggagatgtagtctcgccctgtcacccaggctggactgcaatggcacaatctcggctcactgcaacctctgcctcccgggttcaaacgattctcctgcctcagcctcccgagtagctgggattacaggtgcccaccaccacacccagctaatttttgg

SEQ ID NO: 26682 - DNA, 585 bp, Homo sapiens
caattttccccttggcagcaatattgtacccagttgagaactgctggatcagataatcctcctggacttttaagatgacaacttcctactctgttgaactaatctgtgctgacatcctattcaaggaaactagaggacatccccaaggccgaatgtagtagacatcattgcagggaagacatagggtcgagcttgaggcaacctggcaggccgaagaaataaaatcaatacttgataggtaagactgcttgtctgtagaagtcatctacaagaatcgattgcattccaaagcccaaaacaggaagagaagggcttctttctagcccagaatttctcaactttggcatcactgacatttggggctggataattctgtattgtaaggtgctctcctattcattgcaggatatgaagcagtatccctggcctcaattcactagatgccagtagcacttacccctgccacttatgacaaccaaaaacattgccaaatatccycagggcagcatagttgctcccaggtaagaagcaatccagtctaattgatgcttcattaaagacagatgaatagcataaaacctggaa

SEQ ID NO: 26683 - DNA, 996 bp, Homo sapiens
tttttttctttttttgagatggagtctcgctctgtcacccagactggagtgcaagggtgccatcttggctcactgcaaccttcacctcccaggttcaagctattctcctgcctcagtctcccgagtagctgggactacaggcgcatgtcaccatgtcaggctaactttttgtatttttagtagagatgggcttttaccgtgttagccagggtggtctcgatctcctgacctcgtgatccgcccgcccctgcctcccaaagtgctgggattacaggcatgagccaccacgcctggcagaaaagctttttaaaaattatttagagagctggtaaaattatgccatgtaagtcctaagatactttattaatggttatatagtttgccttcctaatttcaacttataaacatacattgctataaatatgttcaatgaagagcataccacttttaaactaaaaatagttcctgtccattaagccagaggaaacaaatccaagagagtagagactatgtatttgagaatgttaactgtttcccaggaacaaactcaaagacatgcacagtcaaggtatttggcagggttttttgttttttgttttgagatggagtctcggagtctcgcgctgtggcctgggctgttgtgcagtggcgcgatctcagctcgctgcaacctccgcctcccggattcaagcagttctcctgcctcagsctcctgagtagttaggattacaggtgtgccaccacgcccagctaattttttgtatttttagtagagacgtggtttcattatgttgtccaggctggtctcgaactcctgacttcctgattcgtccacctcggccttccaaagtgctggaattacaggcatgagccaccgtgcctggctggcatttttttttttttttaataagatacaagaggaaaattggatagcctgacactacattattcagcacctaaagaggctttctgtgataattgcaggaaaagcagcaa

SEQ ID NO: 26684 - DNA, 1026 bp, Homo sapiens
accccccatgacccaaacacctcccatgaggcccatctccaacactggtgatcagacttcatcatgaggtttggagggacaatatccacactatggcagcaagaagcagcatgaatatgagggggtttgaagtcagttatttcagtagttaaagttgcaggattggtggggtggtgagttagttacatttacagtaggtcagtataggtgtaggtttgaggaaactgaactgcaagttcagctcacaacaggagtaactgtagtacgtagcttcgtgggatcagacggttcatttattttctgtgttgcacaaataacattgcaatatgttaatgaaaattgaaatgaaagtaaaactttgcccgtgactcaccatcgcaataaatggccatttttgtgtttttcatgttctatgttctcttactaaataaatacattttatgtagttatagctgtaatgtaggcacagttccatactctgttttccatttaacattttatttcataatcattttttctatgtcattactgcagcttcaggctttgcagcccagagcgtgtgctccacctagtttttccatttctcttgaggaagcatcagatagagctgggtgaggtctgtcctttggggtcagtgggggcttcccactgcccctctggccgagtgcgtggtgggagcttaaagtatcataggggctgagagttgtggcaaaaagacccttgaagttgcatggaaagatcaactttaaaattatttttcccascatagatcctgttggagtttgctgggattataacaccaatgaggctgatggacaaatggagaagagggaactcagaacttggagctactttgttaatcagcagacctgggccttgggaggatagtcctcaccatagggccgagaataaagcttgagttgccaggtgttctgtgcagcccaggacgggagcccatattgaggttcaagctaactcaggccaatagaagagtccagaacacctggcacatgtctagggctgaca

SEQ ID NO: 26685 - DNA, 1026 bp, Homo sapiens
accccccatgacccaaacacctcccatgaggcccatctccaacactggtgatcagacttcatcatgaggtttggagggacaatatccacactatggcagcaagaagcagcatgaatatgagggggtttgaagtcagttatttcagtagttaaagttgcaggattggtggggtggtgagttagttacatttacagtaggtcagtataggtgtaggtttgaggaaactgaactgcaagttcagctcacaacaggagtaactgtagtacgtagcttcgtgggatcagacggttcatttattttctgtgttgcacaaataacattgcaatatgttaatgaaaattgaaatgaaagtaaaactttgcccgtgactcaccatcgcaataaatggccatttttgtgtttttcatgttctatgttctcttactaaataaatacattttatgtagttatagctgtaatgtaggcacagttccatactctgttttccatttaacattttatttcataatcattttttctatgtcattactgcagcttcaggctttgcagcccagagcgtgtgctccacctagtttttccatttctcttgaggaagcatcagatagagctgggtgaggtctgtcctttggggtcagtgggggcttcccactgcccctctggccgagtgcgtggtgggagcttaaagtatcataggggctgagagttgtggcaaaaagacccttgaagttgcatggaaagatcaactttaaaattatttttcccagcatagatcctgttggagtttgctgggattataacaccaatgaggctgatggacaaatggagaagagggaactcagaacttggagctactttgttaatcagcagacctgggccttgggaggatagtcctcaccatagggccgagaataaagcttgagttgccaggtgttctgtrcagcccaggacgggagcccatattgaggttcaagctaactcaggccaatagaagagtccagaacacctggcacatgtctagggctgaca

SEQ ID NO: 26686 - DNA, 1026 bp, Homo sapiens
accccccatgacccaaacacctcccatgaggcccatctccaacactggtgatcagacttcatcatgaggtttggagggacaatatccacactatggcagcaagaagcagcatgaatatgagggggtttgaagtcagttatttcagtagttaaagttgcaggattggtggggtggtgagttagttacatttacagtaggtcagtataggtgtaggtttgaggaaactgaactgcaagttcagctcacaacaggagtaactgtagtacgtagcttcgtgggatcagacggttcatttattttctgtgttgcacaaataacattgcaatatgttaatgaaaattgaaatgaaagtaaaactttgcccgtgactcaccatcgcaataaatggccatttttgtgtttttcatgttctatgttctcttactaaataaatacattttatgtagttatagctgtaatgtaggcacagttccatactctgttttccatttaacattttatttcataatcattttttctatgtcattactgcagcttcaggctttgcagcccagagcgtgtgctccacctagtttttccatttctcttgaggaagcatcagatagagctgggtgaggtctgtcctttggggtcagtgggggcttcccactgcccctctggccgagtgcgtggtgggagcttaaagtatcataggggctgagagttgtggcaaaaagacccttgaagttgcatggaaagatcaactttaaaattatttttcccagcatagatcctgttggagtttgctgggattataacaccaatgaggctgatggacaaatggagaagagggaactcagaacttggagctactttgttaatcagcagacctgggccttgggaggatagtcctcaccatagggccgagaataaagcttgagttgccaggtgttctgtgcagcccaggacgggagcccatattgaggttcaagctaactcaggccaatagaagagtccagaacacctggcacatgtctagrgctgaca

SEQ ID NO: 26687 - DNA, 1015 bp, Homo sapiens
tgtccaacaccttagcagggataactggaatcctaatgatatctttctccaggtgctgtctctctcaggttagcttgggctttttcagtggctggatctcaagaggaaagggttccaagagagcaagctccattgtgtaagccgctggttgcatcctgtttgctaatatcaaaattgccaatgtcacatcagtcaacatgtctaggactagattcagtttgggaagagctacagaagatataaatatcaggtggtgtggtacattggagccaccaaaataagtctgccatcagataaacaattaattcctcgcttttatgagcatggaattggtgctagatcataaactgactatcctcattttaccaactttccsttaattgttttctgtgtcagtttttcatatttccaagttgaaaccccctaaacacaacatttttttccactgctcattttttaccaaaattcaaacttcatgaaaccctggcatttcatcctttgccttccatcctcatggccaccatcaaagtccacatctttattatcttacatgtgaacagctgtaataacctttccagttattaattctttaaacaccacttttagcctgatgcatttcttttcaagaacctatggtatgtttatagtccagattgcattaaacctaacctttctgttatagggcccttttctgaggcccttatttatcttgctctgcaccatttatataactattttctggctgagcacagtggctcattcatgtaatcccagtactttaggaggcagaagcaggtggattgcttgagctcaggtgttggagaccagcctgggcaacatggcaaaatgccatctctaccaaaaatacaaaaattagccaggtgtggtggtgggtgcctgtggtcccagctacttgggaggctgaggcaggaggattgctggagccagggaagttgaggctgcagtgagccatgatcatgctactgcactccagcctgcatgacagagtgagatc

SEQ ID NO: 26688 - DNA, 564 bp, Homo sapiens
tttactttgttttctttttggagacagagtctcgatctgtcacccaggctggagtgcagtggtctggtctcggctcactgcaacttccgcctcctgggttcaagtgattctcctgcctcagcctcctgagtagctgggactacaggtgcatgccatcatgcctggctagttttttgtattttaatagagatggggtttcatcgtgttgcccaggctggtcttgaactcctgagctcaggcaatctgcctgccttgtcctcccaaagtgctagggttacagacgtgagccaccgtgcctggccaaattagttccttttgttacctagcctcctttgtcagttatctatgcattaaacggttttcagtgcctggtcttcagcattggattggatgatggctgatggaagaaaaaaaaacagtggttatacmttggaatttagttttcagttactggtgaattttagatccaaggagactactaaacctggctcagttatttttggacaccaaaacataattttattggaaagcgaacacactctatcaaccaattttaaataaaaa

SEQ ID NO: 26689 - DNA, 1088 bp, Homo sapiens
ccaccctctaagtagagcactgttacaagaagtgctgcacaacttttcttcttatgcattagggtgggagagaaggaaagaaatccatgtgcctaacaagcactgggttaggtgaggagtcaggggataacaggcaataaagttgagaattggagaattgatgaaattacacacagtgaaagacagaaagtactagaacacaccaggtttgcaatcccccttggtaggtggagggaagtgagggtggcggagtttgagaaaacactgagatttgcagttacccaatctgctcactaggtggtaccatcttcctaggacagcttggttgccaactgccaggttggagttgggtggggtggggtgggggtgggggaacaacctcctggggaggggcaagggtgggtttaggtgtctggcagctggtggtgggatatttaaagtgcggatgaccctaaactgtgtggcagtctgtaatttccctttggccttacttagataatatgtcataatgtgtgaagacacacatgtatgacacaggagaacatttgatttaatacagtgtctagcttgcagtctcaaatgtaaacacttaggtcttctcaatcagtaggagacctgatcagcatccaagtgaataaaaaataggccaaagacattttagacaccgtcttgttgacaatgaactcttaccactcaaggcttagtaaatatacttaagtgtttatgaaaatgaatacactaaacttatgaaaatggtttattacagaaactagaagaaaaagttagaaaatagatgcatacttttagtaacatccaagaagacacaatctctataaagacaggacagaaagtcagaaggaaaaaaaatgctgaaaygaaaagtaagaaaagataataaacacttacatggagattgctatacaccaaacactggagttcatgtatattaacgtattcagtctttgcaataatcatgtaaagtgaaaaccattattatccttatatctcagatgataaaattgagatagagttagagatagagatagagataggaatttaatgtggttcactaatttgacagtctgtaa

SEQ ID NO: 26690 - DNA, 734 bp, Homo sapiens
atttgccagtgaatgttaaaatcagtgtacaagggttataagagaaatgtgtccatattctcaaatatatttcccaaaatatttattaaacacaagggtcaaattaataaccttacacttgataaatccagcagttaccaagttaacagaatgatcaagaaaatatccccagtactaaaacactggcatgatgagccccatgctatgatatactagtaagggcaccatatcaattctctggtgttctttctgaaaatgataacctcatttcaatcatggaaatatatcagacaaatcaaagttgaaggtcattctaaaaataactaattagtactcttccaaagygtcagatcataaaagacaaggaaatactgaaaagactgaaggtctgaaagagattaaggagaaatcataatgaaatgcaatgtaaaatcctcagtaggattcttgaaaaaaaaaataacattagtagaaaaaaatgatgaaatttaaatgaggtttccattttagttactaatattgtaccaatattaatttcttcttcctgataattacatataatcatataagttgctaacattaggtgaagctggtgaggaatatatgaatactccatgtaacatttatgcaacttttctgcaagcctaaaattagttcaaaattaaatgtttcagaaaatgagcttattgtttccatctgaacattaacattactaaattagggtgttatatcag

SEQ ID NO: 26691 - DNA, 734 bp, Homo sapiens
atttgccagtgaatgttaaaatcagtgtacaagggttataagagaaatgtgtccatattctcaaatatatttcccaaaatatttattaaacacaagggtcaaattaataaccttacacttgataaatccagcagttaccaagttaacagaatgatcaagaaaatatccccagtactaaaacactggcatgatgagccccatgctatgatatactagtaagggcaccatatcaattctctggtgttctttctgaaaatgataacctcatttcaatcatggaaatatatcagacaaatcaaagttgaaggtcattctaaaaataactaattagtactcttccaaagtgtcagatcataaaagacaaggaaatactgaaaagactgaaggtctgaaagagattaaggagaaatcataatgaaatgcaatgtaaaatcctcagtaggattcttgaaaaaaaaaataacattagtagaaaaaaatgatgaaatttaaatgaggtttccattttagttactaatattgtaccaatattaatttcttcttcctgataattacatataatcatataagttgctaacattaggtgaagctggtgaggaatatatgaatactccatgtaacatttatgcaacttttctgcaagcctaaaattagttcaaaattaaatgtttcagaaaatgagcttattgtttccatctgmacattaacattactaaattagggtgttatatcag

SEQ ID NO: 26692 - DNA, 556 bp, Homo sapiens
gggtctttattatcgtttatattaacctttaaatgctaaaaatgaagttgaagcttcacatrtttcacttcttttaaggaaagcatatatttgttatcagctagccgcaatggagtattttctttgttaagagatacttgccattttaaagctgtacaatatgaagcagcattataaaatgaagcattcaagttttgatgatctgtttcctctccattgacaactaagaaaggctaaagttgtgcagctgttacattcccatgatgcatgtactttacctttatagaaaccaagcaaactattccttttggtgtgcataagctccgaagagaggcgcaaaataaagttcctgtaatattctttgaatttttcttacagaatctcctttcccccatgctcactggtttgggaaagaaaaataaatggatgattcatgagggttaaacattgccagctgatactttttactagctgcagatggagcagtttctttttaaaagcaaagttcaagtcttcacacaaacaacaattagaaaagttaatgagtttcatttta

SEQ ID NO: 26693 - DNA, 590 bp, Homo sapiens
tgtcaaatacaaaaacaattttggggtgattaccaaacagcaaaatcaaaattattatttctctatatttcaaaagaaaagattttttcctttgtattcattcttagttcttctgaaaggtttatatttaaataacacaatggccataatgcaatctttttcttagaatgtacaatccaaaagaaaggagtataacctttcctattcacattttaaaaaccactttttatggagcccaaaacartatttgatggcaaaggtttgaaaaaaatgcagttgaccaattagtaactacaaagtgagaatataacctagcgtaaaaaactcaaaagcaaaatgaaaccagatccatcaagaccagaaaacaaaagctctttattcactggaaaaccaatggagaactaaaaatgatcctctcccaaaattttttaagagtgaagttttccacttcactattatttcaactatatctcttaatgaaaaggggagtgtatatgaacaagaaacagtatattcaaaacttagattcttacttttgattttcttcttcttctgattcttcatgctggtcaaataattcccatttagaa

SEQ ID NO: 26694 - DNA, 467 bp, Homo sapiens
gtggctcacacctgtaatcccaacactttgggaggccaaggtgagtggatcacctgaggtcaggcattcgagaccagcctagccaacatggtgaaaccccgtctctactaaaaaatacaaaaaattagccaggcctggtggtggacacctgtaatcccagctactcaggaggctgaggcaggagaatcacttgaacccagaaggcagaggctacagtgakccactgtactccagcctgggcaacagagcgagaccccatctcaaaaaaaaaaaaaaaaaagaggaaaaaagaaaaaaaggaaaagtttggggctgagagaggcaattgagcctaggacaggaagaggcagagacctgaagatacaagtatatctgggtgggtaccagatagttccacattgcagatacagcagatcagtgggagacacattcatttggagcatggaatagatgtgaggaaccagggg

SEQ ID NO: 26695 - DNA, 467 bp, Homo sapiens
gtggctcacacctgtaatcccaacactttgggaggccaaggtgagtggatcacctgaggtcaggcattcgagaccagcctagccaacatggtgaaaccccgtctctactaaaaaatacaaaaaattagccaggcctggtggtggacacctgtaatcccagctactcaggaggctgaggcaggagaatcacttgaacccagaaggcagaggctacagtgatccactgtactccagcctgggcaacagagygagaccccatctcaaaaaaaaaaaaaaaaaagaggaaaaaagaaaaaaaggaaaagtttggggctgagagaggcaattgagcctaggacaggaagaggcagagacctgaagatacaagtatatctgggtgggtaccagatagttccacattgcagatacagcagatcagtgggagacacattcatttggagcatggaatagatgtgaggaaccagggg

SEQ ID NO: 26696 - DNA, 884 bp, Homo sapiens
ggactacaggcacccgccaccatgcctggctaatttctgtatttttagtagcgatggggtttcaccatgttggtcaggctggtctcgaactcctgacctcaggtgatccacctgcctcagcctcccaaagtgctggaattacaggcatgagtcaccacgcccagccatttctcagaactttcaaagtatcgctccattgtcttgcttttggtgttgctactgagaagtctgtagctattttaattcctcattctttgttagaatccttcttttccaactctacaagtcagtaaaattcttttgtttgcagatttctgaactttttcagtaatacatctgagtgtaggtttgttttttcttgtgtgggtcagtctatggactttttcctaccttaaaactcagttattttattaatggaaaaatttctcgaattgtatttttcatatttgctttcttttattttctctgttcactctgaaactcctattttaaaaaatttctgggccagttctctaattttcttatgttttttctctcttctatttatttgttttatattctattttcaggggagatttcctccactttctcttccaactcttccactgagttttacattttagaaaaatgtatacattcgaaaaggtatcacattagaaaaaatataacatttagagaacaaaaaaatctattaaaatatgatttttgttttcttgttctgcatagcctgtttccttcccagttgcttttttctgtttttgtctttcattatcaaatcctctcttcaagtgtctggtgatctttggctgtcttgttcatataaaatagtatgaactmaaaagctaagaggaagttctgtgtttggatggagctcattaatggtg

SEQ ID NO: 26697 - DNA, 819 bp, Homo sapiens
caagactgtcctttcattcaagacacgtttattgagtgcctactgtgtagcagatgctgagctaggcactaggcattcagaaatgaaacatgatcttgctgttataaagagaattctattttgagatgtttaaaacaatgattcttccatccccataaatcatgttgcctctggcttctgatttaatggcttcttttcatttctgagggaagtcagatgctgcctagaataaagaaatcattgttcagctttaaacaccaaaaaaaatattttcttgcatccatagtgtaacagtcttacaaaccaagctttgttttgaggcaaaatgctttgctaaattccaaagccttacttgtacatatcaagggcaggaaatctggaaatctgagcatagggttttattctatagaaaagtgagaatttgatggaagatcaccttctattacagaggaaataaaaatacaaatctctctggcctctggaaggaagacgcaataaatttagaaaaatttcaaaaargataagaccagggtaaggttgtggatttcttgaaactcagtgccctaatgtcctgagcatggtttcagaggagcaatagatacatcataatagaaacttcaagctgacagaaacttaagaacaacaaacccatataccttgaaggagaatccaagagcatctaagtggggctctgctccctgagtcaagactgacatgttgcaagaatgatagagcattatttgtagagtgaggtgtctatatggatggtcccaaaatactgctcctgtctttccctactgcttgctcatagcatggtaa

SEQ ID NO: 26698 - DNA, 537 bp, Homo sapiens
attgctatgcagccattttccataatatgtgtgaaatatcacaacataaaattattaaccttaggcctcaactgttcaaattgaatgttttatcatgttgagattcaaaatatattgagtattttcagactaattttaaatatttggagaaaaaatagttcaaaatggtgcttactaaggtattatttcaagctagctttataaaattatgagggtagtcatttggaagttcagcacggaacttatttcctattgaggaacctaattaccaaacatttttgctcacattgtctgaatgttgtgatcagaacacattaaaaaaaaaaaaaacargagattcagatataagtgaacaacaaggtacataaggtgatgaaaggtctcccatgaaagcacaaggctacaaccattaagtatcatctatgagagtacaatcatttaaaaatcaatgcaaatcttttaaagagtcagtgttcagtaaaacacaaatgaaactgccaggaagaatgagagattctgaattttgtatgaggcaat

SEQ ID NO: 26699 - DNA, 1060 bp, Homo sapiens
tacgattattgtcatttaaaactaaaaataaaggctgcattttcaaagataaattggagattgctattgatgacatacagccaaaatactgaatctgatgtacatataggttgctacaggcagggatagtgtaatttagaatttggagatttaataaccagggctacccagaaaaagtgacttgataacatggtaccaataagtacgggatgctctctcggtttgcatttgctactttcaagatttygacttctcaggttattaatcaaaattattgtataagttagccaatagaatttttaggttaaaacaacagatgggaggtttgtggagtgtttaatgtcatgggcatttttagtagcatagaccctttgttctgcatttgaatgtttcgcatatttttgtttcacagttaatcttccctcccaagtttgctattcaaatcaaatgcctgaaagacatttctagtagtttgatgtattttttgaggaaaagtttgtgattccaatgcaggtgtcttcattaccatttcctctacactgcagaagaagcaaaactcctttgtgagaattattgcacatgtgtatggggaaattagttccgaaaggctagaatgatacaagtgagcaaaagaagttggtcagcttgactatggagtggtggcaataatctctaaacaatccaaaagactatgagctgaacctaaactcccttggaatctgaacagaaaagaaatataaaattgccatttgaaaactgaccagctaatctggacctcagagatagatcagccagtggcccaaagccatttcaagtacagaaattgtattgagactacagccaaataaatttgaacattaagtatcatttttccacttttcctttttataagcatatttgtaaactcaaagctgagcagaagtgactttattctctcaagtttgatactcagttgattgactgttcccttacccctcactcttccccttccctttcctaaggtaatagtgcacaatttaggttatttttgcttccgaatttgaataaaaaacctaatgct

SEQ ID NO: 26700 - DNA, 545 bp, Homo sapiens
gttggggttaaatgtttttatttgcatttctagagagaagatggttataaatctgactgttttacagaatatacattttctccctcaagttaagaaacacaaaatgaggcatactactgaaccaaatagttcccctgtaacagaaagtcaggaaatcagtactattgctgtttaagaccatcattgttggattttagygtagtgcttttaaattactattacagtacagcaggcaggccctcaaactgtatctcttaaatgaactttgataggtagtattcttattggagcaattgctttcaccttctacttgaacaatgaatctgcctcaaacttcagtcttcttcctttttccttggatttttgttttatcaatcgttatattatcacatgaggtcattttttatgtaaactgatgaaaaatcattaggaatttaggtcatactgttaaaaaaagaacagtggcaagatatggttaaatttctttatttttttttttactatcagaagtaatactaagagaagttatgtaacatctttaaaca

SEQ ID NO: 26701 - DNA, 559 bp, Homo sapiens
tgtaattcaaataatttttctaccacataaaaaagataaaagaggaacaaatacaatcagtgatytgtgttgcttccaaactacgaaataaagagattggatcttttagcaaatttgagcacataatatgtagattgttaggtaaaaatgatcgttgttttattcttctttgatgataaagaatatgtaacaagaggaaagttataactgagaacaaattcacatttggaaaacaagtaaacaataaactccttcatgatatttataatagattgagaaatattttggacagaatacattaacatgtaagcttcttcctctaaattaccacaagttcataaagtttttaaaaaatggctgaaaataataaaggcaagaaggccctcactacatgttggctgctcagtcttggacttcctagccttcagaactgtaagaaataattatcttttcttatcatttacccagtctcaggtattcttgttatggcaacaggaaatgaactgaaacaatcagtgattaatcaatcaatgtaagtgaaacaggaccaaatatttat

SEQ ID NO: 26702 - DNA, 578 bp, Homo sapiens
ttgcaggactctttcctttacgacagagggaccccaayatttgctcagaaccaatcttcttttcaccacacttaaggatgcaagaaatcgtcaagagagatcaagtcagcgaagaataagaaaaagggttttctgaactcatgttgttttctttatcataaacttggagcatctccaacttggagaattggttggaaataaatgaacatcataattttattcagcgaatgatgtatcgatttattacacattgacaggatgccaggtcttgccctttgtaatttcagatcacttcttttagcaatgagtactattgaacaaccttaaagctggaaggaacataaactccaataatctcattgtccagatgagaaaactgaggccttgggaagctgacttcgctgaggtcatgagtgatttattggcagatctagatcatgaatccaagtatttccatcatggctactaattctcagaccagatgcttcaaacctgggcttagacagtctcagtttgagaaggggagaagcgagattcaatttgccaatattcccatccttggaggaagtgatatttat

SEQ ID NO: 26703 - DNA, 533 bp, Homo sapiens
tggttgtaatcaaacagggaggtatctgaatctgaaatcttgggattgaatcctttcttcgtgaaagagatatcccaggaagtggtccttcttgccaagtgttagaaaaaaatagtagatttgagaagatcagtgaacaactctaactttaattatttttaagtaagaatccttttttcaacaagttaaataaattcttgaaaatcagctgcaatctacagaaacagctattttgctatgattaagaagttactgtattttgtttcagaatatctggtaaagagagtgttctaagttgatattatgctcaacacataaaatgttccaactccaaacatagatctgagtgtatgcacagctaaaattaatcatcaacttgtttaactggcaactgcagccattcatctgcagcttctaaaggcttgaacaatagaacagcacatagtrtgcatttgcttacttaaatcttggtttgaatattctccaatatgggagtttcaataatacaaacaaatacatgatataatgcactt

SEQ ID NO: 26704 - DNA, 565 bp, Homo sapiens
gcctggctaatttttgtatttttagtagagacagggtttcaccatgttggccaggctggtcttgaactcctgacctcaagtgatccgcccatctcagcctcccaaattgctaggattacaggcrtgagccaccgtgcctggctgagacattacatttaaatcttagtccatcttgagttaatttttgtatatggtgaaaggcaggggttaaggcaaattgtaaactctttaatgagaggttaagagataataataatttgtttcacagttagccaaaatagggtattcatgactaatatgtagatttatcagtgataaaacttgagttattaattcggcctttaaaattatatgtatataattttaatatatacaatataaaaataaaaatatatattatatactttttcaacctttgtcccccttcctccctcctcacctctagtagtccccagttcctattgttgccatctttatgtccatgagtatctgatatttagctcccacttataagtaagcacatgcagtacttggttttctgttcctgtgttaattcacttaggat

SEQ ID NO: 26705 - DNA, 611 bp, Homo sapiens
tagaggtcaccccctctccccataaagtgttaactatctagaaaggtctgctaatcaaaaacatttcattcttctcctctatcctgggaaaagtataaaacagatcaaagaggccaacaatatttggtacattttacataacactttacacagatgagaagaatgtaggttctaagcctataactgctttactgaatttctcatagcggacttgcaaaagttattctctgtggatttcttttttcttgtaagaaagctgatacattgaaatttataaagcgaaatgtcaaaagttccagtaaaaaattatgatttctcaggtatatttgtctctaaatataaacagcaaataagcaagcacctgaattccatctaatctcttcattcttgtaaaaatagtaacagctgaccccctaagtatgcagmgaaaggaaatgtctgtgtttggtgtcaaaagttattgagccaaccaaatacaagaaacctctccctcccacagttgcaaccacacaaacacaaactggtgcagtggaaaaaaaatcactgggttaatcaggtgttccagatcctagttctggtacaacatttaactagctgtgtaactcttggca

SEQ ID NO: 26706 - DNA, 1361 bp, Homo sapiens
attccctggcactgtgtaaaggagttggggaacagtgtgggaaactgatggtgtagacaacctcctgtttctgtctttcctagagaatcactgactacatggcaggatagcagagggccagttatcttcctttgcctggagatgaaagggcttaaggaagaagtagggaagaaatcatcacaagagggtggaagccaggagatgggaagcagttggaggagagaggtcgggagtgaggagtctggagagaggagtctggagagagggagacttcaagctgttatggtgtatgaaagatgtaagagaggagagaaaataaaaaaggaggtattttaacatctaggattctagattacaattagaatattttacattctctttgagagagagcaatgrttggaattcctatttaattactttgggtaggttttttctatatgcaaactggagataatttctgcaagaaggtggtgatgaggattaaattattcttctctactttttctccactacttcacttcaccaaagccctgccctgtaactattgtctccaaagtatcctactggctattgtccaggtacttataacagtgaataacaattatttgtttgcctttgcgattgtgagctccttacagtcagtgttgtgtcttctttgtcttcagttttcaggccaggcaagggtctgatacattctacatccgcaatacatgtctgataaatgaaggaataagtaaatgaatgaatgggaatggccaacattaacataataaatgaggactcccttctgttttcttcaaaccaattaaagccaaatcctaatatattgaattgcttccaactatttcttacagttctggtttacttaatttaataaattcgcctaccagccacagatatttactgaattcccactctgccctgtcattgtgatagatgtaaggcatacaaagttaaagacagagcttctctccttagacagctcacattcctcagagaacccagacatgcaaaccaacatcttcaggagagtactgcaattgctatgatggaaaatatactaaaggtggtgagagcaaaggaagaaggcttgaggattctgggggggattgggaaaggcacctccaaggagatagtctctatggtgagatgtgaaggtggcataagagtttgacatataagcaggagggaccatttatacacagagaacaacgagcataaaacatagagccttagacagcaaggagtattgtgcatctacaagatgtcatgtttgggagcttgatataagctcctcgtgatcttacctgcaccagctcaagccttacctcctgccacttttcatatataatattttcaat

SEQ ID NO: 26707 - DNA, 1005 bp, Homo sapiens
ccccaaactctgagaatggtctctggatgaagaccctacttgtctgtcagtcatctgccccctgactgtatgaggcccatgatactggcctgcatctgctatcctctggttagagtgctgccagaataaactgcttgagatgtgttgaagattcctcttcgatgtgaagtaaatggaaggggataagtcgctttgggaaagctgcttaactaagaccacctaaaacctctgatcatgacaacggctcattattttctttttgcataaaattagagtagaaacataaaaagtcattgagactttgaactttttctttattcaagggaaggctgataaggacatgggttttggaggcagaaagtcctaggttcaagtccagctcttcaattcacttcctgagtaaacctcagcaagtaacatcaattcattcagtttcctcatctgtaatttgaaagcttgaatactagtttcaggcacacattgatggggtgtgtgtatgtatgtgtgtgtgtgtgtatatatatatatatatatagctacacgatcaatatgtatatatgtgtgtatatatgtacatatatataatgggtatatatacatgtaatcaatatatagtcaaatatatatatttaaataaatatattcctttgggggttgttttgagtattagagaaaattttatataaattacttaacccattatagacacattgcattttctttaatakacgtaataaatattaaggacaaaaatatgtcatttccatcaccaatagtatcaaattcacgttttaaaatgagaaacttcgatgggctggcaagatggccgaataggaacaactccggtctgcagctcccagcaagatcaacagagaaggcaggtgatttctgcattttcatctgaggtacacaggtcatctcactgggactggttagacaatgggtgcggcccatggagggcaagcagaagcagggtggagtgtcacctcaccagggaagtggaag

SEQ ID NO: 26708 - DNA, 544 bp, Homo sapiens
taaagtacgcagtagccacatgcagctagtggctactttaatggacaacacaggtcattgcagaaatgtctttaaraaggtactggagggaggctgggtgcaatggctcacacctgtaatcctagcactttgggaggccaaggtgagtggatcacttgaggtcaggagtttgagaccagcctggccaacatgttgagaccctgtctctactaaaaatataaaagttagctgggcatggtggcgcacgcctgtaatcccagctatttgggaggctgaggcaggagaattgcttgaaccccgggtttggaaattgtagtgagcctagatcacgccactgcactccagcctgggcaacagagtgagactcagtcttaaaaaagaaaaagagaaaaaaagaaaaagaaatgtgctgggggaaagactaggtgtttgaatttattagattgagggactaccctgtcaaaagcatagtggaggaatgaaacagacaaggaaccaaaagcagctctgtatggctggaatcagtacaatgtagaaatgttca

SEQ ID NO: 26709 - DNA, 565 bp, Homo sapiens
tctgctgactacacattcctggaaaaattgtctactgttattttctagctcagcgtcttacttgtttctttcacagcactaatcacaacttgtaattattttccatatctgcttttggttttctttctgcctcctgtactggaataaaagctccctgaaagcaaagaccttgcctgtgttctcyggctcagcacagaaactggcccagtgcagctcacttgtcattcacttgttgagtaattaaatgagtgacagagtacatgattaaatgagtgtatgtacttagttgttgagattattaaatttttctcgttggtagctatactctcagagaagtcacaaagtgtctccaaggttctggtcttttgtattaacctgtaaaaacagggcattacttaccctgactatctcacaaggctgatatggggatcaactagaataacgtaaacacatacaagtttttgttatgtgcctagcatgatataaggcaacaggtatttaaggtaaaggaagaataatgctttatatgaaaataaaggaaagatgggctacttaagtcatggag

SEQ ID NO: 26710 - DNA, 1072 bp, Homo sapiens
tgggcatgttgtagttgtcgttactagcaagacacacctaccctttaagaccagtctaaatgccaccttgttccctccatgtaatctcagaacttctttaagggcaaggaccaaattacgtctgtgaaacctagagtttgatctaccacttcacgtggaggcatgggacagaggttttgttaatgagtgaatgtatccatttaataagttccttcttcagtacactcttgagacctattctggctttcccaggaaacagctgaaggagtgacctccratcaagtcagctctgtgtcaatccttcattttcggatgttttttcttccttttctcacagggtcataaggatcaaatgtaataatgatgtaagagttaagcgtattcaataaagggaggcagtggaatcatcacaatgttgatcatcacaatcaacattattattactgcaccactatagttccttgtaatacacagtccagaaatattatcacaaaatctcactgaggatgtcattgttctgggtttgacctagatgttgatgtaatgaacagttctctatcagttagtgtgttggcctagcacaggtgcttgacaaaggccctattcagacttctgtgcattacttcaaacccctccctttgctcccatagtatagtaatgaattaggagtcatatcttttgactggcaagggactgcctaaagcagatccctgcagattggggcctcactgtttctgtgggtataaagaacctctcgggagagcctgaatgatcaggagatctgaactggggagccatcggcccagcaggaggtgcctctgcttggccaaccagagcctgctgcaagaaaccttttttttttttttttttttggttctgacaggcttgttggggaaattgaaaatctcctgtttgaaagccagataatttaaaatcctttctgattcagaatctcagcaagtagtgaagggctaggttattgattgtgggaaatggggcagcctcaaagggctctgggctatctcagtaccccatctccctcacccctcacgcttcctcaggtttctctctc

SEQ ID NO: 26711 - DNA, 615 bp, Homo sapiens
tcccgtgcccaaacaccactcatattcctggagatattgctgctgtttctgtttccagatcgctttgttcctacttttattatagtatttattctattayagttcattgttatgcatttggatctaccactatattcaaactctttggtaagtaccatgttcaggagattctagttcagaatattgtatatactttttctgaaaggttaggacttctgtttcaaaagtagttatcttctggcaaaagtcagaagactctagacagatctgaaattcagattaagttgacaattaggacaaaaaagacaaaactcatggctacacaaaccagtcagtaatactcaagtttctggacaagtttctaccaagcccattcaaagtatgcaatatggtgaaaaactatcagaatggaagtcaggagacctgggttctcattctttctctgctattagttagctaagtagattttcaaagatggaaacttaatctttcttggccataacgatcctatcaataaaaagtgaggttctattatctgctaaattattgcaaagatctccgtagctctgaaattttaggcactgtatctttgtaggttgctgcatggtctctaag

SEQ ID NO: 26712 - DNA, 1207 bp, Homo sapiens
gaaaccctcaggattttctcagagattaatgacttttcttttatattccatacagtcctgacaagatacttattagacccacagcatatttagaaaaataagttacacatgggtacatggagattctgggaaactggtaacagaaaatgccctgatttttacaagaagcaatatctcagartaaggaagggaagagacacagaaaatattagaacataatagcttagaatcaattgtgcaagagcagtgctgtatttccagttaatggtgaggacaattattgcattacagtacaatcatcaagattgagcacaactgtcccaagtcattaaataaatgctcagcatattctgcttaagaatgtaagtgaaaataaagaaatgtaagaaccttgttgaaagactcttagacgtgattaaaataaatattcatgctcaaagatgtaagaacgcatcacatgaagtgtccacctatgtacagtacctcattactaatgctgttggcaggacattgtaaggcccattgtagatgttcaattaacatttggtggctaatttcatgaatgaataatacattaaatgaatatcatttgttgtagatatactgctaataaggtcagcaagttatatgtttatttagattgtacataagagaaatatttagaaattattcacaggcaggtttggaagaataaaatgagatattaaaatactcagaaaagcaatttagaaagtccatttttatttttaattaattattattttcttttttttttttttttggctcagaaggtagaaagtccatttttaaaaagcctacttaatgaagtaaaaaccatgtctgctcactgaggtttttggtgttagatgtaatagagctagagcaataacctcattgggctataaaatgaaagtcccataccagagattgtattctaattcccttaaaagtttttcaagtgacctaacccattcatctcactcaggctgtgtgtgtgtgtataaaacagtttgaaatatcctcagcacagctctcttgaaggcagtctagcttcgggagtaagcgtactagtgaaaaagcttaaattgcaagaacagaaaattcagagaactttatactattacagacccatatggtggtttgacagatcaaactaacctccaaagggaaatttctatttgaatagtaagtagatgatttcagacat

SEQ ID NO: 26713 - DNA, 1675 bp, Homo sapiens
tgcatcatatagcattaattatcatatataatacctaccctgagaattaaataatgaaattgtaagctaaataagtagtcaactggctcattttgtggaatggggaatctctcaattatgagtatatatatatatatwttttttctgagacagggtctcgctctgttgtccaggctagagtgcaaaggcacattcacagctcactgcagtctcaacctcctgggctcaagggatcctctgacctcagcctctgaggacctgggactacaggcacacactaccacacccagctatataattttttctcgggaggagttcattattttctcagttaactttcctatttgaaatctcccatctccctgaacagagagatgctgttctctgcctggcatatccaatccagagcctcactgatgcagtttcccccacagcatatactttatgtctttcacggggttcagggtagaggcacatatggagacagagggctgagggtctaacccttccttacagacactttcaatgtacccatccacccctccttccacagtaactgtgctaattactccaatgcaaatggctttccagaattctgcagggtgaatgatatttgattgctttccattgctatccccttggcagatccttgagtttcaccttttctgttctgagtcattttactacttttcaatgttctgtgacatggagttacagatgtcttctagttttgacacgtgtaaatcagtttttctatttcttcatatccttatttttgtaatgagatttttgagaagggcagaaatacctttactctgccattctgaaagggaagtctacatgctgtttcttcaagttcataaagttctctttttcaagttccattgaaaggatttagtagtttgttccttctgcttaacatttatattattgttagtctttaggccacatgtactcacttacactgccatgcattttaaatgacttcatctaattttttcatgtgtaggaaagattcatcaaaatgatgtgtttcttactataagccacaacatgtaggcttaggagcttgcagttttagccaccgtatatgccatattcatttaaataataaaattataggttttcttaggaatttattgactcttgaacaataaaatacaaagcaatgccctgatgattttaaatcaaaattttatgcattgcataaaatcctcttcataaacacactccaataatatctgtagtattaaaactttatttcctttttttgttccataatttttctcattttgaagtgatcttctgaaccaaggttaagtaagtatgtaaaactcattttgtgctcaaaataagtaaatgatctcttaccctactgtaaaacgcagcatgttaagtaaatagttttgcttaaaattttcaatcaaccaggcgactacatgaaaccattcttttccttgcatgtgtttacatactatttttgacaattatatgatggttttggatgtatattcaaacggctatgtttttgtgagtgaattttgaaaaactccttgactccttcttttctcagtgcagttatttttattctcccctcccttgccatcccccgctgcccccatctcccttaaccaatctttatacttcctcactatttatttcacttgtggcttat

SEQ ID NO: 26714 - DNA, 584 bp, Homo sapiens
tgcctatatgtcatcattaaagtacacaccattttatatcttgaaatttttccatktaatattataagcctttgtataaccactgtggcatgttgggtgaaaattccatactctataaaaccataattttattgacagtaagttggttttcctttactttttttttttgagacagagtcttgcactgttgcactggagtgcagtggcatgatctcggctcacggcaacctctgcctcccaggttcaagcaattctcctgcttcagcctcccgagtagctgagattacaggctctcaccaccacacccggctaatttttttaatttttagtaaagacggggttttaccatgttagccaggatggtctcgatctcctgaccttgtgatccacccgcctcggcctcccaaagtgctgggattacgggcgtgagccaccgcgcctggccaatttttgtatttttagtagagacggggttttaccacgttggccaggctggtctcgaactcctgacctcaaatgatccacctgcctcggcctcccagagtgctgggattatgggcgtgagctactgcgcctggccaaaa

SEQ ID NO: 26715 - DNA, 584 bp, Homo sapiens
tgcctatatgtcatcattaaagtacacaccattttatatcttgaaatttttccatttaatattataagcctttgtataaccactgtggcatgttgggtgaaaattccatactctayaaaaccataattttattgacagtaagttggttttcctttactttttttttttgagacagagtcttgcactgttgcactggagtgcagtggcatgatctcggctcacggcaacctctgcctcccaggttcaagcaattctcctgcttcagcctcccgagtagctgagattacaggctctcaccaccacacccggctaatttttttaatttttagtaaagacggggttttaccatgttagccaggatggtctcgatctcctgaccttgtgatccacccgcctcggcctcccaaagtgctgggattacgggcgtgagccaccgcgcctggccaatttttgtatttttagtagagacggggttttaccacgttggccaggctggtctcgaactcctgacctcaaatgatccacctgcctcggcctcccagagtgctgggattatgggcgtgagctactgcgcctggccaaaa

SEQ ID NO: 26716 - DNA, 584 bp, Homo sapiens
tgcctatatgtcatcattaaagtacacaccattttatatcttgaaatttttccatttaatattataagcctttgtataaccactgtggcatgttgggtgaaaattccatactctataaaaccataattttattgacagtaagttggttttcctttactttttttttttgagacagagtcttgcactgttgcactggagkgcagtggcatgatctcggctcacggcaacctctgcctcccaggttcaagcaattctcctgcttcagcctcccgagtagctgagattacaggctctcaccaccacacccggctaatttttttaatttttagtaaagacggggttttaccatgttagccaggatggtctcgatctcctgaccttgtgatccacccgcctcggcctcccaaagtgctgggattacgggcgtgagccaccgcgcctggccaatttttgtatttttagtagagacggggttttaccacgttggccaggctggtctcgaactcctgacctcaaatgatccacctgcctcggcctcccagagtgctgggattatgggcgtgagctactgcgcctggccaaaa

SEQ ID NO: 26717 - DNA, 584 bp, Homo sapiens
tgcctatatgtcatcattaaagtacacaccattttatatcttgaaatttttccatttaatattataagcctttgtataaccactgtggcatgttgggtgaaaattccatactctataaaaccataattttattgacagtaagttggttttcctttactttttttttttgagacagagtcttgcactgttgcactggagtgcagtggcatgatctcggctcacggcaacctctgcctcccaggttcaagcaattctcctgcttcagcctcccgagtagctgagattacaggctctcaccaccacacccggctawtttttttaatttttagtaaagacggggttttaccatgttagccaggatggtctcgatctcctgaccttgtgatccacccgcctcggcctcccaaagtgctgggattacgggcgtgagccaccgcgcctggccaatttttgtatttttagtagagacggggttttaccacgttggccaggctggtctcgaactcctgacctcaaatgatccacctgcctcggcctcccagagtgctgggattatgggcgtgagctactgcgcctggccaaaa

SEQ ID NO: 26718 - DNA, 1294 bp, Homo sapiens
atacagtttagcttgttttcccctttgacatcttagatgtagttttmgaaatgatttctgaaactgtttcctttggtgtgctgtgaaatccacatcaggagacagcagtaattctgataaaaggagaaagaaaatgccccaacttaccgtttctaatgcaattacacggtcctgcaaagaaagcataatatataattataaaacgaaggctgtttaaaattgtttcaagtttacttaatttacaagtattctatttaccatctattattaataattcattttaaaaatgtaaaaaatgagaactattcagaatgatctctagaacagaaaaatagtcatcaaagaatgaatgtatcttttttcatctcatttagtgctaggactacagagtttaagagtaaatgctacaattctagtacagttaatgaaaggaatagaacctaccatttttgtaatggtaagattatttataagatgtaaaatgttagatttgattatatgaatcacaactagacaagagtagtgatatagacaaggaattaagcacatattctagctcttaattaggtttacagcgaaaaatgtggtctccacaacaagctgaaattcagacatatcttcatcaattaaaataaatgagtaaatcattattgaaaacaaggcaggaaaataaatgagaaagatatggcacatgcagccaatcctgagcccagataggccttcattgtctacagcatcttagaatgtttatagaaggactggctttaaaaggggtcattgataacgatgcatcaaaagctaaatgattaagaaaatgtttgtattctcaactccatagttgtattctcaagtctttccagaggtgacatctataaacaggaagtcttcaccaaataaagactgactctgagacaaagcagagtgtgaagatctaagaaaatgaaaaaccatcctttttgaggtggaccaaggccatttgcctttgttttctcttattttaagaactggaggaggtcaggtgcaatgcctcacacctgtaatcccagcactttgggaggctcaggtggacagatcacatgaggccaggagttcgagaccagcctggccaacctggcaaaacactgtctctactaaaaattaaaaagtagccaggtgcggtgccgcgtgcctgtaatcccacctactcaggaggctgagacaggagaatcacttgaacccaggaatcagaggttgcagtgaactgagatcaagccactgcactccagcctgggcaacagagcaagactacacctca

SEQ ID NO: 26719 - DNA, 1294 bp, Homo sapiens
atacagtttagcttgttttcccctttgacatcttagatgtagttttcgaaatgatttctgaaactgtttcctttggtgtgctgtgaaatccacatcaggagacagcagtaattctgataaaaggagaaagaaaatgccccaacttaccgtttctaatgcaattacacggtcctgcaaagaaagcataatatataattataaaacgaaggctgtttaaaattgtttcaagtttacttaatttacaagtattctatttaccatctattattaataattcattttaaaaatgtaaaaaatgagaactattcagaatgatctctagaacagaaaaatagtcatcaaagaatgaatgtatcttttttcatctcatttagtgctaggactacagagtttaagagtaaatgctacaattctagtacagttaatgaaaggaatagaacctaccatttttgtaatggtaagattatttataagatgtaaaatgttagatttgattatatgaatcacaactagacaagagtagtgatatagacaaggaattaagcacatattctagctcttaattaggtttacagcgaaaaatgtggtctccacaacaagctgaaattcagacatatcttcatcaattaaaataaatgagtaaatcattattgaaaacaaggcaggaaaataaatgagaaagatatggcacatgcagccaatcctgagcccagataggccttcattgtctacagcatcttagaatgtttatagaaggactggctttaaaaggggtcattgataacgatgcatcaaaagctaaatgattaagaaaatgtttgtattctcaactccatagttgtattctcaagtctttccagaggtgacatctataaacaggaagtcttcaccaaataaagactgactctgagacaaagcagagtgtgaagatctaagaaaatgaaaaaccatcctttttgaggtggaccaaggccatttgcctttgttttctcttattttaagaactggaggaggtcaggtgcaatgcctcacacctgtaatcccagcactttgggaggctcaggtggacagatcacatgaggccaggagttcgagaccagcctggccaacctggcaaaacmctgtctctactaaaaattaaaaagtagccaggtgcggtgccgcgtgcctgtaatcccacctactcaggaggctgagacaggagaatcacttgaacccaggaatcagaggttgcagtgaactgagatcaagccactgcactccagcctgggcaacagagcaagactacacctca

SEQ ID NO: 26720 - DNA, 2451 bp, Homo sapiens
tgggcatatcaaagcacttgggtagtgctggttataccaagttacacagtaatattctcctctaagcctggagttggcaaacctttcctgtaaaggactagatagtaagtcttttaggctttgtggcttacgggatgttacaaatattcaagtcagccattgctgtgccaaagcaaccacaggcagtatataaacaaatgggtatcgctgtgccccaatgacattttacttatgaacactgaaatttgaatttcatgtcatttttacatgtcataaaatgttgtccttctgttgactcttttttcaacaatttagaaacgtaaacatcgttcttttaattcatgggccatacaaaaacaagtggtggcctggttttggcctgtgggctgcaatttgccaaccccttaaccaccgagcagcccttgttctaagctatgggaatggctgatccggtgaaatgaacaggcagggagagatcatgcgtttctgctactgtcctaattattgttctaattgccgggacttagataatggtagcaggtaattaacacacaacttactcttgttttctctactgatgatctagatagaaaagcatttttaatgtttataaatggtcattgtaatggcttcgtgaacacgcaaacccagcaaaaaggactgtcatgctgtgctggtgaggtgacttgcctgggctcagttgcgggagggtgaggcacggatagatgggggccttcagacctgggtgcatttcacctttgctaccaacctcctgcacaaaccagcatttgtttgatttatgccactctgattctctggcaacttatttgccattaactccaagtgagtcgactataagcatgttttacatactggaaaatatgaatcatttatagttttaacgttgcagtttcctaagagccctgtggtgcccagtcctataaatcagagcatggagaggctggcctcatcactcacctcatcaactctcttacactccagtgccagatttagaaagccattgcccacagaggtgtcatctgtttgggaccaggctgtctgagaaccactccctctagggatggccgttgactcttatgctgccgggtaatggttgtgaggtgaggctctactgggtttgattaggcctggtacacacttctcatggcctagggtgagaacactatacacagtctattgtgattttcatgaaggtccacagctgccttggggcccccacacagtagactctgttagtgtaatcctccatcgaagaatgcaggttgcaacattcagttatgctatgtgtatcgcctatgtgcacatacaccttaggtgataccattcagaaatttagggataataaatcaaatgttagtctcttaaaaacatgagccacattgcttcattccacccgtcagctgagttgctgctgtagatgtgtaacccaaataatgtgagacacagaacgtctttcatatattagaagctgaagttgcagtccttcctagaagtattagcctacattggagaaagaagggaaggatccctcatttgtggcttcttttgggaatatttagtcttctttcttactgaacctagaatgtaaagttagactagcccaaaaggaactcaatccataaatattcagaagtaccaaggcccagtgtccaagatcccatgcttgggaatatttaagagagttactgtgtttgctcttgtgggtagaggataaaacagtaatggggcagggcaggggaagagaagctatttgtcagatgcttgcttcacagccttcaaagtaacccatacctctggtagcttagcagataaataagagaggagctatggtgctccttgcatggctgtttttggatggcaagggtcataaaactctatttttttcctccaaatttgcttctttattattttgtattttcgctatacccaatatccacgccaaaactgcaaagtcatcctggactcttcacaacatctcttaggagtaggttgctctgggtcttgttaccttagcagcttcctcatccatttgcccctctccattcacactgcaagcccctcttacctttcctcttggaagattacagctgtggtctaggaggtctcccagcctcaaatttcctctcccatccaatcagctgagctgctgccatggagattttctacaayaaaaagcagaaactgtcaccttcctgtttagaacccttcattcgttcagaagtttaaaccctgtattttagaatacagaacacaattttagcatctgccttctactcacttcccccacagataccattcagcctatctgggctctcccggcagtttctcacatgttgtgcgtgagcatcacagggctccggggaccctagctgacaatgttccccccatgacacttgagtgtcctgcatttgctttcctagctcctcttct

SEQ ID NO: 26721 - DNA, 577 bp, Homo sapiens
aggggtgccctggcatgtagggctttctgtgctaaaactagaaaagttctaggcaaaccaagacaaattggtcaccttaagatcatttctttttattttttatttatttgatttatttatttttttaaattttaaatttttgtggatacatggtaggtgtatatattttgtatatatttatggggtacatgagatactttgacacagacatgcaacgcataataaccacatcagggtaaacagagtatccatcacctcaagcatttaccttttctttgtgttacaracaatccagttatacagttttagtttttttgaaatgtacaataaattattgttgcctgtagaaggtaatgcctttttaaagaaaaagtcttgaggtcactaaaaagcattaaaaataatcctggggagatgtgttggtgcatacttaaaaagccacacacattaaaaatatagaaaagaaagaaatagaaaattaaggggtgggtttcaagactcctgatgaaacttaggatatttatgcctcagaagagcaaaaatccccaagtgaacaagttagctttttcagacttca

SEQ ID NO: 26722 - DNA, 577 bp, Homo sapiens
aggggtgccctggcatgtagggctttctgtgctaaaactagaaaagttctaggcaaaccaagacaaattggtcaccttaagatcatttctttttattttttatttatttgatttatttatttttttaaattttaaatttttgtggatacatggtaggtgtatatattttgtatatatttatggggtacatgagatactttgacacagacatgcaacgcataataaccacatcagggtaaacagagtatccatcacctcaagcatttaccttttctttgtgttacaaacaatccagttatacagttttagtttttttgaaatgtacaataaattattgttgcctgtagaaggtaatgcctttttaaagaaaaagtcttgaggtcactaaaaagcattaaaawtaatcctggggagatgtgttggtgcatacttaaaaagccacacacattaaaaatatagaaaagaaagaaatagaaaattaaggggtgggtttcaagactcctgatgaaacttaggatatttatgcctcagaagagcaaaaatccccaagtgaacaagttagctttttcagacttca

SEQ ID NO: 26723 - DNA, 947 bp, Homo sapiens
ccagcccagatgcccatcaatcaatgaatggataaagaaactgggatatatatatatgaatactacttagccataaaaagaaatgaattaatgacatggcattcgcagcaacatggatggggctggagaccattattctaagtgaagtaactcaagaatggaaaaccaaacatcacatgttctcataagaaggagctaagctaagaggatacaaaggcatcagaatgatacaatggactttggggactcaaggggaaagggtaggaagggggygagggataaaagactacaaattgggttcagcgtgtactgcttgggtgatgcgtacaccaaaatctcacaaatcactactcaaagaacttactcatgtaaccaaataccacctgttccccaaaaacctctggaattaaaaaaaaatgaaatgacaaaaccaacattaaagaaaaaaatctcaccttgaattgtaataatcccaacgtgtcaagggcaggtccaggtggagataattgaatcgtgggggtgatttctcccacactgttctcatgatagtgaataagtctcatgagatctgatggttttataaaaaggagttcccctgcacatgcagtcttgcctgccaccatgtaaaacgtgactctgcctctcctttgccttccaccgtgatagtgaggcctccccagccatgtggaactgtgagttcattaaaactctttcctttataaattacccagtctcaggtatgtctttattagcagtgtgagaacagactaacacaatcctacaaggcagagaaggccagagaggagccagatacatgtagagacagatcccaagggcatactggccctataacaacctgctttcatgggaactaatctattcctaccacaactaatcaacctcaccagaactcactaccaagagagcagcaccgagccattcatgag

SEQ ID NO: 26724 - DNA, 947 bp, Homo sapiens
ccagcccagatgcccatcaatcaatgaatggataaagaaactgggatatatatatatgaatactacttagccataaaaagaaatgaattaatgacatggcattcgcagcaacatggatggggctggagaccattattctaagtgaagtaactcaagaatggaaaaccaaacatcacatgttctcataagaaggagctaagctaagaggatacaaaggcatcagaatgatacaatggactttggggactcaaggggaaagggtaggaagggggcgagggataaaagactacaaattgggttcagcgtgtactgcttgggtgatgcgtacaccaaaatctcacaaatcactactcaaagaacttactcatgtaaccaaataccacctgttccccaaaaacctctggaattaaaaaaaaatgaaatgacaaaaccaacattaaagaaaaaaatctcaccttgaattgtaataatcccaacgtgtcaagggcaggtccaggtggagataattgaatcgtgggggtgatttctcccacactgttctcatgatagtgaataagtctcatgagatctgatggttttataaaaaggagttcccctgcacatgcagtcttgcctgccaccatgtaaaacgtgactctgcctctcctttgccttccaccgtgatagtgaggcctccccagccatgtggaactgtgagttcattaaamctctttcctttataaattacccagtctcaggtatgtctttattagcagtgtgagaacagactaacacaatcctacaaggcagagaaggccagagaggagccagatacatgtagagacagatcccaagggcatactggccctataacaacctgctttcatgggaactaatctattcctaccacaactaatcaacctcaccagaactcactaccaagagagcagcaccgagccattcatgag

SEQ ID NO: 26725 - DNA, 947 bp, Homo sapiens
ccagcccagatgcccatcaatcaatgaatggataaagaaactgggatatatatatatgaatactacttagccataaaaagaaatgaattaatgacatggcattcgcagcaacatggatggggctggagaccattattctaagtgaagtaactcaagaatggaaaaccaaacatcacatgttctcataagaaggagctaagctaagaggatacaaaggcatcagaatgatacaatggactttggggactcaaggggaaagggtaggaagggggcgagggataaaagactacaaattgggttcagcgtgtactgcttgggtgatgcgtacaccaaaatctcacaaatcactactcaaagaacttactcatgtaaccaaataccacctgttccccaaaaacctctggaattaaaaaaaaatgaaatgacaaaaccaacattaaagaaaaaaatctcaccttgaattgtaataatcccaacgtgtcaagggcaggtccaggtggagataattgaatcgtgggggtgatttctcccacactgttctcatgatagtgaataagtctcatgagatctgatggttttataaaaaggagttcccctgcacatgcagtcttgcctgccaccatgtaaaacgtgactctgcctctcctttgccttccaccgtgatagtgaggcctccccagccatgtggaactgtgagttcattaaaactctttcctttataaattacccagtctcaggtatgtctttattagcagtgtgagaacagactaacacaatcctacaaggcagagaaggccagagaggagccagatacatgyagagacagatcccaagggcatactggccctataacaacctgctttcatgggaactaatctattcctaccacaactaatcaacctcaccagaactcactaccaagagagcagcaccgagccattcatgag

SEQ ID NO: 26726 - DNA, 947 bp, Homo sapiens
ccagcccagatgcccatcaatcaatgaatggataaagaaactgggatatatatatatgaatactacttagccataaaaagaaatgaattaatgacatggcattcgcagcaacatggatggggctggagaccattattctaagtgaagtaactcaagaatggaaaaccaaacatcacatgttctcataagaaggagctaagctaagaggatacaaaggcatcagaatgatacaatggactttggggactcaaggggaaagggtaggaagggggcgagggataaaagactacaaattgggttcagcgtgtactgcttgggtgatgcgtacaccaaaatctcacaaatcactactcaaagaacttactcatgtaaccaaataccacctgttccccaaaaacctctggaattaaaaaaaaatgaaatgacaaaaccaacattaaagaaaaaaatctcaccttgaattgtaataatcccaacgtgtcaagggcaggtccaggtggagataattgaatcgtgggggtgatttctcccacactgttctcatgatagtgaataagtctcatgagatctgatggttttataaaaaggagttcccctgcacatgcagtcttgcctgccaccatgtaaaacgtgactctgcctctcctttgccttccaccgtgatagtgaggcctccccagccatgtggaactgtgagttcattaaaactctttcctttataaattacccagtctcaggtatgtctttattagcagtgtgagaacagactaacacaatcctacaaggcagagaaggccagagaggagccagatacatgtagagacwgatcccaagggcatactggccctataacaacctgctttcatgggaactaatctattcctaccacaactaatcaacctcaccagaactcactaccaagagagcagcaccgagccattcatgag

SEQ ID NO: 26727 - DNA, 947 bp, Homo sapiens
ccagcccagatgcccatcaatcaatgaatggataaagaaactgggatatatatatatgaatactacttagccataaaaagaaatgaattaatgacatggcattcgcagcaacatggatggggctggagaccattattctaagtgaagtaactcaagaatggaaaaccaaacatcacatgttctcataagaaggagctaagctaagaggatacaaaggcatcagaatgatacaatggactttggggactcaaggggaaagggtaggaagggggcgagggataaaagactacaaattgggttcagcgtgtactgcttgggtgatgcgtacaccaaaatctcacaaatcactactcaaagaacttactcatgtaaccaaataccacctgttccccaaaaacctctggaattaaaaaaaaatgaaatgacaaaaccaacattaaagaaaaaaatctcaccttgaattgtaataatcccaacgtgtcaagggcaggtccaggtggagataattgaatcgtgggggtgatttctcccacactgttctcatgatagtgaataagtctcatgagatctgatggttttataaaaaggagttcccctgcacatgcagtcttgcctgccaccatgtaaaacgtgactctgcctctcctttgccttccaccgtgatagtgaggcctccccagccatgtggaactgtgagttcattaaaactctttcctttataaattacccagtctcaggtatgtctttattagcagtgtgagaacagactaacacaatcctacaaggcagagaaggccagagaggagccagatacatgtagagacagatcccaagggcatactggccctataacaacctgctttcatgggaactaatctattcctaccacaactaatcaacctcaccagaactcactaccaagagagyagcaccgagccattcatgag

SEQ ID NO: 26728 - DNA, 1157 bp, Homo sapiens
tcccccaagatgagaagagctggctacgcctggtttatggatagttttataaattgtcacacacacacacccttcccgcgccattctatttccattctgcggaaatcctgggtggaagggagctttattcccttaaactctgttttaaaaatactgaccagaaaaccatcgatcctctttctgccaccgtaaatgagtttgtgttttctagmacttcacgcacctggcctcgtgcagcgagagctcctctgggcctggctcctgtcactcagcacgatgattgtgagtttccttcctgcgctgcataggtgaggagctcgtctctgctcactactgagcaccgttcaccgtgtggacacacagagctgtgcatattccttcacctgttgggagacatgtgggttgctcccttttggagatactatgaatgtggctgtcatgaacattcatgcccaagacaacaaaaacaccgacaactccagcgaggtcaagcgctgcacttccacagacatccccaccgctcctctggtgcgtccttccaccactgccctggagctgttccaaggctcctcagcctccctgccaactgactgactgccggacacgttcaacccagagatcttacagttcaaaatgccgcgttgtggccacttgttgacgggcgccttccaccagacggggaaacagctttactgtgcagcaggtcctccctgggaaacggggagtgagatgaggctgcaggtgaatgggctgaaacctcccccagcccctcccggcctcacctagccgtgtcctgctgcaggaggtgcctgcggagttgcttcaccgggtctggatgagttaaccttgatgcccttcctccggcagagagggacttctgtgcacaacacgccaaccagaggagcccgtctcatcagaaaggcgggctctccagcacagctagagcaggtgggacaatgagtgaggcaagaggggctcaggcagcccagctgacggattaactgtgagtgcgtggggtgggagcggccagagagcggaggtgggaagcgaggcttgaggaagaggggcagccggcagcaggggctgatgtctctgagaagagaagcccatccgtgaaaggccgaaacttcaaatattcaacttgcatacctggggat

SEQ ID NO: 26729 - DNA, 526 bp, Homo sapiens
ataaattttgtatccctgaaatatagaatatatgaaaaaataactagagataaggccagggaaataggcaaggatcaaaatcctgtgaaactggataaggagtaggaaaaggagcatatgagccttgctaagggggttgtactttatgctgaattaatgcagggccattccaagattttaagcagaacagtagtataattacatttgcttttatcaaggtcattctggttgtagtacgttggaagrgaacatgaatgaaagcagacaggtgattaaagaaattaattactgcagctttccagtgagaagatatttgtaagagctaatgtggcagtgatgataatgatgatgattatggtgatgatcatgactgcaatgatgcttacattgacaatggtggtggtggtgacaatggtgctgtctttaggtactatcaggcttatttgcctccaagtctctatagctgcactgtagaatcctgtagccagtagccacatgtggcttctgtgaaactgtgttcaactta

SEQ ID NO: 26730 - DNA, 955 bp, Homo sapiens
acaactcaggacacaggctttctgcaaacccacccagatttgtgcctattctagtaggtgggctggggcaatagagatagaaccccacatgtttagaagaggtgtcagactttggatgttactttttatataccacctctttaacatcttttttttttttttttttgagacaatcttgctctgttgctcagactggagtacagtggcacgatctcgctttacttcaacctcygcctcccgggttcaagagattctcctgcctcagcctcctgagtagctgggactacaggcatccaccaccatgcccagctaatttttgtatttttagtagagatggggtttcaccatgttggccaggctggtactgaactcctgacctcaggtgatctgcccacctcagcctctccaagtgttgggattgcaggcgtgagccaccgtgcccggcccaacatgtttacatgagttaaaaagacagatgttttgtcattctcattaaactattatcaggttgaattaatgagttctcctcttgaaagataaccaaggaagcaagaggatgggatttccatgagggaatgaggcagaggatgctgaagacttgacagggagcagataagggatggatttggtatgtgggaagctgcttggtgagagcagacaatttagggagaagggagatcatgccacagctttgcttaatgtttgtcaatggcaactgcaagcttcctggagcttaccctagccagggcttccagctgaatcatgtgatgccctgtcccatgcacctgcctcattctaaactacttctccaaacacaccacctcctcctacctcagggcctttgtccatgctattccatctgtctagagtaccaatccacagcttgtttgcctgcataattcattgattttttcaggattaaacttaacttctgcctccagtgaggaaccttctt

SEQ ID NO: 26731 - DNA, 955 bp, Homo sapiens
acaactcaggacacaggctttctgcaaacccacccagatttgtgcctattctagtaggtgggctggggcaatagagatagaaccccacatgtttagaagaggtgtcagactttggatgttactttttatataccacctctttaacatcttttttttttttttttttgagacaatcttgctctgttgctcagactggagtacagtggcacgatctcgctttacttcaacctctgcctcccgggttcaagagattctcctgcctcagcctcctgagtagctgggactacaggcatccaccaccatgcccagctaatttttgtatttttagtagagatggggtttcaccatgttggccaggctggtactgaactcctgacctcaggtgatctgcccacctcagcctctccaagtgttgggattgcaggcgtgagccaccgtgcccggcccaacatgtttacatgagttaaaaagacagatgttttgtcattctcattaaactattatcaggttgaattaatgagttctcctcttgaaagataaccaaggaagcaagaggatgggatttccatgagggaatgaggcagaggatgctgaagacttgacagggagcagataagggatggatttggtatgtgggaagctgcttggtgagagcagacaatttagggagaagggagatcatgccacagctttgcttaatgtttgtcaatggcaactgcaagcttcctggagcttaccctagccagggcttccagctgaatcatgtgatgccctgtcccatgcacctgcctcattctaaactrcttctccaaacacaccacctcctcctacctcagggcctttgtccatgctattccatctgtctagagtaccaatccacagcttgtttgcctgcataattcattgattttttcaggattaaacttaacttctgcctccagtgaggaaccttctt

SEQ ID NO: 26732 - DNA, 1198 bp, Homo sapiens
ctctcagtatccattgctcaccacagtccaggcagtgagtggatggcaagggagggtttcagaaaaacgtttgcgatggggtagagaatgaaaccgagctgtcgtcttcaggcccaaggggtgagagaagtgcaagaaataagcagcgcacacagaggacactctgagggtctcccattgggttggagtgagtgacggggatatccaggaccaytgcgttggaagagggtactgtgcacatgggcacattgcaaaaactctgctcacagtgggcatggtgctgcctgcaatgctgctctcttgcataaggcaaagaccgagaaggccgttctagtgacttagagctctatcttgccccaggaatttggtccttccaatgctggggatgtgcctgtgaccctttcctcagccagtccactcaaaaccacatgctaccagtcacctatggccctaggcaacagaacacatgaaatgtcagctttttaggttcccaagctctcattattcctccttcaacccctgctccttcacttctggcctttcaggtgaccgcattccctggagcccaggacatttatgccatctccatatttctcccttatcccggccatttctaaggagagggctctcatcaataaattcaccatgagatataaaagactaataaattttaataacttgcctctcccaggaggatttgcattttaacaggggaatagcagcctaagctataggaattaggctgtaatggtacaatttcaggcaccatcaagcagctgaaagaggcattttttggcaggcaggaggacctccccaggacttctggggcagccctgctggaggctgcctcctccaaggtcagcgagctggtcaaaagggagacagagcaagcacacctgtgccctgggcccatcctaccacttcattctcagcccagtcccataggctcaccttcccagggtggtgtgctccttccatccccttattctctcatttaccttttgtttcagtctgcaaatattgaccaggccctactatgcgactggagactgcctacgtgcattgaaagttccagagacccagcaataacttagggattgatatagcttgactgtttgtccccctcatatctcatgttgaattgtaatccccagtgttggaaggggggcctagtgggaggtgattggatcatgggggt

SEQ ID NO: 26733 - DNA, 1198 bp, Homo sapiens
ctctcagtatccattgctcaccacagtccaggcagtgagtggatggcaagggagggtttcagaaaaacgtttgcgatggggtagagaatgaaaccgagctgtcgtcttcaggcccaaggggtgagagaagtgcaagaaataagcagcgcacacagaggacactctgagggtctcccattgggttggagtgagtgacggggatatccaggaccattgcgttggaagagggtactgtgcacatgggcacattgcaaaaactctgctcacagtgggcatggtgctgcctgcaatgctgctctcttgcataaggcaaagaccgagaaggccgttctagtgacttagagctctatcttgccccaggaatttggtccttccaatgctggggatgtgcctgtgaccctttcctcagccagtccactcaaaaccacatgctaccagtcacctatggccctaggcaayagaacacatgaaatgtcagctttttaggttcccaagctctcattattcctccttcaacccctgctccttcacttctggcctttcaggtgaccgcattccctggagcccaggacatttatgccatctccatatttctcccttatcccggccatttctaaggagagggctctcatcaataaattcaccatgagatataaaagactaataaattttaataacttgcctctcccaggaggatttgcattttaacaggggaatagcagcctaagctataggaattaggctgtaatggtacaatttcaggcaccatcaagcagctgaaagaggcattttttggcaggcaggaggacctccccaggacttctggggcagccctgctggaggctgcctcctccaaggtcagcgagctggtcaaaagggagacagagcaagcacacctgtgccctgggcccatcctaccacttcattctcagcccagtcccataggctcaccttcccagggtggtgtgctccttccatccccttattctctcatttaccttttgtttcagtctgcaaatattgaccaggccctactatgcgactggagactgcctacgtgcattgaaagttccagagacccagcaataacttagggattgatatagcttgactgtttgtccccctcatatctcatgttgaattgtaatccccagtgttggaaggggggcctagtgggaggtgattggatcatgggggt

SEQ ID NO: 26734 - DNA, 1198 bp, Homo sapiens
ctctcagtatccattgctcaccacagtccaggcagtgagtggatggcaagggagggtttcagaaaaacgtttgcgatggggtagagaatgaaaccgagctgtcgtcttcaggcccaaggggtgagagaagtgcaagaaataagcagcgcacacagaggacactctgagggtctcccattgggttggagtgagtgacggggatatccaggaccattgcgttggaagagggtactgtgcacatgggcacattgcaaaaactctgctcacagtgggcatggtgctgcctgcaatgctgctctcttgcataaggcaaagaccgagaaggccgttctagtgacttagagctctatcttgccccaggaatttggtccttccaatgctggggatgtgcctgtgaccctttcctcagccagtccactcaaaaccacatgctaccagtcacctatggccctaggcaacagaacacatgaaatgtcagctttttaggttcccaagctctcattattcctccttcaacccctgctccttcacttctggcctttcaggtgaccgcattccctggagcccaggacatttatgccatctccatatttctcccttatcccggccatttctaaggagagggctctcatcaataaattcaccatgagatataaaagactaataaaktttaataacttgcctctcccaggaggatttgcattttaacaggggaatagcagcctaagctataggaattaggctgtaatggtacaatttcaggcaccatcaagcagctgaaagaggcattttttggcaggcaggaggacctccccaggacttctggggcagccctgctggaggctgcctcctccaaggtcagcgagctggtcaaaagggagacagagcaagcacacctgtgccctgggcccatcctaccacttcattctcagcccagtcccataggctcaccttcccagggtggtgtgctccttccatccccttattctctcatttaccttttgtttcagtctgcaaatattgaccaggccctactatgcgactggagactgcctacgtgcattgaaagttccagagacccagcaataacttagggattgatatagcttgactgtttgtccccctcatatctcatgttgaattgtaatccccagtgttggaaggggggcctagtgggaggtgattggatcatgggggt

SEQ ID NO: 26735 - DNA, 1198 bp, Homo sapiens
ctctcagtatccattgctcaccacagtccaggcagtgagtggatggcaagggagggtttcagaaaaacgtttgcgatggggtagagaatgaaaccgagctgtcgtcttcaggcccaaggggtgagagaagtgcaagaaataagcagcgcacacagaggacactctgagggtctcccattgggttggagtgagtgacggggatatccaggaccattgcgttggaagagggtactgtgcacatgggcacattgcaaaaactctgctcacagtgggcatggtgctgcctgcaatgctgctctcttgcataaggcaaagaccgagaaggccgttctagtgacttagagctctatcttgccccaggaatttggtccttccaatgctggggatgtgcctgtgaccctttcctcagccagtccactcaaaaccacatgctaccagtcacctatggccctaggcaacagaacacatgaaatgtcagctttttaggttcccaagctctcattattcctccttcaacccctgctccttcacttctggcctttcaggtgaccgcattccctggagcccaggacatttatgccatctccatatttctcccttatcccggccatttctaaggagagggctctcatcaataaattcaccatgagatataaaagactaataaattttaataacttgcctctcccaggaggatttgcattttaacaggggaatagcagcctaagctataggaattaggctgtaatggtacaatttcaggcaccatcaagcagctgaaagaggcattttttggcaggcaggaggacctccccaggacttctggggcagccctgctggaggctgcctcctccaaggtcagcgagctggtcaaaagggagacagagcaagcacacctgtgccctgggcccatcctaccacttcattctcagcccagtcccataggctcaccttcccagggtggtgtgctccttccatccccttattctctcatttaccttttgtttcagtctgcaaatattgaccaggccctactatgcgactggagactgcctacgtgcattgaaagttccagagacccagcaataacttagggattgatatagcttgactgtttgtccccctcmtatctcatgttgaattgtaatccccagtgttggaaggggggcctagtgggaggtgattggatcatgggggt

SEQ ID NO: 26736 - DNA, 707 bp, Homo sapiens
gaaccttctccagataaggccccttctaaaacacaaatcgaagccctggatttattcagaagaccctccatggtctagcaccagccaacttcctgagccccacctctggtcactcacacatgccactgtagccctgctgaatgctctctctcctcaatgccctcacaaatgccattcccctgcctggaacacttattcccctgcctttctcctggctagtccctgctcagtttcagcctcagctgaaaagtcacttcctcctgaaagttctcctggaccctactcacacaagcatgcacacacacacacacacacrcgcgcgcgcacacacacacacacacacacacacacccttttaaaggtgctctgctctgaggtcccttcccctgagccacagttcccttccccactggctgctgagctgtggaagggcagaaatgagatccttcaggctcacccttgtacctctcacctctaacacaggcccgacacaaagtaggcattaatagacaggtatttattaaaggaatgaacattgccataaagagtttagcgcaactccaggcacttgactggcatatgataaattcatatctactgagagacagcacagtgcagtgcttaagtgcccctcgcaggagcaatcctgcctgggtttgaactccacctgagcctctattagctgtatgaccctgggtaggtcactt

SEQ ID NO: 26737 - DNA, 707 bp, Homo sapiens
gaaccttctccagataaggccccttctaaaacacaaatcgaagccctggatttattcagaagaccctccatggtctagcaccagccaacttcctgagccccacctctggtcactcacacatgccactgtagccctgctgaatgctctctctcctcaatgccctcacaaatgccattcccctgcctggaacacttattcccctgcctttctcctggctagtccctgctcagtttcagcctcagctgaaaagtcacttcctcctgaaagttctcctggaccctactcacacaagcatgcacacacacacacacacacgcgcrcgcgcacacacacacacacacacacacacacccttttaaaggtgctctgctctgaggtcccttcccctgagccacagttcccttccccactggctgctgagctgtggaagggcagaaatgagatccttcaggctcacccttgtacctctcacctctaacacaggcccgacacaaagtaggcattaatagacaggtatttattaaaggaatgaacattgccataaagagtttagcgcaactccaggcacttgactggcatatgataaattcatatctactgagagacagcacagtgcagtgcttaagtgcccctcgcaggagcaatcctgcctgggtttgaactccacctgagcctctattagctgtatgaccctgggtaggtcactt

SEQ ID NO: 26738 - DNA, 707 bp, Homo sapiens
gaaccttctccagataaggccccttctaaaacacaaatcgaagccctggatttattcagaagaccctccatggtctagcaccagccaacttcctgagccccacctctggtcactcacacatgccactgtagccctgctgaatgctctctctcctcaatgccctcacaaatgccattcccctgcctggaacacttattcccctgcctttctcctggctagtccctgctcagtttcagcctcagctgaaaagtcacttcctcctgaaagttctcctggaccctactcacacaagcatgcacacacacacacacacacgcgcgcrcgcacacacacacacacacacacacacacccttttaaaggtgctctgctctgaggtcccttcccctgagccacagttcccttccccactggctgctgagctgtggaagggcagaaatgagatccttcaggctcacccttgtacctctcacctctaacacaggcccgacacaaagtaggcattaatagacaggtatttattaaaggaatgaacattgccataaagagtttagcgcaactccaggcacttgactggcatatgataaattcatatctactgagagacagcacagtgcagtgcttaagtgcccctcgcaggagcaatcctgcctgggtttgaactccacctgagcctctattagctgtatgaccctgggtaggtcactt

SEQ ID NO: 26739 - DNA, 707 bp, Homo sapiens
gaaccttctccagataaggccccttctaaaacacaaatcgaagccctggatttattcagaagaccctccatggtctagcaccagccaacttcctgagccccacctctggtcactcacacatgccactgtagccctgctgaatgctctctctcctcaatgccctcacaaatgccattcccctgcctggaacacttattcccctgcctttctcctggctagtccctgctcagtttcagcctcagctgaaaagtcacttcctcctgaaagttctcctggaccctactcacacaagcatgcacacacacacacacacacgcgcgcgcrcacacacacacacacacacacacacacccttttaaaggtgctctgctctgaggtcccttcccctgagccacagttcccttccccactggctgctgagctgtggaagggcagaaatgagatccttcaggctcacccttgtacctctcacctctaacacaggcccgacacaaagtaggcattaatagacaggtatttattaaaggaatgaacattgccataaagagtttagcgcaactccaggcacttgactggcatatgataaattcatatctactgagagacagcacagtgcagtgcttaagtgcccctcgcaggagcaatcctgcctgggtttgaactccacctgagcctctattagctgtatgaccctgggtaggtcactt

SEQ ID NO: 26740 - DNA, 707 bp, Homo sapiens
gaaccttctccagataaggccccttctaaaacacaaatcgaagccctggatttattcagaagaccctccatggtctagcaccagccaacttcctgagccccacctctggtcactcacacatgccactgtagccctgctgaatgctctctctcctcaatgccctcacaaatgccattcccctgcctggaacacttattcccctgcctttctcctggctagtccctgctcagtttcagcctcagctgaaaagtcacttcctcctgaaagttctcctggaccctactcacacaagcatgcacacacacacacacacacgcgcgcgcgcacacacacacacacacacacacacacccttttaaaggtgctctgctctgaggtcccttcccctgagccacagttcccttccccactggctgctgagctgtggaagggcagaaatgagatccttcaggctcacccttgtacctctcacctctaacacaggcccgacacaaagtaggcattaatagacaggtatttattaaaggaatgaacattgccataaagagtttagcrcaactccaggcacttgactggcatatgataaattcatatctactgagagacagcacagtgcagtgcttaagtgcccctcgcaggagcaatcctgcctgggtttgaactccacctgagcctctattagctgtatgaccctgggtaggtcactt

SEQ ID NO: 26741 - DNA, 801 bp, Homo sapiens
acaagaaatggtgcagttatctccacctgcccctaatgagaaggtggccgggccatctgctggaagctccatgacaggggaagagggaatcagggctccacagcaacacacacgcacgaaccaatsgggctgcaccaaagacacgggattcccctttcccgcaacactgcacagacaattataaattaagacgtttcccccacattttcaaaattaatcaatttcaaagacctcctggctgcctaagccaccagctctatctgactccctcacattcaccttcttctcagggtgggagtgaggacaggtcttggtcattcaccccccactcccagaaggaggcagtggtcactgctatcgtcactgcaccacaaggtcagggcataagcaagagatggagctgctgactggggcaaccatagtccccagaaaagcaacaaaaggacttcagggaaactgagtcccgttgcctctctttcctggggcagaaagaagggaactctttttttccatttttttcttttattgacaaggtctcactctgtcgcccagactggagttcagtggcatgatcacagctcactgcagcctcgacctcatcggctcaagccatcctcctatctcagcctcccaagtagatgggactactacaggcatgggcaccaccacaatatttttactgtggtagaatacacataacataaaatttatcatcttcatcatttttcagtgtacagtttaacaatattaagtccattcacattgtgcagctgtcaccaccatctatctccggaacgtttt

SEQ ID NO: 26742 - DNA, 801 bp, Homo sapiens
acaagaaatggtgcagttatctccacctgcccctaatgagaaggtggccgggccatctgctggaagctccatgacaggggaagagggaatcagggctccacagcaacacacacgcacgaaccaatggggctgcaccaaagacacgggattcccctttccygcaacactgcacagacaattataaattaagacgtttcccccacattttcaaaattaatcaatttcaaagacctcctggctgcctaagccaccagctctatctgactccctcacattcaccttcttctcagggtgggagtgaggacaggtcttggtcattcaccccccactcccagaaggaggcagtggtcactgctatcgtcactgcaccacaaggtcagggcataagcaagagatggagctgctgactggggcaaccatagtccccagaaaagcaacaaaaggacttcagggaaactgagtcccgttgcctctctttcctggggcagaaagaagggaactctttttttccatttttttcttttattgacaaggtctcactctgtcgcccagactggagttcagtggcatgatcacagctcactgcagcctcgacctcatcggctcaagccatcctcctatctcagcctcccaagtagatgggactactacaggcatgggcaccaccacaatatttttactgtggtagaatacacataacataaaatttatcatcttcatcatttttcagtgtacagtttaacaatattaagtccattcacattgtgcagctgtcaccaccatctatctccggaacgtttt

SEQ ID NO: 26743 - DNA, 1614 bp, Homo sapiens
agaatgttcttccttttttaaggctaaatagtattgcattgtgtggaatatctcattttgtgtatccactcatctgttgagggacccctgggttgcgtccactttttagcgactatgaatcatgctgctataaacatggttgtgcaaatgtccctttgagattctactttcagttttttcaggtctatacggaagaaacatttttgtaacttcaagtgaccccaccgcaagcctgagagaaggaggcaggacagtagttacggacgcagattttacagtcaaacagaactgattctacctcttactctgcatagaacaaaataactaacacctgttgggcacttagcatatgccaaatgttcttctaacctcttctacttatgttagtagcagaggttaatcctcacaacaattctagaagataggtactattattaatcttattttacagaggaagaaagtccataaaagttaaacagtttacctggattcgagtaagtggtagaaccaagatttgaattcagacagtctggttccagtgcccatatgatgataacaatcatgataatgataatgacagtaacaacaaatgaagagraggaggaggaaaacagacacttattagcacttaatccaaatcaggccctgttagagcatctaaatgaattaactcatttaaatctaactcctctctcaattaactcatttaaacctaaatactctcagttaagtgtattatttttccttgttttactcacaaggaaactgactctccaaatggctccataccatgtccaaagtcacatggcgaccaagaaaaggatccaagatctgaacccggatcctctgttagccaagtccccctttgttcacttcatcagccgtctctgcttgaatttctctgtatagagtgaggaaaggcttggaggcaaacagcattcatgctctccactcttctactgtatttttttggccagagcagacgttccagggacctctggcagagagacaataaagtgtgacatgtgggaaggaggaaggaggcagtagaagcaccacgcaggctggagatgaggaacagatttaggggcaaccacagaatgcaggaaaaggaaagaagagagggatttggggaagtgtctctctgaatcacaaatggatctacataaagtgctttcaaagtcaggagtaaagattagaatctttttaaaatgagcctggtgcagtggcagctcacacctgtaatcctaccactttaggaggccaaggtgggaagaccacttgaggccaggagttcaaggccaacctgggcaacataaggaaaccccatctctacaaaaaaattaaaagttacccgagcatagcggcgtgcacatagacccaggtactcagaaggctgaggtaggaagatcccttgagcccaggagttgaggctgccatgagtggtgatcatgccactgaactccagcctgggtgacagagtgagaccctgtttcaaaaacaataaaattatatcttttactttggactctattttctctaaatactacatggaggtaatactgggccacataggaccccaagttatatttgggttaaaccagttgaacaaga

SEQ ID NO: 26744 - DNA, 681 bp, Homo sapiens
gtgccctcagctcatgggaacacacccttactctggatgaccattcaccaaagaggtatgagacactctcccttgtcttcacccacagagcacctcctacccaggcctcatggcaacacgagaaaaagccatttcccaatggccgatactgtttatacatttgtcttctcycagtctcagctcccttagaggcagagagcaagtctagggaaaagactctggaaacttgtaaagacaggtggctatgaggctctgccttctcccttttgcagaatttagaaaagtacctcagcactcaccacagcagccatcttggccattgcaggtcataagcaaatgactccgaaggcaccaggcacacatccttccacaaaagcactctgctggctggggtgtcatggccaggctgctctgaacactgccaggtgccctgacacaatcttctatttctcctggggacaggcactccctgggctacccagagtgaccgcatgcttcccacaacaattttacattaaggagcttatttatgaggaccttagggagatatatatatgacttgcatatatatttagaaagagagatgggcagagacagaaagagacagagacaaagaaacagagaacgtaaatacatacacacatgcacacacataaacgacccctatctgtgtctatgaaa

SEQ ID NO: 26745 - DNA, 681 bp, Homo sapiens
gtgccctcagctcatgggaacacacccttactctggatgaccattcaccaaagaggtatgagacactctcccttgtcttcacccacagagcacctcctacccaggcctcatggcaacacgagaaaaagccatttcccaatggccgatactgtttatacatttgtcttctcccagtctcagctcccttagaggcagagagcaagkctagggaaaagactctggaaacttgtaaagacaggtggctatgaggctctgccttctcccttttgcagaatttagaaaagtacctcagcactcaccacagcagccatcttggccattgcaggtcataagcaaatgactccgaaggcaccaggcacacatccttccacaaaagcactctgctggctggggtgtcatggccaggctgctctgaacactgccaggtgccctgacacaatcttctatttctcctggggacaggcactccctgggctacccagagtgaccgcatgcttcccacaacaattttacattaaggagcttatttatgaggaccttagggagatatatatatgacttgcatatatatttagaaagagagatgggcagagacagaaagagacagagacaaagaaacagagaacgtaaatacatacacacatgcacacacataaacgacccctatctgtgtctatgaaa

SEQ ID NO: 26746 - DNA, 681 bp, Homo sapiens
gtgccctcagctcatgggaacacacccttactctggatgaccattcaccaaagaggtatgagacactctcccttgtcttcacccacagagcacctcctacccaggcctcatggcaacacgagaaaaagccatttcccaatggccgatactgtttatacatttgtcttctcccagtctcagctcccttagaggcagagagcaagtctagggaaaagactctggaaacttgtaaagacaggtggctatgaggctctgccttctcccttttgcagaatttagaaaagtacctcagcactcaccacagcagccatcttggccattgcaggtcataagcaaatgactccgaaggcaccaggcacacatccttccayaaaagcactctgctggctggggtgtcatggccaggctgctctgaacactgccaggtgccctgacacaatcttctatttctcctggggacaggcactccctgggctacccagagtgaccgcatgcttcccacaacaattttacattaaggagcttatttatgaggaccttagggagatatatatatgacttgcatatatatttagaaagagagatgggcagagacagaaagagacagagacaaagaaacagagaacgtaaatacatacacacatgcacacacataaacgacccctatctgtgtctatgaaa

SEQ ID NO: 26747 - DNA, 954 bp, Homo sapiens
tttgcacttgcggttccctttgctgggaatgttctcttcctgtcgctcccttgtctggtgagctcttctcatgcttcaggtctcagccccagtgtctccttcctggggaagccttttctgactttgctgaccagggatttttgccctacaggctcccaaagcactgggttgctctcctcgccagttctcacggaagatgaacacattttgcccttgttgacgtgctgctgtaactgcctccttgtcgcctggatcatttgctcctgagaggctgcatctgttctattcattgccgtgtcccggtgcattgcagagtgcctgctccacacgggctgaatgagtggatgagttagtgaatgaacaacctgctaaagtcctagatcaccaaggaaaatgatgacctcaggccaggcgcggtggctcacrcacaggacagttcctgttggggggaacacaggacttccatggcctcactcacatccacagttgtcaggacgtggactccagtctctggctatgtgggtccccatgccatggtgtgaccttcagaatttatttaacctccagtgcttttgtttcctcatctgaaaaatgggctttttgaaaagaagttcctatctcctaggatcgatgataagattaaatgagttgatacaggcaaatacttcaaacggggccacataaatagcatgagtgctgcaggtgtagccgtcgctattactggtggtgttgacatgctgtaaataccatctccccttaagcattggaatggtcaaggcataagatgaatggattaatccagttttctgggttgggccagatgaaggggcaatcaatccctgtacatatcaattttcaaataatgcactatcataaaataacatgcaagctggagggaatagaatcaacctctttggtgagtcagaatgatgtttcagacccaacaaggctcag

SEQ ID NO: 26748 - DNA, 954 bp, Homo sapiens
tttgcacttgcggttccctttgctgggaatgttctcttcctgtcgctcccttgtctggtgagctcttctcatgcttcaggtctcagccccagtgtctccttcctggggaagccttttctgactttgctgaccagggatttttgccctacaggctcccaaagcactgggttgctctcctcgccagttctcacggaagatgaacacattttgcccttgttgacgtgctgctgtaactgcctccttgtcgcctggatcatttgctcctgagaggctgcatctgttctattcattgccgtgtcccggtgcattgcagagtgcctgctccacacgggctgaatgagtggatgagttagtgaatgaacaacctgctaaagtcctagatcaccaaggaaaatgatgacctcaggccaggcgcggtggctcacacacaggacagttcctgttggggggaacacaggacttccatggcctcactcacatccacagttgtcaggacgtggactccagtctctggctatgtgggtccccatgccatggtgtgaccttcagmatttatttaacctccagtgcttttgtttcctcatctgaaaaatgggctttttgaaaagaagttcctatctcctaggatcgatgataagattaaatgagttgatacaggcaaatacttcaaacggggccacataaatagcatgagtgctgcaggtgtagccgtcgctattactggtggtgttgacatgctgtaaataccatctccccttaagcattggaatggtcaaggcataagatgaatggattaatccagttttctgggttgggccagatgaaggggcaatcaatccctgtacatatcaattttcaaataatgcactatcataaaataacatgcaagctggagggaatagaatcaacctctttggtgagtcagaatgatgtttcagacccaacaaggctcag

SEQ ID NO: 26749 - DNA, 954 bp, Homo sapiens
tttgcacttgcggttccctttgctgggaatgttctcttcctgtcgctcccttgtctggtgagctcttctcatgcttcaggtctcagccccagtgtctccttcctggggaagccttttctgactttgctgaccagggatttttgccctacaggctcccaaagcactgggttgctctcctcgccagttctcacggaagatgaacacattttgcccttgttgacgtgctgctgtaactgcctccttgtcgcctggatcatttgctcctgagaggctgcatctgttctattcattgccgtgtcccggtgcattgcagagtgcctgctccacacgggctgaatgagtggatgagttagtgaatgaacaacctgctaaagtcctagatcaccaaggaaaatgatgacctcaggccaggcgcggtggctcacacacaggacagttcctgttggggggaacacaggacttccatggcctcactcacatccacagttgtcaggacgtggactccagtctctggctatgtgggtccccatgccatggtgtgaccttcagaatttatttaacctccagtgcttttgtttcctcatctgaaaaatgggctttttgaaaagaagttcctatctcctaggatcgatgataagattaaatgagttgatacaggcaaatacttcaaacggggccacataaatagcatgagtgctgcaggtgtagccgtcgctattactggtggtgttgacatgctgtaaataccatctccccttaagcattggaatggtcaaggcataagrtgaatggattaatccagttttctgggttgggccagatgaaggggcaatcaatccctgtacatatcaattttcaaataatgcactatcataaaataacatgcaagctggagggaatagaatcaacctctttggtgagtcagaatgatgtttcagacccaacaaggctcag

SEQ ID NO: 26750 - DNA, 843 bp, Homo sapiens
ctatcaccatcagactaataaacctattctgtcacattcttttttttttttttttttgagacagagtctctctctgtcgcccaggttggagtgcagtggcgcgatctcgtctcactgcaagctccgcctcccgggttcacgccattctcctgcctcaatctccggagtagctgggactacaggagcccgccactacacctggctaattttttttttgtattttttagtagagacagggtttcaccgtgttagccaggatgggctcgatctcctgacctcgtgatccgcccgcctcggcctcccaaagtgctgggattacaggcgtgagccaccgygcccagcctattcttaccatcacattctttccatcctaggaaggagccacctcccaagaagtaaatctatgtgacttttaacagctttatttaggtacaatttgtctgcaacaaactgcatatgtatatagttgtatacatatgtatacataaaaccatcaccacagataagataatgaatgtatccaataacatccaaactcaccatactcatttataatccctccttcccatgcactcttcctggtacccaagcactgactgatctacatctgtcactatgttatttagtatttcctggaattacatatgtaaatgaaataatatgcactccttgtctggttctttctcaccgctgtgattccaagatgcctacaatagcttgtaccttttcattgttattgatgaatatttaagttctttctaagttttggatcttgcaaataaggctgctgtgagcatttatgtgcaaatatctttatggatttatgcttttatatctgtttgt

SEQ ID NO: 26751 - DNA, 544 bp, Homo sapiens
ttgagaaggaaataattttcacaaaaatctaggtgggatatgagataaaaggaaatatatgtctgcctcaattctttccaacttactctgccaaaagaggggtgaaattttatttttatctatctgtattcactgtgtgtacgtagtgtattcatcttgggagctcagatatgtagctctgtagcaccatttcttcatcttattttattctattctttaactatatagggtatttgtaaatgcaaagtcaagtaagcaaaaataaagtcatattttaaaaatttcattgtaagtggttgaactgtaactctaaggtttcttccctccaggctggcaactttaatttcagtgagttttgtgcatatgcacatacaaaygtacgtacatatacacataacctctcaacaaataggcaaagacgccttagtcttattcaataccttagtgtaaggcaacactcaagtgcttcacctccacacaaacaccacttaaattagtcactgttctggagttgaaaacagaagctgagatgattgagagacac

SEQ ID NO: 26752 - DNA, 544 bp, Homo sapiens
ttgagaaggaaataattttcacaaaaatctaggtgggatatgagataaaaggaaatatatgtctgcctcaattctttccaacttactctgccaaaagaggggtgaaattttatttttatctatctgtattcactgtgtgtacgtagtgtattcatcttgggagctcagatatgtagctctgtagcaccatttcttcatcttattttattctattctttaactatatagggtatttgtaaatgcaaagtcaagtaagcaaaaataaagtcatattttaaaaatttcattgtaagtggttgaactgtaactctaaggtttcttccctccaggctggcaactttaatttcagtgagttttgtgcatatgcacatacaaatgtacgtacatatacacataacctctcaacaaataggcaaagacgccttagtcttattcaataccttagtgtaaggcaacactcaagtgcttcacctccacacaaacaccacttaaattrgtcactgttctggagttgaaaacagaagctgagatgattgagagacac

SEQ ID NO: 26753 - DNA, 1203 bp, Homo sapiens
cttctgagaagtatgcagactccaattccctcaaagaacactcagtgtatgtggttcacaaatggcaaacagagggtgtgagatatggcagggctctcttcaaacagcctgctcaacttcttattctctaattccaagtacccgccccctgcccaccacctttcttctccttttcttctgattttactacatgcccagacatgccacagccccaactcacattcctttccttatttgaaaatagactggctctctagtcctctgtagacgaccctttcctcctctcccctctctcccattaggtgcccaccttatctaaaaaagtttaaatgcttagccaatcgagtccactttagattgtgcagtccaaccccagctaatgagaaaaggacacagggtcaagagtcgcggtaaaaataaaagcttcaggccgggcgtggtggctcatgcctttagtaatcccagcactttgggaggccgaggcaagcggaacacctgaggtcgggagttcaagaccagcctgaccaacatgaagaaacattgtctccactaaaaacacaaaattagtcatgcatgatggtgcattcctgtaattccagctactcatgaggctaaggcaggagaatcgcttggacgcaggaggcggaggttgcggtgaactgagatcgcgtcattgcactccagcctgtgcaacaagarcgaaactccctcaaataaataaataaatataaaaagaaaataaaagcttgtactctcctttgttcagggtgctttcgtgccagccagcctgatgagaaacacccttctgcgcaaaagtaaatttgctttgctgagaaatcctttatttaagtgctgtttttctttatgactccgaactttttttctaacagaggggctctaactatttatcatcatagccttagtcagttatccaggcctatgatttaaaaatccagtagtaaatgtcctatggatgccatcaacagtctcttaaaaggttttataattagacaatttttaatgccattcccattgcctctgacagacaactgtcatgttttgcctttgctacctaagaatcttaccaacttcgttgaactcaggaaacctgttcagtggcctaatcttctacctgcgtcctcaggctacacataacaaccagtaaaagtatgttttgtcatattgctacttgcctctccaata

SEQ ID NO: 26754 - DNA, 670 bp, Homo sapiens
attgtagtgatattttcatggaatcaaagtaaaactacactattttactcatggtaatatcaattatatattttttgcaaatatttcttgatcgttaatttttcttgtccaatttttgtacacattcaaattttcccaatattcttccctattacacctgctggggtgtgattgacacaataactactttacattagaaactaaatattttatttaaatgaaatgtagtcaacttagttgatgaaatatttctatacccctgaaatcgttcttctgaaaagaataaatgttttgctgaaaactgttgtcattccttttcttgtcatcactttctttttcattttactgcaacatttaacacttcatagcccatgcaattttgctctgtaggatgaagacagagtgtgcattgctctgtctacatttggatggctactgccccatttarctagctgcagacaattggctcatttagaaaacatttcaccatccaggcaaaaatatgtaatgaaagaacaaaaaaggccttgaagatatttctttctagaaaatcttggaaaaaatgatactgataattttcttatagtaaaagatatttactaataaattaatttcatgcatgccagataacctgatgtgcgtgaaagaacaaaggatgtgtagtcatagt

SEQ ID NO: 26755 - DNA, 313 bp, Homo sapiens
gtccatgttgtggagttcagattatacattaagtgcaatgagaaaccactgaaattttttaagtagaggaatgacatgatctgatagtattttttaaaaaattactccaactggataatgggcttaacagataacacactacaaatgaagaaaccaagtaggaagcaatggcaatgcatcagtagtgacaggagagtaacaaagcgaaatgaatagaggcaagatayatttttgagagaaaatgaagaacagtgctgatggattgaagagattctgacataacaggctctcacccattcaagattaggcctaa

SEQ ID NO: 26756 - DNA, 792 bp, Homo sapiens
acagcttattaaaaacactaaaacaagacttgtgactttattgcattgttgtgacaccagatgctattgtttgggtgtcccctcctgtctcccacaaatccacttccgtatgtctgaaaatccgtaatacgtctaatgattatcaagcaagggaggtctcaggaatattgtaccttgagaagtataagaacttcccagaggttatgttaccataaaatatctagtttctagtgcttaaaacattaaattgtttgcaacatatttttccgtacgttaatcaacatactttgcgatcccttattaagttctagcctctgcaacaaacgtgaaaaaaagcaaagacgcayaactcaaatgtgagaagcacggaaatttcctagaccgcagggttcgttctcagtagtcggcaataagctggctttcagagtcaggaacttgataaagttgttttggaggatgccccagctgtgtgaaggtccatttcgttttgcatctgaagagaagcaagcgagactcccctacagggagtaatggttcagcggggcaaggtttgaaaacccagagctggacaaaggcgggaacgcacgccgccgcgccggggctaggggtgctgacggcccgcgcagctcgcgggcctccgggtttgaggccctggggtcagccctgctccgggcttcgcgcccgggcgcgggtcagagccgccaacttcgggccaatcagcgagcggcgtcccggcgcccgcagcgcccaggcccgcgccccccgcgcccccgcagcaggaatggcaggaac

SEQ ID NO: 26757 - DNA, 608 bp, Homo sapiens
gttgtgttttactcctaagggaaatttaagggatatatgaatgatgctrtaggtattcacattttgtaataggcctcgtctttatcctttcaggctgttataacaaaatactttagactagatacttggtaagcagcagaaatttattgcttacgtttctggagcctaggaagtctatcaaggtgccagcagatttggtgtctggtgagggcccgtttctaattagatagcaccttctagctgtgtcctcatgtgacagaagggacaagcaagctctcttgggcttcttttacaagggcattaagcccatacatgaggacacagtgctcataacctaatcatctcctaaagggcccacctcttaatacaattccattgcggtttcagtttcaacgtacgaattttggggattcacgaacattcagaccatagcaggctgatacttactatacagtacttttccattttgtgtagcaaagccacttcagaagtgatactggtttcattagtcaaagtggtagtatgcttttcctgtactttttctgttctaactgcatgttattggctgagaaagtgtgaacattctgtcaccattgccagcttatgct

SEQ ID NO: 26758 - DNA, 1227 bp, Homo sapiens
gatcctggaaccctccactgagttcagtttccttcagcaagggtgtgactaatgttttagtgaggccactccctgagtgacactcactcacatgctccataaacacctgggggccggccccagagatacaacagcaatagacccagcccaactctgagcggatggcaagacggatgcactccctggcctcataaccctttagctcgggccagtccggaaacacacaacacacaaatggacacactaaaaagacagaactagcagtgtgacctgtacacaggcgcctgggagcttcagctggggagcctgcaggaaagcaagtgggccccggaggcaggtcggactcagagtggctgggaggagaaggctgggcyttcctagcaggggacagccaggccggcggaactgtgggaggatggagagtgtcaaacctggtgaagtcagactggctgtcctagaagacttgggccatggagtcagggaaactgatggggcggctgggagctagcacaggggcctgagcagtggttcaaggaagcgggtttcctcatctccagcgagtagagccggaagaattgctggctggtgtccagctctcagcatctgggcctgttggggggtcagcacccggtctggctgggctctgggggtgcatagacttctgctcatgcatgaggacctgaggtcacctctctgaggggcccacagcctgggtccctgctctgaccctgcctggcactgtctcattcaggcatcttcatcccgagctgcgacgaggatggctactaccggaagatgcagtgtgaccagagcagcggtgactgctggtgtgtggaccagctgggcctggagctgactggcacgcgcacgcatgggagccccgactgcggtacgggctgggcagctcagggcctgctgggggcccaggcctgggggcccttgtcgtgggatgctggggggtgcgtgccagaagctccctcaccccctgttggcttgatcccctcacagatgacatcgtgggcttctcgggggactttggaagcggtgtcggctgggaggatgaggaggagaaggagacggaggaagcaggcgaggaggccgaggaggaggagggcgaggcaggcgaggctgacgacgggggctacatctggtagacgccctcagaagccggctgccgggggggactcaacagcagagctctgagcagcagcaggcaacttcgagaac

SEQ ID NO: 26759 - DNA, 1227 bp, Homo sapiens
gatcctggaaccctccactgagttcagtttccttcagcaagggtgtgactaatgttttagtgaggccactccctgagtgacactcactcacatgctccataaacacctgggggccggccccagagatacaacagcaatagacccagcccaactctgagcggatggcaagacggatgcactccctggcctcataaccctttagctcgggccagtccggaaacacacaacacacaaatggacacactaaaaagacagaactagcagtgtgacctgtacacaggcgcctgggagcttcagctggggagcctgcaggaaagcaagtgggccccggaggcaggtcggactcagagtggctgggaggagaaggctgggctttcctagcaggggacagccaggccggcggaactgtgggaggatggagagtgtcaaacctggtgaagtcagactggctgtcctagaagacttgggccatggagtcagggaaactgatggggcggctgggagctagcacaggggcctgagcagtggttcaaggaagcgggtttcctcatctccagcgagtagagccgraagaattgctggctggtgtccagctctcagcatctgggcctgttggggggtcagcacccggtctggctgggctctgggggtgcatagacttctgctcatgcatgaggacctgaggtcacctctctgaggggcccacagcctgggtccctgctctgaccctgcctggcactgtctcattcaggcatcttcatcccgagctgcgacgaggatggctactaccggaagatgcagtgtgaccagagcagcggtgactgctggtgtgtggaccagctgggcctggagctgactggcacgcgcacgcatgggagccccgactgcggtacgggctgggcagctcagggcctgctgggggcccaggcctgggggcccttgtcgtgggatgctggggggtgcgtgccagaagctccctcaccccctgttggcttgatcccctcacagatgacatcgtgggcttctcgggggactttggaagcggtgtcggctgggaggatgaggaggagaaggagacggaggaagcaggcgaggaggccgaggaggaggagggcgaggcaggcgaggctgacgacgggggctacatctggtagacgccctcagaagccggctgccgggggggactcaacagcagagctctgagcagcagcaggcaacttcgagaac

SEQ ID NO: 26760 - DNA, 1227 bp, Homo sapiens
gatcctggaaccctccactgagttcagtttccttcagcaagggtgtgactaatgttttagtgaggccactccctgagtgacactcactcacatgctccataaacacctgggggccggccccagagatacaacagcaatagacccagcccaactctgagcggatggcaagacggatgcactccctggcctcataaccctttagctcgggccagtccggaaacacacaacacacaaatggacacactaaaaagacagaactagcagtgtgacctgtacacaggcgcctgggagcttcagctggggagcctgcaggaaagcaagtgggccccggaggcaggtcggactcagagtggctgggaggagaaggctgggctttcctagcaggggacagccaggccggcggaactgtgggaggatggagagtgtcaaacctggtgaagtcagactggctgtcctagaagacttgggccatggagtcagggaaactgatggggcggctgggagctagcacaggggcctgagcagtggttcaaggaagcgggtttcctcatctccagcgagtagagccggaagaattgctggctggtgtccagctctcagcatctgggcctgttggggggtcagcacccggtctggctgggctctgggggtgcatagacttctgctcatgcatgaggacctgaggtcacctctctgaggggcccacagcctgggyccctgctctgaccctgcctggcactgtctcattcaggcatcttcatcccgagctgcgacgaggatggctactaccggaagatgcagtgtgaccagagcagcggtgactgctggtgtgtggaccagctgggcctggagctgactggcacgcgcacgcatgggagccccgactgcggtacgggctgggcagctcagggcctgctgggggcccaggcctgggggcccttgtcgtgggatgctggggggtgcgtgccagaagctccctcaccccctgttggcttgatcccctcacagatgacatcgtgggcttctcgggggactttggaagcggtgtcggctgggaggatgaggaggagaaggagacggaggaagcaggcgaggaggccgaggaggaggagggcgaggcaggcgaggctgacgacgggggctacatctggtagacgccctcagaagccggctgccgggggggactcaacagcagagctctgagcagcagcaggcaacttcgagaac

SEQ ID NO: 26761 - DNA, 1227 bp, Homo sapiens
gatcctggaaccctccactgagttcagtttccttcagcaagggtgtgactaatgttttagtgaggccactccctgagtgacactcactcacatgctccataaacacctgggggccggccccagagatacaacagcaatagacccagcccaactctgagcggatggcaagacggatgcactccctggcctcataaccctttagctcgggccagtccggaaacacacaacacacaaatggacacactaaaaagacagaactagcagtgtgacctgtacacaggcgcctgggagcttcagctggggagcctgcaggaaagcaagtgggccccggaggcaggtcggactcagagtggctgggaggagaaggctgggctttcctagcaggggacagccaggccggcggaactgtgggaggatggagagtgtcaaacctggtgaagtcagactggctgtcctagaagacttgggccatggagtcagggaaactgatggggcggctgggagctagcacaggggcctgagcagtggttcaaggaagcgggtttcctcatctccagcgagtagagccggaagaattgctggctggtgtccagctctcagcatctgggcctgttggggggtcagcacccggtctggctgggctctgggggtgcatagacttctgctcatgcatgaggacctgaggtcacctctctgaggggcccacagcctgggtccctgctctgaccctgcctggcactgtctcattcaggcatcttcatcccgagctgcgacgaggatggctactaccggaagatgcagtgtgaccagagcagcggtgactgctggtgtgtggaccagctgggcctggagctgactggcacgcgcacgcatgggagccccgactgcggtacgggctgggcagctcagggcctgctgggggcccaggcctgggggcccttgtcgtgggatgctggggggtgcgtgccagaagctccctcaccccctgttggcttgatcccctcacagatgacatcgtgggcttctcgggggactttggaagcggtgtcggctgggaggatgaggaggagaaggagacggaggaagcaggcgaggaggccgaggaggaggagggcgaggcaggcgaggctgacgacgggggctacatctggtagacgccctcagragccggctgccgggggggactcaacagcagagctctgagcagcagcaggcaacttcgagaac

SEQ ID NO: 26762 - DNA, 1114 bp, Homo sapiens
cagactgagatcgagcctgctgctccactgcacattcgccctccatgccttctctctgttctgcagagacttgcaccggtcaggacctggctgacctgggagatcggctgcgggactggttccagctccttcatgagaactccaagcagaatggctcagccagcagtgtagccggcccggccagcggtaggaagcttgctgctctgcctggaggagggagggaaatagggaaggggctgaggacacaggtgtatgctgggccagyctgcccttgttccttcctgccagactctgggccctacaatctgggccccaaaagaaccttcaccccaaagaagtcggcttccaccagagcaggagggataccagttagctagtaggaagaacttaacatgggtggagggagcttaaaccctgacatgggtagcccagggaaagcaggaattcttttccctgcagggctttcagaacgggttttgaatggttcaggcatagtcctatgtggaggtggaaggaaggacctttcgccgttctcgagtttctcaatcccatggttagattccaagctgcccagacccagaatagagggctggggctgatggcgaggcggagagatggagggctggagaaacggctgaatagccagatgaagcgtgcctgaacctgatcttttcccagggctggacaagagcctgggggccagctgcaaggactccattggctggatgttctccaagctggacaccagtgctgacctcttcctggaccagacggagctggccgccatcaacctggacaagtacgaggtctgcatccgtcccttcttcaactcctgtgacacctacaaggatggccgggtctctactgctgagtggtgcttctgcttctggagggagagtgagtgcagcccccctcccaggcccctgcctcacccgtgtgggctctacccgaagttccaggctctcttgggaagtcagagtggctctttcttggctacgtccccaggcccagcactttcccagcttgcccacttcctgcactcccttagggcttcatcccttaaggcccagggaagccaacactttcagctcccttccttggcaggctcccaggc

SEQ ID NO: 26763 - DNA, 1047 bp, Homo sapiens
atccattgctggtgaactagtatgatttttggggggtgttaaagagccytattttctcatgttaccagagctggttttctggtgccttctcatttgggtaggttctgtcagagggaaggtctagggctgaatcctgctgttcagattctttttcccacagggtattcctttgatgtaatactctaccccttttcctatagatgtgtcttcctgtgaagctgcagtgattgttatctcttctgggtctagccacccagcaagtctacccagctctgagctggtactggtactggggattgtctgcacagagtcctgtgatgtgaatcgtctatgggtctctcagctgtggataccagcacttattctggtggaggtggcagtgaggattcttagctttggtggtttaatgctctatttttgtgctggttggactcctgctgggaggtggcactttccagagagcatcagctgtggtagtacccagcagtgggcaggaccctagaactcccaagagtatatgtcctttgtcttcagctaccagggtgagtagggaaggaccatcaggtgggggcagggctaggcatgtctgagctcagactctccttgggcaggttgctgtgggggttgggggtgaggttcccacgtcaatggagttgtgaacctaggaggattatggctgcctctgctgagtcatgaaggttgttagggaagtgggggaaagctggcagtcacaggcctcaccgaactgccatgcaattcaaaggggcggtcttactccccctgtgccctgccccaacagccccgagtctgtttccaggtggtgggtgagctagacttaagaacttgctccaggctacccacctcccagctgcaaaagaacagagctttggttctttccccacctatggagtctgcacaccagatttgtgccttcccccaagttctggccaggaggcttctcgcccagcttaaattgttacaaagttcagctggagatttccttctgcctttgacatcttcccccatgcctctgggcaccctcccaaa

SEQ ID NO: 26764 - DNA, 742 bp, Homo sapiens
tttgtaatcataaaataatagaaccaatgtaattttaaagatacataaaaagggttttatttatttaacaaacagacaattgaacaaacaaacaatggaagcaagtcatttgccaaaaggaacacagagggtcatgatgatctactccaaggatttcagggttcccagacgcctagttttctgtctagttctggaagatgttattcttggggagcaataggtcctcgagtttggggctctttcaggttctctctccatttccccattctgctacaatagataaacaaacaaaaacaattctcacttccagaagatcccgcctgtacgtctgcacgagcccttcaggaggtctggatgtctggttcayaactcccctgcttcttttccagcttttgctttcccttcccccgctcccgccctaccgccccacgacccgaccaccgcccagctgagccccagaggctccacagcgcagaaggtgcaccggaggtcgtgtcagttgcccgccccgcggggtgccaagaaatcaacgctttgtaaaaagaacttccccgtggaaaaaaatctcttgatttccactctcacctctcttcaaaggactaaaagctaaaggcgacaagggattcattcgacaagtcctagtcgtgcgcccttgtgagtgccagaccctgctccctgccaggggacccacgagcgaccctcaccaccatccctgccctggtggagccccgggcggaacaca

SEQ ID NO: 26765 - DNA, 742 bp, Homo sapiens
tttgtaatcataaaataatagaaccaatgtaattttaaagatacataaaaagggttttatttatttaacaaacagacaattgaacaaacaaacaatggaagcaagtcatttgccaaaaggaacacagagggtcatgatgatctactccaaggatttcagggttcccagacgcctagttttctgtctagttctggaagatgttattcttggggagcaataggtcctcgagtttggggctctttcaggttctctctccatttccccattctgctacaatagataaacaaacaaaaacaattctcacttccagaagatcccgcctgtacgtctgcacgagcccttcaggaggtctggatgtctggttcacaactcccctgcttcttttccagcttttgctttcccttcccccgctcccgccctaccgccccacgacccgaccaccgcccagctgagccccagaggctccacagcgcagaaggtgcaccggaggtcgtgtcagttgcccgccccgcggggtgccragaaatcaacgctttgtaaaaagaacttccccgtggaaaaaaatctcttgatttccactctcacctctcttcaaaggactaaaagctaaaggcgacaagggattcattcgacaagtcctagtcgtgcgcccttgtgagtgccagaccctgctccctgccaggggacccacgagcgaccctcaccaccatccctgccctggtggagccccgggcggaacaca

SEQ ID NO: 26766 - DNA, 742 bp, Homo sapiens
tttgtaatcataaaataatagaaccaatgtaattttaaagatacataaaaagggttttatttatttaacaaacagacaattgaacaaacaaacaatggaagcaagtcatttgccaaaaggaacacagagggtcatgatgatctactccaaggatttcagggttcccagacgcctagttttctgtctagttctggaagatgttattcttggggagcaataggtcctcgagtttggggctctttcaggttctctctccatttccccattctgctacaatagataaacaaacaaaaacaattctcacttccagaagatcccgcctgtacgtctgcacgagcccttcaggaggtctggatgtctggttcacaactcccctgcttcttttccagcttttgctttcccttcccccgctcccgccctaccgccccacgacccgaccaccgcccagctgagccccagaggctccacagcgcagaaggtgcaccggaggtcgtgtcagttgcccgccccgcggggtgccaagaaatcaacgctttgtaaaaagaacttccccgtggaaaaaaatctcttgatttccactctcacctctcttcaaaggactaaaagctaaaggcgacaarggattcattcgacaagtcctagtcgtgcgcccttgtgagtgccagaccctgctccctgccaggggacccacgagcgaccctcaccaccatccctgccctggtggagccccgggcggaacaca

SEQ ID NO: 26767 - DNA, 903 bp, Homo sapiens
aggtaagattaactcacaggaaaaggaaacaaaagatctcatgcttttaaaggtctgacaggaaactttttttttttgaaacggggtcttactctgacacccaggctggagtgtgcagtggtgcaatcttggctcactgcaacctctgcctcccaggttcaagccattctcatgcctcagcctcccgagcagctgggattacaggtgcccaccaccacaccaggttaattaattaatttattacttatttatttatttattttagacagagtcttgctctttcgcccaggctggagtgcagtggtgccatctcagctcactgcaaactctgcctcccaggttcatgccattctcctrcctcagcctccctagtagctgggactacaggtgcccgccaccacgcctggctaatttttttgtatttttagtagagacggggtttcactgtgttagccaggatggtcttgatctcttgacctcatgatccacctgccttggcctcccaaagtgctgggattacaggcatgagccaccgagcccggcctgtatttttagtagagatggggtttgccatgttggccaggctggtcttgaactcctgacctcaaataatctgcccacctcagcctcccaaagtgctgggattacaggcatgagccaccacatctggtggagggctgcttcttgagagacttcatctgcatcacatctgcatcacaacacagcctttgctcaccatgtctttcctcccctcaacctcccataacctgtggccaccaccccctaagaactccaagcctagttagtcctttatgtgctgcatataaacttcaaccatacggccttctttgaggcttttttttttttttgagacagagttttgcttttgttgcccaggctgga

SEQ ID NO: 26768 - DNA, 903 bp, Homo sapiens
aggtaagattaactcacaggaaaaggaaacaaaagatctcatgcttttaaaggtctgacaggaaactttttttttttgaaacggggtcttactctgacacccaggctggagtgtgcagtggtgcaatcttggctcactgcaacctctgcctcccaggttcaagccattctcatgcctcagcctcccgagcagctgggattacaggtgcccaccaccacaccaggttaattaattaatttattacttatttatttatttattttagacagagtcttgctctttcgcccaggctggagtgcagtggtgccatctcagctcactgcaaactctgcctcccaggttcatgccattctcctgcctcagcctccctagtagctgggactacaggtgcccgccaccacgcctggctaatttttttgtatttttagtagagacggggtttcactgtgttagccaggatggtcttgatctcttgacctcatgatccacctgycttggcctcccaaagtgctgggattacaggcatgagccaccgagcccggcctgtatttttagtagagatggggtttgccatgttggccaggctggtcttgaactcctgacctcaaataatctgcccacctcagcctcccaaagtgctgggattacaggcatgagccaccacatctggtggagggctgcttcttgagagacttcatctgcatcacatctgcatcacaacacagcctttgctcaccatgtctttcctcccctcaacctcccataacctgtggccaccaccccctaagaactccaagcctagttagtcctttatgtgctgcatataaacttcaaccatacggccttctttgaggcttttttttttttttgagacagagttttgcttttgttgcccaggctgga

SEQ ID NO: 26769 - DNA, 1779 bp, Homo sapiens
tccttcaccagattacatcttcgacagcccctgaaaatttggagttacctgagagtcgaagacacctgtcctacttgattcttcttacttgtacagtcatctgagaacaaaattcaaaaaggccagtcatgctttaagcaggtctcatttcccagactgcaaacaaacatggaggtctatctgggascagagacttgactacctgatgcttgccttgattccaggatactctgaattttctcagatcttgggttgagtctttagagagcttgtctggcaggctttcctgagcccaccatgaaggtcatcatctccacttgctttgccctgagtcacagcaaaaagctaaaaatgtctttattcccacatatcatggaacacatatccactccagccaaagcctccaagtcctggcacaaggccagcacccaaacccatggctgtgtgttccaccatagctttcatgcagaacttcctcccttctccaaggagatgatagacatccgtgtcccacctaccatcaggagacagcacagtgaactcaagccttctgctactatgggcccttgggttctcaagggggaatttcatgtaaaatgctcctgaaacagctaattatctcaccaccgtgtactagtacacacagtgcctgaaccatgccaaagtcagcatgattctttatcatttttttgaagtgcgccgattaatgttacttatttaatccctagaacaatcatgcaacattcaagggctggaattatttgacttaattttttaggtagagaaacagaaatcaaaataaatattaacctgtccagagctggtaaggaacacatataagctagaggtagggtttttggattcccagttcagggcccttcacaaaaaccagctgcccctgttccttctgtctttctgccaattagtttcagaggaataccatcatccctggggatgcctcctgccctaacagtcatattccatgagggatggaggtgctggtgatcatcatggcatcctcaacccttcttcttggagctcctctccagccagtcctgactctgtcatggtcttaaggtggtgattacaaagcaggacaccaggttgaaaagtgacatgtgaatgggggtggcatcctgtgaacttaggaccttgggagagactgaaaatcttcctaagctctgcggccaacttacctgtgctgaattttctggcaaggctctctgccagctggcttcctttggccagctgctcgcagtagtgctgctccatatagtggtcaaagttattgctctggagtagctcctcaaaggtctttagtgtgttcttgacatgctggatgagaagagcagaggccactctcccaagcttcatcttctgccgtaggtgggttaactcttgagcctgatcctgaatcaaggaatgatacttcctaaagtagaaaaaaagaagtaaaggtagataggaataactgataggttatagcaatttaggagaaggaacttgagagtatcaccaaaggaggccacacactgaattctagcatatgtttagtgtcctgaatatggtaaaaggaatgaaggaaatgaaaacaatctttatgtgaaagatcccttctaagattgtcattttccctgccacttgctaaagaagaaaaatcacttgatcatattaatagatgaagaaaaagcatttgacaaaattcaacactcattcatcataaaatctctcaacaaagtgggaatagaggagaccttcctcaacttgataaagaacatc

SEQ ID NO: 26770 - DNA, 1779 bp, Homo sapiens
tccttcaccagattacatcttcgacagcccctgaaaatttggagttacctgagagtcgaagacacctgtcctacttgattcttcttacttgtacagtcatctgagaacaaaattcaaaaaggccagtcatgctttaagcaggtctcatttcccagactgcaaacaaacatggaggtctatctgggaccagagacttgactacctgatgcttgccttgattccaggatactctgaattttctcagatcttgggttgagtctttagagagcttgyctggcaggctttcctgagcccaccatgaaggtcatcatctccacttgctttgccctgagtcacagcaaaaagctaaaaatgtctttattcccacatatcatggaacacatatccactccagccaaagcctccaagtcctggcacaaggccagcacccaaacccatggctgtgtgttccaccatagctttcatgcagaacttcctcccttctccaaggagatgatagacatccgtgtcccacctaccatcaggagacagcacagtgaactcaagccttctgctactatgggcccttgggttctcaagggggaatttcatgtaaaatgctcctgaaacagctaattatctcaccaccgtgtactagtacacacagtgcctgaaccatgccaaagtcagcatgattctttatcatttttttgaagtgcgccgattaatgttacttatttaatccctagaacaatcatgcaacattcaagggctggaattatttgacttaattttttaggtagagaaacagaaatcaaaataaatattaacctgtccagagctggtaaggaacacatataagctagaggtagggtttttggattcccagttcagggcccttcacaaaaaccagctgcccctgttccttctgtctttctgccaattagtttcagaggaataccatcatccctggggatgcctcctgccctaacagtcatattccatgagggatggaggtgctggtgatcatcatggcatcctcaacccttcttcttggagctcctctccagccagtcctgactctgtcatggtcttaaggtggtgattacaaagcaggacaccaggttgaaaagtgacatgtgaatgggggtggcatcctgtgaacttaggaccttgggagagactgaaaatcttcctaagctctgcggccaacttacctgtgctgaattttctggcaaggctctctgccagctggcttcctttggccagctgctcgcagtagtgctgctccatatagtggtcaaagttattgctctggagtagctcctcaaaggtctttagtgtgttcttgacatgctggatgagaagagcagaggccactctcccaagcttcatcttctgccgtaggtgggttaactcttgagcctgatcctgaatcaaggaatgatacttcctaaagtagaaaaaaagaagtaaaggtagataggaataactgataggttatagcaatttaggagaaggaacttgagagtatcaccaaaggaggccacacactgaattctagcatatgtttagtgtcctgaatatggtaaaaggaatgaaggaaatgaaaacaatctttatgtgaaagatcccttctaagattgtcattttccctgccacttgctaaagaagaaaaatcacttgatcatattaatagatgaagaaaaagcatttgacaaaattcaacactcattcatcataaaatctctcaacaaagtgggaatagaggagaccttcctcaacttgataaagaacatc

SEQ ID NO: 26771 - DNA, 1779 bp, Homo sapiens
tccttcaccagattacatcttcgacagcccctgaaaatttggagttacctgagagtcgaagacacctgtcctacttgattcttcttacttgtacagtcatctgagaacaaaattcaaaaaggccagtcatgctttaagcaggtctcatttcccagactgcaaacaaacatggaggtctatctgggaccagagacttgactacctgatgcttgccttgattccaggatactctgaattttctcagatcttgggttgagtctttagagagcttgtctggcaggctttcctgagcccaccatgaaggtcatcatctccacttgctttgccctgagtcacagcaaaaagctaaaaatgtctttattcccacatatcatggaacacatatccactccagccaaagcctccaagtcctggcacaaggccagcacccaaacccatggctgtgtgttccaccatagctttcatgcagaacttcctcccttctccaaggagatgatagacatccgtgtcccacctaccatcaggagacagcacagtgaactcaagccttctgctactatgggcccttgggttctcaagggggaatttcatgtaaaatgctcctgaaacagctaattatctcaccaccrtgtactagtacacacagtgcctgaaccatgccaaagtcagcatgattctttatcatttttttgaagtgcgccgattaatgttacttatttaatccctagaacaatcatgcaacattcaagggctggaattatttgacttaattttttaggtagagaaacagaaatcaaaataaatattaacctgtccagagctggtaaggaacacatataagctagaggtagggtttttggattcccagttcagggcccttcacaaaaaccagctgcccctgttccttctgtctttctgccaattagtttcagaggaataccatcatccctggggatgcctcctgccctaacagtcatattccatgagggatggaggtgctggtgatcatcatggcatcctcaacccttcttcttggagctcctctccagccagtcctgactctgtcatggtcttaaggtggtgattacaaagcaggacaccaggttgaaaagtgacatgtgaatgggggtggcatcctgtgaacttaggaccttgggagagactgaaaatcttcctaagctctgcggccaacttacctgtgctgaattttctggcaaggctctctgccagctggcttcctttggccagctgctcgcagtagtgctgctccatatagtggtcaaagttattgctctggagtagctcctcaaaggtctttagtgtgttcttgacatgctggatgagaagagcagaggccactctcccaagcttcatcttctgccgtaggtgggttaactcttgagcctgatcctgaatcaaggaatgatacttcctaaagtagaaaaaaagaagtaaaggtagataggaataactgataggttatagcaatttaggagaaggaacttgagagtatcaccaaaggaggccacacactgaattctagcatatgtttagtgtcctgaatatggtaaaaggaatgaaggaaatgaaaacaatctttatgtgaaagatcccttctaagattgtcattttccctgccacttgctaaagaagaaaaatcacttgatcatattaatagatgaagaaaaagcatttgacaaaattcaacactcattcatcataaaatctctcaacaaagtgggaatagaggagaccttcctcaacttgataaagaacatc

SEQ ID NO: 26772 - DNA, 1779 bp, Homo sapiens
tccttcaccagattacatcttcgacagcccctgaaaatttggagttacctgagagtcgaagacacctgtcctacttgattcttcttacttgtacagtcatctgagaacaaaattcaaaaaggccagtcatgctttaagcaggtctcatttcccagactgcaaacaaacatggaggtctatctgggaccagagacttgactacctgatgcttgccttgattccaggatactctgaattttctcagatcttgggttgagtctttagagagcttgtctggcaggctttcctgagcccaccatgaaggtcatcatctccacttgctttgccctgagtcacagcaaaaagctaaaaatgtctttattcccacatatcatggaacacatatccactccagccaaagcctccaagtcctggcacaaggccagcacccaaacccatggctgtgtgttccaccatagctttcatgcagaacttcctcccttctccaaggagatgatagacatccgtgtcccacctaccatcaggagacagcacagtgaactcaagccttctgctactatgggcccttgggttctcaagggggaatttcatgtaaaatgctcctgaaacagctaattatctcaccaccgtgtactagtacacacagtgcctgaaccatgccaaagtcagcatgattctttatcatttttttgaagtgygccgattaatgttacttatttaatccctagaacaatcatgcaacattcaagggctggaattatttgacttaattttttaggtagagaaacagaaatcaaaataaatattaacctgtccagagctggtaaggaacacatataagctagaggtagggtttttggattcccagttcagggcccttcacaaaaaccagctgcccctgttccttctgtctttctgccaattagtttcagaggaataccatcatccctggggatgcctcctgccctaacagtcatattccatgagggatggaggtgctggtgatcatcatggcatcctcaacccttcttcttggagctcctctccagccagtcctgactctgtcatggtcttaaggtggtgattacaaagcaggacaccaggttgaaaagtgacatgtgaatgggggtggcatcctgtgaacttaggaccttgggagagactgaaaatcttcctaagctctgcggccaacttacctgtgctgaattttctggcaaggctctctgccagctggcttcctttggccagctgctcgcagtagtgctgctccatatagtggtcaaagttattgctctggagtagctcctcaaaggtctttagtgtgttcttgacatgctggatgagaagagcagaggccactctcccaagcttcatcttctgccgtaggtgggttaactcttgagcctgatcctgaatcaaggaatgatacttcctaaagtagaaaaaaagaagtaaaggtagataggaataactgataggttatagcaatttaggagaaggaacttgagagtatcaccaaaggaggccacacactgaattctagcatatgtttagtgtcctgaatatggtaaaaggaatgaaggaaatgaaaacaatctttatgtgaaagatcccttctaagattgtcattttccctgccacttgctaaagaagaaaaatcacttgatcatattaatagatgaagaaaaagcatttgacaaaattcaacactcattcatcataaaatctctcaacaaagtgggaatagaggagaccttcctcaacttgataaagaacatc

SEQ ID NO: 26773 - DNA, 1779 bp, Homo sapiens
tccttcaccagattacatcttcgacagcccctgaaaatttggagttacctgagagtcgaagacacctgtcctacttgattcttcttacttgtacagtcatctgagaacaaaattcaaaaaggccagtcatgctttaagcaggtctcatttcccagactgcaaacaaacatggaggtctatctgggaccagagacttgactacctgatgcttgccttgattccaggatactctgaattttctcagatcttgggttgagtctttagagagcttgtctggcaggctttcctgagcccaccatgaaggtcatcatctccacttgctttgccctgagtcacagcaaaaagctaaaaatgtctttattcccacatatcatggaacacatatccactccagccaaagcctccaagtcctggcacaaggccagcacccaaacccatggctgtgtgttccaccatagctttcatgcagaacttcctcccttctccaaggagatgatagacatccgtgtcccacctaccatcaggagacagcacagtgaactcaagccttctgctactatgggcccttgggttctcaagggggaatttcatgtaaaatgctcctgaaacagctaattatctcaccaccgtgtactagtacacacagtgcctgaaccatgccaaagtcagcatgattctttatcatttttttgaagtgcgccgattaatgttacttatttaatccctagaacaatcatgcaacattcaagggctggaattatttgacttaattttttaggtagagaaacagaaatcaaaataaatattaacctgtccagagctggtaaggaacacatataagctagaggtagggtttttggattcccagttcagggcccttcacaaaaaccagctgcccctgttccttctgtctttctgccaattagtttcagakgaataccatcatccctggggatgcctcctgccctaacagtcatattccatgagggatggaggtgctggtgatcatcatggcatcctcaacccttcttcttggagctcctctccagccagtcctgactctgtcatggtcttaaggtggtgattacaaagcaggacaccaggttgaaaagtgacatgtgaatgggggtggcatcctgtgaacttaggaccttgggagagactgaaaatcttcctaagctctgcggccaacttacctgtgctgaattttctggcaaggctctctgccagctggcttcctttggccagctgctcgcagtagtgctgctccatatagtggtcaaagttattgctctggagtagctcctcaaaggtctttagtgtgttcttgacatgctggatgagaagagcagaggccactctcccaagcttcatcttctgccgtaggtgggttaactcttgagcctgatcctgaatcaaggaatgatacttcctaaagtagaaaaaaagaagtaaaggtagataggaataactgataggttatagcaatttaggagaaggaacttgagagtatcaccaaaggaggccacacactgaattctagcatatgtttagtgtcctgaatatggtaaaaggaatgaaggaaatgaaaacaatctttatgtgaaagatcccttctaagattgtcattttccctgccacttgctaaagaagaaaaatcacttgatcatattaatagatgaagaaaaagcatttgacaaaattcaacactcattcatcataaaatctctcaacaaagtgggaatagaggagaccttcctcaacttgataaagaacatc

SEQ ID NO: 26774 - DNA, 1779 bp, Homo sapiens
tccttcaccagattacatcttcgacagcccctgaaaatttggagttacctgagagtcgaagacacctgtcctacttgattcttcttacttgtacagtcatctgagaacaaaattcaaaaaggccagtcatgctttaagcaggtctcatttcccagactgcaaacaaacatggaggtctatctgggaccagagacttgactacctgatgcttgccttgattccaggatactctgaattttctcagatcttgggttgagtctttagagagcttgtctggcaggctttcctgagcccaccatgaaggtcatcatctccacttgctttgccctgagtcacagcaaaaagctaaaaatgtctttattcccacatatcatggaacacatatccactccagccaaagcctccaagtcctggcacaaggccagcacccaaacccatggctgtgtgttccaccatagctttcatgcagaacttcctcccttctccaaggagatgatagacatccgtgtcccacctaccatcaggagacagcacagtgaactcaagccttctgctactatgggcccttgggttctcaagggggaatttcatgtaaaatgctcctgaaacagctaattatctcaccaccgtgtactagtacacacagtgcctgaaccatgccaaagtcagcatgattctttatcatttttttgaagtgcgccgattaatgttacttatttaatccctagaacaatcatgcaacattcaagggctggaattatttgacttaattttttaggtagagaaacagaaatcaaaataaatattaacctgtccagagctggtaaggaacacatataagctagaggtagggtttttggattcccagttcagggcccttcacaaaaaccagctgcccctgttccttctgtctttctgccaattagtttcagaggaataccatcatccctggggatgcctcctgccctaacagtcatattccatgagggatggaggtgctggtgatcatcatggcatcctcaacccttcttcttggagctcctctccagccagtcctgactctgtsatggtcttaaggtggtgattacaaagcaggacaccaggttgaaaagtgacatgtgaatgggggtggcatcctgtgaacttaggaccttgggagagactgaaaatcttcctaagctctgcggccaacttacctgtgctgaattttctggcaaggctctctgccagctggcttcctttggccagctgctcgcagtagtgctgctccatatagtggtcaaagttattgctctggagtagctcctcaaaggtctttagtgtgttcttgacatgctggatgagaagagcagaggccactctcccaagcttcatcttctgccgtaggtgggttaactcttgagcctgatcctgaatcaaggaatgatacttcctaaagtagaaaaaaagaagtaaaggtagataggaataactgataggttatagcaatttaggagaaggaacttgagagtatcaccaaaggaggccacacactgaattctagcatatgtttagtgtcctgaatatggtaaaaggaatgaaggaaatgaaaacaatctttatgtgaaagatcccttctaagattgtcattttccctgccacttgctaaagaagaaaaatcacttgatcatattaatagatgaagaaaaagcatttgacaaaattcaacactcattcatcataaaatctctcaacaaagtgggaatagaggagaccttcctcaacttgataaagaacatc

SEQ ID NO: 26775 - DNA, 614 bp, Homo sapiens
tgtaataataaatatacttctatcctttaattagttgacaaaatatcaacaaataaagcaattaattttttaaaaattttacatataggggctttccagcaaaaattgggaagcctgatagacaagttctaaaacaactgtaacactaaagcaattatttcactccaagtcgcatgtagagttcttacctgtatttgaaagtggacattcatatttttacagtaaacctgaaggacatgctttggtgatatgtgacaaagaagggacacttgtgaaagccttgggctatcaagaagctagaaatggtttctatgtcagactttttaagaggaagcaatgttttggccccacagcccccacgtgaactaaattcagagagacagtcacaggattccctttggttctctctgtgttcttggataggaaataacttggatctgaggtgttggagaaggatgtcagggacaagggacttccctcggagctggctgtggcccagccatttgttctgtccmtccaggagagagctgagcttggggcctgtgaatctagggaatggtcgtcacagtgcccaagcacagtgatggtcaagcacagtaatgtctcaaatcagg

SEQ ID NO: 26776 - DNA, 949 bp, Homo sapiens
ccacagaatttcctggtttttcttggcctagaagagatgtgaatttcaaagagggcaactggaaagtgaacctttgtgacatttggcatcctataggtcctcagaacggatttgtaaaggccagtgagcactcacacagccataaattaattggctgaaaattgtcttatgggtattttgatctacatttaatcaggaagccatcagagtttaagggattaatcaacagatatgaattttaggaaccaaggagaatatatcccagtcaggacttgggaatggagcagagggtcctgtrgcaggatacctctatgtcactatatcctgtgaaatcaggatatcactgccatccttccaaggcagttctggctctggccagaaattccttgctacattgtttgcccttctgcgatttgtctagacccttgtcctgccttttttggaggcggcatctattggacactcaccagtttcacacagaattgcctgtagaaatccctggcccttggtagatcctgatcaaggagacggtctaataccccatagagctcctggaggcccaaaaagggaatgcagaccatcaagacatcacggcaagcctggaaaacagagttttctgcatcacagtccagaacgttaggatctccttccagaagggaaaaaatgctgaatagtactgggaaagaagcactaaaagtcagtggtgtgaatggctttatagtcattgctggcaccttcccagtttcaaggaagagtaagcttgggaagagatagtaagaagaacctagaattggagaagaggttttcaggttcagcgctaaggggtgactttagatctggctcctggtgcagctagaccaggcttattggtacttctcagccatggggagagcaggaggtgcaggtgtctgtggagagcacttacaactccaatcttggggttgggatc

SEQ ID NO: 26777 - DNA, 1703 bp, Homo sapiens
gcattcccattctttactttctgaagtaactaacagtgtttttgccacagttttgtaaattctaactaacttgttaaagtttgccatagtgatgactgagaaaagagacgaggccttcatgatgagggctttaaagaaacaaaggcatacttacaaaacaagatttaaaacatcacgattaattaattttcaagaaaattgttttcattacaaggaataacctactacagcaaaaccctgaagggtgggcctttaaaatggttcagctgactactcaccataggaacactacttttcaaaactaaagtaaaattttgagtagtttgttttggagtcagaaatcaccattactgacatagttaataaacagctggtatatcaggagccacctctcaggtgggccacttaagctgtggtacccagggaagcttcaacaagagtagacagaatgactcgaggatggctcatttctctcttcaacagtgctgagaacttttttcctttctttttttttttaaatatatttttatagagatggggtctccctatgttgcccaggctggtctcaaactcctgggctcaactgatcctcttgcctcggcctcccaaagtgctgggattatattaatagacaaacatctccttttcaatagaaagaatccttttgtcctattcactccctcctgcctcctaccgcacggtggcataagccaccacacctggtctggtgctgagaacttctgtgggcctcttacaaacatctctctctctctctttttttttttttttttgatagagtctcactctgttgcccaagctggagtrcagtggtgtgatctcgactcactgaaacctctgtctcccaggttccagtgattctcctgcctcagcctcccgggtagctgggattacaggcacgaactaccacgcctggctaatttttgtatttttagtagagacgggctttcaccatgttagccaggctggtctcgaactcctgagcctcagcctcccaaagtactaggattacaagtgtgtgcgcctggccacatccccttttcaatagaaagaattctttttgtcctcttcactccctccttcctcctactcccttgaaatctgtaaggttgagagaattgttatgttagaagaaaaaaatgtattatatacaatttattgttccgcaagaggtcaatgacaaaagaaaaatcactgtggttccaaagtcatttgttagtgttgcttattattttttccaaaacagaaagcaataaagcaaacaattacatgccatgtttttacatttgttttatttaaccaagaactcagccgcgaacatcagagaaatgcatatacaatatattcagaatatagttgaattggtggttgaaatcctcacaatattaaattgtcagtgcatgtaacagcatctccaatcacactggtagtcaactattaccaaatagcattcatgaaaatgcctagcttagtgcccggcatatagttaggtgctttattcactataaatctggatatattatatagcattaaaagtcataacattttagagagggaaagaaaattagagattatcttacgcgacttggttatattataaatgagaaagctgtgtttctaattctttaacttgtgaataaatgtaatgaataaatgtgaatctgaaagagtcaatccttcaacat

SEQ ID NO: 26778 - DNA, 1703 bp, Homo sapiens
gcattcccattctttactttctgaagtaactaacagtgtttttgccacagttttgtaaattctaactaacttgttaaagtttgccatagtgatgactgagaaaagagacgaggccttcatgatgagggctttaaagaaacaaaggcatacttacaaaacaagatttaaaacatcacgattaattaattttcaagaaaattgttttcattacaaggaataacctactacagcaaaaccctgaagggtgggcctttaaaatggttcagctgactactcaccataggaacactacttttcaaaactaaagtaaaattttgagtagtttgttttggagtcagaaatcaccattactgacatagttaataaacagctggtatatcaggagccacctctcaggtgggccacttaagctgtggtacccagggaagcttcaacaagagtagacagaatgactcgaggatggctcatttctctcttcaacagtgctgagaacttttttcctttctttttttttttaaatatatttttatagagatggggtctccctatgttgcccaggctggtctcaaactcctgggctcaactgatcctcttgcctcggcctcccaaagtgctgggattatattaatagacaaacatctccttttcaatagaaagaatccttttgtcctattcactccctcctgcctcctaccgcacggtggcataagccaccacacctggtctggtgctgagaacttctgtgggcctcttacaaacatctctctctctctctttttttttttttttttgatagagtctcactctgttgcccaagctggagtacagtggtgtgatctcgactcactgaaacctctgtctcccaggttccagtgattctcctgcctcagcctcccgggtagctgggattacaggcacgaactaccacgcctggctaatttttgtatttttagtagagacgggctttcaccatgttagccaggctggtctcgaactcctgagcctcagcctcccaaagtactaggattacaagtgtgtgcgcctggccacatccccttttcaatagaaagaattctttttgtcctcttcactccctccttcctcctactcccttgaaatctgtaaggttgagagaattgttatgttagaagaaaaaaatgtattatatacaatttattgttccgcaagaggtcaatgacaaaagaaaaatcactgtggttccaaagtcatttgttagtgttgcttattattttttccaaaacagaaagcaataaagcaaacaattacatgccatgtttttacatttgttttatttaaccaagaactcagccgcgaacatcagagaaatgcatatacaatatattcagaatatagttgaattggtggttgaaatcctcacaatattaaattgtcagtgcatgtaacagcatctccaatcacactggtagtcaactatwaccaaatagcattcatgaaaatgcctagcttagtgcccggcatatagttaggtgctttattcactataaatctggatatattatatagcattaaaagtcataacattttagagagggaaagaaaattagagattatcttacgcgacttggttatattataaatgagaaagctgtgtttctaattctttaacttgtgaataaatgtaatgaataaatgtgaatctgaaagagtcaatccttcaacat

SEQ ID NO: 26779 - DNA, 582 bp, Homo sapiens
tcaccaaggtaccccctttaccaacacacaaaagaaaacagggactgcaacttcctgggtgaatgctttgttcctgttctatgttccttgtgatttctcattttccacatatttagggattttccagttatcttattgttattgatttctagttcaattgcatacattctttgatctctatacttttaaatttgttaaggtgtgttttatgggtcagagtatggyttatcttgttgaatgttccatgtgagcttgagaagcatgtacaatctgctgttgttggatgaagcatctataaatatcaattagatcaagttgattgatagtgtggcttaggtcagccataaccttactgattttctgcctgcctgatctatcaattactgaaagaagagtggtattgaagtttccaactataatagtgcatttttctttttctccttgcagttctatgtgtttttactttacgtagtttgatgctctgttgttaaatgcatgtcttattgaagaatttacccctttatcattatataatatccctgtttatctctgataatttttcttgttctgtaatctgcattg

SEQ ID NO: 26780 - DNA, 1206 bp, Homo sapiens
tcccagagagtctaagaccacatggacaggctggagtacaagttgaaagaattaattattgcagataacccttaagcaaccccaatggtgttcatccatcaaatgagtcctatagtcagattgttagctcgctagcccaccacctgtgatcacgggatgatgatgttataagaattacctgattacatagtaagtgctgaataatgacctggaacctcctggctgtgagacatatggaacttaaagatgacaaactaaaaaacttaatacaatgaattaaactgtaagaaattttacataataaattacataaactaagaaattttcaatttctagaattatcctagaatcaggaccactctctccctgaaattgtaaatagctgcagacttttgggaaatggaaaagggaagctgggtgagattgacctaatatttacagctctgagttcagactgcttattgctgattctgcttaggtctggataccttgaattttccagatctcatctttatttctctacaaatgaggagaaaaggaaaagtttttaaacaggagcatctattgttacaagcgctatgtcaaacacaaattttatgttatttcattttcaccacattcctgtttggcatcataacctccatgccggtggtaaaagttttagacttacatggactaaatagcttgctcaataagtgcagagctggaatttaaactcagatttctctgactttaaatctgctcatttcacatcttgcatcctcttccatagcaattacccggtaatatcacctctcctcgttctccctgtgctgcagggacttagtgcttgccacagtccccaattcctattagaggctagatttctttccttatactcaattctcagatgttctaccctaaacccagatctttctgttgctagttcaacactcagagttggctaatggcctgcaccttagatcatgatcaatcatttgcttcatttgttcttagatagataacatttgaggttatgtgtaagggttaagtttatgtgtcaatttggctgggctagaagatacagttattttgagagatgacagcatgctggcagcccttgctcgctcttggtgcctcctcggcctcggcgcccattctggccacgcttgagcccttcagcccrctgctgcactgtgggagcccctctctgggctggccaaggcc

SEQ ID NO: 26781 - DNA, 331 bp, Homo sapiens
ttgactatgaatttcaattgtttaatagatgttaggctaacttttattattaaattcctgtaataaatatagttctatttagattttctatttattcttggaacaatttctgaattgaattttataaggaaacaatttattactgaacttaacacaaagttgtycacaatacatttcatcatacacataattatataatgttatctaataatataatatgtaattgtatattacatatagtatatttttacaattctaagatctatggcctacaactttttacattcttgatgttggaacttttttttttattcaatcttgccaaggttta

SEQ ID NO: 26782 - DNA, 331 bp, Homo sapiens
ttgactatgaatttcaattgtttaatagatgttaggctaacttttattattaaattcctgtaataaatatagttctatttagattttctatttattcttggaacaatttctgaattgaattttataaggaaacaatttattactgaacttaacacaaagttgtccacaatacatttcatcatacacataattatataatgttatctaataatataatatgtaattgtatattayatatagtatatttttacaattctaagatctatggcctacaactttttacattcttgatgttggaacttttttttttattcaatcttgccaaggttta

SEQ ID NO: 26783 - DNA, 520 bp, Homo sapiens
ttttttcttaattgtttctgtttcatagatttagaaacactagatagctcagtttcaggccatttcattcactgatatttagtgtaattcaaaatatattgggatttgtttttattgtattatttagtactttctacttctgacatctttgctttattcctttttttctttctcatctttttaattcatttggttttttttaatcattctacttttttccccaatatttggaaattaattactcatgttcttttggtaactaccctacatgttataccacacatacttaggaagtctgaagktaatcaaagcttttattctcctcccagaaaactcaagaaccttgaaacatattagcaccattaatttctcttacccagcttatatattattgttgataggttaattactattcatttagtaaaaaatatattactgttacaaactatatatgaacagtaataaatgtaaaacaaagtaataaatatatatgaacagtaatatatttattgtatattac

SEQ ID NO: 26784 - DNA, 804 bp, Homo sapiens
ttttgtggcattacattaaattgtgtttaaaaatattccataaataatgaattattacaaaaataatttattactcacttaaaagctataaaatattaaatataaaacttaaggacaaagaagtaatttctaattcacattgcttacacaaaataataaggcctgcatcttctgttacactatggaaaagaaaatatttcacttatttcctttcaggctccaaagggcagaaagaagagtgaaaactctttaatcttcaacccccctggactagcaataactaataggaaccccctgaaagtgacatcaaaaaaagtccggaggccagagtgccagaacttctgccaagctaattattctcatggtattgaaaaatcactctcactcttgtgttgtaaaagtgggacaatcgcaatggacaattcctaatgttcttcgtggactggtagctcacatggggctttattactccccactggaacaataatgagagttcgtggtctcatggagaacctttccaccccagtcatagaagaatgaaataacttccttagtgaatttcttctatgtattctggttacycgttggtctaccatcattttatatctatggatacattaatgctatgaccacacaacacttttatgaattcgtattgggctacatattaacattgatatcacttaaaagatagtacagccatcagcactatgttctgtgctgaatttcccaccatttctctttcaccagtgtaaagaagtatacatttgtatctatagggaggtacaaacagtttggggctct

SEQ ID NO: 26785 - DNA, 563 bp, Homo sapiens
tcttaaaactcttccagcctgtacccattatccagttccagatccaattccacaatcttaggtattggttacataagcaccccactcccagtaccaatctctgtcattttatgtttgggcagccataacaaaatatcataaaccgggtggcttataaataacacaaacttatttctcacagttctggagactgcaaaatccaagatcaaggggccagaagatttggtggctggtgagggccctcttcctggttcatagacaacatcttctcactgcatccttacatggtggaaggaaaaagggagctctctcaagcctcttttctgtgggcactaacctcattcatgagggctctgacctcatgacctaatcaccttccaaaggcctgacctccaaataccatcatactggtcattaggacttcacrtataaattctggagggacacaaacattcaatccacaggatagggtctcagaaaaaagttctgaacctcactgggttccccctgccacctgccatggtggcactctgctgctagccatgttagcacacctttggatg

SEQ ID NO: 26786 - DNA, 522 bp, Homo sapiens
ctttgcccatgcctatgtcctgaatggtattgcctaggttttcttctagggtttttatggttttaggtcttatgtttaagtcttagatcatgcaatatttgcctttccatgtctggcttatttcactttacatgatgtcctccaggtttatcgatgtggcaaatgacaagattttattctttttttattttcttcttyaagtcagggtcttgctctgttgcctaggctggagtgcggttccgcgattgcacagtcatagctcacagcaacctcaaactcctggggactccagcctggataacagcgaaactgtcgctaaaaaaaactaaaaaccagattgttcttcttttttgatgtagtcatttattgctgtacacttatctcttagaactgcttttgttgcataccgtaggttttggtatatgttttaattcttgcttgtgaagtgtgtttcttctaggcaatgtatacttagattttgtgttttaatctattcaaccaatgtatacctttttttttttt

SEQ ID NO: 26787 - DNA, 1710 bp, Homo sapiens
aatggtgctcacaaaagactgattaacacatgacataatctgttgttatagatctgctttccaataaacttttacgtatttgtgctcaggcattatgttttatctatttttgtccaagatcaagtgtggtacatttaagaggcagtgagctaagaatatggttggcttattaaatgcaacatctaaatagtatacattttcttctcatcctcatcctctttcctcttcccaaccccctctcacctctgccaccacctctgttttctccaccttacccctttctccattccctccattccttatccctcctcctttatctacatcattatgtcatctaaatgttgtgtgctgaatgtgtgtaagacacctgtgataattgctacaattcatgattactctaatcctcactgcaactctgtgaggcatacgttttactgatttttaaggacaaggaaacaagaatataagcattaaattaactcttccagcaatgcacagctagaaagcagcaaaagcagaactcaaacccaggtctaatccctaattctgtgcaaataaccactaccgacttccatcatggaattacagactcagcctttggctagtttgtgaatttgtgtcactaaacttgtatgccccaggattttattttattttttaaccacctgtcacatcatcttatgatcatcttatgtctagcactagatgaaagtttgactaaaagtttaaaatgagtggatgaatgaatgaatgactgtcctatcagcatcctattatatagtcaatagttaaagattgtttaatccattcagtattttaaagagaaaaaggacrtagtttttcctagttattattcagaatgaatagcaagttaatgactagacaaatattattccatccctttaaatagctatatacttaagtggagtgtgaatcttctcttttggacttgtattaagcctcacgttaatatggttcctaaatgctaatctacagtggtaacaactgaatctgtgtttcccagcatagaagttttcaggagggaataaataatgattttggaaagggaactcagagatcttaaaaatcccctcagaagactaatctttcagaagttctctctgtgatatctgatgttgctgtagagtacaaagcttcaccatagcttggatccctgatgttcagtgaatcatgacttctgcccttccttcccgctagcctgctctcccacaccaagttgaaccactttttaattttagagaagggcatcagtagagggattccctctctcagtttcagattgataatgtaccaatttgtgcacatgcctacagtgatcacattgttgttcttactgcatagagcacccatttagatgtactatggatgtcatatcaaaagacattcagttctaataagaatgttaccttagtttagtgaaattaatgtaagatgaaataacagttcagttgcatttcatatggattcatttaagaacctactgcaagtgaggaaggtagtatgctaggtcttagggtaacttgaagatgaggacatagtaatattgtcaagaagcttaaaatatagtgggataaacagatgtgtaaatagataattaaaatgcaagaccaagtgaattaagtgctaaatagataaccagcagcctgtagggatattctattctaatttgggcttcaggaaaaaaattat

SEQ ID NO: 26788 - DNA, 536 bp, Homo sapiens
ttttttacttgttgcgtcttatttattacgtactagttcagaacttcatggctttctccaaatattaatgttattaatatttaaatgcttaaacaaatattaatgttattaatatttagtgagaaatgtaattgaamtatgatttcattgtttttgaaatcttgatttaatattgtgtgatggagtgattcaaatgcctgcttctaagttttaaatttatttcaatgctgaaaatactttctcacaagaaaatgccatttaaaacaaaagatatttatctttcagtatcttccaaaaattatgaaaagacttttgttacaattactctgtaacttttcaacatcctaaaaaatctaaattgctttttctaccaaataaatgggaggggtttgcatttgacaaatgacttaaaaatgtaacttttggggaaattttttaacacaatagaaaatttgtgatgctaaggtattttaagggtgtaattgtgagcgggtttataagtcatgctcattttcactattaagccatgttaatta

SEQ ID NO: 26789 - DNA, 536 bp, Homo sapiens
ttttttacttgttgcgtcttatttattacgtactagttcagaacttcatggctttctccaaatattaatgttattaatatttaaatgcttaaacaaatattaatgttattaatatttagtgagaaatgtaattgaaatatgatttcattgtttttgaaatcttgatttaatattgtgtgatggagtgattcaaatgcctgcttctaagttttaaatttatttcaatgctgaaaatactttctcacaagaaaatgccatttaaaacaaaagatatttatctttcagtatcttccaaaaattatgaaaagacttttgttacaattactctgtaacttttcaacatcctaaaaaatctaaattgctttttctaccaaataaatgggaggggtttgcatttgacaaatgacttaaaaatgtaacttttggggaaattttttaacacaatagaaaatttgtgatgctaaggtattttaagggtgtaattgtgagygggtttataagtcatgctcattttcactattaagccatgttaatta

SEQ ID NO: 26790 - DNA, 1021 bp, Homo sapiens
aaaatgtttggctttggaggtcatccaaagtagcttccaatggttgagcaggttcagacacagttcagataggcatcagtgtcaggaatccctttcagtgtccagaaggggcactaagacagtccagctagagggccacaaatagaggacagcatattttacgaaatctgtccatcttccacagggcatccaaagaaggtactggagagcattaggctcaaatcaagaatgctttgggtgtcctgtcatggaactgggctggatggactgggtgtagccatcagagagactctggctttagggtcaaggtgcatgactgagccagtactagagaatggggactgttctgtctgggggaattcatgtagacactgacctcatcccagcgaagtcatcctcatgtatttggctgatgggatagaggcagtttctgcacaggtgtcccattgcctacttactgagcctgtccctgaattcagacccacatccccaccctcctgggtatctcatcagctgacagttctcagcctcaagctccaacttttcctgctgatttttcaggccttacttgtctcagccacagtggtccaggccatgcttttactacctaaagtccagccgaaattcaagaccagcccatttagcagaagccctggtgactttctagccttttaaaatctttctcccccagaggcaagaagatatttccaagtactgctaaccccagtccttacatgyctacctcttgctgctgtgttccacccactaaatacaatcccctcgagaccaagacgaactcaacttaaagcttaattggatagatctctttagacattgattattagatttctagctacttcaattagaaagaaatggcctttctctatgtcttgtgtatgaaatctttgcacaactttagtcacatatacacacaactgagtgtagcttgccatctgctggtgaaatacgatatcacttttaagagagtttttttttttttttcttgttcccccctccccaa

SEQ ID NO: 26791 - DNA, 1021 bp, Homo sapiens
aaaatgtttggctttggaggtcatccaaagtagcttccaatggttgagcaggttcagacacagttcagataggcatcagtgtcaggaatccctttcagtgtccagaaggggcactaagacagtccagctagagggccacaaatagaggacagcatattttacgaaatctgtccatcttccacagggcatccaaagaaggtactggagagcattaggctcaaatcaagaatgctttgggtgtcctgtcatggaactgggctggatggactgggtgtagccatcagagagactctggctttagggtcaaggtgcatgactgagccagtactagagaatggggactgttctgtctgggggaattcatgtagacactgacctcatcccagcgaagtcatcctcatgtatttggctgatgggatagaggcagtttctgcacaggtgtcccattgcctacttactgagcctgtccctgaattcagacccacatccccaccctcctgggtatctcatcagctgacagttctcagcctcaagctccaacttttcctgctgatttttcaggccttacttgtctcagccacagtggtccaggccatgcttttactacctaaagtccagccgaaattcaagaccagcccatttagcagaagccctggtgactttctagccttttaaaatctttctcccccagaggcaagaagatatttccaagtactgctaaccccagtccttacatgcctacctcttgctgctgtgttccacccactaaatacaatcccctcgagaccaagaygaactcaacttaaagcttaattggatagatctctttagacattgattattagatttctagctacttcaattagaaagaaatggcctttctctatgtcttgtgtatgaaatctttgcacaactttagtcacatatacacacaactgagtgtagcttgccatctgctggtgaaatacgatatcacttttaagagagtttttttttttttttcttgttcccccctccccaa

SEQ ID NO: 26792 - DNA, 2216 bp, Homo sapiens
tgctgtgcttctcttctatgcaaattatcatattttgggtaaaacaatgccagcatagaatctgatattcaggcacaggaaaggggtgaagttccatttgaagagttattcctaaagcaaccgtaagtggtgggtggagccaaggaaagtggaaaagtggggatcaattagaaataaagattaagattaattgtgaacatggggcaattttcagtatgatagtggggtggagatggggcagtaactgagagcctccacacttggtgccacagtgtctagaccagtgtgcctactggcacaggccttgtgttgatagcaatccctctctctggtagcatgcattgcactctatgccacattttattaaatgattccatggcactctgctcacaccacttgcagaggttctatgcttattatccttcacagtcattggcacataagcaaagacataattgagtagggctaactaaggggcaatacatgttaatgcaacacaagtcagatttaagtgtatcccacccaaaagaaagcacttcagcttycatgtaagtgaggcttcataactattgttatttattgtgtcaacatgtatgtcatgtttgcagtaccttaaagagcatctatattcttgcacacctgaagggagtatgaggggtgtcctttcttcctttgaattgaatcctaccctaaaatcagcaagaagaattcaagggaattgaaattcaatttgtttccatcagcttcatgccaaatatggagatgcgtgagatactatttctatcctgcagatgatactaagcctagcaggtaagctcagaaaatattgaaagagttccccctatgtgccaggtaatatgccaggggtcaagttgattacaaagtttagctgacttctaagattaatcagtaagctaagtcaataaatgttccccctgaattgtagagtacatattcaattagtcatcattgtcttaaaactcatgatcagttaaagaagctacagctgccaccataaccttctcaaaggaatttctcctaaatagcgggtagggtggatatttctcccaagagatgacctgttgactgaaatatacacctcttagctcccagccccaagcctagcacctcacagtggtttcttgaaaatctttggccatcctcaggctgtcactgggttggacctccagtcataagcagtccactccgtccccaggaaaggtagctttcctgagaagctcccttggactagagctgtggttccaatactctacatctaaaaaggtgtttaaaatggagcccacgaaaacagatagtgacccatggtatgaatcctacctctctggaaaatattcaatggcttcttcaacagttcttggtcccagtaattgtttccagtattgcaagccattgtctctcaataaaacaagggctagagatggaccactattagaaaagaaaacaaagaagaggtaataagaagtgtagctcagtagctaattatgtataggcaatacaaatgcatattgttaaatagatcaaaaacatgtaacatgtaaaataatcttttaacagaggtctgtgatttttttccgttgatatgttttcaagagcatatctataaaagaatagaagcagggaaaggaagggaaggggagtgccatgattcttgtagatgtttctttcattgttcccatggtcctgctggtttatatgcccttgcaggatttcagcctcaattgctatttcagtcattcttctagaaagaaacccagcacatttctagcaactcattctttcctagaactagttaactataagattacaaaagctcttgagagtcagtcagttctctgcttaaacttcatagtattgtacaccctggacttctggtgttcaactcaatgggactccagtaacttcctctgagaccttcctactattccagtaacattccaggaagactagagaagacaggcaggtgagcagaggattgggatgggagcaggactggtagagaagtaaactcagaacatgtttacagacttgaggagtttggcagcttaaatagaaaccagacttaagagaaagtttacatgattcaaaaataaatcagactgaattttctcaacctggattctacctggtcatgttttctataagtttattaaaatagtcttcattttcatattccttgcacagtgcttgtgcttctt

SEQ ID NO: 26793 - DNA, 2216 bp, Homo sapiens
tgctgtgcttctcttctatgcaaattatcatattttgggtaaaacaatgccagcatagaatctgatattcaggcacaggaaaggggtgaagttccatttgaagagttattcctaaagcaaccgtaagtggtgggtggagccaaggaaagtggaaaagtggggatcaattagaaataaagattaagattaattgtgaacatggggcaattttcagtatgatagtggggtggagatggggcagtaactgagagcctccacacttggtgccacagtgtctagaccagtgtgcctactggcacaggccttgtgttgatagcaatccctctctctggtagcatgcattgcactctatgccacattttattaaatgattccatggcactctgctcacaccacttgcagaggttctatgcttattatccttcacagtcattggcacataagcaaagacataattgagtagggctaactaaggggcaatacatgttaatgcaacacaagtcagatttaagtgtatcccacccaaaagaaagcacttcagctttcatgtaagtgaggcttcataactattgttatttattgtgtcaacatgtatgtcatgtttgcagtaccttaaagagcatctatattcttgcacacctgaagggagtatgaggggtgtcctttcttcctttgaattgaatcctaccctaaaatcagcaagaagaattcaagggaattgaaattcaatttgtttccatcagcttcatgccaaatatggagatgcgtgagatactatttctatcctgcagatgatactaagcctagcaggtaagctcagaaaatattgaaagagttccccctatgtgccaggtaatatgccaggggtcaagttgattacaaagtttagctgacttctaagattaatcagtaagctaagtcaataaatgttccccctgaattgtagagtacatattcaattagtcatcattgtcttaaaactcatgatcagttaaagaagctacagctgccaccataaccttctcaaaggaatttctcctaaatagcgggtagggtggatatttctcccaagagatgacctgttgactgaaatatacacctcttagctcccagccccaagcctagcacctcacagtggtttcttgaaaatctttggccatcctcaggctgtcactgggttggacctccagtcataagcagtccactccgtccccaggaaaggtagctttcctgagaagctcccttggactagagctgtggttccaatactctacatctaaaaaggtgtttaaaatggagcccacgaaaacagatagtgacccatggtatgaatcctacctctctggaaaatattcaatggcttcttcaacagttcttggtcccagtaattgtttccagtattgcaagccattgtctctcaataaaacaagggctagagatggaccactattagaamagaaaacaaagaagaggtaataagaagtgtagctcagtagctaattatgtataggcaatacaaatgcatattgttaaatagatcaaaaacatgtaacatgtaaaataatcttttaacagaggtctgtgatttttttccgttgatatgttttcaagagcatatctataaaagaatagaagcagggaaaggaagggaaggggagtgccatgattcttgtagatgtttctttcattgttcccatggtcctgctggtttatatgcccttgcaggatttcagcctcaattgctatttcagtcattcttctagaaagaaacccagcacatttctagcaactcattctttcctagaactagttaactataagattacaaaagctcttgagagtcagtcagttctctgcttaaacttcatagtattgtacaccctggacttctggtgttcaactcaatgggactccagtaacttcctctgagaccttcctactattccagtaacattccaggaagactagagaagacaggcaggtgagcagaggattgggatgggagcaggactggtagagaagtaaactcagaacatgtttacagacttgaggagtttggcagcttaaatagaaaccagacttaagagaaagtttacatgattcaaaaataaatcagactgaattttctcaacctggattctacctggtcatgttttctataagtttattaaaatagtcttcattttcatattccttgcacagtgcttgtgcttctt

SEQ ID NO: 26794 - DNA, 517 bp, Homo sapiens
tgtaatgccacgctattctagaacagataaacaataagaggtatcatttcttaaagagaagtgtaggggagaaaaagtttaaaaataagaatatttaacccaggaacacgatcatatccaaaataggaataatgctgtgagtgggtagtttttactagaaggaaatctactatattggaagaagatatagtagcagattagttagtagaaattaagtaacgttcttgtgaaaatgtagaaaactcacagccccagaagaacttattgacaaacagacaaaacaggacgaagttcacacacctgttacaggttttgcaccatccctctcagtcttagcaacagggcctccacattatgataataataataacacatggggcaaatgtttgcaaagaaaatgaacatgagccagaggggcagccttgtgatctmtctactccaccttggagaacatccacagagacatgcagcaggactttttgctgcaaatacaggaagatgccatgaagggaagact

SEQ ID NO: 26795 - DNA, 971 bp, Homo sapiens
gttctgaccatgtctcttgttcacagaattttagcccattagagcaggaagggcccacagaaaccatctaacccaacaacctcaggaaaaaattaagcccgaaagagaaatgacttgttgctcaaagtcctacagttggctaaaaacacaaaagttctttgaggaaaagtggaagaaactcaaggaaaaaagaaatccatagaaagaacccaaagtagtcactgggagttgtccatggcctaggggctctaggttacattatgaccaccaggcaccatccctcattccaagctacctgctcctctggccccctaggaaccactctgtagccagttccagccattcagtcacttactgccccagggtgaatccgatgaacttgttcctgctcatctccaagaagtgctcaatgtccttctgtctgagaggatggtggaaagaccaatcccagagaagggaagaaaagcaaactttgagagagaaaaactttccgggctcctatccctccaatcagaggactggagcagtggaaaaaggcagcaatcaacagaaggaatttcaaacccaggagttctgactgccagaccaacttaacgagccttgaatacatagactaccccatcttgggcctttggagactgaaaccccgaagcataggggtccctgatgctatcaaacctacctgacctttggggcccagggcaggcccttgggaaaagccacccgctcagcagagaggggtgcctgtgagggtggaggtggcaccagagggtcctgctctagcaggtctagctctccatmcaaggttcgttctccatcaccagcagactcctcttcctcctctgtggcgggctcctcagtcttgaagagatccctttcattgtagatgtccaggctgtcctgcttagtgaggagttgctggaggggaaagaagggagggtaggcatgcagagatctcactctgggcatcc

SEQ ID NO: 26796 - DNA, 1169 bp, Homo sapiens
ttctttacctcttccagtgtcttgtaaccccaagaagtccttgcttgtgacaacataactccagttgtctctgtcttcacaagtccctctttcctctgtatgtctgtctctgtgtcctttcttttcttataaggaaaccagtcacaatagattaagggcccaccccactccagtatgacctcatcttaattgaattacatctacgaagaccatrtttccaaataaggtcacattcacaggtaccaggggttaggacttcaatgtatctttttgagggacacaattcaacccatatcaccctgtattctaaattttatccaagagactattgtctaattctggtaataagacaataatatttcttacttctgggttaataattttagtattattgactcatgcaaggataaattaaatgatcaaactttctaaaggcttaattagcttcctatggctacgatctgttccagaggttctcctgtgtataaataatatcctaattaaaatacactgaggattttctaagatttgctactgatgtcacaagtgtctagatcatgacagaggcagtgaagaaagctccaacccattcagctctctgtccatagcagcattcagagaagtactttatgaagctaaagttagttcgtaactgaatcaactcccataaataggaagtgtatacattttagcaagttataagttatacacagtgaagttatgatagcagtaaccagcatcctaatgaaatgcctcagccactgttggaaaataattgttcctctaaaatggtctggattccttttttctccactttgtctaagttctatcgatcctttgctctatttgaaattgttcttttctcaccataacctttaccacaatgtcactttcttttattaggactcttactactctttgtaaaagtcacaaagaaagagatcctgaaattgcagtttaagtccaatgatttttagcagtgcattaccaatgaagtattgtttccttagggcacaaaatctaaatactgtctgttttccttactacacagcctcacttagcactaaagctctgtatcattaggatggattccaatatgtgttttctgcattgttttgaagagaggaatatttttatattttttttttgtggaatatgattcaaaaact

SEQ ID NO: 26797 - DNA, 1169 bp, Homo sapiens
ttctttacctcttccagtgtcttgtaaccccaagaagtccttgcttgtgacaacataactccagttgtctctgtcttcacaagtccctctttcctctgtatgtctgtctctgtgtcctttcttttcttataaggaaaccagtcacaatagattaagggcccaccccactccagtatgacctcatcttaattgaattacatctacgaagaccatatttccaaataaggtcacattcacaggtaccaggggttaggacttcaatgtatctttttgagggacacaattcaacccatatcaccctgtattctaaattttatccaagagactattgtctaattctggtaataagacaataatatttcttacttctgggttaataattttagtattattgactcatgcaaggataaattaaatgatcaaactttctaaaggcttaattagcttcctatggctacgatctgttccagaggttctcctgtgtataaataatatcctaattaaaatacactgaggattttctaagatttgctactgatgtcacaagtgtctagatcatgacagaggcagtgaagaaagctccaacccattcagctctctgtccatagcagcattcagagaagtactttatgaagctaaagttagttcgtaactgaatcaactcccataaataggaagtgtatacattttagcaagttataagttatacacagtgaagttatgatagcagtaaccagcatcctaatgaaatgcctcagccactgttggaaaataattgttcctctaaaatggtctggattccttttttctccactttgtctaagttctatcgatcctttgctctatttgaaattgttcttttctcaccataacctttaccacaatgtcactttcttttattaggactcttaytactctttgtaaaagtcacaaagaaagagatcctgaaattgcagtttaagtccaatgatttttagcagtgcattaccaatgaagtattgtttccttagggcacaaaatctaaatactgtctgttttccttactacacagcctcacttagcactaaagctctgtatcattaggatggattccaatatgtgttttctgcattgttttgaagagaggaatatttttatattttttttttgtggaatatgattcaaaaact

SEQ ID NO: 26798 - DNA, 573 bp, Homo sapiens
gagagaaagagaaaaatatcttttcattaaagacaatcctacacaccctaattgattccaaatctgtgaagaaaatgagctctaggaaaaatagtcagtgcaagtgaaatgaaaatgctggtgcaatctgaagaagactttgtgtcacatgcctctcacataccacttcagattttcatggccttgcatcgttcccatcccattctttgctatgatgrcaagctgtacattggatcaaaccagatttaagtgggtgcaagttagcaaggtttaccgcaggtttaccccgcctcttttactgctgcccagggagtgcccactcaacactagactgagactacaggtttgtttctctgaacgtagcaaattgtattagttcattctcatgctgctatgaagaaatccccaagactgagtaatttataaagaaagaggtttaattgactcacagttccacatggctggggaacttacaaggcctcaggaaacttacaatcatggtggaagacacctctttagagggtgacaggagagaaaatgagagtcaagcaaagggagaagccccttataaaa

SEQ ID NO: 26799 - DNA, 468 bp, Homo sapiens
ttcagcatacatgttttaagcacatctcatgtacctagcattgcccttggccctgcccatatgtatatgaacaaagtcaattctcacccaaccaaaaagtggcctgctcagctttttcctcttcaggttaccgtgcagttcaaataccaacacagaactatttgaacatgaatattttaacctcccaaagtttgtaagcctaccttgaatcatttgtgtgtaaaatagtggtattctaaaaatagagtttcttcagagaaaataattctctttgttctgagtaagtacacagtaaaagaatgaratatttcctagtctatagtctgctttcagctcccttcttaaggaaagtaattgtccttcataaataaattatattattctgatgcaaagcacagtgcatagcaaattatatcctctcatcaaaaaataatattttcatggaagcttatttcatctttttcagaa

SEQ ID NO: 26800 - DNA, 488 bp, Homo sapiens
aagattaacttctctaagattgcattcaaggctattcataggcttgatactgatcattaatctcttatacatggaccaaactcctcaagtcatttttcattcaatacattaattaggtccatagttaagaaggggatgactcggtgtggtggctcacacctgtaatcccagcacttcgggaggccaaggctggtggatgacttgagaccaggaggtggagaccagcctgggcaatatggcaaaaccctgtcactacaaaaattacaaaaattagctgggcttggtggtgcacacctgtagtcccagctatttgaggggctgaggtgggaggattgcttgagcctgggacatcatgcctgcagtgagctctccagtctgggcgacaaagygagaccctgtttctaaaacgaaaaaaaaaaaaaaagaaggagaatttgattgtaggaagactcgttttcatggagactacatgtgtttggggtaaaaaa

SEQ ID NO: 26801 - DNA, 550 bp, Homo sapiens
taattagactgcaaggctatgtttgggcctcccatggttttgctgcaaacttgaaaaatgattcagagaascatgcggtgaatttgtcaggtctaccttgtttctttttattccaggagtcacatcctaagctgcccactatccaatatctgaaccatgttgtttcacatattttctaagttttatcgttgtttatgatgggagggcaagttctgtccctggtactcccttttggccaaaagcagcagtttccaaagatgctatttttatctgccatctacctgattcattgcctaacatcgcaaaatttttcagaagtaggtgggaaatatcgctgttttatttttgctttttacccaaagaattcaataatgtctcttgaattaaaaaaatttttttaaatattttgagaaattttcattataaagctagttaaaaattagagaactttagtcacacagtggcaatttgtgatacctaaaacttacccagagagatcatgaatataattcattattcttccttaatgaacaattagttaacagaaaat

SEQ ID NO: 26802 - DNA, 550 bp, Homo sapiens
taattagactgcaaggctatgtttgggcctcccatggttttgctgcaaacttgaaaaatgattcagagaagcatgcggtgaatttgtcaggtctaccttgtttctttttattccaggagtcacatcctaagctgcccactatccaatatctgaaccatgttgtttcacatattttctaagttttatcgttgtttatgatgggagggcaagttctgtccctggtactcccttttggccaaaagcagcagtttccaaagatgctatttttatctgccatctacctgattcattgcctaacatcgcaaaatttttcagaagtaggtgggaaatatcgctgttytatttttgctttttacccaaagaattcaataatgtctcttgaattaaaaaaatttttttaaatattttgagaaattttcattataaagctagttaaaaattagagaactttagtcacacagtggcaatttgtgatacctaaaacttacccagagagatcatgaatataattcattattcttccttaatgaacaattagttaacagaaaat

SEQ ID NO: 26803 - DNA, 550 bp, Homo sapiens
taattagactgcaaggctatgtttgggcctcccatggttttgctgcaaacttgaaaaatgattcagagaagcatgcggtgaatttgtcaggtctaccttgtttctttttattccaggagtcacatcctaagctgcccactatccaatatctgaaccatgttgtttcacatattttctaagttttatcgttgtttatgatgggagggcaagttctgtccctggtactcccttttggccaaaagcagcagtttccaaagatgctatttttatctgccatctacctgattcattgcctaacatcgcaaaatttttcagaagtaggtgggaaatatcgctgttttatttttgctttttacccaaagaattcaataatgtctcttgaattaaaaaaatttttttaaatattttgagaaattttcattataaagctagttaaaaattagagaactttagtcacacagtggcaatttgtgatacctaaaacttacccagagmgatcatgaatataattcattattcttccttaatgaacaattagttaacagaaaat

SEQ ID NO: 26804 - DNA, 539 bp, Homo sapiens
tgttctttttctcagtgcaatgctctttgtatttcaatatcttgcttcctcattcctcaaaagattcagagaaagaggactagtgaccaagaagcctacctttttaagagagttttgggctattacaaatrttaggagtcttggcagtcattgatccacccaaactcagccaaccctggctatagatcacagacaattgggtccagggccagatcttaacaaaactgtgaagtatttgaggtttcaaagtttgtcttggcctcttcaattgcctttgagagccattgccttccatattcttttttgccattcccccactcactccattaaattttcttttgttctctattgctgcccttggtgttttaaatgatgttttggttcttaggaatgagagatgtgtgtgcatgtgtgtatgtcagtgagtgtgtgtgtgtgtgtgtgtgtatattgggaggagacttattaatgcttcttagaatctcatcacatgtgaaagtagcgtccactgcctcttgctcattatttcataagaacca

SEQ ID NO: 26805 - DNA, 639 bp, Homo sapiens
ccctgtctcaagaaagacagaaagaaagaaaacaagcagaaggttccgggtgggagctgagaggctgcattcctagtgaggccccgccgctgctgctggtcttgcgcatgccctgcaggacagcttcaccagtgcttctcacttggttgcatgtcagaatcactaaggggcctttctaagtcccaatgcccacttcagatccctcacactgattagaaccacaatctctgggggtgcgacccagacatctaccttgaaaaaaatcttcctaagagatttcaacgtgcagtcaagtctgagagcagtacttcaggttttcctgtggtggtttttgtttcttttaaatcagaaaaatgccttcccttcttcatacctaaatcctcctcaggcctggagcacagccatgagtgacacagcctgcagctcctgggcagtcagggctacaccaggtcccacgggcagccagggaggaccagcctgaggtggcgcccagctgttgtaccctcacagctcctccacagctgactccayaacctgccagggcttgcaaacaaggagaggccaacctctcacctttaggctgttcttgaaggcgccagcatcagaatttacttcatttgcatatttcaggactctgtc

SEQ ID NO: 26806 - DNA, 866 bp, Homo sapiens
aaaggctagggagggcctgagaggggcagagaagacacagagccctgagattgagtgtacattttaacaagaggagctatctatgtccaaagcagttatagaataacaacgttcccatcttgtcaccagggagtttagaggcagaggagaacaatgagagctgggagtggccaagaaaggctgcacagagagcctggggtctgagaggggcaggacctgagtatccagaggccttgggagcccgatcttggggagaggctgtcctgagggaggggagccacaccccctgagcacctgcctggctgacctgtagccagacatccacacactacccgatgctcccagcaacttgaggagaggccctggaggcccattttgcaacaagaggttaatgattgcctaagagggaagtagggtctggtcccaggtgtggagagtgtggcaagagaggagacaagccaggtatggagaaccaggaagtgaggcagaggagggattggatgccttcaaagtgttggggtacctggggtcttgaggaagagattgcatgacttcctgaggccttgtatgcagcttgtgctagagtgcaggtgcggagagtctgggaacttgtaggaagctgtcactccaatgcagggctgagtgtgaatggataagtgtgggagggccctgagccccagagacagcaaagggaccaagcaggattccagagacagagcctctggagggcaatgtgtccagagcctgcgccagcaggagtggctccagtagcctccagtttgggtctgtgtctgccaagtggccaaccaaagggccagggamttttcctcaagcttcttggggtctttcccagcctatcggtgaat

SEQ ID NO: 26807 - DNA, 760 bp, Homo sapiens
ggagcactgattcatacgttccaagctcatgggagggagtggcgtaaatccaggcctctcaaacttcaatatgcacaggaatcacggggggcgcctggggatgggaatctcctgaaaaatgcagcttctaatttagtacagctgggctaaggcctgagattccgcatttccaaccagctccccactgcactttgagtagcaaggatgtacatcggaggccaatttttctaaacttttggtacctgtcaccactggtttcctcacaacccaaagactgcttagggagcatggtggcccagaaaggggactccgccttccagggttgctgggtttcctgcagacctcatgtcttcctgcctttctgctttcaccttctatcagcctgggcctgtcagtggctccggttatacatttccttggttatgttcccagcctgaagggagacctgctgacttkgggtttctctgtgtcccagggttttcccagagattcattaggaagcaatcttaaagggcgggcttcttcctctgacggctaacctagtcctttttcactaattcttcccagtttcagtctctgtgggtgactctccaagagttggaatgcactggtcacggtgttgacaacacagataagaggaatcacatttagaaataagtaatcccatgaggcagccagagagatgggcagtaagaggctgagagatgctcttggagcagggtcgtcagtgagcaccgacagctggagtgggcagcgctgg

SEQ ID NO: 26808 - DNA, 2859 bp, Homo sapiens
atcctcttcaccagccgccccatgaagaactcggagccgaagagctcggaggggatgaaggccccatacttctgcagacccacctcgtagggggagaactcgaaccactctgcacatgaagcagcaggacgggggtcagtctcaggccrgggagccgtccacatagccgggcccccctcctgcctgcagccactggctcaggccttggaaagcctgggacagggaggccgcagttcccccaaaggacacatgggggcacccttggccagcttctgctggtgtagcaagggtcagctttgccatgctttgcaaggaggatggctcatttgcacctcagagcctgttgaatgggacaaaaactgaccctgaagcagggcagctctctcgagtctctctctctctgggcagcgtagaaatatcttcctttcacaacctttgtcttccccagtgtcattaaacacatgcccagggaagctgcagacagtgcctgccggcctcacccatgcagcagggcagattggggtagcaaaggtgatttctccagctgtgtgcacagtctggatgtagaggttgacaaagatgagtgggattgggggacctggaggtgctgggtgcttttgcccaccaagaagtccccccctccaccccacttgtaaatcaccagccactggtgttacctctgaagtcctggttgcttacatcatccttgacattgatggtgaggtagatgggcagggggttctggccgcagctcaaagcagcacgctgatctgacagtttgcattcatttctctgtggggaaacaaaatggttaaagagaagcagcagcccagagggtgagggaggcagtgcagaatgagaagacaatctggacccccgcagccacttcctggctcctgagctcaccgggctgctgtatcggccccagctgacaccagccaaatcactctgaaagggcaccaatggcataggcaccaccccctcgggctgcccaccaccagacaggggccgggactggatccgcagtttaggacagtctctcagagtcccagggtcttggtcttaggggtcagcagataaagaggaaggggtgggagaggctagcactgcccctcttctgccccatcgtcttccctctgctagaactggagcagctccatgtttagcatctccattttttaaaaaaaatcagcttggcatgttgagctccctcaactgaggggtaaaaagttgggggaaaagaagtttcccttcctccgctcccctgccctcccctccctccctcccctcctcttcccctcttcttttttttttttttttttaacaaaagacttaggacttgaacactagatggttgctgaggtcactctaatccccagagtggggagcctttcagatcagcccgggccacagtccacctcccaaagtgaatcagccactgcaaacgaggcagaatcaaggtcttagaggcccaggctctgaccccaggccaagcagctgactcctgggtgaccaaccctggtcaccccagtgtgcaaaggctacagaacccgtgtggaatggcaaacacatgtatatgcccaatgacatgtgggtctcctttgaaagaaaacagggtcataactgggcccagagatctgggcatcacagagcccactgtcctggaagtaaagctgcaggctcagggaagagccggtccacattcattgtcaaggtggcccaagggaaaggggctcctgtcctggccagagcgcaagagcagaggcctctcaacaacaaccctgcccttgctttcctgggaacccagctccttcccaccaaacccccagaatgctgagactcctgatgtcggaagactcggtgcttcctcctcatcatatgcggcactcatgattgttacaatattgttgaaaatgttaactagcacttattgatgtaattcccacttaaggaatagtaaagagcagggcctgaatttcaaacccatcctgactgaatcccaaggccgatgcccttggcctctgcctgctctgcttcatagggaggacaggttaagtggtgggttatcacaggggcagggtgggtgggatccatcagaagtggcgagggcctggggttggaagccatgtccgattcctttctgaatccccatttgccagcgcagttcctggcatgcaggaggtactcaagtaatttaattgaaggaatgagggaagattgaagatgagggtccggtcattctcaggtgctcaaactgtctggctttctggaagatggaacctactattataaaaaataattgctgcaatgactttctggcaagttctgatttgaattcagaactccccggacacctttggagtggagcagggaaccgtgggcctggacagaggtgggaagctctcctttggggccaggcaacaacaaaagttgttaatctcggcttgtgcaacctaaagggcacagatgtcagctgagcccaccctgatgtccaggatcgcaacaccccttggagatccctgtgctgtgccatgtgtccaggaaaaggaccaccctgtgctgggtcgcagctctcacagcagcagccacccaacacaggctggtcctcttcttgggcacgtattagtcagatcgctggatctcagaataggaaggaacctcattgggcccactggtggccatgagaacgggccctgcagacctccaactgcagagagtgttattgactgaggaccccagctgctgtgctctgaaatccacagctgagtctgtgctgaggctgcacttcctgtgactgagtggggcagggatactgaggctggcccgttctgggagacgcgggactcctgtgacagccag

SEQ ID NO: 26809 - DNA, 1227 bp, Homo sapiens
tcccatgaaagagcataaaaatactgtatttcgtagcccttatctctggagacatttttgtattcctttgttccaatcattgccttggagaagttcactgtctcataagaggaatcacaaaacaagaatcatctcagaattgtagggatctctgtgcaaatttgtctaacatcttaccaaggcagatgtcttagtccrttttgtgctgtcatggtagaatacctgagactgggcaatttataaagaacagagatttgtgtcttacagttctggaggctgagaagtctgaggttgaggggcccacattctgtccagtgatgagtagcttgtctactcataggctgcccattccactttgatcaggctcatttactaaacattcactgaacagtttgtcttgacattgtgtgaggttactggagataccaaagggagcaagatgaacgtggtctgactctcatcccgctcacattagaatgttcttctatttttttttattgaaactttgtctatttaccttaggctcattcattctagttatgacctcagagtcataaagaatgcacagcactgtgcactgtgccaaaagccctattgccttcatttcttttactcctcaccagaatcctatgaggcagggaacatcactgtctcaatttcaccactgaagaaactaagacttaaaagggtaggtatcttgcccaatatcatatagctagtatctgtttctccattcacattaattaatcattcattcattcaacaaacattggttgagaatctactatatgctttggcaatgttgagaaaatttgatagctgcccttaaaaactcacagctcaatgggggaagaagtcaagcaaacaggtctactgcagtgtgctgtgctgtgtgagggagctgtgctctgcggcgataacagctagcaggtcggtctctcacctggttgaagagtccagtcaggctcctgattagcacagtggcccctatcggtctctgttgcacctcgtccctccaatccacccaccaccctgcatctggagtgatctgtctagactcacagtcaagatctgtctagactgatctgtcgcattcactcatttttcattcagctaacaaatatttttgagtatctactttgttagcccttggagatacaatggtgagtaaaccagacttggctgggaccttcacagagcttgcaaggcaggtaagaaacagaaaca

SEQ ID NO: 26810 - DNA, 706 bp, Homo sapiens
gccatccatatcactgacaccagctgtttctgttaagagaaaaagtgtaatcatttttcttgtaaggattcttgcatgaattcatgaatctgatgttgattttgtctctgctcaatctagttgaccagagtcatgactaccagaatttttaaaaaatatgtagagtcagttctccctcttgtataacttgaccatcctccacaattgctcacagcctgaggcagcctgaagatgttttacaaaaagtctgtgagccaaaaagtaatcaatcaaaacatatttaagaagcattataatcgacctcgaagggaaaagtaaaggatgtacaggcagactccatctgtgactaggttatcaataatagttgtttgaccttttgtgagttagcaagcatatatacaatgttattgtggcaaacaatcagccaactctagaaagtcattttatccaattacatatctgaaaagaaaattgataatctaaaagaaactgatcatgacatagaaaagtgtttccacattaaaaytggtttccagttccaagtcggtatgcctgagccagtgtcttccttatgtctccttcttccttcaccttccaacaggagctgaacagccctgcctcaacacagcaaaggctgagatttcagagacttgagggctattgggagctcagaacatggcatcaagtcccaaggaggaaaaactat

SEQ ID NO: 26811 - DNA, 526 bp, Homo sapiens
taacagttgctctcaaaactatcaaactcccctgaagaaaaacagggtctccaagtagttatgaagaaaagatttatgttagaaagtttcttaacttttgttttcaaagaaagattctagaagaaaaaaaggagtatggaaaataattcagtaaaaggtgatagtaataaagcaagtaagatggctcagaaaaaagagaaatgtcaccactgagtgtcctaaagattagcatatacagcatcagagtgttctagtctttcaaaaacgtctttttatggtatccacagagaaaaataactattgaccaaaaaaagtcatatttacgtgtctgggacctggatgtggggagcattagtcattcaaagtatgctggaatttggctggtgtggtggcttgtacctgtaatcctagcaatttggtaggccaaggtgggcaggttrcctgagctcaagagtttgagaccagcctgggtaacatggtgaaactccgtctctactaaaatacaaaaaattagccagcatggtgg

SEQ ID NO: 26812 - DNA, 901 bp, Homo sapiens
acattaagttaaggataactaaagaagatcctcatgaaaaaaaatcctttagaatctagatcagagttattgacttttgtctacttattttcctttctttgaggatcttcctgaatttacctatttgaattttttwaaaaaaaaatcacagttcatggcaaagctaaaaaaaagttaatatcaaatatatgtatgcatgtacatagcatgtgtgtggtttagggtccatgtggggaaattaatgtgggtagttcacaggcttattttcaaagacaaggcaaatatctcaaaatataaatagtttatatatccagtttaatatttcaatttcgtgtatgtatatatttaaaagacatgggatatgggaagaaaagtgatagaaaatagagcaaaatagcatataataaaggaggtaactaaagaaatgaccacagggaaactgaatttatcaattgaactctacttcaactttaacatgttattaaaaaataaaaagtaaagttgctacaatatccaggaggaaaccaagaaagaaacaaaccaaacaagagtagttgaaggaggaggagtagattagttgaaagttggggacagaatggaggaaggtattgttaaatgggagtgagattaaaagtagtcattcatgaaactaaaaaactctagtctagccgtgttattatagataagaaaaatgatcaaagaggttaagaaacgttttcaagtttaaaagctggcttagatttaaaaaagacagaaagcacaaagagcaaaagtatcttctgctctttccagcataccagaatcctatgttaataataaaaacaatatggcaatcaacagaatcctcccaacaaccaccgcatgatccgtaaactgtgctggcttcttatgaaagctcaac

SEQ ID NO: 26813 - DNA, 807 bp, Homo sapiens
atcgtcctgccccwagcatggaaaaattgtctttcatacaaccagaaattgatccctggtgccaaaaacattgaggaccactgctttataaccatgtgtaaggtggtgtcaaatatctttttgatgtttatgagatccaagaaacattctttaattatgatagtacttcatgcattttggttatttataacatattgttattttattgcctgtttcctcattatacattagtgaagtattatgggagacattgatttgattcacaacaactgggaacatttagtcctcattattgtactacttctatttagatttgtctacttttaaagatataaattaatggacaaataacttgggatgctttctcctttactttttgctctgttttttaatagctctccaaattaccctattcataaaattaattttcatttttgtatcaaagaacatttacaagaaatgaaataccttaaaatgtgactcccagtcgggtatggtggctcgtgcctgtaatcccagcactttggtaggctgaggcaggcggtcacctaatgacaggagttcgagaccagcctgaccaacatggtgaaaccctgtctctactaaaaatacaaaaatttgctgggcatggtggtacgaacctgtaatccctgctattagggaggctgaggccagaaaattgcttgaaccctggaggcggaggttgcaatgagccaagatggtgccactgcactccagcctgggtgacaagagtgagagactccatctcaaagaaaaaaaaaaaaaagtgattccccatcactttat

SEQ ID NO: 26814 - DNA, 598 bp, Homo sapiens
agcagctggcaggagggcaaacccaacaacctgtaggtctctcacaaacatgctgtattacagggaaatccctgacacgtgcgaatgtctgtacttcccctgggattccctcttactagaaggagcacaactttaagtagggattttaaaataccctgagcagtcaagagagagacaagaagaaagagggggaaaagtttatacaatattttagtrtttgtaattttcttcctgctttttgaacgcagggccccacatttacaatttgcattgggccccacaaatcacgtagccaactctgttacaaggaagtgcttctctataatttctaaaaaagaataaatacagaagaaacaggctgctgcaaccacccccaaggctataaacgatattaattttcacccctgatcatttccattctagattccccttgctctcaggcaaagttgcagccagtctagtttgcttgcctgattggggaacacaccttcaaacctgagtggcatgtgctcttgattgccttggctttcccatgctctggttgctgcaattgcctattcaataagcatggaagcctggagaagtgccccagtgactt

SEQ ID NO: 26815 - DNA, 598 bp, Homo sapiens
agcagctggcaggagggcaaacccaacaacctgtaggtctctcacaaacatgctgtattacagggaaatccctgacacgtgcgaatgtctgtacttcccctgggattccctcttactagaaggagcacaactttaagtagggattttaaaataccctgagcagtcaagagagagacaagaagaaagagggggaaaagtttatacaatattttagtgtttgtaattttcttcctgctttttgaacgcagggccccacayttacaatttgcattgggccccacaaatcacgtagccaactctgttacaaggaagtgcttctctataatttctaaaaaagaataaatacagaagaaacaggctgctgcaaccacccccaaggctataaacgatattaattttcacccctgatcatttccattctagattccccttgctctcaggcaaagttgcagccagtctagtttgcttgcctgattggggaacacaccttcaaacctgagtggcatgtgctcttgattgccttggctttcccatgctctggttgctgcaattgcctattcaataagcatggaagcctggagaagtgccccagtgactt

SEQ ID NO: 26816 - DNA, 798 bp, Homo sapiens
gtccaagcctctgatttccagccctcaccagcctctgggcacctgtctacctgtctatctcctcgtccccataaagaccagatgacacttctttttttttcttttttttgagacggagtcttgctctgtcacccaggctgaagtccaatggcgcaatctcggctcgctgcaccctctgcctcccgggttcaagagattctcctgcctcagcctcccaagtagctgggactacaggtgtgcaccaccacgcccagttaatttttgtatttttaataaagacagagtttcaccatgttggccaggcttgtcttgaacccctggcctcaagagatcctccgcctgcctcagcccctcaaagtgctgggattacaagcgtgagccaccatgcccagatgaccaggtgacacttctaatccagccacctggtctctcaccctgatggcttgtcacacattccctgacccagtcctgcccatcagccaagccagcctctgttccaggcgctcagaatatcttcccaggggcacctctggtcacattcgtcctgcactccttcccaccaaggctcagctttccttcctggtgattgaggcctttctggctcaaatgctctgggcgacttctcctttccarccccatgtgactatcctgcctccctgtcatcttccctccttccactgacaacttctatttgtcctccagggcctggggtcctcccagaggaggcccagcagcctcaggtgttataggcccccatgtccactggacgctctccacagctgagcttgtcactcatcc

SEQ ID NO: 26817 - DNA, 643 bp, Homo sapiens
agaagggagcagcaaagcggacaattcccaaagagctctgttgcaggaatggaaggggaaacctctgaggttactattgtgtgtgtgtgtgtctgtgtgtgtgtgtattatatatattatattgcatgtaatayataatgtgtatacatgtatatacacatattgtatatacatacaactatgtatatattatatataataatgtatataatactcatacaaaattggtaagtgtactatttttctatagtatctcttggtttgcctgccacatcagatctccctctaacctgatcccacatttccagttcttccatctctccctgttttctcctcacacattgtctctggtccaatgagaccatcccaaccagtcacctcaccccactgcgattcatacctctcagcttagggcccctctgcccctttcctcatcctttctgtttgaaaattcggggcttcaagacccacagggtgcctttctttctacagcatttttgtaacatataatgaatacacatatcatcctgacatgatttgtttaccttacaatggtgcaaaaccattatttttcatgttcagtatcatattcaacaaattacatgagttattcaacagtttattataaagtagtctttgtgtt

SEQ ID NO: 26818 - DNA, 620 bp, Homo sapiens
gcgggagtcacagggcctcaaggcttatctcctccagggcagttttatccctgccccaggaaggaagtatgtggtaatatatttcctggtctggctgctggtcggaatttgtgagggtgattgccaaatgaattctctatatgtaatccagatatcaactggcatttcctgctcctgtgatctagataagagaggcctagcaagcaggccacttgccgtaggtgccgagtttatggtccgcatcacttttttatgtaggctgaacctggcccacatgacatctgcccagatataaaattccacctcttccttgatttccacctaaaatgtcactcacctgaggcaaggatccatggagatttgaaggagacatgtgagagtacgcttcagaaaggcacgtcctcctagtaaatgttcaatactgagattcttaaatgtttcctcatgcccaagtctgtatgttctacatycttgagagggaacctaataaaaggagttatttttctcgacaaatggagtttataaaaaggactttgagatctttcaaaatatgatctaatataagaatcacttatttttggaaacacatttgtttattcattcacagttacattcattcc

SEQ ID NO: 26819 - DNA, 627 bp, Homo sapiens
ttgggtatcttagagctaaaagaatggctaagagtccattaatggtcctgtaatattcaccatccctgagcagttagtaaagaatggccgcaaagccacaattaggctactaacaaggaacttatgtagatgtgctaggtccagcctgtgttctggaactatagagatgaataaggtatggtcctttctctctggaggctcacagttgaatagggaatattaatacgtgaatgatagcagtacagtgtggcagatgctaaaatatatgtgtgtagcagctattacaggagaactgattaatagggagagtctggctgggctcagtgactcacccctgtaatcccagcactttgggaggccgaggcgggcagatcacttgaggtcaggagttygagaccagcctggccaacatggtaaaacctcatctctactaaaaaatacaaagaaaattagcaaggcgtggtggcgggcatctgtaatcccagctactggggaggctgaagcaggagaatcccttgaacccgggaggtggaggttgcagtgagctgagatcatgccactgcactccagcctgggtgacagagtaagactgtctcaaaaacaaaacccaaaatactaaccatattt

SEQ ID NO: 26820 - DNA, 549 bp, Homo sapiens
agatgaggttgaacagatacttgctgaatgaatgaatgaatgaatgtcttttaaagctgttctgctcttaatttttctttgttttcctcttgagtcaggaaaaaaaaaaaaaagcatgccttctcaagcatcaggttggagaatgggaaacaggccaggatggttgacgtataatctttagaaatctgggaacaaagatcaaaagagacaaagaaggccattacataatggtaaagggatcaattcaacaagaagatataattatcctaaatatatatgcacccaatacaggagcacccagattcataaagcaagtccttaaaaacctacaaagagacttagactcccacacagtaataatgtgagattttaacaccacactgtcaacattagacagatcaatgagacagaaggttaacaaggatatccaggacttgaactcagctctgcaccaagtggatctaatagacatctacagagctctccacctcaaatcaacagaatatacattcttctcagcaccacatcgyacttattccagaattgacc

SEQ ID NO: 26821 - DNA, 1202 bp, Homo sapiens
gcatacctatagtcttagctactcaggaggttgaggcaggaggctcgcctgggcccaggaattcaagggtgtagtgagccatgctcgcaccaccacactccaacctgggtgacagaacaagtctctaaagaagagaaaagaaacctttttgctacaataatacctttttttttgagatggagtcctgctctgtcgcccaggctggagtgcagtggcacgatctcagctcactgcaacctccgcctcccgggttcaagtgattctcctgcctcagcctcccaagtagctgggattacaggcacctgctgccacactcagctggtttttgtatttttagtggagacagggtttcaccatgttggccaggctggtcttgaactcctgacctaaggtgatccacccrcctcggccccccaaagtggtaggattacaggcgtgagccaccatgcctggccagtagtgctttttcttaaccctttttgctttgaaattgtattacttttcttaactttgacaccttggctatttaccagctgaagttgaatgaatttcttgtcttctccatccttcggtgtcctcatctgaaaagtaaggatatttatcagcagccacctcattggattgtctgttgagttaaatgagataggctctagtacctgggacgtgataactgcttgctcactattattctggcagtcttctcctctctagccatccatttgcatctttcccctttacgtgcttgtaccttcacttaggttaggaaaaatggtttatgtctcctaaatgggcaaccctcttcacaaacttttaaaaaactttttgtttttaaatgattacagactcacaggaagttaaaaaagtagtacggagaggtcctgtttaccctctactcagttttccccaaaaacccagaaaattgccataaatctgagtcacccacagagcttattcccagatttccctgttttacatgcactcattggtgaagcgtgtccatagttctgtacaatttgatcacgtgtagatttgtgttaccactaccacaatcaagatacagaattggctgggcatagtggttcacacctgtaatcccagccttttgggaggctgaggcaggaggatcgcttgagcccaggagtttgagaccagtctgggcaacatggcaaaaccccatctctacaaaaagtacaaaaatcagc

SEQ ID NO: 26822 - DNA, 1202 bp, Homo sapiens
gcatacctatagtcttagctactcaggaggttgaggcaggaggctcgcctgggcccaggaattcaagggtgtagtgagccatgctcgcaccaccacactccaacctgggtgacagaacaagtctctaaagaagagaaaagaaacctttttgctacaataatacctttttttttgagatggagtcctgctctgtcgcccaggctggagtgcagtggcacgatctcagctcactgcaacctccgcctcccgggttcaagtgattctcctgcctcagcctcccaagtagctgggattacaggcacctgctgccacactcagctggtttttgtatttttagtggagacagggtttcaccatgttggccaggctggtcttgaactcctgacctaaggtgatccacccgcctcggccccccaaagtggtaggattacaggcgtgagccaccatgcctggccagtagtgctttttcttaaccctttttgctttgaaattgtattacttttcttaactttgacaccttggctatttaccagctgaagttgaatgaatttcttgtcttctccatccttcggtgtcctcatctgaaaagtaaggatatttatcagcagccacctcattggattgtctgttgagttaaatgagataggctctagtacctgggacgtgataactgcttgctcactattattctggcagtcttctcctctctagccatccatttgcatctttcccctttacgtgcttgtaccttcacttaggttaggaaaaatggtttatgtctcctaaatrggcaaccctcttcacaaacttttaaaaaactttttgtttttaaatgattacagactcacaggaagttaaaaaagtagtacggagaggtcctgtttaccctctactcagttttccccaaaaacccagaaaattgccataaatctgagtcacccacagagcttattcccagatttccctgttttacatgcactcattggtgaagcgtgtccatagttctgtacaatttgatcacgtgtagatttgtgttaccactaccacaatcaagatacagaattggctgggcatagtggttcacacctgtaatcccagccttttgggaggctgaggcaggaggatcgcttgagcccaggagtttgagaccagtctgggcaacatggcaaaaccccatctctacaaaaagtacaaaaatcagc

SEQ ID NO: 26823 - DNA, 547 bp, Homo sapiens
aattccagtaagatttttaaatggattttttaaatcacagaagtatagtctaaaccttgtatataaaaatcaatatgattttccaataaaattctgaaaaaaaagagtaattaaggagaactggaactgaaccaaccagatattttaaaatattaaaaccttcaaaaaataaaataatgctacacatacatcagtagaaaggattagaaagttgataaataggccaggcatggtggctcacacctgtaatcccagcattttgggaggccgaggcaggcagatcacctgaggtcggagttccagaccagcttgaccaacatggagaaaccctgcctctactaaaaatacaaaaattagctgggcgtggtggcacatgcctgtaatcccaggtactcaggaggctggggcaggagaattgcttgaaccagggaggcagaggatgcagtgagctgagatcgtgccactgcattccagcctgggcaacaagagtgaaactctgcctcaaaaaaaaaaaaaaaamacaaaaaaaaggaagttgataaataga

SEQ ID NO: 26824 - DNA, 570 bp, Homo sapiens
gatttactcgggctgttactacctttttatttaaaatttgaggagcaaataccgtctgaagcacacaccctttaaaggttaaaggcctgcagtgtgaggagtgagccaccagagggcacccgagccccacaactcaccctggtctaaggcccccgcaaggcccagcccagggaggccgtgcagcgcgtccaggagcctgcggcttctgaggtctgatcccaggaaagaattggacacttatttaaaagccgggtacggtagctcacgcctgtaatcccagcactttgggagggcgaggtggaaggatctcttgagctcaggagttcaagaccagcctgggcaacatggcaaggccctgtctctgcctaaaaaataaaagccatggttttcccatctctaccaatagtgagaggtgtggctattgaaaaaatgtcatttgtgtggatagagcccaggaagaaaaagggttggctgattggattaaagtgttatcctgcccagtggtggatgtaataagatttaaaccaaaacaattayctctagagtgaaattttaggcatcaagagatga

SEQ ID NO: 26825 - DNA, 527 bp, Homo sapiens
tgcagatatagaaattattggtaaatatgatagaaaaatgttgatatagtaaatttctgtgccaaatatttgaacaattctctgagtaatgctcagtgcattcaataatgtttttcctgcttttgtattttcttaccaagctcatagtgattcagaaggagaaacgcagcaaatgacaaaaacataaacattatgaaaatcatagatatgatttcttcagcaaaaaaaamcccacatctcacagaattactcatttgggccacattttaaaggttatcctaaatgtatcttgtgcattacatattgtaattctaacattatcaacaccatagttttgcctcctctgcttaaataattctgcaactgtagttttaatttactgtgacttgtgcttacctgaggaagggatgccaaggacgatgagaaccagcataaaatctgggagcatcgtgatgtcagtttcagaaagacagtttcttcctttttaacaacagagcatttccactggaaaagggggttttgaaaag

SEQ ID NO: 26826 - DNA, 527 bp, Homo sapiens
tgcagatatagaaattattggtaaatatgatagaaaaatgttgatatagtaaatttctgtgccaaatatttgaacaattctctgagtaatgctcagtgcattcaataatgtttttcctgcttttgtattttcttaccaagctcatagtgattcagaaggagaaacgcagcaaatgacaaaaacataaacattatgaaaatcatagatatgatttcttcagcaaaaaaaaccccacatctcacagaattactcatttgggccacattttaaaggttatcctaaatgtatcttgtgcattacatattgtaattctaacattatcaacaccatagttttgcctcctctgcttaaataattctgcaactgtagttttaatttactgtgacttgtgcttacctgaggaagggatgccaaggacgatgagaaccagcataaaatctgggagcatcgtgatgtcagtttcagaaagacagtttcttcctttttaacaacagagcatttccaytggaaaagggggttttgaaaag

SEQ ID NO: 26827 - DNA, 515 bp, Homo sapiens
aagactggagtgttgcsatattaatagttccgccgcgagttctgtgcaaatcccttgggagcttggtttcttcatctgtaatgaaggggttggactgaggtcgcttttagctctgacaaactataattttgtgatactgattaatccatgaacgtcaggtgctgggaatttggctgccccgtcgggtttctgatgcacatcaagctccgtgtgaagtaactgatgaagacacaggctggcaggatttctgaggcaaaggacaaaagtaatgaagctgggattggggtcggggagggtagatccgttttttatctgctccatttcaggtaaaggtaagccctttccatatacggttttgaaggcatgtggaatacaaaactggaggtttgatggagaagccacaactagaagtcacgttggggatcattggcaaaccagattcaacaaatatttattgggcacccggtagtgcaaataaatagtcatccatgcattaaacaacatgcttttagcat

SEQ ID NO: 26828 - DNA, 515 bp, Homo sapiens
aagactggagtgttgccatattaatagttccgccgcgagttctgtgcaaatcccttgggagcttggtttcttcatctgtaatgaaggggttggactgaggtcgcttttagctctgacaaactataattttgtgatactgattaatccatgaacgtcaggtgctgggaatttggctgccccgtcgggtttctgatgcacatcaagctccgtgtgaagtaactgatgaagacacaggctggcaggatttstgaggcaaaggacaaaagtaatgaagctgggattggggtcggggagggtagatccgttttttatctgctccatttcaggtaaaggtaagccctttccatatacggttttgaaggcatgtggaatacaaaactggaggtttgatggagaagccacaactagaagtcacgttggggatcattggcaaaccagattcaacaaatatttattgggcacccggtagtgcaaataaatagtcatccatgcattaaacaacatgcttttagcat

SEQ ID NO: 26829 - DNA, 825 bp, Homo sapiens
caccatgtatgtctcaatccttgtcatccctcctgggctgtatacgtgtgcatgtgtatgtctcttaattcatttttacagagtggtcccacaaggatcaacatgtctaaaatcaaatccatcactttctccacccgcaaggataccccttagaagccccaaacctgatattcctccctaattatcttaatctcaatggattttcatcctgtgcttcattattatttactattattaaaacagagaagggttaattttattttcaagtctgtctttgcttgttttctgcttttgcctgaatgccaagaaaagcctctcctactctcaaatcagaaaaaaaaattgtccatacctttatttattccttttacagtttaattaaatcttttattttgctgaaagttattttggtatgaggtagggatctgatgttccaataccatttgttgaaaaaaaaaatccatcctttcttctatttgtttgaattagtgttcagctcattctctggagttttccaagtaataaatgtaattaatgaaagttccactttactttccaatgtttatactgcttatattaatcaggacttttgggttggcagcaatagaaatatagaaactgagccaggaactgtggctcacacctctaatcccagcactttgggaggccactgtgggaggatcacttgagcacaggagctcaagaccagtgtgggcaacatagtkagacctgtctctaccaaaaataaaaacaaaaagtattagccgggtgtggtggtacatgcctgtagttctagctacttggaaggctgaggcaggaggatcc

SEQ ID NO: 26830 - DNA, 563 bp, Homo sapiens
tggcatctaggggactgcaatccaggcctgctcaggtgtctcatgatcttcactgtgctgcttagatgaataacagaatcaaaagagaaaggaaaatttgtttttcttctccctatgttgagggagccctgggagactctccagagcacattctttgagccctagcttcttagataatgctattgagactttgcctgggtctgggctttgcctgttactgcctttgggatgaktcagcctaatacagaaagatcgtttctttctctttttaattttacttttctttctttaatttccagcctcaagggtgatgggagaagatgtaagaaaaattatagggaaagatgcaaacctttttggaaggccaaaaactttggagaataatttagctgaaggcagctaaattctcttaagggcaaaggttagataacaagggaatgtaaagaaacatatctagaaaaattggtttacttatgtctcaggaaaccaacctttgatcattcatgtgcaagactgctctctactcaggggtcaacaatgttaatttcccacaaattatgttt

SEQ ID NO: 26831 - DNA, 563 bp, Homo sapiens
tggcatctaggggactgcaatccaggcctgctcaggtgtctcatgatcttcactgtgctgcttagatgaataacagaatcaaaagagaaaggaaaatttgtttttcttctccctatgttgagggagccctgggagactctccagagcacattctttgagccctagcttcttagataatgctattgagactttgcctgggtctgggctttgcctgttactgcctttgggatgattcagcctaatacagaaagatygtttctttctctttttaattttacttttctttctttaatttccagcctcaagggtgatgggagaagatgtaagaaaaattatagggaaagatgcaaacctttttggaaggccaaaaactttggagaataatttagctgaaggcagctaaattctcttaagggcaaaggttagataacaagggaatgtaaagaaacatatctagaaaaattggtttacttatgtctcaggaaaccaacctttgatcattcatgtgcaagactgctctctactcaggggtcaacaatgttaatttcccacaaattatgttt

SEQ ID NO: 26832 - DNA, 1500 bp, Homo sapiens
tgcattcatataatttgtaaaaatgaaactaatgtaattgagtatccaacaccttaaatatttgtctgtttcttatgctagaaacacctgaatgattatcttctaactattctgaactgtacagtagcttgttgtaaactattatttctgggcaaggccagctccacggctacacgatcagtgtggctgcagagacaggcacttggttttatgctctacttcaaagtcttagaattcttaataatttttgaacaaggtacctcacattttcatcgagccttgtaaacagtgtatccagttagtttccttgataatatcgaggtgtgatatttaatgtttctttcaataaacattaccagtgtgaatacgctgctcggtgtggccataatgcactaacgcatttttgctttgtacctatgttattgccaaccactgaactaaagaagggaataaagatataatccttgcccccaaagcattgcaaacatattggaggaacttagtgtctctgtatcagatggcatgcactaaatattcgccatgaatactcttcctgaatgcaaagtcacaattttatatgamtttattcatgcactaacagacatattgtacctattattctaaatgcgtggaggttgggacgatgtctaaaactcaggtcatatcaggcattttgtatcatggaaaagaacagaatgattcactatctagttgatgatggtggagttgggtggacgtagctacagcggttcacagtggcccatagactctctggaagtatttttcagtaacaccaggagatgaccctgaaggcacaaataattttctctccctccatttgatacggacacaggtttatccattaacaggattccagagctaatcagaattacctctgatttgggttttactcacacacctgctggaaatccatgcatgagctttgtgagaaagggcacaaaggaaaccagcctgaagtctgcaggggccacacagtgcaagccaacagcagagctgacacagatgccagaatggtcaaaaacgaacatttacaaagcaattattgctatatcccacatcttcaaaaggttaagtagaggcatgagagattaaaaaggcccaaactgaacttttagggaagaaaactacagtttcctgaggtcaaaaaatacacaaagtggaaattacagcagattagacattgcaggaaaaaaattgtaaatttgaaagtgtggcaataaaaactccataatgtaacatagaaaaaataatagttaaaaaaactgagagcattagtggggctaatcacagaatgtgagactactcccagtagtccaatatacatggaattaaaatcctcaaagatggaaaaagcagaagtattaaacccacagatcccagaagtttagccccaagcacaagaaccaagaagaaaacgacaccaagacatgtgaaaaccaaattgctcaaaccagaaataaaaagaagacgctgaaagcc

SEQ ID NO: 26833 - DNA, 1320 bp, Homo sapiens
  misc_feature (1)...(1320): n = A,T,C or G
ggattacaggcgtgagccactgcgcctggcccgaatcttttctttagatgagatgtgaaagaggcacggtttcacaatggacctcatttagtctagnacaaaatgaaaatgtatttagggtttttgctcctaatggagttaaaattaggaccagaaatctaaataatggtaatcataacgtgggtatttccctccaataacctaycctgcctgttcctccaagcactgcttatattgtagctttcattttaggtggctgaactggtaaaggagcttcgttgcgaacttgatcagcttctccaggataaaattaaaaacccaagcattgatctgtgtacgtgtcctcgaggatcccggatcatcagcacaattgtgaaacttgtcaccacacaataaaaagcagtcttagagagtgcttgctactcacctgcttctagctcacctgggaaataacagcagaacctctacctcgaactaaagacctattggggctggccctggtggaggagcccagggcatgaagcccaaggcagctgaggcagtgtatatacccttagggccatttctaacaaagccttggccactcccagcacaatttggagtgtcaagggtgagagcctaaaacccagcttgcctgtctttgtctctgtgattgttctggagtgaattaagttcacctgataactcaaaagtgaatgtataatacaattctgttttaatctgtgtattctttttctcctactttttactggggtgagaggggcatgaagagaaatacgccttttttttttttcttttcctgtcgccaaggctcgactgagagaagtcagaacagagaaggggaaaaaaaacccaaaattatgtgaacaagcaaaattaaaatttcattttaggctattggctactgagtaaacttgacttgtgaggggtttttatttttactcattaaaagtcaacttaaaaaaattgaatgagttctcttttggtattaaagtgcaagctggtcttatcgataacactcctattcttaaaagcagaacaatctagatgtcgtcatagttctacatttaggaatctttactctgtcttatcaactcacccagacacgaatcaccgaaggagaattttaatagcattcctggggcagagttggcatggatgaggtcaaaaaggttaccatcggatttacagccaccacaatgctttccatgaaattgcttattttcaaccacctgttaggttaatggggcgctagcattttggaaaaacatcaggggatttacattttccctggacatctatcagtatggcgaggaagga

SEQ ID NO: 26834 - DNA, 1320 bp, Homo sapiens
  misc_feature (1)...(1320): n = A,T,C or G
ggattacaggcgtgagccactgcgcctggcccgaatcttttctttagatgagatgtgaaagaggcacggtttcacaatggacctcatttagtctagnacaaaatgaaaatgtatttagggtttttgctcctaatggagttaaaattaggaccagaaatctaaataatggtaatcataacgtgggtatttccctccaataacctatcctgcctgttcctccaagcactgcttatattgtagctttcattttaggtggctgaactggtaaaggagcttcgttgygaacttgatcagcttctccaggataaaattaaaaacccaagcattgatctgtgtacgtgtcctcgaggatcccggatcatcagcacaattgtgaaacttgtcaccacacaataaaaagcagtcttagagagtgcttgctactcacctgcttctagctcacctgggaaataacagcagaacctctacctcgaactaaagacctattggggctggccctggtggaggagcccagggcatgaagcccaaggcagctgaggcagtgtatatacccttagggccatttctaacaaagccttggccactcccagcacaatttggagtgtcaagggtgagagcctaaaacccagcttgcctgtctttgtctctgtgattgttctggagtgaattaagttcacctgataactcaaaagtgaatgtataatacaattctgttttaatctgtgtattctttttctcctactttttactggggtgagaggggcatgaagagaaatacgccttttttttttttcttttcctgtcgccaaggctcgactgagagaagtcagaacagagaaggggaaaaaaaacccaaaattatgtgaacaagcaaaattaaaatttcattttaggctattggctactgagtaaacttgacttgtgaggggtttttatttttactcattaaaagtcaacttaaaaaaattgaatgagttctcttttggtattaaagtgcaagctggtcttatcgataacactcctattcttaaaagcagaacaatctagatgtcgtcatagttctacatttaggaatctttactctgtcttatcaactcacccagacacgaatcaccgaaggagaattttaatagcattcctggggcagagttggcatggatgaggtcaaaaaggttaccatcggatttacagccaccacaatgctttccatgaaattgcttattttcaaccacctgttaggttaatggggcgctagcattttggaaaaacatcaggggatttacattttccctggacatctatcagtatggcgaggaagga

SEQ ID NO: 26835 - DNA, 656 bp, Homo sapiens
tgattctctaatcactgacactaagggaaagaaagatgcctaagtttattctactcttctttttctagccccttgaaatggatgttagcatggtaacattcatcctttgcttctaatataaaagtttctaactatacatttctctcaaagctggctataaatattctatactgaccttcttttcaagcttacgcaggacatgaaaattgactttgaaaatcaccaagtttgaaattcaccatagtttagtagaaagacttcatttttaacyattatacaattaaggtagaaatcaataataggtcattagaacaacctctaatatttcaaaatttctaaaatactcatgtgtattctccagttgctaaacataacgtcctatatagagcagatcattagatcaaggttgctattgaattgaccaaataatcaatatttgttctgactgttgtctgctttatccatcaagtactgagagggaaatattaaaatttccaactgtgaggatgggtatgttcttttttcccctaatagttttgtcaatcttttattgatatattttgaggctatgttactacagatgatatggtttggctctgtgttcccacccaaatctcatgtcaaattgtaattcccaatgttgggggagggacctg

SEQ ID NO: 26836 - DNA, 521 bp, Homo sapiens
tttttaaagttcttttcctacttgtgataccatccatttttaaccactacatcttacacccattgtcctttctctctattaacatagcactctagctctgtgttcctccatacttaagatctccctggagagacacaaagggagtccattatcccttttttttttctggtcacattttggcagagaagtgttctccacttgcatggtcctggcagtgcccctttaattttcacatagctggaggaggcacacataagccatagacgaacaatacagtcctgaccctaacctcattatgcaccgcacttgaagctgcattagcaaaaacagatggtctggctgcaaagccacagatgccaatcagatacactgtcggcaagcacgttctctaatcaggcccctttcaaatggcatctgcttctccctccctgtaggtatacataatgatttgaaaccttctgtacatttcctgttgcacttgggctctaacaacctgttcrcagaacagagttgccagtcta

SEQ ID NO: 26837 - DNA, 1000 bp, Homo sapiens
cactatatagtggtcctacaatgtcccctcaatcctcatggattatggggactcaagcccatcatctcctgacttttggctgccaatattttaatcccctcccactctccccacaatactcctattctcccaatcaaaaaacctggtggctcctacggagcagttcaggatttgtgacaaatcaactccactcttgttactgtttgtccccttgtcccaaacccctacaccctcttatcgagaattcctcccaacaccagccatttctctgtgttagaccatgcattcttctttatgtaatacagattcaagacacttgaagataaatttactttcacgccactgcaggaaaagagagaagggtcttgtcatggataagtactcagtgataaattgacatatcatgtcagtcatttgaggaaatttatgtgtcaaaacagtaaataacccaatccaagcaacaaataaggaaataaaagcatgagaataatttttagggaaaagaaatctgacattcatagttcagaaagataaccatgcctagtccagtcaatgtgggggagtttcagcagtgatatctggcactcactgtctctccagaacaactacatactgggatgaaacaaacaggcttccatcaccactgtgtaaccatttacttaaatctaaaaaggagtccctggaaattattccataaakggatagttccaaactccttgaggttccaagaggaacccaagaaatggagccaagtgacaaaacagatttgtttttttttttggaaacagggtcttgctttgtcacccaggctagagtgcagtgattgtggtcacagctcactgcagtttgaactcctgggctcaagacatcctcttgtctcagcctcctgagtagctgggactataggcatgcactacaatacccagctaatttttaaatttttagcagagatgaggtcttgctatgttgcccaggctggtctttatctcctgggttcagg

SEQ ID NO: 26838 - DNA, 606 bp, Homo sapiens
ccccattttggaaactcgtacactgtccataaataatcattaaggtgatgtactggaagacaggcttttaaggctctggcaactgtagaagggacagattacaacttggttgctcactcgtcacaggagtgttacttaaagacgtctcctgcaaaacctcaaaattaaaatggtttcagaggcttaagtgcgacatggatctgctttcttcttcaaataaacctctgtaggaaggagttcagctcgactacttcgaagggccgaaatcatagcaccttgaggcaatgtgtgttgggggcatttgtatcaaattcttggagaggctgccacaggtgacatgttctcacactggcatcgtggacaatgtttccccaaggcagataccrcagcacagggagaggaagtctgtgtgcctctccttcccgccccctactttgggtccccactcggtgcgggaatgttgaaatgcacataggctggccacattttttataggtattaatttgttgttaatttggagttgtccaaagtctttttttgaggtccctctctctgtctctctctctctcgctttccttcctatctctgtctctttgtatctctgtc

SEQ ID NO: 26839 - DNA, 477 bp, Homo sapiens
tattctcttttctttaacaaaattttctttgttaataatcttttattgattgtgctaaggrcccatttagttctgcctcattatgggagagtagctttttctcattatattttaatgaaatgaaggatcaccatagcctaaagggctttatattccatgtaaaagacattattttttaggcaataagatgaagatcctcgccatctttcaataatgtctttctattgattaaatctaagaggcaataaaatgtatcaaattacttaatgtttaatatattggttttagtttctgagtaccagtgataagtggagttcacatggaacacactaatgagcatagacataagtatcccatcaactccagcactgcagaagagactgcagggatggagccatctagtgattctgtaactaaaagacagagtcacctttttaaaataatttagctttgggctcccaaattaaatgtatactg

SEQ ID NO: 26840 - DNA, 801 bp, Homo sapiens
tatcttggagacaaggcctttctaatatcaatagaaaacctagaagctataaaagaaaaaaatgaataaatctaactacatcaaattttaacatttttggagcctaaaagcatcataaatgaactcaaaaggcaaatctgtgaaaatatttgcaatacaaatgacagacaaaggactgattttcctaatgtacaagttactgttacaaatcaatcaacaaagcacataaaaaatttacaaaagaaatataaatgatgcaaacaaatgagatgattctgaagttctttaataatcaaagaaatacaaaytaaaataatgaggtaatttccaagtaaatattggccatgaaattttaaaacaaatgctcccaagtgctgtcagatcatagggtatccagcattttcattcactgcaaattgaaacagcccttctggagagaattccattattagcttattttaaatgtcctgaatttcataaatatatactaatattatctgtgaattataaataaagctttaaaataaaataaatgttctgattctgccatttcattagtttctattctttatcctctcatcccacctatccctgagtcacataatggcttccagaactagctgccaccagcacctccccgggtcctcataccaatcctcttgtaataccagttacagattgagtagaatcactactccatctgtaatttctggaactcaggaccgctgttctcctggcctgagaggatttccccatggcctgtcagagctcctgggaaatgcaacaatggtctggttaact

SEQ ID NO: 26841 - DNA, 801 bp, Homo sapiens
tatcttggagacaaggcctttctaatatcaatagaaaacctagaagctataaaagaaaaaaatgaataaatctaactacatcaaattttaacatttttggagcctaaaagcatcataaatgaactcaaaaggcaaatctgtgaaaatatttgcaatacaaatgacagacaaaggactgattttcctaatgtacaagttactgttacaaatcaatcaacaaagcacataaaaaatttacaaaagaaatataaatgatgcaaacaaatgagatgattctgaagttctttaataatcaaagaaatacaaactaaaataatgaggtaatttccaagtaaatattggccatgaaattttaaaacaaatgctcccaagtgctgtcagatcatagggtatccagcattttcattcactgcaaattgaaacagcccttctggagagaattccattattagcttattttaaatgtcctgaatttcataaatatatacwaatattatctgtgaattataaataaagctttaaaataaaataaatgttctgattctgccatttcattagtttctattctttatcctctcatcccacctatccctgagtcacataatggcttccagaactagctgccaccagcacctccccgggtcctcataccaatcctcttgtaataccagttacagattgagtagaatcactactccatctgtaatttctggaactcaggaccgctgttctcctggcctgagaggatttccccatggcctgtcagagctcctgggaaatgcaacaatggtctggttaact

SEQ ID NO: 26842 - DNA, 2133 bp, Homo sapiens
tgtaaagccctggagaatttacatcacatcctggaaaaagaggggaacaaaaaggagaagaagaagggggataatgagaaaaaattttgaattgacagtttaaatcctgaatgtactatgttcaaaactgaaagtgagttgctttggtttggaaaaggttcattttaccttcagtggaaaagattgaattcagttaaaatgaaattttaagaagttatttttgttgcacacctgtattaaaactgtaaattataaacctgctacgcttcccagagtttaaagcaaaaaatgccaccagggggaaagagaaccatgaaaaagttaagaggcacaaaagatagatatctgctcaataaaagttctaagagaatataaaaagaggatgataatatttaaaaagaaaaaaggaggaaatttatttgagcttaaaaacaaatcttaagccttcagatccaaagagctcaccaagattctaataccagtactgaacaaaacakacttctggactcaaggattaaaagaatccattacatgtttctagagagggggaaaaaacaacaaagcaagtgacctatatgagaacaagactgccatcaaatttggcatccactctactgaatactggaagccagaggaaagaaaaatgtctttaaaaatcagagaaaattattttgcatttagaatttaatatccaatcaactgtcagtcaagtttgtgttaatcatacaagacacattgtctgaccacaatataaggcatacagaaattaataaaggctaaaaagagtatcagtcattttgacacattaaaatggcctgctcagttacacttgagataatgtgaggctcatcctgaaattgcaaactatttaaaaataattgacattgatatgtacttattaaaacctgtgaattttagcaacaacagttaagggggacaactaggcctggaaatgcatgtattagacaatatggactacaaaaaaataaataaaatatacacacaaccacaagaagctaaagataaattttaaaaatttttagtagaaagtaataacatataagacaaattttttattggatttgataaaccaggaggtggattcttgcaatacaatagacaaacctattgccagtccaaagggaaaaaaaagaggcattggaaaaaaaaaaacaacaaataaatgccactagaattgattaatgagaaaaacacagtttgtagaggtgattttaaattatgagaaggaatgcttcacccataccagatcaacaaaaaaattaaatatgacctgaagctacgtatatcaatatgggtaaatctcaaagccgtcatgttgaacaaattgctggcaatttgaatataagaacagtatggtaccacagatgtcaagtttttaaataaatacaaataaactgttggttattctggagacacaaatatggagtgaaaacataaaagcatgtgtaggaatgttaacagcaaattcagggtagtggttagctctgcaggaggacaaaggactaggatcagagactggaacacaaaggatttcaagaatatctttactgagttatttttgaaatcacacataaagcaaaatgttaagatttgacaaatctggatggtgggtagatgagtgtttatcatgtgtcagtttttggaatgaaatctattattttaattcaagtccaataaaactctcaaggagatttttgccaatgttatttggttgccgtgttgattgtattgatgaattcagtcaacagcctcccttttgaatgccttttgcaatgtgatggcagctccacccttcaagagatagagtctatttccccacccttgaatatttgctggttttatggtttcatccaaaaaaatgcagctgaagggatggtgtgccatttctgaaactaggcttcaagagaccttgcacacttctacttctattttgactcttggacctttgccattgccatgggaacagcttgggctagcccgttggaggatgagacaccacatagaggaaagcacacttgtttcagccaaggactacctgcagccaggcaacccccaaatacgtgagaaaaccttgccaagccccaacctgatccacaattgaccgtagatgca

SEQ ID NO: 26843 - DNA, 2133 bp, Homo sapiens
tgtaaagccctggagaatttacatcacatcctggaaaaagaggggaacaaaaaggagaagaagaagggggataatgagaaaaaattttgaattgacagtttaaatcctgaatgtactatgttcaaaactgaaagtgagttgctttggtttggaaaaggttcattttaccttcagtggaaaagattgaattcagttaaaatgaaattttaagaagttatttttgttgcacacctgtattaaaactgtaaattataaacctgctacgcttcccagagtttaaagcaaaaaatgccaccagggggaaagagaaccatgaaaaagttaagaggcacaaaagatagatatctgctcaataaaagttctaagagaatataaaaagaggatgataatatttaaaaagaaaaaaggaggaaatttatttgagcttaaaaacaaatcttaagccttcagatccaaagagctcaccaagattctaataccagtactgaacaaaacatacttctggactcaaggattaaaagaatccattacatgtttctagagagggggaaaaaacaacaaagcaagtgacctatatgagaacaagactgccatcaaatttggcatccactctactgaatactggaagccagaggaaagaaaaatgtctttaaaaatcagagaaaattattttgcatttagaatttaatatccaatcaactgtcagtcaagtttgtgttaatcatacaagacacattgtctgaccacaatataaggcayacagaaattaataaaggctaaaaagagtatcagtcattttgacacattaaaatggcctgctcagttacacttgagataatgtgaggctcatcctgaaattgcaaactatttaaaaataattgacattgatatgtacttattaaaacctgtgaattttagcaacaacagttaagggggacaactaggcctggaaatgcatgtattagacaatatggactacaaaaaaataaataaaatatacacacaaccacaagaagctaaagataaattttaaaaatttttagtagaaagtaataacatataagacaaattttttattggatttgataaaccaggaggtggattcttgcaatacaatagacaaacctattgccagtccaaagggaaaaaaaagaggcattggaaaaaaaaaaacaacaaataaatgccactagaattgattaatgagaaaaacacagtttgtagaggtgattttaaattatgagaaggaatgcttcacccataccagatcaacaaaaaaattaaatatgacctgaagctacgtatatcaatatgggtaaatctcaaagccgtcatgttgaacaaattgctggcaatttgaatataagaacagtatggtaccacagatgtcaagtttttaaataaatacaaataaactgttggttattctggagacacaaatatggagtgaaaacataaaagcatgtgtaggaatgttaacagcaaattcagggtagtggttagctctgcaggaggacaaaggactaggatcagagactggaacacaaaggatttcaagaatatctttactgagttatttttgaaatcacacataaagcaaaatgttaagatttgacaaatctggatggtgggtagatgagtgtttatcatgtgtcagtttttggaatgaaatctattattttaattcaagtccaataaaactctcaaggagatttttgccaatgttatttggttgccgtgttgattgtattgatgaattcagtcaacagcctcccttttgaatgccttttgcaatgtgatggcagctccacccttcaagagatagagtctatttccccacccttgaatatttgctggttttatggtttcatccaaaaaaatgcagctgaagggatggtgtgccatttctgaaactaggcttcaagagaccttgcacacttctacttctattttgactcttggacctttgccattgccatgggaacagcttgggctagcccgttggaggatgagacaccacatagaggaaagcacacttgtttcagccaaggactacctgcagccaggcaacccccaaatacgtgagaaaaccttgccaagccccaacctgatccacaattgaccgtagatgca

SEQ ID NO: 26844 - DNA, 584 bp, Homo sapiens
gggtttattcatcactgcctcagcccagtctataactaataatacttactaaataaagaacaaaatcatttagttaataggcatttattttcacaaacaaacaacattgcaaataaattcttccctttgttagagtcatttttacttggttggttaataaaatttatttttaaaataatttatcaattttatttgtatttaagtccttttctttatgttggatttcatttcatttagtgaaaccacccttccccatgtgggtcacacagggctaggtctatagtataaaactaaaggaatttctaagagaggaaatacccgatagaatttgctaaacttgtttttggagcatctcctcgggttagggmttttattttccaaaataaagttcattttaaaaaatagatcaataacttctaaaacaatagattcttagttaaccctgatgccagctcaaatctttttccaccagcatttcacctgacattgctttgcatctaccaggaggtagaaatcagcaccttacctctttgagttcaatttaccttaaaattgttctgaaataaagagcatagtaagcaata

SEQ ID NO: 26845 - DNA, 584 bp, Homo sapiens
gggtttattcatcactgcctcagcccagtctataactaataatacttactaaataaagaacaaaatcatttagttaataggcatttattttcacaaacaaacaacattgcaaataaattcttccctttgttagagtcatttttacttggttggttaataaaatttatttttaaaataatttatcaattttatttgtatttaagtccttttctttatgttggatttcatttcatttagtgaaaccacccttccccatgtgggtcacacagggctaggtctatagtataaaactaaaggaatttctaagagaggaaatacccgatagaatttgctaaacttgtttttggagcatctcctcgggttagggattttattttccaaaataaagttcattttaaaaaatagatcaataacttctaaaacaatagattcttagttaaccctgatgccagctcaaatctttttccaccagcatttcacctgacattgctttgcatctaccaggagrtagaaatcagcaccttacctctttgagttcaatttaccttaaaattgttctgaaataaagagcatagtaagcaata

SEQ ID NO: 26846 - DNA, 1767 bp, Homo sapiens
agagtctctgtggtccaggctggagtgcagtggtatgatcttggctcactgcaacctctgcctcccaggttcaagcaattttcccatctcagcctctctagtagctgggattacaggcacccaccatcatgcctggctaaacttttttgtatttttgtagagatggcgggggkgggggggggtctcaccatgttggcaaggctggtctcaaactcctggcctcaggtgatccagagtgctgggattagaggcatgagccaccatgcctggatgtatgaagtgttttttttggggggggttggggggcacggagtctctctctgccatccaggctggagtgcagtggcacgatctcagctcactgcaacctctgcctcccaggttaaagtgattctcctgtctcagcctcccgagtagctgggaccataagcgtgtgtcaccacacccagctaattttttgtattcttagtagagatgggatttcaccgtgttagccaggatggtcgcgatctcctgaccttttgaaccgtccgccttggcctcctgaagtgctgggattacaggtgtgagccaccgggcccagcctgcatgagtggcttttatctgatgttttggatccatttcacatgaaacaaaaacaggtgttatagcaaagccaaaccaggaaaaccccaatagagtatttttagcatgcctcttaatttttctatccccagcttcttgttggttgtctgtgatgagtcttggacaagtaacctcttgaggggatgccactgatggatgggccacgggtgaagtgtcagcaaatgtgaaaaagcaaatccagctataactatatagacagttcatctgcaatgttcagccacataaccgtagataaatccaatgactgaagaaaaaataataattctctgaaacatttgttcaactagcttttgtcccttgtaatctattcgtatgggcagcaagctcatatgctccaacatgactggccatggaggcaggtggtggagcgcaggcagtgggcagcatggtgagggtggctgcaactcagatctgggtctgggtctgggccttataccaccacgcttggcttttgttttttttttttttttgagtggagttttgctctttttgcccaggctggagtgcaatggtgccatctcggctcactgcaacctctgcctcccagattcaagtcattcttctgcctcagcctcccgagtagctgggattacaggcacacaccaccacacctggcctaatttttgtatttttagtagagacagggtttcactatgttggcgaggctggtgtcgaactcctggcctcaagtgatccgcctgcctaagcctcccaaagtgctggattacaggtgtgagccactgcgccaggccctgtcttgtcttttaaataacatctccaaagtggcgatagaaaagaaataccaacctgtaagtatatgcttagctgatgtatactccaagaatgaggataaaaattaaaacattttttaaaaatcaaaagttgaaataatttacaaactgattttcattaatactcatgtaaaagatgtattttaggaaaaaggaaaccatgaacctagagaggcctgacatgcaggaatgaatggtaagcgaagaaaacagtaaatggatggctaaatctaaacacacattggttatatattaaaaaaaatgtataatgatatcaggtcgggcatgtaatgggcctgtaatcccagcactttgagaggctgtggcggga

SEQ ID NO: 26847 - DNA, 1767 bp, Homo sapiens
agagtctctgtggtccaggctggagtgcagtggtatgatcttggctcactgcaacctctgcctcccaggttcaagcaattttcccatctcagcctctctagtagctgggattacaggcacccaccatcatgcctggctaaacttttttgtatttttgtagagatggcgggggtgggggggggtctcaccatgttggcaaggctggtctcaaactcctggcctcaggtgatccagagtgctgggattagaggcatgagccaccatgcctggatgtatgaagtgttttttttggggggggttggggggcacggagtctctctctgccatccaggctggagtgcagtggcacgatctcagctcactgcaacctctgcctcccaggttaaagtgattctcctgtctcagcctcccgagtagctgggaccataagcgtgtgtcaccacacccagctaattttttgtattcttagtagagatgggatttcaccgtgttagccaggatggtcgcgatctcctgaccttttgaaccgtccgccttggcctcctgaagtgctgggattacaggtgtgagccaccgggcccagcctgcatgagtggcttttatctgatgttttggatccatttcacatgaaacaaaaacaggtgttatagcaaagccaaaccaggaaaaccccaatagagtatttttagcatgcctcttaatttttctatccccagcttcttgttggttgtctgtgatgagtcttggacaagtaacctcttgaggggatgccactgatggatgggccacgggtgaagtgtcagcaaatgtgaaaaagcaaatccagctataactatatagacagttcatctgcaatgttcagccacataaccgtagataaatccaatgactgaagaaaaaataataattctctgaaacatttgttcaactagcttttgtcccttgtaatctattcgtatgggcagcaagctcatatgctccaacatgactggccatggaggcaggtggtggagcgcaggcagtgggcagcatggtgagggtggctgcaactcagatctgggtctgggtctgggccttataccaccacgcttggcttttgttttttttttttttttgagtggagttttgctctttttgcccaggctggagtgcaatggtgccatctcggctcactgcaacctctgcctcccagattcaagtcattcttctgcctcagcctcccgagtagctgggattacaggcacacaccaccacacctggcctaatttttgtatttttagtagagacagggtttcacyatgttggcgaggctggtgtcgaactcctggcctcaagtgatccgcctgcctaagcctcccaaagtgctggattacaggtgtgagccactgcgccaggccctgtcttgtcttttaaataacatctccaaagtggcgatagaaaagaaataccaacctgtaagtatatgcttagctgatgtatactccaagaatgaggataaaaattaaaacattttttaaaaatcaaaagttgaaataatttacaaactgattttcattaatactcatgtaaaagatgtattttaggaaaaaggaaaccatgaacctagagaggcctgacatgcaggaatgaatggtaagcgaagaaaacagtaaatggatggctaaatctaaacacacattggttatatattaaaaaaaatgtataatgatatcaggtcgggcatgtaatgggcctgtaatcccagcactttgagaggctgtggcggga

SEQ ID NO: 26848 - DNA, 1767 bp, Homo sapiens
agagtctctgtggtccaggctggagtgcagtggtatgatcttggctcactgcaacctctgcctcccaggttcaagcaattttcccatctcagcctctctagtagctgggattacaggcacccaccatcatgcctggctaaacttttttgtatttttgtagagatggcgggggtgggggggggtctcaccatgttggcaaggctggtctcaaactcctggcctcaggtgatccagagtgctgggattagaggcatgagccaccatgcctggatgtatgaagtgttttttttggggggggttggggggcacggagtctctctctgccatccaggctggagtgcagtggcacgatctcagctcactgcaacctctgcctcccaggttaaagtgattctcctgtctcagcctcccgagtagctgggaccataagcgtgtgtcaccacacccagctaattttttgtattcttagtagagatgggatttcaccgtgttagccaggatggtcgcgatctcctgaccttttgaaccgtccgccttggcctcctgaagtgctgggattacaggtgtgagccaccgggcccagcctgcatgagtggcttttatctgatgttttggatccatttcacatgaaacaaaaacaggtgttatagcaaagccaaaccaggaaaaccccaatagagtatttttagcatgcctcttaatttttctatccccagcttcttgttggttgtctgtgatgagtcttggacaagtaacctcttgaggggatgccactgatggatgggccacgggtgaagtgtcagcaaatgtgaaaaagcaaatccagctataactatatagacagttcatctgcaatgttcagccacataaccgtagataaatccaatgactgaagaaaaaataataattctctgaaacatttgttcaactagcttttgtcccttgtaatctattcgtatgggcagcaagctcatatgctccaacatgactggccatggaggcaggtggtggagcgcaggcagtgggcagcatggtgagggtggctgcaactcagatctgggtctgggtctgggccttataccaccacgcttggcttttgttttttttttttttttgagtggagttttgctctttttgcccaggctggagtgcaatggtgccatctcggctcactgcaacctctgcctcccagattcaagtcattcttctgcctcagcctcccgagtagctgggattacaggcacacaccaccacacctggcctaatttttgtatttttagtagagacagggtttcactatgttggcgaggctggtgtcgaactcctggcctcaagtgatccgcctgcctargcctcccaaagtgctggattacaggtgtgagccactgcgccaggccctgtcttgtcttttaaataacatctccaaagtggcgatagaaaagaaataccaacctgtaagtatatgcttagctgatgtatactccaagaatgaggataaaaattaaaacattttttaaaaatcaaaagttgaaataatttacaaactgattttcattaatactcatgtaaaagatgtattttaggaaaaaggaaaccatgaacctagagaggcctgacatgcaggaatgaatggtaagcgaagaaaacagtaaatggatggctaaatctaaacacacattggttatatattaaaaaaaatgtataatgatatcaggtcgggcatgtaatgggcctgtaatcccagcactttgagaggctgtggcggga

SEQ ID NO: 26849 - DNA, 1672 bp, Homo sapiens
ggtggggataaacaggctactgatcagagcagatcaactgaaggtatgtaactgccacagtaaatgaaacgccacctccaggctgcaggaatcccatcttacgctgagcaagtttaatcacttctgctgctgcttcttccttttcttataggtgttcacaggaaaaaaaaaaaagcacacacacacacacacacacagagatatatcagattgagcaactctaaggcagacaactgttccatcagatttgtaagaagaaagaaaaagaaaaggaggtgtcagatatacatgcttgaaggaaaggcaggagggtggggaagagggagtacttttgtatacaaagacacaactagtgaatatggtgaatggtgaaatgtgctgccaattggaaagtgactatatttgaacactaaatgaggtttcagatactaatggcttgacggtgttcctctattgttgaattatgaactgagaatctcaggggatccagaattaaaaaggtggaataccaagcagtgtgggtccatgtgagttggcctattctggaacaaactgaaaatggytaatttatgaggactttaaaataacgtattagaagaatgaccattgtataagagggcaggggaaattctgctttgataatttgacagttcaaaatgaacattgcatttcccctaattcaatcttgatttcctttagctaaatgtttcctttctttactaccctcttcacaaatcagatggaagggctgtttagagctaactcactggtcctaaaaataactggagctaaacaaaaagctcattcttgctggcatgaacagtcttccaggtagctgctgtacaatgcccccagcagtaagctgagcattgctgatgtatctaacagagacaggagctgggctgcagtgagagggcagtgcttggattccacgaaggttgcaaggccctctgagactcaacatcaaagggttctaaacttagaactacagggatctggtatgaggcctacatcaaaaccactggagaataaagcagatcttgagaaacactggccaaggaagcctcacaaaccacatgaaacaacatgagaggctagagaattcctcaagaaaagagaagagagaatatattttttaactatgctgagagaaagctgatttggtaactcaacaccccatccaagtagtctcctcagttgttccctctgtctgcatgcttagcacacaccaggagcaggccctgggagctctcagtgggaagacacatgctcagatacgcgcttggggggatggctcatactttcctttttgtgactttcttatatcacctcaatttatggaacaaaagtaaatgagcattagaaattaaaaaaaaaaaatttagggccaggcatagtggctcacgcctgtaatcccagcactttgggagggtgaggggggcggatcacttgaggtcagtagttccagaccagctggccaacacagtgaaactccatctctactaaaaatataaaaattagtcgagtgtggtggcaggcgcctataatcccagctacttgggaggctaaggaaagagaatcgcttgaacccgggaggcagaggctgcagtgagtcaaaatcactccactgcactccagcctaggcaacagagtgagactccatctcaaaaac

SEQ ID NO: 26850 - DNA, 1672 bp, Homo sapiens
ggtggggataaacaggctactgatcagagcagatcaactgaaggtatgtaactgccacagtaaatgaaacgccacctccaggctgcaggaatcccatcttacgctgagcaagtttaatcacttctgctgctgcttcttccttttcttataggtgttcacaggaaaaaaaaaaaagcacacacacacacacacacacagagatatatcagattgagcaactctaaggcagacaactgttccatcagatttgtaagaagaaagaaaaagaaaaggaggtgtcagatatacatgcttgaaggaaaggcaggagggtggggaagagggagtacttttgtatacaaagacacaactagtgaatatggtgaatggtgaaatgtgctgccaattggaaagtgactatatttgaacactaaatgaggtttcagatactaatggcttgacggtgttcctctattgttgaattatgaactgagaatctcaggggatccagaattaaaaaggtggaataccaagcagtgtgggtccatgtgagttggcctattctggaacaaactgaaaatggctaatttatgaggactttaaaataacgtattagaagaatgaccattgtataagagggcaggggaaattctgctttgataatttgacagttcaaaatgaacattgcatttcccctaattcaatcttgatttcctttagctaaatgtttcctttctttactaccctcttcacaaatcagatggaagggctgtttagagctaactcactggtcctaaaaataactggagctaaacaaaaagctcattcttgctggcatgaacagtcttccaggtagctgctgtacaatgcccccagcagtaagctgagcattgctgatgtatctaacagagacaggagctgggctgcagtgagagggcagtgcttggattccacgaaggttgcaaggccctctgagactcaacatcaaagggttctaaacttagaactacagggatctggtatgaggcctacatcaaaaccactggagaataaagcagatcttgagaaacactggccaaggaagcctcacaaaccacatgaaacaacatgagaggctagagaattcctcaagaaaagagaagagagaatatattttttaactatgctgagagaaagctgatttggtaactcaacaccccatccaagtagtctcctcagttgttccctctgtctgcatgcttagcacacaccaggagcaggccctgggagctctcagtgggaagacacatgctcagatacgcgcttggggggatggctcatactttcctttttgtgactttcttatatcacctcaatttatggaacaaaagtaaatgagcattagaaattaaaaaaaaaaaatttagggccaggcatagtggctcacgcctgtaatcccagcrctttgggagggtgaggggggcggatcacttgaggtcagtagttccagaccagctggccaacacagtgaaactccatctctactaaaaatataaaaattagtcgagtgtggtggcaggcgcctataatcccagctacttgggaggctaaggaaagagaatcgcttgaacccgggaggcagaggctgcagtgagtcaaaatcactccactgcactccagcctaggcaacagagtgagactccatctcaaaaac

SEQ ID NO: 26851 - DNA, 1672 bp, Homo sapiens
ggtggggataaacaggctactgatcagagcagatcaactgaaggtatgtaactgccacagtaaatgaaacgccacctccaggctgcaggaatcccatcttacgctgagcaagtttaatcacttctgctgctgcttcttccttttcttataggtgttcacaggaaaaaaaaaaaagcacacacacacacacacacacagagatatatcagattgagcaactctaaggcagacaactgttccatcagatttgtaagaagaaagaaaaagaaaaggaggtgtcagatatacatgcttgaaggaaaggcaggagggtggggaagagggagtacttttgtatacaaagacacaactagtgaatatggtgaatggtgaaatgtgctgccaattggaaagtgactatatttgaacactaaatgaggtttcagatactaatggcttgacggtgttcctctattgttgaattatgaactgagaatctcaggggatccagaattaaaaaggtggaataccaagcagtgtgggtccatgtgagttggcctattctggaacaaactgaaaatggctaatttatgaggactttaaaataacgtattagaagaatgaccattgtataagagggcaggggaaattctgctttgataatttgacagttcaaaatgaacattgcatttcccctaattcaatcttgatttcctttagctaaatgtttcctttctttactaccctcttcacaaatcagatggaagggctgtttagagctaactcactggtcctaaaaataactggagctaaacaaaaagctcattcttgctggcatgaacagtcttccaggtagctgctgtacaatgcccccagcagtaagctgagcattgctgatgtatctaacagagacaggagctgggctgcagtgagagggcagtgcttggattccacgaaggttgcaaggccctctgagactcaacatcaaagggttctaaacttagaactacagggatctggtatgaggcctacatcaaaaccactggagaataaagcagatcttgagaaacactggccaaggaagcctcacaaaccacatgaaacaacatgagaggctagagaattcctcaagaaaagagaagagagaatatattttttaactatgctgagagaaagctgatttggtaactcaacaccccatccaagtagtctcctcagttgttccctctgtctgcatgcttagcacacaccaggagcaggccctgggagctctcagtgggaagacacatgctcagatacgcgcttggggggatggctcatactttcctttttgtgactttcttatatcacctcaatttatggaacaaaagtaaatgagcattagaaattaaaaaaaaaaaatttagggccaggcatagtggctcacgcctgtaatcccagcactttgggagggtgaggggggcggatcacttgaggtcagtagttccagaccagctggccaacayagtgaaactccatctctactaaaaatataaaaattagtcgagtgtggtggcaggcgcctataatcccagctacttgggaggctaaggaaagagaatcgcttgaacccgggaggcagaggctgcagtgagtcaaaatcactccactgcactccagcctaggcaacagagtgagactccatctcaaaaac

SEQ ID NO: 26852 - DNA, 663 bp, Homo sapiens
agactcaatagaaagactcccagtgtataacaaagctgcctggaagcattacaacaccaaccacgaggctgatgactggtgcgtccccagcagagaacccaaagacatgacgacgttccgcagtgcctagacacacttgggacatcggaaaatccaaatgtggcttttgtattaaatttggaaggtatggtgttcagaactatattataccaagtactttatttatcgttttcacraaactatttgagtagaataaatggaaactgaattccatttgtgcccgttaaacctcctaaaggatgaaattgcacctattttacacttatattttcacagttaattgaacatatttttaaacaactgtagttttgggcaacttttcactttgtggtagacttcagaagtgtggaaatcttcgggtttctataggaaactagttttttttttttaagaaatactttcatttatgtttgctagaaacattttctaaatgatagtgattagctggttagccatcttcctgttatttggaggagttctgccatcttttattcggtagtgacagctgtaatatggtcttcatgtttatcagtgacttgactacaagtaaagcagaaaacagttggcctgtaatcacagaaccagccacccttcggcgtctac

SEQ ID NO: 26853 - DNA, 663 bp, Homo sapiens
agactcaatagaaagactcccagtgtataacaaagctgcctggaagcattacaacaccaaccacgaggctgatgactggtgcgtccccagcagagaacccaaagacatgacgacgttccgcagtgcctagacacacttgggacatcggaaaatccaaatgtggcttttgtattaaatttggaaggtatggtgttcagaactatattataccaagtactttatttatcgttttcacaaaactatttgagtagaataaatggaaactgaattccatttgtgcccgttaaacctcctaaaggatgaaattgcacctattttacacttatattttcacagttaattgaacatatttttaaacaactgtagttttgggcaacttttcactttgtggtagacttcagaagtgtggaaatcttcgggtttctataggaaactagttttttttttttaagaaatactttcatttatgtttgctagaaacattttctaaatgatagtgattagctggttagccatcttcctsttatttggaggagttctgccatcttttattcggtagtgacagctgtaatatggtcttcatgtttatcagtgacttgactacaagtaaagcagaaaacagttggcctgtaatcacagaaccagccacccttcggcgtctac

SEQ ID NO: 26854 - DNA, 516 bp, Homo sapiens
ttatagagttatacaaatagaaatacagagaaagagcacctacgaagaaggagggatagttgtgaagtctcggcagagagctttgggaaagatcttatcgaagaatgcctgagtgggtctccatcagaagaaggagagagtgtgggaagaaagagtacacaaattagagtagaaaatgggagcaagaagaaaagatgataaatggtgtgttgaatatgatgaattagaagtagttacattttatggaccactggggagagagatgcttagagataaagttggagaggtagaccaggctgggctcttgattcaggaactygtgttttatcttttaggtaatgaaaaatcattgaggggcttaaaggtgaacaatgacatggtcagatatattctttgcatgggaaaaagttgaatataaagggaccggatgctattttcctaatcctagtaagagagttgagggcttaaactagggtggatgcaggaaagaagaggcgaaaagttgtataaatgtag

SEQ ID NO: 26855 - DNA, 1072 bp, Homo sapiens
tccagcattcactcaccagtccatacttgaactgcccttcctccatgcccaccactcaccaaagctgttaacgagacctctttccagggagaacttcacctgggggttgacctgcatagggtcacctccaagagaagcatctttgcatggtatgcaagaaacatcaagaaaaacgccctcatcctctggtccagctgtaccccatcagctggaatcaagggcttggagccccccagaccacctgttaccaccaagtgggcccaagctgaggccttgtgttgttttatgtgactattcatcctgccatgaacaggtctgtgctgctcagttattgcccwcactctggtgctagcccagacatcagcttagagataagaagacaagcgtatgggagtcaaaggtaaacttccagttaccgtgctgccaggagggtgcagttattgaagtggcctggagtgctacctgagcactgagagcaacatttctccctgagacatctgatatgccaggtgaagcttttgaaggatattctgtagtatccctagtaaggaaacaacagaaactaacgcttggaggaataagggagcagtgggctcaagggaaatacacaccattggatattgatggagaatgcactgtaaagcccagaggcaaggaacagtaggtgatgaagctgctccccacatggagtttatattctatgaagggagagagacaaaaagaaaagaaacatatacacagaaaatataccagtggtgataggagccaaggggaaagattatacaggagcatggggaaagagctagggatactgtttttagatgagtggtcagggaaggcctctctgagaaagagacattgagcagggacctgagatatgcaggagtgaagctgcagcttactggaggaagaacattctaggctgaggaaacagcaagcacacatgctcagaggtgggctcctgcttggtgttgggttcaaggagcagcagggaggccagtgtgcacacgctgcatcctttctcatctgatctcaccagatcctcatgccacctgggtggaaggccccagat

SEQ ID NO: 26856 - DNA, 1072 bp, Homo sapiens
tccagcattcactcaccagtccatacttgaactgcccttcctccatgcccaccactcaccaaagctgttaacgagacctctttccagggagaacttcacctgggggttgacctgcatagggtcacctccaagagaagcatctttgcatggtatgcaagaaacatcaagaaaaacgccctcatcctctggtccagctgtaccccatcagctggaatcaagggcttggagccccccagaccacctgttaccaccaagtgggcccaagctgaggccttgtgttgttttatgtgactattcatcctgccatgaacaggtctgtgctgctcagttattgcccacactctggtgctagcccagacatcagcttagagataagaagacaagcgtatgggagtcaaaggtaaacttccagttaccgtgctgccaggagggtgcagttattgaagtggcctggagtgctacctgagcactgagagcaacatttctccctgagacatctgatatgccaggtgaagcttttgaaggatattctgtagtatccctagtaaggaaacaacagaaactaacgcttggaggaataagggagcagtgggctyaagggaaatacacaccattggatattgatggagaatgcactgtaaagcccagaggcaaggaacagtaggtgatgaagctgctccccacatggagtttatattctatgaagggagagagacaaaaagaaaagaaacatatacacagaaaatataccagtggtgataggagccaaggggaaagattatacaggagcatggggaaagagctagggatactgtttttagatgagtggtcagggaaggcctctctgagaaagagacattgagcagggacctgagatatgcaggagtgaagctgcagcttactggaggaagaacattctaggctgaggaaacagcaagcacacatgctcagaggtgggctcctgcttggtgttgggttcaaggagcagcagggaggccagtgtgcacacgctgcatcctttctcatctgatctcaccagatcctcatgccacctgggtggaaggccccagat

SEQ ID NO: 26857 - DNA, 1072 bp, Homo sapiens
tccagcattcactcaccagtccatacttgaactgcccttcctccatgcccaccactcaccaaagctgttaacgagacctctttccagggagaacttcacctgggggttgacctgcatagggtcacctccaagagaagcatctttgcatggtatgcaagaaacatcaagaaaaacgccctcatcctctggtccagctgtaccccatcagctggaatcaagggcttggagccccccagaccacctgttaccaccaagtgggcccaagctgaggccttgtgttgttttatgtgactattcatcctgccatgaacaggtctgtgctgctcagttattgcccacactctggtgctagcccagacatcagcttagagataagaagacaagcgtatgggagtcaaaggtaaacttccagttaccgtgctgccaggagggtgcagttattgaagtggcctggagtgctacctgagcactgagagcaacatttctccctgagacatctgatatgccaggtgaagcttttgaaggatattctgtagtatccctagtaaggaaacaacagaaactaacgcttggaggaataagggagcagtgggctcaagggaaatacacaccattggatattgatggagaatgcactgtaaagcccagaggcaaggaacagtaggtgatgaagctgctccccacatggagtttatattctatgaagggagagagacaaaaagaaaagaaacatatacacagaaaatataccagtggtgataggagccaaggggaaagattatacaggagcatggggaaagagctagggatactgtttttagatgagtggtcagggaaggcctctctgagaaagagacattgagcagggacctgagatatgcaggagtgaagctgcagcttactggaggaagaacattctaggctgaggaaacagcaagcacacatgctcagaggtgggctcctgcttggtgttgggttcaaggagcagcagggaggccagtgtgcacacgctgcatcctttctcatctgatctcaccagatcctcatgccacctggrtggaaggccccagat

SEQ ID NO: 26858 - DNA, 1002 bp, Homo sapiens
ggtactcataagcggcagagttgagactgaaaccagtgctgtttcaatatcctcatggtcacctctccctggttctcatccatttgtagatcaagaaggatttgtgatgtccatctatgactgtacctcgttagacctaaagaccctcctggggttcacatcctgggcttccttcttcccttgtcttgggacataagggaggaggttacatggcccagtgcccctcagccccaaagcccccaccacctggtccacttgttgtttgtttgtttcagccccacagaggttgagctggaaactttaaggcctccaggttctgaggctcaccagatattaaaaatgaagacgatagcaaagccgggttagtacttgcatggatgatcttagcctacacaccttgtttctcctttcaaattaatgggtgcccatccaacaattaaagaagggagcccttcctgcakgtggagacaacccaggttgacgagtggaggcacacttgtgcagactggagaaaggcaaagccacggtacagagccttgtggcctacattaagtgtttgcttgtaactacctgaggctttcaccaccgcctatgcacaatccagtggctgatatgaaacctcatttggaaataactctgaaagtctaaatgccatgcccaccatgagcatgagagctgtctctgggacaaagggagaatgaggaggtggaaaagggagctccagctttcagactttttggaaggattcccccgtgagctccagccttgtcttgcagggatcagcagctcaagtcttgtggttatagggtcagttcagctttcaaggcagtgccattttgtgttcaaagtctgagactgttcactctgggcagggcatgcagctgtgactgaagccctaaaatctccccacaagcctcttcccaggcttgccatttccccatcagcaagcctttggcatgaggtctctgggggacctgataatagagaggaataagctgggat

SEQ ID NO: 26859 - DNA, 1002 bp, Homo sapiens
ggtactcataagcggcagagttgagactgaaaccagtgctgtttcaatatcctcatggtcacctctccctggttctcatccatttgtagatcaagaaggatttgtgatgtccatctatgactgtacctcgttagacctaaagaccctcctggggttcacatcctgggcttccttcttcccttgtcttgggacataagggaggaggttacatggcccagtgcccctcagccccaaagcccccaccacctggtccacttgttgtttgtttgtttcagccccacagaggttgagctggaaactttaaggcctccaggttctgaggctcaccagatattaaaaatgaagacgatagcaaagccgggttagtacttgcatggatgatcttagcctacacaccttgtttctcctttcaaattaatgggtgcccatccaacaattaaagaagggagcccttcctgcatgtggagacaacccaggttgacgagtggaggcacacttgtgcagactggagaaaggcaaagccacggtacagagccttgtggcctacattaagtgtttgcttgtaactacctgaggctttcaccaccgcctatgcwcaatccagtggctgatatgaaacctcatttggaaataactctgaaagtctaaatgccatgcccaccatgagcatgagagctgtctctgggacaaagggagaatgaggaggtggaaaagggagctccagctttcagactttttggaaggattcccccgtgagctccagccttgtcttgcagggatcagcagctcaagtcttgtggttatagggtcagttcagctttcaaggcagtgccattttgtgttcaaagtctgagactgttcactctgggcagggcatgcagctgtgactgaagccctaaaatctccccacaagcctcttcccaggcttgccatttccccatcagcaagcctttggcatgaggtctctgggggacctgataatagagaggaataagctgggat

SEQ ID NO: 26860 - DNA, 1863 bp, Homo sapiens
ggtacccttcacagaaggagccaccacagtggagaaggaagctcatggcttttgggcaaggtaggcttaggttcaaaacccggctctccctgtaggacctagggcaactgatcctctctttcttaatctgtaaacggtacctgcctactagggctgtgctgagacttctggataaagtgtcaaagcacctagcccagggccagcacatagtaagcacacctaagtctaagttctcatctcctcttgagggacttagatcttttatccctttttctttcccatcaaatcctccaattctagcctctaacgtggaagagctgtattgactcaacacactagtacaccagtacacaaaggcactagtcaaatcttatggctttgggcagagaatgcccccgtgtgggttgtgtgacctggggcaagcctcttcctttcctctgattgtgggtctttcatctctgatttgagatgcacaggctaggaagtcacctttatttatttatttatttatttatttatggatatggaatctcgctctgtcacccaggctggaatgcagtggcacaatcatggttcactgcagccttgacctcctgggctcaagcgatcctcttaccccgcctccggagtagctgggaccaaaggcgtgcaccaccacacccagctaatttttgtagagatagggtctcactatgttgcccaggctggtctcaaactcctgggagcaagcgattcccccacccaggcttcccagtgttgagattgcaggcatgagccaccacgcccgacccaggaagtcactttaaagccccttctagctctgcctgttgtgtctccccagaagcctccttgtcatatgggatccttggccctgggagggagctggggcagctgtgaaaatcatctaacgagcgcccaaagaggaggctggaccattcttcctcaccactcagcctgattttctttttgtttgtttgttttgttttttgtttttgtttgtttgtttgtttgtttgagacggagtctcgctctgtcatccaggctggagtgcagtggcacaatctaggctcactgcaatgagccattctcctgcctcagtctcctgagtagctgggactacaggcgcccgccaccacgcccggctacatttttgtatttttagtagagacggggtctcactgtgttagccaggatggtctcaatctcctgacctcgtgatccacccaccttggcctcccaaagtgctgggattacaggcgtgagccactgtgcctggcccactcagcctgattttcaagcacccgatcatctcattcattcctcagacacccacatgtccccacttgttggcaggcacgatgagggcacagatgagaaataaagggtctttcacctcaagatgctgacaggccagcagggcagacagacaagcaaacaaatagctaagccagggtgacaggagctatcctagaagcaacagacagagcacagaggatgcaacacgtgattctaccagggatgagggatgggtggtggttcagagaagctaacgagaagcgaatgttggcgttcaggcttgaaggatgagtgggggtctgcctggtgggaaagggaggaggggcactgcaggccaaggacacagcatgggcattggcccagggattggaaagtcctgttccactcttggaatgacctcagagttcagcaaagcttgaggaagttgactgggagatgagagtggaggcacgaaggccagctggctgtctgctgtggagatccagactggagtccacgggaacatgaactrggacagagcctttgtccttagtaggcaatctggggacacaaagaccagccagatct

SEQ ID NO: 26861 - DNA, 622 bp, Homo sapiens
tattgataagccctttcttatcccatttcatcttccgtatctgttagttcacatcctcagggtcaagttctgtgatctcctgtatcttactgatatatgttggcagctcctttgggaaacagtccatttcttcttcagcaggttcagcacatttcccatctggttatattgtgacttagtcctagtttttggactggggccaggaaggtaagtaggggtaagtcacggtgggaaaggtgcatgcaaaaaasactttgcgatgcctttaattaggaagggaacagtggctttgtaacatggagcagtggtctactttgcaagtccagagagctcagaggaatatggggattgaagatttgaaagcatcaaccctgatgtccttatcaagtctcaagatcctactctttcttaactaggcttttgatcttggtataggtgattttccaggattgagaattcaactttctctgtagctctgctgaccttatgattaagtctcttgagcctgaatcctcggctttttctgtcctcctgcttcaagagatggaagtctgtttgtatactgccacaaaggttttctggctttcatactgtacttttaattcattgtaaatctctctgt

SEQ ID NO: 26862 - DNA, 553 bp, Homo sapiens
ggttctcaaagtatggtcacattcatctcaaagtgtggtaaacagcatcacctgggaacccgacagaatacagattgccaggttccaccccacgcctgatgagtcagaaacagggtcagggtcctgcaacctstgtttgcacaagctttccaggtaataatggtgtatgttaacatttcaagaccactggacagcaccatatcatttatgtaaaattaaaatattttatctgtaaaagctctatacattaaaaaattaatatattagatgtattggctcagcacggcagctcacgcctataatcccagcactttgggaggccaaggtgggtagatcacgaggtcaggagatccagaccaccctggctaacatggtgaaacctcgtctctactaaaaatacaaaaaaaaattgctgggcgtggtagcatgcgcctctaatcccagttactggagaggctgaggcaggagaattgcttgaacctgggaggcagaggttgcagtgagctgagatcgtgccactgcactccagcctgggagacagagcaagactcca

SEQ ID NO: 26863 - DNA, 1362 bp, Homo sapiens
tgcatgaaatactgcagccttctctccttattttattatttttttttgagacagggtcttgctctgtcaccaaggctgcacygcagtggtacaatcatagctcactgcagcctcaacctcctgggctcaggtgatccttccacctcagcctcccgagtagctgggactacaggtgtgcaccaccacacctggctaatttttactttttgttgagatgagtctcactgtgttgcctggctggccttctctcattgagagcatgctgagccactccttctacagccatctccagctttgtttattttattagatactaaagttgtaataatgtttatcagactggctgtactcatgaaagggccaattattactgcttttcaaccagtttcttcacagggcaaatagaatgatagagagtttagcaaaagagtgttttaaaaggtagaaaacgttttttggctacggaaaaaggagaatgttgataaatttcatttgtggaaataaccagccaatatcactaattatcaagtatttttctttatatattatggtaatattttatttatttttgagacagagctttgctcttgtcacccaggctggaatgcaatggcacgatctcggctcactgcaacctctgcctcactgattcaagcaattctccttccgcagcctcccaagtagctgggattacaggcgcccgccaccatgcccagctaatttttgtacttttagtggagacggggtttcaccatgttggtcaggctggtctcgaactcctgacctcaagtgatccacccacctcggcctcccaaagtactgggattacaggcatgagccaccgctcccagccatgctaatattttagtatggccatgtccttacttgacccgtctgacttgttatcttagcttcttggtctctgtaaggtgttaggtgaataatttttttcttttttgatacagggtctcactctgttgcccaggctggagtgcaatggtgtgatcttagctcactgcagcctcaacctcccaggctcaagcaatcctcccacctcagcctcttgagtagctgggaccacaggcacgtgccatcacaaccccctaatttttttttttttttttgtagagatagggtttcatcatgttgctctggctggtctcaaactcctgggctcaagtgatcctcctgcctcagcctcccaaagtgttgggagtacaggcgtgaacggctatgccagctagatgaataatttagatgacatttcaaacttattttctaaactcactatttaagccaacaacaggaataggtaatttctttattaaaacaatcaagggttaaaaagtataaaaacataca

SEQ ID NO: 26864 - DNA, 1362 bp, Homo sapiens
tgcatgaaatactgcagccttctctccttattttattatttttttttgagacagggtcttgctctgtcaccaaggctgcaccgcagtggtacaatcatagctcactgcagcctcaacctcctgggctcaggtgatccttccacctcagcctcccgagtagctgggactacaggtgtrcaccaccacacctggctaatttttactttttgttgagatgagtctcactgtgttgcctggctggccttctctcattgagagcatgctgagccactccttctacagccatctccagctttgtttattttattagatactaaagttgtaataatgtttatcagactggctgtactcatgaaagggccaattattactgcttttcaaccagtttcttcacagggcaaatagaatgatagagagtttagcaaaagagtgttttaaaaggtagaaaacgttttttggctacggaaaaaggagaatgttgataaatttcatttgtggaaataaccagccaatatcactaattatcaagtatttttctttatatattatggtaatattttatttatttttgagacagagctttgctcttgtcacccaggctggaatgcaatggcacgatctcggctcactgcaacctctgcctcactgattcaagcaattctccttccgcagcctcccaagtagctgggattacaggcgcccgccaccatgcccagctaatttttgtacttttagtggagacggggtttcaccatgttggtcaggctggtctcgaactcctgacctcaagtgatccacccacctcggcctcccaaagtactgggattacaggcatgagccaccgctcccagccatgctaatattttagtatggccatgtccttacttgacccgtctgacttgttatcttagcttcttggtctctgtaaggtgttaggtgaataatttttttcttttttgatacagggtctcactctgttgcccaggctggagtgcaatggtgtgatcttagctcactgcagcctcaacctcccaggctcaagcaatcctcccacctcagcctcttgagtagctgggaccacaggcacgtgccatcacaaccccctaatttttttttttttttttgtagagatagggtttcatcatgttgctctggctggtctcaaactcctgggctcaagtgatcctcctgcctcagcctcccaaagtgttgggagtacaggcgtgaacggctatgccagctagatgaataatttagatgacatttcaaacttattttctaaactcactatttaagccaacaacaggaataggtaatttctttattaaaacaatcaagggttaaaaagtataaaaacataca

SEQ ID NO: 26865 - DNA, 915 bp, Homo sapiens
gccagtacaatttggtatttcccgtggctgcagtaacaaagcaccactaactgcagacttaaaacagcagaaatgtattctgtcttcgttttgaaaggcagaaatccaaaatcaaggtatccttagggctcagctcccccgaaggactctatgggaggatccttcttgcctcttccagcctctggtggccccaggccatgcttggcttgtggctgcaacatgccaatccctggcctgccttcacatggccttcccctcttctgtcttttgtaaggacacttgttcccccgggtgacccaggatgagttcttcctctcaagggtccttattacatctacaagggtcttttttccaaataaactcattcacagtttccaggggtcaggacatgggcatagcttctgggggccaccattcagctgaccacaccaggtcaccataggatctcatgaatattttgattagaaaatttaacgtggagcagtaagcgctgaggccggatgcactcccagcactgcccctgttcatgagtcatcccccaccgccctgtcacccggtcttgtgatctgacattgccagyctgccagcctctgtgtgccgggttggggatctcagaagatgggattcccaccttgtcatgcccttgctcttgtggtgcgtgaaaagcctttaaattcacatttttgtcgcgttttgtgtgtgtgccaagctgaggagctctgaccaagatagaagacgtttcactgggaaatatgtgcctgaaagtcatgatccaggccccttgttccgatgtactgggtacattgcagatttttcaagatgactctaaagatgttggcgttttgaaacattctgtcagaaaattgtattcaaaaagctttgagtgaacctgtgccatctgcccaacacagcgga

SEQ ID NO: 26866 - DNA, 549 bp, Homo sapiens
aaatattttttgaaggaagggaagaatttaatgagagggtggagcaagtttgtacctatttgtccacttgagaaatgtaagacttccagtccctccgggtatgtcgtgtgagtggtctgggcagctgcatagtagtagatctgtaaagacacacagtcagtctgccttttctccagagatggttaaactatggaggagaacacctctggaaacataccactctttggtctggcatgacctgcttcacgtcaccattaaagaaagtgacagtgatggtcttcccatctgcactcacttcctttcgagttccattgggaaacagtataacacggcacccattcttataaaccttttccacctaaaaaaccaacacaagattatcacctaagattttctcctgacgaaartatggctaattctcctcccaactgcctactttgaaattttttgtaataaaatgtaaaacattccctcaaaagatcctttatttcgtgaggagtagcaaactcgtgattttctaattttctcattccttttccatgtattagc

SEQ ID NO: 26867 - DNA, 1352 bp, Homo sapiens
tttttttttttttttgagacggagtctcgctctgtcgcccaggctggagtgcagtggcgggatctcggctcactgcaagctccgcctcccgggttcacgccattctcctgcctcagcctcccaagtagctgggactacaggcgcccgccactacgcccggctaattttttgtatttttagtagagacggggtttcaccgttttagccgggatggtctcgatctcctgacctcgtgatccgcccgcctcggcctcccaaagtgctgggattasaggcgtgagccaccgcgcccggccccagcaagctctcttaaatactgaataccataaaatgattttgttacagtaggaccaaaatgtgatgataatcaaagatctttagtattcttttgtcctctaatttcaaaaagtattttgtgcaaaaaaatgcatgaatgtttattgatgtgcatattatctacacatatacatacaattctagaagaatagtcaatagtaactgccactaatgagggctggggtgtttgaggtgcagaatgaggaacagatcctttttccttttatacatttttgctgtatttaagaataagtacttctaataaaaactaaaataatgcatgaaatgctaaaagaaaatttaagttaaaatcatcaaaaaggtgtgctttctcttaagccatatgaaagcaaaggaatactacagttacatgattcccaggaagatcacggcacccagcaattgttaaaagcaaatgtgtataaaaatgtggtgcatgtttttctgcaaatacaagcaatatctttataaaaagttcttattcttcaagaatatggtaattatcttaagtaaaaccatcatattcaaatttgtaggttaatttattactatttaacatttcaaactggtagacaaaaaaaaagtttgaacctaggaaaattcagcaaaaagtgatcagccactgttgaaatttgttgaacttaagtaacaggcaatttacaataaggttatgttattttcataaattacaaaggtttatgtactaaaactcttcctacaccaaaaagtccaagtgacaaaagaaaaaaaacagataaattggacttcatcaaaattaaaaactttggtacttaaaaggacactatcaaaaaagtgaaaagaaagctggatgtggtggtccatgcctttagttccagctactctgcaaaaaggcaagagggctgcttgagccccggagttcaagaccagcctgggcaatatagcgagacactctcaaatccattaatgtgaaaagacaacccacagaataaaagaaaatatttgcaatcatatatttgataaggtacttgcatgca

SEQ ID NO: 26868 - DNA, 778 bp, Homo sapiens
agtccgcgaggcggcgtagcgggcctgggtctggccccgggccagcgagagctgcggccgcctgctttctgtgggagcagcgacagcgccgtaatgacagcgcgggcagggcgcgggaagagtgcggggcggacccgaattagaagcgcgggctctcatcaggagatgcagggaccgtggccaagtcccgggagcgtgtcgggcccacttgaaagcaccaggcggctggggaagagcaatcagatggaggagccctaaatctggagctgtttagggtagacagcagccgccgcaagggcacgcaggcaggcaaggagccgccggggctggctgcagtcgcgcgagggccgcttggaaggtgacgatggatttcaagagcgccacccggaggagccccaggacctgcggagggagggaggccggcctaggcaggcctgggcgccgacctcgtttcccgcgtgcccttccccacctccttgggttgcccctgctgcccttacttttgtgagagcctcagcgcctgccgcggccttctctccttgagtcgctcttgttctstaaggcttgctggcccccagggccattgttcttccagacggcggctggaataggctgcagcttcggcatccctggggtggtaagagtcagggctgctgttgagtgggtgcctcctctgtccaggcccagcgctgggagcacccaagctttacaaaggcagcagagcaggcttccctgcgccggctctgggccagactccctgcctggactctggccactt

SEQ ID NO: 26869 - DNA, 914 bp, Homo sapiens
gaattaacaaaatgttttggcatcaaactaccttatttctttagttctagtatcaaataaaccccctatttctgctttaaaaaaaaaaacagtgtgctagacctaaaaccagattcacaacatattttattatttggtatacagaagacaygcagattacacacttttcctaccatctttaacctcctaaactaataattcattcaaataagtactggaaaccctagtaaatgttttgtatttgtgggttagtaaatgttttttgacttgctaattcatgttaataactaagtggaaaaaccaagggcatagcacttcacaaataaaggtgaacaaacaacagaaaaaaaaaaaaaaaatatatatatatatatatgctattagaacacctggatatggtaccttgttctgatggtttagatacagagaccaaaaaaacagaaagaaatgcaatatggtaaaagaaaatgattaatgtaatgataaaataagacttactcaaagacaaactcttctgaccatactgggttttgcccttcccttgcatgagtttttgctacttggacactattcaggtagatgttacaatatggattagtaaaatgttttactgggagtttatgggcttcttcaatatgtaaaacaaggctgctgacctaaaaaaaaaaaaatatatatatatatattaccccagatttctagaattgcactacatttcaaaagcaattactctaagatacaaagccaaaaataatgacttattttccccttttttttcagaaaatgtgagctttggttatatatttgtatatgacatacttaaaacattcagacatttaaaataattcttcccacctaaaagataaaaacaatgcaattttattttacaagttatttctcccagtatattcctg

SEQ ID NO: 26870 - DNA, 627 bp, Homo sapiens
ataattcaggactaataataatgggtattatttgggttcatttcaggcaaactaggatgcagatgacagcttcttcctatcatttcccaccctgaccacccaaggctgaggtccaaaatcaaaaaagaagtcaataataaactcatatctgtttattctccccaaatcaggggacacaaaggcttttttttttttttctgatgagtgggtaatcctaaaataagcaggaaatgcctgtggctcagcctaactcaaggtgagacgaagctggagctgggagctcgaaagtgtcccccagctccctcctcactttgcctgtaackccacctctgcagaaggtaaagtagaattggtagctgtgtcactggtttgggttgagtcctcggtcagggccctctccagactggcgggaagggcgtggatcagcctctcccggaagtcctggcccatgaagacatagagcatggggttgaggcagctgttgaagaaggccagggcacttgtcacatccactgcaataccaatttctttgtacatgccttgcaataactcacggattctgactgtggctataagggccaccacctgatatggggaccagcagagaaaaaaggctgctgcgacaaa

SEQ ID NO: 26871 - DNA, 1240 bp, Homo sapiens
agaattcacaccggagagaagccttacaaatgcagtgaatgtgggaaagccttcacttctaagtctcaattcaaagagcatcagcgaattcacacgggtgagaaaccctatgtgtgcactgaatgtgggaaggccttcaacggcaggtcaaatttccataaacatcaaataactcacactagagagaggccttttgtctgttacaaatgtgggaaggcttttgtccagaaatcagagttgattacccatcaaagaactcacatgggagagaaaccctatgaatgccttgactgtgggaaatcgttcagtaagaaaccacaactcaaggtgcatcagcgaattcacacgggagaaagaccttatgtgtgttctgaatgtggaaaggccttcaacaacaggtcaaacttcaataaacaccaaacaactcataccagagacaaatcttacaaatgcagttattctgtgaaaggctttaccaagcaatgaattcctagtgcatcagcatattcataaatgaaatatactccgagtttcttgaagaagagaaaatcttctcagaatcaggtctaattatatgttattgaattcatgcttcagaaaaactctagggatgcactgcatgtgtgaacacatgataaaaaagtcatgctttattttagtgagggcaattacagagaaaagagtaagcagaaatgtccttctgagtactggcctcattaaggattataaattttctccccgggaagaaaccctgactaacgcattgagaaaagcctttctgtaaagaatggtacaagacaggttgttactcgattatttatagtaaaatatgtgggaaattatatcaatgatraccctgtttattgtgggatatcaatatttttaaagtgccaacacagtcatgataggacaatattttatgtgtgtgtgtgcgccttatgtatataagcatatatataatatataagcatattattatatacaggttgagtatcccttctccaaaatgcctgggatcagaagcattttggatttcagatacttacagattttggaatatttgcattatatttattggttgagcatccctaatctgaaaatccaagattaaatgctccaattagcatttcctttgagcgtcatgttagagttcaaaaagtttcagattttgggttttcagattaggaatacccaacctgtatgtacgtatatttctgtatctatgtatgtatatatatgc

SEQ ID NO: 26872 - DNA, 614 bp, Homo sapiens
atcccctcaaggaacccagctgagaaattcaaccccatcaatataggaaagaaaaaggagaagttctgtgttgccaaatggtggggaaatgaaaggtaactggctattcttcaaaccatccatagtcacaaactgcccacagtctgaggtgttacacagacttccgttgccasatgaggttaggtttgcgtgtcctcacttcctcaaaaaaagtgattattcaggacagtgggtcatttgttgaaatctgacatctgttagaagagaaatacatctgcagagtatacatgaggacaggcatttcttgctcagtacctgaagcccaaaaggatgagttgattctttaagaaaatagcattacacttgcatcaaacccagctgctttgattcagcaagccatgacagttaaaaataggaatatcactaatttttcagatggtatctatatttctgaaaaagaagagatcagcaggcttataaataagatctaagaattctccagctaccaaagcaagaagatgctaaaggacacatgcaagaccaacttgtgattttttttaattacaaaaaaaaaccctcttatattttttaaatactttcattctgcattctga

SEQ ID NO: 26873 - DNA, 1893 bp, Homo sapiens
gtattgacataattttagatgaaggcctctgaggcctctcagaatagctctgttgatcggattctgcattccggtttttctataaaccatagccataatacaattaacactcatgcttcaggcatcattaaagtagaacagaaaatgtcatttgagtgcagaatcatggacagtgtttttttgtttttttttttttaccctaacactttgcaggtctctaacccacacatatttgtacagatttttttttagcaactaacatttatggggtcttttcaaatcattcaagttagtgctcaaagaaaacagaacttttttctgatgtattacagacattgaactcactattgtcattatgttatttagttaaacatgatgtaaactgacaaagtatgggcacaaaaaagaatggttgcccctgtgaacgctaaactgaatgctttagaagactgtacagagatgaattgttgcagggtagcaaatacaactgattcctgctaagcagcaagttgactgacgaaaacagaaaaacatgggtcatctcaacgggagagcagtctaatggccttggggctccgcctgccaccaacatcaggcaataggattgcaggtgaaaagtcactgatccagcaagacagttaagtggaggtcaagtggacaatttccactgtatctactttatatttctgatcccagcaacgtccaggtagagtggaaccctgtccacactctggcccactcctcatcccgcttcttgttctcccaagaggaggaatgcagttctaacgagygagatcccacgacactgaacacatggtttttttctagtggaaagggtcaaccctcccttcttcacctcactcttcacaacactcacctcttgtcttctgcctcatactggtaacaaaaagttataagggcctgtgctttgagggagtggcaaaataagagggtgtggtagatgaggctagggaagggggcatgtcagtctacggacattggactaaggcattcaaactttaccctataggcaatgaggaataactgagatcgaatctgtgcgaaagaaagatcactcatgcaattgatgcggacaataaatcggaggagaatggaggcaggaaggccagtgaggagcctgctgcattcaccagggaaagagacgatgacgcctaaactgatacaggaagctgaggtgaggatgggggtccgcatagcaccagacctaacaatgggttagacatgaggaataaaaaggaaaaagtctccgagaatgcccaggcttctgtcttggctaactggcttcagccagtaaaatcaggaagacaggaatgggagtggggttggagtcagaaagatgaaggcttctgcattggccatttaagcttgtgtttcctgtgagccatgcagaaggagaaagccaggagccgaaatacattcaaacctggactggaagaaacagctcttctagctgcttgaatcaagtgaaaactaccaactgccttgaggatttctcttttcttaagacagggtctctgtctgtctcccaggctggagtgcagttgtataatcatggctcactgaatcctcagctcaagtaattttcccacctcagcctcccaagcagctggaactacaggcatgcgccaccatgcctggctgattttttaatctttttgtagagatgaggtcccactttggtgcctaggctaatcttgaactcctgagcttaagggatcctccctccttggccttccaaagtgctgggattagaactgaggacttctgattgctgttgttccactcaatacttggcagcagaacaggtagagtggaaaaagccatgcttttgaggtcatccaattctgggtggaaattcctagttctgcagat

SEQ ID NO: 26874 - DNA, 583 bp, Homo sapiens
tgaatttctcccagctctctctctcctgggttactttttaacatatgtagcatttttaatttacctttctgttgtcacgatggtcacttatgataaattcctttataaaaattaatctaacttttgcctttaagggtctccaaaaaacaattttagtaaataactcagtgggtcttaggttcatttaggttcagtcctgaaatatattagagtctacaattccattttcagtttggataacatwaaaaaaaataggtagtcaggcacagctattacttttttcccagaaaattgaacgtgtttatacaaataccttttgaaatccagcttgatgcctttattgcttttcataacttcagtcagccactcctgtagagtattatcactgtttgtttcagggggatgggccataattggctggctgtgttctgatccatcacttggaagaaggacatcagcctctatcatgtgagcagtacctgtccaaataaaagaacttcagttaatgctaagaaaacagggcacagaactacaggaggcaccatgttcagtatccttttgaggaagataaaaaaaaaggaaa

SEQ ID NO: 26875 - DNA, 1193 bp, Homo sapiens
tgtcgccacactcaaatagaagaatcacaatagaaactcaaaatttcaggacatagttgtcctcttttaaggaaatgattgctgttttggcttggaggatactgatggagtctgtaacttcagaccttttatcaatatcgacataccctgaagcaactcaaaaatgaacaacctacagaaaattatctgatatcttcgacttacaaccataccaagtcctgccacaaactcatacttttaccttctcatggtgttccctatgcagactgagtgataaggaaatgatcyaacctatttataaatccctccgctctatgcctgcaccagctgccaagtaggctgctgttgacctcacagaggtagtcatggatgtctcagacaaaaaatgaaacaaatagtaatatactaggatttaagcacttgagggagtatgaaaaagataattcatttctcctcaatattggtatttctgtttcaagcaacagaaattcaattgcattttactctgtatgtgtacacgattatctgtttgtttctgcaatatcaaattcctatccaaggtgaccagattctgttgtgaaaagacactgaactattgtataaatgaaggtttttactttgttttatgtacctttctgtactgtttgaatttcgaatcatgtatagccatttctttatgtcaacagcagttatatgaatggtgatttgtaagacatttgaaatttattttttaaataattctctcgactaaaaccactgaatgctgttaaaaacaaaaataatagaacatcttagaattgtggaggtaaaatggaggagaggtgaagaggatgtaggagttatgggtactacatgaaatgaatcaaggaaggcacctatattatagaagctataaatgtaagactattattaaaaataataacacaataaaaataagatgtaatggaaagtaggagaagatgtatctaaattgaggtaaaagtatatgttcttgttatttaaaaaaatcattttatcatcttaaaaaaatgaagcacgaagcacataaaatctttatgctcagagcaaagattgtcaactgggggagaaaattttgccgtcaagggacagtggcaatgtttagggacattttttattatcatgtcttgaaggaaaggattgatcttaatggcacctattggttaggtggcagc

SEQ ID NO: 26876 - DNA, 529 bp, Homo sapiens
acagtttacacatttaagtgctttaatacttccattgaaattcaatggactgcatatatgtgagtctcattgtaagttacatttcaattttttttatttctttttgtgcagtacatacttttttggatttaagtgatcactataacttagtggaacatataatatttatttaatatgttcttttattgtttgctgatatttaattgaaaactttagggaatatacaaaaatagcrttggccttatacatatttgtcctattatgtaacattgcttgtaatttataccaatgttattggtatttcacaaaaaaataatttgaatactttacccctgttttctaccctggaaagttaaatgagttaatggagtcttggagtttgttatctgacattctaacatattgttaacattctaacatattgttcacatatttctaaacattctaacatattgttagaatgtttagaaaattttttatgcagatgtgagaccatcctgagctgttcctattatttgtaagaaagcag

SEQ ID NO: 26877 - DNA, 2704 bp, Homo sapiens
aactcacccccatacttgttgcctgctgttgagagcaccacgtactctggatgcacaactgagaatcttgtgcagcagattggggaggtgaggactccagggtctgagggacgagggtctgggggcccggagtcttgggtctgaggcaggaggcactgagggcctggactcctgggtctgagggaggaggcactgggggcctggactcttgggtctaagcggggaggcactgggggcctggactcagacacagaatagtcacagactggtgaccagctttgcttactctcttttcgaaacagtctggctctgttacccaggctggagtgcagtggtgtgatcttggcccactgcagcctctgcctccagggttcaagcaattctcatgtttcagcctcccgagtagctgggattatagacgcccgccaccacgcccagctgatttttgtatctttagtagagatgaggtttcaccatgttggccagactgctctcaaactcctggcctcatgtgatctgcctgactcggtctcacaaaatcctgggattacagacgtgagcctccacacctggcccacttagtcttactgacaaaactagaacccagagtctcccggggcaggtgatacctggtttcagggtctcctgcctcaaagcccaatgggaattgtggttgtagggctggtgccgtccagccacacagcagttgtggtaggttgggggccggccccaacacccttatggagggggcccgtcatgactgctcggcccctctcctacagcgggggatccacttctccattgtgtctccccggaagctgcctgcgcttcggcttctgtttgagaaggcagcccccccggccttgctggagccgctgcagcctccgacagatgtgagccaggacccgaggcacatggtgctggttcggggactcgtgctgcctggtgaggcctgggcaccgtgcgcggggatgggggctcgacgtgtttccccagctccctctgacttggattttggatttctctcctttctctgcatcttgaatcccttctctctggggttggccatccctcctgctctcagttgggggtggctcagccccaggccccctccagtcaaagcagccagtccccctgcctcccgccgcaccctcaggtgccactctctcagcagccccccagcagcctctgccccccgtccccccgcagtaccaggtatggatatttccgggaagggacatgcttctggggacttgctggagccctggcccctggggagaaatctagttgcatgttggagcttgtgggatgatgggagtcccatgggacattgggaaggtgggactcttggggccatggaagctcatgtgctgtgtgatgggtgttgtgagctaagctatcccagctggtgcctcatggggccatgggtggtgtgacctcgtgggataccaggactggggggccatggtcctcaccagtcccttcccttcttcccttctacccacaggttcccgggaacctgagtgcagctcaggtggccgcgcagaatgcagtggaggctgccaagaaccagaaggctgggctgggccctcgctgtgagtcctggagtgaggatgaagggcgggcaggggccaggcaggcctctctccacacacttgttccccacttcttcccttggtctctcccacagtctcgcccatcacccctctccaacaagctgctcccggagtgggtccccccttcagccaggccccagctccccaactacccccaggaccccctggcgcccccaagccaccacctgcttcccagcccagtctggtctccactgtggcccctggctccggcctggctcccacggcacagcccggggcaccgtccatggtaggtgcctgcacgcctcctgcccctgctccttcctcctgctgtccacagctaggacagttagaggatgagtcatttgccttccagggggatgtggctctcgtggttctggggctttgggggctcgtggtgtgtgtgctgcagatgcctgagatgagggtctggggacagagtggggaggctcatggctccaggagggtcagggctgttccgagaaacccaaggaatccctgggtctgggagtccagggcatcgcacagcttacgagtcctcgaatcctgcaaggtccaagcatttggggtcctgcggctggccaagtgctgttctggggatggaggggcagaagaagggatctttcctccttcctggtttgccctcacaggatggcccccggaggctcccggccttccccattctcatggccctccttcctcccctctggcaggcaggcactgtggccccaggaggggtgagcggcccttccccagcccagctgggagccccagccctcggtgggcagcagtcagtctccaataagcttctggcctggagcggggtcctggagtggcaagaggtgaggggcctgagggtccattgggcacttgggactcctggggccgtggggctgggcatgtaggactcatggggccagatgcgtggggtctgcagtgctgggtttggaggcattcgttgcgctggacctgtgggatgcggggcgaggycaggagccccatggagtggtgggacttgcggtacagaggagagtccccatgcaaagaacccagaaaagcccaggatttggggcccagagaagagccca

SEQ ID NO: 26878 - DNA, 1193 bp, Homo sapiens
agaaatcgtaaactagaggcagccagacaagctacacgtggattcctgagcctcagaaactgtgagataataaatatttgttggtgacatagtttagacgttgtcccctctaaagctcatgttgaattgcaattcctaatgttgtaggcggggtctggtgggaggagattgagtcctggagactgatttctcatgaatggcttagctccatcctctgggtgctgtcctcaaaatagagtgagttcttgcaagatctggttgtttaaaagtgtgtggcatctccccgccactcactctctcttgctctggctcttgccatgtgagatgccagctcgttgtggccataccagaagcagatgttggcaccatgcttcctgtacagcctgcagaactgtgagccaattaaacytattgtcttcataaattacctagtctcaggtatttctttatagcattgcaagaatggtctaacccagttgacttcagttctaagtgttggggtaacttattatacagcaatagataacagatacaggagaggaaaagtgttaagtcattcaaatagtttagccttgtatgaatgtccataacaagtatgacaagaagggctcattatctggagggtagagactgaggcaggatgtgtctaggacttgaaactccttattgtggtcaccaacaacttttgtggactagggaaagtcactttcccttttggactttattttcctttgctataaaagcacaaggttggcctaaagaagcttaaggacccagagtcccttccctgttgcttgggtgtttgttggtggatatgtgaaaggaaaataaatcttggggcccccaaatcactaagctaaagggaaaaatcaagctgggaactgcttagggtcaacctgcctcccattctattcagggccctctctctgctcactgagataaatgcgtatctgattgcctcatttggagagactaatcacaagctcaaaagaatgctaccatttgtctcttatctacctatgatctggaaaccccctcaccacttgaagttgtcctgtcttcacctcaagttgccccatctttccagactgaaccaaagtccatcttacacatattgattgatgtctcatgtctccctaaaatgtataaaacaaagctgtgtcactaccacattgggcacatgtcatcaggac

SEQ ID NO: 26879 - DNA, 595 bp, Homo sapiens
gtggtgaagtctggcttttcgtgtatccatgatctgaatagtgtacattgtacccagtaggtagcagatacattttaaaattattttgctaactccagggtttctcacctcttctcctctcctctgctcttccctcccctccactccactcccacttcttcttctcttctgtcaatttaytctgatgccatgatgtggaactaactggaggggcaagtgggcaagcaggaagaccaattaagagcctatgaaagacattcaggtgaaagatgatggcagcttggatgggggaagtagcagtggagttgaagagaagtggatggatttgagccattttaagattacattgggagcacttggtgatggattagatatggaaagagggaagtaagagagagaaagggtgtcaaagtcaaacggctgttacccgtcccagaggccaaggtgagctttcactgctgggacccaggacatttgaggagtctcaggagccccctccacttccacctctatgctggccactctgtggaatccagtccctgctgagggatcctctgtagcatggggctaccttgggaactaccttctggttctc

SEQ ID NO: 26880 - DNA, 595 bp, Homo sapiens
gtggtgaagtctggcttttcgtgtatccatgatctgaatagtgtacattgtacccagtaggtagcagatacattttaaaattattttgctaactccagggtttctcacctcttctcctctcctctgctcttccctcccctccactccactcccacttcttcttctcttctgtcaatttactctgatgccatgatgyggaactaactggaggggcaagtgggcaagcaggaagaccaattaagagcctatgaaagacattcaggtgaaagatgatggcagcttggatgggggaagtagcagtggagttgaagagaagtggatggatttgagccattttaagattacattgggagcacttggtgatggattagatatggaaagagggaagtaagagagagaaagggtgtcaaagtcaaacggctgttacccgtcccagaggccaaggtgagctttcactgctgggacccaggacatttgaggagtctcaggagccccctccacttccacctctatgctggccactctgtggaatccagtccctgctgagggatcctctgtagcatggggctaccttgggaactaccttctggttctc

SEQ ID NO: 26881 - DNA, 644 bp, Homo sapiens
cacacacacacacacacacgccccttacaaccctgggctctcctatgctctgcctgtgaccacgtcttcacatttatctcctgtgttatcacattctcaycacatacctgcatcactcgtacacctcctcatacactacctaacccactcatcacacttataaggctccgttcacagactaacacacatccaagtgtatcgccaacccaccgcaaacacaaattccctattcagtcaccacataccacagtcatagtgaacaaacccactgcaaacacatattccctattccatcaccacataccacaatcatagtgaacactcactctcttgaagtcttctcatgctacccattgtttcttctttatatttcccccacacccttccactaattcactctcttctcctacacacctacaagcccctcacacactatttcacactcgaactacccacatcatacccaatcatacctcatctcagaaggaacaatatgtaaaatcttagactatgtgaaaacttcacagtgataggtttatcttcgagctctctccaatttttttcttctctcttctgaacaatgtttataactcagaggtgttcctgacaaccatttggggatacttctattctttctgggtacc

SEQ ID NO: 26882 - DNA, 587 bp, Homo sapiens
ttgtggtatgttcataaaatgaaatattatttagctataaaagggaatgatgtaccagcaacagctacagcttggatgaaccttgaaaacattatcctatgtcaaagaagccagacacaaaaggtcacacattctatgattccatgtatgtaaaatatgcaaaataggcaaagccattgaggaagaaagtagactatggattgtcaggggatgggggaatgaggaaatggggagtgattacttttaggctatagggtgttcatcyggggtgatgaaaacatctcgaaactagagagcggtggtcagtctttgcataacattgtaaaggcactaaatgcccctgaaatgtgtactttaaagttgttaactgcacattatgtaaacttgagctcaatgaaaatagtaatacctaacataaaatattctaaaaattaagtaaactaatacatgcaccttgatacataaatttaaacattttttcttaataaacatttgtaaaaaaagtattgtatgataatatttactttttctgaagtagagtttccaaatgtgttatcagattctcaaagagatcgctgatcccccga

SEQ ID NO: 26883 - DNA, 676 bp, Homo sapiens
ttcaggctgctcctgggaagagcacgtggccgtggtccatgtagcttcctcaggccaaaagcatgtctgggagagcatactggctgaactgtgtcaaccaacagtcccagcagcaggaggaacaaattcctcaatcctggaagggcacctggacagtgccactcrctgtccatcacaggtccatggactgcgcagctcgtcttttgagagaagttgctacatgttcattttaaatgtaactggaaactaccagttattaatcctcccatctcaattgtaatgtgacaaagggaatgccttgcttaagatttttagagtaataggccattatttctaaggagaaaaaaatcatccctgagggccactgacctgcagagcttttccatttttctcctttttaaagcttttgcgacctgaagtatcagagctgcagtattatgtaagaagctccaagcaaagagatttgaacttgacttgaagtctttctttactattcaataaaaagttggagatttattggcctatggcagagaccaatttcctgttacatggaccagagaggagattaaaaaaagatttttagagcagcgcccatatttcttaagacaggcaaagaacggagctcacctaattttgcagatcaggctgctagcatggttcttttctctagaccgat

SEQ ID NO: 26884 - DNA, 547 bp, Homo sapiens
ttgaattctttggttcttcccagtttggtctcaggccttctctcacattgtgcaatctcacttgagagtttcaggctctcctgtccttgcagatactgcttactgaggaaggattggccatctataagtckaggctggggtgccctcctgagctatggactcatagcactggtagtcagctggatagttccccttggcagtctaacaactgtgtataagttggcttgttcaaaactgagtttggtgtcatctccacttctcttccctgcaaactggcttctcctgtgtttcctgtccccatgaatggccccattgtccatccagtgtccgagccagaaatctccgctcttccatgtgttttccacccctccatgtgtgatgaaccgtccagttctgtggattccccctcccgtgttgatctcattcatttcagtccccttctttttaatctaaccactacctctcttgaggtttccctgccacctgtctttctccctttcacattccagacagatgaatctgtctccttgtaactctgatcacatga

SEQ ID NO: 26885 - DNA, 572 bp, Homo sapiens
tcccaaagaagcaactaattgcgacaggcatgaaacttgtaattgtatgtattataaagatatttatgaggatattgtacactatttcacacatttctaggtaaaatgtgtgttgggtttatgtgtgcatgcatgcttatatgtatgcatatagtgggtgctcaataaatatttactgaataaattaatatgaggtgcaagagtgttcaccaaaattctgaaccctaaaaacactatgatctactgctacataatttacaatttctgaatccaccatgcttctctttttttctcttattttcccccagtttcagcctaagactgaaaatagagcagaggcttcattaaagtccatcaataattataaataaaagctgattaatcaatcatcaatgagtgtgtttacatcagcrtgatgaggtttcacagtgcattcactgcattagtgaagccaggacttctgggttctggccctggctctgcccttagcgacagtgattctgtgagcaagtcccttggctccctggtccaaagtgtgctcatctataaaattatatgatatgcagggctcc

SEQ ID NO: 26886 - DNA, 1607 bp, Homo sapiens
tcctcctgttcttttccttcaagatgcgctgttcttatactggttaccattactaagaatataattagtgagaatataattgtttacttaatttctgacttgtccattacagtgtaaatttcatgaaagcagatgtcatgtccatcttgtttatgaacagtgcatggcccatagcagatgttcaagaaacatttgatacaaaataaacgaataaactatttttctgacctcaaatagtctgtcctcttcaacaaataatgtctcttcaaagttagcttttcatgttaaacctaagcctgaacccacaaagatcttgaacccaagacactccagcagttacttagcactaatatatagtttaactccgctgtgcttttgcgttatttgtcctgtgttaccccaccagatggtttgtttctcagcacagggcttacttctgtcacttcctctgtctccctgaggtgttctgtacactgggagtggtgttcagcaaacaccgaagccttgctctcgtatcacctacatgctgtaaagtggcattcagtgtgtacccaaggagaccttgttgtggcactgttccacctgcatcactaactcattaatcccggacttgtggaggagaaggctaaaggccttggctagtacagttatgtcccccaagctagagctcccctttttgttaccagttacatgctgctacatgcccagtgtggctttaagtgtgaccttcattggtgaccatagagatggtcacacakttgggcattttgctctcgaggaccagatcagcccatctgtccagggagcctgatgagtctccaggccacttgaccaatacccattctccccccgccatttccatttcattccaatcaggaggctcacggtctggaaataaccagaactgcttctcagcagaaacactggggatgccaatctagagcatcagatgggaaagcaggatccagttcctttattaaagtcctgagtgcccttggaagggagatgaccctttgcctttaatctcctccatctctgcaaaagaggagcagcagaggattaactggtcttatcagggaagcattaagctcactggagataaagcacaactctggagtcaaaggaggagttggagagataggggaggaaacaaatgattagggaaagatgtagagggggagaaacaaatgggaagttaacaaattgtggcttgtgtagcctgggatattaatctgcattccagggcactggatgggttggggaaagcaaggacaggagatggactgtgagggcatcagactgcaaagtatcagtgaccttccacaggcagcagggacaaatgctgttttaggggcaggtctgcagaggcatcatgttccaggttaaggatgcagactggcaagtgaaagggaaatgcaaagtctggtgtggggtgtgcagtcccaaatatcccctttccttctaattcgtactgcattctgatctcatctgaccccctcatctgaccctctcatctgatccccctggttcttgggaactaggtactattgtcatgctgatcttactgatgaggaaactgagtctcagggggttgggtaacctgcctg

SEQ ID NO: 26887 - DNA, 554 bp, Homo sapiens
tgtctgtctcgaggcttcctcctccctcccgttccrcagagctgttctggcaggggcctggagtccagagccgcagcttcgtccctttcggggggcctcagatcgctctgctgctgcccttttcctctggagatctgcgagaagggtgaactgagataatggatgagaaagcatgttgaaaaccacagccggggcttttctctaaggttatcgagtacgtggttctcagggatccaagaacagtgatggacaaggcaaatgtgagccagtatggtcatcagtagctctatattgattatcagccagatggcctaaaagatacctgtctcaatattactagtgtatttttcaataaaataaaccatcactatatgggtatcttcttggtagtcacagacattctatcgaggaaacatggaagccgttggggtcgggctcggagcctggctgtctccactctctacagccagtgcggaagtcttgaaatgacacgactcttggaaaagcaggaggggcagaggcttctttgagtgacttcggtgaagcaacgtgag

SEQ ID NO: 26888 - DNA, 1299 bp, Homo sapiens
aagtattcaatttaatgccattcttcttctttttttttttgaggccgtctcacactgtcacccaggctggggtgcagtggggctcactgcaacctcaaactcttgggctcaagctatcctcccacctcagcctcctgagtagctggaattataggcatgcaccaccacgccctgctaatgttttgtattttttgtagagactgggtttcggcatgttccccaggctggtctcaaactcctggactcaagcaatctgcccgcctcggcctcccacagcagtgggattaaggccagagccactgtgctggacttgtaatgctgttcttaatataagaagctgtgaacagctattcccaataagagggggatggttaaatgaaccatggttcactaactgaacagaacatttactattacaatcgcattgtatgaacattgtaaataggaggatgcacacacatttgtctgtagctggtgcttagtaatgaaagggaatgacaaaagcacatgttcatatgactatgactatgcgtgtatatatactcatgcattcattctagcaattgttttgatcactgattatataacaggtgttggccaggtatacgaaacatactgaggaaatgatgtggtttctgctctcattgaggggtcactcagccggaaggtggccgtgggaagaaatggaaaagtacggaaattcacaaaacgcgaatggagtacagttaggcaaagatgaagggaaggctttgtaaaggagctaacatgtatctacagtggagaaatcacttgtataagagtggaggtactagaaggyacttaaaaattcttaatgtctttattgagatgtaattctcataccttaaacatgttcatttaaaatatacactttaataatttttactatactcacggagttgtgttgttttgttttgttttgtttttttgagacggagtctcactctgttgcccaggctggagtgcagtggtatgatctcggctcattgcaacctccacctcctgggttctagcaattctcctgcctcagcctcctgagtagctgggattacagatgtgcactaccatgctcggctaatttttgtatttttagtagagaggggtttcaccatggtcaggctggtctcgaactcctgacctcatgattcgctgcctcggcctcccaaagtgctgggaatacaggtgtgagccaccgtgcccggccactcacggagtttaatacaaacatcactgaaatctaagtagaacattttcatcctcccagggagctttgcatttttg

SEQ ID NO: 26889 - DNA, 1277 bp, Homo sapiens
taaaagaagaataaacaatgggatcagcatcttggattctgctaagcagccttctctaggcttcagtttcttcagttccataagacaagtggtttggggggaaccttccccaacatgcccacctctcattgtagggatgcaagtaagagaaataacatccaactctagcagccaagaataagaggacagagcaagcagagagagaacaagggggtgaaaytcgtggagggtggagttcttccacgttacggccattcccaccatgagcccattgcccttactcaatggtagcacgcagacggcacctgctggcccaagacctagctccaagggaggactgcgggaaatctcacacaggaaaccagctcctgcgtcatgaagggtcgtcagaggaaaacccccacataatgggtggaaaaccgagaaaaactcctataccaaggaatccccactcagcactggatatgagctctggagaaagttgtccctgagccacaaagtccccaaggccacagcgggcctgaagggaagagcattattgttgtcacaaatgctgggagagcacctggttccctggctcggctgctcctgcagaccagcagggggagaggggactggactagcaggggaccggcgggagggctgtggaatttaggctgaggggaggccactgaatctcccaggcacctgccaccatggaaatccatgttgggggaactgtaaaagcagtagaggccggacgcgctggctcacacctgtaatcccagcatctggggaggccgaagagggcggatcacctgaggtcaggagttcgagaccagcctgaccaacatggtaaaatcccatctctactaaaaatacaaaaattaggccgggcacagtggttcatgcctgtaatcccagcactttgaggggctgaggtgggtggatcacaagatcaagagattgagaccatcctggccaacatggtaaaaccccgtctctactaaaaatacaaaaattagctgggcatggcagcacacacctgtagtcccagctactcgggaggctgaggcaggagaattgcttgaacccaggaggcagaggttgcagtaagccgagcttgcgccactgcactccagcctggcaacagagcaagactccgtctcaaaaaaaaaaaagaaaaaaaaaaacttagccaggtgtggtggcacatgcctgtaaaatgtgcaggggaagaagggcaggtccctttttccccgttgttaccgtgactggcaaaggttgagcgtcaccct

SEQ ID NO: 26890 - DNA, 520 bp, Homo sapiens
cattaaatgttccacctgccttggcctcccaaagtgttgggattatgggcctgagccaccgtgcccagccaatactttggcttttaaccagaacatttagtctaatgcatttaacgaatttactgctatatatatatatatttttttttttgagacacagtctcattgtgtcgcccaggctggagtgcagtggtgcgatcatgactcactgcagcctctgcctcccaggttcaagtgattctcgtgcctcagccttcctagtagctgggacttcaggcgcgtgccaccacgcctggctaatttttgcatttttagtagaaagaagattttatcatgttggccagactsgactcaaactccagacctcaggcgatccgcctgcctcagcctaccaaagtgctgggattacaggcatgagccaccatgcccagcccatttttcccactatactagtttgaaagttaaattctcttttcctattagtattattttagtgatctccctagaaattaccacatgc

SEQ ID NO: 26891 - DNA, 520 bp, Homo sapiens
cattaaatgttccacctgccttggcctcccaaagtgttgggattatgggcctgagccaccgtgcccagccaatactttggcttttaaccagaacatttagtctaatgcatttaacgaatttactgctatatatatatatatttttttttttgagacacagtctcattgtgtcgcccaggctggagtgcagtggtgcgatcatgactcactgcagcctctgcctcccaggttcaagtgattctcgtgcctcagccttcctagtagctgggacttcaggcgcgtgccaccacgcctggctaatttttgcatttttagtagaaagaagattttatcatgttggccagactcgactcaaactccagacctcaggcgatccgcctgcctcagcctmccaaagtgctgggattacaggcatgagccaccatgcccagcccatttttcccactatactagtttgaaagttaaattctcttttcctattagtattattttagtgatctccctagaaattaccacatgc

SEQ ID NO: 26892 - DNA, 1265 bp, Homo sapiens
tattgataaggaattagactagctccaaattttttacataatactataataaatgtccttatacataagtatacatataacatatctatacaaatatcctttacatgtattatatatgcttactgttatatatgtgtgtgtgaatatgctactcaattaatgttcaaaatgtatttaccaacagtatatgaaatgtctttttcaatgaaaccatttcccctgcagcaacacggatggagctggaggccattatcctaagaaaactcatgcaggaacagaaaatcaaatgccacatattcttactcattagtgggaactaaacatgagaactcatggacacaaagaggagaataacatacactggggcctacttgagggaggagcatggcaggagggagacgaccaaaaaactacctttcgagtattttgtttactatgtggctggtgaaataatctgtaccccaagcctccatgatacagtttacctatataataaacctgcacacgtaccccgaagctaagataaaagttcactgaaaagagaagaaaatgtcttttccctcacatttgccattactggttatttttcaaataaattaatgactggaaaaaaaacggtaactgattgtttgctgattttcatttttctgattaacaggcaaggctcaatatcctaataaaagtataaaatttgttcatcatgaatattagctcaaattaggattagtttggcagcacaaagttacctcctgttcaatgttgccataggcttacctgtgatactcttcattctcagtgtcaggaaattgctggctttcaggtgttctgctcttccttggaggaattaatccatcatcaccattgccagcagtggcaccattagtcaggttttctgggaatccgacatgagtacttctgtgcttcttcatttcttcgatagccataaaattttctagctggaaaatacagagaataagaaattatctactttaggcacattatctattgataatcagactaaaaccaagaaagataaaataattggtctaaagytcctaaagtggcattacctagcattttatggcaccattcgggattattccataataatgaaagaatagctctagggtttgcacctcttcaaaattcaatgtacagaattctgagttaactatttaatttttcactgatgatttatgctacttacatgataggatcatgtatgcctacatttactacactttgttaaacaacataatgtaaaa

SEQ ID NO: 26893 - DNA, 1085 bp, Homo sapiens
atcctggcggggacagacgcggggccggtgagccctctccgcccggcgcggccacctccctgaagacccgacaaggacgggggcgggggctcctcccgaccagcgggccgggmgtacccggaaagcagaggtcggggggtgtctggctagcatgcggcccccacccgccccgctcacttgaacacgtcggggtcgatagcgccgcccgccgcctgcgccagctcgtacagctccatctcctcggtgctcagcaccttcttccgccgcagcgccagcttctgccgggccgcctccagccccgggggcgccaccgaccccggcccaggccctacgccctgcgccgccatccccgcggcccgcggaaaggtgcgctccgccccgccgcgccccctagcggctgcgcccaccaccctctccctgcagcgtcaacgtctggcctcccgggctgccctggcgggaggggcgggagcgcggggacggggccgcctccgcggtgccttgaagcccaacagttattgggcgctcacggtgtgctgagcggcgctctaggagccgggagtggcatggcggaccgcaggcttggacttggcgatctgggcctccctgatagactgcattggtcgtgctcgcttaggtggcagcaccagcccagtgccaggcatacattgggcgctcggtaaatgcctctttcaagaaagcgtgcaattttctggtccgcaccggtgcaccactaggggtcgcttttcggggcgggcggggggaaggggggggcactaatcaacaatactgcttacgcgcacgcggattccttgctggggagaaagtaccttggggcgccggaggccgccacaacgcaggcgcattcagctaaggaccactccctcccccgcactcctgcctcgccatttctcttccccgcccggccggccttcgctttgcgcacgcgccttttgaggtaacggcccaaagaggtggaagcgcttttcccgcccggccgcggggcgtggctctgcgcgcagcttgatgacgactttcggcgccgtggcggaatggcggcttccatctctgaggcgagcgacgctatg

SEQ ID NO: 26894 - DNA, 1085 bp, Homo sapiens
atcctggcggggacagacgcggggccggtgagccctctccgcccggcgcggccacctccctgaagacccgacaaggacgggggcgggggctcctcccgaccagcgggccgggcgtacccggaaagcagaggtcggggggtgtctggctagcatgcggcccccacccgccccgctcacttgaacacgtcggggtcgatagcgccgcccgccgcctgcgccagctcgtacagctccatctcctcggtgctcagcaccttcttccgccgcagcgccagcttctgccgggccgcctccagccccgggggcgccaccgaccccggcccaggccctacgccctgcgccgccatccccgcggcccgcggaaaggtgcgctccgccccgccgcgccccctagcggctgcgcccaccaccctctccctgcagcgtcaacgtctggcctcccgggctgccctggcgggaggggcgggagcgcggggacggggccgcctccgcggtgccttgaagcccaacagttattgggcgctcacggtgtgctgagcggcgctctaggagccgggagtggcatggcggaccgcaggcttggacttggcgatctgggcctccctgatagactgcattggtcgtgctcgcttaggtggcagcaccagcccagtgccaggcatacattgggcgctcggtaaatgcctctttcaagaaagcgtgcaattttctggtccgcaccggtgcaccactaggggtcgcttttcggggcgggcggggggaaggggggggcactaatcaacaatactgcttacgcgcacgcggattccttgctggggagaaagtaccttggggcgccggaggccgccacaacgcaggcgcattcagctaaggaccactccctcccccgcactcctgcctcgccatttcycttccccgcccggccggccttcgctttgcgcacgcgccttttgaggtaacggcccaaagaggtggaagcgcttttcccgcccggccgcggggcgtggctctgcgcgcagcttgatgacgactttcggcgccgtggcggaatggcggcttccatctctgaggcgagcgacgctatg

SEQ ID NO: 26895 - DNA, 562 bp, Homo sapiens
acttctattgagtacctcaaggaaatttttggccattctcctcatctgagtgactccaccagcaaattccagcatctgattaccaccaattcaccctgaaaatggctagtgcttctccactcactcatttattctttctcgcaaaggttgtgtactgagagcatgctgtcagcagcagtaacgaagacraggaagggtgtggctggcgtctctaaacacgtggcctggtggttgagacatgcaatcgccatgcactgcgtgaagaataaggggctctcagggctttgtgggagcacttagaagggaaagccagcccggacttcccaaagcctcatgtcttcccagagccagaggtgttgagtctgagatctgaaagctgagtaggcattccacatggaagggggtggggctgtcgcaggtgagtgaaaagatgcacaagactcagacctaagagagactatgacccctgaattactcatcacatgtgggctttggatgttgattgtgaggttagaaaaaaatcagggttgcaatcttgtgtgtcaatctaagggggcttggc

SEQ ID NO: 26896 - DNA, 767 bp, Homo sapiens
caacatcagggcactgactggtagtgtaatcaataactgagatggggcaatggataagtgtgtggtaaacatgcttgagtttgaaaactgagttcaccgagaacagatttgtttaggaaaagagctacagagcaaaaggaagtcaagcaaggagccagaactgctacagggtagaccagaaagaccagcctgttagcctgcgcccagatcaaagaagcccaagaacagtttggcagccatcccaaggggactgctcccttgacctggcggaagtattcctttgagcttcacgcttacactgttccagcctaacaaccaagagccctccccatgccgacacctggcacagaataggaccccaccacgttgggaacacatgccctttgctgcaaacccactggtctctcctcagtctctgtggcttcctcctctttcccctaacctcctagcagtgggggcccaggcccaggcctcactccatgtamgtatgagatgtgtccaggcttagagctccaacaatcttacaattcacacccggacatctcccaaacttaaaccacccaccagaggtcagcctgcctggagacttacacatctctctccacctggacgccaagctggcatgtttcagtttaacaggtccaaaaccaaactcctgctctttccccttaaacctgcttcaccctcagccttcctcatctgttgactgcaacaccatccttcctgttgtttgaacaactaaagattcatcatgcagtggcgtcatc

SEQ ID NO: 26897 - DNA, 525 bp, Homo sapiens
caataatatacttccttacattttctctccctctctcctgttttcttggcrttgcgtttccccaatccaatattggcacattagtttggcctcaggctctgctttgtaggagatcttaactgatgcaataaacatacgcgtgcatgtgtctttatagtataatgatttataatcctttgggtatatacccagtaatgggattgctgggtcaaatggtatttctggttctagatccttgaggaatggccacactgtcttccacaatggttgaactaatttgcactcccaccaacagtgcaaaagctttcctatttcttcacatcctctccatcatctattgtttcctgactttttattcccaaaagtccatcctagtaagaaggataagacaaaatacaagatctggccagatagaaggaggagtggtgagaaataaaatcatatgataaaaacatagcctctggagccagactgcttggattcaaattctgtctccaccacttactagctgtgtaagctagggca

SEQ ID NO: 26898 - DNA, 525 bp, Homo sapiens
caataatatacttccttacattttctctccctctctcctgttttcttggcgttgcgtttccccaatccaatattggcacattagtttggcctcaggctctgctttgtaggagatcttaactgatgcaataaacatacgcgtgcatgtgtctttatagtataatgatttataatcctttgggtatatacccagtaatgggattgctgggtcaaatggtatttctggttctagatccttgaggaatggccacactgtcttccmcaatggttgaactaatttgcactcccaccaacagtgcaaaagctttcctatttcttcacatcctctccatcatctattgtttcctgactttttattcccaaaagtccatcctagtaagaaggataagacaaaatacaagatctggccagatagaaggaggagtggtgagaaataaaatcatatgataaaaacatagcctctggagccagactgcttggattcaaattctgtctccaccacttactagctgtgtaagctagggca

SEQ ID NO: 26899 - DNA, 1008 bp, Homo sapiens
atctcttgtcgatctagaactcgagtggcaggtggraaaccatcccccagtgtgttgtgtttgtaatttgaaaattgttttcaagaaatttttgcaaaaacaggaaaaatcttttacacattgattttttatctctcttattttaccccgttgagtcttcccatttctacgttttctttatttttaaaaaaatcaccttttcaaaatattgtctggatctagctaagggtgggggcagccaacacgggatactaatggagaaaatcttctgtccacattgggggtgccgtggctctcagaggaaactgatagcaaactcatgcacaattaaactcagaaggagaggcacacgcctcggaacacacatgtcaaagaacccacatttggtgcgagcagggctgggcatggtggtggctccacgctgtgtcaatcatctgcctccatccagggctcctcctggagaaagatgagaagggcttatttgaggactgctgggagatcagaggtattcatcacacaggaagagggtgtgcactcttttctttgttaaaaattttatctagattgaaaaacctggtaggaacaaaacactactttgtggagagaatcagtggtgactaatttggtttgggaaagtagaattcaagataggctatttccgaaaccatttaaaatgaggatgggaaaattaaggtattatttcctagttttattcaacttttgggggaatagtttacaaaacttctttttagaagggatctgttatgaaattatagtatgttgaaatgttaaaatacgtgtcaaactttattaaaaaggaagaagatatatatggaccacagttaattacttagttataagagtccatgctgagtttgctgtcagtcaagccaacaagagacgtgatcagttacacagttatctgtgtgtgagagaggagtattttttcttcaacagaggccagttttggagaggaatatcgtaaattttgaaaggaatttttcacgt

SEQ ID NO: 26900 - DNA, 1008 bp, Homo sapiens
atctcttgtcgatctagaactcgagtggcaggtgggaaaccatcccccagtgtgttgtgtttgtaatttgaaaattgttttcaagaaatttttgcaaaaacaggaaaaatcttttacacattgattttttatctctcttattttaccccgttgagtcttcccatttctacgttttctttatttttaaaaaaatcaccttttcaaaatattgtctggatctagctaagggtgggggcagccaacacgggatactaatggagaaaatcttctgtccacattgggggtgccgyggctctcagaggaaactgatagcaaactcatgcacaattaaactcagaaggagaggcacacgcctcggaacacacatgtcaaagaacccacatttggtgcgagcagggctgggcatggtggtggctccacgctgtgtcaatcatctgcctccatccagggctcctcctggagaaagatgagaagggcttatttgaggactgctgggagatcagaggtattcatcacacaggaagagggtgtgcactcttttctttgttaaaaattttatctagattgaaaaacctggtaggaacaaaacactactttgtggagagaatcagtggtgactaatttggtttgggaaagtagaattcaagataggctatttccgaaaccatttaaaatgaggatgggaaaattaaggtattatttcctagttttattcaacttttgggggaatagtttacaaaacttctttttagaagggatctgttatgaaattatagtatgttgaaatgttaaaatacgtgtcaaactttattaaaaaggaagaagatatatatggaccacagttaattacttagttataagagtccatgctgagtttgctgtcagtcaagccaacaagagacgtgatcagttacacagttatctgtgtgtgagagaggagtattttttcttcaacagaggccagttttggagaggaatatcgtaaattttgaaaggaatttttcacgt

SEQ ID NO: 26901 - DNA, 800 bp, Homo sapiens
ccttagctgcttatgagctatgagatatgatgttgcagtgaattactaaattggcctagatataaacttaagttgatgatttttcgacacccatcctaaatttggaccccatccctaacttgcgaaattgaatcaggaatcagtttacaagctcttccctgatttccacccacccacccacacagacaataaaataagcagccccaacaagcccaggatcacaactgggagcttgctcacaggggaggtcgtaaacccactgtttcccttttgtctatatggctgaccccattctctctgccttgggggaacaarcttggctgtaaaagtctggatagaggcccaaataaaaggtctgaggaagagggagaggctcatgaaggaagaagacaaaaatcagggttcagccgactgccactgaaagtcatacaaatgaatgtcataaatataccatcaaacgggtacaaaggacatgtccggttaggtaggggccatgtgctcaaccatggctttccccgaccaaaaagtatagcccggacttctccatttctcattcatcaacctcatgcaacattcatttagctgctcatggggttgttgggagaaacattatggtcaatcaacagaaataatctcactttataacttagaacccatttatattttcaaaggatttgaagcgtccagcaaaaaggtactaataatctaaaaggataaagtaagtagttgttggacatcagggcccagagaggacagagtttgaaaaatccgagagaggagggtgatacttccacttccca

SEQ ID NO: 26902 - DNA, 1306 bp, Homo sapiens
tcaaagggtcctgtttgtggagggctggacagtagtactagacctcacatccgagcctggaagtatacatttcaagcactagctggacagtccaagttctatttgtcttgcaagtttacaggcggagttaattagtggccagctactttttcagaaaacaatctaggaggagatgaaatctcaatatattgcttcaattatcttgaataacaaagcagaatgttatcaagaaatgaaatcatggctttctagagcattttacatacattatactacttgttataggctgaattgtgtcaccctccaattcatatactaaagccctaaccctcagcatttgaggaggtgacygtatttagagataggtagggcctttaaagaggtcattaagttaaagtgtggcccttatggtagggccaatctcgctggtgtcttataagagaaaactcaggcacacagaaagacaccaaggatgccttcacaaaaaggaaagaccatgagaggacacagggagaaggcaaccatctgcaagccaagcagagcgccctcagaagatgccaaacctgcagacatctcaatcttggacttccaggctccagaactgtgagcaaataaatttctgttgttcaagccacccagactgtggtatttatgacagctgtaacaaacaaatataccacctaagtttctcctagaatgatctatgtgttagatttccaggccctattccagggcctgggcctggacctagtacaaaagagtctgcattttaactgttatcccaagaatattttgatgccaaataaagctcaaaaataactgatagcaaggtcactttatcacctttatagatcaaaagggataaacatttaacctttttttttagtattttttttttatgattacattttggtagtagcaaggcttgaaaattaagatcacagaaaactcacggtctttccctctctaggtctctgttagctgacgcttgttacagaatcggacccttttataatggtcccaagtcctgcctcttactttagacaggaatacctgacaggtggcagacagggaactattcattaacacagatggctgtttccatacctaacacttgccaacacctgcagaaccaaccaagacttactcctttaattaatttttatctttattcttaaaatttaaaagaaaattaaattaaaatccattcactatatataggatatatgacattttcaaaatatagaaatacttgttggaaaaatcttggagccaaatcttgccctcagatacacagatatcttcc

SEQ ID NO: 26903 - DNA, 471 bp, Homo sapiens
tattatagcagcagaaaatggactaagacatttgtcaagtcaccaaaatagggacaatcatacatcaaaataaaaaatctacaatggaactttagagatcatctaattcatgggtgtctgtcctaactatgctttagaatcatctgggaatttttaaaaattctggtgtttggaccatgcccatagcacccatagcaaataaatccacactgaggtggggaggcactagtatttctttataactgtccagcacacagccacagttgagtatccctgctatagctcactcctctcacttgatagacagggaagctgctattcagggccagagttgggaacrgaactcctgttcttagcaggtgtatcagctaagagagcttctcagacctgcttctgtgaacttgctacagttggtgacttatcaccccaggactccatgctaactcttgctactggtagcactcacttgga

SEQ ID NO: 26904 - DNA, 539 bp, Homo sapiens
agaaagtctggtcttacttctatcatctttttaatattacgttatactgagggttctttcctctaacattattgaggtatacttgataattaaaaattgggtgcatttaaggcatacaacttgatgatttgatgtatgtatacattacgaaatatataccacaggacgggcgcggtggctcaagcctgtaatcccagcactttgggaggccgaggcgggcggatcacaaggtcaggagatcgagaccatcctggctaacacggtgaaaccccgtctctactaaaaatacaaaaaattagctgggcgtggtggcgggcgcctgtagtcccggctactcggaagactgaggcaggaaaatggtgtgaacccgggaggcggagcttgcagtgagccgagatggcgccactgcactccagcctggatgacagcaagactctatctcaaaaaaaaaaaaaaraaaagaaaaaaaaaaaaggaatatacaccacaatcaagctaattagtatattcatcacttcatgtagttacacgtgtgtgcg

SEQ ID NO: 26905 - DNA, 539 bp, Homo sapiens
agaaagtctggtcttacttctatcatctttttaatattacgttatactgagggttctttcctctaacattattgaggtatacttgataattaaaaattgggtgcatttaaggcatacaacttgatgatttgatgtatgtatacattacgaaatatataccacaggacgggcgcggtggctcaagcctgtaatcccagcactttgggaggccgaggcgggcggatcacaaggtcaggagatcgagaccatcctggctaacacggtgaaaccccgtctctactaaaaatacaaaaaattagctgggcgtggtggcgggcgcctgtagtcccggctactcggaagactgaggcaggaaaatggtgtgaacccgggaggcggagcttgcagtgagccgagatggcgccactgcactccagcctggatgacagcaagactctatctcaaaaaaaaaaaaaagaaaagaaaaaraaaaaaggaatatacaccacaatcaagctaattagtatattcatcacttcatgtagttacacgtgtgtgcg

SEQ ID NO: 26906 - DNA, 720 bp, Homo sapiens
atctccactacaaaataaagttttgaaaccccgctcaagcaaatattttaaacataaaacaaaataataaaagatcaaaatttgaaggaataactgcagtactatgatgaataaagggataatttatttaacaataggaaacagataaaaatcctaataggaaaagagacaaagatgtatagtcaggtcacagaaaaggcaacacaaatagccaataaatgtgtgaaaagttattctatctcattcactaatctacaaaatgcaaaytaaagcaagtgtatcagagttttcatctatccggttaggaaaggcaaaactttgatgatatgtagcatttttagtgtgtgggagaaaagtacttatattctatcgtttggaggaaatttggcgcaaattctgggtaaagcaatttggctgatctaaaatgtaaaatgcacagagcatttcaatcaatgcttcatttcctgggagcttactctacaggtatgccattgggaaaaaaaaaactcattcatcaggatgttccctgcagaatttgtatggtagtccaagaccaaaaaagcctagttatccatcaagagaggaattgttaattaaattaaatcatagtattcctatacaatggaatgttgcatagccatgggaaaaaatatgagtcagctccaaatatggtgatatgaacaatctccaagataggctgataaggaaggcaaagggctc

SEQ ID NO: 26907 - DNA, 529 bp, Homo sapiens
gaattaatacttgtaaagcaattagaatagggcctgctacaaaacaaggctgatttccttaaagttacaggaatttttccttctagttaagctctaatctcatcctttcctttctctccagcttctgcttgaaattggaggggagggggctatcatttgctcttccatttctttcttggtgctagctgtgacatamgaagtcctaccatccaatgagaacttggcattggtgtggagaaatccttgcaaataaacctgtgggaataatacactcctaacactctagaaacctgggttgagttaaccattaatggtgactgtattagctcattctcacactgctataaggacatacctgagactgggtaatttataaagggaagaggttgaattgactagcagttcagtagggctggggaggcctcatgaaacatacagtcatggcagaaggggaagcaaacatgtccttcttcacatggtggcaggagagagaagaatgagagccaagcgacggaaaaagcctctgata

SEQ ID NO: 26908 - DNA, 2063 bp, Homo sapiens
taagtcagttatttttaatggggaagaggtaaggaaatgaatagcaccatctgttgttgcaaaatgttactgcagcctcctaaatgggtgttaacacctgggcagcattttccacacttgccagtrctattacaattgtaataataacaattagcaccactcaaaatggaaacaagcagctgaaaaatacattttgacccatatgagtaatttgtctaattccacattacattagattaaaaatgtcaaatgtgtttttatcaatagaatattgtcttttactccctcattcagaatgaataaattcactataaaaagatatgtgcttaacaagtaggtgcacctctctgttcataatttaattcttataacccctctaagaaggaaagattattatccccatgtgttgatgagacatcaactcttaaagaaacactcaatgactcacaagctaagtttagtgtgtgaatctgaggttacctcacttatccaacaatcatttaattaaggtcattctataattattgtacacctttgttaataataggagaagaaaaagtatacattgtaaaatggcaaattttatgatatgtgaattatatctccataaagttgatatttgaaaagtatattgaggggagatgggaaaagtgaattagaaatgaaagacatttagaagtgaatcattcaaagggaccaaacaaaaacactgaaaaaaaaataaagatactggtgacttatcttcaaatgcatcagggatgcctagatgttattaacacaagacagggcagcaaaacagaggtagtgttgagggctggaaatagaacatccatggggcaggagttgcaggcatccaggctgtaagtagtagcaatggcttagcaaatctaattgaagatgccaggcttcctatccatgcaaacactccaatctccaacccagatttaaacagatgatcagcactaaggcatccccattggagaagcccatcctctcaccgagtacaagaatcatgaatctatcaagagctctgcaggtcttgcagtcttagttaaggtctgtaggagtcagcaggtctttagcatttggaggtaaagtttatggaaaagacctagtctccaggggtgaggcctgaaaagaacaaagtatggctgtaagcactcttgggaaatgagtgggaatcaaccagatattcatcagcaatacaaaagggatcctctaattatcagacgctgcaaactagctcacagaaaagggattaaaagctgcagggccatgatggagttgtccaatctgaggtcctgtgggagctggggacagctctaaccctacaatcacagtgggactgcaggaatcaggaatcagcattgggacattcagcccccactcagggccacagcaaggaaagttttgagcagaatgtcagggtaggactgtgctgtcacagtggtcagagtatgggatttgccacctaatctgagttgaaggtggcagaagatgagtatgaagcacccctgcccaacagcagaagataaggggcagtagcactaatataattattttctttgacccagttctgcctgggactaggacagacgctggggcaagagagaggttacaggtgagggggtttggtggattcagccatgaggacctgagagaggctcaggcagggcccaagggatggagctggaaataaacatatttggagtgatgattttcaacgtgtaagaaagcaaagaaaataatctctgagcaaagaagctggtcacagcatggagaagagaatcagatcttaaaggtcctgatgtacacaggttagaaaaggtgaggaagaagggcactagagaaggcgagagcagctaagacaatgcagaggagctataagattgaaggaaattataaagatagggccaggtatacagaaaggctgttgtgaaaatgtagagaaatggtatcaatgtacaaagtgagaaagcagatgatgagaactttgattttaaatctagaagagataagacataacttcaagaaaacagcatggtcattgtatgtgaataaaa

SEQ ID NO: 26909 - DNA, 2063 bp, Homo sapiens
taagtcagttatttttaatggggaagaggtaaggaaatgaatagcaccatctgttgttgcaaaatgttactgcagcctcctaaatgggtgttaacacctgggcagcattttccacacttgccagtactattacaattgtaataataacaattagcaccactcaaaatggaaacaagcagctgaaaaatacattttgacccatatgagtaatttgtctaattccacattacattagattaaaaatgtcaaatgtgtttttatcaatagaatattgtcttttactccctcattcagaatgaataaattcactataaaaagatatgtgcttaacaagtaggtgcacctctctgttcataatttaattcttataacccctctaagaaggaaagattattatccccatgtgttgatgagacatcaactcttaaagaaacactcaatgactcacaagctaagtttagtgtgtgaatctgaggttacctcacttatccaacaatcatttaattaaggtcattctataattattgtacacctttgttaataataggagragaaaaagtatacattgtaaaatggcaaattttatgatatgtgaattatatctccataaagttgatatttgaaaagtatattgaggggagatgggaaaagtgaattagaaatgaaagacatttagaagtgaatcattcaaagggaccaaacaaaaacactgaaaaaaaaataaagatactggtgacttatcttcaaatgcatcagggatgcctagatgttattaacacaagacagggcagcaaaacagaggtagtgttgagggctggaaatagaacatccatggggcaggagttgcaggcatccaggctgtaagtagtagcaatggcttagcaaatctaattgaagatgccaggcttcctatccatgcaaacactccaatctccaacccagatttaaacagatgatcagcactaaggcatccccattggagaagcccatcctctcaccgagtacaagaatcatgaatctatcaagagctctgcaggtcttgcagtcttagttaaggtctgtaggagtcagcaggtctttagcatttggaggtaaagtttatggaaaagacctagtctccaggggtgaggcctgaaaagaacaaagtatggctgtaagcactcttgggaaatgagtgggaatcaaccagatattcatcagcaatacaaaagggatcctctaattatcagacgctgcaaactagctcacagaaaagggattaaaagctgcagggccatgatggagttgtccaatctgaggtcctgtgggagctggggacagctctaaccctacaatcacagtgggactgcaggaatcaggaatcagcattgggacattcagcccccactcagggccacagcaaggaaagttttgagcagaatgtcagggtaggactgtgctgtcacagtggtcagagtatgggatttgccacctaatctgagttgaaggtggcagaagatgagtatgaagcacccctgcccaacagcagaagataaggggcagtagcactaatataattattttctttgacccagttctgcctgggactaggacagacgctggggcaagagagaggttacaggtgagggggtttggtggattcagccatgaggacctgagagaggctcaggcagggcccaagggatggagctggaaataaacatatttggagtgatgattttcaacgtgtaagaaagcaaagaaaataatctctgagcaaagaagctggtcacagcatggagaagagaatcagatcttaaaggtcctgatgtacacaggttagaaaaggtgaggaagaagggcactagagaaggcgagagcagctaagacaatgcagaggagctataagattgaaggaaattataaagatagggccaggtatacagaaaggctgttgtgaaaatgtagagaaatggtatcaatgtacaaagtgagaaagcagatgatgagaactttgattttaaatctagaagagataagacataacttcaagaaaacagcatggtcattgtatgtgaataaaa

SEQ ID NO: 26910 - DNA, 351 bp, Homo sapiens
tactatttcctaatcataatgcagtcaaattgttttaaaaaccatttctatcagaaagttgaacactttatttgtcctgagaaatcttttgtgtgcctcccatagcatacaatattgacataatctgtgcccactctgaaagattcatcttattctttttatccaccctttataacaycagtcctccaaacttgttccaacctactccttccttatcctgccaaattatttgacagtatatatgaatcagtgaatagcagtccctttgactctgtctccatctaggcaaactggaaaacaaatgcatggttaagtgttcctctgggagggtaaagaagagggcgtgggagg

SEQ ID NO: 26911 - DNA, 586 bp, Homo sapiens
tgcaagctctgcctcccaggttcatgccattctcttgcctcagcctccagagtagctgggactacaggcgcccgccaccacgcccggctaattttttgtatttttaatagagatggggtttcaccgtgttagccaggatgctctcgatctcctgacgttgtgatccgcctgcctcggtctcccaaagtgccaggattacaggcgtgagccaccgcacccggcctgactgatgcttttaacacttagtaataccaagaactgacgactgcttctatsacagaaaagaaaatcgaaacaggaaaaacaggtacctgatatgattcacaaagtagagaagagaaaaaaaactcaactatattcaaactacttaaactagaacattttaatacccagaaagcattcttaaagcagagactttcagatacaaggtgattcaaaacttcataaaaatatatgagcttcaaactatacatttaacttaacagaatgtccattttcaatttttacaataagtagagaaacagaatcaagttttatgtagtaattcaagatatatataattgcaaataagtgaaaaatttccatt

SEQ ID NO: 26912 - DNA, 528 bp, Homo sapiens
ggagactgaatcagtccaggcccaataaactcattcaaaacaaaccaaactattatgggaagagaggggggaaaggaagggagaattgctttgcacattcacgggtaattgcaaggagtacacaataagttataagcaactgaatcagacagggtccaataaactcttcaaaacaaacaaactattatgagctgaaacgtgtcttcccaaaatttttacratgaacttaaccctaaccctcagtacctcaaaatgtgactatatttgcagatcaggcatttaaaatggtaattaagttaaaatggtgttgtaaaggaaggccctaatccaatataagttcaaattgagattctttttataaaaagagaaaaaggacacagataacaatttacagaaaaaccatgtgaagacaccagaaaaagatgaccattgaaagccaagaagagaggtcttagaagaaaccaatcatgaccacacttcgctcttgcacttctagcctccagaattgtgagaaaataaatttatttt

SEQ ID NO: 26913 - DNA, 528 bp, Homo sapiens
ggagactgaatcagtccaggcccaataaactcattcaaaacaaaccaaactattatgggaagagaggggggaaaggaagggagaattgctttgcacattcacgggtaattgcaaggagtacacaataagttataagcaactgaatcagacagggtccaataaactcttcaaaacaaacaaactattatgagctgaaacgtgtcttcccaaaatttttacaatgaacttaaccctaaccctcagtacctcaaaatgtgactatatttgcagatcaggcatttaaaatggtaattaagttaaaatggtgttgtaaaggaaggccctaatccaatataagttcaaattgagattctttttataaaaagagaaaaaggacacagataacaatttacagaaaaaccatgtgaagacaccagaaaaagatgaccattgaaagccaagaagagaggtcttagaagaaaccaatcatgaccacacttcgctcttgcrcttctagcctccagaattgtgagaaaataaatttatttt

SEQ ID NO: 26914 - DNA, 1156 bp, Homo sapiens
aaagagctgccttagcaatgtaggagactcactcctgatgcagtgccatcctgcagggtgtcaagaattagctaggacataaatacaagctaccgtcytttgtccccttataacatatggtagaatcagtcaacctaaaataagattggcaacagttaaagtgtgagatcttcaattttacctgtgagcattagacttagtaaaaatatgggtccaaagggggttaaaaacatagaaatgaaagaagccatatttggcaatactagatgtggaaaaaagaactaactgatgaatcaactttcattacaaaattttcacaggaaaaaagatctcaacaaaagtaagaaaataagaatgaaaatggaaatattagaagtggtttcaacgtactctgcagaaaagtgatcagaaattaaattgatttgatgcaattcactccagaaaaaaaaatattttttcagcaaaaaatgcattgctgtggaataattaggatgaaattctccacactagcactacaccatgagaatggaagcactgccctaaagcagggattttgttttattcattgctaaatcatcagtgtctaacccagtacaagtctcagactgacttttcccattttattttactgggtttattcaacagttatttactgagtcctcactgggtagcaagtcttcgataatcgtcatggatagagctatgaacaagagctatgaacagctcactccgcctttgagctcaaatctggcagtgtctcagaatcccccaggaaatcttccaagcatgctttgctgtctagagaagtccactagattctgatccacttatgtcctctattctcaacatattaaagctgaagccaccttttccaacccaagcattacaatgagcaatgtagaccaaggcttcataattgatttggtcttttcaaaattctccttttttacacttatttaccaaaaaaagaaaaaaaaaagcttcagtctttattaaacaaaggaagtagaagacagctaagggaacaggtcaggaccgctcctttcccctacacatatgcagacttacaaacacagacgcccccgagtgaatgtcagggaccaccaggggacagactgatgggcagagggaggcaaaaccctccgagaatgggcca

SEQ ID NO: 26915 - DNA, 1156 bp, Homo sapiens
aaagagctgccttagcaatgtaggagactcactcctgatgcagtgccatcctgcagggtgtcaagaattagctaggacataaatacaagctaccgtcttttgtccccttataacatatggtagaatcagtcaacctaaaataarattggcaacagttaaagtgtgagatcttcaattttacctgtgagcattagacttagtaaaaatatgggtccaaagggggttaaaaacatagaaatgaaagaagccatatttggcaatactagatgtggaaaaaagaactaactgatgaatcaactttcattacaaaattttcacaggaaaaaagatctcaacaaaagtaagaaaataagaatgaaaatggaaatattagaagtggtttcaacgtactctgcagaaaagtgatcagaaattaaattgatttgatgcaattcactccagaaaaaaaaatattttttcagcaaaaaatgcattgctgtggaataattaggatgaaattctccacactagcactacaccatgagaatggaagcactgccctaaagcagggattttgttttattcattgctaaatcatcagtgtctaacccagtacaagtctcagactgacttttcccattttattttactgggtttattcaacagttatttactgagtcctcactgggtagcaagtcttcgataatcgtcatggatagagctatgaacaagagctatgaacagctcactccgcctttgagctcaaatctggcagtgtctcagaatcccccaggaaatcttccaagcatgctttgctgtctagagaagtccactagattctgatccacttatgtcctctattctcaacatattaaagctgaagccaccttttccaacccaagcattacaatgagcaatgtagaccaaggcttcataattgatttggtcttttcaaaattctccttttttacacttatttaccaaaaaaagaaaaaaaaaagcttcagtctttattaaacaaaggaagtagaagacagctaagggaacaggtcaggaccgctcctttcccctacacatatgcagacttacaaacacagacgcccccgagtgaatgtcagggaccaccaggggacagactgatgggcagagggaggcaaaaccctccgagaatgggcca

SEQ ID NO: 26916 - DNA, 1156 bp, Homo sapiens
aaagagctgccttagcaatgtaggagactcactcctgatgcagtgccatcctgcagggtgtcaagaattagctaggacataaatacaagctaccgtcttttgtccccttataacatatggtagaatcagtcaacctaaaataagattggcaacagttaaagtgtgagatcttcaattttacctgtgagcattagacttagtaaaaatatgggtccaaagggggttaaaaacatagaaatgaaagaagccatatttggcaatactagatgtggaaaaaagaactaactgatgaatcaactttcattacaaaattttcacaggaaaaaagatctcaacaaaagtaagaaaataagaatgaaaatggaaatattagaagtggtttcaacgtactctgcagaaaagtgatcagaaattaaattgatttgatgcaattcactccagaaaaaaaaatattttttcagcaaaaaatgcattgctgtggaataattaggatgaaattctccacactagcactacaccatgagaatggaagcactgccctaaagcagggattttgttttattcattgctaaatcatcagtgtctaacccagtacargtctcagactgacttttcccattttattttactgggtttattcaacagttatttactgagtcctcactgggtagcaagtcttcgataatcgtcatggatagagctatgaacaagagctatgaacagctcactccgcctttgagctcaaatctggcagtgtctcagaatcccccaggaaatcttccaagcatgctttgctgtctagagaagtccactagattctgatccacttatgtcctctattctcaacatattaaagctgaagccaccttttccaacccaagcattacaatgagcaatgtagaccaaggcttcataattgatttggtcttttcaaaattctccttttttacacttatttaccaaaaaaagaaaaaaaaaagcttcagtctttattaaacaaaggaagtagaagacagctaagggaacaggtcaggaccgctcctttcccctacacatatgcagacttacaaacacagacgcccccgagtgaatgtcagggaccaccaggggacagactgatgggcagagggaggcaaaaccctccgagaatgggcca

SEQ ID NO: 26917 - DNA, 561 bp, Homo sapiens
aaggattccctatttaataaatggtgctgggaaaactggctagccgtatatagaaagctgaaactggatcccttccttacaccttatrcaaaaattaattcaagatggattaaagacttaaatgttagacctaaaaccataaacaccctagaagaaaacctagacaataccattcaggacataggcatgggcaacgacttcatgtctaaaacaccaaaagcaatggcaacaaaagccagaattgacaagtgggatctaattaaactaattaagcttttattcttttatgtagtggtaagagtgaataacagtcaaatgcaaaattcgctttgccttgcacctctgcccttatcaagcccacattatactgatttgtggtgtcaagctactgtgatgacattgatctaaatatcttctcaacaaaataattttagcattgaataccttgggatttcactcactaccaacaacaggtttttagacttttcagctttgtctattcattttgtgtctacagacttgttttggtagaacagctgcttatcagtcagtttttttgca

SEQ ID NO: 26918 - DNA, 602 bp, Homo sapiens
cccagagttcaaggttgcaatgagctatgatcacaccacaacactccagcctgagcaatggagcagagaccttgtctcaaaaaaaaaaaaaaaaatctggaagtttaaatgttggatttttctagagaggctaaaaaatagattttaatgtgatgtttcttggttttcaaatgttggcaatgatttattatttttaaaaagacagaaaccatgggaggttctaaaaaaacaaaataagccatttctgcyggccttattcagtggactacttactcttcccgtaaacagcagtctgttcaagggatttagcagagggcagggtgttagaataagtgttgaatgggcaggatgaggtctgtctcagtgggatttcagggacatcatggcatatgttggtccctcatgtcataaatcaagaggttttcttcccattgatttttccttgggcctgaagtgggctctttacctggaaaactatgtggcattggacccacccaaagcagccccaaagggcagagagtcatagggttgtcttagtctctcccaataagcaacaaaacagtgttctctcctcaccagggtgatcctgagtgagtttggca

SEQ ID NO: 26919 - DNA, 2109 bp, Homo sapiens
ttaattttttaaaataatgaagcctctgccataaagtcagtgtcctggctgccagccaccaggtagaacctaccagacttctccaaaatagatactggggcctccttcctcaaccatggtcaaggcctaagcttccttctcaaaggcaggcagtcctaggctttagggcaagaagtgcttcctacatgcaaggtgctctggggaagggctgmgtgtggcaggccgtgtgtgcaggtctttaggatttcagctgagccaccttttcttgcagttcaagaagaaaacagccaaccattccctccttgtaataaatgcctccgcatatttgaagacagagttaggtcattcttgagctttctcatctccaaacaaaacaactgtggcccctgtaaccttaccttggcaaattataaggcccatatgcagagaaaaagcaaaacaaaaccatctgatggggaaggcctcctatctctgaccaagtgtctgttttgaaatgcggtctgcacttgagtctttaattacatgtaaattcagtagcttcaagcgtctgagccagtgggggaccaggtgctgctcatcaggccccttggatgtgttcaggctgcaatgctgggcgacagcgcttggcagaggctaggatttcttctcttcagattcattttggggcataaaaaggggcatccgtgagtgacccaggagcagtcagctgaccttcctgccaggtcccctgagggtaggatgggccccaagagcctccagagagctggcagcctgccaagaaggctgcccttggcctccacagaagccagcaggagtggcgtccagatgtccctggtggaggctggcagcctcatcctgcagccagtgtcttccaggggaggcttcctgatgctgctaactcagagacagctgccctgctgagcgcctgccctcactgggggtgctgtgatcacatcaagtttcttcccatggttctttccaagctccttcccatatttgtagtgtgttatcttggtgatacagacaagaggcaaggaaatactgggtagaggagggcagttccccggcaaacgcccccaccctcaagtctggaaacccgcagccctaaatgggaacaggcatttgtactttcatgcccaaatgtgggatcctcccccatgacccaaacacctcccaccagggcccacctccaacactggggatcccatttcaatatgagatttggagggaataaatatctaaactgtatcagccaaggttagtgcatttctctgtcctccagttttgcctgccatgagcagctttcctgtgagtcagctgtccttttggtctccagggtcactttctttttttcatgcccaaatggggtggacccaagaacactctggtccaccacaccgctatcctgtgcccatataagcctcaagctccaccagcagagttacaggagagcagaagagtggcagagcagcagagcagcagagtggagtggcagagaaggagagaagagaaggagcatctgaatgttgaaaggagttcagctggggacagtcagagaggagattggctgcaggacagctgaactccaggggaagataatcttcccactccatcccctttccagctccccattcatcccactgagatatcccatttatccgtcactcaataaaatccctgccttcaccaacctacaagtctgagtgacctaattcttcctagatgccagacaaggacccaggtaccaagaaggcagagtgtaaaagactgtcatcttgactctccactgagctggtttaagacttgccatccacggacagcagctgctaaaacagcatgaattgtaacacgctcctagacactaccatggggctggagcccaaaagcgctcaccccagctcctgcacctacccatctgcatgctccccttcccataaggggtttgagcagccagcaaacaagccacaccccatcacaagtcctgcaaggggttcagggtactctcccgtttcactgggagacccaatgcattagtctgtttgtgttgctaagaacacctgagtctgggtattcataaagaaaagaggtttatttggctcatggtactga

SEQ ID NO: 26920 - DNA, 2109 bp, Homo sapiens
ttaattttttaaaataatgaagcctctgccataaagtcagtgtcctggctgccagccaccaggtagaacctaccagacttctccaaaatagatactggggcctccttcctcaaccatggtcaaggcctaagcttccttctcaaaggcaggcagtcctaggctttagggcaagaagtgcttcctacatgcaaggtgctctggggaagggctgagtgtggcaggccrtgtgtgcaggtctttaggatttcagctgagccaccttttcttgcagttcaagaagaaaacagccaaccattccctccttgtaataaatgcctccgcatatttgaagacagagttaggtcattcttgagctttctcatctccaaacaaaacaactgtggcccctgtaaccttaccttggcaaattataaggcccatatgcagagaaaaagcaaaacaaaaccatctgatggggaaggcctcctatctctgaccaagtgtctgttttgaaatgcggtctgcacttgagtctttaattacatgtaaattcagtagcttcaagcgtctgagccagtgggggaccaggtgctgctcatcaggccccttggatgtgttcaggctgcaatgctgggcgacagcgcttggcagaggctaggatttcttctcttcagattcattttggggcataaaaaggggcatccgtgagtgacccaggagcagtcagctgaccttcctgccaggtcccctgagggtaggatgggccccaagagcctccagagagctggcagcctgccaagaaggctgcccttggcctccacagaagccagcaggagtggcgtccagatgtccctggtggaggctggcagcctcatcctgcagccagtgtcttccaggggaggcttcctgatgctgctaactcagagacagctgccctgctgagcgcctgccctcactgggggtgctgtgatcacatcaagtttcttcccatggttctttccaagctccttcccatatttgtagtgtgttatcttggtgatacagacaagaggcaaggaaatactgggtagaggagggcagttccccggcaaacgcccccaccctcaagtctggaaacccgcagccctaaatgggaacaggcatttgtactttcatgcccaaatgtgggatcctcccccatgacccaaacacctcccaccagggcccacctccaacactggggatcccatttcaatatgagatttggagggaataaatatctaaactgtatcagccaaggttagtgcatttctctgtcctccagttttgcctgccatgagcagctttcctgtgagtcagctgtccttttggtctccagggtcactttctttttttcatgcccaaatggggtggacccaagaacactctggtccaccacaccgctatcctgtgcccatataagcctcaagctccaccagcagagttacaggagagcagaagagtggcagagcagcagagcagcagagtggagtggcagagaaggagagaagagaaggagcatctgaatgttgaaaggagttcagctggggacagtcagagaggagattggctgcaggacagctgaactccaggggaagataatcttcccactccatcccctttccagctccccattcatcccactgagatatcccatttatccgtcactcaataaaatccctgccttcaccaacctacaagtctgagtgacctaattcttcctagatgccagacaaggacccaggtaccaagaaggcagagtgtaaaagactgtcatcttgactctccactgagctggtttaagacttgccatccacggacagcagctgctaaaacagcatgaattgtaacacgctcctagacactaccatggggctggagcccaaaagcgctcaccccagctcctgcacctacccatctgcatgctccccttcccataaggggtttgagcagccagcaaacaagccacaccccatcacaagtcctgcaaggggttcagggtactctcccgtttcactgggagacccaatgcattagtctgtttgtgttgctaagaacacctgagtctgggtattcataaagaaaagaggtttatttggctcatggtactga

SEQ ID NO: 26921 - DNA, 2109 bp, Homo sapiens
ttaattttttaaaataatgaagcctctgccataaagtcagtgtcctggctgccagccaccaggtagaacctaccagacttctccaaaatagatactggggcctccttcctcaaccatggtcaaggcctaagcttccttctcaaaggcaggcagtcctaggctttagggcaagaagtgcttcctacatgcaaggtgctctggggaagggctgagtgtggcaggccgtgtgtgcaggtctttaggatttcagctgagccaccttttcttgcagttcaagaagaaaacagccaaccattccctccttgtaataaatgcctcygcatatttgaagacagagttaggtcattcttgagctttctcatctccaaacaaaacaactgtggcccctgtaaccttaccttggcaaattataaggcccatatgcagagaaaaagcaaaacaaaaccatctgatggggaaggcctcctatctctgaccaagtgtctgttttgaaatgcggtctgcacttgagtctttaattacatgtaaattcagtagcttcaagcgtctgagccagtgggggaccaggtgctgctcatcaggccccttggatgtgttcaggctgcaatgctgggcgacagcgcttggcagaggctaggatttcttctcttcagattcattttggggcataaaaaggggcatccgtgagtgacccaggagcagtcagctgaccttcctgccaggtcccctgagggtaggatgggccccaagagcctccagagagctggcagcctgccaagaaggctgcccttggcctccacagaagccagcaggagtggcgtccagatgtccctggtggaggctggcagcctcatcctgcagccagtgtcttccaggggaggcttcctgatgctgctaactcagagacagctgccctgctgagcgcctgccctcactgggggtgctgtgatcacatcaagtttcttcccatggttctttccaagctccttcccatatttgtagtgtgttatcttggtgatacagacaagaggcaaggaaatactgggtagaggagggcagttccccggcaaacgcccccaccctcaagtctggaaacccgcagccctaaatgggaacaggcatttgtactttcatgcccaaatgtgggatcctcccccatgacccaaacacctcccaccagggcccacctccaacactggggatcccatttcaatatgagatttggagggaataaatatctaaactgtatcagccaaggttagtgcatttctctgtcctccagttttgcctgccatgagcagctttcctgtgagtcagctgtccttttggtctccagggtcactttctttttttcatgcccaaatggggtggacccaagaacactctggtccaccacaccgctatcctgtgcccatataagcctcaagctccaccagcagagttacaggagagcagaagagtggcagagcagcagagcagcagagtggagtggcagagaaggagagaagagaaggagcatctgaatgttgaaaggagttcagctggggacagtcagagaggagattggctgcaggacagctgaactccaggggaagataatcttcccactccatcccctttccagctccccattcatcccactgagatatcccatttatccgtcactcaataaaatccctgccttcaccaacctacaagtctgagtgacctaattcttcctagatgccagacaaggacccaggtaccaagaaggcagagtgtaaaagactgtcatcttgactctccactgagctggtttaagacttgccatccacggacagcagctgctaaaacagcatgaattgtaacacgctcctagacactaccatggggctggagcccaaaagcgctcaccccagctcctgcacctacccatctgcatgctccccttcccataaggggtttgagcagccagcaaacaagccacaccccatcacaagtcctgcaaggggttcagggtactctcccgtttcactgggagacccaatgcattagtctgtttgtgttgctaagaacacctgagtctgggtattcataaagaaaagaggtttatttggctcatggtactga

SEQ ID NO: 26922 - DNA, 2109 bp, Homo sapiens
ttaattttttaaaataatgaagcctctgccataaagtcagtgtcctggctgccagccaccaggtagaacctaccagacttctccaaaatagatactggggcctccttcctcaaccatggtcaaggcctaagcttccttctcaaaggcaggcagtcctaggctttagggcaagaagtgcttcctacatgcaaggtgctctggggaagggctgagtgtggcaggccgtgtgtgcaggtctttaggatttcagctgagccaccttttcttgcagttcaagaagaaaacagccaaccattccctccttgtaataaatgcctccgcatatttgaagacagagttaggtcattcttgagctttctcatctccaaacaaaacaactgtggcccctgtaaccttaccttggcaaattataaggyccatatgcagagaaaaagcaaaacaaaaccatctgatggggaaggcctcctatctctgaccaagtgtctgttttgaaatgcggtctgcacttgagtctttaattacatgtaaattcagtagcttcaagcgtctgagccagtgggggaccaggtgctgctcatcaggccccttggatgtgttcaggctgcaatgctgggcgacagcgcttggcagaggctaggatttcttctcttcagattcattttggggcataaaaaggggcatccgtgagtgacccaggagcagtcagctgaccttcctgccaggtcccctgagggtaggatgggccccaagagcctccagagagctggcagcctgccaagaaggctgcccttggcctccacagaagccagcaggagtggcgtccagatgtccctggtggaggctggcagcctcatcctgcagccagtgtcttccaggggaggcttcctgatgctgctaactcagagacagctgccctgctgagcgcctgccctcactgggggtgctgtgatcacatcaagtttcttcccatggttctttccaagctccttcccatatttgtagtgtgttatcttggtgatacagacaagaggcaaggaaatactgggtagaggagggcagttccccggcaaacgcccccaccctcaagtctggaaacccgcagccctaaatgggaacaggcatttgtactttcatgcccaaatgtgggatcctcccccatgacccaaacacctcccaccagggcccacctccaacactggggatcccatttcaatatgagatttggagggaataaatatctaaactgtatcagccaaggttagtgcatttctctgtcctccagttttgcctgccatgagcagctttcctgtgagtcagctgtccttttggtctccagggtcactttctttttttcatgcccaaatggggtggacccaagaacactctggtccaccacaccgctatcctgtgcccatataagcctcaagctccaccagcagagttacaggagagcagaagagtggcagagcagcagagcagcagagtggagtggcagagaaggagagaagagaaggagcatctgaatgttgaaaggagttcagctggggacagtcagagaggagattggctgcaggacagctgaactccaggggaagataatcttcccactccatcccctttccagctccccattcatcccactgagatatcccatttatccgtcactcaataaaatccctgccttcaccaacctacaagtctgagtgacctaattcttcctagatgccagacaaggacccaggtaccaagaaggcagagtgtaaaagactgtcatcttgactctccactgagctggtttaagacttgccatccacggacagcagctgctaaaacagcatgaattgtaacacgctcctagacactaccatggggctggagcccaaaagcgctcaccccagctcctgcacctacccatctgcatgctccccttcccataaggggtttgagcagccagcaaacaagccacaccccatcacaagtcctgcaaggggttcagggtactctcccgtttcactgggagacccaatgcattagtctgtttgtgttgctaagaacacctgagtctgggtattcataaagaaaagaggtttatttggctcatggtactga

SEQ ID NO: 26923 - DNA, 2109 bp, Homo sapiens
ttaattttttaaaataatgaagcctctgccataaagtcagtgtcctggctgccagccaccaggtagaacctaccagacttctccaaaatagatactggggcctccttcctcaaccatggtcaaggcctaagcttccttctcaaaggcaggcagtcctaggctttagggcaagaagtgcttcctacatgcaaggtgctctggggaagggctgagtgtggcaggccgtgtgtgcaggtctttaggatttcagctgagccaccttttcttgcagttcaagaagaaaacagccaaccattccctccttgtaataaatgcctccgcatatttgaagacagagttaggtcattcttgagctttctcatctccaaacaaaacaactgtggcccctgtaaccttaccttggcaaattataaggcccatatgcagagaraaagcaaaacaaaaccatctgatggggaaggcctcctatctctgaccaagtgtctgttttgaaatgcggtctgcacttgagtctttaattacatgtaaattcagtagcttcaagcgtctgagccagtgggggaccaggtgctgctcatcaggccccttggatgtgttcaggctgcaatgctgggcgacagcgcttggcagaggctaggatttcttctcttcagattcattttggggcataaaaaggggcatccgtgagtgacccaggagcagtcagctgaccttcctgccaggtcccctgagggtaggatgggccccaagagcctccagagagctggcagcctgccaagaaggctgcccttggcctccacagaagccagcaggagtggcgtccagatgtccctggtggaggctggcagcctcatcctgcagccagtgtcttccaggggaggcttcctgatgctgctaactcagagacagctgccctgctgagcgcctgccctcactgggggtgctgtgatcacatcaagtttcttcccatggttctttccaagctccttcccatatttgtagtgtgttatcttggtgatacagacaagaggcaaggaaatactgggtagaggagggcagttccccggcaaacgcccccaccctcaagtctggaaacccgcagccctaaatgggaacaggcatttgtactttcatgcccaaatgtgggatcctcccccatgacccaaacacctcccaccagggcccacctccaacactggggatcccatttcaatatgagatttggagggaataaatatctaaactgtatcagccaaggttagtgcatttctctgtcctccagttttgcctgccatgagcagctttcctgtgagtcagctgtccttttggtctccagggtcactttctttttttcatgcccaaatggggtggacccaagaacactctggtccaccacaccgctatcctgtgcccatataagcctcaagctccaccagcagagttacaggagagcagaagagtggcagagcagcagagcagcagagtggagtggcagagaaggagagaagagaaggagcatctgaatgttgaaaggagttcagctggggacagtcagagaggagattggctgcaggacagctgaactccaggggaagataatcttcccactccatcccctttccagctccccattcatcccactgagatatcccatttatccgtcactcaataaaatccctgccttcaccaacctacaagtctgagtgacctaattcttcctagatgccagacaaggacccaggtaccaagaaggcagagtgtaaaagactgtcatcttgactctccactgagctggtttaagacttgccatccacggacagcagctgctaaaacagcatgaattgtaacacgctcctagacactaccatggggctggagcccaaaagcgctcaccccagctcctgcacctacccatctgcatgctccccttcccataaggggtttgagcagccagcaaacaagccacaccccatcacaagtcctgcaaggggttcagggtactctcccgtttcactgggagacccaatgcattagtctgtttgtgttgctaagaacacctgagtctgggtattcataaagaaaagaggtttatttggctcatggtactga

SEQ ID NO: 26924 - DNA, 746 bp, Homo sapiens
tgcaagtgcaggatgatgtttcattccaacaacaacaataacaaaattgaattttggatagcctttagcattccacaaaacagcctctaaagagcccctggaattatggtatctaagtctaaagaggaaacagaagaaattcaaatcaagaattcagaagtgaaacatgtttgctaggctttttctctcctgacttagaatgttgtttccaaaaggtttagtattttgcagtcatgtgatatgtagtcattcaaaaaacaaagtactggaagactgggtggattcaaacaagaataacataaatatcctcatgaaaccaacagtctggtatacgtgaaaacggaggaaattttttgagttcttagtatatagctgtggctttgccctatgtttgcacayatcttattcaatctttacaacaatcctgtaatatagcttatgttaccttctttttaataggttttcatctggttcatcaaatttgctactgatgcatatgtaagacaacctcattaccactgacctggtcaaagccaccatcacctctggtcttgtccattcaaatagtttcctaattggtctccacatttatttttgcccctttccaacctgttctgcactaaaaagccagggtaagcctttggagaccctactacttccctgcatgaaatgcttcattggtttctctcttcatttagaccaaatttctaactcgtcaatggcttacagcgtagcactgcataaca

SEQ ID NO: 26925 - DNA, 566 bp, Homo sapiens
ccagtgattggtggctttgtgatattaaactacgtcggttcttctcctttggttctgcttatccttctcagtgtgtcctgggaggctgatctctgtgggttatattcccaggttcctttgatcctctttctcctgttgtcccatcgcgttcagccaataaaaagcatttacaggtcataggattggaggaagacatgtcaaagcatttattcccacccctgctgcttctctggtcagtttttattgggtggctttcttctrtggctacagagatcactggtaatatactttcgtccctctgccccttcaggactgttttactcatggttctccagaaagacagaagtggtaggagaaatacatatatttatatatatatagatataaatataaatatttatatagatataaatataaatatttatatagatataaatataaatatttatatagatataaatataaatatttatatagatataaatataaatatttatatagatataaatataaatatataaatataaatatttatatagatataaatataaatatataaatataaa

SEQ ID NO: 26926 - DNA, 1086 bp, Homo sapiens
ctaagacgagggtgccttggtgttctgtttgcagcatggccttggtttgcgtgtagtgtcactggttctctgcctctgcagggagatggcttgtcccatgctacccagccagggaggtggctcgtcccaagctgggggtggaggaagctgaggcagtggctgggagagaaggtgtaggatcaggcttaggcgagtcacagagaaggaggagagtcaaagagaasggatcctcactatggaccagtggggttctggggtggtgggggtacaggaccaagttgggccagcccagcctgtcttctgctgaatgatgaatggggctggggtgtcagggatggatggagaagctagcaccaactctacctgccccaggtgctttctgatgaagacgcaaactctcttctggttattgttcttcacaacctcccgtctccctgcaaactcacacaaccaggaaggaaagagagagagagagagagagagagatgacagagcgttcctagtcatctttgtcatcctccccatcatgattatgatcatcgtcatccatgcctggacttcttatataacctgcttaacttgttgagggctgaacttgtctttccacctcctaccttcaaccagcttttgctaacttcctcattctgctcacacattcctctcttccaggcactggctcaccccccactgagtcatcttccactcccccttcctctttcttcccctcctactatcagcaactcactgtagcatgaccgcctgcaactgcttcctgggaggatccgcttccagtcccctctgttcacacgctctccatcctgcgacacgcggctccagccatagctgctcgcaggtcccggatgcctctgtgcctttgcttctgcaattccttctgcttggaacctctctcctcttcctacaccttagccctcaaccttggaggaattagaatgtatggatagttctcttgacagctggtcggggtggggcccttctctgtgctccccaatcccctgttcagaccttgaggatggggctgtttatttcccatttcatgactaggctctaagctgtacgtgtcttatg

SEQ ID NO: 26927 - DNA, 560 bp, Homo sapiens
gactgaagccttgttaatggggcaggctgcaaattcacatcaagggagtgtcatctttcaaagcagcttcttggcagaaggggatgtggaatattagagaaatctgaatctgttaagcttccattaaatgaacccttgattccagactgtgctgagcggaacctagggactgtgggccgtgagtaattgacttcttcagtggcaggatgcctgagaaaggtcgagcgtcctttgggatgaaacatccaccagtttgaaggaggtttttgcttttctgtattcctctgtgtctccttttctatgtacttttacttttttttttttttcgttgatgctttgtgttttgcccaatataatggagatgaaaggcggaggtcttgtgccggggtctggaggatgtgtgtggaacgaccctcgttgtcataggtcatcattttatggctgtcagccttcctcacattgactgtaagtaccttgaggacaggggcaggattttaccttycatcccctttccccgcctcctacctcgttccagtgccactgttgctcaacccatattt

SEQ ID NO: 26928 - DNA, 560 bp, Homo sapiens
gactgaagccttgttaatggggcaggctgcaaattcacatcaagggagtgtcatctttcaaagcagcttcttggcagaaggggatgtggaatattagagaaatctgaatctgttaagcttccattaaatgaacccttgattccagactgtgctgagcggaacctagggactgtgggccgtgagtaattgacttcttcagtggcaggatgcctgagaaaggtcgagcgtcctttgggatgaaacatccaccagtttgaaggaggtttttgcttttctgtattcctctgtgtctccttttctatgtacttttacttttttttttttttcgttgatgctttgtgttttgcccaatataatggagatgaaaggcggaggtcttgtgccggggtctggaggatgtgtgtggaacgaccctcgttgtcataggtcatcattttatggctgtcagccttcctcacattgactgtaagtaccttgaggacaggggcaggattttaccttccatcccctttccccgcctcctacctcrttccagtgccactgttgctcaacccatattt

SEQ ID NO: 26929 - DNA, 577 bp, Homo sapiens
tgtcaggcactgtgctacctgctttccattaattaactcagtcctttctaatgacagaatctagagcttcacgtagttcctggcacataggaaatgctcagagtggtgcttattgttaatggaatgtcctgcatagttaagtctgcccaagtctggaccctgccctgagctgctgcttccatggggactaattgccatgacttggctcatgtaatctctcagtggctccctttgttgcaaatccattcattgcacaaggcctggctcaggaagccacttattcacggtttagtggtttgctggtagagacagatgtgtgagccaatggttgcaatgcagtgctccaggagtgcctgagcacaggggtaagtggtggggtggctgtggggaaccagaggggacastcacctttgtttctggggggtggttcagggaagatctgatggagagaaggtaatagttgagttgggtgttgaaagaacgggagtgtgttgggcagaggcagggaaaaggtatattcaggacactgcaggacactggagatggtcaagaggcagatggtgaagggcctgggtgg

SEQ ID NO: 26930 - DNA, 540 bp, Homo sapiens
tactaaaaacgtggcccagtggattccagttactaacaaagctcgttgagaagatgcaagaaaggaatggaacaatggctaggacctccccgcggcagcacttcccccaagagaatagaggagctgatgggcacgtcacatttttctcaatgctggatgacattccatcaccttcctcatcttcatggaatttttttttttttttttgagacaargtctccctttatcacccaaactggagtgcagtggtgcaatcatgcctcactgcagtcttgacctcccaggctcaagggatcttcccacctcagactcctgagtagctgggactacgggtacataccaccacacccggataatttttgtaattttttagagataaggtttcaccacattgcccaagctggtctcaaattcatggcctcaaacagtgcttcgggttcagcctcccaaagtgctgagattacaggcatgagtcaccgcacccagctggaatgcattctttgaattttaaaagactgtaaatgagagatttgttcagag

SEQ ID NO: 26931 - DNA, 1610 bp, Homo sapiens
tgtcaggtggcctttctgggtcccagtttcttcaactgtgacataaggaaggtagactagatcatcactaccaataaaaggtccctggtccttggggagcagtggttggagtgggagaagggcatcgcccagctattttccaacacatcgtaaaagatatcgcacaggacaactgaatgttgacttggtttgcttacctgtggaattctatccacttggtgtggtaaaacggattctcgccagagaactggaagtgtagatgggtggtgttacctatatccttgattgataagagaaggaaaatgaatttttcctcaataagtacaggttgtttgaaatgcaggctgggtgcagcgacgctgcatggtctccaggcgccttgtgtttctaaccctcttgctggacaacttggcctccacagggtagtccccagggaacccttggccatctccggcctgaaggaatcagggaagaccttccggacatgccaagtctccctgagaccctgctccatgagggctggctccctccccgacctggtcttttggttcaaagtcagtcctggagttatgtctgccaattgaccccaacctccagaaaactcagaaacagcctgtcctctcaggcctgcaaaccaggagcagccaggcccagccctgacttatgcaagtaactaccacagaaggcctgctgtgcagcctatgcckctcaacctggatcaagggcaatgtggagaaaccacattattgcttgactatagtgcagtattccaacaatcattttaaatgtgcacttgtgtaaccatgatcaccatcaagatgtaggatatttccatctctctttagagattcccttttgccctttgctagttaatccccaccccattccctggacccaggaaatcactgatctgctctcaatcacaatagctttgcttttccagaacgtcctgtaaatggaatcacacagtttgtacccttttaaatctagcttctttcacttagctttatgcattttagatgtatccatgttctggcatgtgtcagcaattgttcctttttcctgctgagtagtattccattggatggatatgcgacaatttgtttatccatttaccagttgatagatatttgggttgtttcagatttggggttattatgaataaagctgccatgaacatttgaatatttatgtggacatatgtttccatttctcttgagtaaacgcttgaagtttactgggtcctatagtaagtgtacatttgcctttaaagaacttgtcaaacggttttccaaagaaagtattttttgttctcaccagcaatctatgaggagttctacccggttttgtcagtctttttaattttagccattctaaagggagagaagtgatattccgttgtgttttaaatttgcatttctcccatgactaatgatgttaagcacattttcttgtacacatgtgccctttgtgtatcttcttttaaggatatctgttcagttctctcaccctaccttgaacctacacagggtggaatgtgcctatgacctcggaaggactttagggaagcaagccccactttccccagagaggattccagtacaaacgga

SEQ ID NO: 26932 - DNA, 1610 bp, Homo sapiens
tgtcaggtggcctttctgggtcccagtttcttcaactgtgacataaggaaggtagactagatcatcactaccaataaaaggtccctggtccttggggagcagtggttggagtgggagaagggcatcgcccagctattttccaacacatcgtaaaagatatcgcacaggacaactgaatgttgacttggtttgcttacctgtggaattctatccacttggtgtggtaaaacggattctcgccagagaactggaagtgtagatgggtggtgttacctatatccttgattgataagagaaggaaaatgaatttttcctcaataagtacaggttgtttgaaatgcaggctgggtgcagcgacgctgcatggtctccaggcgccttgtgtttctaaccctcttgctggacaacttggcctccacagggtagtccccagggaacccttggccatctccggcctgaaggaatcagggaagaccttccggacatgccaagtctccctgagaccctgctccatgagggctggctccctccccgacctggtcttttggttcaaagtcagtcctggagttatgtctgccaattgaccccaacctccagaaaactcagaaacagcctgtcctctcaggcctgcaaaccaggagcagccaggcccagccctgacttatgcaagtaactaccacagaaggcctgctgtgcagcctatgccgctcaacctggatcaagggcaatgtggagaaaccacattattgcttgactrtagtgcagtattccaacaatcattttaaatgtgcacttgtgtaaccatgatcaccatcaagatgtaggatatttccatctctctttagagattcccttttgccctttgctagttaatccccaccccattccctggacccaggaaatcactgatctgctctcaatcacaatagctttgcttttccagaacgtcctgtaaatggaatcacacagtttgtacccttttaaatctagcttctttcacttagctttatgcattttagatgtatccatgttctggcatgtgtcagcaattgttcctttttcctgctgagtagtattccattggatggatatgcgacaatttgtttatccatttaccagttgatagatatttgggttgtttcagatttggggttattatgaataaagctgccatgaacatttgaatatttatgtggacatatgtttccatttctcttgagtaaacgcttgaagtttactgggtcctatagtaagtgtacatttgcctttaaagaacttgtcaaacggttttccaaagaaagtattttttgttctcaccagcaatctatgaggagttctacccggttttgtcagtctttttaattttagccattctaaagggagagaagtgatattccgttgtgttttaaatttgcatttctcccatgactaatgatgttaagcacattttcttgtacacatgtgccctttgtgtatcttcttttaaggatatctgttcagttctctcaccctaccttgaacctacacagggtggaatgtgcctatgacctcggaaggactttagggaagcaagccccactttccccagagaggattccagtacaaacgga

SEQ ID NO: 26933 - DNA, 1610 bp, Homo sapiens
tgtcaggtggcctttctgggtcccagtttcttcaactgtgacataaggaaggtagactagatcatcactaccaataaaaggtccctggtccttggggagcagtggttggagtgggagaagggcatcgcccagctattttccaacacatcgtaaaagatatcgcacaggacaactgaatgttgacttggtttgcttacctgtggaattctatccacttggtgtggtaaaacggattctcgccagagaactggaagtgtagatgggtggtgttacctatatccttgattgataagagaaggaaaatgaatttttcctcaataagtacaggttgtttgaaatgcaggctgggtgcagcgacgctgcatggtctccaggcgccttgtgtttctaaccctcttgctggacaacttggcctccacagggtagtccccagggaacccttggccatctccggcctgaaggaatcagggaagaccttccggacatgccaagtctccctgagaccctgctccatgagggctggctccctccccgacctggtcttttggttcaaagtcagtcctggagttatgtctgccaattgaccccaacctccagaaaactcagaaacagcctgtcctctcaggcctgcaaaccaggagcagccaggcccagccctgacttatgcaagtaactaccacagaaggcctgctgtgcagcctatgccgctcaacctggatcaagggcaatgtggagaaaccacattattgcttgactatagtgcagtattccaacaatcattttaaatgtgcactygtgtaaccatgatcaccatcaagatgtaggatatttccatctctctttagagattcccttttgccctttgctagttaatccccaccccattccctggacccaggaaatcactgatctgctctcaatcacaatagctttgcttttccagaacgtcctgtaaatggaatcacacagtttgtacccttttaaatctagcttctttcacttagctttatgcattttagatgtatccatgttctggcatgtgtcagcaattgttcctttttcctgctgagtagtattccattggatggatatgcgacaatttgtttatccatttaccagttgatagatatttgggttgtttcagatttggggttattatgaataaagctgccatgaacatttgaatatttatgtggacatatgtttccatttctcttgagtaaacgcttgaagtttactgggtcctatagtaagtgtacatttgcctttaaagaacttgtcaaacggttttccaaagaaagtattttttgttctcaccagcaatctatgaggagttctacccggttttgtcagtctttttaattttagccattctaaagggagagaagtgatattccgttgtgttttaaatttgcatttctcccatgactaatgatgttaagcacattttcttgtacacatgtgccctttgtgtatcttcttttaaggatatctgttcagttctctcaccctaccttgaacctacacagggtggaatgtgcctatgacctcggaaggactttagggaagcaagccccactttccccagagaggattccagtacaaacgga

SEQ ID NO: 26934 - DNA, 525 bp, Homo sapiens
tgcaaataagaaaattcctgttcttggaatgtgatcagtcatctgcataaggtcttgcgacatatctacgattgaattatttctttgaatcaaggattcccccggccacacacaaatcagtacttgccttactttggaaaacgaaaagagctcactaaagtggtccctcttataataaggtgagagtggcctctaggacaaatttcagcttgtacaattctggaatacagaaagggtagctggctagcgacctttttccatactccaccaggcactgtgtagrggctaagggaaagcttcccctttgccctctgaaagctcactgaaaactcacagaagacagattagtagaagaaaaggcatacgaatttattttaacatgtctagcactggaggatccatagagaacaattacccattaacccttcttcataggggaaggggagatgggggaaatgtggcaatttgagggatggtaaatgatttttagggggagacgagtggacttggggaacttacaatggc

SEQ ID NO: 26935 - DNA, 1240 bp, Homo sapiens
gcgaaaacctgggaggcggaagttgcagtgagctgagatcgcgccactgcactccagcctgggcaacagagcaagactctgtctcaaaaaaaaaaaaaagttagaaaaagatgtgaccaatctagcatcatattcattatttaaaacactacattttacctaaaagacatctacttttctgcggctcaacttactctaaaggcgccagaataaattaatcacacaatgtatttctaggtaaataaaaaatctgacccagacatggagatgtcgaatagatgccaattaaatagcagaggacagctgaataaaaggttgtagtgttaattttaaaggagctgatgtgaagctgctatttccaacagtagctagatagtagggccatatttctattgagggttctttagtttgtgacaatcataccacaccattagcacaggggaaacacatattttgatttctctgtggcaaagagataaataatttgctcaacagtttctgtgaatgaataattctgtcacaaaaagttttcacattaaaatagtggtatcatggtctgtggtttgatgagctgttttctcagtatactgaaaatcattgaaaatcattatatgtttttagtaatcttatttttaaattctgttggtgatttttattttaaaaatatgaatactgaggcattctcgctctgtcgccatgctggagtgtagtggctccacctcgctcactgcaaccttcgtctccagggtamaagcaattctcctgcctcagcctcctgggtagctgggattacaggagtgtgccaccacaccccgcagatttttgtacttttagtagagataggatttcaccatgttggccaggctcatctgcaactcctgacctcaggttatccacctgcttcagcctcccagaatgctgggattacagatgggagccaccacacccatacaagaagtggcttacttcttaagtaattttttattggctgcataaaaattattttacagataatacatttaatttactagaaggattaaactgagaagaggactcttaataaaacacaatcatgtaaataaccataggtatatggactcaagtttgaaagaaacaaaactaagtagaataaaactttactaaatattggtcaggcgcagtggctcatgcctgtaatcccagcactttggaaggccaaggtgagtggatcacttgagttcaagagttcgacactagactt

SEQ ID NO: 26936 - DNA, 519 bp, Homo sapiens
tcccagcaacactgctggctctggatgactctaaatgctgccacctctgccccagacttgaccttgctgaaactgctccaccattagtgtgagaatgagctccttctgctctctgcttctgctcactaattcgctactctgggatgcacatgtgtgtttggcaaaacatgtatcctagatgtatgggacatgtgggaaagtgtttaaccttctgcaattataagacgggaggatggccagatgcagtggctcatgcctttaatcccagcactttaggaggctgaggtgggtggatcacctgaggtcaggagttctagaccagcctggccaacmtggcgaaaccccatctctactaaaaatacaacacttagccaagcgtgttggtgtgtgcctgtaatcccagctacctaggaggctgaggcaggagaatcatttgaacctgggaggcggaggttgcagtgagctaaatcacaccactgcactccagcctgggcaacagagtgggactgtgtctcaaaa

SEQ ID NO: 26937 - DNA, 519 bp, Homo sapiens
tcccagcaacactgctggctctggatgactctaaatgctgccacctctgccccagacttgaccttgctgaaactgctccaccattagtgtgagaatgagctccttctgctctctgcttctgctcactaattcgctactctgggatgcacatgtgtgtttggcaaaacatgtatcctagatgtatgggacatgtgggaaagtgtttaaccttctgcaattataagacgggaggatggccagatgcagtggctcatgcctttaatcccagcactttaggaggctgaggtgggtggatcacctgaggtcaggagttctagaccagcctggccaacatggcgaaaccccatctctactaaaaatacaacacttagccaagcgtgttggtgtgtgcctgtaatcccagctacctaggaggctgaggcaggagaatcatttgaacctgggaggcrgaggttgcagtgagctaaatcacaccactgcactccagcctgggcaacagagtgggactgtgtctcaaaa

SEQ ID NO: 26938 - DNA, 744 bp, Homo sapiens
acatggaatcaacctaaatgcccatcaatggtagactagattaaaaaaaaatggcacatatacacagtggaatactatgcagccataaaaaagaacaagattatgtcctttgcagcaacatggatggagctggaggccattatcctaagcaaactaacacggaaatagaaaaccatatacctcacgttctcacttgtaagtgggagttaaactttgagtacatatggacacaaagaagggaatggtagaccccgaggcctacttaaaagtggagggtgggaggaggaagaggagcagaaaactatctattaggtactatacttattacctgggtgacaaaataatctgtacaccaaatacccatgacatacaatatgcctatataacaaacctgtgcatgtaccctgaacctaaaataaaagttaaaaaaaaaaacaaaactaatggatcagtactcttctcttatgtcaggtaggcaagtctgagcctcattctacatgaattttyataggctgtctagtgggattgagccctaattgctgacaataataaccagtttagtaatgcaccctggaatggccttctctccctccctgtttcctgcttcctagtttcaccactcctgtccccagatcattcctcaacaaacaaaaacgataaactacataaaagtccttgactcaggctttacttttgggggtaacttaatgcaaggcaatcttgaatgactctcaaatatttctt

SEQ ID NO: 26939 - DNA, 744 bp, Homo sapiens
acatggaatcaacctaaatgcccatcaatggtagactagattaaaaaaaaatggcacatatacacagtggaatactatgcagccataaaaaagaacaagattatgtcctttgcagcaacatggatggagctggaggccattatcctaagcaaactaacacggaaatagaaaaccatatacctcacgttctcacttgtaagtgggagttaaactttgagtacatatggacacaaagaagggaatggtagaccccgaggcctacttaaaagtggagggtgggaggaggaagaggagcagaaaactatctattaggtactatacttattacctgggtgacaaaataatctgtacaccaaatacccatgacatacaatatgcctatataacaaacctgtgcatgtaccctgaacctaaaataaaagttaaaaaaaaaaacaaaactaatggatcagtactcttctcttatgtcaggtaggcaagtctgagcctcattctacatgaattttcataggctgtctagtgggatygagccctaattgctgacaataataaccagtttagtaatgcaccctggaatggccttctctccctccctgtttcctgcttcctagtttcaccactcctgtccccagatcattcctcaacaaacaaaaacgataaactacataaaagtccttgactcaggctttacttttgggggtaacttaatgcaaggcaatcttgaatgactctcaaatatttctt

SEQ ID NO: 26940 - DNA, 667 bp, Homo sapiens
aacatggcactggatttcacctagatttctcctaggacctcgttatattattgttaacattatcaattacatacccaccagtgccatgacagtcctgagaacacccatatttggtgtgaaaaaataggtggcaccacagttctgagaaatctctaaatttttccaggaattttaatgaatattccaccccttggttaaagaagcccataaagacagaaactccaaactccatcaaacaactctgtcttaagtacccccacaatcccctttcttgagtatatgcttttcactttgcartaaatctcctactgtcactattttctgactcattcttgaattcctgcttgcaatggtgtcaagagcctgaacactgttatcaccttggccttagacatccagcttccataacatggaaaaaatacatttatgttgtttaaaccacctagttggtgatgttctgttatggcagccctagcagactgatacagaaacaaaggaatagaggtgccaagtaattaattagaatcactcagttagtagatggcagaggggattatgacccaacctctaaccactgcagctctctcagacaagttattctctcacttaagccaagagtccagatgaaaccatctcatgatataaagaatccagaaacaatacttct

SEQ ID NO: 26941 - DNA, 667 bp, Homo sapiens
aacatggcactggatttcacctagatttctcctaggacctcgttatattattgttaacattatcaattacatacccaccagtgccatgacagtcctgagaacacccatatttggtgtgaaaaaataggtggcaccacagttctgagaaatctctaaatttttccaggaattttaatgaatattccaccccttggttaaagaagcccataaagacagaaactccaaactccatcaaacaactctgtcttaagtacccccacaatcccctttcttgagtatatgcttttcactttgcaataaatctcctactgtcactattttctgactcattcttgaattcctgcttgcaatggtgtcaagagcctgaacaytgttatcaccttggccttagacatccagcttccataacatggaaaaaatacatttatgttgtttaaaccacctagttggtgatgttctgttatggcagccctagcagactgatacagaaacaaaggaatagaggtgccaagtaattaattagaatcactcagttagtagatggcagaggggattatgacccaacctctaaccactgcagctctctcagacaagttattctctcacttaagccaagagtccagatgaaaccatctcatgatataaagaatccagaaacaatacttct

SEQ ID NO: 26942 - DNA, 552 bp, Homo sapiens
gactataaaattcttgagactaaatttaataagaactataaagtttgtaaaaagtataaattaatgaagaattgaatagatggatattttcaatcttggactagatgatttaacattttaaagacaccaatatttcctacattcatatagaaacgaaatgcaattccacataaaataccaacaaaattatttttagactgatttagaagaaagtgtcatgagggcttaataaccctaccaaatataagatatactaatattgattaataaagtatagaactggcaaaagaataggcagattaatagatgctatagtttggatatttaaccttcaaatcccatgttgaaatttgatccccagtgttggagttgggacctagttgtttgggtcatgggagtggatccctcattaatagattcatgccctctctgggttcagggttyggggaggcagtgagggatttctcactgtgttagctcctaagaaagctagttgttaaaaagagcctggcaactcttgtctctctctctctctcttgctttctttctcgc

SEQ ID NO: 26943 - DNA, 545 bp, Homo sapiens
tgctctaaggtgtctatgcagatcattatgtattcttcaccacaggtcagttgcttagctaccagagaagtagagaactactaattgaaagtattctgtattgctggcaaggcttgctgcaggacgttgaacttggaaacagcagagactgtgtcagataaaaatgttgcagaggatgaaagaaaaatagttgcagcattatcatactaggaatggttattatttactttatggtaaattctgcaaaatgctttgctgtgcttctgttttrtaagatattaaaattgattttactattaaggatcatttacacaatcagattaaaaatcagagttgtggcatctatttttaaaaagtaaaacagaacacaaaggagaaaaagaagaggaggacaaaagggaagaaacagaagcaacagcactaagttagatccaggtccctaaagacaagtaacaatatctgtatgaacttttctgattgcttattttattttgtaatgaaaacaaagaaagaggatgaggaggaagatgaggatgaggagactg

SEQ ID NO: 26944 - DNA, 545 bp, Homo sapiens
tgctctaaggtgtctatgcagatcattatgtattcttcaccacaggtcagttgcttagctaccagagaagtagagaactactaattgaaagtattctgtattgctggcaaggcttgctgcaggacgttgaacttggaaacagcagagactgtgtcagataaaaatgttgcagaggatgaaagaaaaatagttgcagcattatcatactaggaatggttattatttactttatggtaaattctgcaaaatgctttgctgtgcttctgttttgtaagatattaaaattgattttactattaaggatcatttacacaatcagattaaaaatcagagttgtggcatctatttttaaaaagtaaaacagaacacaaaggagaaaaagaagaggaggacaaaagggaagaaacagaarcaacagcactaagttagatccaggtccctaaagacaagtaacaatatctgtatgaacttttctgattgcttattttattttgtaatgaaaacaaagaaagaggatgaggaggaagatgaggatgaggagactg

SEQ ID NO: 26945 - DNA, 1940 bp, Homo sapiens
agttacctattaaagatctctggttaaattaataaaagccttaaatgcaaatgcatatatatctgtgaaaatgaccaattttatgaatgaagtgtgggagtgattgtgtccagagaaagtaggagaagaagctgtgttcactgtcctcctcgcatttgtcctacagaaattttatcagggggtagaggttgggctatcaggtggcagtacaaagaggatactgctgctaggtgggctgacctctaggtcatttttcttaggttgggtaaggtctgtgtgttcagacaggatcttgatgttctcagattaggagtttcaatatttgccattttgtttaggtaaatttcttcccataaccactcacttgcctaggagccattttcagtactcccattagactgttcaaaagtagaaactcatacctggaaagcagtggctcttatcttctccccagcctattattgtgtttttatgtacataaaagagattcagatactatccttgtttaggacctcttgtttagtgtatagggagaaaaataaaaccaaacatttaacctgaaaatgtctaatctttaagacagagatacctaagggcatcccctctggccataggtaaaatccagatccagaacattttgactggatgaatttgaaacaaaatttgtcatgtgtgaggatgggcaaagggagtgaaggaggaacaagtcgaaattgttaaatattttttactatgtcagtgctacccagagcagttcgcatatgttttggcctcatatccaggatcctctggttagcagtttgacattttgaatgatgtgcttagttaaccatctctccctttctgtttcctcacctgatagtagattaaaatctgtatcactgcgttgttgtgaggatacaattatatcaggcaaaatgccatagtaataatacaaagaaaaaccttattggtaatttattagagacgacrataatattttcgctcatactattatttataactttgtttaaaatgtattatctatatctgttataaatttagcaataggagataagttggaaatttcccaatgatgctaaaagctggtcgatcaatttgagtcaagtaaggaagcattatttccttgctgggttatgcatttctagacgatcagatactagtctaacctaaactaccttcacaatgtctacctgtaagaatgtccagttagagtcaaaatttgagttataaaaatttgctatttttagaaatgcaattttcttgtttttaagtcatataataactcgcaataaaccaaaaaggagctattcaatagagacatgaggaagaattctttcaatcctcaaacatgattgatgtgtatttagcagaaaaattctcataacaataggggctttttagtatgtgaaagaggtaagctaagtaattcatgttgttctttacagtcttttaagacaatgaataccatcgtcaatactttttatttttaaagcactttagaaataacaactctatattccaatttctctatttctcactggaatttgaataaaataagtcttgtagcaccctttccaatgcaattttagaaagtatttccaatggccatgacttggtgacataaattataacaattatttttataataaacactagtatttcttaaaaattcaagttcataaaaagctataagcctcacagttctattctcagtaaatattaaatatattcaagctgaggaagctgtgactcatttattcaaaaataatatagcttataattggtaaagccatatcttgaacacaagcccaacacttttcccattacattttatttctcagttgaatagggtaattggctcatctgtacaggtttagtgttcaagcctctacagtgtgcaggggcattcagttactctgtctgtctacctgttacat

SEQ ID NO: 26946 - DNA, 625 bp, Homo sapiens
tctcctgagtagcagggactgcaagtgcatgacaccatactagctaatttttgtaaagatggggtttcaccatgttgccctggctgatctccaactcctggactcaagagatctggccaccttggcctcccaaagtgctgggattatagatttgaggcaccgcratcagcccagccttaaaaaagggtgactagagatctttatctatgtatatctatctataaaataaacatatgtgtttcttatataaaaatatatactattaatattatataaaaatttttttcaaggtagaaatatataaagagggtgcatgtagagcctggggcattgtgtagtgaagctcaaggcctctgaagaaatgatccttgcctcttttgtctgggctagaatccgagaagggaaagcagcagatgcactggttcccaggttcttggcatcctacagagagaaacttgtttgagctagggtagcgttaaacacccttgttcttactctcctgttttatgtagtgagcagagactagcttcatgagaacagactgtgacagccaaggctgtctgttattttgtgcagcattaattgagaaattctagcacctgaagacctctgggccatttgaggg

SEQ ID NO: 26947 - DNA, 625 bp, Homo sapiens
tctcctgagtagcagggactgcaagtgcatgacaccatactagctaatttttgtaaagatggggtttcaccatgttgccctggctgatctccaactcctggactcaagagatctggccaccttggcctcccaaagtgctgggattatagatttgaggcaccgcaatcagcccagccttaaaaaagggtgactagagatctttatctatgtatatctatctataaaataaacatatgtgtttcttatataraaatatatactattaatattatataaaaatttttttcaaggtagaaatatataaagagggtgcatgtagagcctggggcattgtgtagtgaagctcaaggcctctgaagaaatgatccttgcctcttttgtctgggctagaatccgagaagggaaagcagcagatgcactggttcccaggttcttggcatcctacagagagaaacttgtttgagctagggtagcgttaaacacccttgttcttactctcctgttttatgtagtgagcagagactagcttcatgagaacagactgtgacagccaaggctgtctgttattttgtgcagcattaattgagaaattctagcacctgaagacctctgggccatttgaggg

SEQ ID NO: 26948 - DNA, 625 bp, Homo sapiens
tctcctgagtagcagggactgcaagtgcatgacaccatactagctaatttttgtaaagatggggtttcaccatgttgccctggctgatctccaactcctggactcaagagatctggccaccttggcctcccaaagtgctgggattatagatttgaggcaccgcaatcagcccagccttaaaaaagggtgactagagatctttatctatgtatatctatctataaaataaacatatgtgtttcttatataaaaatatatactattaatattatataaaaatttttttcaaggtagaaatatataaagagggtgcatgtagagcctggrgcattgtgtagtgaagctcaaggcctctgaagaaatgatccttgcctcttttgtctgggctagaatccgagaagggaaagcagcagatgcactggttcccaggttcttggcatcctacagagagaaacttgtttgagctagggtagcgttaaacacccttgttcttactctcctgttttatgtagtgagcagagactagcttcatgagaacagactgtgacagccaaggctgtctgttattttgtgcagcattaattgagaaattctagcacctgaagacctctgggccatttgaggg

SEQ ID NO: 26949 - DNA, 625 bp, Homo sapiens
tctcctgagtagcagggactgcaagtgcatgacaccatactagctaatttttgtaaagatggggtttcaccatgttgccctggctgatctccaactcctggactcaagagatctggccaccttggcctcccaaagtgctgggattatagatttgaggcaccgcaatcagcccagccttaaaaaagggtgactagagatctttatctatgtatatctatctataaaataaacatatgtgtttcttatataaaaatatatactattaatattatataaaaatttttttcaaggtagaaatatataaagagggtgcatgtagagcctggggcattgtgtagtgaagctcaaggcctctgaagaaatgayccttgcctcttttgtctgggctagaatccgagaagggaaagcagcagatgcactggttcccaggttcttggcatcctacagagagaaacttgtttgagctagggtagcgttaaacacccttgttcttactctcctgttttatgtagtgagcagagactagcttcatgagaacagactgtgacagccaaggctgtctgttattttgtgcagcattaattgagaaattctagcacctgaagacctctgggccatttgaggg

SEQ ID NO: 26950 - DNA, 497 bp, Homo sapiens
gctgtagcaaacctgttttcaaaaacctcttcattcatgaaaagagagtaataacaacagggaaaattatgtgaatttggaacaagagcaaaataagacaatgtagcaatagtagacagtgtaattacttgatatgaatgttaggcagtgtattaatgtatttcttttgcaccgtaaggtccaaaatagtagcattgaatgccacagcctatgaggtattcatcaagatttgtcaatttagtatcrgtttcctacagcttagaaaaactgtttgtctgagtacccataaggagcctaaattcctggtgggaggggatcttatcttttttacttggtggtgccagtgtttttcatatattagtcaagagaagaaagatttttattgcctctctccaactcatttttccattcctgtccccattgttggaaacacatgctcagtgtcacaaaaaagaactagcgctgaaacaaaggacaaagggtctctcagcaaggca

SEQ ID NO: 26951 - DNA, 497 bp, Homo sapiens
gctgtagcaaacctgttttcaaaaacctcttcattcatgaaaagagagtaataacaacagggaaaattatgtgaatttggaacaagagcaaaataagacaatgtagcaatagtagacagtgtaattacttgatatgaatgttaggcagtgtattaatgtatttcttttgcaccgtaaggtccaaaatagtagcattgaatgccacagcctatgaggtattcatcaagatttgtcaatttagtatcggtttcctacagcttagaaaaacygtttgtctgagtacccataaggagcctaaattcctggtgggaggggatcttatcttttttacttggtggtgccagtgtttttcatatattagtcaagagaagaaagatttttattgcctctctccaactcatttttccattcctgtccccattgttggaaacacatgctcagtgtcacaaaaaagaactagcgctgaaacaaaggacaaagggtctctcagcaaggca

SEQ ID NO: 26952 - DNA, 1127 bp, Homo sapiens
tgagcccagactcttccctattcacccacttggacgaatgaatggctgtctcctgctggcctcactcctccatagcatagtgaaccactctcaattttaaagttccattagagaagatgacttatttgagtaaattaggaagtcaagggaatttgagcagttccaagaccartcaatgcttaggtgtgttttttgttttttgttttttgttttgtgtgtgtgtgtgtgtgtgtgtgtgtgtgtgtgtgtgtgtgtaggaagctccagggctatccttgagaggagatatcaattactagtctaaaaaagcacagacctctgacctctgcttttactaaaattaataaccaccttctgtcatatgtatgtctagcataaaaattttatttacatcattgcttttttgatataagtattattcattttgtaaatgaaaaaataaactacatagcaaggagaggactcaaatccacttcatggacttcttcctactgtctatgtgaagtcagtttagtctctgattagacattctctctgtaaagttacttacaatatgcatttactagtaagaatattgaacatcatccatgaaaatatctttcagtatactctacaaattgcaaagagtaaaatatatttgaatgaactatgatatataaccgttttactgaacattaatagaatgcaatgtcaatctgcaggtattaactataatatttaccaagtcagtctgctagaaatgtccttcaattgtctgattctctacagcctcatttagaacattttcatctctattggggcttgggccttcttcaaggggaccccacaattcatcagtttagataataccactagctatacagctctcttgtgaagagtcacagcccaatcatgaaaaacttcagtaaagaaaattgtattggtttattatctaatcttacttgacaattaaaaaaaatgaatgggatacctaatgataatttttagaattggtgttctttacacaattgcatgaaatattcagctctactgttctgtaatgtctgttgtgaggtatgactggaacatatacatggaagatattctgaaaactcttaagaatacaagctctggagtcatactgatct

SEQ ID NO: 26953 - DNA, 1127 bp, Homo sapiens
tgagcccagactcttccctattcacccacttggacgaatgaatggctgtctcctgctggcctcactcctccatagcatagtgaaccactctcaattttaaagttccattagagaagatgacttatttgagtaaattaggaagtcaagggaatttgagcagttccaagaccaatcaatgcttaggtgtkttttttgttttttgttttttgttttgtgtgtgtgtgtgtgtgtgtgtgtgtgtgtgtgtgtgtgtgtaggaagctccagggctatccttgagaggagatatcaattactagtctaaaaaagcacagacctctgacctctgcttttactaaaattaataaccaccttctgtcatatgtatgtctagcataaaaattttatttacatcattgcttttttgatataagtattattcattttgtaaatgaaaaaataaactacatagcaaggagaggactcaaatccacttcatggacttcttcctactgtctatgtgaagtcagtttagtctctgattagacattctctctgtaaagttacttacaatatgcatttactagtaagaatattgaacatcatccatgaaaatatctttcagtatactctacaaattgcaaagagtaaaatatatttgaatgaactatgatatataaccgttttactgaacattaatagaatgcaatgtcaatctgcaggtattaactataatatttaccaagtcagtctgctagaaatgtccttcaattgtctgattctctacagcctcatttagaacattttcatctctattggggcttgggccttcttcaaggggaccccacaattcatcagtttagataataccactagctatacagctctcttgtgaagagtcacagcccaatcatgaaaaacttcagtaaagaaaattgtattggtttattatctaatcttacttgacaattaaaaaaaatgaatgggatacctaatgataatttttagaattggtgttctttacacaattgcatgaaatattcagctctactgttctgtaatgtctgttgtgaggtatgactggaacatatacatggaagatattctgaaaactcttaagaatacaagctctggagtcatactgatct

SEQ ID NO: 26954 - DNA, 1000 bp, Homo sapiens
ttggataatgctgaggttggttgccaggaactggtgaggaggagatggaagagaggtctctatggtttgctcctagggagcaagagcattttgagataatcagacctttcacagattgacactcctgtgagcatattttgttagcatgctcagagagtgcccaccgcctcttatcggagttgttattatatgcaagagagggggaggaaggagaaagcctcatacctgtgttatgagttctccaagtggaaaataattgaaaactaaggctttactttttgacatactccactcttctttattacctataatttaggtttttataataaggaaggaagatatagaaagaaatgactccttcctgaatacaacagacataccacttgtgagtgaggtttcaggtagctgccttgtttccatggtgtcaaaatcaaggctgtgtcagcgtggtcctctcggaccccagacatgcaaataatcccagggccacaactggactcatcatgtcccttgtccacgattgaaattccactcaccctcagctaacagttctgctcatctggacatgcaccaatcttcattcctaaggagtctgagccctggtgaccatgcccttcttgggccagggctgctatatttgtccattcacagctacaattagacaaggggcacsaaggacaccaaaaatgtgtcctctgggttccacacatatccttcctgcccctactgtggaacagcagccttacctacctgctgatcatggtcaattaaccctgccaacacaggggctcctgctgctccctagacataaggagtcaaaggtgctcaggtgtcagtcctaacttatagtttaacaatacacttgctttttcctttggcaaaagtgcacccccttaccggaccagggcctccaacccccccaaagttgcagggatgaagagaataaaattctccagtgagtcactgaaggtaagtggggccactgccagattttgcctct

SEQ ID NO: 26955 - DNA, 784 bp, Homo sapiens
ttattcataactttaaagaccagacaagaagacatggatttaaatttggaagatttcaactaaacttaagaaaaaaaacatagctagagtggctatgttaatttcagaccaaggagatttctactaaaagagtattataagaaataaagacattatatgtaataataaaagaagaaatctgtcagaaagacaaccatcctaaatgtttgtacctaataacagaacatcaaaattcatgaagcaaagactcaaagggggacaaattcatacccctctctcagtgtacttatagaacaagtataaaaaatcatgatacataaaaacgatctaaatatacaactgatcaaattaacttaattgatgtttactaaacgccacacccaacaactgttaaacatatttgttttccagtccacatagaatggtcacccagataggccatatgctgagccataaatatgactcaataaatttcaaaggatttaagtcttaaagcacatattccatgactacaatggggaaaaaattgggtaattatgtgggcagataatgagaaaatccaagacaagtgtttctaggaaaaacacaacaccaagattaggataaacaataaaaacaatcaatgaaggtgaaaaaaaagaactaaaaagactggggagtcttcaaatggaaaaaattgtagcaaataatcagaaagtaaggtattacaaggcacaacagccattatttttatttttctyaaaattgatcctagtagtgagacagctgatggcaatttaggtca

SEQ ID NO: 26956 - DNA, 528 bp, Homo sapiens
aaaaaaagaacttggaattgcagtgatagatgaccagatggtgaggtgggaatcctaaatgaccatctgaaggaagtgcatttactacctcaatggaattgcaggtaaattctaataatggggttaaggtctgtaaagaaccaaatgcttccgaaaagtgcctccttaagaactttaagtataggctaagctcaactagatggctacaataatactagccaagtaaggtcatttctgccctttatgtcttctttcttctgcttcatccctggaggaataagagagggagaggaatagtgaaagccatggaaacaatcgtgytcctcccagtgcaagtgggggctccactgtggctgaagcagggataatgaagaggctttaactgacttctgctattacagaggagtaagctgattttactttttatgtctaaaagtgaacggatgacctttttactatccaagagggagcaaagcactgttgagactccctgtggacttccctggtggttagaaagaaatattttta

SEQ ID NO: 26957 - DNA, 528 bp, Homo sapiens
aaaaaaagaacttggaattgcagtgatagatgaccagatggtgaggtgggaatcctaaatgaccatctgaaggaagtgcatttactacctcaatggaattgcaggtaaattctaataatggggttaaggtctgtaaagaaccaaatgcttccgaaaagtgcctccttaagaactttaagtataggctaagctcaactagatggctacaataatactagccaagtaaggtcatttctgccctttatgtcttctttcttctgcttcatccctggaggaataagagagggagaggaatagtgaaagccatggaaacaatcgtgctcctcccagtgcaagtgggggctccaytgtggctgaagcagggataatgaagaggctttaactgacttctgctattacagaggagtaagctgattttactttttatgtctaaaagtgaacggatgacctttttactatccaagagggagcaaagcactgttgagactccctgtggacttccctggtggttagaaagaaatattttta

SEQ ID NO: 26958 - DNA, 546 bp, Homo sapiens
tttgctgtttttaagggtgacgcctaactcaagaggtatagcatgcgactgatggaactgtaggctttgtggtcagaggagtctttctgacacctctgaaatccccagtgtttagggttccacatgctccaagagaggttgagtctggtcccgccctctgggccacaccattcagaggtgccctgagaccttttgacttcccaaagagggatcaccaggcctctccatttctttcgctgatggttccaagtggctctccttgactgaggagtcggctcaccttggctcagctcctcatccctccccctgtcagctgaaaacaaagccccggactccatttgtgattctgcagcttgtgaatttctagattacgarcaaagccagggaatctgacagtctcatttagcagcctctctcaggctctggccaggctagtggccactctggctggggtctcagagaaccaagttcacttcctggggttttgaacagatgagtgcatctcgccggctccttccttctgcagataatcctgcaggccatcga

SEQ ID NO: 26959 - DNA, 1107 bp, Homo sapiens
taacagtgacataaatgagataaggatccactctctcatcggcataaggaatcacaagcataaggactgacataatgctctgaggagtcaaggcccaggttcctccatctggttgcatatgcgtagtccaagatgcctcactaccacctacacaccagccagaagaaagggtgcactgggcaagggagaccaagctccttccctttgggggcataatgctaagacatgcacacattgctgctgctcacatcccagaaactggtcagaagcgtgcatctagctgaaagggaggcagggcagtgtagtcattattccaggcagccacatacatggtttatttcatcgctatgaaagaagaggagaaggggtggttaggaatctctgccatacacccctcagaatggattatggacccctgttagcacaatatttttgagcacataaaccccaatatatttatatttgttcataattaatatctatgccaatatgtatattaaatccttgtaaagcttattttttccttactttttagataaaaataaatgtgatatttttcttctcataccccaagagatcatctggcacatgcctcgttggagatcactaaagatgcagatttgtaaatcaacagcaaataggcagtggctgcagctctggagttgaatgggatcacccaagaagagacaaatagaggcagaagaaagctccaaggatgagaaattgggaaacaacaatatttaagctggggaaaaattttaaaagcaggagtgatctaagaaactgagcaggagcyggccaagagacaggaagacaaatgagaacgagtgtttctaaggaaatctgaggagaggagagcttcacaaaacgtcacgtaggatgaagactgaaaagaggccattgatttgccaatgtgaaggtcattggtgaccagggtaagaacagaagaatattaggatgaataggcaagaaagaatttgatagcacatttgattctatgggcaaggaaggaggtagccatggaaggtttttgagtgtggaagcctcatgatgacagcaaaatgtgaggaagagtcatgtgggcatttgcatgaaaagtagaccaga

SEQ ID NO: 26960 - DNA, 533 bp, Homo sapiens
gcaagagcccaggccgcagatggggctacttccaaacaaggccgcctgcactcagcaggctctgccctctcaaaggctgaaatgttcttggctttgaaccatttcattttaatattctttaggagatgagttataaacacaaagccaatgccctgaacacttagcagggctgggaaagctgtgaataccaagtttgtctatgctcctctgggaagctggccaggctcaggttagtgacattccaggagcctgaattgggaatctttstgcaatcacaagccttcgtgacttcttgggcagttttgtctgcataaggaatacagggaaggcacagagcaaagggatcagcttgtgcgtcgagactgaaacacttgcttcttggccagtggcgttttgttagagggcaatgccttcaatgggcatttcgcacgcaagcaggcaggctacagagaatcctcaagggagaaatttttctcattaataattattttcttcaaaaatcaaaaccaaaaccaactccccaaaagtctttg

SEQ ID NO: 26961 - DNA, 532 bp, Homo sapiens
actgatggggacttggtccttttggggtagaacaacgagtagagacagtaggtccttcagattcatggtactttctggtatgaagaggtggcagtatgaactcatctgtaaaatgggaggtcctgtcctgcctccgagggttgttaaaaggattcaatgagcatgtctgtggaagtaccagcacctgtatacaagaggtgcccaagtgctgctgctatggttgttactgtcactattatgattcttgcttgctcctgagtytctccgtctttttttttttttttttttttgagactgagtctcgctctgtcgccaggctgtagtgcagtggtacaatctcggctcacggcaacctctgcctccagggttcaagtgattctcatgcctcagcctcccgagtagctgggactacaggtgcgcaacacaacacccagctaattttttgtatttttagtagagatggggtttcaccatgttggccaggatggtttgatggtctctatctcttgacctcgtgatccacccacctcgg

SEQ ID NO: 26962 - DNA, 754 bp, Homo sapiens
ttaacccatcgtaaactgaaaaccgcctaagttgaaaatgcgtttaatacacccaacctgctgagcatcatagcttagcctagcctaccttaaacgtgctcaaaacacatcagcctacagtggggcaaagttatcgaacataaagtctattttataataaagtcttgaggatctcatgtaattgattgaatattgtattgaaagtgaaacgcacaatggttgtatgggcactcaaagtacaatttctattgaatgtacaaagtcaaraaatcgtatgttgaaccactgtaagtgggggcctatctgtactctcaattccaccatctttggctgtgtgaccttgagcaaggccttagcctcgtgtctctgcgttcaaatctgtaagacagagaagacaatacctagctggaacccaagctgcacacatcacatcgtgggctcgacaggtgacaattctcttctgcttctctggagtcccaaatggggtgctgggtgagcagcagcagagctggagctcccaaaccctccacccaaggtcccccagtgctctgctctcacaactcccccataatgccctcaagagatgagtactttttccaaatcaagatgattcaaccttatgacagtgttccttctctttcagaacaggaagcaagagcagcaagtgcatgggctgggctgtgggtgcacctgcttacagctgctgtgatgcctcagagggtcactgcctcctctatcttatgtgtctagaacc

SEQ ID NO: 26963 - DNA, 539 bp, Homo sapiens
tgcaaagtatataaaacaagcccagtaattttcaaagaaagaccttcatataatagtattttgattcaaattaaacttgtggtttctattgaattaaaaaaacttaatctttctgttgtagttacatatgttatttaagatttatagttagactctctttaccactagcttttcatggaatcatttttggttatagaataatgtcttcatgcaaaataaccaaccttctttggccatsgaccctttttaacctcataatagaatcactaaattaatagagatgagtgttttggtgaaacttgtacaaaatggaaattaaacacaactttaaagaagcatgagaaagcagagagcacacattatccctaacaatctgtgtcttatttaaaatttcttaaaaggaagactttttaaaactgctccttcctaatcctaaatgtttatctgaagggtcaaaggaaccactaggtgttgctctaagacagcttcctatagacaaaccagtaaattgctttatggttttgagatttcatcggtca

SEQ ID NO: 26964 - DNA, 540 bp, Homo sapiens
gttttaaataagattttaattgcttaatgttatgccaaaccccagttctccttgaagaatttaacatagtggtcaagaacacaaaagttgaagtcagagaaacattggcctgagaactagttytattaccagccagctatgtgacccttttcatgttatttcctttttttcactatgccttaatttgtgcatgtagaaaataaagatgatagtaatatctatctcatgggtttgttctagagattaaatgaagtaaggcacatagcaccatgttgaagacttggtaagcactcagtaaatgacacctgatatgatgattttgtaaattttaagttgaactgtaaataaacttttatagacagaactgtttgagactctttgacatccttgagttagctggagatgccctgagatgttataagagaaaggttaagagcaataaaggattctagttttcttgatccattcataaaccagttttaagtataattttactgtactatagtggtttaaaatgtttaatttagtgatttgcattct

SEQ ID NO: 26965 - DNA, 1788 bp, Homo sapiens
agtccatttcaggagaaagaaaaaatgtggctaatttgaattctaaccaaaaatcctagtttttatctagagctttagggtagaccatatcactaagacacaaatataacatttattttttggttactgtatttttcttttatttgggtaacagtgactactatgggacttttttggggggaggtgggggcacaggttgtttttaatatatgaattaaaaactaacatgattatttcacagtactcaaaaatgaaagaacagaaaggtactcaggaatatataactgaaattacaaattaaacaaccctgcgttttgctgctcagtgaatacattttgagctgaaaatatctgacaaaatctgaaacccactgcctaattatataaaaataactagaacaggtttcttagctttcaaggacagaactagaataaaaaagtttgttttcactaaagccctggatgccagaaatggggtttactctttttcacctggtggtcttttcaactctcctcttgatccttcatctaaggtcattaagataacttcttggttaagaaagagaggaaagcgggtagggagagaagacaaggagatccacgtgctgaaacgggactgatttttcacagctaagacctcctggtaagtcattgtgttaagtcatcctgctgtattggaatcaggtgcacaatttttccctccttgcagccgtcacgcacatactgtatagaggtagactggcatttattttggatccacattggtatgtgtttggatgcagacacatggataatgaaagaataagcagcttgataaaactgctgcaatatcctccctgaaacacaattttgacaaggctactctcttcttcctcgcaagtacatttctaatgttttcaccaaaagtctctaggaaaaaaaaccaatctaaagcactcactgtattacaagctttcagtaagatgcatgtattcagtgttctttttgataagcaaatcccttaaatttgttaacctgaaaaaaaaatctatccataaaaacgaacatagaaacaaagcaaaccaaaacgggaaggagatttcatgaaagaggcaggcgactggcatgcagcagtgggaggatcrcgccacagaaggtagaaatcctaaaagcacaccggttccctattactctgcttggtactatgagggggaaaagacatacacatatcagcactcccggtgagtcacaaaggaaaaaaaaaggcctgcaaggtgacactatgataaagggcaagcatgttttctttcttagattgcaactgccctcagcaacatttaccctgaggtattcctatgacaggtcaaggattttcggtcatttggaaatgcagttacttctgcatgcatagctctttcacccacactctcacatagttacatgcctctcatttgtgcttatttatatatgctctaatgatagcaaatcatccaagtatcagacaaccctacctttccagttcttttcatcacacaatgcagtcaggtccgactggggcacttcggagacacagctctcctcctgggcaccggcatcttgatatctctgctgtttggtgtcagataggctgggatgctcctggatcttcattgtggggctctgcaataacagcacactgtgcccaaatatctactgctcaccaaaaccccaagacgtctgcagcaatttcactccttcatgataaaacctttcaagtcacagctgctaatgcgtccagcacacagataaaaatcatggcttgatgcccccc

SEQ ID NO: 26966 - DNA, 1788 bp, Homo sapiens
agtccatttcaggagaaagaaaaaatgtggctaatttgaattctaaccaaaaatcctagtttttatctagagctttagggtagaccatatcactaagacacaaatataacatttattttttggttactgtatttttcttttatttgggtaacagtgactactatgggacttttttggggggaggtgggggcacaggttgtttttaatatatgaattaaaaactaacatgattatttcacagtactcaaaaatgaaagaacagaaaggtactcaggaatatataactgaaattacaaattaaacaaccctgcgttttgctgctcagtgaatacattttgagctgaaaatatctgacaaaatctgaaacccactgcctaattatataaaaataactagaacaggtttcttagctttcaaggacagaactagaataaaaaagtttgttttcactaaagccctggatgccagaaatggggtttactctttttcacctggtggtcttttcaactctcctcttgatccttcatctaaggtcattaagataacttcttggttaagaaagagaggaaagcgggtagggagagaagacaaggagatccacgtgctgaaacgggactgatttttcacagctaagacctcctggtaagtcattgtgttaagtcatcctgctgtattggaatcaggtgcacaatttttccctccttgcagccgtcacgcacatactgtatagaggtagactggcatttattttggatccacattggtatgtgtttggatgcagacacatggataatgaaagaataagcagcttgataaaactgctgcaatatcctccctgaaacacaattttgacaaggctactctcttcttcctcgcaagtacatttctaatgttttcaccaaaagtctctaggaaaaaaaaccaatctaaagcactcactgtattacaagctttcagtaagatgcatgtattcagtgttctttttgataagcaaatcccttaaatttgttaacctgaaaaaaaaatctatccataaaaacgaacatagaaacaaagcaaaccaaaacgggaaggagatttcatgaaagaggcaggcgactggcatgcagcagtgggaggatcgygccacagaaggtagaaatcctaaaagcacaccggttccctattactctgcttggtactatgagggggaaaagacatacacatatcagcactcccggtgagtcacaaaggaaaaaaaaaggcctgcaaggtgacactatgataaagggcaagcatgttttctttcttagattgcaactgccctcagcaacatttaccctgaggtattcctatgacaggtcaaggattttcggtcatttggaaatgcagttacttctgcatgcatagctctttcacccacactctcacatagttacatgcctctcatttgtgcttatttatatatgctctaatgatagcaaatcatccaagtatcagacaaccctacctttccagttcttttcatcacacaatgcagtcaggtccgactggggcacttcggagacacagctctcctcctgggcaccggcatcttgatatctctgctgtttggtgtcagataggctgggatgctcctggatcttcattgtggggctctgcaataacagcacactgtgcccaaatatctactgctcaccaaaaccccaagacgtctgcagcaatttcactccttcatgataaaacctttcaagtcacagctgctaatgcgtccagcacacagataaaaatcatggcttgatgcccccc

SEQ ID NO: 26967 - DNA, 551 bp, Homo sapiens
atctccaatcgcctcaccctgcagggctcccaggacaccgacaatcaggtttgtatcccacagacaggaaattgaaggattccattccagagaaactggcatgctcatggaaaaaaagacctaaactcacagacatttgagagacattgtccagtgcactttagtaacccatttgcagcaacttccaattggctacttagtacctcactctttttttttttttgagatggaatctcactctgtcacccaggctggagtgcagtggyaccatgtcagctcactgcaacctctgtctcctgggttcaatcaattctcctgcctcaccctcccaagtagctgggattacaggtgcccaccaccacacccggctaatttttgtattttttagtagagacggggtttccccatgttggccaggctggtttcagtgtcctgacctcgtgatccgcctgcctcggtatcccaaagtgctgggattacaggcgtgagccacctcacccggcctacctcactcttaaatatgagcatcacattaaggaaagagagattat

SEQ ID NO: 26968 - DNA, 551 bp, Homo sapiens
atctccaatcgcctcaccctgcagggctcccaggacaccgacaatcaggtttgtatcccacagacaggaaattgaaggattccattccagagaaactggcatgctcatggaaaaaaagacctaaactcacagacatttgagagacattgtccagtgcactttagtaacccatttgcagcaacttccaattggctacttagtacctcactctttttttttttttgagatggaatctcactctgtcacccaggctggagtgcagtggcaccatgtcagctcactgcaacctctgtctcctgggttcaatcaattctcctgcctcaccctcccaagtagctgggattacaggtgcccaccaccacacccggctaatttttgtattttttagtagagacggggtttccccatgttggccaggctggtttcagtgtcctgacctcgtgatccrcctgcctcggtatcccaaagtgctgggattacaggcgtgagccacctcacccggcctacctcactcttaaatatgagcatcacattaaggaaagagagattat

SEQ ID NO: 26969 - DNA, 759 bp, Homo sapiens
  misc_feature (1)...(759): n = A,T,C or G
catcgaggataccacattatatatatatgaagtaatggatacattaattaacgtgtatatactttagctaattataatatatataattaataactatatattatacatatatgcatatatataatacaatatacacatatacatatctatctatatatttttttgagacagggtcttgctctgtcgcccaggctggagtgcagtggcgccatctcagctcaccacagccyccacctcctgggctcagataatcctcctgcctcagccttttaaatagctgggactacaggtgtgcaccaccatgcctggttaatttttgtactttttgtagagacagggttttgccatgtttcccaggctggtctcaaactcctgggcttaagccatcctcctgcctcagcctcccaaagtactgggactataggcatgcaccaccatgcccgggcccatgttatatttagctgtcatgtctcagcctccccttggctgtgacagtttgtagactttctttgtttttggttccttgacagttttgaggaatactggtttaggtattttatagaatgttcctcagttagaatttgtctgatattctcatgactagatgggatctgggttaggggaagatcacaaggtagtatgccttttcatcactncannnnnnnnnnnnnnnnnnnnnnnnnnnnnnnnnnnnnnnnnnnnnnnnnnnnnnnnnnnnnnnnnnnnnnnnnnnnnnnnnnnnnnnnnnnnnnnnnnnnt

SEQ ID NO: 26970 - DNA, 590 bp, Homo sapiens
taaatgtttctcccgtcacttggtaaaggctcccttctgctccttacccttatttataggtgacccttgatctgctccccactaataaattagctcatattttgtagaactttatatgaatgaaagcatatagtttatcttcttttatacctggcttatttcactcagcataattattttgagatttttatcttcaataagaggcattataaaagagaaaargtgaaaaatcacaatacaaacggtacaaaaataaacataaaagcttatgagagaatattttgaaattacatctcataaaaattgcaaatatagattaaattttaattttacagaagtatctcaaagtaatgagaaatctgaaacaatttgtttaagagtggattgttagttaagtggttaattttatttctctatgtcagcaaagagcaattcaaaattgaaatagaaaacagctattcacaatagtttcaagaatataaagaatttagggataaatcaaacaaactatgaataagctctgtacactgaaactacaaagcactgctgagagaaagtaaagatgacataaataatgaataataaatact

SEQ ID NO: 26971 - DNA, 1773 bp, Homo sapiens
tgtggggcgtctgggcacactgttgtaaatgtcagtcttcaccgagtggcccagttattgggctttacagcctgcagtgcaggctgstgtgctctgcagtggccttcacattcgctgtcttctcattctatctgcccagccaccctgggccgggactcaggaaaggaactagtaagaccactgtatagatgtagaaactgaggtccacttggggaaagattggcccgagtcacatctggctggtggaggggctgggactgaagccagcagagacagctgtggtattggccctgatttaaatcctggttctcacttgctggctgggagaccattaagcttcacgagccttggtttctttatctgtgaattgggcacgataacctttccctacagagctactgctggggttaagggtgaggatgtgggtgggctgcagaccacagccgtcatatatttaaagggaaaatagcacctctcctgaagaagaaatcaacataccagtgctgggaccctgtgtccagcttctttctgctctgccgtccttcttctgagtgttggtggttttacagtcagaacttgcagctggaatgtctgggtttgagccctgtctctgcccccgactctccgtgtgactacagtctgggcctcagttccccgtctataaagtggggataatgatcgaaacctgcctcctagggctgccatgaggattccagggaaggtagctgaggaagtgctgggtcagggctggccattgtcatcctaggacctggttgagtgtgtctagtttcaccatgcttctctagatttggcttatattctgagtgttttaaagggattgggtttgggacccaagctcccttttggtgccccaggagcctgcatgggcagcctggggaggagaaagataccccctctcacaagctggcttcctgcactgtctggcactttacccctctctgggtgcttccccaggcctggttctaaagaaagatgttaagagagacctgagggtagcttaggagcggacctagatgggagacttctgccctgccatggcccctgaagtagggtaccctgcctgggggatgctggccctcaaatagcttccctatttgggaacttttgtgctcccccatatgtcatacatttctagcatctcaagaggtgtttgtttttttccatatcaagggatccatggagtgaagagacctatgtgtgacctctgaaccctttatgggggattgggttgggggtggggaggacaccctgccaaggtgaggccacctcatctggcctctgggctgctggctcagccacctcctgggtcctgcaagcaactctgcttcagctcccggtcaccagcacctacttatgccaagctgctgccttgttctccagctcacccacttcccaggacccctccggaattctgtggggatggggaggttgcagctaagtgaatagtcaccctattattttaggagaggaacaacagcctgtgtgcaaagcccctgggtagggctggtttatttatgcatttgtctttaatgggaaggctgagagaaattgcatggtttgtgaatatttacaggcaaattactacagggaggaaatgaattcattctctctcctctcccactgttaatagatcacactgtggttccctgaagcctgcctcccacctcccccccttttctttcttgcaactccttgtagtctttatgccagctccaggagggtgtccgggtagacgtgccaatttaatttacc

SEQ ID NO: 26972 - DNA, 1773 bp, Homo sapiens
tgtggggcgtctgggcacactgttgtaaatgtcagtcttcaccgagtggcccagttattgggctttacagcctgcagtgcaggctggtgtgctctgcagtggccttcacattcgctgtcttctcattctrtctgcccagccaccctgggccgggactcaggaaaggaactagtaagaccactgtatagatgtagaaactgaggtccacttggggaaagattggcccgagtcacatctggctggtggaggggctgggactgaagccagcagagacagctgtggtattggccctgatttaaatcctggttctcacttgctggctgggagaccattaagcttcacgagccttggtttctttatctgtgaattgggcacgataacctttccctacagagctactgctggggttaagggtgaggatgtgggtgggctgcagaccacagccgtcatatatttaaagggaaaatagcacctctcctgaagaagaaatcaacataccagtgctgggaccctgtgtccagcttctttctgctctgccgtccttcttctgagtgttggtggttttacagtcagaacttgcagctggaatgtctgggtttgagccctgtctctgcccccgactctccgtgtgactacagtctgggcctcagttccccgtctataaagtggggataatgatcgaaacctgcctcctagggctgccatgaggattccagggaaggtagctgaggaagtgctgggtcagggctggccattgtcatcctaggacctggttgagtgtgtctagtttcaccatgcttctctagatttggcttatattctgagtgttttaaagggattgggtttgggacccaagctcccttttggtgccccaggagcctgcatgggcagcctggggaggagaaagataccccctctcacaagctggcttcctgcactgtctggcactttacccctctctgggtgcttccccaggcctggttctaaagaaagatgttaagagagacctgagggtagcttaggagcggacctagatgggagacttctgccctgccatggcccctgaagtagggtaccctgcctgggggatgctggccctcaaatagcttccctatttgggaacttttgtgctcccccatatgtcatacatttctagcatctcaagaggtgtttgtttttttccatatcaagggatccatggagtgaagagacctatgtgtgacctctgaaccctttatgggggattgggttgggggtggggaggacaccctgccaaggtgaggccacctcatctggcctctgggctgctggctcagccacctcctgggtcctgcaagcaactctgcttcagctcccggtcaccagcacctacttatgccaagctgctgccttgttctccagctcacccacttcccaggacccctccggaattctgtggggatggggaggttgcagctaagtgaatagtcaccctattattttaggagaggaacaacagcctgtgtgcaaagcccctgggtagggctggtttatttatgcatttgtctttaatgggaaggctgagagaaattgcatggtttgtgaatatttacaggcaaattactacagggaggaaatgaattcattctctctcctctcccactgttaatagatcacactgtggttccctgaagcctgcctcccacctcccccccttttctttcttgcaactccttgtagtctttatgccagctccaggagggtgtccgggtagacgtgccaatttaatttacc

SEQ ID NO: 26973 - DNA, 1773 bp, Homo sapiens
tgtggggcgtctgggcacactgttgtaaatgtcagtcttcaccgagtggcccagttattgggctttacagcctgcagtgcaggctggtgtgctctgcagtggccttcacattcgctgtcttctcattctatctgcccagccaccctgggccgggactcaggaaaggaactagtaagaccactgtatagatgtagaaactgaggtccacttggggaaagattgkcccgagtcacatctggctggtggaggggctgggactgaagccagcagagacagctgtggtattggccctgatttaaatcctggttctcacttgctggctgggagaccattaagcttcacgagccttggtttctttatctgtgaattgggcacgataacctttccctacagagctactgctggggttaagggtgaggatgtgggtgggctgcagaccacagccgtcatatatttaaagggaaaatagcacctctcctgaagaagaaatcaacataccagtgctgggaccctgtgtccagcttctttctgctctgccgtccttcttctgagtgttggtggttttacagtcagaacttgcagctggaatgtctgggtttgagccctgtctctgcccccgactctccgtgtgactacagtctgggcctcagttccccgtctataaagtggggataatgatcgaaacctgcctcctagggctgccatgaggattccagggaaggtagctgaggaagtgctgggtcagggctggccattgtcatcctaggacctggttgagtgtgtctagtttcaccatgcttctctagatttggcttatattctgagtgttttaaagggattgggtttgggacccaagctcccttttggtgccccaggagcctgcatgggcagcctggggaggagaaagataccccctctcacaagctggcttcctgcactgtctggcactttacccctctctgggtgcttccccaggcctggttctaaagaaagatgttaagagagacctgagggtagcttaggagcggacctagatgggagacttctgccctgccatggcccctgaagtagggtaccctgcctgggggatgctggccctcaaatagcttccctatttgggaacttttgtgctcccccatatgtcatacatttctagcatctcaagaggtgtttgtttttttccatatcaagggatccatggagtgaagagacctatgtgtgacctctgaaccctttatgggggattgggttgggggtggggaggacaccctgccaaggtgaggccacctcatctggcctctgggctgctggctcagccacctcctgggtcctgcaagcaactctgcttcagctcccggtcaccagcacctacttatgccaagctgctgccttgttctccagctcacccacttcccaggacccctccggaattctgtggggatggggaggttgcagctaagtgaatagtcaccctattattttaggagaggaacaacagcctgtgtgcaaagcccctgggtagggctggtttatttatgcatttgtctttaatgggaaggctgagagaaattgcatggtttgtgaatatttacaggcaaattactacagggaggaaatgaattcattctctctcctctcccactgttaatagatcacactgtggttccctgaagcctgcctcccacctcccccccttttctttcttgcaactccttgtagtctttatgccagctccaggagggtgtccgggtagacgtgccaatttaatttacc

SEQ ID NO: 26974 - DNA, 1029 bp, Homo sapiens
ccggctcctcacatcccagccgcggaggccttcagagtaaacacactgggcttcctggctcacagggccagtgctgggttttaattgtggctgttaytgttgagataattgttcaattttgggagaagccggagaaaggagagactgtgtgtctgatgcttctgcggggatgatgctctcattcattcattcactcatgctacagatgttgattggcaccagccaaaggcttcgcttggggctgagaatgtaaaaatcaacatcagctcatccttgtcctccctacacccttctctggtcctagacacagacactaaacccatcctcccagttcagtgtggtcagacaacaataggggcatgaagctgtgccagtgctggagctttaccttccttttatagggtgctaggtcagagccccctcccaccaccccccaccaccccgaactcggggaggagttctgacctgagtgctcctgctgactcctgaatatcaaaggagggcagagctcccttttgatctcttctcttgactccaaactgaaggacacgtagaaggcaacatgttagagcctgatgtttatccagcaccttccatgtgtcagaaactgtgtgagagcttttgcagatcacctcagcgcagccaagaacggagggctgactttttccccatttcacaaatgagaagactgaggccccaccaggttgagtaaatggctcagttcacattattaggaaatgggtagcctgggtgggagccccggtcagtctgactccagtgctctcaagcttctccctgggtcctgccaccttctgcagtgtgcgccccgattcactggtgggctctcaggcaccagcagaggctgaacctctcctagaacaaggctggtcttgcctgacttgatgcatcccagcgggacccctcctgtgtgaagtctcctgacagactcgagctggaaacaggagtcaggggccatgcagctatctccttacaggtttcagggatgttgccgtctcagcatttgaacct

SEQ ID NO: 26975 - DNA, 1029 bp, Homo sapiens
ccggctcctcacatcccagccgcggaggccttcagagtaaacacactgggcttcctggctcacagggccagtgctgggttttaattgtggctgttactgttgagataattgttcaattttgggagaagccggagaaaggagagactgtgtgtctgatgcttctgcggggatgatgctctcattcattcattcactcatgctacagatgttgattggcaccagccaaaggcttcgcttggggctgagaatgtaaaaatcaacatcagctcatccttgtcctccctacacccttctctggtcctagacacagacactaaacccatcctcccagttcagtgtggtcagacaacaataggggcatgaasctgtgccagtgctggagctttaccttccttttatagggtgctaggtcagagccccctcccaccaccccccaccaccccgaactcggggaggagttctgacctgagtgctcctgctgactcctgaatatcaaaggagggcagagctcccttttgatctcttctcttgactccaaactgaaggacacgtagaaggcaacatgttagagcctgatgtttatccagcaccttccatgtgtcagaaactgtgtgagagcttttgcagatcacctcagcgcagccaagaacggagggctgactttttccccatttcacaaatgagaagactgaggccccaccaggttgagtaaatggctcagttcacattattaggaaatgggtagcctgggtgggagccccggtcagtctgactccagtgctctcaagcttctccctgggtcctgccaccttctgcagtgtgcgccccgattcactggtgggctctcaggcaccagcagaggctgaacctctcctagaacaaggctggtcttgcctgacttgatgcatcccagcgggacccctcctgtgtgaagtctcctgacagactcgagctggaaacaggagtcaggggccatgcagctatctccttacaggtttcagggatgttgccgtctcagcatttgaacct

SEQ ID NO: 26976 - DNA, 1175 bp, Homo sapiens
cttttgagtcttggccttgtctctcgagaagttgacagagttgctgcatgccgaagaacttgtagcccccaaagaggtatgggagttgaactaggtactgaaggagagccatgcttttggatggctgtctaagtggcacatactgttggatagctacctaaatgatacagggggatcatattaataccaggccataaagtgtcagcacagattggttgaaagcctgtatgcgcatatttgcatattaaagaacagttatgttgatatatttacatctctgttaaatgaagaatcagatttggtgagatgtaggattagatatagtatcaaaaaattttcatgagaatacagtaagcctatgggaaaaattcattgttttgtcattcaaatttgatacaaatttctgtttaattgcttttcagatgmaaatacaattctggaaagaggaaatatagtgaaagcctttttataaatataaaatattttttcaaaacttgagttgtttttttcttccaccatttctgttgctgcaaaaggtaatgacatttcccgcctgaggaaaaacatttttgaaatggagttaaattattatttgagaataaggtttccttctgtggcctgtactatattctgatgacttataaagagaccttgtgcagcagtgtcctctgtatgtccttggtggggcctttgacactctgcaataggaagactagctaataaattttctctttcctctacacaaattcccatttgtgcaattgcctcccctctagtttttcccagtgatgtaagctactattatgccaccacgcttgctaacttaatggtatcacttttaagaaatactgcaggttttttaaaaataccagttggaatgcctcattctaggatattctcatttacttttaaaaacgtcatttagagctttttgctttctggggttttttggtacttttttttcaacctttgtatggtgtgctttctccataatatatgaatatttatttttatttgaaaaatgttttccctcaaacccaataattgatgctggaggaaggtgtgttacgtctctcctgtggcatcatgtactgttactgcgtgccttagtacccacctgtttaagaggcacaggacctgatgattctattgtttcagagaagccaaattagttt

SEQ ID NO: 26977 - DNA, 1109 bp, Homo sapiens
aaccgatgtgtttcggaggtgccctacccattcaggggcagggtggggctgtcacccagtcgagaggctttcctgaagccgagagcactgggaggcagcatctgagacctctctccacagcaggagctcccccacatctccagggaagaacacgttccagcagatccacagccggcacaaaggaaaccttaggaaggtggtgctaggctctccacgctggtccttagcagctgttcctcctgcagctcagagctcagcatcccttctccaggaccttcccgccatcaggcactctctgcaccacccagctccaccaccatctctgcctcsttcccacggaccgtcagcccaatgctgggtccccactgcagcttccacaaacccttagacccgctggtgatgtgctagctccctcattcccggcctgggagagcctggcctggtcccacctccctcctgccaccctccgctcaagcacatggccatcccaacagcagagccctgtctgagaggaaagaactcagctccagaccgccagcaggcaaacatatggaaagatgggctcaactcagtttctggtttttcactaattcatggcttttttattaaatgcaatcttaatacagatggatgcaggagtgggtttccataacaggccatggatggtgagctaatggcctgaaatgtcaagtccaaatctccaaacaaaagtgatcatttaaaaggaagatgtgtgtagccgtactcgtgggacataaactgttctttttcttttcttttcttttttcttttgagatggagtctcgctctgtcgtccaggctggagtgcaatggtacaatcttggctcactgcaacctctgcctcctgggtttaagcaattctccttcctcagcctcctgagtagctgggattacaggtgcacgctaccacgcccagctaatttttgtatttttagtagagatggggtttcactatgttggccaggctggtctcaaactcctgaccttgtgatccacctgcctcggcctcccaaagtgctgagattacaggtatgagccaccacgcccagctgggacatgaagttttcttaaacaacaatgctttgtaa

SEQ ID NO: 26978 - DNA, 1109 bp, Homo sapiens
aaccgatgtgtttcggaggtgccctacccattcaggggcagggtggggctgtcacccagtcgagaggctttcctgaagccgagagcactgggaggcagcatctgagacctctctccacagcaggagctcccccacatctccagggaagaacacgttccagcagatccacagccggcacaaaggaaaccttaggaaggtggtgctaggctctccacgctggtccttagcagctgttcctcctgcagctcagagctcagcatcccttctccaggaccttcccgccatcaggcactctctgcaccacccagctccaccaccatctctgcctcgttcccacggaccgtcagcccaatgctgggtccccactgcagcttccacaaacccttagacccgctggtgatgtgctagctccctcattcccggcctgggagagcctggcctggtcccacctccctcctgccaccctccgctcaagcacatggccatcccaacagcagagccctgtctgagaggaaagaactcagctccagaccgccagcaggcaaacatatggaaagatgggctcaactcagtttctggtttttcactaattcatggcttttttattaaatgcaatctkaatacagatggatgcaggagtgggtttccataacaggccatggatggtgagctaatggcctgaaatgtcaagtccaaatctccaaacaaaagtgatcatttaaaaggaagatgtgtgtagccgtactcgtgggacataaactgttctttttcttttcttttcttttttcttttgagatggagtctcgctctgtcgtccaggctggagtgcaatggtacaatcttggctcactgcaacctctgcctcctgggtttaagcaattctccttcctcagcctcctgagtagctgggattacaggtgcacgctaccacgcccagctaatttttgtatttttagtagagatggggtttcactatgttggccaggctggtctcaaactcctgaccttgtgatccacctgcctcggcctcccaaagtgctgagattacaggtatgagccaccacgcccagctgggacatgaagttttcttaaacaacaatgctttgtaa

SEQ ID NO: 26979 - DNA, 1109 bp, Homo sapiens
aaccgatgtgtttcggaggtgccctacccattcaggggcagggtggggctgtcacccagtcgagaggctttcctgaagccgagagcactgggaggcagcatctgagacctctctccacagcaggagctcccccacatctccagggaagaacacgttccagcagatccacagccggcacaaaggaaaccttaggaaggtggtgctaggctctccacgctggtccttagcagctgttcctcctgcagctcagagctcagcatcccttctccaggaccttcccgccatcaggcactctctgcaccacccagctccaccaccatctctgcctcgttcccacggaccgtcagcccaatgctgggtccccactgcagcttccacaaacccttagacccgctggtgatgtgctagctccctcattcccggcctgggagagcctggcctggtcccacctccctcctgccaccctccgctcaagcacatggccatcccaacagcagagccctgtctgagaggaaagaactcagctccagaccgccagcaggcaaacatatggaaagatgggctcaactcagtttctggtttttcactaattcatggcttttttattaaatgcaatcttaatacagatggatgcaggagtgggtttccataacaggccatggatggtgagctaatggcctgaaatgtcaagtccaaatctccaaacaaaagtgatcatttaaaaggaagatgtgtgtagccgtactcgtgggacataaactgttctttttcttttcttttcttttttcttttgagatggagtctcgctctgtcgyccaggctggagtgcaatggtacaatcttggctcactgcaacctctgcctcctgggtttaagcaattctccttcctcagcctcctgagtagctgggattacaggtgcacgctaccacgcccagctaatttttgtatttttagtagagatggggtttcactatgttggccaggctggtctcaaactcctgaccttgtgatccacctgcctcggcctcccaaagtgctgagattacaggtatgagccaccacgcccagctgggacatgaagttttcttaaacaacaatgctttgtaa

SEQ ID NO: 26980 - DNA, 551 bp, Homo sapiens
tgaaatgagaccagttcaatgataaggtaaagagtgattttaagaattaacatgagaaatctaaattagtattatctatgttaaataatgtgacaatattatatggattaaatctatgtagaattaaaacggtagatatgtgctggaaatcgcttggctattcatgtccctctacgttggatacactgctgatctcaaaagacatttcccatgtggaagtgccatgtttattctcctcatacttattcaatacttttataaattcattaaaatgcatattttaaaaaatacacttttacttttgaatagcttaagatttacagaaatgttgtgaacctagtacagaaggctcctatataccctacaaccagtttaccttatcattaacattaatatgctatatttgtcacaagtaataaaccagtactgacatattattattaaataaagtatatrctttactccaattttcttattttttaacctaatgccttttttttctgttttagggtcccaatcaggataccacattatgtttagtaacgatgtct

SEQ ID NO: 26981 - DNA, 1426 bp, Homo sapiens
caactatctttccaagaacatgcacaggaaacagccttggatgatggagatagcatctccctccagagcacagggcaaatgtgctttgtgcccactgtagaagatttggttcctaagcttagggttcctctcctgcaatgcagcccttgatgtgtgcggatgccatggggccctgactacatcacagctatgggcactgggacctgggaaatgacccaaatgctaatactctggctactgctattgctgtgaataacggatttttctttgtctctgaccctgawgtctcatatcttagaccagctccgtgaaactggaaggccaacttgccaggtaagtaaaatctcaaactcaacacaagttctcattccctggtaaccagtgccttgagtgttagtcttcagcaacagtggaatacatgttagcatattggggggtcctcttttatacctttgcatgggggttccctccgtctgtaccacccccttccctgtcccaccaactgcctgtcagggccactcagtctcaggtttttttctctgaggcttgccttgaccctgcaacccacttcctcctgtctgcctacccctgctgcagattttgcatggatcactatatatatatgtatgtatgtatatgtatatgtgtgtgtgtatgtatgtgtgtgtgtgtgtgtatatatatataattttttttttttgagacgaggtctctgtcacccaggctggaatgcagtggcacgatcacagctcactgcagccttaaattcctgggctcaagcgatcctcccaactcagccttctgagtagctgggaccacaggcacatgccaccatgcctgtttttttttttttttttttaaattttctttttttgtagagacagagtctcactatgctgcctaggctggtctcgaactcctggcctcaagaaactctcccgcttggcctcccaaagtgctgggattacaggtgtaagccaccgtgcctggccagcatgggtcacagtatcaagcaatttttggtgtctctctctccttcatgctgtgagtttcctgagggcaggtgtggtgctagtacagtgcctggcacatagcaggcagaggggactctgtggaactctctgtctagatgccaggcctggtgtggcatcggagccctaacccaccaggcaggggtgtagatcaggctgtttcaaccacctcctacaccccagccccggcatcaggtatcttcccccatgagggatgaggctaaagggacgggactggaacctcactgttcaagcccactgggtcactgtgtgaggctggaccttctgctggaatgaagaacagagctggaagtgagaaaggaaaggcagtgggtgtggccacccacttaaccacgtgggatggggccgctgcaggggtaggagggtgggcaacc

SEQ ID NO: 26982 - DNA, 1426 bp, Homo sapiens
caactatctttccaagaacatgcacaggaaacagccttggatgatggagatagcatctccctccagagcacagggcaaatgtgctttgtgcccactgtagaagatttggttcctaagcttagggttcctctcctgcaatgcagcccttgatgtgtgcggatgccatggggccctgactacatcacagctatgggcactgggacctgggaaatgacccaaatgctaatactctggctactgctattgctgtgaataacggatttttctttgtctctgaccctgaagtctcatatcttagaccagctccgtgaaactggaaggccaacttgccaggtaagtaaaatctcaaactcaacacaagttctcattccctggtaaccagtgccttgagtgttagtcttcagcaacagtggaatacatgttagcatattggggggtcctcttttatacctttgcatggkggttccctccgtctgtaccacccccttccctgtcccaccaactgcctgtcagggccactcagtctcaggtttttttctctgaggcttgccttgaccctgcaacccacttcctcctgtctgcctacccctgctgcagattttgcatggatcactatatatatatgtatgtatgtatatgtatatgtgtgtgtgtatgtatgtgtgtgtgtgtgtgtatatatatataattttttttttttgagacgaggtctctgtcacccaggctggaatgcagtggcacgatcacagctcactgcagccttaaattcctgggctcaagcgatcctcccaactcagccttctgagtagctgggaccacaggcacatgccaccatgcctgtttttttttttttttttttaaattttctttttttgtagagacagagtctcactatgctgcctaggctggtctcgaactcctggcctcaagaaactctcccgcttggcctcccaaagtgctgggattacaggtgtaagccaccgtgcctggccagcatgggtcacagtatcaagcaatttttggtgtctctctctccttcatgctgtgagtttcctgagggcaggtgtggtgctagtacagtgcctggcacatagcaggcagaggggactctgtggaactctctgtctagatgccaggcctggtgtggcatcggagccctaacccaccaggcaggggtgtagatcaggctgtttcaaccacctcctacaccccagccccggcatcaggtatcttcccccatgagggatgaggctaaagggacgggactggaacctcactgttcaagcccactgggtcactgtgtgaggctggaccttctgctggaatgaagaacagagctggaagtgagaaaggaaaggcagtgggtgtggccacccacttaaccacgtgggatggggccgctgcaggggtaggagggtgggcaacc

SEQ ID NO: 26983 - DNA, 1289 bp, Homo sapiens
cttaggggaacaaatacatgtaagtgttcacaggaacatcagaacccatttcgagctaatttctaaatgtgctccctacagtggctgttctatggcttcatcactcactctatttatttattttttgagacagagtttcgctcctgtcgtccaggctggagtgcaatggcatgatctcagctcactgcaacctccgcctcccaagttcaagcgattctcctgcctcagcctcccgagaagatgggattacaggtatgtgccaccatatccggctaattttgtatttttagtggagacagggtttcaccatgttggccaggctggtcttgaactccygacctcaggtgatccgcccacgttggcctccccaaatgctgggattacaggcataagtcactgcacctggccgatcactcactttaaaaatctatcccaccacctgtcttctccgtatactggacagaagaaagttcccttgtctagtatcttctatgtcactcaacatttctgtctctcctttcagctcctggtcctttcctcccgtctctctgcatcctttacctggtcccctcataccttcttgcggacctggatttggcatggtttcctcactctcttgcaaacttcatgtcccccttctacagacctcctgcactcacttcctgatctcactccatccttgagagagatcatcacctcttttcttcatccttcactcacacaatctgcaaagcagacacgtgcacgcgtgcatccagctctttaccaccctctcttttctaataatgcttccccatcatccacctgattgaaacctcactctgtaagattacagatcaaggaacagccaggggccatgggctgtgcttagtcttctttctcactgacccccctctttctggagcacctgacgttgctgatgggcaccaccatcttgcaatattttcccccttagtcttctgagatgcttgatcaccctgaagactcacccagatgtgagcaaggcttttatcagggtgaatgaaagagatgtgaatagagttatatggattcacagctaaggggtactaagcagcataaactagcagaaggtctgcagtggtcaaccatggaactattacctctgtcttgcctcattcaatattcaatgttttatcaatgacttggataaagacatataaagtctgcttaccaaattgtgaaagcaaagagttttgggggatagcagataaactagggttttatccccatccccaaggtctaaaaagaggaggatctcttagctgaac

SEQ ID NO: 26984 - DNA, 1289 bp, Homo sapiens
cttaggggaacaaatacatgtaagtgttcacaggaacatcagaacccatttcgagctaatttctaaatgtgctccctacagtggctgttctatggcttcatcactcactctatttatttattttttgagacagagtttcgctcctgtcgtccaggctggagtgcaatggcatgatctcagctcactgcaacctccgcctcccaagttcaagcgattctcctgcctcagcctcccgagaagatgggattacaggtatgtgccaccatatccggctaattttgtatttttagtggagacagggtttcaccatgttggccaggctggtcttgaactcctgacctcaggtgatccgcccacsttggcctccccaaatgctgggattacaggcataagtcactgcacctggccgatcactcactttaaaaatctatcccaccacctgtcttctccgtatactggacagaagaaagttcccttgtctagtatcttctatgtcactcaacatttctgtctctcctttcagctcctggtcctttcctcccgtctctctgcatcctttacctggtcccctcataccttcttgcggacctggatttggcatggtttcctcactctcttgcaaacttcatgtcccccttctacagacctcctgcactcacttcctgatctcactccatccttgagagagatcatcacctcttttcttcatccttcactcacacaatctgcaaagcagacacgtgcacgcgtgcatccagctctttaccaccctctcttttctaataatgcttccccatcatccacctgattgaaacctcactctgtaagattacagatcaaggaacagccaggggccatgggctgtgcttagtcttctttctcactgacccccctctttctggagcacctgacgttgctgatgggcaccaccatcttgcaatattttcccccttagtcttctgagatgcttgatcaccctgaagactcacccagatgtgagcaaggcttttatcagggtgaatgaaagagatgtgaatagagttatatggattcacagctaaggggtactaagcagcataaactagcagaaggtctgcagtggtcaaccatggaactattacctctgtcttgcctcattcaatattcaatgttttatcaatgacttggataaagacatataaagtctgcttaccaaattgtgaaagcaaagagttttgggggatagcagataaactagggttttatccccatccccaaggtctaaaaagaggaggatctcttagctgaac

SEQ ID NO: 26985 - DNA, 556 bp, Homo sapiens
tttcctttttttttttttttttttagagaaacagggtcttgctctgttgcccaggctggagtgcagtgccacaaacataggtcactgccgcttcccgctgctgggctcaagcgatccccctgcgtcagcctccccagtagctgggactacaggcgtgcaccaccatacccagctaattttttttaatttttatagaaacagggtctcatattgaccaggctgatttcaaactcttggcttcgagtgatcttgccgtcttagcctccccaagtgctgggatgacaggtgtgagcccacctggccctaaaagccctttctaaaggcctccaaacatcctagtgcgtaaggactagatccttacttcctagwgatgtaaggactagaggaaggaggctagtcctaggagcagactagccccacctccccagcgggggagcagcaggtaggctgctgggcaaggacttcactgcaaggagggacagggtgggccgggggggacttcccagttatgtcaggtttcaaaatatatttggggaataaaatagggtgcttgggg

SEQ ID NO: 26986 - DNA, 556 bp, Homo sapiens
tttcctttttttttttttttttttagagaaacagggtcttgctctgttgcccaggctggagtgcagtgccacaaacataggtcactgccgcttcccgctgctgggctcaagcgatccccctgcgtcagcctccccagtagctgggactacaggcgtgcaccaccatacccagctaattttttttaatttttatagaaacagggtctcatattgaccaggctgatttcaaactcttggcttcgagtgatcttgccgtcttagcctccccaagtgctgggatgacaggtgtgagcccacctggccctaaaagccctttctaaaggcctccaaacatcctagtgcgtaaggactagatccttacttcctagagatgtaaggactagaggaaggaggctagtcctaggagcagactagccccacctccccagcgggggagcagcaggtaggctgctgggcaaggacttcactgcaaggagggacagggtgggscgggggggacttcccagttatgtcaggtttcaaaatatatttggggaataaaatagggtgcttgggg

SEQ ID NO: 26987 - DNA, 575 bp, Homo sapiens
gctcagaagtcgcagcacgtgagtcccgtcgcatcccctccctcttcctggtggccacctccctcccgcccacccactctcaccccaaacaaaatcacaaaacctggacatccctcaaggggcgaagaggcggccgggagactgcagaagtggctccttttcataaactcccctaaaccacacacaggagagagcgacgggcctcggccctttgatgatagcacatggcgcaggacccttgtcctggkggcacaagggatggggacgcgagggggaggggaggcgaggaacaaggagaaggggcaactttccttaactggcagttgagcacatagtacatttcccctctaccaaacggaacacttggattccatctcttctctgaggagctcgacggcataaatcagaagcaagcacagagtttgtcaggtttgaagcccctatgatggtgtgtgtcaaatcagttgtagctaatctgtccagggagaatactggcttcattacacttgtacagccgagttcttcccgcattactgctgtttaatagaacgtgattagtcatcgccgagaagaaa

SEQ ID NO: 26988 - DNA, 1206 bp, Homo sapiens
aacagtttcaaggcagtttcctcgggagactgaggtgggaaggtcgcttgagcccaggagttcaagtcctgcctgggcatcccagtgagaccccacctcttaaaaaaggaaagaaaatggttttttaaatcatttcatttcgtataagattattttscgaggttggtgcatgacattggagttgcccagcaattggaaaaagacatgagcgtttaatactgggcgttctttctaaggctcttaaagtgaaggcaatcacataaggctatcttgcttcatgggtaattaaggcatttccttctgcagttcccaaatctaatgaagaagaaggaatttctcttttgctgaaatatttcttgtaaggttttcatttcttctcattgctccgactttggaaaaatgttctttttacctctgattttctcttgtaatgtcttcttgaattgtgagtcggggaaaaaagtaaaagattcgctacagattcagacttgcaaaaaaacgcttagaatcttgctgtccgtaaaactgaaacatccagcctcacaaatgtccacatttctctctcatctgtgaaggcccgttgagactgctcagttggtgtctcctctgtccacaggacatggccgtagccgtgtgtggagaagggttgtgatggtggccatcacgagacccagataacaggagtggttagaagcgcagcggaggagcctgtcttcctgggtccgagttgcgtggttaggagcgcagcggaggagccggtcttcctgggtccatgttgcgtggttaggagcgcagcggaggagccggtcttcctgggtttgagttgcagctccacctcttcctggcgggtggcctgggcgagtgcctcacgctcccgtcagtgctctcagctgtaaaatgggaacgatcaggttgtctacctccaagactgttgtcaggattcactcaatgaactcctgtgctttgagtgtctggcgttcagtggcaggggaccctccatgtggggacagagactgccacccattcctttctgaggattcagttcttatagactacagtattactcgtgggagccaaattatgtgcagtgtattttcagattttattgactcacctaagaaaggctcggggacactgttgtgttctgatgtaagagatcacttgttatattatgctttttaaatgttgaaggcaatactcatcaga

SEQ ID NO: 26989 - DNA, 1206 bp, Homo sapiens
aacagtttcaaggcagtttcctcgggagactgaggtgggaaggtcgcttgagcccaggagttcaagtcctgcctgggcatcccagtgagaccccacctcttaaaaaaggaaagaaaatggttttttaaatcatttcatttcgtataagattattttgcgaggttggtgcatgacattggagttgcccagcaattggaaaaagacatgagcgtttaatactgggcgttctttctaaggctcttaaagtgaaggcaatcacataaggctatcttgcttcatgggtaattaaggcatttccttctgcagttcccaaatctaatgaagaagaaggaatttctcttttgctgaaatatttcttgtaaggttttcatttcttctcattgctccgactttggaaaaatgttctttttacctctgattttctcttgtaatgtcttcttgaattgtgagtcggggaaaaaagtaaaagattcgctacagattcagacttgcaaaaaaacgcttagaatcttgctgtccgtaaaactgaaacatccagcctcacraatgtccacatttctctctcatctgtgaaggcccgttgagactgctcagttggtgtctcctctgtccacaggacatggccgtagccgtgtgtggagaagggttgtgatggtggccatcacgagacccagataacaggagtggttagaagcgcagcggaggagcctgtcttcctgggtccgagttgcgtggttaggagcgcagcggaggagccggtcttcctgggtccatgttgcgtggttaggagcgcagcggaggagccggtcttcctgggtttgagttgcagctccacctcttcctggcgggtggcctgggcgagtgcctcacgctcccgtcagtgctctcagctgtaaaatgggaacgatcaggttgtctacctccaagactgttgtcaggattcactcaatgaactcctgtgctttgagtgtctggcgttcagtggcaggggaccctccatgtggggacagagactgccacccattcctttctgaggattcagttcttatagactacagtattactcgtgggagccaaattatgtgcagtgtattttcagattttattgactcacctaagaaaggctcggggacactgttgtgttctgatgtaagagatcacttgttatattatgctttttaaatgttgaaggcaatactcatcaga

SEQ ID NO: 26990 - DNA, 1281 bp, Homo sapiens
tgcatcactgcaagctgtggcctgagtgtggtgatggtgaggatgaccctgtggtggtattcctttctttcttgcctctggctcttctctccctcactttccctcacccattgccaaaaatgggtttggaggtcattgtgcagtgggtttggaggtcactgtgcagtaggtctggaggtcagcctcaataaaagaccagttttcagccctcacagcctccctgcagtgttattagctgttcctgatttggatgtgtaagcccaagccgccacgtgggctcggaggggtacagagattaactggaggcttgccaaccgtttgtcacacaaatagcagtgccagttaactgagatacgataaatcatttttctcaagattgaaaccttttatcagttgtgtcagtttcattattcgataagcaattagtagcagccattgtcatttagttatctgtagttaacaactcaaagctgctgccagcagggcacccgcttgacacctgcacccaggtggaaacccgtccactgcccacctctccagcagaaattaggccaaactcgcctcctactgccccttggccgattggagattcgtatctgacaggtgtcttctaatttttttaacttacgctctgacacatagttaagttgtgctgtagttaagagaatagtaaacaggtgagcattattctattaccacctactgatccttttatgaaaatattcttgccttttaatttaaatgccaaccatcttgattagagaaatagtgttattccttcctgcacccaagccctgacgtcagyatgacctggcggtagagccagcccctgccagctggctgcccccggggaccttctgttcaccatcaagcggcagttcatctggagtaaggagagaggctggagcacagctcccagcctgcaggaacagacctctggagatgccaagggcctgaaatctgtgtgtaggtttatgtagacagaagtaaccatatattgaaattgtggttaatggaaagcaaagtcgttttagaatgttgccaaattgtgctcatcaaaagacgcctgcatactttttaaaaattgggaaccactgaaagagattaatccttgccaattttttcactttttcactcaagtctaatttatcagaaaaaataattccaccactagctaagtgtaggagaagaaaaaaatcactgaatgtatgtatcattgagacctatttaattattctaccagtgttctggctttacccataatgaagacaggagtgtgtg

SEQ ID NO: 26991 - DNA, 1281 bp, Homo sapiens
tgcatcactgcaagctgtggcctgagtgtggtgatggtgaggatgaccctgtggtggtattcctttctttcttgcctctggctcttctctccctcactttccctcacccattgccaaaaatgggtttggaggtcattgtgcagtgggtttggaggtcactgtgcagtaggtctggaggtcagcctcaataaaagaccagttttcagccctcacagcctccctgcagtgttattagctgttcctgatttggatgtgtaagcccaagccgccacgtgggctcggaggggtacagagattaactggaggcttgccaaccgtttgtcacacaaatagcagtgccagttaactgagatacgataaatcatttttctcaagattgaaaccttttatcagttgtgtcagtttcattattcgataagcaattagtagcagccattgtcatttagttatctgtagttaacaactcaaagctgctgccagcagggcacccgcttgacacctgcacccaggtggaaacccgtccactgcccacctctccagcagaaattaggccaaactcgcctcctactgccccttggccgattggagattcgtatctgacaggtgtcttctaatttttttaacttacgctctgacacatagttaagttgtgctgtagttaagagaatagtaaacaggtgagcattattctattaccacctactgatccttttatgaaaatattcttgccttttaatttaaatgccaaccatcttgattagagaaatagtgttattccttcctgcacccaagccctgacgtcagcatgacctggcggtagagccagcccctgccagctggctgcccccggggaccttctgttcaccatcaagcggcagttcatctggagtaaggagagaggmtggagcacagctcccagcctgcaggaacagacctctggagatgccaagggcctgaaatctgtgtgtaggtttatgtagacagaagtaaccatatattgaaattgtggttaatggaaagcaaagtcgttttagaatgttgccaaattgtgctcatcaaaagacgcctgcatactttttaaaaattgggaaccactgaaagagattaatccttgccaattttttcactttttcactcaagtctaatttatcagaaaaaataattccaccactagctaagtgtaggagaagaaaaaaatcactgaatgtatgtatcattgagacctatttaattattctaccagtgttctggctttacccataatgaagacaggagtgtgtg

SEQ ID NO: 26992 - DNA, 665 bp, Homo sapiens
tgtaaacattcgtaatctagaaattatttaatgtgtagaagcaagcatcatatgcttttgagaacagtagataatgtacttgcatggaacaacatctagtaaaaataagccaaaatgttaatagtaattatcacaggatgatgtgatctcaagtgatttaattttttctttttgctcattaaaaaatgtttcttatgatgactattattgacttatatagttataaaaagaggttgttaaaaaaaaaaaaaccttaccagctggaggcacattacttttctagactttattttctgtatatgtaatatggaaattctagaaattactctatagagaggttgtgtggattaatggataatgcagataaagggctttaaggagctccaggcacacggttgagtgtacactacatagtggccaccagcatccctgctgtcatctaattcatttgtgcttctgcctctactcttgcctgttcttcatgggtaggagagtggcctttcaagtcagatcacataaggctttgccctgcttaaagccttccagtgtagccaggagtggtggctcatgcctgtaatcctagcactttgggaggccgagactgytttgttctatcctacctcagggcctttgcattttgttctgtcctacctcgggacctttgc

SEQ ID NO: 26993 - DNA, 1359 bp, Homo sapiens
tgcatgttgaatcaacagagtcacaccggtctagcatatccctcagtgagaaggaagtacataagttgtatgtgcacagaaagtctgtgccatcatgagccttctggaattgtccatgggacttattggagaaacttaaaagaatacatcctacctagtgtttcctcactcaccgtgggaaaaaaaaccctgaaaataaaatactgttaaaatgaatactattctggctgaaagtctgcacccttgataagtgatttgctctgttagacaggcaggaattagcatagagaactttggaaaagccaccaactatcagtggcttggtattacaaacatggagaagaatgaatttctgtgctcaattccttgcattctcccaccattaagaaagatgctatcatttcaaaatgaagatatgtacagtcttggacttttggggaacttctcttggaagttattggtgcttccgaaaatgggtagtctgtaacactttgtagggaagatctatactggggagggctggagctgtcataatctttgtagagaactggaaggctgccatgctgtgttcctgagcattcattacttcagtgaggacaccttcattccttatggttagcctgatgagccaccgagcaatgctgatggattggtaaggctcacaccctgactccaatgctccatcaaggttagatatgctcgactttgctgccttttcagtagttttgtgtttacttccctcttttcctatattttatacatgcctccacgtgacacttattgatatcactgttgctgagtttgggcatacttccagagaagctcagatttgctcttacttttccatccaataaattcatctgttaagcattgggagaagaattctggaaactccatcactagttggcaactatcacatttcttaagagaagaaaaatctttaatctagttgaaaccatatttcttgtgctggaatggatttaagacaaaaattatattgcacatttgggcacggaccttgatttttcaacatgcatctttcatgtgttaggaactgatgctgcacattttctcccccggggattttccttttcttaaggcattaaattgcttgctcagatgtataaaggatgtaccaccttgaatggatgtgctaattagcaatggtaaartttatgtatgcaacattgataaggaaggagagattaaaatcctatttcatttatgtattatatgtttacaaaaaagaaaaacataagggaaagcgacctcttttgtctagctgagaatttagaaatgaaaggcatgcatgcatttttcagaaggaggtgagcaaaatgttttatggctttctagcag

SEQ ID NO: 26994 - DNA, 544 bp, Homo sapiens
agacctagatttaaatgctctgtccctcctgagcaatgtatttagcttttccaaactccagatccctcatctaagatggatataccaaaaagagtcttccttaggagcggtggtaagcagaggcaggcaggccaacctcccccatccttccaacccgacagaggaggcagctggcctggctggccattccccacagcaggagcccgggacagattcctcctaccccagtgagaaatctgaaaacccaagcttgcacctgaactttgctctgccactattccactaaaaacacctaagtgcccaccccaaggaaagataatgatgatgacactccttttcccttgcaggacccagtgtggggtgagttgtggggrgttcagtttacaactcagcaagagggccgggtgtagtcatctccatagaagcagaaagggacagacagatgccctgctctggccctcaagctgcagcagcaccatacagcaaccccaccagcacgagcagagcacaaccaaggtgcttcacgccgggctgaaggttcaag

SEQ ID NO: 26995 - DNA, 503 bp, Homo sapiens
aatgttaaatatttgcagggtttgttttctccttgaggatataaaaagggttatccatagcatacatttaagtttttaattattgctgttatcagtggattctctttgatataggttatttarcaataaaaacaatcttcatattgtctggcctcagttgtcaaagtggaaggtactcttttgggccggaaaaggtcttcctctctctaagtatgctgagtccctggtcaggtgtgatttcaatagggcaagcagaaacaggcactaacacgtcccttctgccgctgtctcccagtccatgccataggcaacagaaatgactcttattttcttcagagatgaaaacttcttaactgactttagagaagatcattaactttccaagccagtcttcactaatcaaaatcatcactgtcttcattacactttttctttctttctttttttttttgagacggagtctcgctctgtcacccaggctggagtgcagtggcacgatctca

SEQ ID NO: 26996 - DNA, 503 bp, Homo sapiens
aatgttaaatatttgcagggtttgttttctccttgaggatataaaaagggttatccatagcatacatttaagtttttaattattgctgttatcagtggattctctttgatataggttatttaacaataaaaacaatcttcatattgtctggcctcagttgtcaaagtggaaggtactcttttgggccggaaaaggtcttcctctctctaagtatgctgagtccctggtcaggtgtgatttcaatagggcaagcagaaacaggcactaacacgtcccttctgccgctgtctcccagtccrtgccataggcaacagaaatgactcttattttcttcagagatgaaaacttcttaactgactttagagaagatcattaactttccaagccagtcttcactaatcaaaatcatcactgtcttcattacactttttctttctttctttttttttttgagacggagtctcgctctgtcacccaggctggagtgcagtggcacgatctca

SEQ ID NO: 26997 - DNA, 2314 bp, Homo sapiens
aacgccgagcagactggctctgtgatgtcttcagggaagaatttgagggccttgagcacgccaagacctgccttctacatgctgtgatgggacccacgtstcctctagaagccataaaaagagccatctcagcccctgttttctagtatggagctcggggaaaacttctatgtgctgtcttcccatcacaagcacctgggatggaagatgcatatcccctaggccttccagcaaagaattaaaagctgtttggaagactccgtctgcaaaaatgtctgatgtttaagtctagtgggtaaagcctgagactatggcctatccctaggaggaagtacttgggatttgaggaaagcactgtttctacattcaggaacgctaagaggagtcttgccacttgcagagaatctgagtcacgaccttttccttcctaagacgtcatcccttcagttataaaaggagaggatgttccaaattggcagttcataaacagcatgcattagaatctacttgggagctttttaaatgcctaagccaggcccccacctccagcatatcttaggtggcctaggcatgggaagttaaaaaatttctgcagctgactctgacgtgtccccaacaacctgtagttccatgaacggaacttaacattctactcatgcaaatgtggccgtggcatgatattgcagttaggtcaatttcctgacatcagcctagttgaggtgctttggttatgcccaagtacaagctgcacattagggacaaaaccacatccccaaggctgagcttgaagatcacaggccattgatgaggccacggccacctctgcacaggccagcacagctaggttcaaaacaaaagtatcccttacgtgtctctccttccatggctcccaagatccctgctctcatcccttccccaacctggtgcagtcctctcttcccatcactcaatgaggaaggagaggctgtgtttattccacgatagtggcaacacttgctatccagttataccagtttgaaacctctaagtctccttggccttcaccctccgtgaattctatttcaagcctctccatcccaatgccactgtatttctgggtcaacttctcccttgccaggaataaaacaaaagcccacagacagatgtccttccagccactccaccaatctgtcctctaggatgaacttttcaaactgaggttctgacttcagggatccctgctctggcatgtaaaatgccgtggggagggagtgtatttgtacatttttacagaggatccactgttttcatcagactctcaaaagagtttctggcctaacaaaagtagatgaaagtggataccaggctgcaccccattctatgttctgaccaaggtggtcttgagggcaggaaccacatcttcaccacctctgtttccctgtggtctggctcagtgtctggcaccaaggaggaagttccaggggtgttgaactgaattactagccacagcccagcatgatttcagcagcatgggagtgatgccttaaagaactctccctcgtgggctggaaacacacagaaaactcttggccctctcctagcaagataacagcctttaactctgaaggaaacattccatgtgcatcagctttgccaacgaaagtgagccaagcaaaggtgtctccagcccgtggaagagccttgaggacaccgtgccagctgcagcaggtgatccactctcaggcatgactgcgcaccacagcagtgccaaaccacctgcccattcaaccagctacagaatcccaggcctgctgttggatcagtgggtcagatccaaaaatccccaccagccccaaagctatctgccaatcattactacagtcttgtgctcccctacagatgccaagctgtgtgcgtcttgttgggagatgtttatagctcaagttccagagacaacttggagggctctcaggctgtaatctacttaagacaaaaatctatgacatctccttggactcctgcagcttcccaagggacattccaactgtacttaggaatatttgattttcctgcatgttgtacttccaggtaagaaatcataaaggtagaacagaagatggctggacatgataagaatgcaaaacatgtgtttgctaagggggaaacaagagtcatggaatcctaattcctcaggttgattccagcagtgcaagccaagtacaaagagatttacagaagaaccagtttgcctcatctacatggtgtcttcccccagacagcaggcagtcaagaccaatttctcagcccacagcatgggtattatcttcaatgccca

SEQ ID NO: 26998 - DNA, 2314 bp, Homo sapiens
aacgccgagcagactggctctgtgatgtcttcagggaagaatttgagggccttgagcacgccaagacctgccttctacatgctgtgatgggacccacgtgtcctctagaagccataaaaagagccatctcagcccctgttttctagtatggagctcggggaaaacttctatgtgctgtcttcccatcacaagcacctgggatggaagatgcatatcccctaggccttccagcaaagaattaaaagctgtttggaagactccgtctgcaaaaatgtctgatgtttaagtctagtgggtaaagcctgagactatggcctatccctaggaggaagtacttgggatttgaggaaagcactgtttctacattcaggaacgctaagaggagtcttgccacttgcagagaatctgagtcacgaccttttccttcctaagacgtcatcccttcagttataaaaggagaggatgttccaaattggcagttcataaacagcatgcattagaatctacttgggagctttttaaatgcctaagccaggcccccacctccagcatatcttaggtggcctaggcatgggaagttaaaaaatttctgcagctgactctgacgtgtccccaacaacctgtagttccatgaacggaacttaacattctactcatgcaaatgtggccgtggcatgatattgcagttaggtcaatttcctgacatcagcctagttgaggtgctttggttatgcccaagtacaagctgcacattagggacaaaaccacatccccaaggctgagcttgaagatcacaggccattgatgaggccacggccacctctgcacaggccagcacagctaggttcaaaacaaaagtatcccttacgtgtctctccttccatggctcccaagatccctgctctcatcccttccccaacctggtgcagtcctctcttcccatcactcaatgaggaaggagaggctgtgtttattccacgatagtggcaacacttgctatccagttataccagtttgaaacctctaagtctccttggccttcaccctccgtgaattctatttcaagcctctccatcccaatgccactgtatttctgggtcaacttctcccttgccaggaataaaacaaaagcccacagacagatgtccttccagccactccaccaatctgtcctctaggatgaacttttcaaactgaggttctgacttcagggatccctgctctggcatgtaaaatgccgtggggagggagtgtatttgtacatttttacagaggatccactgttttcatcagactctcaaaagagtttctggcctaacaaaagtagatgaaagtggataccaggctgcacccmattctatgttctgaccaaggtggtcttgagggcaggaaccacatcttcaccacctctgtttccctgtggtctggctcagtgtctggcaccaaggaggaagttccaggggtgttgaactgaattactagccacagcccagcatgatttcagcagcatgggagtgatgccttaaagaactctccctcgtgggctggaaacacacagaaaactcttggccctctcctagcaagataacagcctttaactctgaaggaaacattccatgtgcatcagctttgccaacgaaagtgagccaagcaaaggtgtctccagcccgtggaagagccttgaggacaccgtgccagctgcagcaggtgatccactctcaggcatgactgcgcaccacagcagtgccaaaccacctgcccattcaaccagctacagaatcccaggcctgctgttggatcagtgggtcagatccaaaaatccccaccagccccaaagctatctgccaatcattactacagtcttgtgctcccctacagatgccaagctgtgtgcgtcttgttgggagatgtttatagctcaagttccagagacaacttggagggctctcaggctgtaatctacttaagacaaaaatctatgacatctccttggactcctgcagcttcccaagggacattccaactgtacttaggaatatttgattttcctgcatgttgtacttccaggtaagaaatcataaaggtagaacagaagatggctggacatgataagaatgcaaaacatgtgtttgctaagggggaaacaagagtcatggaatcctaattcctcaggttgattccagcagtgcaagccaagtacaaagagatttacagaagaaccagtttgcctcatctacatggtgtcttcccccagacagcaggcagtcaagaccaatttctcagcccacagcatgggtattatcttcaatgccca

SEQ ID NO: 26999 - DNA, 772 bp, Homo sapiens
ttaattttaaaaataaaaaatacaaatactacaaaattaattcattagtgtctttacatgactgtcagaaaacagatcaacagacataaaaatttcatgttggctagagacaggcagtgggatgtgagtattcaataaagaataagaagaaagagattggaatgttaggcagggagcacaggaagttaaggtgcctgatatctcatgtttaatcttccaagcacaactttactacaagtgaaataaaattacgctgtaatgcatattattataaaatacatataacataaaagctgtaatgtagcgctttgtaaaaaaggtatttctatggtctgacagctcataatatatatgttgctatgctatgtaatatgctttcacacaaaccactcccaattaacaataaatatgtataacggttttgttctaggatacccatgtatagtacctccagtataactatctgaatacacaaagtttattagcaatttacatacttaaaaatattaaggtagtaatgttggaggtttgataccagcactgtttttatagtatccaagcacggaaagcataatatttaaaaatacaaatgttgttattaaataccgacacatttttcaaaatgctggaggacttctttaaacataaacttttrgttaaaactgtctctagatggaaatggagatgggtaagactcaaattgtattcagcaatggaattcctactctgagatataaacaactagaagaaagtaccagaatcttggagaaaa

SEQ ID NO: 27000 - DNA, 909 bp, Homo sapiens
ccagagctgctgaaactgacaagtaagtttttgctgaaacccagcaaattgggctttgtatttacctttgacccatgactgaggctgctagttcttcatgtgtctgtgccctttctcaggaggaaattacgtaacctatatcaatggaggaggaaatgctctaggagaatactggtggaagcagaaaggccaggtagggctattaataacgtcactgcaggcaggagatgacagtggcttaggctatatgataatagcaaatgtgtgagaagtaactgcattcaatagactttacggctgaggtgacagagaatgagtatacggtgtgtgaagaagcaaggagccaagaatgacaccaagatttttgatagatgacagcataggaattcaaaattacttttactgttcaggaaaatgaaatgtaataaggacatgtaaaggcagctctcagatctaaaatttcaactgcaaaaatgcaagataagggaaaactggcctaacaatagcctataagaaaatgagctaggagtcttgctggacctcaagttcagtgtgattcacatgacaatcagaagagcctacaatttaaaatatactagaagtagaatgcctgagttaagggagatgaatctttagtatatttcacactaatcagttcatgtctaaaatcccttccattgctaagattcataaatcttccaatccatcacctaaaatgagcatcatgtacttayaggggtctcaatgtgtgatgtgtgtatagtgcatttctccatttggaaggaataatagagaaagttcacattttaaaacatcaaattacaacctagaataccatctactttgtgctaattgcctcattagcaagctttgcatacatgattactgagctttctcagtgattccttc

SEQ ID NO: 27001 - DNA, 548 bp, Homo sapiens
ttccctttccacagcagccacttgccctctctagcctctgtttcctgtgaagtggggttagtaaaagctgtgccccgaagagctcttgtaaaagagggaggcttctgtgggaggcaggtcaatcgctcctcccagacctccacagcctgacccttggtacttaygtttcctacataacaaaggggataaggctgcagatggaattaaggctgttcgtcagccaccttaagatgagagattatcctagattatccagcaggcccaatgtaaacacaagggtccttattagtggaggcaggaggcaagagttggtgtcagagtgatgggatgtgagaaggactcaacctaccactgctggccttgaagatggaggaaggggccatgagccaagaattgcaggtggcctctggaggccagaaaatgcaaagaaatggactctgccctagagctttcagaaggaacattgccctcatggcagcttgatttttgttcagtgagactccttcagacttctggcctccagaactgtaagatgacacattagtgtt

SEQ ID NO: 27002 - DNA, 549 bp, Homo sapiens
ctgatggtaactacccatatttgttgggcttaaaagatcctcaccctttctttaactcccaactgcaattttagcatgccagctatctttagtcactctagagcacttcttcctcataaccctgctctgcgttggccattccatgtatatcataacttcctcattagttatttcatcttatgggttaaatttgtactttaatactccctatctttascagttacccagtctgaacagtgcattttcttctttagtttgtggaactatgaatcaaattgcgtgccctctccttgccatgggataggtggcatgatttcccagccattgcttaaggcactagtttcctggattttgaatattaaattgagtgggcccaggtggtacttttcatcaaaacttcttgctattaagaactgccttagttttgttttttgacagatagtctttttttttttcttttgagacatggtctgtatcatccaggctggagtgcagaggcacaatcatggctcactgcagcctcaacctcctaggctcaagggattcttt

SEQ ID NO: 27003 - DNA, 549 bp, Homo sapiens
ctgatggtaactacccatatttgttgggcttaaaagatcctcaccctttctttaactcccaactgcaattttagcatgccagctatctttagtcactctagagcacttcttcctcataaccctgctctgcgttggccattccatgtatatcataacttcctcattagttatttcatcttatgggttaaatttgtactttaatactccctatctttagcagttacccagtctgaacagtgcattttcttctttagtttgtggaactatgaatcaaattgcgtgccctctccttgccatgggataggtggcatgatttcccagccattgcttaaggcactagtttcctggattttgaatattaaattgagtgggcccaggtggtacttttcatcaaaacttcttgctattaagaactgccttagttttgttttttgacagrtagtctttttttttttcttttgagacatggtctgtatcatccaggctggagtgcagaggcacaatcatggctcactgcagcctcaacctcctaggctcaagggattcttt

SEQ ID NO: 27004 - DNA, 1229 bp, Homo sapiens
atgtgcagaacatgcaggtttattacataggtatacacgtgccatggtggtttgctgcacccatcaacccatcatctacattaggtatttctcctaatgctatccctcccctagcccaccaccccctgacaggccctagtgtgatgttcccctccctgtgtccatgtgttctcattgctcaactcccacttatgaaggagaacatgtggtgtttggttttctgttcctgtgttagtttgctgagaatgatgttttccagcttgattcatgtccctgcaaaggacatgagctcatcctttttatggctgcatagtattccatggtgtatatgtgattcttcattgtcattagtttattttcattaaaaatacttggacaaatgtcccctaaaaatcagattgcaccactaatgtctaaacaccaagctaaaccttcctggattctttaaattaaataatgcaaaaaatatctatcaagcaatgactgtggtaggcataattttgagaagtagagatgcagtaattgccagtgttgataaagcctttgcctcatgcaacttactttcattttaaaaataagaataaattttcatatataaatctagatttagaaataataatagggaaagcttgatttgaaagccaaatttctattagtgaaaaaagacttttaaaggaaatacatcatgggataattattacacttaatacattataaattaaataaaagttacaaattacacttgacttcatattatcagtaggccccctcatccttttgcagtttcttcactggtatatgtatgctattgtttttctagaaaactctgttctattaattgcttcatatcwgataatgcctagcttgtttcatctaggagccatggctctctttaggaattttttcttttccttctttccgtttttgtttgtttatttgtttaacaaaacatgatatatagttttcttagcaactgtgcctcaaaataataattcataataatgtaatattcataatatttctaagctatgcatgtatattcataatgtacatgagtagcttagtttaatggtgaatgttgtctgtttaatggtgaatgttgtcttcttgaggatatacccatgggggctttctagacctgctgcatgattataaaataggacctgaacttagatttagttctactttttctgtcttggatttatatttaattttgcttgggttatttt

SEQ ID NO: 27005 - DNA, 1198 bp, Homo sapiens
cagctcactgcaacctccacctccagggctcaagtgagtctcctgcttcagcttcccaagtagctgggactacaggtgtgcgccaccacacccatctaatttttgtatttttagtagagatagggtttcaccatgttggccaggctggtctcaaactcctgaactcaggtgatccacatacctcggcctcccaaagtgttgggattacaggcgtgagccaccacacctggctgccacatgcttttaaacagccagatcacccatgaactcgctatcgtgaggaaagcaccaaggggatggtactaaaccattcgtgagagacctacccccatgaaccaaccacctcccaccaggccccaycctgcccccagcattggggattacatttcaatatgagatttcagcagtgataaatatccaaactatatcatggggcacacagtggagctgactgtacaaatcttgttcactaaatcatttttcagtttgccaagtttccatttacaatggggagagaatttgcccaaaatatcatcatccactgcaatcatcccacacttcagaaaaacataagatggctggcagccattgctccaagggaaaccgtgatgatagaaatggccaaccagtttctcttctcagtcgccctcctaccctgaaggatttgtctattcacatcagccatttcaattgtaaacatttatgtctgatagtctcatagcttagcatcccgggagagagggagagaaaagaaaatgcagaacagaaaggggtagatggaagatccccaaaggaaagcctcagcagaaggtccagggaaataaagtggaaccgctcctccatcaaagtcgtggagctgtggcttccccgtccttcatcggagtcagctggggcatagagccacaggaggaaaccttcctgcagcagcttcgttagaaaacacggctctgttttcctcccaaggctcccctgcaaccttgcccccataggctggcacatgcccagcacccaccctgggacccagccttcagctgcagccacccttcccctgggacatgtctctagcccatctgcctccgtgtcatctctgaggaggaaaagcagcagtaacagtaattcaacaagacgagctcataacacccattacccccactgaacacactgtgtagtgctcaaccccttctgtctgtcagaaggg

SEQ ID NO: 27006 - DNA, 1198 bp, Homo sapiens
cagctcactgcaacctccacctccagggctcaagtgagtctcctgcttcagcttcccaagtagctgggactacaggtgtgcgccaccacacccatctaatttttgtatttttagtagagatagggtttcaccatgttggccaggctggtctcaaactcctgaactcaggtgatccacatacctcggcctcccaaagtgttgggattacaggcgtgagccaccacacctggctgccacatgcttttaaacagccagatcacccatgaactcgctatcgtgaggaaagcaccaaggggatggtactaaaccattcgtgagagacctacccccatgaaccaaccacctcccaccaggccccatcctgcccccagcattggggattacatttcaatatgagatttcagcagtgataaatatccaaactatatcatggggcacacagtggagctgactktacaaatcttgttcactaaatcatttttcagtttgccaagtttccatttacaatggggagagaatttgcccaaaatatcatcatccactgcaatcatcccacacttcagaaaaacataagatggctggcagccattgctccaagggaaaccgtgatgatagaaatggccaaccagtttctcttctcagtcgccctcctaccctgaaggatttgtctattcacatcagccatttcaattgtaaacatttatgtctgatagtctcatagcttagcatcccgggagagagggagagaaaagaaaatgcagaacagaaaggggtagatggaagatccccaaaggaaagcctcagcagaaggtccagggaaataaagtggaaccgctcctccatcaaagtcgtggagctgtggcttccccgtccttcatcggagtcagctggggcatagagccacaggaggaaaccttcctgcagcagcttcgttagaaaacacggctctgttttcctcccaaggctcccctgcaaccttgcccccataggctggcacatgcccagcacccaccctgggacccagccttcagctgcagccacccttcccctgggacatgtctctagcccatctgcctccgtgtcatctctgaggaggaaaagcagcagtaacagtaattcaacaagacgagctcataacacccattacccccactgaacacactgtgtagtgctcaaccccttctgtctgtcagaaggg

SEQ ID NO: 27007 - DNA, 627 bp, Homo sapiens
tgttctgccctcactctcctttcctccctcctgctgccgggacaccccactggctatacccagctggaaggcagagggccgagagctgtagaatgaggtccatacggatccataaaggtggaaggaagagatcttcactctatcgatgaataagcacccttttctcatttgaaattcactgtaattgtattttcaatgctttttttcctgtttagttttgctgaaggtttttccattttactccttttttcaagaaatcagctattggattttgttgatcagttctcttttaaaatattataacccattaatttttgcctttatcattattaactcctttctcctatctccttaggtatgttttgtttgtctttcatgctccttggattgactgctcagttaatttcataacatttttttcctagagtcataataaaggcaactttcaaaatggtataaatttccctttgaacgttggtagggtcatagccaagagttttgaggcagtgttcccttccctccttccctccttccttccttccctccttcyttccttccttctttccttccttttttgagacagggtcttgctctgtcacctatgctgcagtgcagtggtgtgatcat

SEQ ID NO: 27008 - DNA, 591 bp, Homo sapiens
attctatttgcatattgatataaaagtacatttttttttgccagaattatctctgctcattctttaattttttttttgagacagagcctcactctgtcacccaggctggggtgcaatcacragatcttggctcactgcaacctccatctcctgggttcaagcaattctcccgcctcagcctcccgagtagctgggattacagggacccgccatcatgcctggctaatttttttgtatttttgtagagatggggtttcaccatgttggccaggctggtcttaaacccctgatctcaggtcatccaccctcctcggcctcccaaagcgctgggattacaggtgtgcgccaccacacctggcctcatttttaaattttaaccttttgtttcactttgttttaaatgtatttgagagtctgtgttggtaacagggtagtttaagcaattttcatttattatcataaatcaagcgtttggtctcactctggtctcactttattctttttgttttctgcttcttgtttcctttgttttccggttctgttgtacatgtttgtattttctttggattcatcttccgtattttggaagta

SEQ ID NO: 27009 - DNA, 591 bp, Homo sapiens
attctatttgcatattgatataaaagtacatttttttttgccagaattatctctgctcattctttaattttttttttgagacagagcctcactctgtcacccaggctggggtgcaatcacgagatcttggctcactgcaacctccatctcctgggttcaagcaattctcccgcctcagcctcccgagtagctgggattacagggacccgccatcatgcctggctaatttttttgtatttttgtagagatggggtttcaccatgttggccaggctggtcttaaacccctgatctcaggtcatccaccctcctcggcctcccaaagcgctgggattacaggtgtgcgccaccacacctggcctcatttttaaattttaaccttttgtttcactttgttttaaatgtatttgagagtctgtgttggtaasagggtagtttaagcaattttcatttattatcataaatcaagcgtttggtctcactctggtctcactttattctttttgttttctgcttcttgtttcctttgttttccggttctgttgtacatgtttgtattttctttggattcatcttccgtattttggaagta

SEQ ID NO: 27010 - DNA, 591 bp, Homo sapiens
attctatttgcatattgatataaaagtacatttttttttgccagaattatctctgctcattctttaattttttttttgagacagagcctcactctgtcacccaggctggggtgcaatcacgagatcttggctcactgcaacctccatctcctgggttcaagcaattctcccgcctcagcctcccgagtagctgggattacagggacccgccatcatgcctggctaatttttttgtatttttgtagagatggggtttcaccatgttggccaggctggtcttaaacccctgatctcaggtcatccaccctcctcggcctcccaaagcgctgggattacaggtgtgcgccaccacacctggcctcatttttaaattttaaccttttgtttcactttgttttaaatgtatttgagagtctgtgttggtaacagggtagtttaagcaattttcatttattatcataaatcaagcrtttggtctcactctggtctcactttattctttttgttttctgcttcttgtttcctttgttttccggttctgttgtacatgtttgtattttctttggattcatcttccgtattttggaagta

SEQ ID NO: 27011 - DNA, 591 bp, Homo sapiens
attctatttgcatattgatataaaagtacatttttttttgccagaattatctctgctcattctttaattttttttttgagacagagcctcactctgtcacccaggctggggtgcaatcacgagatcttggctcactgcaacctccatctcctgggttcaagcaattctcccgcctcagcctcccgagtagctgggattacagggacccgccatcatgcctggctaatttttttgtatttttgtagagatggggtttcaccatgttggccaggctggtcttaaacccctgatctcaggtcatccaccctcctcggcctcccaaagcgctgggattacaggtgtgcgccaccacacctggcctcatttttaaattttaaccttttgtttcactttgttttaaatgtatttgagagtctgtgttggtaacagggtagtttaagcaattttcatttattatcataaatcaagcgtttggtctcactctggtctcactttattctttttgttttctgcttcttgtttcctttgttttccggttctgttgtacatgttygtattttctttggattcatcttccgtattttggaagta

SEQ ID NO: 27012 - DNA, 1680 bp, Homo sapiens
ttttttagaaacacggttttgctatggtgccctggctagactcaaactcctgggctcaagtgatccccctatgtaagccttccaagcaattatgacctttttagtatttttggaaaaatacttaaaaccacaataagaaatgaaactttcattttagctaatcctgtaatacctgctacagtaaaatgctctttgcagttttgtatgcatgtgtttccatttattgaaattactttatatataagcatatatgtaaatgtttacacttattttattaaaatcaaatctatcaggctggacatgttgtctttgccatgattttttacttgccagtaaatcagagacaactttacagatttgatatgttcttttaataattgataaaagtctttactttggatgcaacatagttgcaagctttcccagatgtttttctgctaaagatttggctaacttcttcaaaacaacaataataaacagatgttgtctttctttgaccctgaagaaagtataaagcaaaatgcctttagccacccaaaacagtgttaccatgacgtttggtctcgtccagtctgcttttgatttgactggatcgctttcgtttcttggtagccattgctttgattgtgctttgtcttcagggtcttactggtaaagctatgtttcatctcctgttacaattctttgaagagatgcttcaaggtctggatcccacttgtttataatttccattgaagggtctgttcttgtctgcagatgatctggctgtaacggttttggcacccaacaagtggaaaatttgttcaactgaaatttttgtcagaattgtttaaactgatctgattgaaatttctgttgtgttggctattgtttctgctgttaattgtcagtcctcttcagttagagtatgagcaagattaattgtttccttgtgaattgatgtatggatggtctgctggtgtgggcttcatcttcaccatcatcttgtcccttcttaaaaggaattgcccatttgtaaactgctaattttttggagcattttccccattaactttctgtaaagcatcagtgatttcaccgttcttccctcatgtctcagcataaattttaggctattgcttcaattgtagcagaattcatgttgttttgatggggacttctttccaactgatgtcttatccttcttagtgcctcaaactagatcctactcagacatgttttaacaagttagcataagtttgttttggtgcaaagaaatttgaaatccatgcttaagtttttcataatatgcattttcattaatcgtgtgatgatccctcatctattacttttatagggatgggccacgcatttttgttcattgttctggcttcttacaaggttcagtagactttgtaacacagttgtgtctctcacagattggcagatgtttggtaaaggattgacttttcagccaactcatgggaaagtgaaataatgtaaaaaacaggaagaatacagttttaggcctttcaagtgaggcatggctttcagctcttggcaagaacaggcaaggagatgcaagtgttaggactctaagaggctaggcttttcaaagtgcttctctccscttcaccctccttcagttacagcaccaagcaccaccgaggtgttacctgcagcgtcactctctacctggtt

SEQ ID NO: 27013 - DNA, 1680 bp, Homo sapiens
ttttttagaaacacggttttgctatggtgccctggctagactcaaactcctgggctcaagtgatccccctatgtaagccttccaagcaattatgacctttttagtatttttggaaaaatacttaaaaccacaataagaaatgaaactttcattttagctaatcctgtaatacctgctacagtaaaatgctctttgcagttttgtatgcatgtgtttccatttattgaaattactttatatataagcatatatgtaaatgtttacacttattttattaaaatcaaatctatcaggctggacatgttgtctttgccatgattttttacttgccagtaaatcagagacaactttacagatttgatatgttcttttaataattgataaaagtctttactttggatgcaacatagttgcaagctttcccagatgtttttctgctaaagatttggctaacttcttcaaaacaacaataataaacagatgttgtctttctttgaccctgaagaaagtataaagcaaaatgcctttagccacccaaaacagtgttaccatgacgtttggtctcgtccagtctgcttttgatttgactggatcgctttcgtttcttggtagccattgctttgattgtgctttgtcttcagggtcttactggtaaagctatgtttcatctcctgttacaattctttgaagagatgcttcaaggtctggatcccacttgtttataatttccattgaagggtctgttcttgtctgcagatgatctggctgtaacggttttggcacccaacaagtggaaaatttgttcaactgaaatttttgtcagaattgtttaaactgatctgattgaaatttctgttgtgttggctattgtttctgctgttaattgtcagtcctcttcagttagagtatgagcaagattaattgtttccttgtgaattgatgtatggatggtctgctggtgtgggcttcatcttcaccatcatcttgtcccttcttaaaaggaattgcccatttgtaaactgctaattttttggagcattttccccattaactttctgtaaagcatcagtgatttcaccgttcttccctcatgtctcagcataaattttaggctattgcttcaattgtagcagaattcatgttgttttgatggggacttctttccaactgatgtcttatccttcttagtgcctcaaactagatcctactcagacatgttttaacaagttagcataagtttgttttggtgcaaagaaatttgaaatccatgcttaagtttttcataatatgcattttcattaatcgtgtgatgatccctcatctattacttttatagggatgggccacgcatttttgttcattgttctggcttcttacaaggttcagtagactttgtaacacagttgtgtctctcacagattggcagatgtttggtaaaggattgacttttcagccaactcatgggaaagtgaaataatgtaaaaaacaggaagaatacagttttaggcctttcaagtgaggcatggctttcagctcttggcaagaacaggcaaggagatgcaagtgttaggactctaagaggctaggcttttcaaagtgcttctctccgcttcaccctccttcagttacagcaccaagcaccaccgaggtgttacctgcagcstcactctctacctggtt

SEQ ID NO: 27014 - DNA, 728 bp, Homo sapiens
acgactcccacccagtccaagtcaggaaatggaaaggcctcctagaccagcccctygccactgtggtgacaatggaaccaatctttatagaggcagcggagaggagtaaagtcacagaccatgggatctcctgcctgggtccaaatcccagctctgcgacatctcatccaggcgcccttcacaagtgagtctatccttccatgcctcactctccccatctatgaaatgggaataacaattctgtgatgaggggatcagttaatattagaaagtactggccgggagtggtggcttatgcctgtaatcccagcactttggatcacttgacgccaggagttcaagaccagcctggccaacatggtgaaaccctgtttctactaaaaatacaaaaatgagccgggcattgtggcagcatgcctgtaatcccagctactcaggaggctgaggcagaagaatcgcttgaacctgggaggcggatgttgcagtgagctgagatcatgccacagcacttcagcctgggtgacagaacaagactccatctcaaaaaaaaaaaaaaaaaattagaaatcacataaaccagtgtctgcaggccgggcatggtggctcacgcctgtaaaaccagcactttgggaggccaagacgggtagatcacctgaggtcagaagttcgtgaccagcctggccaacatggtgaaaccccccctctactaaaaatgcaaaaattagccg

SEQ ID NO: 27015 - DNA, 728 bp, Homo sapiens
acgactcccacccagtccaagtcaggaaatggaaaggcctcctagaccagcccctcgccactgtggtgacaatggaaccaatctttatagaggcagcggagaggagtaaagtcacagaccatgggatctcctgcctgggtccaaatcccagctctgcgacatctcatccaggygcccttcacaagtgagtctatccttccatgcctcactctccccatctatgaaatgggaataacaattctgtgatgaggggatcagttaatattagaaagtactggccgggagtggtggcttatgcctgtaatcccagcactttggatcacttgacgccaggagttcaagaccagcctggccaacatggtgaaaccctgtttctactaaaaatacaaaaatgagccgggcattgtggcagcatgcctgtaatcccagctactcaggaggctgaggcagaagaatcgcttgaacctgggaggcggatgttgcagtgagctgagatcatgccacagcacttcagcctgggtgacagaacaagactccatctcaaaaaaaaaaaaaaaaaattagaaatcacataaaccagtgtctgcaggccgggcatggtggctcacgcctgtaaaaccagcactttgggaggccaagacgggtagatcacctgaggtcagaagttcgtgaccagcctggccaacatggtgaaaccccccctctactaaaaatgcaaaaattagccg

SEQ ID NO: 27016 - DNA, 728 bp, Homo sapiens
acgactcccacccagtccaagtcaggaaatggaaaggcctcctagaccagcccctcgccactgtggtgacaatggaaccaatctttatagaggcagcggagaggagtaaagtcacagaccatgggatctcctgcctgggtccaaatcccagctctgcgacatctcatccaggcgcccttcacaagtgagtctatccttccatgcctcactctccccatctatgaaatgggaataacaattctgtgatgaggggatcagttaatattagaaagtactggccgggagtggtggcttatgcctgtaatcccagcactttggatcacttgasgccaggagttcaagaccagcctggccaacatggtgaaaccctgtttctactaaaaatacaaaaatgagccgggcattgtggcagcatgcctgtaatcccagctactcaggaggctgaggcagaagaatcgcttgaacctgggaggcggatgttgcagtgagctgagatcatgccacagcacttcagcctgggtgacagaacaagactccatctcaaaaaaaaaaaaaaaaaattagaaatcacataaaccagtgtctgcaggccgggcatggtggctcacgcctgtaaaaccagcactttgggaggccaagacgggtagatcacctgaggtcagaagttcgtgaccagcctggccaacatggtgaaaccccccctctactaaaaatgcaaaaattagccg

SEQ ID NO: 27017 - DNA, 609 bp, Homo sapiens
gcctggaagagctgggcataaagagaatttgaacccataaaaactcattccttggcctagacccaattcggaaagtttggggtggacccaagagtgtgcatgtttaactaattccttgtttatcctgatgtgcatggtctgtgggccacttcgggraaaatggaagcaaagcaatccttcctaaaaagaatcatcacctccattgtttgtgtgtttgagaatctatgtttctcacacagggcttgttttaaacgagaagccctgaacaatcctggcagggtgtacaggttgcacgaccccagaatgacctgcttgtaacactggggttatctcattcatcctgcaaaataaccattctgaggcaggcatttcgattatcccagtttatatgtcaggaaactgaggcatagagaggcgaaatcctctgcctagagtctcccacgtagaaagcggaagtggtgcgatttacaccagagcctgcgctgtggcctctgcactaagctgatgccctggctgggtatggtgactcacagctgccatcccagcacttcaggaggctgggacaggaggatcgtttggctccaggagttcaggaccagactgggcaac

SEQ ID NO: 27018 - DNA, 813 bp, Homo sapiens
ttgctgagaacatcctgagcatagatgagatggacctggaagtgagagactactacctgtccctcctcctcatgctgagggccactcatctgcaggagggctccagggtggtaaccctctgtaacatgaacatcagtaagaattataaagcatctttttggggggatgcaacaaaaaagtaaatccagtgtctgataatcctcagtctccttctttgcaggaaaccccaccttctttccatcttctatgtatcagagaggctagtggcaaccccaacmcttaaccaggaaagtattgaaagacacagttgtccttaagctggcacttgcctctctctaagatactacctgccaatgaaggctggctggaaggagcggggaggaattggggcaggatacttgaaaagcacctgtaacatttaagtctatgtacttttgtaattttatttttttaattgggattctctagaacaaactgcagcccaccagccaaatgcactgtatgtggcctgtgagctaagaccgtttttacattttcatagggctaattttatgtgatttacaaagccaaaatatttaccatctggccctttacataaaaatttgccaacttcttctctagaatgtaagatttatgtatacttctttgttcattgattagatgatgaggcattcctaactcaaatacaaatgtgctccaaaagatgtgctgtttggggttagtcatactcctctctactcacataggtaattgagaattgatgacattaaaatcagggctagttctacttatccagtccaaacctcttcatca

SEQ ID NO: 27019 - DNA, 955 bp, Homo sapiens
actggggtcccaacttcccttcagggtcctaacaccttcattccttagccagagcatcaagcatcaagcacctgactgggatggcacattcggacaaaaccccacatccagctcaggcccagcagcctcaggaggaaatctaaggctagcagggcactcgtgctgtaagaacggggactgttcacagcgccagggagaggtgatcagaacacacaaactcactgcttctgattgctttagaactaaggccctttgtctcattatttcacctcaggtacatttttgaaggttgccaggattcacagaagggtgtagtgggtgaaagggggacacagcactgccctaggggcctccagatgcggtttctagacactcagtaaagtgatggccttggctggtaaatccatccactgggatgtcatcctcacaacaaaacagggtttagaccagcagatctctgacctttgcggctttcagatgagagaccagttgatcatgattgggctgaatgttgctgatttcacttgttcatcattcacttattccatgtgtctctaagcctggaatgtgcgggaragctggggtagcagagatcccatgatgtggctgcagctctagagcagcctccaccacaataaacaaacagacacacaattgattttgatgatgttgatataatgaaggtaactaagtttaacatttatcagaaaagtgtgacttctgcctgccaccttacaatttgaatcatttaggaccatggccgtaagagtccacacccaaaaccacttacacagctgggtacttcgagccaaagtatttcttaacacagctccttctgctcaggaccccaagggaaatcaataaatagttcctcatatgagcaggcaaaattatactctttttcccttctctgctatgcttttgacgtgttattaaaccctgagataattatagg

SEQ ID NO: 27020 - DNA, 955 bp, Homo sapiens
actggggtcccaacttcccttcagggtcctaacaccttcattccttagccagagcatcaagcatcaagcacctgactgggatggcacattcggacaaaaccccacatccagctcaggcccagcagcctcaggaggaaatctaaggctagcagggcactcgtgctgtaagaacggggactgttcacagcgccagggagaggtgatcagaacacacaaactcactgcttctgattgctttagaactaaggccctttgtctcattatttcacctcaggtacatttttgaaggttgccaggattcacagaagggtgtagtgggtgaaagggggacacagcactgccctaggggcctccagatgcggtttctagacactcagtaaagtgatggccttggctggtaaatccatccactgggatgtcatcctcacaacaaaacagggtttagaccagcagatctctgacctttgcggctttcagatgagagaccagttgatcatgattgggctgaatgttgctgatttcacttgttcatcattcacttattccatgtgtctctaagcctggaatgtgcgggagagctggggtagcagagatcccatgatgtggctgcagctctagagcagcctccaccacaataaacaaacagacacacaattgattttgatgatgttgatataatgaaggtaactaagtttaacatttatcagaaaagtgtgacttctgcctgccaccttacaatttgaatcatttaggaccatggccgtaagagtccacacccaaaaccacttacacagctgggtacttcgagccaaagtatttcttaacacagctccttctgctcaggaccccaagggaaatcaataaatagttcctcatatgagcaggcaaaattatactctttttcccttctctgctatgcttttgacgkgttattaaaccctgagataattatagg

SEQ ID NO: 27021 - DNA, 590 bp, Homo sapiens
tgtcttgaagttttttctcagtttgggaaaatctttgtcctttaatattttaaatttgctcctgtcttctattttggaacttcaagtatgcatttgcagaatgttttcaccatgtcttatatgtgtcttatactttattttatttttcagcttttgctttctgatttcagtctgtattttttaaattgaactatcttcttattacyttttttttccagtagctaggtctaatgtgctgttaaacctttatgtttaagtgaattctttgagctacagtattcttcagctgtagaatttttacttgattcttttttttaaaggtttcagttcccttgtgaaaactgtattctgtctccatttcttgagcattttaatcacagctcttttaattcaatgccactttctcatctcttatttagtttgattttcactcatttgttcatgtcttgtgtatctcgtaatgattaaatgactaaaattacatacaaaaattatagagatcatctggtttcttagtggtgtcattttacttacagagaagatgctcttttgcctttaataggcattaaggtcatttacatgcaactttc

SEQ ID NO: 27022 - DNA, 599 bp, Homo sapiens
ttaaattattcttgatttcagaattacagaaaataaaggaaaaatattctttttaaaatttctttggtatatacatctttaatcattttctttgggtaagctcctttagttgatttgttggatcaagaagtttatacattttagactttggatccttacagccaaattgccctataaaaattttgtaccaattgacattctcactaacaccatgagaatctttgtawtttactggacgtcttatttatgtttttgtattttgttaattgctagtgaatgtaaacttttaaggggtcctcattggcaatttttattttgtattttgtgtattgcttattgatgttctctgctcatttccttcaataataaatagactgttgttatttatcggtccaaaattcattctaaaaatattttggatttttacctaaccacttctgattcagatctcaggaactatttttagagtgatcctacttccccagtatacttactttctcatttgtatgatgagtcacacatctctttccttctcttaagttcagtcattgtttctactgcttcatcccaatttgacctggtcataattaatatttaat

SEQ ID NO: 27023 - DNA, 1714 bp, Homo sapiens
tcctgtacatactccaatttgcagaccactggaggaggctgtaggaggcaatattatatcccagtgaggtgtgtgggttgtaaagccgaacagcctgagtccacatcccagctccaccactccttagttctgtgatcttggaaacatcacttaacctctctgaatctatcttctcacctgtaatatgagggcattaaccccttacaggttattgtaaggtttcttacactgtgcctgtggtaagcatcaatacattttagccaataataacagtaatgataataacacattcctagagggctgggatggatctagatttttcttccccttttagtggaagaccacagcatgatgcatgaatttacatttcctcagacattctggtgctgatgaaggtaaagatggtgaggctgcgatgatggtttcagggatgggtgtgttgggcgtgatgaatagcatgatgcatattgtcactcatttagtttatctgcactgatgatgatgctgattatatgatgactgttacagggatggtcacattgtgggtgatgaatatgaccagaaagggaagactttcacagttcctacccgaactacaacatcgatattttcatttgtctttcctaggaactcttaccttaatcacctgaccaatatgctgacgactaacatgttgcgccctgcctttcttccgggcctctctgccttgctgatctgttttgctggtgtgccctccactgtgctcttgggtctttgtctctcggtaaagcctagtactgtggttgctgtacacaaaacctgtagatgattaagatctctgttcactgcagggccattcatctcccagcractattttatccttaagtcaagagacttgcctctcagcccctggggaccatggaaagagtgctagaaacctacagagtatgaccctttgtagccttatgcaagaagtgacctgtgtctttcctgtcatgagagaggacagacattgcaggaatcaaacgcataacactagtgcaaaactggggataatgcccaaacctggttaggcaggggcgcctggaacatgcttgtccaggaaatcttccactcagttctgctgcctccatgtcccagatgatcacagaagcctcctgagaagggttgaatcccccgtcgcctggggatcccaagaaagctgcagaggaaagactttctcttccaagatcagaacaaaggacggttagcattgtgcccagtagtgccaaaaggtaaggttgggttaaaataagaatttgccttaagctcttttcccgggggcttgtttttttcattaaccttgttggctggactttagggaagtatgcaccatcttctccagaagtgcttcagattttatatttttaagaaattcaagagtctgagttaggcactttaatgtaacctccccaaagcttttgttccaggaattgacttggggattaatctgtttagcaaattctgacacagaggcatctcataaccttttattttttctacagaccacattgtatctacctgggatgttttgaaaatgaacagtgacacctaagaatgtatacttatctcttcatgccaattctccaaactggatgttgcccatgtctcaaaattacttgcctccaattttagggcataaagtgtgagattctgtagcatgagatcatatgctcttaaaatactaagtatata

SEQ ID NO: 27024 - DNA, 592 bp, Homo sapiens
attctgggctctaaaatgcattacagcattttagaattcaaaagcgtggtgtacgtgggccatgcctaatctgaacacctgccatggtcagctgagtgtgcaggtctcactgaatgacagagctggttttgaggccctgctgtcaggggatgtggcacatgaggcaccccatgtttctggcttgatcttaaatactctgctttagaagcgatagcaagtaatctcaggtctaggaatccatatgtgtccagtatttctatgctcaaagtttctctaagttaygaatccctgaagtgctcacgtgtgaagcagatgtggatttcgggaaataagtcaaggtttttaagcctttctcccctcctacttatagagccttttagaagatccttacccgatggtccgttccacagggatccttggtgtttgtaaaataacttctaagtactgggaaatgatgcccccgaccattcttattgacctcctgaagaaggtgactggggaactggcatttgacacgagctcagctgatgttcgttgttctgtctttaaggtaagattttttaaattatgtaagtaatgtttatttgttgta

SEQ ID NO: 27025 - DNA, 940 bp, Homo sapiens
atcaatggctgtggttgttgttggtcttatatataaaacacttaactaaatataaatgtccatgttcaaaagaaratgcgaataacaaactgcaacttctgaagcagtcttttgatgcaatgtagttttcttaccttataaatctgatgtttaaacattaaaaagtttaattttatttcacacaaataaatttcacaccttgcttcccaatcatgataaatctcacagtgccctaggcctctataacatcaaagactagaaacagtgtatctgtttggggcctcaattttactcaatgattaagtcatttcaaatattaatatgaaacaaacataatgctaaaggcaagatttgcacctgtttttaatataaacatgaaatgtcaaatactttttccatgggttagtgtaggacctgaacccaacccttggctcttggaggtaggatgtcacactcctacctgacaatgtttgttggtaagtttgataaatgctagaaagggaatgtctaagcagataagcaaaatagtaacaaaaggaatctgggataagtttcttccaatatttattgtcctggtgttaaagccaatacctacagattcctctcattgagaattactctctacctagttggtaaaatcaccactaacctgttgcgaaactattaaaaaaactttccttttcttcattctatgacttgatcattttcttttctttttttttgagatggagtctcgctctgttgccgaggctggagtacagtggtgcaatgatgactcactgcaacggccgctatctgggttcaggtgattctcctgcctcagccttccgagtagctgggattacaggtgtgtgccactacgctaattaatttttgtatttttagtagagatggggtttcaccatgttggccaaggtggtcttgaaatcctaacctcaag

SEQ ID NO: 27026 - DNA, 940 bp, Homo sapiens
atcaatggctgtggttgttgttggtcttatatataaaacacttaactaaatataaatgtccatgttcaaaagaagatgcgaataacaaactgcaacttctgaagcagtcttttgatgcaatgtagttttcttaccttataaatctgatgtttaaacattaaaaagtttaattttatttcacacaaataaatttcacaccttgcttcccaatcatgataaatctcacagtgccctaggcctctataacatcaaagactagaaacagtgtatctgtttggggcctcaattttactcaatgattaagtcatttcaaatattaatatgaaacaaacataatgctaaaggcaagatttgcacctgtttttaatataaacatgaaatgtcaaatactttttccatgggttagtgtaggacctgaacccaacccttggctcttggaggtaggatgtcacactcctacctgacaatgtttgttggtaagtttgataaatgctagaaagggaatgtctaagcagataagcaaaatagtaacaaaaggaatctgggataagtttcttccaatatttattgtcctggtgttaaagccaatacctacagattcctctcattgagaattactctctacctagttggtaaaatcaccactaacctgttgcgaaactattaaaaaaactttccttttcttcattctatgacttgatcattttcttttctttttttttgagatggagtctcgctctgttgccgaggctggagtacagtggtgcaatgatgactcactgcaacggccgctatctgggttcaggtgattctcctgcctcagccttccgagtagctgggattacaggtgtgtgccactacgckaattaatttttgtatttttagtagagatggggtttcaccatgttggccaaggtggtcttgaaatcctaacctcaag

SEQ ID NO: 27027 - DNA, 473 bp, Homo sapiens
  misc_feature (1)...(473): n = A,T,C or G
tggatcttcctccccacttctcaggaacctgcttgcttattttctgtattggaaaagttttctgggctaggtgcagtggctcacacctgtaatcccagcactttgggaggccaagacaggtggattgcttgagttcacgagctcgagaccagcctgagcggagtggtgaaaccctgtctctacaaaaagtacaaaaaaaagtagctgggcatggtggtgtgtacctgtagtcccagctacttgagaggcagaggtgggaggatggcttgagcgtgggaagcagaggttgcagtgagccaagattgtgccactgcactccagcttgggtgatagagccagaccttgtctcaaaaaaaaaaaaaawatttttttnnnnnnnnnnnnnnnnnnnnnnnnnnnnnnnnnnnnnnnnnnnnnnnnnnnnnnnnnnnnnnnnnnnnnnnnnnnnnnnnnnnnnnnnnnnnnnnnnnnnc

SEQ ID NO: 27028 - DNA, 982 bp, Homo sapiens
tctgcagatgcctctctgcgagtcaagcccaggttggtgcccagcaactttcagagtgatgtttcatttcctgcatgctttctctacatagcaccagtaagcctggacttctagcccatgatagaagcgtgcccctaattcccggctatctttctaacatggactccccatgctactcaagacttctatccacaatttatgtcctcaacagactctggcttgtctgagggttccaacatttccctcttattctgacttagatatatgtctactctatttcacataactttccccagttctaggttttcaccctaaatttagtggctcaaaccctaatatctggcttcaaaaaaactcagcagaagttcaaaagcatttctattcctccaagctcatatgttctttttcctacactaggctgaggtcccagatgccagttctcagacacattagtggctctagatatgcacttaaagcaaacataaccttaaacggtaaataaagaacccggaacttggaattaacatatgcgtttctgatgctagctctgccactaagatcacaccactgtatgatcttggatgagtcattaactctctaggtctgtttttttcatctctaacattaagaggttttataatttcaaagttctcttccagctatgaaattttattattatattctgcaaaagtatttgtcagattaattcctagacatataaagacatataaaggtttaacacattatctattgttatttactctgccatttctcctctccatttgtgtggacaactgaaagtcaattacgtatgctaaggcaaagacattggggaagactccctatacttttactccactggcatatctagatgaacaacttagtgccctgctgattaaaggactcaaagactcatccatatccatttctctcacaagtttaaagaagcaaaacccagtsgctgctacctactatgggccag

SEQ ID NO: 27029 - DNA, 544 bp, Homo sapiens
gaccaaaacaatgatgtatagcttacatgtattgattgatgttttatgtctccctaaaatatataaaaccaagttgtagtctgaccaccttggacacatgttttcagcatattttgaagactctattaccagccgttggtcactcatatttggctcacaataattctcgtcaaccatactaaagtttgactcttttttgtcaacaaaaaattaaggatccctctaaattcttaatccaagaataaagagtggcattggccatgatggatgtaatgttttgaaagattaatccagtctaaatgtgcaagatggatagagtaggggaatattcaggtggcagaaaaatcaatttagatgctattgaaactgcctttgcaaaattacgaccgagacagtgaacgagatctatcctaactgacatcatcttgcttctaacctttaagtcrtcctcatttattcatgggtataggctgtgaactaactttgggaggaacttggtttatagcttatagtttaaaacaaagatgataacagctctttccca

SEQ ID NO: 27030 - DNA, 536 bp, Homo sapiens
tcaagaatatttctccatctcaaaatataacttcaaaataattgcaacaatggtcactgaaattaaaaatataattggtatatcaaaatttgtagagactttaatgcaactcttataaaaacaagctgtttgagaacgcaaaagtaagtaaaagtaaagagaatgtgcatttaaaaaataattggagaatgtatattgcttttaaatacatctgaattattgttaaatgtccattttttaaagtcacatacacacacatgcrcacacacacacacgtgccccaaattataagcctatatatcacttgaaattcaaaataaaatctaaccccactaacttatttatctgcggattaaatacataatagaaaataatcaatggcttaaaatgaatgcccaaacagaaattaggttacattttaatttgaacaaaaacaaagctcaacatagaaaaatgactggtgttcattcaaatcagtactgaggaggaaatgtcagttactaacttatttttctcctaattacattagaaaggtc

SEQ ID NO: 27031 - DNA, 536 bp, Homo sapiens
tcaagaatatttctccatctcaaaatataacttcaaaataattgcaacaatggtcactgaaattaaaaatataattggtatatcaaaatttgtagagactttaatgcaactcttataaaaacaagctgtttgagaacgcaaaagtaagtaaaagtaaagagaatgtgcatttaaaaaataattggagaatgtatattgcttttaaatacatctgaattattgttaaatgtccattttttaaagtcacatacacacacatgcacacacacacacacgtgccccaaattataagmctatatatcacttgaaattcaaaataaaatctaaccccactaacttatttatctgcggattaaatacataatagaaaataatcaatggcttaaaatgaatgcccaaacagaaattaggttacattttaatttgaacaaaaacaaagctcaacatagaaaaatgactggtgttcattcaaatcagtactgaggaggaaatgtcagttactaacttatttttctcctaattacattagaaaggtc

SEQ ID NO: 27032 - DNA, 536 bp, Homo sapiens
tcaagaatatttctccatctcaaaatataacttcaaaataattgcaacaatggtcactgaaattaaaaatataattggtatatcaaaatttgtagagactttaatgcaactcttataaaaacaagctgtttgagaacgcaaaagtaagtaaaagtaaagagaatgtgcatttaaaaaataattggagaatgtatattgcttttaaatacatctgaattattgttaaatgtccattttttaaagtcacatacacacacatgcacacacacacacacgtgccccaaattataagcctatatatcacttgaaattcaaaataaaatctaaccccactaacttatttatctgcggattaaatacataatagaaaataatcaatggyttaaaatgaatgcccaaacagaaattaggttacattttaatttgaacaaaaacaaagctcaacatagaaaaatgactggtgttcattcaaatcagtactgaggaggaaatgtcagttactaacttatttttctcctaattacattagaaaggtc

SEQ ID NO: 27033 - DNA, 536 bp, Homo sapiens
tcaagaatatttctccatctcaaaatataacttcaaaataattgcaacaatggtcactgaaattaaaaatataattggtatatcaaaatttgtagagactttaatgcaactcttataaaaacaagctgtttgagaacgcaaaagtaagtaaaagtaaagagaatgtgcatttaaaaaataattggagaatgtatattgcttttaaatacatctgaattattgttaaatgtccattttttaaagtcacatacacacacatgcacacacacacacacgtgccccaaattataagcctatatatcacttgaaattcaaaataaaatctaaccccactaacttatttatctgcggattaaatacataatagaaaataatcaatggcttaaaatgaatgcccaaacagaaattaggttacattttaatttraacaaaaacaaagctcaacatagaaaaatgactggtgttcattcaaatcagtactgaggaggaaatgtcagttactaacttatttttctcctaattacattagaaaggtc

SEQ ID NO: 27034 - DNA, 814 bp, Homo sapiens
tagacatattttcaacataatttgctgaccaattagatgtgggatataamagaaagaagagttgagtatattccgaagttttaggtctgagcaatggggaaaattaagctggcattaattaagatagagaaaactattcaaagagcaggtttagggtgtcagtggtggggcagtgtgggccagggaagaggagccagggggagatcaagcacttagtttttgcataagtttgagatgcctggtagtgattttagtcaagcaggtctgtcctccaccagggccagaggtataggtcctatgggaatttctgccaaagaattgcagattgaatttacttgccaccgtgtatttcccttctcctctttattaaaaaaaaaaaggaggagagctatctgccttttaaataactatttgtcttccttcagtatatataaaaaatccaagtggaggtgtcaggtagttagatagataattctggaatttggaagagtggtctagcctagaaatataaattttttgttctttagcatgtaaatggcattttaaagcatgagagtgaatgtaatcacttagggagagaatatagataggaaagaagagaccaaagtctgaactctggaacactgcaatctcaagagtttggaggagttgaaaggaaaccagcaaagaagaactagagtagccagtgaagtaggatgcaagtcaggtctgctagatctgatttccaaaatgtcttcagaatgccatagtattcttagatcagaacatggtaactggtatattacagacagttgcttttgaaaaattatattgg

SEQ ID NO: 27035 - DNA, 814 bp, Homo sapiens
tagacatattttcaacataatttgctgaccaattagatgtgggatataaaagaaagaagagttgagtatattccgaagttttaggtctgagcaatggggaaaattaagctggcattaattaagatagagaaaactattcaaagagcaggtttagggtgtcagtggtggggcagtgtgggccagggaagaggagccagggggagatcaagcacttagtttttgcataagtttgagatgcctggtagtgattttagtcaagcaggtctgtcctccaccagggccagaggtataggtcctatgggaatttctgccaaagaattgcagattgaatttacttgccaccgtstatttcccttctcctctttattaaaaaaaaaaaggaggagagctatctgccttttaaataactatttgtcttccttcagtatatataaaaaatccaagtggaggtgtcaggtagttagatagataattctggaatttggaagagtggtctagcctagaaatataaattttttgttctttagcatgtaaatggcattttaaagcatgagagtgaatgtaatcacttagggagagaatatagataggaaagaagagaccaaagtctgaactctggaacactgcaatctcaagagtttggaggagttgaaaggaaaccagcaaagaagaactagagtagccagtgaagtaggatgcaagtcaggtctgctagatctgatttccaaaatgtcttcagaatgccatagtattcttagatcagaacatggtaactggtatattacagacagttgcttttgaaaaattatattgg

SEQ ID NO: 27036 - DNA, 1853 bp, Homo sapiens
aacttcccaggttataatacggtcttgaaattcttgttttgtttatgctgattccgtctctagakaaaatcatgaccgatctttccttctagaacaagtgacagactttttatatatccactatcaagaagccttctatgtacactagaaaataaactttcctctcttactttaagtactattttatggataaaggttcatttcaattagcttgtgccaaagatatctgaaaatgtaagcaaaacataagaaaataaaatgtttaaaaaggtgtctatgatggtcagataagcagagaatcataatggaaatgacaaaaccaggcagctaatcatgggactgcttaaagaacaagccacctagcccaaattataatagatttcccaaagattaccactttgttttttttaaatgcattatattgattccaagtctatgtttgggctgaaagacccaatatatctcttaattaaaagtaccaaaaagatggtttttagttgaaaataaaatgagaattaatgttaataaaatcttaacataaagcctattacctacatggaaaattcctttatttatgactctaaagaggttaatgaacaacagtatccttttagagaactaagataatgcattcaacgagcaaaaaagaaaaaaaaataaagatgccacacataaacaatattaatcttaaatgtaaaggggctaaatgccccaattaaaagacacagactggcaaattggatagaatcaagacccatcggtgtgctgtattcaggagacccatctcacatgcaaagacacacataggctcaaaataaagggatggagaaatatttaccaagcaaatggaaagaaaaaaaaaagcagtggttgcaatcctactctctgataaaacaaattttaaaccaacaaagatcaaaaaagacaaagaagggcattacataatggtaaagggatcaatgtaacaagaagagctataattttcactaattgtgctcataaatattatattatagctgtaaccctcatgtccccgcatgactccctatatccatgggccccaaaccctatgactaaaaagtaaacttaggagaaccacatttgtaatgtggagcccctaaataatgagttcaacacacagaacatactgcacagacgtactctaaattgcctagctggattcactgcctaggaaccaatgtatatgtttatttgtttgtttgttttggaaagggtaggatgaagaggaagaggtaaaaaacaagtacgacactttggcttcaagaaatctgttggaaacacagagttgaacatggtaaatattaatacaaaaaaacactttaaatgaaataggatttgttggaaatcatatctaagaattggaagaacttctaaggagttcttttgatccaacttttgtcactagagagcagtacatttaaaacattctccaaagctgatattttactattttttctcaaaaatcattacagagggggattccataatccccgacttcacacactcataatgtgtaatgaactttaaatttgatgtccaggtacataagttgacatatttattttggacaaaatactgctttaattattttaatatttcaggcagccttttatttttttggtcttgagtggtccagaaattcatttcaaattttaatttctattaaatgtgtaaacacatcgttcttcggactattacgtcttagtctcttctgtagtttaaacacattctttttctgtcatcattggaaacaaaatctatatacctgttctcattgcagatggatgatgacagacataaagctcttttcacctctttttctctttagctaa

SEQ ID NO: 27037 - DNA, 969 bp, Homo sapiens
acatcccacaagccagaaccaggtcatggatgaaacagacaaagcagttcctcccagaaggcatatccagggtctaatcccaaataacttcctccatgtccagatcaagaatcacttctccagcaggagtgcatcatgaagaaggacaagtgaatgccttgtgtttcctgttcttcccgttctcggtgggaatttcatcgttcttctactggatctgctacactcttttctattatatgtatgtttggggaagagatgcccaaactcatgatctggagttcatagatctccagatcgtgagctacttctctctctctctatgtgtgtatatatatacatatatatgtatgtatatatacacacatacatatatgtacatataaatatatattaatataaatatatattaattataatactatttaataatataataatattaattaattataattatatatatawacttttgggagtcagggtcttgctctgttgtccaggctggtattgaactcctaggctcaagtgatccaccaacctaagcctcccgaagtactaggattacaggtatgagccaccacacccagcccttgagtcacctctagactcaaaggagaggttactctataccctagagatcatggacttccaagctgctgagtaactcaatggtgagagtatctctgggtaggaggaaggatgatctgcttatcagaaaaatgaatggaaacagaatttgttcagtgttcacaattttaggtgctttcccttacattctcctgtttccaaaagttaaaccactacatgagaattttactgatgaaatgtaagtggaagttatgtgtaccattttggggtcacagcttttaagaaatggggatatcttttatgctcccattttcccttccacaagcaatatcctgaaaatgacttgacttgacccttacaaagctttaaaatgaagagact

SEQ ID NO: 27038 - DNA, 612 bp, Homo sapiens
gtacaaaaagcatggcgcccacacttgcttctggtgaggcttcaggctgcttccactcacggcmgtagttgaggaggagccagcctatgcagaagtcagatggcaagagaggaagcaagagggagaggaggaggcgccaggctctttttagcaaccagttttcaggggaaccaaaagtaagaactcacactcccatgagaaaggcaccatgacgttcatgagggacccaacctcacccccaggatccaaatgcctcccaccctatgcaaccttacctcccacaatggggatcaaattttaatatgagacttagcagggccaaacaaaccatatcaaaccacagcatcctggaatctggactggccagtgatgaagagcaggagctttggtctcacagctcagttttaccacttatttatttggatttagttttactacaaaaaaagactgtagcattgtgtattataaagattgagaaaaatattgtacttaggtaaacagggtgcctatccttattgattgttgtagcttcaacccctaaaagtttagaaatggatacaacatgagtttccaggtgacggggcacccagacctctaggcaggtgttcagaa

SEQ ID NO: 27039 - DNA, 612 bp, Homo sapiens
gtacaaaaagcatggcgcccacacttgcttctggtgaggcttcaggctgcttccactcacggcagtagttgaggaggagccagcctatgcagaagtcagatggcaagagaggaagcaagagggagaggaggaggcgccaggctctttttagcaaycagttttcaggggaaccaaaagtaagaactcacactcccatgagaaaggcaccatgacgttcatgagggacccaacctcacccccaggatccaaatgcctcccaccctatgcaaccttacctcccacaatggggatcaaattttaatatgagacttagcagggccaaacaaaccatatcaaaccacagcatcctggaatctggactggccagtgatgaagagcaggagctttggtctcacagctcagttttaccacttatttatttggatttagttttactacaaaaaaagactgtagcattgtgtattataaagattgagaaaaatattgtacttaggtaaacagggtgcctatccttattgattgttgtagcttcaacccctaaaagtttagaaatggatacaacatgagtttccaggtgacggggcacccagacctctaggcaggtgttcagaa

SEQ ID NO: 27040 - DNA, 1047 bp, Homo sapiens
aaatcttgagaacacatccttaagtatatcttttctgagaagcagaggttaatatcaactgctgaaaatacatgcaggcataaggctaaatgtactaaccatgccaaaatatgatgtgattggcaggagagcaataatacacaaatatttcttgaaatacccatttcctttcaaatagaaggtttatttttctttcatgctttcctcaaacagaaaccctcaagccttgttatgttccaatgccacaagcaaaatgtacagttagaaaccaccggatctagcagggccagcctgccattgttattttgcagagggaagggtaatattctcaggaagctttgttccaacaatataataaaggctacacgttgtgagtattatctgtggcaggcagaatgactccccaaagaaatgcccatgccctattccgtggaacagaatatattacattgcacggaaggaggaagttgatagatgagaaaatattcacagactttaagatagggagatttccctggcttattgggatgggctcaatctcatcatataacccttaaaagcagaaaatttctcagcagaagagttaaggcagaargagaaatcagagagattccaaacatgagaaggattccatctgctgctgttggtccgaagatggaggggccacctacataaggaaggcctgcaggagctgagaacagctcccagctgacagcccacaaaaaaaaataaaaagaggcctcaaccctataaccagaaagattgatttctgccaacaatctgaataaacctggaagtgaatcatctcccagagcctccacataaaagccctgccagataacaccttgagttcagccttttgagacatgaacaaaagacccggccaacactatctgcgcttctgacccacagaacaggaggataatacatttatgctgttataagcctctaggaatatgctaatttgttacagcaacaatagagaactacaatagaaaaagagtgaaaatacaatacagaatcctggaaaactaggcttggagagtg

SEQ ID NO: 27041 - DNA, 1212 bp, Homo sapiens
ttgaaataacaggatgctaaaacctttataaattgatatgccagaaaagagggaggcaaaaatgaatgctaagtttcttcgcataatactctgtgggatgtgtttttccccctaagaatatyttagcattaattaagataaacaatgatatatgctgaaagacaattgaatctgttctcggttaaaaatggcttcgttgtgtaaaaatagtacccaaattatagcatataaagatgcagggggaaaaatactgtaaacctataacatgattaaaatagaaatgcaaaccagtaatgatgagaccttgaacaaatctgggggaagaagagaaagatggggaagtagcaaggcacgtcatcatgcttaatttattcacctccctctgggaacttctttactgtgtttctctttaataataactattatttatcatggcatcgttagcatacgttttcaatgaaattggttttgttattaccattttataagtgaggaactgagctttggagagtttaagtcaaggtcacactggtagaaatagcagaaccaggttttgaaccaggttaggttaagcctccagcataacactttccacccgtctaggctgccccactgttccctgggtctcccctctaaaaatcctcttcaagtcagaatgagaatcaaggaaggagctcacacatatcacacttaagacgtgccaagcactgttccaagcttttcctaagtattagcttatttcatcctcacaatattgggggattgttatattattatccccatttgacagatgtggagagttaagtagtttgtccaaggccagacagctggtggaagctgtaattcaaggcaggcaggtgggccggcttcagaattcatgctgcgatgttgttctatttcctttggagagccatttgtgacatccaagggtgactcctcctgccccattttccccagagttcctgcaggggtgaatacctacagcacatatctggcgtggtctttattttagcaggggatgtttttatgtctttgtgtggcaactgtctgataaccctgcaaattccttgagagttaggagtttccagaattcttcccatctcccacagttcctagtcaatattttgcacatgatgggtgctcagcaaatgtttgatggggaggctgatggagaccagttaattttgcttccctccatggctgcaggatgca

SEQ ID NO: 27042 - DNA, 1212 bp, Homo sapiens
ttgaaataacaggatgctaaaacctttataaattgatatgccagaaaagagggaggcaaaaatgaatgctaagtttcttcgcataatactctgtgggatgtgtttttccccctaagaatatcttagcattaattaagmtaaacaatgatatatgctgaaagacaattgaatctgttctcggttaaaaatggcttcgttgtgtaaaaatagtacccaaattatagcatataaagatgcagggggaaaaatactgtaaacctataacatgattaaaatagaaatgcaaaccagtaatgatgagaccttgaacaaatctgggggaagaagagaaagatggggaagtagcaaggcacgtcatcatgcttaatttattcacctccctctgggaacttctttactgtgtttctctttaataataactattatttatcatggcatcgttagcatacgttttcaatgaaattggttttgttattaccattttataagtgaggaactgagctttggagagtttaagtcaaggtcacactggtagaaatagcagaaccaggttttgaaccaggttaggttaagcctccagcataacactttccacccgtctaggctgccccactgttccctgggtctcccctctaaaaatcctcttcaagtcagaatgagaatcaaggaaggagctcacacatatcacacttaagacgtgccaagcactgttccaagcttttcctaagtattagcttatttcatcctcacaatattgggggattgttatattattatccccatttgacagatgtggagagttaagtagtttgtccaaggccagacagctggtggaagctgtaattcaaggcaggcaggtgggccggcttcagaattcatgctgcgatgttgttctatttcctttggagagccatttgtgacatccaagggtgactcctcctgccccattttccccagagttcctgcaggggtgaatacctacagcacatatctggcgtggtctttattttagcaggggatgtttttatgtctttgtgtggcaactgtctgataaccctgcaaattccttgagagttaggagtttccagaattcttcccatctcccacagttcctagtcaatattttgcacatgatgggtgctcagcaaatgtttgatggggaggctgatggagaccagttaattttgcttccctccatggctgcaggatgca

SEQ ID NO: 27043 - DNA, 1212 bp, Homo sapiens
ttgaaataacaggatgctaaaacctttataaattgatatgccagaaaagagggaggcaaaaatgaatgctaagtttcttcgcataatactctgtgggatgtgtttttccccctaagaatatcttagcattaattaagataaacaatgatatatgctgaaagacaattgaatctgttctcggttaaaaatggcttcgttgtgtaaaaatagtacccaaattatagcatataaagatgcagggggaaaaatactgtaaacctataacatgattaaaatagaaatgcaaaccagtaatgatgagaccttgaacaaatctgggggaagaagagaaagatggggaagtagcaaggcacgtcatcatgcttaatttattcacctccctctgggaacttctttactgtgtttctctttaataataactattatttatcatggcatcgttagcatacgttttcaatgaaattggttttgttattaccattttataagtgaggaactgagctttggagagtttaagtcaaggtcacactggtagaaatagcagaaccaggttttgaaccaggttaggttaagcctccagcataacactttccacccgtctaggctgccccactgttccctgggtctcccctctaaaaatcctcttcaagtcagaatgagaatcaaggaaggagctcacacatatcacacttaagacgtgccaagcactgttccaagcttttcctaagtattagcttatttcatcctcacaatattgggggattgttatattattatccccatttgacagatgtggagagttaagtagtttgtccaaggccrgacagctggtggaagctgtaattcaaggcaggcaggtgggccggcttcagaattcatgctgcgatgttgttctatttcctttggagagccatttgtgacatccaagggtgactcctcctgccccattttccccagagttcctgcaggggtgaatacctacagcacatatctggcgtggtctttattttagcaggggatgtttttatgtctttgtgtggcaactgtctgataaccctgcaaattccttgagagttaggagtttccagaattcttcccatctcccacagttcctagtcaatattttgcacatgatgggtgctcagcaaatgtttgatggggaggctgatggagaccagttaattttgcttccctccatggctgcaggatgca

SEQ ID NO: 27044 - DNA, 794 bp, Homo sapiens
tttgacgatttacgtagcagctgagattcacctgctaaatggaaggcccgtcactcaggcttattctccaactgttacgggatggaaatgcttgactgtgagttgtccaggttcttggtgcactgaacaaagaatcaaacaaaacatacaaacaaagcaacaacaaaaaaaaaaacaaaacaatgaaagcacagatttattgaagcaaaagtatactctacagagtgggagcaggcttgaacaagcagctcaaacgctcccattataatgttgtttagggttcttattaagctaaaagartttggtaacacccacttggcgccctttagaggcctccagttggttatatcctatgaaggattggcccaagaaccaatcagaggctaaagtggagatggctcatgaccaatcagaggctgaagtggagacttggcctgtggtcaatcagaggctgaaatggaaatttccatgttgttatttcagagtgaggatgtggcctgtatgctgcccagtcttgcctagaattggctgcacctgctgttgttttgcttatgacttaacctttggttatcctcattccctattctcctacttctcaagcagagggtttcaaatacatggacccaagtaaatcaatgatcttctatctctcctcttcctgtatcttgcggactagaagatgttgatgcttacagagtggaaatacacagtctatggctggagactggtctttacggccttagaattgttcccctggaaggtcagttcaagctgttaccctgcatattcagaag

SEQ ID NO: 27045 - DNA, 794 bp, Homo sapiens
tttgacgatttacgtagcagctgagattcacctgctaaatggaaggcccgtcactcaggcttattctccaactgttacgggatggaaatgcttgactgtgagttgtccaggttcttggtgcactgaacaaagaatcaaacaaaacatacaaacaaagcaacaacaaaaaaaaaaacaaaacaatgaaagcacagatttattgaagcaaaagtatactctacagagtgggagcaggcttgaacaagcagctcaaacgctcccattataatgttgtttagggttcttattaagctaaaagaatttggtaacacccacttggcgccctttagaggcctccagttggttatatcctatgaaggattggcccaagaaccaatcagaggctaaagtggagatggctcatgaccaatcagaggctgaagtggagacttggcctgtggtcaatcagaggctgaaatggaaatttccatgttgttatttcagagtgaggatgtggcctgtatgctgcccagtcttgcctagaattggctgcacctgctgttgttttgcttatgacttaacctttggttatcctcattccctattctcctacttctcaagcagagggtttcaaatacatggacccaagtaaatcaatgatcttctatctctcctcttcctgtatcttgyggactagaagatgttgatgcttacagagtggaaatacacagtctatggctggagactggtctttacggccttagaattgttcccctggaaggtcagttcaagctgttaccctgcatattcagaag

SEQ ID NO: 27046 - DNA, 370 bp, Homo sapiens
tagagcaatgaaaataactgaaaaactgaaaattgtctatgtgtttattacaagggaattaagtcatgccgaaatattcatacaataaaacattaggcagtcatttaaaaggatcatgtggttttttctaacatagaaaaaaatggtcccaatttatcgttaaawgaaaatgttcctaatctattgctaaatgaaaaaaaattacaaaaccttcctaaatgcacacagcattttgtatagtatgtctctcttttgctgtcattcagaagcatattaggggtgaaaagaatccatcctgttccctcagattagatctagtataatctttttgtgtaagaggaaaaagtattccaggaacagtagctcacgc

SEQ ID NO: 27047 - DNA, 577 bp, Homo sapiens
ctttgagtgattactggacactggctctgaattgacaccaattcctgggaaccccaaacatcactgtggtccactagtcagaggaagagcttatggaggtcagtcaagcaatggcgttttagctcagatccatctcacagtgagtacagtgggtccccaaatccatcctgtggttagttccctggttccaggaggcatcttagarcagacacatttaacaagtggcagaatctcttaaaaattatttgttatttatatgaaattcaaattgaactgggcactctgtgttttgtgctgttgttgtttttgctaaatctggcaatcctacttcaaggaaacaccaagtggaaaaaccaccatgtgagcaacagcttagaggacatgagagtgagggtctattaagaagactgtgagtatcctgagttggacggtaaaatccaagggccagaggacatgaaattcagtgagctgagggactttgcaagactctggaaattttccttttttaaaagagccagtttgtccctagccaaaacaaccacccaaaacaaaacaaaagcttttcagtccttcctca

SEQ ID NO: 27048 - DNA, 577 bp, Homo sapiens
ctttgagtgattactggacactggctctgaattgacaccaattcctgggaaccccaaacatcactgtggtccactagtcagaggaagagcttatggaggtcagtcaagcaatggcgttttagctcagatccatctcacagtgagtacagtgggtccccaaatccatcctgtggttagttccctggttccaggaggcatcttagagcagacacatttaacaagtggcagaatctcttaaaaattatttgttatttatatgaaattcaaattgaactggrcactctgtgttttgtgctgttgttgtttttgctaaatctggcaatcctacttcaaggaaacaccaagtggaaaaaccaccatgtgagcaacagcttagaggacatgagagtgagggtctattaagaagactgtgagtatcctgagttggacggtaaaatccaagggccagaggacatgaaattcagtgagctgagggactttgcaagactctggaaattttccttttttaaaagagccagtttgtccctagccaaaacaaccacccaaaacaaaacaaaagcttttcagtccttcctca

SEQ ID NO: 27049 - DNA, 577 bp, Homo sapiens
ctttgagtgattactggacactggctctgaattgacaccaattcctgggaaccccaaacatcactgtggtccactagtcagaggaagagcttatggaggtcagtcaagcaatggcgttttagctcagatccatctcacagtgagtacagtgggtccccaaatccatcctgtggttagttccctggttccaggaggcatcttagagcagacacatttaacaagtggcagaatctcttaaaaattatttgttatttatatgaaattcaaattgaactgggcactctgtgttttgtgctgttgttgtttttgctaaatctggcaatcctacttcaaggaaacaccaagtggaaaaaccaccatgtgagcaacagcttagaggacatgagagtgagggtytattaagaagactgtgagtatcctgagttggacggtaaaatccaagggccagaggacatgaaattcagtgagctgagggactttgcaagactctggaaattttccttttttaaaagagccagtttgtccctagccaaaacaaccacccaaaacaaaacaaaagcttttcagtccttcctca

SEQ ID NO: 27050 - DNA, 577 bp, Homo sapiens
ctttgagtgattactggacactggctctgaattgacaccaattcctgggaaccccaaacatcactgtggtccactagtcagaggaagagcttatggaggtcagtcaagcaatggcgttttagctcagatccatctcacagtgagtacagtgggtccccaaatccatcctgtggttagttccctggttccaggaggcatcttagagcagacacatttaacaagtggcagaatctcttaaaaattatttgttatttatatgaaattcaaattgaactgggcactctgtgttttgtgctgttgttgtttttgctaaatctggcaatcctacttcaaggaaacaccaagtggaaaaaccaccatgtgagcaacagcttagaggacatgagagtgagggtctattaagaagactgtgagtatcctgagttggayggtaaaatccaagggccagaggacatgaaattcagtgagctgagggactttgcaagactctggaaattttccttttttaaaagagccagtttgtccctagccaaaacaaccacccaaaacaaaacaaaagcttttcagtccttcctca

SEQ ID NO: 27051 - DNA, 1093 bp, Homo sapiens
tcctgttgaggtttcatgtgaacctcatatttgtttcatatttggtgttatgtgagccttccacctggccataggtgattggacagggactggcacttgagctgaaagtagccaatgagttagcctcatgtaagagtccatctctacataggactatgattaattagacccattacgttctccttctgaaagttttgaatgagacgttgctcagagtgagtgggatatrtgttcattctagtaggaatcttgtctgttttctttcctaatttatcaccattattgataatagtacccagcacttggctgggcatggtggcgcatgcctgtaatcccaggactttgggaggctgaggcaggcagatcacaaggtcaggagttcatgactagcctggcaacatggcgaaaccctgtctctactaaaaatacaaaaattagccaggcacggtggcacgtgcctataatcccagctacttgggaggctgaggcaggagaatcacttgaacctgggaggtggaggttgcagtgagccaagatcgcaccactgtactccagcctgggcaacagagcgagactctgtctcaaaaaaaaaaataataataataataataaagtagtacccagcatggcacacaataaatatttgataaataaatgcacgcacccttatgtagaaagatttttaaaaaatgaatcaacatctctctccccatattttacctttttctcctgccaccaggcagccaggttcttccttatctcctcttttaaattgttattattcttttaaacacactttattttttaaggcacctttaggtttgcagcagaactgagtggaagataatagagacttctcacatatcccctgctgcctcacatgcatagcctcccttattatcaacatccccacagaatggtacatttgttataattgataatctacattgacacatcattatcatccaaagaccaagtttacattagggttcactcttgctgttgttcattcaatgggttttgacaaatgcttaatgacatgtatctaccattataacaacatacagagtagtttcactggcctaaaaatcct

SEQ ID NO: 27052 - DNA, 1093 bp, Homo sapiens
tcctgttgaggtttcatgtgaacctcatatttgtttcatatttggtgttatgtgagccttccacctggccataggtgattggacagggactggcacttgagctgaaagtagccaatgagttagcctcatgtaagagtccatctctacataggactatgattaattagacccattacgttctccttctgaaagttttgaatgagacgttgctcagagtgagtgggatatatgttcattctagtaggaatcttgtctgttttctttcctaatttatcaccattattgataatagtacccagcacttggctgggcatggtggcgcatgcctgtaatcccaggactttgggaggctgaggcaggcagatcacaaggtcaggagttcatgactagcctggcaacatggcgaaaccctgtctctactaaaaatacaaaaattagccaggcacggtggcacgtgcctataatcccagctacttgggaggctgaggcaggagaatcacttgaacctgggaggtggaggttgcagtgagccaagatcgcaccactgtactccagcctgggcaacagagcgagactctgtctcaaaaaaaaaaataataataataataataaagtagtacccagcatggcacacaataaatatttgataaataaatgcaygcacccttatgtagaaagatttttaaaaaatgaatcaacatctctctccccatattttacctttttctcctgccaccaggcagccaggttcttccttatctcctcttttaaattgttattattcttttaaacacactttattttttaaggcacctttaggtttgcagcagaactgagtggaagataatagagacttctcacatatcccctgctgcctcacatgcatagcctcccttattatcaacatccccacagaatggtacatttgttataattgataatctacattgacacatcattatcatccaaagaccaagtttacattagggttcactcttgctgttgttcattcaatgggttttgacaaatgcttaatgacatgtatctaccattataacaacatacagagtagtttcactggcctaaaaatcct

SEQ ID NO: 27053 - DNA, 1017 bp, Homo sapiens
tgcattaatcactaagatggaattttaacaggcaactggtacgagctgcattggaataagagggattgatagtatttaaggaccagtcagaagaggactgatggtatttaaggaccagttacaaaacaggctggttgcagtgactcacacttgtaattccagcactttgggaggccgaggcaggaggatcacttaagcccaggagttccagatcagcctgggcaacatagtgagacctccatctctacaaaaaatgttttaaaaaattagctgggaacggtggcatgtgcctttagttccagttacctgggaggctgaggcaggaggatcacttgagtgcggggggggttgaggctgcagagagctacgatcacaccactgcactccagcctgggtgacagatcctgtctcaaaaaaaaaaaccaaaaacaagcagaaagtgaaaaaatagtgacagagtatatttctttgaatcatgccttcaattgcatgtgmtccttggttaagaacactcattgaggattatatttaacttttctgttttattttatatagaaaaacccatattagagcaaaatataccttagtagtggtaagctgtggtgactctaattaatactgctttctaactactctacaggaaaagtgatctacagggtttacctgtagaaatacagcagtgccatagccaggcgtggtggctcgcacctgtaaccccagcactttgagaggctgaggcaggtggatcatgaggtcaagagatcgagaccatcctggccaacatggtgaaaccccgtctctactaaaaatacaaaaattagctgggcatggtggcacccacctgtagtcccacctacttgggaggctgaggcaggagaatcacttgaacccaggaggcagagattgcagtgagccaagatcgcgccattacactccagcctgggcaacagagagagactccgcccccccccccaaaaaaaacaaaacaaaacaaaacaaaaaaagcagtgccattag

SEQ ID NO: 27054 - DNA, 1017 bp, Homo sapiens
tgcattaatcactaagatggaattttaacaggcaactggtacgagctgcattggaataagagggattgatagtatttaaggaccagtcagaagaggactgatggtatttaaggaccagttacaaaacaggctggttgcagtgactcacacttgtaattccagcactttgggaggccgaggcaggaggatcacttaagcccaggagttccagatcagcctgggcaacatagtgagacctccatctctacaaaaaatgttttaaaaaattagctgggaacggtggcatgtgcctttagttccagttacctgggaggctgaggcaggaggatcacttgagtgcggggggggttgaggctgcagagagctacgatcacaccactgcactccagcctgggtgacagatcctgtctcaaaaaaaaaaaccaaaaacaagcagaaagtgaaaaaatagtgacagagtatatttctttgaatcatgccttcaattgcatgtgctccttggttaagaacactcattgaggattatatttaacttttctgttttattttatatagaaaaacccatattagagcaaaatataccttagtagtggtaagctgtggtgactctaattaatactgctttctaactactctacaggaaaagtgatctacagggtttacctgtagaaatacagcagtgccatagccaggcgtggtggctcrcacctgtaaccccagcactttgagaggctgaggcaggtggatcatgaggtcaagagatcgagaccatcctggccaacatggtgaaaccccgtctctactaaaaatacaaaaattagctgggcatggtggcacccacctgtagtcccacctacttgggaggctgaggcaggagaatcacttgaacccaggaggcagagattgcagtgagccaagatcgcgccattacactccagcctgggcaacagagagagactccgcccccccccccaaaaaaaacaaaacaaaacaaaacaaaaaaagcagtgccattag

SEQ ID NO: 27055 - DNA, 1017 bp, Homo sapiens
tgcattaatcactaagatggaattttaacaggcaactggtacgagctgcattggaataagagggattgatagtatttaaggaccagtcagaagaggactgatggtatttaaggaccagttacaaaacaggctggttgcagtgactcacacttgtaattccagcactttgggaggccgaggcaggaggatcacttaagcccaggagttccagatcagcctgggcaacatagtgagacctccatctctacaaaaaatgttttaaaaaattagctgggaacggtggcatgtgcctttagttccagttacctgggaggctgaggcaggaggatcacttgagtgcggggggggttgaggctgcagagagctacgatcacaccactgcactccagcctgggtgacagatcctgtctcaaaaaaaaaaaccaaaaacaagcagaaagtgaaaaaatagtgacagagtatatttctttgaatcatgccttcaattgcatgtgctccttggttaagaacactcattgaggattatatttaacttttctgttttattttatatagaaaaacccatattagagcaaaatataccttagtagtggtaagctgtggtgactctaattaatactgctttctaactactctacaggaaaagtgatctacagggtttacctgtagaaatacagcagtgccatagccaggcgtggtggctcgcacctgtaaccccagcactttgagaggctgaggcaggtggatcatgaggtcaagagatcgagaccatcctggccaacatggtgaaaccccgtctctactaaaaatacaaaaattagctgggcatggtggcacccacctgtagtcccacctacttgggaggctgaggcaggagaatcacttgaacccaggaggcagagattgcagtgagccaagatcgcgccattacactccagcctgggyaacagagagagactccgcccccccccccaaaaaaaacaaaacaaaacaaaacaaaaaaagcagtgccattag

SEQ ID NO: 27056 - DNA, 1017 bp, Homo sapiens
tgcattaatcactaagatggaattttaacaggcaactggtacgagctgcattggaataagagggattgatagtatttaaggaccagtcagaagaggactgatggtatttaaggaccagttacaaaacaggctggttgcagtgactcacacttgtaattccagcactttgggaggccgaggcaggaggatcacttaagcccaggagttccagatcagcctgggcaacatagtgagacctccatctctacaaaaaatgttttaaaaaattagctgggaacggtggcatgtgcctttagttccagttacctgggaggctgaggcaggaggatcacttgagtgcggggggggttgaggctgcagagagctacgatcacaccactgcactccagcctgggtgacagatcctgtctcaaaaaaaaaaaccaaaaacaagcagaaagtgaaaaaatagtgacagagtatatttctttgaatcatgccttcaattgcatgtgctccttggttaagaacactcattgaggattatatttaacttttctgttttattttatatagaaaaacccatattagagcaaaatataccttagtagtggtaagctgtggtgactctaattaatactgctttctaactactctacaggaaaagtgatctacagggtttacctgtagaaatacagcagtgccatagccaggcgtggtggctcgcacctgtaaccccagcactttgagaggctgaggcaggtggatcatgaggtcaagagatcgagaccatcctggccaacatggtgaaaccccgtctctactaaaaatacaaaaattagctgggcatggtggcacccacctgtagtcccacctacttgggaggctgaggcaggagaatcacttgaacccaggaggcagagattgcagtgagccaagatcgcgccattacactccagcctgggcracagagagagactccgcccccccccccaaaaaaaacaaaacaaaacaaaacaaaaaaagcagtgccattag

SEQ ID NO: 27057 - DNA, 1017 bp, Homo sapiens
tgcattaatcactaagatggaattttaacaggcaactggtacgagctgcattggaataagagggattgatagtatttaaggaccagtcagaagaggactgatggtatttaaggaccagttacaaaacaggctggttgcagtgactcacacttgtaattccagcactttgggaggccgaggcaggaggatcacttaagcccaggagttccagatcagcctgggcaacatagtgagacctccatctctacaaaaaatgttttaaaaaattagctgggaacggtggcatgtgcctttagttccagttacctgggaggctgaggcaggaggatcacttgagtgcggggggggttgaggctgcagagagctacgatcacaccactgcactccagcctgggtgacagatcctgtctcaaaaaaaaaaaccaaaaacaagcagaaagtgaaaaaatagtgacagagtatatttctttgaatcatgccttcaattgcatgtgctccttggttaagaacactcattgaggattatatttaacttttctgttttattttatatagaaaaacccatattagagcaaaatataccttagtagtggtaagctgtggtgactctaattaatactgctttctaactactctacaggaaaagtgatctacagggtttacctgtagaaatacagcagtgccatagccaggcgtggtggctcgcacctgtaaccccagcactttgagaggctgaggcaggtggatcatgaggtcaagagatcgagaccatcctggccaacatggtgaaaccccgtctctactaaaaatacaaaaattagctgggcatggtggcacccacctgtagtcccacctacttgggaggctgaggcaggagaatcacttgaacccaggaggcagagattgcagtgagccaagatcgcgccattacactccagcctgggcaacagagagagactccgcccccscccccaaaaaaaacaaaacaaaacaaaacaaaaaaagcagtgccattag

SEQ ID NO: 27058 - DNA, 553 bp, Homo sapiens
acagggtctcaccgttacccaggctggagaataggtgtgatcacggctcactgcaatcttgacctcccaggctcaggtgatcctcccacctcagcctgctgggtagctgggactacaggcatgtgccaccatgcctagctaatattttgtagtttttttttttttagaggtgaggtcttaccatgctgcccaggctggtcttgaattcctgggctcaagtgatccttctgccttggcctcccaaagtgctgggattaaagacatgygccaccgcacagcccatcttcccatttttataggaaggctgctgcataattttggaatctttatgctgggctgcaaactcaaaggcatagggggtaagataggcaacagaaattgtgtatcgagtgcttactgtatgcgtggcactgttctaagtgctttacatataacacatttagttttcacaaccatcctatgaggcgattttatttccattttatagacaagaaaactgaaatacagagaggttaaatagccttggatttgaatcgaaagtcaggactgttca

SEQ ID NO: 27059 - DNA, 522 bp, Homo sapiens
acatcttcatttgtgaaaactgyacctgtcaaatttgtgatttttcaataccaacaactcccatccaaaacaatgaggcaaggagggagtcccgcagaggaggaagtgtgtgatttaacccttttcttctggctctttatagaaaaacttcaaaggaagctttgatctaaggtgccacttctgccatcccagaagcatggaatattttgttaataacaaatcatatttttcccagcactttgggaggctgaggcaggcggatcacgtgaagtcaagagttccagaccagcctgaccaacatggtgaaaccccgtgtctactaaaaatacaaaaattagccgggcatggtggcgggcgcctgtagtcccagctactcaggaggctgaggcaggagaatcgcttgaacccgagaggaggaggttgcagtgagccgaggtcgcgccattgcactccagcctgggcgacaaaaaaagaaaaaaaagaaaaaagaaagaaagaaagaaaggaaggaaggagaaagaa

SEQ ID NO: 27060 - DNA, 587 bp, Homo sapiens
tcaataaaaaatgtcagataccaaaaagaaatatcccatataatcatcaccaacaaaaaaaagagataaatctaataatggtgagaacaggctgctgatgaggagtcaaaatgatcaggcaacctgcctgtaccctccctcccctgcagccttgccattgccacctttgcctttaggtactcacacacagccacccaccatattgctttgctggtgcrtgtgtgcacagatggacctagccttcccttacctgccagtgcacctgtgtgcgtgcaccatgccatgccactgctgctggtgtgagtgcaccccaccacatcgtcattgttatggaagcgttggtgggcatggaatccaccagtcccagcccaccagcaccccagccctgcaccagggaggctggcacaaaactaggcacagaaaacagcagacctgatccctgctctgagcagccactgccaccagagtgaacacgcacggaaggcatacatagtcctgtgcccaccagcactcagtccccatgctaacaccacgatcagtgcaaatgtgcacacaattgctggcgggggctcccatcctcctgagcc

SEQ ID NO: 27061 - DNA, 603 bp, Homo sapiens
ggaytattactccccatatgccctgatcctctctgggatgtcaaccttgcagcaagctagagagaaataagcctatactatttgatattgtttggactttttaataaggtttacatacaactcttccactgttataggatagtctggatttcttctcatcttgttcaaaaaaaagactacttgttgctaagcacgtagcaggcagtgtccttttgaaaataaggataagaaaaaagataaggccctttgtgtaacagaattaattggataatattcacccagttcctattatagtctgaaggaaagaaagagaaaattgtatagttttagaactttactaaacgcaaacaacagaaagaaaacttactggacatttgcttaggcaacatgcttgttatattttaagtgaataagccagtgaacaggtggatgcttatgtctgcaacccctgctatttagtatctttaggtaaaaaatttttttaataacccctgcaaatgttttcagcagtgggtaaaaataatgactgtgccttataaacattgaagagagactagagctgtgctcttggagcccttctgctttgcaaagtgtctttcttga

SEQ ID NO: 27062 - DNA, 2522 bp, Homo sapiens
attcaccaaatatttatggagcaactacacaccaagtatcttgttgagttttaaaggtatgatggtgaagaaggtagattcaatctctgctcttcggagagtaattgacatggctaatagtgactttttctgtttcaatcaaggtacacatcagcattgtaaaatatatttcccaccaatttcaggttgtccctcatgctcagtagtaatgaataattaagcggacaattctctacaatttctatcataatgtcactaattcagagatccaaagtggtaggattgggtacaaactttcaaaaaagaaaataattgtagtgaaaatttttaaaaccctatttttctccaggaacttactaagttatcctatttaagtgtcttcacttcaattaagtcatcatgaaagagaggagatgagtcataatggatgatggaattatgaaaataaatgtgattaaaagacaatttgtaaatattaaaatgctcctgacatatactctcctaagcagcatcagtaaaaattaatacaagcatatagaaaataaataaatgcaaaacttgaactatttaaaaaacaaactaaaagttatttattttttatttttttgatttggggtctaactctatcatccaggctggagcgcagtggcacagtcacagcttatggcaactttgaactcctggcctcaagctaccctctcacctcagcctcccaaagtgcggggattacaggcttgggctgctgtgcctggacaaaagttatattttcataataaagaacaaattataaatatgatttttggcaaatgaaacattaaatctcatattacagaaataacaaaaaaatagggattttggtaaataaggcctgttaactgagaatcttaccataaagttgagcattttataaaaatagagaagcttctgatttttaagtttttctttctgtacttacagggataaagaaaataggctccctgggacagtttcgttattaattgagtcattcaacaactcagatgctatatccattgtgttctctccaaattctttgacccaaagcctctgatgtgtacacacactattagaaagaagaatggttatttcccaacatgtagttatattaaagaatgttgaatcactgtgattactcattgaacttgttttcaaagacttcagagagtccagtatgcagtttcattccccattctcacactttttttttgttaatggcactgcagttaagagaaatgagcatcattgtccacatgtgtactcctgtttttgtatactctgtagatgtggaaatgcrtcacttaaataatcatctttttaggggagcaaagagaagatcttctgtttattgacactgaatcagttgcagcaattgcatagaaagtctgcaatatttgaatccctaaaatctggacattcaattagggcaggagacagctaacctggaaatgttctcactaccaaaatttagaaatgatgactgaaataaagcagcgaaaattccaatatgtagctgatctcacaagaaagaaaaggaaatcccgaagtatcagaaacaaataagaactaaaatccaaagtatactctctggtgttaaccctgaggagatcttggaagcaaggtacattttttatatgttacagaagtagaccctaaagtctaaaacctagaggatgaatgatcatgccaagggcaaaggacaagtccttgggcctgcctaagaatggaagttgaatagcagtgtctgcccaagtcagactccagatggaatgacctgctggttcagagtagaagacaaaaattccccaatgagaaaccaaaagcctatgcagcacatgtatttgtggcccaaatgcgtattaccacatagtatcaaaaatatgcgattgaaatttaacataaacattgatccttttgttgcaattgcttttggtgttttagtcatgacttcttttcccgtgcctatgtcctggatgatattgcctagattttcttctagggtttttatggctttaggtcttatgtttaagtctttaatccatcttgagttaatttttcataaggtgtaagcaaggggtccaggttcagctttctgcatttggctagccggttttcccaacaccattttgtatacctgtgtaacaaacctgcatgttctgcacatttatcccagaacttaaaggataataataaaaaaagaaagtaaactacatagaaaatggggaaaaaaattgatcctaagtagggttcatgcaaaagcattctcgaggaagactttcataacgtagatgcacagtatatctcaaagtggtcattgtctgctgaaatagggactactcactgaagaatcagaccaagaacttctaaaacattttagttgctttagataaccatactgttaaaaaaaaaccttaaaaagtgggaaaatcatagttgaccaactaatctcaatatcttctgaaatgaatgctactactactaaatgtttaccaccgaataagatcggc

SEQ ID NO: 27063 - DNA, 1385 bp, Homo sapiens
cacggtggctcacacctgtaattccagcactttgggaggccgaggagggtgggtcacctgaggtcaggagttcaaaaccagcttggccagcatggtgaaaccccgtctctactaaaaataaaaaaaattatccaggcttggtggcaggtgcctgtaatcccagctaatcagaaggctgaggcaagaggattgcttaaacctggaaggcagaggttgcagtgaactgatatcgcatcatcgcactccagcctgggcaacaagagtgaaactccatctcaaaattaataaaataaaataaaataaaataaataaaataaaataaaataaaataataaaataaataaaatataaaaatataaaataaaataaaaatataaatataaagtataaaataaaataaaataaggacaggacaatattctaatggttgcatgatatttcattactgctatgattaacctctaatgttggacatttaagtgtcattataatcaataatacagcaacagacatctttgctcataaggccttttctgtatagattgctagtagtgwaattacctagctaagagtaattttagggttcttaatatatattgccaaatccaagagcagttgtattcttgtatcaacaataaatcaaagttttaaatttcatgccttattttgccagcattggattttctcattaaaagagaaagggctaatttcatgggtgcaaatggcatgtcattgttgttttgactacgttattggtgacactgaatgtttacataggttgttaaccagttagattttctcttttatggattgttatgtccttagcccatttatctataaggtgagtgagtaatatttaagttgttgttaatgaattattaatttatcatactaggcatggtccccattcagtcaatttttctgaaaaatcgtttcccctgttattcattaatagcatttttaagcagaaatttcagatttttatgaagtcaaacgtaagcctattgatcttccattgattcaacacctttagttcttcctcatccaaagaattgattaaaatttgcttcaatttctcatagatatttatagtttttatatgtgatttctaaacccatatggatttcatgtaagaaattccatgaattctgaagtatataaaattatttatccttgcctcccctactatgcagattcagagtgttcatctttttgagttattatttcctcctaacagagatagccagtttaataaatggatgactttgataccttcattttatttttctcaatattaagccagtaaacattgctctgagggtaccatactaatcagttttaaaattttgtgtcatttttgttgttgcacagagatatatacgtat

SEQ ID NO: 27064 - DNA, 1158 bp, Homo sapiens
atacacagaaaaggctaaagagaagaaggatcaagatggccaactaaatacaggtactatgtgcttccaccatggggaagagccagaataggaagtagatactcaaatttcaaacatatcttctaggagagaatgtttggattcatcacagaagmgatggaaagcaccagaaataagtaggaagagagtttgaggcagattgtccagctaggaacttactgagagttgggagaaatgccttgatgtggggaaacagtaacagagaaatacccagacctctgaaatgaactttaacaaacctggcatgggagaaaccatcaacccactaggtcctcgtgcctgacatatggagctgcctagattttgcacagagacgttgctccagaaagggttcctacacagaatcccacagttatctgtgtcaggagcagcctcagtcaggagccattttcagaaccaagatgctgtggacctatagaccatggctgcaaccactgtgctgctccaagaagggagaggggtgaataggtgcacccatacacccctgggtgggtacttgctgtcctgctacaaactactgttgagactgagatataagtggatcacacttctccagagtcttactcatgctgcttgcctggatggtgtcccatcccctctggttccagaccaaggcaccattttgagagcttagtggtgggctgaggcttgccttcgacctgagctcaggctgacaaggttaaagccaccccctgaccaaggactgacaggaaatccaggctatcctatatatatatatatagtcatacccagtgctctgaaacaggctgctgtgagactgaaacatgatcagaccacactctccacagctttttgctcacactgcttgcctaggtcatcctccaccctttctgttcccagtccaaaacttcaccattgtcttgattttgggctgatgcactctagctgccacccagccaaagagggacagggaagccaggttctcctatgcatacctaggacaatactcaatgccctggtacaggctgctgtgaggccaagatttcagtggaccacacttcccaaagcttcttgcctattcactagaatggggccccaccctccccagtcacaagcccacaactgacaccattttga

SEQ ID NO: 27065 - DNA, 1158 bp, Homo sapiens
atacacagaaaaggctaaagagaagaaggatcaagatggccaactaaatacaggtactatgtgcttccaccatggggaagagccagaataggaagtagatactcaaatttcaaacatatcttctaggagagaatgtttggattcatcacagaagagatggaaagcaccagaaataagtaggaagagagtttgaggcagattgtccagctaggaacttactgagagttgggagaaatgccttgatgtggggaaacagtaacagagaaatacccagacctctgaaatgaactttaacaaacctggcatgggagaaaccatcaacccactaggtcctcgtgcctgacatatggagctgcctagattttgcacagagacgttgctccagaaagggttcctacacagaatcccacagttatctgtgtcaggagcagcctcagtcaggagccattttcagaaccaagatgctgtggacctatagaccatggctgcaaccactgtgctgctccaagaagggagaggggtgaataggtgcacccatacacccctgggtgggtacttgctgtcctgctacaaactactgttgagactgagatataagtggatcacacttctccagagtcttactcatgctgcttgcctggatggtgtcccatcccctctggttccagaccaaggcaccattttgagagcttagtggtgggctgaggcttgccttcgacctgagctcaggctgacaaggttaaagccaccccctgaccaaggactgacaggaaatccaggctatcctatatatatatatatagtcatacccagtgctctgaaacaggctgctgtgagactgaaacatgakcagaccacactctccacagctttttgctcacactgcttgcctaggtcatcctccaccctttctgttcccagtccaaaacttcaccattgtcttgattttgggctgatgcactctagctgccacccagccaaagagggacagggaagccaggttctcctatgcatacctaggacaatactcaatgccctggtacaggctgctgtgaggccaagatttcagtggaccacacttcccaaagcttcttgcctattcactagaatggggccccaccctccccagtcacaagcccacaactgacaccattttga

SEQ ID NO: 27066 - DNA, 613 bp, Homo sapiens
gttaagtttgtaaatcactaggcatatagaagatgagtaacaattttagccttgctgagcccctcctttccaccccttcctaggtctagttgggagagaggatggaggaagaggtttagaaaagataaggaaaggaaaggaaaggaaaggaaaaacatgtggctctccttggaaacacacactatacttatcaatattatctgcattttttatgcagttaatgrctatttaaagtcaaaatttccatggatctgcagacaaagttttgagcattcaagagttctattgagtattatcatataattacactgcctacatttacatttgtatttaagatggtatttgccccagataaaagccaattacattgtcaaagaagttattaatgtagcccagagaatatcaatgacagaatcgtgtgattatgagacacaaggtagtataggctcaccaaccacaaagtacctgtgctgaaattgtactacatataaatgttataatcaatggtatcatactaattctgtttgtgtatgtcaatttgtaatatttcattagcaagaactatggtagtaaatatgaaatgaataattcttattttcccaattccagtaat

SEQ ID NO: 27067 - DNA, 1199 bp, Homo sapiens
  misc_feature (1)...(1199): n = A,T,C or G
tgcagtgtgatctgagctgtcaggcctacagagaacacactggctttgctgtttcttaacgcagtctgtgatcacggtgtctaatgcagtattgttagacagggtgctacccaggcaaccagactcatgcgtggtttcagcctccaccgtgacggctggtgccagaatcacatcagtgggcgagtgggtcacatggctgcccaaacacactccaaagggccaagttgagcaaggaaaaacagggaaatatcccactttctggtcactaggaggggccaagagacaaacactttatcctcctaatgcctccacttttgctcttcagtcaagacaaaattctgctggtcaagttcatgtgtagagtagggaccactgacattctctctccttcccagctcaggaaggtttcagtttgttttcggaagaggggacagagaaatgaaattagtatttttktgaatacctactatgtgccatgcattcttaggagtaataagaagaccttcatttgattataacagtaacagtagcagccactatctagtgagcattactattttccaaactgctaaatgttctacttgaaacatcatatttaatctatatggccactatgaaataggttgtaagattagtcccattttacagagaaggacatagaacctcaaagaggtaaatttatccttcatcacaaaggtagtaagtggcagagccagactgttacctgggtatatcaattaggattctttggtgtaagcaatagtaactgacattctaacaaaggaatatattggaaggatactggcccttatagacttggcaagagaatgcagagctagactcagacacaggtgggcagcaaggcaaatctgggcaatggagataggaaccaggaaccaccaaccaccaggtcttgttgcaggaaaggttgtcagaggctgtcnaatgggatgaactggactctgtgacatttcagtctggactctgttacatttcagtctctttgcctctctgttcaaggagtctccaacagcctaaagcagatcatgaggagtctttgcctgggcatctgtccacagttattaatgtacacagactgtatccaatggtaataccctccacttggaagtgctattgagaaaaagaaatgaatgctgggaagtgagaaaacaacaaatgtgcattgcacaacctgggga

SEQ ID NO: 27068 - DNA, 1199 bp, Homo sapiens
  misc_feature (1)...(1199): n = A,T,C or G
tgcagtgtgatctgagctgtcaggcctacagagaacacactggctttgctgtttcttaacgcagtctgtgatcacggtgtctaatgcagtattgttagacagggtgctacccaggcaaccagactcatgcgtggtttcagcctccaccgtgacggctggtgccagaatcacatcagtgggcgagtgggtcacatggctgcccaaacacactccaaagggccaagttgagcaaggaaaaacagggaaatatcccactttctggtcactaggaggggccaagagacaaacactttatcctcctaatgcctccacttttgctcttcagtcaagacaaaattctgctggtcaagttcatgtgtagagtagggaccactgacattctctctccttcccagctcaggaaggtttcagtttgttttcggaagaggggacagagaaatgaaattagtatttttgtgaatayctactatgtgccatgcattcttaggagtaataagaagaccttcatttgattataacagtaacagtagcagccactatctagtgagcattactattttccaaactgctaaatgttctacttgaaacatcatatttaatctatatggccactatgaaataggttgtaagattagtcccattttacagagaaggacatagaacctcaaagaggtaaatttatccttcatcacaaaggtagtaagtggcagagccagactgttacctgggtatatcaattaggattctttggtgtaagcaatagtaactgacattctaacaaaggaatatattggaaggatactggcccttatagacttggcaagagaatgcagagctagactcagacacaggtgggcagcaaggcaaatctgggcaatggagataggaaccaggaaccaccaaccaccaggtcttgttgcaggaaaggttgtcagaggctgtcnaatgggatgaactggactctgtgacatttcagtctggactctgttacatttcagtctctttgcctctctgttcaaggagtctccaacagcctaaagcagatcatgaggagtctttgcctgggcatctgtccacagttattaatgtacacagactgtatccaatggtaataccctccacttggaagtgctattgagaaaaagaaatgaatgctgggaagtgagaaaacaacaaatgtgcattgcacaacctgggga

SEQ ID NO: 27069 - DNA, 1186 bp, Homo sapiens
actactaagttagcagtccttttattccgaggaagcaaaatgaagaagaaaagtcttagaaaatgttagagttgatggatatatccctatagttcttcccaaacttatttattatggtttaattgacatagaacaaagtaaaatggaaagttggataattaaagccaaagtccctacttttttcttaataacttatgtgggaattattgttgctgggaatgtgtctggaattgcatatcttggtccatcatttctggagcatttgcagctggttgttttttaataaaagtgtacatgtatgcatgtgtataaaagatttgttattctgataatggcttatgcatgaagtgattgctgatactgaaattacaaaagtgaggctgggcgcggtggctcacgcctgtgatcctagcactttgggaggccaaggcagaaggatagcttgagcccaggagttcaagaccaccctggrcaacatagggggaccccatctctccaaaaaaaagttaaaaaattagctggacatgccagcccatgtttgtaatctcagctattgggaagctcaggcaggaggatcacttgttcctgagaggctaaggctgtagtgagttgtaatcatgcccctgcacttcagcctgagcaacagagtgagaccctgtctttaaaaaaaacacaaaaactataaaagtgagtttggaaaacaaaaagtgaatctgaaatttctctattctttattctgaaagatctatatctgtatattttctatagctatacctatatataggtatatgtggaaatatctgaactctttttttttttttttacgatgtttctttttttctttttttcttttttatttattttttttttattgatcattcttgggtgtttctcgcagagggggatttggcagggtcacaggacaatagtggagagaaggtcagcagataaacaagtgaacaaaggtctctggttttcctaggcagaggaccctgcggccttccgcagtgtttgtgtccctgggtacttgagattagggagtggtgatgactcttaaggagcatgctgccttcaagcatctgtttaacaaagcacatcttgcaccgcccttaatccattcaaccctgagtggatacagcacatgtttcagagagcacagggttgggggtaaggtcaccgatcaaca

SEQ ID NO: 27070 - DNA, 1235 bp, Homo sapiens
ccagcagtgtgctggcggcagggaccctgacaaggtctggagcctcagagcgcacctgcccccacttacaagccccggcctcggggattgggtggagtgtcccctgcctccaacggctcccagatgagtgagtaaaagatggcacgtagaccaggagcgggggctgacacctgcaatcccagcactttgggaggctgaggtgggaggatcacttgaggccaggagtttggggccaccctgggcaacatggtgaaaccctgtctctactaagaatacaaaaaaattaaccagcgtggtggcacatgcctgtggtcccagctactggggaagctgaggtgggaggattgcttgagcctgggaggtcaaggctgtagtgagctgagattgcaccactgcactccaccttgggtgacagagtgagaccctgtctcgacaaacaaacaaacaracaaacagaccgatggcatgtaaatagcacccacattgggcagacagtcttaggctgtaagagagggcagagtgccctggaacacacacaagggaaggagcgctgctctctcttggggtctgtgggaggctttctggagcaggtgtccctagaggtaggactggggggactctgctaggctggtaggaagggaacagcattccaggcagaaggaacggtgtgagcaaaggcctggaggctacagagctcccggcaagctcaggatatgatcctctgtaggtctccccagaccacctggggagctggtgacacgtgcagattcccaggcccgaagaccagctggactccaagagcagggcccaggaatatgactaataattcccctgcctgattcccataccctgcaaaatttgagaccctctggttcagatgctagtgcatagaggaggggatgaagagacgtacgatggcaaggcaggttgggtccaaattgtgagggttttgagggttgtttaggagtttggattttggtgtacaggcaggagggggctatcaagggtgtttaagtaagggagtgctgctcctggacctgctcctgagaatggctcctgggagtgatgtaggtgactgattgatggggtgggacgaagctgggcagaggcttgggtagctgggactgtaacagttatgtgagaggaagcgggaatctgagagagttgccggggcaaaatgtaggcccccagcccctggttcaggggacagcccagggatagtcaccagggatcca

SEQ ID NO: 27071 - DNA, 920 bp, Homo sapiens
ccccgttttgattcagacgcccacagcctgaaactgagctgtttcctccattggtctccacagagtgtggataggtctcgatggcccgtctgggttatcctagggctgtgatgggcatgtccaggccactccgtgcatctgcccggaaccccagygtccagtgctttgcagatgggagatggaaggtcagagacctgagcctccagggcaacaggagggccactgtggggagtccctggatggtgatgtaggcctccagccagggccgtccaccagcgcgactgaccttggatgagaaactccattcatgagcccccacttccacagctggggctgacagtatgggccatgtagccctgcatggacagtcaacagaaaacctacgtgcagctcttggccagcacccactgcccatagtatgtccgcaaacagcagattggtgctggggacaaaccactcacaggcacatcccttctgcagtggccattctgctccctgccctgaacgcccgaccagggcaatcaggcacaccggctgccaccccaggccactgcaccaactcctggaggtcggtgctgtagctgacttatccaaggaaagtgaggcacagcaagactgaggtcccatggcttataggtggcagccctctgcctccctgaggcttgctcttgactttccaaatttggccttgcttatcccttgcataatctaaaagagcagcttatttttatagaaatagtgggtggcagacagcacggaaaagtggagagttctgccctgcctgatgccccacccctgccccttcaccccacccttcccacataccacatggttgttactaagtcggctttgtaacaaccagggcagcccagatgctctggtcccatgccccactctccattctgtgacctgctgtggat

SEQ ID NO: 27072 - DNA, 1068 bp, Homo sapiens
tgcccactgcttagaaaatgcagttgctggatgagccaccactgctgtcctttccagccccgggcagctgctgcttgcctgtgacccaggagttctcctcctcctctctgtccagcctggaggcaccttccctatctgtgtgtgggctgagccacccagcccaaacacaaacatttttatcagactctacccactctcctcacccgccagcaggttcctggccccatttctcagggtggggggagtgagttatttgtctaaggtggaacagtgtgagtggcagaactgggaatcgatccctcgatgccatgtaactttcccaggtcaggtctcaccacgtcaggccgcctaaatctgcatccacgcgggaacctgggtgtgatttaaccaatgtcattggcaggagcttatttcagggtgagggtgctgccggtccccctcctggacagtgggtctcctccgggttgcaaatttcttgtgttttgtgtctcttccctcagtgacccaggaggctctcacgtggagtccccagaacagcatcaactcctcacgatgctcctgacggtggtggacagactctccatgccccgatgaagttgtgagtcacatacatcccygtccacagcacccggtactcagtaggtggtcccataaatgtttgtggcacaagtgaatgaacttggaaccatccatctagtggaaattgtaaattataacaaaacccaatggaccgtgaaagccagggtcaaggctggggcctgctgaggccctgtcatcgagggagtttttgtgctggtaaagatgatgactgccctggtgcagggcccgtgtagcccaacatgtctagtccgtggcgggctcttactggggatgaggggcctccaggaggagcaggcctgggcacagacttctgacctgggcacagttgggaagggtgacaaggggtcagagcaggctcttggcctcaggtcaaaggacaggagtcctcctgactctgctgtgtctgaagcccacagtgaatgcaatgcagaaaaagcagtgcttgaccctttgttttctccggggtta

SEQ ID NO: 27073 - DNA, 472 bp, Homo sapiens
tactataaactgtaccttcattagaccaaaagtgggaactactgttcagatacacaaaaaggtatcagtgccatgataactgtcagtcaaggctgggtgcagtggctcacacctggattcacagcactctgaaaggccaaagcaggtggatcacctgaggtcaggagttcgagaccagcctggtcaacatggtgaaaccctgtctctactaaaaatattaamaaattagctggatgtggtggcacgcacatttaaagaaaaagtcaaggggtgaccttttaggtacaaaaggatccataatctataactgttcatagaacaagctgaaacgtcatttccttggcacctccaaaagctggcagagaagactcaaagtaacaccagtaccctactgttaagacctgtgggctgcacgcggtggctcatgcctgtaatcccagcactttgggaggccagggtgggtggatcacct

SEQ ID NO: 27074 - DNA, 644 bp, Homo sapiens
taacttcatcagtgaggcatccttgtagactctgagaaagctgatatagagacgctttttccaaattataaaagagacaaamactttaagtaagtcacagtagcatctactgctgcatcatcaacttctaaattcaggcttaatcatgtgactttaatataaacatgaacagtttcttaattacgattttcacaaatctgagttaagtactgaatctttttaacactccaaagaggtagcatatgctaattttttaaagatgcaaccttctattttcttcgtaacaattacttatagctgaaacatcttaatggtatacattttttaaaaataatagtctcgtatttgattaatttaacatctacttatttaggctatttttcaaaatgttactgctactaaaccacagccctggctaatgatcgtattccacttcaaaaacggagtaagaagaaaagccatattttcatgctttgttctatttttcacacaaataactatcatttatggacaaaaatatgcaacacgtaaagtgatgtcataaaaatttgaaataaatccaccaaaattggaaagcaaagatcaccgaaattatgaaacattgtgggtatatttgataaaaagaagatactatttttgattaa

SEQ ID NO: 27075 - DNA, 551 bp, Homo sapiens
tgccattctagcaagtgaaatgcagcagtgtgtttttcaaaagtgtgcttccaaaacataaaaagaatatgataaatagcaagtcaaaagactgatgctacaaggcgatgttgtgaatgaacagaggctaccaaactacrtatctagtagtgtatactacatatctagacagtatagattctatatatatgtacactacatatctagacagtatagattctatatatatgtacactacatatctagacagtatagattctatatatatattacatttgttacaagcatttcataatccttttaaaatagctgcatattattctattttgaacaattacaaaactatataaaagctttatacacttttggacatttaagatttcaaattttcataatcataattaccactacaatcaatatctttctgcactgtttgttttttctctgtattaaggatcgttctccagagagcccatactcgcagtgaaattactggatcaaaggatataaattatttttgcatcaattctgtatgccaatttggttaaaat

SEQ ID NO: 27076 - DNA, 1178 bp, Homo sapiens
ggatccaaaatgccaaccagttcctagccccacagctgttctagcttcccacagtggcagtgtctatgttactcttgctttctcagttttctggtggctttcttactttaaattattctataaagcaaggatactgcttgttcagtttacctcctagtaggcctggcataatgctacaactgtgtgtttaacataaagaaggaggaatattatctgttgctgtgggctagaggagagatggggaaataacaagaaaaaagaatgaaagagaaggagcacagggagtaggttgttttctggtatgtggggactctgtcacaagttggagagtgaaatgatgattcccaggctgggactctctcttctgtgctctcagactcctttttccattggaattgtaatctcaggtactctggaaccttcatttgttttataaaggtttttcctaaccaactagaaaggagatgataacttccttatgaatatatttgcaatcatctcgtgactgctcctcacccaccgttactggataagaacatttgtatcttatgcttttatgtcataggatgagcatcttctagtcctgcacttggatttagcagacgaggcttctaggactggctgtggccctgtagaacttagtcaagtcacttaactctctgaattatttctaaggttatatacaactataatgagaatcgtatgattcctgattttaatactagtctaattttgaatatcataaaagtagtaataaaagagtttagaacttggattatctgtctgggatttaagatctttctcctcacttctgcaatggtcttagctaattaatttaatctctctgaaaatttctattcatgtatagatgttaaaagttattatttcatcaatatcatgtggttcttcaagaagcaaatgtagccatatatgaggacattatgcaatttgtaaatgtatatatttgggawaatatttaaaaatttgcagcaacagtaataacaacctttaccaggcacacttttgggtcaggcactgtgttaagagttcaattcacatgattttgttagacttcgaacaatgctaaaaagttatatataacatctaattttacattggatgaaacttaggctcagagaatttgagtaatttacccaagatagcaaatggtggaagaa

SEQ ID NO: 27077 - DNA, 627 bp, Homo sapiens
cccacccccaggctggaggtatggatgtatggatattacctggattcctagacagaggctaatggtttagctggaaggacagggactttgaaagaataagattaccaggcatggtcgttacgcctgcaatgccagcactttaggaggccgaggcaggcacatcacatgaggccaggagtttgagaccagcctggccaagatggcaaaaccccatctctattaaaaatacaaaaatgggccaggtgtggtggtgcatgtctgtaattccagctactcctggggctgaggcacaagaattgcttgaacctgggaggtggggttgtagtgagctgagatcgcaccactgcactccagcctgggcaacagagaatccatctcaawaaataaataaataaaatatgtaggaaagatgacagggccataaaaacctaagccattcttgaagaagaacaagaggggaagatttgccctagtagatatgaaaataaaggctgccctaccagctatcaagacaaagctacagtaataaaaaaaatagtatggtattggtgcaagagtagactgatgaaatagaagaaaaagcccagaaacaaatgtagagagatatggtgctatggtctaaatgtt

SEQ ID NO: 27078 - DNA, 620 bp, Homo sapiens
ccaggggtggcaggagagtgaggggaacttcctgcagccctaatcccagtcacctcgttagttccagggaggtctggcttcaagctggctacagaggtcctgggccctggagcccccaaccgctcccagtggacttggtgcagggttgaccccctcagcccactttaaggcacagtccagccagccaggctgagccacagtggagctgccacccttcttggtcctctcttctgccccgcatggctgtgagcagagctgcaggccctacctcctggctctgctccagttgtgctcatgtcacaacccctcgttcctggagaggggacccaggctccagggctcagcatgtgtcctgactgttctgtctgccttcccagcctgcagtgaccccgccccatccgagcttgaatcccaggtgaatccctgctgcctgggcttgaatcccaggtgacatgtggccagtgagttcacctgtggtggctcagtttcctcwtctgtaatactacccacctcatagggagttgtgagggacagataacccaggacatgcaaagcacttggaacactgcctggtctagagtaagccctaaacaagtgcaagcaatctaataaccacctca

SEQ ID NO: 27079 - DNA, 642 bp, Homo sapiens
gctagaacagatatctactataatagtgtactattatggtgtagatgaggtgccatcctgcatcacagcacaactaggcttactgaattgtgaggtgcctgcaagacccaaaaactcgggatgcctcatgggagctgatggcatgcctagagctttgctgctgccacttcattatctggaatgatttctggggggcttatcccagaggtagattatactcctcccacctctaccactgccaccaagtcctcctgcctccgctcagggcgagtctgtaggatccccagtcccttccctggtgatctgtaagggccaggcccatgcctgtcctgctcaatgaccagcacacagcaggtgctctgcacaagtgaaggagctgagcttgaatcaggtggtgctgcaagtgtgacccagctcagcccccaraacagacctaccccagatgcagggtccgaggaaggaagccacattttgtccagaacaactgtaatatccagatagggcaagagactcatgccacgtcatatgctggtcgcagtgccaagtcccttctggctcccctttcaataatctcgattacttctggcccatctttcttgttgagtcgagcgccacccccctcccacccatttcccgctctgc

SEQ ID NO: 27080 - DNA, 1361 bp, Homo sapiens
tatgaactctcccctactttaatctcaatgaagccaacattttttagttgcctgcagtatatttttatgtttctatacctttatttttgtttccctctgaaacattcttctcagtctgcttcacctggctaacttctgcacaccattaatagttctttaactatgatactctccagaaagcttttttggacttctttagcctaggatttcccatggtattctggaaacatctctagcactataatttctattaccttcctgatgagtccattttcccaaaaccatgagctcactgaatctcttgccctttgcactgtgcctggcacagagcagacattcaatcaatggaagtttattggctgaagtaaataatcatttagtaccttgttgatagcaggataacatcctctgtatgatttctggtactggtatgcctaggtagacagatagctgatggtaatcaagggagatattctcaatgggattctccttcactttgtcaatatcctcttgcatcatcccaaggcgcagaagaatatctgaaacttttttccaaattgaattgaactgtgactcagtgagaccattcatcaaaatctcactaaggaggatatccctgtatttgcacagtctcaggatgtctgcagatttagagatgtcagaagatggcggttccatattccatccttttttgggtgcmgggaacacatttaaatgttttataagagctaacaggaggcataagtcaaactgtttggattgcggtaactccttgttaggaggataaagcagatgccatgatccacccaaaggatgattggtccaaagatggttgtagtaggattccagcacattcttgtgtataagaagctcttttttcaaaagaggaggtggcatagcctcatcaaatatttgtcgaacaatgtcagtaccagaaataataattatatgaagcagatgatagaaataattataatcaagcttgaagataggcatttcatctgaaaataaattttgagaagtcaagacattccacattaatgctcattttctatttggtctctcacattgtatcctaagctcctgtaggataaaaactattccaaaagaatgaaggatagtacagtgctttgccacagccagtgctcaattagcatgctgctttctgcctgtcaaaaaacctaaacaaaaacaacatgttcccaagcaaaagtaataacaaagactaatcaccacagaagtctttcagtcatccaaggttttgttcaagtaaatgacctttagcaacaacatggcatcacagtattaggtctttaaaaattctgaaatttgccaagaatgctaattgtcaatgtctaact

SEQ ID NO: 27081 - DNA, 575 bp, Homo sapiens
tgagccactgttcctggccaaaattttatatttctacctttatattctgtttgatatgattcctaagttattaataaatattgtatattttatatctaataagaattgaactattaacaaaattactaatatacacatacataaacttgartcaaatggaaatagtcttgatatattccactcaattgttaactggtgggaatggatttatgatttaacatagaaggcaaatttaatagttgtttgcattgtgaagataagtccctgacagcatttctttttattgaaactgatagttataactactttgaaccatttacttatacatctatacatagtgatctttaaagacaaaatattgagtaatattataacatctggagacctattaagccgttataaacaataggtcatagaacactttcacagagagaactgattctaacaaattattgtactgacccatataattatctttaatacaagaagatatgatacttttaaaataatggtcagaacagaactataaaaggatttacccaagtatatgctgatgcatatttgcctgtgatgcc

SEQ ID NO: 27082 - DNA, 575 bp, Homo sapiens
tgagccactgttcctggccaaaattttatatttctacctttatattctgtttgatatgattcctaagttattaataaatattgtatattttatatctaataagaattgaactattaacaaaattactaatatacacatacataaacttgagtcaaatggaaayagtcttgatatattccactcaattgttaactggtgggaatggatttatgatttaacatagaaggcaaatttaatagttgtttgcattgtgaagataagtccctgacagcatttctttttattgaaactgatagttataactactttgaaccatttacttatacatctatacatagtgatctttaaagacaaaatattgagtaatattataacatctggagacctattaagccgttataaacaataggtcatagaacactttcacagagagaactgattctaacaaattattgtactgacccatataattatctttaatacaagaagatatgatacttttaaaataatggtcagaacagaactataaaaggatttacccaagtatatgctgatgcatatttgcctgtgatgcc

SEQ ID NO: 27083 - DNA, 575 bp, Homo sapiens
tgagccactgttcctggccaaaattttatatttctacctttatattctgtttgatatgattcctaagttattaataaatattgtatattttatatctaataagaattgaactattaacaaaattactaatatacacatacataaacttgagtcaaatggaaatagtcttgatatattccactcaattgttaactggtgggaatggatttatgatttaacatagarggcaaatttaatagttgtttgcattgtgaagataagtccctgacagcatttctttttattgaaactgatagttataactactttgaaccatttacttatacatctatacatagtgatctttaaagacaaaatattgagtaatattataacatctggagacctattaagccgttataaacaataggtcatagaacactttcacagagagaactgattctaacaaattattgtactgacccatataattatctttaatacaagaagatatgatacttttaaaataatggtcagaacagaactataaaaggatttacccaagtatatgctgatgcatatttgcctgtgatgcc

SEQ ID NO: 27084 - DNA, 575 bp, Homo sapiens
tgagccactgttcctggccaaaattttatatttctacctttatattctgtttgatatgattcctaagttattaataaatattgtatattttatatctaataagaattgaactattaacaaaattactaatatacacatacataaacttgagtcaaatggaaatagtcttgatatattccactcaattgttaactggtgggaatggatttatgatttaacatagaaggcaaatttaatagttgtttgcattgtgaagataagtccctgacagcatttctttttattgaaactgatagttataactactttgaaccatttacttatacatctatacatagtgatctttaaagacaaaatattgagtaatattataacatctggagrcctattaagccgttataaacaataggtcatagaacactttcacagagagaactgattctaacaaattattgtactgacccatataattatctttaatacaagaagatatgatacttttaaaataatggtcagaacagaactataaaaggatttacccaagtatatgctgatgcatatttgcctgtgatgcc

SEQ ID NO: 27085 - DNA, 575 bp, Homo sapiens
tgagccactgttcctggccaaaattttatatttctacctttatattctgtttgatatgattcctaagttattaataaatattgtatattttatatctaataagaattgaactattaacaaaattactaatatacacatacataaacttgagtcaaatggaaatagtcttgatatattccactcaattgttaactggtgggaatggatttatgatttaacatagaaggcaaatttaatagttgtttgcattgtgaagataagtccctgacagcatttctttttattgaaactgatagttataactactttgaaccatttacttatacatctatacatagtgatctttaaagacaaaatattgagtaatattataacatctggagacctattaagccgttataaacaataggtcatagaacactttcacagagagaactgattctaacaaattattgtactgacccatrtaattatctttaatacaagaagatatgatacttttaaaataatggtcagaacagaactataaaaggatttacccaagtatatgctgatgcatatttgcctgtgatgcc

SEQ ID NO: 27086 - DNA, 575 bp, Homo sapiens
tgagccactgttcctggccaaaattttatatttctacctttatattctgtttgatatgattcctaagttattaataaatattgtatattttatatctaataagaattgaactattaacaaaattactaatatacacatacataaacttgagtcaaatggaaatagtcttgatatattccactcaattgttaactggtgggaatggatttatgatttaacatagaaggcaaatttaatagttgtttgcattgtgaagataagtccctgacagcatttctttttattgaaactgatagttataactactttgaaccatttacttatacatctatacatagtgatctttaaagacaaaatattgagtaatattataacatctggagacctattaagccgttataaacaataggtcatagaacactttcacagagagaactgattctaacaaattattgtactgacccatataattatctttaatacaagaagatatgatacttttaaaataatggtcagaacagaactataaaaggatttacccaagtatatrctgatgcatatttgcctgtgatgcc

SEQ ID NO: 27087 - DNA, 627 bp, Homo sapiens
ttcattttaagaggacagtttgatgaaatttgacaaaactctacaagcttgtggatcctctatatctattctgctgttaaatctatccagtgaaattttattttatatactggattctttatctctgaagatatttggctctttttaaaattcttctagttctttcttcatcatgtacatgttttcctttaagctctcaaaaataattataatagtctttttaaagttcttatgctaatctaccatctctttcatttctatttttatgactattaatcaattcgacatgttaatggtcacattttcctgtcttttctcatgtctagtaatttctgattggattgtggacattgtaattgtgatattgttgaatgctaatattttgttttctrtcttgaaagagggatgggtttagtctggtcagagtcagctaaatgcaatgcagcttaatctagagaatagtttttaagtgtattttagaggatttagatttcactcaagagttagctaagtagtactatatatataatcattcttataatttcacagtgaggcagtgatatcattgtgacatctgactgtttggatagcaaactcctcacagccctctttgagtagtagacattt

SEQ ID NO: 27088 - DNA, 541 bp, Homo sapiens
tatttgtttgtaataagtgtctactacttttaaattttgtattgagatatgatttgcataaaagtacaatgtttaaaagtaaatttttagtgaatttgaaaaggtataacccatayttgaaactcatacttgaaaaataatagagaatatttccagcacatccactgtactcttttctggtcaattttgtccccagacttctaaagtgaattggaagttctgattttaaatcacaatacattatctttgcctgttcttaagctttaaataaaaaaaaatcctttcctttattctaccaacttgtattttcttttctttggttctaaggtagaagcttcgttttttgctttttgtaacaacagacatttaaagttataaatttctctctaagggcaccttacttgcatcccacaaattttgatagtgttttcattatcactaatttggaaatatattatttctctgagttctttgatcaatcggttatttagaagattgtggtcaccttttagggagtattttttagttattttttgctatt

SEQ ID NO: 27089 - DNA, 541 bp, Homo sapiens
tatttgtttgtaataagtgtctactacttttaaattttgtattgagatatgatttgcataaaagtacaatgtttaaaagtaaatttttagtgaatttgaaaaggtataacccatacttgaaactcatacttgaaaaataatagagaatatttccagcacatccactgtactcttttctggtcaattttgtccccagacttctaaagtgaattggaagttctgattttaaatcacaatacattatctttgcctgttcttaagctttaaataaaaaaaaatcctttcctttattctacyaacttgtattttcttttctttggttctaaggtagaagcttcgttttttgctttttgtaacaacagacatttaaagttataaatttctctctaagggcaccttacttgcatcccacaaattttgatagtgttttcattatcactaatttggaaatatattatttctctgagttctttgatcaatcggttatttagaagattgtggtcaccttttagggagtattttttagttattttttgctatt

SEQ ID NO: 27090 - DNA, 541 bp, Homo sapiens
tatttgtttgtaataagtgtctactacttttaaattttgtattgagatatgatttgcataaaagtacaatgtttaaaagtaaatttttagtgaatttgaaaaggtataacccatacttgaaactcatacttgaaaaataatagagaatatttccagcacatccactgtactcttttctggtcaattttgtccccagacttctaaagtgaattggaagttctgattttaaatcacaatacattatctttgcctgttcttaagctttaaataaaaaaaaatcctttcctttattctaccaacttgtattttcttttctttggttctaaggtagaagcttcrttttttgctttttgtaacaacagacatttaaagttataaatttctctctaagggcaccttacttgcatcccacaaattttgatagtgttttcattatcactaatttggaaatatattatttctctgagttctttgatcaatcggttatttagaagattgtggtcaccttttagggagtattttttagttattttttgctatt

SEQ ID NO: 27091 - DNA, 1173 bp, Homo sapiens
aggaaatcagaagtaaaatattagggccaaataagaataacataatcatatcacagaattaaaactcaatgtataaataaattcacaatttcccatgtgaaaaaaagtgtttgtcagtctaaatgaaaaaatacaagcaaaatgtatatatacatgcccataaaaaatacatctgaattatttgcatgcagaaaatgtaaaggtatagaaaaagacatactatataaacacccatcgaagaacattaaggtagctatgttaaaataagaagtagacttkaaagcaaaatgaagtaccagaaataaagtagatcacttcacaacaattataaggcttagttgaacagacatcatctatcaagaccatcaaagaattacccaacttagcctagcctaaacttcttacccagagacctagcatctaaatacatgataatgattgaagctactaactcatgatttggtttgatacaaagacaaataacagatacatttgataatgaaaatctgaagaaaaaatgttagcatctatcttaatagtgaacattgctctttttcccccttgagttcagaaatgaagtaaagttgcctcacattgttacttctattcatcattctgctaggggcctcagctagttcagcaaatttttaaaaatagttgtaagttttcaaaaggaagacacaaatatgttatttatacaatggtaaaatgatccattagagatcaattatgaagctggctggtgataactcgttttatatctggaatgctattctttaatatatccttatatcttgaaagatagcaatttaccaacatgaggagttgcttttcccattgccaaaatgcatttggagccaaaggatgaaaatacaatggctcttcttactattaatcctaatgatcaaaatcaacatttttaccacttattgtagcacctctatacaggatggtcctccactgatcatttggatcagatgtcaagactgataacaccacatacctattaagagggtatgaaaagctttattacttttattttctggagggagcagggcaggtctcctcaacaggcccaaaactggcttgagtgagcaagtaaaaaattgaactagtcggcctagctagtttccttcagccgttttataaggcattaatcccatccatgaaggt

SEQ ID NO: 27092 - DNA, 1173 bp, Homo sapiens
aggaaatcagaagtaaaatattagggccaaataagaataacataatcatatcacagaattaaaactcaatgtataaataaattcacaatttcccatgtgaaaaaaagtgtttgtcagtctaaatgaaaaaatacaagcaaaatgtatatatacatgcccataaaaaatacatctgaattatttgcatgcagaaaatgtaaaggtatagaaaaagacatactatataaacacccatcgaagaacattaaggtagctatgttaaaataagaagtagactttaaagcaaaatgaagtaccagaaataaagtagatcacttcacaacaattataaggcttagttgaacagacatcatctatcaagaccatcaaagaattacccaacttagcctagcctaaacttcttacccagagacctagcatctaaatacatgataatgattgaagctactaactcatgatttggtttgatacaaagacaaataacagatacatttgataatgaaaatctgaagaaaaaatgttagcatctatcttaatagtgaacattgctctttttcccccttgagttcagaaatgaagtaaagttgcctcacattgttacttctattcatcattctgctaggggcctcagctagttcagcaaatttttaaaaatagttgtaagttttcaaaaggaagacacaaatatgttatttatacaatggtaaaatgatccattagagatcaattatgaagctggctggtgataactcgttttatatctggaatgctattctttaatatatccttatatcttgaaagatagcaatttaccaacatgaggagttgcttttcccattgccaaaatgcatttggagccaaaggatgaaaatacaatggctcttcttactattaatcctaatgatcaaaatcaacatttttaccacttattgtagcacctctatacaggatggtcctccactgatcatttggatcagatgtcaagactgataacaccacatacctattaagagggtatgaaaagctttattacttttattttctggagggagcagggcaggtctcctcaacaggcccaaaactggcttgagtgagcaagtraaaaattgaactagtcggcctagctagtttccttcagccgttttataaggcattaatcccatccatgaaggt

SEQ ID NO: 27093 - DNA, 998 bp, Homo sapiens
ttctttggtggatagtggaagcatacctgacagcctcagcatatggagaasttggtcagttgtatagaagctttggacaagcaacttcatgtctaacatcactttcatacaccctgcatgaggttttttgatattggttcttagtgtctggactagttttacccattctaggtcagagtttaagctagccaaagggccccagtctagcttatcagaggttatttccagaaagcctcctccctccagggacttctgacatgagaaaactggagaaggtgcagagctggaatggattacccaagtggcttaagcaagataaaggaagaatgcaccctcgactggggactcaaatggactgatctgagttgttgactattgattggctttggtctcttttgtggtggttgagattatagtatctctgcaatctgattactgtacgaatttctgcattctaccaaatgtagcatatatgtgtggttggcttcaataaatctttcatttaacaatgaaaacaagcaagagtttgtaatgtaatgccaaattcagtgaaggtccttgataaccttggttgagaaccatgatttccatccattttaatttaagatccttgataatttgtggagttgttacttcattgaatcaaaaacaggatttcttgaattttctgagcttttgttcccctattatgatgttattacacaatatcttacactgacatatacaattgtcacaattgtccccataaagcattagaaagatattctctttatgttcaatgcaaatcttagatacacatgtcctaagtcatgaaattcaggggagtaaaaagtattccagttctaggaagcaactgttttacaaatgcaaaacaattgggatagataaaaatatttgaaaacaattaaaaccaaatcaacctgtactttatctgtgtgctgagattttaggtccagtggatcagaatacagggaaaaaactaatgagaatccctcaat

SEQ ID NO: 27094 - DNA, 525 bp, Homo sapiens
gtgtggaaaaaaagtagttaccacagataaaacacttaagttgtctctgacacacagccagtgatccaaaaatattgttgatattatgattatttyagtcattatttttaatactttaaattagctaacatgtgccagccatttaagatatcagtcttcatttaatagtgattgattttccaacacatcaagattatattctctagcaaagtcctagagaacagatactctgtgtacttgtttaaatgtaaatgtttaagtttgggcagtcagttgaacaagctggaaagctaaagttgtattgtaaaggtggaggctcttcattaatattctagcttaaaaggtaattctgtgtactcttatcttattctcaaaaaaaaattcctcactcacattaaaagaaagtgatagtgccagtagcagggggaagagagtagcagaataaggacaagggataaatgactagtagtacaatagtgattattactgatactagcatgatctcggctcactgaaacctccacc

SEQ ID NO: 27095 - DNA, 1305 bp, Homo sapiens
tttattacttcaatactgggtgggtgaagcagacttttggcagtgaatgagacaaaacattgaactcaagttacattaaatgtggctacaggcaactgcaattacactgagttcctggatgcctcatgaattatctctaatagccatacactgaatctccaattaaaactgatgtcaggccaggcacagtggctcatgcctgtaatcccagcacatcgggaggctgaggcgggtggatcacaaggtcaggaggtcaagaccastctggccaagatggtgaaacctgtctctactaaaaacagaaaaattagccaggcgtggtggcaggtgcctgtaatcccagctactcaggagactgaggcaggagaattgcttgaacctgggaggcagaggttgcaatgagccaagattgcatcattgcactccagcctgggtgacagagaaagactccatctggaaaaaaaaaaaagatgtcataaagttaaattatattttttaaaaatacttaccaatatatggtctgaattgacatattttagaatttctttttttatttgtaaacagttttataaagaaatttcccccaatgattaggaccagaaagtatatttgttatgacagaaggggttggtcattattttactgagaaaaagagaatttagaacaaaagggacaacagcaacaaaaagatgagtatacaattttgatatgatatccaggaaacttatgggtctacatttcttttcctctttctctctctcttttttttttttttggtgtgagaatacattgagcgatgtggcattagagaatggatttaagtttaaaaacagggacacatcaggaaacacaagtcagaataattctcattcatttcaaagcaaacacatattcaccaggagcttcatatagtgtgagggagctactctagggggtgagcagatctccactggagaaagtcctggtgacctctcccactgtggttcaagtgccccctgtgagacacagcaaagtgatgatgagggtcccccacattcagttatacatagcacatcaaattcacagtgtgatttcaggacaaaaggtgtcatagtcatacctaagcaatgacctgagaaataagatcacttaattatgtaactatatagtatataatactgtattataaatggaattctcagaactatttcccagaaattccaaaccacaataccagactgctgaatgtcagtgattcttatacttcagcttttaaggtgtttttggggggtgggggtgtcgggggcagtgaggggtagtggggta

SEQ ID NO: 27096 - DNA, 1305 bp, Homo sapiens
tttattacttcaatactgggtgggtgaagcagacttttggcagtgaatgagacaaaacattgaactcaagttacattaaatgtggctacaggcaactgcaattacactgagttcctggatgcctcatgaattatctctaatagccatacactgaatctccaattaaaactgatgtcaggccaggcacagtggctcatgcctgtaatcccagcacatcgggaggctgaggcgggtggatcacaaggtcaggaggtcaagaccactctggccaagatggtgaaacctgtctctactaaaaacagaaaaattagccaggcgtggtggcaggtgcctgtaatcccagctactcaggagactgaggcaggagaattgcttkaacctgggaggcagaggttgcaatgagccaagattgcatcattgcactccagcctgggtgacagagaaagactccatctggaaaaaaaaaaaagatgtcataaagttaaattatattttttaaaaatacttaccaatatatggtctgaattgacatattttagaatttctttttttatttgtaaacagttttataaagaaatttcccccaatgattaggaccagaaagtatatttgttatgacagaaggggttggtcattattttactgagaaaaagagaatttagaacaaaagggacaacagcaacaaaaagatgagtatacaattttgatatgatatccaggaaacttatgggtctacatttcttttcctctttctctctctcttttttttttttttggtgtgagaatacattgagcgatgtggcattagagaatggatttaagtttaaaaacagggacacatcaggaaacacaagtcagaataattctcattcatttcaaagcaaacacatattcaccaggagcttcatatagtgtgagggagctactctagggggtgagcagatctccactggagaaagtcctggtgacctctcccactgtggttcaagtgccccctgtgagacacagcaaagtgatgatgagggtcccccacattcagttatacatagcacatcaaattcacagtgtgatttcaggacaaaaggtgtcatagtcatacctaagcaatgacctgagaaataagatcacttaattatgtaactatatagtatataatactgtattataaatggaattctcagaactatttcccagaaattccaaaccacaataccagactgctgaatgtcagtgattcttatacttcagcttttaaggtgtttttggggggtgggggtgtcgggggcagtgaggggtagtggggta

SEQ ID NO: 27097 - DNA, 1281 bp, Homo sapiens
tatatcttttaatcatcacaatattggtataagttgattattttcctcatttttatattgagaacttggactccgataatttaatggaactgctcaacgttgtcagtgagtgttgaaacaagaattcaacaaatgctggggttcctcagacatctgctcttagctttctgtgtaaacataacattttatccaaaggaagatatcaaacaaacatcgttacaaatagatcagtataatccttaaaattgacaatatayccatattttaaagcacaatattttctcttttaccatatcttaataattatatttttattatttaccaaatatactatgatttaaaacatcaaacagtatttatggggattcttctgtgttgtcaatttctactcttcatttccactccacagagggaaagacttttaacagtgttagctcttttgtacggttatataaataatatgcttcaatattttctcacattatcttcccaatgtggatatgtcataatatttaattatgtaaatatttcatttttacttaattatgcctatgtacatatttttcagtgttgtgccaagtagtgtactatgacaccattttctttctgcacacttgtttccctatttacttcaagtttttatttctctggtgtttcatattgctatttataattcttccaaatttcctatcagaatgcaatttcccacatagtgaagcacatcaggtgatatatcaattccaatttattttctttcctgcagtcattcctcttggcaccctctcttcttctgcccctatttgtactctagttccctgggccagcagcacagctggctcttctttctgatcttctttggatcatttttctccttcattttgctagaatgtggcttccagaaaagtactggtaatgatttgcatagatggcacatttttgtaagcttgaaaatgcttttattttaccttcatttttatttgaggtttgaactgaataaagaattccaattgaaaattatttttctttataattttgaaacattgtacttttgacttctaacttgtggtgttgctgttcagaaattcaatgccatatcaacaattattgttcaaaatatatttgtcattttttcttcttattagcatccttattttatattcactcttcagggagctcatgaaacacgttttgagataccatgcttcaaaaatatttttacatttgtcatgatcaggagctagtgagcaaagtttacgacaagcagaattaaagatatgcttc

SEQ ID NO: 27098 - DNA, 571 bp, Homo sapiens
actgatctcctctgctgtgtaccaggcagagtgctggattcttcccttacatgtcctggaatccttagaatggacacaaatctccattttcagactaagatgccgaagctctgtggcaatacttggatccaaatccaggtctgtgctcctgcaatggaatcctagtaccaaaacacaaataactgaggcagagagatcaagcctgtctgagctctgggatcaacctaccatctaatccttcatttctctgcaagcatcctacatgctgagcaaataagatactccccttcttttggacaaactcatgtttcccatccctgggcttttgtccacactggtttcttcctggaatgcccttctcccgtctcaacctgcaaaaatatcctacctgcctatctcccttccctcctgatgctgaagctcttctagcacagctgagtttgatatcactctttctcctttgaaccccaatggcattgggtttctctgttgtatcaatctgtgtgcttttccaatgcgtttcacgtggcagcayacatttggatggcaggaaccaagtcatcttgtgtcc

SEQ ID NO: 27099 - DNA, 581 bp, Homo sapiens
gcccctgctctggcagggacaagtgcctactgttggcaatctacatttccattattcctaagcactagcactttctggaaagcagacatctccctgaatggagggacccagagtttcaggcctccatccccttatgaccccagacctggagacatgttcttcatcttcatctggaatgtcttcactgatccttgaggtcctcagacagaaaggggcttattccttcaacactcccctccctccccttttaaaagccagaacttgattatctctaatggtattcacacttataacattcaaaaaatcaatctcattgactacactgggagccttttcttatrtaacatcttacttccctttaaaaaaaaacacacacttcatatcaccttcacccaatacttttcatacatcatagacagagtgaatccccaaaatagctctattattcctctctctaaagtagagaagtagctgagaattcattttaaagaggacagttgattacatttatataataactattaccctttgtcctgccactttgccaaagggcttcatctaaacttcagtttagaaagctc

SEQ ID NO: 27100 - DNA, 618 bp, Homo sapiens
attcatttacttgcatagattgtataggaattacatagattgtttagaaaggatgtgacagagaacatatttgaaggcaagcattctggctccagaaactttgcttttgattgctatccaaggttggagccctaataaaggatgggagaagtagacaatgcagtctactttcatatacccagtgctttagtaaaactggattagaagttcttcctgtacacattttgtaatttctcaactctataccttgagtcatacatttctctttgctcaaaatgcctttccttccaaatacyttatatgcttctctttatataccctcctcccaattaaaaaaatagccagtattagaagcttttctaagatacttagtaggaattaattgctcctttctctgaactcctgaggcattttgttttcctatttagtggtacttactattctctactttttatttattgaatcttctccattaagttgtaaattacttgaaaacagaggcatttacttctgtatccttttaaattccagatttaggctgtgctcatggtacgtgcctacaagtttgtttaataaccattgctgatagacattttcaaattgcatgtcattttcttg

SEQ ID NO: 27101 - DNA, 544 bp, Homo sapiens
ctgggtgacaaaagtgaaactctgtctcaaaaataaatagatagatagatagatagatagataaaaacaaaaacttgcaggaaagaaactaatacacagttgytcttaaaattatcctaatagttttctgccatgcagccatttaaattgtatataatctttaaaaatctgcagtgctacaaggcccatgtctatagtcatgctactcagcaggctgaacagtgatcatttgagtccagcctaggcaacatagcaagaccccatctctttaaaaaaaatcttacagtgcttacctataataatgggcatgattactttaaaaataagacattcttaaaaatctcaaatctgcatttgagaactttacacctaaaatgcattcctctctaatggcatatgatctgtagtgattacatggattaatttacacggagagggagtatctctttggtgaaactatctttcagaaccaatattagaacatgtggtttaatgaaggatttttacccttatcagaaacaagggaaaatctcagaaacatttt

SEQ ID NO: 27102 - DNA, 1456 bp, Homo sapiens
  misc_feature (1)...(1456): n = A,T,C or G
agtttagtctcactaatgaactgctaagaaatcttggataacatatctagaataatactctctctttccaatatggtatggatccttctgtgtcctgkgttgttggtctcatccatatatccttaagtgtctggtcagcatgactgtcaaaggtttactttgggatctacagagaattcttagtctttgatcattaacgtgaggactggcccaccaaaactgaagctctgactgacttgagtgtactctcagcacctttcactttgctgcctgtattctctgcatatgtgatagaaaatataattttaaagtctgtgtggaaaaaagtatttctactggaaatccaaactgaaatttgatccttccttttttcagttcataatattttctttgtaagatcacgtaccatttcctggctccagaagctggaggaggtgactgttacagcttagtcattttgtcagaggcgtttgaaccagagtaactccatcttgaataggggctgggcaaaatgaggctgagacctactgggctgcattcccagacagtaaaggcattctaagtcacaggatgaaatagtaggtcggcacaagatacagaccataaagacctcactgataaaatgggttgcaataaagaagccagctaaaccccaccaaaaccaagatgaccatgagagtgacctcaggtggccctcactgctacactcccaccagcgctctgacagtttacaaatgccatggcaacattgggaagttaccctatatggtctaaaaaggggaggcattaataatccacaccttgtttagcatatcattaagaaaaccataaaaatgggcaaccagcagccctntgggctgctctaaggagtagccattctttattcctttactttcttaataaacttgctttcactttactctgtggactcaccctgaattctttcttgcacaagatccaagaactcttggggtctggattggtaccccttttctgtaacatcttcatgccagctataacgtgaataacacaatgcaagacagtggataagcaaactgtgattatcttcaaataatatcagcttttatcactcactaatgaatatgcccaaaacacacccaaaatgacagggtagaagaaccaaaattgggggcttggtaccctttagtatcttttagtcaacgtgatctatgaaggttacactagaataagtaagagctcatttaccgattttgatcttttttcttcttttgttttaatgaagttccatttgcattatgtcatccctgtatcagttcaatttggcctggacaaaggacattgtatacccttaggatgggttggccaggaggaccagattctggcaaggtagtacacttgacagagactactaaagaacatgcaacctggggcacagagtggagtggaaccttggcagtagaagtattagggacaa

SEQ ID NO: 27103 - DNA, 3229 bp, Homo sapiens
gatcctgcatttttctgagtgagctggctgagaaccgattttgatttctgttcagtacattgttatcacttaattctcattggtgagccaattttctttgcctttgttcttcaaagcgaggccgcatctgcggctgtcttgcatttcttgtggctgccttcttcagtccctgctataatcagctcaactctgtgcttgctgggtcagttctccatatttccctgaataatctgggtcagccctcagaggagtggtgggggttcccaccactgccccattgggaagattaataggacttttgcagtgtcaccatggcactctcaggacctccccttccctgttgcccagtgccatcccaggtaccttagccagatcctggacctcctcctccaaacatgcatcaggtcctgtcctggcccagagaatgggactagagacgccgtgcagaccctgtctccgtccaggcttctgctggttcctctccgaactagatcctgtggcatcttcacaccataaccagggcattgatacaggggccatagaagtctccctgccctttgggaccaaaacctccctgtaggcaaaatcctgaagccaggctattctttaggaaagctcagtcagcacaaaaagttgtctccatccccaggagcaattgcaaggctggaggagtcagcattcccatgtgactgaagggtggggcgggtggggtggaagatggagagcaactgaccccctcactggaccctgaggaagatgcccttgcagggaggtggcagctgatatttcctggtccaaacactggcttccacttagttactagaatcaaagtctttttgcaagctggactttgagctataatagtggatgggatccattttaactaaaaccccctttcagagtcatgatgtaacagcagcaacagttacagagcacttatacatgccagacaccattctaagcacgttacgtgtatcagttctttccattcttaccacggcctgtgaagttgataccattattatctctacagagaaatgaattaaggcacagagagattaagaaccaaggtcttaatgtccaaggtcttgtgtccaaggtcacacagctaagaagtagcagaacgtaaactggaacctggccagtgtgctcaagtatcactgttgtactatatgcctctcaagatgttcgtgtttttgctcccctactctttaggcctaagctaccgtgaagtttgatcccagagtttcaaaaggccgagcaactcacaaacacctctgtctccagcaggagcctagagtgataattttgacaagtttgggcttgaggtttcagaagggagtggaattattttgcatgttgacgaatttggtcgagactcaagcactatatcagggaaagctgcattctgaaggactttgcgtgataaaagtaagttctcaaggctttaactggtccttttgtctggagcagtctttagaagcctttgaatatgtttttaaccgaagagagaaaagaggctccgttctttcctcaggaattcacagggaccgtcctttctgtgcagacatgacagatcgatgcttaccaggagcaaagtgtgattcccatctcagggcagctgggggttagaatcactatcatgtttcgatttcccacatcccttcatcaggtggtgtgagcagctgtgccgctgagcaggtggagttcagatgtggagtccacctccccatcctgcattcctctagcttttgccattgctcacttctttagaggacggttaggcgcagtgacgttttgtccctttcacattgacaccgtcctggttcagggggcagccatgttcccataggctccgcggattctgtggtgcaggacgggagacgtctgctctgggcctaagccagcagcgggggatggtgccacctccccctggctgcccacctcccaggccactgcctgccacttggtcccaggagaagagaggcagttcttattcaggatcctcattgctgttttggaactttggaagaaaaggcttctagctacccaaaaccatgcaaatggataaatttttacaagagttgtttttcttccagaagyaattacctggttgtagcttcagtcccttgcccccatcagcacagaaattagtcatgagactatagtcatttagccacttaagtttcatatcaactttctgctcaccaacttttttatagcagtccctgaccaggcttcattactgtgtagcccagcccgtgtgaaatcttggcagaaatgtcttacctgcagtgattctgattgcttggaggggaatagtctgactaccaccaaaatctttttcttttcctgtataagatgaccagcatcagaccccgtggcaccagcatggacagagttgtacaaaagatgttcattaagaactggattggccgggcgcggtggctcacgcctgtaatcccagcactttgggaggccaaggtgggtggatcacgaggtcagagatcgagaccatcctggctaacatggtgaaaccctgtctctactaaaaatacaaaaaattagccgggcgtggtggcgggtgcctgtagtcccagctactcgggaggctgaggcaggagaatggcgtgaacccgggaggcggagcttgcagtgagtggagatagcgccgctgcactccagcctgggcaaaagagcgagactccatctcaaaaaaaaaaaaaggaactggattgagagactcagtcattcattcaagaaatagttgttggccacctaccatgtgccaggcactgataggcgctggatataaaacaatgtgaaaggcagtcaaaaccattgcccaacatagggagcttgtagccatgggggcacagagacagatgatggccatctatacaaatgcgtaaaataattatatattgtgattagagataaggcatttctatatagagtgctatcatagaggattacaggataggaaccctctggaaagcctctctaaggaagccaaccgtgggaagagccggggagggatgttttaggcagagggaacaggggaagagcttgatggagtccaggacttggcccaaaggccaggatgatcagggaaggggagagacaggggtcaggtcctgcaggatttagggggccacaggaagaaacccttttattctaaatgcactgggaagccattgagggctcgacgtctgattatgtgtttaaa

SEQ ID NO: 27104 - DNA, 512 bp, Homo sapiens
agacattagtccacggggaccctcaaactacgtatactgccaatgggagtctaaattggtacmttgatgcaatcaacccagagagcaatttggtaatagctaacaaagttgcagatttcgcagcaaattcacttttgggaatctgcttggtgaatccattgcacatgatgttcattgctgctctgtaaggccgttaaagtagaaataacctctctcactaaggaatgtaaaaacaaatatgggtcagtcatacaatgagcagtgaaaattatctagcgattgaccaaatggataaatcttgagagtataattttgagagaggagaaaggtgcacaatgagaggtacaactatgattccattccatgatatgtctaaacatgcaaaagaaaatattatttatgggtatgcatataaggacatgcatggacatgatatacaacattctcagcacagtgattgccactggggagggagacagaatgagatggaggaggtacgcaggggcttctgc

SEQ ID NO: 27105 - DNA, 958 bp, Homo sapiens
tatttgttagaaataaaacattttataatcgcattacgcagcacttttctaagcatgttactcagaagtaatgtcccacagattttaatatgttttactgaaaaagaaaattctgtggtttaataattgaaatagtctggattaaacgcagttaatagatttgttttgggcaggacttctgggagattttaatatgccaatatgcattgtgaaatttcaataagggaatattattgagtactgtatttccctaatttgatcagaaattttcttccaagatgattttacaggattaacattcctcgggytttttatttggaaaatgctggcataaagacattgtgatgacttaacagtaaatacagtcgatgtggtaagaactttggactcttttttcatgaactattaaaatttatgactaggctgagtgtggtggcttgcacctgtaattccaacactttggaaggctgaggtgggaggattgcttgagcccaggagttcaaggccagcctgggcaacatggggacaccctgtctctacaaaaaaacaacaatatgacttacgattagacaatataatcttcatctaaattcaagcattggagcaaattgcaaattttagaaagactttaaaaatgtgttcactaaattagtaactgattgctctccagtgaatgttttgcatgggatcttttttctttttttaattaatagacttcttttttttttctttcagcagttttaggcttacagaagaaatgagtagaaaagtaaaaagaattcttttatctcctttaccccttccccgatttcctctatttattaacaccttgcattttgtagtacatttgttataattgatgaaccaatatagatacattattattaactaaagctcacagactacattagagttcactctgtgttatacattctacagctttggacaaatatataat

SEQ ID NO: 27106 - DNA, 958 bp, Homo sapiens
tatttgttagaaataaaacattttataatcgcattacgcagcacttttctaagcatgttactcagaagtaatgtcccacagattttaatatgttttactgaaaaagaaaattctgtggtttaataattgaaatagtctggattaaacgcagttaatagatttgttttgggcaggacttctgggagattttaatatgccaatatgcattgtgaaatttcaataagggaatattattgagtactgtatttccctaatttgatcagaaattttcttccaagatgattttacaggattaacattcctcgggttttttatttggaaaatgctggcataaagacattgtgatgacttaacagtaaatacagtcgatgtggtaagaactttggactcttttttcatgaactattaaaatttatgactaggctgagtgtggtggcttgcacctgtaattccaacactttggaaggctgaggtgggaggattgcttgagcccaggagttcaagrccagcctgggcaacatggggacaccctgtctctacaaaaaaacaacaatatgacttacgattagacaatataatcttcatctaaattcaagcattggagcaaattgcaaattttagaaagactttaaaaatgtgttcactaaattagtaactgattgctctccagtgaatgttttgcatgggatcttttttctttttttaattaatagacttcttttttttttctttcagcagttttaggcttacagaagaaatgagtagaaaagtaaaaagaattcttttatctcctttaccccttccccgatttcctctatttattaacaccttgcattttgtagtacatttgttataattgatgaaccaatatagatacattattattaactaaagctcacagactacattagagttcactctgtgttatacattctacagctttggacaaatatataat

SEQ ID NO: 27107 - DNA, 1103 bp, Homo sapiens
atccttttctcctactaagtggtaaagttgggccatccaggatgatgttcttgcaaaaaatcctaaagaaaacttagaagtaaaggaggaaggtacacaatagatgaaacttcccagcaatgtaaaaaaagacatcatcctttcagcaggcacatatattgagttaataacaaaactaacatcttaaaattgtacagtgctatctgttttccaaggcacttttcacagatgtaatcttactcaatcgtttcaaaaacactgtgaaggagagactaagtgatctgcccaaaaccacaaagtggctggcactgtctcaagcccaattcccacttattcttttccctaccttcgagccttcaaattatgtagctatcacaaagtcatgcgtccagtagataagaactatatattaagggcccagatgaaaatgttaattttgaactattctcatattgtttcctctcttatgccaagaaaacttatgtgtttctccgtttggttggcaattaaacttcttacaacttcagagtagtgaaagaagaattgaccatcctgtgcaatgaaacaaaacaggacttgtctttctatttttragaagaatgaggcttatgtaaataagaaattttgagatctggggggaaaaaaaggcatgtatttatcccatacgacttgtcctcccatgatcctcaactctgcactgagcttcattgctagagtgaatcatggctcaaaattacaggaaatcccaactacaagaagtgaaatgtgctcaacaaacatatgtgtaagtatatttgtatctgtgtgaatatgcaacatacagcactaagttctaatactgagaaggctgtgcttttatgcagagcagaaaaaaataaacaactatagatagttgtatattaactgtttaaagtcaaatggaggtgaactataaaaatagaatgtttaagtacttgaaaaaataaaaccaggtgtaagttttaatgctttgagattgacttgacttctactcttctcacgttatgggacaaaaacaattgatacctttgggcaaagtgttataaaaatggtatactagtttttgagaactggattctaggccc

SEQ ID NO: 27108 - DNA, 1103 bp, Homo sapiens
atccttttctcctactaagtggtaaagttgggccatccaggatgatgttcttgcaaaaaatcctaaagaaaacttagaagtaaaggaggaaggtacacaatagatgaaacttcccagcaatgtaaaaaaagacatcatcctttcagcaggcacatatattgagttaataacaaaactaacatcttaaaattgtacagtgctatctgttttccaaggcacttttcacagatgtaatcttactcaatcgtttcaaaaacactgtgaaggagagactaagtgatctgcccaaaaccacaaagtggctggcactgtctcaagcccaattcccacttattcttttccctaccttcgagccttcaaattatgtagctatcacaaagtcatgcgtccagtagataagaactatatattaagggcccagatgaaaatgttaattttgaactattctcatattgtttcctctcttatgccaagaaaacttatgtgtttctccgtttggttggcaattaaacttcttacaacttcagagtagtgaaagaagaattgaccatcctgtgcaatgaaacaaaacaggacttgtctttctatttttaagaagaatgaggcttatgtaaataagaaattttgagatctggggggaaaaaaaggcatgtatttatcccatacgacttgtcctcccatgatcctcaactctgcactgagcttcattgctagagtgaatcatggctcaaaattacaggaaatcccaactacaagaagtgaaatgtgctcaacaaacatatgtgtaagtatatttgtatctgtgtgaatatgcaacatacagcactaagttctaatactgagaaggctgtgcttttatgcagagcagaaaaaaataaacaactatagatagttgtatattaactgtttaaagtcaaatggaggtgaactataaaaatagaatgtttaagtacttgaaaaaataaaaccaggtgtaagttttaatgctttgagattgacttgacttctactcttctcacrttatgggacaaaaacaattgatacctttgggcaaagtgttataaaaatggtatactagtttttgagaactggattctaggccc

SEQ ID NO: 27109 - DNA, 575 bp, Homo sapiens
ctttaagttctgggatacatgtatcccagaatgaaagaggaaaagtattttaatcagaaagccatggtagcatggagcaggtacaggtgactagggaactttaaaattttggtacaaatagagcacaaatgtatggggggaaaatggcaagatataaagctggagaaataggaaactgacattactgaaagccagactaaggtgtttggtttttgccctacgagaatctatcaaaagtattaagcaaaggcgagacatggttaaatttgtaagagtggttacattggcttgaagtgtgaagaataaattggagggaaatacccatgagtaaattattctaattacatgggcaagagaatawgaagtctagaagtaaggcagtaacagtagcaatggagggaagaagacaagttgaagatatattctaaatattggtgaataattagatgtggaaagatgaatgaaaaagagttttctaagaatccaataggcctgtcttgagtggttaatatgattaaatattttattaatatttactgaatgcctatactatacaaaacacaaaactacaaaga

SEQ ID NO: 27110 - DNA, 679 bp, Homo sapiens
acttgtgttttgaacatatgcaatttgctttttttttccccctgggaagaaatgtcccagaggctctacttagatccagagctaagagcaataagtaaagtattccccattcccatcagacacattgtctctctgtttccttcccactaaaaccccttatatgcctcctaatctgttacatcaataacactacacagaaaggaggagaggcccaragatgtttttctctactcaggagggagctggacaattcaggggaattagaataaaaataaataaatgttggtgcaactcatatgtagtgactgtcagagcattggcttccatgtcaagagtgggctcctgtcctgtagctgagatggaagacagagacattggaagagacctgtacaattctgattctccttcagtaacagaaaagcagattttttttttcatattcacaggaacccaaaggctgagagcaatctcatgaatacggaattgctacagatacatggctcctccttcccaggcaagttcttaatgctaattcttgattactctggccatttattaacttatttcatctgcaagtatttattacttgcttgctatgtaacaccacttttgctaagttctggttaaaataatgtattctcctcccatattctgactacctttctttaggtaagaaata

SEQ ID NO: 27111 - DNA, 679 bp, Homo sapiens
acttgtgttttgaacatatgcaatttgctttttttttccccctgggaagaaatgtcccagaggctctacttagatccagagctaagagcaataagtaaagtattccccattcccatcagacacattgtctctctgtttccttcccactaaaaccccttatatgcctcctaatctgttacatcaataacactacacagaaaggaggagaggcccaaagatgtttttctctactcaggagggagctggacaattcaggggaattagaataaaaataaataaatgttggtgcaactcatatgtagtgactgtcagagcattggcttccatgtcaagagtgggctcctgtcctgtagctgagatggaagacagagacattggaagagacctgtacaattctgattctccttcagtaacagaaaagcagatttttttttycatattcacaggaacccaaaggctgagagcaatctcatgaatacggaattgctacagatacatggctcctccttcccaggcaagttcttaatgctaattcttgattactctggccatttattaacttatttcatctgcaagtatttattacttgcttgctatgtaacaccacttttgctaagttctggttaaaataatgtattctcctcccatattctgactacctttctttaggtaagaaata

SEQ ID NO: 27112 - DNA, 1047 bp, Homo sapiens
ctcttatactgccatgctaagatagagtctactttgcttatttgactcatttgaagtagggctaaaacaaaccttcaaattaggcaggatatcaaggttcaatcttatcctgaagatatttcttggatgagattccatgtgtgacctgttatytgtatcactgctattggcttaatcctgccattcaaaatagcttcctggataatcggcactaagagaaagaatagctcccttaatgcagctaccaccctactccacaaggcagggactctgaccatggtgctgacagatttttcaagtgaagctcattttattcacataccaaagacaggcacaagatgatcaggataggggaagaaaatattagaactcagagacacaaacaccagtgatgctggttctacttaatgaaactgactattaagactatcaaaatgatgacaagacagtgctcacatgcaggggatttaaggtctgcaacaaaagtccagaaagtagattagttatgctactaacacatggttatcattttctaagtcacgcagttatacttcttcaccagtaactcccagcatcctctttatttatagactcaatttgagatgctcagaatgcaacacagttgggaaggaaagtggatgaaaaatggcacagtgcaacctagaccatgtagttaccttaagaagattaagtgtgagcaggtatggaaaaaaaaaagcccatggaaagtacagacatttaaatactatgaaagactacatttgaatctctaaaacagccagaaaaacatactggtggaataagacaatcagttcaggagttgtagaagatgaaagtctgtgaggcactgaaaagtagatctaaaagctgaagatccagaggtctggttcacaccagaccccagtaaaaggggacaatgtgggagtaccaactacaaagaaggtgctcctatagatggaatcctataattagaaatagtatcaaagacacttggtcaggtaattgaaatacccgagtctcaggaaagattgagtggaagggaggatc

SEQ ID NO: 27113 - DNA, 530 bp, Homo sapiens
cttagaaacaacacttcacaaatcatattttttaacagtcttccatcyacatactaattatttttgatattaagtacttcaactattcttggtttccacttaatgatttggttaatacctatagctttttggaagcaaaatttttattttaaaagataaattgtttgtaaccaggacatttttaaaaattacatttgaaaaatatatcaacaacccagtgatattgaagctttttcttctgctggtaaatcatctttcacaatcatggtgtcatgctgctcagtcagccctttgtacaataaagatggcctctttgttctcagagttattctttatggcgcaagggtactggactgcatcgtatgtgaaggccctccagcgtcaaggcttagatagcattcagcagccttaaaacatcctgcctcctgtgggaacagagaatggcttgcattctctccaattctttatgctcctaacctcaggtcgtagaatgattcacttaagatgtcagatcctttacccaaacttaa

SEQ ID NO: 27114 - DNA, 634 bp, Homo sapiens
ttttaaatttgcataaatattttaagtagtgatgcttagtttcggcattcatttcatatgctgtttcatgttgtccacatgaaggtaagtcagattgttacatatcaaaatatgagggcacagaatggtgtgtctgctgctggatagacacgggtgagttgctggctgctgtcaatagaatcacaagagaaaggacagttgttatagtgtctttgcacagacagkgtgtggcgctcacctgaatggagattggattttatgaggcactgacgtggctcctgacgctaagtcagatgtctcaccccagcctcgatgacctctctccctcgtcatgctcctgcctctccctgcaggaactccagcctcttctgtaatatctagcccagatcttccttctggttatgacttcctcaatgtcctgatttcccacatgaaatgtcacaaagcattttttctgatttttctaatataatatctttccataaaacaatgaatacctccaggtctaaatggggctgtgtggctgtgtgatacagtagcccctagccatatgtggctatttaaatgtaaatttatcaatattaaacaaattttaaaatttaattcctagtcacagtatcacatttcaagtgct

SEQ ID NO: 27115 - DNA, 634 bp, Homo sapiens
ttttaaatttgcataaatattttaagtagtgatgcttagtttcggcattcatttcatatgctgtttcatgttgtccacatgaaggtaagtcagattgttacatatcaaaatatgagggcacagaatggtgtgtctgctgctggatagacacgggtgagttgctggctgctgtcaatagaatcacaagagaaaggacagttgttatagtgtctttgcacagacagtgtgtggcgctcacctgaatggagattggattttatgaggcactgacgtggctcctgacgstaagtcagatgtctcaccccagcctcgatgacctctctccctcgtcatgctcctgcctctccctgcaggaactccagcctcttctgtaatatctagcccagatcttccttctggttatgacttcctcaatgtcctgatttcccacatgaaatgtcacaaagcattttttctgatttttctaatataatatctttccataaaacaatgaatacctccaggtctaaatggggctgtgtggctgtgtgatacagtagcccctagccatatgtggctatttaaatgtaaatttatcaatattaaacaaattttaaaatttaattcctagtcacagtatcacatttcaagtgct

SEQ ID NO: 27116 - DNA, 532 bp, Homo sapiens
aagtaggaaaacacaattataaagaaaaaatagtttgaagttttagtgagccttcaaaccttgccagcaaatattcctagccatatataaactcgtataactcccaaaactgacatttaggctaccattttcccagcactttttacaaggtccttaattatgctttgaaattttactttacaaactattactttttaatgagagagctcattattttccattggcagtacttcattgccaagagctaccatttcataggaggtggacaggctttaatttcagcagcagcacaagsctccactatgtttttctgttcatattggcccaaattctctgtcctttccccctgctgccaaaataaacatttctccccaataggcatacactctcaacccttggaactcaaagcagctatcgggagcctacaaattaacctgttcggcctccactaacagatgccacgctggcgctgggcacttcagccaaactcatgggatttataacattaagagtaagtgcaaaaactacaagc

SEQ ID NO: 27117 - DNA, 1191 bp, Homo sapiens
attaagtgtttttttttttttttcagcacttggcaggaggtaggcaagtttgggccatagctttcaggccctgagtccaggcaaggaaagaactgaccccagagagccaatccagccctggtgcatcttgagtattctggaaatggcagatctaaaaggacaaaatcatttcatattcatcatgagtatagcttggtggttaagagtgcagactacggagccatcacgatgggttcagatcccagctcctctacttcctagtgataaaagaaaaaactcaaccaaattaaatttaaaggagtttaactgagcaatgaacaatttgtgaatcgggcagcacccagaatcacagcagattcacagagactccagtacagccacgtggtggaagatttatagacaaaaaaagggaaatgatgtacagaaatcaaaagtgaggtacacagcgggtggattggctacaggctggcgtttgtcttatttgaacacagtttgaacactcagtagtgtatgaatggttgaagtacggccgctgggattggccaagactcagctattgttacaggtgcatactcctaagttaggttttcaatcttgtgtacttataagcttggttgcagtttttccacaaagactgaaatatagaagcatggagtcattctcaggccatatwtacttcacttttatactagataggagaactcaagcaagttatctaacctctctagactcactgtcctcatctattaaagaacagtaacaacacctactttctaaggtgtgttctttcctactttctaaggtgtgtgtgaagaataaacaagccaacacctgtaaaccattcagaacaaggcctggcactaattaagtgctcagtaaatattagctataaattacgattattttctcttttgagtctcacaacagtattgtaaggtattattatccctattttgcagaggaagagactgagggtcacacaggttaaggagaggctcaagatcatttggacagaaagtggcagaggctgggcttgcatgggatcataggactctaatactgtttcacttaggatttcagagccccctttggtctccagatgaaatgattttacccttgtcatggagattcatattcattccttctccaaatgtgtcctaacttccccatgcagatggcaccaaatattta

SEQ ID NO: 27118 - DNA, 1010 bp, Homo sapiens
cactaaagctggaggcctctcatctcatccaatatcaccctcgtactagaaacgcaaaagggatgagtttgtctatggactcaaacctttacagtcttcttgcttagcagcttaaggcataattatggtagtcatggtggtaagggacttaacatttgcctttttccaatttaactgtgtcctttgttgaaatatttcttagtcaggtccccttttctctatttccactactgtcctaggattagatctgagtccccctctcaatgagattagtccagaaattgtgtataccatccatcttgcaaaccactgccagactctgttgacttttcattatgtaacttccctatgggagaggtgagttacataatatgatgctaagatgcccctcactggtggcatcatgtacatatttctcagtctgaaaggaaaggtctttttaaactggcttcaggccatctgtccaactaattcctgcctgcaactcctagtataccctctactacaaggtctcatcacttattctgttacccaccacattcattccgtcttgggctttggttcatgtgatccactcsatgtgctccttctctctaatccaaacaccacgcatctataaggtcagctcacgtcccatctccttgaccccagcccattcatatccctattctcttagcagctattgtcaggacgacacagttttcatgccagttattctttcatggttttattagttaattctccccaggtagattagaagctccttaactttggaccctgtcctaagcttctgttatattctctgcagtgcccagccaagcttatgtgtcatgcagtaaagaataaaataattttgaccctgatcaggtgtttggttacataaaaactgcattggcaactttctagaaactaatatattcatttatcttgcaaaaaggattgctatctgattatagccagtagtcatgatcttccagccatgcacaaatatacccttataactttcatga

SEQ ID NO: 27119 - DNA, 1010 bp, Homo sapiens
cactaaagctggaggcctctcatctcatccaatatcaccctcgtactagaaacgcaaaagggatgagtttgtctatggactcaaacctttacagtcttcttgcttagcagcttaaggcataattatggtagtcatggtggtaagggacttaacatttgcctttttccaatttaactgtgtcctttgttgaaatatttcttagtcaggtccccttttctctatttccactactgtcctaggattagatctgagtccccctctcaatgagattagtccagaaattgtgtataccatccatcttgcaaaccactgccagactctgttgacttttcattatgtaacttccctatgggagaggtgagttacataatatgatgctaagatgcccctcactggtggcatcatgtacatatttctcagtctgaaaggaaaggtctttttaaactggcttcaggccatctgtccaactaattcctgcctgcaactcctagtataccctctactacaaggtctcatcacttattctgttacccaccacattcattccgtcttgggctttggttcatgtgatccactcgatgtgctccttctctctaatccaaacaccaygcatctataaggtcagctcacgtcccatctccttgaccccagcccattcatatccctattctcttagcagctattgtcaggacgacacagttttcatgccagttattctttcatggttttattagttaattctccccaggtagattagaagctccttaactttggaccctgtcctaagcttctgttatattctctgcagtgcccagccaagcttatgtgtcatgcagtaaagaataaaataattttgaccctgatcaggtgtttggttacataaaaactgcattggcaactttctagaaactaatatattcatttatcttgcaaaaaggattgctatctgattatagccagtagtcatgatcttccagccatgcacaaatatacccttataactttcatga

SEQ ID NO: 27120 - DNA, 1010 bp, Homo sapiens
cactaaagctggaggcctctcatctcatccaatatcaccctcgtactagaaacgcaaaagggatgagtttgtctatggactcaaacctttacagtcttcttgcttagcagcttaaggcataattatggtagtcatggtggtaagggacttaacatttgcctttttccaatttaactgtgtcctttgttgaaatatttcttagtcaggtccccttttctctatttccactactgtcctaggattagatctgagtccccctctcaatgagattagtccagaaattgtgtataccatccatcttgcaaaccactgccagactctgttgacttttcattatgtaacttccctatgggagaggtgagttacataatatgatgctaagatgcccctcactggtggcatcatgtacatatttctcagtctgaaaggaaaggtctttttaaactggcttcaggccatctgtccaactaattcctgcctgcaactcctagtataccctctactacaaggtctcatcacttattctgttacccaccacattcattccgtcttgggctttggttcatgtgatccactcgatgtgctccttctctctaatccaaacaccacgcatctataaggtcagctcacgtcccatytccttgaccccagcccattcatatccctattctcttagcagctattgtcaggacgacacagttttcatgccagttattctttcatggttttattagttaattctccccaggtagattagaagctccttaactttggaccctgtcctaagcttctgttatattctctgcagtgcccagccaagcttatgtgtcatgcagtaaagaataaaataattttgaccctgatcaggtgtttggttacataaaaactgcattggcaactttctagaaactaatatattcatttatcttgcaaaaaggattgctatctgattatagccagtagtcatgatcttccagccatgcacaaatatacccttataactttcatga

SEQ ID NO: 27121 - DNA, 1010 bp, Homo sapiens
cactaaagctggaggcctctcatctcatccaatatcaccctcgtactagaaacgcaaaagggatgagtttgtctatggactcaaacctttacagtcttcttgcttagcagcttaaggcataattatggtagtcatggtggtaagggacttaacatttgcctttttccaatttaactgtgtcctttgttgaaatatttcttagtcaggtccccttttctctatttccactactgtcctaggattagatctgagtccccctctcaatgagattagtccagaaattgtgtataccatccatcttgcaaaccactgccagactctgttgacttttcattatgtaacttccctatgggagaggtgagttacataatatgatgctaagatgcccctcactggtggcatcatgtacatatttctcagtctgaaaggaaaggtctttttaaactggcttcaggccatctgtccaactaattcctgcctgcaactcctagtataccctctactacaaggtctcatcacttattctgttacccaccacattcattccgtcttgggctttggttcatgtgatccactcgatgtgctccttctctctaatccaaacaccacgcatctataaggtcagctcacgtcccatctccttgaccccagcccattcatatccctattctcttagcagctattgtcaggaygacacagttttcatgccagttattctttcatggttttattagttaattctccccaggtagattagaagctccttaactttggaccctgtcctaagcttctgttatattctctgcagtgcccagccaagcttatgtgtcatgcagtaaagaataaaataattttgaccctgatcaggtgtttggttacataaaaactgcattggcaactttctagaaactaatatattcatttatcttgcaaaaaggattgctatctgattatagccagtagtcatgatcttccagccatgcacaaatatacccttataactttcatga

SEQ ID NO: 27122 - DNA, 508 bp, Homo sapiens
taagatattaaaaaattaacatgaagccaataacaacatatgtgaaatgttcagtttattaataaagtaatgaagaaaattctatttgattgctgtgcatgtaccatatagttgaccagaatttacaatgcacgtatatagtttatacctgacagcatttratgggcttgggaagaccctataaaccaaaattatctttctcacacctgccaggtcatctgtaatatttcacatcaaatttatttcgttagagtaagacagacattgcccactgaagttgagtgtaaaaaaaaaaaaaattcttttctaggaaagttatgcatccaaacaactggtaaattatattagttttgtccaaacagccctatctcttagatgtggccaaagcctttaaagaacaagataaggcagataaaggttaatattaggcaaaggctgagatatgggagattgccccaagggactgactgctacaggagacattctgcagtggaccgcgctgaaatga

SEQ ID NO: 27123 - DNA, 755 bp, Homo sapiens
tcgtgtaagttatgagccataaatcattctactttctcactagctcagtattttatttacaagattccctcccccagttagcatgctggttcatgatctaccatccttcagtttctttcctcatatcactttccaaaagaggacttaaatgaccagcataagtctagccaatcaatgcctctctgtttgacttacctctaccctgtttattttaataccatcatccattgtcttcaatagaacatatcgagatgtctgctgtcactaaaaactctgaggacaaggatttcttcygctcactcccctctgcctttcctcactactggagccccagcaaatatgctgcttgtttttttgttttgttttgtttgagaccaagtctcactctttcacccaagctggaatgcagtggtgatatgttggctaactacaacctctgcctcctggttcaggcgattctcctgcttctcgagtagctggaattataggtggttccaccatacctggctaatttttgtattttcattttatgttatatatttgtgagatggagtctcattctattgcccaggctggagtgcagtggcgcaatctgggctcactgtaacctccgcctcccaggctgaagcgattcttgtgcctcagcctcccaagtagctagcattaaaggcacacaccaccatgcatggctaattttttgtagagatggggttttgccatgttggcctggctggtctcgaactcctgacctcagg

SEQ ID NO: 27124 - DNA, 1135 bp, Homo sapiens
cagagtaaggaagcatctgttagccaagtctttggttaccccaaattagctcaggtcctttactgcttgtttcctctgattatatagtacatatccaaaccctcaattttccagaataaactaggtctgcctattctgtgtggaaaacatttgatggtggttaagattctcttgcctagacgatggtagtgccttagtcgtttaactgcctgtcactttaagattttgaaatactggttctcgttgtgtaagccagacacatcttgagaatattttacggggcaacttgccctttctgaaacctcagtcatcctgaaaagtaactctgtacctccttgactttaatttttctgtcttaattctatttgtatacaatgtttgtggtgtctgattcyctgtctcgtattgctgaaactcatggccttgaatttctgggtcactcttaaaaaatagacataacttgattactaatgaaaaagtgactcattttcttccaggcaaaggctgacactgactgtcacagtttgtgacagaagcaaactctctaattaggagacatcacctattcttttctaaattttataagaattgatgatagcatcatgagatgggaagtgagtaagataagcgtttatgcttgtagagaggatgcataaaaatgaaatctggataaagttctatctgaatttaccattttaagtggttgattccctgtgagcttaaatttagtgcttctcttcccagaccgttgtcttacatacacacttcagtcagttttagccttgtataactaatcagcaggtcagattccatagaggctgaaatacctaccaccattctatgctcaagaaaacaggctctcatgttggccagttgtttgggatagaagatggttagacctttctatcccttttaaacacaagattctttttcattccccttatcttatttaaatatattgttccttctgtttggttgttctttgctttcttatgcatctgtgaggggctagctgaaagtgtgagttgtggaacaattcatttacataagtgtatattgaattatctgtgcacctagagggtgatgggcactgtgagggatattaaaaaagagacacagtacagttcttacccta

SEQ ID NO: 27125 - DNA, 1135 bp, Homo sapiens
cagagtaaggaagcatctgttagccaagtctttggttaccccaaattagctcaggtcctttactgcttgtttcctctgattatatagtacatatccaaaccctcaattttccagaataaactaggtctgcctattctgtgtggaaaacatttgatggtggttaagattctcttgcctagacgatggtagtgccttagtcgtttaactgcctgtcactttaagattttgaaatactggttctcgttgtgtaagccagacacatcttgagaatattttacggggcaacttgccctttctgaaacctcagtcatcctgaaaagtaactctgtacctccttgactttaatttttctgtcttaattctatttgtatacaatgtttgtggtgtctgattctctgtctcgtattgctgaaactcatggccttgaatttctgggtcactcttaaaaaatagacataacttgattactaatgaaaaagtgactcattttcttccaggcaaaggctgacactgactgtcacagtttgtgacagaagcaaactctctaattaggagacatcacctattcttttctaaattttataagaattgatgatagcatcatgagatgggaagtgagtaagataagcgtttatgcttgtagagaggatgcataaaaatgaaatctggataaagttctatctgaatttaccattttaagtggttgattccctgtgagcttaaatttagtgcttctcttcccagaccgttgtcttacatacacacttcagtcagttttagccttgtataactaatcagcaggtcagattccatagaggctgaaatacctaccaccattctatgctcaagaaaacaggctctcatgttggccagttgtttgggatagaagatggttagacctttctatcccttttaaacacaagattctttttcattccccttatcttrtttaaatatattgttccttctgtttggttgttctttgctttcttatgcatctgtgaggggctagctgaaagtgtgagttgtggaacaattcatttacataagtgtatattgaattatctgtgcacctagagggtgatgggcactgtgagggatattaaaaaagagacacagtacagttcttacccta

SEQ ID NO: 27126 - DNA, 1135 bp, Homo sapiens
cagagtaaggaagcatctgttagccaagtctttggttaccccaaattagctcaggtcctttactgcttgtttcctctgattatatagtacatatccaaaccctcaattttccagaataaactaggtctgcctattctgtgtggaaaacatttgatggtggttaagattctcttgcctagacgatggtagtgccttagtcgtttaactgcctgtcactttaagattttgaaatactggttctcgttgtgtaagccagacacatcttgagaatattttacggggcaacttgccctttctgaaacctcagtcatcctgaaaagtaactctgtacctccttgactttaatttttctgtcttaattctatttgtatacaatgtttgtggtgtctgattctctgtctcgtattgctgaaactcatggccttgaatttctgggtcactcttaaaaaatagacataacttgattactaatgaaaaagtgactcattttcttccaggcaaaggctgacactgactgtcacagtttgtgacagaagcaaactctctaattaggagacatcacctattcttttctaaattttataagaattgatgatagcatcatgagatgggaagtgagtaagataagcgtttatgcttgtagagaggatgcataaaaatgaaatctggataaagttctatctgaatttaccattttaagtggttgattccctgtgagcttaaatttagtgcttctcttcccagaccgttgtcttacatacacacttcagtcagttttagccttgtataactaatcagcaggtcagattccatagaggctgaaatacctaccaccattctatgctcaagaaaacaggctctcatgttggccagttgtttgggatagaagatggttagacctttctatcccttttaaacacaagattctttttcattccccttatcttayttaaatatattgttccttctgtttggttgttctttgctttcttatgcatctgtgaggggctagctgaaagtgtgagttgtggaacaattcatttacataagtgtatattgaattatctgtgcacctagagggtgatgggcactgtgagggatattaaaaaagagacacagtacagttcttacccta

SEQ ID NO: 27127 - DNA, 1219 bp, Homo sapiens
agactcctattgctgatagcgtcctgcaggattgggcttcaatgtgactaacctacaattgcctccaggtgctccacccactgagtccttgtgtctctgctgaggtccttggagagttactggagagggctctgtgtcagattaccttgaggaggctctgatttagccttttgtaaaatgcaaagagttgaggtcttctccacgcaagagctcgctgatgtcaatgaggtattgaggatggggccatctcctatttctgtggccagtactgagttttgttatccttcctttaggtaaggagtgccaatggacggatgcctgcctgtctcatccctgtgcaaatggaagtacctgtaccactgtggccaaccagttctcctgcaaatgcctcacaggcttcacagggcagaaatgtgagactgatgtcaatgagtgtgacattccaggacactgccagcatggtggcacctgcctcaacctgcctggttcctaccagtgccagtgccctcagggcttcacaggccagtactgtgacagcctgtatgtgccctgtgcaccctcaccttgtgtcaatggaggcacctgtcggcagactggtgacttcacttttgagtgcaactgccttccaggtaaggagctccctagtgtcccaggattaggggacaaacccctagcacaggaggtagtgggtgtggctcaattgctgtttttaggaagcccaaggaaaaagggaagtgagaattttgtgtggggtgggttgctagtgagggaggagttttatgggcccactgtggtccataaactgagcaggggataatttagcatgtcagggtttatgatgatgagtggctagaaaattgtttattgtcccttttgtagaaacagtgagaaataagaggaacagagctctgggaaagrgacaggcaagtctggaatggaaaagaacacgatgagaattagacactggaaaatatgtatgtgtggttaataaagtgctttaaactgaattgacattaacagtaggtgatcaactttcctatgtgcttgtgcttttgcttttgatggagtaattcattgttttcttatccacctaaatgcacccagctgcccttgattttctctgggctactggccttcacaaccctctcccatgtaccctctctgactttggggtaaccctcccctaacttaaagctagagaattctgaaactgaggagg

SEQ ID NO: 27128 - DNA, 592 bp, Homo sapiens
agagacagagaaataaagaacagctaaagacagatatagattagatagacataaccaaacacaacaaaaggtctatcacagtgttatggtattatcaaaacattatgatgataaaaataactttctgtaataatgttgaagatatgagtgctagaaggaggttcagagagaaaaatcaaagcattatagataatagtgggacaacacagtggcatatgtagggcagagtagagaaatatctgggagtgaagttggtaccagtttaaaaggacatggtcccattccctagaattcccatagaaaactgagacaaatgcttcaaatcaaggcagctggttaggaagggaagagagtaaaagacacacaacaacatgggcttcmtaaaggctccagtcatcattttcagtcagatcctagatgccatctgcaggtgagagtccagtgctggagttctagggctgcatcctcaggtccccattttcctgagacagttttctgaacgtgagggagggaggtagagaaattcagataacagacttacaacctcaggcatcagccaagtttcttctccagttacaacatgtgaacacaa

SEQ ID NO: 27129 - DNA, 629 bp, Homo sapiens
ttactgaaaaataatcactttacagaaaatctggaaaagagaaaaaggaaaaaattccataatacatctccctaatatacctttttccaaatattcttttgaatagtattttggtatctttccttaccttttccctaatattttaaaaagcattttattagtttttttctgctttataaaataatgtgctcattgagaaaactgaaaaaagcgaagagaataaaataaaatatccactgcacagataaccacttttacactttggcattttttttactcctcctaaacaattttttattgaggtaaaatatacatataatttaccatctttaccatttttaagtgtacagtgtttatgctttttttaagaaaagttcctgaagttcataccgcttcatattcttttttcacatttcctaataaatctcaaacccttttctacattaaatattcttctgttgtattatttctaagacttcataacattccattttacttaayaatttactgtaacttatttactatcccctattgttggatatttaggttttcccttttaaaaaccttataaacatccttgtaactacatcttcacaaacattcttgattattttctttggataaatttc

SEQ ID NO: 27130 - DNA, 1851 bp, Homo sapiens
tgtgaataatagattttatctatgtaggaatcacacttgatcatccataactaccatgctttccactcataaaatacccgtctcaattagtgaattagcatcccatcaagttgatgtcaaagatgtgaaaccttgagaatgttcattgcagctaatgaaaatatgtttagaaattgcttctgcaaatgaatcactagcaagaaattggcttattattgtagactgtatttggttctgaaaaatcaatcttcccttcagttctgtcatctactggctcatcagatatttaaagcatcaaatgagctgtctgcctttaaccattcttagaaattggggcattttcacagcttatcaagtgacattacagccattattataccgattaaaaacacagctactgcaaactaaatgatcattatacttccttaaatataatctttctgttcacgttttstcagcatcggttaaaaaaatagttgacattttctgaagggtggtacaattccagggaaaacatattaagcatcatgcattattccaaatgtctgtaagtgtttatattgtacattatgaaaaccttgatataaaatgccacaattcaaagaaaaagtgttaaaaatgtcagccctattctatcatttttggagaccaatttgcttttttttttggtaaggttgtaatgagcctggttcattttgcttcctaccatttatctttccagtagtaatggaaaatttcccccttaggcacagcgtgctattcttgtcttagacgattaggcagaaatgaaggagatcataaaggtgagagatttctccacaaacaatatgatgctcagtacggtaacctgcgcaatgtaggctgaggaattctaattggacccagggatgtggttttgcgatgtagcagggcatatagaaagcaaataaggtttgtatttctgattgcactggaaggtctgtggaaagacaaagctcaaatttcgcctcagcctttcttcaaatgctcagtaagctgccaaacaatacaatttaactcaagaatgtgaagtgatgatctaaaacatattgaaaagcagggatagaataactgtagggtattttatttaaaatagtagaaaaaaatttttttcagcaagttttctttgcaagaattagagtttgtgtttcagatgattttagaacaaagaagtttcactgctatgcctcctctggaagcaaagatgttaactgtgcttttgaaaacagacatggaaagaagatgtcaaagctgaaaggtactcctgcctcagccaccctctattaatggcaaggcatagaggccacataaattcactcagcctatttctttacctgcaaggagttacagattggtttgaataacataaaactgctatttcaccattttttacttaataaaatggcaaatagtttgttcacagtgtcgctgtaataatcaatgaagaaaaacaaacaaacaaacaactcagagagcacatagtgtggtacaatacattctgtctcctctttggtaccagacctcttgccaatataaggaattatctcatgatgatgtgtgtgactactttaatcaataagtaagcatagaattttgcatgttctacctgatttagttaatccttacagtatgaggtgggtcttataattatttccatgatgtgaaagagcaaactgagatctgatatattgggacctggactcaggaaggatacctggaaaaaccatggtttttgccagcactgtataaagtctcaaagaagtcaggaaactattttcaaaattattattataatagaacttcctgttatatgcctttttataagctcttatc

SEQ ID NO: 27131 - DNA, 1851 bp, Homo sapiens
tgtgaataatagattttatctatgtaggaatcacacttgatcatccataactaccatgctttccactcataaaatacccgtctcaattagtgaattagcatcccatcaagttgatgtcaaagatgtgaaaccttgagaatgttcattgcagctaatgaaaatatgtttagaaattgcttctgcaaatgaatcactagcaagaaattggcttattattgtagactgtatttggttctgaaaaatcaatcttcccttcagttctgtcatctactggctcatcagatatttaaagcatcaaatgagctgtctgcctttaaccattcttagaaattggggcattttcacagcttatcaagtgacattacagccattattataccgattaaaaacacagctactgcaaactaaatgatcattatacttccttaaatataatctttctgttcacgttttgtcagcatcggttaaaaaaatagttgacattttctgaagggtggtacaattccagggaaaacatattaagcatcatgcrttattccaaatgtctgtaagtgtttatattgtacattatgaaaaccttgatataaaatgccacaattcaaagaaaaagtgttaaaaatgtcagccctattctatcatttttggagaccaatttgcttttttttttggtaaggttgtaatgagcctggttcattttgcttcctaccatttatctttccagtagtaatggaaaatttcccccttaggcacagcgtgctattcttgtcttagacgattaggcagaaatgaaggagatcataaaggtgagagatttctccacaaacaatatgatgctcagtacggtaacctgcgcaatgtaggctgaggaattctaattggacccagggatgtggttttgcgatgtagcagggcatatagaaagcaaataaggtttgtatttctgattgcactggaaggtctgtggaaagacaaagctcaaatttcgcctcagcctttcttcaaatgctcagtaagctgccaaacaatacaatttaactcaagaatgtgaagtgatgatctaaaacatattgaaaagcagggatagaataactgtagggtattttatttaaaatagtagaaaaaaatttttttcagcaagttttctttgcaagaattagagtttgtgtttcagatgattttagaacaaagaagtttcactgctatgcctcctctggaagcaaagatgttaactgtgcttttgaaaacagacatggaaagaagatgtcaaagctgaaaggtactcctgcctcagccaccctctattaatggcaaggcatagaggccacataaattcactcagcctatttctttacctgcaaggagttacagattggtttgaataacataaaactgctatttcaccattttttacttaataaaatggcaaatagtttgttcacagtgtcgctgtaataatcaatgaagaaaaacaaacaaacaaacaactcagagagcacatagtgtggtacaatacattctgtctcctctttggtaccagacctcttgccaatataaggaattatctcatgatgatgtgtgtgactactttaatcaataagtaagcatagaattttgcatgttctacctgatttagttaatccttacagtatgaggtgggtcttataattatttccatgatgtgaaagagcaaactgagatctgatatattgggacctggactcaggaaggatacctggaaaaaccatggtttttgccagcactgtataaagtctcaaagaagtcaggaaactattttcaaaattattattataatagaacttcctgttatatgcctttttataagctcttatc

SEQ ID NO: 27132 - DNA, 531 bp, Homo sapiens
aaaaacactaaaacatttggaagagacaaggatgcttatggacacagctctgtgcatgtgaataagcacgaaaaaaatgccatctgtaggcaattaaaaagaagaaaaaatgtgatgttcaaatttagattcctaaatagcatatctctgtctcttctctcctacctctgtgctcagtcttgtcttcttggagacactactatttcccagtgtactgatgacttgggctacaaggaaatctcaaatcatcagcaaacaataaatatacagtggttttggaatgtttcttaagattaagctgagaaaatcacttgtgagatatttcagatttctgatctgtatgtgggaaaatcatattcaagtaccaagaatactgccatctaaatttttcaaaagagtactgaacaagaagtcaacccttggccargtgtggtggctgacacctgtaatcccagtattttggaaagctgagcttgaggcctcctagtctcaaaaccagcctgggcaacatagtgagaccctatctctaca

SEQ ID NO: 27133 - DNA, 591 bp, Homo sapiens
cacataatcatcatgcacactgtaaattcaagccccttttccagttaaactgaagggggaatgtagccacattacacataagaagggtgcagatattaaagcctttcctgttcaggtcttggggtagctcaagccacagatgccctggcaatctaatgagacccactcccttcagaaaaggcaactccatctctgctataacttcccatcacctaaactggctgctgatgtttccatgcatgcttcttaagayataaatcaaagcatgttttagcacaaagccccaaagtcctgggttctagccttggatcagcgaattgctagctgtgtgacctacagcgattcttttcacctctctaggcatgaactgctgcagctacaaaatgaaaagaatttattgtgtgtcctcaaagatctctttcagctctataatcctttgatcctaaacgaattctatagttagaagccctttttctgactattttaactatcaaaaatataaccatgaatcaaaaatagggtgcaaagaaaggaaagagaaagatccatgaaaagcataggtcaatattgcaaagtccacacgttaagctt

SEQ ID NO: 27134 - DNA, 591 bp, Homo sapiens
cacataatcatcatgcacactgtaaattcaagccccttttccagttaaactgaagggggaatgtagccacattacacataagaagggtgcagatattaaagcctttcctgttcaggtcttggggtagctcaagccacagatgccctggcaatctaatgagacccactcccttcagaaaaggcaactccatctctgctataacttcccatcacctaaactggctgctgatgtttccatgcatgcttcttaagatataaatcaaagcatgttttagcacaaagccccaaagtcctgggttctagccttggatcagcgaattgctagctgtgtgacctacagcgattcttttcacctctctaggcatgaactgctgcagctacaaaatgaaaagaatttattgtgtgtcctcaaagatctctttcagctctataatcctttgatcctaaacraattctatagttagaagccctttttctgactattttaactatcaaaaatataaccatgaatcaaaaatagggtgcaaagaaaggaaagagaaagatccatgaaaagcataggtcaatattgcaaagtccacacgttaagctt

SEQ ID NO: 27135 - DNA, 1201 bp, Homo sapiens
actcatcctccacggtcagctatcttgcaatgtgttcttgtaagtgtcttgcataggggtagagggaccttcttgatgacctacagactgactaagtagggggcgtactggaagaagagctaaggactattgtctcttctgctgccatcaagctcatggtgccacrttaacttgtgccaacagatgcttatagaagccagtcaggctcatggtgccacattaacttgtaccaacggatgcttatagaagccactcggatttgccacagcagggaggaaggcatgggagaagaggaggagggactcaatgtcctgtgatggagtgtagaggctgctgactggaaaaaaccaggaacaatgaaaatgaggtatcttctttaggatgccatgccaagcagaaagcctccgaaaaatcccccagtcactagaacatttttcttcacaaatgacaccacctcctcagctttgctcctgacctggttaggtatctgagtgctcttagggatcttcagctgctctttggctttcttcatgtccttctccactcgttgccaatcaactttgatgtacccagaatggtttgcaagctgaaggagaaaaaatccacctcccacagctgttgcagccaactttccaaccttctggaatataaaacccgtgcaccatccagtgacacctccaatgaacaggtgggttgccacgctatacttttcggctgagagtccagattctggcccaaacagcttacgccaccacggctgctgcttagcaaattctgcaaggtccactgactcaatatctccctcaaagtttccttgactggacgcggccatttcggtgagctagtcttgcgaggacacacgcaggggatctgcgaggttacgctgcggagtggcgcgctgtcgtggccaccacccggcttcctgcacgtggggcagatgtttccattcccaccgcggccgcggaagagggcgggcctgacgtgctgcgaccgcttcctgtctccgcaagcggctgtgtcacaaagttcagcgggcggcatcacaagccccgtagccccgcccaacagatgccatcctggttttttgttttttttagaagcagtgtggaatggtggaaagagcaatggaccacatgtccaaggagaagacctgagtctgttttctcatctatagaataagaaaaatacagtattattgtga

SEQ ID NO: 27136 - DNA, 1201 bp, Homo sapiens
actcatcctccacggtcagctatcttgcaatgtgttcttgtaagtgtcttgcataggggtagagggaccttcttgatgacctacagactgactaagtagggggcgtactggaagaagagctaaggactattgtctcttctgctgccatcaagctcatggtgccacgttaacttgtgccaacagatgcttatagaagccagtcaggctcatggtgccacattaacttgtaccaacggatgcttatagaagccactcggatttgccacagcagggaggaaggcatgggagaagaggaggagggactcaatgtcctgtgatggagtgtagaggctgctgrctggaaaaaaccaggaacaatgaaaatgaggtatcttctttaggatgccatgccaagcagaaagcctccgaaaaatcccccagtcactagaacatttttcttcacaaatgacaccacctcctcagctttgctcctgacctggttaggtatctgagtgctcttagggatcttcagctgctctttggctttcttcatgtccttctccactcgttgccaatcaactttgatgtacccagaatggtttgcaagctgaaggagaaaaaatccacctcccacagctgttgcagccaactttccaaccttctggaatataaaacccgtgcaccatccagtgacacctccaatgaacaggtgggttgccacgctatacttttcggctgagagtccagattctggcccaaacagcttacgccaccacggctgctgcttagcaaattctgcaaggtccactgactcaatatctccctcaaagtttccttgactggacgcggccatttcggtgagctagtcttgcgaggacacacgcaggggatctgcgaggttacgctgcggagtggcgcgctgtcgtggccaccacccggcttcctgcacgtggggcagatgtttccattcccaccgcggccgcggaagagggcgggcctgacgtgctgcgaccgcttcctgtctccgcaagcggctgtgtcacaaagttcagcgggcggcatcacaagccccgtagccccgcccaacagatgccatcctggttttttgttttttttagaagcagtgtggaatggtggaaagagcaatggaccacatgtccaaggagaagacctgagtctgttttctcatctatagaataagaaaaatacagtattattgtga

SEQ ID NO: 27137 - DNA, 2103 bp, Homo sapiens
  misc_feature (1)...(2103): n = A,T,C or G
tttttgataatgagggttatcatgaaattttctttgcaatttctaaactgtatatgctgctgaaagtttagctagcattatcctatgaatatatgtggtcggaagtataacacatgagttaaagtggcctataatgatgcccacaagagaaaacttaaaaaaaaaaaagagacagaactcatacaaaacacaagtaaacttgtattttaaagaatcatataattaatatgtttctttttaatttctataaactggtacatgaaaaaaatcccaaggaatgcaatacactatattacattttgaattccacagaattcnnnnnnnnnnnnnnnnnnnnnnnnnnnnnnnnnnnnnnnnnnnnnnnnnnnnnnnnnnnnnnnnnnnnnnnnnnnnnnnnnnnnnnnnnnnnnnnnnnnngagtgggagattgagtgggaataataaagtgaaaataacgcagccatgtgtaggaaagtgcacagtcgattagctaaaatttcaatgaaaacaaacaaatcttcttcaccgtagatgaataatagtgaggcttgttcatgtatgggtaaagcaaatgctaggttttatcccgatgaagtactatatattaaagaaattaatgttctaatgaaaacatgcatgaaaagaaataaatggttagcattttcacttgtaaagtaggctcatggcaggcttctcacattgaaggcagatcttttaagtgccaactgagtcagaaggaatgactaccgaatgccaaatgcaaatgaatataatcataaaaaatgtgaagtgtaagctgatttcattttggcgaaaagaaagggaataaaagagtcattgaagaacagaaatagaaatgttgaagttaatggagcttgcctgaagacactctccatcacagccaggttgggatcataaactgtgggtaataatgaaagatgaaaggacatagcaatacaatatttattttttaaaataaatttatcagaaaaatccagaaaaacttgtcaaggaaaacatatgccaatcaagaaattaaatatttattaagtacttaaacctgttctttataaagcactaatctaaatgctaatgaataggaaacactacacatgtgtgagggtgtatttgtgtatgtgtgtgcacacataaccagcaaacagaagccaaaatttaatcattctattttattgtgaaataaatatgctttactagcacttctcagaggtaaatggtgagaattagtgcgggaagtaagatttttactgggcctttgagagagacagtttaagagggacaaaaacataaaggcagaaaaaaacaaaatgtacttggggttcaataaaagattggttttactaaggtatataattaatataggaaactagagcaagagatggggatggcaagttaggaacatatgtgaaagaaatttattgtcagctaagtagttgtaatttcttcctatgggaggccattgaagtgttttagtagaatattataaaattatttttgttttcttaatactatgacatacttttttcttttatgattattaaaagtcatarctttaaatatagttatttgtgtataaatagcagtcttctttatctcagttgtaagcgctctataaacagaaatggtcttcttaatcttacatgctatagaacctagcacaatgtgtgcttggtttattgtagaataacaaggctggtaattttaaaatactaggcaaagaatctgaaaatagttggcaaatgatcttaaaacaagtaaaccagtaaagacagttgctacttatttttttctgaatttgaactacagttgtagtcactgcaaaaaaaaaattgtgctggatgaaagatttctgaacatatagtcagtcaaacgtcatacatttgcattaagagatgaccccaaaatagatagcttagagcaaattgtggtaccattacactgtgattttcttttccttctctgaaagatcatttgaattagtggtggcatatcttagaaatatcaataattgaaagaatgatatttccagtgttttaagcagttctaggcacctggatggtataataaatagtgcggtaatgatta

SEQ ID NO: 27138 - DNA, 2103 bp, Homo sapiens
  misc_feature (1)...(2103): n = A,T,C or G
tttttgataatgagggttatcatgaaattttctttgcaatttctaaactgtatatgctgctgaaagtttagctagcattatcctatgaatatatgtggtcggaagtataacacatgagttaaagtggcctataatgatgcccacaagagaaaacttaaaaaaaaaaaagagacagaactcatacaaaacacaagtaaacttgtattttaaagaatcatataattaatatgtttctttttaatttctataaactggtacatgaaaaaaatcccaaggaatgcaatacactatattacattttgaattccacagaattcnnnnnnnnnnnnnnnnnnnnnnnnnnnnnnnnnnnnnnnnnnnnnnnnnnnnnnnnnnnnnnnnnnnnnnnnnnnnnnnnnnnnnnnnnnnnnnnnnnnngagtgggagattgagtgggaataataaagtgaaaataacgcagccatgtgtaggaaagtgcacagtcgattagctaaaatttcaatgaaaacaaacaaatcttcttcaccgtagatgaataatagtgaggcttgttcatgtatgggtaaagcaaatgctaggttttatcccgatgaagtactatatattaaagaaattaatgttctaatgaaaacatgcatgaaaagaaataaatggttagcattttcacttgtaaagtaggctcatggcaggcttctcacattgaaggcagatcttttaagtgccaactgagtcagaaggaatgactaccgaatgccaaatgcaaatgaatataatcataaaaaatgtgaagtgtaagctgatttcattttggcgaaaagaaagggaataaaagagtcattgaagaacagaaatagaaatgttgaagttaatggagcttgcctgaagacactctccatcacagccaggttgggatcataaactgtgggtaataatgaaagatgaaaggacatagcaatacaatatttattttttaaaataaatttatcagaaaaatccagaaaaacttgtcaaggaaaacatatgccaatcaagaaattaaatatttattaagtacttaaacctgttctttataaagcactaatctaaatgctaatgaataggaaacactacacatgtgtgagggtgtatttgtgtatgtgtgtgcacacataaccagcaaacagaagccaaaatttaatcattctattttattgtgaaataaatatgctttactagcacttctcagaggtaaatggtgagaattagtgcgggaagtaagatttttactgggcctttgagagagacagtttaagagggacaaaaacataaaggcagaaaaaaacaaaatgtacttggggttcaataaaagattggttttactaaggtatataattaatataggaaactagagcaagagatggggatggcaagttaggaacatatgtgaaagaaatttattgtcagctaagtagttgtaatttcttcctatgggaggccattgaagtgttttagtagaatattataaaattatttttgttttcttaatactatgacatacttttttcttttatgattattaaaagtcataactttaaatatagttatttgtgtataaatagcagtcttctttatctcagttgtaagcgctctrtaaacagaaatggtcttcttaatcttacatgctatagaacctagcacaatgtgtgcttggtttattgtagaataacaaggctggtaattttaaaatactaggcaaagaatctgaaaatagttggcaaatgatcttaaaacaagtaaaccagtaaagacagttgctacttatttttttctgaatttgaactacagttgtagtcactgcaaaaaaaaaattgtgctggatgaaagatttctgaacatatagtcagtcaaacgtcatacatttgcattaagagatgaccccaaaatagatagcttagagcaaattgtggtaccattacactgtgattttcttttccttctctgaaagatcatttgaattagtggtggcatatcttagaaatatcaataattgaaagaatgatatttccagtgttttaagcagttctaggcacctggatggtataataaatagtgcggtaatgatta

SEQ ID NO: 27139 - DNA, 2103 bp, Homo sapiens
  misc_feature (1)...(2103): n = A,T,C or G
tttttgataatgagggttatcatgaaattttctttgcaatttctaaactgtatatgctgctgaaagtttagctagcattatcctatgaatatatgtggtcggaagtataacacatgagttaaagtggcctataatgatgcccacaagagaaaacttaaaaaaaaaaaagagacagaactcatacaaaacacaagtaaacttgtattttaaagaatcatataattaatatgtttctttttaatttctataaactggtacatgaaaaaaatcccaaggaatgcaatacactatattacattttgaattccacagaattcnnnnnnnnnnnnnnnnnnnnnnnnnnnnnnnnnnnnnnnnnnnnnnnnnnnnnnnnnnnnnnnnnnnnnnnnnnnnnnnnnnnnnnnnnnnnnnnnnnnngagtgggagattgagtgggaataataaagtgaaaataacgcagccatgtgtaggaaagtgcacagtcgattagctaaaatttcaatgaaaacaaacaaatcttcttcaccgtagatgaataatagtgaggcttgttcatgtatgggtaaagcaaatgctaggttttatcccgatgaagtactatatattaaagaaattaatgttctaatgaaaacatgcatgaaaagaaataaatggttagcattttcacttgtaaagtaggctcatggcaggcttctcacattgaaggcagatcttttaagtgccaactgagtcagaaggaatgactaccgaatgccaaatgcaaatgaatataatcataaaaaatgtgaagtgtaagctgatttcattttggcgaaaagaaagggaataaaagagtcattgaagaacagaaatagaaatgttgaagttaatggagcttgcctgaagacactctccatcacagccaggttgggatcataaactgtgggtaataatgaaagatgaaaggacatagcaatacaatatttattttttaaaataaatttatcagaaaaatccagaaaaacttgtcaaggaaaacatatgccaatcaagaaattaaatatttattaagtacttaaacctgttctttataaagcactaatctaaatgctaatgaataggaaacactacacatgtgtgagggtgtatttgtgtatgtgtgtgcacacataaccagcaaacagaagccaaaatttaatcattctattttattgtgaaataaatatgctttactagcacttctcagaggtaaatggtgagaattagtgcgggaagtaagatttttactgggcctttgagagagacagtttaagagggacaaaaacataaaggcagaaaaaaacaaaatgtacttggggttcaataaaagattggttttactaaggtatataattaatataggaaactagagcaagagatggggatggcaagttaggaacatatgtgaaagaaatttattgtcagctaagtagttgtaatttcttcctatgggaggccattgaagtgttttagtagaatattataaaattatttttgttttcttaatactatgacatacttttttcttttatgattattaaaagtcataactttaaatatagttatttgtgtataaatagcagtcttctttatctcagttgtaagcgctctataaacagaaatggtcttcttaatcttacatgctatagaacctagcacaatgtgtgcttggtttattgtagaataacaaggctggtaattttaaaatactaggcaaagaatctgaaaatagttggcaaatgatcttaaaacaagtaaaccagtaaagacagttgctacttatttttttctgaatttgaactacagttgtagtcactgcaaaaaaaaaattrtgctggatgaaagatttctgaacatatagtcagtcaaacgtcatacatttgcattaagagatgaccccaaaatagatagcttagagcaaattgtggtaccattacactgtgattttcttttccttctctgaaagatcatttgaattagtggtggcatatcttagaaatatcaataattgaaagaatgatatttccagtgttttaagcagttctaggcacctggatggtataataaatagtgcggtaatgatta

SEQ ID NO: 27140 - DNA, 2103 bp, Homo sapiens
  misc_feature (1)...(2103): n = A,T,C or G
tttttgataatgagggttatcatgaaattttctttgcaatttctaaactgtatatgctgctgaaagtttagctagcattatcctatgaatatatgtggtcggaagtataacacatgagttaaagtggcctataatgatgcccacaagagaaaacttaaaaaaaaaaaagagacagaactcatacaaaacacaagtaaacttgtattttaaagaatcatataattaatatgtttctttttaatttctataaactggtacatgaaaaaaatcccaaggaatgcaatacactatattacattttgaattccacagaattcnnnnnnnnnnnnnnnnnnnnnnnnnnnnnnnnnnnnnnnnnnnnnnnnnnnnnnnnnnnnnnnnnnnnnnnnnnnnnnnnnnnnnnnnnnnnnnnnnnnngagtgggagattgagtgggaataataaagtgaaaataacgcagccatgtgtaggaaagtgcacagtcgattagctaaaatttcaatgaaaacaaacaaatcttcttcaccgtagatgaataatagtgaggcttgttcatgtatgggtaaagcaaatgctaggttttatcccgatgaagtactatatattaaagaaattaatgttctaatgaaaacatgcatgaaaagaaataaatggttagcattttcacttgtaaagtaggctcatggcaggcttctcacattgaaggcagatcttttaagtgccaactgagtcagaaggaatgactaccgaatgccaaatgcaaatgaatataatcataaaaaatgtgaagtgtaagctgatttcattttggcgaaaagaaagggaataaaagagtcattgaagaacagaaatagaaatgttgaagttaatggagcttgcctgaagacactctccatcacagccaggttgggatcataaactgtgggtaataatgaaagatgaaaggacatagcaatacaatatttattttttaaaataaatttatcagaaaaatccagaaaaacttgtcaaggaaaacatatgccaatcaagaaattaaatatttattaagtacttaaacctgttctttataaagcactaatctaaatgctaatgaataggaaacactacacatgtgtgagggtgtatttgtgtatgtgtgtgcacacataaccagcaaacagaagccaaaatttaatcattctattttattgtgaaataaatatgctttactagcacttctcagaggtaaatggtgagaattagtgcgggaagtaagatttttactgggcctttgagagagacagtttaagagggacaaaaacataaaggcagaaaaaaacaaaatgtacttggggttcaataaaagattggttttactaaggtatataattaatataggaaactagagcaagagatggggatggcaagttaggaacatatgtgaaagaaatttattgtcagctaagtagttgtaatttcttcctatgggaggccattgaagtgttttagtagaatattataaaattatttttgttttcttaatactatgacatacttttttcttttatgattattaaaagtcataactttaaatatagttatttgtgtataaatagcagtcttctttatctcagttgtaagcgctctataaacagaaatggtcttcttaatcttacatgctatagaacctagcacaatgtgtgcttggtttattgtagaataacaaggctggtaattttaaaatactaggcaaagaatctgaaaatagttggcaaatgatcttaaaacaagtaaaccagtaaagacagttgctacttatttttttctgaatttgaactacagttgtagtcactgcaaaaaaaaaattgtgctggatgaaagatttctgaacatatagtcagtcaaacgtcrtacatttgcattaagagatgaccccaaaatagatagcttagagcaaattgtggtaccattacactgtgattttcttttccttctctgaaagatcatttgaattagtggtggcatatcttagaaatatcaataattgaaagaatgatatttccagtgttttaagcagttctaggcacctggatggtataataaatagtgcggtaatgatta

SEQ ID NO: 27141 - DNA, 559 bp, Homo sapiens
tattgtctcttgggaattatggtgattgctttcaagcagctcagcccctttgatctcttaatgcttgtatgaccctatcactcagcaataccatacatctagctctggctttcagtggtctcctttgactcattttagggcctgtagctccatgctgctatcctcatctgggagaaacattgmtgcttaatttatttatttatttatttatttttttggtgatacagagtctcgctctgtcgcccaggttggagtgcagtagcgcgatctcggctcactgcaagctccgattcccgggttcacgccattctcctgccttagcctcctgagttgctgggactacaggctcccgccactacgcccggctaatttttttttctcttttttttctttctttttttttttttttttttttaagtagagacgggttttcaccgtgttaaccaggatgacctcgatctcctgtcttcatgatcctcctgcctcggcttcccaaagtgctgggattacaggcgtgagccaccgcgcccggccgactcttaattcttagccagtgtct

SEQ ID NO: 27142 - DNA, 559 bp, Homo sapiens
tattgtctcttgggaattatggtgattgctttcaagcagctcagcccctttgatctcttaatgcttgtatgaccctatcactcagcaataccatacatctagctctggctttcagtggtctcctttgactcattttagggcctgtagctccatgctgctatcctcatctgggagaaacattgctgcttaatttatttatttatttatttatttttttggtgatacagagtctcgctctgtcgcccaggttggagtgcagtagcgcgatctcggctcactgcaagctccgattcccgggttcacgccattctcctgccttagcctcctgagttgctgggactacaggckcccgccactacgcccggctaatttttttttctcttttttttctttctttttttttttttttttttttaagtagagacgggttttcaccgtgttaaccaggatgacctcgatctcctgtcttcatgatcctcctgcctcggcttcccaaagtgctgggattacaggcgtgagccaccgcgcccggccgactcttaattcttagccagtgtct

SEQ ID NO: 27143 - DNA, 527 bp, Homo sapiens
ctacttttggtgatctttctttgcttctgactaacaagaaaaagattcattttcaataactagttttttgaaaaaggcttcaacagcacaacttttgacactgtgaagctcctttaaaaaaaaaaaaaagaattctgttgtaatacagaactttttcatacaccttccattcacttgggggtgaggagagttgaggacatagctgtcatcaaagatgtcagatgcagccccctagataagcctgaaaagttcatcttcactcattagtatttttttttctcagaagctcaaatatctttctatatagtctggcttactttggagaactcattttcattgtgagaggcmtgcaaatatctgaattccaattgtggactggattcaagtccctcacagagttgatgggccccatgaaataatatcactaaacctatgtcctgcttgtgccctgataggtaagccctgagatagtctatgatggaatactggttgatccagaatatgtaaaatcctctaagaaagaaaaa

SEQ ID NO: 27144 - DNA, 541 bp, Homo sapiens
agactgtcagtaattcagacttgggtctttatcttttgtggtttccacaaaagactgtctgcacagtgccacagctcaccctctctccctaacctgagcaccttgtgtgacttgtattctgtctagaagctgccttctttctgaagaatcattattctgcggagcactgaaagaaggagcttaaaatactttgggtgtcaaaagtaggagcaacagattgccatttgtgtgtactttccgctatctaaaacttccaattaaaaaatcctttatggggagggagagcattaagacaaatacctaatgcatgcrgggcttaaaacctagatgatgggttgatgggtgcagcaaaccaccatggcacatatgtaacaaacctgcacgttctgcacatgtaccccagaacttaaagtagaaaaactttactaaacacttcttaaccatataactacctcagcaccaccttaaacaaagaagtacttattaacatatcaagaatttaacaaacattcttcactgacctttctaattttcatccatt

SEQ ID NO: 27145 - DNA, 541 bp, Homo sapiens
agactgtcagtaattcagacttgggtctttatcttttgtggtttccacaaaagactgtctgcacagtgccacagctcaccctctctccctaacctgagcaccttgtgtgacttgtattctgtctagaagctgccttctttctgaagaatcattattctgcggagcactgaaagaaggagcttaaaatactttgggtgtcaaaagtaggagcaacagattgccatttgtgtgtactttccgctatctaaaacttccaattaaaaaatcctttatggggagggagagcattaagacaaatacctaatgcatgcagggcttaaaacctagatgatgggttgatgggtgcagcaaaccaccatggcacatatgtaacaaacctgcacrttctgcacatgtaccccagaacttaaagtagaaaaactttactaaacacttcttaaccatataactacctcagcaccaccttaaacaaagaagtacttattaacatatcaagaatttaacaaacattcttcactgacctttctaattttcatccatt

SEQ ID NO: 27146 - DNA, 541 bp, Homo sapiens
agactgtcagtaattcagacttgggtctttatcttttgtggtttccacaaaagactgtctgcacagtgccacagctcaccctctctccctaacctgagcaccttgtgtgacttgtattctgtctagaagctgccttctttctgaagaatcattattctgcggagcactgaaagaaggagcttaaaatactttgggtgtcaaaagtaggagcaacagattgccatttgtgtgtactttccgctatctaaaacttccaattaaaaaatcctttatggggagggagagcattaagacaaatacctaatgcatgcagggcttaaaacctagatgatgggttgatgggtgcagcaaaccaccatggcacatatgtaacaaacctgcacgttctgcacatgtaccccagaacttaaagtaraaaaactttactaaacacttcttaaccatataactacctcagcaccaccttaaacaaagaagtacttattaacatatcaagaatttaacaaacattcttcactgacctttctaattttcatccatt

SEQ ID NO: 27147 - DNA, 2005 bp, Homo sapiens
gagaaattccctcttacttgagaaagggcagcctttttgctctattcaggccttcaactgactgcatgaggctcatctacattaggaaggacatctgctttactcatccaatctatttaaatgttaaccccatccgaatgcaccctcataggaacgccaagaataatgtttcacaaaatatctgggcactctgtggcccaatgaagttgagacataaaatgaaccatcacaaaaacaaactagatttgtgctatcattatattctttcctatccacttccttaatacctacatactttgttaaaataaagttccataaatcattttgtcagtagaataaatccctacatcaacagaaattatctatgagttaaaaagtcaccaatatagtgaagcaaaaaacataaaagtttacagcagacactgtacagtatctgaaaagtgccagacaaataactgatcctctgcactctatgaaggattcaccataggacttgaatgtggagataaagtgcgacctgagctgaactctgaaaaatgggtggtgatcagttaaaatggattaagaagtctattgcaagcctaaaaattatctgaattaaccgaaaagacacaaatttggtaagcaaayttgacaaacttgttgaggacaatcaaataatcaaataaaagagatgattagtaggattttagatattatcaaagtcctgaaataggcaggatttgatccagataataatgaaatcaactgatgatttggagctaaaggtgatgtaatgaaagtagtcgggtttctgaagaggtaatgagtgaaatggattaaaaataaaagcatagaaggaaaaagtatgtcaaatgagaatcagatttcctggcacaaagttttgaatgcatgtaacagggtagtcgcagaagtataaaaaggaaagcaaacaaaggtattactaaaaaacactaagaataaatgattgtttgaaaatgtaaaaaaggaaagttggaagattcaacaatacatcaagcttttaagaccagatagcttaaaaaatgacggaaggaaaacaaagagcttggaatgagtcaaggaagtagtgacatgtacgtgtgttaaacactcaaatggtagttgaacaaattgagagcaagagctagagactttagcatcatcatttagtgaaaatggattaattcttctaagaggtagtttatagaaaccgagaaccagcgactgagtttttggcctcactctcaattaagagtgtctgtgaaaaaatgaaaaccagataagacagaaaaaaaaagattataagaaaaagaggataaaactggaaaattaacctggtgatctagaggggagaatgtgtctaaaaaagagatgttttagagaaaaacaaagtacataaaagacagagtagtctggagttccaaaaagaaagtaattagtggaactgtttatagcctgtctactaatcaattgcagaggaaaacattgccactgaattctaattgctaactttcactacttaatctctctgtggagattagaattagttatggagtgtttatgtagatgacagtcatcttgtttgccacaaactcatttgcacggaaaagcacacatcagttagactcctgtcaaaataattagctaagcatgagataagaccttttaggttttagaactttctaagcattaaatcttttttttttatatgagggcactcaacatgttttacagaaataataagcatgtgtataagtctacattttgcatcatgttacctttttcttgttgttttttcttatctatttaataaagtacctaatttagtaaaatataaaattagcaactggtagtcactgagataatgggaaatagaatttcttctcacttttctcatttctctcattctatgttaggcattatgaaattaaaataaaatccatttcaattaaaagtgatctgttcttttagtatagagcttgataaacagcattgctgaattcag

SEQ ID NO: 27148 - DNA, 2005 bp, Homo sapiens
gagaaattccctcttacttgagaaagggcagcctttttgctctattcaggccttcaactgactgcatgaggctcatctacattaggaaggacatctgctttactcatccaatctatttaaatgttaaccccatccgaatgcaccctcataggaacgccaagaataatgtttcacaaaatatctgggcactctgtggcccaatgaagttgagacataaaatgaaccatcacaaaaacaaactagatttgtgctatcattatattctttcctatccacttccttaatacctacatactttgttaaaataaagttccataaatcattttgtcagtagaataaatccctacatcaacagaaattatctatgagttaaaaagtcaccaatatagtgaagcaaaaaacataaaagtttacagcagacactgtacagtatctgaaaagtgccagacaaataactgatcctctgcactctatgaaggattcaccataggacttgaatgtggagataaagtgcgacctgagctgaactctgaaaaatgggtggtgatcagttaaaatggattaagaagtctattgcaagcctaaaaattatctgaattaaccgaaaagacacaaatttggtaagcaaatttgacaaacttgttgaggacaatcaaataatcaaataaaagagatgattagtaggattttagatattatcaaagtcctgaaataggcaggatttgatccagataataatgaaatcaactgaygatttggagctaaaggtgatgtaatgaaagtagtcgggtttctgaagaggtaatgagtgaaatggattaaaaataaaagcatagaaggaaaaagtatgtcaaatgagaatcagatttcctggcacaaagttttgaatgcatgtaacagggtagtcgcagaagtataaaaaggaaagcaaacaaaggtattactaaaaaacactaagaataaatgattgtttgaaaatgtaaaaaaggaaagttggaagattcaacaatacatcaagcttttaagaccagatagcttaaaaaatgacggaaggaaaacaaagagcttggaatgagtcaaggaagtagtgacatgtacgtgtgttaaacactcaaatggtagttgaacaaattgagagcaagagctagagactttagcatcatcatttagtgaaaatggattaattcttctaagaggtagtttatagaaaccgagaaccagcgactgagtttttggcctcactctcaattaagagtgtctgtgaaaaaatgaaaaccagataagacagaaaaaaaaagattataagaaaaagaggataaaactggaaaattaacctggtgatctagaggggagaatgtgtctaaaaaagagatgttttagagaaaaacaaagtacataaaagacagagtagtctggagttccaaaaagaaagtaattagtggaactgtttatagcctgtctactaatcaattgcagaggaaaacattgccactgaattctaattgctaactttcactacttaatctctctgtggagattagaattagttatggagtgtttatgtagatgacagtcatcttgtttgccacaaactcatttgcacggaaaagcacacatcagttagactcctgtcaaaataattagctaagcatgagataagaccttttaggttttagaactttctaagcattaaatcttttttttttatatgagggcactcaacatgttttacagaaataataagcatgtgtataagtctacattttgcatcatgttacctttttcttgttgttttttcttatctatttaataaagtacctaatttagtaaaatataaaattagcaactggtagtcactgagataatgggaaatagaatttcttctcacttttctcatttctctcattctatgttaggcattatgaaattaaaataaaatccatttcaattaaaagtgatctgttcttttagtatagagcttgataaacagcattgctgaattcag

SEQ ID NO: 27149 - DNA, 540 bp, Homo sapiens
tactgtgtcagtgggcgcaccacctgagccacccgtggccttcctttcacaaggaaaaggaagacatcagcgtctccaggtgctcctctcagcgtgacaggaagaatggcaatcactaaagaaaaccaaagaaaatgcatatataactggatctaaagaactctttcaaacaacattatctcctctcacaagttattttaccaaacgatgctgcagtgcaaactgcagagcccagcagtgcgggtgaacattccggtttctctgttcaacgttacctgtccagcaccagacccttgctgggtcttagtgcaatgacaccaaggatcacacctgaaattattcgagagacaaaacctagagggaaaggaaattgtagaaagattgcattatttacaaagttaaaccattttctggaatgtgtccaaaatggctgttattgggcagggagaccttgagggctgtgatcaacccatttggttctgccccatgtaaataatayggcaactcattctgcctataccgatgataatgaattgcaaa

SEQ ID NO: 27150 - DNA, 572 bp, Homo sapiens
ttacttcatcatccctgtagaagcctctagtctcaaccaacctgcgacatgatcttggtgatttgttcagccttcctcctttatcaattttttttttctgagatggagtttcacttgtcacccaggctggactgcaatggcatgatggctcactacaaccttgcctccctggttcgagccattctcctgcctcagcctcctgccctaaagtgatcctcccacctcagcctttcaaagtgctgggattacagatgtgagccatwgcacccacctttttttctcattttgaaaatataaaaaattaaaacagaaatagggggaaaatggatctcacccagaggtaacaggctccaagaacagtggctctaaaaagtcttctctggatgagtgatggacttttcatttgtctccttgttggagggggcgggggcagtgagtgtgtttgcagttgtgcttgtatcctattacgtgggattccttttgatgtgtgggatgacaggtgtgtggcattgagggacagatgctggtagtgtcttgggtacagttccctggagcagaacctgagaagggga

SEQ ID NO: 27151 - DNA, 1095 bp, Homo sapiens
atgacccatttctgaataagccaggtgaattgactttgtccatgctagaaaagtatcaactgcctgagatcgcaaatgacgttggccctaaaagtatgtttgagacaacttcaagtcttcgtatgttctgaattaaaatcaaggcagaatatcctgagtttaccacaaaagctctataaagtctgcttccattcccaacatcctgtctttgtgaagcagggttttctgcagtgacagcaaccgaaagagattatgaagtaaactggacataagcaacacactttgggtgtcactgtctccgatcaccacccgatgggactatctagttgcaggaaaacaagctcagggctcccactgattctacattatagtgagctgcataattatttcactacccgagtagtgaaaccagaaagccatccagtcatggcagctgctttatttatgcatatactgatacaaaatcgaaataaaatgcacaataaatgtaacgtgcttgatttatcatgaaaccattccccctccccgatccatggaaaaattgtcttccacgaaaccagtccccggtgccagaaagcctggggactgctgctgtaagcagaggaaggagcatatcttattttacctgcctcagacaaatcaaggttatttaaaatgttaactcatctaacaattaaacaataaaacaattctctcgtggatacttctggacaatctgcagctcactctacctttcttattctggtttcataatgaaataggcacatctcatgtgcatctgggcattgtacaacaatcatctattctgattaaatgwtgagtcgtgatctaatttcccattcagtaaatttaaatatatcccttagttcactatattgtatgaattatgtggagaactacttcatatctcttgccatatcatggctattttctgtgttttagcactaaaaatggaaatgcaaaaagactctactcctctaactaatataaagcctatttatttaaaaaataggtaagttaaggcaagtatccagttcattgagcaaaaagctcacttccatggccagaatgattctagtatattacttacatgga

SEQ ID NO: 27152 - DNA, 945 bp, Homo sapiens
cactggtgattgtttttcgaggaaactgagcagatggagggggaaggccattgacatctgcgtgatggatttgaaaagggtcaagaaaaagccagagaatcccatggtgaaggttttcacttccagtccccttcgcctttggatgggtgatgttcttagccttcatgtaccaattgccatatttgctgcagaaattctcagtctcatccatcactatgtgtttaatctttagaaactccccttgcatgaaagttttcctggtcacagcttggcaggtggtttgttggctgtaaggacggaaaaaacagggcttgaggcatatcracaaagagaacaccagcagtcattactctctggaatggaatcagaggctgattctcatctgcaggctgagtcattgattcagtagtgtgaataccacaaaactgttctaattacaagttacctgacagacagaatgcataattttacaccttgctctttggggttatccagttaaacctgcatgtgaaacttctgaaatgaacccaggtaacagattgtattatgtctattagtaatccattcctactgtttggcaatcctgaagacaagttcattacatctaaaggaaatctcaaagttaacttacacttcttactaccatttctttactttctatcctctttagagctggaaaacagtttcctcgatgcatatcataatttttatgtgcaaaaaaagcacggactagttcaaattcctctaaagcttctttagattttggtaagagaaacatcaagaggatgctgagttccacgacacatcaagtagggtaccaaatctatggggctatgcctctttggagctacctcatttacttagctcaattttcctttatagtacgctttagcatatatgtattttttctgaacgaatttggttgttttttgcctcctttaattt

SEQ ID NO: 27153 - DNA, 1191 bp, Homo sapiens
tattattgtttctctatgtagcttcccttcttgcaaatccctcactgctcctgaggcacaaactcctttaggaagaaacaagtgattgccatgactcccagcaagaggctcatggtggggtccccacttccacagcacctcccttctttgttgtgtaaagaaataggtctgcgaaatttcagagttgcaagatggcacatagggttagaagcacagaatagacacaggtttccccaagttttagttgagtggttattgcatggctaccatagcggtgtgaactccttaatcagtacctctgtgtacattcattgttcattgctactattaataacccttttatattggtgctggtatcggagagtgtttgctgtgctgtctctccattagatgctaaagccagactaagcctttcaatttccatctcaccatatttaacctcttttgaggtttagcttagtgttgttaatggtgcatagcatgttcttttccatactcaatttgacaaactacggggaatctttgatcttataatttaaagacatcatgtcttatytcggcagacagataatctcagaacatttaagatttaattgaattggacacggtaaaaacatgttagcattatcgaaatactaaaacccctaaataaagaagcatgcataaactacagtggcttttttttttttctggcacagatggtttatatttttattttctgtaattgaaaaattaatctgtctttagattgcccaagggagttacaagaagcttagctgctttagatttttttttaaaagtgttacagagtaattataaatagacagtagtagtattaatcaatctttctaaactgttgttatttggattctgaattgttaattgactaatattatacaatgataatgtaattttattttctcttcaaaatgtgaagatatgacaaaaatgtagcccccaaaacataattatttccacttattttatttttctactttacttttagaatacaatattctctattattgaacaagtctcatcctttaaattttgattcattcattcttttattagtgttagaaaactggatgttaactttttaattaaccctactttgtttgaggggattggtaacaattcatttactatgttttaataattatttgtagaaaaaaatgtatgattttcccg

SEQ ID NO: 27154 - DNA, 570 bp, Homo sapiens
gtaattactgagtagaggaagaagatatagattttaaaaagaaaaatgataatgggggcttggaagaattttatgaaatgattatgagagttctatcwactctgtctgccaaaattctaatattcaggcagaactaaagagtttctagaaatcctgtaggttttcttagctttcctttggatgatttgacacctgcataaactctgttgtgttaaaatatcaatcaaagctgtgatttctgcagcaccgcagtgagagaggcagagttctagctgctacatgctaaatcatctgattctgtatttgttcttttactgtaagaaattgtagcagagactgagtagctgttcacccaacccacttattccgcttcctgcacaaatagcaagccttcattcctcaacctgtcttgcagttttccatgaacaggtgattgagttctagccaaagactgactttattttaggtagcgtggttttctttcatattgttattgttgaactccaattccatttttatttttttaattaaaaaagagctattacttttataaaaacatacatgtatttt

SEQ ID NO: 27155 - DNA, 987 bp, Homo sapiens
cttagcttgaagctatccagtgataaaggactcactacataatgaagcagcccattctataatggataactttggtggttagaaaagtcttatactaagatgtgtaagacttattcaacatgtgtacttgtaaaggcatgtataagacttttataagacatatacaagatgtctgcctctaattgccattggtcctttattttgccttgtaaagtcacccagcacagattggyaactactagctctaaaaagcagcaagtgtttctttaaaaagctgagacctttcccaataacgttacatttctaaattgacctgaggttgaagatttgtgcttctcctaggagccatctttggaaaatgtaaactgactgagaatcccagagaatttacattaactcacttacctcgtgtctgccaatgtgggtccctaaaacagctgctgctccacctggggtatgtcctatctgattataacttataaattgtggctccctatctgctgaagttcctccggctctgtaagaactctcagatgttgatacaacatgctgtagcgagatgcattttattattacaacaaagtcctttccttgcacataaaaactgggtgcctaattgtattcaaaggatggtctaatagaaatactgtgagttaattgtcagaaaatctgggccttccaattaaaatccattaggaatcactacatgacttgggggaaatatcctaacacctcatgtgcctcaatttcttcatctctaatatgtgaatattatttgcttttcaattacaaatatgtggtgagaatagaacgaaaaagtcttaagaaatagtctacacagttctaaaacctcttaggaacttctgtttctggtgaggtatagtagacgttctttcctctattccttccacaagtctaactttatatatgaacattatatataatacgaacaaaagagaggagagggcagactgacttaaaacctca

SEQ ID NO: 27156 - DNA, 987 bp, Homo sapiens
cttagcttgaagctatccagtgataaaggactcactacataatgaagcagcccattctataatggataactttggtggttagaaaagtcttatactaagatgtgtaagacttattcaacatgtgtacttgtaaaggcatgtataagacttttataagacatatacaagatgtctgcctctaattgccattggtcctttattttgccttgtaaagtcacccagcacagattggtaactactagctctaaaaagcagcaagtgtttctttaaaaagctgagacctttcccaataacgttacatttctaaattgacctgaggttgaakatttgtgcttctcctaggagccatctttggaaaatgtaaactgactgagaatcccagagaatttacattaactcacttacctcgtgtctgccaatgtgggtccctaaaacagctgctgctccacctggggtatgtcctatctgattataacttataaattgtggctccctatctgctgaagttcctccggctctgtaagaactctcagatgttgatacaacatgctgtagcgagatgcattttattattacaacaaagtcctttccttgcacataaaaactgggtgcctaattgtattcaaaggatggtctaatagaaatactgtgagttaattgtcagaaaatctgggccttccaattaaaatccattaggaatcactacatgacttgggggaaatatcctaacacctcatgtgcctcaatttcttcatctctaatatgtgaatattatttgcttttcaattacaaatatgtggtgagaatagaacgaaaaagtcttaagaaatagtctacacagttctaaaacctcttaggaacttctgtttctggtgaggtatagtagacgttctttcctctattccttccacaagtctaactttatatatgaacattatatataatacgaacaaaagagaggagagggcagactgacttaaaacctca

SEQ ID NO: 27157 - DNA, 987 bp, Homo sapiens
cttagcttgaagctatccagtgataaaggactcactacataatgaagcagcccattctataatggataactttggtggttagaaaagtcttatactaagatgtgtaagacttattcaacatgtgtacttgtaaaggcatgtataagacttttataagacatatacaagatgtctgcctctaattgccattggtcctttattttgccttgtaaagtcacccagcacagattggtaactactagctctaaaaagcagcaagtgtttctttaaaaagctgagacctttcccaataacgttacatttctaaattgacctgaggttgaagatttgtgcttctcctaggagccatctttggaaaatgtaaactgactgagaatcccagagaatttacattaactcacttacctsgtgtctgccaatgtgggtccctaaaacagctgctgctccacctggggtatgtcctatctgattataacttataaattgtggctccctatctgctgaagttcctccggctctgtaagaactctcagatgttgatacaacatgctgtagcgagatgcattttattattacaacaaagtcctttccttgcacataaaaactgggtgcctaattgtattcaaaggatggtctaatagaaatactgtgagttaattgtcagaaaatctgggccttccaattaaaatccattaggaatcactacatgacttgggggaaatatcctaacacctcatgtgcctcaatttcttcatctctaatatgtgaatattatttgcttttcaattacaaatatgtggtgagaatagaacgaaaaagtcttaagaaatagtctacacagttctaaaacctcttaggaacttctgtttctggtgaggtatagtagacgttctttcctctattccttccacaagtctaactttatatatgaacattatatataatacgaacaaaagagaggagagggcagactgacttaaaacctca

SEQ ID NO: 27158 - DNA, 1340 bp, Homo sapiens
ttcttcaaggttcaaggtctgcacgtgagaatctgtcccatgtatmagtatcagtagagttcctcagaaatgtttcctttggtaaaaggatttgtagatttcaggatgtagggaaatgcctggatgtccaggcataagtttgctgcaggggtggggtactcatggagaacctctgctagggcagtacaagaaggaaatgtggagtcacatttgtgttgcccacagtttgctgactactgatccactgcaacaagttcattcctgaggttcaaggtctgcacatgagaatctggcccatgtatcaatagagttcctcagaaatgttttctttggtagaacattgcacatttagtttatctcaattaaagaataaagaaccaacaagacaaggtatccctctcaacccaaatacaatggtggaacagaaattgaataatcactatagccactcccactcaaaagtgggagaggaatggctgacatctagaagatacaaacattcatggcacaactgtgcagagatggccggtgaaatcgtttcgtgagcctgctgttggcctttagaagtctgagggtccaaagatcccctttaattttgcactgtttctgttccttctagttcaagcttaaatagctctatataacatttttgtgggtcttatgaattaattggttattcactccgttagacaaaagacacattaaaaatctccaacataagactttctctgccttgaatttcctgtaagggtgattaggacacttttcttaatattttcagatgcacttcagtgaaaagtatgaggcatgctgactaataattaatgaatattttgtctaactgaatattttcgaggcattaatttggatttttctgtggtctttgccaatgatattatatttacatactgaatttaacttttcctctgaagtccctttttatttgagaaacttgaataggagagaataaaaaataatttaaattttaaacccagaaagctgtatcttattaatatgattttaatttttgcttaaattcttaaaaatatttattaaattttaacctcatgtatctccttcttaattttactataggcagtcagttgaaacaaggtggcatctccaacactctacctagaaatacgtgaaacattgagcatgctaataggttactatggcgcatttttcatagtctgtaaaccaatgttggcgtgtcattattaactcaaggttatactgatttacaactgaatattgatgttagaagtccctctatatatttatgaaatgtttatgtgtgtaatctttctttctcactaatgaaaatctggttagatgca

SEQ ID NO: 27159 - DNA, 510 bp, Homo sapiens
gggagggcgggacagagcagaggccggtgtgaaactggagagcctcacgtggggctgggagccgtggggctgggagccgagtccggagtccatcagcttgccagcttgcctgctgaggcctctttttgctctggggcccctggctggagtctgccctgagccccgcttcaccccacatgccttccttggggacgtgttcacacatgtggccctagctgtgagagacagacctgccttgacgtgcctgtgcctgtgtgcaggggctgaccctcctgggccccattgcttttttctctctgcctgccctctcacttccttggcatctcagaacagctgagctggaagtgggtgaataataataataataataataataataacaacaacaattagcactyactcatgtttagccctgtgctaagtgctgtgcttttattaactcactcactcctcgcagcaaccctaatgaggtagatactttttttttttttctgagacagtctcgctctg

SEQ ID NO: 27160 - DNA, 1196 bp, Homo sapiens
acccaggagtcccctttggtggggaggctgccggcagtggctgcgtctggctggcgactggcccagtagcggtggtaggtgtcctggaagaggtccctgcaggcgatgtgggctcggaggtgggcacaggccaggaaagcccctgccagcttgcggtgcagggcataggtctcctcgggtgggggacacagccggtgccgcagcagcaccgggatgaggtcctgtatgcggcgggccgtttcccccgacccaaagtcataagggccctgggtggcgaaaggctcccccaggatcatcactgcctccacgtgggcgtcggagaatgcctgggagtgggggtggggggagagcaaaggcagccagtgtggacatagagccctctgcataacccagaaacaacgtgtagcctccactccctccagtctccaccatcaacacaagccccgactcccccaagagtgagcagcttccactccttccagagcctggactagacaagcagctgcctattccccgagtaagcacccctcacttccctgcagagcctccaacagacaagtagccctctactctctctacaacagagaagcggcttcgcccctcctgaacagatccmcgtgcccatgttcccagggttcctgagaagtcaggcagccacctccccccactcctccccaaagcccccagcatggataagcatccctcctagagtcacccactccccaggtatagacacacagcctccattctccctagtggagacaagcccctcctagagtcccccagtccccgggtatcgacatgccccatcacctactcgagttcctcagtggagataagcagccccccactgcaccccaccaacagacaccagcccctttctcccccagtgtctccccaccttggtttcaaagcctgtgaggaatttgaggtccctggacttctgcaggacacagtctctgtctccatcagctgcagccttcaccacctggggagacgggtgggagttagagggacaaaggccggggctcaagggggctctggagaagaggagctggaagcctgggcctcccatgtacccacctccattctcatctgcctgggccctccctcacctggaagcttcctgctcccaactttgcctgtctgtgactcccttaaagactcttccagagcctgggagtggaggtggttag

SEQ ID NO: 27161 - DNA, 420 bp, Homo sapiens
tcataactagttaaacgaaggaactaccctgattaattacataattccgccaattaaatcaagcttgagttcttgactggatyaatttagcaacattaaaaacaacagcaacaacaatgccctacaattcagcaagatattttgaaaatatcaacgaatataaataaatttaaacatatgtttacatggaaattatgtaaaagacccagaatagccaacttaatactaaaggagaataacaaagtcagaagactgacactacctgacttcaagactccctataaaactatagtgttcaaaacagtattgtattggggaaaaatagacaaatatatcagtggaataaaatagggttctcagaaatagacttatataaatccagcaaacagatctctgacaagagcaaaggcagtagcatgg

SEQ ID NO: 27162 - DNA, 1842 bp, Homo sapiens
acctttcttaaacaaaaygaagaggaagcttgtggtgtgaacagcagtgagaagcttgtagtgtgagcagcaaatatgaaaacttcctcatagacacactccctacattttgtgtctcctctgatgacactgagtttgctgcagctgtgtctgacttattgcagttagtgtcataaaggccaaggacttgtctttctctctccaggagtcagtaggtgggtgaagaggaggcaggtgtggattctggcagacagcgctatggcagtgggctggggccacagggacttgctgtgttctcagagatggcccagtgtcactgagtggggtgggtttgggaagtacccttttgtctctggggctgagaagctagtcccagacctggatgtgagaagaaagagcagccacagttccttattgcagtgcggggcttcccgtccagacctgagcgcctggtcagtctaaccacaaactctgcagatggagtaagcagccccagtgccctggccttaagggcctttggagaagtctgttctgtccatggctatgtcccctgtacccagagcagtctctgcacatagtatgtgctcagtgagtactggtgtattctagagagacctcttttggcctggaagccaaaagacctgagtgtgaatactacctgcagctgcttgtaggaaaatcaccggctttcccaagacctgatttctccttttcaaaagaatcagagggttagcgcctgcaggaaggtgatctcatgaagatgagcggagtgtgcagcacagcatggaggtgccccacagccaacggctcagccaggttggtgggtggggacaatttcctgagcatctcacagagacattcatctccctcctccccggaggaccctgcatgagcactcacagcgtttggcacctgccttcttggaaggttctcggagaaggagggtctggagcagaagattcagtgcccttgctgtcagtttcccagtgcatagccctcctccacagctgctggtggactgactgccaactcagatcagggagggatgaagagccagtcaggagtgttccagattgctacctgggaaggcagaaccaggaagggagagaaagaagggtcagagagtcaggtgggcctgggatccccgccgacagctgtggagccttaagcaaggtggtattaaactgtcccgggcctcagtttccttctttgtaagtggtgatcaatagaattttccttacagggtgttgcgagaaccatagtgaatcctaagtcataaacatagggctggcacttaataaaaatagtgattactcaaggtctggactgtcaccggggcagatggtctgaatggaagacacagagggagaagagctgttagaagagagagagtctaagtgttccaatgaagccgctgggcatccaggccccattgtcctcttctagcctcatcccaaacattctctgtccccctttccccctttacaagcagctgtcagggaaccctaccatagaatgtaagttctgtgacacaggaatataagccagaggtgtatgcttcccttcagttgtaaaaggaaaagacattgtcctatgagtccctcctgttgtccagcaggactactggcatacccctggttttgggggtgtggactgggaagctcaggctctaagttaattaacaaagtggcatagtgaggcaggtagcagccaggatgcaggcatccagactcctgcccttctgggtgagggtggtttgggaagtgccctttttgtttctggggctgagaggccagtcatagacctgggattgagaagagcagccacaagcagcctacaagc

SEQ ID NO: 27163 - DNA, 1842 bp, Homo sapiens
acctttcttaaacaaaatgaagaggaagcttgtggtgtgaacagcagtgagaagcttgtagtgtgagcagcaaatatgaaaacttcctcatagacacactccctrcattttgtgtctcctctgatgacactgagtttgctgcagctgtgtctgacttattgcagttagtgtcataaaggccaaggacttgtctttctctctccaggagtcagtaggtgggtgaagaggaggcaggtgtggattctggcagacagcgctatggcagtgggctggggccacagggacttgctgtgttctcagagatggcccagtgtcactgagtggggtgggtttgggaagtacccttttgtctctggggctgagaagctagtcccagacctggatgtgagaagaaagagcagccacagttccttattgcagtgcggggcttcccgtccagacctgagcgcctggtcagtctaaccacaaactctgcagatggagtaagcagccccagtgccctggccttaagggcctttggagaagtctgttctgtccatggctatgtcccctgtacccagagcagtctctgcacatagtatgtgctcagtgagtactggtgtattctagagagacctcttttggcctggaagccaaaagacctgagtgtgaatactacctgcagctgcttgtaggaaaatcaccggctttcccaagacctgatttctccttttcaaaagaatcagagggttagcgcctgcaggaaggtgatctcatgaagatgagcggagtgtgcagcacagcatggaggtgccccacagccaacggctcagccaggttggtgggtggggacaatttcctgagcatctcacagagacattcatctccctcctccccggaggaccctgcatgagcactcacagcgtttggcacctgccttcttggaaggttctcggagaaggagggtctggagcagaagattcagtgcccttgctgtcagtttcccagtgcatagccctcctccacagctgctggtggactgactgccaactcagatcagggagggatgaagagccagtcaggagtgttccagattgctacctgggaaggcagaaccaggaagggagagaaagaagggtcagagagtcaggtgggcctgggatccccgccgacagctgtggagccttaagcaaggtggtattaaactgtcccgggcctcagtttccttctttgtaagtggtgatcaatagaattttccttacagggtgttgcgagaaccatagtgaatcctaagtcataaacatagggctggcacttaataaaaatagtgattactcaaggtctggactgtcaccggggcagatggtctgaatggaagacacagagggagaagagctgttagaagagagagagtctaagtgttccaatgaagccgctgggcatccaggccccattgtcctcttctagcctcatcccaaacattctctgtccccctttccccctttacaagcagctgtcagggaaccctaccatagaatgtaagttctgtgacacaggaatataagccagaggtgtatgcttcccttcagttgtaaaaggaaaagacattgtcctatgagtccctcctgttgtccagcaggactactggcatacccctggttttgggggtgtggactgggaagctcaggctctaagttaattaacaaagtggcatagtgaggcaggtagcagccaggatgcaggcatccagactcctgcccttctgggtgagggtggtttgggaagtgccctttttgtttctggggctgagaggccagtcatagacctgggattgagaagagcagccacaagcagcctacaagc

SEQ ID NO: 27164 - DNA, 1842 bp, Homo sapiens
acctttcttaaacaaaatgaagaggaagcttgtggtgtgaacagcagtgagaagcttgtagtgtgagcagcaaatatgaaaacttcctcatagacacactccctacattttgtgtctcctctgatgacactgagtttgctgcagctgtgtctgacttattgcagttagtgtcataaaggccaaggacttgtctttctctctccaggagtcagtaggtgggtgaagaggaggcaggtgtggattctggcagacagcgctatggcagtgggctggggccacagggacttgctgtgttctcagagatggcccagtgtcactgagtggggtgggtttgggaagtacccttttgtctctggggctgagaagctagtcccagacctggatgtgagaagaaagagcagccacagttccttattgcagtgcggggcttcccgtccagacctgagcgcctggtcagtctaaccacaaactctgcagatggagtaagcagccccagtgccctggccttaagggcctttggagaagtctgttctgtccatggctatgtcccctgtacccagagcagtctctgcacatagtatgtgctcagtgagtactggtgtattctagagagacctcttttggcctggaagccaaaagacctgagtgtgaatactacctgcagctgcttgtaggaaaatcaccggctttcccaagacctgatttctccttttcaaaagaatcagagggttagcgcctgcaggaaggtgatctcatgaagatgagcggagtgtgcagcacagcatggaggtgccccacagccaacggctcagccaggttggtgggtggggacaatttcctgagcatctcacagagacattcatctccctcctccccggaggaccctgcatgagcactcacagcgyttggcacctgccttcttggaaggttctcggagaaggagggtctggagcagaagattcagtgcccttgctgtcagtttcccagtgcatagccctcctccacagctgctggtggactgactgccaactcagatcagggagggatgaagagccagtcaggagtgttccagattgctacctgggaaggcagaaccaggaagggagagaaagaagggtcagagagtcaggtgggcctgggatccccgccgacagctgtggagccttaagcaaggtggtattaaactgtcccgggcctcagtttccttctttgtaagtggtgatcaatagaattttccttacagggtgttgcgagaaccatagtgaatcctaagtcataaacatagggctggcacttaataaaaatagtgattactcaaggtctggactgtcaccggggcagatggtctgaatggaagacacagagggagaagagctgttagaagagagagagtctaagtgttccaatgaagccgctgggcatccaggccccattgtcctcttctagcctcatcccaaacattctctgtccccctttccccctttacaagcagctgtcagggaaccctaccatagaatgtaagttctgtgacacaggaatataagccagaggtgtatgcttcccttcagttgtaaaaggaaaagacattgtcctatgagtccctcctgttgtccagcaggactactggcatacccctggttttgggggtgtggactgggaagctcaggctctaagttaattaacaaagtggcatagtgaggcaggtagcagccaggatgcaggcatccagactcctgcccttctgggtgagggtggtttgggaagtgccctttttgtttctggggctgagaggccagtcatagacctgggattgagaagagcagccacaagcagcctacaagc

SEQ ID NO: 27165 - DNA, 1842 bp, Homo sapiens
acctttcttaaacaaaatgaagaggaagcttgtggtgtgaacagcagtgagaagcttgtagtgtgagcagcaaatatgaaaacttcctcatagacacactccctacattttgtgtctcctctgatgacactgagtttgctgcagctgtgtctgacttattgcagttagtgtcataaaggccaaggacttgtctttctctctccaggagtcagtaggtgggtgaagaggaggcaggtgtggattctggcagacagcgctatggcagtgggctggggccacagggacttgctgtgttctcagagatggcccagtgtcactgagtggggtgggtttgggaagtacccttttgtctctggggctgagaagctagtcccagacctggatgtgagaagaaagagcagccacagttccttattgcagtgcggggcttcccgtccagacctgagcgcctggtcagtctaaccacaaactctgcagatggagtaagcagccccagtgccctggccttaagggcctttggagaagtctgttctgtccatggctatgtcccctgtacccagagcagtctctgcacatagtatgtgctcagtgagtactggtgtattctagagagacctcttttggcctggaagccaaaagacctgagtgtgaatactacctgcagctgcttgtaggaaaatcaccggctttcccaagacctgatttctccttttcaaaagaatcagagggttagcgcctgcaggaaggtgatctcatgaagatgagcggagtgtgcagcacagcatggaggtgccccacagccaacggctcagccaggttggtgggtggggacaatttcctgagcatctcacagagacattcatctccctcctccccggaggaccctgcatgagcactcacagcgtttggcacctgccytcttggaaggttctcggagaaggagggtctggagcagaagattcagtgcccttgctgtcagtttcccagtgcatagccctcctccacagctgctggtggactgactgccaactcagatcagggagggatgaagagccagtcaggagtgttccagattgctacctgggaaggcagaaccaggaagggagagaaagaagggtcagagagtcaggtgggcctgggatccccgccgacagctgtggagccttaagcaaggtggtattaaactgtcccgggcctcagtttccttctttgtaagtggtgatcaatagaattttccttacagggtgttgcgagaaccatagtgaatcctaagtcataaacatagggctggcacttaataaaaatagtgattactcaaggtctggactgtcaccggggcagatggtctgaatggaagacacagagggagaagagctgttagaagagagagagtctaagtgttccaatgaagccgctgggcatccaggccccattgtcctcttctagcctcatcccaaacattctctgtccccctttccccctttacaagcagctgtcagggaaccctaccatagaatgtaagttctgtgacacaggaatataagccagaggtgtatgcttcccttcagttgtaaaaggaaaagacattgtcctatgagtccctcctgttgtccagcaggactactggcatacccctggttttgggggtgtggactgggaagctcaggctctaagttaattaacaaagtggcatagtgaggcaggtagcagccaggatgcaggcatccagactcctgcccttctgggtgagggtggtttgggaagtgccctttttgtttctggggctgagaggccagtcatagacctgggattgagaagagcagccacaagcagcctacaagc

SEQ ID NO: 27166 - DNA, 807 bp, Homo sapiens
tcatcccagctaaactctccaggcttagccattacctctcatcttccccsacttaccccgcaaccccactcaactccaaactttcagctatgcttaattatttgcagttcccaggacataccacatttgttttctctctttctgagcctttgcatattttacacttaaccaacttcttcacctgaccaattctatgtgtcctttacaattcagtttagacattacctactccacagtctctcttgacagccatttcctacaactcctgatgttggttaagagaccctccatgacattctaattcatatcacactataactattttccttcatggatgaatgaatgaatgctaaaaagagctctcaaataaccacaatgagttagtgtaattgatccccaaagcaggctcttgaaaatgttggactgcatagtgttctcagaataaacgtataatttctgttggttagtttaaaatactgaaaatggactatctccttaatatttttgaggactctaagggtccagggaatccctgatgagaaccactagagaacatacgaagtgatttgtggaaaagaaaactgaaactgaaatccagagactttaagcgacattaccatggtcacatgttttcacatgaatgtaaaccccaaacgctgcttattttcagacttgaattttaaatttccatacaaaggcttcaagtggttctcacccactatagcagcctcttcaaccaaaagtgtgagtgagcttccttcaccagctggtagagacacaagtctttcccaaggcttgaagataaga

SEQ ID NO: 27167 - DNA, 558 bp, Homo sapiens
gagtctccagccccagtcaagccttcagatgactgcagcccacttgacagcttcacggtagccttatggaagagcctgagccataaccacccagctaagctgctcctgcattcccttgaaaaccatgtaagataataaatgtttgttgtttgaagtggctatgttttgagcataagttgttacacagcaatagataactaatatggtaatctttccaatagagctcttctttactttggagttaagtttttaagttttattaaaaggtcttttcattattttggaatatgtgtttacctgcatttaatatgtaaatggatcagatgttataaaatgttcaggtaaattaaatcccaccttcttttttagcttctgattttaacaaagagaaatgatttttctcatctactgaggtaccagaaacaatgarggtactgtaaggcctcaaagagtctaacagacctctagagttaggagtggggagtggctagattatgtcttgagatgttttcctcatttaaaatcatttaacataaacaaaaaagatggcattttaat

SEQ ID NO: 27168 - DNA, 1205 bp, Homo sapiens
tacttggatcagacgtggcgctgggcactggggcaagtacgagatgagcaggggcaggcttagaggagctctggctgcccgcagagagaggtttcttctattttttcagtacatgaacttttattcttcatcaagtgcttcatagagccatggagataagtgtgagacactataacagagcacagtacaaacccagggggcgagagtacaggaagacagaggaggaggcagtcagagggatcactgaagatgggtagttttctgtgtagaaaagatggagtgggacatttcaatcagaggtcactgcaagtgccgagtattcttagagggaagaagggcatttgggragcattgtatgattttctagggggcctgggggatggtgggagatggggcaggaatggaaagatggggatgggcctaagtgccaggaatgtggaccttatcttgagggtggagggaaactggtgaagtgatgttgtcagacatggattagaaaggtcattctggctgctgtgcaggaagagtcagagggaatgggagaggcagggagggcagttagaagctcatggctaaggtctgggtgagggcagagttgacggggagttagggggctgaatgatcagaggcagccgaacattttttgagcacttctcacaagtctcttactaggagatggacaaactactcatatcaacctttttcaaaggaggaaactgaggcacagagtatttaagtaacttatcaaagtcacacagctcatgagcatggagctggatggagctcaggtaggcacaccggagaccagcgtgttctttaccattctcttctggccttggtgaccagaatatacatccaagtttctgccaggagcagggataagtcacacatctctgtatcccctccagagttctgtatggggtaggcactcaaccaaggtcaattccacactccctgctgggccctgcaaaaggaccaggacagtcgagccacttgcattcctgctcagaggtcagctagtgtcagcaccacctgttatttggtccactttcttcttccagccctttgtgtgaactctgcacgctgtcctttagtgctggcgggcatggtctcggtgcccgtctccatcttttggccatgccagttgcctcctcatcaaactggagtctcccaagggcagagcctcagactctgcagaaagcctc

SEQ ID NO: 27169 - DNA, 512 bp, Homo sapiens
ttcattttttgastattttccactaaacttttgtagtagtacattttaaataatatttttccagtttaacatttgccctttaactttgttctagattttttccataaactcatttaaaaattttattagacaactctatcaaaattttgtttttgttttcacttttgatgttagtcagattttcatttattcttcagtatattctaggtgctgcgataaataatacagcaaccctactacccttaaaaagttctcctcagggttagaaaacaaagttcatgcctttaaaatcttggaaaaaatataaaatatccagtccaacccctccacagtgcaggtaaggggggggaaccaaaatcccagaagactgcctggttcctggtgaaagaagagtgcagtggcctaaccaggaagaggaagcagaggccctcactgccagactcaatgaaccagcccgtaaagccctttggtttcctgttctgtgaaatggggccaatacctactctgcattg

SEQ ID NO: 27170 - DNA, 1764 bp, Homo sapiens
cggaccccgagtgcactcgtgcacgccacactcacctcttcatctcagggtccccagcgctgcagcccatgagttggaggcattaagggagggtgatgaggccagcggtctgggctttctcttctcaccagtgcacccctgtgtgtcctactagagagcctgctttgctgccccaacttccctcagtaacagttcacaggtaaaccccttttctccacatgggccccacctgtttccgcccccagtgccatctgtccttttaattccttttcttctcccagagttcctgcctcccccatgtcctgaaagcttcgcatcaccctctctcccaaaggttggtaggtctcgaagcttctctggcgacattttcccagccccttccttgatctgtacatcaagactctttgtcctctctgcctacatctgctgccaggaagagaagtacgaactcagacgcccaagatgagaggggtggggaggaaggagtttgcggtgattctccattccccacaggtagttagggttttgcttttctttggttgctttcaagtacatgtattttttaattagacatggttcacacttcgagatttaatctctttatcattgagtctccatatggacccaaaaccccaaacccagctggtgggatagtgaactcttttatgagttcactatcataaaagagcgttagttccactctgaccttgaattacatgacaaagcttcttccaatcactgggtgttggtaggatccatgccaaagtaccatgctctaattcctgagtaatacaaccatatattttagatcccatctacataattctactgggagacacgttatcacttcttcccacctcatcacttgctcccttctctaactgtggagtggagaaattggagcactgtctctgtggcctacagatgtccttgggtagctgctatacccggtcagagaagtggggaaaagctcgttcatggatgaccaaagaggccttgttgaaacactatcgtaatttactagaaaagttccagtaccatattggcagtcgtgttaaagagtaaagtgccacccacagtatttgacacaggcatgattcagccatcagtacacccataccttcagcattcttctccaagacccaaataaaactaccctactcaccttccagtcatgcagttatttactgacagcatagaaaggattatcctataaatccattgttgggaaacctcgcagacctgatcacctcatgtgcttgcctgggggacaggctgagcaaacggcaggaaactgccccaggcccgggcaactaaaggcaagagggattggcttggctgactcagtcactcctcaccctgggtgccagtccacttacagggccgtgaaagtctcccctcccaaaatctaccaggcctggtcaatagcttcatgtgttggagactgctggcagtcaattgccccttcttccatattaatagagtgtaaactaagcatgggctgctcaggaagagacaacatttcccagacacccttgaggccaggtgtggccaggtgactaagttgctgcgtgactgaggaatgaacaacttccgtcttattgctcaaaaggaaattgcttctggacttctgctgtttgtccttctctcggttggaaagccarcgtgcccagttttgaccaggctcgtgaagaccatgatctaacgcaggggtcttagagccttttgtgccatgaactgcttatagtgtctggtgaaacctat

SEQ ID NO: 27171 - DNA, 566 bp, Homo sapiens
atgggtaagttaagttagaatttttaactactgttaattcacctctttaaaaaggtgaatagcataaatgctggcatcctttagctgtaaatgaaatacgatctgttccttcatgatctggccctgttgtctctcatctgctatcccaccccacctcagatggcatttctygaggacaaggaccttgccctatttatgtctgcgtatctatcactggcataatgcctgacacctggagaataagcattgtttcatagaaattaagcattcatctaagtatttgtttggtgaatattactaaccttttaagggttgcacttgtgccacatctaaggatatgaaaacaaaaagacacatgactttctctcatgggcccctacaaaacagtaaattacattatggttgggctacaacaggggtacacaggagtacccacggaagtagaagaaaaacagtatctgcctctcctcagagagacaatgtttgaagggagacttaaataaaaaaacaggttaggctgggcacagtgggtcatgcctgtaaacctagcactttgggaggccaaa

SEQ ID NO: 27172 - DNA, 566 bp, Homo sapiens
atgggtaagttaagttagaatttttaactactgttaattcacctctttaaaaaggtgaatagcataaatgctggcatcctttagctgtaaatgaaatacgatctgttccttcatgatctggccctgttgtctctcatctgctatcccaccccacctcagatggcatttcttgaggacaaggaccttgccctatttatgtctgcgtatctatcactggcataatgcctgacacctggagaataagcattgtttcatagaaattaagcattcatctaagtatttgtttggtgaatattactaaccttttaagggttgcacttgtgccacayctaaggatatgaaaacaaaaagacacatgactttctctcatgggcccctacaaaacagtaaattacattatggttgggctacaacaggggtacacaggagtacccacggaagtagaagaaaaacagtatctgcctctcctcagagagacaatgtttgaagggagacttaaataaaaaaacaggttaggctgggcacagtgggtcatgcctgtaaacctagcactttgggaggccaaa

SEQ ID NO: 27173 - DNA, 533 bp, Homo sapiens
gaacagttagccatatcattaattgatttatgttttactyctcagggaggtcacttacagaggtcacaaatatgaaattatagaatcctggcttctccccccatctcttttatttacatgctgggtggccttggttgagtcacttctcagagtatcagaaaagcttcatctataagccaagggtattcataaattcttcattcaatcattgtgtctctgtgtgtgtgtctgtgtgtgtgtgagagagagagaaagacagagagggagagagagacagagacagatacatacagagacagagagagagacacgagagagacagagacagagaaatgattcagataatgattgtaagctccttgagaacagagcttttgtttaataggctcaaatcttcaggatttatcagcactatttgatgaatcagcgagtcaagtacttggaacaaaaattgccacccagacagttagtaggtgactgtaatatttattctagttccaacgatcctgtaaaatcccccttagacttttgga

SEQ ID NO: 27174 - DNA, 533 bp, Homo sapiens
gaacagttagccatatcattaattgatttatgttttactcctcagggaggtcacttacagaggtcacaaatatgaaattatagaatcctggcttctccccccatctcttttatttacatgctgggtggccttggttgagtcacttctcagagtatcagaaaagcttcatctataagccaagggtattcataaattcttcattcaatcattgtgtctctgtgtgtgtgtctgtgtgtgtgtgwgagagagagaaagacagagagggagagagagacagagacagatacatacagagacagagagagagacacgagagagacagagacagagaaatgattcagataatgattgtaagctccttgagaacagagcttttgtttaataggctcaaatcttcaggatttatcagcactatttgatgaatcagcgagtcaagtacttggaacaaaaattgccacccagacagttagtaggtgactgtaatatttattctagttccaacgatcctgtaaaatcccccttagacttttgga

SEQ ID NO: 27175 - DNA, 533 bp, Homo sapiens
gaacagttagccatatcattaattgatttatgttttactcctcagggaggtcacttacagaggtcacaaatatgaaattatagaatcctggcttctccccccatctcttttatttacatgctgggtggccttggttgagtcacttctcagagtatcagaaaagcttcatctataagccaagggtattcataaattcttcattcaatcattgtgtctctgtgtgtgtgtctgtgtgtgtgtgagagagagagaaagacagagagggrgagagagacagagacagatacatacagagacagagagagagacacgagagagacagagacagagaaatgattcagataatgattgtaagctccttgagaacagagcttttgtttaataggctcaaatcttcaggatttatcagcactatttgatgaatcagcgagtcaagtacttggaacaaaaattgccacccagacagttagtaggtgactgtaatatttattctagttccaacgatcctgtaaaatcccccttagacttttgga

SEQ ID NO: 27176 - DNA, 533 bp, Homo sapiens
gaacagttagccatatcattaattgatttatgttttactcctcagggaggtcacttacagaggtcacaaatatgaaattatagaatcctggcttctccccccatctcttttatttacatgctgggtggccttggttgagtcacttctcagagtatcagaaaagcttcatctataagccaagggtattcataaattcttcattcaatcattgtgtctctgtgtgtgtgtctgtgtgtgtgtgagagagagagaaagacagagagggagagagagacagagacagatacatacagagacagagrgagagacacgagagagacagagacagagaaatgattcagataatgattgtaagctccttgagaacagagcttttgtttaataggctcaaatcttcaggatttatcagcactatttgatgaatcagcgagtcaagtacttggaacaaaaattgccacccagacagttagtaggtgactgtaatatttattctagttccaacgatcctgtaaaatcccccttagacttttgga

SEQ ID NO: 27177 - DNA, 522 bp, Homo sapiens
tgggctcactgcaagctccgcctcccgggttcacaccattctcctgcctcagccattctacggcctcccgagtagctgggactacaggtgcctgccaccacgcctggctaattttttgtatttttagtagagacggggtttcaccgtgttagccaggatggtctcaatctcctgacctcatgatccgcccgccttggcctcccaaagtgctgggattacaggcgtgagccaccgcgcccggcccacatttgcttctttctgtcagtgagctctttctaccattgtgcccctccaacttctggtctgcctgtgattgcagccctaggctgcccaggcatctggtgcccgcaggtcacactccagttcccccaaacccagtgaaaccagcaacaacacagcctttactagaatgtaataatatttccattttgcacttttgagacagcaaattctcaggatctaacggtccctcatgttgatctatattgctctcacatacmgtctgactacaaatcaaggatg

SEQ ID NO: 27178 - DNA, 1303 bp, Homo sapiens
tttttgaaacaggaatatagaggaaactcatcattgtagcagaacaagcacttgatttggagtcagaagaaaattgggttagaatcttaattgtccagcttactggtaatttaaatttgtgaaagttactaaaccagttggtttataatctataaaggagccatatggataccaaactcaaagactctgttatgtgtgctgattggtgattggtaagctttgtgactggcacatagctagaggtaattatcagtcacatctgagaataggcatatgagattcaaatattttatctctaacagtgctcaaaaatgtaatagtgaaaataccaactgaaattagatataagcagaaatcaaaagtaatctatttatctcatagcacatggggtatatggattgacaggcatgtgctaaatttaataatgtctttcaattcaattcaattcaagtattgaattaaattaaattaaatgtartcataggggaaaatggtagcatagaaaatcttcctaaattcctaaaacaactgagtaaccaaaataaacaaatgtggaaaattcctattagtactgattttgttatcagttggattagactgaagtaacaagtaacacccaaatctcaatggcttacaacaggtaagtaagctttcattcatattaaatattggctgcagaccaggcatggtggctcacgcctataatcccaaaacttcgagaggacaaggtaggaggatcacttgaagccagtagtttgagactagtctgggaaacatagcagcaccctatctgtgcaaaattaaaaaaaaaaaaattagccaggcatggtggtgctcacctgtagcctcagctacgtggactgaggcaggaggatcacttgagcccaggagttcaaagttacagtgagccatgtttgcatcaccatactccatcctgggtgacagactgagatcctgtctctaaacacaaaacacaaaacaaagcaaacaagaaccaaatattgtctgcagtttggggtggctctgcttcatttcatttttacttgtagatctggattcacatctgaggagacaagaggaaaaaagtgtgaggaaaaaatatctcattatacctcctaaaacatatgctcagaaatggtcctgagaaacttatcaaactaatattaattttattttcatttcattagccaaatcaactcagatagtcaactagaaaacaggattccattctattagaaaaccacgggcctgaagaatatgagaccatttgggggaatagagaatatacctaatgaatactcta

SEQ ID NO: 27179 - DNA, 1303 bp, Homo sapiens
tttttgaaacaggaatatagaggaaactcatcattgtagcagaacaagcacttgatttggagtcagaagaaaattgggttagaatcttaattgtccagcttactggtaatttaaatttgtgaaagttactaaaccagttggtttataatctataaaggagccatatggataccaaactcaaagactctgttatgtgtgctgattggtgattggtaagctttgtgactggcacatagctagaggtaattatcagtcacatctgagaataggcatatgagattcaaatattttatctctaacagtgctcaaaaatgtaatagtgaaaataccaactgaaattagatataagcagaaatcaaaagtaatctatttatctcatagcacatggggtatatggattgacaggcatgtgctaaatttaataatgtctttcaattcaattcaattcaagtattgaattaaattaaattaaatgtaatcataggggaaaatggtagcatagaaaatcttcctaaattcctaaaacaactgagtaaccaaaataaacaaatgtggaaaattcctattagtactgattttgttatcagttggattagactgaagtaacaagtaacacccaaatctcaatggcttacaacaggtaagtaagctttcattcatattaaatattggctgcagaccaggcatggtggctcacgcctataatcccaaaacttcgagaggacaaggtaggaggatcacttgaagccagtagtttgagactagtctgggaaacatagcagcaccctatctgtgcaaaattaaaaaaaaaaaaattagccaggcatggtggtgctcacctgtagcctcagctacgtggactgaggcaggaggatcacttgagcccaggagttcaaagttacagtgagccatgtttgcatcaccatactccatcctgggtgacagactgagatcctgtctctaaacacaaaacacaaaacaaagcaaacaagaaccaaatattgtctgcagtttggggtggctctgcttcatttcatttttacttgtagatctggattcacatctgaggagacaagaggaaaaaagtgtgaggaaaaaawatctcattatacctcctaaaacatatgctcagaaatggtcctgagaaacttatcaaactaatattaattttattttcatttcattagccaaatcaactcagatagtcaactagaaaacaggattccattctattagaaaaccacgggcctgaagaatatgagaccatttgggggaatagagaatatacctaatgaatactcta

SEQ ID NO: 27180 - DNA, 594 bp, Homo sapiens
aacccagatggggtttcatatttgtttaatgggctttatgttcagcatgtgtgttaaataattggtttctcaaaagtgaaaaaaaaatgggtctccctttgtccccttcagtcagtaattttttttcttcctcctttataataagtcccaggtttattattagctcttttgtgacactctgtggcctctattctgcaataactcacttgagcatggagttgctgccaggcctctggccacacggtaatagctcaccacttttgtcatcatctggtgttcaattttgatggcaaggggacacatcctgccaaatatatcagtccatgctctggtctcattttaaaagattttcaggttgtagcaacaaaagctgtacttttggcataaaactagttcaaacttaaaccaatccccaatgtattggttaccagtcaccaatgtcaggaatttaccctaaagagtggccatattaggacaatacttttcgattttcttamaagtaattcaatttatcatagataatgacagatacgattcaaaaatacttacactcaatgccattttaaaaaaagtaatttttctaaaattctgtca

SEQ ID NO: 27181 - DNA, 534 bp, Homo sapiens
ttacgttatcctatgttttattttatattgtctgtttttktcccattagaataagttcttaacatgctaatgatacttatttatattatttatctgatatcttcaacagctgtagcctattgcgctctggttgtcatgattgtattgtctccctagactgtgttcccccttgccttttacatgctgctgtggtttcattatgtgtttctttctaaaatttatgttgaaactcaactctcattttggtgatattaagcaatgggtctttttgagaagtgctctattattctaaaataataaaagttcagtgcaaatattgtttcaaaataagttcaaactgcttcaaagtaaaattaatgttgatgcttacagcttttaaaaatattaaattcaatggtatatttatagagtattatatgtactaaatatctaaatacagtatgtaatattaaaaaatgtatgtatttctacaaagtgcgcaaattgggaacaccttgatttttcacatgaatacatataaaactgaaagtatct

SEQ ID NO: 27182 - DNA, 534 bp, Homo sapiens
ttacgttatcctatgttttattttatattgtctgtttttttcccattagamtaagttcttaacatgctaatgatacttatttatattatttatctgatatcttcaacagctgtagcctattgcgctctggttgtcatgattgtattgtctccctagactgtgttcccccttgccttttacatgctgctgtggtttcattatgtgtttctttctaaaatttatgttgaaactcaactctcattttggtgatattaagcaatgggtctttttgagaagtgctctattattctaaaataataaaagttcagtgcaaatattgtttcaaaataagttcaaactgcttcaaagtaaaattaatgttgatgcttacagcttttaaaaatattaaattcaatggtatatttatagagtattatatgtactaaatatctaaatacagtatgtaatattaaaaaatgtatgtatttctacaaagtgcgcaaattgggaacaccttgatttttcacatgaatacatataaaactgaaagtatct

SEQ ID NO: 27183 - DNA, 534 bp, Homo sapiens
ttacgttatcctatgttttattttatattgtctgtttttttcccattagaataagttcttaacatgctaatgatacttatttatattatttatctgatatcttcaacagctgtagcctattgcgctctggttgtcatgattgtattgtctccctagactgtgttcccccttgccttttacatgctgctgtggtttcattatgtgtttctttctaaaatttatgttgaaactcaactctcattttggtgatattaagcaatgggtctttttgagaagtgctctattattctaaaataataaaagttcagtgcaaatattgtttcaaaataagttcaaactgcttcaaagtaaaattaatgttgatgcttacagcttttaaaaatattaaattcaatggtatatttatagagtattatatgtactaaatatctaaatacagtatgtaatattaaaaaatgtatgtatttctacaaartgcgcaaattgggaacaccttgatttttcacatgaatacatataaaactgaaagtatct

SEQ ID NO: 27184 - DNA, 1613 bp, Homo sapiens
tctcttgataatgtcttatagggttccttttaaaaaaagcaaatgtaatgagccaactcatcataccagaggtctcatgaagcaaaccaaaaaaatgcatttatctctttcgttgtacttaatgtaaattcttagcgtggagacttcattttgatttgtctttgttgtgcatcttgcctgtgtcggtaacattggacttacatggcaggctcccaaaggacacttctcatttcatatcaccatacaagtgataagtaacagtgttcttagagatgagcttttcaattagaggaggttctatatgaatgtgagaaaggatatggattcttcatggtcattttaaagacattttgaggcaccttccttttattctctctgagcaataatagcagacatttacccattaatggagcttttgctgtgtgacaggtatcatgctatgcatctgactcacagtataccatttactcttgattataaactgtgaggtacacactatagtttctactattttaaaaatagtaaaaacaatagtatgttttgtagaaatagcatgatggaggggttatcgcccaaagtcatgaagttaagggaggaagtgccaacattaaaccaagaagagaaaccaccaaataaggcttggtgcagtggctcatacctgtaatctcagcactttgggaggccaaggcaggaggatcattgagatcaggagtttgaaaccagcctgggcaacacagtgagattgagtctctacaaaaaattagctgggtatggtggtgtgtacctgttggggggctgagacaagaggatcccttgagcccaggagtttgaggctgcggtgagataagaaggtgccatctcattctagcctgsctgacagagtgacagcttgtctcttaaaacgacaacaacaaacaaacaaaaaaatgaaatagggagtctctaacactatacacaatacttctcctaagcacattccatttgcaatattattctaaatgtcatcctccaaatctcttgtagaacgcaaaagattcttcaaaatcaaactgtgtccggaattggtgggttcttggtctcactgacttcaagaatgaagccacggaccctggcggtgagtgttacagctcttaaggtggcgtttctggagtctgtcccttctgatgttcagatgtgttcggagtttcttccttctggtgggttcgtggtctcgctggctcaggagtgaagctgcagatcttcacggtgagtgttacagctcgtaaaagcagcgtggacccaaaaactgagcagtagcaagatttattgcagagcgaaagaataaagcttccacagtggggaaggggacccgagcgggttgccaatgctggctcgggcagcctgctttttattctcttatctggccccacccacatcctgctgattggtagagccgagtggcctgttttgtcagggcgcttattggtgcgtttacaatccctgagctagatacaaaggttctccacctccccatcagattagttagatacagagtttccacacacaggttctccaaggccccaccagagcagctagatacagtgttgattggtgcattcacaaaccctgagcta

SEQ ID NO: 27185 - DNA, 604 bp, Homo sapiens
gtttcaaatatggcactgaaaaacaaaataaaataaacaytcaatttttatttaaaatggtgggcaatttactttcttttttgtttgggatctgattcaagagcctcaattcagcttattgcagaactaactaaactaaacctcaaaggaaaaattttaaaaatgatttttatagcaatgacatcattatataaaatgttggcatttcatattttccaaacagaaacttggaaataacagaatacaagttaaataaaacaaattgaaactaatccaattctctgtttttctttccctttttaaaaaccaagctttttattgccagcttttactttgcataataatatatgatgaattgtccaagaaagacccagtgggtacatttctcttagaaataagcctctctatgcaataggaggccaagttctagggcaacatacttatataatcatgtaagattttccttattgctaacaattgaccaacctgggcatttgtcaaatatgtaaacacatggaggtcactggtcaccagaggattgaaaacacaaatcactctattcatatccatccctagttctagaaaaacaataccaaattaaagc

SEQ ID NO: 27186 - DNA, 542 bp, Homo sapiens
cccagggaaagaatgtgtcaggaatgtgaagaaactattttctattttgtccccactaagagcgtatatatgagttttctcttggatagaaaatagagaccttatgtgagtctacatgacagccaagaaattgttgtgaagaaaatgggctgattgggcttgtgttagtccattctcatgttgctaataaagacctacttgagactgggtaatttataaaggaagaaggttgaatggactcacagtttcgcacagctggggaggsctcacaatcatggcaaaagatggaggaagaggaaagggacttcttacatggcagcaggcaagagagcatgtgcaggagtgccccctttataaaaccatcggatctcatgagacttattcactatcacaggaacagcatgcgaaaacccaccccatgattcatttacctcccacccggtccctctcatgatgcgtgggaattatgggagctacaattcaagatgagatttgggtggggacacagctaaaccatatcagagctgatgctgggttctcat

SEQ ID NO: 27187 - DNA, 2225 bp, Homo sapiens
tgcatatagaaatgaaggttgtatggagaggaattactttatacttcttctcattgctagaagcctgagtgacccaggagatagaagggttactgtctcagcgcaatctcctttattggtgctctatcttaagtgcgtgtatgaaaagctaatgagggcctcctttattagtgcagaagcccaatttcttggggtgattatgtcctatgaaagggcccagaaagactgccagggcattggaaattattgctttctgaactccatatagctatggcattccttttcaaaagcacatgtctgagaggttgttcatgttctcaaaagtgtgataccagcttagactcaagacttttcacagtctggccccaaaccaacagctaaatcttatccccagccttctatctcccgaagttgtttggtggtgcttgatgcagttagcactttcctgcttcctcatggatcaaaaggcttaatctgtgagcccacagtcttctgaaggaggagactcaatatctctaccttcctgtctccaattttgtataatcattctgtttctgggttttgggaatgcagaatcgagatatagggagagaagcaagtgcatgtgtggaagaaaaggggataaagaggaaggtctgagtcacctcaatcatgggccacgagaaaagaaagcacaggtgaagagggtcaatattcacaggcttgcagtgagagggcacagagaaagcagaagagggagagcagggtgaaataaatggagaggtgggagatcagtcttctcagatcggagaatcagtttcttcaagttgtaggaagctggaaaactggacaccccagggtattttttacaagagttgctgtgtacaatgtgcttagatcttcattaatgtttttgaagagctgcaagtcaaaaaggcaattcttgcttctatcatgcccctctgagtgtggctcatcccaggacggagccacagagtcacagctggccattgcttatgctccaactctaccttaaacactcttctttttttgtcctaggcaataagttgctttcccttcaaggacaaactcaaaggtgatttccttggagaagtttgcacagcattatcctacctgagtccaaagcaatagacttccctaatcactccagaagcacttttaaaatgacctcagttctaattcrtatcacagtctggcacattgtgtatgaggatacatttatccttgtcatatatctagcttggtcatgtttgtatccctagcatctagcaaggtgccttacatggtgcatatgaccaggacatattgcacagagtagaatgaattcagatgcagtctggtcctaatcaatccaaatatccaagtttgtactgtatactggccttgattcattatcattcacgtacaaggcttaaaatattttacacaactggccaggatcagtggctcacgcccataatcccagcactctgggacgctaaggcaggcggattacaaggtcaggagtttgagaccagcttggccaatatggtgaaaccctgcctctactaaaaatacaaaaaaattagcaggtcatggtgatgcatgcctgtaatcccagctacttgggaggctgaggcaggagaattgcttgaacctgggaggtggaggttgcagtgagccaagatcatgccactgcactccagcctgggtgacagagcgagactctgtctcaaaaaacacaaacaaaaaatattttacacaactagaataaagggtgttagtaaaattctacttttttccttcattttatacacaagatgacagatgctgatgtgacaatttataagtctgaagtagtcttttttattgtctctggtctgtttcatacatgtctgagcctgttatgtgggagagctatataaaggaaacaaaaaatatttaaaagatatcatcccattttatttggtttcattattaagaagatttgtatacccacccctgttcaaagttaaatgagcttgctcaaatcctttgggcacttaactggaatataaataaagaaggaacactctctctgttcttgttggaaaaaatattcgtgtagtgccaggtttgtgatagtaaaatcaagtgattcatcagctcattcatagttactgctacccaaactctgcttttagtttaatggtgtagatagttcagaactgttacagtttgaattgtacatagtaaaatcaagtgat

SEQ ID NO: 27188 - DNA, 2225 bp, Homo sapiens
tgcatatagaaatgaaggttgtatggagaggaattactttatacttcttctcattgctagaagcctgagtgacccaggagatagaagggttactgtctcagcgcaatctcctttattggtgctctatcttaagtgcgtgtatgaaaagctaatgagggcctcctttattagtgcagaagcccaatttcttggggtgattatgtcctatgaaagggcccagaaagactgccagggcattggaaattattgctttctgaactccatatagctatggcattccttttcaaaagcacatgtctgagaggttgttcatgttctcaaaagtgtgataccagcttagactcaagacttttcacagtctggccccaaaccaacagctaaatcttatccccagccttctatctcccgaagttgtttggtggtgcttgatgcagttagcactttcctgcttcctcatggatcaaaaggcttaatctgtgagcccacagtcttctgaaggaggagactcaatatctctaccttcctgtctccaattttgtataatcattctgtttctgggttttgggaatgcagaatcgagatatagggagagaagcaagtgcatgtgtggaagaaaaggggataaagaggaaggtctgagtcacctcaatcatgggccacgagaaaagaaagcacaggtgaagagggtcaatattcacaggcttgcagtgagagggcacagagaaagcagaagagggagagcagggtgaaataaatggagaggtgggagatcagtcttctcagatcggagaatcagtttcttcaagttgtaggaagctggaaaactggacaccccagggtattttttacaagagttgctgtgtacaatgtgcttagatcttcattaatgtttttgaagagctgcaagtcaaaaaggcaattcttgcttctatcatgcccctctgagtgtggctcatcccaggacggagccacagagtcacagctggccattgcttatgctccaactctaccttaaacactcttctttttttgtcctaggcaataagttgctttcccttcaaggacaaactcaaaggtgatttccttggagaagtttgcacagcattatcctacctgagtccaaagcaatagacttccctaatcactccagaagcacttttaaaatgacctcagttctaattcgtatcacagtctggcacattgtgtatgaggatacatttatccttgtcatatatctagcttggtcatgtttgtatccctagcatctagcaaggtgccttacatggtgcatatgaccaggacatattgcacagagtagaatgaattcagatgcagtctggtcctaatcaatccaaatatccaagtttgtactrtatactggccttgattcattatcattcacgtacaaggcttaaaatattttacacaactggccaggatcagtggctcacgcccataatcccagcactctgggacgctaaggcaggcggattacaaggtcaggagtttgagaccagcttggccaatatggtgaaaccctgcctctactaaaaatacaaaaaaattagcaggtcatggtgatgcatgcctgtaatcccagctacttgggaggctgaggcaggagaattgcttgaacctgggaggtggaggttgcagtgagccaagatcatgccactgcactccagcctgggtgacagagcgagactctgtctcaaaaaacacaaacaaaaaatattttacacaactagaataaagggtgttagtaaaattctacttttttccttcattttatacacaagatgacagatgctgatgtgacaatttataagtctgaagtagtcttttttattgtctctggtctgtttcatacatgtctgagcctgttatgtgggagagctatataaaggaaacaaaaaatatttaaaagatatcatcccattttatttggtttcattattaagaagatttgtatacccacccctgttcaaagttaaatgagcttgctcaaatcctttgggcacttaactggaatataaataaagaaggaacactctctctgttcttgttggaaaaaatattcgtgtagtgccaggtttgtgatagtaaaatcaagtgattcatcagctcattcatagttactgctacccaaactctgcttttagtttaatggtgtagatagttcagaactgttacagtttgaattgtacatagtaaaatcaagtgat

SEQ ID NO: 27189 - DNA, 600 bp, Homo sapiens
cttgaaccaatgaaatgagtgtgaacaggaggggatagtatcgatggaattgattcaagatacacaaatacaggtggtaattgaaaatagagctgagaaaacaaaatatgagacctaaactaataaaaaattcttctgctcagttctctattaatgtaaaaatgtagttggatgaagaaaatttgacttgatttatgagagttttctgtatatggaggaaatgttttgagaagtgggtttggaaagaaggtagatgtggtagagcagaaccatgagtgcaagtatgggaaagaagamatttgggagcacaaacaagcatggtaaaaatttggaaaaccatgctataaaatatacaaattctccttttcatttattaggttttctgtgccttccatgttaccaagaatgcttttgtgagtggagtattggtaggttaatacaacaagagtttaaaagtctaaggtaaggtatgcagaggaataaaaaatagtcttcacacagaaatggctagcataataataataagtacacaatacaaaactttaagtttttgatttattcattctaaaaacaattactgggaatctatttcatactaag

SEQ ID NO: 27190 - DNA, 2512 bp, Homo sapiens
aatgccctcccctttctacctggttaattctcactcgtcctccaagcatcattccttctgagaagatggctgtcactcattgcaccaagataacaaggatcaaatatagaggaaccaagaaaggaaaagagaatgaaggaagaagtgactgtggaggcaggatgggcaagacttaatgaccttagggattaagaatcactgattggatcacagaggctttgccaaacgcaaacttatttacatttatttgactatttatcataatttacatcatttacctagtacatcttattcatacttatatactatacatatattatatactagatattaaagtttgtcttcaacactctaatgtcctttcttcatctaactgcatgctgcttagaaacaaattatattgggctgggcacagtggctcatgcctgtaatcccagcactttgggaggacaaggtgggtagatcacctgagttcgggagtttgagaccagcctgaccaacatggagaaaccctgtctctaataaaaatacaaaattagccaggcacagtagtgcatgccggtaatcccagctactcaggaggctgaggcaggggaatcgcttgaacctgggaggtggaggttgcagtgagccgagatcgtgccattgcactccagcctgggcaacaagagtgaaactctgcccaccccaaaaagaaagaaagaaagaaagaaagaaagaaagagagagagagagaaagagagagagaaagagagagagaaagagagagagaaagagagagagaaagagagagagaaagagagagagaaagagagagagaaagaragagagagaaagagagaaagaaagagagaaagaaagagagaaagaaagaaagaaagagaaacagaaaaagaaagagagaaagaaagaaagaaagaaagaaagaaagaaagaaagaaagaaagaaagaaaagaaaaagaaagagggaaagaaagaaatcatattcatccttctatgctacagttcacctagcccaaagccttgtcggtggtcagcattatttctaaataaatatatattcaatgaatgaatgaataaattgttgctgtggtttgctgtttaagtttccaggtctgttagcaaaccccagacttgtaaaatacttgaagggctgtgtacactccttctttgtatctttctttgtgcactgctaaatcttaagcatatgatagggttcaggacatttctgaggaagaaaggaatgacgagtgaatgatttcaggctatttctcaaggagaatgaggagtttattcaagccaccaccagtttctatgagtataatgaatgcattcaaatgtaagtctacacaaaacctatttaggtaaggcaggcagccacccaacctggaaggacattagatagagaggattattgctttatcatcggtgtcacactcacagctgtgaactcgtgtgcagcatagttctataacctcagggggactgtcagctgtggatgctgaaaacacagttctgccaccaacagcccctttctattacaatgaatgaccctcctgtagttggtggttgcagtttcagccatggtggtagtcagggtttgtaacacatctctacctttcactcacaccatctccccaacacattcccaagtgagaggcagcagctagctcttcaacaaggtagtttccctataaatctcagcaggaagcagcctggtgaaatgggaagaacacaagattgagggccaactcttgcattctgctcccaaatatttaacaactccatgttgttatatgtaacaactccatggagactttaggaaagaggaaggcaactagtggtttgctgagcacctattctgtgccagacactttgtatgtcatttatttaatcagcatcatagctttaccttatagttaacattgcctctttttcacagctggggcaacagaggctgaacaacttgcccaaggccaaatgtaggatgtatagagaatttgtacccagtttttcgggtaaactatttcccttttctctgagcctcaattttacctataaaagaaagagattaggtgtacatgatttaacacctgcataatttttctagaaacttttaacctattccctgatttgtaaccattaccacaggaagtaacactgtagcaagaagtaaaacagaaactgtcaaaaatagacaaaatgaagagatatactaaattgagttcatctctttgaatattggattatggagaaggcaggtaatcttcatacatcaaccttgtgtattgaattaaagatatttttaataaattcaaatataacattttagtgattcaacaaataattttttttcagattttaaacattatgctatcctattgtttagtttgtccaaaagatatatgatttattgaagctattaatgcacaataatctcacttttgtgcctagattgggaccctttaagaaaaaagtttgaggactggtgaatggacacttttcaatgca

SEQ ID NO: 27191 - DNA, 2512 bp, Homo sapiens
aatgccctcccctttctacctggttaattctcactcgtcctccaagcatcattccttctgagaagatggctgtcactcattgcaccaagataacaaggatcaaatatagaggaaccaagaaaggaaaagagaatgaaggaagaagtgactgtggaggcaggatgggcaagacttaatgaccttagggattaagaatcactgattggatcacagaggctttgccaaacgcaaacttatttacatttatttgactatttatcataatttacatcatttacctagtacatcttattcatacttatatactatacatatattatatactagatattaaagtttgtcttcaacactctaatgtcctttcttcatctaactgcatgctgcttagaaacaaattatattgggctgggcacagtggctcatgcctgtaatcccagcactttgggaggacaaggtgggtagatcacctgagttcgggagtttgagaccagcctgaccaacatggagaaaccctgtctctaataaaaatacaaaattagccaggcacagtagtgcatgccggtaatcccagctactcaggaggctgaggcaggggaatcgcttgaacctgggaggtggaggttgcagtgagccgagatcgtgccattgcactccagcctgggcaacaagagtgaaactctgcccaccccaaaaagaaagaaagaaagaaagaaagaaagaaagagagagagagagaaagagagagagaaagagagagagaaagagagagagaaagagagagagaaagagagagagaaagagagagagaaagagagagagaaagaaagagagagaaagagagaaagaaagagagaaagaaagagagaaagaaagaaagaaagagaaacagaaaaagaaagagagaaagaaagaaagaaagaaagaaagaaagaaagaaagaaagaaagaaagaaaagaaaaagaaagagggaaagaaagaaatcatattcatccttctatgctacagttcacctagcccaaagccttgtcggtggtcagcattatttctaaataaatatatattcaatgaatgaatgaataaattgttgctgtggtttgctgtttaagtttccaggtctgttagcaaaccccagacttgtaaaatacttgaagggctgtgtacactccttctttgtatctttctttgtgcactgctaaatcttaagcatatgatagggttcaggacatttctgaggaagaaaggaatgacgagtgaatgatttcaggctatttctcaaggagaatgaggagtttattcaagccaccaccagtttctatgagtataatgaatgcattcaaatgtaagtctacacaaaacctatttaggtaaggcaggcagccacccaacctggaaggacattagatagagaggattattgctttatcatcgstgtcacactcacagctgtgaactcgtgtgcagcatagttctataacctcagggggactgtcagctgtggatgctgaaaacacagttctgccaccaacagcccctttctattacaatgaatgaccctcctgtagttggtggttgcagtttcagccatggtggtagtcagggtttgtaacacatctctacctttcactcacaccatctccccaacacattcccaagtgagaggcagcagctagctcttcaacaaggtagtttccctataaatctcagcaggaagcagcctggtgaaatgggaagaacacaagattgagggccaactcttgcattctgctcccaaatatttaacaactccatgttgttatatgtaacaactccatggagactttaggaaagaggaaggcaactagtggtttgctgagcacctattctgtgccagacactttgtatgtcatttatttaatcagcatcatagctttaccttatagttaacattgcctctttttcacagctggggcaacagaggctgaacaacttgcccaaggccaaatgtaggatgtatagagaatttgtacccagtttttcgggtaaactatttcccttttctctgagcctcaattttacctataaaagaaagagattaggtgtacatgatttaacacctgcataatttttctagaaacttttaacctattccctgatttgtaaccattaccacaggaagtaacactgtagcaagaagtaaaacagaaactgtcaaaaatagacaaaatgaagagatatactaaattgagttcatctctttgaatattggattatggagaaggcaggtaatcttcatacatcaaccttgtgtattgaattaaagatatttttaataaattcaaatataacattttagtgattcaacaaataattttttttcagattttaaacattatgctatcctattgtttagtttgtccaaaagatatatgatttattgaagctattaatgcacaataatctcacttttgtgcctagattgggaccctttaagaaaaaagtttgaggactggtgaatggacacttttcaatgca

SEQ ID NO: 27192 - DNA, 2512 bp, Homo sapiens
aatgccctcccctttctacctggttaattctcactcgtcctccaagcatcattccttctgagaagatggctgtcactcattgcaccaagataacaaggatcaaatatagaggaaccaagaaaggaaaagagaatgaaggaagaagtgactgtggaggcaggatgggcaagacttaatgaccttagggattaagaatcactgattggatcacagaggctttgccaaacgcaaacttatttacatttatttgactatttatcataatttacatcatttacctagtacatcttattcatacttatatactatacatatattatatactagatattaaagtttgtcttcaacactctaatgtcctttcttcatctaactgcatgctgcttagaaacaaattatattgggctgggcacagtggctcatgcctgtaatcccagcactttgggaggacaaggtgggtagatcacctgagttcgggagtttgagaccagcctgaccaacatggagaaaccctgtctctaataaaaatacaaaattagccaggcacagtagtgcatgccggtaatcccagctactcaggaggctgaggcaggggaatcgcttgaacctgggaggtggaggttgcagtgagccgagatcgtgccattgcactccagcctgggcaacaagagtgaaactctgcccaccccaaaaagaaagaaagaaagaaagaaagaaagaaagagagagagagagaaagagagagagaaagagagagagaaagagagagagaaagagagagagaaagagagagagaaagagagagagaaagagagagagaaagaaagagagagaaagagagaaagaaagagagaaagaaagagagaaagaaagaaagaaagagaaacagaaaaagaaagagagaaagaaagaaagaaagaaagaaagaaagaaagaaagaaagaaagaaagaaaagaaaaagaaagagggaaagaaagaaatcatattcatccttctatgctacagttcacctagcccaaagccttgtcggtggtcagcattatttctaaataaatatatattcaatgaatgaatgaataaattgttgctgtggtttgctgtttaagtttccaggtctgttagcaaaccccagacttgtaaaatacttgaagggctgtgtacactccttctttgtatctttctttgtgcactgctaaatcttaagcatatgatagggttcaggacatttctgaggaagaaaggaatgacgagtgaatgatttcaggctatttctcaaggagaatgaggagtttattcaagccaccaccagtttctatgagtataatgaatgcattcaaatgtaagtctacacaaaacctatttaggtaaggcaggcagccacccaacctggaaggacattagatagagaggattattgctttatcatcggtgtcacactcacagctgtgaactcgtgtgcagcatagttctataacctcagggggactgtcagctgtggatgctgaaaacacagttctgccaccaacagcccctttctattacaatgaatgaccctcctgtagttggtggttgcagtttcagccatggtggtagtcagggtttgtaacacatctctacctttcactcacaccatctccccaacacattcccaagtgagaggcagcagctagctcttcaacaaggtagtttccctataaatctcagcaggaagcagcctggtgaaatgggaagaacacaagattgagggccaactcttgcattctgctcccaaatatttaacaactccatgttgttatatgtaacaactccatggagactttaggaaagaggaaggcaactagtggtttgctgagcacctattctgtgccagacactttgtatgtcatttatttaatcagcatcatmgctttaccttatagttaacattgcctctttttcacagctggggcaacagaggctgaacaacttgcccaaggccaaatgtaggatgtatagagaatttgtacccagtttttcgggtaaactatttcccttttctctgagcctcaattttacctataaaagaaagagattaggtgtacatgatttaacacctgcataatttttctagaaacttttaacctattccctgatttgtaaccattaccacaggaagtaacactgtagcaagaagtaaaacagaaactgtcaaaaatagacaaaatgaagagatatactaaattgagttcatctctttgaatattggattatggagaaggcaggtaatcttcatacatcaaccttgtgtattgaattaaagatatttttaataaattcaaatataacattttagtgattcaacaaataattttttttcagattttaaacattatgctatcctattgtttagtttgtccaaaagatatatgatttattgaagctattaatgcacaataatctcacttttgtgcctagattgggaccctttaagaaaaaagtttgaggactggtgaatggacacttttcaatgca

SEQ ID NO: 27193 - DNA, 1348 bp, Homo sapiens
caaatataagataatagcaacaagattcagctgacaatttgaaattggattatatagctttgcccttaaaagagaagttatggaaatgccttctctcccgatgtgttttttctaatgaagtaacaaastcatgaagattaaagaaacattttacaaagaaacatcgtaataaagttgtcaaaagtgtgtcacatttccaagggatcttgtccctggaatactcacaaatagtcttttaatcaaaaaaaggatgaatcttagcaatagaaatgattgctaaattgtggtaagctacacaatattggagaaaagctaactttactagctatgcaagaatttagtaaaatcatcatggaaaaaatgcaaataatttttttttacttttcttttgagcagtgttactgtgtccagaagaatttatggcagtgttgaaaaattagccatgtaatgaactgcaacaagtaagtttttatgtcaagtatatgaaagcatcttgtatgacaatgaagatttactgctcatatacaaaggatctgcaaggaaaaaaagagtagtagataaactagtattttcaaaagaactgatcaagtacaaaaaaagtatgtcagtagttagaattgttaaaaaatgttaaacagaaaaataatttcctttccagtcattgactgtaccatagaaaatgggaccagctatgatttgccaataaggctttgtaaacaaattaaaataccaccatgttttagcagttccttctatttttcatcaatgactagtaggtaagaatcttggtgaaacatttcagaaatcaatatattgtttagtcttaataaaattaagacatctatgaattattatttagaaacctatgaattgacaaaaatattaaaaattttatccaacataataagtaatcttataagtaagatagctcttcaaagggaactgcttatcaattttatgcttactatttgacagtgttgtagaattatttcatcattgataaattagtgacaaatacaataccaaaattaaaatgttgaaaaatgttgtatttattttttagagatagttgtaaagttaaatgaggtaattttgagatgcaaggaaatgaaatcaatcacatcaatgtgaaagaaatatttatgggaattatcaagaaacagatttctttaaaataatctttgtcactgaacattttcattattcttctttccacctaccgaatgaagttaagtgtaatactatttggaaatatattactctcatatggatgctaccaaaagatgaaatgtaactatctgaatgaataagtgattaatgcatgatctattcatttgaaatggaaaaa

SEQ ID NO: 27194 - DNA, 1348 bp, Homo sapiens
caaatataagataatagcaacaagattcagctgacaatttgaaattggattatatagctttgcccttaaaagagaagttatggaaatgccttctctcccgatgtgttttttctaatgaagtaacaaactcatgaagattaaagaaacattttacaaagaaacatcrtaataaagttgtcaaaagtgtgtcacatttccaagggatcttgtccctggaatactcacaaatagtcttttaatcaaaaaaaggatgaatcttagcaatagaaatgattgctaaattgtggtaagctacacaatattggagaaaagctaactttactagctatgcaagaatttagtaaaatcatcatggaaaaaatgcaaataatttttttttacttttcttttgagcagtgttactgtgtccagaagaatttatggcagtgttgaaaaattagccatgtaatgaactgcaacaagtaagtttttatgtcaagtatatgaaagcatcttgtatgacaatgaagatttactgctcatatacaaaggatctgcaaggaaaaaaagagtagtagataaactagtattttcaaaagaactgatcaagtacaaaaaaagtatgtcagtagttagaattgttaaaaaatgttaaacagaaaaataatttcctttccagtcattgactgtaccatagaaaatgggaccagctatgatttgccaataaggctttgtaaacaaattaaaataccaccatgttttagcagttccttctatttttcatcaatgactagtaggtaagaatcttggtgaaacatttcagaaatcaatatattgtttagtcttaataaaattaagacatctatgaattattatttagaaacctatgaattgacaaaaatattaaaaattttatccaacataataagtaatcttataagtaagatagctcttcaaagggaactgcttatcaattttatgcttactatttgacagtgttgtagaattatttcatcattgataaattagtgacaaatacaataccaaaattaaaatgttgaaaaatgttgtatttattttttagagatagttgtaaagttaaatgaggtaattttgagatgcaaggaaatgaaatcaatcacatcaatgtgaaagaaatatttatgggaattatcaagaaacagatttctttaaaataatctttgtcactgaacattttcattattcttctttccacctaccgaatgaagttaagtgtaatactatttggaaatatattactctcatatggatgctaccaaaagatgaaatgtaactatctgaatgaataagtgattaatgcatgatctattcatttgaaatggaaaaa

SEQ ID NO: 27195 - DNA, 1348 bp, Homo sapiens
caaatataagataatagcaacaagattcagctgacaatttgaaattggattatatagctttgcccttaaaagagaagttatggaaatgccttctctcccgatgtgttttttctaatgaagtaacaaactcatgaagattaaagaaacattttacaaagaaacatcgtaataaagttgtcaaaagtgtgtcacatttccaagggatcttgtccctggaatactcacaaatagtcttttaatcaaaaaaaggatgaatcttagcaatagaaatgattgctaaattgtggtaagctacacaatattggagaaaagctaactttactagctatgcaagaatttagtaaaatcatcatggaaaaaatgcaaataatttttttttactkttcttttgagcagtgttactgtgtccagaagaatttatggcagtgttgaaaaattagccatgtaatgaactgcaacaagtaagtttttatgtcaagtatatgaaagcatcttgtatgacaatgaagatttactgctcatatacaaaggatctgcaaggaaaaaaagagtagtagataaactagtattttcaaaagaactgatcaagtacaaaaaaagtatgtcagtagttagaattgttaaaaaatgttaaacagaaaaataatttcctttccagtcattgactgtaccatagaaaatgggaccagctatgatttgccaataaggctttgtaaacaaattaaaataccaccatgttttagcagttccttctatttttcatcaatgactagtaggtaagaatcttggtgaaacatttcagaaatcaatatattgtttagtcttaataaaattaagacatctatgaattattatttagaaacctatgaattgacaaaaatattaaaaattttatccaacataataagtaatcttataagtaagatagctcttcaaagggaactgcttatcaattttatgcttactatttgacagtgttgtagaattatttcatcattgataaattagtgacaaatacaataccaaaattaaaatgttgaaaaatgttgtatttattttttagagatagttgtaaagttaaatgaggtaattttgagatgcaaggaaatgaaatcaatcacatcaatgtgaaagaaatatttatgggaattatcaagaaacagatttctttaaaataatctttgtcactgaacattttcattattcttctttccacctaccgaatgaagttaagtgtaatactatttggaaatatattactctcatatggatgctaccaaaagatgaaatgtaactatctgaatgaataagtgattaatgcatgatctattcatttgaaatggaaaaa

SEQ ID NO: 27196 - DNA, 1348 bp, Homo sapiens
caaatataagataatagcaacaagattcagctgacaatttgaaattggattatatagctttgcccttaaaagagaagttatggaaatgccttctctcccgatgtgttttttctaatgaagtaacaaactcatgaagattaaagaaacattttacaaagaaacatcgtaataaagttgtcaaaagtgtgtcacatttccaagggatcttgtccctggaatactcacaaatagtcttttaatcaaaaaaaggatgaatcttagcaatagaaatgattgctaaattgtggtaagctacacaatattggagaaaagctaactttactagctatgcaagaatttagtaaaatcatcatggaaaaaatgcaaataatttttttttacttttcttttgagcagtgttactgtgtccagaagaatttatggcagtgttgaaaaattagccatgtaatgaactgcaacaagtaagtttttatgtcaagtatatgaaagcatcttgtatgacaatgaagatttactgctcatatacaaaggatctgcaaggaaaaaaagagtagtagataaactagtattttcaaaagaactgatcaagtacaaaaaaagtatgtcagtagttagaattgttaaaaaatgttaaacagaaaaataatttcctttccagtcattgactgtaccatagaaaatgggaccagctatgatttgccaataaggctttgtaaacaaattaaaataccaccatgttttagcagttccttctatttttcatcaatgactagtaggtaagaatcttggtgaaacatttcagaaatcaatatattgtttagtcttaataaaattaagacatctatgaattattatttagaaacctatgaattgacaaaaatattaaaaattttatccaacataataagtaatcttataagtaagatagctcttcaaagggaactgcttatcaattttatgcttactatttgacagtgttgtagaattattkcatcattgataaattagtgacaaatacaataccaaaattaaaatgttgaaaaatgttgtatttattttttagagatagttgtaaagttaaatgaggtaattttgagatgcaaggaaatgaaatcaatcacatcaatgtgaaagaaatatttatgggaattatcaagaaacagatttctttaaaataatctttgtcactgaacattttcattattcttctttccacctaccgaatgaagttaagtgtaatactatttggaaatatattactctcatatggatgctaccaaaagatgaaatgtaactatctgaatgaataagtgattaatgcatgatctattcatttgaaatggaaaaa

SEQ ID NO: 27197 - DNA, 1348 bp, Homo sapiens
caaatataagataatagcaacaagattcagctgacaatttgaaattggattatatagctttgcccttaaaagagaagttatggaaatgccttctctcccgatgtgttttttctaatgaagtaacaaactcatgaagattaaagaaacattttacaaagaaacatcgtaataaagttgtcaaaagtgtgtcacatttccaagggatcttgtccctggaatactcacaaatagtcttttaatcaaaaaaaggatgaatcttagcaatagaaatgattgctaaattgtggtaagctacacaatattggagaaaagctaactttactagctatgcaagaatttagtaaaatcatcatggaaaaaatgcaaataatttttttttacttttcttttgagcagtgttactgtgtccagaagaatttatggcagtgttgaaaaattagccatgtaatgaactgcaacaagtaagtttttatgtcaagtatatgaaagcatcttgtatgacaatgaagatttactgctcatatacaaaggatctgcaaggaaaaaaagagtagtagataaactagtattttcaaaagaactgatcaagtacaaaaaaagtatgtcagtagttagaattgttaaaaaatgttaaacagaaaaataatttcctttccagtcattgactgtaccatagaaaatgggaccagctatgatttgccaataaggctttgtaaacaaattaaaataccaccatgttttagcagttccttctatttttcatcaatgactagtaggtaagaatcttggtgaaacatttcagaaatcaatatattgtttagtcttaataaaattaagacatctatgaattattatttagaaacctatgaattgacaaaaatattaaaaattttatccaacataataagtaatcttataagtaagatagctcttcaaagggaactgcttatcaattttatgcttactatttgacagtgttgtagaattatttcatcattgataaattagtgacaaatacaataccaaaattaaaatgttgaaaaatgttgwatttattttttagagatagttgtaaagttaaatgaggtaattttgagatgcaaggaaatgaaatcaatcacatcaatgtgaaagaaatatttatgggaattatcaagaaacagatttctttaaaataatctttgtcactgaacattttcattattcttctttccacctaccgaatgaagttaagtgtaatactatttggaaatatattactctcatatggatgctaccaaaagatgaaatgtaactatctgaatgaataagtgattaatgcatgatctattcatttgaaatggaaaaa

SEQ ID NO: 27198 - DNA, 627 bp, Homo sapiens
ggcttcttggctgcctatggggttggcaccaaaaggattgagtgtcagggtggatgtctctttgcccaccttttgggtgtgttattatttatattataccctgattccacagattatagagactgtctgttgcttataaaaataaaacaaggccgggcgtggtacactttgggaggcctaggcaggcggatcacctgaggttgagagtttgagaccagcctgaccaacatggagaaactccgtctctactaaaaatacaaaattagccgggcgtggtggtgcatgcctgtaatcccagctactcgggaggctgaggcaggagaatctcttgaaccagggaggcggaggttgtggtgagccgagattgtgccattgcactacagcctgggcarcaagagcgaaactccatctcaacaaataaataaataaaaataaaataaacaaacaaacaaaaaattatcttaaatctatatcctacaataaataaagttccaagtaataaaaaacaccaaaataatttattttcaccttttttctcttacaactgcagtctacttgtttgttccccccaccccccccccccaatttgaataaacttacattaggagcaccaagaaaaacacacaa

SEQ ID NO: 27199 - DNA, 1059 bp, Homo sapiens
ggcccagatccggtcctgaggcccctcccaccrgagcctggggtgccctcacatgccctgcgccaacttcgcaacagcccagcttcccggctgctgtgtgccctgcctgtgtcaatattatgactggacttcctgtgggtcaggccgcacgtggggcgtccgcgtgaggtagccacgtggaagtggtacccccatgtccttgagcccactggagtctgtcccccttgccatcctcgggagcccggtgcggttgtgcccccctcatatctctgggcctctcagcacacaggtctgtcctgcctttgatagcaagacggacctgggcaaggttcctggcttctccgagccttggtattctcatctgtgacccaggcacagctgcctggctcactgttgcaagggccgggatggtgcctggagtgggtggtgcctggagccagctcagcgtcagtgaccctcgtctgttccctcttcctacctccagccttaccgtccgcttccccctcgggcagccaccccagggcatctgttgtggaactgctctgtgggttttgtccttgatacctttccaggcttcttcaggttgggctcaggcagggactcagggggacttagcttccagcttgcagcctcaccgcttgggttccggctgtggctggccattcactgtgctaagcttcgtgccttggcgttcttaactgtgaaagagggttacctgtaggttccacctcctgggtcgtgtgaggatgtgacacactccgtgtgcagcacagggagccaggcagagttgaagcctgaaaaatgtgagctgggagtggctgttgtcctctgggccctgccccacggtgcccagtgaatgtttgatgactgtggtgtgtgtgggtcctgcccatcatgtgagactccctggaacctgaggcaaataggatttgagtgtggggtctggaggaagggaggagagaggggagaggaaggcgcggccggggtccttgctatcttcagtcacactgcacacattgctgactcctagacgtgtgtcaggccaggcccagggttcag

SEQ ID NO: 27200 - DNA, 1059 bp, Homo sapiens
ggcccagatccggtcctgaggcccctcccaccggagcctggggtgccctcacatgccctgcgccaacttcgcaacagcccagcttcccggctgctgtgtgccctgcctgtgtcaatattatgactggacttcctgtgggtcaggccgcacgtggggcgtccgcgtgaggtagccacgtggaagtggtacccccatgtccttgagcccactggagtctgtcccccttgccatcctcgggagcccggtgcggttgtgcccccctcatatctctgggcctctcagcacacaggtctrtcctgcctttgatagcaagacggacctgggcaaggttcctggcttctccgagccttggtattctcatctgtgacccaggcacagctgcctggctcactgttgcaagggccgggatggtgcctggagtgggtggtgcctggagccagctcagcgtcagtgaccctcgtctgttccctcttcctacctccagccttaccgtccgcttccccctcgggcagccaccccagggcatctgttgtggaactgctctgtgggttttgtccttgatacctttccaggcttcttcaggttgggctcaggcagggactcagggggacttagcttccagcttgcagcctcaccgcttgggttccggctgtggctggccattcactgtgctaagcttcgtgccttggcgttcttaactgtgaaagagggttacctgtaggttccacctcctgggtcgtgtgaggatgtgacacactccgtgtgcagcacagggagccaggcagagttgaagcctgaaaaatgtgagctgggagtggctgttgtcctctgggccctgccccacggtgcccagtgaatgtttgatgactgtggtgtgtgtgggtcctgcccatcatgtgagactccctggaacctgaggcaaataggatttgagtgtggggtctggaggaagggaggagagaggggagaggaaggcgcggccggggtccttgctatcttcagtcacactgcacacattgctgactcctagacgtgtgtcaggccaggcccagggttcag

SEQ ID NO: 27201 - DNA, 1059 bp, Homo sapiens
ggcccagatccggtcctgaggcccctcccaccggagcctggggtgccctcacatgccctgcgccaacttcgcaacagcccagcttcccggctgctgtgtgccctgcctgtgtcaatattatgactggacttcctgtgggtcaggccgcacgtggggcgtccgcgtgaggtagccacgtggaagtggtacccccatgtccttgagcccactggagtctgtcccccttgccatcctcgggagcccggtgcggttgtgcccccctcatatctctgggcctctcagcacacaggtctgtcctgcctttgatagcaagacggacctgggcaaggttcctggcttctccgagccttggtattctcatctgtgacccaggcacagctgcctggctcactgttgcaagggccgggatggtgcctggagtgggtggtgcctggagccagctcagcgtcagtgaccctcgtctgttccctcttcctacctccagycttaccgtccgcttccccctcgggcagccaccccagggcatctgttgtggaactgctctgtgggttttgtccttgatacctttccaggcttcttcaggttgggctcaggcagggactcagggggacttagcttccagcttgcagcctcaccgcttgggttccggctgtggctggccattcactgtgctaagcttcgtgccttggcgttcttaactgtgaaagagggttacctgtaggttccacctcctgggtcgtgtgaggatgtgacacactccgtgtgcagcacagggagccaggcagagttgaagcctgaaaaatgtgagctgggagtggctgttgtcctctgggccctgccccacggtgcccagtgaatgtttgatgactgtggtgtgtgtgggtcctgcccatcatgtgagactccctggaacctgaggcaaataggatttgagtgtggggtctggaggaagggaggagagaggggagaggaaggcgcggccggggtccttgctatcttcagtcacactgcacacattgctgactcctagacgtgtgtcaggccaggcccagggttcag

SEQ ID NO: 27202 - DNA, 477 bp, Homo sapiens
tggagtgcagtggcgcgatctcggctcactgcaagctccgcctcctgggtttacgccattctcctgcctcagcctcccgagtagctgggattacaggcacccgccaccacgcctggctaattttttgtatttttagtagagatggggtttcaccatgttagctaggatggtcttgatctcctgaccttgtgatccgcctgcctcagcctcgcaaaatgctgggattacaggcgtgcgccaccgcgcccagctttaattagttatttctaatggaggcatacactctcacaactcactgtctcaactcamtgtcccaaacaaaagccagaagacaatgacccctatctatcaagaggttaattagaagaaacagaaaatagaggctgggcacaaaggctcacacctgtagtcccagcactttgggaggccgagggtgggaggattgctggagcccgggggggtcaaggctgtggtgaa

SEQ ID NO: 27203 - DNA, 1055 bp, Homo sapiens
cagaagratcctccaattccctgaaaatatctgatttgaggccctgaagtccataatttttctgacacaatttaactttcctgtgcctcagtttcctcactgtaacagtgagcatacaaacaactacctcaaagatttcttatgaagattgcaatgatccatgtaaagtgctgagaagaaagcctgacacatagagagcaatcggtaaatatcatatattatttttataattaaagattatgcaacacagagaatagagcagcccagtcagaagttacacaaacatatagcctagaacctctggctctagactctctatgggctctaaatgctcatgctgtattcacagtacaagtattgagttttggtaatagatccccatttcagcaactaagtcctctatctcaggggcccccagcccctgagccacagattggtatcggtctgtgacctgttaggagctgggctgcacaacaggaggtgagcagggacaagcaaagcttcacctgtatttatagctgctccctatcgctggcattaccgtctgagctccaccacctgtcagatcagctgtggcattagattctcataggagcacgaaccctattgtgaactgtgcaagccagggacctaggctgcgtgctccttttcagaatctaatgcgtgatgatctgtcactctctcccgtcacctccagatgggaccatatagttgcaggaaaacaagttcagagctcccactgattctacattatggtgagttacataattattgcattatatagcacaatgtaatcataatagaaataaagtgcacaataattataatgcacttgaatcatccccaaaccatccccctccccagtccatggaaaaattgtcttccatgaaacaggtccctggtgccaaacaggttggggaccactgctctatcttatgtaatactttgtttacacaaagttaatctcatgaaagaaaattagaccgtacctttgccagatatgattgggtgcaggaaaagccaaatatgtgccccaaagaaaaagaaatatatag

SEQ ID NO: 27204 - DNA, 1055 bp, Homo sapiens
cagaaggawcctccaattccctgaaaatatctgatttgaggccctgaagtccataatttttctgacacaatttaactttcctgtgcctcagtttcctcactgtaacagtgagcatacaaacaactacctcaaagatttcttatgaagattgcaatgatccatgtaaagtgctgagaagaaagcctgacacatagagagcaatcggtaaatatcatatattatttttataattaaagattatgcaacacagagaatagagcagcccagtcagaagttacacaaacatatagcctagaacctctggctctagactctctatgggctctaaatgctcatgctgtattcacagtacaagtattgagttttggtaatagatccccatttcagcaactaagtcctctatctcaggggcccccagcccctgagccacagattggtatcggtctgtgacctgttaggagctgggctgcacaacaggaggtgagcagggacaagcaaagcttcacctgtatttatagctgctccctatcgctggcattaccgtctgagctccaccacctgtcagatcagctgtggcattagattctcataggagcacgaaccctattgtgaactgtgcaagccagggacctaggctgcgtgctccttttcagaatctaatgcgtgatgatctgtcactctctcccgtcacctccagatgggaccatatagttgcaggaaaacaagttcagagctcccactgattctacattatggtgagttacataattattgcattatatagcacaatgtaatcataatagaaataaagtgcacaataattataatgcacttgaatcatccccaaaccatccccctccccagtccatggaaaaattgtcttccatgaaacaggtccctggtgccaaacaggttggggaccactgctctatcttatgtaatactttgtttacacaaagttaatctcatgaaagaaaattagaccgtacctttgccagatatgattgggtgcaggaaaagccaaatatgtgccccaaagaaaaagaaatatatag

SEQ ID NO: 27205 - DNA, 1055 bp, Homo sapiens
tcctactgaggtggctccaggaaaagctatgaagctggcaatgtttatttttcaggcccttccagcttcccttgcagtgttcctgcctcttttccaggagaccagtgctattctcagccccctgcattcgggtatgctcttggattctgaagcacttggaagacatgtgacaagaaagctcacactaaaggatgtatatatgatagttataacaatgcagtattctttccatgtatgcttgcggttgaatacgggggcaattctttttttatctaataaatgaaaggcagtatgggyacaggtatatgtgtgagatagtaatgagagataataattttaaggcaagagaactttgttcatgctcctcttatcatctttcataagaggtcatctaatctaactaagcacgaataagttggttcctagtttttgctgttggcttccaacggttctgaaaactctcagcagaagtgtctaagattttctaaatgcagaaactttgaaaacctgtaacactgagttgtttttatattataaatggcttcaatgtttctcagtgcagccaaatcacctttctgtcttctcttttagtttcagttttgagggtgaggctcactatacaccctgacatgggcttcccttgtgtggagcagaaggcacagatattggctatgtgagatgggagcatgggaggttaaaagtggggaagggccactttacagcagcaggagctaaggcccagtggggagtgactgctctgtgctccagagtcagtgaatagcagggctaggatgggaacttgagtctcctcattcaggttctggttttacaagttatgaaaataaccatagcaaacacttactgaattctaagtatgtcccaggcactgtcctatgatcagcacatatgctgtcactgttctaagtacccatgagatctttgtatttataccacattcaaggtagatgctattaccgtcctcattgtacagataaagagacataactagaggacaccataacttaggtccaactgtcttttatttactgagtatt

SEQ ID NO: 27206 - DNA, 583 bp, Homo sapiens
caccaagatcacttccaaactggagtcaatacaatcttaccaattcagtgaacttctctgacttgtataataacagaatcaatgtaaaagtttaagagttgtgtttgactcagcactgttatttgctagaaaaaaaaaaatctcattccccataggcctaggataggtccagacaggtcacctgcaatctctagcaggcaatctttgcttacttaaattccctaaaccaagactcatctctaaatgtccaaggttcttctcgcctccataattctccctatagaataaacatatctataatgggaagcacgatatttttgccagggatggtacacaatatgtaatcacttgtttgaagacaaaattagtgggagagtcytcaacaaaacagaaaataaatagtttaatttaataaggaggatggcatggaaactttacctcaaaagcacttaattattttgttttctccaaatcaaaatcctttgttggatatatattccatcttggtgtttcactgttgttgcccaggctggagtgcaagggcacgatctcggctcaccgcaacctctgcctcctgggttca

SEQ ID NO: 27207 - DNA, 1091 bp, Homo sapiens
gtagatttggatgaaatggaaaataaagatgaaagcacaatgtaaggtattagaacacacacgtataactggatgaakaaaatttaattcattagaattctatttgtggaaagctgtatctgtgttgagaagaattcttgatgtgtgcccaaaacttgaaattgaccactgatgtgcctttgaaatgaagactcagtgtggctttgctgaacacctagaagcatttttgtacacagtgtttgggtagggtgtgggtctgagctgaattactcagcaatagaacagaggaaagagtaagtgaagatgaggtctgagtgtaactgacggaggtaatggaagtgtggaaatatctatgggggactactaagtgttctgctgggtatacacaatgtaaaccttttttgttctctctttcaggagatctttggtagcatttctttgttgatgcaaacatttgtatgagaggcgtccatgaggggaaataggcgatgtgtagggcttggagtgtaaagagagagattcatgcagatttcaactggagaatgaggattaggtctaatctgggagaataacagcagctgattgagagtttgtaaggttttgtctcttttaatcacctgaagagcctaggaggtaagaattggtattattcccatatggcagataatgcaattggagcacaacgaaagggagttatttgtcccaggggttatgtattacatagtatgaatttgagtccggcaggtctgactcacaatccagtcttggagcagccctttatacccagcaccaccctgtgtcgattatatatgttacagggagtaaagcagaggagtgattctcaagttaaatccaaattggcagccaaaattgtggattgaaaaaaaaactgacctaagcaaactccacatagagaaggagaggcaaatcaaagagggaacaaaatagaggtgagtgaatgccatttaggaataaattcaggagttcctttttgcctatcagaggtcacatttgctctggaatcctgaggatgcacaggggcaggaggcctcctggtggacagaagatgcaccctttgctgggagtacaga

SEQ ID NO: 27208 - DNA, 1091 bp, Homo sapiens
gtagatttggatgaaatggaaaataaagatgaaagcacaatgtaaggtattagaacacacacgtataactggatgaataaaatttaattcatyagaattctatttgtggaaagctgtatctgtgttgagaagaattcttgatgtgtgcccaaaacttgaaattgaccactgatgtgcctttgaaatgaagactcagtgtggctttgctgaacacctagaagcatttttgtacacagtgtttgggtagggtgtgggtctgagctgaattactcagcaatagaacagaggaaagagtaagtgaagatgaggtctgagtgtaactgacggaggtaatggaagtgtggaaatatctatgggggactactaagtgttctgctgggtatacacaatgtaaaccttttttgttctctctttcaggagatctttggtagcatttctttgttgatgcaaacatttgtatgagaggcgtccatgaggggaaataggcgatgtgtagggcttggagtgtaaagagagagattcatgcagatttcaactggagaatgaggattaggtctaatctgggagaataacagcagctgattgagagtttgtaaggttttgtctcttttaatcacctgaagagcctaggaggtaagaattggtattattcccatatggcagataatgcaattggagcacaacgaaagggagttatttgtcccaggggttatgtattacatagtatgaatttgagtccggcaggtctgactcacaatccagtcttggagcagccctttatacccagcaccaccctgtgtcgattatatatgttacagggagtaaagcagaggagtgattctcaagttaaatccaaattggcagccaaaattgtggattgaaaaaaaaactgacctaagcaaactccacatagagaaggagaggcaaatcaaagagggaacaaaatagaggtgagtgaatgccatttaggaataaattcaggagttcctttttgcctatcagaggtcacatttgctctggaatcctgaggatgcacaggggcaggaggcctcctggtggacagaagatgcaccctttgctgggagtacaga

SEQ ID NO: 27209 - DNA, 1091 bp, Homo sapiens
gtagatttggatgaaatggaaaataaagatgaaagcacaatgtaaggtattagaacacacacgtataactggatgaataaaatttaattcattagaattctatttgtggaaagctgtatctgtgttgagaagaattcttgatgtgtgcccaaaacttgaaattgaccactgatgtgcctttgaaatgaagactcagtgtggctttgctgaacacctagaagcatttttgtacacagtgtttgggtagggtgtgggtctgagctgaattactcagcaatagaacagaggaaagagtaagtgaagatgaggtctgagtgtaactgacggaggtaatkgaagtgtggaaatatctatgggggactactaagtgttctgctgggtatacacaatgtaaaccttttttgttctctctttcaggagatctttggtagcatttctttgttgatgcaaacatttgtatgagaggcgtccatgaggggaaataggcgatgtgtagggcttggagtgtaaagagagagattcatgcagatttcaactggagaatgaggattaggtctaatctgggagaataacagcagctgattgagagtttgtaaggttttgtctcttttaatcacctgaagagcctaggaggtaagaattggtattattcccatatggcagataatgcaattggagcacaacgaaagggagttatttgtcccaggggttatgtattacatagtatgaatttgagtccggcaggtctgactcacaatccagtcttggagcagccctttatacccagcaccaccctgtgtcgattatatatgttacagggagtaaagcagaggagtgattctcaagttaaatccaaattggcagccaaaattgtggattgaaaaaaaaactgacctaagcaaactccacatagagaaggagaggcaaatcaaagagggaacaaaatagaggtgagtgaatgccatttaggaataaattcaggagttcctttttgcctatcagaggtcacatttgctctggaatcctgaggatgcacaggggcaggaggcctcctggtggacagaagatgcaccctttgctgggagtacaga

SEQ ID NO: 27210 - DNA, 1091 bp, Homo sapiens
gtagatttggatgaaatggaaaataaagatgaaagcacaatgtaaggtattagaacacacacgtataactggatgaataaaatttaattcattagaattctatttgtggaaagctgtatctgtgttgagaagaattcttgatgtgtgcccaaaacttgaaattgaccactgatgtgcctttgaaatgaagactcagtgtggctttgctgaacacctagaagcatttttgtacacagtgtttgggtagggtgtgggtctgagctgaattactcagcaatagaacagaggaaagagtaagtgaagatgaggtctgagtgtaactgacggaggtaatggaagtgtggaaatatctatgggggactactaagtgttctgctgggtatacacaatgtaaaccttttttgttctctctttcaggagatctttggtagcatttctttgttgatgcaaacatttgtatgagaggcgtccatgaggggaaataggcgatgtgtagggcttggagtgtaaagagagagattcatgcagatttcaactggagaatgaggattaggtctaatctgggagaataacagcagctgattgagagtttgtaaggttttgtctcttttaatcaccygaagagcctaggaggtaagaattggtattattcccatatggcagataatgcaattggagcacaacgaaagggagttatttgtcccaggggttatgtattacatagtatgaatttgagtccggcaggtctgactcacaatccagtcttggagcagccctttatacccagcaccaccctgtgtcgattatatatgttacagggagtaaagcagaggagtgattctcaagttaaatccaaattggcagccaaaattgtggattgaaaaaaaaactgacctaagcaaactccacatagagaaggagaggcaaatcaaagagggaacaaaatagaggtgagtgaatgccatttaggaataaattcaggagttcctttttgcctatcagaggtcacatttgctctggaatcctgaggatgcacaggggcaggaggcctcctggtggacagaagatgcaccctttgctgggagtacaga

SEQ ID NO: 27211 - DNA, 1091 bp, Homo sapiens
gtagatttggatgaaatggaaaataaagatgaaagcacaatgtaaggtattagaacacacacgtataactggatgaataaaatttaattcattagaattctatttgtggaaagctgtatctgtgttgagaagaattcttgatgtgtgcccaaaacttgaaattgaccactgatgtgcctttgaaatgaagactcagtgtggctttgctgaacacctagaagcatttttgtacacagtgtttgggtagggtgtgggtctgagctgaattactcagcaatagaacagaggaaagagtaagtgaagatgaggtctgagtgtaactgacggaggtaatggaagtgtggaaatatctatgggggactactaagtgttctgctgggtatacacaatgtaaaccttttttgttctctctttcaggagatctttggtagcatttctttgttgatgcaaacatttgtatgagaggcgtccatgaggggaaataggcgatgtgtagggcttggagtgtaaagagagagattcatgcagatttcaactggagaatgaggattaggtctaatctgggagaataacagcagctgattgagagtttgtaaggttttgtctcttttaatcacctgaagagcctaggaggtaagaattggtattattcccatatggcagataatgcaattggagcacaacgaaagggarttatttgtcccaggggttatgtattacatagtatgaatttgagtccggcaggtctgactcacaatccagtcttggagcagccctttatacccagcaccaccctgtgtcgattatatatgttacagggagtaaagcagaggagtgattctcaagttaaatccaaattggcagccaaaattgtggattgaaaaaaaaactgacctaagcaaactccacatagagaaggagaggcaaatcaaagagggaacaaaatagaggtgagtgaatgccatttaggaataaattcaggagttcctttttgcctatcagaggtcacatttgctctggaatcctgaggatgcacaggggcaggaggcctcctggtggacagaagatgcaccctttgctgggagtacaga

SEQ ID NO: 27212 - DNA, 1091 bp, Homo sapiens
gtagatttggatgaaatggaaaataaagatgaaagcacaatgtaaggtattagaacacacacgtataactggatgaataaaatttaattcattagaattctatttgtggaaagctgtatctgtgttgagaagaattcttgatgtgtgcccaaaacttgaaattgaccactgatgtgcctttgaaatgaagactcagtgtggctttgctgaacacctagaagcatttttgtacacagtgtttgggtagggtgtgggtctgagctgaattactcagcaatagaacagaggaaagagtaagtgaagatgaggtctgagtgtaactgacggaggtaatggaagtgtggaaatatctatgggggactactaagtgttctgctgggtatacacaatgtaaaccttttttgttctctctttcaggagatctttggtagcatttctttgttgatgcaaacatttgtatgagaggcgtccatgaggggaaataggcgatgtgtagggcttggagtgtaaagagagagattcatgcagatttcaactggagaatgaggattaggtctaatctgggagaataacagcagctgattgagagtttgtaaggttttgtctcttttaatcacctgaagagcctaggaggtaagaattggtattattcccatatggcagataatgcaattggagcacaacgaaagggagttatttgtcccaggggttatgtattacatagtatgaatttgagtccggcaggtctgactcacaatccagtcttggagcagccctttatacccagcaccaccctgtgtcgattatatatgttacagggagtaaagcagaggagtgattctcaagttaaatccaarttggcagccaaaattgtggattgaaaaaaaaactgacctaagcaaactccacatagagaaggagaggcaaatcaaagagggaacaaaatagaggtgagtgaatgccatttaggaataaattcaggagttcctttttgcctatcagaggtcacatttgctctggaatcctgaggatgcacaggggcaggaggcctcctggtggacagaagatgcaccctttgctgggagtacaga

SEQ ID NO: 27213 - DNA, 577 bp, Homo sapiens
cagctcttgtcaagaaggctggagaaggaagaatggaaacagaacaaaccaggaagggagcccctgacagagcgaggctaaagagccctgtacattatccaactaggaaatcgaaggaggaaggagaaagaagacagaagagtcaacagccttagtcatactcctatgcgatttatgctgagggacattttatacccattgcaggccttattttgcatcttctackcaaaacaaacagctcaggtgctcctggaaaggatgattgttctttctctgagtaactgacaacaatcctcgactctctaatctgtttagcagctccccaggcacattgggcagcacaacctaaggcagcggctcaaatcttaaggaagcccaaaaataccccgtgtgcgttgttactggatgccccgtcccttacggctcaggagatgtgtttttgatacaccttgcagcggcttctgaaatgtgatccatccacttaacacatcctgagaagctgcactacggggaaaggggatattcccagcagctctgaaagactcgagacaggcaacccagcaaaccctagttcctg

SEQ ID NO: 27214 - DNA, 767 bp, Homo sapiens
tactttcaactgctgtatttaaatcactgctccctataaattcatttatcacgcaaatgtgaatggtactaagttgctgtcctttttttttttaaacaaacctcaggagatgtttatttcccctgttagaaaaatcagcttccaaacgtcagtaccacatctgtaaaatgggtagtgtccccatggcattattatatgctactactggttctcactgaaagaagatgtttrtatgctatgacactaaaataaaagctgaaaaaaagttctaacattttatacgaatacaaatatattcattagaaaacaacctttaacagtattttataggtgaatgtaatgcacatttaaaaattcaataaaatttttagtattggtgtttgtatagcactatgtaatgagaaaggccatgaacctgagttaagagttgagaatttcccctctaatatgattattaagtccagccagtaaatctgttccctactagtccagctctccccaggcaccagtgattatttttggcagcaggctgtttcctccttgagtgcttcctatataactcccctcaccatgaggacatgatctgtgataattttttcattctgggtagattagatcattccatattttatgttatcaggaaatcagtaacttgggagtcaagaaattctgaaccagaaaaggcatatggatatgtttgctcaggattgagcagagtatgaggatattcagagttgaacctgatagtttctttgattatcctgttt

SEQ ID NO: 27215 - DNA, 568 bp, Homo sapiens
tcagaagatggtttttcatttctgacttgtcatwtctgtgaggctgattttcgtaagtttaaatgatcaagatctagaatctcgttggtgacctcatcttgccatttgataataaatatggcttgtcaaatgagtttactaagaatgtttaactaagccacagctaacagacctaagtccaataatcatataaaaggttagatacaaattggaatgtaagcacctatagtggtgggcacagtctagttccaaactataactttgagtataagtaatattagccagaaaaacagatttcatttatttattttttgttgttgttgttgtttttcaatagaaacaagttctcactatgttgcccaggctggtcttaatctcctgagctcaagtgatcctcccaactcagactctgaaagtgctggggttacaggcgtgagctaccatgcctggctgaaaaacagatgattttgaaaagtttggatttataggccgggcacagtggcttacacctgtaatcctagcactttgggaggccaaggcaggtggatcaactgaggtcaggagtttg

SEQ ID NO: 27216 - DNA, 828 bp, Homo sapiens
ggggtctaactatgttgccagggctggccttgaactcctggcctcaagcaatcctcccaccttggcctcccaaagtgctgggattataggtgcgagccactgtgtctggctttgattcttttttctttctctttatcattattattgttgttcttgttattttagcaccttttcatcatattttcagggatttacttgtttgctttcttcttttttcattcttatttctcccatctcaagaagggaacagatcttggacttagtactaagtttgatcagtggtgatggtgatctaccaattggttctcaaaatcttactcttgccttagaccacacagagtgcactgtggccttggtggcttgtgtaactccagctctggttgagagatattctaatgattcgtaaaaaataagaaagttccaggccttggagtcagcatgacactgttgagagcctcccagggaagtagcttggactcaattatgcccagaatgccttaagaattttctgtatcttctcattctgatgttactgatggtcctgtcagctagaggtagttgagggctaaagccctctaaaatattatcggtgtgacaaatgttggtctttttagcattaagatgagtgaaaaaasaatcgccagcccagcccctctgaaaaactattttctttttctcttattgattccagtgtaattgtgacttaacccattgctgcattggagacaatatggaattgttgtataaacgtttttcccccaaaatggtagtttttctaggaataggcctagattcaagatgaacagtctgggttagtggactctgata

SEQ ID NO: 27217 - DNA, 472 bp, Homo sapiens
agttctcatgaaatctggtcatataaaagtgtggcacctccctccaacacacacacacactctctctctctctccctcctgcttttgtcatatgatgtgcctgcttcccctttgccttccaccatgattgaaaaagctccctgagaccatccccaaagcccagtgatttgggtgctatgcttcctgtacagcctgcagaatcatgagccaattaaacytcttttctttataaattaccagtctcaggtatttctttatagcaatgcaagaatgggctaaaacagccagtaattcatacctacttgttgaagaatcagtttcactcatatttagagaccctgctccaccttcactgcatatcaacaatgtagcaccccacattcatgaatcccctgtgagcatttcagtgacatttccccaaaccacttctaagagatgttgacagatgagacctctggaggtggggaaaatg

SEQ ID NO: 27218 - DNA, 472 bp, Homo sapiens
agttctcatgaaatctggtcatataaaagtgtggcacctccctccaacacacacacacactctctctctctctccctcctgcttttgtcatatgatgtgcctgcttcccctttgccttccaccatgattgaaaaagctccctgagaccatccccaaagcccagtgatttgggtgctatgcttcctgtacagcctgcagaatcatgagccaattaaacttcttttctttataaattaccagtckcaggtatttctttatagcaatgcaagaatgggctaaaacagccagtaattcatacctacttgttgaagaatcagtttcactcatatttagagaccctgctccaccttcactgcatatcaacaatgtagcaccccacattcatgaatcccctgtgagcatttcagtgacatttccccaaaccacttctaagagatgttgacagatgagacctctggaggtggggaaaatg

SEQ ID NO: 27219 - DNA, 637 bp, Homo sapiens
ccggagtgcagtggcacaatctcagctccctgcaacctccacctcccaggttcaagcagttctcctgcctcagcctcccgtatagctgggattacaggtgtgtgcctccacacccagctaattgtttgtatttgtattagagtcgaggtttcaccatgtgtagcaggctgatctcaaactcctgacctcaagtgatctgcctgcctcggcctcccaaagtgctgggattacaagcrtgagccaccatgcaggaagtagcattttaaagaagcaccacccaccccctcattcattgtgagccatgaagttgggcattcgttgccctggaggatcaggtagctaaaagagatggtgacccgtgaggatctgtgacagtgaatgtgcaggagattttggtaagtctgcttatatagagattctgtttaagacccctaggtgttcctcctaaaaataatgtggttttaatgaaggaaaaggggcctatttctcacctcattaacaagctctgagaagtttctctgtgtcattatatagttagtagaagagggttgtgtgttgtaatcttctatttctactcttttatctcctgggtccaaacactttgtttctcccttgaagaagcagaattaacataact

SEQ ID NO: 27220 - DNA, 1760 bp, Homo sapiens
tgggccagtttctgaggacagtgctgccgatggaacccccaagcattcattcaggactagctccactctggaaatagacacagaggaattaacctctacgtcttcaaggacctcacctcccagaggacgtcaggattcactcaatgattacttagatgctatcgaacacaatggccactccaggccrgggacagcgacctgctctgagaggtccatgggtgcctctccgaaactgaggagtagttttcccactgacacaagactcaatgccatgcttcatattgattcagatgaagaagatcacgagttccagcaagacctgggttacccatcttccttggaggaggagggaggcctgatcatgtttagcagggcatccagagctgatgatggaagcctgacatctcagacaaagctggaggacaaccctgttgagaatgaggaagcctccacacacgaagctgcttcctttgaggataagccagaaaatcttccagagcttgcagagagctccttacctgcaggcccagccccagaggaaggtgaaggcgcccagagcctcaacccagtgctgaccagggcagtgctgaactgtgtggctctcaagaggtagatcagccacaagtggcgcagacacagggacttccgatgcatcaggaggaagccgaagagccgtcagtgagaccgagtctctcgatcagggctctgagccttcccaggtgtcctctgaaacagaacccagtgatcctgccaggacagagagtgtgagcgaagccagcaccaggcctgagggagagagtgacctggaatgcgctgacagctcctgcaatgagagtgtgaccacgcagctgtcctctgtggacacacggtgctcctctcttgagagcgcacggtttcctgaaaccccagccttttcttctcaggaggaggaagacggagcctgtgcagcagagcccaccagcagtggccctgccgaagggtcgcaggaatccgtgtgcactgctggttctttacctgtggtacaggtgcccagtggggaggatgaagggccaggggcagaatcggccactgtacctgaccaggaggagctgggggaggtctggcagcggagggggagcctggagggagctgcagctgctgccgagagcccaccgcaagaagaaggcagtgctggggaggcccaaggcacctgtgaagggcaactgcccaggaggagggcgctactggaggtaggatatggacaccactgtggctcttggctcgagcgtagctgtgcagagagaagttctgtagttttcccctcaatgtaaataaggctgcaggttacatatgacctgaattcctcaccttgaggttcagcaggcaagaagagaggcaagattgaaaacagcgccaggaagagaaggaaacaggtaacaaatgagtggcagctgaaacccttcctctagattaggcctcctgtttctgagcggggagaccttggacttaatcacatagctaggaagaaggcagcatggtttgcatccagatgggcttgagttcaaattcagtgctcttttaaaaaatggctcttctgctgctgaagtaacaggcctgttaaacagcaatcttcaaacttaaataatgggtctctattggaaccggggtttgtagatacacaaccaaacaggctggcagcttcaaccttagtgtaatctgcaaaggttatgagaaacacctagccactcttcctttctaaaatttcacagtggaagattaat

SEQ ID NO: 27221 - DNA, 1760 bp, Homo sapiens
tgggccagtttctgaggacagtgctgccgatggaacccccaagcattcattcaggactagctccactctggaaatagacacagaggaattaacctctacgtcttcaaggacctcacctcccagaggacgtcaggattcactcaatgattacttagatgctatcgaacacaatggccactccaggccggggacagcgacctgctctgagaggtccatgggtgcctctccgaaactgaggagtagttttcccactgacacaagactcaatgccatgcttcatattgattcagatgaagaagatcacgagttccagcaagacctgggttacccatcttccttggaggaggagggaggcctgatcatgtttagcagggcatccagagctgatgatggaagcctgacatctcagacaaagctggaggacaaccctgttgagaatgaggaagcctccacacacgaagctgcttcctttgaggataagccagaaaatcttccagagcttgcagagagctccttacctgcaggcccagccccagaggaaggtgaaggcgcccagagcctcaacccagtgctgaccagggcagtgctgaactgtgtggctctcaagaggtagatcagccacaagtggcgcagacacagggacttccgatgcatcaggaggaagccgaagagccgtcagtgagaccgagtctctcgatcagggctctgagccttcccaggtgtcctctgaaacagaacccagtgatcctgccaggacagagagtgtgagcgaagccagcaccaggcctgagggagagagtgacctggaatgcgctgacagctcctgcaatgagagtgtgaccacgcagctgtcctctgtggacacacggtgctcctctcttgagagcgcacggtttcctgaaaccccagccttttcttctcaggaggaggaagacggagcctgtgcagcagagcccaccagcagtggccctgccgaagggtcgcaggaatccgtgtgcactgctggttctttacctgtggtacaggtgcccagtggggaggatgaagggccaggggcagaatcggccactgtacctgaccaggaggagctgggggaggtctggcagcggagggggagcctggagggagctgcagctgctgccgagagcccaccgcaagaagaaggcagtgctggggaggcccaaggcacctgtgaagggcaactgcccaggaggagggcgctactggaggtaggatatggacaccactgtggctcttggctcgagcgtagctgtgcagagagaagttctgtagttttcccctcaatgtaaataaggctgcaggttacatatgacctgaattcctcaccttgaggttcagcaggcaagaagagaggcaagattgaaaacagcgccaggaagagaaggaaacaggtaacaaatgagtggcagctgaaacccttcctctagattaggcctcctgtttctgagcggggagaccttggacttaatcacatagctaggaagaaggcagcatggtttgcatccagatgggcttgagttcaaattcagtgctcttttaaaaaatggctcttctgctgctgaagtaacaggcctgttaaacagcaatcttcaaacttaaataatgggtctctattggaacckgggtttgtagatacacaaccaaacaggctggcagcttcaaccttagtgtaatctgcaaaggttatgagaaacacctagccactcttcctttctaaaatttcacagtggaagattaat

SEQ ID NO: 27222 - DNA, 886 bp, Homo sapiens
tggaaaaactgtgctgattgggaagctcaaagggtgtgcttttctaagttttagaaacaaaatggaataggtggagtttgaccagctggatgttagctccttggtgcttcactgacaacacgataaagtaattaattagtgttcttacggtcacatttcctcaccaacaattaagagttatgacatcctttgacggtgtgtaaacagtccttctcccatctgacagaygaggtaattaggaaaagaagagaatgtaccttgcccaaggtctcaagggagcctgcatcagacctatgattagagtccaagtgctgttgcctgtcctatattcagttggcaagctgaaccatgccttcctttaatttgaaatttaaaatctagccatctataaatcaaatttcacctcctctatattctgtgttgtttctccaatcacttaggtctatttcagctgtgcctgcgatgaccaattccagttctcttgcatcaaaaacagataccagcctggcatccaccacctgtggaataaaaagagtacaaggcatggcttaggagcctggagaaatatcagctataattaagccttagaaaaggggacacatggagtttcaggaataatatgtgtgtaccttgtgttggcacttgaaaacctgtaaagctccctacaaatataaggcattctttagtataaggttgatgagatttgccttgacagaatttttgttttataattgattgctgattaatctaggtcccgtccacctttaggaaactatctagtgtttctacagaaaaagtcacatacaatacatgccaactcattctgatctcagatataattatttcacatagcaagcatgagatttgattacccatatctaagcat

SEQ ID NO: 27223 - DNA, 886 bp, Homo sapiens
tggaaaaactgtgctgattgggaagctcaaagggtgtgcttttctaagttttagaaacaaaatggaataggtggagtttgaccagctggatgttagctccttggtgcttcactgacaacacgataaagtaattaattagtgttcttacggtcacatttcctcaccaacaattaagagttatgacatcctttgacggtgtgtaaacagtccttctcccatctgacagatgaggtaaytaggaaaagaagagaatgtaccttgcccaaggtctcaagggagcctgcatcagacctatgattagagtccaagtgctgttgcctgtcctatattcagttggcaagctgaaccatgccttcctttaatttgaaatttaaaatctagccatctataaatcaaatttcacctcctctatattctgtgttgtttctccaatcacttaggtctatttcagctgtgcctgcgatgaccaattccagttctcttgcatcaaaaacagataccagcctggcatccaccacctgtggaataaaaagagtacaaggcatggcttaggagcctggagaaatatcagctataattaagccttagaaaaggggacacatggagtttcaggaataatatgtgtgtaccttgtgttggcacttgaaaacctgtaaagctccctacaaatataaggcattctttagtataaggttgatgagatttgccttgacagaatttttgttttataattgattgctgattaatctaggtcccgtccacctttaggaaactatctagtgtttctacagaaaaagtcacatacaatacatgccaactcattctgatctcagatataattatttcacatagcaagcatgagatttgattacccatatctaagcat

SEQ ID NO: 27224 - DNA, 655 bp, Homo sapiens
tatcctatatgtaattgaaacttttttcaaggttcaggggttagtaaaagaacctctctcctaaagtgtgtctggcaagttatgactggcaagaagggaccaacccctgccttaacaagttaaatctcaacacagagcagaaacagatgcagcattatccattatcttaacttgggttttccctggacctctgattctctaatgaacacagctcctcattcatgattccaggtaaaatcttgtcagagctgaaaacagatgaactcttggtgggctactactcttttatacccaggtataatactaccagtatttttcaaagtccttacttggaccatctgtgcccttccatccaatggaatatttacaggcactgggctctcaggctgttgaaccaaatatagtaccagcaaagccatatcttcccctggtgtccctgcttccagctcagtgttctggaaaggcttctctgtcacgcccatctgactctaattcagtgtcattttacctgtggtccagggacataatcacaagcccaattctctttcatctctcctaaacttcatgcttgccacttctaatcttctcttggctgggaattagagktttattaaaaacacttgcagaaatcaagtcagtagtttcaatgagagtt

SEQ ID NO: 27225 - DNA, 981 bp, Homo sapiens
tctaaatatgcaaggatgctgatgggcaggcctggcaggagaatcgctaagctacgggagaggagttcctctctcaaatgagtcaccaggactattaaagtggggctgctcaatgtatttccctaaggaagttcatctttcactgactttctcgactgtaccaaatggcctcctgcagggtctttggtttccttattttaagagaaagatatgataactgaagaaaaatcctcctccaggaatttatatcattacactcttcctaccaatgaacaaatactaaatctcaaaaaaacaaaagttgttatggggtaaaaatattgagtccttatattatttatgtgagtcactatccaataattcataatttaataagcatcattggccagaagatttttactacgtacctgccacagcacatggccaggaagcaatgtgccagamagtgcaagggaatcaaggaaaggtttctggtctagtggctgttctgtagtgtagctgctgagatgccaatcacaggcatggcaaaatacaaaagacacacactaaaaaggaagagcaccaggtcgaacagcatagagagcgtagagaagatgagagaggacatggtggagtcagaaaggtgtcatggaaaaaacaggtctaatggatgagcaaaatggggctagagagagttaaggagtggcaaaagcagggaggcacagatgaagcatgctgggtttgaagaatggcgagatgacctacgcaggaattctagctttactattactttgcctccctgagaactcttctgcaaatgactttcctgaacacaaacacagattactggttatttctgaaatagtagtagctggacagacctgagcaaactttactctcccacttgcttttttccaagacgaatagcatgtagtctgcaagaacaaagctaagtagtgtgcacgaggacggtccgagcagaataaagtgtggtaacatgca

SEQ ID NO: 27226 - DNA, 981 bp, Homo sapiens
tctaaatatgcaaggatgctgatgggcaggcctggcaggagaatcgctaagctacgggagaggagttcctctctcaaatgagtcaccaggactattaaagtggggctgctcaatgtatttccctaaggaagttcatctttcactgactttctcgactgtaccaaatggcctcctgcagggtctttggtttccttattttaagagaaagatatgataactgaagaaaaatcctcctccaggaatttatatcattacactcttcctaccaatgaacaaatactaaatctcaaaaaaacaaaagttgttatggggtaaaaatattgagtccttatattatttatgtgagtcactatccaataattcataatttaataagcatcattggccagaagatttttactacgtacctgccacagcacatggccaggaagcaatgtgccagaaagtgcaagggaatcaaggaaaggtttctggtctagtggctgttctgtagtgtagctgctgagatgccaatcacaggcatggcaaaatacaaaagacacacactaaaaaggaagagcaccaggtcgaacagcatagagagcgtagagaagatgagagaggacatggtggagtcagaaaggtgtcatggaaaaaacaggtctaatggatgagcaaaatggggctagagagagttaaggagtggcaaaagcagggaggcacagatgaagcatgctgggtttgaagaatggcgagatgacctacgcaggaattctagctttactattactttgcctccctgagaactcttctgcaaatgactttcctgaacacaaacacagattactggttatttctgaaatagtartagctggacagacctgagcaaactttactctcccacttgcttttttccaagacgaatagcatgtagtctgcaagaacaaagctaagtagtgtgcacgaggacggtccgagcagaataaagtgtggtaacatgca

SEQ ID NO: 27227 - DNA, 519 bp, Homo sapiens
cacccaggctggagtgcagtggtgcaatcttggctcactgcaacctccacctcccaggttcaagcgattcttctgcctcagcctccttaatagctgggatcacaggcgcctgccaacacacccagctaatttttgtatttttagtagagacagggtttcaccatgttggccaagctggtctcaaactcctgagctcaagtgatctgcctgcctcggcctcccaaagtgctgggattactggcgtgagccactgcgcctggccacagatacagttttattagaaagttmaaaccaacagcgacaatagccacagtaactgtgagcttctccccaggtgcctggggcaccaggatttctctcgctggaagactgaagctatctgaccccgtgaggtatgagctgggacgagacggtggtcgtggggcaaaggcagcttcggcagcagtgcttacatttcacttttttcttagtttcctctgggagagtgggaaagaaagcaagtcttcgactttagaaggc

SEQ ID NO: 27228 - DNA, 456 bp, Homo sapiens
gaactgttcatgaccgacttcccggccaggtatgccccgaaggcccctcccagaacacagtgcaggtcacagggggcgttcctcgctgtgcagttgccgagtgatctccaggaagacccctctggggcgggcaggtgccccggccatggcttcccaccaatctcagtaccttttaggttcccatcctcggctgcctgaaaggaaccaggctgccggctttccattttggaggscttgataggcccaactgggaagagtgctttgcaagtgcagccatcctgcctccccatacggctcccccttcccctcgtagccagagctgctctctcctgagctgcctctcctttccactcctacctccccaccagctctagggccagcagataagtgcagccagtgctcctcaagcattcaggaaggggagagaagggagagctcccacccagagccttgttt

SEQ ID NO: 27229 - DNA, 965 bp, Homo sapiens
ccatttgctcagacgttcaggctgcttctgtccagggacggggccgtcactctgctgttcaaggcagacctgagagccacctggaatccctcagtgtggcttttccactctgacccaaggcaggccgcctctgcacacctgccctgtccacacttaggcagagcccccgtcacttctccctgggtcaccgcagatgcctccacccggggcctctgcagtttactgtctccatggcaaagacaggacactttaaacctgcaagtcaggccttgtcatatctctgcctgctgcccccacggctccccacctgactcagaatgagtgccagcgccccggccttggccccagcctgtgccacatgactgccctttgtcctccgggtcctctccccaacctccccctgctctgtgacctgcagactgaccaggtggcccacaccacagggctcccttgcctctggctctggatgtgtccccccagtggggagtcccattgggaggtcagcaggggtggtgttggagttcacctggttccttttttggggggtcgcctggggctggctgtgccctggcctcctttctatcctccactacaggaccatctttcctgccccagggcctttgcactggctgctcccattgcccagactgctccttaacccactcctccggcactcagtacacagtgcagccaagggctgcgtgaggaagtctgggggagggaggggcaggttgtgcaagagaaacaggagcttccctcaggccacatggacctggggcagaatggatctcagtggagatgtcaagctggtggctgtcactcagaacccagagcttcgaggaggggactgagctggaggcasatgtcaagggggtgtcttggttgatgtgtgtcctgcagtgtcaccttgtcagggacacctcttcacccctcccatctacagtgtgtgctcctgcttcccccat

SEQ ID NO: 27230 - DNA, 522 bp, Homo sapiens
tatctcttcatctcttttgtctatagtcatagaatcctagacctttatctagccactgagaacacattttagctgactttgtaggtatttgtgaccagattaccaacttctagttagtggaatataaacctaggtgctgtgttcaaattctaagtattttaaagagacagagcatcccctccctccatctgctggctggcccatggacttgggtgacagatctggagcagacaccttgaactatgagtgagaagcctcatgcagggcattgcagggcattgcagagcaagctagaaggggcctgatcctcgacatcacaggagccactgtaccagccctggactgtccacatttatagaacatagaaatatatttttatcctgtttaagatmttaatataatactgtcattttttcctatttggaaactcacagcagaatgtaatctcaatgaacacagagaccattttgctcagcactgagctagaatctttgagcagaggaagagagacttgaggttaat

SEQ ID NO: 27231 - DNA, 580 bp, Homo sapiens
tggcctccccacatgtttgtgggaagatcagatacagaagggctgtacacttggaagaaaaaaaacgggttcaaaagtcagtgtcattatttttgtgagtggcaggaattcgctttgacatgcccctgggagagagataggaattaacaaccacatcaaatgcatatcattggccaacaggggagttttcctaagggaagatttatcrgaaaaagtttgggttggtggaaggaatagcacagatgcctgagggcccctgggaggaagggaaggggcccagaggcctggtgggcatgctgaaagcaaccttcaccttcttcataacccacctgatctccttgcccagagcagaattcagttcccctgggaaggaatgtgctgggaagcaatttttccttcccctgggaaggaaggaaaatgctgtccaaaggtttcgggttttgggcagttctccttcagtttaggaataatatatatatatatatatattttttgagacggagtcttgctgtctcccaggctggagtgcagtggcgcaatctcggctcactgcaagttccgcctcccgggttcacgccat

SEQ ID NO: 27232 - DNA, 601 bp, Homo sapiens
tcttaacatttatcatacaattgctgaatgaataaattatggctgtcaccaatatgttccctgcggaaaatgttatatcagtcatctcatattcgtatttccttacatattagtgctttaaaatatggcattgatttacagaaataatttagtcacttccctcagagatttatcagactttttccaaaactactgtagtttttcatattttcatagatattttatatctaaacacattgtcagagtgctggaaatattttctgtccttccctggttccttcgtttttctttctctttctttcactctttctttctgagactattttaaaatacatccagaaattcttcaatatttccattttcatatgtgggaatgtaatctgcctttccctaagtgtgaactggtcttaataacttgcttctaatagatagaagaataaagcagaaatagcatgcatttttacttgaaatcactccggttatatatatttgtgtgtgtgtgtgtccatgtayatgtacacattactctatgtatacaaacacttttacaaattttaatactgtaatatttttgatagtgtccttttagtttttaaaacat

SEQ ID NO: 27233 - DNA, 644 bp, Homo sapiens
cataatgatgtttatgaaattttacataaaggaggaatttattcatttcaagaaaatgggtaaaatcaaaattattttgatttaaatatatatatatagtcacataagcacacagaaattaaacttctgcatataaatataagccaaagtatcaaatgcaaggtaaatattcaggacagattttagtgcacaaaaaacagaagaaagctgttgcccttaatacataaattagttacaaaatgtagaagtaccactctaaaatccagtagataaatagacaataggctaatgaagaaatgcaartgggagagaaagcaggtgaaatatgtactcatcctctaaattcagaaaaaaattaaaattctataacattttgtacttcccatttagctaatatttaaaaaataattataacccctcctgttctgaaagaacagtcaatcgagtacatgcttatgtaatagttgatctttcaaattggaatattgtttctggaaagcaatttgaaaagtacatattaaaaccatctaaatatttatggtgtctgtcttcacaaacaaattactgatgaattttataatcattcatcatggctataatctactatcttataaagtagaaaatttgtcagcataaaaaatccc

SEQ ID NO: 27234 - DNA, 644 bp, Homo sapiens
cataatgatgtttatgaaattttacataaaggaggaatttattcatttcaagaaaatgggtaaaatcaaaattattttgatttaaatatatatatatagtcacataagcacacagaaattaaacttctgcatataaatataagccaaagtatcaaatgcaaggtaaatattcaggacagattttagtgcacaaaaaacagaagaaagctgttgcccttaatacataaattagttacaaaatgtagaagtaccactctaaaatccagtagataaatagacaataggctaatgaagaaatgcaagtgggagagaaagcaggtgaaatatgtactcatcctctaaattcagaaaaaaattaaaattctataacattttgtactkcccatttagctaatatttaaaaaataattataacccctcctgttctgaaagaacagtcaatcgagtacatgcttatgtaatagttgatctttcaaattggaatattgtttctggaaagcaatttgaaaagtacatattaaaaccatctaaatatttatggtgtctgtcttcacaaacaaattactgatgaattttataatcattcatcatggctataatctactatcttataaagtagaaaatttgtcagcataaaaaatccc

SEQ ID NO: 27235 - DNA, 689 bp, Homo sapiens
aaaattgcaaaaacagaccaaaaaacactatccattcttcatggacatgcactctaggtattaaacatggatgggaagacacacattgacttcagaatagtgggagggaggtggtaactggactggaaaaggggcatataactcgagtgtcagcttgaacattatggctgaatctgtaatgttttcttccttaaactctggagcaaatgcatccaaaagttaccatatttgaattttaactgggaggtacatgaaagtttaataccattatcctctatgcagtcctgtgtgtttgtaatattgagccatattttttaaacacttgactcatcatgaaaggaagcttgcctacatggtaccaatggttatctttaggtagcagaattcaagactgattcttttttctttttttcctacttgtatgttatctctatttccctgtgtgaggatttatgactgttgtgatgaaaaggctagcatcctaactccctgcatcataagcacacaccatgccctggctggcaggatgaggaggagggagcgtgtctkttcacctggccagccctaggcaactctgcagagaaagacacaggcacttcccctctgcagccaaagagttaagaaggctcgatgtgaaatgaatcattccaggggagctaaatcccggccttatctaattctgtatcctg

SEQ ID NO: 27236 - DNA, 628 bp, Homo sapiens
tctgaggtaaatggagagctcagctaaggcctaaagttgaaaaggggctttccagagcccccagtgtgctggacatctcaccagccatggaaagagtctgtgtccttgtggccacagayaggcaataatgggagcctgcccacatttcagggccttctggagtcttcacttgagagttcagctctggcaacagaggacacttctggtgtccagagattctcagtgcctggtggatgtaaaactgattgatggcatctgctggcttctgggagcactgcttggccatccttatctgtgagccccagccaagacactgcagaaagcttggtctctggctagcattctggactgtgagacagcgtggctgcagctagcacgggatggagagagtacagtgtggtgaagtggggacagtgggcattctgccacatggcctagggtttctcctgactctggactgcccaggtgcggtgaccaaaggcaaacagtttctaggccacagctcaaggagggaaaacccaggctgagctgggtgatggttctgagttgaggagacgaagctgggagtccagggagactaaagaagctcagataaactctgcagggcagagtattcagggaatgaaaa

SEQ ID NO: 27237 - DNA, 1219 bp, Homo sapiens
aagtctggacattgcatttattcttctgtagaatgaaaataaatgcatgtcaggtgattaatgtccctaaaacaatttgggggagtggatattacacaaaaacttttccaccagcagttttgctaacagatctactagtcataataaggatgctgaagagttgaaatagtaactgaaaccaagctgggactaaaattaaaaagagaacctcatcagcttctgtggtaatttgtggggatttcacaagtctgcaagttcacagttttagacccttgccaatctttatctcaccacaatatctcatgtctactggcttcttttcaaactttgtttctaatctccagttcaggaaacagagcatgtatatatttatttatcttagcaccctttaactattaatcatacaaaacttgaaagtattcaccaagcatttaggtaaaaagatacttctttactactaaatgcaacacaacatattttattatattattaaaacagaaaaatacaaattaaaatgtacaaatctcacattaacttattactacgtacttgaattgggagaaaaagaaaaaaagctaccattaatcaatgagtaggaaaaaaatgctgaagtatctaaagctgtatttacacttgaaatgtcaagaaatactcaagacccaaaacgtattgctttcatgcatctaaagcaatgtgatgggagtaggggtttgttttttttgttggtttgttttgttttctttttaagataagttctcactctgtcacccaggctggagtgaagtggtgcaatcttggctcactgcaacctctgcctcctggattcaagtgattctcccatctcagccttctgagtagttgggactacagcatgcgccgccayaccttgctaatttttgtattttttggtagagacaggatttcactatgttgcccaggctggtcttgaactcctaacctcaagtgatccacccacctcagcctcccaaagtgctgggattacaggtgtgagccactgtgcccagcccaaacatttattttttgacaactagaaaattcctcatgtcatctagatatatccagatctccatatctttgttgtaacataggccctatctgaaacattctaatgaattctttattaaggaccatattcacagcaagatgactatagatgccataagcctgacatcagcaatatcttacttcattgtgctgt

SEQ ID NO: 27238 - DNA, 1219 bp, Homo sapiens
aagtctggacattgcatttattcttctgtagaatgaaaataaatgcatgtcaggtgattaatgtccctaaaacaatttgggggagtggatattacacaaaaacttttccaccagcagttttgctaacagatctactagtcataataaggatgctgaagagttgaaatagtaactgaaaccaagctgggactaaaattaaaaagagaacctcatcagcttctgtggtaatttgtggggatttcacaagtctgcaagttcacagttttagacccttgccaatctttatctcaccacaatatctcatgtctactggcttcttttcaaactttgtttctaatctccagttcaggaaacagagcatgtatatatttatttatcttagcaccctttaactattaatcatacaaaacttgaaagtattcaccaagcatttaggtaaaaagatacttctttactactaaatgcaacacaacatattttattatattattaaaacagaaaaatacaaattaaaatgtacaaatctcacattaacttattactacgtacttgaattgggagaaaaagaaaaaaagctaccattaatcaatgagtaggaaaaaaatgctgaagtatctaaagctgtatttacacttgaaatgtcaagaaatactcaagacccaaaacgtattgctttcatgcatctaaagcaatgtgatgggagtaggggtttgttttttttgttggtttgttttgttttctttttaagataagttctcactctgtcacccaggctggagtgaagtggtgcaatcttggctcactgcaacctctgcctcctggattcaagtgattctcccatctcagccttctgagtagttgggactacagcatgcgccgccacaccttgctaatttttgtattttttggtagagacaggatttcactatgttgcccaggctggtcttgaactcctaacctcaagtgatccacccacctcagcctcccaaagtgctgggattacaggtgtgagccactgtgcccagcccaaacatttattttttgacaactagaaaattcctcatgtcatctagatatatccagatctccatatctttgttgtaacataggccctatctgaawcattctaatgaattctttattaaggaccatattcacagcaagatgactatagatgccataagcctgacatcagcaatatcttacttcattgtgctgt

SEQ ID NO: 27239 - DNA, 1219 bp, Homo sapiens
aagtctggacattgcatttattcttctgtagaatgaaaataaatgcatgtcaggtgattaatgtccctaaaacaatttgggggagtggatattacacaaaaacttttccaccagcagttttgctaacagatctactagtcataataaggatgctgaagagttgaaatagtaactgaaaccaagctgggactaaaattaaaaagagaacctcatcagcttctgtggtaatttgtggggatttcacaagtctgcaagttcacagttttagacccttgccaatctttatctcaccacaatatctcatgtctactggcttcttttcaaactttgtttctaatctccagttcaggaaacagagcatgtatatatttatttatcttagcaccctttaactattaatcatacaaaacttgaaagtattcaccaagcatttaggtaaaaagatacttctttactactaaatgcaacacaacatattttattatattattaaaacagaaaaatacaaattaaaatgtacaaatctcacattaacttattactacgtacttgaattgggagaaaaagaaaaaaagctaccattaatcaatgagtaggaaaaaaatgctgaagtatctaaagctgtatttacacttgaaatgtcaagaaatactcaagacccaaaacgtattgctttcatgcatctaaagcaatgtgatgggagtaggggtttgttttttttgttggtttgttttgttttctttttaagataagttctcactctgtcacccaggctggagtgaagtggtgcaatcttggctcactgcaacctctgcctcctggattcaagtgattctcccatctcagccttctgagtagttgggactacagcatgcgccgccacaccttgctaatttttgtattttttggtagagacaggatttcactatgttgcccaggctggtcttgaactcctaacctcaagtgatccacccacctcagcctcccaaagtgctgggattacaggtgtgagccactgtgcccagcccaaacatttattttttgacaactagaaaattcctcatgtcatctagatatatccagatctccatatctttgttgtaacataggccctatctgaaacattctaatgaattctttattaaggaccatattcacagcaagatgactayagatgccataagcctgacatcagcaatatcttacttcattgtgctgt

SEQ ID NO: 27240 - DNA, 1219 bp, Homo sapiens
aagtctggacattgcatttattcttctgtagaatgaaaataaatgcatgtcaggtgattaatgtccctaaaacaatttgggggagtggatattacacaaaaacttttccaccagcagttttgctaacagatctactagtcataataaggatgctgaagagttgaaatagtaactgaaaccaagctgggactaaaattaaaaagagaacctcatcagcttctgtggtaatttgtggggatttcacaagtctgcaagttcacagttttagacccttgccaatctttatctcaccacaatatctcatgtctactggcttcttttcaaactttgtttctaatctccagttcaggaaacagagcatgtatatatttatttatcttagcaccctttaactattaatcatacaaaacttgaaagtattcaccaagcatttaggtaaaaagatacttctttactactaaatgcaacacaacatattttattatattattaaaacagaaaaatacaaattaaaatgtacaaatctcacattaacttattactacgtacttgaattgggagaaaaagaaaaaaagctaccattaatcaatgagtaggaaaaaaatgctgaagtatctaaagctgtatttacacttgaaatgtcaagaaatactcaagacccaaaacgtattgctttcatgcatctaaagcaatgtgatgggagtaggggtttgttttttttgttggtttgttttgttttctttttaagataagttctcactctgtcacccaggctggagtgaagtggtgcaatcttggctcactgcaacctctgcctcctggattcaagtgattctcccatctcagccttctgagtagttgggactacagcatgcgccgccacaccttgctaatttttgtattttttggtagagacaggatttcactatgttgcccaggctggtcttgaactcctaacctcaagtgatccacccacctcagcctcccaaagtgctgggattacaggtgtgagccactgtgcccagcccaaacatttattttttgacaactagaaaattcctcatgtcatctagatatatccagatctccatatctttgttgtaacataggccctatctgaaacattctaatgaattctttattaaggaccatattcacagcaagatgactatagatgccataagcctgacatcagcaatatcttacttcawtgtgctgt

SEQ ID NO: 27241 - DNA, 532 bp, Homo sapiens
attcactttttaaaacatactagctttagcataaatgcatttacttattataattcacttgaatttacctttatggcagtgtttctctcttaacattctctgtccatctaatcatcttctataaactagcctagatttctagctgaagctggattcagtaaaacctgagaaggaaaatttagcgttcatgccacaaaacaccttgtttagcataattacttacayacagctttctcccccaattatttttattccaaaactatttgatttgacagcaagtttcattcatttttgaggctctcactcctataaacgcagatgagtggtaaagttaatctgaatctagatcttctgaaatgccactgttgattctaggattcttttcattcttgaaaagagtttcttatagttaaataaataaataaataaaaatcctgaggcaacctctgcatttcttctgagaatcattttagtgtgcagagaatactataaggagaattttcagaattatgatttcctttctattcaagca

SEQ ID NO: 27242 - DNA, 532 bp, Homo sapiens
attcactttttaaaacatactagctttagcataaatgcatttacttattataattcacttgaatttacctttatggcagtgtttctctcttaacattctctgtccatctaatcatcttctataaactagcctagatttctagctgaagctggattcagtaaaacctgagaaggaaaatttagcgttcatgccacaaaacaccttgtttagcataattacttacacacagctttctcccccaattatttttattccaaaactatttgatttgacagcaagtttcattcatttttgaggctctcactcctataaacgcagatgagtggtaaagttaatctgaatctagatcttctgaaatgccactgttgattctaggattcttttcattcttgaaaagagtttcttatagtwaaataaataaataaataaaaatcctgaggcaacctctgcatttcttctgagaatcattttagtgtgcagagaatactataaggagaattttcagaattatgatttcctttctattcaagca

SEQ ID NO: 27243 - DNA, 1803 bp, Homo sapiens
attacccaaattgtagggctaatcatcctgtcttttaaaattacaataattactttgtttttatatttcacgatcatgaaacacaagcaatgattcatattggaggctttggagttagataaactaggaataaaatccaggtctaaaatctaaatccaggagttagataaactaggaataaaatccaggaataaactccaggctttggagtcagataaactaggaataaaatccaggtctgcttaaatattacccaaattgtaaggctaatcatcctgtcttttaaaattacaataattactttgtttttacatttcacgatcatgaaacacaagcaatgattcacattggaggctttggagttagataaactaggaataaaatcctggtctgaaaattgtaaatagcatgggtatttgcaattaccttaattactctgatactctgtaatttctttaaaacaagttgctgtgagaattaaagtatgatgggtacctggaacaaagtaggtgctcacaaaatggtgagctacagagatagttgaatcatggctatgttgggattttacagcataatctctgaggagatggttgccagatccataaactggcagtttttcttcagttctcttcaattcccctgaagttagaacatgctataatctagtttcttccagctacacttcaaatgattgttggtccataaactgaggcaagagattttataacaccctagctaattttaaaacacctctcccaattgcaattgctttctggtattttaacatggtctttttaatttatttcaattgctatgaagttgacattttagcttctggtataatcatctcttttgtttctttgatccactcctattccttatgcacgtttagtctgatgcatataggtctagactctctactagaacacaaatcaatggtaagaaaagtggctatatcagggtaagtgacacagtaacactcaggatagtgcagcaggccatttattggtaaagggcatagagcacaatttgtaacttggggctggagctgctagtgacattgctaggctgggaaatttaaggagacatttgctctgagggtcccaaaagtgcaatgtcagccctgggagcaaatgcctcctaaattttgagccctagggcctcactccctttaccctagtcctggctctgaattgcaacactaagtcacattggctataaatacagaatagcattcaaagcttggaaaaatgaacattttaagtaacttacagtggattgtattagaagtcagcaaaaaattttaaacacatgaggaatatwtatatagcattctctttttagattatacattaaaaggtactaggaaaatttaaaatttttatgcccagttttaaaaatatatgaatagtaatgttagaaccactagcatacctcaacaaatattgagcaaactaagtgcatccacatctttatttcatcattagtttggtgacttgaaataaattttatgttaaacactatgagcaaatcgaaaggttcatccaggaaaattaagtacttgtatttttttaaagttttaataggatgtatatttctgtattagtccattttcatactgctatgaagaaatacctgagactgggtaatttataaagaaaaagaggtttaatggactcacagttccacatggctggggaggcctcagaattatggcagaaggcaaaagaggaggaaaggcacatcttacatgtcagcaagccagagagtgtgtgcagggaaactgccttttataaaaccatc

SEQ ID NO: 27244 - DNA, 504 bp, Homo sapiens
ttctgaaagccatatcctgcccygtttcctgctcagttctgaatgttagtctcacaattaggtttagctaagtgaaggcaggggagagggcatccaaagggtggaagggaaggagaaaccagactatttcttctcactctctgtacttgaggtcatatctcttctctggtttcggtttctgttgtgcattctttgccatggttccagcctggcagcttcagcatttcctaagcagttccttctccatgattccaggtcctactgaggccccaactcagagaatcccatagtgccacagcctccctttgttgtccatttctggtatcatagagactttctgctcttgctaacctctgggtgcttcatatttccttattaacctttttgactcttccaatataggatattaaagaatcatattactgaaatgttaaaaagcataactgcctttagatataattaaacaaagggcctcaaacaaagtcaccatgggcctgcctcttt

SEQ ID NO: 27245 - DNA, 1120 bp, Homo sapiens
caagctgactgaggctctatctccacttgtttccatgatcacaaacacaggaggagagggaaatgtgaaggacatgctggtttcacaagattttgctcaggagacagatgtcaatttccctcacagttcattgatcaaagcaagttgaaaggagaagatagatatgaatggggtagagaattctaatcctctcctaaagagataatgaatattgctcccaaatattttccccaaagctaggagaagaggcttcaaattcaacaaatcaggctgaaaagcctatactcttaatcctatcaatctatctgtgtaattactatacataactatatgtgctatctcggaacacatacaaacatacacatactcacacaaatacataagtagatgtatattcctttttagcgtattacaaaatgtaaaaccatttccagatttctgtccacatctagatctccctttgccccaatattacaaacttggtgttcatactttcaatgtgcatattttcataatttcataataaagttatcaataaaaatatattatattgtgtttcatatttaaataaaatgatatttttgtcacttgcttttgtcacttttactccacatcacatttgaattaactacagattttgttaattcctcttaagtttaattgacattatagtcacactgtgaagacactggatcatatactggatttctcaagagtccatgagtcaaatacttttttattctgctttaaaatttattttacttaaaaagttaggaagtcttgacaaatgccaaagcaaatgtgttctgtggcttctttcagttttgtctatgatggaatcaggaagagagactttcagtcaaagcaggagggcaccaagttagattacaaagttgatgcacagttacttattctaaacctgaaaaaatgttcaaaagctctgtatatcacaaaaaccccaacaactggaaggtaccacgtattacaatgtgtcccaatacatggcttcgaagactagaaaccagkgtacttgtaagtgatcagatatcttctggatgttctagatgatataactagctgctatggtttggaagtttgtcctttgcctcatgtttcactt

SEQ ID NO: 27246 - DNA, 511 bp, Homo sapiens
gagaatatgggatataatttcgtatcataggatacataatgcaagtcacactatctcatactatgcatggtttaattttaccaaaagaataagccttattatttttcccagtaagagtcagcaaataacctgtggttatgatttgttttctttaagcatgagctactaaataacactttgcagttgaatgacaatttacactcctgttgkcaacaaaagaccaaatccgtatagaaatggcattcttattccataatgatatatttatttggtgtcattggactttgatcaatatcattttctcaaaacatagaactcctttctcgtgactaaaagaacagcttatatcaagtcaagtcttctagtcctagtatcagaatttgattatatgttcctgaatttgtatctaactttcttcttcctttgtgaaatcaaaattatctctagagtgtttttaatcaaaaacagttactaaataagagataatgaatgtgatgtgtttatcacgcca

SEQ ID NO: 27247 - DNA, 517 bp, Homo sapiens
aggaagccaaataaacctaccaaactaaaagctcttgatacggaggctgtgaaaagtatgatgtattttctttgtcaatcactagattttattgaagatctaaaaggtcttagcacaatattaggtacttgggatataatttagacattaggtattctctatgtcttcaggagatgaacagttattgactacttacaacttgacaaatggaccacccctcaaaaacgtcaggggcctactttctaatatagaaatttatacgccttgagtaggaatacttttactttctgcttggctgatattgctttcataactctgaaatttgactcattttgctaacatacttgatgttaacattttagccttatatatttataaaaatartagtttgaattactgtcccatagaaagaaatgcaagcaatttaaaatatgcttcccctcaactcaaattttgtcattaaaattcaatgaagcttcttcatgatcctataagttatcttaaatactaactgctt

SEQ ID NO: 27248 - DNA, 535 bp, Homo sapiens
tctaatttaagaaagagaatccgggccgggagcagtgcctcacgcctgtaatttcagcactttgggaggccgaggtgggtggatcatgaggtcaggagatcaagaccgtcctgtctaacatggtgaaactccgtctctactaaaaatacaaaaaattagccggatgtggtggcacgcacctgtagcccacctactcgggaggctgaggcaggagaattgcttgaccccrggaggcggatgttacagtgaaccaagatcgcgccactgcactttagcctgggtgacagagcaagactccatctcaaaaaaaaaaaaaaaaaaaaaaccaaaaaaccacaaagaaagagaaaccattctaggtatatgagattctgggcccagatcacataatactattattaatattttcttaattttagaaataacgaatataaaattcctgaaagttagtaggcgttcactgaagagcaactattattattgaagaaagtctataacacattctccatcctccatcccaccttttctagacttc

SEQ ID NO: 27249 - DNA, 543 bp, Homo sapiens
aaaactatcactgagtctctggctacaggtggcctgttgttagccttattttgggatctttcagaatacttaactttatgtttcactctagctggccagatttcaggccagatgtgtttatagggggtttgaactgaaatattttactgttgtccaacatttagagaaaagtatatacaccatgtaacagtccatttgcttaacctttcttgggtttctgttgtgaatattgtagagactcagattattttcaatttggcaatttaactgtcatctgtgctctatttggctctaattttattttcccccaaagtcttaaataatgactaggtttttctctatccaaagggactgatgaactctgtgaagttctatagtattttatcccagtgctgagctcattttggctgctgctctaaatgggatatttacaaattgttcaatagctgttagcaggtgctctgtcttcctctgcattccagtaactcattcagatatattcagccttcyattaataatctattttgtaatgtcacatgacaa

SEQ ID NO: 27250 - DNA, 1621 bp, Homo sapiens
taaaaaatttgctatgtggaatagccagaggactttcgccgctcaattttaatttgtccactgtagaacaatatgacctccttattgctccaaatcttgatacatttgtatagcttttgtggtggtggcatgtgttgggggggaaggtgaaagagcagggccatatatagaagtgtggcttgctccactcacctctgctgagacctacgtgtagctagcagcattgtaacttggttctaggttgcactttgctagttctaggtggtgaacctggaggagtgagcagtggctggaaatggggctggaagaggaagcaaggagagcttaatgcaactggcagctggcagatgggtgacttgartagatgcatgaaacatacacctagtttgctctagtatgtttgccaaacatactagaggcttcaaaggcaactcttagatgacagtactggataattctggaatttattgtcagcacactctagccatttgagagaactagcctgatgtgagacatagattttctttctttctttctttcttttttttttttgagacggagtctccctttgtcgcccaggcaggagtgcagtggcacagtctcggctcactgcaacctccgcctcccaggtccaagcgattctcctgcttcagcctcccgaatagctgggattaccggcacccactaccatgcccaggtaatttttatatttttagtagagacggggtttcaccatgttggccaggctggtctcaaactcctgacctcaagtgatccacctgcctcagcctcccaaagtgctgggattacaggcatgagccaccgcacccaaccggtagattctctttcatttagatccaattaacttggaatctgtgcttccttggtcagaagtttgggggaaataatcttttgtcttgtctatgaagaaacaaatcagaagtagaaacaaagtgagagggagaaggtttagattttgtaaaggaacaggtcagtacttttcccatactaacaaagtgtttattgccctagaaaaataatttgcaataaatccatcaatagtttacaggaatgtatgggtttttaaaatgtgaaaccctcaatccttttttgaaatttggtttgaggacagttctaaatttcttcctaacccctttctctcccataactttcatccctttatttctcccagccaggccttccatggtgtggaaatgatatggaaagtcaggttgccattttttgtaaggctccccacagtatcctggacgaattttctttctcctttccaaataagcgtcgatcattggactgaagtggatggttgagatgttgcagtgggaataaaaggaggtggcgagaacgttcttgcctaaaccattccccttcctttgttcccagcccaagggctgctggacagtgtctctcagagtacaccttggtccttttcctgagaaagacaaacttggaagtgactagcaggtctaattatgcctctatggaatccaaatgctggaaggagacaaagagaagtctggaggcctccgactggagagagagcctgatggattaaatccaagcttcgcacagtcccaaaaagctgtcagggtgcctgggcagc

SEQ ID NO: 27251 - DNA, 520 bp, Homo sapiens
gtcttgcgtawgatgtaagctaaatatttattgaatgagtcaatgaaagtgattttcagtgttgagagctgaattcagaaccccacaatctgatctccatgtttcttctaccaagtcattctgaaagcaatgcagtttctactatgatttgcctctttgtaagccaatcacggttgaaaataggctgtttcatatggtgcagtctaacccaatgcatatggaactgtttggacagaataaaatagtttaaatggctgagcttgaaaactgaacttcctgtgctgttgctggctagcattaaatgcgtatcccctcccaagaaggcctccttctttcataaacttgtattagttctcaccaggagtagtgtgagaataaagtatagtggtcgttggggtgtatccatggaccaaatgaagaggagaatgagggagtgacctggtgttgtgtcttccgtcagtcatccattcactatttccataagcattgactaagcgtgttctgtcactggcctagatga

SEQ ID NO: 27252 - DNA, 728 bp, Homo sapiens
cgcccactagtgagaaaagcagaaaggcgaacctgggccttatcctaatagctctcatttaattcacccaatgcttttcaaaggcagatattttactgataaggaaacacggcaaacaggtgaggtggtccaaggtcccatgcgctacagccatctctctggtataaggaaatacactaggcatgaaaagcaaacggatggcaagaagggacaaagggaaagtttcccatagattctatcttaagctgattgagggagggcaaggggatcaggaatccattctctcaacagatagcccttcagcgatttttctgagccaccctcggaatcgcagctgccagcagcagatgtggatgtaatacagtgagcaggacccaaactcaaatgtttgctgaatgaatgaaggaaccagagtargcaaagagggaaccagcaccggttaggccctggcgtgcccccaggacgcctgcagaagtgccacgggcatgacccggcccacctcgctacgcaccgcagcggagagaaggctcttccgagcggcacccagaggagccttcgcgggcatcgccgcaccttcaccggcagccccaccccaacccgggtccctcgggattctgcccgagcctacgccggcgcaagcgtgggcagcgaggaaccagctgagaggcaggatcaaagagcatgggagttgaagacaagggaaaactgggggacagaggcgaaaactc

SEQ ID NO: 27253 - DNA, 564 bp, Homo sapiens
tgaaatacattccaaattaaggacttaattagtttacttgcttttctagaagagaacctggtcatagactcccctttgttagaaaaattgaaacgatgactttatattgctctaaagtagtgtcaatctcccctctctctctctctctctgtgtgggggtgtgtgtgtgtgtgtgtatatatatatcacacacatatacatacatatacacacttattatctatatacacacacatatatacatatacatttctctgtaagtatatataagagtagagatctgtaaaatctacatataggtaaacataaattataatgtgtgtatatrtacaactttatacatatatttatatctgaacaatttataattcctgcctgctatctagtaagactacttaaaaaataatgcatactgtgaattacatgtaactactttgtgtacctatgaagaattaccctttttacacagataacatcttgaggggatactcacttgtcctaagaaccgtatggaacatagtagtgaaatttcaattccattcataaaattaatagtgccatcta

SEQ ID NO: 27254 - DNA, 507 bp, Homo sapiens
ggataatgggacatgaaatttttgtttatattcaatggtctctgtcaagcccttaaaaaataaattaggctgtcatctttctgaaatagttagtgggaagatagaagggtatgatacrtcagtggctttcaaacttattcaactcaactaatttcataaagaagaaaacccacaattacattaaactatattatgacttgtgcttacagaaatttgctctgaggaaactgtactgggataccaaagtccaagacggggtttgtaggtaagggtattgccagtaactatctgtgtgatctcaggcaagtcactgcccctttttgggcctcaatttcctcaagaaagagaaaaaggacattaagataacctttgaagctatagaccctttgtgaacctgagataagctataaattctttccctagatgatgcatatatgcatgtacatggacaactttgaatgctggttcgggttgttcacagattttccaaagactatttgtgggctt

SEQ ID NO: 27255 - DNA, 507 bp, Homo sapiens
  misc_feature (1)...(507): n = A,T,C or G
ggccatgctgkggggggaggggccgggcccctgtccggaagctggaccagcaggcagagctggggagctggggctcagggctgcatcttgctccttcgctcctgacccaagccccaggcctttgttttctcagttcctntgatagcaccattggcacccctccctcccatccagacccccggtatcccgaacctcacccatccagagctcccacaaacccttggcagcccgagactccatctcatgcacccagaatgcacagacccaactgatgctcactctttggactaaacaggggtgcagtatctccagacacattttcaatctccctcctgagactagctgctgagagtggggctgaggtcccccagtccaggcccctgagaagtcagggccatgcccttcttccagaatggaccaagcctggccaatgctgtccccatcctgtcccccatgaggcttgggtccctagaggcttctgcctgcccacccctccctcatgctgaa

SEQ ID NO: 27256 - DNA, 1122 bp, Homo sapiens
gatccccccaggcggcaggcacttgacctgcttgaccacttagggctgtggccctggaatttgaccttggagtaatgaccaccaggacggtggcctggagtcgtgggaaggaggggagcatatcaagacggctccttcctgccctgctctgtccccagagctgatgtcatcccccttctgtgagctgcaccagcatgcttgctttactctcctcctaagtaacatttctgttgtctgccattgaggctccctaattatgtaactctctccatttcaccaatgggtcacaggcctggggggcaacagagtggtttctcccaggatgtccctggaaggagttggggtaggggaggaggctgccctcacccagcgtggccagcacgtggcgaagctcagcacccatgacagtgccattgccctccttgtcgaagacccgcagcccctccacgaagtcctcataggtgcctgtgtccttgttcttggaaatgtgctggagcataggcaggaaagtttcaaagtccatcatcttggtattgagctctgcagagaaatggtcccaggttccagggtctaaggctggggtgggcacacccctcccccatgcctgataatgaggagctatccccacctytcacacagttctacaacagtctacaccagttctcacagcagtctacaccagtttgccatttaaaagcaaactaccatcgcgaggcactttacagtctactgagcaatgcactgtttccatagccctttgctattcacaaagggagtttgctgccctgagccaccatggagggctctgtccagaaccccttgcctacttttgggaaacagtcctcccctcgtggcattttcttatagacctcaccctccaccacctgtgattgggtcaggagcagctaggccaatcagagaccttccctgggacttttgaacccttggtgggggcttgggcctcactcctttttttttttttagctttaaaattttattcatttatgtatttattcattcatttatttatttttagacacgaggtcttcttgttatgtcacacagactggagtacagtggtgtgattatagctcactgcaacctcaaattcctgggctcacg

SEQ ID NO: 27257 - DNA, 1122 bp, Homo sapiens
gatccccccaggcggcaggcacttgacctgcttgaccacttagggctgtggccctggaatttgaccttggagtaatgaccaccaggacggtggcctggagtcgtgggaaggaggggagcatatcaagacggctccttcctgccctgctctgtccccagagctgatgtcatcccccttctgtgagctgcaccagcatgcttgctttactctcctcctaagtaacatttctgttgtctgccattgaggctccctaattatgtaactctctccatttcaccaatgggtcacaggcctggggggcaacagagtggtttctcccaggatgtccctggaaggagttggggtaggggaggaggctgccctcacccagcgtggccagcacgtggcgaagctcagcacccatgacagtgccattgccctccttgtcgaagacccgcagcccctccacgaagtcctcataggtgcctgtgtccttgttcttggaaatgtgctggagcataggcaggaaagtttcaaagtccatcatcttggtattgagctctgcagagaaatggtcccaggttccagggtctaaggctggggtgggcacacccctcccccatgcctgataatgaggagctatccccacctctcacacagttctacaacagtctacaccagttctcacagcagtctacaccagtttgccatttaaaagcaaactaccatcgcgaggcactttacagtctactgagcaatgcactgtttccatagccctttgctattcacaaagggagtttgctgccctgagccaccatggagggctctgtccagaaccccttgcctacttttgggaaacagtcctcccctcgtggcattttcttatagacctcaccctccaccacctgtgattgggtcaggagcagctaggccaatcagagaccttccctgggacttttgaacccttggtgggggcttgggcctcactcctttttttttttttagctttaaaattttattcatttatgtatttattcattcatttatttatttttagacacgaggtcttcttgttaygtcacacagactggagtacagtggtgtgattatagctcactgcaacctcaaattcctgggctcacg

SEQ ID NO: 27258 - DNA, 1470 bp, Homo sapiens
gcctcctaggtccctgtcaggggctggttccrggggacgcaggcgcacatcccacccacccctgtggccagcagcccacccctgctcaccacaatggaggccaggatgggcacctggatgatccactttttgttcccggagctcaagtcccagcacctgggggaggttgaggcattagctcccatccctcctgttcccatcctaagactgcccacagagacccagatttggtctggtctgacattagctgttgaggacacagggcaggggtgctgggtgtggccaggcctgaggcctccctcacaggcctctttggaagtagcctcctgtgaccctgagggtgctcctggcttgaggctggactgagaactcctgaggctgggccgtttgaggccagggtacaggaggccctctcacatgcttcctggaagaaaagggacccaggggtgcttcttgcctgggccccttctccacctggacctacccggtgttggccagggtagctctgacactgacccacacagccacgaagacagcgggcagacctgtgggcacagagggggacagtgtgcaggactgtggctgctgtccacaaggtcattcccccctcatcctcgatgacccccagcttaccccaccattgccctgaacccctgacactgggcacttggtccacttggtgacagagccacactctgccatgtggtgccctaacagcttccccttggggctccagccctcaaaacccagctcagcctctgccctcatcttggctccatgtcatatgcacatatatggggtacaaggcataatataataataaggtatcactaactgatccatgccctgtccactccctctgcagagggcactgctttggacttgcagctcccatggggagacagcctattttccgcatttttttttgccccagcacagcaccccccacaacctggtttgaaaggtcctagccctcgtggatgagactggatggggtgagaggttttgtcccaagcagaggccacagggagacctcggtgtgtcagtatgtcctggcctgcgccagctcaaggggcacatggtatatttgggtgagctgtgcctctgggaagggagccccaggtcctccccgaccacataccaccaacttgactctaggcctggtacacccttggagggatagggtatgacctggctttacggtaagaaaaagagctgtgacattcctgtgccccaggattctatgcactcccaatctgcatgtcgccagtccactaggacacctcctagccccagagcctgcatctgttcctgggactgggcccaggtctccccaactctggggcttgtcatggtgaggtcagggtcaggatgtatgtcgaggggcagggaggcggtggctgttgacctgtgggcctctgggtgctgagtgcggagagggctccagccacccggcccacccctctgcag

SEQ ID NO: 27259 - DNA, 811 bp, Homo sapiens
cactttgctcctaacataaggctaaatgactgtaattaaagattgagggagaagagaatcaagaaaacatatagaaacttcggaaagagaatgggaacttggtagtgattaataaaatatacataagttccctgaaaaattagaaaaagttgaatgtatatcttttaaaattatgaatattctgttttttgaattattttctcatttatttatagtccaccaatcttttttagtagttgaatctgggggcaataaaagcatataaaataaaatgctaaaatataaaagtttaaaagtcaaaatccagaataataaaacttaggttaagaatccaaggctaaaacttaaaaaggacactactttgcataccataagaagcagtataagaggtacctgaactgtaaattcaactctaaayttcttggtacagaatgaacagggaaacattttcatgcacgtagttttttggtcaaaatcaaaatcagatcactttctcaggggaataaaaacttctctgagcatttcattgtaaacaaaatgttgtaagggtcactttagggaaaagtgagtgatgtcatggataaagtcctcaaaataatcttcaggcaaacacagtaatcggtttgacttgcctatttctatgaaagctgcacaatatatttattatatattgtgaaagctgtactggattcattgtttcagttgcccaaaatgaattccattttagggagtggttcttggtttctaattcttttgaagaaatgattgtctccttttaagaacagtcagcaaatctggtgtccttatcctc

SEQ ID NO: 27260 - DNA, 1257 bp, Homo sapiens
gtgcttgtcttatttccttttgtatgggttcctaaacctcattcatygctctactacttttattctctttcaccataagcagattccacttgtcctattgtttaatattttctttcatctgactcactgttcaagacctaatttatgtttattttaaataaaaattatataccaccacagtgagttgaaaccattatcatgttctagaaatgaaaagtaaccaaaaaataaaacaaaaaagttgtaacataatagtttgattatggcctataaaaggcttagacatattccttatttttttaaaggagggggagattagttttagaaagcattaaagacagaatgccccaaactaaaattgaaaatcatttctcattctcctaaaaattacctcatgagtaagtagtagggttcctagtctttaagaaactcggccccagatatttaaagtttctcaaagacaagggtagtgcattatgggagctattgtgattcaaaggtagacgtactgctgcataacaaatcaatgtgaacattttctagtaccgtcatgtacatctttaaaaccacttcaggacttagcatgagtgctttgcatatggagtgctctgaacaaatatttgttgagggaatgaatgaaggaatgtacaaacatcctggctgtaaaattgattttgtaccttttctcaatttaattgctccattaacctctactggttcagttcagtgtccccctagcacaacacaaattctaccctatgatttctttctcccatgtgctgtgttccaattacacaattcaagtagacagcacctgatttgtatgtgatttcattgcggtcagtttggtcatttacggaggctgaagtggattttttgtttgtttattacacttcccatcttgcatgccaaatcatccttttggtttacactaggtcatgaaccacactgtttattggagctactagttggcttttaagtttgggttttggtttagggttgtatgtctaatattaatcctgcagtcactagcttctctgtacctgaaggtctgtgtttacagctatgaaacctaaagcagtttcactcaacctggagctctgactccagctcactaaacaactttttcatgttattttcttattaacttaatgttaaatatttccattcctggctcatgagcattgcaaaatatgatagcaatccctatgcacccaaaactgagaattcttttgaaatgcttatgtaaactacata

SEQ ID NO: 27261 - DNA, 816 bp, Homo sapiens
gggaaacctttgattctttccagaaaaaaagaccaggccacaggtaggagggacattcttcgctttccttaatgtagatatacatcagttgactttagtggactgaccaccttctcttgtccacatttttagttttgtgtggtttttttttttttttttttttttttttttttttttttttttttttttttgggagacagctctgtcgcccaggctgcagttgcagtgatgtgatctcagctcattgcaacctccacctcccaggttcaagcgattatytgcttcagcctcctgagtagctgggactacagcgagcaccaccatgcccaatttgtttttttaattttttagtagagatgggattttgccctgttggccaggctagtctcaaactcttgacctcaagtgatccacccgccttggcctcccaaagtgctgggattacaggtgtgagcaaccacacccagcccacagttttagttttaattaaatgaattaaagatgggttgtataaaaagtagaatattaactacattcgattttggtttctggttgtaatacacactcatgcaaatcctgagaagttaccagtcctggtagcatattagtctatagtcatgtatttttaatgagtagttttttaaacttatcttttcagacttatacttgacttcgtgatttccctgcagttctactgatgggtttaagaagttgggtctagctgagaccaataaatgggaaattttttgtaaaatttaattttgtcaaatcaggctctatttttctttcttccttttttttttttttttttttttt

SEQ ID NO: 27262 - DNA, 528 bp, Homo sapiens
gcatgtggtaaccaccaaatgggaaccacggccttctggctcgacctagagcatgaatgtagcaaagcgaagccctgtacactttataaaaaccagtagaaagacactccagtctgagtgagcagctggaacaaaggtaccacctgaatagagggtgtgtggcaagggcaggcacgagacaggaaatcagactggaagagtaggttgggcctggtcatgcgtgycaaggcaggcagcattctctaaggagcagtggtaagccatcaaggcatttgttactaggggtgtgacaatatgagattgtattttcagaagatgactggggctatgatgatgaatgctttgggtgggagtggaattaagccagagaaaccagctagttcactactgcaaccatccagccaggatactggagacttttattcaacattaggcaaatacttgctgagcacatgctatgtgctaggtactgttctaggtcccaggggtgcatcagtgaacagacaactgtctctgcccttgtggagt

SEQ ID NO: 27263 - DNA, 1253 bp, Homo sapiens
tgtctcagcctcctgagtagctgagattacagatttgcgccaccatgcctggctaatttttgtatttttagtagagagggaagttctaccatgttggccaggctggtcttgaactcctgacctcaggtgatccacccaccttggccacccaaagtgctgggattacaggtgtaagccaccgctcctggccaataactttatttatttattattttatttatttatgtttttgagacagagtctggctctgtcgcccaggctggagtgcagtggtgtgatctcggctcactgaaagctcagccattctcctgcctcagcctcctgagtagctgggactacagacgcccgccaccacgtccggccaatttttgtatttcttaagtagagacggggtttcaccgcattagccaggatggtctcgatcttctgaccttgtgatccgcccgcctcggcctcccaaagtgctggggttacaggcgtcagccaccgcacctggcccagaactttattataggtgggacacacataccaaaagaatcagtgcaccacaatgatctaattcaattttgctttttgagagggtttacagaaagattaaactgactgattaacattaagcgctcttttccccttagaccaaattttagttagctattgtcaactataaagctcattattattcttatgaactttagaatctaaaaagataaatcagtcatttgcctgtttgttaagactttgtctgagccatccctacaagacaggtaaagacagcactcagcacaggactgtggcctacactgatctctccttacttccattatctgcattcacatccatgtcttaaattactgccttctgaaagttaacaactacrttagtattttcttgtttattatctttttgttttgttttgtttttgttttttctttttcgagagggtttctcactctgttgcccaggctggagtgcaatggcatgatctcggctcactgcaacctccacttcccgggttcaagcgattctcctgcctcagcctccggagtagctgggactacaggtgcctgccaccacgcccagctaatttttatatttttaatagagacgggattttaccatgttggccaggatggtctcgatctcttgacctcgtgatccacccgcctcagcctcccaaagtgctgggattacaggcctgagccactgcgtccggtcttttttttttttttttttttttttttgagacacagtct

SEQ ID NO: 27264 - DNA, 1253 bp, Homo sapiens
tgtctcagcctcctgagtagctgagattacagatttgcgccaccatgcctggctaatttttgtatttttagtagagagggaagttctaccatgttggccaggctggtcttgaactcctgacctcaggtgatccacccaccttggccacccaaagtgctgggattacaggtgtaagccaccgctcctggccaataactttatttatttattattttatttatttatgtttttgagacagagtctggctctgtcgcccaggctggagtgcagtggtgtgatctcggctcactgaaagctcagccattctcctgcctcagcctcctgagtagctgggactacagacgcccgccaccacgtccggccaatttttgtatttcttaagtagagacggggtttcaccgcattagccaggatggtctcgatcttctgaccttgtgatccgcccgcctcggcctcccaaagtgctggggttacaggcgtcagccaccgcacctggcccagaactttattataggtgggacacacataccaaaagaatcagtgcaccacaatgatctaattcaattttgctttttgagagggtttacagaaagattaaactgactgattaacattaagcgctcttttccccttagaccaaattttagttagctattgtcaactataaagctcattattattcttatgaactttagaatctaaaaagataaatcagtcatttgcctgtttgttaagactttgtctgagccatccctacaagacaggtaaagacagcactcagcacaggactgtggcctacactgatctctccttacttccattatctgcattcacatccatgtcttaaattactgccttctgaaagttaacaactacattagtattttcttgtttaytatctttttgttttgttttgtttttgttttttctttttcgagagggtttctcactctgttgcccaggctggagtgcaatggcatgatctcggctcactgcaacctccacttcccgggttcaagcgattctcctgcctcagcctccggagtagctgggactacaggtgcctgccaccacgcccagctaatttttatatttttaatagagacgggattttaccatgttggccaggatggtctcgatctcttgacctcgtgatccacccgcctcagcctcccaaagtgctgggattacaggcctgagccactgcgtccggtcttttttttttttttttttttttttttgagacacagtct

SEQ ID NO: 27265 - DNA, 1253 bp, Homo sapiens
tgtctcagcctcctgagtagctgagattacagatttgcgccaccatgcctggctaatttttgtatttttagtagagagggaagttctaccatgttggccaggctggtcttgaactcctgacctcaggtgatccacccaccttggccacccaaagtgctgggattacaggtgtaagccaccgctcctggccaataactttatttatttattattttatttatttatgtttttgagacagagtctggctctgtcgcccaggctggagtgcagtggtgtgatctcggctcactgaaagctcagccattctcctgcctcagcctcctgagtagctgggactacagacgcccgccaccacgtccggccaatttttgtatttcttaagtagagacggggtttcaccgcattagccaggatggtctcgatcttctgaccttgtgatccgcccgcctcggcctcccaaagtgctggggttacaggcgtcagccaccgcacctggcccagaactttattataggtgggacacacataccaaaagaatcagtgcaccacaatgatctaattcaattttgctttttgagagggtttacagaaagattaaactgactgattaacattaagcgctcttttccccttagaccaaattttagttagctattgtcaactataaagctcattattattcttatgaactttagaatctaaaaagataaatcagtcatttgcctgtttgttaagactttgtctgagccatccctacaagacaggtaaagacagcactcagcacaggactgtggcctacactgatctctccttacttccattatctgcattcacatccatgtcttaaattactgccttctgaaagttaacaactacattagtattttcttgtttattatctttttgttttgttttgtttttgttttttctttttcgagagggtttctcactctgttgcccaggctggagtgcaatggcatgatctcggctcactgcaacctccacttcccgggttcaagcgattctcctgcctcagcctccggagtagctgggactacaggtgcctgccaccacgcccagctaatttttatatttttaatagagacgggattttaccatgttggccaggatggtctcgatctcttgacctcgtgatccacccgcctcagcctcccaaagtgctgggattacaggcstgagccactgcgtccggtcttttttttttttttttttttttttttgagacacagtct

SEQ ID NO: 27266 - DNA, 565 bp, Homo sapiens
ggaacacaaacattttttatgagaccagcattaccctgataacaaagacagaaaaggatactacaaggttgacagatatttttaaggtgcaaatgatgtattgttggaattgaaaatacaggatttgtttgtacaaagatttgtgtgtggataggtggatgcatactggtgtgtgcatgcatacatatacaagcttaccttgttttattgcacttcactttattatgcttctcggatattgcattttttacaggttgaagrtttatggcaaccctgcatcaagcaagtctaccagtgccacttttctggcagcatgtgcttattttgtatctctgtgttacatttttgtaattcttgcaatatttcaaatgttttgttattattatatctgttacggtaatctgtgatcagtgatcattgatattactattgtcattgttttggggcatcacaaaccatgctccaaaagacaatgagcctaactgatacatatatgtgtctgaatggttccatctatctgcccttcctccatccccccaactcctcaggtctccctgttttctga

SEQ ID NO: 27267 - DNA, 582 bp, Homo sapiens
tatccagagaaagaatacctaagtacttactagcttctaacctaatttgtctagattttggttgctgatatgagaaaatatctcatctctctagaaagtgctcttatttgagtttataaaagaattttgcatrtctaaggtccaaaattctataaatttgagtatttgcacttagatttactgtaacagcattctcccagatatgttaaaaataaattactgtgtttactatttcaaacactgtgtaaaacattttatttgaaaaatcttatttttagaaaaacctcataagagtgtatttatgaggatattttattttttaaaaatactgcctcaaactggcataaacaataaaggaattcattatcttaaagaataggatgtatgaaggtagattgtcttccagtgggctatgagtaggactccagcgatttccttaattcgcctgtctgattcagcttcatctttaagttacctaccctcatgggtgcaaaataattgccttcaaacataaagaccatatccttctgtttatttctaaaggagagacaactttccctcttccccagctatgaaaaattt

SEQ ID NO: 27268 - DNA, 989 bp, Homo sapiens
ggatccaaacctgctggctatgcaaaccctctggcttctcagtttcctttatttatcaaatgaggataatattacctatctcatagagccattaagagaactatatgagatatttcccagagccaggcaggacacataacaagtactcagaaagtgttagctgttatcactattattatgactattttttcaacacatggtagacattcaataaatgttttcccttctttgcttccacaacccttgataactttttcttacagcatttactaaagtattttatacgttttagttttatgtgtacatcayttttcatgtactagagtatattccttgaaagtaggaatcctcacagtgcctcataaatgacaaatgacaaatgaccagtagctgtctgggtttcgtttttggtttggttttttgttgttgttgttgttgtttttagatggagtcttgctctgttgcccaggctggagtgcagtggtgcagtctcggctcactgcaacctctgcctcctgggttcaagcgattctcctacttcagcccctcctgagtagctgggattacaggcgcttgccaccacgcccggctaattttttgtatttttagtagagaccatgttggtcaggctggtctcgaactcctgacctcatgatccatctgcctcggccccccaaagtgctgggattacagacgtgagccaacgcaggttttttaagagaaaaaaaaatatttggagacatgaggaagtttttttaccttgaaaacatatgttcctaagaaagggagaagtagcaagtaaaaattataagaaattatctgaacaaagttggtaaattgttaaattatacattatgaaaattatatagatagatatatataagaataaagctttttctttttttagagacaaggtcttgccctgtcaccaggctggcatgcagtgctacaatcatggttcactgtagcccgaaattcctgggttcaag

SEQ ID NO: 27269 - DNA, 989 bp, Homo sapiens
ggatccaaacctgctggctatgcaaaccctctggcttctcagtttcctttatttatcaaatgaggataatattacctatctcatagagccattaagagaactatatgagatatttcccagagccaggcaggacacataacaagtactcagaaagtgttagctgttatcactattattatgactattttttcaacacatggtagacattcaataaatgttttcccttctttgcttccacaacccttgataactttttcttacagcatttactaaagtattttatacgttttagttttatgtgtacatcatttttcatgtactagagtatattccttgaaagtaggaatcctcacagtgcctcataaatgacaaatgacaaatgaccagtagctgtctgggtttcgtttttggtttggttttttgttgttgttgttgttgtttttagatggagtcttgctctgttgcccaggctggagtgcagtggtgcagtctcggctcactgcaacctctgcctcctgggttcaagcgattctcctacttcagcccctccygagtagctgggattacaggcgcttgccaccacgcccggctaattttttgtatttttagtagagaccatgttggtcaggctggtctcgaactcctgacctcatgatccatctgcctcggccccccaaagtgctgggattacagacgtgagccaacgcaggttttttaagagaaaaaaaaatatttggagacatgaggaagtttttttaccttgaaaacatatgttcctaagaaagggagaagtagcaagtaaaaattataagaaattatctgaacaaagttggtaaattgttaaattatacattatgaaaattatatagatagatatatataagaataaagctttttctttttttagagacaaggtcttgccctgtcaccaggctggcatgcagtgctacaatcatggttcactgtagcccgaaattcctgggttcaag

SEQ ID NO: 27270 - DNA, 989 bp, Homo sapiens
ggatccaaacctgctggctatgcaaaccctctggcttctcagtttcctttatttatcaaatgaggataatattacctatctcatagagccattaagagaactatatgagatatttcccagagccaggcaggacacataacaagtactcagaaagtgttagctgttatcactattattatgactattttttcaacacatggtagacattcaataaatgttttcccttctttgcttccacaacccttgataactttttcttacagcatttactaaagtattttatacgttttagttttatgtgtacatcatttttcatgtactagagtatattccttgaaagtaggaatcctcacagtgcctcataaatgacaaatgacaaatgaccagtagctgtctgggtttcgtttttggtttggttttttgttgttgttgttgttgtttttagatggagtcttgctctgttgcccaggctggagtgcagtggtgcagtctcggctcactgcaacctctgcctcctgggttcaagcgattctcctacttcagcccctcctgagtagctgggattacaggcgcttgccaccacgcccggctaattttttgtatttttagtagagaccatgytggtcaggctggtctcgaactcctgacctcatgatccatctgcctcggccccccaaagtgctgggattacagacgtgagccaacgcaggttttttaagagaaaaaaaaatatttggagacatgaggaagtttttttaccttgaaaacatatgttcctaagaaagggagaagtagcaagtaaaaattataagaaattatctgaacaaagttggtaaattgttaaattatacattatgaaaattatatagatagatatatataagaataaagctttttctttttttagagacaaggtcttgccctgtcaccaggctggcatgcagtgctacaatcatggttcactgtagcccgaaattcctgggttcaag

SEQ ID NO: 27271 - DNA, 989 bp, Homo sapiens
ggatccaaacctgctggctatgcaaaccctctggcttctcagtttcctttatttatcaaatgaggataatattacctatctcatagagccattaagagaactatatgagatatttcccagagccaggcaggacacataacaagtactcagaaagtgttagctgttatcactattattatgactattttttcaacacatggtagacattcaataaatgttttcccttctttgcttccacaacccttgataactttttcttacagcatttactaaagtattttatacgttttagttttatgtgtacatcatttttcatgtactagagtatattccttgaaagtaggaatcctcacagtgcctcataaatgacaaatgacaaatgaccagtagctgtctgggtttcgtttttggtttggttttttgttgttgttgttgttgtttttagatggagtcttgctctgttgcccaggctggagtgcagtggtgcagtctcggctcactgcaacctctgcctcctgggttcaagcgattctcctacttcagcccctcctgagtagctgggattacaggcgcttgccaccacgcccggctaattttttgtatttttagtagagaccatgttggtcaggctggtctcgaactcctgacctcatgatccatctgcctcggccccccaaagtgctgggattacagrcgtgagccaacgcaggttttttaagagaaaaaaaaatatttggagacatgaggaagtttttttaccttgaaaacatatgttcctaagaaagggagaagtagcaagtaaaaattataagaaattatctgaacaaagttggtaaattgttaaattatacattatgaaaattatatagatagatatatataagaataaagctttttctttttttagagacaaggtcttgccctgtcaccaggctggcatgcagtgctacaatcatggttcactgtagcccgaaattcctgggttcaag

SEQ ID NO: 27272 - DNA, 989 bp, Homo sapiens
ggatccaaacctgctggctatgcaaaccctctggcttctcagtttcctttatttatcaaatgaggataatattacctatctcatagagccattaagagaactatatgagatatttcccagagccaggcaggacacataacaagtactcagaaagtgttagctgttatcactattattatgactattttttcaacacatggtagacattcaataaatgttttcccttctttgcttccacaacccttgataactttttcttacagcatttactaaagtattttatacgttttagttttatgtgtacatcatttttcatgtactagagtatattccttgaaagtaggaatcctcacagtgcctcataaatgacaaatgacaaatgaccagtagctgtctgggtttcgtttttggtttggttttttgttgttgttgttgttgtttttagatggagtcttgctctgttgcccaggctggagtgcagtggtgcagtctcggctcactgcaacctctgcctcctgggttcaagcgattctcctacttcagcccctcctgagtagctgggattacaggcgcttgccaccacgcccggctaattttttgtatttttagtagagaccatgttggtcaggctggtctcgaactcctgacctcatgatccatctgcctcggccccccaaagtgctgggattacagacgtgagccaacgcaggttttttaagagaaaaaaaaatatttggagacatgaggaagtttttttwccttgaaaacatatgttcctaagaaagggagaagtagcaagtaaaaattataagaaattatctgaacaaagttggtaaattgttaaattatacattatgaaaattatatagatagatatatataagaataaagctttttctttttttagagacaaggtcttgccctgtcaccaggctggcatgcagtgctacaatcatggttcactgtagcccgaaattcctgggttcaag

SEQ ID NO: 27273 - DNA, 989 bp, Homo sapiens
ggatccaaacctgctggctatgcaaaccctctggcttctcagtttcctttatttatcaaatgaggataatattacctatctcatagagccattaagagaactatatgagatatttcccagagccaggcaggacacataacaagtactcagaaagtgttagctgttatcactattattatgactattttttcaacacatggtagacattcaataaatgttttcccttctttgcttccacaacccttgataactttttcttacagcatttactaaagtattttatacgttttagttttatgtgtacatcatttttcatgtactagagtatattccttgaaagtaggaatcctcacagtgcctcataaatgacaaatgacaaatgaccagtagctgtctgggtttcgtttttggtttggttttttgttgttgttgttgttgtttttagatggagtcttgctctgttgcccaggctggagtgcagtggtgcagtctcggctcactgcaacctctgcctcctgggttcaagcgattctcctacttcagcccctcctgagtagctgggattacaggcgcttgccaccacgcccggctaattttttgtatttttagtagagaccatgttggtcaggctggtctcgaactcctgacctcatgatccatctgcctcggccccccaaagtgctgggattacagacgtgagccaacgcaggttttttaagagaaaaaaaaatatttggagacatgaggaagtttttttaccttgaaaacatatgttcctaagaaagggagaagtagcaagtaaaaattataagaaattatctgaacaaagttggtaaattgytaaattatacattatgaaaattatatagatagatatatataagaataaagctttttctttttttagagacaaggtcttgccctgtcaccaggctggcatgcagtgctacaatcatggttcactgtagcccgaaattcctgggttcaag

SEQ ID NO: 27274 - DNA, 555 bp, Homo sapiens
atccatattgtaatagattgtgatggacatattctgagaggcacaatgtggatggtacccctggagttctgcaaggaagctgccctgaaaaaagaaaaggaaaagaggctttgaccctttatctttgaggtcctaggttactggtcctcaaatggattgrtatggtactcactgagaattatcagcaggaaagaagaacaagggccccagagaggcacttgccataagggaagggctgtctgcagagcactgggctcagcaaagctttctgactgaggctagatgccattgggaaacaaggatggacctgaatcactgaagggccactgtaaccttaaaatctttctgggctctccccagcaccagtcagaaacaccaaggtagatctagaagtctcttttcctctctatttcaccagctgcttttcctcgagggtccaggaagttgagactgatgttttaatttcacttcaaatataccatcctgtactgtgtatgctcagcaagtgttaatgactgaccggctagctggttgagtgaaaagttttaatattga

SEQ ID NO: 27275 - DNA, 555 bp, Homo sapiens
atccatattgtaatagattgtgatggacatattctgagaggcacaatgtggatggtacccctggagttctgcaaggaagctgccctgaaaaaagaaaaggaaaagaggctttgaccctttatctttgaggtcctaggttactggtcctcaaatggattgakatggtactcactgagaattatcagcaggaaagaagaacaagggccccagagaggcacttgccataagggaagggctgtctgcagagcactgggctcagcaaagctttctgactgaggctagatgccattgggaaacaaggatggacctgaatcactgaagggccactgtaaccttaaaatctttctgggctctccccagcaccagtcagaaacaccaaggtagatctagaagtctcttttcctctctatttcaccagctgcttttcctcgagggtccaggaagttgagactgatgttttaatttcacttcaaatataccatcctgtactgtgtatgctcagcaagtgttaatgactgaccggctagctggttgagtgaaaagttttaatattga

SEQ ID NO: 27276 - DNA, 501 bp, Homo sapiens
gcgtgagccactgcgcccaggcttattttattttttttgggacagagtctcactccgtcacccaggctggagtatagtggcttgattttggctcactgcaacctctgcctcctgggttcaaacggttttcctgtctcagcctcccaagtagctgggaccacaggcatgaaccaccaagcctggctaatttttgtatttttagtagagatggggtttcgccatgttggccaggctggtctcgaactcccaacctcaggtgatcagcctgcctcagccccccaaagttttgggattacaggcatgagctactgggcccggcctgtcgggttgtttagataattaagtgaattaatatatgttaaaatgcttagaacagtgcctgacacatagtaagagttatatatgtgttaagtattatttttgttttttttgcctgtaagtagagttattctggtgatggtaacttcctaatcaatagaaaaactrtgtatattggttttg

SEQ ID NO: 27277 - DNA, 610 bp, Homo sapiens
catgggtctaggcttgagggtgtggccctcgccggggaccaccccctcttctacccagtatttccctgcctcctgtccatatcacatgtamaaagatgaaaggtgcccatcacattttttttttgagccggggtcttgctctgttgcccaggctataggtacagtggtatgatgaaggctcactgcagcctcaacctcctcaaggctccagcaatctttccaccttagactcctgagtagctgggaccacaggcatgcactaacacacttggctaatttattttttatttttatgtttggtagggattgggtctccctatgttgcccaggatggtcttgaactcctgggctcaagaagtcctcccaactcagtctcccaaagtgctgggattacaggcatgagccaccatggcccacaacattaagacagtagagatttagaggcaatgtaagtttatcgtgggtgggaatggagacgttaaatctgatggaggtatactatggaatactctgttacagtcagaaataatgaaccagagttacatacaacaacatgaagagggctgggaaatctagtattaggtgagaagggtaagaaatagagtgagat

SEQ ID NO: 27278 - DNA, 610 bp, Homo sapiens
catgggtctaggcttgagggtgtggccctcgccggggaccaccccctcttctacccagtatttccctgcctcctgtccatatcacatgtacaaagaygaaaggtgcccatcacattttttttttgagccggggtcttgctctgttgcccaggctataggtacagtggtatgatgaaggctcactgcagcctcaacctcctcaaggctccagcaatctttccaccttagactcctgagtagctgggaccacaggcatgcactaacacacttggctaatttattttttatttttatgtttggtagggattgggtctccctatgttgcccaggatggtcttgaactcctgggctcaagaagtcctcccaactcagtctcccaaagtgctgggattacaggcatgagccaccatggcccacaacattaagacagtagagatttagaggcaatgtaagtttatcgtgggtgggaatggagacgttaaatctgatggaggtatactatggaatactctgttacagtcagaaataatgaaccagagttacatacaacaacatgaagagggctgggaaatctagtattaggtgagaagggtaagaaatagagtgagat

SEQ ID NO: 27279 - DNA, 610 bp, Homo sapiens
catgggtctaggcttgagggtgtggccctcgccggggaccaccccctcttctacccagtatttccctgcctcctgtccatatcacatgtacaaagatgaaaggygcccatcacattttttttttgagccggggtcttgctctgttgcccaggctataggtacagtggtatgatgaaggctcactgcagcctcaacctcctcaaggctccagcaatctttccaccttagactcctgagtagctgggaccacaggcatgcactaacacacttggctaatttattttttatttttatgtttggtagggattgggtctccctatgttgcccaggatggtcttgaactcctgggctcaagaagtcctcccaactcagtctcccaaagtgctgggattacaggcatgagccaccatggcccacaacattaagacagtagagatttagaggcaatgtaagtttatcgtgggtgggaatggagacgttaaatctgatggaggtatactatggaatactctgttacagtcagaaataatgaaccagagttacatacaacaacatgaagagggctgggaaatctagtattaggtgagaagggtaagaaatagagtgagat

SEQ ID NO: 27280 - DNA, 1214 bp, Homo sapiens
cataatgctttatgaaacctgtattgcagataatgtctgaatgttgaattgaaaccatgagaactgaagagtgaatgggccaagatcagagcttgtgacaatccacaggtggccctggatgcaggtttagatactattctttcagacaatgttctcagccgtgtgcatcattcaatcctctacatctgaaatgatttgcataaccatgttgctgggcctgggacaaaattcctatggcagtgttgaagctttttcagattctcattctctcccctctttttttctctatcttttagaattctgcaagaatggatttgtgtggggttttcttttctgtagaaattgatgttgtatgtctttcataagtgttcagagctgagaaagaaagggattggatactgttgtattttactgtgccttctataagacatttcaacaatctctgtaaattagtttatcttgttttttattgatttcttaaataaattaatgatctatcccaaaagaaggtgtgacattaatttcttttctttttttttttaagtgcagtggcatgatcatagctcactgcagcctcaaccgccaggttcaagcaatcctcccacctcagcctactgagaagctgggactacaggaatgcactaccacactgggctaatttttttatttttagtagagacagggtctcaccatgttgtccaggctggtctgaaacccctgggctcaagtgatcctcctgccttggactcccaaagtgttgggattacaggtgtgagccactgtgccctgcaacacattaatttcaaaactatatctttaaaataatgcaaattgtgtctatatggattgccaaactacagagacaagaacagttayttcatttcattccttataaagcttccctcttctccgaaataactatgctggcaataccagtatgtcaacagaaattttaggtatataaattccttttttttaatcacccccattattactaatgtcactctaccttcaaaagcaaaatcaaattgaaaagtagcacatatctgacttaggctattgaaaacttttaactacttacatttcagataataaatgagcctcagcaactaatcacactcagaatccgaaaaataaataaacttagtttcttaactataaattattttgccccaagccaaagatatttttatcttccagagatattataatct

SEQ ID NO: 27281 - DNA, 1133 bp, Homo sapiens
gttctcaaaattgatcacggttggacgagaaaattgatctgatcaaagatgaactaaaccggaagtctgctttctaaaaagtcaccatgcccagatggttttacacttgtagttttacttattaatcatataacaaataaattctatgttagtctaatatttacagactatagagagttcatttttaagaggccagcatagtctacacacaaaaccctgaactaacaaaaaaggaaattataaaccaaaatcacaaatcaatgcagatgtaaaaattataattaaaatacctcttagaaaattaaattttaaaatgtactaaaacaattacaagctatacctatgaccaaataagattaattttagagatccaaggttggatcatcattagcaggtctaatataatttttatgtcaaattaaatggtacaaattatatgattatttaaatatataataaacaggcacttactaagattcagcagcaaaactcccagtaaaatatgaaaagaaaaaaatgctaaacacgaaaaagactatttgccaaaatcatattgcaagcatcatatggaatagtgaaatcctaagtcattcttatgaaaacaaggaactacaaaaaggtgatggatggcaacattattgtaattcaacacactatagaggttctaactaatacaataagaaaactaaatatgtaacttaaatagcagaaatgaggaaatttgaaaattcttatttgaggattacaaggctgcatacctaagaaagtggacattgtactaacaaaaaagttattactaataaaaaatttggcaagatggttctatataacataaatatgtaaaagccagttttttcctatacaagaagctaattagaaacagraaaggtaaaaacttgattgaattatacttggttataaatatgatgagaaaggtatagtatctatataaattataaaactataaaaatttcaagaacaagacttgataaaagagatttattgaaaactttcaaattcaaagaactaagtccttcctacattataaatgtaatgtaatgacagtctcaaaccccaatgagatgattctggaactttacaaaataactttttagttcctatggaagaagaca

SEQ ID NO: 27282 - DNA, 1133 bp, Homo sapiens
gttctcaaaattgatcacggttggacgagaaaattgatctgatcaaagatgaactaaaccggaagtctgctttctaaaaagtcaccatgcccagatggttttacacttgtagttttacttattaatcatataacaaataaattctatgttagtctaatatttacagactatagagagttcatttttaagaggccagcatagtctacacacaaaaccctgaactaacaaaaaaggaaattataaaccaaaatcacaaatcaatgcagatgtaaaaattataattaaaatacctcttagaaaattaaattttaaaatgtactaaaacaattacaagctatacctatgaccaaataagattaattttagagatccaaggttggatcatcattagcaggtctaatataatttttatgtcaaattaaatggtacaaattatatgattatttaaatatataataaacaggcacttactaagattcagcagcaaaactcccagtaaaatatgaaaagaaaaaaatgctaaacacgaaaaagactatttgccaaaatcatattgcaagcatcatatggaatagtgaaatcctaagtcattcttatgaaaacaaggaactacaaaaaggtgatggatggcaacattattgtaattcaacacactatagaggttctaactaatacaataagaaaactaaatatgtaacttaaatagcagaaatgaggaaatttgaaaattcttatttgaggattacaaggctgcatacctaagaaagtggacattgtactaacaaaaaagttattactaataaaaaatttggcaagatggttctatataacataaatatgtaaaagccagttttttcctatacaagaagctaattagaaacagaaaaggtaaaaacttgattgaattatacttggttataaatatgatgagaaaggtatagtatctatataaattayaaaactataaaaatttcaagaacaagacttgataaaagagatttattgaaaactttcaaattcaaagaactaagtccttcctacattataaatgtaatgtaatgacagtctcaaaccccaatgagatgattctggaactttacaaaataactttttagttcctatggaagaagaca

SEQ ID NO: 27283 - DNA, 513 bp, Homo sapiens
acacacacaacccaaatcgtcatctctactgccagtgttgatcactaacattgttcctcagaggtattgtagaattgccattatgacagaatgggttcttctttttactttaaaacctctctatctgcttacttgctagaaccccctgcagtgaacaaagaaaaccttgcaaaggtttatagacacaggttggattccctaagcaaagaacactgcaggatgcttttacatgtaatgagaactccccaaatccatagtcttagaggcatccaggtatctaaattactgatgcattaaattcacttagstaatataatagtaaataaaatagcctttaacacaagcattattggccagttcctaggaggttttgcaagttgaaatgtgtcttcataaccaaattcctttggttttcctttgtatcatttcaaccttgcatgcataaattaagaattaaaacttgtttaataaacatttaatgcaggatatttgtcatcagaagaaatgtttgtt

SEQ ID NO: 27284 - DNA, 885 bp, Homo sapiens
ttatctctatatatggaatgagaactcaggtgaattttatgtgaatgccaaaggacagggtaccccagtgggctgttaggttgcaaaggtaaagtacttggcaagtacttgtatgcttaagtgctcaacaaataccagctatactattagtgaaggttttccttgttttgattttgggtgatattctggttatttaatatttgcacccaatattttccctcatagtgcttaccaacatttgtagccacatatttattttcatagcctaattgattatccttctttaatctcgatgtggctttttagaacatatacactagatctcttatacagctgcatacacattgacaaacttgtactatttaattcttcattttaccaagcacaaaatcataccacttacgtacaatktaatcaatctatagctttctttactttgtcatttcttcctgactacactctggtcacccctaatagattcaggaaatgttctagtcttagaaaaaacaatcacaggtttcttctcaaaaaagaaaacttctacaaatgttgataaagtggtataagatggactatgttagatggagggagaaagaaaaaggaaagagatttcataatcagaaacctgcatcaacctctaagtgacccagttgtttattggttaggtttctttattgtaagcaacagaaaccaaatctggctaacttagccaaacactaaaaataaaatgggatagaaaaattgtaatttgttagcatctataactgaaaaattcagtagtaatatctttgtcatcattctatctagaggcttatatattatcattactgtttggtttctccccatctttttgttctgtattcttccatgatgctgtcattatct

SEQ ID NO: 27285 - DNA, 617 bp, Homo sapiens
ggcatataagaagcatttattgaatgaatgggttaataaattagtgaaagaataagtgattggggtatgaaatctacagcaatatatctcagctaactttaagcttcaactaaattttaaactcctggggacagtcacaccttgtgagttttctgtattctatccaaaggcgaacacagtgttaagtatacaagaggttcttaaaaatgacttcccattattgaaagcctaccctgcacagtaaatcctgcagattattacaatttaggctttataaagatgtcctattttagagatgacaaaaactgatgccaagaaaggttaagacactctcaaggtcatataactagtaatgaaagtgctgagattagaactctcgtctattttaccatcatggaagctttttccgacctcattttccactgtgcttcttccttcaccaagagctcacactataagaggtatctatagtgaccaagtgctcctatacttacgagctctcatgaagatacagctgtatgyatgaaagtccaaaaaaaatctatatcaatatttaaatttaaaaagcaaatttttggaaacatgcactaaagggagaaaggtgtgttttctttcat

SEQ ID NO: 27286 - DNA, 620 bp, Homo sapiens
tgagtcactgcacctggctggattatagctttattataaacttctattgaattctccaaatatataaggcaaaagaaaggtgctattttttgagcagttggttcacagtatatgttaaataattggtcttttgattatttccaccagcactctccctaggcatcatagtgtctccactatgctaggtaaaatttaataataataataacttttattattaaatttgacctgaaacacttgtgtagcatttattctgtgctaggcagtgtcctaactgctttatacgtgttaatttatttaattcttataacagtcaatgaggtaagtggtattatcactcccattttacagattagaaagctggatatggcatggttaatttgcccaacatcacataattagcaagtgatagatctaggatttgaacttrgcatgtttctcgagtctttgtgctagattgcctcccacttaggattttgttcatttgaaataccaaaggaatccgacaccagactacaaaatcagaatctctgggagtaggagtccaccatcttgaatttttttttttttttttttttttttgagatggagtctccctctgtctccaggctggagtacag

SEQ ID NO: 27287 - DNA, 1100 bp, Homo sapiens
tggggactgtatttcaacattagtgttgggggaacaaatatcaaaactataccagatagggcaatccagaattactctggatgaacctcattttttttctaaatgaaagtagttttactggtttttccttgactgtaaaagagcatatttatttttaaaagtcattcaatgcaaaaaatcctaaaaagaaagtgaaaatcactcacaacatcaacactctggtaacattttggtttatattcttccagatgttattctgtgtgtgtgtgtgtgtgtgtgtgtgtgtgtgtacctatgtcatttctttctcttatataacaaaaaataagctcatattacacatagtgctttggggtctactttattgttttcacagtagaccaaagacactgttttcatatcaataactttcatatcaacaccctgtgagtcagaaattccacacttagtcaattatcctatggaaataaatcaaaaatgcctcaaaggcttatgtgcaaggcagatattcccactatcacttatagcagtgctgcgcaatatggtaaccactaaccacaagttcgtatttaaattaagagtaacttaagcagaatttaaaatctagtttctcagttgcactaggcacatttcaagtgcccagttgccacatgtagctagtagctaccatatgaacagtgcagaaatgaatacactcatcattgcagaaagttctgttggacaacattggcttgtaggagcaaagcagtgaaaataggctagatactccacaagaggagactaaagtaaattatttatttatttttatgatagactatttaaattttattctaagtgtttgtgtttttaaataattatatctgctccttacatatgcaatgtaaatattgtttatcaagacttacatacatattaatgtatatgtacatgtttatatacatatatgtattatgtgtgtatatgtaacttttacaactagagtttkagttatgtctttaagaatttttctgtataagcacattggcttttgacttctgctgccatggagagccacccttagatcccaaggggctcagggcagcatgggtagaagacgattg

SEQ ID NO: 27288 - DNA, 1100 bp, Homo sapiens
tggggactgtatttcaacattagtgttgggggaacaaatatcaaaactataccagatagggcaatccagaattactctggatgaacctcattttttttctaaatgaaagtagttttactggtttttccttgactgtaaaagagcatatttatttttaaaagtcattcaatgcaaaaaatcctaaaaagaaagtgaaaatcactcacaacatcaacactctggtaacattttggtttatattcttccagatgttattctgtgtgtgtgtgtgtgtgtgtgtgtgtgtgtgtacctatgtcatttctttctcttatataacaaaaaataagctcatattacacatagtgctttggggtctactttattgttttcacagtagaccaaagacactgttttcatatcaataactttcatatcaacaccctgtgagtcagaaattccacacttagtcaattatcctatggaaataaatcaaaaatgcctcaaaggcttatgtgcaaggcagatattcccactatcacttatagcagtgctgcgcaatatggtaaccactaaccacaagttcgtatttaaattaagagtaacttaagcagaatttaaaatctagtttctcagttgcactaggcacatttcaagtgcccagttgccacatgtagctagtagctaccatatgaacagtgcagaaatgaatacactcatcattgcagaaagttctgttggacaacattggcttgtaggagcaaagcagtgaaaataggctagatactccacaagaggagactaaagtaaattatttatttatttttatgatagactatttaaattttattctaagtgtttgtgtttttaaataattatatctgctccttacatatgcaatgtaaatattgtttatcaagacttacatacatattaatgtatatgtacatgtttatatacatatatgtattatgtgtgtatatgtaacttttacaactagagtttgwgttatgtctttaagaatttttctgtataagcacattggcttttgacttctgctgccatggagagccacccttagatcccaaggggctcagggcagcatgggtagaagacgattg

SEQ ID NO: 27289 - DNA, 540 bp, Homo sapiens
ggcagcaaaasgtttgtggtctcaagccattctgtttttccaagatgtgattttgcaaataaatttatccattttagtgcttattgtcgagctgactatagagtttaaaattcttattattgtaagtatgtgaaatatgtggttgactggagatgcctgggtgccgacaagctgcattctcctggcttggcttctaacttgcttaacctccagaagccctgggttcttcatctgaaaagtgggaaaaataacagtacctacttcataggattgatgtgagcattaaatgaggtaacataaacatggggcttaggctggagctttgcatgttaagtaatgttagctccattcctataattaacaattacgcttatctctttcattccttaacattacctttggctataagtgaagtgacttgtggattcagcagctacacagcagctcagaactaaatgatctgccccattttcggtaattacccagatgactttcccacacatctaactgagcaaggtgaccctggtcttgatcagagat

SEQ ID NO: 27290 - DNA, 800 bp, Homo sapiens
tgctcgtgtgcttggagagtggcacagtgccaccggatgcccaccagctgcactgggcgcagtgagacagctcagagcagatgcccccaggctgtccaggggtggcagagctggtgtggttggagcccctcctcgctctccttgtgtggtgggccgtgggctggatagcaggcggcggtgagcgagtgactgggatctgccttttcctgccttcgtgaagcccatggctgcatcctgtcatgggccctgtgtgggccatctcctgccatcaaaaaatagtgaaaagtagattttgccacagtgtggatacaaagacaaaagcatcgttggcccttaaagttcattttwtcttctcattttaaaagaaatcatgacatttccatggccctaatggtgtcagccctggctgaggatcaacctcccggacacccgtgtgtctggctggagggaggctgagcgtggggcctcggaccagcatcgggctggtgtgcgaggacctctgggttggttgctgcttggaatctggtcagctcttccagcaccttctcggatggtaacaatccagggagtggtgtctttcatggcaacatgaggtcacccacccacgggcttctcaattgtcctgcagaggaactgagaccaaggcagcaggtgcggggaaccggtggaacccacgactgactcccaagtgtggcatttttgtccatctgcaaatgcgggcgtcctaggtttggaaatgaacacagttcaaatagcattgtgaagccacattgggaaacccagatgcaggacagcacgca

SEQ ID NO: 27291 - DNA, 800 bp, Homo sapiens
tgctcgtgtgcttggagagtggcacagtgccaccggatgcccaccagctgcactgggcgcagtgagacagctcagagcagatgcccccaggctgtccaggggtggcagagctggtgtggttggagcccctcctcgctctccttgtgtggtgggccgtgggctggatagcaggcggcggtgagcgagtgactgggatctgccttttcctgccttcgtgaagcccatggctgcatcctgtcatgggccctgtgtgggccatctcctgccatcaaaaaatagtgaaaagtagattttgccacagtgtggatacaaagacaaaagcatcgttggcccttaaagttcattttatcttctcattttaaaagaaatcatgacatttccatggccctaatggtgtcagccctggctgaggrtcaacctcccggacacccgtgtgtctggctggagggaggctgagcgtggggcctcggaccagcatcgggctggtgtgcgaggacctctgggttggttgctgcttggaatctggtcagctcttccagcaccttctcggatggtaacaatccagggagtggtgtctttcatggcaacatgaggtcacccacccacgggcttctcaattgtcctgcagaggaactgagaccaaggcagcaggtgcggggaaccggtggaacccacgactgactcccaagtgtggcatttttgtccatctgcaaatgcgggcgtcctaggtttggaaatgaacacagttcaaatagcattgtgaagccacattgggaaacccagatgcaggacagcacgca

SEQ ID NO: 27292 - DNA, 720 bp, Homo sapiens
cacttcagagtttttgattcatcaagtctaggatggagcctgaaaacatgcatttacaataatttctcaggtaacgctgatgctacttacccagatacygtacttgaagaatcactgtgttaggagtgaggtgatagcagcttaggccctggggttaagtgggactgagtaaatgtggggagacacaggaaccaggtccaatgcagatgtgttccattcattcatagacatccttaagttgattttacatcaacttggttatccaaagttatgctatatagtgtgacctggaaaaagctaacaagactgtcctttcattcaagacacgtttattgagtgcctactgtgtagcagatgctgagctaggcactaggcattcagaaatgaaacatgatcttgctgttataaagagaattctattttgagatgtttaaaacaatgattcttccatccccataaatcatgttgcctctggcttctgatttaatggcttcttttcatttctgagggaagtcagatgctgcctagaataaagaaatcattgttcagctttaaacaccaaaaaaaatatttttcttgcattcatagtgtaacagtcttacaaaccaagctttgttttgaggcaaaatgctttgctaattccaagccttacttgtacatataaggcaggaatctggaattctgcctagggtttatgtatagaaagggaaattgagggag

SEQ ID NO: 27293 - DNA, 531 bp, Homo sapiens
taaagaaagagcaggccaggcatggtagctcacaccagcactttgggaggccaaggtgggtggattacctgagatcaggagtttgagaccagcctggccaacatggtgaaaccccatctctactaaaaatacaaaaattagccaggcatggtggtgcacgccagtaatcccagcttctcaggaggctgaggcaggagaatcgcttgaacccaagaggcggaggttacagtgagctgagatcgcgccactatacttccccctgggtgacagagtaaggaggctcatcccaaaataaaacaaaacaaaacaaaaaacaaaaaaagaaaaagcacataccatactatataaatgcttaagtagtgaaaatttaaagttatgaatatatgtgctatgkactattaaagatataggaatgtgaaatagtaattacagaggcaaaatgtgactatgttaaagatttttaaaacaaaatgatgagtgtgtgaaatattctccatttgaagtaagtgagatttattttggactgtctta

SEQ ID NO: 27294 - DNA, 1158 bp, Homo sapiens
atcccaggcgtctgcagcaagagttggctgtccctctgtcccttcattcaccccttacttagtagctattgaggggcaggcactagccctggcattcagcaaccctgcacaggactcagctttccccccttcagccttggtgtctgagccatggctccattgactcagtgttttctctctaaagatcttttcaaagtttgttggtttacttgagaatttggtctccctccatgggagtagcacttctggatgcactgaatggcccatgttgtctctcctcaattatttatttttattcattgtcaaaacttcctttaatcctagactgcattctagaatatatagttggttttaaattataacactttgtaattcataccaaaattcatcatctttrtataccaaaaatccaaaaataaatttgtcttttcaactttgtatgaataattgtgatgatattttgtcatcccttgatagtctacttgtttctgacacttctgggcatggtaaaattgtgacccaaaatttgcttatcactcttcaatttacaagacagatgaaggcaaggcaatcttagtctggtccagttttctgtaacccaggagaccaaagaatgtaaacatgaaagggccctctaacagagtgcacgtgtcatgttttatgtagctaatctgtccttgggtgcatcctctttgcctaatttgtaagaggtacacagatagaaatctggattatttatattgttttctgtgctcttggctacttcatcccaataatatcacatatagcatgcctcatagaaacaaaaagtttaaatcttgttggaactttgcctagggagattttgcttcttttttcaactccattgccataacctcagagtctccctaggataatatacacacaaagagagaaaaaactgattctctgctttacttgaatgcttctgggtatgataaaataacattctgttcctttgtatattagtataatttcacccagctttactttctattgctagtttaaatttgagttattttaaaagggaaaaaatacaagtacatataatgtatatttttattattgcaaactctgttcattccagctgtatgctgaaggcattagcctacgcctgtaagaagaatgatccatatcagt

SEQ ID NO: 27295 - DNA, 537 bp, Homo sapiens
tttactttccaacaaatgcagaacagagaaaatgtgaatgctgggtgctgctcctacaaaccaggataactgtgctggggctgtagagggggatcccaaaaccatcactaacagagctgaattatttattcttaaatatgtggagccagttacaagaaatggactcagcagcaaaaggttttacagtcccagtggtctctgaatgggaatttgaagtcaagtccagtgactcaacccaagtctttttggcaagtccaggaacacatttaagtgtccagccaagggctacatgattccttattccatgaacacccgaaataagaaaatactcctctcagatacaaaagcagacttttctaaaaagatttgccagaatttcacacggtttctcaaactttcacccaaatattcctaatagcaaaggagagttgaaagctatcccctgagatacagggaactatttgaaagaaacctgcaaaaagcatcaaatgtctttataatcctgtgtttyagctttttaaaaagtgaatgttgctt

SEQ ID NO: 27296 - DNA, 615 bp, Homo sapiens
catggtggctcaccctgtaatcccagcactttggaaggctgaggcaggaggatcactgagcccaagacttgagaccagcttggacaacatagtgagacccccatctctacaaaaaataaaaaagtcagctgagtgtggtagytcatacctatagtcccagctacttgggaggcttaggtgggaggatcacttgagcccaggagatcgaggctgcagtgagccatgattgtgccactgcactccagcctgggcaacagaggaagattctgtctcaaaaataaataaaaagatcagaagaccagtgttgttctctgtgtgaataggaaacagctgagactgtctgacctcaggtgcttccttgataaaacgggaataacacaacctacctcacaggcttttggagatgttaaatgagtgtatgtgtatatagaagtgctttataaaccataaagtactacatttacttactgtgggccatgcacagtattaaagcactttacatggataatctcctttaatcaccactacaaccctacgagctaattattcttctgtttgttgtataggaatttgaagttcagcttgcccgtggccaagtaactagcagaaggagga

SEQ ID NO: 27297 - DNA, 587 bp, Homo sapiens
tggttttgtgcatatgtttgtgtatgcattcacacacatatataaccatatatgtgtaagaccatttatgtctgtattagtccrttttcactctgctgataaagacatacccaaggctgcgtaatttataaagaaaaagaggtttaatgggctcacagttccacgtggcttgggtggcctcagaatcatggtggaaggtgaaagtcacatcttacatggcagcaggcaagagataatgacagccaagcaaaaggaggaaccccttataaaatgatcagatctggtgagacttattaaccaccacgagaacagtatgggggaaatcatccccatgattcagtcatctcccactgggtccctctcacaacacgtgggaattatgggagctacaattcaagatgagatctggttggggacacagccaaaccatatcaatgtcttacacatatgtggttatctacatttatatctatacctatatctacatctatgtctatctatctatccatctatctatacacatatggttatatatagggttctattttaaggtgagaaaactgacctttaacggtgacaattaactt

SEQ ID NO: 27298 - DNA, 587 bp, Homo sapiens
tggttttgtgcatatgtttgtgtatgcattcacacacatatataaccatatatgtgtaagaccatttatgtctgtattagtccattttcactctgctgataaagacatacccaaggctgcgtaatttataaagaaaaagaggtttaatgggctcacagttccacgtggcttgggtggcctcagaatcatggtggaaggtgaaagtcacatcttacatggcagcaggcaagagataatgacagccaagcaaaaggaggaaccccttataaaatgatcagatctggtgagacttattaaccaccacgagaacagtatgggggaaatcatccccatgattcagtcatctcccactgggtccctctcacaacacgtgggaattatgggagctacaattcaagatgagatytggttggggacacagccaaaccatatcaatgtcttacacatatgtggttatctacatttatatctatacctatatctacatctatgtctatctatctatccatctatctatacacatatggttatatatagggttctattttaaggtgagaaaactgacctttaacggtgacaattaactt

SEQ ID NO: 27299 - DNA, 587 bp, Homo sapiens
tggttttgtgcatatgtttgtgtatgcattcacacacatatataaccatatatgtgtaagaccatttatgtctgtattagtccattttcactctgctgataaagacatacccaaggctgcgtaatttataaagaaaaagaggtttaatgggctcacagttccacgtggcttgggtggcctcagaatcatggtggaaggtgaaagtcacatcttacatggcagcaggcaagagataatgacagccaagcaaaaggaggaaccccttataaaatgatcagatctggtgagacttattaaccaccacgagaacagtatgggggaaatcatccccatgattcagtcatctcccactgggtccctctcacaacacgtgggaattatgggagctacaattcaagatgagatctggttggggacacagccaaaccatatcaatgycttacacatatgtggttatctacatttatatctatacctatatctacatctatgtctatctatctatccatctatctatacacatatggttatatatagggttctattttaaggtgagaaaactgacctttaacggtgacaattaactt

SEQ ID NO: 27300 - DNA, 581 bp, Homo sapiens
cactggacaggtaagagcagaagggcagtgatgaataaatcaccctcagcacaccttctaaagagcactggggtggcgtcacattcaccacatgacctgggcttctgtgacccttgggagaagtcatgtctgccttgagacttgcaagtctcaaatgggataaaacaagagaagctttgatttcagtgctggccacataagtgcccctagctgtgagttgcgggacaagtggaagacagacagcaaagaggggcatttaggaaaatggagcaaagaaatgtgacaccatggagagtccacggagggtcccacagcgggaaagctgagggcaaccagagcgtgggagtccttgaatgcyaggaccttggtctggtttctgaggaggagagtgacatggtcagagctatgctggaaaggtggccactgtgcagttgctactaccagtagcagctgtgctctgggggcctaagagtgtcagatggtctgctgccatggctctagcccaggatgttttgggatcgtccagttctgccacaggggcctgcctctgactgagtgtgaggttcaaccctcaccaccca

SEQ ID NO: 27301 - DNA, 662 bp, Homo sapiens
cagcagggagggaagatggtggggatctgcgtgaaggcagaactcagagggctggaaactgcagggccagctggccagggaggaaggctgggctcgtggggaagcctgtgggaaggctccccttgcttctggatctcccatgggtttggggcccgactttctgtcttcctcccctaggttccccctcagcccttcctggagatgcagcacgtccgcctggcgaggcagctggaagggctgtgggcaaggctgggcttgggcaccagggaggatgtaactccaaartcagactctgaagctcaaggagaaggtagggaccgagagagcgggcaggtggcgcccatctgagtgtcacagcatcctccacccttatgaccaggggtcctttaatcagtagggaaactgaggcctgaggaggccacatctaagcaggccctgggcccaagtgttctgtgctatccccaccttaccactcagactcatcttccaggagagggtcttggaggcagcagccacaccttctggcacccctctccaagaagccaccccaaagataagataggctgtgttaccccaccatggctggctgcccatcccagctctgccctaatccccaggggaaaggctctttgacctggaggagacgctgggcagacaccgcc

SEQ ID NO: 27302 - DNA, 998 bp, Homo sapiens
aggcccaatctgctcagctgcctctgctgggcccctcggcctgtcctggccatcttggactacgtagggtgagcccaggctgctcgtgggggcagaatcatgtgttgctcacaggtcacgtctgtgctatctcaaggcccgcaggttttgtgtgttattttgtgcgtgctatctctggggtgaggcctgtattctgttgtttactcttcagtaagcacttctcacatccccgactgcctatgtcttctaaggacccctgctctgagactctggctttggtatggtaccactgtgcatggtaaccaagctgccatctggcccaagtccacttcccgttcttcctgcctctgctcttgccggcggctgactgtggaaggccygggcgtagctcataaagattggggaatgttgtcatcctctcacaggcctttgttgatctgcctttgcccttcagtactaactacatgctataaagtatctctgttttctgcaacacagtctcctccagaaaaaatacacccagaaaaagcagcgactctctaaaccacacattcagggtgacctgcctagaattcacctaaatcctgcctcggctggagtctctcctgccctttgcctaacaaggtctaggtcttcaatgtggtcagtctcccccaggtcgactgggcttacttgaccacaggtcctgtgtgaatgtgcctgagcctgtccctcccagcatgaagtaagtatcacagggcaaacatattgctgcatcggacatgacagggttctcgcaagccacggaaattgtcatatacactgtgaaacacagacaatctctacgtctgttttgcactgcgtaaaaactgtatatttccgactcaaatgaaaaacacccacagagatgctgtgtgcctggaagagcctggacaggagaggccccatcccagggcccccgatgctgccagtggctctggaccttgtccagactgggaagggcccgtgcagcaccctct

SEQ ID NO: 27303 - DNA, 998 bp, Homo sapiens
aggcccaatctgctcagctgcctctgctgggcccctcggcctgtcctggccatcttggactacgtagggtgagcccaggctgctcgtgggggcagaatcatgtgttgctcacaggtcacgtctgtgctatctcaaggcccgcaggttttgtgtgttattttgtgcgtgctatctctggggtgaggcctgtattctgttgtttactcttcagtaagcacttctcacatccccgactgcctatgtcttctaaggacccctgctctgagactctggctttggtatggtaccactgtgcatggtaaccaagctgccatctggcccaagtccacttcccgttcttcctgcctctgctcttgccggcggctgactgtggaaggcccgggcgtagctcataaagattggggaatgttgtcatcctctcacaggcctttgttgatctgcctttgcccttyagtactaactacatgctataaagtatctctgttttctgcaacacagtctcctccagaaaaaatacacccagaaaaagcagcgactctctaaaccacacattcagggtgacctgcctagaattcacctaaatcctgcctcggctggagtctctcctgccctttgcctaacaaggtctaggtcttcaatgtggtcagtctcccccaggtcgactgggcttacttgaccacaggtcctgtgtgaatgtgcctgagcctgtccctcccagcatgaagtaagtatcacagggcaaacatattgctgcatcggacatgacagggttctcgcaagccacggaaattgtcatatacactgtgaaacacagacaatctctacgtctgttttgcactgcgtaaaaactgtatatttccgactcaaatgaaaaacacccacagagatgctgtgtgcctggaagagcctggacaggagaggccccatcccagggcccccgatgctgccagtggctctggaccttgtccagactgggaagggcccgtgcagcaccctct

SEQ ID NO: 27304 - DNA, 998 bp, Homo sapiens
aggcccaatctgctcagctgcctctgctgggcccctcggcctgtcctggccatcttggactacgtagggtgagcccaggctgctcgtgggggcagaatcatgtgttgctcacaggtcacgtctgtgctatctcaaggcccgcaggttttgtgtgttattttgtgcgtgctatctctggggtgaggcctgtattctgttgtttactcttcagtaagcacttctcacatccccgactgcctatgtcttctaaggacccctgctctgagactctggctttggtatggtaccactgtgcatggtaaccaagctgccatctggcccaagtccacttcccgttcttcctgcctctgctcttgccggcggctgactgtggaaggcccgggcgtagctcataaagattggggaatgttgtcatcctctcacaggcctttgttgatctgcctttgcccttcagtactaactacatgctataaagtatctctgttttctgcaacacagtctcctcyagaaaaaatacacccagaaaaagcagcgactctctaaaccacacattcagggtgacctgcctagaattcacctaaatcctgcctcggctggagtctctcctgccctttgcctaacaaggtctaggtcttcaatgtggtcagtctcccccaggtcgactgggcttacttgaccacaggtcctgtgtgaatgtgcctgagcctgtccctcccagcatgaagtaagtatcacagggcaaacatattgctgcatcggacatgacagggttctcgcaagccacggaaattgtcatatacactgtgaaacacagacaatctctacgtctgttttgcactgcgtaaaaactgtatatttccgactcaaatgaaaaacacccacagagatgctgtgtgcctggaagagcctggacaggagaggccccatcccagggcccccgatgctgccagtggctctggaccttgtccagactgggaagggcccgtgcagcaccctct

SEQ ID NO: 27305 - DNA, 998 bp, Homo sapiens
aggcccaatctgctcagctgcctctgctgggcccctcggcctgtcctggccatcttggactacgtagggtgagcccaggctgctcgtgggggcagaatcatgtgttgctcacaggtcacgtctgtgctatctcaaggcccgcaggttttgtgtgttattttgtgcgtgctatctctggggtgaggcctgtattctgttgtttactcttcagtaagcacttctcacatccccgactgcctatgtcttctaaggacccctgctctgagactctggctttggtatggtaccactgtgcatggtaaccaagctgccatctggcccaagtccacttcccgttcttcctgcctctgctcttgccggcggctgactgtggaaggcccgggcgtagctcataaagattggggaatgttgtcatcctctcacaggcctttgttgatctgcctttgcccttcagtactaactacatgctataaagtatctctgttttctgcaacacagtctcctccagaaaaaatacacccagaaaaagcagcgactctctaaaccacacattcagggtgacctgcctagaattcacctaaatcctgcctcggctggagtctctcctgccctttgcctaacaaggtctaggtcttcaatgtggtcagtctcccccaggtcgactgggcttacttgaccacaggtcctgtgtgaatgtgcctgagcctgtccctcccagcatgaagtaagtatcacagggcaaacatattgctgcatcggacatgacagggttctcgcaagccacggaaattgtcatatacactgtgaaacacagacaatctctacgwctgttttgcactgcgtaaaaactgtatatttccgactcaaatgaaaaacacccacagagatgctgtgtgcctggaagagcctggacaggagaggccccatcccagggcccccgatgctgccagtggctctggaccttgtccagactgggaagggcccgtgcagcaccctct

SEQ ID NO: 27306 - DNA, 698 bp, Homo sapiens
tggcggttcatgccccctgggtgggaggagggggagagggagggctccattgaatggtctctggtttttcccctcagactcctcactttgggcaaaggacaagaagcagtgagggcccctccctggggtctgggccaagctgacccctcttctccaggatcttccctccctgtgccctaggcgatccctgggccctgtgcagcaaggatgtcccttccacaccgcggctccaacttactatgcagaaaaatccttttttctctcaatgaggagmctagttttcaagatttttgtccaaatgttcaatttgaaccataaaccaggcacctggctcttcacagagtctccccctttccccaaggtggtaggtgtgactgtcacgagcctgggcagcctagtacaaggctgagcagggcacagatcgcgactgtcccctggactgtcatcctgttgcaggcaccagcccttccctagagaatcagggcacctgccaggggttatttagacccgcgggtggggatctggtgccgtaggtttgtctccagggagcagtgcagtgacagagggtgtgttgtgtgtttagggagcagtgcagtgacggagggtgtgttgtgtgttgtgcatgggatggaggttcctggtctcaccaagggaacagcttccttttggaggcgggggccgcctgtggccccacagaa

SEQ ID NO: 27307 - DNA, 1104 bp, Homo sapiens
gggatccttcctttaacccaaatacttaccaaatggccattattccccatcttaattaaccctataggccacccaatttaaagtggccatccagtcaatgttgcattatcctcagacaccaaacccctgacattgacccgagtcctaggcagagaccctggcacatcagctatgaatgtgtgccacttacatctcttatcagaaaagaacttgttgcttatctgtagagcatgcagagtgcctctaactgcagtgtctccaggatctggcctcagctggagagcttcaaaccacaaagtaggcctggcgaagtccagataatccaatagggatcttcagagcaaagattgttctttacagaagacttagactgagaagaagtggtcaggcccaatagccccatggtgcttagttatcagaacagctcctcaggcagagtctggcttggcatctcaatgcctgctctccagaggacccaactgacatagtcacccacttaccacttcttccctctagctgctagccctagttactgcctctctctgggcaggggctgatgcttattggttcaggctagtggaaagcaaccattctatagcattttctgtctacatatcagctacacataaagtagaagcgctttctcatcctaaaagtctgaaccccaaagatgcctttctgaggtctctacacacatttctttttccagaggaagactctttaataatagcatcaacaataacaacatttacctatatgcaggacattataactttcaacacaatttcataagcaatagaatcattatactttcaatctaagcaaattcaattattcacattgagaagaaaaagtgagagagagcaacttaaacaacctggtaattctgcctgccagataaacaaaataaacctttcctatgagtgactaatgcagtcaagcctgaaaaagtaatcacatgttccagaaaacttcagaaaaatgcatgaataattttaggagttttctgactaatgacaaagaagtggaagactttgcctagtttttcaggtgagtgggtggcattgaagkaataaattgaagaattaatacaaactccaggag

SEQ ID NO: 27308 - DNA, 611 bp, Homo sapiens
ttaatttttttattgaagtagagtcaagattaattttttccccatataaaattccccttggcagaatctccttttttagaaacactattsttcccccacttgtcataaataaagtgtccatatgtgtgttgatacattggcctgttttcccatccctgtgtcggtactgtttaattaatataaacatacaggttttaatattcagtaatgaaaatacttctttgttcattaaaaaagttttattatttttgtctgggagtggtggctcatgcctgtaatcccaacactttcagaggctaaggcaggcagatcacttgaggtcaggagtttgagaccagcctgaccaacatggggaaacctcgtctctattaaaaatgcaaaaactagctgggcttggtggtgcgtgcctgtagttccagctactcgggaggctgaggtgggagaatcacttgaactcgggagtcagaggctgcagtgagccgagattttgccactgcactccagcctgggcgacagatcgagactccatctcaaaaaaaaaagtttattatttttggcctgttgcacttctttatgaattttgggatcaatttgttggtctccacaaacaa

SEQ ID NO: 27309 - DNA, 1101 bp, Homo sapiens
tcctgcctcagcctcctgagttgctgggattacaggtgcatgccaccacaccccgctaatttttgtatttttagtagagatggggtttcaccatgttggccagactggtcttgaactcctgaccttgggtcatccgcccgccttggcctcccaaagtgctggaattacaggcgtcagccacggcgcccccgcagggatgcatttttgttacctaaaaatccctccgaagttcaggaaggrtagtatgaaaaccattaagaatctggagtcagcatcttccaattttatagattatgaattgacttcttgatatgaaatatgaaggaataatattttaaaaattttcttccacttccttaccacaatctactgattatttttacttatagttttacattgttagtttagaacatttacatttctgctgtataaacataatatctataattgtttaatattaatatttttccatggtttctccatcagctgtgatgaaagtgacaaaattaggtaatggatgtcttattaaattaaattgttaacacctaagaatagtaataacacaataagtttgttaagtaaataaaattcctggggtatttataatgatttatattttactggctgggtttatggttgagtagcgttttaaagaaagggctcattggtactgtattctttgattgttttgattcaaaactgttttctattttcatttataataataatttccacttaccttcagatatacatacctactatttaattttgcagtggagaagtctgaggcattctagcttttacttctttacaaaaggtgtttttttgtttatgttttcctgtctgaagtattcactattttctctgcctggagaatcctgtattcttaaagtttatttaccagcattttgctcatgttgattactctgtatcaaagtttcattgaacatagtttactcttttgatctatggatttgtatcttccttgattttctgtattatttatcttattgttttttcttttgggagttctctactgcagggatctctcctcttatatttatgtctgattatcttagtcagttatgtctgccataaaaa

SEQ ID NO: 27310 - DNA, 513 bp, Homo sapiens
tcccataaatgtgcacaactattatatatccatttaaaaacgtatatgctaacaacataaaactaaaagactgaggtagaataggaggtgctagaaaatatgactgggatcaatataaagtgtaaacttcaattggccttaattttttaattatctatattactttcaaacactataaaaacaaaagttaacattatcaatacagyttttggatgatctaattacaagacatatttttaaaaatataatcagtatcagtgacttcttagcctatcagagcattgttctttggttatttttcttaaacattgtcatcttaatacatagctattatgggatatatgaaaagaagccaaaaagctgccttacaacttgtgtggttttgttgtgccgtctctctgcaacatttaattattcatagattattatatctaattacaggacatttttatagtaatgtatttgatattgctaagtttttgtttgtccagacatgataaagttctattagaa

SEQ ID NO: 27311 - DNA, 513 bp, Homo sapiens
tcccataaatgtgcacaactattatatatccatttaaaaacgtatatgctaacaacataaaactaaaagactgaggtagaataggaggtgctagaaaatatgactgggatcaatataaagtgtaaacttcaattggccttaattttttaattatctatattactttcaaacactataaaaacaaaagttaacattatcaatacagtttttggatgatctaattacaagacatatttttaaaaatataatcagtatcagtgacttcttagcctatcagagcattgttctttggttatttttcttaaayattgtcatcttaatacatagctattatgggatatatgaaaagaagccaaaaagctgccttacaacttgtgtggttttgttgtgccgtctctctgcaacatttaattattcatagattattatatctaattacaggacatttttatagtaatgtatttgatattgctaagtttttgtttgtccagacatgataaagttctattagaa

SEQ ID NO: 27312 - DNA, 495 bp, Homo sapiens
ctagccagaggatatttgaaagrgaagacagtcaataaaaactattcaagtaagttagagacatatatatatatatatatctccatcataccaagaggagattgaacctcaggccagaaatgccaaaatgagtcctttctttttttctgttttggagacagagtctcactctgtcgcccaggctggagtgcagtggtgtaatcttggctcactgcaacctccacctctggggttcaagcgattcttctgcctcagcctcccgagtagctgggactacaggtgcacgccaccaggcccagctaatttttgtatttttagtagacacggggtttcaccatctaggccaggatggtctcaaactcctgtccttgtgatccaccctcctcaccctcccaaagcgctgggattacagttgtgagccactgcacctggccaagtcctttcttaaataaaaaactcatttcttagtaattccctgacctaattgaaatctgt

SEQ ID NO: 27313 - DNA, 1167 bp, Homo sapiens
gctaacttgaattaagcagagaggttaccccaatataacattmattctatcagggaatcaaaattgtttgcttgtttaaagaggtgaccatttgttttggcattctaggcaggcaaggatgcttgagaaaaatatgagaaaactacagaaacaactcaaaacttttctgacttccttaaaagaacatctccacggaggtttacagtgagctggtaacagagctgctgcactccagcctgggtgacagagtgagactgtctaaaaaaaaataaaaataaaaaaaagaacgtctccaattttaatgcatttctttgttcatggaaatatacaaagtgtattaaggaagtaaaaacactttaaatcatgtctcttcaacctaagtgctggagcagtttttctttctataggttttctattattcttatgtgaatcagcacagcagagtgtttctattcatcttgaaacctgttcctaattcctattctgccaagaccatagagatgttttcaaatagtaagcccctttgcatacgttgtttatagataaacaacaataatcaaacttaatttatagtgaattatcattgatcatagtaattgcattgtgcaattagcagtggtttctacctttgctggaaaccacaaaacattttaaatcacaaagatattcacacttttttgaatgttcattcgtttggtggagtagtttgttgatataaatttgaggtcaaatgctggcctctacataaatgtgaacgttttggtttgttagttgtcactttttaaatctgtagctaatacaaaatcttagttatttggggaggagatctgctgctaagaaatgccaggaaaagctttctgagcctctagtgtatttttgttgtggtaaatgtgagccataagccaagactctggtggcaaatagttattccattgttttatctaactgtacacaatttcatgaggcttattcttttatttataaatgaggaaatcagaattcagaaagattaaataagttaactgaggctactagtgaatggaagtcaagatttaaactaattatgtttaactttaaagaccataattgtctcattaagccaaattagatctaggaatgctgcctttccaaacttctatcaaaaaatggaggcattggctgggattt

SEQ ID NO: 27314 - DNA, 1167 bp, Homo sapiens
gctaacttgaattaagcagagaggttaccccaatataacattaattctatcagggaatcaaaattgtttgcttgtttaaagaggtgaccatttgttttggcattctaggcaggcaaggatgcttgagaaaaatatgagaaaactacagaaacaactcaaaacttttctgacttccttaaaagaacatctccacggaggtttacagtgagctggtaacagagctgctgcactccagcctgggtgacagagtgagactgtctaaaaaaaaataaaaataaaaaaaagaacgtctccaattttaatgcatttctttgttcatggaaatatacaaagtgtattaaggaagtaaaaacactttaaatcatgtctcttcaacctaagtgctggagcagtttttctttctataggttttctattattcttatgtgaatcagcacagcagagtgtttctattcatcttgaaacctgttcctaattcctattctgccaagaccatagagatgttttcaaatagtaagcccctttgcatacrttgtttatagataaacaacaataatcaaacttaatttatagtgaattatcattgatcatagtaattgcattgtgcaattagcagtggtttctacctttgctggaaaccacaaaacattttaaatcacaaagatattcacacttttttgaatgttcattcgtttggtggagtagtttgttgatataaatttgaggtcaaatgctggcctctacataaatgtgaacgttttggtttgttagttgtcactttttaaatctgtagctaatacaaaatcttagttatttggggaggagatctgctgctaagaaatgccaggaaaagctttctgagcctctagtgtatttttgttgtggtaaatgtgagccataagccaagactctggtggcaaatagttattccattgttttatctaactgtacacaatttcatgaggcttattcttttatttataaatgaggaaatcagaattcagaaagattaaataagttaactgaggctactagtgaatggaagtcaagatttaaactaattatgtttaactttaaagaccataattgtctcattaagccaaattagatctaggaatgctgcctttccaaacttctatcaaaaaatggaggcattggctgggattt

SEQ ID NO: 27315 - DNA, 1167 bp, Homo sapiens
gctaacttgaattaagcagagaggttaccccaatataacattaattctatcagggaatcaaaattgtttgcttgtttaaagaggtgaccatttgttttggcattctaggcaggcaaggatgcttgagaaaaatatgagaaaactacagaaacaactcaaaacttttctgacttccttaaaagaacatctccacggaggtttacagtgagctggtaacagagctgctgcactccagcctgggtgacagagtgagactgtctaaaaaaaaataaaaataaaaaaaagaacgtctccaattttaatgcatttctttgttcatggaaatatacaaagtgtattaaggaagtaaaaacactttaaatcatgtctcttcaacctaagtgctggagcagtttttctttctataggttttctattattcttatgtgaatcagcacagcagagtgtttctattcatcttgaaacctgttcctaattcctattctgccaagaccatagagatgttttcaaatagtaagcccctttgcatacgttgtttatagataaacaacaataatcaaacttaatttatagtgaattatcattgatcatagtaatygcattgtgcaattagcagtggtttctacctttgctggaaaccacaaaacattttaaatcacaaagatattcacacttttttgaatgttcattcgtttggtggagtagtttgttgatataaatttgaggtcaaatgctggcctctacataaatgtgaacgttttggtttgttagttgtcactttttaaatctgtagctaatacaaaatcttagttatttggggaggagatctgctgctaagaaatgccaggaaaagctttctgagcctctagtgtatttttgttgtggtaaatgtgagccataagccaagactctggtggcaaatagttattccattgttttatctaactgtacacaatttcatgaggcttattcttttatttataaatgaggaaatcagaattcagaaagattaaataagttaactgaggctactagtgaatggaagtcaagatttaaactaattatgtttaactttaaagaccataattgtctcattaagccaaattagatctaggaatgctgcctttccaaacttctatcaaaaaatggaggcattggctgggattt

SEQ ID NO: 27316 - DNA, 1167 bp, Homo sapiens
gctaacttgaattaagcagagaggttaccccaatataacattaattctatcagggaatcaaaattgtttgcttgtttaaagaggtgaccatttgttttggcattctaggcaggcaaggatgcttgagaaaaatatgagaaaactacagaaacaactcaaaacttttctgacttccttaaaagaacatctccacggaggtttacagtgagctggtaacagagctgctgcactccagcctgggtgacagagtgagactgtctaaaaaaaaataaaaataaaaaaaagaacgtctccaattttaatgcatttctttgttcatggaaatatacaaagtgtattaaggaagtaaaaacactttaaatcatgtctcttcaacctaagtgctggagcagtttttctttctataggttttctattattcttatgtgaatcagcacagcagagtgtttctattcatcttgaaacctgttcctaattcctattctgccaagaccatagagatgttttcaaatagtaagcccctttgcatacgttgtttatagataaacaacaataatcaaacttaatttatagtgaattatcattgatcatagtaattgcattgtgcaattagcagtggtttctacctttgctggraaccacaaaacattttaaatcacaaagatattcacacttttttgaatgttcattcgtttggtggagtagtttgttgatataaatttgaggtcaaatgctggcctctacataaatgtgaacgttttggtttgttagttgtcactttttaaatctgtagctaatacaaaatcttagttatttggggaggagatctgctgctaagaaatgccaggaaaagctttctgagcctctagtgtatttttgttgtggtaaatgtgagccataagccaagactctggtggcaaatagttattccattgttttatctaactgtacacaatttcatgaggcttattcttttatttataaatgaggaaatcagaattcagaaagattaaataagttaactgaggctactagtgaatggaagtcaagatttaaactaattatgtttaactttaaagaccataattgtctcattaagccaaattagatctaggaatgctgcctttccaaacttctatcaaaaaatggaggcattggctgggattt

SEQ ID NO: 27317 - DNA, 588 bp, Homo sapiens
agtcagcagtttgmaacctcaaacgaatccctcaacagaacccaattatgcagacaccctgatcttggacttctggcctccagaactgtgagaaataaatttctgttgtttataaccacccagtttatggtattttgtgatggtagcccaagtagactaagtatattatctcaatggattttatacagcagcaaagtgaataaactacaaccacacaaagcaacatagataattttcaaaacaataatgatgatgacagttaaagataggcccataagactctattagtgtgatgtcatttctataaatcttgaatataaacatatatcaagaacactttgtttaggaacatatgtgtataaaaatatttcataacactcaaggtaatgatgaagacataatttaggctggcatgacctctgatgagggaaaggcaagaggtagatggtaaagacacatacctaggtggacacgagttgatggcagggttccagtccttgtatgtgatgatgatgtcacatgtttattacagtattgagctttagacgtgcataaatattatgtgttaatttttatttatcaattata

SEQ ID NO: 27318 - DNA, 588 bp, Homo sapiens
agtcagcagtttgcaacctcaaasgaatccctcaacagaacccaattatgcagacaccctgatcttggacttctggcctccagaactgtgagaaataaatttctgttgtttataaccacccagtttatggtattttgtgatggtagcccaagtagactaagtatattatctcaatggattttatacagcagcaaagtgaataaactacaaccacacaaagcaacatagataattttcaaaacaataatgatgatgacagttaaagataggcccataagactctattagtgtgatgtcatttctataaatcttgaatataaacatatatcaagaacactttgtttaggaacatatgtgtataaaaatatttcataacactcaaggtaatgatgaagacataatttaggctggcatgacctctgatgagggaaaggcaagaggtagatggtaaagacacatacctaggtggacacgagttgatggcagggttccagtccttgtatgtgatgatgatgtcacatgtttattacagtattgagctttagacgtgcataaatattatgtgttaatttttatttatcaattata

SEQ ID NO: 27319 - DNA, 664 bp, Homo sapiens
caagggatataaacagacacttttcaaaagaagacatacatatgctaacaattgtatgtgaaaaagctttacatatgcaaatgcaaatcaaagccacaatcagataccatctcacaccagccagaatgcctattactaaaaagtcaaaaaataacagatgctggtaaatttccagaataaaaggaatgcttatacactgttggtaggagagtaaattagttcatccattgtggaagacagtgtggcaattcctcaaaacctaaaagaaagaaacaccatttgacccagtgattccattactgggtatatacccaaaggattawaaatctttctattataaagacgcatgcacgtgtatgttctttgcagcactattcacaatagttaaagacatggaatcaacctacattcccatctatgacagactggataaagaaaatgtggtccaaggcacattttaaagatgcaaacttcatgaagtcctgaaatcagtgatcataatgggatgttttatacacgctatgtattgaacttttgttatgtctttctaccaaactgttcagagtaggataattgtaacaaaaaagaaattccagcaaaagttctttttattgaaatatgaattttggattaaataaccatgattagccacctcacataattt

SEQ ID NO: 27320 - DNA, 645 bp, Homo sapiens
tctatgattatataagttaaaaagtggttatgtaaatgggaggggtattgattggaaaggtacctgaagaaatttttggtttgatggaaatgttctatgtcttgtttgggcaatggtaaacactactacactggtatataaaattactgaacctcatggattgaaaaattagaaaataaattttattgaatgtaaattttacgtcctttaaaataagccttgaagagagtgattagaagggagcaaagcagagatttgttgggactggtaatttgtttcttgattagcaaaggttacactgtgtttaattttgtaaaaatcttatttgttcacttaggctttctgycatttttgtatatatgctattcctcaatttattttaaaaaactttattaaaattaaattaggcagaagttaactatatttttttaaaacctttaaacactctcaaataaaatacagactgttattattgcatcattaaaaagatatttaggatagttacaaagaaacctacctagtcaaggatcttatattccagattttagctgcaagtccaatattttgtaaaatagtaaaagacaaatcaacaaccagatgagtttctcattaaatgaaaataatttggaaaataacttctatgca

SEQ ID NO: 27321 - DNA, 2817 bp, Homo sapiens
atttttagaatttcatacttttcctaatgttctcacttttcttcaagcaaagcaaaggtacatttaagccattattttatagaaaaaaaattgttaaaaaatacatttttcccagcttccacatcaatttcctatagccttgaataaataaatgtttggctaatgttttctcatgtttttgaaaaagacaattatcttgtgtttctaggcactaaaagcctccactaagtaaattgcatctttaaaaatgtgccccttttccatgaaaatgtaggaggaaaaaaacctactaaatctctttcaaacaattctgtagaattttctttttcttcttgctttctccattttgtgaactcatgcttgactcccaatacctccatctgtcttgcaaaaatgaaaatctggtacatacattcttctcctaggtatttgtcaaaactcagagagaaggctatactctttcacacgctgtctttcctgcgctccgtattccctcataggcaggatgggagtgctcttggtatttctccacttttctcctccccatctcacaagcagatctctatattcccccttcctagtggcagaagagggaaagaaggctagtttctacaaatacaacatttagtcaaaaagaaaaacagtgtcagtaaagcagactccccttgctgataggggaagtaggcaactaagaaatgctgttggaaacagttgctcaagaacaaaaaacaaattcaagcactcaaataaccaggagacaagttgatgggttgtgagccatgctgaattagaaactaaaacattaggagacagtactaaacaacacgctgttgggcttaacctcaatggtcaacatcagtaaggtcaataccagtttattatcagctctgacaccagaagtccttgtttaaggcaaaagactgaggtttcctgccgggcctgggaattatgtacacatgaaaagcaggtcaggtcacagcagcctgacagctacccagtattgtaggataatatttttagggattaactgaggtttctctccctgtcccctgttttaaaaaacaaaaataatctttaaacaaattagttatgaaaatatataaaaattgtactaaatcttacttcaagggaaaaggccttagcagaccaattcaaagattcagtagggtattttagaggaatagacaatgactctatgggtgtttctcaacctcagcactattgacattttgggcctgataattcttcattgttaggatgtacaggatgtttggtagcatccctggcctctaccactaaatgccagtaacaccaacaccccaagttgtgacaatcagaaaataccctcagacactgccaaatgttccctgggggacaaaattgcctttggttaaaaagcacacattgttagattcaaaaaacaacaaaaaaagaatggtttgttaaaagttattaaattctcgacagacatcagctggctaagtgagtgactggattcccaaaacaagttttgatcacattagaatccctcaggaaatcgcttaaatattttttcaggaatgctatttcccacccccctagaaggagattgtgaattacattacacaaaagttcygtcccagatgagctttggggcaattttcttttacagtcttcatggacacacttatttgtgttcatcaccctctccccaggcatttaagcgataacaatggcagcttttcatctgtgctgctgttgagggaaggaagcatgaaaaaataagatggatgaatttctaaatattattattaaatgcctagctgaagcaatcatggaaagttaatccatgaaagccagagctcctcttgtaagaactaggctttttgaaataacaaacatgtattgaactcaaagttttagaatctggaacattgagagtataaaaagatgcaagatgcaatattcccaccaaaagaaaaaaaatggtagaaatacagagatcaagttagatacagggagttatttctgaaagggctctatacctgacctcaaccaaagttaaaacacagatatggcagagggggtgacacatcgggaaacacacccagatcccaaaagcaataagggcaggtcaaaacaaactctaaagggctacaaagggctaaaaaaaaaatgaccctgtagcagagagctagaggactgaccacccaaatcaagtttcaaatgaaagtcacagctagaccttgggggaacttacagcttcaccaagagctgggtcagctgagtcagcagaatgagacctcttgtccacaggtcatgctaaaagtatgagggagttaagccagtggtggacaccccaacagtggatgcagcaacagcagagtgggaggggggaaaagcggggcagtggagaagatagatctcagagagtacatgactaaaaaatgttaaacagttcttgatgacaaaagacagcactagatttgtgaagctaagcaaactatactgacttctcccctcctgaggagttcaggaaaacacatctcacctaaacactagcaacaaaatgattgtaattgaattccctataaagttatcataagcaaaaagtgaataaagagtagaacaatagtactgcaagcaaacaagtcatccagaaatgtatgtacaaatataaatatataatattttaaacaagttaaaataatttaaggtgatagtagaagctataaaagtacaacctaaatcataactttcaaatctcagaaatgagatgtttgggcaagagagagctgacagagcagaaaaattaaaactaattataagataagtcag

SEQ ID NO: 27322 - DNA, 538 bp, Homo sapiens
aattaaaatttaagcctaatttctgcataagactgtggccttacaaatgcttgtaccatttctcatcttgacataacgagacttcctgagtgcactgcaaaacatggtgaaaatctgcagattcctgcaactgcagcactttccaccaagcaactatggctatgctttgttgcattaattgcagaagcagggaagtgtagccaaaaaaagcacatagattttgtatgtgttttacagcaggaaaatattaaaagctcttcaagtaccacttcagtaatctagccatgtaaatcctaaagawttttatgcagcatgagcaaagttttagttttcagctggactgttcttagttgacaaaacctgcagagaataaagaataatcagaaaacatggaaaaataagctgcttaatgtgacgttattttggggtgatcagaatttatgatgtgcttatttcacattgcatgcctttatcaaaatatctcatgtagtccataaatatatacacctactatgtacccacaaaatgtttaaatact

SEQ ID NO: 27323 - DNA, 938 bp, Homo sapiens
acagagctgggggctgctgccaaggtctgaggtgcggcctctggaggggagccctgcagaccccagctgccctgggctgggcctcctgctctgggccgcyctctctgctgatccgctggggtcagaccccggtgtgggtggagcagccacaggacacatgtgggtctcgaagcctcctctcctgtgctcctggggaacaagtcagcagcagcccctgctcttttcctgcctggaccaccatcttcaacaggtgaatgcacctctttaaagcctgggatggaggatagaggtttgggggatgggaatggggaggggattcctggagtccctgggaaggaggaggaggaggaggtggccctggccttcagagcccagtgaggccccatcccctgtgaaggctgcactcaccctgaagtgtgcctgtgcccgagagatttgtttccacgtcagggtctcatctggccaactgcaggagcctccaggtgagccaggaaacaggaacctgtcatgcaggggattccccatcccagttaaatacttcccacccccaagtcccgagctggcactggggcctcctgtctacgtggtgggtgttctcaggagggaaaccctcctccacttccctgccaatcgtacacttttaaaaaacaaatccacaaattaaaacattttgacaagccgaggagtggtacacctaacgcccaatgaatgagaaaagaaacgtgaaaaattcatgcctgatttcactccgtatcacaaaaatgaatgtgttgctcgggctcatacattttagaaaggaatttttgctaaaaaacaaaaattgcaaccttcagaaatgttgtctgctcccacagctctgaaacaaaagcacacccttctccaagcaggagagagcccagctctgcccccgggacacccaggccttcaccccaaatagc

SEQ ID NO: 27324 - DNA, 938 bp, Homo sapiens
acagagctgggggctgctgccaaggtctgaggtgcggcctctggaggggagccctgcagaccccagctgccctgggctgggcctcctgctctgggccgctctctctgctgatccgctggggtcagaccccggtgtgggtggagcagccacaggacacatgtgggtctcgaagcctcctctcctgtgctcctggggaacaagtcagcagcagcccctgctcttttcctgcctggrccaccatcttcaacaggtgaatgcacctctttaaagcctgggatggaggatagaggtttgggggatgggaatggggaggggattcctggagtccctgggaaggaggaggaggaggaggtggccctggccttcagagcccagtgaggccccatcccctgtgaaggctgcactcaccctgaagtgtgcctgtgcccgagagatttgtttccacgtcagggtctcatctggccaactgcaggagcctccaggtgagccaggaaacaggaacctgtcatgcaggggattccccatcccagttaaatacttcccacccccaagtcccgagctggcactggggcctcctgtctacgtggtgggtgttctcaggagggaaaccctcctccacttccctgccaatcgtacacttttaaaaaacaaatccacaaattaaaacattttgacaagccgaggagtggtacacctaacgcccaatgaatgagaaaagaaacgtgaaaaattcatgcctgatttcactccgtatcacaaaaatgaatgtgttgctcgggctcatacattttagaaaggaatttttgctaaaaaacaaaaattgcaaccttcagaaatgttgtctgctcccacagctctgaaacaaaagcacacccttctccaagcaggagagagcccagctctgcccccgggacacccaggccttcaccccaaatagc

SEQ ID NO: 27325 - DNA, 938 bp, Homo sapiens
acagagctgggggctgctgccaaggtctgaggtgcggcctctggaggggagccctgcagaccccagctgccctgggctgggcctcctgctctgggccgctctctctgctgatccgctggggtcagaccccggtgtgggtggagcagccacaggacacatgtgggtctcgaagcctcctctcctgtgctcctggggaacaagtcagcagcagcccctgctcttttcctgcctggaccaccatcttcaacaggtgaatgcacctctttaaagcctgggatggaggatagaggtttgggggatgggaatggggaggggattcctggagtccctgggaaggaggaggaggaggaggtggccctggccttcagagcccagtgaggccccatcccctgtgaaggctgcactcaccctgaagtgtgcctgtgcccgagagatttgtttccacgtcagggtctcatctggccaactgcaggagcctscaggtgagccaggaaacaggaacctgtcatgcaggggattccccatcccagttaaatacttcccacccccaagtcccgagctggcactggggcctcctgtctacgtggtgggtgttctcaggagggaaaccctcctccacttccctgccaatcgtacacttttaaaaaacaaatccacaaattaaaacattttgacaagccgaggagtggtacacctaacgcccaatgaatgagaaaagaaacgtgaaaaattcatgcctgatttcactccgtatcacaaaaatgaatgtgttgctcgggctcatacattttagaaaggaatttttgctaaaaaacaaaaattgcaaccttcagaaatgttgtctgctcccacagctctgaaacaaaagcacacccttctccaagcaggagagagcccagctctgcccccgggacacccaggccttcaccccaaatagc

SEQ ID NO: 27326 - DNA, 938 bp, Homo sapiens
acagagctgggggctgctgccaaggtctgaggtgcggcctctggaggggagccctgcagaccccagctgccctgggctgggcctcctgctctgggccgctctctctgctgatccgctggggtcagaccccggtgtgggtggagcagccacaggacacatgtgggtctcgaagcctcctctcctgtgctcctggggaacaagtcagcagcagcccctgctcttttcctgcctggaccaccatcttcaacaggtgaatgcacctctttaaagcctgggatggaggatagaggtttgggggatgggaatggggaggggattcctggagtccctgggaaggaggaggaggaggaggtggccctggccttcagagcccagtgaggccccatcccctgtgaaggctgcactcaccctgaagtgtgcctgtgcccgagagatttgtttccacgtcagggtctcatctggccaactgcaggagcctccaggtgagccaggaaacaggaacctgtcatgcaggggattccccatcccagttaaayacttcccacccccaagtcccgagctggcactggggcctcctgtctacgtggtgggtgttctcaggagggaaaccctcctccacttccctgccaatcgtacacttttaaaaaacaaatccacaaattaaaacattttgacaagccgaggagtggtacacctaacgcccaatgaatgagaaaagaaacgtgaaaaattcatgcctgatttcactccgtatcacaaaaatgaatgtgttgctcgggctcatacattttagaaaggaatttttgctaaaaaacaaaaattgcaaccttcagaaatgttgtctgctcccacagctctgaaacaaaagcacacccttctccaagcaggagagagcccagctctgcccccgggacacccaggccttcaccccaaatagc

SEQ ID NO: 27327 - DNA, 1969 bp, Homo sapiens
gtaatctaacatctctaaaatataacataagtgtggatatatttttctgaataactattttctataaaagtagatagtgttttgggatgtaggggattttaattctattttgcatttgtatatttcctatttatttttttctgtattaaatgagatattttatgtaacttaaaaatattctgtgacacaaaatatttttgccattttctacaatattataaatcaaccttcaaaacataaaagtgaaataaataattcatgtttacaaagaactgtcaggaaatggctagatttataagatatagtgaatttactatcttctcaaaattttttcagtctataaacatgttgtgtggatttaatctgattcactgtgtagataacactgattttagtgatatgatttactattgagatgttttatttccatagtagctactgaaaaaatctcaccattttcaaagacctagtagtgatatatatatatawaattaaattttcattaaatgataaaatcttaagtttgcatataaaatattaaaactgaatcaaggcaaatcaagatcaacaatagaaatcctattgaattctcataaaagaaaccatagttttaaaaaatatgattttaaaaaggtcattttacacagttggtgaagtcaaggcaaaactaatttatgactcatggcaaattctgaagaactccaaactgtgtatgcataccttaactgtgagccaaatacatttagaacatttctgacattggcaaggcaggagggcagtagattccagaaatttaaacactcctaagacattatttttcatcattaagtttctctcattatttttctccactcctatgtttcctaagtggatacatactaatacattaaatatttcacttcatttggattaaaagctgcatgcccattgaaaggtctttatcaatgactgaaatttacatttccaagtttttattccagtaaggatattggagttttccactaatattttaaatgtgaagactttaaaaagtttatgttgctatcaggaattattctatcaatcacaaagtataataacatatcatttggttgtatataatagtgaagaattagaaagagatttacaatgttcaccaaatcattctacactacaaacttcatttgaaatggagacccacattagtcaatattagtatggttactgcaccactgttagtgtaactaaatggaatgtcacatcctaaaccacaaatgtgctattgctgaatacaaatgtcctttgatatggaggtaacagtttataagcgtggtagcattagttatcagcaaactgttttgctaggagtaaaaattattataactacaaagtttatatacttttagagaaaaagttacaattgcattttttgaaaagacatctctttcaaattaatgatgtcatccaacataatctttaaccaaaaatcttagaataaccctccttagataagagctatgaaatggaatattttgaggcacaaatagaagggataaataaatacatcggattattttaaagctttcttcattatagaaagtacacagtgctcttcatggtatacaattaattcatgtgttagcacagttaatagaaagagctttgcagttaaacctctgttcaaattcatgttgtgttgttgagatgtggtgcagagcaggttttctttcttttaggaccatggttgggaattataagacactcataaaaagtaagaattatcaataaaaatgcaaacaactaattgttagacattcaacttacttttacattgcaatttaaaaaggaaattaaaaagttaacaactgaaatacattttttctcccaaactttttctgtaccaataagataaatctatgatggcctgaaaacaatatttagtgacacatggaatgttccattcacaatgttcaacaaaggtaaaatgttt

SEQ ID NO: 27328 - DNA, 1969 bp, Homo sapiens
gtaatctaacatctctaaaatataacataagtgtggatatatttttctgaataactattttctataaaagtagatagtgttttgggatgtaggggattttaattctattttgcatttgtatatttcctatttatttttttctgtattaaatgagatattttatgtaacttaaaaatattctgtgacacaaaatatttttgccattttctacaatattataaatcaaccttcaaaacataaaagtgaaataaataattcatgtttacaaagaactgtcaggaaatggctagatttataagatatagtgaatttactatcttctcaaaattttttcagtctataaacatgttgtgtggatttaatctgattcactgtgtagataacactgattttagtgatatgatttactattgagatgttttatttccatagtagctactgaaaaaatctcaccattttcaaagacctagtagtgatatatatatatataattaaattttcattaaatgataaaatcttaagtttgcatataaaatattaaaactgaatcaaggcaaatcaagatcaacaatagaaatcctattgaattctcataaaagaaaccatagttttaaaaaatatgattttaaaaaggtcattttacacagttggtgaagtcaaggcaaaactaatttatgactcatggcaaattctgaagaactccaaactgtgtatgcataccttaactgtgagccaaatacatttagaacatttctgacattggcaaggcaggagggcagtagattccagaaatttaaacactcctaagacattatttttcatcattaagtttctctcattatttttctccactcctatgtttcctaagtggatacatactaatacattaaatatttcacttcatttggattaaaagctgcatgcccattgaaaggtctttatcaatgactgaaatttacatttccaagtttttattccagtaaggatattggagttttccactaatattttaaatgtgaagactttaaaaagtttatgttgctatcaggaattattctatcaatcacaaagtataataacatatcatttggttgtatataatagtgaagaattagaaagagatttacaatgttcaccaaatcattctacactacaaacttcatttgaaatggagacccacattagtcaatattagtatggttactgcaccactgttagtgtaactaaatggaatgtcacatcctaaaccacaaatgtgctattgctgaatacaaatgtcctttgatatggaggtaacagtttataagcgtggtagcattagttatcagcaaactgttttgctaggagtaaaaattattataactacaaagtttatatamttttagagaaaaagttacaattgcattttttgaaaagacatctctttcaaattaatgatgtcatccaacataatctttaaccaaaaatcttagaataaccctccttagataagagctatgaaatggaatattttgaggcacaaatagaagggataaataaatacatcggattattttaaagctttcttcattatagaaagtacacagtgctcttcatggtatacaattaattcatgtgttagcacagttaatagaaagagctttgcagttaaacctctgttcaaattcatgttgtgttgttgagatgtggtgcagagcaggttttctttcttttaggaccatggttgggaattataagacactcataaaaagtaagaattatcaataaaaatgcaaacaactaattgttagacattcaacttacttttacattgcaatttaaaaaggaaattaaaaagttaacaactgaaatacattttttctcccaaactttttctgtaccaataagataaatctatgatggcctgaaaacaatatttagtgacacatggaatgttccattcacaatgttcaacaaaggtaaaatgttt

SEQ ID NO: 27329 - DNA, 973 bp, Homo sapiens
  misc_feature (1)...(973): n = A,T,C or G
catgataaccagttggaagaggatcatggttacttgaatgtggaaatcatactttctttaagcaccttttctgtcatacctcatctatagaactgatagactacttatttgatataatctagaaattagttttttctaagccacagtagtcttatttaatggaaagraaaacatattctaaaacagtttctatcttgttttctcccctatcctaatctatgcctaattacttaaggtgatgataataacatcagtggcttcattgtactgtaatacagtaatgttctcaggatttgtagacctgtttggcctatactaaaagggcttggggctctgagagttgttatcaccttttttttccaataatcctgcctctgatgatactgtatctctactcgctttagtagtccacattccttcaccagctctcgtttgttatttcaaatctcttccttgaaatctcctgcagactagaaaaccaagtaaccaagttttttagaattgtgtgtaaaattaaattgatgctatttcttacaattaaattgcttgaacttgaagatgttcattttattgatcagatttttgcccaagtcctagatagttgagatcagataaacgaatttcaaatgaggaagatttttgtatataaaatttaccattccaatttttataaatgctcttaaacagtttttttggtcgtatgaaagatattttcctgtttctttgggaagtgctctttactaagctttcccctccatctatataatttaatgagcttgcccatcatcaggggctgagcaatttggcagaactgcaaattctaattctggtcttggtactgaattggggcaaatcacttaacttctgtgtatnnnnnnnnnnnnnnnnnnnnnnnnnnnnnnnnnnnnnnnnnnnnnnnnnnnnnnnnnnnnnnnnnnnnnnnnnnnnnnnnnnnnnnnnnnnnnnnnnnnng

SEQ ID NO: 27330 - DNA, 937 bp, Homo sapiens
ttgtggtgatggaaatgtttgtattttgactgtatcaatgtcaataatgtagtgacaatattgtactacaatagttttgcaagatgttaccattggggtatgcygggtaaagggtatatctgatctctttgtattgttcttacaactgcatgtgaatctaaaattacctcaaaattaagtttaattctataaaagaatttcactgaagagctggggaatggagtttttttgtataattatttgtctaatttgtatagttattacataaataattctgttaggggctgctatattagccaagtactgtggtatgggagaagtatggtaatgttcactttgtagtagaaagattatggctttgtcattagagaccttgtgtcaaatacatcccaccacataccagctgtgtgaccttgggcaatctgagcttcagtgtcctcatctacaaagcacgagatctcttttaaggcttaagcaaggtaatatctaaatcagatatataaaacactgtacttcgaaccttggcactacgcctcacacataataagttcttaaatgctagctgtcatgaaggagagagaatcaaaacaattacttagcaagcaactgtttcctgtgttctctatgttatacctgataagtgattattaaacagattctaggacaaggtgtaaaaacgagaaactcaactaggcatgttacccacacaatgagtaggttcggtcgtttagggggtatcagtccgatgaccacaaccaaggaggatttaataaggggattttattacttgtaacaagtaaggagaacactgggcattagttcccaaagcagtgtttccccaagctgggggctggatcaggttttataagcatagggtaatgagctgtgacctgattggatcttgtaatgaggtgatgccagggggtatgatctgact

SEQ ID NO: 27331 - DNA, 937 bp, Homo sapiens
ttgtggtgatggaaatgtttgtattttgactgtatcaatgtcaataatgtagtgacaatattgtactacaatagttttgcaagatgttaccattggggtatgctgggtaaagggtatatctgatctctttgtattgttcttacaactgcatgtgaatctaaaattacctcaaaattaagtttaattctataaaagaatttcactgaagagctggggaatggagtttttttgtataattatttgtctaatttgtatagttattacataaataattctgttaggggctgctatattagccaagtactgtggtatgggagaagtatggtaatgttcactttgtagtagaaagattatggctttgtcattagagaccttgtgtcaaatacatcccaccacataccagctgtgtgaccttgggcaatctgagcttcagtgtcctcatctacaaagcacgagatctcttttaaggcttaagcaaggtaatatctaaatcagatatataaaacactgtacttcgaaccttggcactacgcctcacacataataagttcttaaatgctagctgtcatgaaggagagagaatcaaaacaattacttagcaagcaactgyttcctgtgttctctatgttatacctgataagtgattattaaacagattctaggacaaggtgtaaaaacgagaaactcaactaggcatgttacccacacaatgagtaggttcggtcgtttagggggtatcagtccgatgaccacaaccaaggaggatttaataaggggattttattacttgtaacaagtaaggagaacactgggcattagttcccaaagcagtgtttccccaagctgggggctggatcaggttttataagcatagggtaatgagctgtgacctgattggatcttgtaatgaggtgatgccagggggtatgatctgact

SEQ ID NO: 27332 - DNA, 937 bp, Homo sapiens
ttgtggtgatggaaatgtttgtattttgactgtatcaatgtcaataatgtagtgacaatattgtactacaatagttttgcaagatgttaccattggggtatgctgggtaaagggtatatctgatctctttgtattgttcttacaactgcatgtgaatctaaaattacctcaaaattaagtttaattctataaaagaatttcactgaagagctggggaatggagtttttttgtataattatttgtctaatttgtatagttattacataaataattctgttaggggctgctatattagccaagtactgtggtatgggagaagtatggtaatgttcactttgtagtagaaagattatggctttgtcattagagaccttgtgtcaaatacatcccaccacataccagctgtgtgaccttgggcaatctgagcttcagtgtcctcatctacaaagcacgagatctcttttaaggcttaagcaaggtaatatctaaatcagatatataaaacactgtacttcgaaccttggcactacgcctcacacataataagttcttaaatgctagctgtcatgaaggagagagaatcaaaacaattacttagcaagcaactgtttcctgtgttctctatgttatacctgataagtgattattaaacagattctaggacaaggtgtaaaaacgagaaactcaactaggcatgttacccacacaatgagtaggttcggtcgtttagrgggtatcagtccgatgaccacaaccaaggaggatttaataaggggattttattacttgtaacaagtaaggagaacactgggcattagttcccaaagcagtgtttccccaagctgggggctggatcaggttttataagcatagggtaatgagctgtgacctgattggatcttgtaatgaggtgatgccagggggtatgatctgact

SEQ ID NO: 27333 - DNA, 701 bp, Homo sapiens
aaatccatcttacccttgacttctgtttcccttttttttctgtaagtataaatttatttttttccactttttatatgtcatattcccctcctttggtttttttcctttcttagttcctttggaaactgcaaacatttgagtattagaatcacatctacttcagtgtagcatcttgcataaaatgtcttacccagagtgatcaaaaagtattatgacaygcatctataggaagctctcaacatccatcaacagacttctcttctggctgcctttgtcattgaaatgtgaattttgcataaggacatcatagaaggctataaggtcaaaagtgaaatatattatttttcagatgaaacactgtaatgtgtgtactgattataattagccttccaaataaggatacttcagaatgccacagaaatatgttctttatcctattctctttaaaaatctttcctctagtttctgtggtgaaaacactaaaagcaattaagacctttgccttcttttctatagaagtaatgtaaacaattctatgttggttaaattatctcagagtaaagcagtcttttaattgcaagctagtgtatggcatttttgctatattcaatttaagccatgccaaataattctctatggaaaataacaaataaaaatcacatcctaactaccaatttttctcttaatctgttttggtaaat

SEQ ID NO: 27334 - DNA, 701 bp, Homo sapiens
aaatccatcttacccttgacttctgtttcccttttttttctgtaagtataaatttatttttttccactttttatatgtcatattcccctcctttggtttttttcctttcttagttcctttggaaactgcaaacatttgagtattagaatcacatctacttcagtgtagcatcttgcataaaatgtcttacccagagtgatcaaaaagtattatgacatgcatctataggaagctctcaacatccatcaacagacttctcttctggctgcctttgtcattgaaatgtgaattttgcataaggacatcatagaaggctataaggtcaaaagtgaaatayattatttttcagatgaaacactgtaatgtgtgtactgattataattagccttccaaataaggatacttcagaatgccacagaaatatgttctttatcctattctctttaaaaatctttcctctagtttctgtggtgaaaacactaaaagcaattaagacctttgccttcttttctatagaagtaatgtaaacaattctatgttggttaaattatctcagagtaaagcagtcttttaattgcaagctagtgtatggcatttttgctatattcaatttaagccatgccaaataattctctatggaaaataacaaataaaaatcacatcctaactaccaatttttctcttaatctgttttggtaaat

SEQ ID NO: 27335 - DNA, 1159 bp, Homo sapiens
tctgtagggaatgccccactcttcctgcctgcatcctgtcccctgccggaatttttcaaatctcacctcgaacgtccacttctctaggagaacatttttagctttctagatatagccagtagcctccttataatttgcagagatattgaaaacaccatggttaatacaccattgcacattcttgctggtcctacctggatcatagacccttgtgaacagggtcttcatatccactgggcctcactgatgtttgacacatagttgttcacacttgttcaggagggaaggaaggaactaggaagatggaagggcagtgcaggctacaaaggagggaaaggccatttgacactcaacgcatctctgggcctgggcatttggttaaggaacaggtaatactctgcttcatggctacgtccctttgttcatgcagccaacattgaaggttggctttgagcactgttccttctctgcggtttctgtcctggattaacctgcagacttaacccaatgcaccatgtcttacgaccacccccatttgttgggattaccaagctcaagacacacagatgtcttttcaggaccactttgaaagtggagttttaaattagatgagattcttgacaagaacatctcatccaccagtcagagagattcagtgactcttaggtgctgtgagtctgtgtctatttgtttcaggtacaaatctctttacttttcagtaacatagcacctcagatgaagaaagctcttctactattattattattgttttgctctgcctatgaaaatgtgtgattatgtcaggttccccagaaacagatcaaggatttattaaagaaattttcccaggagaaactaaaaaaagagtgagasagctggatagggaaagaagaggctgggtgagggtgtcagcctcagcctgaccctatagtggagctctgtgggaggaattacttctgagtttgtcccgacatggggaagggagctgaacacccccaaattaggtttcagctaagaagagagagggtataaactcctggacacttcagttctttgggcttgagtacaaaatggctctggtagtccaagggcagccctgagaagtgagccccagatgcaggctgttagatgtggagtgcacagataggggcagtgacgg

SEQ ID NO: 27336 - DNA, 1159 bp, Homo sapiens
tctgtagggaatgccccactcttcctgcctgcatcctgtcccctgccggaatttttcaaatctcacctcgaacgtccacttctctaggagaacatttttagctttctagatatagccagtagcctccttataatttgcagagatattgaaaacaccatggttaatacaccattgcacattcttgctggtcctacctggatcatagacccttgtgaacagggtcttcatatccactgggcctcactgatgtttgacacatagttgttcacacttgttcaggagggaaggaaggaactaggaagatggaagggcagtgcaggctacaaaggagggaaaggccatttgacactcaacgcatctctgggcctgggcatttggttaaggaacaggtaatactctgcttcatggctacgtccctttgttcatgcagccaacattgaaggttggctttgagcactgttccttctctgcggtttctgtcctggattaacctgcagacttaacccaatgcaccatgtcttacgaccacccccatttgttgggattaccaagctcaagacacacagatgtcttttcaggaccactttgaaagtggagttttaaattagatgagattcttgacaagaacatctcatccaccagtcagagagattcagtgactcttaggtgctgtgagtctgtgtctatttgtttcaggtacaaatctctttacttttcagtaacatagcacctcagatgaagaaagctcttctactattattattattgttttgctctgcctatgaaaatgtgtgattatgtcaggttccccagaaacagatcaaggatttattaaagaaattttcccaggagaaactaaaaaaagagtgagacagctggatagggaaagaagaggctgggtgagggtgtcagcctcagcctgaccctatagtggagctctgtgggaggaattacttctgagtttgtcccgacayggggaagggagctgaacacccccaaattaggtttcagctaagaagagagagggtataaactcctggacacttcagttctttgggcttgagtacaaaatggctctggtagtccaagggcagccctgagaagtgagccccagatgcaggctgttagatgtggagtgcacagataggggcagtgacgg

SEQ ID NO: 27337 - DNA, 1159 bp, Homo sapiens
tctgtagggaatgccccactcttcctgcctgcatcctgtcccctgccggaatttttcaaatctcacctcgaacgtccacttctctaggagaacatttttagctttctagatatagccagtagcctccttataatttgcagagatattgaaaacaccatggttaatacaccattgcacattcttgctggtcctacctggatcatagacccttgtgaacagggtcttcatatccactgggcctcactgatgtttgacacatagttgttcacacttgttcaggagggaaggaaggaactaggaagatggaagggcagtgcaggctacaaaggagggaaaggccatttgacactcaacgcatctctgggcctgggcatttggttaaggaacaggtaatactctgcttcatggctacgtccctttgttcatgcagccaacattgaaggttggctttgagcactgttccttctctgcggtttctgtcctggattaacctgcagacttaacccaatgcaccatgtcttacgaccacccccatttgttgggattaccaagctcaagacacacagatgtcttttcaggaccactttgaaagtggagttttaaattagatgagattcttgacaagaacatctcatccaccagtcagagagattcagtgactcttaggtgctgtgagtctgtgtctatttgtttcaggtacaaatctctttacttttcagtaacatagcacctcagatgaagaaagctcttctactattattattattgttttgctctgcctatgaaaatgtgtgattatgtcaggttccccagaaacagatcaaggatttattaaagaaattttcccaggagaaactaaaaaaagagtgagacagctggatagggaaagaagaggctgggtgagggtgtcagcctcagcctgaccctatagtggagctctgtgggaggaattacttctgagtttgtcccgacatggggaagggagctgaacacccccaaattaggtktcagctaagaagagagagggtataaactcctggacacttcagttctttgggcttgagtacaaaatggctctggtagtccaagggcagccctgagaagtgagccccagatgcaggctgttagatgtggagtgcacagataggggcagtgacgg

SEQ ID NO: 27338 - DNA, 585 bp, Homo sapiens
caccttttcttatttcctaattaatgcctataagttttccattttattttttcagttccaactwtcaatatatgagagttccttacctcaggatacttcccaacttacgtcagacataaattgtaatagcatgtcatgatttaacttgtgtttccttgatatatatttcaaaactgagaaactaaatttatctaaaaattaatcccttaaaatataatatagacaagtcatttaatgagtgagaatatggtcagaagagcaaaatatgtctgttctaggtataccctagaacaaggtttatcataggaaattacagataataaaactgttggtaagtcaaggggagcttaaatcacagaaagatgtcagaaattggtgattcacaggagatcacctagaagccacagtgaatttcagcaatcttatcagaagctgccaccacagagatttttcagcagctttcttggaagcttgagtaaatctcagcaattgaattgcgcattgttaccaattttagcagtctgctgtgccagtgctgttgattgaaaacaccaaaaatccaaaaatcttgactctgctcaaatt

SEQ ID NO: 27339 - DNA, 642 bp, Homo sapiens
gttgattacaggtcaaatttgaccactgaaagcccatttattcagaatatttttatcattttgaaattatgctagtagtcccaagaaacttctaaaaacagtatttcccacctggtgcttccccttatcagaacttgaaaagaaattattttcttcaaagaagacttgcatcccactagtgagcatgaacaagggtaatttaaacgtatattctgattactgattactcagtgcacagtttgtaattagaatgagattagctatatatgctcttcctatgaagtaacataattacrtgcacacatacataacactttatactactatttgtgcttcaaatttaatactacaacttttcttggcctgttttattcaatcattatatctgttacagtgagagtcatacttcttaaaatatcaatatatttgctcatatgttttttcatataatattttacaaaacagctttaaattgcattatcaatattactggtagcaaaaattatgggtaacatttaatattttttattattttgatgtgttgtatagattaattattttgtgtttttttctgttcaatttaacagattttttttctacttgctttaattatattgtttttatatgtaaacctttacttat

SEQ ID NO: 27340 - DNA, 642 bp, Homo sapiens
gttgattacaggtcaaatttgaccactgaaagcccatttattcagaatatttttatcattttgaaattatgctagtagtcccaagaaacttctaaaaacagtatttcccacctggtgcttccccttatcagaacttgaaaagaaattattttcttcaaagaagacttgcatcccactagtgagcatgaacaagggtaatttaaacgtatattctgattactgattactcagtgcacagtttgtaattagaatgagattagctatatatgctcttcctatgaagtaacataattacatgcacacatacataacactttatactactatttgtgcttcaaatttaatactacaacttttcttggcctgttttattcaatcattatatctsttacagtgagagtcatacttcttaaaatatcaatatatttgctcatatgttttttcatataatattttacaaaacagctttaaattgcattatcaatattactggtagcaaaaattatgggtaacatttaatattttttattattttgatgtgttgtatagattaattattttgtgtttttttctgttcaatttaacagattttttttctacttgctttaattatattgtttttatatgtaaacctttacttat

SEQ ID NO: 27341 - DNA, 642 bp, Homo sapiens
gttgattacaggtcaaatttgaccactgaaagcccatttattcagaatatttttatcattttgaaattatgctagtagtcccaagaaacttctaaaaacagtatttcccacctggtgcttccccttatcagaacttgaaaagaaattattttcttcaaagaagacttgcatcccactagtgagcatgaacaagggtaatttaaacgtatattctgattactgattactcagtgcacagtttgtaattagaatgagattagctatatatgctcttcctatgaagtaacataattacatgcacacatacataacactttatactactatttgtgcttcaaatttaatactacaacttttcttggcctgttttattcaatcattatatctgttacagtgagartcatacttcttaaaatatcaatatatttgctcatatgttttttcatataatattttacaaaacagctttaaattgcattatcaatattactggtagcaaaaattatgggtaacatttaatattttttattattttgatgtgttgtatagattaattattttgtgtttttttctgttcaatttaacagattttttttctacttgctttaattatattgtttttatatgtaaacctttacttat

SEQ ID NO: 27342 - DNA, 642 bp, Homo sapiens
gttgattacaggtcaaatttgaccactgaaagcccatttattcagaatatttttatcattttgaaattatgctagtagtcccaagaaacttctaaaaacagtatttcccacctggtgcttccccttatcagaacttgaaaagaaattattttcttcaaagaagacttgcatcccactagtgagcatgaacaagggtaatttaaacgtatattctgattactgattactcagtgcacagtttgtaattagaatgagattagctatatatgctcttcctatgaagtaacataattacatgcacacatacataacactttatactactatttgtgcttcaaatttaatactacaacttttcttggcctgttttattcaatcattatatctgttacagtgagagtcatacttcttaaaatatcaatatatttgctcatatgttttttcatataatattttacaaaacagctttaaattgcattatcaatattactggtarcaaaaattatgggtaacatttaatattttttattattttgatgtgttgtatagattaattattttgtgtttttttctgttcaatttaacagattttttttctacttgctttaattatattgtttttatatgtaaacctttacttat

SEQ ID NO: 27343 - DNA, 642 bp, Homo sapiens
gttgattacaggtcaaatttgaccactgaaagcccatttattcagaatatttttatcattttgaaattatgctagtagtcccaagaaacttctaaaaacagtatttcccacctggtgcttccccttatcagaacttgaaaagaaattattttcttcaaagaagacttgcatcccactagtgagcatgaacaagggtaatttaaacgtatattctgattactgattactcagtgcacagtttgtaattagaatgagattagctatatatgctcttcctatgaagtaacataattacatgcacacatacataacactttatactactatttgtgcttcaaatttaatactacaacttttcttggcctgttttattcaatcattatatctgttacagtgagagtcatacttcttaaaatatcaatatatttgctcatatgttttttcatataatattttacaaaacagctttaaattgcattatcaatattactggtagcaaaaattatgggtaacatttaatattttttattattttgatgtgttgtatagatkaattattttgtgtttttttctgttcaatttaacagattttttttctacttgctttaattatattgtttttatatgtaaacctttacttat

SEQ ID NO: 27344 - DNA, 2221 bp, Homo sapiens
tgtagctagagcattttaaaagagtgcagagcatctttctcaagacgttatktataaaatacaggtaaacactctcatttcagtaaactatcccctaccaacttctatagttttcactccccggatcaaccctttcaaaatccactccaacataatgtgaggcatataatggctttggctgaaaagtttgcagggcttttacttgaagggtagctgatttcttcttcctctattgagggtaaagaagttgtttctgcttttttaaaaggctaaaagaaatttgtatcttcaagattctcaggctcttccacttaattatcactggagattctaaagtcctcagtttgcagccgttccctctccaggagtttgttgaggagagctcctgagattacatattctgtcccatttgtatattttggatacctttaggattacatcttggcttgatttccgggagagtcttccttctgcttacagtaggttgcgtctttttaaatactcccactgaggtatttttactttgacaatatgctttgactttgtactggctaatttgagatttttttttttaatcacggactgcagagtgactctgtccctgtgtgcaattggagtttaattttcctgaagccactattgttttgtgttgatgaaggatccccttgtagagtgagttttagaattatctgagacatgaaagaagggtacaataagtgacaaacttctatttcccattggagtgtcagctcccttacatttccaggttagcccctttctcagattaatctgtgcacaactggttgtctcagcattttcactaaaaatatgggcccggggtatataagacaaagtaatgtgtatatatagcattctctataccaagtgttaaactttagttattatttaaaatattcatagtattataataatgataaatacaaaataaatgaacaacatgatagttcctagccatggggaaaagcatagaaaatcaacaaagaagatgaatattgaggtttacctttttattctgaaataaatgcacttctaaatttggcaatcaaatcactcattgtgatgatatagtatggaaaaacattcaactaatttttcccaacagtttattcttaagtatcttctttacctagtgcaatatacctcaaaggctatttatattttgcaactatcctattgaaatgtatgtgataattcttatttgctggtcacttctctcctaaactttttcctgtaatactgctgaaataatagttttttaaagtttccattttttttcctcctcagtattcaaagatgtaatatttgactaggaaaggaaagaggtttaattgacctcttcccattataaataaacttcagcatggctgggtaggcctcaggaaacttacaatcatggtggaaggggcagcaaatacatacttcttcacatagagacagcaaggagaagtgctgagcaaagggggaaaagccccttataaaaccgtgagatctcatgagaactcaatgactgtgacaagaacagcagcatgggggtaactgctcccatgattaaattacttcctgctggatccctcccatgtcacatggggattttgggaactacaactcaaggtgggatttgtgtggggccacagccaaaccatacatttggcaagttttatttgcagttaagtcctgctgtacgtgactctaccaaatatttcctacactttatttttcctcatggaaatggattacatattcacagtctatttcaggaaaatacactaccttaacttaaatatacctttgaattagatgcctgtattttgctttgactgaagttgcttacttttcaaacacttagttctccataaatattaaaattgataggccatattgaagcatgctgccacctgcacatcacaattcagaccaagtccatagataggtctactttattttaattgttaattaagcatgaaccaatttgaacaaattatacacaaacttctccacataattctatactggtaatacaaaacatgagaagagagaaaaatatattatttaatgtgggcttaatatatgtaggcatttctatttactttatgtaaaaccctgtatcttattcacacagtaatcacttgatattacaagtgctcttcttatgttcatgaagaaaatatggtgttaacaatctcaatagctttcccaggag

SEQ ID NO: 27345 - DNA, 551 bp, Homo sapiens
aagaaaagtaaattaaatgttttaaatagcatgaaagctaggattagtagcatgaattatgtttctaagtattattaaaattattattgtcatttaagcatgatctacgtattacatgtataattaacagaaaaaataaaatgtaaagagctcagttatttttaaatggaaagataactgactgaacaatatgtttctatctcayaagccttgattccagagtaaatttgtgagactattttaaaacaattttatttaaacaatattttagagtaaaaatagtgttttatttaaattactttgattgtttagtagacattttcataatctattatgtgcctgattgaaataatcaagtataattaagacaatgcagtgtattcataaacattttaacagttgtaaaactctgaaagatatattttctttgttaaatgtaggagtacaagaggatcaattatgcaaactatagatttgaatgtaataaatctgatttaatgacaagcaaggtaggaggaagaaaattagtcccttcatttacatgtatatat

SEQ ID NO: 27346 - DNA, 563 bp, Homo sapiens
tggctgttcatagatgttcgaaatgtttaaggctattgtacatggaaattctaacaacaaaatttcaagctgcttttgccggtatacaagaaagctatgatttttgggatctgtgtttttcattaatccatgttattacacatatatttcaataataagcaaytgcatttaaaataatctaagagaaacaaaagcagacagaacaaataaaaatgaattactaacctgatagtcttaaagcaaactatatcaatatttatattaagtgtaaaagaactcaatatgccacttaacaggcaaagattgcaggcctggaaaaaatgtaagactaaactatacagtacttataattgtgctgtaagattttgattttaaatcacaaatgggtaaatgtatgacaagtgacccaagaattcaacatttaaaagaaaatcattgcattattaggaccttcaccataatcaattagcaatttataatagtacatattctactaggtattttggtcttataatttcagggatttttaaaactatagtgaaattaacagttttctttaatgt

SEQ ID NO: 27347 - DNA, 1170 bp, Homo sapiens
gcttgatgcagaggcaaggaacagtgcatttggctggatctctgtaatcgagaaaactgcactggtggtttggaggttttaagttgtttgagcctcaaatgttgatgccaaggggtccatggccatatactcccacaccatatttggagcaaagtgcacagggaccccacagtgcctcaggatgaacattgggatggaatgcaaactgagaggaagggacagttcaaagagatttgaagtgagtagatgggatgtgttagaggtggagaagaagggatgtgacctgtctccaaagtcgtgagcaaggggaatacaggcgcaagtgtttttctagctcccatttccaccgcagtccagtgtttcttgcccacaccctcccaccagaatgtaaccttcacagaaacttgccttcccacctctgcagccatttctcacaacatataatatacatatgtgtatctgtgtgtatttatataaagcaaaataaaatattagttcaaggtgatcatagcataaaacaaagccattttagatgtggtcactatatagagggttaattttaattatttttaattttttaatttcccataccagcattgtaactcgctgctaatacaagcactgcattgtgtgtgtaattcagatagcaacaaattcacagcaaaattatttcaggccacgggcttgtggggttgctcataatagctggcccaactcctgtgayactaggatagccatctccaggcagaatagggagtttgggaatgccagtaacccaaggggataaaacttcacttgcaaagcattccacattttcaaagcttttttaaaaaaaattattttaattatcacaccaaacttgatagggcaaatttattcctactgggtatacaagcaaagtaaaatgaagcccagtcatgagcctcctgtgggaacagtcaacttaaatacactggcagagccagtaaaaccctgtacacccggccttgttcaccctcccccagcagcctctggggtaggcccaggcccctcccgcccatgtcttttcctggcctctggcctatggcccatgggtgaggcccaggacccccacccatgtcttctcccagcccctaggtgaggcccaggacccttccacccatgtcttctcctagcctctgggtgaagcct

SEQ ID NO: 27348 - DNA, 711 bp, Homo sapiens
ggtggcacgtgcctgtagttttaaacaattatcatatgacccagatagtgtattccttagtgatacaaccaagggaaatgaaaatatacatccacactaaaatttgtacacaaatgttcacagcagcattgtgcataatagccaaaaattggaaaaaaagctcaagtgcttatcaacagaggaactgataaaatatggtacatccattcaaamgattactcagcattaaaaaaatgaagtgctgatatacgctacagcatggataaaccttgaaaacactgtgccaagtgaaataagtcaatcacaaaagaccatatgtagtaagatttcattctgtgaaacctccagaagagctaaactcagagacagaaagtaggctagttattgccagggactaggggaaaagggaacaaggatgactgctaatgggtatgaggtttcttgtggactgatgaaaatggtctgaaagtatctagatacctgtcttgtttgtgtgattctgtgaacatattataaaccacaaaattctgcactcaaggggttgatttcatggtaggtgaatttagctcatttatctttatctcaataaagcttttaaagacactttaaaaagacatatctgtataagctacaaaaataacacactgagagactaaaatgcttaatttttccatttttcttcttcagcacaatctcaagtccaaaagtctt

SEQ ID NO: 27349 - DNA, 345 bp, Homo sapiens
aatatctccagtcacctccactattgatctagtgaaaacaggcgcaggaacagtgctctaaacgacattcgatgtccttcaatatctttgtcagtctgaattcaaaggaaatattttaactcaagtaaaaagaagactacaaaagaaagataacccatatggggatagcagamttttttgtttttgttgttgttttaaaatctcttgtttttggccacaggcactctgagctagaagaaaatatttaggagaaggatgagaaatccttctgtgttgaataagggaattacttccagatggcaatggtgtaaatctactatgataacaactatatatatatatata

SEQ ID NO: 27350 - DNA, 557 bp, Homo sapiens
cccctggacaaataagtttgaggactgtcattgcaggacttctcagaacctttaaaacacaaatcctcatccgcagggatcttcaggagggagacggctgatgcagcacaactttctttcacaggagcatcttgcagaatacagtatgagatacagaaaggctgcactgagtctttttaagggtctgggccttggtgggggtggggtaggagctctccagatagcatctaatgagtaggaacattcaggttgctttttttttcccttattggcaaaactgtgtgtgcaccatgaatgaagctggtctcccttatccacatcaaaactaaacccaaattaattggctaaattgggactcaacaccaccaggagccacgyggaagacagccctaccacactttaaagtagcttacctcatcatgtttgaggaaagcaaaacgcttatgaccagtatgctgctaatacaagtctacagataatgctgtaggaaaaattatttttcccaatcatagctggcatagtccacattttgcattacaatttccccttttttaaaa

SEQ ID NO: 27351 - DNA, 644 bp, Homo sapiens
tcaaaaacaaaaccaaaaaaagcaagccaggcacggctcacaccagtaatcccaacactttgggaggccaagtcggaaggattgcctgagcccccagagtttgagaccagcatggacaacatggtgacacccgtctttataaaaattttttaaaaaataaaaggtaatacatcaagactgtgtacagtggctcatgcctgtaatctcagcactttgggaggccaaggcgagarttgcttgagatcaggaatttgagaccaccctgggcaacataacaagaccccaactctacaaaaaaaaaattttaatgagcagggggcatttgttgagctggcctattgtcccagctacttggaggctgacagttcaagtgccagggtccgagccaaaagatgtggggtgtaacctatggtgaacgggttgtggtctgtatcacaccagagttcatagcctaagtaaaggggagaggaggcagcgactgtgctgccggggtgggaaccaaacttccctttcagtctcttccactgacctgacacttcccttgtagggcctcaggatcctcatctttctaatgaagaggatcgtttccaaaggatggcaaacttcagtaccttctaatcagttatctaaatttttttttttga

SEQ ID NO: 27352 - DNA, 644 bp, Homo sapiens
tcaaaaacaaaaccaaaaaaagcaagccaggcacggctcacaccagtaatcccaacactttgggaggccaagtcggaaggattgcctgagcccccagagtttgagaccagcatggacaacatggtgacacccgtctttataaaaattttttaaaaaataaaaggtaatacatcaagactgtgtacagtggctcatgcctgtaatctcagcactttgggaggccaaggcgagaattgcttgagatcaggaatttgagaccaccctgggcaacataacaagaccccaactctacaaaaaaaaaattttaatgagcagggggcatttgttgagctggcctattgtcccagctacttggaggctgacagttcaagtgccagggtccgagccaamagatgtggggtgtaacctatggtgaacgggttgtggtctgtatcacaccagagttcatagcctaagtaaaggggagaggaggcagcgactgtgctgccggggtgggaaccaaacttccctttcagtctcttccactgacctgacacttcccttgtagggcctcaggatcctcatctttctaatgaagaggatcgtttccaaaggatggcaaacttcagtaccttctaatcagttatctaaatttttttttttga

SEQ ID NO: 27353 - DNA, 1126 bp, Homo sapiens
aggttgcatattccttatgagaatctaattcctgatgatttgtggtggaacagtttcatcccaagaccattaccatcctgcgccccatcccttgccgcctgtggaaaaattgtcttccacaaagccggtccctggcgccaaaaatgttggggactgctgtgctttagaatctgccatgaatctgcagcctctattatatagctccctatagactttgcttcctaccgtcttacgttctgccttataggcatttgagtttgcaacccttgtttttgttagtatgctacgctggtgacattgaccaaattgaccacacattaatgataagcttagttggtgatgacctcaatggaataatgtgacataagtattgtgacaatacttcttgcatgtatctgcaggtggaattgtaaacctggtkgtccgagatggtctaattcgatcttcctatgtatctccttatattaatagtggtaacatttgtggtggtgattcagcgtttcaatgcctcttctcatggcaacaacaaatgttttccttctgaatcaacattaacctagatgttactgcggatcaaaattagactgtacattttcaaccacagaaatattgggcagtaaaaatttttcttaatattgattgcctacataggttgtgtaattagcatatgtttatagttctatgatttgtgcgtggctgctacagagccagagggggtaaagcaacagtgttttctcagttgtgcgagcagcattacattataataaataggtaatattaaactgggctgatgagagttgcaaaagactactttaatgttcatatggaaccaaaaaagagcccacattgccaagacaatcctaagcccaaagaacaaagctggaggcatcatgctacctgacttcaaactatactacaaggctacagtaaccaaaacagcatggtactggtaccaaaacagacatatagaccaatggaacagaacagagccctcagaaataataccacacatctacaactatctgatctttgacaaacctgacaaaaacaagaaatggggaaaggattccctatttaataaatggtgctgggaaaactggctagccatatgtagaaagctgaaact

SEQ ID NO: 27354 - DNA, 568 bp, Homo sapiens
ttttttttttttttgagacagggtcttgctatgttgtccagactggagtgcagtggcatgatcacagctcactgtagcctccacctcccaggctcaagcaatcctcccacctcagcctcctgagtaactatgactacagrcacaccaccacacctggctaatttttgtattttttatagagatgaggttttgccctgttgcccaggctggtctcttaactcctggactcaagcaatctgcctgcctcggcctcccaaagtgctgggattacaggcttgagccacggcacctgtctatgttctcttttcactgtaggatcagagggtcatattgatggatgatagtgatggttactttgcattttggaatggtaaacttaaacatgaactgttatacagtactctactgaatcttttaaaattcttttggtgtttttgcaaataggtatgagcattctccagggaaaggatgacatatttttggacctgaaacagaaattctggaacacctatatggtaagacaggcgtttgataaagttatcagtatctttttgtgtgtgtatataca

SEQ ID NO: 27355 - DNA, 568 bp, Homo sapiens
ttttttttttttttgagacagggtcttgctatgttgtccagactggagtgcagtggcatgatcacagctcactgtagcctccacctcccaggctcaagcaatcctcccacctcagcctcctgagtaactatgactacagacacaccaccacacctggctaatttttgtattttttatagagatgaggttttgccctgttgcccaggctggtctcttaactcctggactcaagcaatctgcctgcctcggcctcccaaagtgctgggattacaggcttgagccacggcacctgtctatgttctcttttcactgtmggatcagagggtcatattgatggatgatagtgatggttactttgcattttggaatggtaaacttaaacatgaactgttatacagtactctactgaatcttttaaaattcttttggtgtttttgcaaataggtatgagcattctccagggaaaggatgacatatttttggacctgaaacagaaattctggaacacctatatggtaagacaggcgtttgataaagttatcagtatctttttgtgtgtgtatataca

SEQ ID NO: 27356 - DNA, 633 bp, Homo sapiens
ctacagtggtcagtgacatggagatgcaaggtgtctgccaggccagtgtggaatagagggctctggggaagaggatgtagacctccctagtacccccacctgtcacagatgacactgaaatccttaratcctgtcttcgtggctttggtctttggtataacctctgaaatccttctgaggggcgaactgcacatctctacgcacataacaactcttcccaaacctctgcactcagggactcgaccaatctctagcattgcttctagcagcttaaggctgtgtccctagaatgaccccagtatccttaacataactgcctgggaaggctcaaccctgccaggacaatttactctgctccagccaaaacctggagacaagcagccaggtccccgaacccaactagagcagttactttagaagcctgcaatgataaacactttctctgccctttgggatgtgaatctaccacccaaccccatttccttgaggacctgagagccttctctttgcaatgcaaacattcagggagctcactcctgatcttcccagtccctgtcgaaagagtagagcctgacttcagtgggttcttcctgcggtctaatgcatggcttcctgtcctaaagataagaggag

SEQ ID NO: 27357 - DNA, 1347 bp, Homo sapiens
ttaatgtataaaattgtttctcacacctgcttgaatacattattttaagtgttttgtttttttcaaccttgattgatgaaaaataattccttgctaaggatggtctgcagttttcttgttatgagggaggttgagtggatgttcgtatgtttagaagccacttgtgttttcttttccgtgaactatctgtttctatctgttacccagttttcmattaggttattcttttcttattaattttaggagctcttcagacatcaaggaatttaaccttttgatacatatgttgttgactttttccagtttagggagtccatgtgccattacatagtatgggctcaggaatggttgctgagaaataacagtgacgtttattaggtattcactcttactttatggggcttattttatttaatccttatgacaacctaggaggaagttctttattatctgtgttgtgaggatgaaaaactgaaataatgaataacccacagtgcacaaatacactctatatggaacgttctgtcctctttgtcaagaggccagtgtgaataagttaagagcctgcattgtgtaatgtttctaactaaatattttagtgataactcctgtgtgtaatcttccctgtaatttttttctattgataacctcatctgattggtttattttaggcaccaaatatgtcataaacttaagaataaatgagctaacatcacaagtaacatttcacaagcatttacaaagctcttctgggtgcagaccactttgagctggaattatgaaaaacatggtccttgcctcttaaagcctcaggttgtggcctcatgggatttctgggaaggggagggagggtaagaccagtggtcaaagaaaaggaagaaaatggttctagtatattaaaaaaaaaaatatttagattgcttgagtgccctgaagtggccaaacctgtaggtttcagtacaaagagaagccctcatcaagcaactgtcatggcactttttcatcctggcttctaaaaatggaagggagggcattttccagagaaaggttgtgtccgcctataaaccacagaggtaattaaatgccaaccccgaagtcctccaggcgcttgcatcgtggtggggtaagcaaggggcttcatgtgaactgtgggaagtggccagtcccttaccgaacataacaatgtcccccttcaggaaggcaccaccgaacacaaagcggacttcatcagcgtggtcggctttgacaaaagctggcttcgtgtcttcaaagcactgaggccggtgccgaaactcatagaagtagacaggtgcaccagcatctgacaaaaggtcagggaaggtcagg

SEQ ID NO: 27358 - DNA, 764 bp, Homo sapiens
caaaagctataaactagaatttttatagcagcactatttgtaatagctaaaaattgacaacccaaatgtccattattagtagaatgaatggatctactatgagatattccccaaatcaaatactatacaacaatgatgctgagcagttcattacatgcaacattatggataaatctgaccaacactatgtggcacaaaagaagacacacataaaagaatatatactgtatgattacctttatataaagtttgaagatatgcaaagttaacctatgtgattagacatcagcattatggtttttcttgtgggagagtagtgaccgagaaaagagtacatggaagtttctgaggtgctggtaatgttccgttttggatctgggtgctggttacatgattgtgttcagttgygaaaatgtatcaagctctatcctaatgatatgtgcatatttgaatatatgtgaaaagtatatacttcaataaaaagtataaaaagtttatagtttccttaaaaagtataaataagataaagagtgctgttgtagttatagtttcttaaaaacttcatgcttgggctgggcatggtggttcacgcctgtattcccagcactttgggaggctgaggctggaggatcgcttgagcccaggagttcgagaactgcttgtgcaagatggtgaaaccctgtctcaacaaaaaatacaaaaatcagccaggcatggtgtctcatgcctgtagtcccagctacttgggaggctgaggttggggg

SEQ ID NO: 27359 - DNA, 1095 bp, Homo sapiens
aaagatgtaagccaatattaaagcacagcaagcagatgggattcgtggtctgcagctatttaccgtgagcctctgcacagcataccctggctgatacagacagcagagctgtgggcaggatgatgagatgtggcccctactctcactgagtttatatgggagggacagggggcatgatggggaagataagtagccaaaataaaccaaaaagttgctatgcagaaatttaaactggcaaccacggctgtgaactttaggttggtcagggagagcctccctgataccaagtggctggtactgaggctgagatgggaaaggtaacgagcagccagttacggaaagacaaggggacagcactctggcacaatggacagcaggacagggcccccaggtgggatggactaagagggcaccaaaggcaccagcacagcccaagcagcggagtctaagaccaggcctgagtgtacccgtctccatgggccagctacagagcagagagtccgaagcctggaggagattcaagatggacctaaaggaccaagccctcagaaggtcaggatgcagagcccaggtgccagcaaaggccccactgcctcctgctgagacgccaggccctcggcctgcatgcagcctggaaggggagaaggtcccaggggcaaggtgggaggggttttggtgagcaacattaggaagggcttgggtgagcgacatccatggcatgccagctgtgtgagggcaacacagtggaaaagggaagggaagagggagcccagcacggaagatcacaggagccagggatcagaaaggaagcccaggatgccctgctccacagaaacaccgagtaaggacacatcgagaaagcacagggtggatggcgacaaggagtggaacaagagcgaagaagcamctgcactagggtggtgagctggggatcaaggtaggcagagcccatgtactaagagagctaaggtctctgggaggctgggccaagcaagacagacactcccacccacaggaagatgggaccggtaacaaagtatccaagactcaagagaaaaccccccgccacgctaaggccgacctcagtctatatcc

SEQ ID NO: 27360 - DNA, 560 bp, Homo sapiens
gtggcaagtaatgcaataaaagctaattaatttagcatcctattgattagaaagcagggatacaatacaatgagaactgatgaccacaaacatgactcaaacgcggccagatatcctaaagaagtttatgactcatcatcaaaacacaattatattccaaagaggccaagcattaaatgtattttattgagttaagtttatctgacactgttcagccacaaatggtcatgtgaaatcsatagaaccagaatacctgattagccacaataacacattctcagaccacgctggcttttctgccattggatctagacaaacatgaccctctgcagcatacatatttactgcatcacttgaagattgtggagaagatagacttagagctgaactggaaagtatatgacagaaaaatgtctggagacagttatttcataatatatcatttctaagaagaaattaagcactataatttgcgagcctgcagtgatgcctcaatgcattgagtaaggtctctggcatcaattatgtttaagtaataacatatgtaaagggcctgtgtc

SEQ ID NO: 27361 - DNA, 560 bp, Homo sapiens
gtggcaagtaatgcaataaaagctaattaatttagcatcctattgattagaaagcagggatacaatacaatgagaactgatgaccacaaacatgactcaaacgcggccagatatcctaaagaagtttatgactcatcatcaaaacacaattatattccaaagaggccaagcattaaatgtattttattgagttaagtttatctgacactgttcagccacaaatggtcatgtgaaatcgatagaaccagaatacctgattagccasaataacacattctcagaccacgctggcttttctgccattggatctagacaaacatgaccctctgcagcatacatatttactgcatcacttgaagattgtggagaagatagacttagagctgaactggaaagtatatgacagaaaaatgtctggagacagttatttcataatatatcatttctaagaagaaattaagcactataatttgcgagcctgcagtgatgcctcaatgcattgagtaaggtctctggcatcaattatgtttaagtaataacatatgtaaagggcctgtgtc

SEQ ID NO: 27362 - DNA, 560 bp, Homo sapiens
gtggcaagtaatgcaataaaagctaattaatttagcatcctattgattagaaagcagggatacaatacaatgagaactgatgaccacaaacatgactcaaacgcggccagatatcctaaagaagtttatgactcatcatcaaaacacaattatattccaaagaggccaagcattaaatgtattttattgagttaagtttatctgacactgttcagccacaaatggtcatgtgaaatcgatagaaccagaatacctgattagccacaataacacattctcagaccacgctggcttttctrccattggatctagacaaacatgaccctctgcagcatacatatttactgcatcacttgaagattgtggagaagatagacttagagctgaactggaaagtatatgacagaaaaatgtctggagacagttatttcataatatatcatttctaagaagaaattaagcactataatttgcgagcctgcagtgatgcctcaatgcattgagtaaggtctctggcatcaattatgtttaagtaataacatatgtaaagggcctgtgtc

SEQ ID NO: 27363 - DNA, 1034 bp, Homo sapiens
ggtcactgcaaagtgaaaggaggcaattcttctgtaactaaagaatcaaaggaagaaaaaaatcctaaataaaatatcactttgttatattttaaccatggtagcttccataaaaaaaaaaaaagaagaagactgatgaaacaccagttatttcttacaatctttatctgcccccctagtattgaaaggctgagttccaggagacccatacaagtttacttgtaccttttttttattttccattagatgagaaatagggccataaataggataattacagctaatctcctttctggtggcctatgaagtaaccttgtcttctgtattttttgagatagagagcatgacaaaaacagtggttgaaagttttacctgttgacatagcatcaaatatagacgagcctgcttggaagactctaacatagagtacacggtgggtagtgttctacacactggcytctaaagagtgactgacagacttggctctatcttttaaataaagtttagaccagcacaattaaacaagagtaaatgaaaatatgaataattaattgacacagtcaaggtgcaccatcataatagaaaggtgattcaagttattcctgtgaagcaaaataagaaaataagtgtgggcttaaaaaaaagtcacagtgtatatactactaaaatttttttatttggacaaatggctttaatattttttaaaggtttttgtgtacgattggaagatttcttatctaaaaagacttaatatagggaattcaatcatagaaggcaaaagtcagttaatgggatatatacagctagtcaagaaatagaaaaacagatataaaatgaacaccctatttgcttcatggaagatgcagaaagattacataatagaagaaatggcagagaaaaggcaaagtggtagtgaatcccaggtgaatgatatggaatgggttaggtacaagtgtaattaattaagagggtttctcaggaagttttatattcatcacagatggtcaaggtgctaggacagacactgcttgagg

SEQ ID NO: 27364 - DNA, 836 bp, Homo sapiens
tggagactgtgcagccgccccctaggctggcttgctcctcctccctgtaattttttttttctctgtcttctaataaggttttgccaattggcaagttatttaaactccttcagtcttagttttcttacctgtaaaataggagtaataccattgttaggaggattaactaaacacatagtcatcccttgataaatgttagctattactattcatttaggaaaataggactggcaatactatataaaattaatgaggatggagagaacaggataaagagagaaagaaatcaagacaggaacaattgaggtaaactaaggaatgaggtaataagattttggattcaaggccaaggacggtggctcacgcctgtcatcttagcactttgggaggctgaagcattgcagatcgcttgagctcacgagttcaagaccagcctggttaacagggcttaaaccccatctctacaaaaaaatagccaagcgtggtggtgcacgcctgtagtcccaactgctcgggaggctgargtggcaggatagcttgagtccaagaggtggaagttgtagtgagccaagatcacgccactgcactctagcctgggcagtagagccatatgttgtctcaaaaaatatataaataaattttggattgaggtagtgtcaatggaacggagagaaaagggtgaaattaatgcaggatattttaaaggtgttcattgtagaaatgtaatgacatgggatatagggagtaagccagtgggaaagagggaagacttaaatgttttaaatttgggatacaggaaaaagtgtgattgttaatgggagggcttatgtgtagaa

SEQ ID NO: 27365 - DNA, 735 bp, Homo sapiens
  misc_feature (1)...(735): n = A,T,C or G
cctagctctgccacctggttcctccagactccagcctgtgctgcagtcttcctgggaaagcaggctggttttcctgcagttsctctgctgcccccactctgctttaccctccctccctcattgtttgtcattggccagccttgtttgcagcacaaggacatgaagaagacattcctcccattctccagtgattgtcactaattgaaatgggaagcaagacaaggctccagaagaaaagcttattattggctgccttgttggaagaaaatgaatcaccctaagcagataggtttctgtgatctcaggcaaacctcactctttattctacacaaccccgtctaattgttcaagaaaatgttcatctgcttcataatggaacagccataatggaagtgttgtgaaatcactgaaaagtttattcaagactcccttctgaaagcccagtcataaagcacgggcttcggaggagttaatagaattggttctcactgaaatggcatggataacaaatttcctgaacatgtatccttttaaatgtgcctgttggtgggagtctgaattggcatttgacagatgcaaagcactaacaaaaggnggtgaatttcccagctctggcgttaggccctcccctgtggctgtgtcatcagagtccctgcccagcctctcacaactgaatggngactagaaacctccaagattctcatgaaaccaagtcttgcaaacagggaatattca

SEQ ID NO: 27366 - DNA, 810 bp, Homo sapiens
ctgtttctgaccggtaagaccttactgagcattagtaagatttaaaagctccctgggtgattctaatgtgcagcctgggctgaatatcacagctgtaaacttccgtctcctcgtctgtgaaatagagatttagaaaacagccactatgtcatggggtattttgcaaaattcagtaaaattatgcatgataagcacttaacacagaccctgacctggaggaaacattcaataactcttccgtattattattctcttagagcctcaaattatatatttagtctcaggcggcgccctcccgtaatatctgttactccacaggtcagcagatgatttctggagagggccagatggtaaatattctttgccttgtgagtcgtaagaattctgttgcatcccctcacctctgctgttgcagtgtgaaagcagccgtagacagtatgtaaaccaatgacactgtctgtgttccactgaaacgtcatttatggacactgaaatttgcattttatataatttgcaccttttcaccaagtattccccttttgatttttttttcagccattttaaaatataaaaaccattcatggcttagactgtccaaaacaaagcagcagacaggattgggcccactggctgtagtttgctggttcttgttttactcttctctcttactatttttttcatgtgataaagcagatggcaaggttcctggaatttttgtatgttcctttgttagtttagggttctctctaaattgtctcaatctctctctccccctccttttctctctctttctttctctctctctstctg

SEQ ID NO: 27367 - DNA, 633 bp, Homo sapiens
ctggagggctcttcccattgctctgggtctctggggggtgtatttgcaagtcccatctcctcaaattttacctacagacactttttttctttcgagatggggtttcattctgtcacccaagctatagtgcattggcatgattttggctcactacaacctccacatcctgggatcaagccatcctcccatctcaacctcctgagtagctgggattacatgcagccaccacgcctggctaattttatgtattttttatagagacaggatttcgccatgttatccaggctggtctcaagctcctgggstcaagcaatctgcccctgcctcagcctcccaaagtgctgggattacaggtgtgagccaccacgcccggcccctacagacattttaatatcattgtctatatttaaaaaaaaaatcagatgtttaacttttcttaaaaccaaaagaactgggaaatttggtcccacgggtcttcatggaggtaaggagcagcttctccccttacactgaccaggtgttctccagtttgccacagtcctccccatcccctgtcatattccaccctggcccatgtcatgcacttttcttgcccacctggcaccttcacgaaggtgagtccgtgagaccttt

SEQ ID NO: 27368 - DNA, 1311 bp, Homo sapiens
gatttaggggtatccttctcccattggtttaagattttggtcctgtggagaagaagggtcttggctagactttgtgaatttcccaaatggaagtctctcccctcatccaggatcctttctctagtctctctctctgcctctccaatctttctcctgagaacctgatagaagtctgtggtaaagagcctgcaagacggtacaaattcccttttgtatctctggctcccaagagccttagaaatgcttgtggtagccatcttgctcataagtaccactccaaacatgaaattgtgaagttatcttcttgatacaggtagaaaataaaatgattacacttacctagattttatcattaacgtatagtatatttcaagattttaccagagttgtatcttaaacttgagcttccttgggtctaaataccaaccaaatatgaaaatactggataatgctaggatgaatttgaagaatctagtaacctactctaaacatatatttcaacagtcaagcgttttaaaataattgatgtggtgttataactacctagactactcatataaaaagtacttctgccaatcggtattaacttgtaaattacgccaaaacaaggcaactagttcaggaataccaaccttttcttaaacaggtttgttgtagattctccatgttccaggtctacagtgttttatagatgaaatccctgttaccgtatatgcatgcctgataagtttaaaatgggagtcaagaaactccatatgattctactacccaaaactagtgtgaaattccatccctgatgtgagagctaaaatatttatatttgaggtttttattagtgttgaaagttttattaaaattagtgttataaaatttactactcattaattgatttgatctgaggttagccttgcacttatttcatagtgaatacctttacttttcatttagtgcattgactaagcwtgcacagattggcaagcaccaggttttgctggtaagtgaaaggatgggtgtaataactggaaaatacttgttggagaaaacttgaatcaatgaaaggaaaaaatgcaatctgatagattctgaatatagaaaaaattggacaaaaattcatagaaaaaaatgagaatctgattgagaagaagagctcatcacagaaaagccagcttgattagaacaggaaatataatccatgtacttcaattcaggaagatggggcaaattgataggttacataatgtgggtttaaaaaattatgtttattagtttgcttgagttgtcctaaaaaatgctgtagactgcatggcttaa

SEQ ID NO: 27369 - DNA, 529 bp, Homo sapiens
tacacatataaaaaaccatttggtcttccattaaggctgttacagtttaaagttacgkaaaccacgtacaaagaaacagttaaacgtacaaaaaggggagtggggagatgtgaggccgcaggtggagatgtggtgctccccacaggtgcgtccatgatttgggggctgcgtgcgagggggcctggctccagccggcctctccctgccttgactctgcacttggggccggtgcccacctcacgtcactcttgagcttttgattctggatccttctctgagggccgaacactagctctgcagctctggcgcccagctccagtgcaggggccgtcctcggacatgcagactttgtcagctgtggctctcagccattggtctggcccgaggcggggggcaggcagtacgttgggggatccgagtacctccgcttggccccaggtggctggccatcctcttctaggggctccagggcgccctgcactggcaggtctgccccgggcgtgatgtacacggaatgtatctggtccgg

SEQ ID NO: 27370 - DNA, 515 bp, Homo sapiens
ctgtcctccatgaataacggcgccaggaaccttgggygatcttgagaaaactccttcctgtaacctctgttttccacgttggatgtgttttaggccacagtcaggcctggcttttttttttttttttttttaagacttattccatgaccttaagccccagtctgaatctctgagccttaattattctatctataaatgggaagcatttggaaatgggacggagagaagtgtacactttgcccctggccgccttcttccctcctggtgtcctgggtggacacggaggtgtgtctggggaaggtgtgtcctttagggccggtcgcctgggaaggatgttgagcggagggcagtgggtgtgggtgagaatccctgggcagagaagggcgccgccatgctgggcacggctgagtcacgctccagcgacgccttgccccagggtgctggagctggcgccaccctgggtgtggtcactgagctgtggccctgggcagagcagggctgggtggtctaggatg

SEQ ID NO: 27371 - DNA, 515 bp, Homo sapiens
ctgtcctccatgaataacggcgccaggaaccttgggcgatcttgagaaaactccttcctgtaacctctgttttccaygttggatgtgttttaggccacagtcaggcctggcttttttttttttttttttttaagacttattccatgaccttaagccccagtctgaatctctgagccttaattattctatctataaatgggaagcatttggaaatgggacggagagaagtgtacactttgcccctggccgccttcttccctcctggtgtcctgggtggacacggaggtgtgtctggggaaggtgtgtcctttagggccggtcgcctgggaaggatgttgagcggagggcagtgggtgtgggtgagaatccctgggcagagaagggcgccgccatgctgggcacggctgagtcacgctccagcgacgccttgccccagggtgctggagctggcgccaccctgggtgtggtcactgagctgtggccctgggcagagcagggctgggtggtctaggatg

SEQ ID NO: 27372 - DNA, 515 bp, Homo sapiens
ctgtcctccatgaataacggcgccaggaaccttgggcgatcttgagaaaactccttcctgtaacctctgttttccacgttggatgtgttttaggccacagtcaggcctggcttttttttttttttttttttaagacttattccatgaccttaagccccagtctgaatctctgagccttaattattctatctataaatgggaagcatttggaaatgggacggagagaagtgtacacttygcccctggccgccttcttccctcctggtgtcctgggtggacacggaggtgtgtctggggaaggtgtgtcctttagggccggtcgcctgggaaggatgttgagcggagggcagtgggtgtgggtgagaatccctgggcagagaagggcgccgccatgctgggcacggctgagtcacgctccagcgacgccttgccccagggtgctggagctggcgccaccctgggtgtggtcactgagctgtggccctgggcagagcagggctgggtggtctaggatg

SEQ ID NO: 27373 - DNA, 781 bp, Homo sapiens
atttccctgaaaaaagcaagtacaaatgctaackaatacatgtgagaagaataatgagtttggaaaattatcatctgaagattgctgttcaacttttggagagtgatattcagatgctttgaagacttccaatattcaaacatcgttgtaatgcctgattcagccaaggccgggcatggtggctcacacctgtaatcctagcactttgggaggctgaagtgggcagatcatgaggccaggagtttgagagcagcctgactaacatggtgaaaccccgtctctactaaaaatacaaaaattagctgggcatggtggcacataatcccagctactcgggaggctgaggcaggagaatcgcttgactccgcaaggtagaggttgcagtgagccgagatcacactgctgtactccaggctgaatgacagagcaaggctccatctcgaaaaaaaaataaaaaaaaattgattcagccaagagaatcatcagtggaggccaaagcagcatgtgaaagtttgaggagaaaaaagataactacatagcatcaggctaagtgtggtggctcatgcctgtaatccaagcactttgggtagttgataccttgatcttggacttccagcctccagaactgtgaagaaatagacttctgttgttggccaggtgcagtggctcccacctgtaatcccagcactttgggaggctgaggcaggaggatggcttgagcccaggagtttaagaccagcctgggcaacacaatgagacccccatctctattaaaaaaaaa

SEQ ID NO: 27374 - DNA, 606 bp, Homo sapiens
ccaaagtcagtaggactccagaattcccaagctttgggcatcatcacgttaagctagccattcacatgtccacatactgcctactgtagctaaaaggatgggcagattcatttgtttggtgacatgcaaagagaaaaagatggtactcttttagaagtaggtcatgaatcacaagtttttaaggagagaatagcgtggagtggtcaaaaggtatgacctttggagctgggcagacctaggttcaaaccctggctcctctacttcatagctgtgtgactttggattagttacttagcctctctgtgcctccatgttgtcatttataaaatggtagttataatgytcatgtcatagaaatgttagaattatatgaactaaggcaagtgaagtatctggcacatagtaggtgctcaaaaagatggtaaggttttttcatacaccaatgcttccatattccagaaaagcttttgaagagttgataccaaataaattatctaaatataagacaatcttcacacaagcatgcaagaacattttccccttcagaactaggacaaaagaaaaaagcaaaaacccttgcccttaacttctagtggcaaataaaca

SEQ ID NO: 27375 - DNA, 461 bp, Homo sapiens
tgaatgtgcagatggttgcacaatatgaatacaatcaaagatggttaaaatagtaatacatttatgttatgtatgttttaccataattataaayaaatgaaaaaatgaatgaatgagtcactcctaaaaattagtaagaaaataaaaccaaataatgaagtagaaaagatgaaacataaaaaggaagcacaaacaggaaatatagtttctttttttttttttttttttttgagacagagtcttgctctgttgcccaggctggagtgcagtggtgtgatcttggctcactgcaacctctgcctcctgggttcaagcgattctccatcctcagcctcatgagtagctgggattacaggtgactgccaccacacccggctaattttttgtgtgtttgttttagtagagatgttgtttcactgtgttgattaggctggtcaccatgttgaccagaccactcctga

SEQ ID NO: 27376 - DNA, 1224 bp, Homo sapiens
gggaagtagaaatgcaagaagagagtcagaaaaagagatctcctaggagactgttaatttactagcctggttggaaatacaacgcatggaaacaggtgaggcagacagagtcatccaattgcagggtcggaacttggaaggcctgaggcatgaagggaacagggtgggggtgcagtcctcactatcgggagggctgagggccacaccacagtgcaggaccgagaggctggggccaaaggagctactgggtcccaagttctgtcctggaacagtaataagccgtcctgcacctgtccttggctccaaggctaaactggaaagcccagtttcccatcatgcctttccaagtggttgcagtcacaggaggtcctgttataaatccaactcccaagtttcagacatgggaaactgcaatgtaagatgcgtctttagagctcaacaaatggacttgccttgaggggctggtgaaggtgacacccatccacccgacttccttgcccttcgtgggaagagcagttcaaatgttgggctcagtgtgagcaaagcaaacagcacaggttgagaaaagaagtgaactgttgggactcaggaacccgtgtgtgtgtgtgtgtctgtgtgcacgccaagtggagagggcagcctacagtgggctttgcaagtttggaatttatcctgaggacaataggaagccatggaagggtattaagctacagaacaaagtgatcagaattatgctgagtctaggaagtgctgttgcttggctggttaatttgatcatatcaacaagagaatcagtacggggtcaaattggttgcattcytatttgttactgagacaaaaaaatacagattttgaggaatgtgatagtggctagtcccctaagtccaatgactaggttggcgtctgtcatcctcccttaaacaaaaattcttcacttaactctaagcaggaaatgaaaacgtatgttcttggggtgacttcatcttttggaattttctcatatatttttccaaaattccaaagcaattgttacaaaaaggacacaaatattaatggcttaaaaatttgtctgtaaatttgcttatttttctgaaaaaaaaaaaaaaaaaaacaacaacaaaaacaaaacaaggaaattaaactagaaatgaatgaaattggttatttatagggatcagtgagaaccaaatgcaagtcatagggaagaagatggaatttctctgg

SEQ ID NO: 27377 - DNA, 1224 bp, Homo sapiens
gggaagtagaaatgcaagaagagagtcagaaaaagagatctcctaggagactgttaatttactagcctggttggaaatacaacgcatggaaacaggtgaggcagacagagtcatccaattgcagggtcggaacttggaaggcctgaggcatgaagggaacagggtgggggtgcagtcctcactatcgggagggctgagggccacaccacagtgcaggaccgagaggctggggccaaaggagctactgggtcccaagttctgtcctggaacagtaataagccgtcctgcacctgtccttggctccaaggctaaactggaaagcccagtttcccatcatgcctttccaagtggttgcagtcacaggaggtcctgttataaatccaactcccaagtttcagacatgggaaactgcaatgtaagatgcgtctttagagctcaacaaatggacttgccttgaggggctggtgaaggtgacacccatccacccgacttccttgcccttcgtgggaagagcagttcaaatgttgggctcagtgtgagcaaagcaaacagcacaggttgagaaaagaagtgaactgttgggactcaggaacccgtgtgtgtgtgtgtgtctgtgtgcacgccaagtggagagggcagcctacagtgggctttgcaagtttggaatttatcctgaggacaataggaagccatggaagggtattaagctacagaacaaagtgatcagaattatgctgagtctaggaagtgctgttgcttggctggttaatttgatcatatcaacaagagaatcagtacggggtcaaattggttgcattcctatttgttactgagacaaaaaaatacagattttgaggaatgtgatagtggctagtcccctaagtccaatgactaggttggcgtctgtcatcctcccttaaacaaaaattcttcacttaactctaagcaggaaatgaaaacgtatgttcttggggtgacttcatcttttggaattttctcatatatttttccaaaattccaaagcaattgttacaaaaaggacacaaatattaatggcttaaaaatttgtctgtaaatttgcttatttttctgaaaaaaaaaaaaaaaaaaacaamaacaaaaacaaaacaaggaaattaaactagaaatgaatgaaattggttatttatagggatcagtgagaaccaaatgcaagtcatagggaagaagatggaatttctctgg

SEQ ID NO: 27378 - DNA, 1224 bp, Homo sapiens
gggaagtagaaatgcaagaagagagtcagaaaaagagatctcctaggagactgttaatttactagcctggttggaaatacaacgcatggaaacaggtgaggcagacagagtcatccaattgcagggtcggaacttggaaggcctgaggcatgaagggaacagggtgggggtgcagtcctcactatcgggagggctgagggccacaccacagtgcaggaccgagaggctggggccaaaggagctactgggtcccaagttctgtcctggaacagtaataagccgtcctgcacctgtccttggctccaaggctaaactggaaagcccagtttcccatcatgcctttccaagtggttgcagtcacaggaggtcctgttataaatccaactcccaagtttcagacatgggaaactgcaatgtaagatgcgtctttagagctcaacaaatggacttgccttgaggggctggtgaaggtgacacccatccacccgacttccttgcccttcgtgggaagagcagttcaaatgttgggctcagtgtgagcaaagcaaacagcacaggttgagaaaagaagtgaactgttgggactcaggaacccgtgtgtgtgtgtgtgtctgtgtgcacgccaagtggagagggcagcctacagtgggctttgcaagtttggaatttatcctgaggacaataggaagccatggaagggtattaagctacagaacaaagtgatcagaattatgctgagtctaggaagtgctgttgcttggctggttaatttgatcatatcaacaagagaatcagtacggggtcaaattggttgcattcctatttgttactgagacaaaaaaatacagattttgaggaatgtgatagtggctagtcccctaagtccaatgactaggttggcgtctgtcatcctcccttaaacaaaaattcttcacttaactctaagcaggaaatgaaaacgtatgttcttggggtgacttcatcttttggaattttctcatatatttttccaaaattccaaagcaattgttacaaaaaggacacaaatattaatggcttaaaaatttgtctgtaaatttgcttatttttctgaaaaaaaaaaaaaaaaaaacaacaamaaaaacaaaacaaggaaattaaactagaaatgaatgaaattggttatttatagggatcagtgagaaccaaatgcaagtcatagggaagaagatggaatttctctgg

SEQ ID NO: 27379 - DNA, 583 bp, Homo sapiens
tgggaggctgaggcaggagaattgcttgaacctgggaggcagaggttgcagtgagccaagatcgcgccactgcactccagcctgggcaacagagcaagactgtatctcaaacaaacaaacaaacctggaactatgtcttgtgttaacaattttatgaaggcatgaacctcttctggtgggcactacacaccttctctggctgaatgccctcatccattattatttgttytctcccagaagcagtctacactacagattcaggagatattctctgaacccctcctcattctccaagagttgtaaacttgcatggccatttacaaggaggaaatagaaaccaccatgccaagccctaattgtattagccgtcagactgcagagcagatggtccactacattcattcaaaatgtatttgctaggcggtggtggctcacacctgtgatcccagcactgtgaggggccgagacgcaaggatatcgagtctgggagttccagaccagcctgcgcaacatagtgagaccccgttctctacaaaaaatttttaaaaaaattagccgggcgcggtggcctgtgcctgtagtc

SEQ ID NO: 27380 - DNA, 481 bp, Homo sapiens
ttaaattgctagggccaccataaccaactaccacagactggttgggtttaagaacagaaatttattttatcacaattccggaggctggaagtccaagataaaggtgttgatagggttgtttcttccgaggcctctctttggcttatagatgtccatctctccctgtgttgttacatggtctttactctgtacatatctgtgtcctaatctcctcttcttattaggacatcagttatattggattagagcccaccccaataatctcattttaacttagtcacctctttaaagactctacttccaaatacagctacattctgaggtactggaagttgtgactttgacatatgaacgtggagagaatataattcagcccataaaagggttagatctaatttagatmatcaagacagcagtgtggacagaggcaagaccaggacagggagaccctttggaagactattgcagtatttagtttgta

SEQ ID NO: 27381 - DNA, 584 bp, Homo sapiens
ttgaaaacatagaatggactgctgaaattttatgctcttagtaccattctttaaaaataaacattttctaactcttcaaaacattgacaataaaaatatacatttctccagcatcacagaaatcatcaagcctgtcttaaatactttaatatgctatcaggtttttcttctctccaamcccaaacaattaaaagtcatacacataaccactgccacaacatctatctgtttttaccaacaagagatgaaaaaagaaatacatctgttttctgcctctggatatagaggaaataaaggttggctatagactaaaatgggtttaaatacagacattcattttaaacagccactaaaaatctctggggagtttcagctattagatgagacttcacttaatcaagtgtaggtcattttggaatgagtcaagtaacaccaccagggacttactttggaatggcaaatgccatttttaaaaagcaaagaggttacacttagggcttctctacaaaatctattctaagtaatttacacaaaatactactgtcccatatattccacttaagctggaaaatattcaaatgtac

SEQ ID NO: 27382 - DNA, 525 bp, Homo sapiens
gttgccagaggctggaggaaagggaaacaggaggaatgaggatacttataagtatggttttcttttcctttaaaaaaaaaatgtgattacaggtaaaatttttcattttaaccattcttaaatgcacagttctgtgggaataagtacattcactttgttgtccagccatcaccatcgtccatctccagaatgttttcatcttcccaaccagaaactctgcatccattgaacactccctattctcccctccccaagctcctggcaaccaccattccactttctgtctctctagatttgactactctaggtatgtaagtaaaagcatacaacatttaaaaaaaaaaagaaaagaaaaaagaaagaatacagtctattctcataatttgtgaagtttgtatttgcaaatttgccattcactttattttattttatatttarttttattactttacgaaatttataaatttcgtaaagtaatctattaaatagatttattttacaatttatattataaccccaaaatca

SEQ ID NO: 27383 - DNA, 534 bp, Homo sapiens
attttagagccactccattcttcctctcctagtattaacaaagcattaagagtaaactttcagggaaaactgcaattctccttttcaactcaacaggaaagacaatagcagagctcatggggtaataatctctgtccagccctaggcagccaagctgaaggtcttcttggacttctctcaggcacaagctccatgagaggcaggcaggcttctggtctagcctgtgatagtatgattctttgattaccatcaatttggtaattctcttagggctaaagaaccaagtgttaaatacatcaagttgaacaaaacaccctgagagagacacatatcccaaagtatttggcttttaagatgaatgtgaattcttatatttttaaatattgtatttcacatttttgggaagttcctctcaaactctcactgctagycacagaacaattccaaaacgatggctcttctttgatggcccaaagaaacggtttcagagaagcccccagtgctcagaactccatagtcaacatttatgggtgg

SEQ ID NO: 27384 - DNA, 522 bp, Homo sapiens
acagtctgctgagaatgtctttattctcgcagtagatgcagcaaggagctacttcacttgatttttaagaaaggttctttcttaaacaaaaaaaaaaaacaagtgtcacatttctttcacagccctcaaaggaacctaatataattagagatgtataaaagtcagtagtcctgatataagacgtattgagaagaaaaagaaggctagagacagatgaaaagggcatgtaactgaatttgtctgtgttcagatctgttgtatccccagtccaaactctagtctattatgtccaacatgattcagaagtataacagtcatctcaaacgtaactgagctcttgattagtccccatgcccccatgacaggactgttactctttcagtgttctccttctagtgatggrgatatttttcttctagttgcccaaacagaaaaattgaagtcatcttaactcttctcttcttcttacaccacatatacaatctgttcataaattcttcatactctatctttaactatatc

SEQ ID NO: 27385 - DNA, 588 bp, Homo sapiens
aataaaattaaggtgtccatgtctcacaaacagtgacctccaggtaggaggggcaggtgtgccgtcccagccatggtcctgttgccacagagctgcaacggcctcagactgggcttaggacctggtgcggagcaggacattggccgtgccacctgcccaggcagagggacacagaacmaggacccccgtactgtttttaatgcagtcaaatccacgtggttggtatcttttttcttttaatcttgggcattttgtttctctttctgagaacataacttgaaccactacagagccaataatcatataaaaagtgtatctgcaaacgctgtatagttttatgtaaattcacaatgtacttttgctgccttctagataatttagtttgcaacacattactgcacagttgtaaataacttctgtactgtaacatcactttcagctatgtgtaaaggaataaataaattaattttttaaaaagctatacatgtggcacgagcctctatcacagactgtaagatactaaactcctggaagtaactcatttgatgttagaaatagtgtaatttgtattttctcccccttataact

SEQ ID NO: 27386 - DNA, 1753 bp, Homo sapiens
aaagagaaattaaaaagctagtagaaggaagacatttctttaataaatctcatagtttctgctttgaaactaagtgccatattgaattaaatgggtatttttgcacacacatacataaagatatacacacacctattttaaacttaagaaaggattatatattataaatgacagatacctatatgacatagtgtttggctatacagagttcacacttgggctttagttacattcattttctgaatagtcatgttctatatccaaaaaactcgaagcaaatattacaaaccatcaaggccataagcattttattctttgcctacatgccttcatgacttctgactatgctaataaaagacatgaagtttcaataagtatttaagtacttatgagcacaaaagttgaaaaaacagagaattaaaacacagttctttaaatcccctcagcaatgtatgaaaaaattgactttcatttacatttgatatgtaatatcaaatattccataaatgcagatatatagatacagatagatgatagatgatataatattaatagatgcagagatagttgaaacacgatctgaaacaggatccacaatctacgatctgtagaccaagttcagtcaccacatttttctgtaaatctagctttatagaaacacaatcatgcccatgtgttgtgtttcgttaatggctgctttcacagagtgacagagatgacaaggtttgcaaagcctaaaatagttactatatgactcttcagaaaactttcagaaaacctttttgaacacttgttctggagcaaatcgtttttgcaatgacataagaagcttgcactaaaacaatgaccatttatctgctcattatctgtggtccaggactgaaagcaagctactctcactggttgttctagtccacatgggcttggcttagattatctactggagtacatttagctggatttggaagatccaagaaacaacttcactcatgcagttggtgcttcactgcttctctacaaagtctccttttacctttcccttcccttgcctcctctcctctttctcactgcccccagcctacattggcctcaagtttcacagtgtggtagtctagggcattcagactttttaaatgccagctgcttcagtaaagggccttttcaaaacgagaagttgaaagtttcagatttttttcctggacttagttgtcacacaaaatagattctactactttcttttcttttctttttttttttttttttttgatttttgagatggagtttcactcttgttgcccaggctggagtacaatggcgcgatctcgactcaccacaacctctgcctcccaggttcaagcgattctcctgcctcagcctcccgagtagctgggattacaggcatgcgccacaatgcccagataactttttgtatttttagtagagacagggtttctccatgttggtcaggctggtctcgaactgggtctaaacagaccataaggccagtgcasatacaaggggaggggaaaaaaagactaccttttcatagggaagtggcaaagtcacattaggaagcaccacttgtgatgagaagtatttttgcctcaatctttagaatcacattctaccagaaggatgtttaatgacaaatgaatttatattctggcagagttcttcatcttatcacagaatgttaactaaaagtgtgtagaaagctagccagtccgaggaacacattgagaagttctgacct

SEQ ID NO: 27387 - DNA, 564 bp, Homo sapiens
gcctgtagtcccagctactcgggaggctgaggcaggagaatggcgtgaacccgggaggcggagcttgcagtgagccgagatcgcagcactgcactctagtctgggcgacagagcaagactccgtctcagaaaaaaaaaaaaaaaraaaaaaaaaaaaaagattttaatgcaaaatacagtaacctcttatttatcgtatatttgcatacctgtgaatgtagacctagtgatggtgttttgtactctggaagaagcatgtggctgccacatctttatatttgctttagtatttgccctctggctatattaatggacatcgctatccaagatgctcccacacacatgccattattgactaagtgggtttaaatatacttgtaaatgccataaagggttgactttgtcttctgcaaaaataaatgagtaaaagggttcctcaaatttatttttttactaatcatctcccatgggcttaatagaaaaacaataagctctgaaagaaagtgggcaagtaaactgcaaaataaaaaaaaaaaaacaacttggaaaagcataatatgttca

SEQ ID NO: 27388 - DNA, 564 bp, Homo sapiens
gcctgtagtcccagctactcgggaggctgaggcaggagaatggcgtgaacccgggaggcggagcttgcagtgagccgagatcgcagcactgcactctagtctgggcgacagagcaagactccgtctcagaaaaaaaaaaaaaaaaaaaaaaaaaaaaaagattttaatgcaaaatacagtaacctcttatttatcgtatatttgcatacctgtgaatgtagacctagtgatggtgttttgtactctggaagaagcatgtggctgccacatctttatatttgctttagtatttgccctctggstatattaatggacatcgctatccaagatgctcccacacacatgccattattgactaagtgggtttaaatatacttgtaaatgccataaagggttgactttgtcttctgcaaaaataaatgagtaaaagggttcctcaaatttatttttttactaatcatctcccatgggcttaatagaaaaacaataagctctgaaagaaagtgggcaagtaaactgcaaaataaaaaaaaaaaaacaacttggaaaagcataatatgttca

SEQ ID NO: 27389 - DNA, 627 bp, Homo sapiens
acagctttgaatgcagcccaccacaaattcataaactttcttgaaacattatgagattttttgtgatttctgtttgtttgttttttagttcatcaactattgttagtgttagtgtgttttatgttgtgtggcccaagacaattcatcttcttccactgtggcccaggatagtgaaaagacaagacacccttgttctaaatgcttaacaaatatcaatcatatctaatatttcttaatgttattttcaaacattctgtttttgatgtttatggtgtggaggaagttctacaaacgttgccagcagatagagccaacagtagttactgggactttttacatgggtgaaattcagtcagagaagagaaaataagtgaaatgataccacaattatgtcttctcaatamcatatgagaaaatgggaattgtcaccaatggctttgcaatcaatcacctgaagaaatgtgagtgcgtggccttcagctccactcagtcatgaccacactagttctgagcagtgagttcagagggtagtagtgtttgaatgctaagaaacagccatagaggagcagtgtcttttagccagtgctatgtttcaatagacattcgttggtagtcctattaatttga

SEQ ID NO: 27390 - DNA, 1241 bp, Homo sapiens
tttcggcttttccgggcactgacagggataggaatgggagagagaagagagaagaaacaaaatccacaacagagccttcgtcaaattccataattacagaggctttggggatttccaaaagattattgttgggggagtaacggctgattccgagagcccaagccgaagctaattctacagaggtgttcacagcaatgtcgttggtctgattggttcgagaaaaggcaaataaaaaaggcaacagttaatgatctcggctactaacaacatggtagcgtcgctttcccacaccctgaagctgagggacattttcttcttggggtagccaattagtagcattaatgggacaggaatcagattaatcatggcacgagccacccgctaatgcattccacccattattctcagcattcactcatcaagcagtctccaagagcctccaaggaaataataaaacgggtcgatctgaatgcctctcatctcccttcttcatctcatctacctctgacctggtagttaaggagccacaaaatggacaggccaggggctatagaggaatctgaggagaaggatcaggataatgggcaaactggagatgtgattaattacagaatgcacttttactttccccgggtgaattagctataaaccataagccttctccctgctgccatggccttcacctattttatcctcaaaaagagataagcagagaaaattgcagctttgcaagtgacatttgccccttccttggcactaaggattggcaggttgcaataacacactccagacagggctcctcaggctgtaccgtgcatgtgagcggccaggagaaccgacagaaatgcaggttccgaggcagtgagttggggacggggccagttgccacatgtctgtggtcttttagctgcaggacaaaccagactgaaagtcctgcagcttccagcccatccgtgcacacaccatgtctggaaaatatgtrtggaacggagaaatgggcagtcactggaaagagagccactggcgacttgacttctctgtgaggaatcctgtagcccagcccaagacaatgaagaggttcctgatgagaacgtgtggctctatctgcctggtcactgccgagctgacaatgaggatgcccatccagcacccagggtgtgacgacaccacactcgcgaaacaccccagaactccttctacatccctggcaaagggcagggctcacgttccaaaatgactct

SEQ ID NO: 27391 - DNA, 1241 bp, Homo sapiens
tttcggcttttccgggcactgacagggataggaatgggagagagaagagagaagaaacaaaatccacaacagagccttcgtcaaattccataattacagaggctttggggatttccaaaagattattgttgggggagtaacggctgattccgagagcccaagccgaagctaattctacagaggtgttcacagcaatgtcgttggtctgattggttcgagaaaaggcaaataaaaaaggcaacagttaatgatctcggctactaacaacatggtagcgtcgctttcccacaccctgaagctgagggacattttcttcttggggtagccaattagtagcattaatgggacaggaatcagattaatcatggcacgagccacccgctaatgcattccacccattattctcagcattcactcatcaagcagtctccaagagcctccaaggaaataataaaacgggtcgatctgaatgcctctcatctcccttcttcatctcatctacctctgacctggtagttaaggagccacaaaatggacaggccaggggctatagaggaatctgaggagaaggatcaggataatgggcaaactggagatgtgattaattacagaatgcacttttactttccccgggtgaattagctataaaccataagccttctccctgctgccatggccttcacctattttatcctcaaaaagagataagcagagaaaattgcagctttgcaagtgacatttgccccttccttggcactaaggattggcaggttgcaataacacactccagacagggctcctcaggctgtaccgtgcatgtgagcggccaggagaaccgacagaaatgcaggttccgaggcagtgagttggggacggggccagttgccacatgtctgtggtcttttagctgcaggacaaaccagactgaaagtcctgcagcttccagcccatccgtgcacacaccatgtctggaaaatatgtatggaacggrgaaatgggcagtcactggaaagagagccactggcgacttgacttctctgtgaggaatcctgtagcccagcccaagacaatgaagaggttcctgatgagaacgtgtggctctatctgcctggtcactgccgagctgacaatgaggatgcccatccagcacccagggtgtgacgacaccacactcgcgaaacaccccagaactccttctacatccctggcaaagggcagggctcacgttccaaaatgactct

SEQ ID NO: 27392 - DNA, 2021 bp, Homo sapiens
caaaggcccaaaccctcccacgaggatggagaccctccagatctcagggagacccccaggtctctgcttcctcacctccaggcacagcctccacccccaaggactggaaaagcttctccgcacacccagcagagtcctccctgctgcagagggagtccttgaggcagaactcctcgtttgggatcgtttgagcccaggagttcaaggctgcagtgagcgatgatcatgccactgtagtccagcctgggggacagagatactgtcactaaaaaaaaaaattccggccaggcgtggtggctcacgcctgtaatcccagcactttggaaggccgaggcaggtggatcacctgagttcaggagttcaagaccaacctggccaacctggtgaaaccccgtctctactaaaaatacaaaaattagctgggcatggtggcgggcgcctataatcccagctactcgggaggctgaggcaggagaattactcgaacccgggaggcagaggatgccgtgagccgagattgcgccattgcattccagcctgggcgacaaagcgggactctgtctcaaaaaaaaaaaaaaaaaaaaagaaagaaagaaaagaaaacgaaaaaagaaaaaaaaaatcctgccctctcgtagctcatgttctagtggggacactggaggggcaagaggaagtgcagtaacatatgaggtcagaggggtgatagtgacacatcgtgcaggggctgtgcccactgtgaggactctggttgtcacctgggtgaggtgggtgctgtgggagggtgctgagcagaggagggaccagggctgatgggcagagcagggggaccgttcttaaggctacaaccaggagagagctggcagtgccggggccaggtggggcgatagagggctggaggggcagattccgaaggggtccaccgtcattcactagtggctgacagggggttgtggagacaggcagcaaagtggggactttccgggaggcatctcacaggaagacgtccacacgtgaggaacagagaccactgccttggcttggagctgcaggaggcaggctaagcccacacggatgccgaggcctgaggctggatcctcagcctggatgctgcctccaccccagcttgccgaggaccccccaccatccccagcagcctggcctcagtttctaaacagggtgaagggccagcgatggttcctctgaggccctcggctgtccctgctgtctatgcgcctcctgctctcaggcctgggaggtgtgatttactctcctgacctccaggcagcccggctcctgctggtaaatgcactgaaaagtccatcttttccacctccagccctgctgggagtgcccaggtgccatcacctgggaacagctgatgacgcgagctaagaagttcagagttgcttttgctttacaaggcgcataggaacacactgtactaagaacgtgccagaagcctcaagatcactaaagatccccatttaccagaccggaaacaaaggagcaggggaaggaagcgcacacgtggggcttcgtgggctggaactgcrtgacctcggcaagtcacttccctcccagagccactctttcccaggttagctggagacagccacaacctacaggcaggcgtggtcggaattaaagacagcaggcaccaaatgcgtggtgaatgggagacattatagtaactgttttattaatcttagattaaactatttcttgcaactttgaaaagaaaccaaaatcttattttagcttgcaaaggtcctaataccttaaaattttttgaaatctttaaagccttaccaaaacctttgcagggcctgcaaggagtggcaggatctggccctgctcacttcccccatctcagctccttcctctcacccttgccctctgtgctccaaccttgctgacctcttagctctctaaacaagaaaacttgtgctgacctcagggcctttgcacatgctgttcctgctgctggaaacactgttcccaggctctcggtaccgaca

SEQ ID NO: 27393 - DNA, 805 bp, Homo sapiens
aaggatgaactcaggcagggcttgaggccactactcccggttcccctcctctcctccccatgaatcaccttcaaggacacttccatcaaacctgactcacacagaaggcccaracctgagaaatgaccagcccctgggccagagcagagagccagaaggcaattccctcccccatcactgctgcactgggtggaaattgggtcagagctggccagcccattcatttaatccaaacgccccctttccattcagctcttagtcctcagagctttcagtccaaggaagcactatttcctctgcaaaataaacaaaataaattaagcccatgctctttgatctcagggcttttgtgtggctgatgaattgaacagaaatgatctgccatcctcctggcatctcaaagacactgcaaaaattcagctgtagcttccagccacctgccaggcactgtgctgacaaggaagcatggctaaggaaggcactctttgccacccattctcccagggaagcaagaagagtctgcaggaggcacgacaggggaagtcaaaagagtcaaagactgtgaggcaggattcgtctttggccacataggcatggattcttcttcctctgctcattcccaccccagggactttgcactggcttttgtccccatgtggcatactttctctggagaccttggaaagctggctccttctcatccttctcatgtcagcttgcacaggacctccggagagaaacctttcccatcaaaagtagcccccagactctacccgcatcactgtctgccagccccctactctat

SEQ ID NO: 27394 - DNA, 805 bp, Homo sapiens
aaggatgaactcaggcagggcttgaggccactactcccggttcccctcctctcctccccatgaatcaccttcaaggacacttccatcaaacctgactcacacagaaggcccagacctgagaaatgaccagcccctgggccagagcagagagccagaaggcaattccctcccccatcactgctgcactgggtggaaattgggtcagagctggccagcccattcatttaatccaaacgycccctttccattcagctcttagtcctcagagctttcagtccaaggaagcactatttcctctgcaaaataaacaaaataaattaagcccatgctctttgatctcagggcttttgtgtggctgatgaattgaacagaaatgatctgccatcctcctggcatctcaaagacactgcaaaaattcagctgtagcttccagccacctgccaggcactgtgctgacaaggaagcatggctaaggaaggcactctttgccacccattctcccagggaagcaagaagagtctgcaggaggcacgacaggggaagtcaaaagagtcaaagactgtgaggcaggattcgtctttggccacataggcatggattcttcttcctctgctcattcccaccccagggactttgcactggcttttgtccccatgtggcatactttctctggagaccttggaaagctggctccttctcatccttctcatgtcagcttgcacaggacctccggagagaaacctttcccatcaaaagtagcccccagactctacccgcatcactgtctgccagccccctactctat

SEQ ID NO: 27395 - DNA, 805 bp, Homo sapiens
aaggatgaactcaggcagggcttgaggccactactcccggttcccctcctctcctccccatgaatcaccttcaaggacacttccatcaaacctgactcacacagaaggcccagacctgagaaatgaccagcccctgggccagagcagagagccagaaggcaattccctcccccatcactgctgcactgggtggaaattgggtcagagctggccagcccattcatttaatccaaacgccccctttccattcagctcttagtcctcagagctttcagtccaaggaagcactatttcctctgcaaaataaacaaaataaattaagcccatgctctttgatctcagggcttttgtgtggctgatgrattgaacagaaatgatctgccatcctcctggcatctcaaagacactgcaaaaattcagctgtagcttccagccacctgccaggcactgtgctgacaaggaagcatggctaaggaaggcactctttgccacccattctcccagggaagcaagaagagtctgcaggaggcacgacaggggaagtcaaaagagtcaaagactgtgaggcaggattcgtctttggccacataggcatggattcttcttcctctgctcattcccaccccagggactttgcactggcttttgtccccatgtggcatactttctctggagaccttggaaagctggctccttctcatccttctcatgtcagcttgcacaggacctccggagagaaacctttcccatcaaaagtagcccccagactctacccgcatcactgtctgccagccccctactctat

SEQ ID NO: 27396 - DNA, 661 bp, Homo sapiens
tgcctgtaatcccagcactctgggaggtcgaggcaggtggatcacctgaggtcgggagttcaagaatagcctgattgacatggagaaactctgtctctactaaaaatacaaaattagctgggcgttgtaacgcatgcctgtaatcccagctactcaggaggctgaggcaggagaatcgcttgaacccgggaggcagaggttgtgatgagccaagatcacactattgcacgccagcctgggygacaagagcgaaactccatctcaaaaaaaaaaagcatttccttttactaagtacagaaggttcattattattcttttattattctttttcaggccactaggaaatgagggtgtacaacacccttccagagccaacttcaacaaactcaaatttatgtacatcctaatctaaaatttttcttttcctacatataaaggaaattaaataaaaaacctgtccgtttcagttacacttggggcagtgggcctacattatttttgcataaagcccaattgcttctagatgacttctgcttgttgattagattagtctaatatttgttgcggctctgagtggcaaaggtgactacaggaagtcatacataaaatttccttctaaatagtgcatacaaatcaataataaaatagtaatgctcctaac

SEQ ID NO: 27397 - DNA, 812 bp, Homo sapiens
tgggctcggtgaatccgcattttatgtaagataaagtaagcatgtgaaatgactgccgtttgggaacacaaggaaggcagttgttttgttttgttttgtttgttttgttttgtttttgttttgttttgtgtgactccatgtccaagcttaactttctcttcatcatggtgaatttgggggtctcaagagtctagttttctttcacaggggcttcgggaaggcagggatcttcgttgtatcctagatgcctagctcgtgctaggagctggaaacaggtttgttgcattgaactcagtaggaatcttggcaggctgtctgcagggctgggtggggtgggaaattcaccaccttccctttctcccatctcactgtcagatctgatctacttcatgaggtctcacctggacgatagccagagactgcaggctcagctctcaktgcttcttattctaattgcctgaaatcccgaggaaataactcttaccttttggaaatgtataatctagtggggacatacaaaactcatatacacccttatgtggaatgttgacattttgcttcatgattaattgttctgaaagtcctttccacttacccgtgtttaggtttcctgtctggatttaggctccatcacaaaatctaaggttcagcaaaaacgagaggctctcagtgcttctgagtgaggacatgaaaaggatctgggaataaaagcactagacccttacagactcatgagcagcagcagctggcagcactgggctgggaagacaggagctgctggggcctctggctgctggttcaaaagacagttt

SEQ ID NO: 27398 - DNA, 466 bp, Homo sapiens
cagtagagtcagatatgggttctgctggtggacatccctcctggggagtaagtacagtgaaaaatcagagagaagcggaggcagggtgggagcatctcaccctataaactagtcaccggatctgaccaggaaaaagaacaaggacttggagaaatgcaggcaatgcagatcagggttggataccttccagttcatctaagaagtagtgacagaagagtgggagcccagtagaagttgctctgccagtatctagattttcttcctgtggtagactgggtcttcaccacccactctgcctggaggagggtccctccagagctcactgaaaaccagggacagggctcagctcactaatggcctgcccactcagaactccgcgagtgcccgcagaagcagygaaggtaccaatggggtgtgagacccacctccatcttgctaaacggttgggggcaggaagctctgtggg

SEQ ID NO: 27399 - DNA, 576 bp, Homo sapiens
ttgtgagataccagttatttgggtcaatggctcctaagccagatagcaccaaatacttggctggatattttctcattcatgtttgcaaacctagaattagaaagtgagatgaccatatacaaaastgtagcagccagatttgacattaagaaaacaaaactaagcttaactcaaaagggcccccaaaacagcaatgaacaagaactatttgtctattcttcctcctgttggttgagtctgcacaccaggatgcaactaacagtcctcttgaaagagcgctggagaaatgctctgccctgctggttaagcagactgctatgtcacaacttgagttgagtttccatcagcatttcaaggtcagcacccatgatcattcctcagtagcctgttagaacaaagcacccagggcttctcttatctctgatgcctatagatcaagacagttcttgctggaaagaatccttggctatctccatttattgtcctctcagcctctgacaacctagagaagaatgcagtgactatttctcagaaatggacggtgtgggacaggtggttcagacaattcatggccaa

SEQ ID NO: 27400 - DNA, 529 bp, Homo sapiens
caatatatttcatatctataaatatatgcaaagtttaatataatgaatatctatgtatccaccacccagcttaaggaagagtgttgccagcatagtgtgtggataccctctccttttccggagtcctgataaggtcactctttcaagtttgcctgacaccagaaacaggtacaacttagctgctcagggactatatgagtccttctgctaaactactgggtttcagaactcttttttgttttttttgtggagcggagcccaggttggagtgcagtggggcccggagtgcagtggggcgatcttggcttactgtaacctccgtctcctggattcaagcgattctcctgcctcagactcccgagtagttgggattaccagcatgcaccaccatgcccggygtatttgtatttgtagtagagacggggggtctcactatgttgtccaggctggtcttgaactcctgacctcaagtgatccgcctgcctcagcctcccagagtgttgggactacaggcctgagccactgcgcc

SEQ ID NO: 27401 - DNA, 952 bp, Homo sapiens
gattctggaaaaacctttaaaaggacaaaatcagccatactgctccttcatctatttgcttttttctctttttcctggattaactgtggatacaagagctggaactttakaagccatcttataaatgtgtgacataaaagccagggataaaagatggcagagctgccttgatccttgatggcaccccaaagaattggcctctgctgtctatctatggccttcttcctactgagtaaaataaatatctgcaagttaacttattgttagcagggatttcttcactttttttcatgcttatagagacacatattccttggccaataagttttttctctatatcctgaagttgccaagaacagtaacagccaaaattcatagtctggagctgtagcaattcaggagatagaataagtgttaaacattcagaaaaaaaaagaattttttattcaatcttcattctccaatattcagtaccctgcctagacagagtaggcaataaaaaatgtttgctgactgatgctacttattatatattttaaagaaaataatttggaataacacatttaaaacatgtattatgatttatagaaggtttagtagcaaatttgaattaaatgtataacaatatttattgaataactaacatttactaaattcttactatgatctaggctctatgctaaatacttaatgtattttttaaaattctcacagcagttctctaacctaagagttattattagagaagttcagagatatttaagtaacttagccaaggtcacacagccaggtggtaccagagccaggattcaaggccaagtttacttctctccaaatctatgctcctaaccactatgtattactaaaatattctgaatctgatttcctaaaagaaacatgacttttgataccaaaaaaaaataaataaactcctttgtggcagaacagtaag

SEQ ID NO: 27402 - DNA, 540 bp, Homo sapiens
gttacatgagagaggttgaagaggctattgtcttttccaaatgaagcatacagaggttgatgtggtattccatgtttggaggtcctagagattgaggctatgtgtgaattttgtcaggaaatatcccaggcagagcatcacttgagatgcctgcctggtgacagagaaaggtctgcacagaaagtgagatgtaatttgtggtgtggaaaaggacctatctcttgagtattacatgttgacccagcagacatgtgggttaatatttaaagggactccacaaagaggacatctggagtggtgaaaagactccaagagagggaggaaytattggaaaatagaaagcagacatgggtcctaagtggacaatggaaaaaactctatcaccatctgggaagttggtgggtctgaggaatcctcaagagcagctggcagagaggaaaaacttttcctctactctgtcatattcagtatctgggggtctgtgacttaaactaacaaaagacagattaataggagaaaaggcatacaatttttattaat

SEQ ID NO: 27403 - DNA, 495 bp, Homo sapiens
atcactctgcctttaaaatttgtttcatgacaggctcctgtgcaaccagctaagcatgtggatgctcacggcactgatgaagtgggggcrtgggggtggggccgggcccatcatggctttcagcatcagaaccccttttctgcttgctgcctcttgttcctgtaggtctagggtggcaaagaaatacacaactatcacgggaacaaatgaaaataaccccaaagtccttcaagcagtgaatgaataggctgcggtgagtgcatccacacaatggaatactgctcagcaatgaaaaccatgcattcctacccaatacattttgctaagccacaccccaaacgctacattacactccatacgacattccgggaaaggcaaaactacaggcactgcgaacagatcggcggttgtcacagactggggctgagaggaggtctggattacacagggaaaagcatcagagaatttctttgggacagtgggactgtttcgcag

SEQ ID NO: 27404 - DNA, 589 bp, Homo sapiens
tcttggttttgcttaagggtgtttgtgttatttttctctgtcactctcaacgaagagtatcctgacagatgcaatctatgaaacaagcagaaaaagactgggaatgtgaaggcatgcaagctaattttcatttcccttttctcttttcatttactcccattataactatgagatgtaagtagggacgatggttttattgtctcactgaagaggtgctaaaattataaccttgttatgttgaatgactttgcccagtcttctagctaatagataatagagtttggagttggccaccttctaatttgggaaacagggaaagccaacaagatcagcgaggcaggagaatagggtctggaggcaggtaactaaggctgattcaccctgacttcctagaactaaatcgaaaggaaarccccaactttccacatctaagtaccaaaaggaccagaggctactccctttgcaaaaccccacctttcctggcagcggatggaaaattgaaaacgtttgcataggagtgtaactttttttttttttgagacagagtctcgctctgtcacccaggctggagtgcaatggcgccatagct

SEQ ID NO: 27405 - DNA, 765 bp, Homo sapiens
tttaaacaactgaaggagaaggatgacagctcgctcacaattggaattcccctttgcaaatcctcagggagactaattgctcctgctcttggcctgtctgttaaaatgcaggattaaaaagagaaacaggtagcaggtttttttgttgtgttttgttttgttgttttttttttaacttctgaaatgagtattacagaagaaaatcatgcaggaggaaaaccatgataactcatcagcatgattcagcaatggggcacacttcagaggaaaggaagattggttttgctcataggctctttatctgtgaaacgcaatcactctccctcactggtgtttcatgctctgacgtcttatggtttgaggcacgatcaggggcctatttctgtgacacctgaaggctttacacttgcttcttttgcttctcacagcagcctcatagagtgcagtgaattttttcaatattttcattggtcttacagttttgtcttatagatttgcaacttgtgacaacttttcccaccttcacatggtttgatgatttcccttcacacctactactaatggttacaatgctctggatcacgcctcgtgaatcatcggtgtctgtcctcccctaccacagccaggtgctgacagtaacaactaggtgccggcagtattttaaagatggcagtatggcctggaggacatgccacaggscctgaaaaggaaccttgagttggacccaagagccagtcccccagaggtcaggtgcaccagaggtca

SEQ ID NO: 27406 - DNA, 1058 bp, Homo sapiens
tttactagaactcagctcaaacccactcccttaaggttttaaatatctgaaagtgacaatttgagggacccatcctgttaggtatatcccctggatcaatcagctatggtaggatgtgtttgggagacaaggtagggtctcagaacactgatgtgatcagtggggaccactactttgtattaagagtttcccaaagaaaatgcaaccattgagacctgccaatatgaatcccttgcagtcatctttctaatatattaaatcctaagtccttctaaataaaatggagcagtggaagggttagataaaaacagctccaaagcaaagcaactttaatatttcaataaatagtcactgaatgctaactctgtgcattcaaaggacttacgctagacattgggtgggtaaagggataagaaaatcggtaagacctggcagctgctcaaagataagacaggcatacaaatcatgacactgagaggcaggataagggaaatgatgctccacaacagatacaaagtgctataaggttttacagcatggagagattctctaaaatttatatccagaggaaaaccaaaaagctaaagtccagattttccttcttattgcaacttcatcatatgctggaaaaactatacatgacttcacatgcaaaggaacacartgttcttatttccacctactgcagtccagctgccaattcaaatgtctgccacctcttaattgtgcaattagggaagcattagtttcagtggactcaagtgccactgctaagctcctgcttggatagattgcataaacatggtatctgggaaggaaaaaaggaattgctagaggagtcttgcctatgcttctatgaagatttcagatgctggttccatcaggtaaaaacttctgaaaatctgtgagcatggcaaagagaaagtactctagaattcttgctgatagggttaaggatggagttcttgggtgataacattgctatgcaaggagagtttgctgcaacattttataactcaagagctgctggcccaaggctatgctgttgcaaaatattt

SEQ ID NO: 27407 - DNA, 826 bp, Homo sapiens
tctcctgcctcagcctcctgagtagctgggattacaggcgtgtgccaccactcctggttaatttttttgtattgttagtaragacagggtttcaccatgttggtcaggctggtcctgaactcctgaccccgtgatctgcccgccttggcctcccaaagtgctgggattacaggcgtgagccacggtgcccggcctttttgtttgtttgtttgtttgtttgtttgtttgctttgagacagaatcttgctctgtcagattttctttcttacagggttgttataagatttcttaagataatccaagtaaaatatttaatagagtgcctgcactccatgccaggctggagtgcagtggcatgatctcagctcacagcaacctctgcctccaaggttcaagcaatttttgtgtctcagccacccaagtagctgagattacaggcgtgtgctaccacgcctggctaagttttcatattttttagcagagatggggttttgccatgttggccaggctggtctcgaactcctggcctcatgtgatctgcccgcctgaccttccaaagtgctgggattatgggcatgagccaccatgcccggcccctttattcttcaacagggtcctttgctctcatgatgtctgagcttcacctttgacagctttctatgaaccattcctggagtctgagaccagattgttttcctttttccccccttccttaaatgtttaaatgggctcctcctgggagtaagaaagggaaagaaaaaaaattaaaaataaataaataaaatggctcccctttaaagccttgggcagctagctgatggatcct

SEQ ID NO: 27408 - DNA, 826 bp, Homo sapiens
tctcctgcctcagcctcctgagtagctgggattacaggcgtgtgccaccactcctggttaatttttttgtattgttagtagagacagggtttcaccatgttggtcaggctggtcctgaactcctgaccccgtgatctgcccgccttggcctcccaaagtgctgggattacaggcgtgagccacrgtgcccggcctttttgtttgtttgtttgtttgtttgtttgtttgctttgagacagaatcttgctctgtcagattttctttcttacagggttgttataagatttcttaagataatccaagtaaaatatttaatagagtgcctgcactccatgccaggctggagtgcagtggcatgatctcagctcacagcaacctctgcctccaaggttcaagcaatttttgtgtctcagccacccaagtagctgagattacaggcgtgtgctaccacgcctggctaagttttcatattttttagcagagatggggttttgccatgttggccaggctggtctcgaactcctggcctcatgtgatctgcccgcctgaccttccaaagtgctgggattatgggcatgagccaccatgcccggcccctttattcttcaacagggtcctttgctctcatgatgtctgagcttcacctttgacagctttctatgaaccattcctggagtctgagaccagattgttttcctttttccccccttccttaaatgtttaaatgggctcctcctgggagtaagaaagggaaagaaaaaaaattaaaaataaataaataaaatggctcccctttaaagccttgggcagctagctgatggatcct

SEQ ID NO: 27409 - DNA, 826 bp, Homo sapiens
tctcctgcctcagcctcctgagtagctgggattacaggcgtgtgccaccactcctggttaatttttttgtattgttagtagagacagggtttcaccatgttggtcaggctggtcctgaactcctgaccccgtgatctgcccgccttggcctcccaaagtgctgggattacaggcgtgagccacggtgcccggcctttttgtttgtttgtttgtttgtttgtttgtttgctttgagacagaatcttgctctgtcagattttctttcttacagggttgttataagatttcttaagataatccaagtaaaatatttaatagagtgcctgcactccatgccaggctggagtgcagtggcatgatctcagctcacagcaacctctgcctccaaggttcaagcaatttttgtgtctcagccacccaagtagctgagattacaggcgtgtgctaccacgcctggctaagttttcatattttttagcagagatggggttttgccatgttggccaggctggtctcgaactcctggcctcatgtgatctgcccgcctgaccttccaaagtgctgggattatgggcatgagccaccatgcccggcccctttattcttcaacagggtcctttgctctcatgatgtctgagcttcacctttgacagctttctatgaaccattcctggagtctgagaccagattgttttccttttyccccccttccttaaatgtttaaatgggctcctcctgggagtaagaaagggaaagaaaaaaaattaaaaataaataaataaaatggctcccctttaaagccttgggcagctagctgatggatcct

SEQ ID NO: 27410 - DNA, 826 bp, Homo sapiens
tctcctgcctcagcctcctgagtagctgggattacaggcgtgtgccaccactcctggttaatttttttgtattgttagtagagacagggtttcaccatgttggtcaggctggtcctgaactcctgaccccgtgatctgcccgccttggcctcccaaagtgctgggattacaggcgtgagccacggtgcccggcctttttgtttgtttgtttgtttgtttgtttgtttgctttgagacagaatcttgctctgtcagattttctttcttacagggttgttataagatttcttaagataatccaagtaaaatatttaatagagtgcctgcactccatgccaggctggagtgcagtggcatgatctcagctcacagcaacctctgcctccaaggttcaagcaatttttgtgtctcagccacccaagtagctgagattacaggcgtgtgctaccacgcctggctaagttttcatattttttagcagagatggggttttgccatgttggccaggctggtctcgaactcctggcctcatgtgatctgcccgcctgaccttccaaagtgctgggattatgggcatgagccaccatgcccggcccctttattcttcaacagggtcctttgctctcatgatgtctgagcttcacctttgacagctttctatgaaccattcctggagtctgagaccagattgttttcctttttccccccttccttaaatgtttaaatkggctcctcctgggagtaagaaagggaaagaaaaaaaattaaaaataaataaataaaatggctcccctttaaagccttgggcagctagctgatggatcct

SEQ ID NO: 27411 - DNA, 826 bp, Homo sapiens
tctcctgcctcagcctcctgagtagctgggattacaggcgtgtgccaccactcctggttaatttttttgtattgttagtagagacagggtttcaccatgttggtcaggctggtcctgaactcctgaccccgtgatctgcccgccttggcctcccaaagtgctgggattacaggcgtgagccacggtgcccggcctttttgtttgtttgtttgtttgtttgtttgtttgctttgagacagaatcttgctctgtcagattttctttcttacagggttgttataagatttcttaagataatccaagtaaaatatttaatagagtgcctgcactccatgccaggctggagtgcagtggcatgatctcagctcacagcaacctctgcctccaaggttcaagcaatttttgtgtctcagccacccaagtagctgagattacaggcgtgtgctaccacgcctggctaagttttcatattttttagcagagatggggttttgccatgttggccaggctggtctcgaactcctggcctcatgtgatctgcccgcctgaccttccaaagtgctgggattatgggcatgagccaccatgcccggcccctttattcttcaacagggtcctttgctctcatgatgtctgagcttcacctttgacagctttctatgaaccattcctggagtctgagaccagattgttttcctttttccccccttccttaaatgtttaaatgggctcctcctgggagtaagaaagggaaagaaaaaaaattaaaaataaataaataaaatggctcccctttaaagccttgggcarctagctgatggatcct

SEQ ID NO: 27412 - DNA, 541 bp, Homo sapiens
ggtggtggctactcaggaggctaaggcaggaggattgcttaagcccaggagtacgaggatacactgagctatgatcatgccactgtactccagcctgggcaacaaagcaagacctcatctttttaaaaaaagtgaaaacaaaaaaaactctggaactaatggtgccaaggtcccttccagatacaccactgrtgcatggatgactagttatagtctccttcttaaggatgtctggaatttcatccagagtccccaagtcaatagcatccgggaaggggctccacagtcttttcttgattatgaccagtagcccctaggcccagattggagaaagccacaaaggtttcaaatctcagccatctaagtgtgccttctccttgaagactcaaccaatgctgctcaggaactttctctgggccctccctgatgatactcgtgcctctggctctccttccttaggaaaatctccagaccaaatgtccaggaaagatcagccatgaagctaagaataggcagagcaggtgggagcccctcagaagct

SEQ ID NO: 27413 - DNA, 1260 bp, Homo sapiens
gcctgccctctctgcacagaaagttctggccctaaccttgaaaagaatatgacccagctagtcctctgatcctagtagactgtgggatatctggcgtaaactatgactaaacctatagcctggcaccaaatgcagccaaggttagcttaagttagtcaaccccagcttgaccaaagaagtgaaaaataaatgcttatttgctgtatgccactgatatttctatggttattgattatgccacattattctagcaatagttgattaagaagctagaatcaaatcatggtattaattaggagaatataataatgtggcagtaacctgatacaaatttctcattctgagattttttccccttatttatgtattttttttttatatcctgtgcttggtacaacttgtttgcaagccaattgataacaagtaaatgaacaagtatattaaaattaagagaaaaattcataaacaactaattttacttagtttgaaagattgtatttcacatagatatttgtgctcaaaattgtaactttctattgcacaaacaaaacacagtatcttctcctaggaaaatttttgttcattcccatgacagatttcaagatgtcattatataatgatgttttacaaacaatatggtattctaaaaagagcacagtaacttccaggtatgttgcctgcttaagatcacttttgttgagaattgagtatctctgaaaaatctgattttgtttttgttgttgttgtttagttagttggttgctatatcaggagagatctgtacttaaaaagtttatcctggcagtaatatagccaktttaagtgaaggtagaaagtgctgggcaccaagcaggttagtatatagtcctagggctatagaggcctgtaggattggattaatgggaaaaaagttagggaaatggacaggatatgacaatatctggatgcaggtagtaagggaaaggaaagagattcttaaatttcagtgtacatgaaaatcactctgagagcttgttaaaaatgcatatatagtccatgtctccacttccaaaaattctgtccagaatttctaaaatagtgatctagaatctccaattttaacaaattccctttcttattctgttttgggtaattgagagctgcattttgagaaacattagaacatagctttcctaatcatttggaaacaatagtttgattctaagatttcagaatcatttagctctttgcatgtcccagttattgccaaggactgctgca

SEQ ID NO: 27414 - DNA, 1026 bp, Homo sapiens
tctggagaaaaaaccgcagccctctcacatagcctgtccattccmagagggccctgctgtcctccccagactcaccatagtccaaaaacgatgtctccacagctgctttctgagttgagagaatgtcactgcccatcagcaggaggatgatgcttcggaggagcttatgggagtctatgagagctatctcaggtgtctgccagcctgtggtgggtggggtgaaaaagggagaagatgcagccagaacttcaccacttttagctactaaggcagcaaagcctgcttcccatgcttccttctgcattaaggcaggcagagctaatcaatctcataactccttccctctgagatcccctggggtctcagaatcctttcagctggctgggcgcagtggcccaagcctgtaatcccagcattttgggaggctgaggcagacggatcacccgaggtcaggagtttgagaccagcctggccaacatggtgaaaccccacctctactaataatacaaaaattagtcgggcgtagtggcgcatgccagtaatcccagctactcaggaggttgaggcaggagaatcgtttgaacccaggaggcagaggttgcagtgagctgagattgcaccattgcactccagcctgggtgacaacagcgaaactccgtcttagaaaaaaaagaaaagaaaaaaaaatcctttcagcctagtattccaggcagtcaccaattgtttagagtcagcaggcaaactgaaacccatctgctatcccaggcctactctgtgcaggttctaggtaggctgggccacatagttagccagcagaggggatgaggtttgagaagagctgacagcagacagaccatacatgtcatccaaggggggccatccaccctattctttcaccttgggcacaggagcgtgctccacagggagtgtgagaggttgtttgacgggaggctaaggtaagctgccaccagctgcaggacctggacacgcagcaagtaccaagccttggaggacttctggagggca

SEQ ID NO: 27415 - DNA, 1026 bp, Homo sapiens
tctggagaaaaaaccgcagccctctcacatagcctgtccattccaagagggccctgctgtcctccccagactcaccatagtccaaaaacgatgtctccacagctgctttctgagttgagagaatgtcactgcccatcagcaggaggatgatgcttcggaggagcttatgggagtctatgagagctatctcaggtgtctgccagcctgtggtgggtggggtgaaaaagggagaagatgcagccagaacttcaccacttttagctactaaggcagcaaagcctgcttcccatgcttccttctgcrttaaggcaggcagagctaatcaatctcataactccttccctctgagatcccctggggtctcagaatcctttcagctggctgggcgcagtggcccaagcctgtaatcccagcattttgggaggctgaggcagacggatcacccgaggtcaggagtttgagaccagcctggccaacatggtgaaaccccacctctactaataatacaaaaattagtcgggcgtagtggcgcatgccagtaatcccagctactcaggaggttgaggcaggagaatcgtttgaacccaggaggcagaggttgcagtgagctgagattgcaccattgcactccagcctgggtgacaacagcgaaactccgtcttagaaaaaaaagaaaagaaaaaaaaatcctttcagcctagtattccaggcagtcaccaattgtttagagtcagcaggcaaactgaaacccatctgctatcccaggcctactctgtgcaggttctaggtaggctgggccacatagttagccagcagaggggatgaggtttgagaagagctgacagcagacagaccatacatgtcatccaaggggggccatccaccctattctttcaccttgggcacaggagcgtgctccacagggagtgtgagaggttgtttgacgggaggctaaggtaagctgccaccagctgcaggacctggacacgcagcaagtaccaagccttggaggacttctggagggca

SEQ ID NO: 27416 - DNA, 623 bp, Homo sapiens
gatactctttctctgttagagaaattcatggcactctagacctgcctagagagttccccaaggcccccatctctgcccagaagactccagcctcaaacacagaaaaataatagaccttccctagacaccgtgtcccaggtccaggtgtgccccagtcagcttgcggagactttggggctgagctcaggctgggcaacgatgatgataaccactgaactaaccgtgtctgccctgtgcccagtgactcttcacagctgccctgtgcctggtcactcttcacagctgctctaagactgggagcatccgcatctcccactgaggaaaggaagcccagagaaatcacctctccaaatgcacacagttcatgagccttagacaaaacctcaggcatccaatgcccttttatattgcaactttgttacaggccaggaggagggaaatgtatcacccacacacccaygggtaattagcttggattcatttaccagattagacacctcagacaagagggagcagatagagccctgaacaaataacttttcagagcaggaaagccattgaagaagactaaatggtgggggagcaggctaggaagcacccccctccccgccacccaccgccgg

SEQ ID NO: 27417 - DNA, 579 bp, Homo sapiens
atgatatcaaattcatatttcagtgtccataaataaagttttattggaacacagccacgctcattcatgtacatattgttgagggctgctttggcattaccacagcacagctgagaagctgtgacaaagatggtgggcctgcagagcctgtacaatttaccatctggtcctttacagaaaacatttgctgacccctgctttggagacaaaatcacccctctgccctcaccccatctcctggtgtgtcacctgaacaagctgaacatcatgggaaattttcttgcctcttaggtagattttctcctacctaaacttatgcttttcaaaatgaagagaaagagagatattgaaggatgaagctgggaagtagtaattcttggaatatcatatttcttgtgacctggctcaagtcatcttaatttctctctgggcctcatccttctccccctgaaaaatagggctgctgggagtgaggggygagccagacgcacggccttgtcagtgttcatcttggagccagacgtctgaggactggccttacttaaagtgcttcatctgtgcctgccttgggtgtccttg

SEQ ID NO: 27418 - DNA, 514 bp, Homo sapiens
cccaaagtgctgggactacaggcgtaagccatgccccggccaattattcaagtcttaaagcagcagttaatatgaaaataagtgattcaaaaactgttcagttgatgtaaatgattttaacagtagactgcttttcctggtggtttactggattcaaagcttatacaaagatcaaaaaatatatatatatatgttttttaattgtttttttgagacaatcttactgctgcccaggctggagcgcagtgatgcaacctcagctcacttcagtctcgaccaccggggctcaagcagtcttcccacctcagcgtcccaatagctgggactacaggcatgcatcaccacgccaggctaattttcgtatttttttgtagagacgagatttctccacattgcccaggctggttttgaactcctgagctcaagtgatcccttggctgggtgccatgactcatacctgtaatcgcaaagtgttgggattacaggcatgagccacygtgcccagccaagatca

SEQ ID NO: 27419 - DNA, 610 bp, Homo sapiens
tgtttttacctttcgagggaagtgattgattagctctattttacaatgaaccagaggcaatttaagaagattaagtaacttagggtctcacagtttctaaatggtaaaatcattcttaagctcatattttttgacacacaactcaagtatattttgttacactaccttacaagagtttttactctttaaggattacaaaatcacatatgcaaatatgagtataaataaaaaatgaaatactattacaccaaagtcatacatagttaccaggagtggtgggaaagtaatatatttggaytgtttatgaaaacattaaaaattaagtgtataatttcaattttttgtctacatttatttgactttaagaatgaatgattttattcattttctcctgtaggtaccacaagttgatttgggggccttataaaatggattccaaaggagatgtctctggagttctgattgcaggtggtgaaaatggaaatattattctctatgatccttctaaaattatagctggagacaaggaagttgtgattgcccagaatgacaagcatactggcccagtgagagccttggatgtgaacattttccaggttaagactttaac

SEQ ID NO: 27420 - DNA, 478 bp, Homo sapiens
ttatcacatgtttaataatgcttatatagcttttaccttgtgccagacactgttctaagtgttttacagaaatgaactcatataatcctcacaacaacttaataagttaggtagtattatctttattttagacatgagagagctgaatcacaaggagttatatagcatatccaagttaacagagctagtaatagttttatttcaagaaagttttgtcaaaatttgacataatgaaaaattcctcgccaggtactatggctcatgcctgtaatcccagaactttgggaggctgaggtgggtggattgcctgaacccagaagtttgggaccaacctgggcaacatggtctctacaaaaaawacaaaaaagttagctggcatggtggcgcatgcctgtggtcccaatggaaggctgaggtgggaggatcacttgagcctgggcagctcaaggctgcagtgacgtgtgatcacaccactgca

SEQ ID NO: 27421 - DNA, 548 bp, Homo sapiens
tgttacttctgattctttcagagccatttgctaaatcttagtagtacaggcaagtatacatattaaggtgattgaaatattaaaggcagaatgtctttgaagttacaaagaccagatttaaatatcacttaacttagatgagtgaatttactcatagtcacttaaactatttaaatgtgaatttcttcatcttttgaaagaaggaaacaatacttgctattyaaggatcttgtgaaaacaaaatgagataatatatttagaatgtcttgaatgaattcagtagtagctgttagtatttttattaggtgttatgtgcaagtctagagctctgtagctattacaattggagtatttatataatgctctgactatcatagaataagaataccaagctgtagaggctgtttgagagaatggtcacagatagaaggttgtttcttggaaccttatgtttatttagggatatatgattgttttataaatgtggagggaaataaattatttaaagaaaatataaagaaaacagttggataaaagtatttcggatg

SEQ ID NO: 27422 - DNA, 770 bp, Homo sapiens
ttaatcctatttttcctcccactgctatatgttctatgtgaatgtcttccatagtcaatgacaaattcttacatataaaaattttattatataytcctttcactatcaggtatgggtataatgatcaatcaacacttcgaaggtgaattattatgatctctcataattcatgtacatttatatagtatatatttacatagtctgtagtttttctagaattacaaggttattattctaggttgtattatctgttacacaagactaagaatcaagtcataagctttttctctatccccatgtatgtccactagaagtattaataggaatcaactgatttttctacatatttaaaatctctgtatataatatttattccaaagattttttttttttttttttttttaaagagacagggtccttctatgttgcccaggccggtctcaaacgatccttccaccttagccacccaagcatctgggatgagataaagatgtttgttagtaggtttaagtcccataattcccttacttgcaaagagagagagaaaagtcggttagagagtaaatactttggtcatgcacagtagctcatgcctataattctagcactttgggaggccaaggtgtggatcacttgatgagcccagttcaagaccagcctgaacaaaatggtgaaaccctgtctctacaaaaaactggccagatgaggtggcatgcagctgtagtccccaatactcaggatgctgaggtgggaggatcacttaagcttgg

SEQ ID NO: 27423 - DNA, 1155 bp, Homo sapiens
actgtagggaggttatttagtctgtgtaagctataattttttcttcygtaaaatgggggaaataatagtttccatctgaattagtctgttcaagctgccataacaaaatttcatagtctaggtgttttctcacagttctggaggctggatgtttgagataaggtgccagcatgatggggttctggtgagggctctctttctggcttcttgctgtgcctcacataatggagagtgagcaagctcttttgggtctcttctgataagggcactactcttatgaggtggggccccaccctcctgaacttcatctaactctaatcttttcccaaaggcctcatttcaaatatcacactagggggttagcgtttcaacatacggattttgttacagtctttagtggagacaagcaggattaattaatttatggaaagcatgcagcagtgtgcctctaacataaaaaatgtcttatttaacctgtcatcatcatcatcattttgacttggcctaaaatttcgcatatgggctagtggagaaaaattagaactaatttggtgattttgctcttcattgatggaaagtatgtgataacattcattaagaagggcaatgtaggaagaaagagacagttgtaggcatgctgtggagagatgcttccttcactgtatcagtagagaagaagatggttgtcaacctcaggtttatggatgaatcctcagtatgctgtaaatagaagaaaagagatgctttagtgttctttatatctatgtggcctttaaaatgcagtcctttaatttgtttttattcaaatctttattttttattttcttttctctgatttaattgatagatcgggtttttcagtgagcctgggaaagcagaagtaccatttttatgtctataaataatactaaatttattttgctggattttgtaaagttctgtattaaacattatggatcttaaatatattttggtattttaaaattagagtataatcagtttctgttctctagcctttggatttagactttttcttctctaagttaatgagtccaggactgattttgttagcctttctggagctgttaagaattcctattctttcgtttttggtagtcattgtctccacatttgctttatggagtcctctttggt

SEQ ID NO: 27424 - DNA, 1230 bp, Homo sapiens
ttgccttctggcagagtcttagccatggggccctcccatcttggacgatcttttacttagttaacaagcagtgagatgtgcgtgagagggaaagcatcctggctctttcaggcttaactgtgacatctgcaattaaaatggagattttgctccttgagaagagggggaaagctgattaggaaagatgtcaggtataaaaatgagatgtaggcactagagagatttctttttactgaagaattgtctaggggctatgaggacttttcctttaattgaacaaatactttcagacaaagtgtctggcaaagtcctcacatgcacgatcagcagggtatggtccaggatacagaattatccaggcctccttgcagctgaccaaaaagtgatcaagacggagcctgttccaaggacaggcagccccagcctccaagaatagctgaacctgcaacaagacagaccgtagggagggtggcatcgcctcttggctggtctgagttagctttgccattccttgtgttttgaggctccaatgcttgccaggcggaattactgcacagcagggtagtcagaaatcccagcagcctgtccagctccccgaggaatcaaatccctttcttgtgaacaaaagtgctgtacttacaatgctaaagaaagcatcacaatccaagttggcggcacccctgaagcccaaacaccagaaacatttatgaaagaattttgtaagtggatagttcaaaagaactcaaagcagtaagcttggagggaaacatgtttctctttctacttagcaagcactcagagagctcacactctgtgctaagcaccttcccgatacggtctccttcagtcttcctaacacagctaaacacaggtgctattattctctccactttaaaataaagaaattgaatcatagagagtgagtaatttgcccaaggccagatactggactttcttacatttatttcattatctctttttattctgatgttcatatgtctggaatgtggtgggaggtggtggtggcaggcggggtgsgggggcgacgcaatttgttcagtgtttgggacttccaaagttctgatttgaccccagatgcaaagtcttcaccctaaagaagagttgatatgttgtttatcagctgtgacggagacctctgtgaacagcaagaagtgaccataatggaacccaagagtgagaattctctctacacccttgcaaagacgaggc

SEQ ID NO: 27425 - DNA, 1230 bp, Homo sapiens
ttgccttctggcagagtcttagccatggggccctcccatcttggacgatcttttacttagttaacaagcagtgagatgtgcgtgagagggaaagcatcctggctctttcaggcttaactgtgacatctgcaattaaaatggagattttgctccttgagaagagggggaaagctgattaggaaagatgtcaggtataaaaatgagatgtaggcactagagagatttctttttactgaagaattgtctaggggctatgaggacttttcctttaattgaacaaatactttcagacaaagtgtctggcaaagtcctcacatgcacgatcagcagggtatggtccaggatacagaattatccaggcctccttgcagctgaccaaaaagtgatcaagacggagcctgttccaaggacaggcagccccagcctccaagaatagctgaacctgcaacaagacagaccgtagggagggtggcatcgcctcttggctggtctgagttagctttgccattccttgtgttttgaggctccaatgcttgccaggcggaattactgcacagcagggtagtcagaaatcccagcagcctgtccagctccccgaggaatcaaatccctttcttgtgaacaaaagtgctgtacttacaatgctaaagaaagcatcacaatccaagttggcggcacccctgaagcccaaacaccagaaacatttatgaaagaattttgtaagtggatagttcaaaagaactcaaagcagtaagcttggagggaaacatgtttctctttctacttagcaagcactcagagagctcacactctgtgctaagcaccttcccgatacggtctccttcagtcttcctaacacagctaaacacaggtgctattattctctccactttaaaataaagaaattgaatcatagagagtgagtaatttgcccaaggccagatactggactttcttacatttatttcattatctctttttattctgatgttcatatgtctggaatgtggtgggaggtggtggtggcaggcggggtgcgggggcgacgcaatttgttcagtgtttgggacttccaaagttstgatttgaccccagatgcaaagtcttcaccctaaagaagagttgatatgttgtttatcagctgtgacggagacctctgtgaacagcaagaagtgaccataatggaacccaagagtgagaattctctctacacccttgcaaagacgaggc

SEQ ID NO: 27426 - DNA, 445 bp, Homo sapiens
ccaaaaaggcacacatagtcacgattggtgcagcactatcacaatagcaaagacatggaatcaacccatcaacagtggattggataaagaaaargaacataattgcagattatctaaagtaaatgctctaataaaaagatcaggagcctatagtcaagaagaaacctgtctgaagttcagtcaaggtgaggagaaccctaaagtattcttcatcatcgatcattctgaaatatgggattcagtaattcagtgtaatttaaacttaattctactgaggaaattcatgcaaatggcatgtaagtcactaatatacataacctattttaaaattataatatttacatgtacattttaaaagttacaccaatatacattacaaaatttaatatacatctttgaagtaaaattttctgttttataggcattttaaaacagcacgtagaaa

SEQ ID NO: 27427 - DNA, 587 bp, Homo sapiens
gttagcacttactagctcttaacttggagaaaaacacttaatctcactaaatcctattttcctcttttgtaaaataaaaacaacaaaactgtctataacatgagattcttgagagatttaaagaagataatctattcaaactgattttttaataaatagtagactactaagcaaacacaaagaaatgtagcagcgatcttctgggtcagatgacctgaatttgggtatgagctggatgtagataaagaattgccttgaagaagcccaagtccctaaagaataaggaacacacacacacacacacacacatatacacacatctgtttcctctagagtaggggtcccaacgcaccagtctgcggcctgttaggaactgggctgcatagcaggaggtgagtggctgtcrggtaagcattgttacctgagctctgcctcctgtcagataagcagtggcattagattctcacaggagcctgaaccctattgtgaactgcacatgcgagggatctagcttgtgggctccttatgagaatttaactgatgcctggtgatctgaggtggaatagtttcatcctgaaaccaccccc

SEQ ID NO: 27428 - DNA, 543 bp, Homo sapiens
cccctcccccagcttttctggaatctgtttccttactttctttcattttatccaacacctatctgcccttcaaagtccaccttgattgttaggttcatcatgttcaccatctcactactcctcttcacttcagaagaccacacttaagtctctaccagcaatgtaacatgtagctaccaattgattggtttacttttcaggagcacatgagttgtgtaaaataagaaatacctctaaatgttcatttggatgataatgattcttaaatgcaagacttatgtacatttatgcttgcttataaccttttatttttcataattccagttttctagcaactctcctaggttaagaaatgaagaagttggattaggtatctcatctttagaatgttttcaccattaagatttgaataaattttcagartgcatagttgatcacgtttatgtgtgtgatacatataaaatatgtgtgtgatacatataaagtaacaatattttttaaaaagaatctcatatcttattaaatcaagtactgaatatgaaa

SEQ ID NO: 27429 - DNA, 528 bp, Homo sapiens
gcaggatgcgcatgtttgttacataggtaaagaaccctcttctatataaacaaatacattcatatggaatatatgtgtccctgtcagaaaaaagaaaaagaaaaagaaaaagaaaaacagagcaagatccttgttaaaaattgcaagacaaaytttattttgacaactgaagaaggggatagtgactacagtatgaactgagcttaactccaactaagacaaaggtaactgagacttttaaagaaaatctgtttatgaataaaaagggaatatgaggaaatcaaaataaggaaaccaaaaagagagtagtgggctatatggaagtagaaaattacataaaaattaagtgtaaaatgattgattattagacaagattagttagggtaattttggaatttggcagcgtcacattttattgagcaaagcctcagcatgaaggctagggtcaccttccaggacaaatccatgacatagtgcacatataagctggactaaacttggctaagtctcttagcatggtgtttaggc

SEQ ID NO: 27430 - DNA, 528 bp, Homo sapiens
gcaggatgcgcatgtttgttacataggtaaagaaccctcttctatataaacaaatacattcatatggaatatatgtgtccctgtcagaaaaaagaaaaagaaaaagaaaaagaaaaacagagcaagatccttgttaaaaattgcaagacaaactttattttgacaactgaagaaggggatagwgactacagtatgaactgagcttaactccaactaagacaaaggtaactgagacttttaaagaaaatctgtttatgaataaaaagggaatatgaggaaatcaaaataaggaaaccaaaaagagagtagtgggctatatggaagtagaaaattacataaaaattaagtgtaaaatgattgattattagacaagattagttagggtaattttggaatttggcagcgtcacattttattgagcaaagcctcagcatgaaggctagggtcaccttccaggacaaatccatgacatagtgcacatataagctggactaaacttggctaagtctcttagcatggtgtttaggc

SEQ ID NO: 27431 - DNA, 613 bp, Homo sapiens
acctgaaaggtacaattattcaactactaactataaactgtacaattctgtattataaatgagactctaaggactgattcataaatattccaaatcacaatactagactccagaatgtcagtgattcttaacccccagcttttattttttattttattttttgaaaaactactggaaaactctgacaaattttaagtgaagcaaaaagcattgtagagtaacgtaaatgtagatataaaattatcccaactgtgagtagcttttcctcagtactcatagttagggaagtaaaccactaatggcttcaaactaaaagaattctacagaaaacctgcctgaaataaacacaagtgatttagtagaacaaaaatatagattaaaccctagtggtgccacttttccaaggacttatagtagcaattatagtattataagtgaagagtctgggtatatgttttaacattatctccctgactacaatgtaatagctccttttcttttctccattacacacatrcagacacatacctacatacacacacatatttacacaaatatccttaacagaggccaactatctcatacatcttcttgcaaagaaacagtgattgag

SEQ ID NO: 27432 - DNA, 1048 bp, Homo sapiens
tccgacaatcattatcacatgactttttatcccttggaaaatgattttcttttcataaatcaattcaagctattgattaaaataagagctgaaattccaaaagtaaaaaaaatttgcattgtagctagtaaaacaactaaacgttcctacggagaaaaataatcttatggatatttttctgttgcctctgggggaaaaatacaaagaaatttaatgatgcaagcaatgctatcaaataagatacttttcagtgcttaaactgattgaaactgagtctggagatgcagctggcatcatttccaaataaatatgtatttctcagaaaaccctattagatgyttgacatgctctgtcatttctgaataacctactactgaaatctacacatagaaaaaattaataaactaattgtttctgcttttactatagtagctgagttacaaagcagggggctgaatttgtttaagaaacaaaagattaagagaaacttttcttaatatgatccccatggagcaaagctcctaaggatgttccagaagaaaaactacgccctctaccaagaccaccaaaggtattagaatttgtcaagagttttagtgactggtggtagaacttaatgtggaaagttaacggcctaaatgaaaccatgccccacaatctaacttacctgctttatatgaagaacgcaccaaagggccacttgcagtataatgaaatccaagttcatttcctactttttcccagtatttgaatttttcaggagtaatatattcttcaacctagatttaaataattacttctgatcagattttagaattccactttgattctgcagaaagtctatacctatgtatgcagaatgctcttcactgcgtaatttatcttgcccccacccccaggcttttgtcctctccctcctccctgactacgtgtttactggttactttttggccactctattgggatgtaaatacagggaattacagagacagggaagcatatcaattttgtgctacaatggctattccaaaggacagagaaagaagag

SEQ ID NO: 27433 - DNA, 1048 bp, Homo sapiens
tccgacaatcattatcacatgactttttatcccttggaaaatgattttcttttcataaatcaattcaagctattgattaaaataagagctgaaattccaaaagtaaaaaaaatttgcattgtagctagtaaaacaactaaacgttcctacggagaaaaataatcttatggatatttttctgttgcctctgggggaaaaatacaaagaaatttaatgatgcaagcaatgctatcaaataagatacttttcagtgcttaaactgattgaaactgagtctggagatgcagctggcatcatttccaaataaatatgtatttctcagaaaaccctattagatgcttgacatgctctgtcatttctgaataacctactactgaaatctacacatagaaaaaattaataaactaattgtttctgcttttactatagtagctgagttacaaagcagggggctgaatttgtttaagaaacaaaagattaagagaaacttttcttaatatgatccccatggagcaaagctcctaaggatgttccagaagaaaaactacgccctctaccaagaccaccaaaggtattagaatttgtcaagagttttagtgactggtggtagaacttaatgtggaaagttaayggcctaaatgaaaccatgccccacaatctaacttacctgctttatatgaagaacgcaccaaagggccacttgcagtataatgaaatccaagttcatttcctactttttcccagtatttgaatttttcaggagtaatatattcttcaacctagatttaaataattacttctgatcagattttagaattccactttgattctgcagaaagtctatacctatgtatgcagaatgctcttcactgcgtaatttatcttgcccccacccccaggcttttgtcctctccctcctccctgactacgtgtttactggttactttttggccactctattgggatgtaaatacagggaattacagagacagggaagcatatcaattttgtgctacaatggctattccaaaggacagagaaagaagag

SEQ ID NO: 27434 - DNA, 1686 bp, Homo sapiens
tgtaagagatcaaataaaacatgttggacattcactattataagtggtagaaaatgcactgattatgtgaatcaaccaaacttggatcaattctaaaaataaaacactcagggaatatgcttttgtgaacaggaagatagggttattaataatcacacttactgtatcaggcttcaatttaggagytgaggaataatgagtttttcctatttacaattaagtttccaaacttcctgggtcagcttttttcttaagcactgaagtgttcctggataaatggcctctaaggcactatagaccatcattttatgaaatttttatatatgaataatggtgaatggcagatgatggcaaataaataaaaatgacacctctagtatacaattactactcatgctaagattttttttttaaagaatgtgattgatctgcttttgtgtttaatatctttaaaaaattggttggctaatcttgaatccttataaattctaaatgagaagcagagggaccccatttttcccataggagccttgatgattctagatgactcaaatgaattctttagtatagatatctttcctgtcattctaatattaccagaagtatgtgagtctttggattgaaaaaacatctgattcaaattataaacacatttattccaattaattttcttttacttgctgaaatcaccagtacagaatactggccacctcaagaccaccccctttgccttgagattataagaatttgtgtcatatcagaaatcagaccccaatcattccagctctttcatgctcctgctgctactgcatagtcctttgatttcacaaacatcatttaatttcttccaactcataagccaactcctgagtttactttttctccatttagttgaaatttatgatggataatttaattcgatggtactcaaagtaggctcggtggccagcatgggcattatctggtaatttgttagaaatgcagaatctcaggcacttcctgatctgcattttagaaattacttaaaaagatccccatgtaatttgtatgcacattgatggttgagaagccctaacgtcaaaatttcttcaaccagtttcattaactcacatatactttctgggtcagctttgttcttaagcactgaagtatccctggataagtcactttagatgccccccatcactttatgaaattcttccatatgagtcatggtgaatggcagatgatggcaaataaagaaaaatgacatgtctagtatatacatttgctactcataacatggtagtgctggtgtagttccacagcacattgaaattacttgttcatactcatcacatctaaacaatattttgtgagcagctatcattttatctttttaatcttagcaagatgctgttactagcatgttctagcaacagtgttgttgagttcaagttaacttctctctaggtcatgaaccaattaataagctgcttatgacatagcaggatcagtaactattctaaaatatttgcatcttaatggaagattcctgaagaaaaatgaatttaacctaaattattaatagtaatactgtgaatttttgagaagttggctgagttgaaaataattttgggggctgttgggtgaaattcacccctgatatttcacgtagattcttttctattttccttaagtgtcagc

SEQ ID NO: 27435 - DNA, 559 bp, Homo sapiens
tatacaatagtagaaaaatgtatttcttctatctgaatgcctctggtgaacttctctggatcctttaagacttcctgaatattttatacattctctagttatagcatatactgcatatattaaaatgatttactcatttttccactagattgtgagcttatgtagtatttgttatatggttccatgtttctcctcccttgttttggtactttcaaataatagtagacactggagaaatgtttactgcgttaaaaacaaaaacaaaagtggttaactttgagataatgtggctataatgtgtttatgaaataawaattccatgtagaaattaccctcttttaccagataaattgtaccaaagacagagagttctgcttcttgaatggcagcaaacaataggaaaatgggactaaattccatttacagtagcattaaaaaccataacacttaggaatacatttaacagaagtataaaacctgtatgttgaaaattaggtaatattgatggagagaaattaaagatctaaatagacaaatttaccatgttcttgggttggaa

SEQ ID NO: 27436 - DNA, 559 bp, Homo sapiens
tatacaatagtagaaaaatgtatttcttctatctgaatgcctctggtgaacttctctggatcctttaagacttcctgaatattttatacattctctagttatagcatatactgcatatattaaaatgatttactcatttttccactagattgtgagcttatgtagtatttgttatatggttccatgtttctcctcccttgttttggtactttcaaataatagtagacactggagaaatgtttactgcgttaaaaacaaaaacaaaagtggttaactttgagataatgtggctataatgtgtttatgaaataataattccatgtagaaattaccctcttttaccagataaattgtaccaaagacagagagttctgcttcttgaatggcagcaaacaataggaaaatgggactaaattccatttacagtagcattaaaarccataacacttaggaatacatttaacagaagtataaaacctgtatgttgaaaattaggtaatattgatggagagaaattaaagatctaaatagacaaatttaccatgttcttgggttggaa

SEQ ID NO: 27437 - DNA, 604 bp, Homo sapiens
ggattacgggtgtgagccactgcacccgacctatttaatgtttttgaatgagtgacagccttagatattgagcagactattttccaaagattttttttttaaaggggaatgatagttctctgtcatactctaaaaacaaagacattttggtcattcawtaaagaccatacaatgctcataaaattgcaaagggaaaacaacaatcctgccaagagcaaacagaaaggtaaagtgccaagtctctctgcaattagttttttaccaagtgctagaagtgttggtagatatgtgtatgcagggccctgaaaataagcaaatgaacatgtttaacctctgggccagatgagctggatggaagtgtcatgttagattgcataatgtcctggggaagccacacaaggtgtcagtacaaactaggctggtacccatcaaatattagattcaccagctaagaaaggcattgccatccaattaagtgactttctaaaaggaaaaaagaacatgataattctatttcagtgagctgttgcttttggaaagtatattgtatgagatgtaaaattatccactgaggagagacttacagagtgaatctacatcatgt

SEQ ID NO: 27438 - DNA, 604 bp, Homo sapiens
ggattacgggtgtgagccactgcacccgacctatttaatgtttttgaatgagtgacagccttagatattgagcagactattttccaaagattttttttttaaaggggaatgatagttctctgtcatactctaaaaacaaagacattttggtcattcaataaagaccatacaatgctcataaaattgcaaagggaaaacaacaatcctgccaagagcaaacagaaaggtaaagtgccaagtctctctgcaattagttttttaccaagtgctagaagtgttggtagatatgtgtatgcagggccctgaaaataagcaaatgaacatgtttaacctctgggccagatgagctggatggaagtgtcatgttagattgcataatgtcytggggaagccacacaaggtgtcagtacaaactaggctggtacccatcaaatattagattcaccagctaagaaaggcattgccatccaattaagtgactttctaaaaggaaaaaagaacatgataattctatttcagtgagctgttgcttttggaaagtatattgtatgagatgtaaaattatccactgaggagagacttacagagtgaatctacatcatgt

SEQ ID NO: 27439 - DNA, 586 bp, Homo sapiens
ctagaagttgactgtacatttcactctatgaatagccatattcatgtttatctttcagaaggcratcagtgtcagaatatcaagtagtataatagagtctgacgttgtccgaaagacttcttgttagtgttcatgaaatatcagaaagttaacgagccttaagtagctctcttgggtggtgtagggttattttagatttcgagactttggttaccaaatgagggatttggtaaatttcagttaaatttttcagatagtagatgaaattgtgagtagttgtcggggtggtttattttcccctctacttaagattacttcttagactcatgattgaatccatttttctagaagttaccataatgagagctatgtttcacggactaaaatactttctctaaagctgctagccaatagatgattgctaagaaattttccagtcaactagggtcaaagggatttattttcacagttatgtttacttacttttctaataataagaaagggtaaatataagttcatacaaacaaatataattgtgcagttaagatgacagataattaagggaaagttttcgtactaattttgc

SEQ ID NO: 27440 - DNA, 628 bp, Homo sapiens
ttttttttacattttagaaaaaattattgaaaaaataggaaggtgaaaattgaaggtaatatcaaattgcccttttactcctaacctgaaatcacttgtggcacagccaaaatrtataattctatacacttatgaaaatgaaaattacaaattcaaagtgataggccacagtggcaaatttagcattaatctctggaaagattttatcttccagcttttccctttcatggaaaagcaatctatagaagactcacaaatcacttatatgatactatgtaaaacatgccaaaaatctttacaatctttcattctgttacttgatttcatcttcttcattgattttcaacatgaatctatttctttattctaggaaattatacctattgttatttcctttagattaagttatttgcaccataaactatggtatccaaataaagcaagtcatttaaaaaacattaacttttaagcagttatgacaaggtgttgaaatgttatcatcagagaaattgagatttataatgaagaggaagcttaatggacttatgctcacttattcatagtaatatagatttggagttatttgatttgtataataggaaaagaaaaatacacatgaagagaaaaa

SEQ ID NO: 27441 - DNA, 628 bp, Homo sapiens
ttttttttacattttagaaaaaattattgaaaaaataggaaggtgaaaattgaaggtaatatcaaattgcccttttactcctaacctgaaatcacttgtggcacagccaaaatatatrattctatacacttatgaaaatgaaaattacaaattcaaagtgataggccacagtggcaaatttagcattaatctctggaaagattttatcttccagcttttccctttcatggaaaagcaatctatagaagactcacaaatcacttatatgatactatgtaaaacatgccaaaaatctttacaatctttcattctgttacttgatttcatcttcttcattgattttcaacatgaatctatttctttattctaggaaattatacctattgttatttcctttagattaagttatttgcaccataaactatggtatccaaataaagcaagtcatttaaaaaacattaacttttaagcagttatgacaaggtgttgaaatgttatcatcagagaaattgagatttataatgaagaggaagcttaatggacttatgctcacttattcatagtaatatagatttggagttatttgatttgtataataggaaaagaaaaatacacatgaagagaaaaa

SEQ ID NO: 27442 - DNA, 628 bp, Homo sapiens
ttttttttacattttagaaaaaattattgaaaaaataggaaggtgaaaattgaaggtaatatcaaattgcccttttactcctaacctgaaatcacttgtggcacagccaaaatatataattctatacacttatgaaaatgaaaattacaaattcaaagtgataggccacagtggcaaatttagcattaatctctggaaagattttatcttccagcttttccctttcatggaaaagcaatctatagaagactcacaaatcacttataygatactatgtaaaacatgccaaaaatctttacaatctttcattctgttacttgatttcatcttcttcattgattttcaacatgaatctatttctttattctaggaaattatacctattgttatttcctttagattaagttatttgcaccataaactatggtatccaaataaagcaagtcatttaaaaaacattaacttttaagcagttatgacaaggtgttgaaatgttatcatcagagaaattgagatttataatgaagaggaagcttaatggacttatgctcacttattcatagtaatatagatttggagttatttgatttgtataataggaaaagaaaaatacacatgaagagaaaaa

SEQ ID NO: 27443 - DNA, 628 bp, Homo sapiens
ttttttttacattttagaaaaaattattgaaaaaataggaaggtgaaaattgaaggtaatatcaaattgcccttttactcctaacctgaaatcacttgtggcacagccaaaatatataattctatacacttatgaaaatgaaaattacaaattcaaagtgataggccacagtggcaaatttagcattaatctctggaaagattttatcttccagcttttccctttcatggaaaagcaatctatagaagactcacaaatcacttatatgatactatgtaaaacatgccaaaaatctttacaatctttcattctgttacttgatttcatcttcttcattgattttcaacatgaatctatttctttattctaggaaattatacctattgttatttcctttagattaagttatttgcaccataaactatggtatccaaataaagcaagtcatttaaaaaacatwaacttttaagcagttatgacaaggtgttgaaatgttatcatcagagaaattgagatttataatgaagaggaagcttaatggacttatgctcacttattcatagtaatatagatttggagttatttgatttgtataataggaaaagaaaaatacacatgaagagaaaaa

SEQ ID NO: 27444 - DNA, 628 bp, Homo sapiens
ttttttttacattttagaaaaaattattgaaaaaataggaaggtgaaaattgaaggtaatatcaaattgcccttttactcctaacctgaaatcacttgtggcacagccaaaatatataattctatacacttatgaaaatgaaaattacaaattcaaagtgataggccacagtggcaaatttagcattaatctctggaaagattttatcttccagcttttccctttcatggaaaagcaatctatagaagactcacaaatcacttatatgatactatgtaaaacatgccaaaaatctttacaatctttcattctgttacttgatttcatcttcttcattgattttcaacatgaatctatttctttattctaggaaattatacctattgttatttcctttagattaagttatttgcaccataaactatggtatccaaataaagcaagtcatttaaaaaacattaacttttaagcagttatgrcaaggtgttgaaatgttatcatcagagaaattgagatttataatgaagaggaagcttaatggacttatgctcacttattcatagtaatatagatttggagttatttgatttgtataataggaaaagaaaaatacacatgaagagaaaaa

SEQ ID NO: 27445 - DNA, 648 bp, Homo sapiens
ttctggagccaaacacaatgtccatggtttgacagagtgaatggagacaggaaaacatactttctcaaaagagcaaaattgcttttccatcctcattcttctggtctgtccactgtactgcagcaatattaaccaacttgatctttccttttgtcacattcttaccaccatatttctaccttaatttattttttagcatcagactttcatgcaattatttaatttttggtttcctaccacagattatgtatgacttatccagtgttagtagtaatactacaaaataaacaaacaaagtgacaatttgtttagccttgagtctatagggttttgctgactggaactaggattgactgacaaggctatgcttaggtggtctcacctgggcttgcatatgcctctgcagccaacaagaattagcttgaaggtgctgctcatcttggctagctcactcacatgtttggttgagggtcagctaccggttgcctaacctaggatgtcctcatctgggctgacttgagtagtttggctctgttcctcatatccctttcttcaacaggcaagcctgagtatgttcttcccattstatagatgctccttgacttctgatggggttacattccaataagcctattgtaagtgaaaaat

SEQ ID NO: 27446 - DNA, 599 bp, Homo sapiens
atatccatatgtatttggaattatgtaggaaaatgcaactgaagagtttctctgcagtgggcttgatgaatgtgttcctgggatgaagaaattagccagctgtctgagaaataaaaagattacaaagttttaccagttcttgaattaattgactttctcagtttgtaatgagatctgaggatgactttcagtgcaattgagatgatcctttttgatctatctcagggtttctcaacctcagcactattaacatttcgaacagataataattttatatgaggagggctgacctgtgcattgtaggatgattcacaggatccctggcctctacccattagatgccaatctcrgctccccattatgacaaacaatatctccaggtgttgccagtatctcaaggaagtggtgcaaaatagttcccagttgaaaaccactgatctagatgtatacacttcagagaaatgcaaacttttcccttattttatggaatgcaaatgaatgtctagcctttttctgaatactgagcatcttcattttgttgtggttgaagggaaattcctaagtgaccactattctgtgctttctttcagaaccattaa

SEQ ID NO: 27447 - DNA, 1057 bp, Homo sapiens
tatatatatgtaaaaagagacagacagaaagacagaaaaaattctgtatagctgtaaattcatccctgtagttcaattcccttagtcaggagaaaagaaattgggctacagttccttttcattaaaattgcatttgaactattacacttggcttaaatatgattatactcttttctcaaataaatctgtttcttgttaaaaaaatgtggattttatgcactrgatcataaccttaagtctttcctgagcacactttattaataaaaattaagtgttaacaatgtttgtaaaaattctacagatataatatgttgtatgctttcacgagtgtaaaaataaaagttagattctttgtcattaagaagggccaagaaaaggagagtatgaagacttctgtgtaacacccaacactgtgattcttcatgactaatgaatgtacaataaacaaaattcaaaaatggggctagagggagccagactgatctgaagcttctggttgaagcaaactaaaccagggctgagttatgcttgaatcccataggtaaggttgtttaatgacacttaaaaatagcttgaacagatatcaattataggagaaatgactacaaatgaatcagaacttatcaaattgttggtgccttggacagtgttaaaagtccctgaaataataagtgaagactatctgagacaggcgtttggctaaagtggagggaccttgaaggcccactcagttctcacatccacaaaatctttcactactgatttgtatctgtaacctcaatcagtcttatatggtaaattctgatcttcttggttaatcaagtggatatattgatccctggattaaacagaatgagcttaaagtatagataatgtaaaactaaaaataagtatagatgtaatggctattacaggtgtcacggtcaactgttctgttgcaagttagttgttgggggacttcttttgttttacatgtgttcaaattcatcaaaaaatagaatcatattttaaatattttagataaaatctacttatatccaataatgtgaatatttaa

SEQ ID NO: 27448 - DNA, 650 bp, Homo sapiens
tgggaaaagccaatttcttcatctgggtccatgtgctgtgaaacagagacagagacagaatggccagatggtcccaaaactgacctaatttgtcagaaagtctggcttaatcatatcaagaacctaaaacagtggctggtgcatagtagctgctcaatacatatttgatcagaattaatgaatgaattcattaggcatcggtgattttgagatgccccttgagaaccatgaacatcttctctcaggtagtcatagttactagggtattaaaatgagttttcaagcaatctaattgaaattatatacatcaataaaacctttgttaatgtctagcttatatttacattaatatttaacacttttgaatattaaagttttaagagtaaacacgactgtgggtactttttcaaaccttaaagtatcctattttgctctcttttaaatacctattgtacagaaaatcaagaggctttcaaaatcacttttaaaaataaaattccaaggcataatttacaactrtgggaatgaaaacagtttatagacactcgagttaaaccaaaatcttcactatccatgccgatttcaaagtattaaagtgttaagcatgacaaattgcctcaaaatgtagtgccttaaaacaataaatatgt

SEQ ID NO: 27449 - DNA, 510 bp, Homo sapiens
agtcattcttggaccaggaagaaagtttccttagagaagaaaggagtagaaaaaggaggaggagaaggagatggaataagaggaagaggaataagaaagagaaggtgaaaaagaaagattgggaagggaggagaaaaaagcaggagggggaagaggaaaagaaacagctgttatcgtccatgctgtatagttcagttgtttttcttattgctctgactgggtcatgtgctattcctgatttgatcactgtatcaaggaaattctatgtcttacagggcagacccaaggcacacaggcacataggcacataaccattcctggtctaggatagcttcaacaccttgaaagcatatggactcaagtggaagaagagtgaggtaccagagaaatcagagttgtggttccctaaagcatgagttgattctaggtagccaaaaacagatacccactaacagaygtctataaatatatatatatatatatatatatatatatatatatatatatata

SEQ ID NO: 27450 - DNA, 605 bp, Homo sapiens
ttccagcttcttaaatagaagtatttcttctgtttaggttgattcaaaagataaccttttgaaaagataacctttccctcaagggaacatgcgaatcccatgatttctgtggaatagtataaaacttgtattttgtttttgctcctgttttaggggacatctttaaagatattctgttttaagagtatatattgtgctaacttagtagcgttctggatgaatgggttggtaaaatattggggaccaaaaattaagaactgtaaattcagaaaagtttaagaaactcaattatttatttttactttacctgcctgtatttgcagtwacctaccattaaatacttcagaataaattcaatgtttctatgtaaaattatttgaagttattagaatatattctattagaaaaagcaacatggtaagttacatgaatgagtaaattcatatgcagacattcttctttccagttggtttcttttttagttcaagaaaaatgtggagtacaaggtaatttttttttttttgtcacagagtcttgctctgtcacccaggctagagtgcagtggcatgatctcggctcaccgcaagctccatctcccaggttca

SEQ ID NO: 27451 - DNA, 605 bp, Homo sapiens
ttccagcttcttaaatagaagtatttcttctgtttaggttgattcaaaagataaccttttgaaaagataacctttccctcaagggaacatgcgaatcccatgatttctgtggaatagtataaaacttgtattttgtttttgctcctgttttaggggacatctttaaagatattctgttttaagagtatatattgtgctaacttagtagcgttctggatgaatgggttggtaaaatattggggaccaaaaattaagaactgtaaattcagaaaagtttaagaaactcaattatttatttttactttacctgcctgtatttgcagttacctaccattaaatacttcagaataaattcaatgtttctatgtaaaattatttgaagttattagaatatattctattagaaaaagcaacatggtaagttacatgaatgagtaaattcatatgcagacattcttctttccagttggtttcttttttagttcaagaaaaatgyggagtacaaggtaatttttttttttttgtcacagagtcttgctctgtcacccaggctagagtgcagtggcatgatctcggctcaccgcaagctccatctcccaggttca

SEQ ID NO: 27452 - DNA, 622 bp, Homo sapiens
ggtccactgggaggacaggaggaagtgtttgctgggatttagggagctgaacccagctcaccccactcacccaaggtgggagtcatgattcttccagccccaagaatcaggaagacccaaaacatcaaccccattcacagtacagaggcccggagtggttaagtgaattgcctgaggtcacacagcccacaagtagcaaagccagggcctgaacctgcaattgggctcccaactgtctggaggtgcacagcacagggacccacagaaaaaggagccctttttccctctgcctgaggcctccccattcctcccccaggaccctcctgcaagcccaccattgagggyggtgatgtcgggggttgtgcgggcaactcactggtccgagccacctcacgccgggtgagatagtccagaaagcgcccagccagtccccggccaagaaagagtttcaccagcttggtggcaaggtcctggcggcagtcccccaaggtcagctcttccagcaaagccaaggggctagcagtgtcctcctgggtgggggcgggagacaaagatgacctcggcccctgggaccccaaagcagatgggcctagatagggctccgtgaggcagggggaggcca

SEQ ID NO: 27453 - DNA, 622 bp, Homo sapiens
ggtccactgggaggacaggaggaagtgtttgctgggatttagggagctgaacccagctcaccccactcacccaaggtgggagtcatgattcttccagccccaagaatcaggaagacccaaaacatcaaccccattcacagtacagaggcccggagtggttaagtgaattgcctgaggtcacacagcccacaagtagcaaagccagggcctgaacctgcaattgggctcccaactgtctggaggtgcacagcacagggacccacagaaaaaggagccctttttccctctgcctgaggcctccccattcctcccccaggaccctcctgcaagcccaccattgagggcggtgatgtcgggggttgtgcgggcaactcactggtccgagccacctcacgccgggtgagatagtccagaaagygcccagccagtccccggccaagaaagagtttcaccagcttggtggcaaggtcctggcggcagtcccccaaggtcagctcttccagcaaagccaaggggctagcagtgtcctcctgggtgggggcgggagacaaagatgacctcggcccctgggaccccaaagcagatgggcctagatagggctccgtgaggcagggggaggcca

SEQ ID NO: 27454 - DNA, 961 bp, Homo sapiens
cttttttggattgacttctgttcccttcatgcttctttctgcagtctccaagcctctggcaccatccttctcgatgacgttagatgtcctatcccaagccatttgttgcttgcatttttaggctcgagagactaaagagaactatactaactgcctgtccttctggggccaggggcaggggagcccagtctaggagaccccccaacctagacacatgtagcaaacaaaaacccagatgtaagggggtaagtgggtctggggccttccactgggtggaatgtgggagaagagatttgggagtgtcttggctgttacacatgcagggcagaggagagagaccagtgaaggttgggaggaggcggccaaaaggagacagcttcatgcccccaggacataaatagcccggctgctgcaggtactcacatgaggtgacacgactggggacagaacaggctggagcggcgggggcgggggcgggggcgggggggcgggtaatcttcagaacttcagtatgagattttccccaagcacagatctaggtagtccaggaaatctctctggcggagcgggcagacagaacggtaattacgagtcggtagtcccgagggatgccttgtgacctgggctttcagcttcagagctgaaaagcctaagtgcttatctgtagatttctcctctcagcccacagccccagctcatggtacagcaaggcctgcaacaacaggcaggtggacctgggtagcagaggcctgtagagtttggcagaggcgcctcatgctcttatttgcagccctttgcctgtgattagtggtttggcttgggaaaccttggaaagggctcagagaaccaagctgctgattaacgccacagctggtcaacacagcggacagctgaccgccgaggyccctgtggtctgtggttcctgcctttcaggctggtgtgggactggggtgttggtttg

SEQ ID NO: 27455 - DNA, 1080 bp, Homo sapiens
tccctcagggatttttataaacatcaaagtttaagatgtgattactagatgaacgtttttgtcagtgaaataaaattacctatttccccaacttcttttagctgaactaaggcttatttttaaagtgttggccgggcgcggtggctcacacctgtaatcccagcactttgggaggctaaggtggrcggatcacgaggtcagcagttcaagaccagcctgaccaacatggtgaaaccccgtctctactaaaaatacaaaaaaaaattagccaggtgtggtggcgggtgcctgtaatcccagctactcgggaggctgaagcaggagaatcacttgaacccaggaggtgaaggttgcagtgagccaagactgcaccattgcaccccaggctgggtgacaagtgcaagactctgtcacacacacacacacacacaaagtgttgtgttttgtactcaagtagaaaattcctggccacttctgcacctgattattattactgtgaatctctctcttttaggacatgtgcccactggtctcaaatgccatcctgaccaggagcatatgatttatcctcttggttgcacagtcctcattcaggcaataaatactaaagagcagaacttcctacagggtcatggcaacaacgtctcctgcttggccatctccaggtctggagagtacatcgcctccggacaagtcacattcatggggttcaaggtgaatacagtgaaaacgactcattgtcaatttatctagaggtgcctccctagaagaactgccccacttcaagttgttagttctatgtggcaatgtgctttattcttccttcttcttctttttgacttctcttttaacccattttcattccgtcagaccgggagtgaaggactctgatgattttatacccgaggttgcagcttgtgactgataatgctcacaaacaaaagttcccgcttaaagctgtttccattgtgttgctgtcatgtttgtagaacctgatccgatttctagaaaagtgatagagcgggctgggcgcggtggctcatgcctgtaatcccagcactttgggaggcctagacggtc

SEQ ID NO: 27456 - DNA, 419 bp, Homo sapiens
tgctttggacaattgttttagatactttggagagaggtgactaatgaacagtacattgtttaattggatgcaagagttaggagatgaaaaagagaaagttgtcgagaaaaaaatcaattaatgtacagaaaaatgaattttaaacaagattgtatacgtaaacaatatgtacagtgaaacgtcttgtaaatgcatgtatatatgttgtgaaaaattcatgagactgtataagcaaaggattaacatccagcctgggctgttgcaggtcagtctgggactgaccctaggctcccacagcactgtttccttggaaacactaactttaagatgaatgggaaatgttgggcctggctttgtcgtgtggaactgcacctcatcgcrggagctgtcagttggaatacagtccttggatccacgtg

SEQ ID NO: 27457 - DNA, 435 bp, Homo sapiens
gtagaagtgtatgcagaaaaaacaaagtcctcaaaaaatgaaaagacaataaagtatcattctgaaaatcatctagcataaaatttagttatacttcctgcctatcatgcttctcttaaactgcaaaattttagtatgtagtcataacagaaagggtattttataatcaccccagtttctccttctaaatgttttactacaaaataatacagggaacaaaaagattaagctttgccaattttgaaaaacttttrtaggaagaactgtttcatcgtttacttatatatctaagtgctggccaggcacggtggctcatgtctgtaatcccagcactttgggaggctgaggcagaagcatcgattgagctccagagttcgagacccgcctgggcaacatagagataccccatctctacaaaaagtggaaaaaaaaaat

SEQ ID NO: 27458 - DNA, 435 bp, Homo sapiens
gtagaagtgtatgcagaaaaaacaaagtcctcaaaaaatgaaaagacaataaagtatcattctgaaaatcatctagcataaaatttagttatacttcctgcctatcatgcttctcttaaactgcaaaattttagtatgtagtcataacagaaagggtattttataatcaccccagtttctccttctaaatgttttactacaaaataatacagggaacaaaaagattaagctttgccaattttgaaaaacttttataggaagaactgtttcatcrtttacttatatatctaagtgctggccaggcacggtggctcatgtctgtaatcccagcactttgggaggctgaggcagaagcatcgattgagctccagagttcgagacccgcctgggcaacatagagataccccatctctacaaaaagtggaaaaaaaaaat

SEQ ID NO: 27459 - DNA, 708 bp, Homo sapiens
taatactttaccgcaatgaaaatggataaactacaattacatacaaccatatggatgactctcaactgcatagtgttaaatgagacaagtcaattcaaaaagtacatgtatattggatgatatcatttgcataatattcaaaaactaattatgaggctacaaatcagaatactggtaaggcttggggagagcagtattgagaagagggaaggagagagtgtgcagtttctggagaagttctgtttcttgttcctyttgccagttacaccattgaattcatttagtgaaaaacttatcaaacaacctactttttattggtgtacttttctaggcacatgatgtacttggataaaatatttactgtaaaaataagtggctgaaataaaaatcagtgttacagatcttgaatatttcctgtgaagagacaaagcttacatgacattagtgagcaaaaatttgtttacttgtaatattgtaccaattattaaaaacacttcccatatctcatctactgtctatctttccttgataacccttagtgcagtgaaataaaatcttagtaatcaattattgttggctgatgcaaaaaggacagaattagttctaagagtaatgaagtgaaacagtatatcaaaaaaagatagaacattaggtactaacaaactactttagaatattttttggtttaaaaatattcagaaatatgca

SEQ ID NO: 27460 - DNA, 540 bp, Homo sapiens
aggattattttgaatgtgagaaataatatctttaatttgattttcttttgttagctaattaaatggtaactaacttttattcatataattagtatggtctcatcacacaaggccctttgcaacattgctcctacttctatgtctaagttctgcttcactttcctatgctccatccatttcaatcaccccagacgtctctgtataatttggccatgtcctatcacaactctaatcttgtttgtattcctggaatgccctgaaaaactcctactcagacttaaaargccagctcaaatattgtgttcttcgtgattcttttccttcttcattgaggtagagtctaacacttcttcacacaccactaacaaactaggtttgaaatgttacttttgtacatttaagaaccttttttacatttttcattttaaaaacattttaatagcaaaaatattataacagagaggagtacatactaacgaatgtaatttaaataagatttattgtataaacatagatgttttaataactgtaatctggaaa

SEQ ID NO: 27461 - DNA, 541 bp, Homo sapiens
ggactatggaaaaatcagctcttcctttcaagaatttaaagttaactctttatgattccactttacaaagcttctaattttgtcattacgttgagttaaaaactgactacttttgagcttaagtctcatctcactttagcccaggtgagtaccactacacctggtctttttctgtcctgcagcagtgccattgtctaggatttgagggcccagtcttgcatcttctagctatacccagaattcaaagttccttttggtaaaagtgactgcaggtcctccatgccaattcaccactcccactatgattcacctattttctttcaggacagtgcttatcttttctttgttttctgaacatcatgggaacacaggaytttctgatttctgagagttttcaggatagttttgaagcctcttgcacaatctaagggttcagtagtgtcttgtaagaactgttcacgtgatggtggctcctcaaatctccatactcaaccctcctgacctcaagcagtttagtatttttttctagtaattatatttt

SEQ ID NO: 27462 - DNA, 631 bp, Homo sapiens
tagtttcttatgtctgtgtgaattcttaaaatctatttatatcctcttgcgatttcagtgagccaataaataatattctcctgtcctcttcaatagcaaattcagaagtcagtggaaaattagatactggtatcatgtcttagcttgttygggctgctataacaaaaatatcctagactgcatgtcttgtaaacaacaaaaatgtatttctcacatttccagaggctgggaagtccaaggctgaagtgccagccaattcagtgtctggtgagggcagcttcctgggacactgacagccatcttctagttgtgtcctcacatggtaggaagggcaaggggtctctctggagtttattttataagggcactaatcccatccatgatggctctgccttcatgacctaatttcctcccaccagctccatgccctaacaccatcaccattagggtgaaatttcaacatatgaatttgtaaaggacataacatctagtctgcagcagaccttctagattgagagaaaagagtcagttttattgttaaggatgattttggaaccttgctgagaattgtgtcctcagtgggcttcctcaaactctgagtttgactcaggcccacaacctccccgagtcc

SEQ ID NO: 27463 - DNA, 565 bp, Homo sapiens
cacgaaatttgtaaactgtcacattgctcattggagtgtcttttttttttttgagacagggtcttgctgtcacccaggctggagtgtagtggtgcaatctcagctcactgcaacctcctccacctcccaggctcaagtgattctcgtgcctcagtcagctgagtaactgggaccacaggtgtgcaccaccacacctggcttagagatgggggtttcacatgttgcccaggctggtatcaaacttctgaccttaagtattccactagcctcaacctcctaaagtgytggaattacaggcatgagccaccatgcctggccaatttggtgtctttatgttaataagcagtgagggtcactaaaggtcatttttgtcccatcttctgatttccacaggcttcttcactgcaccctgttttgatcaaatcctgctgggatcacaaggttgccaacagggtggggacagtgctggaaaaacaaggcttgctgatcccctacctataaaagcctaatacacctctatctacgaatctatctacatctatctatctatctagctatctatcta

SEQ ID NO: 27464 - DNA, 1287 bp, Homo sapiens
  misc_feature (1)...(1287): n = A,T,C or G
taaccatattccattttttggacaaataacacaattagaattacagtgctagccaggangctatggaagacagtttcatccacagctgatgggaatgtaaatttggaagggtttttagccagatagatcttataccctcagacacaataattcacttctagcaactggtcttgagaaaataatacaaactacagaaaaatcttttgctataaaatgacaaaaattttaaacactccaaataggatgtcaagtaagtctgttaaggtggatccacattatggaattgtgtagccccataaaacaaaattttaaaagatgagaagactcttatttttgtaattatgtgaaaaatctagtataagctttattaagttcatagtggctatctctagacggtgagattttagaacattgttataggaaatgggaaacagaaaagtttaagatgagaaataaggtaaacatttgttttataatcagaggaaagaaatccattggattttcttgtaagagagtgaatttaatttttaattatttaattaaaaaaataaaattttaatttagttttcttgtaagagagtgaattaatttaatctagctcctgatctgtgttcatgtggacttgtttgactttgctggtgaaaaggcccctgtattttttgttttgttttgttttatgagacggagtttcgctctttttgcccaggctggagtgtaatggcgcaatctcagctcactgcaacctccacctcccaggtccargcgattctcctgcctcagcctcctgagtagctgggattacaagtgtgcaccaccatgcctggctaattttcatattttcagtagagacgggggtctcaccatgctggccaggctggtctcgaactcctgacctcaggtcatccgcccgcctcggcttcccaaagtgctcggattacaggcgtgagcctgcgcccggttgtcctctgtgctttctgaagactccgtgctgaagagccagcagcacagtggccacatcgtgtgacccatgctccctctgctgactccagccagcagtgacgatccagtcccaagctgctgggtaccacattccaggccaacaggaagagcttccccaggacagcggcctcagagctcaggcctggagaaagctgagaattatgctaaggaaagaaaagaagacttttttaaaaataggagaaacaatgagatggggctttcagaacacagcaagatgtttagggtgaggttggccttgtccttctgtatcctgtgtagtccccatca

SEQ ID NO: 27465 - DNA, 1194 bp, Homo sapiens
agagtgcataatccttatgagaatctaatgcctgatgatctgtcactgtctcccatcacccacagatgggactgtctagttgacggaaaacaagctcagggctcccactgattctacattatggcgagttgtataattatttcattatatattacaatttaatagaaatgaagtgtaccatagtgtaatgcacttgaaccatcccaaaaccacccccccttcctccgagcctggaaaatgtgtcttctacaaaactggtccttggtaccaaaaaggttggggactgctgctgtaggtgacactggtgtgtgccagtaggaacacacccacacacgtgctcacacgcgtccatacagcatccccctcactggggccaggtcttccctgtttggaaggaaccatcccgccctcccctcgctcccttcccagccgcctgctcggggtctccgagcagaacaaccccaccaattcatcaggggacgacagcctctcagagctgtttgggggcataaatcaaatggccaggagaaaaggttttttttaaaaaaaaaggtagcggagagagaaaaatcaggaaaggggtggggagaaaaagcaacggcaggagagagaggggaaacgagatcaaagggaaaacttcagagataacagcattatttatttttcctgctcgcagtcactgggtctttgaggcctccacactgatgtatttggacgtcttggggccgtctgttaccagaggccaccctagcccctctgcacgggcccagcccccctataggcatgccagttccatcagcagcggctgctcctggagtcttttgaagtgggtcctggtggtgtttattcgccttcgtgtaagaaacgtgtgcacagtgctggcggctgcagctgccctgggtggaggtgggagagaagggggtcccccctcatcactcatgagcctgtttatttgggaacmagagcaggcctttctccagttattattcaacgtcctctacaggctacacccgccatcccccattccagaaggtggggcaggaataacaaacatgccgccacctctgccagaggtcccatcttgtctggccccatggtgtacttggctttcagagaagagatggagatgaagggcccgcgaggatgttcagctggtggtcccaagaagactcagaacaagatggttagaggcat

SEQ ID NO: 27466 - DNA, 1183 bp, Homo sapiens
cttaagccaggtgtttgaggttacaatgagctatgatcgagccactgcactccagcccgggcaacagagcaagactccatccacctctacctccaaaattaatttcacctgtttcttttttttttttwattttttattttttttttttgagacagagtctcgccctcaccctgtcacccaggctggagtgcagtggcgcgatctcagctcactgcaagctccgcctcccaggttcatgccattctcctgcctcagcctcccgagtagctgggactacaggcacccgccaccacgcccagctaacttttttgtatttttagtagagacgggatttgaccatgttagccaggatggtctcgatctcctgacctcgtgatccacccgtctgggcctcctgaagtgctgggattacaggcgtgagccaccgcacccggttcacctgtttcttttaatgtttttaaaatgtggtcacttctcaaggtcctttcgacaaaaaaaaaaaaaaaaaaaaaaaaagtaaaagaaaaaaatgtggtcactaaaaaattttaaaggacctacttggctcatattgtatttttttaaataatagtttagcttaattgtatcaaaacaatgcatgcctaagttaaaaaaaaaacatagtactaaaaggcttaacaaaaacaggcagtcccccatcttaccctctcaactgtgctcttttgaagcaaatactttttaattttttagctgtttgaatatttacctccatacatataaacaacatgcttgcaccctaattcctaacttattatagacattatctattgacgtcctgttttggtacctgatgacctaactcttaccctcccctctgaagccctttgcctgtactccatcctttcaacagttccactgcattaattgaaaaatctaaatgtgttatgatggaggacagagctcacagctgaaccaagtggtgttccgtgtcctcacacaactatgtacatattgatacttttgtcaaatacctatccataacttttctaaatatcttcaaattacctacaaattatcgatcaggtatctttgggctttgtgtctttttcttgtcgatctctctccctcctgcagaattccatcctgtctctctaactcagactttcctctgccgctcacctgtgtcagatcccgtttcctg

SEQ ID NO: 27467 - DNA, 1183 bp, Homo sapiens
cttaagccaggtgtttgaggttacaatgagctatgatcgagccactgcactccagcccgggcaacagagcaagactccatccacctctacctccaaaattaatttcacctgtttctttttttttttttattttttattttttttttttgagacagagtctcgccctcaccctgtcacccaggctggagtgcagtggcgcgatctcagctcactgcaagctccgcctcccaggttcatgccattctcctgcctcagcctcccgagtagctgggactacaggcacccgccaccacgcccagctaacttttttgtatttttagtagagacgggatttgaccatgttagccaggatggtctcgatctcctgacctcgtgatccacccgtctgggcctcctgaagtgctgggattacaggcgtgagccaccgcacccggttcacctgtttcttttaatgtttttaaaatgtggtcacttctcaaggtcctttcgacaaaaaaaaaaaaaaaaaaaaaaaaagtaaaagaaaaaaatgtggtcactaaaaaattttaaaggacctacttggctcatattgtatttttttaaataatagtttagcttaattgtatcaaaacaatgcatgcctaagttaaaaaaaaaacatagtactaaaaggcttaacaaaaamaggcagtcccccatcttaccctctcaactgtgctcttttgaagcaaatactttttaattttttagctgtttgaatatttacctccatacatataaacaacatgcttgcaccctaattcctaacttattatagacattatctattgacgtcctgttttggtacctgatgacctaactcttaccctcccctctgaagccctttgcctgtactccatcctttcaacagttccactgcattaattgaaaaatctaaatgtgttatgatggaggacagagctcacagctgaaccaagtggtgttccgtgtcctcacacaactatgtacatattgatacttttgtcaaatacctatccataacttttctaaatatcttcaaattacctacaaattatcgatcaggtatctttgggctttgtgtctttttcttgtcgatctctctccctcctgcagaattccatcctgtctctctaactcagactttcctctgccgctcacctgtgtcagatcccgtttcctg

SEQ ID NO: 27468 - DNA, 769 bp, Homo sapiens
gtaatcccagcactttgggaggccgaggcgggcggattactggaagtcaaaagttcgagaccagcctggccaacatggcgaaaccccgtctctactaaaaatacaaaaattagccgggcatggtggcgagtgcctgtaatcccagctactcaggaggctgaggccgaagaatcgcttgaacccgggaggcagacgttgcaatgagccaagatcgcaccactgcactccagcctgggcaaagagggaaactctgtctcaaaaaaaaaaaaaaaaaaaaaaggaaaaagaaaaagaacaagaacaagcaccgactacatgcagaacatgaaggaactgagtggacgtgatgctgaacaatgaaaacgggccagccatggtggctcacacctataatcccagcattttgggaggctgaggcaggaggatctcctgggcccaggrgttcaagactagcctaggcaacacagtgagacctcgtctctacaaaaaatttaaaagtagggcaggaggatcacttgagcccgggaggtcgaggctgcaatgagctgtgattgcaccaactgcactcctgcttgggcgagaggagtgagaccccaactcgaaaaaaaaaaaaaaaaaaaaaaagaggagggggacacgaagaaggaggaggaggaggagcatcactgtgattccactttagggaaattaggcaaaactcctctccagcgacagagcttggagttgtgcggagagggaggctttgcaggcgctagacattcctgtgtct

SEQ ID NO: 27469 - DNA, 518 bp, Homo sapiens
agatatacctaatgctaaatgatgagttaatgggtgcagcacaccagcatggcacatgtatacatatgtaactaacctgaayattgtgcacatgtaccctaaaagttaaagtataataataataaaataaaattaaaaaaaattatcacatagtttttcaatactaatgtcagtgtgttatgatgttttgtttagttgactggtgtgctagtacctattacatagatagcaatgcctagactaagaattaataagaagtgtctttctttagaaaatgagttaaagggtgacctttcaagcagattaattttaagaaaagtataagagaaattgaagctctgatattaatagcttaatattttctatatttatacgtcccagaaagtttttgaaatccccagaagtatgtaaaccccattctgaaaactcctgttgtcttgcacttgatagagtctgaaaatcaggctttcattttaagctgcttgtgatacccactgttgtttacaaatatttgttta

SEQ ID NO: 27470 - DNA, 586 bp, Homo sapiens
tgttgtctgtttacaaatacagtggtatatatcaaggtttttgattggtgagaactctcagtctagtatgaatagatttaggcgttctagtattccataaatgtattagttaggtgactagccatgtataaaattaattgagtttgtttagatgatctctacagtagttagtgttatgtgtcaacttctccaggctatagtacccmtttatttaatcaaacactacttaggagttgctgtgaaagtattttacagatgttgactaacatctataattagttgactttaaaggagttgacccttgaaaatgtgcgtgggccttatacaatcagtcgaaggccttaagaacagaaattgaagttttccaaagaagaagaaattctacctcaaggctgcaacattaattcctccttgaatttccggcctggggcctgcactacagattcaggactagccagcccttgcaatcctatgaacttatttctttaaaaaaattccttaaagtgggccaggtgtggtggctcacacttgtaatcccagcactttgggagaccaaggtgggcacatcacttgaggtcaggggttc

SEQ ID NO: 27471 - DNA, 586 bp, Homo sapiens
tgttgtctgtttacaaatacagtggtatatatcaaggtttttgattggtgagaactctcagtctagtatgaatagatttaggcgttctagtattccataaatgtattagttaggtgactagccatgtataaaattaattgagtttgtttagatgatctctacagtagttagtgttatgtgtcaacttctccaggctatagtacccctttayttaatcaaacactacttaggagttgctgtgaaagtattttacagatgttgactaacatctataattagttgactttaaaggagttgacccttgaaaatgtgcgtgggccttatacaatcagtcgaaggccttaagaacagaaattgaagttttccaaagaagaagaaattctacctcaaggctgcaacattaattcctccttgaatttccggcctggggcctgcactacagattcaggactagccagcccttgcaatcctatgaacttatttctttaaaaaaattccttaaagtgggccaggtgtggtggctcacacttgtaatcccagcactttgggagaccaaggtgggcacatcacttgaggtcaggggttc

SEQ ID NO: 27472 - DNA, 1025 bp, Homo sapiens
ccaagcccttccacggccaagggccccacactcaccagcttcacgcagatgacgaagggtggccgggcggctcggaagtgcaggatggggattcggggcttgggtctttcctgagagtgacagtggccatcagtcctgcccgagcctggagcttgtccccggagagacgccctcagggtgcacgcagccaccaagttggctcacacaggagccagggcttgggcagcagataacgtgccagggtcacagactgcggcaggtgttcagagcaggaacccggctcccgccacccccgcctgacacccgactgcagaactgaccagggtgggctaccccaaggccyagacccacgagggacagcggggttctccccccaagaatgggggctgggctccctggaggccccgaggagccagcacggcccaggtggactctgccaagggggaaggctctgagcagctgtccctcagccccggagcaggtggttgacccaagggtgacaccatgcggccctgcacacctgagagtcctcgtggcaatagaagcctttcctgatcttgttctcgtccacgtcacagaatgccaccacctggggacaagcacagaagggcagctctggacaggccgggccagggcctgtgctgtgggacagtacgggggcagggcaggcagtgttggagggtggcaggatgctcaccttgcgctggctgccggcagtcaagctgcggtacagccggcgcccctgcttgccagcgttccagatggtgaaggcccgccagcggagcagggcctgctcttccaggaagcggacgcggtgggtccagatggtcgtcctgcggtggagaagagggtgataggctagcggaggccccacagatgcacacagatgctgacatacagggacatgatgtgtgctcagctcacgttgccagtggagtggacacctggcccaatgcctaagagagactggctgtcctacagtcaggccacctgccccagctggacgtagccacatgcctaggtgg

SEQ ID NO: 27473 - DNA, 527 bp, Homo sapiens
agcaaccacaaatacgtgtgagagtgtgacagcatatccatggcaatcggggccacaggctccggaagtcagtttctggaagtttacaggcatggactgcctgggagagacgtccgagagtgtctgctygacgggtgggacggggggcccggggatctagggattaggggtgatttctaccccagccacaggtgctgtggggtttcagtcatgtggaaacagagagtgatcacagacggtttttccagtccagttcctttgtggggaatagggggaaaatgggggaaaatgtccttcgggatggacttctgtggacagtttatgtgaggaaagtgcagagtctggggtttccaggagggccttttgcagaggtgtgagatatcgcacatggaggctggagaggaaaggggcgtccctgccacgttagctgcccaacggctccctttgcgtccctgcagctgtgtggtcctgtggactggaaggtggagcagaccctgtgccggcccgtgagctggaaaccgtggctg

SEQ ID NO: 27474 - DNA, 527 bp, Homo sapiens
agcaaccacaaatacgtgtgagagtgtgacagcatatccatggcaatcggggccacaggctccggaagtcagtttctggaagtttacaggcatggactgcctgggagagacgtccgagagtgtctgctcgwcgggtgggacggggggcccggggatctagggattaggggtgatttctaccccagccacaggtgctgtggggtttcagtcatgtggaaacagagagtgatcacagacggtttttccagtccagttcctttgtggggaatagggggaaaatgggggaaaatgtccttcgggatggacttctgtggacagtttatgtgaggaaagtgcagagtctggggtttccaggagggccttttgcagaggtgtgagatatcgcacatggaggctggagaggaaaggggcgtccctgccacgttagctgcccaacggctccctttgcgtccctgcagctgtgtggtcctgtggactggaaggtggagcagaccctgtgccggcccgtgagctggaaaccgtggctg

SEQ ID NO: 27475 - DNA, 648 bp, Homo sapiens
ctagagggtatgaagccaagactagaatccacatctccaaaagcccatagcagtattttttctttataccactttatctcaattgtactttaggatgcaagggaggtatgatttggctcactgtttcaatgaccttaaagaaacttctgaaccaaaggttaataccagccggactctgttacaacacaggyttttaaatctactatattttaaaatctgcaagatttaaaattcactataaaagaaataatgttcccttcctcaaaacaatttaaagtggaggccaggcgcggtggctcatgcctgtaatcccaacgcttggggaggccgaggggggtggatcacctgaggtcaggagttcgagaccagcctggccaacatggtgaaaccccgtctctcctaaaaatacaaaaattagccgggtgtggtggcaggtgcctgtaatcccagctacttgggagactgaggcaggagaattgcttaaacccaggagatggaggttgcagtgagctgagatctcaccattgcattctagcctgggcgacagagtgagactctgtcaaaaaagaaaaaaaaaaaagaaaaagtagaatttccatataatccagcaagcactcttctgggtatacttacaaaagaattaaaagt

SEQ ID NO: 27476 - DNA, 648 bp, Homo sapiens
ctagagggtatgaagccaagactagaatccacatctccaaaagcccatagcagtattttttctttataccactttatctcaattgtactttaggatgcaagggaggtatgatttggctcactgtttcaatgaccttaaagaaacttctgaaccaaaggttaataccagccggactctgttacaacacaggcttttaaatctactatattttaaaatctgcaagatttaaaattcactataaaagaaataatgttcccttcctcaaaacaatttaaagtrgaggccaggcgcggtggctcatgcctgtaatcccaacgcttggggaggccgaggggggtggatcacctgaggtcaggagttcgagaccagcctggccaacatggtgaaaccccgtctctcctaaaaatacaaaaattagccgggtgtggtggcaggtgcctgtaatcccagctacttgggagactgaggcaggagaattgcttaaacccaggagatggaggttgcagtgagctgagatctcaccattgcattctagcctgggcgacagagtgagactctgtcaaaaaagaaaaaaaaaaaagaaaaagtagaatttccatataatccagcaagcactcttctgggtatacttacaaaagaattaaaagt

SEQ ID NO: 27477 - DNA, 648 bp, Homo sapiens
ctagagggtatgaagccaagactagaatccacatctccaaaagcccatagcagtattttttctttataccactttatctcaattgtactttaggatgcaagggaggtatgatttggctcactgtttcaatgaccttaaagaaacttctgaaccaaaggttaataccagccggactctgttacaacacaggcttttaaatctactatattttaaaatctgcaagatttaaaattcactataaaagaaataatgttcccttcctcaaaacaatttaaagtggaggccaggcgcggtggctcatgcctgtaatcccaacgcttggggaggccgaggggggtggatcacctgaggtcaggagttcgagaccagcctggccaacatggtgaaaccccgtctctcctaaaaatacaaaaattagcygggtgtggtggcaggtgcctgtaatcccagctacttgggagactgaggcaggagaattgcttaaacccaggagatggaggttgcagtgagctgagatctcaccattgcattctagcctgggcgacagagtgagactctgtcaaaaaagaaaaaaaaaaaagaaaaagtagaatttccatataatccagcaagcactcttctgggtatacttacaaaagaattaaaagt

SEQ ID NO: 27478 - DNA, 1169 bp, Homo sapiens
catcgcgaggcacaccgccgaggccaggccacagataattgcacctgaaagatgtgcgggggctttgactccgggcatcaatgttccatttggccgcctgggcgcatccattattcrtggtaatgacaaccataacttctacggggcttttcatcttcaaaccactttacaaatacggtctgtttaattcgaactgcagcttccctctctccatccaagtgcattcgccctggctccaggtgcacaggcagggtgcagaccgagcttctgtggaaaccaagccgcatccaccaggctgctttcctttaggggcaaagcggaaactttcaccatgcaaagcatttgtattttcaaaaatcaaagtaattgcctaaagatggattcaggagaggtgttttcctgtattttttttttcatttttttcccagcaaggagcatggtttatttatgtaattaaaaggaaaaatcaacagtctccccacccccaaaacaacaacatcgcaattgtgaaagtacctgctgaatatggaaactatgtacgtgatcctgcattcagaaatgtgtattttcaaagcagcatcctatctgggaatccatttaactcaccttactcattccagtcccactaccctgccttgactaaacaggcctgtgaacagtaatacccacccgtggacttccgttctgccatcccaaatcccggagacagtgggtgctaggtcagcccctgggtgctggggagaatgagtgcctcaggaaggtgctggggtggggagggcggtgccaggggagggtgagggagtgcaggggggagaagggatggatggagggtcccttcgcctcccaggaagggaggagctgggctgggctggggtgggttgggctgggggtaccacccttccttccctgcacccatccaggaatccggagtctgctcagccccgcatctcaccccacccataccgtgcagagtgcagggcagctgccgatgccttcggcagagcgcctggcttccggtgcttagcgtgagaaatgttctttttggtgatagcatctcgacataaggtgtttttggaaaacgacaacacactcattttcctttcatcatgtctcagtcaggatggccccgggacttcacgcacacgggggaccttggatcatccgctgta

SEQ ID NO: 27479 - DNA, 1169 bp, Homo sapiens
catcgcgaggcacaccgccgaggccaggccacagataattgcacctgaaagatgtgcgggggctttgactccgggcatcaatgttccatttggccgcctgggcgcatccattattcgtggtaatgacaaccataacttctacggggcttttcatcttcaaaccactttacaaatacggtctgtttaattcgaactgcagcttccctctctccatccaagtgcattcgccctggctccaggtgcacaggcagggtgcagaccgagcttctgtggaaaccaagccgcatccaccaggctgctttcctttaggggcaaagcggaaactttcaccatgcaaagcatttgtattttcaaaaatcaaagtaattgcctaaagatggattcaggagaggtgttttcctgtattttttttttcatttttttcccagcaaggagcatggtttatttatgtaattaaaaggaaaaatcaacagtctccccacccccaaaacaacaacatcgcaattgtgaaagtacctgctgaatatggaaactatgtacgtgatcctgcattcagaaatgtgtattttcaaagcagcatcctatctgggaatccatttaactcaccttactcattccagtcccactaccctgccttgactaaacaggcctgtgaacagtaatacccacccgtggacttccgttctgccatcccaaatcccggagacagtgggtgctaggtcagcccctgggtgctggggagaatgagtgcctcaggaaggtgctggggtggggagggcggtgccaggggagggtgagggagtgcaggggggagaagggatggatggagggtcccttcgcctcccaggaagggaggagctgggctgggctggggtgggttgggctgggggtaccacccttccttccctgcacccatccaggaatccggagtctgctcagccccgcatctcaccccacccataccgtgcagagtgcagggcagctgccgatgccttcggcagagcrcctggcttccggtgcttagcgtgagaaatgttctttttggtgatagcatctcgacataaggtgtttttggaaaacgacaacacactcattttcctttcatcatgtctcagtcaggatggccccgggacttcacgcacacgggggaccttggatcatccgctgta

SEQ ID NO: 27480 - DNA, 1469 bp, Homo sapiens
ggattttcacagaagaggctgatattttagaggtttttgccccccagattataactatgccttgtgcattcaaacacagggcatccaaacaggaagatccttggagacagctcgatgagtccaaacctcccactttccagatgagaccactgaggccagaggggctctctggagaccccaactgcctcttttcccctgggttggtgtgatagttccattgcagttgcagatttcactgacagaagatgacattatgggagttttcattcactttctaaaagaattttagggccattatatttttcaataaagcttttatttgtggatcatcttagatttacggaaaaagttgcaaagacagtacagagagatcccgtatccccccaatccaacatcccccagtgttacccaagacatgtggttcaaaacaaacattaacatggtctagagttccgtgaagcatctctaggaacagacccccgattccatgtgttttcccactgatgtcctcttttggtttcaggatcccacaggtcattttattttagcattctaaaatctataaagagaccaaagaccttccctgcccaaaccagcatcacaccctcaccttattagtgtaggcggctggtgactaagtckctggttcattcattagagtccaagacacacttatccatcacagcgatcatgcctgtaagaaaactcttcttactgcactcctacctggaactgaaagatgatgtgttcggcttcaatagatcctgctcgtcacatcagggacagtagtcaatacttttgtatttggacactgggaatcaaggcagaagatctaacagaagatacaaaataattataatacattaattacaatagcaccatgaacacagtgttgcgctttctctgttctctctggctgcagccaggaaaggactcagaccaagaagaactgctggtgtgaggacgtggccgtgctggcctcatgcagtccttcctgcattcattagttgagcaatgcagaatctgtattgacgtgaagttcaagacaaaataaataaagatacatttgtaaattcaaatataattcttcattcactttactaaaaccaagacagaaagtctgttttttacacaaagaattcatcttagcaataacacgctatgtgaacaacaacaatgaaaattctttctggcagcattggtagaaaaaaattaataaagtatagaatcttggtaatcgtcaagggaccctctcccagtcccaccagagagaaaccactcactccaccccagggcagtgtccaccctcaacaggagacaaagaactagaggagggagggtgtaagggagggcgaagacggcctcgcccggggtgtgttggcccagctgagagggacacttgtgtagccggcagcatgaagggaggcgctattcatgctgccggggggctctgtctcaggcaaggccat

SEQ ID NO: 27481 - DNA, 893 bp, Homo sapiens
ccagagtgctggcttcttcatgctaatgttgactgacagcttcaggatggagccgttcacctgaaagatgggcatgaccaggtgcttggagtggttttttcctacttaattccaattcttagaacacagctcctagaacccaagtgcaagcctctcccttgtttggcattccctgagatggagtgacataacatgaattccatcagggccaacttcatggcccagtgtgagtctggcatcccarggtacaaggtcacacccttatctttcgaatgttgtgaccaccaccctctgcccagcccaattcaccctcccacccatgctgcgcccagccccatcctgaaatctgttttcaatccaggggctaggcagctgtccccctacttgtcacccaccacagaccaagccctggcagtggggcagtgctgttgggttcttcctgagtagtcaccaggaacctgacggagtgacgcacccaggcaccaggtgggcagcaccccagctccacggggccttcttaggtaacattgcatagccgacctcttagccagcatgggcaaaagtagccatggaaacaagacacaggtctttcaggagtccttttggaggctctgcccatacccggcgtttcccctctaggcctcacctatgccgcagccttgcggggagcaaggagcctggagctgcaccccctccccagctctgcccaccctgggcagggtttggccacgattctcagctgctcggctccagggttgcctttgtgtgaaaggcgatacaaccacatggcctccaggactgaccccagggagccctctgcacatgccagcccctgttccttcaggggggtctgcaagcttggagcaaatctggcttgcacacactgtcgggaa

SEQ ID NO: 27482 - DNA, 893 bp, Homo sapiens
ccagagtgctggcttcttcatgctaatgttgactgacagcttcaggatggagccgttcacctgaaagatgggcatgaccaggtgcttggagtggttttttcctacttaattccaattcttagaacacagctcctagaacccaagtgcaagcctctcccttgtttggcattccctgagatggagtgacataacatgaattccatcagggccaacttcatggcccagtgtgagtctggcatcccagggtacaaggtcacacccttatctttcgaatgttgtgaccaccaccctctgcccagcccaattcaccctcccacccatgctgcgcccagccccatcctgaaatctgttttcaatccaggggctaggcagctgtccccctacttgtcacccaccacagaccaagccctggcagtggggcagtgctgttgggttcttcctgagtagtcaccaggaacctgacggagtgacgcacccaggcaccaggtgggcagcaccccagctccacggggccttcttaggtaacattgcatagccgacctcttagccagcatgggcaaaagtagccatggaaacaagacacaggtctttcaggagtccttttggaggctctgcccatacccggcgtttcccctctaggcctcacctatgccgcagccttgcggggagcaaggagcctggagctgcaccccctccccagctctgcccaccctgggcagggtttggccacgattctcagctgctmggctccagggttgcctttgtgtgaaaggcgatacaaccacatggcctccaggactgaccccagggagccctctgcacatgccagcccctgttccttcaggggggtctgcaagcttggagcaaatctggcttgcacacactgtcgggaa

SEQ ID NO: 27483 - DNA, 484 bp, Homo sapiens
tcagcaaactaacacaggaacagaaaaccaaacgccacacattctcacttataagtgggagctgaacaatgtgaacacatagacacagggaagggaacaacacacactggggcctactgtgggttggggagaaggagagcaycaggaaaaatagctaatgcatgctgggcttaatacctaggagatggattaataggtgcagcaaatcaccatggcacatgtttacctgtgtaacaaacctgagcattctgcacatgtatcccggaacttaaaagaaaaaaagaaggtcagtgggaagtcatagatacatcctgtggtttttgaagattagtttgtatcttatagacacacattcactttgaatagggcaacgacagatgatttttaatattctttgtactttgtaaattttctcagtgagtatgtattcttttaaccagcaaacataattaatgttgttataattctgcttgcatcacatttc

SEQ ID NO: 27484 - DNA, 579 bp, Homo sapiens
ggcgattgaaagaaggaactagaatgagggcccctgattatactacaccagaaatgtaagactttaagaagtattcctgtgttctctttctttgctcgcaaattctccttgcctggaagactttccattatatagaccttcttcattgcccagttagtgtcctgcttttactttggggcctttcttgataatttcaagcatggagtcatcacttcttgaaaagatagtactttattattcaaagcaaccagttagtttttattagatgttgctttaaatgttttctatacacattgagcctctggagtatgggactctgtgtcttacacagttttgtatccttatttagcatctcacctcgtcrgctctttacaaatgtgtactcatttaagtgcttattttcagcattcaggaagaaagaggcatttaatgaaatcagtgttttgcttctctaggtaccagaccatgctggactgctggcacggggagcccagtcagagacccacgttttcagagttggtggaacatttgggaaatctcttgcaagctaatgctcagcaggtttgtcacctccatcca

SEQ ID NO: 27485 - DNA, 1949 bp, Homo sapiens
gtaaagagacgtgggaaatgaattttatttcaccacttaccttgaacatagacataaatgaccgaggccaagtcagtttcccggtagaagcacttgtaggctccagtgtcatttccgatcacttttggaattgtgagtgtcttacagaagaggccatcgctgcactcagtcacctccaccctttgctcactgccactctgattattgggccaaagccagtccaagtccctctgtcccctgaaaaattaatttcagggaggtattaatatgaagtgccagactgtgaggctatttctaagaaaagagaaaatttggttttgaaacttaaataaactcttcaacagacacagtcagtcttctaccggccaggcatggtggctcatgcctataatcccagcactttgggaggccaaggcggatggatcacctgaggccaggagttcgagaccaggctgggcaacatggtaaaaccctgtctctactaaaaatacaaaaatgagccaggtgtggtggcgcatgcctgtaatcccagctactcaggaggctgaggcatgagaattgcttgaacccgggaggtggaggttgcagtgagccaaaatcacaccactgcacttcagcctgggcaagagggcaaccctgcctcaaaaaaaaaaaaacaaagtcttctaccaacaagtcagattgacatatgatgaaaagttataaactcagcttcagaagtcacttataaagattcctgagttttccattaattaatgcattctttctttcaacaaatatctattaagcatctactatgtgccaaacttgttaaggactagagaaagagcagtgaacaaatcagacaaaaatcaatgcctttatggaacctcagtctaactggagaaaacaggcaattaaaaagtaaggaaagtttattgtataaaagatagtgtttagtactatggagaaaaatatagaagatacaaagaaaagagtaaagaattttgcaggaggtggtcttgataaagctagccataggaacatcatgaagagcagtattacaggagcaaaaacagcacatggaaaggccctggagcaggtgcatatctggagtattaagggaacagccaggaaaccagagcagccaggtaagagtgagcaaaggggagtaagaagtgaggttaggaaggaaggaggtgcaagtaagagtccctcaggaccttgtaaggacctcgcattaaaacatagatggcttgtactgcagcatttctctacaaggccccaaggaagataagaagatagtcaacatcaagaagaatgtaacattattggcccttcattcaaagaacttaaaatttccaggaagttgcagctaaatcaatgaagttacttttaacacactccatggtttttttcagaacataagaaatgtttatgcagagttttaaaaagggagcatgggatccttggggatttcaaataaccttgttatcgagggtcggtaaaaggaaaatctaatgggaaatgtgtcttaaacaagtaaagctagagaaacagcacctgctactgtgttttttcccaagggctgggtattggtaaggggctagggtattctttatactgcagtctaaaatagatgtatgtcattcggtttaatgcttagtattcaacaagtatgaagcaatggcaataacctacccaaggtcctttgtggacccccagcactcttccaggagggtaacatcacctccacttgtcacagtctctaccaaaaacacacaggtcctaagaaggctccatgcctttcgtgtgtgatcactatgttaaacccaagggtcttctatctttcrtcctggggtaagggttgaaaggcaaaatttaaaggcctcttcttcttgacaaagaagtctacttctccagttatcaaaaatcaatagcatgacttcttgctagcaagtggggaaaga

SEQ ID NO: 27486 - DNA, 667 bp, Homo sapiens
cttgccatcccaattgtaacaaggtcacgattatacttggcattgtgctcttggaaatcttctcttgtgtcatgccaatttaaaaattgctaaaattaatgctattaaaagcattacaatatgttgatacaataaggaagataaaggcattctatttctccaacctttccctaaacttccttttttggctcaccagggttcttaccaggaaggtatggtgtatcattgaaaacaagcttctcttccttcatggctttagctgtgtttggctctagggagggaaggcttaattgaagctgagctccaagctcctcagcttgccaggactcaccagagggaatagcagcctcacttctgtaaatatttaaggggctcaaagtgatgccagtcacatgtcagaagaggaagctcttgacttcctccattgaattgtgtccggaattggtgggttcttggtctcactgacttcaagaatgaagccgcagaccctcacagtgagtaaagacggcatgyccggagtttgttccttctgatgtttggatgtgttcagagtttcttccttctggtgggttcatggtccactggcttcaggagtgaagctgcagaccttcacagtgagtgttacagctcatgaaggcagtgtgggcccaaagagtgagcagcagca

SEQ ID NO: 27487 - DNA, 1580 bp, Homo sapiens
ttctttgtagttcagctagaagtagttttyttttttgcccatactttctaggtatttatgtaaattctcaattcccatggatgcttacagccttttccttttgaaggtgttctcagactagctctggtattctcaagagtaaagaggatgtgttgtacatattttgtatctcttcaagtgcctggtacagtgttctgtacacaatgaaaagtttttgttttttttttttgtggtggagtctccctctgtcgcccaggctggagtgcagtgacacgatctcggctcactgcaacctccgcctcctgggttcaagtgattctcctgcctcagcctcccgagtagctgggatttataggtgtgggccaccatgcccggctaatttttgtattttttttagtagagacgaggtttcaccaggctgatatccaactcctgacctcaggtgatccgcccgcctcggcctccaagagtgctgggattacaggagtgagccaccacgcctggccacactaaaaacttaatggaagtttttaaatgatggtggtgttaggattgatggtggtgatgaataatggtgacggtggtgatgaatgatagtgatggtgctacactgggccatgtagcagtttcagatcaccaaaaacataatggcatccattgcactgtgaagccaggcagtggactatttaaaaatggttatagcttaaatgtagcttgtatctttttaagccaatagggtaagagtgtagagactctggagctggagtgcctaagttaaaaatttttctattccacttactaattctaaaaccttgtgcaagtaccttaattgctccatgcctcagtttcctcatctgtaaaatggagacactaatagtatctacttttaagggctgttatacagactaaatggctggcagttatataatggacttagaagactctctgctacacagtaaatagttgataaatggagctattattcttattattaaataaagttttaaaataaaaagatacatgctcattatagaaaaattaaaaagtacaaaagcagaaaaaagaatatcactcagtgttccatcttccagagcaaccacttgttaatattttgacatatttacttttattgttttcacagcttttaaaataaacaattttaaaaattcatttaaattatgttttaagctgcttttgcctttggaggaaaagaaaaccgaattagttcacttcaacatccactgatctctttttatgacaattgcatgatgctggcaggtcgtatctcaactctgtaataacatttatctcgattttctattctgcaactttcttttgagcatgttttgtagttgaggatttgtgcaaaatatatatgactgtccttgccatttctgaagcagtcttcagagaagttatatctttgaatataactttattatttttggtcccaaagtgaggattcatgattactgtacctaatgacttggacattctcctaaattatgagcacatatcacagtaaaccatgacaacatttgctaagtcaaactcttccacattcctattaaatatttgca

SEQ ID NO: 27488 - DNA, 1580 bp, Homo sapiens
ttctttgtagttcagctagaagtagttttcttttttgcccatactttctaggtatttatgtaaattctcaattcccatggatgcttacagccttttccttttgaaggtgttctcagactagctctggtattctcaagagtaaagaggatgtgttgtacataytttgtatctcttcaagtgcctggtacagtgttctgtacacaatgaaaagtttttgttttttttttttgtggtggagtctccctctgtcgcccaggctggagtgcagtgacacgatctcggctcactgcaacctccgcctcctgggttcaagtgattctcctgcctcagcctcccgagtagctgggatttataggtgtgggccaccatgcccggctaatttttgtattttttttagtagagacgaggtttcaccaggctgatatccaactcctgacctcaggtgatccgcccgcctcggcctccaagagtgctgggattacaggagtgagccaccacgcctggccacactaaaaacttaatggaagtttttaaatgatggtggtgttaggattgatggtggtgatgaataatggtgacggtggtgatgaatgatagtgatggtgctacactgggccatgtagcagtttcagatcaccaaaaacataatggcatccattgcactgtgaagccaggcagtggactatttaaaaatggttatagcttaaatgtagcttgtatctttttaagccaatagggtaagagtgtagagactctggagctggagtgcctaagttaaaaatttttctattccacttactaattctaaaaccttgtgcaagtaccttaattgctccatgcctcagtttcctcatctgtaaaatggagacactaatagtatctacttttaagggctgttatacagactaaatggctggcagttatataatggacttagaagactctctgctacacagtaaatagttgataaatggagctattattcttattattaaataaagttttaaaataaaaagatacatgctcattatagaaaaattaaaaagtacaaaagcagaaaaaagaatatcactcagtgttccatcttccagagcaaccacttgttaatattttgacatatttacttttattgttttcacagcttttaaaataaacaattttaaaaattcatttaaattatgttttaagctgcttttgcctttggaggaaaagaaaaccgaattagttcacttcaacatccactgatctctttttatgacaattgcatgatgctggcaggtcgtatctcaactctgtaataacatttatctcgattttctattctgcaactttcttttgagcatgttttgtagttgaggatttgtgcaaaatatatatgactgtccttgccatttctgaagcagtcttcagagaagttatatctttgaatataactttattatttttggtcccaaagtgaggattcatgattactgtacctaatgacttggacattctcctaaattatgagcacatatcacagtaaaccatgacaacatttgctaagtcaaactcttccacattcctattaaatatttgca

SEQ ID NO: 27489 - DNA, 1580 bp, Homo sapiens
ttctttgtagttcagctagaagtagttttcttttttgcccatactttctaggtatttatgtaaattctcaattcccatggatgcttacagccttttccttttgaaggtgttctcagactagctctggtattctcaagagtaaagaggatgtgttgtacatattttgtatctcttcaagtgcctggtacagtgttctgtacacaatgaaaagtttttgttttttttttttgtggtggagtctccctctgtcgcccaggctggagtgcagtgacaygatctcggctcactgcaacctccgcctcctgggttcaagtgattctcctgcctcagcctcccgagtagctgggatttataggtgtgggccaccatgcccggctaatttttgtattttttttagtagagacgaggtttcaccaggctgatatccaactcctgacctcaggtgatccgcccgcctcggcctccaagagtgctgggattacaggagtgagccaccacgcctggccacactaaaaacttaatggaagtttttaaatgatggtggtgttaggattgatggtggtgatgaataatggtgacggtggtgatgaatgatagtgatggtgctacactgggccatgtagcagtttcagatcaccaaaaacataatggcatccattgcactgtgaagccaggcagtggactatttaaaaatggttatagcttaaatgtagcttgtatctttttaagccaatagggtaagagtgtagagactctggagctggagtgcctaagttaaaaatttttctattccacttactaattctaaaaccttgtgcaagtaccttaattgctccatgcctcagtttcctcatctgtaaaatggagacactaatagtatctacttttaagggctgttatacagactaaatggctggcagttatataatggacttagaagactctctgctacacagtaaatagttgataaatggagctattattcttattattaaataaagttttaaaataaaaagatacatgctcattatagaaaaattaaaaagtacaaaagcagaaaaaagaatatcactcagtgttccatcttccagagcaaccacttgttaatattttgacatatttacttttattgttttcacagcttttaaaataaacaattttaaaaattcatttaaattatgttttaagctgcttttgcctttggaggaaaagaaaaccgaattagttcacttcaacatccactgatctctttttatgacaattgcatgatgctggcaggtcgtatctcaactctgtaataacatttatctcgattttctattctgcaactttcttttgagcatgttttgtagttgaggatttgtgcaaaatatatatgactgtccttgccatttctgaagcagtcttcagagaagttatatctttgaatataactttattatttttggtcccaaagtgaggattcatgattactgtacctaatgacttggacattctcctaaattatgagcacatatcacagtaaaccatgacaacatttgctaagtcaaactcttccacattcctattaaatatttgca

SEQ ID NO: 27490 - DNA, 934 bp, Homo sapiens
tgcctgtaaccccagcactttgggaggcagaggcaggcggatcacctgaggtccggggttcgagaccagcctgaccaacatggagaaaccccgtctctactaaaaatacaaaattagctgggtgaggtggtgcatgcctgtagtcccagctacttgggggactgaggcaggagaatcacttgaacccggggggcrgaggttgcggtgagcagagattgtgccactgcactccagcctaggcaacaagagcaatactccatctcaaaaaaaaatacatatatatatatgattacaaatatgctattttcagtaaataaacttttggatttttcccttcccttttttttctgcttatcttcttcctgccatattacttttatcccctccacaggtggctaacaacctaatattctctcatattttctgtataataaaatcatacacacaagcatgcacacacacaaaaggccctccaaatcaagcagtaaacctttacttcattaccttaaatccctgcataatactcaatgatgtggatatttaatgatttcctgggcctcctgatgagtattcactcattgtttttgttttttaatttactctgttaatgaacaatataccacagttaacatcctagccagtcaggtgtggtccatgtaccagcagcattagcatcacctgggagctttttcaataagcagaatcttaagttctatcccagcctactgaactgaatccccaggaaattcaaactgacattgaagactgagtagtgacctagtatatatgccatttcatattaatgctatcatttctatagttagatttcaaggagtaaaattctggggcaaaggggatatatatgcttttaattttaacagatgccttaacagcttgcttcccttacagactgcagcacaatggatttctacca

SEQ ID NO: 27491 - DNA, 2178 bp, Homo sapiens
tttttagttgtagctagtgggaggaatagggaaaagtacgtctacttcattttcccagatagttcattttatttttatgcgtaggtaatgtccttggcttttatacttggagcataggccaagtttaaccttatcatttgctgtgttaaaggacaatgtttggaagtatggatgtgaaaagagaagatacttgaactttttcttttggaaaatagccttttgtgatggcttttcattcttgtcaagatgggtgttcagaaagaagtaattattgggagtggacaactcatagaatgtaaagcaggggtgcctaatatagtggaaagtaagcagatctaaggctttccctgcacttctgctaggtggctgctgccgtggggactgccccaatcagcagacttcttaattagatggagagggagcagtggggtaagaaaccttgctgtcagcttcccttctccctatcccttcccctcattccttgtcaggaaaaaggaaaagtataattttttcattagagataacaggaatcatgtttggtttgatagtatttataaatatgcttcaataaacattcaattgtgctcacttacagttttacgtaagctgtgggtcagtttcatactgcaacagttcattctcatcatttggttgtcctttatcattctgatgtgaaaatcatgttgaaggggaaattattcgtgcattataatgagtataacttgcatcctaggggccttgaaatgcagtttgctaaactaaatacaaaagactacagtctaaacatagaattcgccatagtcaagctcttcctgtgaaggcttaaagaaaaaaaaacaacctagggaattgtcacacttcccattgttattcacacgcttgtttgggatctgataatggcagctgccagagccctgacatttcagcagagaggggaagcagggcaaaagttagaagactctggatctgaggagaactctcaaattcactgtaagcctcagctgtcttgaaaatgtgataatggttgtagaatttggatagatgatttctctagaaaaacaaattttattagataacagcatgcatgaacactacaaaacacaggattaaaataccactgaatcctacaaagtactttaaattctccttcttaactggtttgccattcaagtcaataaatatttaccaaaaaatgaccacgtttctggtccactgggggcagttggggtacgaagatgaacaagtcctgatccctgtctttaaggagctaataatgcagagggaaaacagaagtgtatacaaataactgctataaaatgtgcctaaatgaggctttatgaagaattgccatttgaactgaaccttgaaggattatttagtggctgcaagaagcagatatgaactctggctaattgaagagaaaacaaaattccaacaacacacccaccaccaagggggacatctgttgggattgtggagatagctcctgaattgaagtaaaagctgtacctttaagaaacatgttatagattgatgtactagcgattgatgccaatgtgtttttcagagtatggtctataaggatgagtcaactccagtgcttttgggttgggtcacttctcttaaggtacaaatttcaagggaagagggactgagaggtcttacctgggtcatatacccatctcttggccaatgcaatgccaggggagtcattccttaaaggaagagcataagctctaattaaaagcccaatagctctgacgttgggcagcacaaaccatggacaggtggaaggaatatctgagcagagatgcagaggcagagaaataagaatgtttgggaacagcaaagcatctggtccagttgtgcataaggtgaaggaaaggcgaagttgggagagatgaggaagaagaggcaggttgcaagtgggtgatggaagrccttagctgctatgtttggaattgaagatagagtcattggcagggctggggggagcagatctggtaagatctatgctttgagaacagttctctggaaacagacttgggttataaaaggaattatggggcaagaaggcaaaggatgttgcctaggtgaaaaggggtaatgaaggcttttaatgatattatacttaactctgaaatgaccacagtgaacactttatacattttactttta

SEQ ID NO: 27492 - DNA, 738 bp, Homo sapiens
  misc_feature (1)...(738): n = A,T,C or G
annnnnnnnnnnnnnnnnnnnnnnnnnnnnnnnnnnnnnnnnnnnnnnnnnnnnnnnnnnnnnnnnnnnnnnnnnnnnnnnnnnnnnnnnnnnnnnnnnnncttcagtaaggtatttaaacttctattcaatgaaacataccacaatgatgattctgcaaaggacctagagtgaatagtaaatctctcttctatcccttccccgtcccagccccagctcccctcccaagagacaaccagtgtcttttctgagcgtgtctaattcacactcagcatctaggtttacatagtattttaaaatattttcatacaagtattagtacaccaggcatattgttcctgcatcttgctggtatcctttttctttctcaagacagggtcttgctctgtcaccyaggctggagtgcagtggcacagtcatagctcactgcggcctggacctcatggacccaagtgatcctcccacctcagtctcccaagtagcagagaccacgggtgtgcaccaccatgcccagataattgttttattttcgtacagatatggtctcactatgttgcccaggctggtctcaaactcctcagctcaagccctcctcctacctgggcctcccaaagtgctgggattacaggtgtgagtcactgtgcctggccatgggattcttaataatatgtcttggagattgtttcatatcattatatttagagctacctcactcttttaacaactgcatataattcc

SEQ ID NO: 27493 - DNA, 814 bp, Homo sapiens
ttatttaatatactacttatagataatatataatatgttatttatatattgtgatatgttaatttttttttagatggagtcttgctctgtctcccagggtggagtgcaatggtgccatctcggctcactgcaacctccacctcccgggttcaagtgattctcctgcctcagcctcctgagtagctgggactacaggtgcgcgccaccaagtctggctaatttttgtatttttagtagagatagggtttcamcatgttggccaggctggtcttgaactcctcacctcaagtgatctgcctgcctcggcctcccaaagtgttgggattacaggcgtgagccaccgcgcacagccaagacgtattaaattaataatatttataagctccttctttttcccaaagtcagaagttccacacatgctcaaggtcaggggttgttaatgaagaaaacctaaggtaaccgaagtaatgatgtttgtgtagtgcttaataatctacaaaaatttgtgggttttttttttttttttttttttttgagatggagtctcgctctgtcacccaggctggagtgcagtggcacgagctcagctcactgcaacctccgcctcctgggttcaagcgattctcctgcctcagcctccccagtacctgggattacaggcacacaccaccatgcctggttaatttttgtatttttttagtagagacggggtttcaccatgttggccaggctaatcttgaactcctgaccttgtgatttgcccgcctctgcctcccaaagtgctgggattacaggcgtccaccaccacaaccgg

SEQ ID NO: 27494 - DNA, 814 bp, Homo sapiens
ttatttaatatactacttatagataatatataatatgttatttatatattgtgatatgttaatttttttttagatggagtcttgctctgtctcccagggtggagtgcaatggtgccatctcggctcactgcaacctccacctcccgggttcaagtgattctcctgcctcagcctcctgagtagctgggactacaggtgcgcgccaccaagtctggctaatttttgtatttttagtagagatagggtttcaccatgttggccaggctggtcttgaactcctcacctcaagtgatctgcctgcctcggcctcccaaagtgttgggattacaggcgtgagccaccgcgcacagccaagacrtattaaattaataatatttataagctccttctttttcccaaagtcagaagttccacacatgctcaaggtcaggggttgttaatgaagaaaacctaaggtaaccgaagtaatgatgtttgtgtagtgcttaataatctacaaaaatttgtgggttttttttttttttttttttttttgagatggagtctcgctctgtcacccaggctggagtgcagtggcacgagctcagctcactgcaacctccgcctcctgggttcaagcgattctcctgcctcagcctccccagtacctgggattacaggcacacaccaccatgcctggttaatttttgtatttttttagtagagacggggtttcaccatgttggccaggctaatcttgaactcctgaccttgtgatttgcccgcctctgcctcccaaagtgctgggattacaggcgtccaccaccacaaccgg

SEQ ID NO: 27495 - DNA, 1722 bp, Homo sapiens
tccagaaagcaaatgcagttttgttttctccattttcctcactcttttgccatggtagcaagcatgtttgtaagctttgctgattcctctgcctttgccaccttgaaatcttctgtttacatggtctgcgtgttgtgaccaatttgcttatggggttccctcacttctcctcatttaaaggagaacacatttttgaaatcagattttagaccttaaaatttataagtagcaatttctacagttttggaaaaacctttgaaaactgcttattcatctaacacgtatctagagagggtctgctcttgagtggaggctcttcttagcagtgtgggttcagtggtaaagacaaacatcttgtcttcatggagtttacattctgatggaagagagttgattaaaaaaattattataagtgctgtgaagagaaaaaagcagggtaagggagagagaaaaacaagttagtcactattttagataaaatgttcaagaaaggcctttgtgaggaagtggcatttgtacagacctagatgaagtgrgggaatgagtcctgccacgctctgagagtagagtatttcagaaggactaagtagctcctgcagaggctttgaggcaagaacacaattaacatgcttagaagcagcaaatgcagctagaacagagaaaataaacaaaacattggaaagatggagatataaacagtggccagatgatggagaacatttgagatccctcttaggcagctggattttattctgaatgtcctgggatgccatgaacgatttcaggcagggaaagtagcattttctgactcacctttctaaaatatatcttggctgctgtgtggagaatattatgaaggaactaggcttgggcatgtgaaagactggaagcaaggggatccattagaagactgtactgtagtttatgctaacaatgtacatgtcttgggctacattagtagcagttgaggtggcaagaaataatcaagatgcagggtatatattgaagacttgataggatgttggtgaatttggatgaggaatgcaggaaagaaagtcaaggatgggctctggccctttagcctgagcaagtgcataaatactgctgccacttatcaaaatggggtaacctgaggagaagcagtctggaaggcaaagaggagtgtattagtcagtttgggctgctataacaaaataccaacaactggatgcttaaacaacagaaatttatttctcacagttctagaggctgagaagtccaaaatcaagatgctagttgatttgcttcctgttgaggtctctcttgctggcatctttctgtgttttcacatggcagagagagaaagagtgagaatgagagagagagagagagagcgagcacactagcaagctagctcttggtgtctcttctaaaaagatactgatcccatcaaaccagaacctcactctcatgaccttgtctaaccttaattacttcccaaaagctccatctccaaataccatcacattggagattagcgtttcaacatatgaacttgggggagacacaaacattcagtccataacagggagatatggttgtggtcatttttctgcttttcttaactgcagatgcagacttgtttatcagtcactcaagtaaatatgaatacttaactacaggagtgtggagctcagggagagtttgaggtgggaggtataaatctggaaggcttctcataaa

SEQ ID NO: 27496 - DNA, 575 bp, Homo sapiens
cacacctgtaatcccagcactttgggaggccgagccgggcagatcacgaggtgaggagaatgagaccatcctggctaacacggtgaaaccccgtctctgctaaaaatacaaaaacaaaattagctgggcgtggtggcgggtgcctgtagtcccagctactcgggaggcttaggcgggagaatggcgtgaacccggaagggggagcttgcagtgagccaagatcatgccactgcactccagcctgggcgacagagcaagactccggaaaaaaaaaaaaaaaaaagattatttcaggataaaaagttatatttgtcctttcaaaaaaagaaaagaatttcattggccaggcgtggcaggtcatgcctataatcccaatgctttggagactgaggkgggagggtcacttgatgggaggagttcaataccagcctgggcaacacagcgagactccatctctgcaaaatataaaaggagccaggcatggtggtgcctatagtctcagctatttttgatgctgaggtgggagaactgcttgagtcaggagttcaagactgcagtgagccatgattgcatct

SEQ ID NO: 27497 - DNA, 437 bp, Homo sapiens
tggaatataaatgttgttttaatccaaaaagatactttttaaacatgtacatgaattaagataaggatttttttcagtttagagacttgaaattatttttgaagttatagtgatcaacattctacttgtgggggctwaaagtacaaaaaaatccagttacagtgttggtattgatgtataaaaatatcactaacattttagggataataagagaatgcatcacgaatactagtacattcagggatacattatgaacagaaaactaaaataactttatgatggtatcctatacacattttccaatttatttaagaggaaaaaaatggttctgtgatgccctatccgtaactcacgaagctaaatattaaattggcacttaaagatattttgtcatgtattgagtgttttagattttagaattttagtgttcgaattat

SEQ ID NO: 27498 - DNA, 437 bp, Homo sapiens
tggaatataaatgttgttttaatccaaaaagatactttttaaacatgtacatgaattaagataaggatttttttcagtttagagacttgaaattatttttgaagttatagtgatcaacattctacttgtgggggctaaaagtacaaaaaaatccrgttacagtgttggtattgatgtataaaaatatcactaacattttagggataataagagaatgcatcacgaatactagtacattcagggatacattatgaacagaaaactaaaataactttatgatggtatcctatacacattttccaatttatttaagaggaaaaaaatggttctgtgatgccctatccgtaactcacgaagctaaatattaaattggcacttaaagatattttgtcatgtattgagtgttttagattttagaattttagtgttcgaattat

SEQ ID NO: 27499 - DNA, 487 bp, Homo sapiens
agactttctttcaaaaaaaaaaaaagttaagattttgaatttgttctttttctgatatttcttgagttcagattctactcagtgcttgtacttgatctttctacacagataactgaatgattgaagggcagtgtgggtacaattgaagggtaaaatgggtggggagcagttcttggcacttcgcttggaaagtttattgccttggtggtggtgtgaagaaaatcaggcaagtgttaagtgtgtagctagaatggtgctagcggatttcttgaggtcaggagttcaagaccagcctggccaacatggtgaaaccccatctttactaaaaatacaaaaattagccaggcgtggtgctgggcrcctgtaatcccagctacttgggagggagaggcaggagaattgcttgaacccaggaggcagaggttgcagtgagctgagattgtgccactgcactccagcctgggcaacagagcgagactccgtctca

SEQ ID NO: 27500 - DNA, 636 bp, Homo sapiens
aattttgctcctttaattactatgcttcttttcccaaacctctagaaacaattttgaaagaaaatgtttgtataagaaacagagataaagaggatggcaattttttagaatgtggtcagccatctaaacaagaattaaattagaaatgcaaaagtcaaatacaagtcaacctaaaaatatgtaattttttcagtaatactttctctaccttttcactaagttataaatataatcaagaaaaaagcaaaataatctccacagcaatacatatacttttgctcaattaactgaatatattccacgtaaataatctaaagtgtatttccaacaagtcagtcaagatactgagtacagtattttccattctatatcagaaggataaaatattagatatttatccacatctatcaataagaattaagtacactgggcctaatacttctcacacaatgttttaaaaaatccacatcaataaaaagacaatattcataaatgtaaggtttatattcaagwgtggattacacaaccaagggagacaaatgatggaacagagttccgagacctgagttctaagcccttcgcagtaactaattagttttatgtccttaggtaaaactaaaaacatcttgggcctca

SEQ ID NO: 27501 - DNA, 486 bp, Homo sapiens
tcggcttctaatttccaaaacaaacaaacagcacaggctgggaatttgactggagttgtattaaatctgtagatcagtttgcagacaattaatattactacagtgctactacagcatggagtcggagtcccccagtccaggaccttsgtttatcccttcatttacttaggtgtttaaacatttttatcaaaaatatcttagagttttccatgaagcagtcttgcacatattttgctagatttactcctggatatttgatttaaaaatatgattatagatggactttttgtttgctaaacatttattgatatatcaaaatacatttgatgattttgtatttattttgatcaactgggttttgaaatcttgctttctcttgggaagtaggttcatccatgtaccctaatatactctgtaggcctcccccgatgcactgcctatgggactcaaggttgccatattgcacaactccgggggcagcaatga

SEQ ID NO: 27502 - DNA, 486 bp, Homo sapiens
tcggcttctaatttccaaaacaaacaaacagcacaggctgggaatttgactggagttgtattaaatctgtagatcagtttgcagacaattaatattactacagtgctactacagcatggagtcggagtcccccagtccaggaccttcgtttatcccttcatttacttaggtgtttaaacatttttatcaaaaatatcttaragttttccatgaagcagtcttgcacatattttgctagatttactcctggatatttgatttaaaaatatgattatagatggactttttgtttgctaaacatttattgatatatcaaaatacatttgatgattttgtatttattttgatcaactgggttttgaaatcttgctttctcttgggaagtaggttcatccatgtaccctaatatactctgtaggcctcccccgatgcactgcctatgggactcaaggttgccatattgcacaactccgggggcagcaatga

SEQ ID NO: 27503 - DNA, 380 bp, Homo sapiens
ttcctccgaagcattttattacgataataatcacaaatgtgacctcagtccttttatcctgtttattctctaccgtttcctgtgataagtgctacttctgtactttgccaacctcctccacccgcatttgtttagggaaagaatattaattagtgatattaaggaggctatgggctgaaaatgaaattttcataatggaattccttagactatctttgccctccgaggcatcctctgtttaagcagttcaattgaatatcattattaacatacrtaataataataattagcattattgcctgcatcagttgttgttcatggaaaactgcaagctcttttctatctattggcctcagttaaaagtgcgaaatagattctca

SEQ ID NO: 27504 - DNA, 1119 bp, Homo sapiens
tgaatctcaatagcaagggggaagcctatgggtagatatttctggtctggtaggaaggaccattattatcatggagactaaaatataaggcagatttcagacctcccaggtagctcagaacacaataccccaaagtatggtgccttggcatgctgagtactttgaaatgaaggacactggaaggacctcagaagcaaggtatctctgaccttcccctgtcctcctgtctctcacccccttttctccctcagagcaaatcacagaaaccataattcttcttccccaagatggttcatagatactagaactcctccccataaagcgagccataaaacccagaaaagtcactctctcccttctgtctcattccaaggggactctcattccaaagagaccctacctcataccttggaagaagcaatgctacaaagagaagccaagaaaaatctgaacagaccctgctgggtttcctccctcagtctattaccattagatcacacccttttgtccacttacatttctacacagctgttcactcctcattgaacccaagcataaaaataaaaatagttttccctgagtctctgggtttcatttctgaagactcctgcatcacataaaactttaattaagtaaattgtttatgcttttctcttgttagcctgtcttttgttataggagtgttggttgtgaccattatgatggacaaggaatggtatcacacatttccatccctgtaaaagacagctctttgatgaagacctttgttcacttttccttctaaacagcttaaaggtctttctgttagttataaaaagtagtctagatgattatacagaacccaggtggaatcagcggaacattcgctttaggagaagacacttaagaggagagagacyatacaacttttggcaggttgcttccaggtcagagaaaaggatatatccattgtccacaattcatacaagttactgggatgtagtgagaggaatgtgagggcaggcacaggggcaattaggatctgagttcagcccatgcagcgcctagcacagaacagccagctcagagtgtgggctcagacatttggcaacctactagctctgtgtgtgtgtgtgtgtg

SEQ ID NO: 27505 - DNA, 565 bp, Homo sapiens
ttttcctattcaggccaaccttctgctcagccctggggaggagcttgattgcattttggttgcctcttctctctcctttctcttgccatctgggttttgcctcagcagggaacttttttcccttcattttaaaggcagtggcatgcctcgttagctgcttcctccaatttaaagcagtcgggctttttccaattattaaaactggaggaggggaaaacactgagcccttcattcagatcaaggcagcagatcaaggagggttatttttccccagaatagtaccaaatctcccagggttagtttggtctagagattttcttattttataaaaactgatttaaawgggctttttatatcctaacactaaagctcttttagttctttttgcctgccctaagtaattcaccacccaggtgacctttttcttctactttgatgaagcagtgtactcagtggtcataaaaatcaaactcagaccaagattcaattttgcctttcagagagattggctgtggaactcctggctctcatctgacttttctgtctctataactaagcatatcaa

SEQ ID NO: 27506 - DNA, 955 bp, Homo sapiens
tccacgcaaaaggggaccaaggttaggaaattaactcaaggtgcccgcccaccccacagcatcttaacctgccaccttccttctttccaagcagcctcctggctcccacggcccccagaggtccaccttcaacctccctcagcctgtacccaggaaagctcaggaggttccccaactctgccccctaccctattgcaagatcttgcgtcagcccccagggaccccagagtctggccccgttctctgtgctccttcttggagcagctccaggactctgcaagcttcttagtgctgagttgccgcccatgaggatggcatgctcgggatcagccctgctggttcctgcccacagggcccagtgcccaaggtccccacctcgcgccctccagctgcaatggatgcccggggagggggtggcagaggcgactcatcctgcgggcgaagttgcgaggggggcagtcttttcccaggacagtggagcctggaccacagtaaggggcagggggagtcctgctggtggatktgggggcaccagggttacaaagtgtccggcgtacagtaggcgcttaataagcaggtgtttggcacaggtacatcaacgtgcccagggagtcagctaaagccccgtaaaccagccctagtggcttcgcaggatgcacccaggctctgctcgaggcccgagcactccacttcaattctccagcctcgctcatgaaggcaaatggctggggacagctgtattgtaacagggctctcgaactaccaggacaaaactcaggttttcggcagctccagcagacaggaaagctcttggggacatagatcttggggggacacacatttctgggccatttccaggcccagaaatcacatcaagaggacaaggggtaaatggtggtgatcaaagagtcacaacctacctgtcttagcccctgcttagtgccaggggcctggg

SEQ ID NO: 27507 - DNA, 613 bp, Homo sapiens
agtgagttgagatcatgtcactgcactccagcctgggtgacggagcgagactcagtctcaaaaaaaaaaaaaagtatatatatatataattgctataatgtaatatgtatgtaattgctataattttcatttattgacgatctactagatttgtttttaaatccacatgtttctgtccaaatttccaagcttctacttaatttttttcctgaaatctacatgggattataaatctttaattttaaaagaacatattagatgtagataatgagtattctttatctgaaaataagtatgtgaacttttaaaagatctatttctactatctgttrtttctgcctcttctcattcatagtaacttgattcctcataaatttcataattttttaagccacttatattctttgcaactttacctgtgggaattcttgcagaactgaattaaattatgtttttttttctttaggaaggtcgcttacttctgtgaatcatctggagatgctacaaacaaaggattttaatttaaagtctgcttgatgttttccagatcacacaagtggttagttaagataaaatcttgcatgagggctggcatatggttgcaaattctcaa

SEQ ID NO: 27508 - DNA, 583 bp, Homo sapiens
tattaccttccatgcaattcaacaaagcacaggagagggagaaatcaaatctggagaaaagatgagtaagtgaagacttcacagactatatcatggctggagtaaaatttggaggttgaatttatcacccaggaaagagcagagataaccattccaggacttgaaagcaccagggccaaaaaaagacagttaacaagatagaatatcrggacagttaacaagatagaatattgcttgttgctgcaaatgtttctggagcctaaaattatagggcaagcaaaaggagatatagataacagaaaatatctgggccagattttgccagaacaaagggatactgttgagttagagatggaagcttcaaagaacagagaaaactgcaataggttatataattttgaattctaaagatctctaacatgtaatgagagtttaccatatgccaggcccgattctaagtacttttacatgtattaacaaatttaatactcatgacaacactgttacatgaatattattttagcttcactttacaagaatagaaaccctggcacctagagctccaggaagatgtgaaagatca

SEQ ID NO: 27509 - DNA, 1499 bp, Homo sapiens
atggtaagagcaaggaagcctagagggtgrgggctagtctcccaatgaagaaagaagctctgctgctggaatattcatccaaagctgtccactggctgagcctattttctgaaatgtctccaatttacatcaagattgactgcacccttggggactggtgggggctggactcacagggaggattttgagaagccaactttgaaaggagaggaagggaagccaagcctgggagtcaggtcagctttggaagcaccgtttctattcatggcactgctctttttgtccatgcactgtccctctggtgctgggtttggatgtgacttctatctctttaccaagatagatgctgtggggagactgaggataagttgcattggacctggaatcttagctgtcatcctggaatgcagttacttagccttgccccagtagcttcctccaaaggcccatcaactaatcctctcttgaagctctgctaatctgcagagattcttatctccctccagaggttacacatagaagagaccagaaggccacagccctactcagatattgctgcagtaaagcctctccccagtggatggacagcttgtccactgctgataccccttgggagaataagagattaatccaattaagcaattaagcttatttaaacaattaagcagttaaagcagaagggaatccctgctgatgatagaggaactgcctttcttctgtttagaagagacagagaagggagagcatttcctctgagcctggggaagcacaagagccttctctcagtgtccataaatgaaactctttggcaggtagaattccaggtgatcagccctctcatatcccagattatgatggactctggccttgagttacagcctcaacttgccctcatgtccctacacaacaggcttcacaaatacccctctgtgagcccaggcccagtcagtctccaaggctgcagtcaagcctgatgtaagttggtgacatttcaggaaatagagcttagccagtggagaactttgggtgaataattcaacagcagagcttctttcttcactgggagaccagcccttccctctgggctttgcactctccagtgtctcccagctggccccttctttgcaccccctctctagttcacaggactttaccctctctttcttctaggatccaatacactcaccagcctcaactgttttcctcaccaccagctgtgcacagtcaactttcgtccacaccattccctaatcacaatcctgatccgcagctcctgtgcctcctaatattaattacagacggccacttcatttaggagtgtaattgctttcagtacttaacctttctgcagttcaagtggggtgcacagagaaatgctcaacctcaacgcgggcctgggaaccccacagagctctgtccaacacgtataaacctctgtgagagctccatgttagagaggggtgtggagagacatcaatagtcattcagcctctaatggg

SEQ ID NO: 27510 - DNA, 1499 bp, Homo sapiens
atggtaagagcaaggaagcctagagggtgggggctagtctcccaatgaagaaagaagctctgctgctggaatattcatccaaagctgtccactggctgagcctattttctgaaatgtctccaatttacatcaagattgactgcacccttggggactggtgggggctggactcacagggaggattttgagaagccaactttgaaaggagaggaagggaagccaagsctgggagtcaggtcagctttggaagcaccgtttctattcatggcactgctctttttgtccatgcactgtccctctggtgctgggtttggatgtgacttctatctctttaccaagatagatgctgtggggagactgaggataagttgcattggacctggaatcttagctgtcatcctggaatgcagttacttagccttgccccagtagcttcctccaaaggcccatcaactaatcctctcttgaagctctgctaatctgcagagattcttatctccctccagaggttacacatagaagagaccagaaggccacagccctactcagatattgctgcagtaaagcctctccccagtggatggacagcttgtccactgctgataccccttgggagaataagagattaatccaattaagcaattaagcttatttaaacaattaagcagttaaagcagaagggaatccctgctgatgatagaggaactgcctttcttctgtttagaagagacagagaagggagagcatttcctctgagcctggggaagcacaagagccttctctcagtgtccataaatgaaactctttggcaggtagaattccaggtgatcagccctctcatatcccagattatgatggactctggccttgagttacagcctcaacttgccctcatgtccctacacaacaggcttcacaaatacccctctgtgagcccaggcccagtcagtctccaaggctgcagtcaagcctgatgtaagttggtgacatttcaggaaatagagcttagccagtggagaactttgggtgaataattcaacagcagagcttctttcttcactgggagaccagcccttccctctgggctttgcactctccagtgtctcccagctggccccttctttgcaccccctctctagttcacaggactttaccctctctttcttctaggatccaatacactcaccagcctcaactgttttcctcaccaccagctgtgcacagtcaactttcgtccacaccattccctaatcacaatcctgatccgcagctcctgtgcctcctaatattaattacagacggccacttcatttaggagtgtaattgctttcagtacttaacctttctgcagttcaagtggggtgcacagagaaatgctcaacctcaacgcgggcctgggaaccccacagagctctgtccaacacgtataaacctctgtgagagctccatgttagagaggggtgtggagagacatcaatagtcattcagcctctaatggg

SEQ ID NO: 27511 - DNA, 1542 bp, Homo sapiens
ccattaggaaggatgaatggatgaaatggatgttgacagaccaaatgatgcattcagtacaaacggcaagcactgaagccagcctgcagcgttgaggcaggagtagcaaatgaggatgcatagactgagtgtggacttgacagaagcttagctctgcagggaaaagagaggagtgcagctgtaaacagaggagcatttctgatcaaaggatatttataaggtgaaagacccttgacagtagttatgtgttaaggaaaagaatcagaagagagggagagactggacatcttgggaagtggacggagtctttgccagggagccaggagggaagggaccctgagtgcaggtcctccattcaaccttacaagagatgacatcttttcctctgagcctgcagagcagagacaggcgtggacacacttaaataaattgaaccaaacagaaacacactcaggatggcaccctctcctggtaacagtggttttcccagtgtagtaaggaacaaggccatgggctgagaagctggacgaaaagggaagtagctattttagggatgcatcaaggacataggtaaaggtgttcgcctggaatgggagtgacctcttctctggggagaaggtaaggatgggcagatataagtgagactccagttggcggctacaggatgcaggtaggtggaatcccaggacagccaatagcccaaatcctccaggtactagtggcaggggaatgtgactccaaggagaatagggtgttgtgagcgtttctaggtgaactgaaaaccaacccattcttaccccacaccttactttttgcaaccttggaatgaagggaattatccatatgaactctaaaattccatgtttatatgagagatattttcctgtttgctgtttacattttggtgacrggatccatttgaataacaaaagcatctgcactccagatccagtttaatccacatgcttccagagtccttgatgcttcctgtacactctgaataccaccaacagcagaaaacgattgagtgtggattgttaaaggggaaagattcaggacaaaaacatgaggactgtcactcccttgggagagagccctccgctcccatgtcctctgcactgttttcacatgaattgtgtagaggatctggaatggaatgttgccatgtgattaggtaccagtgagacaaattctgtcagtgatccttctgtattttaatttatgcagaccataaaagatattcagtctgttctctaatttatagaccttcttttgaaaataatctaatctgactacagtaaactaagatttttgaagaaatatatccttttcagaagttctcaaaattacttaaagctatccccccaatttgtcaactgccacaatcagtcgcacccggtgagcacatttccgtgtctttacctagtgatcagcagggccgcagcgggttcctgcctgcagtagggagggggtccttggagagaatgtggtttctttggaggactctcacgatcgtttaatgaagatatctatgcatgcccc

SEQ ID NO: 27512 - DNA, 1225 bp, Homo sapiens
ccggaaaaataactaatggttactaggcttaatacctgggtgatgaaatcatctgtacaacaaaccctcatgactcaagtttacctattcaacaaccttgcacatgtacccctgaatttaaaatacttgttaaaaaaaaaagttgtgctctagtagttatatttgtactcacaacgttttaaatgccactagtcccttgttagtttatttttatcttttaccacgtggcttttaattgttttcaataaattatttaatactatactgaaatgtgtctgttgtactcttgaacactcatccacgagattgaccacaattgctgtggcttgctggtttttaatggtatccaccaactgctggtgtcacagtcaatgatattgttctgctttttccttttctgctcccttctcctcccacttttagttgcattatttccctaccggaaaaataagcactttttcttttctcacacagccaacacaacacagaacagctctggtcactaaaatggggtgagaagtgcattccccacacactaagcaattctccagagacactggctgggtgtcctatgattcaactccattctgacaccacctacctggatttagagtcagatcgcacaggttaagggctcagacccacaagactgcacccatttcagacactaattccaagtagtaggttgtcacctatatgtcttactgattggctataaattggggttcccatgacccactctttgggtttggttaatttgctaggaaggctcacagaactcagagaaacacatttacaagcttatgagattaatagaggatgtgacaaaggacagagatgaaattcaggtaaagaggcgcaatagggtgaggtctggaagggtcgtgagtgcaggagctcctgtcatcagggagttggggtgcaccaccctcccagcacacagatgtgttcaaccctkaagctctctaaaccccatagttcaggtgttttatggaggcttcacccatcatgtaggtgtgatcaacaattaactcgataaccagctcctctccttttcccggaggttgaaagatggaggtgaacgttccaagcttctcattacggtgtggcctttctggtgatgatccccaatccaggagtccaccaagagtcacctcattggaacaaaagacgctcctactgcccaggaaattccaaatgattcagcagctctgtgtcaggatcc

SEQ ID NO: 27513 - DNA, 1225 bp, Homo sapiens
ccggaaaaataactaatggttactaggcttaatacctgggtgatgaaatcatctgtacaacaaaccctcatgactcaagtttacctattcaacaaccttgcacatgtacccctgaatttaaaatacttgttaaaaaaaaaagttgtgctctagtagttatatttgtactcacaacgttttaaatgccactagtcccttgttagtttatttttatcttttaccacgtggcttttaattgttttcaataaattatttaatactatactgaaatgtgtctgttgtactcttgaacactcatccacgagattgaccacaattgctgtggcttgctggtttttaatggtatccaccaactgctggtgtcacagtcaatgatattgttctgctttttccttttctgctcccttctcctcccacttttagttgcattatttccctaccggaaaaataagcactttttcttttctcacacagccaacacaacacagaacagctctggtcactaaaatggggtgagaagtgcattccccacacactaagcaattctccagagacactggctgggtgtcctatgattcaactccattctgacaccacctacctggatttagagtcagatcgcacaggttaagggctcagacccacaagactgcacccatttcagacactaattccaagtagtaggttgtcacctatatgtcttactgattggctataaattggggttcccatgacccactctttgggtttggttaatttgctaggaaggctcacagaactcagagaaacacatttacaagcttatgagattaatagaggatgtgacaaaggacagagatgaaattcaggtaaagaggcgcaatagggtgaggtctggaagggtcgtgagtgcaggagctcctgtcatcagggagttggggtgcaccaccctcccagcacacagatgtgttcaaccctgaagctctctaaaccccatagttcaggtgttttatggaggcttcacccatcatgtaggtgtgatcaacaattaactcgataaccagctcctctccttttcccggaggttgaaagatggaggtgaacgttccaagcttctcattacggtgtggcctttctggtgaygatccccaatccaggagtccaccaagagtcacctcattggaacaaaagacgctcctactgcccaggaaattccaaatgattcagcagctctgtgtcaggatcc

SEQ ID NO: 27514 - DNA, 642 bp, Homo sapiens
aaattagcctggcgtggtggctcatgcctgtaattccagctactcaggaggctgaggcagaagaaccgcttgaacccgggaggcggaggttgcggtgaaccaagatcataccattgcactccagcctggccgacaagagcaaaactccatctcaaaaaaaaaaattaactatattagaaatcagaaattaactatactagaaaatataaactatactggaaaatacagttacctatattttcttctaatgcatttattttttatacttgaatcttttatctttatatcttttggtgaggggaaaactttctaagtgtgaaaccaaaaggagaaaccacaaaaaaagaaacttctacagttgaaaattaktcacatacaagatttatttgtttgtttctctgtatttcctaattttcctataatgaactgataatgaactataatgaattgaaaggaagattttcttttgggggagcaaggatatcttctaagacgaatatagcagaccatgctgagccagcccaaatcctgttttgcttacaggcagaataaatgtttgcattatctttaaatttgctttccttctcagtatttcatatataatttatgcttttctcctagataactgtgccttactgctaa

SEQ ID NO: 27515 - DNA, 646 bp, Homo sapiens
cccctcccccagcctggctgccgccttgcagtttgatctcagactgctgtgctagcaatcagcgagattccgtgggcgtaggaccctctgagccaggtgtgggatatagtctcgtggtgcgctgtttttttaagccggtctgaaaagcgcaatattcgggtgggagtgacccgattttccaggtgtgtccgtcacccctttctttgactcagaaagggaactctctgaccccttgcgcttcccaggtgaggcaatgcctcgccctgcttcagctcgtgcacggtgcgcgcacccactggcctgcgcccactgtctggcactccctagtgagatgaacccggtacctcagatggaaatgcagaaatcacccgtcttctgcgtcgctcacgctgggagctgtagaccggagctgttactattcggccatcttggctccccccaccgacatctttcaaaacttgtaaataatattgtcctttgagtgttgaaccatgaagtcgtcccagagtgagggatgtcctgattgatactagaaagcattttacttatagaaargtatctttaatatatatttttacttacaaaaagcagtttagttatagaaagcaattaatatgcaaagccaggaagtattagcatacttaaa

SEQ ID NO: 27516 - DNA, 607 bp, Homo sapiens
attacacacacacaaagttgtgagatgggaggagggaaggatagtacatattataaccatgttaattacagtacattaaaatggtggtttatatgacaaataagcctgtaagtttaaatatactagtgttataactcaatgtacagattttctttatacaacacatataattaccaggaatgcaaaaaaaaaagaaaacataaataatgcccattttacaggtgacattttaaacaatgaacacrcaaacagttctggctgacaactggggcattggtccataaaaaccctttctaaaaatagaaatagttgtagcagcaatgctctttttaagcaactgaatacaagtcattagaagaccatttcaataaattttagttattaaccgtatcttacaaaaatgtctacacataaatttatcttccaaatatggaagaaacaaagtcccacgttgtagtgtcctgtaagagtcaccttgatgcttataacaaaatccatctgtggtcaagcataccacactcatatgaccgttaacacagcatatccacaaggaaaaataaagaactgaaacaatctgcgataggaaaagaaatgtattctatcgaat

SEQ ID NO: 27517 - DNA, 1903 bp, Homo sapiens
actctgtttatcaaagatcacataaatcttggattgatatccagggctcgataaaccaaagtcaaaaacgggatkggtaaaggaaagaaattacacatgtatactaccagaacatcattttagaaacaaaggcccgtgcttgaatggcagcccccgtgtattttctttgcctttattctacattttcttgccacctacaagtggagttagtctgtctacaagctagagttagtctgttggcctcttagcttcttaagaactaacatcttcctgccctttctagtccctccctggagtacagcctgtcattttcctaacaactgttttctttgactcttccagaagaggtgcatttactttttatgaggggcagaagttcagtccacactgctaattatccctcccttgtggcctggtggagagacctccctggccctcccattttgtgggcatccactgctaagccaccaagctcttcagaaaaggagttcccacatcctccctgaaagcctgagaaatattacagtgatgttgtccaaaccactctgaaatgactaactggaagtctctcaactgtctttctttccctccctaggaatccgatcatgggacacaaacctgattgaatgcaacttggaccaagaactcaaactttttgtatctcgacactctgcaagattctctcctgaagtcccaggtgaggcttccgctcagtgttggtcagcctagaattccaaaggacaaggagcaagctagaaagctttgtctgaggcagcaaaaagactctcttattgctaaaaggatactttgtatttgttattatcaactaggttagccagcagccacagtttaggaagtcactctaggttatcactgtgtgggttatctattttgtggattcttaatgagtttttaagttctagggttgtgtatgtgtatatatatacacacacacacatcaatgatcacacaaattttgaattgatatccagggcttgagaaagagagagagagaaagagagagagatagtatagtgtgtgtatgtgtatctcactgtactctgagctcaagggactacaaactatttaaatgttaatcttactcaaatgaaattctgaatacaaattggatgctcctaggatcccagaactgtcttcctgcaaaagaaaaaggaaacatatactgcatttcaaaatgaaatatacatcatcatttcataattgcattatcacccgccattgcattaccacttatctttcttcgtgtgggtaaaagaatctgatattacaaacttctgttaaaatagcctttttttcagagatgaaaaagaatatcaaagaataattaaaggtaaggatgcaaaaatttgtcatatgtgaagatgttcccactaaccagccaccttcctggggctatgatctgacccatgcctctggcgctggagatgtattcatactgacccatctcgtcttcttcttgtgagcaataacctatattcctcccatttggtcacatttaggaattatgagacagtttctggcccataaagactccaaacctggaatatatttctccagacctttgccattgacccatcagaaacactgtattacatcttatttcttgaccatcacttgaattttacataagagaaagctattttctgcccatatgcttttgttatatgattcctaattttattggcattgatataacatcaggaatgagattcagcctattttgactggttaggtcatattccattagtcgtgtatatacattgatatttgaaatcacttttatagaatatcagtgccttcgtgaatcacatttggctgcagtaatatgcccataggactgtctcagttcttccttttgagtttaatattagaataaaatccc

SEQ ID NO: 27518 - DNA, 1903 bp, Homo sapiens
actctgtttatcaaagatcacataaatcttggattgatatccagggctcgataaaccaaagtcaaaaacgggattggtaaaggaaagaaattacacatgtatactaccagaacatcattttagaaacaaaggcccgtgcttgaatggcagcccccgtgtattttctttgcctttattctacattttcttgccacctacaagtggagttagtctgtctacaagctagagttagtctgttggcctcttagcttcttaagaactaacatcttcctgccctttctagtccctccctggagtacagcctgtcattttcctaacaactgttttctttgactcttccagaagaggtgcatttactttttatgaggggcagaagytcagtccacactgctaattatccctcccttgtggcctggtggagagacctccctggccctcccattttgtgggcatccactgctaagccaccaagctcttcagaaaaggagttcccacatcctccctgaaagcctgagaaatattacagtgatgttgtccaaaccactctgaaatgactaactggaagtctctcaactgtctttctttccctccctaggaatccgatcatgggacacaaacctgattgaatgcaacttggaccaagaactcaaactttttgtatctcgacactctgcaagattctctcctgaagtcccaggtgaggcttccgctcagtgttggtcagcctagaattccaaaggacaaggagcaagctagaaagctttgtctgaggcagcaaaaagactctcttattgctaaaaggatactttgtatttgttattatcaactaggttagccagcagccacagtttaggaagtcactctaggttatcactgtgtgggttatctattttgtggattcttaatgagtttttaagttctagggttgtgtatgtgtatatatatacacacacacacatcaatgatcacacaaattttgaattgatatccagggcttgagaaagagagagagagaaagagagagagatagtatagtgtgtgtatgtgtatctcactgtactctgagctcaagggactacaaactatttaaatgttaatcttactcaaatgaaattctgaatacaaattggatgctcctaggatcccagaactgtcttcctgcaaaagaaaaaggaaacatatactgcatttcaaaatgaaatatacatcatcatttcataattgcattatcacccgccattgcattaccacttatctttcttcgtgtgggtaaaagaatctgatattacaaacttctgttaaaatagcctttttttcagagatgaaaaagaatatcaaagaataattaaaggtaaggatgcaaaaatttgtcatatgtgaagatgttcccactaaccagccaccttcctggggctatgatctgacccatgcctctggcgctggagatgtattcatactgacccatctcgtcttcttcttgtgagcaataacctatattcctcccatttggtcacatttaggaattatgagacagtttctggcccataaagactccaaacctggaatatatttctccagacctttgccattgacccatcagaaacactgtattacatcttatttcttgaccatcacttgaattttacataagagaaagctattttctgcccatatgcttttgttatatgattcctaattttattggcattgatataacatcaggaatgagattcagcctattttgactggttaggtcatattccattagtcgtgtatatacattgatatttgaaatcacttttatagaatatcagtgccttcgtgaatcacatttggctgcagtaatatgcccataggactgtctcagttcttccttttgagtttaatattagaataaaatccc

SEQ ID NO: 27519 - DNA, 1903 bp, Homo sapiens
actctgtttatcaaagatcacataaatcttggattgatatccagggctcgataaaccaaagtcaaaaacgggattggtaaaggaaagaaattacacatgtatactaccagaacatcattttagaaacaaaggcccgtgcttgaatggcagcccccgtgtattttctttgcctttattctacattttcttgccacctacaagtggagttagtctgtctacaagctagagttagtctgttggcctcttagcttcttaagaactaacatcttcctgccctttctagtccctccctggagtacagcctgtcattttcctaacaactgttttctttgactcttccagaagaggtgcatttactttttatgaggggcagaagttcagtccacactgctaattatccctcccttgtggcctggtggagagacctccctggccctcccattttgtgggcatccactgctaagccaccaagctcttcagaaaaggagttcccacatcctccctgaaagcctgagaaatattacagtgatgttgtccaaaccactctgaaatgactaactggaagtctctcaactgtctttctttccctccctaggaatccgatcatgggacacaaacctgattgaatgcaacttggaccaagaactcaaactttttgtatctcgacactctgcaagattctctcctgaagtcccaggtgaggcttccgctcagtgttggtcagcctagaattccaaaggacaaggagcaagctagaaagctttgtctgaggcagcaaaaagactctcytattgctaaaaggatactttgtatttgttattatcaactaggttagccagcagccacagtttaggaagtcactctaggttatcactgtgtgggttatctattttgtggattcttaatgagtttttaagttctagggttgtgtatgtgtatatatatacacacacacacatcaatgatcacacaaattttgaattgatatccagggcttgagaaagagagagagagaaagagagagagatagtatagtgtgtgtatgtgtatctcactgtactctgagctcaagggactacaaactatttaaatgttaatcttactcaaatgaaattctgaatacaaattggatgctcctaggatcccagaactgtcttcctgcaaaagaaaaaggaaacatatactgcatttcaaaatgaaatatacatcatcatttcataattgcattatcacccgccattgcattaccacttatctttcttcgtgtgggtaaaagaatctgatattacaaacttctgttaaaatagcctttttttcagagatgaaaaagaatatcaaagaataattaaaggtaaggatgcaaaaatttgtcatatgtgaagatgttcccactaaccagccaccttcctggggctatgatctgacccatgcctctggcgctggagatgtattcatactgacccatctcgtcttcttcttgtgagcaataacctatattcctcccatttggtcacatttaggaattatgagacagtttctggcccataaagactccaaacctggaatatatttctccagacctttgccattgacccatcagaaacactgtattacatcttatttcttgaccatcacttgaattttacataagagaaagctattttctgcccatatgcttttgttatatgattcctaattttattggcattgatataacatcaggaatgagattcagcctattttgactggttaggtcatattccattagtcgtgtatatacattgatatttgaaatcacttttatagaatatcagtgccttcgtgaatcacatttggctgcagtaatatgcccataggactgtctcagttcttccttttgagtttaatattagaataaaatccc

SEQ ID NO: 27520 - DNA, 1903 bp, Homo sapiens
actctgtttatcaaagatcacataaatcttggattgatatccagggctcgataaaccaaagtcaaaaacgggattggtaaaggaaagaaattacacatgtatactaccagaacatcattttagaaacaaaggcccgtgcttgaatggcagcccccgtgtattttctttgcctttattctacattttcttgccacctacaagtggagttagtctgtctacaagctagagttagtctgttggcctcttagcttcttaagaactaacatcttcctgccctttctagtccctccctggagtacagcctgtcattttcctaacaactgttttctttgactcttccagaagaggtgcatttactttttatgaggggcagaagttcagtccacactgctaattatccctcccttgtggcctggtggagagacctccctggccctcccattttgtgggcatccactgctaagccaccaagctcttcagaaaaggagttcccacatcctccctgaaagcctgagaaatattacagtgatgttgtccaaaccactctgaaatgactaactggaagtctctcaactgtctttctttccctccctaggaatccgatcatgggacacaaacctgattgaatgcaacttggaccaagaactcaaactttttgtatctcgacactctgcaagattctctcctgaagtcccaggtgaggcttccgctcagtgttggtcagcctagaattccaaaggacaaggagcaagctagaaagctttgtctgaggcagcaaaaagactctcttattgctaaaaggatactttgtatttgttattatcaactaggttagccagcagccacagtttaggaagtcactctaggttatcactgtgtgggttatctattttgtggattcttaatgagtttttaagttctagggttgtgtatgtgtwtatatatacacacacacacatcaatgatcacacaaattttgaattgatatccagggcttgagaaagagagagagagaaagagagagagatagtatagtgtgtgtatgtgtatctcactgtactctgagctcaagggactacaaactatttaaatgttaatcttactcaaatgaaattctgaatacaaattggatgctcctaggatcccagaactgtcttcctgcaaaagaaaaaggaaacatatactgcatttcaaaatgaaatatacatcatcatttcataattgcattatcacccgccattgcattaccacttatctttcttcgtgtgggtaaaagaatctgatattacaaacttctgttaaaatagcctttttttcagagatgaaaaagaatatcaaagaataattaaaggtaaggatgcaaaaatttgtcatatgtgaagatgttcccactaaccagccaccttcctggggctatgatctgacccatgcctctggcgctggagatgtattcatactgacccatctcgtcttcttcttgtgagcaataacctatattcctcccatttggtcacatttaggaattatgagacagtttctggcccataaagactccaaacctggaatatatttctccagacctttgccattgacccatcagaaacactgtattacatcttatttcttgaccatcacttgaattttacataagagaaagctattttctgcccatatgcttttgttatatgattcctaattttattggcattgatataacatcaggaatgagattcagcctattttgactggttaggtcatattccattagtcgtgtatatacattgatatttgaaatcacttttatagaatatcagtgccttcgtgaatcacatttggctgcagtaatatgcccataggactgtctcagttcttccttttgagtttaatattagaataaaatccc

SEQ ID NO: 27521 - DNA, 1903 bp, Homo sapiens
actctgtttatcaaagatcacataaatcttggattgatatccagggctcgataaaccaaagtcaaaaacgggattggtaaaggaaagaaattacacatgtatactaccagaacatcattttagaaacaaaggcccgtgcttgaatggcagcccccgtgtattttctttgcctttattctacattttcttgccacctacaagtggagttagtctgtctacaagctagagttagtctgttggcctcttagcttcttaagaactaacatcttcctgccctttctagtccctccctggagtacagcctgtcattttcctaacaactgttttctttgactcttccagaagaggtgcatttactttttatgaggggcagaagttcagtccacactgctaattatccctcccttgtggcctggtggagagacctccctggccctcccattttgtgggcatccactgctaagccaccaagctcttcagaaaaggagttcccacatcctccctgaaagcctgagaaatattacagtgatgttgtccaaaccactctgaaatgactaactggaagtctctcaactgtctttctttccctccctaggaatccgatcatgggacacaaacctgattgaatgcaacttggaccaagaactcaaactttttgtatctcgacactctgcaagattctctcctgaagtcccaggtgaggcttccgctcagtgttggtcagcctagaattccaaaggacaaggagcaagctagaaagctttgtctgaggcagcaaaaagactctcttattgctaaaaggatactttgtatttgttattatcaactaggttagccagcagccacagtttaggaagtcactctaggttatcactgtgtgggttatctattttgtggattcttaatgagtttttaagttctagggttgtgtatgtgtatatatatayacacacacacatcaatgatcacacaaattttgaattgatatccagggcttgagaaagagagagagagaaagagagagagatagtatagtgtgtgtatgtgtatctcactgtactctgagctcaagggactacaaactatttaaatgttaatcttactcaaatgaaattctgaatacaaattggatgctcctaggatcccagaactgtcttcctgcaaaagaaaaaggaaacatatactgcatttcaaaatgaaatatacatcatcatttcataattgcattatcacccgccattgcattaccacttatctttcttcgtgtgggtaaaagaatctgatattacaaacttctgttaaaatagcctttttttcagagatgaaaaagaatatcaaagaataattaaaggtaaggatgcaaaaatttgtcatatgtgaagatgttcccactaaccagccaccttcctggggctatgatctgacccatgcctctggcgctggagatgtattcatactgacccatctcgtcttcttcttgtgagcaataacctatattcctcccatttggtcacatttaggaattatgagacagtttctggcccataaagactccaaacctggaatatatttctccagacctttgccattgacccatcagaaacactgtattacatcttatttcttgaccatcacttgaattttacataagagaaagctattttctgcccatatgcttttgttatatgattcctaattttattggcattgatataacatcaggaatgagattcagcctattttgactggttaggtcatattccattagtcgtgtatatacattgatatttgaaatcacttttatagaatatcagtgccttcgtgaatcacatttggctgcagtaatatgcccataggactgtctcagttcttccttttgagtttaatattagaataaaatccc

SEQ ID NO: 27522 - DNA, 796 bp, Homo sapiens
ctaaatatcaggcttgtgctggacccctcaaatatatttgttgttaaaaatatggggcttgatttagygggagggtccaactcatcaaatcccatcaataattgtaaaattacaattgtaagaagtctactaaagaatgtgatgcttcagctgcttttatccagggggtgtgcctagtgcagagggtccaggaggaagtaatataattgagcagagacctagaagacagacagatgtcaatcaaagggtagaggcataggaagcaatgtaagcaaaggccccgtagcagcagggcatatggcatctccaaggaatgagaaggctggagtgtcaaaagcaaggggcattatgtaaaataaagcaggtctagggggagagggaaaaacctgtgcaggaaattatatgttaataaggcttttgggctttacctccttctctctaattgctgagtacttgacagtttcagcaactccatctgtttcttcaatagaaaagtagaaaaggagggaaaaatgaccaaaattcagcttttataaatcaacaggaagatgatctggaaaattaacccatttatgcctagtgtcccattattggaacactaagcttgtcagaattatgtatatcctactgctcaaggtcattgccaaggtctggcttttcacaaaaaaaattctaaccttgggcataaacaggttaatttgtttcattctggaattttttttttaattttacaaagctaagattttgaaacaattgactttaaaaagaaaaaatcctccctcaccagttcatttaa

SEQ ID NO: 27523 - DNA, 2407 bp, Homo sapiens
  misc_feature (1)...(2407): n = A,T,C or G
tcaaacctgagaatttctggctcagagataccatggcttaaacctgagatataaagaaaactgtacaccaaaaatggaactccaactttcttcgctaactctgcttttcctttccaggcctgcttttactttccaggcagaaaattgggagatccttctcagaagaaactgaaatgtcttcaataaagatccccagataatacactgaggtctcccaaatgaaaagctagtcaggcttctaaggcctcacactgagtgctatcagttaacagaaatcctgcttccaaataaagcaggccagggaccaccacacattggagggaagcctccaagaaaagaratcaaaacaatagaaaaaaggaattgataggaccagtcaaaatcaggagcaaaactttaaaaaaaaatcttaaaacactctcaaaaaatataaaattcaatagaaatagtagaggataaagtcacagaatatcccagaactagaataaaaagacaaactgaaaaaaatacaagggaaaaaattaaaaatcaatgcaggcgtattggtctaagcagcctagcatctgaataacaagactatcagtaaaaaagtaacagagaaaataaaaaaaaattctcaagaagagatagtctgcaggtttagtagcctcaataaaatgaaaagatccccaacaagctgttataaaatttcagaaccttagagagagagattccaaaaagcttccgcagannnnnnnnnnnnnnnnnnnnnnnnnnnnnnnnnnnnnnnnnnnnnnnnnnnnnnnnnnnnnnnnnnnnnnnnnnnnnnnnnnnnnnnnnnnnnnnnnnnncaaaaattagctgggcatggtggcgggctactcaggaggctgagacatgagaattgcttgaacctgggagacagacgttacagtgagtggagactgcgccactacagtccagtctgggtgacagaggttacagtgagtggagactgcgccactacagtccagtctgggtgacagagtgagactctgtctcaaaaaacgaatacaaataaaaaaaaattgtttttgaaataactattatcaaagcagcatagaaagattaaaatgtttcttttctaaaactaaattgtgcccaatgcatatcaaacttcatatatattgttttatagctgataaaatctgaaagatttttctgttatgagaagatccacacatacacttgcctgagtaaggcaccctgtgctggtttaggaaaggctttcatgtgactgtggtaatggctatagcaatatctaaaaaatgggcataatttttatttcttttttgttgtgttttgttgggttttttcccccctaaaggtctgctctctgatccaaatttttatctcttgatgtaatatggaaagtggagcattaacttacaaaaggcaagaacttgtttgaaaagtgtcttttaatatttatacattttgggcctgtgaaagtaaatcaaaacatccaaataactgttttcataaagcaagctaaaccatattataagatttttatgttagtaatagtgttattgaatttaggctatggaagcatctttgatgtttttaccttactgctttccaagtttaatattttcctattgctgcaacttctttttaaagggttgtagagcaccacgattctgttaataaataagtgaaagttatgcagcttgggaaatctttacctcttttaggagaaaacagatgtttctgcagtatgatgagaatgtctttgggagagaacttttattttttcctggaactgttgcagttttagtacatgaagtgacccccctcacgttctaagttattatgtacttttaattacctaacttcatgtcaaggaacagctcttaagaatcagcctttatataaaaccagaaagaaaaagataggtctgcttacttctaatttcttagatatgtctcctaattgtgtgtgtgtgtgtactttttttttttttttttgagggactacaggtgcgcaccaccatgcccagctaatttttgtattttttttagtagagacggggtttcaccatgttggccaggatggtcttgatctcttgacttcatgatctgcccgcctcggcctcccaaagtgctgggattacaggcatgagccaccgcacccggccgtgtctgtgtacttttaatctaacgtaagtggaatttattttggttttaattattgttggaaccaatatttgaaaatatagggagcagaaagtatatagtaaaaaaattattgatagtaatatcatagaatcagcaaatacacagactctagtgacatagggaaaaaatatagactataatggcataggacaaaaaactctcatgttttagtttagccctgtctttgaatatagcaacataatcatgca

SEQ ID NO: 27524 - DNA, 2407 bp, Homo sapiens
  misc_feature (1)...(2407): n = A,T,C or G
tcaaacctgagaatttctggctcagagataccatggcttaaacctgagatataaagaaaactgtacaccaaaaatggaactccaactttcttcgctaactctgcttttcctttccaggcctgcttttactttccaggcagaaaattgggagatccttctcagaagaaactgaaatgtcttcaataaagatccccagataatacactgaggtctcccaaatgaaaagctagtcaggcttctaaggcctcacactgagtgctatcagttaacagaaatcctgcttccaaataaagcaggccagggaccaccacacattggagggaagcctccaagaaaagagatcaaaayaatagaaaaaaggaattgataggaccagtcaaaatcaggagcaaaactttaaaaaaaaatcttaaaacactctcaaaaaatataaaattcaatagaaatagtagaggataaagtcacagaatatcccagaactagaataaaaagacaaactgaaaaaaatacaagggaaaaaattaaaaatcaatgcaggcgtattggtctaagcagcctagcatctgaataacaagactatcagtaaaaaagtaacagagaaaataaaaaaaaattctcaagaagagatagtctgcaggtttagtagcctcaataaaatgaaaagatccccaacaagctgttataaaatttcagaaccttagagagagagattccaaaaagcttccgcagannnnnnnnnnnnnnnnnnnnnnnnnnnnnnnnnnnnnnnnnnnnnnnnnnnnnnnnnnnnnnnnnnnnnnnnnnnnnnnnnnnnnnnnnnnnnnnnnnnncaaaaattagctgggcatggtggcgggctactcaggaggctgagacatgagaattgcttgaacctgggagacagacgttacagtgagtggagactgcgccactacagtccagtctgggtgacagaggttacagtgagtggagactgcgccactacagtccagtctgggtgacagagtgagactctgtctcaaaaaacgaatacaaataaaaaaaaattgtttttgaaataactattatcaaagcagcatagaaagattaaaatgtttcttttctaaaactaaattgtgcccaatgcatatcaaacttcatatatattgttttatagctgataaaatctgaaagatttttctgttatgagaagatccacacatacacttgcctgagtaaggcaccctgtgctggtttaggaaaggctttcatgtgactgtggtaatggctatagcaatatctaaaaaatgggcataatttttatttcttttttgttgtgttttgttgggttttttcccccctaaaggtctgctctctgatccaaatttttatctcttgatgtaatatggaaagtggagcattaacttacaaaaggcaagaacttgtttgaaaagtgtcttttaatatttatacattttgggcctgtgaaagtaaatcaaaacatccaaataactgttttcataaagcaagctaaaccatattataagatttttatgttagtaatagtgttattgaatttaggctatggaagcatctttgatgtttttaccttactgctttccaagtttaatattttcctattgctgcaacttctttttaaagggttgtagagcaccacgattctgttaataaataagtgaaagttatgcagcttgggaaatctttacctcttttaggagaaaacagatgtttctgcagtatgatgagaatgtctttgggagagaacttttattttttcctggaactgttgcagttttagtacatgaagtgacccccctcacgttctaagttattatgtacttttaattacctaacttcatgtcaaggaacagctcttaagaatcagcctttatataaaaccagaaagaaaaagataggtctgcttacttctaatttcttagatatgtctcctaattgtgtgtgtgtgtgtactttttttttttttttttgagggactacaggtgcgcaccaccatgcccagctaatttttgtattttttttagtagagacggggtttcaccatgttggccaggatggtcttgatctcttgacttcatgatctgcccgcctcggcctcccaaagtgctgggattacaggcatgagccaccgcacccggccgtgtctgtgtacttttaatctaacgtaagtggaatttattttggttttaattattgttggaaccaatatttgaaaatatagggagcagaaagtatatagtaaaaaaattattgatagtaatatcatagaatcagcaaatacacagactctagtgacatagggaaaaaatatagactataatggcataggacaaaaaactctcatgttttagtttagccctgtctttgaatatagcaacataatcatgca

SEQ ID NO: 27525 - DNA, 2407 bp, Homo sapiens
  misc_feature (1)...(2407): n = A,T,C or G
tcaaacctgagaatttctggctcagagataccatggcttaaacctgagatataaagaaaactgtacaccaaaaatggaactccaactttcttcgctaactctgcttttcctttccaggcctgcttttactttccaggcagaaaattgggagatccttctcagaagaaactgaaatgtcttcaataaagatccccagataatacactgaggtctcccaaatgaaaagctagtcaggcttctaaggcctcacactgagtgctatcagttaacagaaatcctgcttccaaataaagcaggccagggaccaccacacattggagggaagcctccaagaaaagagatcaaaacaatagaaaaaaggaattgataggaccagtcaaaatcaggagcaaaactttaaaaaaaaatcttaaaacactctcaaaaaatataaaattcaatagaaatagtagaggataaagtcacagaatatcccagaactagaataaaaagacaaactgaaaaaaatacaagggraaaaattaaaaatcaatgcaggcgtattggtctaagcagcctagcatctgaataacaagactatcagtaaaaaagtaacagagaaaataaaaaaaaattctcaagaagagatagtctgcaggtttagtagcctcaataaaatgaaaagatccccaacaagctgttataaaatttcagaaccttagagagagagattccaaaaagcttccgcagannnnnnnnnnnnnnnnnnnnnnnnnnnnnnnnnnnnnnnnnnnnnnnnnnnnnnnnnnnnnnnnnnnnnnnnnnnnnnnnnnnnnnnnnnnnnnnnnnnncaaaaattagctgggcatggtggcgggctactcaggaggctgagacatgagaattgcttgaacctgggagacagacgttacagtgagtggagactgcgccactacagtccagtctgggtgacagaggttacagtgagtggagactgcgccactacagtccagtctgggtgacagagtgagactctgtctcaaaaaacgaatacaaataaaaaaaaattgtttttgaaataactattatcaaagcagcatagaaagattaaaatgtttcttttctaaaactaaattgtgcccaatgcatatcaaacttcatatatattgttttatagctgataaaatctgaaagatttttctgttatgagaagatccacacatacacttgcctgagtaaggcaccctgtgctggtttaggaaaggctttcatgtgactgtggtaatggctatagcaatatctaaaaaatgggcataatttttatttcttttttgttgtgttttgttgggttttttcccccctaaaggtctgctctctgatccaaatttttatctcttgatgtaatatggaaagtggagcattaacttacaaaaggcaagaacttgtttgaaaagtgtcttttaatatttatacattttgggcctgtgaaagtaaatcaaaacatccaaataactgttttcataaagcaagctaaaccatattataagatttttatgttagtaatagtgttattgaatttaggctatggaagcatctttgatgtttttaccttactgctttccaagtttaatattttcctattgctgcaacttctttttaaagggttgtagagcaccacgattctgttaataaataagtgaaagttatgcagcttgggaaatctttacctcttttaggagaaaacagatgtttctgcagtatgatgagaatgtctttgggagagaacttttattttttcctggaactgttgcagttttagtacatgaagtgacccccctcacgttctaagttattatgtacttttaattacctaacttcatgtcaaggaacagctcttaagaatcagcctttatataaaaccagaaagaaaaagataggtctgcttacttctaatttcttagatatgtctcctaattgtgtgtgtgtgtgtactttttttttttttttttgagggactacaggtgcgcaccaccatgcccagctaatttttgtattttttttagtagagacggggtttcaccatgttggccaggatggtcttgatctcttgacttcatgatctgcccgcctcggcctcccaaagtgctgggattacaggcatgagccaccgcacccggccgtgtctgtgtacttttaatctaacgtaagtggaatttattttggttttaattattgttggaaccaatatttgaaaatatagggagcagaaagtatatagtaaaaaaattattgatagtaatatcatagaatcagcaaatacacagactctagtgacatagggaaaaaatatagactataatggcataggacaaaaaactctcatgttttagtttagccctgtctttgaatatagcaacataatcatgca

SEQ ID NO: 27526 - DNA, 1309 bp, Homo sapiens
tgcatgtactcatattgtatattaattatatactaaatatagtatatgctcttttaagatattgctctaataagctatcatataatggtaatagtgattactctttaacaaaagtaatgtcattttgtaaaaaaaaatcttttttttggtaatctcgtaagaaaaaagtttgaaaaaagttcttttgttatttttcacttatttgcttttgtcagtgaatgattcagtttcttaaatttcctgctgattttaatttgttgccttttggttaggtgtgttggcttacgtctgtaatcccagcattttgggaggctgaggtggggggatcacctgaggtcaggagttcgagaccagcctggccaacatggcaaaaccacctctctactaaaaatacaaaaattagccaggtgtggtcacacatgcctgtagtcccagctactcaggaggctgaggcaggagaattgcttgaacctgggaggtgaaggttgcagtgagctgagattgtgccaccacattccagcctgggcaacagagcgagactccatctcaaaaaaaaaaaattggttgcttttagttttgttttggatctgtattataaaacagtttgttatgattgtatcttatatctcttctatttctgacagcactcaattctgagtgaggcctgagagcttgacatctaaacattcagagttttagtgcatagactttgtgatgattatttggatactcagggacctttattgcttactattttgttatctgctrtatgtataattgtcatatttaacaaaatctggcacctttagataaatgagatgttacataatttaaaaaggtaatacttttctaattccttatttccactttctctttatttttagagtatgccaagatggaaggaagcctcatacagtgagattaataatccgtcggtattcctctgagaagcactatggtcgtgagagtcgtcagtgccctattccttcacatgtaattcagaaattagggacaggtatggactagttttccaacagtttcattagcaggttgaactcttaaataagccaactttgaatgagaaatatgctccaaaaatggagggtcttcacagggaattagcaagcaattaaatgcttttattctatcaggaattttcactggaaaactttgttgtttgtttatttatttatttattttttgagacagggtcttgctctgcaccaaggctgaagtgcagtggtgctgtgatagctcactgcagcctttgtctcccaggctcaaacaattctgccccagcttcccgagt

SEQ ID NO: 27527 - DNA, 966 bp, Homo sapiens
ctgggctgtgcctgaagagctgagcacctgccagtcaacctgctggatgcctggtggaatagtccacttagatgtttgtgtggcaccagtgacatggctattgctgctcagagatgaggaacctgtctcatggcccacagccttcctcggcatggtgtgggccatggcacggggcttgggggaggcagggtgtgatgcaggcatgtccccttgtggagacatagtgggcagtagctgttttcccaagtgctgctgccctccggttcctaccggttcccttggtggcagccccaaattcgtggttcgtgtttgatyagtgtctgttttcccaccacgtgtctggtcattcttgggtctctgccccttgtctggcaccgggcagacaggaacttgggaaatactgttggctggcgggtgggttagccaggatggctgcagcagggcttctgaggagctcgctactgagtcaggtccttcatttcctaccttattcatcctggaaccccgcggtgactttgatgttattacccctcccgccagcgaggccctgaggtcccagaaagtacgtgaagtgaccggctgggtttcttggcctcctaccccactcatgccacagcgtcttaggagggctgttgaattttgcagcaaacacgttggccaaagaagtctcccctgatggcattggtctctgtttcagatcatcactgccctggaggaggatggcacggcccagaagatgcagctgggctatcggctccagcagattgcagctgctgtggaaaacaaggtcacagatctataggaacccaggagccacggcctgctgttgcttcagcctggcctgggcagccctggaagctcggaggagaggccaccttcttaggtgcctgtagtgactgacaagcagagttagtggaaggtgactcccagtctcctggtggctctggcctcggccctgctggatcc

SEQ ID NO: 27528 - DNA, 630 bp, Homo sapiens
gagatgcacaagaaacccagggatgagagatgggaaagactcctaacagcctggagttccctgtgtcattctagttctgagcctctagagtcagggaatttcatcattcatctcatgatagtgctctctcttcttcattctcccttttactccccctaccgtgttcctatctcctcaggtttgccttgcaagtttctttatacagttatgcatcacttaacgacrgggatacatgctgagaaatacatctctacgcaattttgtcattgtgtgaacatcatagagcatccttacacaaatctagatagtatagcctactacacacctaggctatatggtatggcctactgctcctagggtacaaatctgtacagcatgttatgtgctgaatactgtaggcagttgtagcacagtggtaagtatctgtgcatctaaacatagaaacggtacagtgaaaatatggtattaaaatcttatgagaccaccattgcatatgcggtccttcattggctaaaatgtggtgatgtggcacatgactgtatttagaaattaggaaattacactttctatttttagtcaactacttcttcccttacacatatacacactacatatatataaatatatgta

SEQ ID NO: 27529 - DNA, 630 bp, Homo sapiens
gagatgcacaagaaacccagggatgagagatgggaaagactcctaacagcctggagttccctgtgtcattctagttctgagcctctagagtcagggaatttcatcattcatctcatgatagtgctctctcttcttcattctcccttttactccccctaccgtgttcctatctcctcaggtttgccttgcaagtttctttatacagttatgcatcacttaacgacggggatacatkctgagaaatacatctctacgcaattttgtcattgtgtgaacatcatagagcatccttacacaaatctagatagtatagcctactacacacctaggctatatggtatggcctactgctcctagggtacaaatctgtacagcatgttatgtgctgaatactgtaggcagttgtagcacagtggtaagtatctgtgcatctaaacatagaaacggtacagtgaaaatatggtattaaaatcttatgagaccaccattgcatatgcggtccttcattggctaaaatgtggtgatgtggcacatgactgtatttagaaattaggaaattacactttctatttttagtcaactacttcttcccttacacatatacacactacatatatataaatatatgta

SEQ ID NO: 27530 - DNA, 913 bp, Homo sapiens
cttctttccatccgcatcctctaggaatcctctctatttctgttgggcacatcttatgaacctcttcagattctcttgaacactcagacacttgcttctcctcagctgcttccacagtcaactgactcctttcatacttgcacggttctgccatctgaggttgaccagctgccctgccagaaccgcagactcctgctgcattttagacttggaagaaggaacaatatatatggtgtgggatctagcttcctaagccactgctgaaggggccaagtgatacaatcagggagttcaggtgagtgccctataagagtaatttcaaaagagaaaagatggaagagaactttagataaaattctccctccttttcccttctaattgttggttccaagggcaaatgttttctgaacagcttgtccagagatatccttcctggctgatgggatgcatctacatcttggacagcggtgtctctttgcaacttgtcagaaagcaacagccagtgcaataacatatcatcttgcattgttccctaccctttactgcctcacttctaccttgtttcacttttgcttccrtgggtttccacttccaaaataaagcattcacacttaagcactgctgcagtctctattttctagggaaaccaaagatatcatcttgaaggagttcacagcgagagatgtcttgggaggaagtctaggacttccacccaagtcacttagccctaggtcacttagccctagtgtctaactgagaacagcacacaactgagtaactgtgcctttcgcaagagaagactcagaattgacaaagatagtttgtgttgttaatgggagtaggggtggtaggacatcccttccccatgaaaaagctagtagcccatttctaggaggccagggcttagggataa

SEQ ID NO: 27531 - DNA, 548 bp, Homo sapiens
tgctgttatacaaaacatgatggctctccaagataaaattaaccatttccagataggattaaacataactctgaatatctatggacatgtgattaaacattatgaattcaacaaccaagctataatataactcatctttgtaagggagacacttaaaaagaagaggaaaggtgaggacctaaaaaagtgaaataattcacccatcaaataaaatgtctacagaaaaagatgactcaggaccaccaggagaacttcaaaagccaagtcaaagagctttagcgtttcagacatccttacagtcagttgttcacgtctccattgcattctctccctccctttctcccagtacacagcaccacctttgttctcccattaacccttaaactgggaagtctcttactattttctcatcttcctgccatcctctgatgaggatttgttatgaggacctgtgtttrgtcatcacaggtgatctccacatcccacccctataactattagttgaccccaaagctttcattaggaatactctatgcctgacttttaaa

SEQ ID NO: 27532 - DNA, 593 bp, Homo sapiens
gacactttatttaattatcttctatctttctcagctgacagtgaatttgcctttgcaaaaattataactgagattattattacagygagagagatctgacataaccaactccatcttgcttctaacctccaagctgtccttttttattcctgggcataggccttactaacttcgggagacacttagtttatagtttaaccttgaaacaaagacaataacagccctttccccaaacaaacccccttcttgcctggggactagactgcctttgcaggactaacaaattggccacaggattagaaatcatgggttaggagtcatgaagctggaggctgcaagagtctgaccctccccaaataactcctagggataatatcactattgtaaaatctacggatcagctgacaccacccaaatcgataaattggttcatctggtcttatggtccccgctacccaagaactgactcagcaaaaggggacagcttcgactccctatgatttcatctcctacctgaccaatcagaactttcaattcactgatcccccacccaccaaattatccttaaaactccaattcctgaattttctggg

SEQ ID NO: 27533 - DNA, 593 bp, Homo sapiens
gacactttatttaattatcttctatctttctcagctgacagtgaatttgcctttgcaaaaattataactgagattattattacagcgagagagatctgacataaccaactccatcttgcttctaacctccaagctgtccttttttattcctgggcataggccttactaacttcgggagacacttagtttatagtttaaccttgaaacaaagacaataacagccctttccccaaacaaacccccttcttgcctggggactagactgcctttgcaggactaacaaattggccacaggattagaaatcatgggttaggagtcatgaagctggaggctgcaagagtctgaccctccccaaataactcctagggataatatcactattgtaaaatctacggatcagctgacaccacccaaatcgataaattggttcatctggtcttatggtccccgctacccaagaamtgactcagcaaaaggggacagcttcgactccctatgatttcatctcctacctgaccaatcagaactttcaattcactgatcccccacccaccaaattatccttaaaactccaattcctgaattttctggg

SEQ ID NO: 27534 - DNA, 1385 bp, Homo sapiens
ccccaacacctatcccccagacctcaagcacataccctctggcctagcatctgatcttcaagcctaacaatggcaagtaaggagggtagggttgccagataagacacaagacacccagtcaaattagagtatcagataagcaacaagtcatgttttagtctaagtatgtcctaaataatgcatgggatatacttatccttaaaaaaaaaaaaaaaaacactagattttttgtttgtctggaattctgatttaacttatatcctgtatttttagtggcagccctagaaagatgacaggtggaggtgagggaggaggagagagaagatgaggggagggaaggaagaaataggcaggcagtagctctgttttaaaataataataataaaataacatacctaaacactttagcgagttgcaaaaacatcagggcagatgagccacgtcttcccaaggtcacctcttcccaagatgacccaacaggacatctttctgggtcacgaacttctaaagggtgataatgcagcagtcccacaagacactcctttgcatatttaatattcaacataatgatgctcaaatcatttaatactcagaatactctacaaaatggtattatgatttccattgcacagaggttcagaagagttaagtcatttgcccaaagtccctatctttaaatgacatatccaggattgtaagcctgaccagaccccaaacctgccttccctccaacaccccatatccagagcccgaatgccatcctcagcatcagccgagggaacattctgcaagaatggaactgctctgaatctgcactctccaatatgggaggctcaaacccatgtagctactgggcactgaaagtgtgtgtctagggagatggagcaacggaagtcttcatttaattttcatttcatttcattttaaataatgaaaaactttaaaagccacatgtagcttgtggatcccggaatggaaagcacagataacagctcctccctgtccagggagccaagctcccccgaccccctttgtctgtccctttgattgccctgaagcctgggcctggcatcccctatatagcraaagggtcccaagaaacacaagatgcagttgtaatgtccttggaaatcatcccttccacctcctcacctccaagatggggaatctgacagccaaggagccagaggccccaggatcatttcagggacagagctagtattggagagtgggcttctcactcccacacccctgttcttttctggcttagaatgggaaaagcaaaactcagtggttcccagcacaggctgggcagccctagaagtcccctccgggatctgagccccacctcgaaaacacctactgttttctgaaaggatatgaaa

SEQ ID NO: 27535 - DNA, 565 bp, Homo sapiens
taattatctgattatttgtataatcattaatgttttccaataatatttcctactatataacttacatttcttatttccatagctatacttctttaaataacaaaaaatgactacatacatttwaaataaaaatagatttaatgctctaacagcaattaaaaatatataattaagtagtcctttttatatatcttgtatataggctctaatgtatggcacaaaaaataatatactatatataatttaggtgattagttcaagcctatgtctgaaatatcagttttgtgcattttacctgtgtaaatttggcaccattgtcaaatctacacataaacattctagcataaacatctcttttaatttatgtaacttaaaatacatgaaaaagagggaaactacaatttcattgaacttactctttaacaggtatgagagctgtaaaatatagatatggcaacaaatacataaagcactggaatagagagaaaaattactacacatgaagcaaataatctctcacttattacaaagtgggaaaatcaggaaaggttagctgttggtatct

SEQ ID NO: 27536 - DNA, 491 bp, Homo sapiens
tgggagatgccagcaccaactctcaggtcttctccgtatgaccactctcctccctgtggctggctgggctcctcacccttgtgcccatactagaacatagacaccctccctttccacctcctccttttggtccaggcacattcttcatagtcagagacttctcacatttcttctcaacttggatgccctcatacttttctcttgcctcatacggaaaaaaacgcgccttgttctgcctaaactccacccccrtcccctgtccaggctcacaaagtacttaactttcctttcaccttttctatacccctcggcctctctccaggaaaggcaatctgtgatctgcctgcctttgcttacattttttgggaaccacgtcagcctttccaatgaaagctcagtgcattgttataatctgatattaataacactgggctaccagtcttggagggaagcattttcccatttaaaaacatgtcttagctgctgccttt

SEQ ID NO: 27537 - DNA, 506 bp, Homo sapiens
gcttttcctccaattacgtggtctcagaccacttttccttcctctgcctgcctgacagagtgctcctttggttgtcactcacattatttcaaggattcataggttatttcttgagggaggataggaaaacactgctctgtaccagcttgtccagaacccatatctccttattttccttgctatggttcaagcctttttccaattaatctttctattttgagaatttcctttagtgagtatttacgattatgttacataacaaatatatacatcacattgtggattgtactttatgtttttaagtttgcagtacaccagttgaggtgtggcatcacagctgcataggtatttatgttgaacttaccgctgagctccaccaatactgttctggaaaaagcacagcactgactcataccaccttgttggctctgagtgagygtgcatgcttactttaccactaccccacaaacattaggcaaaatgtagtcagatggctgacatatacc

SEQ ID NO: 27538 - DNA, 1254 bp, Homo sapiens
  misc_feature (1)...(1254): n = A,T,C or G
taaggttaataagtcttttgcagctctaccaaaactcttgaaattctaaaaaatgtacataatgactctaaatttaaaaaataatttaatgttgaaattaatatttaattaaatgtctataacatgtaataccatgcctataattatacatgattatattcaacataggaaatataaactttaatctgctttgtattatgtgtcaagggttctccacgacttaaagaacttggrcatatgatggtttttcaaagctccaggtagctacagcctcaggcagacttaatcactttcaaattctatgcatctaaagccaattgcagtattctgttcttttttttcccttaaatcctttttcaaggcattccattgctaattctacaagaaacaagactgtattttacttttgtttttattatccaatgtattatactcagcacacttacttaacttgtattagcacttgtaagttataattacaattattatttttgttaatacttatgtagtgctgacttactagcttgtttgctctttgatgaacaacattaattcattattcatttaagtctttcaagcttatgtgtagtgcttttggggttgtaagtgacagaaaccaagcgtaaactatctcagacaagtgaattttaggtcatgtagctgaaaccgtcaaggatgagcagcattgaggacaggtggattcaggggcttaagctattttatttctcaattccattttatgaaaattggccatattcttaggtggggtctcttgtcaaaataacaaggaagcagttactccactttagcaaccctgagattaacaatttggtaacaccaaaattgcaagnnnnnnnnnnnnnnnnnnnnnnnnnnnnnnnnnnnnnnnnnnnnnnnnnnnnnnnnnnnnnnnnnnnnnnnnnnnnnnnnnnnnnnnnnnnnnnnnnnnngaattcaccctcctagggtcgtcctccctgctagccagctcttctctgccaatcaactggagaaatctttcaaacccttcatatctctgttccttgtttgcctcaagtcagtaatccaatagataaagaggttgcctaaaaatttgcaggattcccctggctcccttctttcttgtttccttctcacgtggaacaaggtggtttgtggtcttagattatgtcctgcagacacccaggctcctctgactgactcagttgggaaaggagagtctgaagggacagtgcatggtcggagagcagtgac

SEQ ID NO: 27539 - DNA, 558 bp, Homo sapiens
atcattggattcagatgatcctgaatcacagagctgtgacaatgtcaatgattggatgtcatgatcagatgatgtcgacgcctaacagacaggtatagagctcggatacactggacaaaaagatgattcaagggatgacacaagtcttcatcatgctactcagaaaggagccaaatttaaaatttgcgagttatttctggaattttccatttaatatttttggacattggttgactgtgagtaactaaaatatcagaaagcaaaaccatggtttagtggggactactgcaatttaatttaacttaatttagtgggttggtagccttcaatatccacggagaatgagatttcttttatttttatcctataatacttaaataatagtttagtaagtaacccagcttgatccccaagctatttctaccaggtaaatccaaatctgtatggctaatgtgcagggcagcagatcagagagtttatacccatggagtgttggaaagcagccgaggaaagcaktaatcctcagtgatattggattgaccagaacaagattatccc

SEQ ID NO: 27540 - DNA, 1318 bp, Homo sapiens
taaagtagttaggttactcactgcctatgtctaattgctgtattctagtgacagaactgtgaccaaaagcatcacaaatgtaatagggcctttgccaaacatatcaaagttagacaactaacctttctctacattatttaagaaaatggtaaatgcaaatatcagttttggaaatatggtatgaggttaaacaatctcctttcacttaaatactatacagcaaaacaaggacaaagtaagaacaaacacagtaatttctcttcagctataaacagagcatcattacacatttccaggtttggtttctagatacgtactgacaactgattaggtaactttcactaccaaaatcttcaaatcagtgaagcacctgcacatattttgttttcaggtacacatatgaaggcccattattagtaagtaccttggcattaaaaatcagtagaaagtattacattttaaagaaaaattattactacctaatccaagtcaatgtcatttaatgttaatcattgtaaacacaattaaagtagtttgagagcaatcccaatcaatgtaatctccttaaggacaaggccaatctttsctgaactttaaaacattgtcactatatcacagtttgtctttattatctcatgaaaaaaatctgacaccaactcaaattattgattaaactgaattatcttgaaaataaacacgatttaaatatttttattctcactttttcaaataataaataatgtactattttggttcccaacttataaaaatatgtcatttgtgtaattttttttcttatactctcaagatcatcagaggtaagcaaaaccaactgaattttaaatggctggtgtcctctatcaatttttggaaacttgacaaagttagaaattttagataaatagatcaaataatgaattgttggacctgcatagaaaacaaaattgctattcatagaatcaaataaaagccttccattaaaatctaaaaaaaaaatcaatagttttatacatatggacaaataagtaaaacccagaggacaacaaacaaaaaataaataaaaattaaaagcaaaaacaattttttaaatttaatttaatttttttctttgcagatagagtctcgttctgttgcccaggctggagtgcagtggtgcgatcacagcttattgcaacctccgcctcccgggttcaaaccattctcctgcctcagccgcctgagtagctgggaatacaggtgcccgccaccatgcctggctaattttttttatttttagtagagatagggtttcaccatattggccaggctggtctcgaac

SEQ ID NO: 27541 - DNA, 535 bp, Homo sapiens
ttatttatttattttgagactgagtcgcttactctgtcacccaggcaggagtgcaatggcgtgatctcggctcactacaacctccacctcccgggttcaagcaattctcctgtctcagccttccaaatagttgggattacaggcacgtgccacaacccctggctaattttttgtatttttagtagagatggggtttcaccatgttkgccaggctggtctcaaactcctgagctgaggtgatccacctgcctcggcctcccaaagtgctgggattacaggcatcaggcgtcgtgcccagcctcaatttttaattctacgactttctgctctaattcaggtgaagcacaggataggtttgtattgtttttatatctgtctcctgcatgtatcctatctttcccattgtaatgagggttcctcaggacagagaccactgttcttctcatttcttcatttcttcctcccatccatccccaccccatctttcttacctagcagagtcaacattgggttagagcactgcatatgggttgag

SEQ ID NO: 27542 - DNA, 535 bp, Homo sapiens
ttatttatttattttgagactgagtcgcttactctgtcacccaggcaggagtgcaatggcgtgatctcggctcactacaacctccacctcccgggttcaagcaattctcctgtctcagccttccaaatagttgggattacaggcacgtgccacaacccctggctaattttttgtatttttagtagagatggggtttcaccatgttggccaggctggtctcaaactcctgagctgaggtgatccacctgcctcggcctcccaaagtgctgggattacaggcatcaggcrtcgtgcccagcctcaatttttaattctacgactttctgctctaattcaggtgaagcacaggataggtttgtattgtttttatatctgtctcctgcatgtatcctatctttcccattgtaatgagggttcctcaggacagagaccactgttcttctcatttcttcatttcttcctcccatccatccccaccccatctttcttacctagcagagtcaacattgggttagagcactgcatatgggttgag

SEQ ID NO: 27543 - DNA, 2287 bp, Homo sapiens
gggacacgaattcataatcaggatttgctagatcctcttagagggagtcagcatttgtggggcaatgagattatttacagagctatgagcaatagcaatagctagtgaaaaacagagactggaaaagcaacagaagagagcgagggtgggagaygacccccagaaaccttgttcttggagcctgtagaaaaatgattttcagactacagcagacctctgaatatatctttcaggagctattagtatcatatattggtcccgaatcttaaagcttgaattgaggagatgatggtttatagattcaaaggagtaggatttgttttttgtatgcaactgaggatttttttttcttccttcccccatgtaaaggtcaggtgatgctcagaaatttcaagccccttgaaaaagcaggaaaaaagcagactgcagtccttaaccctgaagatggctatggcctgtgaaaccaggggaagtggaagttagagggtcactcagggcagttgagcctggggagggtggagccccctatttcagaatggttccatcaggcccagatgggggcctcaaagagctggtcagctggacaccctctgactcctccctcccccatccctgtgcttccctggacctgggatcaaacctattttcagggcaaaccttgcaagggctccaaactgggagagagcgggtgggagggaggtgcaagaagagagggcactttgctgtttacagctaagccctggtgtctgaaagcctcaaactgaagacatcaataattcatacattcatatgctgtagagtatttccccttttgtcacatatctggccaattgatttcccttggccacaaacctgctgcttttagaacatcattaataacaagtcaactggtaaaatcttccctgggagagggggctttggttgggagaggttcctgaccttgtttcccccaagaaaaggggctgtgagcagccctggcagcagaatgtatgcacatgggctgggagccttcctcctcctgttttagtggaagaagggactgggggccagagagatgagatgcccaccctatggcctccccaggctattgctggaaccctctgatagggttacagggagagaaggaaagagagagagagagagaacttgggagcctcagaataagaatacaggttcctaatggaaccctctctagcagcctcctcctcccctcctcaccccaggttctgtctctgggggtttccgtgtctgatcctcaagtaccacgggatgaaactaatcaggggctctggaattactcaaagagctgggagcccatggtgcaacctggagcttctaccaaagcctccctgcacctcgtcagggaaaccaggaggccacccagctgaggccctcttggagtggcaaaatggggcaagggcatctttcctgctggctccattccctgagccccttccatggcatccggagcccagattgtctcctccttctgcttctgtgagtccctggacagcacctggctcgtagggaatgacccttcatggatactcacaagagacttgttgaaagagtaaatgaaagcggaaaggaactgacaactcattcacagtaagtaaagtgctgccacttcctcaggactctgggtttacagagactcaaaggaatgagtctctactggtgggatgtcagcaacttgggagaatagctaaatagggttttttgtcttaagggcagtgcgtgaaatcagatggctagagcctacatcacctatgtgacactggtcctgatgaaaactccccctctctcattgcgctgggtaggagaagtccctctggaagggtgttcttcaaggctggtagaaaaacctgcactgagcagtgcccgctgtgggaggagagggagcaggcctttccccactccttgccaggggcatcgccaaggtgtgtgcaccaggaagcccataccaccactcatacccactcccccctggccagtgagacccccccatgagaacccctgttacagggaggctgtgatccagacaggagggaagagtctaacagttctgcttttatcactaatgtggtgagatcttacatcgccaacaggaaggcctcccagagggctctgctcttctgatcccactgaagagtcctccctgctcctctcagccccatggtttatatctctggaaatctcctggttggcctgatattgatttggcttcgaaaaggagtcagtaagaaatacacacaccacaggtctgaaatagaatctgtcctttgca

SEQ ID NO: 27544 - DNA, 2287 bp, Homo sapiens
gggacacgaattcataatcaggatttgctagatcctcttagagggagtcagcatttgtggggcaatgagattatttacagagctatgagcaatagcaatagctagtgaaaaacagagactggaaaagcaacagaagagagcgagggtgggagatgacccccagaaaccttgttcttggagcctgtagaaaaatgattttcagactacagcagacctctgaatatatctttcaggagctattagtatcatatattggtcccgaatcttaaagcttgaattgaggagatgatggtttatagattcaaaggagtaggatttgttttttgtatgcaactgaggatttttttttcttccttcccccatgtaaaggtcaggtgatgctcagaaatttcaagccccttgaaaaagcaggaaaaaagcagactgcagtccttaaccctgaagatggctatggcctgtgaaaccaggggaagtggaagttagagggtcactcagggcagttgagcctggggagggtggagccccctatttcagaatggttccatcaggcccagatgggggcctcaaagagctggtcagctggacaccctctgactcctccctcccccatccctgtgcttccctggacctgggatcaaacctattttcagggcaaaccttgcaagggctccaaactgggagagagcgggtgggagggaggtgcaagaagagagggcactttgctgtttacagctaagccctggtgtctgaaagcctcaaactgaagacatcaataattcatacattcatatgctgtagagtatttccccttttgtcacatatctggccaattgatttcccttggccacaaacctgctgcttttagaacatcattaataacaagtcaactggtaaaatcttccctgggagagggggctttggttgggagaggttcctgaccttgtttcccccaagaaaaggggctgtgagcagccctggcagcagaatgtatgcacatgggctgggagccttcctcctcctgttttagtggaagaagggactgggggccagagagatgagatgcccaccctatggcctccccaggctattgctggaaccctctgatagggttacagggagagaaggaaagagagagagagagagaacttgggagcctcagaataagaatacaggttcctaatggaaccctctctagcagcctcctcctcccctcctcaccccaggttctgtctctgggggtttccgtgtctgatcctcaagtaccacgggatgaaactaatcaggggctctggaattactcaaagagctgggagcccatggtgcaacctggagcttctaccaaagcctccctgcacctcgtcagggaaaccaggaggccacccagctgaggccctcttggagtggcaaaatggggcaagggcatctttcctgctggctccattccctgagccccttccatggcatccggagcccagattgtctcctccttctgcttctgtgagtccctggacagcacctggctcgtagggaatgacccttcatggatactcacaagagacttgttgaaagagtaaatgaaagcggaaaggaactgacaactcattcacagtaagtaaagtgctgccacttcctcaggactctgggtttacagagactcaaaggaatgagtctctactggtgggatgtcagcaacttgggagaatagctaaatagggttttttgtcttaagggcagtgcgtgaaatcagatggctagagcctacatcacctatgtgacactggtcctgatgaaaactccccctctctcattgcgctgggtaggagaagtccctctggaagggtgttcttcaaggctggtagaaaaacctgcactgagcagtgcccgctgtgggaggagagggagcaggcctttccccactccttgccaggggcatcgccaaggtgtgtgcaccaggaagcccataccaccactcatacccactcccccctggccagtgagacccccccatgagaacccctgttacagggaggctgtgatccagacaggagggaagagtctaacagttctgcttttatcactaatgtggtgagatcttacatcgccaacasgaaggcctcccagagggctctgctcttctgatcccactgaagagtcctccctgctcctctcagccccatggtttatatctctggaaatctcctggttggcctgatattgatttggcttcgaaaaggagtcagtaagaaatacacacaccacaggtctgaaatagaatctgtcctttgca

SEQ ID NO: 27545 - DNA, 575 bp, Homo sapiens
tagaattggatgatactctttttgttcaatcatatttctgcatggctctccaaactttgcttcacctaagcataaaaacagatcactttccctcagtctttgggtcatcgttctgaaggcttctgtgtgtacataataagtaaattggtatgcctttcctcctattaatctgccttttgtgagctgagtttycagtgaatcttcagagggcaaaggtgaacagttcccttggccccagcatctaacatctcaagtacttgaattagcacagaaggaacagaatggagcaagaggaaggggagggatagggaacggagacaatggaagaagaaagaaaaacagcaagaaaaaaaggaagaaaaaagagaaaatgtgaaagaggaagagaaacagaaagcaaatgaggccacatttacacacacacacacacacactcaccaatcttagttgcaatcctagaatttgaaggttggattttggcttcaaccttgactgtcatcactagcggaggtgctgtaaggagaacaaccaccacagatagaaatgctttttgctttctcggtaagtgtccttca

SEQ ID NO: 27546 - DNA, 575 bp, Homo sapiens
tagaattggatgatactctttttgttcaatcatatttctgcatggctctccaaactttgcttcacctaagcataaaaacagatcactttccctcagtctttgggtcatcgttctgaaggcttctgtgtgtacataataagtaaattggtatgcctttcctcctattaatctgccttttgtgagctgagttttcagtgaatcttcagagggcaaaggtgaacagttcccttggccccagcatctaacatctcaagtacttgaattagcacagaaggaacagaatggagcaagaggaaggggagggatagggaacggagacaatggaagaagaaagaaaaacagcaagaaaaaaaggaagaaaaaagagaaaatgtgaaagaggaagagaaacagaaagcaaatgaggccacatttacacacacacacacacacactcaccaatcttagttgcaatcctagaatttgaaggttggattttggcttcaaccttgactgtcatcactagcrgaggtgctgtaaggagaacaaccaccacagatagaaatgctttttgctttctcggtaagtgtccttca

SEQ ID NO: 27547 - DNA, 605 bp, Homo sapiens
ttcatatactaattcaaacacttttaagtttttggatatattctcatttgatccaccaacacacaagagagatattcttttattctgattttaccatttgcaaagaaactgaggcttagagaagtaaagtaacttgttcagattgttagaactggattccaggttctaaataggactttgaggctcacccctttcaccactaatccatgctgcctctagaaggctaaaatctgtgtgctctttgcaccttaaaaaaagatgttgcctttatagcagcatgatttatagtcctttgggtatatacccagtaatgggatggctgggtcaaatggtatttctagttctagatccctgaggaatcgccacactgacttccayactggttgaactagtttacagtcccaccagtagtgtaaaagtgttcctatttctccacatcctctccagcacctgttgtttcctgactttttaatgatcgccattctaactggtgtgagatggtatctcattgtggttttgatttgcatttctctgatggccagcgatggtgagcattttttcattgttttttggctgcataaatgtcttcttctgagaagcacaca

SEQ ID NO: 27548 - DNA, 605 bp, Homo sapiens
ttcatatactaattcaaacacttttaagtttttggatatattctcatttgatccaccaacacacaagagagatattcttttattctgattttaccatttgcaaagaaactgaggcttagagaagtaaagtaacttgttcagattgttagaactggattccaggttctaaataggactttgaggctcacccctttcaccactaatccatgctgcctctagaaggctaaaatctgtgtgctctttgcaccttaaaaaaagatgttgcctttatagcagcatgatttatagtcctttgggtatatacccagtaatgggatggctgggtcaaatggtatttctagttctagatccctgaggaatcgccacactgacttccatamtggttgaactagtttacagtcccaccagtagtgtaaaagtgttcctatttctccacatcctctccagcacctgttgtttcctgactttttaatgatcgccattctaactggtgtgagatggtatctcattgtggttttgatttgcatttctctgatggccagcgatggtgagcattttttcattgttttttggctgcataaatgtcttcttctgagaagcacaca

SEQ ID NO: 27549 - DNA, 532 bp, Homo sapiens
ttttaaggatataacatttatcttagatttattgttattacagttgtttccatttcccagcaatgagcccattcaccccaggcctctcgtggcctctcatgtggtgatccaatatgatttactcataaaagcccgtgaccagagccccacctaattgcggcctaattacacttggcaaaagctgaggaaaatgccaccatgacttgctgtgtcgtttgggagcccagaataatccaygctgtgacttgtgtgtgtctcgggtactggcggcaggtggtacactgagagcatttccctctgtaattctgagagccatgtttttccaaatgagtgaagttctgacctgcagaaagcatgcttcctctaccccagagcaccaggggcctgtccacatggggcacttcggctgatctcatggctctcccgacagacggtttagggcactgtactccccagcagcaatgatcaccttagtgaagacaggagtcccccttatctgtggggaatgcctctcaagacctccagtgggtgc

SEQ ID NO: 27550 - DNA, 532 bp, Homo sapiens
ttttaaggatataacatttatcttagatttattgttattacagttgtttccatttcccagcaatgagcccattcaccccaggcctctcgtggcctctcatgtggtgatccaatatgatttactcataaaagcccgtgaccagagccccacctaattgcggcctaattacacttggcaaaagctgaggaaaatgccaccatgacttgctgtgtcgtttgggagcccagaataatccacgctgtgacttgtgtgtgtctcgggtactggcggcaggtggtacactgagagcatttccctctgtaattctgagagccrtgtttttccaaatgagtgaagttctgacctgcagaaagcatgcttcctctaccccagagcaccaggggcctgtccacatggggcacttcggctgatctcatggctctcccgacagacggtttagggcactgtactccccagcagcaatgatcaccttagtgaagacaggagtcccccttatctgtggggaatgcctctcaagacctccagtgggtgc

SEQ ID NO: 27551 - DNA, 532 bp, Homo sapiens
ttttaaggatataacatttatcttagatttattgttattacagttgtttccatttcccagcaatgagcccattcaccccaggcctctcgtggcctctcatgtggtgatccaatatgatttactcataaaagcccgtgaccagagccccacctaattgcggcctaattacacttggcaaaagctgaggaaaatgccaccatgacttgctgtgtcgtttgggagcccagaataatccacgctgtgacttgtgtgtgtctcgggtactggcggcaggtggtacactgagagcatttccctctgtaattctgagagccatgtttttccaaatgagtgaagttctgacctgcagaaagcatgcttcctctaccccagagcaccaggggcctgtccacatggggcacttcggctgatctcatggctctcccgacagacggtttagggcactgtactccccrgcagcaatgatcaccttagtgaagacaggagtcccccttatctgtggggaatgcctctcaagacctccagtgggtgc

SEQ ID NO: 27552 - DNA, 2027 bp, Homo sapiens
ggcgggaaagggagaccaagaaagcccgaggaggctgtgcttcacccttgttgggcccagctcatagaccagagcattccatgcaggggccagcagcccctgcccacctggttaccaagggctactgatggcggccactcccaagcctgtccatgctggttggactcgctattatgccagatgtaactaactgaaagtacatgatccaatggaagatgaccatgaagatgatatatatttaatatatttttttctatgaaaattaggttgtcaagtccaggcacggtggctcatgcctgtaatcccagcaagtgggaggccaaggtgggcagatcacttgaggccaggagttcaagaccagcctagccaacgtggtgaaaccctgtctttataaagataaaaaaaaaaaaaagttaaaaaaaattaggttgaatcctttgggaacactggattaaaaaagagaaatcactaaaagaatttctgaaaaattaggaatgagtgggactactgcacaatgattgggaagagctgcagaggacaaggaggaggctgttcttggatgctgttgagtgtctaaggttcccttccacaaaaagaaacgaactagaagttgttgatgatgcatttttgggtggtttatatcaggaagtcgatgcacaatgacattcagtaaatcaatcctaaaggcctcagcccgccatcaaaatatggctgccagatatacactttcatattttaaggcaaaataaaatgcgtagagtatatgtctcccatgtaatgctttcctgcttcaaccgacttgttttgatgaatcaaccacctaccctcattgcttcagataagaaggccgactgtcaagataggctttaataagttagaaagtagactgctataaagcagaaattgagtagaacttgtcagcaagtggcagagcctatgtcaaatgtaagtgtcttgcctgtcccctcaaagatgctgctgtggacgtactagccccagattcatgcctgcccctcatggcttctctctgcaacttgtggtcatgcgccttgttttaaaacccacaggaaggtgctgccgggagcctgcccttgttagggtgggactgtggccaagctacccttcagcaaggctgggtaggctccacctacccagcaaatgcgggcctctccgctcccatgtgtggataaggccaaggggtattggaaagggagtggtccagggtcctcaaccagcttgcagcttgccggccatattaccttgggcacaccattcccccagctcagggcctggcttcttcagtaaaataataggactggacttgatcatctcttaacagccatcagaaaataatctatgatccaatgaagacataagaagattccattgtatattgggagttagctaaccttaccgtcaacacccccatctgaggtgacactgtgatcctttatggttccagcatgatggtaatttacaaccccctccccccatgcacccggtaattctgtgtaagaatcattggcaagtgtctacaagttttaaaataaagaatttggascatgatttctgtaggaaaggtttcaggaaaacaaatgaacctctggtgtggttaatcaagactaatatgattccattggaaataagcccatcaagaaaaataaattatgttttcagcaattagagtcctcttctaccctaaaggttctctgaactaaaataacagccttctttagttgaaacccattgtgtgtgatttcaagaacatgtgtttaatatgatctgttgtccttgttttaattccttttggaaatatttcagttcagacactggttctgaatgttggtagtaagaggaacagcacagtttgaaatgttattttgaaactcttcatgaaggaaggttgcttttcaaattactttgaacaacaaaagtcttttttaaaatcatagaatgttaatttaaaaggtaattacagctcagtctgattttctttgttaaataaaagtcacatgaaaaggtcaaaa

SEQ ID NO: 27553 - DNA, 2027 bp, Homo sapiens
ggcgggaaagggagaccaagaaagcccgaggaggctgtgcttcacccttgttgggcccagctcatagaccagagcattccatgcaggggccagcagcccctgcccacctggttaccaagggctactgatggcggccactcccaagcctgtccatgctggttggactcgctattatgccagatgtaactaactgaaagtacatgatccaatggaagatgaccatgaagatgatatatatttaatatatttttttctatgaaaattaggttgtcaagtccaggcacggtggctcatgcctgtaatcccagcaagtgggaggccaaggtgggcagatcacttgaggccaggagttcaagaccagcctagccaacgtggtgaaaccctgtctttataaagataaaaaaaaaaaaaagttaaaaaaaattaggttgaatcctttgggaacactggattaaaaaagagaaatcactaaaagaatttctgaaaaattaggaatgagtgggactactgcacaatgattgggaagagctgcagaggacaaggaggaggctgttcttggatgctgttgagtgtctaaggttcccttccacaaaaagaaacgaactagaagttgttgatgatgcatttttgggtggtttatatcaggaagtcgatgcacaatgacattcagtaaatcaatcctaaaggcctcagcccgccatcaaaatatggctgccagatatacactttcatattttaaggcaaaataaaatgcgtagagtatatgtctcccatgtaatgctttcctgcttcaaccgacttgttttgatgaatcaaccacctaccctcattgcttcagataagaaggccgactgtcaagataggctttaataagttagaaagtagactgctataaagcagaaattgagtagaacttgtcagcaagtggcagagcctatgtcaaatgtaagtgtcttgcctgtcccctcaaagatgctgctgtggacgtactagccccagattcatgcctgcccctcatggcttctctctgcaacttgtggtcatgcgccttgttttaaaacccacaggaaggtgctgccgggagcctgcccttgttagggtgggactgtggccaagctacccttcagcaaggctgggtaggctccacctacccagcaaatgcgggcctctccgctcccatgtgtggataaggccaaggggtattggaaagggagtggtccagggtcctcaaccagcttgcagcttgccggccatattaccttgggcacaccattcccccagctcagggcctggcttcttcagtaaaataataggactggacttgatcatctcttaacagccatcagaaaataatctatgatccaatgaagacataagaagattccattgtatattgggagttagctaaccttaccgtcaacacccccatctgaggtgacactgtgatcctttatggttccagcatgatggtaatttacaaccccctccccccatgcacccggtaattctgtgtaagaatcattggcaagtgtctacaagttttaaaataaagaatttggaccakgatttctgtaggaaaggtttcaggaaaacaaatgaacctctggtgtggttaatcaagactaatatgattccattggaaataagcccatcaagaaaaataaattatgttttcagcaattagagtcctcttctaccctaaaggttctctgaactaaaataacagccttctttagttgaaacccattgtgtgtgatttcaagaacatgtgtttaatatgatctgttgtccttgttttaattccttttggaaatatttcagttcagacactggttctgaatgttggtagtaagaggaacagcacagtttgaaatgttattttgaaactcttcatgaaggaaggttgcttttcaaattactttgaacaacaaaagtcttttttaaaatcatagaatgttaatttaaaaggtaattacagctcagtctgattttctttgttaaataaaagtcacatgaaaaggtcaaaa

SEQ ID NO: 27554 - DNA, 1073 bp, Homo sapiens
atccttctgctttggtctcccaaatgagaggtattagccaccacaccaggcgtcctgagatgatttttaatgtacaatagtaaaatctttttttgaaagtgaggagttagaccctgaacactctggagcttgaatctttgttatcacgagtttctcattaagtgaaacgccacacaagaccttgtatgatctgatccctgctcatctttcaaacccatctactcacctctgccttgctgcctgctgttaggatccaccccacactcttctttccattcctctaagatcttgagatcattcttgccttggcaattgctgtttcctccatctggaacattttatccccatatagtcacatacagtggacttcttatcattcaactcgcagatcaaacgtgagattcccctttcctttgacacttaggcagccacttctgcctcctccaagtcccttcctgttcttgsattttgatcatttccttcaagtcacaatcagaatatttttccttgttgactggcttgtagtctctactgcttgcaatatgcaccctgtgcctagaatactacatgagagcagagggctggtctgtcatatttaccactagaatagtatttggaatatggcaagtatataatacatatttattaaatgaataggtgattagagtttgatgaggaaaggttattaagtatatgtaatccctgaacatctttttaggagacagggaagaaactggtgagaatgaggttaaatatgtaaaacaagtaggtttacaaaaaaaaaaaaaatgacagaacagagaagaggtaactgatgaagtgagatcttgaaaaggcagttggcattttgaaatacctaggtgttttctgtttataaatagctgaggttttggattttctttgacttgttaacaattgaaaatttttttagtgacataagttgatgacttaatatacttcactaaaaaattctctttgtataaaaatgttacaggtattcttgtttgcttaaattctgggacacttaaagggtggcttctctttctctttgttcactttgttatcttcttcta

SEQ ID NO: 27555 - DNA, 1073 bp, Homo sapiens
atccttctgctttggtctcccaaatgagaggtattagccaccacaccaggcgtcctgagatgatttttaatgtacaatagtaaaatctttttttgaaagtgaggagttagaccctgaacactctggagcttgaatctttgttatcacgagtttctcattaagtgaaacgccacacaagaccttgtatgatctgatccctgctcatctttcaaacccatctactcacctctgccttgctgcctgctgttaggatccaccccacactcttctttccattcctctaagatcttgagatcattcttgccttggcaattgctgtttcctccatctggaacattttatccccatatagtcacatacagtggacttcttatcattcaactcgcagatcaaacgtgagattcccctttcctttgacacttaggcagccacttctgcctcctccaagtcccttcctgttcttggattttgatcatttccttcaagtcacaatcagaatatttttccttgttgactggcttgtagtctctactgcttgcaataygcaccctgtgcctagaatactacatgagagcagagggctggtctgtcatatttaccactagaatagtatttggaatatggcaagtatataatacatatttattaaatgaataggtgattagagtttgatgaggaaaggttattaagtatatgtaatccctgaacatctttttaggagacagggaagaaactggtgagaatgaggttaaatatgtaaaacaagtaggtttacaaaaaaaaaaaaaatgacagaacagagaagaggtaactgatgaagtgagatcttgaaaaggcagttggcattttgaaatacctaggtgttttctgtttataaatagctgaggttttggattttctttgacttgttaacaattgaaaatttttttagtgacataagttgatgacttaatatacttcactaaaaaattctctttgtataaaaatgttacaggtattcttgtttgcttaaattctgggacacttaaagggtggcttctctttctctttgttcactttgttatcttcttcta

SEQ ID NO: 27556 - DNA, 940 bp, Homo sapiens
atcagcaaatttaggatacctccaaaggggcctgacaggttaggcaaagaaagcattgcataccatcagttctttcactgatagctaaagatctataggtcagagaagggcaggctctgatgtctcctccattaattattgaaggtaatattccagatgctagtaaatcttaataacttcaaatatmagcttcaaagatgtacttttgatgaacaaagccaaaacacttctccttatcaaaaagacatgttataatgcatattttatctttcaacggatatcctctcaccaataaacgtgatctttgatccaaaaattcttagtaatgccactaaaatttctcaaaacaaagtcagtttaaacgtgcttcagttaaaaccactgccctattgctctaaaagaaacattacaaaatgcaactacagactgtcaatttttcaacaactttgggagtgactgtttagacactgtcaaatgatttctaagcaaccctgccacaagcagactggcttgctataaacacaaggtgtaggatacataagaactaatatttgttaaggaatttctgtgtgccagactcttggctgatctctttgggtttgattgaatcgaatagtcatcacaatctgcagaaaggtttggtgacttgatcgcaagaagctggctagtaagggactgagtaagagacttcactaggcaagttaaagtgctgctctacactcccattgctgtctctgtacccagcacgtgggcacaaatgtaagagcctcgtgaaggaaagcataagcaagaacacactgagcagctctaggaagctccttaaggtagaatgagaaacttactcaggcaggctcctgcagttgcacaattatcattcttcttaagtgtgattactgctcaaagtcagaaacatcaaatgtggaaatattatccaagtagg

SEQ ID NO: 27557 - DNA, 940 bp, Homo sapiens
atcagcaaatttaggatacctccaaaggggcctgacaggttaggcaaagaaagcattgcataccatcagttctttcactgatagctaaagatctataggtcagagaagggcaggctctgatgtctcctccattaattattgaaggtaatattccagatgctagtaaatcttaataacttcaaatatcagcttcaaagatgtacttttgatgaacaaagccaaaacacttctccttatcaaaaagacatgttataatgyatattttatctttcaacggatatcctctcaccaataaacgtgatctttgatccaaaaattcttagtaatgccactaaaatttctcaaaacaaagtcagtttaaacgtgcttcagttaaaaccactgccctattgctctaaaagaaacattacaaaatgcaactacagactgtcaatttttcaacaactttgggagtgactgtttagacactgtcaaatgatttctaagcaaccctgccacaagcagactggcttgctataaacacaaggtgtaggatacataagaactaatatttgttaaggaatttctgtgtgccagactcttggctgatctctttgggtttgattgaatcgaatagtcatcacaatctgcagaaaggtttggtgacttgatcgcaagaagctggctagtaagggactgagtaagagacttcactaggcaagttaaagtgctgctctacactcccattgctgtctctgtacccagcacgtgggcacaaatgtaagagcctcgtgaaggaaagcataagcaagaacacactgagcagctctaggaagctccttaaggtagaatgagaaacttactcaggcaggctcctgcagttgcacaattatcattcttcttaagtgtgattactgctcaaagtcagaaacatcaaatgtggaaatattatccaagtagg

SEQ ID NO: 27558 - DNA, 1958 bp, Homo sapiens
ctttgttgcccagtctgtaaattttattttttaatttttttaatttattttttaagagacagggtctctgttgaccaggctggagtgtagtggtgcaatcatagctcactgcagtctccaactcctggctcaagcaatcctcctccctcagcctcctgagtagctgagaccacatgtgtgcaccactatattgcactagttgttgaagtttttcgttgagatggggtcttgcagtgttgcccaggctggtcttgaactcctagcctcaggcagtcctcccactccagcctctcaaagtgttgagattataggtgtgagccactgtgcctgagccatttccctctagtctttttcaacatcagattcatcattaccgagaagtagattggtttttcagaggcacccaaaattttagttgttgtctaagcaagtctgctcttagggtcactgacaaaaagtattatttgtgtgactatactgaaatttttgtttctcttaaaacacacacaaaatgctccaagtggaatgtttgaacatcatttgggaaatagcttacaacattttcaggtttaccttttctgaattataatgctttgtcattgaaaagagagcgtgtgcacaaactcttttgttgtttttcaagtttttcttaatggacatttttagacttacggcaccttggtccaaaggctatattgttttagaatttaaaaatgccatgaaggatctcagccagattgtggagtatcaatgcgataccggatccagtgtggatttaatcagaacagcttttcttacatgactgctaagaaagataaattagctttctatttttctagtgcggggcaggccccaactgtcaaagctcttgcaacttacagtggatacttcagggtcccattctcattgctgagacaccctgtggttttgtttgttgactcagggtattttgccaagaaccagctgctataaatgactgctgtgcacacacttccagctttttagctatttattaacaaaataaaagctgtatacattaacaaaatataagatatttgagattccagaaaaaataagggggagttgagtggaataataggtaaggatgactaaaaagaatgattgtggaaatagctcattttaaatatctttttctaacatcatatgttggagccctctggttytctgaagttttccactaaatctaataatcttagatgtattctgtactcactttgaaggagcagtaagctgagttcactcagcagggaaataacagtgaaaaggaaagaaaacattttgacactaagaaacgcgtgtgcattcacaggaaatcactctttgggacagtagtggtaatctctttctcttgcctggcccagttatctgtcctgactttcactcctcagtgtgcctcttcaccaaactctgtggaccagtgggtgtccattcagctgggcttgcttttttttgttgtttttattttatttaagttctagggtacatgtgcccaacgtgcaggtttgttacatatgtatacatgcgtcatgctggtgtgctgcactcattaactcatcatttacattaggtatatctcctaatgctatccctcccccttcccctaccccatgacaggccccggtgtgtgatgttccccttcctgtgtccaagtgttctcattgttcaattcccacctatgagtgagaacatgtggtgtttggttttttgtccttgcgatagtttgctgagaatgatggtttccagcttcatccatgtccctacaaaggacatgaactcatccttttttatgactgcatagtattccatggtgtatatgtgccacattttcttaatccagtctatcattgatggacatttgaaataggaacacttttacactgttggtgggactgtaaactagttcaaccattgtggaagacagggtggcaattcctcaa

SEQ ID NO: 27559 - DNA, 1115 bp, Homo sapiens
acacacacacacacagatacaggtatgtatattcaaattataaaattccacttcaacttacagcatacacrgacacataaccagtgactatattactgggccattcttctgaagtaaaccctatgcaaagacaaaattgtgtcaatcctctttcatagaatttttttttttcattttatttgagacagagtctcattgttgccccggctggaatgcagtggcatgatttggattgaagcaatactcccacctcagcctcctgagtaactgggatcacaggtgtgcaccaccatgcctggctaatttttttttgttatttttgggagaaatggggtttcactgtatttcccaggctggtctcaaactcatgaactctcgtgattcacccacctcggcctcccaaagtgctgggattacagtcatgagccactgtgctcagccttataaaaatatttttagttacttaacatctaaaggagttttgttttgtttgttttcttgtttttaaagaggtgaagtcttcccatgctgcccagggtggagtgcagtggctattcacaggcatgatcatggcacattacagcctcgaattcctggccttaagggatcctcctacctcaacctcccaagtagactacaggagtgtactattgtgcctggctcaaaacagtctttctaacccattaagagccactagatatttgcatcctttatttaaaatttatagatctgaatctctgacaaatagatctattatttttataaattactaattatattccacattcttattactaccaaatgaccaacatatacccagaaaatctcagactctctgtttgaagttgaataatacagttacttactaatttcaggtgaaattaagacaagttaggatatcatcgaagagtcaaattaaacctcaagaattgactgtataaaaataattcagattgtgtgggaaagtacactcttagaaaacaagaaatttctccaggaaaaaaaggataacagaagaccaatgggaggaaattgatttggagaaaagcagctgtatcttccatctgcactctcacaagagagaagtctaaacattacattgcagcagaattttt

SEQ ID NO: 27560 - DNA, 545 bp, Homo sapiens
tgtagttagactgtagatcgggagtcagcaaaggtttagtgtaaaaagaccagataacaaatattttcaaatttgccattttaatgcaaaagcagccagatgatacataaatgattgggaataaccttggttcaataaagctttatttacaaagccaggtggcaggccctcatttgctgaccccttctctagagctaaactacctaggtttaagtcaactctgtcatttatgagatacaggaaattaagcatgtcacttaatctctttgtgcctcagtctcctcatctataatatgggtcatattcataatgtacctgccttctagggcataaaatggtgtyttatatatgaagtgttcaaagcatgcagtaagtgctatgaaaaaacaatgcatgccattttgtgttgtaggattcaagtatctcaacagagtggccagaataatcatagttaacattcatatagcacttaccctctgcctaggcactttacgtatgttaactcatttaatcctcaggataccctaggctataggtaagatatc

SEQ ID NO: 27561 - DNA, 908 bp, Homo sapiens
tggtgctccctggtcaggttttggatttgattttgctcttttaatgaagatctcatgttgcacagacttagcattaattttctgtttatacacttagcaaaatgggtatttttgaaagttttaaaaatatacttgaattttatatttcaaattttaatatttcttgtgaatccaaggattattattctggtgaacccaaggaaagtgtagagatgtaggaccaaaaatgtggaaattagccccagagcaggtaaactttgaatataggtgagaatattaccaatagcctgggttatttttgggtttggggcagaaggggaagctgtctcttggtagagctgggagaagggggtgtgggagtagctgagtgattttcctttatttgcttaattggtcctaaggcaagtcagaggaaattttctctttcctagtgctctgagtgtgaggggatagttgggttttgtggtttgtttcatttctcccctacccctttccactgcttctgtgaaatagtgattttacaaatgaacccaaattggaaagtcactctttttattttttgstttttatgttccttcattctctagccacctaagtgtggattctttactccctgtcctttcctttcacctcatgggaaatacttggttttatgttctagttggtactataaaaactcatagtcttctctgggataagtctttctcagaattaaagtttaattcttccaaagatcctaagggaaaaaattatcaaaaggtcggtttccgactagaggcctggaccacaaaaatctgcacttggtttttctccgggagtgtctgttttagttttacgtcaactggaagatgtctagcagtgtgaagtgaccaatctgaggccaggcccagaactccgcgatctcacgt

SEQ ID NO: 27562 - DNA, 568 bp, Homo sapiens
agaactagggaatcagaggcctctaatatgcagtggcaaggaaggaaattgagatggggaatataagaggaagatcagatattttgtattttgtgggaaaggggaagagtaataaacagttagcctgctgagcatattgtagcctagtgtgcatgttatcagagatgcacagtaggcagttagatacacaggtgtaaagcacagagagagagctggcctgcagatcgagacttggcagtttgttgccatattgtattcagccaccataatatgaaatattcagaataccttacagataccayggtagggtcatttaggggactttctgcttattttctttacagaggaatgtgaccactggggaaattacatatctagcattcaattgtaacctaaatcagagccaattggaaatttcatcagatttaaatgtttcggaaaatagataccagcaataaagattacatcatcagatagaatatctatcgattatctatcggctatctatatttttcctatattcttattagtaaagctttgaattctttacacaaagtccagtgtttca

SEQ ID NO: 27563 - DNA, 568 bp, Homo sapiens
agaactagggaatcagaggcctctaatatgcagtggcaaggaaggaaattgagatggggaatataagaggaagatcagatattttgtattttgtgggaaaggggaagagtaataaacagttagcctgctgagcatattgtagcctagtgtgcatgttatcagagatgcacagtaggcagttagatacacaggtgtaaagcacagagagagagctggcctgcagatcgagacttggcagtttgttgccatattgtattcagccaccataatatgaaatattcagaataccttacagataccatggtagggtcatttaggggactttctgcttattttctttacagaggaatrtgaccactggggaaattacatatctagcattcaattgtaacctaaatcagagccaattggaaatttcatcagatttaaatgtttcggaaaatagataccagcaataaagattacatcatcagatagaatatctatcgattatctatcggctatctatatttttcctatattcttattagtaaagctttgaattctttacacaaagtccagtgtttca

SEQ ID NO: 27564 - DNA, 568 bp, Homo sapiens
agaactagggaatcagaggcctctaatatgcagtggcaaggaaggaaattgagatggggaatataagaggaagatcagatattttgtattttgtgggaaaggggaagagtaataaacagttagcctgctgagcatattgtagcctagtgtgcatgttatcagagatgcacagtaggcagttagatacacaggtgtaaagcacagagagagagctggcctgcagatcgagacttggcagtttgttgccatattgtattcagccaccataatatgaaatattcagaataccttacagataccatggtagggtcatttaggggactttctgcttattttctttacagaggaatgtgaccactggggaaattacatatctagcattcaattgtaacctaaatcagagccaattggaaatttcatcagatttaaatgtttcggaaaatagataccagcaataaagattacatcatcagatagaatatctatcgattatctatcggctatctatatttttcctatattcttattagtaaagctytgaattctttacacaaagtccagtgtttca

SEQ ID NO: 27565 - DNA, 817 bp, Homo sapiens
tgaaaccaccaaatgaatggatcaatattaccctgtcagtgttataagatgaatctgaaaccaagtacctcatgattttaaaatggcaataataataatagtattcattaagagtggatactattagccgagtttcctagaattatgtggtgatctttaatacacctaaagaacatggctgtaaatcactctccttaatgtttacaatttttgaaatcaataattccaaatatacttaattcaaaatatatcattaatatgtttacttaatttccattggtttaaccctgagtaacaggagaatgtactatgtttaagtagataatcagggattacagtaatatttacaaatgataaaacagttcccaaagtaatggaaaaataaagttgtcttggaagtccagaaattttagtaatattccaatctctttgtcccccattgtgctcctaatttgcatgtgcactgataatattgtttaatttcccaagcacaacattcataatcatatccaagcattatccacctgtgattttgagagaagataaattcttcccctgcaaaaatattgtgatatttgctcaacttctctcaggcagttgttttgtcyaatcatttgggtctcactgaatctgtgcctcatggcaatagtgaaattgtccaggatttaacaggatttgagtccaaaaatatttgtgtcaggagaggcacaattataaagtaaaaactaaaaactgaatttttttattgtattacaaaatagtttctaaaaaagcttccagatgcttgaacaggagtgctgcattaggggaatgaatt

SEQ ID NO: 27566 - DNA, 525 bp, Homo sapiens
ccaccacccaaataactagtgggcttcagctttttgtgcactgttgcccaggctggagtgcagtggtacgatctcagctctctgcaagctccgcctcccgggttcacgccattttcctgcctcggcctccggagtagctgggactacaggtgcccgccaccacgcccagcacattttttgtatttttagtagagatggggtttcamcgtgttagccaggatggtctcgatctcctgaccttgtgatctgccagcctcagcctcccaaagtgctgggattacaggcgtgagccactgcgcccggcgtgggcttcagttttattgggccaatttaaattaaatgaggaaatagaaatctaattttctattatttaagaagtaaggtaaataggaagcctgagtttttcaagaagcaagtcaagagcctagaaaatataagcaccctacaacccacaataaggaaaagttgcatcttaagaagagcttctctgacctgagaaaactgagtaattctccctgtgcagta

SEQ ID NO: 27567 - DNA, 597 bp, Homo sapiens
aagttgtaatcacttttgaaggactttggattccataggatttgaatttggacaaaatagtatagggagttgttgaaagtttttgagaaaagcctatcggagtgagaagaattatttcagaaacaatatccattctctagcacagttgagagagctcagaggtggggcaagtcagaagctgttatcacagtaactctagttgaaagataatgagagtctaaattgggctagtggcagtggaaaatgaaaaaaaaccacaaaggttttatacaaggagaatgtataggacttgaccactcgttgtggaataagagagattgaggaattttaaaaactggatttcaaacttgggtggataaaacaatggtggtaccaacaatagtgacataaaaaatgagmaagtggggctcttttggtgggtttggttaggtatctttggaatttgggtgctccaataacatctaaaaacttataaaaacttagaaagagtagttgaggggagatatactgagggggttgagaatctgttgaagcagaacagagtgtgagtcccctccagaaagaattttgggttctatttaagaaatattgaatgag

SEQ ID NO: 27568 - DNA, 802 bp, Homo sapiens
aaaaggagtcaaagggaaacatgatgttaccttccttttaagggcacattccagaagttgcacacaccacttacgtccacatccctttgaccagctcattagttatacaacttaactgggtgcccctgactcagggtctctcagaaggctgcaatcaaggtattgaccaggtaggcagtcatctcaagactcaactggagaggacctgcttcctctcactagcaagctcactagcatagctggtggcaggcctcaagttatttctggctattggcctgaaacctgagttccttgccatataagcctcttcgtaaggcttcctacacaacatgtcagcttgcttctcccagagcaaagacytttgagaaagacagaaggagacagctctaagagagggtaagagggagttaataagaaaagaagccagagtgtttttgtaacctaatctcataagtaacatctctttactttagctgtattctattcattggaagcccacactcaaaggaaggagtaaaacaagagtgtgaataacaggaggcagggttttggggggacattttaaaagttgccacaaggccccatagtgcattgcattcattaagatagacaccctattaacaccctcaatgaaagaatgaatgaaatgaagctcagaagagcgagctaagtggaagatatagatttggtagctggagccactgttacatgagaaggcccaggtagtctgggaatcacaaccctaaggatgatttacagttgtagacctgtaatctcaggtacttgagaggctgaagcagga

SEQ ID NO: 27569 - DNA, 1208 bp, Homo sapiens
acagcctgtgctctgccgctctcctgggtcactggccactttataaactgagctataatttctctatataatgtcccctctctctctcgactcagatcctgaaaggttgggcttgcacatctgctgaatcttccacagtatagcctagttgaggactgtaaacatgaaatgtttgctggggaatgaacaactggctcagtaagacaccacaaaaagggagggtgagagcatgaggcaagaaccaccaagagaaagaaggacttcttttcacgatgctcgaaaggcagggcagggcaatacagggttggtatattccaacaaaaacacaggagaatatacttccaccaaggctggattattaagtaagggcgtggtatctgtgcatacagtacaaacaatgataaccaggagaaggaccccagatgtaggctgaygtagaaatcagcataactttgtgagatcagtccaaagcctccactggagacagcagcttcgagatacccagatgctatcctgattctgagcagtaaccacaaacctagagatgtggtcaaaattaagcatgaatcagcttctctgctagaagcaccaaccagatgggccttcttgtatgtgcctcttaacttattagtagagagtagacgtgggcaagacaacagcacatttctgagttctagctcagctacatccagccctaggaccctgggcctgcttctctccataggccttcattctcctgcacttcaactgagaacattagattataactcagaatcttgtcagccctgatgttccagaaagccattaagtatttaacaaatacctgctcggtctcatagtgcactaggccctgagaaagtaacagaacaacaaagttaagtctctttcttttcctggaatgggttatctacttgggtaaatttgatacaaaaataatggttatgtgactgaagtaataccgtgtctttgtgtgtgtgtgatgtgaaagtacctgcctaggagaggtacaaaaagaaacatcccacaagattaacagtggttatctctgggctacagtctgcaggtaattgttgttacttacaattttctgtgaattctaaattttctacattaacaatgtatttctttatttaggtaaaatgacaccctcagctctcagggtggactagggagaaggtgcatacacattagccacacatcaaacatgg

SEQ ID NO: 27570 - DNA, 1208 bp, Homo sapiens
acagcctgtgctctgccgctctcctgggtcactggccactttataaactgagctataatttctctatataatgtcccctctctctctcgactcagatcctgaaaggttgggcttgcacatctgctgaatcttccacagtatagcctagttgaggactgtaaacatgaaatgtttgctggggaatgaacaactggctcagtaagacaccacaaaaagggagggtgagagcatgaggcaagaaccaccaagagaaagaaggacttcttttcacgatgctcgaaaggcagggcagggcaatacagggttggtatattccaacaaaaacacaggagaatatacttccaccaaggctggattattaagtaagggcgtggtatctgtgcatacagtacaaacaatgataaccaggagaaggaccccagatgtaggctgacgtagaaatcagcataactttgtgagatcagtccaaagcctccactggagacagcagcttcgagatacccagatgctatcctgattctgagcagtaaccacaaacctagagatgtggtcaaaattaarcatgaatcagcttctctgctagaagcaccaaccagatgggccttcttgtatgtgcctcttaacttattagtagagagtagacgtgggcaagacaacagcacatttctgagttctagctcagctacatccagccctaggaccctgggcctgcttctctccataggccttcattctcctgcacttcaactgagaacattagattataactcagaatcttgtcagccctgatgttccagaaagccattaagtatttaacaaatacctgctcggtctcatagtgcactaggccctgagaaagtaacagaacaacaaagttaagtctctttcttttcctggaatgggttatctacttgggtaaatttgatacaaaaataatggttatgtgactgaagtaataccgtgtctttgtgtgtgtgtgatgtgaaagtacctgcctaggagaggtacaaaaagaaacatcccacaagattaacagtggttatctctgggctacagtctgcaggtaattgttgttacttacaattttctgtgaattctaaattttctacattaacaatgtatttctttatttaggtaaaatgacaccctcagctctcagggtggactagggagaaggtgcatacacattagccacacatcaaacatgg

SEQ ID NO: 27571 - DNA, 896 bp, Homo sapiens
aaacacctcgcaccaggttcctcccccaacattgggaattacaattcaacatgttatttatgtggggacacagagacaagcatatcagtgatactcaaaatgttaaacaaccagttcagcgcgaggggcaactgatcagaaasgatatggtcacatcgattacctggaaatatttcttgtagggcagatgtaaaagatagttccaggttcaaatattgatgtatgaaagcctggggcgtggtcaggccagggggaggtcaagtttataaaggaagctcctccatcaacattctcctctgtatgtctcaaagttttgccttcacacctattttctttaaattctctcatattttcaacaaacatcacatcaacatatccttctaaaatttgtgaaaaatactccacttttagagaatgtgttctaaatgtttatgctctcccaaattctgagaaacaatggtaccattagctcttccctgagtctgctcaagaaaaacaaaatagagagattatttaatgctgaaatgtatactattgaatgagaaatgagaggttgtttcttttgaagtgtcattcacatggattcaatttgactgtgtagatgcaaattttgaccttcaacatctacctttttcctgcagatattttgctttttttccctgcaggtatttttgtattgtttcctaggctcaagctgcccaaagtgtctcagttgctttagtagcctaattgtgcagtggcatatttaaaagtcattattttcatcatctattaaatgtagcccagaacagtttaaaaaattgggtgaggcatttttgcaaaagcatttatgatgtgggctgccaaggaatgtgcagctgcaggagcttctttctctaatctcggacttttacttg

SEQ ID NO: 27572 - DNA, 958 bp, Homo sapiens
tacagagatgagcacacagtttctttatccaacaatgaattatcwgtcccgtttaagggcacaggtttctatgcctcatagcctaacattgagtcaacttcatagcttagctcaaattccacctccaagaatcctgtctcatccacacaccacatggctaggaaagagacatatcaggaaataattgagaacttggataatagactgcccccatataaaggcaacaggatggagagtagctgcactagtcacctacaaaaggcaagcaaggtgttaagctgatgaacgttagcatggggagggagaccaaagtgtcacaaaaattagcctttcctatttagattgcccacaaagctgatgacattgagaaactacccaggactcctgaataattcacatgcatttctcaccagctgattttactcatttaaaggtttcttttttctgtgacccagaaatatacagacatacaccggagcatgttatcagtctaaacctcatgaacagagacatgcactagctactgtgtggaattatgcaaaaagcagactttacttcttttaagtttcaaatgcatcagcgtccagaagataccacatcaaagggtattgtggccaagggaagccaactaccttccatactccacaatggaacccatctaaaagggttgcttgatggcaatacttaaatcctttcttctaaagctcagctgggagaagttacactgatgtacccacaaggtaggtgagtctcccagttgatttcaccagtagtttgttgaaactttctcaaaaaacattaagtctaaattcttatttgctttggcttataaatgagttcaatatttatggcaaagtgttttttgaggattttgaaactctctctactattttctctagtcatttataaaataaaaataaaaaatttatggatatgtttcccaccaaagggatctgtg

SEQ ID NO: 27573 - DNA, 1057 bp, Homo sapiens
tattacctttaaaattatttcttttctaagagcttaaaatcaagttttctaccatgcatagcagtcttgtattttcctaatgtcctcctccacagtctgtctctactgtctttttttctactaattgagactttaaatccttagttttttttaatctaatctatcaaactccacttcgattttggccttcactttcaaatctatcctcagaatgcatcattgtacgtcttttcttgctaatactcttgttttctcaccggattaccctcacccagcaagtacataacttcaatgtccaaatgggtttaccccaataaccattctattactggacctgacctatagagtgctacttctgtataagtcacacagctgctagattgacccaatataactccatgaattcaaacttagagtgtgcttttcactccacatagatacggagttatgctttctgcttctattgtctttctaacttcagtttgactttttckaaatttctttactgtctccacaatttcataccttccatccaagtcttttcttagaggttgaaatcatcttttgttttacagacaatgttgaaagttatctaacaggttcacactcagtatatagcacccacaaaataaaattgtatttcatggcagggcgcggtggctcacgcctgtaatcccagcactttgggaagccgaggcagtcagatcacgaggtcaggagatcgagaccatcctggctgacacggtgaaaccccatctctactaaaaataccaaaaaaaaattagccgggtgtggtggcgggtgcctttagtcccagctactcgggaggctgaggcagcagaatggcatgaaccctggaggtggagcttgcagtgagccgagatcgcgccactgcactccagtctggctgacagagcaagaccctgcctcaaaaaaaaaaaaaaaaaaattgtatttcatttatcccaacagtcttcatccatccattagaagaatgccatttccttcaaaggttcttgcactcatgtttgtaatctcgtgctttcccaagtcctca

SEQ ID NO: 27574 - DNA, 553 bp, Homo sapiens
caaaatgcccccagggagcgctggtaatttttcagtggatgctcaggagctgacaggaggaaagcactacataaagttatgtgcaaaagcactaggtcacagccagatagaatctgggattgtagggaaaaatacccacacttaaatgcccccaaacctggtgagaaagtaaatataagaagtcgtgcatcttcccctgatactcatctcccaaagtctgaagtgcccagaaccaactttataaatattaaaatattatttttaaaaagatgtaattgggatgtagggactaaaaaacagaccccaactttgtayacttatacttttagaaactaaaaaatgcaacagaatattaacaaagaatttctggatgtgatattacaagcaggtttatttcttacttgtaatgctttgtttattccagattatctgtagtgtacatatataatttttataataagcaaaactacaaacattattttaaaatcttacatcaagcttataagtcaggcaggcaatgtttattccatgaatttttatttatttatttcat

SEQ ID NO: 27575 - DNA, 683 bp, Homo sapiens
ggaggttttcagagatttagttcagattttttttcttggctgcatatatgtgaataaagaaaaatctcaataagctgacatctaaaacaagtaggaagaatatttttaaaaatattttctggtaatgtggtgaaatagcatgtgttgaaatttatgatatagaccagaagattataaccccatgttaaaatcatatgggaacattctaaaaaamtattcagtttctacacctcaaattttaattccacaggtatccagaatactgtggccaattttatattttaaaagctatctagctcgttcttgtgaacaattagtcttgtgagacctgatctgtcagttaattctacaggcataaagaaaaaggataaatgtaacatattattacttgttcaagatgatattatttgtttacaattcttacttacctcctgccctagctatagctttcctatgggcagagtatacttctctaccctattaatttgggagctttgaccaatggcatgtgggcagaggtggtagtttgtcatttgggaagagacttgaagatccactgcaaatgtccacctgagtgcttgtgttcctgtactctgctatgagaagacctaacctaccagtctagaatcaaagccagccaaaaccagctggccccttagcctacccactgtaaacctgtagat

SEQ ID NO: 27576 - DNA, 618 bp, Homo sapiens
ttcaacagcattccacaagtgcttatgggaatatcttgtcacagccccagcccttaggtggcatgaactacaragaggagttagcctcagtaatggactttaaggagcaatatatataaacaccagctaccatgttacacagggcagaaggactgataagaggggaagaaattaactggtttagaatttgcagaacataagtgggaggatatgtaaagcctttcaaagaaaggagtataaaaaacagtgcagtaggaaattggaagagaaagccacagtatcagcaaaccaggttggaaagtgcaacgcaacttgaggaaagagaaagttcccattgactcaaggaaagagacttaggctacttacaatttgaaactgcagatgagacaagaactaggcggtcttgacacaccaggcttaggcttctacctaatccatcagtcaatggagagtttttatccctgtagtaatatgctcgttgcccaaggaagaaaagccatcaaagtaagggaggagggagctgacagcatccacactgaggcacagtggaacatgcccatgggcacttggagactaggttgctgtgtgctgagtgagaacagatttctgacctcgtca

SEQ ID NO: 27577 - DNA, 560 bp, Homo sapiens
ccttcacagtctgcttagtctgtggagctgtagtcctgcttaattaaagcaggggtctggagggattaaccttcatttgaatatacgaatttttctttctgagactgcatccagtggtgtgctgataaacgtttaacaacgggctctctgggagaaaaaggaaccctgatttgtagcatttgctgattttcatggtgtaaatactaccactgctgctggctccaagctaccaacgtggcattactgatcatagagttgggaggagttgttaaagattggctttcctgagccagcatgagccagctcctgcacattgctgactctatcccttgtcagaggtcttactatgtattctggaatgttctcccaccttgctcccttcctgcagtgaacagagcagaatcctacagaacctaagaagtaatgggagtatggggagcccaaggagtgataagtcagattattttcayggcagttggagcacccccacaatgaacattgggagcctggagcagacaccccgtggaccacagccaagggcagcctcttttcagagaggc

SEQ ID NO: 27578 - DNA, 521 bp, Homo sapiens
tgagccacctcacctggcctatcatccacattttctagatgagaggaagaatgtactacaggaaatctccccaggatctgagatttgtcctgtgtcagaggtgaagcccaagacacggctcacaccgacattccagggcagtgccaagccttcccgggctccgggcagctcggaacttggggactttgcccccaccctccagcatctccagaatgaggggagtgtgtatgtgtgcatcgtgcatggcccctcctgccttcttgttccttctccctcctgtctcctttttcctcttgctccrccattctcccgcccacaatatctgctctaataagccaggcggcagtgctccaactagcccataggtggttcacgctggagtaccttgtgcaggataatttgccaaatgggttagaggtctgtcttgcaaggcctgtgcatacatccacaattagaagggagtgaaaggaggaggggaacctaacaaccaagaatggctccacatccatttgcacagtgtc

SEQ ID NO: 27579 - DNA, 550 bp, Homo sapiens
cctgcttttatctcttcaccaaataccttgtgattttttgtgccactacaacatattacctgagcctgggtaatttataataagtggacattgtatttctcacagttctggaaactgagcagcccaatgtcaagatgttggcatctggtaagggccttattgctgcatcatcctatggcagaagggcaaaagagcatggggtgtggcgtggsgtaaagaaagagagcagaaattattacatttttaaaatcagaaattcactcccaagacaactaacccattcctgtaataacagctttaattatgagtggagagttcttgtgacctaatcaccttttaaaggtaccacctctcaattctattgcattggggattaagtttccaacacatgaactttgggggacacattcaaaccatagcacaagtatactcgtcatactgagacccccaagcactggcctatataataagatatccattaggcttccagcattaatagtcttttctcccatgttttcttttccactgaaaaacttaaggtaactttgtc

SEQ ID NO: 27580 - DNA, 2011 bp, Homo sapiens
gaaaggtgttgtaaaaaacgttagagaccactcgatttttccccctttcatctgggacacaaagaattgatgagatgagcctgctgcctagaatagatgatacaatgttgttaacagataataaaaggcagaacttctcagctccaacatctactttgcttcaatcgtctatcaaggataatcatcttaagactggaaaggttagaatraacattagttcgaagaactaaaccaaaagacaaggtaggggattattttaagagggaaaaaaagaaaaatcagcacctaactgctctaaatgaattcctagcctatagtaaatacatatatgtatgtgtaggtatatataattattttctaacctacagaactgtgagaacctgcaaaatagttaagtgaactgttactaatcagagaagaactatggtgaatgagagaggaactaaaagatgaagacaatttagtcatcgttcagtatgcatgggggattggttccaagaccccttaccaaatctgcagatgctcaattatcttatataaagtgatgtagtatttcaaataacctacacacatcctcttgtatattttaaatcatctctcgattacttataatacctaacacaatgcctacacgtcatttgcatggattcaacatagtacttggtgtgtggcaaattgaagttttgctttttgaaactctatggaattttttctgaatacttttgatccatgattggctgaatccatggacgtgaaactcagggataaggagggccacctgcactctcccagtgttctaaaaagaagatggatcataaagatcataaaccactgttttttaaaatgggagtctacagatgtgctttcaaagttcacagatttacaaaatgagatccactgcttctaaaggatttttgggaaagatctgaaaattcagaagttaaaagaacatttctgagaattcagttaaacatggaactgagcttaattattttgaaagcagtgtttctcatacaaagaatatattctcaaagaccaaaaagaaatgtttcctctaaaaaaggtcctttacattagataagtctgaataataatgctattggccaatgagtttgaggccaatgctagtcaaacattaagtgcagctgattaacagactgcttaaaagggaggtggtgactggtggggatcagtaagcctccactgactaaatcccttttctttcttttcaaaaatagaaccctcagcatctggatttcaagaaggcttttgtgtaggccctattgttataaatgaagacacacgattccatgattatgaaacaatgtggattcacaactatgtagctgacaaacatacatggaggggtctcacatactaaagctattctttggccatccctgcctgtgagcccttctgaaagagcctcccctgggtcacccttggactcggtctctccttccatctcctggcctggcctagtacctgagccctaggtgtcagggtcaacatggagcacctgaccagccaggccagtcagatcccttttagagaatgtggatttgtggtcagtcaactcagcaccaagtaaggaacatcacggacaggtgggctggagggagcatcatggcactctgaagccacatgcatgccaaagttaggaagtgaaggagcagacgtacagagacttccccctcaccagaaaaaaaaaaaaaaaaagaacaatgaacctctgctgtgatacaagaggatcccttacagtaaatgcctaacttggtaagggctctgggtgcagactgcctgggttccaatgacaggataaggacacatgacacgattaatcaatgtacagatgacatgaaaaaaatcagaattctagaagattttgaaaggctgaataagttgaaggttctatactaaaggcctaaagaagcaactgtgtaaatacaatatgggagacacctgacccagcaaggcatgtagagcataaatgtttttactgcttttattg

SEQ ID NO: 27581 - DNA, 564 bp, Homo sapiens
tagatcattaatgtaaaaagatacagcagaaatcctaaatatcatcactaaatattttctcttattatatcccagtttcaatgaaatgtcactgttatgtaatcatcctttcagccgcaaatgattcagatttttctcaagtgcatgaatgtgtccccctaactgaaagcaaatatctgcccaagtctgtctctgaatactttattaaaaactatgaactaccaaatgttgtagaggaaaaaaatgttcaaactgacatcaaaattcaaatggcaaaacaaaaaaaaatcatggtaatgaagagggacagacattttctatttgatacatgacctccgtataagttctcagcaatactttaaggatagtttgttctttgtttctgtttttgtttctctgacaaattactcattaacttgtctgagtaatgattacaatgagaagtgggtgtaaaaaaatgtcgtgctgarttcatggtattgtaatgaagaaagtattacctatttcgaaatcatcatcctcagtaagcatttctgcctgtggaaccgctgggggaggttgaca

SEQ ID NO: 27582 - DNA, 631 bp, Homo sapiens
aaaaaggcttttaagaatcctaagggtattgtcccacagcacccaactctgagcccagaccaaaaaagggactatcttgaagagaattgtaggtatgtgtttcatttaacagaaagaaacccagtaagattcaaaggatgcccacaaagattatgagagaagtgtattagtggacacataatcagcttggacaaagcaggcagaggtaaagtgcaaagagtccttagagcccccagacttttatgggtgagacataagctgagaagattattcagctgaaagtgctatttcttatggaaaggggacaactcagaaggtgcaacaagagtctggagggtggatccaagagccgcagagaatcattccagagagcaggactcggccctccagccaaggaactggcagcatgtggatttcagacttgctatggtaatgyctggcgtatagctgtttatccactctttgagtgggaatatcccaagcacttatcccatccctgtattatcagtatacgttggacatatatgaggcaaatacctttttcatattgagaggtcttcatattgagagaaattgtataagacaacagcatcaaatgggccccatcagcaactgaaccttatttagatgg

SEQ ID NO: 27583 - DNA, 1025 bp, Homo sapiens
atgagggaggaggagggggaaggagagtcagggcacccaggaggggtggagagcatctagaacccaggatggccagaggcaaaatcaggaaaacaggagcaagagaaagtgtggaaggcacagcgtgagggccctgcagacacaggggagatgaatttgctgataaatatttgattagagccttcaccgccttgcactgtcttcccagcaaccccctcctccacctcctccaaggcctgagaaagagtgggctcctggttgggtgcagtggcttattcctgtaatcccagcactttgggaggctgaggtgggaggattgcttgagcccaggagttcgagaccatcctggacaacacagtgaaaccctctctacaaaaaataaaaaaaaaaaaaatagccaggtgtggtggcacatgcctctagtcccagtaatgtgggaggctgaggcaggatcatcacttgagcctggaggttgaggctgcagtgaaccaagatcacaccactgtggtccagccagggtgacagaggaaamccctgtctcaaaaaaaaaaaaaaaaaataaagaaaataaaataaaaaagaaagcgcagctcctgtcccatctgcttccttctcaccctacctctaaccctctgcagggctctaatccctgtcattcaacttggggctgaatgacagctgccaatcactctcacttgaggttctgcagggctgaagcccagagccctgagctaacaaatgacaggcgaacccgccaacataaaggggggagctccggcagtaggtgccagatctgagggcatctgtggtgggcaagaggtccctagcagatggggacattttagggacatttgtgacactagaataaaacagcatatttgagcccacagtgctccctgcttttacagacgctcactcattgagtggacacttccccctttcccagctaataaaaccgaggtgtagagacaaagtgatttgccaaactagtatgggaggaccccagagagcagcactggcagcca

SEQ ID NO: 27584 - DNA, 1025 bp, Homo sapiens
atgagggaggaggagggggaaggagagtcagggcacccaggaggggtggagagcatctagaacccaggatggccagaggcaaaatcaggaaaacaggagcaagagaaagtgtggaaggcacagcgtgagggccctgcagacacaggggagatgaatttgctgataaatatttgattagagccttcaccgccttgcactgtcttcccagcaaccccctcctccacctcctccaaggcctgagaaagagtgggctcctggttgggtgcagtggcttattcctgtaatcccagcactttgggaggctgaggtgggaggattgcttgagcccaggagttcgagaccatcctggacaacacagtgaaaccctctctacaaaaaataaaaaaaaaaaaaatagccaggtgtggtggcacatgcctctagtcccagtaatgtgggaggctgaggcaggatcatcacttgagcctggaggttgaggctgcagtgaaccaagatcacaccactgtggtccagccagggtgacagaggaaacccctgtctcaaaaaaaaaaaaaaaaaataragaaaataaaataaaaaagaaagcgcagctcctgtcccatctgcttccttctcaccctacctctaaccctctgcagggctctaatccctgtcattcaacttggggctgaatgacagctgccaatcactctcacttgaggttctgcagggctgaagcccagagccctgagctaacaaatgacaggcgaacccgccaacataaaggggggagctccggcagtaggtgccagatctgagggcatctgtggtgggcaagaggtccctagcagatggggacattttagggacatttgtgacactagaataaaacagcatatttgagcccacagtgctccctgcttttacagacgctcactcattgagtggacacttccccctttcccagctaataaaaccgaggtgtagagacaaagtgatttgccaaactagtatgggaggaccccagagagcagcactggcagcca

SEQ ID NO: 27585 - DNA, 1025 bp, Homo sapiens
atgagggaggaggagggggaaggagagtcagggcacccaggaggggtggagagcatctagaacccaggatggccagaggcaaaatcaggaaaacaggagcaagagaaagtgtggaaggcacagcgtgagggccctgcagacacaggggagatgaatttgctgataaatatttgattagagccttcaccgccttgcactgtcttcccagcaaccccctcctccacctcctccaaggcctgagaaagagtgggctcctggttgggtgcagtggcttattcctgtaatcccagcactttgggaggctgaggtgggaggattgcttgagcccaggagttcgagaccatcctggacaacacagtgaaaccctctctacaaaaaataaaaaaaaaaaaaatagccaggtgtggtggcacatgcctctagtcccagtaatgtgggaggctgaggcaggatcatcacttgagcctggaggttgaggctgcagtgaaccaagatcacaccactgtggtccagccagggtgacagaggaaacccctgtctcaaaaaaaaaaaaaaaaaataaagaaaataaaataaaaaagaaagcgcagctcctgtcccatctgcttccttctcaccctacctctaaccctctgcagggctctaatccctgtcattcaacttggggctgaatgacagctgccaatcactctcacytgaggttctgcagggctgaagcccagagccctgagctaacaaatgacaggcgaacccgccaacataaaggggggagctccggcagtaggtgccagatctgagggcatctgtggtgggcaagaggtccctagcagatggggacattttagggacatttgtgacactagaataaaacagcatatttgagcccacagtgctccctgcttttacagacgctcactcattgagtggacacttccccctttcccagctaataaaaccgaggtgtagagacaaagtgatttgccaaactagtatgggaggaccccagagagcagcactggcagcca

SEQ ID NO: 27586 - DNA, 1025 bp, Homo sapiens
atgagggaggaggagggggaaggagagtcagggcacccaggaggggtggagagcatctagaacccaggatggccagaggcaaaatcaggaaaacaggagcaagagaaagtgtggaaggcacagcgtgagggccctgcagacacaggggagatgaatttgctgataaatatttgattagagccttcaccgccttgcactgtcttcccagcaaccccctcctccacctcctccaaggcctgagaaagagtgggctcctggttgggtgcagtggcttattcctgtaatcccagcactttgggaggctgaggtgggaggattgcttgagcccaggagttcgagaccatcctggacaacacagtgaaaccctctctacaaaaaataaaaaaaaaaaaaatagccaggtgtggtggcacatgcctctagtcccagtaatgtgggaggctgaggcaggatcatcacttgagcctggaggttgaggctgcagtgaaccaagatcacaccactgtggtccagccagggtgacagaggaaacccctgtctcaaaaaaaaaaaaaaaaaataaagaaaataaaataaaaaagaaagcgcagctcctgtcccatctgcttccttctcaccctacctctaaccctctgcagggctctaatccctgtcattcaacttggggctgaatgacagctgccaatcactctcacttgaggttctgcagggctgaagcccagagccctgagctaacaaatgacaggcgaacccgccaacataaaggggggagctccggcagtaggtgccagatctgagggcatctgtggtgggcaagaggtccctagcagatggggacattttagggacatttgtgacactagaataaaayagcatatttgagcccacagtgctccctgcttttacagacgctcactcattgagtggacacttccccctttcccagctaataaaaccgaggtgtagagacaaagtgatttgccaaactagtatgggaggaccccagagagcagcactggcagcca

SEQ ID NO: 27587 - DNA, 502 bp, Homo sapiens
ccaccagtgccaccaggctctgaagcagacactcccagtggataggttgagaccacacgcagagaacccctcctccaaggctgactggctgcccaccagcggctcaccaaggcaggtccttgcctgagtgcctaggaggtctttggaggaacgaagggagacggcgctgtcgaggaagggatttccaaaaaccggttcatgtggtgccacagcagcacagcttggttccgtgccaacaacagccaccgggtcccacctgctgtccagggtctgcctaggtctaccagaccctgcctggggctcattccctttgtctgtctccgtgccaagcttgggggccccaggcgaaagtgggtgcaggctcctcagaggatgtggagagtgggaggtgctgtgtggcaactagacccccacccygaacttgagtgggctggggaggtgtccataatggccgggccaagacagagctggggaaggatgcagaagcaggacccccagccca

SEQ ID NO: 27588 - DNA, 638 bp, Homo sapiens
tttgacctttgaaatattggctagataatttacgtatttattttgaaaacaaaatgtgtgagtatgcaactatttgtttaaaatggcaactggccactgatgtagccttatacagttttatttaaaatatctgtgaaaatatagaaaggttagaaactcataaatgagtaaaagtattccctaaagactgaaaatttatttccaaaatctggaaagtattaacttgtatgaggagcctgatggatgtggattattgtaaacaaataatgcttctccttgtgagaagaatgtaaccccttccatgagggagaaggttgcactctggtttatacctggctcctgggctatcccctggcttagaggcacagtctatgtagaggagaaaacagaatgagtrccctttcccctgcttctatatagctgctgcttttaaacgttacctaaaacttcacttgtaccaaattaaaatatctttagtgtttagttatcttagtgcctcaagagcctaggtgatttaagaaaatctctatgtatgtgttacaaaaatgtgcttccttttccagacactttattttcatgttttggaaacctattacaataacattattagggcagggcatattactgttatataccaa

SEQ ID NO: 27589 - DNA, 536 bp, Homo sapiens
gatgaatgaatgaaagtgttttagatgtagtaaaacacacacaactaaaaaggataaagtggcttaagtttacttggaggtggtcagagaagtttcactgataaggtgcttaaattgaacaattgaaagatgtgtggattcagagaaaagaagggaaagccagagttctccagaaaggcaacacaggagaaaaagcataagatctgttcagagtatccttgcagacatttgaattggagtgtgatgtgcaaatcctataggacaatattagcttgagctcaactgactacgaggtcctttaaagcttgaaaagaagagtgttttatattttaggaatttgaaagtcagcttatatttatgatcagcttgctgctcgcatgaagaaactgtttctttttttttattattatactttaagttttagggtacwtgtgcacattgtgcaggttagttacatatgtatacatgtgccatgctggcgcgctgcacccactaactcgtcatctagcattagtagaatcagaataaatttgagg

SEQ ID NO: 27590 - DNA, 1165 bp, Homo sapiens
gatccaggctaaatgaacccaaacttggattaaatttgtgaaaaatcagacattagaaaagggacatgaacttggattgctcctaaatctccattagctacctcacagagaggcaaaacattttgggattttccgaggactctgtactagtggtatatgtaactcctgtgtgagtatctgacagggataaagtatatggacatggggatgtttgattaggggatggagcagatggggagagygtaggtaaagcaggagcaggctgaggacagagtgataggcaaaagggtcatctaagacaccagacttgaggaggtaggaagtttcttggaaggatacatgaaaatttttatgtaattttgagttttgggataaagccaaaaagacctgaacatatgggataaagacaaaaagaccagaacatatcctttttgagggtctggtaaaatgcatctacttgtaaaataatattgtgatgcaaagttccattaataggccaatttgatgtattagggattacaaaagaaaattacatgcttctttttgagcgtttatgggtcaaaatcggactgatttttaagaacgcatgcattctggagatgtatagaaattctagttgcttataaatttttgggacagaagtctggtaccagatgctggagtcagataatagggaagtctaatcacttctgaattcctcagataaggagttttgcctccggatggtcggattcattggccaccagatgatctttgctttacttaagaagcaaatcaaaggatttccctggctgattctcgctcaccaacaggtcctccaggagccggtctcccagccctgcccctcgcagccgtagctgcagccgcagcagatctgccagcccctccaccgctgtcaaggtcaggagaccgtccccaaaccgctccaagctgtccaatgtggcgcgcaaggctgccctcttgtcccggttcagcgattcctattcccaggcccgcctggacgcgcagtgcctgctgcggcgctgcatcgacaaggctgagaccgttcagcggatcatctacatcgccacagtggtatgtgacgcctgcgggactcccggctccttagggcagccgggagacaagttctgtaacgtgaatggaacaacttacaaagactagtgga

SEQ ID NO: 27591 - DNA, 617 bp, Homo sapiens
agtcttgcagacaaatatcaaaaattttttaaaaagaaagaaaagaaaagaaaaaaacagctcttcaaaacggtacacagctaggtaggtaggaagatggcttagacagcaaggttcttggtgagtatgccaatagcaaaatagcagaaaacattttccccttagccctaagcaaaggacaccaacaagctgttagaaaataaagacaatttttttaaaaattatgtatttaagtatacatgtgcattccartcatatatcagcaacacctcccatcttagtgactgtggcattttgctgtagtagggtaaaatttcaaggaactaccattacatggtggtaaaattgtagattttttacccatgattatgaacaaacctatattatatgttgtactgtccttactagatatctttaaaaataaatagtacaaaatagtttacctataagttctttttactttatgctaaaacaaaataaaacaagacaaaaattaaaaaagtaaacaaaaaaggcattattgcactgtatatgctcatttagaggcttattaaagaacaaaacataataaagagctttcaattttttttgtaatactttaactgccaaaaatttta

SEQ ID NO: 27592 - DNA, 617 bp, Homo sapiens
agtcttgcagacaaatatcaaaaattttttaaaaagaaagaaaagaaaagaaaaaaacagctcttcaaaacggtacacagctaggtaggtaggaagatggcttagacagcaaggttcttggtgagtatgccaatagcaaaatagcagaaaacattttccccttagccctaagcaaaggacaccaacaagctgttagaaaataaagacaatttttttaaaaattatgtatttaagtatacatgtgcattccaatcatatatcagcaacacctcccatcttagtgactgtggcattttgctgtagtagggtaaaatttcaaggaactaycattacatggtggtaaaattgtagattttttacccatgattatgaacaaacctatattatatgttgtactgtccttactagatatctttaaaaataaatagtacaaaatagtttacctataagttctttttactttatgctaaaacaaaataaaacaagacaaaaattaaaaaagtaaacaaaaaaggcattattgcactgtatatgctcatttagaggcttattaaagaacaaaacataataaagagctttcaattttttttgtaatactttaactgccaaaaatttta

SEQ ID NO: 27593 - DNA, 623 bp, Homo sapiens
tgaacattaactcccagctaattcagaaatctgctttagaggaaggagaatgaaggagagcattaaaattgggatagcagagattgttaaaacagagtgactatgaattgccatgagattaactgggtggggagaagctttgtagttctgggatctgaaagaagtgtgttgcatattttcttacttagtttcttttcctttttcttggcaaatggagaacttgctgcttccaaggtcctttactcactgcattgctatgatggagcattcaggtataaaaaccacagagaatccaaataaagatccttgtttacagataccagggattccataaagaggaggaaggtatacagacccttcccaagcccatagtctttgaatcagtaactacatgttagaagcaattagaagtccaccttccttggtaggacataagagcctctttcactatctggacctgcccytcccacttggagattctcacctagtcccatattctacctttaatgtaatagcattgattctcctgatttcacaggagttatgttttataaagttgtgggaaacattgaactggcgaattctgaggcatggctcctagtggaaaattgagggctaggttc

SEQ ID NO: 27594 - DNA, 938 bp, Homo sapiens
  misc_feature (1)...(938): n = A,T,C or G
cttccttacaccttatacaaaaattaattcaagatggattaaaaacttaaacgttagacctaaaaccataaaaaccctagaagaaaacctaggcattaccattcaagacataggcatgggcaaaggacttcatgtctaaaacaccaaaagcaatggcaacaaaagccaaaattgacaaacaggatctaattaaactaaagagcttctctgcacagcaaaagaaactaccatcagagtgaacaggcaacctacaaaatgggagaaaattttcacaacctgctcatctgacaaagggctaatatccagaatctacaatgaactcaaacaaatttacaagaaaaaaacaaacaaccccatcaaaaagtgggcaaaggatatgaacagacatttctcaaaagaagacatttatgcagccaaaagacacatgaaaaaatgctgatcatcactggccatcagagaaatgcaaatcaaaaccacaatgagatacaaaaatagttttcaacatgcaagaacccagggaatttggtgcttattaggaacctactacaggatgagtttcatctagstaagaaataactttgggggaaaaaagctgatgctgatggggaatatttaacatatttaattgtagatctatataagcctaaaaaaagatagatacaagaataggaaactagtatataaatgtatgttctaatgaagtagaaatagtgcaactgtaaaaatagagaaggaggagaataagagaaaagtagaataaggttattgattgaggtacagttaataggctggaattaaagaatatcagtaaaacccaacaaatcaaagtagaaaggtnnnnnnnnnnnnnnnnnnnnnnnnnnnnnnnnnnnnnnnnnnnnnnnnnnnnnnnnnnnnnnnnnnnnnnnnnnnnnnnnnnnnnnnnnnnnnnnnnnnnt

SEQ ID NO: 27595 - DNA, 1280 bp, Homo sapiens
tagcaagatgactattacagtcttatataacataaacataattatgtacattctgttacctttgccacatcccatagcacctgggagcaagtcacagatggcacccacactcaaggggagaggattacacagggatgtgaatgccacatcttgggggccaccttatgagtcttgctacaacgactatatttactggaagaatgctcattgttgcttgaagtctccttggaatctttccttgtggtgcacatgtycttttgattttattccacctttgattgtcccatagcaaaacaaagaacccacttacactaatctcattttgttcccatccaatctctttcttagacttcagatatttagcttgacttaattatgtttacatttctagacatgctaatatgataagttatctatgaaataatacaggcagtaagagggaaaagataacctgtgccaactttgtttcaaagagaactttctcagaaattcatcttcttcaacaaaccacattgtctgagtcctgtccagccttctggactgatgattgagccctgtgaagggagggactacagatcaaagtcaagggggacgttttcatacagggtacctgaaagaagcctgagctgattagtgaggaacccccagagaatgaattgcttggaaagtgtgagacctgagacaaaccaggaagtggttgtgacatttgggcttactcccaaacctagagtgggaagtgaggaactctttcatggattttgggcacacacatgcagtaatagcaggaggcatggaggaaaggtgaggtctatagacatttaatttctgaccgtgtatttctgatttattttatttgtcatgagcagggttttttaaaaaaattttcttttttaaagaaaggtgaatgaaaaatgaacacatggttgagataaaagaaacaaacttttttttcgtggaaatcttgtgtatgtttgaaaatggtcactgaactttcctcttcccttcagatttccttgagtaggcatcatgctgccccctgaatctctcctgtgggtattttaatcatgtttctctggatccattctggtaaccatatggaagacccattagaactctgctcagtagacagtgggatgaaatcagactaaggtgaatcttggaccttgtaaggaatttaatttcaaaggacctgtgaggagtcataacaccaccctcaaggaaaaagatacagtgattccctgtgtcatgatttttactgtaaccatatgtttttaattggg

SEQ ID NO: 27596 - DNA, 1280 bp, Homo sapiens
tagcaagatgactattacagtcttatataacataaacataattatgtacattctgttacctttgccacatcccatagcacctgggagcaagtcacagatggcacccacactcaaggggagaggattacacagggatgtgaatgccacatcttgggggccaccttatgagtcttgctacaacgactatatttactggaagaatgctcattgttgcttgaagtctccttggaatctttccttgtggtgcacatgtccttttgattttattccacctttgattgtcccatagcaaaacaaagaacccacttacactaatctcattttgttcccatccaatctctttcttagacttcagatatttagcttgacttaattatgtttacatttctagacatgctaatatgataagttatctatgaaataatacaggcagtaagagggaaaagataacctgtgccaactttgtttcaaagagaactttctcagaaattcatcttcttcaacaaaccacattgtctgagtcctgtccagccttctggactgatgattgagccctgtgaagggagggactacagatcaaagtcaagggggacgttttcatacagggtacctgaaagaagcctgagctgattagtgaggaacccccagagaatgaattgcttggaaagtgtgagacctgagacaaaccaggaagtggttgtracatttgggcttactcccaaacctagagtgggaagtgaggaactctttcatggattttgggcacacacatgcagtaatagcaggaggcatggaggaaaggtgaggtctatagacatttaatttctgaccgtgtatttctgatttattttatttgtcatgagcagggttttttaaaaaaattttcttttttaaagaaaggtgaatgaaaaatgaacacatggttgagataaaagaaacaaacttttttttcgtggaaatcttgtgtatgtttgaaaatggtcactgaactttcctcttcccttcagatttccttgagtaggcatcatgctgccccctgaatctctcctgtgggtattttaatcatgtttctctggatccattctggtaaccatatggaagacccattagaactctgctcagtagacagtgggatgaaatcagactaaggtgaatcttggaccttgtaaggaatttaatttcaaaggacctgtgaggagtcataacaccaccctcaaggaaaaagatacagtgattccctgtgtcatgatttttactgtaaccatatgtttttaattggg

SEQ ID NO: 27597 - DNA, 1280 bp, Homo sapiens
tagcaagatgactattacagtcttatataacataaacataattatgtacattctgttacctttgccacatcccatagcacctgggagcaagtcacagatggcacccacactcaaggggagaggattacacagggatgtgaatgccacatcttgggggccaccttatgagtcttgctacaacgactatatttactggaagaatgctcattgttgcttgaagtctccttggaatctttccttgtggtgcacatgtccttttgattttattccacctttgattgtcccatagcaaaacaaagaacccacttacactaatctcattttgttcccatccaatctctttcttagacttcagatatttagcttgacttaattatgtttacatttctagacatgctaatatgataagttatctatgaaataatacaggcagtaagagggaaaagataacctgtgccaactttgtttcaaagagaactttctcagaaattcatcttcttcaacaaaccacattgtctgagtcctgtccagccttctggactgatgattgagccctgtgaagggagggactacagatcaaagtcaagggggacgttttcatacagggtacctgaaagaagcctgagctgattagtgaggaacccccagagaatgaattgcttggaaagtgtgagacctgagacaaaccaggaagtggttgtgacatttgggcttactcccaaacctagagtgggaagtgaggaactctttcatggattttgggcacacacatgcagtaatagcaggaggcatggaggaaaggtgaggtctatagacatttaatttctgaccgtgtatttctgatttattttattwgtcatgagcagggttttttaaaaaaattttcttttttaaagaaaggtgaatgaaaaatgaacacatggttgagataaaagaaacaaacttttttttcgtggaaatcttgtgtatgtttgaaaatggtcactgaactttcctcttcccttcagatttccttgagtaggcatcatgctgccccctgaatctctcctgtgggtattttaatcatgtttctctggatccattctggtaaccatatggaagacccattagaactctgctcagtagacagtgggatgaaatcagactaaggtgaatcttggaccttgtaaggaatttaatttcaaaggacctgtgaggagtcataacaccaccctcaaggaaaaagatacagtgattccctgtgtcatgatttttactgtaaccatatgtttttaattggg

SEQ ID NO: 27598 - DNA, 1280 bp, Homo sapiens
tagcaagatgactattacagtcttatataacataaacataattatgtacattctgttacctttgccacatcccatagcacctgggagcaagtcacagatggcacccacactcaaggggagaggattacacagggatgtgaatgccacatcttgggggccaccttatgagtcttgctacaacgactatatttactggaagaatgctcattgttgcttgaagtctccttggaatctttccttgtggtgcacatgtccttttgattttattccacctttgattgtcccatagcaaaacaaagaacccacttacactaatctcattttgttcccatccaatctctttcttagacttcagatatttagcttgacttaattatgtttacatttctagacatgctaatatgataagttatctatgaaataatacaggcagtaagagggaaaagataacctgtgccaactttgtttcaaagagaactttctcagaaattcatcttcttcaacaaaccacattgtctgagtcctgtccagccttctggactgatgattgagccctgtgaagggagggactacagatcaaagtcaagggggacgttttcatacagggtacctgaaagaagcctgagctgattagtgaggaacccccagagaatgaattgcttggaaagtgtgagacctgagacaaaccaggaagtggttgtgacatttgggcttactcccaaacctagagtgggaagtgaggaactctttcatggattttgggcacacacatgcagtaatagcaggaggcatggaggaaaggtgaggtctatagacatttaatttctgaccgtgtatttctgatttattttatttrtcatgagcagggttttttaaaaaaattttcttttttaaagaaaggtgaatgaaaaatgaacacatggttgagataaaagaaacaaacttttttttcgtggaaatcttgtgtatgtttgaaaatggtcactgaactttcctcttcccttcagatttccttgagtaggcatcatgctgccccctgaatctctcctgtgggtattttaatcatgtttctctggatccattctggtaaccatatggaagacccattagaactctgctcagtagacagtgggatgaaatcagactaaggtgaatcttggaccttgtaaggaatttaatttcaaaggacctgtgaggagtcataacaccaccctcaaggaaaaagatacagtgattccctgtgtcatgatttttactgtaaccatatgtttttaattggg

SEQ ID NO: 27599 - DNA, 1280 bp, Homo sapiens
tagcaagatgactattacagtcttatataacataaacataattatgtacattctgttacctttgccacatcccatagcacctgggagcaagtcacagatggcacccacactcaaggggagaggattacacagggatgtgaatgccacatcttgggggccaccttatgagtcttgctacaacgactatatttactggaagaatgctcattgttgcttgaagtctccttggaatctttccttgtggtgcacatgtccttttgattttattccacctttgattgtcccatagcaaaacaaagaacccacttacactaatctcattttgttcccatccaatctctttcttagacttcagatatttagcttgacttaattatgtttacatttctagacatgctaatatgataagttatctatgaaataatacaggcagtaagagggaaaagataacctgtgccaactttgtttcaaagagaactttctcagaaattcatcttcttcaacaaaccacattgtctgagtcctgtccagccttctggactgatgattgagccctgtgaagggagggactacagatcaaagtcaagggggacgttttcatacagggtacctgaaagaagcctgagctgattagtgaggaacccccagagaatgaattgcttggaaagtgtgagacctgagacaaaccaggaagtggttgtgacatttgggcttactcccaaacctagagtgggaagtgaggaactctttcatggattttgggcacacacatgcagtaatagcaggaggcatggaggaaaggtgaggtctatagacatttaatttctgaccgtgtatttctgatttattttatttgycatgagcagggttttttaaaaaaattttcttttttaaagaaaggtgaatgaaaaatgaacacatggttgagataaaagaaacaaacttttttttcgtggaaatcttgtgtatgtttgaaaatggtcactgaactttcctcttcccttcagatttccttgagtaggcatcatgctgccccctgaatctctcctgtgggtattttaatcatgtttctctggatccattctggtaaccatatggaagacccattagaactctgctcagtagacagtgggatgaaatcagactaaggtgaatcttggaccttgtaaggaatttaatttcaaaggacctgtgaggagtcataacaccaccctcaaggaaaaagatacagtgattccctgtgtcatgatttttactgtaaccatatgtttttaattggg

SEQ ID NO: 27600 - DNA, 755 bp, Homo sapiens
tgacattttacctagagactctatgcataatgaataacactctgctatatctagtttctaaattaggggtgggagttgtatycattatttagttcccatacagcatatctactgtttacaccccacattttctttttttctttctttcttttttttttttttttttttttttttttagagacagagtcttgctttgtcacccccaggctggagtacaatagcacaatctcggatcactgcagtgtctgcctcctgggctcaagcgattctcgtgccttagcctcccaagtagctgggactacaggtgcgtgccaccacgcccagctaatttttgtatttttagtagagacatggtttcaccatgttgggcagtctggtctcgaactcttggcctcaagtgatctgcccaccttggcctccccaagtactgggtttacaggcatgagccaccgagcccgcattttctctgagacgtcttcaaaggcagtttactaatcctgctgaagagacaactgtcatttacacagcattttaaagttttacaaaatactgtcatgaattaggttaaaccatatgaaattgctgatatttgaccagttgtgatttctcaagcaacagtttcatgtagtttaacctataaatcatttcaattaattcttggaacagacgtgaggtaggtgaggcaattctttcttttctctaaccaaagaagtacctttatagatgtgagatgattcccagctattaagtagtaa

SEQ ID NO: 27601 - DNA, 530 bp, Homo sapiens
tataaactttctctaatttgttaaaatttgatagtaaatttggcattttgttgttttaattttaattgtcctcatactaatgaggtcgagagttttaattttctcttactttttgcattttctcttgcctgttcatatcctttgatacttttcaactggacctttatttttccttttctgaagaagttctttgtttatgaragatattaaacctttctccacatatagttcaaatgttttaccctgtcacttgctatttgactctctctgtttttttgccatatagaaatgattaacttccatcgtgaaaccagcctctgtctgcctgtatgtcctttgagttttgtttgttgcttgacaaggcctttttcaccccaagattaggcaacattcttctatattttcttctaatacttgtatgggtttgttttacacttagttatttgatatggtttggatctgtgtccccacccaaatctcattttcaattgtaatacccaatgtttggcagtggggcctggtgggaggta

SEQ ID NO: 27602 - DNA, 511 bp, Homo sapiens
gcacccctactagactacagtgtagtataaacataaactttagatgcactgggaaaccaaacacttccgtctgacttgctttattgcagtggcctggaactgaatccacgatatctgaggtataccactatttsaactgaataaaattggtagctttcactttgtttttacttcttcagcaatcataacaaattttggtgtatttaaagtacagcaaggtaattattatcttcaaagagcccctaaattagtagagaagagaatacctataaaaatgtaaaaacaatgctggtaaataatgacaaatggcataataagggaatagatccaatggttaagaattgcacaaaaataaaaatcactctatttagaattggaaaaagcaccaggaatggtatcttattttaacaaaatttgtaaaactcaaaaggctgacataagtgatgggctctggttatatgaacaggctgagcaagagtggagtgtagaaatttcccagagaactgagaaa

SEQ ID NO: 27603 - DNA, 511 bp, Homo sapiens
gcacccctactagactacagtgtagtataaacataaactttagatgcactgggaaaccaaacacttccgtctgacttgctttattgcagtggcctggaactgaatccacgatatctgaggtataccactatttgaactgaataaaattggtagctttcactttgtttttacttcttcagcaatcataacaaattttggtgtatttaaagtacagcaaggtaattattatcttcaaagagcccctaaattagtagagaagagaatacctataaaaatgtaaaaacaatgctggtaaataatgacaaatggcataataagggaatagatccaatggttaagaattgcacaaaaataaaaatcactctatttagaattggaaaaagcaccaggaatggtatcttattttaacaaaatttgtaaaaytcaaaaggctgacataagtgatgggctctggttatatgaacaggctgagcaagagtggagtgtagaaatttcccagagaactgagaaa

SEQ ID NO: 27604 - DNA, 511 bp, Homo sapiens
gcacccctactagactacagtgtagtataaacataaactttagatgcactgggaaaccaaacacttccgtctgacttgctttattgcagtggcctggaactgaatccacgatatctgaggtataccactatttgaactgaataaaattggtagctttcactttgtttttacttcttcagcaatcataacaaattttggtgtatttaaagtacagcaaggtaattattatcttcaaagagcccctaaattagtagagaagagaatacctataaaaatgtaaaaacaatgctggtaaataatgacaaatggcataataagggaatagatccaatggttaagaattgcacaaaaataaaaatcactctatttagaattggaaaaagcaccaggaatggtatcttattttaacaaaatttgtaaaactcaaaaggctgacataagtgatgggctctggktatatgaacaggctgagcaagagtggagtgtagaaatttcccagagaactgagaaa

SEQ ID NO: 27605 - DNA, 511 bp, Homo sapiens
gcacccctactagactacagtgtagtataaacataaactttagatgcactgggaaaccaaacacttccgtctgacttgctttattgcagtggcctggaactgaatccacgatatctgaggtataccactatttgaactgaataaaattggtagctttcactttgtttttacttcttcagcaatcataacaaattttggtgtatttaaagtacagcaaggtaattattatcttcaaagagcccctaaattagtagagaagagaatacctataaaaatgtaaaaacaatgctggtaaataatgacaaatggcataataagggaatagatccaatggttaagaattgcacaaaaataaaaatcactctatttagaattggaaaaagcaccaggaatggtatcttattttaacaaaatttgtaaaactcaaaaggctgacataagtgatgggctctggttatatgaacaggctgagcaagagtggagtgtagaaatttcccagagaaytgagaaa

SEQ ID NO: 27606 - DNA, 543 bp, Homo sapiens
tgtgtgttagcttttaccaaaacgaagtttaagaaatctgtatgcttattttttgttctgaatacttaccaagatacaacttacagagaggaagcatcgaggcacctgagtgtatctttttaacgctgacattatcattgagaaaaaaattaaaacacagaaaaagctatttttcttaagaaaaagtttsagtgtttttaacaaatctatgaattgatttgcaatttcatggtatctttattggtaatgtaccttcaacaatgcaatcatgtgcacatactttactgaggaggcacttaacacaggctgaatcacctatagatatattcaactgattacctgtgcctgtgagaatacacgaggtaaactctaatgatgtatcaataagtagaaagctatgaagcaaattgagacaattatctaaatcatcctgtcagaaattccctttttatctggactactaggccaataaaatatcattaatttctggaacctgtgaagtttgcctctgttcagttaattagggaaatgagtctctaaaca

SEQ ID NO: 27607 - DNA, 1112 bp, Homo sapiens
ttcagaagtttttgggcccagtaggctcctagtcatgcctgagggtgagcctttggaagaggaatttgcccagcctggcctgggggccagtcaacctatcaaggttggtcaggtggttgtccaccttcttgatgagtttcacttcctcattgaggaagtggctctccaggaagtcaagatatggaggtctgtgtgggcagaacccagsacatgaagatctaaaagaccctggttcagcttcttctccaaggccgtggcggctcccatggcatccagggttttaccccactcatcttgaggtgacttatggatgtcctggaatacagcactgctgccacactggttttgtatcttcaagagatgcttggagctccgtgcttctccttgtccaattcatagaagtggcccacagcttccagagccacatcatcatgatggagacagaagcccagcgagagtgggtggaagaggctcactgatgcaaattgaccaggaggttagtggctgcctccacgtcggtggaataattctgatgaatctgggagcttctcattggttggcaagaaggagctaaccacaacaactgtgtgggctgatcccagaagcaggagatggccaagatgatcccggagtttgcaagtgaagaggagactggaggatgctcggaggctggaagagagggagtccccgggtctgttccatccaaacactgttgaagaagaaacatattcatgggactgctgaacactctgcctgccatttctcttattggtgtgagttctgttttttgaaaccctttcaattaaatctgattccttttctatatgatttccatttgaatgttggaagatggccatcgagtctccccaagatggagaaccgcccatgtttcctaccacgctgtggagccctgtcctgctggctcagctctgcacaggctctgcgaccatgggaaggaacattgagagccctgaattgcaggcaccactggccaatactcccaaccccatcactaggccatatctggtcacgaggactaagtcatgtagtctagcccctgtgaccatatttattctctaattcccagatttctgttttgtctccctgcctgg

SEQ ID NO: 27608 - DNA, 965 bp, Homo sapiens
aaggccagggctaagaccaggcctgacttgcagctcagggttttctttgttgttcccttgctacctccttgataaggattattagtaaatcccactcattataaatgctcttaatttcccattttgtacactgggaattctacaccattttctttctcttccagttttttgttttgttttgtttttcttctttgtggagttcaagcaggtataacagtattctaggatgctaaaaataaatagacttaggtatcttttcttaagtggagatgatactggattagatgagaatattatttgggacctgtaaaaaggtaaaacttaaatgctgaaatgtttggaatttctgttcttacaaactttataattttaaagataagtagatttattcacacattttaaaattctttcattccatattycaagaggatttactaggtgatgatgccacagcaaagaatttccatatctctcctgttgtctgttgagaattgatgattatattaatagtctctccatctagagtgttaaggttaatattgttaacttgtgaatgcttctttgggatctaccatccatgtccttagcctagacaagaactaagaagcagaaaatagaatgtcttttggataaacacagatttggtaggagtgatttagtttggagcaggggaaccttaattaattatcactgtttataatacatttttcccctttgtttccaagaatgagaatagttcagcaacacaattgataaataaaacataaaaggacagttatggttgccctggtaactatatttctcagcaagtattttgtttgccatgaaatgtgtccagggttatttattggaaatcagactccaaatgtcatgactttttgtatttgaatttcttatgtactcatttaggagggacaattttgtacgtttttttgggttgggttctgaagctctatgtgtgatgg

SEQ ID NO: 27609 - DNA, 1246 bp, Homo sapiens
gtggctatgttggtggatgagatagttatggaaaaaatgcatacaatctttattcttagaacacatgcattgtcaaactttcctcgtgcaaaagtgaagcaggatccagatttaaaaatgtacctcattctggggtgggggacagtagaacattttcttcacttcctttatcattttcattgggcaattcaagaaatttacattctcaatttcatttgggctccaaacactgcttcttgttgactctgcctttatttttatgaaatatgtatatatttaataagtctgtgtgaaacttaccatgtggtggtattattttgtatttgttgatgtttcatttaagtgttgtgctatatttttcatgtgttctgttttccaactaagtatagtagcaaagtgttttaagagtatgcccacttctgttttcttattttttcctttcagagattggaaggagacaataaaacaccataaactgtgttcagtttatagtgagggttcactgttgactgactaaaagagatttgaagatctatgtgataataaattcgtagcagaaatagagaataatataggcatgatttaaaatgtataattataatactgtgtttttatgttttttttttgcaggaagattctctggcaacagatgatttccttgtagactactttaatgaattcctaagccttccagtgagtttattattatgatctattgaatatatattatcaaagcaaaatattttaatcactgggttatcttgtgaaaccaatttatcagggataatgctttttaaaaaaatattaaagcatttaggtaaaggttttatctttttacatagttaatcatttggatttgaatcatwtttagaaattattcttattgaagaaatctggagtttttctaaccattaaaaagcattctgtacaaactctggttcagctgtatttggcaccatgttaggcttttttttttgagacattgtgttgctctgtcgcccacgctggaatgcagtggtatgatcatggctcgctgcagccccgacttctcaaactctagcgatcctcctgcctcccaagtagctggaacttcagacatgtgccatgatgcccagctaacagttagacttttgacagagataataaggacaaaatatcaaaaaagtcaaggaactaattttttgctttcaagcaattattttcatcctcttggatagaacttaaagtggaatttgtatttaaggca

SEQ ID NO: 27610 - DNA, 583 bp, Homo sapiens
aataaaatatttatttgtgttttaataaaattaaaaaaattttaatgtgttttagaggggctctttagataggaaaatagtgagcaataaatgaaggtaggtatggaaatccttgtttaaaaggcagcaaacataatttgcttagggcaggaagacactaacattaaaaagtgaacattatatactacataccaaacactgtgctagatataattcatattataatatttaatcctcacagaggtgasattcatagggaattatatagattagtttggggtgacataatggaagactttggagttagactaatgactttggatattatctttttctatttttttatccagctccctctcccacacccacactgcaattattctaaagccttattttcttgctccataaaacatgcctattctaccttgccaatattcctccattccaatccaccagcagattaccttgcaggttcttctcacacaaaatgtatgtacaacatgcttcagtttccatttcctcatgtagccgaatggcatgcttctatatacagtaccactgagatcctgaaaaagctaaacat

SEQ ID NO: 27611 - DNA, 1028 bp, Homo sapiens
atcctactagtctggcccaggctccttacaaatcttctgcatgatagatttatttcagacctcttgtaattccaagacatgtcttctggttcggtggttgagggtatagactcaaaccaaactacctggtttgaatcccagctctgcctcttgctaggatgctgctgctatgagaatgtacctcacagacccccaactacagggagcttacttggccaagggccccagctgcttgctatgctgtgaaatccatcactatgtttgtgctaagaccttgcttttctcacagttcagcaactgagcatcatagagattctaggagacccaagactcttctgatagccagctcaggctcaaggacatccccattgctttgccaagccttccttaggctacatggcagtctggtacacttccacacaaccttctttcccgctctcttacatttggggtcagacttgcatcctagtgtgatagtccaccagttctttcccagctccttccctatcttctctcacaggtgttttccctaataaaaagtcttgtacatttagtcccatcttggcatctacttctggggtgataatattggaacagtcccatccattacctgactgagaagatgccaccttagttggtagatggagcattcatagtcccagacataactttgcagcttaattgcttaatttcaccagtgttgacttggaaccctgtcccaatagaaggaaataatggggctaagtgtgatacaggcatttgaaaatgcttgcagagacagcagagttggctggttattgctaacttaaacactacaagtggaaaacaagaaatgggactgttaacaagcagttaatagctaagtatgagaggctctatggtaacttataaagaggtctttatcacctataggacagattcagttgaaccacaggttcaagagctaattgttaagagtcacagagctccagagacattggaccatttaatatttagamtaggcaggtctattaatgtagagaaacctg

SEQ ID NO: 27612 - DNA, 486 bp, Homo sapiens
aaacctactccactcagagtctggctaccagccacagacctgggcccatagtcccgtttctagatctctgccctgcagctctgaggaagcctcatgctggagggtaagggctgctgagagcatccctgaggggccacctctgaggaccctcgagggcagtggcggaagrggtcctgtgagacgccagcccacctgacccaccagcatccatgaggtgcttgtgcctgtgaggacagtgctggcgggcacagaaccacaggagccccaggcactctggaaggccaccttgccagcctggggccctgggagtctgggggcgggtgacgtgctgctcaggaagcagaagcacaggcaggtaaactgagcctgaaccagctcctgggtctgcatccccaccccggccctccctgaagccctgtggggactcagctcagaccgcccctgccaccccacgaagggcagacctgggtggggaggagggggagg

SEQ ID NO: 27613 - DNA, 838 bp, Homo sapiens
atgacctgggagcagaggattcctgtaacggagtaaaagggatgatgggaggagaagcaaagaataattctcagtctattcaaagacacaaatggtcaaaagaacccaaaagcagtacatgtgtgacctatctgtgtatttgagttcaggttgtattgttcaagctccttgcccacttccactagggatggagacaagagaagggaactggggaagggagagaaaagtaaagaggggcaagtgtgaggtctgcatgaagaggctcactgatgtccttgcctttccctgttccagccccatcccatacagggcacatagcccaaggctggatcccacaccaagacaggagatggaactgagatagaatctgaggccagagtggatcacagtgggaggggggctgtgacttgcatggagtggcygcaggagggctggggtggagtgggagagggaagcagggtcccacgatgttcctgaaccacaggccctccccacaccctgactatgccccactgaggctgaagccttgcaagtcatgtccacccctagggaaaaaagcaatgcagtcaaactatcaatcaatcaccaaaagcaagcaagacatttcctctgttcctttttggggcctcaagaggattgggcctgggacacagacacacagattcactggcaggaacacagaaaggaacccacaaggatggcattgtggcccctgtccatactactaatccagacttagatttgtccacatctatatggacctctgcattccgtctactcacctgcaccttctctcatgagcagacacgcaccaagaaacacatatagaaatgtgaga

SEQ ID NO: 27614 - DNA, 838 bp, Homo sapiens
atgacctgggagcagaggattcctgtaacggagtaaaagggatgatgggaggagaagcaaagaataattctcagtctattcaaagacacaaatggtcaaaagaacccaaaagcagtacatgtgtgacctatctgtgtatttgagttcaggttgtattgttcaagctccttgcccacttccactagggatggagacaagagaagggaactggggaagggagagaaaagtaaagaggggcaagtgtgaggtctgcatgaagaggctcactgatgtccttgcctttccctgttccagccccatcccatacagggcacatagcccaaggctggatcccacaccaagacaggagatggaactgagatagaatctgaggccagagtggatcacagtgggaggggggctgtgacttgcatggagtggctgcaggagggctggggtggagtgggagagggaagcagggtcccacgatgttcctgaaccacaggccctccccacaccctgactatgccccrctgaggctgaagccttgcaagtcatgtccacccctagggaaaaaagcaatgcagtcaaactatcaatcaatcaccaaaagcaagcaagacatttcctctgttcctttttggggcctcaagaggattgggcctgggacacagacacacagattcactggcaggaacacagaaaggaacccacaaggatggcattgtggcccctgtccatactactaatccagacttagatttgtccacatctatatggacctctgcattccgtctactcacctgcaccttctctcatgagcagacacgcaccaagaaacacatatagaaatgtgaga

SEQ ID NO: 27615 - DNA, 519 bp, Homo sapiens
tatagtccacttctggacaaaggttctgcctcttgaatacgctcttaaattctttgcctttccaaatttagcttgattttcctacagatattttagtgaatctccacagaatgtacaagtgatataaagactttagtgagagtgaagtgccctcatttatttagagataggttctagctctgtcacccagtctagagtgcagtatcatgatcacagctcatctcagcctccacctctagagctcaagcaatcctcctatctcagactccagagtggctgggactacaggcatgcaccaccacacctggctgtttttatttatttatttatttattttaaaaattttgttacagatggggtctccctaggttgcccaggctgatcttgaactcctgggctcaagctatcttcctgctttgacctcccaaagtactragattacaggcatgagccacttcaccaggcctatttatgtatttttttttgaataaatgttttctgcacttaaaacttggaaaa

SEQ ID NO: 27616 - DNA, 1054 bp, Homo sapiens
acgccaatgcgtttaccactctggaactgctagactgagccctcctgcttgctcctgaggagcccgtggtctgcctctgctcccctgtccacatcgcacatgggcttgaggtctagcctcactcctctgtggagcccccagggcctctgctgcccctgtgacgtgatttcctcaaaattaaatttcaccggattcttcattatattctaccacccatgtttatttaacattcgactatatttatctatcttcttccaggctattttaaagttgcaccaagaaaattaccatgccacatacttgtttgcatccctgactctaaggggtgtctaagtcctagctggcagcatggggaatgaaagaaaacccagacttgggaacctgacatttctagatgagcatccacgtgctgtctcctgatggctgccatgtgacctcagaaaagtctgtcaatcagctggagcctcagcagtaaaagggaacaactctactcataccacagtgttgttgtgaaaggtacacaggcaacacagggaaagcactttgtgcataattcaacagatattcgattttcaaaaaaatkgtagctattatgtggttgaataaataaatgaaagttagatctagtaatttttaaaaatcaagattatgagtcttttgcaggcattcttgaaatataaacatcactgataacatagtatcaatatttttttttttttttttttttttttattgatcattcttgggtgtttctcgcagaaggggatttggcagggtcataggacaatagtggagggaaggtcagcagataaacaagtgaacaaaggtctctggttttcctaggcagaggaccctgcggccttccgcagtgtttgtgtccctgggtacttaagattagggagtggtgatgactcttaacgagcatgctgccttcaagcatctgtttaacaaagcacatcttgcaccgcccttaatccatttaaccctgagtggacacagcacatgtttcagagagcccagggttgggggtaaggtcatagatcaacaggatccc

SEQ ID NO: 27617 - DNA, 1054 bp, Homo sapiens
acgccaatgcgtttaccactctggaactgctagactgagccctcctgcttgctcctgaggagcccgtggtctgcctctgctcccctgtccacatcgcacatgggcttgaggtctagcctcactcctctgtggagcccccagggcctctgctgcccctgtgacgtgatttcctcaaaattaaatttcaccggattcttcattatattctaccacccatgtttatttaacattcgactatatttatctatcttcttccaggctattttaaagttgcaccaagaaaattaccatgccacatacttgtttgcatccctgactctaaggggtgtctaagtcctagctggcagcatggggaatgaaagaaaacccagacttgggaacctgacatttctagatgagcatccacgtgctgtctcctgatggctgccatgtgacctcagaaaagtctgtcaatcagctggagcctcagcagtaaaagggaacaactctactcataccacagtgttgttgtgaaaggtacacaggcaacacagggaaagcactttgtgcataattcaacagatattcgattttcaaaaaaattgtagctattatgtggttgaataaataaatgaaagttagatctagtaatttttaaaaatcaagattatgagtcttttgcaggcattcttgaaatataaacatcmctgataacatagtatcaatatttttttttttttttttttttttttattgatcattcttgggtgtttctcgcagaaggggatttggcagggtcataggacaatagtggagggaaggtcagcagataaacaagtgaacaaaggtctctggttttcctaggcagaggaccctgcggccttccgcagtgtttgtgtccctgggtacttaagattagggagtggtgatgactcttaacgagcatgctgccttcaagcatctgtttaacaaagcacatcttgcaccgcccttaatccatttaaccctgagtggacacagcacatgtttcagagagcccagggttgggggtaaggtcatagatcaacaggatccc

SEQ ID NO: 27618 - DNA, 1054 bp, Homo sapiens
acgccaatgcgtttaccactctggaactgctagactgagccctcctgcttgctcctgaggagcccgtggtctgcctctgctcccctgtccacatcgcacatgggcttgaggtctagcctcactcctctgtggagcccccagggcctctgctgcccctgtgacgtgatttcctcaaaattaaatttcaccggattcttcattatattctaccacccatgtttatttaacattcgactatatttatctatcttcttccaggctattttaaagttgcaccaagaaaattaccatgccacatacttgtttgcatccctgactctaaggggtgtctaagtcctagctggcagcatggggaatgaaagaaaacccagacttgggaacctgacatttctagatgagcatccacgtgctgtctcctgatggctgccatgtgacctcagaaaagtctgtcaatcagctggagcctcagcagtaaaagggaacaactctactcataccacagtgttgttgtgaaaggtacacaggcaacacagggaaagcactttgtgcataattcaacagatattcgattttcaaaaaaattgtagctattatgtggttgaataaataaatgaaagttagatctagtaatttttaaaaatcaagattatgagtcttttgcaggcattcttgaaatataaacatcactgataacatagtatcaatatttttttttttttttttttttttttattgatcattcttgggtgtttctcgcagaaggggatttggcagggtcataggacaatagtggagggaaggtcagcagataaacaagtgaacaaaggtctctggttttcctaggcagaggaccctgcggccttccgcagtgtttgtgtccctgggtacttaagattagggagtggtgatgactcttaacgagcatgctgccttcaagcatctgtttaacaaagcacatcttgcaccgcccttaatccatttaaccctgagtggacacagcacatgtttcagagagcmcagggttgggggtaaggtcatagatcaacaggatccc

SEQ ID NO: 27619 - DNA, 679 bp, Homo sapiens
tgactcattggctctaattcacgtggtgcatgtcaatcagctgctccctgtggttgtggccagagggccgccataatttctccgggtcaatggtagaaaattgattttcttatgtatactgctaccagaaaatgaaacatttgctttccatgtaatgcaatattttatctgtacctggtttggttcaggagtcaatgtatatacatgcttaaatgaaaacaactcttcgtcttcccctgtcactttttattgggaaaattttcatacctgaaaaaaaagtaaaagaataatacaaggaacatctctatcccctccaccgacattcagctattattaacattttgccatgtttgctgcttcatattttgatctaattatatgtccaaatatatatatatatatatatatatatatatatatatatattwttttttttttttttttgtagacggagtctcactctgtagcgcaggctggagtgcagtggctcaatttcagttcactgcaagctctgcctcctgggttcatgccattctgctgcctcagcctcccgagtagctgggactaggggcgcccgccaccaagcccggctaattttttgtattttttagtagagatagggtttcaccatgttagctaggatggtctcgatctcctgaccttgtgatccacccgcctc

SEQ ID NO: 27620 - DNA, 533 bp, Homo sapiens
tgcttccgtcttccactgtgmgagccacatatagtgctgcaagaggaaattgacatttggggcatatttcccccttctgtacaaaagccagagcaattgagggtgaagatatgtctttatatttatatagctattaaagtggttagttaaaattatttgaataattcaaaaaattaagcaggaaagcatgaaatatctgcaaactgagaaagatacaatcacttatttatggaacaccaattttaattttatattttgaaaagatggcaataaatatttatatgtttctcatttttttaaacacaaaagccagggaggaaaatgcagactacagtgaaagcttgtggtttaaattccctttttagattttataataacctttatcttcctgaattttcttcctttattagtattatggaacagccagacttaattatctccttttaatttgtgtttcttatttcttttgtttggctcatacacttgtttattcctttagatgtggattggtgagggaggggtagaagagtgaa

SEQ ID NO: 27621 - DNA, 533 bp, Homo sapiens
tgcttccgtcttccactgtgcgagccacatatagtgctgcaagaggaaattgacatttggggcatatttcccccttctgtacaaaagccagagcaattgagggtgaagatatgtctttatatttatatagctattaaagtggttagttaaaattatttgaataattcaaaaaattaagcaggaaagcatgaaatatctgcaaactgagaaagatacaatcacttatttatggaacaccaattttaattttatattttgaaaagatggcaataaatatttatatgtttctcatttttttaaacacaaaagccagggaggaaaatgcagactacagtgaaagcttgtggtttaaattccctttttagattttataataacctttatcttcctgaattttcttcctttattagtattatggaacagccagacttaattatctccttttaatttgtgtttcttatttcttttgtttggctcatrcacttgtttattcctttagatgtggattggtgagggaggggtagaagagtgaa

SEQ ID NO: 27622 - DNA, 2238 bp, Homo sapiens
tgtttgttctttgacttcagaaggctctgggctgtcccccagaacctagtctacctcaaagatcagccatccagatcctaatatactggtgcctaatgtcttgctcttatggcttcttcaagggtcatagttttgaacttagatgctagcacttatatcctttaattgtgtagatatgacacaaatctagcataaatttacattttaaaaatctatttcatcaatcctaacacatctatgttaattttgaaatagcatataggtataaaattgtttattcagtctatcaccagtgtttgatgcccatgtagttttggcaacacactggaaagaactgtaactttccctatcaaagcccatagcttttaatatagggccacagagcagcaatatcccaaccactgagttgctgtttcatctggtatccaactaccaatatggccataagaactattattaagaagatagaagttatattatcacccagagcagagctgaaacctccctctcagttgctcaagaacccatactaaccatggataagtaagcatcactgatatgcagctcataagatgctactcggttaatagcaactccacattcttcagagaagggaccgtggatttcatattccatctcagctttagggaaatccagccataaaaagtaccacccactaaggtaagggacttcttaaatactaataggaatatagccagcccacttcttataagctgaaattccattcagctgagattaacagctactaatctaccaacgaggacattgtttctagatgaaagaaccaatcaaaccagagaaaacagtgaagagaaagggggttagtgctcttactatcccagtcagtgttcagtgttttctctcttcttctctctgattgtggttctctctgatatatttcctgagtagtgaggcattaacagaaaggatgcattacctttattttttttttctttcttcaaaaactattatggcaccacatgctggatcccatggtgaatctaagaagactggctaaaatgcattttgtctatgaggtaccattacatctccctcctttctccataagaccccaacacacataactgatcttaaggtgggatatgatgggagttctgagatgtcaacaccattattagctgaggggaatagggcaggttttattagtaaattggcattttaaattggccctggaaagtaaacaagaacgtagagaaatggaaatggaagatgggcattccacctggaaaacaagcctacataggctgtaaatatgagaggtgttagtggtttctccaaactacagaagactgtttcagctgggaacattttggccccctccttttactatatcccaaaggtccccacctgccccaacatacaccttaatttgcatccyttgagggcaaagactgtttcacttgttttggtatatgtacaacccataatggagtattttgtaaataatacatgctgaaacaatgttgattaaataaaaatatatttcatgtgtaagtaaagagcaagatttctcatgcatctggtggattcctagtttgagcctaagccgagtctgcttgaacctcattagaagtggcaggtcaccaaagtctatctcttgaggcagtgaggagtgaggcagcttcctgagaacttttgtttcctgactgctcttgtcccagttgaatttaatgccttagtcccaagaagagagaggtgctttgagtcagtgcttctcaaagagtaacttgcatatgaatcacctggggctgttgttaaaatgcagattctgattgtggaggcctgagattctgcatttctaacaatgctgccgaatgctattggtccatggactacactttgagtagtaatggtttaagtacattcctaaaaagttgtttcagtaaaaattccataagacagaaatggcactaccagtggaccctgtaatagtagaggaaaagagaacagtctatgcttcttctccacagacccctgtactgccttggcatgtgagagctcacaggaccttcatggcagcatctctggggaggcagcagctccagggcactctgcagtatcccgcctatgaggttacagcaggtgaagaggaaataaagtggtaactcattagataattaattgtttttttttcatagtatatgtaaaacattacctgaacttcctccaaaatttggggacattttaaggagatta

SEQ ID NO: 27623 - DNA, 1084 bp, Homo sapiens
accctcctgggcctcccaaagtgttgggattacaggcgtgagccaccgtgccctgcctgttgtttgccttttgatccaattcctcaaaccaagagagtgtggggaaggctgtattggagcagagcccaccagagtttgggcgcacgggggctggggagggcattctcagcacctccaggtgaggttacagagggctgcaccctctggggtctgccttggggaccctgcccagaccctgctccacccactgaccctgctgacatgggtgtgtcctcccttccaggactggaaggatcaccagcacatatgcggccagtcagcagctgtcaccgtccaggcagacgaagtccacgtggctgaaagcgtgatggagaaggtgaccgtgtgaggctccatcggccgccctgggagctggggcccctcgcactcctgtgaggcttttgcaggtcgaaggcccccctgaggactctggggggacgttgagaagaggggtgtgggaaggtaaagaaacttgctggacaagtcattaacacactttaagcgaatggtgccctgggaagcgcactccccctgcccgggccccctgcccgctcgcggacagattttttatccctgggatcatgagcgtccggtcttgcccacagggcctgtgctgcgacgcacatacatacgtgttgtgtctgtcaataaagtgtaaataaggtctccctgccccacacggccggttgcagtgccagccctcgggggggggtttcctccccttcctcctactgcgcaggtgggaaaaccaagcccaccgcacctcyggtgcacgggacagcgcggccaggccggagcctccggtgcacggggcagcgcggccgggctgaagccctggcgtctggtggctcgtgtagtccaggaggtcttcgttccttctgttccacgagaccctcgtggctgctgggaggtgcagcaggcctacggcccttcccgccaggtttcggggcacatggtgcctcctgtgccctggctgcttgagcgagcccgacggtccagcacggcctgttcagtccacgtgtacagcttggtggcctcggtccag

SEQ ID NO: 27624 - DNA, 1084 bp, Homo sapiens
accctcctgggcctcccaaagtgttgggattacaggcgtgagccaccgtgccctgcctgttgtttgccttttgatccaattcctcaaaccaagagagtgtggggaaggctgtattggagcagagcccaccagagtttgggcgcacgggggctggggagggcattctcagcacctccaggtgaggttacagagggctgcaccctctggggtctgccttggggaccctgcccagaccctgctccacccactgaccctgctgacatgggtgtgtcctcccttccaggactggaaggatcaccagcacatatgcggccagtcagcagctgtcaccgtccaggcagacgaagtccacgtggctgaaagcgtgatggagaaggtgaccgtgtgaggctccatcggccgccctgggagctggggcccctcgcactcctgtgaggcttttgcaggtcgaaggcccccctgaggactctggggggacgttgagaagaggggtgtgggaaggtaaagaaacttgctggacaagtcattaacacactttaagcgaatggtgccctgggaagcgcactccccctgcccgggccccctgcccgctcgcggacagattttttatccctgggatcatgagcgtccggtcttgcccacagggcctgtgctgcgacgcacatacatacgtgttgtgtctgtcaataaagtgtaaataaggtctccctgccccacacggccggttgcagtgccagccctcgggggggggtttcctccccttcctcctactgcgcaggtgggaaaaccaagcccaccgcacctctrgtgcacgggacagcgcggccaggccggagcctccggtgcacggggcagcgcggccgggctgaagccctggcgtctggtggctcgtgtagtccaggaggtcttcgttccttctgttccacgagaccctcgtggctgctgggaggtgcagcaggcctacggcccttcccgccaggtttcggggcacatggtgcctcctgtgccctggctgcttgagcgagcccgacggtccagcacggcctgttcagtccacgtgtacagcttggtggcctcggtccag

SEQ ID NO: 27625 - DNA, 1084 bp, Homo sapiens
accctcctgggcctcccaaagtgttgggattacaggcgtgagccaccgtgccctgcctgttgtttgccttttgatccaattcctcaaaccaagagagtgtggggaaggctgtattggagcagagcccaccagagtttgggcgcacgggggctggggagggcattctcagcacctccaggtgaggttacagagggctgcaccctctggggtctgccttggggaccctgcccagaccctgctccacccactgaccctgctgacatgggtgtgtcctcccttccaggactggaaggatcaccagcacatatgcggccagtcagcagctgtcaccgtccaggcagacgaagtccacgtggctgaaagcgtgatggagaaggtgaccgtgtgaggctccatcggccgccctgggagctggggcccctcgcactcctgtgaggcttttgcaggtcgaaggcccccctgaggactctggggggacgttgagaagaggggtgtgggaaggtaaagaaacttgctggacaagtcattaacacactttaagcgaatggtgccctgggaagcgcactccccctgcccgggccccctgcccgctcgcggacagattttttatccctgggatcatgagcgtccggtcttgcccacagggcctgtgctgcgacgcacatacatacgtgttgtgtctgtcaataaagtgtaaataaggtctccctgccccacacggccggttgcagtgccagccctcgggggggggtttcctccccttcctcctactgcgcaggtgggaaaaccaagcccaccgcacctctggtgcacgggacagcgcggccaggccggagcctccggtgcacggggcagcgcggccgggctgaagccctggcgtctggtggctcgtgtagtccaggaggtcttcgttccttctgttccacgagaccctcgtggctgctgggaggtgcagcaggcctacggcccttcccgccaggtttcggggcacatggtgcctcctgtgccctggctgcttgagcragcccgacggtccagcacggcctgttcagtccacgtgtacagcttggtggcctcggtccag

SEQ ID NO: 27626 - DNA, 587 bp, Homo sapiens
attgtgtatagcagtctttcaaccatccttcatgcttcctggcccctgcaaaatcgcaattatatttagctggctatactctacttttttgccaaaaataatcacccttaatgtgctcacaaaaactgagaaaggcataggcctacagcactacttgaaaagtcaacagcaatatttataatttttcaggatccagaagtagctcatagattaagaacatactttttgagatattattacaatttcccttactgtagaagattaaaataaaattgtggatctcttttatccttcttagtcatcatcactgcaagaaataatttaacaactcaaaaatgtctccagcttttcctcttccaggatctaagtagtacatgtattgtttatccatctattctatatcaaaaccatgaactattgaaaacytccagtacattttgtgtgttatatgattacaaaggtcatttttggtgaagattgccacttaatttttcctttttgtgcttcaaaaacataaattattaaagtgtttgccagtcaactcaacttaggaatactagcttttatttgctgaaggaaagagctat

SEQ ID NO: 27627 - DNA, 587 bp, Homo sapiens
attgtgtatagcagtctttcaaccatccttcatgcttcctggcccctgcaaaatcgcaattatatttagctggctatactctacttttttgccaaaaataatcacccttaatgtgctcacaaaaactgagaaaggcataggcctacagcactacttgaaaagtcaacagcaatatttataatttttcaggatccagaagtagctcatagattaagaacatactttttgagatattattacaatttcccttactgtagaagattaaaataaaattgtggatctcttttatccttcttagtcatcatcactgcaagaaataatttaacaactcaaaaatgtctccagcttttcctcttccaggatctaagtagtacatgtattgtttatccatctattctatatcaaaaccatgaactattgaaaacttccagtacattttgtgtgttayatgattacaaaggtcatttttggtgaagattgccacttaatttttcctttttgtgcttcaaaaacataaattattaaagtgtttgccagtcaactcaacttaggaatactagcttttatttgctgaaggaaagagctat

SEQ ID NO: 27628 - DNA, 587 bp, Homo sapiens
attgtgtatagcagtctttcaaccatccttcatgcttcctggcccctgcaaaatcgcaattatatttagctggctatactctacttttttgccaaaaataatcacccttaatgtgctcacaaaaactgagaaaggcataggcctacagcactacttgaaaagtcaacagcaatatttataatttttcaggatccagaagtagctcatagattaagaacatactttttgagatattattacaatttcccttactgtagaagattaaaataaaattgtggatctcttttatccttcttagtcatcatcactgcaagaaataatttaacaactcaaaaatgtctccagcttttcctcttccaggatctaagtagtacatgtattgtttatccatctattctatatcaaaaccatgaactattgaaaacttccagtacattttgtgtgttatatgattacraaggtcatttttggtgaagattgccacttaatttttcctttttgtgcttcaaaaacataaattattaaagtgtttgccagtcaactcaacttaggaatactagcttttatttgctgaaggaaagagctat

SEQ ID NO: 27629 - DNA, 714 bp, Homo sapiens
ttcccgacagtgtgtgcaagccagatttgctccaagcttgcagacccccctgaaggaacaggggctggcatgtgcagagggctccctggggtcagtcctggaggccatgtggttgtatcgcctttcacacaaaggcaaccctggagcckagcagctgagaatcgtggccaaaccctgcccagggtgggcagagctggggagggggtgcagctccaggctccttgctccccgcaaggctgcggcataggtgaggcctagaggggaaacgccgggtatgggcagagcctccaaaaggactcctgaaagacctgtgtcttgtttccatggctacttttgcccatgctggctaagaggtcggctatgcaatgttacctaagaaggccccgtggagctggggtgctgcccacctggtgcctgggtgcgtcactccgtcaggttcctggtgactactcaggaagaacccaacagcactgccccactgccagggcttggtctgtggtgggtgacaagtagggggacagctgcctagcccctggattgaaaacagatttcaggatggggctgggcgcagcatgggtgggagggtgaattgggctgggcagagggtggtggtcacaacattcgaaagataagggtgtgaccttgtaccctgggatgccagactcacactgggccatgaagttggccctgatggaattcatgttatgtcactcc

SEQ ID NO: 27630 - DNA, 947 bp, Homo sapiens
cgtgctgcaaccaggagcccttgctgtgctttcagctcctcctggggaaaatcacagagggcgaagcctgatctcccaggcagaaacaggtcagcatttgaagtaggagacgaattcgtgaaccttcctggcgagggattagcggggagagatgaggccagatatcgagcgttcaaagtggcttttaacctttgggttgtgatctgtgggttaaaacatcctgagattcagatractcgtttatgggtcaccgtgccctgttcttctcttaccaacccttgacagtttcacaccgacgattatttcagtattttggttcttaagagaatttcaatctgggcaactaaattttttcaaaatgccagaaaattctcggtgtcaaatatgatacctgctttccttctgaaaagtgttagtgaagtttttaccttctggtagattcaagcatagaaactacctcctgtgtagcaccagtgactatcatgattccaggcacatagtagccactcaagaaatgttgaactaaatcaaacttttgctggaatggccatcacatttttgtccacaatggcaaggggtttcttattttttatttattttatttatttatttttttgagacagcatctccctctgttacccatgctgtagtgcagtggtgtgatcttggcttacggcaacctccacctcccaggttcaagtgattctctctcctcagcctcctaagtagctgggattacagatgcgtgccactacagccctgctaatttttgtatttttagtagagacagggtttcaccatgttggccaggttggtctcaaactcaggtgattggcctgctttggcctcccaaagtgctgggattaccggcatgagccaccatgcccagcctagaacggcaagaactttaatcatatttgaggttggtagacagaatcactctcaag

SEQ ID NO: 27631 - DNA, 947 bp, Homo sapiens
cgtgctgcaaccaggagcccttgctgtgctttcagctcctcctggggaaaatcacagagggcgaagcctgatctcccaggcagaaacaggtcagcatttgaagtaggagacgaattcgtgaaccttcctggcgagggattagcggggagagatgaggccagatatcgagcgttcaaagtggcttttaacctttgggttgtgatctgtgggttaaaacatcctgagattcagatgactcgtttatgggtcaccgtgccctgttcttctcttaccaacccttgacagtttcacaccgacgattatttcagtattttggttcttaagagaatttcaatctgggcaactaaattttttcaaaatgccagaaaattctcggtgtcaaatatgatacctgctttccttctgaaaagtgttagtgaagtttttaccttctggtagattcaagcatagaaactacctcctgtgtagcaccagtgactatcatgattccaggcacatagtagccactcaagaaatgttgaactaaatcaaacttttgctggaatggccatcacatttttgtccacaatggcaaggggtttcttattttttatttattttatttatttatttttttgagacagcatctccctctgttacccatgctgtagtgcagtggtgtgatcttggcttacggcaacctccacctcccaggttcaagtgattctctctcctcagcctcctaagtagctgggattacagatgcgtgccactacagccctgctaatttttgtatttttagtagagacagggtttcaccatgttggccaggttggtctcaaactcaggtgattggcctgcyttggcctcccaaagtgctgggattaccggcatgagccaccatgcccagcctagaacggcaagaactttaatcatatttgaggttggtagacagaatcactctcaag

SEQ ID NO: 27632 - DNA, 611 bp, Homo sapiens
cggtgactgactctatcagggaactgggttgttttcacacacaggcttgtaaggaataggagagaaaataccacatttgaggtctgaagaactgaatacaagtgtagattctgctccttagcagcacataagcttgagatgctacttcatctaaaacccatttcctcacttgtcagawgagaataatcacacctcttttgcacagttgctttgaagcctaaatgagataatgtctgtgaaatcagctctcctggcacatagtaggagatcagtacatattagctgagtttatcagggtttatctgactgtgcatctctagggcggtaaataacacagtcatgcccccaccagcattctcatacaggtaaaactgggttcaaatgaacacagagataagtgtgacgtggaaacatgcaatggatatgtcccaggagggcaacataggaaaggattagaataggcacactggtcccaatcttgaagtcctggggtgttaaggcttccagatttttccaccactcaaaggactccccttccacctgccctctgcccccactccccgctccacacacacaaacatagacaggaatatctgttttatggggccctt

SEQ ID NO: 27633 - DNA, 856 bp, Homo sapiens
caaaaagtaggtgactccattgtataacatggtcagtgagtgccgaagctaattgtaatgctcaaatctccagttaaattctttgtcccctggggcctgcggtacccaccttgtaggtcctaatcctccagtcaaagaccacaggaacacacctgcagctggacaagtccggtttatcacgcgttgtagccaaggaaaacacactccatcrgggagcgtggagtgtcccagtaagacggtgttcagaaggacttagtcaagggtttgggcatgtgttaggtggtttgaggaaggcaatactccagattggatgctgtcaggaagcagcatcctgcttcctgaacaaacagggttctttgtcccatggccatgaaaattcaggccagagtccctgctagagcacttcctgccgcagcttgaattccaggttccacacaggaagaggaggggccaggctcctccctgctgcaaacggctcaaacttcccaagtctctaccccagtgggcgggctggttagagtttctccaggaaccctctcccacctggctgtctcaacaggaagagcagttcccaggagagaaaccccaggtagccaacagacacatgaaaagatacgcaatgtctctggcaatgaggaaaatacaaagtagagcaacaatgagatgtcctcatgagaggtgaggccagctggacttcctgggtcaagtggggacttggagaacttttctgtcttacaagaggattgtaaaatgcaccaatcagcattctgtaaaaacacaccaatgagcactctgtagctagcaagaggattgtaaaatgcaccaatcagtgctctgtaaaatgcaccaatcagta

SEQ ID NO: 27634 - DNA, 856 bp, Homo sapiens
caaaaagtaggtgactccattgtataacatggtcagtgagtgccgaagctaattgtaatgctcaaatctccagttaaattctttgtcccctggggcctgcggtacccaccttgtaggtcctaatcctccagtcaaagaccacaggaacacacctgcagctggacaagtccggtttatcacgcgttgtagccaaggaaaacacactccatcggggagcgtggagtgtcccagtaagacggtgttcagaaggacttagtcaagggtttgggcatgtgttaggtggtttgaggaaggcaatactccagattggatgctgtcaggaagcagcatcctgcttcctgaacaaacagggttctttgtcccatggccatgaaaattcaggccagagtccctgctagagcacttcctgccgcagcttgaattccaggttccacacaggaagaggaggggccaggctcctccctgctgcaaacggctcaaacttcccaagtctctaccccagtgggcgggctggttagagtttctccaggaaccctctcccacctggctgtctcaacaggaagagcagttcccaggagagaaaccccaggtagccaacagacacatgaaaagatacgcaatgtctctggcaatgaggaaaatacaaagtagagcaacaatgagatgtcctcatgagaggtgaggccagctggacttcctgggtcaagtggggacttggagaacttttctgtcttacaagaggattgtaaaatgcaccaatcagcrttctgtaaaaacacaccaatgagcactctgtagctagcaagaggattgtaaaatgcaccaatcagtgctctgtaaaatgcaccaatcagta

SEQ ID NO: 27635 - DNA, 856 bp, Homo sapiens
caaaaagtaggtgactccattgtataacatggtcagtgagtgccgaagctaattgtaatgctcaaatctccagttaaattctttgtcccctggggcctgcggtacccaccttgtaggtcctaatcctccagtcaaagaccacaggaacacacctgcagctggacaagtccggtttatcacgcgttgtagccaaggaaaacacactccatcggggagcgtggagtgtcccagtaagacggtgttcagaaggacttagtcaagggtttgggcatgtgttaggtggtttgaggaaggcaatactccagattggatgctgtcaggaagcagcatcctgcttcctgaacaaacagggttctttgtcccatggccatgaaaattcaggccagagtccctgctagagcacttcctgccgcagcttgaattccaggttccacacaggaagaggaggggccaggctcctccctgctgcaaacggctcaaacttcccaagtctctaccccagtgggcgggctggttagagtttctccaggaaccctctcccacctggctgtctcaacaggaagagcagttcccaggagagaaaccccaggtagccaacagacacatgaaaagatacgcaatgtctctggcaatgaggaaaatacaaagtagagcaacaatgagatgtcctcatgagaggtgaggccagctggacttcctgggtcaagtggggacttggagaacttttctgtcttacaagaggattgtaaaatgcaccaatcagcattctgtaaaaacacaccaatsagcactctgtagctagcaagaggattgtaaaatgcaccaatcagtgctctgtaaaatgcaccaatcagta

SEQ ID NO: 27636 - DNA, 725 bp, Homo sapiens
tttcatgaattgcatacatttaaaatttcgatctccttcccatttgcaatccgtcatttactaatagagagatacagtgtgtgggaactgaactgtgaacttttccagaaggatcacttcattcttgatttcattatcttgatttcagtcttgccttcactagcaatgattaagctttgaaaattmtcttacaaattgtgtgcccacttttactggaattctgtaatagtaacagataatacgtagaacaatataaaggtggtgttgggtttacagttataacatgaatagtattatctccctccaactatgttatattgcattaaaataatcaatgtgtaattgtattagacatttttatatgttaagagaaaggacaattgatataatttttgttctgacttttttatttaaataaatttaaattttcattggccaaatacgtactcagaacataatcataattcaaccgaattcagttatctaaatcaatatactctaatacgttcagtgcatgttaaagtacaggctaaatattttcattttttggttacaactaccttttattagttccccatcagcacctataaacaaacaccttatggcctgctaaatgagcctcaaaaagctgttctgaaccatcaacacaattacagaaattgaaatgtgtttaaaatctgagttagtgctgtcagtgaatgtgcttaaaggcaaacaaaaatcta

SEQ ID NO: 27637 - DNA, 725 bp, Homo sapiens
tttcatgaattgcatacatttaaaatttcgatctccttcccatttgcaatccgtcatttactaatagagagatacagtgtgtgggaactgaactgtgaacttttccagaaggatcacttcattcttgatttcattatcttgatttcagtcttgccttcactagcaatgattaagctttgaaaattatcttacaaattgtgtgcccacttttactggaattctgtaatagtaacagataatacrtagaacaatataaaggtggtgttgggtttacagttataacatgaatagtattatctccctccaactatgttatattgcattaaaataatcaatgtgtaattgtattagacatttttatatgttaagagaaaggacaattgatataatttttgttctgacttttttatttaaataaatttaaattttcattggccaaatacgtactcagaacataatcataattcaaccgaattcagttatctaaatcaatatactctaatacgttcagtgcatgttaaagtacaggctaaatattttcattttttggttacaactaccttttattagttccccatcagcacctataaacaaacaccttatggcctgctaaatgagcctcaaaaagctgttctgaaccatcaacacaattacagaaattgaaatgtgtttaaaatctgagttagtgctgtcagtgaatgtgcttaaaggcaaacaaaaatcta

SEQ ID NO: 27638 - DNA, 725 bp, Homo sapiens
tttcatgaattgcatacatttaaaatttcgatctccttcccatttgcaatccgtcatttactaatagagagatacagtgtgtgggaactgaactgtgaacttttccagaaggatcacttcattcttgatttcattatcttgatttcagtcttgccttcactagcaatgattaagctttgaaaattatcttacaaattgtgtgcccacttttactggaattctgtaatagtaacagataatacgtagaacaatataaaggtggtgttgggtttacagttataacatgaatagtattatctccctccaactatgttatattgcattaaaataatcaatgtgtaattgtattagacatttttatatgttaagagaaaggacaattgatataatttttgttctgacttttttatttaaataaatttaaattttcattggccaaatacrtactcagaacataatcataattcaaccgaattcagttatctaaatcaatatactctaatacgttcagtgcatgttaaagtacaggctaaatattttcattttttggttacaactaccttttattagttccccatcagcacctataaacaaacaccttatggcctgctaaatgagcctcaaaaagctgttctgaaccatcaacacaattacagaaattgaaatgtgtttaaaatctgagttagtgctgtcagtgaatgtgcttaaaggcaaacaaaaatcta

SEQ ID NO: 27639 - DNA, 725 bp, Homo sapiens
tttcatgaattgcatacatttaaaatttcgatctccttcccatttgcaatccgtcatttactaatagagagatacagtgtgtgggaactgaactgtgaacttttccagaaggatcacttcattcttgatttcattatcttgatttcagtcttgccttcactagcaatgattaagctttgaaaattatcttacaaattgtgtgcccacttttactggaattctgtaatagtaacagataatacgtagaacaatataaaggtggtgttgggtttacagttataacatgaatagtattatctccctccaactatgttatattgcattaaaataatcaatgtgtaattgtattagacatttttatatgttaagagaaaggacaattgatataatttttgttctgacttttttatttaaataaatttaaattttcattggccaaatacgtactcagaacataatcataattcaaccgaattcagttatctaaatcaatatactytaatacgttcagtgcatgttaaagtacaggctaaatattttcattttttggttacaactaccttttattagttccccatcagcacctataaacaaacaccttatggcctgctaaatgagcctcaaaaagctgttctgaaccatcaacacaattacagaaattgaaatgtgtttaaaatctgagttagtgctgtcagtgaatgtgcttaaaggcaaacaaaaatcta

SEQ ID NO: 27640 - DNA, 725 bp, Homo sapiens
tttcatgaattgcatacatttaaaatttcgatctccttcccatttgcaatccgtcatttactaatagagagatacagtgtgtgggaactgaactgtgaacttttccagaaggatcacttcattcttgatttcattatcttgatttcagtcttgccttcactagcaatgattaagctttgaaaattatcttacaaattgtgtgcccacttttactggaattctgtaatagtaacagataatacgtagaacaatataaaggtggtgttgggtttacagttataacatgaatagtattatctccctccaactatgttatattgcattaaaataatcaatgtgtaattgtattagacatttttatatgttaagagaaaggacaattgatataatttttgttctgacttttttatttaaataaatttaaattttcattggccaaatacgtactcagaacataatcataattcaaccgaattcagttatctaaatcaatatactctaataygttcagtgcatgttaaagtacaggctaaatattttcattttttggttacaactaccttttattagttccccatcagcacctataaacaaacaccttatggcctgctaaatgagcctcaaaaagctgttctgaaccatcaacacaattacagaaattgaaatgtgtttaaaatctgagttagtgctgtcagtgaatgtgcttaaaggcaaacaaaaatcta

SEQ ID NO: 27641 - DNA, 2865 bp, Homo sapiens
tgcattttgttatcttttactgatctgatctcaaggtaaaggacaatttctccaagagcaaagcccagtacagttgaggcctaatatcaagaaacttcaaggaattaacgccttagcctaagtcacatctgttctcttggaagaacaaaagaagatcaatagccgatttattccaaagtgagaaggtgataggaaaataaataaatccacaagagtgagagggaaaggcagatatgcactcagaaatgcccatcggtcgtattttctggttttgtagaaagcagatttcttttgtgctttgtgagcagtgagcaggcgtcctctacttctgtgtcacgtaaggacttttccaggtcttaactactaatcggtgttttaatgccacattcctttcctgccttccaacacaagaactcaaactgaggtttaaatttactgcaaatttctttctttccatccactgaatgccgttaagcaatctccatgtgtaatcaaaatgctgggtagcagtagtgttggaagctttgttctttaaatgaaggtggcctatcactctttgtcagtgctcttaaaaacgtaaaaataccttattgagatataattgatataccgtatacttcagtcatttaaaatgtacaattcagtggtttcttagtttaatcataggattctacaaccattgccacaatctaattttagaacattttcatcccccaaaagaaaaccacacccattagctgtcattgtcattccccatttctcttcattccccctagctactggcagcctttagtctcctttctgtctccatagatttgccacttttggacattttatattaatggggtctttgtggctgacttctttcacttagcgtaatgttttcaagattcatccatattgtagcatgtgccagtacatttcttttctttgctgaataatatttgattatgtggaaagaccatgttgtgtttatccatgcatcagttgatggacatgtgggttgttcccactctctggctactatcaatgatgctgctataaacacttgtgtaagcatttttgtgaggtgtatgtttttcttgtctcttgggcacatacctcggagtggaattgctgggtcagatggtcattctttgttgaaccatttgaggaactgccagacagttttccaaagcagctgtaccattttacatttccactagcagtgtgtgaaggttccaatttctctacctccttgccaatcttgtttctgattacagccatcctagtgttaagtggtggtgttcttggttttctagctggattctatgacgtggcctttgggtaggatagggtggaggcagcaacagaaagggctgcttttagggggctggtgtgctgtcccccatgctttagcccccagcaggctgcagcagatggaatctggggaaaagaggctggagtacagaagagcccagaatgtcctcttcctctctcaacagcccctccatacctccttcttctgctcctgactctctcacacccaccatggggcaaaagtccaaatatttttggaagttaccatttgccattttctaatccgggttccacttccttggaaaaaaaaatgctatttagaaatagcactggtacggctaactgagtgggtgatatgcaaaacccaaacccaaacagtcttttgaaatcccaaggcatttcaggattgctaactcacacatttaatcccatatttgggtctggaaaacgtcccagctccaaccaagagtcatcatggcatcatcgtttctcaacctgagaacccaaaaaactcatttatataaatgctaggaaactcactgtgttcatcttggggactggagaataaccttttaaaaatgctttgctgtgtatataaaaatattttgggtccctgggaaagtacaggagaggcaggagctgccctctgacttaagcactcccaagcagcaagccaagagctatgcttagaaatattccccgcaagctccacccatgattatacaagtgatcctatggccataaaagtgatgtcatctatcaattaccccttaggaaagtaagctgccatatgcacaccaggccccagtagaaataaaaccagagccgcctgaattaaatcagtccaggccatgagttggaaattaaatgccctcagaccctcttttcttaatctcctgttatttggtttccacgaaattcatcctttcccaaggatgatttttgagtacgtacttcgcaagcatgcatatgtgtaatcaaagccttatgtgaaaaaaaatacatatttgttttgtttaggggttacatgcaggtctggggcctggtgggagtgaagttgtaaagtgggggtcctgctcataagaaaaggaggtctgcttgcttgagaaaggggtccccagagagaagggcaggtgggcctagagtcacttccttttcgcagaggacgattaagctractttatgctcataggagagttgtttgggagataattaacacttcctttccaaagaggaattaagaggttagaaaatgtgtgtctagaagctgggaagaggttggaggattgctcagtgaggagcagcaagtcagtgtctctttcagatatgaaggaggtgaagtagaatttataagaggtaaaaagagctaagaacactttgttttaacctataacttaaattcctttgaactcttgactcgttgggggtattacattgtttatagtaggtattagaggggttttcagttttcaatgctctattcatttctcatagtctctttgctctctaaaactcatcttcctaaagtagcagtctttctttttaaaaaatctctagcgtcttgag

SEQ ID NO: 27642 - DNA, 1269 bp, Homo sapiens
cattgttgtaatgttcccatttcactgcttctgtagctcatgctcaggtgtctctcctgagtcatcaactcctgcagagcagagttcagatctgcccacttattttcatggccaagcaaagtgagtcccctgcaaaattagctgcttcaacctttccctctttaggtgaattacgttttgtaactttggggtgaattatctaatattgaaaaacttacttatttgcagagttgggttaagaagtaattatttgccccaaagttgcctagatttctgttaggaactcacatctgagctccctacatcgagtgggattttgagatcagaagtctctctccataattgttgccagggaaagaagtcaattcagcaggtggcttagtcagttcaggctgctataacaaaatatcttggattgggtagtttataagcaacagaaattgatcgctcacagttttggaggctgggaagttcaagatcaaggcaacagcagatctggtgtctggtgagggccsgtttctcacagattgtcccttctatgtgccctcacatgacagaagggacaaacaggttccctccagcctgttttataaggacactaatcccattcgtgaagattccactttcatgatctaatcagccccgaaagtctcacttcttaatacccacgtgttgggaattagatttcaacatatgaattttggaggggaacaacctgatcacagcagaaggcttggtgcctttttttccccaggaacaggatggcgagggttatttttacagcctctcacaactgggcacatatgatccaaattcagagcattactgtagcattccagttttccacttgcgctccttatgtcttcctgttcatcttctggttttattgattcgtggacagtgagtgctctggccatttctattggtgtggacttgccctgtaaagggactcccaccctctggaagaggccccagcatgattaaactctggagaagtgggtcgtgttttggaaagcatgttagctatgcttatttatatgccacatcatatatgggctaaaaccagcacatgtggtctttgtttcattgcttcctattgaacgcggattcgatccagcgtgctggagaggaatgatgattttggagaaatggatgcagtgagcaacactggcccacaggctgcaaagtgctaaggttgagagtgcgtttagaagtgcgtatgtaaaataattcaaactgcagtatcccggcgaggtgcttcggctcttt

SEQ ID NO: 27643 - DNA, 586 bp, Homo sapiens
tctgatacacgcaaacatttgagaacaaatgacctaattattaacttatgcggtagaaaatcacagatgcataaagttctgaatcactttttatagtgaggttttttttgaccctttatgctaaagtcaatcatactatttcatagagcttagaactgagtttttctgctgctggtataaaagagattacacattggtcagaacctttcctctggaaaagtggagaggaaaacaaaaacttgtaaaaacaactgtcttgtaagcttggaaatctaaaatagaagccctatcagtggcaaactctctctttctcattcacatacacactytgcgtgtgtgtctatctacatacatgcatgcgtttggttttcttagctgagttaacacaaattcagatgtctatattgagttaataagagtcagatacataatggtgccaagagaaatcgtgttgcttttgtgacaactgaatagtagcaagagagaaaaagacaaaaggctggagactagaaatagcatagaacaaaacacactctggatggaatttgacacattcattaattttcctctccttctaattttgaaa

SEQ ID NO: 27644 - DNA, 586 bp, Homo sapiens
tctgatacacgcaaacatttgagaacaaatgacctaattattaacttatgcggtagaaaatcacagatgcataaagttctgaatcactttttatagtgaggttttttttgaccctttatgctaaagtcaatcatactatttcatagagcttagaactgagtttttctgctgctggtataaaagagattacacattggtcagaacctttcctctggaaaagtggagaggaaaacaaaaacttgtaaaaacaactgtcttgtaagcttggaaatctaaaatagaagccctatcagtggcaaactctctctttctcattcacatacacactctgcgtgtgtgtctatctacatacatgcatgcgtttggttttcttagctgagttaacacaaattcagatgtctatattgagttaataagagtcagatacataatrgtgccaagagaaatcgtgttgcttttgtgacaactgaatagtagcaagagagaaaaagacaaaaggctggagactagaaatagcatagaacaaaacacactctggatggaatttgacacattcattaattttcctctccttctaattttgaaa

SEQ ID NO: 27645 - DNA, 520 bp, Homo sapiens
gttgtgggggccatttgaagcttccagatcccagaaatgagtcacccatagccaatgcatcagtggaggtatttattctgtgaggctgttgcaaagttcctatcatctttgtcttcattctgaaagtttatgtatgtttaaaaccatgattaaagagaacacaacttcttgaagcagtttaactttatttgaaatgtttagagttgaagtagaagtgcatactaggtgaaatttttgtctacccctacagtctcacacatcactcccaatttcaacatatatttgaaacatcctagagaacttgggcttgaactgagtacagaattatggaactggaaactcagtcagtcccatattctgtcttacgcaggaatcccttcgaaattgtttcttgtgtgttaatctagtttttgttaaaaacaaacaaaaaagtcaagggccgggyacagtggctcacacctgtaatcccagcactttgggaggctaaggcgggcggatcacgaggtcaggagatggaggc

SEQ ID NO: 27646 - DNA, 520 bp, Homo sapiens
gttgtgggggccatttgaagcttccagatcccagaaatgagtcacccatagccaatgcatcagtggaggtatttattctgtgaggctgttgcaaagttcctatcatctttgtcttcattctgaaagtttatgtatgtttaaaaccatgattaaagagaacacaacttcttgaagcagtttaactttatttgaaatgtttagagttgaagtagaagtgcatactaggtgaaatttttgtctacccctacagtctcacacatcactcccaatttcaacatatatttgaaacatcctagagaacttgggcttgaactgagtacagaattatggaactggaaactcagtcagtcccatattctgtcttacgcaggaatcccttcgaaattgtttcttgtgtgttaatctagtttttgttaaaaacaaacaaaaaagtcaagggccgggtrcagtggctcacacctgtaatcccagcactttgggaggctaaggcgggcggatcacgaggtcaggagatggaggc

SEQ ID NO: 27647 - DNA, 627 bp, Homo sapiens
cagactctagacgctccaaggtccggagcctcagcgagcgcactgcaatccgacacctgctgtagccggcacttcgctctccaggctacgcgcccgccggtgtcgttgtcatgggwacgcgggagggcggtctagcgtccggctccccttagcggctactctgggaacaaccccgcatcccccgcgcgtccagtgccacagtgaggggtgggcgttgagcggggttggctgggagtgggagcagaagactttactggaggaggagatataaatcggagcaaacctctagagctgatactgatgccctctttgccaagctttgaggctggttatttatttcctaaaagttggtaggtaaaccctgggacttttaaggaagggcaaagttggtctgtgctctgagagggtatgcagtggcagatgcagagacgtttctgtttttctttcttaaatttaagtagagggggcagaaagccaccccagcttagttagccagtagcatgttttattaggtaagctgtgttctatgtctagcacttttcacttgagttttcctcttcttcttctgccattcaggccttgaatcatttatgatgatgatgactgaggaccatttataacctactt

SEQ ID NO: 27648 - DNA, 627 bp, Homo sapiens
cagactctagacgctccaaggtccggagcctcagcgagcgcactgcaatccgacacctgctgtagccggcacttcgctctccaggctacgcgcccgccggtgtcgttgtcatgggaacgcgggagggcggtctagcgtccggctccccttagcggctactctgggaacaaccccgcatcccccgcgcgtccagtgccrcagtgaggggtgggcgttgagcggggttggctgggagtgggagcagaagactttactggaggaggagatataaatcggagcaaacctctagagctgatactgatgccctctttgccaagctttgaggctggttatttatttcctaaaagttggtaggtaaaccctgggacttttaaggaagggcaaagttggtctgtgctctgagagggtatgcagtggcagatgcagagacgtttctgtttttctttcttaaatttaagtagagggggcagaaagccaccccagcttagttagccagtagcatgttttattaggtaagctgtgttctatgtctagcacttttcacttgagttttcctcttcttcttctgccattcaggccttgaatcatttatgatgatgatgactgaggaccatttataacctactt

SEQ ID NO: 27649 - DNA, 557 bp, Homo sapiens
gaggtagttaggggccagagtatattggggcttgcagatctttttaaagattttatattttctttgaagtgtagtgagaagctcttggagagttttttttccccctctctctgactgtaaatgcttttattamctaattctttttttaaattggggtaaaataggtataatataaaatatgccattataaacatttttaagtatacaatatagtgacattaataacattcacattgttgtgcagccatcaccactatctgtttctaaacctcttcattatctgaaacagaaactctaatcattaagcagtgattcctcatttttcctttccccaaagctggtaaactctaatttactttctgtctctgattttgtctattctaggtacctcatctaagaggaatcatacagtatttgtccttttgtgtctggtttatttgtaatgttttcaagcttcatccacattgtagcttgtatcagaacttcattcctttatatggctgaataatattcctttgcatgtatatcccacattttattcatctatgcatttgtcg

SEQ ID NO: 27650 - DNA, 1320 bp, Homo sapiens
tgtaattcttaaattctgaaactgagaatataatctttctgaataaacagatacaacttacagattttcatacagtttggatctgtatctccaccaaaccacatgttgaattgtaatacccaatgttagaggtgaggcgtggcaggaggtgactggatcatgggggcagtttctcatgaatggtttagcaccatcctcttggtgctactctcatgatagtggatgagtgagttctcaygaaatttggtcatttaaaagtgtgtggcacctcccccatctctctcttcatcctactctggccatgtaaagtgcttcattccccctttgtcttccaccactattagaagctttctgaggcctccccagaagcagaaaacattatgcttcctgtacagccagaagaaccatgagccaattaaacctcttttatttataaataacccagtctcaggtatttcttcatagcaatgcaagaatagactaatacaggctgtattctcagaatcttgaccaattgtttctgaactacattttctccctcatcctcatcaaattattaagttcatttatatgcacaaagataattcagaagttgtataatgagtccagactgtgaaaacaaaactgtatttgtgaacatcactcaggtgttgttcgtattttttatttgtttgtaattcaatgcacccttcatttaaaaatgaccatcacagtaattttgaaactccattatctatggagtttcaagataacttggatgtctctagatgtcaccagcctgtggaaagagaggaagctgcatcagcagatatccaatattcagtggttcactgtctttttgctcatggaggaaggactccgatctctggaagggtcccttgcccaggtatttctggaagtgtccaacaggggaagaataaatctgctatgttatctgcttccaacttctccctctgagggttgccttcctgcaggaaaactgccaatcacagccataccctcccataacttccatgaaatgcctgggcccatgttaaggtgccgcctccatgttcccaaagaagacagtcttggaatagtagtctatgccaattgttatctgaggatgaaaaaatgaccccctcacatactctgtgcagtcctctgtcattgtccttgaagcagcccagctcattccacaagcatcatggcatttctcatgaaagcagctccttcagctttttcccctccatcattctatcgaggctcaaaaatccaaataggctgtagccattttgctctctccattgttatttgccacacaccacctccaggtacttc

SEQ ID NO: 27651 - DNA, 1007 bp, Homo sapiens
tggttagttggtctcatataaatcctcttttctttggatttgctttctacgtaaatgcttgctactttgtgtttgaatcctaaagcttttggatgtggtatgggtataaaatacaaaaaaaaaaaagtcattatttcccttatattcttttttaaaaggccacagtaatttctttaaaatggaaagagatattttgctatgaggcaaattataaaattactgaagtgagttagagtgtaattattcatatatgcatgtrgagaaaccaccaccatgtaaatgcctaaaatataaatttgtcaaaaaatactgactgtttcctacatataagtggacatacatgtgtgtgtagatagtagatatacacaggcatatgtgtacacattcatgcaaacgcaataagaatttttttctaacacttacttgattttattcaaacttgcgcacacgttttggaaacagagtttaggttctagttctgtcttagcctatttgtgttactataaaggaataacctgaggctgagtaacttataaagaaaagaggtttatttggctcatggttctgcaggctgtaaaagaagtatggtactagtatctgctcccagtaaggactttaggtgtcttccactcaaggtgggaaacaaagggcatgtgcagaaatcacatggtgagagaagcagcaagggaggagggcagggagatgctaggttttttaaacaaccagttctcataggagctaatagtgcaagaactcactcattaccatgaggatgggaccaaaccattcatgagagatctatacccaagaatcactcaagcacctccccttaggtctcacctccaacactggggatcaagtttcaacatgagatctggggagacaaacatccaaaccatagcaagttcctagagcacaagaagtaacttcttttcaaattcacgtaggttaagaggaagtgttattaaatgtatttttcaacagtagagtttacatccaattccaaa

SEQ ID NO: 27652 - DNA, 586 bp, Homo sapiens
tgattatcattgaatctacaaatttttacttgataataattgttatttatttatttattcattcattcattttctattctgctttttctagttcaaggtcactggtggccagaccctatccttgcagctcaggcttcaaggcagaaaccagctcttgccagcacattgtcccattgcagggtgtgcatgcacgtgtgctctcacacccacacccacacacaacacccccccmcccacacacacacacacacactcagattgggaccatttagacatgccaatgatatcaggggtcacatcattgggatgtgggaggaaaccggagtacctgtagaaaacccaggcagacatggggagatcctgtgaactccacactgacggtggtcccagcaggaattgattaaaacaatgttatttgaagacttgctgtatatatatcatttaaacctcaaaggagcataattgcttaggtatgaaaatggaggcttcaaaaggttaaatagtttccctgaggtcacctaggtcttaggtaagagagctgggagcatgatgaaagtctgaccacaaagacactttcctgacaact

SEQ ID NO: 27653 - DNA, 586 bp, Homo sapiens
tgattatcattgaatctacaaatttttacttgataataattgttatttatttatttattcattcattcattttctattctgctttttctagttcaaggtcactggtggccagaccctatccttgcagctcaggcttcaaggcagaaaccagctcttgccagcacattgtcccattgcagggtgtgcatgcacgtgtgctctcacacccacacccacacacaacacccccccccmcacacacacacacacacactcagattgggaccatttagacatgccaatgatatcaggggtcacatcattgggatgtgggaggaaaccggagtacctgtagaaaacccaggcagacatggggagatcctgtgaactccacactgacggtggtcccagcaggaattgattaaaacaatgttatttgaagacttgctgtatatatatcatttaaacctcaaaggagcataattgcttaggtatgaaaatggaggcttcaaaaggttaaatagtttccctgaggtcacctaggtcttaggtaagagagctgggagcatgatgaaagtctgaccacaaagacactttcctgacaact

SEQ ID NO: 27654 - DNA, 591 bp, Homo sapiens
ataaacttggcaatgaagttctgggtgctgttaatattaaatcatgatttcttaaaacatttttaaacattttatttgcttggtttgtatttttcccttttgtatcttgaccaactctttctagctgggcttgactttctgccaccaccaaagagcagggcaagtactcaagtaagtaagctactaagaaggccagtgacccaagccaccaggagaatcagctacccatctccactccagggtttctgccattcagtgaccgtgtcaggtaggayaggcaattacagacatcactatactcatgcctctccttaagctaatggaaaacaggcaaggatgatgcccaagaaggtctcaaatgtgttactcaggcatcatcttttattcatagtgcaaacgtttttggtaacagggaccaactcccctgaaacctactacagcccttcaagacttctgtataattctttctcctttatcaagcctgtgtacccagtatagggtagtggaggcatgctgttcttactcactagctcatttttgcctaattctaccatcttaatatatttaatccttccaaaaaagtcataaagt

SEQ ID NO: 27655 - DNA, 600 bp, Homo sapiens
aaagtggtttctaatatttgttgtatagttcatttagcctcacaggagacggaaattgttgtaaaagctgcagaaggatatataggatctcgataggtagagaagtggggaggaaaacaactacaggtatacaattcctygaagcgcagggatcttgttcctctccttcattgttgtaatgcctagtggaggaccagtacatagtaggtatgcagtaagcactttaaaaaaaaaacaaaccttggggtaggatgctagatggctgaatgatgggaaaaagtggagaatgtgcaattgtccagggatggtttcagaggctgtgtatgtcatgctctgggattggctattagaaatctacttcatgggattgattggcatgtgcaaggagcaggggctggaaacagtttgagaccagtttgcagaggtctatgactgacagactaagtgtggaccatttgtccattagtcactgaaagtgactgatggtttggaagttaaaaatgataaaactggcatttaagaagaaagatctggcatgggtatgcagtaaccgggagagagtaaaaaaggtatgatgttgagtgttccaggcactcaaca

SEQ ID NO: 27656 - DNA, 681 bp, Homo sapiens
atactaaaatcacatttcagttatggcttagattttaattctcctggtggtataagtaatcagccctgaaaaagcactttcgatttcaagtgatttattgagtacaaattattttaaaataatgcaagtgaattctctctctcttttttttttacttacagtagaaaagattatatgatgtagtcagctttatttcttctatttggcagtttctcctttttttcttactaaaaacctatgaaattatatggaatattagagaaggaatcataaccttctgtaaatcttggtgaggactcttgatttaatttcctgatgaactccgaacttgtcacctctcattctctgatccaatttcctaataaactttgaacttgtcttcttcttctgtctctgctcatggcagttgattcttcattacttcatgaactattaatcatttcctcctratagttatctgctcctcttgttcattatggattttgctagtggaattatttttttcatattgctaaatggcttctaccactgttctgtggtgagcaggtctgtgcaaacctatccccaaagactgaggagctgagaggctgaagaaagaggctgacacatccgttttcacaggaaacaacatttaatagggccttactaacagaagccatgtctcggtacctgtgagatgat

SEQ ID NO: 27657 - DNA, 1744 bp, Homo sapiens
gggcacagataacttcttggaaagatgaagattgtaaaggatggacctcattctactttttatcttgttcattttaagccctgctcccagttttctactcamgctatcatgacctgtcatttctactctgtgccacaggatagcaacaggctaagcatctagcagcacggagatgagatgagcaatctgttgtaatagcttacttactacggactcagaagtgtctttaaagcttcttcatcagtaggtcaaagaacttcaaatatttctgctacagcagcaccgtaaggagaagtacttgtaactcaaaagtgctattaaaagcctgatgtttgctctaaatataaggaatataatgattgaccaattcaagctgcacagagacaatttgctttttttgagttgcctctaagtccctggtgatgttattgtataaataccaacaaggcaataagagctcaattgtcccaccatcaaagaggaagcaccctttggaattggttttaaataactgtaggtagttcagtgctataaataccagcactattttataaatctcagtcacaaacatgagattgcctttactgtctcaatcattttaggatctcttcctgtagtctctgcagaatttctgaagcaagagcagaggctgtattcattgcctggcaatagcagtgaatgatgtcttacattcaagatgataggaggatcctaaatgtcttcctagccttaagtcctatgacttttcagtatgcaccgtcagttcaggctaactaagtaaatcactttttacccaaaatgccacttgtttacttcacgctgcacttttgttcatgtaatttgtttcattgagactacctttttaaattgttaaaatatgtaaagcttcatctcaaatactaatctttccacaaatcctagcttgattcttccaatgagaagcttgaatatccagagcacaagttgttacttttaaaccactttacacatccttaattatatttaaaaataactaaaaatttcatacaccccccccaattgaagcactttttactatttattggagcgaattatggagaaatatttgtatgagccttggccatggaatatcagaatagctgtgtgtgtctataagttacttaatttagaatcatttatatcactctagtttcatctgtaaaatgattagtatctaacttacatcaagatgttgatgttcaaatgtataaaggatgaggaaaacaagttgaaaagcaggctaaaaatgttagttacaattccttattattttttgtgtcttttacatggtaggaaatcaaaaagtttgtattatattgaactaaattggaagtccacagaaatctatactgggattaaaaatccttaattcttttaattgcatgaaaaagagaggggagaaatagcttgacattttcttcatgatgacaaagcctgggcaaaacacatgtatgtgcatgcatttatgtatgtgaggcttgtttcaaaaagggttttttaaatgttttctataagtgtataagaaatatcaaggtatactaacataagactgaagtgatgggacacagtggtcaaagataaaataagaaatagaagtgagataaaataagaatttcaattaatatacttcaaatatgtcataagaatgtcatcatttgctagaatttgaccaaaagattagtattaaacattcatggaactgaaataaagctttatttcagatcta

SEQ ID NO: 27658 - DNA, 1744 bp, Homo sapiens
gggcacagataacttcttggaaagatgaagattgtaaaggatggacctcattctactttttatcttgttcattttaagccctgctcccagttttctactcacgctatcatgacctgtcatttctactstgtgccacaggatagcaacaggctaagcatctagcagcacggagatgagatgagcaatctgttgtaatagcttacttactacggactcagaagtgtctttaaagcttcttcatcagtaggtcaaagaacttcaaatatttctgctacagcagcaccgtaaggagaagtacttgtaactcaaaagtgctattaaaagcctgatgtttgctctaaatataaggaatataatgattgaccaattcaagctgcacagagacaatttgctttttttgagttgcctctaagtccctggtgatgttattgtataaataccaacaaggcaataagagctcaattgtcccaccatcaaagaggaagcaccctttggaattggttttaaataactgtaggtagttcagtgctataaataccagcactattttataaatctcagtcacaaacatgagattgcctttactgtctcaatcattttaggatctcttcctgtagtctctgcagaatttctgaagcaagagcagaggctgtattcattgcctggcaatagcagtgaatgatgtcttacattcaagatgataggaggatcctaaatgtcttcctagccttaagtcctatgacttttcagtatgcaccgtcagttcaggctaactaagtaaatcactttttacccaaaatgccacttgtttacttcacgctgcacttttgttcatgtaatttgtttcattgagactacctttttaaattgttaaaatatgtaaagcttcatctcaaatactaatctttccacaaatcctagcttgattcttccaatgagaagcttgaatatccagagcacaagttgttacttttaaaccactttacacatccttaattatatttaaaaataactaaaaatttcatacaccccccccaattgaagcactttttactatttattggagcgaattatggagaaatatttgtatgagccttggccatggaatatcagaatagctgtgtgtgtctataagttacttaatttagaatcatttatatcactctagtttcatctgtaaaatgattagtatctaacttacatcaagatgttgatgttcaaatgtataaaggatgaggaaaacaagttgaaaagcaggctaaaaatgttagttacaattccttattattttttgtgtcttttacatggtaggaaatcaaaaagtttgtattatattgaactaaattggaagtccacagaaatctatactgggattaaaaatccttaattcttttaattgcatgaaaaagagaggggagaaatagcttgacattttcttcatgatgacaaagcctgggcaaaacacatgtatgtgcatgcatttatgtatgtgaggcttgtttcaaaaagggttttttaaatgttttctataagtgtataagaaatatcaaggtatactaacataagactgaagtgatgggacacagtggtcaaagataaaataagaaatagaagtgagataaaataagaatttcaattaatatacttcaaatatgtcataagaatgtcatcatttgctagaatttgaccaaaagattagtattaaacattcatggaactgaaataaagctttatttcagatcta

SEQ ID NO: 27659 - DNA, 1744 bp, Homo sapiens
gggcacagataacttcttggaaagatgaagattgtaaaggatggacctcattctactttttatcttgttcattttaagccctgctcccagttttctactcacgctatcatgacctgtcatttctactctgtgccacaggatagcaacaggctaagcatctagcagcacggagatgagatgagcaatctgttstaatagcttacttactacggactcagaagtgtctttaaagcttcttcatcagtaggtcaaagaacttcaaatatttctgctacagcagcaccgtaaggagaagtacttgtaactcaaaagtgctattaaaagcctgatgtttgctctaaatataaggaatataatgattgaccaattcaagctgcacagagacaatttgctttttttgagttgcctctaagtccctggtgatgttattgtataaataccaacaaggcaataagagctcaattgtcccaccatcaaagaggaagcaccctttggaattggttttaaataactgtaggtagttcagtgctataaataccagcactattttataaatctcagtcacaaacatgagattgcctttactgtctcaatcattttaggatctcttcctgtagtctctgcagaatttctgaagcaagagcagaggctgtattcattgcctggcaatagcagtgaatgatgtcttacattcaagatgataggaggatcctaaatgtcttcctagccttaagtcctatgacttttcagtatgcaccgtcagttcaggctaactaagtaaatcactttttacccaaaatgccacttgtttacttcacgctgcacttttgttcatgtaatttgtttcattgagactacctttttaaattgttaaaatatgtaaagcttcatctcaaatactaatctttccacaaatcctagcttgattcttccaatgagaagcttgaatatccagagcacaagttgttacttttaaaccactttacacatccttaattatatttaaaaataactaaaaatttcatacaccccccccaattgaagcactttttactatttattggagcgaattatggagaaatatttgtatgagccttggccatggaatatcagaatagctgtgtgtgtctataagttacttaatttagaatcatttatatcactctagtttcatctgtaaaatgattagtatctaacttacatcaagatgttgatgttcaaatgtataaaggatgaggaaaacaagttgaaaagcaggctaaaaatgttagttacaattccttattattttttgtgtcttttacatggtaggaaatcaaaaagtttgtattatattgaactaaattggaagtccacagaaatctatactgggattaaaaatccttaattcttttaattgcatgaaaaagagaggggagaaatagcttgacattttcttcatgatgacaaagcctgggcaaaacacatgtatgtgcatgcatttatgtatgtgaggcttgtttcaaaaagggttttttaaatgttttctataagtgtataagaaatatcaaggtatactaacataagactgaagtgatgggacacagtggtcaaagataaaataagaaatagaagtgagataaaataagaatttcaattaatatacttcaaatatgtcataagaatgtcatcatttgctagaatttgaccaaaagattagtattaaacattcatggaactgaaataaagctttatttcagatcta

SEQ ID NO: 27660 - DNA, 565 bp, Homo sapiens
tattttattaagggagtgaagggaaaggtagaatttaaatatcttgcagtggccagaaagaggacacagtaaaactacaagtagaactggccaaaaggcaaccctgaagaaatgttaggttgatcagtgaaccctaaacaggctaattttaagaatgtttgcagccttaaaaattatgattcttagtttcttttgagaatcatttacatattccttttttgaattttttatcttttaaaacagggtctcactctgcacccaggctggagtgcagtggmacaatcatagctcactgcagcctcaaccacttggctcaagcaatcctcccacctaagcctcctgagtatctgggactaaggcatgtgccaccatgtccaactttttctttctttctttctttctttttttttttatggagacagggtctcactatgttgcccaggctggtctcaaactcttgtgctcaagtgatcctcccacctctgcctcccaaagtgctgagattatagtcatgagccactgcacccagctcatttccatattctttaagcccaacatgggatca

SEQ ID NO: 27661 - DNA, 565 bp, Homo sapiens
tattttattaagggagtgaagggaaaggtagaatttaaatatcttgcagtggccagaaagaggacacagtaaaactacaagtagaactggccaaaaggcaaccctgaagaaatgttaggttgatcagtgaaccctaaacaggctaattttaagaatgtttgcagccttaaaaattatgattcttagtttcttttgagaatcatttacatattccttttttgaattttttatcttttaaaacagggtctcactctgcacccaggctggagtgcagtggcacaatcatagctcactgcagcctcaaccacttggctcaagcratcctcccacctaagcctcctgagtatctgggactaaggcatgtgccaccatgtccaactttttctttctttctttctttctttttttttttatggagacagggtctcactatgttgcccaggctggtctcaaactcttgtgctcaagtgatcctcccacctctgcctcccaaagtgctgagattatagtcatgagccactgcacccagctcatttccatattctttaagcccaacatgggatca

SEQ ID NO: 27662 - DNA, 1371 bp, Homo sapiens
cgggtggattgcctgagctcaggagttcaagaccagcctgggcaacacgatgaaaccccatctctactaaaatacaaatattagctgggcatggcggcatgcacctgtagtcccagctactggggaggctgaggcaggagaactgcttgaacccaggagctggaggttgcagtgagccgagatcgggccactgcactccagcctgggcaacagagcaagactgcatctctaaaagaaaaaaaaataattcaataggacttgatgaaaaattgttgaagacttctaagtaatcttttttgctcaatttccaaagcttactttccagatctaggttctcataatcaaattattatattagagaacttcagcttttggggataatatttacattcagctttttgggataatatttcattgttttcttttttgttacatgaaaatatgtgctgtgtatcttattgcaacctattacaggtaatytgcattttcattctcacagttttaaggtttttatctcatctttgtggtctaatgtctctctttattcctaaaaatgtgctacttttatctctttgaaatcacctcttcagaactcctattaaacattaattataaaccttcatttaattgttcttgtttcctaattttaattttatattctgaaaaaatttatctatgctttggaggatttcctcaaatctatttttcatttatgaattctctgtaaattcagctctaaatagactagtattcagcatttctatccaatgctaaagaagtatcttattttaaaattacattttctaaaaactagcttgttcctttgccagattttctttttattacgttattgattctgttcttaccatgttctctattcattttaaaacacagtcatttaaaacattttcttgagaatgatctgttttctttacctcttatgaatatgaatgcttttgtttgtgtcttctgacttttcctcaaggtgtctgattacaaaaatttttgaatgatgagcttaccttctacagaagttgtttccaaagggtagtttgatgccatagattctaatgtaattcccctgaaatggctttgcatttaaatttgtatttatatctgcctgtgaaacggtctcctgggttgcccatgggttgttttttcatctcaggatttgagcattgtaaatgagtgcgaaaagtcccaatacctgtgtatagtataagggtttccacttttaaattatggctcttttatcattgaaagcccaggtgaacagctcaagtgaaggacatgttaccatactgcattcccaatctaggaagaagaatgtttctaatcctatatggagatgggtcatcctttctcaattct

SEQ ID NO: 27663 - DNA, 1144 bp, Homo sapiens
tggctttgtcacataaatttagggcactagtgtgatttttaaagttaaaagtagtaagcagggccgggcacagtggctcacgcctgtaatcccagcactttgggaggccagggcaggtggatcacgaggtcaggagattgagaccatcctggctaaaacggtgaaaccccgtctctactaaacatacaaaaaattagccaggcatggtggcacacaccagtagtcccggctactcaggaggctgaggcaggagaatcgcttgaacccgggaggcggaggttgcagtgagccgagattgcgtcactgcactccagcttggtgacagaacgagactccatctcaaaaaaaaaaagagtaagcaatgccctgtaaattggtacagcaaacctaagcttggctaaaaatagcaaactatttttaattgttaaacaaaggtcccagcttgatcattatttggtgttttttaaagaaatagtaacaattatagtaactatgttatattattgttataatataaaacctctaccmtatctataaatgttagctaaagcaaatttgtgtaacttttggggattttgccactgatttctcggacacataattactagagatactatcatgtgaaaatgttatagactggaaaattttataaactggataatttatggggttggtataactggtcagtttgcagatgcttttgcattaatatatttatacactttttccaaagattaataagatttgatttatgcttttgctattttcattgtgcaacgttaaaaactctggtccaaagcacatgagaacatacatttgtaaacctttctatgataataaaatatgatctgcttaaagtgtcatatttggaattactcctagtgcagtaaatattctgagatcaaagcgtaagagttgaggagtaagaacttgtcttctggcatgaaaatactttataatttctatggatctgtttcattaagtgaaaagtggtagcaagagtgcctacctattacctttcatgaagcaatttaaggtggtaaggaaaagccctaaactttggtgttgcatctggtgtgtaaggaaaacaactacaacataaacatggcttgattatttttaaatggtttaaagccaaattaca

SEQ ID NO: 27664 - DNA, 589 bp, Homo sapiens
tgcagttaaatccgtccaaaattaaatgagacttttcctctctatttcatttaaactgtaccactctcagtttgcccaggcatgaaatttcagaggcaacattgacttatttccctcacatttcatattttgctagtagccacattttgtcaatctttcttacttgtcagttctctgttgttgttgtcacaattctaattcaagcctcctttccatttacctggactacatcactagactttcctgtttctaattccccaccctgaccccaaaccattctctgtatcacaactaaagttcctttctagagaaacacttgttttcatttgattcttctgctcaaaaacatccaaggctctccactaccatgaaaasagctacattaacaaagaatccaaggctcccaggatgttggaatctagcacatcctgtgcttgagcgaaattggacactgcctgacctggtgatttcttctgtctctaatatccttccctcctgctcttttgcctctgtctccttccttttatgcatgtataaatagttcttctcctttagagccctgtttaaatgccaccactatttacaaagc

SEQ ID NO: 27665 - DNA, 583 bp, Homo sapiens
tcagcctcccgagtagctgagattacaggtgcacgctaatgtttgtatatttagtagagatggggtttcaccaagttggccaggctggtctcraactcctgacctcaagtgatctgcctgccttggcctcccaaagtgctgggattacaggtacaagccaccttgcctagccttcccagcatctttaatatgctaacatgcatcctgaatcctcaaaaggaggacaggtgtacaatttgcagtagtattccagtgaaccttccctaggcatataaaattgcagttcatagatagttctcttcaaatgctttttggtaaacaactgcctgttactttttcaacaaatatttggggtgggaaaaccttaaaagtaccattaaagagcaacaccctacgattgtagaatgatttctgacttgccttgtatttgttctagcaagcagatactaatgaacagagaaaatgtccagaagatctgtagccaataaaaatttataaagtggtttgccactttacaagtttgccttaacaaaaggtcaagacccaactctagttgtccaaggccttatatattcctttcaaa

SEQ ID NO: 27666 - DNA, 556 bp, Homo sapiens
gaagccaggggtagagtatattatttgttcacaatcatctatttatttttctaccttaccatgctgttatataagcagaawgtattttcctgttccttcactggatttggccatgtgacttgttttggccagaagaatgtgatcaataatgggacacaccgttccctagcagaacctttaaatgctcttgcatgtcatgactctgtcctcttttaaacttctgtcctggaccataagaacagccagggtcactgtgtaccaaaataaaaaagccaagtagagcaaaccgaagccaagcttaatcctagaacggcccaggagaaccaagcaagagccaatctgtagcactcaggtcacataaataagtaatatgtgttattgtaacagattgagattgccggtgcctgtggccagaaagggagtttcatttacaacttctctctccaatccctattctttcaccagccgctcaaattttatcctttctttctcagtcactttgaatgtgttttctttcttccttgaatgcactgcccatattttcatcccacatcca

SEQ ID NO: 27667 - DNA, 556 bp, Homo sapiens
gaagccaggggtagagtatattatttgttcacaatcatctatttatttttctaccttaccatgctgttatataagcagaatgtattttcctgttccttcactggatttggccatgtgacttgttttggccagaagaatgtgatcaataatgggacrcaccgttccctagcagaacctttaaatgctcttgcatgtcatgactctgtcctcttttaaacttctgtcctggaccataagaacagccagggtcactgtgtaccaaaataaaaaagccaagtagagcaaaccgaagccaagcttaatcctagaacggcccaggagaaccaagcaagagccaatctgtagcactcaggtcacataaataagtaatatgtgttattgtaacagattgagattgccggtgcctgtggccagaaagggagtttcatttacaacttctctctccaatccctattctttcaccagccgctcaaattttatcctttctttctcagtcactttgaatgtgttttctttcttccttgaatgcactgcccatattttcatcccacatcca

SEQ ID NO: 27668 - DNA, 556 bp, Homo sapiens
gaagccaggggtagagtatattatttgttcacaatcatctatttatttttctaccttaccatgctgttatataagcagaatgtattttcctgttccttcactggatttggccatgtgacttgttttggccagaagaatgtgatcaataatgggacacacckttccctagcagaacctttaaatgctcttgcatgtcatgactctgtcctcttttaaacttctgtcctggaccataagaacagccagggtcactgtgtaccaaaataaaaaagccaagtagagcaaaccgaagccaagcttaatcctagaacggcccaggagaaccaagcaagagccaatctgtagcactcaggtcacataaataagtaatatgtgttattgtaacagattgagattgccggtgcctgtggccagaaagggagtttcatttacaacttctctctccaatccctattctttcaccagccgctcaaattttatcctttctttctcagtcactttgaatgtgttttctttcttccttgaatgcactgcccatattttcatcccacatcca

SEQ ID NO: 27669 - DNA, 556 bp, Homo sapiens
gaagccaggggtagagtatattatttgttcacaatcatctatttatttttctaccttaccatgctgttatataagcagaatgtattttcctgttccttcactggatttggccatgtgacttgttttggccagaagaatgtgatcaataatgggacacaccgttccctagcagaacctttaaatgctcttgcatgtcatgactctgtcctcttttaaacttctgtcctggaccataagaacagccagggtcactgtgtaccaaaataaaaaagccaagtagagsaaaccgaagccaagcttaatcctagaacggcccaggagaaccaagcaagagccaatctgtagcactcaggtcacataaataagtaatatgtgttattgtaacagattgagattgccggtgcctgtggccagaaagggagtttcatttacaacttctctctccaatccctattctttcaccagccgctcaaattttatcctttctttctcagtcactttgaatgtgttttctttcttccttgaatgcactgcccatattttcatcccacatcca

SEQ ID NO: 27670 - DNA, 556 bp, Homo sapiens
gaagccaggggtagagtatattatttgttcacaatcatctatttatttttctaccttaccatgctgttatataagcagaatgtattttcctgttccttcactggatttggccatgtgacttgttttggccagaagaatgtgatcaataatgggacacaccgttccctagcagaacctttaaatgctcttgcatgtcatgactctgtcctcttttaaacttctgtcctggaccataagaacagccagggtcactgtgtaccaaaataaaaaagccaagtagagcaaaccgaagccaagcttaatcctagaacggcccaggagaaccaagcaagagccaatctgtagcactcaggtcacataaataagtaatatgtgttattgtaacagattgagattgcsggtgcctgtggccagaaagggagtttcatttacaacttctctctccaatccctattctttcaccagccgctcaaattttatcctttctttctcagtcactttgaatgtgttttctttcttccttgaatgcactgcccatattttcatcccacatcca

SEQ ID NO: 27671 - DNA, 546 bp, Homo sapiens
catgctactgtttcttgatacacagtttcctgtttcctgatgcttaggactaccttgaataaagcctttgggacactagaatgaatactgagatgaaacatagatggatctttttgtagaattctgctctaattaccctgcaaatattagaatgtttgcaggataatatttaaattaaattttactctcaaattatttcatttttcaaagaaaacctttttctgttaaaagcacacctgaaatgttcaaataaaatcatttttgtggtaaagcaattgcccagggmagtttctaaatagaagataagaaagcagtagtcactttactctgaaaggcatgttccagagatttgtaaaatttctctcctcctcttttactgtgacacaccataactaaattgtttatcttttatgagcttcgattttctcttggacaatatggtggtaaggggcttaaacgtatgcttcgttatcagagagctataaggttttttattggtttcatacaagtcaccattattagttgatctttaataaaaataacagt

SEQ ID NO: 27672 - DNA, 546 bp, Homo sapiens
catgctactgtttcttgatacacagtttcctgtttcctgatgcttaggactaccttgaataaagcctttgggacactagaatgaatactgagatgaaacatagatggatctttttgtagaattctgctctaattaccctgcaaatattagaatgtttgcaggataatatttaaattaaattttactctcaaattatttcatttttcaaagaaaacctttttctgttaaaagcacacctgaaatgttcaaataaaatcatttttgtggtaaagcaattgcccagggaagtttctaaatagaagataagaaagcagtagtcactttactctgaaaggcatgttccagagatttgtaaaatttctctcctcctcttttactgtgacacaccataactaaattgtttatcttttatgagcttcgattttctcttkgacaatatggtggtaaggggcttaaacgtatgcttcgttatcagagagctataaggttttttattggtttcatacaagtcaccattattagttgatctttaataaaaataacagt

SEQ ID NO: 27673 - DNA, 546 bp, Homo sapiens
catgctactgtttcttgatacacagtttcctgtttcctgatgcttaggactaccttgaataaagcctttgggacactagaatgaatactgagatgaaacatagatggatctttttgtagaattctgctctaattaccctgcaaatattagaatgtttgcaggataatatttaaattaaattttactctcaaattatttcatttttcaaagaaaacctttttctgttaaaagcacacctgaaatgttcaaataaaatcatttttgtggtaaagcaattgcccagggaagtttctaaatagaagataagaaagcagtagtcactttactctgaaaggcatgttccagagatttgtaaaatttctctcctcctcttttactgtgacacaccataactaaattgtttatcttttatgagcttcgattttctcttggacaatatggtggtaaggggcttaaacrtatgcttcgttatcagagagctataaggttttttattggtttcatacaagtcaccattattagttgatctttaataaaaataacagt

SEQ ID NO: 27674 - DNA, 546 bp, Homo sapiens
catgctactgtttcttgatacacagtttcctgtttcctgatgcttaggactaccttgaataaagcctttgggacactagaatgaatactgagatgaaacatagatggatctttttgtagaattctgctctaattaccctgcaaatattagaatgtttgcaggataatatttaaattaaattttactctcaaattatttcatttttcaaagaaaacctttttctgttaaaagcacacctgaaatgttcaaataaaatcatttttgtggtaaagcaattgcccagggaagtttctaaatagaagataagaaagcagtagtcactttactctgaaaggcatgttccagagatttgtaaaatttctctcctcctcttttactgtgacacaccataactaaattgtttatcttttatgagcttcgattttctcttggacaatatggtggtaaggggcttaaacgtatgcttmgttatcagagagctataaggttttttattggtttcatacaagtcaccattattagttgatctttaataaaaataacagt

SEQ ID NO: 27675 - DNA, 547 bp, Homo sapiens
ttttctgtttagttttttttctttattaccatgaaatacatggcatatcttaccacgcaacatgtacacaatcatataattatatacttttactataatttactcatttatatgaattatctttcttctcccattctagaattcaagctccaataataaagatttttctgctttgttcttctgagtcccttgtgctgagaaaactcatctagcatatggtaagaattcaaaaattatgtttagtaatttcaagaaaattctgtaaacaagcaaaatttgaaaaatattttaaatagtttaatataaaagttagagacaagatgttttttctaactagcatatttgatgtatgatattttttagcttcatacctattatctgagctattgcatgtaaatattagatatcacattaaatttggattataaataaattaatagaaagtattggccaggcatggtggtttatgyctgtaatcccagcactttgggaggcagaggcgggtggatcacctgtcagaagttcgagacccgactggccaacatgc

SEQ ID NO: 27676 - DNA, 568 bp, Homo sapiens
agtgagttgaagaactatgctcacacatttccttttcattgcatggtctatatcagaaaagagattgaggyaaaaaccaatttgagagggtggaaatgttcatacagagcacgcatgtatgaaaatattgaacgtaaagcttgatttttatttttacttatgcctgttttgtttttacagatcagtattgggataagaaaaatcaactcagtataactgtcaaaaccaaagagattgagttggaacaactatttgaaacttaaataaaaaagttaccattttgtagtaaaagaaaaagcaacatatattgtagatcaatctgttttataaatcaggggtctaatgtaccaaaattaaataaccagagaataaatttctggtgctttaaaaattatactctcttttatatttaagaaactaatgttcagcaagcaaataattcaggagatatttatcaaaacaactcggtttaaggtctggagaaagtggtaggagtgatatttaagaaaggagagtaaacacaaaactagcagaacagatggcactatctaaatatctgtccccccag

SEQ ID NO: 27677 - DNA, 568 bp, Homo sapiens
agtgagttgaagaactatgctcacacatttccttttcattgcatggtctatatcagaaaagagattgaggcaaaaaccaatttgagagggtggaaatgttcatacagagcacgcatgtatgaaaatattgaacgtaaagcttgatttttatttttacttatgcctgttttgtttttacagatcagtattgggataagaaaaatcaactcagtataactgtcaaaaccaaagagattgagttggaacaactatttgaaacttaaataaaaaagttaccattttgtagtaaaagaaaaagcaacatatattgtagatcaatctgttttataaatcaggggtctaatgtaccaaaattaaataaccagagaataaatttctggtgctttaaaaattatactctcttttatatttaagaaactaatgttcagcaagcaaataattcaggagatatttatcaaaacaactcggtktaaggtctggagaaagtggtaggagtgatatttaagaaaggagagtaaacacaaaactagcagaacagatggcactatctaaatatctgtccccccag

SEQ ID NO: 27678 - DNA, 775 bp, Homo sapiens
tcaatggktcaaaatcaagctgttagtagggttgcattctttctagaagctcttggggagaataggtgaccttgccttttccagcttctagagactgcccctgtgggatcatggcccctttaattttaagccaggagtgtagtatcatagaaactcactgactcttctgcttgcctcttctacctattaacatccttataattgcattgagtctacctgaataatcaacggtaatcatcttctctaaatgtcatcagattagcaatcttcattccatctgcagcatcatttccctttcgccaaataacctaacatagtcacagtttctggggaagtcgatacaggagatgttattttgtgtacaatccttgataaataatttaaaattttaatacatactttatttatgcctacaaattaaatattgacatataccatataaatgtattttagctcttataatttacaaattagatgaattaatcatacaagagatctatatcgttgtaaacttgactgcttttcataatctatattatagatgaaattcatgatttagttatccaggtttttttttttttcaggtccctcaaaacacctaatatagcatgtattagacacttcttgaagaaaggtactctgatattggacaatagtgatgtctggccttgctgagtgatgcctggcttggctaatttggttgtatagcagactattccctccaaaatttagtattctaaatacaactccaaaattttaacccaaagataattat

SEQ ID NO: 27679 - DNA, 775 bp, Homo sapiens
tcaatgggtcaaaatcaagctgttagtagggttgcattctttctagaagctcttggggagaataggtgaccttsccttttccagcttctagagactgcccctgtgggatcatggcccctttaattttaagccaggagtgtagtatcatagaaactcactgactcttctgcttgcctcttctacctattaacatccttataattgcattgagtctacctgaataatcaacggtaatcatcttctctaaatgtcatcagattagcaatcttcattccatctgcagcatcatttccctttcgccaaataacctaacatagtcacagtttctggggaagtcgatacaggagatgttattttgtgtacaatccttgataaataatttaaaattttaatacatactttatttatgcctacaaattaaatattgacatataccatataaatgtattttagctcttataatttacaaattagatgaattaatcatacaagagatctatatcgttgtaaacttgactgcttttcataatctatattatagatgaaattcatgatttagttatccaggtttttttttttttcaggtccctcaaaacacctaatatagcatgtattagacacttcttgaagaaaggtactctgatattggacaatagtgatgtctggccttgctgagtgatgcctggcttggctaatttggttgtatagcagactattccctccaaaatttagtattctaaatacaactccaaaattttaacccaaagataattat

SEQ ID NO: 27680 - DNA, 775 bp, Homo sapiens
tcaatgggtcaaaatcaagctgttagtagggttgcattctttctagaagctcttggggagaataggtgaccttgccttttccagcttctagagactgcccctgtgggatcatggcccctttaattttaagccaggagtgtagtatcatagaaactcactgactcttctgcttgcctcttctacctattaacatccttataattgcattgagtctacctgaataatcaacggtaatcatcttctctaaatgtcatcagattagcaatcttcattccatctgcagcatcatttccctttcgccaaataacctaacatagtcacagtttctggggaagtcgatacaggagatgttattttgtgtacaatccttgataaataatttaaaattttaatacatactttatttatgcctacaaattaaatattgacatataccatataaatgtattttagctctyataatttacaaattagatgaattaatcatacaagagatctatatcgttgtaaacttgactgcttttcataatctatattatagatgaaattcatgatttagttatccaggtttttttttttttcaggtccctcaaaacacctaatatagcatgtattagacacttcttgaagaaaggtactctgatattggacaatagtgatgtctggccttgctgagtgatgcctggcttggctaatttggttgtatagcagactattccctccaaaatttagtattctaaatacaactccaaaattttaacccaaagataattat

SEQ ID NO: 27681 - DNA, 775 bp, Homo sapiens
tcaatgggtcaaaatcaagctgttagtagggttgcattctttctagaagctcttggggagaataggtgaccttgccttttccagcttctagagactgcccctgtgggatcatggcccctttaattttaagccaggagtgtagtatcatagaaactcactgactcttctgcttgcctcttctacctattaacatccttataattgcattgagtctacctgaataatcaacggtaatcatcttctctaaatgtcatcagattagcaatcttcattccatctgcagcatcatttccctttcgccaaataacctaacatagtcacagtttctggggaagtcgatacaggagatgttattttgtgtacaatccttgataaataatttaaaattttaatacatactttatttatgcctacaaattaaatattgacatataccatataaatgtattttagctcttataatttacaaattagatgaattaatcatacaagagatctatatcgttgtaaacttgactgcttttcatawtctatattatagatgaaattcatgatttagttatccaggtttttttttttttcaggtccctcaaaacacctaatatagcatgtattagacacttcttgaagaaaggtactctgatattggacaatagtgatgtctggccttgctgagtgatgcctggcttggctaatttggttgtatagcagactattccctccaaaatttagtattctaaatacaactccaaaattttaacccaaagataattat

SEQ ID NO: 27682 - DNA, 574 bp, Homo sapiens
gaaacaaaatacttacagtgtgtgagcaaaagtgtattatttcagggtaagactcaatgtcaaactgttgctattactgatgacttttagtaatacttatatataataattttgctgtaaagcatttaatwtatcttattatactatgaagcaacagaagtatcaccaagaaatgcatttaacttagagctaaatgatctctatggttcattaccaacaatgattttctgtagttgtattatgtgaatcatattaatgaatgacagaaacattttagatataaatatgggcacaatattttaaaattgattcaaacaataattcttttgcttaaatataatattcccatctttcagaagaataaattacctaaaaaatgtatatttcttaaaaccacagcaaaaacggaacataaaatataattccagatctatctttttccataccaggatgctcccattgtactgtaacatttgttctatgtgtgtaaaaaaaccgggaaactgctaaccaagatagcaatgaaatgttttaaaaatcacatcaatgcaagtttctgaattaaaaaatttat

SEQ ID NO: 27683 - DNA, 608 bp, Homo sapiens
acaagtaaccaagacgtacccattagtagttcaggatcaaatgtgatcattcacatagtacaatatactctctttgaatttctttatcaacgtaatttacatggccaaaaatgaataaattagtgttgaaatcaaatacctttttgtgtgttttgtttctgagacagggtgtcactctgttgcctagcctggaatgcaggagtgcaatcacagttcactatagccttgacttcctgggctcaagcaatcctcttgcttcagcttcccaagtagctgggaccacaggcaggtaccaccatgcccagctaattttttaaattgtttrtagagacggagtctcactgtattgctcaggctggtcacaaagtcctaggctcaagccatcctcctgcctatgcctcccaaagtgttgggattacaagtatgaaccattgcaccagccctcaaatcccatttgttctacaattgccttctgccaatgattgtcacgcgtacttaaaataagattttgttttaaaggcatgttttttgaaatgtaaaaatctgatctgcctcagagatacaaagtcaggctattgagggaagcctgaacttcatgagtattaaaa

SEQ ID NO: 27684 - DNA, 650 bp, Homo sapiens
atcctctctatttagtgatacggaaaaacctccaaggtatattgttagtgaagtaaacaaaggatatatattatgctatctttcaaaaacacaatgcttacatcgacctacacaaatactggaaagatatacaagcttgtcagtgacctatgaaggttgttggatgtggggccaaagaaaataggtaagggaaggagacttttaactctatacattttctcaaatttcttgtttgctttttgaaccatgtcaacatttacctatttataattcaataaaaaataaataaaacacgcacacatagggcaaaatccatgaggggaatccagaatttcctcagtaacctgtgctactctgttctatttcctgatatsaagaatttcttctatttctgatataaagaattattcttcaggagcttcagaataatagcttcacttggcagttttaaaaaatacatataaaatttttccaacataaggaaatgacaaatgtttgagatgatggataacccaattaccctgatttgatcattacacattgtatacatgtgttaggatttcacaggtactccatcaatatgtactgttattatatataaactaaaaataaaatccatatacaacagttactgcatattctgaaagtat

SEQ ID NO: 27685 - DNA, 560 bp, Homo sapiens
tgaattgggccaggtgtggtggctcatggctataatcccaacactttggcaggtcaagatggctagatgacctgagatcaggagttcaagactagcctggctaatatggcaaaaccctatctctactaaaaacacaaaaattagcttcatgtggtggtaagcacctgtaatctcagctactcaggaggctgaggcatgagaatcacctgaactcaggaggtagaggttgcagtgagcctagatcatgccactacactccaccctgggcaaaagagygagactctatttcaaaataaataaataaataaaatcctgaattagaaaaataactatgaatccagaactctacatccagcaaaaatattttttcaaaaatgaacgtaaatgctagaataaggtgtcaataatagagaaaactagatgcagtatatatgggaactgtctgtactatcttcccaatttttctgtcaatctgaaaccatcctaaaatatacagtttaatttaaaaagtgaaatacatatttttccagtcatataagagccgagaaagatccacacta

SEQ ID NO: 27686 - DNA, 580 bp, Homo sapiens
cacagtgtcctatcaacaaattaagaagccagctggcaacttcttgaaaccatcaaacacgcataaagtagtccgatacacagtcagagaagacatgaaggacagaaagcccaggctccacattgacaggtagccaattgggtgaaaaagacacttatgcaaaagaaacaaccgagcaaagtagtcaactgctgtgggtgtggggccaacaattggtgcagygtgtcccattaacccagacagtacctgtccatatggggatttgggttccatgcacacaggttgtggcagtcaggaaaagcgctagagcagccctgagccaacatcctgagaaacgctttgctgaggtcaccatgggaggacagtgtccaatgcagaaaccacagcgcaggagcagaactaaaaagaggagtcaaagttgagagtcagggcagaggcagaagaggacctgctcataagcaaagtaggcaaagctggggtgattgcagaagactgtgctcgggtgtttcaagtttgccctcagttttcatgcatgtgagacaaagggtcaagacagatcccaggatagatcctaaggcca

SEQ ID NO: 27687 - DNA, 580 bp, Homo sapiens
cacagtgtcctatcaacaaattaagaagccagctggcaacttcttgaaaccatcaaacacgcataaagtagtccgatacacagtcagagaagacatgaaggacagaaagcccaggctccacattgacaggtagccaattgggtgaaaaagacacttatgcaaaagaaacaaccgagcaaagtagtcaactgctgtgggtgtggggccaacaattggtgcagtgtgtcccattaacccagacagtacctgtccatatggggatttgggttccaygcacacaggttgtggcagtcaggaaaagcgctagagcagccctgagccaacatcctgagaaacgctttgctgaggtcaccatgggaggacagtgtccaatgcagaaaccacagcgcaggagcagaactaaaaagaggagtcaaagttgagagtcagggcagaggcagaagaggacctgctcataagcaaagtaggcaaagctggggtgattgcagaagactgtgctcgggtgtttcaagtttgccctcagttttcatgcatgtgagacaaagggtcaagacagatcccaggatagatcctaaggcca

SEQ ID NO: 27688 - DNA, 828 bp, Homo sapiens
ggcagatttgctgagtatttatcaagactggtagtgagtataaggaggtgaaaagatcaggcagggacaggtaagcacgattcttcccagacaggtttgcaaagtccactctggcaaaaacctcttgaatcctaagtagtaaaaaggaatctttatgtgagcaatgtgagggaaagcaagagtaattgaagttgttttcctgagaggaggaagggattcacatgatgctgtttggtgcatgtaaccttgggagcagctggaaggagtggggagggggctgcctcctgaccttgggtctgaggtctccccaccyccaatatctccagctgtttcatcagccaattaggttaaaccctttttcttgggttccatatccaacctttggagttgtttccagagggtttaatctttagatcagggatctgatatcccagaaagtataaatgtggtcaaacacaaagggtgaggcagtggatggaaacatgcagagtcagctctgctggaagttctgacaggtaaatggggagagcagcctggtatgtgtggaaaagagcaggaaccttggagtcagatgtgggtttgaatggtggtccttatattagctgtgtgtctgtgggcaaaccatttaatcactctgtgctcctgtttcattctgtaaactgctgacaataaaaaatactctccatggctgtgacagggctccatgatgctgtgtaagcaaagcccatgacactgtctggccctctgtagataagttacaaatgccagtctccatttccttctaagagcagggctgtagctaatatcagaaacagtgctacagagatg

SEQ ID NO: 27689 - DNA, 461 bp, Homo sapiens
ggcctgagagcccctggcaaaccactggtgtaagttcccaaaagctgaagaacggggaatccaatgtttgaggacaggaagcatccagcatgggagaaagatgaaggccagaagactcagcaagtctgttcattccactttcttctgccagctttattctagccatgctgacagctgattagatggtgtmcacccagatagagagtgggtctgcctcccctagtccactgactcaactattaattttctttggcaacatcctcacagacacacccaggaacaggtctttgcatccttcaatccaatcaagttgaccctcagtattaaccagtacttgctttatggcatctatgctgcttatttctaggaagagttatgtggtctatgacacatcttatttaagaaaggatacttattctcagtttgtttattccatatgcttcttatagagaagaattaga

SEQ ID NO: 27690 - DNA, 461 bp, Homo sapiens
ggcctgagagcccctggcaaaccactggtgtaagttcccaaaagctgaagaacggggaatccaatgtttgaggacaggaagcatccagcatgggagaaagatgaaggccagaagactcagcaagtctgttcattccactttcttctgccagctttattctagccatgctgacagctgattagatggtgtccacccagatagagagtgggtctgcctcccctagtccactgactcaactatwaattttctttggcaacatcctcacagacacacccaggaacaggtctttgcatccttcaatccaatcaagttgaccctcagtattaaccagtacttgctttatggcatctatgctgcttatttctaggaagagttatgtggtctatgacacatcttatttaagaaaggatacttattctcagtttgtttattccatatgcttcttatagagaagaattaga

SEQ ID NO: 27691 - DNA, 602 bp, Homo sapiens
cagatcccagtgtcctcaggtgccaaccagagggttagaccagacccgtggttctcagccatcgctacatattagaatcacctgggggcttttaaaaagaagtttagtttaatttaatttaacttgaaaaattgacatataggccaggcgcggtggctcacacctgtaatcccagcattttgggaggccgaggcgggcggatcacctaagttcgggagttcaagaccagcctgaccaacatgaagaaacctcgtctctactaaaaatacaaaattagccgggtgtggtggagcatgcctgtaatcccagctactggcgaggctgakgcaggagaatcgcttgaaactgggaggcggaggttgtggtgagctgagattgcgccattgcactccagcctgggcaacaagagtgaaactctgtctcaaaaaaaaaaaaaaaaattgacatacaataattgtacatactcgttgggcacatagtattgtttctatatatatctaaaacatatagtgatcagatcggggtaattagctcacccatcatctgaaacatttatcattcttttgtgttgggaacattgaatatcttccttctatggctgg

SEQ ID NO: 27692 - DNA, 553 bp, Homo sapiens
aaaaaaaaaaaaagtttttgaacacttttttttttttgtgggggatgtatagctagaagtggaattgctggatcatatggtaattctgtttaacttcttcaggtaattatatatttaactgcaaaacttcagatatttttgaatgttacttttttggggggttagactgtgtctgctaatttaatcatttgtgtttatagagtttaaaaacctgttaagtagtcttattaaaattaatctctttgtaaaattagtttcaaattctttaggctttttgtgtcactttggttagtttttcttaatctagggaaacagttgccttggatcatgctggtttactcctgattgtgctcttctaattatattagtagtattacgttttgaaatattttaaaaattactttatgtcttcaaaatatttaagtgtgttaaatataccttttacttatgagttattacataaacctgaaaaggtaaaagagaaggaaacttgacatagagaagattgtctctmtgtcactatttaatctatattaatcaatatttaatctaa

SEQ ID NO: 27693 - DNA, 508 bp, Homo sapiens
tttgaagaaaataaaactggatgcctgagtaaaaccacatacagcatttgaaggtagactgtagatgaaataaagatctaaatgagtaatgtcaaactataaggtatctttgtaaaattgtcatagacttagcttttgtttcagaacagatgttggagaatctttgtgacctaagaaagagaaagggcctcttaaaatttcaaatccacaatcactaagaccaaatgcactgatttatttattaaaactttctgtgaccagccacaaaaatacatacactatgtgattttgcttatatgaggcaccaagatcaaagacatagaaagtaaaatggtggttgccaggagctagagggaggggagaagagagaattgctgtttcctgggtataaagtttcagttttraaagatgaaaaaagttctggaaattggtgcacaacaatgtgaatgtgtttcacactactgaactgtacacacaaaaatggttaagatggccacatttttctgta

SEQ ID NO: 27694 - DNA, 1166 bp, Homo sapiens
atccctcttggtgctgactgtgccaggctgggaaatggggtggcacaggtaaaatgctttctatagttttctatgttggctatcattggattttgtgctccactgggttgcttcattgtcattgtactctggggttttcccacagctattttcatcagtaggtagttctctcactgttgtttttgtggagagatgagcattgggatttcttagttcaccatctttcagacactactcattgctttttataaaaaaaaaaaaatcctttaaaacataatagctattttggggagacataactcattgtaaattaaatttcttttatttcctaactttatgacatcactgtccaagtcctgggtgtttaatctaggacagtatgaatcaaataagcagatgctgcagagcacctaacacacattactatctttaaacaaagggtagtgaactgaggtgatcctcatttgacatattttcttctatcttacattgttattctctggatttttactagtcttcttatatawatatatttttttcttatttattttctagaaaaaattttaacctactatttatgttaaaagaacacacgagaatattaagattaaccaaagcacaaaagttaatgtaagcataaaagcttataagttaatataaacaagataactatatcatatttgagtacaatgggcaaaatatagtttaaaatattatttatggcttttctcactctcttgctttttagttcctatggctttgggggttgattggagatgctgggtatagaagaaaaataaaaaaaatgctgagagaagttaaatttgtgtaagataggacatggagcttattctcccaggaaaatagaatattctgaaaaataagaaggtgagatggatgagacaagaaatcttaggcttattaccgactgaagttttttttttttaattagagaaatttggaatggtaaagaaaattgggaataagaatttttaaacaagttttgcctcttctccatcttcaacccacatcaagggcatcttttcatatgaaagactgacatcacattactcttcaaaactttggagtcatatttatgttcgcttgggtatgtctatgtaacgaatcaagatgaacagcaagaagacttagttttcctaaggatc

SEQ ID NO: 27695 - DNA, 1166 bp, Homo sapiens
atccctcttggtgctgactgtgccaggctgggaaatggggtggcacaggtaaaatgctttctatagttttctatgttggctatcattggattttgtgctccactgggttgcttcattgtcattgtactctggggttttcccacagctattttcatcagtaggtagttctctcactgttgtttttgtggagagatgagcattgggatttcttagttcaccatctttcagacactactcattgctttttataaaaaaaaaaaaatcctttaaaacataatagctattttggggagacataactcattgtaaattaaatttcttttatttcctaactttatgacatcactgtccaagtcctgggtgtttaatctaggacagtatgaatcaaataagcagatgctgcagagcacctaacacacattactatctttaaacaaagggtagtgaactgaggtgatcctcatttgacatattttcttctatcttacattgttattctctggatttttactagtcttcttatatatatatwtttttttcttatttattttctagaaaaaattttaacctactatttatgttaaaagaacacacgagaatattaagattaaccaaagcacaaaagttaatgtaagcataaaagcttataagttaatataaacaagataactatatcatatttgagtacaatgggcaaaatatagtttaaaatattatttatggcttttctcactctcttgctttttagttcctatggctttgggggttgattggagatgctgggtatagaagaaaaataaaaaaaatgctgagagaagttaaatttgtgtaagataggacatggagcttattctcccaggaaaatagaatattctgaaaaataagaaggtgagatggatgagacaagaaatcttaggcttattaccgactgaagttttttttttttaattagagaaatttggaatggtaaagaaaattgggaataagaatttttaaacaagttttgcctcttctccatcttcaacccacatcaagggcatcttttcatatgaaagactgacatcacattactcttcaaaactttggagtcatatttatgttcgcttgggtatgtctatgtaacgaatcaagatgaacagcaagaagacttagttttcctaaggatc

SEQ ID NO: 27696 - DNA, 1008 bp, Homo sapiens
agggatttgaataacaccgtaaggtctgtcactctcttcccaccttcctccttctctctctctgtctctctctctctctttctctctgcatttcttggctctgtcgggctttttatccaactcactgtgtccatttgaaaaaaaaattggaccccacaattccagattcaccttgtctttggaactcatatttcaggggagtgagaaggccaacactctgcaacattcaaattaatttcccccaaagaactctcatttgccatatattggtcataaatgtgtctagatcaatcgctgagaccggacaattagtgatctgattggccaactaggtgcaggtatctgttgggatgaccaaggcacatatttgaaagttcaagtaaaattgcttaaaataggcagtggcaggagggaaaagatgctgggaaacagaaacatagcagaaggccaatccacaggtcttctaccatcctggctctttataggagatcatctagtactcttgggcttctacgtgtaccccagytctctaggtagattctgatctgtgacaagcacagtgaggctaacatgccttactaccttacaatgtacaattattaacagagtttagagttttctctttgatttttttgttagcagcttcatcacattgctcactcaaactgaggtcacaatccaaaaattaaaacacaaaaccaccacaaccaccaccaccaacagaacagatatctatcccatacaaccaaagctcaattcagaaaagaattttctttctgctgatgacactaccaagagatgattcccatagcccatcttgactgtcaaatcacacacacgattaagaactcaggcaaccattttgtcctggaagtcagaataaaagctgataccaagcaaaacacactctgcatagtaaattaattgccatgtgcaatgaagccctcttctggatgggaacatgaattgagttgcaataatgagactaatttcctgtggggtttgtgg

SEQ ID NO: 27697 - DNA, 607 bp, Homo sapiens
cagataaccaggagtcgaccctgatgaagctggtggctttctcagctttacagaatgctcttttctgcttcgcctggcaaaacaggaggatatctgtctcaaagttttcaaagaaaggacattcagtgatctgttgagagattcagaggttctccttttctctggtggtgctctatcagggacagataggtccctaagacttagcagcaaaagggactctccctgcagaagcatgtrcatgatgtgagtaggtgtgcccacagcccagggttcatactctggggcttcatgcccttttcctattctttgtctccaaccgcatcttataagaagtgcatgttaggaaagagtacactaaagacaggaacagttactggattaatataactttaaaggtgagcatactggggaaaagtgaacagcaacccttaccagaatgtttaggtacatttctgcctccctcttcaagctgccaggaaagtgcactgtaagttaccaaggagcaaacttcagcgcttttccaacagtcacaaaggactctctgccaccatctgtgttgcatgtgtgctttacctttgctgtcctccttactttgaaataaatccca

SEQ ID NO: 27698 - DNA, 519 bp, Homo sapiens
tgagggagctgagcaagagaaatattttcaaaggccattctgggctgcacaaggatagaaacaaatgggaggtccattgggcaggacacacctgtttctacaagagcaacctacttttttgttttgttttaatcaagggagtgtcaagcaattgcttatttcataaacagggctgtgctgctatttttamacagtgtgaagtccacaggtctgaataatttcttcttgctccaagagttcctaggtcctgtgttcagattttgagagccttcatgtctcaggtcccaatagcagtttctatgactgaccagcctgtccacagagcatctcctcactggacaggcattgtgggcacgctcctgcggaggaagaatcagggtggtgaggcaattagtaggtgttctacaatcctgacatctttctcagaccagcccccatctctgtctattggcgagatttcttctttagcttctgctcactatgacatgaaggacttcttcttacctagatattctggtg

SEQ ID NO: 27699 - DNA, 519 bp, Homo sapiens
tgagggagctgagcaagagaaatattttcaaaggccattctgggctgcacaaggatagaaacaaatgggaggtccattgggcaggacacacctgtttctacaagagcaacctacttttttgttttgttttaatcaagggagtgtcaagcaattgcttatttcataaacagggctgtgctgctatttttacacagtgtgaagtccacaggtctgaataatttcttcttgctccaagagttcctaggtcctgtgttcagattttgagagccttcatgtctcaggtcccaatagcagtttctatgactgaccagcctgtccacagagcatctcctcrctggacaggcattgtgggcacgctcctgcggaggaagaatcagggtggtgaggcaattagtaggtgttctacaatcctgacatctttctcagaccagcccccatctctgtctattggcgagatttcttctttagcttctgctcactatgacatgaaggacttcttcttacctagatattctggtg

SEQ ID NO: 27700 - DNA, 559 bp, Homo sapiens
tctytctttctttctttcgtctctttctttcttctcttgttctttctctttcttcctctctatttctctcttccttctttagttttctcttcttctctatttttttctctcactcattctttcttctttcattctttatcttcctctttctttctctctcttattttcttctgttgttctttctttctttctttctttccttccttcctttcttcctttctttccttctttcttttttctctttcttgctttctttcttactctttctttctttctttctctcttgcttctttcttttcttctttcttctctagcttaaacatactgattgggcagagttgttctctggtttttacaggtaaaataggagaagaaagggatctagttaaatttgttctttcatctactgtggcacccaggatgattattctttctcttgtgcacacatgaagtcacagcatgtataccgtctttatacagtttttttatggtttttattcaattggttggactttaattgactaatgccctcccttctgtggaatctccaggactggat

SEQ ID NO: 27701 - DNA, 1289 bp, Homo sapiens
tccagataacttgcaggacacccagttggtgtctgctggacaatgagttgttggcttggagaaatccaccacactttggtcacagaacgttctgttgtgttgactgtgcaagggaagaagaagtgttggtttttctgatacatacacgcagatttttcccctttactcctaaatacttcagtgtttatttcaaaacaagaatattctgtttcttaaccatagtacaaatatcaaaattagaaaatcaacatttatataatactattatacaccctatagattttattcatattttgcyaattgtcccaatgacgtcctatgctgcaaactcattaagatatcgtgctgttaagtctcctctaatgcggaacagttccaccgtgttcctttgtcttccatgacactgacattttaaaagggtacaggccagttattttgtagaatgtctgtcaattcagatttgtcagctacttcctcacgattagattcaggttatgcatttttagcaaaaagcactgcataagtaatactgtgttctcagtgcttcggatcaggaggtagaagacgttcatttgtctcactattagttaaattaaccttgattatttggttaaaattgtttaaacagattgtctagtgtcaagttattttttttctaattgtacttattaagcttatgagaatataagtttgtatgtcctcccctcctccagtcctctaaggcttaactcaaatattgctttccctgcctaaaatattctccactgtctgcctacactaccaagaacttagcttcattatcgtgttcattgtattgaaaagtagccattccttttgctatgtcaccgaatagattagaagcctgtgtcattaagggctttatcttattccatggtatatcctaggaaaataagaggttctcaacagctaataattgaataagctagtaaatgaacaaatgaattccaaggggtggaatgaaaaggtattatcttctctgttttgtaaagaagaatcctgatgatcagtatagtgtgattaaattatgatggcacattcttagcgtggctatttgttatgtaacaatgaatattattgagctcactttatttggatccaagaggctactttactataccctaagaatagaaaagaaaaagagcttttttgcatgaggattcacaatcatgtatgaattagaacatatttcatggctgctgatagtacataatacgtaggatattagctagtgtaacaatagtgccaggaaacaaacaacccacaactta

SEQ ID NO: 27702 - DNA, 1285 bp, Homo sapiens
tcccctctgggggaggcagaagagcttccctgtgaaaagctgacctcttaaaattaggtaaaaacaataatcagattttactggggaaatgcgaccatgcaagaaaaaagttcacttttcttgagaaatatggtgatttgtacctctaaaaatattttgtttcttctacagatatttttgacagctttgttgagatacttgggtaccataaaatttacacatgtagtgtactcaatgtggtttttagtttatttacagagttatgcaatcaccgctaccgtcaattttagaaaccccatcccctaacccctccccagcctaaagcaaccactaatctactttctgtctctatagacttccttattctttactttcatgagaatagaattgtatagtatgtagtctttgggactggcttatttcattttgcataatatttcaagktttatgcatgttgtagatggtgccagtacttcattcctttttatcaatgaataatattccattgtatgaatctatcacactttgatgtggtctactatgctgtttcagaggccctctgggtagaaggaggagagttcaggggatagccagaactgggccaggacccagccccaccacttcccagctgtattaccttggccaaatgatctcacctctctgagcctcagttttctattttttttttttttttctgagacagagtctcactctgttgcccaggctggagtgcagtggcacgatccgcaatctcggctcactgcaacctctgtctcctgggttcaagagactcttctgccccagcctcctgagtagctgggactacaggcgcatgccaccatgcctggctaatttttgtatttttagtaaagacagggtttcaccacattgaccaggctgatctcgaactcctgacctccaatggtctgcctgccttggcctcccaaagtgctgggattacagacatgagccactgcgcccagccagagcctcagttttcttgtctgtggactgcagatattaataacacccaccgcagaaggccttcttgaggattaagttcctcacacagacttggcatgtacagggaattaagcagcgatagtgctcatagctgtggttgttgaatgactggaattgaaactacaggcattgttttgtttctctagctcagaatttcccccaagtgatctctgggggatcccatcctacatgattgtgctcaaaacaggggttccgtggtcaaatgggcttggaaatgctacagactgcacccctctctggt

SEQ ID NO: 27703 - DNA, 608 bp, Homo sapiens
caccaagttgagagaccagtttacagtgtggatccactgctatggtgtgcatgtttgtcttctctaaaactcatgttgaagtgtagttgccattgtgaccayattgggagatgggacctttaagaggtgtttaggtcatgagagctctaccaccatgggtagattaatgtgagtatcgtggaggtgggtctgccccctcttgctgtctctcactctctctttgcccttctgccctgtgaagccttccgccatgggatgatgcagcaagaaggccctcaccagatgccagcatcttgactgtggacttcccagcctccaaaactgtgagaaataaatttctgtacaatataaattacccagtctatggtgttttgttgcagcagcacaaaatggactacaacacccaccctaggagagtcctttagacttcaaagcaaggcacttaattttctttcttttacaataaaggcagtcttgagaacctgagctatgaggatcccagatccagcaaaggggcgaatgcctggaggttccagggtgcgagaagggctgtcacggcaacaagaactcgagcagacaactgggggaagagaaaatccaaatggctg

SEQ ID NO: 27704 - DNA, 550 bp, Homo sapiens
tgtccttctttctgctttccatggaatcactgggttgctagaaaaaggaagaaaaaaatacaggatgtctatttaaatttcactttcatatagacaattttttttagtatgagtatgtcccatgcagtatttgggacataattatactaaaaaattacttgctatttatatgaaattcaagtttcatagagygtctagtattttatctaacagtcttatcctaagatgagcacatattctctctctctctctttctctctctctctctttctctctctctctcatagttccttctggttggagatgagagaagacagttctctttcaaaacctcaagcagacacctccttgtatcttcttggactgaaatggctatttctgaacaagtgtctatagctggagaataagataaactgattggattaaggaaaggagacagactgaaatggccaaatagaagcctccactgatcatcctccttgcaggaacaccaaattgaacaactactatccacacaaaaacaccttcttaagaaccaaaaatcagcgta

SEQ ID NO: 27705 - DNA, 550 bp, Homo sapiens
tgtccttctttctgctttccatggaatcactgggttgctagaaaaaggaagaaaaaaatacaggatgtctatttaaatttcactttcatatagacaattttttttagtatgagtatgtcccatgcagtatttgggacataattatactaaaaaattacttgctatttatatgaaattcaagtttcatagagtgtctagtattttatctracagtcttatcctaagatgagcacatattctctctctctctctttctctctctctctctttctctctctctctcatagttccttctggttggagatgagagaagacagttctctttcaaaacctcaagcagacacctccttgtatcttcttggactgaaatggctatttctgaacaagtgtctatagctggagaataagataaactgattggattaaggaaaggagacagactgaaatggccaaatagaagcctccactgatcatcctccttgcaggaacaccaaattgaacaactactatccacacaaaaacaccttcttaagaaccaaaaatcagcgta

SEQ ID NO: 27706 - DNA, 530 bp, Homo sapiens
tgtgcccattttgtcagtagcaagccattagcatgatgttcaaggaacaatcatctaccacatgatgtactgacgctctgtttgatcaaactggggcttaagaatagctgtgaagggccaggtgcggtggctcatgcctgtaatcccagcactttgggaggccgaggtgggtggatcacctgaggtcaggagttcgagtcccagcctggccaacatggtgaaaccctgtctgtacaaaaattagccaggcctggtggcaggcgcctgtaatcccagctacttgggaggctaaggcaggagaaccacttgaacgtgggaggcaaaggttgcatgcagtgagccragatcgcgccactgcactgcagcctgggcgacagagagagactccatctctaaataaataaataaataaaataaaaagaatagctgtgagatggaagaggttgcaagtttccctgggagcttgtggcacacagaagaccccaggaccttggccttaatggggttaggttgctgggacgggggctggc

SEQ ID NO: 27707 - DNA, 524 bp, Homo sapiens
tgctcttaccagtagccagccacaatgtactaaaacctagctagtgctgttgtccccactctctgcctttgyttaaatgaaagtgttacctctttcccaggagtatgaagcacagaggttgagagcgtaggctctagatccaaaccttctgggccaaattctgtctttgccattaacttgagcaagttcctttactctctgtgactcattttcctcatctttaaatatgtgtaatagtagtactaaatttataggcatttttttgaggatgaagtgtggtattatttgcagagaacatggcacattgttaactattgttgcaatttctttatgtagtattctatgttcttctttcaaatttttagttgtccagtaatttgttaagttccaaacttacagtatttcttgtatacaatctgaagcagaattttgtggctgcaaactcataatggttactcatccacatccactagttcacagcacaaagcaatttttgtttggcaaattgagtagttaaaaatatt

SEQ ID NO: 27708 - DNA, 524 bp, Homo sapiens
tgctcttaccagtagccagccacaatgtactaaaacctagctagtgctgttgtccccactctctgcctttgtttaaatgaaagtgttacctctttcccaggagtatgaagcacagaggttgagagcgtaggctctagatccaaaccttctgggccaaattctgtctttgccattaacttgagcaagttcctttactctctgtgactcattttcctcatctttaaatatgtgtaatagtagtactaaatttataggcatttttttgaggatgaagtgtggtaktatttgcagagaacatggcacattgttaactattgttgcaatttctttatgtagtattctatgttcttctttcaaatttttagttgtccagtaatttgttaagttccaaacttacagtatttcttgtatacaatctgaagcagaattttgtggctgcaaactcataatggttactcatccacatccactagttcacagcacaaagcaatttttgtttggcaaattgagtagttaaaaatatt

SEQ ID NO: 27709 - DNA, 524 bp, Homo sapiens
tgctcttaccagtagccagccacaatgtactaaaacctagctagtgctgttgtccccactctctgcctttgtttaaatgaaagtgttacctctttcccaggagtatgaagcacagaggttgagagcgtaggctctagatccaaaccttctgggccaaattctgtctttgccattaacttgagcaagttcctttactctctgtgactcattttcctcatctttaaatatgtgtaatagtagtactaaatttataggcatttttttgaggatgaagtgtggtattatttgcagagaacatggcacattgttaactattgttgcaatttctttatgtagtattctatgttcttctttcaaatttttagttgtccagtaatttgttaagttccaaacttacagtatttcttgtatacaatctgaagcagaattttgtggctgcaaactcataatggttactcatccayatccactagttcacagcacaaagcaatttttgtttggcaaattgagtagttaaaaatatt

SEQ ID NO: 27710 - DNA, 524 bp, Homo sapiens
tgctcttaccagtagccagccacaatgtactaaaacctagctagtgctgttgtccccactctctgcctttgtttaaatgaaagtgttacctctttcccaggagtatgaagcacagaggttgagagcgtaggctctagatccaaaccttctgggccaaattctgtctttgccattaacttgagcaagttcctttactctctgtgactcattttcctcatctttaaatatgtgtaatagtagtactaaatttataggcatttttttgaggatgaagtgtggtattatttgcagagaacatggcacattgttaactattgttgcaatttctttatgtagtattctatgttcttctttcaaatttttagttgtccagtaatttgttaagttccaaacttacagtatttcttgtatacaatctgaagcagaattttgtggctgcaaactcataatggttactcatccacatccactagttcacagcacaaagcaatttttgtttggcaaatygagtagttaaaaatatt

SEQ ID NO: 27711 - DNA, 1003 bp, Homo sapiens
cacctacctatcatagtaccatcccattgaggacctttaagatcagagtacatggatctgtagacatgaacccatttttgcccctgttgaacttttacaaaactaaactggcagtttggtttctcagttaccactagaattaagtcagagggactataattttttttttttttttktttttgtgtgtgtgagacaaagtctcactctgtcacccaggctggagtgcagtggtgcgatctcggctcactgcaacctccacctcccggattcaagtgattcctttgcctcagcctcccaagtagctgggattacaggtgtgcctggctaatttttgtatttttagtagaggcagggttttgccatgttggccaggttgttcttgaactcctgacctcaagtgatccacctgccttggcctcccaaagtgctgggcttacaggtgtgagccaccatgtctggccccaaaattttcaaaactacacatttgatgtatctgaatcacaagcctaaagatgcaatgttttatactcatggttgtgatcctatggttgattctgtatttgttatgtactttaagcaagaaaggatatcattaaaatgttgtcatacggagtaagattttaaaagcatctcttcaattacatataattgaccctctgctgactttcttaagatttttaaaaatccagattcaagtaaatattgaaaataatgttattttaatttctttgtctggccatcccaccctagcaaaaaactgtgaccttcctctgctaccctgaaaaatctaaggttttttattcttactaaggaaatagtgtttccttatgtacatttagaaaaaaatacaggaaggttgcctacctcagaaaagaactcgtccataaaagccgtgttgtcgatagcaatctcaaccgcatcagtatcatcatcctgtgtcagctgcttctgcaaaaggcaaaaaagagcagagtgaggctaaaaacacaataaatggctaaat

SEQ ID NO: 27712 - DNA, 1003 bp, Homo sapiens
cacctacctatcatagtaccatcccattgaggacctttaagatcagagtacatggatctgtagacatgaacccatttttgcccctgttgaacttttacaaaactaaactggcagtttggtttctcagttaccactagaattaagtcagagggactataattttttttttttttttttktttgtgtgtgtgagacaaagtctcactctgtcacccaggctggagtgcagtggtgcgatctcggctcactgcaacctccacctcccggattcaagtgattcctttgcctcagcctcccaagtagctgggattacaggtgtgcctggctaatttttgtatttttagtagaggcagggttttgccatgttggccaggttgttcttgaactcctgacctcaagtgatccacctgccttggcctcccaaagtgctgggcttacaggtgtgagccaccatgtctggccccaaaattttcaaaactacacatttgatgtatctgaatcacaagcctaaagatgcaatgttttatactcatggttgtgatcctatggttgattctgtatttgttatgtactttaagcaagaaaggatatcattaaaatgttgtcatacggagtaagattttaaaagcatctcttcaattacatataattgaccctctgctgactttcttaagatttttaaaaatccagattcaagtaaatattgaaaataatgttattttaatttctttgtctggccatcccaccctagcaaaaaactgtgaccttcctctgctaccctgaaaaatctaaggttttttattcttactaaggaaatagtgtttccttatgtacatttagaaaaaaatacaggaaggttgcctacctcagaaaagaactcgtccataaaagccgtgttgtcgatagcaatctcaaccgcatcagtatcatcatcctgtgtcagctgcttctgcaaaaggcaaaaaagagcagagtgaggctaaaaacacaataaatggctaaat

SEQ ID NO: 27713 - DNA, 1003 bp, Homo sapiens
cacctacctatcatagtaccatcccattgaggacctttaagatcagagtacatggatctgtagacatgaacccatttttgcccctgttgaacttttacaaaactaaactggcagtttggtttctcagttaccactagaattaagtcagagggactataattttttttttttttttttttktgtgtgtgtgagacaaagtctcactctgtcacccaggctggagtgcagtggtgcgatctcggctcactgcaacctccacctcccggattcaagtgattcctttgcctcagcctcccaagtagctgggattacaggtgtgcctggctaatttttgtatttttagtagaggcagggttttgccatgttggccaggttgttcttgaactcctgacctcaagtgatccacctgccttggcctcccaaagtgctgggcttacaggtgtgagccaccatgtctggccccaaaattttcaaaactacacatttgatgtatctgaatcacaagcctaaagatgcaatgttttatactcatggttgtgatcctatggttgattctgtatttgttatgtactttaagcaagaaaggatatcattaaaatgttgtcatacggagtaagattttaaaagcatctcttcaattacatataattgaccctctgctgactttcttaagatttttaaaaatccagattcaagtaaatattgaaaataatgttattttaatttctttgtctggccatcccaccctagcaaaaaactgtgaccttcctctgctaccctgaaaaatctaaggttttttattcttactaaggaaatagtgtttccttatgtacatttagaaaaaaatacaggaaggttgcctacctcagaaaagaactcgtccataaaagccgtgttgtcgatagcaatctcaaccgcatcagtatcatcatcctgtgtcagctgcttctgcaaaaggcaaaaaagagcagagtgaggctaaaaacacaataaatggctaaat

SEQ ID NO: 27714 - DNA, 1003 bp, Homo sapiens
cacctacctatcatagtaccatcccattgaggacctttaagatcagagtacatggatctgtagacatgaacccatttttgcccctgttgaacttttacaaaactaaactggcagtttggtttctcagttaccactagaattaagtcagagggactataattttttttttttttttttttttgtgtrtgtgagacaaagtctcactctgtcacccaggctggagtgcagtggtgcgatctcggctcactgcaacctccacctcccggattcaagtgattcctttgcctcagcctcccaagtagctgggattacaggtgtgcctggctaatttttgtatttttagtagaggcagggttttgccatgttggccaggttgttcttgaactcctgacctcaagtgatccacctgccttggcctcccaaagtgctgggcttacaggtgtgagccaccatgtctggccccaaaattttcaaaactacacatttgatgtatctgaatcacaagcctaaagatgcaatgttttatactcatggttgtgatcctatggttgattctgtatttgttatgtactttaagcaagaaaggatatcattaaaatgttgtcatacggagtaagattttaaaagcatctcttcaattacatataattgaccctctgctgactttcttaagatttttaaaaatccagattcaagtaaatattgaaaataatgttattttaatttctttgtctggccatcccaccctagcaaaaaactgtgaccttcctctgctaccctgaaaaatctaaggttttttattcttactaaggaaatagtgtttccttatgtacatttagaaaaaaatacaggaaggttgcctacctcagaaaagaactcgtccataaaagccgtgttgtcgatagcaatctcaaccgcatcagtatcatcatcctgtgtcagctgcttctgcaaaaggcaaaaaagagcagagtgaggctaaaaacacaataaatggctaaat

SEQ ID NO: 27715 - DNA, 544 bp, Homo sapiens
ttccaagtaatttttcataacgatctggtcaggctgctgaacctgggcatgaaagcttggctatctgtcctcagtgggatctgtatcatcaccccattcaaatttcctatccagttgatagtttcttcctgctaaggcaatgcttagacataacggcggtcgcggaaaaagaaatataatcaggttgatgcaaccactctaagaaaaaataaatatttttggctgggygcggtggctcatgcctgtaatcccagcactttgggagatggaggcgggcggatcacgaggtcaggagatcaagactgacacggtgaaacgccatctctactaaaaatacaaaaaaaaagttagccgggcatggtggtgggcacctgtagttccagctactctggaggctgagggaggagaatggcgtgaacccgggagacggagcttgcagtgagccgagatcgcgtcactgcactccagcctgggcaacagagtgagactctgtctcacaaaaaaaaaagaaaaaagaaatatttttgagagtcaagccattgtg

SEQ ID NO: 27716 - DNA, 853 bp, Homo sapiens
tttctagaaaacttaagatgggtcytttccaaggagtagctgtggcactattgtctgaaatctgaaaacaaatactaaggagaataaagctgctcctgggataggccagtgcataaaagcctggatgaggtctgcttctcggtcgattctctattccagtctttgggtctggctgttccctccctgatctgtacctctacgatcccaaccatcttcccacagatccctcacctgtcctgtgcttctaactcagatccagtctttcgactctgagtctccccttgcttatttgtctataaaattcttggccttgatttatatcttgattcaaatggtgaatattattaccgaaggcaatgttaggtcttacttttaggtaaggccagttatatatcgttttaacctactgacttctccagggtcaccaatttgtgttgatcctgtggtataggtcagatgtacacggcagatgagtggctagactatatggacactttcaatgctttccatgccaaagtaatgatactatcttgaaatattacattttaaaatagctttatattttatgtgaaaaaagaccaccttaaattaccttaaaaattcaaagtcctcattcgctctgagaactaattgtatgagactggggtcttttctattcttatcattgttaagctatgatattcatgtcataataacattttatattatacttggaatattgggtggtctcctttttaatacagcattgttttacataggctttctaagtatttacgtagtccagatattcatcattttcattgccacagactttattaccatattaaagttctaaagtttgcttaataacccc

SEQ ID NO: 27717 - DNA, 853 bp, Homo sapiens
tttctagaaaacttaagatgggtcctttccaaggagtagctgtggcactattgtctgaaatctgmaaacaaatactaaggagaataaagctgctcctgggataggccagtgcataaaagcctggatgaggtctgcttctcggtcgattctctattccagtctttgggtctggctgttccctccctgatctgtacctctacgatcccaaccatcttcccacagatccctcacctgtcctgtgcttctaactcagatccagtctttcgactctgagtctccccttgcttatttgtctataaaattcttggccttgatttatatcttgattcaaatggtgaatattattaccgaaggcaatgttaggtcttacttttaggtaaggccagttatatatcgttttaacctactgacttctccagggtcaccaatttgtgttgatcctgtggtataggtcagatgtacacggcagatgagtggctagactatatggacactttcaatgctttccatgccaaagtaatgatactatcttgaaatattacattttaaaatagctttatattttatgtgaaaaaagaccaccttaaattaccttaaaaattcaaagtcctcattcgctctgagaactaattgtatgagactggggtcttttctattcttatcattgttaagctatgatattcatgtcataataacattttatattatacttggaatattgggtggtctcctttttaatacagcattgttttacataggctttctaagtatttacgtagtccagatattcatcattttcattgccacagactttattaccatattaaagttctaaagtttgcttaataacccc

SEQ ID NO: 27718 - DNA, 1037 bp, Homo sapiens
tttctttttacagtcaaattattaatgttagaaaatgcaatatcttcaggggatagtaatggactcctgaacaaaaatgtaaaattgcctagagatgtaatgtcagttaactagaagtttttatttcccttccaaactgcaatctggcttctatatgaaacaggatcctttgtctttttggcagcctctttggctgaactgagatctaaacgtccagcgttcctttaaaacagttcaacaaggccaggaaagaaaatcgtgctgaccaatacacctattccaagacctgggatgcttgatttttagacctaatatcagtccagtcagggtatctcatggctaggatctcatctcattattttttcaattcatattggattcactgttaagctattttcagtcatgcacattgacctagattctcccacagtgtaagctactccccaggagtatgctaggtacttgaggaaactgcattaacactttcagggatgctacaataatgggtttcctggtgcctgaaaagagctgcctcacaggatattaaatgataccttcatatacggaagaggatttatacaacttctataatgatctgctgtgcaaaccaggggaaacccagaaactaagagaaaatgcttactaaatagaaggaaaacaaatatttagataatagattttttaaatcttctaatagaaattacagtgtacaattatcagctggtttctaattataggaaggtttttgacccaataccaaggttactagaaaattaaagtgctrttttaaagataaatgatgactttgccctggaggctccttctcgcagtctctgccattgaatctaactcaacgttctgtgatcctttagagacagtactttattttctaccaattgagcctttaaggaggtatctctttaactacattgttaatttgtagagaaatttaactcaaactagcttcagcaagagtagccaattgttcttggctcttgaaactcaaaagtccagggatagatgtttgaggaatggct

SEQ ID NO: 27719 - DNA, 1037 bp, Homo sapiens
tttctttttacagtcaaattattaatgttagaaaatgcaatatcttcaggggatagtaatggactcctgaacaaaaatgtaaaattgcctagagatgtaatgtcagttaactagaagtttttatttcccttccaaactgcaatctggcttctatatgaaacaggatcctttgtctttttggcagcctctttggctgaactgagatctaaacgtccagcgttcctttaaaacagttcaacaaggccaggaaagaaaatcgtgctgaccaatacacctattccaagacctgggatgcttgatttttagacctaatatcagtccagtcagggtatctcatggctaggatctcatctcattattttttcaattcatattggattcactgttaagctattttcagtcatgcacattgacctagattctcccacagtgtaagctactccccaggagtatgctaggtacttgaggaaactgcattaacactttcagggatgctacaataatgggtttcctggtgcctgaaaagagctgcctcacaggatattaaatgataccttcatatacggaagaggatttatacaacttctataatgatctgctgtgcaaaccaggggaaacccagaaactaagagaaaatgcttactaaatagaaggaaaacaaatatttagataatagattttttaaatcttctaatagaaattacagtgtacaattatcagctggtttctaattataggaaggtttttgacccaataccaaggttactagaaaattaaagtgctgttttaaagataaatgatgactttgccctggaggctccttctcgcagtctctgccattgaatctaactcaacgttctgtgatcctttagagacagtactttattttctaccaattgagcctttaaggaggtatctctttaactacattgttaatttgtagagaaatttamctcaaactagcttcagcaagagtagccaattgttcttggctcttgaaactcaaaagtccagggatagatgtttgaggaatggct

SEQ ID NO: 27720 - DNA, 1166 bp, Homo sapiens
ctcaatttactctgcaaagtcctgtactccagccccaaattacttcacgtcccccgtgttagcttaagagtttccagcagtggggtctgggtttgtacttctcaagagcccagctctccccttaggctggtggtatcacctggcaccctacagaggacgctgccaaggctggagacagcgctcaagaggccggctgggaggcaagagtccggggaggaaggtggaagccagggacgagagcagtgactttggggtgtcagggagggccaacatcagaggcagataaaactggcatgctggatatgaggcacaatgaagatgaagtcccaagacagggtacaggcaggggtgggcagtgctacaaactgaactatggaaaaaacaaaaacaaaaaaaaacaacactctcaacaaccttgagaaggggaatagtttgagttctgtccaccacaaaatctatttacctgcttctgggtaactttgagggtaagaatttgatttcaacaccttcctctggcagaccattttggtcacagcccaggggccatgcctgggtgtcctctgttatctgcaaaatatggggggcctcaaggacacccctcccccaggaatcgtgtccccctggagatggggagcatgcagggaggatgactggggaggctcagggctctagtactcatcccggactctgagcagtggaatgaattccagccctcctgccctcctctaaccacatgatttgcggttgggcttagaccagactggcctgcagggtggggcgccrtgcctgcccttaggcaggtgtggggaaaggcagtgtggggaaggcccagcccccgctgtgtgcccggcaccagatgggcacttagcccgtggtcatgttgcatggtcacaccaagcctgggaattgggaattattgtcttttattgtagaactgagctacctgaccctcaaaaagataaaggaggttgctcaggtcacagggcaagtaatgactggcatctggctttgcctggttgtggcttcagctctcagtttacccctccctccccacatgtatacccactatcctctgctccatcaagtggaactgttttcagacctctttaaattagctctctctggccttttccattcaggcattgcttcctgcaagaaaccttcca

SEQ ID NO: 27721 - DNA, 1166 bp, Homo sapiens
ctcaatttactctgcaaagtcctgtactccagccccaaattacttcacgtcccccgtgttagcttaagagtttccagcagtggggtctgggtttgtacttctcaagagcccagctctccccttaggctggtggtatcacctggcaccctacagaggacgctgccaaggctggagacagcgctcaagaggccggctgggaggcaagagtccggggaggaaggtggaagccagggacgagagcagtgactttggggtgtcagggagggccaacatcagaggcagataaaactggcatgctggatatgaggcacaatgaagatgaagtcccaagacagggtacaggcaggggtgggcagtgctacaaactgaactatggaaaaaacaaaaacaaaaaaaaacaacactctcaacaaccttgagaaggggaatagtttgagttctgtccaccacaaaatctatttacctgcttctgggtaactttgagggtaagaatttgatttcaacaccttcctctggcagaccattttggtcacagcccaggggccatgcctgggtgtcctctgttatctgcaaaatatggggggcctcaaggacacccctcccccaggaatcgtgtccccctggagatggggagcatgcagggaggatgactggggaggctcagggctctagtactcatcccggactctgagcagtggaatgaattccagccctcctgccctcctctaaccacatgatttgcggttgggcttagaccagactggcctgcagggtggggcgccatgcctgcccttaggcaggtgtggggaaaggcagtgtggggaaggcccagcccccgctgtgtgcccggcaccagatgggcacttagcccgtggtcatgttgcatggtcacaccaagcctgggaaktgggaattattgtcttttattgtagaactgagctacctgaccctcaaaaagataaaggaggttgctcaggtcacagggcaagtaatgactggcatctggctttgcctggttgtggcttcagctctcagtttacccctccctccccacatgtatacccactatcctctgctccatcaagtggaactgttttcagacctctttaaattagctctctctggccttttccattcaggcattgcttcctgcaagaaaccttcca

SEQ ID NO: 27722 - DNA, 1166 bp, Homo sapiens
ctcaatttactctgcaaagtcctgtactccagccccaaattacttcacgtcccccgtgttagcttaagagtttccagcagtggggtctgggtttgtacttctcaagagcccagctctccccttaggctggtggtatcacctggcaccctacagaggacgctgccaaggctggagacagcgctcaagaggccggctgggaggcaagagtccggggaggaaggtggaagccagggacgagagcagtgactttggggtgtcagggagggccaacatcagaggcagataaaactggcatgctggatatgaggcacaatgaagatgaagtcccaagacagggtacaggcaggggtgggcagtgctacaaactgaactatggaaaaaacaaaaacaaaaaaaaacaacactctcaacaaccttgagaaggggaatagtttgagttctgtccaccacaaaatctatttacctgcttctgggtaactttgagggtaagaatttgatttcaacaccttcctctggcagaccattttggtcacagcccaggggccatgcctgggtgtcctctgttatctgcaaaatatggggggcctcaaggacacccctcccccaggaatcgtgtccccctggagatggggagcatgcagggaggatgactggggaggctcagggctctagtactcatcccggactctgagcagtggaatgaattccagccctcctgccctcctctaaccacatgatttgcggttgggcttagaccagactggcctgcagggtggggcgccatgcctgcccttaggcaggtgtggggaaaggcagtgtggggaaggcccagcccccgctgtgtgcccggcaccagatgggcacttagcccgtggtcatgttgcatggtcacaccaagcctgggaattgggaattattgtcttttattgtagaactgagctacctgaccctcaaaaagataaaggaggttgctcaggtcacagggcaagtaatgactggcatctggctttgcctggttgtggcttcagctctcagtttacccctccctccccacatgtatacccactatcctctgctccatcaagtggaactgttttcagacctctytaaattagctctctctggccttttccattcaggcattgcttcctgcaagaaaccttcca

SEQ ID NO: 27723 - DNA, 650 bp, Homo sapiens
taccccaggcctacagaatcagaaactctgaaaatgaggcccagcattctgtgttttaacaagctttctaggagctcctgatgcgtgctgaagtttgaggatcatagattataatgagctagaaatggaaaacagcataaatatgcccttgtgttgaggatataaaatggcatcctggtaaagttagtaattttcccgaaagtccctaatctctatgttctgattcttctctctttgctctgtgcttttatgactttcaagttagttcaggacaatccagcacttgatacaattgtgatttgtattgctctttatttcatttgaggattttctctctggtagatctacaaatcctacgccttctyttctcctcccattattcctattaccaaatgcatgcttcacaatgcccattaaaaaaaaaaaaccctatacagaaatatttcaaaactagcttttctccttgtgtcttgatatgctactaaaatggaattcaactgaatagttccactgatttgatacagattaaaatatactcaggatcttatatataagtcacagagggggatatttttggtttgataagatttaataggtttaattctttgatgaaattaaaaacaacaattgggttattggctataacatat

SEQ ID NO: 27724 - DNA, 588 bp, Homo sapiens
tccaaatgttccagaaatgtttttaattaaaatatgtaaaaatattataggaagaaaaaatacattgctgcatctctaccttttaccaaatcttttccaattcagaaaagaatcatgtgtagcaagtcgaagctacttcttgcaaccagtttcttctctctttctttcaacttctatgaatgacaaaaaagacatactcattctaatgaatacatcctaataaacgagtcacagmaacacatatggcctatttcaacaacagacactctagaatcataaacagcatctcttttatttcttcccttggtcatggtttagcacacacgtgtgaaattttattttcatcatcaacactatcaaaaatgttaacaaaatgtttggtacaaacaacagagatagcttaaagctttaacatagaagtatcgtaagtaatccaaaggctcagcaagtttaaaatcagagagcaaatagataacaagtatgtgaattgaaatgggaaatataactatgaataggaaggcaagaccccagtattaattcaaagaacacatttaaacaaagtgattcttaagtaggttttaaaagaag

SEQ ID NO: 27725 - DNA, 588 bp, Homo sapiens
tccaaatgttccagaaatgtttttaattaaaatatgtaaaaatattataggaagaaaaaatacattgctgcatctctaccttttaccaaatcttttccaattcagaaaagaatcatgtgtagcaagtcgaagctacttcttgcaaccagtttcttctctctttctttcaacttctatgaatgacaaaaaagacatactcattctaatgaatacatcctaataaacgagtcacagcaacacatatggcctatttcaacaacagacactctagaatcataaacagcatctcttttatttcttcccttggtcatggtttagcacacacgtgtgaaattttattttcatcatcaacactatcaaaaatgttaacaaaatgtttggtacaaacaacagagatagcttaaagctttaacatagaagtatcgtaagtaatccaaaggctcagcaagtttaaaatcagagagcaaatagataacawgtatgtgaattgaaatgggaaatataactatgaataggaaggcaagaccccagtattaattcaaagaacacatttaaacaaagtgattcttaagtaggttttaaaagaag

SEQ ID NO: 27726 - DNA, 937 bp, Homo sapiens
ctcctcaagacctcatttgcccctgcctacaaccacaaagaattcaaggcagttcctaccaggaaacaatgtgagatcccagagtcctgagactgggatgggattcttggaaaggtaagtctaggaagcatgggtccaaaaggttttgggagggagtaagtggaagctaagcttggaagaatctgttcatttttctgagttttttctttctttctttctttttttgagacagagtttcgctcttgttgccgaggctggagtgcaatggcacaatctcggctcaccgcaacctctgcctcctgggttcaagcgattctcctgcctcagcctcctgagtagctgggattacaggcatgcgccaccatgcctggctaattttgtatttttagtagagatgggggtttctccatgttagtcaggctggtctcgaactcccgacctcaggtgatcygcctgcctcggcctcccaaagtgctgggattacaggcggagccaccacgcccagcctttttttttttttttttaatcaaagatattatagagaaatagaagaagagccaggagacaactttgggcatccaggacactggctttccccggctcttccagaaccagccccctccctgggataaaggcggaaagggattttctgtgccactatttccaatggaggagtggtcctgaagttctgtatcaatagccacttgctaccaagtcaatgagaagagaaaagaacctgcctggtagagcacacctcctcattgctaggtcccttcagcatgaaatttctatatctatcggggtccaatctccaatcccatcctaagacctacaatatcaaggctcctatacagattcaggatctggtgaggggggagctttcaagaggaaacaggatagaaaaacccaagagtcaaggtggtggaagaagaagcaa

SEQ ID NO: 27727 - DNA, 1967 bp, Homo sapiens
attttggaaaattgtagaaaccaaatgggagaaacatgatatagaaaaacgtaaacaactacagaacattttatgaactttgtttaaatttttttwaatttataaacaagaagagatgatagagctaaaataaacaaaaaagttaagtgggaaaaccacaatcatcagggattgcgcatagtctttattgatttggagatacgttgttctgcaaaggaagcatttataaaacttttattctcatgtagttttaacatagccccatgaagttagaaatctaattctataaaagtggttactgaaagaaaataattttcaaacttcagttttcaacctactgtctacagtagcttctgtacacttgaaacaataaaattggctatttatattactttatctctgactctttagaatggaattatttcatcaatacctttttgctaaggaatgtagacatccctacattttggaatttttattgcaagtacatacagttttactcataaattgaatttttatctccacaatatttgagtaaattatgaggattcaaaacaaaagtgtgaaactgtcatcgggaggagaaagatttcaaataactttattatgtctcataaatctagggagatagtgttatatcataaattaaatattattttttgggagataaaggaactgattttcagtaaaaggactgttcctaactagtcgtgagagtttggaagactcatttaaacttgatggaccaccaccagctccaccttagagccaatgaactgtaactttccaatagcattatttaatgtgaaaagactttctgtgaattattggatttacaacatgagtaattagtgattttagcaaataaggtatactaagaagtaaaaacgacagtatcagcgctgtacatcatttagcaggttgtatcttgtagctgtgcaatgtgtttgtctgtgtgtgtgtgtgtgtttcagcttgttagattctccaggtaactttgtagatccagtctgatttagcttttgttaaagtttcctcttcaacaaacagaagactgtttattcaaaatattcactcagtatggcactaagatttctaaagcctttacattaaaataatgcaggtagcataagactgataaaactggggccgggcgctgtggctcacgcctgtaattccagcactttgggaggccgaggcgggtggatcacgaagtcaggagatcgagaccatcctggctaacacggtgaaatcccctgtctacaaaaatacaaaaaacttagccgggtgtggtggcgggagcctgtagtcccagctactccggaggctgaggcaggagaatggcgtgagcctgggaagcggagcttgcagtgagccgagaccacgccgctgcactccagcctgggtgacagagagagactccgtctcaaaaaataaaaataaaaaagactgataaaacatggccaaaaaaaaaacacctaattgattagaaagttatgcagtcttttcacatatgacataaggacacacctatcttttcacagtttttttgtttgtctattttttgcataaacgttaagaaattcacatccccgttatatttcttattgaactagtctactaatattacacccatagtgaacagatcaggttgatgagagcaactgtagtaaaccagtatctatttctcattttaaatttactgattcagccaactgcactgatttagaaaagaaaaataccttatgatagatctgagaatgcttaacaaacattattgcaattctgaaaatgcttttactgtctgtttcattccggcttctgccaaaaatacctatggatcacgtttaatacactgtggtgtatgcttaaaccttgacataatgggagaaacactacaacttaatattgaatgaggtagtattggattctttgtgtctataacaatatacttttctaccaatgca

SEQ ID NO: 27728 - DNA, 1967 bp, Homo sapiens
attttggaaaattgtagaaaccaaatgggagaaacatgatatagaaaaacgtaaacaactacagaacattttatgaactttgtttaaattttttttaatttataaacaagaagagatgatagagctaaaataaacaaaaaagttaagtgggaaaaccacaatcatcagggattgcgcatagtctttattgatytggagatacgttgttctgcaaaggaagcatttataaaacttttattctcatgtagttttaacatagccccatgaagttagaaatctaattctataaaagtggttactgaaagaaaataattttcaaacttcagttttcaacctactgtctacagtagcttctgtacacttgaaacaataaaattggctatttatattactttatctctgactctttagaatggaattatttcatcaatacctttttgctaaggaatgtagacatccctacattttggaatttttattgcaagtacatacagttttactcataaattgaatttttatctccacaatatttgagtaaattatgaggattcaaaacaaaagtgtgaaactgtcatcgggaggagaaagatttcaaataactttattatgtctcataaatctagggagatagtgttatatcataaattaaatattattttttgggagataaaggaactgattttcagtaaaaggactgttcctaactagtcgtgagagtttggaagactcatttaaacttgatggaccaccaccagctccaccttagagccaatgaactgtaactttccaatagcattatttaatgtgaaaagactttctgtgaattattggatttacaacatgagtaattagtgattttagcaaataaggtatactaagaagtaaaaacgacagtatcagcgctgtacatcatttagcaggttgtatcttgtagctgtgcaatgtgtttgtctgtgtgtgtgtgtgtgtttcagcttgttagattctccaggtaactttgtagatccagtctgatttagcttttgttaaagtttcctcttcaacaaacagaagactgtttattcaaaatattcactcagtatggcactaagatttctaaagcctttacattaaaataatgcaggtagcataagactgataaaactggggccgggcgctgtggctcacgcctgtaattccagcactttgggaggccgaggcgggtggatcacgaagtcaggagatcgagaccatcctggctaacacggtgaaatcccctgtctacaaaaatacaaaaaacttagccgggtgtggtggcgggagcctgtagtcccagctactccggaggctgaggcaggagaatggcgtgagcctgggaagcggagcttgcagtgagccgagaccacgccgctgcactccagcctgggtgacagagagagactccgtctcaaaaaataaaaataaaaaagactgataaaacatggccaaaaaaaaaacacctaattgattagaaagttatgcagtcttttcacatatgacataaggacacacctatcttttcacagtttttttgtttgtctattttttgcataaacgttaagaaattcacatccccgttatatttcttattgaactagtctactaatattacacccatagtgaacagatcaggttgatgagagcaactgtagtaaaccagtatctatttctcattttaaatttactgattcagccaactgcactgatttagaaaagaaaaataccttatgatagatctgagaatgcttaacaaacattattgcaattctgaaaatgcttttactgtctgtttcattccggcttctgccaaaaatacctatggatcacgtttaatacactgtggtgtatgcttaaaccttgacataatgggagaaacactacaacttaatattgaatgaggtagtattggattctttgtgtctataacaatatacttttctaccaatgca

SEQ ID NO: 27729 - DNA, 1967 bp, Homo sapiens
attttggaaaattgtagaaaccaaatgggagaaacatgatatagaaaaacgtaaacaactacagaacattttatgaactttgtttaaattttttttaatttataaacaagaagagatgatagagctaaaataaacaaaaaagttaagtgggaaaaccacaatcatcagggattgcgcatagtctttattgatttggagatacgttgttctgcaaaggaagcatttataaaacttttattctcatgtagttttaacatagccccatgaagttagaaatctaattctataaaagtggttactgaaagaaaataattttcaaacttyagttttcaacctactgtctacagtagcttctgtacacttgaaacaataaaattggctatttatattactttatctctgactctttagaatggaattatttcatcaatacctttttgctaaggaatgtagacatccctacattttggaatttttattgcaagtacatacagttttactcataaattgaatttttatctccacaatatttgagtaaattatgaggattcaaaacaaaagtgtgaaactgtcatcgggaggagaaagatttcaaataactttattatgtctcataaatctagggagatagtgttatatcataaattaaatattattttttgggagataaaggaactgattttcagtaaaaggactgttcctaactagtcgtgagagtttggaagactcatttaaacttgatggaccaccaccagctccaccttagagccaatgaactgtaactttccaatagcattatttaatgtgaaaagactttctgtgaattattggatttacaacatgagtaattagtgattttagcaaataaggtatactaagaagtaaaaacgacagtatcagcgctgtacatcatttagcaggttgtatcttgtagctgtgcaatgtgtttgtctgtgtgtgtgtgtgtgtttcagcttgttagattctccaggtaactttgtagatccagtctgatttagcttttgttaaagtttcctcttcaacaaacagaagactgtttattcaaaatattcactcagtatggcactaagatttctaaagcctttacattaaaataatgcaggtagcataagactgataaaactggggccgggcgctgtggctcacgcctgtaattccagcactttgggaggccgaggcgggtggatcacgaagtcaggagatcgagaccatcctggctaacacggtgaaatcccctgtctacaaaaatacaaaaaacttagccgggtgtggtggcgggagcctgtagtcccagctactccggaggctgaggcaggagaatggcgtgagcctgggaagcggagcttgcagtgagccgagaccacgccgctgcactccagcctgggtgacagagagagactccgtctcaaaaaataaaaataaaaaagactgataaaacatggccaaaaaaaaaacacctaattgattagaaagttatgcagtcttttcacatatgacataaggacacacctatcttttcacagtttttttgtttgtctattttttgcataaacgttaagaaattcacatccccgttatatttcttattgaactagtctactaatattacacccatagtgaacagatcaggttgatgagagcaactgtagtaaaccagtatctatttctcattttaaatttactgattcagccaactgcactgatttagaaaagaaaaataccttatgatagatctgagaatgcttaacaaacattattgcaattctgaaaatgcttttactgtctgtttcattccggcttctgccaaaaatacctatggatcacgtttaatacactgtggtgtatgcttaaaccttgacataatgggagaaacactacaacttaatattgaatgaggtagtattggattctttgtgtctataacaatatacttttctaccaatgca

SEQ ID NO: 27730 - DNA, 1967 bp, Homo sapiens
attttggaaaattgtagaaaccaaatgggagaaacatgatatagaaaaacgtaaacaactacagaacattttatgaactttgtttaaattttttttaatttataaacaagaagagatgatagagctaaaataaacaaaaaagttaagtgggaaaaccacaatcatcagggattgcgcatagtctttattgatttggagatacgttgttctgcaaaggaagcatttataaaacttttattctcatgtagttttaacatagccccatgaagttagaaatctaattctataaaagtggttactgaaagaaaataattttcaaacttcagttttcaacctactgtctacagtagcttctgtacacttgaaacaataaaattggctatttatattactttatctctgactctttagaatggaattatttcatcaatacctttttgctaaggaatgtagacatccctacattttggaatttttattgcaagtacatacagttttactcataaattgaatttttatctccacaatatttgagtaaattatgaggattcaaaacaaaagtgtgaaactgtcatcgggaggagaaagatttcaaataactttattatgtctcataaatctagggagatagtgttatatcataaattaaatattattttttgggagataaaggaactgattttcagtaaaaggactgttcctaactagtcgtgagagtttggaagactcatttaaacttgatggaccaccaccagctccaccttagagccaatgaactgtaactttccaatagcattatttaatgtgaaaagactttctgtgaattattggatttacaacatgagtaattagtgattttagcaaataaggtatactaagaagtaaaaacgacagtatcagcgctgtacatcatttagcaggttgtatcttgtagctgtgcaatgtgtttgtctgtgtgtgtgtgtgtgtttcagcttgttagattctccaggtaactttgtagatccagtctgatttagcttttgttaaagtttcctcttcaacaaacagaagactgtttattcaaaatattcactcagtatggcactaagatttctaaagcctttacattaaaataatgcaggtagcataagactgataaaactggggccgggcgctgtggctcacgcctgtaattccagcactttgggaggccgaggcgggtggatcacgaagtcaggagatcgagaccatcctggctaacacggtgaaatcccctgtctacaaaaatacaaaaaacttagccgggtgtggtggcgggagcctgtagtcccagctactccggaggctgaggcaggagaatggcgtgagcctgggaagcggagcttgcagtgagccgagaccacgccgctgcactccagcctgggtgacagagagagactccgtctcaaaaaataaaaataaaaaagactgataaaacatggccaaaaaaaaaacacstaattgattagaaagttatgcagtcttttcacatatgacataaggacacacctatcttttcacagtttttttgtttgtctattttttgcataaacgttaagaaattcacatccccgttatatttcttattgaactagtctactaatattacacccatagtgaacagatcaggttgatgagagcaactgtagtaaaccagtatctatttctcattttaaatttactgattcagccaactgcactgatttagaaaagaaaaataccttatgatagatctgagaatgcttaacaaacattattgcaattctgaaaatgcttttactgtctgtttcattccggcttctgccaaaaatacctatggatcacgtttaatacactgtggtgtatgcttaaaccttgacataatgggagaaacactacaacttaatattgaatgaggtagtattggattctttgtgtctataacaatatacttttctaccaatgca

SEQ ID NO: 27731 - DNA, 809 bp, Homo sapiens
agggaaagttccctgaaagatatcactttcaagattgcaaaacctggctttacctttgtgtgcatgtatgtattacatgtaggcatttctttttatgtctgtgtcccctacacgtgccagtttcagaggtgatacttcaaagagagtggaggacatgccagctgcaattcctattttcattctcactttaagagtatttatggctataatgtcggaattctatgtaagacattttttaaatggtgatacagttaaggtgctaaaaaggtttgtgtatttttctttgtctgcatattgaaagcttcccatttatcatatataagagagaatttggataattttcttcctgaaagcagaaggatatattatcattatttcctacagggtatggcaaggcacctttcttcccagtacctttcttgcaacacttgatctcacaatcctataatcccattatatactgcaccttttccatgaaayatcatccttgaagttatagtttttccttttaataaaataactactactgcatttttattaacctctcacatttcccaagccactttgtgggagacaaacatacaagataggccacacatacgtgtttgcttttcagaaaaattacacactggtaagaagcttagaatcaacacagaattatggctacaagtaaacacagtcgaagattaaattaaatgcctacatccaagggttaataggatcagacccaagtgtctgagaccatcagaatctaccaatgcaaagttaggatgtatcctcactgtataatatatttcaaaaacaattca

SEQ ID NO: 27732 - DNA, 510 bp, Homo sapiens
agctgtagcagatacattgttaccaccatcttctgcattattttccaacagtctgtctaaatcatcaaaacagtgtctttgaaacaaccacgccatgtccagaaagacttatgaaactttttatgtctcatttaagtacttttgaacaataagaatatgagtagaaaccactcgaatttttgagatgtagtttgagtctctgaactcatgaatttcaagtgaaattaaattggcccagataaaaccacagctagttaaagcaaccctcattcacccttataagccaaataatgcttttacatgttcctaaagaattcctgtgccatggaaaaaaaaaactcatttttgttcacaataaacagccctgatggatttctgtagttgatcctgagtacctacrtgcttcattgtctttcaatcctaagaacaggcatcttacaaagacacagaggcagaggcctaaaaagcaacatccagtgctccattaatgtctgataatcagggccattt

SEQ ID NO: 27733 - DNA, 559 bp, Homo sapiens
aactgttcctggtaagatataataattggcataaatggtaaaatctagacaacacaacaaactactaaacacaacgttctacttaaaagtataagacctgaataccagattgtgaattacgattatggaggataatagaaaattgakatcagggctagatggatctagtaactggtgtccccgttttccctaataaggagtggaatagtacaatatgcactgagggctatctctacccagattgcaaagagatgtaacatagcatgtgacattttgagagagttatttgatagaaaactctgtgaagggagagataagatcagaatgtatgtgtgtatgtttgtgtgtgtgtgtgtgtgtgtgtgagagagtgagagagagagagagagagtgcttatgcaatgggagaagtagtggttgggacagaagtgctccagatggtaagtaagcggagagtaaactcaagagattattctgagttgtgtgatttagcattatcctattgtccttgaggcatctttggcttaaagcctttcacaaacttttcaagttttaagaa

SEQ ID NO: 27734 - DNA, 653 bp, Homo sapiens
taatttgacagataaggaacttaaggacccaaagtcatgtcagacaaagaagcaaactaaattcatgctcatcttactttacattctaagatcttgtattttttagcaaaattttttgtttgggattttaagttctccatgtgaattattctttgggatcattttttttttttttttgatggtttcaaacctattgggatttaaacagacatccaaagcatacctcttttattatayaggtctgagattacctttaaccctggctgcagagctgggctctgattggtctgcccaaatgcaatcagggcaatgtaattgaagagcagacacatgagctaaatttgtccaattgcagtgaaactcagaacctttgtgccacgttgaagagaaaacatatcaactgtcacatcatagacctaaccagtgaagtagaagcatttagccttgtggcttatagcagtcatcttttggccaagacagatatcagcttgaggatgcagaagacatggggaagaaggagaaagagaattttgaagaaattatttaaaaccttgcattacttctggacttctcagaagaatcaacctatttctcttatttttcaatccagtttagattagatgtgctgtcacatgttgccttaagtgctcttt

SEQ ID NO: 27735 - DNA, 653 bp, Homo sapiens
taatttgacagataaggaacttaaggacccaaagtcatgtcagacaaagaagcaaactaaattcatgctcatcttactttacattctaagatcttgtattttttagcaaaattttttgtttgggattttaagttctccatgtgaattattctttgggatcattttttttttttttttgatggtttcaaacctattgggatttaaacagacatccaaagcatacctcttttattatataggtctgagattacctttaaccctggctgcagagctgggctctgattggtctgcccaaatgcaatcagggcaatrtaattgaagagcagacacatgagctaaatttgtccaattgcagtgaaactcagaacctttgtgccacgttgaagagaaaacatatcaactgtcacatcatagacctaaccagtgaagtagaagcatttagccttgtggcttatagcagtcatcttttggccaagacagatatcagcttgaggatgcagaagacatggggaagaaggagaaagagaattttgaagaaattatttaaaaccttgcattacttctggacttctcagaagaatcaacctatttctcttatttttcaatccagtttagattagatgtgctgtcacatgttgccttaagtgctcttt

SEQ ID NO: 27736 - DNA, 653 bp, Homo sapiens
taatttgacagataaggaacttaaggacccaaagtcatgtcagacaaagaagcaaactaaattcatgctcatcttactttacattctaagatcttgtattttttagcaaaattttttgtttgggattttaagttctccatgtgaattattctttgggatcattttttttttttttttgatggtttcaaacctattgggatttaaacagacatccaaagcatacctcttttattatataggtctgagattacctttaaccctggctgcagagctgggctctgattggtctgcccaaatgcaatcagggcaatgtaattgaagagcagacacatgagctaaatttgtccaattgcagtgaaactcagaacctttgtgccaygttgaagagaaaacatatcaactgtcacatcatagacctaaccagtgaagtagaagcatttagccttgtggcttatagcagtcatcttttggccaagacagatatcagcttgaggatgcagaagacatggggaagaaggagaaagagaattttgaagaaattatttaaaaccttgcattacttctggacttctcagaagaatcaacctatttctcttatttttcaatccagtttagattagatgtgctgtcacatgttgccttaagtgctcttt

SEQ ID NO: 27737 - DNA, 653 bp, Homo sapiens
taatttgacagataaggaacttaaggacccaaagtcatgtcagacaaagaagcaaactaaattcatgctcatcttactttacattctaagatcttgtattttttagcaaaattttttgtttgggattttaagttctccatgtgaattattctttgggatcattttttttttttttttgatggtttcaaacctattgggatttaaacagacatccaaagcatacctcttttattatataggtctgagattacctttaaccctggctgcagagctgggctctgattggtctgcccaaatgcaatcagggcaatgtaattgaagagcagacacatgagctaaatttgtccaattgcagtgaaactcagaacctttgtgccacgttgaagagaaaacatatcaactgtcrcatcatagacctaaccagtgaagtagaagcatttagccttgtggcttatagcagtcatcttttggccaagacagatatcagcttgaggatgcagaagacatggggaagaaggagaaagagaattttgaagaaattatttaaaaccttgcattacttctggacttctcagaagaatcaacctatttctcttatttttcaatccagtttagattagatgtgctgtcacatgttgccttaagtgctcttt

SEQ ID NO: 27738 - DNA, 711 bp, Homo sapiens
tggctagatgcttacatgtatgagaataacagataaaaagagttgcaatttaactttgagaccagactaattttgagagactgagtcctgaagtactttttttcagtcacaaaagcttcagaagggcagaagaaaggcttgactcagtaacccaggaatgtagcagctgatgttcgaggacaagctggtgtatgcaggagcaccagatgtcccgacagaagaaagcggatgccacagattgggaagagctgtggcaggggagagagccaactcagatttcttcttctgactaattctgattttctgattaatgaatgcttataataaaaaaatcatcatcacagaaaggggaaatacatctacaatacccatgattatactgcaccgaacatcactttaagttttgaagtataattctttgggtattttctctttctgaaaaattctgcttatgccatcattttcataatttttttcaaatagtaaaatgttaaagacacttctataagaccagacataatactctttgcctttctttctactctctctctccacacacacacacacacacacacacacasagagagacagagagagagagacagagagagagagagagagagagaatgtcctaggtactgagctgtgtgctaatttttaataagagcaattttgtgtcagtcttatcacagaattcctcagctgtcaggg

SEQ ID NO: 27739 - DNA, 582 bp, Homo sapiens
tgcataagaacattttgtctgttgaggacaattaaaaataggtccatataagacgcaattaaagctcctgggataaactcagtcgcttaatgaaatctgctctagagcacagagtgtaagagcattattccaactgacgattttaatgcccaagtaaatgaagacaggatggccaataaaggtaactagcaaaatgttgaggtggtggtgtatgttgggaggggaggaggcaatggaagtaacccttacagagaattttaaaaccaaccagaagttgatctacttttcattattaccatgtgctggtgattgtaacccatgtcagtgataagacacattacattccacttccgayggactacagctctgctctctccttgtcttctcactgtgttaaggaacagagacaactttgttcctgcaatgagaatccacaggttataggatatagctcttatttataccccccaacgcaccattaagcaatgccaattgacttttctgacccaagatccaaaggatcttagaggacttctgacagaagatattcagcaaaagttggtgctctgtcatgctgacttg

SEQ ID NO: 27740 - DNA, 1038 bp, Homo sapiens
ctgcagtttactttcattgctatattctcaagcactttcagtactaataatagcaccaaagtgaaaatctccattatctagaaacattttggatagccaagttttctaagtaattcagattttattatctaatacatcaattgttattttaactattttcgatggaaacttgtgaaatgtattctaagcttccctcttcttaaatggaatataaaattaaacataatttaattttttcttagggactcaygggcatgaattatgaaaatcaaatattatcctaggccagaaaacagccttgaaatgtataaggatatttgctttacattacatggcttctgtccagtttttatgttgcatcttcccttacatcactttgtcctttcctgtgaactacctccttttggttgggttcagtgatgcctccttctagtatctcctcccatgcttcctccttttatcctctgaagcataactgtttggaaaccacatcatcaaatctgtttgaactatcaaggtaaaagtaaacaggttttgagagagggatcaattggttattttatgtgcatggtctttagtgcatgagtttatttattctggctatctagaggccttttaaatttaattccaggttctcaactatgtcaagtgggaaagctgccagagaagttaatttcagggcagtaagctattgtcacaccttgctagaatattttatgggttttctctttgtttttgaatctctacaaactgcttaaacaatgccttccaggtctctgattctaaatgtgaagcacccaacacctaatttagttatattgttacaaggtatttataattttcagagtttcgctacagcataaccatgtgcctgctgatagatgttgcttatatggactatatagacttaaaaattccttaaattttcatctttaagttttgtaacaaatgggttagtactgcaaattatcacccttaatcacaatattagttctaaattctatattgggtatatacctaaaataagatgcctgtact

SEQ ID NO: 27741 - DNA, 562 bp, Homo sapiens
gcttagaacttttcctgtgtacttaaatgagaatttttgactggatgatccagactattatatcaccattttcttcttttttgatgaagatagaggcttagaaatacaaaagagaacaggaaatctccttaaaaaaaattacagcattgtcttgcatagactgtaaccactccctgaactaccaactcagtgagcgctatgaaaccatcttacaaggaaataccctattctctgcaacycagaaagcatcttgatcatcagttatcctctagctgagttccttatctgacccaagtcttctttctgcaaaccttttgttcaggcattttctttctactactacttactaaaattgagaaggtcaaagtgcaagtggtaattgctcttggcactttagaaaatggttttctttccatacctatgattttctttaaagccttcttctgctgagtctctatcagttgttctttgtactgtagatcaacacattcgggacccctctacctcctaagtccctttctggtattggggagtttaaaattcagtgaagtagcccaatgta

SEQ ID NO: 27742 - DNA, 746 bp, Homo sapiens
gttctttctcatttaattatattcgaagcagcttgttcaaggagcataacagacactctgttccgtgttaagtcaaggaatgccccatttgtgtattactcggtcgcactcagcatcgttcctaagataactaagtaaaaattataaaaaggtaaatgggtgtggaaaccaaattactccaacctgagtcagatctcctcaaaattttaattttgttaaatgcaatggaaataaacagaccgtgccggaagttgcaagtgagctcagttagtttagtgttttagaaacgaggtaaataattcctttgtatcactcggggagtgacatattaattaaagcagcaggtccatctacatgcagtaaaatggaaagctactgataatgtcctgcagaacaaatattctatgcaaaaatgtttagtataatgsgggacagagatgcactcacattaatttacagcacaaagcctgtatctcttaaaaaagaattatgatttatttttgaagcaatgaaaagattctatacaaaaataactggtgctacccaaaccttaccactacaggaatgaaacatgacgtgtctagaatgagaaaaagtaaggataatttatgtaaagttctaaagtcatgcttttgttaaaaaaaaaaattaagtcattgagacattcctaacagaaattgctttttaaaattacttacttgcaaatgatctcattcctattttagaagaaaggcgctgcagcttta

SEQ ID NO: 27743 - DNA, 750 bp, Homo sapiens
tagccccatggggagtgcttcatgctatcacaaaaggggttcacagcagccacagagagttctccatgcatggagatgtgccctgtctgtgttaactttgtcatcgatatgaaagagattacaatgtctgtggggaggctcataagggacagaggttcacattgcccatgggagcttacattatgtttgggggagatttttattgatcagggtagggttttgtgttccacagtccgtttgcatcaggagtgagggagaattagacttttagcagagaggtgtgtactctgcatgagggaattcacttggcctagggagcctgctgcagtgaaaggaggtctcgactgtcagtttaggatgttctctggctgtggtgaatttgtaatgtccatgtagggatcccccctgcttacaagagttataccatgttgggatgccaagaaggcagatcacttgaggtcaggagttcaagaccagcctggccaacatggtgaaacyccatctctactaaaaatacaaaaattcggctgggtgtgatggctcacgcctgtactcccagcactttgggaggctgaggtgggtggatcacctgagatcaggagtttgagaccagcctggccaatatggtaaaaccctgtctctactaaaaataccacaaaaattagcaaggcatggtgacgggtgcctgtaatcccaactactcgggaggcagaggcaagagaattgcttgagcccaggagacagaggtgg

SEQ ID NO: 27744 - DNA, 1107 bp, Homo sapiens
atccttatttgcaaagttgaaaaactgaaaagaatctgaataacatcaataaatgaataattaaataaatgttggtacttttttgctatgaaatagtatattgatacttgaaataatgttttagagttacagttactgacttggaaggatagccatggcgtagtactaagaaagaaaatcaagtttcaaagtagcctgtaagatatgatgctgttttgtggaaagaaacagccctcctgtgtctctatacacatacctatctttttatgataaggggaggaaatgaaaataggcaggggaagattatgcattttgtttacttatagctttatgctatatcagtacttgcagcaaatagaggtttgttgttaatgttgttgctattgtttcttttttaatgtggragagaaatgtaatataataaaaatatgatcaaaaaggaaaaaagaaaatagtctaaagaaaatcctctccccatttctaggattccaaaaagcccagacaccgttatgagaatcaaaggaatagatgattctgtgtccctttctccttataaaacatagctttatatgattaccagtttaatattaacttctccaaattattcagattgatgccataagcctgcagctacttcattcttttttagcaatctttctatgtggttgtattgattataaacactcctataaaggcacgcttctctcaataatcatttgatctttgtctatgaacacaaactctatgattataggtttccagtagacaatatattgatttgtctaaacagcacctgctttgatgcgaaatgcaagtttccatctggttggctttcatggaagcagcgatttttgtaaaatatgaccccaccatgtttgtcacagaggtaagcagaagacctcagttaagataatgaaacccttcttctagatatatagtatttgggccaaagagactataagaatagtccactttcagtgataaaaccataaaatatgaaatttgtgagttgtcaataactaggtttcctaccatgtggttaaagcacaactgcagggaaagtgaatgtagcaaacctcccaagaaaggtaaaaataaagagaaaga

SEQ ID NO: 27745 - DNA, 1107 bp, Homo sapiens
atccttatttgcaaagttgaaaaactgaaaagaatctgaataacatcaataaatgaataattaaataaatgttggtacttttttgctatgaaatagtatattgatacttgaaataatgttttagagttacagttactgacttggaaggatagccatggcgtagtactaagaaagaaaatcaagtttcaaagtagcctgtaagatatgatgctgttttgtggaaagaaacagccctcctgtgtctctatacacatacctatctttttatgataaggggaggaaatgaaaataggcaggggaagattatgcattttgtttacttatagctttatgctatatcagtacttgcagcaaatagaggtttgttgttaatgttgttgctattgtttcttttttaatgtggargagaaatgtaatataataaaaatatgatcaaaaaggaaaaaagaaaatagtctaaagaaaatcctctccccatttctaggattccaaaaagcccagacaccgttatgagaatcaaaggaatagatgattctgtgtccctttctccttataaaacatagctttatatgattaccagtttaatattaacttctccaaattattcagattgatgccataagcctgcagctacttcattcttttttagcaatctttctatgtggttgtattgattataaacactcctataaaggcacgcttctctcaataatcatttgatctttgtctatgaacacaaactctatgattataggtttccagtagacaatatattgatttgtctaaacagcacctgctttgatgcgaaatgcaagtttccatctggttggctttcatggaagcagcgatttttgtaaaatatgaccccaccatgtttgtcacagaggtaagcagaagacctcagttaagataatgaaacccttcttctagatatatagtatttgggccaaagagactataagaatagtccactttcagtgataaaaccataaaatatgaaatttgtgagttgtcaataactaggtttcctaccatgtggttaaagcacaactgcagggaaagtgaatgtagcaaacctcccaagaaaggtaaaaataaagagaaaga

SEQ ID NO: 27746 - DNA, 1107 bp, Homo sapiens
atccttatttgcaaagttgaaaaactgaaaagaatctgaataacatcaataaatgaataattaaataaatgttggtacttttttgctatgaaatagtatattgatacttgaaataatgttttagagttacagttactgacttggaaggatagccatggcgtagtactaagaaagaaaatcaagtttcaaagtagcctgtaagatatgatgctgttttgtggaaagaaacagccctcctgtgtctctatacacatacctatctttttatgataaggggaggaaatgaaaataggcaggggaagattatgcattttgtttacttatagctttatgctatatcagtacttgcagcaaatagaggtttgttgttaatgttgttgctattgtttcttttttaatgtggaagagaaatgtaatataataaaaatatgatcaaaaaggaaaaaagaaaatagtctaragaaaatcctctccccatttctaggattccaaaaagcccagacaccgttatgagaatcaaaggaatagatgattctgtgtccctttctccttataaaacatagctttatatgattaccagtttaatattaacttctccaaattattcagattgatgccataagcctgcagctacttcattcttttttagcaatctttctatgtggttgtattgattataaacactcctataaaggcacgcttctctcaataatcatttgatctttgtctatgaacacaaactctatgattataggtttccagtagacaatatattgatttgtctaaacagcacctgctttgatgcgaaatgcaagtttccatctggttggctttcatggaagcagcgatttttgtaaaatatgaccccaccatgtttgtcacagaggtaagcagaagacctcagttaagataatgaaacccttcttctagatatatagtatttgggccaaagagactataagaatagtccactttcagtgataaaaccataaaatatgaaatttgtgagttgtcaataactaggtttcctaccatgtggttaaagcacaactgcagggaaagtgaatgtagcaaacctcccaagaaaggtaaaaataaagagaaaga

SEQ ID NO: 27747 - DNA, 676 bp, Homo sapiens
tgtgtaccctgcctttgaagcacctcctcaggttagctactgttggatagagtaaaaggtcaccagtcactattgactgttccaggagaagaacctggagcttgactttctctttcatgctgtaacctatggtttgggcatgaaccctgggtacttttatgaacagcttaaaatccacaggattcaacattttccacttggaatcctgagtacctgggtcgcttgtctcatccagtttggctgttagatttactcattagaggtcctcattagtgtcatgtttgtaggggagatgacaggaaacagctgtgttaggcccatgtagcctggggcttctaaggatggggagttccattgactgaaacttgtgttgttttcagaaaacatccatatgatccaacgggggagctgacctgtctggggagatgaatacagtggtttcatgggtcttttggggaagcctacctttcacagccctctaattgctgctgtgctaccttcccaggttttcagcatataaaatatatgtggcccayctagggccaggctttcagacttggagtcacttcgattagaatgtcactcctccactgcataggtgtgcctgttaccctcgaagacatgatataagttcatgatcttctgactacaaactgattctgatgaaagtcaggat

SEQ ID NO: 27748 - DNA, 805 bp, Homo sapiens
cttgagcccaggagtttcagacaagcgtgggcaacgtagtgagaccatctctacaaacaatttacaagttagccaggtgcagttgcatgcacctgtagtcccagctactcagggggctgaggggggaagatcgctgcccaggaggtcaaggctgtaatgagccatgatcgtgccactgcactccagcctgggtgacagagcaagaccctatctcaaaagaaaagaataagcattaaaatacatacatatatatataaaataaaatccttaaagcctggcacaagatgacttctcaacaaatgtgggggcgagacgcggtggctcacacctgtaatccyggcactttgggagaccgaggtgggcgggtcatctgaggtcaggagttagagaccagcctggacaacatggtgaaaccctgtctctactaaaaatacaaaaacttagccaggcgtggtggcgggcgcctgtaatcccagctactcgggaggctgaggcaggagagttgcttaaacctgggaagtggaggttgcagtgagcggagattgtgctactgcactccagcctgggcgacagagcaaggctgtctcaaaaaaaaaaaaaaaaaaatcaaccaaacaaaaatgtggggttttagtatccaccagcctagtactctcagccctggttgcaaatccacctgggagattgattgtaattaaccaattagagcaggactgcctctaattggtctcaggtggagcccaaacacgggcgtttgtggaatctccccaggtggttctcatgttcaagcaaaggtgtaaagtgc

SEQ ID NO: 27749 - DNA, 597 bp, Homo sapiens
tattctctgttagattgtatgtttaccataacaggtaatatgtcagttattacatttttgaaccttttaaattgctttatagcagtgtagggctgctgactttccatttaagtgayagatggaaagccacatgccatggataacatgttgttgtttgctcatatgtttaaataccagttcctagttttattatttctgaatatgatccatggcttaggttattagtggacttttggctccctgttaatttttatcatggttttctgatttgacctaccttgatattagcagataggaaaggcacaggtctttaacactgtaggccatatttaggggaccatttgttgcaatagattccagtaaattttatctattggtagttgatgacttttgctttttgtgatgcttagagaaggcagaaaattaacgttgagaacaaattttagtatagttgagtttggtattttaatttttttagatatttagctatgttgtttccttgaggtatgtaatttcctttagaagcctttgatacctaaagcagtgctgtgtatgtaagatatattaaaggttttaaaattttactaaagaaacatg

SEQ ID NO: 27750 - DNA, 1181 bp, Homo sapiens
  misc_feature (1)...(1181): n = A,T,C or G
tgtacccagttatatattgtccttttaatttaaacatctagtaaaaaataataatttcaatgagaccagaaattactaagcaaaggaaatggcaaggtagttctacatttttggaaaaaaaaaaaaaagaaaagatggtcattgtatttgaaacttaagacaagataataacacgtattatctggttaatgaatgcctgtcctgtcttcacaaggatttttcctgacataaaattctaaatatctgtcaaaaatatatatatatatatacntgagatggagtctcgctctgtcgcccaggctggagtgcagtggcgcsgtctcggctcactgcaacctctgcctcccaggttcacgccattctcctgcctcagcctcccaaatagctgggactacaggcacccaccgccacgcccagctaattttttgtatttttagtagagacagggtttcactgtgttagccagaatggtctcgacctcctgacttcatgatccgcccaccttggcctcccaaagtgctgggattacaggtgtgagtcaccgcacctggccaaaaatattttttaattatatacactaaataacaacataatgaataatgtcttcaatatcagttcctcacacaattatttcttgcgttgaacttcaataaaattcagaatataacactaatggtataacttgataaggtattttataggaagcattatagctcacatttaccaaggcttaatgttttacaggcactcttgtaggcatattgcttgcatgatgttattaaatcttcccgacatctctatatgatctctattttacaggtaaggaacctgagggagagagaggctaagtcagttactttcccattacgctgctagtaagtgcaaagccaggatctgaagttagactaagggcccatgttctcaatgatgagacatgccttaggtatactgactgcagatgacctaacttgatatgcctgtaactcttagacaacttaagaaagatcacatttttcttactgatgattgagaaatgcagtctatctcaaatgcctttcataggagctgaatgacagtcagattggcagtggacagtctagcaagctcctacaagatagaatgggcttatgggaaacaggtcctttttaacttaaaaaatcattttcgaataggtgatacat

SEQ ID NO: 27751 - DNA, 1181 bp, Homo sapiens
  misc_feature (1)...(1181): n = A,T,C or G
tgtacccagttatatattgtccttttaatttaaacatctagtaaaaaataataatttcaatgagaccagaaattactaagcaaaggaaatggcaaggtagttctacatttttggaaaaaaaaaaaaaagaaaagatggtcattgtatttgaaacttaagacaagataataacacgtattatctggttaatgaatgcctgtcctgtcttcacaaggatttttcctgacataaaattctaaatatctgtcaaaaatatatatatatatatacntgagatggagtctcgctctgtcgcccaggctggagtgcagtggcgcggtctcggctcactgcaacctctgcctcccaggttcacgccattctcctgcctcagcctcccraatagctgggactacaggcacccaccgccacgcccagctaattttttgtatttttagtagagacagggtttcactgtgttagccagaatggtctcgacctcctgacttcatgatccgcccaccttggcctcccaaagtgctgggattacaggtgtgagtcaccgcacctggccaaaaatattttttaattatatacactaaataacaacataatgaataatgtcttcaatatcagttcctcacacaattatttcttgcgttgaacttcaataaaattcagaatataacactaatggtataacttgataaggtattttataggaagcattatagctcacatttaccaaggcttaatgttttacaggcactcttgtaggcatattgcttgcatgatgttattaaatcttcccgacatctctatatgatctctattttacaggtaaggaacctgagggagagagaggctaagtcagttactttcccattacgctgctagtaagtgcaaagccaggatctgaagttagactaagggcccatgttctcaatgatgagacatgccttaggtatactgactgcagatgacctaacttgatatgcctgtaactcttagacaacttaagaaagatcacatttttcttactgatgattgagaaatgcagtctatctcaaatgcctttcataggagctgaatgacagtcagattggcagtggacagtctagcaagctcctacaagatagaatgggcttatgggaaacaggtcctttttaacttaaaaaatcattttcgaataggtgatacat

SEQ ID NO: 27752 - DNA, 1181 bp, Homo sapiens
  misc_feature (1)...(1181): n = A,T,C or G
tgtacccagttatatattgtccttttaatttaaacatctagtaaaaaataataatttcaatgagaccagaaattactaagcaaaggaaatggcaaggtagttctacatttttggaaaaaaaaaaaaaagaaaagatggtcattgtatttgaaacttaagacaagataataacacgtattatctggttaatgaatgcctgtcctgtcttcacaaggatttttcctgacataaaattctaaatatctgtcaaaaatatatatatatatatacntgagatggagtctcgctctgtcgcccaggctggagtgcagtggcgcggtctcggctcactgcaacctctgcctcccaggttcacgccattctcctgcctcagcctcccaaatagctgggactacaggcacccaccgccaygcccagctaattttttgtatttttagtagagacagggtttcactgtgttagccagaatggtctcgacctcctgacttcatgatccgcccaccttggcctcccaaagtgctgggattacaggtgtgagtcaccgcacctggccaaaaatattttttaattatatacactaaataacaacataatgaataatgtcttcaatatcagttcctcacacaattatttcttgcgttgaacttcaataaaattcagaatataacactaatggtataacttgataaggtattttataggaagcattatagctcacatttaccaaggcttaatgttttacaggcactcttgtaggcatattgcttgcatgatgttattaaatcttcccgacatctctatatgatctctattttacaggtaaggaacctgagggagagagaggctaagtcagttactttcccattacgctgctagtaagtgcaaagccaggatctgaagttagactaagggcccatgttctcaatgatgagacatgccttaggtatactgactgcagatgacctaacttgatatgcctgtaactcttagacaacttaagaaagatcacatttttcttactgatgattgagaaatgcagtctatctcaaatgcctttcataggagctgaatgacagtcagattggcagtggacagtctagcaagctcctacaagatagaatgggcttatgggaaacaggtcctttttaacttaaaaaatcattttcgaataggtgatacat

SEQ ID NO: 27753 - DNA, 1181 bp, Homo sapiens
  misc_feature (1)...(1181): n = A,T,C or G
tgtacccagttatatattgtccttttaatttaaacatctagtaaaaaataataatttcaatgagaccagaaattactaagcaaaggaaatggcaaggtagttctacatttttggaaaaaaaaaaaaaagaaaagatggtcattgtatttgaaacttaagacaagataataacacgtattatctggttaatgaatgcctgtcctgtcttcacaaggatttttcctgacataaaattctaaatatctgtcaaaaatatatatatatatatacntgagatggagtctcgctctgtcgcccaggctggagtgcagtggcgcggtctcggctcactgcaacctctgcctcccaggttcacgccattctcctgcctcagcctcccaaatagctgggactacaggcacccaccgccacgcccagctaattttttgtatttttagtagagacagggtttcactgtgttagccagaatggtctcgacctcctgacttcatgatccrcccaccttggcctcccaaagtgctgggattacaggtgtgagtcaccgcacctggccaaaaatattttttaattatatacactaaataacaacataatgaataatgtcttcaatatcagttcctcacacaattatttcttgcgttgaacttcaataaaattcagaatataacactaatggtataacttgataaggtattttataggaagcattatagctcacatttaccaaggcttaatgttttacaggcactcttgtaggcatattgcttgcatgatgttattaaatcttcccgacatctctatatgatctctattttacaggtaaggaacctgagggagagagaggctaagtcagttactttcccattacgctgctagtaagtgcaaagccaggatctgaagttagactaagggcccatgttctcaatgatgagacatgccttaggtatactgactgcagatgacctaacttgatatgcctgtaactcttagacaacttaagaaagatcacatttttcttactgatgattgagaaatgcagtctatctcaaatgcctttcataggagctgaatgacagtcagattggcagtggacagtctagcaagctcctacaagatagaatgggcttatgggaaacaggtcctttttaacttaaaaaatcattttcgaataggtgatacat

SEQ ID NO: 27754 - DNA, 592 bp, Homo sapiens
ctgatctatatctctgtcattaaacaaaattaaaaataattagacttttaaaattgtggtattttacttttcacacactgaacacagaattagtatcactaaaaagactttttaacaaaaggatgtagcacgtatctccaaagaatataaaaaatctgatttattcaatatgaccaaataattaaccttatagaccaagtaattctataaatcaagtaattaagtcaaacttttatatcaattgcttaatatttaggaaatatcaaagtaagatttccttgcaagtaatccacttgaagggaacttgatgacataaaccctgggtaaagctgtaattctaaactaaaatttactcactgatggaatatggaaaataaacacagagaaatgtttaattaaaattttaaatctcccaataaagtaaaaataaactgatttccatagatatacacacacacacagtgcttatttacattcaaatagagcttaaattaaaatatatggctcaaatgtaaggcttaaaaccaatctgaataaaactcaagcaaargtatatagagaaaatcttcaggctaacaactatactctttaa

SEQ ID NO: 27755 - DNA, 1169 bp, Homo sapiens
tttgagctcaggagctagagaccagctggggaaacattgtctctacaaaaaataaaaaatttgacatgcctctagtcctagctgttcaggaggctgaggtgggaggattgcttgaggccaggaaatcgaagctgcagtgaaccttgtttgagccactgcactccagcctgggtgacagagaaagaccttatttaaaaaataaataaataaataaataaataaataaaagaaaaataaaagagtttctgttgttattacttttatagttaccagtataagtttaaattttataattctatttactattttataacatcctataacatctgttggctgccaactatgaaaggtgaacaattgatacacttacactagaacaattgaagcacttacactatctcttactgcccttttccaccacagcttcaggttgtggttattaaatttcattttctgtggcagtgtttaagattttaaatttagtacttatatccatattctatgattaattaatgttaatgattatgtgttaactccctactataaaatgtgatactattataatttctgtattttctaataactctccttttaatatttcacttttagttacttttaaattttaaaggttattttaagggatattttccaacaccaacaactaatactctgattcaccaactagatgttcaacaattcagttcaattctaacacyaactactcaaaattagtgcagattctgttatttaagggctgagttccaaaatactgcccccaactttagatgctggtctcaagtcccagaggtccatacttctgatgaacctcctcctaatgtttgataatttgtgagggtggtctcaaaattcaagaagattacaaatcaatagccaaatcaggaggtacatagaacaaggacagaagggtcttgggctgaaagcttctgttgctgtggagctggcctgccactcagcatgcgtatgggtttgtcaagtctaaggctcatcacattttaagagtctatagagcttaatctccagcccccttccacaaggtcagaaggtgagattaaattttccaattattctgattattttgaagtgatctagggatgtcaccctaagtcaccttattcacatctccaaatcatgtgaggagctcagtgcca

SEQ ID NO: 27756 - DNA, 1169 bp, Homo sapiens
tttgagctcaggagctagagaccagctggggaaacattgtctctacaaaaaataaaaaatttgacatgcctctagtcctagctgttcaggaggctgaggtgggaggattgcttgaggccaggaaatcgaagctgcagtgaaccttgtttgagccactgcactccagcctgggtgacagagaaagaccttatttaaaaaataaataaataaataaataaataaataaaagaaaaataaaagagtttctgttgttattacttttatagttaccagtataagtttaaattttataattctatttactattttataacatcctataacatctgttggctgccaactatgaaaggtgaacaattgatacacttacactagaacaattgaagcacttacactatctcttactgcccttttccaccacagcttcaggttgtggttattaaatttcattttctgtggcagtgtttaagattttaaatttagtacttatatccatattctatgattaattaatgttaatgattatgtgttaactccctactataaaatgtgatactattataatttctgtattttctaataactctccttttaatatttcacttttagttacttttaaattttaaaggttattttaagggatattttccaacaccaacaactaatactctgattcaccaactagatgttcaacaattcagttcaattctaacaccaactactcaaaattagtgcagattctgttatttaagggctgagttccaaaatactgcccccaamtttagatgctggtctcaagtcccagaggtccatacttctgatgaacctcctcctaatgtttgataatttgtgagggtggtctcaaaattcaagaagattacaaatcaatagccaaatcaggaggtacatagaacaaggacagaagggtcttgggctgaaagcttctgttgctgtggagctggcctgccactcagcatgcgtatgggtttgtcaagtctaaggctcatcacattttaagagtctatagagcttaatctccagcccccttccacaaggtcagaaggtgagattaaattttccaattattctgattattttgaagtgatctagggatgtcaccctaagtcaccttattcacatctccaaatcatgtgaggagctcagtgcca

SEQ ID NO: 27757 - DNA, 1169 bp, Homo sapiens
tttgagctcaggagctagagaccagctggggaaacattgtctctacaaaaaataaaaaatttgacatgcctctagtcctagctgttcaggaggctgaggtgggaggattgcttgaggccaggaaatcgaagctgcagtgaaccttgtttgagccactgcactccagcctgggtgacagagaaagaccttatttaaaaaataaataaataaataaataaataaataaaagaaaaataaaagagtttctgttgttattacttttatagttaccagtataagtttaaattttataattctatttactattttataacatcctataacatctgttggctgccaactatgaaaggtgaacaattgatacacttacactagaacaattgaagcacttacactatctcttactgcccttttccaccacagcttcaggttgtggttattaaatttcattttctgtggcagtgtttaagattttaaatttagtacttatatccatattctatgattaattaatgttaatgattatgtgttaactccctactataaaatgtgatactattataatttctgtattttctaataactctccttttaatatttcacttttagttacttttaaattttaaaggttattttaagggatattttccaacaccaacaactaatactctgattcaccaactagatgttcaacaattcagttcaattctaacaccaactactcaaaattagtgcagattctgttatttaagggctgagttccaaaatactgcccccaactttagatgctggtctcaagtcccagaggtccatacttctgatgaacctcctyctaatgtttgataatttgtgagggtggtctcaaaattcaagaagattacaaatcaatagccaaatcaggaggtacatagaacaaggacagaagggtcttgggctgaaagcttctgttgctgtggagctggcctgccactcagcatgcgtatgggtttgtcaagtctaaggctcatcacattttaagagtctatagagcttaatctccagcccccttccacaaggtcagaaggtgagattaaattttccaattattctgattattttgaagtgatctagggatgtcaccctaagtcaccttattcacatctccaaatcatgtgaggagctcagtgcca

SEQ ID NO: 27758 - DNA, 1169 bp, Homo sapiens
tttgagctcaggagctagagaccagctggggaaacattgtctctacaaaaaataaaaaatttgacatgcctctagtcctagctgttcaggaggctgaggtgggaggattgcttgaggccaggaaatcgaagctgcagtgaaccttgtttgagccactgcactccagcctgggtgacagagaaagaccttatttaaaaaataaataaataaataaataaataaataaaagaaaaataaaagagtttctgttgttattacttttatagttaccagtataagtttaaattttataattctatttactattttataacatcctataacatctgttggctgccaactatgaaaggtgaacaattgatacacttacactagaacaattgaagcacttacactatctcttactgcccttttccaccacagcttcaggttgtggttattaaatttcattttctgtggcagtgtttaagattttaaatttagtacttatatccatattctatgattaattaatgttaatgattatgtgttaactccctactataaaatgtgatactattataatttctgtattttctaataactctccttttaatatttcacttttagttacttttaaattttaaaggttattttaagggatattttccaacaccaacaactaatactctgattcaccaactagatgttcaacaattcagttcaattctaacaccaactactcaaaattagtgcagattctgttatttaagggctgagttccaaaatactgcccccaactttagatgctggtctcaagtcccagaggtccatacttctgatgaacctcctcctaatgtttgataatttgtgagggtggtctcaaaattcaakaagattacaaatcaatagccaaatcaggaggtacatagaacaaggacagaagggtcttgggctgaaagcttctgttgctgtggagctggcctgccactcagcatgcgtatgggtttgtcaagtctaaggctcatcacattttaagagtctatagagcttaatctccagcccccttccacaaggtcagaaggtgagattaaattttccaattattctgattattttgaagtgatctagggatgtcaccctaagtcaccttattcacatctccaaatcatgtgaggagctcagtgcca

SEQ ID NO: 27759 - DNA, 595 bp, Homo sapiens
atttatacttttgatgtattaaaaatacatctatttcccaaatgcctctaggcttattttaagaaaacacgtacatgtcactattaaatttgagacacgctgaaggtaagaacatgagttatcattagagaactatttttccaatatgtatayataccatgtgtatatttttaaagtttatcaaacattttattttgaatgttgagttctagctacccattcatatgagtgatatgaattaattagaaattctctaatatttataaaattaaaaaaatcataattgtggattatttattaacaaaataatatttctatgtttcatccagtttcatggatagagaaattagcaaagttatatgatttacctaagaatttaatttccatgaaaaaaagttatagttaaggaaagccaaaaaaaaaattgtggaaagggaaagctactaatgaagacacatggactgaaacatcacatctgtcactagccagctggagagttcttttaagtcatttcccctttctgggacaattttcttatctgcaaaataagtgatgtggattctggggcttctgagaataagataattataatggc

SEQ ID NO: 27760 - DNA, 595 bp, Homo sapiens
atttatacttttgatgtattaaaaatacatctatttcccaaatgcctctaggcttattttaagaaaacacgtacatgtcactattaaatttgagacacgctgaaggtaagaacatgagttatcattagagaactatttttccaatatgtatatataccatgtgtatatttttaaagtttatcaaacattttattttgaatgttgagttctagctacccattcatatgagtgatatgaattaattagaaattctctaatatttataaaattaaaaaaatcataattgtggattatttattaacaaaataatatttctatgtttcatccagtttcatggatagagaaattagcaaagttatatgatttacctaagaatttaatttccatgaaaaaaagttatagttaaggaaagccaaaaaraaaattgtggaaagggaaagctactaatgaagacacatggactgaaacatcacatctgtcactagccagctggagagttcttttaagtcatttcccctttctgggacaattttcttatctgcaaaataagtgatgtggattctggggcttctgagaataagataattataatggc

SEQ ID NO: 27761 - DNA, 643 bp, Homo sapiens
tttttgagacrgagtctccctctgttgctcaggctggagtgcagtggcacgatctcggctcactgcaagctccgcctcccgggttcacgccattctcctgcctcagcctcccgagtagctgggactacaggcacccgccaccatgcctggctaattttttgtatttttagtagagacgaggtttcaccatgttagccaggatggtctcgatctcctgacctcgtgatcctcccgcctcagcctcccaaagtgctgggattacaggtgtgagccacccggccattgcagtcactttctagagagctaaactttggtgaaagtctggatttaggaagacttttaaggcttaaggagagtctctggggtctgaggagaaggtcaaggtcccttcttccacactgtcaagaatagagacttccttttttgactgtaacctcctcttctcattccatctaatcttttcctaccccttgcatactttctaagccctaggtcacatctctccctatgttagctgttaggaaagcttggaaatgagggagaacaaatggaaaagagtctgggctggtctaggtgggcagacctcagtagataacctcttaattataagaaaccctccattaatccagtgcctctgggatcc

SEQ ID NO: 27762 - DNA, 643 bp, Homo sapiens
tttttgagacggagtctcsctctgttgctcaggctggagtgcagtggcacgatctcggctcactgcaagctccgcctcccgggttcacgccattctcctgcctcagcctcccgagtagctgggactacaggcacccgccaccatgcctggctaattttttgtatttttagtagagacgaggtttcaccatgttagccaggatggtctcgatctcctgacctcgtgatcctcccgcctcagcctcccaaagtgctgggattacaggtgtgagccacccggccattgcagtcactttctagagagctaaactttggtgaaagtctggatttaggaagacttttaaggcttaaggagagtctctggggtctgaggagaaggtcaaggtcccttcttccacactgtcaagaatagagacttccttttttgactgtaacctcctcttctcattccatctaatcttttcctaccccttgcatactttctaagccctaggtcacatctctccctatgttagctgttaggaaagcttggaaatgagggagaacaaatggaaaagagtctgggctggtctaggtgggcagacctcagtagataacctcttaattataagaaaccctccattaatccagtgcctctgggatcc

SEQ ID NO: 27763 - DNA, 1036 bp, Homo sapiens
ctcccacgttcacccttggcttccatccctcccatccctcctcccggctgctgaattatgggggatggacggaggaaatccgggcctgggtctgagagtcgctggggcctgcgccgtttctgtggcaaccaaagcgtacgttcccttcttccctccgcccctctccctcgcctccttttctttggaggcaggccgggcttccctgcgcctttgctaccctctggtggccaacaggagaaggacagaccaagaaggagggcacggaaggagacttaggggagcggcggcactagggccccgggggcagagacagggctgagccgcgaggaagctcggaggaaaagtcggaaggctacgcggaccctggggaggggctgcggagcggtcagatggaaagcggctttgctctggggtttcttctctctgagccgcttcctcttccccacagcctgcggcgagagggctacaccgtgcaggtgaacgtgaacgactatctggatatttactgcccgcactacaacagctcgggggtgggccccggggcgggaccggggcccggagrcggggcagagcagtacgtgctgtacatggtgagccgcaacggctaccgcacctgcaacgccagccagggcttcaagcgctgggagtgcaaccggccgcacgccccgcacagccccatcaagttctcggagaagttccagcgctacagcgccttctctctgggctacgagttccacgccggccacgagtactactacatctgtgagtgacggcggccgggcgggcgggtctgaacgcgagagtctgagtgacagccggggggtggagcccctaggctccggggcggggccggcgcggcgggcgccaggtctcgcggctgagaccagggaggaggcgtgggcacgggacgcctgaggggttcagctcagacgaggtcgtggggccaagagaggagtttggtgacagtcccaagtttgggctgcggagaatcgctgtttctgtgagggacattccggggttggaacatcagggatcc

SEQ ID NO: 27764 - DNA, 673 bp, Homo sapiens
ttttaaccacctcacattttctgcctggaaaaagatagctcttttgttcattaactcttttaggtacccccaaaatatatatctaattatcaagtttttaaatgcccccaaaatcagatgcccccccaagaaattctattttatttatccatcaaagactatcattttatttcatccaaattaacaaccatatcacataaagcaggtgaaacagtaatactcttatagaaaaagttttggtaggaagattgctttatcattaatcaaaaaataaagctataaatttaaaatatatataactttatgaagttagtaaccccaaaatatgtaaaatttcctttaggtattaaaatttaatgtactgtatttgaagttaattcctttagttacctaaaataggaaaaggacaattgtaatttaaaaaaaaaacaaaaaacaacagttytgaatctgagcctacttggtaataataaatatcacattatagagataaatgaaaggaagttgttgaggaagatccaggccaaaaaaaaaaaaaaaaatccctgaagtcaaattatatgtaaatatagccaagtggatttacagcaactgtatccaagaagaaacaattaaagatcttagcttagaagaggtctctagggcagtcaacaacagtgattgctgaatttca

SEQ ID NO: 27765 - DNA, 994 bp, Homo sapiens
atgtgtttaaaatagaagttctttcatcactaagagctctggaaaacttctagataatgagatactagatagtagagttccaggtcagtttcctggatagctgtgttttgtataggtgcagtttctgaagctaagttagggtgtataagaaatattccagactgactgattaaaccagtgtttctaaaccaagtgtatactttagaaacgtctgtgaatctttgaagatgacaactaacaactacaacagattctgagctctacctcagatttcktgaatctttgggagtaggctcaggacatgtgtatttttaaaattttccaaaaagtaatcatgatagatgccttgggttaagatttattggaaccaatagggaataggtattaaagctttaattttacaaagataccaaaagtattttttttccctcattatgctgaaattaggccatgattggcctcatattgtcctgttcatgtttagagacagttgattttctttttgaggttttatctgttgtttcttccttttgtcttatcctaactttgattcttactcactatctttcatttttttagtagttgtttctattagtctcccatttggtcccctggtcttaggagccttacatgttcttgggatgtttcttcttggttcctggttcttggaggaacagatctcttctaatttcaggatgcccgtgttaaacatgtagatgctttcctttccactgtggtcctttcaagcttgattctttggcttgactttgtaacgtatatagcctgccttgtgtgccttgaagtgactaattttggctaaccagcctgtgttaattccgtattgctgtcataacagattatcaaacctaatgcttaaaacagatttattgtcttacagttttgtaggtcatatgtatgacctggatctcgccaggctaaaatcaaaattttggggggtggggtctgtgttcctttcaggaggccgtaggacagg

SEQ ID NO: 27766 - DNA, 994 bp, Homo sapiens
atgtgtttaaaatagaagttctttcatcactaagagctctggaaaacttctagataatgagatactagatagtagagttccaggtcagtttcctggatagctgtgttttgtataggtgcagtttctgaagctaagttagggtgtataagaaatattccagactgactgattaaaccagtgtttctaaaccaagtgtatactttagaaacgtctgtgaatctttgaagatgacaactaacaactacaacagattctgagctctacctcagatttcgtgaatctttgggagtaggctcaggacatgtgtatttttaaaattttccaaaaagtaatcatgatagatgccttgggttaagatttattggaaccaatagggaataggtattaaagctttaattttacaaagataccaaaagtattttttttccctcattatgctgaaattaggccatgattggcctcatattgtcctgttcatgtttagagacagttgattttctttttgaggttttatctgttgtttcttccttttgtcttatcctaactttgattcttactcactatctttcatttttttagtagttgtttctattagtctcccatttggtcccctggtcttaggagccttacatgttcttgggatgtttcttcttggttcctggttcttggaggaacagatctcttctaatttcaggatgcccgtgttaaacatgtagatgctttcctytccactgtggtcctttcaagcttgattctttggcttgactttgtaacgtatatagcctgccttgtgtgccttgaagtgactaattttggctaaccagcctgtgttaattccgtattgctgtcataacagattatcaaacctaatgcttaaaacagatttattgtcttacagttttgtaggtcatatgtatgacctggatctcgccaggctaaaatcaaaattttggggggtggggtctgtgttcctttcaggaggccgtaggacagg

SEQ ID NO: 27767 - DNA, 994 bp, Homo sapiens
atgtgtttaaaatagaagttctttcatcactaagagctctggaaaacttctagataatgagatactagatagtagagttccaggtcagtttcctggatagctgtgttttgtataggtgcagtttctgaagctaagttagggtgtataagaaatattccagactgactgattaaaccagtgtttctaaaccaagtgtatactttagaaacgtctgtgaatctttgaagatgacaactaacaactacaacagattctgagctctacctcagatttcgtgaatctttgggagtaggctcaggacatgtgtatttttaaaattttccaaaaagtaatcatgatagatgccttgggttaagatttattggaaccaatagggaataggtattaaagctttaattttacaaagataccaaaagtattttttttccctcattatgctgaaattaggccatgattggcctcatattgtcctgttcatgtttagagacagttgattttctttttgaggttttatctgttgtttcttccttttgtcttatcctaactttgattcttactcactatctttcatttttttagtagttgtttctattagtctcccatttggtcccctggtcttaggagccttacatgttcttgggatgtttcttcttggttcctggttcttggaggaacagatctcttctaatttcaggatgcccgtgttaaacatgtagatgctttcctttccactgtggtcctttcaagcttgattctttggcttgactttgtaacgtatatagcctgycttgtgtgccttgaagtgactaattttggctaaccagcctgtgttaattccgtattgctgtcataacagattatcaaacctaatgcttaaaacagatttattgtcttacagttttgtaggtcatatgtatgacctggatctcgccaggctaaaatcaaaattttggggggtggggtctgtgttcctttcaggaggccgtaggacagg

SEQ ID NO: 27768 - DNA, 572 bp, Homo sapiens
aaacttggtttcttgtgctatttatttttataaaagaatattttttccaaacactgacaaagtatctgctagttataaagaacgtagttatgaatttttaaaactaattcatgaatctctctcccttttttccctccttcatgagtatttagcctaaaagatattaggttgagtatatgctagatagaaacacgtgctggaagggagataggtacagtggccttgtgcaatgagacacaggagatatttatatgtgggtggtgggtaaaggaagagaatggactggtggtacagccactataatgggatgctagattgagggtggggtgaggaagtgaggggtaaaaggtgtaagaaacctgagaggaggaggagcacattcttttggcaaagctctgagtagtcatactcaagartgtgagagggacagctatgtaaggggtatataacagtgtaagcagcttggtgagatatcagaaacccaagtaggtaaagaggctgtctgcatgtgggatggttgtggtcccaccgtaatttgttacagcccaagcatagcacagatggcttccaca

SEQ ID NO: 27769 - DNA, 622 bp, Homo sapiens
ccaggagctatttctcagatctgggcctcacctgggtatgggaagccaggcaggctgtctgcctgaacttgctacccagcccttccctcttacaatcttgctgcctcctggaactctccagggaagcccctcttcaatgttcactgcctgctgccattccagaccttgctcccacatttccaataagcccttacaacctctcatgtctgctaaggtctggggttagcagggtacaaagccaggaagactccattgtttccacccaccatctgtcctgcccctcttcctaatccaggctcagtggctggaatggggagtgcagagcaaacccccaggagaaaaatacctgttaacatctcaatcaagtgtatcccaccttgtycactgtgactattaggatcagagtgatagcagaggaatgcaatgtctcaagaaaacgatgtgaagggcagagaaccaaagtctttcagcagagtttgagcagagctggaagaacagggatgtccctggaaagacatcttgggggagaaaccaatgatcagagcccagatatgagagggtggaaggagaattcagagttgcccactgacctggaacatctggatatggactgttgaaaggg

SEQ ID NO: 27770 - DNA, 498 bp, Homo sapiens
tgtttaggagagacggggtttcaccatcttggccagactggtctcaaactcctgacttcgttatccacctgcctcagcctcccaaagtgctrggattacaggtgtgagccactgcacctggccatcgctggatattttcaaacccacgaggggtatcagagccatggggctagttcagttctttgggacttttgtcaatctgctcacatctagtctgactttgccacatgaacctcttgggtttttttactggcaacttaatgggaaccagatttgcaaagcattcatcagtccatggcactggtatttgccaggctgtaggctgtaagctaaggacaatgacagcagagaaaccaggtcctattcctggtttctttgagcaactcctttgagcaaccttgagcaactcctgtggcagcactggtcttgcttgtcttccccagggagggagaaaaggcaggcatttgggaggatgtttgaggtaagagcaatagctgt

SEQ ID NO: 27771 - DNA, 849 bp, Homo sapiens
caggccctggactccgggggaacaatgtaagggacaccaaaaagctcagccatggagatgaatagtattttaacatgaaatttgtgaaaatcaaaattaccgctgttcctgatcttatctttctgtaacatgttcatagtttgttcatcacgggtgtcttgccattaattctgacttttaaaaatgttgtgttaacataccgtttatctccatgactgagttttttggcatcccttacatttcgtgcccaaggtgagagtctcactggctgcaccctcatcccaggcccgactggactccagttccacagcatcctttccatgagacctggaaccagatgcagctccctcttcacccagcttcatgttcctagttgtaaaatggagacgatggtaacagcgaaaacaagaaccacagctaagagttactaagtgcacaggtatttacgggcagtagagtcctctcagccctttgatctcagtactgttattaggttcactttacagatgaggaaactgaggcccagagggctgagggaacctgctccagggcacccagccagcccagggtggagctggggctggcatctggcggtrtggctgcagcgcacccgcattctaatcgcaatgactcttccaggcaggaaactggttcagagggagatgtaaacagcaggggtcctgaagccaggatttgaatcagcagctgcctcatagggtggtcttgagcgttaaataagattcacaaaaggcactccacaagtcctttttcttgtcctcccacttctttaggcaatgcctgaggtgaaggctcagattccactcggctatggggcattcttgccctgac

SEQ ID NO: 27772 - DNA, 849 bp, Homo sapiens
caggccctggactccgggggaacaatgtaagggacaccaaaaagctcagccatggagatgaatagtattttaacatgaaatttgtgaaaatcaaaattaccgctgttcctgatcttatctttctgtaacatgttcatagtttgttcatcacgggtgtcttgccattaattctgacttttaaaaatgttgtgttaacataccgtttatctccatgactgagttttttggcatcccttacatttcgtgcccaaggtgagagtctcactggctgcaccctcatcccaggcccgactggactccagttccacagcatcctttccatgagacctggaaccagatgcagctccctcttcacccagcttcatgttcctagttgtaaaatggagacgatggtaacagcgaaaacaagaaccacagctaagagttactaagtgcacaggtatttacgggcagtagagtcctctcagccctttgatctcagtactgttattaggttcactttacagatgaggaaactgaggcccagagggctgagggaacctgctccagggcacccagccagcccagggtggagctggggctggcatctggcggtgtggctgcagcgcacccgcattctaatcgcaatsactcttccaggcaggaaactggttcagagggagatgtaaacagcaggggtcctgaagccaggatttgaatcagcagctgcctcatagggtggtcttgagcgttaaataagattcacaaaaggcactccacaagtcctttttcttgtcctcccacttctttaggcaatgcctgaggtgaaggctcagattccactcggctatggggcattcttgccctgac

SEQ ID NO: 27773 - DNA, 361 bp, Homo sapiens
gtaatactaataatttttataatttgagaagscttcgcttcaaaacgaaaagccctaataatcgaacaaccctccaccaacctggagtggctatatggatgccttccaccctatcatacgttcgaagaacccatatacataaaacctagacgaaaaaggaaggaatgaaacctcctaaagctggtttcaagccaaccccacagcctctatgactttttcaaaaagatattagaaaaaccatttcataactttgtcaaagttaagttacaggttaaaccccgtatatcttaatggcacatgcagcacaagtaggtctacaagacgctacttctcctatcatagaagaactaatcatctttca

SEQ ID NO: 27774 - DNA, 1557 bp, Homo sapiens
taggatgaggctgcactgctcatgacagatttaaatgtcagcgcctccagttggaattgaaagtgagattttgctctctccatttgaatttggaaaaccctccattacacattactaaccagaatcagttgagactgggagttggtatactgaaagtggttcctttcaggcttataatgcattgatcctaaataatttttggagagatgtgtaggctgccagtgtacaaatgatgcagtgcaagtgatattattttagtttgataatcaacgtgtcatagcttctctccccgcttggtacgttgcattgtaaatccgatactcacaggcaaagtccctgtgatccactatactgccttgagttgcggcaacgttattatgaaaaatacattcatttgtctatatggaagggatttaaaggttgctgcattcattttttaccgcagtctaagtacttaatcttatggacattgctcaacaagaaaatgatctcttcctctctacccccattagcaacattctttcagtctcaagaaatataaatattggggcatattaatgaaaatgacatctactgctgatatattaaaactcaaatgtgtgattaagtattctgttaattaactctttttgtcagaataattgtaaatgcgttctcatacttcagagcaatttgaactgccaggagaaggttagtagactgccctgagatagttggaaatcagacatcattagtttaattaaattccattaacataacaaaaacagtttcttcgattttttttttaaaggatcctaatagagagaccgtcatagttacagcagcagccaggagatactaaagttgctgttttttaacccacaacttctatcgcttcttcagagtatttgccggctctatcatcacccattgatgcaacagatatttattaagcctttgcaaggttttaggcattgctgtaggttctagggatagaacagtatcttagtccattcaggctattacaacaaaacagcatacattgggtggcttataagcaacagaaatgtatttctcatcattctggaggctgagacatctacatcaaggtgctaagcaaatctggtttctggtgaggacccatttccttgttcacagatrgtgtcttccatgtgtcctctcatggtggaaggagaaaaagctcaggcctttgaaaaataaggatactaattccattcctaagggatctaccctcatgacctaatcatctcccaatgacctcactcctaatatcatcacattgggagttaacattttacaacatgaatttggcaggggcggcggggggtaatgacataaatatttagaccatagcaagcagtgagtagaatattcaaggtcactcctcacagagtgctattggtgttgggggccagactataaaataaacagacaaatatggatggtgatcaatgttatgaaggaagctgggtgcggtggctcacgcctgtaatcccagcactttgggaggctgatgcaggcagatcacctgaggtcgggagttcaagactagcccgg

SEQ ID NO: 27775 - DNA, 1122 bp, Homo sapiens
cccagtcatccaccctgatgaccagctcagtaattgtccctgaggcaattactgtagccagaagaaagcaatgttcccagtggtttgaggaacacaccaaaagcttcatgtcctgaatgtggtatgggtccggcctgagagctggggaggggcggagcccaaaatgaaaacctacgggcgttgctgtaagagggtggagtggaggccagggaggcagaggacaaatgtttttatttttttatttttatttctattttattttattttattttttattgtactttaaatactttagggtacatgtgcacaacgtgcaggtttgttacatatgtatacatgtgtgatgttggtgtgctgcacccatgaactcatcatttaacattaggtatatctcctaatgctatccctcccccctagccccaccccacaactctcccttctttagaggcagggacatgaggcacagagakagggagagtaacaacctcaagccaaactgctggtgcctggcagagctaagactcgaaccctgctctgctgacttcaagtagcactttccacacagctgctcttcccagggagaggtctcagacacaggaaggaccctggagtccctactcagaggacttccttttattcgttatttttaaattttgtttatttatttttctgctgagacagagtctctgtcacccagactagagtgcagtggtgcaatctcagcttactgcaacctccacctcccaggttcaagcgattttcctgcctcagcctccccagtagctgagatttcaggtgcccaccaccgtgcctggctaatttttatatctttagtagagacagggtttccccacgttggccaggctggtctcaaactcctggcctcaagtaatccatatgcctccgccttctaaagcgctggggttacaacatgagccaccgtgcctggcagaggcctttcttttaaataatgagatgttggtggaggctgtccttctcacaaactgggctttagtcaatggctctgagaaaggagagaactatactttttgccctgggagtcttctatcttttctttgaagaaaaattcctctccttcccagtcattccagcccttgccaa

SEQ ID NO: 27776 - DNA, 1122 bp, Homo sapiens
cccagtcatccaccctgatgaccagctcagtaattgtccctgaggcaattactgtagccagaagaaagcaatgttcccagtggtttgaggaacacaccaaaagcttcatgtcctgaatgtggtatgggtccggcctgagagctggggaggggcggagcccaaaatgaaaacctacgggcgttgctgtaagagggtggagtggaggccagggaggcagaggacaaatgtttttatttttttatttttatttctattttattttattttattttttattgtactttaaatactttagggtacatgtgcacaacgtgcaggtttgttacatatgtatacatgtgtgatgttggtgtgctgcacccatgaactcatcatttaacattaggtatatctcctaatgctatccctcccccctagccccaccccacaactctcccttctttagaggcagggacatgaggcacagagagagggagagtaacaacctcaagccaaactgctggtgcctggcagagctaagactcgaacsctgctctgctgacttcaagtagcactttccacacagctgctcttcccagggagaggtctcagacacaggaaggaccctggagtccctactcagaggacttccttttattcgttatttttaaattttgtttatttatttttctgctgagacagagtctctgtcacccagactagagtgcagtggtgcaatctcagcttactgcaacctccacctcccaggttcaagcgattttcctgcctcagcctccccagtagctgagatttcaggtgcccaccaccgtgcctggctaatttttatatctttagtagagacagggtttccccacgttggccaggctggtctcaaactcctggcctcaagtaatccatatgcctccgccttctaaagcgctggggttacaacatgagccaccgtgcctggcagaggcctttcttttaaataatgagatgttggtggaggctgtccttctcacaaactgggctttagtcaatggctctgagaaaggagagaactatactttttgccctgggagtcttctatcttttctttgaagaaaaattcctctccttcccagtcattccagcccttgccaa

SEQ ID NO: 27777 - DNA, 905 bp, Homo sapiens
tttgagcagggcacactggaagaggcctccctccagggagcagacggacctgtacgttctcatacttcawaatgatgtcctctcactcctgcaaagtatccacatcctctaccatgtccatcctgtgagacaaaatcatctaaatgttacactgtacctgagaccttcggagaatacctaaaccgctcccacctggctcccagattctgcctggcggtgtaaccccccttccaccactgccctcaggtgaaaaggggccagacccagtggcccacacctgcatgggtctctggagtctcaagccccaagcaggggtgggcatcttcccaaggacttgagaatactgggacctggacagagaatcctgttgtccccaaatgccatgaaacgggtacacacctgccccagcatgttgaatggtgtccacctgccaaggttgaagggcccatgatgggctattccagggatgtggaggcagactggggtcagggaccagaggtctctgtacagtcggcctcctgggatgctcagggaccacagagatgcccagtttcctacgggaacaagacctctcctgactgctcggttctactccactcatcacttgggctactgtggcccttcagtctcaccagtgaagccactttaggaacaacgccagttaagcaggagggtgtttggtttgggggatgaaaataatctactgtctccaaagcagcccctatgctcgtggaaaccacatctctcggggagggacggtggactccaccattctgagctatccatacaggagggggcttcattttcctgggtcactgaggaagaacagtgggtccttggttctggagaacacctagatggaccatccctcctgggaacactcagggcaaaaggagggtgaggcc

SEQ ID NO: 27778 - DNA, 954 bp, Homo sapiens
ccgccttgaacctgttgagctcagccaatggggtgcccaggcagaacactgagagaaggaagggaagatcgtgagctcagcgcattcgtttccctgagaggcggccgcgggctgagggcattgctcggctgaaagtcccagccccatcaagcagacccctcctcactgcagcgctgtcttgggtctggtgaccccctcctctcctccgtggtagtaacagtccccgctgacactcgctggagctccacactctcctctctggtgtcctgcacctgcccatgcctgcaaacagacctttatgaaaataccctcaaaacacacagtctggctgtgcctccacttcctgctaggacctcgaaggatccctcaggtgggaggcgaacagcatttgggggagacagcccctcctctcctgattgtttcttctctggtttccttctctgttgggcccccatggacagatgagcccagggtgagggtggcacaaagttatctcggggggacagttactcagcccttctgcccctygaacatttccctcccaagcctctgcaccagctctcccacaccccaagccaggctggccagccctaggcaggacacagaggggacccacgaccactcaggcctcctctatcacagctggcccacagctggaaggagggagcaaagtaggaggtcaggcgcgttggctcatgcctgtgatcccagcactttgagaggctgaggtgggcagatcacctgaggtcaggagttccacaccagcctggccaacatggcaaaaccccgtctctattaaacatacaaaattatctgggcgtggtggtgtatgcctgtaatcccagctaattaggaggctgtggcaggagaatcgcttgaacccgggaggcagaggttgcagtgagccgagatcatgccattgcactccagcctgggcaatgagactgaaactcc

SEQ ID NO: 27779 - DNA, 665 bp, Homo sapiens
gtcattcacgcccgggacgctcgtgatttatggactttaatttccccagatcctcagtggcttccctcctttccctctggcctgtcagggtgtttgtctcccagcacccccagcacccccctccctggtttttaatttgaagcatctgtctggagcatcccgaggaggagacgcctgcgaggctgaatgcatgaagcagctgacagctctattgatttcctctctcccaccgcataatgcaagatatatacaagccgataggccagccctctttgaagggtctgtgcccttttttctcactctgatgtcccctcaccctggcacatgttgatctataggaggggtgcttgtccctcatgctgaaaatgcattctcctctgcctcagtgttatttttctcactgttggtggatgaggcctcatctgtcctttctgtgcttgcagattggacacccaggaagcagttcttggagtgaaagggrccagtagggaaaagcaggggagctggggaggtgtcatctgtcaaaactgactctgccccccatggaggagatggtgcggggctttcggagtggcgctccccagcctcacaggtctgggcaaggagggctgctttccactccagcccccgcctccagcaggtcgcagcttgactcctccaagtcc

SEQ ID NO: 27780 - DNA, 723 bp, Homo sapiens
tgccgttgccctgcagaggtgactcgctactacctgtattgcagccagagtggaagcagccccttccagcaggtatggccccccgaggcctgccctcaccctgcccacagccgctcccccttgaccctaagcctcaccactgaccaggatggcggaggtggcggggccttgcttgcctcactgtggtcctctccttagctgcttctgtgaggggggcgtgcttttggtcgtgggttctagattggtggttaacacatatgcagctcaatgcgggagctagttcccatgcagatgctgtccaggagctctggggtggggccgagattctgtactactcacaagctcccaggtgaggccagagctgctggtccaaagacacatctgagctgcaacgagggagaagactgtgcagctctcaagaagccagaggagtagggggagacttcctgcaagtggaggggcctgtgcagctgcagccaggtgggrgggtgggaggggcaggagcataggcccctcagccactgtgggctcctgggagacggagcctcactgtggggctgtgtctttcctggctcagaccctgaccaccttccagcgcgcactcaccaccatgcagatccaggtcgcggggctgctgcagtttgccgtgcccctcttctccactgcagaggtaaggcagctgtgcaggaagaggggagccccagatgaaccctgacagccctt

SEQ ID NO: 27781 - DNA, 745 bp, Homo sapiens
ttaaattttaaatttctttttccttaaaacaattttttttttttgcactggcaagtatgtagaacaattatgagattcattttgcaacctctactgtgcctggcagaggcttgaagttcagtccaaatttgtcaaatgaatgaatgatccctattggctgctgggtggggcactttgggagtcacctttgcccaaggtcagactcctcctgatgccyggtcagcccttgtacctccctgccttccctgttggtctgtgattgggacctctgcctgctcccagacagaaggctccttgaggtagcagctggtccccttccccccagcattcacacgagcctcacagcgatggccaggcacagctggggcagtgcatcccttggggagctgcagtgatggatggggctcttgcagctggggcaggaggaagccttacagagccgagctgcatgatggcgttaacgtagttctcatctttctccactttcttccggaaacggatggtctgctccagctccagggggttcacgtccttgggccagcccccctcgacatggttaactccccgggtctccatctcaaaccgctctgagttggcctaaacagagagccgcaggagggaagacgtcaccctggtatactcccaaaccctcggccacttctgcaagccaggtcccacgggggctcccagggctggatgctgaggcgccctgccggagccacagtattttcaaatgcaggcaagg

SEQ ID NO: 27782 - DNA, 554 bp, Homo sapiens
gactcttgctgtcgctggctggttccaggctctagcccttactcactccggtcacactgatgactccctgttggtctaacagagcagcaccggcttctttcctccttccggaattgtgtgtgcagctgccctgcctggggtgcccctccacacagatgcgcacgtcatcacacatgcacacagatgcactcgcacgtgtacacacatctctgctcatgcttgttcttaaggtctcagctgcattgtccctttctcatggaggcctcctgcgagctccttcttctctagagtctaggttagttcttcctgttatccctctcacggcaccctgtactcttccttaacatgcactttgcacaactgtcgttctgtaggtatctgcctatctatcagctttccctgcctcccactggtgtaccggctctgggaggcggggctgcatctggtttattctccactcrtggcaagtgcctggcacagggctgagtgtaggcaacgttacccggatggcaagcgcctgagctgggttcagacttccctgcctggaaatgccg

SEQ ID NO: 27783 - DNA, 594 bp, Homo sapiens
tgggggggaaatgtgagcttgtaccccaaggtccccctgcccccgygcacgctctgcccattcatgcagtaccatgtacatgtgcattcactctaccagtgtttaccggcacctcctgtgggctgggctctgtgggcaggggttagatagaggagtccaaaatacagagagggccaggccttgccctgcctcctggtcttctgggcggtgaatcctccccctacctgctcctgacccttcccctaaagagcaggggcctggagtgccgcagggagaattctctctctccggcaccccatagagagctgtccaaagagggacaagggccgcacttcaattcccacaggccagggtgtaaggtcagagaacagaccgggagccaggctgtcgggactcaggcttggattctgctacttcccggttgcaagccgtgggttactcaggcaagttatttaacctccctcagtttttttcacctgtgaaacatggacaatggtcccttacctcacacattcattgcaagactaaatcattaacacttgtaaactgctgagaacaatgcctggcacatgggaacctcactatgtttttcaa

SEQ ID NO: 27784 - DNA, 548 bp, Homo sapiens
gcaggaagaggagagtttgtgtttcaacttggctggcctggtaaatgtaacagcacactttatccccaatgtgttaattagacccaaaagaaaagaaccataaaagagttgttctcctaaacgccagcatttttcatctggattctatttatcgattattttatagttgagagggagcaaaaatccatgtttttatagcaaataaagctggctgcagtaattatgcaggcttaacatgtctgttctggagcaggaagttggaattcagcctgactctcaaacatttgggtgagatctaattgaaaaagacatttcaaagaacaaatatttaggaatgaggagtttcgctgatggtctctctgggccaagtgtgagtaccttgcttttagtttgatcctcagaggtgggaggagactatggagaaggacctggtcagtaatgttgagaccacagtcaaaatgtgaggctgaaacttaaarataatcagtgaggcttagtaaagggaagaaagatgccttcagggaatatatcccctgtacctggtgagc

SEQ ID NO: 27785 - DNA, 916 bp, Homo sapiens
tgtaggaggacccaggctcttctggagtttagagaacatcactgctctgagtgcctggagggttttggcaggtattggggtgtagtgstgttgctcagaggcttgagaaacgaggatgatcctgggtagttgagacccctgggtaggtagtcagtttctattctccctcttggccatgtctctggatttgttacagattttgaccttttttttttctttgagacagagtcttattttgttgcccaggctggagtgtagtgataccatcatggctcactgcagcctcaacctcccaggctcaagcagtcccctcatctcagcctcccaagtagccgggaataaaaggtgcatgccaccatacccagctaattttaaaattttttatagagatgaggtctccctacattgcccaggctggtctcaaacttctggactcaagcaatcctcctcctcagcctcccaaattgctgggattacaggcataagccaccttgccctgctatattttgacctttgaattgctttaatcggctccctaatttttgtccctaacttgattctctgcaccttccccgccctccgccatgtgtaacacaagggatttaagcagaggaagatcttcaaaaaataggagactctgaaatgggttttcagggaaagcgtggcgccccctctcctgctttgtgcagagtaggcgtggagggtgtggaagcataggaaagagccccttacttcctgtgggatgaggacagtgaaatgacatcaccagaccctgagttccgaaggtgggaagggcagagaggacctggttcagggccagggattgctctgggactcccccactggaggctcggtgtccttctgggtaattttcatctttaatttctcagcgttttatgaacagggagtaaatcag

SEQ ID NO: 27786 - DNA, 916 bp, Homo sapiens
tgtaggaggacccaggctcttctggagtttagagaacatcactgctctgagtgcctggagggttttggcaggtattggggtgtagtgctgttgctcagaggcttgagaaacgaggatgatcctgggtagttgagacccctgggtaggtagtcagtttctattctccctcttggccatgtctctggatttgttacagattttgaccttttttttttctttgagacagagtcttattttgttgcccaggctggagtgtagtgataccatcatggctcactgcagcctcaacctcccaggctcaagcagtcccctcatctcagcctcccaagtagccgggaataaaaggtgcatgccaccatacccagctaattttaaaattttttatagagatgaggtctccctacattgcccaggctggtctcaaacttctggactcaagcaatcctcctcctcagcctcccaaattgctgggattacaggcataagccaccttgccctgctatattttgacctttgaattgctttaatcrgctccctaatttttgtccctaacttgattctctgcaccttccccgccctccgccatgtgtaacacaagggatttaagcagaggaagatcttcaaaaaataggagactctgaaatgggttttcagggaaagcgtggcgccccctctcctgctttgtgcagagtaggcgtggagggtgtggaagcataggaaagagccccttacttcctgtgggatgaggacagtgaaatgacatcaccagaccctgagttccgaaggtgggaagggcagagaggacctggttcagggccagggattgctctgggactcccccactggaggctcggtgtccttctgggtaattttcatctttaatttctcagcgttttatgaacagggagtaaatcag

SEQ ID NO: 27787 - DNA, 916 bp, Homo sapiens
tgtaggaggacccaggctcttctggagtttagagaacatcactgctctgagtgcctggagggttttggcaggtattggggtgtagtgctgttgctcagaggcttgagaaacgaggatgatcctgggtagttgagacccctgggtaggtagtcagtttctattctccctcttggccatgtctctggatttgttacagattttgaccttttttttttctttgagacagagtcttattttgttgcccaggctggagtgtagtgataccatcatggctcactgcagcctcaacctcccaggctcaagcagtcccctcatctcagcctcccaagtagccgggaataaaaggtgcatgccaccatacccagctaattttaaaattttttatagagatgaggtctccctacattgcccaggctggtctcaaacttctggactcaagcaatcctcctcctcagcctcccaaattgctgggattacaggcataagccaccttgccctgctatattttgacctttgaattgctttaatcggctccctaatttttgtccctaacttgattctctgcaccttccccgccctccgccatgtgtaacacaagggatttaagcagaggaagatcttcaaaaaataggagactctgaaatgggttttcagggaaagcrtggcgccccctctcctgctttgtgcagagtaggcgtggagggtgtggaagcataggaaagagccccttacttcctgtgggatgaggacagtgaaatgacatcaccagaccctgagttccgaaggtgggaagggcagagaggacctggttcagggccagggattgctctgggactcccccactggaggctcggtgtccttctgggtaattttcatctttaatttctcagcgttttatgaacagggagtaaatcag

SEQ ID NO: 27788 - DNA, 684 bp, Homo sapiens
aaccccttttccttataaattacccagtctcaggcatttctttatagcaatgcaagaatggactaatacatatgtcaatcagcattgctcattgccccagatccaagccagcaggcctgaagtgaaacctcacatttatagggaaggtcccttgactttttctcatcacaggtrcccaggctgggctaagttcttattacaagtcctccacaccaccattccccttccatggaagccattcattcatgattatatgttgttgtttatttcccccataagactgttggtgctgttccctgacttaaaaatatgtgtgcaggccagagaatagttcaatagttccaggaaaaaaattgaagcaacatatgggtgaaccctacctttgagaaagtcagtttttataagactgtgagataataataagcaacctatttgtagtctttactttttaaaatgcttccctatacaccatggtcatagtggcgatattcacaataaccaaaaggtagaacaatccaagtgtcaatcagtgaatgaatggttgaacaagatgtggtatatatatatacagtggaatcggattcagctgccaagaggaaggaaattctgacatgtgctactacatggatgaaacttgaaaacatgatgctaagtgaaagaatccagttatgaaagggctattcc

SEQ ID NO: 27789 - DNA, 499 bp, Homo sapiens
actgtattccattccactgatgtaggtatgagtcttccaaatcatgagcacaatacacctattcatttatttagcaatttgatttctttcattagcatggtgtagtttcagcatatacatgctctattagatttatacataagtatttttgaagtttttaaacatggcttttttttktttttgtttttgttttttttggagatagagtcttgctttgtcacccaggctgcagtgcagtggcacaacctcggctcactgcaacctccacctcccaggttcaagcgattctcctgcctcagcctccggagtagcagggattataggggcccatacatgacattttaaaaaaatttcagttttcaattaccttgttaaactcactttttttggttgttccaggatctttttggcagattctttgtcattctctatgtaaagaattatgtcacctacaaatagggatttcttttgtcctttccaatctgtcttttctttttcc

SEQ ID NO: 27790 - DNA, 499 bp, Homo sapiens
actgtattccattccactgatgtaggtatgagtcttccaaatcatgagcacaatacacctattcatttatttagcaatttgatttctttcattagcatggtgtagtttcagcatatacatgctctattagatttatacataagtatttttgaagtttttaaacatggcttttttttgtttttktttttgttttttttggagatagagtcttgctttgtcacccaggctgcagtgcagtggcacaacctcggctcactgcaacctccacctcccaggttcaagcgattctcctgcctcagcctccggagtagcagggattataggggcccatacatgacattttaaaaaaatttcagttttcaattaccttgttaaactcactttttttggttgttccaggatctttttggcagattctttgtcattctctatgtaaagaattatgtcacctacaaatagggatttcttttgtcctttccaatctgtcttttctttttcc

SEQ ID NO: 27791 - DNA, 499 bp, Homo sapiens
actgtattccattccactgatgtaggtatgagtcttccaaatcatgagcacaatacacctattcatttatttagcaatttgatttctttcattagcatggtgtagtttcagcatatacatgctctattagatttatacataagtatttttgaagtttttaaacatggcttttttttgtttttgtttttgttttttttggagatagagtcttgctttgtcacccaggctgcagtgcagtggcacaacctcggctcactgcaacctccacctcccaggttcaagcgattctcctgcctcagcctccrgagtagcagggattataggggcccatacatgacattttaaaaaaatttcagttttcaattaccttgttaaactcactttttttggttgttccaggatctttttggcagattctttgtcattctctatgtaaagaattatgtcacctacaaatagggatttcttttgtcctttccaatctgtcttttctttttcc

SEQ ID NO: 27792 - DNA, 728 bp, Homo sapiens
accagcttggacatgcctgatagttttcttagctccaagaacagttgtgaatttccaggttccttgcctgtgatgtaggccgatggcatcctctactcaggtagacttcctggcctcctggtccaggagagggaatgctgtcagctggttaccagcytcaaacggcctcccagaaggtcccttctcttgactcttattttctttctcaggggtagctgagtacttactacacgcctagggacactgtcataagcaaggagcaacattcatgctcacaggccaattacagggatgtacatgtgctcacagggagctggcctggcaggggcggggctagctgagggaccccaggagggtctcagaggagtcctgaggtttttggcctcaagcaaggggacctcagcagagaccccaatgcactgacaaaagtaaagtcaatacataaaaaagaatgcagagcaatgtcagtgccctcctgttgggagtgggggaagcattccaaggtgacttcttcccaggggcatgcacaccaggactcccatgtgagcgccatgtggcctgcactgtgcaccttccccagggtgtgctgggcaccgaatccgtgatggccagcagagcagcccagctcctgccctcagatcgcccatcacttatggactcaataaaataataacaaaaacacaggtacaaccccaacaatggcaactgacacagagagatataagacc

SEQ ID NO: 27793 - DNA, 728 bp, Homo sapiens
accagcttggacatgcctgatagttttcttagctccaagaacagttgtgaatttccaggttccttgcctgtgatgtaggccgatggcatcctctactcaggtagacttcctggcctcctggtccaggagagggaatgctgtcagctggttaccagcttcaaacggcctcccagaaggtcccttctcttgactcttattttctttctcaggggtagctgagtacttactacacgcctagggacactgtcataagcaagragcaacattcatgctcacaggccaattacagggatgtacatgtgctcacagggagctggcctggcaggggcggggctagctgagggaccccaggagggtctcagaggagtcctgaggtttttggcctcaagcaaggggacctcagcagagaccccaatgcactgacaaaagtaaagtcaatacataaaaaagaatgcagagcaatgtcagtgccctcctgttgggagtgggggaagcattccaaggtgacttcttcccaggggcatgcacaccaggactcccatgtgagcgccatgtggcctgcactgtgcaccttccccagggtgtgctgggcaccgaatccgtgatggccagcagagcagcccagctcctgccctcagatcgcccatcacttatggactcaataaaataataacaaaaacacaggtacaaccccaacaatggcaactgacacagagagatataagacc

SEQ ID NO: 27794 - DNA, 1028 bp, Homo sapiens
aggcactgagccttggtgttgagccaggcagagacagcaagagctctctccagcacagcagagtgtgcccagctgcgacttcctgagatgtgaagaagacttgaaagcgttaggaatagtcgcagctttctgtttccataagctctgtctgaggctttattgaaagaactgaactctatttatggtctccctaatgtcaatctgcacacttaggcaaagtgttttctgtttccctggaacataccacacttgtcaattgtccctaagcccacgaagcacaaagccacctcaaggcttaagcttttacttaacgttataaaaatgttatttattctcaaattattctataaatttaacataataataaaaactcacagctggaattcttgagaaactgaaaacacttatactaaaattaagtggaagaatgaatatccaygacaagccaagtaaactttgaaaatgcaattataaagtgtgtatgtgaaatattatgacgttaaatttttttatattggacttgtatttctgttttgaattccaggtatatatttgtatttgcattttttaaaattcatcttggtttcaaaaggaacccttttgcataacagtggaacatattcatgccagggagcatttcagatcctcttgagaagcaagcttacttgtcttcagaaaaggagatttgtagctttcagcccagtgaacaagtgggctaaaaaggcaatattgccattttaaatgtgaataaacagtcagcaaccaccccttcacattttatgttcaattttgaaatgccacacaattaatctttgaaaactgttttaatacacgcatttataaagaaagacacacaggtgggaggtgcagttaagcacttcacagagtcagctggggactatttttctgagccagagctctgccatcgacatgtctggacaaaagtcctgtgctctaagaccatgcttccctcctcagagaatcagcatgaaaacaacaaaaagaaccccacagatttttttcctttg

SEQ ID NO: 27795 - DNA, 1028 bp, Homo sapiens
aggcactgagccttggtgttgagccaggcagagacagcaagagctctctccagcacagcagagtgtgcccagctgcgacttcctgagatgtgaagaagacttgaaagcgttaggaatagtcgcagctttctgtttccataagctctgtctgaggctttattgaaagaactgaactctatttatggtctccctaatgtcaatctgcacacttaggcaaagtgttttctgtttccctggaacataccacacttgtcaattgtccctaagcccacgaagcacaaagccacctcaaggcttaagcttttacttaacgttataaaaatgttatttattctcaaattattctataaatttaacataataataaaaactcacagctggaattcttgagaaactgaaaacacttatactaaaattaagtggaagaatgaatatccatgacaagccaagtaaactttgaaaatgcaattataaagtgtgtatgtgaaatattatgacgttaaatttttttatattggacttgtatttctgttttgaattccaggtatatatttgtatttgcattttttaaaattcatcttggtttcaaaaggaacccttttgcataacagtggaacatattcatgccagggagcatttcagatcctcttgagaagcaagcttacttgtcttcagaaaaggagatttgtagctttcagcccagtgaacaagtgggctaaaaaggcaatattgccattttaaatgtgaataaacagtcagcaaccaccccttcacattttatgttcaattttgaaatgccacacaattaatctttgaaaactgttttaatacacgcatttataaagaaagacacacaggtgggaggtgcagttaagcacttcacagagtcagctggggactatttttctgagccagagctctgccatcgacatgtctggacaaaagtcctgtgctctaagaccatgcttccctcctcagagaatcagyatgaaaacaacaaaaagaaccccacagatttttttcctttg

SEQ ID NO: 27796 - DNA, 1271 bp, Homo sapiens
aaattccaatgtcatttttcacagaaataggaaaacagaccataaaatttgtatggaaataaaaaagaccctgaatagccaaagcaatcttgaacaaaaagcacaaamctgcaggcatattgttttaatttacaatgttggtttagctattctagcacacactctatacatatatgttttagaattagttcatcaatttccatgaaagatcctgtagggatttaacctggagttgcattgattttgcagattagtttggggagaaatgacatctttcgtctatattgcctctccctgtccatgaacataattgcgtgcttcattcactcagttattcctaggtgccttctagtaaagtcttctaattttctccataaaaattttcgcattagcatattgaaattttgagaagaagaagaaacaaatgctaagaagtcattcacaaaatttattttcgtatgcaagtggtaactatgacaatgtagtagctttggtcatttaaggaagtggattgttggggatttcttgaaggataattagtcttcaacttgaggagtgaaaatatttggtcacttataatatgttacctaacaccttcctatgacagggatcacgtttattcatttaagacagaaaccttcccagtctaatgttgaggctgtcctaaagtcagtgtattacacttgataatttccattcacgctgaatctaacaagactatcttatttgtatctttttcacaacaaagctttcccaaagagtggtcctatatctgttcttttccttgttaaaaaatggaatcctgtgtggaatttttctgctaggtttggttccatttgtgagattttacttaataaactgataagcacgtaagtgccagacactaattctaagtgctgcaaaatacacgaaaacccatttcatccttaaaacaagcctgggaggcaagtacttttatgatctccattttgcaagtgtggcagctgagggaccagagatccgagaacttctttgaggtcacacagacagaaagtgatgaagtgaagcctcacgcagcaggcaggccaccacctctgcgtgctgcctcaatccctgaaacgcggcacatagtggaggacatggtgaaatgcctgagaatttttttttcatttacagaatagaagagtatattgatgctcttaggattttgaaactagaagagatcaaagcacagatcctatgcagtagcttctttgttctatggccaaggctgtcatccccaaaagaatgca

SEQ ID NO: 27797 - DNA, 1271 bp, Homo sapiens
aaattccaatgtcatttttcacagaaataggaaaacagaccataaaatttgtatggaaataaaaaagaccctgaatagccaaagcaatcttgaacaaaaagcacaaacctgsaggcatattgttttaatttacaatgttggtttagctattctagcacacactctatacatatatgttttagaattagttcatcaatttccatgaaagatcctgtagggatttaacctggagttgcattgattttgcagattagtttggggagaaatgacatctttcgtctatattgcctctccctgtccatgaacataattgcgtgcttcattcactcagttattcctaggtgccttctagtaaagtcttctaattttctccataaaaattttcgcattagcatattgaaattttgagaagaagaagaaacaaatgctaagaagtcattcacaaaatttattttcgtatgcaagtggtaactatgacaatgtagtagctttggtcatttaaggaagtggattgttggggatttcttgaaggataattagtcttcaacttgaggagtgaaaatatttggtcacttataatatgttacctaacaccttcctatgacagggatcacgtttattcatttaagacagaaaccttcccagtctaatgttgaggctgtcctaaagtcagtgtattacacttgataatttccattcacgctgaatctaacaagactatcttatttgtatctttttcacaacaaagctttcccaaagagtggtcctatatctgttcttttccttgttaaaaaatggaatcctgtgtggaatttttctgctaggtttggttccatttgtgagattttacttaataaactgataagcacgtaagtgccagacactaattctaagtgctgcaaaatacacgaaaacccatttcatccttaaaacaagcctgggaggcaagtacttttatgatctccattttgcaagtgtggcagctgagggaccagagatccgagaacttctttgaggtcacacagacagaaagtgatgaagtgaagcctcacgcagcaggcaggccaccacctctgcgtgctgcctcaatccctgaaacgcggcacatagtggaggacatggtgaaatgcctgagaatttttttttcatttacagaatagaagagtatattgatgctcttaggattttgaaactagaagagatcaaagcacagatcctatgcagtagcttctttgttctatggccaaggctgtcatccccaaaagaatgca

SEQ ID NO: 27798 - DNA, 1271 bp, Homo sapiens
aaattccaatgtcatttttcacagaaataggaaaacagaccataaaatttgtatggaaataaaaaagaccctgaatagccaaagcaatcttgaacaaaaagcacaaacctgcaggcatattgttttaatttacaatgttggtttagctattctagcacacactctatacatatatgttttagaattagttcatcaatttccatgaaagawcctgtagggatttaacctggagttgcattgattttgcagattagtttggggagaaatgacatctttcgtctatattgcctctccctgtccatgaacataattgcgtgcttcattcactcagttattcctaggtgccttctagtaaagtcttctaattttctccataaaaattttcgcattagcatattgaaattttgagaagaagaagaaacaaatgctaagaagtcattcacaaaatttattttcgtatgcaagtggtaactatgacaatgtagtagctttggtcatttaaggaagtggattgttggggatttcttgaaggataattagtcttcaacttgaggagtgaaaatatttggtcacttataatatgttacctaacaccttcctatgacagggatcacgtttattcatttaagacagaaaccttcccagtctaatgttgaggctgtcctaaagtcagtgtattacacttgataatttccattcacgctgaatctaacaagactatcttatttgtatctttttcacaacaaagctttcccaaagagtggtcctatatctgttcttttccttgttaaaaaatggaatcctgtgtggaatttttctgctaggtttggttccatttgtgagattttacttaataaactgataagcacgtaagtgccagacactaattctaagtgctgcaaaatacacgaaaacccatttcatccttaaaacaagcctgggaggcaagtacttttatgatctccattttgcaagtgtggcagctgagggaccagagatccgagaacttctttgaggtcacacagacagaaagtgatgaagtgaagcctcacgcagcaggcaggccaccacctctgcgtgctgcctcaatccctgaaacgcggcacatagtggaggacatggtgaaatgcctgagaatttttttttcatttacagaatagaagagtatattgatgctcttaggattttgaaactagaagagatcaaagcacagatcctatgcagtagcttctttgttctatggccaaggctgtcatccccaaaagaatgca

SEQ ID NO: 27799 - DNA, 1271 bp, Homo sapiens
aaattccaatgtcatttttcacagaaataggaaaacagaccataaaatttgtatggaaataaaaaagaccctgaatagccaaagcaatcttgaacaaaaagcacaaacctgcaggcatattgttttaatttacaatgttggtttagctattctagcacacactctatacatatatgttttagaattagttcatcaatttccatgaaagatcctgtagggatttaacctggagttgcattgattttgcagattagtttggggagaaatgacatctttcgtctatattgcctctccctgtccatgaacataattgcgtgcttcattcactcagttattcctaggtgccttctagtaaagtcttctaattttctccataaaaattttcgcattagcatattgaaattttgagaagaagaagaaacaaatgctaagaagtcattcacaaaatttattttcgtatgcaagtggtaactatgrcaatgtagtagctttggtcatttaaggaagtggattgttggggatttcttgaaggataattagtcttcaacttgaggagtgaaaatatttggtcacttataatatgttacctaacaccttcctatgacagggatcacgtttattcatttaagacagaaaccttcccagtctaatgttgaggctgtcctaaagtcagtgtattacacttgataatttccattcacgctgaatctaacaagactatcttatttgtatctttttcacaacaaagctttcccaaagagtggtcctatatctgttcttttccttgttaaaaaatggaatcctgtgtggaatttttctgctaggtttggttccatttgtgagattttacttaataaactgataagcacgtaagtgccagacactaattctaagtgctgcaaaatacacgaaaacccatttcatccttaaaacaagcctgggaggcaagtacttttatgatctccattttgcaagtgtggcagctgagggaccagagatccgagaacttctttgaggtcacacagacagaaagtgatgaagtgaagcctcacgcagcaggcaggccaccacctctgcgtgctgcctcaatccctgaaacgcggcacatagtggaggacatggtgaaatgcctgagaatttttttttcatttacagaatagaagagtatattgatgctcttaggattttgaaactagaagagatcaaagcacagatcctatgcagtagcttctttgttctatggccaaggctgtcatccccaaaagaatgca

SEQ ID NO: 27800 - DNA, 1271 bp, Homo sapiens
aaattccaatgtcatttttcacagaaataggaaaacagaccataaaatttgtatggaaataaaaaagaccctgaatagccaaagcaatcttgaacaaaaagcacaaacctgcaggcatattgttttaatttacaatgttggtttagctattctagcacacactctatacatatatgttttagaattagttcatcaatttccatgaaagatcctgtagggatttaacctggagttgcattgattttgcagattagtttggggagaaatgacatctttcgtctatattgcctctccctgtccatgaacataattgcgtgcttcattcactcagttattcctaggtgccttctagtaaagtcttctaattttctccataaaaattttcgcattagcatattgaaattttgagaagaagaagaaacaaatgctaagaagtcattcacaaaatttattttcgtatgcaagtggtaactatgacaatgtagtagctttggtcatttaaggaagtggattgktggggatttcttgaaggataattagtcttcaacttgaggagtgaaaatatttggtcacttataatatgttacctaacaccttcctatgacagggatcacgtttattcatttaagacagaaaccttcccagtctaatgttgaggctgtcctaaagtcagtgtattacacttgataatttccattcacgctgaatctaacaagactatcttatttgtatctttttcacaacaaagctttcccaaagagtggtcctatatctgttcttttccttgttaaaaaatggaatcctgtgtggaatttttctgctaggtttggttccatttgtgagattttacttaataaactgataagcacgtaagtgccagacactaattctaagtgctgcaaaatacacgaaaacccatttcatccttaaaacaagcctgggaggcaagtacttttatgatctccattttgcaagtgtggcagctgagggaccagagatccgagaacttctttgaggtcacacagacagaaagtgatgaagtgaagcctcacgcagcaggcaggccaccacctctgcgtgctgcctcaatccctgaaacgcggcacatagtggaggacatggtgaaatgcctgagaatttttttttcatttacagaatagaagagtatattgatgctcttaggattttgaaactagaagagatcaaagcacagatcctatgcagtagcttctttgttctatggccaaggctgtcatccccaaaagaatgca

SEQ ID NO: 27801 - DNA, 604 bp, Homo sapiens
ggagaggttgtgtgtaagtcaggacaggmgtgagtacatgagaactctactttctcttcaatgttgcctacaactgctctacaacataaattttatagatttaaaaaatgaatgaactgcttatatatgcaccgatattgatgaatctcaaataattatggttagtggaagaatccaggcataaaaaagtacatacaaattatttcatttgtgtaaactctagagaagaaagtaatctgtagggacaggaagtgtgtatctcctgaagatagggaggaaggaagaggtgagaaggagaaatcatacatggccttacagaaacgtttgggggtgatggctaagttcactatcttaattgtggtgataattccacgtatgcatgaaaatgtcaaaactcaatgcttaattatgtgtcttttattttctgtcaattacatatcaacaaaactgtaagaatgtgctaatgcacactgtggagtgtcaacagcaattaaacgtaacatggctggatcctgaaaacatagtgctaaatacatagtctaagaaacaatatgaaaaagaagaaggaattaaaatacaatgcaatagtgacagctgagttagt

SEQ ID NO: 27802 - DNA, 604 bp, Homo sapiens
ggagaggttgtgtgtaagtcaggacaggagtgagtacatgagaactctactttctcttcaatgttgcctacaactgctctacaacataaattttatagatttaaaaaatgaatgaactgcttayatatgcaccgatattgatgaatctcaaataattatggttagtggaagaatccaggcataaaaaagtacatacaaattatttcatttgtgtaaactctagagaagaaagtaatctgtagggacaggaagtgtgtatctcctgaagatagggaggaaggaagaggtgagaaggagaaatcatacatggccttacagaaacgtttgggggtgatggctaagttcactatcttaattgtggtgataattccacgtatgcatgaaaatgtcaaaactcaatgcttaattatgtgtcttttattttctgtcaattacatatcaacaaaactgtaagaatgtgctaatgcacactgtggagtgtcaacagcaattaaacgtaacatggctggatcctgaaaacatagtgctaaatacatagtctaagaaacaatatgaaaaagaagaaggaattaaaatacaatgcaatagtgacagctgagttagt

SEQ ID NO: 27803 - DNA, 807 bp, Homo sapiens
tagagaacacgcatgaattgatactgttgtgtctggtgtctggtggcccagcttgatggatcctgaagcacaagctcatttcctgataactccatcattcctattttctctcaacattatagaagggtacctaatgacagaatatatccctcttgcgttttgtggctaaagctatttgggtgtaattgccaaaggtattcactctacctgaaagggtgagagccaagaaaaagaagtgcctagctgtgaggaagttcagaacatgataaaatatacctcttagtacatagagagagcatcacatggagccctggacatttctgtttgttgatgctcctattctgccacatgtgctaatcctctacccttacgggatcrtcgtccatcctgcttcagccagtttgggtaagtacctgtaaaaaattacatcctttagagtgactgcccaaagacagtgagatttatcttgctaaatctagtagtctttcatgatagaatgttgatgactattttgctaaaattcacctcggtgccagaggaggtcaagaatgaacaaattatctgacagggatatgtattccaaactacctctgtgtgtgtgtgtgtgtgtgtgtgtgtgtgtgtgtgtgtgtaaactatacatatacatatgcagttaatgaatatataaatgatacagaaataaatttttgaaatatattctctttatcacttgagactagccacttctttattattcgaagtaatattgtatctgtatgaactgtatcaattcagaaataatattaaaaattcttcttaaagtgt

SEQ ID NO: 27804 - DNA, 807 bp, Homo sapiens
tagagaacacgcatgaattgatactgttgtgtctggtgtctggtggcccagcttgatggatcctgaagcacaagctcatttcctgataactccatcattcctattttctctcaacattatagaagggtacctaatgacagaatatatccctcttgcgttttgtggctaaagctatttgggtgtaattgccaaaggtattcactctacctgaaagggtgagagccaagaaaaagaagtgcctagctgtgaggaagttcagaacatgataaaatatacctcttagtacatagagagagcatcacatggagccctggacatttctgtttgttgatgctcctattctgccacatgtgctaatcctctacccttacgggatcatcgtccatcctgcttcagccagtttgggtaagtacctgtaaaaaattacatcctttagagtgactgcccaaagacastgagatttatcttgctaaatctagtagtctttcatgatagaatgttgatgactattttgctaaaattcacctcggtgccagaggaggtcaagaatgaacaaattatctgacagggatatgtattccaaactacctctgtgtgtgtgtgtgtgtgtgtgtgtgtgtgtgtgtgtgtgtaaactatacatatacatatgcagttaatgaatatataaatgatacagaaataaatttttgaaatatattctctttatcacttgagactagccacttctttattattcgaagtaatattgtatctgtatgaactgtatcaattcagaaataatattaaaaattcttcttaaagtgt

SEQ ID NO: 27805 - DNA, 623 bp, Homo sapiens
agttgggagaattatttttagccctaattactaaatttcagtgtacagtatggcatgctgaaacaccacctctgtgatgttattttggaacatgaaaacagcaaatatttcagaaaattttcctgaatgaggagttaaacgtgattttaaccagatttgggggtgcatgctgaaaaaaaaaaaaaaacttcagacaagttaaatttgatggagtttaattgagcaaaaaaaagaaacaatatgtgaatcgagcagcctccagaatcacagcagtttcagagagactccaggggtgcctcrtggtcgaacaaatttatagacaaaaaaggtaaagtgatgtacaggaatcagaagtgaggtacagaaacagtgaaattggttacagcccagtgtttgccttatttgaatgcagtttgaacactcagcagtctatgagtggttgaagtatggccgctgggattgtccaacaatcagctattgttacaggcacatgctactaagtcaggttttcaattttgtctgcctattaagctaggttatgattcacccacaaggactcaaatatagaagtacagattccttctcaggccatattaaatttgctttaacaatgcacacctgca

SEQ ID NO: 27806 - DNA, 623 bp, Homo sapiens
agttgggagaattatttttagccctaattactaaatttcagtgtacagtatggcatgctgaaacaccacctctgtgatgttattttggaacatgaaaacagcaaatatttcagaaaattttcctgaatgaggagttaaacgtgattttaaccagatttgggggtgcatgctgaaaaaaaaaaaaaaacttcagacaagttaaatttgatggagtttaattgagcaaaaaaaagaaacaatatgtgaatcgagcagcctccagaatcacagcagtttcagagagactccaggggtgcctcgtggtcgaamaaatttatagacaaaaaaggtaaagtgatgtacaggaatcagaagtgaggtacagaaacagtgaaattggttacagcccagtgtttgccttatttgaatgcagtttgaacactcagcagtctatgagtggttgaagtatggccgctgggattgtccaacaatcagctattgttacaggcacatgctactaagtcaggttttcaattttgtctgcctattaagctaggttatgattcacccacaaggactcaaatatagaagtacagattccttctcaggccatattaaatttgctttaacaatgcacacctgca

SEQ ID NO: 27807 - DNA, 527 bp, Homo sapiens
acttctcaatatttcacccataggcatagttttaaaaatcatcataatttgtgtgcatacatgaaaatggaaatataagtggataatgtttaaggtactcctatttttaatattcagtcttactttttcatattgctttttgcctttctgtgctttttcatcagtgctgtgaggagttatttgatgctgtctttcataaaagatacgttaaaagattaccaagactaccctcagattcagtaattctctggggccttacaggactcagaagagtcatactcaaggctatgatttatgacatataaaggataccaagcacaatcagcagtggggcctgaggcgaagtcttggaaaaaccaggaacaggattccacagtccttttycagagtctcacaagatggattcagttccctcaggaacaagttgtgacatttatgaaatgttaccagccacagaagctcattagagactagtgacccagtgcacagggttttcatttggggctgatcatgagagtactccctgc

SEQ ID NO: 27808 - DNA, 725 bp, Homo sapiens
catttgctcttctatcgttgtgccctgcccctcacaagaggcagagtctcttccccttagaccaggacagatctttgtgattgccttgtctaacagattatggtgaatgttatgtgagttctgaagttgtgtcataaaaagaatttatggcatttttcctttttttggaaaattcatccttggtatccagccaccatactgtgagaaagctaaggccacgtagaaagatcatatataaatgttctggccaatagccccactaagatttcagagaacaaccagcattaactgccagatattggaatgagaaagctttgaaatgacaccaatcccagctgttttatgactgcaactgcatgagaaatcctgagaagaaacyacttagttgagcccagttaacctcccaaaattacaataatatgagacaggctaaaatgatctcattctctgatatgttttttgcagataacattttcctttccaataagactttgaataattattgctattattttgttatataagcagctaaagtctgtcttattcttctatggggctaacatggcaactggattataataaaaatttaataactaattgatgactaaataagaaatgactatatgaataataaaaatgaatgtttctttgtataaatactaacaaaaaaggtttttggtaggttatattttccaaaatatggttataataagtttgggataatt

SEQ ID NO: 27809 - DNA, 652 bp, Homo sapiens
taatcctagcttcaaggcagtctataatctataaaattatagactctctgattccacagtacagacagtaggcttctctgattccacagcacagaaagtcccagaagaagggtggaatggaggctaaaagccagttaactatattcattaaaattacctggttttaatgacctgataaggatatagacagcctgatttaaatgtcacaattattgttagattgagaaagttactgaacttctatcatttttagattcctcagttataaaactgggataacatagatatacatcgcgccagagtttttaatgattaaattagataatttatatatagtaagatcaagaaattttagccattattatcattttatgaaatctttgcaaatttgtctaattatttctttggaataaatgtctttaagtggaattttatcactggtaggcacacctatttatgtattacaggaagaagtaaaatgtaaaaatggccagatttacactgctgtcagcaaagtgtgagagcgattatttaccagaataatttcctatatagagtattgtaaatctaatcttggctttktaagtctatcatgttgttgtttaaatctgcaatacttaattaatgagggcaaccacatttaataaatgca

SEQ ID NO: 27810 - DNA, 652 bp, Homo sapiens
taatcctagcttcaaggcagtctataatctataaaattatagactctctgattccacagtacagacagtaggcttctctgattccacagcacagaaagtcccagaagaagggtggaatggaggctaaaagccagttaactatattcattaaaattacctggttttaatgacctgataaggatatagacagcctgatttaaatgtcacaattattgttagattgagaaagttactgaacttctatcatttttagattcctcagttataaaactgggataacatagatatacatcgcgccagagtttttaatgattaaattagataatttatatatagtaagatcaagaaattttagccattattatcattttatgaaatctttgcaaatttgtctaattatttctttggaataaatgtctttaagtggaattttatcactggtaggcacacctatttatgtattacaggaagaagtaaaatgtaaaaatggccagatttacactgctgtcagcaaagtgtgagagcgattatttaccagaataatttcctatatagagtattgtaaatctaatcttggctttgtaagtctatyatgttgttgtttaaatctgcaatacttaattaatgagggcaaccacatttaataaatgca

SEQ ID NO: 27811 - DNA, 645 bp, Homo sapiens
aataagtaggcataaaatggatgacataataaaatagtcaatacttctccctgcatgtaggatcactgtgaatgcttgagagacagattgatacaggtgtgctatttggcaactcaaacaccaaaagcagcattaccattagagatgtgatttttcaaaatrgtgaacaactttacctaaatttccagacaaaacatactaaattttctcttgatttacccataattgcatttgtgtaaaatttaatgattgttaatactatggaaaagtttctttgtggttacttattaaataaatttaagttctaggcttgaaccaaaagtttatttgtttcttttttacctactttaacatctagtaggacattaggaagccatatgggcaagtcttttgattatattcagaacttttgaaaaaatctagaaaggaagtgaaatcagcaagatggtaaaataggtggtcctatgcttcactccctcaatggaaagatcaagtggcaactatccacagacaaaaacatctaggtaaaaccacccaaacatggaaataagccagagtcagctatgtgtaccacaaagctgaataaaaatccatattgaaagggtagcagaaacattattgctttgactgcattgcccctcgtct

SEQ ID NO: 27812 - DNA, 1237 bp, Homo sapiens
tgcaatccaggagagacaaagcagtgtagcatgtggcttcaggattctggccagcagaggtgagttagagagacagctcttaaccttcacatttatgtgtaacattagaggacaaggtattcagttagtggtgaaaatgcaacgaaagtaaatgctgacaactgcatttttttcccatcaaagtcagtttaacctaatttccactgactaagtgcctcatcctactttcaaaattccactgaattttaggcaactagatctttatagcaaaagttgaaaaaatagaaattttttttgtcacctgggcttcagacaggccttgaaatttcattctgtctttcctctataaccagcaattgtccaatagcaatataatgcaatccacaaattaattttaaattttctagtagccatgttaaaaaatgaaaaagaaacaagtaagattactttaagaacatattttatttaacccaatatatccaaaatgktaccacgtcaatagggaattaatataaaagtttattaatgggctattttacattcttcagttcatcctatgtctttgaaacctggtatatattttacacatacggcacatcctaattcagattaggcacatttcaagtgctcaatagcagcacgttgctagtggctatcaatcatactgaacatcacaactcgaaacaatcataaaaaaatcaggtacaaaaagaatctcatctaactggaaaatagggaactcatatttactgaacatctattaggtgacagccactgagctctcatgtcatttactcctcaccgcaattctgccacatagatactattatctacttttttttttcttttttctttttgagacagggtctcactctgttgtccaggatggggtgcagtggcatgatcacagctcactgcagcctcaacctcccaggcttaagtgatcctcccacctcagcctcccaagtagctgggaccacaggcatgcacaaccactcctggctaatttttaaattttttgtagagctggggctttcttatgttgctcaggctggtcttgaactgctggactgaagtgatccttctatctcagcctcccaaagtgctgggattacacatgtgagccactgcacctggtctctatctttctttttgagagagaaactgaggctcggaatgtttaaataaattgtgtttcactaagaagtggcagaaacagcatttaaactcaaggccg

SEQ ID NO: 27813 - DNA, 1237 bp, Homo sapiens
tgcaatccaggagagacaaagcagtgtagcatgtggcttcaggattctggccagcagaggtgagttagagagacagctcttaaccttcacatttatgtgtaacattagaggacaaggtattcagttagtggtgaaaatgcaacgaaagtaaatgctgacaactgcatttttttcccatcaaagtcagtttaacctaatttccactgactaagtgcctcatcctactttcaaaattccactgaattttaggcaactagatctttatagcaaaagttgaaaaaatagaaattttttttgtcacctgggcttcagacaggccttgaaatttcattctgtctttcctctataaccagcaattgtccaatagcaatataatgcaatccacaaattaattttaaattttctagtagccatgttaaaaaatgaaaaagaaacaagtaagattactttaagaacatattttatttaacccaatatatccaaaatggtaccacgtcaatagggaattaatataaaartttattaatgggctattttacattcttcagttcatcctatgtctttgaaacctggtatatattttacacatacggcacatcctaattcagattaggcacatttcaagtgctcaatagcagcacgttgctagtggctatcaatcatactgaacatcacaactcgaaacaatcataaaaaaatcaggtacaaaaagaatctcatctaactggaaaatagggaactcatatttactgaacatctattaggtgacagccactgagctctcatgtcatttactcctcaccgcaattctgccacatagatactattatctacttttttttttcttttttctttttgagacagggtctcactctgttgtccaggatggggtgcagtggcatgatcacagctcactgcagcctcaacctcccaggcttaagtgatcctcccacctcagcctcccaagtagctgggaccacaggcatgcacaaccactcctggctaatttttaaattttttgtagagctggggctttcttatgttgctcaggctggtcttgaactgctggactgaagtgatccttctatctcagcctcccaaagtgctgggattacacatgtgagccactgcacctggtctctatctttctttttgagagagaaactgaggctcggaatgtttaaataaattgtgtttcactaagaagtggcagaaacagcatttaaactcaaggccg

SEQ ID NO: 27814 - DNA, 789 bp, Homo sapiens
cacggggacgcccctccaggaacccgaggtcgatcggtgcgcgagaggagcgtccggcccagccctccctccggtcctccctcccgataccgctgggtggcgcgcgccgcccccagtcttgtcttcccctctggctccgtcggactccagccccaggcctttgacctccttgtcccagcgtccagagctcttctcccttcctgccttgagtcttgaccggattcccaaatccctccccctttcctacctcggcccctgtggtcactgaccaccgtggttctgcgcccttccaccagaccctgggcttggggaccagatgaccccagccttgcgcacagcatttaaacgtggggtggcgggtgtccgccatgctctgctgtgtgacgttgagcaggtcccgcgcctctctgagcgccagtttcgatcctcatctgggcaagtgcagccctgccactgggctggagtcaccacttttaatattactgtgtgctcccagggatgcggacggcactgggcagagcttcgggatgcctacagggctgatgtggggactatgatgggtctgggagttcctgaggcccccacccaccctgaccacgacgacagaagtgctctgaccactcatgccaaatagtttaatgttagggggaagggagaggtaaggcagggttttcgggagttacccccaaagcaagagggcacagtattcwggctgctggggttgggagatagaagtcctggttccaagctatgccatgtcccagccttgctgtgaccctgggcaggtag

SEQ ID NO: 27815 - DNA, 577 bp, Homo sapiens
tgcaatgattgctgtcatttgcggctaagttgtgaagtgatttattaccagcaacagctaatgagaagagcagccatatcctatttctggggcagcagaggcagcgagacaactacagtgtctagtggccatcgccagcatggcctcatcagaccggttccgtggtgtcactgtggctgggttaccattgctggccagttgccaggattcttcctgctcactttccaatcctgattccccagttcactcctgggattctgtgagtgaccccaaatcctctcaataaattccctttctgcccctgaggtagcatctgttgcttggaactaaatctgtgawaattctctttctttcttttctttctttctttcttccttcctttcttttctttctctccttccttccttccctccttccttttcctctctctccctcccttccttcctttttttttttttttttcagagttttgctcttgttgcccaggctggagtgcaatggcacaatctcggctcactgcaacctccatctcctgggttgaagtgattctcttgcctcagtctcccgagtagctggg

SEQ ID NO: 27816 - DNA, 577 bp, Homo sapiens
tgcaatgattgctgtcatttgcggctaagttgtgaagtgatttattaccagcaacagctaatgagaagagcagccatatcctatttctggggcagcagaggcagcgagacaactacagtgtctagtggccatcgccagcatggcctcatcagaccggttccgtggtgtcactgtggctgggttaccattgctggccagttgccaggattcttcctgctcactttccaatcctgattccccagttcactcctgggattctgtgagtgaccccaaatcctctcaataaattccctttctgcccctgaggtagcatctgttgcttggaactaaatctgtgataattctctttctttcttttctttctttctttcttccttcctttcttttctttctctccttccttccttccctccttccttttcctctctctccctcccttccttcctttttttttttttttttcagagtttygctcttgttgcccaggctggagtgcaatggcacaatctcggctcactgcaacctccatctcctgggttgaagtgattctcttgcctcagtctcccgagtagctggg

SEQ ID NO: 27817 - DNA, 542 bp, Homo sapiens
ggctggtctcgaactcctgagctcaagtgatacacctgtcctggtacctcccagaatgctaggattataggcatgagtcacatgctggcttcttgaaagtcttttaatggtatccctgctgtctcttagcgtctcttatctgtgtcttccggggcctcttctatctctctctgtgtctagttcttagggtccctgtccctctgtgtctccaattcccagggtctctcttggggtctctgttactcttttctcttttgagacagggtcttgctctgtggcccaggctggagtgcagtagtgcaatcagggctcactgcagccttgaactcggttcaaacgattctcctgcgtcacgctcccaaagtgctggaattactggtatgagccaatgtgcctggcctctgtcactcttatctgtgtcccccagagtctctggtctctgctctgtscctcttatattctctgtctctttgtaacagctttattgagacattattcccataccatacaatctacccatttaaagtgtacagttcagtggc

SEQ ID NO: 27818 - DNA, 1299 bp, Homo sapiens
tacactgatgggaaacatgtccccaccttgggggcctccaagtctgatggcagaggtcttcctcccatccttgggaagctctagtccaatgagggaggcactcccccaccatgtcagtgccttccttcccgtaccttctccctgccctctggctgcccgaatgagcagggcagggggcttcccctccccacctccctggtgaatcctagaatcagggaacttctrcaggaggacaccacggttccccagccctgggacttccctttctccgtcagcccaaacccagggcctcactgggggggccagacatgcctgccctgctgatcatggctcacctatcaccccagcccccatgacatcacctggttattgcatgtccacagcatcccaggctccgcggggactttccatgcttgacctcgccagtgccctaccctgagagggaggagtctgtccccactttacaaacaaagcttagagggcatggcactcttgccagagaccacacagccagaaactggcagagtggggaacagaccaagtgggtctgactccagagccccagctccttaggaatgaggatgaggatgatgtacgtatacagtcctcattttctgccaggcaatcctgccaagggctatattgctgactcactagctcttctcggccatggtgttattattctcattgtcattattctgtaactcagacagggaaactgaggcccaaagagatagatgagtatgtagcagagccaatactcagtcaggttgtctgactccagtgccatcgtcacagctcagctcccccagaagacagatgattatacggaattgggcatgcgaaagatttatggaccagcctgggaaacgtagcaaaatcccatttctgcagaaattttcgaaattagccaggcatggcttggtgcggtggctcacgcctgtaatcccagcactttgggaggctgaggctggcagatcacctgaggtcaggagtttgagaccagcctgaccaacatcgagaaaccccgtctctactaaaaatacaaaattagccaggcgtggtggcacatgcctgtaatcccagctactcgggaggctgaggcaggagaatcgcttgaacccaggaagcagaggttgcggtgagctgagatcccgccattgcactccagcctgggcaacaagagcgaaactccgtctcaaaaaacaaaaagaaaaagaaattagccaggcatgatgacacacacttatagtcccagctactcaggaggccgaggtgggaggatcacgcctgtggtcc

SEQ ID NO: 27819 - DNA, 596 bp, Homo sapiens
cacagtggctcatgcctgtaatcccagcactttgggaggctgaggcaggcagatcacctgaggtcaggagtttgagaccagcctagccaacatggcaaaaccccatatctgctgaaaatacaaaaattagccctgcgtggtggtgggtgcctgtaatcccagctactcgggaggctgattcgggagaatcacttgatcctgggagacggaggaagaagtgagccaagattgcgccactgcactccagcctgggcgacagagcgagactcaggctccaaaaaaaaaaaaacaaaacaaaaaaagaaaggaatggagacatgaaagactgatgaagcttgatgtctttcagtgcatttatttattgctaaaacccacaaagcatcaaaacacagagcctgccgggcrcagtggctcacacctgtaatcccagcactttgggaggccaaggcgggcggatcacctgaggtcgggagttcaagaccagcctgaccaacatggagaaacgccgtctctactaaaaatacaaaaaaatcagccaggtgtggtggtgcatgcctgtaatcccagctactcaggacgctgaggcaggagaatcg

SEQ ID NO: 27820 - DNA, 556 bp, Homo sapiens
tcccctgggcaccctggcatagccagatgacttccgtgcccctgttgcaataaccactgcttccaagtctctatagaccaccccttgggtatatctaatgtaagtgatatttattttatttattttttgagtcagagtctcrctctgtcacccaggctagagtgtgctgatgtgatcttggctcactacaacctctgcctcctgggttcaagcgattctcatgcctcagcctcccaagtggctgggactacaggcatgcaccatcacgcccagctaatttttgtatgtttttcagtagaggtggggtttcaccaagttggccgggctggtctcaaactccccacctcaagtgctctgcccacctcggcctcccaaagtgctgggattacaggcatgagtcgtggtgtctggccctaatgtgagtgatctttaacaatgaggacttgaaaaagaaaaccctgaagaaacctaattctttgatgtctggatgacaaggaagaagatagaaatggcaccagataataaacagtgtaaatgtttatcagaaagaggctgg

SEQ ID NO: 27821 - DNA, 824 bp, Homo sapiens
agacagaactcacccattgccccagttgctgcaagagatcagtgagcacaatgggcctggtgggtacttccacttggtcactcactacttctgacctgagggttgcaggaggtctacttcagaccctacctccaataacaaacttaaaaaaaaaaagtggtgggtaagtgattcacacctataatcccaacactttgggaggctgaagtgagacgatcacttgagtccaagagttggagagcagcctgggcaactagtgaggcctgtcgccacaaaaaattaaaaaacaccaactagccaggcatgacagcgtaggcctgtgctcccagctattcgtgaggctgaggcaggaggactgcttgagccaaggaggtccaggctgcggtgagccttgattgctcygctgcattctaccttgggcatcagagagaaactctgactcaaaaagagaaaagaaagacattaaacaaattaaattctgcaaagtttatatgagcaaaggccaattcataaatctcgcagcactcagaaccttcatgcaatgtagacaggccttctttattaatagaaagaggacgttacatacagaacagctcgattggttacagctcagaatttgccttacatggtcaatgctctgatcagttggcaacctctgattggctaaagctcagctgctttagccaattggcgagactcagctactttttataagaatatactcttagttaagtttctacatatggaagcagtttggggtcaaatttaatttaatttagcagaggaaaagacctttgccactcaagaacaggaatcgtggatcc

SEQ ID NO: 27822 - DNA, 824 bp, Homo sapiens
agacagaactcacccattgccccagttgctgcaagagatcagtgagcacaatgggcctggtgggtacttccacttggtcactcactacttctgacctgagggttgcaggaggtctacttcagaccctacctccaataacaaacttaaaaaaaaaaagtggtgggtaagtgattcacacctataatcccaacactttgggaggctgaagtgagacgatcacttgagtccaagagttggagagcagcctgggcaactagtgaggcctgtcgccacaaaaaattaaaaaacaccaactagccaggcatgacagcgtaggcctgtgctcccagctattcgtgaggctgaggcaggaggactgcttgagccaaggaggtccaggctgcggtgagccttgattgctccgctgcattctaccttgggcatcagagagaaactctgactcaaaaagagaaaagaaagacattaaacaaattaaattctgcaaagtttatatgagcaaaggccaattcataaatctcgcagcactcagaaccttcatgcaatgtagacaggccttctttattratagaaagaggacgttacatacagaacagctcgattggttacagctcagaatttgccttacatggtcaatgctctgatcagttggcaacctctgattggctaaagctcagctgctttagccaattggcgagactcagctactttttataagaatatactcttagttaagtttctacatatggaagcagtttggggtcaaatttaatttaatttagcagaggaaaagacctttgccactcaagaacaggaatcgtggatcc

SEQ ID NO: 27823 - DNA, 1627 bp, Homo sapiens
aaacagatgcacgaggtttgaataaagattcatctgagggtctgcacttgctttcccctccttacgtattgttcgttgaagtgattttttaaaacccaggtctgaccctatcatctctgatgcttacaatctttccaaggcttccctttacctatggacaaggcattttaacatgatagaaaatgtcctttcagcccattcccaactcagcaggccgctggcatgcacacacgcgcacctccaagtgtgtgtcccatgctcatgtggctatgctgtctcgtagtctccaagtcactgagggtcccattgctggggctaggtgtggtgtgcatggttctttccaaggagatggagggatgccagccctttgcctggtgaggtttgggacgaggtcttgccgtaaccagatgctatgctgcaatgccaggtgtgggcgctggaagtctgtgtaaccccttagtgtcctttcccaccccttccccacccctttaggctagaatgtaatgccttaatattcacactgtggtccaagtgccagcaatgccagcctcacctgggagctccttagcaatgcatcacactaggtcctaccctggacttactgtgtcagaaactctagggtggatccagctgttgcgtttgaacctctgggtgattctgatgtacatttgagtttgctgtaggtgaacacagcctggctcttctaggtcccactgacgtattgaagcagaatgtgcatgttaacaggaacccatgatttctgtgctcagcaccgttcagaacctgcttccttgattgcacatattacattcctactgagctcttctaggtaggtgggcagctaggaggagcagtatagacagaggccttgcttttaaaaagcctgcattccagatggagggtggcatgacaataagaaggggggaaaagcaggtaaaacagtggcagagtaatggctctgaatcaaaggaaacagccaggtgggaggacaggggagagagagagagacaagagacagagaggaaggtagagaggcagagagagggaagtagagagagagaggagggacaaggtaaagacagcatggccagtgaggcctctctctaggaggagctagcctgtgctcacctgggaccatgttgcacagagggtgttgtgagatgactgggctcactgcgcagtttctgactcagtaggtctggggtgrggcctcagcgtgttgcgttgtcgacaggctcccaggaggtgttgctgctgctggtttgagaaccctagatctaggagaccattccagaaacatggcacatgtatttagaccttgggctttggggcaggcgtgggtgggacaggctgttcagcacagcctgggggcagaggaaggtgggacgttgggggccaagtctggcaggtcagcaggtgccttgtgggctgtgggattttgttctcttggcccaagagagctagtggtgggttgtggcaggggagagatgtggggcctgatttgcatttgtaaaaatgcaaattatattgctttgattttctattcaaggacagattgggaggcagaggtagaagcaagggaggttaagaggctacggtggtggtcagtcccttccagagatgacgg

SEQ ID NO: 27824 - DNA, 880 bp, Homo sapiens
ctgtagtacaacctcagtgggagaagaagaaagaggaccaaggagaaatgattgtaagagggaaagggtccaagctaatagaagggattacaacaggatttagttttctcttttaacaggaattttctcatctgacaagacatctggatgtaggcaggtccagggctcattcagctgcttatcaaggtcactgaggacttcattgttctctggtaggctgtatgcaccgtgtagacgtgatggtccctcatgctgtcaaggaggctgcagttgttccttgtatcacatcctcttacaatgtgcaaaagtagcaagagacaggttcactctctctgtctttctctctctgtctttctctctctctctctaatgcctctctccttttatgtggaaagaaaatctccctagggagtttttccactggactctgcttactcatcactgcccagagggagacacatagctamccccaactacaagggaatgtgagataacaagagtctgacgtttccatcttatttcatgaaaggcagtctttgtcaggatgtcagaatcaggaggggaatggacctggggcaggcatccgggagtatctgctatggtggtctaatcagactacctcatctctaggtcccagtggagagcatttgacctcagccaagtcaatcagtgccctgacctggggtttcttaattaaaaatgggcaaaaaaataataattaaaaatgctttatgctaatagaattgaaaaagctgcaaacctaaagctgccagcctccaaagttccagacttttggagaaatccagtttgataaaatcgaagctgaaacacagagagaggtggcatgagagatgggcagggattttcccatctgactctg

SEQ ID NO: 27825 - DNA, 880 bp, Homo sapiens
ctgtagtacaacctcagtgggagaagaagaaagaggaccaaggagaaatgattgtaagagggaaagggtccaagctaatagaagggattacaacaggatttagttttctcttttaacaggaattttctcatctgacaagacatctggatgtaggcaggtccagggctcattcagctgcttatcaaggtcactgaggacttcattgttctctggtaggctgtatgcaccgtgtagacgtgatggtccctcatgctgtcaaggaggctgcagttgttccttgtatcacatcctcttacaatgtgcaaaagtagcaagagacaggttcactctctctgtctttctctctctgtctttctctctctctctctaatgcctctctccttttatgtggaaagaaaatctccctagggagtttttccactggactctgcttactcatcactgcccagagggagacacatagctacccccaactacaagggaatgtgagataacaagagtctgacrtttccatcttatttcatgaaaggcagtctttgtcaggatgtcagaatcaggaggggaatggacctggggcaggcatccgggagtatctgctatggtggtctaatcagactacctcatctctaggtcccagtggagagcatttgacctcagccaagtcaatcagtgccctgacctggggtttcttaattaaaaatgggcaaaaaaataataattaaaaatgctttatgctaatagaattgaaaaagctgcaaacctaaagctgccagcctccaaagttccagacttttggagaaatccagtttgataaaatcgaagctgaaacacagagagaggtggcatgagagatgggcagggattttcccatctgactctg

SEQ ID NO: 27826 - DNA, 880 bp, Homo sapiens
ctgtagtacaacctcagtgggagaagaagaaagaggaccaaggagaaatgattgtaagagggaaagggtccaagctaatagaagggattacaacaggatttagttttctcttttaacaggaattttctcatctgacaagacatctggatgtaggcaggtccagggctcattcagctgcttatcaaggtcactgaggacttcattgttctctggtaggctgtatgcaccgtgtagacgtgatggtccctcatgctgtcaaggaggctgcagttgttccttgtatcacatcctcttacaatgtgcaaaagtagcaagagacaggttcactctctctgtctttctctctctgtctttctctctctctctctaatgcctctctccttttatgtggaaagaaaatctccctagggagtttttccactggactctgcttactcatcactgcccagagggagacacatagctacccccaactacaagggaatgtgagataacaagagtctgacgtttccatcttatttcatgaaaggcagtctttgtcaggatgtcagaatcaggaggggaatggacctggggcaggcmtccgggagtatctgctatggtggtctaatcagactacctcatctctaggtcccagtggagagcatttgacctcagccaagtcaatcagtgccctgacctggggtttcttaattaaaaatgggcaaaaaaataataattaaaaatgctttatgctaatagaattgaaaaagctgcaaacctaaagctgccagcctccaaagttccagacttttggagaaatccagtttgataaaatcgaagctgaaacacagagagaggtggcatgagagatgggcagggattttcccatctgactctg

SEQ ID NO: 27827 - DNA, 880 bp, Homo sapiens
ctgtagtacaacctcagtgggagaagaagaaagaggaccaaggagaaatgattgtaagagggaaagggtccaagctaatagaagggattacaacaggatttagttttctcttttaacaggaattttctcatctgacaagacatctggatgtaggcaggtccagggctcattcagctgcttatcaaggtcactgaggacttcattgttctctggtaggctgtatgcaccgtgtagacgtgatggtccctcatgctgtcaaggaggctgcagttgttccttgtatcacatcctcttacaatgtgcaaaagtagcaagagacaggttcactctctctgtctttctctctctgtctttctctctctctctctaatgcctctctccttttatgtggaaagaaaatctccctagggagtttttccactggactctgcttactcatcactgcccagagggagacacatagctacccccaactacaagggaatgtgagataacaagagtctgacgtttccatcttatttcatgaaaggcagtctttgtcaggatgtcagaatcaggaggggaatggacctggggcaggcatccgggagtatctgctatggtggtctaatcagactacctcatctctaggtcccagtggagagcatttgacctcagccaagtcaatcagtgccctgacctggggtttcttaattaaaaatgggcaaaaaaataataattaaaaatgctttatgctaatagarttgaaaaagctgcaaacctaaagctgccagcctccaaagttccagacttttggagaaatccagtttgataaaatcgaagctgaaacacagagagaggtggcatgagagatgggcagggattttcccatctgactctg

SEQ ID NO: 27828 - DNA, 1095 bp, Homo sapiens
cccaccctctaagtagagcactgttacaagaagtgctgcacaacttttcttcttatgcattagggtgggagagaaggaaagaaatccatgtgcctaacaagcactgggttaggtgaggagtcaggggataacaggcaataaagttgagaattggagaattgatgaaattacacacagtgaaagacagaaagtactagaacacaccaggtttgcaatcccccttggtaggtggagggaagtgagggtggcggagtttgagaaaacactgagatttgcagttacccaatctgctcactaggtggtaccatcttcctaggacagcttggttgccaactgccaggttggagttgggtggggtggggtgggggtgggggaacaacctcctggggaggggcaagggtgggtttaggtgtctggcagctggtggtgggatatttaaagtgcggatgaccctaaactgtgtggcagtctgtaatttccctttggccttacttagataatatgtcataatgtgtgaagacacacatgtatgacacaggagaacatttgatttaatacagtgtctagcttgcagtctcaaatgtaaacacttaggtcttctcaatcagtaggagacctgatcagcatccaagtgaataaaaaataggccaaagacattttagacaccgtcttgttgacaatgaactcttaccactcaaggcttagtaaatatacttaagtgtttatgaaaatgaatacactaaacttatgaaaatggtttattacagaaactagaagaaaaagttagaaaatagatgcatacttttagtaacatccaagaagacacaatctctataaagacaggacagaaagtcagaaggaaaaaaaatgctgaaaygaaaagtaagaaaagataataaacacttacatggagattgctatacaccaaacactggagttcatgtatattaacgtattcagtctttgcaataatcatgtaaagtgaaaaccattattatccttatatctcagatgataaaattgagatagagttagagatagagatagagataggaatttaatgtggttcactaatttgacagtctgtaaggatcc

SEQ ID NO: 27829 - DNA, 530 bp, Homo sapiens
tgacctgagacaagattcccaacttcccagatggctctcctgcattatctcctgtaaaatagggacagtgatagctgtttgccaacctcacacatcagccttaatttttttttacactggataatgtatgggaaagggggcttgaaatggtaagaagcattcaaaatttgacattctcattctcgagttatgtgatgtaaaagcataatgtctagggctaggtgacctgaatttaagcctctgcctcttactgactgcgtgaccttgagcaggctacttagttcaactttcgtcatctgcaaaatgtggctgctataacaatacttctaaaagttttgaggattagggttggttccaagtctttgctattgtgaataatgccgcaacaaacatacgtgtgcrtgtgtctttatagcagcatgatttatagtgctttgggtatatacccagtaatgggatggctgggtcaaatggtatttctagttctagatccctgaggagtcgccacactgacttccacaatggttgca

SEQ ID NO: 27830 - DNA, 530 bp, Homo sapiens
tgacctgagacaagattcccaacttcccagatggctctcctgcattatctcctgtaaaatagggacagtgatagctgtttgccaacctcacacatcagccttaatttttttttacactggataatgtatgggaaagggggcttgaaatggtaagaagcattcaaaatttgacattctcattctcgagttatgtgatgtaaaagcataatgtctagggctaggtgacctgaatttaagcctctgcctcttactgactgcgtgaccttgagcaggctacttagttcaactttcgtcatctgcaaaatgtggctgctataacaatacttctaaaagttttgaggattagggttggttccaagtctttgctattgtgaataatgccgcaacaaacatacgtgtgcgtgtgtctttatagcagcatgatttatagtsctttgggtatatacccagtaatgggatggctgggtcaaatggtatttctagttctagatccctgaggagtcgccacactgacttccacaatggttgca

SEQ ID NO: 27831 - DNA, 632 bp, Homo sapiens
cattatctggatttagaaaagatcgtgttaacacccttgttcagagattgccacaggatgtcacatattcttctgagagctattacctgagagtcttattatctgcttaataagaggacaatgtttatttgtagtaaatttcctctccttaccctccaatggtttgtcaccatcatcttccatgaactcctagcccctatacttttctgtatggtacagaaatttctgtcatctgtcccatttacaagtctcatattttatgtggcttccatatatatgtgcacatactacrcttctatgccttttctcttgttaatctgtctattgtcagtttgttttatagactcaaattattgagccttcaaagcgagagaagaaaatttcctcttcctgtacaccacaactgcttcctagatgagtttctagtatttagtctgataatgctacaaaccatttttaaaaccctacttgtcagaattgtgcttctaaaactgttttcaaagcttcaaagtcattctggagtttattaatgacttaaagagaaaatgaagcacaatgacatgatcaatacggatataaccccctttttattgcctgctcctcttctccttacatgaatggttatgctctca

SEQ ID NO: 27832 - DNA, 632 bp, Homo sapiens
cattatctggatttagaaaagatcgtgttaacacccttgttcagagattgccacaggatgtcacatattcttctgagagctattacctgagagtcttattatctgcttaataagaggacaatgtttatttgtagtaaatttcctctccttaccctccaatggtttgtcaccatcatcttccatgaactcctagcccctatacttttctgtatggtacagaaatttctgtcatctgtcccatttacaagtctcatattttatgtggcttccatatatatgtgcacatactacgcttctatgccttttctcttgttaatctgtctattgtcagtttgttttatagactcaaattattgagccttcaaagcgagagaagaaaatttcctcttcctgtacaccacaactgcttcctagatgagtttctagtatttagtctgataatgctacaaaccatttttaaaaccctacttgtcagaattgtgcttctaaaactgttttcaaagcttcaaagtcattctggagtttattaatgacttaaagagaaaatgaagcacaatgacatgatcaatamggatataaccccctttttattgcctgctcctcttctccttacatgaatggttatgctctca

SEQ ID NO: 27833 - DNA, 592 bp, Homo sapiens
tttttatcttacaattgtgcgtttgacattctctttgacatatcaactaamctgactccattcttgtattcctctgtctttttcacccaaactttttttctgtttctatctgaaattcctactttattatcaaaaatgcatcccaccttcaatttctttaatgattatttcctgcttcttccattcttaggagaaactagcttcccctgcagtactatcaggtagcaactgatctttctctaacagtttgtacactgcactgtgtagaagtggaactcttgtcttcctcactctgagtctctgctgaacaagtaagattctgctaacttataaacaggcaaaataaacaacaaaaccaacaaatatgcacatgcacacatacaactcaaacttctttcttgagttttgtctactacaatagtctaattttgactattatttacaaatatcctgattgtgcctcctcatttgctgaaacaattggatcctgttgagtcatgcagttgctttggcccacacaacacgttgaactcagtttgccgaggtctcatcatcttcaaacatcccctctacttcactctaacttttctcc

SEQ ID NO: 27834 - DNA, 592 bp, Homo sapiens
tttttatcttacaattgtgcgtttgacattctctttgacatatcaactaacctgactccattcttgtattcctctgtctttttcacccaaactttttttctgtttctatctgaaattcctactttattatcaaaaatgcatcccaccttcaatttctttaatgattatttcctgcttcttccattcttaggagaaactagcttcccctgcagtactatcaggtagcaactgatctttctctaayagtttgtacactgcactgtgtagaagtggaactcttgtcttcctcactctgagtctctgctgaacaagtaagattctgctaacttataaacaggcaaaataaacaacaaaaccaacaaatatgcacatgcacacatacaactcaaacttctttcttgagttttgtctactacaatagtctaattttgactattatttacaaatatcctgattgtgcctcctcatttgctgaaacaattggatcctgttgagtcatgcagttgctttggcccacacaacacgttgaactcagtttgccgaggtctcatcatcttcaaacatcccctctacttcactctaacttttctcc

SEQ ID NO: 27835 - DNA, 586 bp, Homo sapiens
aagattcctgcttgtaagtctatttctcaggtgttaaaattagggaaatcatgtgtgggatggttttttttgaattaaattaatgcttttaaatgaagcatctgacttgccttctggcacaaaaatatattaagtcgtcttttctggattggaaatcccctagaataaaaacaacttttctcagtcatttgatttatcagtaaattaaattatamatgaatagtcaattataattttatgtctttgaattaaaaacatgatttttctgtatagatctattagctacaaaatattttcttcaacaattgtatttttagccataagatacatttaatttttgaaagactattaaaagtccaggcatgataaaggccaagaaagacactgtaaagattatgttaaatcctaatacgtgataaaaataaatcagtataaatcataaattatatgtaatctcacaaagtttaaattttctcaataataattttttgatatatcacattttatttcctaaaagataaaaacccattacttatcctgaaattcaggaatattcatcacttgttcaacctatttttattattat

SEQ ID NO: 27836 - DNA, 1120 bp, Homo sapiens
ggatccatcaaatttttaggaatacatttagcaaaggatgtacaaggcctttacactgaaaactatagaatatgggtgaaagaaattaaaggaggctttaaaatattagttaattagatacaatgcaaagtcttctaatccataattcatagagctcataaaccaaatctagcctgtagtctgcttttgtaaaaaatttgattagaacataaccctctcatttacttacattttgtgtatggccactcatacaacaatcacagagtagagcttgtgaacagatgcatggactgctaaccctaaaatattttctatctagctcattgcagaaaacgtttgctgaccccttatgtataarattataattataattaatttttgtcttttaaccttgtatcctgtgatcttgctaaagttactaattaattctagtagttgttttgtagattcccaggggaagtgttgactctactgagggaagaaaggtattagacaacgaagtagctactgcacttaggaaacacatttcagcagtttccgggacaagatgtgtaggacttgatcccaagtgggttaaacaaagggcagtagagcataaagtttcataatgcaatatatataaatatgaggacactctccaatgatgcgggagttaagtctttgataaagacctcaagagatggaactaatatattgcaagaacagatattacgctcctggcatctgtgtgggcattagttctctgcccccaagttctaagtgataatgccattaagcccataaaaaatggtgcatatacagtgtttttttttcttttcttttcttttttttttttttttttttttaacacagctgaggaacatgaagcttgggaagcctgccttgtatagaaaatggttagcaggcctgttcattatccccaagagaaaaactgtatcattcatcaatggtgtccactgcaaatgcagcactgtcaaaagtccagagtgcaaaggtttctaaatctggaaggagctcaggttaccacctgcttgagcttggtcagactgagcactcacacaatgtcaggaaaagtgaatttattacttacaaataggcagcaaggataaaaagaagccta

SEQ ID NO: 27837 - DNA, 1120 bp, Homo sapiens
ggatccatcaaatttttaggaatacatttagcaaaggatgtacaaggcctttacactgaaaactatagaatatgggtgaaagaaattaaaggaggctttaaaatattagttaattagatacaatgcaaagtcttctaatccataattcatagagctcataaaccaaatctagcctgtagtctgcttttgtaaaaaatttgattagaacataaccctctcatttacttacattttgtgtatggccactcatacaacaatcacagagtagagcttgtgaacagatgcatggactgctaaccctaaaatattttctatctagctcattgcagaaaacgtttgctgaccccttatgtataaaattataattataattaatttttgtcttttaaccttgtatcctgtgatcttgctaaagttactaattaattcyagtagttgttttgtagattcccaggggaagtgttgactctactgagggaagaaaggtattagacaacgaagtagctactgcacttaggaaacacatttcagcagtttccgggacaagatgtgtaggacttgatcccaagtgggttaaacaaagggcagtagagcataaagtttcataatgcaatatatataaatatgaggacactctccaatgatgcgggagttaagtctttgataaagacctcaagagatggaactaatatattgcaagaacagatattacgctcctggcatctgtgtgggcattagttctctgcccccaagttctaagtgataatgccattaagcccataaaaaatggtgcatatacagtgtttttttttcttttcttttcttttttttttttttttttttttaacacagctgaggaacatgaagcttgggaagcctgccttgtatagaaaatggttagcaggcctgttcattatccccaagagaaaaactgtatcattcatcaatggtgtccactgcaaatgcagcactgtcaaaagtccagagtgcaaaggtttctaaatctggaaggagctcaggttaccacctgcttgagcttggtcagactgagcactcacacaatgtcaggaaaagtgaatttattacttacaaataggcagcaaggataaaaagaagccta

SEQ ID NO: 27838 - DNA, 1120 bp, Homo sapiens
ggatccatcaaatttttaggaatacatttagcaaaggatgtacaaggcctttacactgaaaactatagaatatgggtgaaagaaattaaaggaggctttaaaatattagttaattagatacaatgcaaagtcttctaatccataattcatagagctcataaaccaaatctagcctgtagtctgcttttgtaaaaaatttgattagaacataaccctctcatttacttacattttgtgtatggccactcatacaacaatcacagagtagagcttgtgaacagatgcatggactgctaaccctaaaatattttctatctagctcattgcagaaaacgtttgctgaccccttatgtataaaattataattataattaatttttgtcttttaaccttgtatcctgtgatcttgctaaagttactaattaattctagtagttgttttgtagattcccaggggaagtgttgactctactgagggaagaaaggtattagacaacgaagtagctactgcacttaggaaacacatttcagcagtttccgggacaagatgtgtaggacttgatcccaagtgggttaaacaaagggcagtagagcataaagtttcataatgcaatatatataaatatgaggacactctccaatgatgcgggagttaagtctttgataaagacctcaagagatggaactaatatattgcaagaacagatattaygctcctggcatctgtgtgggcattagttctctgcccccaagttctaagtgataatgccattaagcccataaaaaatggtgcatatacagtgtttttttttcttttcttttcttttttttttttttttttttttaacacagctgaggaacatgaagcttgggaagcctgccttgtatagaaaatggttagcaggcctgttcattatccccaagagaaaaactgtatcattcatcaatggtgtccactgcaaatgcagcactgtcaaaagtccagagtgcaaaggtttctaaatctggaaggagctcaggttaccacctgcttgagcttggtcagactgagcactcacacaatgtcaggaaaagtgaatttattacttacaaataggcagcaaggataaaaagaagccta

SEQ ID NO: 27839 - DNA, 1120 bp, Homo sapiens
ggatccatcaaatttttaggaatacatttagcaaaggatgtacaaggcctttacactgaaaactatagaatatgggtgaaagaaattaaaggaggctttaaaatattagttaattagatacaatgcaaagtcttctaatccataattcatagagctcataaaccaaatctagcctgtagtctgcttttgtaaaaaatttgattagaacataaccctctcatttacttacattttgtgtatggccactcatacaacaatcacagagtagagcttgtgaacagatgcatggactgctaaccctaaaatattttctatctagctcattgcagaaaacgtttgctgaccccttatgtataaaattataattataattaatttttgtcttttaaccttgtatcctgtgatcttgctaaagttactaattaattctagtagttgttttgtagattcccaggggaagtgttgactctactgagggaagaaaggtattagacaacgaagtagctactgcacttaggaaacacatttcagcagtttccgggacaagatgtgtaggacttgatcccaagtgggttaaacaaagggcagtagagcataaagtttcataatgcaatatatataaatatgaggacactctccaatgatgcgggagttaagtctttgataaagacctcaagagatggaactaatatattgcaagaacagatattacgctcctggcatctgtgtgggcattagttctctgcccccaagttctaagtgataatgccattaagcccataaaaaatggtgcatatacagtgtttttttttcttttcttytcttttttttttttttttttttttaacacagctgaggaacatgaagcttgggaagcctgccttgtatagaaaatggttagcaggcctgttcattatccccaagagaaaaactgtatcattcatcaatggtgtccactgcaaatgcagcactgtcaaaagtccagagtgcaaaggtttctaaatctggaaggagctcaggttaccacctgcttgagcttggtcagactgagcactcacacaatgtcaggaaaagtgaatttattacttacaaataggcagcaaggataaaaagaagccta

SEQ ID NO: 27840 - DNA, 1120 bp, Homo sapiens
ggatccatcaaatttttaggaatacatttagcaaaggatgtacaaggcctttacactgaaaactatagaatatgggtgaaagaaattaaaggaggctttaaaatattagttaattagatacaatgcaaagtcttctaatccataattcatagagctcataaaccaaatctagcctgtagtctgcttttgtaaaaaatttgattagaacataaccctctcatttacttacattttgtgtatggccactcatacaacaatcacagagtagagcttgtgaacagatgcatggactgctaaccctaaaatattttctatctagctcattgcagaaaacgtttgctgaccccttatgtataaaattataattataattaatttttgtcttttaaccttgtatcctgtgatcttgctaaagttactaattaattctagtagttgttttgtagattcccaggggaagtgttgactctactgagggaagaaaggtattagacaacgaagtagctactgcacttaggaaacacatttcagcagtttccgggacaagatgtgtaggacttgatcccaagtgggttaaacaaagggcagtagagcataaagtttcataatgcaatatatataaatatgaggacactctccaatgatgcgggagttaagtctttgataaagacctcaagagatggaactaatatattgcaagaacagatattacgctcctggcatctgtgtgggcattagttctctgcccccaagttctaagtgataatgccattaagcccataaaaaatggtgcatatacagtgtttttttttcttttcttttcttttttttttttttttttttttaacacagctgaggaacatgaagcttgggaagcctgccttgtatagaaaatggttagcargcctgttcattatccccaagagaaaaactgtatcattcatcaatggtgtccactgcaaatgcagcactgtcaaaagtccagagtgcaaaggtttctaaatctggaaggagctcaggttaccacctgcttgagcttggtcagactgagcactcacacaatgtcaggaaaagtgaatttattacttacaaataggcagcaaggataaaaagaagccta

SEQ ID NO: 27841 - DNA, 576 bp, Homo sapiens
attattcaaacaagccaattacattctcaggtgggaaccacagggacacctcaccctcttgacaccaacaaacctgcctctcacggtccctgactgttctctctgttctgactgcaacccatgtgtggcacaatgtcctatttccccatactgtcagtatatggagctgacaacctgctctcaatatcatctgtcctgtgttacatgtcgtgtgtttggcctcccactaaccctagggtgggaattcacatgaaaattaatatttctcagttaaaatgtctttagaaacatatcaactttatgaaaaggtttaccarcttactaaatttgatacataattgttgtgatacaaatgtatattctggtcaaagctattatgcatagcttcatgctttcgttgacatattttggattgacatattttgtattaggtatatttatgacaggacctgtgggtaaccatatggagtatggttggttactccataaccagtggagtaaatacaaggcaataaaaacaaatggtgtcacaaacaaggtcatgcaaccatgaccaagaacatctcatcagcttta

SEQ ID NO: 27842 - DNA, 576 bp, Homo sapiens
attattcaaacaagccaattacattctcaggtgggaaccacagggacacctcaccctcttgacaccaacaaacctgcctctcacggtccctgactgttctctctgttctgactgcaacccatgtgtggcacaatgtcctatttccccatactgtcagtatatggagctgacaacctgctctcaatatcatctgtcctgtgttacatgtcgtgtgtttggcctcccactaaccctagggtgggaattcacatgaaaattaatatttctcagttaaaatgtctttagaaacatatcaactttatgaaaaggtttaccagcttactaaatttgatacataattgttgtgatacaaatgtatattctggtcaaagctattatgcatagcttcatgctttcgtygacatattttggattgacatattttgtattaggtatatttatgacaggacctgtgggtaaccatatggagtatggttggttactccataaccagtggagtaaatacaaggcaataaaaacaaatggtgtcacaaacaaggtcatgcaaccatgaccaagaacatctcatcagcttta

SEQ ID NO: 27843 - DNA, 571 bp, Homo sapiens
caagctcagaaaaattgactaaattgaaccagaagagcacagcagcactcaacttagaggaagtgctaacactacaatgaaagactgtggcacaattcattattagatcttgccttactgtcacttaattgtatttggtacatatatgctctaggagtattttttttacatttcttacaagtaaggtgaaaatcaaacaccaaatgaaacagtgatagttacacacttttcaacsaaaaatgtgtttatatgatattcaaatgtattcatgaagatgactagagaagtgttctcctaaggaactctacattggcaattaaagttgacttgatgatggtcactaatggacattagcatatttaaattcatgtgttgtttttattatcattttgtttgagatgcattttaaagtaaaaatcaaataaaatgttggcagagctctgaagaaagagaatgctaaagttaaaatatactggactaagtggcctcaatcttacctacagactcagacttaatttttttacattttacaagagaccgatctttgttaaagacattaagattgaacaat

SEQ ID NO: 27844 - DNA, 988 bp, Homo sapiens
aaagttaagccctgtaaaccttgtttgattaactctggaacacaatgttatactttttcctgctgaggtgctcaaaggaatgtggcatacttgaatgtagaaaaaaaaaaamaaaacatgaaatctgaggagttgggctgaaacttgaaatcctccactttcaggttactgagttttagttttctcatcctcaagatgaaatactcgccagatgcgctggctcatgcatgtaatcccagcactttgggaggctgaggtgggcagactgcttcaactctggtgttccagaccagcctggacaagatggtgaaaccctgtatctacaaaaaaatgaaaaacttagctgggcatgctggtgtgtgcctttggtcccagctactcaggaggctgaggtgggaggattgctggagcctgggaggcagaggttgtagtgagccgagactgcgtgactgcactccagcctgggtgacagggtgagaccctgtctcagaaaaacaaaagagatgaaagctgatgatctaaagcctcattcctagctggggtattttgttatgttaattaattgattaatatatgaattcaataactcactaattagctattaaacaacactatgctttctttattgtactaaacactttatgtacaaaagtgagcagaataaacagccactgccatcacagagtatgatcttattagcaaaatggcatatttttgacatcccattcttaataggccagtgacttccaaagattttacgctgcagattgtacaggaaacattgccaattttagagcaatttaaacaagaaaacagaaaaaagtcaaagaagaaagaagcagggatgaagtactgaaacaggaacaaacaaacaaatccagattatggtgagaatatacgataaaaccaagcatcaaatgccctgagctttctgatagctctggtaaaaatttaagagagatgggatgcaggatattttcaaaaagaa

SEQ ID NO: 27845 - DNA, 1299 bp, Homo sapiens
ttgcccctgcactacacctgctgtcttggcaatttgtcttttcagagtgggtacacactgaatgactttattaccattaatgcaacaatttctcagtaggtgaaaacattacattgctggagttaactaaagctgcctcccctgggggcaacagcagagggaacaacattgacatcatatccgtgaggttccagttctgactcatggcagccttgtcttgcccggaatgatgacccctgtctagaaggaaaaagcagagatgccaacgtccataggaacagcatgtaggagaaaaattagcttcccataaagcagggagtatttaaggagctttcgacaatcaggctgctgaacagggttgagagaatagcaactctgcttttggaattaaaatatcacctgcatcctaatgttttaagtaatcactaaccagaatatagatttatagttctttcaagtaccactgctttccctgcttccctatgagtgtgcacagagatttaatttgtccgaccacctctacctcccacacatgcactcaaactcacccacaggcttcaacaattgaatgtcaactagcaggcactattctagaaatgggcatataaacaagccaatcattatcttcactcttggaaggtttacattttagtgtagaaagagatcatcaatgcgtaagcaagtaaataggatatttcacaaagttataaatgctataagggaatacaatagtgtaggcgccaggcatggtggctcacacctgtaattccagtactttgggaggctgaggcgaggccatcacctgaggtcagaggttcctgcccagcctgggcaacacggtgaacaaccctgtctctactaaaaatagaaatattagtcaggtgtggtggcgcgtgcctgtaatcccagctactctggaggttgaggcgggaggatcacttgaacctgggaggtggaggctgcagtgagctaagatagcgccgctgcactctagcctggtgacagagagagactctgtctcaaaaaaaaatagggcaaagggtagcatgtaatgttggaagaatgttgctgattgagayatgagtgtctggaaagagtatactgcattgagtgagacctgcatgaggcctcaatgaaaaaatctgggcaaagctcatttcgggtagctggacccacatgttcaaagggcctggggtgggaacaagcgtggtgtgttcaaggaagggaaagaagtgacactgaccagtgaaaacctcccttttccttttggagtgatacaaaccgggtactcctggttca

SEQ ID NO: 27846 - DNA, 620 bp, Homo sapiens
ctgttctatccattatccttagcaaatcaggccttgcttggcaaaagaagtattaagtaaagataattccaaaacttattcagtcttatcattataatcattatcattgctattctactttatgaatcatcttttttctttgaaatcttacatattttcccccaaagagaagaaaacaaaaaagtaaaatgaactaaaagaagcattaaacatattctatccaggagatatgttagcaacagcaacttttatgaacacatgtaaaataaaataattacacaataatgtacatacacttattcaaacattctctgcaagttttcatgaaacttacaatatacaagtccttaaggcaaataatgttggcagaatgctggagtggtgaatagatcgcctatctgccacatcaagatagatcgcctatctatgggatctcattgggggtggcaccgcagatggactctagtccatgattaagttaggagaggacctagtgctccctaaactaaggcggtagaagtggtaggtcacgccattagttaatacaccaaatagctgtagccataagggtcagactcctgaccatgacagggagaggatcagtgcttyttaatcatgca

SEQ ID NO: 27847 - DNA, 518 bp, Homo sapiens
ttccctatataaaataggtgctttagatggtgaagatgcagcctgactgcrtggtcttgcatatttagaagcattttcagaaattctgaattttcctttaaactgtactacattcaatattttgtaattatagtagtggaattttaaatactattgtatcacagttcaaactaatatttcttaaataccctataaagattctgaatcagtgggtatggggtggagttcaagagactgtgtgtttaataaatatccaagtgattctgatacaggtttccaaagtacacattttgtggaaaactgttctaagtttctaaagagtctcaaaccttatctttggctctctaccctcactgccttcactccaccccataaataagaatcatattgtttaatcccaaatgctttggtcaaggtgataggcaactataggaagcagcaagggtgatgatcacaagtatatgttctctgttagagtgtctggagtcaaattcaggctttcccatgattagctatgt

SEQ ID NO: 27848 - DNA, 595 bp, Homo sapiens
ggatgtaattttttttttttttttttttttttttgkgacagtctcactttgtcatccaggctgaagtgcagtggcatgatctcagatcactacaacctccacctcttgggttccagtaattctcctgcctggccttcctgagtaactgggattatgggcacccaccaccatgcccagctaatttttgtatttttagtagagatgaggtttcaccatgttgatcaggctggtctcgaactcctgacctcaagcaattcacctgcctcggcctcccgaagtgctgagattacagttgtgagccaacatgcccagccaggatgtaattttttaaagttggtcatttagtcttactgtcatactttttaggttgagcattcctaatccaaaaatctgagatccagaatactccaaaatttgaaactttttgaggccagtattctaattttctaattagggatgctctttaatttttaaagttggtcatttagtcttactgtcatactttttaggttgagcattcctaatccaaaaatccgagatctaaaatgctccaaaatttgaactttttgagtgccagtattccaattttctaatt

SEQ ID NO: 27849 - DNA, 698 bp, Homo sapiens
tcactctgtcacccaggctggagtgcagtgatgtgatcacggctcactgcagccttgacctcttggcctcaagtgatcctcctgcctcagcctcccaaagcaccgggattacaggcataggtcactgcgcctagccttaccagccctttagtaataagcacttttcagagaattgaagctgttcrgcctggagatgaggcgcaatatcaccctggacactggaagtctggttggatgctggggtcagctaaaaacaaaacaacactggagagcagaggctgtggcttggctgccttgaccctgcaggaggagcttggactggccccaggtgatgctgcctttgctgtcctaggagaggcctggcagggtcctttccatcccagaaatgctgtgatcagagccaataagcacccactggaagcttcatctgcccaaaggagtctgccttcatcagcataattcattgcgcgccagcttcactcagtgactgttttggaaggtgaagggctatcagaaacaattttaagtccctgctttcaggaagtcaagcataacaaataatatgcacccatgagaactctccatgaggggctgaggtctctggggctctcgtgagctgtccacccagactgtgtgatagaacccagaggaggagagaacccgggactgggagggtcaagaatgaatccggagctggg

SEQ ID NO: 27850 - DNA, 698 bp, Homo sapiens
tcactctgtcacccaggctggagtgcagtgatgtgatcacggctcactgcagccttgacctcttggcctcaagtgatcctcctgcctcagcctcccaaagcaccgggattacaggcataggtcactgcgcctagccttaccagccctttagtaataagcacttttcagagaattgaagctgttcagcctggagatgaggcgcaatatcaccctggacactgraagtctggttggatgctggggtcagctaaaaacaaaacaacactggagagcagaggctgtggcttggctgccttgaccctgcaggaggagcttggactggccccaggtgatgctgcctttgctgtcctaggagaggcctggcagggtcctttccatcccagaaatgctgtgatcagagccaataagcacccactggaagcttcatctgcccaaaggagtctgccttcatcagcataattcattgcgcgccagcttcactcagtgactgttttggaaggtgaagggctatcagaaacaattttaagtccctgctttcaggaagtcaagcataacaaataatatgcacccatgagaactctccatgaggggctgaggtctctggggctctcgtgagctgtccacccagactgtgtgatagaacccagaggaggagagaacccgggactgggagggtcaagaatgaatccggagctggg

SEQ ID NO: 27851 - DNA, 541 bp, Homo sapiens
atgtagtaatacttttggatgcatgggccttgcaaaagtcacttaatctctttggcactaacatcttcacctatataaaggagtagagtagataatggccttgagtccctttcacttttaatattcctgactgaattcctaactgaattcaaagaaggcacaaggacgcactagtgtcaaaagacagaaytgggcatctccaaaggcttggcctagacaatggtggttaccattgatcaatactatatatatggctgggatgatgggatagagtacctactaaataaattttctgctaaaggaacccactatctaaggtgagctttacaaaagaattcactgcaaaattcctttgctaccagcagaataattcagtagtgatttgaaacatgtttaaatagtgtttttagagaaaacaggtcatgttgcaatggatgcctggaagtcattcccaggtgactcggatagaggtgatggattccacagaatttttataacctgcccaaccttaccaaaatgtgcattttctcatgtgaagttt

SEQ ID NO: 27852 - DNA, 541 bp, Homo sapiens
atgtagtaatacttttggatgcatgggccttgcaaaagtcacttaatctctttggcactaacatcttcacctatataaaggagtagagtagataatggccttgagtccctttcacttttaatattcctgactgaattcctaactgaattcaaagaaggcacaaggacgcactagtgtcaaaagacagaactgggcatctccaaaggcttggcctagacaatggtggttaccattgatcaatactatatatatggctgggatgatgggatagagtacctactaaataaattttctgctaaaggaacccactatctaaggtgagctttacaaaagaattcactgcaaaattcctttgctaccagcagaataattcagtagtgatttgaaacatgtttaaatagtgtttttagagaaaacaggtcatgttgcaatgratgcctggaagtcattcccaggtgactcggatagaggtgatggattccacagaatttttataacctgcccaaccttaccaaaatgtgcattttctcatgtgaagttt

SEQ ID NO: 27853 - DNA, 1061 bp, Homo sapiens
tgcaagaaggggagagtgacaagtcatcctcagctgaacatttgctgagtggtataacctgtaggcccagtctatgctgccatgggaatggagtgtggtgaatgagctcatcatgtgggtcccctgctgggtgtgggtcccctcctcagcatgggtcccctggggtttgcgagtaaacatggaaactgatgctaggaagggaggacagctggagcttcctgggccggcaggtgaagagggagctggcgcgtggtacgtgcctgaggacccaaaggactgagtggtcaggggtttctgcagctcctggtaaaggagactgggggcttccaaaagaggctgcagtgggttgaggaaggctcagttcaccctgagaagagagggactagtgtgggctgcccctctctgggtggttctcagagctgctagtaaactaagtcaaatgctaccctaagaaaaagtagacacaccaccaatacaaagaccaccacagcagcagaggctaccagcaccatgtggaaaggcactggccctttgggaggtgagggacacctctctaccactgccaggtggtcagatgtgtgacacatccactgcctgccttggatactggatgctagaggaggaaggagagacctagaacagagatgggaggatgtagacaattgctttgagatgctagggaggaggggggtgaatgagtaggccaagtgccttccccacttctggccctgtttcttgagtcatgggtccaacccacaccaggaggagggaagaaatgaggtttaaatcaagcaggagttttacattagactggacttttcatggccagaatgttttggtatctgctgaaatcatcattaccacatgggtaaggtagtggatttggctgagtacaactagaagtaaaaataaagggaaaaaggaggcattgcctgtcgatggcttaataaatcagttacctgttcattgaatcctcaaaagattcaatcactgaatcctcaaaagaatcatataaggcaggtactgtgacaatcccagttttagagaygagggaagcaagg

SEQ ID NO: 27854 - DNA, 1021 bp, Homo sapiens
aaacatcacactgtattccagaaatatgtaaagtattatgtgtccattataaattcaaaaattaactaacgaaaaaatgtctaagaatcaggcccmctgagataatagaactcagtaataatgtaaatataaaactttgttttcagaggctttttttttttttttgagacagagttttgctcttgttgcccaggctggagtgcatggcacgatctcggctcactgcaacctccgcctcccggattcaagtgattctcctgcctcagcctcccaagtagctgggattacaaacatgtgccaccaagcctgattaattttgtatttttagtagaggtgggttttcaccatgttagttaggctggtctcgaacttctgacctcaggtgatccactgtcttggcctcccaaagtgctggcattacaggtgtgagccaccgcacccagcctcattgttattttttaacaagcatgttcctaagtaatttataattgcaatatttccctattgtattagtttaggccttctgagggcttatcaaataaaaaattgggtcactgaatttcaaaaaaccaactaacttagttccatatggattatttgaaccgattgcagatgtcataaatgatatattaaagaatcataaaaaccacttcgatctctaatgcgattaatagtaacatagattattgcacctgttatggtcctgaccttgctttaacaatttgagtgtctactttatcattatatcagttaataggtttgtcttagtccattttgtgttgctataacagaatatcacagactggataatttataaagaaatgaaatttatttcttagagttcttgaggttgaaaactcccacaggcccgcatctggtgacggtcttcttgcagaaggtggaagagccagagattgcaagagagcaagagagtaagcaggggccactagcttttacagcaagcctacactcagcccacactcatgataattcacctgttcccatgataacaacattgatg

SEQ ID NO: 27855 - DNA, 520 bp, Homo sapiens
  misc_feature (1)...(520): n = A,T,C or G
ttcaacacaactcctggtcaagtctagctcttccactggcctatgcgttcagtgaaattgtggatcttgtctacaggtgaatcccgtgatagacagcttcccagtcnnnnnnnnnnnnnnnnnnnnnnnnnnnnnnnnnnnnnnnnnnnnnnnnnnnnnnnnnnnnnnnnnnnnnnnnnnnnnnnnnnnnnnnnnnnnnnnnnnnnttaaaggagtatcacgggcttgccatgaactacactgagtccagggccacyttggtcctgccccacctcactgggcccctgggaggtgggagattagattagattagaactgccaggcttcaggctagcactcccgagagagtgtgaccatcctgagagtcccttctcagagattccagtgtgaccatccaggttgatcccgagcacgaggagctcagagggtcccaggtgggtctgatgcataatccgggctgagaggctgagcttggagaggctgagcctggagaggctccgaaggccagggacctctttat

SEQ ID NO: 27856 - DNA, 3373 bp, Homo sapiens
  misc_feature (1)...(3373): n = A,T,C or G
gttcagacacagatgattagacacatggacagatgttccattcagagagacagatattctgacagatggacagaagtttagacagacagacactccagcagatgggcattctgacacacaagaagttccaacagaagatgttcatacagatgtttggacggactgacatttagacagatggacagaagttcagacagacggacattccaacagatggatgttgaaacagatggacaggcattcagactgtcaaatgtgcattctgacagacgggcgttatgacacacagatggtcagagatggactttccaacgtatggatattccgacagattcgtgttcagaaagatgtaaatggatgttcccaaaggagagactttcagacagacagatgttcctaccgatgggtgttttcacacacaaaaatgcagacacacagatgattggatagctcttcatactgatggacacattgaccaatagatgcttaaacagatagatatttggacagatggacattcagacaggaggtcatttgggcaggccaacagacatttagacagatcactttcagacagatggacagacattcagacagatagacatttggacagacagaccttgggacaggtggaaagattcacacacacattgtggcagatgggcatactgactgatggacattcagacacgtgaacagatattctggcaggtgggtgttttggcagacaggcattctgagaagacattcaaatggacagatggtggatggatggacaggaggaaacattcagataggtgggtgctcaaacagatgttcgctcagtcacaaagatgttcagacacacacatgttcttacaggtggatgttctgacaaacagaaattcagacgttattggaggatggaggggtgttcagaatgatgggcatcagacagacagagtgtcagagagctggatattcagacacatggccagatgtacagatagatatttggacagatgcccagatgccctgacagacagatggctgttgagacagaacaacattcagacaaatgaacagacagacattcagactgatggacttatggacatagggacagacattcacatagatggtttttcaagcagataggctgagtatctgatagacagactggatccatctgaaggtctgcaggtggacagatgttcagacaaacaggtgttttgggagaagggcgtgccaatgtacagcagttgtgacagatggatgttcaaatgcttgttcctgtagactgatgttcagacagatgatatgcattctgacagacagacattatgacaggacagtgaggaaaatggacgtttgggcagacagaggccattccagcagataggcgtgcctacagaacataccctgtgtgtcagatgctcgtacgtgggaatgtctgtctgacaagcygactttctgtatgttccagtgtctatctctctgtatgtctatctctctgcaactctgtccatccgcctaaacacctgtctgcctgaacatctgcctgtccgtctgggcatccatgtgtctgagtgtgcatgtgttggaattgctgtatgttggaattcccatctgtcataacatccatctgtctgaatgtgtttgtatgagaacccatccacgtgtctgaccatccttaagtctgaacatcttcatgttggcacacccatctgttggaacatcagtttatcaaaatgtctgttcatctctccaaacatttgtctatctgaatgtatgttcttctgtcctaatgtccccctgcctgccttcctgaatgtcaatgggtccaaacatctgtctgtctgaacgtccatctgttcactacagagtttataaaactcttgtgaaagtgtccctgtaggttgttacagaatcaggaggacttcaagtgaaacaggagactcgagagcaggtttggatgtgggattaggaagagaatttgaggtactattcacctgagaaccgaaggtgggatcatgactactaatcctgagaaaatgccccacacctaaccccagagcctggcatatcaaagaccaactccccttattgtttcatttttatgaggccaagcctatgtctgactgtcggctcctcctgtgggcagcctggtgagggagggaagctctagggagcccatgtctttcctcctggtcctgtgtgcacacagggaagatgggggctcgtgcctaaattaatgnnnnnnnnnnnnnnnnnnnnnnnnnnnnnnnnnnnnnnnnnnnnnnnnnnnnnnnnnnnnnnnnnnnnnnnnnnnnnnnnnnnnnnnnnnnnnnnnnnnnttgtttgtttgtatgtttgtttgtttttgagatggagtcttgctctgtaacccaggctggagtgcagtggcacaatcttggctcactgcaacctccgcctcccgggttcaagcagttctcctgcctcagcctcctgagtagctgggattacaggtgttcaccaccacgcccggctaatttttgtatttttagtagaaatggggtttcatcatgttggtcaggatgatcttgaactcctgacctcgtgatacacctgccttggcctcccaaagtgccaggattacaggtgagagccaccacacccatctgcaggcagcctttgtgacgatggtcacggtggagatgatgatggatgtgacaatgatggcggccgccagctgctggtgtttaatacctgccagagcttctgctgggtcttctacatgcactgtcacatatattactcatgcttatgttataaggtcagtattatgatccccattttagataataaaactgaactttagaatgaaaatgtcccttgtgtgagttcacttgtacattaaatgtcaaaattggaaataaaagccgtttctgactacagaattaatccattcaccccttcattacttacatcataactattacctactagcaggccaggcattgtactcagtgctagggaaaatacagtgagggaaaaaaggcataattcctgcttgtgtggactttcctctcccggggtcgtggaggcaaacatctataaaatatgtgtctagtcaaaacctggtgctaagggtgaggaagagaataggatggtaggtgttgagggcgtggcccagggcacctgatcagcctctttaggaggcttctcggaggaagccgcattgaaaatggggagagcgtgggttatgagatgaaggatgggttggggtacagcattccaggcagagggaaggacatactgcatctgagctactgcaggaagacccctgatgctgggataaagaaggagaagagaaaagtacagggtgaggctggacaagccagttcatttt

SEQ ID NO: 27857 - DNA, 3373 bp, Homo sapiens
  misc_feature (1)...(3373): n = A,T,C or G
gttcagacacagatgattagacacatggacagatgttccattcagagagacagatattctgacagatggacagaagtttagacagacagacactccagcagatgggcattctgacacacaagaagttccaacagaagatgttcatacagatgtttggacggactgacatttagacagatggacagaagttcagacagacggacattccaacagatggatgttgaaacagatggacaggcattcagactgtcaaatgtgcattctgacagacgggcgttatgacacacagatggtcagagatggactttccaacgtatggatattccgacagattcgtgttcagaaagatgtaaatggatgttcccaaaggagagactttcagacagacagatgttcctaccgatgggtgttttcacacacaaaaatgcagacacacagatgattggatagctcttcatactgatggacacattgaccaatagatgcttaaacagatagatatttggacagatggacattcagacaggaggtcatttgggcaggccaacagacatttagacagatcactttcagacagatggacagacattcagacagatagacatttggacagacagaccttgggacaggtggaaagattcacacacacattgtggcagatgggcatactgactgatggacattcagacacgtgaacagatattctggcaggtgggtgttttggcagacaggcattctgagaagacattcaaatggacagatggtggatggatggacaggaggaaacattcagataggtgggtgctcaaacagatgttcgctcagtcacaaagatgttcagacacacacatgttcttacaggtggatgttctgacaaacagaaattcagacgttattggaggatggaggggtgttcagaatgatgggcatcagacagacagagtgtcagagagctggatattcagacacatggccagatgtacagatagatatttggacagatgcccagatgccctgacagacagatggctgttgagacagaacaacattcagacaaatgaacagacagacattcagactgatggacttatggacatagggacagacattcacatagatggtttttcaagcagataggctgagtatctgatagacagactggatccatctgaaggtctgcaggtggacagatgttcagacaaacaggtgttttgggagaagggcgtgccaatgtacagcagttgtgacagatggatgttcaaatgcttgttcctgtagactgatgttcagacagatgatatgcattctgacagacagacattatgacaggacagtgaggaaaatggacgtttgggcagacagaggccattccagcagataggcgtgcctacagaacataccctgtgtgtcagatgctcgtacgtgggaatgtctgtctgacaagccgactttctgtatgttccagtgtctatctctctgtatgtctatctctctgcaactctgtccatccgcctaaacacctgtctgcctgaacatctgcctgtccgtctgggcatccatgtgtctgagtgtgcatgtgttggaattgctgtatgttggaattcccatctgtcataacatccatctgtctgaatgtgtttgtatgagaacccatccacgtgtctgaccatccttaagtctgaacatcttcatgttggcacacccatctgttggaacatcagtttatcaaaatgtctgttcatctctccaaacatttgtctatctgaatgtatgttcttctgtcctaatgtccccctgcctgccttcctgaatgtcaatgggtccaaacatctgtctgtctgaacgtccatctgttcactacagagtttataaaactcttgtgaaagtgtccctgtaggttgttacagaatcaggaggacttcaagtgaaacaggagactcgagagcaggtttggatgtgggattaggaagagaatttgaggtactattcacctgagaaccgaaggtgggatcatgactactaatcctgagaaaatgccccacacctaaccccagagcctggcatatcaaagaccaactccccttattgtttcatttttatgaggccaagcctatgtctgactgtcggctcctcctgtgggcagcctggtgagggagggaagctctagggagcccatgtctttcctcctggtcctgtgtgcacacagggaagatgggggctcgtgcctaaattaatgnnnnnnnnnnnnnnnnnnnnnnnnnnnnnnnnnnnnnnnnnnnnnnnnnnnnnnnnnnnnnnnnnnnnnnnnnnnnnnnnnnnnnnnnnnnnnnnnnnnnttgtttgtttgtatgtttgtttgtttttgagatggagtcttgctctgtaacccaggctggagtgcagtggcacaatcttggctcactgcaacctccgcctcccgggttcaagcagttctcctgcctcagcctcctgagtagctgggattacaggtgttcaccaccacgcccggctaatttttgtatttttagtagaaatggggtttcatcatgttggtcaggatgatcttgaactcctgacctcgtgatacacctgccttggcctcccaaagtgccaggattacaggtgagagccaccacacccatctgcaggcagcctttgtgacgatggtcacggtggagatgatgatggatgtgacaatgatggcggccgccagctgctggtgtttaatacctgccagagcttctgctgggtcttctacatgcactgtcacatatattactcatgcttatgttataaggtcagtattatgatccccattttagataataaaactgaactttagaatgaaaatgtcccttgtgtgagttcacttgtacattaaatgtcaaaattggaaataaaagccgtttctgactacagaattaatccattcaccccttcattacttacatcataactattacctactagcaggccaggcattgtactcagtgctagggaaaatacagtgagggaaaaaaggcataattcctgcttgtgtggactttcytctcccggggtcgtggaggcaaacatctataaaatatgtgtctagtcaaaacctggtgctaagggtgaggaagagaataggatggtaggtgttgagggcgtggcccagggcacctgatcagcctctttaggaggcttctcggaggaagccgcattgaaaatggggagagcgtgggttatgagatgaaggatgggttggggtacagcattccaggcagagggaaggacatactgcatctgagctactgcaggaagacccctgatgctgggataaagaaggagaagagaaaagtacagggtgaggctggacaagccagttcatttt

SEQ ID NO: 27858 - DNA, 541 bp, Homo sapiens
ataacggtaaagtcagaggtatccatgttttttttctttaaaacggagtttctctgtcacccaggtgaagtgcaataacatgatctcagctcactgcaacatctgcctcccaggttcaagcaattctcctgccttaggctcccaagcaactggcatcacaggtatgtgccaccatgcctggctaatttgtatttttagtagagatggggtttcaccatgttggtcagactggtctcgaactcctgacctcaggtgatctgcccgtctcagcctcccaamgagctgggattacaggagtgaaccaccgtgcccgaccgtatttttaatgttttacatgaaaaattttttcatgtattacatgtgtaattttccaaatgaaatattgagagagatgtgtacgttcaggtctacaaatctggtaaggaaatttgaaaaatgtataaatgggacctgaaagtcccctgacactgcaatagctatttatttttcttttttgtcagaacatgtgagatttatagattatgattcttgcttttaacca

SEQ ID NO: 27859 - DNA, 541 bp, Homo sapiens
ataacggtaaagtcagaggtatccatgttttttttctttaaaacggagtttctctgtcacccaggtgaagtgcaataacatgatctcagctcactgcaacatctgcctcccaggttcaagcaattctcctgccttaggctcccaagcaactggcatcacaggtatgtgccaccatgcctggctaatttgtatttttagtagagatggggtttcaccatgttggtcagactggtctcgaactcctgacctcaggtgatctgcccgtctcagcctcccaacgagctgggattacaggagtgaaccaccgygcccgaccgtatttttaatgttttacatgaaaaattttttcatgtattacatgtgtaattttccaaatgaaatattgagagagatgtgtacgttcaggtctacaaatctggtaaggaaatttgaaaaatgtataaatgggacctgaaagtcccctgacactgcaatagctatttatttttcttttttgtcagaacatgtgagatttatagattatgattcttgcttttaacca

SEQ ID NO: 27860 - DNA, 272 bp, Homo sapiens
acaaaatatgaccagtagcttgctgaaacctaactttttatttgttcatggaactttctagaccgtaactacactgaataatgagaatctgctgtaatctttttaggtgctgtagatgagccattggattaaattattacagtatgtttcagactgctctatgttgaaccctagtgaaatgcctctcaaaccctcataargatcacaatctcatgtccttttttttgttattaaatgcccagtatgtgttagcgatttaaacaaaattcaaa

SEQ ID NO: 27861 - DNA, 272 bp, Homo sapiens
acaaaatatgaccagtagcttgctgaaacctaactttttatttgttcatggaactttctagaccgtaactacactgaataatgagaatctgctgtaatctttttaggtgctgtagatgagccattggattaaattattacagtatgtttcagactgctctatgttgaaccctagtgaaatgcctctcaaaccctcataaggatcacaatctcatgtcctttkttttgttattaaatgcccagtatgtgttagcgatttaaacaaaattcaaa

SEQ ID NO: 27862 - DNA, 588 bp, Homo sapiens
ctaaagttactagacatgtaaagaagcagaaaactgtaacccatactcaggaagaaaatcaatagaaatgctccaagtgggcacagatgttcgatttagcaaagacttmaaagaagctactgtaaatatattaaaataactaaagaaaaccatactaaaggattagtaaagacctagatactttcaaagaagaaaaaagtatataacaataaagagtggtagtaaacaaaattttaagagcaatggaactggtctatattatgattgtgatggtagctaaatgaatctatgccattgtcacaatgtaaagaaagagtacacttcattttatgtaaacttaaaaataaatttaaagagaaaagaaccaaatggaaattctaaggttaaaatgaaaattccaccagatgagctccttggtagatttgaaaaagtagatgagaaaatcagaatcagtaaacttgaagaccactagaaattatccaatccaaagggcaaaatgaaaaaaaaaatttaagaaaattaagcataacatcagagttctgggaaacaatattaagcatttcagcacatgtgtaggaaagaggtgga

SEQ ID NO: 27863 - DNA, 588 bp, Homo sapiens
ctaaagttactagacatgtaaagaagcagaaaactgtaacccatactcaggaagaaaatcaatagaaatgctccaagtgggcacagatgttcgatttagcaaagacttaaaagaagctactgtaaatatattaaaataactaaagaaaaccatactaaaggattagtaaagamctagatactttcaaagaagaaaaaagtatataacaataaagagtggtagtaaacaaaattttaagagcaatggaactggtctatattatgattgtgatggtagctaaatgaatctatgccattgtcacaatgtaaagaaagagtacacttcattttatgtaaacttaaaaataaatttaaagagaaaagaaccaaatggaaattctaaggttaaaatgaaaattccaccagatgagctccttggtagatttgaaaaagtagatgagaaaatcagaatcagtaaacttgaagaccactagaaattatccaatccaaagggcaaaatgaaaaaaaaaatttaagaaaattaagcataacatcagagttctgggaaacaatattaagcatttcagcacatgtgtaggaaagaggtgga

SEQ ID NO: 27864 - DNA, 588 bp, Homo sapiens
ctaaagttactagacatgtaaagaagcagaaaactgtaacccatactcaggaagaaaatcaatagaaatgctccaagtgggcacagatgttcgatttagcaaagacttaaaagaagctactgtaaatatattaaaataactaaagaaaaccatactaaaggattagtaaagacctagatactttcaaagaagaaaaaagtatataacaataaagagtggtagtaaacaaaattttaagagcaatggaactggtctatattatgattgtgatggtagctaaatgmatctatgccattgtcacaatgtaaagaaagagtacacttcattttatgtaaacttaaaaataaatttaaagagaaaagaaccaaatggaaattctaaggttaaaatgaaaattccaccagatgagctccttggtagatttgaaaaagtagatgagaaaatcagaatcagtaaacttgaagaccactagaaattatccaatccaaagggcaaaatgaaaaaaaaaatttaagaaaattaagcataacatcagagttctgggaaacaatattaagcatttcagcacatgtgtaggaaagaggtgga

SEQ ID NO: 27865 - DNA, 916 bp, Homo sapiens
cctgagcccagaagttcaagggtatagtgagtcgtgattgtaccactgcattcctgctgagcaacagagtgagaccccatctcaaaaaagaaaaaaaaaggcattctagtaaatcgaatgtaatgtgaatggaatttcaaaacaggatctaagatggtatgtagtagaattcaaagtaatatcattttaaagttaaatgagtatggaaaaggtctgttctctagttttgtccagttcagtttactgaaggaatatatttaattatattcatatatttaacaaataaaaatatgttgaattttcgtattgtttgccactgagggttcagatgatagacctcaaaaaatcgaaaatactggttgaaatttgtagcatccatttagttattctttttgacctaaataacttaatagtttattaaatctaaggttagctaaatatgtagctaaccttatttgttttctttcctaacaactctgaagaatacataggactttgcacttttttttttttttttttttttaaagagacagcgtttcggtcttgttgcccaggctggactgtaatggcacaatcttggctcattgcaacctctacctcccgggttcaagtgattctcctgcctcagcctcctgagtagctgggattacaggcacctgccaccacacccgcctaattttttgttatttttagtggagacagggttttaccattttggaccaggctggtctcaaactcctgactgacctcaggtgatccacccgccttggcctcccaaagtgctgggattataggtgtgagccaccgtgccgggcytggactttgtactttttcaaatcatatttaattatttcttgatctttactcaaagaattattctgcgctaaatttgcaacattaaacaataattaagcct

SEQ ID NO: 27866 - DNA, 571 bp, Homo sapiens
ttatttgatattttaaaagataaaagagttatatattcaaataccagtatagatgttgctctgaaagtattgttagatgagattaacatgaaaatcagtaatttctgagaaaagcagattattttccaaaatattgtagggctcatccagtcaattgattatattaaaagactgagatccctcaaggaaataattctgcctgcagattgcctttcgacttgagactgtaacatcaacttttctctaggtctcttgcttgctagcctaccctgccaattttttatacattaaaaaatatttttctcaaatattgtagttctgctatttccagaaacgcttgaggattgtacttccaagttcttttaaagttgatcatcgtcatgaaactcatcatcaaatggcatttgagcaaaatctttattaattaaacatgagtggaagtttaaaggccaaagcacaactcactcaggcattgtgaactatgtgtgcagacagatcacaactcatccttggtctctgggtgtgtctgcgtctattactgacttaccctggatatgtaaaatgartaaga

SEQ ID NO: 27867 - DNA, 999 bp, Homo sapiens
tgcagtttacaaagctgtctctgatacttttccatcggattgccacgctaggaaatgcaggatttacactgtcctcctcttagaaacgaagagatgaagacttcgttaaaaatctagctctttggattcacatttcagaaaattttactttgttaaatagggcaagaagtgaaatcatgatttgtaatgtaaaaaatgcagaggaggagggagtgtttctaatgtggctgagcccactagagtaagggttacgagagtttgcagggcaaggacctcatgctatgaacacataattggtctttcagagaatagcagcttccctgagactcagcctaatattcttgatgaggccaggcgggtgtaaactaagccacatcatcttgcatagcatggtacacgttttatgtaagaagtcaagcaccttttttaccatataacaatgtgaagcacactgtcatggctaaataaagaaaatgcacccaacaatggaagggcagcaccatctgtgacactttttttttttcttttttgagactgagtctcactctgttgcccaggctggagtgcagtggcgcgatctcggctcactgcaaggtccacttcccgggttcatgccattctcctgcctcagcctcccgagtagctgggactacaagcgcctgccaccgmgcccggttaatttttttgtatttttagtagagacagggtttcaccgtgttagccaggatggtctcgatctcctgacctcgtgatccacccacctcggcctcccaaagtgctgagattacagatgtgagccaccgcgccccgcctgtgaagctaatttttttacaaagtggaaggtggactgaggtgccagctggcatcagcagaaactgaaatacagtccactttagacgcatcacctgagagtacgggtgcaggtctcctgtgtgctgccaggaagcagcatccacaggggcagcacttttccagtgcatgtccaacgctggaaggaaa

SEQ ID NO: 27868 - DNA, 1107 bp, Homo sapiens
caataaatagaatctctcttccttacttgagcttggaatccattgagaaataaatggaggtgtcagtcagttggaaatgtgtgagatattattgataagagctctacaggaagacggggcttagaagtagattcaggtgtgctcatcaatatctccccttgctgtgcatggcccagagagtagtcgagaacccagaatctctgcagacataggagctccaaggaggactcagcagagctggagccccatgtggtctattgtttctgcgcaagctcaccaatcacagcaagtgtgagaaggcagagagaagtgaggatgggtgctggacaaggaggctcatcacctgaagccaggcaagcataagctcttgccgccaagagccccttcaagcctgaagcacagagtccagcaggaagttccaagaatgcctctgatatttcagggagagcccayggcacggaatgtgtgtgtgtgtgtgcgtatgcacttctgggcgtgtgtgtgtgtgcatgtgtgtgttgtcactttacaagaaaagaaacctcaggagggcctgggctcccctggtagagattttccttagggaacagccgtgatgtgtagtggctcgaggatggagcccttaggatcaccaccgtctaccgagagagatcagaggaagagaattctttaatgagacaaaacagacagcgaagtccatggagaaccaggagagaagagtgtccccaaagtcagcaagggtgagtgataagaaaatgcaataaacatcatattccgaagagcaattcattaagataaggcatgaaaaaaggccataagtcacggcaacgtgggcatcagagacgacatccagagaaacagcaaagcaggattctcatcatttatccggcaaatgaacaaggagggctaagtgcaggcctctgaatagaagaggggcattttctattaggatctgaaatggaaatggctccccagcgccaagccacgtggtgctgggtgttgcccgttgatgtctgtcacagctcagagaggtggctgagtttaaccagctcacatcccaaattttgtttgccagcggttttcgatctgtgctcttgacaacctggg

SEQ ID NO: 27869 - DNA, 540 bp, Homo sapiens
tctaaatattctactgtactggacagtaggtaactgaaaccaaggaaagtgaaatctcagcactgcactacccatctgaccttgtcttagaaatttatacagttctctcattactaaaaagggaacaatatcaccttttttttwaaaaaagctgtagtagtaatgtagttatacaaaatgcttggaatagggtctggcatacagttaaatttaaaaataaatagtgcctgcttttattatggtttctaacaagaaatatcatcaagaaaacacatcatgatattttgctgtaatataaagatatatccgagttactgagttgtattgagctgcctatccctagcgaaagtgactaaaacccgtaacaattttctagtttgctcctatagattttttttgttttactcttctcccagttccacacagctgacattattttataccagttactggaatcctctaatatcctgcccctgttcaaatacgtaacagctaaatgaaatggatagtttaccaagtaccttcgcaagaaacccagat

SEQ ID NO: 27870 - DNA, 959 bp, Homo sapiens
aggggcctcagtcccaggccacctcatgaaacactgcaggaaccagcctgagggattggggtgggggatctggccttgcaggtgggaagtgcttccatcttgtcacagtaaggcagagaagcaggagggcaaactccacggcacgaatgcaataggtacttcgtgttgctaagtctctgcacatggaaagggaggtttctgctcacgaggaggtgaaatgatgttgcataaacaagacgcaagatatcaaggcaagccccagggaacaggaagactgggtggggtgacatgaacagaaccagtctgggtggaccagtccctccaaactccagcggctcagcagcagcatctccttaaggatgaggccccctcattgcttcattggtcttaaggggctttgactcaggagaaattgaaatttcagagaccttggccccatgtcatctaattcaagtgtcaactacagaggaagtgggttgggcaaggccctaacctcagctttaaacaggattggttgtttcccaggrgcaactcttggcctgtcagatgaagcaaggccttcctctcacatgctaaagttgtgaaatacagcagcatctttttttcaggttctttggcccatattacagcagtgatgatgatggtgatggttgtgggatgtgacaaaaggaatgcaacgtgacatggaggcaaagagatggaaaaaattggggtttggaggcagaaagccccagctctgcaacttaaatgcccttttgcaagatatttgttcttgttttgacagaaggggatattgaaacctcctgaggttgtttttgttattattttttctctttttagattcaagagcattcctataaagaaactcccatgttgcctcactcatagaatattcaaaactccatagttattttccaggtgtatgtccatcagtacctgtcccatccctctggttgtgc

SEQ ID NO: 27871 - DNA, 1072 bp, Homo sapiens
ccgtgtactccctgcagcagttcggtatgtgccgcacacggccggcgcctgggtgaggccgccctggagcccctcgggcatccaagtgcgaatcctgacacaggccggggcctcctcgcctcctgctgcagatccttgcacagacgttgaatcagaggctagcagcgcctgcctcacttctctccttggagatgacctggttgattgtctggaaattggctttattaagaacataatatgtgaaatgccatgagtttggtcaaatgaaccttaactgttgatgagatttatttttattgtttgtttgtttgtttgtttgtttgtttgttttgagacagagtctcgctctgttgcccaggctggagtgcagtggcacaatctctggttactgcagcctccgccccccggattcaagcgattctcgttcctcagtccccccagtagctaggattacaggcgcgtgcccccacrcccagctaatttttgtatttttagtagagatggagtttcaccatgtttaccaggctggtcttgaactcctgacttcaagtgatctgcctgcctgagattcccaaagtgctgggtttacaggcatgagccactgcgcccggcctaaatttttatattgaaaactgtatttgtaatgttaggtaagattgacattgcctgttttatattgtatgtttttttttccttgacagggttttcagagaaagatgctgatgaggtgaaaggaatttttgtagataccaacttatacttcctggcgctgaccttctttgtcgcagcgttccatgtgagtcatccaccggggggcttgccgcaggcacttggggggctccctgggccccgggcctcctgcaggggtcctggacctggggtttgtgggcgccgtccagccctgtggccctcaagtgtccactcccatcactcagcagccagcacgcctgacaccaggcgaccattgtcccagtgggcggtttctcccagttctgaaaagggagggaccataaagctccgtccacagccttggcgacttgggctgtgctggctttgggggcggttttgaaaa

SEQ ID NO: 27872 - DNA, 585 bp, Homo sapiens
acaacatgctacagtataagaatggagatttctcaacccctctggcgaggacagggctgctaatgaacaagaatttgagacatgagccctttgactatttttctctgtcttctacccaggcctacctagtaaattttgggttgagaaatgtatggctgaaaatgccctaagatgtttgaagttctggttggtaagaccacaagctctacagagtatctgtattctgcaagtcagtagtgcrtgaaaaggcattgtacttatttacagtgatattctcctatgtatagccacagctgaccagtcagcagcttcatatgaaatggaaatgtctcagactggcttcagtgctcattattcacaggtatgttgaccacgttggtgaaaaatgaaatatatgtttgcaagacttcccttcccataaccaacatctagccatcagtatgtaagtgcaacgtgcagttcatagcttgaacaattatgcaggctatgatgatgttttctaattcaaataggaaaatatcatttcacaagcttcttattaagaaaatatgttctctcacacagttcactacattgtactaatag

SEQ ID NO: 27873 - DNA, 585 bp, Homo sapiens
acaacatgctacagtataagaatggagatttctcaacccctctggcgaggacagggctgctaatgaacaagaatttgagacatgagccctttgactatttttctctgtcttctacccaggcctacctagtaaattttgggttgagaaatgtatggctgaaaatgccctaagatgtttgaagttctggttggtaagaccacaagctctacagagtatctgtattctgcaagtcagtagtgcatgaaaaggcattgtacttatttacagtgatattctcctatgtatagcyacagctgaccagtcagcagcttcatatgaaatggaaatgtctcagactggcttcagtgctcattattcacaggtatgttgaccacgttggtgaaaaatgaaatatatgtttgcaagacttcccttcccataaccaacatctagccatcagtatgtaagtgcaacgtgcagttcatagcttgaacaattatgcaggctatgatgatgttttctaattcaaataggaaaatatcatttcacaagcttcttattaagaaaatatgttctctcacacagttcactacattgtactaatag

SEQ ID NO: 27874 - DNA, 521 bp, Homo sapiens
tcacggtctttgcactttcttatactgcctagttcagcccaggtgtgaaataggaaaggtctcttcatgtctaattaataagttgatagtaatttctttacttaatgataaagttawtttttttagaatgcccagaatttagccacataaaacccacacattcctgtttttctcaaaatttaaataatttcaaaaagttctcacacttagaaatgatgaggaagtgtgccccgtcccccaaaagcaaataaagtaaattttactttcctctgctaaccaggagagaatattcttttagattttgtaaaggggagctacaatctattttagtcttaacagtgacttctccttggaactggtaacaagttaacatctttgcacatgagttttttaatggttaactctgggggaagaaagcaagccacaaaaccattgaggggttctgtgccaggtgctctgctactttatttaaggactgtcatttctaaatctgatctctaatcaagacttggcagaagggc

SEQ ID NO: 27875 - DNA, 1126 bp, Homo sapiens
ctatctcacacaatcaaaattgtattttaaaacattaaaaaaaaaaaaggaaaaaaagagacgaggaaggaagcgctgcgggagggggtgttactttgtcgctcaggctggcctggacccccaggctcagcgatcctcccgccgctgcttcctgagtagctgggacctcaggctcctgcccccgcgcgcgcatccctcccaccccggcgccccatccagcaggtggtcacctcactcctccctggcctgagcactccgtcccgcatccatggcggtggctttagggaaatctctgaagttgagcacggggtggacttgccctcctgagtgaatggagaatagaaagggggaggatttctattttgttttgtgggccgtcagcatgaaatcgtaccttccgcccaggcagggctttgcatttcacattctagtttgcatccccgttccagacaattccagggcttttgaatagtgcctcaaccttactggccggtctcgactccaaaaccctaaaacaggcgctggagcgagggtgacggactcacaggtcccacccgcggccccgccctctgcgccttccaaagggcaaagttctctccgcctctcgccccgcccctgcytcgtcaggccccgcccacctcccaggtcccgcccaggcctggcttctgtcctgcgcgcagattcgcgaaaacccggaagcggatcgcgtggagtgacggtcccacggcagcgcgtgagtttggctctgtgttgtattaggtctgcacttcccaggtccctggcgcttctgtacctggggcgtggggtccccacaaacctggaaattctcagccgtcttccttcacccagagcaaattgagacgaccccgtgagagtccgggggtcgcttccttttgtgtttaaggtcgccctgaggctggtcccgtcccgggtctttctgctatagggcaatgtatacactttctatcgcgcatttttcctgctctaaacctttctctgactcctcccaccccgcgactttttgaagtcctcacccaaggggtggattctcgcccacttcggccggtggagcgcagaaccgcggccccagtcccgggaaggccgcgtcctctgtctggtcccggga

SEQ ID NO: 27876 - DNA, 1126 bp, Homo sapiens
ctatctcacacaatcaaaattgtattttaaaacattaaaaaaaaaaaaggaaaaaaagagacgaggaaggaagcgctgcgggagggggtgttactttgtcgctcaggctggcctggacccccaggctcagcgatcctcccgccgctgcttcctgagtagctgggacctcaggctcctgcccccgcgcgcgcatccctcccaccccggcgccccatccagcaggtggtcacctcactcctccctggcctgagcactccgtcccgcatccatggcggtggctttagggaaatctctgaagttgagcacggggtggacttgccctcctgagtgaatggagaatagaaagggggaggatttctattttgttttgtgggccgtcagcatgaaatcgtaccttccgcccaggcagggctttgcatttcacattctagtttgcatccccgttccagacaattccagggcttttgaatagtgcctcaaccttactggccggtctcgactccaaaaccctaaaacaggcgctggagcgagggtgacggactcacaggtcccacccgcggccccgccctctgcgccttccaaagggcaaagttctctccgcctctcgccccgcccctgcttcgtcaggccccgcccacctcccaggtcccgcccaggcctggcttctgtcctgcgcgcagattcgcgaaaacccggaagcggatcgcgtggagtgacggtcccacggcagcgcgtgagtttggctctgtgttgtattaggtctgcacttcccaggtccctggcgcttctgtacctggggcgtggggtccccacaaacctggaaattctcagccgtcttccttcacccagagcaaattgagacgaccccgtgagagtccgggggtcgcttccttttgtgtttaaggtcgccctgaggctggtcccgtcccgggtctttctgctatagggcaatgtatacactttctatcgcgcatttttcctgctctaaacctttctctgactcctcccaccccgcgactttttgaagtcctcacccaagrggtggattctcgcccacttcggccggtggagcgcagaaccgcggccccagtcccgggaaggccgcgtcctctgtctggtcccggga

SEQ ID NO: 27877 - DNA, 886 bp, Homo sapiens
ccagcctgggccctggcaactctaatattggtgaggcctggggcttgggaggaacattccaagacttgaaggatggtcctggatctggggagagagctccaaacaggggasggtgtccaggcctcagagagagggttagggctttggagggggaactcctggcctggctagtagggatgacagtgctagtagtggatggggatggaggtaactggagaatctggtcctcagagttaggttttgggctggacacagcgactcatgcctataatcccagtactttgggaggccgaggtggaaggatcacttgaggccaggagttcgagaccagcctgggtgacatagcaagaccctgtctctacagcaaattgaaaattagctaggtgtggtgatgcccaccagtagtcctgccactcaggaggaagaggcaggaggattgctggagcccaggagttggaagctgcagtgagctgtgattgtgtcactgccctccaacctgggtgacagagtgagaccctgtctctaaaaataaataaataaataaataaataaataaataagtcagagttcgggctttggtgggagtttgggcctggtgtgggggtctgtcatgtaggatttaggcctggggtgggttcttgccccataatgaggatttgggcccagagtgggagtctgggcatctctgggaccaggttagagggatctaggctccagattgaagggatctaaggctccattttggagggatctaggccccaggttggagggatctaggctccaggttggagggatctaggctccaggttggagggatctaaggccccaggttggagggatctaaggccccaggttggagggatctagggcccaggttggagggatc

SEQ ID NO: 27878 - DNA, 886 bp, Homo sapiens
ccagcctgggccctggcaactctaatattggtgaggcctggggcttgggaggaacattccaagacttgaaggatggtcctggatctggggagagagctccaaacaggggacggtgtccaggcctcagagagagggttagggctttggagggggaactcctggcctggctagtagggatgacagtgctagtagtggatggggatggaggtaactggagaatctggtcctcagagttaggttttgggctggacacagcgactcatgcctataatcccagtactttgggaggccgaggtggaaggatcacttgaggccaggagttcgagaccagcctgggtgacatagcaagaccctgtctctacagcaaattgaaaattagctaggtgtggtgatgcccaccagtagtcctgccactcaggaggaagaggcaggaggattgctggagcccaggagttggaagctgcagtgagctgtgattgtgtcactgccctccaacctgggtgacagagtgagaccctgtctctaaaaataaataaataaataaataaataaataaataagtcagagttcgggctttggtgggagtttgggcctggtgtgggggtctgtcatgtaggatttaggcctggggtgggttcttgccccataatgaggatttgggcccagagtgggagtctgggcatctctgggaccaggttagagggatctaggctccagattgaagggatctaaggctccattttggagggatctargccccaggttggagggatctaggctccaggttggagggatctaggctccaggttggagggatctaaggccccaggttggagggatctaaggccccaggttggagggatctagggcccaggttggagggatc

SEQ ID NO: 27879 - DNA, 1134 bp, Homo sapiens
gggatccaggttgcatattccttatgagaatctaattcctgatgatttgtggtggaacagtttcatcccaagaccattaccatcctgcgccccatcccttgccgcctgtggaaaaattgtcttccacaaagccggtccctggtgccaaaaatgttggggactgctgtgctttagaatctgccatgaatctgcagcctctattatatagctccctatagactttgcttcctaccgtcttacgttctgccttataggcatttgactttgcaacccttgtttttgttagtatgctacgctggtgacattgaccaaattgaccacacattaattataagcttagtcggtgatgacctcaacggaataacgtgacatacgtattgtgacaatacttcttgcatgtatctgcaggtggacatcgtaaacctggtggtccgagatggtctagttccatcttcctatgtatctccgttattttaatagtggtaccataggtggtggtgatcagcattccaatgcctcttctcatggcaacatcaaacgttttccttctgaatcaacattaacctagatgttactgcggatcaaaattagactctacattttcaaccacagaaataccgggcagtaaaaatttttcttaatattgattgcctacataggttgtgtaattagcatatgtttacagttctatgatttctgcgtggctgctacagagctggagggggtaaagcaacagtattttctcagttgtccgagcagcattacattataataaataggtaatattaaactgggctgatgagagttgcaaaagactactttaatgttcatatggaaccaaaaaagagcccacattgccaagacaatcctaagcccaatgaacaaagctggmggcatcatgctacctgacttcaaactatactacaaggctacagtaaccaaaacagcctggtactggtaccaaaacagacatatagaccaatggaacagaacagagccctcagaaataataccacacatctacaaccatctgatctttgacaaacctgacaaaaacaagaaatgcggaaaggattccctacttaataaatagtgctgggaaaactggctagccctatgtagaaagctgaaact

SEQ ID NO: 27880 - DNA, 1134 bp, Homo sapiens
gggatccaggttgcatattccttatgagaatctaattcctgatgatttgtggtggaacagtttcatcccaagaccattaccatcctgcgccccatcccttgccgcctgtggaaaaattgtcttccacaaagccggtccctggtgccaaaaatgttggggactgctgtgctttagaatctgccatgaatctgcagcctctattatatagctccctatagactttgcttcctaccgtcttacgttctgccttataggcatttgactttgcaacccttgtttttgttagtatgctacgctggtgacattgaccaaattgaccacacattaattataagcttagtcggtgatgacctcaacggaataacgtgacatacgtattgtgacaatacttcttgcatgtatctgcaggtggacatcgtaaacctggtggtccgagatggtctagttccatcttcctatgtatctccgttattttaatagtggtaccataggtggtggtgatcagcattccaatgcctcttctcatggcaacatcaaacgttttccttctgaatcaacattaacctagatgttactgcggatcaaaattagactctacattttcaaccacagaaataccgggcagtaaaaatttttcttaatattgattgcctacataggttgtgtaattagcatatgtttacagttctatgatttctgcgtggctgctacagagctggagggggtaaagcaacagtattttctcagttgtccgagcagcattacattataataaataggtaatattaaactgggctgatgagagttgcaaaagactactttaatgttcatatggaaccaaaaaagagcccacattgccaagacaatcctaagcccaatgaacaaagctggcggcatcatgctacctgacttcaaactatactacaaggctacagtaaccaaaacagcctggtactgstaccaaaacagacatatagaccaatggaacagaacagagccctcagaaataataccacacatctacaaccatctgatctttgacaaacctgacaaaaacaagaaatgcggaaaggattccctacttaataaatagtgctgggaaaactggctagccctatgtagaaagctgaaact

SEQ ID NO: 27881 - DNA, 1134 bp, Homo sapiens
gggatccaggttgcatattccttatgagaatctaattcctgatgatttgtggtggaacagtttcatcccaagaccattaccatcctgcgccccatcccttgccgcctgtggaaaaattgtcttccacaaagccggtccctggtgccaaaaatgttggggactgctgtgctttagaatctgccatgaatctgcagcctctattatatagctccctatagactttgcttcctaccgtcttacgttctgccttataggcatttgactttgcaacccttgtttttgttagtatgctacgctggtgacattgaccaaattgaccacacattaattataagcttagtcggtgatgacctcaacggaataacgtgacatacgtattgtgacaatacttcttgcatgtatctgcaggtggacatcgtaaacctggtggtccgagatggtctagttccatcttcctatgtatctccgttattttaatagtggtaccataggtggtggtgatcagcattccaatgcctcttctcatggcaacatcaaacgttttccttctgaatcaacattaacctagatgttactgcggatcaaaattagactctacattttcaaccacagaaataccgggcagtaaaaatttttcttaatattgattgcctacataggttgtgtaattagcatatgtttacagttctatgatttctgcgtggctgctacagagctggagggggtaaagcaacagtattttctcagttgtccgagcagcattacattataataaataggtaatattaaactgggctgatgagagttgcaaaagactactttaatgttcatatggaaccaaaaaagagcccacattgccaagacaatcctaagcccaatgaacaaagctggcggcatcatgctacctgacttcaaactatactacaaggctacagtaaccaaaacagcctggtactggtaccraaacagacatatagaccaatggaacagaacagagccctcagaaataataccacacatctacaaccatctgatctttgacaaacctgacaaaaacaagaaatgcggaaaggattccctacttaataaatagtgctgggaaaactggctagccctatgtagaaagctgaaact

SEQ ID NO: 27882 - DNA, 1134 bp, Homo sapiens
gggatccaggttgcatattccttatgagaatctaattcctgatgatttgtggtggaacagtttcatcccaagaccattaccatcctgcgccccatcccttgccgcctgtggaaaaattgtcttccacaaagccggtccctggtgccaaaaatgttggggactgctgtgctttagaatctgccatgaatctgcagcctctattatatagctccctatagactttgcttcctaccgtcttacgttctgccttataggcatttgactttgcaacccttgtttttgttagtatgctacgctggtgacattgaccaaattgaccacacattaattataagcttagtcggtgatgacctcaacggaataacgtgacatacgtattgtgacaatacttcttgcatgtatctgcaggtggacatcgtaaacctggtggtccgagatggtctagttccatcttcctatgtatctccgttattttaatagtggtaccataggtggtggtgatcagcattccaatgcctcttctcatggcaacatcaaacgttttccttctgaatcaacattaacctagatgttactgcggatcaaaattagactctacattttcaaccacagaaataccgggcagtaaaaatttttcttaatattgattgcctacataggttgtgtaattagcatatgtttacagttctatgatttctgcgtggctgctacagagctggagggggtaaagcaacagtattttctcagttgtccgagcagcattacattataataaataggtaatattaaactgggctgatgagagttgcaaaagactactttaatgttcatatggaaccaaaaaagagcccacattgccaagacaatcctaagcccaatgaacaaagctggcggcatcatgctacctgacttcaaactatactacaaggctacagtaaccaaaacagcctggtactggtaccaaaacagacatatagaccaatggaacagaacagagccctcagaaataataccacacatctacaaccatctgatctttgacaaacctgacaaaaacaagaaatgcrgaaaggattccctacttaataaatagtgctgggaaaactggctagccctatgtagaaagctgaaact

SEQ ID NO: 27883 - DNA, 582 bp, Homo sapiens
atcagggcgcttccagtcattgagtgccccttgaggaggctggaggagaggccaatgacatttgcacttgagactccagagtctagatttataaccactatgttatggctgccagtgtggctgcaaggacacttctttcattcattcatttacaatagatgtagcatctgctgtgtgccagatgccattctaggttctagggaaacaaggcagagcccgttttccaaggcatccacattctaggaaagactgctaccagcctggcgtggtggctcatgcctgtaatcccagtactttttgggaggccgaggtgggcggatcacttgatgtcaggagttcaagaccagccaacatagtgaaaccccgtttctactaaaagtacaaaaatcagctgggcatggtggcacgtgcctrtagtcccagctactcaggaagctaaggcaggagaatcgcttgaacctgggaggcagaggttctggtgagccgagatcatgctactgcactccagcctgggcaacagagtgagactccatcaaaaaataataataataataaaataaagactgctactaaacaataaaa

SEQ ID NO: 27884 - DNA, 930 bp, Homo sapiens
tccagctggcccacaaagcctgaaatatttattatgtggttctttgcaggaaaagtttgcagactcccaatctatattatttctgatggctactttattttctattatatggatacactagaatttatttaacctgttctttattgaagtctaatttatgtttgtatctagctttttccattttaaaattagtctatctgcacctgtctgcatatatcctagtgaacatatataattattttccttagacagggtcataggagtgggattactgaaacatctggctcatattattaaattctgctaatataaatttctaatttaccctctttaaggtggcaccagtgtataacatggcgtgagggcatctattttactccagtttaacatgttattatcagtctattcaatgttcccgtgttgtaaatataaaatgctatttgccactttaacgtatattatcttaataagtagcaacatttaatagcttttagtcattaaacccaagtcattattcacgcttgggttttattaggcgtaataagaaattctgggtatcagtgacaagagcacagttgaaaaagaactggctttgtagttggagaattgtggattcagaactcagatgtcttgtttattaacagtggatttaggtttctgtttttctgatgttgaagtggagataataatgacattgyagaactgttctaaggattaaatagctatatataaggtatgcatcacataaaagttgattttttttttattgcttccagggccataaatttacttctccctctagtttgggtactgagggagaagggagggtgaatgatgtcctgcagggaccctggggactcttctgattgagggaaatggggagtggtgagccctgaggattgtgggagttccagttcaggctaggaaaag

SEQ ID NO: 27885 - DNA, 538 bp, Homo sapiens
ataaaaagatttgcgtataagcacttcataaagaaaaatgataaatgaattagtgaaagaggaaaaaaatggctcaagaaagtcaaagacaaaaccattcaggaaggaagctaacctgaacggtgtgtatttctgatgactgaataacccatggctgtggtgtctgaattactccctggacatgtatagtttggcccgaaggtaactgcactagagttacagctggggagcctcttctggtgcctgatccagccacagaaacctrccaaaatgatcaccattgaggattaaagctggaccttttttgttattgtttttgctatttttaagtaataccactcactaatatgactggcctacttctctttttcctgctgctgagaaatgacaaactatctaggatacttaccatcgggaggtggttactgtcctggaacagtcattttctgatgtgacatttattaaggaacacatgctccttatcgcttttggtgcccatacttcggtggctaagaatgttccaagcacaaagttctaa

SEQ ID NO: 27886 - DNA, 1495 bp, Homo sapiens
atacagaaatgtttattttgtgatgtttatttttaaactcagagttctgtatgcttaggaactgtgttaacccatttatgcctgcggctgcaattttttgaatttttgcaatcagaccttggctatgaccttgagcagtaagagtaaataactccctcatgcttagtgttccaacaatggaacactaggcataaatgggttttaagcacatgagcaaatttcccaaggtccctcccagctccagtatttcccagtcccagctgccattcagtggccttggggtcatttgggaatgccgtgtcatcccaatgcatcagggtagtgtccccctaggggtagaacctcctcgcccgggcagggcacccagtacacagwtgtttcagtttacgcctgagacttacagctgtggaaataccacccttcaaaacattatgccttttttgtttctaatacatgaattaggtctcaaaaaaaaaaaagaaaaagaaaaagaaaaagaaaagaaagaaaagaaaaaaaaaagaaagaaaagtaacagatctgttttgtgccagagctgtctggtctctccaaacacttaatccagccgctctcattgtctgggatcaaagcgccttccccacactgcagctttgttctacttggagcagatgaacaggctgaaaggagaactccttcaggcttcctgcccctcccttcccctgaactttgagagaacaaagagatttacaaggcaaggatcccaactacaaggtgctaatgatcagaatcacatgcatctgaggtctggacaagtgttcctaagtcagaaggcttccaggagggggaggcgcttaaggtaggagaatggcagctgggaactaggaaccaggaatcaggagtttggaattgcctggagatgagaacaaaacctggaatcaggagtgttcaggaatcaccttgtagaatacaaagcactcacaggcataggtgcaactcacccaggaaaaataccctcccaccaacatggcacatgtatacatatgtaacaaacctgcacgttgtgcacatgtaccctaaaacttaaagtataataataataataataataataaagaataccctccctccgaaggccccctgccctctgagaatctggcaggctccactgggtcctccctgttcctcccatgcccagcacctgaaagtagctatttagtctcagcctgtgctgagaatgacaaaagggtttcctaagaatggcagagcacaaactctaggagacctgtttagcgtaaatcagcatcacctcaagggtttgttaaaataagattgctaagccccaggctctgagtttctgattcagtaggtctaggtagagctccagaatttgcatttctaacaaactcccagatgctgctggttcagggacaatcctttgagaatctgtattctgaacaattaactctccaggttcatacacaataaacaatttagagccaatatagtctccaat

SEQ ID NO: 27887 - DNA, 1495 bp, Homo sapiens
atacagaaatgtttattttgtgatgtttatttttaaactcagagttctgtatgcttaggaactgtgttaacccatttatgcctgcggctgcaattttttgaatttttgcaatcagaccttggctatgaccttgagcagtaagagtaaataactccctcatgcttagtgttccaacaatggaacactaggcataaatgggttttaagcacatgagcaaatttcccaaggtccctcccagctccagtatttcccagtcccagctgccattcagtggccttggggtcatttgggaatgccgtgtcatcccaatgcatcagggtagtgtccccctaggggtagaacctcctcgcccgggcagggcacccagtacacagatgtttcagtttacgcctgagacttacagctgtggaaataccacccttcaaaacattatgccttttttgtttctaatacaygaattaggtctcaaaaaaaaaaaagaaaaagaaaaagaaaaagaaaagaaagaaaagaaaaaaaaaagaaagaaaagtaacagatctgttttgtgccagagctgtctggtctctccaaacacttaatccagccgctctcattgtctgggatcaaagcgccttccccacactgcagctttgttctacttggagcagatgaacaggctgaaaggagaactccttcaggcttcctgcccctcccttcccctgaactttgagagaacaaagagatttacaaggcaaggatcccaactacaaggtgctaatgatcagaatcacatgcatctgaggtctggacaagtgttcctaagtcagaaggcttccaggagggggaggcgcttaaggtaggagaatggcagctgggaactaggaaccaggaatcaggagtttggaattgcctggagatgagaacaaaacctggaatcaggagtgttcaggaatcaccttgtagaatacaaagcactcacaggcataggtgcaactcacccaggaaaaataccctcccaccaacatggcacatgtatacatatgtaacaaacctgcacgttgtgcacatgtaccctaaaacttaaagtataataataataataataataataaagaataccctccctccgaaggccccctgccctctgagaatctggcaggctccactgggtcctccctgttcctcccatgcccagcacctgaaagtagctatttagtctcagcctgtgctgagaatgacaaaagggtttcctaagaatggcagagcacaaactctaggagacctgtttagcgtaaatcagcatcacctcaagggtttgttaaaataagattgctaagccccaggctctgagtttctgattcagtaggtctaggtagagctccagaatttgcatttctaacaaactcccagatgctgctggttcagggacaatcctttgagaatctgtattctgaacaattaactctccaggttcatacacaataaacaatttagagccaatatagtctccaat

SEQ ID NO: 27888 - DNA, 1113 bp, Homo sapiens
cctgacttaagttttacctgggtaattcagaggtgggaagaggcaagaaccctaagttactattgggtgccctaactttgaaaaccgctgggcccttccccctggttgtaagtttccactttgttctcacaccatgtgaccagcaccctgtcccccaattctcacccctacctccactgtcctaaccgaactcagtgctccaatggccaagcgttcaggaaatggtttccaaaagccaaaaaatgatccaagagtacagaatagaaggggagtggaagggcagcctcatagcaggagaggcggacaggtgccacctcagccaggtrctcaagggcgacatcgacggccgtgagccacactgatagttctggcccttgaaacgatgtgacgagaagggccacttcacctctggggtctgtctcccagacccatacccccgtccaatcacgaggagaccatcagctaaatcacaatagtgggggacacttgactgaatccctgaccaggactcctcaaattgtcaagagcatcagaaacaaagagtctgagcaaccgcgagagccaggagcagcctggggacacctgatggctaaatgtctcgtgggacctggggtagaaaaggacattaggcaaacacgaaggaagagtgaataaaatgcaggtgacttactcatatatgaattggctccttcatggtgacagatggaccagagtcatgtcagatgttaaggcgcagtggaacagggtgcgggtcgcacacgaactctctatcatattctcaacagtcctttatgtctaaaaccattgtaagatttcttatttaaaaaccatcacggtagccatgtgttttgcggtgatcgcgagcgccacctggtggacacaggacagcattggccgtgaccaacctccctggaaaggaaggaaccattgcagaggatgcatgatgcgatgagccgctgtgattgattccggtcttgggaaatggaaaaggcagcttcctgccccgcagtggctcccagtccggtggagggaaatggtgcaaggcaaattcaggactcctggtcacagccagcatctgttccatctttacctggggttagggaccaagctgac

SEQ ID NO: 27889 - DNA, 1113 bp, Homo sapiens
cctgacttaagttttacctgggtaattcagaggtgggaagaggcaagaaccctaagttactattgggtgccctaactttgaaaaccgctgggcccttccccctggttgtaagtttccactttgttctcacaccatgtgaccagcaccctgtcccccaattctcacccctacctccactgtcctaaccgaactcagtgctccaatggccaagcgttcaggaaatggtttccaaaagccaaaaaatgatccaagagtacagaatagaaggggagtggaagggcagcctcatagcaggagaggcggacaggtgccacctcagccaggtactcaagggcgacatcgacggccgtgagccacactgatagttctggcccttgaaacgatgtgacgagaagggccacttcacctctggggtctgtctcccagacccatacccccgtccaatcacgaggagaccatcagctaaatcacaatagtgggggacacttgactgaatccctgaccaggactcctcaaattgtcaagagcatcagaaacaaagagtctgagmaaccgcgagagccaggagcagcctggggacacctgatggctaaatgtctcgtgggacctggggtagaaaaggacattaggcaaacacgaaggaagagtgaataaaatgcaggtgacttactcatatatgaattggctccttcatggtgacagatggaccagagtcatgtcagatgttaaggcgcagtggaacagggtgcgggtcgcacacgaactctctatcatattctcaacagtcctttatgtctaaaaccattgtaagatttcttatttaaaaaccatcacggtagccatgtgttttgcggtgatcgcgagcgccacctggtggacacaggacagcattggccgtgaccaacctccctggaaaggaaggaaccattgcagaggatgcatgatgcgatgagccgctgtgattgattccggtcttgggaaatggaaaaggcagcttcctgccccgcagtggctcccagtccggtggagggaaatggtgcaaggcaaattcaggactcctggtcacagccagcatctgttccatctttacctggggttagggaccaagctgac

SEQ ID NO: 27890 - DNA, 1113 bp, Homo sapiens
cctgacttaagttttacctgggtaattcagaggtgggaagaggcaagaaccctaagttactattgggtgccctaactttgaaaaccgctgggcccttccccctggttgtaagtttccactttgttctcacaccatgtgaccagcaccctgtcccccaattctcacccctacctccactgtcctaaccgaactcagtgctccaatggccaagcgttcaggaaatggtttccaaaagccaaaaaatgatccaagagtacagaatagaaggggagtggaagggcagcctcatagcaggagaggcggacaggtgccacctcagccaggtactcaagggcgacatcgacggccgtgagccacactgatagttctggcccttgaaacgatgtgacgagaagggccacttcacctctggggtctgtctcccagacccatacccccgtccaatcacgaggagaccatcagctaaatcacaatagtgggggacacttgactgaatccctgaccaggactcctcaaattgtcaagagcatcagaaacaaagagtctgagcaaccgcgagagccaggagcagcctggggacacctgatggctaaatgtctcgtgggacctggggtagaaaaggacattaggcaaacacgaaggaagagtgaataaaatgcaggtgacttactcatatatgaattggctccttcatggtgacagatggaccagagtcatgtcagatgttaaggcgcagtggaacagggtgcgggtcgcacacgaactctctatcatattctcaacagtcctttatgtctaaaaccattgtaagatttcttatttaaaaaccatcacsgtagccatgtgttttgcggtgatcgcgagcgccacctggtggacacaggacagcattggccgtgaccaacctccctggaaaggaaggaaccattgcagaggatgcatgatgcgatgagccgctgtgattgattccggtcttgggaaatggaaaaggcagcttcctgccccgcagtggctcccagtccggtggagggaaatggtgcaaggcaaattcaggactcctggtcacagccagcatctgttccatctttacctggggttagggaccaagctgac

SEQ ID NO: 27891 - DNA, 629 bp, Homo sapiens
atgagcgaaaataaaacgagaatcagatactgacacagtctcaacatgtctctcggtaaaatacttaatcattacaagggagaaartaatagctttaattaagggaaacctggcagacgctgtcttaaccaaggggcaaaagttactcccaccagtaacgagacaaacagctgggtgggcctcccaataccatgtactaaggaggacacagtatcgtgccacagggctttctccagaagcgcgtaacctgagccaaatcccgaggaaacattagacaaactcaaatcaagagacatcctatgacgtccccgagcctggaatctgagcccggaatctctaaaaaggtcgagaatacagaagacaaggaaaatccacaggagtattccacacagaaggagaaacagagggacgtggcaactaagagccacatcctttccctgttaccaggacaacgctgatgggaacttgtggactggatggtcatgttgtgtagatgttcatttcctgatttttggactctgttgtgattaatgaagactgtcacttaaagaaaataggctgggcacagtggctgacacctataatcccagcactttgggaggctgaggtgggaggattgcttgagctca

SEQ ID NO: 27892 - DNA, 1139 bp, Homo sapiens
tcctccagcctccagccagggtgttccccaaaatgaaatctcttaaatttcttgagagcagaggacctgctcattcatcttatagcttgtcggttcagcaatgcatctgtgggaatccttgtaggactggacgggagctcctgacggctgggttttcctgcccttgcgtatacgggttctgtctgctctcccttattaattccttacatgtgttgagttcctcctgcatgccaagtgttgtgattctcctatctttcccccagtgacagggaactcatcacctcacaaggcagccctgttcctctgtctcaggagtctcaccattaggaattctaccttagcacggcgtaaggctctggacgggatggcagggaggcactaggctggtgctctgaggaggtggcatctgggcagagatctgagtgaaatgagacggaaagccatgtgaggatgtggatggagggcgtcgctggagggcagggtgcagagtccctgaggggacaggagcctggcagcctgggaatcaaggtgcccagaccaggtgcattattattattgttatattctgggatagggtttctctggtgtccaagcaggagtgcagcggcataaacacggctgactgcagcctcaacttcccaggccccagtgatcctcctgccttagccttctgagtagttgggaccacaggtgcacctcaccatgcccagctcattttttcatttttttgtaaagatgggattttgctgtgtttcccaggctggactgaaactcctgggctcaagcagtcctcccatttctgcctcccaaagggctgggattacagtgtgagcctctgcacccagcccttgttgatattgtaactctcttccttatcctgatctttggtctgccttctgaatccggttttatgtgtttgcatttcttttcaatcctctgtaacatgagctaccatgagatgtctctgaaatgaaagggcagatatataaaataaagtaaaaatcttctcaggaagttttgggaacggctgttttagagagggacatcattggagtccctagaggctgttacaggagcaggytgttactgagtttggtgactgggatgtgcaggatttggggagctggtgtggtgagaga

SEQ ID NO: 27893 - DNA, 536 bp, Homo sapiens
gcagtcagcaggagcagaaaagaaaacttttttaaaggatgcaatttaattaaattgtgatgtattggagatttctctccagaaatgatttctgtgtgagtgttgctttgcttactgtgagaacgcagatatcaaataaaaaaaccaaaggtaaactacaatcactagggccttttgttgggttttttaatgggaagtcarttagattagattcaggtatttcatatactaacatcaccttttgccctattaggatctgatggagcattaggaaagaaaggcaagtcatatttgcatttattattagggctaacactttttaattaaattggcttttactaagtatttggctaacttcagaattcagatactacaaatacgtaatcttcagcctgattcaaagttttctttttggggaatatcctttaagttagcagtgatccttatatatagaatcattgagagactaagctaagctattgtccttatcctctagtctagtaaaaggttgtgagcaggacagccatgtaattttc

SEQ ID NO: 27894 - DNA, 1705 bp, Homo sapiens
tgtgaggcagctactgtgattgtcctggccaacgccccaccggagagtctcccccaaccccctgagctcagtacatggcatatgccctcttttggagtggtcttctcagaggggcctggttgcccatcagctgctgtggaagcgatacagggactcctcctgggtagcagcagggccagcctctgcctatggagtccctcgagaaaataccgcccagcctttggggtgcccccttgccctcctgacaccctcaaacaacagaagctgcctgccttcttaatgggttcatcctgaatgagaggtttccaaaaagaagccctccctcaagacaggcactgctcttgttcccctgaggagggagagcaggctcgtcctggcctgtccaggggagggtccgaaacccttggctcctggacagcctccttgaggggagatggcctccccttgtgtcccccacctcgcagacgtgctgtgaatgggcttggactcagagcacgcccctgtctgttgggtaggtgggttacttgctctgcattccccctcccagcccccgctccccgcccacctgggaacggcttccctggggttccccggtccccattaacctctgggacctcatttcccctcaccgaagacacagtgtaacaagcaaaaaaaacatcagagccagcgtgcagtgtctggaaaatcacccgcagcccacgcccttctgcaaaggatggggcctggaagggcctctggcgtgggaccgcactccgctcgggctccgcccgctgacgtttttatgggataatataccgtttcgctcacgcaggcctatttgtcagtgggctgcccctgtttgttgtaatctataatattactgcctcccgtggccccagagcagctgccgcgggagaatccagggatggtgggcgctaggtgygcgctgaggggatgtggtggcaggcgctgggggcaggcggcgcccaggtcctggttatgaggtcggcgcggggtttgcagcgagcctcgggtctggtggggaggcgtccagcgcccaagctgggagccagccgggctggcatgctgcagctgtccacacgattaggttcccgatcggatcagccaggaagtgggtttttttcattctgacctgctgtggcgaggaagggagggacaaacaggtgggctgggttcctgccttcccttctctcccctaggatcccccaagaaaaagtccagtgtcttgagatgcggggactctgaggctggccggaagtgctgcccctctccggggtctgtgggagacccactgtcacttgcaactgtgaggaacggcagagcagccccttgccccagctcagtgcagggacatggttttccagtggaaatttccagaaatgggggatgggtgtgcttccaatagggtcctctgagcagcaggctgggctccctgaagcggagggtgacattggggggcagtgccttcttggggtaccccaccaaaaaagagaagccttagccatattaagtaagaaagaaaccagcctgctggcgtcttcaagggaagtcgggtctcagtgcgactccctctctctccggtccttggagcacagttgaagctttgctttcttcccctgagacttctgcaaccaggggcgcctcctgttcttaacacatggcatgggtgagagtgagcagatccagggaagaagagatgggg

SEQ ID NO: 27895 - DNA, 580 bp, Homo sapiens
gctaaaatacgaattgattacmttattatttttcagttcaatttcattttaattatatagacctaatagcattatgatataatcttgttgtcccaaatagcttgatctttacaatggccaatgatttttcattttataatattattttaaaaatttaattataacatatgtatattttaaccttttttatttttgaatacatcatacatacagaagagtctaaagcacacacacacatatatatatgtagtttacatacatatagagagttatatacaatttaaggggtaattataaagcagaatccactaaccatcagcataattaagaatacgtgatagtcagttccctagaagtcattcctgtgggtcacaaacccaatcttgttgcctctccccagagttaaaataatactttttgatttttgtgataatcatctattttcttcttcttctcctccttctcctccttctcctcctcctcctcctccttcttattcatcgttgtcctcttcgtcttcttcttctttctaatttcatctgtatatgtgttctgatatggtttggctgtgtccacaccc

SEQ ID NO: 27896 - DNA, 580 bp, Homo sapiens
gctaaaatacgaattgattacattattatttttcagttcaatttcattttaattatatagacctaatagcattatgatataatcttgttgtcccaaatagcttgatctttacaatggccaatgatttttcattttataatattattttaaaaatttaattataacatatgtatattttaaccttttttatttttgaatacatcatacatacagaagagtctaaagcacacacacacatatatatatgtagtttacatacatatagagagttatatacaatttaaggggtaattataaagcagaatccactaaccatcagcrtaattaagaatacgtgatagtcagttccctagaagtcattcctgtgggtcacaaacccaatcttgttgcctctccccagagttaaaataatactttttgatttttgtgataatcatctattttcttcttcttctcctccttctcctccttctcctcctcctcctcctccttcttattcatcgttgtcctcttcgtcttcttcttctttctaatttcatctgtatatgtgttctgatatggtttggctgtgtccacaccc

SEQ ID NO: 27897 - DNA, 917 bp, Homo sapiens
  misc_feature (1)...(917): n = A,T,C or G
ccacatgtgtgggtgacaattcttactgtcagctggctgtgggtatgagaataagtctcaactttgtattgggctgtgttgacactctctgtaccaccacagggcattatactgtatgtgattttatgttgtatgtgttgtgattttttttgtgacctttgtacaagtagaaaacccagaaccatccccattttcccaagcgtaacaatgagagtgaacgtctcttctgttagcttggttcaagtgtaagagacaacactgtgcctgtgagttagtcaagaaatgacttccctttgacctgtggccaaatccacatacgacagtcacgattccaactgtggtctgcatccatatgtgagatttataacctcaccagtgggctgtgtctaggtttaagggtgacaatcccattgttggctgggtgcacctgtgggagtcacaatctcacctgcgtgttggaccgtgttatgacatagcttataccacccaagggctttgtaaaatatttgtgtcataatctcccatgaccttttataagaaaacccagaaccttacctgtgtccctaagtctagccagaagagtaaaaaatctgttgttttggttgagtctatgtatgagagtcattatcatgtccactaactgggcctgggtatatgtaaaaatttcacctctgggtgtggatcasgcaagagtcacatcacctgaattctgggccaggaatatgtcaacattcttcttgtgtgcagtgccatagcaggaaagccacatcgcctgagtgctgggcttagtgagatgttacaacgccttctgtggacataaaatgatagtcacgtcacttatatattgggtccagaaatatgtcacaattcccactgtntgcatggcccaggcagaagagtcacatcatttgggtgca

SEQ ID NO: 27898 - DNA, 978 bp, Homo sapiens
cagctctcctccacttcctgcttctgcagcaagcacatcagtgtctgtgtgttactacagctgagtagggggaggcaggcctgcatttcatccccatggcagcccaaggagatgagctcagaccagctttcctcctggccaatctccaagtttacatttggggtggaagaaatggaaacgctgcatgttgaagtccagccccccctttaataaacctgttcccttctcattggatcatcagttctttatgtacattctctggcacatgaactccagtgagacaagtaagcaagctgcaccccaacctttaaaaattaatatagacactaacacacaataaaataaattacatacacttagatgattcttgccaactgcattcacttatctagtaacttagagcttattctctacaaaagaaagtattcataaaatacatacgcagccccttaagaagctcacaattcagcagcaatcactagtgaatccataatacttataattcygagtcataaaattaatgtccagattatcctgtgatattataccaacaaaggaatctactttgtagcacacaatttgactaaaatatttaagccttccttttacagtaaaattataaatacatcttctctagtagattaggcagactatgacaatcatgaccaaatatgtggtatcagtttaataactttcccaagactacgaagttcaatgaagtaaatgaggggaaataaggaaaggcaaggctacattaagcacacacatacaatctgcatagactactaacttacagaattagtcccagagttaaaggagcattaagaaagtgcctctgaaattctaacgtgtacaaccttcacctgggggagcttgttaacatgcagattctgattcagtaggtctgggcctgagattctgcaaaaaattcctaagctgctggctggtacgcaaagcacaaaatcagaaggcctcaca

SEQ ID NO: 27899 - DNA, 525 bp, Homo sapiens
ttgcttcattcttaagatggtgactaaaattccagctcctctgctgtgtcacctcgggcaagttacctaacctctctctacgtgcattttctcatctgtaaaaccatgaaaatagaggctaactcaytgaaatattgagtatttaattagctaatgtacatcaagctaaaaagttaaaacaatatctggcaaatcacagatgctcaataaaaatcagccaaaacatgtagtgagcctgtgcacatacatttgcagatgaactacaaccttccccttttggagtttctactccaggaccaggtagggactgttgcataatgttatgtgttcgagtttaccaccattattcctttgagttaagttgctgttgtcacgtatcaggcttctaaccaaggagcttgcccctaatctgaggttcccttctaagtttccttttgtattagtccgttttcaggctgctgataaagacatacctgagactgggtaatgtataaagaaaaggaggtttaatggactcacagttcc

SEQ ID NO: 27900 - DNA, 525 bp, Homo sapiens
ttgcttcattcttaagatggtgactaaaattccagctcctctgctgtgtcacctcgggcaagttacctaacctctctctacgtgcattttctcatctgtaaaaccatgaaaatagaggctaactcactgaaatattgagtatttaattagctaatgtacatcaagctaaaaagttaaaacaatatctggcaaatcacagatgctcaataaaaatcagccaaaacatgtagtgagcctgtgcacatacatttgcagatgaactacaaccttccccttttggagtttctactccaggaccaggtagggactgttgcrtaatgttatgtgttcgagtttaccaccattattcctttgagttaagttgctgttgtcacgtatcaggcttctaaccaaggagcttgcccctaatctgaggttcccttctaagtttccttttgtattagtccgttttcaggctgctgataaagacatacctgagactgggtaatgtataaagaaaaggaggtttaatggactcacagttcc

SEQ ID NO: 27901 - DNA, 591 bp, Homo sapiens
aacaatatcttgttcaaaatataaaattctgtcatatattgaaaataattttttaaatgatatgttttctctttccctcttcatcaaaaacattgagaatctgatactaaaacctctttctaggtcatggatcttggtattaaaacctgcatttttgatgcatacaaaccataatatcaaaaaatagttttgccataataaggtcacttctgaaackcaagaaaataccaaggcacatgatttattttctggttatttatttattttctggtttatttcctggtataacggtttgttttctgactctagtttgcagtttcatcagaatcacaagtgaaaaaatgtatcctgttaaaatgggcacaatttttatgcacatatgtcaggggacctatttatcaccacgtggcagcattctcttgctttatggcagttactgaaagatgtatctttttttttcaattttgataagcccactgtttctaagagtttcagtatttgaaatagctatataagtgaaatcatgcagtatttgtcttcttgtgactggttgatttcgcttagcataatttcctcaaggaatatccatgc

SEQ ID NO: 27902 - DNA, 591 bp, Homo sapiens
aacaatatcttgttcaaaatataaaattctgtcatatattgaaaataattttttaaatgatatgttttctctttccctcttcatcaaaaacattgagaatctgatactaaaacctctttctaggtcatggatcttggtattaaaacctgcatttttgatgcatacaaaccataatatcaaaaaatagttttgccataataaggtcacttctgaaacgcaagaaaataccaaggcacatgatttattttctggttatttatttattttctggtttatttcctggtataacggtttgttttctgactctagtttgcagtttcatcagaatcacaagtgaaaaaatgtatcctgttaaaatgggcacaatttttatgcacatatgtcaggggacctatttatcaccacgtggcagcattctcttgctttatggcagttactgaaagaygtatctttttttttcaattttgataagcccactgtttctaagagtttcagtatttgaaatagctatataagtgaaatcatgcagtatttgtcttcttgtgactggttgatttcgcttagcataatttcctcaaggaatatccatgc

SEQ ID NO: 27903 - DNA, 1304 bp, Homo sapiens
tgtgaggtctcaccaaggggtggggagaaggggggcttacattttcttccgtgctatcgtaagagccactaaggaatgaaaagctgggctttaaaaagtggagaggggtgagacacagcgggagaaggtatctctgattctgatagctcaattgcaaggcagttgggaagtttcattatctgatgtccagatgaaggcgatgggtttaagccaagaagatcattagcaattttcattatgcaatccacatcactctcatatctagcagaaatgagaaactcgcttgtaactggcaaattaaataytgataatgcagatctgctctacaacctctttcacaaggcgggtaccatgatttcagtatttctaaaaaactcagtcatttgcattccagtatcacaatctttgtcataactgcgggcaatatgtaacattatgaagttaatatttatctttaaagcaacccatttttaacttaaataagtggaacaataaatggaacataaaatacgatgtgtgccaaggaaactttgtattgccacggtaaatgaaaaaccaatatcaacagtcacacataaaagttaatgaaaaaaatccattaatatccaacaataattaagaaccttttttattccagacacttttctaacaacctcatatgcattaattagtttaatctttttttgcatgcaaaaatacaaacacgaagacacatgcgcatgcacacacacacacacacaaacttatgaaatctgtgcaatgattatctccactatacaggtgaggaatttgacatagagaggattgaagtaacatgtacaaggctacaaagtgctaagttgcaaagtctagattttatctcagtaggcgtagctccaggcccctgattcttaatagtgtattttgcaaacaatgttttcaaagtgcaaagagatgctctggggctggaggctctcatcctgaggcacactccctttcccttaaaaaagaaagcttagaaagtgttacagccctgctaaagatactttagtttaaactgagcatttctgattggcataaaaaccacagagagacaatggaaaggggagtaactttctaagtgattccccctttcttaatgagttagtgttcgcctgaaagctgtgagtaagacgtgcggtaggtgtcctatattttgagaaatacagagctagcagttggtggtagcacatgtattttccaggatcctttgttcagctgatatccacattttgaaagcatagcagagatctatatctggtggttttcgtgtttttttttttttt

SEQ ID NO: 27904 - DNA, 1051 bp, Homo sapiens
tcctacttgctccccagctgactgcaagtctasacacatcatcctgataaagccagagccactttgcacaagatgactcatggttcagaaaccaccccagctcatcgtcaggaggttccctggtttgctgagggtggcttcctggcagagctctgcaaagctggaggaggcttcattattacttccaacgagggttcctcttcactccctccttctctctcccaattccacgttaggctctgagacacttagaaaccatgcttgaatccctttgggaaagatgccaacgcctaatggaagcatttcacaaaagagcttcatgaaatcctgctcctggagtccgccaagaggtgtggatctttgaaatccattatgagcataccaaggaaacatcctggaaagtttaacgctaccttccccataaatatttcctcattcaagtctccgtctctcactcccagttccaataattattgcacaggatatcactctgagaggttctgctttcagcgtttcacacaggaattgttggttcagatattgatgagctctgcctagaaatatgccacattcttttattcattcctttaaaaaaatagaaagatgcccccaaattcatcaatgcattcatttatgcacttaaaagatgtatttattaaactcatactatatgctaggtcctgggtatccaacaataaattgaagaaatcatttctctccttacaaaactacatatttgggaagttagacaatatagccatgaaaacataagtgcaaactgagcgaagtggcacagaaaatgaagaaaatcctatcatacagactcagagtggggaaaagaaactttgtgtggtcagaaaaataaccaagagaaggtgacctttaaaaaactaaaaaaaaaaaaaaaaaaaaaagccatttaaaaaaaaatggacaaaatttatttgtccattcagaaaatggacaaattgggagggagaaggagggagagagagagaaagcaggagagagagagagagagagggagagaaggagagaataagagaatgag

SEQ ID NO: 27905 - DNA, 1037 bp, Homo sapiens
ccaagcagagacactaagagaaagggaaacgacggcagtaagaaaatacgcgggggctctccttctcagtcatgcataataaacacaagagaaatttcgagaaatttcatttgcatgttgaaatttcattgcaacatggtcccacggagggattcgacgctgagaaagctactgtgcttggggcgggggggtcttgctgtggcagaagaaggaagagaaaaaaaggaggaaaaaaatggttgggaaaagtaaagctggtgataatgatcctaacaattctaaaatacctgcacagagacacagatgcacagacacacttctgctcccacaactgcttgcgacgcaggcaaggcgggagaggaaaccacgctcggagaagggacgggactcagcttctaggaatcagctgagaagtggagacgctgggaccgcggactccaggacccgggctcagtcacccacgccgggaagctgcccaggatggcaagaacccagcccaggcccacgccgcccccatagctcagtggacccggacctcagggtgcccctgtcctgggaaagttgcttcctgaccctgaggaaacgccagcaggaaagactccacttggtaaacacttttggtggggactgctctgtgacttccgccaatttttctccaggggcagcagcttgatttggaggagctctatcgccccctggtggagatttagccacatgcttctgcaggggccaccgtcaccrttcagactgcagcagctgtgggggcagaggcacgaaaagggacgggacggaggacgttttagagaccaactttttagaatatttgtttggcataataatcttctagaggagctggcatcactcggggacctgggcaactggggctcctgccctggcttggctttagcaggccccactctggtcctctgtggggcagtaagtccagggagctcacccaaagcccacagccgtccttcccctgcacctggagctccaggccctaaacctgctcccacggctgcatgggcctctctctt

SEQ ID NO: 27906 - DNA, 1037 bp, Homo sapiens
ccaagcagagacactaagagaaagggaaacgacggcagtaagaaaatacgcgggggctctccttctcagtcatgcataataaacacaagagaaatttcgagaaatttcatttgcatgttgaaatttcattgcaacatggtcccacggagggattcgacgctgagaaagctactgtgcttggggcgggggggtcttgctgtggcagaagaaggaagagaaaaaaaggaggaaaaaaatggttgggaaaagtaaagctggtgataatgatcctaacaattctaaaatacctgcacagagacacagatgcacagacacacttctgctcccacaactgcttgcgacgcaggcaaggcgggagaggaaaccacgctcggagaagggacgggactcagcttctaggaatcagctgagaagtggagacgctgggaccgcggactccaggacccgggctcagtcacccacgccgggaagctgcccaggatggcaagaacccagcccaggcccacgccgcccccatagctcagtggacccggacctcagggtgcccctgtcctgggaaagttgcttcctgaccctgaggaaacgccagcaggaaagactccacttggtaaacacttttggtggggactgctctgtgacttccgccaatttttctccaggggcagcagcttgatttggaggagctctatcgccccctggtggagatttagccacatgcttctgcaggggccaccgtcaccgttcagactgcagcagctgtgggggcagaggcacgaaaagggacgggacggaggacgttttagagaccaactttttagaatatttgtttggcataataatcttctagaggagctggcatcactcggggacctgggmaactggggctcctgccctggcttggctttagcaggccccactctggtcctctgtggggcagtaagtccagggagctcacccaaagcccacagccgtccttcccctgcacctggagctccaggccctaaacctgctcccacggctgcatgggcctctctctt

SEQ ID NO: 27907 - DNA, 601 bp, Homo sapiens
aggctcctggctggtggccacttcactcccatctctgtctctgtcttcacatggcttctttcctgtgcctgtgtctcttgccttctcttctcgtataggacacttgtcactggatctggggcccaccctaatccaggatgatctcatttccagatccttgtattcatatgtctgcaaagaatcttttatccaaataaggtcacatgtgcagggggcatacccttcsggtgagggggggcaccattcagcttactacatagggtgagggacagggctgcctgccagggcaggtacttcatagaaaccagctctgagttaggaccccgcccccatgtgagggtgataccggccttggggtcagccagggcccccatgtgggttcagagttctgtggagcctttcacctggagagtttacattgtgttggcctagaaggtggcagttgaagtcacagaaatggaaaaggttgtgcagggactgggaggtgtaaggagagaaagggatagaaaagaaggtcctatgtgggggaatctgcatttgaggggtcagaagaggaagagggtcccacagagacatggagaaagagcaggtggggaggtca

SEQ ID NO: 27908 - DNA, 607 bp, Homo sapiens
tgaacccaggaggcagaggttgttgtgagctgagattgcaccattgcactccagcctgggcaacaagagggaaactccatcaaaaaaaaaaaaaaaaaaaaggactttctcaaagaaaatgtatttaaatgtctgcaccaataattccagcatgtgtatgaataaatatgatatgtcctttacagtgaaaaaaaaaaaaaagaatggctattgttagtcaaaaaacaacagatgctggtgaggctacagagaaaaatgaacactttatacaccgttggtggaatgtaaattagttcagccacaagaaagcaatttggagattcctcaaagaatttaaaacagttaccattcagcacagcaatcccatcactgggtgtgtatgacccaaaggaaaataatacatcctaccaaaaggacacatacacacgtatgtttgtcacagcactgttcacaatagcaaagacatggaatcaacctaggtgcccatcagtggtggattggatmaagaaaatgtggtacatacacacaatggaatactacacagccatgaaaagaaaaatcatgttccttgcagcaacatggatgcagctggaggccattatcccaa

SEQ ID NO: 27909 - DNA, 1059 bp, Homo sapiens
ccccaatatgtagcccactctgtgcagttggcaggctagaagtaccagggaattaaatgtaccaccccaaaagccctcaattaataatttatggttgttggtatataatctcagattatctcttctcttggttgacacaactctgaggcatgcttttgccctttgccctttcccctagagtgaagcaatcctgtggtttctagattagtaacgcacacttcgagcttggtttcttctctgtagcacctacccatttcccttctaatgtttcctgcatctcccaaatactatgcctctgcttctggagggtcataaaataagacaggaagagggaaagtaaagagaaaactgtcattcaaaggaaagctgtaaagcaagttaccagtataagcaagttcctgcatctcccaaatactatgcctctgcttctggagggtcataaaataagacaggaagagagaaagtaaagagaaaactgtcattcaaaggaatgctgtaaagcaagttaccaatataaagcaagttgccactagggaattatgggagrcaatggggaataggagcctcagaattattctacacaaaagaaaagggagcctctatactgatatactgacacccaccagtcactggttaagtgatgatgaccttagaatgtttgtattctctggcgtttctggcctgctgtggacaaagtagagaatgagattgctactagagaaaactctcagaaaagtaaatgtaggtgctgacttttgtaagccaggccagtctgcctacggaatggggaagaaaggttagtttcttccacactgggatcctcaagaaggttactgtattttatttgtttttcctccaaagggtttatcaccatggctgacacaaagaaggtatgaaaattttttctaaaccacataattgagaggataaagcaactatatggttaagaaatcatagatacattcaatacaagtactttaggataactgtgaaatggagtttatgaggaaatctgagcaaaatgttgagcttcctgagtgaggcattttctggagcttc

SEQ ID NO: 27910 - DNA, 1059 bp, Homo sapiens
ccccaatatgtagcccactctgtgcagttggcaggctagaagtaccagggaattaaatgtaccaccccaaaagccctcaattaataatttatggttgttggtatataatctcagattatctcttctcttggttgacacaactctgaggcatgcttttgccctttgccctttcccctagagtgaagcaatcctgtggtttctagattagtaacgcacacttcgagcttggtttcttctctgtagcacctacccatttcccttctaatgtttcctgcatctcccaaatactatgcctctgcttctggagggtcataaaataagacaggaagagggaaagtaaagagaaaactgtcattcaaaggaaagctgtaaagcaagttaccagtataagcaagttcctgcatctcccaaatactatgcctctgcttctggagggtcataaaataagacaggaagagagaaagtaaagagaaaactgtcattcaaaggaatgctgtaaagcaagttaccaatataaagcaagttgccactagggaattatgggagacartggggaataggagcctcagaattattctacacaaaagaaaagggagcctctatactgatatactgacacccaccagtcactggttaagtgatgatgaccttagaatgtttgtattctctggcgtttctggcctgctgtggacaaagtagagaatgagattgctactagagaaaactctcagaaaagtaaatgtaggtgctgacttttgtaagccaggccagtctgcctacggaatggggaagaaaggttagtttcttccacactgggatcctcaagaaggttactgtattttatttgtttttcctccaaagggtttatcaccatggctgacacaaagaaggtatgaaaattttttctaaaccacataattgagaggataaagcaactatatggttaagaaatcatagatacattcaatacaagtactttaggataactgtgaaatggagtttatgaggaaatctgagcaaaatgttgagcttcctgagtgaggcattttctggagcttc

SEQ ID NO: 27911 - DNA, 1059 bp, Homo sapiens
ccccaatatgtagcccactctgtgcagttggcaggctagaagtaccagggaattaaatgtaccaccccaaaagccctcaattaataatttatggttgttggtatataatctcagattatctcttctcttggttgacacaactctgaggcatgcttttgccctttgccctttcccctagagtgaagcaatcctgtggtttctagattagtaacgcacacttcgagcttggtttcttctctgtagcacctacccatttcccttctaatgtttcctgcatctcccaaatactatgcctctgcttctggagggtcataaaataagacaggaagagggaaagtaaagagaaaactgtcattcaaaggaaagctgtaaagcaagttaccagtataagcaagttcctgcatctcccaaatactatgcctctgcttctggagggtcataaaataagacaggaagagagaaagtaaagagaaaactgtcattcaaaggaatgctgtaaagcaagttaccaatataaagcaagttgccactagggaattatgggagacaatggggaataggagcctcagaattattctacacaaaagaaaagggagcctctatactgatatactgacacccaccagtcactggttaagtgatgatgaccttagaatgtttgtattctctggcgtttctggcctgctgtggacaaagtagagaatsagattgctactagagaaaactctcagaaaagtaaatgtaggtgctgacttttgtaagccaggccagtctgcctacggaatggggaagaaaggttagtttcttccacactgggatcctcaagaaggttactgtattttatttgtttttcctccaaagggtttatcaccatggctgacacaaagaaggtatgaaaattttttctaaaccacataattgagaggataaagcaactatatggttaagaaatcatagatacattcaatacaagtactttaggataactgtgaaatggagtttatgaggaaatctgagcaaaatgttgagcttcctgagtgaggcattttctggagcttc

SEQ ID NO: 27912 - DNA, 1059 bp, Homo sapiens
ccccaatatgtagcccactctgtgcagttggcaggctagaagtaccagggaattaaatgtaccaccccaaaagccctcaattaataatttatggttgttggtatataatctcagattatctcttctcttggttgacacaactctgaggcatgcttttgccctttgccctttcccctagagtgaagcaatcctgtggtttctagattagtaacgcacacttcgagcttggtttcttctctgtagcacctacccatttcccttctaatgtttcctgcatctcccaaatactatgcctctgcttctggagggtcataaaataagacaggaagagggaaagtaaagagaaaactgtcattcaaaggaaagctgtaaagcaagttaccagtataagcaagttcctgcatctcccaaatactatgcctctgcttctggagggtcataaaataagacaggaagagagaaagtaaagagaaaactgtcattcaaaggaatgctgtaaagcaagttaccaatataaagcaagttgccactagggaattatgggagacaatggggaataggagcctcagaattattctacacaaaagaaaagggagcctctatactgatatactgacacccaccagtcactggttaagtgatgatgaccttagaatgtttgtattctctggcgtttctggcctgctgtggacaaagtagagaatgagattgctactagagaaaactctcagaaaagtaaatgtaggtgctgacttttgtaagccaggccagtctgcctacggaatggggaagaaaggttagtttcttccacactgggatcctcaagaaggttactgtattttatttgtttttcctccaaagggtttatcaccatggctgacacaaagaaggtatgaaaattttttctaaaccacataattgagaggataaagcaactatatggttaagaaatcatagatacattcaatacaagtactttaggataactgtgaaatggagtttatgaggaaatctgagcaaaatgttgmgcttcctgagtgaggcattttctggagcttc

SEQ ID NO: 27913 - DNA, 550 bp, Homo sapiens
cagaggatttttgacttcaataacaactaaaaaaatcacatggaaagttgatagctgatttgttagggactttacacctgctttctcagataccagtaattcattttgctgatagagctgtaaaagctgcttttatttattatttatttttattttttagatgaagtctctctgtgtcacccaggctagagtgcaatgacacgatcttggctcactgcaacctccgcctcctgggttcaagcgattcttctgcctcagccttccgagtagctgggactacaggcatgtgccatcacacccagctaatttttgtatttttagtagagacagggtttygccatgttggccaggctggtctcgaactcctgacctcaggtgatccgcctgtctcagcctcccaaagtgctgggattatagacgtgagccactgtgccctgccaaaagctgcttctaaaacatggctggctccaaacttagaagctctgtttttaatacaacaagaagcttttgttcattttttaaaatgtgcttcacaaaaataaatgagcaa

SEQ ID NO: 27914 - DNA, 1261 bp, Homo sapiens
ttcagggcttaaaacctagatgatgggttgataggtgcagcaaaccaccatggcacgtgtacacctatgtaacaaacctgcacgtcctgcatatgtatcccagaacttaaaataaaataaaaataaaaataaaaagctgttgttcagacagtggtaaaggttctcttaaaactcacaatttccacttctgggataccagagcacattgactaggacagaggaagtcattttacttctactgttgcccaggaattatgccaaatgtgtgcagattcctataagcctcagtcctttggacaagtagagtgaataaatcaaactctaaaaagctatttggccaagatttagtaatctaacatgttaaaatggcttagagctttgccactaaccttatcaaaaattagagtgacccctgcaagcaagcatagtatctctccctttgaacttatggttggcaggcctatgaacttgggtctgagaccatgttctgttcccaatttaactgaatcctgtcataatcatgttcaatagttaaaaggccttctcttttccctagaaaccctgagacttacagtcataaggacttgcctgagtcagtctgccacccttataggataggagacttcatccacataaaggtatttcaaaggaaagacaggttgtcactctattgggagagaccctttcaggtgctgctgatcactcatactgctatcaaagtgaaggagaaccatagctggattcatgctttctatgtgaaaccagcactgcaggaggactagacagttgttcccacaaagaacttcactagagtaatggatattggtactgaactcaactgaaaagaggtattctttatttttaaaaaaatttttttgagacttggtatcactctgtcccccagactggagtgttggagtgcaatagcgtgatctcggtcactgcaacctctgcctcccagattctaatgattctcttgcctcaaaaagatgtgttctaaaaaattgattgctattctcatagtactactcagacagaggttatttgaatcaccacaataaagaatcacatttattggaaagcaaacattattacaccaaatttctgcattcccagtaatggttcctccaaacaygtatttccaatgagctctaaattgtactcccattgtggatatgctctggattactggccgagtacaagtgagatcatcctcattagtaatttttgataataacaaagttaaagtaattagtatgca

SEQ ID NO: 27915 - DNA, 694 bp, Homo sapiens
  misc_feature (1)...(694): n = A,T,C or G
gccagagcttttcgttgccatgtcaatagaaatggatttaaatcccaggagattctcaaatcacaagcaatctctttactttttttttttttttttttttggccctgggatttttgatgaatactggggttttgagggaagctggggtgtttaactgtgaaggtggagaatctcctaaaatctcatgaatcgtacaagatagacaaaagggcctaaagtaaacacagagggcattttgccctcaaaacatttgtaactaaaagtgagttaaataaataagctgccaccagctcaacaaaggtcaatgtttttgttggattgagatgatcagcttctattgtgtgtaagtgatagtagaaaggatgtgtagcctctatggggaaataaaagggacctcaggtctggcctttttatacacaatatccggcacataacaacaatnccaataataattataataataagaacatatagagaaataataaaaatgacttaaatcaagataaatcatttcaaacaaaataaatcacaaagaattaacctttggaatatrtaaataatgcctacatataaataaaacaaattatctgaagagaaaaatggacaattgtcaaaaaaggaatggcaattgtcagaaaaagagttccacaacatatatgtggaaaaaatgttcaatatcattagagaagtgaaa

SEQ ID NO: 27916 - DNA, 684 bp, Homo sapiens
aaagcaagtttattgtatagaacccaaatgtcacctttttaatggaagtaatgatatagttaaaagagtttaagcattagatggaagaagatatttgaaagagtaaaagaatgttaaattgatcttaataaaagggggagtcaattacactgtctaaaagcttaatgaattaaaaagtaaataaatgtgataaatagatgtatgaaaataaaattataatgaccctgggaggtcgctgaggagacaaaataatgtctaggggaggttatcaaaattcttcatcttatataaagttacctaagtagaccttaaatttgataccattaagaaataaagtgatgaacatatgcagaaactcaccagaagaattacaacagaaattctaaaaattaactacctctaaggatgagccaaagataaacaacttttcacttcatactcaagtgtattgcttgcacwttttgtgcagacttaattttaattaaaaaattgtttgctcacttggagatttggatcatttgaggtaaatgtatttttatttcttttttctcctctcttactgaaatattttcctaattacccagcagtctcaacagactgtttttgttttgttttgttttgttttaatcatcctgcataggtttatcgacctttacctgaaattgaaccatatcaattgatgca

SEQ ID NO: 27917 - DNA, 723 bp, Homo sapiens
ataacaaaaagtatcacagtaacctctgcaaaaaccacacccttgtacaaagaccatcacaaccttacacaaaatacttctgcagagatatctgcccagcaattgcctgtccaaactcagactggcatcacccttgtgacctttgtaggcagggataatgctttcaaaacaattatgtaattctcctcattctttttcctttagaaaccacagtttttctttacatctctaaatatccacatggtttaatatggcatgagtattctcattgcaatgctctattcccaaataaatatatgtttttcttttagaaagccaatgtttgttgtttagatggtcaatctttttatgatcttttcctgatccttgtttttacttttctttagatttttttkttgttgttgtttttatgaacttagactttcaaagttatcctatgtgaccttgaaaattgaaaatgtttctttaggttttcttttactatcattatttttttaaagaaagtgctccgtgaaaaagggcaagtttgataacatcctatattttgaatttgttcagagttcatcagagacacaacatcttatggggaattacctccccaccaagatcagagtacatactcagtttcaattgctgcatttcgtctttcaatttaaagggggctaaatatcatctaaaaatactcaagcacttggaaagactttttaactaagcttcattcca

SEQ ID NO: 27918 - DNA, 723 bp, Homo sapiens
ataacaaaaagtatcacagtaacctctgcaaaaaccacacccttgtacaaagaccatcacaaccttacacaaaatacttctgcagagatatctgcccagcaattgcctgtccaaactcagactggcatcacccttgtgacctttgtaggcagggataatgctttcaaaacaattatgtaattctcctcattctttttcctttagaaaccacagtttttctttacatctctaaatatccacatggtttaatatggcatgagtattctcattgcaatgctctattcccaaataaatatatgtttttcttttagaaagccaatgtttgttgtttagatggtcaatctttttatgatcttttcctgatccttgtttttacttttctttagattttttttttgttgttgtttttatgaacttagactttcaaagttatcctatgtgaccttgaaaattgaaaatgtttctttaggttttcttttactatcattatttttttaaagaaagtgctccgtgaaaaagggcaagtttgataacatcctatattttgaatttgttsagagttcatcagagacacaacatcttatggggaattacctccccaccaagatcagagtacatactcagtttcaattgctgcatttcgtctttcaatttaaagggggctaaatatcatctaaaaatactcaagcacttggaaagactttttaactaagcttcattcca

SEQ ID NO: 27919 - DNA, 1263 bp, Homo sapiens
catgtacgttgctttttagacataatgctgtttcacacttaataaaactggtgtgtctctgtgtgtgtgtgtgtgtgtgtgtgtgtgtgtgtgtgtgtgtgtttgcttgtacctgtgcctgtgtttgcagtaggacatgttggcaaaggctggagtccaatagaacatttgatgtcttttgcgaataggtgcacacataattcaatggacttgagggtcatgagatactttccaaggtgattcttctaaattagaggctgctatggtttgaatgtctcttccaaaactcatgttaaaatttaattgtcattgcagcattattaggatgtgggacttttaaaaggtgacaagatcatgggggttctgccttcatgaatcgattaatgccacatgggaatgggttagttatggcaggagtgcttctgttataaaatctttcttgagcgcttgcatggtctctggccatgttatgatgccacacataggctctcacaagatgtagccccctgatcttggacttcccagcctccagaaccataagyccaataaaactcgtttctttataaattattccatgcgtggtattctgttatagcagcagaaaatggactaagacgagattatcttcaaaggatacaatggagtactagagaaaagacctgagatagagctagaacacatttctattctatttgtgaagtttggatctctatgaggtgttacagtgggccataggcccttatgagaccatattatagacatggtatattttattttttaaaaaaagaatgatctttatatacagagggatggggtcagaaggcatacatgacttaattgaaaaatcagtatactttaaagttttttcaactttcaaaaagttaatttaagtataaagtaatataaatgacctaactaccacttagataaaaacaatactttaagtgtgtatatttatatatacagttcatatagaactgatataaatggtcaatgaaaaagaaataaatgagaaaattctgctgactcagtttgcattaaactgacttcagatttttattaaaatttttctatcagtaaagggaagaggaaggagattgaaaaataaatgtgtggcaaacaaaaaaaaaatcttacattcaagtactaaagatagtatgcttcatttctctttgccatcgtagtgtaaggactaattgttactccttcagaagtgactgttttcacagctcgcattgccatttaaagccacagaaacatgca

SEQ ID NO: 27920 - DNA, 579 bp, Homo sapiens
tcccagtctgtgacttttcttctcctcctccttgacaatgacattcatagagcagaagtttttaattttaatgaagtctgacatcaattatttattccatgggtgcttttggtgaaagtcatcaccttagccaagggcatctagatattctctcatgttatcttttatgagttttatagttttgcattttatatttaggtttatgatccattttgtgttattttttgaagagtataaggtctgtgtcttgattcattttttttttttttttgcctgtggatatccagttgttctagcaccattttttgaaaacaaaatcttttctccattatattgcatttgctcctttgtcaaagatcattggctatttttgcaagtctgtttctcagctatctattctgcttcattgaacactttgtctctttttctctcacattatcttttgtttggttgcattatagtgtactcatctagcaattctcataacttgaagtcagcttgtaagtcctttttactgatttttccccatagacacattgtttactaraatttgcatcttatttaatcttcttacttact

SEQ ID NO: 27921 - DNA, 962 bp, Homo sapiens
atgaacggtggggctgtgctcttcaccctggctcctagataaggagtgttggggtgttgaaggctgaaagtatgagggtcgtgatcaactcagcataccactggaggctataagagtaaacagtacactgcttacccaccgccccatcacgtggagaggcactcatggcaggcttcgtgcctrcagtccccactcccagctccatcatactcctctgctcttatcttcccctttgactcattccacccctcccctcaccagcttctttaaaaatgttttatttggtgtattatagttgtgcagtgttttttttagaacaaggtagtaaggcactctgtgaatgaaaagttaaagtgaagcatttcaggtagtgtgggggctatttggggcctcaccccagtgagttcggagattccaagatcttctgggggcctccaggcttccctgtcccatccagaacctctctcacctccccagagagaaccccccccacccatgccaacgtccgcagccaccacacctccccagcccaccccagctccagccacaccctcctgctcctggagtttggtttgtgtccatcgagtgatgctggctcagtctcggcttctggtgctgccctgggcgaggccaggactctcctaggcattcaggcctgaaagagcttcccttgactcagccatgactcaccaggggtgggccctaccagggcggggtggccccctgaggggtcttgggatggcctggagtttctgagctataaacattgccatttaaattattgaaattactgagaaagtttgatatgtggcagctcagccttcaggggttgaagttcctagaacatctgctttcaactcaaaccagttagtgggattgtggcatggaagtctgggaaatgtttcctaaaaggccaagtgttggagagaaaagaggactggactgcgggttgggagacctag

SEQ ID NO: 27922 - DNA, 962 bp, Homo sapiens
atgaacggtggggctgtgctcttcaccctggctcctagataaggagtgttggggtgttgaaggctgaaagtatgagggtcgtgatcaactcagcataccactggaggctataagagtaaacagtacactgcttacccaccgccccatcacgtggagaggcactcatggcaggcttcgtgcctacagtccccactcccagctccatcatactcctctgctcttatcttcccctttgactcattccacccctcccctcaccagcttctttaaaaatgttttatttggtgtattatagttgtgcagtgttttttttagaacaaggtagtaaggcactctgtgaatgaaaagttaaagtgaagcatttcaggtagtgtgggggctatttggggcctcaccccagtgagttcggagattccaagatcttctgggggcctccaggcttccctgtcccatccagaacctctctcacctccccagagagaaccccccccacccatgccaacgtccgcagccaccacacctccccagcccaccccagctccagccacaccctcctgctcctggagtttggtttgtgtccatcgagtgatgctggctyagtctcggcttctggtgctgccctgggcgaggccaggactctcctaggcattcaggcctgaaagagcttcccttgactcagccatgactcaccaggggtgggccctaccagggcggggtggccccctgaggggtcttgggatggcctggagtttctgagctataaacattgccatttaaattattgaaattactgagaaagtttgatatgtggcagctcagccttcaggggttgaagttcctagaacatctgctttcaactcaaaccagttagtgggattgtggcatggaagtctgggaaatgtttcctaaaaggccaagtgttggagagaaaagaggactggactgcgggttgggagacctag

SEQ ID NO: 27923 - DNA, 591 bp, Homo sapiens
catttatgccagaagagcctaactatcttatcaattgagatatcactgagataatatgaatggattctagactactctaaagagaacaagagttatttggttcatatttatttggtatagattatttaaatgaaaattaaatgtagttatcagggctggggggaggatgcggagacattagtcaaagggtacaaagtttcagttagacgggagggatacagtttttagatctattgcacagcaaggtgaccatagttaataataatgtgttgtatatttcaaaattgctgagcataaatttcaaatgtaccaccaaaaaaagasaggtgaagtgattgatatgttaatttgcttcattgaatgattccatgtagtatacatatatcaaaaacatcacattgtaccccataaatataaacaagtatgatttgttgattaaaaatactatttattaaaaaagaaaaacattggccattttctcttcaagctgttcaaccttattaacccattcataatcaatgtgtttattcgaacctctagtatatcagtgtgttaaccatgtcttttcttttttgatgctttgacaatttg

SEQ ID NO: 27924 - DNA, 1135 bp, Homo sapiens
agtaattaactcatctataattctttctgtgtagggtttcagggagggaatctacctttatttagtgtccaaataaataactaatggtctgaacacctcttatactgtccatttcttccccactgatttgaaatgtaatctttattattaagtaaatttccatatatatggatctattttgatacattctactctattccaatctatttagctttcctttgccattactaaactatcttaattactcttgtctttctaatatctaatagagcaagttcttccagccctatatgctattcattgctctttaaaaacagaaaagaaaaaacttttacaattgtctgttcttgtctatattctctcttcatatgtcaagttcctatcctcaattctctcttcatatgtcaaattcctatcaaggttttgattgagattacattgaatttaatgattaattgagagattaccataatcataagactgaatattatcataaattatattatctcttcatttattaaaaaaaaatttttttttttgagacggattctcgctctgtcacccaggctggagtgcagtggcgcgatctaggctcactgcaagctccgtctcccgggttcaagccattctcctgcctcggcctcccagtagctgggactacaggtgcccaccaccatgcccagttaattttttgtatttttaatagagacagagtttcaccgtgttagccaggataggctcaatctcctgacctcgtgatcgcctgcctcggcctcccgaagtgctgggattacaggcatgagccactgcgcctggcctattcaaaatgttttaaagtgtctttcagaaaatatttatactttctttctcatataagtgttacacatttcttgtccrgtttaggcttttgttattcttataaatgtaatttttttcctctacattttttcattagttattgtggcataagagcagatattgattttgttttccttatacagagccattttattgcactctcattaattcaaattagtgcttcattggttgtcttagattacctctattgcctgtgtatataatgatttttgttgcttcctttccagtatttaactcatttctatgtttcttttcc

SEQ ID NO: 27925 - DNA, 1135 bp, Homo sapiens
agtaattaactcatctataattctttctgtgtagggtttcagggagggaatctacctttatttagtgtccaaataaataactaatggtctgaacacctcttatactgtccatttcttccccactgatttgaaatgtaatctttattattaagtaaatttccatatatatggatctattttgatacattctactctattccaatctatttagctttcctttgccattactaaactatcttaattactcttgtctttctaatatctaatagagcaagttcttccagccctatatgctattcattgctctttaaaaacagaaaagaaaaaacttttacaattgtctgttcttgtctatattctctcttcatatgtcaagttcctatcctcaattctctcttcatatgtcaaattcctatcaaggttttgattgagattacattgaatttaatgattaattgagagattaccataatcataagactgaatattatcataaattatattatctcttcatttattaaaaaaaaatttttttttttgagacggattctcgctctgtcacccaggctggagtgcagtggcgcgatctaggctcactgcaagctccgtctcccgggttcaagccattctcctgcctcggcctcccagtagctgggactacaggtgcccaccaccatgcccagttaattttttgtatttttaatagagacagagtttcaccgtgttagccaggataggctcaatctcctgacctcgtgatcgcctgcctcggcctcccgaagtgctgggattacaggcatgagccactgcgcctggcctattcaaaatgttttaaagtgtctttcagaaaatatttatactttctttctcatataagtgttacacatttcttgtccggtttaggcttttgttattcttataaatgtaatttttttcctctacattttttcattagttattgtggcataagagcagataytgattttgttttccttatacagagccattttattgcactctcattaattcaaattagtgcttcattggttgtcttagattacctctattgcctgtgtatataatgatttttgttgcttcctttccagtatttaactcatttctatgtttcttttcc

SEQ ID NO: 27926 - DNA, 1135 bp, Homo sapiens
agtaattaactcatctataattctttctgtgtagggtttcagggagggaatctacctttatttagtgtccaaataaataactaatggtctgaacacctcttatactgtccatttcttccccactgatttgaaatgtaatctttattattaagtaaatttccatatatatggatctattttgatacattctactctattccaatctatttagctttcctttgccattactaaactatcttaattactcttgtctttctaatatctaatagagcaagttcttccagccctatatgctattcattgctctttaaaaacagaaaagaaaaaacttttacaattgtctgttcttgtctatattctctcttcatatgtcaagttcctatcctcaattctctcttcatatgtcaaattcctatcaaggttttgattgagattacattgaatttaatgattaattgagagattaccataatcataagactgaatattatcataaattatattatctcttcatttattaaaaaaaaatttttttttttgagacggattctcgctctgtcacccaggctggagtgcagtggcgcgatctaggctcactgcaagctccgtctcccgggttcaagccattctcctgcctcggcctcccagtagctgggactacaggtgcccaccaccatgcccagttaattttttgtatttttaatagagacagagtttcaccgtgttagccaggataggctcaatctcctgacctcgtgatcgcctgcctcggcctcccgaagtgctgggattacaggcatgagccactgcgcctggcctattcaaaatgttttaaagtgtctttcagaaaatatttatactttctttctcatataagtgttacacatttcttgtccggtttaggcttttgttattcttataaatgtaatttttttcctctacattttttcattagttattgtggcataagagcagatattgattttgttttccttatacrgagccattttattgcactctcattaattcaaattagtgcttcattggttgtcttagattacctctattgcctgtgtatataatgatttttgttgcttcctttccagtatttaactcatttctatgtttcttttcc

SEQ ID NO: 27927 - DNA, 597 bp, Homo sapiens
caaagtcaaaatgtaacccacagaatgagagaaaacatgagatatctctctctctctctctctacatatatatatatatataaacacacacacatatcaagtatagaaatatatggataaaaggatatacatattctgttgattctgtgtctctggagaaccctgactaattaaacaacatgcaaacttatctttatttatgttattgtacttcaacagaaagtcttcaaaagcaacacatctgtaatgacatttaatagaagacagtatctttgcagcctatttcctgaagtaaggcatgatttgcatccaattataagaattaacaatgactataattggctaaagctgtgtcayaaaaagaggttacatttttattgtagaaatttagcttgtctcttgcatgatacatttcacaatcctaatgcatatttcaggttacttacttaactaagcaatatgttctgtcaaagaacttatttcaagtcaaagcaaaaaaaaaaaaggtctcaatgcagaacaacaaaaaaagtactattcaaatttaaagaaacaatattattctctccctcatcccttctcccacttggtagaccc

SEQ ID NO: 27928 - DNA, 531 bp, Homo sapiens
aaagtaaactaataatttatggctttagaatatcaagattttttcaaaattttatatattttataatttttacaaaattaacactaatatatgcaatgagcaatgatgtttgcaaatttccatttatgcctactgcatgttcagtgttttaaatatttttatcatacattttaaaagattttaaagaaaggaagcaatgaaaataagttttgaacaacttaagtcaaaacgaaaagtctcaagcattttaaatatatttatcttttatatttatttactttccatcattattaatacattattttaatgttggaatatcatcaggaaaatcatcatctggatttgggtaatataattattccctagtatttcttttaacataccttgatagttattctcctcttcagactaaataccttatttgaatgataaacgtatttaataaagaagtaataccacttttgtcatataaaagtgttaatgcatatgtgttggcttttggtttctayattacattttataagtctattt

SEQ ID NO: 27929 - DNA, 1016 bp, Homo sapiens
ggttttggtgtcttctttctctgctctaatggtttgggaattttgcattctctttctgttcttcttgtggctgcccttaaacttggattccgtgtccgtttktgggattatccgcgtctataacttcgtgatgagttcctgatctccgtcttccaaaacttgggaagtcatccgagggtttgttccagattgttttgggtaattttaaaattttatttcacactaattttattctaggaatcgcttcttcatcttactgaagttttgatgcgacgttatagttatttaggcttaacgggaggttgcatgggttttgtggccgtttctggtgtcttcctggtgtgtttggatttgtgcttcgccacgtccgcacgtcacttctgagcccagtgcggtggcccctgagctcctgccggtcacgggctgtgtgttgtccccctcacaccagagacagtcgtttcttctcttaactcttaagccctcctcagtcactcggatgaactgattaaattctgtgcttttaatactaagcattaaaaaaaaaaaaacatatgagggaagcacctgccacccaggcccatgtttctgctctcagccttgtgccctcccccggtggcccctccaaagggcatgaagctgtggatgctgtgcctgtgcctggaggctctggccctcccacccctggctgggctccagctctaggtttgttcagcagccaactcagagcagccgaggctcagggtggcatcagccggccgcgctggcttcacagccgacctcttctccatcatctgacgggcgcaggccccctcgctgccacccccactggtgggcactcagcctcaaggcacaggcctcctgggactggtggctcctctgaatcttcctgagagaggcaagtttagtcatcgctgagcaacgcaaaagcgtgtcgggtttatttactcacaacgatgtcttctaaaccaaaaatacttgacggggcctttctttctgttttccgagggaggggatgg

SEQ ID NO: 27930 - DNA, 1016 bp, Homo sapiens
ggttttggtgtcttctttctctgctctaatggtttgggaattttgcattctctttctgttcttcttgtggctgcccttaaacttggattccgtgtccgtttgtgggattatccgcgtctataacttcgtgatgagttcctgatctccgtcttccaaaacttgggaagtcatccgagggtttgttccagattgttttgggtaattttaaaattttatttcacactaattttattctaggaatcgcttcttcatcttactgaagttttgatgcgacgttatagttatttaggcttaacgggaggttgcatgggttttgtggccgtttctggtgtcttcctggtgtgtttggatttgtgcttcgccacgtccgcacgtcacttctgagcccagtgcggtggcccctgagctcctgccggtcacgggctgtgtgttgtccccctcacaccagagacagtcgtttcttctcttaactcttaagccctcctcagtcactcggatgaactgattaaattctgtgcttttaatactaagcattaaaaaaaaaaaaacatatgagggaagcacctgccacccasgcccatgtttctgctctcagccttgtgccctcccccggtggcccctccaaagggcatgaagctgtggatgctgtgcctgtgcctggaggctctggccctcccacccctggctgggctccagctctaggtttgttcagcagccaactcagagcagccgaggctcagggtggcatcagccggccgcgctggcttcacagccgacctcttctccatcatctgacgggcgcaggccccctcgctgccacccccactggtgggcactcagcctcaaggcacaggcctcctgggactggtggctcctctgaatcttcctgagagaggcaagtttagtcatcgctgagcaacgcaaaagcgtgtcgggtttatttactcacaacgatgtcttctaaaccaaaaatacttgacggggcctttctttctgttttccgagggaggggatgg

SEQ ID NO: 27931 - DNA, 1209 bp, Homo sapiens
agagatgagtaaatcacaatcagtcccagccaagcacagtggctcacctggccaagatgacgaaacctcatctctcctaaaaatacaaaaattggccgggcggtagtggagtgcacctgtaatcccagctacttaggaggctgaggcaggagaatcacttgagcttgggaggcagaggttgcagtgagccgagatcatgccactgcactccagcctgggtgacagagcgaggctctgcctgaaaaaaaataataataatcacaatcagtccctttcccagacatctagtgagcaaagtggacatgtcaaccgataatcatagcccagtgccctaggtgctgtaataaaggcaggtacagagggctgcggggaacagaagagatattaagtgtctggagtagggtaagatttcagaaaagaaaaaaaagtttcatctcaaaattaaagaataattggagttcttcctagtgcccctgcatgcacatgtcgctatcatccagagatatcatccagaggttgccaggagccccagtggctggaacatagcatttgtgggggctggcagtgaagctggcaaggcaagcaggcgccctgatctcacaaaaaaccttgtgcctttcagagaaggttgtccctgagactgtaagcagaggaaagcccaccccagaccatcacgatctcagcctcttctggcctcatctagagtactaattgcatattttactaatgccacacttatttgctatcttatattattatttctgaaaatcttgactataccaacccaccagcagcgcctctctgaggcttcttatcccaggttgacayatttcgtaccaggtaactctgctaccttggtcacaggtgattggaccagggattagcatctgacctaagggcagctaccctatggttggccagtgccctacaggaggtggcccagaacaaagcccagctcattggtgccattctatcctgcacgctgactgcctagacagagtacctctctcagggaatttcaaatgtgagacacagaaaggaaaacagacacaggggcaacagacgtggaaaaactcacttggaagaaagcagtaagcagaagacgtgacaagctgagcctagaggtagagaacagagtgagtcagtcatgtcagaacagcgacatggacagaagctgctaagactcagtgagacagaacactggccgag

SEQ ID NO: 27932 - DNA, 542 bp, Homo sapiens
aataaataaatattatgttcactgcctctaacagatgctcatgtgcacagctggcaagtttcatcaattatccttggtgccacctaaggcactattatcagaagttgtacagccttagcatgaaaacagagcttggctttcagtacgccgtgtgcttttctagtaaatatatttgtgcttttccaccatgacaattatcacagctcaatggtgttcattaaatagcctcacgttcttgtacaayccaaatgagatctgattattaaagaccaaactattacagaggaaccaaggaaaaagaataatgatttccctcacagtgttcagataagccggtctgctatttgctttagggaactatgtgacctgctctgactattaaacagctttcttatggctgatgagaaaattccacatagctaacactgaaagggatggcagattgcagaataaatcaatcttgccagccttggaactttccacatatactatttagattgacagtgacagaaggccaagagaagtaaaagtctccttcaata

SEQ ID NO: 27933 - DNA, 542 bp, Homo sapiens
aataaataaatattatgttcactgcctctaacagatgctcatgtgcacagctggcaagtttcatcaattatccttggtgccacctaaggcactattatcagaagttgtacagccttagcatgaaaacagagcttggctttcagtacgccgtgtgcttttctagtaaatatatttgtgcttttccaccatgacaattatcacagctcaatggtgttcattaaatagcctcacgttcttgtacaatccaaatgagatctgattattaaagaccaaactattacagaggaaccaaggaaaaagaataatgatttccctcacagtgttcagataagccggtctgctatttgctttagggaactatgtgacctgctctgactattaaacagctttcttatggctgatgagaaaattccacatagctaacactgaaagggatggcagattgcagaataaatcaatcytgccagccttggaactttccacatatactatttagattgacagtgacagaaggccaagagaagtaaaagtctccttcaata

SEQ ID NO: 27934 - DNA, 1206 bp, Homo sapiens
agctgacagccacccgggagccgcaccacggggaatgctgcgtaggttctcaagtgcacatctcacagcttcgctgacaggtaaaaataaagacctgggaattccaggtgatgtgggctgcacctccctcatgaggtcagcacagtgagtgcacttagagttgtcctttctctggaggaatctgctctctgagcctccaaagctgcaaggagtgtgggtgtgccctgagctggggttgctgtctttggatgcagatgcagacatctggagccggtgctccctgagccctgctgcctgggccagtccatgctctctgcgcactgtgtcatggggacagcagaggccactcctgtaatacctgagagctggggttgtcttaagaataaagcacagttgttgaggactcttcgtgtgctgagtgctgtgccaaaacttcatgatttcaccccatttcatctcaatgtcttttgatgtaggaatcgcctgttagctccatttccttttttttttttctttttttctttttctttttttttttgagacagagtctcgctctgtcacccaggctggagtgcagtggcgtgatctcggctcactgcaacctccgcctcctgggttcgagtgagtctcctgcctcaggctcccaagtagctgggagtaccaccacgcctggctaatttttgtatttttagtagagacagggttttgccatgttggccaggctggtctcaaactcctggcctcaggtgatcggcccaygtcggcctcccaaagtgctgggattacaggtgtgaatcactgtgcccggtcttccattttatacagaggaaccttgaggctcggagaggctaagttacttgctgtaggccaaacagctgtgcacggctgagatgggacctgaatgcagcttctctgagtccaaagcccaggttgtttctaccgcttacatcatggcatgctgtctcttgctgcatccagcagcctcccatagtgggcctttccttgggctctataactgtcaagcttgatttagggaagagacaactatggaggactttattgtgaattccacattaaaggggcatgggcaatttgtcaaccaggaaatccccagactgcagtgtcgagactgatggcatggctcagagatgtaagtgctgcagctcttcagccaggtgccaggccctgtccttccaactggatcca

SEQ ID NO: 27935 - DNA, 2340 bp, Homo sapiens
cccacaggccttcaatccctgaaaagcccagtgacaactgcatagtcccaatagaagcctcagtcgcaatgccagggagyagccaaattgctctactcctccttgccaggccacacttggtgctagctttcagaatggcaggccagcctctgcctgaattatgtgggcaggcatggctagggactggggaggtttataaggtatgtggtttttatagtttccttgttgaatgctcagaatcacttgtttttctcttttgcaggggttttaactttaatctaactcactaaagaagctaagaaaaatgagttataattccacaatctgtaatttcataagttcatggcaataaagaaaaaagtaatctctatgggcggaagtaattgttgaaggatcataggaagacactggggtaaaagttagaagattttagttcttgcccagttctgccatttaataacattatgacctggggtcttagtttattcatctgtaaaatgaggtaattatcacaccaggtcttttcactaaaacactgtataactctccagcagtccatatggatctgttgttttactggaggcttcaaacccaagctacatactgtgtcttcgcattttacttactctaatatatatatttatatatatatatatttttttttaaatgaggaagaatatatgtatagtttttggtagccactgggctttacatcaagtaacttgatagttttatacctagagggtaaaataaatcaaagggatgatctacttggtaactcttgacatattttatgttgtcatttggatgcattttcagctacctatgccaatactaaggttgtactccacatctgagtgtatatttgggcttttaaaatgaaattgagttttctgtgccttttggtattttgtacactaaaaaattattgatatggggtggtggtagttaaatgttgcttgtagtaacagaaattgtatttctgctggtgaaagagaaaaatgcttaaaggttgtgtaagggtgtgcataggtatacatgtatatatatatatatgcacatttgaacaaactataattcccactagcagaagtaacacaaacattaataaccctcagtaatatatttcagtagaattgatttgttttatgaatatccaaaagctctgtgttatacaaccaatcggatcctaaaccaagtcttccataaagttggtactgttttatttgttagcctaaagtaccatagacatctaccaaaagtaaggaagggcagcctgttatcatctttattatgcccctcacaaaaaaattgctatattttcttagaatctagttagttagagggacttttggaatcatccatggaaataacttacattttagtcaaagaaaaatatatttttctctatgtagcaatacacatttctttctataccaatgactcaagtgaggagctggccaagaagtcagaaattaaaatgagccatgatatttttcctctatttctctctttaaagcttgctttgtttgtggagtacacagataagttttcaaatcaaaactgactatattatcaagacaagaataggaactagccaaagaaccacctatgaagaggccgggcacagtggctcatgcttgtaatcccagcactttgggaggctgaggcaggcagatcacttgagatcaggagttcaagatcagcctggccaacaaggcaaaacccagtctctactaaaaatacgaaaaaattagcattcctgtagtcccaaccgctcaggagtctgaggcaggagaattgctggaacccggtaggtgaaggttgcagtgagtggagatcatgccactgcactcatgcctgggcgacagagtgagactttgtcaagaaaagagagagagagaggagagagaaagaaagaaaaaagagagagaaaagagagacaaaaaaagaaagagaaagagagagatgtatgaggagttgctactggtagacacatataactaccttttcttcccatcctaactgataacttgttatattagtattccatggtgttgcgcttatagaatagtagagatcacattgtctaaagtctttattagaaagtctttgtcttggcttatttggggtgcttggactgtttctcctctggtcatctgattgattctatactgtctgatattgtgatacaattaccaacagaaaacacatggggttttcaaacaagtatgagtgaggttcttgggtttgttaagaaccctgcagaaggatgggagtgacaaaaggagtaatgactcagcaactgtactcagggccaaagtcttgaggctggattac

SEQ ID NO: 27936 - DNA, 813 bp, Homo sapiens
gtttctccagtgaaaacaataataaagaaatattcaaactaaaaacacattcatttttatccaagtttgtcatgcattttttttttctttttttttttgagacggagtctcactctgtcacctaggccagtgtgcagtgatgcgatcttggctcactgcaacctccacctcctgggttcaagtgattctcctgcctcagcctcccaagtagctgggattacaggtgcctgccaccacgcccagctaatttttgtatttttagtagggatggggtttcactgtgttggccaggctggtttctaattcatgacctcaggtgatccacccactttggcctcccaaagtgctgggattacaggcatgagctacggcccccagtctgtcatgcattcttatgctaaatagggagtaatggtagaatgtgctgtatttattcatctagcatttgtggatgtacagtgcatgaaactgatagggaaggcatcaccatgaagwagtatgaagcaattttattttaacataacaaatggcaaaataaccagataaagaaaagagcagaaagagctaatttttcaaaaatcgagataataccagcttttagtcatatagtttgatgaatcctagatgttgatgataactaaaatggaaaatggaatatcttagcaggccagcacctgaactctgtcaaaggtgtgctcgtgaatatttgtaagatgtttttattagtgcttgcctccgttataatggttgaaattgctaaaggaacttcagcaaaatcagagaacataaaatttcctatggaaaggactccta

SEQ ID NO: 27937 - DNA, 813 bp, Homo sapiens
gtttctccagtgaaaacaataataaagaaatattcaaactaaaaacacattcatttttatccaagtttgtcatgcattttttttttctttttttttttgagacggagtctcactctgtcacctaggccagtgtgcagtgatgcgatcttggctcactgcaacctccacctcctgggttcaagtgattctcctgcctcagcctcccaagtagctgggattacaggtgcctgccaccacgcccagctaatttttgtatttttagtagggatggggtttcactgtgttggccaggctggtttctaattcatgacctcaggtgatccacccactttggcctcccaaagtgctgggattacaggcatgagctacggcccccagtctgtcatgcattcttatgctaaatagggagtaatggtagaatgtgctgtatttattcatctagcatttgtggatgtacagtgcatgaaactgatagggaaggcatcaccatgaagtagtatgaagcaattttattttaacataacaaatggcaaaataaccagataaagaaaagagcagaaagagctaatttttcaaaaatcgagataataccagcttttagtcatatartttgatgaatcctagatgttgatgataactaaaatggaaaatggaatatcttagcaggccagcacctgaactctgtcaaaggtgtgctcgtgaatatttgtaagatgtttttattagtgcttgcctccgttataatggttgaaattgctaaaggaacttcagcaaaatcagagaacataaaatttcctatggaaaggactccta

SEQ ID NO: 27938 - DNA, 762 bp, Homo sapiens
aaattcttgcctttgcctgtattttatgtgtttactgtggcattgtatttggaggggttccaatgttcaatgggtagacctatttgaacttcaggttctaaaagttcctcagattacagagtgttcaagagagtgacagttaataaccaaaaataaatattatatgtatcagttcagaatctcttttagaggcaaatagcaagcagaaagaccaactcaaattgactttaaatgcgaaattattggcttaactaactgaaaactcaggattaagacttagttatagacagagcatacattattagagacttaaaaaaatgtcaytgtgggtacttttagcccttgccaccttctccagtctgagagttgggcaggaatgagtaataccccaaagaaaaatcagcttactgccagtgcagcaggggttatggagcctcagagcaaaacaaggaacgtctcctacatgatggcgaatatcggtgtccgctccccttccttacctactcaggatgtcttagcaaatctcagttcagccctaatggacaggaaaaaaattgccctcctccttaccatgactgatgtgcagttgtgtcctttggacccaagggtcttcagtcattcaaaaagaaattattcccatagaatagccatgtaattaagaatgcagggacacaaagaactggtaggaggctgcttctatgccaagatttcaaggtaatttctcacctgggttataatataaagttcatatgagacaatatt

SEQ ID NO: 27939 - DNA, 735 bp, Homo sapiens
actttaagcagagacctgcagtgtgccgtgagttggctagatggaagaataggaaagggaatggaggaaaatggtccatggaaaggaagaggcaagagcacagggcatggccactttgaagaactgaaagatgactagcttggctgggctgttgagagccaggaaaatgttggtgagagaggcagaggccagatcatgcaaggtttgttaaggttctggaactttatcctaagagcagtaggaagtcatttgagatctctarccagctctcaatgagttacaggcatccaccatgtttgtttatttcatcacggaatctaggccagccttagtctgaagcactgccagatgtgctgttcctgacaagtgcccctgggcttctcgaaaatgtctttgcctttccccctcacagtctgtctttccaccactgaacccagttaccgtgtgacagattgggggtggcagaaaggaaagctgcgggttcccaagggaagcctgagcaagaagccagcagtatcctttcttggcctctcaagccccctttggggattgtggaaaagtccaagatcccctgtgtctccatctttgcatctggcatctgagtctgcctcacctccctaggatgttggaggaataattaaattaaagatatgaggtgtgacatttcccaggtgctggggtaacagctgtacatgtacataggaaaaagtgccttggagaagtacccaaggacaa

SEQ ID NO: 27940 - DNA, 735 bp, Homo sapiens
actttaagcagagacctgcagtgtgccgtgagttggctagatggaagaataggaaagggaatggaggaaaatggtccatggaaaggaagaggcaagagcacagggcatggccactttgaagaactgaaagatgactagcttggctgggctgttgagagccaggaaaatgttggtgagagaggcagaggccagatcatgcaaggtttgttaaggttctggaactttatcctaagagcagtaggaagtcatttgagatctctaaccagctctcaatgagttacaggcatccaccatgtttgtttatttcatcacggaatctaggccagccttagtctgaagcactgccagatgtgctgttcctgacaagtgcccctgggcttctcgaaaatgtctttgcctttccccctcayagtctgtctttccaccactgaacccagttaccgtgtgacagattgggggtggcagaaaggaaagctgcgggttcccaagggaagcctgagcaagaagccagcagtatcctttcttggcctctcaagccccctttggggattgtggaaaagtccaagatcccctgtgtctccatctttgcatctggcatctgagtctgcctcacctccctaggatgttggaggaataattaaattaaagatatgaggtgtgacatttcccaggtgctggggtaacagctgtacatgtacataggaaaaagtgccttggagaagtacccaaggacaa

SEQ ID NO: 27941 - DNA, 578 bp, Homo sapiens
caaacaatcccctctttttagcagccttcctaaatccttaatctaattttgatgttccccaatcacaytcccataggcaatgaagatacatatacatatgcttctggcaatgactgagttacctacctcttctccatacaattaaattaaaacctccttaatgtcagggacctggtcatctcattcattagtataaaccagaacatcacacaaagtaggtattcgataaatgttataaaacgaataaataggccaggcgaggaggctcacacctataatcctagcactttgggaggctaaggcaggtggataacctgagatcaggagttcgagaccagcctggccaacatggcgaaaccccatctctactaaaaatacaaaaattacccagaagtggtggcacatgcctgtaatcccagctactcgggaggctgaggcaggagaatcacttgaacgcgggaggcagaggttgcagtgagccgagatcgcgccactgcactccagcctgggtgacagagtgagactctgtctcaaaaaaatcactaaataaataaatattcaagatttaccatctaaat

SEQ ID NO: 27942 - DNA, 801 bp, Homo sapiens
ctgtgttgtagatgttttttccattagcctcacacagctgaaatatctcagctttcccctttatcctctcatatagatatcatcatgtattatagggttaggctatgaaacttctaatgtaatgtgcagtattaagtctggaaataccttaattctagagattcagaattatgtaaaataaatgtacctatttcagttctaaatttaaaatgggtttatattaaattcaaaatttctctaaactaaaatcaactttgaactggtaatcaaatttcaaaaaaattttattagatttatagtcttgatcataattttactgcttatatataattttataattttatataaattttaaaattactttgtacttcttgagtataaaattagtttagccttgaggttagagtgctttggctgattattaaaggatattgacttaataagaaatttactagggaaaataaataaaaatgttatgcctgagctgggtgtagtgatggcgtgcctttagtcccagctacttgggrggctgaggcaagaggacttctcaggcgttcatggccagcctgtgaacacagcaagatcccatttccacaaagaattaaagttaaaaggaaatgttacatctgagaaataaaactatctttaagtatattttccatttctgtttaatatttgtcctgattaatggtatatttaaaatgcaaaatttgatgagaggtgggaaaatacccgtaacaaagcagcagagaaatggttttgcttttaggacaatttttagtattgtgtggggttttgcat

SEQ ID NO: 27943 - DNA, 750 bp, Homo sapiens
tatatattttgatatgttgtttctatttttgtttgctcaagatatttttaaatctctctttctttcgatttcttctttgatacattgattgttgaggagcatcttgtttagtttccacatatttttgatttttaaacttttctttttttattgattttaattgatcaataaatgattaccattattgtytcttaccattgtggttgggaaactacttgatatgattaaaatcttaaagcaatctaggaaatgaaggaaaagataaacatctgaaaataaaatcaattagaacttctgaaattgaaaaactcacttaagtaatttcaaaacacaattgaaatatttatcaatagactggacaaagcagaagaaataactttagagctagaaggctggtctttggaactaatgcagtcaggtaaaaataaagaaaaagaatttacaaaaatgaacaaagtccttgaaaaatacaggattatgaaatctacaaagcctatgaattattggcatgcctgagagagaaaaaggaaaagcaaacaacctagaaaacatacttcaggaaataaagaacatttccctaatcttgctagagaaatagacatgccaaattctcagcagcaaccttgcaagccagaagaatctgggagcctattttcagcattcttaaagaagagaaattacaaccaaaaatttcatatatctttaaactaggattcataagtgaaggagaaataaaaacttttccagact

SEQ ID NO: 27944 - DNA, 859 bp, Homo sapiens
tggctaagaaaatgggatttgaatttgaaagagtaaggaggctaattaaatagtaagttgacctcattcccaatgattcagtgaaaagctgtcaattctcaaagactaattaaaagaacaatataaattcatatatacgttaatatttttgtttgatctttgaattaaactaagtttatgcatttgtgttatacaaagttgaactttttaaaatttcacaaaaagttttattctttgctgataagataaactatcctactttttctggtgtctttttacaggatacagccaaaactaaaatttagactatataatggagaataatttttaagtttcttttcctccaatctcatataaattggagacatgggcaaggaaaactgcaccactgtggctgagttcattctccttggactatcagatgtccctgagttgagagtctgcctcttcctgctgttccttctcatctatggagtcacgttgttagccaacctgggcatgwttgcactgattcaggtcagctctcggctccacacccccatgtactttttcctcagccacttgtcctctgtagatttctgctactcctcaataattgtgccaaaaatgttggctaatatctttaacaaggacaaagccatctccttcctagggtgcatggtgcaattctacttgttttgcacttgtgtggtcactgaggtcttcctgctggccgtgatggcctatgaccgctttgtggccatctgtaaccctttgctatacacagtcaccatgtcttggaaggtgcgtgtggagctggcttcttgctgctacttctgtgggacggtgtgttctctgattcatttgtgcttagctctta

SEQ ID NO: 27945 - DNA, 596 bp, Homo sapiens
tgcagtgagctatggcgccattgcactccagcctgggtgacagagcgagactctgtctcaaaaaaaaaaaaagttacactcctatgcaaacgttttcaattttccatccgctgccaggaaaggtggggttttgcaaagggagtagcctctggtccttttggtacttagatgtggaaagttggggytttcctttcgatttagttctaggaagtcagggtgaatcagccttagttacctgcctccagaccctattctcctgcctcgctgatcttgttggctttccctgtttcccaaattagaaggtggccaactccaaactctattatctattagctagaagactgggcaaagtcattcaacataacaaggttataattttagcacctcttcagtgagacaataaaaccatcgtccctacttacatctcatagttataatgggagtaaatgaaaagagaaaagggaaatgaaaattagcttgcatgccttcacattcccagtctttttctgcttgtttcatagattgcatctgtcaggatactcttcgttgagagtgacagagaaaaataacacaaacacccttaagcaaaaccaaga

SEQ ID NO: 27946 - DNA, 622 bp, Homo sapiens
gtatacatatatatatgtattttatatatgtgtaaatatttacattttacatatatttactatactatttacatatttaatatgtaatatttaatactatttacatttataaatgtaatatttaatataaataaatatttaatactattacatatataaatatatatatrtaaatagtctctctctctctctctctctctctctctctctctctatatatatatatatatatatatatatatatatgtattttagacatgaggcctctctgtgttgtccaggctggactccaacttctggcctcaagtaatcctcccatcttagacttccaaagtgctgggattacagaaaagagccaccacacctggctataatggttactaatcctttatattaactgtagctattgtatttttaatggttattaatttattaagagtttctattgcttcatgagtcaatccagaaatttatatttttctagaaaaatgttcacttcatctaagttttcaataaaatcagcctaagtaatttattttatttattattttttctttctattttctctccatctttattttatttatttattttattcccataggtttttgggaaacaggtg

SEQ ID NO: 27947 - DNA, 622 bp, Homo sapiens
gtatacatatatatatgtattttatatatgtgtaaatatttacattttacatatatttactatactatttacatatttaatatgtaatatttaatactatttacatttataaatgtaatatttaatataaataaatatttaatactattacatatataaatatatatatgtaaatagtctctctctctctctctctctctctctctctctctctatmtatatatatatatatatatatatatatatgtattttagacatgaggcctctctgtgttgtccaggctggactccaacttctggcctcaagtaatcctcccatcttagacttccaaagtgctgggattacagaaaagagccaccacacctggctataatggttactaatcctttatattaactgtagctattgtatttttaatggttattaatttattaagagtttctattgcttcatgagtcaatccagaaatttatatttttctagaaaaatgttcacttcatctaagttttcaataaaatcagcctaagtaatttattttatttattattttttctttctattttctctccatctttattttatttatttattttattcccataggtttttgggaaacaggtg

SEQ ID NO: 27948 - DNA, 622 bp, Homo sapiens
gtatacatatatatatgtattttatatatgtgtaaatatttacattttacatatatttactatactatttacatatttaatatgtaatatttaatactatttacatttataaatgtaatatttaatataaataaatatttaatactattacatatataaatatatatatgtaaatagtctctctctctctctctctctctctctctctctctctatatmtatatatatatatatatatatatatatgtattttagacatgaggcctctctgtgttgtccaggctggactccaacttctggcctcaagtaatcctcccatcttagacttccaaagtgctgggattacagaaaagagccaccacacctggctataatggttactaatcctttatattaactgtagctattgtatttttaatggttattaatttattaagagtttctattgcttcatgagtcaatccagaaatttatatttttctagaaaaatgttcacttcatctaagttttcaataaaatcagcctaagtaatttattttatttattattttttctttctattttctctccatctttattttatttatttattttattcccataggtttttgggaaacaggtg

SEQ ID NO: 27949 - DNA, 608 bp, Homo sapiens
aaaaacaaatattacaacttctatatatatttgaatatatttgagtatatccaaatattattactacttctatggctcttatcacttaagaagttacgagggttttagaagttctgtccaggacccagatgaagacgaaatatacagtgtatttctcattatatcagtatatcacacaactggtactttggtgtagatgctagactgctgtgtagggaagctctgtttgggtaattatcctgcaaatcctggtcaagcaaattctgtagactattatgggcaaactacaaagctctggaaagactgaacccaaagctctgtcagctccacttttgggccatgaagtttccaaatattgtatgggacatgcctatattacaaaattttttgkttttttttaatctaaaattcatatttaactggggtatcctatattttattaactaactctatcactcctagatattacttttgaaacaagatccaaatgtgtgaattgcccttgggtagcatctatcagtcaccccggagcgcccatttaggacatgaatattaagaagttagcctgaagagtcagttttttatgttccactgaactaggagctacc

SEQ ID NO: 27950 - DNA, 395 bp, Homo sapiens
caaagcctaaccatattacccactcccactcttaacacacacattttaccttctcaaactttccctccctccagcctcccagaaattaagggattacattatgcgtatatctgtattttccaaagctcatccatgtggtctactggaatgtgttcactctgttgtgatgatttgcttatatttatctttgcttatcrctaattaattccagaaatcttacagagcaagaagcctttttttgtggtcaagcacatcatttaaactctgtttaattttgtatttgagggactttttcagagtgtttccctctcttctgatctggaccagaatctttcgtttttggtgggttctgaacatcctggaaattttcttcaccttttctttgtgcacatgat

SEQ ID NO: 27951 - DNA, 395 bp, Homo sapiens
caaagcctaaccatattacccactcccactcttaacacacacattttaccttctcaaactttccctccctccagcctcccagaaattaagggattacattatgcgtatatctgtattttccaaagctcatccatgtggtctactggaatgtgttcactctgttgtgatgatttgcttatatttatctttgcttatcgctaattaattccagaaatcttacagagcaagaagccttttwttgtggtcaagcacatcatttaaactctgtttaattttgtatttgagggactttttcagagtgtttccctctcttctgatctggaccagaatctttcgtttttggtgggttctgaacatcctggaaattttcttcaccttttctttgtgcacatgat

SEQ ID NO: 27952 - DNA, 395 bp, Homo sapiens
caaagcctaaccatattacccactcccactcttaacacacacattttaccttctcaaactttccctccctccagcctcccagaaattaagggattacattatgcgtatatctgtattttccaaagctcatccatgtggtctactggaatgtgttcactctgttgtgatgatttgcttatatttatctttgcttatcgctaattaattccagaaatcttacagagcaagaagcctttttttgtggtcaagcacatcatttaaactctgtttaattttgtatttgagggactttttcagagtgtttccctctcttctgatctggaccagaatctttcgtttttggtgggttctgaacatcctggaaattttcttcaccttttctttgtgcrcatgat

SEQ ID NO: 27953 - DNA, 568 bp, Homo sapiens
ggagaaaaccaaaattaattaagaaccaatagcaacataatttagtgtggtttctgttacactataaaagacccaaattgcccactttttaatttaagtgtagagaacagaacattttattcgtaagaacaaacaatactaaatagttccttatgaaggctggacgactataagttatagtaggacgaatatttgaagggcagagctatctatgagamcctctatctgacaagctgtcagtgggttatgctctaccattagctttggattatttagctgcatgaacttgggcaaactataaaagttggaaactaaagaaaacagaggctttctactctgagagcttcatgttatagatgaggaaatgaagtcccacccatagtaaacaacctgctgactgtcaaataaatagtggagaactaatactgtcctgtgcctcactcacttaacttcttggtgcctccgcttcctactctgtaaagagaataaatttaaataggaaattcatgataccatggaagaaacacatgacttggagattgatatcctgggtttgagagcccttctc

SEQ ID NO: 27954 - DNA, 639 bp, Homo sapiens
attatgtgagcggggtcgggatcaggactgaaaaggtgagacttgggactgggactttgaaaagctgcttaaggaactgggcactgctctgaggccgtgggagaatccaattaagactatcaggggctggctggcgtggtggctcacgcctgtcatcccagcgctttgaaaggaggctgaggagggagtatctcttgagccccagagatcaagaccatcctgggtaacatagtgagacccccatgtctaaaaaaaattagccaggcgtggtrgcgcacgcctgtagtcccagctacatgggaggtatggcttgagcccaggaggttgaggctgcagtaagccacgattgcaggactgcgctccagcctgggcgacagagtgagaccctgtctcttaaagaaataaaaataaaaaagtcagaagaatggacactgggagtggacgaaaggtagggtccattgcttggtgttggaagtgtcggaagcaaagcataaagaacctgggggcttgtctcaggagggcgatgacagccaatgaaaagcagtcatgggcgtggcgctgtcaaacttcgaggggcgggaccgaggacacagagccggggcggagcccaaggtgaaaccaatgagaagcctccgggtg

SEQ ID NO: 27955 - DNA, 639 bp, Homo sapiens
attatgtgagcggggtcgggatcaggactgaaaaggtgagacttgggactgggactttgaaaagctgcttaaggaactgggcactgctctgaggccgtgggagaatccaattaagactatcaggggctggctggcgtggtggctcacgcctgtcatcccagcgctttgaaaggaggctgaggagggagtatctcttgagccccagagatcaagaccatcctgggtaacatagtgagacccccatgtctaaaaaaaattagccaggcgtggtggcgcacgcctgtagtcccagctacatgggaggtatsgcttgagcccaggaggttgaggctgcagtaagccacgattgcaggactgcgctccagcctgggcgacagagtgagaccctgtctcttaaagaaataaaaataaaaaagtcagaagaatggacactgggagtggacgaaaggtagggtccattgcttggtgttggaagtgtcggaagcaaagcataaagaacctgggggcttgtctcaggagggcgatgacagccaatgaaaagcagtcatgggcgtggcgctgtcaaacttcgaggggcgggaccgaggacacagagccggggcggagcccaaggtgaaaccaatgagaagcctccgggtg

SEQ ID NO: 27956 - DNA, 821 bp, Homo sapiens
agggttccatgggagagattttgggggtgaacagtgagaattggagcctagagagccccacatctgaccaaaactttagtgcttgggactctagaactgaggttcccatgaagtttttttgtttgtttatttgtttgtttgtcttttgagacagaatctggctctatcrcccaggctggagtgcagtggtacaatctcagctcactgcaacctccacttcttgggttcaagtgattctcctgcctcagccccctgaggagctgggagtacaggcatgcgccaccacacccggctaatttttgtatttttagtgaaaacagggtttcaccatgttgacccagctgatcttgaactcctgacctcaggtgatccgcccacctcagcctcccaaagtgctgggattacaggcatgagccaccacctctgttccccatgaagaagctttgagagtcaggatgaagaattgggtcccagatgttcatacctagcccaagcttcatgcttgcatccctggggtctggggttcccatggggaaaattaggggtcaaggttggggggttgtttcagtttccacacctggctgtggcctccacagtgaagagtttctgctgggagccctcgttcacgtttgcagagatgtcagatattgtctgtccaccttggggcagcaagagggctagaggggttccaggctccccgcaagatagattctggggagcatggcctggaagtcctcagggtgggtgcgatgccccctccctcctcgttctagaggaaaagggcctggggcagagctgcatcccctcccgactttctggac

SEQ ID NO: 27957 - DNA, 814 bp, Homo sapiens
atccctcagcttctcatgtctgcaccagcgctactgcccatatttctatctgggcctcagccttgtgctggttgctgccgccctcgatgtgccctcgcatccactgggtcccacactggcctcagcatctccccacaccttctcctgggtccccatcccagggatgacatcttttctggggcccttagaagggtactggtcaggaacacacacccttcccactccagaggcttcatgctgccccctgccacccagttcacccacactcactcaggagaatggtgatgtcaggtgctggcttcgcgtccccagacacacagttgaccacgtactcctgcccagctacccaggtgaccatggtgcctgcctctggggtcagcaggagcagcttgggaggaactggtgagagaagggtctggggtaagcttccagcactgagaaggacttgaagattggagttyggtacccagagtctgggagaggagaggctgggggcttggacttccgggtcgcggggtaggggagggcttgaagcccagactcatgggtcctgggcgtctctcacccatacccaggatggagaggatcactctgggagacacgagctcgggccccatctcagagcggccgacctggcactcatactccgcgtcatcgctgaggtcacaggcctcgatgtgcaggtggaattcacctgcagggggagccggaagtcagggccgcagcttccgctggtggctgagggtctcaggctctgatcccttacctctagcagggtccccttccaggcggtacctcgggaagcctgggatcc

SEQ ID NO: 27958 - DNA, 814 bp, Homo sapiens
atccctcagcttctcatgtctgcaccagcgctactgcccatatttctatctgggcctcagccttgtgctggttgctgccgccctcgatgtgccctcgcatccactgggtcccacactggcctcagcatctccccacaccttctcctgggtccccatcccagggatgacatcttttctggggcccttagaagggtactggtcaggaacacacacccttcccactccagaggcttcatgctgccccctgccacccagttcacccacactcactcaggagaatggtgatgtcaggtgctggcttcgcgtccccagacacacagttgaccacgtactcctgcccagctacccaggtgaccatggtgcctgcctctggggtcagcaggagcagcttgggaggaactggtgagagaagggtctggggtaagcttccagcactgagaaggacttgaagattggagtttggtacccagagtctgggagaggagaggctgggggcttggacttccgggtygcggggtaggggagggcttgaagcccagactcatgggtcctgggcgtctctcacccatacccaggatggagaggatcactctgggagacacgagctcgggccccatctcagagcggccgacctggcactcatactccgcgtcatcgctgaggtcacaggcctcgatgtgcaggtggaattcacctgcagggggagccggaagtcagggccgcagcttccgctggtggctgagggtctcaggctctgatcccttacctctagcagggtccccttccaggcggtacctcgggaagcctgggatcc

SEQ ID NO: 27959 - DNA, 781 bp, Homo sapiens
ttgaagycaggagttcgagaccagcctggccaacatggtgaaaccccgtctctactaaaaatacaaaaattagctgggcatggtggcacatgcctgtgatcccagctactggggaggctgaggcaggagaatcacttgaacctggcagaggttgcagtgagccgagatcgcgccactgcactcaagcctgggcaacagagcaagactccgtctcaaacaaaacaaaacaaaaaaacaaaaacaggttcagagaagaaactgattttcctaagatctcactgggagtaattgtcagagctggaatttgaactaggcctgttgcagtctgactccagagcctaagctcctaaacatttttatacactgcctccatcctgccaactacagtgaccacagtgcagacacacatggtcccagggaatccccagccactataggaaacagaatgacgccaacacgcattggaataggcagccaaggctcacagaggtgaagctcctcatctcagctcacacagctagtccatggctgagcaaggagtagaatgatgcaagacctgaatccaagcctgagttcttcatcacacctcacactgtgtttttcctatttgaaagatgaagaaacgaggccgggcatgatggctcacgcctgtaatccaatcactttgggaggccaaggcgggtgggtcataaggtcaggagttcgagaccagcctgaccaacgtggtgaaaccccatctttaccaaaaatacaaaagttatctgggcatggtggcgcatgc

SEQ ID NO: 27960 - DNA, 781 bp, Homo sapiens
ttgaagtcaggagttcgagaccagcctggccaacatggtgaaacccygtctctactaaaaatacaaaaattagctgggcatggtggcacatgcctgtgatcccagctactggggaggctgaggcaggagaatcacttgaacctggcagaggttgcagtgagccgagatcgcgccactgcactcaagcctgggcaacagagcaagactccgtctcaaacaaaacaaaacaaaaaaacaaaaacaggttcagagaagaaactgattttcctaagatctcactgggagtaattgtcagagctggaatttgaactaggcctgttgcagtctgactccagagcctaagctcctaaacatttttatacactgcctccatcctgccaactacagtgaccacagtgcagacacacatggtcccagggaatccccagccactataggaaacagaatgacgccaacacgcattggaataggcagccaaggctcacagaggtgaagctcctcatctcagctcacacagctagtccatggctgagcaaggagtagaatgatgcaagacctgaatccaagcctgagttcttcatcacacctcacactgtgtttttcctatttgaaagatgaagaaacgaggccgggcatgatggctcacgcctgtaatccaatcactttgggaggccaaggcgggtgggtcataaggtcaggagttcgagaccagcctgaccaacgtggtgaaaccccatctttaccaaaaatacaaaagttatctgggcatggtggcgcatgc

SEQ ID NO: 27961 - DNA, 1192 bp, Homo sapiens
gttgatcaagcaaattttagcatttataaatgcccccaaaaaaaggagactggaaactgtattactagtattttctttctcaaactgatgtttaagggttgcagatttcttggtatagttagaacagctgcagaacatttaatactctgtaatttatttatttattttttgagacagagtcttgctcttgttgcccaggctggagtgcaatggcacaataacttccgcctcccgggttcaagcaattctcctgcctcagcctcccgagtagctgggattacaggtgcctgcctccatgcccggctaatttttgcatttttagtagaaacgaagttttgccatgttggccaggctggtctcgacctcctgccctcgtgatctgcccacctcggcctcccaaagtgctgggattacaggcatgaaccaccacacccagcctgaaatttattttttaaagaaagagcccattacatagaacaatgtcagttcagacgtacttccagggggtggcttaggaagagaacagagataggaatcggtgaagccaacttttccaatagatgtaagatgagggtagtgcacaggaaggtggaagggagatgggatgggcaaagagagggtcctgaagccagagatacccttccatgagggtgagatttcaggctcagtcccaccaaaagtgaacatcagtgtcctttaagagctagatgagtcactgcctctgctcttaggaaacttatgatttcctctttcttttgagtgaaatataactcaggaaaaaaaattaagcaaatggtatttgaacccataattctgagtagtggaagcagagttaggccatttcaaatcaatcagaataaatgtctggggcagaaatcactcagcagcagctagttactaagaccttgggccactacattggacaaaaatttcttgcttccatacgacacaatggtctaatgtttgcacttttactgaaattttagtaaaattagatttaaatctttgatccatttgaaattttccctagtgtaaggagtgaggtagtatttttttttccagactggtgagtggttatcgcaacattattcattgattcaaaatgccagatttatcatatcgtaagttccttaygtgtttaggcctgtttctactctgttctattagtctctttacataggtactagtacca

SEQ ID NO: 27962 - DNA, 897 bp, Homo sapiens
caaagggtacagctacacttctgggctgctatgccctggtctacaggggtcagggcactacatgggcttgggtcccaaataggcagttgctctgctggactggggctctgatttcgagggggctaggcactgagctggttcaggcaggaatggggaagcagagtccatgttccactggtactaggctctaagcagctggggttaggggactgccacaactgcgttagtggagatgaagtgcatgtaaggcagtttagcaccaggacgtaggaagctgtagctattctgctggggaatagcacactccagtgtgtgagcaaggtgcaatgatagcagaacctcagggatgaagggatgcagtggttactggctcccaaagcaggatacattgtagccgtggctctgatttcaaaataacttgtgcagtagcaggttggggtatgagaagtggggaacaatgtgggccccacattgcagaggtaatgggagcccttgggagactcctgcctttttttttttttttttgacggagtttcgctctgtcacccaggctggagtgcagtggtgtgatctcggctcactgcaacctcygcctcccaggttcaagtgattcttctgcctcagccgcctgagtgactcccgcttaccttcccctatagggagtagtccctcctggttcagagatgaccccagctgggggatatggtggaaaaggcaaggtgtttccccgccatctctgtgcagccatcttgagtgtgctccagaaggtctctgcttctcccttgctgtcctccagcatttcatttggagacaggaagggtaataggtagagtagatgtgtgtagaaatagaaatgaaaatgccctagacatagggaaatgatatcagatgatattt

SEQ ID NO: 27963 - DNA, 897 bp, Homo sapiens
caaagggtacagctacacttctgggctgctatgccctggtctacaggggtcagggcactacatgggcttgggtcccaaataggcagttgctctgctggactggggctctgatttcgagggggctaggcactgagctggttcaggcaggaatggggaagcagagtccatgttccactggtactaggctctaagcagctggggttaggggactgccacaactgcgttagtggagatgaagtgcatgtaaggcagtttagcaccaggacgtaggaagctgtagctattctgctggggaatagcacactccagtgtgtgagcaaggtgcaatgatagcagaacctcagggatgaagggatgcagtggttactggctcccaaagcaggatacattgtagccgtggctctgatttcaaaataacttgtgcagtagcaggttggggtatgagaagtggggaacaatgtgggccccacattgcagaggtaatgggagcccttgggagactcctgcctttttttttttttttttgacggagtttcgctctgtcacccaggctggagtgcagtggtgtgatctcggctcactgcaacctctgcctcccaggttcaagtgattcttctgcctcagccgcctgagtgactcccgcttaccttcccctatagggagtagtccctcctggttcagagatgaccccagctgggggatatggtggaaaaggcaaggtgtwtccccgccatctctgtgcagccatcttgagtgtgctccagaaggtctctgcttctcccttgctgtcctccagcatttcatttggagacaggaagggtaataggtagagtagatgtgtgtagaaatagaaatgaaaatgccctagacatagggaaatgatatcagatgatattt

SEQ ID NO: 27964 - DNA, 1043 bp, Homo sapiens
actgccaaagtcagattctgtgtgttgccttgaccatctccaggcctcatctctccttactcttggacagatccacttactcagtcttaccttcagttctgcttcttccaaaagtctcctcactcatgatgtcaaccactgaaaacctgaagtttcagcgctagcccagggcactcccaccacccaccataactggtacacctacggggctctacgtttcctcaactctggggactatccccagtctctgtattccttagagagaagagcacttcatggactcggcatagcatctaaaggaaaggcaacaaagacagccaaacaggctacagattgcccaaggaatttgcaagcgcaccaaaacctaaagttttctccagacacaaataaaatggacagcaaaccatcctattaattcaagccaccaaaaactgtaycagggtagtggccctaagaatcaatatggatatctttacagatagttaaaaagatatcaacagaataattgccttttatgcattctcttagcacaaaaatctgggaactaagaagagaggagaaatttctgtataaggagaaaagagtttcaaatctataaggaaatcatttagttgaactttaaaggaaaaaaaaagaaaacatcagaaattctttacttgcaggatctgcaatagtgtctgtcaatcattcttgggaaaacccagctgacacgtttgcagttatattcttggcctagtatctatcgatttctatggctaattttttcatactagttcttcccctttttcctccaaatccatattctgcccgacattttccatcactcacaggttatgtctgctattgtaacctacaggaacaaatattcatctcctaagagctatattgcacaagcttttcatgcctattatgggaaaatcaggcttctgcacgacatcaaagtccttgcagaccatgaccttaactgtgttctcaccagcattcaaaacctggttgcattaaataatactggtggaggctcataatgaaataaaaccactaca

SEQ ID NO: 27965 - DNA, 754 bp, Homo sapiens
atgaaaagtgaggctgtcaggagttatgcaagtattaataattctttatttttctgagcatttgcttacgtaatttttctaaaaattaatctgagaattcattcagagtaatgtcaaacctttttctctatcagaatactgtgcataaaattgtttatagtgattacaggtacttccatgcctgatagagacaaatttttgatagaatccatttattctctgaaacctgtatttaatcacaaaaactctatttcgttctcaagaattagataattggactcattaagtgatgtatcagagaagaacaaagtttctaattgtatttacaatgaaatatatgagttaataaataaaatgtggtaacagtctattaaaatgactaaaaccttctagaatagagtrtgctatgacaggtatagttagaaggtatattggtacacataaatatctctatatatgttgtgttaaagccagtctttggaattcaaactaatgaccaatggacctagcaaaattcaaatgttaaaatatattaaggccataaaaactcaatgactgattgaggcaaacatctctcaactctgagattttgacattcatgcagatcagactttcattcactgtcttgttcattggttgttgttgctgtttgacaccaggtaagacacctcacatatgcagaataaatctatcctttaacacttaagggatgatcttttatgctcttcctgatgagccttcctgctaggagaag

SEQ ID NO: 27966 - DNA, 662 bp, Homo sapiens
gggtgtcaatgaacctaaaaacatgttcaatatatcaaaataatacgtattattgaaaataatatggcaaacacagcaaacatcatagtcactgggcaaaagcttgaagcattcctcttgagaactggaacaagacaagaatgctcactctcatcactcctattcaacataatactcaagtcccagacagaataatcaggcaacagaaagaaagaaaaagtatccaaatagcaaaagaggaagttaggctatttatctttgttgatgatgagattctatacttagaaaaccctaaagattccaccgaaaggctgctagagctgataaatgacttcagtaaagtttyagggtacaaaatcaatgtacaaaaatcaacagcatttctatatgacaataactttcaaactgagagctaagtcaagaatgaaatctcatttacaatagccacaaaatgagtaaaatacctaggaatacagctaaccaagacggtgaaagatctctacaacaagaactacaaaacactgctgaaataaatcagagacagcacaaacaaatggaaaaacattccatgcttatgaattggaaaaatcaatatcattgaaatggccatactccccaaatcaatttacagattcaatgctatccctaggtaactattctaa

SEQ ID NO: 27967 - DNA, 623 bp, Homo sapiens
tgtagctcataataactgtattactttcggggaaaattaacaatgataaggacatgctttctaaatgtcagtgtggtaattcttttggctttttcattttttaattgaatatggatataataaatatttcccaaggctaccagaataaatgaacaatcaggatataattaaacagcagaacaatgtttctctgcatgtataagttgaaatccatttctccacctaagaagtgtgtgtctgtgtgtgtgtgtgtgaagtgagcagcaagttaaggaggaagaggcttcyagagtattgtgtttgtgttaaggtctgattcattcctcatgtctcagcttgccatattttttccatcaccattgcaatgttctttggccaacagccctagaaactggacaatattctgcccagtgcagttcctatcctacttaggtgacactattttctagaaaagccttctggacaggtacctggatatggaacaagtgaaatggaagctgagaccacatgggccagaaatagaaacagtatatttcacactgtccttatcagaaggctacttcagagttcaggttcataaagcagattgaacacatgtgttctctttactattgacacccctc

SEQ ID NO: 27968 - DNA, 446 bp, Homo sapiens
ttatatgctgcccagctagctgcaatgcaggtatctccaggagggaagctgccaggcataccccaaggcaaccttggtgctgctgtatctcctaccagcattcacacagacaagagcacaaacagcccaccacccaaaagcaaggtacccttttgaagaagccactgtcttgccacttagctttatttttcattcaatggtatttattaaatgtctattgtatgccagcagctagcttaaactctgggtgtacaaggaggtaagaatcaagtaagggcaacaggtgtgcatgtcaacttayctgcatacattgaatcattcatttattcatttattcaatatgcgtgtatcgataactatagtagaaaatgtgagagataaaaaagattatcagatgggtatcttgtacccaaggagcttacagtctgattatgtagatatttata

SEQ ID NO: 27969 - DNA, 599 bp, Homo sapiens
catatgttaaaaatctagcccccaaggtaatggtattagaaggtacggcctttggggaggtgattaggctccacctgtatgaatgagcttagtatctttataatagaggcccaaaggagtttgtttgctctrtccactaagtgagggcacagcaatgaatcacctatgaaccaaatagcagccctttagcagattctgaattggctggcaccttgatattgaagtgctcaaactccagaactatgagaaaataagtttctaaatttgccatcttcaaagaaaatccaagtgccagtaagctgtagggaaagtggtatgttatttatttaattcatctagtaaacagtgcttcagagaacagagagagacattttcacatttgtcctaccaaagtgaagtttgttggctggacttgaaaaatttttaattttactttaaaagaaaaaaaaatatatcttttcaggctgtcacaattagctacaaaaacataatttcattagattgattttgctatcaaacatttagtaaaagatgcttttttattcaaattatccattgttggactgtattattttcatttgcattattttgaaaatgca

SEQ ID NO: 27970 - DNA, 599 bp, Homo sapiens
catatgttaaaaatctagcccccaaggtaatggtattagaaggtacggcctttggggaggtgattaggctccacctgtatgaatgagcttagtatctttataatagaggcccaaaggagtttgtttgctctatccactaagtgagggcacagcaatgaatcacctatgaaccaaatagcagccctttagcagattctgaattggctggcaccttgatattgaagtgctcaaactccagaactatgagaaaataagtttctaaatttgccatcttcaaagaaaatccaagtgccagtaagctgtagggaaagtggtatgttatttatttaattcatctagtaaacagtgcttcagagaacagagagagacattttcacatttgtcctaccaaagtgaagtttgttggctggacttgaaaaatttttaattttactttaaaagaaaaaaaaatatatcttttcaggctgtcacaattagctacraaaacataatttcattagattgattttgctatcaaacatttagtaaaagatgcttttttattcaaattatccattgttggactgtattattttcatttgcattattttgaaaatgca

SEQ ID NO: 27971 - DNA, 1224 bp, Homo sapiens
ctgagaaaccttataagaaatgcctcgctctgcctcctccctgccccactctctaacaccatcaggcttcttaaggactacacagtaactggccccttggaaagcctcccccactgcgaacttaaacatccgaccagcgtcccttcccgacaagagagcaccaacttcggagtggctctggccctctacggaggctgtgtgctgagtatcttcctgtccccgcttcaccttctgatggacagggtctgattgaaatacagttaaatattaagtctccacacccaaatgagcgtgggtctcatgtaacatacgtgttagccaactgcgcacgcttgcaacccccccttcatgaatatccatggctcttcctgcagcctggtgagtatgtgcacccagccagcctgttcagcacgaattcctgtctcctccttccctctcctgaagtgcttgcttttcggttttggttggaggccttgcttctggcccacaggctgagctaccctcgtttagaagtaaagctctgtctaaatttatagattttgtgacttttccagtccacagtggccagtgcttcacgttgcctcaagggtgacggtccacagtggttcacatgcaatttctctatttactcctcagaatcatgttagaaccaaactcctgttatttctcactttgtgttgaggaaatgaggcttacagagacggaggaggttgcctcaggccctaacacgaatggtggagctggaactggaaccaggggcagtgaagctggcgcaggggtgtttctgcaaaccaccarcgctgtgtgcttgggggaaacggaagaaaagggaacaaaagagcagcaggagaacaacttaatctcgttagtagaataatacttccatcctaatgtggaaattgaacacagaaacattttccaccagttcccaaaatcccctccgagtggttgccatcagtacctagactgtgggggatctcaggggaacacggccccacatccctgaaggatgagcctcctttgaaagtcctgaaatcaaggaccctgtagagcaaatggggctccctatctgatgcactggaagccaatactatgacactgggtttttgagaaaagaaacgtttgctgttgaaaatcaactcccagggagacacgagtccactcagatctgtcttcctatgctggcttcatggcagtgattttattagaaaaggctcgggggct

SEQ ID NO: 27972 - DNA, 1224 bp, Homo sapiens
ctgagaaaccttataagaaatgcctcgctctgcctcctccctgccccactctctaacaccatcaggcttcttaaggactacacagtaactggccccttggaaagcctcccccactgcgaacttaaacatccgaccagcgtcccttcccgacaagagagcaccaacttcggagtggctctggccctctacggaggctgtgtgctgagtatcttcctgtccccgcttcaccttctgatggacagggtctgattgaaatacagttaaatattaagtctccacacccaaatgagcgtgggtctcatgtaacatacgtgttagccaactgcgcacgcttgcaacccccccttcatgaatatccatggctcttcctgcagcctggtgagtatgtgcacccagccagcctgttcagcacgaattcctgtctcctccttccctctcctgaagtgcttgcttttcggttttggttggaggccttgcttctggcccacaggctgagctaccctcgtttagaagtaaagctctgtctaaatttatagattttgtgacttttccagtccacagtggccagtgcttcacgttgcctcaagggtgacggtccacagtggttcacatgcaatttctctatttactcctcagaatcatgttagaaccaaactcctgttatttctcactttgtgttgaggaaatgaggcttacagagacggaggaggttgcctcaggccctaacacgaatggtggagctggaactggaaccaggggcagtgaagctggcgcaggggtgtttctgcaaaccaccaacgctgtgtgcttgggggaaacggaagaaaagggaacaaaagagcagcaggagaacaacttaatctcgttagtagaataatacttccatcctaatgtggaaattgaacacagaaacattttccaccagttcccaaaatcccctccgagtggttgccatcagtacctagactgtgggggatctcaggggaacacggccccacatccctgaaggatgagcctcctttgaaagtcctgaaatcaaggaccctgtagagcaaatggggctccctatctgatgcactggaagccaatactatgacactggrtttttgagaaaagaaacgtttgctgttgaaaatcaactcccagggagacacgagtccactcagatctgtcttcctatgctggcttcatggcagtgattttattagaaaaggctcgggggct

SEQ ID NO: 27973 - DNA, 799 bp, Homo sapiens
atccacagcggtgaggagatggtcatggaggayaagcacccggaatcagcagcagagctctcctcctacacaagggcaagtatcacgggcacctccaggcaaaaggcaaagatgctaaactgctaataacaataaggaatagctgtataatagcagactgcataggagctctacaaatacaactttttaaaacccacaaatcataaatgaaaagatccctaaatatgatgacattgacccaaaaccctgcactcagccaaaacaccatcaacaaatttatagacaagcctcagctggggaagtgatactcgcaaaacctgtaacttaccactcaccaaaaactagtgtccacatttaaggactcctacacatcaatgaaaacaatgagaaaatgggggaaaagggtatgtagaggttaattcacaaaggaaactagaaggccaagaaaaatatgaaaattgttcaacctcattataaactgagaaatgcacataatgaaccctaattaaacaccattttatatctgtttgatttggcaccattacaaaggcctgacaataccatgttttggaagtgagaaagttggaagtcttgggcatggcaggtgggagtgtggtcagaagaacaatggtcccccagagatgtccgcgtcctaatccccagaacttgtgaatatgtcagttgatgtggcacagggggatgaagtttgccaagggaattaggtggctatcaactgacccgagaggggaaactatccccaattgtccgggtggacccagtgtgataatcacaggggtcc

SEQ ID NO: 27974 - DNA, 1088 bp, Homo sapiens
aagaccaatgaataattatggtattagccggctgcggtggcttacgcctgtaatcccaacacgttgggaagctgaggcgggggaatcacaaggtcaggagatcgagaccagcctggccaacatggtgaagccctgtctctactaaaaatacaaaaaattagctgggtgtggtggtgggcacctgtaatcccagctactagggaggctgaggtaggagaatcgcttgaacccagggggcggaggttgcagtgagccgagattgcgccactgcactccagcctgggtgacagagtgagactccatttcaaaaaataataataactattattattatggtattataacaaaaatattttctaggctaagtttttaataaaggctacagactgcacctagagcttgattacagctgtattttaaaaatgtcctacccaggaacacctggaagaaaactttgcaaaatgtaggcattagtcatgtttgcaactctttcaaattttgctcatttatccaaaatttttgtttaataattatgcattaaattgaaaataaaaatgagcctttttaaagatcatggttttaaaaatgttattttcatcctgataacattaacaggaaataggaagataagaaatcattactctataattaccattatgctaaaacatctacatgtttgaaaaatagaaatgcattaacactgattgcttcttttgggactcagagcaattgggagaggggtaggatcctctagttaccaaatttattcactgtggtttgagaatgaaatacaaaatatgaatgtatgagtagatttgcagctcgtatgcacagatttctcaaagatgcacctgaaattttgggaattaatctttatttaaaataaaataaacaacagctygtactttggcttactgctcctgttgaggtgttctcaggctgtatccttgcctctctgaaccaccccagtactggagactgtgctcccacgtgaggtagcatgaacaggggttcattggttttctcacctggaagtgaacccagccaaggagtatgactcactcctcagagcctcaggaatagtcata

SEQ ID NO: 27975 - DNA, 621 bp, Homo sapiens
tgcctgtataaaagaagtgcctgtatttccagaatttaaatttaacatagtttattttgctgttctctgctgctactaagaaaggcagaaacagaaaagtttctcttgtttttcagttgcatgctgtttaraaactttgccatggaggtgggcaggataactgtttggaatatttgcaaatataaactgtatatctccttttttatgagacagtacataaaataagagtctgtgtttagccccttattgcttttgaatgcaccacttcttaagaagtaatgtgaattaaaaaaacaaaaaaaatcactttaaatttggttcatttatctttttatgtatcctcaaatgccatctatcaaattaatatttattattcatgcaagattcattgtaaaaatgctattagaatttaatattgttaataatgtttgcatgatgtctttcacatgatcaatgccttagtgaaattaaagattgttatcactgtggaaagggatttgtggatttttctgtttccctaacctaaacataaatcacacctgtctttttttattaaaagtggaataattgagctgttgtaaaaattgaatttgaataaaagtggcttgaacagcatgaacc

SEQ ID NO: 27976 - DNA, 621 bp, Homo sapiens
tgcctgtataaaagaagtgcctgtatttccagaatttaaatttaacatagtttattttgctgttctctgctgctactaagaaaggcagaaacagaaaagtttctcttgtttttcagttgcatgctgtttagaaactttgccatggaggtgggcaggataactgtttggaatatttgcaaatataaactgtatatctccttttttatgagacagtacataaaataagagtctgtgtttagccccttattgcttttgaatgcaccacttcttaagaagtaatgtgaattaaaaaaacaaaaaaaatcactttaaatttggttcatttatctttttatgtatcctcaaatgccatctatcaaattaatatttattattcatgcaagattcattgtaaaaatgctattaraatttaatattgttaataatgtttgcatgatgtctttcacatgatcaatgccttagtgaaattaaagattgttatcactgtggaaagggatttgtggatttttctgtttccctaacctaaacataaatcacacctgtctttttttattaaaagtggaataattgagctgttgtaaaaattgaatttgaataaaagtggcttgaacagcatgaacc

SEQ ID NO: 27977 - DNA, 1138 bp, Homo sapiens
cctcttctggacattgaacaaaaggagactatacatttaaaagacacaaacctaaacatgaagtaagaaagacttgaaatttggctctagaaagtacatatttgaggctgagtaggttattttaactcaccaaatcttaatttcatcctttgtaaaatgaaatgatgaaaataatacttgccttataagcttgtctggaaagttgacttagacaggtcctgcaaaaatcttggcatgttcgtggacacatagaaagttctcagttaacgttaagcaccccctgttctcgcgtcttcctcctcaccttctcatcgctgatgtatatgaaagtataacatgcagcaagggaactagactgagtctgcctcaacacattctggaaggaagtattctgttctgcctatgctcctttccacaagttttattctaatcgtcagatgtgttctacttcatctgagtaattgtttgtgataacacctggagaggtcttaacttttgtatcttataaaaacaccaaacaccacatgttctcactcataagtgggagttgaacaatgagaacacatggtcacaggtcacagtaaggggaatgtcacacaccggggcctgtcggggggtggggggctagtggagggatagcattaggagaaatacctaatgtagatgaccggttgatgggtgcagcaaaccaccatggcacgtgtatacctatgtaacaaacctgcacgttctgcacatgtaccccagaacttaaagtataataaaaaaattaaaaataaaacaccaaaatattaagtggggagtgacttaatgaaccccatggaatgagaacraaatacaatgtatatgcatttaacttgtacagttgtaagcagcatttttcagtgggctgtgatattaattccatttcacaaaagaatttgtgagactctcaagcaggtatggccaagagaatgatcctcattctgatttagcttctcagaagattgatgttctctctgggatcttttgtgtgtccagcatggtacttgcagcagaccattatgtgctgtcatgctgcttcttgatatccagactcggtgtgctctgcagaactgcagcctcgctacatgtttcagtgcaggaaattcacattaag

SEQ ID NO: 27978 - DNA, 701 bp, Homo sapiens
tgcatggattttgtgacccttaaaccataatttagcacacgtgtcaggctgtgacttttctaaggggacacaatgcccagaaaacattgagaagctgctgcacagatccagttcacagttgaggttgtgacttgtctactttacccatcatacaagacatgtggactctcatacctagaaccagaacatgtgagggattggtaatttcatccctgtattttttgaaggtctgattgtgacatacacctctgccaaacacctgatttgactctcctgcctggcttggttcacgggtagaattgtgatatattgctggacccagcacccaggtgagatgactctattctcaagccttggtgcctcttacaggagrcactgtgacatatcgctgggatttgcagtcaggtaatgtaaattttctctcctaccttggtgctgccaataaggggcattgtgtcatattgctcattttaacacccaggtgatgtgactcttctgcctgggtccagcctaaaggggggattgtgacatctctctgcactcatcacccaggtaatgtactctcatctcttgcctggtttctgttcacaggagggaaggtgacatatctctgagctcagcacctagctaatgtgacacttctcttcttcctaggttctgcccacaagggagattgttacatatatgctgggcccagcttt

SEQ ID NO: 27979 - DNA, 990 bp, Homo sapiens
tgggtggccaggattccatctgcctaccagacattccaaaccacacattgtttttttttttttttttttgagacagagttttgctcttgttgcccaggctggagtgcaatggtgcagttttggctcaccrcaacctctgcctcctgggttaaaacaatcctccttttgctgtgagccgagatcacgcctctgcactccagcctgggtgacagagtgagactccgtctcaaaaaattaaaaaaagaaaataaaggaatcctcttgtctcagcctctccagtagctgggattaccagcgcctgccaccacgcccagctaatttttgaattttcagtagagacggggtcttacatgttggccaggctggtcttgaactcctgacctcaggtgatctgcctgcctcagcctcccaaagtgctgggattacaggcatgagccaccgcgcctggcccccaaaccacacattctaaaccacctggaggtcagagcagcggctccgggatctggctgaagatcagaatccctgggaatttgttaaaatgccatccctgggctctaatccaaagctgcagaatgagaattgccaggggtgggaccagaaatttgggcattgaacacactttccaggttcttcttcagcacaggtgggctggaacccctgatttaaccatcagccttgcctcctgggggtctgcctacctgtgccagggtgggtccccaggagttatcagggacaaaggaatccccttttcctggcaggggtgaatgtgagtgtctagggctgactgctcacatgatagcatggagtctcagctctggccagcatgactctgggaagacgaggacaagacccagggcttggtggggacgggctttgccagggcatgaatcatgcttctagtgcttctaggggagccatctccaggtctccctcccctcacctctagaatggagttgaggaggcctgacacgagaattattaaagcactta

SEQ ID NO: 27980 - DNA, 990 bp, Homo sapiens
tgggtggccaggattccatctgcctaccagacattccaaaccacacattgtttttttttttttttttttgagacagagttttgctcttgttgcccaggctggagtgcaatggtgcagttttggctcaccgcaacctctgcctcctgggttaaaacaatcctccttttgctgtgarccgagatcacgcctctgcactccagcctgggtgacagagtgagactccgtctcaaaaaattaaaaaaagaaaataaaggaatcctcttgtctcagcctctccagtagctgggattaccagcgcctgccaccacgcccagctaatttttgaattttcagtagagacggggtcttacatgttggccaggctggtcttgaactcctgacctcaggtgatctgcctgcctcagcctcccaaagtgctgggattacaggcatgagccaccgcgcctggcccccaaaccacacattctaaaccacctggaggtcagagcagcggctccgggatctggctgaagatcagaatccctgggaatttgttaaaatgccatccctgggctctaatccaaagctgcagaatgagaattgccaggggtgggaccagaaatttgggcattgaacacactttccaggttcttcttcagcacaggtgggctggaacccctgatttaaccatcagccttgcctcctgggggtctgcctacctgtgccagggtgggtccccaggagttatcagggacaaaggaatccccttttcctggcaggggtgaatgtgagtgtctagggctgactgctcacatgatagcatggagtctcagctctggccagcatgactctgggaagacgaggacaagacccagggcttggtggggacgggctttgccagggcatgaatcatgcttctagtgcttctaggggagccatctccaggtctccctcccctcacctctagaatggagttgaggaggcctgacacgagaattattaaagcactta

SEQ ID NO: 27981 - DNA, 990 bp, Homo sapiens
tgggtggccaggattccatctgcctaccagacattccaaaccacacattgtttttttttttttttttttgagacagagttttgctcttgttgcccaggctggagtgcaatggtgcagttttggctcaccgcaacctctgcctcctgggttaaaacaatcctccttttgctgtgagccgagatcacgcctctgcactccagcctgggtgacagagtgagactccgtctcaaaaaattaaaaaaagaaaataaaggaatcctcttgtctcagcctctccagtagctgggattaccagcgcctgccaccacgcccagctaatttttgaattttcagtagagacggggtcttacatgttggccaggctggtcttgaactcctgacctcaggtgatctgcctgcctcagcctcccaaagtgctgggattacaggcatgagccacygcgcctggcccccaaaccacacattctaaaccacctggaggtcagagcagcggctccgggatctggctgaagatcagaatccctgggaatttgttaaaatgccatccctgggctctaatccaaagctgcagaatgagaattgccaggggtgggaccagaaatttgggcattgaacacactttccaggttcttcttcagcacaggtgggctggaacccctgatttaaccatcagccttgcctcctgggggtctgcctacctgtgccagggtgggtccccaggagttatcagggacaaaggaatccccttttcctggcaggggtgaatgtgagtgtctagggctgactgctcacatgatagcatggagtctcagctctggccagcatgactctgggaagacgaggacaagacccagggcttggtggggacgggctttgccagggcatgaatcatgcttctagtgcttctaggggagccatctccaggtctccctcccctcacctctagaatggagttgaggaggcctgacacgagaattattaaagcactta

SEQ ID NO: 27982 - DNA, 990 bp, Homo sapiens
tgggtggccaggattccatctgcctaccagacattccaaaccacacattgtttttttttttttttttttgagacagagttttgctcttgttgcccaggctggagtgcaatggtgcagttttggctcaccgcaacctctgcctcctgggttaaaacaatcctccttttgctgtgagccgagatcacgcctctgcactccagcctgggtgacagagtgagactccgtctcaaaaaattaaaaaaagaaaataaaggaatcctcttgtctcagcctctccagtagctgggattaccagcgcctgccaccacgcccagctaatttttgaattttcagtagagacggggtcttacatgttggccaggctggtcttgaactcctgacctcaggtgatctgcctgcctcagcctcccaaagtgctgggattacaggcatgagccaccgcgcctggcccccaaaccacacattctaaaccacctggaggtcagagcagcggctccgggatctggctgaagatcagaatccctgggaatttgttaaaatgccatccctgggctctaatccaaagctgcagaatgagaattgccaggggtgggaccagaaatttgggcattgaacacactttccaggttcttcttcagcacaggtgggctggaacccctgatttaaccatcagccttgcctcctgggggtctgcctacctgtgccagggtgggtccccaggagttatcagggacaaaggaatccccttttcctggcaggggtgaatgtgagtgtctagggctgactgctcacatgatagcatggagtctcagctctggccagcatgactctgggaagacgaggacaagacccagggcttggtggggacgggctttgccagggcatgaatcatgcttctagtgcttctaggggagccatctccaggwctccctcccctcacctctagaatggagttgaggaggcctgacacgagaattattaaagcactta

SEQ ID NO: 27983 - DNA, 540 bp, Homo sapiens
gagccctaagggggtgaacaggactgaatcgatggagcacaaaaggcatctggactggggagagatcctgagaggggacagatagggatggaggagcatgcaggaagtgcacagagagcagaggcagctggagttccagtgccctcaaaactggccctgggggtcattcggggtcttaccagccaccccaccccactcgcgtacctaatctctcccactgtctctcatagggatgttgaggtgggtgaacccttagatagccaccagaccaagcactgtttattgagcaccaactagaaccaggcacatgaaacacttactcattatctcattttatagaagagaaaaccagggttcagggagttaagtaacttgtgcamaaacagctaggaagaggcagcgctggattcatatgcagggctgtctgaccagagctccgagctcctgccactctgccataccctccctctgaggggctgaaggagccccacacagtcatcccgcagatggaaagactaaggcccagagaggagacaggat

SEQ ID NO: 27984 - DNA, 999 bp, Homo sapiens
tcaggtggtaggtctgaagtagcagacaagctgtagactagggcttctcggcgttgtcactattggcctttggggctggataaattcttgattgtggggactgccctatgcattgtaggatgtttagcggcatctctgggctctacctgttagatgccagtagtacccctccccagttgtggttaccgaaaatgtcttcaaatattgccaaatgtcccctggggggaaaagatcacccccagttgagaatcactgttacagacaaaagccgttttaaaaagctaaaagccaagagtgcagtaggttaattaaaatatctttttataatgcatttttatttatttatttttgagacagggtctcgctctgtcacccaggctggagtgcagtggcaccatcgtggctcactgcagccttgatcttccaggctcaagtgattctcccacttcagcctcctgagtagctggaactacggggcacgtgccaccatgactggctaatttttttttattttttagtagagatgagatcatactatgttgcccactctggtctcgaactcctgagctcaagcaatcctcctgccttggcctcccaaagtgctgggattacaggtgtgagccactgtgcccagcctattctacatttttaatgatactggtagtatcagtactggtggtttcataagctttcacatgtaactagtttatgcagtttgtagtgtgtatgtgtatatgtgtgtgtgtgtgtgtgtgtgtgtgtgtkttctccaaaatgaaaaataaggaagaatttgagtttgtctcttcgaagtgtatccttgaccaaaagagcaccaaccctacgaagttgcccatgcatattggctagttttgcagaaagggagagccattgtcacccttaatgggctggagggaggactcctagagcacatgctgccagggccggggcgcctgtggtgctacagccggcgtgctcattgccatgacagactccacc

SEQ ID NO: 27985 - DNA, 536 bp, Homo sapiens
tttttaaatagcaaacatttggaaaaactgtacctgagccaataaatgtgttagggaatattggaatgctgtatatgaaatctgacttgggccattattcttgggctcaggggagtatgtattataactgcttataagatacttaatcaaaattattgttgaattcttgaaagggcagtatgtaaggtcctccttcccttctgattatctaatcttttataaaagagttcagtgaatatcaaactatcatcttctttaatcaaaagcaacacaagatcacagcctagatctctgaacaaattatactattatatttgctccctacrtttgactttgaatgatatgctgcagggaggagtcaactctgcagagcagatacatccaaatgtgctaactcatactcatccagccaaatgattagagataaagagaaacagcttctggatatggtttcaacaggctacatttgccccagtcattcacctacatctgcttaacacataaaaataagaatgatgaagacattaatcattctg

SEQ ID NO: 27986 - DNA, 627 bp, Homo sapiens
tgaaatttttaataaaaataacgtgcatgccgttagaaaaattaaacagtatagaaagtcacaaaatagagaaaagcctccccaactccttctcctcgaagggtacaactcataaacatttcttgtgattacatttagaaaagttaattgccctttaaaaacattttctgagcccctgatgctaagagatttgttttttcagatcagagataagattcagtagtccattggtactaatctctcacagcaaaacagatctaaagtgcttcaagagcatcactcccaagtcctataagatggaatccaacaattctcactcaatttatcttgccccmagatgccagcagactgagaaacactcctaaaatttttaattttctttgcctcactaggaaatgtgtcagatcttcaaaagaactctttttcacagtgtttcttaaaacaattttaagcattaacctcaaatccaatgggattatttaatccaacccaaaatttcaataatttttaaatctgtggccatttaatcatttccttgcctcgagattagaagcaaagattaaaatgcttaacacaaatcatccaattttagaaaaagaccattttaaagcacaacctgaaaccatg

SEQ ID NO: 27987 - DNA, 1263 bp, Homo sapiens
cacagtactggcaaaagcataagaaatcagcacattcctgtattgcctaatgccctactatacattggtatttttttcaaagattaatttgcyaatatgtatcaaaaccttgaaaaatgtaaatctcgatccaccaattccacttctaggaatttatcctgaaggaaatacataaatgtacaaggttgttacatacatatatgtacaaatacacaatcttaaaaatctgaagataactacacatcgaattgagaattgaataagacatcaacaaaatgaaatagtaatgctgttattaaaaattaagttataaaagtatgcttaacaatataaacttagatatggaaatatatttatgacatattgttacaaaacagtaaaccgtattaatacacatgtacacacacacataggcccagaaaatcacctagaaagatgtggactggtgtttaatactggatagtggaaagattttaatattaacttttatatttttaatgtttttcactattttcatatttttctactatgactatgtataacttttacaagtttttaaaacctttaaaaaaagccgggtgcggtggctcacacctgtaatcccagcactttgggaggccgaggcaggtggatcacgaggtctggagatcgagaccatcctggctaaaacggtgaaaccccctctccactaaaaatacaaaaaattaggtgggcgtggtggtgggcgcctgtagtcccagctactcgggaggctgaggcaggagaatgacgtgaacccgggaggcggagcttgcagtaagccgagatcgcgccactgccctccagcctgggcgacagagcaagactctgtctccccaaaaaaaaaaaaaaaaaaaaaaaaaaaaaaaaaggatttttttccattttacatattatttattttattttacacactatatatttaatagaaaatgtacaactgctagtcttatttcaaataaatgtaatttatttaaattattacatatttagggtaagacagaagagtataatgcacttagtctagaaacccaagttctgattttggctctgcctgttgctagccaggtggtctttaggaagtagtttaacctttatcttggattcctcatgcattaaatgagtgactaaaaatcaaattgaataataaacgtgtagccattttaaaaagacatcaaatattatctttgcgcccctggtagtattttgagcccctggtattattccacattaatcgtattaaaa

SEQ ID NO: 27988 - DNA, 1263 bp, Homo sapiens
cacagtactggcaaaagcataagaaatcagcacattcctgtattgcctaatgccctactatacattggtatttttttcaaagattaatttgctaatatgtatcaaaaccttgaaaaatgtaaatctcgatccamcaattccacttctaggaatttatcctgaaggaaatacataaatgtacaaggttgttacatacatatatgtacaaatacacaatcttaaaaatctgaagataactacacatcgaattgagaattgaataagacatcaacaaaatgaaatagtaatgctgttattaaaaattaagttataaaagtatgcttaacaatataaacttagatatggaaatatatttatgacatattgttacaaaacagtaaaccgtattaatacacatgtacacacacacataggcccagaaaatcacctagaaagatgtggactggtgtttaatactggatagtggaaagattttaatattaacttttatatttttaatgtttttcactattttcatatttttctactatgactatgtataacttttacaagtttttaaaacctttaaaaaaagccgggtgcggtggctcacacctgtaatcccagcactttgggaggccgaggcaggtggatcacgaggtctggagatcgagaccatcctggctaaaacggtgaaaccccctctccactaaaaatacaaaaaattaggtgggcgtggtggtgggcgcctgtagtcccagctactcgggaggctgaggcaggagaatgacgtgaacccgggaggcggagcttgcagtaagccgagatcgcgccactgccctccagcctgggcgacagagcaagactctgtctccccaaaaaaaaaaaaaaaaaaaaaaaaaaaaaaaaaggatttttttccattttacatattatttattttattttacacactatatatttaatagaaaatgtacaactgctagtcttatttcaaataaatgtaatttatttaaattattacatatttagggtaagacagaagagtataatgcacttagtctagaaacccaagttctgattttggctctgcctgttgctagccaggtggtctttaggaagtagtttaacctttatcttggattcctcatgcattaaatgagtgactaaaaatcaaattgaataataaacgtgtagccattttaaaaagacatcaaatattatctttgcgcccctggtagtattttgagcccctggtattattccacattaatcgtattaaaa

SEQ ID NO: 27989 - DNA, 1263 bp, Homo sapiens
cacagtactggcaaaagcataagaaatcagcacattcctgtattgcctaatgccctactatacattggtatttttttcaaagattaatttgctaatatgtatcaaaaccttgaaaaatgtaaatctcgatccaccaattccacttctaggaatttatcctgaaggaaatacataaatgtacaaggttgttacatacatatatgtacaaatacacaatcttaaaaatctgaagataactacacatcgaattgagaattgaataagacatcaacaaaatgaaatagtaatgctgttattaaaaattaagttataaaagtatgcttaacaatataaacttagatatggaaatatatttatgacatattgttacaaaacagtaaaccgtattaatacacatgtacacacayacataggcccagaaaatcacctagaaagatgtggactggtgtttaatactggatagtggaaagattttaatattaacttttatatttttaatgtttttcactattttcatatttttctactatgactatgtataacttttacaagtttttaaaacctttaaaaaaagccgggtgcggtggctcacacctgtaatcccagcactttgggaggccgaggcaggtggatcacgaggtctggagatcgagaccatcctggctaaaacggtgaaaccccctctccactaaaaatacaaaaaattaggtgggcgtggtggtgggcgcctgtagtcccagctactcgggaggctgaggcaggagaatgacgtgaacccgggaggcggagcttgcagtaagccgagatcgcgccactgccctccagcctgggcgacagagcaagactctgtctccccaaaaaaaaaaaaaaaaaaaaaaaaaaaaaaaaaggatttttttccattttacatattatttattttattttacacactatatatttaatagaaaatgtacaactgctagtcttatttcaaataaatgtaatttatttaaattattacatatttagggtaagacagaagagtataatgcacttagtctagaaacccaagttctgattttggctctgcctgttgctagccaggtggtctttaggaagtagtttaacctttatcttggattcctcatgcattaaatgagtgactaaaaatcaaattgaataataaacgtgtagccattttaaaaagacatcaaatattatctttgcgcccctggtagtattttgagcccctggtattattccacattaatcgtattaaaa

SEQ ID NO: 27990 - DNA, 608 bp, Homo sapiens
aagcagcaattaccttttcactcactcctgtcatcctcccaaaccctgcaacatcttatccaactaaacgaaactcagctacagctccaaaacacaagctgaaaggacaaaattattagaaataaggagaaaagcagcaagggtggcacacgcatctgtgtgatgacactgccgaaattccccgcttgattcagggcacgatgcaaaacaacagaaattcaatcaacacattcaccacacatggtggattaggggcctttagaaaaagaaaagctatttggttaacagattttagtaaaatttactataataaagttgtctaaagtcaacgtcacactggatataagtgctttaaaaaaatgccagatatggagtctgttattaatattgtagctgctggaatttgtgataaaaaggattctggttatacccttttttccaggcataagtacgttaatagctctaaaaatattaactttttcaagccatcaaataactattaaccaatggcatacttacagttycttaaaaagctgcccaaagacatagccaatgagtatgttcatgcaagttaaaaataaaatagaccaacttacaactatggaagt

SEQ ID NO: 27991 - DNA, 536 bp, Homo sapiens
ctctgcctggaatgcttttccttccaacataaactgggcttgcttttctcttgccttcaggcatttgctcacacgtcactttctcagcaggacctattctaactgcctacttccttctgctgccggcacccactcctgacccccttactctgctctgccgggtttcacatagcacctgtcatttattaccattctgtataatgtgcttacttaatattctatttattgtgtgtgcctctaccactacaatgcaaagagtctttattttgttcatcaacataccataagcagttaatagcagtgtttctgaaaattagtgatagctgttgtaatgcccaacaagagaattgttatattcttactgtattagtcaaagattgaggcataatggtgtcaaggaaatataaattgctgagattcttgtttagaaacccataattcagccakacaggtgagagacaagaaatgtttcaccttttttgacttctaggtttggcatattgagtttcttgtgttaataccacagctacaccaag

SEQ ID NO: 27992 - DNA, 559 bp, Homo sapiens
gccagcggcggcgcctgcggcgggagcgggtgcgcgcgcagccctgctgccgcccgacggcctacgaggacgaggtgtccttcctggacgcgcacagccgctaccacacggtgcacgagctgtcggcgcgcgagtgcgcctgcgtgtgaccctacctcactcggccggcgcggcggccactccccccgcctcgacggcaccactggccggccccgcgaaagactgcgcgtgcgtagagcacgccggcgcggccccgggactctcgcgataactgtactgagataaagtgtggcaactcgagctggctggtgattcatcctcggcgaggggctcgcgtgtgggccrcgtcgccgtctccaccgggaaagcggggaccagtggggggggcccagctgcagggtagtgggaggatgctgtttgctttgggggaagggtagatgcaaagtgggtccagtttatggcggacaaaaaggaaaatggggtgaatggggctatgttggcagggaccgtccttcctgcctccctacgggtccctctgcccgtcccgagcgtgttccgg

SEQ ID NO: 27993 - DNA, 598 bp, Homo sapiens
tgtcaaatctatcatacaaagaattttgagaattgtgagtaagctatggatcaatgaacatagcatatttttatatgctatgtttgagtcaagtaaaaggacaacattgtagtctttttttttaaggtttgcttcctttgcatgatgagaaacaaaataagttttgcaaaacgaagtgatgatgcgtatacagttgaatgtacrttacaagctctagtgtatattatcaccagtaaacgttggaactgcattaattttgttttgacaatcattttgttaaagtgtgtaggtactttgttaaaacaaggagagatgggctcttttagacaggaactcctggaggggaacagacagaagcttatctccttccttaggcctctagcatccgtcttcaaattgcctaaaattcttttgagcagggctttgttgggggaaagaaactgtgttaatgcagggttccctgtgtcaccaggagcgtcctcactcagcctccattaacccagggaggactggagagtctcttcactggtccttctagacacaaaagaacaataaaaatccactgtttgctgatgcttgaaattccattagccaaaga

SEQ ID NO: 27994 - DNA, 810 bp, Homo sapiens
tttggtcaaactttagctcaaatgacgtctcctccaacaagccttctttgactgcacactctgcaatgggccctcccacagctatctaggacagtcactcatctttcatcactgaccatggttagtgtaaatgggagtgtcctctcatccattgtccatcttcccacttcagctatagctccatgagagtaatttgagccccccatgaaatgttcctatgactcactgacaattaggtatggtccaaatagagcctttctttcacacagagatgtcaaccccagcayggccccctcacagctcctcctgaaggggaagccttaagtgagccacgtgacagcacagttgattcaatactgcatggcatcagacctacccaggaccccaggcacagctgtcgggacctgagatggacagcaggcctaggaatccacagaccaaccagcaacccgagatgtgtcaggaagggatgagctgggctaatcctattcctccttggggagtttccagtgagaaccgaaatggaaaggatatcacatgctggagtcagggctgtggtggaccatctgctcgtggagatttgagggagcagaactcatgagaaggcagaggccccagttaatgaaactggaacagagtgcacaagagcagagagaaacagaactgccacagagacacatagagcctccggctccagggctgtctcagttcctgcctgaaccccaattccagttcccatcaagggagttccttcagtgagtctccctttccaggaggtaactaacagttacttgcatcaaaaagagccaa

SEQ ID NO: 27995 - DNA, 544 bp, Homo sapiens
aattacatgaaatgtttcttttgttggaactatcattgcctttttccccatgctaaatgatgaatgtgttctagcaatggaaatcaaattcccttttacatgcagaactcccctcacctaaattaagaaaactggtattgtttggcaaagagggccagatcttaaaaataaaatagagagtaagaatcaaagaatgcacattacttcggctcttacagaaacctggattatattgtgcaaattacgaatattggctgggtgcggtggctcacgcttataatcccaacactttgkaaggccgaggtgggcgggtcatttgaggctggaagttcgagaccaacctggccaacgtggtaaaaccccgtctctactaaaaatacaaaaattagccaggtgtggtggcatatgcctgtagtcccagctacttgggaggctgaggcaggagaatcagtggaactcaggaggcgaaggttgcagtgagccgagactgtgccactgcaatccagcctgggcgacagagtgagactccatctcaaaaaataca

SEQ ID NO: 27996 - DNA, 544 bp, Homo sapiens
aattacatgaaatgtttcttttgttggaactatcattgcctttttccccatgctaaatgatgaatgtgttctagcaatggaaatcaaattcccttttacatgcagaactcccctcacctaaattaagaaaactggtattgtttggcaaagagggccagatcttaaaaataaaatagagagtaagaatcaaagaatgcacattacttcggctcttacagaaacctggattatattgtgcaaattacgaatattggctgggtgcggtggctcacgcttataatcccaacactttggaaggccgaggtgggcgggtcatttgaggcyggaagttcgagaccaacctggccaacgtggtaaaaccccgtctctactaaaaatacaaaaattagccaggtgtggtggcatatgcctgtagtcccagctacttgggaggctgaggcaggagaatcagtggaactcaggaggcgaaggttgcagtgagccgagactgtgccactgcaatccagcctgggcgacagagtgagactccatctcaaaaaataca

SEQ ID NO: 27997 - DNA, 544 bp, Homo sapiens
aattacatgaaatgtttcttttgttggaactatcattgcctttttccccatgctaaatgatgaatgtgttctagcaatggaaatcaaattcccttttacatgcagaactcccctcacctaaattaagaaaactggtattgtttggcaaagagggccagatcttaaaaataaaatagagagtaagaatcaaagaatgcacattacttcggctcttacagaaacctggattatattgtgcaaattacgaatattggctgggtgcggtggctcacgcttataatcccaacactttggaaggccgaggtgggcgggtcatttgaggctggaagttcgagaccaacctggccaacgtggtaaaaccccgtctctactaaaaatacaaaaattagccaggtgtggtggcatatgcctgtagtcccagctacttgggaggctgaggcaggagaatcagtggaactcaggaggcgaaggttgcagtgagccgagaytgtgccactgcaatccagcctgggcgacagagtgagactccatctcaaaaaataca

SEQ ID NO: 27998 - DNA, 812 bp, Homo sapiens
actgttattaccccatattcatttcctggggctgccgtcagaaattagcacaaacttgttgtcttaaaacaactgaaatttatcctctcacagtatcctcttcacaggtccgaagtctgaaatcaaggtgttgacagggccgtgctccttctggaagctctaggggagaatccttccctgcctcttgcagcttctgggagctgtggacwttccttgcactgcttcagcccagtctatgcctttgtcttcacgttgctttgtctgtgtgtctgtgtcttctctcttgtctgcatgtctctactttgtgtgtctcatttataaggacatttgtcattggagttagggctacccaaataattcaggatgattccaacttgagatttttaatttaattacatctgcagagacacttttgccaaatgaggacacatttgcaggttttgggatgtgggtatatcttttggggagctactattcaacacagtacaaccccttttgtgatggaaaaatggtgatacattgtggttacggaattctctgaggttgcacagccaggagttggtagaattggaatttacacacagcagcctggctctagagcttgcatatggaccactactctcttttgccttttagtaaatgtgctccgtgattgttcacggtatgaatggagggcagcatggctggggaaatagatggatgaaaagatgctggtaacagtagttggccaacattctccttctcaatgtactgaaaatagtaacaacaactgatattcattgttttatgctcttgacctgggactcgtcctt

SEQ ID NO: 27999 - DNA, 542 bp, Homo sapiens
taaaaagtttaccttaagacaagttaaatgagagtttgaagatactgacaagctgattttagcaactgtgtttgctctcagggcatgtgatgcttttggtgaccatagagactccatttaaatacccccagctcccttgagctagtttctcctaagaaaggaataatacgtttaaaagaaggaatgctggagaggagtttactccaactaaatatattgtagtggcatagcttagattccttaccagaagcggaaaatgcatagtataggaccaaaagagggctgtaattttttttggaacatcgcattctttcttctccctaagackcatagatagatataattatatgattggaaaattagacccaagtggcgagtttaaaggaactggggctggttaaactagaggcgagagcgagggtagcaatgatggtctgaagcagctgctgtgtgtttcctggaggacccacggggagggggagagctactacacaagcttcgcagaggggcttaggcaggggtcagtgtttgaattggacact

SEQ ID NO: 28000 - DNA, 523 bp, Homo sapiens
cactatgtttgaagtttttatttctgtgtgtgtgtgtgtgtgtgtgtgtgtgtgtttatgtaaagacagatcaggttgtgtttgagtgatgagcagggttgtatgaacaagagtataagagatgtatttccaaattctaaagaaatttagataagattttgctttgttagtttctgtttgtttagctggttttgaaaaaaaatagataatagatctgctatttaaaatgtttaaaataacatttaaaaaatgttgtcatctgttccatcagaaagtatgtgattttagagcacctgtcacaacaatattagcattcgcacaaggaattaaatcggtaaacagtattggggtacctaaagacaggtggaagacagtaaacttaggcaaggtggagctatagctagaacaactgcrtagtagacacttcatggtgattctagttatcagactcatctgtgataacaataataccctagttttatttaatttctcagaaattccagttgacatttggatggaactt

SEQ ID NO: 28001 - DNA, 555 bp, Homo sapiens
caacaatatatttcctgtgtcyctgataggttagtcagaaagaaaattatggaaaacaggaaagggatgttagaaattacattttaaccaagcagatattatcatgcatataattatttgcaaaagtaagatattagtagttaatagctaatatatgtttttaatcatatggataaaaggaaacacaatgatttttcaaaagcatttaaattgtccaagaaataacaacaaagctcagtgaattggactttatttagtttcttattgctgctctaacaaattatcacaaactgaatggcttaaggcagcaaaattttattactatacaatgctggaggtgggaagtccagaattaatctctgtaggctaacgtcactatgacttcagggctagtctcttctggagtctccagggcacaacccatttattttcttttccggcatctggaggccaccttgatttcctaggtcatctgatctttcttcatcttcaaagccagaggctttgcatcttcaaatctccccctgctttataatcacaatagctttcacttct

SEQ ID NO: 28002 - DNA, 532 bp, Homo sapiens
tgcatgcttaatatttttcgtactcttagtgcttgatttttttgttctttcttggggttcaaattcatcctccctaaattgcattctataggcttataagtgaaaatttgtcatcagtaaactcaattctagtttattgtaaaatgaatttcacctactgtcttcaatttattttaccagatatacaattctaatttaaactcattttttcttaaactttacacatttttatttcagtttctatttttctattgagacatctagtatttttcaaaattctaatctcrtaagtaatctttctttttcctctttcttttggtattttataggatgatcatgatattgcccagggtgaacttgtagtttaccttatttgggggttgtagtttttaatgagactctaaagtcattaagagatctagaaaattctcagttaatacatttttataaagcatgtattttcattcttcatttacttttattctgggtctccatcttacatacatgttagacttcctttctatcatatctc

SEQ ID NO: 28003 - DNA, 532 bp, Homo sapiens
tgcatgcttaatatttttcgtactcttagtgcttgatttttttgttctttcttggggttcaaattcatcctccctaaattgcattctataggcttataagtgaaaatttgtcatcagtaaactcaattctagtttattgtaaaatgaatttcacctactgtcttcaatttattttaccagatatacaattctaatttaaactcattttttcttaaactttacacatttttatttcagtttctatttttctattgagacatctagtatttttcaaaattctaatctcataagtaatctttctttttcmtctttcttttggtattttataggatgatcatgatattgcccagggtgaacttgtagtttaccttatttgggggttgtagtttttaatgagactctaaagtcattaagagatctagaaaattctcagttaatacatttttataaagcatgtattttcattcttcatttacttttattctgggtctccatcttacatacatgttagacttcctttctatcatatctc

SEQ ID NO: 28004 - DNA, 1007 bp, Homo sapiens
atacatactaaagccaaaaagatttaaaccctagttgaaaggatttgggtaaaatgtcattctacattttcttagcatgagagcttggattactgaaacaagtaagctaaggaggtgacctctctcctgaagctctttcaatcagtgaatgggtttgggtctcaaccttcctgaaagacacagttacccacacacttcctcctccgatattcatgggctgcctctcacttctcacaagtatctgctgctcccatcccccattttccctgactcctcttccctcttcatctgaaaatccttgtggagtgttcactcttgccaagcacaggactagataccaggatcacaaacatgtaagaaaagtccctgctaccaggagaacacagttcagcaggggagcagaagcaaacacactgctacagtccctagggacaaaggacaataggaaggtttgcaaaagtgctcagagaacacagaagaaaggaggagaggagggaaaaggtgtgtgggaaggtttcaggcagctgaggcacctacactgagtcttgaaaggctgaatgtatatgttcggagcagacaagggctggggaggacagggtgtcccagacagccagagcaagatctgcaaaggcctggaagcaagagcacatgggccacctgagaagccccaagaataggctgcaggctgtacawgagaacacagagggaactgatgcaggcagggcctgtactgtgaaggtccttttacaccatggaacatttgcactttatcctagagccaacacacacatgcgcatacatttttacataaatcttaacagggtcacatctcttttcattgttactagatctctgtggttagcactgtgaaggatggactggaatggagaaaagatgaaaaggaataaggaggctacaggcaagcctgggatagaaaagagaagtcagattggacataaggaagtaaaaaaagctcagtgatttatgtgatatgaagggcaagggaa

SEQ ID NO: 28005 - DNA, 1215 bp, Homo sapiens
tgcatgccaggttaagaagttggagataatttggtagcatttgagctgcaatagatcgtgtcagagagaactatgccatgaccagatgtatgacttagataaccctgacagccatggggtggacaaatggctagggttgagactgcagccaaactcttcacaatttcaggagagaaatgatgaggaatgagattgaagaagtggccatggaggtggggaaaagagagcaaattccagaaaaatattgtggatttgctcagtggaacttggcactggatgaaatatacagaataagtgcaagggaggaggcagaagattaacttggatagatgggttgataactgtagccataactaagggaaatatattaagctcctcttctcaataaagattagatttaattacgaaaatatcatctatttatttgccatcttkttttacaataatatatcttgtatcttcatataaaagcagttacggcagccctctgcactgtattttcatagggttctgtttttatcttacttaactgtaaggtccttgagggcaaaaacagtcaagcctttctcattcatcctttgcaaacccagcaccctgattcccaacagggtagaactcagcacatatttgatgaattagattgaatttaaatctatatatagttataggaataaatgcttggaggattttcctatctctgtttcaattctttgttttagctcagtctttttatgttggctcctgtaagctttttgcagtgctgcaaacacttctagctgacaagagagaaaaagaaagtcagtgaaaaggaggagggggcattgcagcatctagattgaactctccaggcttgcctgtctcataattttcacctttggtggggaactgtcccagatttcatccaccaggctaaggttctgacatggtaccttcttaaatcaagcttgaagggaaattgattgaaaagaaaacaccattatgggaaaacaattcattttcttccccatgacagaaggtagacttttgtctatactgcagaataaatatgatctggctgattgctttaagatctggaagctcagaggagtcataatggctttgctcactctttagagggaaattaccttccattttggagacatttgatacaaaggttttggttagctttcaaaaagtaatattttttctccctgtgtgattatttatattagctag

SEQ ID NO: 28006 - DNA, 1215 bp, Homo sapiens
tgcatgccaggttaagaagttggagataatttggtagcatttgagctgcaatagatcgtgtcagagagaactatgccatgaccagatgtatgacttagataaccctgacagccatggggtggacaaatggctagggttgagactgcagccaaactcttcacaatttcaggagagaaatgatgaggaatgagattgaagaagtggccatggaggtggggaaaagagagcaaattccagaaaaatattgtggatttgctcagtggaacttggcactggatgaaatatacagaataagtgcaagggaggaggcagaagattaacttggatagatgggttgataactgtagccataactaagggaaatatattaagctcctcttctcaataaagattagatttaattacgaaaatatcatctatttatttgccatcttgttttacaataatatatcttgtatcttcatataaaagcagttacggcagccctctgcactgtattttcatagggttctgtttttatcttacttaactgtaaggtccttgagggcaaaaacagtcaagcctttctcattcatcctttgcaaacccagcaccctgattcccaacagrgtagaactcagcacatatttgatgaattagattgaatttaaatctatatatagttataggaataaatgcttggaggattttcctatctctgtttcaattctttgttttagctcagtctttttatgttggctcctgtaagctttttgcagtgctgcaaacacttctagctgacaagagagaaaaagaaagtcagtgaaaaggaggagggggcattgcagcatctagattgaactctccaggcttgcctgtctcataattttcacctttggtggggaactgtcccagatttcatccaccaggctaaggttctgacatggtaccttcttaaatcaagcttgaagggaaattgattgaaaagaaaacaccattatgggaaaacaattcattttcttccccatgacagaaggtagacttttgtctatactgcagaataaatatgatctggctgattgctttaagatctggaagctcagaggagtcataatggctttgctcactctttagagggaaattaccttccattttggagacatttgatacaaaggttttggttagctttcaaaaagtaatattttttctccctgtgtgattatttatattagctag

SEQ ID NO: 28007 - DNA, 559 bp, Homo sapiens
aactcattaaacaggtactattactatccttattgtacaggcgaggaagcacgtgagaattggctaaagccatatagttagtaagccatagagttaggatttaaacttgggtccaaatcctgtatgcttaaccattactgcaccagagaggtcctccaggcttcccttgagtaatctgaggaatgaggtgtgtgttatcttttttttttttttcctcaatcaattgaggttttattgagctagagcttgagggtgtgcccaagataaacaagagtcacagaaatcctctgtggcttatgttctccctgaagaggttttcaggaggctcagttttatacatttccttgggggraaaatgtgtgtaggaagagttggggggtaggcagaagaatgattgctctcatattgtctttgttccatacctgagaaaataaggattattagtgtgaagtataataggcatatccttgttttgtgggagaatatacaccttttttaaggtattaagattatttttttctgtaagttattgggggtacaggtggcattcggttacatg

SEQ ID NO: 28008 - DNA, 525 bp, Homo sapiens
gccaatcttgagaaccattgctttaaacagtttgtaaaatgtacgaaacagggaaagatgtttaattacaatgtttagttacatgactgaaattttatcaataagatctaaattctaatctaaacagaaattcatttgcctcttcattcttcaacagattagttcccagaggacactgttggattcatatctgacacgtaaataaagcccacacaccaatatccaaagcagaaagctgaaagggacctgtttccttgataatatcattgaaccattgaaatattgaccccataattgttccaattttgacttctaagaatgtagaatatttgtattttgtttcaactagatgttggaaaattctatagtttgcacccgaaagcgtttgaaacattcctttgtataaacacattttcttgattgtgtggtcaatctgctggacagatccrctatgaattcagacagatctgggtttgaatcctggctctgctaccgtttaatgactttaacaatcttatttcatca

SEQ ID NO: 28009 - DNA, 618 bp, Homo sapiens
attaagagtaacaattaagagatccttttgaagtgcccatgtttaagttttatttgtttggttttgtatttttttctaaatattctttcagatcaaaccaagtctaaactkgttactatttgacttaatgaaaggcctgacatgaaggaaggatgtaaataattttgagagaaaatacttttgaaatgttaaaacatttcttttgagcaatgttatttttattataaaggaaatagcactttcacctctgggagtgaataggggcttctcaatttgatacctaaaggatatttcctctcaagacaaacaaacaaaaatgtgcttactggggctgcaccttcagcccagcattggatatgttaattgctgacatacttgaggtctcactaagagaaaaatatcattagactgctggttcccaaaatacattcccttaaatatcagtcctatggagtggtccttgggaataaaaatcagggaacatattcaatggtaaatatatatatatatatatatatatatatatatatatatatatatataatatttatatatatattatatatgtattatgtagctctttattattattattattatttttgagacagagtctgg

SEQ ID NO: 28010 - DNA, 601 bp, Homo sapiens
cccagggtagagaaattatatctcagggtagaaaaatatatattttttgtatggaggttacttcttattgaagtgtgttagatctggccaggcatgctggctcacacctataatgtcagcactttgggaggcygaggtgggaggatcacttgaactcaagagttggagaccagcctgggcaacatagtgagatgctgtctctaaaacaaaaatttttataattagccaggcatggtggcacacgcatgtagttccagcagctagggaggctgaggtgggaggatcactttaacctggggatcaaggctgcagtgaaccagattgtgccagtgcactttagcctgggtgatagagtaagaccctctctaaaaatatatatatttttaaaagtgtgttagatctgcatattataaaatgacatgaattaagattcttcctccgtcatttatttctgttaaaaaaattcactgcttgcaaacatgtacatatatataaaccactgcacactaattatactgtatggtgtcacaagggtgttttttttttttacttgtaatgttttgcctaactttagagaaagcttgaaaagttaattaaaatc

SEQ ID NO: 28011 - DNA, 2248 bp, Homo sapiens
aaaattgtatcacaaaggggtgaactggggcctgattgattgatgttgaaatttgatttatccccagtagaaagtgccaggatattaagcctctattactccacaagggataccattttgcctttggtgggtgaggtaaatcttcagattagaaatggtaaagcctcaagacttccaaaaacatacaggctcctattgtatacttgctgaagttcctataattatttacaattccctgcaaagaacattcttgggggtgagtcccagaacagaggtgagcctccagctgcaaaaaccatagcaagtatggcagggagcatctttgattcagaacagaacgccactcatcgttccatcagaacaggggcaggaggttcctgccaatactgattgatgccacgaatcaactggagttgttccatgatccacatggtccttggacttggtgctgtcctggaaactggattcattgctcaaggagctgagataaaagaaagcagcctaaccaatggccagctcaaattaggagctcaaatgaacagggcctcaaggaagtcagcctctgagaatctgagatttccagactctgataatgggaatctcacctatttgtccacttttggggtagatctagacaccrtgatgtgtcagcagcctcttagttgctgagacaattgtcccagagtgcacagactaaatctaaatccctacaatatgttttcaatgaatttatgccacactaattttctaatttgcaatttttaagtcaatatactttattttcttttaaaaatagtgttttatattttcatactataacatatttccatgatattaaaattggcaagtaaagaaaataaaatatgtaaagtcattactgtcatcctcccagaagtgatgtgctaacaattagacatatttcatccccagtttttttctacagacacttttgctttaccatattgtgtacttgggtctattttcaactctgagccacttgctatattgaacagtgtttctacagacaccgtgctgtttcttctttccttctttcactcaacaatcatttactgagcattttgagaagaactgggaggacagcgatagaatgcttttgcattttatctgcagtcaactagttagaaaccagaaacaactatcttgcatctcactatcttgttatttgcacctttaaaatccctttgcagaataggtgcatagtattaatttgataactaaatgaaaacaaaatggagttcatcaaagtggatttgttttgaattggcttggagttactggcagtctatgatgacatacgctactccccaccattgacacatgcattcaaatgcagatgctatattagtctgttctcacactgctaataaagacatatccaaaactcggtaatttataaaggaaagaggtttaattaactcacagttccatgtggctggggaggcctcttaatcatggcagaaggtggaggagaagcaagacatgtcttacatagcagcaggcaagagagcttgtgtaggggaactgctgtttataaaaccatcagatatcttgagacttattcactatcatgagattggtatgggggaaatcactcccacaattaagttatctcaccctgaccccacccttgacatgtaaggattattacaattcaaggtgagatttgggtgaagacacagccaaaccatatcagaggcacacacaattttatgtgtttgtgaagaaaaggcaattgtggaaactttacttaaaaagtgtaatgtcaatctcatgagttgaggacagttaggagaccctgaaatgacacctgtgggcttgcattttattcttggtcactgctaaaccatttttcacttccctctgtttcagtaacctaaaaatctagggttcacaaaacaatgagattaaggaagccaactgataactattgtaataggataggaaatgtttcctgatttgggaaggatgggcaaggaggtggagaatgagcttccaaggcagttttgattttccggaaaaactcatcttaaaactgattatctccccaacatgagacctaccaactgacctgtatcagcctaactgcaatgtatctgtctaaagctgttaaacacagctattttcaaaacatttatccattttcataaaagatttcttaaaattcaagctaggttttcttcctttatttgaaaagggaatatggtaattttaggaatatgattatata

SEQ ID NO: 28012 - DNA, 2248 bp, Homo sapiens
aaaattgtatcacaaaggggtgaactggggcctgattgattgatgttgaaatttgatttatccccagtagaaagtgccaggatattaagcctctattactccacaagggataccattttgcctttggtgggtgaggtaaatcttcagattagaaatggtaaagcctcaagacttccaaaaacatacaggctcctattgtatacttgctgaagttcctataattatttacaattccctgcaaagaacattcttgggggtgagtcccagaacagaggtgagcctccagctgcaaaaaccatagcaagtatggcagggagcatctttgattcagaacagaacgccactcatcgttccatcagaacaggggcaggaggttcctgccaatactgattgatgccacgaatcaactggagttgttccatgatccacatggtccttggacttggtgctgtcctggaaactggattcattgctcaaggagctgagataaaagaaagcagcctaaccaatggccagctcaaattaggagctcaaatgaacagggcctcaaggaagtcagcctctgagaatctgagatttccagactctgataatgggaatctcacctatttgtccacttttggggtagatctagacaccgtgatgtgtcagcagcctcttagttgctgagacaattgtcccagagtgcacagactaaatctaaatccctacaatatgttttcaatgaatttatgccacactaattttctaatttgcaatttttaagtcaatatactttattttcttttaaaaatagtgttttatattttcatactataacatatttccatgatattaaaattggcaagtaaagaaaataaaatatgtaaagtcattactgtcatcctcccagaagtgatgtgctaacaattagacatatttcatccccagtttttttctacagacacttttgctttaccatattgtgtacttgggtctattttcaactctgagccacttgctatattgaacagtgtttctacagacaccgtgctgtttcttctttccttctttcactcaacaatcatttactgagcattttgagaagaactgggaggacagcgatagaatgcttttgcattttatctgcagtcaactagttagaaaccagaaacaactatcttgcatctcaytatcttgttatttgcacctttaaaatccctttgcagaataggtgcatagtattaatttgataactaaatgaaaacaaaatggagttcatcaaagtggatttgttttgaattggcttggagttactggcagtctatgatgacatacgctactccccaccattgacacatgcattcaaatgcagatgctatattagtctgttctcacactgctaataaagacatatccaaaactcggtaatttataaaggaaagaggtttaattaactcacagttccatgtggctggggaggcctcttaatcatggcagaaggtggaggagaagcaagacatgtcttacatagcagcaggcaagagagcttgtgtaggggaactgctgtttataaaaccatcagatatcttgagacttattcactatcatgagattggtatgggggaaatcactcccacaattaagttatctcaccctgaccccacccttgacatgtaaggattattacaattcaaggtgagatttgggtgaagacacagccaaaccatatcagaggcacacacaattttatgtgtttgtgaagaaaaggcaattgtggaaactttacttaaaaagtgtaatgtcaatctcatgagttgaggacagttaggagaccctgaaatgacacctgtgggcttgcattttattcttggtcactgctaaaccatttttcacttccctctgtttcagtaacctaaaaatctagggttcacaaaacaatgagattaaggaagccaactgataactattgtaataggataggaaatgtttcctgatttgggaaggatgggcaaggaggtggagaatgagcttccaaggcagttttgattttccggaaaaactcatcttaaaactgattatctccccaacatgagacctaccaactgacctgtatcagcctaactgcaatgtatctgtctaaagctgttaaacacagctattttcaaaacatttatccattttcataaaagatttcttaaaattcaagctaggttttcttcctttatttgaaaagggaatatggtaattttaggaatatgattatata

SEQ ID NO: 28013 - DNA, 2248 bp, Homo sapiens
aaaattgtatcacaaaggggtgaactggggcctgattgattgatgttgaaatttgatttatccccagtagaaagtgccaggatattaagcctctattactccacaagggataccattttgcctttggtgggtgaggtaaatcttcagattagaaatggtaaagcctcaagacttccaaaaacatacaggctcctattgtatacttgctgaagttcctataattatttacaattccctgcaaagaacattcttgggggtgagtcccagaacagaggtgagcctccagctgcaaaaaccatagcaagtatggcagggagcatctttgattcagaacagaacgccactcatcgttccatcagaacaggggcaggaggttcctgccaatactgattgatgccacgaatcaactggagttgttccatgatccacatggtccttggacttggtgctgtcctggaaactggattcattgctcaaggagctgagataaaagaaagcagcctaaccaatggccagctcaaattaggagctcaaatgaacagggcctcaaggaagtcagcctctgagaatctgagatttccagactctgataatgggaatctcacctatttgtccacttttggggtagatctagacaccgtgatgtgtcagcagcctcttagttgctgagacaattgtcccagagtgcacagactaaatctaaatccctacaatatgttttcaatgaatttatgccacactaattttctaatttgcaatttttaagtcaatatactttattttcttttaaaaatagtgttttatattttcatactataacatatttccatgatattaaaattggcaagtaaagaaaataaaatatgtaaagtcattactgtcatcctcccagaagtgatgtgctaacaattagacatatttcatccccagtttttttctacagacacttttgctttaccatattgtgtacttgggtctattttcaactctgagccacttgctatattgaacagtgtttctacagacaccgtgctgtttcttctttccttctttcactcaacaatcatttactgagcattttgagaagaactgggaggacagcgatagaatgcttttgcattttatctgcagtcaactagttagaaaccagaaacaactatcttgcatctcactatcttgttatttkcacctttaaaatccctttgcagaataggtgcatagtattaatttgataactaaatgaaaacaaaatggagttcatcaaagtggatttgttttgaattggcttggagttactggcagtctatgatgacatacgctactccccaccattgacacatgcattcaaatgcagatgctatattagtctgttctcacactgctaataaagacatatccaaaactcggtaatttataaaggaaagaggtttaattaactcacagttccatgtggctggggaggcctcttaatcatggcagaaggtggaggagaagcaagacatgtcttacatagcagcaggcaagagagcttgtgtaggggaactgctgtttataaaaccatcagatatcttgagacttattcactatcatgagattggtatgggggaaatcactcccacaattaagttatctcaccctgaccccacccttgacatgtaaggattattacaattcaaggtgagatttgggtgaagacacagccaaaccatatcagaggcacacacaattttatgtgtttgtgaagaaaaggcaattgtggaaactttacttaaaaagtgtaatgtcaatctcatgagttgaggacagttaggagaccctgaaatgacacctgtgggcttgcattttattcttggtcactgctaaaccatttttcacttccctctgtttcagtaacctaaaaatctagggttcacaaaacaatgagattaaggaagccaactgataactattgtaataggataggaaatgtttcctgatttgggaaggatgggcaaggaggtggagaatgagcttccaaggcagttttgattttccggaaaaactcatcttaaaactgattatctccccaacatgagacctaccaactgacctgtatcagcctaactgcaatgtatctgtctaaagctgttaaacacagctattttcaaaacatttatccattttcataaaagatttcttaaaattcaagctaggttttcttcctttatttgaaaagggaatatggtaattttaggaatatgattatata

SEQ ID NO: 28014 - DNA, 2248 bp, Homo sapiens
aaaattgtatcacaaaggggtgaactggggcctgattgattgatgttgaaatttgatttatccccagtagaaagtgccaggatattaagcctctattactccacaagggataccattttgcctttggtgggtgaggtaaatcttcagattagaaatggtaaagcctcaagacttccaaaaacatacaggctcctattgtatacttgctgaagttcctataattatttacaattccctgcaaagaacattcttgggggtgagtcccagaacagaggtgagcctccagctgcaaaaaccatagcaagtatggcagggagcatctttgattcagaacagaacgccactcatcgttccatcagaacaggggcaggaggttcctgccaatactgattgatgccacgaatcaactggagttgttccatgatccacatggtccttggacttggtgctgtcctggaaactggattcattgctcaaggagctgagataaaagaaagcagcctaaccaatggccagctcaaattaggagctcaaatgaacagggcctcaaggaagtcagcctctgagaatctgagatttccagactctgataatgggaatctcacctatttgtccacttttggggtagatctagacaccgtgatgtgtcagcagcctcttagttgctgagacaattgtcccagagtgcacagactaaatctaaatccctacaatatgttttcaatgaatttatgccacactaattttctaatttgcaatttttaagtcaatatactttattttcttttaaaaatagtgttttatattttcatactataacatatttccatgatattaaaattggcaagtaaagaaaataaaatatgtaaagtcattactgtcatcctcccagaagtgatgtgctaacaattagacatatttcatccccagtttttttctacagacacttttgctttaccatattgtgtacttgggtctattttcaactctgagccacttgctatattgaacagtgtttctacagacaccgtgctgtttcttctttccttctttcactcaacaatcatttactgagcattttgagaagaactgggaggacagcgatagaatgcttttgcattttatctgcagtcaactagttagaaaccagaaacaactatcttgcatctcactatcttgttatttgcacctttaaaatccctttgcagaataggtrcatagtattaatttgataactaaatgaaaacaaaatggagttcatcaaagtggatttgttttgaattggcttggagttactggcagtctatgatgacatacgctactccccaccattgacacatgcattcaaatgcagatgctatattagtctgttctcacactgctaataaagacatatccaaaactcggtaatttataaaggaaagaggtttaattaactcacagttccatgtggctggggaggcctcttaatcatggcagaaggtggaggagaagcaagacatgtcttacatagcagcaggcaagagagcttgtgtaggggaactgctgtttataaaaccatcagatatcttgagacttattcactatcatgagattggtatgggggaaatcactcccacaattaagttatctcaccctgaccccacccttgacatgtaaggattattacaattcaaggtgagatttgggtgaagacacagccaaaccatatcagaggcacacacaattttatgtgtttgtgaagaaaaggcaattgtggaaactttacttaaaaagtgtaatgtcaatctcatgagttgaggacagttaggagaccctgaaatgacacctgtgggcttgcattttattcttggtcactgctaaaccatttttcacttccctctgtttcagtaacctaaaaatctagggttcacaaaacaatgagattaaggaagccaactgataactattgtaataggataggaaatgtttcctgatttgggaaggatgggcaaggaggtggagaatgagcttccaaggcagttttgattttccggaaaaactcatcttaaaactgattatctccccaacatgagacctaccaactgacctgtatcagcctaactgcaatgtatctgtctaaagctgttaaacacagctattttcaaaacatttatccattttcataaaagatttcttaaaattcaagctaggttttcttcctttatttgaaaagggaatatggtaattttaggaatatgattatata

SEQ ID NO: 28015 - DNA, 608 bp, Homo sapiens
tgctccacccatactcaaatgcaggttgatttattctcctttaygctaggtgacttccccctgtgtatactctctttcagaagtatttctttctatctccctaaaatcaaaaccaatgttcaccttaggttgtgtagaaaagtctctgctaaggcacctcacacctttctaaatcacataagttataacttatttatatatttactttgaagtaccattcctgaatatctaatagtgagattaatgagttggttaatgtggtatcaatttagggcagaaatcattttgaggaactcataaatacctactattatgatgtatgaagcttcaggtttttatggctgccactcaaacaaagaaatattatttggaagatgtgatttgatgttagtatttaatcaaatgtacttatttcacctacttgctgaataagcacccttctttactaccatcactggttttcatattgaggtatgtggatttatcctttatcattgctcacctttgaagatggtggcataattaaagaattacaaggggatttcagaaagttgtagataaattgaactaaaagataaaaatagaaaaaatttatttctcaacataag

SEQ ID NO: 28016 - DNA, 746 bp, Homo sapiens
atattataactgaattactgtctgtttgcttaactcattacagaaaactatgataaggtttttaattacaaaattagccctgccaaatgaatttctttcattcaatgaactgcaaaaggtggtacagtgaggataaaaatcatgtcctttcccatgttatttatagtacttttttctaaaaataattgttataataaaaaataatgccaacaacaacaacaataatattttcttcctcgtctgtttttgtgtgattcctttaaactgttaattcatgctgaacttgttcaaccaagattccataaagtaatcctcttcaacctacattttattctcagccttgtcttgaacatcttactctgacctcactagctcttcacttaccaatttgtttctcatcttctccttaataaccttatgaataagttttctatgtagtcccttgtattgctctttagacctgtcacttatcacttcttcttcttaggatactcttctccactgtaattcttatgtctactctaactatatatctttgaattctttagcatacataaacatatctgataaagcaggatcaagcacaaagatgctgtatcttgcctgcatccaacagactgggattattctgagctctcaagcaaaacatggttaaatcctgacaacaaaatgaagtgacatttatgctyacatatatccttccttgttttctgcattttcatttgaaaagtaaacatctagtccat

SEQ ID NO: 28017 - DNA, 785 bp, Homo sapiens
tactcactgagactataggctgtcagaatgctacatgctcccagccctttaactcttttcactctgctatggccacaactggaatacaccttttcctcaattacaaaagccacacaagattctacctgcagcctcagtacacttcaacaattctcttattagtccttttgtaaacttactacctaagattttgcagtccctttgatgtctatatatcttgccaatctatcacttgaaggtgcctgttttactccaatgacaaaaaaaatccaatctaatattttttcaccttttctttctctgcctcagagttgataatacttacctttgtcactttcgtctcacctaggtccaggcatgagcatagccctgcttcatttcaacttagcctatctttatggccttcaggtctcctctcatctggaattgagttctgyagattttgtcctgtatgcccataatccactaaatagtgttcccattgttttcaaatataattcacaggggtaaagatagaaaatgtattttttagggctttttctaacaattatattttccatggaatgctgaagtcccacaaggaattctgaggcccaggtaaggaagaagaattagggaagacacaccagtgggaggttgcctagggcacaccaaaccattgcaaaagtatagtaaatccaggccaatccacaggtgagattgagactacagaatacattgttctttggttagaattggcttaacaacaagtcaatgacctaagctagggtaggcataagctggcg

SEQ ID NO: 28018 - DNA, 785 bp, Homo sapiens
tactcactgagactataggctgtcagaatgctacatgctcccagccctttaactcttttcactctgctatggccacaactggaatacaccttttcctcaattacaaaagccacacaagattctacctgcagcctcagtacacttcaacaattctcttattagtccttttgtaaacttactacctaagattttgcagtccctttgatgtctatatatcttgccaatctatcacttgaaggtgcctgttttactccaatgacaaaaaaaatccaatctaatattttttcaccttttctttctctgcctcagagttgataatacttacctttgtcactttcgtctcacctaggtccaggcatgagcatagccctgcttcatttcaacttagcctatctttatggccttcaggtctcctctcatctggaattgagttctgtagattttgtcctgtatgccyataatccactaaatagtgttcccattgttttcaaatataattcacaggggtaaagatagaaaatgtattttttagggctttttctaacaattatattttccatggaatgctgaagtcccacaaggaattctgaggcccaggtaaggaagaagaattagggaagacacaccagtgggaggttgcctagggcacaccaaaccattgcaaaagtatagtaaatccaggccaatccacaggtgagattgagactacagaatacattgttctttggttagaattggcttaacaacaagtcaatgacctaagctagggtaggcataagctggcg

SEQ ID NO: 28019 - DNA, 651 bp, Homo sapiens
tctctgtttctggaataacttatgcatcttttgccttagttatcagtggatggtgtttatatgacctgatcacaaagtctaggaacgcatacagcttgaactttaaaaagataaatttgtccccacggcatatactatagaccttagtcagctgatcagttctacaaagcatacctttgtaaatggtacataagatactattaggttggtgcaaatgtaattggagtttttgccatgaaaagtgcctcttgtggtatcagatgggacagcttgattgtggccaggagatccrccttagatgtctcatgcacgtggcaagttagtgctggctgtcacctgggtgctttgttggggctgtcaccctgtgtctagatttccccccaaatagcctctcaatatggcaatgtgggcttctctcagcacggtggctgggttctgagagagagagactgttccaagagccagcaatccataaaaacatgacacaatgtgcaaacacttatcaagctccagcttactttatattagtgctaaagtttgggtgtttgtccctccaaacctcatgttgacatttgatctcagtgttggaggtaggagcctcatgggaggtgattgactcacggagacagatccttcatgaatggtttcgtg

SEQ ID NO: 28020 - DNA, 651 bp, Homo sapiens
tctctgtttctggaataacttatgcatcttttgccttagttatcagtggatggtgtttatatgacctgatcacaaagtctaggaacgcatacagcttgaactttaaaaagataaatttgtccccacggcatatactatagaccttagtcagctgatcagttctacaaagcatacctttgtaaatggtacataagatactattaggttggtgcaaatgtaattggagtttttgccatgaaaagtgcctcttgtggtatcagatgggacagcttgattgtggccaggagatccaccttagatgtctcatgcacgtggcaagttagtgctggctgtcacctgggtgctttgttggggctgtcaccctgtgtctagatttccccccaaatagcctctcaatatggcaakgtgggcttctctcagcacggtggctgggttctgagagagagagactgttccaagagccagcaatccataaaaacatgacacaatgtgcaaacacttatcaagctccagcttactttatattagtgctaaagtttgggtgtttgtccctccaaacctcatgttgacatttgatctcagtgttggaggtaggagcctcatgggaggtgattgactcacggagacagatccttcatgaatggtttcgtg

SEQ ID NO: 28021 - DNA, 1710 bp, Homo sapiens
aaaaggaggaggtagggggaagggaacactctcttgtcttctgagaagttcagtctatggggcaaatcacacacaaatacaccaattacaatacaacctacaagcgactgacaaggaaaggctttccctggttgcgatcctccagagtcctggttgaccgctagctttggagcatagaatggataattcaatgtctaagcctaagtatcctgattcacacttcctccttggtcttcaagccacctttagctgctactcctctatctgatgacccaacgccatgctttgtgaaaatagaagctaccagacaacagctcctttaccatccttcctttagtggaagcaatgtcctcatgcctttcagggctaatttttcacctgatctgcaatgatgccctcctttaacacccctctctcccagatcattttcatcagcatacaaacagggccaactacctgatattaaaaacaacataaaatttaaatccctgtcttttcttcacatcaccttcaattacatccaaaaatccctaccatccttctcagcaaaacattactcatctctctgaacaccagagtatttttttctttaaaagggggctaatattaatagttgtcccatgtggttattaaaaagtagacatggatccatgaattcatgtaaaacatatagaaagagcctggcccgagatgagctttcactatatgttagtgcttattactctccaatgccttgcgtactcatggccccgcctcctcactttattactctctctcccctccaggctgtcctcccttcctaatatgtatctgaaactgcctttgtcaaggtcaccagtaaatgacctgatgctaaatcagataagtgcttcccctcccccsccaactttctgctggacctctcccatcactcagcaatgctgactgcccctcccctttgaaacacctttctctcctgcattctgtgattccattgtctcttgaacttccttctcagttgtctttgctgcctccttttcttccaccagacagccaaataatggagtcttttattcattgtttctgccccttcctccaaaattatcctctgggccatccatatgctggcaacttcccccatctccagacgagatctctcatgaactccagtcctgcgtattcccctgtctgcttggcatctccactctaccatctcaagcactttaatccaatgccaaaaggagaactttgccgcctcctcacacctcaaatgattgtccctcagtcatccgtgtctgaaagatgagcttccaaccactccaactcagaatcagccttgattcctctgcccattaacaccacagtacaagtctcaccagctgccgcttgaaaacttgtctcaaactggtgtgtcctctccatctccatcccacctggaggaccacatgagcctcctaactggtctccctactccacctcacctttcctcaatgtattctccactcaaagctggaggatctttctaaaacaaaatctagatcatctttctcccctcctcaattcaattcaaagactttcaatgtctttacagtaaaaacaatgcctctgtccatggcctataaaacccccatgacctatctaaggcttgcctcccaagcactcctcttgccacccctttccttgctcaggacacccaaaccctctcacctctctccattcctccaacaggct

SEQ ID NO: 28022 - DNA, 1868 bp, Homo sapiens
tgcataaaagcctttgtttcaggtagacctagtcttaaaggtcagaaaaaagacatattccagtgatattgttccagcttcagagcagcactctggcaatgactattatgttaatggtgaaatatattcaataaaacattgatttttgctattcaatggcactttgccacaagggtgatcatagagccagtagatcacaaaaaatttactataattttagggacatttttattccaacattttatgaaaggtgaaccactctattacctaattcagtggcatatataaaaattattaaaacccatctagattattactttattgatatttctcacctgcacattctataatatacaatgtttatcttggaatgacaataccttgctgcacaaaaagaaaattgaaaacgagatcttctctaagagaaaagcaagatcattatgtaaacagcagccgggtctcattcagaatatgtcacataaataccacaccatcaaacaagaaatgtaaattattatacatatgctgtaattgaaaattgtattatacattagtgaagtcacccatttatctaatcacaatcagttcccataaaatctcattttgaaaagttgagtgcaattcaggggaggtggctatgagaatttcaatcatggaaatctaagtttggattgagatctcagcaagktctgcaagtcagttttcattgctcctcagacatgcctttcaaatctttgaacttatctgtatgtgaactgatcagcccagcctctcatctggggagaggagatgagatcagccagcattcgtggccctggttcaaaaacaatgtgcaacacatggtgccatctgaatgttttctgggctttctcacccctttctgactagaacatagtcacttacgttcattcatttgttcacatttttttaattcagcaagtatttacttagcaccttatatgtctaggctttgtgctatgaactgacgacacaaagggagccaaaacacagtttctgccttcaaggtgttgccagtctagtggggataatagaagaacaattgcactattttatatgcaattctaaactgtgatagatgcaaaaaagaaagacagagggtgctatgagagcaaagaacacatctggtgctatgatttaaacgtctcccacagtttacgtgttggcaacttaatccctaatgcatcagtgttgagaggtgagaactttaagaactgcttaggtctcatgacttttaagagggttagggcttgttattgtgagagtgggtttgttataaaaatgagtttgaccctgtcttgctcgcttgcactctcttgcctttctgccttccaccatggaatgatgcagcaggaaggccctcaccaaatgaaagcccctcaaccttggacttcccagcccctagaactgtaagaaataaatatcggttcttcattaattacccagtctcaggtattttgttatggctgcataaaataagttaagttatctagtttgtggggagcattactcaagagtgaatatgggtgggaaagagacaaataccaactaaaggtataaagacttagaggggagaagaagcttggagcatagcaaatgcttagacaaagttgatatggctggatccctgaacaagaggcactggacaaggctggaaagcagatgaggtggggtagttatagtctacaaaagccatataggccatgctaaagattttggattgtattgtaagtataatttttaggttgggggctagtggtagggagagtagagcaacgaaatacctagtctgagttgcactttaaagagatctctcaagctgcagatgaagaacagatggaattggggca

SEQ ID NO: 28023 - DNA, 1868 bp, Homo sapiens
tgcataaaagcctttgtttcaggtagacctagtcttaaaggtcagaaaaaagacatattccagtgatattgttccagcttcagagcagcactctggcaatgactattatgttaatggtgaaatatattcaataaaacattgatttttgctattcaatggcactttgccacaagggtgatcatagagccagtagatcacaaaaaatttactataattttagggacatttttattccaacattttatgaaaggtgaaccactctattacctaattcagtggcatatataaaaattattaaaacccatctagattattactttattgatatttctcacctgcacattctataatatacaatgtttatcttggaatgacaataccttgctgcacaaaaagaaaattgaaaacgagatcttctctaagagaaaagcaagatcattatgtaaacagcagccgggtctcattcagaatatgtcacataaataccacaccatcaaacaagaaatgtaaattattatacatatgctgtaattgaaaattgtattatacattagtgaagtcacccatttatctaatcacaatcagttcccataaaatctcattttgaaaagttgagtgcaattcaggggaggtggctatgagaatttcaatcatggaaatctaagtttggattgagatctcagcaaggtctgcaagtcagttttcattgctcctcagacatgcctttcaaatctttgaacttatctgtatgtgaactgatcagcccagcctctcatctggggagaggagatgagatcagccagcattcgtggccctggttcaaaaacaatgtgcaacacatggtgccatctgaatgttttctgggctttctcacccctttctgactagaacatagtcacttacgttcattcatttgttcacatttttttaattcagcaagtatttacttagcaccttatatgtctaggctttgtgctatgaactgacgacacaaagggagccaaaacacagtttctgycttcaaggtgttgccagtctagtggggataatagaagaacaattgcactattttatatgcaattctaaactgtgatagatgcaaaaaagaaagacagagggtgctatgagagcaaagaacacatctggtgctatgatttaaacgtctcccacagtttacgtgttggcaacttaatccctaatgcatcagtgttgagaggtgagaactttaagaactgcttaggtctcatgacttttaagagggttagggcttgttattgtgagagtgggtttgttataaaaatgagtttgaccctgtcttgctcgcttgcactctcttgcctttctgccttccaccatggaatgatgcagcaggaaggccctcaccaaatgaaagcccctcaaccttggacttcccagcccctagaactgtaagaaataaatatcggttcttcattaattacccagtctcaggtattttgttatggctgcataaaataagttaagttatctagtttgtggggagcattactcaagagtgaatatgggtgggaaagagacaaataccaactaaaggtataaagacttagaggggagaagaagcttggagcatagcaaatgcttagacaaagttgatatggctggatccctgaacaagaggcactggacaaggctggaaagcagatgaggtggggtagttatagtctacaaaagccatataggccatgctaaagattttggattgtattgtaagtataatttttaggttgggggctagtggtagggagagtagagcaacgaaatacctagtctgagttgcactttaaagagatctctcaagctgcagatgaagaacagatggaattggggca

SEQ ID NO: 28024 - DNA, 585 bp, Homo sapiens
gcacaaagagaatataactagggaaaaaaggaatcaaacctcagagatttttggaataatatcgagtggctatatatggaagggagaacagaaagatgaaattaaggagacagtggccaaatttttccaaatttgacgaaaactataaaccaacaacgaagaagcttaactccaagcaggataaccacagtacatcaaaatctaattgctgaaaaatagtgataaagagaaaatttaaaagcagaggtaagagacactttatacccacaaaaacaaagataatgatttcsaaagactacttgttaacagctatgcagctagaagacaatgaaataaaatcttaaaaatactgaagaccacctcacacccataaggatggctactagcagagaaaaaaaaattaataagtgttggtgagaatatagacatagtggaattcttttacagtattggtgagaatataaaactggcacaactaaggaaaacagtatgatggttcctcaaaaaattaaaaatagaattaccaaccaggcatgtcgggtcacacttgtaatcccagcactttgggaggctgaggcgggaggg

SEQ ID NO: 28025 - DNA, 585 bp, Homo sapiens
gcacaaagagaatataactagggaaaaaaggaatcaaacctcagagatttttggaataatatcgagtggctatatatggaagggagaacagaaagatgaaattaaggagacagtggccaaatttttccaaatttgacgaaaactataaaccaacaacgaagaagcttaactccaagcaggataaccacagtacatcaaaatctaattgctgaaaaatagtgataaagagaaaatttaaaagcagaggtaagagacactttatacccacaaaaacaaagataatgatttccaaagactacttgttaacagctatgcagctagaagacaatgaaataaaatcttaaaaatactgaagaccacctcacacccrtaaggatggctactagcagagaaaaaaaaattaataagtgttggtgagaatatagacatagtggaattcttttacagtattggtgagaatataaaactggcacaactaaggaaaacagtatgatggttcctcaaaaaattaaaaatagaattaccaaccaggcatgtcgggtcacacttgtaatcccagcactttgggaggctgaggcgggaggg

SEQ ID NO: 28026 - DNA, 999 bp, Homo sapiens
atccagggcgggtggcgagtctcatagttgtgggttccaagcagatgccaaccctaagcatgtggtgattgtgcatcttcatgattatatttagcttgtattgcatcayacacccaaccaaacctattaaaacacagtgtctgcatctaaagaactaacaatgtgaaaagacagggagaaaatgatatgtaccacgaggaagggagtgagtctttcctttccatgctgtttccaggtttgcactgagaactgatatcagatacagaatcaatacttaatgcgttttgtttttattacccagtagcttcagtggaaagacatggcctgataatgtggacctctgtccactgattgcttgggtacatcaacacttgaatggccagcaggcttgatcaggcgggaccccagcctcattcacaaagtttagaactctggatctggatatgcatcagaaggacccagagagcttgttaaagcatgaattgctgagcctcatccaccaagtttctaattctttgcctttctaacaagatcccacgttatgctgatgctgttcattcagagaccatgctttcagaacccttggtatccaacaaggtagttctgtggatgctagaatgggcccatatccaagaaatatgactgttgagtgataaaaagcaagagtgggtggggcgggggtgggggatagtcggggaagagtttcctactatttgtatagaaaatgggttggcatagacattgtagcttgtacatgcattgactatttctggatggttacaaagaaaatgctaatatagttctctctcagtatatgtaagggattgtttcgaggaccccacatgtatactcaaatccacacactcttcaagtcccacaattggacctgcagaaccctactataccaaaagccagccttgtacacactcagatttctaatcccacaaatgctgtgtttttgatgcgcttagtttgggtgaaaaaaatccacatataagt

SEQ ID NO: 28027 - DNA, 999 bp, Homo sapiens
atccagggcgggtggcgagtctcatagttgtgggttccaagcagatgccaaccctaagcatgtggtgattgtgcatcttcatgattatatttagcttgtattgcatcacacacccaaccaaacctattaaaacacagtgtctgcatctaaagaactaacaatgtgaaaagacagggagaaaatgatatgtaccacgaggaagggagtgagtctttcctttccatgctgtttccaggtttgcactgagaactgatatcagatacagaatcaatacttaatgcgttttgtttttattacccagtagcttcagtggaaagacatggcctgataatgtggacctctgtccactgattgcttgggtacatcaacacttgaatggccagcaggcttgatcaggcgggaccccagcctcattcacaaagtttagaactctggatctggatatgcatcagaaggacccagagagcttgttaaagcatgaattgctgagcctcatccaccaagtttctaattctttgcctttctaacaagatcccacrttatgctgatgctgttcattcagagaccatgctttcagaacccttggtatccaacaaggtagttctgtggatgctagaatgggcccatatccaagaaatatgactgttgagtgataaaaagcaagagtgggtggggcgggggtgggggatagtcggggaagagtttcctactatttgtatagaaaatgggttggcatagacattgtagcttgtacatgcattgactatttctggatggttacaaagaaaatgctaatatagttctctctcagtatatgtaagggattgtttcgaggaccccacatgtatactcaaatccacacactcttcaagtcccacaattggacctgcagaaccctactataccaaaagccagccttgtacacactcagatttctaatcccacaaatgctgtgtttttgatgcgcttagtttgggtgaaaaaaatccacatataagt

SEQ ID NO: 28028 - DNA, 1161 bp, Homo sapiens
agcactgcatgtgagagaggctagtcgygtggtgctgatacccgagaaggagctctgttttttaattctattgacaagagacacaactcactcatgagaggagctgtttttttttctctgaccaccaagcaggcatgagggtgacaagaagagcagtgcctgagatcttgacttagcaagaggtgaagggaataaaattgcagaatttaaaaacggggccaatggctagaaggcaagccagaaaatgactgctacataccagtagtagctcaagacagaaatgtgggtgttatcctagatttatctcattctaatgatccctctgcaccagccaattcatcactaaatcttctttttctgcctcctaactatacccttaatccgtcggcttctgttgacaacaattggccacctccctagatcaaacgcttaccacatctcccctacactttcgtaattgcctctttactattttgcctgatttcatttttgttttcctccaacatattctccttgtagaagccacagtggcatcttataaatagaaatttgatcatgtcactccttgccttaaaactcctccatggcttcctgttgcacgtcaaacaaaatcccagctttgtataatatcatgatccagctagccaaaataatgggccccttcctacctctctacctgggtctcggtaccaaataccccactccccaccataatcttcaccctctaattccagccacattggtcacccttcacttcctcaaagattccaagctctttcctcccccagagtatttgcaatgctctgtcccttcttcctggaacatccttcctcacttctcccagcctcactcttggtgtccttctacggcttcctccttctgatcttactggtcacaacctagatactacctcgtaaatgagcctttctctgaccacccatcccaaagaacatgtgtttcctcctccaaaacccaacatcttgcaacaccacctccccaaaagagaaagcttagtaccttcttctagggtttcctccttattcccttgcttcaaagagaccaaaaacagaaatctcagtttttaccctagccatctcaagcctgtggatgctgcaacagtagcaatgggagattaaatactcagaaatctgctcctgctgg

SEQ ID NO: 28029 - DNA, 1161 bp, Homo sapiens
agcactgcatgtgagagaggctagtcgcgtggtgctgatacccgagaaggagctctgttttttaattctattgacaagagacacaactcactcatgagaggagctgtttttttttctctgaccaccaagcaggcatgagggtgacaagaagagcagtgcctgagatcttgacttagcaagaggtgaagggaataaaattgcagaatttaaaaacggggccaatggctagaaggcaagccagaaaatgactgctacataccagtagtagctcaagacagaaatgtgggtgttatcctagatttatctcattctaatgatccctctgcaccagccaattcatcactaaatcttctttttctgcctcctaactatacccttaatccgtcggcttctgttgacaacaattggccacctccctagatcaaacgcttaccacatctcccctacactttcgtaattgcctctttactaytttgcctgatttcatttttgttttcctccaacatattctccttgtagaagccacagtggcatcttataaatagaaatttgatcatgtcactccttgccttaaaactcctccatggcttcctgttgcacgtcaaacaaaatcccagctttgtataatatcatgatccagctagccaaaataatgggccccttcctacctctctacctgggtctcggtaccaaataccccactccccaccataatcttcaccctctaattccagccacattggtcacccttcacttcctcaaagattccaagctctttcctcccccagagtatttgcaatgctctgtcccttcttcctggaacatccttcctcacttctcccagcctcactcttggtgtccttctacggcttcctccttctgatcttactggtcacaacctagatactacctcgtaaatgagcctttctctgaccacccatcccaaagaacatgtgtttcctcctccaaaacccaacatcttgcaacaccacctccccaaaagagaaagcttagtaccttcttctagggtttcctccttattcccttgcttcaaagagaccaaaaacagaaatctcagtttttaccctagccatctcaagcctgtggatgctgcaacagtagcaatgggagattaaatactcagaaatctgctcctgctgg

SEQ ID NO: 28030 - DNA, 313 bp, Homo sapiens
gcaatgcacaccaagcatttttattactcctgtaactatcctactcccacactattattacattattgcctaatgtgtatgttggtagctgtttaatgtactttttgagagacaggaagcttcttagtttattttaattctcagctttctatatgcttccaaactttggagataaagcattggtaaatatgatgatgaagattcaactgtaaaccaaagtttaagcttgggaggcgtgggtggaaattaagaggtaaataagtggctcayccctgtaatcccagcactttgggaagccgaggcagggggatca

SEQ ID NO: 28031 - DNA, 313 bp, Homo sapiens
gcaatgcacaccaagcatttttattactcctgtaactatcctactcccacactattattacattattgcctaatgtgtatgttggtagctgtttaatgtactttttgagagacaggaagcttcttagtttattttaattctcagctttctatatgcttccaaactttggagataaagcattggtaaatatgatgatgaagattcaactgtaaaccaaagtttaagcttgggaggcgtgggtggaaattaagaggtaaataagtggctcatccctgtaatcccagcactttgggawgccgaggcagggggatca

SEQ ID NO: 28032 - DNA, 607 bp, Homo sapiens
ctttggcaccacttcaggggtctccatcgtccacaggtcagaaaagcaacccagaaaagtccaggacgagtcacctcaaacaagaggcagacgtgtgtgtgtctgtctctgactcattttgaagaacctcctccaaactcaagacttcaactgtcatttctgagttaatgtctccaaattgcacattcgtaacctcaaccgtcagacgtccccaagacaagctcatcttccccacgacaagctccctcagtggtcacgkgggctgagcccagcgcccaacgtcacatggggttctctcatggctgtgtcttaactttacatcccattgtcacggaagctctgtgttgtcctacaaagctgaaatctgcctgtgctgcttcttggttccacagcattcacccagctctcagaatgctcactcagtaaaccccgatggagaccctaccatgtgctgggcgtggagcaccccagttaatgagaagacctgcctgcccgaattgctgacgacctcactgcaaagagggacactgaacaattcctgctttacttttttttttttttttttttcagacgatgccttacttctgttgcccaggctggagcgcag

SEQ ID NO: 28033 - DNA, 607 bp, Homo sapiens
ctttggcaccacttcaggggtctccatcgtccacaggtcagaaaagcaacccagaaaagtccaggacgagtcacctcaaacaagaggcagacgtgtgtgtgtctgtctctgactcattttgaagaacctcctccaaactcaagacttcaactgtcatttctgagttaatgtctccaaattgcacattcgtaacctcaaccgtcagacgtccccaagacaagctcatcttccccacgacaagctccctcagtggtcacgggggctgagcccagcgcccaacgtcacatggggttctctcatggctgtgtcttaactttacatcccattgtcacggaagctctgtgttgtcctacaaagctgaaatctgcctgtgctgcttcttggttccayagcattcacccagctctcagaatgctcactcagtaaaccccgatggagaccctaccatgtgctgggcgtggagcaccccagttaatgagaagacctgcctgcccgaattgctgacgacctcactgcaaagagggacactgaacaattcctgctttacttttttttttttttttttttcagacgatgccttacttctgttgcccaggctggagcgcag

SEQ ID NO: 28034 - DNA, 607 bp, Homo sapiens
ctttggcaccacttcaggggtctccatcgtccacaggtcagaaaagcaacccagaaaagtccaggacgagtcacctcaaacaagaggcagacgtgtgtgtgtctgtctctgactcattttgaagaacctcctccaaactcaagacttcaactgtcatttctgagttaatgtctccaaattgcacattcgtaacctcaaccgtcagacgtccccaagacaagctcatcttccccacgacaagctccctcagtggtcacgggggctgagcccagcgcccaacgtcacatggggttctctcatggctgtgtcttaactttacatcccattgtcacggaagctctgtgttgtcctacaaagctgaaatctgcctgtgctgcttcttggttccacagcattcacccagctctcagaatgctcactcagtaaaccccgatggagaccctaccatgtgctgggcgtggagcaccccagttaatgagaagacctgcctgcccgarttgctgacgacctcactgcaaagagggacactgaacaattcctgctttacttttttttttttttttttttcagacgatgccttacttctgttgcccaggctggagcgcag

SEQ ID NO: 28035 - DNA, 1292 bp, Homo sapiens
tagaattcattttcccctaaatatttaaaaggtatttactgttaatgacctagttattttctattcaaaatatttcttaacatctccaggaagatctactttaaaacatgacttacttcttcccacatacctttatattttgagcttatatccccgaaaagataaaagttgtttattttcccagaactttaaaaatccatttctttgcttcttggtggacttcggtaatgaagcaactctggatttgttaatgtgttctttctgaattggggtaggtggagagggcccttctcctagcccttcctagctctacatgggggagtgtatagtttggagatgagagagttaattcttactttccaagttgccaaatgcaccctctcagatgctggaagagtcaggacttggtgaaggttgggattacaaatctggrgtgcctgggcagccgtgccctgggaaattttaaaaccaaaataatcaggaaagattgtgggtaggtgctgggtaagatttaaaagatgaggtttcagctccccccacccatctgttcacttgtgtgtacctaagcaagaggttgagaatcgaatgcagagggtcagtttactttttttttttttaagatgaggcagctggaagacatgccttccaaaattggagcagagtctgatgtgtggattgccaaattccatttccgcccatattaaattattttggcttctagaagcccttattttgctgggccggcctttatttgcagttgtttaggtggtgtgaatcatttgtatactttgagttccctgctttctgtacgcaaatgtttttatctgtgcagctagttgagtaattagagacatggacatggccctgtctgtacagacagaacaaataccacttggggaagatctgggcctttccttttcaaatcatcaattgccaaatcttcccagcctgttgggcaattcagataaaggtgtcaagtgagctgggcagtgaagaatttatatatgcagctgattctgctcatcctacaataaagcatcttcccatggggccaaaaagtgggggttagggaggcatataaaaatgatcctgtgttcttagtcactgactacccagctctctctggatttctgagaacctgccaggagaaactgttgactggatggaagtttcaagaaatgcagaacagaaatcaggacaagccctccttgagcaacttttatttctgtttggaggaaaggaacactttgttagaataacaaattgtggctgcttttcaagaccagaaaacc

SEQ ID NO: 28036 - DNA, 506 bp, Homo sapiens
ggggtgtctaagtgagacatctgtggctggcagggaactgctccctgctgtgcattctactttctttctctctccctctcttcttcctgatttctcctcccaacctcagtatcttttctycttttctgctgtctgggcatgtatgggtattgctctctccactggcactgagcaagattaaaaggctgggttgtgatcacactcactctcattttttcagtcattgttccttacacttaccccaatcatggaatcattatgcttgaaagggaaggtcagacattcgtctaggacttgtttccagagagaactgaaactcaaccatctcagacaaccagtaatcttattctcaattctctctgacaagaacaatctcacagtttgtctgataaacttttaatggattactcaggtgacgtctaaatccctttaaactctgacactcatcctgtgtttaaaagttcttctatttagaaactcatttcctaagtgtaatcttaattaaa

SEQ ID NO: 28037 - DNA, 506 bp, Homo sapiens
ggggtgtctaagtgagacatctgtggctggcagggaactgctccctgctgtgcattctactttctttctctctccctctcttcttcctgatttctcctcccaacctcagtatcttttctcyttttctgctgtctgggcatgtatgggtattgctctctccactggcactgagcaagattaaaaggctgggttgtgatcacactcactctcattttttcagtcattgttccttacacttaccccaatcatggaatcattatgcttgaaagggaaggtcagacattcgtctaggacttgtttccagagagaactgaaactcaaccatctcagacaaccagtaatcttattctcaattctctctgacaagaacaatctcacagtttgtctgataaacttttaatggattactcaggtgacgtctaaatccctttaaactctgacactcatcctgtgtttaaaagttcttctatttagaaactcatttcctaagtgtaatcttaattaaa

SEQ ID NO: 28038 - DNA, 503 bp, Homo sapiens
gagggttctataacacaatagttacggtcaccctatgtgcattwaaaaattcctagttggtctcaagcccttaatgcacaccgaagccctttaagaggcttctcaaactacttgttcatggaaagattatgagacaaagccaacctgtgtgggtttggtccttctgtttcagaacctgactaccaaagagcctgggagaagtacataaacttattgaacatgtaactcataaactaaaagattcaaactctgtacacagaattctgtatgcggtcatgaagaaatcccttctcatttatgatcatacatttgccttagggagtccgagtttgccctcttcactgccttgggtgccccactatcttcctgaggtaggcacagtcctcctgcaagtttctccctgagagaagagcacctccaacctccaacagaattgatgaggactgaaatgctgttgcccttgtcttagaaaatgcctccttcatagctttcctggcatagct

SEQ ID NO: 28039 - DNA, 919 bp, Homo sapiens
gatccatgctcttcamctctgcctgatacatttctctttaagtcatttcatgaggcaagtattttatacctgttttgacagacaaagcagctgatggtctgaggggttacataactcactcaaaggcacgtggagggcacatgccgcagttatgatgtaaacccaagtgtgtcttattccaagagattcaccccttccttctgctgcctacccaagaagaatgtatcataacctcaaactatgacggctatttaggaacaagagataagcaactgggaaatgagaaatcatgtaacaggacacatggtctaataactaagggaattaatggcaaataggtattgcagtgcctactagctgatcgacaaactattttatttcctcctcagcatacagactgcatttcccagcacccttcatagtcaggtgtgatcaagtgactgagttttggccagtggaatgtaggcagacaaatcttgcagtacaattctccctctttctttcctctattccctggatgaatggggagtctccagaaatttagatgagggaggaatctcaatttccaggagtgaaggagcccataaagccagatagtataaacatcacctttaatgcttcttggaaacacatttaatatttctctatcccactcctcaaggaagcctgggttcccgttgaccacatggaaggctattcaaccacaaacaggctcaaaggaccatggcaataagaagtaaacttgtactgttttaggtcacagagattttatgtttatcttttatagcaactactactacattaactaatatagaagttgaacgccatcgaataaaaaacttaaaatatgttattgatttactgttgggttgtaggtagaagagaaattaataacttgagctggaaagctggagacatg

SEQ ID NO: 28040 - DNA, 543 bp, Homo sapiens
aatgatccaaaaatcacagggccaaaattcaaacacaagcacctgcattcacagcttgtgctaaaatacgatgcttggatcacttgcaaaactttatgctacaagtatgagaaactctgacacaaaatgcctccaacattaaggtcattaacagtgctgtttgtttagttaattcttgcactgctataaagacctgagactgtgtaatttttaaagaaaagaggttgaattagctcacagttctgcaggctgtacagatagcatgggtggggaggcctcaggagactttcaatcatggtgaaaggtaatggggaagcaggtacattatcaaatggcagcagaggagagagagagaagtaggaggtgctatacacttttaaacaaccaaatctcaggagaacttactatcacaagaacagcaagagggaagtccacccccatgatccagtaacctcccatgaagaccctcctccaacattggagattacagttcaatatgagatttgggtggggacayaaatcgaaaccatatcaagggcacat

SEQ ID NO: 28041 - DNA, 1192 bp, Homo sapiens
gatccacctccctgcgcctcccaaagtgctgggattacaggcatgagccaacgcacccggcctatttttgcataaaaagttaatgtttaagccttttatttttttgaaactagaaaacatattgctttagattatttcagaatgataattagattgtttagagaacatatgcccatttggggatatctatcagcagctcagtatgttcctaaaatactattttagaatataatttttttttaatttgggaaataattaatcacaagattgttcatcaaaacattggctatattactgaaaacagaggcaaactaaatgcagctattttttaaataaatctggcagatccatacatatactacaatggagtttttaaaattatttttgtagaataatattaaataatataaaacagtacttatgatagagcattacattaaaaakttgtttccagattgtttaaaaatgtcatattttaagataataatatgataagggttgagacacgtacaccaaaatcctagagtttaagctaggatggtgagattcatggtaaattgtttttccatattatgtatattttctaaattttctgctgtgaatatatattttataatagttaaaaaggagtcttatgagaatcgtacctttataaagtgaaaaaatgtatttgcccaatttcctgctccaccaactgtgaattaggtctgtattaactgaaaatgacgcttttctggcagctcaagtgaaagaatgaagaagataaaccaacaatttatccatattatgcatgacaccactatttcaccacttattgcttttgtcatcatcatgattatcactgccattgttaacatattcaacatgcttacttcagaaactgtattaagcattagtccactttattctaacagcagttctgtagacacatagcctttcataatctatagaatttttttttaattggcaaggccaaaatcaatggccaagaagattcatataagcagcaattcagaaagcatgatataatcctggaatcatcttaacgtaaaataggaaagggagaatgtatgcttctcagcaatatacgtagcgtagttcacacgttgtagattaaaaaaaaatactcgatttagcctagcattcaaaatgttggaatggaatggaataaaatgaacggaatggaatgata

SEQ ID NO: 28042 - DNA, 951 bp, Homo sapiens
cacaaaacaccccggyagctcagcgcaccgcctcccagtctctctcccggcacccacaccccttgccacataactttgcagggacttctcaaggtgagtggagagcacttccctgcctctgctacactgagttcaggcacgtaacttgctttgggcgacagaatgaggtggaagtgaggtgtgctgctttggaggctagacctcagctattgctatgagaagaacatgcccaggctagtccacaggtcttagggggaagatgggagggacatggagcaaggctgagtcaagttaatcaagcccagcctagatcagctaactgctggccaagctgcagcccatgagagcaaatcactgttgttttcagcccctgggtttcccggtgtcttgttacacagcatgactgtgatcatagttacctggacagcaggagatggagggggtcctaaaagtgaacgctctgggataaatatgtgtgtcatcctcacagcatgcatacgttcattttgcaaatgtctcctggcacctaccgcagcaaggccctgtgccagggacactgcggtgaccgaggcaggtgtggacccagacccgagggagttcacagcccaacaggggacagtgcacacatgctccccccaggctgtggcacatgtgatgaccaggaggatggaagtcctaagttagacaggtctggggagaggtcagaggagggctcccctaaagaagtgacatttcagctgagactcaaagagcaagaatgagctggctaggcaaagcccagggaagggaggaagacagtttcaggcactggggtgggagggacaagtgcacccttgggggaactgagagacatctgaggtcagctggaagtcagggagcaagggacagaactttaggaagggtgatgagtgggccaggttgtgtggacctcatgggccaggctggacaggt

SEQ ID NO: 28043 - DNA, 951 bp, Homo sapiens
cacaaaacaccccggcagctcagcgcaccgcctcccagtctctctcccggcacccacaccccttgccacataactttgcagggacttctcaaggtgagtggagagcacttccctgcctctgctacactgagttcaggcacgtaacttgctttgggcgacagaatgaggtggaagtgaggtgtgctgctttggaggctagacctcagctattgctatgagaagaacatgcccaggctagtccacaggtcttagggggaagatgggagggacatggagcaaggctgagtcaagttaatcaagcccagcctagatcagctaactgctggccaagctgcagcccatgagagcaaatcactgttgttttcagcccctgggtttcccggtgtcttgttacacagcatgactgtgatcatagttacctggacagcaggagatggagggggtcctaaaagtgaacgctctgggataaatatgtgtgtcatcctcacagcatgcataygttcattttgcaaatgtctcctggcacctaccgcagcaaggccctgtgccagggacactgcggtgaccgaggcaggtgtggacccagacccgagggagttcacagcccaacaggggacagtgcacacatgctccccccaggctgtggcacatgtgatgaccaggaggatggaagtcctaagttagacaggtctggggagaggtcagaggagggctcccctaaagaagtgacatttcagctgagactcaaagagcaagaatgagctggctaggcaaagcccagggaagggaggaagacagtttcaggcactggggtgggagggacaagtgcacccttgggggaactgagagacatctgaggtcagctggaagtcagggagcaagggacagaactttaggaagggtgatgagtgggccaggttgtgtggacctcatgggccaggctggacaggt

SEQ ID NO: 28044 - DNA, 951 bp, Homo sapiens
cacaaaacaccccggcagctcagcgcaccgcctcccagtctctctcccggcacccacaccccttgccacataactttgcagggacttctcaaggtgagtggagagcacttccctgcctctgctacactgagttcaggcacgtaacttgctttgggcgacagaatgaggtggaagtgaggtgtgctgctttggaggctagacctcagctattgctatgagaagaacatgcccaggctagtccacaggtcttagggggaagatgggagggacatggagcaaggctgagtcaagttaatcaagcccagcctagatcagctaactgctggccaagctgcagcccatgagagcaaatcactgttgttttcagcccctgggtttcccggtgtcttgttacacagcatgactgtgatcatagttacctggacagcaggagatggagggggtcctaaaagtgaacgctctgggataaatatgtgtgtcatcctcacagcatgcatacgttcattttgcaaatgtctcctggcacctaccgcagcaaggccctgtgccagggacactgcggtgaccgaggcaggtgtggacccagacccgagggagttcacrgcccaacaggggacagtgcacacatgctccccccaggctgtggcacatgtgatgaccaggaggatggaagtcctaagttagacaggtctggggagaggtcagaggagggctcccctaaagaagtgacatttcagctgagactcaaagagcaagaatgagctggctaggcaaagcccagggaagggaggaagacagtttcaggcactggggtgggagggacaagtgcacccttgggggaactgagagacatctgaggtcagctggaagtcagggagcaagggacagaactttaggaagggtgatgagtgggccaggttgtgtggacctcatgggccaggctggacaggt

SEQ ID NO: 28045 - DNA, 951 bp, Homo sapiens
cacaaaacaccccggcagctcagcgcaccgcctcccagtctctctcccggcacccacaccccttgccacataactttgcagggacttctcaaggtgagtggagagcacttccctgcctctgctacactgagttcaggcacgtaacttgctttgggcgacagaatgaggtggaagtgaggtgtgctgctttggaggctagacctcagctattgctatgagaagaacatgcccaggctagtccacaggtcttagggggaagatgggagggacatggagcaaggctgagtcaagttaatcaagcccagcctagatcagctaactgctggccaagctgcagcccatgagagcaaatcactgttgttttcagcccctgggtttcccggtgtcttgttacacagcatgactgtgatcatagttacctggacagcaggagatggagggggtcctaaaagtgaacgctctgggataaatatgtgtgtcatcctcacagcatgcatacgttcattttgcaaatgtctcctggcacctaccgcagcaaggccctgtgccagggacactgcggtgaccgaggcaggtgtggacccagacccgagggagttcacagcccaacaggggacaktgcacacatgctccccccaggctgtggcacatgtgatgaccaggaggatggaagtcctaagttagacaggtctggggagaggtcagaggagggctcccctaaagaagtgacatttcagctgagactcaaagagcaagaatgagctggctaggcaaagcccagggaagggaggaagacagtttcaggcactggggtgggagggacaagtgcacccttgggggaactgagagacatctgaggtcagctggaagtcagggagcaagggacagaactttaggaagggtgatgagtgggccaggttgtgtggacctcatgggccaggctggacaggt

SEQ ID NO: 28046 - DNA, 1043 bp, Homo sapiens
tgatctcataatgatgttggtctgttccagctactgctagtggcctctgctgatgaatctccaaacatggcaaattcttccactaacttcaataagtcaatatttatttttaatgagtctataattattctaatacatgaaaatttgttaacatttcagaacattacatarcattaagccattctgagtagactccaactgctgagctgaattttcacgtaagcatcattatcaagagaattttggtgctgtgaagaaaccacacttttatagcttatattcaaatgcttttctgtgtttttgaagacaatttaaaactactgctgcagaatttttcatgcagtcgattgaagataagatcattgtagaagaacaatacgtagaaccattattcttataagtgacattaagatttggattttcttgtgatgttgatttgcttcgaatgcaaaatcttagtgttgtgacatgtcaattaagagtacagtcttgatgatgaagaatttctggtgacatttgcaacaattaacaaattataaaagagaccctgataaacacgttttgtgacatttatttagtttttaaaaccagaatagcagtgtgtactactggatagccttataaaataaaactgcaccacatggtgagattatgattgatgagtattaagctgaagtgcccgcaggagcagaggagcctcagataacaattactcaatgctactcccacgtatgttacagaggcaaaacttaagtcatttaaattcttcggataaaatttttccatgtagacagttgaaggaaaaaaaacacagataatattaatcatttctaaacagttatttttgcacagagaaagtttgtctctgagccccatgctataatggcatgaggaattataggctgaggcttcagattgaacttaattagtgtcttgcacacatatggccctggaagcatctgtgcatctgatttgtgcttcctctggttgtggttgtcactgcaactttgatattgtaccagctaccttagcataggagtcag

SEQ ID NO: 28047 - DNA, 1043 bp, Homo sapiens
tgatctcataatgatgttggtctgttccagctactgctagtggcctctgctgatgaatctccaaacatggcaaattcttccactaacttcaataagtcaatatttatttttaatgagtctataattattctaatacatgaaaatttgttaacatttcagaacattacatagcattaagccattctgagtagactccaactgctgagctgaattttcacgtaagcatmattatcaagagaattttggtgctgtgaagaaaccacacttttatagcttatattcaaatgcttttctgtgtttttgaagacaatttaaaactactgctgcagaatttttcatgcagtcgattgaagataagatcattgtagaagaacaatacgtagaaccattattcttataagtgacattaagatttggattttcttgtgatgttgatttgcttcgaatgcaaaatcttagtgttgtgacatgtcaattaagagtacagtcttgatgatgaagaatttctggtgacatttgcaacaattaacaaattataaaagagaccctgataaacacgttttgtgacatttatttagtttttaaaaccagaatagcagtgtgtactactggatagccttataaaataaaactgcaccacatggtgagattatgattgatgagtattaagctgaagtgcccgcaggagcagaggagcctcagataacaattactcaatgctactcccacgtatgttacagaggcaaaacttaagtcatttaaattcttcggataaaatttttccatgtagacagttgaaggaaaaaaaacacagataatattaatcatttctaaacagttatttttgcacagagaaagtttgtctctgagccccatgctataatggcatgaggaattataggctgaggcttcagattgaacttaattagtgtcttgcacacatatggccctggaagcatctgtgcatctgatttgtgcttcctctggttgtggttgtcactgcaactttgatattgtaccagctaccttagcataggagtcag

SEQ ID NO: 28048 - DNA, 1043 bp, Homo sapiens
tgatctcataatgatgttggtctgttccagctactgctagtggcctctgctgatgaatctccaaacatggcaaattcttccactaacttcaataagtcaatatttatttttaatgagtctataattattctaatacatgaaaatttgttaacatttcagaacattacatagcattaagccattctgagtagactccaactgctgagctgaattttcacgtaagcatcattatcaagagaattttggtgctgtgaagaaaccacacttttatagcttatattcaaatgcttttctgtgtttttgaagacaatttraaactactgctgcagaatttttcatgcagtcgattgaagataagatcattgtagaagaacaatacgtagaaccattattcttataagtgacattaagatttggattttcttgtgatgttgatttgcttcgaatgcaaaatcttagtgttgtgacatgtcaattaagagtacagtcttgatgatgaagaatttctggtgacatttgcaacaattaacaaattataaaagagaccctgataaacacgttttgtgacatttatttagtttttaaaaccagaatagcagtgtgtactactggatagccttataaaataaaactgcaccacatggtgagattatgattgatgagtattaagctgaagtgcccgcaggagcagaggagcctcagataacaattactcaatgctactcccacgtatgttacagaggcaaaacttaagtcatttaaattcttcggataaaatttttccatgtagacagttgaaggaaaaaaaacacagataatattaatcatttctaaacagttatttttgcacagagaaagtttgtctctgagccccatgctataatggcatgaggaattataggctgaggcttcagattgaacttaattagtgtcttgcacacatatggccctggaagcatctgtgcatctgatttgtgcttcctctggttgtggttgtcactgcaactttgatattgtaccagctaccttagcataggagtcag

SEQ ID NO: 28049 - DNA, 1043 bp, Homo sapiens
tgatctcataatgatgttggtctgttccagctactgctagtggcctctgctgatgaatctccaaacatggcaaattcttccactaacttcaataagtcaatatttatttttaatgagtctataattattctaatacatgaaaatttgttaacatttcagaacattacatagcattaagccattctgagtagactccaactgctgagctgaattttcacgtaagcatcattatcaagagaattttggtgctgtgaagaaaccacacttttatagcttatattcaaatgcttttctgtgtttttgaagacaatttaaaactactgctgcagaatttttcatgcagtcgattgaagataagatcattgtagaagaacaataygtagaaccattattcttataagtgacattaagatttggattttcttgtgatgttgatttgcttcgaatgcaaaatcttagtgttgtgacatgtcaattaagagtacagtcttgatgatgaagaatttctggtgacatttgcaacaattaacaaattataaaagagaccctgataaacacgttttgtgacatttatttagtttttaaaaccagaatagcagtgtgtactactggatagccttataaaataaaactgcaccacatggtgagattatgattgatgagtattaagctgaagtgcccgcaggagcagaggagcctcagataacaattactcaatgctactcccacgtatgttacagaggcaaaacttaagtcatttaaattcttcggataaaatttttccatgtagacagttgaaggaaaaaaaacacagataatattaatcatttctaaacagttatttttgcacagagaaagtttgtctctgagccccatgctataatggcatgaggaattataggctgaggcttcagattgaacttaattagtgtcttgcacacatatggccctggaagcatctgtgcatctgatttgtgcttcctctggttgtggttgtcactgcaactttgatattgtaccagctaccttagcataggagtcag

SEQ ID NO: 28050 - DNA, 1043 bp, Homo sapiens
tgatctcataatgatgttggtctgttccagctactgctagtggcctctgctgatgaatctccaaacatggcaaattcttccactaacttcaataagtcaatatttatttttaatgagtctataattattctaatacatgaaaatttgttaacatttcagaacattacatagcattaagccattctgagtagactccaactgctgagctgaattttcacgtaagcatcattatcaagagaattttggtgctgtgaagaaaccacacttttatagcttatattcaaatgcttttctgtgtttttgaagacaatttaaaactactgctgcagaatttttcatgcagtcgattgaagataagatcattgtagaagaacaatacgtagaaccattattcttataagtgacattaagatttggattttcttgtgatgttratttgcttcgaatgcaaaatcttagtgttgtgacatgtcaattaagagtacagtcttgatgatgaagaatttctggtgacatttgcaacaattaacaaattataaaagagaccctgataaacacgttttgtgacatttatttagtttttaaaaccagaatagcagtgtgtactactggatagccttataaaataaaactgcaccacatggtgagattatgattgatgagtattaagctgaagtgcccgcaggagcagaggagcctcagataacaattactcaatgctactcccacgtatgttacagaggcaaaacttaagtcatttaaattcttcggataaaatttttccatgtagacagttgaaggaaaaaaaacacagataatattaatcatttctaaacagttatttttgcacagagaaagtttgtctctgagccccatgctataatggcatgaggaattataggctgaggcttcagattgaacttaattagtgtcttgcacacatatggccctggaagcatctgtgcatctgatttgtgcttcctctggttgtggttgtcactgcaactttgatattgtaccagctaccttagcataggagtcag

SEQ ID NO: 28051 - DNA, 1043 bp, Homo sapiens
tgatctcataatgatgttggtctgttccagctactgctagtggcctctgctgatgaatctccaaacatggcaaattcttccactaacttcaataagtcaatatttatttttaatgagtctataattattctaatacatgaaaatttgttaacatttcagaacattacatagcattaagccattctgagtagactccaactgctgagctgaattttcacgtaagcatcattatcaagagaattttggtgctgtgaagaaaccacacttttatagcttatattcaaatgcttttctgtgtttttgaagacaatttaaaactactgctgcagaatttttcatgcagtcgattgaagataagatcattgtagaagaacaatacgtagaaccattattcttataagtgacattaagatttggattttcttgtgatgttgatttgcttcgaatgcaaaatcttagtgttgtgacatgtcaattaagagtacagtcttgatgatgaagaatttctggtgacatttgcaacaattaacaaattataaaagagaccctgataaacacgttttgtgacatttatttagtttttaaaaccagaatagcagtgtgtactactggatagccttataaaataaaactgcaccacatggtgagattatgattgatgagtattaagctgaagtgcccgcaggagcagaggagcctcagataacaattactcaatgctactcccacgtatgttacagaggcaaaacttaagtcatttaaattcttcggataaaatttttccatgtagacagttgaaggaaaaaaaacacagataatattaatcatttctaaacagttatttttgcacagagaaagtttgtctctgagccccatgctataatggcatgaggaattataggctgaggcttcagattgaacttaattagtgtcttgcacacatatggccctggaagcatctgtgcatctgatttgtgcttcctctggttgtggttgtcactgcaactttgatattgtaccagctacctwagcataggagtcag

SEQ ID NO: 28052 - DNA, 601 bp, Homo sapiens
tagttacttggccacgggcaagctgaacttcaaattcctatacaacaaacagaagaataattagctcgtagggttgtagtggtgattaaaggagattatccatgtaaagtgctttaatactgtgcatggcccacagtaagtaaatgtagtactttatggtttataaagcacttctatatacacatacactcatttaacatctccaaaagcctgtgaggtaggttgtgttattcccgttttatcaaggaagcacctgaggtcagacagtctcagctgtttcctattcacacagagaacaacactggtcttctgatctttttatttatttttgagacagaatcttcctctgttgcccaggctggagtgcagtggcacaatcatggctcactgcagcctcgatctcctgggctcaagtgatcctcccacctaagcctcccaagtagctgggactataggtatgarctaccacactcagctgacttttttattttttgtagagatgggggtctcactatgttgtccaagctggtctcaagtcttgggctcagtgatcctcctgcctcagccttccaaagtgctgggattacagggtgagccacca

SEQ ID NO: 28053 - DNA, 584 bp, Homo sapiens
ccattcattcccatctctccacatcaccttccgcttctctgggatttccatcactcccgagagcattccacataaactggacctgtttagttgatcctttccccttggaagcctttactctctttacaaaaaaaaaaaaaaaaaatctgtttaaagagaaaaagtcagcctacttttttccaaactcctttgggactttgtaaaaggtgaaatgggtaagcatgttggtatctggaaagaatttttaaagatccttctctacattccactgttttatcaatagtcaagtattctatttcatgactattgtgtattaggtatatctatacttgattttacaaattcataattgtgaaggtaaaatcaatcaatatcacaacatccaaaagccatcaacactttcgcattagtttctcactcctgagctgctttcaagaaatgatttagataaagaggaccaaatgaaacaggcyggaaattcagaaagaattatattcccatctctgtgactgtgcttccttcatcaaaggatatagtagaatggatatttgttatacgttgaggctgcatagcaactgtgcaca

SEQ ID NO: 28054 - DNA, 420 bp, Homo sapiens
gtaattaaacaagttaaatcctatgtgaaattatagaatatgccatcatcaaatttcttatagtatctaccacaaataattattttaaattttttactgataattgatgcacatcaattccttctgataacacctgggtagaatagcaaattattcaataaagtcatgcctacttcataattttaaaactctgctttgcatttgatggtgcrtgtatgcagattttccagttgagccaaaatgactttaaaaatatatacacacacacatacgtgtgtatatgtgtatatatgcatatatgtgtatatatacatatgtgtgtacatacatatatgtgtatatatgtgtgtgtacatacatatatgtgtatatatatgtgtgtgtacatacatatatgtgtatatatgtgtgtgtatatat

SEQ ID NO: 28055 - DNA, 1491 bp, Homo sapiens
ggagctgtgcaaatgatatttcaagtaatctttatgacatggggaatattttcactatataatgtcatctgaaaaaacatgcataacgccaatctgtttacacaatttcatctcaattattgaaaagaacacatatctataagaaaaaaaaaaaaaggaagaggcagactcccgtggagggcagttgtgccaagcagaggcatggcctgatgggctcattggcaccacagacgttgctctgtggttgggaagaggaggctggggggccaaatctaagatgtgtggctctctgcatatatagctacgtgcgcgcgcacacacacacacacacacacacacacacaaaggattttcaacagagatgcaatctacaaacttcctagtgacaggtatcatgtagtgagtaaacccccaaaaggatcttatgcctatgaggcagaaaattacagatttatcaaactttcccaattatccatatctgtccctgtccctttcctcccctyggcagaggatgtctcatgcttgtcttctcaaaaaatgacagttttggaaaggcccaatggcttcatccgtgagtcgctaaggtgccagaaaccttgcaggatttcccgtggtcttctgctttttcagtctctttgagttcatatttaggggcagaaaagcaggagagcctgaacttgaggccctggagctgctgtcagtaaacctggagagaagggctgtgtgtctacactccgaggtgctagatcattatccccttcagtctgggtgtctgagaagcttggtctatcagtctagcagaacagactgaagattccataggaactcaaggggaactgactcccgccctccctccagcctccaagcatgagagggcatcactaagtcctcctggggctctggctagagttcatctgggaggtcttagaaggcttaatttttccaaattctccttctgcttttacagaataatcccaaagttgattttttattgaagaaaaaagatctatattataagggttcttatgtaattattacaaaggtagcctacatagtgcagaaattggaacttgattagtataaatgcatttttatctgaatttttgcaaagtaagttcaataagtcatttgatttgttaatattcagtgtttataattttgtagagacgtgttttaacttttactctgtatttctgtgctcagagagttgtttgataagcctgtgcaacttgacttcggagttttatttcaagcatatgtagtttgtatcaggaaatcatatttttttagaattatgtattcatcatagaaaaatccttaattagcagtagtgaaggaaagctcttagactgaagactgattagcccagcctccagaggagatgtacgttagtgggacaacgtcctctaataaaggaacattcaagtcagaaatcacagtgaaacaccttaaattgttaaccacgaaggaaacagcgcctccaaattgata

SEQ ID NO: 28056 - DNA, 1491 bp, Homo sapiens
ggagctgtgcaaatgatatttcaagtaatctttatgacatggggaatattttcactatataatgtcatctgaaaaaacatgcataacgccaatctgtttacacaatttcatctcaattattgaaaagaacacatatctataagaaaaaaaaaaaaaggaagaggcagactcccgtggagggcagttgtgccaagcagaggcatggcctgatgggctcattggcaccacagacgttgctctgtggttgggaagaggaggctggggggccaaatctaagatgtgtggctctctgcatatatagctacgtgcgcgcgcacacacacacacacacacacacacacacaaaggattttcaacagagatgcaatctacaaacttcctagtgacaggtatcatgtagtgagtaaacccccaaaaggatcttatgcctatgaggcagaaaattacagatttatcaaactttcccaattatccatatctgtccctgtccctttcctccccttggcagaggatgtctcatgcttgtcttctcaaaaaatgayagttttggaaaggcccaatggcttcatccgtgagtcgctaaggtgccagaaaccttgcaggatttcccgtggtcttctgctttttcagtctctttgagttcatatttaggggcagaaaagcaggagagcctgaacttgaggccctggagctgctgtcagtaaacctggagagaagggctgtgtgtctacactccgaggtgctagatcattatccccttcagtctgggtgtctgagaagcttggtctatcagtctagcagaacagactgaagattccataggaactcaaggggaactgactcccgccctccctccagcctccaagcatgagagggcatcactaagtcctcctggggctctggctagagttcatctgggaggtcttagaaggcttaatttttccaaattctccttctgcttttacagaataatcccaaagttgattttttattgaagaaaaaagatctatattataagggttcttatgtaattattacaaaggtagcctacatagtgcagaaattggaacttgattagtataaatgcatttttatctgaatttttgcaaagtaagttcaataagtcatttgatttgttaatattcagtgtttataattttgtagagacgtgttttaacttttactctgtatttctgtgctcagagagttgtttgataagcctgtgcaacttgacttcggagttttatttcaagcatatgtagtttgtatcaggaaatcatatttttttagaattatgtattcatcatagaaaaatccttaattagcagtagtgaaggaaagctcttagactgaagactgattagcccagcctccagaggagatgtacgttagtgggacaacgtcctctaataaaggaacattcaagtcagaaatcacagtgaaacaccttaaattgttaaccacgaaggaaacagcgcctccaaattgata

SEQ ID NO: 28057 - DNA, 810 bp, Homo sapiens
agctctctttccaacctttgaaatgccttttcatgccatgcatttagagaaagggctctgccatctgcagaggacctgtgcggaaatgtggggaaatgaccgtgtgtttatttatgtcatccattgttagctaagaatatccaggtgttctaataatggaggtaccaagaaaggaaacagtgttggatggtgggaaggacgctgggctcggggcaggaaaacaagtcccacagcccaagctgagtgaccttcagcaagtttttgttctttagcctcagtttcttcctctgcagaaaaaaaaaaaaatgagtctacagtacttgctatgctgacctcaaagggatataacaagaatccaatgaaaggatgtatgtgcatcccaaatttgctcaggcccagcaccagagggacaaatgaatccacattaacagatgtcactggggcctcccacctgctgacacaggcctccagcacttccccatagaagtttcactgaaatatttttcagagtgcctaggtgtgtctcaggaggaccccatgcaaccttctttctcggttcactgcctgagaagactctccctatagccactatgtcccaagcaggggctgaatctcagggctctcaaagctgcaaaagacaagaggtgtcaaaatggtctgtcccctctcggaatgcacccccacctcctgrcagagggacacctggaggctgggtcatgctcgggaatgtccacgctgcaggttagttcaggagaacatccctacgcagagggcagggcccaggctgaggggtttattcaggttgccact

SEQ ID NO: 28058 - DNA, 810 bp, Homo sapiens
agctctctttccaacctttgaaatgccttttcatgccatgcatttagagaaagggctctgccatctgcagaggacctgtgcggaaatgtggggaaatgaccgtgtgtttatttatgtcatccattgttagctaagaatatccaggtgttctaataatggaggtaccaagaaaggaaacagtgttggatggtgggaaggacgctgggctcggggcaggaaaacaagtcccacagcccaagctgagtgaccttcagcaagtttttgttctttagcctcagtttcttcctctgcagaaaaaaaaaaaaatgagtctacagtacttgctatgctgacctcaaagggatataacaagaatccaatgaaaggatgtatgtgcatcccaaatttgctcaggcccagcaccagagggacaaatgaatccacattaacagatgtcactggggcctcccacctgctgacacaggcctccagcacttccccatagaagtttcactgaaatatttttcagagtgcctaggtgtgtctcaggaggaccccatgcaaccttctttctcggttcactgcctgagaagactctccctatagccactatgtcccaagcaggggctgaatctcagggctctcaaagctgcaaaagacaagaggtgtcaaaatggtctgtcccctctcggaatgcacccccacctcctgacagagggacacctggaggctgggwcatgctcgggaatgtccacgctgcaggttagttcaggagaacatccctacgcagagggcagggcccaggctgaggggtttattcaggttgccact

SEQ ID NO: 28059 - DNA, 1001 bp, Homo sapiens
tcctgccttggtattacaggtgtgagccaccacgcctggctgaaatccctttttttttttttactaaattccagatgagtgcatcatagtaacatcgaaatatttgtattttgagagcttaatgattggttgaaatgggtgccctgtttttgctgctttgcactcatttgcattcattcatttgagttcagttttcactcattcgtattcattcatttttgcagtaaggacgtttttccatttgtacattgatttaggaacataggaagctatcgggaaaggttagaaaaactggggtatgctaagtaaaacaacaacaaaactattgattctctgtccagctgtaatccttttcctgttaatgtcaccaacatacatgagcagggttattctctcatttgtgagcccttactgtaacaaaggtctcagtatatgtgattgtgacttcttttccccttrattttctggggcaagtgttgaggtggagattgcggaaataatatattgagtgcagtgaatcagattgaagattagcaaaccttacaaatagtaatgtgtctttttcagtgataccttcaattagtttaggtgcttctgtggttgactttgaaaataacaatcagaataatttcagcatgaagaaatagaaatcattatgatatggtggaaatctttgagattagacagatctggattcaagtactactctattacttttgcctgcgtaaccgtaggcaagccacttaatccttctgaggggattaacaaaaggaactgtcattgttttaagaataagtgacagaatgtgagatgtttaagttattgttgctgcataaccatgccaacatttagtagcataagttaatcaccattttattatttacaggatctctcagtgaggaattcaaacagggtacaggagtgagagctcttttctgttccacagtgtctgcttgctcattggcaatggctgggggttggaacacttggaggtgggggat

SEQ ID NO: 28060 - DNA, 1001 bp, Homo sapiens
tcctgccttggtattacaggtgtgagccaccacgcctggctgaaatccctttttttttttttactaaattccagatgagtgcatcatagtaacatcgaaatatttgtattttgagagcttaatgattggttgaaatgggtgccctgtttttgctgctttgcactcatttgcattcattcatttgagttcagttttcactcattcgtattcattcatttttgcagtaaggacgtttttccatttgtacattgatttaggaacataggaagctatcgggaaaggttagaaaaactggggtatgctaagtaaaacaacaacaaaactattgattctctgtccagctgtaatccttttcctgttaatgtcaccaacatacatgagcagggttattctctcatttgtgagcccttactgtaacaaaggtctcagtatatgtgattgtgacttcttttccccttgattttctggggcaagtgttgaggtggagattgcggaaataatatattgrgtgcagtgaatcagattgaagattagcaaaccttacaaatagtaatgtgtctttttcagtgataccttcaattagtttaggtgcttctgtggttgactttgaaaataacaatcagaataatttcagcatgaagaaatagaaatcattatgatatggtggaaatctttgagattagacagatctggattcaagtactactctattacttttgcctgcgtaaccgtaggcaagccacttaatccttctgaggggattaacaaaaggaactgtcattgttttaagaataagtgacagaatgtgagatgtttaagttattgttgctgcataaccatgccaacatttagtagcataagttaatcaccattttattatttacaggatctctcagtgaggaattcaaacagggtacaggagtgagagctcttttctgttccacagtgtctgcttgctcattggcaatggctgggggttggaacacttggaggtgggggat

SEQ ID NO: 28061 - DNA, 579 bp, Homo sapiens
tctagtctactaaaatgatagtcatgtaagctgcattcccatatcatactaatgtgcctctaaagcaagcaaaaacacttgggattatagttagtgtgtgcaaacttgtcatggctaagtgtataatttgttaggatttctgaagtggtgaaaataccagaagtaccttacagagctttcaatcatttcaagttctctattgatctcaggtcaaggacttcggtgataaaaagtgtcagtcaagtttattcttgcacagaatcctgttgcccattggaaaaaaatatttttcttaagactttacatctgttggcatgtttctcacgttcctcgcaccaaccaaatgtcgtgttcctactttctcttttggttccacatctctagctaaagcttctcagtaatgccctcagaatcaggtgtttacattgcagttctttgtcactctttcctctccatttttccactgttagtcatgggtccatgtgcttcatagtccaccttaaacattttgaatggttacacattcrtactttaagactaagatcagggacttaattatcacaaaatattcataccaag

SEQ ID NO: 28062 - DNA, 568 bp, Homo sapiens
gatatacccccatcattgagggttttttaaatgtggtttattattaatgaaattaaaatgatctattcatagcacctgagatgatttcagatatcatattatgcaagcattaagataatattaagaattagactggtaaatgaaaatcatagaatcagagtacttactcaatgtcaagttttgctaataattgcaatgacacaagcagttatawgacacaagtgaagcagaaagtgttctgggaccccaatgtgacttattgggtcatttcttctcacatgagatgtgttctggtacagatcttgcacagaagaagccacttaggtcatgaattactgagttacatagtttatgtgacattttccttggagccatcccctgtaaacctaaagattccaggtctatttacacaggtgattctagataggcagctatattttactatatgtatttcatagttctctcttgctagccaaggtcacatactttgtttgccaggagagctgccattataatgtttacaaggcaattagacaagataatatgctttctttcttcctttgatgca

SEQ ID NO: 28063 - DNA, 594 bp, Homo sapiens
aaaaaacaaacaccccatgttcttactcataggtgggaactgaacaatgaaaacacatggacacaggaaggggaccatcacacaccggggactgttgtggggttgggggatgggggagggatagcattaggagatatacctaatgctaaatgatgagttactgggtgcagcacaccaacatggcacatgtatacatatgtaacaaacctgcacgttgtgcacatgtaccctaaaacttaaagtataataataataaaagaaaaaaaagtagttgaatgaatatagagtaaacaaaaatgggtgggcctcatgcttctataaaatacaaggctttattaggtaaattaaaagtttcttaagcttccaacattttcttattccacaggaagctgtaaaattttctgcactggatccacactttgtctttatattctcctctcagcacaccatttcccaatatttggyaacccacaggttagcatcgaaaataaacaagtcagggtggctggcaaggtggccaaataggaacagctctggtctgcagctcccagtgagatcaacgcagaaggcagaaggtgggtgatttctgcattt

SEQ ID NO: 28064 - DNA, 594 bp, Homo sapiens
aaaaaacaaacaccccatgttcttactcataggtgggaactgaacaatgaaaacacatggacacaggaaggggaccatcacacaccggggactgttgtggggttgggggatgggggagggatagcattaggagatatacctaatgctaaatgatgagttactgggtgcagcacaccaacatggcacatgtatacatatgtaacaaacctgcacgttgtgcacatgtaccctaaaacttaaagtataataataataaaagaaaaaaaagtagttgaatgaatatagagtaaacaaaaatgggtgggcctcatgcttctataaaatacaaggctttattaggtaaattaaaagtttcttaagcttccaacattttcttattccacaggaagctgtaaaattttctgcactggatccacactttgtctttatattctcctctcagcacaccatttcccaatatttggtaacccacaggttagcatcraaaataaacaagtcagggtggctggcaaggtggccaaataggaacagctctggtctgcagctcccagtgagatcaacgcagaaggcagaaggtgggtgatttctgcattt

SEQ ID NO: 28065 - DNA, 496 bp, Homo sapiens
tctcttagccatagattgaaaaaactgaaatcagatttctgaaaacaacttctgaattttatatttctcatcccaggttaaaaatcgatgkaatttaagtcaattttggaattaggagtacaatattttgattctgtctcagtttacattgggaatttttaataagttatttcacttcttcagactataagataatatgtgattaattattgctctgtctttgtagtatctttcatattttatggctttttgtgacttttaaaactggctaaaagagaaatccaaatggttcccctcatagaatatgtgtgaagtggtacagattgaacatccttaacctgaaaatttgtaatccaaagtgcctcaaaattcaacactttttgaagaatgaaataatgtcacaggtggaaaatttcaccccgatcacatgtgatgagtcacagtcaaaacacaatgaaaactttgttttctgcacaaaattacttaaaatactgta

SEQ ID NO: 28066 - DNA, 541 bp, Homo sapiens
caaatgatctgaagatttgaagacttccgtgttaccatttctgaactccaggggacccaataggactaactacttcaaaaacgccattacaacagcatttcctatattctgatgaatgctctcaagaacatttcatgtctgacaaatatttaagcatttttgggccttatattggccaagttgtacctacccttccaaactcagagccaacatcaaataataaagaacagaaattagtaatatagaaactgagcatcataaaaaatgatcataaaaatcaaaagttattatttttcraaagaataataaaattgaaaaacacatgatgagagaataataaaaagagaaggcacataggatcaacactaaggttttgtggacattaaaaggatcagaagaaagagcatatgctttttataccttatacttttatacatttataattttacacttttatgaatatgaggaatctgtatatccaaaagaaattcttacacatgaaaactgggagaactatacccaaatattcaaagcgacatta

SEQ ID NO: 28067 - DNA, 2004 bp, Homo sapiens
ccccctttctaagaatcttccctcttcctggaagcagcacagtctcaaggctgtctcctacctgtagtaggagaacctctttatagcaatcttattttcgactccccgtaggaaatatttaatctcccaggtctcagatctgttctttgtggtgctcttttactcaggctggagaaatacctctctttcttgggatgagatttggttagtgtcacctgaattctaccactctaggaccttgccgcagtctttgcctcaccttctgctgtgctgtgcattcagaatcaacctcactggcttcagatgtttgttttcccacttaaatgtaaatggaagcttctaatgttttctgactcctagctatgctataggcgtgggccaagagtaattttatttgctctgcttttctgttctgtaagactttcaggaggatgtatggacaaatttgaatctaagtggctgctgttatccttagtaatcctgaaggccaaacctgagtctttgaaatgtattaatgaaggtaataattggtcttaattggataataattaccagtgcaaatatttttattccctcaaaggaatcaccgtatcattcatttaactaactatttactgagcagcaattatgtgcttgtattaggcaaaatctgatctaccacttgctacttgttaagaccctgggagggagctaatgcagacgtaccttatcatccccatttcacacatgagattttccctcaccaattattctgcaggcacattggccttctcccaatttctgaatgatttatgccccaggaccattgcacagccattatttatctgcctggagcactctatcactgactttttttgtaaccttccgactttaatattaccgcttcattattttcttccacactcacctccattatttgttgttactatacattgttcagttcctttgtagctcttgtcacaatttgtattgagatacatagatatttggctgtttgctgatgtattgtctgtctctccattaaactgtaaattctgygaggacagaaatcacacctgtgttcaatcttgtctgggttcagccacgtcaaagtgctaggaacatgtaggactgcaacaaatatttgccaaatgaatgatgcccagagaggataggcagttagcccaaggtcacacagcaggttaacggaggatccagaattagaatcctggtccctccaagctaagtggttcattcattagcgacgttgcctcttcatggaggatgccatcctctctctggggataaaagacagatgttctctctcatttttgcctcatttaaccttctaaaaaatctccgtactcaatgagtatggggaaaacctgattttaaaagttaattaacgtcagaccacagttttctgaagttagccacgaaacccaatctctgtgctcagccggcagcctaagggactgaccagaagggctcaggggacagggcagctgtggtccagtggctgtagatattcagccacttcaaaagcaacaggactgtattgggcatttattagctgccaggtagggcactgggcactggggattgaaaaataaacaagacagacatttccctgcctctggttgctcccagtgcagtcagaattccagagcagcacatcgagcgctgtgaatgggaaggaccaggggcagtggaagcccagaggagacactaggccattctcagggctcaggaaagagggcttccaggaggaagggacttgaaggatgagcaagagttaaccagatgaaggacaaagaagagataagtgcaacaggtaaagcgctaaagaagagcccagacgcaagagggaacagaacacactgagatgattccagaggcgtcaagttggaacccagccaattggcagtgtggtggaatgaccagagaggaggctggggccaggtcagagaaggacctggaggctgtgccaggagtcaggctgtgacctggaggtcaatggggagc

SEQ ID NO: 28068 - DNA, 866 bp, Homo sapiens
ctaatggaagggatatgctggacccaaactcacagagcaaatcagtgggcttgtttggactcaagcccacagccttttgatgaatgctgaactgaagccttaagtaggagatggttattttctgcatttgtttagcaggtttggaaagcaactggatttggtttcaaacctcagcatttacgagctgtttgattttggataagtcactttgcctgagtgtcagaattctcacttgtaaaatgagaataaaaatgagaactctaggtacttacctgatcgttctcaggatccagcttctcccccattaagatgacaggcactccctgactgcaaggaagccagctatgtttgagatcaaatgaaataacatgggtcaaaagtcttggtaaaacagccgggtgtagtggctcacacctgtaatcctagcactttkggaggccaaggtgggtggatcacttgaggtcaggagttcgaaaccagcctggccaacatggtgaaaccctgtctctactaaaaacacaaaaaagttagccaggcatggtggccgggcatcccagctactcgggaggctgaggcaggagaatcgcttgagcctgggaggcggaggttgcagtgagcagagatcacaccactgcactccagcctgggcaacagagtgagactctgtctaaaaataattaaataaaataaaagtattggcaaaatgctgggaatggttttgtggttttatgtgatgaaccataggaattgctgtctgacacttagccataagaaaccataatttttgtataattgcctatgtccagttgaatctgggagatcccttagtcttggtcattttgttggtaagatcactctatcctccc

SEQ ID NO: 28069 - DNA, 2114 bp, Homo sapiens
ccaatgtcaattaaagggagaagaaaagtgacagctgttgacagatctattctcataatgaagatttcagaaaagaaggtgttttctagcaaaatatgctcttcttttcccaggaaaaggggggaaagtgtttgtattattttaaatagcaggctgtcgctgaacgtggttccacagttcagcacttgaggcagatggttaaaagccacatgcttgcggattttcccactttttccacactcacagactcacaaccacttttggtgcccgtggtttaacctctgtttctctaactcctgtttatgagtcaagcggtttcatgtcatcagattgatggggaaagtgtgaacaaggataaggatgtggaaggagtttccgcactgggaagcaccacagtgtgccaatgctaaaaaaggaaaaaaagaattcaaagtatttgggctttgagggattgtatttagttaactttgaaagtttgaatgcgatcaaagtagctatctgaatgtttaaaagacattatttactggaatatatataaaaatctgtgttgaaacagactgaggtgatggtgcagagaagcagggtgggtctggggtcagagacaaacaagaagattgataatctctctccctttctccttggaaaaagcataggtcaaagtttaccaatgatgccaacatcctgtctggccaagacaaagctcagtaatgagggcagtgaggacactgtgagccatacaaagctgtttgtttctgctggcatgctaatgcaacaagttgctgatgaaagtgcctggaaaaaaaaaatcctattccttattctttgctcttgcttgaccccagtaatcttaaatctcagaattccatagaaccatagctaatcaaaactctgaaagccctcagagatttccctccacccccaactcatttcagagacaaagaaacaaagcttacaggttatttgactaaccacaagctactgaaagagctgggtctgggatccagtttttccgtccaatgaggagcactctcccatgtatacctcactgaatttcagtgggcatcttctgggaacttcttggaagaatataatatttttagcctttaaatgatccacaaagatggttggagcaattccaggttcaaagacatagttcctccaagaggatgtgggaggttctttctcattgaccctattattgctgttactaaagaaaaatgactgaactttctttgtcaggaagactgatgagcaaagcaggactgagggaaacagtggcttatgcgagttctacrtttagaaaaatgttcttaacctccttgtcaaaatcctctcaacatttaagtgaaataatggttctttcaaaaagtccaatcttctcttactatagttaaaaagtatttcgctcatttcgtcttcttcttaacctggctcaatttccccttttgcttaattagtctaatgtttccatccatttcccttacaaaccatggtttctggacttctaattgttttaaatggtttccattgtaacctttccagtatatccacatctttcttaaattgtgttactcgtaaccagacataaaattccatttgaagagttccgaggaaggtggtaagggagttattcatgtacattacacagcatacaaatgaaaacagaatacatttggcaattttctacttatgagtcagggctgttttggaacttctgttcaactcagttctgaactgattctgtaattttcctcctcacagctcaaatactattaatgaattcattcaatcgtctacttgctaataccttaatttaaaaaaattcgagggaactttatgatagtgataacatttgcaaagggattcaaaattcaatagatgaaagactgagataattatttgcaaaccttagataataatacaattggacataaaatttgcctcctaatttcctggaaacaaggcaacaagggaaaattttctattttaagaaattttaaagataattttgcttctgaagaacaaacaaaataaaagtatctctgctcataggtctttgcttgaatttctcagccagtgattcaacacttaagttcttctcctcaatgcctatg

SEQ ID NO: 28070 - DNA, 2114 bp, Homo sapiens
ccaatgtcaattaaagggagaagaaaagtgacagctgttgacagatctattctcataatgaagatttcagaaaagaaggtgttttctagcaaaatatgctcttcttttcccaggaaaaggggggaaagtgtttgtattattttaaatagcaggctgtcgctgaacgtggttccacagttcagcacttgaggcagatggttaaaagccacatgcttgcggattttcccactttttccacactcacagactcacaaccacttttggtgcccgtggtttaacctctgtttctctaactcctgtttatgagtcaagcggtttcatgtcatcagattgatggggaaagtgtgaacaaggataaggatgtggaaggagtttccgcactgggaagcaccacagtgtgccaatgctaaaaaaggaaaaaaagaattcaaagtatttgggctttgagggattgtatttagttaactttgaaagtttgaatgcgatcaaagtagctatctgaatgtttaaaagacattatttactggaatatatataaaaatctgtgttgaaacagactgaggtgatggtgcagagaagcagggtgggtctggggtcagagacaaacaagaagattgataatctctctccctttctccttggaaaaagcataggtcaaagtttaccaatgatgccaacatcctgtctggccaagacaaagctcagtaatgagggcagtgaggacactgtgagccatacaaagctgtttgtttctgctggcatgctaatgcaacaagttgctgatgaaagtgcctggaaaaaaaaaatcctattccttattctttgctcttgcttgaccccagtaatcttaaatctcagaattccatagaaccatagctaatcaaaactctgaaagccctcagagatttccctccacccccaactcatttcagagacaaagaaacaaagcttacaggttatttgactaaccacaagctactgaaagagctgggtctgggatccagtttttccgtccaatgaggagcactctcccatgtatacctcactgaatttcagtgggcatcttctgggaacttcttggaagaatataatatttttagcctttaaatgatccacaaagatggttggagcaattccaggttcaaagacatagttcctccaagaggatgtgggaggttctttctcattgaccctattattgctgttactaaagaaaaatgactgaactttctttgtcaggaagactgatgagcaaagcaggactgagggaaacagtggcttatgcgagttctacgtttagaaaaatgttcttaacctccttgtcaaaatcctctcaacatttaagtgaaataatggttctttcaaaaagtccaatcttctcttactatagttaaaaagtatttcgctcatttcgtcttcttcttaacctggctcaatttccccttttgcttaattagtctaatgtttccatccatttcccttacaaaccatggtttctggacttctaattgttttaaatggtttccattgtaacctttccagtatatccacatctttcttaaattgtgttactcgtaaccagacataaaattccatttgaagagttccgaggaaggtggtaagggagttattcatgtacattacacagcatacaaatgaaaayagaatacatttggcaattttctacttatgagtcagggctgttttggaacttctgttcaactcagttctgaactgattctgtaattttcctcctcacagctcaaatactattaatgaattcattcaatcgtctacttgctaataccttaatttaaaaaaattcgagggaactttatgatagtgataacatttgcaaagggattcaaaattcaatagatgaaagactgagataattatttgcaaaccttagataataatacaattggacataaaatttgcctcctaatttcctggaaacaaggcaacaagggaaaattttctattttaagaaattttaaagataattttgcttctgaagaacaaacaaaataaaagtatctctgctcataggtctttgcttgaatttctcagccagtgattcaacacttaagttcttctcctcaatgcctatg

SEQ ID NO: 28071 - DNA, 2114 bp, Homo sapiens
ccaatgtcaattaaagggagaagaaaagtgacagctgttgacagatctattctcataatgaagatttcagaaaagaaggtgttttctagcaaaatatgctcttcttttcccaggaaaaggggggaaagtgtttgtattattttaaatagcaggctgtcgctgaacgtggttccacagttcagcacttgaggcagatggttaaaagccacatgcttgcggattttcccactttttccacactcacagactcacaaccacttttggtgcccgtggtttaacctctgtttctctaactcctgtttatgagtcaagcggtttcatgtcatcagattgatggggaaagtgtgaacaaggataaggatgtggaaggagtttccgcactgggaagcaccacagtgtgccaatgctaaaaaaggaaaaaaagaattcaaagtatttgggctttgagggattgtatttagttaactttgaaagtttgaatgcgatcaaagtagctatctgaatgtttaaaagacattatttactggaatatatataaaaatctgtgttgaaacagactgaggtgatggtgcagagaagcagggtgggtctggggtcagagacaaacaagaagattgataatctctctccctttctccttggaaaaagcataggtcaaagtttaccaatgatgccaacatcctgtctggccaagacaaagctcagtaatgagggcagtgaggacactgtgagccatacaaagctgtttgtttctgctggcatgctaatgcaacaagttgctgatgaaagtgcctggaaaaaaaaaatcctattccttattctttgctcttgcttgaccccagtaatcttaaatctcagaattccatagaaccatagctaatcaaaactctgaaagccctcagagatttccctccacccccaactcatttcagagacaaagaaacaaagcttacaggttatttgactaaccacaagctactgaaagagctgggtctgggatccagtttttccgtccaatgaggagcactctcccatgtatacctcactgaatttcagtgggcatcttctgggaacttcttggaagaatataatatttttagcctttaaatgatccacaaagatggttggagcaattccaggttcaaagacatagttcctccaagaggatgtgggaggttctttctcattgaccctattattgctgttactaaagaaaaatgactgaactttctttgtcaggaagactgatgagcaaagcaggactgagggaaacagtggcttatgcgagttctacgtttagaaaaatgttcttaacctccttgtcaaaatcctctcaacatttaagtgaaataatggttctttcaaaaagtccaatcttctcttactatagttaaaaagtatttcgctcatttcgtcttcttcttaacctggctcaatttccccttttgcttaattagtctaatgtttccatccatttcccttacaaaccatggtttctggacttctaattgttttaaatggtttccattgtaacctttccagtatatccacatctttcttaaattgtgttactcgtaaccagacataaaattccatttgaagagttccgaggaaggtggtaagggagttattcatgtacattacacagcatacaaatgaaaacagaatacatttggcaattttctacttatgagtcagggctgttttggaacttctgttcaactcagtyctgaactgattctgtaattttcctcctcacagctcaaatactattaatgaattcattcaatcgtctacttgctaataccttaatttaaaaaaattcgagggaactttatgatagtgataacatttgcaaagggattcaaaattcaatagatgaaagactgagataattatttgcaaaccttagataataatacaattggacataaaatttgcctcctaatttcctggaaacaaggcaacaagggaaaattttctattttaagaaattttaaagataattttgcttctgaagaacaaacaaaataaaagtatctctgctcataggtctttgcttgaatttctcagccagtgattcaacacttaagttcttctcctcaatgcctatg

SEQ ID NO: 28072 - DNA, 2114 bp, Homo sapiens
ccaatgtcaattaaagggagaagaaaagtgacagctgttgacagatctattctcataatgaagatttcagaaaagaaggtgttttctagcaaaatatgctcttcttttcccaggaaaaggggggaaagtgtttgtattattttaaatagcaggctgtcgctgaacgtggttccacagttcagcacttgaggcagatggttaaaagccacatgcttgcggattttcccactttttccacactcacagactcacaaccacttttggtgcccgtggtttaacctctgtttctctaactcctgtttatgagtcaagcggtttcatgtcatcagattgatggggaaagtgtgaacaaggataaggatgtggaaggagtttccgcactgggaagcaccacagtgtgccaatgctaaaaaaggaaaaaaagaattcaaagtatttgggctttgagggattgtatttagttaactttgaaagtttgaatgcgatcaaagtagctatctgaatgtttaaaagacattatttactggaatatatataaaaatctgtgttgaaacagactgaggtgatggtgcagagaagcagggtgggtctggggtcagagacaaacaagaagattgataatctctctccctttctccttggaaaaagcataggtcaaagtttaccaatgatgccaacatcctgtctggccaagacaaagctcagtaatgagggcagtgaggacactgtgagccatacaaagctgtttgtttctgctggcatgctaatgcaacaagttgctgatgaaagtgcctggaaaaaaaaaatcctattccttattctttgctcttgcttgaccccagtaatcttaaatctcagaattccatagaaccatagctaatcaaaactctgaaagccctcagagatttccctccacccccaactcatttcagagacaaagaaacaaagcttacaggttatttgactaaccacaagctactgaaagagctgggtctgggatccagtttttccgtccaatgaggagcactctcccatgtatacctcactgaatttcagtgggcatcttctgggaacttcttggaagaatataatatttttagcctttaaatgatccacaaagatggttggagcaattccaggttcaaagacatagttcctccaagaggatgtgggaggttctttctcattgaccctattattgctgttactaaagaaaaatgactgaactttctttgtcaggaagactgatgagcaaagcaggactgagggaaacagtggcttatgcgagttctacgtttagaaaaatgttcttaacctccttgtcaaaatcctctcaacatttaagtgaaataatggttctttcaaaaagtccaatcttctcttactatagttaaaaagtatttcgctcatttcgtcttcttcttaacctggctcaatttccccttttgcttaattagtctaatgtttccatccatttcccttacaaaccatggtttctggacttctaattgttttaaatggtttccattgtaacctttccagtatatccacatctttcttaaattgtgttactcgtaaccagacataaaattccatttgaagagttccgaggaaggtggtaagggagttattcatgtacattacacagcatacaaatgaaaacagaatacatttggcaattttctacttatgagtcagggctgttttggaacttctgttcaactcagttctgaactgattctgtaattttcctcctcacagctcaaatactattaatgaattcattcaatcrtctacttgctaataccttaatttaaaaaaattcgagggaactttatgatagtgataacatttgcaaagggattcaaaattcaatagatgaaagactgagataattatttgcaaaccttagataataatacaattggacataaaatttgcctcctaatttcctggaaacaaggcaacaagggaaaattttctattttaagaaattttaaagataattttgcttctgaagaacaaacaaaataaaagtatctctgctcataggtctttgcttgaatttctcagccagtgattcaacacttaagttcttctcctcaatgcctatg

SEQ ID NO: 28073 - DNA, 2114 bp, Homo sapiens
ccaatgtcaattaaagggagaagaaaagtgacagctgttgacagatctattctcataatgaagatttcagaaaagaaggtgttttctagcaaaatatgctcttcttttcccaggaaaaggggggaaagtgtttgtattattttaaatagcaggctgtcgctgaacgtggttccacagttcagcacttgaggcagatggttaaaagccacatgcttgcggattttcccactttttccacactcacagactcacaaccacttttggtgcccgtggtttaacctctgtttctctaactcctgtttatgagtcaagcggtttcatgtcatcagattgatggggaaagtgtgaacaaggataaggatgtggaaggagtttccgcactgggaagcaccacagtgtgccaatgctaaaaaaggaaaaaaagaattcaaagtatttgggctttgagggattgtatttagttaactttgaaagtttgaatgcgatcaaagtagctatctgaatgtttaaaagacattatttactggaatatatataaaaatctgtgttgaaacagactgaggtgatggtgcagagaagcagggtgggtctggggtcagagacaaacaagaagattgataatctctctccctttctccttggaaaaagcataggtcaaagtttaccaatgatgccaacatcctgtctggccaagacaaagctcagtaatgagggcagtgaggacactgtgagccatacaaagctgtttgtttctgctggcatgctaatgcaacaagttgctgatgaaagtgcctggaaaaaaaaaatcctattccttattctttgctcttgcttgaccccagtaatcttaaatctcagaattccatagaaccatagctaatcaaaactctgaaagccctcagagatttccctccacccccaactcatttcagagacaaagaaacaaagcttacaggttatttgactaaccacaagctactgaaagagctgggtctgggatccagtttttccgtccaatgaggagcactctcccatgtatacctcactgaatttcagtgggcatcttctgggaacttcttggaagaatataatatttttagcctttaaatgatccacaaagatggttggagcaattccaggttcaaagacatagttcctccaagaggatgtgggaggttctttctcattgaccctattattgctgttactaaagaaaaatgactgaactttctttgtcaggaagactgatgagcaaagcaggactgagggaaacagtggcttatgcgagttctacgtttagaaaaatgttcttaacctccttgtcaaaatcctctcaacatttaagtgaaataatggttctttcaaaaagtccaatcttctcttactatagttaaaaagtatttcgctcatttcgtcttcttcttaacctggctcaatttccccttttgcttaattagtctaatgtttccatccatttcccttacaaaccatggtttctggacttctaattgttttaaatggtttccattgtaacctttccagtatatccacatctttcttaaattgtgttactcgtaaccagacataaaattccatttgaagagttccgaggaaggtggtaagggagttattcatgtacattacacagcatacaaatgaaaacagaatacatttggcaattttctacttatgagtcagggctgttttggaacttctgttcaactcagttctgaactgattctgtaattttcctcctcacagctcaaatactattaatgaattcattcaatcgtctacttgctaataycttaatttaaaaaaattcgagggaactttatgatagtgataacatttgcaaagggattcaaaattcaatagatgaaagactgagataattatttgcaaaccttagataataatacaattggacataaaatttgcctcctaatttcctggaaacaaggcaacaagggaaaattttctattttaagaaattttaaagataattttgcttctgaagaacaaacaaaataaaagtatctctgctcataggtctttgcttgaatttctcagccagtgattcaacacttaagttcttctcctcaatgcctatg

SEQ ID NO: 28074 - DNA, 2114 bp, Homo sapiens
ccaatgtcaattaaagggagaagaaaagtgacagctgttgacagatctattctcataatgaagatttcagaaaagaaggtgttttctagcaaaatatgctcttcttttcccaggaaaaggggggaaagtgtttgtattattttaaatagcaggctgtcgctgaacgtggttccacagttcagcacttgaggcagatggttaaaagccacatgcttgcggattttcccactttttccacactcacagactcacaaccacttttggtgcccgtggtttaacctctgtttctctaactcctgtttatgagtcaagcggtttcatgtcatcagattgatggggaaagtgtgaacaaggataaggatgtggaaggagtttccgcactgggaagcaccacagtgtgccaatgctaaaaaaggaaaaaaagaattcaaagtatttgggctttgagggattgtatttagttaactttgaaagtttgaatgcgatcaaagtagctatctgaatgtttaaaagacattatttactggaatatatataaaaatctgtgttgaaacagactgaggtgatggtgcagagaagcagggtgggtctggggtcagagacaaacaagaagattgataatctctctccctttctccttggaaaaagcataggtcaaagtttaccaatgatgccaacatcctgtctggccaagacaaagctcagtaatgagggcagtgaggacactgtgagccatacaaagctgtttgtttctgctggcatgctaatgcaacaagttgctgatgaaagtgcctggaaaaaaaaaatcctattccttattctttgctcttgcttgaccccagtaatcttaaatctcagaattccatagaaccatagctaatcaaaactctgaaagccctcagagatttccctccacccccaactcatttcagagacaaagaaacaaagcttacaggttatttgactaaccacaagctactgaaagagctgggtctgggatccagtttttccgtccaatgaggagcactctcccatgtatacctcactgaatttcagtgggcatcttctgggaacttcttggaagaatataatatttttagcctttaaatgatccacaaagatggttggagcaattccaggttcaaagacatagttcctccaagaggatgtgggaggttctttctcattgaccctattattgctgttactaaagaaaaatgactgaactttctttgtcaggaagactgatgagcaaagcaggactgagggaaacagtggcttatgcgagttctacgtttagaaaaatgttcttaacctccttgtcaaaatcctctcaacatttaagtgaaataatggttctttcaaaaagtccaatcttctcttactatagttaaaaagtatttcgctcatttcgtcttcttcttaacctggctcaatttccccttttgcttaattagtctaatgtttccatccatttcccttacaaaccatggtttctggacttctaattgttttaaatggtttccattgtaacctttccagtatatccacatctttcttaaattgtgttactcgtaaccagacataaaattccatttgaagagttccgaggaaggtggtaagggagttattcatgtacattacacagcatacaaatgaaaacagaatacatttggcaattttctacttatgagtcagggctgttttggaacttctgttcaactcagttctgaactgattctgtaattttcctcctcacagctcaaatactattaatgaattcattcaatcgtctacttgctaataccttaatttaaaaaaattcgagggaactttatgatagtgataacatttgcaaagggattcaaaattcaatagatgaaagactgagataattatttgcaaaccttagataataatacaattgracataaaatttgcctcctaatttcctggaaacaaggcaacaagggaaaattttctattttaagaaattttaaagataattttgcttctgaagaacaaacaaaataaaagtatctctgctcataggtctttgcttgaatttctcagccagtgattcaacacttaagttcttctcctcaatgcctatg

SEQ ID NO: 28075 - DNA, 521 bp, Homo sapiens
cggttttcaggaactactggattaaaagcaggaaaacagtggcatctttgtcccaaatgcattgatttgaagaaaccctagaaaattgacattggaatagatggagccctctagataagccttggaaaattttgaggttctgttagaggaaaaagacctacgataaaaacagatggctttcaacttaactgtaggatcattttttctttgagtggcrtaggaattatgatattggattatgatgtatataggacatgtaacaaagaaatgtaaatataacacacactgctctcagagtttaataatttgtatgtgggcacatagtaaagatcgctaatttgtttttaacttctagaatcaaattataaacaaagcacagaaaatgattataattctagaatggaatattagtgttttcatcttagaagaagggaggaaacgtagacgcaagtattggagtactagtgtcttcattttgcaaaatgggaagttgaggtactctttgtgtttgataggagcgc

SEQ ID NO: 28076 - DNA, 680 bp, Homo sapiens
tcgaaaaagagaagtgggtgttccaacagtagaggggatcattgacrcaaattcgtccttttatgttcccacacggctcaagttggggaatataagtcctaaaaacaggcgcaccctaatcctacctacttcccacaagaagccttcacgcagccaaggcccgccccacatagcacacgcgcggattcgttttccgtttggtaactgacaggaagcggaagccgtgcgtgggaggccgattctagtgcgcctgcgtggccgcgaatcaccagccagcctctgggtctgtagcaaccgcccagcgttgaggcgcggctcatgcccccagtatcccggtccagctattccgaggacatcgtgggctctcggagaaggcgacgcagctcctcggggagcccaccatccccgcagagcagatgttcctcttgggatggctgttcccgctctcactcccgcggccgtgagggcctcaggcctccttggagtgagttggacgtgggcgctctttacccctttagtcgctctgggtcgcgagggcggctcccaagattccgcaactacgccttcgcgtcctcctggtcgacctcgtatagtggatatcgctgccatcgtcactgctatgcagaagaacggcagtcagcggaagactacgagaaggaagagagccatcggcagaggag

SEQ ID NO: 28077 - DNA, 947 bp, Homo sapiens
acattattcaagataaatacttcacatgactccttaattagtcattaacgataattaaccttgtgggaaaaatgactcatctgattggtaaaaatacacttggtttcacttgggtctactgtcttctttctaaggttacagaggaaktgtctttccttctactcaggtttactcacctggaaagcaggaaggcagctttggatgacccttctgtcaagttttgaaagacttggagtacaaatctgatactgtataaaaaaatctgatctctcttaaataagcctgctcttctccctggagagacagaatggacaccagttcagctaccttaaacattacattggttgatcagtgataaataatgcaagatttcttactttacaggcttccccagaaaaatcaatctagggattcaatttattattcacctaaatgcatggatcaattaatacacattttttacttctggattttaatcagatttgaaacaagtgtgctatattatgataccatgaagaagcaagatatgtacaagttccaatactgaggcaaaatccttctaatttctcattttcagtacagatatgatataatccttctaatttctcattttcagtacataggaagaaaatcctatgagtttcattgtccacataattgccagattgattcccctttcttgcccagggagaatcaagataaatgcaataggcaagaggtgaatgagctattcttttgaccctaggggagaaagtcacaggggttgggaacctattgtattaaagtggtataagccttgttaagaggttgttcatggatattcaatttaaaacagatctaggtgactcttttctcccattatggctacttctcatatagtagttccaatttccacagaagaaccctaggcaattagtccacaggtaacttgttcagccctgaaatta

SEQ ID NO: 28078 - DNA, 440 bp, Homo sapiens
attaacttctattctgcagcaattgatggccacccaacttgaacagtgggggcttatcacctcatgtactaagaccagagatagctgatgccaagtttggctaaattagtagcttgagatgttaggtttttcatttgaggtttctatgctgctattgtcttctgctcttggacacagaggctgccacaatccgcatgtcaagtcctcatgtgacaatatccagagacagcaaggaagaggtacagggtattcctgcatgtttcttaaaaaaatgtttttgatagagaataattatacamatttatggggtccatgtgagattctggtacatgcatgcaatgtgtaatgatcaaatcagggtctttaggatattaatcacctcaaacattgatcatttctttgtgttgggaatatttcaaatcttattgctatttagaaat

SEQ ID NO: 28079 - DNA, 1411 bp, Homo sapiens
atcaaattcaaaatctagcattgggtccaatagttaccatatttttgaagtagtgttggcataaaaaatattttgagagagctggtcacacttgtaatgtgatacgaaaatatctgtgacttccattggtgagagagttaaagatactactaccttggtctgtgcttacattcataattgatagaagtgctacatttcaactagagttggtgaaaaggtcaccgactcctgaatcctatctgtggacccacgtgagtctcatggtccccgggttgaggaccccgtttcagggccaaggtacttgctgttccctctgccggaaatgctctccctggagatctccacacagcttgtttagcctggctgaaggcctctggtaaaccttgtttcaatgtagaattgacagcaccgcttaccagcttcttaccgtggaggaataatgaataagccaatgtatctgagattgtttagggtctttcactgtaagaggctttatgtcttgagaaaacctcactaatttggactgattgtaagaggcaagtctgaattaataaacatccctgaattgtaaaatgctttcaagtctatgaattgcttttagaaatgttcagtcatttaagcgagaattgcttagggtcttaaaggcaaccactttaatttataaatgtcgatttatactcacataacaattgtgtatatgttgtggaggccagtgaagtatttgaaggaatttctgaaatgatttgcacttttgccctcaaatatgtaaggagatttttttctcttcctagctagtatagcccttctctaaattaccatagattccaaaataatagtgtctgagtttatgaggattttactatacagtcagtgctttattatctttgctgcttggaagagagcattggyatgaataaccaaaaaagtcacgctgatgtatctttgggatagaatatggttttcttctagtaaatgcattccctagtttattcatttatgcattcagcaaacattcacacatctaatctttgccaggcctatactcatgatctgctgtggagaactgagattaatgcagtaataatgctataaaagaattctggtcatagagagtgaataatgagagtgaattaaataatatatgaaagaatagatggatgaatgaatgaattgatctcacacatatcttagagctaaaagggaccccaagagaaaatttaacaagaagttaaatcaaagttgtttctgagctccattattaactttttaaaagttggggataggtgatccaggtaatacattcaatcaaaaaacaaggcactataccatgaaaagtctggctcctgctcctgttcccatgctttcctacatctgcactctatgttcctccttgcaggtatcttccctttct

SEQ ID NO: 28080 - DNA, 525 bp, Homo sapiens
gatgaaaagatcagtgagatgtgaaggtagagattgatgagctgtccacatggatgtggatgtcactcagactaacagtrggtctctggctgtagagctaggaaaagagagggagccctcaagtcaggaaataaagctttgacaagcacatggcacgcaccaaaaggctggtgagtgacagtaacaagaagtgaagggtgatactactgctaccactgttaaaataatggcaagtgaatatttatgaaatccatattaatatttatggtacttttgaaaagcattatctcaaggaattctcacaataatcctttgaaaaagacactattatttttcccatgttatgaatgagttaactgagttttagaaaaattgaataaattgcctaagtccacacaactatttcaagtcaccaatatagctatgtgaaatggttttcaaagaattcacccatccttcatccatctatctatctgtcccttcatccattcattcatccatttgcttaacaaccttgagtgtctt

SEQ ID NO: 28081 - DNA, 525 bp, Homo sapiens
gatgaaaagatcagtgagatgtgaaggtagagattgatgagctgtccacatggatgtggatgtcactcagactaacagtgggtctctggctgtagagctaggaaaagagagggagccctcaagtcaggaaataaagctttgacaagcacatggcacgcaccaaaaggctggtgagtgacagtaacaagaagtgaagggtgatactactgctaccactgttaaaataatggcaagtgaatatttatgaaatccatattaatatttatggtacttttgaaaagcattatctcaaggaattctcacaataatcctttgaaaaagacactattatttttcccatgttatgaatgagttaactgagttttagaaaaattgaataaattgcctaagtccacacaactatttcaagtcaccartatagctatgtgaaatggttttcaaagaattcacccatccttcatccatctatctatctgtcccttcatccattcattcatccatttgcttaacaaccttgagtgtctt

SEQ ID NO: 28082 - DNA, 536 bp, Homo sapiens
tgggagtgctttgtcactgcagcaaaatctgacttctactggctggcatagtcatacaatatgaaaaattgctgttacctgtcaacattcaatatgtggtaagaaggcattgtaattaaaagtgtggatcatgcagccagagtacatgaattcaaatccaagtaagttctgccattcataaactcatggccttggcaagtaatttaattgcttggtgtctcagattcctcataggtcaaatgagaatgataaaattacttcataggagcttgagtgaaacaaaatgagtaacacattttatagcatttaaaacaaggcctggaacatgaaarcactcaatgaatattagctattcatatttttagtccatactgaattgacttcaattccaattagcctaggaggttaaccaaaaacagccaaaagaaaattcccacatatgtcccccaacaaaattcacaaaggcactcttcatgtctctgtaggtaaaggaaaggaaatgagaagttcatggaacatacagaggtgttctgcac

SEQ ID NO: 28083 - DNA, 811 bp, Homo sapiens
agagttgctcccaccaagcgtgggtgagggcaggaaggatgccaactgtacttccaaatgcagtgtctgctccttagggaacagggagcaggtgggattgtttctcctgaagccaatcaagtaaatgactaattaaggcgatacaacattccaatcacaaccttaaaattcaacgcagtgcccaatgcctagcaggtgccttcatccttctgccagaagcaattctgatggagacacaggctggctcctccaacttaaacatcctgagagtcagctgcaggtgaagcggctctcagagccggaacgctttaactcttaggggccgggtttacagaggggacaggcgtgcacctggcaccagtgtggagggcggtttctttgtgggcctgatgcaatgtccagcggccagckaggaaagaacccattgatgtagcatcagagaatgcacgcaatatcgccgtgggacagggcgggcaggcagaactgcagagagaaggaggcacctgcttccagctgctctgccctgaaatcctaaagtgacaccaaaggaaatattaaagaggataaagacaagaggacaaaaactaaagtgcagaaggaaggggctggagaaaaagttgagaattgtcagaagggggaataaaaggataaaaagatgaaaaatgggagtgcaaaggtcgtacaacaaattactggaaacgccaggagaagagagaatcagcagggtggagaaatcatgagcagcaattccaggcctacttgtccagctgaagaggagctggacacggaggccaagaatcccccacctgcg

SEQ ID NO: 28084 - DNA, 811 bp, Homo sapiens
agagttgctcccaccaagcgtgggtgagggcaggaaggatgccaactgtacttccaaatgcagtgtctgctccttagggaacagggagcaggtgggattgtttctcctgaagccaatcaagtaaatgactaattaaggcgatacaacattccaatcacaaccttaaaattcaacgcagtgcccaatgcctagcaggtgccttcatccttctgccagaagcaattctgatggagacacaggctggctcctccaacttaaacatcctgagagtcagctgcaggtgaagcggctctcagagccggaacgctttaactcttaggggccgggtttacagaggggacaggcgtgcacctggcaccagtgtggagggcggtttctttgtgggcctgatgcaatgtccagcggccagcgaggaaagaacccattgatgtagcakcagagaatgcacgcaatatcgccgtgggacagggcgggcaggcagaactgcagagagaaggaggcacctgcttccagctgctctgccctgaaatcctaaagtgacaccaaaggaaatattaaagaggataaagacaagaggacaaaaactaaagtgcagaaggaaggggctggagaaaaagttgagaattgtcagaagggggaataaaaggataaaaagatgaaaaatgggagtgcaaaggtcgtacaacaaattactggaaacgccaggagaagagagaatcagcagggtggagaaatcatgagcagcaattccaggcctacttgtccagctgaagaggagctggacacggaggccaagaatcccccacctgcg

SEQ ID NO: 28085 - DNA, 2044 bp, Homo sapiens
ccataacctcagaaaggttaaaaacactaaacacaggaatcccagaatgtaatcaaagacattccctaggaaaaaaaaaaccctctctgatgagccaagtcagaccaaaagatcctgggaaaattatcctccagcccttaggggttacccaagcattcctcagaaggtgataaccaaaaatgctttgtagaatgtgcttttcgttgccagatctcaactaaccgacacatagaaaacatgaggaaaggtctcacattattcaccaacaatgtcacttgtaaaagagcagccaaattgactctttattatgcctggggcgggggtggggtggagtggagtgggaatcagccaaggtaatgcatagggtgacgcgtacctttttgtcaatcaggtgcacgcatttaatttagaaagcaccctgagttaagcatccaatttaaattagcctgtaattgtaaataatataaaaaaagaagaaaaacagctgagggatatgcacatatccgtagtttaacatatatatgatttacaaaggtataatcttgagtgtgtatatataaaatacaaattttatatataccactctattctgtttggacaaggccaatacctgttccctggtcccaactgcagggcctttattgtatcttggtatgtttaactgaattgaacatgaattgaacatccatggagatggacttggcacagcagagtatatgcttacaaatgtaacaagctctctctgttttctgaaaattagtatttctaaaaactggatttgttttgggttgataagaggaaaaacatgatataaaagccatttgttgatggtgttctccatttgatggatactgacaaatcaccatgattgctcagaaaatcgatgtcaacatccactctgtcagggtctaagaccaaagaagcatttacggcttcctccccgtccacagcacacacaccacacacaccccgggaacatcccatgccagtgcccgtcagcatgggaacagaaaagagctgtgttattttcctaaatcactctctctcggtctaacataaacaactcaccaaacaaaacttgaagacaaggcaggagaatcattttaaaatgggatccaagacctgagacgcaaagcaaaagcctgcctagatccttctattcatcctatcccttccaaggctgatccatgccaacataacctttgagtatcaaacatcagaaggtctgtgtgcctcagccctgtcaaggggcaggtttctcctttgccctctcctgcacctgggagcacacgcactaccagtagagaagggccatctggccccgtcccagccgggacccctgagggtcagatagaggtgctgagcccctatgtcaaagttattaaatgtttttgttttgttccatggtagctctttttttctcctttctgatgaatttacaaaagaaagcaagctgctgagaaggccctgaaagtgaggaggggcaagaaagatgactagttacggagagtgagggttgtttttgttttttgtttgtttgttttgccaaaaaagcctggatagagttatctcagttatctggcgccctcctgaatggaacccyggagtagctcccatgtggaagagtccctggattttccccaaccccaccgtctcccccttcagccatgtcgacagggaagataggaacttagaacccatttctcactggagaggaaaacttgtcatctggctttgtgaagaaggttctaccttatgctcatcgcacattatctttgctatgtgctaagatatcatatttaaaaggccaaaaaaagggacaaaagaaatgtaaaatacttgaatgagcttgtattataacattaatattattgggagtatctgctttccaggctgaagtgattcattcattattctagtcttgctgtagtcctttgtaatttgtagtaattatgtaattgtggtaattatgtttttttaattaaaaaagtataataataaaaaacttgaaaaggcaaaataaattttttaaaggaataaaatg

SEQ ID NO: 28086 - DNA, 2044 bp, Homo sapiens
ccataacctcagaaaggttaaaaacactaaacacaggaatcccagaatgtaatcaaagacattccctaggaaaaaaaaaaccctctctgatgagccaagtcagaccaaaagatcctgggaaaattatcctccagcccttaggggttacccaagcattcctcagaaggtgataaccaaaaatgctttgtagaatgtgcttttcgttgccagatctcaactaaccgacacatagaaaacatgaggaaaggtctcacattattcaccaacaatgtcacttgtaaaagagcagccaaattgactctttattatgcctggggcgggggtggggtggagtggagtgggaatcagccaaggtaatgcatagggtgacgcgtacctttttgtcaatcaggtgcacgcatttaatttagaaagcaccctgagttaagcatccaatttaaattagcctgtaattgtaaataatataaaaaaagaagaaaaacagctgagggatatgcacatatccgtagtttaacatatatatgatttacaaaggtataatcttgagtgtgtatatataaaatacaaattttatatataccactctattctgtttggacaaggccaatacctgttccctggtcccaactgcagggcctttattgtatcttggtatgtttaactgaattgaacatgaattgaacatccatggagatggacttggcacagcagagtatatgcttacaaatgtaacaagctctctctgttttctgaaaattagtatttctaaaaactggatttgttttgggttgataagaggaaaaacatgatataaaagccatttgttgatggtgttctccatttgatggatactgacaaatcaccatgattgctcagaaaatcgatgtcaacatccactctgtcagggtctaagaccaaagaagcatttacggcttcctccccgtccacagcacacacaccacacacaccccgggaacatcccatgccagtgcccgtcagcatgggaacagaaaagagctgtgttattttcctaaatcactctctctcggtctaacataaacaactcaccaaacaaaacttgaagacaaggcaggagaatcattttaaaatgggatccaagacctgagacgcaaagcaaaagcctgcctagatccttctattcatcctatcccttccaaggctgatccatgccaacataacctttgagtatcaaacatcagaaggtctgtgtgcctcagccctgtcaaggggcaggtttctcctttgccctctcctgcacctgggagcacacgcactaccagtagagaagggccatctggccccgtcccagccgggacccctgagggtcagatagaggtgctgagcccctatgtcaaagttattaaatgtttttgttttgttccatggtagctctttttttctcctttctgatgaatttacaaaagaaagcaagctgctgagaaggccctgaaagtgaggaggggcaagaaagatgactagttacggagagtgagggttgtttttgttttttgtttgtttgttttgccaaaaaagcctggatagagttatctcagttatctggcgccctcctgaatggaaccccggagtagctcccatgtggaagagtccctggattttccccaaccccaccgtctcccccttcagccatgtcgacagrgaagataggaacttagaacccatttctcactggagaggaaaacttgtcatctggctttgtgaagaaggttctaccttatgctcatcgcacattatctttgctatgtgctaagatatcatatttaaaaggccaaaaaaagggacaaaagaaatgtaaaatacttgaatgagcttgtattataacattaatattattgggagtatctgctttccaggctgaagtgattcattcattattctagtcttgctgtagtcctttgtaatttgtagtaattatgtaattgtggtaattatgtttttttaattaaaaaagtataataataaaaaacttgaaaaggcaaaataaattttttaaaggaataaaatg

SEQ ID NO: 28087 - DNA, 2044 bp, Homo sapiens
ccataacctcagaaaggttaaaaacactaaacacaggaatcccagaatgtaatcaaagacattccctaggaaaaaaaaaaccctctctgatgagccaagtcagaccaaaagatcctgggaaaattatcctccagcccttaggggttacccaagcattcctcagaaggtgataaccaaaaatgctttgtagaatgtgcttttcgttgccagatctcaactaaccgacacatagaaaacatgaggaaaggtctcacattattcaccaacaatgtcacttgtaaaagagcagccaaattgactctttattatgcctggggcgggggtggggtggagtggagtgggaatcagccaaggtaatgcatagggtgacgcgtacctttttgtcaatcaggtgcacgcatttaatttagaaagcaccctgagttaagcatccaatttaaattagcctgtaattgtaaataatataaaaaaagaagaaaaacagctgagggatatgcacatatccgtagtttaacatatatatgatttacaaaggtataatcttgagtgtgtatatataaaatacaaattttatatataccactctattctgtttggacaaggccaatacctgttccctggtcccaactgcagggcctttattgtatcttggtatgtttaactgaattgaacatgaattgaacatccatggagatggacttggcacagcagagtatatgcttacaaatgtaacaagctctctctgttttctgaaaattagtatttctaaaaactggatttgttttgggttgataagaggaaaaacatgatataaaagccatttgttgatggtgttctccatttgatggatactgacaaatcaccatgattgctcagaaaatcgatgtcaacatccactctgtcagggtctaagaccaaagaagcatttacggcttcctccccgtccacagcacacacaccacacacaccccgggaacatcccatgccagtgcccgtcagcatgggaacagaaaagagctgtgttattttcctaaatcactctctctcggtctaacataaacaactcaccaaacaaaacttgaagacaaggcaggagaatcattttaaaatgggatccaagacctgagacgcaaagcaaaagcctgcctagatccttctattcatcctatcccttccaaggctgatccatgccaacataacctttgagtatcaaacatcagaaggtctgtgtgcctcagccctgtcaaggggcaggtttctcctttgccctctcctgcacctgggagcacacgcactaccagtagagaagggccatctggccccgtcccagccgggacccctgagggtcagatagaggtgctgagcccctatgtcaaagttattaaatgtttttgttttgttccatggtagctctttttttctcctttctgatgaatttacaaaagaaagcaagctgctgagaaggccctgaaagtgaggaggggcaagaaagatgactagttacggagagtgagggttgtttttgttttttgtttgtttgttttgccaaaaaagcctggatagagttatctcagttatctggcgccctcctgaatggaaccccggagtagctcccatgtggaagagtccctggattttccccaaccccaccgtctcccccttcagccatgtcgacagggaagataggaacttagaacccatttctcactggagaggaaaacttgtcatctggctttgtgaagaaggttctmccttatgctcatcgcacattatctttgctatgtgctaagatatcatatttaaaaggccaaaaaaagggacaaaagaaatgtaaaatacttgaatgagcttgtattataacattaatattattgggagtatctgctttccaggctgaagtgattcattcattattctagtcttgctgtagtcctttgtaatttgtagtaattatgtaattgtggtaattatgtttttttaattaaaaaagtataataataaaaaacttgaaaaggcaaaataaattttttaaaggaataaaatg

SEQ ID NO: 28088 - DNA, 2044 bp, Homo sapiens
ccataacctcagaaaggttaaaaacactaaacacaggaatcccagaatgtaatcaaagacattccctaggaaaaaaaaaaccctctctgatgagccaagtcagaccaaaagatcctgggaaaattatcctccagcccttaggggttacccaagcattcctcagaaggtgataaccaaaaatgctttgtagaatgtgcttttcgttgccagatctcaactaaccgacacatagaaaacatgaggaaaggtctcacattattcaccaacaatgtcacttgtaaaagagcagccaaattgactctttattatgcctggggcgggggtggggtggagtggagtgggaatcagccaaggtaatgcatagggtgacgcgtacctttttgtcaatcaggtgcacgcatttaatttagaaagcaccctgagttaagcatccaatttaaattagcctgtaattgtaaataatataaaaaaagaagaaaaacagctgagggatatgcacatatccgtagtttaacatatatatgatttacaaaggtataatcttgagtgtgtatatataaaatacaaattttatatataccactctattctgtttggacaaggccaatacctgttccctggtcccaactgcagggcctttattgtatcttggtatgtttaactgaattgaacatgaattgaacatccatggagatggacttggcacagcagagtatatgcttacaaatgtaacaagctctctctgttttctgaaaattagtatttctaaaaactggatttgttttgggttgataagaggaaaaacatgatataaaagccatttgttgatggtgttctccatttgatggatactgacaaatcaccatgattgctcagaaaatcgatgtcaacatccactctgtcagggtctaagaccaaagaagcatttacggcttcctccccgtccacagcacacacaccacacacaccccgggaacatcccatgccagtgcccgtcagcatgggaacagaaaagagctgtgttattttcctaaatcactctctctcggtctaacataaacaactcaccaaacaaaacttgaagacaaggcaggagaatcattttaaaatgggatccaagacctgagacgcaaagcaaaagcctgcctagatccttctattcatcctatcccttccaaggctgatccatgccaacataacctttgagtatcaaacatcagaaggtctgtgtgcctcagccctgtcaaggggcaggtttctcctttgccctctcctgcacctgggagcacacgcactaccagtagagaagggccatctggccccgtcccagccgggacccctgagggtcagatagaggtgctgagcccctatgtcaaagttattaaatgtttttgttttgttccatggtagctctttttttctcctttctgatgaatttacaaaagaaagcaagctgctgagaaggccctgaaagtgaggaggggcaagaaagatgactagttacggagagtgagggttgtttttgttttttgtttgtttgttttgccaaaaaagcctggatagagttatctcagttatctggcgccctcctgaatggaaccccggagtagctcccatgtggaagagtccctggattttccccaaccccaccgtctcccccttcagccatgtcgacagggaagataggaacttagaacccatttctcactggagaggaaaacttgtcatctggctttgtgaagaaggttctaccttatgctcatcgcacattatctttgctatgtgctaagatatcatatttaaaaggccaaaaaaagggacaaaagaaatgtaaaatacttgaatgagcttgtattataacattaatattattgggagtatctgctttccaggctgaagtgattcattcattattctagtcttgctgtagtcctttgtaatttgtagtaattatgtaattgtggtaattatgtttttttaattaaaaaagtataataataaaaaacttgaraaggcaaaataaattttttaaaggaataaaatg

SEQ ID NO: 28089 - DNA, 1484 bp, Homo sapiens
tgaatgagtaaatgagttagtaagtgaattaatgaatgaatgagtgaataaaagattcagcgagtgagtgaataaatgagtgggtgagtgaataaatgaatgagtgaatgaatgagagagtgaataaaagagtcagcaagtaagtaaatgaatgagtgagtgagtgaatgaattagtgactgaaagagtgaacaaatgagttagtgagtgaatgagtctgtgagcgagtgaatgaatgagtgaataaaagttagcaagtaagtgaatgaataaataaatgaattagtgagtgaatgaataaatgagttagtgagtgaaggaataagtgaataaatgagtgaatgaatgaatgagtgaataaatgttagtgagtgagtgaattaatgaataaattcatgaatgaatgcatgagtgagtgaataagtraaggaataaatgagtggaagaatgcatgagtgagtgaacacatgaatgacagagtgagtaaaagactctgaggctcctggccagcccctcacatcaatcacatatgccggctggagatatcaggcaagagctagaaacttcacaattattacccgtataaaaatgtcctaccttacacttgtacaacagcaatttatgccttccccaagctctgtcacacacaccctttggtcctcatgacactcctgtgaagtgggtaggagtcagcagcagtcccaggatcccagccctggcagacagccccactcccactctgctgccctctcagctatgggccaagagaaacgcaccagaaccacacccatgaagaccatgtgctggtaaaactccccgctcgggtctcttcggcagaagctgctcacctccactgactgcattttaggctctcccatgtctttgcttacttggagagagacccctggtctatactccaaaggcagccagttgctatgtgttgtggaggaaccacctgcctggagcaggtaaccattcccagccctgtgctgcactgtatagtttcccaaggacttccacacacatctccatctcctccactcccagaaccaggccaacccagcccagctgtacaagcataaggctcagtctggaaggccaattccaggaaggttctcagaacctgggatggagtcaggaaggatgttgtatccagatcataggtgaaggccagtgagtgttggcatgcacacaagtccatgatcccaaaactcatgcatttgtaaagaaatggacaaagaccaaatcagaagggagaacagaacaagatgcagctggaggggaaggcaggcctggaaagtaaaattagtcctagaaatcctatagagataaaaagcagattactggttgccatgggctggcggcaggaagaatggagagtgactgcttaaggggcatggggcttccgttttggtgctgaaaatgttttgaaactagacggtggtgatgatcgcacagcactgtgaatataataagtgccactg

SEQ ID NO: 28090 - DNA, 1142 bp, Homo sapiens
ccacatctctgggccccccttctctctgggctccaggacactgaacctgcaacttggatgacccccgtccttcccacctggccctttgacccaaagatttccaggggaatttctccattctgatgtcctacaggtggcaccagctacacaatttgcaggtcccaatgcaaaataaaaatgcgaggccctttgtttgaaaagtattaagaatttcaagatagcaacagcagagcatgaaaccaagcatggggccctatctgactgctaggtcgcagtccaagaaacctactcaacccacaaggtctggggcttgctggccaacattacattccccggtaagaaacttgctgtcttgctcagctcaggccaccataacaaaatgccatagactgggtggcttataagcaacagaaatttatttctcacagttctggaaacttgaagtccaaaattaaggcactgatgattagtgtctgatgaaagcccactctctggttcatagatggcaccttctcaccctactctcacatagtagaaaaggacagggtagctcgttggcctcttttatgagggcactaatcccattcatgagtgttctaccctcatgacctaatcacctcccaacaggactacctcctaataccatcacattggtaatcagccttcaacatatgaattttggggggacacagacattcagaccatagcacttgcttaattcaattaagatttccagtttcttaaagtgtgaggtggagaaaaatgctcaagatatttggctaggaatctccccatgaggtggcctgttacagcttctaaaatcctcccaggtaggtatcagagtgctgaaacacagcacagggtagcaccctgcccaagagcattgtcactaaagtcagtctgcttgggtttaaatgccagttccctgactcactagcttgacttgggcaaaatactaaacttctctgtttttcagttttctcactataaaattggggtattcatgccaacttcatacggctggggcagtaattatataaaataatccatgcaaaatgcttggtacagtgccaggtacatgatttgctctcagtcgaagtcagctgttaytgtatttctactccactctggtatacttggga

SEQ ID NO: 28091 - DNA, 707 bp, Homo sapiens
  misc_feature (1)...(707): n = A,T,C or G
caagcactggccgtcagaatcacccagggcgcttgggaaaaatgcagatgcctggacccgtcagtgagcccggacctctgtgtttctttttagctctcctaaaacaacatttcagaaccactgcctttcagcacagcagagagaaygaagttatggggagggttaacttgaaatagagttgtggacttcttctaaggtctatcatcattaagcttcccttgcagaatgtcagacatgtgtccaacttcaccatcatcctatcaaatccacatgacaacctgcaagtacgatttgacgtctctgttttgtggatgaagaaacagaagctaagagacattccagtgaactctggatctggaaatccacggctaggaagcagtctgtctgatgggaagggcagatgcatgcaggttccacagaaggagccctgcctcctcttctgagcctctcttggttcctcacgtccaagtgcagggtcagagatggggcaggcacatcgtccttttgctggggatctccaggcacctgctggggggcacctccttacttcaccacctctggccagccctgatttcttccttctccctggtttctatcttccccccnnnnnnnnnnnnnnnnnnnnnnnnnnnnnnnnnnnnnnnnnnnnnnnnnnnnnnnnnnnnnnnnnnnnnnnnnnnnnnnnnnnnnnnnnnnnnnnnnnnnct

SEQ ID NO: 28092 - DNA, 979 bp, Homo sapiens
tcctaactcacagcaggagggtctgaggccaggtggggagaagagcagtggagaagtggcggatggaagagatggaccacacagagaggaagcaggagatcctctgcaatagttacagtaacacagctctggcacgcaccaacagaacccaagtcacatcctcaaggatgcacgagaaagggtraagaataaggtcactaactaggtaagcccagatggtagagcggagagagacttcttagaggttcgctacggcggagttttcagatgaggaaaattgaaggtcccaggggtgaagtgagctgctcaccttacaagtaggagtgccccgattgctgctcatgcatccgacccctaacttctcatccagaacacaaaccatgccacctcctactacagttcttcctttttttcttttggagaatgacagtggtgcacattttctaaccagcagcgtctcattcctcattacacttgtgagccgaggatccatcacaagccagtacttctgtggaattccatatggtataaaaatagtttagtccctcttcatgtcgtgtaaggaacataattaagctcttttattgggatatagttcacgtgccataaaattccatttaaagtgatcagcgcattggtttttagcatattcaaaaggttatacagccatcacccttagctaattccagaacttttccatcactccaaaaagaagccctgtacccattagcaatgactccctagtctccccgtctccccatctcctgggaacctctaatccactttttgtcttgatggccttgcctattttggacattgcatgtcaatggactcatagacagtgggtggcctttgtgcctggatccttcacttggcctcatgtttttgagggtcatccatgttgttgcatgtgtcaatgcttcgctcctttttttggctgagttgtaagattccattatgtgggtagaccacattttgt

SEQ ID NO: 28093 - DNA, 624 bp, Homo sapiens
aaaagtgttaagtttgtcactttatgcttgatacttccccccgaaacagtgaaatagcataagcccaaaacaagagagggctgagcaccacaacaggcagggccctcggaagctctagccaaaagaaggtaatggaatgaggaaggtaggaagaaaaatgaagaaacttcgttttaaagccaaaacactggaaagcaggtgactgaggcctgtgtgtatataggccctttctttagggcctcttcaggtgtgccttaaaatgaggacaggagcatgggcctgttctctcctggcaaggccactgctgggcaaatgggcctgcagacaagacacaaagtgctttgaattcagtactaagaaaattatcaggcccatggaagccactgggaatattaccaagcagttactatagggcagggcatgtgtcttatttagctttaagctaaatactcagcaccttacaaaaatagtttggttactgaatgaataagcccgctgaagatgagatttcaaggtcwtatagatacggcctttagtctctcttgttatggtttattacactaacctggtgaaccaaatagcataactattaacatatttttagcactttttgctataaatgca

SEQ ID NO: 28094 - DNA, 1139 bp, Homo sapiens
tagccttgaaacaatcactcaagctgcagggggctggggaagcttgccatgggagagtgagtgaggggggcaggtgactgagacagagcagttaggaaaggaggtaggaaaaccccagactgccgtgggcagagggcatttgcacatgtatgtaacacaggcacctacatgtgcacatgcacacaaatgcacacggatgcaccaacacacatacattcatgtgcacacacgtctcaacatgtacacacatccacaaaccatgcacaggcagaacacacacaccacacacatgcacacagacacacatacatgcttgtaccccatgacacatttgcatgcctagactatgtacatacgtgcacacacgtgtgtacatgcatgtgagtacatgcacacaaaacacccatgcgtacccacgtatacgggcccttacatgcacacctgcatgcacacatgtacacatgatgcgtgcatgcacaggcctgtctagaagtggggacttggctgtgtcagtgctgctgaggggctgagggaactgagcactgagggagctgaccactgcggagcgcccactggatttttccacctggaggctgtctgtgactttgtagcagcaggggaagctgggatgagaagagcagctggaaaggaagtgggtccaggcactgcagaccagccttttgagaagtttggctgtgagagatgagagagggcagaggtgggaatggagtgtgaagttcaggaaacgctcattttctgagcctcacaggaagcaaaggcctctcgaggggagccctgtgtgaggggctctggcaagatgccccgacacacacatgcatcttccacacgcaccctcttaaaggagggggctggcttgggtgctggtgggaagaggctggcctggagggggagtcaccgatgtaggaaagagctggctttgagggcccctgtgggaatggtagaagttgctggctttagcaggaggaacaaagggcagggtggctgctgtcacaggcagattggtggcttggtggccagatgtgaagccatgtcagccggatscctccagtcttccgttttctctgtgcagcagggaggttctccgcagaccaaaggtatggagaaaatggacaggtgga

SEQ ID NO: 28095 - DNA, 583 bp, Homo sapiens
atgtgcaaaggcctggagggaggagctattcaatagtcctgtagaactgggggcagttgaggggacagttggaagagagtcaggaccaagtcaggaaggcctgagaatggcgagctggagagccgggaygcaccctgccagtgctggctcaccatggcctgtggctgctggaggaggcagggggtcttcccacaccgccagtgccaggatagcaagggttcagcacagtccaggtcgtgtctcagcttccccttctaggaaataggggtacagactccttagggccaagcctgctgaatgaaggctgcagaaggttttgcagacctgccagaggacagggctttacctcgtcccccgcctctggagggcagcctggtgggggttgggcaggtgcggagggcagcagtcagtcatcggctgggctctgaggacagtccagagtgggccctgctttgtgctcgggagggccccgtcatgactttcgagggccccagctgtgtccactgtacctcacaggttccgtcagccctggcgcccaggcgcatctgactcggcaccccctgcaggcaccatggcccagagc

SEQ ID NO: 28096 - DNA, 583 bp, Homo sapiens
atgtgcaaaggcctggagggaggagctattcaatagtcctgtagaactgggggcagttgaggggacagttggaagagagtcaggaccaagtcaggaaggcctgagaatggcgagctggagagccgggacgcaccctgccagtgctggctcaccatggcctgtggctgctggaggaggcagggggtcttcccacaccgccagtgccaggatagcaagggytcagcacagtccaggtcgtgtctcagcttccccttctaggaaataggggtacagactccttagggccaagcctgctgaatgaaggctgcagaaggttttgcagacctgccagaggacagggctttacctcgtcccccgcctctggagggcagcctggtgggggttgggcaggtgcggagggcagcagtcagtcatcggctgggctctgaggacagtccagagtgggccctgctttgtgctcgggagggccccgtcatgactttcgagggccccagctgtgtccactgtacctcacaggttccgtcagccctggcgcccaggcgcatctgactcggcaccccctgcaggcaccatggcccagagc

SEQ ID NO: 28097 - DNA, 583 bp, Homo sapiens
atgtgcaaaggcctggagggaggagctattcaatagtcctgtagaactgggggcagttgaggggacagttggaagagagtcaggaccaagtcaggaaggcctgagaatggcgagctggagagccgggacgcaccctgccagtgctggctcaccatggcctgtggctgctggaggaggcagggggtcttcccacaccgccagtgccaggatagcaagggttcagcacagtccaggtcgtgtctcagcttycccttctaggaaataggggtacagactccttagggccaagcctgctgaatgaaggctgcagaaggttttgcagacctgccagaggacagggctttacctcgtcccccgcctctggagggcagcctggtgggggttgggcaggtgcggagggcagcagtcagtcatcggctgggctctgaggacagtccagagtgggccctgctttgtgctcgggagggccccgtcatgactttcgagggccccagctgtgtccactgtacctcacaggttccgtcagccctggcgcccaggcgcatctgactcggcaccccctgcaggcaccatggcccagagc

SEQ ID NO: 28098 - DNA, 583 bp, Homo sapiens
atgtgcaaaggcctggagggaggagctattcaatagtcctgtagaactgggggcagttgaggggacagttggaagagagtcaggaccaagtcaggaaggcctgagaatggcgagctggagagccgggacgcaccctgccagtgctggctcaccatggcctgtggctgctggaggaggcagggggtcttcccacaccgccagtgccaggatagcaagggttcagcacagtccaggtcgtgtctcagcttccccttctaggaaatagrggtacagactccttagggccaagcctgctgaatgaaggctgcagaaggttttgcagacctgccagaggacagggctttacctcgtcccccgcctctggagggcagcctggtgggggttgggcaggtgcggagggcagcagtcagtcatcggctgggctctgaggacagtccagagtgggccctgctttgtgctcgggagggccccgtcatgactttcgagggccccagctgtgtccactgtacctcacaggttccgtcagccctggcgcccaggcgcatctgactcggcaccccctgcaggcaccatggcccagagc

SEQ ID NO: 28099 - DNA, 583 bp, Homo sapiens
atgtgcaaaggcctggagggaggagctattcaatagtcctgtagaactgggggcagttgaggggacagttggaagagagtcaggaccaagtcaggaaggcctgagaatggcgagctggagagccgggacgcaccctgccagtgctggctcaccatggcctgtggctgctggaggaggcagggggtcttcccacaccgccagtgccaggatagcaagggttcagcacagtccaggtcgtgtctcagcttccccttctaggaaataggggtacagactccttagggccaagcctgctgaatgaaggctgcagaargttttgcagacctgccagaggacagggctttacctcgtcccccgcctctggagggcagcctggtgggggttgggcaggtgcggagggcagcagtcagtcatcggctgggctctgaggacagtccagagtgggccctgctttgtgctcgggagggccccgtcatgactttcgagggccccagctgtgtccactgtacctcacaggttccgtcagccctggcgcccaggcgcatctgactcggcaccccctgcaggcaccatggcccagagc

SEQ ID NO: 28100 - DNA, 583 bp, Homo sapiens
atgtgcaaaggcctggagggaggagctattcaatagtcctgtagaactgggggcagttgaggggacagttggaagagagtcaggaccaagtcaggaaggcctgagaatggcgagctggagagccgggacgcaccctgccagtgctggctcaccatggcctgtggctgctggaggaggcagggggtcttcccacaccgccagtgccaggatagcaagggttcagcacagtccaggtcgtgtctcagcttccccttctaggaaataggggtacagactccttagggccaagcctgctgaatgaaggctgcagaaggttttgcagacctgccagaggacagggctttacctcgtcccccgcctctggagggcagcctggtgggggttgggcaggtgcggagggcagcagtcagtcatcggctgggctctgaggacagtccagagtgggccctgctttgtgctcgggagggccccgtcatgactttcgagrgccccagctgtgtccactgtacctcacaggttccgtcagccctggcgcccaggcgcatctgactcggcaccccctgcaggcaccatggcccagagc

SEQ ID NO: 28101 - DNA, 765 bp, Homo sapiens
attttggttattatttttagaatagtaataaaattgggtagtatttttctttttgtacctttgtcagtttggggctttatctgtttctttttttttctttttttttttttttttttttttgaaatggagtctcactctgtcccccaggttggagtgcaggggcgcaatgttggctcactgcaactgcaacctccgcctcctgggttccagcaattctcttgccttaaactcctgagtagctgarattacaggcatccgccaccacgcccagctaatttttgtatttttagtaaaaacagggtttcgccatgttggccaggctgatctcgaactcctgacctcaggcctcggcctcccaaagtgctgggattacaggcatgagctaccgcacctggcctttttctgtgctccaggagagtttaagtacatagtagtgaaattatctgacctttaaatgtttggtagaattatcctgtgaaaatactgaacctttagtttctagtgacagtcacacatctttttactagagcttcactgttgcttattaataatgtggtcctgtgagttaagcttaacacaaataactttatgctttttctgtatactactttttatagattattttttaatataaggttggcctaaacgagttttgtattctaaattaaactataatcagatcatcttgtaaaaagacaggtttacttaggctgggcatggtggctcatacctgtaatcccagctctttgggagatgaaggtggga

SEQ ID NO: 28102 - DNA, 552 bp, Homo sapiens
ttcagcttacaaaaggaaggagaaagggtgttgagataacatgcaaccacaagggaacctctcttctcccgttataatcatctcagaaaagctcacttagtattatcaatgcaatttgatgtacaatgcatgtagaagtgccactatatatatgccagtgtttcccagtgtggtgtgtacattggtactgaacaaaatgattgcagacagtacacaatgaaatacttttatttaactgtaactaaaattttaaataaagtggtggatcacgcctgtaataacagccctttgggaggctgatgcaggtggattgcttgagcccaggagttcgaaaccagccttggcaacatggcgaaaccccatctctaaaaaaatacaaaaaattagccaagcatagtggtgcaygcctgtacttccagccacttgggaggctgaagtagtaggattgcttaagcctggcaggttgaggctgcagctgcactgagccgtgattgtggccactgcactccagcatgggtgatagagcaagaccttgtctcaaaacaaaacaaa

SEQ ID NO: 28103 - DNA, 552 bp, Homo sapiens
ttcagcttacaaaaggaaggagaaagggtgttgagataacatgcaaccacaagggaacctctcttctcccgttataatcatctcagaaaagctcacttagtattatcaatgcaatttgatgtacaatgcatgtagaagtgccactatatatatgccagtgtttcccagtgtggtgtgtacattggtactgaacaaaatgattgcagacagtacacaatgaaatacttttatttaactgtaactaaaattttaaataaagtggtggatcacgcctgtaataacagccctttgggaggctgatgcaggtggattgcttgagcccaggagttcgaaaccagccttggcaacatggcgaaaccccatctctaaaaaaatacaaaaaattagccaagcatagtggtgcatgcctgtacttccagccacttgggaggctgaagtagtaggattgcttaagcctggcaggttgaggctgcagctgcastgagccgtgattgtggccactgcactccagcatgggtgatagagcaagaccttgtctcaaaacaaaacaaa

SEQ ID NO: 28104 - DNA, 508 bp, Homo sapiens
tgtcttccaaaatagacgcttctgtgtaatagcagtggaacaaaggataagcaaggttaatatgggcatgaaggcagtggcaatcagggaatctggcttttgagatatattatattaggtgttatgctattctattggacacattataaaatatctgtaataaaataatacaatgagtagtgctaggacatttggattttgtccataaggaacgagataaaattagattcattctttaccatatgccaggaaaaattttcaaaatttataagtaaaatataaatcatagcatattaaagaaaaagatagatatggggcagactttctagccatgatgtaaaatgcacacagagaaaatatattggtaacttataaaaattaaggtaaaagaaatttttgtgaactagccttacaaaagtgagagcagggctttccttatagattgstaatttcctccaggggcaatgactttcctggataattagagaagtaaaggctaaatctaatt

SEQ ID NO: 28105 - DNA, 1971 bp, Homo sapiens
tccagataacaccctcttgccaaaaagttccaggtcctggctactaccagctacagtctttagtggcagctatataatctcaatatagaaggactttagaaagaaaaacctaatgagggaagggagcattggaaattttatcttaaggctctacatatgcacagcaagtgcattacttaaattatatacacattcatcatgagtttgmgagctctcaacatctccaatgctcattttccttagcattccttctactctttcagcccaaatcatccataacagacaagttgtctggttacatgctaacactcatccatactcatactttctggttatgtacagctgtgattagaattctactgtccaattttgatgcctaatacctggtatcgtggaaagaacaagagccctggagtcatatagacctacttataaatctcagctctaccacttacaaggtaaagaactttggacaagttacctaagtgaagctcatttttctcaatagaaattaggtaaaacaatagttactttgtaaaaagctgttgaaggctagcaagaattatatgaagtatacagaacataggaggcacttagcatacagcaattaagatggaagtctattgaccagacctacacacaggtttccaaatagtattaactatataatgaaagcatgaatcagcttcacacgtccttgtctctctactcccagttgtaagatgacttaactgctcctccggaggaagaaggctgtttctcagtcctcagtcttaagccaaaattgactaacattacagttatctccttaccattaacatgtttgctaccacagctgctaagaaaattttatgttttcactatggcctatgttcttgttttatggtcttgaccaatatttttaagagacagggtcttgctctgttgccaaggctagaatgcagtggcacaatcataattcactgcagccctgaactcctgggctcctaccttatccttcctagtagcccagcctccttagcaaatcgtgaatgctgtttcactctcagtctattctagggagctctgacagtccccagcttctccagaactaccactctttggcttaccatactactgtactccaagatggcaatcaaaccatagtgctctgccagtgcctaagtgcctttatgtccctgtaacaggctgatgtccagttccacttactcctagcaaacaggatcccaatttctagaatgacagatacatccctatctcaagcttgccccacctaggtctacttcctcttattttcccacccccacttccctacagccccacaacagtatatgtattttgggtaaagtagacagatactcaaataggagtcagaagaccttggttctacctctacttctgccactttactagttatgaagtgataaaatgttgtacttaccttacaggaaggctcaaatagacatttatgaacatgttctatagatgtattattattataagtatagcaagtttctattatgacaatatttacttgtcaatataaaaccctaacatatttttttaaatcctctagcattgttttattagcaacagcttagaaacaactcaaggccaggcgtggtggctcacgcctgtaatcccagcactttgggaggcccaggcaggaggattccctgaggtcaggagtttgggaccagtctagccaacatggtgaaaccctgtctctactaaaaatacaaaaaaaaattagccaggtgtggtggcatgagcctgtaatcccagctactgaggggactgaggcagggaaattgcttgaaccagggaggtggaggttgcagtgagtcaagatcgcgccattgcactccagcctgggtgacagagagagactccgtctcaaaacaaaaaaaaaaaacaactcaaatgaaatatctaaaaaatatatataatacatcctttcattggaatacc

SEQ ID NO: 28106 - DNA, 1971 bp, Homo sapiens
tccagataacaccctcttgccaaaaagttccaggtcctggctactaccagctacagtctttagtggcagctatataatctcaatatagaaggactttagaaagaaaaacctaatgagggaagggagcattggaaattttatcttaaggctctacatatgcacagcaagtgcattacttaaattatatacacattcatcatgagtttgcgagctctcaacatctccaatgctcattttccttagcattccttctactctttcagcccaaatcatccataacagacaagttgtctggttacatgctaacactcatccatactcatactttctggttatgtacagctgtgattagaattctactgtccaattttgatgcctaatacctggtatcgtggaaagaacaagagccctggagtcatatagacctacttataaatctcagctctaccacttacaaggtaaagaactttggacaagttacctaagtgaagctcatttttctcaatagaaattaggtaaaacaatagttactttgtaaaaagctgttgaaggctagcaagaattatatgaagtatacagaacataggaggcacttagcatacagcaattaagatggaagtctattgaccagacctacacacaggtttccaaatagtattaactatataatgaaagcatgaatcagcttcacacgtccttgtctctctactcccagttgtaagatgacttaactgctcctccggaggaagaaggctgtttctcagtcctcagtcttaagccaaaattgactaacattacagttatctccttaccattaacatgtttgctaccacagctgctaagaaaattttatgttttcactatggcctatgttcttgttttatggtcttgaccaatatttttaagagacagggtcttgctctgttgccaaggctagaatgcagtggcacaatcataattcactgcarccctgaactcctgggctcctaccttatccttcctagtagcccagcctccttagcaaatcgtgaatgctgtttcactctcagtctattctagggagctctgacagtccccagcttctccagaactaccactctttggcttaccatactactgtactccaagatggcaatcaaaccatagtgctctgccagtgcctaagtgcctttatgtccctgtaacaggctgatgtccagttccacttactcctagcaaacaggatcccaatttctagaatgacagatacatccctatctcaagcttgccccacctaggtctacttcctcttattttcccacccccacttccctacagccccacaacagtatatgtattttgggtaaagtagacagatactcaaataggagtcagaagaccttggttctacctctacttctgccactttactagttatgaagtgataaaatgttgtacttaccttacaggaaggctcaaatagacatttatgaacatgttctatagatgtattattattataagtatagcaagtttctattatgacaatatttacttgtcaatataaaaccctaacatatttttttaaatcctctagcattgttttattagcaacagcttagaaacaactcaaggccaggcgtggtggctcacgcctgtaatcccagcactttgggaggcccaggcaggaggattccctgaggtcaggagtttgggaccagtctagccaacatggtgaaaccctgtctctactaaaaatacaaaaaaaaattagccaggtgtggtggcatgagcctgtaatcccagctactgaggggactgaggcagggaaattgcttgaaccagggaggtggaggttgcagtgagtcaagatcgcgccattgcactccagcctgggtgacagagagagactccgtctcaaaacaaaaaaaaaaaacaactcaaatgaaatatctaaaaaatatatataatacatcctttcattggaatacc

SEQ ID NO: 28107 - DNA, 985 bp, Homo sapiens
tcctcatgatgttggtgcttggtgtggtccrggaggtcactagaagggaagtggtccttctattctcatcctcttgatttttagattatgtcttgtcaacattaacagatgtgactgaaaaggcaactttactcagaattctgtgcaaatgtcacagaagctatcactttatcgtgaaggatgtaaattcagggtttttcattgttgttggtggtggggtgtgtgtgtgtgtgtgtataggtgtgtttagaatcagggtcttgctctgttgcccgggctggagtgctgtgatgcactcttagctcactataactttgaactcctgggctcaagtgatcctcctacctcagcctccctagtagctaagactataggcatgcccactacaccaggctaatttttaaaattttttttttagaggcaaggtctcgttatgttccccaggctggtcttggactcctggcctcaagtgatcctctatctcagcctcccaaagtgctggaattacaggcatgagctatgatgcctggctgcaaattcagtttgatcccaatgcagtgtgttggggaacagaagactcagaggactaatgaggagtccagtatgtaggatattggacccccaggccctttatgggccaccattccatgtgtgcataaaatgacaacttaccatgttgaaatgttttaccgttactgccaagtgaagtcttcacttttcaagatctcgagggaaagggaccggatgtatttatgtagcagggagttctgggaagcattggtcctgggagctatggcaggaccagcaatgacaccacgtggtgctctgtgaggccctgaggagaatcccctgctggtgggtgggggtgggggtcgggggctgggtctcagctcaaggcctcccattatgcgcgttctccacacggaaacctggcctctgtggtgcagctcctctgcacagctcagatcttcggtgccacgtcacg

SEQ ID NO: 28108 - DNA, 550 bp, Homo sapiens
gggtgtgtccccttgcatcgctgggaattcaacagacacagcccacagcatgacttccagaacacctgaatcaaattactcctcaggatgataggcacatataataggagtgtaaccgggttgggacagtggccacacagttgccttattttaggtaaagcaatggcagggaagaaatctttacgtaggaaaccgtgtgagtgtgtgtgtgtgtgattgtgttcgtgtgtgtgtgtgwggggggggcgcgtgtgtgtgtgtgttttttctgcgatgaacttccaagtatgtacttttggcagctgccatcatcctctcagcgacggaaagacaagaagtcgaaagtgcgctttctgacctgagaatagtcaatgaagtatagtatttagcacagcgtattttcttccctaatgagaaaggagagatccgtggaatcaaacagaccttccagcgataacctttccacgttgagcctattgattctctatctgagtgaaattacctgccagtggagaacaagacaagtctttgcatgaaatgctcttgtgga

SEQ ID NO: 28109 - DNA, 550 bp, Homo sapiens
gggtgtgtccccttgcatcgctgggaattcaacagacacagcccacagcatgacttccagaacacctgaatcaaattactcctcaggatgataggcacatataataggagtgtaaccgggttgggacagtggccacacagttgccttattttaggtaaagcaatggcagggaagaaatctttacgtaggaaaccgtgtgagtgtgtgtgtgtgtgattgtgttcgtgtgtgtgtgtgtggggggggcgcgtgtgtgtgtgtgtttttkctgcgatgaacttccaagtatgtacttttggcagctgccatcatcctctcagcgacggaaagacaagaagtcgaaagtgcgctttctgacctgagaatagtcaatgaagtatagtatttagcacagcgtattttcttccctaatgagaaaggagagatccgtggaatcaaacagaccttccagcgataacctttccacgttgagcctattgattctctatctgagtgaaattacctgccagtggagaacaagacaagtctttgcatgaaatgctcttgtgga

SEQ ID NO: 28110 - DNA, 550 bp, Homo sapiens
gggtgtgtccccttgcatcgctgggaattcaacagacacagcccacagcatgacttccagaacacctgaatcaaattactcctcaggatgataggcacatataataggagtgtaaccgggttgggacagtggccacacagttgccttattttaggtaaagcaatggcagggaagaaatctttacgtaggaaaccgtgtgagtgtgtgtgtgtgtgattgtgttcgtgtgtgtgtgtgtggggggggcgcgtgtgtgtgtgtgttttttctgsgatgaacttccaagtatgtacttttggcagctgccatcatcctctcagcgacggaaagacaagaagtcgaaagtgcgctttctgacctgagaatagtcaatgaagtatagtatttagcacagcgtattttcttccctaatgagaaaggagagatccgtggaatcaaacagaccttccagcgataacctttccacgttgagcctattgattctctatctgagtgaaattacctgccagtggagaacaagacaagtctttgcatgaaatgctcttgtgga

SEQ ID NO: 28111 - DNA, 1114 bp, Homo sapiens
tgttttctgcttaggttagccagagaagatttttgtttaaaaccagtcagacttggctgatatcccaaagtcctaattgggttatagaatgcaaatagcctcatcatctggccttaagaccccttcattcttgtgtattctagatagagccagtgtttcgatttcaggcatgagcctttgcccacacagaaaataaaactagcatgacagattctaggaataaggtttagagtggcattgaayggaatcaacattttatttgtgttaactcagtattttttgtattggctttctcttagccattaaattactatcctttaaatattacctcaatattgaagaaaaatgtagagttgttagaaaacgtctattttcttgctagaaacaagcaacagataatcagtgccacattgcaattttcctaaataaaaatggcatatattgaaactgggccctagcaggtccagaaagcacagacaaaatgtgtaagcaggcaattcagatttccataatatctgatctcaagagaaaatggtccataattttataatccatatcaatgttttcattccttaaaattttctgtccttcctgagggatctctaggtattacatattgctagaaagaagttgtttgtcataatgaaccagtaaatgacttgagtaaaaagtaattaatgactttgatatgtcactaatgtcctgacgagtatctcataagctgaacatctgaaattgttcttaaactcatatataggatactggtttctattatccacatagggaactaatatctggattagtagtattttagcctgagaacaaatgacttcctggtcctattaataagttaattactactaatatattattaaataaattcatttgctactactagtacttttacaattcactatttagccttataaactattgggtccatccaccccacctccatgattatacctgtgtatagcagcaacaaatatgacgtattttcacatgtggttttccttgtttgaattctcaaaaatcttattcaaagcaacaggaaaagattcactacaatatttcccagtaaaacttaatccacaaaaatacagactctcaaacc

SEQ ID NO: 28112 - DNA, 1315 bp, Homo sapiens
tttaactcaaacgtcaccttcatagctgggcagaccctgaccactctatccaaaactgtactccccacctgttttctcagttccccttattcggttctatttttttctcttataaactttaaactttatgtctgtctcttcccactaagatgtaagttccacagggcagggattttgttcatgtacatgttttgtttccaggactagaagactgtgtggcacacagcaggtgcttattaagatcttttgttaaataaatgaatgaatattaaatacttcaaaccctcaactcacttaaaattagggttgtttatataaagatgatggattactcatttttactatattgtggaaggataattttatttccagatgaktatttccagtttttaacgtgaaatctggagaactgtttactagcaatggttagacaactcaacgtcttatctttctaatgcttgtaagtaaaaagctttgtctggtttaggcagcatgaactttacatcaggtttatggtctttggttctatgaagggcaaaaaattggactgcatttttatattttatgaacatgttcataaacccttttattggtgctctcaacagctgatttcatggataatatgaaaagttgaaatgcattcagagaacagcacaaagaatgattttcttggtctaatttatacaaacagagtgagggttcacctctggccatgaactacggaaggtttttaaggctactagtgactggctaacctgctacttgtccttcctactaaaactgaatagaagagagaaccttcctctttttctgtgtagaaaacagaaattaattattagttgcctgaagtagatgggcctagttaaatcccaaagagattttaacaaccagggatgtgaacttcatcgtggctcagatatcaagttatcagacacatgcagaaggtgtggattgctaatgcattttacagctttgttgaatatctaaatttaggaagtataggctatagtttagaaagggtcacaaaataagatctcctactgatttatatgaaggtttgtacaatcagatataaccaggggcacctgtgagttggttcccatggtacctgttgctatgcatgctgatttttggggatcctggaaggggaaaggtcaccatgctgctgaggcagccaacaagcagaatgggtaaaatgtgtgggcaaagtgtccagtttctgtatttaatttgtggacatcaaaatgaagcaaacaagatttggccctaattagacatgatggaaaaaatgtgaaaatatccaagtaaggtgctg

SEQ ID NO: 28113 - DNA, 1216 bp, Homo sapiens
gaatttcacgggacagaactgggccaaaaggaagaagactgtttgcggcaggagggtagcagaggagcaagtggtaaacagaagacagatagaaggcagtattcttcagacccccatacatcactgaatgacagccctgatgaggaaactcaggcaagtagagtcttttattggagaagaagggtctttgcgagcaggtgaggacttgccttctgaactgtgcggcagggtgagcatcccaggtgtgctggctgggggcttgcatccagcacccccagcaaaaaaagccagggtgagctgggagaaagacgggtagtggggagggtttacggctgctttagaagagatagttatcactgaattaccatatttcaaattttgacatgggaatgtcttaagatcattattagataaaattaaactgactttattaaacagagtcacttcaggcctttttcttatgaacagagtgatccttagtcgggtaacatgtcaatgacagtgcactctgtgcctctcctgcattgtggggagggcacttcttaaggcaaagtaaaattcaggacctgcatgaaatcagttttgcttccatttgagttcgatttatgctattaatagttctgatcaccaaatttataacatttaaagtactgtctgttacccgatgtctggtatgtttacataaaacgtggttctgcccagtaacagcataaggtaaaaatgtgatttcccctaaaattataacatcatgtcatcctagagtgttacccacctgggagaggtacaaaaaacaaagcattagatttcaggctaagaacagccagttttaggagtaagaattacatcgaatagccttaagagcatttaaaaagtcaaggcatcttaaacttcagaaatgaaaacaaaaccaaaacaaaacaacaacaaaaacaacctaacccaaccacaaaactctaggagccaaggcactcagtatctgcctgttggttatgtacaaagccacaaatgggaggtcttttcaaattaatctggaaaatccaagcacaagactcttagcttgaaaagcctgacaactctgcctccaaatccaggcaactgtgcttccactcctcttcttgcttgccttaggaaaacttcactttagtaagataaggcaaaacagaaaataaaagagtygtttaaccaaactccaaaaacaaacaaaaatagaaaataa

SEQ ID NO: 28114 - DNA, 722 bp, Homo sapiens
gcctcacactcacactagyggactcagagtctgccttctcctcgatggttggccccatgagttcaaagtccatgactctctcagtagcaatatacaacgcagcctcacaagaagggttatgtgttgaattttgtccccaaaaatttatacattgaagtcctaacctgggctgggcatggtggctcattcctgtagtcccagagctttgggaggctgaggcgggtggatcacttgagcctaggagttcgagaccagcctgggcaatgtggtgaaaccttgtctctagaaaaaatacaaagattagctgggctcggtggtgaatgcctgtgatcccagttatttagtaggctaagatgggaggatcgcttgagcccaggaggttgaggttgcagtgagctgagattgcgccactgcattccagcctgggtgacagagagaccctatctcaaaaaaaaaaaaaaaaaaaaagtgctaacccccgtgaatgtcactttattttgaaagaggattattgcagacagaattagttaagatgaggtcataccagagtagggtggacccctaatatattgtgtccttataaataggggaaatttggacacacccacagacaggaagaaaaacactgtatgaagattggaggtatgctgccagaagccaagaaactagtagaaacaagtagagaggcccagaacaggtccttctctaccaccttcagaggg

SEQ ID NO: 28115 - DNA, 722 bp, Homo sapiens
gcctcacactcacactagtggactcagagtctgccttctcctcgatggttggccccatgagttcaaagtccatgactctctcagtagcaatatacaacgcagcctcacaagaagggttatgtgttgaattttgtccccaaaaatttatacattgaagtcctaacctgggctgggcatggtggctcattcctgtagtcccagagctttgggaggctgaggcgggtggatcacttgagcctaggagttcgagaccagcctgggcaatgtggtgaaacsttgtctctagaaaaaatacaaagattagctgggctcggtggtgaatgcctgtgatcccagttatttagtaggctaagatgggaggatcgcttgagcccaggaggttgaggttgcagtgagctgagattgcgccactgcattccagcctgggtgacagagagaccctatctcaaaaaaaaaaaaaaaaaaaaagtgctaacccccgtgaatgtcactttattttgaaagaggattattgcagacagaattagttaagatgaggtcataccagagtagggtggacccctaatatattgtgtccttataaataggggaaatttggacacacccacagacaggaagaaaaacactgtatgaagattggaggtatgctgccagaagccaagaaactagtagaaacaagtagagaggcccagaacaggtccttctctaccaccttcagaggg

SEQ ID NO: 28116 - DNA, 722 bp, Homo sapiens
gcctcacactcacactagtggactcagagtctgccttctcctcgatggttggccccatgagttcaaagtccatgactctctcagtagcaatatacaacgcagcctcacaagaagggttatgtgttgaattttgtccccaaaaatttatacattgaagtcctaacctgggctgggcatggtggctcattcctgtagtcccagagctttgggaggctgaggcgggtggatcacttgagcctaggagttcgagaccagcctgggcaatgtggtgaaaccttgtctctagaaaaaatacaaagattagctgggctcggtggtgaatgcctgtgatcccagttatttagtaggctaagatgggaggatcgcttgagcccaggaggttgaggttgcagtgagctgagattgcgcsactgcattccagcctgggtgacagagagaccctatctcaaaaaaaaaaaaaaaaaaaaagtgctaacccccgtgaatgtcactttattttgaaagaggattattgcagacagaattagttaagatgaggtcataccagagtagggtggacccctaatatattgtgtccttataaataggggaaatttggacacacccacagacaggaagaaaaacactgtatgaagattggaggtatgctgccagaagccaagaaactagtagaaacaagtagagaggcccagaacaggtccttctctaccaccttcagaggg

SEQ ID NO: 28117 - DNA, 1520 bp, Homo sapiens
cctggctaacacggtggaaccccgtctctactaaaaaaaaaaatacaaaaaaattagccgggcgtggtggcgggcgcctgtagccccagctactcaggaggctgaagcaggagaatggcgtgaacccgggaggcggagcttgcagtgagccgacatcacgccactgcactccagcctgggcgacagagcaagactccgtctcaaaaaaaaaaaagaacaggaaagaaaggaaaattcgcttggaagatacccaagccgtcgcctgaaggtccaagagagaagagagcaaaaaagggcctttaaccttgatcctaaaactttacaggctcacctctttcccatgattcttccctcagcgtgggtttcccgcatgcgcaatgctttccttagcctttggaattgagcacgcgcagtgcgtttagggagttacacgcatgcccacctgagactttttcctttttcctgtggcgtgtaccccggaaagtcatactttgccattttatctcttaacacacatgcccaagaatctgcttctccctgggatctgtattcagttaacacttttaatgtcaaggktatggaccatcaggagattgtctctccctggctgctgaattatgatttttagagaggcaatgcgataactgtggaactgtcatccgacatttctagtgcgtcgggggagagcccactcttgcctatctacctgtaacaaaactaggttttggagacaaagaaacttgttcaagatcacacagctagctatgagcacaactgttcacggcagaacttgctggaccttcttaatagtagagcgtcaaagctctgaaattccgccatttgaactctatgttccagtccaacaagactgttgcatcccccccacccccacttccgccaccacaccattcagaagagtctccccccatctcaccatggctgctcagcctttattcaccgttcaatttcagctcaaagccttccccctctgtaaatatcctccttggtattcccattgtttctttctcttccctgtaacagaacttagctcccagcactgggagtgcctgattatttgtaatgtccctccagaagactctaccctcttcggaaggcacagatcttacctatgctgctcccctttgcacccatggtacgtggcaccgggtctgatgcagagcaaatgctcaaaactatttctggaatgaatgagtcatctaactcctccatttactgttgaggaagtgaacattcagaaaggctgtgttgattgcccaatgccacacaggaagcaggagcacaggtataataagtcaaaagccaggtctcggactgggagtggtggttcacacttacagtctcagcactttgggaagctaagggaggaggcttgcttgagcccaggagtttgagaccaccctgggtaacatagtgagacctcgtgtctacaaaaaaattaaaatagctggatgtggtggcgtgcacatgtggccccagacactccagaggctgaatcagga

SEQ ID NO: 28118 - DNA, 633 bp, Homo sapiens
tgagttgttttagtgtcaggatagaaaaagattgatctagacaggcgtgagaatcagcaggaatctgtaccatgaagaggccactctggagacggtaatagagtttcgagtcctttgtctcactgagatttcttcccccattacctgcttatcaaaatcctttttatccatggaggcaaattttggaaatcaaaaaataattcttaaatatattaataaaaatttagttaaaaattaatttgaaaacrgaggccacactttccaaatataagaatgaatatctgagtaaaaaaagcggttgataatgagtgcaacacactaatgtagccatgatcctttatttgtaaaacaaagacagtttagaaaatatctacttaccacttatacaatttaagtaagaactatatgctgtatctattagttacatagttgagtttctcacttgatttcttttccaaaaagaaagaaatttccaataaattagagagatgtgtttaaaagcctcctaccctaaactgggtacttactgctttgagattatatttgttatagaaaatatttttggcagataattatatttcttcatttaaagtcaaagaaaatagatatattttcaaaacctaatgtcttgaa

SEQ ID NO: 28119 - DNA, 517 bp, Homo sapiens
ttaataatctttgatttgttttacttctccaagccaacatatgcaagtcgaaaaactgtgaacaatgtttccaaatatttctggcacaattaaatacaatacaacttttctgccaaaatatctctttttcttagatgtcaatcctctgtcatcagtccacatgatttttcatttctgcattctagttcaagtcatgacctatatttacgtagaatgtctttctataatttttttagtagcagttggtgagyggagaaacccctaatgatgatttcttcttattattttggaaaataagtcacaaaagaaaaatatatttatgactcaaataaattcttgtctccaaagagctgccctgaagttgtagttacattagcacattttaaaatctgccccttccaggggtaaattagctgtggagtaccaggaaatatttcgtaggcagaaaatttataacaatgttgcctttctgaatgggattatgtgctataggatcaagtcaaatactgacattaat

SEQ ID NO: 28120 - DNA, 567 bp, Homo sapiens
catgagaattgcttgaacccaagaagaaggttggagtgaaccgagatcacgccattgcactccagcctgggcgatagactgagacttcatgtcgaaaaaaaaagaaaaagaaagaaagaaagaaaagaagtaagacatactcgtgctgttcctgaattcaaagttagtcccttagtactcacgaaggactagaggaaggtgtaaaggtctgaagcatggagaagatacagggaccccaaagagctgcccatctrttaatctacaaaacacaaaacaattccctaggcagcaggtgaaaagtcacccagacaagtgaaagctacacccaagattcatgagttatttggggatagacatccttacctagtgagaccaggctgctatagttctccatcattacatttctgtataagtccttctgagcagtgtccaggcactcccattcctcctgagagaagtctataaacagatcctggaacatgcccaacccctgaaatgacaaacccaggcagcactgttgaaattaaaggaaaggtttttaagatgaaggaagagacggaagggtgc

SEQ ID NO: 28121 - DNA, 586 bp, Homo sapiens
cagttattgtacagtaaataartacttctcattttattctggcatctgaaactatacctacatgtacatatatatatacacacacataaatacatatatataaacatgtaacaatttctcatgtctctaactttagttttcagcattgagagtatagtcagtgtgatgtttttaccagagactgttgtaatcccaaatgaaaaggaaatatgtggtgctattgtggatgaatacaggctgctatagttgagcatcagaaaataaatatacagggtgagtttaagaagaatttttaagagatatattactgccctagaataatgcttgagtgctcattttccagtgtcaaagtagacatatggcagaagattccagagaacatttttcctatttatataaaatgggataaaggatatttaaatatagcattatctaagatttcctaatctatttattcatttagttacattctacaaatcttccagatataaatgtgatacaaagagactcatatattgtctatactctagggctatatatagggaaaagacagatatatgcattcaactgtaatttatggcagaat

SEQ ID NO: 28122 - DNA, 586 bp, Homo sapiens
cagttattgtacagtaaataagtacttctcattttattctggcatctgaaactatacctacatgtacatatatatatacacacacataaatacatatatataaacatgtaacaatttctcatgtctctaactttagttttcagcattgagagtatagtcagtgtgatgtttttaccagagactgttgtaatcccaaatgaaaaggaaatatgtggtgctattgtggatgaatacaggctgctatagttgagcatcagaaaataaatatacagggtgagtttaagaagaatttttaagagatatattactgccctagaataatgcttgagtgctcattttccagtgtcaaagtrgacatatggcagaagattccagagaacatttttcctatttatataaaatgggataaaggatatttaaatatagcattatctaagatttcctaatctatttattcatttagttacattctacaaatcttccagatataaatgtgatacaaagagactcatatattgtctatactctagggctatatatagggaaaagacagatatatgcattcaactgtaatttatggcagaat

SEQ ID NO: 28123 - DNA, 528 bp, Homo sapiens
catgtacttagcctaagggacaggacaataaacaaaacctaagaccctatagtcagtacatttttcactaaatcaaaaagcttctggtataaatgtgcattcaagccagagcatattgccatgctgggggaaggaagagcatgattatggcaaaaatatgtaaatgagcacctgctgaagaccaccagagccatctgctccttggaatcacgtacccatttaccaacctctttttgttagcttttcccctcagttgttcaggacatgaagggaggaccacattctctaattatgaattttaaagcattagcaataattgagatcatctcataaaatgaacttgccaaakaagtgcctgcttgatttagtggactagtatcttaaactgcttggagacctatgtgcgaatcttaaagaaattgtggccaaaaaaattcttaaagttgaccctatagattatcagaatcagaatgaggtattcattctagcattggctatatctctgatttatgattctagcatccttta

SEQ ID NO: 28124 - DNA, 528 bp, Homo sapiens
catgtacttagcctaagggacaggacaataaacaaaacctaagaccctatagtcagtacatttttcactaaatcaaaaagcttctggtataaatgtgcattcaagccagagcatattgccatgctgggggaaggaagagcatgattatggcaaaaatatgtaaatgagcacctgctgaagaccaccagagccatctgctccttggaatcacgtacccatttaccaacctctttttgttagcttttcccctcagttgttcaggacatgaagggaggaccacattctctaattatgaattttaaagcattagcaataattgagatcatctcataaaatgaacttgccaaagaagtgcctgcttgatttagtggactagtatcttaaactgcttggagacctatgtgcgaatcttaaagaaattgtggccaaaaaaatwcttaaagttgaccctatagattatcagaatcagaatgaggtattcattctagcattggctatatctctgatttatgattctagcatccttta

SEQ ID NO: 28125 - DNA, 533 bp, Homo sapiens
tgtgtgtgagagagagagagagagagagacagagagaggcagactggtatccgtcattccacatatacacatacatacacgcatcttgtttggtctgtttctctggagaactctgactaatacagtaccattgtccaaaataatttgactttagttataagggttttaattctggactttcaattccattccacttacctatatgtctatctttatgactccagtaccaattttaatgcttscatttcatgattcacttatcttatacaagattcacatatatacaagattcacatatataaacaagtttggatcagacttcaaacctatgtatggcacactcttcattttgaactctcatgcgatatttctatttctaccaagaactgagcagagatatgacaactcgactcatattaggtcattgtaatttttttttttatcatcaccaaaggtggaaagtcagaagatgctaactttgtgtagctgccttagttccaactttgtgtttaatttctcctgaagtctcatct

SEQ ID NO: 28126 - DNA, 567 bp, Homo sapiens
gagaatctgactgtgttgatcatgttatgagagagtagaaacatgcacaaatcaagacaaaatgagaattgtaatttttaaatttttcctctgacttagaggggtaagtggactcctttgtagaaaaccttatttgtctgcatttgacattggtaggatttttcaaccaatatgtatgtrtaaacacagtcactaaagttttattacaatgatgttttttgcttcttttttatgattttgttttggagattagtaagattggcacttctcaaaagatgtatataatgtctctattcatattccccatggaacatagcatagtgacttttattaaacactcagaatttaatataaattcattgagtttaaagtttactttggtgattggaataataatacatttcaattctgaaaagtttttaattttagaacaacttgcctcttactagatgaactcaaatatttctaaataattaaagttgtatatgtcacaaacaattgtgaattttatttttatctgaacctcataccacccctccccacctcccaaaaaagactccaaaaaaa

SEQ ID NO: 28127 - DNA, 567 bp, Homo sapiens
gagaatctgactgtgttgatcatgttatgagagagtagaaacatgcacaaatcaagacaaaatgagaattgtaatttttaaatttttcctctgacttagaggggtaagtggactcctttgtagaaaaccttatttgtctgcatttgacattggtaggatttttcaaccaatatgtatgtgtaaacacagtcactaaagttttattacaatgatgttttttgcttcttttttatgattttgttttggagattagtaagattggcacttctcaaaagatgtatataatgtctctattcatattccccatggaacatagcatagtgacttttattaaacactcagaatttaatataaattcattgagtttaaagtttactttggtgattggaataataatacatttcaattctgraaagtttttaattttagaacaacttgcctcttactagatgaactcaaatatttctaaataattaaagttgtatatgtcacaaacaattgtgaattttatttttatctgaacctcataccacccctccccacctcccaaaaaagactccaaaaaaa

SEQ ID NO: 28128 - DNA, 708 bp, Homo sapiens
tacaattgcaattcaatcaaagatgagagagagttattaaarttggcaaattggtttacatgattgtagaggccaaggagttccacagtctgccatctgtgacctggagaaccagaaaagcaagtgctataattcagtctgagtctaaatccctgagaacaaggaaagccaattgtataagtcctcatctgagtccataggcccaagaactaggagcaccaatgtccagtgcccaagggcaagaaaaagatggatatccaagctcaagcaaagaaagtgaatttgctcccctttgccttcttgctcttttcaggccctcagtgattggatgatgcccacctaaattgatgaggaagattttttttcccacagactaccaactcaaaggctcatcttttccagaaacatcctcacagacacacccagaaataatgttttagcagttatctgggcaccccatagcccagtcaagttgacacataaaattaaccatcattgctagtaacaaattttggattcagacacagatatttaggatttaatctatgttctgttgtaatttagggtaaaacctatgctctgttacaatttactgcctctccaatatacacagagcaacatggtaggtactgaaagaggttaagatggaggattaggtttctgttctcataaaatttagaaaccaggagccaaatgcagtataaaggc

SEQ ID NO: 28129 - DNA, 544 bp, Homo sapiens
tcagtaggaaccaaacaagataagaccatgaattcagaaaaatatgtataagtcagtcagagagatagaacaagaatttgggggttggttacagatatataataataatcataatcataatttgtatgaacaaataggttgattttattaaaacaagaatgaaataaagtaagaacagatgcaggacaaaaatctcaaaaaagaccagaagtcacatgtcattcccagttacctttgaagaaggataacytcccacatctatgaaaactagagtaaacagtaataactggcaagattaactggttcattctttgaaaggatgttcatagtaccaagaaaagagactttgagagattgatttggggttgtacataagattaattttattaggtctccatgctctgaaacaacttgtctaatgcaaaatccccagacctccccctaacatgtccaaagatgacataaactacatgtttgtgcgttccagttgccaccaagctctatgagtgacttttaccacgtgaatataaatcgatgaaataca

SEQ ID NO: 28130 - DNA, 544 bp, Homo sapiens
tcagtaggaaccaaacaagataagaccatgaattcagaaaaatatgtataagtcagtcagagagatagaacaagaatttgggggttggttacagatatataataataatcataatcataatttgtatgaacaaataggttgattttattaaaacaagaatgaaataaagtaagaacagatgcaggacaaaaatctcaaaaaagaccagaagtcacatgtcattcccagttacctttgaagaaggataacttcccacatctatgaaaactagagtaaacagtaataactggcaagattaactggttcattctttgaaaggatgttcatagtaccaagaaaagagactttgagagattgatttggggttgtacataagattaattttattaggtctccatgctctgaaacaacttgtctaatgcaaaatccccagacctccccctaacatgtccaragatgacataaactacatgtttgtgcgttccagttgccaccaagctctatgagtgacttttaccacgtgaatataaatcgatgaaataca

SEQ ID NO: 28131 - DNA, 570 bp, Homo sapiens
gagaggcaaagtcatattgctcagagcatccaatacaaggaaaggakgaatctatggccatttattgcaatctatacaagcaaagaaacacatcctaatgagctctattctccctagcacctaatataaggtttggtacacatggacaatattttaagtctgttgttaaatgaatacataagtctttagaaatatagttaatccattgctgataagagaaatttcaaaattaaaactgccagtgcttttttaaaattagggtattaacctttatcaactctagtcttatgtcactatccttaccctttctcttacattggcatgaaaatttgttttctccaaataactaagctgagatcaggctaatttgacatcttcttgaaaatttgtgctagttctctaatctagcttctattatcatcaaaataacatgggccataccagatataattgtataatctgcttataaatataaccccaatgttctgtcccacagcatccaaaagcatacacaaccacaattcatcgtggcaggaatgcaggcttattcacagctcatcacaaacaaac

SEQ ID NO: 28132 - DNA, 627 bp, Homo sapiens
attcattcatttattcagtcaacaaatgcatcttaagcgattactacacaccaaagaacaaggggtggcattggtatttcaaaagggaaaagatagcaccttctcagaactttcagtcccaatttctcacttgtattacattattgtagttgattatccttggtcaatattagggatgagtcagattttttactatgtctttattagtatatacagcaattaagagtgccgattttggaaaagacagatctgggtttgaatcttgggtcatcatatatggtttacgtgatattggacaggttatctaagctctctacacttaagctttctcatttgtaaaataggaatgttaatgcttactgcatattgtcattttgaggattaaatgaggtaagatatacgaaacaaacagtacagttactgtcaaatggaaagtcttaatgaatctgacatgattattaatcatttggtacattttcagcaacataattactcaaattgttaataaattattgaaataatataaakgaagggattatataaactattgggttataaaaggtaacatattgtctgcaatatctgcatatccactaaatcattctctgttaccacttgttttctaaa

SEQ ID NO: 28133 - DNA, 779 bp, Homo sapiens
tgttgtaataaagtaccacaaactggatggcttaaacaatagacatttattttctcacagctctggaagctagaagtccaagatcaaggtgcgggcagggttgttgtcctgtgaagactgagagggtagggtctgtcccaagcctctctttggtttatagatgaccatcttcacattcttcctgtatcttcacatcttcttccctttgtgtatgtctctgtgttcaaatttccctgtttataagaacaccaggctgagtacagtagctcatgcctgtagtcccagcactttaagagcctgaggtgggtggatcacttgagtccaggagttcaagaccagcctgggtgacatggcaaaaccccatctctacaaaaaaattaaccaggcatggtggtgcccacctgtagtctcagctactcaggaggttgaggtgggaggattgcttgagccagggagtcgaaggctgcagtgagctgagattgtgccactgtactccagcctgggcaacagagcaagaccctgttcccccacccaaaaaagaaagaataccagtcccactgcattagagcctgttctaatgacttcataataacttgattaactctgtaaagactttgtctccagataagatcacattctgaggtactaggtgttagacttcaacacaaaattgaagggcatagccagggaccacacgractaatggagaaggcatctcacttcaaatttgaagggcacacagttcaacccacaacatccttctaggacaaaaggatccc

SEQ ID NO: 28134 - DNA, 564 bp, Homo sapiens
tgctgtgaggaaactgagattcagaaagatttgatttgctaaagctgcactactaggaagtggtagagcataatttaactaatactgtggatttaaatcatatactcttttcacttcagcattactccaatggtgtcaatgtagctgtgccccttaaagaaaatgtccatagtttctgaaacttgctaaaatattcttaagaagatatcttaatggattagcagcttgtagagtgtgtgtttccttgtctgttagatatccaaagagtcgtaacctaaaaagtcaccatacttcagctaaaatcatgatctctctttaatacattttttattctccacaacttcaactaacatgccactctccaagcgatactcctagaaataacttcagtctccctaattactttcaccctytccatccagataatcaacaaatcatgccaactttttcctggaagttcctcaatccatcttttcttttccatgcttgcacagctacaaccccggtttagactcatcatttctcacacatattactgaaaattcttactctctcatctccacc

SEQ ID NO: 28135 - DNA, 1531 bp, Homo sapiens
atagctgatcctattatttataagctttaagaggcagtgacatatcaataaacaaatgccttaaaaatcagtttcctttggatccagaatgtttttaacaattttctattaaagaacatggcatatacaaaatctgttttattggtattttcaaatatcacccccaagtttcagtatttgcaggacatttggaaatgtttataagcaaaatttttgtgtctctaaatgagcataataaaatctaaaataaaaacacacttgttggcacaaaagctgtcatgtttcatgtagcttttcctttcctaattggaagagaaaaatatagaaattgcagggtagtttgcatccatcttcacaaaaggtgttgaaggaataattttggaaaatcaagtttatatacagttctcttggtatttagcmtttcttgcacacatacacatgttcatgattatggactactatttgccaatagtagaaaatattgatttgatttacctcgtctaagaaaaagagaaagaactcagactgtgaatattttagaatgacaaaatgatattttagaattatgattaaagttgtgacttgttttatatccaatataaatttacttaaaatgtatttcttacttcttgatataaaactttatgttgtaagctttatggtaaatcttttcagagaaactgggacatgcagcagagatggctagtggcttgtccactatccattcttatgttatttcttttattatggattccctatgttcttagaagatcacaacgaacctagctaaaaattttccatcattaggtaagtcttttgtgaaagctcctaaatatgtctctggtaacaaattccttctttttctcttgctaatttctcccttcattcagcatgaattacatgcataaatactggacctccagcgatcatcttgagggtgtgaaaagagcttgcagatgcaaactacataataagaaaacacaacagaaagatgtaaggagccatggtcaattaggtcatcgtgataccacattacaatgctgggctgcttatcactgcaattttattatgaagaggagaaaaaaataaattttattgaagttgtttcattgtatctctgttattgtatcagccaaattgattttctagcagatacaagatatgtagtgtataccagttgttgtctttctataacagtaattttcctttggtggaaaagtttgcttccactatgcatgattttaataaatataatctttctttggagcctgtctttctttccattatcgatcagctcatagtgtacatttgaattaagctctgtaaaacagcacaattcatccttacccccagcctaaatattcatcttacagtgagcatgtgtataaattgtacctgttgaaagattttcaggatctgtgcacttagcatgagagagaaagatagaaaaaaaaattatactctctcccataggtggtgttatgaagaaagatggggtctactaggggccctatttcctatccaacataga

SEQ ID NO: 28136 - DNA, 583 bp, Homo sapiens
cagttgaagggtaaggggtgaagattataagacataaagtgcagcaatctatgaatggagaaccaccctgaagggagccatggtctcagaagagactccaaggtttctcagaaggatacattacttggcgtgtctagcagagtcaaatttgtaagagtggacaaagttacagccttaagagtgtttgaaagtccatgagaatgtggtattcccagtatgcagtgtgaaataatgaggtaagccttgcaaagaatgctcagtgtcttagactttaaaattgtgctaattctgctttgaaagacttgaaataaagcttagatgatttatccttcttcaagactcatttatagagtcaatcaaacttcaaaacatagcaaaaatgcaaaccaaaagcctacaacaaattatacatatataagcgttccagttgccaagaatatatgtatttttgtttttgttttaaatcacaatccartaataaacctagtattcagtcttggcaaaatatgagtcaaactcatttacaaagcttagaaaatacagaaatagttacaaagaacattcttttttgtcacaatcttaa

SEQ ID NO: 28137 - DNA, 605 bp, Homo sapiens
ttgaaaagccttctagatttaagaatatagtgaattcaaacaggtagtcaatatggcattactgtaatagrgatataaagagctttcctgaagccatagtccctgtaaaattttcaaatgaaacatctttgcatttcaaactctaagtcagacgtttcagtaaaattgtatatgtcaaaagaaaatatatcaacggtgggttcatattctgatttccttggactttgcagtggtgagaattaagctgttctctttagaatgctggccaaggctgaaaaatacttgttatagaatttcaggtggtaggtaacaaagcctgcctcgtttattcataacaagtgctatgagggttgaaaaaatggcacttaaactgcatggagaaaaatggagcatctttctgaacatcaatggtgatatctgaaaacactttgctgttcctcaacctgaggtcacgtgtgtgcattagacctcattctaccttttgtgaaaagatctgtttgtctttggggcataaagggaataagccagatcaatatctgatggtcactcacatcctctgactgcatggaagctgcccagggttgaacttcccttctactcatgca

SEQ ID NO: 28138 - DNA, 605 bp, Homo sapiens
ttgaaaagccttctagatttaagaatatagtgaattcaaacaggtagtcaatatggcattactgtaatagggatataaagagctttcctgaagccatagtccctgtaaaattttcaaatgaaacatctttgcatttcaaactctaagtcagmcgtttcagtaaaattgtatatgtcaaaagaaaatatatcaacggtgggttcatattctgatttccttggactttgcagtggtgagaattaagctgttctctttagaatgctggccaaggctgaaaaatacttgttatagaatttcaggtggtaggtaacaaagcctgcctcgtttattcataacaagtgctatgagggttgaaaaaatggcacttaaactgcatggagaaaaatggagcatctttctgaacatcaatggtgatatctgaaaacactttgctgttcctcaacctgaggtcacgtgtgtgcattagacctcattctaccttttgtgaaaagatctgtttgtctttggggcataaagggaataagccagatcaatatctgatggtcactcacatcctctgactgcatggaagctgcccagggttgaacttcccttctactcatgca

SEQ ID NO: 28139 - DNA, 605 bp, Homo sapiens
ttgaaaagccttctagatttaagaatatagtgaattcaaacaggtagtcaatatggcattactgtaatagggatataaagagctttcctgaagccatagtccctgtaaaattttcaaatgaaacatctttgcatttcaaactctaagtcagacgtttcagtaaaattgtatatgtcaaaagaaaatatatcaacggtgggttcatattctgatttccttggactttgcagtggtgagaattaagctgttctctttagaatgctggccaaggctgaaaaatacttgttatagaatttcaggtggtaggtaacaaagcctgcctcgtttattcataacaagtgctatgagggttgaaaaaatggcacttaaactgcatggagaaaaatggagcatctttctgaacatcaatggtgatatctgaaaacactttgctgttcctcaacctgaggtcaygtgtgtgcattagacctcattctaccttttgtgaaaagatctgtttgtctttggggcataaagggaataagccagatcaatatctgatggtcactcacatcctctgactgcatggaagctgcccagggttgaacttcccttctactcatgca

SEQ ID NO: 28140 - DNA, 1036 bp, Homo sapiens
tcctcaggccacccrtacaccagagtagttgtgcacctcatactacagtcaagacagtgccctccttcttggggttcccaggcttccagcataccagagtagtaaaacctcttctcccagcaccatggatgaggcagcatcttgtcctctggcggcttcaagcccctggcacactagagtagctgtaccccttagtgccacagctgatgaggtgtaccatattccaagggtctggaggatatgctgacccatgtagccacactctgtggggctgatcagacatagtgccttgcatcccagggaatcagagtcttggttgtgctgtgccaccagatcctccaggctgaatagccacagtatcctgcttatttacaattgggctagccccttgcagtctgagctgctgagatgccttacttccgtggagaaggtagtcattggtgtgctgcttccctcccaccagggatcaagccacagtagtgccttgacattcctgggtccttgctgctactgcacctggccacatagaccctgggccactgccatatcctaccaccccaagatccatagttaccattgtgcaatatgtcatcacctggagcactggctgctatgccctggtttgggttctaaatagcagctgagaacctcctcctcaaagcctgagcatccagaacatcataccttcttcctcagagctgggtcaaggctttgccctgccttccagggtcagaaccacacctacatcttagacccctggggtctaactgcttgggtttgctcagtgcaatagaccacagcttagtgggagaattacatccatttctgtcttggaaagtgaacctgtaccttaagtcctaggtgctacaatagtttcacaagaccctgagcccaggaacccaactctatagctgctcagagcacctatgacctgaatccttttgccaatgcagctgtttgtgggttgtgtcagacatgacaacaagaaaaattccctcagttaagatactttgctatagggaaggcaagaacagga

SEQ ID NO: 28141 - DNA, 1036 bp, Homo sapiens
tcctcaggccacccatacaccagagtagttgtgcacctcatactacagtcaagacagtgccctccttcttggggttcccaggcttccagcataccagagtagtaaaacctcttctcccagcaccatggatgaggcagcatcttgtcctctggcggcttcaagcccctggcacactagagtagctgtaccccttagtgccacagctgatgaggtgtaccatattccaagggtctggaggatatgctgacccatgtagccacactctgtggggctgatcagacatagtgccttgcatcccagggaatcagagtcttggttgtgctgtgccaccagatcctccaggctgaatagccacagtatcctgcttatttacaattgggctagccccttgcagtctgagctgctgagatgccttacttccgtggagaaggtagtcattggtgtgctgcttccctcccaccagggatcaagccacagtrgtgccttgacattcctgggtccttgctgctactgcacctggccacatagaccctgggccactgccatatcctaccaccccaagatccatagttaccattgtgcaatatgtcatcacctggagcactggctgctatgccctggtttgggttctaaatagcagctgagaacctcctcctcaaagcctgagcatccagaacatcataccttcttcctcagagctgggtcaaggctttgccctgccttccagggtcagaaccacacctacatcttagacccctggggtctaactgcttgggtttgctcagtgcaatagaccacagcttagtgggagaattacatccatttctgtcttggaaagtgaacctgtaccttaagtcctaggtgctacaatagtttcacaagaccctgagcccaggaacccaactctatagctgctcagagcacctatgacctgaatccttttgccaatgcagctgtttgtgggttgtgtcagacatgacaacaagaaaaattccctcagttaagatactttgctatagggaaggcaagaacagga

SEQ ID NO: 28142 - DNA, 1036 bp, Homo sapiens
tcctcaggccacccatacaccagagtagttgtgcacctcatactacagtcaagacagtgccctccttcttggggttcccaggcttccagcataccagagtagtaaaacctcttctcccagcaccatggatgaggcagcatcttgtcctctggcggcttcaagcccctggcacactagagtagctgtaccccttagtgccacagctgatgaggtgtaccatattccaagggtctggaggatatgctgacccatgtagccacactctgtggggctgatcagacatagtgccttgcatcccagggaatcagagtcttggttgtgctgtgccaccagatcctccaggctgaatagccacagtatcctgcttatttacaattgggctagccccttgcagtctgagctgctgagatgccttacttccgtggagaaggtagtcattggtgtgctgcttccctcccaccagggatcaagccacagtagtgccttgacattcctgggtccttgctgctactgcacctggccwcatagaccctgggccactgccatatcctaccaccccaagatccatagttaccattgtgcaatatgtcatcacctggagcactggctgctatgccctggtttgggttctaaatagcagctgagaacctcctcctcaaagcctgagcatccagaacatcataccttcttcctcagagctgggtcaaggctttgccctgccttccagggtcagaaccacacctacatcttagacccctggggtctaactgcttgggtttgctcagtgcaatagaccacagcttagtgggagaattacatccatttctgtcttggaaagtgaacctgtaccttaagtcctaggtgctacaatagtttcacaagaccctgagcccaggaacccaactctatagctgctcagagcacctatgacctgaatccttttgccaatgcagctgtttgtgggttgtgtcagacatgacaacaagaaaaattccctcagttaagatactttgctatagggaaggcaagaacagga

SEQ ID NO: 28143 - DNA, 1036 bp, Homo sapiens
tcctcaggccacccatacaccagagtagttgtgcacctcatactacagtcaagacagtgccctccttcttggggttcccaggcttccagcataccagagtagtaaaacctcttctcccagcaccatggatgaggcagcatcttgtcctctggcggcttcaagcccctggcacactagagtagctgtaccccttagtgccacagctgatgaggtgtaccatattccaagggtctggaggatatgctgacccatgtagccacactctgtggggctgatcagacatagtgccttgcatcccagggaatcagagtcttggttgtgctgtgccaccagatcctccaggctgaatagccacagtatcctgcttatttacaattgggctagccccttgcagtctgagctgctgagatgccttacttccgtggagaaggtagtcattggtgtgctgcttccctcccaccagggatcaagccacagtagtgccttgacattcctgggtccttgctgctactgcacctggccacatagaccctgggccactgccatatcctaccaccccaagatccatagttaccattgtgcaatatgtcatcacctggagcactggctgctatgccctggtttgggttctaaatagcagctgagaacctcctcctcaaagcctgagcatccagaacatcataccttcttcctcagagctgggtcaaggctttgccctgccttccagggtcagaaccacacctacatcttagacccctggggtctaactgcttgggtttgctcagtgcaatagaccacagcttagtgggagaattacatccatttctgtcttggaaagtgaacctgtaccttaagtcctaggtgctacaatagtttcacaagaccctgagcccaggaacccaactctatagctgctcagagcacctatgacctgaatccttttgccaatgcagctgtttgtgggttgtgtcagacatgacamcaagaaaaattccctcagttaagatactttgctatagggaaggcaagaacagga

SEQ ID NO: 28144 - DNA, 634 bp, Homo sapiens
tgagcagtcttgttgtaagcagccttgaaatggaatcaaggctttgcttagtttgaataaatgttctttaaatatttgtttgcttttataaatgagggattttattgctccaatttctataacattgcattatgcacatgctttggagctagtcaggtatagttgtaaataattactatatgaccttgggtaagtaactcaaacttttataatctcagtttactcacctacaaaatgggcatagtaataactgcacctacctcatagtatcactgtgataataaaatgagaagcattttgcacagtgcctggtacacagcatgtgaaatattagcaccatgtttgytacatagaaaacactttataaatgaggtatattattaaaatttgttgcattaattaaaagctatctgccacaccttgatctcccccataaggccatttctttctgattttcttgaacaatgaaattatgcttcatatggaactattttattgtaatatttccactgcaggatatattatttattcagtgttctgtagatccattaagggatgtctctcttccagagttaactgctgatcattgatcaattttcaaagggtttattaacttttttattttaaaaaatat

SEQ ID NO: 28145 - DNA, 1998 bp, Homo sapiens
tccactcacaccattgtgcgggagcctggctgcttctgcagcccccagagagtgtcctgtgagaagctgtcagaggcttgggatgtccagctggagaaatgagacatgcatggctgtctcagggcacagggaaagtgtgggtggccccaggctgcacttctggggggccagttaaagggcagccaggtttcggctggggcacaggccagctgtgccggtgggtctcaggtggaacaggctgagtcgcccatatggcggtatagtaagaccagttgtgaggcggacaccttaagcatcttgacctgtgtcatcctcctggcagccacaygagcttgcgcaccactgtgctctccatcgagtagttgtggaggctgagacttggagaggccgagccgcttgtctgagctccgggaggacagagctggagtctgaactcagatccgtggatctgcactgtctcgtgggagccacgggccccagagctatttacttgtagttagaaaatgagcagttcagttcctaagatgcataagcctcctgtcaatggctcactgcactgccacatgtgggacagggcaggagcagagccacgcgggtcctctgccggtgctggtgcacgtcccacgtctgagcttgtattcccgactgtgccgccttcctcctgatttgccatgtgatttttaaaaagcatgggcccttttttaaagttgtttttgaatcttttgagtctccttttgcagcaattttaggcctgtagaaaatctgccagtttagtccaaaaagtggtctccctcattcacctgagagccggctgccagcctcatgtcccgtcaccctgatgattttcatgtgctttacgaccatcggggcattgtcctgcacggccaccatgcagtcatggcactaggaaacgaacactgttgccggccgtcttcagaccttactcgagtttggtcatttgtcccagctttatccttttcagtaaaaagaaggatcccagccccaagtcacctgccgcatgtgtcctgtttctcttagtctctgtcagcctgggactgtctcccgggctttgactttggacaccacaacgcttgtgaagaggacagtctagttatctgtagagtggcccttgttttgggtttgtctgctgttccctcacggccagggtccgaacgttgtgtctttggcaggaacatcacagaagtgagactccgctcttccacttgcctctgcgctttctcacccctatataattataagtcctttgtcagggagtttactgtctggtctttcattatgccattaaagtcctgctctgggctgtaggggatgttggggatgtggtggttcctctgtcacagccttctccagggctcagcttacagcaactccaggccgacgtcctcatgtcctgacgcctttgtgagccgagttgcccttgtggagacagcctgctggaccagctctgtgggttctggtgttttgtaaaacaatgaccatgggccagagagtcagagacctggattccagtcctggctttgtcgcttcctgcctgtgtccttagccagggaacgttacccacctgagcctcagcctcctgccctgggaaacagagctggagggaatcccgtgcctgcctctgagggccactgtacagctcagtgggttgatccactcagggcccctctctgggcctggcacacgctggatgttgaggggatgctgaatccctgtccccttctgacaataccccattccccaccccttgagcttccaggcagctagctctgcacctgagccaaatgctaacagaaatcccagatgccaaggcgggttggagctggattgtcctggatttgtaatttggcgtgtgacacctagagtaaccaggcgaggaaataaatcacagtgcggcccagcattggcagattgctcttgtgcaggggaacagtgggctcgtttgtaaatgcaggctgaagtgggaggctgcgtgggaag

SEQ ID NO: 28146 - DNA, 1998 bp, Homo sapiens
tccactcacaccattgtgcgggagcctggctgcttctgcagcccccagagagtgtcctgtgagaagctgtcagaggcttgggatgtccagctggagaaatgagacatgcatggctgtctcagggcacagggaaagtgtgggtggccccaggctgcacttctggggggccagttaaagggcagccaggtttcggctggggcacaggccagctgtgccggtgggtctcaggtggaacaggctgagtcgcccatatggcggtatagtaagaccagttgtgaggcggacaccttaagcatcttgacctgtgtcatcctcctggcagccacatgagcttgcrcaccactgtgctctccatcgagtagttgtggaggctgagacttggagaggccgagccgcttgtctgagctccgggaggacagagctggagtctgaactcagatccgtggatctgcactgtctcgtgggagccacgggccccagagctatttacttgtagttagaaaatgagcagttcagttcctaagatgcataagcctcctgtcaatggctcactgcactgccacatgtgggacagggcaggagcagagccacgcgggtcctctgccggtgctggtgcacgtcccacgtctgagcttgtattcccgactgtgccgccttcctcctgatttgccatgtgatttttaaaaagcatgggcccttttttaaagttgtttttgaatcttttgagtctccttttgcagcaattttaggcctgtagaaaatctgccagtttagtccaaaaagtggtctccctcattcacctgagagccggctgccagcctcatgtcccgtcaccctgatgattttcatgtgctttacgaccatcggggcattgtcctgcacggccaccatgcagtcatggcactaggaaacgaacactgttgccggccgtcttcagaccttactcgagtttggtcatttgtcccagctttatccttttcagtaaaaagaaggatcccagccccaagtcacctgccgcatgtgtcctgtttctcttagtctctgtcagcctgggactgtctcccgggctttgactttggacaccacaacgcttgtgaagaggacagtctagttatctgtagagtggcccttgttttgggtttgtctgctgttccctcacggccagggtccgaacgttgtgtctttggcaggaacatcacagaagtgagactccgctcttccacttgcctctgcgctttctcacccctatataattataagtcctttgtcagggagtttactgtctggtctttcattatgccattaaagtcctgctctgggctgtaggggatgttggggatgtggtggttcctctgtcacagccttctccagggctcagcttacagcaactccaggccgacgtcctcatgtcctgacgcctttgtgagccgagttgcccttgtggagacagcctgctggaccagctctgtgggttctggtgttttgtaaaacaatgaccatgggccagagagtcagagacctggattccagtcctggctttgtcgcttcctgcctgtgtccttagccagggaacgttacccacctgagcctcagcctcctgccctgggaaacagagctggagggaatcccgtgcctgcctctgagggccactgtacagctcagtgggttgatccactcagggcccctctctgggcctggcacacgctggatgttgaggggatgctgaatccctgtccccttctgacaataccccattccccaccccttgagcttccaggcagctagctctgcacctgagccaaatgctaacagaaatcccagatgccaaggcgggttggagctggattgtcctggatttgtaatttggcgtgtgacacctagagtaaccaggcgaggaaataaatcacagtgcggcccagcattggcagattgctcttgtgcaggggaacagtgggctcgtttgtaaatgcaggctgaagtgggaggctgcgtgggaag

SEQ ID NO: 28147 - DNA, 1998 bp, Homo sapiens
tccactcacaccattgtgcgggagcctggctgcttctgcagcccccagagagtgtcctgtgagaagctgtcagaggcttgggatgtccagctggagaaatgagacatgcatggctgtctcagggcacagggaaagtgtgggtggccccaggctgcacttctggggggccagttaaagggcagccaggtttcggctggggcacaggccagctgtgccggtgggtctcaggtggaacaggctgagtcgcccatatggcggtatagtaagaccagttgtgaggcggacaccttaagcatcttgacctgtgtcatcctcctggcagccacatgagcttgcgcaccactgtgctctccatcgagtagttgtggaggctgagacttggagaggccgagccgcttgtctgagctccgggaggacagagctggagtctgaactcagatccgtggatctgcactgtctcgtgggagccacgggccccagagctatttacttgtagttagaaaatgagcagttcagttcctaagatgcataagcctcctgtcaatggctcactgcactgccacatgtgggacagggcaggagcagagccacgcgggtcctctgccggtgctggtgcacgtcccacgtctgagcttgtattcccgactgtgccgccttcctcmtgatttgccatgtgatttttaaaaagcatgggcccttttttaaagttgtttttgaatcttttgagtctccttttgcagcaattttaggcctgtagaaaatctgccagtttagtccaaaaagtggtctccctcattcacctgagagccggctgccagcctcatgtcccgtcaccctgatgattttcatgtgctttacgaccatcggggcattgtcctgcacggccaccatgcagtcatggcactaggaaacgaacactgttgccggccgtcttcagaccttactcgagtttggtcatttgtcccagctttatccttttcagtaaaaagaaggatcccagccccaagtcacctgccgcatgtgtcctgtttctcttagtctctgtcagcctgggactgtctcccgggctttgactttggacaccacaacgcttgtgaagaggacagtctagttatctgtagagtggcccttgttttgggtttgtctgctgttccctcacggccagggtccgaacgttgtgtctttggcaggaacatcacagaagtgagactccgctcttccacttgcctctgcgctttctcacccctatataattataagtcctttgtcagggagtttactgtctggtctttcattatgccattaaagtcctgctctgggctgtaggggatgttggggatgtggtggttcctctgtcacagccttctccagggctcagcttacagcaactccaggccgacgtcctcatgtcctgacgcctttgtgagccgagttgcccttgtggagacagcctgctggaccagctctgtgggttctggtgttttgtaaaacaatgaccatgggccagagagtcagagacctggattccagtcctggctttgtcgcttcctgcctgtgtccttagccagggaacgttacccacctgagcctcagcctcctgccctgggaaacagagctggagggaatcccgtgcctgcctctgagggccactgtacagctcagtgggttgatccactcagggcccctctctgggcctggcacacgctggatgttgaggggatgctgaatccctgtccccttctgacaataccccattccccaccccttgagcttccaggcagctagctctgcacctgagccaaatgctaacagaaatcccagatgccaaggcgggttggagctggattgtcctggatttgtaatttggcgtgtgacacctagagtaaccaggcgaggaaataaatcacagtgcggcccagcattggcagattgctcttgtgcaggggaacagtgggctcgtttgtaaatgcaggctgaagtgggaggctgcgtgggaag

SEQ ID NO: 28148 - DNA, 601 bp, Homo sapiens
atttgggaaaaagtcttgcaaacatcttctggtcaagttcccctcagatctcactgccaggattgggtcacataatcatgcttaaaccaatccttaacaaggagaatgagacctcaataggactggatcattctaatmatgatttgcccctgaactcggcaggagagatcatttcctcaaatcagaacaatgaggtgagaacaatgaacaaattcaggcttcttccaggaaggaaggtgagcaactctcaccaagaaaacagcgatcacactggtgtatgatccagacactatttcacatggaaaaccaataaaaaacggaggatgtttaacctacacaggggaaggctatgatgaagtcttcaaatatgtgaaagtcttcaaataccatgtgaaagagaagatccctgattaatttaatatgaggccttacaaactatagctctctaacaatatgctcagtgcaaactcatgagagagcagtcattagacaattcacatacaagcagaatcatcatttccagagaatatactctttggatagaaggttgaactagtgaatctaagatttttttctatcccttctctagtttggctgaatc

SEQ ID NO: 28149 - DNA, 1305 bp, Homo sapiens
ctcttaacagtatataaaaatgataaaattccatagcaggctgacttacatcaattgagccacaaacctgatcaaacgcttttgggcggctgggctgagaattacagattagaggatcataacattgtcaacaggctttttcttcttgaggcaagcccttttaaacagaactttgtgaacacacagtaggcatctaataaatactgttaagtggaagactgaatgtcttgggtcaaaaaatctcccaatttactgatgagggaatccaagacacaatggaagtcacgtaacaagtcacagctctgagactggaatgcgtgagctatcagtttctcaaatttctgcttcctctccctcaggaaggaaaccaacaagcaccgtaaaataagaaaaccatcaggacttttcactttctcttggaagttatttgagcaaaaggaactctgagaatttcccttagtccacagataacaaagataaaaaaatcaagttcataaaaataatatttaccctcttttgaagtctgaaataaaccagttcttccattttttgactgttcatttttagtttgttgtgacgagtgaccttctggcaacttggagctattaaacggattcttcctctgctggggacaaatattgtttattaaacttattttaaatgtcatgacagcaactcagtgttggcaaatgcctattatcttcaattttgatagttttatcccataaactccattatttggcatgtttgaaaaacagttgtcctgattaatctgcttagcacagagttaccatatatgccatttaaaaattatataaaatayatgcaaagccagagtcctacaaagttagctcagaatcagacacttaaatcaaaatcccacattttacaggtgaaaaaacttggccccggatatagcaaagaccagatcaaggtcaaaggaaacttgggtctctaatcaggtcagagtcccaccagtgattcttctaccataccagactctcagtgtgctagatcacaagtgtacaaaatacaactgtaattgacctttcctaaagattttggagacattttaggtatcttgaagtgcttcatagtcattattattatcatcaattctaatgataaaaatggtatcaatagaggttttaaaaattaatataggaatcaataacaatgtttactgtctacagtttaataaattagcaattctctcccagaagcagatctctaacagagatttaggaagctatgcataggaatataggaataaggactgacatggaactaacaagccttattcca

SEQ ID NO: 28150 - DNA, 564 bp, Homo sapiens
cctcacttatctagtttctgtacaaaggtacagggtttatccaactatgacactgtttagccacaaaggcacttgtgtcagtgtgttttgcrgtgctatataggaatacttgagactgggtaatttatttttaaaacagaggtttatttggctcagaattccacaggctgtaccaaacggggctagcacctgcttggcttctggtaagggcctgaagaaatttttattcacagtagaaggtagagtgggcacaggtatatcacagggtgagaaggggagcaaaggagaggagaggggggagtgctaggctcttttaaacaaccagctctggagtaaactaagagtgagaacttactcattaccatggggaaggcaccagccattcattcatgagggttctgcccccatgacaccaacacctcccacagggccccacctccaataccggcaatcatatgtcaacatgagatttggaggagacaaaatatccgaagtataagcaccctagctggcatcataacatcgagggtttcatatagtcatttctactttatgatgtgggac

SEQ ID NO: 28151 - DNA, 564 bp, Homo sapiens
cctcacttatctagtttctgtacaaaggtacagggtttatccaactatgacactgtttagccacaaaggcacttgtgtcagtgtgttttgcagtgctatataggaatacttgagactgggtaatttatttttaaaacagaggtttatttggctcagaattccacaggctgtaccaaacggggctagcacctgcttggcttctggtaagggcctgaagaaatttttattcacagtagaaggtagagtgggcacaggtatatcacagggtgagaaggggagcaaaggagaggagaggggggartgctaggctcttttaaacaaccagctctggagtaaactaagagtgagaacttactcattaccatggggaaggcaccagccattcattcatgagggttctgcccccatgacaccaacacctcccacagggccccacctccaataccggcaatcatatgtcaacatgagatttggaggagacaaaatatccgaagtataagcaccctagctggcatcataacatcgagggtttcatatagtcatttctactttatgatgtgggac

SEQ ID NO: 28152 - DNA, 1049 bp, Homo sapiens
tccatgcagtttaaacctatgctgctcaagggttaactgtataaataaatctatctatacacactcaggcacacacacatacccacgaccaactggctttgtttctctggagaactctgacgaaatacaatgccaggatgccaagactgtgtaaggctggagacgatcaatgcaccatctttagtatggtgtcctgagcccagccaactcagtaaccgactgtgtgtggcagtgattgttactcttttcaaatcactgacattcagagggctgggcttaggtggacaattgccctttgggactgtcttccctcactgatgtcactaagcacctgcttcctctctggtcttcctgtgcttggcccctgtgtattctgacacacctggagaccatgcctcttggactctacccctcagagtccctgaaaccatgtgttagcctctttgcagcgacactgtgcagtatttttcacttcaggaggcatcctccaaccttccaaaagccatctgagataggaattatgacaccgccagctcatatcaggaagcaaggctcacagatgcacagggaagactatgcagaatttgaactgaaatcttccagccccaaactccaaacctttccacgtgggctactggctggggagcatggagacaggagggcagggctgcaggagctggtccacctggaaggaggagggtgagatcccgaagcaatgccgccagctgtgcttctgtatcatgccttgaccttggacttcccagtaycaagagcggtgagaaacacatattatgtctaaactgccaagtctgagatattttcctatagcaaatgtttgctatatttcctatagcaatattttccccaaaagacagcacttctcctgggtattttaaaagggtaagagggagaaacgagagactggaaggaacatacaaactttgaggagcttttcccaacagtgtagcttagcaatgaagaaataagtccaatgtggttacatggctggaaaaaactgttgtcatcagagccatgaatagaccacaggg

SEQ ID NO: 28153 - DNA, 1049 bp, Homo sapiens
tccatgcagtttaaacctatgctgctcaagggttaactgtataaataaatctatctatacacactcaggcacacacacatacccacgaccaactggctttgtttctctggagaactctgacgaaatacaatgccaggatgccaagactgtgtaaggctggagacgatcaatgcaccatctttagtatggtgtcctgagcccagccaactcagtaaccgactgtgtgtggcagtgattgttactcttttcaaatcactgacattcagagggctgggcttaggtggacaattgccctttgggactgtcttccctcactgatgtcactaagcacctgcttcctctctggtcttcctgtgcttggcccctgtgtattctgacacacctggagaccatgcctcttggactctacccctcagagtccctgaaaccatgtgttagcctctttgcagcgacactgtgcagtatttttcacttcaggaggcatcctccaaccttccaaaagccatctgagataggaattatgacaccgccagctcatatcaggaagcaaggctcacagatgcacagggaagactatgcagaatttgaactgaaatcttccagccccaaactccaaacctttccacgtgggctactggctggggagcatggagacaggagggcagggctgcaggagctggtccacctggaaggaggagggtgagatcccgaagcaatgccgccagctgtgcttctgtatcatgccttgaccttggacttcccagtatcaagagcggtgagaaacacatattatgtctaaactgccaagtctgagatattttcctatagcaaatgtttgctatatttcctatagcaatatyttccccaaaagacagcacttctcctgggtattttaaaagggtaagagggagaaacgagagactggaaggaacatacaaactttgaggagcttttcccaacagtgtagcttagcaatgaagaaataagtccaatgtggttacatggctggaaaaaactgttgtcatcagagccatgaatagaccacaggg

SEQ ID NO: 28154 - DNA, 1049 bp, Homo sapiens
tccatgcagtttaaacctatgctgctcaagggttaactgtataaataaatctatctatacacactcaggcacacacacatacccacgaccaactggctttgtttctctggagaactctgacgaaatacaatgccaggatgccaagactgtgtaaggctggagacgatcaatgcaccatctttagtatggtgtcctgagcccagccaactcagtaaccgactgtgtgtggcagtgattgttactcttttcaaatcactgacattcagagggctgggcttaggtggacaattgccctttgggactgtcttccctcactgatgtcactaagcacctgcttcctctctggtcttcctgtgcttggcccctgtgtattctgacacacctggagaccatgcctcttggactctacccctcagagtccctgaaaccatgtgttagcctctttgcagcgacactgtgcagtatttttcacttcaggaggcatcctccaaccttccaaaagccatctgagataggaattatgacaccgccagctcatatcaggaagcaaggctcacagatgcacagggaagactatgcagaatttgaactgaaatcttccagccccaaactccaaacctttccacgtgggctactggctggggagcatggagacaggagggcagggctgcaggagctggtccacctggaaggaggagggtgagatcccgaagcaatgccgccagctgtgcttctgtatcatgccttgaccttggacttcccagtatcaagagcggtgagaaacacatattatgtctaaactgccaagtctgagatattttcctatagcaaatgtttgctatatttcctatagcaatattttccccaaaagacagcacttctcctgggtattttaaaagggtaagagggagaaacgagagactggaaggaacatayaaactttgaggagcttttcccaacagtgtagcttagcaatgaagaaataagtccaatgtggttacatggctggaaaaaactgttgtcatcagagccatgaatagaccacaggg

SEQ ID NO: 28155 - DNA, 504 bp, Homo sapiens
ttcttttcccagatctaattcagaataacacgtgtgttactacatgatgatttaaaatgtttacaaaaacaagacctctacctatgctcctattagtgtgtgtgtgtgtgtgtgtgtgtgtgtgtgctggtgtgtgtatatctttatttaataataaaactagaagggcaatgaattcgaaacggaggcttttcttactagcctttttaagatagacattgctgacacatggacagggattgaattagtacaaatattaaatatcattaagccttcttttttgagttctgtctgcacatcaacttcacctgaagaatgtttgtaaaatacacatgcttgttccccacccaaaatctattgaatcagaatctctagggagtgaggaccaacagttgygcttttaacacctccactccccccttgtattggacggtaaaggccagaaaagattaccttaggcattctcatttcagaagctaaaacagacattcaattttctatacc

SEQ ID NO: 28156 - DNA, 611 bp, Homo sapiens
cagaaactaatagagcaacaagtcactcagttcctacccaccccagggagggcattaatgtattcatgaaggatctgccctcatgacccaaacacctcccattaagcccacctccaatgctagggatcaaagttcaacaagagatttggaggagtctaacaaaccatagcaattactatcaatatttcataaggctagtatttctagagtcaatttctcaagtgtatgcaaaggaaaggagaggtaacaattcccagaataaaagcagggatttgagtaatagggtaaaatgattttgagaaatactgaattaaaagtaaatgaatttctctactacaggatttcttagtgctaaatctgctaatactaatgattgatcccaaggaaaaagaatgtgcaaggtttcctaaacttattagaccatggcactttttttccggaagcatattggtgagatagtaatctgtggatacactttggggaaatatttcactagagaatgaattacaaaaattgtcaaagaaccaggttaagattatkccataggaatgccttatacatatgtgtgtggcatttgagtacataaaatgatactaatttatattattata

SEQ ID NO: 28157 - DNA, 544 bp, Homo sapiens
cattaaaagtaccatcatcctgacagttcagtaggcttaaaagcttgaagtyaatcatctgtcttaatacctcttctcactctgtcacccaggctggagtacagtcgtgcaatcacggctcactgaagcctccacctcctgggttaaagtgattctcttgcctcacagccccccgagtagctgggattacaggtgtgcaccaccatgcctggctaagttttgtatttttagtaaagacaggatttcaccatgttgcccaggctggtctcaaactcccgtcccaagtgatctgcccacctcagcctcccaaagtgctggaattacaggtgtgagccaccaggcccagccttctccctcttaatattaattttaaaaccatctatctacttactccataatttctccaagatttgcctaacctttctgctcttattagatcctttgattgtagcccagtcacattcctctagtctgttgaaatgacttctttatgctcttctgcttttatactcacctttttatcttaaaattatcatcaaactat

SEQ ID NO: 28158 - DNA, 636 bp, Homo sapiens
ttttccttatgaaatgtaaaagacattttattataggctttgaataaaataaacactcattttacattacaaagttaacatgaagaatttgctatcatgtgaaataatgttaatagttattaaagttkttttttttttacctctaataaataaaagtatctattaaactgtggactctttgtatcctccaaaccttttaattgtctggtaataaacaaaaatatgtcctgttaaaaaaaaaaacacattaatttagacacaaatacttttctttcacaacacactaatagtatgtaactttattatttgtgtacaaactacaataaaagaaaattctcctttagatgaatgtcttgggattggcctaatccattattcaaaatgattcaaaagatccaatcaaataaaattatactctttagaagcaaaaataaactataaatctttaggctttctctttcagagcggaccacaggctctatatctcattataatttcttctactatcgtgctttcactttactcactatctccaccttgcatcggggcaaaaactatcttcattttaaggagttggatatgagtatttccattactattacctacaagtaaatagtaatttttagccaatgtttt

SEQ ID NO: 28159 - DNA, 536 bp, Homo sapiens
tgaagcgtgtgctaaaatctcagaattcactactataattattcatggaaccaaaaaccacttgtacctcaaaagctattaaaatttaaaaaaagttttttaaagaaaaaatgtttcagtattaagagcccttcatgtgactaggaattgaggataccaacaacaaaataagtagataaaataacaaataaaaggattaactgctgtctctgtgttcaaagagcctacaaatagatatacagacacatgaaagatcacaacacaaagaagtaacagcatgaaaactaggtaaattgagtataataacttttgtattttgtttggattatagctaaaacagtgaaaagaggcaagggtagacttggtgatattttttatctatcaagactcagggcagcccaagtacatccataatgccattattaatgacacygaaggcctatttccaaattattatcattcagtgccatctagtgttaaactgatggatggattttttcatattattttgtttttgtaaattccttgtccagctc

SEQ ID NO: 28160 - DNA, 597 bp, Homo sapiens
ctctgattcgttgcagcacagggctgagagtggagggacactgaaggcctcccgctgtgatgtcaatctgaatctcttcaggcctgcctgcatacctccaattttcaggaaatacaggggacggatacaagtgcaaacagacaaatccagaccatgggacatattacaggacaactgttctgaaatcttgaaggtaatgacatggaggagggggcaaaaggaagggagagagcaagagagactgatstaatttaagaagaccaaagggcaatgtaactaagtgcaatgtgtagatcttacatggaagtgcactaggacaaaccagccgtaaaaagtattttagagagaactgggaaatttgaatatggactggataaagatgacgccaaggaatcattgttaattgtgtttgctgtgataatggcattgtggtgaatgtgaggtaatatttatatttttttagaactacatattaaaatatgaagggtgaaatgatggtgtagaatttttcattaacacccttctgccaaaaaaataatgttgtgaatatttcaaaacctcaacaattactgaatctggatgatcaatacaagggtg

SEQ ID NO: 28161 - DNA, 597 bp, Homo sapiens
ctctgattcgttgcagcacagggctgagagtggagggacactgaaggcctcccgctgtgatgtcaatctgaatctcttcaggcctgcctgcatacctccaattttcaggaaatacaggggacggatacaagtgcaaacagacaaatccagaccatgggacatattacaggacaactgttctgaaatcttgaaggtaatgacatggaggagggggcaaaaggaagggagagagcaagagagactgatctaatttaagaagaccaaagggcaatgtaactaagtgcaatgtgtagatcttacatggaagtgcactaggacaaaccagccgtaaaaagtattttagagagaactgggaaatttgaatatggactggataaagatgacrccaaggaatcattgttaattgtgtttgctgtgataatggcattgtggtgaatgtgaggtaatatttatatttttttagaactacatattaaaatatgaagggtgaaatgatggtgtagaatttttcattaacacccttctgccaaaaaaataatgttgtgaatatttcaaaacctcaacaattactgaatctggatgatcaatacaagggtg

SEQ ID NO: 28162 - DNA, 995 bp, Homo sapiens
ggttctgcagtgggtaagggtttggtggagggaaggaagggaagaggtgggcattcaggaaaaagctgggyggaactcaggaaggcatggaggtgtggtcctgttggaggagagcttgcaagaagagcaagaaggcagtgcagcacattggtaatacctctcaccgagcacttgctgtgtgttaggctctgtgactctcattattagtttctgtcgctggaaaatgggaaggctaatagtttctcctttctaagagttattgcaagcactttaagaaatactgtgtacaacatttttgaacaatgagtgcttgacacataaaagtttgttgttactattattatttactattaaatccttcaaagctcacatgaggaagaccagggaacatgttcaaaaccatggagctagtaactgacaaatatcccctgttgcccggcaagtcaagcagagtcttccatcctcccgctgcccaccctccagccccatctctcaaccttccagtggtgttgccagggtggacctagattggctcagagcccccgttctgcctcttcctggctgcaagaccggagtaagtcactttgcctttctgaaactcagaaagcaaacttccagtttgctcatttgtgaagtgggggtcatgtttcttatagggattttgtaggaattcaataatgttttccaagtagagtgcgtagcccactgtttggcacatagttactcaaggagtattaagctgttaatgtgaagtgaagtgagcccttgggttctctgtgacctaagtttctctagaccctgacatttccatacttaacctttactctggaacagtctgggacaaaagaaacatatcggaaacctaggctttgacagccttctctccctctttttgtaacacaccattttcttaattcaatgccgtatgaagcaatacagcttctaaattcattgatggtgtctgccggcaaggaaatgtcagagcacttggatcc

SEQ ID NO: 28163 - DNA, 995 bp, Homo sapiens
ggttctgcagtgggtaagggtttggtggagggaaggaagggaagaggtgggcattcaggaaaaagctgggtggaactcaggaaggcatggaggtgtggtcctgttggaggagagcttgcaagaagagcaagaaggcagtgcagcacattggtaatacctctcaccgagcacttgctgtgtgttaggctctgtgactctcattattagtttctgtcgctggaaaatgggaaggctaatagtttctcctttctaagagttattgcaagcactttaagaaatactgtgtacaacatttttgaacaatgagtgcttgacacataaaagtttgttgttactattattatttactattaaatccttcaaagctcacatgaggaagaccagggaacatgttcaaaaccatggagctagtaactgacaratatcccctgttgcccggcaagtcaagcagagtcttccatcctcccgctgcccaccctccagccccatctctcaaccttccagtggtgttgccagggtggacctagattggctcagagcccccgttctgcctcttcctggctgcaagaccggagtaagtcactttgcctttctgaaactcagaaagcaaacttccagtttgctcatttgtgaagtgggggtcatgtttcttatagggattttgtaggaattcaataatgttttccaagtagagtgcgtagcccactgtttggcacatagttactcaaggagtattaagctgttaatgtgaagtgaagtgagcccttgggttctctgtgacctaagtttctctagaccctgacatttccatacttaacctttactctggaacagtctgggacaaaagaaacatatcggaaacctaggctttgacagccttctctccctctttttgtaacacaccattttcttaattcaatgccgtatgaagcaatacagcttctaaattcattgatggtgtctgccggcaaggaaatgtcagagcacttggatcc

SEQ ID NO: 28164 - DNA, 995 bp, Homo sapiens
ggttctgcagtgggtaagggtttggtggagggaaggaagggaagaggtgggcattcaggaaaaagctgggtggaactcaggaaggcatggaggtgtggtcctgttggaggagagcttgcaagaagagcaagaaggcagtgcagcacattggtaatacctctcaccgagcacttgctgtgtgttaggctctgtgactctcattattagtttctgtcgctggaaaatgggaaggctaatagtttctcctttctaagagttattgcaagcactttaagaaatactgtgtacaacatttttgaacaatgagtgcttgacacataaaagtttgttgttactattattatttactattaaatccttcaaagctcacatgaggaagaccagggaacatgttcaaaaccatggagctagtaactgacaaatatcccctgttgcccggcaagtcaagcagagtcttccatcctcccgctgcccaccctccagccccatctctcaaccttccagtggtgttgccagggtggacctagattggctcagagcccccgttctgcctcttcctggctgcaagaccggagtaagtcactttgcctttctgaaactcagaaagcaaacttccagtttgctcatttgtgaagtgggggtcatgtttcttatagggattttgtaggaattcaataatgttttccaagtagagtgcgtagcccactgtttggcacatagttactcaaggagtattaagctgttaatgtgaagtgaagtgagcccttgggttctctgtgacctaagtttctctagaccctgacatttccatacttaacctttaytctggaacagtctgggacaaaagaaacatatcggaaacctaggctttgacagccttctctccctctttttgtaacacaccattttcttaattcaatgccgtatgaagcaatacagcttctaaattcattgatggtgtctgccggcaaggaaatgtcagagcacttggatcc

SEQ ID NO: 28165 - DNA, 545 bp, Homo sapiens
taaactcggtcttaactgaaaagcttgtttcttctcatggtactagttttacccagtctatttctgaaataatgagattatattttatgtaaaactttaggaggagtttcctacactctgggagaatatttagatctcggaagtctaataacccacaacaactgcagagaggctgcagaacggaagaccatttgcacaatctggattcttccacctcgtgcagtcagccctgttcttcctcattatttaagtgaaaaatattctaaacactgctcttcggttgctatgaaagctttgtggcaaaaggtcatctgatccaccatagcctttaacaaatgaaaatttaaaccaaagatgtctaatacaattttataaagttttacagaaatggaaattatgattatctttcttaggaaactgttccaatttttcattaccctcaaagtcaaartttatttttctttctttctttctctttctttctttcgttctttctttctttctttctatctttccttctttttctttcaatctctctctctctc

SEQ ID NO: 28166 - DNA, 542 bp, Homo sapiens
catacacataaatatatacaaaacacacatacacatgcctagaatctacatagagaaatttagtagaaaaaggaggtataataaagttattacatttctttaattctccagatgttcttgaagagcaactggattagaaaccgtagatctagtgaatggtttattttttaggtaagcatattgagtccggaatagggaaataattttcataattattcatgcatttatatatttaaaatttatttttggcctattttggggagaaacagaaaacttctatcagggactgtaaacaccatgaagacaagcaaagacacagaaagggatgaaatatgacattgttgcaagctttggatatattttagagagggtctagactgtaactttatgatgtggggatatcagaaacaatatctgatgaagtgatgtaaaatgacactgagaattattttcagcgagccacttttaaagatgagcagacracgaagattgtctttattatgtcagaaatcaattgaccatatatatgtgaatctggttct

SEQ ID NO: 28167 - DNA, 1637 bp, Homo sapiens
catttgttattagccttcagaaacatacatgcacacatgtgaacacatacacatacacacacatatatctgggaaacatttcttttacacttttaggtttattagttagaaggcccattaattaaagtgacaaaggaatgattaacaatagaagagacaaagtttactcatacacatataggggcacacaaaagaactggctcaataattagagaccagggtttatatacctaatttgccacatgaaagcaaaggatgagaaagccttctatgggaagaacaaatgaacttttagcagaacaaataggagacaaagtttccgatagtgttcgttttatgcagattcctgtgttccctttcttcttccaggcagaaaatcctcccgctagaggcaatttatggaggtttcagtctcagaagtctctgtctttagtataagaaaagcactgataaagcttctttctgcatttgttgaatctgaaatgtcttcagataaaaatatttttatgccactttggtataatttgaatcctttcaaatcccaaattgtgattctgaaaatctaacttcctatgcaataaactgtcacccattttctgtggattggttaactataaaatacaatcttcagtttcgtaaaaaatatagaagaaccagtagctgcacagtcacagagacatgtagcagacacacaggcacacacacacactctcacacacacacacacacatctctcaaggaatattggttaaaggaagtgtactgacttctccttcttcttagtgacgtccaagagctgagccattttgcagattttgagattcttctgaaacaagaacttgaaaccaagcatcaatgggaaaaaaactcacccacgatcagaccacatgaatatttgagagccagaattcaaatatgcctatacttatatacttgtacacagacctcctcctcatttacattaataaaaggcctttaaatttcctgcctgtattttatgtgccatctttttctagaattgtgaaaatttgcatattttattttaaaaagtaattctgcagtcacagatggtttctctttagggtgactccaattctgccagttaacagaaaaaccaaaacaacaatgtaaagctattctgttatattagagaatatcgtaattcaccaaaaatcagccttcagggaacttccgtaaaagagtacaaccatttgaaaatgctaaaagttacacgtttaacaaaatggctctttgaatcccacatggcctatgttcatctatcattccagatggtgtttatggttctgatcacttggccatccatcaaatctcagtccagcagcactgttattctcataattgttaagaatgtaagcatgctgtttgttaaatgatattattgcaatatgtagtgaataatagttttggttttaaaggcatgtttatatctatcaaacagagttcatagcaataaatcttatctgttaaaatctataaaagtctatgaatttgtttawgactgcttgacaatgaaagttatggaaatttataattaaatgtgttaaagcattttttacttcattgtttctatacagctcataattgctttcagaagaatctcattgtcaagtattttg

SEQ ID NO: 28168 - DNA, 417 bp, Homo sapiens
tgacttacacacagtaagtattattctcaaaattggaagattttgtttcacattttacttcagatgaaataaaatggggactttcgcagaataatatattaatatatattmatgtatatattaatatatacacatatcatttactctctaccctaagtaatgtcagggtttgtgagacaaatgtagagttgccagaatcagagtctacaagcaaagtatacattttgaaaatataattttttggaagaaattagattttgattagttatgtcaggaaaacatcacatcttttataaattaatacttatatattgtctataattttaatgtacctgactaaaaaccccaagggtgaaatttattgaaaattattattaaataatattggaaacaaaagggcagtaaattatataataa

SEQ ID NO: 28169 - DNA, 492 bp, Homo sapiens
agggggaggggggaggtgggagggacagcattgggagatatacctaatgctagacaacgagttagtgggtgcagcgcaccagcatggcacatgtatacatatgtaactaacctgcacaatgtgcacatgtaccctaaaactttaattaaaaaaaaaaaagtacacattcaatgaattaaaaactaagcaaaatcaccaagtgataagagctcttgattttaaaatatwtgtagactttgtgagtttagacataagagacttgaattagagggtagggagcatagctcaaaacacgtctaaagctccgaatctcaaaataactggatttcatctcccaaacattgtttctaagttctacatcaaaagaaatataagcatttacttgtacaatattttagtcccatatgtaattccattaaatcataccagtacaggggaggcagagataatacagcggtcagctggtatggaaaccataggtgagctgcttag

SEQ ID NO: 28170 - DNA, 1247 bp, Homo sapiens
cgggctacaataataaaataccttaggctgggtaatttataagtaacagaaatttattgctcacagttttgaaggctggggaattccaggatcaaagaaccagcagatttggtggttgacgtcttgttctctgtttcaaaggtggtgtctctttgctgtttcctgacatagcagaaggggcaaacagctctctcacactacttttgtaaggtcactaattccactcatgagggcttcatcctcatgataaaatcacatcctaaagacgctatcacattggtgatcaagtttcaacgtataaattttgaggggaacattcaggccttagcagaggggctaaaaaaccttgtgagtaataaatgagaatggaaaaagagctgtaattgatgcattctgataggacagtagcttttctaatagcttatttctgtacgaattaacatgaatactttaatgaatataggtttgtatggaaggggagagacataaaaggtggataaatcagtgtctgttaacactatagtcttaaaatttgatttaggcaaccctccaagtaaaaatttgaccacctaaaaagggaattatattttaattcaaaatatttctattgtatgtgatatttaaccatctgttacagataataaatgaggaaaatacaaacaatggataatcaaaaatattgtatatagatagtatcatgtgrcattgtggctttggtttctaaacacttaatccttttcttcttgtagtcaaggtaaaattaaaataagcccctaactatgagaactcagtgaagatttagaatgattataaagtaaaggccccttggtcttttatcattttgggtaatttgctttatccctaactgcatacaaatatttgagtattggcagaatgtgtttaatgagaaaatattctaacaaaaattgtaggcatgaactagactttgaaagtaactaaaatatgctctttagctcagatttttaggcaaaaaaatcacagaaatgaagggatccttttcctgctaattacattcgctaaagccttctttacttccttattcctgaggctgtagatcagaggattcaatatggggatcaccactgtgtagaacacagaaaccactttgtcctgatcagggagtagctggaactaggtctcaggtaggtatagatggaggtggtgtagaagaggattatggctgtcaggtgagaggcacacgtggagaaagctctgtgcctcccctc

SEQ ID NO: 28171 - DNA, 1259 bp, Homo sapiens
acaaatgtaaaaattttaaaggctaaaatgttcagctttttaggattatttttccaagaggaagggactatatctttgggtagagatgccataaagtttgagatccctgcatctgtactrtatctttatcactgaattttctcttcaatgtcattggtaacccagttttagctaaatccaatggacttgttttattattttaacataataatatctctgaagatttacatatttacacccttctttctatgtatttatgcctttatttatatttgtttccttctaattatctcataaagtaatatagacattgactttcagggaaggtgcataagagattagtgttttgacaattgtagtctcttgactgggtataaattgtatactgatcaagagaacattgcagtttataagatgtagagtaagttctagattttcacgggtcactcaacgacaagcaagaagaaggagaaggagaagaaggacaaggaagaagaagaagaataggaagaagaagaagaataggaaaaagaagaaggaagaagaagaagaaaagaagaggaagaagaaggagaagaagaagaagaaaaagaagaagaagaacaaggaggaggaggaggaagagcaggaggaggaggaagagcaggaggaggagggaggaggagaacgaggaggagaagaaatgtagaaaaagaagtttgaatggatacttttcaaataaagtaaatatctttgttagtcactgagttacatgataaagatgacattattttgttgacttgtattttcacatcttgattttattatataagattattgtgctttctatagctaaaattaaacaaaacaaaacaaaacctcaatgtcgaagaatgagtgaagcccttaattacaaaaacctattgaattatattcacaggatataataaaatatataattttcagttattacatctttctcttctttacctttctaataaactattttagagcatacatatttgcaattattgactaggttaattaaatagtttctgccacaggcattcaataaatatttttgaataaagtgatgaataaaagaattaatagatttaactcatttttaatgtttaaaaatattattgaagtcagttttataaatgattaaattcatttttcattacttcttagaatggaagcatgtctgtagaagtcatttatataaggatgacttcaggatcctaatattttactctaataagtttcattgtgttact

SEQ ID NO: 28172 - DNA, 1169 bp, Homo sapiens
gcatacaatctttaattaaactcaatattttaaattgaatttataaatcccttttaattttcttcttaagctttttatgtatctgaccaagaaaaaatatcaacacaagaatataagtactttttgtatattaaatacattaatctataaatatggtaaatttcacattatcktaattacttcaatactgtttaaaaacacaataaatcacattatatttttaattcaaaaataacccagctctaaatcaatttctgaattatatatttgacatttgtttcacaaatatgatcagtctgatcatctatctaccaaattctcttacaggcaatgtctctcaaaagaccgaagttgtgtatctgccaagagattcctggctagcgtacaagattttcttcttacaattgacaccgactgatcccttctttgagttaccgtaacagtgacttcgcaaataataaagaggttggtttatagcatgtaccattgatttgatttcatttaataatgctctatttctccattaattaattaataattaatctccattaattaattaatctccattcattaattcttccctacctccattcattaattgactgtgttgctgggtttaaattatttttctcttttttacatagcaatatcttccatttgcatccaaaggcattcttatgttggtctattgggatcttcacactatatgtagttttgccatcattctgtgaactttatacaatatttgaattgatatttaactttattatttcatttatttgcatataacaccctgtttttctgttacaatactaacaacagaacttaacaaaagcatccaagcacacaaataatcaaccttatgtaaaaatcaataaatcatgtgaaatgtatgtgaattccctacgttgtaatatatgtctaatactgctttgggataatgggagttagaaaaaatgtgtaagacataattcacagatctatagtgtctactgagttatcagggagaatagcatacattttcagtataaataagacagaaagagagcacggaattcaattaattccctgtgtgtgtgtgtgtgtgtgtgcacgtgtgtgtgtgtgtaaaatcgtactcataaaactaattcaataagagattattaaagttttggagtataacatga

SEQ ID NO: 28173 - DNA, 1169 bp, Homo sapiens
gcatacaatctttaattaaactcaatattttaaattgaatttataaatcccttttaattttcttcttaagctttttatgtatctgaccaagaaaaaatatcaacacaagaatataagtactttttgtatattaaatacattaatctataaatatggtaaatttcacattatcgtaattacttcaatactgtttaaaaacacaataaatcacattatatttttaattcaaaaataacccagctctaaatcaatttctgaattatatatttgacatttgtttcacaaatatgatcagtctgatcatctatctaccaaattctcttacaggcaatgtctctcaaaagaccgaagttgtgtatctgccaagagattcctggctagcrtacaagattttcttcttacaattgacaccgactgatcccttctttgagttaccgtaacagtgacttcgcaaataataaagaggttggtttatagcatgtaccattgatttgatttcatttaataatgctctatttctccattaattaattaataattaatctccattaattaattaatctccattcattaattcttccctacctccattcattaattgactgtgttgctgggtttaaattatttttctcttttttacatagcaatatcttccatttgcatccaaaggcattcttatgttggtctattgggatcttcacactatatgtagttttgccatcattctgtgaactttatacaatatttgaattgatatttaactttattatttcatttatttgcatataacaccctgtttttctgttacaatactaacaacagaacttaacaaaagcatccaagcacacaaataatcaaccttatgtaaaaatcaataaatcatgtgaaatgtatgtgaattccctacgttgtaatatatgtctaatactgctttgggataatgggagttagaaaaaatgtgtaagacataattcacagatctatagtgtctactgagttatcagggagaatagcatacattttcagtataaataagacagaaagagagcacggaattcaattaattccctgtgtgtgtgtgtgtgtgtgtgcacgtgtgtgtgtgtgtaaaatcgtactcataaaactaattcaataagagattattaaagttttggagtataacatga

SEQ ID NO: 28174 - DNA, 672 bp, Homo sapiens
tttggttttccccccacacttgccccacatttccttttattcattgtaaacttcaggaaagtaaatgccttaggggagccattaagttcttcagtttcctaaatccytcaagaaacaaagaagaattttcaataatatatgtactatatccttttaatgagaggattaactccagggactttattcccattttgttagggaaccacaaacacagaaaagccagggtgacaccactttaaaatcagctccatcttaaaactagcaatgcacattccttccctgtcactgcccatggtcataagatgattacagttaaggaagcagttgaataaagcgtgtaaggacaaactcctctgataaaaaaaaagtctagatgcttcagtattgtgtaacaactttgcttttaaggtaattatagttatgctttgatttgcttagacactaaaatgccaaggatagttttctttaaatcaacagaatgataaattttgctacgatgtcagctcacctgcaggtagacatagcttagcctcatttttacacaggtaagatttcaacataaataaagcttaaagatgagacgttcctctgcttgctttctgaggacaccatgatctgtatttgagtagctttcaatgaactacctcttatcacactctgtgacttgccttg

SEQ ID NO: 28175 - DNA, 582 bp, Homo sapiens
atttacactcccaccagcaatgtattagggttccagtgtcttgtcaccacttgttattttgttttttctctttaaattatagtcatactaataggtgtgaaatggtrtgaaccagttgcatttttaaaagtacgtttaagataatttgtttatgaaatatttaaactttggttaaaagtgccctgagttcaacagttttaaaaaattgtcatattttaaaacatttatataattgctatggtctgaatatttgtgttcccccaaaattcttacattgaagttccaactttcaagatgatggtattaggaggtgtatggcctttggaaggtgaattaggtcatgggggtggaggccccatgatgggattagcatctttataaaaaacacctgagagagaaagagagcacatgccagagacccccacctctttcatcacatagtgttacagtgaaaagaccaagagcattattagcataacctgggaacttgatattaatgcaaattctcaggtcctacctaaatcggaagtctggtgctagggcttagaatctgtgttttaacaagcgcttgaaatgattatg

SEQ ID NO: 28176 - DNA, 626 bp, Homo sapiens
caagtagcttttcttcaactgacaaggctttgagagatttgggaaagataagcractctgacacttctgaggagggagagagagtagtggagcatgcattcaacatcctgatctttcagagaactttatttagctactttcacttatagtgtaatgtcatccaaattattttatgtagttggaaataggatgtacttcttgaatagaaaaaaaaatcctaaaattcatatgaaattacagaagatctgaatacccaaaacaatcttgagcaagaaaaacatcctctcattgttaggggtggcaaatatctgagtctcacggcaccaaatatgagttactggtggtgaatctgtacaggtctgcagcaacctcaattcttgcctcctcagaagaaagaatttgagggacataaggcagaaaaagaaactgaggtatgtttcagagcaggagtagaagtttattttaaaaggctttagaacgcgaaataaaggaaggtacacttggaaaaaacccaagtgggcttgtgaaggtcaagtgtggtgtttaaccttgatcctagtgcttcacaggctggcccctttcccatgattcttcccttggtgggctgtccgcatgggctgtgctct

SEQ ID NO: 28177 - DNA, 626 bp, Homo sapiens
caagtagcttttcttcaactgacaaggctttgagagatttgggaaagataagcaactctgacacttctgaggagggagagagagtagtggagcatgcattcaacatcctgatctttcagagaactttatttagctactttcacttatagtgtaatgtcatccaaattattttatgtagttggaaataggatgtacttcttgaatagaaaaaaaaatcctaaaattcatatgaaattacagaagatctgaatacccaaaacaatcttgagcaagaaaaacatcctctcattgttaggggtggcaaatatctgagtctcacggcaccaaatatgagttactggtggtgaatctgtacaggtctgcagcaacctcaattcttgcctcctcagaagaaagaatttgagggacataaggcagaaaaagaaactgaggtrtgtttcagagcaggagtagaagtttattttaaaaggctttagaacgcgaaataaaggaaggtacacttggaaaaaacccaagtgggcttgtgaaggtcaagtgtggtgtttaaccttgatcctagtgcttcacaggctggcccctttcccatgattcttcccttggtgggctgtccgcatgggctgtgctct

SEQ ID NO: 28178 - DNA, 545 bp, Homo sapiens
ctccaagacaaactgaccatggagaggtgccttccagagggatgaacccaatctaaagtaggctttgaacacacaccatggacttgaacttcccaagtaacttgttccaaagcagctcttatttcaaagatacttttacatttctagccaatgaagcaatcaaaaccaggcatatgatccccttcagtctaaatcaaaggtctcaaactgaaataactacagagaaaacartaatagacgagtaacttaagctcctggttaaaaggacagtggctactaggttcaacaaatcattgccatgtggcaatagcagcccatacttgtgtaaatattgacaacaaattaaaattgtgtgcatgcaaaacaaaacagaacaaaacagatttgaggactggattttcaaatttttgtctagactcgtgctatctaatatgggagccattagtcacatgtggctacctgaattaaaactagttaaaattaaatgaagtttataattttttcagtcacactggatacatttcaagtgctcagtaggccatttg

SEQ ID NO: 28179 - DNA, 545 bp, Homo sapiens
ctccaagacaaactgaccatggagaggtgccttccagagggatgaacccaatctaaagtaggctttgaacacacaccatggacttgaacttcccaagtaacttgttccaaagcagctcttatttcaaagatacttttacatttctagccaatgaagcaatcaaaaccaggcatatgatccccttcagtctaaatcaaaggtctcaaactgaaataactacagagaaaacaataatagacgagtaacttaagctcctggttaaaaggacagtggctactaggttcaacaaatcattgccatgtggcaatagcagcccatacttgtgtaaatattgacaacaaattaaaattgtgtgcatgcaaaacaaaacagaacaaaacagatttgaggactggattttcaaatttttgtctagactcrtgctatctaatatgggagccattagtcacatgtggctacctgaattaaaactagttaaaattaaatgaagtttataattttttcagtcacactggatacatttcaagtgctcagtaggccatttg

SEQ ID NO: 28180 - DNA, 543 bp, Homo sapiens
ggatctgcaatgatggcctcaggtcagtccacacctgggtggagtgaatgtcagtgaatgagccacaatatgcatagcaggcagtggtggtcactggggtccatctcaccatgccctgcttgccatatcttccaatgtttctattttctcctaggagtaggaggcctagagtgagtaggagttgctakggaaaaaagttttgggtcaagtggggaagtttccaaatagagttgagaacaaggaaacacacaaattagggaaacacagaattatcgctggatagtacaggataatcccttaaggtaaaaggttaggaatttagctattaaaagactcacaaaatgcttctagttttcaaaattcccagtctaatttgtgtggcatatatagatactacatggcatttctagattcataaatggtccaaaggactttgactagcttaactatagcaaatgtaccattctttgtgagactatctgatgggcagccatggccccacggagattttctaccccaaatcccacaaattcccactcacat

SEQ ID NO: 28181 - DNA, 543 bp, Homo sapiens
ggatctgcaatgatggcctcaggtcagtccacacctgggtggagtgaatgtcagtgaatgagccacaatatgcatagcaggcagtggtggtcactggggtccatctcaccatgccctgcttgccatatcttccaatgtttctattttctcctaggagtaggaggcctagagtgagtaggagttgctatggaaaaaagttttgggtcaagtggggaagtttccaaatagagttgagaacaaggaaacacacaaattagggaaacacagaattatcgctggatagwacaggataatcccttaaggtaaaaggttaggaatttagctattaaaagactcacaaaatgcttctagttttcaaaattcccagtctaatttgtgtggcatatatagatactacatggcatttctagattcataaatggtccaaaggactttgactagcttaactatagcaaatgtaccattctttgtgagactatctgatgggcagccatggccccacggagattttctaccccaaatcccacaaattcccactcacat

SEQ ID NO: 28182 - DNA, 534 bp, Homo sapiens
gtacaaaaggatgatcgacacacttggaagcagagtatattgtacatgaatatgtaatggccaaacattactgtgaacttagaagtgtcaaagcgtgcttttggatatccatgtcagtgtttttagtgcaggaagttggcaggtacattgcaaggaaagctgttcccatggcatgttagagggtcctaggggagtgtgatcttgggtggtgatccttcttcagccctgattgctttgaggtggargcaggacaggcagcactgggggaagctcctaccccagctgcctcagtgccacctttacaaacaatgaaaaactgaggagccaaaaaatattgtcaaaggtttactacaagagaaagcatgaagcctgagatctttttcactctaagaagtggaatcagtcagcttttgagttgaactttaataagcccgttatagagatcaaagtgtggtgaatttatttaagtggcaccatatcagcaatgacggatttccgttggtagtattgaacattttgtgttgtcaataacaa

SEQ ID NO: 28183 - DNA, 577 bp, Homo sapiens
tgaacactaaccaactgatatcttggtttctattgctctccaaacatgtaaatattaagttttgccctaagagcccgatccccattcatgttgctgaccaatatggtttttttctaggcctgtaaagctgagaatctgaccttgaactatgcagctcctgacgctaccagatcactttgggattcttgatagccgatttttaattaaataaatgtaattgcctgtttccaccaatgtttaatattcacctgtgttacctgatatcctgcacayatatcaaattaatgtacacaaatctttataaacaacaaaaagatgatctctaaggctccttaaatttctttgctcttgagtacgaaacctaaggaaaaactcaagaaatatattgtttataccatatagttaggtaatttattacagtgagtatttactgtcctcaggatcataattggaggatataaagaatcattaatacaaccaaaaaaatctcaaaacctggtgtgagacttgcttataagttagtatttttaaaacatgtttctatttgttatttggctttgcattgtcatcaattttt

SEQ ID NO: 28184 - DNA, 2055 bp, Homo sapiens
ataacagaaaagttttgctctgggaatctctttggcctaagactttttgagaattgtgctgtattctgaggccctctgaaccaactttcttctcctttcacctstcccctcatagatccagacttgcatggcagtctgaagcctttctctggccctgtcttctttatctcttatacccatagtttctatcaatctttgacatttctaattttgtcttggagtctgcctcccagtctgagacactctaataccagggcatcaaatccttttctgattatttactttcaacaaaattgagagagaatctaagcaaaagatcctttgctaaacagtaattttaaaaactggtaatacatccaggagtaggttaaatagagtaaaagtaatctcattcccctagtttggaattagcttagaaactcaggcctaggccaactgtgtgacaaaatagtcacagggatttgttcaggataggcataaatttcaatttggagaaatgagacacaaggagaatgttgggtattctggaaaagagttttcctattcttaaaaaagtaaccattggaaaagataacttcctgcttcctttctataccatgtatatggatacaaaattaaaagccaccaagtcactttcctactgtaaggaaaggaagccaataagcaacatgctcacagaccagggaactgcagagaaacaggggtggagcaatcagatcaagctgatcttaaagcccactctactcagtgacttcctagttaaatgaggatacattttctctccattttaacctgctagagtcagttccctatcacggccaaatgcatcccacttatttgagagtgttagccttccatgcctccacttacattggaacctgcctggaatccaccttgccccagctccctcccatgtgcagtggatcctgtcctttatgtctcagctgctttcctggaatggggatgcagttgtttatctggacattgggctttgcctctgcctgagcctcccacttcttatattttctctgtggaaagggaccaatttggaagtgaataccagcctgaatcaaagtctacctggtcgtttattggattttctgcttctttgtttacccagctacatttctgtctctagcccctacaactaccctgtcagttaacgcttttgcgtctccgtggatcgttaagatttcagagactatgggcatataaagacagacatataaaataattaacttttaagcttattctgctaattttcactaatacatgcaagtgtgcaaacatatttgcatatatatttttgcacacatgcacatgtatatggacatagagacatatctatatatagagaaaaatgcctttctatatatttatgtctgaatatcacgtttgaaagttcttattatgatatatccagtgtatcatgggtgaactaatctaaagaactaatccgaataaagagctaatgcaggggtctcctaggcccctactgtctcatgagacattttcatttctgaaacttggggacaatctgtctggggacagttctagaacacgagtcagtggggtgattggaggcctatgccagcagctatttagcaattattatcaaagtatttaaatgatttgtttttcctactggcatatgtctctggatagcatcaaatagttaaataacaagtatggctgtactagtacaaacctccctgaatatgaacactacttatgacaatttgaagcctggtatcttgaatttctattagttctactgatgttcttatttatgctttaggtttcctaattcttccgctgttcctagcttcgtatgttctccaatatccccacctttgtcactcactataaaggaggtaataaaaaccatattgattgagtcccttagaagttcacgctatccccaaccaagttctggtaatcactcacaattcctaaaaaaaaaacaaaaaaataaaccaacaacaacaaattccggtaagtttcaacaactcatcttggaacttcttctttcttgctcactacagcccagacacc

SEQ ID NO: 28185 - DNA, 2055 bp, Homo sapiens
ataacagaaaagttttgctctgggaatctctttggcctaagactttttgagaattgtgctgtattctgaggccctctgaaccaactttcttctcctttcacctctcccctcatagatccagacttgcatggcagtctgaagcctttctctggccctgtcttctttatctcttatacccatagtttctatcaatctttgacatttctaattttgtcttggagtctgcctcccagtctgagacactctaataccagggcatcaaatccttttctgattatttactttcaacaaaattgagagagaatctaagcaaaagatcctttgctaaacagtaattttaaaaactggtaatacatccaggagtaggttaaatagagtaaaagtaatctcattcccctagtttggaattagcttagaaactcaggcctaggccaactgtgtgacaaaatagtcacagggatttgttcaggataggcataaatttcaatttggagaaatgagacacaaggagaatgttgggtattctggaaaagagttttcctattcttaaaaaagtaaccattggaaaagataacttcctgcttcctttctataccatgtatatggatacaaaattaaaagccaccaagtcactttcctactgtaaggaaaggaagccaataagcaacatgctcacagaccagggaactgcagagaaacaggggtggagcaatcagatcaagctgatcttaaagcccactctactcagtgacttcctagttaaatgaggatacattttctctccatttwaacctgctagagtcagttccctatcacggccaaatgcatcccacttatttgagagtgttagccttccatgcctccacttacattggaacctgcctggaatccaccttgccccagctccctcccatgtgcagtggatcctgtcctttatgtctcagctgctttcctggaatggggatgcagttgtttatctggacattgggctttgcctctgcctgagcctcccacttcttatattttctctgtggaaagggaccaatttggaagtgaataccagcctgaatcaaagtctacctggtcgtttattggattttctgcttctttgtttacccagctacatttctgtctctagcccctacaactaccctgtcagttaacgcttttgcgtctccgtggatcgttaagatttcagagactatgggcatataaagacagacatataaaataattaacttttaagcttattctgctaattttcactaatacatgcaagtgtgcaaacatatttgcatatatatttttgcacacatgcacatgtatatggacatagagacatatctatatatagagaaaaatgcctttctatatatttatgtctgaatatcacgtttgaaagttcttattatgatatatccagtgtatcatgggtgaactaatctaaagaactaatccgaataaagagctaatgcaggggtctcctaggcccctactgtctcatgagacattttcatttctgaaacttggggacaatctgtctggggacagttctagaacacgagtcagtggggtgattggaggcctatgccagcagctatttagcaattattatcaaagtatttaaatgatttgtttttcctactggcatatgtctctggatagcatcaaatagttaaataacaagtatggctgtactagtacaaacctccctgaatatgaacactacttatgacaatttgaagcctggtatcttgaatttctattagttctactgatgttcttatttatgctttaggtttcctaattcttccgctgttcctagcttcgtatgttctccaatatccccacctttgtcactcactataaaggaggtaataaaaaccatattgattgagtcccttagaagttcacgctatccccaaccaagttctggtaatcactcacaattcctaaaaaaaaaacaaaaaaataaaccaacaacaacaaattccggtaagtttcaacaactcatcttggaacttcttctttcttgctcactacagcccagacacc

SEQ ID NO: 28186 - DNA, 495 bp, Homo sapiens
ataataaaagtttaattaaaaaaaaaagaaggtccttgagcagcaggaaaaatgattgtttaataattcataacacttgaatacggaagggttctttaggcttgggtgaggcctgagggagctctggaggaacaacatcttatgtaattgtttgagttttgagttgagctggctgcttgcttttctactgaactcctcttatttaaagaacgatagaccaactatcattgctaagattggagtatctctcacttatttataaaaactgaatgagtcttttacttcaaggaaaatgacaaaatttgagcccatgacaaagttaaagttttctaattttcattagtaataaaattgtaattttcatttgtaattttctaacgaaaattagaaaattttcraaagctggtatctatcatcatgagtttgacagtttttcaatgctttcagatcctcctaatgaaatacatggtaatatcaacaaatgtatttttgtaa

SEQ ID NO: 28187 - DNA, 733 bp, Homo sapiens
gatcctgatttagaaggccctaaacttgatttaacattgctttttcccaaagctaaatctagacgggggctgggcgtggtggctcacacctgtaatcccagcactttgggaagctgaggcrggttagtcacctgaggtcaggagttcaagaccagcctagccaacgtggagaaaccccatctctactaaaaatacaaaaaaagtagccgggtgtggtggtaggtgcccgtaatcccagctactttggaggctcaggcaggagaatcgcttgaaccctggaggcagaggttgcagtgagccgagatcacaccattgtgctccagcctgggtgacaagagcaagactctgtctcaaaaaaaaaaaaaagaaaaaagaaaaaatctagacaggcactcctctgggctttgctagtcttgaggtaaggataggttttaggggtcctcctcagaaggcccactgacaaaagacaggagcaataaacaggacatataatgagggtgggataaagagggccatactgtctttcagtgtgaagcaatttctagaaacagctagaataagtcctaaaacaattacaaccagaagctacatgtgagccccatgacctgtgattacagaataaaatgcatcttagccctggggcacttttctctacctacttcaccaggcaggtcagatacccaaatggcactcttgccaagacatgaacaaaaagttattttttattagattt

SEQ ID NO: 28188 - DNA, 572 bp, Homo sapiens
caaaaatatactgatatggaaaaatgtttatgaaaaagtaaaatggcaattcaagcataatgctattatgttagcaaacccctgtatgtttgtgtaagagacatagatagtatttttaagyatgtaagaaaaaaagacaggctctcaagaggtaggtatggtgtggggtagcaggcagtataaaggaacatatgcttctttattatgcctctatattcctttcatattttacaaataagtatacattgcttttctaattttaacaacttaaaatatcagaaagtacagataagcaaaatgaactatacatatccaacccaccctgtgaccaccaccactacctcaccagatttctaagattacatactcatatggtacatattttcatatatatatacacacgcaaacatgttgagagatatatagctatattacataaaaataaggcttcctttaaaaaattaacagggtatgagcatctttccatatttatgaaaatatttctgcaactttatttttagtgcatcaatttagatatacttagagtccagttacacataaaaataatgtca

SEQ ID NO: 28189 - DNA, 572 bp, Homo sapiens
caaaaatatactgatatggaaaaatgtttatgaaaaagtaaaatggcaattcaagcataatgctattatgttagcaaacccctgtatgtttgtgtaagagacatagatagtatttttaagcatgtaagaaaaaaagacaggctctcaagaggtaggtatggtgtggggtagcaggcagtataaaggaacatatgcttctttattatgcctctatattcctttcatattttacaaataagtatacattgcttttctaattttaacaacttaaaawatcagaaagtacagataagcaaaatgaactatacatatccaacccaccctgtgaccaccaccactacctcaccagatttctaagattacatactcatatggtacatattttcatatatatatacacacgcaaacatgttgagagatatatagctatattacataaaaataaggcttcctttaaaaaattaacagggtatgagcatctttccatatttatgaaaatatttctgcaactttatttttagtgcatcaatttagatatacttagagtccagttacacataaaaataatgtca

SEQ ID NO: 28190 - DNA, 572 bp, Homo sapiens
tgtaacatcaatgattaccagagcacacaaaagatcaggagatgctcaactgcccattagattagagagatcacattgaatacctggaacgttctctagatacacaaacatcacagtagtttatatttcctagagtaacacttattcractgctgccgataaaatgatcaagctggtcctcaatcaaattaaatgcttttcaatacaaattttaacattcttaattcagaatggcattatttacatactagaaacataatattcacacgaatgagataatgaaattagcaaacagtttccagtagcccttagaaatatgcttaaagatttaaaggaaattatgaacatagggaggagagaattaaaagacttaaataaagaaacaaatgaaatataagttctaatatattggactgacaccagtagctagtggtgtattggtcacagaacattgaattctgctactggcagattgtgtgtgtgtgaagtataatattcagctgtgactgtgactactgttattttacctagatctactattacattgggcccactgtgatgtacatcaacaa

SEQ ID NO: 28191 - DNA, 572 bp, Homo sapiens
tgtaacatcaatgattaccagagcacacaaaagatcaggagatgctcaactgcccattagattagagagatcacattgaatacctggaacgttctctagatacacaaacatcacagtagtttatatttcctagagtaacacttattcaactgctgccgataaaatgatcaagctggtcctcaatcaaattaaatgcttttcaatacaaattttaacattcttaattcagaatggcattatttacatactagaaacataatattcacacgaatgagataatgaaattagcaaacagtttccagtagcccttagaaatatgcttaaagatttaaaggaaattatgaacatagggaggagagaattaaaagacttaaataaagaaacaaatgaaatataagttctaatatattrgactgacaccagtagctagtggtgtattggtcacagaacattgaattctgctactggcagattgtgtgtgtgtgaagtataatattcagctgtgactgtgactactgttattttacctagatctactattacattgggcccactgtgatgtacatcaacaa

SEQ ID NO: 28192 - DNA, 572 bp, Homo sapiens
tgtaacatcaatgattaccagagcacacaaaagatcaggagatgctcaactgcccattagattagagagatcacattgaatacctggaacgttctctagatacacaaacatcacagtagtttatatttcctagagtaacacttattcaactgctgccgataaaatgatcaagctggtcctcaatcaaattaaatgcttttcaatacaaattttaacattcttaattcagaatggcattatttacatactagaaacataatattcacacgaatgagataatgaaattagcaaacagtttccagtagcccttagaaatatgcttaaagatttaaaggaaattatgaacatagggaggagagaattaaaagacttaaataaagaaacaaatgaaatataagttctaatatattggactgacaccagtagctagtggtgtattggwcacagaacattgaattctgctactggcagattgtgtgtgtgtgaagtataatattcagctgtgactgtgactactgttattttacctagatctactattacattgggcccactgtgatgtacatcaacaa

SEQ ID NO: 28193 - DNA, 572 bp, Homo sapiens
tgtaacatcaatgattaccagagcacacaaaagatcaggagatgctcaactgcccattagattagagagatcacattgaatacctggaacgttctctagatacacaaacatcacagtagtttatatttcctagagtaacacttattcaactgctgccgataaaatgatcaagctggtcctcaatcaaattaaatgcttttcaatacaaattttaacattcttaattcagaatggcattatttacatactagaaacataatattcacacgaatgagataatgaaattagcaaacagtttccagtagcccttagaaatatgcttaaagatttaaaggaaattatgaacatagggaggagagaattaaaagacttaaataaagaaacaaatgaaatataagttctaatatattggactgacaccagtagctagtggtgtattggtcacagaacattgaattcygctactggcagattgtgtgtgtgtgaagtataatattcagctgtgactgtgactactgttattttacctagatctactattacattgggcccactgtgatgtacatcaacaa

SEQ ID NO: 28194 - DNA, 628 bp, Homo sapiens
cacacttttaaattaaaattgacaaattaaatcttaaataactatgaaaatgcagactaatgacaacttgaataacaagaacaaagccataggactcttatctctgttttgaaatttactacaaaactacagtatacaaatcaagatattgtggtagtggtactggaatacatataaacatacagatcaatggaatataattgagtccagaagtaagccattatgtttatggtcaattgataattgacatgcatgccagggctactcagtaggggaaagaatagtgttttcaactaatggttctggagaaaatcagtatcaacatggaaaagcatagtataggatccctaccttatatcatatacaaaaattaactcaaaatggattctagacctaaatataacaactacaattactacactcttggaagaaaacataagagtaaatattcatgaccttgratttgtcagtggtctttgatataaaagcaaaagcacagaaaccaaaagaaaagttaactaaattattttcaggaatattaaaaagaagactttggaatgtcataataagtgagatgaacaattatctacaattcttcagaaatacactataaaatatcttgaaagac

SEQ ID NO: 28195 - DNA, 590 bp, Homo sapiens
tctgaaagaagaacattctggaaaggaaaaacagtgtcaacatcttcagctgggagtatgttgggttcctgaaasacagaaggaaggctagtcatacagggacatagagcagtaagggatgagggtgccgtgggaggcagaggctggatggcggaagaattttaagcctagttagagatttagattaaattcttattgcaatgagcagacactcatttcaaacagaagagttgaatatgcttttaaaagatcactgtggttactgtggtgaaatcagccactaaggaaaaaagtgaaagcagagaatttatttagaagcctagcaatccattgaggcatgtcagtgccttagtctgggtttgtatccacagaagtggaaagaagtggactgggtctttatgcagtctagagagaatcaattgctaaacttgtatgcttaggatggatattgcaatttactgatataggaaagatgtgcactataataatccagatcattattttttcaccctgtccgcagatatacatgtaacaaattcgtattgcataagccactgcagatagtaaaatcattgtttatctagagttca

SEQ ID NO: 28196 - DNA, 521 bp, Homo sapiens
cattcaactgtgctgaaagaatttttgtttggtgtagtcattcatgctgtgatccagtagatagtgcttaagagtagggccagtaggtgggctcttagccacatacttcttttgtatttcagtgcatacccagcagtgctcgggagaagggacatggaggatgagagaagagtccctcaycaagtttgttcctaggctttggtggagcccctgcaattgctggcgccctgctcatgttaccttaggtccacgtggggctttggcggtctgtgctctcatgtcccagaggggcagtctgagccaaagtttaggtcaccaggagacctgcaagtccctggggacctgctggttctctgagcttggcaaagtcagagtgtgttgtagggtatgtttgagggtggtctagtgatgaaatgtgtcaaggttggaggatcccttggcagggcagccgtagtgggttttttttggtttgtttttggttttgttttgttttgttttgctttgctttgcttttgagatgg

SEQ ID NO: 28197 - DNA, 1243 bp, Homo sapiens
cagggaattgtggtgtgatacagggcggtgaaggggctccagtttcacagagaagtgaagaacgagtgtgcctctttttatgggacctttggaatgacaggaatggaagcctgagccctctccacccagcactgccctgtcactgccccgggacgtccacgtgggctctgggaatgctcctttgctgagacaggcttgggtagtacaagttcaagccctcctctgttgaaatgtgtgtgctctgtttagccaagaggtgtctgcatccgagctatgcagagcaaagtattattagagccggcatcagtgtgtctgtaactgaacccagctctccctagcaaccgttgccaacaacacatctaacagaaggatgcgatacctttttttgaaaaaaaaaagtttgtctcaaccaagtcataaacacagcaggcctgttgtgaaaagacaacacaaaatcagaatctggtgtgtgaccagatttcaaaataaattgctcttctctagcaccttctagaagacagcctgttaaaaagctgaccttgagctaaagagcggagaaactcttcagagtttctggctgggtcatcatcaagcattgtgttttgggcttttcatacatagacgctcagttgagtggtgactctgtgggatctctgggaatgactttagcmcagaaggggcactcaagattttctggcttggctttccttatcagtgaatctctcaagtgtgagacaagcctgaagatgtatcttacccatacctcatcctggatgtgtgtgttgcccccacttctacccgtttctcccatcctcctgcccttctccttgtcccatgttttcaggcttgggaagaaaactgggccattcctctaactctcttcctaaggggaaaacctcgttctcttgtgattctctcaaggtctctggaaaatcaagtcattcccctttgtcagaagtttgaagttcctaactcttatcttttacataggaagggaggagggagactgatatcgattcctggagtctaagttttaaactcctagatggccagaatcctggctgagttatcggctgtccccagctcctggcttcatggttcatagtagatgctcaggaaatggctgtggaagggaggcatggagccatcagtcatgggtaccaatgctctctggggcatgaggggctttgaaactcttctgagcactttcctgtgtgtgaatcggaggtaggttccagggcag

SEQ ID NO: 28198 - DNA, 471 bp, Homo sapiens
aaattcaaatattcaggaaagacaatgcctatggggactaggaggaacaggactagtttaaaccaacataaaatgtcctcatctgtcctcttagctgaagttagttaggttttaggggttattttcatcttaraaatgtatacccagaaaacctaacataatttgtctagatagaaaattttcaaacatgtttatgccaaattatttttcccctatgattttcaatcccaaattgtcatgtaaattctaaaaatatgactcctgagaatttagcaaaacctaatttctcttcaggaatctttagcagaacattgtgtggacttgatcaaggaaagacttcatttgtcaaatggctcaaagccttccccaacttccacccctcttacaatatcttagtataaaaatcttcaggagctgaaagaggaagaaatccaaaactagtagatgcccatagatgacaaacagaaacag

SEQ ID NO: 28199 - DNA, 616 bp, Homo sapiens
gggaaacccagcaagttctatctatctgttcagattcttttttggcctccctgtgcaacattttctcctccagggtatggggcagaaccccttctgaaatggtggtttcatgacttataatcagacaaggtaggtcagagaatttctttgtgaccagctccaagacagaaaggccggaggaaattagggtatatttttaatttcagtggcctgccttgaggcgaaaaaggagcaggtgaaaggagggcmgaaaaaggtcaaagagaaagaaattctgtgtctgaggcctgattctgaggtctaaggcatcccaatattataacaaaagatgatctttcacttttatctctctgaagttgctccaaagttgcttcaggaaacaaggacaaaaggccaaatactttaacaaaagatatgcttattgttttagtcacttaggaaataacaaaggttatgggggttataagccaggaactgtggacgaaaaccaatatgtatatatagtaatataacaggcatgtttctcattttttcctttacctttttgctggtagaggagaagattttattgatggattccatctttactgcctttcaaaccctgcctttctcctca

SEQ ID NO: 28200 - DNA, 608 bp, Homo sapiens
catgctcatgcactaagctacaattcctgctattgcaactggtcttgagagtgcaatagatctatctcttcagtcgaccattcttttagaccctcttcacttcgaccagcacctcagtaggtcctgaatacttactaaatgggatgacctacaaaayctttttgtgcaaggggtctgagaccttctttgctttgctcttcctgaactggatttgctacaattgtacatttccagctacctctgagcatagaagcaccaagaggaatcttactgcttattttctgccctcctagtgtgtagccatagcctcatgtcctcatggtaatcaggaaagtattaatacaatatttcttctaaaattgagatttttttatttgcctcctggtccacacacatgaagagcccagcatgcccaggtgatagctgtggtttcaacattagtggaattcttactgtgacccctagtggaagaatttcctccttagaaaccagaacttctattccagcaaggactaagtttgcaggaagaagaatcataaacattttaaatgtgtcattaagagcgatagtgagaggatctaaacccattttgttttgtgttttgtttt

SEQ ID NO: 28201 - DNA, 1139 bp, Homo sapiens
ctttttcaggccattttcttccagaggctaaagaatattgcagccaagcagtgcagtaataaaaaatcatctttttcataggctcaaagataaaaatggctcaattctgcagaataccccttaatgggctacaaggaggaatagagctcatatttcccattttagatgacaaaaccttaggtgacaaacccttaatgcctcctctgggctttaagctgagtttcaagcaagcaaataaaaatcaaaatgcaatttctcaaggggtcgctcccttcagctttttacagggtatcccctaccaaatgcactctgacttgccaaagcaaggccagttcctactgctttgctgaagcaaggccagatgtcctactaaagcagaaccccaggtctgaaggaagagtacgtggaggctgttgcccatgcactctccacttaccaaaagacatttttccagcctggtgccttgtttctaatgctgcaaaaatgaaagtgctatgggccagcaatggctggttggcagccagactcacggacctgtcccttaatgaaatartttaggcacctgctagatgggatcagagggtggctgcagccaggagcccatgtgtcatgggtgagatgcgcacttaggacttttgtcctttctatggtgccaattatttgttaccaaactgaacttcagtctaagtgcctagtgtagcaaaaccagacactgacatcaggattgcagtgacagaaagagaggcatttattacagggcaccaagcaaagagaatggggctggtaacacttaagcctggaactccccaatggcttataggtaagggttttaaaggtggggacgcagagattataggcaagtcataaatcaatacatgaaggctatacattggtttaacctaaaaaggtgacatatctccaagcaggggcccagagctcataggtggattcaaagattttccgatttgtaattggttaaggaggcaaagctttgtctaaaaattgggatcagcagaaaagaatgttaggtctgggtcaggggcgtgaccttctctccaagccactcaggaagaaatttagaacaaagaacagcagagttcagtcctcagtttctccttatttgaggtctccgtgacagt

SEQ ID NO: 28202 - DNA, 574 bp, Homo sapiens
tgaccaataaaagcataaaatacattacattgggataaagttttctgaaggaaatgaaataaaaacacaagtctgagaaaaaaaatggagtgatataaaatttctttacaagaaaaattcttatatatcttgtaagaagagtatcaaatctccaaggcatttagatttcactaaaaagatttaagagagcaatgtaacatttacagtgcaccagaaattctaattcttttcaactatataaatagatcaaagaaaagagttaccaacttaaaaatgttggtgggaaaggagttacataaatgtttataattcttttactgaatatgtgagaaaaaaaaktttgaaattattgccctagtgagtatttttccccttactctattttgagagaggtgaattcccttgcttgtcaataaaggctgtcttggatggtgtttgcctaaagggtttaagtgcaggggaagggaaacagacttctactttaaactaccaattctgccttctcatgcccagaaaagatcataaaaagagaccaccaggatccataatcagaaaatcgcctgtagaggccgag

SEQ ID NO: 28203 - DNA, 574 bp, Homo sapiens
tgaccaataaaagcataaaatacattacattgggataaagttttctgaaggaaatgaaataaaaacacaagtctgagaaaaaaaatggagtgatataaaatttctttacaagaaaaattcttatatatcttgtaagaagagtatcaaatctccaaggcatttagatttcactaaaaagatttaagagagcaatgtaacatttacagtgcaccagaaattctaattcttttcaactatataaatagatcaaagaaaagagttaccaacttaaaaatgttggtgggaaaggagttacataaatgtttataattcttttactgaatatgtgagaaaaaaaattttgaarttattgccctagtgagtatttttccccttactctattttgagagaggtgaattcccttgcttgtcaataaaggctgtcttggatggtgtttgcctaaagggtttaagtgcaggggaagggaaacagacttctactttaaactaccaattctgccttctcatgcccagaaaagatcataaaaagagaccaccaggatccataatcagaaaatcgcctgtagaggccgag

SEQ ID NO: 28204 - DNA, 615 bp, Homo sapiens
agtaaactagacacagatcaaataacagcctcagggtgtctgccagtataatcaagtttcttgtaagagaaacctcaagaccaaattagagaaaagaaatataacaactttataaaaactaaattctatgatacaattatttatactttgtaccatcttcaagcctcaaaaagatttttattgtttaaaaaatattttatttttaagatatactttattragataataacttaataagtaaaatatttaaaaagataatttctttgattcaaagtcttttatatttttgtgtctgtagttgaaaaataaagctaataggtttctttcttacccatagaatctctctcagcattgtattaatccagccaggtctctgtgcaaagatgacataaaaaagtcattcctgtgatgccctccttctctaacttctaaaaagggaatcctccagtgaattttaacttcttactttttttgtatttcatcctctcttccctaggaagagaaataaagtggctaaggtcatattgcaggtcatatttctaacgttctgcaattctgatggttctttgaagaaaagatcagagtgctactgaatatatagcaggaagtcctaac

SEQ ID NO: 28205 - DNA, 2043 bp, Homo sapiens
agtttaaatgtgttgaaagagaagaaagtgaatggtacaataaacactcttttattttccacaaagattagacttgtaaacaatcggtttcacctgctaaatctttactgctctgctgacctttacttactcctggtcccatgtgcttctagtataggtggatatccaagtgttaatcttttgaatacaagtggggatcataaacctgctttcaaaaaatgcgtgtgcttgttttctctcctctgctggggttatctcatggctggttaggactgaaaataattgacaacagattctccaggctctgtgactatatcaagtatagctgtgacttgagcaataagtggcacagtcttctatttcaggatgggtcccaatcactatcaaggggatgcctaatagagatcatgggtggcagtgactattttgctctaggcaaactcttactgaaatctttgtcattatttcctgtccttctctgtaggcttaaagaatgtgagaatatgggtttctatagggacctatgaaaaccaaataaaaatacaacaggataatatttcttttatacacatactttcattttcaggaattccttttgtctggtaattttgtctagaacagagcagttaaataagtttgttttaaaggaaagttgactgcataggtatgttaaaagctactccccaagatttttataagcatcatctggtccttagaaacctcaggcagggttattgcaagatcctctttatgggtattcttcttcttccacgtcctcaaacctctaaaatctccttcctgtcactgtcagattaccatttctaatattatcttagtttttattctgaaacttttcatggatccctcttgtaatgttcaaagcctgctaaaactgtcttcaatttctttttaaatccatcatagagtctgttaacatgtactctgtctaaaaaccagactgacctagtcaatatctcatgactatgccttccttattgtccttacttttgctgatcccttttcctggaatttgtggcttacttggtgcttttacttggccaaacttttgaatcttttaagttttactttaaattatacgtctttgttacatcttccttcactggctactctagccagtagtccttatcaatatcacttatctggcatttaatcaaaccaaccaatagttttgactttttaagtaccaatgtttttatactctgcagagactaatgtggtgccacatacatataagctctttaaaaattttttttacatgaatgaatagcatacatttgcaggaacaattttaagctcrttcatgaatggttattatttgtaattaaaccatatagtgcacaaagtaagctgtttgaataacataattatagaattcttaataatagctattgggcatgtttaccctgcaaatttctttagttgctttcttgagcttcctagggtatttcttcaagtggtgtgtttctaagacgctatcattcatccctatccccatttttagaatctacccataaatatggtgcaatttctgttggttttatttctggcaagttaaatatatgtggaatgtggataccacttttaaacatgtaaatattttgtagttcagtattttaatgttaatggctattattttgctatttcttacttatctgccatttaaacatttaatcaatttaagcaataagcatgtactgatccaccagtgtgtatttcaggaccatgttaggaactgaagaggaaatataagaagctcaagatgccagctttttctttctttaaagaagaatagatgaggccaataaaacacaatacaaaaatatgttattaagtgattttgcagactcttgggaggaatatttgcctccagataaaatgttaataaatatttcatgaaaaagggttccagatagaatctggcattttctattcctagatatatgtgataatacaactttgttatagctaagatttctcagtatcttaaaatagacaactagacatatgcttaccattttaaaa

SEQ ID NO: 28206 - DNA, 605 bp, Homo sapiens
tgaaaggttgaaaatgtatagaggtgattctcagtcttttaagatttttgagatagttcacattctggcacttagctgcaaaatgttttaatagaagtgaattaatattttgagaaagtatttggaatattttgtaatttttactgaaactcaaaagtaaatataaacatgacaaaactagaatggataaaaagattagaatcaacaacttaaatatatattaaaaagggtgatatatttaatatcacatatataactaatatgtatagactactataatctttagagatgcccactaaatttagaagccttctctgacaactgaaggaacaacattaatttcttttgtatccagagtgcatgaagccaaagtacatagaaaaacatggaacacacacacacacacacacacacacacacacacacacacacwcacacacactctctctctctctctctctctctctctctctctctctctctctttctctccgtccctccctcccccacccccccaaacaatgtatcagcatatctatggaatctattataatttctgtaatatgtactgtgtgtataaaactttgtgtttcagttagctcctg

SEQ ID NO: 28207 - DNA, 1075 bp, Homo sapiens
tttgctgttactaaatctagatctctagttgttctgagagaaaggaaaaacagtactcataaatgttaagtaaaactttcgatgacaatgattctatgtgatacatctttgtggtaaaattagtacatatatagtcaatagcatttttttccatttccttcagtttattccccatttagaggtattgttatacaaaaacgttctaaaccagaaaataattttgctgtcatttagtctattctatggcatacagatggcaaaagtatgagaaattttgctccaaaggaaaaagataagattaattatgaatagagaaactatagctgttttcatatatatttcaaaatataaatataacgtatgaatctgtactttatttcatatagtttaaatatagttttcatataattaatgattattaaattttaattacaagtttagctatttttatttttgaaaatgctcctaagattattttgcacaaggttttcaattaacacttgtttctactgagtctctaaaaatgcccattaattttaattttgttgtgattttattttttcttcttctaacattattcctatccttagcttatcaataattttcagtaatgacacatcacaataatatagtgttgtgattttttacattatctatttagtagggatatgcttcagcttaagtctcttytttcttgatatattattgtattggatttcatattttagagtaagttctttccacacaccaaactcattaataatttattagttatcttatggatgtagaatagaagtatattactccttttgttagaattccatttcaaaaaacattaagggacaggatacatttaataaacttttatcgtaaaagttccagaaaaggaaattcttatttatacaaatatgttattaatgtttttcatgtgtagtgccaaatacgatactgatagattgaaacaagacaattatgttatcaagtttaaccttctgtgtaatatctcctttggcatctgaaataatgcaacttaacagaacaaatttgttagtatctttactgggcataagctggc

SEQ ID NO: 28208 - DNA, 1158 bp, Homo sapiens
accaaagccaaatatacctgaaacattatcatggagacaattctataagatgctcttcaaaaatatatccttcaaatagtctaccacttttaatataaaatkttatgctcaaaacatgtacaatgagttggaatgtagaagaattgttctgaaatatggacactgatctaagacccaactaccttgaggcagcccagaaccacaggaggatctagttagccactgggacaaaactccaaatgttgtacatattagtgaaataatacaccttctacagatgtttttccaactagaaaactaagagcacacactgtcacttaagtcatactcccacgaggtagaggaggcttgccaaacctaattaatctacggttcaaaaagaaatgtgtgcacacccagcctaaataacagctaaacaagataacagagctgacagcaatacttggacaagattaagagccactcagaagaaataccaagacctaaagtctacagaagagggctagtgtagcagaattagctaagaatgagttctaatgggggaagttactgtacaagtactgcctctaatatggcagagttatgatgggccaaagatgataattcacaccaataaactcacctcagggactctgatgtcccaatctcagtcttttactgttccaaaagtgatgcacttctcaattcttaataaagaatataatattttattaaatcccaaattactataaaaacatcattctatttatgctggaatcttacaaatttcacatactattccatcatatttcttctaattctgcttccactcttttctctttctttgcttcccttatattctctgcctgaattcatcctctctcactctttcattttctttcctcctattgtttattgacaatatttatttagtgtatgctggagttgatcttataggctaatcaactgtgtcatatctgtaaacatatgtttctaactcttagctattgccatcattgctcaaacaactgatttttaatcaaatgtgtatggatatatatattttttttttaaataaatatttactgtgtatttactgtagggtgggtctgcctctcccagtccactgactcaaatgttagtttgagtcctttggcaacacacccaggaacaatactt

SEQ ID NO: 28209 - DNA, 1158 bp, Homo sapiens
accaaagccaaatatacctgaaacattatcatggagacaattctataagatgctcttcaaaaatatatccttcaaatagtctaccacttttaatataaaatgttatgctcaaaacatgtacaatgagttggaatgtagaagaattgttctgaaatatggacactgatctaagacccaactaccttgaggcagcccagaaccacaggaggatctagttagccactgggacaaaactccaaatgttgtacatattagtgaaataatacaccttctacagatgtttttccaactagaaaactaagagcacacactgtcacttaagtcatactcccacgaggtagaggaggcttgccaaacctaattaatctacggttcaaaaagaaatgtgtgcacacccagcctaaataacagctaaacaagataacagagctgacagcaatacttggacaagattaagagccactcagaagaaataccaagacctaaagtctacagaagagggctagtgtagcagaattagctaagaatgagttctaatgggggaagttactgtacaagtactgcctctaatatggcagagttatgatgggccaaagatgataattcacaccaataaactcacctcagggactctgatgtcccaatctcagtcttttactgttccaaaagtgatgcacttctcaattcttaataaagaatataatattttattaaatcccaaattactataaaaacatcattctatttatgctggaatcttacaaatttcacatactattccatcatatttcttctaattctgcttccactcttttctctttctttgcttcccttatattctctgcctgaattcatcctctctcactctttcattttctttcctcctattgtttattgacaatatttatttagtgtatgctggagttgatcttataggctaatcaactgtgtcatatctgtaaacatatgtttctaactcttagctattgccatcattgctcaaacaactgatttttaatcaaatgtgtatggatatatatattttttttttaaataaatatttactrtgtatttactgtagggtgggtctgcctctcccagtccactgactcaaatgttagtttgagtcctttggcaacacacccaggaacaatactt

SEQ ID NO: 28210 - DNA, 297 bp, Homo sapiens
agagtatctggatttagattttgactttacagctaaagaattgagagctcttgggctgactacttaacatcagtgtgcttcagcttcacatctgtaatttggaataatgayagaaaacatacaagctggtgtcatgggaggaaggctgctggggagccatggtcaggagattgaatagtgtcccttcctccaaattcatgtccacctggaacatcagaatgggaccttatttggaataagggtctttgcagacataataaagataaggatctaaatgagatgatactagattagggt

SEQ ID NO: 28211 - DNA, 560 bp, Homo sapiens
gttttcccaactcgatcaaaaacaatattgatggtagcctgcaaagatgcagatttttaccttggagcatcttaacaatcacttactatttcaaaaagtgactgaaactaatgaattaatcactgtaacatatcttacaggtcaatgttcctaaaaatgcaattctactcttaatccaaatcatatataggaaatctatttyggatactcatatataggcaaacaaaagtccctatttcctccatctttcttttctgtaaagagtcaatgggaataaagctacggcattatgccttaatttatcaggagccagaaaggtaacattctggtagatgaagtcagattaagagaatcaagaaatcccagggtaattccttgtggttattttctgaatgctttaacagcaaatactaaaataacagaaaaaggagttatagctaataagtcaacaaacgatatcaaatggaataatgaaaaattcccaattaatccccaagatggaagtttaaaaaaaggaaaaagggagaaaagaacagatgggaccaatgaaaagaaatagc

SEQ ID NO: 28212 - DNA, 809 bp, Homo sapiens
gaggccaaggcagggatatcacttgaggccaggagttagagaccagcctggccaacatggcaaaaccccatctgtactaaaaatagaaaaattagccaggcatggtggtgcatgcctgtaatcccagctactccccggaggccggagacacaagaattgcttaaacccaggaggctgaggttgcagtgagccgagatcgtgccactcccctccagcctgggcgacagagcgagactctcaaaaaaaaaaaaaaaaagataagaccaatccttatgtaaaatgaaaaaaagataatctgtaaaagtacttcttgtgcggtgtctgaaccaaccttggaatgtccttagtgggaaagagtaagagagattacaaaagactgtaaggaatctgtgtgagcaggtggcaaaggtgagatgatcttctgctagtctccttattcatctgactttccatgtattaactgctaaatggggataatgatgactgactcctacttcatagaaatgctgagattaagtaaatagtatytacaaagtactttaaaccagaaaaagatatgtaataaaaggacaaagacaccatgttaaaaggaataaaggtagagggggaattttttcagtttttcaaatttaatagcccatattaatctcttggattttttatgttactgagtgatattatagtcaacaaacatttgttgaacacctcatatgtgccaagcagtaaggaaaacaaagatcaataagaaatgatgtcttcttgtaaaggggttgcaaattcaagaggtatacggcaagtagaataacaga

SEQ ID NO: 28213 - DNA, 739 bp, Homo sapiens
caggctggcatcagagtcccacaccacagccccactgcctcgcctgggcacaaacccctttcttctttcttcttctgttggagctgagtcatgactggccraggccacaggttcctgtttcccaggctaatccatgcctcatcctgaaaagccacatctaggaaatgtctcccggcaggccactccagaacagacggctttgccctgacggccccctatttccagtgccctcctaaccatcctctcatccaccgcaaccagctgtctttttttattcacgttcgtttctgctcaaacatcatccttggctgccccctgccctcccctaaaatatgagcgcctttgcaacctgaagtcagccaggggcctcagctgctgtgcccaacaccccccacccatgctcccactattctaccacttcataatacttgtctgccctgaacacgcccaggtgcatccacacctctgaacagacaagtttctttctttcttttttttttagacagagtcttgctctgtcatccccacccctgctaggctggagtgcagtggcgcaatctcagccatctcccaggttcaaatgactctcctgccttagcttcccaggtagctgggattacaggtgggcaccaccatgcctggctaattaccatatatatttttttgagacggagtttcacttttgtcacccaggctggagtgcaatggcttgatctcagctcactgcaacctccacctc

SEQ ID NO: 28214 - DNA, 739 bp, Homo sapiens
caggctggcatcagagtcccacaccacagccccactgcctcgcctgggcacaaacccctttcttctttcttcttctgttggagctgagtcatgactggccaaggccacaggttcctgtttcccaggctaatccakgcctcatcctgaaaagccacatctaggaaatgtctcccggcaggccactccagaacagacggctttgccctgacggccccctatttccagtgccctcctaaccatcctctcatccaccgcaaccagctgtctttttttattcacgttcgtttctgctcaaacatcatccttggctgccccctgccctcccctaaaatatgagcgcctttgcaacctgaagtcagccaggggcctcagctgctgtgcccaacaccccccacccatgctcccactattctaccacttcataatacttgtctgccctgaacacgcccaggtgcatccacacctctgaacagacaagtttctttctttcttttttttttagacagagtcttgctctgtcatccccacccctgctaggctggagtgcagtggcgcaatctcagccatctcccaggttcaaatgactctcctgccttagcttcccaggtagctgggattacaggtgggcaccaccatgcctggctaattaccatatatatttttttgagacggagtttcacttttgtcacccaggctggagtgcaatggcttgatctcagctcactgcaacctccacctc

SEQ ID NO: 28215 - DNA, 739 bp, Homo sapiens
caggctggcatcagagtcccacaccacagccccactgcctcgcctgggcacaaacccctttcttctttcttcttctgttggagctgagtcatgactggccaaggccacaggttcctgtttcccaggctaatccatgcctcatcctgaaaagccacatctaggaaatgtctcccggcaggccactccagaacagacggctttgccctgacggccccctatttccagtgccctcctaaccatcctctcatccaccgcaaccagctgtctttttttattcacgttcgtttctgctcaaacatcatccttggctgccccctgccctcccctaaaatatgagcgcctttgcaacctgaagtcagccaggggcctcagctgctgtgcccaacaccccccacccatgctcccactattctaccacttcataatactygtctgccctgaacacgcccaggtgcatccacacctctgaacagacaagtttctttctttcttttttttttagacagagtcttgctctgtcatccccacccctgctaggctggagtgcagtggcgcaatctcagccatctcccaggttcaaatgactctcctgccttagcttcccaggtagctgggattacaggtgggcaccaccatgcctggctaattaccatatatatttttttgagacggagtttcacttttgtcacccaggctggagtgcaatggcttgatctcagctcactgcaacctccacctc

SEQ ID NO: 28216 - DNA, 530 bp, Homo sapiens
tttgagggtttggtcacgcgttcttccccttctcctgaaggggctcaagcttccttgctccctgtatgatcccaggtctgcccttcrgtgaactgggtaattgaactgctgttccctgtgtgctgggccccatagctagcactgggaactgagaggtagaagccatggtcctggagtctgtggagctcatggtgtaattggtgaagacagtggaccccagcagcgtttgcaatgtggtgtggccaatgctgtgatagagggatattacctcacccagaggcggcttcctgggagaagtgacccccgagggcctgcaaaggcaagtaggtgtccccaggaggagggttgcggtgtccccagcacctgcagggggagtgcagcgagcctatagcagggggcctggctctgggcacagggtgcagccacctggagcgctcttaggacagaaactgacccctgggcttcagtcagtccaattaaccagagtctacggtggaagaaattcgtgaggagtaggatgggaggtagaa

SEQ ID NO: 28217 - DNA, 530 bp, Homo sapiens
tttgagggtttggtcacgcgttcttccccttctcctgaaggggctcaagcttccttgctccctgtatgatcccaggtctgcccttcagtgaactgggtaattgaactgctgttccctgtgtgcygggccccatagctagcactgggaactgagaggtagaagccatggtcctggagtctgtggagctcatggtgtaattggtgaagacagtggaccccagcagcgtttgcaatgtggtgtggccaatgctgtgatagagggatattacctcacccagaggcggcttcctgggagaagtgacccccgagggcctgcaaaggcaagtaggtgtccccaggaggagggttgcggtgtccccagcacctgcagggggagtgcagcgagcctatagcagggggcctggctctgggcacagggtgcagccacctggagcgctcttaggacagaaactgacccctgggcttcagtcagtccaattaaccagagtctacggtggaagaaattcgtgaggagtaggatgggaggtagaa

SEQ ID NO: 28218 - DNA, 465 bp, Homo sapiens
  misc_feature (1)...(465): n = A,T,C or G
cnnnnnnnnnnnnnnnnnnnnnnnnnnnnnnnnnnnnnnnnnnnnnnnnnnnnnnnnnnnnnnnnnnnnnnnnnnnnnnnnnnnnnnnnnnnnnnnnnnnnaaaatagataattrtgaggctggaaatggccacaaaaatagaaagtctcagtcttttgcacagtttccggacctgagtcaagactgatacctgaatctaccgagtaaaggacaaactgggttcccagggggaatcactcagcaacaccttagcagttgcggactgtagtgggctctccagaccttccccccaaaagatcctacaccaacaccatttctttaggtggcattacactgaagaaagggagtatatcaaaatatttcaaaggctgtttcacacaggattcaagtagatacttggaaacccaaatctttacagaggtgttttggtttcagtggagcagattgggggaaagaaataaatg

SEQ ID NO: 28219 - DNA, 945 bp, Homo sapiens
ctaacctagatttgtstaactccagagactgtgttatttccttttattctctcctacttccgacctttcatttattcagcaaatgttatggagtgttcagcctgtgtgggatgctgtgcaggggtggtggtgccatgatgaacgaatttatactttcgtatactttgaattgtaggatggtctcattcacacttgactaattcttaggcttaagaaaaccctcaaacattgaagtgggtcagttgagtacatttgaagaaaaaaatagagtactgtgctgatgttttcctactgttttatttatttatttatttatttattgagacagagttttgctcctgttgcgcaggttggagttcaatggcgcaatcttggcccaccacaacctccgcctcctgggttcaagcgattctcctgcctcagcctcctgagtagctgggattacaggcgtgcgcccccatgcccagctaattttgtatttttagtagagacggggtttctccttgttggtcaggctgatctctaactcccgacctcaggtgattcgcctgccttggtgcctcccaaagtgctgggattacaggtgtgagccaccgcgcccggcttctactgttatttttaggaaaacatttattgatagggtttgttcgtaggattcctgaccagactagctctggaaggtggcattgtgaggactgcattgtgaacagaccaattggtcctcccctggaaacaataaggaggaatgatgaaacagcaaaacatttatgaattaaagaagatgtgttgcaaggtggtgtgtttattccttgctgttgagcaataacagttttggcccacccttctcatgtgaggtcaggaatatacattatttaatggagcttatcatggttgcaaactactttaagggaaaaatgaagcaatgtactatgaagtgatctcgca

SEQ ID NO: 28220 - DNA, 945 bp, Homo sapiens
ctaacctagatttgtctaactccagagactgtgttatttccttttattctctcctacttccgacctttcatttattcagcaaatgttatggagtgttcagcctgtgtgggatgctgtgcaggggtggtggtgccatgatgaacgaatttatactttcgtatactttgaattgtaggatggtctcattcacacttgactaattcttaggcttaagaaaaccctcaaacattgaagtgggtcagttgagtacatttgaagaaaaaaatagagtactgtgctgatgttttcctactgttttatttatttatttatttatttattgagacagagttttgctcctgttgcgcaggttggagttcaatggcgcaatcttggcccaccacaacctccgcctcctgggttcaagcgattctcctgcctcagcctcctgagtagctgggattacaggcgtgcgccmccatgcccagctaattttgtatttttagtagagacggggtttctccttgttggtcaggctgatctctaactcccgacctcaggtgattcgcctgccttggtgcctcccaaagtgctgggattacaggtgtgagccaccgcgcccggcttctactgttatttttaggaaaacatttattgatagggtttgttcgtaggattcctgaccagactagctctggaaggtggcattgtgaggactgcattgtgaacagaccaattggtcctcccctggaaacaataaggaggaatgatgaaacagcaaaacatttatgaattaaagaagatgtgttgcaaggtggtgtgtttattccttgctgttgagcaataacagttttggcccacccttctcatgtgaggtcaggaatatacattatttaatggagcttatcatggttgcaaactactttaagggaaaaatgaagcaatgtactatgaagtgatctcgca

SEQ ID NO: 28221 - DNA, 945 bp, Homo sapiens
ctaacctagatttgtctaactccagagactgtgttatttccttttattctctcctacttccgacctttcatttattcagcaaatgttatggagtgttcagcctgtgtgggatgctgtgcaggggtggtggtgccatgatgaacgaatttatactttcgtatactttgaattgtaggatggtctcattcacacttgactaattcttaggcttaagaaaaccctcaaacattgaagtgggtcagttgagtacatttgaagaaaaaaatagagtactgtgctgatgttttcctactgttttatttatttatttatttatttattgagacagagttttgctcctgttgcgcaggttggagttcaatggcgcaatcttggcccaccacaacctccgcctcctgggttcaagcgattctcctgcctcagcctcctgagtagctgggattacaggcgtgcgcccccatgcccrgctaattttgtatttttagtagagacggggtttctccttgttggtcaggctgatctctaactcccgacctcaggtgattcgcctgccttggtgcctcccaaagtgctgggattacaggtgtgagccaccgcgcccggcttctactgttatttttaggaaaacatttattgatagggtttgttcgtaggattcctgaccagactagctctggaaggtggcattgtgaggactgcattgtgaacagaccaattggtcctcccctggaaacaataaggaggaatgatgaaacagcaaaacatttatgaattaaagaagatgtgttgcaaggtggtgtgtttattccttgctgttgagcaataacagttttggcccacccttctcatgtgaggtcaggaatatacattatttaatggagcttatcatggttgcaaactactttaagggaaaaatgaagcaatgtactatgaagtgatctcgca

SEQ ID NO: 28222 - DNA, 547 bp, Homo sapiens
tgctggaaatcctagccagagcaataaggsaagagaaaaatataaaagcatctaaataggaagagaagaagtcaaactatatctgtttacagtatttttgaaaatgtctttgggttactcgtggaaatacaaactgtgtgacttttgacaagaaaattcacatctttgaatcagtttcttcatctttaaaggaagattaagatctccctcatgtacttgtgagaaataaatataataatatataaggaacacccaggagtgtgctctgaatgtagcaggtgctcatgaaatgccactattattctattttaaaaagaaataaaaagcaatttcttgacagtcacaaagtttacatcgcaaggcctctgtgaactccccaattctcaaatgtccctctattatttcatgatgaaaataatagagggacattacaccttatacaaaaattaactcaagatggattaaagacttaaatgtaaaactcaaaaccataaaaatcttagaagaaaacctaggcaataccattcaggacataggcatgggcaaa

SEQ ID NO: 28223 - DNA, 1163 bp, Homo sapiens
tccactaaatacacattaattcactgcatgctttgcccaaggtcctaggcattatctttttcttttatttaatatcttccttctcacactagtgcagtagccagtgggtaccgatctcagttgccaccagtagagtccacaccaccrttatattttgcctcctttggctataagcttcctgttttttcacaacaaccaactattttcttggcacgggcagactgttctcatcctggacaaatgactctgtagaagagcagaggaaatagcagtgattcacagagtaaccaggctgagccctgaggcacagcaactttctaataataatattgccaatatttatttatccttgcaatatctgtacatgagttttgaaagagaggtccaattcagtgatattcacattaattttgacttataaaattatcacccatcccatctaatcttcatttttactgagcatattagtggtacatatcagtgattctaaatcaagagaatatgccaaaatcacttaggaaaattttccaaatacacgtttcctggctaccctactcatgcatagtaaggagcatttgatacataatggggtagtatgtcatggaatataaacttctaaaaagtgattctatgcatttttacatcattcccctgaataagaaacatacagagataaagatacagtctatgttttgagaggattgaccaaaaaaattattctcaaattgtgtcaagtacactgtaagatcatggtaaatatttgttaaattaacaaaataaatgaataatgtagagatttttcactgctacttgagtagaatatatggacaatatttatatactactttatggaatacacaatgctgtcatgtatatgactaaaatttcacggattttcaggtctagagttcagttatcttcccctgtcctgctgggtgaccctggggcaagccactaacataggtcatgttttgtcttccatatgccagccaagtacaagcatcatcaaatctcagctgttgccacatcatgtggcttaatgtaaagctgccattaaatacactcaatcaaaagtctgcttgggcttgcatgaccttagttacatacacatacacatacacacacacatatacatagtagaactacttaagttctactcttcc

SEQ ID NO: 28224 - DNA, 1163 bp, Homo sapiens
tccactaaatacacattaattcactgcatgctttgcccaaggtcctaggcattatctttttcttttatttaatatcttccttctcacactagtgcagtagccagtgggtaccgatctcagttgccaccagtagagtccacaccaccattatattttgcctcctttggctataagcttcctgttttttcacaacaaccaactattttcttggcacgggcagactgttctcatcctggacaaatgactctgtagaagagcagaggaaatagcagtgattcacagagtaaccaggctgagccctgaggcacagcaactttctaataataatattgccaatatttatttatccttgcaatatctgtacatgagttttgaaagagaggtccaattcagtgatattcacattaattttgacttataaaattatcacccatcccatctaatcttcatttttactgagcatattagtggtacatatcagtgattctaaatcaagagaatatgccaaaatcacttaggaaaattttccaaatacacgtttcctggctaccctactcatgcatagtaaggagcatttgatacataatggggtagtatgtcatggaatataaacttctaaaaagtgattctatgcatttttacatcattcccctgaataagaaacatacagagataaagatacagtctatgttttgagaggattgaccaaaaaaattattctcaaattgtgtcaagtacactgtaagatcatggtaaatatttgttaaattaacaaaataaatgaataatgtagagatttttcactgctacttgagtagaatatatggacaatatttatatastactttatggaatacacaatgctgtcatgtatatgactaaaatttcacggattttcaggtctagagttcagttatcttcccctgtcctgctgggtgaccctggggcaagccactaacataggtcatgttttgtcttccatatgccagccaagtacaagcatcatcaaatctcagctgttgccacatcatgtggcttaatgtaaagctgccattaaatacactcaatcaaaagtctgcttgggcttgcatgaccttagttacatacacatacacatacacacacacatatacatagtagaactacttaagttctactcttcc

SEQ ID NO: 28225 - DNA, 522 bp, Homo sapiens
gggagatgataatttgttaaagaaaaacatgcagagctcagctgagaagaaaaatccccttttctgactgacacaactgagcaaagagaatcattcaacttcaaagccaaaacaaaaaaacttaactacttaccataatttgggagtaaagattgacagtttgcwgcaaaagttaatctcctgattcatgttgaaggcattgactcaatagagtaccatcatttatagtattgcctatgagttaataaaatttgctattggagagtttacaacttcctctgtttaagaacaaaggttccttaaaaaaaaaagaagatgtaattttacttatgcctctttcaactcaaacactgcacaagcgaacaacatatggtaattcaaaccaataaaagttactacaaagaaaagaatatgatggatggcctgttcacctgtttctgaaggtagagtatcatcaagttggagaaaaggaagtcaggtagaaatggcatgaccaccatcttattttcttccatcactgca

SEQ ID NO: 28226 - DNA, 552 bp, Homo sapiens
tggctaaagaaaatgatttctacgtccacttttagctctgaatgctaaataatgctatgcacatttattttgacttttggtgaatcagtttcctggccagagaaacttttagcacaaagaacccaagctaccttttgtgaatttatcacgcccgtgacctcagccaccctattccagaacgtaaatgtacttgaccgaactcagaacagctgcactgagtcaccaaataatgtgtaatcatcattattttaggacactccctgtggccttgcaggtgatatttcacttaactcactttctttttctttttctttttttttttttgagatggaktctcactctgtcacccaggctggagtgcagtggtgtgatctcggctcactgcaagctccgcctcccgggttaatgtcagtctcctgcttcagcctcccgagtagctgggactacaggcgcccgccaccacgcccggctagttttctgtatttttagtagagacggggtttcactgtgttagccaggatggtctccatctcctgacctcgtgattcgccc

SEQ ID NO: 28227 - DNA, 552 bp, Homo sapiens
tggctaaagaaaatgatttctacgtccacttttagctctgaatgctaaataatgctatgcacatttattttgacttttggtgaatcagtttcctggccagagaaacttttagcacaaagaacccaagctaccttttgtgaatttatcacgcccgtgacctcagccaccctattccagaacgtaaatgtacttgaccgaactcagaacagctgcactgagtcaccaaataatgtgtaatcatcattattttaggacactccctgtggccttgcaggtgatatttcacttaactcactttctttttctttttctttttttttttttgagatggagtctcactctgtcacccaggctggagtgcagtggtgtgatctcggctcactgcaagctccgcctcccgggttaatgtcastctcctgcttcagcctcccgagtagctgggactacaggcgcccgccaccacgcccggctagttttctgtatttttagtagagacggggtttcactgtgttagccaggatggtctccatctcctgacctcgtgattcgccc

SEQ ID NO: 28228 - DNA, 552 bp, Homo sapiens
tggctaaagaaaatgatttctacgtccacttttagctctgaatgctaaataatgctatgcacatttattttgacttttggtgaatcagtttcctggccagagaaacttttagcacaaagaacccaagctaccttttgtgaatttatcacgcccgtgacctcagccaccctattccagaacgtaaatgtacttgaccgaactcagaacagctgcactgagtcaccaaataatgtgtaatcatcattattttaggacactccctgtggccttgcaggtgatatttcacttaactcactttctttttctttttctttttttttttttgagatggagtctcactctgtcacccaggctggagtgcagtggtgtgatctcggctcactgcaagctccgcctcccgggttaatgtcagtctcctgcttcagcctcccgagtagctgggactacaggcgcccgccaccacgcccggctagttttytgtatttttagtagagacggggtttcactgtgttagccaggatggtctccatctcctgacctcgtgattcgccc

SEQ ID NO: 28229 - DNA, 617 bp, Homo sapiens
  misc_feature (1)...(617): n = A,T,C or G
cagtctccaaaggcctgaattgagctcctccagcatatgagggagatattctcatacaaatcmacaacaaaatccattataaagttacttaaactgtacatgctcaattagaaattatgtgtacagtttatttttaaaagtgatctggatgatctagatcctttatcattacattattttctaggtcattcttttttaatataatgataaaatagaagaattaatcataatagattgttnttttagaatcttttttattccaggctgctcttgaagtaaaaggaggataaactgtcaagtaattcttattgtataatagaagaaattaagtttaagaataaaagatacttttactgtgcctttcaggactgtaatgtagccagagaattacagttctgatatttcttttaactagatagtatcttccatttttaaaatataagcattcatgtttagtctgaagtttgcttaaaaatgtgttcatgacttggcacatatggctaaaagagagagaatccaatgttataaagaaaatacagacatggtacaatggttaatttacagctacttttagcaccttttctctttaccgagctgaaattaaacaggatcttttg

SEQ ID NO: 28230 - DNA, 525 bp, Homo sapiens
ctgttaaaattaattactagacaatttttwaaaaatagaattgggaaattcaaaaaatgaaaaccagttttattttcatctaactgcaaagccacttcaacaggaatgagatcagtattggttaaaattcatgatatagacactctaagcatagtttaaaaggaacaaggaggatattctaaggtatatagattagcatataatcattgttgacaaaaatacggaaaaagaaatgattagactaagattttgtaaaaagtctacagtaagttttctcagggggaaaaaagcaaataaagttgtgttagtcagagttctccagagaaatagcatgaataggatatatatatcctattcatatatatatatatatatatatagctataaatttatttattatcttataatacatctatatattggctcacagaattatggaggctgagtagttccaagatctatagtcagaaagctcaagacccaggagagccaatggtgtagtttcaatcagagtttgaagtcctg

SEQ ID NO: 28231 - DNA, 554 bp, Homo sapiens
tttttaagcttgaagtttaggagctctgtcattcctgttagtatatstttacagacagtatgagaaaggagcacacgatatattttcataaatttgaaagcaggtctagatcccaaatttactcaccatgtaaatgattatacacagttttcaaaggattctcttttaatctgttggtgcctttagcttctctcataacagggcaattgaaagcgttgagataaatttaaaaaataacactcaatcatcaccttttttgaaccaagatgctattagtctctttcttatttgctttttcaaatacttttagtattaattaggccatatgtggaacattacttagttgttcacaaaaatgctctacctttattctttttcacctgattgtcagtttgggtcatgtgacttgatttggccaatgaaatgcagtaaaaagcagtaaataccattaatcttcctctgccttatcagcaatttttcgagacaggagtttttctattattttgatttctaaatgcgatcaacacaaaaacgattcataactaacccatgat

SEQ ID NO: 28232 - DNA, 554 bp, Homo sapiens
tttttaagcttgaagtttaggagctctgtcattcctgttagtatatctttacagacagtatgagaaaggagcacacgatatattttcataaatttgaaagcaggtstagatcccaaatttactcaccatgtaaatgattatacacagttttcaaaggattctcttttaatctgttggtgcctttagcttctctcataacagggcaattgaaagcgttgagataaatttaaaaaataacactcaatcatcaccttttttgaaccaagatgctattagtctctttcttatttgctttttcaaatacttttagtattaattaggccatatgtggaacattacttagttgttcacaaaaatgctctacctttattctttttcacctgattgtcagtttgggtcatgtgacttgatttggccaatgaaatgcagtaaaaagcagtaaataccattaatcttcctctgccttatcagcaatttttcgagacaggagtttttctattattttgatttctaaatgcgatcaacacaaaaacgattcataactaacccatgat

SEQ ID NO: 28233 - DNA, 660 bp, Homo sapiens
gcatgatctcagctcactgcaacctccgcctcccaggttcaagcgattctcctgccttggcctcccgagtagctgggattacaggcacgtgccaccacacccagctaatgtttctatttttagtagagatggggtttcaccatgttggccaggctggtctcaatctcttgacctcgtgatccacccgccttggcctcccaaagtgctaggattacaggcgtgagccactgtgcccagcctcattggcttttttaaaggttttcttcgtgcagcagagcactctcctgatgctcctggctggtgctcatcctgctggttttcacttcctcggttgtattccagtccagccctgccacagccccgcatcagtggctctgcctgcgattcgagttctcccgtgtccccctgaccaacaccactcggcctccccttttccaagatgtggttttgcttcatattgggttctatcgggttgttacgacgagatggatgagggacagatgctagtataaagtggccagtttaataagtggcccatttattagtgaatatttgcatgttatgatagatttttctttctcccctatcttgtaactgcagggamatggaaaatgaatattcaaaaggtcaggcccttaaaatatcaagaaaagtgattgg

SEQ ID NO: 28234 - DNA, 562 bp, Homo sapiens
tgattacttttgtctctatacattctgttttctgaacattgaatataaatakaatcatacaatgtgtggtctttttttgtctgacttctttcacttagcataagatttttgaaatgatccatgttgtagcatgtgttagtatttcattgctttttgttgccagattgtatcccattatatgaacagaccatattttgttcaatcacaagttgatctacacctgggtggtttgcactttttggctattgtgattaatgcttctgtgaacacttggatgaagaacatggacaaagtttctgcccaaacatgctggtggtgaggaggagataggcattgagataaataaaagtaaaatgcgtgctagaaaaatcataagtgctatgaggaaaaagaaaaaagcagaacagggttagagaggtcaatagtttgcaggtggaatggagagacaggttgcactaataaataacctgatgtggtaaaaaccttgagtagaggttaaaggcttcaaataagttttctggggaaagaacagaaattgagaatgtatatggaatattaagaa

SEQ ID NO: 28235 - DNA, 562 bp, Homo sapiens
tgattacttttgtctctatacattctgttttctgaacattgaatataaatagaatcatacaatgtgtggtctttttttgtctgacttctttcacttagcataagatttttgaaatgatccatgttgtagcatgtgttagtattwcattgctttttgttgccagattgtatcccattatatgaacagaccatattttgttcaatcacaagttgatctacacctgggtggtttgcactttttggctattgtgattaatgcttctgtgaacacttggatgaagaacatggacaaagtttctgcccaaacatgctggtggtgaggaggagataggcattgagataaataaaagtaaaatgcgtgctagaaaaatcataagtgctatgaggaaaaagaaaaaagcagaacagggttagagaggtcaatagtttgcaggtggaatggagagacaggttgcactaataaataacctgatgtggtaaaaaccttgagtagaggttaaaggcttcaaataagttttctggggaaagaacagaaattgagaatgtatatggaatattaagaa

SEQ ID NO: 28236 - DNA, 587 bp, Homo sapiens
gttttctggccttatagccttatctttctccgaaatgtctagctgggccagccatggtggctcacatttgtaatcccaatactttgggaggccgaggtggacagatcactggagtccagaaatttgagaccaacctgtgcaacatggcaaaacttcatctctaaaaatkagccaggcacggtggtgtgcacctgtagtctcagttacttaggaggctgaggtgggaggatcacctgagcctgggaggtcaaggctgcagtgagccatgattacaccactacactctagcctcagtgatagagtgagaccctgtctccaaaaaaaaagtgtcttgggccaggcatggtggctcacatctgtaatcctagcactttgggaggctgagatgggtggatcacttgaggtcaagagttcgaggccagcctggccaacaccgtgaaaccccatctgtactaaaaatacgaaaattagctggcatagtggtgcatgcctataatcccggctactcgggagcctgaggcaggagaatcacttgaacctgggaggcagaggtcgcagtgagccaagatcacagcactgcactccca

SEQ ID NO: 28237 - DNA, 587 bp, Homo sapiens
gttttctggccttatagccttatctttctccgaaatgtctagctgggccagccatggtggctcacatttgtaatcccaatactttgggaggccgaggtggacagatcactggagtccagaaatttgagaccaacctgtgcaacatggcaaaacttcatctctaaaaatgagccaggcacggtggtgtgcacctgtagtctcagttacttaggaggctgaggtgggaggatcacctgagcctgggaggtcaaggctgcagtgagccatgattacaccactacactctagcctcagtgatagagtgagaccctgtctccaaaaaaaaagtgtcttgggccrggcatggtggctcacatctgtaatcctagcactttgggaggctgagatgggtggatcacttgaggtcaagagttcgaggccagcctggccaacaccgtgaaaccccatctgtactaaaaatacgaaaattagctggcatagtggtgcatgcctataatcccggctactcgggagcctgaggcaggagaatcacttgaacctgggaggcagaggtcgcagtgagccaagatcacagcactgcactccca

SEQ ID NO: 28238 - DNA, 587 bp, Homo sapiens
gttttctggccttatagccttatctttctccgaaatgtctagctgggccagccatggtggctcacatttgtaatcccaatactttgggaggccgaggtggacagatcactggagtccagaaatttgagaccaacctgtgcaacatggcaaaacttcatctctaaaaatgagccaggcacggtggtgtgcacctgtagtctcagttacttaggaggctgaggtgggaggatcacctgagcctgggaggtcaaggctgcagtgagccatgattacaccactacactctagcctcagtgatagagtgagaccctgtctccaaaaaaaaagtgtcttgggccaggcatggtggctcacatctgtaatcctagcactttgggaggctgagatgggtggatcacttgaggtcaagagttcgaggccagcctggccaacaccrtgaaaccccatctgtactaaaaatacgaaaattagctggcatagtggtgcatgcctataatcccggctactcgggagcctgaggcaggagaatcacttgaacctgggaggcagaggtcgcagtgagccaagatcacagcactgcactccca

SEQ ID NO: 28239 - DNA, 587 bp, Homo sapiens
gttttctggccttatagccttatctttctccgaaatgtctagctgggccagccatggtggctcacatttgtaatcccaatactttgggaggccgaggtggacagatcactggagtccagaaatttgagaccaacctgtgcaacatggcaaaacttcatctctaaaaatgagccaggcacggtggtgtgcacctgtagtctcagttacttaggaggctgaggtgggaggatcacctgagcctgggaggtcaaggctgcagtgagccatgattacaccactacactctagcctcagtgatagagtgagaccctgtctccaaaaaaaaagtgtcttgggccaggcatggtggctcacatctgtaatcctagcactttgggaggctgagatgggtggatcacttgaggtcaagagttcgaggccagcctggccaacaccgtgaaaccccatctgtactaaaaatacgaaaattagctggcatagtggtgcatgcctataatcccggctactcgggagcctgaggcaggagaatcacttgaacctgggaggcagaggtygcagtgagccaagatcacagcactgcactccca

SEQ ID NO: 28240 - DNA, 1464 bp, Homo sapiens
tggaactattcggggatgtttaggtacgtcttagttccaccagttctaacaggcacctatagagaaataagaagtgtgggagtatttgatggggacgggaaagttaaacaggtaggggaagaagtagccagatagaaaaggtaggaagtcatatygaaaagaagattaattggcatttcaaaatgatggtccctttgttcacaatacagcacatgatcaaggaaaggggagaatagagaagtcatattcattctttcccatgactctgatctaaagaccaacatattcttcagaataatttgctttttttcaagaaagcctatgtgaagaataatttaaaaaacatacatacataaatatcagcaaccatgctcttacccaaacacattctatcaaatttcattcaatctaaattacatgagaatcatgacaacagtatggtctagtggaaataatactaggattgtgtgcctgaattattaaattctggctttttttatatgtacaaacacccaaaccagataatgaatttaatatttttaaagaaaataagtgcatgaaagacacaaatgttttaaagttgagtacagttgccagcatggaagacaaagtgacctgcagagacaccatggactttgcagccatgcaaacctggaatcagagtttttagttctgcctctcacagtctacggaatcacaggcaggttacaaaaactttatgatcttctgtttccttacctataaaaagataataatacatacttcatatgattcttgtgttaaaatatacaacgtgggaaaacaccaagcactgtttacacaataagtagatgctcaattactaaacttttgcttgaaataatcaacctgtttctggtacagataaaataatcaaatattccttaatcctaaaaaataagtataaactcgtgatacatttattataacactggggatagcctcaaaggaattgttatcatacatcaaggccatatttaagtgaggtttgggtcatttgggatattatttacttcaactgtaattacaaattaatcacttgttttggaaaattacattgagaatccattggggcaaagaaattatatgtacacatctattgggacagcgaaataacctgcccacatgatcatataaaggcttatgaatgaagtattttctacacacccaagcattccatgcatttttaaattcagtgatttgaaaaaaagaaattataacattttactattattgaagttgcacttcagatcaacatgattaatatggttgcagcaatctgtggcacttctgaaatgtggctgtattcagtggcccaagttttaaggtcacttatgtttagaaatcatctgggtttgccagtttagtttacaaacgtgtatagaatagaattgcaatattattttcagcatgatgagtagcatacactttttaaaaattatttgt

SEQ ID NO: 28241 - DNA, 946 bp, Homo sapiens
ttcctgcctctcccagctcctgggagcttcaggtgtcctgggcttatggtcgcattcctccagtctctggctccatctccacatggccttctcctctgtgtctatgtctcctcttctgtctcttagaagtaccctggtcattggatttagggccaccttaatccaggatgatagcatattaatttgattatgtctgcaaaaattctatttccaaatgtggccacttttataggtccagagtgggtatatatgtatgtatgtatgtatgtatatgtacatatatatttgtggaggggaccatttgacccagtagaatgaccttcagtgtaaaaatataaccaaacatttgcataattttagacaagtttgaaaataatgaatgagtacttattttacagaggtaaacattttaggaaaaacatattctyataggctgacagtgtagctttatgacaaaattagtcaggagcttgtgcctatgtgcacttgtgaatgtggtctttgcacattggatcggggtattggtggatagccatggttcgtttccttttgccaggaggatacatttcctagcactctacaaagctgctctgagtgtaccattgacctttccataaatctgttattcttctcacattcctctccacagactcttttttccctccaatggtatttgtagaaggaagacacagaaatctattacatcttctttactttaaccttttagttatgtagtttttgtcctcctctgtagtgagataccattcctactctaagtgcagatcacggaagaccttcatggccaaatcatttacttgaattttattattacacaaccagttcagttgaccttttgtaattctgctaatcaacatagatgcttgaggtgaaacttaagaatacagtgaaatcttcctgtttatggaatattttatttgcatatgtt

SEQ ID NO: 28242 - DNA, 478 bp, Homo sapiens
gggacatttactaagttatggtccaataaagcaaagcaaggcaatggaagggacatgccttgtctcagatgagactttacaccttgggcatttgagttaatgctggaatgaatcaagagtttgggggactgttgggaaggcctcattgtattttgcaatgtgagaaggacatgagatttgtgagggatcaggggtagaatgatatagtttggatatttgtccctgccaaatctcatgttgaatcgtaatccccaatgttggaagtggggcctggtgggaggtttttgsgtcatggaggtggagctttcatggcttggtgctatctttgcaatagttcttgtgttctcatgatatctggtcatttagaagtttatggcacctcacccttgatctctttcttgctctgttcttgtgatgtgatgtgtctgctccccttctgccttctgccatgattagaagcttcctgaggcctccccag

SEQ ID NO: 28243 - DNA, 1091 bp, Homo sapiens
aaagggactgtggcttgaggctgttagtcaactgtgctttctgcagcaggttttcttgaaggagacctctaagagatatgtcactgtgagggatgtgaatccacatgtccatgcatgtctggggagtggctactccatgatccagggggctattcctgagacaagacttagaagagggaggttattggggtgtgatggttaattttacgggtcaactcgactgggtcacggggtgcccakattaaacactgcctctggttgtgtctgtgagattagcaaattagattagcatttgaatcagtggactcagtagatggccctccccagtgtgggtgggcattctccaatcctttgaggccctgaatacagcaaaaagcagagaaaggaggaattcactccttttgctcctgtctcactgcttaagcagggacatctcttctgaactatgccatcagctttcctgagtctccagtttataggcagcacatcatgggacttctcagcctccataatcccgtgagtcaattccttgtaataaatctctctctctgtttctctctctctctctctcctattggttctgtttctccagaggagcccaactaatacatgggtgaaccacacccctacccactgcagggggttgctgcttgccaccgttgatactcatcagcccttctcctctatccattctaaattcccttcatttatggctaccatggtggtcttggtggcccggtggtgtgactcaaacctttgtttctaagggatctgagccattggttatcgtgtctttttcaggttagagttgctgcacgttgccattcctggttacaactgggtccctgggtggatggcctgagcgctgcacatattccctctgcctccgctgtgtaacagcagcccttcctcccctgctggggaaacagcatgcgcgatacaagggttgctggtttaatccctatgctgtgtcccgaaggatggtaccctatcccctcagtgagctgacgcttcagttttgcctttagaaggctattctatactttccgaggccagcggtttctggagcacatagaagtgataaaaccagg

SEQ ID NO: 28244 - DNA, 1091 bp, Homo sapiens
aaagggactgtggcttgaggctgttagtcaactgtgctttctgcagcaggttttcttgaaggagacctctaagagatatgtcactgtgagggatgtgaatccacatgtccatgcatgtctggggagtggctactccatgatccagggggctattcctgagacaagacttagaagagggaggttattggggtgtgatggttaattttacgggtcaactcgactgggtcacggggtgcccagattaaacactgcctctggttgtgtctgtgagattagcaaattagattagcatttgaatcagtggactcagtagatggccctccccagtgtgggtgggcattctccaatcctttgaggccctgaatacagcaaaaagcagagaaaggaggaattcactccttttgctcctgtctcactgcttaagcagggacatctcttctgaactatgccatcagctttcctgagtctccagtttataggcagcacatcatgggacttctcagcctccataatcccgtgagtcaattccttgtaataaatctctctctctgtttctctctctctctctctcctattggttctgtttctccagaggagcccaactaatacatgggtgaaccacacccctacccactgcagggggttgctgcttgccaccgttgatactcatcagcccttctcctctatccattctaaattcccttcatttatggctaccatggtggtcttggtggcccggtggtgtgactcaaacctttgtttctaagggatctgagccattggttatcgtgtcyttttcaggttagagttgctgcacgttgccattcctggttacaactgggtccctgggtggatggcctgagcgctgcacatattccctctgcctccgctgtgtaacagcagcccttcctcccctgctggggaaacagcatgcgcgatacaagggttgctggtttaatccctatgctgtgtcccgaaggatggtaccctatcccctcagtgagctgacgcttcagttttgcctttagaaggctattctatactttccgaggccagcggtttctggagcacatagaagtgataaaaccagg

SEQ ID NO: 28245 - DNA, 1132 bp, Homo sapiens
tgaaaaatacaaagtccctagtgtattagctggcacatacggtgaagggaggggatagatgttgtaataagatgcaaagaaatcttacttgcgcgcacacacaaatgtcccttaccttttttatactatctcttatgcagatggttaaagacctcgagaaggctgctcctagattaggagccttaccccaccccatgtcatagcacgtggttaaaattcagagcrcccacattctccactccatcaccccattgcactttcatcatctgaaatgaagccctttatgtgcctccaagagcaagcgccatgaccgccgggctctggtccccgtggttcccttgggggttccccgacgcctagcacgaggcagggcacagagcagcagctcctgaaacatttccaaaaagactgaaggtattaaggctgcagaatttgcaggtctcttctgtctatactgtaagtcgatattgtgcatttcttttggacattttgggcactttaagcctttcttttatttttattagcctttatttgttttcatgattcttttggtggcgttcctttttaatttttaaatttattgattattaatttattctttttttttttttgagacggagtctcgctctgttgcccaacctggagggcagtggcgtgatctcggctcactgcaacctctgcctcccgggtttaagcgattttcctgcctcagcctctggagtagctgggactacaggcgcccgccaccatgcccagctaatttttgtattttagtagagacggggtttcgccatgttggccaggatggtctcgatctcgtgacctcgtgatccgcccggctcagcctcccaaagtgctgggattacaggcgtgagccaccgcgcccagcctattaatttattctttagtgtgtcacgcaagagtctgaatttgcaggaggggtccttagcagtagtggaagactcctggcaaagctgctcggctccgctcggttctcctccatctgccagcacacgcgtcctctccgcctcgcccaagtcaaccccacgggcctcctgcgcgtccccaccccatcccctcccagtcccctcccttcccgcgaccccaacgcccgggcggcggagggatcccg

SEQ ID NO: 28246 - DNA, 585 bp, Homo sapiens
gaaggtaccccagggggacccccgcccctgtctgctttcgtgcatccgggcactggagttatggtctctgtaagattgttgctgggtgggaaggagccagccaccttctgcaggaaattgtcgggactgggggcttctgttggtgagagcttgtaaacatctttcactgggttatatgaaacctgcctgcctgcctgccttcctctcagaatgttaaggaggttcaaggaggtgatggaggagakagtctgtgtaagagcttaaagacgatcacatttcactgtgccctttgccctcgggttggctggggccagacccccgctaccctgggggtacggtccagccaggtcatacagtcccccgagagccctgcttgtgccagcccctccgcccagccactcagtaccagcaccttcatttctgacaccacacctccaattgcaggttgctggatctttccaatgaagggtttacaaactgggaattcatgactgtccactgctggggagaaaaggctgaagggcagtggaccttggaaatccaagatctgccatcccaggtccgcaacccggagaagcaaggtca

SEQ ID NO: 28247 - DNA, 631 bp, Homo sapiens
acacttatgtgtgcatatacctacctatcatatatgtcatccatgtatctgtcatacattccccaactaaagggcatccaccacttctctgtacctgctgtcaagtccacaccctcactatggccttcaaggcctgctcccagccctgyccctggacaccatcccccatgtctccccagcccaggctgcatgtggacagagaggcctggacacccctccttgcccttggtaccaaggggaaaggcaccccctcccaaaggcaacctctggaggtgtctgctgagtgggtaccaggctgcagagggaaagccattcacagagaacagaagagatcccagagacagccccaaacagcaatgggaaccagaatatgaatggtgcaaaaccagtgcaaaaaccagtgttgttcatcagtgatcccatgagagtcaagataaagctggacccctgcctcacaccccacacaacgatcaaccaaaatggactgaaggcaaaactatgaaacttccagaacacaacatgggggaatgtcttgagagagcccttgaatgagcagaaacaaaggaagagataaaatcagttccattaaaataaagaatctctgttcaccaaaagccccataaaaaatgaa

SEQ ID NO: 28248 - DNA, 940 bp, Homo sapiens
acccccatgaccaaaacaatcccctccaggccccrcctccaacactggaggtcacacttcaacatgagatttggagggacaaacacctaaactatatcagtaggttacaaatatttctgcaaacaaaaattctcttagttaaatgtgggtagggctaggggagaaatgcagctagtggccagccagggcaaacatttcacctactcttgtaatcaaagacctggaaatgaaataatgaaaacaatggcaattttccacctgaattagtgaaagtcgaaaactgaaataagtgccagcaaggctgcccagcaacggttggttccagggcccccatgcacacagcagcataaatccaccctgtcctacggaagagcaacttgacagcacatgcagagccagaaaaaacacactgaagcccctgcccccagtgatcccacccctgggaattcatcctcaggaaacaatgcaatagaaggaacaaaaaaagccaagaatgagaatatattggttgaagcactttttagtattttattatggaaaatgtcaaatctacacaaaagtagagcaaataggataatgaaccatgtgccaccccccagcttcaacagttaaaagctcacagcctatattattagtattttaaggcaaatcccagacatcatcgtatcattttatccataaatacttccatttgtgtctctagcacataaggactttaaaaatctaatcacagtatcattgcacccaacacattcataattctttaatatcttttaattctcagcccatgttcaaatctcctcagatgcctttagctatgtttttagagttggtttgttggaatcggaaagcagatcgaggtattacattggttgctgtatgtcttctcattctcctttattctgtaacagcttccccttcctcttttctttattaattg

SEQ ID NO: 28249 - DNA, 940 bp, Homo sapiens
acccccatgaccaaaacaatcccctccaggccccacctccaacactggaggtcacacttcaacatgagatttggagggacaaacacctaaactatatcagtaggttacaaatatttctgcaaacaaaaattctcttagttaaatgtgggtagggctaggggagaaatgyagctagtggccagccagggcaaacatttcacctactcttgtaatcaaagacctggaaatgaaataatgaaaacaatggcaattttccacctgaattagtgaaagtcgaaaactgaaataagtgccagcaaggctgcccagcaacggttggttccagggcccccatgcacacagcagcataaatccaccctgtcctacggaagagcaacttgacagcacatgcagagccagaaaaaacacactgaagcccctgcccccagtgatcccacccctgggaattcatcctcaggaaacaatgcaatagaaggaacaaaaaaagccaagaatgagaatatattggttgaagcactttttagtattttattatggaaaatgtcaaatctacacaaaagtagagcaaataggataatgaaccatgtgccaccccccagcttcaacagttaaaagctcacagcctatattattagtattttaaggcaaatcccagacatcatcgtatcattttatccataaatacttccatttgtgtctctagcacataaggactttaaaaatctaatcacagtatcattgcacccaacacattcataattctttaatatcttttaattctcagcccatgttcaaatctcctcagatgcctttagctatgtttttagagttggtttgttggaatcggaaagcagatcgaggtattacattggttgctgtatgtcttctcattctcctttattctgtaacagcttccccttcctcttttctttattaattg

SEQ ID NO: 28250 - DNA, 940 bp, Homo sapiens
acccccatgaccaaaacaatcccctccaggccccacctccaacactggaggtcacacttcaacatgagatttggagggacaaacacctaaactatatcagtaggttacaaatatttctgcaaacaaaaattctcttagttaaatgtgggtagggctaggggagaaatgcagctagtggccagccagggcaaacatttcacctactcttgtaatcaaagacctggaaatgaaataatgaaaacaatggcaattttccacctgaattagtgaaagtcgaaaactgaaataagtgccagcaaggctgcccagcaacggttggttccagggcccccatgcacacagcagcataaatccaccctgtcctacggaagagcaacttgacagcacatgcagagccagaaaaaacacactgaagcccctgcccccagtgatcccacccctgggaattcatcctcaggaaacaatgcaatagaaggaacaaaaaaagccaagaatgagaatatattggttgaagcactttttagtattttattatggaaaatgtcaaatctacacaaaagtagagcaaataggataatgaaccatgtgccaccccccagcttcaacagttaaaagctcacagcctatattattagtattttaaggcaaatcccagacatcatcgtatcattttatccataaatacttccatttgtgtctctagcacataaggactttaaaaatctaatcacagtatcattgcacccaacacattcataattctttaatatcttttaattctcagcccatgttcaaatctcctcagatgcctttagctatgtttttagagttggtttgttggaatcggaaagcagatcgaggtattacattggttgctgtatgtcttctyattctcctttattctgtaacagcttccccttcctcttttctttattaattg

SEQ ID NO: 28251 - DNA, 498 bp, Homo sapiens
tgtatacaaaggcttgtgcaaacaagtaaaacaatgaaataaggatacctgtaagcatgtgcattggttttagtatctgctaacgctgraagtagatttttgagacatggtccctgtggtccccttagtttatgcctcagtgtcagctgtgccctcttacctccacctgcacacatttgcttgatgctagtgtttagcacctgttgccaggagattttttttttcctgtttttggcaatgcctagcacaatagtgggtatctatttcccagtttacactctcaggctggcaggcttcaatatctcatcctacctttgtaatcttcagacacactgcactcctctaattttgttctggattttgcataatataatgcacttcagactagaacaaaaccagaagctaatacattcaaggggtatataaaatgatagcacaacatttgatagctaccaggcaaaatttttaataagaactagatttccagaaaaaagtgta

SEQ ID NO: 28252 - DNA, 498 bp, Homo sapiens
tgtatacaaaggcttgtgcaaacaagtaaaacaatgaaataaggatacctgtaagcatgtgcattggttttagtatctgctaacgctggaagtagatttytgagacatggtccctgtggtccccttagtttatgcctcagtgtcagctgtgccctcttacctccacctgcacacatttgcttgatgctagtgtttagcacctgttgccaggagattttttttttcctgtttttggcaatgcctagcacaatagtgggtatctatttcccagtttacactctcaggctggcaggcttcaatatctcatcctacctttgtaatcttcagacacactgcactcctctaattttgttctggattttgcataatataatgcacttcagactagaacaaaaccagaagctaatacattcaaggggtatataaaatgatagcacaacatttgatagctaccaggcaaaatttttaataagaactagatttccagaaaaaagtgta

SEQ ID NO: 28253 - DNA, 795 bp, Homo sapiens
tattcacgggcgggtttttatgtcaaaatacagttccaactcctttgggtaaattccgaggagtgtgactactgagtcatatggtaagagcatgttcagttttgtaagaaactgccaaactgtcttttagtgtggctgtactattttgcattccaaactacagtgaataaaagttcctgttgctccgtatycttgccagcattttgttgtcagtgttctgaattttggctattctaataggtgtgtagtgatatctcattgttgttgaagatttcatttttagtcacaaaaatcatatagcattggaaggaatgttagatagcatctggttaaaatcaccacttaatgtataaacttactctgcaatatttcgttttaagcaatcatctcatccagaatccttttaagaccatctatggaatgcttcttgtcatgagatgcagaaaagctgtatgctaccaaacattagaaggccccagggctcagtccttggacatctttgctttgtgcacttactgccttggagatctcttccagtatcatggctttaaataccatttttatgctggcaattcccaaattttcatcaccaacctggacctctcccctgaactccagacacatgtatcaatctgcttagttgacatctttattttttgtctaaatgggtatgtcacacttagcgaccccaaacaaattccttactttttctcccacacctgacccttcacattcttcctcagtagtaactttatcctttcagatgatcatgccataaccttcattccttttagc

SEQ ID NO: 28254 - DNA, 670 bp, Homo sapiens
tttgactccaccttgtctactttaatattcattcatacatcttgaaagagctgtctacactttacaatcaaacaaattactaaattttttatctaaacctattcctctcactgagatgttcagaggcattataatagaaaaaactaatctcctcttgagggctccccacaaaccttcatcaaaaagaaaatgtttaccaactcatctcttctctataaattattttgtttcccattgctaacagcatattaagcttagcattgacataaattgaattttaaaacgtttctacctttctctttctcatttgttggtccctttcttctgataaacttgaatacaacatgacaacacacatttattttagacaattaggcaattgyttgcccatattctgccttgatgcaagtgagtaggaaactcccacaaggacaaaagagaatgttctgttaggcttattaagaagtgagagtggggccaggtgcggtggctcacacctgtaatcccagcactttgggaggccaaggtgggcggatcacaaggtcaggagtttgagaccagcctggccaacatggtgaaagcccatctctactaaaaacacaaaaattggctgggcatggtggcaggtgcctgtaatcccagctactcgggaggctgaggcaggagaatc

SEQ ID NO: 28255 - DNA, 596 bp, Homo sapiens
tgaactcattccgtcttttcatgagcttctgtacttcctcgtcctcaagacccagccatcccacccagcaaaactgaccggctgtggtggttttggagccctgctctccttgtggggtggctgcgtgggtcgtccacaggctttctggaggacagcctggtgctgctgcagatcccactgcttcttcctggctccttggcccagccttgggacaaacccagggcagggctgcagctgcccgctggccccacagaccgtctccccacgcactcctcayctgcggctccctctgtgctccctggtgcccctcagaagcgggggtcagccctgcccacccctccgtgtgctgcccaggctccaagccagggaagggggcctcaggttctaggtgaacccgtccaccccagtgaggcctctctgggatggcctctgtcatagcttctgactgcagccaggaagtctgggcagattggcttaaaacagactgagggattcaggccaaccctcctccctaggccagctacaaaggctgttttaaatctgctttaagtcatcttaatgacctcagggccagcaggatgggagtggtcgggccc

SEQ ID NO: 28256 - DNA, 778 bp, Homo sapiens
gtatctagctcaaggtttgtaaacacaccaatcagcaccctgtgtttagctgaaggtttgtgagtgcaccaatcgacactctgtatctagctgctctggtggggccttggagaacctgtgtgtggaaactctgtatctaactaatctgatggggacgtggagaacctttgtatctagctcagggattgtaaacgcaccaatcagcgccctgacraaacaggccactcggctctaccaatcagcaggatgtgggtggggccagataagagaataaaagcaggctgcctgagccagcattggcaaccagctcgggtccccttccacaccgtggaagctttgttctttcactctttgcaataaatcttgctactgctcactcttcgggtccaggctgcttttatgagctgtaacactcaccgcgaagatctgcagcttcactcctgagccagcgagaccacgaacccaccagaaggaagaaactccaaacacatctgaacatcagaagggacagactccagacgtgccaccttaagagctgtaacaccgcgagggtccgcagcttcattgttgaagtgagaccaagaacccaccaattccggacacattggtactcttgaaaaaaaaaatctcccgcagtactaaaagctaataattcattgatgactaattttgacttagtttactttccttataacaactagctgagatgagctactctaaaagtataggatgtaaaatatgggaaaagtaatcttgtaacaaagagtcttttgggaag

SEQ ID NO: 28257 - DNA, 778 bp, Homo sapiens
gtatctagctcaaggtttgtaaacacaccaatcagcaccctgtgtttagctgaaggtttgtgagtgcaccaatcgacactctgtatctagctgctctggtggggccttggagaacctgtgtgtggaaactctgtatctaactaatctgatggggacgtggagaacctttgtatctagctcagggattgtaaacgcaccaatcagcgccctgacgaaacaggccactcggctctaccaatcagcaggatgtgggtggggccagataagagaataaaagcaggctgcctgagccagcattggcaaccagctcgggtccccttccacacygtggaagctttgttctttcactctttgcaataaatcttgctactgctcactcttcgggtccaggctgcttttatgagctgtaacactcaccgcgaagatctgcagcttcactcctgagccagcgagaccacgaacccaccagaaggaagaaactccaaacacatctgaacatcagaagggacagactccagacgtgccaccttaagagctgtaacaccgcgagggtccgcagcttcattgttgaagtgagaccaagaacccaccaattccggacacattggtactcttgaaaaaaaaaatctcccgcagtactaaaagctaataattcattgatgactaattttgacttagtttactttccttataacaactagctgagatgagctactctaaaagtataggatgtaaaatatgggaaaagtaatcttgtaacaaagagtcttttgggaag

SEQ ID NO: 28258 - DNA, 778 bp, Homo sapiens
gtatctagctcaaggtttgtaaacacaccaatcagcaccctgtgtttagctgaaggtttgtgagtgcaccaatcgacactctgtatctagctgctctggtggggccttggagaacctgtgtgtggaaactctgtatctaactaatctgatggggacgtggagaacctttgtatctagctcagggattgtaaacgcaccaatcagcgccctgacgaaacaggccactcggctctaccaatcagcaggatgtgggtggggccagataagagaataaaagcaggctgcctgagccagcattggcaaccagctcgggtccccttccacaccgtggaagctttgttctttcactctttgcaataaatcttgctactgctcactcttcgggtccaggctgcttttatgagctgtaacactcaccgcgaagatctgcagcttcactcctgagcsagcgagaccacgaacccaccagaaggaagaaactccaaacacatctgaacatcagaagggacagactccagacgtgccaccttaagagctgtaacaccgcgagggtccgcagcttcattgttgaagtgagaccaagaacccaccaattccggacacattggtactcttgaaaaaaaaaatctcccgcagtactaaaagctaataattcattgatgactaattttgacttagtttactttccttataacaactagctgagatgagctactctaaaagtataggatgtaaaatatgggaaaagtaatcttgtaacaaagagtcttttgggaag

SEQ ID NO: 28259 - DNA, 535 bp, Homo sapiens
gagacagagtcttgctctttcgccctggctggagtgctacagtggcacgatctcggctcactgcaacctctgcctcctggtgtgattctcgtgcctcagcctcccaagtagctggaaattacaggcacgtgccaccacgcccggctaattttttgtatttttagtagacacagggtttcaccatgttggccaggctggtcttgaactcctgacctcaagtgatccacccgcctcagcctcccaaagtgctgagattacaggcatgcaccaccgtgcccraccacgtgctcttatattaacaaccagtatttactaagcacatactatgtgccaggagatagtctacatattccatgtctattagtattcttaatacttgcaggaccccaattaagcaggtgttggtgttttcctcaagttcacacagctgatcaaatcagtgagggctgtgaccctagatagcctagctgcagagtcagtgaagagaataactacatagccctgctaactcatcatgtccggcactcctcctgcc

SEQ ID NO: 28260 - DNA, 773 bp, Homo sapiens
actctgtaagaatgtaggtgctactgctgtggtccttctcgttttgtgattcatattctgaaaagaaaaaattcatactctacaaaaatttctaaacctatggtttagaccatatttcgtactctaaacaagagaaaactaagatacatatgttcataacatgtccggcatctgctgttttcaagattttccttaaacccacatcctccaagcactttcttattcttttttgcatattgccactaactcaaggatgttttttcaaactttttataccatgtataaaaaatattcagtaaacaacagccaaaaggtagaagcaacccatgtgtctgccaataaatgaacagatacaaaaaatgtggcacatccatacaacggaattattcagccctgaaaggratggaaattcagacccttgctacaacatggatgaacccttaagacattatgctaagtgaattatgacagtcacaaaaagataaacactgtgcgagtccacttgtatgaggtatccagaatactcaaattgatagagaaagtggaaatgtacaattccacttatatgaggatccagaataatcaaattgacagaaagtggaagggtggttgccagggctggagatgggggaaatggggagctgttgtttaatgagtatggattcagttctgcaagaggagaagagttctggagattgctgcagggtaacgtaaatatacttaacgctatcgaactgtgcattaacaacggctgtgaaacattttgttcatgc

SEQ ID NO: 28261 - DNA, 173 bp, Homo sapiens
tgtataatatataatatataagatgttttatatacrtataatgtataatatataatatataaaatgttttgtatatgtatgtatatgtatgtataaaatatctatataaggtatatatataaaatgacttaatgtttacatcctatgtaattatcttgctgttcctggtgcat

SEQ ID NO: 28262 - DNA, 546 bp, Homo sapiens
cgggtgaacaaatccacgaacccaccctctccacatgtccgtcccatccatccagccccagtgccccgtcttcctcagcccgatcgcctctcttacagggtcgaggctctgtgcaccctccccaccgagtcttgtagctgcaggtgtgtacacacgtcccagtcccagtcccagtcccagtccctctccccagggagcgtaggaggtccactggccaacaaacacttattaagcgcctggtrggtgagtcgccattccctccctgtggggtaccacgggtctagctggcgagaaggaggaaaccagcatttgcagtacagtatgatgagcaccatgaagccaggaaaggtaaggctgggggggggggggggcgccaggctggtgtcagagaaggttctggaacatcaccatcatcctcatcaatacttcgcattcacgatgctccctgctattttttaatggtgaatttcatatgatgggtatcttaccacatttttttttgtttgtttgtttttagacagggtctcactctgttgcccaggctgg

SEQ ID NO: 28263 - DNA, 908 bp, Homo sapiens
tcctgaccagcaggaccgggctggacccgcagagaaccacacataaaaaaatcagccatgtgactgtgatgaaatctgatgtttcacaccaaacagaatcagcaccactagacaggaagccacagaacatccattccaggatgctctgcagcagggacagggcccagagcaggacacacgactgctgacaggtgtgtggggtggtggcagcggtactagatgggccacaggatggacaggcagtgcttggtgctgatggagcccagcatgctcaggcctgtaaagtagagaaaggtcatcacagtggtgaaataggtggagatggaaaggaagaagtcatggtagaaattcacaatttctaaaatctgggagcagaggaagaagtcggccccggccaggttgagggtgtagagggagaaggtgttcctgtgcakgcggaatcccaggagccagaggaaatgactgcatttcctgccagctggaccaggtcaacgatgaggagcagcaacatgaggatcatgatctccatgccacaatgttgaagatgggtctcctcggtcctattgattgatgtcagttctgtacccaaggctgggatggttggatccatgcacagaaaccctagtctggtgcccctgggaacacaaaaaagatgtgatcagcagctgtgtgatctctgatttcacatacattctattatatgagaattattgtccccattttacagaggagagaaacaggcttgcagagaataagccacctgtcaaaaggtgaggagtgctgaactccagtttcaaatccagttcttggtgactctaaagcctgggctctctctattgcaacacaatttctctactgacatgggaataacattatgatgaaaacatccccactcaactggccagggc

SEQ ID NO: 28264 - DNA, 908 bp, Homo sapiens
tcctgaccagcaggaccgggctggacccgcagagaaccacacataaaaaaatcagccatgtgactgtgatgaaatctgatgtttcacaccaaacagaatcagcaccactagacaggaagccacagaacatccattccaggatgctctgcagcagggacagggcccagagcaggacacacgactgctgacaggtgtgtggggtggtggcagcggtactagatgggccacaggatggacaggcagtgcttggtgctgatggagcccagcatgctcaggcctgtaaagtagagaaaggtcatcacagtggtgaaataggtggagatggaaaggaagaagtcatggtagaaattcacaatttctaaaatctgggagcagaggaagaagtcggccccggccaggttgagggtgtagagggagaaggtgttcctgtgcaggcggaatcccaggagccagaggaaatgactgcatttcctgccagctggaccaggtcaacgatgaggagcagcaacatgaggatcatgatctccatgccacaatgttgaagatgggtctcctcggtcctattgattgatgtcagttctgtacccaaggctgggatggttgratccatgcacagaaaccctagtctggtgcccctgggaacacaaaaaagatgtgatcagcagctgtgtgatctctgatttcacatacattctattatatgagaattattgtccccattttacagaggagagaaacaggcttgcagagaataagccacctgtcaaaaggtgaggagtgctgaactccagtttcaaatccagttcttggtgactctaaagcctgggctctctctattgcaacacaatttctctactgacatgggaataacattatgatgaaaacatccccactcaactggccagggc

SEQ ID NO: 28265 - DNA, 905 bp, Homo sapiens
ctggatcccaaaagtcattagcttttgtcattaaatatagtggttctggaattgaacacctggacatgaatcccagatcttctcactactagctcaaggaccgtgggcaagtttcttaaactttctatggctttctatggctcatagaagcgtttctatgttataaacattgataaaaatggggattctgacagtatatgcatgcttcatagagaggagtgtgtgtgtgtgtgtgtgtgtgtgtgtgtgtacacttagaggagtgctgtgcaaatagtaagtgctcaatacatattagctgtcattacggtataaacgccaagattttgcccttgctgttctataactagcaacactcccactttccttgtgtgccccccacctttgacttttccccatcctttagatcttggcttaaaggtcaactttctctcaacatcctacttaacacagccaagactaggtgcccttcccttgggatgccctagccccttgccacccttaggtagagcatactaccctcatttataagtatctgtttacttataaacagatggtatctccattatatcacaggtttctkgaggataacgatttagtgggttcatcattacatttgtggcacctagtcaagtgcttggcacacaacaggtcacccatatttgcataagatagaatgtttaagaaccttctcccttgaggcacggatcagcaaatgtctttgaagcgagcttcctattagaagacctcttgacattcaaaaatggtgagccaatcagagatggacagctaggatagaccttgacatgaatttaaaacttgaaaaaaaaggtgactgtagattgtagagataaaccactatcgaaataccctaggtagtaagtacttagtcctctgtgtatttt

SEQ ID NO: 28266 - DNA, 635 bp, Homo sapiens
tggtggatgggcagccagccagagaacaatttcagaggtagcagatagattgtgatcatcagaacagtgtctgatacatgttcaataaatagttgttgaatgaatgaatgttttttarttgtttttgttctatgtatgcatttttttcactcagctctctgaagatattaatttttaatttttttaagtttggggctttccctcccccctttttctgccttgtctctgtttcctctgagttctgcatttttgttgtttgtttgctctccatctttaaagcagagcgatccttggatgtccatttatgtttaaacatgtggcactaaaagccaattcgaagctctatgtgcgtaggtagagttttgctgactattggagtccaccgtaggatggttggacataacctggtctttatattgggggactctaggtttcagtatttttttctctggttctgttcagtttctccagaaaagaattcttgaatttcctgcctacgagatgtgaacaggagtgacagtcaactggacacaccagtgcagccatgctggttgttaacatattgaaactcctattgctagtggtgtataatgactgcctcaagttctcagactgcctcattccagccacactga

SEQ ID NO: 28267 - DNA, 572 bp, Homo sapiens
ttcctcagtcctgcctgtcacagcagcccatccatctccttgcaatagatagcactagcctccagtgataatgatcttaattgtttctgtggcaaaggtaaaaagtcattaygtttcagttcccataactgaactgtaactgaattcaactttgttctccaggcccttttctgactctctcccaggccaggatactgggttcaatttaataggggtcttttcagctcaggttaaatattatctcattcactgttcagttcagactgtggttgctttaagaaaaatagtcaagttcttcaggattttcttccccattctcctgttcctgtctttcttttcaactggcatctggatccaagggtaaagcacacacatttgagtgatcaggagcggaattggagagagagaaggggccagaggggagtttctcaatgccacccttcagtcttcgctagcctcatctgcagcaaggtgggtctggctgccccaggaagatcactgctgctgctgctgctgctgccaatggtgcactttgccaccacctttggcaaagaggcctttgtccagactcc

SEQ ID NO: 28268 - DNA, 533 bp, Homo sapiens
tagaatgatttcacctagcagttacactaatggaaccatctaactcttagacttggatgaaactaaaaataaaagctatttcaatatgatcataaattacaaaatgaacacagagagggcggcaacctgtttttacatttaagagttgtcatccattcctaatccacttttcctcaaagcccaaaataaaattccctaattttgtgtcagaaaaaaatactgctgtactctaatatggcatttattgttgatcaccttgctttttttttttttttttttttttttactaatctatcctagtcacaatacagtttcacaaaaraaagttcctgttttgtcaaaactctacgtaaaaatcttgcactgacttgccctaatgcttattaaattgagtttaaaaaatatttttacaaagcttctcaatgtcatctaccttttccttgcttgactcaaaccaagcaaaggctttttaggatctgtaagcaatcctcatgctttctcatctcttactgcttgatttttctccttctttc

SEQ ID NO: 28269 - DNA, 533 bp, Homo sapiens
tagaatgatttcacctagcagttacactaatggaaccatctaactcttagacttggatgaaactaaaaataaaagctatttcaatatgatcataaattacaaaatgaacacagagagggcggcaacctgtttttacatttaagagttgtcatccattcctaatccacttttcctcaaagcccaaaataaaattccctaattttgtgtcagaaaaaaatactgctgtactctaatatggcatttattgttgatcaccttgctttttttttttttttttttttttttactaatctatcctagtcacaatacagtttcacaaaaaaaagttcctgttttgtcaaaactctacgtmaaaatcttgcactgacttgccctaatgcttattaaattgagtttaaaaaatatttttacaaagcttctcaatgtcatctaccttttccttgcttgactcaaaccaagcaaaggctttttaggatctgtaagcaatcctcatgctttctcatctcttactgcttgatttttctccttctttc

SEQ ID NO: 28270 - DNA, 533 bp, Homo sapiens
tagaatgatttcacctagcagttacactaatggaaccatctaactcttagacttggatgaaactaaaaataaaagctatttcaatatgatcataaattacaaaatgaacacagagagggcggcaacctgtttttacatttaagagttgtcatccattcctaatccacttttcctcaaagcccaaaataaaattccctaattttgtgtcagaaaaaaatactgctgtactctaatatggcatttattgttgatcaccttgctttttttttttttttttttttttttactaatctatcctagtcacaatacagtttcacaaaaaaaagttcctgttttgtcaaaactctacgtaaaaatcttgcactgacttgccctaatgcttattaaattgagtttaaaaaatatttttacaaagcttctcaatgtcatctaccttttccttgcttgactcaaaccaagcaaaggcwttttaggatctgtaagcaatcctcatgctttctcatctcttactgcttgatttttctccttctttc

SEQ ID NO: 28271 - DNA, 486 bp, Homo sapiens
ggcaggggcactgagggttgctgtggagggtgagctttctggactaagcagggtgcccccgcctctacaatggacccctccctgagcctctgggagtagccgccttggcattgaggggctaccagggctaccrctattacgaatgacagtgaccgtgaccataactgacgctcattgggcctaccacatgccaggccctgtgctgagccctcgttctaggcccgagggcatggcctcctcaccacactggtattcccactttacggacaggacccagctgtgcacagaggtcacacggctggccggcagcaaagctagcatctgcatgagacctgcctgagtctaagcccggactctctgcccacaccacacccttccctgaggaaagaaagcaggtctggcgagggtgaagtcagctcctatcaccctaaaaagcctgccgaggccacctctggggcagggagaggaaatgcccagtggttcccg

SEQ ID NO: 28272 - DNA, 614 bp, Homo sapiens
taaatatgtcaccaaatccaaggaggcctctatcgagagctttcttgaaattaaaaactgtggaaatcaatgaatgatcacattgagaaagttgggtttagcataagaagtctgagtaaaaggaattgccctttatatttgtgtgtgtgtgtgtgtgtgtctgtgtgtgtgtgcattttttttgaagcacaatttacatgcaatgaaatgtatccattgaaagtatatggttcattgatttttaggaaattggccgagttgcacaactattgccatggtccagtttcagcacggttgcttcacccctgataagatcccttttgctgtttgtagcaatccccgttcctgcctccagcctttgacgaccactcctctgatttggccttgatggatttgcccatcctcactattcctgtaaatggaatcctccagcatgtggtcatcctttttgtctgccttctttagtgtcatgttcygaggtgtgtctacgcagtagcttgccacgtcattccctttttgttcctgaatggtatcctgattttcagacatcccgttggcttgccggttcacctgctgatgcaccgttgggttgttggcatgttggggctggggga

SEQ ID NO: 28273 - DNA, 614 bp, Homo sapiens
taaatatgtcaccaaatccaaggaggcctctatcgagagctttcttgaaattaaaaactgtggaaatcaatgaatgatcacattgagaaagttgggtttagcataagaagtctgagtaaaaggaattgccctttatatttgtgtgtgtgtgtgtgtgtgtctgtgtgtgtgtgcattttttttgaagcacaatttacatgcaatgaaatgtatccattgaaagtatatggttcattgatttttaggaaattggccgagttgcacaactattgccatggtccagtttcagcacggttgcttcacccctgataagatcccttttgctgtttgtagcaatccccgttcctgcctccagcctttgacgaccactcctctgatttggccttgatggatttgcccatcctcactattcctgtaaatggaatcctccagcatgtggtcatcctttttgtctgccttctttagtgtcatgttctgagrtgtgtctacgcagtagcttgccacgtcattccctttttgttcctgaatggtatcctgattttcagacatcccgttggcttgccggttcacctgctgatgcaccgttgggttgttggcatgttggggctggggga

SEQ ID NO: 28274 - DNA, 792 bp, Homo sapiens
actgtattaactcaggaagttcacaggaggacgctgagcccattatctcccttctacaggtggagaaactgaggcagggaggcatctggtgagccaccctgccctgctcactcacagcgggtgcccctccagtacccaccagtgggaagaaagcctctcacatacgtgctcaggccaagagtctgagaccccgcctgcccccctcactcgcctgtagggggtgagggttctttggrgaccgtagcctgcggcttcggtcttcagttcctgaggtcatgtagagggaatgggtgtccagaacggtccctgacagagtatagggagagagagaaacacaccgacgtcctcgccccaaaagaggtttcagagacaattaccgataaatcagaacgacgcgcctggtatgaattcagctgattaaggcggttaaattgtttttcccttgccaaagggttgcccgattaacaactaaacaagcaatttgttgcacctaaaatacctattttctgatttattggcaaggagagtggagcctcgcgcagcccacccacgaggaggcggagggccaggaacgcaaggcccaggaaggcggaggcggggggcgttcctggcaggatcatgcacagggcagaggggccagaagcctctgagccgatggcccctggggccctggctggaagtggtggcaggtgaaggccagacaaggtgcaggatgggggtgcctggatggcctggtcttggtttcagctccgtgggtgagaagcaccatgacaggatactggatttggagga

SEQ ID NO: 28275 - DNA, 792 bp, Homo sapiens
actgtattaactcaggaagttcacaggaggacgctgagcccattatctcccttctacaggtggagaaactgaggcagggaggcatctggtgagccaccctgccctgctcactcacagcgggtgcccctccagtacccaccagtgggaagaaagcctctcacatacgtgctcaggccaagagtctgagaccccgcctgcccccctcactcgcctgtagggggtgagggttctttggggaccgtagcctgyggcttcggtcttcagttcctgaggtcatgtagagggaatgggtgtccagaacggtccctgacagagtatagggagagagagaaacacaccgacgtcctcgccccaaaagaggtttcagagacaattaccgataaatcagaacgacgcgcctggtatgaattcagctgattaaggcggttaaattgtttttcccttgccaaagggttgcccgattaacaactaaacaagcaatttgttgcacctaaaatacctattttctgatttattggcaaggagagtggagcctcgcgcagcccacccacgaggaggcggagggccaggaacgcaaggcccaggaaggcggaggcggggggcgttcctggcaggatcatgcacagggcagaggggccagaagcctctgagccgatggcccctggggccctggctggaagtggtggcaggtgaaggccagacaaggtgcaggatgggggtgcctggatggcctggtcttggtttcagctccgtgggtgagaagcaccatgacaggatactggatttggagga

SEQ ID NO: 28276 - DNA, 524 bp, Homo sapiens
taacctctagagcatagataatagtaaaatgtgacaaaatatttagaaagtgttaagttttgagtatttattatctttagtataacttcaaaaataaactgaaaatgttaaaaagcaaaaagtaaaaactgcctcccacatttgaggtacactaaagaaaaaacaattctctgaatcttgcacactccaaaattaatacacccagttaactgctaaccaaagctaagttgatcttagaggccaaaggaaatgttatcactagaaacaaggagaaattaaaggcttcactgtgctacaacattaacttctacttttacttaaaaaccactaacaacaatgaaaaggctctaagttgtttacgcccttttagaagtgctctcactaaaacacctcaggctatgtacattacttcttttctttttttttwaatttcaacttttattttagatcagggggtatatgcacaggtttgttacatgggtatactgcatgatactgaggtttggaatatgaatgatccctat

SEQ ID NO: 28277 - DNA, 546 bp, Homo sapiens
attttactgaaaacacgctgctttactatacaactattttaaaatccaaaataaagagaagtagacatctccagtgccagttgcaacaaatattcttaaatacactcctaagaaggctaagcagtcagtcatcatttattcaaggctcattctaactttcaaagaaataaatactggaatggacttgataatagcttaaaccagccatgcagcccaaccacttaccaaaataacctttcaaattagcttaaggaaagtaacgtctacatatgtgtcctggggagcagcttcatcctccagggtccgccaactgttatgggaagaaatgctactgactcgatggggctccaggccagctccaggtaaaagtgagcccagagggagtggatggcttagcccactggtgaccttctcttgcaagcccactgagctcagaggcagaggcagagycagatcaagcttggagaagtggcgatgaagttggtgctaactttttatcagcttaagattcagaagagggacaagttgcctatgcgcatgagtagg

SEQ ID NO: 28278 - DNA, 480 bp, Homo sapiens
caggtggatcacttgaggtcaaaagttcaagaccagcctggccaacatgggggaaaccctgtctctactaaaaatacaaaaattagccagtcatggtggcgcacacctctaattccagctatgtgagaggctgaagcacgagagtcgcttgaacctgggaagcaggggttgcagtgagccaagattacatgactgcactgcagcatgggtgagggagtgagattctgtctcaaaaaaataaaaataaaaataaataaaaattaaaaaaataaaaatatctttaccttcatttttgaaagacagctttgttggagaaataattcactttgggaggctgaggcaggtggatcacttgaggtcaaaagttcaagaccagcctggccaacatggcraaatcctgtctctactaaaaagacaaacattagccagctatggtggtgcacacctctaattccagctacttgggaggctgaagcatga

SEQ ID NO: 28279 - DNA, 1019 bp, Homo sapiens
tcaataacttgaaagccttctattttagcattagaatgaaacataatgctaattaataaataaggagctaagcatggtgccaaatgaaataaatatttactggaataaccaaaatgacttcactgcagcagaaaggtcctaaaactgtactcagaagaatgctggctgtttctgtgttttcactaacacatgctgaataccatgtcccactcttcatacctgggagggagcagggcaaggatgacccttactgcgaaggagcagtcacacagtcaaacagtattaaataagtattttatgatcaatacccttaaaaccccaagagaaattttaaaacttaaattgtctgaagcttagctgtacagctcccaattaaatgagcgaactgtgtttttaaatacccatgtcctactcaaaattccccatagcttttcttttaaaagctataaaatgtgttactggtgacagaattcagcttaataagtttcagtaggttttgatagttcattcacactttagcttataaaaagtgtaggcaagtaagcaaaatcatttttcctgtctcctgcattattggaaaaggtacagaatccagctgcatttcattaaagttgttttggaaagttgaagacagcccatgaggaaaagaggactcaaaattaaatacttggaacctgaggttaaacattgcacatggctttatgtgcctctctccccttatatttggatgacaaatgacttcaggcctctgcygacctaaggatttgtcgttgatgattcaacaagaagaactacttagacttgtttaggattcatggtgaacaggcagtttcccattcattctattatataatggtcactcttaggtcacatatacaccaaaggggccctggcttcagaggaacttaaacctttgtaagctcttttatgagtctagtcctattggaaagcatttgattccactgtcagtcaccttgtgactcttttgtttccctgataaataattaaaagtgggttgg

SEQ ID NO: 28280 - DNA, 565 bp, Homo sapiens
actgaggtctgtgtaatgttgcaaacccgtggttgtggcatttcctcctctgacctcaactgggacagacagatatttacccatctggatgaattctacatagtccagctgtgataaatccttgaatcttctcagacttttaaaaatgactgaatgtcactttgatataacttattccattctgccttaaagctttgattttgctggaaatccttttctatatcctgagtaaagagttatctgttgatgctactgacccaccagtaatggtaatgaactgttcattgatgtactgctaagatgtgagctcattcattcacakctttttgccctgttgcccgaatatcatacagtgctgattctacaataaaattgaaagcatcctcttgctggaatctttccataccttgaggcctgaataaaacccaaaggtcttagcagagagtactaggctttctgcgagctggctcagtttatctgctgacattcatgtcctgcctttcttcctcgctcaggtaacagatatgtagggccatcacttccaagtatacatggcacctcacca

SEQ ID NO: 28281 - DNA, 580 bp, Homo sapiens
tatcactgcaaacctctcgctgggatttatgattttagattagtaatgtatgaaaccactactttgttcaactgtattccctctgccaacttcatgtatatacctaatctattcctatctcagaggctcatctaattttcccaacactgggagtggtttccacgcagtgatcatacaagcattatgtgatgaaagaaawctaagcctgttaaccgttgacctgaaggcagtgactgtcagtaacaattacatgttcttccaaccattgattcacttaatctttctgaaattaagcttggaatttttacaacagatgtacaaagctcgacagagaacttaaaggaactagcaaggctagaagagcggaacacagaaactcactcagccaggcatggtggctcatgcctgtaatcccagcagtttgggaggttgaggcaggcggatcacctgaggtcagatgttcgagaccagcctggccaacatggtgaaaccctgtctctactaatcatacaaaaattagctgggcatggtggcgagtgcctgtaatcccagctacttgggaggctgaggcaagagaatc

SEQ ID NO: 28282 - DNA, 652 bp, Homo sapiens
ctccaggggcagggcctggcagtctgtgtttccaccagatctgtgttaatgctcacatgagccagcccaggtgatgctgacgccggaggcgcaagrttgggagccagtgtctaaggaaactatgcccatggggacaggggcagcccctggaggttcagaaagaaattagggaaaatctcttcggcacattgaggcaattaagacacacacaaggaagctttttaatctgtgtttgtttaaatggtgtaaagtccctctcccctctgcctccgtatgcaacctcaacaattcagtcccaaagcctcaggcagcagcctaggttgggtgtccagggatcagagcccaggccagagggtgggtgcacacagtggcggccacagagagctcaagcaaatcagtaagtaggggaagataacaaaagccagtaaaaaagaaaaaaaaggccaggcccggcggctcacgcctgtaattccagcactttgggaggccaaggtgggcggatcacttgaggtcaggagttcaaaaccagtctggcctacatggtgaaaccccgcctctgctgaaaatacaagaagtagctgggcacggtgactggcgcctataatctcagctactcgggaggctgaggcaagagaatcgcttgaacctggga

SEQ ID NO: 28283 - DNA, 652 bp, Homo sapiens
ctccaggggcagggcctggcagtctgtgtttccaccagatctgtgttaatgctcacatgagccagcccaggtgatgctgacgccggaggcgcaagattgggagccagtgtctaaggaaactatgcccatggggacaggggcagcccctggaggttcagaaagaaattagggaaaatctcttcggcacattgaggcaattaagacacacacaaggaagctttttaatctgtgtttgtttaaatggtgtaaagtccctctcccctctgcctccgtatgcaacctcaacaattcagtcccaaagcctcaggcagcagcctaggttgggtgtccagggatcagagcccaggccagagggtgggtgcacacagtggcggccacagagagctcaagcaaatcagtaagtaggggaagataacaaaagccagtaaaaaagaaaaaaaaggccaggcccggcggctcacgcctgtaattccagcactttgggaggccaaggtgggcggatcacttgaggtcaggagttcraaaccagtctggcctacatggtgaaaccccgcctctgctgaaaatacaagaagtagctgggcacggtgactggcgcctataatctcagctactcgggaggctgaggcaagagaatcgcttgaacctggga

SEQ ID NO: 28284 - DNA, 758 bp, Homo sapiens
ctggagcagatggtgcgcgtctatggctcagacagtaacgcacgcctgcacagaaggagcacctggtgtgagtcagccatccctgtcccctgggctgggtcccgggctcagtgattstgggcactgtgggaagcgctcttgatccttcggcccatggccatgctctggccccatgttaatccccacgcttcactgcaggcagcctctacctcttccaaactcccccggtcatggctagagaaagtcctaagactggatgcatcacttccactacagatccactctcctgtctcagctccgtctttccaggctcagtaatctttcgaatcatccgttagtggccttgcatctcaaacaacctgatcttctcagcgccctattctgcagaagctttctcataggtttgttgagaaggctggctgtacatctgcggtgggtgctctctgctgtcctcttcccaacctcagtgtgactttcctgcgtccacattgacttctgtccctctcgcctcccctcaagggtgaccttcctgctctggctcatgaactcaccctctgtggggccccgggacctctgctgtcaatgaacatcatgcagttgttctctttcttatgccttaaatcactctggggcctttccccacaaccatgtccaagtctccctgtagctcaggctaaaaacaacttttcttcttcaaacctaccctcccctccagtgaaggtcttacctatagcttcccattataggcaaacttttcc

SEQ ID NO: 28285 - DNA, 758 bp, Homo sapiens
ctggagcagatggtgcgcgtctatggctcagacagtaacgcacgcctgcacagaaggagcacctggtgtgagtcagccatccctgtcccctgggctgggtcccgggctcagtgattgtgggcactgtgggaagcgctcttgatccttcggcccatggccatgctctggccccatgttaatccccacgcttcactgcaggcagcctctacctcttccaaactcccccggtcatggctagagaaagtcctaagactggatkcatcacttccactacagatccactctcctgtctcagctccgtctttccaggctcagtaatctttcgaatcatccgttagtggccttgcatctcaaacaacctgatcttctcagcgccctattctgcagaagctttctcataggtttgttgagaaggctggctgtacatctgcggtgggtgctctctgctgtcctcttcccaacctcagtgtgactttcctgcgtccacattgacttctgtccctctcgcctcccctcaagggtgaccttcctgctctggctcatgaactcaccctctgtggggccccgggacctctgctgtcaatgaacatcatgcagttgttctctttcttatgccttaaatcactctggggcctttccccacaaccatgtccaagtctccctgtagctcaggctaaaaacaacttttcttcttcaaacctaccctcccctccagtgaaggtcttacctatagcttcccattataggcaaacttttcc

SEQ ID NO: 28286 - DNA, 611 bp, Homo sapiens
gtatctttgctgataataagttatattataacgttatttaatatttagaccacattactggaactccttgctgttatgggttaattttatcccctccctgcaaaagatatggtgaagtactcaatcctagtacttcagcatgcgaccctatttggaaatagggtcataacagaggtaatcaggttaaaatgaggtcattggcatgggttctaatccagcatgactggtatcctaataaaagcatttgatttggacacaaagacacagatgaaagaagggaagatgatatgaaaagacataatgccatctacaagccaagcaatttctgaggctaccagaatgtaggagaaaggcatggaacagatttttcctcacaaacctcacaagaaaccaaccttgctgataccttgatttcagactactagcctccagaactgtgatacaataaatttctgttkttcaaatctatctagtctgtggtaccatagcccttggaaactaatacactttctctgtggcttcatgttaagtttggccaatgggaggcgccagaagctagaagaagagaaggttgcaagggagttcagagcctttgttttcttggctccctc

SEQ ID NO: 28287 - DNA, 1085 bp, Homo sapiens
ccaggtgtggtgggttctagtgtttttggcaaatcgccccccaaatcgcccattaataagcatcagtgtggaagggccttttctccgtggacaggaaaactgagacccaaccagctgtcattgcggcaatatctgctctccttttagaaagagatgggacaggctattctcaggaagacacttagctggcttcttcggctgcatcaactcaaatctgccactttggaaaatcaagttgaataggaattgggagggattgctgctgcctggggacccagagcacctcacacataaactcgggtttgcagggagatggctgaataaagaagagaggcgagattttaaccttttgtgcagccagatcttttttttttttttgagatggagacttgcccaggctggagtgctgtggygggatctcggctcactgcaagccctgcctcccggattcacgccattctcctgcctcaacctgccgagtagctgggactgcaggtgcccgccaccacgactggctaattttttttttttgtatttttagtagagacggggtttcaccgtgttagccaggatggtctcgatctcctgacctcgtgatctgcccgccttagcctcccaaagtgctgggatgacaggcgtgagccaccgcacctggccttgtgcagccagatctttaggccatgcatgtggcctgattcagcgagaaacgggatgacatgaactgaggatgagggcggctgagcgagccagttcttcatagtcacattcggtttagcagctgatcatgacttgcaggtttcatatctgaagatgattttcactttacccagtattttccacaggaaaaattaggggaacaaaacccaaaagcttttactacagaatatttttgtttctttttaaaaatgggatctaatgagtaatacgtgatctcgtgatgttattagaaggtaggtaactggaagtagtagaggcattcacagtcaacctttcggagtattgcaagcttattttttacaagcaaaattattttctgcaaaatccatttcatgtgaatacttaaaatagaagccaataatagttgg

SEQ ID NO: 28288 - DNA, 1085 bp, Homo sapiens
ccaggtgtggtgggttctagtgtttttggcaaatcgccccccaaatcgcccattaataagcatcagtgtggaagggccttttctccgtggacaggaaaactgagacccaaccagctgtcattgcggcaatatctgctctccttttagaaagagatgggacaggctattctcaggaagacacttagctggcttcttcggctgcatcaactcaaatctgccactttggaaaatcaagttgaataggaattgggagggattgctgctgcctggggacccagagcacctcacacataaactcgggtttgcagggagatggctgaataaagaagagaggcgagattttaaccttttgtgcagccagatcttttttttttttttgagatggagacttgcccaggctggagtgctgtggcgggatctcggctcactgcaagccctgcctcccggattcacgccattctcctgcctcaacctsccgagtagctgggactgcaggtgcccgccaccacgactggctaattttttttttttgtatttttagtagagacggggtttcaccgtgttagccaggatggtctcgatctcctgacctcgtgatctgcccgccttagcctcccaaagtgctgggatgacaggcgtgagccaccgcacctggccttgtgcagccagatctttaggccatgcatgtggcctgattcagcgagaaacgggatgacatgaactgaggatgagggcggctgagcgagccagttcttcatagtcacattcggtttagcagctgatcatgacttgcaggtttcatatctgaagatgattttcactttacccagtattttccacaggaaaaattaggggaacaaaacccaaaagcttttactacagaatatttttgtttctttttaaaaatgggatctaatgagtaatacgtgatctcgtgatgttattagaaggtaggtaactggaagtagtagaggcattcacagtcaacctttcggagtattgcaagcttattttttacaagcaaaattattttctgcaaaatccatttcatgtgaatacttaaaatagaagccaataatagttgg

SEQ ID NO: 28289 - DNA, 560 bp, Homo sapiens
tgaaacataccccttttacaaattgtaatgcaacacacagaatataattcctacctcatggggatgttgtggataccaaagggcaccgacgtcagcttcttccctagtgtcctgtttaaggtgcttctgttttcatttctagttatactttatttttattttattttatttttttgagacagagtctcgctctcttgccaggctggagtrcaatggcatgatctcagctcactgcaacttctacctcccaggttcaagcgattccctggcctcagcctcccgaatagctggaattacaggcgcccgccactacgcccagatactttttgtatttttagtacagacagggtttcactatgttggccaggatggtcttgaactcctgacctcaagtgatctgcctgcgttggcctcccaaagtgctgggattacaggtgtgagccactgcgcctggcctatactttattttttaaactcttcaagaaatcttaggcccgcacggtggctcatgcctgtaatctcagctccttgggaggctgaggtgggcaaactgcctgagt

SEQ ID NO: 28290 - DNA, 560 bp, Homo sapiens
tgaaacataccccttttacaaattgtaatgcaacacacagaatataattcctacctcatggggatgttgtggataccaaagggcaccgacgtcagcttcttccctagtgtcctgtttaaggtgcttctgttttcatttctagttatactttatttttattttattttatttttttgagacagagtctcgctctcttgccaggctggagtgcaatggcatgatctcagctcactgcaacttctacctcccaggttcaagcgattccctggcctcagcctcccraatagctggaattacaggcgcccgccactacgcccagatactttttgtatttttagtacagacagggtttcactatgttggccaggatggtcttgaactcctgacctcaagtgatctgcctgcgttggcctcccaaagtgctgggattacaggtgtgagccactgcgcctggcctatactttattttttaaactcttcaagaaatcttaggcccgcacggtggctcatgcctgtaatctcagctccttgggaggctgaggtgggcaaactgcctgagt

SEQ ID NO: 28291 - DNA, 560 bp, Homo sapiens
tgaaacataccccttttacaaattgtaatgcaacacacagaatataattcctacctcatggggatgttgtggataccaaagggcaccgacgtcagcttcttccctagtgtcctgtttaaggtgcttctgttttcatttctagttatactttatttttattttattttatttttttgagacagagtctcgctctcttgccaggctggagtgcaatggcatgatctcagctcactgcaacttctacctcccaggttcaagcgattccctggcctcagcctcccgaatagctggaattacaggcgcccgccacyacgcccagatactttttgtatttttagtacagacagggtttcactatgttggccaggatggtcttgaactcctgacctcaagtgatctgcctgcgttggcctcccaaagtgctgggattacaggtgtgagccactgcgcctggcctatactttattttttaaactcttcaagaaatcttaggcccgcacggtggctcatgcctgtaatctcagctccttgggaggctgaggtgggcaaactgcctgagt

SEQ ID NO: 28292 - DNA, 629 bp, Homo sapiens
atgttcccccttaaaaataaagtgaagtataacccaaaataggaataatcccataaatccctaatgaagattactacatgaaagacaatctttgacacaatcagtggcagagatatgttcttaagccccccacccattcagatacggtaatacctgagcacatggcagactattccacaacaacttcatgatttcttgaaagagccccaattgtgagcactgagcccstgagtgccagagaccttcttgtattaatggttctagaaaaaatatttagactttttgtaatttcatagtttgcagatgagggtccctctgccttaaaggctcttttaccacattcatccccttctttacctaggtaggccctgcttctgggatttgtggattaaagtatacaagcagtaaaacactttaatggatatccaagaaatatttgtcagaaatttgtatcaatttaaattcctactagcagtgtgtgaaagtgtccttcccaccaaaaggaggacatatttttaatattatgtttcaaaataatgttaagttgtttcaaaaaatgttttaaaccacgtaattgtatacatgtccaaacccaatgctttattctgtgaacgtttgatacattaaaa

SEQ ID NO: 28293 - DNA, 570 bp, Homo sapiens
ggcctctagttgggccccagtgtctgtcaagtgagacagatgtttctggtctgcagaccacattttgtatagcaagaaggttgttagtctagttagtagtgatttttaaaggcaaaagtggcaagtagctatattagtgaatagtggtcactgctaaagctggatgcccatctgttccattttttaggaatmttttcccatacattttatatgaccatctttcacctacttgatggaactcctaattataactataaggaaaaaacaaattttattaatatattggtagaaacattaaattggcaaatttaggagaatatgtgttggtcaaaacaatatgtgaagatgttaacgagttaatatttgcttatgagtttttgataccattaaacgtagaggacatcagtggtatgaccaaagtttatcacagggaataaaaaaatactgcaggttttaaacttgctggccggctacagttcactctctttatgcaaatgaactataatgagtaagatcacatgcaattaaaataaatatcagtcagggatgaggttacatgataggtggcac

SEQ ID NO: 28294 - DNA, 499 bp, Homo sapiens
cagaaatatggcactggagagaatgagagaaaataacttccagttttttgaatcctggagtcatttctctaggtttttattcatatttttacatcactggttagattttctgcagtgcttgcaggcagattttaattctattatcatagtttcctcacaaactttccttagtcagcttggtctctttccattttaagttatactgccatttaagattcccatcayacgtctcagttcttatttctgtggtttctgttttaattgtactgaaaccacaaaaaaagatgatttctgagaattttatctgctttctgtactaaattattgtcactattatgccattcctatgcatcttcagaacattattccgtttttcttgtgctacagaatcttttaatgagccccacggtgttgtcttttccctcagtctatcaatctttaaatggtgtatacaattctatggcccttctttttgtgtagcatagtgtttgtagagaat

SEQ ID NO: 28295 - DNA, 575 bp, Homo sapiens
ttcctcagtagcgtccgagactttaaacaggttactcttaatcaattaagtggggaagaaatatataaatgttcatataatgtcaatgtttgtaatcttggatcaatccatggcataaaattgaagaagaaattttaggcagttatagaagaaatatgggccaaaataatttttatttctcctgaactggctataatttataaagagaaatagacagtgatcatctccttgtgaagctccatactgtttgataaccagtcaaaagtataagcctcgtcagcaaaggcaatcctcatacaaagagccagagtattgtgctttcattcaaatttaaaatcttaagccattcatcaagatagcagtgtaggacatttctaccattatttttccacagaagcatcaattatgacaactacccatgggcaagtgtacttttgtgggmgtctaggagactagaagataagttttaacacaccaatgggaaaaatctgagaataaatgcattgaaaagggtagaaaaaaaataattttgttttactcatatcatcccttcccaaaggcagcataacttagtg

SEQ ID NO: 28296 - DNA, 628 bp, Homo sapiens
tgcttactttatttcatgaatattgtatatagtacatataatatacaaaatctgtgttaatcaactatttatgttattggtaaggcttccagtaaacagtaagctattagtaattaaatttttggagagtcaaaaattatacatagattttgactgcacaggggagtcagtgtccctaactcctgcattgttaaagggtgaactgtatttgaactagggttctggatccatctggtggacagcatcacagagtataaacccaagttctaaatataaaagcagtgtaagtgcctaagcaagactggaatatgatacttggagttaaaacactatatatgcaayggtatttgccacatttgtttgtgtattctcatatttcacatactcacagattttttccttttttttttttttgctttgaaataatacctcttacttccagatacattcttaattgcattaaataattttataattgacatattaaaagtggacctcaataatctttatctattaagaaagggtaaattaaagcacactattaaagctaatagcacacgattacctattgtttactcgggatgggactgggaggaaggaagactgagtcagcattggttcttcctta

SEQ ID NO: 28297 - DNA, 374 bp, Homo sapiens
ctccctagtagctgggattacaggtgtgtgccaccatgcccggctaattttttttgtatttttggtagagacggagtttcgccatgttggccaggctggtcttgaactcctgacctcaagtggtccacccacctcagcctcccaaagtgctgggattacaggcatgagccagtgtgcccagattaatctgttttcattcttcccyggggtagggtggacacaggatgctaccccaaatgaggagagggataggcatggaagagggacatcctggcaatttccctttggccacgtccccaccttctgtctcccttgccacccctccctcttgctaccacttaagatatcatacactaaaatgcacagagaaatca

SEQ ID NO: 28298 - DNA, 1011 bp, Homo sapiens
tttcccagaagaatgagaatgaggtaatgtttaagttacatctgcattgaactgaaattttataatttcccaagcattcattatgaaaattatgatctggaagtcttttatccatgaatttatcaaaaggaagtagagaagttatgttcattttaacaccaaagacgacatgtgcaagctggaagtggtagtgtgtgcctgtagtcccagctacttggaggctgaggcaggagaatcacttgagcccaggaattcgagaccagcataggcaacatagtgagaccccatctctaaaaaaataaaaattatttaggtttggtgcaaaagttattgcggttttggctgccaaaagaaatggccaaaaccgcagtaacttttgtgccaacctaataaaaaaatagaggccacatcctgtgaaagtgactgtctcattagcattgtattttggtttttacttcaagctctctgaatcaggatggggtaaagtagtgctggagaaaggggcaggtatattctgaataacattgtcacaatgtgagctgcagtgagtacattctcattacttctttcttctggttcccagatgtttagcactgtgttcagtggtcgatacattattttattgatgggtgtgttctccatgtacactggcctcatctacaatgattgcttttccaagtctcttaatatctttgggtcatcctggagtgtacggccgatgtttacttataattggacgtaagttgcagaagaagctaaaattcaaagcttattcctttcatgtgcagccctgatttttaagacaagtggtaaactgacacttctttaggaagtggtgacagtgtctcctcattcatgctccacactgtgagttgctttgtgatttgttcagcaagtatccaggaactaagattagaaatgattttttttytttttggaaactaaaaccagattccccagttccctacttgattgtgtgtttgtgtgtttaatttttctttttgtcatttt

SEQ ID NO: 28299 - DNA, 548 bp, Homo sapiens
taggtcagaaactcagagaaggaagggaagtgtgaggtgtactgtactgggtgaagactcacaggggtcgagaacagctatagcatgggaaggggaggctcatttttcgtcttcctcaytcagtttctgactcattgtactataagacagagcataaagtccagtgtatgtagataagggaattggctttcaccagacggtagtccactagcatacccctcccctgtgttttggaattcacactccccaaggatatggaacaatggcaagggagtcagggctgggcctgctagggctgttctcttcttgaccacctccaagtttcttctatttgaatgtgttcttttgaaaacaaagatgtagattttatgaatgttttccccagtttgcgattaaacttaatgaaaaacaacaggccgggcgccatggctcacgcctgtagtcccaacactttgggaggcggaggcgggcggatcatctgaggtcaggagaccgagacgatcctggctaacacgtgaaaccccgtctctactaaaattacaaaaaaa

SEQ ID NO: 28300 - DNA, 1123 bp, Homo sapiens
aactgtattttataaactagtaagtttgtgtgattacttcatgaattagwttctaaaatgaaagctataaggtctgtattttggtgtatgtgtatatatatgtgtgtatatgtatacatatatgcttggatgtatttatgcgtatgtacatgtattacattatatgttgtgtctacatggtaaaacctgatatacagtcaaccagaaattcctcaaagataaatgagtactcatataaaataagaaatgtatagtaataaatctaaataccttttaatttacaagacttaagtaaatcattaatacataaggtggtttgaaaattgttggtaaaataaaaataaaatatgtcttcaaaaaaaaagaaaaaaatgtggcacacatacaccatagaatactattcagcccagtcaagtaatcagaatgctttttgtaaaagaacaaagagaataagaagtttcattagcagtagtaaaggtaaaaatacctaatacagtctagaaacacgcccatggaaacaccagtattaagcaattccttccacatgttaaaaatggggttaactcacagaaatcacagagtaagtacttatttgtaccaaaggcagtaaaagatattgcttttaccaatctttacatgacattcacagaaaaacgtgggttccatgatctttagaactcaattctcatagcctaattctccagaactcagccttaaaccggacactaaattttaagcaaaagaaaggccaaagatgaatccaaacaaggaagagaagcaagaggcaggtgactggtgcacaggaatgggctctggaaggagcagggatcaggtaacaaggatttttttttttttaatgggttcatttcagccatcatctcctcactaactgaggtatagctcagcttgtaagattcccagtctacaaagcacaaaatagaaatatagttggtaggataacttggttgctggataatttgttcttacatgtggtttccaaaagagatgcattaaatagcaagataaatactaaccaattttcaaactgctgctctttcatttagtatagatttcaatgtcactctgtataatgaagtgtaagactaattaataaactacagtg

SEQ ID NO: 28301 - DNA, 1123 bp, Homo sapiens
aactgtattttataaactagtaagtttgtgtgattacttcatgaattagtttctaaaatgaaagctataaggtctgtattttggtgtatgtgtatatatatgtgtgtatatgtatacatatatgcttggatgtatttatgcgtatgtacatgtattacattatatgttgtgtctacatggtaaaacctgatatacagtcaaccagaaattcctcaaagataaatgagtactcatataaaataagaaatgtatagtaataaatctaaataccttttaatttacaagacttaagtaaatcattaatacataaggtggtttgaaaattgttggtaaaataaaaataaaatatgtcttcaaaaaaaaaraaaaaaatgtggcacacatacaccatagaatactattcagcccagtcaagtaatcagaatgctttttgtaaaagaacaaagagaataagaagtttcattagcagtagtaaaggtaaaaatacctaatacagtctagaaacacgcccatggaaacaccagtattaagcaattccttccacatgttaaaaatggggttaactcacagaaatcacagagtaagtacttatttgtaccaaaggcagtaaaagatattgcttttaccaatctttacatgacattcacagaaaaacgtgggttccatgatctttagaactcaattctcatagcctaattctccagaactcagccttaaaccggacactaaattttaagcaaaagaaaggccaaagatgaatccaaacaaggaagagaagcaagaggcaggtgactggtgcacaggaatgggctctggaaggagcagggatcaggtaacaaggatttttttttttttaatgggttcatttcagccatcatctcctcactaactgaggtatagctcagcttgtaagattcccagtctacaaagcacaaaatagaaatatagttggtaggataacttggttgctggataatttgttcttacatgtggtttccaaaagagatgcattaaatagcaagataaatactaaccaattttcaaactgctgctctttcatttagtatagatttcaatgtcactctgtataatgaagtgtaagactaattaataaactacagtg

SEQ ID NO: 28302 - DNA, 1123 bp, Homo sapiens
aactgtattttataaactagtaagtttgtgtgattacttcatgaattagtttctaaaatgaaagctataaggtctgtattttggtgtatgtgtatatatatgtgtgtatatgtatacatatatgcttggatgtatttatgcgtatgtacatgtattacattatatgttgtgtctacatggtaaaacctgatatacagtcaaccagaaattcctcaaagataaatgagtactcatataaaataagaaatgtatagtaataaatctaaataccttttaatttacaagacttaagtaaatcattaatacataaggtggtttgaaaattgttggtaaaataaaaataaaatatgtcttcaaaaaaaaagaaaaaaatgtggcacacatacaccatagaatactattcagcccagtcaagtaatcagaatgctttttgtaaaagaacaaagagaataagaagtttcattagcagtagtaaaggtaaaaatacctaatacagtctagaaacacgcccatggaaacaccagtattaagcaattccttccacatgttaaaaatggggttaactcacagaaatcacagagtaagtacttatttgtaccaaaggcagtaaaagatattgcttttaccaatctttacatgacattcacagaaaaacgtgggttccatgatctttagaactcaattctcatagcctaattctccagaactcagccttaaaccggacactaaattttaagcaaaagaaaggccaaagatgaatccaaacaaggaagagaagcaagaggcaggtgactggtgcacaggaatgggctctggaaggagcagggatcaggtaacaaggatttttttttttttaatgggttcatttcagccatcatctcctcactaactgaggtatagctcagcttgtaagattcccagtctacaaagcacaaaatagaaatatagttggtaggataacttggttgctggataatttgttcttacatgtggtttccaaaagagatgyattaaatagcaagataaatactaaccaattttcaaactgctgctctttcatttagtatagatttcaatgtcactctgtataatgaagtgtaagactaattaataaactacagtg

SEQ ID NO: 28303 - DNA, 460 bp, Homo sapiens
tcccacctcggcttcccaaagtgccaaaattataggcatgagccatcattcctggccctatttttggtactcttaacataagtaggggatttttttttttttttttgagactgagtctcactctgtcatcaggctggggtgcagtggcgcgatctcagctcactgcaacctctgcctcctgggttcaagtgattctcctgcctcagcctcctgagtagctgggattacaggygcctgccaccacgcccagttaatttttgtatttttagtagagacagggcttcaccatgttggccaggatggtcttgatttcttgacctcatgatccacccgccttggcctcccaaagtgctgggattacaggcatgagccactgcgcccggccaagtaggggattttttaaacctaattgtgaatatttgacatcaaattatattggttcatatgtaatagtgaattc

SEQ ID NO: 28304 - DNA, 753 bp, Homo sapiens
agaaagcatatcaggcaggctcggggagaggaaaggaacacggcctctccagcagccacacaggcctgcagtaggatggggctggggctggggctggggctgggactggggctggccccgtttatcacttgggcctcatgaggggaaaagaaaggacagggggcagaggaggagcatgggggcagcgggttgcctaaggagaaggcgcctcagggaaggggtattagtttgttttcacactgctataaagaaatacttgagcctaggtaatttataaaggaaagaggtttaatcgactcccagttcagggaacttacagtcatggcagaaggcgaaggggaagcaggcaccttctccacaaggcggcaggagggagtgagcggagaagcaggaagtgccacactttcaaaccatcagctctcctgagaactccckcactatcaggggagcagcaggggggaaactgtccccagatcccatcccctcccaccaggtttctcccttgacacaggaggattacaattccagatgagatttcggtggggacacagagcccaacctgtgagggtctcagtctatcttgcagctcccctggggctgaggctgagtacagttctgctggccctgctctacagcacgtggggactctgcctgtgtgcccccatctgctcttcctggggatggtggctgcttcctcaagaggagggtggatctgctctcctgcccacccctctccagggccttttggagccc

SEQ ID NO: 28305 - DNA, 753 bp, Homo sapiens
agaaagcatatcaggcaggctcggggagaggaaaggaacacggcctctccagcagccacacaggcctgcagtaggatggggctggggctggggctggggctgggactggggctggccccgtttatcacttgggcctcatgaggggaaaagaaaggacagggggcagaggaggagcatgggggcagcgggttgcctaaggagaaggcgcctcagggaaggggtattagtttgttttcacactgctataaagaaatacttgagcctaggtaatttataaaggaaagaggtttaatcgactcccagttcagggaacttacagtcatggcagaaggcgaaggggaagcaggcaccttctccacaaggcggcaggagggagtgagcggagaagcaggaagtgccacactttcaaaccatcagctctcctgagaactccctcrctatcaggggagcagcaggggggaaactgtccccagatcccatcccctcccaccaggtttctcccttgacacaggaggattacaattccagatgagatttcggtggggacacagagcccaacctgtgagggtctcagtctatcttgcagctcccctggggctgaggctgagtacagttctgctggccctgctctacagcacgtggggactctgcctgtgtgcccccatctgctcttcctggggatggtggctgcttcctcaagaggagggtggatctgctctcctgcccacccctctccagggccttttggagccc

SEQ ID NO: 28306 - DNA, 545 bp, Homo sapiens
ccatgaaacaattacttacacaacaaaatatttgagattagcacataattatttataaatgtcctttgcactttcattactcttaaaacagatgtaacagaactaaatttaagtacaaaacaatcttctttaaaaaacccaatacttaaatttgtagtgtcaccagagaatacaaggaattcaacatccgtgctaaattataaatcacaaatatgagtaatcamtctacacttagattattgactttggcctgccagataaaaagcttgcattaaaaaagtagttctaaaacaacccaatactattttaatatgtgattcaagattaagcttcaacttatatgattcaatacaagcacttaaaaaaaattccaagagcaatttccctgtaattggtccttaatctactggaaatgcaaaagatgatcccagccttccctgacaaatataactcaacaaagcaaaaaggcagtagaaattccattcaaagtgaaggaggtacatttagacaccaacaaaaaactcaagaacataacacacacggca

SEQ ID NO: 28307 - DNA, 798 bp, Homo sapiens
aaataagtaaagtaatacttacatttctctgtacacacatagaaaaaggtctagaggcccggtgcggtggctcatgcctgtaatcccagcactttgggaggccaaggcgggtggatcacctgaggtcaagagttygagaccagcctggccaacatggtgaaaccccatctccactaaaaatacaaaattagctgggcatggtggtgggtgcctgtaattccagctactcaggaggcggaggcaggagaatcgcttgaacctgggaggcagaggttgcagtgagccgagattgcgccattgcactccagcctggacaaaaagagcgaaactccatctcaataaaaaaaaaaggaaaaagaaaaaggtctagaatgactgaacactaaattatttatggtgatctcttctgtaaggaagaggaagcaggtttgttgcaaaatggtcattgcagaatggtactttcactttttactcaaaattcttctgtattgtttgaagtctttttttctaaataccactaacatatatttatgcattccatggattaagtaaaaagaaaaacacaaaaaccacagcctcagaaatagacactccacatcatagcacagatgcttttccttgggggtttgagatcttaatcaaagatgttaaatggattcttgggtttgtcaaattgactctgacctgcagcttttggtcctgagggagtaagtgaaatgaaacgagcctttcctccctaaattcagcctcggctggccccaaatcacagagttgaaagaggtcaagtaagggatgagg

SEQ ID NO: 28308 - DNA, 798 bp, Homo sapiens
aaataagtaaagtaatacttacatttctctgtacacacatagaaaaaggtctagaggcccggtgcggtggctcatgcctgtaatcccagcactttgggaggccaaggcgggtggatcacctgaggtcaagagtttgagaccagcctggccaacatggtgaaaccccatctccactaaaaatacaaaattagctgggcatggtggtgggtgcctgtaattccagctactcaggaggcggaggcaggagaatcgcttgaacctgggaggcagaggttgcagtgagccgagattgcgccattgcactccagcctggacaaaaagagcgaaactccatctcaataaaaaaaaaaggaaaaagaaaaaggtctagaatgactgaacactaaattatttatggtgatctcttctgtaaggaagaggaagcaggtttgttgcaaaatggtcattgcagaayggtactttcactttttactcaaaattcttctgtattgtttgaagtctttttttctaaataccactaacatatatttatgcattccatggattaagtaaaaagaaaaacacaaaaaccacagcctcagaaatagacactccacatcatagcacagatgcttttccttgggggtttgagatcttaatcaaagatgttaaatggattcttgggtttgtcaaattgactctgacctgcagcttttggtcctgagggagtaagtgaaatgaaacgagcctttcctccctaaattcagcctcggctggccccaaatcacagagttgaaagaggtcaagtaagggatgagg

SEQ ID NO: 28309 - DNA, 469 bp, Homo sapiens
gaaggctatgtaggatgatgacaggcattttgagcaaaggactgatcataggctgaacaaaggttaaaaaagcaggcatagtaatgttactttcagaaaataataaaaatatgtttaaaaaatggaaaattaattacacaagtttgtactgagcacttatgtgagaaatacaagttgttatcttgtgattacatgctttctgacatttaagattgtctcaattgagaagaactaatgagttataagatctctttatcagagattaggaagtgttctgattcttcaggaaattttccctaaaacttatttataaaaaagcaatttatggtgagacttgggattggattgaagacaaattagaaaagcagtatgacttcatattttccagtttgaatgattaaaagcatggcaattatactaggagaaatagcaraattggccaagaagtttgttttgaaacaaaatatat

SEQ ID NO: 28310 - DNA, 469 bp, Homo sapiens
gaaggctatgtaggatgatgacaggcattttgagcaaaggactgatcataggctgaacaaaggttaaaaaagcaggcatagtaatgttactttcagaaaataataaaaatatgtttaaaaaatggaaaattaattacacaagtttgtactgagcacttatgtgagaaatacaagttgttatcttgtgattacatgctttctgacatttaagattgtctcaattgagaagaactaatgagttataagatctctttatcagagattaggaagtgttctgattcttcaggaaattttccctaaaacttatttataaaaaagcaatttatggtgagacttgggattggattgaagacaaattagaaaagcagtatgacttcatattttccagtttgaatgattaaaagcatggcaattatactaggagaaatagcagaattggcmaagaagtttgttttgaaacaaaatatat

SEQ ID NO: 28311 - DNA, 501 bp, Homo sapiens
gtctgtcatcttttacacaactgaagcctttggtggagaaggattttgagttgactacattgcttaattgtaatgactattctgtttgacctttctaagccagagcttcacgaagagagatttgaatgtttgctccgtagaagtaggtctcttccaggggtgaggcactgtcttaaaaagttataaagaggccgggtgtggtggyttatgcctgtaatcccagccctttgggaggccaagtcaggtggatcatgaggtcacgaaatcgagaccagcctgaccaacatggtgaaaccccgtctctactaaaaatacaaaaattagctgggtgtggtggcgcccgcctgtaatcccacctactctagaggctgaggcaggagaattgcttgaacccgggaagcagaggttgcagtgagccgagattgcgccactgcactcctgcctgatgacagagcgagactccatctcaaaaaaaaaaaaaaaagttgaaaatactaactt

SEQ ID NO: 28312 - DNA, 604 bp, Homo sapiens
ggactgaggaagtcttacaagaccctcatgaatgctttacttttgtttgcagctacattaataattgagcagttagttttaagcagcgattcttgaaccttagtacacatgaacatcagtttaaggccttgttaaataaggctgattctcattcccaggaccagaaagagtagaaatcgggagaccaaatctggtgatcctttgctctggaatcatgacccacacttcrggaaacaatgatgttaagactcataatatgtgtctgattctcatacggaacagttagccctgctctgccccactatcatatgatggtacttactagccaccaagacaaaacacaaagcaccgagcccaaatgggtaaggcgaggggttgggagtgggacaaaggaggcaggcatgacatgaaggaaatgaagagtctaacacagggtaacattcaacagtaaaacaaaagaacatagcaaattaaaacaacagcaacgacaaaacagtaacacccacgttcactcatttaatttattctttatcaacgctggattacccaaaaggcataaatgatcctgagtttgggccaaacacatgcacaaacaccaaatcaa

SEQ ID NO: 28313 - DNA, 604 bp, Homo sapiens
ggactgaggaagtcttacaagaccctcatgaatgctttacttttgtttgcagctacattaataattgagcagttagttttaagcagcgattcttgaaccttagtacacatgaacatcagtttaaggccttgttaaataaggctgattctcattcccaggaccagaaagagtagaaatcgggagaccaaatctggtgatcctttgctctggaatcatgacccacacttcaggaaacaatgatgttaagactcataatatgtgtctgattctcatacggaacagttagccctgctctgccccactatcatatgatggtacttactagccaccaagacaaaacacaaagcacygagcccaaatgggtaaggcgaggggttgggagtgggacaaaggaggcaggcatgacatgaaggaaatgaagagtctaacacagggtaacattcaacagtaaaacaaaagaacatagcaaattaaaacaacagcaacgacaaaacagtaacacccacgttcactcatttaatttattctttatcaacgctggattacccaaaaggcataaatgatcctgagtttgggccaaacacatgcacaaacaccaaatcaa

SEQ ID NO: 28314 - DNA, 1462 bp, Homo sapiens
atttgccttatattccatgtgtaaataacagaaataatttttttctgaatattttartaagtgtaattcaattctggttagtttgcaacaccattgaacataatattactcacttctgcccacttttaaatacagacactttcactactcttacagaacagtaatctgttctctcatctcactgacagtggaacaagaaaaaaatttaagctacaatatgagagaagtaaagtgcataacccagttctataatagtatcattgctagaaagagcttgcaaagtgctgtgaattttttttctctagaaagttttccatttacccttttattttatccatccatccatccatccatcccagagaattttctcatggtctcagtgaattttttttatagtcctaaacaaagttaaataacaaaacttctgaggttctaacactatgatcttgacaatccaagtgaacaattatcagtaaatataacagaaaactctgccatttacagcacttcacattatcaaattattaaaatgatctaaaattattcatttaaatgctagcagggaaataaatgactctaaattccctgcattactcacaaatactacaaaaaggaatgttccctggtttctgtggttagaaaatgtatagagcagagtatttcatctaaacctagagtcttctttttttatttggatttgccacttataacatgaatgattttgaaattcccatagcagaaagcttttcatcattgtctcactaagaaagacttgattctagtgccgaaaactgaagaactccttagggcataaagtcagagaacagcagcttattccagaccactcctctaaatgttaatgaaacttacataaatcatacataacatatactatccctttgtgctggaaaatgccatgtttttatggttgtggttgtacagctaggataataggaaccaaagacataaaacagtaattaatatatttcagaagtgaagtgttttattggatagatgctaattaagactgatagatggcagtgattgaaataagcataagccatttggtcaacacaagtgaaagatcagctatcatcttgaatgctttaattaaggatgctttgctttttgtttcttcttccctactcttctgaatatatgaaaaaacatggagaaaaaataataataactgctttttgacagggaaactgatgtgtagtgcatgcctgatatggtttggctgtgtcctcactcaaatctcatcttaaattgcagttcccataatccccaagtctcatgggagggacctggtgggaggtaattgaatcataggagtggttaccctcatgctgctgttctcatgatagtgagtgaattctcatgagatctgatagttttataaggggcatttccctctttgcttggcacttctccttcccgccatcatgggaagaagaacatg

SEQ ID NO: 28315 - DNA, 1462 bp, Homo sapiens
atttgccttatattccatgtgtaaataacagaaataatttttttctgaatattttagtaagtgtaattcaattctggttagtttgcaacaccattgaacataatattactcacttctgcccacttttaaatacagacactttcactactcttacagaacagtaatctgttctctcatctcactgacagtggaacaagaaaaaaatttaagctacaatatgagagaagtaaagtgcataacccagttctataatagtatcattgctagaaagagcttgcaaagtgctgtgaattttttttctctagaaagttttccatttacccttttattttatccatccatccatccatccatcccagagaattttctcatggtctcagtgaattttttttatagtcctaaacaaagttaaataacaaaacttctgaggttctaacactatgatcttgacaatccaagtgaacaattatcagtaaatataacagaaaactctgccatttacagcacttcacattatcarattattaaaatgatctaaaattattcatttaaatgctagcagggaaataaatgactctaaattccctgcattactcacaaatactacaaaaaggaatgttccctggtttctgtggttagaaaatgtatagagcagagtatttcatctaaacctagagtcttctttttttatttggatttgccacttataacatgaatgattttgaaattcccatagcagaaagcttttcatcattgtctcactaagaaagacttgattctagtgccgaaaactgaagaactccttagggcataaagtcagagaacagcagcttattccagaccactcctctaaatgttaatgaaacttacataaatcatacataacatatactatccctttgtgctggaaaatgccatgtttttatggttgtggttgtacagctaggataataggaaccaaagacataaaacagtaattaatatatttcagaagtgaagtgttttattggatagatgctaattaagactgatagatggcagtgattgaaataagcataagccatttggtcaacacaagtgaaagatcagctatcatcttgaatgctttaattaaggatgctttgctttttgtttcttcttccctactcttctgaatatatgaaaaaacatggagaaaaaataataataactgctttttgacagggaaactgatgtgtagtgcatgcctgatatggtttggctgtgtcctcactcaaatctcatcttaaattgcagttcccataatccccaagtctcatgggagggacctggtgggaggtaattgaatcataggagtggttaccctcatgctgctgttctcatgatagtgagtgaattctcatgagatctgatagttttataaggggcatttccctctttgcttggcacttctccttcccgccatcatgggaagaagaacatg

SEQ ID NO: 28316 - DNA, 1462 bp, Homo sapiens
atttgccttatattccatgtgtaaataacagaaataatttttttctgaatattttagtaagtgtaattcaattctggttagtttgcaacaccattgaacataatattactcacttctgcccacttttaaatacagacactttcactactcttacagaacagtaatctgttctctcatctcactgacagtggaacaagaaaaaaatttaagctacaatatgagagaagtaaagtgcataacccagttctataatagtatcattgctagaaagagcttgcaaagtgctgtgaattttttttctctagaaagttttccatttacccttttattttatccatccatccatccatccatcccagagaattttctcatggtctcagtgaattttttttatagtcctaaacaaagttaaataacaaaacttctgaggttctaacactatgatcttgacaatccaagtgaacaattatcagtaaatataacagaaaactctgccatttacagcacttcacattatcaaattattaaaatgatctaaaattattcatttaaatgctagcagggaaataaatgactctaaattccctgcattactcacaaatactacaaaaaggaatgttccctggtttctgtggttagaaaatgtatagagcagagtatttcatctaaacctagagtcttctttttttatttggatttgccacttataacatgaatgattttgaaattcccatagcagaaagcttttcatcattgtctcactaagaaagacttgattctagtgccgaaaactgaagaactccttagggcataaagtcagagaacagcagcttattccagaccactcctctaaatgttaatgaaacttacataaatcatacataacatatactatccctttgtgctggaaaatgccatgtttttatggttgtggttgtacagctaggataataggaaccaaagacataaaacagtaattaatatatttcagaagtgaagtgttttattggatagatgctaattaagactgatagatggcagtgattgaaataagcataagccatttggtcaacacaagtgaaagatcagctatcatcttgaatgctttaattaaggatgctttgctttttgtttcttcttccctactcttctgaatatatgaaaaaacatggagaaaaaataataataactgctttttgacagggaaactgatgtgtagtgcatgcctgatatggtttggctgtgtcctcactcaaatctcatctwaaattgcagttcccataatccccaagtctcatgggagggacctggtgggaggtaattgaatcataggagtggttaccctcatgctgctgttctcatgatagtgagtgaattctcatgagatctgatagttttataaggggcatttccctctttgcttggcacttctccttcccgccatcatgggaagaagaacatg

SEQ ID NO: 28317 - DNA, 800 bp, Homo sapiens
ctctgaacttctgatgacagccagggactctctcccataatatacacacattgaactaaaattttgcatttaatttctatgggtggactcacaaactacttgaaactcatctttgagccccagggtaacaactcatgatttagaggttgtgcatatagrtggcaataatgataataggaatttaaactatttttgagcatttactgtgtcctgggtacagtgctaaaggctttccatgaattaccttgcttacaacatttccataacatttccattcacccgcattgcacagataagaaaattgaggtttatagaggtcaagtcattgtctcaagctcaagcagctagtaagcaccagagatgaactaaaacccagctctgctggttccaaagtcagtgctctgtgcactgtgcagccggccctgcttagggctggtggtacccttgtagacataggcctgagggagagaaggggcagttttggggatggtttagaatgtgtgcttctggactgttttactgcctgaacctttggagatttggaccccagcccatgcctgatggagtctgcagtttggcataatgaattctgtgcatacccaacaattcggccctatctttgagagcagaaaggcagagtggggcgaagaaggaaagtgttggtgcacccaaaggcagagctggacatgggagagaagaagaagtctgtttcaagctgtctgtaagacactctcagagttaagagaccatcatgaggtggggttgggggaggggagcaaaggaaggcctaggggaaagaa

SEQ ID NO: 28318 - DNA, 507 bp, Homo sapiens
tattttctgattttcatagaaatatgaaaaagagaaaaatagttatatatataattcataatttatatgcatacataagtatatataaacagtaaaacatatttatggaaatacatatacacacataaatcataagagcattcacattaaaagttactcattcagccacatatataatgtaatttctgccctttgcattttgctactgataaggaataaatatagttggtatgatgtggtggaaagtgttttatactgagagtcagaagatctcaattcatataggcacagagaatcttttatgttctcatctctaaaagtagttcaaattgaactgtgatttcagaggcccctggactctaatatactatataatctggcatttgyatagctctatatgtaaagaaaagtcaatctaatttaaacagttccaactgatcattacacttgtagggaatgaaatgcgtattttatcagcattgaaataatatttagggactaaaaaat

SEQ ID NO: 28319 - DNA, 839 bp, Homo sapiens
ggaacagaaagggacattagggaaagacgagggaagtccaagtgtactgtggggtgtagttggtggtcatggacccacattctttccttggttgtgacaaatgtaccgtagtgtgcaagatgttaacaaaaagggcaactgggtgatggggtgtgtggacactctttgttctatctttataactggactgtcatctgaagctgttctgaaataaaatattaacaacaaccaaaaaaaaaaaaagcacacagaagtcagagcatgtgtccttcgctcaaaagcctgcagcgtaaaaccctcagagtaaaagccttttctacagaagcttaggaggtccccgagatccgactctctgttgctttccagccgtgtggcctctgttctgtctcccaagcctgccctgcaaccccttctggaaaaccttggggtgtgcagatctggctgccctcaatgctgcaccccaggtgactccttggctcagtgtcacctcctcagtggggtctggcccacctcccaaactgaacaccgtagcctactcctgacacctgctctcccacccgagaccccttccctggctcagcgttttgctttttttcatgagytccccaggggcagcaatctttgtcttaagggtcccccggtagatcccaaatgcccagatgagggcctggtacatgacaggtgctgaacacacacacacagttgaatgaagaaatgagtgcatgtgggcctctccctgctctcaggccaggtcccagctaagatatgtgccaatcgcactggttgatcagagtggacgtctcactgtgcttttctacagctgccgctagggcctcttc

SEQ ID NO: 28320 - DNA, 839 bp, Homo sapiens
ggaacagaaagggacattagggaaagacgagggaagtccaagtgtactgtggggtgtagttggtggtcatggacccacattctttccttggttgtgacaaatgtaccgtagtgtgcaagatgttaacaaaaagggcaactgggtgatggggtgtgtggacactctttgttctatctttataactggactgtcatctgaagctgttctgaaataaaatattaacaacaaccaaaaaaaaaaaaagcacacagaagtcagagcatgtgtccttcgctcaaaagcctgcagcgtaaaaccctcagagtaaaagccttttctacagaagcttaggaggtccccgagatccgactctctgttgctttccagccgtgtggcctctgttctgtctcccaagcctgccctgcaaccccttctggaaaaccttggggtgtgcagatctggctgccctcaatgctgcaccccaggtgactccttggctcagtgtcacctcctcagtggggtctggcccacctcccaaactgaacaccgtagcctactcctgacacctgctctcccacccgagaccccttccctggctcagcgttttgctttttttcatgagttccccaggggcagcaatctttgtcttaagggtcccccggtagatcccaaatgcccrgatgagggcctggtacatgacaggtgctgaacacacacacacagttgaatgaagaaatgagtgcatgtgggcctctccctgctctcaggccaggtcccagctaagatatgtgccaatcgcactggttgatcagagtggacgtctcactgtgcttttctacagctgccgctagggcctcttc

SEQ ID NO: 28321 - DNA, 839 bp, Homo sapiens
ggaacagaaagggacattagggaaagacgagggaagtccaagtgtactgtggggtgtagttggtggtcatggacccacattctttccttggttgtgacaaatgtaccgtagtgtgcaagatgttaacaaaaagggcaactgggtgatggggtgtgtggacactctttgttctatctttataactggactgtcatctgaagctgttctgaaataaaatattaacaacaaccaaaaaaaaaaaaagcacacagaagtcagagcatgtgtccttcgctcaaaagcctgcagcgtaaaaccctcagagtaaaagccttttctacagaagcttaggaggtccccgagatccgactctctgttgctttccagccgtgtggcctctgttctgtctcccaagcctgccctgcaaccccttctggaaaaccttggggtgtgcagatctggctgccctcaatgctgcaccccaggtgactccttggctcagtgtcacctcctcagtggggtctggcccacctcccaaactgaacaccgtagcctactcctgacacctgctctcccacccgagaccccttccctggctcagcgttttgctttttttcatgagttccccaggggcagcaatctttgtcttaagggtcccccggtagatcccaaatgcccagatgagggcctggtacatgacaggtgctgaacacacacacacagttgaatgaagaaatgagtgcrtgtgggcctctccctgctctcaggccaggtcccagctaagatatgtgccaatcgcactggttgatcagagtggacgtctcactgtgcttttctacagctgccgctagggcctcttc

SEQ ID NO: 28322 - DNA, 1462 bp, Homo sapiens
ggagcacagcacctggagttgctttttagtcttcttcccaagaactgcatggggctggcagggagaggaggggaagtaggaggccacacgacacctggcacccattgtatgttttttatttttttttatttttttgatggggataagatttgcatgacataaaattagccattttaagactgactcatgccttaatcctagcactttgggaggccgaggtgggtacattgcttgagtccaagagttcgagatcagcctgggcaacgtgtcaaaacctcatctctactaaaaatacaaaatattagccaagcatggtggcacgcgcctgtggtcccaggtactcgagaggctaaagtggargatcacttgagcctgggagttcaaggctgcagtgagctatgattgcaccaccacactcccgcctgggcagcagagcgagacccggtctcaaaaaaaaaaaaaaaaaaaaaatcattttcaagtgagcaattcagtggcacttagtacattcacaatgatgtacaaccaccactgagttccagaatactttcatcaccccagaaggaagcctgtacccactcacagtcactccccattcccctctctcccaaccacctgccagtcaccaatctgagccccatctctatggatctacctactctggatatctcatataaatggcatcatacaatagttgacctcttatttagtttgatggcaagagggggaaggagctgctgctggagcccctccaggccctgcctgaagcttctgcttgtggggaagtttctagatgctcagagggagcagcccagtctgccctagacctttgtttacctccttctttggggctccgctgtgtagtggactgggtgccggtggtcctgggctttggtctcagctcagcagctgatgcagagtcctcagggaagctgctgcacctctctgggccccaggggtctcgtatgtgaagcgagcggttgaacttgtgggtccctgttgctgcttttgcacccccccactactcccaataagttctgaggagagacgggactccctgtggtagagacaaagggccactgctgattggaggggaggaggtccagaagctccttctaaaacggaaagaaagagaggggaagtggccttgaccttggtccagcaaggggcagtgggccaccagacctcgtgggttctctgccaaccatgagagccagtaaaagggataaagaaggtgaccagggcaggagcagagcccagtgtccaggggtgcacaacggcctgcttccctccagattgggtgcagccccagatgggtgacaccaggatggccgtgggccctaggagtgactggggaggaggccgcgtgtgtgtggtgtgtgctggccggcaggcatgtgcaggcttctgtgtataatctggcttgtaaattgctcggggactgtaactgcggaaagggcca

SEQ ID NO: 28323 - DNA, 1462 bp, Homo sapiens
ggagcacagcacctggagttgctttttagtcttcttcccaagaactgcatggggctggcagggagaggaggggaagtaggaggccacacgacacctggcacccattgtatgttttttatttttttttatttttttgatggggataagatttgcatgacataaaattagccattttaagactgactcatgccttaatcctagcactttgggaggccgaggtgggtacattgcttgagtccaagagttcgagatcagcctgggcaacgtgtcaaaacctcatctctactaaaaatacaaaatattagccaagcatggtggcacgcgcctgtggtcccaggtactcgagaggctaaagtggaggatcacttgagcctgggagttcaaggctgcagtgagctatgattgcaccaccacactcccgcctgggcagcagagcgagacccggtctcaaaaaaaaaaaaaaaaaaaaaatcattttcaagtgagcaattcagtggcacttagtacattcacaatgatgtacaaccaccactgagttccagaatactttcatcaccccagaaggaagcctgtacccactcacagtcactccccattcccctctctcccaaccacctgccagtcaccaatctgagccccatctctatggatctacctactctggatatctcatataaatggcatcatacaatagttgacctcttatttagtttgatggcaagagggggaaggagctgckgctggagcccctccaggccctgcctgaagcttctgcttgtggggaagtttctagatgctcagagggagcagcccagtctgccctagacctttgtttacctccttctttggggctccgctgtgtagtggactgggtgccggtggtcctgggctttggtctcagctcagcagctgatgcagagtcctcagggaagctgctgcacctctctgggccccaggggtctcgtatgtgaagcgagcggttgaacttgtgggtccctgttgctgcttttgcacccccccactactcccaataagttctgaggagagacgggactccctgtggtagagacaaagggccactgctgattggaggggaggaggtccagaagctccttctaaaacggaaagaaagagaggggaagtggccttgaccttggtccagcaaggggcagtgggccaccagacctcgtgggttctctgccaaccatgagagccagtaaaagggataaagaaggtgaccagggcaggagcagagcccagtgtccaggggtgcacaacggcctgcttccctccagattgggtgcagccccagatgggtgacaccaggatggccgtgggccctaggagtgactggggaggaggccgcgtgtgtgtggtgtgtgctggccggcaggcatgtgcaggcttctgtgtataatctggcttgtaaattgctcggggactgtaactgcggaaagggcca

SEQ ID NO: 28324 - DNA, 1462 bp, Homo sapiens
ggagcacagcacctggagttgctttttagtcttcttcccaagaactgcatggggctggcagggagaggaggggaagtaggaggccacacgacacctggcacccattgtatgttttttatttttttttatttttttgatggggataagatttgcatgacataaaattagccattttaagactgactcatgccttaatcctagcactttgggaggccgaggtgggtacattgcttgagtccaagagttcgagatcagcctgggcaacgtgtcaaaacctcatctctactaaaaatacaaaatattagccaagcatggtggcacgcgcctgtggtcccaggtactcgagaggctaaagtggaggatcacttgagcctgggagttcaaggctgcagtgagctatgattgcaccaccacactcccgcctgggcagcagagcgagacccggtctcaaaaaaaaaaaaaaaaaaaaaatcattttcaagtgagcaattcagtggcacttagtacattcacaatgatgtacaaccaccactgagttccagaatactttcatcaccccagaaggaagcctgtacccactcacagtcactccccattcccctctctcccaaccacctgccagtcaccaatctgagccccatctctatggatctacctactctggatatctcatataaatggcatcatacaatagttgacctcttatttagtttgatggcaagagggggaaggagctgctgctggagcccctccaggccctgcctgaagcttctgcttgtggggaagtttctagatgctcagagggagcagcccagtctgccctagacctttgtttacctccttctttggggctccgctgtgtagtggactgggtgccggtggtcctgggctttggtctcagctcagcagctgatgcagagtccycagggaagctgctgcacctctctgggccccaggggtctcgtatgtgaagcgagcggttgaacttgtgggtccctgttgctgcttttgcacccccccactactcccaataagttctgaggagagacgggactccctgtggtagagacaaagggccactgctgattggaggggaggaggtccagaagctccttctaaaacggaaagaaagagaggggaagtggccttgaccttggtccagcaaggggcagtgggccaccagacctcgtgggttctctgccaaccatgagagccagtaaaagggataaagaaggtgaccagggcaggagcagagcccagtgtccaggggtgcacaacggcctgcttccctccagattgggtgcagccccagatgggtgacaccaggatggccgtgggccctaggagtgactggggaggaggccgcgtgtgtgtggtgtgtgctggccggcaggcatgtgcaggcttctgtgtataatctggcttgtaaattgctcggggactgtaactgcggaaagggcca

SEQ ID NO: 28325 - DNA, 585 bp, Homo sapiens
tgtgtgggctcaagtgataactcccacttcagcctcccagagtgctgggattacaggcatgacccccaatgcttggccatatggttttttggttaagttttgttgatcaaagtctgccacacttatgaaggcatactacattatttaaactttgactttatgttgcagcctgtatccttctgaaatgtaaatacaygcgcacacacacacacacacacacacatatacacatatacatgtatatatatttaaattgcctagaatgtagacatatatgtatgtatgtattctgaggcaagggtctattttcattttaccttaaaaaatagaaagaaggctgggcacaatggctcatccctgtatttgcagcattttgggaggctgaggtgggataattgcttgaagtttttgagattgaggcttcagtgaaccaagatcacaccactgcacttcagcctgaatgacagagcgagacccgatcccaccaaatgaatgaacgaatgaatggacaaccagttgtcttaatattgtgaagtctgaatggacaaggatggtgacaggaagattgatatgcatgaagacaca

SEQ ID NO: 28326 - DNA, 605 bp, Homo sapiens
tcctgggttcacaccattctcctgcctcagcctcctgagtagctgggactccaggcgcccaccaccacacccagctaattttttttttttgtatttttagtagagacggggtttcacggtgctagccaggatggtcttgatctcctgacctcgtgatccacccgcctcggactcccaaagtgctgggattacaggcgtgagccactgtgcccagccgcatatggccagacatttctatgagacattgttcatcaggcctagaccctgagtccccattaaatggtgtttctatggcaaattagggacatatgtagaatagaactgcttatccctgctgatctgtggctgcagggagtcacaagtttgcagtcttgttacattcagatacttaagagttaaaaaataactggtggcttttgcctcctttatccctgatgtcaaataaaatggaattccaaccaatagcttttccacattgatcttttttcaatgagtttttctaatttgtttgaatttcctggtgtcaaataaggtaaaagccatggttgaaagcttgccaacactgmctgcattcatagtgttctccagtatgagtcctcttacgt

SEQ ID NO: 28327 - DNA, 566 bp, Homo sapiens
gcacagcctaacaactttaattctaggtgtacaatgcaacagacagaggctatggatatcctgccctacatcckctgcccagtgctgtcttctcttcttgatggctaacagcacccttcctcacacttcagcatctctgcagtgtctgcctatcggcttttcccagggcgggtgcttgttcaatccaccttcagagcaccctaagggggctctaacactcccaaggacactcccatccaatgaggattgaggagtggaaattaggaactaaatgcctcagctcctggaggatggatgcattgcatactcctcggagggtcctcaggagagaacaggcagctgggaatgcttcaggaagaaacgccaggtacccagaagcaagtagaaaagtaatgaatattaatggtgtatttatcttggggcgggatttttacagtggccaggttaataattttatgcacatttatgcagatcaggaaagagggctacagggctggtgcctaaagggcccacagccagaatgtggggggacttagatatagttcactgcaagtcagtttcacttc

SEQ ID NO: 28328 - DNA, 996 bp, Homo sapiens
tttttttttktttttttttttgctgttgttgttgttgctcatgagctgcactgtcaaatatttgtatttgtgctgatggtgtcttgaaaagttcttgggccagctctgcaagaatgcatgcacttgacaaaacgaaactcaataacaactgaacaaatgtttcttttatttcgaaggccaagcacttggctttagaaggaaaagggagtcctgtgaattgcttcgctttgagaactatttgtcagtccccataatatgctacttctgcctgatgtgggcaggcctattgtctatcattaagaaatcagctggtttttaagagaatgactaggtggatataagcaggcacctcaaatctagatggctggtcatttctctagtgctcacataaacagtttacaaatgcataagtatgttattcataagacactctcttgtaggtagttaaaatgttcagtgctgtaggaataaagaaaatcaagagctttctccaactcccttgccctgacacatttgagagatattttattgttaaaaaaacaaagccttgttgtctgcctagccagtttgaattaacgtggtggttgatttttttaaaatgaaatttgtattgaacgtggaagaaaatagatttacttaaaagtacatgcacaaggatgcatctgaatttgtactgttagtattttcattccactgttgtggttgttccttattgctccattttagattcaattccctccattcagaatatatttatggagcattttctaggtgccagacacatagacaccaggaagatgaatatccgggtccttgattttaagatgtgcacagatctgttttccatcttaatgacctaatttccattactatcatccacaaataatattcatacacatagttctaccttttgttaaacctctccaacttataaaggatctcatttgtacaaccctgtttatccctcctgtccttaagcacaggagggatgcttgt

SEQ ID NO: 28329 - DNA, 996 bp, Homo sapiens
tttttttttttttttttttttgctgttgttgttgttgctcatgagctgcactgtcaaatatttgtatttgtgctgatggtgtcttgaaaagttcttgggccagctctgcaagaatgcatgcacttgacaaaacgaaactcaataacaactgaacaaatgtttcttttatttcgaaggccaagcacttggctttagaaggaaaagggagtcctgtgaattgcttcgctttgagaactatttgtcagtccccataatatgctacttctgcctgatgtgggcaggcctattgtctatcattaagaaatcagctggtttttaagagaatgactaggtggatatmagcaggcacctcaaatctagatggctggtcatttctctagtgctcacataaacagtttacaaatgcataagtatgttattcataagacactctcttgtaggtagttaaaatgttcagtgctgtaggaataaagaaaatcaagagctttctccaactcccttgccctgacacatttgagagatattttattgttaaaaaaacaaagccttgttgtctgcctagccagtttgaattaacgtggtggttgatttttttaaaatgaaatttgtattgaacgtggaagaaaatagatttacttaaaagtacatgcacaaggatgcatctgaatttgtactgttagtattttcattccactgttgtggttgttccttattgctccattttagattcaattccctccattcagaatatatttatggagcattttctaggtgccagacacatagacaccaggaagatgaatatccgggtccttgattttaagatgtgcacagatctgttttccatcttaatgacctaatttccattactatcatccacaaataatattcatacacatagttctaccttttgttaaacctctccaacttataaaggatctcatttgtacaaccctgtttatccctcctgtccttaagcacaggagggatgcttgt

SEQ ID NO: 28330 - DNA, 575 bp, Homo sapiens
ctctgggaaaagtaatcaagagtaaacagagggaatggaaaggcccaagctaaaaatgaacaatgtgattttcctacataatttaattacattaatagtcatttccttaagtagtctttttccttgataaatgcattgtgcatctttgattatctgttcatatttgataattttgaagatattttaataatattttttaaaattacattttatgattgttagttatataaaaaacaatgtacttttacagtgcttttgcatctaacaattctctgcaagtttccaaacttaattacaaagatgatattttgactgacttttcctatatatttagaagtttagatgaatgaacaaaccaaatcctgagaaaataaaaattcctaattaaagaaaaaataattaaaattctcttaactattgaagttattgatttcatggtgaaaacattttttacaaagaaaaatgcaaatttcaaatgggtttactggggaattctatmaaactctcaagtaataagtatggccaatcttctattaaactcttccagagcacaggagagaaaagaaatgaaatgc

SEQ ID NO: 28331 - DNA, 1419 bp, Homo sapiens
ccagagggtagatggggagtttgtggcctttggtgctggggtaagaaaggcacttcggaagtgcagggggaacagcgtgtgcaaagctcggaggacaggattgctgtctggtgactcaggaggaggggagagctgtgcaggtactcagcgcagtgcctgggctgctgggcgtgtgccagtgaggcctccaggtttctgtcttgggtggctgggtggacagtygtgccatcactgatccagagacccaaggacagaagtgactttgggaggaagtcgagttcagcttgggacctggcaactgtgagatactgcagggtatcggggtccatgccggcatcaagaggcaacatgtgtaggaaacggaaagctgcggggtagggttgggggtgaggggactgcccaggtcctggtggtgtgctctttcacaccctgtccccttctcccactgccaaatgtcagcaaatcctgggacacttctcaggcctcatctggcatgccctccctcctcagaactgtttcccctctggggcttctggtaccctgtgttttcttgagtttcctctggctcctgtggatattccatgttaatctccttcacagacgccctcccttcctgccatctgctgggatgcccggctgtcagggagcatccccagacagggtagatatgtgtttggggtgagggagatttggtggagcacttgggcgaagtgaggctaatcttggaaggcttcttggaggaggaaggggtgtgcggagagaggtctcctggtccctgtttgtttattgctgggcactctgctgggctctgtgtttctatggtctccatgatccctgcagcagaccttctgggagatttgtgtactggctttacgagcaggacatgaacaaatcagagggagagcagggagggggccctggctggatccatgccaaggacatactcagggggccttgtggggagggtctgggagattctttccacccagggaggagcattaagtcagggggccttgaagaccaagctagtgctgtggtgttttgagggttgattggtagaagcacaaaaagggtacatgctcttcctgggttcacacaactcgtaacaggtatagggtctctccaggaacctggagggaagctcagattgaaggttcctggtgcccttgcgccctctagtgaccattcttctgcatgcaggagcgttttctatttcaaccccatcagcttgtgggggggagagagagagagaaaaagagagagagagagagagagagaggttagaagagagaagaggatagagaagagaaagtctgtctgtctgtctctggggttggaagtgggtgaacaaagggaagaagcagggccctggccaggtcccctctcaggcccttcctgtgactcccggacgggcagtgg

SEQ ID NO: 28332 - DNA, 1192 bp, Homo sapiens
cagtatgagttagcttggttcaatcatatggtgagcaggagggacaggacatatgggaaagagcaggaaagggaattaggagtttgagaatttaggagaagacaactgagcaccaaccacagagaatagtggcatgagatgaagctagagacaagaaagggtctagtttacatagttgtgcacaccagtgtttctgaaagtgtggcccccagagcagcttcatcagtatcacctgggaacctgctgcaaatgcacattctcaggctccatgccaaactcactgaataggaatctctggaggtggggtccagcaatctgtgttttgaccagcctgccaagtaatcccaatgcatgctgagtttcagaactactcacatctacaatgtttataattctcagtttcccccaggcactgtggctcacgcctgtaatcccagcactttgggaggccaaggcaggcggatcacttgaggtaaggagtttgagactagtcttgccaacatggtgaaaccctatctctactaaaaatacaaaaattagctgggcatggtggcgcacgcctgtaatcccagctactcgggagtctgaggcaggagaattgcttgaaccttggagatggagtctgcagtgagccgagatcgcaccactgcacttcagcctgggcaatgagcgagactttgtctcaaagattttcagtttcttcctaaaagccatggatattactaaagtgttttaagcaagtagatgacatgatcagatgagaattaaatatatacatatatgatatataaaatagatatgtgtgtatgtgtatgtgtacatgtgtatatctgtgtgtatgtgtatgtgtattcaattctttatagtttaataagttcataaaagttataatttctcaaaatgtttgattataggtgacaggagagggtatattttctggaactccttaaaaactgtattttagaactttccttaacacctagaaaatattcaaatgactaaacacactcagggaaatgaacaactacccaatgggagtaggagctgtcccactgggsgaacaaacaatatttcctatcaagagctgatgaggcttgtgtcatagaaactactaagctcataggcccattaatgactagctaaatggtaatgaagcccaagacggtgggttttataatcccaaggcgtgaca

SEQ ID NO: 28333 - DNA, 853 bp, Homo sapiens
aaaagctacaaaaaaaccttagcctggcacagtggtgcactcctgaagtcccagctactcaggaggctaaattgggagaatcacttgagcctacgagttcaaggctgctgcagtgagccatcatcacagcactgcactacagcctgggtgacaaagtgagactctgtctcaaaaaaataaaaaaataaaaataataaaaataggaataaatacattattagctcctatgttttgctcacagctttaatacccccctgaagttcccctaatttatgcctcctgtattgcacatggtaggcactctactaagaacaaattgaagcttccaaattaacaaaatatattgaataaaaaagaaaaatacctcaaatgttatatctcaaggacaaaaagtatttcttttagtgagaaaatcgtctcaaatataaaaataaaaagagaataccttaacatccaaaaactcagtcgttaaaataaaagaaaatgagaatatcaatgaagaaagaatccgtttgctggcaatttggctccatatgtgatttggcagctgtattagtttcctactcccctgtaatatttaccacaaaattagcagctgaaaacatccatttattatctcacagttcctgtgaattacgtgaccaggcagggcttacctgggtctcacaggctgcaatgcagctgttggtcaggggcacatcctcattcgaggctcaacccagggtggagttggggactggaaggttgatccacttctaggccacctcaggttgtttgcagaattcatctcattgtgggccgggcgcggtggctcacgcctgtaatcccagcactytgggagaccgaggcgagt

SEQ ID NO: 28334 - DNA, 1173 bp, Homo sapiens
caatttttcaaagcaattataagcaaaaggaacacaatcagaaggattatattaccagactttaaaccgtactataaggctacaataaccaaaacagcgtggtactggtacaagaacagagatatagacaaatgggatgaagtagagaacccagaagtaaagccatacaccaaagccatttgatcttagacaaagtcaacaaaaataagcaatgaggcaaagaccccctattcaacaaatggtactggaatcctggccagccatatgcagaagaataaaactggaccactacctttcactgtaaacaaaagttaactcaagatagattaaaaatttagatataagacttcaaactttaagaatgctagaagaaaacctagaaaacacaattttggaggtcagctttgagaaacaattcattactaagtcttcaacaaaaattaaaattgactgatggaacctaattaaagacctcctgcacagcaaaagaaactatcaatagaataaagagacaacctacagaataagagaatatatttttaatctacacatctgacaagtgtctaatatccaaaatctctaagaaacttaactgaggcagccaaagcagagtttacagtaataaacaaatgcatgtaaaaagttgaaagatataaattaaacaaacataaactcactaggaactacaaaaagaaaaactaatcccaaagttcacagagcaaaggtgtaataaagactaaactgatcagatgcaagatggccaatttagaagcagctgtggtctgtggcactcacagagaggaatgaaaaggggtgagtaatttcagcaccttcaactgaaatatccaggttctcacattgggactgactaggcaaaaatttcggcccaattataatgtagaaacataggagggggagcgatggctcacccaagagyataatggaaccaaaggaacccccatccccagccaagggaaccagtgagtgattgtgcaaccccacccagaaaaaccacacttcttccatggatttttgcaacccatggattaggagattccctagttagccaacaccaacaggccttgggtctgatacacagaactgtgtcaagtctcggcagaacagacactcagtacacacagagacccaggagttttacattctccagcccca

SEQ ID NO: 28335 - DNA, 756 bp, Homo sapiens
acttccaagcccaagtgatcatttgtagaattcagttatttgtgcgctctagtactgagagcctcagcttttcyctagtgtttgtctgggggtctccctaagttccttgccatgtaggtctttaaaacatgacagtggctgggcgtggtagctcacacatgtaatcccagcactttgggaggctgaggctggtggatcacctgaagtcaggagttcaaaaccagcctgaccaacatggagaaaccccatctctactaaaaatacaaaattagctgggtatggtggtgcatgcctgtaatcccagctactcaggaggctgaggcaggagaagcacttgaacccaggaggtggaggttgaagtgagctgaggttgggccattgcactccagcctgggcgaaaagagtgaaactccgtttcaaaacaaaaacaaaaacaaaacaaaaccatgacagcttgcttcatcaaagtatgtaacctgagagggcaatagaaagagtcaaaaaggaagttacaatctttcgtaaactaattataaaaatgttgtggaattctattggttagaagcaagttactaggtgtagcctacactgaaaaggagaatatcacacaagcgtacaaaatccaggatgttgagatcattgagggttgtcttagaagtatacctatcacaaggagtcaggagaaagataggttggggtaattttatttttctttttcctttctgctttgagactcatttctggcagttgctgtat

SEQ ID NO: 28336 - DNA, 877 bp, Homo sapiens
actgtgactcagtctttcctaggtacagaagaaggaaattagttcccattgcctttgtcactggtattgctttaaagttgtatctataaagaaattttagggtctttaaaagtgactttgaaccaaaacaataactttaaaagagcatattttaaaaactaacactactgcttgcatcagaatttttaaaaattacaaataagacttttggaaatattcttccctcctcaaaaaagacaaaatagtaaatcaatacttaaagtttagtagtaaataatcttttctaaaacatatgacaacagtgtccactggctctcaagatgtgggaggtcattctggattaagtcttttttttttctttttgagacggagtttagctcctgtcacccaggctggtstccaatggcacgatcttggctcactgcaacctctgcctcccaagttcaagtgattctcctgcctcagcctctcaagtggctagaattacaggcatgtgccaccatgcctggctagttttgtatttttttttttttttttttagtagagatgggatttcaccatgttggccaggctggtctcaaactcctaaccccaggtgatccgcctgccttggcctcctaaagtgctgggattacagacgtgagctgctggcctggattaagtctttactttgtccttgacacagtttgtttagaagggaattagggaagctgattatatctcactaacaatggtgcccccctgtcaaggggcttgagcttcagagcttctccagcagtgtcttcaggtaggaattaattcaacaccatctagtaagtactttctagctagcgccaagaaagtaaagatgaacaagatagagtccctgccctaaaaa

SEQ ID NO: 28337 - DNA, 823 bp, Homo sapiens
tgcttttgatgtcctaacaactcatcaagaagccctacgtcctaaagtttttytcttgttatttcataagaatgttatacttttatggtttacatttaaatctatgatccattctgagataaatttttcatagggtgtgaggtttgggtttgagattctttttttttttttttggctacggatatccaattgttacagtgtcatttgttaaaaaaacaagcaaacaaacaaacaaaaaactaccctttcattgagttacctttgcacctttgtcaaaaataaatttgctgtactgttgtgggtctgtttctgtgttctgctgttccactgatctatgtgtctgtcctcttcacaatacaatagattttaaatggggtggaatgattcttccctctttattctattccaaaattgtttgtatatttaggacaacagttttttttatgtcttttgcaaatgttttcttccagtctgtggtttgcctttcattcttttgagaacatctttcagagagcaaaaatttttaattttaatggaggccagcccatcaattctttctttattattcatgttactgatgttgtatctaaaaattcatcaccaaacccaaagctatctagactttctcctatgtgatcttctacgacttttatggttctatgatttacatgtaggtatataatctattttaagttaatttttatgaagggtgtaaagtctgtctcttgatttattttttcacatgtggatgctcagttgttccagtaccattcgttgaaaaaactatcattgttccattgtactatgtttactctgttagcaa

SEQ ID NO: 28338 - DNA, 823 bp, Homo sapiens
tgcttttgatgtcctaacaactcatcaagaagccctacgtcctaaagtttttttcttgttatttcatargaatgttatacttttatggtttacatttaaatctatgatccattctgagataaatttttcatagggtgtgaggtttgggtttgagattctttttttttttttttggctacggatatccaattgttacagtgtcatttgttaaaaaaacaagcaaacaaacaaacaaaaaactaccctttcattgagttacctttgcacctttgtcaaaaataaatttgctgtactgttgtgggtctgtttctgtgttctgctgttccactgatctatgtgtctgtcctcttcacaatacaatagattttaaatggggtggaatgattcttccctctttattctattccaaaattgtttgtatatttaggacaacagttttttttatgtcttttgcaaatgttttcttccagtctgtggtttgcctttcattcttttgagaacatctttcagagagcaaaaatttttaattttaatggaggccagcccatcaattctttctttattattcatgttactgatgttgtatctaaaaattcatcaccaaacccaaagctatctagactttctcctatgtgatcttctacgacttttatggttctatgatttacatgtaggtatataatctattttaagttaatttttatgaagggtgtaaagtctgtctcttgatttattttttcacatgtggatgctcagttgttccagtaccattcgttgaaaaaactatcattgttccattgtactatgtttactctgttagcaa

SEQ ID NO: 28339 - DNA, 1411 bp, Homo sapiens
gggctaaagtgatcctcctgcctcggcctctcaaagtactgggattataggcatgagccaccatgcctgtctcatccatgctttctactctccctcccaaattaaaaatatggttctatgttccagttacaattgttgtgtaacaaaccacccagaactgaggggcataaaacaaccatttattctgctcacagagtctctgagttaggaatttgagcagggcacaacagaaatggcttatctctgctccacaatacctagggtctcagcaaaaaaatgtccaaagtccaagagtgacttgaaggccagatattgaaatcacatgaaggattattcattttcgtgtctgttatctgggctaggataattcaaaggttgagattgtggactaaaagccttactctcaatgtggttttggtttcctcacaaccatggagrcctcagggtaatctaacttgttatgggggcagctccagtacaactatttcagtgaacaaggtagaaacagcctagctttttgtgacctaatgtcagcaatcacatggcaacatttctgccataccacagtagtcacaactgtgcctccattcatggagaggaaacagggatctcacagctctctataggaagtctgtcaatagtgtaaccatttttttaaaacaccacacttgtgcaaatatgagcatcattatggagagtgcaggacacatttcttcctactgactttttccctatagggatgagacacaactagacttgccattcgttcaaggcctttatgcattatggactgtgctaaggcttcacatccattttcttcagtacctgttacagccttgtaatatgggtgttgttatttctatattacaaatgggaaagtgttgctcaaagagatcgagaaatttactgtgttctcaaggctaacaagtagtagagaaaagatttgaacctacaactgattatttcccagtcccatgttccccctactagaatatgatgctttgccttctacccctcaggattactattttgttagtaaaataataggtagaaaaacacaggaaacaacatccgcacaacaattgcaattaagtgccaattatgtgaaataaatgatcaggttaatagaagtaacctctgttttaaaggattttagaatatgtgtgtagatagcacaaagattcctagaaaactgatgaaaccagaactttgaaaatgagagttggaaaactcaacataaaggaaataatatacagggcacaatcaaaatatttttagctcatggttcctaaatactggtcaaccactgttttcaaaaagcctacatttgtgagggggacttgttcttatcaatctatattgagttatgttattgcctacatgttctgggtctctgtgagcacacatgaac

SEQ ID NO: 28340 - DNA, 648 bp, Homo sapiens
tgcatattatgttttaggcatgtagtcttccttttagaagccctaatcacttatgttacaagggacaatgtgtaaagacatatactacatgttgtgatttaaaagtgaakaattaaaagagaatggggctggacacggtgactcatgcctgtaatcctaacacttcgggagactgaagcaggaagatcgcttgagcccaggagtttaagaccagcctgggcaacatatggaaaccacatctctacaaagaaaaaaaaaatagccaggtgtggtggcacgtgcctgtggtcctagctactcaggaggctaaggcgagaggattgcttgagcacaggaggtcaaggttgcagtgaaccatgattccattactgcattccaacctgagtgacagagtgagaccctgtcttaaaaaaaagagagaatgggtagctgagttgcctagaatgctctagtttatgagctgagtggatatcacagggggataggtggaaaatgagagggggtttagtttgcataagctatctttaaagccaagtcaaactaatggggaagtgagaaagagaatctgggtcctatctgtgtgaggggtaaatggtaaggggagctggagcagttcttttaaatatgtgtgtatgtgctgtttatgca

SEQ ID NO: 28341 - DNA, 648 bp, Homo sapiens
tgcatattatgttttaggcatgtagtcttccttttagaagccctaatcacttatgttacaagggacaatgtgtaaagacatatactacatgttgtgatttaaaagtgaagaattaaaagagaatggggctggacacggtgactcatgcctgtaatcctaacacttcgggagactgaagcaggaagatcgcttgagcccaggagtttaagaccagcctgggcaacatatggaaaccacatctctacaaagaaaaaaaaaatagccaggtgtggtggcacgtgcctgtggtcctagctactcaggaggctaaggcgagaggattgcttgagcacaggaggtcaaggttgcagtgaaccatgattccattactgcattccaacctgagtgacagagtgagaccctgtcttaaaaaaaagagagaatgggtagctgagttgcctagaatgctctagtttatgagctgagtggatatcacagggggataggtggaaaatgagagggggtttagtttgcataakctatctttaaagccaagtcaaactaatggggaagtgagaaagagaatctgggtcctatctgtgtgaggggtaaatggtaaggggagctggagcagttcttttaaatatgtgtgtatgtgctgtttatgca

SEQ ID NO: 28342 - DNA, 775 bp, Homo sapiens
aggaaggtggccagataagcaggggttaaaactccacagggagaaggaattctctagcctcctggccagaactcaggggagggcacgaatgaggtgtgcagacttcacaggtggaggaagaactaaagccctgagaggcggaaagcctcaggcaagttttcaggccagtcttgccctctgcctggaaacagaccctaggtgctattggggggatgcatggtgagagtgagacggctcttcagtttgtgtgggagctgggtgaagcccrtgatggctggctttcccccaactttcctgacaacgtgcatggctcagcagatgcatccataatcctcctaggtatacaactacagtgatctgggaatctcacccccatcctctgcagcagccacagcaagacccgttgaaggagagtctgagctcagacatgcctagccttgccccgattggatggtccattcctatccaacctggtagtgaaagacaaaggtcatataatcttgggagttctagggccctgcccaccacttgtccctctccacactactgtagttggtgctttctggaaagtgtcacctcctggcatgaggccagccagcacaaaaatagagcattaaaccaccaaagctaagagccctcctggagtccactgcaccctctgccacctctgctgggacaggcaatggtatccatggctgagagacccatagatggttcatgtcacaggactctgtgcagacaacctacagtatcagcccagagccgggtagacttg

SEQ ID NO: 28343 - DNA, 911 bp, Homo sapiens
ccactgacaccccgtgactgcccactccccctgctcctgatccccaggtacaattctgccaagaaggacaacgacttcatttaccatgaggctgtcccagcattggacacycttcagcctgtaaaaggtcggggagctgagaggtgggggcagaggtgacggtggggtggggacaggacacaggaggctgcctcaaggactctgcgtgggcctgatctccacaattcccacccccccaggagcccccttggtgaagcccttgccagtgaaccccacagacccagctgttacaggccctgacatctttgccaaactggtacccatggctgcccacgaggcctcgtcactgtacaggtgggtggagggtggcacagagggaggtggggtgtcttgagatgtgggtcttcagcaaatgctctgtcgcttctgcagtgaggagaaggccaagctgctccgggagatgatggccaagattgaggacaagaatgaggtcctggagtgagtgtgggacttgggcagggaggcggaggcaggcagcacttcccgggcctctgggggccccagggctgcctatgctgggagaggaatgaaatgtccattccaaacaggtttcccaatgctgccttcccgcctggggtggtggggctagtgtgtaaggcaggagtcatgtcttgggaggaggaggtgccttctgttccactgtttccagcagtgccctgggcatgttctgtgagaccaggccagacctggtagtaggggtccgaggtcacaatttgctctctgctgagacctcagattgagtggtgaggcttgccctagcggctcctttgacatggtcagagttggatcagcacccagcacccacctggccctgttgctccccacagccagttcatggattcaatgcagtt

SEQ ID NO: 28344 - DNA, 911 bp, Homo sapiens
ccactgacaccccgtgactgcccactccccctgctcctgatccccaggtacaattctgccaagaaggacaacgacttcatttaccatgaggctgtcccagcattggacactcttcagcctgtaaaaggtcggggagctgagaggtgggggcagaggtgacggtggggtggggacaggacacaggaggctgcctcaaggactctgcgtgggcctgatctccacaattcccacccccccaggagcccccttggtgaagcccttgccagtgaaccccacagacccagctgttacaggccctgacatctttgccaaactggtacccatggctgcccacgaggcctcgtcactgtacaggtgggtggagggtggcacagagggaggtggggtgtcttgagatgtgggtcttcagcaaatgctctgtcgcttctgcagtgaggagaaggccaagctgctccgggagatgatggccaagattgaggacaagaatgaggtcctggagtgagtgtgggacttgggcagggaggcggaggcaggcagcacttcccgggcctctgggggccccagggctgcctatgctgggagaggaatgaaatgtccattccaaacaggtttcccaatgctgccttcccgccyggggtggtggggctagtgtgtaaggcaggagtcatgtcttgggaggaggaggtgccttctgttccactgtttccagcagtgccctgggcatgttctgtgagaccaggccagacctggtagtaggggtccgaggtcacaatttgctctctgctgagacctcagattgagtggtgaggcttgccctagcggctcctttgacatggtcagagttggatcagcacccagcacccacctggccctgttgctccccacagccagttcatggattcaatgcagtt

SEQ ID NO: 28345 - DNA, 1113 bp, Homo sapiens
ccgcaggttttccagccccaaggattgggccccagccccagccccatcctcagccccatccttcacaagcgtttgggcctcagcccccacagcagccccttccactccagcatccacatctcttcccaccccaggccccaggactcctacccccacaatccccctacccctatgcccctcagcctggggtcctggggcagccgccaccccccctacacacccagctctacccaggtcccgctcaagaccctctgccagcccactcaggggctctgcctttccccagccctgggccccctcagcctccccatcccccactggcatatggtcctgccccttctaccagacccatgggcccccaggcagcccctcttaccattcgagggccctcgtctgctggccagtccacccctagtccccacctggtgccttcacctgccccatctccagggcctggtccggtaccccctcgccccccagcagcagaaccacccccttgcctgcgccgaggcgccgcagctgcagacctgctctcctccagcccggagagccagcatggcggcactcagtctcctgggggtgggcagcccctgctgcagcccaccaaggtggatgcagctgagggtcgtcggccgcaggccctgcggctgattgagcgggacccctatgarcatcctgagaggctgcggcagttgcagcaggagctggaggcctttcggggtcagctgggggatgtgggagctctggacactgtctggcgagagctgcaagatgcgcaggaacatgatgcccgaggccgttccatcgccattgcccgctgctactcactgaagaaccggcaccaggatgtcatgccctatgacagtaaccgtgtggtgctgcgctcaggcaaggatgactacatcaatgccagctgcgtggaggggctctccccatactgccccccgctagtggcaacccaggccccactgcctggcacagctgctgacttctggctcatggtccatgagcagaaagtgtcagtcattgtcatgctggtttctgaggctgagatggagaaggtgagaagagggggtgggtgcccacgagggcagtgtggggtggcagggcagg

SEQ ID NO: 28346 - DNA, 807 bp, Homo sapiens
ggaagaagttgagctgtaatgcagtctcagcggaggcctcagctgaccctatggggagttcagaatctgggataaggtggcccttggtgcttgtccctagttggggtaagaggacttagcctttaaacccccatggcaatgagtcatcggatgcaggctgccctggtaaaggatcatgaccttggcaatgtggttgtctttccaggatgattcctgtaaaggctgacagctaagggccttctgttggcagcactgacagtagctgggagtgactcttccattcctgaagggaggtcagggtggggcatcacagcatccaatacaatcactagtcatgatttttaaaccaatacaatcactagtcatgatctttaaaaatcttgaatgtgacatctcctgacctcatccaccttggttgatgaaatagatatgattgtcttggtagtcaagagtactagttaaccaaaagactatatgctctttaagtttaggcaagctagtaaggaagtgagaaaagcaagacctgaactttgatctggagcaaatcactttacctttgaacctttttccctctctgtacaatgaaatggcartccctgccctgcttgccttctgttgttttggatgacctcattagccattagacaacatatttgaaagtaatctctgattttattttttatttatttttattattttttttcaactaggggcatacccagatatctctgattttaaatcttccgccaacctaatactgtttcaggtggacagtaggtgcctgttaacaagtcataggtggtggga

SEQ ID NO: 28347 - DNA, 545 bp, Homo sapiens
cacagtgaccatctcagaaggagtgggaagccctggagaagaggccatgactgtctttgacttttttgcatttcaggatttttatttatcccttactttggttttgtggctcttttgctcctcagtcatctgaaagcccatggccatttttaaatctttatggaaacagaaccagtaagagggaagttaaagaaatctattctgaataaaactcagaagaactacaaggsttgatgttaggagaaagggttagaccatttctgaacttgagatggtgtcttggggcttcacaaatgtgtatttgtccaaaatacaccgcataaattcaatgtgcatattctgagttagcttttgcaaagttatgttgtggtaaatacatctcccctgagtccttggggcttgcactaacaaaggtacatttctcttattacttgttggctgcaaggtctgtggcttaggtccatgtatatatcttcttcattctagaccaatggaagagtccccttctgaatatattgttctcttgataatgaggaaatacagca

SEQ ID NO: 28348 - DNA, 611 bp, Homo sapiens
tcccagaccatagtttaccaaatgtttaaaagtctcatgtcacactgactctatgcgtagacaytatatgcttttctccttacatgaagcacagtggagatggtgacatgcctgaatattttctgttggacagaaaggaaaagagaccgagaggcagggttataatgatgtcttagaacctccaggtatgaactaactcaggtttagtcttagcgctatgtctagtctagtcttagtgctatggtccttgtaaactcaaacttcctgacagctgcttttgacttttgggcaaactagagagaaaagccaagtgagagactagaatcaaagcatatcagtattggcaagaaaatgagacttacctagataaataaactgtggaccatacgtggacttaattatcttggctttggaaaaagagaatgttttatttgttgcttagcttccagactccgctggaagcgggtgtttctttactaaggctctttagagtccttgtctcatcctggctgatttcaacaacctgagctttaagaaccctcttttcacatttcttcccaacttatcaatctcagaattggaaaagcctggggagtctattagctccagcc

SEQ ID NO: 28349 - DNA, 754 bp, Homo sapiens
tgtggcaactgagtgtatgtgatggaaaatggatgtttactttaaggtcattactgaaggctttctggagccayctctttcttggggacgtctccctactgattcatattagaaatcaacttgagtgacctttctctgcaaaacatcagagactgccttggactgtgtggtctgcttggaggacttcaaccctcttagaaccttactctgcatgtgaacacagcagcacagggacagcgggttccattgtctacgggagatggtgctcaagggttggagccagtccccctagagagtcacatagcatttggccctcaaccatggctgaataaatgaatgaataaaccttatttaatatatactttcacctgcctgagttgtagaactctgcagaagtccttttatatctcttctacattcatcttcagagccattgtatcataggggttgttttgttattctccatacatcctaatttatagaggagaaaacaaaatccagggaaaggtggaaaattgatccagggtcaaacactgaacttatggagaggatggagaggaaagcatggcttttggagtaataccgctgagagtcaaatcccagttattgcagtgaggagtggcaagaagtcacctaatttcaacaacacaatcatttcaggaatggaaagaacacccccagttccattaaacgacatgaagtgcagaaagtcctggctcacagaaggggcccactaagcattagttgccattcc

SEQ ID NO: 28350 - DNA, 528 bp, Homo sapiens
gagtcaaagttggaacctcagcctttaaggagcactctgccaccacaagccagtaccatactgtttgacttcccagcctccataaccatgagccatatatatttatrttctttataaattacccagtctgtgatattcgattatcacagcagaaaaagagctaagacacataggcagaagaactgatcaagtattttatagaagaggaactactttttataatcatgttaaagaatacccaacctcattaacaagcagggaaatataaatttaaatggcattgcgaggccagcaattccagcttagacacattccctggagaaactccttcccatgtgcacaggaacaagtcccacgagttcatggccacatcattcgcaccaatgttcatcaacagcagaatagaaataaatggtgttgggaaactggctattcatatgcagaagaaggaaattggactcatctcactccttatgcaagaatcaactaaaatggatgaaaaacttaacaaaagtcccgacactctaa

SEQ ID NO: 28351 - DNA, 528 bp, Homo sapiens
gagtcaaagttggaacctcagcctttaaggagcactctgccaccacaagccagtaccatactgtttgacttcccagcctccataaccatgagccatatatatttatattctttataaattacccagtctgtgatattcgattatcacagcagaaaaagagctaagacacataggyagaagaactgatcaagtattttatagaagaggaactactttttataatcatgttaaagaatacccaacctcattaacaagcagggaaatataaatttaaatggcattgcgaggccagcaattccagcttagacacattccctggagaaactccttcccatgtgcacaggaacaagtcccacgagttcatggccacatcattcgcaccaatgttcatcaacagcagaatagaaataaatggtgttgggaaactggctattcatatgcagaagaaggaaattggactcatctcactccttatgcaagaatcaactaaaatggatgaaaaacttaacaaaagtcccgacactctaa

SEQ ID NO: 28352 - DNA, 528 bp, Homo sapiens
gagtcaaagttggaacctcagcctttaaggagcactctgccaccacaagccagtaccatactgtttgacttcccagcctccataaccatgagccatatatatttatattctttataaattacccagtctgtgatattcgattatcacagcagaaaaagagctaagacacataggcagaagaactgatcaagtattttatagaagaggaactactttttataatcatgttaaagaatacccaacctcattaacaagcagggaaatataaatttaaatggcattgcgaggccagcaattccagcttagacacattccctggagaaactccttcccaygtgcacaggaacaagtcccacgagttcatggccacatcattcgcaccaatgttcatcaacagcagaatagaaataaatggtgttgggaaactggctattcatatgcagaagaaggaaattggactcatctcactccttatgcaagaatcaactaaaatggatgaaaaacttaacaaaagtcccgacactctaa

SEQ ID NO: 28353 - DNA, 534 bp, Homo sapiens
atgttcttgccacaagaaaaggatgtgagtatgtgaatgagcctgattgaatcattccacaatgtataaatgcaccaaaacatcacattgtatcccacaaatacatacaattatttgtcaaataaaattaaacttaaaataaaaataaaatacttaattgatacataataattgtatatattcagggtgtacctcgtgccgctcatatgccattgcggacggaagggcaccctgagaagctgggcaacacaccttaattgatacataataattgtatatattcagggtgtacctcgtgccgctcatatgccattgtggacagaagggcaccctgagaagctgggcaacacacccagcaaaccgcacggacctgtcggctcccagggttgagcagcatctgagggctgaggcaggtcaccctgtgaggtcaataaaggagatgcaagtgagtaagagacaccagtgtgtggagcagggggtccrggacacagcctgtagtgatagtcccttagccacgagtgtcagaaggtggac

SEQ ID NO: 28354 - DNA, 811 bp, Homo sapiens
gagcgaaaggcgtcagttctccctcgctcgccccrtagacgccgcgcaggccccgagctcccgagcggcggtttcagaacccgcgggtcacccgggagctcctcccgcagtaccagccgaaagctcccagtgccgaggagggcgggcagctgccctccccgacctcgccccgcccgcgcggacgcccccggccccacgcggggaccaccccgggactcccgccggaccccgcgcgcccgcggccaacctgcgtgcacctgcgccccgcgccacgcccccggcgccccacgtttagccctcactgggtcccgcttcttagtggctctaagccccgccccctcgctggtcaccgcaagctccgcccctcgaggccccgcccctgcaaggcccgccccttcacgactcaggccccgcccatcacggccagcccgggtctaggccccgccccgacacgactcaggccccgcccccggccagcttcgctcctcgcgcgccccgcccagcaatcctcgctgaacccggcgcggtttccccagcgctgctccacgccgcagtccagcgcctggagtccgcgcgccccgagcccctgcccgctcatgcgcagctgggtcacccaggtgcacccacttccttgctgtcccgccgccctccctgcccccaccccgcctaggccctgggtgtcccttctccatcctccctggcgcctctgccccaggccacctggccgtcctcctgggctccccgctcgggggcggcccctggtccgacggtgccgcagacgcgcgcgcacaggccagtcccgcggagaggc

SEQ ID NO: 28355 - DNA, 811 bp, Homo sapiens
gagcgaaaggcgtcagttctccctcgctcgccccatagacgccgcgcaggccccgagctcccgagcggcggtttcagaacccgcgggtcacccgggagctcctcccgcagtaccagccgaaagctcccagtgccgaggagggcgggcagctgccctccccgacctcgccccgcccgcgcggacgcccccggccccacgcggggaccaccccgggactcccgccggaccccgcgcgcccgcggccaacctgcgtgcacctgcgccccgcgccacgcccccggcgccccacgtttagccctcactgggtcccgcttcttagtggctctaagccccgccccctcgctggtcaccgcaagctccgcccctcgaggccccgcccctgcaaggcccgccccttcacgactcaggccccgcccaycacggccagcccgggtctaggccccgccccgacacgactcaggccccgcccccggccagcttcgctcctcgcgcgccccgcccagcaatcctcgctgaacccggcgcggtttccccagcgctgctccacgccgcagtccagcgcctggagtccgcgcgccccgagcccctgcccgctcatgcgcagctgggtcacccaggtgcacccacttccttgctgtcccgccgccctccctgcccccaccccgcctaggccctgggtgtcccttctccatcctccctggcgcctctgccccaggccacctggccgtcctcctgggctccccgctcgggggcggcccctggtccgacggtgccgcagacgcgcgcgcacaggccagtcccgcggagaggc

SEQ ID NO: 28356 - DNA, 558 bp, Homo sapiens
tgccctctggactttttgctggctgttttcaaaagttgtgcaacttaggatggacattacaatctacatggaaggtgtaaacagcgcatgtggggacaaacacgtcttccataaaaacaacaggcatctgcagagttgctgcaattgaaatgcatggcgtaaatgcttaccaatcggaggaaagctggtagtttttagatttttatggtgcaaacagttcctagagaccatgctagtacaagtccctcatttgacctaggaggaaattgaagctaattattctttcattcaaaacataattattaagtgcttatattgagtcaggaactgttctagccccaagatacagcagaatgaagatcaagtaacttatctgggggcacatagcaagttagygatatccctgccctagaactccagtgccctcacaccttgtccagtgttcttgagagtacctgcactttaaattgacttagaatatttggcaatagagaaacagaaaaaaaaaaaaaatcctgactcccaatgccctgatcaaatatttgtacttcttcagtt

SEQ ID NO: 28357 - DNA, 552 bp, Homo sapiens
gcccctctctggccacctgggtcatggggcaggccaccaccctcattcttggtgcctcctggctgtcctaacccctgttcccgggccccacctcagtggctttttgcctcagccacataaatcaccatccaggtcagtgccgggtgaggggccagggcaggcagggcacgtcccccgggtctgcagacagagtggctgctgaatgacccctgacagccctggctgggggcctcagagggccagagggcaggtcaggaggctctcatgttcccctgggctttgtgggtgatcttggctttgcctcaccgtgtggggaggttgactctgatcacagggcctggggcagaggtgcaggcccacacctgctcaggtggcccctggaggcaggcaggaggccgyggggggatccctaccctaggactgcacgggtagattcccaggacgcagtggtcagtacgggagctgcacagacagtgcccacagacctgagggcctggtcccaactctgcccaccacagctgaatgtcccaacaccctttgcttcttcaaccc

SEQ ID NO: 28358 - DNA, 642 bp, Homo sapiens
tatcagctgggcgcagtggctcacacctgtaatcccagcactctgggaggtgggcggatcaggagttcgagaccagcctggccaacatggtgaaaccccacctctactaaaaaatacaaacattagccgggcatggtggcaggcgcctataatcccagctactcaggaggctgagataggaaaattgcttgaactcgggaggtagaagttgcagtaagctgagatggcgccactgactccagccttggtgacagagcgagactctgtctcaaaagaaaaaaacaaaaaaaaacacaaaacaatctatcatctcattttattttatcattgttttaaaaaaccttttttagaaattgggtcatgctctatagctgaggcttgagtgcagtggcataatcatagctcactacagccttgaactccccagtatcctcctgaatagctaggattataggtgtgtgccacctcacccaactaatttttcaattttttgtagagagagtctcacyccaggctggtcttgaactcctggcttcaagcaatcctcccatcttggtgtctcaaagtgctgggtttacaggtgtgagttatagcacccaccccatctcattttaaattgaaattcaaaattaaatttactta

SEQ ID NO: 28359 - DNA, 583 bp, Homo sapiens
tcaaaataaccaagatattccaaatgtttcaccacaaaaaaatgatgagtgagatgatagttatgttaatcagtttgatttaattacttctcattgtatatatggaatatatatatcaaaacatcacaatgtaccccataaatataatttgtagattaaaaataatattaagaaaaaatatgctattgaaaaaagtatttttcaggtaataagtattcaaataatttctgtttcaagactgtcatgattttctgtgttgagagttcaggttcaaatctatttcatcaaacgtctctgtactaattttttgttaataatgttattaataatactaacatttttaaagtaattcagtattttgtaatgtaatttggtcatttgaaatttaacattgcccaaaatataattgtctattcattttttttttttctttagacagagtttcactctgttgcccaggctggagtgcagtggtgcgatgtyggctcactgcaacctgtgtctcctaggttcaagcgattctcctgccccagtctcctgagtagctgaaattataggcaggtgccaccatgcctggctaact

SEQ ID NO: 28360 - DNA, 550 bp, Homo sapiens
taactcctggaacctgcgaacatgatcacatttggaaaacggatctttgcagatgtaattaaggtaagggtctcaaggtgagatcattctgaatttagtgggccctaaatccaatggtgagcatctttataaaagacagaaaaggagaaagacacacagacagggggagaaagccacgtggagaygggggccagagatcagagatggtggtgatgcgtctgcaggccaaggaacgccaggaatctccaggagccgccggaagctatgtttgtaagcccccaggttgtggcactctgttacagcaaccccaggatatagaccccaggaacagaacacagaaaagaaacgggaggaggcctagagcctgctgtggccactccagccattccattcgactccctcagtgtcccgtcaattctgaagccccttctagccactgagtcaccggttctgaaaaggagatatgggtgtcctggagctggtctagcctggcaggaggcagcctcgccccactgccctctcatcagccaccagctcacacaggcccttc

SEQ ID NO: 28361 - DNA, 550 bp, Homo sapiens
taactcctggaacctgcgaacatgatcacatttggaaaacggatctttgcagatgtaattaaggtaagggtctcaaggtgagatcattctgaatttagtgggccctaaatccaatggtgagcatctttataaaagacagaaaaggagaaagacacacagacagggggagaaagccacgtggagatrggggccagagatcagagatggtggtgatgcgtctgcaggccaaggaacgccaggaatctccaggagccgccggaagctatgtttgtaagcccccaggttgtggcactctgttacagcaaccccaggatatagaccccaggaacagaacacagaaaagaaacgggaggaggcctagagcctgctgtggccactccagccattccattcgactccctcagtgtcccgtcaattctgaagccccttctagccactgagtcaccggttctgaaaaggagatatgggtgtcctggagctggtctagcctggcaggaggcagcctcgccccactgccctctcatcagccaccagctcacacaggcccttc

SEQ ID NO: 28362 - DNA, 550 bp, Homo sapiens
taactcctggaacctgcgaacatgatcacatttggaaaacggatctttgcagatgtaattaaggtaagggtctcaaggtgagatcattctgaatttagtgggccctaaatccaatggtgagcatctttataaaagacagaaaaggagaaagacacacagacagggggagaaagccacgtggagatgggggccagagatcagagatgrtggtgatgcgtctgcaggccaaggaacgccaggaatctccaggagccgccggaagctatgtttgtaagcccccaggttgtggcactctgttacagcaaccccaggatatagaccccaggaacagaacacagaaaagaaacgggaggaggcctagagcctgctgtggccactccagccattccattcgactccctcagtgtcccgtcaattctgaagccccttctagccactgagtcaccggttctgaaaaggagatatgggtgtcctggagctggtctagcctggcaggaggcagcctcgccccactgccctctcatcagccaccagctcacacaggcccttc

SEQ ID NO: 28363 - DNA, 550 bp, Homo sapiens
taactcctggaacctgcgaacatgatcacatttggaaaacggatctttgcagatgtaattaaggtaagggtctcaaggtgagatcattctgaatttagtgggccctaaatccaatggtgagcatctttataaaagacagaaaaggagaaagacacacagacagggggagaaagccacgtggagatgggggccagagatcagagatggtggtgatgcgtctgcaggccaaggaacgccaggaatctccaggagccgccggaagctatgtttgtaagcccccaggttgtggcactctgttacagcaaccccaggatatagaccccaggaacagaacacagaaaagaaacgggaggaggcctagagcctgctgtggccactccagccattccattcgactccctcagtgtcccgtcaattctgaagccccttctagccactgagtcaccggttctgaaaaggagatatgggtgtcctggagctggtctagcctggcaggaggcagcctcgccccactgccctctcatcagccaycagctcacacaggcccttc

SEQ ID NO: 28364 - DNA, 514 bp, Homo sapiens
aagcgattcctgtgcctcagcctcccgagtacctgggattacagacatgcaccaccacacccagctaatttttatagttttagtagagactgggtttccccatgttggccaggcaggtctcgaactcctgacctcaggtgatccgcccacctcagcctcccaaagtgctgggattacagacatgagccaccgtgcctgscctgagttttactctttggccacagccctggggtccagtcagggagggagatggggtcccacaagcaggggagagcagggtgagccgggagcgcctccacaccggcttctatctctcagtttcctgtgcctggtccccgaggaagccaagacctctgccttcctggaggagacaggctatgacacatacgtccacgatgcttatggcctggtgagtggctcctgctaccagctcccacttcctgtccttcagaacagctgggtcataagctctgggttccgcctctctcatctgcccaaggaccccagcccatcc

SEQ ID NO: 28365 - DNA, 802 bp, Homo sapiens
cagagagtgaagtttaattctggctctgttctgttaccttgggcaaacttcttaacctctctggtttcagttcctttaccgataaaatgtaacatgggggttaatgcttacttaatactgcttttgtgatgaataaataaataaagtagctcacataatctctattatgtagcaaatgcttccccaaaaaaaatgcgattctcaaacttgaccttatctccatcctattcttttatctgtttttctttttgttttggttgacatggctttaatgtttagttgarataatttttaggaattatgaaatttgcctaggtagaaaatatttataatgtttcttatttagggtttcttcagtggaaattttaagaattctgtcactgcagcttagagagaattattctttgttagtatgttgctctgcagtttgcagctaagtgggactgaatatagaagaaaagtaagacatcttggatgtttggaaatccaaatatttccctaaagttagcttgagttttgctggaggcagcttattgagaaagccatatgactgacagagtaggcacaggccctccccacagagggcaattatctttccaggttgccttcaccagaagcagcctagttaactgacctgctgaacctgccattttaacaatcagatccccgaagaaaaggacaaattcttgaaaataacaaagaatgttaatagcagatgaacaagttttctcttgcatttaaatgtactacatgataaacccaggatacaaggatgtgtcaagaaataaatcagaattaacta

SEQ ID NO: 28366 - DNA, 540 bp, Homo sapiens
ttgccttagaaatctattcttaaaagcagtaactatgcaagttactaaagataattctgtccctcaaackatattgtggacttgcgaatcaaggcagaaggtcaaaaatattatactactatatatatatttttattgcagtaagattattgttatggccatattgttcggattgttgcctgtcctaaagaaaataatacattataatgataaatatataaatataatataaatacgtacatacaggtagcgattgctaaatagatattttgtactatttgctgtagtgaagggatcacaaaacagaaggaagccaatttgtatgttctccaattctaatgatgtgactttagacatttgaaaaatgcctctctgggccttatttaccttatcaataaagggattagatttgttcacgtgagagtgttggaaagcattctctttgaacaccagccctatggggtattctcaacataaagaatgacattgtcttctccatttgggcattgctgcaaattacatcccccgcatggaaaggta

SEQ ID NO: 28367 - DNA, 1186 bp, Homo sapiens
cctctttttcctaattctaaaggtaatatacagtgattgcagacattttgtaaaatacagaaaaataggccaggcacggtggctcacacctgtaaycctggcactttgggagggtgaggcaggtcgatcccttgaggtcaggagttcgaaaccccgtctctgctaacaatgcaaaaattagctgggagtagtggcaggcgcctgtgatctcaactactcgggaggctgaggcgggagaatcgcttgaatctgggaggtggaggttgcagtgagcttagatcacgccactacactctagcctgggcaacaagagcaaaactttgtctcaaaaaaaaaacaacaacaacaacaaaaaaaaccagaagaatataaatcagataagaattacttggtatggaatcatccagaaattataacatatttaattttggaatattttcttcttttttaaataaagtaatgaataagtacttaaaatggatgggatcataatatatatattgtttgtagccttatagtttccctcttagtatattgtgagcactgacacatatccttacatgatttttaataattccacaaaataggtatataaatcacaactctatttggggttatttacattgtttacagctttggaattaaaaataatgcaatgggcaatggctggcaagctggccaaataggaacagttccagtctgcagctcccagtgagatcaacgcagaaggtgggtgatttctgcatttccaactgaggtacccggcccaactcattaggactggttagacagtgggtgcagcccatggagggtgagcagaagcaggatgaggcatcccctcacccaggaagcacaaggggttcaggaactccctcgcctagccaagggaagccatgaggcactgtgccatgagaaaccatgcattctggcccagatactatgcttttctcatggtctgtgcaacccacagaccaggagattccctcgggtccctacatgactagggcctagggtttcagcacaaaattgggtggccatgtgggcagacactgagctagctgcaggaggtttttttttttttctttcatacccagtggtgcctggaacgccagcaagacagaactgttcactcccctggaaagggggttgaagcctgggagccaagtgatctagctcagtggatccc

SEQ ID NO: 28368 - DNA, 1186 bp, Homo sapiens
cctctttttcctaattctaaaggtaatatacagtgattgcagacattttgtaaaatacagaaaaataggccaggcacggtggctcacacctgtaaccctggcactttgggagggtgaggcaggtcgatcccttgaggtcaggagttcgaaaccccgtctctgctaacaatgcaaaaattagctgggagtagtggcaggcgcctgtgatctcaactactcgggaggctgaggcgggagaatcgcttgaatctgggaggtggaggttgcagtgagcttagatcacgccactacactctagcctgggcaacaagagcaaaactttgtctcaaaaaaaaaacaacaacaacaacaaaaaaaaccagaagaatataaatcagataagaattacttggtatggaatcatccagaaattataacatatttaattttggaatattttcttcttttttaaataaagtaatgaataagtacttaaaatggatgggatcataatatatatattgtttgtagccttatagtttccctcttagtatattgtgagcactgacacatatccttacatgatttttaataattccacaaaataggtatataaatcacaactctatttggggttatttacattgtttacagctttggaattaaaaataatgcaatgggcaatggctggcaagctggccaaataggaacagttccagtctgcagctcccagtgagatcaacgcagaaggtgggtgatttctgcatttccaactgaggtacccggcccaactcattaggactggttagacagtgggtgcagcccatggagggtgagcagaagcaggatgaggcatcccctcacccaggaagcacaaggggttcaggaactccctcgcctagccaagggaagccatgaggcactgtgccatgagaaaccatgcattctggcccagatactatgcttttctcatggtctgtgcaacccacagaccaggagattccctcgggtccctacatgactagggcctagggtttcagcacaaaattgggtggccatgtgggcagacactgagctagctgcaggaggtttttttttttttytttcatacccagtggtgcctggaacgccagcaagacagaactgttcactcccctggaaagggggttgaagcctgggagccaagtgatctagctcagtggatccc

SEQ ID NO: 28369 - DNA, 1186 bp, Homo sapiens
cctctttttcctaattctaaaggtaatatacagtgattgcagacattttgtaaaatacagaaaaataggccaggcacggtggctcacacctgtaaccctggcactttgggagggtgaggcaggtcgatcccttgaggtcaggagttcgaaaccccgtctctgctaacaatgcaaaaattagctgggagtagtggcaggcgcctgtgatctcaactactcgggaggctgaggcgggagaatcgcttgaatctgggaggtggaggttgcagtgagcttagatcacgccactacactctagcctgggcaacaagagcaaaactttgtctcaaaaaaaaaacaacaacaacaacaaaaaaaaccagaagaatataaatcagataagaattacttggtatggaatcatccagaaattataacatatttaattttggaatattttcttcttttttaaataaagtaatgaataagtacttaaaatggatgggatcataatatatatattgtttgtagccttatagtttccctcttagtatattgtgagcactgacacatatccttacatgatttttaataattccacaaaataggtatataaatcacaactctatttggggttatttacattgtttacagctttggaattaaaaataatgcaatgggcaatggctggcaagctggccaaataggaacagttccagtctgcagctcccagtgagatcaacgcagaaggtgggtgatttctgcatttccaactgaggtacccggcccaactcattaggactggttagacagtgggtgcagcccatggagggtgagcagaagcaggatgaggcatcccctcacccaggaagcacaaggggttcaggaactccctcgcctagccaagggaagccatgaggcactgtgccatgagaaaccatgcattctggcccagatactatgcttttctcatggtctgtgcaacccacagaccaggagattccctcgggtccctacatgactagggcctagggtttcagcacaaaattgggtggccatgtgggcagacactgagctagctgcaggaggtttttttttttttctttcatacccagtggtgcctggaacgccagmaagacagaactgttcactcccctggaaagggggttgaagcctgggagccaagtgatctagctcagtggatccc

SEQ ID NO: 28370 - DNA, 640 bp, Homo sapiens
agtgtgcattgactatttctgtgaagagacaaagcagctagaagaatttgataggaaggtgtaactccagagatggtgcaccaagggtctgatacatgagagaaacttatctttattttatataaatatatttatatatatgtgtatatatataatatatatgtgtgtgtgagtgtgtgtgtgtgtgtgtgtgtgtgtgtrtatatatatatatatatatatatatatatatatataaaatcgatattatttacccaacctcagaaatgggtgtttttatttccattctaaggaaaagtagctgagtctcttagaattcactgaattgttcaaatgcacacagctagtgaatagcagagccaggatttgaatcgaagacagtttgatatataagccttacatttttatagtatattatttttctttcgaaatccacaatggaataagaaagcattttagttatgttacaaaaataaactaaattttaacaacaaagaatcccaattttaaatttgttctttatgataaaatctgcctgcttcaatgattaaatatgaatataaattcaaccatagaaaaatttttctccactaaatagtaaaacatatatatataaaagaatttttttctgaaaacccca

SEQ ID NO: 28371 - DNA, 533 bp, Homo sapiens
tgaagtataggcatatccttcaaccataacaaccacagtcacttttcccaagtattataaaaacatattagaatgagctggctgtcaatccacatatggagggctgtactacactgacagatggacacactcctccctaacacaccacaagaagaacaaacattccccttctcctctgagcacttctgttacacttcttggacctcacccatagacaggtgaggctgctcttaagaaaataagctttgtcttctatayagaagtccaggcagttgaaggatcgatggcaggctgtttcctgggcccagagggctccttctacccctccttggctgggctacacattcacatccatgcctagagaggaacctcagcaggaagctggggctgaaccagccacctgactgatgcctccattccaagaatcaaaggagatgaaggccccacatcctgaacctgaaaagaaagagctctcaatacaaatcctacctcttacagtgattcaacccagtccttcgacacaagaactattg

SEQ ID NO: 28372 - DNA, 1084 bp, Homo sapiens
cctggaaggatgtgtgttgaggaggctgaatctgcctactcccaccttaaccaataggcagccattcctgcacagattaatcactttacttccccaactcaagtgacaacaatacactccaataaggtgaccctgattttcagtgtcttttccacagatatgtctaagtgatttcaattcattccctcacttgtttgtattcacaacatacttatatttcttaccagtaatgcaaacgtaaaacaagttttgatcttggggctctccatcatgctcaatgagctctcctcattgttcatgccactcttcctggctccttcaaaccctgcctctcygctacactcttttcagtaacttttcaagagtttaaaataatcatctattggccaaacggcaacaaccacctttcttaccaaatctacttcctcctgaaacccttactctggattacgtgcccaccttaatactcatcatctggggggattcactgtctttatccatgcatgaggggtctgcacactggtagtatttacatctgtttcaagggctggacagctcactctagcatgcgcaggagctggcacaaataggtaatggataaaagatgtagagacatacaaaggatgggttagtattgttcttctcttcaatacagacatttcagtgtcacaagaacaccaatacaatgaatacaaagtggatgaggcctcaagccaatacatctggcccttttttttttgtctatggttgtacccatggatattaaaccccgaagataaaataagatccaagtacttgtaagagtccaacttaggaaaaattaactttaccccacttatttatggggcgcccattatgtgcaattcgttcaacaaataccaatgactacctattattttaagacattttgccaactgtcaggaatagagaagacatagtgtccctgccctcagagatcttccaatttagtggagatacagttaaataacagatacagcaacactgtgataactcaagcaaaggggctgagtaccaggtgcacagggaacacaaagggtctcctaatccaattaagatccagtca

SEQ ID NO: 28373 - DNA, 1192 bp, Homo sapiens
ttgagggctcagtcctcaaggctgccccaacaccaccccacaccagttgcaagtgactgactggcttcaagttgggtacagcttgaggggtttggatttgtctgtctcctgttgctatcattgtgagctactccacaaagttagtcaaacccaaagagggatttgtagcctactggattaatgagagcaagtaatttagggacagtatctgtggttttaaatgctgcagagtggaagagcaagagcatgtttgagttgatgcaggaaccacagctcactgttgaaaaaattgaagacggttatatatagtccagacactcaggaggttattcctgagggaacagccagcctggtgagacaagaacttggaacccaccaaactgtgggagtgaaagagctgtaaggctcctgctcactgaactatgggtggctagagtaaaagagctrcaacactcctgcccgctgaactatggaagtaaaagaagccacaacaacaataactcagtgaaacacttacattgattggtttattataaaggatattgcaaaggatacaggtgaagagatgtgtagggtgaggtatgggggaacgggaaaggagcttgcatgccctccctgggcacgctaccctctagaacctcatgtgaccagctatccagaagctcctgactcacgtgtttcatccataaaagagcatgttttattagatgttatcagatctcctgtgtaggagaatgaaaaatgattgaaataaatttcaatttttttcataatttatcatcaactaaaagttatgagggtcatactttttatgctcaatcaagaaatcagcttatatactttttattttaacaattaaatgcataggtacatggtggagagtcatcaatgaatggaaataaagtttatattctgttgttgatatcctactatttagaaatggaagcattcactatcttgctctggcccaaatgtttatctgctgatgatttaatttgagatgcatggtacaggacgtaactaacagaatcagcaaacatgcaggaaaggctgtctcatggttaggtctgttggaaagaaatctcagacatccgtgggacagcacagtgtgcttaggacagaaaggggcatgcaggcaactgctggcagccaacccggaactgtaggaatgcagtggaaggaaactggatcc

SEQ ID NO: 28374 - DNA, 554 bp, Homo sapiens
tctgctaacctgggccacactgaatataatatgattgagaaataaacaagacataactttcttagctttgcctattctagcccccatctggtctgtaataggccttttaaccttcgttctaagtctcactatttcttgccttatccaatacaamaattctgctatggttaaactctgtctttatctcctttctggaacatgtcaatggataacatttccagttgtaggtggttttccagatatagagatatagttattactattactctctcttcaatcctaaacttacccatgtagtctgcattactttcagaataaatatcaagctcctttatgaagccatgcaagatccttcatagtgtgtcctgaatttatcttttcaatatttttccaagtaccttatactttatcatattaattcttgtctgaaatgctaagtcccatcaatttcatacacatctacatgcacttgtccctcagctgtcattgttatgcccaatggaattttacttagcctttaagaatcagatcacgcattatgacttttaaacctt

SEQ ID NO: 28375 - DNA, 1052 bp, Homo sapiens
atcctactggtgtgaaatctacaacacttccaaaaacatcrtcactgttctcagagatgtcagcctggtggtgtttgcaggtgagctcttttcttgaggaaataccactgtgccaccccccagggacctgaaggaaagtcacttacccactcccatgcctctatcatcccccatcctgccaggtcttctgctctggtccgaagggagcaaagatcctgtacccagacatggactctcacctctccttcacccggcacatcctggcctcaactgttgggaagatacccccagaggtccctggacagagacacagtctctctgtcactctgcgtctctctttgtcttacacaggcacacccacaactcttcttttcacacacacactaacacacacacgccaacaactctgtcatgcagatcttaggctcaggccactcctggcttaaggcatcctgagggtctggctctgggcccctacctcctctcatatatagggtagaccctgctcacttctgggcccctggagagtcagtgtttgctgtctttttcctttagccccaaccacgtctcctatgtggaccctcacctggctcccaacaaacacaggtaggttggaggcctcggtggggggagattagaggagtcaccaggcagcttgggagcctcagattcagggaaggggaaaccagggaggcctgcctctgaggactgatctcttggggcctgggcttgtgggaagctaccttcagggtccgctgtctcctagggagagaaacatgcactatctgatgtgatcagaagattgccatgttctcacgacaatgggcagctgtccccagaggggagtccatatggaacaccttgcacatgtgtgtcccagccctcctgtccctggcctcccgccagcatggagaggacagtgccagacttaactttagctgggtatggagatctcaggcctcagttcagggattttaacactgggagggaggtcttgggaagggacggcctgattagctcctgaaccctgaaatcaggtccagggcacccaa

SEQ ID NO: 28376 - DNA, 1052 bp, Homo sapiens
atcctactggtgtgaaatctacaacacttccaaaaacatcatcactgttctcagagatgtcagcctggtggtgtttgcaggtgagctcttttcttgaggaaataccactgtgccaccccccagggacctgaaggaaagtcacttacccactcccatgcctctatcatcccccatcctgccaggtcttctgctctggtccgaagggagcaaagatcctgtacccagacatggactctcacctctccttcacccggcacatcctggcctcaactgttgggaagatacccccagaggtccctggacagagacacagtctctctgtcactctgcgtctctctttgtcttacacaggcacacccacaactcttcttttcacacacacactaacacacacacgccaacaactctgtcatgcagatcttaggctcaggccactcctggcttaaggcatcctgagggtctggctctgggcccctacctcctctcatatatagggtagaccctgctcacttctgggcccctggagagtcagtgtttgctgtctttttcctttagccccaaccacgtctcctaygtggaccctcacctggctcccaacaaacacaggtaggttggaggcctcggtggggggagattagaggagtcaccaggcagcttgggagcctcagattcagggaaggggaaaccagggaggcctgcctctgaggactgatctcttggggcctgggcttgtgggaagctaccttcagggtccgctgtctcctagggagagaaacatgcactatctgatgtgatcagaagattgccatgttctcacgacaatgggcagctgtccccagaggggagtccatatggaacaccttgcacatgtgtgtcccagccctcctgtccctggcctcccgccagcatggagaggacagtgccagacttaactttagctgggtatggagatctcaggcctcagttcagggattttaacactgggagggaggtcttgggaagggacggcctgattagctcctgaaccctgaaatcaggtccagggcacccaa

SEQ ID NO: 28377 - DNA, 861 bp, Homo sapiens
ccacgcattataaatatatgagttctactcatcaattttgtaaaattatagtaatgtatcaatatcaactcattaattgtgagaaatgtagcatactattggactatattaataatagaagacattgaacatagcacatcagggaagtatgcaatacctacacaactcttctgtgaatctgaaagcattctaagtgtaaaagattagttttaayatgtatagaaacgatttacacaaagcatatgaataatcacttgatacataacaaacagcgtgtacataacaaacagcaaagttttaagaaatcttagtacggctaggtgtaaagcacctactaacacttgatggtaataagagtcattttcttaaacacactgaagtttctaagaaaagtatgataaattctggaagaggaaaataggaatttattctctgcatctgtatcatttgatgccttcagtgtgatatgtcacacatagtgtccgatgtactgattgctgtaaatgaaaatttgttactataacgtttatactacagaatagggtttatttggtgtaacaaggcaaatactatatttttacaaatagcgtttatttgacataacaaagcaaatactatatgtttatttttcacttagtcatatttgactttcattgacagcaaaagaaacaacaaaacttataaattttaactattgtgatctcagttttggctgagagtattcaggtagacactgtgaactcactatatattcattgccacctctttctttcttcccttccttccttccttccttccttccttctttccttctctctctttttctttctccttccttccttccttcttttttcttttctt

SEQ ID NO: 28378 - DNA, 572 bp, Homo sapiens
aactagccaggggtggtggcatgtgcctgtagtcttagctgcttgggaggctgaagtgggaggcaggtttgagcccaggagtttcaggctgcagtgagctatagttgcaccactgcattctaacctggtgtcaaagtgagatcctgcctctaaaaaagataaataaaataaaattataaaataaaattattccaaaagaaaaagtttacttattaaagggtatgtcacagcccatatgtatatagtatgccaccatatttgtaaggagagaaaggaatatgccygtatatgtaatgtttgtgaaccataaaatatcactggaaaaatgtggaagaaactgataacagtggttacctctcaggaaggaacttaagtactttgggggaagcaaagtgggagaattttcaccatgtctcctgttgtattttttatccatccaaaaacaaatttttaaaaatgtgtttccaataatggagaacatagctcttccgtaatatgatctaattctgattaacttcgttaactaaataattaaataagtatttattgaatgcctactatgggctaggccc

SEQ ID NO: 28379 - DNA, 572 bp, Homo sapiens
aactagccaggggtggtggcatgtgcctgtagtcttagctgcttgggaggctgaagtgggaggcaggtttgagcccaggagtttcaggctgcagtgagctatagttgcaccactgcattctaacctggtgtcaaagtgagatcctgcctctaaaaaagataaataaaataaaattataaaataaaattattccaaaagaaaaagtttacttattaaagggtatgtcacagcccatatgtatatagtatgccaccatatttgtaaggagagaaaggaatatgcctgtatatgtaatgtttgtgaaccataaaatatcactggaaaaatgtggaagaaactgataacagtggttacctctcaggaaggaacttaagtactttgggggaagcaaagtgggagaattttcaccatgtctcctgttgtattttttatccatccaaaaacaaatttttaaaaatgtgtttccaataatggagaacatagctcttccgtaatatgatctaattctgattaacttcgttaactaaataattaaataagtatttattgaatgcctactatgsgctaggccc

SEQ ID NO: 28380 - DNA, 554 bp, Homo sapiens
agtagttagggtttgaacctaggcagcctgacaactaatgaccacactctgaagaccctcatatactttgaagatagttgtttaatccacttcttttctcatatagaaaaaaggaattgaggatggaaatctaatatttgatgaagactcagtgtgcaagtaatcatggagacactatattgttttattctagtgtccttgtaattttctttatagagcaccaaaacaataaactgcttctcaaatggtcgtattcaagtgctttataatattaactcatttggtgtgcataacaactctatgaggtaggttttattattatgcccattttccaattsaagcatcttgtgtgcaaagaattaagtaatttacccaagattattcagctgatgagtggcaagatattcacatacatggttctttatagttacaatgaatctcattaccagttcaatgaagtgaatggttcccacactcagaggatactcttttgttaacacctgtactttaaccaagaaaggctgggatatgactgtcagcgatgggacattttt

SEQ ID NO: 28381 - DNA, 803 bp, Homo sapiens
ttgtatatagatgctagcaactawctaatcctgcagaagacagcagaagaataataaagataactttggctaccattgtttcagtgtcttttccctgttctcaaactgggggaaagacatacactttggtgctggcagcattgaatcactaacaatgaagacaaagcatgatgcaacttcctggagggaccatttgactcaaagattattttgaacagtatgttttatttcaaagaggtattaaaagaggtatattacaaaagagaattttaaaattagcatgatttttaaaatttcatttatttattcaacaaatatttactgagcatttgtacaaagccttggtgttcctatcatggacagaatcaaatggaccctgatctcaggaaatttagaacctgataagggaggcagaggaattcgttgcaaaagctgggatgagtgctctgaagaaaataccacagttcttaaagagcctcgcacaaaggcaagggaagcatgagctgagatctgaaggatgagaaggagttgagtaggtaaaaggctggagaggtggtgctggtgggagatgcagatggggcagtatgagtccaaagccttgatgtgggcagggattaggaagaaggccagtgacaccaaagctcacagggtaagggagaaagtagtggatcaggctggagatgttgctggggccagacagtgcaaggacttgtgagcatgttagaattgcagaaaaaaatgaaactaagttctggcttgagggcactttgcaggtaactgtctgatccttccagaggaaatag

SEQ ID NO: 28382 - DNA, 520 bp, Homo sapiens
cctatttattatatacaacatgttgtgcttggagataagtctacacccttgaaaccatcaccgcaatctctttcaccccttccctagtccttcctatttagttcttcttccccgtctgtgttgaatagtctcttcttctccctgcagaccatttccccactgctcccccttttgcttgagacccagaagtttgacatttatggacatcacccttgccttttggcttctsgttggattcagccaatgggaagccccagccagagatctaggggtggacagctagggtgaagtttgaatatttattctcccagctccctctctgctgatctatgcattggccatggctgtgtccctctacaaggccacagctcctgtgggctgtcctctctcacagctacactgtagccacagcctttcgtggacccagtaaccactccctcaccctcctcctcaggcctgtgggattccatggttgtcgctgtggctagcctctgctggtctcccttcatcctggcatggc

SEQ ID NO: 28383 - DNA, 762 bp, Homo sapiens
agaaatgtaacctctggtttagcctggcttcctctctgtcatgttgatggtgagatcggactaaatatctttcctgtgcaaatagtcttcagatacactccctttcccagccaatgctcactgggcactcaatctacaccyagccctgcccagggtccggggacttgctgaggagattaagcaaggacaaacagataaggattagtatcagcgctttaagaaagcaaccaagagctttgaatatacaaagaaatgagtaggtatctctggtgggctacatcaacagtgggagctgcaaagccaggtgacctaggattgaatcctgcatctttcttttaccaactcagtgaccatgggccagttaataagagttcttactcttcctggatagggttattcagaagattatatgaagtaatccaggtaagaaactacaacagtgcctggcagagagtaaacactcaatatgtatcagctgctattggtggtattgcgggcttcttacagagagcattataattccctcctaatccatttccctgtgtaagaagaggagagagtgagaggatggagggagagagaaagccaaagaggtggtcactagcctacaactgatacctgcaatgtgtcaagctctacaacaaacacaagctcttttgacttcctggatcacccctggatcacctgtatagacaagctgactgaagctgaagccctgacctgctgaatatcacagtcctcacatggatagaatcaggattt

SEQ ID NO: 28384 - DNA, 762 bp, Homo sapiens
agaaatgtaacctctggtttagcctggcttcctctctgtcatgttgatggtgagatcggactaaatatctttcctgtgcaaatagtcttcagatacactccctttcccagccaatgctcactgggcactcaatctacacccagccctgcccagggtccggggacttgctgaggagattaagcaaggacaaacagataaggattagtatcagcgctttaagaaagcaaccaagagctttgaatrtacaaagaaatgagtaggtatctctggtgggctacatcaacagtgggagctgcaaagccaggtgacctaggattgaatcctgcatctttcttttaccaactcagtgaccatgggccagttaataagagttcttactcttcctggatagggttattcagaagattatatgaagtaatccaggtaagaaactacaacagtgcctggcagagagtaaacactcaatatgtatcagctgctattggtggtattgcgggcttcttacagagagcattataattccctcctaatccatttccctgtgtaagaagaggagagagtgagaggatggagggagagagaaagccaaagaggtggtcactagcctacaactgatacctgcaatgtgtcaagctctacaacaaacacaagctcttttgacttcctggatcacccctggatcacctgtatagacaagctgactgaagctgaagccctgacctgctgaatatcacagtcctcacatggatagaatcaggattt

SEQ ID NO: 28385 - DNA, 762 bp, Homo sapiens
agaaatgtaacctctggtttagcctggcttcctctctgtcatgttgatggtgagatcggactaaatatctttcctgtgcaaatagtcttcagatacactccctttcccagccaatgctcactgggcactcaatctacacccagccctgcccagggtccggggacttgctgaggagattaagcaaggacaaacagataaggattagtatcagcgctttaagaaagcaaccaagagctttgaatatacaaagaaatgagtaggtatctctggtgggctacatcaacagtgggagctgcaaagccaggtgacctaggattgaatcctgcatctttcttttaccaactcagtgaccatgggccagttaataagagttcttactcttcctggatagggttattcagaagattatatgaagtaatccaggtaagaaactacaacagtgcctggcagagagtaaacactcaatawgtatcagctgctattggtggtattgcgggcttcttacagagagcattataattccctcctaatccatttccctgtgtaagaagaggagagagtgagaggatggagggagagagaaagccaaagaggtggtcactagcctacaactgatacctgcaatgtgtcaagctctacaacaaacacaagctcttttgacttcctggatcacccctggatcacctgtatagacaagctgactgaagctgaagccctgacctgctgaatatcacagtcctcacatggatagaatcaggattt

SEQ ID NO: 28386 - DNA, 1206 bp, Homo sapiens
tgcttgtgtgctcccagtttatgacctttggagaacatagtgtttttggggtaaggacaaggggccagagagtggtaagagatacctctaaggagrtaagttggagctattttgtgaggatcttgctaagaaatcggtgctttatcaagtagggctcattgaatccctcaaggatcttaagcctggatgtggtatcaaatttgtgttatcaaatgatcaatctagaaccagcaaaaaaaagtttggatttgagaaagataagactaggataggaagattatgtatagggattactaaaataatcttggaaagaaacaaatgaaggtctgaaagaagagatctgagagccattaagaataacaccaaaatgacatagaaactgacaagttgccatgagtgagggcagtgaggagtgatccagaagcttctgagttaagtgacagcagggagagggcagtggaagagcaggatttgtggtgagagggaaaagttttcatgttgagttggggaatctctgggacttggtgtggagctgttaagtagcaagattaatcaggaatctggaccacgtggtcaggcagaaccaggtgaaaatccaggctctgctggttagcacagtgacccggggtgtattatttaacttatctaaggttctgtttcttcctctgtaaaatgagtattagcacagcacctagctcacagggcctgtgtgaagattaaatgagttaacacgtgtaaagtacttagctccatgcctggcagatgttaattcttgatatgcggttactattaatattttaatgttgagtcatgggagttagcaaacagactccttaaattctctttgaccaaggacaggggtgagtcttcaggtaggaaggtcatgtatggtcacctgtagagactggaggctgcaagggaaaacttatttttagtgttttattttaaggtaatttatggtgtggcttttaaggttatgtctaaaaggtttctctccgcctggtggataaggtcagatgaggtctcaattacttgggagtgttgcacacagactctctcctggagccttgtggaatatagagctcagcagtttccaatcactggggatcactgagaatttgagatcttaaatcacattaggatcacttgtggcactttcaaaactacagatggtaaaatgctgtctctggagacgagtcctgcgtg

SEQ ID NO: 28387 - DNA, 2636 bp, Homo sapiens
cttatgtgaccctctcttggggcatggatcaggcagccctgcaaaatagcatggtcccaaatcttgacttctccactcacaagctagcttatctgcggtaagtgactcagcctgactaggaaaactcctagttttcctcatctttaaaccagcaatatcagtagtaacttccatatacggttgccatgaggataaaatgagtgaatatatatatacaaaggaattagaacaaggcctggcacacagtaaatggcttatacgtgcatagtagtgcattatccaagcattagggattatctgtgtcggtgttatctgtgtgcctgtcacaagacttccatttgattgtgaactccataagcatagaaatcatctctgattcagccatgaatcctcagctacttgcacacagaaggatgcagtaccacttatccatgcattcattcatgcatttaataaatatttattctactatgtgccaagcactgtgccctggggttacaagcattaataaagacaacgacccttcccttatggaggttatattgtttggagaagacagaaatagagcaaacaagtaagtcgataaaatgggcacatcttgtagtaagtgcaagaaagagaacagccagactctttgaaagagaatgaaggaggaggagcatggaagagagcttttggatggtcagggaaggcattgcttctaaaggcctctgaagaggcgataattaagctgaaacttagatgaaaaggaggaaggggtataggcaaaagatggactgcatcttatatgaaaaggatgcctggggtataggcaaaagatggactgcaaaggagcaggaggaaacttcccaaggtgatggaaatgtaacggtggttgcctaagtgtatttataaagttgtcaaaactcatcaaactgaaccctgaaaaggagtgaattttattcatacaaattatgcttcaggttgggctcagtggctcacgcttgtaatcccagcactttgggagaccgaggtgggtggatcacctgatgtcaggtgttcaagaccagcctggttaacatggtgaaactccgtctctactaaaaatacaaaaagtagctgggcctggtggtgtgcacctgtaatcccagctgcttgggaggctgaggcaggagaatcgcttgaacctgacaggcagaggttacagtgagctgagatcgtatcattattgctcagcctggtcttctagagtgagcctcctgctgagtaataataataataataatgatgattattattattattattatgcttcaataaagctgatttaaaaataaaagatggtagccaagtaaaaaatcaaggaagagcattccagacataggaaaaaagagctgatgcgtagcctctgaagcagggaaaatctttttgcatcctaggaaggcctgtgtggatgaagcagggtaaagaagagggaaggtagcaagagatgaggcaaagacatgacatcctggacctggtggggttaggattttattctgtgtgaacagaaaaagcccttgatttgctatcaaaagtcctaaaccctggtctggactttctagctgtgttgtcttggatgaatcattgaactattgtgaacattttttaaatctgtaaaataggaataaaaatgatatgcagggatcccatcaaagggggctgcagccagggctgactatgaaggcaggttgacacctgatgcctggggatatacccacatatttttattgggcactcaaaagattgcttattgaattaaaatagtacatgcctgtatggagcagagacctatgacctttcaaatagcagttggtgagtggtggggaggaagaatgggaattattcccataattatggcattgactaattagggcattgagtccttcagtgtgtcctcacctacccaatactgtttttctctcttatagaaaattcttattttccttggtctcatagcatgtgtcacagtttattattatgcatttaaattctgtgcatctttgttcagtgtctgactttctgcagactgcaagctccatgaggaccagaactgtgtctcttctctaaaccactgtaccccagtatctagcactgtcattggtacataggaggcactcaataaatactaattgaatgaatgaatgaatgactataaccatccatttatccaaagacaattaactatccacagggccctttctgcttcttcctaaataatccaccttcttccccttacccactggaagctcatcacctaagccttcctttttgggttttctccatcatcctcattctaaattcagcaccgcccaaccccacagagcttctttctttctattttaataaacatctacacaaaattaaggagagaaagactggtggttgtgtttgatttcacactggttttgacstttgatattgtaaacttctttcaccttaatttgattttctgaagtagatagggtcagatcaactataattcccattttccacatgaggagccagacagttgaagagatggattgactcatcccatggcatagctagggagtggcagggacacagctaaaccctgggtcccatggctctaaattccatgatccttttcccttaca

SEQ ID NO: 28388 - DNA, 1172 bp, Homo sapiens
aagatggctctagagactgtccttcagagaccagagttgattgcttctaccctcttgctgctgccatctaatcaccctatttgcactctatgcaaatttcatctttgtcttgctcatttctgtttactcatagcttctcacgtctcatggtgaccaagttggccttctccttttgtcttttatcttttgctattaactgactttccatatctcaagttcagatatttgtttgctcatgactaacatgttagtgaactctgtttatcaaagttctcctcctatgcagttcacaaggtacaatccagcttccagaatggctgtcttgggtctgtgccctccctagattcaattagatccgaggctggtgacttaygaggaaagagcccatagaaagggctctatgtatggcagtccagttcagtacattcctcatctcatttatttgttcttcaaatatttattgagcatatatttatgccaagcacagtacctagaataaatacaaagatgtatacacaagacataatctcctgtattgcaaagttcacagtctagtgagggaggtaaacaagcaaataaataccttttacacaggataaatgctacaacagatatctgtatagtgtgctacagggatgaaagagaagagatcaattctacttgaaggtgataacggaagatttcacagaggtgaaaataaatgcactgaagagtaaggttgagtagaagatctcaggctggttaagctgctcagagtgtgctggggagaaagctggctatgccttcctggtatggttagagggtaaggtttgggcttccaggccagagatgatttagcagggtagggatcaagttactgtgggctttactggttttgctgaggagttcggctacattcttggaacaaggagaaaatccctgagtgatttcagtaggggaatatcatggtcagatttatgttttggaaggagaccacttcagtggcagaagtaagaatggattgaaatgtgtgacaatggaagatgaagaccaactaggaggctgttacctggaatgagaaaatgagggtccaggtgaaaaatggcaaaacaagtgcacacatgctgctatttcttgaacaaagtccatggtagatattgttaattgatcatggcactgccccactggatcat

SEQ ID NO: 28389 - DNA, 783 bp, Homo sapiens
caaaacccaaacaccaaattagtataacaaagaaaagcaaaggggacaagtagttacaaaatgtattaacatatgggggctctaggggagaggatgactcaggagactaggcacaaatagcaacacctctcaagcctgaaccacaagtgaggccaaatctccatggacagaagccacttggagtagktgggtacattaggtaggggagagaggcttgtagtggagcatttaccttgtggatgaagtaagttgggttctagtcttctcagcacaacttacaccatgcagaacaaagagagatgactggcagcaaggtcacctttactaacaagtcaccctgtgtctaaaggtcaaaaaggtaaatatccatgggcacgagacagacacttcagtgagtcaagttggctaggttaagaccatgctggattggagagatgttgtccctccaaaggggatggggccacaagaccattcataggccctgtatttctgggttgtcagaatttccaagaagtcagaaatgcagacattttctgaagaatctctagttctgaatgttggcagcacatctgaattcctttcaaaatattctggagccacaccaagcatgtctacaggctgaattggccttgggagccatctgcttggcaacctctcgcctgggagtgggtggctccaggcactgttgaacttggttacagatatcagtaggcaccctttctttccgatgatttgaaaatcttcctccgatcctaagctatattttgaggttccataacctac

SEQ ID NO: 28390 - DNA, 783 bp, Homo sapiens
caaaacccaaacaccaaattagtataacaaagaaaagcaaaggggacaagtagttacaaaatgtattaacatatgggggctctaggggagaggatgactcaggagactaggcacaaatagcaacacctctcaagcctgaaccacaagtgaggccaaatctccatggacagaagccacttggagtagttgggtacattaggtaggggagagaggcttgtagtggagcatttaccttgtggatgaagtaagttgggttctagtcttctcagcacaacttacaccatgcagaacaaagagagatgactggcagcaaggtcacctttactaacaagtcaccctgtgtctaaaggtcaaaaaggtaaatatccatgggcacgagacagacacttcagtgagtcaagttggctaggttaagaccatgctggattggagagmtgttgtccctccaaaggggatggggccacaagaccattcataggccctgtatttctgggttgtcagaatttccaagaagtcagaaatgcagacattttctgaagaatctctagttctgaatgttggcagcacatctgaattcctttcaaaatattctggagccacaccaagcatgtctacaggctgaattggccttgggagccatctgcttggcaacctctcgcctgggagtgggtggctccaggcactgttgaacttggttacagatatcagtaggcaccctttctttccgatgatttgaaaatcttcctccgatcctaagctatattttgaggttccataacctac

SEQ ID NO: 28391 - DNA, 1043 bp, Homo sapiens
atacccccaagctcaggattatgcaatatacctatgtaacaaacctgcacctgtatccccccatatctaaaataaacactaaaatttaattaaaaaataaattaaaaaaatgaaaaaatatatcagtcattgactttattgccctgataacgtagcaatggcaacttcacatgttgacttaaaactttgattgtcaacctttggtgtttgcaggatacttaaaaaaactggattatttaatgacactcttgaaggaattaaagtataaaaaagttatagaatattgaaaacatatttccatacttattgaattagttgtttttaatttgaggagaaccaaaaaactctttactgtcctgaccatattctctgatacagtmataatgcaaatttcttacaatttctggcatatagggcatctttctttaacactagcatgcctttacacgaagccttatcacttctttgcagcaacttgttccacaactcactgagtgtgcattgttctgccagagacatcactgtaagagtatgtcgtgtcaaatgtagcaaaaattgtttttatatggtatcagttataaagtgcttttgaggactgtttcttgcttccctgagaatgctgacaagcagagtaaactaagtgctccaatttctaggttcggaaaattacccattttagtcagcttctgcagggccttctaggacagggcacagcaaaaacaccacttctgaacaccccaatcccctggaccacatctagaggactacagaaggtaagagggagaattctcaaagttgtagttatccataatcctaccccttcttatcaagaggaggagaaaggcattgaactctctctcatccctgccttttacagatggttctggaatatggacaaaaggaaaggagaaaaatggctaaggtgccagaggaaattcccaaagcagcctgcattccctcataaatcaaatgtataacatggaactcacctgacacttatatcatcttttcagtgctccaatggtcatacccacaaagaaaag

SEQ ID NO: 28392 - DNA, 1233 bp, Homo sapiens
  misc_feature (1)...(1233): n = A,T,C or G
ttgggtccattatcaatccttaataatgagaaaaacatgaaatttaaaatttaaaattatctttcaaacattggaagaggaaaggatggttttagttccccaggtcgttaaatgagtaatgaagcaagttttacattctaaccgtgagacatattagctgttcatttgaaaaggaaacatttagtttccagtctttggggacctcactgcaaacttttgtttacaaagctggttgcgcatgtctattattgtgcatcatttttgagcttttgcattatattttgcatcaccacagttaagggtagaataacaggactatggcatctgtgtttagatttagatagacaaatggggaaatagtgcagagaaaagccaactaaagaaattttaattgttccttgtataaagccccagtttacagaaaggttgaaccaattcatttctgcagcttacatatctaaatttgtgaccatgtagcatatgaaacaaattagggtatccctattaatcactgagttgtcaatatgaacataaagattggtgcgaattcagtgtcctgcacaaaagtcttcagttaaaacagaagagatattatggtggtggattccccaggatgttcaacaaacagagaagaggccaaagcatgttgtctcaatcttccttcttgttttagtccattctcacactgctaaacgatactacccaagactggataatttacaaagaaaagaggtttaattgactcacagttccacatggctggggaggcctcaggaaacttacaatcatggcagaaggagaagcaagcacatcttacatggtggcaggtgagggaacatgagcaaaagcagggaaaactgccttataaagccatcagatctcatgacaattcactcactatcacgagaacagcataggggaaaccacctctacgatccaatcgtctcccatcagattcctccawccacacgtgaggattaccggtattacaattcaagaggaggtttgggtggggacacagccaaaaagtaacactttttatttattacaattttatatcatccctagcaaattgttccaaattcttgcccatccttcatcaatatctaaaattgcacttgtaannnnnnnnnnnnnnnnnnnnnnnnnnnnnnnnnnnnnnnnnnnnnnnnnnnnnnnnnnnnnnnnnnnnnnnnnnnnnnnnnnnnnnnnnnnnnnnnnnnnatataatat

SEQ ID NO: 28393 - DNA, 641 bp, Homo sapiens
agaattttctgtttcaagaatgattgataaacagatggtgtatccgtcaagattctccagagaaaaataaacaataaaaaatgtgtagacggatgaatggatgaatggatggagaaagagacagagagagagagaaatagatttattttaagaaattggcttatgtgattgtggaggctagtaagtccaaaatctgcaggatagaccagcaagctggagacccaggaaagaatgaaygttgcagctcaagtctaaggcagtctgctgccagattccctcttcctcaggagagaaagatgttaggagaggtcagtctttccatccccccaccattaagggcttcacctgatgaaatgaggcccacctagattatggaggttaatctgcttcactcaaagtctactaatttacatgttaatatcatcttaaaaattccttcacagcagaattcaaaatagtgtttgaccaaatatctggaccttaacatgtaaaattaataattacagagggacagattatggaagacaaagaacaaatttttttttaccaggtaaagaattagattcattaattttaggtaaactgaaattatcctaaattacttttaattcaaaccaaaagacaaggagagataatgtaga

SEQ ID NO: 28394 - DNA, 641 bp, Homo sapiens
agaattttctgtttcaagaatgattgataaacagatggtgtatccgtcaagattctccagagaaaaataaacaataaaaaatgtgtagacggatgaatggatgaatggatggagaaagagacagagagagagagaaatagatttattttaagaaattggcttatgtgattgtggaggctagtaagtccaaaatctgcaggatagaccagcaagctggagacccaggaaagaatgaacgttgcagctcaagtctaaggcagtctgctgccagattccctcttcctcaggagagaaagatgttaggagaggtcagtctttccatccccccaccattaagggcttcacctratgaaatgaggcccacctagattatggaggttaatctgcttcactcaaagtctactaatttacatgttaatatcatcttaaaaattccttcacagcagaattcaaaatagtgtttgaccaaatatctggaccttaacatgtaaaattaataattacagagggacagattatggaagacaaagaacaaatttttttttaccaggtaaagaattagattcattaattttaggtaaactgaaattatcctaaattacttttaattcaaaccaaaagacaaggagagataatgtaga

SEQ ID NO: 28395 - DNA, 641 bp, Homo sapiens
agaattttctgtttcaagaatgattgataaacagatggtgtatccgtcaagattctccagagaaaaataaacaataaaaaatgtgtagacggatgaatggatgaatggatggagaaagagacagagagagagagaaatagatttattttaagaaattggcttatgtgattgtggaggctagtaagtccaaaatctgcaggatagaccagcaagctggagacccaggaaagaatgaacgttgcagctcaagtctaaggcagtctgctgccagattccctcttcctcaggagagaaagatgttaggagaggtcagtctttccatccccccaccattaagggcttcacctgatgaaatgaggcccacctagattatggaggttaatctgcttcactcaaagkctactaatttacatgttaatatcatcttaaaaattccttcacagcagaattcaaaatagtgtttgaccaaatatctggaccttaacatgtaaaattaataattacagagggacagattatggaagacaaagaacaaatttttttttaccaggtaaagaattagattcattaattttaggtaaactgaaattatcctaaattacttttaattcaaaccaaaagacaaggagagataatgtaga

SEQ ID NO: 28396 - DNA, 641 bp, Homo sapiens
agaattttctgtttcaagaatgattgataaacagatggtgtatccgtcaagattctccagagaaaaataaacaataaaaaatgtgtagacggatgaatggatgaatggatggagaaagagacagagagagagagaaatagatttattttaagaaattggcttatgtgattgtggaggctagtaagtccaaaatctgcaggatagaccagcaagctggagacccaggaaagaatgaacgttgcagctcaagtctaaggcagtctgctgccagattccctcttcctcaggagagaaagatgttaggagaggtcagtctttccatccccccaccattaagggcttcacctgatgaaatgaggcccacctagattatggaggttaatctgcttcactcaaagtctactaatttacatgttaatatcatcttaaaaattccttcacagcagaattcaaaatagtgtttgaccaaatatctggaccttaacatgtaaaattaataattacagagggacagattatggaagacaaagaacamatttttttttaccaggtaaagaattagattcattaattttaggtaaactgaaattatcctaaattacttttaattcaaaccaaaagacaaggagagataatgtaga

SEQ ID NO: 28397 - DNA, 603 bp, Homo sapiens
tttttaaaaagaaaacaggtttgtttccttgtgttgagaattattcaacatggaaagtgctacctaaaagaagagagagctcattgactccatttgttctaaaaaacaaacmaacaagcaacaaaaaaccctatatattttatacaagtagaaaccctatatattttatacaagtagaaataactagcaatatatttctatagggagaaataagccagcatattttcaacgttcttaagatttcatttctaaagcaaataaaacaaggcaaagccaatattgtaaaaaaaaaaaaaaaaaattaaacctaagtctacatgaacttagctgggtaccagttgagatatttgaagtttatctaccctgtagtcctcacatttaaaatttttctcaatagttgaatgtaagttatttacttctggattgaacaataaaatgtaaatggaggtttccaggaagatgaattgagtgtgccatactgcctgcctctgtaggctccacctctgggggcagggcacagacaaacaaaaagacagcagtaacctctgcagacttaaatgtccctgtctgacagctttgaagagagcagtggtgttcccagca

SEQ ID NO: 28398 - DNA, 603 bp, Homo sapiens
tttttaaaaagaaaacaggtttgtttccttgtgttgagaattattcaacatggaaagtgctacctaaaagaagagagagctcattgactccatttgttctaaaaaacaaaccaacaagcaacaaaaaaccctatatattttatacaagtagaaaccctatatattttatacaagtagaaataactagcaatatatttctatagggagaaataagccagcatattttcaacgttcttaagatttcatttctaaagcaaataaaacaaggcaaagccaatattgtaaaaaaaaaaaaaaaaaattaawcctaagtctacatgaacttagctgggtaccagttgagatatttgaagtttatctaccctgtagtcctcacatttaaaatttttctcaatagttgaatgtaagttatttacttctggattgaacaataaaatgtaaatggaggtttccaggaagatgaattgagtgtgccatactgcctgcctctgtaggctccacctctgggggcagggcacagacaaacaaaaagacagcagtaacctctgcagacttaaatgtccctgtctgacagctttgaagagagcagtggtgttcccagca

SEQ ID NO: 28399 - DNA, 1072 bp, Homo sapiens
aaattccatgctatatctaatgtaccattctctatacttaaaatgtgtttttctggaaaaaattatccattgatatttatatcttttgatatcacaagaatttttggcctctcatcaagatgaaatatattaggaaatgagatagaatgttagaattaaattgttktgagaccaccaaattcccattgctatggaaatcattttgggcaatgcaaatattttaactggctaacactcaaggttttccagattaaattcttttctttctctccatagaatagtagttatttacctttgtatggctcattcatagtaaatctcttaatttccttggtgatgtttatttaaataattggtctccttaaatgaaagcacaattatagcaagacaattcttcttccataaaacacacattcacacgattaaaaacctaatttaagcttctattactgtattattaaagaaaatcttcatgtcacatttatgtttgaaatcatctaactgtttgatttcacaatgctttctctctttataaagggtcttattttctagaaattatattttagatttgcaaggcactgtttttgataaccaaagctagtagtaattaatataattcttggtcattaagagaataacttgattttatttgaccatagtcagagatattatttactgaatgcctatgacagagatgtatctgagttatcctaaccagaattctatgttgcagatattctcattttgcagacaaggtacttaaaccaaaccattttgcagaccagccaaacaagaagtgatgtagcctgaattcactcagatctgacttcctcaaggataaactactaaattacaccaccttccacctcaaagattaagtaataaaatggatttgatcacaaatggatgaaaccttcttcatgttgactgggtgtttagctagatgagcaagagatgttatccagtgtaccttcattactgactaacctacatctaggagtgctctaacatactgggcaggttcagaaatccagtctcaccatcttaaaattcttaataattttttaataaa

SEQ ID NO: 28400 - DNA, 1246 bp, Homo sapiens
tacccttttccaccactccgattgcctaccaccacatcactaaattactgcacaaaatatccaatttattttgccttaggggtcctaggcctaagcaaaaaaataaataggtccttacttgttataatttgtaacttggctgtgggaggaaagtgaatgcaagtcttttaactgcagtattatactctaccatcaaatttcccattcaaaactgacacagatgaaatctcaagatactcagactttatttatttttaacatgacrtctaggttgctgaggtctctcaactttcctccaaagaaatttggtacttacaacattgttggcttttaatatcaccagggagatataaagccctgcagaaaactgttttctgtcaaaattacaatggacctgcatattttagcaatttcagcaacattacgtagtctgatcaggccagtcattgaccagttgctcacccctatcaattgcgttagcatttaacttgtcactttaaattacaaaggtaacaaaagtttaagaaggttacaaaaaatttaatcccccactaaagaaaaagagaatattactgaattacatagataaattatcttcctcctctgtccaattttggtgataatgtattgggggttttcttctcaatactttgcttttatgaggcttaaaagatgtaagatcttagaactggtaaaaatcaatatgaatttccattgcagtgtctgtcaaagtaaaggaaaagttagtaaatagctgtgaggttttcctggttcaaggaaaagcaagtgagtggcatgcgtcatagcagcaactaagatgtctcattttctggctgcagtgtcccacattgccttccagtgacaagaccaatggagaaatcaagcaggagagagtaccagaaatcctttccttcatcccatctagatgccactctgatggacacccatgtataaatttataagtaggcagaggtttgctaagttcaagaataaaaccacaatcacttagatataccagattcttccgtttctcttaggacctgggaagaagaccttcacctgccaattgtttgaaaagcagttttctagtttagcagaatattttagtatatttctctccccaaatctcttctactttgagtggtattctgaccaatctcaatccaccggtcaatcatacactcaattaattttttaaaagctgctttattgacattttctctccttgaatgaaatggttatttgt

SEQ ID NO: 28401 - DNA, 1246 bp, Homo sapiens
tacccttttccaccactccgattgcctaccaccacatcactaaattactgcacaaaatatccaatttattttgccttaggggtcctaggcctaagcaaaaaaataaataggtccttacttgttataatttgtaacttggctgtgggaggaaagtgaatgcaagtcttttaactgcagtattatactctaccatcaaatttcccattcaaaactgacacagatgaaatctcaagatactcagactttatttatttttaacatgacgtctaggttgctgaggtctctcaactttcctccaaagaaatttggtacttacaacattgttggcttttaatatcaccagggagatataaagccctgcagaaaactgttttctgtcaaaattacaatggacctgcatattttagcaatttcagcaacattacgtagtctgatcaggccagtcattgaccagttgctcacccctatcaattgcgttagcatttaacttgtcactttaaattacaaaggtaacaaaagtttaagaaggttacaaaaaatttaatcccccactaaagaaaaagagaatattactgaattacatagataaattatcttcctcctctgtccaattttggtgataatgtattgggggttttcttctcaatactttgcttttatgaggcttaaaagatgtaagatcttagaactggtaaaaatcaatatgaatttccattgcagtgtctgtcaaagtaaaggaaaagttagtaaatagctgtgaggttttcctggttcaaggaaaagcaagtgagtggcatgcgtcatagcagcaactaagatgtctcattttctggctgcagtgtcccacattgccttccagtgacaagaccaatggagaaatcaagcaggagagagtaccagaaatcctttccttcatcccatctagatgccactctgatggacacccatgtataaatttataagtaggcagaggtttgctaagttcaagaataaaaccacaatcacttagatataccagattcttccrtttctcttaggacctgggaagaagaccttcacctgccaattgtttgaaaagcagttttctagtttagcagaatattttagtatatttctctccccaaatctcttctactttgagtggtattctgaccaatctcaatccaccggtcaatcatacactcaattaattttttaaaagctgctttattgacattttctctccttgaatgaaatggttatttgt

SEQ ID NO: 28402 - DNA, 1588 bp, Homo sapiens
tgcatgtattacctactctgggtagcagagacttaactgaaatatcagatagagtctttctgcagtggacacttctaacttttataattatgtaaaaagttgttaaataaatctgatttggtttccttttacctttccattccaggcccaagtcattcttctggtcattcttctaattgctattgcaaacttcttcattggaactgtcattccatccaacaatgagaaaaagtccagaggtttctttaattaccaaggtacatggaataaattggttgcttttcattaaatacttctccattgccctcctcatcaccatccccatcaacccaaccccagccttcggaatgcctggctcccctttcaagttacttgtggatgcggaagcccaaaagaaatgggaagtacgttggggaaacataatagaggcaaaaactatcattctcttctgaaacccagtacttcaccagcaaatttgggcacaccataggttttagaaccagaaaatatatgagtttaactagtgataactaactagtgataaaatggatagtacatttctccaggaaagagcctggagttggattcaggagacccaaggttggatctcaactctgccacttaacagctggacagaacacctaatgtgactgggtctcagattttcctgccaaaatgtgggtgacaataagaacttcctgagggaattttgagaaacaaataagacagtggatgtgaaagtgctttgtaaaccttttgttgttgctgtcaaatagtagaaacagagacacagctcaatttgttcaaccactgcagagcactaaagtcaaacatagtcatttctctcttcctgctagacttgtttgcaccttgctttcccacagcattacctagttaagcatcactgtcaggctttcaggcagaaaagactgtaggagttactcagtgtagcatcctgtgataacatcacagagcatgaaatttgacttctttctctccttattttactccttctatctgttcttgcctttcttttccctctagcttactcaagaatccactgctgagtttttcaatgtttccctttattatttactcagttgtcagtatttatttctttttgatatcacatacctctttcttcctgattccttttcttcataaagactttctggtttgctttgcatgttaatatccttttcccttctattattttccctcccttcccattcctaccatattttttctttaagccttttttcctattttttcatcccagattcttttgttcacatttttttcctctccttttctcttttttccttctgtttttcttctaggttgtttcctttttatttaataatttggtggcaatgtgtgggatggtattattttattaacaaaacttctcatcataatattctcccatactgaggatttggtataagcagctaagatctaatatctaggagtaaaaagtaaagagattcatrcattagtagcaaaattgtaaagtagactcacacacaaggttcttcaactaccaaaaaaggcatagaaaaccagtgtgttgattgtttatggtatt

SEQ ID NO: 28403 - DNA, 1588 bp, Homo sapiens
tgcatgtattacctactctgggtagcagagacttaactgaaatatcagatagagtctttctgcagtggacacttctaacttttataattatgtaaaaagttgttaaataaatctgatttggtttccttttacctttccattccaggcccaagtcattcttctggtcattcttctaattgctattgcaaacttcttcattggaactgtcattccatccaacaatgagaaaaagtccagaggtttctttaattaccaaggtacatggaataaattggttgcttttcattaaatacttctccattgccctcctcatcaccatccccatcaacccaaccccagccttcggaatgcctggctcccctttcaagttacttgtggatgcggaagcccaaaagaaatgggaagtacgttggggaaacataatagaggcaaaaactatcattctcttctgaaacccagtacttcaccagcaaatttgggcacaccataggttttagaaccagaaaatatatgagtttaactagtgataactaactagtgataaaatggatagtacatttctccaggaaagagcctggagttggattcaggagacccaaggttggatctcaactctgccacttaacagctggacagaacacctaatgtgactgggtctcagattttcctgccaaaatgtgggtgacaataagaacttcctgagggaattttgagaaacaaataagacagtggatgtgaaagtgctttgtaaaccttttgttgttgctgtcaaatagtagaaacagagacacagctcaatttgttcaaccactgcagagcactaaagtcaaacatagtcatttctctcttcctgctagacttgtttgcaccttgctttcccacagcattacctagttaagcatcactgtcaggctttcaggcagaaaagactgtaggagttactcagtgtagcatcctgtgataacatcacagagcatgaaatttgacttctttctctccttattttactccttctatctgttcttgcctttcttttccctctagcttactcaagaatccactgctgagtttttcaatgtttccctttattatttactcagttgtcagtatttatttctttttgatatcacatacctctttcttcctgattccttttcttcataaagactttctggtttgctttgcatgttaatatccttttcccttctattattttccctcccttcccattcctaccatattttttctttaagccttttttcctattttttcatcccagattcttttgttcacatttttttcctctccttttctcttttttccttctgtttttcttctaggttgtttcctttttatttaataatttggtggcaatgtgtgggatggtattattttattaacaaaacttctcatcataatattctcccatactgaggatttggtataagcagctaagatctaatatctaggagtaaaaagtaaagagattcatgcattagtagcaaaattgtaaagtagactcacacacaaggttcttcaactaccaaaaaaggcatagaaaaccagtgtgttgattgtttatgktatt

SEQ ID NO: 28404 - DNA, 435 bp, Homo sapiens
gaagttattaataccaacctggatttactatcaagtgctcttaacttgccagaagctgggamtcacttcaggtgtttgtttagaggcagctttgttaccctaccccagactcatagaatcacagcttctagagaagagcttcagaatccatttgcagacctcggtcccagggcttctggtggtcccagctgcctttcggagatggtgacagggctgtcaagtggtgggtgttccttaaaatgcggttgttacataaaagatctgttatttaccactgtaggacttggctccctcatgtgttttgcctctttccacagatttcaaactcttctttgagtttctcttttgcaggtgccctcaggccgtgcaggagaatgcaaagtggtcaagtgggctgggttctgggacccttacttcttatttgaccagtgcagc

SEQ ID NO: 28405 - DNA, 532 bp, Homo sapiens
aaactaaatgacatatgctggcttcctttacctctgagattcaactagtgcataacaatctaaaggggaaagtaaatgaaatggtttgggtactgtttccgttagagaattaaggaggtcttgaagagccccagcctctcaggcaaatttgctgaaagatgccgaatgattccagggaaggagtcccactcattctctcccgcctgtgagctttgaataagagggcagagtgactttgtacgtaacctatctggtcctgaaattctataggcagaaaaaagaatgcgttggcatttgtgtgatagcctctggatttttctttccctgcctccaagtgcacagaaacaggactttcatttcttgagagttaatttgcttcagcagcttattctccatctaaagtcacaatcctctttggggaagcaattggttattgtgtaaaggattttgragttacatactaaggattatgtctctatttggtgagtaagaagcagtgtcaggagaactcttaagcaccaaatacccagtt

SEQ ID NO: 28406 - DNA, 1138 bp, Homo sapiens
acctggtatatttaaaagcccaatgacagtcctgtgagacatgtaatagtaataagatactaattgctgtttatcaaatgagccttgtgtgccagggactgtgataggatcagaaaggttaaacagtttacccggagtcataaaatagatgtttaaaatagttgcagagtaggtacacaaaggtatgtcttttgacttrtctagatggaccccataatgcagaagaacgagtcttggccatttgcatactgacacttgggctagcaggccagaaggttctacaataggcctggcctcaaatatatttcacttgtaataagcaccatatggggtcctgccttggagctgagtcatacaagagtgcctagagtgccttttaaaggcctacagccatccaactcttagggaagggagtccgcattggacttgggtgctctgggaagtggtctggttcctggatcaattgttgatgaggtatatatttcaatcatgttttcccacggactgtggggaaggcggtgagggtggctggagacagggttggttggggagaaggggctgctgttggttgaacattagttacacagagctgcgtgctataaattctggctcactgaatcctcacgaccactctgagacttatattattaatatgtattagaaagaggacagtccgtggggtgctctgcctcctggactcctccgtcaggaaggttgttggttcagggccagccactgcttggctaacgcctcagtgcttcagcgacaaggaccaggccgtgggcacaaataaggtcttaggtctctcctctgtgcacatccaggagagagattttagggatagttcctactggcttcatcactctagggtttaaatctgggctttgctgcctaccagctgtgtggcccttccagtgtgaacctgtccagacctgagttttagtatacccacagtggggaaaaaagacctacatcacagggttattgttaggcttaaaggacgagacagatgcaaagtactaagcatgtggcctggcacaggggaagtgctcaggaaatggtagtgactgttaagactgtgatacttggaggctgaaccttaacaggatattatcctgacctgtcagtttagctcttt

SEQ ID NO: 28407 - DNA, 1138 bp, Homo sapiens
acctggtatatttaaaagcccaatgacagtcctgtgagacatgtaatagtaataagatactaattgctgtttatcaaatgagccttgtgtgccagggactgtgataggatcagaaaggttaaacagtttacccggagtcataaaatagatgtttaaaatagttgcagagtaggtacacaaaggtatgtcttttgacttgtctagatggaccccataatgcagaagaacgagtcttggccatttgcatactgacacttgggctagcaggccagaaggttctacaataggcctggcctcaaatatatttcacttgtaataagcaccatatggggtcctgccttggagctgagtcatacaagagtgcctagagtgccttttaaaggcctacagccatccaactcttagggaagggagtccgcattggacttgggtgctctgggaagtggtctggttcctggatcaattgttgatgaggtatatatttcaatcatgttttcccacggactgtggggaaggcggtgagggtggctggagacagggttggttggggagaaggggctgctgttggttgaacattagttacacagagctgcgtgctataaattctggctcactgaatcctcacgaccactctgagacttatattattaatatgtattagaaagaggacagtccgtggggtgctctgcctcctggactcctccgtcaggaaggttgttggttcagggccagccactgcttggctaacgcctcagtgcttcagcgacaaggaccaggccgtgggcacaaataaggtcttaggtctctcctctgtgcacatccaggagagagattttagggatagttcctactggcttcatcactctagggtttaaatctgggctttgctgcctaccagctgtgtggcccttccagygtgaacctgtccagacctgagttttagtatacccacagtggggaaaaaagacctacatcacagggttattgttaggcttaaaggacgagacagatgcaaagtactaagcatgtggcctggcacaggggaagtgctcaggaaatggtagtgactgttaagactgtgatacttggaggctgaaccttaacaggatattatcctgacctgtcagtttagctcttt

SEQ ID NO: 28408 - DNA, 528 bp, Homo sapiens
gggtgtttcttcttccagagctgcagacaggtttcttgggyggggtcagaacctggacatgcctgggccaccaggaaccaagaagtttccaaccccagccccgtctggctccatcaggtgcaaggggcagggtgtccccatcactaaccaggtcaagaaaagagctgaggttgtcagttgtagaacacaaaacctacaacaaccccccccccacacacacacgcacatacatgtactcacacacactcacacacactcattcacactcacgctcacacacatttgtaaaatcacattcacacacacacacaccaagggcaggtgctggagcgctgtccagcccagagagcaactcacagaccagaccccttcccaagcagcctgtaccatggaggggctacagggaggagctccgctgggatctgccagagcccctcctggctgggccagatgccaagccctggcacctgggcaggccaaagggtgcatcccggggtgccaggcctggctcaaggcttctctggtgtc

SEQ ID NO: 28409 - DNA, 528 bp, Homo sapiens
gggtgtttcttcttccagagctgcagacaggtttcttgggtggggtcagaacctggacatgcctgggccaccaggaaccaagaagtttccaaccccagccccgtctggctccatcaggtgcaaggggcagggtgtccccatcactaaccaggtcaagaaaagagctgaggttgtcagttgtagaacacaaaacctacaacaaccccccccccacacacacacgcacatacatgtactcacacacactcacacacactcattcacactcacgctcacacacatttgtaaaatcacattcacacacacacacaccaagggcaggtgctggagcgctgtccagcmcagagagcaactcacagaccagaccccttcccaagcagcctgtaccatggaggggctacagggaggagctccgctgggatctgccagagcccctcctggctgggccagatgccaagccctggcacctgggcaggccaaagggtgcatcccggggtgccaggcctggctcaaggcttctctggtgtc

SEQ ID NO: 28410 - DNA, 526 bp, Homo sapiens
gcgctgacgcccgtgaccaaggaaatggtgcacgttactcgggcccgtttcaggcgtgaattacagttaggagctgcatgcacttaacacacaaacccatccagagaaaacaggaaatgagcatcaaacacacgcaagaaaccctgccggctggagccaggaaggtgggacaagatgaacttgaagctggcccaccccaaggctatggagcagatgaacatccttccgagcctccrctagcctggtgcatggcaacccaggagggcagcatggaggaggtgttctttgagccaatcctgaaggaaggaaggggcgtgaggaggtgagggatggaactgtgtatggagggaacaacggggcacccaaggcaacagcaaccactcagtgaggctgagagaggagactctttgcaggccgtggggagcagcacttggttttgtacaaggacagagagcgctcctttaagaacaaggcctggcacatcaatggtctcacaaccatcatcaggcaaagatgcatcctcagt

SEQ ID NO: 28411 - DNA, 1306 bp, Homo sapiens
tgctttgatattacaaagggaaaaacagctatggcgtctctgaaaagcacaacgtgctaggactggaatgactttaaaaccacacataaatttctgagagatttttgccataaggtaccatccaccttactgtaaaccacatcctaaaattgtctgcagtgcaaatggattatgtgcatccaacaggaaacagcataggttgagaagctgttacttaatagcttcattgtcaccacgagtgtaaagtgtggggtctcatcacttttgcacccacgttttgcctgttggtttctccacactgtcaggagcatttgaccaactcactgtggctcagggtcccttacgcagcctgttggggaaaccagtgggtattgaagacctgcctctggtgtgccaggaggttgtgcctgccggccactctgacttgcgatcttccgcctcagtgtatggcttcctacacctgggtaattaacattgccagcatgataaggaggtcctttcatcactaytgccactagtccttccgactcctgtgccctgtttctcctttattggaacccaagaacgagtaaacatagcattttcaaacatcccgcccccttccctggtaacaccaatattccaccatcctaattccctcacaagcattcagtctctccaccctgaggtggtgaaatccctgcaggcatttataagtatacctggacagaagaaatacaagataccgttctattaactcaatatagtgttgctaagttcgtacttttgcttggtttattttattttataaataggtatcactcgcatggttccaaatgcgataggcacagagagtatatatgatggaattacatcctccttccctgcactcagcaaccgagatcttcccgctacgggcactcaaaggtttcattgtctgaaatatcagcctaaacgtagtttatgtttaggaagcaacaaccgtaaataggcccacatccaaacggagtggatttaggtttcactttttcaaggaaaaaccatcaaagaatttttccacatacttataaaccatcccacgtatagaatccatttttactgacacaaatttagtaccaataaacgactcttcttctcaatttgttttatttcacaataagtcttgaacgtcattcccagttaacattttgaagagtttcctctctttcgttgtgttagagctgcagagtattcttccgtaaggatgaacgtactataatttattagccagccacttagtgatgtacaattaagcagttttaaatctttgactcttggaaatattgtt

SEQ ID NO: 28412 - DNA, 1131 bp, Homo sapiens
atcctgaaattatgaaagaaactaataatttggacatacatcatgctatcaaaaaatgtaatgtgtgtgcaaaaagtctaaatcgagaagggccataaaaatagaaatgtgagtgccagaaacagtgcggtaactatttggrgaaacataatggagtctagtttcactattatgggtaaaggacgcagctgtgaattgattcccaaggccaccacatttctttttatttctttttttgagatggagactcgctctgttgcccaggctggagtgcagtggcgcgatctcggctcactgcaacctccgcctcccgggttcacaccattctcctgcctcagcctcccgagtagctgggaccacaggcgcccgccaccatgcccggctaatttttctgtatttttagtacagacagggtttcactgtgttagccaggatggtctcaatcttctgacctcgtgatccgccgcctcggcctcccaaagtgctgggattacaggcgtgagccaccgtgcccggccggccaccatatttcttattaaacataggccatcagattaatctctttccactattgccaaagatctcctacatggagcataaatctttggagaatgaaaactgagccagcttctgctttaccagccactgtctgactaaggattgggaatccaagaccgtgatcccatttttcttcatctcagtagggacaagggctacccattgccacacagacagccctccagtgatcagcaatggaagatgaacagggggctctagaggcagaaaaaggtgaacccagtgcttttgaagatgctagaaaaataggacaaatgttaacaaaatagaaaactctcctttaaactctttaaaaaacaactcctggaaaatctatactttcatatctacaaagagtatggaacacacacaatgccgctgaagagtctgaccttttctcagcactaaaaaggtgacatctcactcttctaaattctcatagcattttgtgtctgcctctcaatgacacagatccttgtctccctgaattaaggtttgtacttttacaatgggctctttccccatatctactctgtaagctctgtgaagaaaaaatctgggcccagctcacttttg

SEQ ID NO: 28413 - DNA, 1131 bp, Homo sapiens
atcctgaaattatgaaagaaactaataatttggacatacatcatgctatcaaaaaatgtaatgtgtgtgcaaaaagtctaaatcgagaagggccataaaaatagaaatgtgagtgccagaaacagtgcggtaactatttggagaaacataatggagtctagtttcactattatgggtaaaggacgcagctgtgaattgattcccaaggccaccacatttctttttatttctttttttgagatggagactcgctctgttgcccaggctggagtgcagtggcgcgatctcggctcactgcaacctccgcctcccgggttcacaccattctcctgcctcagcctcccgagtagstgggaccacaggcgcccgccaccatgcccggctaatttttctgtatttttagtacagacagggtttcactgtgttagccaggatggtctcaatcttctgacctcgtgatccgccgcctcggcctcccaaagtgctgggattacaggcgtgagccaccgtgcccggccggccaccatatttcttattaaacataggccatcagattaatctctttccactattgccaaagatctcctacatggagcataaatctttggagaatgaaaactgagccagcttctgctttaccagccactgtctgactaaggattgggaatccaagaccgtgatcccatttttcttcatctcagtagggacaagggctacccattgccacacagacagccctccagtgatcagcaatggaagatgaacagggggctctagaggcagaaaaaggtgaacccagtgcttttgaagatgctagaaaaataggacaaatgttaacaaaatagaaaactctcctttaaactctttaaaaaacaactcctggaaaatctatactttcatatctacaaagagtatggaacacacacaatgccgctgaagagtctgaccttttctcagcactaaaaaggtgacatctcactcttctaaattctcatagcattttgtgtctgcctctcaatgacacagatccttgtctccctgaattaaggtttgtacttttacaatgggctctttccccatatctactctgtaagctctgtgaagaaaaaatctgggcccagctcacttttg

SEQ ID NO: 28414 - DNA, 1131 bp, Homo sapiens
atcctgaaattatgaaagaaactaataatttggacatacatcatgctatcaaaaaatgtaatgtgtgtgcaaaaagtctaaatcgagaagggccataaaaatagaaatgtgagtgccagaaacagtgcggtaactatttggagaaacataatggagtctagtttcactattatgggtaaaggacgcagctgtgaattgattcccaaggccaccacatttctttttatttctttttttgagatggagactcgctctgttgcccaggctggagtgcagtggcgcgatctcggctcactgcaacctccgcctcccgggttcacaccattctcctgcctcagcctcccgagtagctgggaccacaggcgcccgccaccatgcccggctaatttttctgtatttttagtacagacagggtttcactgtgttagccaggatggtctcaatcttctgacctcgtgatccgccgcctcggcctcccaaagtgctgggattacaggcgtgagccaccgtgcccggccggccaccatatttcttattaaacataggccatcagattaatctctttccactattgccaaagatctcctacatggagcataaatctttggagaatgaaaactgagccagcttctgctttaccagccactgtctgactaaggattgggaatccaagaccgtgatcccatttttcttcatctcagtagggacaagggctacccattgccacacagacagccctccagtgatcagcaatggaagatgaacagggggctctagaggcagaaaaaggtgaacccagtgcttttgaagatgctagaaaaataggacaaatgttaacaaaatagaaaactctcctttaaactctttaaaaaacaactcctggaaaatctatastttcatatctacaaagagtatggaacacacacaatgccgctgaagagtctgaccttttctcagcactaaaaaggtgacatctcactcttctaaattctcatagcattttgtgtctgcctctcaatgacacagatccttgtctccctgaattaaggtttgtacttttacaatgggctctttccccatatctactctgtaagctctgtgaagaaaaaatctgggcccagctcacttttg

SEQ ID NO: 28415 - DNA, 668 bp, Homo sapiens
ctttgggtggtacttcagtaaagtaggtagaaattttaaaatgctgtgcaaggcagggatcatgtaggaagacaatatcaayttcgccttgctgggggcaactaaatgtatatttttctagaattctaatttattgcctcatatatcagaaaatactacaaacataaatgacatatgctagatttcagtattatacaacagagaatgtcaataaattcaaaactaatcatcccattggccacactgttttacaagtcaaaccctactggtctaattttaaacaattacaacaaaacaaataatgcttttccattcctcaaagaactacaatattgctaaaggtgtaaagcacaaaggtcacaattgttaagactcctcatgtcccatctcaatgtggagattcacttttcctagtacctcagaagactgctatttattcatccattaacatatgttttattatgttaaacatatgagacaggatttacattttgatagttactggagtgcctaatgcaaatacatgcttatattcatcaaaaagccatacaatatgttatatctattggaatacgcgtgagtacaagacaacctgcaatatagattgtcaatatggttgcatataaaatgctatgtctcttttactgacttcattaatctcagaatta

SEQ ID NO: 28416 - DNA, 615 bp, Homo sapiens
gcccatttcttggaccagtcagtttccagagatctatggatctgtgatcgatggatctgtcatctatgattggcctggctgggcctttaactgtctctaaggaggggaggcaggatgtgggctgtgattagtaatcctttctgaacctcatggcctggggagtgcaaagagctcagtttcctaaatgaagggtaaaggtggtactatacacagaggaggaagggatgactagggaataaaaacagcatgtgttgatcacagtagatattattaatcctaccttacaaaggaagaaactaagtgtcagagagaatctaaacaaccctagcagattagcatgtggcagactgggcactcaacagcccttcaccatgaccactaagctacaacgcttcccagggacgcaggcctctgcaagcacctccrgcaaccccaggcctcaaatccaacaggtttaaactcataattccatcccaaacaggacaattctcaaagctcaggcactgaggcccctggaaggccccagagcttacaaacctaatcataatgatagatttaatttgaaggtccctttttcccagaccacagtgaactgagcatgctgtccgtggcaat

SEQ ID NO: 28417 - DNA, 615 bp, Homo sapiens
gcccatttcttggaccagtcagtttccagagatctatggatctgtgatcgatggatctgtcatctatgattggcctggctgggcctttaactgtctctaaggaggggaggcaggatgtgggctgtgattagtaatcctttctgaacctcatggcctggggagtgcaaagagctcagtttcctaaatgaagggtaaaggtggtactatacacagaggaggaagggatgactagggaataaaaacagcatgtgttgatcacagtagatattattaatcctaccttacaaaggaagaaactaagtgtcagagagaatctaaacaaccctagcagattagcatgtggcagactgggcactcaacagcccttcaccatgaccactaagctacaacgcttcccagggacgcaggcctctgcaagcacctccggcaaccccaggcctcaaatccaacaggtttaaactcataattccatcccaaacaggacaattctcaaagctcaggcactgaggcccctggaaggccccagagcttacaaacctaatcataatgatagatytaatttgaaggtccctttttcccagaccacagtgaactgagcatgctgtccgtggcaat

SEQ ID NO: 28418 - DNA, 834 bp, Homo sapiens
gcccgcctcggcctgccaaaatgctgggattacaggcttgagccaccgcgcccggcctctgatttacttatctatacatctccattcatttaattcttgattctcctaatcatgcgacgaggctaaagtcgcttttttatcactcaaccctgcacccggtagactcaggagccccaaactgaacccttgactctttcctccactaatgtgagcaataagccgggcggtggttcctgtctgggcttaggatatggtgtctccgttctctcgtggacaggtctttttttttttttttttttttttttttctaattttttttggtcacagttatatgtgtacctgccttttaaacatacgtttattttattgtaaaaaaatgccattttaaacatttttaaacaatagttaaaaraaaaagctttattcaaatgctcgcagaccatacaattcacctactaaaagtgtgcggttggccgggagcgatggctcacagctgtaatcccagcgctttgggaggcggaggtgggaggatcttttgaacccaggagttgaggccggtctgggtaacataaattcagtaaaatgtttaaaagtgtgcaatttaatggtttttggtatattgcgttatttttaaaatattgtccaaaatgtatataacaaactgacattttaaccatttttaagtacaattcaatagcattaattacattcacaatgtaaccatcaccactgtttccagaacttttcatcaccccagataaactctaaccgtgaggcactgactccccatttcacctttccccccagcctcggcaccttctattccactttctg

SEQ ID NO: 28419 - DNA, 1038 bp, Homo sapiens
ggctgaagctagacttcagttggactcatcttcacctaactccttcccctgccctatccatccctccctccattataggtttttcctgagagtgctcccaccattaatcaggggcagtgaatttgctgtctcaggttctgcttctaagatgcccagccaaagacagcccttcagtaggacacaatgatggcttgacccagaggaagacacatgaccccaacatagctacagccttctggagcattgatatggactctgggaagaagcaggtatgtctctttctaaggttatgagctacatgtaagaaaattgtggtaggtgtatgttaattttactctctaacatgtatttcacccctgataacactacacccattgtgcaggaaaggggagggagctaccttcctctcattctcagttcctctactttgagtggaggtgaattctctttgagcccatagttaggcatgtaacccgcatctgattagtcatgttcccgtgaccacagagactgtttggcatagccctgcgtcccaatgagagccattgaaatatgggattgttaagagagagaaaaactctttttccctggactaagagcatcaaggatgagaagaacctagggccgctggaaggtagcatgagggactgttctgagaatgaagccaacaaacacagcagcaggcaggctcctaatggagggagtgaaataagcccaagtsgttgacattgctggagctcttagcttaagctcccctacaagccaaccctatcctagattacacctctttgattatacaggctagtaagttctcttattttgtttgtttaagctaatttacaatgaattttgtaacactcacaacccaaacagttctgatagacggcaatgatggcaagtctgaagctgctggaaaatacattactgccatgtggagagactctgggtgacaataaagcctactcataaaaaggaaagaattagaaccaagagaggaagagagagcaagcaatagctgtgagcagtgtccaagaacaa

SEQ ID NO: 28420 - DNA, 1038 bp, Homo sapiens
ggctgaagctagacttcagttggactcatcttcacctaactccttcccctgccctatccatccctccctccattataggtttttcctgagagtgctcccaccattaatcaggggcagtgaatttgctgtctcaggttctgcttctaagatgcccagccaaagacagcccttcagtaggacacaatgatggcttgacccagaggaagacacatgaccccaacatagctacagccttctggagcattgatatggactctgggaagaagcaggtatgtctctttctaaggttatgagctacatgtaagaaaattgtggtaggtgtatgttaattttactctctaacatgtatttcacccctgataacactacacccattgtgcaggaaaggggagggagctaccttcctctcattctcagttcctctactttgagtggaggtgaattctctttgagcccatagttaggcatgtaacccgcatctgattagtcatgttcccgtgaccacagagactgtttggcatagccctgcgtcccaatgagagccattgaaatatgggattgttaagagagagaaaaactctttttccctggactaagagcatcaaggatgagaagaacctagggccgctggaaggtagcatgagggactgttctgagaatgaagccaacaaacacagcagcaggcaggctcctaatggagggagtgaaataagcccaagtggttgacattgctggagctcttagcttaagctcccctacaagccaaccctatcctagattacacctctttgattatacaggctagtaagttctcttattttgtttgtttaagctaatttacaatgaattttrtaacactcacaacccaaacagttctgatagacggcaatgatggcaagtctgaagctgctggaaaatacattactgccatgtggagagactctgggtgacaataaagcctactcataaaaaggaaagaattagaaccaagagaggaagagagagcaagcaatagctgtgagcagtgtccaagaacaa

SEQ ID NO: 28421 - DNA, 2969 bp, Homo sapiens
tttgtgtgtgtgaggaccttcttggaccagaaacaagaaaaggtgctgtgctggcagttcagcttcttaagctgcccgttcttagtctacccaattaatatcttttggagacaaacttgctctaagtggcatgctatggggaaatgatgtcagaaaatgcagattttagatattgcattctatatgtcacagtttcagttgagaagaaattttgaaattttatagaaatggaaaaaaatgaataatcctgtacaaacacttgagacccaccaccaccaccaccaccactccaccagtgttccaggaaagaaaaattcaattttgtggcattattctttaagaagtaactttctggccaactgaatggattatgacaatgactcatatgttttgtctttttgacctttaaaattagagccttgagtttctgataaataagtggtgaatttcagagggattgtctaaacttcccagcaatgttgagtccccacggcttcctctgctcttgtgaccactgagagccctctgaagggtgcaactggctgaggacaaaactgcccatgctgctgcttctgtatgtgcaactctctctcgcctgtcccctttgccctgcatggtgaggccagagccctcattctgttctctgccctgggtaacaggagactaagcccaaagcctaacccactcagcctgtctcctgtacacactcactgtggcgtgagggcccccgagctgcaggatctccctccccggccacgcgcagagggaagagttctctagagaagagcgtccttgccttaatctatatacagggactcgccccaggacactgcctctcctcagcttcctgcccatgggccttggctagaccctccaaaacacagtccctgtggctggggaagcccgcatttccaggatcctcttcccaaactctcggacctttgtgcaggtgcccacaaggcaccagactttttcaagtgtttttccattcacagacaggccccaccagccccagagatagatggagcacggaatcaagcagggtgccctgggggtttattaatcaaaatagcagatgctgggcgatactaccttctcctggccgctcctgtagatactagtcgagttcctcctccagaccttactaacaaaatcacaccccaaacatgttgtacttgaaaacacacagggccatttttttgtctaatatttcaccttctcatcatctttttagctttaaaaaaaaatcatggccaggcgtggtggctcacgcctgtaatcccagcactttgggagaccaaggcaggcggatcacctgaggtcaggagttcaagaccagcctgatcaacatggaaaaacctcatctctactaaaaatacaacattagccaggcatggcggcatatgcctgtaatcccagctactcgggaggctgaggcaagagaatctcttgaacccgggaggcggaggttgcagtgagccaagatcacgccattgcactccagcctgggcaacaagagcgaaactccatctcaaaaaaaaaaaaaaaattcacaaagggtttttaaaccccaactttgatcagacatatattacttttctaatcaatagtaccctaccttgaaaggttttcagtttctcttccctgagggataaatgcctcacgctcatatttctaaataaaggaaactcaacatcctaatccatcagtgttctaagaactcaagattaagataataaagcttttgttcctgttaaagttaacctatttgaatagaaacaaaaatcctggacatccattgcaaaatgttagtgggaagggttcrgtgccaagtctcttgcagccaaggtcaagttgtctcttttgcctccataatgagcatgtaatcctgttatgcctacagcttttgagagccatccccgttggaattggccaagtgtacggctgtgataacccctggactggaggcatcttcctcatagctctgttcatatcctcacctctcatttgcttgcatgcagcaattggatccaccatggggatgctagcaggtctgtgtcctcacttccctgggctgtgagggggttagagcctggggccagctccaaataaaatggtgactctcatcttcaacactccacctgctgattcctgtgaactttccctccttctgttgtaccctgtttctccgtttttgatctagcccctttatcctcccctgagccacagctgccctcaagaaaggctttggtgttagtcattcacaccttagtataaatttaaagtttgggggaagtttcttccaggtatatttacatgttaagtgatctgcaatgacagcaagaaagattcgttctccattagagaattaaggtatcgatgaaggaggagaggttctctttcttggcaggggaaggatattctctggactgtttaaatcagacttctgtccttactcaaagaatctcttcaacccatgccagcttaactgctagtattcatgggactctatggccatttgtttcctttagatgttttttcacagaataaagccagaagtcctttttgtataactacctaagaagataactggctccgggctttgaggactgtggtaggtttcagggccagcagatgggccccataagaccctagacccaaccctgatgcctgccttctgtcacagcactcactattgcgacgccctttgactccatctacttcggcctgtgtggcttcaacagcaccctcgcatgcatagcgataggaggcatgttctacgtcatcacctggcagacgcacctcctcgccatcgcctgcggtaggtactccccacagaggatttgtttcctttataaaaggctttttacataaaactgtttttttatgttttttaatggttatttagtaattaatagattaaacactattttcactgaatactcaacgttcagtcacatgaagacggt

SEQ ID NO: 28422 - DNA, 523 bp, Homo sapiens
aaacatgacagttcattaagtgtgaccattcatgttgccccaaacccagcataggtttgaacaggtattattgagacaaatacacaggctcaaaacaaagagctgtctcttgttaagaatggtcaaacagaaaatgacaaagtgcagagaaatccctcctgtataaaatctaaaaatgattgataaaatatttaaaacayctctttatagtagcaaggccagaaaccctgaaaatacataaaattttcagagcaataatcaagcactagactcattgttggctctgacggcatcagtccatacctaataagctggattctgagttttgctatatcatacacagacacacacacacacacacacacacacggcaaaaaggaaacaaaatccagatcccatgcaagatggaaggtctgatcagagaccctggcatagagtcaggaatacctaagggtgatacccacaatgataaaccagggaaagacatggcccacagaagagcaaaagggcacctatcttggcc

SEQ ID NO: 28423 - DNA, 585 bp, Homo sapiens
tgcttctccacatagtagggaattaaataatgctggtgaaagtaaatgataatttgaatttgatttcagtttttcaagccacttctttcagacttatttcctttgctagttctagcaacctgaaggttaagcaaatctttttttttttcaaaaaggtgtgtttgtgggggatatattcttatctaactttcaggtacatgccccaaataatagtaacagcttaaacttytatggggtttactctgttgttagtttaacaatcataacacattgaagacctgtagcacagaaaggttaagaaacttgcccaagatcacacaacaaaagatgacacaaccaggaggaaaatccagccaatctggccctagagcccatgtttccaatcactacatgatactgtctctcattctatgatgatatcaatttgcaaagctgtaggaatttcacacatggctgccagaggcaactgtttttttacgttaaataacagaagccaacttaagatattttttatgtataatgattttgagtatctaccatttactgatttcttcagagtaggcctggttcctgcatattccatct

SEQ ID NO: 28424 - DNA, 426 bp, Homo sapiens
ccatggggatgagtgcatggtccaagaataacacagtgggtctgtggtgaatgggaaggcacagacaggtcctgcccgaacactttctaaaacaccatgtgggcttaaaacataagyctgtcagaagggagccccacgaggacccggatctttgtgtctgtccaattcgtcgtgtcgtcccggacatgttgtaggcctcaagaattatttgttgtcatgaagtcggtctggggcctcgctttctatttgtgtctgtagtttgtaaactttatgccaaataaagctgtattttttttttcgtctacctgttctgacaaggacaaaaagaagtgtattcctgtgagattctagcagccagatggtattttaattcacagtaaagttcatgatttgtgttgtgtctggatactatgtgtcatccatagt

SEQ ID NO: 28425 - DNA, 426 bp, Homo sapiens
ccatggggatgagtgcatggtccaagaataacacagtgggtctgtggtgaatgggaaggcacagacaggtcctgcccgaacactttctaaaacaccatgtgggcttaaaacataagtctgtcagaagggagccccacgaggacccggatctttgtgtctgtccrattcgtcgtgtcgtcccggacatgttgtaggcctcaagaattatttgttgtcatgaagtcggtctggggcctcgctttctatttgtgtctgtagtttgtaaactttatgccaaataaagctgtattttttttttcgtctacctgttctgacaaggacaaaaagaagtgtattcctgtgagattctagcagccagatggtattttaattcacagtaaagttcatgatttgtgttgtgtctggatactatgtgtcatccatagt

SEQ ID NO: 28426 - DNA, 761 bp, Homo sapiens
ggttttctattattcttatgtgaatcagcacagcagagtgtttctattcatcttgaaacctgttcctaattcctattctgccaagaccatagagatgttttcaaatagtaagcccctttgcatacgttgtttatagataaacaacaataatcaaacttaatttatagtgaattatcattgatcatagtaattgcattgtgcaattagcagtggtttctacctttgctggaaaccacaaaacattttaaatcacaaagatattcacacttttttgaatgttcattcgtttggtggagtagkttgttgatataaatttgaggtcaaatgctggcctctacataaatgtgaacgttttggtttgttagttgtcactttttaaatctgtagctaatacaaaatcttagttatttggggaggagatctgctgctaagaaatgccaggaaaagctttctgagcctctagtgtatttttgttgtggtaaatgtgagccataagccaagactctggtggcaaatagttattccattgttttatctaactgtacacaatttcatgaggcttattcttttatttataaatgaggaaatcagaattcagaaagattaaataagttaactgaggctactagtgaatggaagtcaagatttaaactaattatgtttaactttaaagaccataattgtctcattaagccaaattagatctaggaatgctgcctttccaaacttctatcaaaaaatggaggcattggctgggattt

SEQ ID NO: 28427 - DNA, 761 bp, Homo sapiens
ggttttctattattcttatgtgaatcagcacagcagagtgtttctattcatcttgaaacctgttcctaattcctattctgccaagaccatagagatgttttcaaatagtaagcccctttgcatacgttgtttatagataaacaacaataatcaaacttaatttatagtgaattatcattgatcatagtaattgcattgtgcaattagcagtggtttctacctttgctggaaaccacaaaacattttaaatcacaaagatattcacacttttttgaatgttcattcgtttggtggagtagtttgttgatataaatttgaggtcaaatgctggcctctacataaatgtgaacgttttggtttgttagttgtcactttttaartctgtagctaatacaaaatcttagttatttggggaggagatctgctgctaagaaatgccaggaaaagctttctgagcctctagtgtatttttgttgtggtaaatgtgagccataagccaagactctggtggcaaatagttattccattgttttatctaactgtacacaatttcatgaggcttattcttttatttataaatgaggaaatcagaattcagaaagattaaataagttaactgaggctactagtgaatggaagtcaagatttaaactaattatgtttaactttaaagaccataattgtctcattaagccaaattagatctaggaatgctgcctttccaaacttctatcaaaaaatggaggcattggctgggattt

SEQ ID NO: 28428 - DNA, 761 bp, Homo sapiens
ggttttctattattcttatgtgaatcagcacagcagagtgtttctattcatcttgaaacctgttcctaattcctattctgccaagaccatagagatgttttcaaatagtaagcccctttgcatacgttgtttatagataaacaacaataatcaaacttaatttatagtgaattatcattgatcatagtaattgcattgtgcaattagcagtggtttctacctttgctggaaaccacaaaacattttaaatcacaaagatattcacacttttttgaatgttcattcgtttggtggagtagtttgttgatataaatttgaggtcaaatgctggcctctacataaatgtgaacgttttggtttgttagttgtcactttttaaatctgtagctaatacaaaatcttagttatttggggaggagatctgctgctaagaaatgccaggaaaagctttctgagcctctastgtatttttgttgtggtaaatgtgagccataagccaagactctggtggcaaatagttattccattgttttatctaactgtacacaatttcatgaggcttattcttttatttataaatgaggaaatcagaattcagaaagattaaataagttaactgaggctactagtgaatggaagtcaagatttaaactaattatgtttaactttaaagaccataattgtctcattaagccaaattagatctaggaatgctgcctttccaaacttctatcaaaaaatggaggcattggctgggattt

SEQ ID NO: 28429 - DNA, 761 bp, Homo sapiens
ggttttctattattcttatgtgaatcagcacagcagagtgtttctattcatcttgaaacctgttcctaattcctattctgccaagaccatagagatgttttcaaatagtaagcccctttgcatacgttgtttatagataaacaacaataatcaaacttaatttatagtgaattatcattgatcatagtaattgcattgtgcaattagcagtggtttctacctttgctggaaaccacaaaacattttaaatcacaaagatattcacacttttttgaatgttcattcgtttggtggagtagtttgttgatataaatttgaggtcaaatgctggcctctacataaatgtgaacgttttggtttgttagttgtcactttttaaatctgtagctaatacaaaatcttagttatttggggaggagatctgctgctaagaaatgccaggaaaagctttctgagcctctagtgtatttttgttgtggtaaatgtgagccataagccaagactctggtggcaaatagttatkccattgttttatctaactgtacacaatttcatgaggcttattcttttatttataaatgaggaaatcagaattcagaaagattaaataagttaactgaggctactagtgaatggaagtcaagatttaaactaattatgtttaactttaaagaccataattgtctcattaagccaaattagatctaggaatgctgcctttccaaacttctatcaaaaaatggaggcattggctgggattt

SEQ ID NO: 28430 - DNA, 507 bp, Homo sapiens
acagcaaatgcataaaaaccaaaacatgtacatcttttcactaaaaacaaaatactattaatagaaagttcaaaatacatgaaagaayacatcataattatgaattacaagagtaagtttacaagaatgtcaattctccaaaaatttataaatgtatatatgtgtgtatattaataattgtatataggccaggagcagtggctcacacctgtaatcccagcactttgggaggctgagaccagtggatcacttgaggtcaggagtttgagaccaccctggccaacatggcgaaaacccatatctaataaaaatacaaaaattatccaggtatggtggcacacccctgtaatccaagctacttggaaggcttcagaattgcttgagaaggcagtggttgcagtgtgctgagatggcaccactgcactccagcctgtgtgacagaatgagactccagctcaaaataataataataataatagtaatattaataataataaattgtataca

SEQ ID NO: 28431 - DNA, 543 bp, Homo sapiens
tatggggggtgatttcagaagcaggagagtttgaaaatgcatactgactcttgtccattatttggagctgtggcamatatctaaatcttttgaagactgagtgtttctcccaaaaaaagggctcttcctttgaaactaaacctccttaacacaactggtcttcaacatattctttctcctttttttgccagtagaaatgaatatgcctcacaataattcagtttggaacctgaaaatctaagtctctaattcaagtgcaggttacacagatagtggaagacagtacccttgattaaatcccggctccatcacttcttatagtgtgacttagaggaagttacttatttttcccagtgtatttttttaattgagggaaaacacacatagcataacctttaccatcttatgccatcttagccatgtttaagtatacaatttagttgtattaagtataattaaaatgttgtacagtcacgttaccaacatccatttctataactcttttaatcttgtaaaactgaaactgtattcctattaacaaaa

SEQ ID NO: 28432 - DNA, 545 bp, Homo sapiens
aggaattataagtccaattaaaacttttttttaataaattgcccagtcttgcatttgtctttattagcagcatgaaaacagaataatacacaaatgtacagctgtcaggttagggtaatattccccatcattttgtccccattacccagcatggtggcaggcccaacagagctataaatgtcaacttactattcatgaataaggaaaaaargaagtcaattgaaattcaagagaccagctttataggaagaacctcaccttttgcttttgctgcttatttttcttttgcaccagaacatctaagaacaaaaatttaatgggcactgtagcaggagggaatggcagttgtgaagtctctactagagattcagactttcttttgtcacaggtacagagccaaggccactttgaacaatagttattattaatcctgaatccaaggcctttaaattttctacaaatatatttgaaacttgaccaactgatcagtaggattgattccaaaataattgaagagaaaagctgctccagtaatcagtgtattg

SEQ ID NO: 28433 - DNA, 545 bp, Homo sapiens
aggaattataagtccaattaaaacttttttttaataaattgcccagtcttgcatttgtctttattagcagcatgaaaacagaataatacacaaatgtacagctgtcaggttagggtaatattccccatcattttgtccccattacccagcatggtggcaggcccaacagagctataaatgtcaacttactattcatgaataaggaaaaaaggaagtcaattgaaattcaagagaccagctttataggaagaacctcaccttttgcttttgctgcttatttttcttttgcaccagaacatctaagaacaaaaatttaatgggcactgtagcaggagggaatggcagttgtgaagtctctactagagattcagactttcttttgtcacaggtacagagccaaggccacttygaacaatagttattattaatcctgaatccaaggcctttaaattttctacaaatatatttgaaacttgaccaactgatcagtaggattgattccaaaataattgaagagaaaagctgctccagtaatcagtgtattg

SEQ ID NO: 28434 - DNA, 1305 bp, Homo sapiens
tggcagcagtaaaataatggcagtagtaaaatcttcttggcattcttaaatttcagcatatttgaaattcttctttttattcttacttaaaagcaatccttgctatgtagcattacttgttgagtcagctttgctaatgtttacagtcaaagcaaatatataaaggtaaaaatgcagttacatatgcctacataaatacagacatacataactatatataaaaatattatagttctctctctctgtgtgtatatatatatatatacacatatatatatacacatatatatatacacatatatatatatacacatatatatatatatatacacacacacacacacacacacacasacacacacacacacacagtccaggcaaatgtgtaaaagcaaagttatatacacctatataaatatagacgtatataactatacataactatatatatatatagagagagagagagagggagagggggagggagagggggaggggtgggagagagagagagagagagggaagtatcaaaatgatgagggagtcaggatggaagagtcctcttccatatcagcagagagagagtggagtgattaccactttggcaaatgtgtaccctaggtagaaaaggggaagacagacaccctcaggaaaacatcttgagccaaagcaatagattgaaacttaatcctttacttctgctgatgtaacctctttgagatatacaaggaaatcttacaacataaggtcataggcttcggatcaagtaattttctgctttaagtgagtaaatttctgattcaagcagacagaaagtctatttctcttttagctattgctatttcatctcaaaagatgagaaatagaaaaacctataaaatagatgatatcttcaggtttcatctttcagagacaaaaatttcttggtgatgttacctctaaaaaccacaatacttatttctccattatatgacatcattatatatggctttatacaacagtcagtgcccagtgtaaactctatgccatacagctaatgtcaaactgacaaaagagtcctacttacacatgagtcattctgcatattgaggtcttctaccacaggtactgttattgccatgcagactgaattacagtatatgctcaagaatgtacctcatcctgtcacttttgacaaagagcctcaattatgttgtacaaatgagagtcctgcaattttaagccttttaaaagaattatgccttccactgtgagaagaaatcaattactaggcaggtaagtgctcaggtgctctggcttcaatcc

SEQ ID NO: 28435 - DNA, 536 bp, Homo sapiens
tccatgttggtcaggctggtctcgaactcccgacctcaggtgatccgcctgtctcagcctcccaaagtgctgggattacaggtgtgagccaccatgcccagcctggatcaaggtcttgtagctagtaggtggcagtgctgggatttacccccaggcagcctgatcccgggacttgtgcctttacctcctcccagttgaattcttattcatattcatcttcctggctgttagggagagaatgtggcatgactcaactcccatgataacggatgtctgctgaccccagtttcatgggaggttgttttttttttttttttkgaagccgagtcttgctctgtcacccaggctggagtgcagtggcacgatctcggctccctgcaacctctgtgtggcaggtatttttatacctatttaagatcaacgtgtctcctcttctgtaatctgttgtctgcagctgtcttctcttattggtggtatgactgcccatcagcaagcactccagacttttccctttttttggacaggtccgaactcca

SEQ ID NO: 28436 - DNA, 733 bp, Homo sapiens
tgggtggagacccttgagttttgagcctccaaaacatctgcatttaggtgaatgcggtggttgggcacttgctttatatttgcataaaaatgaggcattcctatagttctcataaacaaagaaacacctttatccaaagggaagagggaagaatgaggtcagattctggaactgacctggattctggtgttcctgagttaatatttatttagcctgagaggtgactgtgcattcacaatgatttatctccaagacatgtactgtaagccctcacttatcatcatcwataggttcttggaaactgtaactttaagtgaaatgatgtataacgaaactaactttgccataatctaattgatataaacaagagttaagggccagcatggtggctcatgtctgtaatcccagaacttgggaggctgaggcagggggactgcttgaggccaggagtttgagaccagcctgaccaacatggtgagactctatttctacaaaattaaaaaaaaattagcccaggagtagtggcccacatctgtcatcccggttacttgggagcttcaggtgggaggaacacttgagcccaggagtttgagattacagtgagctatgattgcaccactgcaccccagcctgggtagcagagcaagaccttgtctctgaaaaaaattaaaaaaaaaaaaagagttaagtttttattgtatattactgttttcttttttcgggggtcagaaaa

SEQ ID NO: 28437 - DNA, 417 bp, Homo sapiens
tgcctactagacaattacaaaaatgcctttcatgtcaggcgtggtggctcgtgactgtaattccagcactttgggaggcagaggcaggtggatcacctgaagtcaggagtttgagaccagcctggccaacgtggtgaaacctcatctctactaaaaatacaaaaattagccgggcgtggtggcacgagcctgtaatcccggctactcaggaggctgaagcaggagactcgtttgaacccaggaggcagaggttgcagtaacccaagtttgcgycactgcactttagtgtggcaacagagcgagactccgtctaaaaaaacaacaacaacaacaacaaaaaatgcatttcatacgtgatttgaagaagcacatctattgtcactcaaaatcaattgtactactacttattaagaatct

SEQ ID NO: 28438 - DNA, 1560 bp, Homo sapiens
tgcaagtagagatatttgggtagcagacaggtatgtctgagctcaggtgagagatgtgtgcagtggaatcgttagcatgtatgttaggatttcttttcctggagcctgtggatgtttcaaggtatccatgagctccttggaattgtataaaaattctgagattgtgtgatatgtacttttttctagggtgagggtctgtagatatcgtcttatttttaagggacctgtgtcttcccaaaatgagaaacctctaatatgccatattttgtctaatctaagttacatcattattttatgtaccagaaggtacataatgctttcaattaagaacatttaccagaagtataaacacttccaattaatctactatccactgctttaacattattcctgtgtgacacgtggaatagtcacaccagactctactgttgctttgaagtttcttccaaaggaattggcagattcttctgacctcaggtgtgttttctggggtattttttggcaaccagtttgtggtaacagaatgtaacatagcttcatttacttggggttcttggatccataaagtaattggctgtttctttgcaagaaaatatggaagtgtgatcatctcaccaatgatttctattttctttacagtatcaaaatttatccctatttctgtgcctttctacagagacatagtgtaatctttttaaaagacattctaaatctcacacagcaattgactaaattaatttaaaatattttatctaacaaaacccttagctcagctatagtgatgaaayaggaacagctatgcccttggtcccttccattccggcagtggaaactacattgcagctgccatgtgggagccatcctgatttcagagataataaggtgaaccatttttaaaacatgtttcttagaactgatggaattgaagctctgggaacaagtgggacagccaggatgagaatgcaagagagaagagcacaagagtgaagatgggacttgggggacaccaacatgtaaggggctgagaggaagaggaagctgaagggttccctgagaagaagggaaaatccaggctaatgaggcttcaaggcgggagaaggagggcaagggttgtaagatgtgtgctgggctgggcatgcccattggaactggccatactgggtaacagcagcttccatggcgtgctggaacttccgggaagtggagccagcttatgcattcctccctgtcaaaaggtttatccttgaagagggggaagcagggaggctgaaatcaaagaagacacatggaggttgtagcttggatgacaccattatctaaaagggggacacagaaggaggaacagatttggaggagacagtaataattttggtgttgagtatgtagaattgtaggtcttcataggaaatccaggtagacatatacataagaggttgaaaatatgggtcttaaattcaagagataccactgcatgaggaggattaaagagcatcagtacattggtggctcctaaacccataggaataggaaagaaaacccaggagagtgtttagagaatag

SEQ ID NO: 28439 - DNA, 1278 bp, Homo sapiens
agcagagagtgattctttcatcaacgcttgaatgtgaactacattcaaattctgaattgaatgtagctaacttggaaaaataaatggctcaggagttaaacttggtaaaatagcataaccttttaatggttgaatttaaactttaaccagagatccaagcatcttcagatgactcttatttgcctaagcagaaagcccaagtcagcactaataaatcactaactataaagcacaatcttctctttctcagtatcatcatttttgagacaataagtcactggaagccatcccagagtcataaaattagggaaataacttatgacaagagagaaagatcgcattaactttacaaatgtcaaatttcaagagttggaacctaaaagaactgctggtattaatacaagtgttttcaaacatcagaataaaaggtcttactcatggctaccaggaaagatgaacaataacaacaacaaaaataaatacattcgcttgatttcaacattagtggctactcacgtgccacataattaaactttataggaataaatgtagggctcatacaaatatataaacaaattatcatcatatgtaatactttacagccagtttaaaatgctgccaactcattatttttccccttggaataaaataaaatacctggcaatgctgcccagctttttttttcttaacttatccaaatatatacaggagctgtaaccacgaacatcacattgactgatcacttaatttgttttcaattttcgtttaaagcaggtttcaactcaatttatttgtatttgttaaaccaacaaagattcctcctgctccagatggacagaagtctaatttactccttttgctaacaaaaatcattattgaaaatataatctgtgtcccatgaaggtactgattaacatttaaatgctctagtaaatgagaattttgttaatgtgatgtatatcatttgtatatatctatacccacccacacagatacgctgccttgtttcataagaaacaatcagctgaaaatgcccatggacatctattttaaaggaagataattatttaacgctatgaaaaatcaaatctaatgtcaatttactttgcaagaaggctaacaggaatgtaaatttcaagtttctcctgaactccgcaacaaaactgtttcagttagctggaaagccagatgtaaggtgcagaaasattaagaaaaagactgatgtgtttatcatcatcttcattagaagatgcaagtttacatttctccataaagatg

SEQ ID NO: 28440 - DNA, 472 bp, Homo sapiens
gaaggttcattctcattgactcaatactcaccacagaactataaatcggatgccatcatggcccccagcttacagctaaggaaatagattwagtcactcaaggtacacacagttagtagtgaagtgatgggtttagctctgctaaagtgaaatattgcctttgaggaatttttatactagttgaaagataagtcaaatatgcaaatagctatagctaggacagatgaagtgcaataaaagaaatacttcctttgcactggaagttcaaagaaacaaaacagaaaacatagtgaagtgatcaggtaagaggtggttttgggttgtctttgctgatgttcttctctaattttttaaaatttttattattatgggcatatcagagttatgtatatttacaggaaacattatgttttgataagtgcacacaatgtgtaatgatcaaattagggtagttagaatacccatcacctca

SEQ ID NO: 28441 - DNA, 616 bp, Homo sapiens
ttggggtttggctggactgccttgattttcccagggtgatcagtctttaacacgaaatgaaaaaggtcctgaatgtcaacactgatttacaaagtcattcttggccgggcgcggtggctcacgcctgtaaccccagcactttgggaggccgaggcgggcagatcacgaggtcaggagatcgagaccatcctggctaacacggtgaaaccccgtctctactaaaaatacaaaaaattagccgggcgcgcaggcgggcgcctgtagtcccagctactcgggaggctgaggcaggagaatggcgtgaacccggtaggtggagtttgcagtgagccgagatygcgccactgcattccagcctgggcgacagagcgagactccgtcttaataaacaaacaaacaaacaaacaaacagagtcattcttgcaattcttgcatcagggtttccttaacgatggcaattctgacgactgctggagaccaggcaggagtgggcatggaaagggaagtgctgtgcagactaacaaattaatcacatgtgtgttcgcacctgtgattacgcgcaggcactgatccaggatctaaggataccttaggtgaagagatagactagacccct

SEQ ID NO: 28442 - DNA, 640 bp, Homo sapiens
gcacattaaattcccacatgaaaagcagtcagcacagaatatacatggcttggggaaacttacattggctcactagagattaagcatgtaactttaaaatggattttccttcaggaatgcctttctgtccaagtttagaaataattcaagtggttccctaccatttcttgttagagtcatcttgtatctgtgtttgaaggtcatctagctttctattgaaaagctgggaattattagagaattgttagggaattaatttactgtagatggctagttggaaaagaaacaaggattaagtgccaactgcaaaaaattccccccaaacaaataaaaaaaaaccaaaggaacccaaagcataatgctggcacttaggaagcttgytgcctgggtgcactggcaaaatatttgcccatataccaacctgagaatactttcaaaagaacacatcacaatttgttgatttctaacagatgcaagcagtgttgtaaaatggaatgtgcctgcctgacacaaatttgagccaattttgaaatggcaaaaatcttccaacaatgacttgaatactgtgccttcaacttcctattggtatgcacattttttagagctaccatttgaatattttattaaatgcctgggatga

SEQ ID NO: 28443 - DNA, 1584 bp, Homo sapiens
ggttaaggagtatttgtttttcattcatacagttaactacagaatattaagacgtggtcaagagtgactgtatattgggagaaaaacgggagggtctggacaagaatgttgagtggccaccttgagggcacaggctaggcagggtaaatatgaatttatgaatgattttattttcttttgtttttctattttgtcaagttttctgctttgtgtatatattacaattgtgatcactaacaaagctcttactaaaatagatgcagttttgttgaactactttgaagacagaggtcaaagaaagaattttttggtgaatctaagttgttttatttaaaaaaaagaaagttctcccagtatgcatttacttagtgcctgccttttgcactgcaagaagcagtcatttttttcttgaaatcatcattatttaatacttttcctggtggataaaaagatgcagaaccaaagagcacacccagtttaaggctcatacttgtatagccctctaggagtgtgttaatccttttgcattgctataaaraagtacctgaaactgggtaatttgtaaagaaaaaggggttattttgctcatggttctgcaggctgtacaggaatcattgtgccagcatctgattctggtgagggcctcacgaagcttcttctcatggcgaaaggcaaagggggagcaagtacatcacatggtgagagacggagcaagagacagtgggggtgatctcagactcctttaaacaatcagaactcacagtaacttattaccacagcgagggcaccaagtcatttatgagggatccacccccatgacacaaacacctcccactaagccccacttccaacattgggaatcacatttcaccatgagaattggaggggacaaacatccaagccacaccagggagggaggctgtgtttaggtgaagcacactcagccacccggggagaagctggtagaagggaaatgcctccggatacttgagttcaagtcatcatctactgtgtcctcttccataagaagcttgaccactccgagcctcactttcctcatctacaaaattagtgccatgacatcggccctccaggttgctgtggagctcagtaataacctatgacaggccagcaattgtgccagggtcttgcatagctctttccatttaaatgtgggaatgaatgtgggataatctataggaaattatgtaagtgaaagagtttggtaaactgtaaaaggctgtaataagtagaagttccttttatgacctgagtctcaagggtgttcttgcctcatggaaactgttgttgcagcttttgagaccagctgacagtaaatggtatcacttaatgagaatgaggaggcatgcattttaaaagagacattcactttggggtttattgtttaaagtaactaaagcttgacttttttttttccctattcaatcaggagtttttttaaaaaatttatttatttagttttattattattatactttaagttttagggtacatgtgcacaatgtacaggttagttacatatgtatacgtgtgccatgctggtgtgctgcacccattaacttg

SEQ ID NO: 28444 - DNA, 1347 bp, Homo sapiens
ctgcctcctttgagtggagactggacttacagactggactccttcctcccaggcttttccagtggacagagtttgaatagactttttgttttagaagaaaaagaattagtttatactgatatttgcaattcagatttaatatcaccaattatttacttgaatttatgctgatgatatgaattcaaaccaaccatatcaatattaccatgaacaaaaagactactgaatgtggttaagatttttatcccataagaggtgtacagtcaaatatgctgttataaagatgyatgaaatatgtcttttctctgtgtggttatgccacaacttgatatactctcatatttgctttagtttgttttcaattttgagaaattatttttttctttttaacttataaaatagttatatgattccaaaaataagaactataaaacaaggcatattcagagatatctagcctccatttgtttctcctcagtttcaatattctaatttcaacaaatacatgtacacattggtatagccccttcttctctcatataaaaggtagcatacattgtcctatacctggcttcttcacttaacacttttgtcctggagatctcttcatatcagtatctaaaagtccttttcattcctttttacaactgcgtaagtactacattatgtagacataccacagtttattcagttaatcccctattaatagatatttggcttatttccaggtttttgctaaacaaattatgccagaataaatagccttgtatatgagccattttgtatttttgctcatgtacctgtggaaattgccatattcctagaagagggatagctaagtcaaaaattaaatatatatgtaattttgatagatatgtactgccaaacatcccgcaaaatgtaccattttgaattcccaaagacaatgtatgagaatgcctaattgcacacagtcttaccaactcatatgttgtcaaacatctttatttttttcccatctgataagtgagcaacaattcctcagtgtagttttaattacatttctctttttgtgaacaagagattaagtaagtgtacttttacattatatgttctctgaattgtctgtttttatctctagcccattttctttctttttttttttttttttttttttttttgtagagatggggtctctctctgtcgcctaggaaggtctccaatttctgggctcaaaggatcctcacaaagtgctgggattacaggcatgagccaccttgcacagcctcagcccactttctctatagttttttccagagggaaggggggataattttttgtaatgtgattaaatttatcaaacttttt

SEQ ID NO: 28445 - DNA, 1992 bp, Homo sapiens
tccaaaatatgaattcattcctaaagcawtttttttctgttctgcctttcagctaaagtttgagttatgaattcaaatgttgtcagggctcaggtgaggaaaagagtaaaactggctaggtggagactgaagatttggaagcaatttttggcatggaagaacttgagaccagcattaccagatcttcccatttttcaagagaaactgaaaatatcttctctttaatgtgaaatctctgtatttaaaatgctatatattaatttttttaaataaacaggatttgggttaggcacaattctctggttatatcctctgaactggcatttaatgatccctttctctggtggctatagagatgatgggtgcaagatggagcattttcctaaagtattgagccatggaacaatttcctgagacatccttctttggggttactgtctaaatgccccactggctggtgcggcatcccttgcaaagactgaacttatatatttcctggaaatgcctcattttggggtaaaccaggaatgttggtcactgtcagcctgaggtgttggctctatttaaatgcacatggactgaaaaagaaaaaaattatatgaaagtttctaggtattctgacaccacttgaaggttgttccataccctagggaccttaatgtgtcagtttaaactcaatttaacaatttgttatgcatttcccatgtgccagatactgttctaggtacttgggattatcagtggattaaaaaaaagacaaagattccttctcccatggagggcaatttacactctaatcaggagaaacaaatagcaaacaattatcatgaaaggaaaaaccccaatttacggaaaacactaaatgtgctttgagaaggagaaaagttagcaaagcattgggagatttggattacagaggtttgggtctcttcacaatataaaaatctttgtctaggaaagaaggtaagggagtgggccaggaagatatctgaatatatgctccaggccatgggagcaaatggatccaaggcctatgtgtctgtattttccaggaatagcaaggaggccagcatgtgggaacccagagaatgaggtctgtggtggtaggaaatgaggttaaagcaaccatgggagaaaaataatcatcagggacttgtgtgtcaccataaggattttggcttttgctttgatggaaatagggagccagctcagggttttgagcaaaagacttaaataatttgatttacattttaaaggaataactctacttggtttgtcgagagtagatttaagacttacaggtggtgggtgaggagcacagagcagagacctgcaaggaagctattgaaataaaccagaagaaagatcatggtggcttgtaccaaagaggcaattttattggcgaaaagtggtcaaattttagatttttttaactatgtatttcgaagtattttttctatttcttttcttttctgtttctttctttctttttttttttttttttgagacagtgtctgcctctgtttcccaggctgcagtacagtggtgcaattctagcaccttgcagcctcaaactcctgtgttcaagcaatcttcctggctatgcctcctgagtagctaggactactggaaggtgccatcatgctggctattttttatttttacgtttttgtaaagatggggtctttctacattgccaaggctgaactcttgacctcaagcaatcctgctgccctttccttctaaagtgttgagattacagggggaatgagccaccacacccatccaaaataattttagaaaagttgcagagagttcccaagtaacctttacctagcttcccctgacgttaatatcttacataataatggtccattttttaaaacttaagagattaatagtcgtacaataccattaattaaattatagatttttattatgttatttatatttcatcagtttttccacttagtgttctttttttctgttcca

SEQ ID NO: 28446 - DNA, 1992 bp, Homo sapiens
tccaaaatatgaattcattcctaaagcattttttttctgttctgcctttcagctaaagtttgagttatgaattcaaatgttgtcagggctcaggtgaggaaaagagtaaaactggctaggtggagactgaagatttggaagcaatttttggcatggaagaacttgagaccagcattaccagatcttcccatttttcaagagaaactgaaaatatcttctctttaatgtgaaatctctgtatttaaaatgctatatattaatttttttaaataaacaggatttgggttaggcacaattctctggttatatcctctgaactggcatttaatgatccctttctctggtggctatagagatgatgggtgcaagatggagcattttcctaaagtattgagccatggaacaatttcctgagacatccttctttggggttactgtctaaatgccccactggctggtgcggcatcccttgcaaagactgaacttatatatttcctggaaatgcctcattttggggtaaaccaggaatgttggtcactgtcagcctgaggtgttggctctatttaaatgcacatggactgaaaaagaaaaaaattatatgaaagtttctaggtattctgacaccacttgaaggttgttccataccctagggaccttaatgtgtcagtttaaactcaatttaacaatttgttatgcatttcccatgtgccagatactgttctaggtacttgggattatcagtggattaaaaaaaagacaaagattccttctcccatggagggcaatttacactctaatcaggagaaacaaatagcaaacaattatcatgaaaggaaaaaccccaatttacggaaaacactaaaygtgctttgagaaggagaaaagttagcaaagcattgggagatttggattacagaggtttgggtctcttcacaatataaaaatctttgtctaggaaagaaggtaagggagtgggccaggaagatatctgaatatatgctccaggccatgggagcaaatggatccaaggcctatgtgtctgtattttccaggaatagcaaggaggccagcatgtgggaacccagagaatgaggtctgtggtggtaggaaatgaggttaaagcaaccatgggagaaaaataatcatcagggacttgtgtgtcaccataaggattttggcttttgctttgatggaaatagggagccagctcagggttttgagcaaaagacttaaataatttgatttacattttaaaggaataactctacttggtttgtcgagagtagatttaagacttacaggtggtgggtgaggagcacagagcagagacctgcaaggaagctattgaaataaaccagaagaaagatcatggtggcttgtaccaaagaggcaattttattggcgaaaagtggtcaaattttagatttttttaactatgtatttcgaagtattttttctatttcttttcttttctgtttctttctttctttttttttttttttttgagacagtgtctgcctctgtttcccaggctgcagtacagtggtgcaattctagcaccttgcagcctcaaactcctgtgttcaagcaatcttcctggctatgcctcctgagtagctaggactactggaaggtgccatcatgctggctattttttatttttacgtttttgtaaagatggggtctttctacattgccaaggctgaactcttgacctcaagcaatcctgctgccctttccttctaaagtgttgagattacagggggaatgagccaccacacccatccaaaataattttagaaaagttgcagagagttcccaagtaacctttacctagcttcccctgacgttaatatcttacataataatggtccattttttaaaacttaagagattaatagtcgtacaataccattaattaaattatagatttttattatgttatttatatttcatcagtttttccacttagtgttctttttttctgttcca

SEQ ID NO: 28447 - DNA, 1992 bp, Homo sapiens
tccaaaatatgaattcattcctaaagcattttttttctgttctgcctttcagctaaagtttgagttatgaattcaaatgttgtcagggctcaggtgaggaaaagagtaaaactggctaggtggagactgaagatttggaagcaatttttggcatggaagaacttgagaccagcattaccagatcttcccatttttcaagagaaactgaaaatatcttctctttaatgtgaaatctctgtatttaaaatgctatatattaatttttttaaataaacaggatttgggttaggcacaattctctggttatatcctctgaactggcatttaatgatccctttctctggtggctatagagatgatgggtgcaagatggagcattttcctaaagtattgagccatggaacaatttcctgagacatccttctttggggttactgtctaaatgccccactggctggtgcggcatcccttgcaaagactgaacttatatatttcctggaaatgcctcattttggggtaaaccaggaatgttggtcactgtcagcctgaggtgttggctctatttaaatgcacatggactgaaaaagaaaaaaattatatgaaagtttctaggtattctgacaccacttgaaggttgttccataccctagggaccttaatgtgtcagtttaaactcaatttaacaatttgttatgcatttcccatgtgccagatactgttctaggtacttgggattatcagtggattaaaaaaaagacaaagattccttctcccatggagggcaatttacactctaatcaggagaaacaaatagcaaacaattatcatgaaaggaaaaaccccaatttacggaaaacactaaatgtgctttgagaaggagaaaagttagcaaagcattgggagatttggattacagaggtttgggtctcttcacaatataaaaatctttgtctaggaaagaaggtaagggagtgggccaggaagatatctgaatatatgctccaggccatgggagcaaatggatccaaggcctatgtgtctgtattttccaggaatagcaaggaggccagcatgtgggaacccagagaatgaggtctgtggtggtaggaaatgaggttaaagcaaccatgggagaaaaataatcatcagggacttgtgtgtcaccataaggattttggcttttgctttgatggaaatagggagccagctcagggttttgagcaaaagacttaaataatttgatttacattttaaaggaataactctacttggtttgtcgagagtagatttaagacttacaggtggtgggtgaggagcacagagcagagacctgcaaggaagctattgaaataaaccagaagaaagatcatggtggcttgtaccaaagaggcaattttattggcgaaaagtggtcaaattttagatttttttaactatgtatttcgaagtattttttctatttcttttcttttctgtttctttctttytttttttttttttttttgagacagtgtctgcctctgtttcccaggctgcagtacagtggtgcaattctagcaccttgcagcctcaaactcctgtgttcaagcaatcttcctggctatgcctcctgagtagctaggactactggaaggtgccatcatgctggctattttttatttttacgtttttgtaaagatggggtctttctacattgccaaggctgaactcttgacctcaagcaatcctgctgccctttccttctaaagtgttgagattacagggggaatgagccaccacacccatccaaaataattttagaaaagttgcagagagttcccaagtaacctttacctagcttcccctgacgttaatatcttacataataatggtccattttttaaaacttaagagattaatagtcgtacaataccattaattaaattatagatttttattatgttatttatatttcatcagtttttccacttagtgttctttttttctgttcca

SEQ ID NO: 28448 - DNA, 588 bp, Homo sapiens
gcatattaactctaccctcgctggaaagtggtcagttgtattttaaaaagctttacaatagactttctaataatgagagttgaagcaaagtttccacctaaccctgtaattaaattcaccagaagaccccatttcccattatccagacgaccaaggctttgccgaacaccaccgtccctgccctctaggagaggtcatccaaggccagcaatgaaacagtcaatcaatttgcaaatrgacgggaggacactgacaggatgtgttcactgggggtaggtgtctactcggggagagaggccaggcaagtctgtccttgttttcagtctagcaggagtgaaggggaggccagagtaactcctgagtggtcaatctagaaaggccttttggaagggctggaattttaggcatttttcttaagtaagaggagagtgacgtcctgttggaattgtggggtaggggatattctgggcacttctaaaggggtggagaaacctgaacgtcctgggatgggaaccctaagggtgtagatttgtaaaaattgctgcagtcacttgccatgaggactgggtatctgggctagagacaggt

SEQ ID NO: 28449 - DNA, 588 bp, Homo sapiens
gcatattaactctaccctcgctggaaagtggtcagttgtattttaaaaagctttacaatagactttctaataatgagagttgaagcaaagtttccacctaaccctgtaattaaattcaccagaagaccccatttcccattatccagacgaccaaggctttgccgaacaccaccgtccctgccctctaggagaggtcatccaaggccagcaatgaaacagtcaatcaatttgcaaatagacgggaggacactgacaggatgtgttcactgggggtaggtgtctactsggggagagaggccaggcaagtctgtccttgttttcagtctagcaggagtgaaggggaggccagagtaactcctgagtggtcaatctagaaaggccttttggaagggctggaattttaggcatttttcttaagtaagaggagagtgacgtcctgttggaattgtggggtaggggatattctgggcacttctaaaggggtggagaaacctgaacgtcctgggatgggaaccctaagggtgtagatttgtaaaaattgctgcagtcacttgccatgaggactgggtatctgggctagagacaggt

SEQ ID NO: 28450 - DNA, 553 bp, Homo sapiens
agataaggtccttgcacctgtgggcttaggaagctgaacctcaagctgtcctggttttatggctccacttgtgccatctggaccttggttagactgtcccttgatggcagtgacattgaccgagtgggctggagtgcagtggtgcgatctcggcttgctgcaacctccatctcccaggttcaagcaattctcctgcctcagcctcctgagtagctgggattacaggcgtgtgccatcacacccggctaatttttgtatttttagtagagctggggattcaccatgttggccaggctggtctcgaacccctaacctcaagtgatccatctgccttggcctcccaaagtgctgggattacaggcktgtgccatcacacccggctaatttttgtatttttagtagagctggggattcaccatgttggccaggctggtctcgaacccctaacctcaagtgatccatctggaagtgctgggattacaggcatgagccactgtgcctggccagtgcaagtgcctttagccagcttcatttactccctaactccttgcct

SEQ ID NO: 28451 - DNA, 651 bp, Homo sapiens
atctgatctgtgtacactgaaactttgagtcatctaacaactgttccacagtgttctggaacatttgtattaacggtatacttcagcttggaatcttaagttgtaaaattatgtatggatgttcccataactaatggccactttaggacgcacggtgttattttttacaatgatgtaagctacttatatttgtatctcaaaataccttatctcactttttagaactgttgttgtttctctttattaatttgccttggggcttcattacatattttaaattttaagtaaaaattccagagactcattgttgtgttttctatgaacaaaagaggtttgttgatagggcccgtctctactgtctagtactgaaagccagtgtgacactaaaaatgcagtaagtcattagctgtgagatggcttacttagcagagcatagcaatgaaaccatacagctgctgaatatgacaatattttcacagttagaggaaagatatttaagattttatttcacactttaattccctcccttctttttctctttatccttctatgacattgaaattaagaacgtggaaagtgaggctgggcgtggtggctcacgcctgtaatcccagcactatgggaggcygagacgggcggatcacgaggtca

SEQ ID NO: 28452 - DNA, 531 bp, Homo sapiens
atcagctgaatgaatagaaatatattcaaatttaaacaagcaagaacagggctgtgaaaacaaagagacttctattcttcaaatgacgaaacgctgagaaattggattaaaatgyccatgataatttagctgttttaatactttatgctggtaaacaaaggcaaaggaaacagccctgggcagagcccctcctgcttgctctcccaccgctatgggcagtgtccccgcggctccctgccactcaatacaagtgttccggacagaggaactagccatccctgaaacagctctgtcaactagagggtgattaacacttgccccttcgatgtgagcactcacgtgggccccatgcaaagtctttccagctcatcatgtcacacgcatggcacagaaacaaatgagatggacagaagtgaaagaacctacagacaaatgtcacaacccaaaggcaaaagtcccaagtggctccgtctgcctcacagtccccttcctactctgagatgacacatggtgaataggtattttaaatta

SEQ ID NO: 28453 - DNA, 564 bp, Homo sapiens
ttttgcttcctgaatggggacaaaagatcccactctgtgtgcaagaacagcttccttctaggctgcagcggatactttattccagattccactttataaaccagcccagatgggatcccgcctgcgctggtaccttttccgaagcatcctgtaatcttaacacattctccatctcaccagcccttcaaacgatctcttactcagagaattattttgcacatccattcttgaaatctggccaactttaacaaattttcccagactacagatcattcagaggactgcacccctttgcacctgtgctcgctgtccgaatacaactgtgccactgtcatgggcagggaatcctccatcctgtactgagtctacactgtcatctttctggctgtcatcactgacctacatgtaaaggtcaccttccctacatcatgatgccgcttctcaatgccatggagagatctgctcgtagacagaaatttagattaaaaataacagatgccactttagaagattccatttcctgtcagctagcatcractagctgatatctaccaagcgaaacta

SEQ ID NO: 28454 - DNA, 704 bp, Homo sapiens
aggctgatgtcaaagcgcagcccaaacttagcaaagagcttgtcattgagagtgtagagcttctcygagatgtcatatcccagcagagccgagaagaggcaggagatgtatcgctctttggtcagaagaagatggagacttttccggggccaggaaatgtagctacatgaggtctcagcagtcagagtgacctgagaggggtcagaatctgacaataaaagtttaaactagaaaatttgtccatgctgagcacagagatcattcagtcacttggcaaacagctgtacttttactgaagaagctgtgtgggagtacccctctatggccttgcctggaggaggtctagtggatgactttcacttgtgtgcactgatatgggggggtcctgtgtcaggagccctgggatcagccattcactcactcacccatcacctcctgaagcctcagtttccacatccactttcctcaactgtaattctgtggttccgtggctaatgccactaatgactgcagaaagttctgagtcttatgattttaagatagagaaagaaggggccttcttgtgctctgaagagtggttgaattgctgacaactattcattttaagaatgaggaagggtaagatattggggtagggacataaaaagagttggaaagttgagtttgagaaaaagcttctgatgaggtatgccaagctacatcag

SEQ ID NO: 28455 - DNA, 1055 bp, Homo sapiens
cagaagratcctccaattccctgaaaatatctgatttgaggccctgaagtccataatttttctgacacaatttaactttcctgtgcctcagtttcctcactgtaacagtgagcatacaaacaactacctcaaagatttcttatgaagattgcaatgatccatgtaaagtgctgagaagaaagcctgacacatagagagcaatcggtaaatatcatatattatttttataattaaagattatgcaacacagagaatagagcagcccagtcagaagttacacaaacatatagcctagaacctctggctctagactctctatgggctctaaatgctcatgctgtattcacagtacaagtattgagttttggtaatagatccccatttcagcaactaagtcctctatctcaggggcccccagcccctgagccacagattggtatcggtctgtgacctgttaggagctgggctgcacaacaggaggtgagcagggacaagcaaagcttcacctgtatttatagctgctccctatcgctggcattaccgtctgagctccaccacctgtcagatcagctgtggcattagattctcataggagcacgaaccctattgtgaactgtgcaagccagggacctaggctgcgtgctccttttcagaatctaatgtgtgatgatctgtcactctctcccgtcacctccagatgggaccatatagttgcaggaaaacaagttcagagctcccactgattctacattatggtgagttacataattattgcattatatagcacaatgtaatcataatagaaataaagtgcacaataattataatgcacttgaatcatccccaaaccatccccctccccagtccatggaaaaattgtcttccatgaaacaggtccctggtgccaaacaggttggggaccactgctctatcttatgtaatactttgtttacacaaagttaatctcatgaaagaaaattagaccgtacctttgccagatatgattgggtgcaggaaaagccaaatatgtgccccaaagaaaaagaaatatatag

SEQ ID NO: 28456 - DNA, 1055 bp, Homo sapiens
cagaaggawcctccaattccctgaaaatatctgatttgaggccctgaagtccataatttttctgacacaatttaactttcctgtgcctcagtttcctcactgtaacagtgagcatacaaacaactacctcaaagatttcttatgaagattgcaatgatccatgtaaagtgctgagaagaaagcctgacacatagagagcaatcggtaaatatcatatattatttttataattaaagattatgcaacacagagaatagagcagcccagtcagaagttacacaaacatatagcctagaacctctggctctagactctctatgggctctaaatgctcatgctgtattcacagtacaagtattgagttttggtaatagatccccatttcagcaactaagtcctctatctcaggggcccccagcccctgagccacagattggtatcggtctgtgacctgttaggagctgggctgcacaacaggaggtgagcagggacaagcaaagcttcacctgtatttatagctgctccctatcgctggcattaccgtctgagctccaccacctgtcagatcagctgtggcattagattctcataggagcacgaaccctattgtgaactgtgcaagccagggacctaggctgcgtgctccttttcagaatctaatgtgtgatgatctgtcactctctcccgtcacctccagatgggaccatatagttgcaggaaaacaagttcagagctcccactgattctacattatggtgagttacataattattgcattatatagcacaatgtaatcataatagaaataaagtgcacaataattataatgcacttgaatcatccccaaaccatccccctccccagtccatggaaaaattgtcttccatgaaacaggtccctggtgccaaacaggttggggaccactgctctatcttatgtaatactttgtttacacaaagttaatctcatgaaagaaaattagaccgtacctttgccagatatgattgggtgcaggaaaagccaaatatgtgccccaaagaaaaagaaatatatag

SEQ ID NO: 28457 - DNA, 569 bp, Homo sapiens
agggacgcctcttcttcttcacagacaagtgggagctggactctgacagaatatcaaagtgaaaattaatgcccgctgcttgtatattgcctagacgttacttttgagaggaaaacaacaggagcagagcgaagctgtacatatgttaaattcacatcagtaataaagattaagtagaagttaatagcatcccagtcatgcttgtggaggtaatctcctttctgaaaattcaaaattagatttggaggatcgaagcaaacagggggtgagactttggcgtaatattttaatcaaattgtcatgaatgagtggatacaattaagaattctgtcagtcaaagtgctgaggcccttttgttagtcagcggtgggaggggtgcgctgggccgtggtggggagagattaaacttgacctttcctagggtcttcatttttgaccctgaggctgggctttgcctgtcagatggctgtttttttttaaaaaaagtatgtgtgtgtgcatgaatgtgtatacctgtgcatgtgtgcgtgcactcaggcatgtgtatacatgtgtatacatgtrgttgc

SEQ ID NO: 28458 - DNA, 661 bp, Homo sapiens
catgatagcaagatataattttatatccagctttcattatactaagttttttaaaagaaatcattttaatgggggaaagaargatacttccagtgatcatgtcaaaggaaactgcatggcaaagatgaaaaagttgatgaggcttgcctggaatatgaatgctttctgtacctagcaacaaacaaacacaaagaaaagaaaaccaacatcatctaatgtattatttccttttacttaagccacaaaattagaaccatatcgatactgagagtgagtgaaggccagcaagtaaagcccagcaagcaatccctgcttttcctgccataagacctttggcttatccaaagttaaatgctagccatctgtgttagattcccagccatccaaacccactaatattcataaaatatccccagagctggtcaagacagtagaccaaaatcaaaagcttctgccaagtaaaaaagatatatctgtagacaagtgtgatgctggaaggacataaacttcactgttctttgataaacaaaagtgaatgagtccatcagcctgcaccatgtacttggaggagtctgggatttcgtttttgtgtaggttgtgcctatacgacgtgtagccatctgtcccttccaagcaaaataggagctacttgggtaaacat

SEQ ID NO: 28459 - DNA, 661 bp, Homo sapiens
catgatagcaagatataattttatatccagctttcattatactaagttttttaaaagaaatcattttaatgggggaaagaaagatacttccagtgatcatgtcaaaggaaactgcatggcaaagatgaaaaagttgatgaggcttgcctggaatatgaatgctttctgtacctagcaacaaacaaacacaaagaaaagaaaaccaacatcatctaatgtattatttccttttacttaagccacaaaattagaacyatatcgatactgagagtgagtgaaggccagcaagtaaagcccagcaagcaatccctgcttttcctgccataagacctttggcttatccaaagttaaatgctagccatctgtgttagattcccagccatccaaacccactaatattcataaaatatccccagagctggtcaagacagtagaccaaaatcaaaagcttctgccaagtaaaaaagatatatctgtagacaagtgtgatgctggaaggacataaacttcactgttctttgataaacaaaagtgaatgagtccatcagcctgcaccatgtacttggaggagtctgggatttcgtttttgtgtaggttgtgcctatacgacgtgtagccatctgtcccttccaagcaaaataggagctacttgggtaaacat

SEQ ID NO: 28460 - DNA, 531 bp, Homo sapiens
gggaaaataaatataacttatttctgagaacagggctcaaatatttgtactttttttgtagtatggtaatcaactactctgttttactcccttaagtatatgacatgtcttaaaacatatgttgaaacatctattccttcaccaagtagtgaaaagcgagctgtttaaagtaggagtcactctctaactgatccaggataacatttcatcttttttcctcttccacgtgcctcctgtacctagagagaggggaagtatgattccgtggggatgatgtgtttcttctcaaacactcagctgagttggtctctctgtgatgaggccacacacctgcgctggcctgaataagtgtggttgatctgattttgcacatggtcctagagacacagcatatttttcatataaatgaatgaatgacctccaccaaggatatcagaacrtcttacatttccctcacaatttaattttttttttttagggctgtctcagtaagcagatgggtgacctacatccctaagtgaaaagatcatg

SEQ ID NO: 28461 - DNA, 721 bp, Homo sapiens
tgctcctcattgcaaagttgctcaccaatctgcaaagggtctcaacttggaagcagctcctgcccgctccatccaaggccgttgagttcacgcagattttcttttgcagcggccccacaggtctggagggcaacatgggagtgcgttccagctctgcacccagggaaaagccactgaagagcacagacgattcaaactccccaacctgtccctcttgaaccgctccaggtagaactgttggacttagcaaacaaaaatacaggacgctctgtatgttgcttagcaaacctagccctagaagcccagagaggctggggcgttaaccatactggggagaggcgtgggcaactgagaatggaggggacctcggagggagggcccggaaaaaatttttaaaagccagtcccacaactccgcgacacgtcccagccaaggcgcggcggggagccttggacaggagtgcacttgaaggtgagggtgcagagtggccggtgggacttgtggctggtgwtctcggccatgccctggccccagaagtcgttggtgaagatgccccagcagagcgaggcgctgggccgcacgtcggggttgttcacggtcgcccacgaactcgccctgcagggaacggccttagcacaggcagctcgcgcctgccagcagcgccgcggccccggctatcaacacctcctcctccccactgcgaatgccccgatcgtgctcc

SEQ ID NO: 28462 - DNA, 805 bp, Homo sapiens
atttagtcctccaacctactctgtagggattatattattattattatcatcatcatcccaatttttgagaacaggaaactcaaggttctgcccctctggctgcagagtcagagttcttgcatcatagactataccgcctcttaggagttagggtaagcttacctcacccacgtcctgccaaagggacaagcatagttcacacagataattttaatattgagttcatttttatataaaaaaatagattccttctcaaaagaaataaagctgtcctcttcattcacaagcattaatttggtaaatatctagttgatttcagcagtgcggtgtgtgctgtctggccagcctccctcattaaattagcccagtggytggagatttaaacagaaagtgactttcaaaagtttgtcattcatcttaatatgttagcaaaaatgtcccacctcgaagtacatcaagaatcatgtagtaaatggctcttttaatggacacaaaaatgatcccaagaagttcctcacccctgggagtttaacagggagaccaggcacgcatacaattgggacaagagccttctcactgaacttagtccctgccagagactctggactgcaatctcccatgacatcacaagtgagaaaagtggggttcagaagtcaaaaagactgggtttcaatcttgatgttctcacttttaacttcgtgaatgaggacaatgttattgaatatctcagatgttcagtttccttcaggtaaaacagcaattatattatttaccccaaagtggagttgccagatgaaaatatagg

SEQ ID NO: 28463 - DNA, 1051 bp, Homo sapiens
tttcattctctgcccctccacccatatctattgatctatctatctattgatctgtcatctatctattcatccattcatctatattcttgttattatcttacagacaggagccttaaagaaacgacttgatcattattccaggttaaaaaaatgagccacaattcccctggtcatgaagttataattctagcctcttctctattaaattgctctcaggtaataatttagagagtaattggcacaaaccttacaaatagttttctatttttaactctatcccccttgtggtacctgggtagactttgtgctcattagtctttggctcctactgatcttgtgctgtgttggcagtcatgtgatakacctctgcacaagatgctggggggaaatctagcctttatttctgcagcctaatgacagtgagagccaagagatgagtacatttgaggagtcaaaatgcttctgtgtcagaactttatggcaagagaaagaaagttgggacactggttattttctgggacatcagctactgatttatgaacttgatgggacctccctacttattactttacaatgaaatgaaggttattttaaatgttgattgttaggttgtaatgtccctccccccaccccgttttcattagaaatgtcatttacagattgttacttgacacacagtaaaatgtgtggagtttttgagcagttaaaaaagaggattgcaccacaggggccactgtaagatttgtaacagagctctgccgaaggtattttactccttgatttcagcaatgataaacctaggtttatttttgtttgtttgtttttttagaagaataaatcatgaaaaaaaggaaaaggagtagtactggtgtgaccttaagtcaactaaaagtaagctactggtatcaggaagaaagagaaaagatgtaggaaagcctaatgaactgctgatgtgagacctgaagagtcaaaaaacaggtctaaggctaatgatgtggtgaggatggagagattaggaaccctgagcaggtctcaggacacatgatggatc

SEQ ID NO: 28464 - DNA, 612 bp, Homo sapiens
cagtggctgtaattatgattagagaacacgggccaagaacaggacttgtgggcccgtcatactcagccttcatcttgctccatcctatcccctcacgtggagtgagagtagggggtagactaagtcccaaactaggtcccgaggctatagtaataggcgctggaagacccgtagagactttagacttatctcccctactcatttcacagaaagggaaactgaaacccagggagcaaagtgactagcctgcagactataaaggagtggaatcccaccccctttaataaatatcagaatcagccaggcacggtggctcacgcctgtaatcccagcactttgggagkccgagatgggcagatcacctgaggtcaggagttcgagaccaccctggccaacatggcaaaatcctatctctactaaaaataaaaaaattagccaggcatggtggcaggagcctgtaatcccagttactcaggaggctaaggcaagagaatcgcttgaatccaggaggtgaaggttgcagtgagctgagatcatgccactgcactccagcctgggcaacagagtgagactctgtctcaaaaaaacaaaataaaataaaataaaataaaa

SEQ ID NO: 28465 - DNA, 1229 bp, Homo sapiens
  misc_feature (1)...(1229): n = A,T,C or G
cccccctccccacaccccaccacagtccctagagtgtgatgttccccttcctgtgtccatgtgttctcattgttcaattcccacctatgagtgagaatatgcggtgtttggttttttgttcttgtgatagtttactgagaatgatgatttccaatttcatccatgtccctacaaaggacttgaacttatcattttttatggctgcrtagtattccatggtgtatatgtgccacattttctgtaggctacctactcaaggttgctttatgattcaaaacattttaagtttcaaaaatgttttgaaacaaaatattttgaaacattcttaatatgaaatgaatacttttttaccccgggcaaaatttgtattaatattttaggttgatggagcaacaaacactctagtgattaaaccttgttctagcaccttaacatgatatgagggccacagtgttctcggtactggctgaacatcaggattgctgtgtgcattttttaatttgttttatccgttaaagtaaaaagtaatgctttctaatacaaatccccccaatagcatttagctcacagagaaggaattaagatgaaaatnnnnnnnnnnnnnnnnnnnnnnnnnnnnnnnnnnnnnnnnnnnnnnnnnnnnnnnnnnnnnnnnnnnnnnnnnnnnnnnnnnnnnnnnnnnnnnnnnnnnaatgccaaagcccaactcgggcagtgtaatatatatatttaagatatttaagatatcttaaatatatataaatatatatattttacactgcctgagtgtgtatatatataatatataatatatattcacatttgtatatatgtatatattctatagtgcctatattctatttatagtgcctataatagccttgtagccaagaataaagagccttttttctactttaaaattaacctggtactcttcatatcatgagttctaatgggccaccctctaaacctaaccaagattcgtaacagaatttgatgtggaaatgaatttcaaactcacactaacaaataggatttggaagacagcttatttgtaagctgggctaaagtctaaagcacagtgccttaatgtggaaaacttagactcacaaacaacttttttatggtgttatcttttaaattttaaggatctttatgcttcactcaaattacattctttagtacattgcttctcaaactttattgtgtatacaaatcacctggggaat

SEQ ID NO: 28466 - DNA, 505 bp, Homo sapiens
tttgagtagagtggggaggtagggatggttcgataacactttctagttcttttcagaagaacttaaaaaagaaaggcagagatgggaaaggggcaaaaattccaccatcccgatgtttaactatagaaacttgggggcctcaaatgcaattaattgaaaagytcatgcattcatgtattcccacatttagaatgcaaggatcaccagcaatgccattctgatttgtcagttttccagttcctgacaaaaggtaggcttgttggaaaccactgagatcctaaggagatggtctgagaaacactgtatgaactgcaaattttttgatgctccattccagtatcaagtgagctccccagcaatctgtacacttggcctctcttcctctggattcatgcagagatgccagcaatttaacgttatgtttttggctttcactggaggcatgaaataagaactggccagaaggagaacattactgcaatttttttttttttttttgcaaagc

SEQ ID NO: 28467 - DNA, 505 bp, Homo sapiens
tttgagtagagtggggaggtagggatggttcgataacactttctagttcttttcagaagaacttaaaaaagaaaggcagagatgggaaaggggcaaaaattccaccatcccgatgtttaactatagaaacttgggggcctcaaatgcaattaattgaaaagctcatgcattcatgtattcccacatttagaatgcaaggatcaccagcaatgccattctgatttgtcagttttccagttcctgacaawaggtaggcttgttggaaaccactgagatcctaaggagatggtctgagaaacactgtatgaactgcaaattttttgatgctccattccagtatcaagtgagctccccagcaatctgtacacttggcctctcttcctctggattcatgcagagatgccagcaatttaacgttatgtttttggctttcactggaggcatgaaataagaactggccagaaggagaacattactgcaatttttttttttttttttgcaaagc

SEQ ID NO: 28468 - DNA, 515 bp, Homo sapiens
tcaaaagagttatcaaaggagatttggtcacctgattaacagagaatcatgaatgcctgaggaaaactaatttggttgtgtatttcatcaaagtgacaataaaatattacaaaatgttttaaaggcaacatgattgtaagaaatctgttgtttaccgtgaagatcttttgttctttgttgttatttttaaataatcaaagatgtgataaagtcaacataaagaccagaaaattattttagtgagacacagaccctactctctaggtgagaagagctgtaaacacaatttatcattttaacagagagaaagccaaattcgagttatgagttaaaataactgttagtaaaaaaggttttgtgagattttttctcttttttttacgtaatcttgtgaaaaagtccatcaaatccagcaaactttgccaaaatgttaacrcattttgtatcttctttgcagactctggtgttatgaacccaaacgaataagtttcatttccttcaaagcctctgtatcc

SEQ ID NO: 28469 - DNA, 974 bp, Homo sapiens
catctctacaaaaactaaaaaagctagccaggtgtggtggtgcacacctgtggccctagatactcaggaggctgaggtaggaggatcacttgggcccaggaggtggaggctgcagagaactgtgatcgtgccaccatattccagcctggatgacagagggagacctgtctcagaaaagaaaagaaaaaaaagggcataaagtcaggtttccatttgttgaaggtgggaatggtgcttacggtatccaggggtttggatcagccttgcgyctggtctctgcgtccatctgccaactccgtgagttcccttacaagccccaaatgggtgcaatgtagtctattttggatttcctctgtgtaaatatagaactctgttccttgtacttgttcctataatgccaactaattatctcctcccccttctcacctaaccttaccagatgcagttaatttacactgtctgtctttgcgttttctcacacaacaggcacactccactctggctcagaagaagtctgtttattcccttgaaatgtgcatgttccagggagagggagaggatggttccccaacttttcaccaccaaggaccccttaagcttcttccttggtgaacacagggttttgcaggactttgccttccaaactgctatggacaaataataatgcagctataattccatttttattaatcaaaaacgtataacaaaatgggaaggtaaaacatctcctctcagaaatgcccttgataccatcaatggccaattaagagtttttgattgggatgagataatcagtgttaccacactgacttgggagacttccagctcaaacacaaaacaacttggctttctggtgagtccatgtgaccatatcccagcagatcttctgtttctaataggctgcttgaaatacgaaaaatcgctttcactactttgtggccctttaattgaaaaccattggagtttacaatagg

SEQ ID NO: 28470 - DNA, 525 bp, Homo sapiens
tacagacaagttcattccattattagacgttccctgccagcaacactaccacagtgagtatgaattaaatctattttttctgcatcctctactaatattaaattattttcaagtaaacataagttaaacaaataacctctgtgaaatttactgtaatatactctgcttcaaatacaaaacaaagacaaaattttgtatagtatacaatgaaaataaactgaaaattaaaattcagtgggaagcgtattttagaggcaaagtaattcacaatataaaagaagtatgtctgtgaaataaaacacattccaccagtgttcataaaatatcagtaaggtagcttaattgatttaacattcctgaaatcaggtatgctaactcataaatcatattaaagttcaaaacatttcagccttgataagattttaggccaaaacaaaaagtaaatataaataattttatatctattagcrttcagttgctttcttcaatctcaaacataaaaatatatatgtgtgtgtgtgtata

SEQ ID NO: 28471 - DNA, 522 bp, Homo sapiens
tttttttgacagagtcttgctctgtcgcccaggctggagtgcagtggcacaatcttggctcactgcaacctccgcctcctgggttcaagtgattctcctgcctcagcctcctgagaagctgggactacaggcgcctgccaccacactcagctaatttttygtatttttagtagagactgggtttcactgtgttagccaggatggtctctatctcctgacctcgtgatccacccacctctgcctcccaaagtgctaggattacaggcgtgagccaccgcgcccagccataaagtcctactattttgaagaatgtttctgtcttgttcaatcttaaaacatgaaacaataaaatgaggccacggaagaactttagaaggtcataatcaaattgtcttatagtgtgtaaaaatatggtctataagttttttatgaacaagattgtgccttataaattttttacactctgccttttcctatactagtgccatgtatctagctttaataaatggatacttcgggtat

SEQ ID NO: 28472 - DNA, 522 bp, Homo sapiens
tttttttgacagagtcttgctctgtcgcccaggctggagtgcagtggcacaatcttggctcactgcaacctccgcctcctgggttcaagtgattctcctgcctcagcctcctgagaagctgggactacaggcgcctgccaccacactcagctaatttttcgtatttttagtagagactgggtttcactgtgttagccaggatggtctctatctcctgacctcgtgawccacccacctctgcctcccaaagtgctaggattacaggcgtgagccaccgcgcccagccataaagtcctactattttgaagaatgtttctgtcttgttcaatcttaaaacatgaaacaataaaatgaggccacggaagaactttagaaggtcataatcaaattgtcttatagtgtgtaaaaatatggtctataagttttttatgaacaagattgtgccttataaattttttacactctgccttttcctatactagtgccatgtatctagctttaataaatggatacttcgggtat

SEQ ID NO: 28473 - DNA, 2607 bp, Homo sapiens
aaggaaacatcttagttagaagttattcagcagtaggtaccatccctaagtatttttcaccaaattcgtgacaataaagagctatctaaccagaaaaattagcgagtaccggcaccatccatagggctttgtctttacgcttcattagcacttaccatgccttacaatgtctaggattgaccctgatagcatttcggaaacaagctaatgctttgtccagttcttcagtgaagacaagctcacgccctaatgcgctataggcataagcatcatttggatccacttcgagagttctctggaagaattgaatcgcaatatcgtgttcccgttgcagaccgaaacagttccctgcagcacaccaggcctctggctggcgaatttttatccatgtctgtgaagtctttggacagaactgaaagagcaacctctttcggaggatgccaaagtgttgtagagtagatctccatgccttcgactctgtaattctcaatcctcctaacctctgagaattgtctttcagcttgcgtggactctgaaagtttacaataggcccttccgattttggcacagtacccaaccggtattgcagtggtgagaagctagatggctcaagatactgatagcttctttgccgtggtaagaacacaaagctaaataacctttccccctttcacgaagaaggctcatcaagccttccgctgctgctttttgtagattaaaagcctgaatctgaggcgcgattgcggctattttcccttctgaaatgacggaagagtccaattttgtcacttccaggctatcacttatgttcggtggagttattgctcctttattagtttcacttttggttcttctgtttgggattttaggtggaaacttcatttttaattttctcctattctcctcggttgtggagctgtcactagtcaagagtcgtgaatttcttcgaggcggtgcatttgggggagatgtcatagtggggctcaatacctgaggtgttgcccttgtcggcggaccagaactttgtgtttttgcaaggactggagttacctttcggctctttcccctctgcgagaagacagacggtgttccggtttggccgattctggcaacaggcttctttgaaggggctccggtggatggcacgtcaatgacagacggtgtctcataccagtgcagttttgtcaatagggtccgtctccgggacttggggtttctaatggcaaaatgccaacacttggggttaatggactaacagctgctggtcctcctaataaacttcgaccagtttttggtttatgttgaacctgtttagatcatatggaagttcctgttcccagtgggacagtatcaggtgaaaggacagctgaatcgatagaagacactggggagtctgtattcaaggagtactttgaattggaagattctaaattccatccgtttcattcgacggtgtcctggggtgtttccgtaagaacggtctcgggctgtctgtgacataaactaggacgaggtccaagtgttgcggcgcaacacttggacaggcagttgctaaagctctctagagaggtgaatcaaaatgtttggtcaggatctggcttttcccccctatttcacatcatgattcaaagggacaccagaggaaaggatttcaacgaaggctcttttggtcacattctgatcctttggtaagccgatctgtcttgcaatatacatgtcccgacgatggaaggggaaagcgagctgaatcaccaaactcaggaacgataatatcatcgtggcttttctgcttatgaaacactccacccgataagatttgatccccttctgcaagcttgctgagatcaacacaacatttcgcaagcaggcatttgcattgcggggtagtacaactgtgtcctttcaagagtctatatgttttataggcctttcctgagcggtaagaacaggtcgccagtaagaacaaggcttcttctgagtgtacttctgcataaaggcgttctgcgggggaaaccgcatctcggtaggcatagtggtttagtgcttgccatatagcagcctggacgggtccctgcagcaccgccatcctcgaggctcaggcccactttctgcagtgccacaggcatcmcccccccccccatagcggctccggcccggccagccccggctcatttaaaggcaccagccgccgttaccgggggatgggggagtccgagacagaatgacttctttatcctgctgactctggaaagcccggcgccttgtgatccattgcaaaccgagagtcacctcgtgtttagaacacggatccactcccaagttcagtggggggatgtgaggggtgtggcaggtaggacgaaggactctcttccttctgattcggtctgcacagtggggcctagggctggagctctctccgtgcggaccgctgactccctctaccttgggttccctcggccccaccctggaacgccgggccttggcagattctggcccttcctggcccttcagtcgctgtcagaaaccccatctcatgctcggatgccccgagtgactgtggctcgcacctctccggaaacattggaaatctctcctctacgcgcggcc

SEQ ID NO: 28474 - DNA, 2607 bp, Homo sapiens
aaggaaacatcttagttagaagttattcagcagtaggtaccatccctaagtatttttcaccaaattcgtgacaataaagagctatctaaccagaaaaattagcgagtaccggcaccatccatagggctttgtctttacgcttcattagcacttaccatgccttacaatgtctaggattgaccctgatagcatttcggaaacaagctaatgctttgtccagttcttcagtgaagacaagctcacgccctaatgcgctataggcataagcatcatttggatccacttcgagagttctctggaagaattgaatcgcaatatcgtgttcccgttgcagaccgaaacagttccctgcagcacaccaggcctctggctggcgaatttttatccatgtctgtgaagtctttggacagaactgaaagagcaacctctttcggaggatgccaaagtgttgtagagtagatctccatgccttcgactctgtaattctcaatcctcctaacctctgagaattgtctttcagcttgcgtggactctgaaagtttacaataggcccttccgattttggcacagtacccaaccggtattgcagtggtgagaagctagatggctcaagatactgatagcttctttgccgtggtaagaacacaaagctaaataacctttccccctttcacgaagaaggctcatcaagccttccgctgctgctttttgtagattaaaagcctgaatctgaggcgcgattgcggctattttcccttctgaaatgacggaagagtccaattttgtcacttccaggctatcacttatgttcggtggagttattgctcctttattagtttcacttttggttcttctgtttgggattttaggtggaaacttcatttttaattttctcctattctcctcggttgtggagctgtcactagtcaagagtcgtgaatttcttcgaggcggtgcatttgggggagatgtcatagtggggctcaatacctgaggtgttgcccttgtcggcggaccagaactttgtgtttttgcaaggactggagttacctttcggctctttcccctctgcgagaagacagacggtgttccggtttggccgattctggcaacaggcttctttgaaggggctccggtggatggcacgtcaatgacagacggtgtctcataccagtgcagttttgtcaatagggtccgtctccgggacttggggtttctaatggcaaaatgccaacacttggggttaatggactaacagctgctggtcctcctaataaacttcgaccagtttttggtttatgttgaacctgtttagatcatatggaagttcctgttcccagtgggacagtatcaggtgaaaggacagctgaatcgatagaagacactggggagtctgtattcaaggagtactttgaattggaagattctaaattccatccgtttcattcgacggtgtcctggggtgtttccgtaagaacggtctcgggctgtctgtgacataaactaggacgaggtccaagtgttgcggcgcaacacttggacaggcagttgctaaagctctctagagaggtgaatcaaaatgtttggtcaggatctggcttttcccccctatttcacatcatgattcaaagggacaccagaggaaaggatttcaacgaaggctcttttggtcacattctgatcctttggtaagccgatctgtcttgcaatatacatgtcccgacgatggaaggggaaagcgagctgaatcaccaaactcaggaacgataatatcatcgtggcttttctgcttatgaaacactccacccgataagatttgatccccttctgcaagcttgctgagatcaacacaacatttcgcaagcaggcatttgcattgcggggtagtacaactgtgtcctttcaagagtctatatgttttataggcctttcctgagcggtaagaacaggtcgccagtaagaacaaggcttcttctgagtgtacttctgcataaaggcgttctgcgggggaaaccgcatctcggtaggcatagtggtttagtgcttgccatatagcagcctggacgggtccctgcagcaccgccatcctcgaggctcaggcccactttctgcagtgccacaggcaycccccccccccccatagcggctccggcccggccagccccggctcatttaaaggcaccagccgccgttaccgggggatgggggagtccgagacagaatgacttctttatcctgctgactctggaaagcccggcgccttgtgatccattgcaaaccgagagtcacctcgtgtttagaacacggatccactcccaagttcagtggggggatgtgaggggtgtggcaggtaggacgaaggactctcttccttctgattcggtctgcacagtggggcctagggctggagctctctccgtgcggaccgctgactccctctaccttgggttccctcggccccaccctggaacgccgggccttggcagattctggcccttcctggcccttcagtcgctgtcagaaaccccatctcatgctcggatgccccgagtgactgtggctcgcacctctccggaaacattggaaatctctcctctacgcgcggcc

SEQ ID NO: 28475 - DNA, 2607 bp, Homo sapiens
aaggaaacatcttagttagaagttattcagcagtaggtaccatccctaagtatttttcaccaaattcgtgacaataaagagctatctaaccagaaaaattagcgagtaccggcaccatccatagggctttgtctttacgcttcattagcacttaccatgccttacaatgtctaggattgaccctgatagcatttcggaaacaagctaatgctttgtccagttcttcagtgaagacaagctcacgccctaatgcgctataggcataagcatcatttggatccacttcgagagttctctggaagaattgaatcgcaatatcgtgttcccgttgcagaccgaaacagttccctgcagcacaccaggcctctggctggcgaatttttatccatgtctgtgaagtctttggacagaactgaaagagcaacctctttcggaggatgccaaagtgttgtagagtagatctccatgccttcgactctgtaattctcaatcctcctaacctctgagaattgtctttcagcttgcgtggactctgaaagtttacaataggcccttccgattttggcacagtacccaaccggtattgcagtggtgagaagctagatggctcaagatactgatagcttctttgccgtggtaagaacacaaagctaaataacctttccccctttcacgaagaaggctcatcaagccttccgctgctgctttttgtagattaaaagcctgaatctgaggcgcgattgcggctattttcccttctgaaatgacggaagagtccaattttgtcacttccaggctatcacttatgttcggtggagttattgctcctttattagtttcacttttggttcttctgtttgggattttaggtggaaacttcatttttaattttctcctattctcctcggttgtggagctgtcactagtcaagagtcgtgaatttcttcgaggcggtgcatttgggggagatgtcatagtggggctcaatacctgaggtgttgcccttgtcggcggaccagaactttgtgtttttgcaaggactggagttacctttcggctctttcccctctgcgagaagacagacggtgttccggtttggccgattctggcaacaggcttctttgaaggggctccggtggatggcacgtcaatgacagacggtgtctcataccagtgcagttttgtcaatagggtccgtctccgggacttggggtttctaatggcaaaatgccaacacttggggttaatggactaacagctgctggtcctcctaataaacttcgaccagtttttggtttatgttgaacctgtttagatcatatggaagttcctgttcccagtgggacagtatcaggtgaaaggacagctgaatcgatagaagacactggggagtctgtattcaaggagtactttgaattggaagattctaaattccatccgtttcattcgacggtgtcctggggtgtttccgtaagaacggtctcgggctgtctgtgacataaactaggacgaggtccaagtgttgcggcgcaacacttggacaggcagttgctaaagctctctagagaggtgaatcaaaatgtttggtcaggatctggcttttcccccctatttcacatcatgattcaaagggacaccagaggaaaggatttcaacgaaggctcttttggtcacattctgatcctttggtaagccgatctgtcttgcaatatacatgtcccgacgatggaaggggaaagcgagctgaatcaccaaactcaggaacgataatatcatcgtggcttttctgcttatgaaacactccacccgataagatttgatccccttctgcaagcttgctgagatcaacacaacatttcgcaagcaggcatttgcattgcggggtagtacaactgtgtcctttcaagagtctatatgttttataggcctttcctgagcggtaagaacaggtcgccagtaagaacaaggcttcttctgagtgtacttctgcataaaggcgttctgcgggggaaaccgcatctcggtaggcatagtggtttagtgcttgccatatagcagcctggacgggtccctgcagcaccgccatcctcgaggctcaggcccactttctgcagtgccacaggcatmccccccccccccatagcggctccggcccggccagccccggctcatttaaaggcaccagccgccgttaccgggggatgggggagtccgagacagaatgacttctttatcctgctgactctggaaagcccggcgccttgtgatccattgcaaaccgagagtcacctcgtgtttagaacacggatccactcccaagttcagtggggggatgtgaggggtgtggcaggtaggacgaaggactctcttccttctgattcggtctgcacagtggggcctagggctggagctctctccgtgcggaccgctgactccctctaccttgggttccctcggccccaccctggaacgccgggccttggcagattctggcccttcctggcccttcagtcgctgtcagaaaccccatctcatgctcggatgccccgagtgactgtggctcgcacctctccggaaacattggaaatctctcctctacgcgcggcc

SEQ ID NO: 28476 - DNA, 629 bp, Homo sapiens
aggggtaccccaagtcggacagaaggcccatgaggggaagtgaggtttcagggagtagaggtgaggcacctgtggcaggtgcccatctgtaaactgtttatccatgtgagccctgatgttcaccgggggctggatgtccccctggggctagatgttcgcctggagcctggtgtctacctggggcctgatatccaggagaggcttagttatccatctatggccatctggagccagatgcccacctgaggtctggtgtacacctaaggcctgatatctacctggggcttgrgtgttcatgtgggatctgatgtctacctaagaccgtgtgttcacccggagcctgggtgaccatctgggttatcatgttcagctggggcccagagttcagctagggactgggtcaaccttctgcttgttgcacacctggggactaggtacccacctgggctccggtgttcactggggcctgatgtctgtctggggccttgtatttacctaggaccaatgcatccacctgaggtctgagtgctctcatggagcctggagttttcctggggcctggggtctgccttaggcttaagtgtacatttgtggcctcatgtccaccttgggatggatgtccacctggg

SEQ ID NO: 28477 - DNA, 629 bp, Homo sapiens
aggggtaccccaagtcggacagaaggcccatgaggggaagtgaggtttcagggagtagaggtgaggcacctgtggcaggtgcccatctgtaaactgtttatccatgtgagccctgatgttcaccgggggctggatgtccccctggggctagatgttcgcctggagcctggtgtctacctggggcctgatatccaggagaggcttagttatccatctatggccatctggagccagatgcccacctgaggtctggtgtacacctaaggcctgatatctacctggggcttgagtgttcatgtgggayctgatgtctacctaagaccgtgtgttcacccggagcctgggtgaccatctgggttatcatgttcagctggggcccagagttcagctagggactgggtcaaccttctgcttgttgcacacctggggactaggtacccacctgggctccggtgttcactggggcctgatgtctgtctggggccttgtatttacctaggaccaatgcatccacctgaggtctgagtgctctcatggagcctggagttttcctggggcctggggtctgccttaggcttaagtgtacatttgtggcctcatgtccaccttgggatggatgtccacctggg

SEQ ID NO: 28478 - DNA, 629 bp, Homo sapiens
aggggtaccccaagtcggacagaaggcccatgaggggaagtgaggtttcagggagtagaggtgaggcacctgtggcaggtgcccatctgtaaactgtttatccatgtgagccctgatgttcaccgggggctggatgtccccctggggctagatgttcgcctggagcctggtgtctacctggggcctgatatccaggagaggcttagttatccatctatggccatctggagccagatgcccacctgaggtctggtgtacacctaaggcctgatatctacctggggcttgagtgttcatgtgggatctgatgtctacctaagaccgtgtgttcacccggagcctgggtgaccatctgggttatcatgttcagctggggcccagagttcagctagggactgggtcaaccttctgcttgttgcacacctggggactaggtacmcacctgggctccggtgttcactggggcctgatgtctgtctggggccttgtatttacctaggaccaatgcatccacctgaggtctgagtgctctcatggagcctggagttttcctggggcctggggtctgccttaggcttaagtgtacatttgtggcctcatgtccaccttgggatggatgtccacctggg

SEQ ID NO: 28479 - DNA, 629 bp, Homo sapiens
aggggtaccccaagtcggacagaaggcccatgaggggaagtgaggtttcagggagtagaggtgaggcacctgtggcaggtgcccatctgtaaactgtttatccatgtgagccctgatgttcaccgggggctggatgtccccctggggctagatgttcgcctggagcctggtgtctacctggggcctgatatccaggagaggcttagttatccatctatggccatctggagccagatgcccacctgaggtctggtgtacacctaaggcctgatatctacctggggcttgagtgttcatgtgggatctgatgtctacctaagaccgtgtgttcacccggagcctgggtgaccatctgggttatcatgttcagctggggcccagagttcagctagggactgggtcaaccttctgcttgttgcacacctggggactaggtacccacctgggctccggtgttcactggggcctgatgtctgtctggggccttgtatttacctaggaccaatgcatccacctgaggtctgagtgctctmatggagcctggagttttcctggggcctggggtctgccttaggcttaagtgtacatttgtggcctcatgtccaccttgggatggatgtccacctggg

SEQ ID NO: 28480 - DNA, 2192 bp, Homo sapiens
ggatgatttaaacaaaccaacatttggaacattaaattggatattaaaattaaaagctaacatgaagtcaattctgaaattggctaattgctgtcctctgcaggaagagggctttcacatgcccgttcacagtgtctgagggagactgccatccagggctgcaggctggacaggcgacccagctgcacttcctgcctagattgctctttgtttgatgctgccccatttttgttaagcgtggcagagtccatttcatcagctactgcctgcccagccccaatcctaatgcctcttcattgtcttctggataaaatacaaactccacaaactgatgttcaaagctctcaacaatcaggtcacaccctgtccacatatattaattccaactcaaattagcaaagatgtactcagcctaacagttgagggtgcttgactgcataaacttccccttaaaacccgactgtctagcaggagagacagatatataaaccaaacttgtaatacagtgtggaatggcatttataatggaactcaaataatggaataacttattattttgtattggctgagtggctacagaaaatcctaaaaggtcttggagtcacctgagctggctcttggagtagaaagaggaattttgccagtggtgaaactaaggaaggctgttgagaaaacagtgaaaaggtatgaatgaacattttattttcagagaacctagagcaatccagagctgctggagaataactgggatatttcactgcaaaactctaatggcaygaatggcattgccattcatatagaaatacaatgtgaatggcaccccatcctaccatgctgcacagcactggccctcagtcatcaatgtgggactgactgaacacatgattagaaaaatgggcttgggctaggagggactttgaattctgtaagatttatactttattctgtgaaaattaagagagctatcaggaattttaaagccttggagtgactccatcacgtatgagtattcaaagagatgvtccagagatatgtcacaacttatcccaggcaccaagttaaggtcattgaagatagtcgtgttaaatagtttctgggcccagggatatgtcacaatggctcctgtgagcagagatcaggcagcataatcacataaccggtgtgctggacacagcgataagccactctttcatctctgggcatgacccgggcaagaaagaagagccacagcatttaggtgcttgctgcagaggtaagtaacaatctctcttatgggcaaaactcgggtaagacaggagagtcaaatctccaaggtgattcatgtagaaatttgtcacaagaaactttttaggvgggcccatgttggatcttcttatcttccagaagttaggtccagggatacgtcagaatacccaaaatacacagggctcagtcaataaaggagagtcacatcacccaggtgcttggtctagacatatgtcacatctcttttatggggaaagctcaggtaaaaaaggaaggtcacatcaaatagttgatatacccagagatatgtcactttgccttctgcttgaagtgtctaggccaaagactcacatcacctcggtgttaggcccgtgttcatatataaacattcaaccagagttgaaatggtggcccacatctaaactcagctcataggcaagggaggactctcctatcctgacctagttaattgtaatgatgttgactctcacaccgggcttaatgctacaagtacgatcatgggtccctaccattaggaaggtctcaaagttgattacgactctcatgcatagtgtatagggccattgggtagtacacagagcgtgctaactgggccgagcacacaggtgagattgtgacactcatatgcacacccagccaacagtaactattgtcatcctctcacaggaacacaggtcattctgcagaggaattgagacgctcatgcacaaatccagtctggtgttgagagggttattcgtgagcttagacccaacatacaggaggtgttgaatgtcatgcctacaactgagacagttgtgggattgttaatctaattcctggaccattctgcagctttcatggtgaaatttgccggtgcctagcacctgagtgaattgatggtctcacatggacccagcccacagatgggatattaacatattgat

SEQ ID NO: 28481 - DNA, 1170 bp, Homo sapiens
tccagagatatgtcacaacttatcccaggcaccaagttaaggtcattgaagatagtcgtgttaaatagtttctgggcccagggatatgtcacaatggctcctgtgagcagagatcaggcagcataatcacataaccggtgtgctggacacagcgataagccactctttcatctctgggcatgacccgggcaagaaagaagagccacagcatttaggtgcttgctgcagaggtaagtaacaatctctcttatgggcaaaactcgggtaagacaggagagtcaaatctccaaggtgattcatgtagaaatttgtcacaagaaactttttaggggggcccatgttggatcttcttatcttccagaagttaggtccagggatacgtcagaatacccaaaatacacagggctcagtcaataaaggagagtcacatcacccaggtgcttggtctagacatatgtcacatctcttttatggggaaagctcaggtaaaaaaggaaggtcacatcaaatagttgatatacccagagatatgtcactttgccttctgcttgaagtgtctaggccaaagactcacatcacctcggtgttaggcccgtgttcatatataaacattcaaccagagttgaaatggtggcccacatctaaactcagctcataggcaagggaggactctcctatcctgacctagttaattgtaatgatgttgactctcayaccgggcttaatgctacaagtacgatcatgggtccctaccattaggaaggtctcaaagttgattacgactctcatgcatagtgtatagggccattgggtagtacacagagcgtgctaactgggccgagcacacaggtgagattgtgacactcatatgcacacccagccaacagtaactattgtcatcctctcacaggaacacaggtcattctgcagaggaattgagacgctcatgcacaaatccagtctggtgttgagagggttattcgtgagcttagacccaacatacaggaggtgttgaatgtcatgcctacaactgagacagttgtgggattgttaatctaattcctggaccattctgcagctttcatggtgaaatttgccggtgcctagcacctgagtgaattgatggtctcacatggacccagcccacagatgggatattaacatattgat

SEQ ID NO: 28482 - DNA, 1170 bp, Homo sapiens
tccagagatatgtcacaacttatcccaggcaccaagttaaggtcattgaagatagtcgtgttaaatagtttctgggcccagggatatgtcacaatggctcctgtgagcagagatcaggcagcataatcacataaccggtgtgctggacacagcgataagccactctttcatctctgggcatgacccgggcaagaaagaagagccacagcatttaggtgcttgctgcagaggtaagtaacaatctctcttatgggcaaaactcgggtaagacaggagagtcaaatctccaaggtgattcatgtagaaatttgtcacaagaaactttttaggggggcccatgttggatcttcttatcttccagaagttaggtccagggatacgtcagaatacccaaaatacacagggctcagtcaataaaggagagtcacatcacccaggtgcttggtctagacatatgtcacatctcttttatggggaaagctcaggtaaaaaaggaaggtcacatcaaatagttgatatacccagagatatgtcactttgccttctgcttgaagtgtctaggccaaagactcacatcacctcggtgttaggcccgtgttcatatataaacattcaaccagagttgaaatggtggcccacatctaaactcagctcataggcaagggaggactctcctatcctgacctagttaattgtaatgatgttgactctcacaccgggcttaatgctacaagtacgatcatgggtccctaccattaggaaggtctcaaagttgattacgactctcatgcatagtgtatagggccattgggtagtacacagagcgtgctaactgggccgagcacacaggtgagattgtgacactcwtatgcacacccagccaacagtaactattgtcatcctctcacaggaacacaggtcattctgcagaggaattgagacgctcatgcacaaatccagtctggtgttgagagggttattcgtgagcttagacccaacatacaggaggtgttgaatgtcatgcctacaactgagacagttgtgggattgttaatctaattcctggaccattctgcagctttcatggtgaaatttgccggtgcctagcacctgagtgaattgatggtctcacatggacccagcccacagatgggatattaacatattgat

SEQ ID NO: 28483 - DNA, 1170 bp, Homo sapiens
tccagagatatgtcacaacttatcccaggcaccaagttaaggtcattgaagatagtcgtgttaaatagtttctgggcccagggatatgtcacaatggctcctgtgagcagagatcaggcagcataatcacataaccggtgtgctggacacagcgataagccactctttcatctctgggcatgacccgggcaagaaagaagagccacagcatttaggtgcttgctgcagaggtaagtaacaatctctcttatgggcaaaactcgggtaagacaggagagtcaaatctccaaggtgattcatgtagaaatttgtcacaagaaactttttaggggggcccatgttggatcttcttatcttccagaagttaggtccagggatacgtcagaatacccaaaatacacagggctcagtcaataaaggagagtcacatcacccaggtgcttggtctagacatatgtcacatctcttttatggggaaagctcaggtaaaaaaggaaggtcacatcaaatagttgatatacccagagatatgtcactttgccttctgcttgaagtgtctaggccaaagactcacatcacctcggtgttaggcccgtgttcatatataaacattcaaccagagttgaaatggtggcccacatctaaactcagctcataggcaagggaggactctcctatcctgacctagttaattgtaatgatgttgactctcacaccgggcttaatgctacaagtacgatcatgggtccctaccattaggaaggtctcaaagttgattacgactctcatgcatagtgtatagggccattgggtagtacacagagcgtgctaactgggccgagcacacaggtgagattgtgacactcatatgcacacccagccaacagtaactattgtcatcctctcacaggaacacaggtcattctgcagaggaattgagackctcatgcacaaatccagtctggtgttgagagggttattcgtgagcttagacccaacatacaggaggtgttgaatgtcatgcctacaactgagacagttgtgggattgttaatctaattcctggaccattctgcagctttcatggtgaaatttgccggtgcctagcacctgagtgaattgatggtctcacatggacccagcccacagatgggatattaacatattgat

SEQ ID NO: 28484 - DNA, 191 bp, Homo sapiens
ctgaacgcctcaccatccccttccaggtacaaaaagccaaggactgggaggcctccccstcctatggctgtgaatgatctattgctgaaagcgcaaacaggagatgtggggagagcacatcctgctcaggagtggaggcagaaggtgacttccactgcatgcatccagctgagcgctggctgcccaaggac

SEQ ID NO: 28485 - DNA, 1195 bp, Homo sapiens
gagaggagcccctgcatggctcccccattgaggtgagaccccccgcacctgccccatgaccctggtgaaaccaggtttgtgtaaccacagagctcccaattatgccagctcaacccagaccccaggggtcgtcgcctgaggataatttggggccaaaacccatgacaaatggctacacagtcactagaccccaaccccggaagggacaggcgatgaaatggagaaaccagatttggagacgcgaagcaggcacatttggatttgaactttgattctgaatcctcgagmaagtctatgatctcagtttcttcacctgtaagacagggataattaaactaactccgaagggatgctgggagagctgcatgagactcaaccgctctgcagcaggtccctaactctcttcctggcttctggccctaaggagaggcccaataaataggtgttggttgactgaatgaatgagcaaatgtcattcaaagtagagacttcaggaaaagcacgtgacgtgcagctttgcaacaaatgacacagtcatccacaaatagggcaactgtcccacagctgaagtcaacatcttgatgagcaagaggcttgaggggcgttcccgatgcaccatcacgcctgtcactttaaatactagagacaggcacaaatgcctttattgatccagaaggttttaatggctccctgtgatcatttctaagtgaatttcacttctgccagtgaaagccttgccatgaggaaggcaattacagatgctgtttcctaagtggctcccacaggctgacctgtgcgcaggaggctaggactccccaccttccgtgggacagcactatgacaagggtcataggacggccatgtgggggacacagcaggtaccctcagggttgccccagattttcttgagagtgagaggacaccttaaggcagccataaaacagaaagtgctgtgcccctttcccagtgacccttgctgggaaggccaggacatttgtttcctgatagatcaggggctcagcaaagatgtgtggcaggaggcttgctaggaagacagctgattcctggaataacaggtgtctagaaagcccaacacccagctattagagagcaggtgcccacaggacagaggtgaactaacccccacggcagctcattgctgctgcccaaagggccagtgcatggctaagttccg

SEQ ID NO: 28486 - DNA, 1195 bp, Homo sapiens
gagaggagcccctgcatggctcccccattgaggtgagaccccccgcacctgccccatgaccctggtgaaaccaggtttgtgtaaccacagagctcccaattatgccagctcaacccagaccccaggggtcgtcgcctgaggataatttggggccaaaacccatgacaaatggctacacagtcactagaccccaaccccggaagggacaggcgatgaaatggagaaaccagatttggagacgcgaagcaggcacatttggatttgaactttgattctgaatcctcgagaaagtctatgatctcagtttcttcacctgtaagacagggataattaaactaactccgaagggatgctgggagagctgcatgagactcaaccgctctgcagcaggtccctaactctcttcctggcttctggccctaaggagaggcccaataaataggtgttggttgactgaatgaatgagcaaatgtcattcaaagtagagacttcaggaaaagcacgtgacgtgcagctttgcaacaaatgacacagtcatccacaaatagggcaactgtcccacagctgaagtcaacatcttgatgagcaagaggcttgaggggcgttcccgatgcaccatcacgcctgtcactttaaatactagagacaggcacaaatgcctttattgatccagaaggttttaatggctccctgtgatcatttctaagtgaatttcacttctgccagtgaaagccttgccatgaggaaggcaattacagatgctgtttcctaagtggctcccacaggctgacctgtgcgcaggaggctaggactccccaccttccgtgggacagcactatgacaagggtcataggacggccatgtgggggacacagcaggtaccctcagggttgccccagattttcttgagagtgagaggacaccttaaggcagccataaaacagaaagtgctgtgcccctttcccagtgaccctygctgggaaggccaggacatttgtttcctgatagatcaggggctcagcaaagatgtgtggcaggaggcttgctaggaagacagctgattcctggaataacaggtgtctagaaagcccaacacccagctattagagagcaggtgcccacaggacagaggtgaactaacccccacggcagctcattgctgctgcccaaagggccagtgcatggctaagttccg

SEQ ID NO: 28487 - DNA, 550 bp, Homo sapiens
taagtggatgaaatttttcaacagaacatatcagcctttttcatatgttaatgtgcgtgtgattttcctgcaggaaaaaatcagacataacattttccaaaatatctgatcaggaaactctgtagacccagactgccatttatcctcttgtggagctagcattcctcagaacacagataggaaatgctggtctagtaaggacaactagtggactggcttgagtttttagaaaatacggtttgttgtttgtttgtttgtttgtttgttcatttgtttttgtttgtttgttgaggaagttggaagacaagtgttataagaattgcccagtgatttttctaaattcaagatatgattcctgccctctgtwagcacatgagaaatgaaagagatggcacagatgtgttcttggtatggatggccggtttaacaaaagtacctatgggtaaaaatctacttttggccatgatggagtaaactggtattggatgtgccttccaccacaagcaatgattaaacaggacaaaatatctgaagcaattattttcaggca

SEQ ID NO: 28488 - DNA, 1137 bp, Homo sapiens
cagaggcttccacatcaccagatgaccctcaatgggtgctcaggttccttctgcaccagacccccattaaccccgactcccagctccccagcacatcttcctccaaggtttttgctcttagcctttccgagctctatctgccaccgcaacacagaggctgtcagtgctgtaactgctgtcttcatacgcttgaaatctcactcccaaaccatccctgcagccctggcccctttgggaaccccagtgtacatggtttcccggcttttggaggacacagtggttgcgttgtctggcrtctattcagagttgggggagagcccgcagggacgtcctattgggtcctttctctgttactgtctgttcttacttctcccaccacaccctgtctcctgttggggcgaataccttctctaagggcagcctggtggcaggaatctgcagtaggacacagggcccccaggccatggctagagaggcctatgaggcaaagtgtcctctttcctgccgcagcgtgccccttgtggtcaggaagcctcgaggtctagcttcgttccctcctgctgtctcttcccatcctcccctatgtggaggaaggttttatgagtgggggcttgttggcaccttctcaaaaggagagggcaggcatcctgagctcctggatgccggcagagcctagggtaggatagttcagatgcctgtctggggagagggcatgttccaaaggtggagttctgtgtgggtgggcttggtacctgggcccacaggctgcggggatggacactgggctatgcgggggcaggggatgggtgacagggccacagtgagtccacctgggactctgttgtgctgtcaacggtggacagccccacgtgggcctgctcacctgtattgacatgtcagctcaggtgtcccattaggttaagctgtgagcccagaggctttggtcccagggccaccctggtcaccaggctgtgaggacaggagcaactgttgccccaccctgctttgcctctggaacgagtcctggggttggattgggggtgctgggcctggcactctgtgggagcttggacttaaaacatgttgctggctgggggttggggataagaggcaggggaaggagaaagataggcactg

SEQ ID NO: 28489 - DNA, 1137 bp, Homo sapiens
cagaggcttccacatcaccagatgaccctcaatgggtgctcaggttccttctgcaccagacccccattaaccccgactcccagctccccagcacatcttcctccaaggtttttgctcttagcctttccgagctctatctgccaccgcaacacagaggctgtcagtgctgtaactgctgtcttcatacgcttgaaatctcactcccaaaccatccctgcagccctggcccctttgggaaccccagtgtacatggtttcccggcttttggaggacacagtggttgcgttgtctggcatctattcagagttgggggagagcccgcagggacgtcctattgggtcctttctctgttactgtctgttcttacttctcccaccacaccctgtctcctgttggggcgaataccttctctaagggcagcctggtggcaggaatctgcagtaggacacagggcccccaggccatggctagagaggcctatgaggcaaagtgtcctctttcctgccgcagcgtgccccttgtggtcaggaagcctcgaggtctagcttcgttccctcctgctgtctcttcccatcctcccctatgtggaggaaggttttatgagtgggggcttgttggcaccttctcaaaaggagagggcaggcatcctgagctcctggatgcyggcagagcctagggtaggatagttcagatgcctgtctggggagagggcatgttccaaaggtggagttctgtgtgggtgggcttggtacctgggcccacaggctgcggggatggacactgggctatgcgggggcaggggatgggtgacagggccacagtgagtccacctgggactctgttgtgctgtcaacggtggacagccccacgtgggcctgctcacctgtattgacatgtcagctcaggtgtcccattaggttaagctgtgagcccagaggctttggtcccagggccaccctggtcaccaggctgtgaggacaggagcaactgttgccccaccctgctttgcctctggaacgagtcctggggttggattgggggtgctgggcctggcactctgtgggagcttggacttaaaacatgttgctggctgggggttggggataagaggcaggggaaggagaaagataggcactg

SEQ ID NO: 28490 - DNA, 781 bp, Homo sapiens
gcttggtgctgtcctcaagatagtgagtaagttctcttgatatctggttgcttaaaagtgtgtggccctcccccttctctctcttgcttccactttaaccatgtgatgcctgctcccacttggcctttcatcatgagtaaaagctccctgaggcctcaccagaagccaagcagatgtgggcaccatgcttcctgcacagcctgcagaactgtgagccaattaaacctctttcctttaaacatttcgcagccttaagaatgtctttatattgatgtgaaactgctgaatacacatgaccggggctgggtgtgctggctcagatctctcttcctctttttataaagccttcagttccactcccatgacaacctcatcaatccattaaactattaattcactcatctatgaatgtcttaatccattcatgagggcagaggtgtcacgacccaatcaccgcttaaaggccctacccctccatcctgctacgttgagaattacatttcaacacgagtttcggaggtgagaaacacgcagaccacagcaccaagtgtccaggaagagcaagcccagccagaagcctttgggcaggcagcagccacagggccrtctgctagaggatcactcctggggtggagacacctggaagctcaggtatgcctcttgtttcccctaaattaaacaactggtttatttgacctgatttgcagagatggatctgcaggcccaaggtcaggatgactgagagctctggttactgtggattttaggtaaacaggatccc

SEQ ID NO: 28491 - DNA, 495 bp, Homo sapiens
gatgcgtttataatgatgccactttgcaagacaaatctggccttggtgggctgaagatgaggaggaggaggccggggtgagagggaggaggctgtggtggcatccasacaagggtgccttcattctccaaagccctaggagatcttccagatttctccaggcagcaggaaactgggggacaggtctttacttcccaccccatcatccaagaggctgtacaggttaagattttcctcttcgttctttcatttcattccctgtgaaaggtgaataacaggaactgtgagtggcagataagggaggaggtcctggcaggtgagacactgaagaccagacactgtgaggggccgatggatgtgctgagggaagaaggtggggaagtgccctcaaggatgctggcttccaagaaagtcccatggacaggaggaagagctctgaggtacaaatctgcacactgagtttcaagggaggactctcaagataatgctcttgcca

SEQ ID NO: 28492 - DNA, 517 bp, Homo sapiens
tcacataaaatagtatctccattatatttcttgtaaaacgaaaaatatattactaaatgtcttaggggaagcaaatttctctttttgtagcaaggttttaatttgaataagacacagagatyggggtaagaattgagtcatctgcttctctgatccttctttgtggttagaggctctggtaattatcaagaataaaaaatccccatcaaaggaacagatgagagtttcacaaaagttgaaagggtttgttagatagttcctgctaatcactacaaaggtttgttataagatataagaaataaatacttggtggcatttgtgacatactaagagttcttcattatttctacatcttaaaatatacaatatttactttagatcatgaaaataaaacctacacatggaaaatatatatacttcatccttctggttggaatgagaggttttttaacttgctatccatgtgtagaaacacgctggatatcctgacatatgatcaccaactctgcctttcctc

SEQ ID NO: 28493 - DNA, 498 bp, Homo sapiens
actgcccctaccctactctcaagcctggtgggctaagagatttgtctgccccatggggtgcacacmcatcactagggagaggtaatgggggagatgtcccagaagtgtgggaccgccgacagtcaggggcctgcgagaaaaggagggccttctaggaggcgccccgaggccagagaaggagagggtgccccaggcccgccttggaaagttgacgctgtccccgaggtgtggcgctggcgactcccaaccaaatcgccaagcgctctgtgtgctatctgccctgcacacgcgctaccatactcccggctaccaactagagaggggtggcctggagggcgactgccaagagcctgttcccctggaaacaggcaacccccatcctgggcaaggggggcacggacacccccacccccagcctggcgaccatgcatagggaggcccttcacgggtgagcgaggtggattggagtggagcaggtggcccagggggtccctgagt

SEQ ID NO: 28494 - DNA, 1135 bp, Homo sapiens
tccacagtcatgtcagagcagttagagcaggtttccacataaataacttcagaggacagcagtcagccagtctacctctttttatgcccttggcattctttatacctgaaactggttcagagaccatggggcctcgaaacccatccaggctcacacatgtgcaataagtagctttgagaatcttaattcccctcattttccttctgccataatgcttagggaggcacagagttcaccgctgcatcctcaccctgctaagacccaaattggcatcttcaaattctgtatataggtcctaaaaaatgtaagtttcatctgagaaatgcaagtaactttaattatcaggcccatagagacattaaaaggagattataatcatgtcctgctcccctctttgagctacgtatttatttatatatttatttatttatttatttatttttttgagatggagtctcactctgttgcccaggctgcagtgcagtggtgtgatcttggctcactgcaacttccgcctcctgggttcaagtgattttcctgtctcagcctcctgagtagttgggattacaggtgcgtgccaccacgcctgactaatttttgtatttttaatagagacggggttwcaccatgttggccaggctggtctcaaactgctgacctcaggtgatctgcccacctcagtctcccaaagtgctgggattacaggtgtgagccactgcacctgacctatgtattcatatcttgaaactgcttgcttttgctacaaatgactatacattaactaataataccacacctgaaatcgtagcctacaccctatataagccaatcactaatcaatattatttctgtaaatcaataagatgtcctgacaaataactttgtgacagcccatgtcccgtcctcaatttttgcgtttaaaaatccacttgtaactgctgctagtcaaagtgcatattcagggaaacttgaatctatgctcccaggttgcaatcctcaaacttggcccaaataaactctctacttgtattacttttgcctcatcttcttccttagaatgtgttacaggagtctccatgagggaatctctcctctgcttttactccacttgctgtaaccccccaaaatgcagaga

SEQ ID NO: 28495 - DNA, 1122 bp, Homo sapiens
tatcctggcctgcccctgttcgtggcccaagcaaaaagattatgattttattttctattgtgaaattacagaaatagatatatgtagatctgtagaaagtacgcttttatagtactaacaattttctgtagttacaattttcatggtgtctactggttgagagatgataggacttattcatggaatttacactctggtggtttgataaatatataacatgttgaaarggagtttcgtggaaaagtaaacgttattcatcagggttttagtttctcttatatttgctttcagctgagaatattgtaagttgtttgtttgatttttatttattttttcatttatttggcttttttctagatgctttacctaatctaatccaaataagaacagcacttaacaactctaaatatggcatagggggaaatatgtatatccttttctttatattatcttttgtttcacatgctgagggctgtggaaggcaaaatgtggtgaggtgctattttatagcatggttaatgcttatcagtaattttttccctctgaccttctgcctcagacaattaattttcttgaactgctcacacactggcagaacatggaggggggataatgttagtactagtgaatataatcttggaagaaaagctgtgcaattattcaaagacctaatcttatctcttgtttcatttttatatcacaagtctacatttaaaagtattagatatcctgttctgctgtcccacaccttcaaacctcagtaaataaatgctgttaagtgccaccaggagtgaaagagcttgtaatgagaagtgtgaggagatatgtgctccattcatcattctgttcaggccaatattgaggctcttgttatcagcaggattcgtggcgatgtcatcacggctggcataaatcttctgtcagtgtgggtcggactgatgccctattaaaaccctgctttcacctaatcacagaatgacctttcgatgtctttaattaacctctgacctgaaccatgccaatgtcttgttggtaggtaaatctatggcatgacatttgcttatgacactgcatttgtcttgctttaatcatcatagctttcagattatggcttgaatgaaa

SEQ ID NO: 28496 - DNA, 1122 bp, Homo sapiens
tatcctggcctgcccctgttcgtggcccaagcaaaaagattatgattttattttctattgtgaaattacagaaatagatatatgtagatctgtagaaagtacgcttttatagtactaacaattttctgtagttacaattttcatggtgtctactggttgagagatgataggacttattcatggaatttacactctggtggtttgataaatatataacatgttgaaagggagtttcgtggaaaagtaaacgttattcatcagggttttagtttctcttatatttgctttcagctgagaatattgtaagttgtttgtttgatttttatttattttttcatttatttggcttttttctagatgctttacctaatctaatccaaataagaacagcacttaacaactctaaatatggcatagggggaaatatgtatatccttttctttatattatcttttgtttcacatgctgagggctgtggaaggcaaaatgtggtgaggtgctattttatagcrtggttaatgcttatcagtaattttttccctctgaccttctgcctcagacaattaattttcttgaactgctcacacactggcagaacatggaggggggataatgttagtactagtgaatataatcttggaagaaaagctgtgcaattattcaaagacctaatcttatctcttgtttcatttttatatcacaagtctacatttaaaagtattagatatcctgttctgctgtcccacaccttcaaacctcagtaaataaatgctgttaagtgccaccaggagtgaaagagcttgtaatgagaagtgtgaggagatatgtgctccattcatcattctgttcaggccaatattgaggctcttgttatcagcaggattcgtggcgatgtcatcacggctggcataaatcttctgtcagtgtgggtcggactgatgccctattaaaaccctgctttcacctaatcacagaatgacctttcgatgtctttaattaacctctgacctgaaccatgccaatgtcttgttggtaggtaaatctatggcatgacatttgcttatgacactgcatttgtcttgctttaatcatcatagctttcagattatggcttgaatgaaa

SEQ ID NO: 28497 - DNA, 1108 bp, Homo sapiens
gatccatcccagcacatatggccttttgatcctctgaggccaatttaacttctcactttccttggcttaatcagtacaaagcatcactaagcctgctaccaaccttgaatatccttcatgcttccccttttattttcatatatgcatggcactatctttctgttaaatatacatatgtgtgtgtcttttttggtcatattaattcaatcggtgaataaccacaaattgagctagtaatatagaccaggctgtgatggaaggtatggcagattttattcttcgaagctcagctcaaagattattacctttggaaaatttctttccaggtctgctattctttggaatggtagtgttcctgtacccagagtttataggctgataagaaaagttaaatgacctccttattccatccagaaagtgatggagaatatttcctgcattaccctaaccttctcctctaatgctgagatagtgatatcatgtagaaatttttctagatatatactaggagaatgggggaaaaggaaatcaaaacttcttgacagcccaaagaaaaatatcttcctaccagagcagctgttgctaagtttagttaatgtgtgtcctgtcactgaggaaataggagctttcctttaaatgtctttttgttgttgtttgattgcttgcccattcgagtactgattagcttgttttacaagtgcataatttgcaaggtgtgtgtgtgtgtgtccatgtgtacatgcacrtgtgcatgtgtgtgtccatgtgtacatgcacgtgtgcatgtgtgtgtgcacatgtgcttggggggggaacggggaaagacattgtcattctcatagttgtgactctagctaggctccttcagtgcccttactacatttctccactggtattggaataatattatggatagtaatacaatagagtgtagagagaatctagcctcttgtctgtcctgtcttttaagcatcaagtgtcttttcgtggttcccctagagaagaaaatgtaaatcctgagaccactccatgacagtcttgcaaaggtcaaacacaggttcagtaaagacatcctagagagggacactcacttcaaaatgaaggatcc

SEQ ID NO: 28498 - DNA, 1108 bp, Homo sapiens
gatccatcccagcacatatggccttttgatcctctgaggccaatttaacttctcactttccttggcttaatcagtacaaagcatcactaagcctgctaccaaccttgaatatccttcatgcttccccttttattttcatatatgcatggcactatctttctgttaaatatacatatgtgtgtgtcttttttggtcatattaattcaatcggtgaataaccacaaattgagctagtaatatagaccaggctgtgatggaaggtatggcagattttattcttcgaagctcagctcaaagattattacctttggaaaatttctttccaggtctgctattctttggaatggtagtgttcctgtacccagagtttataggctgataagaaaagttaaatgacctccttattccatccagaaagtgatggagaatatttcctgcattaccctaaccttctcctctaatgctgagatagtgatatcatgtagaaatttttctagatatatactaggagaatgggggaaaaggaaatcaaaacttcttgacagcccaaagaaaaatatcttcctaccagagcagctgttgctaagtttagttaatgtgtgtcctgtcactgaggaaataggagctttcctttaaatgtctttttgttgttgtttgattgcttgcccattcgagtactgattagcttgttttacaagtgcataatttgcaaggtgtgtgtgtgtgtgtccatgtgtacatgcacgtgtgcatgtgtgtgtccatgtgtacatgcacgtgtgcatgtgtgtgtgcacatgtgcttggggggggaacggggaaagacattgtcattctcatagttgtgactctagctaggctccttcagtgcccttactacatttctccactggtattggaataatattatggatagtaatacaatagagtgtagagagaatctagcctcttgtctgtcctgtcttttaagcatcaagtgtcttttcgtggttcccctagagaagaaaatgtaaatcctgagaccactccatgayagtcttgcaaaggtcaaacacaggttcagtaaagacatcctagagagggacactcacttcaaaatgaaggatcc

SEQ ID NO: 28499 - DNA, 948 bp, Homo sapiens
tcagtagtgtctttgcaggaccacaggtaagccattatacacaaacttatttggatatggtgatcatagatttcctatctaaatttgatataaggtcttatcaaaggaagtactgtattacctttaagagcttgggttctggaagtcagagagtgaagtttaattctggctctgttctgttaccttgggcaaacttcttaacctctctggtttcagttcctttaccgataaaatgtaacatgggggttaatgcttacttaatactgcttttgtgatgaataaataaataaagtagctcacataatctctattatgtagcaaatgcttccccaaaaaaaatgcgattctcaaacttgaccttatctccatcctattcttttatctgtttttctttttgttttggttgacatggctttaatgtttagttgarataatttttaggaattatgaaatttgcctaggtagaaaatatttataatgtttcttatttagggtttcttcagtggaaattttaagaattctgtcactgcagcttagagagaattattctttgttagtatgttgctctgcagtttgcagctaagtgggactgaatatagaagaaaagtaagacatcttggatgtttggaaatccaaatatttccctaaagttagcttgagttttgctggaggcagcttattgagaaagccatatgactgacagagtaggcacaggccctccccacagagggcaattatctttccaggttgccttcaccagaagcagcctagttaactgacctgctgaacctgccattttaacaatcagatccccgaagaaaaggacaaattcttgaaaataacaaagaatgttaatagcagatgaacaagttttctcttgcatttaaatgtactacatgataaacccaggatacaaggatgtgtcaagaaataaatcagaattaacta

SEQ ID NO: 28500 - DNA, 1012 bp, Homo sapiens
actgggattgcaatccctgcaatcagagccccaaatgtcaaacccaggtggaatggagtgtgggatattaaaaatatctacacccacaggaactgaattagactgagaaaataatttcataatctaaactaattcatttagaatttattgagcaaatgaattgaaagtgactaaaaatatcattaaattatagccacagctcagaaattaccatcctattctgtctatgttttgtttttagtatctttaggatcaaaatgagcttacctgagctgccccacatgagctgcctcacctgtaggatttagtctttatttttttcctgcagatctcagcccatcctagaaagtacatttgtctattctagcaagaatggataacaagctgatctgatcctccaaaagaaggcagaatcattatgactatgaccaagaattttggtgccaggcagaaacaggttccccagagaatgtgtaaatttagttaacctctctgaccttcaggtttcttatttgtaaaatgaagacaatattatctacctcttaagagttcttgtgagtacttaagaagataatatctttaaagtgttatatcaatgtatggcacatcataaaggtgtctgtaagtcattatttatagcataatgggcaagttgtacagcctagaaggcaaaagcctggcaatacataaataaataaagcaagctgaaaaaatgcaaaaacctatagcatttcatggccctcaataaagtgactagctcattgataaatgtttgacctgagccaggccaaataattcaaacctaggacttttgggcttggattattttgctggagttcttaggagaatagaactcctttggtgttactacactgtgagaataggaatctgagtgtgcaggaggccattctgcygcctcatggaaatgaggccaaaacagaagagagcagaacataagagataaaattgaaaaaagaacaagatagcatcctgatggcctcagttgggctct

SEQ ID NO: 28501 - DNA, 549 bp, Homo sapiens
tataaattacctagtctcaagtrtttatagcaatgcaagaatggactaatagagtttgtgatatagcccacactattttctctcactgtggctagaagagccacataatgagataaatgcaatccctaaatttaaaacataatgaaatcataatcttgtgatattcactttattacttcaaaagaaaagaaagaaagtctcactaaaatgcttgacttgaccattagtttgtggaattgaaacaaaggtagagtcttattaaaataaacattaccatgaaaagcatatttcaccaaaactaagaaataatagtgatattttgcatacataacttcaaggtagtcaaaagtacaatgaaaatattttcaaccctcactccaaattcaattttctttgtcccactactatttaattgcctacatggcctggaattcaactgtgaataagagcagctaaaatgtctagtagatatatttgtatttcttctcagaaagtttgctcaagaaatgttggcaaaactattccttctgtagggtttaggtcagtgat

SEQ ID NO: 28502 - DNA, 549 bp, Homo sapiens
tataaattacctagtctcaagtatttatagcaatgcaagaatggactaatagagtttgtgatatagcccacrctattttctctcactgtggctagaagagccacataatgagataaatgcaatccctaaatttaaaacataatgaaatcataatcttgtgatattcactttattacttcaaaagaaaagaaagaaagtctcactaaaatgcttgacttgaccattagtttgtggaattgaaacaaaggtagagtcttattaaaataaacattaccatgaaaagcatatttcaccaaaactaagaaataatagtgatattttgcatacataacttcaaggtagtcaaaagtacaatgaaaatattttcaaccctcactccaaattcaattttctttgtcccactactatttaattgcctacatggcctggaattcaactgtgaataagagcagctaaaatgtctagtagatatatttgtatttcttctcagaaagtttgctcaagaaatgttggcaaaactattccttctgtagggtttaggtcagtgat

SEQ ID NO: 28503 - DNA, 580 bp, Homo sapiens
tttattttttttcctgtagaatatattctaaatactgatgtgtatgctaaatattgtgctttaaaaccatttgaaatgatttttttaagttgagatatgtcaccaacttgaaaaaaattaggtttatttgttttggcttgtttttaaattccagtttttgcctttttaaaattaattttacccttcaaatgtgtattttgaaaatatgtcttcaaatcagtttagaaaatcacactttcatgtctgtcatwtccatgtgttttctattactgtcacctttttttttctttcttgtatgtgttttcctgttacaaaaataagcaagggggcttatgtatgcatttgtatgtacatgtatatataaatactccaaagttcacataaaaagcaaagttttgtactaatggtagaattccaaaatatcttctgatattaaaagtaaatcctgaaaatcattttattatataatacaattttttttttacattttatggcataatatcccattcagtaaatacgttatagttcagtgggatctataacaatgaatattggattagttttactcttgcaatttcta

SEQ ID NO: 28504 - DNA, 994 bp, Homo sapiens
actggaaatattagtatgataaatgaacgtaacagcattgaaaggtctctttacatacagactgtacttttaaacttattccataaatataagagcctattataaactagaaataccaaccttgttcaacagcagtcaaaagacatgtaaataattacaattacagtaataaataacaacactgtataaaaagtgccatggagacagaataaactgtatgccaagcttagtaagcgtgacactgggaaaacttagtgtgaggtaggcctctaaaaggaggcacaagaataaaccagaaaaaccagtacaaaatgaaagcatttggtacaagtatatgaaagctctgctctctgatactcatccattagacatagcatacaaaatagtttattctaacttctgaaaatattaaggcttttcccacacatactaagaaaagcaaatatagggagaggagcgttaaacrcacatgccactcattctcaatgaaaagtctattcagaaatccttaaatttggggggaagtggtgatcagatgttcattagcaaagttatactgtaaaataaaaaaccctgggccaggcacggtggctcacgcctgtaatcccaggactttgggaagccgaagcaggcgatcccctgaggtcaggagttcaagaaccagcctggcctgtaatcctagctactcgggaggctgaggcaaaagaattgcttgaacctgggcggtggaggttgcaagttgcagtgagtcgagattgagccactgcactccagcgtgggtgataagagtgagactgtctccaaaaaaaaaaaagcgtttggtttactctgcaatgatatatcatctgatttattcatattgtaaaatggaaaactaagatgatataaggaactgaaaaaaggacatgactagctagcatctcaaattttttaaaacagtgcctacaacatccagtaacattttttaaaccccccgccccacacattaaggatc

SEQ ID NO: 28505 - DNA, 994 bp, Homo sapiens
actggaaatattagtatgataaatgaacgtaacagcattgaaaggtctctttacatacagactgtacttttaaacttattccataaatataagagcctattataaactagaaataccaaccttgttcaacagcagtcaaaagacatgtaaataattacaattacagtaataaataacaacactgtataaaaagtgccatggagacagaataaactgtatgccaagcttagtaagcgtgacactgggaaaacttagtgtgaggtaggcctctaaaaggaggcacaagaataaaccagaaaaaccagtacaaaatgaaagcatttggtacaagtatatgaaagctctgctctctgatactcatccattagacatagcatacaaaatagtttattctaacttctgaaaatattaaggcttttcccacacatactaagaaaagcaaatatagggagaggagcgttaaacacacatgccactcattctcaatgaaaagtctattcagaaatccttaaatttggggggaagtggtgatcagatgttcattagcaaagttatactgtaaaataaaaaaccctgggccaggcacggtggctcacgcctgtaatcccaggactttgggaagccgaagcaggcgatcccctgaggtcaggagttcaagaaccagcctggcctgtaatcctagctactcgggaggctgaggcaaaagaattgcttgaacctgggcggtggaggttgcaagttgcagtgagtcgagatygagccactgcactccagcgtgggtgataagagtgagactgtctccaaaaaaaaaaaagcgtttggtttactctgcaatgatatatcatctgatttattcatattgtaaaatggaaaactaagatgatataaggaactgaaaaaaggacatgactagctagcatctcaaattttttaaaacagtgcctacaacatccagtaacattttttaaaccccccgccccacacattaaggatc

SEQ ID NO: 28506 - DNA, 994 bp, Homo sapiens
actggaaatattagtatgataaatgaacgtaacagcattgaaaggtctctttacatacagactgtacttttaaacttattccataaatataagagcctattataaactagaaataccaaccttgttcaacagcagtcaaaagacatgtaaataattacaattacagtaataaataacaacactgtataaaaagtgccatggagacagaataaactgtatgccaagcttagtaagcgtgacactgggaaaacttagtgtgaggtaggcctctaaaaggaggcacaagaataaaccagaaaaaccagtacaaaatgaaagcatttggtacaagtatatgaaagctctgctctctgatactcatccattagacatagcatacaaaatagtttattctaacttctgaaaatattaaggcttttcccacacatactaagaaaagcaaatatagggagaggagcgttaaacacacatgccactcattctcaatgaaaagtctattcagaaatccttaaatttggggggaagtggtgatcagatgttcattagcaaagttatactgtaaaataaaaaaccctgggccaggcacggtggctcacgcctgtaatcccaggactttgggaagccgaagcaggcgatcccctgaggtcaggagttcaagaaccagcctggcctgtaatcctagctactcgggaggctgaggcaaaagaattgcttgaacctgggcggtggaggttgcaagttgcagtgagtcgagattgagccactgcactccagcstgggtgataagagtgagactgtctccaaaaaaaaaaaagcgtttggtttactctgcaatgatatatcatctgatttattcatattgtaaaatggaaaactaagatgatataaggaactgaaaaaaggacatgactagctagcatctcaaattttttaaaacagtgcctacaacatccagtaacattttttaaaccccccgccccacacattaaggatc

SEQ ID NO: 28507 - DNA, 661 bp, Homo sapiens
  misc_feature (1)...(661): n = A,T,C or G
agttccgtggtggctcactcacatgcctgatgagttggtgttgactgttagcaggaggcctcagatactccccaaatgagcctctccatgggctgcttgaacatcctcttgacatagtggctggcttcccgcagagtaagagttcaacagagaccaagattgaagctacaacattttttttattacctaccctcagaagtcgtaaattctgcaatatcttattggtaagccttattcaatgtgggaaggaaccacaacaaagrcttgaatacccaaagacaagaatcactgggggccatctcagaggctggctgccacatgaagtaatattaaatcctacacattcttcattgttcagtgaaactttcccctgagattcctgctcatatcatctcagcccttcttacattctgtcgcctctgacctagtttaggaccatcaacaggcactctcatctgggcactacagcatcttatattctttaactctgagaatgacaactatttttaagttcccctgtagcctccagtgcaccaaatgcagggcagaacatatagnnnnnnnnnnnnnnnnnnnnnnnnnnnnnnnnnnnnnnnnnnnnnnnnnnnnnnnnnnnnnnnnnnnnnnnnnnnnnnnnnnnnnnnnnnnnnnnnnnnntttt

SEQ ID NO: 28508 - DNA, 593 bp, Homo sapiens
ttgggaggctgaggcagtagaatcgctcgaacctgggaggcggaggttgtggtgagcagacatcacgccactgccctccagcctgggtgacagaggagactccgtctcaaaaaaaaaaaaaaaaaaaaaaattgggaaaagaaagaaaaaatcctgtaaatgtatctcacgggtacttaaccagttgtggagacgttcaaggttcaggatcatgaaaagtctacaacctcttaaacaggaagaattccgtgggaagtcagtgtcagccctagaaaccatggcttgggctccaagcgcgcatcttcgcaaaactgaaatagcaacaaatggtaccaatttagtctctgctggggagggactgccccctgaattgtctcacttctttcagcatggtggttcctgcagggtgtgtgaggagaagatcctattatagcctatatatacaggttatagcaaacaccccagggttcctctatttgctgcttgttaaatagcaaagaacaattagaagagagaaatgatataatttaggtacagaggcctggcacggtggctcatgactgaatcccaayactttgggaggccgaggtggg

SEQ ID NO: 28509 - DNA, 782 bp, Homo sapiens
gaggaagcagaaaggggggacttccctacccacacgtctcctctgaagggactcagcaagaggggcgtgctcactccccagccgcttccccaccatcctgcaccctacagctgcctggagctgcacaacccaagccctccctgctccagccctgaccccggctctggagcagaagccctgcacaggccggcacaggcctggcttccgacacctcccctcctcccagcctctccgattcctcactctctcccactcctgatcctgccgtcctccagcccgaagctgggtatgtgcacacgtggcccatgtgtccccatgggtgrgtgcaagtcggtgggtgcatgtgtgtgtgcacgtgtttgtgtggtcactgcttcacctgtgtgcacgtgctcacatatacatgcgaacaggtgcacactgcatgtgttttcagtgacatattttaatcaagtacataaaaaccaaaccatatatacttttatttttcaaactttttattctaaaaattttaatgatttattaaaatttgtggcaaaatacaacctataataaatgttgacattttaaatcaaaattactttagtaaagctgactttaatttaaatttgtgaaaattaaatcactacttggaaatgacattttgtttggcaagaatcacttccactcatggtctctgagagggaggttggcccggttaatatatctgtttttttacctaagcacttgggccaccaaatcctctcagctccctgaaacgtttccatccaagtcagcagccg

SEQ ID NO: 28510 - DNA, 782 bp, Homo sapiens
gaggaagcagaaaggggggacttccctacccacacgtctcctctgaagggactcagcaagaggggcgtgctcactccccagccgcttccccaccatcctgcaccctacagctgcctggagctgcacaacccaagccctccctgctccagccctgaccccggctctggagcagaagccctgcacaggccggcacaggcctggcttccgacacctcccctcctcccagcctctccgattcctcactctctcccactcctgatcctgccgtcctccagcccgaagctgggtatgtgcacacgtggcccatgtgtccccatgggtgggtgcaagtcggtgggtgcatgtgtgtgtgcacgtgtttgtgtggtcactgcttcacctgtgtgcacrtgctcacatatacatgcgaacaggtgcacactgcatgtgttttcagtgacatattttaatcaagtacataaaaaccaaaccatatatacttttatttttcaaactttttattctaaaaattttaatgatttattaaaatttgtggcaaaatacaacctataataaatgttgacattttaaatcaaaattactttagtaaagctgactttaatttaaatttgtgaaaattaaatcactacttggaaatgacattttgtttggcaagaatcacttccactcatggtctctgagagggaggttggcccggttaatatatctgtttttttacctaagcacttgggccaccaaatcctctcagctccctgaaacgtttccatccaagtcagcagccg

SEQ ID NO: 28511 - DNA, 782 bp, Homo sapiens
gaggaagcagaaaggggggacttccctacccacacgtctcctctgaagggactcagcaagaggggcgtgctcactccccagccgcttccccaccatcctgcaccctacagctgcctggagctgcacaacccaagccctccctgctccagccctgaccccggctctggagcagaagccctgcacaggccggcacaggcctggcttccgacacctcccctcctcccagcctctccgattcctcactctctcccactcctgatcctgccgtcctccagcccgaagctgggtatgtgcacacgtggcccatgtgtccccatgggtgggtgcaagtcggtgggtgcatgtgtgtgtgcacgtgtttgtgtggtcactgcttcacctgtgtgcacgtgctcacatatacatgcgaacaggtgcacactgcatgtgttttcagtgacatattttaatcaagtacataaaaaccaaaccatatatacttytatttttcaaactttttattctaaaaattttaatgatttattaaaatttgtggcaaaatacaacctataataaatgttgacattttaaatcaaaattactttagtaaagctgactttaatttaaatttgtgaaaattaaatcactacttggaaatgacattttgtttggcaagaatcacttccactcatggtctctgagagggaggttggcccggttaatatatctgtttttttacctaagcacttgggccaccaaatcctctcagctccctgaaacgtttccatccaagtcagcagccg

SEQ ID NO: 28512 - DNA, 1128 bp, Homo sapiens
  misc_feature (1)...(1128): n = A,T,C or G
cccgcgtgtcaggcacagttcttgtgcgnagggccatcccccaacacaggacctggaggcagaatgggctcttcttccaggctacagggagggctctgtccaggcccttgccttccccgcagccctcctcaggcatgggggctctggcctcagccatctttggattgaacagaacccatttcctcctatcctgcctggtagatgaaatttcacgctcttgagatttcaatttcggggtcccggggtgggggtggtgtttaagaacgacattcgcatgtcacagtgtacaaagcattttacccccatgatctcatttaatcttcatagcagctggttggaggaagcacctcctctcctttcacagggtggcagatggaaggccagagaccttgctctttgctcaccgtctcctggccaggaagtcttagagttgggccttaaccccttttcttggactccaagacccaggttcttactgtggcatgacagctgccaggatctgacgtccttccgggatggcttgcctacaagttgctggagagctctttgcatctgccgagtttctgaagggtagacccttctgtatcctgctgtgaaggtctctggatctcagcgttcttgtgggaattgattcacttctttcagagcatgagggccacacctgtgtttggagcacacccctgaaaacaaagagtagcttctccttccgagggcacggagcccagggtgccgcaagtcattcaaggtcaaggaagatagagcagtgtgcttcatcccagtgacctgctcttgaagggaaaaggkgcactgccaggtggggtgtgacgtcaccaacctttttatcgcccccctcccccgccccgtggccacccgccgctgcccccgtgtgacaggtatggcagacaccgttcccatcttaccagtgagaggaggctcaggctcactgactcctgaaagttaagtcacccgggatctaagcccaggtcctccaaccccaactccagcaagctgcctccctccggttattcagggggctctgggcggacgggagggactttcttgtcaggggtccttcatttctctctcctgctgcacggcccttctgcaggacggctcctccctcgggcc

SEQ ID NO: 28513 - DNA, 1283 bp, Homo sapiens
gaggcagcgaggagggtggcttctcccctagcttgcccctgagtgaccctctcatgctgcccctaccctgactggccaccaggctgcagctccccttcctgcctcccatcccaacaagcccttcccctgcatccctaggtcagaccttcttggcctcatatggaatcttgtccctgagggtctcctaaatggccctggtggcctggggaagcccctcctgtccactccccatgctgctgagacccaccttctgtccacagctctgagcctcccgcacttgcctctttacctcctcaccccctctgcctccctccccggggagctccacacccccgtccttccacgctctgtactctctcaccctgggggtttgcacatgctgtccttctgcctgcaacacttttccctgccccaacctggaaaatgcctagttatccagcaagagtgactcaggcatccccttcggaactctccaaacaggtgaggctctgcaggaacacccatagcccctcatgcagtcattcattcattcaacaaatacctaccaagcactactgagtgccaagctgtgccttaggccctggggagttggtgggggggtggacaaaccctgccttcttgtaactattaagagcaaaccgccctgcccagctgggttagatgcctttccacacaccatctttgctggatcgccggccccttcgatctccaggatctttcctcctcagactgagaggcacttgggcaaggtccttcctgatccccgcaccaaggccacacatgggggctgccttttgaaaggcggatgttcagattccgcctggggagcctgtggtctgggctgagccccctggactctggtgcaggtgttgggagggggtgaacatctggagaagcccctcctggcacagtggcccccgccctgtcccggcaagctgggcactccaggaccctgcatgggatcctggctccgctgtccaccctccacccagctcaacagactctgccccgacatgtgcgggaccccacctcgtgcattctccttagacctgagcccctgtccctcttcgtaggtgcccrtgtgtgttggttgcaggaatggaggatgcacgaggttagagaggttttcagaacatgtagccttctgtgatgacactaacttgatttctgtctttcactaccaggttgccccaggcttttcctgcctctaatcttccctttttgaaagaatcctcaaaagcacatgcgttaaagccttctcaaagctcccacatgatcttgag

SEQ ID NO: 28514 - DNA, 587 bp, Homo sapiens
gatccctgactcttccccatcgggaccagcaaactcatgccagcatgttccctcgcagagtgccggaggccaaggggctgcagtgcccggcctgctggaggtacccaatggggtacagagccatgtgccactctaacctcaccctcaatctagctgcctggtgagcagctctgggagtgtatggcagacaggcggacacgccctcaggcctccccacgacacagcacccgaagtccacgcccacgccaacctccctagaattctccacacatccagcctccgagagagcaatgcaataaggaggcgattttgtgcacacacagcttcatcttctgaagggtttggattgcggtggctcagcatctcgcctcgtgcagctgcagattaaaagcttcagaaatgcgtcttcactaaaatgactccaagattgcctgtgatttcggcgagaggatttttcctttctttcgcytgttccttttcacttggctttttctccctttttaaaaaacatagtcattaaagaagatccctaaggaaatgaaacacagaacactatgtgaacatatcacagaacttctgactctcga

SEQ ID NO: 28515 - DNA, 969 bp, Homo sapiens
aatatgaaaccagccaggctcacccaagagagcctaaatcaaggacaggtgtatccataggagacagaggaagaggaggagacacaggggggagagcaggggccctgggagacagaggcagagatgggaggacgcagtcccgagctgtggagmccctgcagccactgggagcaggaagaggcaggaagcctccttccctgagctccggagggagcacagacctgctggcaccttgattttggacttgtgtcctccagcgttggggaagcctgtgtgctgagagcacattcctattcttgtaagccacccagtttgtggtcatttgttactgcagccaaaaaacagacattgcatgtgtctggagcagcaggtgctccaggctggttctttggcatctctattccacaaggctctctgtccccagaccctcgcgttcccatggtacctccagcttcttgctgtcggggatgttcgcccaccaaggaggcttctcagaaggccctaggatatgccgcgcctccactctcacacacacgtggtccacggacacatgggcggtggtcccggcagcaccaggcacactccacccacaaatgctgcccctgcagccactgcccacccagcaccagatctgttcctccctccagcatggccttctatccgccttcatttcctcaggggcatcgctccgacaccctgttgtaggggacacatgcctgctgaagctcccctcacttggctggtggtaagggacaggaaagggctccaggctcccagcagccagccccaaaagtctccctcccaaactctctgcccatcaccaggctcaccctgttctatatagtttccaaccagtccttggccacccactttcaggaagttcttcaggtggtggatctttccacattatttaatatctatcatcataactacttgtaacttatataagatttctctgttattaagctg

SEQ ID NO: 28516 - DNA, 1325 bp, Homo sapiens
tgtacgcatgcaggagttgtacacatgctcacgtgaggcgttcttcccttatcagtcgaatgtccctagaaggtcatataccagttaaactctggcattctgcctgttagtgctcatgcttgagtccactcgcccaactgctaagatcttaccgggaagctgcttatcacccgtttcaggtgttttctatctactgggagcctgtctttccctagcaccggctgcgaccaattattattttagagcgacrgactaacagccgcctgaccatcacctgatggtcacctgaggttcctggtattggaacagaccctctcctgccctgctcatacctgacagctacctactgtaacacacctaggcagataaagatgagattgtggagttccaacagaagcagacattagggaatgagctgaaaggtggaggtggaagttgttcagggagatgagattgcgcggggtacgtaagaagagagcctcagtaggcttcgcggtggagcaggctgtcccatctccagcgaagctccccccatgcctctgtctccatatggagttccactgttaaccctgggcatctccagcaagatccctacggggagagggaacgcatctgagtactgtttgcagaaccacacacgacagctctgaatgaataagccaagacaacaccccgagattcttcctgcggatttgggttcccaggccgggaaggagctgttggagcctgcatggaagattagtggatctgcaaaaagacaatgtggatgactggccgacgccttgtcccaaccctgtccaagcagaagaatcgccgggatacttgctctggatacaaattcttggaccctgactcagaccaactaaatcagaacctctaggaggcctccagacactgcatttttaacaaattcccatgtgatttttaacgcagtataagtttaggaagcgctgctctgttgacaaggaaaggctctggtctggtttgtagcagactgtccaggctttcccaatttggtccaaaaaggcagaaagtgattggcttgagagggcagaatcaatggaaaaagtttatgaattcctgcccctgggaacattcgtctttcacttttcatcttcttccccacccccacctctttggggtatagtcttccccatgccccagttccacatctgctctgacctggggttcccacccagcctccatccagaacacgctcaccctgtttttgtaagagaaaacattgtcaaaatcagcttatgcctgaaaattcaagaagataaattcctcctgagcccatttgctggcattctcatctgtttcca

SEQ ID NO: 28517 - DNA, 1325 bp, Homo sapiens
tgtacgcatgcaggagttgtacacatgctcacgtgaggcgttcttcccttatcagtcgaatgtccctagaaggtcatataccagttaaactctggcattctgcctgttagtgctcatgcttgagtccactcgcccaactgctaagatcttaccgggaagctgcttatcacccgtttcaggtgttttctatctactgggagcctgtctttccctagcaccggctgcgaccaattattattttagagcgacagactaacagccgcctgaccatcacctgatggtcacctgaggttcctgstattggaacagaccctctcctgccctgctcatacctgacagctacctactgtaacacacctaggcagataaagatgagattgtggagttccaacagaagcagacattagggaatgagctgaaaggtggaggtggaagttgttcagggagatgagattgcgcggggtacgtaagaagagagcctcagtaggcttcgcggtggagcaggctgtcccatctccagcgaagctccccccatgcctctgtctccatatggagttccactgttaaccctgggcatctccagcaagatccctacggggagagggaacgcatctgagtactgtttgcagaaccacacacgacagctctgaatgaataagccaagacaacaccccgagattcttcctgcggatttgggttcccaggccgggaaggagctgttggagcctgcatggaagattagtggatctgcaaaaagacaatgtggatgactggccgacgccttgtcccaaccctgtccaagcagaagaatcgccgggatacttgctctggatacaaattcttggaccctgactcagaccaactaaatcagaacctctaggaggcctccagacactgcatttttaacaaattcccatgtgatttttaacgcagtataagtttaggaagcgctgctctgttgacaaggaaaggctctggtctggtttgtagcagactgtccaggctttcccaatttggtccaaaaaggcagaaagtgattggcttgagagggcagaatcaatggaaaaagtttatgaattcctgcccctgggaacattcgtctttcacttttcatcttcttccccacccccacctctttggggtatagtcttccccatgccccagttccacatctgctctgacctggggttcccacccagcctccatccagaacacgctcaccctgtttttgtaagagaaaacattgtcaaaatcagcttatgcctgaaaattcaagaagataaattcctcctgagcccatttgctggcattctcatctgtttcca

SEQ ID NO: 28518 - DNA, 1079 bp, Homo sapiens
gaatgactggggctggataggaatgccttcgtgtttcccaagacccccgggcctgctccacaaagtttgaagggtgggtacaccccgacccaggcaagttgctcccccaaacccatgactgactaatctgatatgacaaaagcccatgatggatttggtatatgttaattcacaatgccctttcctccagaatttaactataagttaatacacaccggaaaccacgcgcatacacgctccttaatgggcttaggtattagcgagtcctaacgatgcatacaaatgtgctcygcgctctgtaggcccctcaagatttatgggccttgagctctctgaagctgtaaacaaggagaaaaaaaaaagagaaagcgaaagcgactggggggaagagacagaggcctgactcgcccctccaggttgtgggagagaagggattctttacgtattttcctttccttgcaagctcggtgcgtgtgggttttggcgttggtctgggggtggtgttctgcctgaatgctggtgtgcatgggcagtgtgttgtttgggtgctggggtaggatgcctgcctcttcggattgctgtgcaggggcctgaacacagcaggcatttgtgagcatatatgcgtgagtgtgcactgtgttagggtgtgtgtgtgtgtgtgtgtgtgtgtgtgagagagagagagagagagagagagacagagagagagaggcaggcttccccctgggccaggctgctgtcccctgaacggtggtgaacaaatctctaacaacaatcataataacaataaataatgaataataataataaaacagtagttaacagtccctccataacagaataacaataaaatgcaagaggaaatattttgaggtggagacagaagaaggagtcaggatcacagcatctgagggggagataggaaaggaagggaggaagaaagcttcttaatatgctcttggcggggctggggttgggaacccctttcccagacaagggacagaagaggggaaggagggccaggaggccactctttattgctttttttctcaggcttctgctttgtgtgatcagggaag

SEQ ID NO: 28519 - DNA, 1079 bp, Homo sapiens
gaatgactggggctggataggaatgccttcgtgtttcccaagacccccgggcctgctccacaaagtttgaagggtgggtacaccccgacccaggcaagttgctcccccaaacccatgactgactaatctgatatgacaaaagcccatgatggatttggtatatgttaattcacaatgccctttcctccagaatttaactataagttaatacacaccggaaaccacgcgcatacacgctccttaatgggcttaggtattagcgagtcctaacgatgcatacaaatgtgctctgcgctctgtaggcccctcaagatttatgggccttgagctctctgaagctgtaaacaaggagaaaaaaaaaagagaaagcgaaagcgactggggggaagagacagaggcctgactcgcccctccaggttgtgggagagaagggattctttacgtattttcctttccttgcaagctcggtgcgtgtgggttttggcgttggtctgggggtggtgttctgcctgaatgctggtgtgcatgggcagtgtgttgtttgggtgctggggtaggatgcctgcctcttcggattgctgtgcaggggcctgaacacagcaggcatttgtgagcatatatgcgtgagtgtgcactgtgttagggtgtgtgtgtgtgtgtgtgtgtgtgtgtgwgagagagagagagagagagagagacagagagagagaggcaggcttccccctgggccaggctgctgtcccctgaacggtggtgaacaaatctctaacaacaatcataataacaataaataatgaataataataataaaacagtagttaacagtccctccataacagaataacaataaaatgcaagaggaaatattttgaggtggagacagaagaaggagtcaggatcacagcatctgagggggagataggaaaggaagggaggaagaaagcttcttaatatgctcttggcggggctggggttgggaacccctttcccagacaagggacagaagaggggaaggagggccaggaggccactctttattgctttttttctcaggcttctgctttgtgtgatcagggaag

SEQ ID NO: 28520 - DNA, 1079 bp, Homo sapiens
gaatgactggggctggataggaatgccttcgtgtttcccaagacccccgggcctgctccacaaagtttgaagggtgggtacaccccgacccaggcaagttgctcccccaaacccatgactgactaatctgatatgacaaaagcccatgatggatttggtatatgttaattcacaatgccctttcctccagaatttaactataagttaatacacaccggaaaccacgcgcatacacgctccttaatgggcttaggtattagcgagtcctaacgatgcatacaaatgtgctctgcgctctgtaggcccctcaagatttatgggccttgagctctctgaagctgtaaacaaggagaaaaaaaaaagagaaagcgaaagcgactggggggaagagacagaggcctgactcgcccctccaggttgtgggagagaagggattctttacgtattttcctttccttgcaagctcggtgcgtgtgggttttggcgttggtctgggggtggtgttctgcctgaatgctggtgtgcatgggcagtgtgttgtttgggtgctggggtaggatgcctgcctcttcggattgctgtgcaggggcctgaacacagcaggcatttgtgagcatatatgcgtgagtgtgcactgtgttagggtgtgtgtgtgtgtgtgtgtgtgtgtgtgagwgagagagagagagagagagagacagagagagagaggcaggcttccccctgggccaggctgctgtcccctgaacggtggtgaacaaatctctaacaacaatcataataacaataaataatgaataataataataaaacagtagttaacagtccctccataacagaataacaataaaatgcaagaggaaatattttgaggtggagacagaagaaggagtcaggatcacagcatctgagggggagataggaaaggaagggaggaagaaagcttcttaatatgctcttggcggggctggggttgggaacccctttcccagacaagggacagaagaggggaaggagggccaggaggccactctttattgctttttttctcaggcttctgctttgtgtgatcagggaag

SEQ ID NO: 28521 - DNA, 1079 bp, Homo sapiens
gaatgactggggctggataggaatgccttcgtgtttcccaagacccccgggcctgctccacaaagtttgaagggtgggtacaccccgacccaggcaagttgctcccccaaacccatgactgactaatctgatatgacaaaagcccatgatggatttggtatatgttaattcacaatgccctttcctccagaatttaactataagttaatacacaccggaaaccacgcgcatacacgctccttaatgggcttaggtattagcgagtcctaacgatgcatacaaatgtgctctgcgctctgtaggcccctcaagatttatgggccttgagctctctgaagctgtaaacaaggagaaaaaaaaaagagaaagcgaaagcgactggggggaagagacagaggcctgactcgcccctccaggttgtgggagagaagggattctttacgtattttcctttccttgcaagctcggtgcgtgtgggttttggcgttggtctgggggtggtgttctgcctgaatgctggtgtgcatgggcagtgtgttgtttgggtgctggggtaggatgcctgcctcttcggattgctgtgcaggggcctgaacacagcaggcatttgtgagcatatatgcgtgagtgtgcactgtgttagggtgtgtgtgtgtgtgtgtgtgtgtgtgtgagagwgagagagagagagagagagacagagagagagaggcaggcttccccctgggccaggctgctgtcccctgaacggtggtgaacaaatctctaacaacaatcataataacaataaataatgaataataataataaaacagtagttaacagtccctccataacagaataacaataaaatgcaagaggaaatattttgaggtggagacagaagaaggagtcaggatcacagcatctgagggggagataggaaaggaagggaggaagaaagcttcttaatatgctcttggcggggctggggttgggaacccctttcccagacaagggacagaagaggggaaggagggccaggaggccactctttattgctttttttctcaggcttctgctttgtgtgatcagggaag

SEQ ID NO: 28522 - DNA, 1079 bp, Homo sapiens
gaatgactggggctggataggaatgccttcgtgtttcccaagacccccgggcctgctccacaaagtttgaagggtgggtacaccccgacccaggcaagttgctcccccaaacccatgactgactaatctgatatgacaaaagcccatgatggatttggtatatgttaattcacaatgccctttcctccagaatttaactataagttaatacacaccggaaaccacgcgcatacacgctccttaatgggcttaggtattagcgagtcctaacgatgcatacaaatgtgctctgcgctctgtaggcccctcaagatttatgggccttgagctctctgaagctgtaaacaaggagaaaaaaaaaagagaaagcgaaagcgactggggggaagagacagaggcctgactcgcccctccaggttgtgggagagaagggattctttacgtattttcctttccttgcaagctcggtgcgtgtgggttttggcgttggtctgggggtggtgttctgcctgaatgctggtgtgcatgggcagtgtgttgtttgggtgctggggtaggatgcctgcctcttcggattgctgtgcaggggcctgaacacagcaggcatttgtgagcatatatgcgtgagtgtgcactgtgttagggtgtgtgtgtgtgtgtgtgtgtgtgtgtgagagagwgagagagagagagagagacagagagagagaggcaggcttccccctgggccaggctgctgtcccctgaacggtggtgaacaaatctctaacaacaatcataataacaataaataatgaataataataataaaacagtagttaacagtccctccataacagaataacaataaaatgcaagaggaaatattttgaggtggagacagaagaaggagtcaggatcacagcatctgagggggagataggaaaggaagggaggaagaaagcttcttaatatgctcttggcggggctggggttgggaacccctttcccagacaagggacagaagaggggaaggagggccaggaggccactctttattgctttttttctcaggcttctgctttgtgtgatcagggaag

SEQ ID NO: 28523 - DNA, 525 bp, Homo sapiens
ttgtctagatttaaataataaccttgctacttaatagctatagtactatggcaagtttttaatgtatgtgagattccgttttctcctcacctgtaaaatggggtagtaatcatagctacctcacagggttgttgatcagattaaattagttactatacaaaaaattactaagtttgtccaacacataagaagaacttaaacattagctaatattattattatgtatagttaatattttcttttttgtttttttaactatgtgtaatatatcagctaaagagaacatgttatttggaaattaaaaatgaggggaatagaatgggaaaaaatgctgcacttatatatgaaactatacaatatgttgttatataataagtatmaaatgttgcataatatagacagtttgctattcacagtgaatgcactggccagtttaaaatgatggtctacttattgggagatgtttgttgatgcagctactgagcaactgttggatatatttgctatagtgttatactattagat

SEQ ID NO: 28524 - DNA, 552 bp, Homo sapiens
gcaggcttgacttcggaagaatctactcccacactcactcagattacttccaaaattcattttcttaatgctatagaactgagagttccagctatggaaactggctgttagctggaggcttccctaagctttcagaggccacttgcagttcctagaagctgctcaaagttccttgacattgggawcttcccaccatgtctgcttacttccttgagccagaaagaaaaatctctagtgcaagtctgctgacgagaagtatcttatacaatgcaatgtcatcaggggagagatatgccatcacctttgtcatattctattggctagaagaaagttacaggtcccacttacacccaagaggaaaaggttatacaaagatgtgaacaccaagagtcaggattaccttaaagaggctgtccacagctggaggagagcaatgtgagacaagcatgaaaagctaacccgagacagatgaaatgatcagtagataactataacattactctaaagatgacttatccttaggataaaatattgctggaaaaatataaggaa

SEQ ID NO: 28525 - DNA, 552 bp, Homo sapiens
gcaggcttgacttcggaagaatctactcccacactcactcagattacttccaaaattcattttcttaatgctatagaactgagagttccagctatggaaactggctgttagctggaggcttccctaagctttcagaggccacttgcagttcctagaagctgctcaaagttccttgacattgggatcttcccaccatgtctgcttacttcmttgagccagaaagaaaaatctctagtgcaagtctgctgacgagaagtatcttatacaatgcaatgtcatcaggggagagatatgccatcacctttgtcatattctattggctagaagaaagttacaggtcccacttacacccaagaggaaaaggttatacaaagatgtgaacaccaagagtcaggattaccttaaagaggctgtccacagctggaggagagcaatgtgagacaagcatgaaaagctaacccgagacagatgaaatgatcagtagataactataacattactctaaagatgacttatccttaggataaaatattgctggaaaaatataaggaa

SEQ ID NO: 28526 - DNA, 1427 bp, Homo sapiens
catggtgaaaccccgtctctactgacatacaaaaaattagctgggcgtggtgatacgcgcctgcagtcccacctacttgggaggctgaggcacgagaatcgcttgagcccccggaggtggaggttgcggtaagctgagattgcaccactgcactccagcttgggctacagagtgaagaattcgtctcaaagaacaaaaacaaaaacaaacaaacaaaaaagaaatgcacagtgccaggccccatcccacagccccaagcctgaccttttttttctctctaacataaaagcttgcaaggrcactcgccatgtgccctgcttattcaattaatcacttaactgatcatgctgtcatctttttctgcataataactccctgaagtaggtgccattattattccctattttgagatgaaggaaataaggcacagagaggctgagaatcggaatctgcattttcataaggtgcccaggtgaggcgtaagcgtgctacagccctagaagcccttctctacagcagtggattcaatcaccttccactaggaccccccgcccagttatacccgtggtgtggggttggggctgggcagcccaattttaccagctgcttcagcctattctgaggtgtggggatccagctacaagaaagagcagagataaaagacggaagcagtttcatcatttttgatgtgacaaggaagtcacgtttttgtctggagttctcggactctgtcatctttttctgggttctccttccgtcctgactcaacttggcattttgagaaatgaagctttagcgactcaggaagggtggccagagacaacagtgccaccttgtggcagcagcctggcattacagtcctggaaggcggctgtttaaatggaaagaactgtgataacagggtagtcatagagaaatctcagcgagcctttattatatgccagacgccatgccaagtcttcttcatggatttgtttatttaaaactcacaagagtaagaagtagatactattattatcccagtgttacaggcctggaggaatggagcttgagagagagggagctatgctcatgatctctgggtagtgagggctggagctggggccagcttgggcagtcgggctttaaagtccacgattccaaccctttttttctttttttttgagaaggggtctcactctgtcacccaggctggagtgcagtggtgcaatctcggctcactgcaacctctgcttcccaagttcaagcgattctcttgcctcagcctaccgagtaactgggattacaggcacttgccaccattccccgctaatttttgtatttttagtagagatgggggattcaccatgttggccaggcaagtctcgaactcctgacctcaagtgatcaacctgccttggcctcccaaagtgttgagattacaggtg

SEQ ID NO: 28527 - DNA, 1427 bp, Homo sapiens
catggtgaaaccccgtctctactgacatacaaaaaattagctgggcgtggtgatacgcgcctgcagtcccacctacttgggaggctgaggcacgagaatcgcttgagcccccggaggtggaggttgcggtaagctgagattgcaccactgcactccagcttgggctacagagtgaagaattcgtctcaaagaacaaaaacaaaaacaaacaaacaaaaaagaaatgcacagtgccaggccccatcccacagccccaagcctgaccttttttttctctctaacataaaagcttgcaaggacactcgccatgtgccctgcttattcaattaatcacttaaytgatcatgctgtcatctttttctgcataataactccctgaagtaggtgccattattattccctattttgagatgaaggaaataaggcacagagaggctgagaatcggaatctgcattttcataaggtgcccaggtgaggcgtaagcgtgctacagccctagaagcccttctctacagcagtggattcaatcaccttccactaggaccccccgcccagttatacccgtggtgtggggttggggctgggcagcccaattttaccagctgcttcagcctattctgaggtgtggggatccagctacaagaaagagcagagataaaagacggaagcagtttcatcatttttgatgtgacaaggaagtcacgtttttgtctggagttctcggactctgtcatctttttctgggttctccttccgtcctgactcaacttggcattttgagaaatgaagctttagcgactcaggaagggtggccagagacaacagtgccaccttgtggcagcagcctggcattacagtcctggaaggcggctgtttaaatggaaagaactgtgataacagggtagtcatagagaaatctcagcgagcctttattatatgccagacgccatgccaagtcttcttcatggatttgtttatttaaaactcacaagagtaagaagtagatactattattatcccagtgttacaggcctggaggaatggagcttgagagagagggagctatgctcatgatctctgggtagtgagggctggagctggggccagcttgggcagtcgggctttaaagtccacgattccaaccctttttttctttttttttgagaaggggtctcactctgtcacccaggctggagtgcagtggtgcaatctcggctcactgcaacctctgcttcccaagttcaagcgattctcttgcctcagcctaccgagtaactgggattacaggcacttgccaccattccccgctaatttttgtatttttagtagagatgggggattcaccatgttggccaggcaagtctcgaactcctgacctcaagtgatcaacctgccttggcctcccaaagtgttgagattacaggtg

SEQ ID NO: 28528 - DNA, 522 bp, Homo sapiens
tctctcaataatgttttgacattttcagtgtaaaattgttcagtagcttctttccttaatatacaaccatgtcatacatagacatgtacgayatgggctgtgctctcaaattgcttagggtccgatagctgggagaaataaaaaatcttggacaatgagcccaagtaatttaagacattcacagttgggctgtgggttgctcttgccaatgtgcagatgcaggctgcatatgttgcagggtcctcctcattcattcctcaaacatttatcaagcatcagtgatatgcccaaacgcttagaatatagtgctaagccagatgggttctatgggaaaggaaactcaatagtaatgataattatgtgccaggcattttctacatgctttccctgtgttatctcatatcatcccaacacagctataaagaaagtgctatttttaataaacttcatttttagagcaaagtctaaacctctgttttaagttcacagcaacattgagcagaaggtacagagatttcccat

SEQ ID NO: 28529 - DNA, 595 bp, Homo sapiens
attttatctgttgggctcctcataattatttgccccacaagaaaatataatgtgttggggtatgccaggatcctggggactagggacaccctataaaggtaaggcaacatttgtcccaaacacgccaactctggccatctgctggctagatgtctatgatgtcacatrcggatgcttcaaaagaacctccattcccatcaggtactagtggatgcttaatgaatatttgggatgggaaaaggggagcagaaagattaaaaggggaggggagaggaagaggggggtaccctgaacagcaaaaagtgcacacttctggaggacaactttgaaaaccaggtgggctcctgatagggtggcctcgctctaaaatcagggactttatgattatgtgacatcgtatttgagaattttagacacctgtaacactgacattccacaagctacacattacagagacctcagtttagaaatggaacactaccattttctttcaaaatacttttttggtgtggcctacttttattttgtttgtctttttgagtgggctgttttccatcaacaattctattgtaaagattttgcctgtaatgcttaa

SEQ ID NO: 28530 - DNA, 574 bp, Homo sapiens
ggcaatacagcaagatcccatctctattttaaagaaaagtttcactttgggaggccaaggcgggtggatcacaaggtcaggagatcgagaccatcctggctaacatagtaaaaccccatctctactaaaaatataaaaaattagccaggcgtggtggtgggcgcctgtagtcccarctactcgggaggctgaggcagaagaatggcgtgaacccaggaggcagagcttgcagtgagctgagattgcgccactgcactccagcctgggcgacagagtgacactccgtctcaaaaaaaaaaaaaaaaagtttcagcaaattccatctaagaattccaccacagttctgttgtctccaatgtcatcttccacagatttcaagttgtgaagccctgaactgttaatttatcttgagaatgtatatttaagcttaatttaagactatatacctaaaaattgagcatataatttctataatttatttatgtaagtttctgtaagtcataagtatgtggtttccaagggtataatttatctgaatgtaataggcattaatatattttacattattgggacc

SEQ ID NO: 28531 - DNA, 478 bp, Homo sapiens
tctgtggttcatgagttagtaacagctaaaccaagtgtctaggaatattagctctgattctagaaatctacacttatttaactaaatgctgtaaggactcaggaaatccattctttcaacaaaagttactgaagactttccccattagtatcctaaacaatgtctgcaaaattggttttcatacctggataccttgtcttctaagagacacggcagrgaaagatcataggaaaaaagtcactatcaggcacagctaacaactagcaaacccatagtctttaaaagactgatcctttgattcctatctctcaagtaaagaggtttaggtcatcttcatattacaggaaagtatccctaccaaaaacttctaactaatgactcttaggattcttccaaaagcaaatagtctttgggagaagacagcttccatcaaatgcctttggatcaagtgaatcactatatgagatatcggtatctg

SEQ ID NO: 28532 - DNA, 478 bp, Homo sapiens
tctgtggttcatgagttagtaacagctaaaccaagtgtctaggaatattagctctgattctagaaatctacacttatttaactaaatgctgtaaggactcaggaaatccattctttcaacaaaagttactgaagactttccccattagtatcctaaacaatgtctgcaaaattggttttcatacctggataccttgtcttctaagagacacggcagggaaagatcataggaaaaaagtcastatcaggcacagctaacaactagcaaacccatagtctttaaaagactgatcctttgattcctatctctcaagtaaagaggtttaggtcatcttcatattacaggaaagtatccctaccaaaaacttctaactaatgactcttaggattcttccaaaagcaaatagtctttgggagaagacagcttccatcaaatgcctttggatcaagtgaatcactatatgagatatcggtatctg

SEQ ID NO: 28533 - DNA, 1657 bp, Homo sapiens
atgatggctcacgcctgtaatcccagcactttgggaggctgaggcgggtggatcacttgaggtccggaattggagaccagcctggccaacatgacaaaaccctgtctctactgaaaatacaaaattagccgggtgtagtggaaaaatacaaaaaaaaacacttgtaatcccagctactcgggaggctgaggcaggagaattgaacctgggaggtggaggttatagtgagccaagatcgtaccactgcaccccagcctgggcaatagagcgagactctstctcaaaaaaaatcccaaaaaacaaaacaaaatgacaacaacaacaaaaaccaagggagtgatgggaatagttaatttgtaaatgtgagagattgtaagaattttttcccgtttttcatctccctcccccacaccattgtgttctcatgttgggccatatgaaagaaactaaaattctgcttagatgcctatttttttaagcattatcatcttggaaagttggatttgaattggaagagtgacatggaatctttaaaatgactttattttggtcacaaatgaagtaggaatttaacatttaagaggtaaacaagtattttatggatgtttcaaggagggttttggctttgacagggtaaaattatttttgattggaaaaagtacattttagcatttaaccaagatttttgcattctttttcttctgttctgatttctgccaatcttctgggagggaagacaattatttttctaaaggtaagagacagttaagaatgaagatattaaatagcaagggtgctgaacagaaaaacaaaggaagccgaagccttttgcaaaatcaaaaggatctggggtcttagacaccatgtggcactgctgaaacatcattttgtttatacctttgagcatagaattctccaagttattggctgtagcttgcagggtcttaataggtatactttaaagaagagaggtagaagattacatgttcatatatgtttggaaaaaattggcatagacagattatgtatactatgaaatatgaagagtgggataaagtagccagtgtttcacacttacttgaccacagaattttcgtttgttggttggtctgatatatggcacaccaattaactcttagtgttcccaaacttaagtttggggaatattacacatttttctatggtgaaatttagtcgaatttgaaagagttggtttagtataaccccgggaaatccacagtaacggatctttagtggtatttctcaaattgtggctcatgaactgcctgtgtcagaatcccctgacgcgtttgttaaaaatccagatttctgggtctgatctcagatttattgaatacgaatctctggcactgacatcacggactctgacttgttaaaaacaccctagtctttgctgctaaaagtatggtctgtggactagcagcgtcagaatcacctggagctttttggagtgcagaatctcagctccatcccaattgcgctgaatctaaatctgaatctgcagttttttaaaattttttttatgtttttagacagagtcttgctctgtcgcccaggctggagtgccggggtgtgatctcggctcactgcaacctccacctccctggttcatgtgattgtcctgcctcagcgtcct

SEQ ID NO: 28534 - DNA, 1657 bp, Homo sapiens
atgatggctcacgcctgtaatcccagcactttgggaggctgaggcgggtggatcacttgaggtccggaattggagaccagcctggccaacatgacaaaaccctgtctctactgaaaatacaaaattagccgggtgtagtggaaaaatacaaaaaaaaacacttgtaatcccagctactcgggaggctgaggcaggagaattgaacctgggaggtggaggttatagtgagccaagatcgtaccactgcaccccagcctgggcaatagagcgagactctctctcaaaaaaaatcccaaaaaacaaaacaaaatgacaacaacaacaaaaaccaagggagtgatgggaatagttaatttgtaaatgtgagagattgtaagaatttyttcccgtttttcatctccctcccccacaccattgtgttctcatgttgggccatatgaaagaaactaaaattctgcttagatgcctatttttttaagcattatcatcttggaaagttggatttgaattggaagagtgacatggaatctttaaaatgactttattttggtcacaaatgaagtaggaatttaacatttaagaggtaaacaagtattttatggatgtttcaaggagggttttggctttgacagggtaaaattatttttgattggaaaaagtacattttagcatttaaccaagatttttgcattctttttcttctgttctgatttctgccaatcttctgggagggaagacaattatttttctaaaggtaagagacagttaagaatgaagatattaaatagcaagggtgctgaacagaaaaacaaaggaagccgaagccttttgcaaaatcaaaaggatctggggtcttagacaccatgtggcactgctgaaacatcattttgtttatacctttgagcatagaattctccaagttattggctgtagcttgcagggtcttaataggtatactttaaagaagagaggtagaagattacatgttcatatatgtttggaaaaaattggcatagacagattatgtatactatgaaatatgaagagtgggataaagtagccagtgtttcacacttacttgaccacagaattttcgtttgttggttggtctgatatatggcacaccaattaactcttagtgttcccaaacttaagtttggggaatattacacatttttctatggtgaaatttagtcgaatttgaaagagttggtttagtataaccccgggaaatccacagtaacggatctttagtggtatttctcaaattgtggctcatgaactgcctgtgtcagaatcccctgacgcgtttgttaaaaatccagatttctgggtctgatctcagatttattgaatacgaatctctggcactgacatcacggactctgacttgttaaaaacaccctagtctttgctgctaaaagtatggtctgtggactagcagcgtcagaatcacctggagctttttggagtgcagaatctcagctccatcccaattgcgctgaatctaaatctgaatctgcagttttttaaaattttttttatgtttttagacagagtcttgctctgtcgcccaggctggagtgccggggtgtgatctcggctcactgcaacctccacctccctggttcatgtgattgtcctgcctcagcgtcct

SEQ ID NO: 28535 - DNA, 1657 bp, Homo sapiens
atgatggctcacgcctgtaatcccagcactttgggaggctgaggcgggtggatcacttgaggtccggaattggagaccagcctggccaacatgacaaaaccctgtctctactgaaaatacaaaattagccgggtgtagtggaaaaatacaaaaaaaaacacttgtaatcccagctactcgggaggctgaggcaggagaattgaacctgggaggtggaggttatagtgagccaagatcgtaccactgcaccccagcctgggcaatagagcgagactctctctcaaaaaaaatcccaaaaaacaaaacaaaatgacaacaacaacaaaaaccaagggagtgatgggaatagttaatttgtaaatgtgagagattgtaagaattttttcccgtttttcatctccctcccccacaccattgtgttctcatgttgggccatatgaaagaaactaaaattctgcttagatgcctatttttttaagcattatcatcttggaaagttggatttgaattggaagagtgacatggaatctttaaaatgactttattttggtcacaartgaagtaggaatttaacatttaagaggtaaacaagtattttatggatgtttcaaggagggttttggctttgacagggtaaaattatttttgattggaaaaagtacattttagcatttaaccaagatttttgcattctttttcttctgttctgatttctgccaatcttctgggagggaagacaattatttttctaaaggtaagagacagttaagaatgaagatattaaatagcaagggtgctgaacagaaaaacaaaggaagccgaagccttttgcaaaatcaaaaggatctggggtcttagacaccatgtggcactgctgaaacatcattttgtttatacctttgagcatagaattctccaagttattggctgtagcttgcagggtcttaataggtatactttaaagaagagaggtagaagattacatgttcatatatgtttggaaaaaattggcatagacagattatgtatactatgaaatatgaagagtgggataaagtagccagtgtttcacacttacttgaccacagaattttcgtttgttggttggtctgatatatggcacaccaattaactcttagtgttcccaaacttaagtttggggaatattacacatttttctatggtgaaatttagtcgaatttgaaagagttggtttagtataaccccgggaaatccacagtaacggatctttagtggtatttctcaaattgtggctcatgaactgcctgtgtcagaatcccctgacgcgtttgttaaaaatccagatttctgggtctgatctcagatttattgaatacgaatctctggcactgacatcacggactctgacttgttaaaaacaccctagtctttgctgctaaaagtatggtctgtggactagcagcgtcagaatcacctggagctttttggagtgcagaatctcagctccatcccaattgcgctgaatctaaatctgaatctgcagttttttaaaattttttttatgtttttagacagagtcttgctctgtcgcccaggctggagtgccggggtgtgatctcggctcactgcaacctccacctccctggttcatgtgattgtcctgcctcagcgtcct

SEQ ID NO: 28536 - DNA, 939 bp, Homo sapiens
cccctgctgcaaatgsgtttaataataatctttcttgcaatgggggttggggggacaatgttgggaggattacacgagatcacatttgtaaggtgcctggaacacagtaggtgtacaagcaatgccaggccctcctccccaggcttccctatgcctcgtgggtggaagctctggagtgaggaggaaccgaaacagaataaaaaggagggtgctgccaaccacagaggttattatgctccctggtgatgctagaaggcagggagagagccgtgataataagattctcaccccgttttctgtgtgacggcaaataacagagacatgagaaaagagcatccgtcagaagtcacagagaaggcagacaaggcaaggagatcaaaggaataaatccaccgcaatctgaaaaacagcctgcctgctttcatctgtcggggaggtgacacaaggacccacactccagccaaaaacacacttttttccacccatgctgcatgaagcggggctgagggcatggcagcttccaaaacacacccccttcaaggataataaatcttctccttggtctagccacatctcgccaggaccttgatccccactctaggctagactctagaaatataccgctgccaaggagatttatccatttaaaaaggtcagagaattattgccactgaagcttgggctcagagcaggtgtaaatactcccgaggtcccacgagtgctttatcacactcaggagtgaggacctgggggatgttctgccttggggaagttccttcccaggcagaccatgtaactgccctggtgcctggagagacagagggttctccgggggtgggcacctacatgcccatgccaccttttatcattttcttctccttcccacctgggaagggtctcatcttcagcttcctgggctgccagcaatggtagggacct

SEQ ID NO: 28537 - DNA, 939 bp, Homo sapiens
cccctgctgcaaatgggtttaataataatctttcttgcaatgggggttggggggacaatgttgggaggattacacgagatcacatttgtaaggtgcctggaacacagtaggtgtacaagcaatgccaggcccwcctccccaggcttccctatgcctcgtgggtggaagctctggagtgaggaggaaccgaaacagaataaaaaggagggtgctgccaaccacagaggttattatgctccctggtgatgctagaaggcagggagagagccgtgataataagattctcaccccgttttctgtgtgacggcaaataacagagacatgagaaaagagcatccgtcagaagtcacagagaaggcagacaaggcaaggagatcaaaggaataaatccaccgcaatctgaaaaacagcctgcctgctttcatctgtcggggaggtgacacaaggacccacactccagccaaaaacacacttttttccacccatgctgcatgaagcggggctgagggcatggcagcttccaaaacacacccccttcaaggataataaatcttctccttggtctagccacatctcgccaggaccttgatccccactctaggctagactctagaaatataccgctgccaaggagatttatccatttaaaaaggtcagagaattattgccactgaagcttgggctcagagcaggtgtaaatactcccgaggtcccacgagtgctttatcacactcaggagtgaggacctgggggatgttctgccttggggaagttccttcccaggcagaccatgtaactgccctggtgcctggagagacagagggttctccgggggtgggcacctacatgcccatgccaccttttatcattttcttctccttcccacctgggaagggtctcatcttcagcttcctgggctgccagcaatggtagggacct

SEQ ID NO: 28538 - DNA, 939 bp, Homo sapiens
cccctgctgcaaatgggtttaataataatctttcttgcaatgggggttggggggacaatgttgggaggattacacgagatcacatttgtaaggtgcctggaacacagtaggtgtacaagcaatgccaggccctcctccccaggcttcyctatgcctcgtgggtggaagctctggagtgaggaggaaccgaaacagaataaaaaggagggtgctgccaaccacagaggttattatgctccctggtgatgctagaaggcagggagagagccgtgataataagattctcaccccgttttctgtgtgacggcaaataacagagacatgagaaaagagcatccgtcagaagtcacagagaaggcagacaaggcaaggagatcaaaggaataaatccaccgcaatctgaaaaacagcctgcctgctttcatctgtcggggaggtgacacaaggacccacactccagccaaaaacacacttttttccacccatgctgcatgaagcggggctgagggcatggcagcttccaaaacacacccccttcaaggataataaatcttctccttggtctagccacatctcgccaggaccttgatccccactctaggctagactctagaaatataccgctgccaaggagatttatccatttaaaaaggtcagagaattattgccactgaagcttgggctcagagcaggtgtaaatactcccgaggtcccacgagtgctttatcacactcaggagtgaggacctgggggatgttctgccttggggaagttccttcccaggcagaccatgtaactgccctggtgcctggagagacagagggttctccgggggtgggcacctacatgcccatgccaccttttatcattttcttctccttcccacctgggaagggtctcatcttcagcttcctgggctgccagcaatggtagggacct

SEQ ID NO: 28539 - DNA, 939 bp, Homo sapiens
cccctgctgcaaatgggtttaataataatctttcttgcaatgggggttggggggacaatgttgggaggattacacgagatcacatttgtaaggtgcctggaacacagtaggtgtacaagcaatgccaggccctcctccccaggcttccctatgcctcgtgggtggaagctctggagtgaggaggaaccgaaacagaataaaaaggagggtgctgccaaccacagaggttattatgctccctggtgatgctagaaggcrgggagagagccgtgataataagattctcaccccgttttctgtgtgacggcaaataacagagacatgagaaaagagcatccgtcagaagtcacagagaaggcagacaaggcaaggagatcaaaggaataaatccaccgcaatctgaaaaacagcctgcctgctttcatctgtcggggaggtgacacaaggacccacactccagccaaaaacacacttttttccacccatgctgcatgaagcggggctgagggcatggcagcttccaaaacacacccccttcaaggataataaatcttctccttggtctagccacatctcgccaggaccttgatccccactctaggctagactctagaaatataccgctgccaaggagatttatccatttaaaaaggtcagagaattattgccactgaagcttgggctcagagcaggtgtaaatactcccgaggtcccacgagtgctttatcacactcaggagtgaggacctgggggatgttctgccttggggaagttccttcccaggcagaccatgtaactgccctggtgcctggagagacagagggttctccgggggtgggcacctacatgcccatgccaccttttatcattttcttctccttcccacctgggaagggtctcatcttcagcttcctgggctgccagcaatggtagggacct

SEQ ID NO: 28540 - DNA, 939 bp, Homo sapiens
cccctgctgcaaatgggtttaataataatctttcttgcaatgggggttggggggacaatgttgggaggattacacgagatcacatttgtaaggtgcctggaacacagtaggtgtacaagcaatgccaggccctcctccccaggcttccctatgcctcgtgggtggaagctctggagtgaggaggaaccgaaacagaataaaaaggagggtgctgccaaccacagaggttattatgctccctggtgatgctagaaggcagggagagagccgtgataataagattctcaccccgttttctgtgtgacggcaaataacagagacatgagaaaagagcatccgtcagaagtcacagagaaggcagacaaggcaaggagatcaaaggaataaatccaccgcaatctgaaaaacagcctgcctgctttcatctgtcggggaggtgacacaaggacccacactccagccaaaaacacacttttttccacccatgctgcatgaagcggggctgagggcatggcagcttccaaaacacacccccttcaaggataataaatcttctccttggtctagccacatctcgccaggaccttgatccccactctakgctagactctagaaatataccgctgccaaggagatttatccatttaaaaaggtcagagaattattgccactgaagcttgggctcagagcaggtgtaaatactcccgaggtcccacgagtgctttatcacactcaggagtgaggacctgggggatgttctgccttggggaagttccttcccaggcagaccatgtaactgccctggtgcctggagagacagagggttctccgggggtgggcacctacatgcccatgccaccttttatcattttcttctccttcccacctgggaagggtctcatcttcagcttcctgggctgccagcaatggtagggacct

SEQ ID NO: 28541 - DNA, 939 bp, Homo sapiens
cccctgctgcaaatgggtttaataataatctttcttgcaatgggggttggggggacaatgttgggaggattacacgagatcacatttgtaaggtgcctggaacacagtaggtgtacaagcaatgccaggccctcctccccaggcttccctatgcctcgtgggtggaagctctggagtgaggaggaaccgaaacagaataaaaaggagggtgctgccaaccacagaggttattatgctccctggtgatgctagaaggcagggagagagccgtgataataagattctcaccccgttttctgtgtgacggcaaataacagagacatgagaaaagagcatccgtcagaagtcacagagaaggcagacaaggcaaggagatcaaaggaataaatccaccgcaatctgaaaaacagcctgcctgctttcatctgtcggggaggtgacacaaggacccacactccagccaaaaacacacttttttccacccatgctgcatgaagcggggctgagggcatggcagcttccaaaacacacccccttcaaggataataaatcttctccttggtctagccacatctcgccaggaccttgatccccactctaggctagactctagaaatataccgctgccaaggagatttatccatttaaaaaggtcagagaattattgccactgaagcttgggctcagagcaggtgtaaatactccygaggtcccacgagtgctttatcacactcaggagtgaggacctgggggatgttctgccttggggaagttccttcccaggcagaccatgtaactgccctggtgcctggagagacagagggttctccgggggtgggcacctacatgcccatgccaccttttatcattttcttctccttcccacctgggaagggtctcatcttcagcttcctgggctgccagcaatggtagggacct

SEQ ID NO: 28542 - DNA, 553 bp, Homo sapiens
tcaaatactaaagatatatctttgtatagtacatacttatatcttaaataaggcataactatatcttaaagataatatgggaatattgtgaacaactttatgctcataaatttgacaaaatgaatgagatagataaattccttggaagatataaactgctaaagctaatttaagaactaggtaaccgtattaaccctatatcaagttttagagattgaatttgtagttaaaaactttcccmcaaagacaaatacaggtatagatggccttactattacattctttttttttttttttttttttttttttttttttttttttttttgatacggagtctcgctctgtcttccaggctggagtgtagtggagcattcttggctcactgcaacctctgcctcctgggttcaagtgattcttctgcctcagccttccgagtagctgggattacaggcacctgccaccatgcctggctaattttggtattttttagtagagacagggtttcactctgttggccaggctggtcttgaaaccttgacctcaggtgatccaa

SEQ ID NO: 28543 - DNA, 603 bp, Homo sapiens
ccattctatccactgaatcaaatccaccaacatccatagcggagggtagctagatgcaggcaaggggggctcttgccctgtaccccgggctttagagagccccacatgtcacaaacacacaaaagagtacatttattaattaaagaaaacttctctcttctgggatttggttgtcagagtgacccagtgcagtctgtgaccataaacatccactcctatgactaacaccattcaagccccatggaaatacaactctgcatcctgcccttgaatcagaaagtggtcacttctaattgcactcaaggtctgtaggttgtaccactgcccgtgacattggagacaactgctcagaaggcaggaagaatgtgagtaagaaaaaagacaaatgaattaattaacttgtcaaatccatcatccaccagtgtcaagcattcattccttgcttctctttgttgatcaattcataatccctgagacgtttgtgaatagagcctttggtgtctgggaataggttgcaatactaaccaattcatttgtcttaaatttgtgtaagtgcagaatcacggccccaagatagacattacattggccccaagayggaca

SEQ ID NO: 28544 - DNA, 785 bp, Homo sapiens
  misc_feature (1)...(785): n = A,T,C or G
tgatggagatttaggcatttgaataggacaaattagctgaaatttctgctgcatcaggatgcacaagatcaggagttccaagctgtgacagcatcacccttacaagctaggaggccttttctttgtccaagtgaggcttcttagtcagctctgcccaatttcttaccttgcccagcaggccaggcatatntctttcttcttacttgccactttaattttctttctccatttcccaaggaaagtttcatcattttatatatatatatatatgtatatatatatatatatatatatatatgtatatatatatatatatatatwtatatatatacttctttttctatctttgagacagagtcttgctctgtcacccaggctggagtgcaatggcacgagctcggctcactgcaacctctgcctcccaggtttaaacaattctacctcagcctccatagtagctaggattataggcgcacaatgccacaatcgctgtgtgtttgtttgtttgtttttcgtatttttagtagaggcagggtttcaccatattggccaggctggtctcgaactcctgacctcaagtgatcctcctgcctcagcatcccaaattgctgagattacaggcatgagccaccgcaccaggctaggtttcataataatctaacctaggagctggaacctttttgtgcctacctcagagggaaacaggttgtatttgttttttgtttttagtgagaacatccctatttccttaagaagtttctgctgattatgggaaacagcagaat

SEQ ID NO: 28545 - DNA, 785 bp, Homo sapiens
  misc_feature (1)...(785): n = A,T,C or G
tgatggagatttaggcatttgaataggacaaattagctgaaatttctgctgcatcaggatgcacaagatcaggagttccaagctgtgacagcatcacccttacaagctaggaggccttttctttgtccaagtgaggcttcttagtcagctctgcccaatttcttaccttgcccagcaggccaggcatatntctttcttcttacttgccactttaattttctttctccatttcccaaggaaagtttcatcattttatatatatatatatatgtatatatatatatatatatatatatatgtatatatatatatatatatatatwtatatatacttctttttctatctttgagacagagtcttgctctgtcacccaggctggagtgcaatggcacgagctcggctcactgcaacctctgcctcccaggtttaaacaattctacctcagcctccatagtagctaggattataggcgcacaatgccacaatcgctgtgtgtttgtttgtttgtttttcgtatttttagtagaggcagggtttcaccatattggccaggctggtctcgaactcctgacctcaagtgatcctcctgcctcagcatcccaaattgctgagattacaggcatgagccaccgcaccaggctaggtttcataataatctaacctaggagctggaacctttttgtgcctacctcagagggaaacaggttgtatttgttttttgtttttagtgagaacatccctatttccttaagaagtttctgctgattatgggaaacagcagaat

SEQ ID NO: 28546 - DNA, 785 bp, Homo sapiens
  misc_feature (1)...(785): n = A,T,C or G
tgatggagatttaggcatttgaataggacaaattagctgaaatttctgctgcatcaggatgcacaagatcaggagttccaagctgtgacagcatcacccttacaagctaggaggccttttctttgtccaagtgaggcttcttagtcagctctgcccaatttcttaccttgcccagcaggccaggcatatntctttcttcttacttgccactttaattttctttctccatttcccaaggaaagtttcatcattttatatatatatatatatgtatatatatatatatatatatatatatgtatatatatatatatatatatatatwtatatacttctttttctatctttgagacagagtcttgctctgtcacccaggctggagtgcaatggcacgagctcggctcactgcaacctctgcctcccaggtttaaacaattctacctcagcctccatagtagctaggattataggcgcacaatgccacaatcgctgtgtgtttgtttgtttgtttttcgtatttttagtagaggcagggtttcaccatattggccaggctggtctcgaactcctgacctcaagtgatcctcctgcctcagcatcccaaattgctgagattacaggcatgagccaccgcaccaggctaggtttcataataatctaacctaggagctggaacctttttgtgcctacctcagagggaaacaggttgtatttgttttttgtttttagtgagaacatccctatttccttaagaagtttctgctgattatgggaaacagcagaat

SEQ ID NO: 28547 - DNA, 785 bp, Homo sapiens
  misc_feature (1)...(785): n = A,T,C or G
tgatggagatttaggcatttgaataggacaaattagctgaaatttctgctgcatcaggatgcacaagatcaggagttccaagctgtgacagcatcacccttacaagctaggaggccttttctttgtccaagtgaggcttcttagtcagctctgcccaatttcttaccttgcccagcaggccaggcatatntctttcttcttacttgccactttaattttctttctccatttcccaaggaaagtttcatcattttatatatatatatatatgtatatatatatatatatatatatatatgtatatatatatatatatatatatatatwtatacttctttttctatctttgagacagagtcttgctctgtcacccaggctggagtgcaatggcacgagctcggctcactgcaacctctgcctcccaggtttaaacaattctacctcagcctccatagtagctaggattataggcgcacaatgccacaatcgctgtgtgtttgtttgtttgtttttcgtatttttagtagaggcagggtttcaccatattggccaggctggtctcgaactcctgacctcaagtgatcctcctgcctcagcatcccaaattgctgagattacaggcatgagccaccgcaccaggctaggtttcataataatctaacctaggagctggaacctttttgtgcctacctcagagggaaacaggttgtatttgttttttgtttttagtgagaacatccctatttccttaagaagtttctgctgattatgggaaacagcagaat

SEQ ID NO: 28548 - DNA, 785 bp, Homo sapiens
  misc_feature (1)...(785): n = A,T,C or G
tgatggagatttaggcatttgaataggacaaattagctgaaatttctgctgcatcaggatgcacaagatcaggagttccaagctgtgacagcatcacccttacaagctaggaggccttttctttgtccaagtgaggcttcttagtcagctctgcccaatttcttaccttgcccagcaggccaggcatatntctttcttcttacttgccactttaattttctttctccatttcccaaggaaagtttcatcattttatatatatatatatatgtatatatatatatatatatatatatatgtatatatatatatatatatatatatatatwtacttctttttctatctttgagacagagtcttgctctgtcacccaggctggagtgcaatggcacgagctcggctcactgcaacctctgcctcccaggtttaaacaattctacctcagcctccatagtagctaggattataggcgcacaatgccacaatcgctgtgtgtttgtttgtttgtttttcgtatttttagtagaggcagggtttcaccatattggccaggctggtctcgaactcctgacctcaagtgatcctcctgcctcagcatcccaaattgctgagattacaggcatgagccaccgcaccaggctaggtttcataataatctaacctaggagctggaacctttttgtgcctacctcagagggaaacaggttgtatttgttttttgtttttagtgagaacatccctatttccttaagaagtttctgctgattatgggaaacagcagaat

SEQ ID NO: 28549 - DNA, 785 bp, Homo sapiens
  misc_feature (1)...(785): n = A,T,C or G
tgatggagatttaggcatttgaataggacaaattagctgaaatttctgctgcatcaggatgcacaagatcaggagttccaagctgtgacagcatcacccttacaagctaggaggccttttctttgtccaagtgaggcttcttagtcagctctgcccaatttcttaccttgcccagcaggccaggcatatntctttcttcttacttgccactttaattttctttctccatttcccaaggaaagtttcatcattttatatatatatatatatgtatatatatatatatatatatatatatgtatatatatatatatatatatatatatatatwcttctttttctatctttgagacagagtcttgctctgtcacccaggctggagtgcaatggcacgagctcggctcactgcaacctctgcctcccaggtttaaacaattctacctcagcctccatagtagctaggattataggcgcacaatgccacaatcgctgtgtgtttgtttgtttgtttttcgtatttttagtagaggcagggtttcaccatattggccaggctggtctcgaactcctgacctcaagtgatcctcctgcctcagcatcccaaattgctgagattacaggcatgagccaccgcaccaggctaggtttcataataatctaacctaggagctggaacctttttgtgcctacctcagagggaaacaggttgtatttgttttttgtttttagtgagaacatccctatttccttaagaagtttctgctgattatgggaaacagcagaat

SEQ ID NO: 28550 - DNA, 469 bp, Homo sapiens
tgaaagaacayatgcttggcatggtggctcatgcctataaccccagcaacttaggaggccaaggcaggagaattgcttgaggccaggagtttgagaacagcctggacaacataacaagaccccgcctctaaggaaatttttttttttaaattagccaggtgtggtggtgtttgtctgtggtcccagctactcaggagggctgaggtgggaggatcactcgagcccaggattcgaggctgcagtgagctatgagtgtgaggctgcactccagcctggatgacagagtgagaccctgtctctaaaaaaaataaaaataagaaaagagagaaaatattacctaagctgtggaaaccacgtgtgtaccccctcgttacttgcatgatgtgattttgattgtaaggagccatgtgcaagagacaaccagtgccagcagaggtggtgagaaggatctggaggcttcagagacccc

SEQ ID NO: 28551 - DNA, 435 bp, Homo sapiens
ggggagtgtggcctgaggaccttcgattacagcctgtgggactgggctcaaggagatcacatgccccaagaaaccactgaaccgctggatacacaagaaaaggtttcattaaatacatagctcagctcaaaagaaagaaagggccggcggggtgcgggagctcacacctgtaatcccggcactttgggaggctgaggcaggaggatcatttgaggtcaggaggtcaagaccagcctggccaacatggtgaaaccccgtctctactaaaaatacaaaaaaatgagctgggcacagtggtgcacccctgtaaccccagccamtcgggaggctgaggcacgagaattgcttgaacacaggaggcgtaggttgcagtgagctgagattgcgccactgcactccagcctggggaacaagagcgagactcggtctcaaaaa

SEQ ID NO: 28552 - DNA, 641 bp, Homo sapiens
aagatgaggcaaaactatctttaagtatgaatatgggaatcaaagcttctgttttagtcatcttacacgtgatgatgctgacaatttctacaaatagctaacatgtattgagttcttaattggtgccaagcactgtgtaggttactttatgtgtatttccatatttaatcttataatagccccagagttagctggtaccacgattgtcaccattttacatatgagaagacagagtcatgacaaggttactaaatttcccagagttatgcaattagtaagttgctatagatggaaaatgaactcaagtagtctggctagagtttgtgttgtgaatcctcatcctataacacacgttctgcaggagattagagcttgagatatgtaaatgtgggcatcactgacatctataacaactttggcatatattttcagcattttgaatctacagttaagtttacctttactttgtgaaagtkaaattgctttagttagtgttaagctattaagtcattttatatttttaaaaaaaagctattaagtcattttatatttaaaaaaaaaaagcaatggtttccaggagaaaagggtgatacaacaatagtatgacctgatggaaactatttctatttacaaagaatgca

SEQ ID NO: 28553 - DNA, 2893 bp, Homo sapiens
aacaattctcataaaattttccccagcctgttcagtggaattgtcaaagcatcattttcaaaaagtgaaaacatgattcttatataagtctatagggagtgtgtataaagatctgttcacttcacaaaagaaagaaccagaagatggtaaagctgtttgaaaagagaattggaaggagaaagatttggatagaccatcagaaacagcatgctgacataagtttgctaatttggaaacctcactcattaatgtcctgtagagcaataaaatctttttacaggacaaaaatcatttgtatctctaccagacaaaaattaacatgtaacttggcagagtctgggccctaatcaatagtaaatagtaagtcaaacaaaagtacattcccttagagagttaaaaaaagctttggtggtttgttaggcaaccttccagtatggcattagaaagacgtgcagtcatcctattttgatttccaagtttgggatacttttctttttgagatggaattttgctcttgttggccaggctggaatgcagtggcatgatctcacctcactgcaacctccccgtccccggtccaagcaattctcctgcctcagccttcccagcagctgggattacaggtacacaccaccacgcctggctaatttytgtattttttagtagacacaggatttcgccatgttggccaggctggtctcaaactcctgacctcaagtgatctgcccaccttggcctctcaaagtgctgcgattacaggcatgagccaccatgcccagccaagttcaggatacatgtttaaaacaaaattggtccccctcagcctggtggatgtccctgcagaattttaaaatactatgatgttctagatgtctgatgctgtcaattctcaatggccagaagagggcatctgcccagatcagttcaggtgtctatccctggtccaatcgcctgtgcccagggtagcgtatcaggtacacagggctgtttcttccctgctattggtagaacagcttttccaagaaggggataggctggaatggaagaaaagagtccaaagaggaaggaaccacaacagaaagagaattgctttcctttcagttgtgggagcaccagcttaatgcctcttttccacatttgcccagcagaggaaatgtttgggccgaatgacagaaaacctagggtagcctttttggtgcctcctgacaatcacagaagcaggctgggatcctacccaggtatggcagagcaagtgagcccacctaggtgggaatccttaccctcctaatcctgcaggttcacttcacaatcttgtgtagaccttaaacggttgtttagacagttatatgaaatggagtattttctggagaaaaggacagtgaatggggatatggggatttttttttttttttttttttttttttggaaacagagtctcactctatctcctaaggtggagtgcagtggcatgatctctgctcactggaacctcccgcctcctgggttcaagtgattctcctgcctcagcctcccgagtagctgggattacaggcgcccaccaccacacccagctaatttttgtatttttagtagagacagggtttcaccgtgttggccaggctggtctcaaactcctgacctcagggtattctgcccgccttggcctcccaaagtgctgggattacaagcatgggccaccgcaccgggctggggatttctaagtccacttgactctctcccctctgggcctcaatgggcagcattttatctgtagcctttttatcttataatagtttaactaatggatctattttgagtaagggatatgtacaaattcttttgtgattccaggaggagatgagaagtacaaagtacaattataaaattatcattgtcaccattatctccaatcagcacatcattcacagtgacagttctaagagctttatatgggaaaagtgtaatctattgcaaatagagggccatcattactgctcttaggctccctttaggattagggatgcaggttatcatctaggtcctgcggtctcctagagagagcagggagcaccatctccattagtcaaaagaaagaaaagtaaatgttaagagatgagactagggcaatgactccctgttcttgagacaacgagtcaattcagtgtcgaagaaaaactcagtaagttttgatgccttgctcttaacctacaaacttggtagagccacagaaagaacatggagcaaaatgaagaaatggtttagttcctctaaggatcctttcatacttaggcattgcttaatccagttgactgatttttcaaagaatcttgccatatctgatttgaaagcacacaaagtaggtggctacttcacgcctcatctcttggctctaggatcatattgggattaggctttgggatcaggttctttgcagatcagaaatggcataggggagtgtaccgggaatcagacaaacctaagcacacatccagattctccattttttttttttttttttagctgtgtgggaaaatctctttgctactgacatggtttggctctgtgtccccacccaaatctcatgttgaattgtaatccccagtgttggatgtggagcctgatgggaggtgattggatcatgggggtggtttctcatggtttagcaccatcccccagtgctgtctcatcatagagtgctcatgagatctggttgtttaaaagtgtacagcactcccgctttagctctcttcctccttctccagccaagtaagacgtgcctccttccccttcaccttctgccatgattgtcagtttcctgaggcctcccaagccatgcttcctgtatggcctgtggaactgagagtcaattaaacatctttcttttttttttttt

SEQ ID NO: 28554 - DNA, 1032 bp, Homo sapiens
tgattctagtatggacacaacccttattctaaaagacacagaagcagtaatggcttttctagaagctaaactacgtgaagataataaaactgatgaaggaccagatactcccagttataagagagacaattctatttcaccagaatctgatgtagatacagctagtacaatcagtctggttactggagaaactgaaagaaagtcaacccaaaagcgaaagagtttcactagcctctataaagataggtgttccacaggttctccttccaaagatgttacaaaatcatcatcttcaggtgctagggaaaaaatggaaaagaaaacaaaaagtcgttccacagatgtgggttcaagagcagatggtcrtaaatttgttcagtccagtgggagaataagacagccttcagtagacttaacagatgatgaccaaacctctagtgtacctcattctgccatctctgatattatgtcatctgatcaagaaacttactcttgtaaacctcatggacggactccacttacctcagctgatgagcatgtacattccaaactggaaggaagtaaagtaacgaaatctaagacttctccggtggtatctggttcatctagtaaatcaaccacccttccaaggccgcgacctaccaggacttccctcttgcgcagagcacgacgtggtgaagcttcagacagtgaacttgccgatgctgacaaagcatctgttgcttctgaagtatccacaacaagttctacatcaaaacctcccacaggaaggcgtaacatctctcggattgatttattggctcagcctcgtagaacacgacttggctcactgtcagctcgtagtgactctgaagcaacaatttctagaagtagtgcctcttcgaggaccgcagaagccatcattagaagtggagccagactagtaccatcagataaattttctcctagaattagagctaacagtatctctcgactctcagactccaaggttaaaagtatgacctcagctcatggctctgcttcaggtaaatt

SEQ ID NO: 28555 - DNA, 556 bp, Homo sapiens
tggtctttaggccactggttctcaaagcatcagaattacctggaggrcttgttaaactgtaaattattgggcccttgttccagagtttctgactcagcaggagtgggataggagctaaccttgcccttccaacaggctctctggtggtgttagtgctgctggtctaggggctacgtgttgaggcctaaggtagttatttacatgtcggtttcccactagactgcaagcgccatgaaagacaactggtcttcttcaattagtagcgcaatgcctggcacatactgaacacttaaaagatgtcattgtattacagtatattcaatttctggtacaactcagtactatatgagtttggggatcacaaatagaagttccagagctcaatccttcccatgatggcctccacctgaactctctggacatgcaaggctattataagaccagatcttggctgggcatggtggctcacacctgcaatcccagcactttgggaggccaaggtgggtggatcacctgaggtcgggagttcaagaccagcctgatcaacatggagaaa

SEQ ID NO: 28556 - DNA, 800 bp, Homo sapiens
tcctacctcagcctcttgaatagctaagactacaggcatttaccaacattcctggctcattattttttttctttttttggagaggcagggtctcgctctgttgcccaggctgatcttaaactcgtggcctaaagcgatcctcccacttcccaaagtgctgggattgcaggtgtcagccaccaagcccagctcaaatacatattttaataagctttactaacactaagtgacataaatgggcaattctttctgataacctactggtagggcatgtatttagagatgatttgtgtaagagttaattaatttctcctttattttatactgggcactatagcatatacttgcaagaagggtaatcaggtacagtgaaaggcaaatgcagtatcagaawatactccttggtgggtctaaatttatatcccccatgttctaaccatttctaacaataaactgcatgaatgaccaatattggcagatcctgtatttgtctgtatttgatggcaggtccatcatgttggacctcgtagggcttagcaaataccaagaacataaattcactcaggcttatatgaaaataatttaagctcaaagttatcaaactatgaattcaaagccattttacactccagaatgagttttcagtattctgaatcttggtaatcattagttagcctctcatactatctattgcacttcaggctagtgttacattgtagcactttatcaatacttacatgggcattattttcttctttaacttcccccaagaagcaagaccaaaatagcattacccatag

SEQ ID NO: 28557 - DNA, 1022 bp, Homo sapiens
atgagagagcaggacagaagccacagtagctattttaatgttacctcagaaaacatactttatttcttcaatattccaatagttacatagaccaccaatactcattgtgagtgaggactacacagtagtgtcaatactaagagaaaagaatcagtggagaatttgggaagtggcttaccataggttgggtttttaggaaatcagtattattataaaatgtcaatattgctcataaaaaagtaaaaaatgaaaaaacaaagcaataattattctttttatcattcctttcattaaaagtagataatagccaacaaatgcttattaatatggtaaggttgagcatcctccatctgaaaatttgaaattttaaatacgcccaaatctgaaacttcttgagcttcaccatgacaatgcaagtcgaaaatcccacacctgacctcatgtgacaggaggcagtcaaagacaaataaaaaatacagattattaggcattgccaaaagaaaaaagaccctgccagtccccttcaactgcaatatatctgttccatacatgctagattttcccacactagcacacccataaagtttaataaaatagcatatatgcaagccaggtgcaccaatagtaggctccccatatatgggattgagtcctatgtgcgttacccactgtgaatttttgtgktttttttttcacaatttccactttgtgatataaagacattgttgaaaatttcaaaaaggcctgcagatacacctatgagtaagagtggtaagaataaaaaaaggaagcatttatgtttatagcatggaaagtcaagctcttggagaaactggacagcagtgtaagtatgaaacatattacagaagagtatggtgttggaatgaccaccatatatgacccgaaaaacagaaggacgaattgctgaagttttctgttgaacgtgaaagacattaataaaacattaaaaaaaatactgcataaagctaaaaatgaagatctcaatcttgtattgaaagaat

SEQ ID NO: 28558 - DNA, 548 bp, Homo sapiens
attttrgtttccattttgaaggtgagaaaaccaaggctccaagagtttaaggaatttcccaaggccacaaagctaaagctgctaaagccaagatttgattccagtctgcctgatgacatgagttgggcttgtcctccctgaaaacacttcccacagtctccattcgcagcttccatgagagcagtgggtgtatcttgtccagtgttagtgaccagcatgatagaaggaagcacagagagtaggggttcaggctaagaatggcagctaaatacattagtgttgggaaagagatatggtatttacatttagctagagattttaacataaaggaagttcattatacttaaagctgactgttaaaacttcacagtaaaaatttaaactgattcactttcccattggcccagtggctctaacttctctcttgttctcccagtccacactagcaaggatcaagggtgctcctcaggttgtgtaaatcggatcatgtcactccttcacttacaagccttcagtgatttcccattgccttaaagattaattccaaa

SEQ ID NO: 28559 - DNA, 839 bp, Homo sapiens
tgagaagcctataatggacaaataaaattgggtgatgtggccacataaaaatcatcatgtgccctcagcttcctgaccaacctggtgcttctgcatgtggtcctgcatggcttgttgtgcccccttatcttggaactacttacagaaacattataataacaaagaagtcctggctgcagctggtgctctcttgaaagtgccaaatcctgactggagactaaccaacttaggttattatagcaactcatgacataataaccctgatcctaggaagaagaagacaacagctaattccactgcctgcaacatcctggataaccagaggtttttttttttcttctgagacagattcttggtctgttgcccaggatggagtgcagtggcatgatctccactcactgcaacctccacctactgggttcaagtgattctcctgcctctgtttccccagtaggtaggactacaggcacacaccaccacacctggctattttttgtatttytagtagagacgaggttttgccacgttggccagggttctcaaactcctgacctcaggtgatccacctgcctcggcctcccaaagtgctgggattacaggcgtgagccaccatgcctggccaaccagaggtgttgagtgtgtccacacaacaaattcactgctagcataaccagcattagagaaagccagaacactaaacatatctacaaccaaggactctcacagagtctacgtcacctccactagatcaggtgctggtatccatggctgggagacctgaagacagatcacatcacagtactctttgcacacattccccagcaccagcccagagccca

SEQ ID NO: 28560 - DNA, 583 bp, Homo sapiens
gttccaggtgcactgtgattactatctgaatgccattactatttaaattgcattttttttttgagacagggtctccttctgtcacccakgctggagtgcagtgaggtggtcttggctcactgcagcctcaacctcctgggctcaagcaatcctcccacctgagccttccaagtgcctgggactacagccacgcgccgctacacccagctattttttttgtatttttggtagagacagggttttgccattttggccaagctggtctcaaattcctgacctcaagtgatccccccgtcttggcctcccaaagtactgggattataggtaggagccaccatacccagccttaaatttcatcttttaaaagagaaagagagcttagaatcttaatcagttacctgaggccctttatcctgcaatattctgaattgggatgttcctattttacatattaaaaaatgtaaaactgatttatatggtagataaccctacagttcagggctagaactttagattaaatgcattcataccctggcagatgtggtagcttgcctccaagatggcacccaatgaatgatccctg

SEQ ID NO: 28561 - DNA, 573 bp, Homo sapiens
tgggagtgggactgaaatcctcacaccctgcatctctcatacccacccgcaatggtaagagcattcacaggacttgagcttccagcaagaggatgcctgatcaaattgtttgccccctgtgaaatcaccatattaatgggaagataggcttgcttaggaacaacggagtytgtgcctctcctgcaggagaaaccaggagctctaagagaatgtataatgagaacttctatgtgtggagagttaaacaagaagctgtctcatcccagggaagatgaacagaaaatggcggatctgggcttgaagtgcacacagtgttggaaaaggccccacctaaggctctaggaccagcagtccctgagaagtagctgtgtgtaggattaagacaagctgactgcggagagctgtgacattgggcattcaagcatgaagcattgttggcccagagagggtgcacaagcattctccctcagagaaccatggtgttccagagccagagagagatggagagcttccacaatccttgtgaagatctgttatcctaacaccaatatatcccctttaagaaaatggtgg

SEQ ID NO: 28562 - DNA, 573 bp, Homo sapiens
tgggagtgggactgaaatcctcacaccctgcatctctcatacccacccgcaatggtaagagcattcacaggacttgagcttccagcaagaggatgcctgatcaaattgtttgccccctgtgaaatcaccatattaatgggaagataggcttgcttaggaacaacggagtttgtgcctctcctgcaggagaaaccaggagctctaagagaatgtataatgagaacttctatgtgtggagagttaaacaagaagctgtctcatcccagggaagatgaacagaaaatggcggatctgggcttgaagtgcacacagtgttggaaaaggccccacctaaggctctaggaccagcagtcccygagaagtagctgtgtgtaggattaagacaagctgactgcggagagctgtgacattgggcattcaagcatgaagcattgttggcccagagagggtgcacaagcattctccctcagagaaccatggtgttccagagccagagagagatggagagcttccacaatccttgtgaagatctgttatcctaacaccaatatatcccctttaagaaaatggtgg

SEQ ID NO: 28563 - DNA, 775 bp, Homo sapiens
cctgaggtcaggagttcgagaccagcctggccaacatggcaaaaacctgtctctacaaaaaatacaaaaattagccaggtgtggtggaggtcaccaataatcccagctactcaggaggctgaggcaggagaatcacttgaacctggggggcagaagttgcagtgatccaagatcacaccacttcattccagcctgggaaaaagagcgaaactctgtctcaaaagaaaaaaaaattatgcttctatgtatataatatttttttccaagaagttccaaataaagaatagaaaaaggggcaatgctatctattattacataaaaggtgagtttgattaaaagttaggctyttaagttaggtcacctatattaaaattctaacttcaacatttaatctctgtgtattcttttttttttttttttttttagctattcttttttttttattatactttaagttttagggtacatgtgcacattgtgcaggttagttacatatgtatacatgtgccatgctggtgtgctgcacccactaactcgtcatctagcattaggtatatctcccaatgctacccctcccccctccccccaccccaccacagtccccagagtgtgatattccccttcctgtgaccatgtgatctcattgttcaattcccacctatgagtgagaatatgcggtgtttggttttttgttcttgcgatagtttactgagaatgatggtttccaatttcatccatgtccctataaaggacatgaactcatcattttttatgg

SEQ ID NO: 28564 - DNA, 775 bp, Homo sapiens
cctgaggtcaggagttcgagaccagcctggccaacatggcaaaaacctgtctctacaaaaaatacaaaaattagccaggtgtggtggaggtcaccaataatcccagctactcaggaggctgaggcaggagaatcacttgaacctggggggcagaagttgcagtgatccaagatcacaccacttcattccagcctgggaaaaagagcgaaactctgtctcaaaagaaaaaaaaattatgcttctatgtatataatatttttttccaagaagttccaaataaagaatagaaaaaggggcaatgctatctattattacataaaaggtgagtttgattaaaagttaggcttttaagttaggtcacctatattaaaattctaacttcaacatttaatctctgtgtattcttttttttttttttttttttagctattcttttttttttattatactttaagttttagggtacatgtgcacattgtgcaggttagttacatatgtatacatgtgccatgctggtgygctgcacccactaactcgtcatctagcattaggtatatctcccaatgctacccctcccccctccccccaccccaccacagtccccagagtgtgatattccccttcctgtgaccatgtgatctcattgttcaattcccacctatgagtgagaatatgcggtgtttggttttttgttcttgcgatagtttactgagaatgatggtttccaatttcatccatgtccctataaaggacatgaactcatcattttttatgg

SEQ ID NO: 28565 - DNA, 333 bp, Homo sapiens
tgggttttgcaggaagagactggagggtgtttaacctgaacttttgctgcttttataatggcagcagactctctcatgggtattggcctggctggctcatggattcaaacagcttttaggatagtcagcctccctgagtcgtgcatccccaaatagacaacattgtccagttttgcatactactataaactaaagatttgtatgcctctaagatacacatgttgaaacctaatccccaaggtgatggtattaggaggtggggctctgggaggtgattaggtcataagggcagaaccctcatgaataggattagtactctyttaaagtacaccc

SEQ ID NO: 28566 - DNA, 623 bp, Homo sapiens
tgggttttgcaggaagagactggagggtgtttaacctgaacttttgctgcttttataatggcagcagactctctcatgggtattggcctggctggctcatggattcaaacagcttttaggawagtcagcctccctgagtcgtgcatccccaaatagacaacattgtccagttttgcatactactataaactaaagatttgtatgcctctaagatacacatgttgaaacctaatccccaaggtgatggtattaggaggtggggctctgggaggtgattaggtcataagggcagaaccctcatgaataggattagtactctcttaaagtacaccccagagagcccccttgccctctccactatgtgagcacacatcaaaaaggtgacatttatgaaccagtaagcaggccctcaccagacaccaagtctgccagtgtcttgatcttggacttcccagcatttgaaactgtgagaaataaatttctgttgtttgtaagccacctagtttatggtatttttgttatagcagcccaaatagaacaagacacatgctaagccaaggggctaatcctgctcagctcaagtaggaagcttgagtgatgagcaggaaagggggaagtaaaga

SEQ ID NO: 28567 - DNA, 1082 bp, Homo sapiens
tagaaagttagccaactgatatctgaaaaaagagagttrtgggcagaagaaatagccactgccaatgggaaattcagggaacaataaagaggacggtgctcttggagtgaatgatggaggaagagactggttggagatgagatcagagaggttagagggatgggatatgtagacctggaggccattgtaagggctcggatctttactttgagtgcgatgttagttgacttacctttcctttggagcctggtatgacagttgatttttcagaacttttctttgttttcatgcatactctgtgtcttgactttagtactaattactcaagggaagaagcatgccatattcatctttatagtgctaatgcctaatatggtgcctagaacataggccatactcaatgagcatctcttgaattgataatattgttttagatgcttatcctgggaattttctaaagataacataatgcttttacctggttaaaatgtacatgacacttgaaggccactagaaaataaaatcttataataggccttttttagtttctctcaagtcccagccagagatggatgtgtgcccttgcagcatattacttaccctatatcacaccatttaataaaaagatacaagcttggaactcagatgacctaggtttgacaaccagaaatcccacttactagttacatgaccttaaataaattatgtaattcttcaaaaccttttatgtcagactaaatgccatccaaatcatgggatccaatgagaatctaaaaatataatgtggaggaaaaccttttggtaaactgcactgcaatatatgaatgcctaatattcttattgtaatttaagcatttgctaatatttgacatgaaaatataaaattgtccctaaaaattataaacatactatttggcagaaccagaaattatgttgtgttgctctggatgctcagtgaggaaggaccggtttcaccaaaggaataaatagttctgttgctctaataatttgccatactgttgaattttttctcactctcctataacaactttgcttatgttaggatattcttaaaataggat

SEQ ID NO: 28568 - DNA, 777 bp, Homo sapiens
gtaacaataaaaacaatgaaaatgggtagctattgctaatacacaatcaacactgtggaaaaagataatggaaagctgatagtgattaatcatcaattaaaagctaagtgtgaaagccagatggcccctttcataacatttgaagaggctctgatcacctgtgatgataggacagaaaaagccaagggttaggctgaggacctaagagcagttgagtttgtcaaccaaggtaggtttgctatgccaaggacagggccctgcttgggaaagaactggaccattacccatgggatgaagacatctgggttgatccacttgaaaatgttgaatctctatacttccctgaaccttctaatcatgaagaagcaggccactcctgctgattaggggctggcactcccctcttgctcaaagatgatgcaaaagcttcttcccaggaaaataacatgtgcccccatggctcgccctcatcttcctcctggtcactaggccaacaatgaggtttgaggcacaacataatcaagcgatgcaatagcaaataataaagactaaatgctccttaagtccaggcaacstggtagggaagtgagaaaagtaggacctgacttgcagcctgccagggaggaaggagactacaccccagggcctggccagcatgtagcagcaggagtgaggagaggacacatcggactggattctcagggtgctggagcaaggagggcaaacgtaaggttgaataacgaagagtttatagctttgggaatgctctcctgggat

SEQ ID NO: 28569 - DNA, 777 bp, Homo sapiens
gtaacaataaaaacaatgaaaatgggtagctattgctaatacacaatcaacactgtggaaaaagataatggaaagctgatagtgattaatcatcaattaaaagctaagtgtgaaagccagatggcccctttcataacatttgaagaggctctgatcacctgtgatgataggacagaaaaagccaagggttaggctgaggacctaagagcagttgagtttgtcaaccaaggtaggtttgctatgccaaggacagggccctgcttgggaaagaactggaccattacccatgggatgaagacatctgggttgatccacttgaaaatgttgaatctctatacttccctgaaccttctaatcatgaagaagcaggccactcctgctgattaggggctggcactcccctcttgctcaaagatgatgcaaaagcttcttcccaggaaaataacatgtgcccccatggctcgccctcatcttcctcctggtcactaggccaacaatgaggtttgaggcacaacataatcaagcgatgcaatagcaaataataaagactaaatgctccttaagtccaggcaacctggtagggaagtgagaaaagtaggacctgacttgcagcctgcsagggaggaaggagactacaccccagggcctggccagcatgtagcagcaggagtgaggagaggacacatcggactggattctcagggtgctggagcaaggagggcaaacgtaaggttgaataacgaagagtttatagctttgggaatgctctcctgggat

SEQ ID NO: 28570 - DNA, 814 bp, Homo sapiens
ccttgacctcagtaaaagccccccttaagtccaccaaccttctgagagcctccacttggctctggtggggcagtgccctggaagagaggtttggggctgctgatcctggccgagggtcttccagaatgacgctactcaatgtccaggaatcataggagcccagtgtcttggcctcaccaggctctgtcaccccctcaaccctgtggccctgcagttcttgaagctcaggtcccagtccttggtgacgactgaacaaccctggcctctgcttacttcttcaggaagctggagccttaccctgttagcaacgtctttccagcatcccygggagagaagcagcttgccagccctctgggcttggttttaaacctgcaactggagcgtggcccagaggtatgtgtgtgcctgggccctgcccagtgagcgggagcctggctctgagcatcctgcctgaacatccccagcccctggcggggcgacgccactgagcaagacaccctgggaggtgaattcggcaatgggatggcacaaaggcccagctttcccatctaatgagacaacttccaccgaactcacaacaccgtaaaccttctagagaccaaggcaacgtgcacccagaaaatgtttggatcattctctgcctagactaatttagagggaagattctcagcgaatccagcccccaacccttgattgtctccggcaaggatgttaggtccccctgtgcttcaacatgtttggaacaagaaccaattcgtttgttcctaacgtgacacctggaggaggcagagtcgctgtggatgccacgccacct

SEQ ID NO: 28571 - DNA, 553 bp, Homo sapiens
tgaagcatgtgtacagctgaatcagtagaagctaaataygtgtcctttggaggaagaaggcaattagaagtgtttttttgttgttgttgttgttttggttgtttttgtttttgtttttgagatggagtctcgctctgtctccaggctgaagtgcaatggcacgatctcagctcactgcaagctctgcctcctgggttcaagcgattctcctgcctcagcctcccgagtacctgggactacaggtgtgtgccaccacgcccagctaatgtttgtatttttagtagagacagggtttcaccatgttggccaggatagtcttgatctcttgaccttgtgatccgccctcctcagcctcccaaagtgctgggattacaggcatgagccactgcacctggcctggaagttttcattggcagtgttagtaattatgaagagggcaggagaaaatacagagcacaacttaaggaaacacttcttatgagagcactattacctactttagagttgaacaacagaccttgtacctaagcaaatatttttgtcaataactggc

SEQ ID NO: 28572 - DNA, 553 bp, Homo sapiens
tgaagcatgtgtacagctgaatcagtagaagctaaatacgtgtcctttggaggaagaaggcaattagaagtgtttttttkttgttgttgttgttttggttgtttttgtttttgtttttgagatggagtctcgctctgtctccaggctgaagtgcaatggcacgatctcagctcactgcaagctctgcctcctgggttcaagcgattctcctgcctcagcctcccgagtacctgggactacaggtgtgtgccaccacgcccagctaatgtttgtatttttagtagagacagggtttcaccatgttggccaggatagtcttgatctcttgaccttgtgatccgccctcctcagcctcccaaagtgctgggattacaggcatgagccactgcacctggcctggaagttttcattggcagtgttagtaattatgaagagggcaggagaaaatacagagcacaacttaaggaaacacttcttatgagagcactattacctactttagagttgaacaacagaccttgtacctaagcaaatatttttgtcaataactggc

SEQ ID NO: 28573 - DNA, 553 bp, Homo sapiens
tgaagcatgtgtacagctgaatcagtagaagctaaatacgtgtcctttggaggaagaaggcaattagaagtgtttttttgttgttgttgttgttttggttgtttttgtttttgtttttgagatggagtctcgctctgtctccaggctgaagtgcaatggcacgatctcagctcactgcaagctctgcctcctgggttcaagcgattctcctgcctcagcctcccgagtacctgggactacaggtgtgtgccaccacgcccagctaatgtttgtatttttagtagagacagggtttcaccatgttggccaggatagtcttgatctcttgaccttgtgatccgccctcctcagcctcccaaagtgctgggattacaggcrtgagccactgcacctggcctggaagttttcattggcagtgttagtaattatgaagagggcaggagaaaatacagagcacaacttaaggaaacacttcttatgagagcactattacctactttagagttgaacaacagaccttgtacctaagcaaatatttttgtcaataactggc

SEQ ID NO: 28574 - DNA, 765 bp, Homo sapiens
tgtgtgtgtgtgtgtgtgtgtgtktgtttaacttttaagttcagaggtacatgtgcagggtgcataggtttgttacataggtaaacggtgtcatggggggttttctatacagcctatttcatcagccaggtatgaagcccagtatccattatttgttttcctaatcctctccctcctcccacccactgccctcctgtaggccccagtgtgtgttgtttccctctatgtgtccatgtgttctcatcatttatctcccacttataagtgagaacacacagtatttggttttctgttcctgcattagtttgctaaggatgatggcctccagctctgtccgtgttcctgcaaaagacatgatctcattttctcatttttttaatggctgaatagtattccatgatgtgtgtgtaccacattttctttatccagtctatccctttctgctcaaggaattctctcattaaaactgttatgttggagataaaaacttttgtctaatacaatttttacatctcataaaaatactggtgaatttattaatttaacactagataaaaataataaagtgtttctttatccactttatttatttatttatttatttatttatttatttatattttttgagacagagtcttgctctgtcaccaggctggagtgccgtggtgcaatctcagatcgctgcaacctctgactgcctggttcaagcagtgctcctgcctcagcctcctgagtagctgggattacaggcatgcgccaacacat

SEQ ID NO: 28575 - DNA, 343 bp, Homo sapiens
attctagttttcatcttttaaattgtgagtacaatttattcttttccacatgaaaaaagagctacttgaattctatgagcagatggttcacatcgttttcctatttctattggattattggattgcaaatgatttttatccttcttgcacatgaccagttaatctctggttataatatgccaggaccccatttctgaaagaattcatactttttgcacgtaaaagaagcaagtcaaaattctagttccttagttccttacagttttcatcttctaatgctggcctctaccctacctgatttttttttttctttttttktttgtttgagacggagtcttgctct

SEQ ID NO: 28576 - DNA, 629 bp, Homo sapiens
ccagtagctgggattacaggcacccaccatcacgcctggctaattttttttttggttatttttgtagagatggggtttcaccatgttggccaggctggtcttgaactcctgatgtcaggtgattcgcctgccttgccctcccaaagtgctgggattataggtgtgagccacaacgcctggccaaaattcttgtccttctaaacacagctctgatacccccatgatggtatctctggtcatctaagtgaaaagggggtccttcatttttgctgcatgcgtcactaaccattgttccctcactggagccctggatgctcttggaggtgctgggatagataagctttgtctcttccatactggaccatcctacctcccccaagcgaggctcagcaggtgctgtattcttggcccatagcaggtactcaatatgtttgttgaaacagtgaacctgtctggttcaatatctgctgtggagacttggacttagtttcacaattaaattgctaactttttaaaaaagtcattcatttatttcctgtgttgctgtttgacttctggggatgctttcacattaaaaaaaaattgtcttttcaaatagagccagacatggcagcttgtgcctgtartcc

SEQ ID NO: 28577 - DNA, 625 bp, Homo sapiens
gacaggtaaacatagtgtacatgttatttttaaattccagacaaaagcatttaaaagaaaaattttaggcctaaaaatgtcagtaacttcatgaaagtagaaatctaacagaccatattttctaaactctgtgaaatgacagtwgaaatgtcagtgaaatgaaatcaacaagtaatatctagccacatgcaagttttatttaagatcaacttaaataactattgggttaatgtgaaaattaaagcaaagaatattttacaaagtcatggaagtacttaagaggaagtcttgtgactggagtgaaaagactttaattcatctaattacttcttttttaaaaaaattcaattttattttgggttcagaggtacacatgcaggtttgttacatggatatgttgtataatgctgaggtttggggtagaaatgatcgtgctacccagatagtgagcatagtacccaataggtagtttttccaagtctctctcccctccctccctctgtagtagttgccagtgtccattgtttccatatgtgtactcaatatttagttcccacttgtaagtgagaacatgcagtatttggttttctgttcctgtcttaattcacttaggataatggcctcc

SEQ ID NO: 28578 - DNA, 625 bp, Homo sapiens
gacaggtaaacatagtgtacatgttatttttaaattccagacaaaagcatttaaaagaaaaattttaggcctaaaaatgtcagtaacttcatgaaagtagaaatctaacagaccatattttctaaactctgtgaaatgacagtagaaatgtcagtgaaatgaaatcaacaagtaatatctagccacatgcaagttttatttaagatcaacttaaataactattgggttaatgtgaaaattaaagcaaagaatattttacaaagtcatggaagtacttaagaggaagtcttgtgactggagtgaaaagactttaattcatctaattacttcttttttaaaaaaattcaattttattttgggttcagaggtacacatgcaggtttgttacatggatatgttgtataatgctgaggtttggggtagaaatgatcstgctacccagatagtgagcatagtacccaataggtagtttttccaagtctctctcccctccctccctctgtagtagttgccagtgtccattgtttccatatgtgtactcaatatttagttcccacttgtaagtgagaacatgcagtatttggttttctgttcctgtcttaattcacttaggataatggcctcc

SEQ ID NO: 28579 - DNA, 1221 bp, Homo sapiens
gaagcctcctaaacggtcccacattgcagcagggctggtgaggcctgggatccattctctctcttttctgcccttcccatcccggagtctcggggccggcggcgggaattccgcgcagccggaggggggtctgcgcccagcggagcgccgtgctggggcgaggtggctgtgggcagagcgtgcaccggggttggggggagaaggggattgaaggggcggggggcgcgggagtacctgggcggcaggcagttggccctggagctcagtgcccgcgttctgcctgagttgggagagccctgccagagggtggagcggagagggccgtgcacccctcactcttcagcttccctccccctgcttcccagcgcttgtcatatcctgtctctggcctgatatttcacgcgagcaattggaaggagattacaatggagatttatgtgtgttctgagcactgctagtttcccagcgtagagagccgagatcgctgcttcccatttccatttttcattcgcgctttggggagctcagtagagcacggggggagcgtgtctgcgcggcggcgggctgatcacaggactccgcgtctccgggcgggccgggagactgtgagaaaggcttgccagcgcgtcgcccccggcggggctggagccggcccccgcctccaggagccaggctttgtttcctcccttgcctacccctccccctttccgccccctcatttctgggacctgggcgcgtccttgcaaccccttctctttgcccttctcgtggtctgcggaaacacccccttcctctggccccttcaccctcctgctctcggcttcgcaggctccctggggaaaggcrcaccgtggcccggcccgaccctgtcgtcactgggtgccgggtaaggtgactccggcgagtctgtggggcctcagcccaccccggagctgggagctcccgccctcccgactcccaggcttggctcatgccaaggcctgttgcgtgattccaacttgggctgacattccctgccccgggctctccagcgtaggcctcttaatcatcttgtctgctgcagatcctcgacaccagccaatttactgcccgtctctccccgctggtttcgggaggagggaggggagtgcgtgcaaaggaggggagggcacagtcaccctcaggaggaaggctggcaccagttagtggcactaaaaagaaaaaaaaaacaaaaaaaaaaga

SEQ ID NO: 28580 - DNA, 1221 bp, Homo sapiens
gaagcctcctaaacggtcccacattgcagcagggctggtgaggcctgggatccattctctctcttttctgcccttcccatcccggagtctcggggccggcggcgggaattccgcgcagccggaggggggtctgcgcccagcggagcgccgtgctggggcgaggtggctgtgggcagagcgtgcaccggggttggggggagaaggggattgaaggggcggggggcgcgggagtacctgggcggcaggcagttggccctggagctcagtgcccgcgttctgcctgagttgggagagccctgccagagggtggagcggagagggccgtgcacccctcactcttcagcttccctccccctgcttcccagcgcttgtcatatcctgtctctggcctgatatttcacgcgagcaattggaaggagattacaatggagatttatgtgtgttctgagcactgctagtttcccagcgtagagagccgagatcgctgcttcccatttccatttttcattcgcgctttggggagctcagtagagcacggggggagcgtgtctgcgcggcggcgggctgatcacaggactccgcgtctccgggcgggccgggagactgtgagaaaggcttgccagcgcgtcgcccccggcggggctggagccggcccccgcctccaggagccaggctttgtttcctcccttgcctacccctccccctttccgccccctcatttctgggacctgggcgcgtccttgcaaccccttctctttgcccttctcgtggtctgcggaaacacccccttcctctggccccttcaccctcctgctctcggcttcgcaggctccctggggaaaggcacaccgtggcccggcccgaccctgtcgtcactgggtgccgggtaaggtgactccggcgagtctgtggggcctcagcccaccccggagctgggagctcccgccctcccgactcccaggcttggctcatgccaaggcctgttgcgtgattccaacttgggctgacattccctgccccgggctctccagcgtaggcctcttaatcatcttgtctgctgcagatcctcgacaccagccaatttactgcccgtctctccccgctggtttcgggaggagggaggggagtgcgtgcaaaggaggggagggcacagtcaccctcaggaggaaggctggcaccagttagtggcactaaaaagaaaaaaaaaacaaamaaaaaaga

SEQ ID NO: 28581 - DNA, 597 bp, Homo sapiens
gctacttgggaggctgaggcaggggaatcacttgaacctggaaggcagaggtcgcagtgagccaagatgcaccactgcactccagcctgggcaacaagagggaaactccgtctcaaaagaaaataaataaataaataaataaataaataaataaaagaaatagaaatacaaataaaaatgcttacgtgtttacacatttgaaacatgcayagggttttatgcatttgaaaacgcgtgcacaagtacatgcaaacaatctgacatgactgcctagggtcagttccctgtgaataacctgcaaggttcttccctctgctcccctctccattttcaaagaagcgagcagaagcagcccatgtgtagcacacagggaaactacagagaggcttgtcaaggcgggactttgccccgcttactgaatggggcagtccttgccgcacgggttaggagcagtatttggcctttccaaacttcagtgctgcaggcgggccctgcacttccccatccacagtgcctgacggcttcacaatgcccctggaccacccactgccgcctcggaggcccacgcccaaatcccctggcctggcctggtccact

SEQ ID NO: 28582 - DNA, 874 bp, Homo sapiens
tgaagaacgagaaatagttatacattaaagaaactttaattcaaggtatagatctcttttgagtccttactttaccaaacaatattttatatggctaaatgacacaacagtaccattggtcattgagctgctttacttaaatgagcccacttgcagagataatcattcatcgctcctaaaaatgtttactggatagttattataatcatgtgacagtattagatacttggttcacagacaggcatgatctttatcccagtagagctgggataaagttatatgagatgttaatttacatttgttttctatatttgctagtttattaatttattaattcactcagcagtttgtactgaatgtttactatgtccccggcactaatagtatggagaatacagcggtgaataaaacatatgacatctctttcttatgacattctctaatgtctttcacatcatttgctattatgtagcttcctccagatatcccacatttccgattatccttacacataaaaagccttttcttaagtagttccatttctacttaaactgttatcacaaagagaaaatttcaggaatttagaaagtgaactctttttccttatatggggatgaacctgggaagaagcagcaagtagtagttcaacgtgctttacttgctaggagttccacaaaccatgagattgttacactttttgtggaagaagcagacaagtacattttggcaaaaatagaaattccctaacaacagaaaacatcatcccagtgagacacttcattagagtattccacttcaaccagagtgttcagacccagrgaaggtgatttctagtgactccatttcatttatctcctatacagatcctcaaagg

SEQ ID NO: 28583 - DNA, 506 bp, Homo sapiens
tgtttacaatgagcctgtcactatgttcggcattaagaaaggaaatagtgaggtcagaaacattttctrttctcaataaactcacagtgtaatgtctgattctaaaaaggaaacgagttattataggtcaatttaatgaaacacagaggctactagaaccttcagaaagaccacagagtttagcctttagaaaatttcttgaaggaagtggtgtctaagctgaaatcacaagaaatcaagaagctaaggagatgagaaagggaagcagcaaaggggaacagcatacacaaaggaacagcatatgcaaagcggaagtagcaagggggagcagcatatgcaaagagggaacagcatatgcaaagggaaagccttcagaaatttatttttcctgtttctattagatttttctacaggagagctggcaagagaaatcacactcagtaaacatgtgtaatgttttaataccagagatgttgctatgacacgttattttatctaatatgtga

SEQ ID NO: 28584 - DNA, 506 bp, Homo sapiens
tgtttacaatgagcctgtcactatgttcggcattaagaaaggaaatagtgaggtcagaaacattttctattctcaataaactcacagtgtaatgtctgattctaaaaaggaaacgagttattataggtcaatttaatgaaacacagaggctactagaaccttcagaaagaccacagagtttagcctttagaaaatttcttgaaggaagtggtgtctaagctgaaatcacaagaaatcaagaagctaaggagatgagaaagggaagcagcaaaggggaacagcatayacaaaggaacagcatatgcaaagcggaagtagcaagggggagcagcatatgcaaagagggaacagcatatgcaaagggaaagccttcagaaatttatttttcctgtttctattagatttttctacaggagagctggcaagagaaatcacactcagtaaacatgtgtaatgttttaataccagagatgttgctatgacacgttattttatctaatatgtga

SEQ ID NO: 28585 - DNA, 1465 bp, Homo sapiens
agtctcttaaaaagagtcaactcaaaacacacagaatgagaacctccaataaatggcctggggaatcaacattttaaagaaagtcttgcctacacacgttaatatttgagaatcattgtatactatgatgtactacagctcattatttaatatccaaaattcaattttgaaaatttcattaaaactcagagaaaaaatatttccaccacatgaaactccccttttgttttaacagaatagtcattttattatggatgctgtatgaacacgctattttttttatagagaagtaactattttcccaaacagaaattattctttaatttggaagactgcataattctaataattaagtataagttgtctctttttactcaggagttatcaatccacttatagatgattaagatttttagttaacatttttctatttcctttttggccattgcctgtaggtttacatctctaactaaaagaaggaaatgtctgtaacacactctttaaatttgtgtgtgtgtgtgcatgtgtatatatatatatatgtgtgtgtgtgtaccttcatcttttattaccatagagaaaaatgttagtactctacatgtaatgtgtttgatattatgtttaatattttaataattcaattttagrttataaacatcacaccaggctcattattctgcaatacacacatataaccatgcacagacacacatacagacacacaggcatactgaatgcataatacaggaatatttcagaaaaaaaatttgtatcatcatttggtatgaataggacatgcttttttacagaagaaatagtacaaggatatttaaaagcatgtgacactattacacattgaacactcattacagagacaaaatctatagagcataatttctaaaaaggatattcattatcaagaaatagaaatactaagccattaacctaccctcttttaggatttactgcaatagcatagggttctccagccatatttgttaagagtctggtgcagttggggccattcagctgccctacgttgatagagtacctcagactggtccagtgagtagtgtagtaactgaaccaatgcattctagaatgatcagtccagtaaatgtttccagccacccagtcaactgcaatgtccctgggccttttaaattcaggacactacaaggaaacaaaacaacacaccacggtattttcaacaggaaattagcggagttttctgtatctttacattgaagttatgggggaattgtaagaacatagtcatgagttaattgctatatagatgtcaaaaagatatttaatgctattttcaatctttgcagatgtattatctgcatgaatcttaattgtacagatcactggagtttaaccagattgcacctgtttaaccattactctgctgaaatatttccagaaccataggaggttcacccgtgacttcctgcagtca

SEQ ID NO: 28586 - DNA, 584 bp, Homo sapiens
tgtcctttctttctgtccaacttaattttaaacaacttgtacatattatatacacctgcatcttgttttttcaaatggaattaaattttggaattattttctatcaacttatccagatctacctcatttcataacaactacatggaggaatcataattcatgcaaaatatacagagtagcagcatagtgttgtgttttaagacacagactctagagttcaagttctgggttttgggtcttagcaytgcactcacatcaccattgcccttactagctctatgatcatggtgcaaaacgggaacaataatagtaatagctcacaaggttattatgaaggttaaacaaattaatatttcaaatcatattgaatagagcctgatgtaattaacaaactatataagcattgttaataaacattaaggaattttttatttctaagttgttgatatccccaacaatttaagttcatcaaaggacatagcatttttaattttgaatattgccaaatgatcaaaattgtgctgccttatagaataaacattatcaacatttttaatattagttaatttttaagtggaaaatta

SEQ ID NO: 28587 - DNA, 584 bp, Homo sapiens
tgtcctttctttctgtccaacttaattttaaacaacttgtacatattatatacacctgcatcttgttttttcaaatggaattaaattttggaattattttctatcaacttatccagatctacctcatttcataacaactacatggaggaatcataattcatgcaaaatatacagagtagcagcatagtgttgtgttttaagacacagactctagagttcaagttctgggttttgggtcttagcactgcactcacatcaccattgcccttactagctctatgatcatggtgcaaaacgggracaataatagtaatagctcacaaggttattatgaaggttaaacaaattaatatttcaaatcatattgaatagagcctgatgtaattaacaaactatataagcattgttaataaacattaaggaattttttatttctaagttgttgatatccccaacaatttaagttcatcaaaggacatagcatttttaattttgaatattgccaaatgatcaaaattgtgctgccttatagaataaacattatcaacatttttaatattagttaatttttaagtggaaaatta

SEQ ID NO: 28588 - DNA, 584 bp, Homo sapiens
tgtcctttctttctgtccaacttaattttaaacaacttgtacatattatatacacctgcatcttgttttttcaaatggaattaaattttggaattattttctatcaacttatccagatctacctcatttcataacaactacatggaggaatcataattcatgcaaaatatacagagtagcagcatagtgttgtgttttaagacacagactctagagttcaagttctgggttttgggtcttagcactgcactcacatcaccattgcccttactagctctatgatcatggtgcaaaacgggaacaataatagtaatagctcacaaggttattatgaaggttaaacaaattaatatttcaaatcatattgaatagagcctgatgtaattaacaaactatataagcattgttaataaacattaaggaattttttatttctaagttgttgatatccccaacaatttaagttcatcaaaggacatagcatttttaattttgaatattgccaaatgatcaaaattgtgctgccttatagaataaacattatcaacatttttaatattrgttaatttttaagtggaaaatta

SEQ ID NO: 28589 - DNA, 1174 bp, Homo sapiens
cttccttacaccttatacaaaattcaatttttaaaacctctttgctttacacgtaattcatgagtcagtgtggagtggtcatacacaaagcttccatttgcttactgcactttattaaaagttttgaagctgacaaaacttttccaaaaaaacaagaaaaggattttggaaatctatttagaaacaattctgattaattcagtatatactttttaaatgtctctttttaccaagcagttttgcatgataatagggtatttatttcttaacatttcaaattctctagctttcgtatcctttttacaccaaaagtcataatcatttccatagcaactatattcattgtcaaaggtagaaatttttgacttctgttgggtattttttaaggagcaaaggaacatttaagcaacaaaaagtagtattttacaaaaattgacaagaattgagagagaaaaaaagtactgggtggttcctttaataacttacacagataacttattaaaactataagttattgccaaaactcaacataatttttctttagtaacttcattttaaataatatatttttttgcagtcataatttcttcttgtactaagtcaacaacaataaaatgaagaataaatatttacatatttagttagggaatatgatataaatatctaattttctgacctttttttatttaaaaaaatgaatcaaaactaaattaagtcaaaaattycatctaaaaagtaaagaattatttttctctcaaccctctccaaatttctatcaacatgttacttagtgtagtatcatatattgtaatttagaaaataaacactatttacttacgctcttttatgagcaatagataataagtatttgccataacacattcatgaatacaagaatgatgaactttgaagcaaaacttgtttttcttgcaggttttattgcttgaagttactgtttggcacctctggatggagatacggagttagtaaagtagaggggaatagtttttattttatcatacctatagatttgtttacagatggcaggttattttagctggatcttcctgacagttattactaccaccagcaacaaaacatgcttcataagtagagaaattagataaagaatattagacttgctgtgccccatgccacatagtgagttgattga

SEQ ID NO: 28590 - DNA, 1174 bp, Homo sapiens
cttccttacaccttatacaaaattcaatttttaaaacctctttgctttacacgtaattcatgagtcagtgtggagtggtcatacacaaagcttccatttgcttactgcactttattaaaagttttgaagctgacaaaacttttccaaaaaaacaagaaaaggattttggaaatctatttagaaacaattctgattaattcagtatatactttttaaatgtctctttttaccaagcagttttgcatgataatagggtatttatttcttaacatttcaaattctctagctttcgtatcctttttacaccaaaagtcataatcatttccatagcaactatattcattgtcaaaggtagaaatttttgacttctgttgggtattttttaaggagcaaaggaacatttaagcaacaaaaagtagtattttacaaaaattgacaagaattgagagagaaaaaaagtactgggtggttcctttaataacttacacagataacttattaaaactataagttattgccaaaactcaacataatttttctttagtaacttcattttaaataatatatttttttgcagtcataatttcttcttgtactaagtcaacaacaataaaatgaagaataaatatttacatatttagttagggaatatgatataaatatctaattttctgacctttttttatttaaaaaaatgaatcaaaactaaattaagtcaaaaatttcatctaaaaagtaaagaattatttttctctcaaccctctccaaatttctatcaacatgttacttagtgtagtatcatatattgtaatttagaaaataaacactatttacttacgctcttttatgagcaatagataataagtatttgccataacacattcatgaatacaagaatgatgaactttgaagcaaaacttgtttttcttgcaggttttattgcttgaagttactgtttggcaccwctggatggagatacggagttagtaaagtagaggggaatagtttttattttatcatacctatagatttgtttacagatggcaggttattttagctggatcttcctgacagttattactaccaccagcaacaaaacatgcttcataagtagagaaattagataaagaatattagacttgctgtgccccatgccacatagtgagttgattga

SEQ ID NO: 28591 - DNA, 618 bp, Homo sapiens
attcactattatttagatgttagtgacaattttatcataaaatktatgtacactgatcattcaaggaaaaaattgattagataatttatatattttttacacccaaattatttcactttgttgtaagaatacataaaactccaaaatataatccattcatttttcaaaacaaaagcagcattttcccctattatttttccactttgattttcacagtagggcagaatcatatggaagtcacacaaagctatacgattccagataaattaatcctactgaacatttcacgaggttctcgagggttgaaaggcaccccaaagttgtccagctcgacttccaatcccttcactccagcatcttcccccaaagtttattcaatctgtgtttacatgtgtccattgaaaaactttcaatgcttttaattatttcaaatgtcgttcttactgggataatctctacgtatttgtagtatacacacaaacaggaacaaacatacacacacagtctattttagtttctgtacatattctttgtgtttcttcttgtctatataatatttaagtcacttgagattcaaactaacttaaaccctttaccatttggcaccttcttcaaatt

SEQ ID NO: 28592 - DNA, 281 bp, Homo sapiens
aaataatgaaatatataaggcagagatggccctgacaaatctcagcttggcaccagcctactgaaaccagcataatctggactgggcaccatatcttgctttgaacagttaacctcttgggtgtggtatgattgtggcagaagcaacttkctgctaaaatccttacacagtgaacagtcaccagccagcccagcacttacctaatgtacaagcccagagattgtcagtcaggcaacatgacttagatagagacactgcttttttcctatgggaaagaaaca

SEQ ID NO: 28593 - DNA, 927 bp, Homo sapiens
gtttatatatcggttttggtaccagtgccatgctgttttggtcattgtagacttgcggtatagtttgaaatcaggtagtgttatgcctccagctttgttctttttgcttaggagtgtcttggctatatgggctcctttatggctccatagtattttacttctgagatgaggatatgaatctactgatctccactaatcacaagaagtattgaaaaatgataaaagaaagaaatgttgcagcttgaaaacttcactaatgtgttattgtacagctcaataacaatatactggattgttaaatatcagttttatttttaatagacatatgataagaactattattttataatagtaattgtaataatagtataccactttttgtaagggatataaaatatcatctgaattttctttctgaaaaccaagattaaaaataaaataaactgataaacataataatgaatgtaggacaacaatacttacacagagaccactcaaaaagatgaaaattttgcaaaaaaaaagaaaaatcttgtgaaataattagaaagaagctagggcaaccaacatttaatggacacaaagagccaagacaagggagaaacaacttgagaacataagctgactgacattggcagacactttctctgtcaagatatctgtcaattctggtcaaagggaaaaagtttaagatttgaaaaagagctcaggccaagagcctctaccaagaggcaaaaaaatcaacagagatatgagataaaaatcyctataacattattctgagaagaaaaaaattagtttttaacaactgtcagtgggagagaacctactggtgattatcctagactctcagaatatgtagaaggctgtacactatgaggaggagaaaattcagggtcagaggtagctttggaattttcaaatgat

SEQ ID NO: 28594 - DNA, 892 bp, Homo sapiens
agagaccctaggcatctctgtaccccactgacccacacttccacatgtggtcttcgtaacgctggagtggttttggggttccccctagtgtgctccctatgcagtatgtgagctaatgcagacccccactgatactggtgtaagtttccactgaaagtcccattccaactgcttacaactctgttgcctgggagaagagaatgcttaggtctccaaacgttgcagagcctgccaagtgataactccatctccacagcacttctcaaatgaaacagccattgaaatagagggatacaaatgtaaaagggaaaatgggcacctttttaccattacattcaaattattttctaagggtaattcaacataccttaggcttttcatttatcactattaaaaagttcttggccgggcgcggtggctcatgcctgtaatcccatcactttgggaggccgaggtgggtggatcacctgaggttgggagttcaagaccatcctggctaacacggtgaaaccccgtctctactaaaaatacaaaaaattagccgggcakgttggcacgtgcctgcactcccagctacttaggaggctgaggcaggagaatcgcttgaacctgggaggctgaggttgcagtaagccgagatcgcaccactgcactccagcctgggtgacacagcgagcctccgtctctcaaaaaatagaaaaataaaaaataaaaaagttctttgaaaacctaccttcttcttttggaaaatcttatgtgacttaggaaaaacaaaactgatttaaatgaaatggaaataagagctatatttggagtgaggagattctgttctgatcccagatctgacactcatgtcatgggatttggccagtgacataagttttttgtgtaa

SEQ ID NO: 28595 - DNA, 892 bp, Homo sapiens
agagaccctaggcatctctgtaccccactgacccacacttccacatgtggtcttcgtaacgctggagtggttttggggttccccctagtgtgctccctatgcagtatgtgagctaatgcagacccccactgatactggtgtaagtttccactgaaagtcccattccaactgcttacaactctgttgcctgggagaagagaatgcttaggtctccaaacgttgcagagcctgccaagtgataactccatctccacagcacttctcaaatgaaacagccattgaaatagagggatacaaatgtaaaagggaaaatgggcacctttttaccattacattcaaattattttctaagggtaattcaacataccttaggcttttcatttatcactattaaaaagttcttggccgggcgcggtggctcatgcctgtaatcccatcactttgggaggccgaggtgggtggatcacctgaggttgggagttcaagaccatcctggctaacacggtgaaaccccgtctctactaaaaatacaaaaaattagccgggcaggttggcacgtgcctgcactcccagctacttaggaggctgaggcaggagaatcgcttgaacctgggaggctgaggttgcagtaagccgagatcgcaccactgcactccagcctgggtgacacagcgagcctccrtctctcaaaaaatagaaaaataaaaaataaaaaagttctttgaaaacctaccttcttcttttggaaaatcttatgtgacttaggaaaaacaaaactgatttaaatgaaatggaaataagagctatatttggagtgaggagattctgttctgatcccagatctgacactcatgtcatgggatttggccagtgacataagttttttgtgtaa

SEQ ID NO: 28596 - DNA, 986 bp, Homo sapiens
tacctagttccgtggctatagcagctctaccaaccagaatatcagagctgctccccggtgccagactatgcagaccatgtggtctctaaaccctctttacagtctgtacaccagaaaatcctcctcagccaaagaatcttcccaaaagataaattctggatcttccactgctaaatggtctctctcctctgacccaactccttgcatgtatgtgcacatcgcgcgcgcgcgcrcacacacacacacacacacacacacacacacacacacacacacacacacacgtgcaggaatccatgaatcctttccccagggtcacctaagaaaagaggtaaggtgaaactagggctccctaaatcagcataacctcccccaagctcactgttttatatccccaagttaagtgccccacatactagaggggctccccagtgccccaactcctgcacagtgaaagagagagcaagacacaacaggaggccacactcagcaaaactgggcccttatcacaggaagcactcaacactcagtggggtccctggaatcttaggaccccggccattcgcttgcacagcagctattcagtgagcaccttttaccatgagtcaggtaaacatctagctggctgcctgctaagggccttggttcggacaagaaatgagctctttatctccataaccaactcaggactaatgagatgaagcagagcccggtccggtctcctacctgccagaaactctctattcaggctgataccaggaattttccctccttacccacaaagtatacagaagtagcagaaagtagcttcttgggtgagacccagaattctttaagcaccctgctccagggctggcctagggttaacagggggttgcctcctcaagaccacatctcctcctcgactggggccactgagaaaaaaaacccataacctcaagagtcctggtttgctgctggcccagagcaagtatcttcctccagga

SEQ ID NO: 28597 - DNA, 986 bp, Homo sapiens
tacctagttccgtggctatagcagctctaccaaccagaatatcagagctgctccccggtgccagactatgcagaccatgtggtctctaaaccctctttacagtctgtacaccagaaaatcctcctcagccaaagaatcttcccaaaagataaattctggatcttccactgctaaatggtctctctcctctgacccaactccttgcatgtatgtgcacatcgcgcgcgcgcgcacrcacacacacacacacacacacacacacacacacacacacacacacacacgtgcaggaatccatgaatcctttccccagggtcacctaagaaaagaggtaaggtgaaactagggctccctaaatcagcataacctcccccaagctcactgttttatatccccaagttaagtgccccacatactagaggggctccccagtgccccaactcctgcacagtgaaagagagagcaagacacaacaggaggccacactcagcaaaactgggcccttatcacaggaagcactcaacactcagtggggtccctggaatcttaggaccccggccattcgcttgcacagcagctattcagtgagcaccttttaccatgagtcaggtaaacatctagctggctgcctgctaagggccttggttcggacaagaaatgagctctttatctccataaccaactcaggactaatgagatgaagcagagcccggtccggtctcctacctgccagaaactctctattcaggctgataccaggaattttccctccttacccacaaagtatacagaagtagcagaaagtagcttcttgggtgagacccagaattctttaagcaccctgctccagggctggcctagggttaacagggggttgcctcctcaagaccacatctcctcctcgactggggccactgagaaaaaaaacccataacctcaagagtcctggtttgctgctggcccagagcaagtatcttcctccagga

SEQ ID NO: 28598 - DNA, 986 bp, Homo sapiens
tacctagttccgtggctatagcagctctaccaaccagaatatcagagctgctccccggtgccagactatgcagaccatgtggtctctaaaccctctttacagtctgtacaccagaaaatcctcctcagccaaagaatcttcccaaaagataaattctggatcttccactgctaaatggtctctctcctctgacccaactccttgcatgtatgtgcacatcgcgcgcgcgcgcacacrcacacacacacacacacacacacacacacacacacacacacacacacgtgcaggaatccatgaatcctttccccagggtcacctaagaaaagaggtaaggtgaaactagggctccctaaatcagcataacctcccccaagctcactgttttatatccccaagttaagtgccccacatactagaggggctccccagtgccccaactcctgcacagtgaaagagagagcaagacacaacaggaggccacactcagcaaaactgggcccttatcacaggaagcactcaacactcagtggggtccctggaatcttaggaccccggccattcgcttgcacagcagctattcagtgagcaccttttaccatgagtcaggtaaacatctagctggctgcctgctaagggccttggttcggacaagaaatgagctctttatctccataaccaactcaggactaatgagatgaagcagagcccggtccggtctcctacctgccagaaactctctattcaggctgataccaggaattttccctccttacccacaaagtatacagaagtagcagaaagtagcttcttgggtgagacccagaattctttaagcaccctgctccagggctggcctagggttaacagggggttgcctcctcaagaccacatctcctcctcgactggggccactgagaaaaaaaacccataacctcaagagtcctggtttgctgctggcccagagcaagtatcttcctccagga

SEQ ID NO: 28599 - DNA, 986 bp, Homo sapiens
tacctagttccgtggctatagcagctctaccaaccagaatatcagagctgctccccggtgccagactatgcagaccatgtggtctctaaaccctctttacagtctgtacaccagaaaatcctcctcagccaaagaatcttcccaaaagataaattctggatcttccactgctaaatggtctctctcctctgacccaactccttgcatgtatgtgcacatcgcgcgcgcgcgcacacacrcacacacacacacacacacacacacacacacacacacacacacacgtgcaggaatccatgaatcctttccccagggtcacctaagaaaagaggtaaggtgaaactagggctccctaaatcagcataacctcccccaagctcactgttttatatccccaagttaagtgccccacatactagaggggctccccagtgccccaactcctgcacagtgaaagagagagcaagacacaacaggaggccacactcagcaaaactgggcccttatcacaggaagcactcaacactcagtggggtccctggaatcttaggaccccggccattcgcttgcacagcagctattcagtgagcaccttttaccatgagtcaggtaaacatctagctggctgcctgctaagggccttggttcggacaagaaatgagctctttatctccataaccaactcaggactaatgagatgaagcagagcccggtccggtctcctacctgccagaaactctctattcaggctgataccaggaattttccctccttacccacaaagtatacagaagtagcagaaagtagcttcttgggtgagacccagaattctttaagcaccctgctccagggctggcctagggttaacagggggttgcctcctcaagaccacatctcctcctcgactggggccactgagaaaaaaaacccataacctcaagagtcctggtttgctgctggcccagagcaagtatcttcctccagga

SEQ ID NO: 28600 - DNA, 591 bp, Homo sapiens
atggtctgggttgtgcatcacagcggatagctcctattgttagggagttaagccttaggaatttagaaatttgtcatgccagaggggtcctgaacccttgactataggtaactttagttcccttaaccttagaacccgtcttagttaagaaagttgcatctattctggtctctcagatcatggatctttacattttaaaattaatatttaaattataaaatattattgtacacatctaactaaaacacatctgtcttagtctattttaaatagtttaaatattttcctaatctaaatattgtctatttaatcaaaagacaaaataccattttgtttaaaaagttctttcatgtatcaacagaaggcttctgacacaactcttatatctaccaaaaccaaatttcattgcatatatatatatatgtatatatatatatatacacacacwtttttttttctttgagatagaatttcactcttgttgcccaggctggagtgcaatggcgcgatctcggctcaccacaagctccgcctcccgggttcaagcgattctcctgcctcagcctccaaagtagctgggattacaggtgc

SEQ ID NO: 28601 - DNA, 523 bp, Homo sapiens
aatagacaagaaaataaaagatataagagacagtgaaacggtctaacatataggcaatgagatacttggaaaggagagataataggatagaagtaatatttgaggggcaatggccggtgttttccaaaactgatgaacaacatcaacccacagattcatgaagttcagggaaccccgaatggtaaatacagaaaaatcacatgtaggaacatcatattacactgctgaaaactgaaaatgaaagacaacaggaaataatactagaatcagagttgtggagctggagataaagctataaaaaacccagataacccagaaacgggggagtttgtccttgaataacctagaacacaatatgaatgcatttgagttatagctatagctataatttgattttttaaataaawatgtttttacattagggttcactcttggtgttgtacattctgtgggtttggaaaaatgtacaatgacatatattcaccattatagtagcttacagaatagtgtcactttcctgaaa

SEQ ID NO: 28602 - DNA, 908 bp, Homo sapiens
ccttcctccagtttacccaaaggaacaagttgtttcaagtagggcacagttataccatgttttgatccacatggatgaaatttactacttcatgaaccccaagaggacacctgtaacaataatgctatttataagattttctcagttttagtgtattacatattatttattgcagaatggtagttatgaaactcctaaaatactttttaaaatatatctaataatgaataagccttgaataaaataaaaagatgtgttacagaaatcccagatcaaattatgctggagtggccgggcacagtggctcaagcttgtaatcccagcactttgggagactgaggtgggtggatcacctgaggtcaggagttcaagaccagcctggccaacaaggtgaaatcccgtctctactaaaaatacaaaaaattagctgggcatggtggcgtgtgcctgtaatcccagctactcaggaggctgagggaggagaatcacttgaacccgggagtggaggttgcagtgagccgagatcaygccattgcactccagcctgggtaacaagaatgaaactccatctcaaaaaaaaaaaaaaaattatgctggagtacctgtagccagatgccagggtattttggggcttggaagcactgcaaatggatttctagttcaggttgagcttctgtgaggagggatgcactggggctgatagaaagtttctagctaaatacctgcatcaagccaaatttaagtcccctgtggtcccagccgtcttgcaggacagatcccccatggctttccctggagatgatggctgcgatgacagcagggtccacgcaatgtctctgcccgacttttttgatcagagtctggtaaggttttatggccctcaaatccatctcagcaaacatttcaga

SEQ ID NO: 28603 - DNA, 908 bp, Homo sapiens
ccttcctccagtttacccaaaggaacaagttgtttcaagtagggcacagttataccatgttttgatccacatggatgaaatttactacttcatgaaccccaagaggacacctgtaacaataatgctatttataagattttctcagttttagtgtattacatattatttattgcagaatggtagttatgaaactcctaaaatactttttaaaatatatctaataatgaataagccttgaataaaataaaaagatgtgttacagaaatcccagatcaaattatgctggagtggccgggcacagtggctcaagcttgtaatcccagcactttgggagactgaggtgggtggatcacctgaggtcaggagttcaagaccagcctggccaacaaggtgaaatcccgtctctactaaaaatacaaaaaattagctgggcatggtggcgtgtgcctgtaatcccagctactcaggaggctgagggaggagaatcacttgaacccgggagtggaggttgcagtgagccgagatcacgccattgcactccagcctgggtaacaagaatgaaactccatctcaaaaaaaaaaaaaaaattatgctggagtacctgtagccagatgccagggtattttggggcttggaagcactgcaaatggatttctagttcaggttgagcttctgtgaggagggatgcastggggctgatagaaagtttctagctaaatacctgcatcaagccaaatttaagtcccctgtggtcccagccgtcttgcaggacagatcccccatggctttccctggagatgatggctgcgatgacagcagggtccacgcaatgtctctgcccgacttttttgatcagagtctggtaaggttttatggccctcaaatccatctcagcaaacatttcaga

SEQ ID NO: 28604 - DNA, 967 bp, Homo sapiens
tttagccatttaaagaatgcctggtagcttaaattggcttttgcaaaaaagcaggtacatttcagggaaaggacaataaaagagagagggagagaaaaagagatggtgaaacatgattaatggcctaatgttctctactagatggaagtgtttttagctgttggagctcaagcaacccaaggccaagagtattggaattatcctaaggaatgcaagctcctaaagaaaacttactcatcctacaaatttgttggcctagtaaaatagatttcaaggtatgagtattcatttttcccagaaagtgtaaaagtagaaacaaagaataatgatcccataaagattttgatggcctaatccccagaacctgtgaatatgttacctttgcagatgttgatgatggccatacatagtgagacgggaagattatcataaattatccaggtgggcccaatctaatcatagaagccgttagaagcacaggacttttcccagtcttggtcagtgagagagagagatgtgatgacagaaacaagatcaaagagatgcagygttgctggctttaaagaggaatgaagaaagccatgagccaaggaatgcagacggcctcaagaaggtggaaaaagcaacaaaacggctcataccccagagcccccataaaggaacacagccctgccaaaccagagaaattattctgactaaaactattcctctattccctctttcactcttctccacttgactatcttttctcatctttaaagattcagtacaaactatcctcttaaaaaatctgttttgtcgatataagctataaatttccaaaaagtgaggagaacattgtcacattccttataaatgtaatttgaatgatggaattaattaatcataatttgatggactgaaaaaggacaataaaatggtattcatgtcactgttttagaaaaaggactaactgcactcacaagga

SEQ ID NO: 28605 - DNA, 545 bp, Homo sapiens
ggattcaagagtaagtctgactgctttattgtgatgagaccacgtaaacccggaagctgagaaagataggatgcttacatttaaaggtagagaagactgaagctggcttgcaaagacagaaaggggaccagaaaggagactgcaagagaagccctctatggagcaccttcaatggactctggccacatccctactctgtttctataagagacctttttatgcttaaaataatttcatcttttacaaggtagtgcatgataagttttttatttataacctaaagagtgttaattaattcagtcccactatcgtctgtgaagatttttcaaaatgaaaatgagaggccaycccaggagattcagactcagtttgaaactcagtatgaatgggtaaggatgctggcctctctcaccatacgttttaaagcttcatagatcactgagatgcttaaccagggttgaaaaccactgacctgtattacgtatgtaggaaaatacaaagaaaaggaagacagtggcttggtgctccagagattttggatttca

SEQ ID NO: 28606 - DNA, 698 bp, Homo sapiens
atctttgtgtcgaggaattccttcttttctttttgtcttcatttcctgcttctcccttccccctcttccccaccatctctgtagccaatggaagactgtattagtcagcttgggcttcatagcaaaatgccacagtctgggtgggttatacaacagatatttgtttctcacaatttgggatgctgggaagatcaaggtcaatgtgccagccaggtcggtttcattctgaggcctcttcttttgtgttatagactgctgccatattgctgtgtgcttgcaaaacttcttttagtgcttactgagagcaagcatgccctttgatgtctcttcctataaggacattaatcctattggatcagagcctcaaccttatgatctcatttaacttcaattactcctatagaggcctcatctccaaatacagtcaactggagtttagagtttaaacatttgaatctaggggaayacaaacattcagtctgtgatggaaaccaggtctaggaatattggtaaagataatattgctattgctaccatcttatttaagattatttctgtctcttgcttgaataatgtgaaagtttataaagtgatctacaatctttatttcttccattctgtcctcataagtgccttggattgatcataatatttaaacttgataatttacttccatgccaaacatttcaatggttctt

SEQ ID NO: 28607 - DNA, 501 bp, Homo sapiens
tactttctttatttgccaaagtctagggagttgtatttccacacatatgggcattggattcaaacttamcctttcaggtaaccatcttttggtagctgagtttttaaatgttttaatatattatcctgccctctctataacagtatatcaacatgattaaaccccaaaaaggtgttctcttatttccttggagttgtattaatacgagttgtacgactcattatttaaaccatttttttgaacctctctttgtagtctctaggagttcaataagcataaatcctttttttttttttttttttttcagatggagtgtcgctctgttggccaggatggagtgcagtggcatgatctcggctcactgcagcctccaccacccgagttcaagtgattctcctgcctcaccctcccgagtagttgggattacagccatgcactaccatgcccggctaatttttgtatttttagtagagacggggtttcactatattggccagactg

SEQ ID NO: 28608 - DNA, 212 bp, Homo sapiens
gaaagggatggaatttagccaaaataatattaagtggaacaacatarcatggttgaaaggttattactggaaaaattaaaattatttatgcttgtaccctgatgacttgaaactctttcgataaactgattacacattaaacttaggacttgaattaaaaaaaaaataagtggaaatgtaagtcaaaacaaattgtttaacctaatttgtaa

SEQ ID NO: 28609 - DNA, 805 bp, Homo sapiens
atttctcaggaattttgtgcattttgtttgatggaatttgacatgtttaccaaaatggcagaaaggagtgaaattagttctcaaagatttctcaggaatggatataaagtaaacaaaataattaaagttaatatgcaagttgatacagttgttattcaaaagaaattttgtttgaaatgcaatgagatttttatttttatttacttattaattattattattactttgtgacagagtctttctctgctgcccaggctggagtgcagtgcaccatgttggctcactgaaacctctgccttccaggttcaagtgattctcctgcctcagcctcccaagtaggtgcgattacaggcatgcatcaccacacccagctaatttttgtatctwtagtagagatggggtttcactctgttggccaggctggtctcaaacacctaacaacaagagatctgcccaccttggcctcccaaattgctgggattacaggcatgagccaccgctcccagacacaatgaggtttgtaagtaattctaactgatttcctgctgttgagcagggagctgagcaaatacaacagatcatgggcctaaagtaggagaagactgaggacaaactctggaacacatgtgattaaattaagtataattgaaaccaaatcaaatttaataaggctgtaccttttagtttcaagatgtttccatcattttgaaatgtgatgttattcagtgaaaaagaaaaatagtgtttatctccagagtaaagaacagggttccctgcggggattgattgtctgagagatatggct

SEQ ID NO: 28610 - DNA, 576 bp, Homo sapiens
tgaagcccacactgtccccaggaaaagcttcactcaaagcttcatggtgcattttgacagattttacttcagttgtaatattgactggagcaaaggtgaccactataccaggtttgagaacaccagtctccactcggccaacaggaacagtaccaataccaccaattttgtagacatcctggggaggcaggcacaagagcttgttagttggacgatttggtggtaggatgcagtccagagcctcaagcagcatggttccactgacattgctatccttacgggtgactttccatcccttgaaccaaggtatgttagcagttggctccaayatgttgtcaccattccaaccagaaattggcacaaatgctattgtgttggggttgtagccaattttcttaatgaaggtgctgaattgattgcctcatatctcttctagctgtagggtggctcagtggaatcaattttgttaacaccaacaattagttgtttcacccccagtgtgtaagccagagggcatgctctcgtgtctgcccattcctggggatgctaccttcaaattcaccaacaccagcagca

SEQ ID NO: 28611 - DNA, 514 bp, Homo sapiens
gcactgatggagcagctctcctggaaagtaacctggcagtatttatttaaattaagaatatgcatgatttatttcgttactcagtatgtatttcaaagtaattctaacactggtccacaaaaggactcagtattctatatggcattctttgtgacattggaagttgcagttaatcagtccactttcagaagagtatatgaggtatacatagaatatatgaaaaatgacttatgaggtgattgaaagaaatgtattcaatgtacttcaatcatatgatatgattgaagcgtagaaatatatttgagaaaaaataaggtatatgttttacacatacatctaaatatatatataatatatataaaaaaccatatacacaaatttgaaatttaacacatttcaaaataacacacataaagtaaaatattcaacatattagaactattgccattgggctcatgagragcatgggaaaggaagtgacacagaataaataaatacatccagaaatatctta

SEQ ID NO: 28612 - DNA, 778 bp, Homo sapiens
gggtttccttacattccagaaaggcctttaagacagcaaactccaaaaatgtttaaactctttcattgcacatataatttacaatgaaagattaaatatagaatttccctttatcaaattctttcaacctgcccaaataatttcaaacagaaagagatattctctttgacatttatattctgtttgaaggacattcctaaggccctttgaaagatgattaaccctaaagaaactgcctacatttactaagctttttgaaaatactattgcccactctgcataaccattatgggctctctaagacaaagatctggctcatgaataagagtggaaaaaraaaagtatttatctaaggactttataaaatcctgtgttcatctaaactttaatgaaatgggttataggcacatcagaaataaaaatctgcaagtgacttttataagcatatatgtcagctgggcatggtagctcacgcctgtaattccaatactttgggacattgaggcaggaggatcacttaagcacaagagttggagactagcctgggcaacatagtgagacccatctctactaaaaatcacaaaaaattagccgggcatcatgtatgtgtctgtactcccagctacctgtggactgaggcaggagaatcacttgagcccaggagttcaaggctgcagtgagctataattgcaccactgcactccagcccagatgacagagcaaaaccctgtcttaaataagtaaataaaaataaaagtgtacatgtcaaagtttagta

SEQ ID NO: 28613 - DNA, 472 bp, Homo sapiens
tgggcatggtggcacatgcctgtaatctcagctacttgggaggctgaggcaggagaatcgcttgaactcaggaggcgaaggttactgtgagccaagattgcactactgcactccagcctgggcaacagagactgtctcaaaacaaacaaacaacaacaacaaaaaacattgcactgcccggcagtcccaggagtggtcaactagtagaaaattcagtttcagtttcagcagagaattcacccagcagaacaataaagtgctaatgtttccttggaagaactccactaggcctcctgtctgaagataacattttaacaagagcttttttwaaaaaaaattaattcccctatctttgatatccaacctggaagggcagtagctctagtaggctatttggaatttcttatacccactgaggtagaagaaggatgaccagttgggataggaaagagtaatattgctttgaagatcc

SEQ ID NO: 28614 - DNA, 2186 bp, Homo sapiens
tcccacctcagcctcctgagtagctgggactatagacacgtgccaccacacctggctaatttttgtattttttggtagagatgaggtctcgctgtgttgctcgggctggtctcaaactcctggcatcaggtgatcttcctgcctcacctcccaaaatgctgggactacaggcgtgagtcatggcatctggccttttcagctttattgaagtataattgacaaaaattgtacctattcaaggtatgcaaagtgattttttttttgcttttactcttggcaaactatgatacaacatgacattttaatatgcatacacattgtgaaatgatcatcataatcaagctaatcaacatattcatcacctcacctacttacctttgtgtgtgtgtttgtgtggggagaatacttaaggtcaactgttttagcaaatttcaagtgtatgatacattattaattatagtcactacgcagcacattaggtctccagcttactcattttataactgcaggtttgaagcgtctgcttttggagtaagaagctgcattactttattacaccacaactcctccaaactgcatttactacagtttgaagctttcccccaagagattcctaggacccttatcaaagagaaagtagtagcagttttttcaattgagacctgttctgacctttctttccacagcttaatctttcttccactaattttttaaagttttgattgttactgagatgtaataaaatgtaataatataaaataacctttcagataagatttaaagaaataaaggacctatattagtttcctgtggctgctgtaaaatttgttactctgaaacatcactcatttattctcttacagttctagaagccctaagaccaaaatccatttaggctacataaagttaaagggtcacaggtctgtgtccctctggaaattctatgtggttccagttccggtggcatttcttggctcatggtcccatggtcccttccttcctcttttattttttgtttgattttttgagatgggatcttgctctgttgcccaggctggagtgcagtggtgggatcatagctctctgcagccttgagtttttgggctcaagggatcctcctgcctcagcctctctagtagctggagctgggactacaagtgcgtgccaccacatccagctcctccctattcaaagccagcagtatagcatcatcaaacccctctctgtttctattattatcacatctctctctttctcttctatgtcaaatctccttttgcctccctcttagaaggaaacctttgattgcattttgggcccatctggataatccaggatgatctccttgtcacaagcgctataatttaatcgcatctcgaaagaccccttttccgtataaggtaatatgcacaggctgcagggattagggtgtagatctctttgagggtcattattcagcctaccacagaagggagttccatctttttttttaaaaaaaggtcaaaagctattgtgctaaataataacagaaacacttacatagtacattctatatgccagacattgttttaagtgtatttgtgtgtgtgtgtgctcgtgtgaatcatttgtttcttattttaaggatttgtgtttttctttttctttttttctttttctttttttttttgagacagggtcttgctctgtcaccaaggctggagtgcagtggcgtgaccttgactcactgcaacttccccctcccaggttcaagcgattctcgtgtcttagcctccctagtarctaggactacaggcatgcaccaccacacctggctaatttttgtatttttagtagagatggggtttcactatgttggccaggctgatctcaaactcctgacctcaggggatctgccttccttggcctcccaaagtgctgggattacaggcgtgtgccacagtgcccagccaggatttgttttctgagacagagtcttgctgtgttgtctaggctggagtgcagtggcatgatcttggctcactgcagcctcaacttcctggactcaagtgatcctcccacctcagcacctccaaatagcggagactacaggtgtgtgcaccatgcccagctagtttttttttttttttttaagagatggggtcttgctatattgcccaagctggtctcaaactcctgagctcaag

SEQ ID NO: 28615 - DNA, 2186 bp, Homo sapiens
tcccacctcagcctcctgagtagctgggactatagacacgtgccaccacacctggctaatttttgtattttttggtagagatgaggtctcgctgtgttgctcgggctggtctcaaactcctggcatcaggtgatcttcctgcctcacctcccaaaatgctgggactacaggcgtgagtcatggcatctggccttttcagctttattgaagtataattgacaaaaattgtacctattcaaggtatgcaaagtgattttttttttgcttttactcttggcaaactatgatacaacatgacattttaatatgcatacacattgtgaaatgatcatcataatcaagctaatcaacatattcatcacctcacctacttacctttgtgtgtgtgtttgtgtggggagaatacttaaggtcaactgttttagcaaatttcaagtgtatgatacattattaattatagtcactacgcagcacattaggtctccagcttactcattttataactgcaggtttgaagcgtctgcttttggagtaagaagctgcattactttattacaccacaactcctccaaactgcatttactacagtttgaagctttcccccaagagattcctaggacccttatcaaagagaaagtagtagcagttttttcaattgagacctgttctgacctttctttccacagcttaatctttcttccactaattttttaaagttttgattgttactgagatgtaataaaatgtaataatataaaataacctttcagataagatttaaagaaataaaggacctatattagtttcctgtggctgctgtaaaatttgttactctgaaacatcactcatttattctcttacagttctagaagccctaagaccaaaatccatttaggctacataaagttaaagggtcacaggtctgtgtccctctggaaattctatgtggttccagttccggtggcatttcttggctcatggtcccatggtcccttccttcctcttttattttttgtttgattttttgagatgggatcttgctctgttgcccaggctggagtgcagtggtgggatcatagctctctgcagccttgagtttttgggctcaagggatcctcctgcctcagcctctctagtagctggagctgggactacaagtgcgtgccaccacatccagctcctccctattcaaagccagcagtatagcatcatcaaacccctctctgtttctattattatcacatctctctctttctcttctatgtcaaatctccttttgcctccctcttagaaggaaacctttgattgcattttgggcccatctggataatccaggatgatctccttgtcacaagcgctataatttaatcgcatctcgaaagaccccttttccgtataaggtaatatgcacaggctgcagggattagggtgtagatctctttgagggtcattattcagcctaccacagaagggagttccatctttttttttaaaaaaaggtcaaaagctattgtgctaaataataacagaaacacttacatagtacattctatatgccagacattgttttaagtgtatttgtgtgtgtgtgtgctcgtgtgaatcatttgtttcttattttaaggatttgtgtttttctttttctttttttctttttctttttttttttgagacagggtcttgctctgtcaccaaggctggagtgcagtggcgtgaccttgactcactgcaacttccccctcccaggttcaagcgattctcgtgtcttagcctccctagtaactaggactacaggcatgcmccaccacacctggctaatttttgtatttttagtagagatggggtttcactatgttggccaggctgatctcaaactcctgacctcaggggatctgccttccttggcctcccaaagtgctgggattacaggcgtgtgccacagtgcccagccaggatttgttttctgagacagagtcttgctgtgttgtctaggctggagtgcagtggcatgatcttggctcactgcagcctcaacttcctggactcaagtgatcctcccacctcagcacctccaaatagcggagactacaggtgtgtgcaccatgcccagctagtttttttttttttttttaagagatggggtcttgctatattgcccaagctggtctcaaactcctgagctcaag

SEQ ID NO: 28616 - DNA, 2186 bp, Homo sapiens
tcccacctcagcctcctgagtagctgggactatagacacgtgccaccacacctggctaatttttgtattttttggtagagatgaggtctcgctgtgttgctcgggctggtctcaaactcctggcatcaggtgatcttcctgcctcacctcccaaaatgctgggactacaggcgtgagtcatggcatctggccttttcagctttattgaagtataattgacaaaaattgtacctattcaaggtatgcaaagtgattttttttttgcttttactcttggcaaactatgatacaacatgacattttaatatgcatacacattgtgaaatgatcatcataatcaagctaatcaacatattcatcacctcacctacttacctttgtgtgtgtgtttgtgtggggagaatacttaaggtcaactgttttagcaaatttcaagtgtatgatacattattaattatagtcactacgcagcacattaggtctccagcttactcattttataactgcaggtttgaagcgtctgcttttggagtaagaagctgcattactttattacaccacaactcctccaaactgcatttactacagtttgaagctttcccccaagagattcctaggacccttatcaaagagaaagtagtagcagttttttcaattgagacctgttctgacctttctttccacagcttaatctttcttccactaattttttaaagttttgattgttactgagatgtaataaaatgtaataatataaaataacctttcagataagatttaaagaaataaaggacctatattagtttcctgtggctgctgtaaaatttgttactctgaaacatcactcatttattctcttacagttctagaagccctaagaccaaaatccatttaggctacataaagttaaagggtcacaggtctgtgtccctctggaaattctatgtggttccagttccggtggcatttcttggctcatggtcccatggtcccttccttcctcttttattttttgtttgattttttgagatgggatcttgctctgttgcccaggctggagtgcagtggtgggatcatagctctctgcagccttgagtttttgggctcaagggatcctcctgcctcagcctctctagtagctggagctgggactacaagtgcgtgccaccacatccagctcctccctattcaaagccagcagtatagcatcatcaaacccctctctgtttctattattatcacatctctctctttctcttctatgtcaaatctccttttgcctccctcttagaaggaaacctttgattgcattttgggcccatctggataatccaggatgatctccttgtcacaagcgctataatttaatcgcatctcgaaagaccccttttccgtataaggtaatatgcacaggctgcagggattagggtgtagatctctttgagggtcattattcagcctaccacagaagggagttccatctttttttttaaaaaaaggtcaaaagctattgtgctaaataataacagaaacacttacatagtacattctatatgccagacattgttttaagtgtatttgtgtgtgtgtgtgctcgtgtgaatcatttgtttcttattttaaggatttgtgtttttctttttctttttttctttttctttttttttttgagacagggtcttgctctgtcaccaaggctggagtgcagtggcgtgaccttgactcactgcaacttccccctcccaggttcaagcgattctcgtgtcttagcctccctagtaactaggactacaggcatgcaccaccacacctggctaatttttgtatttttagtagagatggggtttcactatgttggccaggctgatctcaaactcctgacctcaggggatctgccttccttggcctcccaaagtgctgggattacaggcgtgtgccacagtgcccagccaggatttgttttctgagacagagwcttgctgtgttgtctaggctggagtgcagtggcatgatcttggctcactgcagcctcaacttcctggactcaagtgatcctcccacctcagcacctccaaatagcggagactacaggtgtgtgcaccatgcccagctagtttttttttttttttttaagagatggggtcttgctatattgcccaagctggtctcaaactcctgagctcaag

SEQ ID NO: 28617 - DNA, 1189 bp, Homo sapiens
tgtggacaaatgtggcctagacagtttcaaaatgaaaactaatggccagtgggaccatggaagttaatgttatgacagcaaagcccaagctaccacacgcagcctcaacatgcctgtactcacaaagaggatctggtgcttggcagtcactgctcatttctatctgtgattgggataccttttacattcctttcaacagagacatactgtaaattgctgaaaaattagttctgagaagttggatacaaatcagatttgggggatctctactgggcactggcttggggaaagagaaccaaaatcagcggatgtttctcactcaccctggccagcattactctttctttgtcttggtgtctgstacctttttagtcctgaaatcttgcacatcttacctaagggtaagcaagggtagtgccaccttgtgacaagtttcatttttcttagtctaaaacatttcttttattcttttgtgatctaggcaagagttgaacagagctgttttactcttcacctgtttgctatgtaggatatatagacagggctgggatgctggctgttcgggatagaaacagtagaaaataaaccaatttggcagcacatcagaatcgcggggaacattaagaattcagaatcctaaacaccatgactcagtgattcagttagtctggactgtggctcaactgactccaaagaagcttgggccatggattggtattggggatctactgatctaggtgaaatagtgccaagttaataaagcttccagacttggttttcttattttaatacaacatcttatttattataagatgtcaagatcttgagaggagaataaaagttcacaggacaggataactaagaaacacacgcagattcacacatgcgcacatacacacacaccggcaaaactgaaggtaggacaaggtcacatttgcagaattgcttcttccccaattgtgtattatgagagatggttgctgtggtgatgggaagagggctaaacacggagggcttgtcacaggggctgtaaactggcaagggcttaacctatagaaatcttgttgaaattatctctgcgaattgggttgagaggctgcctcatctagtctccatcagaggcccgttgcatctcttcaggttctattagtcactcgtattggttgtttctatcatcctgaggggatcc

SEQ ID NO: 28618 - DNA, 1189 bp, Homo sapiens
tgtggacaaatgtggcctagacagtttcaaaatgaaaactaatggccagtgggaccatggaagttaatgttatgacagcaaagcccaagctaccacacgcagcctcaacatgcctgtactcacaaagaggatctggtgcttggcagtcactgctcatttctatctgtgattgggataccttttacattcctttcaacagagacatactgtaaattgctgaaaaattagttctgagaagttggatacaaatcagatttgggggatctctactgggcactggcttggggaaagagaaccaaaatcagcggatgtttctcactcaccctggccagcattactctttctttgtcttggtgtctgctacctttttagtcctgaaatcttgcacatcttacctaagggtaagcaagggtagtgccaccttgtgacaagtttcatttttcttagtctaaaacatttcttttattcttttgtgatctaggcaagagttgaacagagctgttttactcttcacctgtttgctatgtaggatatatagacagggctgggatgctggctgttcgggatagaaacagtagaaaataaaccaatttggcagcacatcagaatcgcggggaacattaagaattcagaatcctaaacaccatgactcagtgattcagttagtctggactgtggctcaactgactccaragaagcttgggccatggattggtattggggatctactgatctaggtgaaatagtgccaagttaataaagcttccagacttggttttcttattttaatacaacatcttatttattataagatgtcaagatcttgagaggagaataaaagttcacaggacaggataactaagaaacacacgcagattcacacatgcgcacatacacacacaccggcaaaactgaaggtaggacaaggtcacatttgcagaattgcttcttccccaattgtgtattatgagagatggttgctgtggtgatgggaagagggctaaacacggagggcttgtcacaggggctgtaaactggcaagggcttaacctatagaaatcttgttgaaattatctctgcgaattgggttgagaggctgcctcatctagtctccatcagaggcccgttgcatctcttcaggttctattagtcactcgtattggttgtttctatcatcctgaggggatcc

SEQ ID NO: 28619 - DNA, 1189 bp, Homo sapiens
tgtggacaaatgtggcctagacagtttcaaaatgaaaactaatggccagtgggaccatggaagttaatgttatgacagcaaagcccaagctaccacacgcagcctcaacatgcctgtactcacaaagaggatctggtgcttggcagtcactgctcatttctatctgtgattgggataccttttacattcctttcaacagagacatactgtaaattgctgaaaaattagttctgagaagttggatacaaatcagatttgggggatctctactgggcactggcttggggaaagagaaccaaaatcagcggatgtttctcactcaccctggccagcattactctttctttgtcttggtgtctgctacctttttagtcctgaaatcttgcacatcttacctaagggtaagcaagggtagtgccaccttgtgacaagtttcatttttcttagtctaaaacatttcttttattcttttgtgatctaggcaagagttgaacagagctgttttactcttcacctgtttgctatgtaggatatatagacagggctgggatgctggctgttcgggatagaaacagtagaaaataaaccaatttggcagcacatcagaatcgcggggaacattaagaattcagaatcctaaacaccatgactcagtgattcagttagtctggactgtggctcaactgactccaaagaagcttgggccatggattggtattggggatctactgatcwaggtgaaatagtgccaagttaataaagcttccagacttggttttcttattttaatacaacatcttatttattataagatgtcaagatcttgagaggagaataaaagttcacaggacaggataactaagaaacacacgcagattcacacatgcgcacatacacacacaccggcaaaactgaaggtaggacaaggtcacatttgcagaattgcttcttccccaattgtgtattatgagagatggttgctgtggtgatgggaagagggctaaacacggagggcttgtcacaggggctgtaaactggcaagggcttaacctatagaaatcttgttgaaattatctctgcgaattgggttgagaggctgcctcatctagtctccatcagaggcccgttgcatctcttcaggttctattagtcactcgtattggttgtttctatcatcctgaggggatcc

SEQ ID NO: 28620 - DNA, 601 bp, Homo sapiens
aaatgagtgcaagaccctgtttctgtgaatccacattctagttaagtcgatagatacacagcacaggtgattatcacagaacagggrtgaaccccacttctggggtgaaagctgactggtcaaagcaatctgggtaatgccatcctcttgttcttaacgttaatccagttatccaggccttactcaagcagttttgactatgccctggtcagactttgttctagaaatgagcacatatttcagggccaatgagacacaagagaagttttgctatgatttctggaaaataaactctcacccttttagagcttacccctccacacacataaaaatattttgtcttctgctggtctgtgcatgtacagaccaaagtctggaattgcaattttttgctgtcaggtaggcagccagtgttaggcccaatctaacccatggaaggcagagaagagtgataaaaagaacctgctcctttatgcacaagaatgagctgctgaactgaagcagccctgaaactgcacctcacatacgctttccactatcattgaactgtcccttatctcagctttctccctctatcccatcacttatatctgaaagtaat

SEQ ID NO: 28621 - DNA, 601 bp, Homo sapiens
aaatgagtgcaagaccctgtttctgtgaatccacattctagttaagtcgatagatacacagcacaggtgattatcacagaacaggggtgaaccccacttctgsggtgaaagctgactggtcaaagcaatctgggtaatgccatcctcttgttcttaacgttaatccagttatccaggccttactcaagcagttttgactatgccctggtcagactttgttctagaaatgagcacatatttcagggccaatgagacacaagagaagttttgctatgatttctggaaaataaactctcacccttttagagcttacccctccacacacataaaaatattttgtcttctgctggtctgtgcatgtacagaccaaagtctggaattgcaattttttgctgtcaggtaggcagccagtgttaggcccaatctaacccatggaaggcagagaagagtgataaaaagaacctgctcctttatgcacaagaatgagctgctgaactgaagcagccctgaaactgcacctcacatacgctttccactatcattgaactgtcccttatctcagctttctccctctatcccatcacttatatctgaaagtaat

SEQ ID NO: 28622 - DNA, 601 bp, Homo sapiens
aaatgagtgcaagaccctgtttctgtgaatccacattctagttaagtcgatagatacacagcacaggtgattatcacagaacaggggtgaaccccacttctggggtgaaagctgactggtcaaagcaatctgggtaatgccatcctcttgttcttaacgttaatccagttatccaggccttactcaagcagttttgactatgccctggtcagactttgttctagaaatgagcacatatttcagggccaatgagacacaagagaagttttgctatgatttctggaaaataaactctcacccttttagagcttacccctccacacacataaaaatattttgtcttctgctggtctgtgcatgtacagaccaaagtctggaattgcaattttttgctgtcaggtaggcagccagtgttaggcccaatctaacccatggaaggcagagaagagtgataaaaagaacctgctcctttatgcacaagaatgagctgctgaactgaagcagccctgaaactgcacctcacatacgctttccactrtcattgaactgtcccttatctcagctttctccctctatcccatcacttatatctgaaagtaat

SEQ ID NO: 28623 - DNA, 485 bp, Homo sapiens
gaaattgaacatatgtcttacttaattcagggcccatgctcaaaaacaccattgctcttcatctttcccccatggagttggtctcctgttctccatgcttccctagcaccccctgtcaggagaaaagtgctctcataaatcaatacttactatgataggtccctgaatattttggtcaacttccactgcccatctaatgaattgtatttttaaagaagctacctaaatatctagaagggcaatgagtaattctatcaaaaggctttctatctggatgaatggagggtgtargggcaggtgaaataatgagaactaaattccctctcttatcaccttatggaaacaacttctaactccatctaagtggaagcaaaggccttgtgggttctttcctgcctttggactgtaagttgcacaaaaatatatacccttggaagagtatgatgacaatgacagacaacaagactgaatacaaaaccatttct

SEQ ID NO: 28624 - DNA, 1125 bp, Homo sapiens
agcaagaaatccccccaaacttgatggaattctttctccaccactgctgcaagaggaccagatctccctctgccaacagatggggcggggtaacactggaaatatgttacaggccaggttcagatgccacaagagtagcctcaagattttgcacataacttcggaagaaaccccagcataatagaaaggtcttctcaagaatttttctggatttactgtgcaacttccctggtcccttacttttcttgccacttttgttattacccctcacaagtgtagcctcgtgtttgcttttatttgatttgcaattctctgtcttataaagattrtcccggttcttaatttcgtgtttcccaaaaatctacctattgcgtccattgtggcattcctggcacctagaacaatatttgcctcataggacatgcatctatttgaccttgccttacgtacatcctgttctcttcttcacttttgtctcaggtccaacagttgaaactatgcattccaagtagaatctggttggaataaaaggatctgaaccagctttaatcatcaaaggaaaaatatgctgtttataatattgaaataaaaatagggaagatttcaattctttgggataattacccagaagtggaattgctggatcatatggtaattgtatttttaattgagaaacctccatactgttgtccacagcattatactatattgcactcccatcggtggtgtgcaaagattccaatttctccatatctgcattaacacttgtcttttttttaaatcactgttgttttgatttgtagttctttgatgactaggggcattgggcattttttcatatacctgatggtcatttgtatgtcttcattggaaaaatgtcttttcaagtccttaatccagtttttaatcaggtcattcatttttttttctttttctattgccttgtaggagagccttctaaatattggagatgaccctttatcagatatatgtgtttcaaatattttttcccattccattggttgtcttttcactctgccaattgtttcctttgctatgcataagctttttagtttgatatagtaccatttgtttattttgtttttgttaccagaattaaaatca

SEQ ID NO: 28625 - DNA, 1125 bp, Homo sapiens
agcaagaaatccccccaaacttgatggaattctttctccaccactgctgcaagaggaccagatctccctctgccaacagatggggcggggtaacactggaaatatgttacaggccaggttcagatgccacaagagtagcctcaagattttgcacataacttcggaagaaaccccagcataatagaaaggtcttctcaagaatttttctggatttactgtgcaacttccctggtcccttacttttcttgccacttttgttattacccctcacaagtgtagcctcgtgtttgcttttatttgatttgcaattctctgtcttataaagattgtcccggttcttaatttcgtgtttcccaaaaatctacctattgcgyccattgtggcattcctggcacctagaacaatatttgcctcataggacatgcatctatttgaccttgccttacgtacatcctgttctcttcttcacttttgtctcaggtccaacagttgaaactatgcattccaagtagaatctggttggaataaaaggatctgaaccagctttaatcatcaaaggaaaaatatgctgtttataatattgaaataaaaatagggaagatttcaattctttgggataattacccagaagtggaattgctggatcatatggtaattgtatttttaattgagaaacctccatactgttgtccacagcattatactatattgcactcccatcggtggtgtgcaaagattccaatttctccatatctgcattaacacttgtcttttttttaaatcactgttgttttgatttgtagttctttgatgactaggggcattgggcattttttcatatacctgatggtcatttgtatgtcttcattggaaaaatgtcttttcaagtccttaatccagtttttaatcaggtcattcatttttttttctttttctattgccttgtaggagagccttctaaatattggagatgaccctttatcagatatatgtgtttcaaatattttttcccattccattggttgtcttttcactctgccaattgtttcctttgctatgcataagctttttagtttgatatagtaccatttgtttattttgtttttgttaccagaattaaaatca

SEQ ID NO: 28626 - DNA, 1125 bp, Homo sapiens
agcaagaaatccccccaaacttgatggaattctttctccaccactgctgcaagaggaccagatctccctctgccaacagatggggcggggtaacactggaaatatgttacaggccaggttcagatgccacaagagtagcctcaagattttgcacataacttcggaagaaaccccagcataatagaaaggtcttctcaagaatttttctggatttactgtgcaacttccctggtcccttacttttcttgccacttttgttattacccctcacaagtgtagcctcgtgtttgcttttatttgatttgcaattctctgtcttataaagattgtcccggttcttaatttcgtgtttcccaaaaatctacctattgcgtccattgtggcattcctggcacctagaayaatatttgcctcataggacatgcatctatttgaccttgccttacgtacatcctgttctcttcttcacttttgtctcaggtccaacagttgaaactatgcattccaagtagaatctggttggaataaaaggatctgaaccagctttaatcatcaaaggaaaaatatgctgtttataatattgaaataaaaatagggaagatttcaattctttgggataattacccagaagtggaattgctggatcatatggtaattgtatttttaattgagaaacctccatactgttgtccacagcattatactatattgcactcccatcggtggtgtgcaaagattccaatttctccatatctgcattaacacttgtcttttttttaaatcactgttgttttgatttgtagttctttgatgactaggggcattgggcattttttcatatacctgatggtcatttgtatgtcttcattggaaaaatgtcttttcaagtccttaatccagtttttaatcaggtcattcatttttttttctttttctattgccttgtaggagagccttctaaatattggagatgaccctttatcagatatatgtgtttcaaatattttttcccattccattggttgtcttttcactctgccaattgtttcctttgctatgcataagctttttagtttgatatagtaccatttgtttattttgtttttgttaccagaattaaaatca

SEQ ID NO: 28627 - DNA, 687 bp, Homo sapiens
  misc_feature (1)...(687): n = A,T,C or G
tccccatgagagaaaagcagggggcacgtgccatggtcgtacacagccctgctggctttttgggcctaactgtagatatsataatacaatgtgggaacagcgccaggcctgtgaactccaagtgcaccattaagggactctgattaaagactgacgccaacacagaggaaaaggatggagattcccaaaacatcggcagagttcctggacgtagccgttcctgaagctagaatctcctctcttcaattacacctgtcaagagctcccgtttttgctgaggctagtttgagctggttctctgtcatctgaaatctgaagatcgcgacacacataatataataccacggggcatagcaagccccaaggcctctctgagcccacggctatatcagcagcctcatttatgtgtcctgcagaacaaaaggagcaagtaaatgacatcccagggcccgagtttaccaagagacacgagtgaaatggatgataccgagacctgggtaccatagctggaagtgtgactatttcctcgacatttccaaaactcttgccaaacacatttgtactctacccttttactgcccttgaannnnnnnnnnnnnnnnnnnnnnnnnnnnnnnnnnnnnnnnnnnnnnnnnnnnnnnnnnnnnnnnnnnnnnnnnnnnnnnnnnnnnnnnnnnnnnnnnnnnt

SEQ ID NO: 28628 - DNA, 321 bp, Homo sapiens
ggtactgggaatactacgcgagcaaaggtgaaatcccttcctcaatgaggtccacattacagcaggtcacacagaccacaaacgcacacgatttcaggccgtggagggttacgcaacagtcactgctttacaaaaccaaccyctggagctcagtcagagctttcattccctcacctcttccaggactgaaatcattatgctctttactgatcacgttattgatttttttactccttgggaagctggtccttcaaattcagatatctaaaactttccagtgtacagagtggagatgctgcatgtgagtcacccatgctaaac

SEQ ID NO: 28629 - DNA, 1976 bp, Homo sapiens
tctaatattatttaacaaagaaaatatagcacacctctgcacatttttaaaaaattctgaaccatggttataagtaacataacatttcaacttaatgccacaggaacccataaatataaccaactaactaatgaatatgtctcaaagattcattagcaagtcagttatgtgaaactcagagcacattttcctaaacacatggtcttattattggtagatagattcctagaccaaccctctacaactcctttacccataagaagctatactttagtatgacttacaattcccagttgtgatggtcaatattgagtgtcaacttgattggattgaaggatgcaaagtattgttcctgggtgtgtctgtgagggtgttgtcaaaggaggttaacatttgagtcagcggactgggagaggaagacccaccctcaatctgggtgggcaccatctaatcagctgccagcacggctaggataaaagcaggcagaggaacgtggaaggactagactggcgaagtcttctggcctccatctttctcctatgctgggtgcttcctgtccttgaacatcagagtccaggttcttcagcttttggactattggacctacactgcactgtgggcttccctacttttgaggttttgggactctgactggcttccttgctcctcagcttgcagatgaccaattgtgggactttatcttgtgatcatgtgggtcaatactccttaataaactccctttcctgtatacatctatcctattagtcatgtctctctagagaaccctgactaatataccagtccttcagaagcccctaagccaggatcctgagccccccagcatagttaaaactcaagtctcatcattaatcagatgggtgatcccaatgtactctctcctataaaatgggtatacagttggctactttttaagaaatatatgaaataatgaaagtaatgctattaatacagagtttggcagaaaataaatcataatagtgactatggtgatagtaatggcaaacacttttgagatctaggcccctctgcacctaagataaagaaaggccctaaaaagtaaaagataaaattaaaaataaaaattaaaaaaaaaaagaaaggcctaagaagtagtttctcatcccaagtatgtgttcacctcctatttactgagaaaatgcatgctgagtgtattggtttcctgatgctgccataatgaagtcctgggkggcttaaacaataggagttcatcatctcacagttctggaggctggaagtctgatgtcaaggtattaacactgttggttccttctgagggcggtgaaagagaatctgttccctgtctttctcctagcttatgatagaattccttggcttgtagatggcgttctcactgcatcttcacctcatcctccctctgtacctgtctgtctctctgaccacattttctacttttgtaagaaatacatcatgttggattaggacccaacctaatggcctcaccttgacttgatcatctgcaaaaaccctgttttcaaataaggtcacattcactggtactgggagttagcatttcaatatcttttgaggggacacaattcaacacgaaacataaatgaaaattttcactgagcatctcccattgaaatgtcgggacaggcttcaggaaggggagggagagaacatctcagcatctctaggtccatggaaggagaaatgggggctccagcatagcccctgctgtctcagagggcagcagctctgagaatgctccagggtagtggtgatacactcaggaaccatccttctcaaaagtaaggcaaatcatccaccattttacccaagcagatatccaaatgccagcctcaccttttctttttcagaggttttcttgtttcagatcattagcttgcctccctttctgaacaacagaaacatcttaagaaactagtttttctttctggctattaggatcc

SEQ ID NO: 28630 - DNA, 552 bp, Homo sapiens
cataattgtgatagtatcagaaaaaaattaaatataaaagtatatagtatatagtaaatgtgcaataagtgaagactctaattttattgtaacatttatatttgtgtcttgtaataagggtatttctggacccagatttggcacagacatttgtctaaatgattatttaaaatatttgaaatttttggaaaacatgtaaactcaagtctattaagaccattttgttttgaaatattaatttttctcaaccaacctatttacttcacaaggacttctgttgtatcttygacacaacccattttttttcacaagtaactcagcttcaacttgcagggaatatttcatctagtcaagtattgacatagaaaatgtattcctgtcctaacccaggcaataaacagccgacacatagaggttcaatatttgtgcaccaagtgttatacagatgatttgtgatgacacaaaagtgtacttttcatctttttgaaagcatttccttggctttctgctgaaagaggggaaaaacctgccatcactcgtttctatttagac

SEQ ID NO: 28631 - DNA, 552 bp, Homo sapiens
cataattgtgatagtatcagaaaaaaattaaatataaaagtatatagtatatagtaaatgtgcaataagtgaagactctaattttattgtaacatttatatttgtgtcttgtaataagggtatttctggacccagatttggcacagacatttgtctaaatgattatttaaaatatttgaaatttttggaaaacatgtaaactcaagtctattaagaccattttgttttgaaatattaatttttctcaaccaacctatttacttcacaaggacttctgttgtatcttcgacacaacccattttttttcacaagtaactcagcttcaacttgcagggaatatttcatctagtcaagtattgacatagaaaatgtattcctgtcctaacccaggcaataaacagccgacacatagaggttcaatatttgtgcaccaagtgttatacagatgatttgtgatgacacaaaagtgtacttttcatctttttgaaagcatttccttggctttctgctgaaagaggggaaaaacctgccatcactcrtttctatttagac

SEQ ID NO: 28632 - DNA, 1091 bp, Homo sapiens
tttgccctgcttgttkgcaaaaaagtcaaattaacttgaaatcttcattttcatcaatctttaaacatatactaacaattgtaatctggcctaactcaacagacataataaaattgcattgttaaatattagatgatttaatgatcctacacacagtttccttgcggatatatttatttcattgttgtagcttaaaatgccttttagggagaaacaaggaaatgcagctcccttgaggtggttttttaaaaacatacattggattgactaccttgctatgctattagtgatgttttcttcttttttctttttatttatttatttattttttgacagagtctcactctgtcacccaggctggagtgcagtggcacaatgcggctcactgcgacctccaccttctgggttcaagcgattctcctgcctcagcctcccgagtagctgggattacaggcgcgcaccaccacatccacctaatttttgtatttttgttagagatgggattttgccatgcgggccaggctggtctcgaactcgtgacctcaagtgatacgcctgcctcagcctcccaaagtgctggaattacaggcatgagccaccacacccggccaacgttttcatttttaaacatggctttcatcatgccactgccatttgcagactcctgtgatggctcttaattggctctcaatttgaatttaatttcctgattccgggtagtaaggtactcaacttctttattcacttttatctaaacgtccctattttccacccggtcatgttcacaaacctctgtattccaaaccttattacttttgagagttcatgtcttaggcttgcctctgagttttcatattcaccattatttctcctagaaaaacctccccagtttcttttgccatactgatgaacactttcttcacatttcttctcagaagagaaatggcctttaaaacacctttgtaaatgttttcagcaatcaatatcatattcccctgtcacagtggttctcaacgttcactgcatattagaatcacctgtggagcagaaagactctgtgccagaccaattacatcagagatttggggctg

SEQ ID NO: 28633 - DNA, 829 bp, Homo sapiens
ggttaatttggagacgtccctgttgtgtaatcgaccccaacactcagggacccagaagcacgtgttcatgtgaagaggaagtctgccaagattctgaatcactagggctcagttggtgtggagttcaggtccccatcccctgtggcattgcatattacatatcaactgtgtttagtagattcaaaataaacaatagcacagtcattatgaagacaaagagaatttgaattactttaattctgcctttccttgtgaccacttggagtttttattttacaattaaaacagcaaaacaaaagaacagagaagtgtcatgttttgttccatatgtgcaaatgttagtgtatacgagagagattttactgcattcaaacagtatctgttgcatcatggtgatagaaaatgattttgtctatagaggagaggcatattagaaacaatgggcttcaggtgtctgttttgcctggcataccactgtctcccagcatgaagttcagttctataagcatttaccaggtcaggaccctgagggtacagcagggactgcaacagacatttccaaaccatgcattccacagttaattatttgaatataaatgtcataaaggctgtaagaatgatctaagaagttgctatattgtctaattctgtataacaaattgctagaaaacttaatggcttaaaaaaatacacgtttattatgtcagtttctttgggccrggaatttgcaagtgatttagctgagtggttctggctcggggactctcatgaggatacaatcaagatgctggccagggctgcatcatccaaaggctcaactgagactaga

SEQ ID NO: 28634 - DNA, 548 bp, Homo sapiens
tgcagtttctaagaacgagtgggcaatgccgactgaggacttaccgtacagctgtgcacatgcactcactggcatggaaaccrttgcattatttgagcttaggattcctatattttttcaattctgggattttttttctagagtttctttgaatttctcttcctctccattcttttaattttctccatctgtatcacctgtaagacaaccgttgcaacttctcaatctgtcttccacttagcttttcttttatcctgtccagctccacccaccaccacctttttctgctggattctaggagagttcctcagtttcctcttctagaataaatctatagagtgtataaatattaactcaccacccacagttggaggagctgttatggttttgatttcataggcagggaagtatcttgatggtttatcgtgctctgggccaggccaccctgctggttgcagtagagcttgtttgactatcttgtcccaagccctctgcacttccacccactccctccctctttccagaatttgggagcaggctcagaaaat

SEQ ID NO: 28635 - DNA, 1097 bp, Homo sapiens
ctgccataacatacatctgtatgtgtatgtatatatatatatatattttgagacggagttttgctcttgtcgcccaggctggagtgcaatggtgcgatctcggctcactgcaacctccgcctcccgggttcaaatgattctcctgcctcagcctcctgagtagctgggattacaggctcacaccaccatgcctggcaaattttttatatttttagtagagatgaggtttcaccatgttggccaggctgatcttgaactcctgaccccaggtgatccacctgccttggcctcccgaagtgctgggattacaggtgtgagccactgcgcccggccccggtatatttttaataaggttcgccacggaatttttatttatggtaagtagtcacagaagaaagtgctcaggatggtttgatagcagaatgtattctctttgtaatactactttaccatttattatatgtttattcattcagcaaatatttgtcaaactgaggattcaatgcttaacaagacaggcatggggcttctgtacacacttgttatttttatgattggaaaatgaattgatcctgttttaacagaaatagaaacatctgctgattgagtgagggaatgacagctttctgggctgtctgtagattgcttctatctggtgcccttcccagcagcctggcctctctagggctgccttggtatccctgtaattcaggggtccgttaggtgggtttctccaggccttcctaccagctgctccmtttgaatgttactgagtatcccaggagaggaggctacacaatcaagtgacttcaggggccactgcacattgcagccttatcttggagatgataccatacacatcagcatattcaaggttctgataagtcctgcagcaagaatgacaaaaagccagagcaaacacctgcttttcttttttttccatctgtgtcttatccagtggtgttttgtgagcccccaaaaggaaggctttttatctagttcctaatgtacttgaccatggaaccttttttccatgtagaatctccttccttcaatcccaaaatatcatatatctactttgtggcaggcaccatgat

SEQ ID NO: 28636 - DNA, 597 bp, Homo sapiens
tgacaagtgacacccctagacatgtgaaatgtgatgtaactcctccaggacatcatttactgcacctttgtggtctaaaagataaaaaaggtatgctgagatgaatcacttttatgaatctgtaatgtattattaattcatgtatttttcacagttatattgaatagaatatataaataaaatacaaccatattccaatcacggcaaactgtatacaacaacrcaagagaattaaatggtcagcaggtagtactaactaagctatattttaaagttctccccaagtaacgtgtcatgtggtatggcagccagggacctatgctggtccctttgtggatcagccacagaggggaggagctagctgagagcctcccaaagggaaggagctagctgagagcctcccagtacagcacctttaagatccactgtgatattggagccaaggccactctctcctttgacagcttgaaaaatacattaaagcctgatgatggtaccagggcttggtacacttctactcattgtcaactcatctacatggaatgttgtgccaaagcactctgttaagtggactgagacttttctctgagcaccacc

SEQ ID NO: 28637 - DNA, 958 bp, Homo sapiens
atgctcggccttaagggacagagagttttctttctctttctgctgcttctcctgcttctccctgcagtgaagcagctcaaaccagagccctgaagaagacacccccttttggtgtgacttctctactttaaaccccgaaagtcacgccaggcagcccctgaccttacaaacagtagagctcccctggagcctccagaatattctagactgcagtgggagtagcctttccttgcgcagccctgcccatgggacccttccaaggatcgctccaggtgttctcatgkcttcctcccgctgccccccctgagcccaggtgcccaacaagcagggagggttgcactgccttccatggtcttcttgtccttgaagccagccagaccatcaaacagtcacgacgctggcatttgattacttggaagaaaacagcattgccaatatgaggaaggtggctgggtgtggggaggagaagggagctgaagtgggaggtatttgggtggtgattattagaggtaatatgtaaatatctgatgattggaatccttgtgaaaagatgttgaagaaagtgatgttaaacagccctgtcatccgcagaaccatctgtgggtggtggagagggtggttaaaggcctttgatttttgtccagtgcctctgcagctggggaagcaggttcctctgccccctcccctcgttctccttgatgtcagatcctggctctgcactgggaggtgagagtggatggcccctctgccctgcctctcacacatgtagcttggcaggtttttcctaacaaggggttgaggggaatcatttcacctagacatgctcaccctggtgtctcattaggaactgggccattttaacagatccagagagggcccagactcttcactttgaagttttttgctccatccaggtactatgagacttccttaatccttaaggatgttgcagaaccct

SEQ ID NO: 28638 - DNA, 607 bp, Homo sapiens
aaagggggcactattaattaaaccatggcaatgggtgcaaatcagaactgttccaggccacctggaatgaatgagcatcctaggtaagtcaggcacataaaaagataattgttataatgaagagataaaaacatttctaaaagagataatattaccacatagattaaggtaagtgccaagggtggaatagactttcagtgctacagccattccaagacgagagagattatttctcctggggaaagacatttgagatcagcgggttgctcagttctcctccaactaaatgaagtcacacaatccatgtgtgcttggccgattttgtagattttctccaagaaatttcagtcccagttgggtccccccctccacccctcacacacccagtgtaactgttcctatttctttctattgtttaggckctgggtttttaaggaaagcaaattaatttaaatcttagccaattattccttttaaaaaataccaaatgcattcctgattcaattataaatcattgtaaatatcttatatttttgattctttaaaccatgttttagcttcattttgcaaagatatctaagaggtgatttataagctttgcttgcaa

SEQ ID NO: 28639 - DNA, 536 bp, Homo sapiens
cataatctttatagagagcataaattaaaattgtatgtaatataaatattacttcctttagattgaatttttgtcatatgctataacatagaaaaagaaaaaaatcacatttttagtaattcctgcatattatatttcaaattttatttcagtgatggtaattctgaaacatatatggagatatataaatatgtttcttgttagtatataaaaaaaagttgctatttagaatactaatgattttgtcctgaaaaatgaggaagcccctagagaggaaactgaatttctctaaataagaaaccagaaaatgttaacccccaagaaggaaattaaacaagaaatcattatgaaactaacttgagaagccaaaagagagatcaagtagtattagcaaaatgaatagtggatgtctatgtgctctataatgtggccaaggaattagctaagctycttttttgatttaaaaatagtgagactataatattaagacaagaagaaccagtcacagaacttgctaatgtgggtgccatggagga

SEQ ID NO: 28640 - DNA, 1023 bp, Homo sapiens
gagtattcagagggtgcaggtgtgtggggtctgggtaagtattttttatttttatttttaaataaaaaaatataaaaaattcttcaatcttcatagccaactacaactacaggtaagtatttcttgaaggagtgtgtgtttgtatgtggtgtgtgcatccctgaagcaaacacaagaactttacagaaagttgggtttatatggcactgcctgccctcccccctcccccccccacacacagagcacacaccttctctagtggcttcaatttgctgaaatatggcctagaccagggccagtatccaggcaacgagttcaggaactgtggatgctgttgtsttgggagtctcagacctcaaaagttttagcctcaaacaaagctagaatgggagtagctgcctgggtgtgagaaggggattgtgctttatggaggagatatgaacatgatatgaatgtgaacgagaggggaaagagggcaagatacatattttgtgtgtgtgtgtgtgtgtgtgtgtgtgtgcgcgcgcaggggtggctttggggggtggctgctgtctctgctctggtacagtctgcttgtctccatggtgcctgttgccacacacgcttgcttttcagaaagtcactgggattgtttattccacccccggcctgggcgccagccaaggagctgcaggcacttgtttatcttctggtgcgtacgagtgtgtatggctccccagtggcagagcaacccgagatacatacacacactcacacgggtgtgggtgaccatgtcatttgtcacagggtgagcctgaaccctaggatgagtcacaacctgggaccagatggattctctccacacggggacaaagatgacccccagcaattccaggtgtatgcaacaccgattcagcaaggcccaaaattccaggagagtatgagaagcaggtggctttggttccgtgctccatccctgagtccccctccccccagaacaaatcagtgatctgggtcacgcccaccctagagctggcactg

SEQ ID NO: 28641 - DNA, 1023 bp, Homo sapiens
gagtattcagagggtgcaggtgtgtggggtctgggtaagtattttttatttttatttttaaataaaaaaatataaaaaattcttcaatcttcatagccaactacaactacaggtaagtatttcttgaaggagtgtgtgtttgtatgtggtgtgtgcatccctgaagcaaacacaagaactttacagaaagttgggtttatatggcactgcctgccctcccccctcccccccccacacacagagcacacaccttctctagtggcttcaatttgctgaaatatggcctagaccagggccagtatccaggcaacgagttcaggaactgtggatgctgttgtcttgggagtctcagacctcaaaagttttagcctcaaacaaagctagaatgggagtagctgcctgggtgtgagaaggggattgtgctttatggaggagatatgaacatgatatgaatgtgaacgagaggggaaagagggcaagatacatattttgtgtgtgtgtgtgtgtgtgtgtgtgtgtgcgcrcgcaggggtggctttggggggtggctgctgtctctgctctggtacagtctgcttgtctccatggtgcctgttgccacacacgcttgcttttcagaaagtcactgggattgtttattccacccccggcctgggcgccagccaaggagctgcaggcacttgtttatcttctggtgcgtacgagtgtgtatggctccccagtggcagagcaacccgagatacatacacacactcacacgggtgtgggtgaccatgtcatttgtcacagggtgagcctgaaccctaggatgagtcacaacctgggaccagatggattctctccacacggggacaaagatgacccccagcaattccaggtgtatgcaacaccgattcagcaaggcccaaaattccaggagagtatgagaagcaggtggctttggttccgtgctccatccctgagtccccctccccccagaacaaatcagtgatctgggtcacgcccaccctagagctggcactg

SEQ ID NO: 28642 - DNA, 1023 bp, Homo sapiens
gagtattcagagggtgcaggtgtgtggggtctgggtaagtattttttatttttatttttaaataaaaaaatataaaaaattcttcaatcttcatagccaactacaactacaggtaagtatttcttgaaggagtgtgtgtttgtatgtggtgtgtgcatccctgaagcaaacacaagaactttacagaaagttgggtttatatggcactgcctgccctcccccctcccccccccacacacagagcacacaccttctctagtggcttcaatttgctgaaatatggcctagaccagggccagtatccaggcaacgagttcaggaactgtggatgctgttgtcttgggagtctcagacctcaaaagttttagcctcaaacaaagctagaatgggagtagctgcctgggtgtgagaaggggattgtgctttatggaggagatatgaacatgatatgaatgtgaacgagaggggaaagagggcaagatacatattttgtgtgtgtgtgtgtgtgtgtgtgtgtgtgcgcgcgcaggggtggctttggggggtggctgctgtctctgctctggtacagtctgcttgtctccatggtgcctgttgccacacacgcttgcttttcagaaagtcactgggattgtttattccacccccggcctgggcgccagccaaggagctgcaggcacttgtttatcttctggtgcgtacgagtgtgtatggctccccagtggcagagcaacccgagatacatacacacactcacacgggtgtgggtgaccatgtcatttgtcacagggtgagcctgaaccctaggatgagtcacaacctgggaccagatggattctctccacacggggacaaagatgacccccagcaattccaggtgtatgcaacaccgattcagcaaggcccaaaattccaggagagtatgagaagcaggtggctttggttccgtgctccatccctgastccccctccccccagaacaaatcagtgatctgggtcacgcccaccctagagctggcactg

SEQ ID NO: 28643 - DNA, 1023 bp, Homo sapiens
gagtattcagagggtgcaggtgtgtggggtctgggtaagtattttttatttttatttttaaataaaaaaatataaaaaattcttcaatcttcatagccaactacaactacaggtaagtatttcttgaaggagtgtgtgtttgtatgtggtgtgtgcatccctgaagcaaacacaagaactttacagaaagttgggtttatatggcactgcctgccctcccccctcccccccccacacacagagcacacaccttctctagtggcttcaatttgctgaaatatggcctagaccagggccagtatccaggcaacgagttcaggaactgtggatgctgttgtcttgggagtctcagacctcaaaagttttagcctcaaacaaagctagaatgggagtagctgcctgggtgtgagaaggggattgtgctttatggaggagatatgaacatgatatgaatgtgaacgagaggggaaagagggcaagatacatattttgtgtgtgtgtgtgtgtgtgtgtgtgtgtgcgcgcgcaggggtggctttggggggtggctgctgtctctgctctggtacagtctgcttgtctccatggtgcctgttgccacacacgcttgcttttcagaaagtcactgggattgtttattccacccccggcctgggcgccagccaaggagctgcaggcacttgtttatcttctggtgcgtacgagtgtgtatggctccccagtggcagagcaacccgagatacatacacacactcacacgggtgtgggtgaccatgtcatttgtcacagggtgagcctgaaccctaggatgagtcacaacctgggaccagatggattctctccacacggggacaaagatgacccccagcaattccaggtgtatgcaacaccgattcagcaaggcccaaaattccaggagagtatgagaagcaggtggctttggttccgtgctccatccctgagtccccctccccccagaacaaatcagtgayctgggtcacgcccaccctagagctggcactg

SEQ ID NO: 28644 - DNA, 742 bp, Homo sapiens
agggcttccaaagggagtcagaccaccagtgtggacaaagtgctgacatttactgccatctgttgggtgatgagcaaactgtcccactctttaaaacacagaaatacgcctctgaaagatttcttcctcaattcaaaaggcatccttagctcatcactgtttgcatctgctatgaaataaatatcagccccactcctagagggacaagaccagtcgctgtttcagtaaagagcgtaagttaagtcgcaaccctaaacagccacacctgaaggctgcaaaagaaaacataaattccaggggctgctataagctcagctacatttgccactacaaagcacatacccaaggctcaattcaatatcccaaaggttgggacccatgtggtcatgccctgggctctttcaaagcactgcctctagaccagacaatgctattggcttcctgactaccaaaccaataattacaaaagacctctccattatgtacaacccagaccaaagttaaagaaaataacaagaagtgctttggggggtkgggggaaaggtagcttgaaagatctttttttttacatagaaatgagattttgaataattcttcaaatccaaaaccactaggcaatggtgtataccaagagaatggtacgcatgctttcaatctctcaattacttccttggaaaggtaaggggtcaggcaggtaacatgagaaaagtagtctcagaacagactgtgcccaacctgaaag

SEQ ID NO: 28645 - DNA, 530 bp, Homo sapiens
atattgtaatakcaataacaatagctccacattcgagttcctaacaagtgtcaatgatgtgataaggcaattcattgattatcatgaaaacccatgattactacaaattaacagataaagaatctaggcacagaaaggtgaaataatttgctgaaggctactcttaaccactgtactctaatattaaaaagtcttcttggctaatgcgattgggatcagttaattgaaaaagtcagttaaaccaaaaactgcctccgcttaaaccttattttattttaatgtaaatattttatttttactgaaaacattaactgagcttttgacaaagggtaatgttcttttctttgaatatgggtcctctgattatatttttgtgttggctttttacataaaaaaatacccataatgcagttttgtctgtgtgttcaacttgcatttccttaaagtagaataagaaattaaaaatatttgtggagcaatctgagaagaaaatccttctaggtttttaccactgtcttcaatctttcaca

SEQ ID NO: 28646 - DNA, 513 bp, Homo sapiens
gctgtgcggagctgatcacaggagacagaaccttctccgtcccgcagacagaggctctgcatcttctgggctagggggctgctggggctgcctccacccccaccctgctcctgctgcccgggygcccctcctccactcaggggctcatttgcatttaaaaacgacaaccaaaaaacaagcccagggcctcctgagagtccctcctcagcctgtcgctgctctgcccagggcctcctgagagtccctcctcagcctgtcgctgctccgccccttccttgtgcccctactcaagcacggatggtgcgcctgctgtatgccaggcgccagtcagggcactcgctcagccactgcacgcccaagctccctgccctcccggagctcccgtgctgctgggcgctaagtgaggcggggtcaacgccctcagcccagaggcaggatgggcacaggcctagccaggaaggtgctggcgctcccggcggtcccccagacactctcccttcggtcacctcccag

SEQ ID NO: 28647 - DNA, 1109 bp, Homo sapiens
cccccactgggccagtccgtggtgtgtatcccctgactgtggtgttttcagtgggtggccggtgaggagggggcgcctggaggcctccaaggccagcacactcctccccccgaggctttgccgcccgacctgggcctgctggtccctgcatctctgtgcctcttaggcctccaccctttggtcccatgcaacgtctgtcttttccttcttgtttctcctctccattccctctcggcacgcatgtgtccggctctctgtagtgtgccctctttctgctttcactccttctctgccctcctccccagggatacgagccacgcttaggtgctgcgcctggtgcaccaggtggaggcaacatgcctgtggggtgggctgctagaaacacggtggctgagggcttcctagcaaagagggaggccaaaaggagtaggtgctgtgagtggtccaagccaggcccagggccgagggtgtcctgtgcctgcaggactgagggagtcatgccctgttctgctccttctctagggcccaccctgcacccggccccacagccctgcayggcctctgcctcccctgcccctgagggcagctctgctcagtccaccccatccctgctgtgagagcatggcctgctgggcgacggtggcagagggacccgtgagtccaggacaggggggtcctctctgtaccactgtgaccaatgcatggctccaggctgggctggcctgaggagctggtgatggggcatgtgccccgagccgggtgtggcacactgcgtctccagccgtggggctcaagatgctgctttgcccttttgggctggctcctgtggggtcatacgggtgtgagcctcgcccaggcccggctgtgaatggctgtccctgtccctgttatgggcaagcccttgggacaggatgcaggagctccctggtgagatgctgctgccaccttggcggaaccgcaggccacagcgtggttccgtgtgggccggcagtggcatcgcagggacaggctgcagggagtgtctggtgacaaatctggagggagccttccttcagtttgcacaaggaccttcggggagggagctcaagggccccccgggggttcctgtg

SEQ ID NO: 28648 - DNA, 1191 bp, Homo sapiens
gttttactgaggttttcaacgtatgggtgcatgtcggtgtgtctacaacatcctttgtcgcgtctagagtttttttcatctgtatttaatttgcgttttctcacttgtttctgggaacagtcttgccaggggcatgtctgtcttattgcccttttcagacaaccagcttttggttttgctagtgttctttgttgcttgctccttttctytttcattgacttctgtcattgctctttattatttccctcctgctttaggttttccccgggctcctgtcctgcttcctgccttctgctctgggagcacctgttcccgtgtctgtaggttttgggttctggctgatgtgctttgagctcttgcctccctctcaggagcccctccctgctgtccttgtgggcacccgcagtcccccacagcagccccacaggccttctctggtggtttgttcactggtcagggtagaaagcatccagtcacttactgtgtttaatatacttgttattattttagatttaccaaaaagttgcagacatatcacagagagttcccatacaccctcagccagcctcccctgccaggagcgtcctgcagatccacagctagcagtgtgatgtgctttgacctgtgtccctgcccaaatctcatgtcgaattatcatccccgatgttggagttggggcctggtgggaggtgattggatcatggggatggtttataatagtttagcaccatcctccagtgctattcttgtgatggaatgttcacaagatctggctgtttaaaagtgtgtagcacctcctccctctctcgacctcctgctccagccccctctctcgacctgctcagccgcgtgaagtgcctcgcctcccctttgccttctgccacgattggaagctccctgaggcctctccagaagcagatgctgccatgcttcctgtacagcctgtgaactgtgagccaattaaacctcttatcttcataaattacccagtcttgactgggtgcagtggctcacacctgtaatcctagcactttggaaggccgaggtgggtggatcacttgaggccaggagttcaagatcagcctggccaacatggccaaaccccatctctactgaaaatagaagaattaggtgggcacagtggtacatgcctgtaatcccagctacttgggaggctgaggcatgagaatc

SEQ ID NO: 28649 - DNA, 1191 bp, Homo sapiens
gttttactgaggttttcaacgtatgggtgcatgtcggtgtgtctacaacatcctttgtcgcgtctagagtttttttcatctgtatttaatttgcgttttctcacttgtttctgggaacagtcttgccaggggcatgtctgtcttattgcccttttcagacaaccagcttttggttttgctagtgttctttgttgcttgctccttttctttttcattgacttctgtcattgctctttattatttccctcctgctttaggttttccccgggctcctgtcctgcttcctgccttctgctctgggagcacctgttcccgtgtctgtaggttttgggttctggctgatgtgctttgagctcttgcctccctctcaggagcccctccctgctgtccwtgtgggcacccgcagtcccccacagcagccccacaggccttctctggtggtttgttcactggtcagggtagaaagcatccagtcacttactgtgtttaatatacttgttattattttagatttaccaaaaagttgcagacatatcacagagagttcccatacaccctcagccagcctcccctgccaggagcgtcctgcagatccacagctagcagtgtgatgtgctttgacctgtgtccctgcccaaatctcatgtcgaattatcatccccgatgttggagttggggcctggtgggaggtgattggatcatggggatggtttataatagtttagcaccatcctccagtgctattcttgtgatggaatgttcacaagatctggctgtttaaaagtgtgtagcacctcctccctctctcgacctcctgctccagccccctctctcgacctgctcagccgcgtgaagtgcctcgcctcccctttgccttctgccacgattggaagctccctgaggcctctccagaagcagatgctgccatgcttcctgtacagcctgtgaactgtgagccaattaaacctcttatcttcataaattacccagtcttgactgggtgcagtggctcacacctgtaatcctagcactttggaaggccgaggtgggtggatcacttgaggccaggagttcaagatcagcctggccaacatggccaaaccccatctctactgaaaatagaagaattaggtgggcacagtggtacatgcctgtaatcccagctacttgggaggctgaggcatgagaatc

SEQ ID NO: 28650 - DNA, 962 bp, Homo sapiens
ggaggaggccagagaacacttactggtaagtggttgggctgacattgatgcgccgagggtgacttcccgactcgaatttgcttgccagtgtgacattatttccaaacaggcaataacgtggcattcgcaccccaacaactccagccagcacggagcctgagtgaattcctatcctcatctaaagaagaatgaaagaggaaaaggaacatatttgtttccatttggtatgcaattattttaatgaaaggcactgctaattaataataataataataaaaaaaaactatgagctcctcaaagacaggaactgagtcctggtcatttttgtgagcctaatagctggatcattatagggctcaaagaagataaatgctattgaatacacaaataaatagattaagtatatgaaaaaatttatgtttaatttgctacataaatctggttatgttacaggttaaatcagatttcatytgtatgtaatatggtctaacttgaaaagtatatttttctccactttctccctccagttattcttaaataaaaccttatttgttcctttcatagcattaaacataattataaattaaatatttatatttctgtttattttgtttaaatgttggattttcccatcagagaaggatatagttatatatattatatacatgtatataatatatataactatatattatatataactatatataatatacatgtatattatatatagttattaataattgtatactatattgtatataatatatataaatatattaatttatatataaaaatttatatatatttatatatttttatatttatatatatttatatatattatataaatatatatataaatttatatattttatataatatatataaattatatatattatatattatataaattatatattatactatgtatatattatatataagtatatataata

SEQ ID NO: 28651 - DNA, 1042 bp, Homo sapiens
  misc_feature (1)...(1042): n = A,T,C or G
cgacatgcccgagaagatacactggcagaggagaaatgatgatgcagaggactgctccgagatgcaggaggaagtttaattacctgtgaattngactgggatggaagggatgaaacgaggtatgaaaggaaatagatatttttttaattcctgactagacagtaactgccgtccttctcttctatctgcccatgtgactaggtgataactgccatccttctcttctatctgctcctgtgactaggcgataactgccatccttctcttctatctgcccctgtgactaggtgataactaccctccttctcttctatctgcccctgtgactaggtgataattgccctccttctcttctatctgcccctaccttgggccccaaatgactcagcactaaagtgtcttcagcaggctccagtccaaaagtggcctctatgggcaccacctcctgctctgctgccctgcctcgctttcctcctcggccttcccggatgaatgacagatgtcattcccaggttccctaacactcaagtctagcccctcagtttctagcaagcatcaagcttcactgtgtgtctagcctctcaggagtcagacctcagaagtacagcttggtgtaaattcagaggcagggaagaaagaaggaaggaaagaagaccctgagctgggttcatacacatcatcgcaattcatccacaccgcagtcctgtgagttatgtgccattgtactcagaaaactgaggctcaaagagattgagcaacttatcgaagacctcacaggtcctgagagcagaccctggatttcaaacacctcggaractctgaaatccatgttacctcttctatacatgagcccaaaatgcagctgtacatcagcaagactgacttcctcttgtggcttatcactatctctgaatacaagaatcctcaaaatgttttataagcaacagtagcatcatgggaataagttggcaagttcccagcattactgctttagatgcacttgaactttttctccatgtatagagtcaagaataaggaaaaa

SEQ ID NO: 28652 - DNA, 603 bp, Homo sapiens
tttctcctctttcaagcgatcaaaatcttacccagtgtttcagggccagccctacttcttctatgagcccatttctgaggcctctaacccccaatgatctttcttctaaactctgaggaacattctattctgcaatatttacactagatttttttttttttttaaagmgatggggtctcgctctgtcgcactggctggagtgccagtggtgtgatcttggctcactgcaacctctgcctcccaggcttcaagtgatcctctcacttcagccacccaagtagctgggactacaggcgtgtgccaccatgcctggctaatttttatatgttttgtagagacagagtttcaccatgttgctcaggctggtcttgaactcctgggctcaaatgatccacccacctcagcgccccccaaagtgctggaattacatgcgtgagccaccatgccaggcatgggcgtttttacttcctgttttacaaatcttagccttttgcccccggttgtaaattcctgaggtacagagtctacacactttgattttttcctcaattgctagattggctaatgtagaacccaagagggatcctttttaagtgataggat

SEQ ID NO: 28653 - DNA, 972 bp, Homo sapiens
actaaactacagccagcatatcttagcaagtgagaaaattgatatcaacatttgggtagcatgggaattgatttttcttaggtctttggatagggcacacactactttaagtgaaactatcttaaaaatgaatccaggtcatttcaatctatgacacaaaggttataccatgaagcttactataaagctttttytaaagggcagctgggaagataaccaacattctccacctaccgtaaataactagcaataataatttttaatatttcatacagactgcctttcactgaggcacaacaactcttttttaaataaaagcaacaatttcaggaattttaagttactggccttctagtcacatcaccttgcagtccagtccgtaccaagaaaagttgacatgctggtaccatgccaacaccacctaaacagagctaacttctcataaaacctccctgaggaggcagagagtaaacagtttagatttcaaactactcgagtgaaacatgctgcttacaaagaaaatataaatagggaacagagatgatgacaaagcaagtcataaaaactagtgcaacaaacctaacttgaaagtaattttcctttactgatattgtttgactatatccccacccaaatctcatcttgaattcccacgtgttgtagaagggacccggtaggaggtaattgaatcatagggacaggtctttattgtgctgtttttgtgatggtgattaagtctcacgagatctgatggttttaaagaatgggagtcttcctgctcaagctctcttctcttgtctgctaccatgtgagacatgcccttcaccttccgtcatgattgtgaagcctccccagccacatggaattgtaagtttattaaatctctttcttttgtaaactgcccagtcttgggtatctttatcagcagcgtgaacatggactaatacatataccaaacaaaaatgcaaagga

SEQ ID NO: 28654 - DNA, 614 bp, Homo sapiens
taagctgataattgcagttcataagtatgataattgggtgctcacgcatgcgtgtgtgagatgtgtcaccctcaaaccttgttatgacgtcagcacattacccgtctaacatgaacttagaagaagcaaaaccaaaaacaaatccagccattggagatggtgctttcagggttggtgaattcccagagaactctgctgtccaatatggtagccattagccacatgtggctatttaaattttatttaaattaattaaagttaaatacaactccaaaatcaatattcaaccacaatagccacatttcaagaggttagtggctatcctaytggggggtgtggacatagaatatttccattatcacagaaagttctattggaagctatgtcatagaattctcaaaacttcctaactgcttctctctctctcttttactcttattctttctctctcactctctctcttttcccacccttaagccaagtacagggatagttgtctcatcattggtggcttaaaatgatgtttttgaacaagaagacgccccatgggtacttttggtgactagcactatctctgtttttttccttttaaattcctgagctattgtttagca

SEQ ID NO: 28655 - DNA, 614 bp, Homo sapiens
taagctgataattgcagttcataagtatgataattgggtgctcacgcatgcgtgtgtgagatgtgtcaccctcaaaccttgttatgacgtcagcacattacccgtctaacatgaacttagaagaagcaaaaccaaaaacaaatccagccattggagatggtgctttcagggttggtgaattcccagagaactctgctgtccaatatggtagccattagccacatgtggctatttaaattttatttaaattaattaaagttaaatacaactccaaaatcaatattcaaccacaatagccacatttcaagaggttagtggctatcctactggggggtgtggacatagaatatttccattatcacagaaagttctattggaagctrtgtcatagaattctcaaaacttcctaactgcttctctctctctcttttactcttattctttctctctcactctctctcttttcccacccttaagccaagtacagggatagttgtctcatcattggtggcttaaaatgatgtttttgaacaagaagacgccccatgggtacttttggtgactagcactatctctgtttttttccttttaaattcctgagctattgtttagca

SEQ ID NO: 28656 - DNA, 614 bp, Homo sapiens
taagctgataattgcagttcataagtatgataattgggtgctcacgcatgcgtgtgtgagatgtgtcaccctcaaaccttgttatgacgtcagcacattacccgtctaacatgaacttagaagaagcaaaaccaaaaacaaatccagccattggagatggtgctttcagggttggtgaattcccagagaactctgctgtccaatatggtagccattagccacatgtggctatttaaattttatttaaattaattaaagttaaatacaactccaaaatcaatattcaaccacaatagccacatttcaagaggttagtggctatcctactggggggtgtggacatagaatatttccattatcacagaaagttctattggaagctatgtcatagaattctcaaaacttcctaactgcttctctctctctcttttactcttaytctttctctctcactctctctcttttcccacccttaagccaagtacagggatagttgtctcatcattggtggcttaaaatgatgtttttgaacaagaagacgccccatgggtacttttggtgactagcactatctctgtttttttccttttaaattcctgagctattgtttagca

SEQ ID NO: 28657 - DNA, 614 bp, Homo sapiens
taagctgataattgcagttcataagtatgataattgggtgctcacgcatgcgtgtgtgagatgtgtcaccctcaaaccttgttatgacgtcagcacattacccgtctaacatgaacttagaagaagcaaaaccaaaaacaaatccagccattggagatggtgctttcagggttggtgaattcccagagaactctgctgtccaatatggtagccattagccacatgtggctatttaaattttatttaaattaattaaagttaaatacaactccaaaatcaatattcaaccacaatagccacatttcaagaggttagtggctatcctactggggggtgtggacatagaatatttccattatcacagaaagttctattggaagctatgtcatagaattctcaaaacttcctaactgcttctctctctctcttttactcttattctttctctctcactctctctcttttcccacccttaagccaagtacagggatagttgtctcatcattggtggcttaaaatgatgtttttgaacaagaagacrccccatgggtacttttggtgactagcactatctctgtttttttccttttaaattcctgagctattgtttagca

SEQ ID NO: 28658 - DNA, 1417 bp, Homo sapiens
gggctgcacaacgctacacggtggctggctgagtgctgctaccacttcctatccactactarcaagtagtagttaatacctggaacttaaaacgacattataatggaagatcactaatctccaggaaataattacagactctgaaaaaggcagaagtgggactatttcccagcagaactgaaaaaaattatcccatttagctctgcctttgattgtggtgagtgaacttcccccttccatatttatcacacaggctttaatattggcagtactgagctgttgctatagctctctccgcttcttgagatttcttaaagggtaatagaggagtggattgagagaaataggttatagctttgtgaaaagatggttaaacaaatgcacaggacattggaaaaatttgggaactactgtgaccccttcctcagccaaagactgcgtcaggaaagaagagatctcttattcttctaggtaatcatagaaaaaaatcacaaaatattttcctaacttacttgagagaaaaagtgcatttaatttataaagttatgctatttcattgatgatcataaaccattttttgtaagactcataattattttacattccacttaaggaggcaaaaaaagacaactaaattggctgacactatgaattttaaggcacaacctaatttcagagatgttaaaatgtggaaaaatgtgtgccttagaatcaataaaatacagcattttaaaccattgcctctcctgctgtaatgaagccccatcactggcagaaaatggaatctagttaggtacttgaaatgtatgactcctagcaatactttctccctagcaattcaattctgatattttaaaatactgacctttagacaaagttgggacaggtttgtgagaggaacttgtgttctgggcattgcattgcatagattgcccaggaatgtataaccatataaatcctgcacacagcctgctttgtggaacatcttggcattttttttcttgtgcaaggctgacatctgctggacaaacaacacttaagcaaagtgttgcattttagagtaaattcaattcttggcaagaacctacttgtggagtatatactacacattttctgaggagaagttgcatgtaattcttatctttgtttttttataggtaaggtgttttttccttctggcttcttttatgatttttccctttacttgtgattttctgtagtttaaaaattataagcttaggtgtagatttttgcgtttttttgtgcgtgtgtttattcttttcggtgttctctgagctctctggatctgtggtttggtatctgacattcatttgggggaattctcaattattattgtttcagatatttcttttatttctttctctctttcttctccttctggaatttccattatgca

SEQ ID NO: 28659 - DNA, 1417 bp, Homo sapiens
gggctgcacaacgctacacggtggctggctgagtgctgctaccacttcctatccactactaacaagtagtagttaatacctggracttaaaacgacattataatggaagatcactaatctccaggaaataattacagactctgaaaaaggcagaagtgggactatttcccagcagaactgaaaaaaattatcccatttagctctgcctttgattgtggtgagtgaacttcccccttccatatttatcacacaggctttaatattggcagtactgagctgttgctatagctctctccgcttcttgagatttcttaaagggtaatagaggagtggattgagagaaataggttatagctttgtgaaaagatggttaaacaaatgcacaggacattggaaaaatttgggaactactgtgaccccttcctcagccaaagactgcgtcaggaaagaagagatctcttattcttctaggtaatcatagaaaaaaatcacaaaatattttcctaacttacttgagagaaaaagtgcatttaatttataaagttatgctatttcattgatgatcataaaccattttttgtaagactcataattattttacattccacttaaggaggcaaaaaaagacaactaaattggctgacactatgaattttaaggcacaacctaatttcagagatgttaaaatgtggaaaaatgtgtgccttagaatcaataaaatacagcattttaaaccattgcctctcctgctgtaatgaagccccatcactggcagaaaatggaatctagttaggtacttgaaatgtatgactcctagcaatactttctccctagcaattcaattctgatattttaaaatactgacctttagacaaagttgggacaggtttgtgagaggaacttgtgttctgggcattgcattgcatagattgcccaggaatgtataaccatataaatcctgcacacagcctgctttgtggaacatcttggcattttttttcttgtgcaaggctgacatctgctggacaaacaacacttaagcaaagtgttgcattttagagtaaattcaattcttggcaagaacctacttgtggagtatatactacacattttctgaggagaagttgcatgtaattcttatctttgtttttttataggtaaggtgttttttccttctggcttcttttatgatttttccctttacttgtgattttctgtagtttaaaaattataagcttaggtgtagatttttgcgtttttttgtgcgtgtgtttattcttttcggtgttctctgagctctctggatctgtggtttggtatctgacattcatttgggggaattctcaattattattgtttcagatatttcttttatttctttctctctttcttctccttctggaatttccattatgca

SEQ ID NO: 28660 - DNA, 913 bp, Homo sapiens
acattctggcactaagcaagggctcaataaatgatagttattattggtattttatcttaaacatttaaatcaaatttgtatgtcttagaaatcaaagaaaagctattatcaggatctccttaaaaaggccctgtttttgtgctcctatctcaatccaagtattcctttattataataatgaccacactattaatttaccccacaaatgcattttatgcctatataaagtcccaggcaccgtgcaagattctgggactacagagcgctgtaagacttctcattcctaaccaactttcagtgtagtggaagaggcagtaaactaaatatacaaatatacctaaaacctcttctctgtgtctgactttctaacataatgtgcccagggagctattatgtatcagagatattaattgcagcattgtttttaataatgaaaaagtttattatcaatacattaagtgaccagtggtttagccaaagtaagatatgccatttatctatactaacaaaaatataccacatatactaacatgcttagggggaaatataaaaccattatagaactatargttcaatatgatatacttatttttttaatgtatacacatgcatcaaataatacatataatttacagatacacatatacacacacacgaactgagaacagtgggtctttatctcaggaaatctcagaactggcatgaaatacattgagatcaggtagttattgagggaaattgtttttttttttacacaagtataatctattcatatgtaacttgtgaatgcgaaattgattttaaaacataattaaaatatgctatctttaaaatcctattccccactcatagccaaatttattttcaggaaaggatctgatagccaccccctacatcaccaatcactggaata

SEQ ID NO: 28661 - DNA, 563 bp, Homo sapiens
tgtatatcctgttttctcatcccaacctcagagaactgtgccacttaccctccgctcccagggtcaagtcatcttcaaagctggtcccatggctgcagaagcctgtccaataatcaggtgagggtcacagaaaaccaggatggaacatatacacatgcacatgcacacccctgcatacacgaacatcttcacatgcccttagactagacttgcacaaccagataatcatactagatacccacgtttgtcaaattaccacaaactgtacatatatcacctcagaagtcatattcatttttgattcagaaacaatcatacatgcattcacctataacctttcccctatatcacatagttatgtacacaatcccctgcmaaacagcaaacatatggggatgtgcactcacacccatataaacacatattttataaagttcttttcctatagcagtggttgttatctgagcaaccactagcagaacatagcctatgactgttagtgagcctgtgggctctgagccagcactttcttctggatttcctgaagtcttgtgaccacgaat

SEQ ID NO: 28662 - DNA, 563 bp, Homo sapiens
tgtatatcctgttttctcatcccaacctcagagaactgtgccacttaccctccgctcccagggtcaagtcatcttcaaagctggtcccatggctgcagaagcctgtccaataatcaggtgagggtcacagaaaaccaggatggaacatatacacatgcacatgcacacccctgcatacacgaacatcttcacatgcccttagactagacttgcacaaccagataatcatactagatacccacgtttgtcaaattaccacaaactgtacatatatcacctcagaagtcatattcatttttgattcagaaacaatcatacatgcattcacctataacctttcccctatatcacatagttatgtacacaatcccctgccaaacagcaaacatatggggrtgtgcactcacacccatataaacacatattttataaagttcttttcctatagcagtggttgttatctgagcaaccactagcagaacatagcctatgactgttagtgagcctgtgggctctgagccagcactttcttctggatttcctgaagtcttgtgaccacgaat

SEQ ID NO: 28663 - DNA, 452 bp, Homo sapiens
attattttaagcgtcccactttatagctcaggcgtctacagtgaacagaatttaagttattagcttatggttggttaaacacttagtagcacaagaattaggctcaagtcttggagacttttcactaaccagaccacctttttgtcataaattttggttcagggtttatctttgtagagcatgagtgaagaaagatgatttctagagtttattatcttgtatttctgtgaatttattattttcaattagaacgaaatatgttctaagtcaatgagcatattttaaactacttggcacccctctaggttattcagataatcagacagttagcaaaagcgtaattaataattgctgacatgaattgawgactcaagagtagttaatgagataaggacattaactgagctgactgtttcccctgtacatatctggtaagtattttaaatcctagg

SEQ ID NO: 28664 - DNA, 587 bp, Homo sapiens
ttttttttttttttttttttttttttgacagagccttgctctgttgctcaggctggagtgcagtgacacaatcttggctcactgcaacctccacctcccaggtttaagcaattctcttgcctcagcctcccgagtagctgggaccacakgtgcccgccatcatgcccagctaatttttgtatttttagtagagacaggtttcaccatgtagcccaggctggcctagaactcttgacctcaagggatccacccacctcagcctcccaaagtgctaggattacaggcatgaaccactgtgcctggccaaaattttctatttctttataattcaatcttggtaggttttatgtgtccaggaatttattcatttctttggtttccacctcaatataaacattatggattctctacgccttgtttaatgttggaagtgttgcttttgttttacaccactggtgtaaaactttaatcattattcgcattgataaactgacagaatatttaggaattctctttatttacatggcttgactgtgaacaactgggaaacagagtgcctggactctggcatcttgggatctccagta

SEQ ID NO: 28665 - DNA, 587 bp, Homo sapiens
ttttttttttttttttttttttttttgacagagccttgctctgttgctcaggctggagtgcagtgacacaatcttggctcactgcaacctccacctcccaggtttaagcaattctcttgcctcagcctcccgagtagctgggaccacaggtgcccgccatcatgcccagctaatttttgtatttttagtagagacaggtttcaccatgtagcccaggctggcctagaactcttgacctcaagggatccacccacctcagcctcccaaagtgctaggattacaggcatgaaccactgtgcctggccaaaattttctatttctttataattcaatcttggtaggttttatgtgtccaggaatttattcatttctttggtttccacctcaatataaacattatggattctctacgccttgtttaatgttggaagtgttgcttttgttttacaccactggtgtaaaactttaatcattattcgcattgataaactgacagaatatttaggaattctctttatttacatggcttgactgtgaacaacwgggaaacagagtgcctggactctggcatcttgggatctccagta

SEQ ID NO: 28666 - DNA, 1394 bp, Homo sapiens
tcccatcagacacattgtctctctgtttccttcccactaaaaccccttatatgcctcctaatctgttacatcaataacactacacagaaaggaggagaggcccaaagatgtttttctctactcaggagggagctggacaattcaggggaattagaataaaaataaataaatgttggtgcaactcatatgtagtgactgtcagagcattggcttccatgtcaagagtgggctcctgtcctgtagctgagatggaagacagagacattggaagagacctgtacaattctgattctccttcagtaacagaaaagcagatttttttttycatattcacaggaacccaaaggctgagagcaatctcatgaatacggaattgctacagatacatggctcctccttcccaggcaagttcttaatgctaattcttgattactctggccatttattaacttatttcatctgcaagtatttattacttgcttgctatgtaacaccacttttgctaagttctggttaaaataatgtattctcctcccatattctgactacctttctttaggtaagaaatactttgaataaaaaattacttgtgatgaatgtagcagtgtaaaatggaaggtcaaacagaaggttataaaaatgaatacaatctctcttgagttgggagtcattgagccattcttatttcagtgatgtttgcacaaggccacaaacgcttctggcagttcagtgaaatgaaccaaggggcggatccctgggagaacagcaaatataaaggctgagagaaagcaggcccttttgagttaaatgtaaacaatatattggatctggcatgctgagggtaaatatgttggatcagcacaatgtgagttaatctgaggtcagatcttaaatagcctggtaggcaacataagaaatattctctatattgaaagtcattggggctgggagtggtggctcatgcctgtaatcccagcagcactttgagaggctgaggtaagaggactgcttgaggccaggagttcaaggctgcagtgaactatgattgtgcagagaccccgtgtcttaaaaaaaaaaaaaaaagaaagaaaatccatgagactgtcatagagcaccttaagcagaactggatttctgattcaatttccttactagttaatggtctgttcagattttctatttcttcatgattcattcttattaggttatatgtttctaggaatttatccatttctgtcaagttatataatttattggcctgtaattatgcatagtaatcctttttgtttctggggcatcagttgtaatgcctctatttcttttttgacttttttattttttactctggatttttaaatttcttagtttagctaagggtttgtcaattttgttta

SEQ ID NO: 28667 - DNA, 616 bp, Homo sapiens
attatctccttcctttctagagtgcaaatttgcctctaatggatggaaatgctaatgattttaaaccttactacaaaaaaaacagtctaaaaatttttaaagaaatactttagcaagctttatatattctattgggaataagacgtcctttaggcaacaattatctacaaaagaaaggaagtcatgagaaaggtgggggtgaaatgaacaagggaatgggatggtggtagggttttttgtaggtgactacatatttggtwgaaaaaggtcaagagcagaactcattcacttcacttcagggaggaagaggaaagcaggatattagagtggaaaaaagagaaaaaagagctgaatatgattctgggatgataaagtactcctgaaaactgcctcacgggctactcaggggcactaaggctcacctgcattcgccataatccatcctttctggtcatgcagggttttcaaggagggagcctgacttttaggaatgaggttagtaatccaatctgttgcagtctaggcaatgactgtatgtaaaactggcaactggcactattaaaagtggaaccagacagcatattagaagaggaaagaggaaaacgtggacatgtgg

SEQ ID NO: 28668 - DNA, 612 bp, Homo sapiens
aaggaatttatgaaatgaaacactaagcatcatatttcaggtaaattttgtgatataaatcagttgtatttatagattcaaagctaagcttgaaaaaagtctcagaagctaaggggctgatgaccctataaactgtaaaatgtgttaacaccaataaattctggtccctcagttcaaagggcatttgattatacgctgcactgtcagtgctactcacatcggagctcatcttggaatgataaacaaggcaggcctgtaatgtataccagagaatgacaagatgcacctgtccctacaagttttgagacaaaacagtaggcacttgcagacagctgtgtcatctatgagaaagtctactcataggctcaccaacaggcaagaagaaacayccccagccagtttagactacaacatcacaatgtttgcattggtatatcttttatttctctgagattattttgaatagaaaactatgttggctaaaatctattagtaaaattcctttgtatggataaagggctgttgatctctggtggctttcatttctatgcacaacattttaaagtattttaataagtattacgtaaatcaatggtaataaatgttcaattg

SEQ ID NO: 28669 - DNA, 891 bp, Homo sapiens
ggcagtacggggccgccggggcgggcgccgagcgctgagcgctgaggtgaggcgaggcgaggcgaagcgggggcgcccgggagcgcggggccaggagggcagagggagatgcggccgcagccgcggggctggaggggccggggagcgggtgtagactggggagcaccgggggccaagatttgggagctgcggccagacggggcggggatggcggccgactggagacgaggggctgtcgggtkcccggggacggggcagagcgggggtctgcgtacaggatgggaggatggggtgccgaaggggcgcgtggagagcaggagagcggcgcgagtgccaaggagaagctcgtgcagccttggccaggggagacccgcccagagagttgttgggcgagaggagtaaccgggacccgagggtttggtgcctggagaagggagtttgggctggtaggctttgtctcagtaaggtggaggtctatgcctgaggaaaactgagggtgtcaggaaggggcagtagctctgggagatgatagctgtgccgggagccctgagttctgtccttggtgagggaaggtggcccgagctcgtgttggtggccagtgagctggaggtctcgagttccatttcctcctgtttccctgacctgccatcctcctctgaaagaagtggccagcctttggggctcttgcttgtaagggagcagggaccggacctataggaggagctgttttcctccatggagcattgcctgcttgccggggctggctatttttatcccaaatgtggccgagagggggctggggctgggtgacggggcagggcaacgtggctgatgggcctgacctgctcagaaaacccaggctgtgtgagactaagaaggaaaagtgagagg

SEQ ID NO: 28670 - DNA, 1491 bp, Homo sapiens
gaaaaagcacaaatatccgtcaatgggtgagtgggtacagaaaagtggcatatccataaaaaggaatattatttagccacaaaaaggaatgaagcatgctacatttcacaatggggacgaaccttgaaaacactgctcagtaaaagaagccatcacaaaaggccatctattgtatgatattgtttatatgaaaagctgacattaggcaaatacatagaaagtaaattagtgattgtcaggacatgagaggaaatagtgacttctaaaagggcaggacgtttcccttggggataataaaaatactctacaactagatagaggtgatgattgcataacactgtaaatgtccttcatgccactaaattgtatgctttaaatgattaattttatgttatgtaaatttcactcaataaaaaaatgcaaaaacaaattgtgtggccacaaagtctaacaaatatctcctacataggataaactctgctgaataaactggcccatcagcctgatgattttatatttatgttttaaaatagccctttgtgtaaatatcagtccctttaggggtgagaccatttctcaaaagactcctggtggtaaaaaaaaaaaaaaaaaaaaaaaaaaaaaaagtcctagtccttttagaaaatgcatctttcctgatggtttagtaatttctatccctccaacaccacggccaggctccggtcctccatcgtgccgtaggatcattggctttccctgcagggaaatatcctgtggctcttattccacttgtaacttgatagtgttcttctcctctgactctgttaccactctattttagcaggtattaaagtacacactgtagatttttttttgttgtaaattcaaccaagctttcattttctttgcaagcaaattctgcagcaactgggcaaagccaacactagcacaagtaacttaaaatccgtttaagaggggccactccaatgcctgatkaagtgagcaaggtgaatgatatggttaggctttgtgtccccacccaaatctcagcttgaattgtagatcccataatccccacgtgtcatgggagggacccagtgggaggtaactgaatcatgggagtgggttttcccatgccattctcctgataatgactaagtctcttgagatctgatggttttataaatgggagttcccctgtacaagctctctcttgcccgcaaccatgtaagatgtgactgctcctccttggccttctgccatgattgtgaggcctccccagctatgtgggactgtgagtccattaaacctctttcctttataattacccagtcttgggcaggtctttactagcaacatgagaacagactaatacagtgaagaatcaggaaaactatttaggcctgtggagaactgggagcccctgcaggggaggaaggttgagactctgctcccactgatcttgccccataagaacgtgggccaaggggcaggggtgaggactgaaat

SEQ ID NO: 28671 - DNA, 1491 bp, Homo sapiens
gaaaaagcacaaatatccgtcaatgggtgagtgggtacagaaaagtggcatatccataaaaaggaatattatttagccacaaaaaggaatgaagcatgctacatttcacaatggggacgaaccttgaaaacactgctcagtaaaagaagccatcacaaaaggccatctattgtatgatattgtttatatgaaaagctgacattaggcaaatacatagaaagtaaattagtgattgtcaggacatgagaggaaatagtgacttctaaaagggcaggacgtttcccttggggataataaaaatactctacaactagatagaggtgatgattgcataacactgtaaatgtccttcatgccactaaattgtatgctttaaatgattaattttatgttatgtaaatttcactcaataaaaaaatgcaaaaacaaattgtgtggccacaaagtctaacaaatatctcctacataggataaactctgctgaataaactggcccatcagcctgatgattttatatttatgttttaaaatagccctttgtgtaaatatcagtccctttaggggtgagaccatttctcaaaagactcctggtggtaaaaaaaaaaaaaaaaaaaaaaaaaaaaaaagtcctagtccttttagaaaatgcatctttcctgatggtttagtaatttctatccctccaacaccacggccaggctccggtcctccatcgtgccgtaggatcattggctttccctgcagggaaatatcctgtggctcttattccacttgtaacttgatagtgttcttctcctctgactctgttaccactctattttagcaggtattaaagtacacactgtagatttttttttgttgtaaattcaaccaagctttcattttctttgcaagcaaattctgcagcaactgggcaaagccaacactagcacaagtaacttaaaatccgtttaagaggggccactccaatgcctgatgaagtgagcaaggtgaatgatatggttaggctttgtgtccccacccaaatctcagcttgaattgtagatcccataatccccacgtgtcatgggagggacccagtgggaggtaactgaatcatgggrgtgggttttcccatgccattctcctgataatgactaagtctcttgagatctgatggttttataaatgggagttcccctgtacaagctctctcttgcccgcaaccatgtaagatgtgactgctcctccttggccttctgccatgattgtgaggcctccccagctatgtgggactgtgagtccattaaacctctttcctttataattacccagtcttgggcaggtctttactagcaacatgagaacagactaatacagtgaagaatcaggaaaactatttaggcctgtggagaactgggagcccctgcaggggaggaaggttgagactctgctcccactgatcttgccccataagaacgtgggccaaggggcaggggtgaggactgaaat

SEQ ID NO: 28672 - DNA, 1491 bp, Homo sapiens
gaaaaagcacaaatatccgtcaatgggtgagtgggtacagaaaagtggcatatccataaaaaggaatattatttagccacaaaaaggaatgaagcatgctacatttcacaatggggacgaaccttgaaaacactgctcagtaaaagaagccatcacaaaaggccatctattgtatgatattgtttatatgaaaagctgacattaggcaaatacatagaaagtaaattagtgattgtcaggacatgagaggaaatagtgacttctaaaagggcaggacgtttcccttggggataataaaaatactctacaactagatagaggtgatgattgcataacactgtaaatgtccttcatgccactaaattgtatgctttaaatgattaattttatgttatgtaaatttcactcaataaaaaaatgcaaaaacaaattgtgtggccacaaagtctaacaaatatctcctacataggataaactctgctgaataaactggcccatcagcctgatgattttatatttatgttttaaaatagccctttgtgtaaatatcagtccctttaggggtgagaccatttctcaaaagactcctggtggtaaaaaaaaaaaaaaaaaaaaaaaaaaaaaaagtcctagtccttttagaaaatgcatctttcctgatggtttagtaatttctatccctccaacaccacggccaggctccggtcctccatcgtgccgtaggatcattggctttccctgcagggaaatatcctgtggctcttattccacttgtaacttgatagtgttcttctcctctgactctgttaccactctattttagcaggtattaaagtacacactgtagatttttttttgttgtaaattcaaccaagctttcattttctttgcaagcaaattctgcagcaactgggcaaagccaacactagcacaagtaacttaaaatccgtttaagaggggccactccaatgcctgatgaagtgagcaaggtgaatgatatggttaggctttgtgtccccacccaaatctcagcttgaattgtagatcccataatccccacgtgtcatgggagggacccagtgggaggtaactgaatcatgggagtgggttttcccatgccattctcctgataatgactaagtctcttgagatctgatggttttataaatgggagttcccctgtacaagctctctcttgccygcaaccatgtaagatgtgactgctcctccttggccttctgccatgattgtgaggcctccccagctatgtgggactgtgagtccattaaacctctttcctttataattacccagtcttgggcaggtctttactagcaacatgagaacagactaatacagtgaagaatcaggaaaactatttaggcctgtggagaactgggagcccctgcaggggaggaaggttgagactctgctcccactgatcttgccccataagaacgtgggccaaggggcaggggtgaggactgaaat

SEQ ID NO: 28673 - DNA, 1001 bp, Homo sapiens
tgctaggacctgggtgcagtgccatctcccatttatttaatgtgtccaatctattgaagtactatctttattaaatttattaaattcagtcccattttgagtgtaccatgtgtttcctgtgaggacccaactaataaactaataataataataataataataactaacacttactttgcactctttacatgccaggttctacggggtgcattcacacacaagctggttcactttgtcctcacagtgactgaacgagattggcactctttctgtaattcccattttgcagatgaagaaactgatcctcagagagcacccctgactcccaccaggtcatacagctagtagctagcagaaccagcgtttaaacctccttggcttgcatataggatccatgcttcagcccatctgtggggttccaagttatgacatgagaatggctcaggctggtgactttcctaagcaaaatgttggcagtgggatccatgacactatttagcttttattattcatcattaattgtaagagtgcatgttcaatgtcactagctgaggttctcaagcttgcacagggagactttcaattaatccactaaaaaagctctttgtgccacaactaatgcatgcctattaatgtgtgattactgtagaaggcccagtrttctttgtctgagacgatgtgaaactgaccaggagcggggatgatttagacacaatcagagtgcattacacaagctcattttcacgttaataggaacaataaaaggcttctcaccatatttacacccagaccttctcatattttagaataaaagcaggttataaaagaagttgttctacacagcacatttactattttccagagctatctgcagcttcctgcagtgctggcagaatgcaaatagcccccataatttgttagggatttttaaaatacatgtgcagtaaattagattgattagtagctttattaaattgtatgagtcacaattttagggttta

SEQ ID NO: 28674 - DNA, 1001 bp, Homo sapiens
tgctaggacctgggtgcagtgccatctcccatttatttaatgtgtccaatctattgaagtactatctttattaaatttattaaattcagtcccattttgagtgtaccatgtgtttcctgtgaggacccaactaataaactaataataataataataataataactaacacttactttgcactctttacatgccaggttctacggggtgcattcacacacaagctggttcactttgtcctcacagtgactgaacgagattggcactctttctgtaattcccattttgcagatgaagaaactgatcctcagagagcacccctgactcccaccaggtcatacagctagtagctagcagaaccagcgtttaaacctccttggcttgcatataggatccatgcttcagcccatctgtggggttccaagttatgacatgagaatggctcaggctggtgactttcctaagcaaaatgttggcagtgggatccatgacactatttagcttttattattcatcattaattgtaagagtgcatgttcaatgtcactagctgaggttctcaagcttgcacagggagactttcaattaatccactaaaaaagctctttgtgccacaactaatgcatgcctattaatgtgtgattactgtagaaggcccagtgttctttgtctgagacgatgtgaaactgaccaggagcggggatgatttagacacaatcagagtgcattacacaagctcattttcacgttaataggaacaataaaaggcttctcaccatatttacacccagrccttctcatattttagaataaaagcaggttataaaagaagttgttctacacagcacatttactattttccagagctatctgcagcttcctgcagtgctggcagaatgcaaatagcccccataatttgttagggatttttaaaatacatgtgcagtaaattagattgattagtagctttattaaattgtatgagtcacaattttagggttta

SEQ ID NO: 28675 - DNA, 1242 bp, Homo sapiens
aattctgaaatagtatcctgaatctgctatgcatgggtttttcaaaagaaataatacttttttttcacaattattgaaatcttttatttgctttaagactttagaagctttgagaggtgaggaagaaagattcttggaggtatattatctttgaaaaatcaattgtgctgttacctctattccctycaaagggagagaaagtgcccatcttcttatcccaaaccccccaaaggaagaggatccgacagggcgggctatttgtaggcattaagatgcaacccctatgactgggggagatggtggcctgagtatgattttccagggcagtgaaagggagatgtgcctataaaagcttagctctggggagcagccctgggctttcagattttcccaagaccagagacacaggtatgttttatctctaagcaaggcaagtgatacaatctacaaagacattggcacaaaagttgaaggcattttaatttttagcatcaaagaataaaataaaacaaagcgaagagcacatgaaaagaatagtcaccttttctttggaaatgaagctgatgagaatatcagaaggaacatgcattgctcagtaagttgttttcctgcaaaggttcctaatcatctcaacaaatcatagttctattaatttgaaattgatgtaaagttggaggaagaatcaggtctaggaatacgtgtgtgtgtgttcactttttcttataaatgcctccagaaagatacagctcagcaggacatccaagctgattgcttatgtaaaaattctaatccaacttgtattaggccattcttgcattgctataaagaaatacccaagattgggtaatttataaagaaaagaggtttaattgtctcacacttctgcaggctgtacaggaagcatagctctggcattagcatctgcagaggcctcaggacgcttgcaatcatggcagaaggtgaagtgggagcagggttttacatggtgaaagcaggagcaagagagagttggcagggggaggtgccatacgcttttaaatgagcagatctcctgagaactcactatcatgaaaacagcaccaagccatgtgggatccacacccatgacccaaaaacctcccaccaggccccacctctagcactgaggattacaattcaacatgagatctgggtggggacgaacatccaaaatatctcacaattattatatactgggtcaagtacagtatatgaggtttacca

SEQ ID NO: 28676 - DNA, 1242 bp, Homo sapiens
aattctgaaatagtatcctgaatctgctatgcatgggtttttcaaaagaaataatacttttttttcacaattattgaaatcttttatttgctttaagactttagaagctttgagaggtgaggaagaaagattcttggaggtatattatctttgaaaaatcaattgtgctgttacctctattccctccaaagggagagaaagtgcccatcttcttatcccaaaccccccaaaggaagaggatccracagggcgggctatttgtaggcattaagatgcaacccctatgactgggggagatggtggcctgagtatgattttccagggcagtgaaagggagatgtgcctataaaagcttagctctggggagcagccctgggctttcagattttcccaagaccagagacacaggtatgttttatctctaagcaaggcaagtgatacaatctacaaagacattggcacaaaagttgaaggcattttaatttttagcatcaaagaataaaataaaacaaagcgaagagcacatgaaaagaatagtcaccttttctttggaaatgaagctgatgagaatatcagaaggaacatgcattgctcagtaagttgttttcctgcaaaggttcctaatcatctcaacaaatcatagttctattaatttgaaattgatgtaaagttggaggaagaatcaggtctaggaatacgtgtgtgtgtgttcactttttcttataaatgcctccagaaagatacagctcagcaggacatccaagctgattgcttatgtaaaaattctaatccaacttgtattaggccattcttgcattgctataaagaaatacccaagattgggtaatttataaagaaaagaggtttaattgtctcacacttctgcaggctgtacaggaagcatagctctggcattagcatctgcagaggcctcaggacgcttgcaatcatggcagaaggtgaagtgggagcagggttttacatggtgaaagcaggagcaagagagagttggcagggggaggtgccatacgcttttaaatgagcagatctcctgagaactcactatcatgaaaacagcaccaagccatgtgggatccacacccatgacccaaaaacctcccaccaggccccacctctagcactgaggattacaattcaacatgagatctgggtggggacgaacatccaaaatatctcacaattattatatactgggtcaagtacagtatatgaggtttacca

SEQ ID NO: 28677 - DNA, 1242 bp, Homo sapiens
aattctgaaatagtatcctgaatctgctatgcatgggtttttcaaaagaaataatacttttttttcacaattattgaaatcttttatttgctttaagactttagaagctttgagaggtgaggaagaaagattcttggaggtatattatctttgaaaaatcaattgtgctgttacctctattccctccaaagggagagaaagtgcccatcttcttatcccaaaccccccaaaggaagaggatccgacagggcgggctatttgtaggcattaagatgcaayccctatgactgggggagatggtggcctgagtatgattttccagggcagtgaaagggagatgtgcctataaaagcttagctctggggagcagccctgggctttcagattttcccaagaccagagacacaggtatgttttatctctaagcaaggcaagtgatacaatctacaaagacattggcacaaaagttgaaggcattttaatttttagcatcaaagaataaaataaaacaaagcgaagagcacatgaaaagaatagtcaccttttctttggaaatgaagctgatgagaatatcagaaggaacatgcattgctcagtaagttgttttcctgcaaaggttcctaatcatctcaacaaatcatagttctattaatttgaaattgatgtaaagttggaggaagaatcaggtctaggaatacgtgtgtgtgtgttcactttttcttataaatgcctccagaaagatacagctcagcaggacatccaagctgattgcttatgtaaaaattctaatccaacttgtattaggccattcttgcattgctataaagaaatacccaagattgggtaatttataaagaaaagaggtttaattgtctcacacttctgcaggctgtacaggaagcatagctctggcattagcatctgcagaggcctcaggacgcttgcaatcatggcagaaggtgaagtgggagcagggttttacatggtgaaagcaggagcaagagagagttggcagggggaggtgccatacgcttttaaatgagcagatctcctgagaactcactatcatgaaaacagcaccaagccatgtgggatccacacccatgacccaaaaacctcccaccaggccccacctctagcactgaggattacaattcaacatgagatctgggtggggacgaacatccaaaatatctcacaattattatatactgggtcaagtacagtatatgaggtttacca

SEQ ID NO: 28678 - DNA, 553 bp, Homo sapiens
tggggtttcaccatgttgaccaggctggtctcgaactcccagcttcaggtgatctgctgaaccttggcttcctaaagtgctgggattataggcgtgagttactgtgcccagccttcagtcatttttttaaataaatataatttgagggcaaaataggattaattatatataacagmttggaactctttgccacctattactgcattatgcacatcttttaatgttgctaaatattttatgattgatcatttatagtaggtgactagaattgaattattggaatctttatttgatccaaaagtcatgaattcaaacaccttcagagcttaagcagatagagtgcaaggctgaagaacctggatcaagtacaataagaaacagtgggtgctatggagaaccaagggagtgatactgaggggagggtgggcagttgccacttagaagtagaattttttaaagctttaattacttatttattttgagacaggccctcactcgatcacccaggctggagtgcagtgctgtggtcagggctcactgcagcctccacctc

SEQ ID NO: 28679 - DNA, 524 bp, Homo sapiens
gcctagaaaacacagtgagaaccctaaaaaagaattagccaggcaagatggtgggtgattatagtcccagctactcaggaagttgtgacaggaggatcacttgagcccagtagtttgaggttgcaatgagctgttatggtgccactgcactccagtctaggcaacagaatgacacttagtctctgaaaaatcaaatcaaaataaaatttaaaagataaatcacacttagtaaatttaaaacaaaattaaaataataaaccagaagggtttattgagttagttgagaagtgagatgccagacataatagcaatttatttactattttttagggggtgaactaactttagattcattaycctaaatatgtgtatttaaatttataacatagcaacgggaaaaatagaaaagcagtgtataattttccaaacagtgaaggtagtgtggaatcaaaattcaattcagaaattgactaaaaacaaaacaataagagaaaaagagggaaaagagcacaaataacacaata

SEQ ID NO: 28680 - DNA, 524 bp, Homo sapiens
gcctagaaaacacagtgagaaccctaaaaaagaattagccaggcaagatggtgggtgattatagtcccagctactcaggaagttgtgacaggaggatcacttgagcccagtagtttgaggttgcaatgagctgttatggtgccactgcactccagtctaggcaacagaatgacacttagtctctgaaaaatcaaatcaaaataaaatttaaaagataaatcacacttagtaaatttaaaacaaaattaaaataataaaccagaagggtttattgagttagttgagaagtgagatgccagacataatagcaatttatttactattttttagggggtgaactaactttagattcattatcctaaatatgtgtatttaaatttataacatagcaacrggaaaaatagaaaagcagtgtataattttccaaacagtgaaggtagtgtggaatcaaaattcaattcagaaattgactaaaaacaaaacaataagagaaaaagagggaaaagagcacaaataacacaata

SEQ ID NO: 28681 - DNA, 840 bp, Homo sapiens
tatgaatttcatggtgcctttgtgttctaacagtctataaatctgtaagattatccaaagatgaatgttcgaacattgagaaagagaagagatgatcactgggtttagcaatagtttatggaaaacaagtaacaccagcctaacttcatttcttcttgtaagggaaaggctaggattatagcacatctggattttgggaagagatttggaaattatatttaatgagcacctactattcatttaacactcattcaacagacactattgagcacctaccatgttgtatttcattttttcatagtttctaaaatgttttttgtttcaatatctttagaggtaaaagtgatttttggccacatggataaattgcatagtggtgaagcctgggcttttagtccactcatcacttgaatagtgtacattgtacccactaggtaattttttatcccacctccccctcttgtaagtcttcagtctgcattatactactctgtatgcttyttttttttttttttgagacggagtctcgctctgtcgccaggctggagtgcagtggcgggatctcggctcactgcaagctccgcctcccgggttcacgccattctcctgcctcagcctcccaagtagctgggactacaggcgcccgccactacgcccggctaattttttgtatttttagtagagacggggtttcaccgttttagctgggatggtctcgatctcctgacctcgtgatccgcccgcctcggcatcccaaagtgctgggattacaggcgtgagccaccgcgcccggccctctgtatgcttttgtgtacccctagattagctctcacttttaag

SEQ ID NO: 28682 - DNA, 340 bp, Homo sapiens
ctacaggcgcctgccactgtgcctggctagttttttttgtatttttagtagagacggagattcaccacgttagccaggatggtctcgatctcctgatctcatgatccccccacctyggcctcccaaagtgctgggattacaggcgttagccaccgtgcccgattctttttatttttggagtccgccatcaatgatttgccagaaagcaccaggtcatgccaaaatagacgagggcatagcaggtgttggttaacatttaaattaagtaaagagtttatcttttatggatgtgcatattcacggttttcattttctttctttctttcgtgacagggtctta

SEQ ID NO: 28683 - DNA, 584 bp, Homo sapiens
tcatttccagtccctttgatcctacgctcagatttgaatactagtgaaagggcggtagtagagtagtaggcccagttgcaatcttgtgctagtctcatgggtagggaagggtatgggccctggttactgtcccatcagactgtgtcttataggaaaaaagtaatttctcaaaaggaattagagtggtaatagaaagaagatggatgctggacaatccaaaaatccacagacatgaaattgatattccttatttcttcagtttrgggtagaaaatgtatatagactcagtgattctgagcccttttaccctgtgctatggtctgaatgtttatgtttctcctaaattcaaatgttgaatcccttaccctcaagggatggtattaggacatgcggactttgtaaggtgattaggtcatgagggtaggacccttgtgagtgggattaatgcccttataaaagaggcctgaggattgctccttccaccatgtgaggacacaatgaaaatccaccatctatgaaccagaaagcaggccctcatcccacaccaaatctgttggtgcctagatcttgaacttcccagcctc

SEQ ID NO: 28684 - DNA, 1081 bp, Homo sapiens
atactatcatttgtcaatgcaataagaatattttattatcataatatgctttacatgatattttcatctttgttgttgttgtattagctatgatacagtctgttttcttttttggctttttgagaattggagctcctactgagaagttttcgagctttcacagatcttttcactttctggatcctagttcctgtgagtgtttccaaaggcaaaatggcatttcagaagcaatgataagtgtatttctaaaatagaacacataccacgcagtttcttaggacagaacaatatcctggtgagaacagctgggctggttagggaaacaaayggtcaaatgcaattctcgaggatgctctgtaaggctgagggcaataacaaccacatgagctttgttccttgatattttcttttagtttcccaaagtgctttgcccctttttcctgtaagtgtaatctctgtacctaagagtgaagtgaagacaatttcttgccaggattatgagcaatactttaatgattagtcagcagcactaactacttatactgtttggggagcatctaagagcatcttgaagaggtcccagagaggagacattctctcttagagctaacgcctttgttcttttgtgaactcactatgctttatttctctgtcagctttaaacgcatgtgttgatcagcaaaaggatacccattacaaagctaattactattattggcctatatgtatcattcaggtcatcttcccagtctctctgcttcttagtagttggggcaagtagccaataattgagaaaaatatttcactttcaattgggtccactctggaactgggtacacagcaattcctgggaatgtgaaatgctgagtttggaacctggagtgggtgctttatatatgtatgcagtagtggcaggaggtcttgcttcaagtgcttatcttctctctccaattgtaacataggtctcttatgggtagaaaccatgagtgtgttttattgttttataaccactgctagcagcctagtgccagaaacatatcaatacatactcatttattgatagcttataaatattcaagta

SEQ ID NO: 28685 - DNA, 1081 bp, Homo sapiens
atactatcatttgtcaatgcaataagaatattttattatcataatatgctttacatgatattttcatctttgttgttgttgtattagctatgatacagtctgttttcttttttggctttttgagaattggagctcctactgagaagttttcgagctttcacagatcttttcactttctggatcctagttcctgtgagtgtttccaaaggcaaaatggcatttcagaagcaatgataagtgtatttctaaaatagaacacataccacgcagtttcttaggacagaacaatatcctggtgagaacagctgggctggttagggaaacaaatggtcaaatgcaattctcgaggatgctctgtaaggctgagggcaataacaaccacatgagctttgttccttgatattttcttttagtttcccaaagtgctttgcccctttttcctgtaagtgtaatctctgtacctaagagtgaagtgaagacaatttcttgccaggattatgagcaatactttaatgattagtcagcagcactaactacttatactgtttggggagcatctaagagcatcttgaagaggtcccagagaggagacattctctcttagagctaacgcctttgttcttttgtgaactcactatgctttatttctctgtcagctttaaacgcatgtgttgatcagcaaaaggatacccattacaaagctaattactattattggcctatatgtatcattcaggtcatcttcccagtctctctgcttcttagtagttggggcaagtagccaataattgagaaaaatatttcactttcaattgggtccactctggaactgggtacacagcaattcctgggaatgtgaaatgctgagtttggaacctggagtgggtgctttatatatgtatgcagtagtggcaggaggtcttgcttcaagtgyttatcttctctctccaattgtaacataggtctcttatgggtagaaaccatgagtgtgttttattgttttataaccactgctagcagcctagtgccagaaacatatcaatacatactcatttattgatagcttataaatattcaagta

SEQ ID NO: 28686 - DNA, 1067 bp, Homo sapiens
aaagcattggtggatagtcagtcttaagaaagaataaagacatccccacaggaaagactaccaagagattcattatatgttgaagacaaaaggaaaatcatgcatatcattatcaatcatgacacacttgtaatttaaatacagatgcatcactaaataggaataagaacatgtatatgtatatattcataaaatatagacagcacataagtgcaaaccttatacataaacatatataacctgcagcagggtctttgagcaacaccatgcattttttgaaaccaagattagggaataaagatgacagagttgggcttttcatttttagtggcaccctttattatccatttcacatttatcttcttatcactaggattttaatcttcatttcagtttgagtccaagtaaggatggagaaaaaaaaatcaagaaactatatttcaatgacattcaataataattattccctagtacttttcatctgtatttttttaatgtgagttccaattttattaattggtaaaactgtgacatagcaattggctttcccaagatcgcaaagtgagctggagcctgaagtcagaataactgccttgtatatttaggcaattgtattacaatacaatgccttcatgtcaaacactactcctatttgaagcagagagaaatcagcagaagggggcaaaaactaaggctttacgtattctaatgtgcaaaatatggaagcctcctattttcaaaacatctacttttttctctgattctgtgaccctgcaaagtgcaaagcacggttttagctactgtgggatgatagagatgagcaagacttattttcttctttcaagcawcctactttctagttggaggaattaaaacaatgatagacatgtaattaatacaaggaaaaatgagggcagaattacaaggaatcacattagatttggtggcactaggaaaggaaccatgtaagaagtgcatctgataaaggttttaaagaatggatgaaatgtccaggtagaaaggaggaagaaaggatggcatgaggaagtgattctgcatagagagag

SEQ ID NO: 28687 - DNA, 1282 bp, Homo sapiens
gacctgaccctgaggacgcatacagggaatgttagctgttactagttttacaagaatgtgaattctccatctgtgatcctctctctcctctcctccaagcgccttcctctgggtcccacagtctacctctcttatctcacctgccacctggcttcaaaattgtctgtgcacctgtacttctcagtagctgttaagtcattttaagacatgccatatctttttattttgattcactccctgcctgccactctcccctagaagatataggcacagagttggcactcaacaaattaccacatttaggggtacatcatcgactattagccaatatgatctaatggaaaagtgacaggctatcacagtcatcactctcctcccaacagtgctttttcaatagagtgtcttctaaagccatttacccactttatacccaattcttccacaattatattaaattttaaaaagtgactaatgaataatggacaattcaaatcagataggagacagtggagtctggccaagcagggaggggcatggccctcccagaattgaccatcatgctgtgtgtgttggctgccttcatagttcattcactgagccagcccgggggttaaagaataatgagatcgtgaagggtgcaaacaaaatcagtctcaatactttgtaatatagtgcatttattacttgtgtttatctgtgtgcatgcccacacacagccctgctgcgttattttaagccaagaaagggacatgctacaatgtatgtatcgaagcagtagaactatgttgaaattgttgagtagcacaggcaaattgccacctgctgtgtatcttgaagccagaacattggagcctattacaggtgagtttgaactaatagtaatgtgcttctcacttaaaatcttctatcaatcatactatttatagtttttcctgtaatcaaatttagaggggtattaaaaaattgaaatgcagagaaggctyttctgccaccacttcctttagttcgatattcagtggcatccctactgtgtgaaggctgacttgaaagtttggcaaggctggcttctctagggcatctcctgctacactgaagcaattctgcaccacctttccaggtgctctcaatcagcaatgctgaaggaagaagaatgcagagttccttttagtagaacattttcctcacttcctctttgctcttcttgcttgaggcaggttgataggcatggctggcagcccaaattgcagtgcccaataagcaacccttagagagccaaagtgca

SEQ ID NO: 28688 - DNA, 495 bp, Homo sapiens
atgtgcatctattccctctctcctcagcacatattagacaatccatcagctactgaatgaatgagaatggcccagatagacagacaatccatgagctactgaatgaaagagaayggcccagatagagagacaatccatgagctactgaatgaatgagaatggcccagatagaggagtggtagatgagaatgatcactcaggatgtccagaccccacctatatcaggacttgtctgacttggctcatcaccttaaaatactacatgccacagctgctgtctctccaagacaggctgatgcttgtgactgtagaaagtcaatgtcctctttgaacttttctaaaaaaggaaaaaaggactttgaaaaactatgaaggggcccactcttctcccttgatctcacccaccacgttataaaacagaccatgtcacaagggaaaacaaatggctctgtcattccagcaccttacagctctctgatgggccagcaacttgca

SEQ ID NO: 28689 - DNA, 1054 bp, Homo sapiens
ggatccaattctccactttgtccctgggcctcaggccagcggtgtgtacactggtaacctggttcataatttctttcatcaagtgcctcccctagattcacactctccaatctcagtgtcgagtctatgactataatggaggaagtgggtctggagagagggtggcacagggtggagagtgtctgacaggtgcccctagaaacggggctggccttctgctgtgctattccatccacctggatgcttctcctcaagcccacaggtccctcgcctcacctcacaatgctgcttctggtttcctccactgtggtcttcatcatcgcccaggggtctcctttcctcatctctgttccccaggctgggctaggcatccttcccaggggtacccacagtgcccacccacccctgtcatgaaaccacctggaatcacaaatgtctatttattagagtctctctctgattacacagtgagctcctcaacgggagatcccatgttatcccttcatctttctatcccccgtgggccctacagagtccagtatacaggacacactcaataaatggttgcaaatacacagcataattccttgtgtctatacctccgtaatcatgaagtctgagtgctgcaatttgcactgcatctgtcatttcctctaaggcccaggctggtcaggagtgcactcggggagtccccgggatagatattgagggcacatgtctggaaacaggctaccctggccatggtctctttgggggacctcaggcagagataacagccacccccatctgtggttggtgacagtggcctgtgaaggcagaggagcacctaagcatcctgtacacgggccccttctgccccctggtgtcactgtggggaaaggcagtggggccccctggaagctagaggaggaaggctcagtaggtccccaagttcctgattcctggtagagccacacaggaaccccaggctsctgaggactcggtgggtagggactgagcaaggggagaggcccacagcccagccacatatgggcaggcaaaacagcaaaggcct

SEQ ID NO: 28690 - DNA, 1092 bp, Homo sapiens
caactaatacaccttccttacctggttcccttaaagccaaaacgcaatgtgctcttcctaaatagtcagccatggtgccaacacctatcacagagtcctcttttggagctgtctgctctggtcctgggccccaccagggtgttggtgccaacccacgagctccctgctgacctgcagtggtgccgccgcaccatccagctgaactcccgcttacagtcgaggcagtggtttgcctctgtgtctccgagccatctctcctcagcactgagcttctgctggaattccagggcatctgacttctgccagagagcatccttgtccctgggacaaaaccacattggaagaaaagragagagaatccatgaaaacaataggatgatccttcttcatttcaaaagactggtatcaaatttcctaagtcatagaaagaaaattcactttcaccttggaaatatgccccagcccatgctaagtctcctccatctcccccgacatgcagacttaactgacaccgcatgtgtgagaacatgcgggaggcaaaagatgtacacagaaggcactgttaaatgcaaagagctgccagcaccaaagagagccaccactcaggcacctaaacaacagtgctgggggaccactgggagtttaagctaaaacgtgctgccatgccgacggcgtgcagtaagcccaaggaccatgaatgtacttcccacctgaatcttaatgtgcttggggccctttatgtttctatggttgatccaagtaacaattaatcagtggagaagatcaaagatttcctagtgtgaaaatctgatcagatgttagcctcctctgcccctcagagagatggtaaggtcactccaagaagccagactcaaagaagtgtgaggctttccagaaaggtctggcagtgtcagaatgtgcctgatgcactggagggggaggatgtgaacagaggcttcctcagggatactaatgagcatgttcaggcttgatggtttctgacatgtgaagtttagttctttctcgtatggagccccagctagcatcctcagggctaacgtggctctagcagcacctcagccaccggtaatg

SEQ ID NO: 28691 - DNA, 534 bp, Homo sapiens
tatacttcagcttttataagttcgaatgccgtcaaattgagcagtcagaaggccctctgtcaaaaactgtgttgctgaaaaatttgaagaaaagtatgtgaaagccttcacttcacgcttttgtcttgactttttaccgctgaaacaactgttatttcgagagccaagactagagtgtcattgagcataataaatgttaagtgttgatagctgagctgacacgttccattaatcagatggtggtgtgttatgtttagagtattgccaagcacattgtttgctaatgtcgtatgaaacatgagatgaaaacatgtctgtgtgtctgttggagcaycttcaaagttgattccaggccctctccatttgcagaaggggaatgggtcatccgacgggttgaaaaatgttcattattaaattccctgtgtgtctaatcatttggcaggaagttctctcttatgtgcttcatgcaatcttttccactggaccaagaaagagcagcacaggtttttttccccctttcctgctgagtgagct

SEQ ID NO: 28692 - DNA, 514 bp, Homo sapiens
tttcttatgcttttgtttcaccggcatttaaaagacaatggattcgaaaagaaaaataacttatctcagcttacaaattaatatgtccattaatatcttttaaacttctgtcttattctttatatccacagtataacagcagctaggcctggaaggcaatcacctaatccattcaactaatacttgagtgccaggtattctcctagtctggtgataaaacagtgaaaaaaggccaaagaaaatcgataaaaaaacaacaatagcaacaacaacaatacagcaaaacagaaactgttcctgtcctgaagaatttccatccyagaagatgatcattaatcaataatcttaagagttaatcaactagtgatataaatgcatgattgttatgaatgctgtgagaaagataaaatcatgcagttcaggaattgacctaatcaaggaatcttttttcggggggatgagatgcttatggggagaaattaaaaatgagaaataattaactaggtgcgaggag

SEQ ID NO: 28693 - DNA, 589 bp, Homo sapiens
cgtgagccaccatgcccgccctatcttctcttataaggaacacgcagtcatattggattaagggcctgccctgctccagtatgacctcatcttagctacttacaaccacaaccacagtatttccaaataaggtcacatwctgaggctccaggaagtacatgaattttggagaggacaccattcaacccagtacattcagtttctatttaacataaaaaataattcccatactatacaggatgaaaaaatgacttatgaaataggtgaaagattgttgaatatacaaatgtgatcttttcttttccaatcacatacagagataagaattttttgggaatatgtctcattcacaaatatgtattatatgcaaagagaaatttatacattgttcaagtaggattcagggaattaacctaggtgcgttctcttgtttctatttcaaccatattgttctccagatttttttcctaattctgatttccctgtgggattgttcagatttaaataaagcctgtaaagcagaagtagtgaacaagcctgggtactaaagttaaatattacagaggcagataaaataagtctgagaaaa

SEQ ID NO: 28694 - DNA, 589 bp, Homo sapiens
cgtgagccaccatgcccgccctatcttctcttataaggaacacgcagtcatattggattaagggcctgccctgctccagtatgacctcatcttagctacttacaaccacaaccacagtatttccaaataaggtcacattctgaggctccaggaagtacatgaattttggagaggacaccattcaacccagtacattcagtttctatttaacataaaaaataattcccatactatacaggrtgaaaaaatgacttatgaaataggtgaaagattgttgaatatacaaatgtgatcttttcttttccaatcacatacagagataagaattttttgggaatatgtctcattcacaaatatgtattatatgcaaagagaaatttatacattgttcaagtaggattcagggaattaacctaggtgcgttctcttgtttctatttcaaccatattgttctccagatttttttcctaattctgatttccctgtgggattgttcagatttaaataaagcctgtaaagcagaagtagtgaacaagcctgggtactaaagttaaatattacagaggcagataaaataagtctgagaaaa

SEQ ID NO: 28695 - DNA, 589 bp, Homo sapiens
cgtgagccaccatgcccgccctatcttctcttataaggaacacgcagtcatattggattaagggcctgccctgctccagtatgacctcatcttagctacttacaaccacaaccacagtatttccaaataaggtcacattctgaggctccaggaagtacatgaattttggagaggacaccattcaacccagtacattcagtttctatttaacataaaaaataattcccatactatacaggatgaaaaaatgacttatgaaataggtgaaagattgttgaatatacaaatgtgatcttttcttttccaatcacatacagagataagaattttttgggaatatgtctcattcacaaatatgtattatatgcaaagagaaatttatacawtgttcaagtaggattcagggaattaacctaggtgcgttctcttgtttctatttcaaccatattgttctccagatttttttcctaattctgatttccctgtgggattgttcagatttaaataaagcctgtaaagcagaagtagtgaacaagcctgggtactaaagttaaatattacagaggcagataaaataagtctgagaaaa

SEQ ID NO: 28696 - DNA, 589 bp, Homo sapiens
cgtgagccaccatgcccgccctatcttctcttataaggaacacgcagtcatattggattaagggcctgccctgctccagtatgacctcatcttagctacttacaaccacaaccacagtatttccaaataaggtcacattctgaggctccaggaagtacatgaattttggagaggacaccattcaacccagtacattcagtttctatttaacataaaaaataattcccatactatacaggatgaaaaaatgacttatgaaataggtgaaagattgttgaatatacaaatgtgatcttttcttttccaatcacatacagagataagaattttttgggaatatgtctcattcacaaatatgtattatatgcaaagagaaatttatacattgttcaagtaggattcagggaattaacctaggtgcrttctcttgtttctatttcaaccatattgttctccagatttttttcctaattctgatttccctgtgggattgttcagatttaaataaagcctgtaaagcagaagtagtgaacaagcctgggtactaaagttaaatattacagaggcagataaaataagtctgagaaaa

SEQ ID NO: 28697 - DNA, 589 bp, Homo sapiens
cgtgagccaccatgcccgccctatcttctcttataaggaacacgcagtcatattggattaagggcctgccctgctccagtatgacctcatcttagctacttacaaccacaaccacagtatttccaaataaggtcacattctgaggctccaggaagtacatgaattttggagaggacaccattcaacccagtacattcagtttctatttaacataaaaaataattcccatactatacaggatgaaaaaatgacttatgaaataggtgaaagattgttgaatatacaaatgtgatcttttcttttccaatcacatacagagataagaattttttgggaatatgtctcattcacaaatatgtattatatgcaaagagaaatttatacattgttcaagtaggattcagggaattaacctaggtgcgttctcttgtttctatttcaaccatattgttctccagatttttttcctaattctgatttccctgtrggattgttcagatttaaataaagcctgtaaagcagaagtagtgaacaagcctgggtactaaagttaaatattacagaggcagataaaataagtctgagaaaa

SEQ ID NO: 28698 - DNA, 1111 bp, Homo sapiens
aaggttctagcctattcaatctgattccaaagtctgcacccttaaccagatgacatgttgcctcatagtttttctttctgtgcccccatctccttattgaagctatactttggatagattttcaaaaaattatgaatgatcatcagaatttactttagccaggcaggccgggcatggtggctcatgtctgttatctcagcactttgggaggccaaggcgggaggatcacttaaggtcaggagttcgagaccagcctggccaatttggtgaaaccccatctctacacaaaaattagctgggcgtggtggcacaagcctgtaatcccggctactcaggaagctgaggcaggagaaatgcttgaacctgggaggcggacattgcagtgagcctagatcatgtcactgcactccagcctgggtgacagagtaagattctgtctcaaaaaaaagaatttactttagccaggmaaactggtgttggcccatgatcaaaaataagtcatcatctaaaaaagaaaattttttaaaaaatgaattataacattattctttctttttattgatttttttccttttattgattttcacctatgccatgaacattgcttttgcctgtctagttgggagtttattagttggttccttcttcaaaagagaagaggggaaataatctaattataataaagatgatgctgataggagcaactaacttttactgagcctttaccataagctaagcactgtaccaagaacttatatatgttggttcatttactcctcatcagaaccttataatgggtacaattatagtatgttacaaatgtaaaaactgaggcttagaaagattaagtaatttgcccaaggtcacatacctggcaagaaacagatatagaactccaatccagatgtaattccctaatccacatctcaataatttagtaaaagctgttactcttcatctactggaaaggctaagcactctgaaaataattcacaaccgacactatgctattttcctaaccttacagatataaccagactgatgttaaagaccaacctaataaacaattcatttgaccaagatcctggaagtgccatttttctatggaaaa

SEQ ID NO: 28699 - DNA, 782 bp, Homo sapiens
caacaacagcaagtctttcatgagttaaaggaaaaacttctggcagccccagccctggggctacccgatctgacacagccttttccattgtatgcatcagagagagaaaagatggcagctggacatttaacccaaactgtagggccctggctgaggccggtggcctacgtctctaaacaactagacagggtttctaaaggattgcccccctgtttkagggccttggcagcaactgccctgctagtacaagaagcaaataagctgactcttgggcaaaacctgaacataaaggccccccatgctgtggtgactgagagccagccccacacacccactccaccaccagctctcaggatctgtggtggactcacagcctgtttaccatattgtgagtaatatcatctccccctctggagattatgaactgtttcacagacggatgtacacccgtctgtactgggagtaatatcatcctcttcctccctgaatattaagaacagtataacaggggtttttctactccctgcgatatcgtgtgttatatcctcctctcccacgttgcaattagaaacaatatcagtgagggcgtgtccaccttctgtcatattgaaagtaatatcatcttcttccctccaggatcgtgggaacaacatccctgggggtttccactttctgccatacatgaagtcatatcaccccctccgccttggaatattatgaaggagcatctcacaccggggtgtatacttacggtgatatttggagtaatgtcaacctctcgg

SEQ ID NO: 28700 - DNA, 782 bp, Homo sapiens
caacaacagcaagtctttcatgagttaaaggaaaaacttctggcagccccagccctggggctacccgatctgacacagccttttccattgtatgcatcagagagagaaaagatggcagctggacatttaacccaaactgtagggccctggctgaggccggtggcctacgtctctaaacaactagacagggtttctaaaggattgcccccctgtttgagggccttggcagcaactgccctgctagtayaagaagcaaataagctgactcttgggcaaaacctgaacataaaggccccccatgctgtggtgactgagagccagccccacacacccactccaccaccagctctcaggatctgtggtggactcacagcctgtttaccatattgtgagtaatatcatctccccctctggagattatgaactgtttcacagacggatgtacacccgtctgtactgggagtaatatcatcctcttcctccctgaatattaagaacagtataacaggggtttttctactccctgcgatatcgtgtgttatatcctcctctcccacgttgcaattagaaacaatatcagtgagggcgtgtccaccttctgtcatattgaaagtaatatcatcttcttccctccaggatcgtgggaacaacatccctgggggtttccactttctgccatacatgaagtcatatcaccccctccgccttggaatattatgaaggagcatctcacaccggggtgtatacttacggtgatatttggagtaatgtcaacctctcgg

SEQ ID NO: 28701 - DNA, 782 bp, Homo sapiens
caacaacagcaagtctttcatgagttaaaggaaaaacttctggcagccccagccctggggctacccgatctgacacagccttttccattgtatgcatcagagagagaaaagatggcagctggacatttaacccaaactgtagggccctggctgaggccggtggcctacgtctctaaacaactagacagggtttctaaaggattgcccccctgtttgagggccttggcagcaactgccctgctagtacaagaagcaaataagctgactcttgggcaaaacctgaacataaaggccccccatgctgtggtgactgagagccagccccacacacccactccaccaccagctctcaggatctgyggtggactcacagcctgtttaccatattgtgagtaatatcatctccccctctggagattatgaactgtttcacagacggatgtacacccgtctgtactgggagtaatatcatcctcttcctccctgaatattaagaacagtataacaggggtttttctactccctgcgatatcgtgtgttatatcctcctctcccacgttgcaattagaaacaatatcagtgagggcgtgtccaccttctgtcatattgaaagtaatatcatcttcttccctccaggatcgtgggaacaacatccctgggggtttccactttctgccatacatgaagtcatatcaccccctccgccttggaatattatgaaggagcatctcacaccggggtgtatacttacggtgatatttggagtaatgtcaacctctcgg

SEQ ID NO: 28702 - DNA, 782 bp, Homo sapiens
caacaacagcaagtctttcatgagttaaaggaaaaacttctggcagccccagccctggggctacccgatctgacacagccttttccattgtatgcatcagagagagaaaagatggcagctggacatttaacccaaactgtagggccctggctgaggccggtggcctacgtctctaaacaactagacagggtttctaaaggattgcccccctgtttgagggccttggcagcaactgccctgctagtacaagaagcaaataagctgactcttgggcaaaacctgaacataaaggccccccatgctgtggtgactgagagccagccccacacacccactccaccaccagctctcaggatctgtggtggactcacagcctgtttaccatattgtgagtaatatcatctccccctctggagattatgaactgtttcacagacggatgtacacccgtctgtactgggagtaatatcatcctcttcctccctgaatattaagaacagtatmacaggggtttttctactccctgcgatatcgtgtgttatatcctcctctcccacgttgcaattagaaacaatatcagtgagggcgtgtccaccttctgtcatattgaaagtaatatcatcttcttccctccaggatcgtgggaacaacatccctgggggtttccactttctgccatacatgaagtcatatcaccccctccgccttggaatattatgaaggagcatctcacaccggggtgtatacttacggtgatatttggagtaatgtcaacctctcgg

SEQ ID NO: 28703 - DNA, 782 bp, Homo sapiens
caacaacagcaagtctttcatgagttaaaggaaaaacttctggcagccccagccctggggctacccgatctgacacagccttttccattgtatgcatcagagagagaaaagatggcagctggacatttaacccaaactgtagggccctggctgaggccggtggcctacgtctctaaacaactagacagggtttctaaaggattgcccccctgtttgagggccttggcagcaactgccctgctagtacaagaagcaaataagctgactcttgggcaaaacctgaacataaaggccccccatgctgtggtgactgagagccagccccacacacccactccaccaccagctctcaggatctgtggtggactcacagcctgtttaccatattgtgagtaatatcatctccccctctggagattatgaactgtttcacagacggatgtacacccgtctgtactgggagtaatatcatcctcttcctccctgaatattaagaacagtataacaggggtktttctactccctgcgatatcgtgtgttatatcctcctctcccacgttgcaattagaaacaatatcagtgagggcgtgtccaccttctgtcatattgaaagtaatatcatcttcttccctccaggatcgtgggaacaacatccctgggggtttccactttctgccatacatgaagtcatatcaccccctccgccttggaatattatgaaggagcatctcacaccggggtgtatacttacggtgatatttggagtaatgtcaacctctcgg

SEQ ID NO: 28704 - DNA, 1120 bp, Homo sapiens
caggaagaagattagtttggggaagagaacaatgagacagtatggtggagtagttaaaaccttcaattgtaaaattaaattagacctgggtttacataccggttctattctttacaactacatgaactttcttggactcatttaactttgctaagccttgatttcctcacctgttaaatggtgctattaatagaacttactcatatattattataagaattcaatgagagaatcattgagaagaacaatgcttaacacctagtaagtccttaacacatgttagccaagttagcagcatccccgagcccaggaagtccaactgcaaagttgatattcctaaccattttaatacactacctccttggggcaattgcatgtagattaaatggttgaaatatagattcccctaagcggacttgtgcagtgtaaggataaaaaactaggcaaaggttagatcacaggagatcatatattgtaagctagggactttggcctttatgttgtttgtgaaatgagaaaatgctggaatgtttttgttttgtttttttgagacggagttttgctctagtcacctaggctagagtgcaatggtgctatttcagctcactgcaacctccgcctcctgggtttaagctattcaactgcctcagcctcccgagtagctgggattacaggcggacaccaccactyctggctaatttttgtatttttagtagagatggagtttcatcttgttggataggctggtctcaaactcctaatcttaaatgatccacctgcctcagcctcccaaagtgctgggattacaggcttgagccaccacgcccggccaaatgctggaattttaagcagggagatggcatgtcccaatttttatttcagaatgctgacatcaacagacagggatgacctaccagtgtaggaaggcaatggccagaaagacccaccagccttctttttcttgttttcctcctagtgtatagaacacttagttgacaaacttgatttgtctacttccgagtaaaagagaaggaaaagagtgatagaaacttgaggtgtttcaagtatgtcagcatggaatatcctttcactcggttggccacacagctgcagataatgt

SEQ ID NO: 28705 - DNA, 1099 bp, Homo sapiens
ggaattaaaaggagagtttgataagctataaagttttgattgaaatagatgtcttaatttgttcaaatgtaaaagataaaagttgacttatatgataaccactaatctgtatcatcatgtactgcaaagtggatttcaaacacatgggctacaattaggtatcttaaatctccatgaaggtaggagcaagctgttttcataccatgtctggataaaagaagtcatgtagtaaatattgaataaatctatgatgacgtacatgtgtatatctatacacctgtctctattttcaattaaattataaattccttgagagtgtagaattttcttttaatctttttatatctgctgctactcttagcatcgatctgggcatgtcataagttgcttaataaatttccagttttctttctcaatatatcctaaaatattagttgatatattacttttttcattattcaactgtacataattggtgaaatcagagatattctttgatagcatagtatatctttagtatatcagagatatactaaaaagtatagcatttttagaaataaaattattcttttttctctcattttctttctaaataaaaataaattatttggaaaatatctttcaaatwcaggaatatatattttagtatattttgccatagagtgagagagtaaaatttttatttttggaagatctccttctccccccaccccaccatgcaatggtaaaaccatttactgatgaagaaacttgctattcaaactgtgatctgcacattaatgttgtcagtattacctgcaagtttattatagatgcaaaatctcagatcccaccacaggcacattgagccagaacattcatttcattgcaatccccaggtgatccttttgcaaatttaagactgagaagcactaatgtatgctagtttccaatttctttttcccttgcttttttgtgcattagaaatatgtttttgaaatgtggatatccttctagagtgttttctgcctaaggcatactcctaagaattttttttcaatattaaaacatgtgtttaagactgagctaccacaacacccagaaaattaactttttgtga

SEQ ID NO: 28706 - DNA, 1099 bp, Homo sapiens
ggaattaaaaggagagtttgataagctataaagttttgattgaaatagatgtcttaatttgttcaaatgtaaaagataaaagttgacttatatgataaccactaatctgtatcatcatgtactgcaaagtggatttcaaacacatgggctacaattaggtatcttaaatctccatgaaggtaggagcaagctgttttcataccatgtctggataaaagaagtcatgtagtaaatattgaataaatctatgatgacgtacatgtgtatatctatacacctgtctctattttcaattaaattataaattccttgagagtgtagaattttcttttaatctttttatatctgctgctactcttagcatcgatctgggcatgtcataagttgcttaataaatttccagttttctttctcaatatatcctaaaatattagttgatatattacttttttcattattcaactgtacataattggtgaaatcagagatattctttgatagcatagtatatctttagtatatcagagatatactaaaaagtatagcatttttagaaataaaattattcttttttctctcattttctttctaaataaaaataaattatttggaaaatatctttcaaatacaggaatatatattttagtatattttgccatagagtgagagagtaaaatttttatttttggaagatctccttctccccccaccccaccatgcaatggtaaaaccatttactgatgaagaaacttgctattcaaactgtgatctgcacattaatgttgtcagtattacctgcaagtttattatagatgcaaaatctcagatcccaccrcaggcacattgagccagaacattcatttcattgcaatccccaggtgatccttttgcaaatttaagactgagaagcactaatgtatgctagtttccaatttctttttcccttgcttttttgtgcattagaaatatgtttttgaaatgtggatatccttctagagtgttttctgcctaaggcatactcctaagaattttttttcaatattaaaacatgtgtttaagactgagctaccacaacacccagaaaattaactttttgtga

SEQ ID NO: 28707 - DNA, 1099 bp, Homo sapiens
ggaattaaaaggagagtttgataagctataaagttttgattgaaatagatgtcttaatttgttcaaatgtaaaagataaaagttgacttatatgataaccactaatctgtatcatcatgtactgcaaagtggatttcaaacacatgggctacaattaggtatcttaaatctccatgaaggtaggagcaagctgttttcataccatgtctggataaaagaagtcatgtagtaaatattgaataaatctatgatgacgtacatgtgtatatctatacacctgtctctattttcaattaaattataaattccttgagagtgtagaattttcttttaatctttttatatctgctgctactcttagcatcgatctgggcatgtcataagttgcttaataaatttccagttttctttctcaatatatcctaaaatattagttgatatattacttttttcattattcaactgtacataattggtgaaatcagagatattctttgatagcatagtatatctttagtatatcagagatatactaaaaagtatagcatttttagaaataaaattattcttttttctctcattttctttctaaataaaaataaattatttggaaaatatctttcaaatacaggaatatatattttagtatattttgccatagagtgagagagtaaaatttttatttttggaagatctccttctccccccaccccaccatgcaatggtaaaaccatttactgatgaagaaacttgctattcaaactgtgatctgcacattaatgttgtcagtattacctgcaagtttattatagatgcaaaatctcagatcccaccacaggcacattgagccagaacattcatttcattgcaatccccaggtgatccttttgcaaatttaagactgagaagcactaatgtatgctagtttccaatttctttttcccttgcttttttgtgcrttagaaatatgtttttgaaatgtggatatccttctagagtgttttctgcctaaggcatactcctaagaattttttttcaatattaaaacatgtgtttaagactgagctaccacaacacccagaaaattaactttttgtga

SEQ ID NO: 28708 - DNA, 562 bp, Homo sapiens
tttagtagagacaaggtttcacagtgttagccaggatggtctcaatctcgtgacctcacgatccacccgcctcggcctcccaaagtgccgagattacagcgtgagccaccgctcccggcagaaagtagatatttttatctagtggtatcctttgattcctttctttttatcttttgtgtatccactactgattttatgtgtgtgtgtatgcttatcaacaggctaaataaaacatcttattgatagactactttaaacttaactttgcatacaaaacctctatatttcaactttctctactttcatattttatgtaatttatatcgctatttacatattttaaatatcatgaatctattactaaatatttgtagatatagttatttttaatccttttgtcttttaacttttatgatagaattgaaagtaatttatgctccatcattgcaatattagaktattctgcttcaaatattttattaggctctattggaatatgtcaaattatcaatttcaacatctttatctgccataagcattttaagtaccatgggattgtctg

SEQ ID NO: 28709 - DNA, 545 bp, Homo sapiens
tagccagttctacccactgacactaatggttagaaggaaactgagaggggtagatcacaaaaatataatgtccttatgatctgtaccaattagtgtggtatcagagcaacattatcagactcttgctaaaattgctctcctrcacctcattatcacccagaagagttatgtacagcagagggatttgggggtggggtgggtcaaaggcaatcagtttcaaggatttgtgcaaaattaacatattttgagcaaaattagaatatatatatgctattttcacttaatgtttagattcaccatggaactaaatatatttggagacactattaagttatgattttttattctaggtatttggattattcatagtaaggtatagtgtattattttgaagtaagatgtgcaactcatattcattatgtgtcatacaatgactaaaaagcattataagtaaggcacttcaagagatgaaaagctgtagttgagaagcgctatgcatatttcacaaaccaagtgaaataagcatgagctttgaattcataaat

SEQ ID NO: 28710 - DNA, 458 bp, Homo sapiens
cacacctttcttctctccctagtcctgccagcgactcccccacaacttgtcagcccccgggtcctagaggtggacacgcaggggaccgtggtctgttccctggacgggctgttcccagtctcggaggcccaggtccacctggcactgggggaccagaggttgaaccccacagtcacctatggcaacgactccttgcggctaaggcctcagtcagtgtgaccgcagaggaygagggcacccagcggctgacgtgtgcagtaatactggggaaccagagccaggagacactgcagacagtgaccatctacagtaagaaggggcaggggcggagtggggcttcttgggggtgtgacctgaacccggggcggggctcactgtgtgcctattccaggctttccggcgcccaacgtgattctgacgaagccagaggtctcagaagggaccgaggtgacagtgaa

SEQ ID NO: 28711 - DNA, 593 bp, Homo sapiens
cgaagggatagcaaattctattgtgtccattcttccatcttcagcatctctctctggaatataaaagttctcaataaatatttgctgaaaaaatatttgctctgttgcccaggctggagtgcagtggcgccatctcaactcactgcaacctctgcctcccaggttcaagtgtttctcctgcctcagcctcctgagtagctgggattataggggcacaccaccatgcccggctgctttttgtatttttagtagagacggggtttcaccrtgttgttcaggctgatattgaactcctgacctcaggtgttccacctgcctcggcctcccaaagtgctgggattagaggcatgagccaccgcgcccagcccctctttcttttctctactgaaaaagtcttggttttcctggctacttgagtgaactaatcaatttcattccattcaaacagttgaacattatatttaacatcctcctaaacacaaataactgatagaaggacacatatgttgcctattttaactgcaataaagtatataagtgccagaaggagtcactgaacagaacctgatgtaagaattaggtttattacagtt

SEQ ID NO: 28712 - DNA, 593 bp, Homo sapiens
cgaagggatagcaaattctattgtgtccattcttccatcttcagcatctctctctggaatataaaagttctcaataaatatttgctgaaaaaatatttgctctgttgcccaggctggagtgcagtggcgccatctcaactcactgcaacctctgcctcccaggttcaagtgtttctcctgcctcagcctcctgagtagctgggattataggggcacaccaccatgcccggctgctttttgtatttttagtagagacggggtttcaccatgttgttcaggctgatattgaactcctgacctcaggtgttccacctgcctcggcctcccaaagtgctgggattagaggcatgagccaccgcgcccagcccctctttcttttctctactgaaaaagtcttggttttcctggctacttgagtgaactaatcaatttcattccattcaaacagttgaacattatatttaacatcctcctaaacacaaataactgatagaaggacacatatgttgcctattttaactgcaataaagtatataagtgccagaaggagtcactgaacagarcctgatgtaagaattaggtttattacagtt

SEQ ID NO: 28713 - DNA, 759 bp, Homo sapiens
tggggaagactagcarcagttctgaagagatacaaagccctgatttccatcaggggctgtaatggggaagacactggacccctccctaggacctgctttccctggcacctcccacttcccctgagtggaaaagcaggcccagggctggctcctagggcccacagcccagagcctgctgcatgggattttaaattgtctctctcaaagtcgttgccaataccaatattaacaacggctcactcttaatgaactgcttactcttctctggccatgagtcatggagggcattttacagacatttgctcatttcttttcaaccctcacaacaaggccttgagaaaagtataatattatgctcattttacagatgaggaaactgaggcccagagagttatgatagattattgcagtaatggcccccaatttgttcatgcactaccctgggcagtgcccttccaccctggctcaggacttgaccatgggacttactttggccaataagaaagaagcaagcatattccaggcacagtggctcacacctgtaatcccagcactttgggaggccgaggcaaatggatcgcttgagctcaggagtttgaggccagcctgggaaacatagcaaaaccccatctctgccaaaaatacaaaaattatccaggcatggtggtgcacgcctgtggtcccagctgcccaggaggctgaggtggaagagctgctggagcctgggaagtcaaggctgcagtgaaccatgatcatgcc

SEQ ID NO: 28714 - DNA, 738 bp, Homo sapiens
ttctctccacctgggatttaatgaaacctacaaggctctgcaatggcagacctatctgctggactgagaagtcctcaaaggcaggctggtgtcttcctctatccctgtatgtggtaaacgcttggcacagagaggctgcttagtaagtgtcaaatgggatcactgaatgcaaaagaacaaggcaatcagtgtctgtgcactgtgtcctgggacctcatccaccctttcctgcagcttcttcctatgcctctccctctgcctctgaccttcccattttctgatttttctaaccattctctctaggttccaaactcagtgtagcaggaggctttaactgagtaatctgtgttcattggtagagaaagtctcattgaaatccatcctctgtgaccttgaaaagtcaccttggccatcctcctgccctggggaagggatgttctttcaggtctaaactgtcatgacttctcctgctttcatggtctcagagctgttgaatgaatgaatgaatgaatttgattccctcacttggtcrccagctgggagtcactgcattgctccctcccgtcatggctattattgaaaaagaatatattgaaaatatatgaaaaagggacaatcagctccctgttagaaaccactaatggagaataatggagactcaggggtctgaaagcaacagctaatagaagatgggagcaattatcaggtgcaatgtcatcagaaacccatgtacgcatg

SEQ ID NO: 28715 - DNA, 738 bp, Homo sapiens
ttctctccacctgggatttaatgaaacctacaaggctctgcaatggcagacctatctgctggactgagaagtcctcaaaggcaggctggtgtcttcctctatccctgtatgtggtaaacgcttggcacagagaggctgcttagtaagtgtcaaatgggatcactgaatgcaaaagaacaaggcaatcagtgtctgtgcactgtgtcctgggacctcatccaccctttcctgcagcttcttcctatgcctctccctctgcctctgaccttcccattttctgatttttctaaccattctctctaggttccaaactcagtgtagcaggaggctttaactgagtaatctgtgttcattggtagagaaagtctcattgaaatccatcctctgtgaccttgaaaagtcaccttggccatcctcctgccctggggaagggatgttctttcaggtctaaactgtcatgacttctcctgctttcatggtctcagagctgttgaatgaatgaatgaatgaatttgattccctcacttggtcaccagctgggagtcactgcattgctccctccygtcatggctattattgaaaaagaatatattgaaaatatatgaaaaagggacaatcagctccctgttagaaaccactaatggagaataatggagactcaggggtctgaaagcaacagctaatagaagatgggagcaattatcaggtgcaatgtcatcagaaacccatgtacgcatg

SEQ ID NO: 28716 - DNA, 545 bp, Homo sapiens
tagattttttttctgtatgaactctctgatgtttcctagatgtacattttagacaaaattttttcatgtttattacatttgtaggggttctctcctatacaaattctctgctaagatgtgagaaaacattaatggttttactaccaactattcattttaccaacatttgtaaagtgtttctccagtgcaaatactgtagtgttctctaaggtatatggacaaagttctttccaaattccttacatgtataaggtttctatccagtattaattctctgatgttgggtaagttgtgaacaccagttaaaggttctgcctcattttttacacttgcagcatgtctctctagcataaatcttgtgtgtgtgtgtggtaaggtttgagcccacattaaaaatttgccacattctttacatttttagggtttctctccagtattaattttctgatgttgagtaagacacaagcatcagttaaatgctttgtcacacttattacrtttgtagaatttctcttcatgtatggattctctggtgttatgtaaag

SEQ ID NO: 28717 - DNA, 611 bp, Homo sapiens
atatatgacagtcacaattccaactgtgaactgtttctgtgagtgacayccaggacctcatgcgtatactctgttctgatttaatagttacaatccaaactgtggcctgtgtacacatgagtcacaatctcaattttgacatgggccctgttttgacactttttgtaccacctgagggcattatacaatatgcatgagtgttgctattctctgagacctctgtaaaagtaggaaatccaggaccttatcttttgccctaagcctagatacaagagtcaagatctcttctattaactggaaccaggtatgagagtcattgacatgcctatgagctgggtccagaaacaagtcacctgacctgtggccagatccacatatgacagtcccaaattcaactgtggactgttgaaccctcaccagtgggctttgtccaggtgtgagagtgacaatcctaatttttggatagtgtgcctcatatgagaggcacaattttacctctgtaatgagctctgatatgatgcaagtattttatagaatatttatgaatgtcaaaatcctctgtaattgtgatacaattaggagacctagaagcttactgattgttctaagct

SEQ ID NO: 28718 - DNA, 611 bp, Homo sapiens
atatatgacagtcacaattccaactgtgaactgtttctgtgagtgacacccaggacctcatgmgtatactctgttctgatttaatagttacaatccaaactgtggcctgtgtacacatgagtcacaatctcaattttgacatgggccctgttttgacactttttgtaccacctgagggcattatacaatatgcatgagtgttgctattctctgagacctctgtaaaagtaggaaatccaggaccttatcttttgccctaagcctagatacaagagtcaagatctcttctattaactggaaccaggtatgagagtcattgacatgcctatgagctgggtccagaaacaagtcacctgacctgtggccagatccacatatgacagtcccaaattcaactgtggactgttgaaccctcaccagtgggctttgtccaggtgtgagagtgacaatcctaatttttggatagtgtgcctcatatgagaggcacaattttacctctgtaatgagctctgatatgatgcaagtattttatagaatatttatgaatgtcaaaatcctctgtaattgtgatacaattaggagacctagaagcttactgattgttctaagct

SEQ ID NO: 28719 - DNA, 1931 bp, Homo sapiens
  misc_feature (1)...(1931): n = A,T,C or G
tactgaggcttttggcttaggcatatgtcaccacacacactgtgggctttattcaggcagtatagtcaaatcagtcaaattctggctgggcaaagttatatgtcacaatcacatataactttgttgaggaatggaatttacatttctgcacatgttctgggtccaggtataaaagtacacacctcttgaaatttaaccatgtgtccaagaatgcaaatcaccattttctttcttccctttctttctctntctttctctttctttctttctttctttctttctttctttctttctttctttctttcttttctttctttctttctttttattcctttctctttctctctctttctttctctctctctctttctttctttagtttgacagagttgcactcttgtcacccaggctggagtgcagtggtgtgatcttagcccactgcaacctctgcctccagggttcatgtgattctccttcctcaggctcccaagcagctgggattacaagtgygtgccaccacacccagataatttttgtatttttagtagagaccaggtttcaccatgttggccaggctggcctcaaactcctgacctcaggtgatccacctgccttggcctccccaagtactgggattacaggcgtgagccaccacaccgagctgcaagtcacaatttcaacagcaaattgaacccatgcatgagagccaaacctcagacagcacctattaggagagttaaagcctaatattggtgctgaatcttggtcagagactcaggctggatccacatattagagtaacaataccaacttctgactgcttttgggtgtgagaatcagaacctcaacagtgggctgtgtctatgtgggagtgtgacaatctttactgttggcagtgtatgcatatgagagtcaaaatctcaacagtgtactgggccttgttatattattactctttgcaccatctgcggcggtatataatatgtgtaagacttgcaatgcactccaaaacatttgtgcttatatgaacccatgatcttactcatttctccaagtctagggatgagattcaccatctcttctattgactggtttagatataagagtcattaccatgcctgtgagctaggtccagcaataagtcaccattttacctgtggccagatccacatatgacagtcaaaattccaactgtaaactgtgtctactagtgacattcaggaccttaactgcgggctctatgtgtgagattgacaattttaactgttggctatgtgctgggctccggaatgacatgctctgtaccaccaaagggcattatagaatatgcataagcttgctcatactttgccatcttaccggaagcaggaggctgaagacattatacattgtcataaatccagctaaaagagtcaaaatctcttctattggttgtgtccatgtatgatagtcatcagcatgcctatgaactggacccaattatatgtcacaataccactgcaagcagggactaggaaggaaagccacatcacctgaatactgagcctgagtaggtcaatgtcccttctgttggaagagtcctggcaggaaagtcgtatcacctagctgctgagcccactcaatgtcacaatgccctctgtgggaaggccaaggcaggagagtcaaatgacctgggtgcgggtccagcagtatgtcacaaattaccctgtgacagagcccaggaaaaaaaggagagtcacatgacctaggtgatgtgcacaaagatatatcacaatgttctctgagaaaagtgtccagaaagaagagttacattacccagatgcttgacccaggtttatgtcactattccaactataggaattgctaagacagaagagccacgtcaccgggatgcttggcccactgatttgtcacaatcctttctgtaggca

SEQ ID NO: 28720 - DNA, 537 bp, Homo sapiens
actcctgacctcaggtgatccacgtgcctcagcctcccaaagtgctgggattgcaggtatgagcaactgcgtccggcaaaatttttttttaaatgtgatgtgtcccagtgtgtacgtggaatgtgacagatgctgattgttcytatgatcacagctcttgaagcccctggtatcatctatcattggtcctcaggttcccttactgactcctattctatgtttatcttttttcaaaaaaatatttcttttagagacagggtttccttctgtaactctgtctggagtttagtggtgcaatcatagcccagtgcagccctgacctcctagactcaagtgatcctccccttcttagcctcctaggtagctaggactacagatgtgaacaccaccacccctgggtaattaaaaaaaatgtttagaggtggggtctcactattgcccaggctggtctcgaactactgacctcaagtggttctcctgcctcagcctcctgagtagctgggactctaggtgtgtaccaccacacctggctaatta

SEQ ID NO: 28721 - DNA, 537 bp, Homo sapiens
actcctgacctcaggtgatccacgtgcctcagcctcccaaagtgctgggattgcaggtatgagcaactgcgtccggcaaaatttttttttaaatgtgatgtgtcccagtgtgtacgtggaatgtgacagatgctgattgttcctatgatcacagctcttgaagmccctggtatcatctatcattggtcctcaggttcccttactgactcctattctatgtttatcttttttcaaaaaaatatttcttttagagacagggtttccttctgtaactctgtctggagtttagtggtgcaatcatagcccagtgcagccctgacctcctagactcaagtgatcctccccttcttagcctcctaggtagctaggactacagatgtgaacaccaccacccctgggtaattaaaaaaaatgtttagaggtggggtctcactattgcccaggctggtctcgaactactgacctcaagtggttctcctgcctcagcctcctgagtagctgggactctaggtgtgtaccaccacacctggctaatta

SEQ ID NO: 28722 - DNA, 1955 bp, Homo sapiens
cttgaatccaggaggcggaggttgcagtgagccaagatcaagtcactgcactccagcctgggtgacacagcgagactccatctcaaaaaaaaaaaaaaaaaaaaaaaagaaatatttctattttctcctggaaaaaataaagtcaagctgtgaattctaagaaacattgcatgaaagttttaaataactgaagttttattaataatattctgcataatggttctaattaagtctccttgtagcctaaaatgagtttaatgtggtttctaagaaatgataatattaacaccatgggttgtaatatgtcattttatgtaatattaaaatagaaaaagtttccagaaaaaactatgctgtgccattggctataagaagtatcttgattttggagagataataatattaaaaacatgtctttatcacaaaaatatgtgataagttactgaagtaatagatactaataaccacagcagcaatgtggttatactttgttagattaggtagaataaatgccttatatgcatgacctcatttatatatcagattgatgctgttattattcctgttttagagaaacatactaattttcccaagatcgaatgtctaacaagtggtagatccaggagatgaacccatctctaccgactctattgaatgacttcttagcaactgcattaagatctaggtgttgtgtagtttcttcagaagcaggcacttctaactggagaaattattgggcttggattctaagtttactagcatttatacatcttaaacattggttaattacactgaagtctcaagaggatcctattccactcatttttcttatttccatggattataatgtttctgttactaaattggcttgttttctttcattcttgtaaacaatatgccagggagatgcagtattaactgtgggatgaagttcaagtgttgtagggattgcccatacaaagtatatttctgtggttgttaagcaatgtgtaaaagatttacatcagggcttctgtacagatgaagatgaataaaaatcccacaatttcacattcttggagaaatgaaatataattggtgtgctatattaaaatagctaacaattagatctttcggtttttgatcaaggacatggctttgtttacaaatcaaagactgcaggattttttccccagagggaggagaagacaaatttrtgttgtcaattctatctgggtgctgattatttagttttctgcttctccctttcctggggtgaagccccatagcacatttgagatctttagtaccctgacaatgcacaacttgaaaaaggaaagatgcatccaaagtcacataatttcagctcgttagcatgtctcgaagagtttagatgaatggaaatgaaaagcatgtgagcatgagcagactacacaggtcttctacatgagtccctaaggttggtcatcagcaagccaagatggtagaatttgtcatttattcgctaggtgacctttgatcacatatgaatgtagcaacctcacaaagtttgtgtgaggatcaaaaatacatttgcattttataaactggaaagtgtcttatacatttcagagcaccttatagagaagaattttcattcccactaaccattatcaacctatgatttgtctgtccagcttatttccagtgtcaacgtcacctagaatgaatcagggtactttagggtaatgtttttcaaatgattatgatacaagatcattttaaaaaatcatgcattgttgacagataatttgataaatacagaaaaattactgtagaaaatgttagagaaaaacaaagatatgcaaaatacgaattctcattgtcattaaattcaatggacataaaattagtgggtcgaattgctataagagattctaaagccttcatccacatgactgaacttatttcattttatattggttatcaatatttca

SEQ ID NO: 28723 - DNA, 521 bp, Homo sapiens
ctcaaaaaaaaaaagaaagaaagaaagaaagaaaatrtacctaatataaggtcaatcatttgccttctcttgttatttctgttcaaaatgttttatttttcttacccttaagccatactttcaaaccataaagctatgggagggcagcaaagcctaagattaataataatatttagtgaagactaattatgtggtaggtactgtcctaggcacttgacatggattattacacttaatccttgaaacagccttatgagaaaggtgcttcataagtaggcactatgaagtcaatatgattgctattgtacaaatgaaggaactgaggcatgaagatgttaggcaacttgccccggggtcacacacacctagttaagtagagagggatacagcagaagtttggagagaaagttcttaattataccaataggttattatctttctcacttcagcagtggtcatgtctaattcagtccaaataataagtaacttattgcctggtgtgacattaatttatttgttga

SEQ ID NO: 28724 - DNA, 2005 bp, Homo sapiens
tgccataggcgacactcctctaatttttctgaagttaatgaaaaagcactctgttttataaaggatactcctttggaaatattagagataagaagttaggaaaattcttattttgatttttattactttataggtttagggcagaggtgctcattcttttggctcccctgggtcacattggaagaggaattgtcttgggccacacataaaatacactagcactaatgacagctgatgagctaaaaaatatctcctaatgttttaagaaagtttatgaatttgtgttgggccacattcaaagctgtcctgagccgcatgcaccctgtgggccgttggttggacaagcttggtttagggagttaaaagccatttaaatatactgcctctctgtcattctaggcatacattttagggatgtattttctgctctggagcttctattctgaagcattcaccttagtaatgcattccttcacaacaaatattggaaaagacagaatgagagagttgaattaggccaataacataaagaaaatattgagttgatggcaggtgaaaatattctgtattattttattagaaaatatagctattgtattaagaaaggagatagattttatgtagaaagctcattaagacttttagtgttttactacgtatttatagttccttaatagaattatgcattgggtgttcaactgttttgaattaagtgatcatttataatgttattaatgataattttactttctgcattatagctttaagttattttaagaactcattctcctcctttattgcttatagtccataacttaaaacttttaactttatcctattacagttcacccttttcactgccatcgctccaacacaggtctccatcattttatatccagattgctgaaatagctttctagctactttctctgaagaaattgtgataaataacagtctttggaattggtactctcctgtatgagttgtctgttgaccactactaggagktggctcccagtcaggaggcatggcggtcagggacccacttgaggaggcagtctgtcccttagcagagctcgagcactgtgctgggagatctgctgctttcttcagagccagcaggcagggatgtttaagtctgctgaagctgaggtcacagcaaccccttcccccagatgctctgtcccagggagatgggagttttacctataagcccctgactggagctgctgcctttctttcagaaatgccctccccacagagtaggaatctagagaggcagtctggctacagtggctttgctgagctgggatatctgagtttgaatttttttattgtatcatgctagttttgtgactgtggacaagttacttaaaagcttatgtctccattactcatacattcagaagactaaataaaaaaaaataaagcatgtagaacaggacctgaacttgccagcactcaataaatgatgaatattgtcattaaaagtatttattcctgttattttactggttggaaactttcaatgtttcctttttgctttggagtctgctttaacttatttttttactttagccccttgaaatggttctttcctagttttctatctgacaaatatttattgtgcacctattatgtgccaggaatgaatttgttttcctgatctccatatgcacaaccagctccaaactctggacaggcctgcattcccacaggacctagtaactgtgccatcaaaagttttgctttatgtctgctataaaaacccattctcctccagtgtaccctttgctttatctatcccctgataattttacctgaatatctaatgtgccctgtataccatgcaaaatgctgacattaagtacatctcagttttgctttcaagttgcttacagtctaatgagaaaagtatacaacaaaataggcattcaaaagttcaagttgtaagttctattataacaacaaaatacgcattcaaaagtccaaattgtaagttcta

SEQ ID NO: 28725 - DNA, 1163 bp, Homo sapiens
ggatgattgctaaatccagttgaaaggcttccatccctaaattgacttgtgtcttgcatcttgtcgcaacactaagctaatattaaatctttcattcagcacacattgaattgctactgattgtcacattgtgtctcagattagctttattgcattatatattcagccacgtacagctcgctgaaaccagcatccagagtcacctctcagctctctgcaggctttagaatgtttttgggattgtgaatttcttatagaatgggacaaaattttcattgaacaactggcaactttcattggacaactgacacttcacaactaaggaaaagaacctcaaaagcactgtctgccaggaatataaatcaccactgatcaatttcaatgacttccagtgcatgaatcattttagtaataaaactgtttgggaaaagactgaaggattgtgtctcttaatcttacacacccagaatctgctattaaatatgtccagggcaacactgggttatggattcacttgaagaaccgtttaattcctcaaaacgatcaggactcaagttgaatttataaacggaattaaacagaagatttgttgctcactagagtaagtcagtagagctgagatatatgggtgatttttctcccattaacgtatctctcaatactcaaaaagtaataacttctgaagaattgcacttatccaggacaaaccggatagagtaactacaattcttcttccttcaatattccacatgcttctccttccccaatgaaagcaatcttctttttctaatagagtttgcttccatttctgtctacccctccctcaaaaaagaaaattacaagattagctaaaaattagattgcagtatatttcacaagttagtacttaactgaccrcgtattgattcatgacggttaatattgactcctaagtacactacgagacccttagcagtagaaacaccatccggagttttccctgtgttctcccacatatccagaacagtgtttctcaatcagggcaactttgccctcgggggacatttggcaatgtccagacacattttgatggtcacgactgggtgatggtagatgttactggaatcaagtgggaagaggtcaggatgctgttaaatgtcttacaatgcttggacagcccccac

SEQ ID NO: 28726 - DNA, 1163 bp, Homo sapiens
ggatgattgctaaatccagttgaaaggcttccatccctaaattgacttgtgtcttgcatcttgtcgcaacactaagctaatattaaatctttcattcagcacacattgaattgctactgattgtcacattgtgtctcagattagctttattgcattatatattcagccacgtacagctcgctgaaaccagcatccagagtcacctctcagctctctgcaggctttagaatgtttttgggattgtgaatttcttatagaatgggacaaaattttcattgaacaactggcaactttcattggacaactgacacttcacaactaaggaaaagaacctcaaaagcactgtctgccaggaatataaatcaccactgatcaatttcaatgacttccagtgcatgaatcattttagtaataaaactgtttgggaaaagactgaaggattgtgtctcttaatcttacacacccagaatctgctattaaatatgtccagggcaacactgggttatggattcacttgaagaaccgtttaattcctcaaaacgatcaggactcaagttgaatttataaacggaattaaacagaagatttgttgctcactagagtaagtcagtagagctgagatatatgggtgatttttctcccattaacgtatctctcaatactcaaaaagtaataacttctgaagaattgcacttatccaggacaaaccggatagagtaactacaattcttcttccttcaatattccacatgcttctccttccccaatgaaagcaatcttctttttctaatagagtttgcttccatttctgtctacccctccctcaaaaaagaaaattacaagattagctaaaaattagattgcagtatatttcacaagttagtacttaactgaccacgtattgattcatgacggttaatattgactcctaagtacactacgagacccttagcagtagaaacaccatccggagttttccctgtgttctcccacatatccagaacagtgtttctcaatcagggcaactttgccctcgggggacatttggcaatgtccagacacattttgatggtcacgactgggtsatggtagatgttactggaatcaagtgggaagaggtcaggatgctgttaaatgtcttacaatgcttggacagcccccac

SEQ ID NO: 28727 - DNA, 943 bp, Homo sapiens
agtttcattcttctgcatgcggattgccagtcttttcagcaccatttattaaataggtttatgtttttgtatgcttcatcaaagatcagttggatgttaagtatttggctttatttcttttttgtggcggggggkggttaaatttttattttaaatgcttggatagcttcaatatccaggttgtggcaaaatcaggacacatgtaaaataccttacattagattccccaaaggtaccaaaaagtacagtaaaattaacacttccattacaggaaatgtatgacataaataatataaaatgaaaagctgacactggtttcctgagatacaatttactctttacaaccagggtccacaggaccaggctgcagagtgcggcagcaggaagcagagactgccattttgttctgggggacctggtactaaaagtcagcccataatgcccctctggcctctcagacaccacacgctgcctaaataactagagttctggaaatagtaaacaagagagtgatttccatgggggaaattttaagtaagatgcacatggggcaagccatagaaagtttgtcaggttaaatttggtacataattgtgttcactccatatccaaacacaacatgtgtgcggtcggttggtctctcctgctgctgcttcagtatggcttgtaggtattctgatggccaccatgtcactggctcttgctgtagtttgtactgccctgacctccacctccaccaccacctccgctgcctcggttccctcggttgtggtttccacggtccccagaaccataccgctgctgccaataaacttctttgggctaggccaccgtgatctcacgcttacttccactgatagtatggaactttttctccagaactttcttcacaggttcttttttaaaggtgataaacacaaaaccttgtcttttgttcaacttt

SEQ ID NO: 28728 - DNA, 943 bp, Homo sapiens
agtttcattcttctgcatgcggattgccagtcttttcagcaccatttattaaataggtttatgtttttgtatgcttcatcaaagatcagttggatgttaagtatttggctttatttcttttttgtggcgggggggggttaaatttttattttaaatgcttggatagcttcaatatccaggttgtggcaaaatcaggacacatgtaaaataccttacattagattccccaaaggtaccaaaaagtacagtaaaattaacacttccattacaggaaatgtatgacataaataatataaaatgaaaagctgacactggtttcctgagatacaatttactctttacaaccagggtccacaggaccaggctgcagagtgcggcagcaggaagcagagactgccattttgttctgggggacctggtactaaaagtcagcccataatgcccctctggcctctcagacaccacacgctgcctaaataactagagttctggaaatagtaaacaagagagtgatttccatgggggaaattttaagtaagatgcacatggggcaagccatagaaagtttgtcaggttaaatttggtacataattgtgttcactccatatccaaacacaacatgtgtgcggtcggttggtctctcctgctgctgcttcagtatggcttgtaggtattctgatggccaccatgtcactggctcttgctgtagtttgtactgccctgacctccacctscaccaccacctccgctgcctcggttccctcggttgtggtttccacggtccccagaaccataccgctgctgccaataaacttctttgggctaggccaccgtgatctcacgcttacttccactgatagtatggaactttttctccagaactttcttcacaggttcttttttaaaggtgataaacacaaaaccttgtcttttgttcaacttt

SEQ ID NO: 28729 - DNA, 1139 bp, Homo sapiens
gctcagaggtggggctgggcagaagccctgtttgaaaggtctaacggccatactggaatgtgggaattaacttttttttttttttttgagatggagttatgctctaattgcccaggctggagtacaatggcaggatctcggctcaccgcaacctctgcctcctgggttsaagcgattctcctgcctcagcctcccgagtagctggggattagaggcatgagccactacgcctggctaattttgtatttttagtagagacggggtttctccatgttggtcaggctggtctcgaactcccaacctcaggtgatccacctgccttggcctcccaaggtgctgggtttacaggcttgagccaccatgcctggccagggattgactttttttttaaattttaaattattattattgttttttgagacagggtctggctctctgttgcccaggctggagtgcagtggcaccatcttggctcactgcaacctctaccacccaggctcaagccatcctccctcctcagcctcccatgtagctgggattacaggcatgcgccaccatgcccagataatttttgtgtttttttttatagaaacagggcttcaccacattgcccaggctggtcttgaacttctgagttcaaatgatctgcctgccttggcctcctaaggtgctgggattacagatgtgagctaccacacccagctgcaattcacttttgaccaagagaaaaaacttaagaggaatccagttgtccataaagtgacaaggaatatttgctgcatatttgaggatcttttgatcaacttaatacagaacctggcatctttacgtctccttagggccagatgatcatagccactcccagcctcagatacttttaatatgttgatgagcttctgagctcagacatctctaacttaactatgtccaaaatggagcttttgatctttcattctgattttgacactgctccagtctttcctatctagggatgggcacctcagcataccggacacttggagtcattaaaacaattttttaaaatttttaaattctttttctttaaacaatttttttttttttttaaagatagggtcttgctgtctttcccaggctggtctcaaactcctgggcacaag

SEQ ID NO: 28730 - DNA, 1139 bp, Homo sapiens
gctcagaggtggggctgggcagaagccctgtttgaaaggtctaacggccatactggaatgtgggaattaacttttttttttttttttgagatggagttatgctctaattgcccaggctggagtacaatggcaggatctcggctcaccgcaacctctgcctcctgggttgaagcgattctcctgcctcagcctcccgagtagctggggattagaggcatgmgccactacgcctggctaattttgtatttttagtagagacggggtttctccatgttggtcaggctggtctcgaactcccaacctcaggtgatccacctgccttggcctcccaaggtgctgggtttacaggcttgagccaccatgcctggccagggattgactttttttttaaattttaaattattattattgttttttgagacagggtctggctctctgttgcccaggctggagtgcagtggcaccatcttggctcactgcaacctctaccacccaggctcaagccatcctccctcctcagcctcccatgtagctgggattacaggcatgcgccaccatgcccagataatttttgtgtttttttttatagaaacagggcttcaccacattgcccaggctggtcttgaacttctgagttcaaatgatctgcctgccttggcctcctaaggtgctgggattacagatgtgagctaccacacccagctgcaattcacttttgaccaagagaaaaaacttaagaggaatccagttgtccataaagtgacaaggaatatttgctgcatatttgaggatcttttgatcaacttaatacagaacctggcatctttacgtctccttagggccagatgatcatagccactcccagcctcagatacttttaatatgttgatgagcttctgagctcagacatctctaacttaactatgtccaaaatggagcttttgatctttcattctgattttgacactgctccagtctttcctatctagggatgggcacctcagcataccggacacttggagtcattaaaacaattttttaaaatttttaaattctttttctttaaacaatttttttttttttttaaagatagggtcttgctgtctttcccaggctggtctcaaactcctgggcacaag

SEQ ID NO: 28731 - DNA, 1139 bp, Homo sapiens
gctcagaggtggggctgggcagaagccctgtttgaaaggtctaacggccatactggaatgtgggaattaacttttttttttttttttgagatggagttatgctctaattgcccaggctggagtacaatggcaggatctcggctcaccgcaacctctgcctcctgggttgaagcgattctcctgcctcagcctcccgagtagctggggattagaggcatgagccactrcgcctggctaattttgtatttttagtagagacggggtttctccatgttggtcaggctggtctcgaactcccaacctcaggtgatccacctgccttggcctcccaaggtgctgggtttacaggcttgagccaccatgcctggccagggattgactttttttttaaattttaaattattattattgttttttgagacagggtctggctctctgttgcccaggctggagtgcagtggcaccatcttggctcactgcaacctctaccacccaggctcaagccatcctccctcctcagcctcccatgtagctgggattacaggcatgcgccaccatgcccagataatttttgtgtttttttttatagaaacagggcttcaccacattgcccaggctggtcttgaacttctgagttcaaatgatctgcctgccttggcctcctaaggtgctgggattacagatgtgagctaccacacccagctgcaattcacttttgaccaagagaaaaaacttaagaggaatccagttgtccataaagtgacaaggaatatttgctgcatatttgaggatcttttgatcaacttaatacagaacctggcatctttacgtctccttagggccagatgatcatagccactcccagcctcagatacttttaatatgttgatgagcttctgagctcagacatctctaacttaactatgtccaaaatggagcttttgatctttcattctgattttgacactgctccagtctttcctatctagggatgggcacctcagcataccggacacttggagtcattaaaacaattttttaaaatttttaaattctttttctttaaacaatttttttttttttttaaagatagggtcttgctgtctttcccaggctggtctcaaactcctgggcacaag

SEQ ID NO: 28732 - DNA, 1139 bp, Homo sapiens
gctcagaggtggggctgggcagaagccctgtttgaaaggtctaacggccatactggaatgtgggaattaacttttttttttttttttgagatggagttatgctctaattgcccaggctggagtacaatggcaggatctcggctcaccgcaacctctgcctcctgggttgaagcgattctcctgcctcagcctcccgagtagctggggattagaggcatgagccactaygcctggctaattttgtatttttagtagagacggggtttctccatgttggtcaggctggtctcgaactcccaacctcaggtgatccacctgccttggcctcccaaggtgctgggtttacaggcttgagccaccatgcctggccagggattgactttttttttaaattttaaattattattattgttttttgagacagggtctggctctctgttgcccaggctggagtgcagtggcaccatcttggctcactgcaacctctaccacccaggctcaagccatcctccctcctcagcctcccatgtagctgggattacaggcatgcgccaccatgcccagataatttttgtgtttttttttatagaaacagggcttcaccacattgcccaggctggtcttgaacttctgagttcaaatgatctgcctgccttggcctcctaaggtgctgggattacagatgtgagctaccacacccagctgcaattcacttttgaccaagagaaaaaacttaagaggaatccagttgtccataaagtgacaaggaatatttgctgcatatttgaggatcttttgatcaacttaatacagaacctggcatctttacgtctccttagggccagatgatcatagccactcccagcctcagatacttttaatatgttgatgagcttctgagctcagacatctctaacttaactatgtccaaaatggagcttttgatctttcattctgattttgacactgctccagtctttcctatctagggatgggcacctcagcataccggacacttggagtcattaaaacaattttttaaaatttttaaattctttttctttaaacaatttttttttttttttaaagatagggtcttgctgtctttcccaggctggtctcaaactcctgggcacaag

SEQ ID NO: 28733 - DNA, 588 bp, Homo sapiens
aaggccacaagaaaacctgttgatcaaagaatgttaagtttattagacctactttagcaatagcaccctgacagagtgttaacagtgtctcaggaagaggtgggctgggaagcatgtttatagatcttggggtgtaggctcaagcaattcagacaggtttgcaagacacaaaacagggattaggcaagatgtgtgacataatagtttcaggttggtggacatctgaagcaagagtcttgaagagaatcttgacaagtgagctgttgcttgataagcaagctgcttgctcaggtgtgctgtcygttttccagataggagagctgtttacccagatgagcaaattatttcccagagcaaattagttttcagaaatttcctgaagtaaacaatgaggttatttattgatttacagacttatcttcctaaatacaaatatcctggaacaaatagttgatttgttgacacaggtggcctcagttatcagttctgagagttaagtaatgtggatacaggtggtgccattctcatgaaaaagaccaacagctgatcataaatccaattcataataaataagggaggtagaagtcc

SEQ ID NO: 28734 - DNA, 850 bp, Homo sapiens
tgtgtgtgtgtgtatatatatatatattacatacacacacacacacacacacacagatatttcactacaattatatttaaggtttaccccactgaaaactttatcttattgtgtacacctattgtgtattatatccaacacctccttttctggtaacttctttcctctttcccagccattcacatgataaccgcagtggcaaactctccttcacctcacccctcagaatctcttcactagatttcagcccaccagataatttacctagtctagaagcagataccttatcctagctgctgtagaaaccacttttctgagaaagtcattccagcttgagtctttgaagccctcttgaactcaacagttgtgggcagkcactcttttgccatatgcatataaaatccagttatatagaaagagaaaagacttaatcagatccactgagcgaagcagaagtgagaaaaagagaagcagccttaattgcatgccaatccctgcttctagggtatcctgggcactgtcagcccttgggtcctgtgtgacaactgtgactatatcctaaaaataagtgccttctcttagaaatatattttttattgccttcaaccaaaagaattctaatatgtaactatagacctatatttaaattctggcatggtcacttgatgatcgtttgatcttatattatttgttttctccaaattgaagtttctttatttataaaatacagacaatacaatttaacttacaagttagttgtatagattaaatattaaaatataaactataggacacactttataaatggcaaatatttatatatgaccgacgcctccaactgccattctta

SEQ ID NO: 28735 - DNA, 568 bp, Homo sapiens
tacacatgtcagttcaggggatagaggacactgactctgagccctgttgacccaagcaggctcccgttgtggtgggttgtcaacccacaacatcactcttcctgagtccccatcgcctctgtgttgtggagaagttagagacacacagcagtgtctgtgagtagctctgcatgaaggaccattttctagatgacagacacatctcaacacagctcactgatcagactcaggtgagtgggacctgctctcctcacttcctcctggcttggggacagtcactatcaggtgggtggttttggcctctggrcagctactgagggtaatccctgaacactcaccgggtgcctgttttgtgctgacagtcgtctcattcatcctcacagcaattccattctgcatttttctcatcacccccctgaccacccaggacaaccccatcagggccctgtcaccaggcccagtccagctccatgataaccaagacacaggtccagagactaccgtcctgcatcgtgcctgcatctgatcccccttggtgggtagtgaccagcacaacatggaagaagcc

SEQ ID NO: 28736 - DNA, 931 bp, Homo sapiens
accctttatcactataaaatgttgggcaagtactcacagtgcctctgctctctcatgtataaaatgtgaggaaccrtagcaccaaaatcatggaggtgttaggcagatggatgtgctgggaggaaacctgtttactagggggctgggttggagatggggagcttcttatgatgtctgctgtcagcagctttaaaggagatgtgggtgtctatcctggtggtctccctatcagcctgggatcaggtggtgagtggcttcacctactaagcccaaagatgtgttaggaaaacaggccgatatctatcgataaggaaaactggccggcacgatggctcatgcctgtaatcccagcactttgggagaccaaggcgggccgatcacctgaggtcaggagttcgagaccagcctggccaacatggcaaaaccctgtctctcctaaaaatacaaaaaaaaaaaaaaattagtcgggcgtggtggtgggtgtctgttgtccccactactctagaggctgaggtggaagaatcgcttgaacccaggaggtggaggttgcaatgagctgagatcgtgccactgcactccagcctgggtgacagagtgagactctgtctcaaaaaaaaaaaaaaaaaagaaaatgaaactcaaagggtcatgtcatctccgtcatctcctaagtgctgcaccactaaccaggcagataggacagacacatgtccagaacatcgacgcgggcccatgtgcttccctagagcagcgcccccgaggcagggacggataggacttccacagcatcatcgtcctctgagagggaagaagcaacgtgggagggctgcatggccggtggggggtccctctgggatgtgcatgatgctgggggaggggaaggaggagctggagacagggcaagtcctggtagcagtgtcaccctaaaaag

SEQ ID NO: 28737 - DNA, 931 bp, Homo sapiens
accctttatcactataaaatgttgggcaagtactcacagtgcctctgctctctcatgtataaaatgtgaggaaccatagcaccaaaatcatggaggtgttaggcagatggatgtgctgggaggaaacctgtttactagggggctgggttggagatggggagcttcttatgatgtctgctgtcagcagctttaaaggagatgtgggtgtctatcctggtggtctccctatcagcctgggatcaggtggtgagtggcttcacctactaagcccaaagatgtgttaggaaaacaggccgatatctatcgataaggaaaactggccggcacgatggctcatgcctgtaatcccagcactttgggagaccaaggcgggccgatcacctgaggtcaggagttcgagaccagcctggccaacatggcaaaaccctgtctctcctaaaaatacaaaaaaaaaaaaaaattagtcgggcgtggtggtgggtgtctgttgtccccactactctagaggctgaggtggaagaatcgcttgaacccaggaggtggaggttgcaatgagctgagatcgtgccactgcactccagcctgggtgacagagtgagactctgtctcaaaaaaaaaaaaaaaaaagaaaatgaaactcaaagggtcatgtcatctccgtcatctcctaagtgctgcaccactaaccaggcagataggacagacacatgtccagaacatcgacgcgggcccatgtgcttccctagagcagcgcccccgaggcagggacggataggacttccacagcatcatcgtcctctgagagggaagaagcaacgtgggagggctgcatggccggtggggggtccctctgggatgtgcatgatgctgggggaggggaaggaggagctggagacagggcaagtcctggtagcagtgtcaccckaaaaag

SEQ ID NO: 28738 - DNA, 632 bp, Homo sapiens
tgaccagagtagtttaccgtaatcccatagatatgttccagatttgtctctgatgacatgtggtgggctgagagaggcttctattctgctagtgtgggtataaccaggaaccctcgtgggaggccaagggccacctcaccttgcctgagaggaggctgcaggtgattacaaagcagaggggaatgtccggctctgaagaacctccagggtcaacygcaggaaccagcacaggaagagggcagagttgctctaggaagggggcttcacaaatggggaagtgagtggactcaagtgaccccctgacatccttagtgtcattatctagggagagtcccagaggtgccacgataccagcacccttggctgtgagaactggaacgccatttcccgccctaagggttaaacagctcgtccatgttctacccttcactttgccctgcatatttctaattaaaagaaagaaaagaacactcttacccatgaggaattttgctcaggacgtaatatccagtatacgagtgttgatatatctgcaacagacaaaaaggaaaaaaggtaggcattgagacaaaggctgttacgatgatatttttcaaatcactgtgaatcctaacaaacatcagtgaaccaaa

SEQ ID NO: 28739 - DNA, 594 bp, Homo sapiens
gaaaatcacaatggtcttggagttatttggaggaacaggacccagatataaaaataaacaacagcacttaaatcccaacaatctggtgctttcagagatcttgagactcctgaaccagaaatatgcggcccggggccccttgctttgagggcagcagatgggaaagtgctgctttagtcataaagaaacagccactaacagacaggactgtctaggagagctttatggagctgctacagcaatctaataaggaacacaggaacttaactcctttttctatttctgccgggatgagtggtgctgcttgcccaggagaaggaaggaagggcctggtgctggctcctgtgtcctgagcaggtcaccgctcagagaggacccattaaaggaccccatgctgcactgtgactaagccatgcctgygtgagctggaacggcttcttcagatgcaagagcaggaagctagacagagctgatctcaggtttccatggttatggtatatggtatattatatagagtttctgaactctccctccaaaaccgccttttcatatgattgatctcactttgttttcatagcatccctagggggcaga

SEQ ID NO: 28740 - DNA, 590 bp, Homo sapiens
gtaaccctcctaaacccttgtctatctcttaatttcttactggtataatattccctttcttcttctctttgacagtgtcccacaaagcaactagaatttctccctgctggctattccctgagagttcatttttttagaaatcggtcttattggcggggcgcggtggctcacgcctgtaatcccagcactttgcgaggctgaggcgggcggatcacgaggtcaggagactgagactatcctggctaacacggtgaaaccccgtctctactaaaaatacaatctctctctctctctctcctctctcctctctctctctccctctctcagagagggagagagagagaggagagaggagagagagagaaagagaaagaaagagagaaagaaagaaagaaagagaaagaaagaaagaaggaaagaaagaaagaaagaaagaaagaaagaaagaaagaaagaaakaaataaataaataaataaataaatctgtcttattgccaggctctatttctagacttgtccctttgccccagtgaaggcaaaatcttataagtaaatattttatctgcaacaactattcagcaaatgagatt

SEQ ID NO: 28741 - DNA, 590 bp, Homo sapiens
gtaaccctcctaaacccttgtctatctcttaatttcttactggtataatattccctttcttcttctctttgacagtgtcccacaaagcaactagaatttctccctgctggctattccctgagagttcatttttttagaaatcggtcttattggcggggcgcggtggctcacgcctgtaatcccagcactttgcgaggctgaggcgggcggatcacgaggtcaggagactgagactatcctggctaacacggtgaaaccccgtctctactaaaaatacaatctctctctctctctctcctctctcctctctctctctccctctctcagagagggagagagagagaggagagaggagagagagagaaagagaaagaaagagagaaagaaagaaagaaagagaaagaaagaaagaaggaaagaaagaaagaaagaaagaaagaaagaaagaaagaaagaaataaakaaataaataaataaataaatctgtcttattgccaggctctatttctagacttgtccctttgccccagtgaaggcaaaatcttataagtaaatattttatctgcaacaactattcagcaaatgagatt

SEQ ID NO: 28742 - DNA, 590 bp, Homo sapiens
gtaaccctcctaaacccttgtctatctcttaatttcttactggtataatattccctttcttcttctctttgacagtgtcccacaaagcaactagaatttctccctgctggctattccctgagagttcatttttttagaaatcggtcttattggcggggcgcggtggctcacgcctgtaatcccagcactttgcgaggctgaggcgggcggatcacgaggtcaggagactgagactatcctggctaacacggtgaaaccccgtctctactaaaaatacaatctctctctctctctctcctctctcctctctctctctccctctctcagagagggagagagagagaggagagaggagagagagagaaagagaaagaaagagagaaagaaagaaagaaagagaaagaaagaaagaaggaaagaaagaaagaaagaaagaaagaaagaaagaaagaaagaaataaataaakaaataaataaataaatctgtcttattgccaggctctatttctagacttgtccctttgccccagtgaaggcaaaatcttataagtaaatattttatctgcaacaactattcagcaaatgagatt

SEQ ID NO: 28743 - DNA, 590 bp, Homo sapiens
gtaaccctcctaaacccttgtctatctcttaatttcttactggtataatattccctttcttcttctctttgacagtgtcccacaaagcaactagaatttctccctgctggctattccctgagagttcatttttttagaaatcggtcttattggcggggcgcggtggctcacgcctgtaatcccagcactttgcgaggctgaggcgggcggatcacgaggtcaggagactgagactatcctggctaacacggtgaaaccccgtctctactaaaaatacaatctctctctctctctctcctctctcctctctctctctccctctctcagagagggagagagagagaggagagaggagagagagagaaagagaaagaaagagagaaagaaagaaagaaagagaaagaaagaaagaaggaaagaaagaaagaaagaaagaaagaaagaaagaaagaaagaaataaataaataaakaaataaataaatctgtcttattgccaggctctatttctagacttgtccctttgccccagtgaaggcaaaatcttataagtaaatattttatctgcaacaactattcagcaaatgagatt

SEQ ID NO: 28744 - DNA, 590 bp, Homo sapiens
gtaaccctcctaaacccttgtctatctcttaatttcttactggtataatattccctttcttcttctctttgacagtgtcccacaaagcaactagaatttctccctgctggctattccctgagagttcatttttttagaaatcggtcttattggcggggcgcggtggctcacgcctgtaatcccagcactttgcgaggctgaggcgggcggatcacgaggtcaggagactgagactatcctggctaacacggtgaaaccccgtctctactaaaaatacaatctctctctctctctctcctctctcctctctctctctccctctctcagagagggagagagagagaggagagaggagagagagagaaagagaaagaaagagagaaagaaagaaagaaagagaaagaaagaaagaaggaaagaaagaaagaaagaaagaaagaaagaaagaaagaaagaaataaataaataaataaakaaataaatctgtcttattgccaggctctatttctagacttgtccctttgccccagtgaaggcaaaatcttataagtaaatattttatctgcaacaactattcagcaaatgagatt

SEQ ID NO: 28745 - DNA, 537 bp, Homo sapiens
catatgaatcaacttgactcaattttgataaaataaaaagatttatttttaaatcacttgagtttaatttttttgcatgggtgtcatgtgaccacagagtagttgtattttttccattgaatgttttagcataaacataacctggaggggaaagctgctttgactcttcatcaatcaattactttttattagtctttcaccaaatgaagagtatgcaactacactaatttcacccatgacttcagatcctgaaacaaaaacaggctccttaaaatagcagtggaggtgatgacttcattgggcattattatasaaatggtaaaaaacctttatctttcaaaatcttttatactgttttaaaaagattatttttgtgaggaatcaaagcatattgtcaaatgatatttcatgattcttatgagtgctttcaattagctagaaactctcttgatttagtgaacttagcttttaaaaagacaattaatgtacactttagtctgtggattgttaaaaatgcaagacagtcattttgattaa

SEQ ID NO: 28746 - DNA, 523 bp, Homo sapiens
atttgagaagatccttttctcctttatgcttctccmctgtaacctcatacacttttttattgtatacactatactatgttaatattgatgtgtactctgtctcgcttctatgctctgaactcttcatgtcatatacctatatcatctacgttcacactccaggtgcctttgaaattgattgacacatagaggttagtaagtgctatgagaatgagtaaattgaataagtaaatttctatggtaaatctccattgactatgaaaaggaaagaatctctgtccaccatcgaaactctgaaccaatctcttttatatatcttcataaataactgattctgtatttaacttgtgtagatacatgtagcagactgaggttaaaagtgttattttgccagatgatgcaaagtctcataaaacaataaactggagttgtgacaagcctcaatgactatttagtgaggcccatggaacatggctggaataaatgcaatgaatgaacatggcttgtagaaggtcagaatgaa

SEQ ID NO: 28747 - DNA, 1191 bp, Homo sapiens
ttttctgcaaaggtaccttctctgacatctctagacttctttggttttctttgctttcaaactccacaactattttcaatctctgagattatcaatattatcaatcatcaatttgtcaattcaattttctctggtataatttgttttgttcaatttacatatatatctattctctgcaaacagactataaaccaaagagacaatgtgttgcattaagggagtgtaggatttggacacaagcaaacttggtgtgagtcatattcagcttcttattacctgtgtgccttgagaaaattatttaaagtcactgagcatcagtttttgcctctatacaaaatgggttatttacactgaaaaatcttgcagaagaataaaagagatcatgtattgaaagtactcagtacacaatacattctcaataatattttggttttctttccatttttctttctttttgtctcccatagcttcttcttgtgcttaatattcctatgttctacttacatgtattcattccctctctttaattctaaagcaaattccttaaggagaaaatctatgcattttatatcaacatagttatcttcatatacagaagacctaaattatgtgacctgaagtctatatgtattatgaaattttttaaaaagcctggccaggcatggtggtccaggcctgtaatcccagcactttgggaggctgaggcgggcagatcatgaggtcaggagattgagaccatcctggctaacatggtgaaaccctgtctctaataaaaatacaaaaaaattagccgggtgtggtggcaagcgcctgtagtcccagctactgaggaggctgaggcaggagaacggcgtgaaccctggaggcagagcttgcagtgagctgagatcatgccacygcactccagcctgggcaatagagcgagactccgtctcaaaaaataaaaataaaaaataaaacaataataataataataataagcttccaaggtttctagaaaagtcttgcttgtattagtagagcccagtgaattgtgaaataactaaagtttctattgaatgtttccagttatcttgttttgtatgatttttcccccctgccctgttaaggaatcaagtcaccttcttcccataaaacatttcttaaagagtatctgatgttggtcattcctagctctgtgtaaattttagc

SEQ ID NO: 28748 - DNA, 1258 bp, Homo sapiens
ttagccgggcgtgggggcggcgcctgtagtcccagctactccggaggctgaggcaggagaatggcrggaacccaggaggggagcttgcagtgagcccagatcgcgcccctgcactccagcctgggtgacagagcgagactccgtctcaaaaaaaaaaaaaaaaaaaaaaaaaaaaaaaaaaaaaaaaaaaaaattcctcattctgagaagtttacaaatcagttaggcttaattaagtgtttaaagaaattaaatgttttaaaaatattaaaggcacacatataaaataatgatactagacttaattatggagagcagcctcccctacaaatttcagccacgatacaagagcagtaagcagatcagactactcaccttcattccaacatttcaagtgactggggaaagaatagggacaaaataaaataaaacaaaataaaggtttcttgtggaacactgaaaaattattatgtgccaaagtgtaagaatgctttatatccatcacatcatttgtcctgggaggtactttctattattgatttcatttgacaaatgaggaaacagaggtctgaataggcagagaaacaactgtcaactttgtacttcttagtacaactttactgcctctgaggcctgcctacattcctgcactggggtttcgtgaacatcgcttgaggccattggccctatgtctgtcatctcttatgtttcattaataaacaccctcagctcttgatctgtgaggatcttaataaatatggttgtattaaattgttgcactttaaagaataatatatgatattaagaaatactatttctgataacagcttaagccataatatgaagtgtgctgatacaagaggagtttgtaggtcttaaaaacaaaaaaacaaaaaaactaagctttaatttagtataagtttctgacttttctgctaaaatttatctaggagtatatataaagaaaaggccttattggataaactggtaaatgcatctctcaagttttattttatattcaacataatatgaagtaaaaataaaatacaactaagaaatatatagcattggctactttttgaaacatttctccacaaaatagcaggtaaaatatgaaaaagtttcgacacaatgttttgaatctctatttctttatatcctaaaggaaataagaatttgatatgcctcaaggaaaaaaaaaccaacaaagatttttttttgcgggggaaagaaagtctactatccagcctcggagatt

SEQ ID NO: 28749 - DNA, 1258 bp, Homo sapiens
ttagccgggcgtgggggcggcgcctgtagtcccagctactccggaggctgaggcaggagaatggcgggaacccaggaggggagcttgcagtgagcccagatcgcgcccctgcactccagcctgggtgacagagcgagactccgtctcaaaaaaaaaaaaaaaaaaaaaaaaaaaaraaaaaaaaaaaaaaaaattcctcattctgagaagtttacaaatcagttaggcttaattaagtgtttaaagaaattaaatgttttaaaaatattaaaggcacacatataaaataatgatactagacttaattatggagagcagcctcccctacaaatttcagccacgatacaagagcagtaagcagatcagactactcaccttcattccaacatttcaagtgactggggaaagaatagggacaaaataaaataaaacaaaataaaggtttcttgtggaacactgaaaaattattatgtgccaaagtgtaagaatgctttatatccatcacatcatttgtcctgggaggtactttctattattgatttcatttgacaaatgaggaaacagaggtctgaataggcagagaaacaactgtcaactttgtacttcttagtacaactttactgcctctgaggcctgcctacattcctgcactggggtttcgtgaacatcgcttgaggccattggccctatgtctgtcatctcttatgtttcattaataaacaccctcagctcttgatctgtgaggatcttaataaatatggttgtattaaattgttgcactttaaagaataatatatgatattaagaaatactatttctgataacagcttaagccataatatgaagtgtgctgatacaagaggagtttgtaggtcttaaaaacaaaaaaacaaaaaaactaagctttaatttagtataagtttctgacttttctgctaaaatttatctaggagtatatataaagaaaaggccttattggataaactggtaaatgcatctctcaagttttattttatattcaacataatatgaagtaaaaataaaatacaactaagaaatatatagcattggctactttttgaaacatttctccacaaaatagcaggtaaaatatgaaaaagtttcgacacaatgttttgaatctctatttctttatatcctaaaggaaataagaatttgatatgcctcaaggaaaaaaaaaccaacaaagatttttttttgcgggggaaagaaagtctactatccagcctcggagatt

SEQ ID NO: 28750 - DNA, 1258 bp, Homo sapiens
ttagccgggcgtgggggcggcgcctgtagtcccagctactccggaggctgaggcaggagaatggcgggaacccaggaggggagcttgcagtgagcccagatcgcgcccctgcactccagcctgggtgacagagcgagactccgtctcaaaaaaaaaaaaaaaaaaaaaaaaaaaaaaaaaaaaaaaaaaaaaattcctcattctgagaagtttacaaatcagttaggcttaattaagtgtttaaakaaattaaatgttttaaaaatattaaaggcacacatataaaataatgatactagacttaattatggagagcagcctcccctacaaatttcagccacgatacaagagcagtaagcagatcagactactcaccttcattccaacatttcaagtgactggggaaagaatagggacaaaataaaataaaacaaaataaaggtttcttgtggaacactgaaaaattattatgtgccaaagtgtaagaatgctttatatccatcacatcatttgtcctgggaggtactttctattattgatttcatttgacaaatgaggaaacagaggtctgaataggcagagaaacaactgtcaactttgtacttcttagtacaactttactgcctctgaggcctgcctacattcctgcactggggtttcgtgaacatcgcttgaggccattggccctatgtctgtcatctcttatgtttcattaataaacaccctcagctcttgatctgtgaggatcttaataaatatggttgtattaaattgttgcactttaaagaataatatatgatattaagaaatactatttctgataacagcttaagccataatatgaagtgtgctgatacaagaggagtttgtaggtcttaaaaacaaaaaaacaaaaaaactaagctttaatttagtataagtttctgacttttctgctaaaatttatctaggagtatatataaagaaaaggccttattggataaactggtaaatgcatctctcaagttttattttatattcaacataatatgaagtaaaaataaaatacaactaagaaatatatagcattggctactttttgaaacatttctccacaaaatagcaggtaaaatatgaaaaagtttcgacacaatgttttgaatctctatttctttatatcctaaaggaaataagaatttgatatgcctcaaggaaaaaaaaaccaacaaagatttttttttgcgggggaaagaaagtctactatccagcctcggagatt

SEQ ID NO: 28751 - DNA, 1097 bp, Homo sapiens
ggcgggaggtaattgaatgaagggggctgcttcccccatactgttcttgtgatggtgagtgagttctcacaagatctgatggttttataagcatctggcatttcccctgctggtactcgttctctctcctgctgtcctgtgaagaggtccttctgccatgattgttaagtttcttgtggccgcccccccgccacagccatgcggaactgtgagtcaattaaacctcttttctttataaattacccagtctcaggtattccttcttagcagcgtgagaagggagtaatataccatctctctgctagaacatgtctggaagggagataaagatatttatgtgttcagttttacaattatattgtttgtgcacacacacacacacacatacatatacctaggataaggttctcgtacttttcaaaatttaaaatggtacctattccatagactatgcttagaaaacaagtgcttgatttactaaactaagcccagggaaggttttaacaattgatagtggtaagtaagtgcccttgtcccttactaattctaaattttacctacttgtctgacaagcagtttgaattgtctgaaggccctttgtgaattcccaaaactgggcatgtgtttggttgtttgtggttgacagtgtgaggagtaaaaaaggtttccctagagcgtctgtggggtttctttcaatatgacatgtagaagaatgtagcatttagatgtgagaaattactcaaaacagactccattcataactaaaatgcttgttgtgccctgggttgcgcgcgcgcgcgcrcacacacacacacacacacacacacacacacacgtgttttgaaagaagagtgggaaggaagcagaaaattaagaatagcctttaagaagacacaggtggctccaggcgggaagtgctgctgctgtgatgcccccggaaatgctgtcctgccaacactgagggtcttttgggccagtgggcctcatggggtcctctgcctggcagggggaaggtgggcaaaggctggtgcccaggtctgtgcaggctactgtgcttgttttggggagaggggccgtgccagctccacccgggagca

SEQ ID NO: 28752 - DNA, 1097 bp, Homo sapiens
ggcgggaggtaattgaatgaagggggctgcttcccccatactgttcttgtgatggtgagtgagttctcacaagatctgatggttttataagcatctggcatttcccctgctggtactcgttctctctcctgctgtcctgtgaagaggtccttctgccatgattgttaagtttcttgtggccgcccccccgccacagccatgcggaactgtgagtcaattaaacctcttttctttataaattacccagtctcaggtattccttcttagcagcgtgagaagggagtaatataccatctctctgctagaacatgtctggaagggagataaagatatttatgtgttcagttttacaattatattgtttgtgcacacacacacacacacatacatatacctaggataaggttctcgtacttttcaaaatttaaaatggtacctattccatagactatgcttagaaaacaagtgcttgatttactaaactaagcccagggaaggttttaacaattgatagtggtaagtaagtgcccttgtcccttactaattctaaattttacctacttgtctgacaagcagtttgaattgtctgaaggccctttgtgaattcccaaaactgggcatgtgtttggttgtttgtggttgacagtgtgaggagtaaaaaaggtttccctagagcgtctgtggggtttctttcaatatgacatgtagaagaatgtagcatttagatgtgagaaattactcaaaacagactccattcataactaaaatgcttgttgtgccctgggttgcgcgcgcgcgcgcacacacacacacacacacacacacacacacacacgtgttttgaaagaagagtgggaaggaagcagaaaattaagaatagcctttaagaagacacaggtggctccrggcgggaagtgctgctgctgtgatgcccccggaaatgctgtcctgccaacactgagggtcttttgggccagtgggcctcatggggtcctctgcctggcagggggaaggtgggcaaaggctggtgcccaggtctgtgcaggctactgtgcttgttttggggagaggggccgtgccagctccacccgggagca

SEQ ID NO: 28753 - DNA, 1385 bp, Homo sapiens
tatgtggcgctacaaggattggagacatgaactgcacccaaagcaagctgaagtgattcggaaccactgtgaactgaaccctcaaaatacgtatagatgagtgaatatttacataggcctaaatgtgcgtgtgtgtgtgtgtgtgcacgygcatgtgcctgtcttcctgcaaccccccagccccagaaacattcttaggctcagcatttgccagcatacagagtattagattttccttgattgttttgatagctgaaaagtcacattgtcaggtagccccagctcacttcctagtttgtaggttctttgatgctgctgtgagatgttctctcagacatgtatttctgttgctctgattagatgaatgaaaaactacagtcttcatcataaattgctacctgagttttctgtagttttgcgcctcccatggaatgttactgctagggaatctattgccatgtcacattctgcagccacccatttaccctggacccttgtttactggatgcttcagtcctcaaatgaaggtagcaagacgaacagggttatgggttgctaccattgtggccacttcaagggcatcagctacacagtagacaggcggctgtccggtgcccagtgctgtgtttggatggatcccaaccttgattaggtaaggctgtaaagggttagggaggaagcctcttcctacttttgttaaagaaggcaaagcaactttatttcatatagtcaaaaacaatgcaacagctctttttttttttttttttttttttgagatgcagtgttgctttgtcgcccaggctggagtgcagtggcatgatcttggctcactatagccaccactcccgggttcaagcaattctccctgcctcagcctcccgagtagctgggattacaggcgcccaccaccatgcccagctaattttttgtaattttttttggtaaagacagggtttcaccatgttggccaggctggtcttgaactcctgacctcaggtgatccgcctgcctcagcctcccaaagtgctgggattacaggcattagccactgtgaccagccagctctgttcttttttcacgaatttaaccttctaagtagaagtaggaaccttctaagtaggaagacatttctaaatgccacccaatttaccgacagattggttgtcagtcatagtctgtatgtgtctgtttccaactttacctgttttgtaatttactagaaaaatagcagagtataactttgccattttaaacagaaggtcggggtcctaatgaaagcgttttcttggttcaggatttctgtgggtatttctgccagggagaggctagaagcaggagagggtgagagggactttataatctctatatagctttgcagttgttaa

SEQ ID NO: 28754 - DNA, 574 bp, Homo sapiens
ttcctttatatatcccccactaatctctaaacactataaagccattatctctgaccatattttgcaccctctcttttccatcagtttttaaaaatgttggtaaaatacacataacataaaatttatcatcttaaccccttccctttatttttttattttattttattttatttatttatttatttttgagacagagtcttgccctgtcacccaggctggaatgcagtggtgcactcttggctcactgcaacctccgcctcctggttcaagcgattcttgtgtcttaacctcccaagtagctgagattacaggcgctcgccatcacgtctggctaatttttgtatttttagtagagatgaggtttcaccatgttgaccaggctggtctcgaacttctaacttsaagtgatctgcccgcctcagcctcccaaagtgccgggattacaggcatgaggcaccacacccagcccccttccctttttttttttttttttaaatgaagggataaactgaatcagaaagaaattatatttaggttttaatagcaacaaaaagatgcttgtgacctacgttgt

SEQ ID NO: 28755 - DNA, 548 bp, Homo sapiens
ttatgttagattttcaattgcttagcattttcgcatttctgggttaaattcatattggacatgatatatttaaatgcattgctcatttggtttgctgatagtgcttaggattatatcataagtgagatttyctatgtttttctttttcttctgctaccttatcaggttttggtattaatattttacatgctaagctcacaaaatggactcaggaatgtttcccctctccaccctgctctgaagaagtttgtatagatcaaaattatctattctttatattttgatagaacttacctctaaatgctcataggccaggtatttgagtgtgtgtttgtgtaggtactgatttcattactatagtgcaataagtagtacatctttaaaatttctctttgagtcagtttcagatcatttctctaaaatttttattttgctagcataatatttttataatagttcttttttaaaaaattcagccatgtcatgtttataatactagacctttttattcttttttttcagagcagtagtgaaaatttattaaaaat

SEQ ID NO: 28756 - DNA, 548 bp, Homo sapiens
ttatgttagattttcaattgcttagcattttcgcatttctgggttaaattcatattggacatgatatatttaaatgcattgctcatttggtttgctgatagtgcttaggattatatcataagtgagattttctatgtttttctttttcttctgctaccttatcaggttttggtattaatattttacatgctaagctcacaaaatggactcaggaatgtttcccctctccaccctgctctgaagaagtttgtatagatcaaaattatctattctttatattttgatagaacttacctctaaatgctcayaggccaggtatttgagtgtgtgtttgtgtaggtactgatttcattactatagtgcaataagtagtacatctttaaaatttctctttgagtcagtttcagatcatttctctaaaatttttattttgctagcataatatttttataatagttcttttttaaaaaattcagccatgtcatgtttataatactagacctttttattcttttttttcagagcagtagtgaaaatttattaaaaat

SEQ ID NO: 28757 - DNA, 592 bp, Homo sapiens
agccgttcatctctcagattgtccttagcagtgaaagaataatcatgcctaccttacagggctgtcatggagatgaagacttttgtttatctgtgtggttttcactcatttattcattcattttctgtctgattcatgaagaaaaagtagcaatgtttttgtgatagtttgaaaattataagatgtaaatgtaagatactatattcaagattcttaaaagtctttctataaaagtaattatcacccatttttattaataaagcctgaagcaagtgagattgttttwaaaaaatccaacactcaataagtaaccagcttactgaatcacaatgatagggtataattccctgtcctcacacaatttaaaagtaaactacatcttaaaagaataaatatataaatcactgtatctattatgatcttatcctctttcaatacgatcaaggatttcacattgttgtcggctttttttctatacagcagtcaataacaacacttgactgagagaagtgacagtcttcgtatgactatttcttagccacctaaatattatccagaaataaaatagaagaaaacttctgaaaaaaaaaga

SEQ ID NO: 28758 - DNA, 592 bp, Homo sapiens
agccgttcatctctcagattgtccttagcagtgaaagaataatcatgcctaccttacagggctgtcatggagatgaagacttttgtttatctgtgtggttttcactcatttattcattcattttctgtctgattcatgaagaaaaagtagcaatgtttttgtgatagtttgaaaattataagatgtaaatgtaagatactatattcaagattcttaaaagtctttctataaaagtaattatcacccatttttattaataaagcctgaagcaagtgagattgttttaaaaaaatccaacactcaataagtaaccagcttactgaatcacaatgatagggtataattccctgtcctcacacaatttaaaagtaaactacatcttaaaagaataaatwtataaatcactgtatctattatgatcttatcctctttcaatacgatcaaggatttcacattgttgtcggctttttttctatacagcagtcaataacaacacttgactgagagaagtgacagtcttcgtatgactatttcttagccacctaaatattatccagaaataaaatagaagaaaacttctgaaaaaaaaaga

SEQ ID NO: 28759 - DNA, 505 bp, Homo sapiens
ggatcttacccaaggatgcgtgactggtaagtagcagagctagaatttgaacccaatctgttaaacagttccctcaacaaagaattatctcattttgtgcttgactctcaagcattcatgtaggtgaaaaacttctttagaattctctgagccaagaacctagctctwtgtataaacattttttgtatgattttaatctgcactgaatatattcgtttcagtctcatattcatctggagacccctccagagcttgaggtcttgagaagtcctggggctccagtggccactaaagcaatgacttttcaaaagaaaagaaatgtttcctgagtgtagatgttgctatcttttttctttctcattgtatacttccttgtagagtacataggtgttagaggtcagatctggagggattttgtatccaggaggttaccttgaactttgatgctgtacactagcctagtattattattattgttgttattatcattactcctactattact

SEQ ID NO: 28760 - DNA, 574 bp, Homo sapiens
ctcaagggataacttagatccataaaacttaacaatgcacatttgattcaccctcgtatcctctgaatgaaacagggccagccacacagtaggtgctcaataaatatttaaggagcaaaaggagattcgatccagtagcttctggcacactctgtatgaataatctgtttcatttttggttttaaatgctcttccccatgtgttcatttctaccctacaataatactgcttttccagattgcaatgttcttctcttagaaacaacctggcagaagagagaccaaaggcacctgctccccacaccccaagggccaatggacacaacttaagagagctgcactagatgctccctcggatctggggttgtgagtcccgcccctgagcggcggtgccctgactccactgcctctgctacaagccagctcccggggccgacctcagggctccagagtcatcatggctcctgctctccccagtctcayatctccagcctcttgttaggggagagatctattcatcaattcccctttgttaaagaaagtctgggttggttttcatttgttgcaaccacagg

SEQ ID NO: 28761 - DNA, 608 bp, Homo sapiens
gctaaagaaactggctggaacaagttgcttatttacatgttgatgaatggttatgttaacaacattcttcactgaaaacttcactgtttgtttttgctgaagtagatagtaaataagtagccaagacatggtggtctgaaacaaataccacaaagacttttattctttctttgtggatgtgtcatggtatactaggtctasaaaaaacaactttctttatatctatttaaatatagcaccctgatagcactaccaagaaaaaccagtcccagcctaagactgaaaagacacagggagaaatctgctgctgtatcacttaaaatatttttgtttgtctatttagtcatctatccctttagagtttatctctggaaaatattacattccaaaaagtccaaaaattaatgtcatcctgaccaaactgtgaaagccttctaaatagtcaaataatgatttatagctagtttgttttctatctggaaatataacaagtgaactatttacacagtagctgctttccatattcatctggtttggatcaaattaatccacttttggataaaagttatcatcaattgtatgtttatgatgcacagtggtatttacca

SEQ ID NO: 28762 - DNA, 587 bp, Homo sapiens
tttagggtaattcgagcgatatttgcagtggtggcracacatggctgtttcttcacagcaggcagcagtagcagggagtcttttttagggctctgttcttatcacctaaaacttccaaagcttaactgactgccaagataattaacccccctgcatactgaaggttcttttagatccactttctgatacattaagaaaaagaaagaaaataatcattttcaggttgagctgcctggcccttagatgttgatatacagcaaattgcagcctgataggaaataaaaccacatttcttaaggacaattttgaaagaaacctattattttttcccttatttttgagggcataaaattgtaatatactttgtagaccttattatttacattgcctcaaatggggggttggaattagaaacatagtacattggcaccagaagagatccgttgcagctaaactaaccctctcattttatattaatcataactatcacacaaacctgtgatgtgcaatgtctgaatgaaataccaggtaaaatgttctgcactttcagattgcttaccaatcttaatgcttgctcaagccatcaa

SEQ ID NO: 28763 - DNA, 628 bp, Homo sapiens
gcacttatttcaaatcacagatgcatgtagaaaagacattaaaatcccatgttaaaaaagtatgtcggctgggtgcggtggctyaagcctgtaatcccagcactttgggaggacaaggcgggctgatcacaaggtcaagagattgagaccatcctggccatgatggagaaaccccgtctctactaaaattacaaaaaaattagctgggcgtggtggcgcgtgcctgtaatcctagctactcaggaggtggaggtaagagaatcacttgaactcaggaggtggaggttgcagtgagccgagatagtgccattgcactccagcctgggcaacaagggcaagactcggtgtcaaagaaaaaataaaaaagtatgtcatgcttcctctagcctcaagagaacataactgtaaactggaatattatccttacactatacaaatgtatagctgtggaatataccctacagaggcagaaagcttgggtatgaatccagccattttcaatccttatctgagtctgagcaagtttgtgagagctcctataggggagcagcaggagctgtagctttgagtttgaaaactaactttgctatttcctacctgtgtgacattagacacttttcacgttgaa

SEQ ID NO: 28764 - DNA, 628 bp, Homo sapiens
gcacttatttcaaatcacagatgcatgtagaaaagacattaaaatcccatgttaaaaaagtatgtcggctgggtgcggtggctcaagmctgtaatcccagcactttgggaggacaaggcgggctgatcacaaggtcaagagattgagaccatcctggccatgatggagaaaccccgtctctactaaaattacaaaaaaattagctgggcgtggtggcgcgtgcctgtaatcctagctactcaggaggtggaggtaagagaatcacttgaactcaggaggtggaggttgcagtgagccgagatagtgccattgcactccagcctgggcaacaagggcaagactcggtgtcaaagaaaaaataaaaaagtatgtcatgcttcctctagcctcaagagaacataactgtaaactggaatattatccttacactatacaaatgtatagctgtggaatataccctacagaggcagaaagcttgggtatgaatccagccattttcaatccttatctgagtctgagcaagtttgtgagagctcctataggggagcagcaggagctgtagctttgagtttgaaaactaactttgctatttcctacctgtgtgacattagacacttttcacgttgaa

SEQ ID NO: 28765 - DNA, 628 bp, Homo sapiens
gcacttatttcaaatcacagatgcatgtagaaaagacattaaaatcccatgttaaaaaagtatgtcggctgggtgcggtggctcaagcctgtaatcccagcactttgggaggacaaggcgggctgatcacraggtcaagagattgagaccatcctggccatgatggagaaaccccgtctctactaaaattacaaaaaaattagctgggcgtggtggcgcgtgcctgtaatcctagctactcaggaggtggaggtaagagaatcacttgaactcaggaggtggaggttgcagtgagccgagatagtgccattgcactccagcctgggcaacaagggcaagactcggtgtcaaagaaaaaataaaaaagtatgtcatgcttcctctagcctcaagagaacataactgtaaactggaatattatccttacactatacaaatgtatagctgtggaatataccctacagaggcagaaagcttgggtatgaatccagccattttcaatccttatctgagtctgagcaagtttgtgagagctcctataggggagcagcaggagctgtagctttgagtttgaaaactaactttgctatttcctacctgtgtgacattagacacttttcacgttgaa

SEQ ID NO: 28766 - DNA, 628 bp, Homo sapiens
gcacttatttcaaatcacagatgcatgtagaaaagacattaaaatcccatgttaaaaaagtatgtcggctgggtgcggtggctcaagcctgtaatcccagcactttgggaggacaaggcgggctgatcacaaggtcaagagattgagaccatcctggccatgatggagaaaccccgtctctactaaaattacaaaaaaattagctgggcgtggtggcgcgtgcctgtaatcctagctactcaggaggtggaggtaagagaatcacttgaactcaggaggtggaggttgcagtgagccgagatagtgccattgcactccagcctgggcaacaagggcaagactcggtgtcaaagaaaaaataaaaaagtatgtcatgcttcctctagcctcargagaacataactgtaaactggaatattatccttacactatacaaatgtatagctgtggaatataccctacagaggcagaaagcttgggtatgaatccagccattttcaatccttatctgagtctgagcaagtttgtgagagctcctataggggagcagcaggagctgtagctttgagtttgaaaactaactttgctatttcctacctgtgtgacattagacacttttcacgttgaa

SEQ ID NO: 28767 - DNA, 539 bp, Homo sapiens
accttatgttctcaaagcaactaacttctggtttcaaccctgcagtktgacgaaaaactttgtatatgatgactccaaaagccaagagattaacctggaaaaagaattaatttcaaagaagagatagttttcatcttaaattggatacatataaagaaaataaatggtaaagatttcaataagatagaaactaaaaatcatggcatttatatagttctttacaatatcactgaaaattatcagtacaagtggtaccgaaagcaacctgtttatgaaacttcttcagatgttatcatcatacctaaagattgatgagtatcatctgctgccactaatatgattaatatatacattaagttaaattttggtttggaaagctttataaacactaaagaaagcaaatttttgttcagtaatttctatactgtttctttgaagaaatgtgttagtgataattctgtgaaccctttaaaaatttagactggaaaagaaaaattgaaagattgaaaagaaataagaaaactcaacaaaacactctc

SEQ ID NO: 28768 - DNA, 539 bp, Homo sapiens
accttatgttctcaaagcaactaacttctggtttcaaccctgcagtgtgacgaaaaactttgtatatgatgactccaaaagccaagagattaacctggaaaaagaattaatttcaaagaagagatagttttcatcttaaattggatacatataaagaaaataaatggtaaagatttcaataagatagaaactaaaaatcatggcatttatatagttctttacaatatcactgaaaattatcagtacaagtggtaccgaaagcaacctgtttatgaaacttcttcagatgttatcatcatacctaaagattgatgagtatcatctgctgccactaatatgattaatatatacattaagttaaattttggtttggaaagctttataaacactaaagaaagcaaatttttgttcagtaatttctatactgtttctttgaagaaatgtgttagtgataattcygtgaaccctttaaaaatttagactggaaaagaaaaattgaaagattgaaaagaaataagaaaactcaacaaaacactctc

SEQ ID NO: 28769 - DNA, 1568 bp, Homo sapiens
tgtttggaacattctgtagctccccactcagatgcccatcacttgtgagccaactcaacctaatcttggtttcagaatggaaaaaaaaatacaagtttcacaactggatgaaaactccagctttctggcagctgcacagaattctaggtcagggtgacatcagggcaagctctctggtgcactgggggcaggggcctggctagaacaccgacatccgtctttcagggagttggagatctcagacaaaaggaagaagagatagttctgtgtccacctggaccctgggaatgtgtgtgatagagcaaaggtcagaccagactgacccgacagagaaatgagcccccgggaggccttaggattcaacgttctgacacaagacaaagaattcctctgggaagatacagaaccaatgcccttgtctctttatttttgtacattcatattctttcctaccccttctccacccccacacagcctttgtcttcttygtctctaaaaaatgcatagtatgattgtctaagttgaagaaaatgcaaccccattttgaaacttgaccctttcgtggagatgagtcactgggcgatttggtgtcgctggttccgctctgttcattttaagggagcatctccactttgtccttgctgactgatgggatggctggccagtggtactagagagcagaagattttcctagagaagctgggaatctaggcttttttttctctaaaatctctggattttaaattataagaaccttcactttttagctatagcgtagctcagacaacatctctgctgactctcagtttcctgcctctggcttagaaggtttccctccagtatctacatattctggcaaaagcattttatagtttgctgtgacctgaggtggaagatgtcttcccaaaaatgatgcatgtggtgattctccaactgcagtgcccaggatccgtggcactccaaggggtgagacagcagtgggcatggggctggagccagtccctaaccccgctcccgccccagacatattcctgttgcaatgagagcacctccaatcagatgtgttgtcaacattaggcctccaacaagtctttcattcaaataatgaaagagaaaagaagaaatgaaacaataaatgaaatgaagaagagaggagagaaggaaggaaaaaagtgagagagggaaggagagaggaagaaagttagcagtttgaaccaaggcaaaaagccatggccctttaaggggagcacacacatgtcaggaatcacgttgtgggcttcaaaggacttcctgactcacagcctggcttccccaggtactggctggatgaccgaacaactctgcctcattttctctatttgcaaaatggggatgttaatccctctcattttggagttgatatgaatgaacaagtcaaagtgcttagaacagaacttgatgccagcaagcatcaataaatggaagctgtttcttgtttttagcaggacttgacatcgcattcaggctcagtggctttagggttggctgcctaaagccaccattcaggcacacttttgaagcctggttca

SEQ ID NO: 28770 - DNA, 895 bp, Homo sapiens
ctcccacctcagcctcccaaagtgttaggactacatgcataagccacagcacaaggcctagtcaattaattttatcctgaattctgagaaaaaagagaataggtatgcagatgggcagaagctacagatgtcatttcaaaggaaagtagagttttaataataatattaatagatgatgtttatcggggccaactctaccaggttttgtaatgggtgtatgttattttgtttaagattttgagcaacctgcatgtggcaggagctatttccctccaattacagacaagaaaacaaacttagrcaagcaccttgttcaaggataggactagggacccagattagttgatatcagtcactacacttgccttcttagtaaagaatggggaatttttttggtttgtttgtttgtttgtttttgagacagagtcttgctctgttgcccaggctggagtgcagtggtgcaatctcacctcactgcagcctccacctcctggtttcaagggattctcctgcctcagcctcctgagtagctgggattacaggcacgccccaccatgctcagctaattttgtgtaattttagtagacatgaggttttgccatgctggccaggttggtctcgaactcctgacctcaactgatccacctgccttgacctcccaaagtgctgggattacaggcgtgagccaccgcaccaggagagaatggggtgctttgataggagattaatagaaataaattaattcatttaaatcagaaaaaaaggaggagaaaaggatatacaggtctcgttctctgttttttgttttttaagggtaaaagtacaagaagtcatttagaaaaggggttggttggtaagggacagtcagggagaagatactgaggaaaaaattggt

SEQ ID NO: 28771 - DNA, 1125 bp, Homo sapiens
tagcctcttcagctcatgtgtgggagcccgggtattcaattgtgaggtggaaacctgtttgcaggacccctctctttgctgagagctttccttttgcttaataaatttcaccttcctcaccctgaaatgtgactgtatgcctaatttttcccaatcatgagacaagaacccagatttagctgaactaaggagcaaaaaatccttcatcrgtagggttacagacactgatttaggcaatgttggaagatatatttttaaaaattctttacttgtttgtatctcctctttgccttccatcaaacagtgttggctcatctaccacacaaactacacattatcctctttgcttgggccatcctcttatgtgaagaactatgtggttctaagtcttattgtgatatggaatgctagggtgtagcaatagttttgaattcaatacaggtcttaaaagtacttttttttttcttttttatttatttatttattattattatactttaagttttagggtacatgtgcacaacgtgcaggttagttacataggtatacatgtgccatgttggtgtgctgcccccattaactcatcatttagcattaggtatatctcctaatgctatccctcccccctccccccaccccacaaaaaaaattacttttcatttggtaacagtccttttaattttcaaactgtttttgagatagccaacagacgtagctataagaatcaaggtgacattatttcacatcatattttccctaagtatgatgatattatctgttcagaaaacttccccctcaccctacctgcccattcccccaccacaaccagtgagaaaaaagaaaagagagtaactctgtccctgcacattacttgggtcacctcggaaatgactgtggtccctgacaggaagaattttacctttagagagtaataccgtctctcaatataatggctataatttctgaagaggaaggggtaaggcagaagaatgaacttggttttacattttgggaatgggataatgtttggattgcaaaattcagtttcagaaagaaagtggatgattctctaagaatgggttctttaaaatatgctcagcagatctcaggagatctcaggagaag

SEQ ID NO: 28772 - DNA, 1125 bp, Homo sapiens
tagcctcttcagctcatgtgtgggagcccgggtattcaattgtgaggtggaaacctgtttgcaggacccctctctttgctgagagctttccttttgcttaataaatttcaccttcctcaccctgaaatgtgactgtatgcctaatttttcccaatcatgagacaagaacccagatttagctgaactaaggagcaaaaaatccttcatcggtagggttacagacactgatttaggcaatgttggaagatatatttttaaaaattctttacttgtttgtatctcctctttgccttccatcaaacagtgttggctcatctaccacacaaactacacattatcctctttgcttgggccatcctcttatgtgaagaactatgtggttctaagtcttattgtgatatggaatgctagggtgtagcaatagttttgaattcaatacaggtcttaaaagtacttttttttttcttttttatttatttatttattattattatactttaagttttagggtacatgtgcacaacgtgcaggttagttacataggtatacatgtgccatgttggtgtgctgcccccattaactcatcatttagcattaggtatatctcctaatgctatccctcccccctccccccaccccacaaaaaaaattacttttcatttggtaacagtccttttaattttcaaactgtttttgagatagccaacagacgtagctataagaatcaaggtgacattatttcacatcatattttccctaagtatgatgatattatctgttcagaaaacttccccctcaccctacctgcccattcccccaccacaaccagtgagaaaaaagaaaagagagyaactctgtccctgcacattacttgggtcacctcggaaatgactgtggtccctgacaggaagaattttacctttagagagtaataccgtctctcaatataatggctataatttctgaagaggaaggggtaaggcagaagaatgaacttggttttacattttgggaatgggataatgtttggattgcaaaattcagtttcagaaagaaagtggatgattctctaagaatgggttctttaaaatatgctcagcagatctcaggagatctcaggagaag

SEQ ID NO: 28773 - DNA, 1125 bp, Homo sapiens
tagcctcttcagctcatgtgtgggagcccgggtattcaattgtgaggtggaaacctgtttgcaggacccctctctttgctgagagctttccttttgcttaataaatttcaccttcctcaccctgaaatgtgactgtatgcctaatttttcccaatcatgagacaagaacccagatttagctgaactaaggagcaaaaaatccttcatcggtagggttacagacactgatttaggcaatgttggaagatatatttttaaaaattctttacttgtttgtatctcctctttgccttccatcaaacagtgttggctcatctaccacacaaactacacattatcctctttgcttgggccatcctcttatgtgaagaactatgtggttctaagtcttattgtgatatggaatgctagggtgtagcaatagttttgaattcaatacaggtcttaaaagtacttttttttttcttttttatttatttatttattattattatactttaagttttagggtacatgtgcacaacgtgcaggttagttacataggtatacatgtgccatgttggtgtgctgcccccattaactcatcatttagcattaggtatatctcctaatgctatccctcccccctccccccaccccacaaaaaaaattacttttcatttggtaacagtccttttaattttcaaactgtttttgagatagccaacagacgtagctataagaatcaaggtgacattatttcacatcatattttccctaagtatgatgatattatctgttcagaaaacttccccctcaccctacctgcccattcccccaccacaaccagtgagaaaaaagaaaagagagtaactctgtccctgcacattacttgggtcacctcggaaatgactgtggtccctgacaggaagaattttacctttagagagtaataccgtctctcratataatggctataatttctgaagaggaaggggtaaggcagaagaatgaacttggttttacattttgggaatgggataatgtttggattgcaaaattcagtttcagaaagaaagtggatgattctctaagaatgggttctttaaaatatgctcagcagatctcaggagatctcaggagaag

SEQ ID NO: 28774 - DNA, 572 bp, Homo sapiens
taaaaaatgaaaagcttttaatcatgacataaataatctgtaaaagataattctrttcaatcaacgaagaatagatgtaggacaatagccacatgttgaattttagctgagtcctctgttcctacaaaacagaaatgtttaagaaattctcccaccttttagtgttctgggtaatggcttattacaatgaaatgccctttcccttaagactttgataagactcacaggaagtacccttatttacctgtgaaaaggccagacacatgccctctaaattccctttccttgccccttaaataattaactaaatcgcttgtccttactgatctatcagttcaaaatacttgctaaccaaactttgttttttgtttttgttttccttccctggacctttaaaccttgacccaccttcagcctgagccaacatacaacatgcaacccttcctgaaaattggctggcttcagaataaaacattctctgacttactatcccactcttatgccactctttcctcctacttctccacacaccattcttcctagccttgtttactcctccccataaaagagaa

SEQ ID NO: 28775 - DNA, 1222 bp, Homo sapiens
ggctgggagtgaaaagtgtttatcacaagcttttaagtaaaaacaaactattgcagaacaatataaaaatagtcccaatgacgaccgtaaggtagtaaaaattgagtaagggtggaggaaatattttctttatacatatatactgttttattattttcaaaaagtgtgtttgaaatgcttttaaaattatctagatttcaaaaagtgtgtttgaaatgcttttaaaattatctagaaatattccattgtaatttgttaacagtggttatttctggagaattgggccaagaagggtgggttaatggaaggtaggattctgtttttaattttgtgttctttattgtttgaaataatttgtggtaagtatgtattaattttatgatagcaaaagcacggagaaaaaaatacaaaacaaaaagcaaaagaaatagacagaaaatatcatctctaaggtcagtagcttttactgttttttctttaatctctgtctctccaaatagagaggatggctgagagtatataaaagctgaacctactccgatcaaccaggcttgatggcatttattctaaggtactcagggaatgggaagatgttactgcaaagccattaactattatttttcagttctttggaagaataaaggaagccctcaaaaaatgagaaaaggtcaccattctactgaaaatgaaaaaaaaaggaggggtgaccttggttcttagaggctggacattttttactctgtttttaatcactggaaagatatcagagagatccttaaacaagtaaaaatgcaagtgctaggagaaacatgaagtccttgggggaggggaaggggtgatatcataatgagatgtgcccttagtctttctttctttttttcaataggctgggaaataggtggggtttggttacatgaataagttatttagtggtaatttctgagattttgttgttcccatcacctgagcagtgcacattgtacccaatgtctagtctttcatccctgtcttatcacactcagacaggtggaggtgctggccttttgaaggtggctctcagcagagtcaaacaccccattcctggagtctggtgagctgggccacawcctctctgctgcttttgagaatgtgggggatgattagggctcagtggtagaaacccagttcgtctggcaaaagccagaaaggaaatgtcttggctttctctactgaaaccccagcc

SEQ ID NO: 28776 - DNA, 629 bp, Homo sapiens
tttagatgctgtttgagagcctgcttacctaatgtttatgtacctggactctgaagccagactacctcggtgcaaagctctgccccaccacgtrctagctttgtgagactgggcaatttccttgtgccttaaaccttccatgcctctgtttacttcatctgttaaatgggaataaggcttttgatctcttttgtttgttaataggtttcaatgagtcaatgcctacagttcttagggcagtacccagcacacagtaaatgctacacaagtattcactcttgtgattatgttccctgcatcgtttcattccctgactgaagacgggaaactattttttaagagttatctcattatcccacagtatggtgctgatattcttggtttggattggaaatgagagacagggtcccttctccctacaatggtcaagttgcctccaacaagtggagagagaattctgtcccaggacagcaactgtgcaccagtgcagaaatctacttaaaacttcctttctcccattcggatgaaaagaaatacattcctccctaatttaaggagacacatacccctcagaagaacaaataaacaggcttgctaaacaagaactctcaactagagatttgtggctg

SEQ ID NO: 28777 - DNA, 629 bp, Homo sapiens
tttagatgctgtttgagagcctgcttacctaatgtttatgtacctggactctgaagccagactacctcggtgcaaagctctgccccaccacgtgctagctttgtgagactgggcaatttccttgtkccttaaaccttccatgcctctgtttacttcatctgttaaatgggaataaggcttttgatctcttttgtttgttaataggtttcaatgagtcaatgcctacagttcttagggcagtacccagcacacagtaaatgctacacaagtattcactcttgtgattatgttccctgcatcgtttcattccctgactgaagacgggaaactattttttaagagttatctcattatcccacagtatggtgctgatattcttggtttggattggaaatgagagacagggtcccttctccctacaatggtcaagttgcctccaacaagtggagagagaattctgtcccaggacagcaactgtgcaccagtgcagaaatctacttaaaacttcctttctcccattcggatgaaaagaaatacattcctccctaatttaaggagacacatacccctcagaagaacaaataaacaggcttgctaaacaagaactctcaactagagatttgtggctg

SEQ ID NO: 28778 - DNA, 671 bp, Homo sapiens
cttcacccccaggcctcagggaccctcctgtggctcccagttactctccagccatccccaggttcctgcgggagtcagccccatgcacccaggagtcccccagagactcacaggtctcgggagaatatgagcggtcccccagccctgactcctcaagattcatgcctgcctcacccagcttctccctctcccctcccagaaactcagacccaaggggcagctcctcaccagggatgtggaagtcctctacatcatcccgcagggcttcascactctcacatccatcatcaacagaattccacaactttacgtttccctttcctaaccaagcaggacagtcactcatgtcattgtgttctcccgtgtcctcctctggagattcttcacagtcacctcattcatcaataatgtaccatatgttcttactgccatcatccagcagctcacccccagccacccatgactctcctgtctgtcccagctactctccaactacgcccagatttcagcgggagtctgtaccccacaccccagaaacacctacaaactcacagacctcagtgagatcctcgccagtctctctcacgtcttcacccccagcccttacggaccctccagtctgtcccagctactctccaaccacgcccacatttcagcgcgggtcagttcca

SEQ ID NO: 28779 - DNA, 671 bp, Homo sapiens
cttcacccccaggcctcagggaccctcctgtggctcccagttactctccagccatccccaggttcctgcgggagtcagccccatgcacccaggagtcccccagagactcacaggtctcgggagaatatgagcggtcccccagccctgactcctcaagattcatgcctgcctcacccagcttctccctctcccctcccagaaactcagacccaaggggcagctcctcaccagggatgtggaagtcctctacatcatcccgcagggcttcaccwctctcacatccatcatcaacagaattccacaactttacgtttccctttcctaaccaagcaggacagtcactcatgtcattgtgttctcccgtgtcctcctctggagattcttcacagtcacctcattcatcaataatgtaccatatgttcttactgccatcatccagcagctcacccccagccacccatgactctcctgtctgtcccagctactctccaactacgcccagatttcagcgggagtctgtaccccacaccccagaaacacctacaaactcacagacctcagtgagatcctcgccagtctctctcacgtcttcacccccagcccttacggaccctccagtctgtcccagctactctccaaccacgcccacatttcagcgcgggtcagttcca

SEQ ID NO: 28780 - DNA, 671 bp, Homo sapiens
cttcacccccaggcctcagggaccctcctgtggctcccagttactctccagccatccccaggttcctgcgggagtcagccccatgcacccaggagtcccccagagactcacaggtctcgggagaatatgagcggtcccccagccctgactcctcaagattcatgcctgcctcacccagcttctccctctcccctcccagaaactcagacccaaggggcagctcctcaccagggatgtggaagtcctctacatcatcccgcagggcttcaccactctcacatccrtcatcaacagaattccacaactttacgtttccctttcctaaccaagcaggacagtcactcatgtcattgtgttctcccgtgtcctcctctggagattcttcacagtcacctcattcatcaataatgtaccatatgttcttactgccatcatccagcagctcacccccagccacccatgactctcctgtctgtcccagctactctccaactacgcccagatttcagcgggagtctgtaccccacaccccagaaacacctacaaactcacagacctcagtgagatcctcgccagtctctctcacgtcttcacccccagcccttacggaccctccagtctgtcccagctactctccaaccacgcccacatttcagcgcgggtcagttcca

SEQ ID NO: 28781 - DNA, 671 bp, Homo sapiens
cttcacccccaggcctcagggaccctcctgtggctcccagttactctccagccatccccaggttcctgcgggagtcagccccatgcacccaggagtcccccagagactcacaggtctcgggagaatatgagcggtcccccagccctgactcctcaagattcatgcctgcctcacccagcttctccctctcccctcccagaaactcagacccaaggggcagctcctcaccagggatgtggaagtcctctacatcatcccgcagggcttcaccactctcacatccatcatcaacagaattccacaactttacgtttccctttcctaaccaagcaggacagtcactcatgtcattgtgttctcccgtgwcctcctctggagattcttcacagtcacctcattcatcaataatgtaccatatgttcttactgccatcatccagcagctcacccccagccacccatgactctcctgtctgtcccagctactctccaactacgcccagatttcagcgggagtctgtaccccacaccccagaaacacctacaaactcacagacctcagtgagatcctcgccagtctctctcacgtcttcacccccagcccttacggaccctccagtctgtcccagctactctccaaccacgcccacatttcagcgcgggtcagttcca

SEQ ID NO: 28782 - DNA, 671 bp, Homo sapiens
cttcacccccaggcctcagggaccctcctgtggctcccagttactctccagccatccccaggttcctgcgggagtcagccccatgcacccaggagtcccccagagactcacaggtctcgggagaatatgagcggtcccccagccctgactcctcaagattcatgcctgcctcacccagcttctccctctcccctcccagaaactcagacccaaggggcagctcctcaccagggatgtggaagtcctctacatcatcccgcagggcttcaccactctcacatccatcatcaacagaattccacaactttacgtttccctttcctaaccaagcaggacagtcactcatgtcattgtgttctcccgtgtcctcctctggagattcttcacagtcacctcattcatcaataatrtaccatatgttcttactgccatcatccagcagctcacccccagccacccatgactctcctgtctgtcccagctactctccaactacgcccagatttcagcgggagtctgtaccccacaccccagaaacacctacaaactcacagacctcagtgagatcctcgccagtctctctcacgtcttcacccccagcccttacggaccctccagtctgtcccagctactctccaaccacgcccacatttcagcgcgggtcagttcca

SEQ ID NO: 28783 - DNA, 1186 bp, Homo sapiens
tagaaactttgtttacgtgggctatatctgtcaacatttacagtatcagaaattaaaacagaacatttattatttattcttctaaaaacaacaaactcatcacatgttgaacataaataacatattttatggaaaataactatattttccacaaaaatatagaagagtggcattgttttagatttttgcaaatatcttcaatgtttggctaacagaagatagctgaattctcctatctgcttctgcattcaatctgttgcaaccctatattgttttgattgaggtacatgaagacaatccagcctcacacagatctgtagagggacaaggaggagtattttaacagctttttcaaataattgtggatattcctctttgatatcacactaaaactcattaagtgatacttycttaaaggatagttgcaatgtggattctgaaatcacagcataattttactgtatatgtgtaattcctaaacaatgtattctttcttttttgcttacttttgaattttaaaaaatagtattatactgtatatatattcttctgcaacttgctttctgtgctcaacattatgagggtcatccattttaatgactgtaactcaaggtttcttaacctggatgctatgacattttgggctggataatcgtttgttatgaggggctgtgcagtacattgtaggatgtttaacagcatccctggcctttactcattaggtgctagtaacatccctccagttgtaacaactgaaaatgtctccagacactgccaaatgtcccccgggtggaggataaaatcacccctgtttgagaaccactgctgtaactggaatccatttatcttcacagctgttaagcattccattctatgacaatactccatttatttatccagtttcctattgttgggcattcgggttgtttttactttttggctattacaaatcatgctgccataattagttttgagcatgagtttctctagactggaatatatatccaggggtaacatttcagagtcatttcgtatgagatggtcagctttatataatgatattatttagttctttaaaacagatccctattagataccatgagctctcaatgccttcaatcatttatacatttgcttgagttccctcatctctcttgtgctccagaagccatggcagggagcagaa

SEQ ID NO: 28784 - DNA, 1186 bp, Homo sapiens
tagaaactttgtttacgtgggctatatctgtcaacatttacagtatcagaaattaaaacagaacatttattatttattcttctaaaaacaacaaactcatcacatgttgaacataaataacatattttatggaaaataactatattttccacaaaaatatagaagagtggcattgttttagatttttgcaaatatcttcaatgtttggctaacagaagatagctgaattctcctatctgcttctgcattcaatctgttgcaaccctatattgttttgattgaggtacatgaagacaatccagcctcacacagatctgtagagggacaaggaggagtattttaacagctttttcaaataattgtggatattcctctttgatatcacactaaaactcattaagtgatacttccttaaaggatagttgcaatgtggattctgaaatcacagcataattttactgtatatgtgtaattcctaaacaatgtattctttcttttttgcttacttttgaattttaaaaaatagtattatactgtatatatattcttctgcaacttgctttctgtgctcaacattatgagggtcatccattttaatractgtaactcaaggtttcttaacctggatgctatgacattttgggctggataatcgtttgttatgaggggctgtgcagtacattgtaggatgtttaacagcatccctggcctttactcattaggtgctagtaacatccctccagttgtaacaactgaaaatgtctccagacactgccaaatgtcccccgggtggaggataaaatcacccctgtttgagaaccactgctgtaactggaatccatttatcttcacagctgttaagcattccattctatgacaatactccatttatttatccagtttcctattgttgggcattcgggttgtttttactttttggctattacaaatcatgctgccataattagttttgagcatgagtttctctagactggaatatatatccaggggtaacatttcagagtcatttcgtatgagatggtcagctttatataatgatattatttagttctttaaaacagatccctattagataccatgagctctcaatgccttcaatcatttatacatttgcttgagttccctcatctctcttgtgctccagaagccatggcagggagcagaa

SEQ ID NO: 28785 - DNA, 508 bp, Homo sapiens
ctgttctgtttgtgtgtgtatgtgtgtgtgggtttcatttgcactatacttcaatataaaaattatgtgatcataatgttatcatgaaataatatattaatttaaataccactaacttggaatttatgctctttgatacgtgagttgcaattcttatttgaaattataaaggtaaaagagagtgaggtattaaaattataataagtttcaaaatatttttaaaaactttatcatcaatcctttgactacaaaaacatgtaagtaacagatgattcttatcaatttatgaaaactatttttaaaatcttctgagcattagtctgtaagttgacacattgaattagttgttatattatgccaaaacataaaagtgggtgcmtatgtaatacaaatcacactgtaagaagtagctttccctcaagttctgaattaatgaagtttacacatgagcttttctagtagtttttgaaaatttgattcaaaaaatatttagcagacacaggtttta

SEQ ID NO: 28786 - DNA, 573 bp, Homo sapiens
tgtggaaagcatgtgtggctcttttatttccctactgttttactctccctcactccaacttgctaaatatttaaagaaaaatactgaagttactccctgttaactgaaaaatgaatattatcaatagttaaatcatttatctatacttaaggccatctctttgaaatcattgctatttttcttggtctctttctcaccrgcacttccctggctgtgcaggaatacagctggcatgaccccatggtcccatgcggagggcagcttctcatgcctaatctttgggtgtgtgttgggtggcacctcatcaaatctgcttggttttgcttcaaccctggctgttcagtgctgttgatgctgacatccctgaataataaactcttctcagcccacttgagaccaatggctccaccacccgttttagccctccaccaaaatcctcctcagttctcactttgtccaagtccaaaacttactctagtcctaggcttgagtatgccaacagggtagtagaagcttctgtgaaacataacagagctaacatctgtagaatctctactataattatagcaagtc

SEQ ID NO: 28787 - DNA, 984 bp, Homo sapiens
taagtgcttattatgtgccaggcaagtgctgcgctaaaaccttgaagctgcaaagattttactgcctctactatatcctccaccaccacaactaatgaaactgttgctgctgctgttgctaagaaaaatgataataaagatgaaggcaatgattactaacattcgttgagtgcttactttctctcaggcattgtgctaagtgctttactcatataatccttcgagcaaatataggaagtaactactattattatttttgttccattgttgagaaaactgaagcttgttgtccagcatcacattgctcatagctaacacatctagggttaggtatcacagctggggttaagcaagtcatctgggaggactgcaagcagtccagctccagagctacttatgatagagggagcatctctgccctctaggagctcacaatatggagcaggagaacagtacatgactggatgtgatgtgtcaattataatttttaaattaagtgcagtgaatgcacaaagactgacatgctgagtggtcttctagagaagttatggagtcttcatagagcaggtaaattatgacataagtctaataggagttcttagcttattttttatatagtaccttttgtagtctgataaacttttcacagacaatatttttaaatgcatgaaataaaatacacagaaaactatatggaaatatagatatttataaaataaaatttttatgtagaaataattgtttcttcattaatgcattaaataacaagatctcgtgatgactctaataattttcctaactcaaaaaagtaatgaacctaaatgtttttgctatatctacaaaaactgtgacctgttatgaaaatacctaatttctgttggtgacaaagtcatagcttctgctgatgatacagaggcttkcagcctcacaacataatttttaaataaccctaaatattcagttagagggtagcaaaagtaaaca

SEQ ID NO: 28788 - DNA, 1512 bp, Homo sapiens
ccatctgcttcttcttcttccccccctccccgccttgagatggagtcttgctctgtcacccaggctggagtgtagtggcataatctgggctcatccagattatgagcaacctccgcctccttggttcaagctattctgctgcctcagcctcctgagtagctgggattacaggtgtgtgccaccaccaggccccgctaatttttatatttttggtagagacatggggtttcaccatgttggccaggctggtctcaaactcctgacctcaagtgatccgcccccctcagcctcccaaaatgctgggagctacctacttcttttttactgacacagcccatctcctactgtggaggctggacttcacagattctcactgtcccagactcagctgcagcaagctgatctatgactcagatctggccagtaaggcataaggtaaatgtctggaggatttctaaaaagattttcctttgtgataaaaagagagagacaatgtctcgattccttcatgcttttgtcagtgtatgaaaatgtgattttaggatccatggcaaacatcttctgtctaaagatagaaaacaaaaagacattcagagaaaccagtgcaggactctgacatcactaactaactgctaactgaccaacttttaaactggttagctttggatctattatttgcaagaaaataattatcttaattcttcaagacatttttactctgaaagaagcttcactaacataagatccattgaaaggttccagtcaagtggtagatatcccaagttttgtgttttataaagattccaggttgaggtgtaaagtaaagtatgtttctgaataggaaagtgagagacagaaggcaggggraccagtaaggaaacttttgtagtaatcgaggcaaaggtaataaagatctgcacacacattgaaaccttctatgtactacgccaatgaactgcaaatatcagtgtttcttttatgtaacttctttactaggtagtttactttcttcaaatgacttcctttttaaattaagtaataatgtgctagttattcttctaaatacacattaaataagtaaaaatttgtctccacttttggcaatggccaactagcatttagggacaaacaatcctgttgagaataactagtaacctgaatacaaatacttaaaagtcacttgtttgtaaggttggggagctactaaggcagccaggatttgaggggccaaggatcttgaaggaaagggagcactgagaagctgattagaactttcagcggtctcaggtttgataagacagaaagtcagagttcagggctgagcaaacactatgagttttcagtcgggaccactgaagggtcaaaagtataaggttaaccagaaataaaccagctctctcaacagctaaaaccagcatcaaatcagcttcgtatctgttggcaataatgtgcattcccagtagtagcctaactaatattagtttagactcttgtcattttgaagggggggat

SEQ ID NO: 28789 - DNA, 470 bp, Homo sapiens
ctttgagaggaagttgtagaactatgtaaataaaaagaagccattctgaggctaactggaaaaagagaacagtgactttgtatagaactgtttgaaggaagcacatctctacgtaaatcaatctataaagacagttcttagggaagaaaggtaattccatgggtaaaagcttaagattttctgtgtataataacaaggaaataataaagtaagatggcagatggagaacagaacctaagacaagtaagggaaatccaaaacagacatgttctastacctccgactctagctaggggctccctcaacaattaaaataagcaggatttcaaaccttgtattaaaattcctggtgttttacttgaaatcaagtgcacatatcacgaccattcaaatttctgagttatgcccagtctcacgtaggacgagggctcagttcttctcagtgcttttgtcgtcttcatagtgtccca

SEQ ID NO: 28790 - DNA, 962 bp, Homo sapiens
gttcatcagaaagcctctaaactgctccagagaggctgcaacaacctaactcatgctagatgatgaaaatgcacttcgagattactaaacaaaccaacaaacaaacagccatgcccttggagaaaygaaacaatctctcaaacatagacatacctcaggccaggggtcaacttgtacattaaagtgtttgatactttttatgagcaaagatgtttagtggatgttgctcccaagaaagttttcaagaagaccctaaagattatctaagtgggcagaaattataggtgacacctgtttttttcttgacaaagcaatagagtaaagtaggaaagaactggtggttcttttctacagagagattaaagttaaagcacagaggttaaagttaaagcaatttggcacccacaggaagacacttacagacaagatgttctctggcacagacttcattgttggtgaaattataagattacacaaagagcaatactattctttcctatagtggttgcttcttattaatatatatgtatataacacatagtacctgaagttttgtgatgactggttagtaagttttcaaaattcagattaatctattcttaacaatatggacactgatagcctattaggcaagccatttatttggaatttataatcatggaattttcgtactacattaagaatctccatgggtgataatagagcactaaaatagctagcattgcactgatgtttctcactctctacatttgtttaattcctctgccagagacacttacttaacttgtcttggtggatttttgtaatgtgtctttcaaatggaaaaaccgtattcaagcattccagttttatcaagtagcaaaaacacccaggctgttggccagaatttgcatgtttgttactgcagtacatacccagatatctcaggcagaggaataataacaattttccacaatgtcatt

SEQ ID NO: 28791 - DNA, 962 bp, Homo sapiens
gttcatcagaaagcctctaaactgctccagagaggctgcaacaacctaactcatgctagatgatgaaaatgcacttcgagattactaaacaaaccaacaaacaaacagccatgcccttggagaaacgaaacaatctctcaaacatagacatacctcaggccaggggtcaacttgtacattaaagtgtttgatactttttaygagcaaagatgtttagtggatgttgctcccaagaaagttttcaagaagaccctaaagattatctaagtgggcagaaattataggtgacacctgtttttttcttgacaaagcaatagagtaaagtaggaaagaactggtggttcttttctacagagagattaaagttaaagcacagaggttaaagttaaagcaatttggcacccacaggaagacacttacagacaagatgttctctggcacagacttcattgttggtgaaattataagattacacaaagagcaatactattctttcctatagtggttgcttcttattaatatatatgtatataacacatagtacctgaagttttgtgatgactggttagtaagttttcaaaattcagattaatctattcttaacaatatggacactgatagcctattaggcaagccatttatttggaatttataatcatggaattttcgtactacattaagaatctccatgggtgataatagagcactaaaatagctagcattgcactgatgtttctcactctctacatttgtttaattcctctgccagagacacttacttaacttgtcttggtggatttttgtaatgtgtctttcaaatggaaaaaccgtattcaagcattccagttttatcaagtagcaaaaacacccaggctgttggccagaatttgcatgtttgttactgcagtacatacccagatatctcaggcagaggaataataacaattttccacaatgtcatt

SEQ ID NO: 28792 - DNA, 563 bp, Homo sapiens
tgamcttaagtgggcacctaagaccaggttttctaaaaaaattaaataaaggagttttttttttaaaaattcaaatgcactgaacaaagaaagaagcaaatggggcatttaccccatcaaccaaatttgccacctttttcctgaaggagcattatttatcatctccatttttacctgtcgtagtaactggagggatggatagaagcagctggcaattggccagtattactgtctctttttgaaacatgatttagatgttcattgatcttcatttgcacatattcattctttaagaaattagtaaaccgtctttaaaacatgttgactgtatataacagaaatctgaaactatgaacaaaacaaaatcttttcatagtgtttgctttctgttcttattatctgaggtggatgacctggcaaccttgttcatcacccatagggctattcaatcagaggtaataaatgacatgagacttactcgtgagtctttctcaactgaaactaacacttacttttgtttgcctcaacttcttttgcgctccgcgtgaaagcgacagaagttg

SEQ ID NO: 28793 - DNA, 563 bp, Homo sapiens
tgaccttaagtgggcacctaagaccaggttttctaaaaaaattaaataaaggagtttttttttwaaaaattcaaatgcactgaacaaagaaagaagcaaatggggcatttaccccatcaaccaaatttgccacctttttcctgaaggagcattatttatcatctccatttttacctgtcgtagtaactggagggatggatagaagcagctggcaattggccagtattactgtctctttttgaaacatgatttagatgttcattgatcttcatttgcacatattcattctttaagaaattagtaaaccgtctttaaaacatgttgactgtatataacagaaatctgaaactatgaacaaaacaaaatcttttcatagtgtttgctttctgttcttattatctgaggtggatgacctggcaaccttgttcatcacccatagggctattcaatcagaggtaataaatgacatgagacttactcgtgagtctttctcaactgaaactaacacttacttttgtttgcctcaacttcttttgcgctccgcgtgaaagcgacagaagttg

SEQ ID NO: 28794 - DNA, 1965 bp, Homo sapiens
gagggctgaattctgcctcaaggtttgggagtcagagacaagcctgatcttgaaatgtgaatggcgtgtctgctagtagatgaagatagaggaatagaggagaagaatgcactcctgaccactgttgctagtctccaaagactgtcaccatcaattcctgccctctgtgtacgtgcatgacattgttcacatcaagcgtcagaggatttcccctgcccctgaatatgggctgatcttactgactcacttttaatagtagaatgtgacagaaatatgccatgtgtcttccaaggttaggttagaaaaggccatgccacttctacctagtctgcctggaatgcttgctctgagaatctagactccatgttatgaggaagtccaggttacatggagatgcccttgtgagcccccagctcccagcccatgtccagcaacagttgccagacatatgaatgaggaaacctttgagatgcctccagtcccagccaccagccgacagcaacctcatgagagaatacaagcaagaacgacctagatgcattgaatctccaccaccatgaagataggagtcacaaaacattgtgactgttgttctaagctgcaatgttttggggtgattttccatacagtaacagataactagaacacagaaacaagaggaagcctatgtaacagcacagagatgctaagcaacagctagaccttggatgttgcaggttcactgagattgaggaaggcaatagaaggaaggaatggccaagcagcaggatcaggggcaggatgtggctgatcactgaggccatacccaagggtgaggatcctaccctatgggcaatacggaagccatagaagacatcttgtggggaggggaggctaaaataatcagatctgaggaaatccccctgacagcagagggtagaaggtttgggaatgtagagaacactgccttcatcccagcatcctcatggggacactgaactaaggcaagcacagtgaaggtaaggggtggagaatagagaatagatttaaacatgctaagaaaaacaatctattggatttggtgactgtctggatttgggattgagaggaaggaggaaccaaagaaatctcattcactcataaactctgatggagggcctactattattaagtaccaatgtgcttctaggctttgaggataaagccgtaaataagacattctgggccatcatgagcttatattctagtgagaaataaagataatgaatggatttaaggaaatttaaggcttaattaatttccagtttawacccttcctattaatctgtctccttatttatcatgcagtatagaggagacatgaacaactttccataaggtaaaacaaatgccttagttttgtattctgaaaatgatggactgacgcagattatttagcctgagagttcagtttccaagggctcgcttttcaatactgttagactgaacatggaaatgcagacatatggggtcaaaggagcgccttgggctatgtattgtgtctttggtaccagagactagtggcagagagtaaaaagaagaataaaaaatatatttcagtcagggaggaagtggttctcattcatttttctacaaacatttgttaattcaacaaatatccactgtactgaccactaggaacgctaacggtgaaaaagagaaagaaaacccctcagtttatggggcttacattgcactagtgaaaacagatactaaacaggtaaagaaataaattaacaccagtgcattaacttcctattgctgctgtcacagatgacaacaagctgagtgacttaaaataccttaagaatattttcttacagttctggaggtcagaagtctaaaagagcatcttatgggttaagtcaaggtgtcaatggcacagtgttctgtctgagaatccatttccttgcctcttccattttccagaagccacgtgccttcatg

SEQ ID NO: 28795 - DNA, 1959 bp, Homo sapiens
tttctgcttcaggaggttttatttataccagcaaccccaagggtctctccatccactcattgtttctcacagcctcagttagcatgctatgttaagagtacacatttacmtaattggctattcctgattggaatagatgtattttaacccattttgggaagcatgcaataaaaaactcgcattgtagatttttggaagcctaattgtttctttttttctttcaaattttctctctttctaaaaaaattcctgttgcttcttcagtcttgatgattttttttcttgtttagttaatgtggttatattctctatgaaactattatagatttaccctttatcttattgccaaggagaatgtgtaattaaatccttgatttaatatatagattttgtgttcaaggaatggcatgggaaaatttaatgaagtcattttagtgaagcaattagcagtcattttgtatgtgaagcttaattgggaaaattgggggtgactgtagaaataagatgatgtatggaaacctaaatgctcactttctctttttctttttgcgttacctattactgcatcacctacattgctcttactagaatgatttatgtatagttctccttgagaaaaagtaggtaccatagaccatatgttttcataacaatttttttgagtgtttaagttagaatcaccacaaagatgtacttgagatggcattctagattgttaatgtgaaaaagatgtgtcaagagtcatatataagatgaagatttcaaatgataggtgtttagtttctatgtagagcttttgctgccctccacaactacatcaaaagatatatttcaagtccccttggtcagctcttctgaggagattttacacaaaagccccttaattggctgtcagtgagtagcacctagctcttttcctgtccataagatgtgggagaaaaaaaagagagacataaactcaacaatataatattgttggaaattatcttatagacacaagctttgattccacatctgcagacttgtgactagagggcaaggatccccctccccttcctttcaccattactctaaagctggtctcaattcaagataaaaagaaagttctaaactttaagattattttaatatcaaagggagatgatgaaaacggcatttccatccaaattataagcttatgttttctttttaaattaaatatgcttaaaaagccaatctccaaattttagcacagatgctcacaaagaatagaggcaatggttatttagccaagggggttaataattaagtgttttattaagctggcctaatttacattttaattcaaaaagcatattataaattaaaaggaaaaagcgtgtttctaaaaaaatgtcaaaaatcaaatatcaaaataaagatcaatcctttgaatttggttcaaaaatttttgagatgagtaagatatagtaagaggactgtgtgataggaacatatttctgaaatccttatccaatttttttctttaaatattttctattttctctcctagctaggagagataattttgatagatagctggaactcgttgtttcctagattttttttcagtttaaaattcctaagacccaagttgtaagaaaaatagatggcatggatttggagagaatggaattttctttggaagacagaaaacatctttttgggctaagaaagagaaagactctgcaacctggacagagggaccctgagcactgcttcttgggcagtgccacgtaggtaatagaacaccagatggatctggcaggcactagaagagagcttgaaatctgttatggctgtattccattaagatcctggaccactacttctgcacagaagcagaagaatggttcccatgctctggagtagagcttcttcagaagtagtgaagacacagttctaaaaagccaagcagacagcaaagaggcctgtcttcag

SEQ ID NO: 28796 - DNA, 1959 bp, Homo sapiens
tttctgcttcaggaggttttatttataccagcaaccccaagggtctctccatccactcattgtttctcacagcctcagttagcatgctatgttaagagtacacatttacataattggctattcctgattggaatagatgtattttaacccattttgggaagcatgcaataaaaaactcgcattgtagatttttggaagcctaattgtttctttttttctttcaaattttctctctttctaaaaaaattcctgttgcttcttcagtcttgatgattttttttcttgtttagttaatgtggttatattctctatgaaactattatagatttaccctttatcttattgccaaggagaatgtgtaattaaatccttgatttaatatatagattttgtgttcaaggaatggcatgggaaaatttaatgaagtcattttagtgaagcaattagcagtcattttgtatgtgaagcttaattgggaaaattgggggtgactgtagaaataagatgatgtatggaaacctaaatkctcactttctctttttctttttgcgttacctattactgcatcacctacattgctcttactagaatgatttatgtatagttctccttgagaaaaagtaggtaccatagaccatatgttttcataacaatttttttgagtgtttaagttagaatcaccacaaagatgtacttgagatggcattctagattgttaatgtgaaaaagatgtgtcaagagtcatatataagatgaagatttcaaatgataggtgtttagtttctatgtagagcttttgctgccctccacaactacatcaaaagatatatttcaagtccccttggtcagctcttctgaggagattttacacaaaagccccttaattggctgtcagtgagtagcacctagctcttttcctgtccataagatgtgggagaaaaaaaagagagacataaactcaacaatataatattgttggaaattatcttatagacacaagctttgattccacatctgcagacttgtgactagagggcaaggatccccctccccttcctttcaccattactctaaagctggtctcaattcaagataaaaagaaagttctaaactttaagattattttaatatcaaagggagatgatgaaaacggcatttccatccaaattataagcttatgttttctttttaaattaaatatgcttaaaaagccaatctccaaattttagcacagatgctcacaaagaatagaggcaatggttatttagccaagggggttaataattaagtgttttattaagctggcctaatttacattttaattcaaaaagcatattataaattaaaaggaaaaagcgtgtttctaaaaaaatgtcaaaaatcaaatatcaaaataaagatcaatcctttgaatttggttcaaaaatttttgagatgagtaagatatagtaagaggactgtgtgataggaacatatttctgaaatccttatccaatttttttctttaaatattttctattttctctcctagctaggagagataattttgatagatagctggaactcgttgtttcctagattttttttcagtttaaaattcctaagacccaagttgtaagaaaaatagatggcatggatttggagagaatggaattttctttggaagacagaaaacatctttttgggctaagaaagagaaagactctgcaacctggacagagggaccctgagcactgcttcttgggcagtgccacgtaggtaatagaacaccagatggatctggcaggcactagaagagagcttgaaatctgttatggctgtattccattaagatcctggaccactacttctgcacagaagcagaagaatggttcccatgctctggagtagagcttcttcagaagtagtgaagacacagttctaaaaagccaagcagacagcaaagaggcctgtcttcag

SEQ ID NO: 28797 - DNA, 1959 bp, Homo sapiens
tttctgcttcaggaggttttatttataccagcaaccccaagggtctctccatccactcattgtttctcacagcctcagttagcatgctatgttaagagtacacatttacataattggctattcctgattggaatagatgtattttaacccattttgggaagcatgcaataaaaaactcgcattgtagatttttggaagcctaattgtttctttttttctttcaaattttctctctttctaaaaaaattcctgttgcttcttcagtcttgatgattttttttcttgtttagttaatgtggttatattctctatgaaactattatagatttaccctttatcttattgccaaggagaatgtgtaattaaatccttgatttaatatatagattttgtgttcaaggaatggcatgggaaaatttaatgaagtcattttagtgaagcaattagcagtcattttgtatgtgaagcttaattgggaaaattgggggtgactgtagaaataagatgatgtatggaaacctaaatgctcactttctctttttctttttgcgttacctattactgcatcacctacattgctcttactagaatgatttatgtatagttctccttgagaaaaagtaggtaccatagaccatatgttttcataacaatttttttgagtgtttaagttagaatcaccacaaagatgtacttgagatggcattctagattgttaatgtgaaaaagatgtgtcaagagtcatatataagatgaagatttcaaatgataggtgtttagtttctatgtagagcttttgctgccctccacaactacatcaaaagatatatttcaagtccccttggtcagctcttctgaggagattttacacaaaagccccttaattggctgtcagtgagtagcacctagytcttttcctgtccataagatgtgggagaaaaaaaagagagacataaactcaacaatataatattgttggaaattatcttatagacacaagctttgattccacatctgcagacttgtgactagagggcaaggatccccctccccttcctttcaccattactctaaagctggtctcaattcaagataaaaagaaagttctaaactttaagattattttaatatcaaagggagatgatgaaaacggcatttccatccaaattataagcttatgttttctttttaaattaaatatgcttaaaaagccaatctccaaattttagcacagatgctcacaaagaatagaggcaatggttatttagccaagggggttaataattaagtgttttattaagctggcctaatttacattttaattcaaaaagcatattataaattaaaaggaaaaagcgtgtttctaaaaaaatgtcaaaaatcaaatatcaaaataaagatcaatcctttgaatttggttcaaaaatttttgagatgagtaagatatagtaagaggactgtgtgataggaacatatttctgaaatccttatccaatttttttctttaaatattttctattttctctcctagctaggagagataattttgatagatagctggaactcgttgtttcctagattttttttcagtttaaaattcctaagacccaagttgtaagaaaaatagatggcatggatttggagagaatggaattttctttggaagacagaaaacatctttttgggctaagaaagagaaagactctgcaacctggacagagggaccctgagcactgcttcttgggcagtgccacgtaggtaatagaacaccagatggatctggcaggcactagaagagagcttgaaatctgttatggctgtattccattaagatcctggaccactacttctgcacagaagcagaagaatggttcccatgctctggagtagagcttcttcagaagtagtgaagacacagttctaaaaagccaagcagacagcaaagaggcctgtcttcag

SEQ ID NO: 28798 - DNA, 510 bp, Homo sapiens
ctagttttgttatagaatattgtgaattttattttttgaagtattatatttagcttctttccatttttgtttccacacaaagggaaaaattatgctaacttcatcttcctggcaagaatttattatttctctcaatactgctggagtttcgaacatgagcctaggtgacctatatcatagcactgggttgttcaacatgagatatatcttgttgcacaytggttcatctaaaaattaaaaagcaatgtcattctagtcttctgttgtggtctttgtgtgagtaatgtatgttatggcttattgcctatggggtgggcctgtacaaccccctctgaaaatatggcatctgtgacaaaaacacggttcatctagtcctttttatggaacaacctggcgtctgaaaatgactgaataaagaacccatggagtacataaaattgttctttttttatgactttaataaagtgatgatatatagcagcttctgtcaacagaaaataaagttagaca

SEQ ID NO: 28799 - DNA, 510 bp, Homo sapiens
ctagttttgttatagaatattgtgaattttattttttgaagtattatatttagcttctttccatttttgtttccacacaaagggaaaaattatgctaacttcatcttcctggcaagaatttattatttctctcaatactgctggagtttcgaacatgagcctaggtgacctatatcatagcactgggttgttcaacatgagatatatcttgttgcacactggttcatctaaaaattaaaaagcaatgtcattctagtcttctgttgtggtctttgtgtgagtaatgtatgttatggcttattgcctatggggtgggcctgtacaaccccctctgaaaatatggcatctgtgacaaaaacacggttcatctagtcctttttatggaacaacctggcgtctgaaaatgactgaataaagaacccatggagtacayaaaattgttctttttttatgactttaataaagtgatgatatatagcagcttctgtcaacagaaaataaagttagaca

SEQ ID NO: 28800 - DNA, 633 bp, Homo sapiens
tgagttggccaaggacagctttgagggtcagcagcaygcactaggaaagcctacacaagaggctgcaggccttgcttctggtcctggttctgccactaaccagctataaccttgggtgagtcacctcttttcctgagacaggtcctcctcatctgtgaaatgaagatgtattcccacgttccagcttctgagtttttctagtacccctcaagtggagagaaataatgctatgccgccagggggaccgggagagtttctagaattttatcttaaaaattatacttgacttcacaatgtatccacatcagctttgaaatacaatgctttgaaccacctgttaaattccttaacttgttctccccaaacctttgtgtcaagtttctccttggatgccccatgcttacggcaaggctctgagctggtccagcacatacactctggagaaaccttccggctccaagaatgcacatacagaagcacccctgcttgcaagaggagtccacagagcctgtctcatacaaactcacctgtttatatgaaagccattcatagggttggtctggtttccgagagcctaaacaagggccattatctaaaaaaagagaaaaaacaacagatgggctgaacgtacat

SEQ ID NO: 28801 - DNA, 633 bp, Homo sapiens
tgagttggccaaggacagctttgagggtcagcagcatgcactaggaaagcctacacaagaggctgcaggccttgcttctggtcctggttctgccactaaccagctataaccttgggtgagtcacctcttttcctgagacaggtcctcctcatctgtgaaatgaagatgtattcccacgttccagcttctgagtttttctagtacccctcaagtggagagaaataatgctatgccgccagggggaccgggagartttctagaattttatcttaaaaattatacttgacttcacaatgtatccacatcagctttgaaatacaatgctttgaaccacctgttaaattccttaacttgttctccccaaacctttgtgtcaagtttctccttggatgccccatgcttacggcaaggctctgagctggtccagcacatacactctggagaaaccttccggctccaagaatgcacatacagaagcacccctgcttgcaagaggagtccacagagcctgtctcatacaaactcacctgtttatatgaaagccattcatagggttggtctggtttccgagagcctaaacaagggccattatctaaaaaaagagaaaaaacaacagatgggctgaacgtacat

SEQ ID NO: 28802 - DNA, 809 bp, Homo sapiens
ggaggaggaggagagagcgaggaggctggctgagagcagcaagcaggaccgggagaatgaggaaggcacgtgtccgccccaggggccggggcacaggccccaggccgctgtgcaggggagcggcggtggtggggtgttccaggttgggtttcctgtcaggaaggagcccatggctagggaggacccctgtccagggccatgaagccgggctggggctgctgcatgtccctgagaaaactggcagtcaggggtggctttctgtgttgggttcaggagagaccctgatcccatggagtaggatggagggctagttcctggaggagacagtggccaacaggattgaccgcctgtgccctgccagaggaggctttagggagaccctcacagcccctgttttcctaccgtgttctcaaggagccaacaaacaagagctagtcattgaaattaaccagtaataatcatagtcacgagccacygagtctcagttgctgcatggttgacttagtggtgtccactttggggtaaaatgacaagtggtgtctagatcctgaagccagaggccacaggtggccctgactgtagcgcaggagccagtgggacagcaggaggaggggccgctcccctgatggcccaggctgtactggcctaggttttgcttgagcccatgtctgagtctgcccagccggccctgcctcttatcagctggtgactgcggttggtccacaccagcccctccctgggacatggggacatcacgagccggtttggggtcaagtgtctctgagccccaggcccagccagaactgagt

SEQ ID NO: 28803 - DNA, 594 bp, Homo sapiens
tggggatttacttgtaagtctgcttgaagatgatgaaatatactatatggtctctcattcttttaaatcagctggcttttgacagtttcccaacttatatccccatcaacacttacttcctttcttacaactcagatttcattatttttttaaatggcatggacatattctagtgtatttaccaagaaaaaaaatttaaaatatcaaacatgatatccatttagcttttaggtacgctaggtraatgtccttacagaagtagtttaaaaacttttcttccataaaatagaaactatatttacaccaaatatcacagctcagaatcatactcttgctttttacacatgaccagtgctcagccactgtagacactacctgatttttcgtgatattcgggctggtagcttttatctcaccttctttctctctactttcttctttcttttctatttcttccccatcacttactcaagagttaaatcttttccattcttaatccatgtgataaataataaattagcataaaaatctttaaaatgcagatttgatataataggggaaatgaaaggcaaattctaatgaaaacttcccaga

SEQ ID NO: 28804 - DNA, 594 bp, Homo sapiens
tggggatttacttgtaagtctgcttgaagatgatgaaatatactatatggtctctcattcttttaaatcagctggcttttgacagtttcccaacttatatccccatcaacacttacttcctttcttacaactcagatttcattatttttttaaatggcatggacatattctagtgtatttaccaagaaaaaaaatttaaaatatcaaacatgatatccatttagcttttaggtacgctaggtaaatgtccttacagaagtagtttaaaaacttttcttccataaaatagaaactatatttacaccaaatatcacagctcagaatcatactcttgctttttacacatgaccagtgctcagccactgtagacactacctgatttttcstgatattcgggctggtagcttttatctcaccttctttctctctactttcttctttcttttctatttcttccccatcacttactcaagagttaaatcttttccattcttaatccatgtgataaataataaattagcataaaaatctttaaaatgcagatttgatataataggggaaatgaaaggcaaattctaatgaaaacttcccaga

SEQ ID NO: 28805 - DNA, 583 bp, Homo sapiens
tgttgacattttacttgggtcgcaaaacaggccatttcctgtcttctcaaagccctacatttctctcatcactgccctgtaacccagtgagtggaaatatactcagtaaatgccgcaaaggcagcagcctccccctcctaagtgcatgactttttgttaatggccctagacactgattgcgggacctggttctgttcatcattgtcataatcaccatggattattttttttgagtgcycacagggggcatggcactatactctgcataatgtttactgctctatttctgcttccgaatcattagatgttttgttcacactgagcttatctctgattgcaagcaatactgtccactgctgtcagctacctaaagttaaagccttttacactgtgaacatctccttaaggaatctgatgaaaaagtggtataccactttttggctatgtgttttcatcgttaatggatttactcaacacgcctatttgtaggtattcttttctttattatatagctcagcgatgacgttgctgagttcaagctttgccagaaccatcaagatttgaaggaaaaagagagagtcac

SEQ ID NO: 28806 - DNA, 1148 bp, Homo sapiens
atccttgttttctcttcacttttggcttggctcttcctcactgcctttccataatgcttttatgaaagatttaaaattatttttaattaaaaatgtttgtctagctatatatttctgtgacgtggcatgagtgatctgaatagcttcactgaccgttacagaaacaggtgggcttcctctctgttttttaactatgtccaaaaataatgggattttgatgatattaggaacttcagcacctatatgaaatctgcttatctcataaatgagatatctattttgataacctsttaacaagaggacctggcaggtcatagctaccttgtatttcaggtatttgcagagaaggtgcataaaggaggagagttactatgaccaaaggagaaagatgctctaaaatcagctcacggattggcttccatctgggtgttctgctgctttcaacttagtctcctctctctagcattaattgtcacctgttgtttttcctccggtgtccttactttctattcttcactatattatcgtgcctctttggcttgctttctttctctctactcggatttctttctttctgtgcaactaaactcattgtttttctttgtgctgcttgcgatggctttctgatggttactttctgtgtcatttacttagttatttttcctcttcacctgtgatatttgggctattttatactaatctaaatattatttctttcctttagaaatacttttttatgtgtgtgtgggcggtggggagcggggagagaaggtaagagaaaaagactaaaaagatgtccttctacaggaaaataatatccctttctatgagctgcttctactttcttttacttcaagatatccccatttatatcaactcacccacaacaaaatccattaaaaggtttagttgacttgctagcacatcattaaacatccatttcagttatgtgtgtactatcactacatgtacataattattgctagctacagtgctagctagctggatttattcttcctaacaaaactccttattctgtttcctataatgtcagtagcagctacacacccaatcctcatagttgccaacagcaaccatttctgatttcctgaccctcccttacaaacggcaacaacaaaaaaagaata

SEQ ID NO: 28807 - DNA, 1148 bp, Homo sapiens
atccttgttttctcttcacttttggcttggctcttcctcactgcctttccataatgcttttatgaaagatttaaaattatttttaattaaaaatgtttgtctagctatatatttctgtgacgtggcatgagtgatctgaatagcttcactgaccgttacagaaacaggtgggcttcctctctgttttttaactatgtccaaaaataatgggattttgatgatattaggaacttcagcacctatatgaaatctgcttatctcataaatgagatatctattttgataacctcttaacaagaggacctggcaggtcatagctaccttgtatttcaggtatttgcagagaaggtgcataaaggaggagagttactatgaccaaaggagaaagatgctctaaaatcagctcacggattggcttccatctgggtgttctgctgctttcaacttagtctcctctctctagcattaattgtcacctgttgtttttcctccggtgtccttactttctattcttcactatattatcgtgcctctttggcttgctttctttctctctactcggatttctttctttctgtgcaactaaactcattgtttttctttgtgctgcttgcgatggctttctgatggttactttctgtgtcatttacttagttatttttcctcttcacctgtgatatttgggctattttatactaatctaaatattatttctttcctttagaaatacttttttatgtgtgtgtgggcggtggggagcggggagagaaggtaagagaaaaagactaaaaagatgtccttctacaggaaaataatatccctttctatgagctgcttctactttcttttacttcaagatwtccccatttatatcaactcacccacaacaaaatccattaaaaggtttagttgacttgctagcacatcattaaacatccatttcagttatgtgtgtactatcactacatgtacataattattgctagctacagtgctagctagctggatttattcttcctaacaaaactccttattctgtttcctataatgtcagtagcagctacacacccaatcctcatagttgccaacagcaaccatttctgatttcctgaccctcccttacaaacggcaacaacaaaaaaagaata

SEQ ID NO: 28808 - DNA, 526 bp, Homo sapiens
aactcctgacctcgcgggatcctcccacctcagcctcccaaagtgctatgattacaagtatgagccaccacactcagccaatctccctatttcaaagtcagttaattagcaaccttagttctgcttataatctaaattcccccttgccatgtagcatagcaaagtcatagcatctgaggataaraatgtgtacgtctccaggagccattattttgcttaccacagactccaagctctgtgaggacagaaattatatctcacttttttttaagatggagtcttgctctgtcgcccaggctgaagtgcagtggagcgatctcagctcactacaacctccacctcccaggttcaagcaattctcctgcctcagcctcccaagaagatgggattacaggtgtgcaccaccatgcctggctaacttttgtatttttagtagaggcagggtttcaccattttggccagactagtctcgacctcctgacctcaagtgatccacctgccttggcctcccaaagtgccggcatta

SEQ ID NO: 28809 - DNA, 638 bp, Homo sapiens
gaattaaaactaaaactttagttttatattttacatgttcaacagtagcacacagtgagtatctaccacatcagacaaaaatagaatacttttatcatcacagaaagttctattagtcagtgctgccaaagtagtcaaagcgatttgaaattatcattcaaattacccctcctttcaggtttcttaaagctaacattttatttaaatcttacttttggttaggtactcttcactttgtatctccacttaattttcagaactgccctgcctgtgagataaatgatataattcccattttacagatgaggaaactattaataaaattgagggaggttacacaaatcacccaaggtcacatacctaggattcaacaccaggtctgccaagtccaaagctcttgttctaagtaaactataagaattctgaaatttatatctactggtccaagatatgtcagaggcasaggttgtagaacaaacccacacagaagcccctcatatgtgtcctttgggtgaaaacatgacagaatgaggaagaaaaggaattaacatggattgagagctgctactgtgccacaaactatgctacatgtgttatcacaatcttcgcaaaaagtccatataatgtaaacccagaac

SEQ ID NO: 28810 - DNA, 1150 bp, Homo sapiens
ctaccttgaatctctttggaataaagtaagacctaaacaaagacgataaaacagactggaataaggtgtcatagaaagcatcagatatgttatatgcaagtaattctggaaaaaaagcagaatttttagccaagagaaggaagatgaaaagaagattcgggtaaacatattataggcaaaagaaagagcgtgagcaaaggcatggcagcacaaaggactgaagtgggtctttttttccaaagcactgggcaggcaagggcagagtgctcagggcaagagggagtaagcctggaaaaggagtggggtccaatcatgattcccttagtgggccaggctaatgagcccaaaagttattctgcatctaagaagagctgctgccagggtaagcaggacactgatgaaacagtgctcagccacagtgtatacgcattgggtggaagtttcatataaagcaattttttaataatagttaaatggatgcagttttgagtgacatgctatttttacgcgtattagaatagacttaagatgatcactcgtaccttgtctttcattcattcacctacaacacagacgccaaaatattccacgtgcctccccacatctgtttccatccttctccaagctgccgtgtccccgccaaggcaatcttcatggactgtagaccaaattcatgtgctcccttgctgtcttggcttccagctaggttagggcaatgaggggagggcaggaaattggaaggcaagatgacagtgaggtcaggacattttcctctcactttctctgctggattggctcccactgcaggttggttttttcctctactgcaggccacagctccagtcatgtgyttctcttatcagcttttcctcccagttccggccttctccatgatttcctccctcaccccttcaccaaggggtggaagtgcttctggctgttaccagcctacaggaccacctgaccttttgtcgctttgcctaaactctgtccacaccttggaaaatggccccgtattaaatcttctttaattgtccagtttaagtgtcctttctgtttctgaagggatgtcaactgatacacatttctctcacacttcctatgagccaggaactcttctcagccctgagaaatagtactgaagacgaca

SEQ ID NO: 28811 - DNA, 1150 bp, Homo sapiens
ctaccttgaatctctttggaataaagtaagacctaaacaaagacgataaaacagactggaataaggtgtcatagaaagcatcagatatgttatatgcaagtaattctggaaaaaaagcagaatttttagccaagagaaggaagatgaaaagaagattcgggtaaacatattataggcaaaagaaagagcgtgagcaaaggcatggcagcacaaaggactgaagtgggtctttttttccaaagcactgggcaggcaagggcagagtgctcagggcaagagggagtaagcctggaaaaggagtggggtccaatcatgattcccttagtgggccaggctaatgagcccaaaagttattctgcatctaagaagagctgctgccagggtaagcaggacactgatgaaacagtgctcagccacagtgtatacgcattgggtggaagtttcatataaagcaattttttaataatagttaaatggatgcagttttgagtgacatgctatttttacgcgtattagaatagacttaagatgatcactcgtaccttgtctttcattcattcacctacaacacagacgccaaaatattccacgtgcctccccacatctgtttccatccttctccaagctgccgtgtccccgccaaggcaatcttcatggactgtagaccaaattcatgtgctcccttgctgtcttggcttccagctaggttagggcaatgaggggagggcaggaaattggaaggcaagatgacagtgaggtcaggacattttcctctcactttctctgctggattggctcccactgcaggttggttttttcctctactgcaggccacagctccagtcatgtgtttctcttatcagcttttcctcccagttccggccttctccatgatttcctccctcaccccttcaccaaggggtggaagtgcttctggctgttaccagcctacaggaccacctgaccttttgtcgctttgcctaaactctgtccacaccttggaaaatggccccstattaaatcttctttaattgtccagtttaagtgtcctttctgtttctgaagggatgtcaactgatacacatttctctcacacttcctatgagccaggaactcttctcagccctgagaaatagtactgaagacgaca

SEQ ID NO: 28812 - DNA, 478 bp, Homo sapiens
taaggttatcgatagtcacaaggaaaagcatgcaaaagagaacaggatagttcaaaactggctttggtagaaagaaatccataataaaaaaggaaaacattccaaccattttattttttctcagtcaacaaatgaacartgtaaaacaaaccatagctttgcggctgaagcattatatcagcaagtttacaaagaggaatttattacgggagtattaatgaaggaggggagttgattagttaaagaagtgactctagattgactccaggaatgacttccaaacccatgctacagaactgggccgccaaggagctgctggctcaggaagctgcctgctgaatgaggagccatagccacagctggctgctccaggaccatggcacagtctgcacaagcaaacgcacatccccatcaccctccctctttccacatacggctgggctctcatatccaagtctcagtgaggtgcatctgactg

SEQ ID NO: 28813 - DNA, 994 bp, Homo sapiens
  misc_feature (1)...(994): n = A,T,C or G
ctnnnnnnnnnnnnnnnnnnnnnnnnnnnnnnnnnnnnnnnnnnnnnnnnnnnnnnnnnnnnnnnnnnnnnnnnnnnnnnnnnnnnnnnnnnnnnnnnnnnngaattcaggcagagagactgagaggaccacacctgtgcagcaaccgtgataattcatgctttgtttcttggccctccctaatctcctaaatctctcccagtcaccaccaagaaagaagactgggagggagaggcaagtctgcactggccgcaaactggattctgagtgatttgagctgcctgtaaagttagacagtgggggcagagagaagcatcagtagtcctggttcccggccccacctctctccaccgagaaaaacgtttctgttaccagattcatattttaccctcacaatgacttagtgtcaacattatcattaaacatgatccrcagagtcactagggattctggtaggaatgcaagcaaagacaatgactccggaaagttgcaagtccagtctgtaaagagactaacttctggcaagggaagaaacacaaatctgaaagttgggaaaagtgtaattatcacataggaagcaaaggttgcttcataaatgctagctcaccgttctcctcatctcctcactactaagcatcctcagctccctgcaacaaggctgctttctcctccccattgctgaaattgctttccccagaatcaaacaagtccttacctaccatatagccaaatccagcaggctattctcagccttcattgtccttgatgcttagcactggtagatgtggttgacggccccaccctcttgatgcctgcagaggtgggctccatgtggcaatgaactgaggattgctcacaatggagcccctagcccagagcagggcctggcacctaataggcaccctgtgaatgctcagtgaaagaaggcatccactgcaaggtcctggggaacaaggaattccaatgtggcccatatattttaagtcatagagga

SEQ ID NO: 28814 - DNA, 1109 bp, Homo sapiens
gatttttattgatagtgataatcttattgagagtaatgacaggtataaaacataagtagttgccctaagcaactaaaatcattacttttccataaccatgtgtatgttttcagctaataaaaaggaaactgttctgaggcccactggaagtatccataactcagatccagattttttttgttttgttttgagagggagtctcactctgtcgcccaggctgcagtgcggtggcacgatcttggctcactgcaacctctgcttcctgtgttcaagcgattctcctgcctcaacctcccaagtagctgggactacagacgcctgctacatttttgtatttttagtagagatggggtttcaccatattggctaggctggtctcgaactcctgaccctgtgatctgcccaccttggcctcccaaastgctgggattacaggcgtgaggccttgtgcctggctttattattttttttttccacaacaaatgatttccagaacctggatattttagcatcctagtctggatatacaagatcccatgggctaggatcagtcactctggactttgggtccctttctttgaaggttaacgttggacagggaagcttcggtcagagtcactagataggaaaccaatggtaaagcagtacccgattctagtaagaaagtgtacttggaggaggttttaggctgtggatttctttttcctttcacgttgaaaagttcacgtgtcctaaagagatgtcctgaataggatgatataaaagtaagtgttttctccccaatatctgtgcaccacatattgaattattattatcattattttttagatggagtctcgctctgttgctcaggctggagtgcagtggtgcgatcttggctcactgcaacctctgcctcccaggttcaagcgattctcctggcttagcctcccgagtagctgggattatatgcactcgccacaatgctcggctaattttgatattcttagcacagatgggatttcaccatgttggccaggctggtctcgaactcctaacttcaagtgatctgcgtgccttggcttcccaaaatgttgggattacacgcgtgaatcccatatatctccgtg

SEQ ID NO: 28815 - DNA, 532 bp, Homo sapiens
tggaaaagtctttcctaccctttggaccaaaggcagtaggaaaggaaatggagttatcagaatccagtggaagtgcgaaccattgaagaggaattgcccagtgggagttgtagctgtggaaggaaatggctattttaagaggctggccagaagaagagcagagaaggaacaagacagaaataccacatcccctttttcctcttgctctcttatctcctgcatgtgaattccattggcctgaatgaagctggcaagyaagagagcacaggagatgccaactgcaaccacaagtcagcctctcaggccacagagcaggcaatggaggggagagatggctgaaggggtgtggtgtggaatatgattaggaaggcaagtgcaacctctaagacagagccaactggatttgagagagagcccagatggacaataacctctttgtctttttgtgggccttaccatcattttactataagaatttatattgctattaatagtttgttttctcatataattctgatagaaaaagtgaaat

SEQ ID NO: 28816 - DNA, 556 bp, Homo sapiens
gatgaacatagatactaaaatccttaacaaaatacttgctagccaaatccaacaacatatcaaaaagataattcactatgatgaagttggagaaayggaaactctaaaaattataatagtaacaaacatttgtttactatttttaagtgcatcatatcaattataagacaaacattagcaacccattaaaggattgttattttaaaatatactttagcaaaaaatttgaagcttacacagattagaaaatatgctcaatgtcccctagctagtgattagcaaacctggtacttgaacccaaagtcctgagttcagggcccaactcttaaccaccctgctgtcaacatctgggctgggtgcaggggctcatgcctgtaatcccagcactttgggaggctcaggcgggcagatcacctgaggtcaggagttcaagagcagcctggccagcatggtgaaaccccgtctctactaaaaatacaaaaattagctggacgtggtggtgcacacctacaatctcagctactcaggaggctgaagcaggagaattgcttgcttg

SEQ ID NO: 28817 - DNA, 556 bp, Homo sapiens
gatgaacatagatactaaaatccttaacaaaatacttgctagccaaatccaacaacatatcaaaaagataattcactatgatgaagttggagaaatggaaactctaaaaattwtaatagtaacaaacatttgtttactatttttaagtgcatcatatcaattataagacaaacattagcaacccattaaaggattgttattttaaaatatactttagcaaaaaatttgaagcttacacagattagaaaatatgctcaatgtcccctagctagtgattagcaaacctggtacttgaacccaaagtcctgagttcagggcccaactcttaaccaccctgctgtcaacatctgggctgggtgcaggggctcatgcctgtaatcccagcactttgggaggctcaggcgggcagatcacctgaggtcaggagttcaagagcagcctggccagcatggtgaaaccccgtctctactaaaaatacaaaaattagctggacgtggtggtgcacacctacaatctcagctactcaggaggctgaagcaggagaattgcttgcttg

SEQ ID NO: 28818 - DNA, 515 bp, Homo sapiens
ctgttggttgtcagaaaaatgtaagccaagaaatgattttgttaacaactcatttaaaagatgaggaaagtggaaaacaaagagaagggacaagttcctgcaggcaattagagatagttggggataggaggggatcggaaggatctgcctgactatrggttttattttccaggagaacactcaatttgaaaacgtgcagcaacctctgggttactagtggcaccataagtactcaaaatgtttataatagtacagaccaggggaaagatacaattggggtttcggctagaaagtttgactgacagctacaatagctccctggcttttagcatgagccaccctttctactgccatgtacaccaggctttgaaggacagatgggggaaaattccaggaaagctactagtttgaaattatgcccattatcagcttcagtgatgaattcaactttctctattgtttggatctcaatcaaatattgagcttaggttataccctccttgaagtcataaatt

SEQ ID NO: 28819 - DNA, 515 bp, Homo sapiens
ctgttggttgtcagaaaaatgtaagccaagaaatgattttgttaacaactcatttaaaagatgaggaaagtggaaaacaaagagaagggacaagttcctgcaggcaattagagatagttggggataggaggggatcggaaggatctgcctgactatgggttttattttccaggagaacactcaatttgaaaacgtgcagcaacctctgggttactagtggcaccataagtactcaaaatgtttataatagtacagaccaggggaaagatacaattggggtttcggctagaaagtttgactgacagctacaatagctccctggcttttagcatgagccaccctttctactgccatgtacaccaggytttgaaggacagatgggggaaaattccaggaaagctactagtttgaaattatgcccattatcagcttcagtgatgaattcaactttctctattgtttggatctcaatcaaatattgagcttaggttataccctccttgaagtcataaatt

SEQ ID NO: 28820 - DNA, 756 bp, Homo sapiens
gctttgaagcaataaagtacatttttacagtaattgaattatctgactcaaaggaaggtccacagmagcaaggatgtcagggattgctttgcgtgtgtgcagggtcatcataaatccctctgaacttcgcctttagtaaacataaaccccatggtattttcatcgcttcccttccaagccggaatggtcctgattatttagaaattctcagaatccttgtgtccttgccacagatgaggagctgttgttgtcattagagcatgacatgtttccatcacaccttgtgctgtggctgctggggccagtgatgcctgagctgcagctgtgtgggcaccagcttccgtgggaaggcttggccatggtgggacgccccctccgcacttccttgaattcattcagtgaattcattccctgtccttcagtttacagggaacaatcattagaacgtgctattatgcctctggagagggctggctgttgtctccctattctttcagttatatacttacggactccaaatatcatttatttatgccaacagctgtctccttatcaacagcaggcttagttgaaactgctcacacctatactttccagcattcttggcaacaatctaatcttaggcacagttgaactctgcgctgtttctctggcatcaatatttatgggattatgtttctttctctataaacagaattcccagtagagctgtctctttcctgtccgtcttggcctcacatgcgcccatgcgcacac

SEQ ID NO: 28821 - DNA, 2118 bp, Homo sapiens
ggttgtatttctagaaatagaattgctaagtcaagtgatatgtaaatgtaaacatttggtacagatttactgacttatattcccgctagttatatatgacactgcctatttcctcctacctgcaacaatgttgtcattaacgcttttgatcttttacctgagaggtaaaaataatatcccatcattgctttagtcttcatttttcaagttatcctagatgtttccttgcttttcatagactttagaactatttgtatgcttttttggtggatttatttatatccttttgtctatttatctggttgattgtcttttttcattgattccaaagaactatttgcatattaggaaaaatttattaaataaattgaaaatagcttttttttttccagatcattatttctatttggatgctgtttattgtattgctgaccttgcagaatcttttctcctttttatgtgaagacaccaaaaaaataccatttttttctttttgtgacatctaggttttgttcttactttaggaatacctttgccattaaaccaacacattatttaaagaatgtatcagcaacaactgttttcttctactatctttaaagtttcatattttgtgtttatattttaaatccaggtaatattaactttggtgtaaactgtgagagaaggatatgcatttatacaatttctaactggtaaagtgggcgcttttgtaggtgaagattggttagttgtggaacaagggtagtttactgaatatgcttttgtaattttgagttttctaccttgttcatgtaaaatttaccaacattttattaaaagaagctgttatgcagagacattattgactgttatgtaaaaacattaagaaagcagctccaattgaatgtgaccctgcaggaatacaaaccaatgttttcagatcttcttattttccaaaagaagctgaaatttggattttcatgtgaaatcccctgatgtttaaatgtcggcaactaattcagagttagaaaaacaaagcatggtccaaacaaaacacatctgctggccagatggggcccacagggtgccagtttgagacctgtgttttaaacgctttttcttatcctcaaagattcatgtaagtgcctctcctacagccttctgtggcacagtgtgttcagcccctatcgtaacatattttaactgattgttgctggcctaccttctccattatagatgcttgaagagtgtatttatagattttgaagtcctgaggcttaacacagtgtcttgtacctagtagacagtataaatgcttgtcaaatgaataaatagatgaatgaatgaactctgctccaagcagaatctatgtcctgaaaaactggacaaggcaactcaggtcacagaggttacctggtttggactgctccttctcctgcctcctccattaagtccctcagtcaccttcatggtaaattaagtgattgtaccgcatagtgattttgtaaacaggtggccgctacaacgttgtgaatcttggccactagatgtctctctttgcctaaaggacatttggaagtgctggagtcaatgtggggtttgctgaaacaatacgtaagtgaaaaagaatgtcctaatctcaggtcacatcttcagatgtttgtcctcatgaggaagttgagcacggccatgacaccagagaaaaagtgcccagggacggaagcagcttaattttgttctagaagagcttctcatccacaggaaggaccctttgcactctgagtctgttgggtgtgagcctctaatccagcagactcatgagtgttctccagaagccttgcttgtgttatttttctctgatgctataggctggtggagaaatgcatcttactgtaaagggtctggaactctagaatctgcatggtaaaaaggaggattcttgtaagatatagcagattctctattgaggctgtcccgaccctgtagaattcctgcacctcctgtgattgcagggggtgtgttctggtgcctgcagctgtacctttcctatggcctcacgaggatcttttgagcttggagaggtgggcttcttggtgctgtataactcttattttaaacacagayggagtgaagggg

SEQ ID NO: 28822 - DNA, 688 bp, Homo sapiens
  misc_feature (1)...(688): n = A,T,C or G
taaaaacttatacctactatgtgcccatacaaattaaaaacaaaaaattwaaaaaaaagtttgctaagccaggaactgtgacttacacctgtaattacaacactttgggaggctgaagcaggaggatcgctttgagctcaggagttcaataccagcctggacaacatggcaaaaccccgcctctacaaaaaatacaaaaattaacattggtggctcacgcctgtggtccaaactgcttgggagactgaggctggagaatcgcttgagcccgggaagcagaggttgcagcgagatgagataatgccactgcattccagcctgggcgacagagtgagaccctgtctcaacaacaacaacaaaatgttggctgatactaagtgcttggtagttcttctcttcctctaattagctgtccaggtctcaattataacacaatgctaccctacccctctgataaaagcaatntctcataagtcacagtgtccaatgcttgtccttaggtagcttcataatttcaaacccacctctccttatcttaagcccttgttccgagtatgaagagcctgtatcagctttgataagacttttatcatagtagtcagaagaatcgtctcgctgaaatttacagtttatactcaactcttctcttttttactcctcctttcagttaaaaaaattatacttgcaa

SEQ ID NO: 28823 - DNA, 688 bp, Homo sapiens
  misc_feature (1)...(688): n = A,T,C or G
taaaaacttatacctactatgtgcccatacaaattaaaaacaaaaaattaaaaaaaaagtttgctaagccaggaactgtgacttacacctgtaattacaacactttgggaggctgaagcaggaggatcgctttgagctcaggagttcaataccagcctggacaacatggcaaaaccccgcctctacaaaaaatacaaaaattaacattggtggctcacgcctgtggtccaaactgcttgggagactgaggctggagaatcgcttgagcccgggaagcagaggttgcagygagatgagataatgccactgcattccagcctgggcgacagagtgagaccctgtctcaacaacaacaacaaaatgttggctgatactaagtgcttggtagttcttctcttcctctaattagctgtccaggtctcaattataacacaatgctaccctacccctctgataaaagcaatntctcataagtcacagtgtccaatgcttgtccttaggtagcttcataatttcaaacccacctctccttatcttaagcccttgttccgagtatgaagagcctgtatcagctttgataagacttttatcatagtagtcagaagaatcgtctcgctgaaatttacagtttatactcaactcttctcttttttactcctcctttcagttaaaaaaattatacttgcaa

SEQ ID NO: 28824 - DNA, 815 bp, Homo sapiens
ttggtggactgctgaagaatgaagcatgtgcacccactttacttctacactttggcagctgtagaacagagacagtggtggtgcaggatacatccttgtatctgggaattaattcctttccgaggtgtatactacttagctttgtgagtaaaatctacgggcttcagtttcctagtcttgctaaattggaaacatgttaatatctatgattgtagcacatcacaagtaaagataaatgagaaaatgaatgctttggctgggcatggtggctcacgcctctaatcccagcactttgggaggccgaggcaggtagatcgtgaggccaagagattgtgaccattctggccaacatggtgaaaccctgtctctactgaaagtacaaaaattagctgggtgtggtggcrggtgcctatagtcccagctacttgggaggctgaggcaggagactcacttgaacctgggaggcggaggttgcagtgagccaagatcacgccactgcactccagcctggcgacagagcgtcacttcatctcaaaaaaagaaaccaaaacaacaacaacaaaaaaaaaaacaaaaaaaaaaaggacaatgtacgttttgtaaactttaagtctgggagatggctaacattatgggggaagacttggccaagacagcccagaaaccacaaggtgaataacagcacccagaacagaaggtccaccatgaagataaggacttaatctatcaagaaggattaaatgtaaccgtcaagagtaggcttgatggaggagggtgaatctgaatggagccttgagctacagtggggtttacag

SEQ ID NO: 28825 - DNA, 815 bp, Homo sapiens
ttggtggactgctgaagaatgaagcatgtgcacccactttacttctacactttggcagctgtagaacagagacagtggtggtgcaggatacatccttgtatctgggaattaattcctttccgaggtgtatactacttagctttgtgagtaaaatctacgggcttcagtttcctagtcttgctaaattggaaacatgttaatatctatgattgtagcacatcacaagtaaagataaatgagaaaatgaatgctttggctgggcatggtggctcacgcctctaatcccagcactttgggaggccgaggcaggtagatcgtgaggccaagagattgtgaccattctggccaacatggtgaaaccctgtctctactgaaagtacaaaaattagctgggtgtggtggcgggtgcctatagtcccagctacttgggaggctgasgcaggagactcacttgaacctgggaggcggaggttgcagtgagccaagatcacgccactgcactccagcctggcgacagagcgtcacttcatctcaaaaaaagaaaccaaaacaacaacaacaaaaaaaaaaacaaaaaaaaaaaggacaatgtacgttttgtaaactttaagtctgggagatggctaacattatgggggaagacttggccaagacagcccagaaaccacaaggtgaataacagcacccagaacagaaggtccaccatgaagataaggacttaatctatcaagaaggattaaatgtaaccgtcaagagtaggcttgatggaggagggtgaatctgaatggagccttgagctacagtggggtttacag

SEQ ID NO: 28826 - DNA, 1048 bp, Homo sapiens
tgagggtaaaacaaggaacaagatgagaatgccccactcccatatggcacatgtaaaagcataaaagtctatctgaatcatttttgaaacagaaggcccatgacattgcctgctgagtccacattggctcttgtttgtggataccagcacatattaaaattatctgaaatattcagttgtgagccccctcccctgatatggttaggcttcgcgtccccacccagatctcatcttgaattgtaatccccataatccccataatccctatttgtcaaaggagagaccaggtggaggtaattgaatcatggggatggtttcccccatgctgttctcatgatagtgagtgagttctcccaagatcggatggttttataaggggcttcttcccctttgcttagcacttctcctttctgccaccttgtgtagaaggtgccttgcttccccttcaccttccaccatgattgtaagtttcctgaggcctccccagccatgctgaactgtgagtcaattaaayctctttcttttataaattacccagtctcaggcagttctttattacagtatgaaaatggactaatacagtgagaaaaaaaatagctctggagggctgggttacattcaggacatgtactaaatattttaatgcatttttttagcaagcacgtaaaatgtctcccccaaggctttaagctctctttctacttccctaaaggtttccccatcaaaataggaaataaatattgaagctagaaaaggcttgtccccttcaaagtaagtaagggcacgcttcatgacaggcatatctttcttcagacagtgggggaggacacttaattccttcacctaagaaaaaaaaagttacaaaacagcaacctatggaaacaaaaacatggaatcaatgcatctcctgaaataacttccctgtagtcctgagggtggtgttttgtttggcttgttctccttcccacctttttataccccccaaggatccttctcattctgttgtagccagggctcctagagaaggctgtcaacattgaagggccca

SEQ ID NO: 28827 - DNA, 544 bp, Homo sapiens
tgatggactaccttttactagtcactgtaatcctaagatatactcagatactcagttgctggtatatgattgaagaaattaattagaactcttagggaaaacacaaacttaataaactcagaattctcaaatgaactttctctcactaggagtttgattttgtttgtttgttttccatctaaaaactagattcgggtcataaaaacaaagaatttcaacatattcattaaatamagaaggggataaatttaatttcttttgtaagatgacacgtcaacacctttgaactgtctctcagtatttattgatgcccttaatttttcatttacgtatgtccataaccccccaggaaggggtccttaatgacctgtagttaacaggaacttaagttctcattaagaatatgcatatagaagataaaatattatatgtgattgcaagtagtcaagatttccttttcctcttttctgtcttcatacctctctcatatatgaagatagaaaatatatcttcatatatatgtatcttcatgtatatatcttca

SEQ ID NO: 28828 - DNA, 1241 bp, Homo sapiens
gaaatcataattttataaaaagagaccaatcaaaggaaacaacaatttagtgtattttttaaagccacataaaattagctaaccaaaggaaaatattttcagatgttttttaattacaaccttttcccctttttatagtatacacataaaacaaagyaacaaggaaaaattagtaagcaaaaacccagcaggcaaaaaaagaaacatggaaaagggggactgtattactcagggttctctagagggacagaactaatgaaacagacatatatatatataaaggggagtttattaagttttaactcacatgatcacacagtcccacaatagcctgtctgcaggctgaggagcaaggagagccagtctgagttccgaaactgaagaacctggagtccaatgttagagggcaagaagcatccaacatgggagaaagatgtaggctgagaagctaggcctgtctctcttttcacatttttttgcctgcttatattctagctgtgctggcagctgattagattgtgcccacccagattaagggtgggtctgcatttcccaaccccctgactcaaatgttaatctcctttggcaatgccctcacagacacacccaggatcagtactttgtatccttcaatccagtcaagttgatactcagcattaaccatcacactgacaaaattaattgcaagtgaggatccatagaagaatgtatccatggaatcaaagtgcattttattaattatggttaaatattttaatgatgatatacccctcttgcaactctagatgttgaattcatctatgtgtgggggagggagtgtgtacagaatgcattcgaatatgaaaagcgaaactaaaagaaacaaggagaaattgttggagacaatactttttgaactcctaaacatctcagtctctcagaccaaacaagacaaaaataagtactttaaaagattgtccaatatctatgtttgtgctctgtaaaatgaggaattggtatgaaataatttcaagtatccccataagttctaaaattctaatttattaaaggtatttggaagtttttgagtaacctaaaataaagtttctcccaaaagagtcaacattattgcatatgtgttgctgtttcttatctttacaaatgtatttataacactcaccttttgtcatttattaccaggcctacacagccatcagtggtagcccttgatactcaggtacacagaatatatgaacagtccc

SEQ ID NO: 28829 - DNA, 578 bp, Homo sapiens
tgacggcaattgtgagataccaatgaaggaagagatgcagaggttctgggcacgtgggcatcgctgggtatcatctcacacaagcccagaacagtcccataagatgagtatctccattttacagaggaggaaactgaggcttggggaggttgactggaaagcccagatcacactgagatcaggtgttggcgtcaggatgcaaattccttgtgtgtgggtctcaggtcagaaacccccaatctagccctgtctgtcctgccattgttcagcccctcctgtttcccgatggggcgttgctgtctagcacaccygacaattacctttagggctcatgtatgtattatgtgtctctagactagaaagtcatctccctgagggcagggactttacttctctcattgttatatccccagcaactagaactctgcctggtccgtggtaggtgctacagaactatttgctgaatgaatgaatgggaaaatgaaagaggtccctggtaaagaaccaaaggaagtggccctggggcccacggagatggtgccaccgttccaggtcacacggctggcaagggcagagca

SEQ ID NO: 28830 - DNA, 587 bp, Homo sapiens
acctctttgctcttggtcacatataagcaaacctccacgtccttaggaatatgaaagaacctcaggtcacagtgtgggtgcctggtaattggttcaagccctctctaaatttctgaccctttaaacccacaaggtttacatggggaaaattatattattctgaatccttagcaagaaatgtaaaaacaaaacaaaacaaaaaaacaagagctttactgtttgggctagaacttccagtaccatgctgaataaaagtaatggaaatgggcatctttgccttgttcccaatctttacaggaaaagctatcagtttttcaccgctgagtataatgtcagctgtgggcttttcatatatgaaaagatatatatacatatatatacacacatatatatstgtatctctctctatatatatatgaaatatattctactctcattgtgccctcagtagaatgactaaaatgataaaagaccatatatacatagaatatatatattctatatattctatatatattctgtatattctatatatattctgtatatattctatacattctatatatattctatatctatgctatgca

SEQ ID NO: 28831 - DNA, 1587 bp, Homo sapiens
ggccagtgcatggtcactgggggatttgcatggcaggccagctggatggtttctgggggatttgcatgtcgggccagtgcgatggtaactggggatttttcatagcaggccagtttgatggtaactgcagggtttgcatggtgggccagtgcaatggtaactgggggactgggtgattttcagatgcaagaactcttcccatttcttcaaagcgggtactgacatgctgagctgttcatctgcatgactgcaacctctgtgggaagttggggaagccacagacagaggcattttcttttctttctcacaggtctggggtatcgctgccactgtgttactccctccaatgattaagtcctacagaagccaagcccttttgggaatcaggctcagagtgggctgtgtcctcaccttagtagcttcccttgtccaggcccctgacaacagtcatgggtggcggggcctccagtttcagtgagctttggggattttctgtagcgcaccaccttccgctccttaacctgcatgaacagagatgaccatggcccatcagaagatggagaaactagacaggggggcatgtgtgcccccttttccagagcctcacaatgactcagcgtttgggcaagagatggatcccaggactcccaaacattcttccagcctygcacagttcaccagagagtcacagtgactcattctcatcctcaaagtcttttcccactcaggtgtctggtaagaagcctggttagaagctccactgcaggaagaaggacatcttgccatgtgttttgaacacatgttgtcttgttatatgttgtgaacatagatgttttcaattgattttaacaaaacacattatacattccattaagaaaaaaaaacaatcagtgtgtttgctttgctgtctgtgaaagatgtttcaaatgaagtggagtgatctaatttcattgtcggctcctgaagaattcatatagcagagtgaaaacatccatcagtatttggacatgtactccttgtggtttaaaataagggccaagcacgccttttatttggtgatattcaacataaagaaggcgttttctatgtttttgtgatctcattttgctttctttgaagacgaatatcatttttagaacaaaaaagattgtaaaataattatgtcatcagaattcaatgataattcacaggaaaacaggacactgattgtgttggtcaaacagcccatgcgcacggtaagccgagtgtgactttgtttatcaaatgctcatgtggcgagaccgatctctggactctgtcctgggttcccgggctccacccaggctgcatctcccatccccccggtgcacacgctgtgttgctgcatctcccaacccccggtgcacacgctgtgttgctgcatctcacatcccccggtgcacacgctgtgttgctgcatctcccatcccccggtgcacacgctgcgttgctgcatctcgcatccccccggtgcacaccctgtgttgctgcatctcgcatccccctggtgcacacgctgtgttgcagttcttgcctcgtaggagccgtccatggcagctggcaggtgga

SEQ ID NO: 28832 - DNA, 1587 bp, Homo sapiens
ggccagtgcatggtcactgggggatttgcatggcaggccagctggatggtttctgggggatttgcatgtcgggccagtgcgatggtaactggggatttttcatagcaggccagtttgatggtaactgcagggtttgcatggtgggccagtgcaatggtaactgggggactgggtgattttcagatgcaagaactcttcccatttcttcaaagcgggtactgacatgctgagctgttcatctgcatgactgcaacctctgtgggaagttggggaagccacagacagaggcattttcttttctttctcacaggtctggggtatcgctgccactgtgttactccctccaatgattaagtcctacagaagccaagcccttttgggaatcaggctcagagtgggctgtgtcctcaccttagtagcttcccttgtccaggcccctgacaacagtcatgggtggcggggcctccagtttcagtgagctttggggattttctgtagcgcaccaccttccgctccttaacctgcatgaacagagatgaccatggcccatcagaagatggagaaactagacaggggggcatgtgtgcccccttttccagagcctcacaatgactcagcgtttgggcaagagatggatcccaggactcccaaacattcttccagcctcgcacagttcaccagagagtcacagtgactcattctcatcctcaaagtcttttcccactcaggtgtctggtaagaagcctggttagaagctccactgcaggaagaaggacatcttgccaygtgttttgaacacatgttgtcttgttatatgttgtgaacatagatgttttcaattgattttaacaaaacacattatacattccattaagaaaaaaaaacaatcagtgtgtttgctttgctgtctgtgaaagatgtttcaaatgaagtggagtgatctaatttcattgtcggctcctgaagaattcatatagcagagtgaaaacatccatcagtatttggacatgtactccttgtggtttaaaataagggccaagcacgccttttatttggtgatattcaacataaagaaggcgttttctatgtttttgtgatctcattttgctttctttgaagacgaatatcatttttagaacaaaaaagattgtaaaataattatgtcatcagaattcaatgataattcacaggaaaacaggacactgattgtgttggtcaaacagcccatgcgcacggtaagccgagtgtgactttgtttatcaaatgctcatgtggcgagaccgatctctggactctgtcctgggttcccgggctccacccaggctgcatctcccatccccccggtgcacacgctgtgttgctgcatctcccaacccccggtgcacacgctgtgttgctgcatctcacatcccccggtgcacacgctgtgttgctgcatctcccatcccccggtgcacacgctgcgttgctgcatctcgcatccccccggtgcacaccctgtgttgctgcatctcgcatccccctggtgcacacgctgtgttgcagttcttgcctcgtaggagccgtccatggcagctggcaggtgga

SEQ ID NO: 28833 - DNA, 625 bp, Homo sapiens
aaccccatctctactaaaaatacaaaaaaattagcctggtggcaggtgcctgtaatcccagctactcgggaggctaaggcatgagcctctcatttgaacctgggaggcagaggttgcagtgagctgagatcatgccactgcacttcagcctgggcaacagagcaagactgtctcaaaaataaaataaaataaaatgttcactctaaaacgatttgattaacacactgttgacaactgagttatctgctatgaacaatagaaaaaaatgagttaaagaaagaccattgtcttgaactactgctctcagaatggtggtctcaaattgtacagagctcaacctgcaaacactggagctctcatcccctggggggctcttaaatggcctggagggtttccataagtgggcctacagttcaataagcaggcctaaagttcaaagccaattttcagaataaagaaacattctccccaggctccrgacaccttgcaaataggaaagtggacctctgatggtgattcataagcatttcaatctcattctctaagtcttgtgactggccattccataactccaaatgcctttggctttgaaatttcctcccagggtgcctgcctggcatgtaga

SEQ ID NO: 28834 - DNA, 571 bp, Homo sapiens
tgaggtgctattcatgtgtgctactagatgtctcataatgcatasggaagagccagactaggaatatttggttcatactcggcatgactttcaaatgccccaacagattttcatgcaggtaaataaaacaatttgtttatctgagcctgtaactaattcttatttatctataacacaatatattttttgcccaatgttaacacaagcaaaatattttaagctcatctcctcatcttaatcatgggaagattgtactttgtttttgttcaaacttttccaagagttctctacattgtggaaatgtccctacaggcagcaccactcatggcatttgagccaatagcatatacttatatcactggcatttgtagctgatgcaaatacttctcagtaaaaaattgagacaccattaatagtaattgataggaggtcagcagttcgagaacagcctggccaacatggtgaaaccctgcctctactaaaaatacaaaattagctgggcatggtgacacatgcccataatcctagctactctggaggctgaagtaggaggcctgcttgaacctgggaa

SEQ ID NO: 28835 - DNA, 571 bp, Homo sapiens
tgaggtgctattcatgtgtgctactagatgtctcataatgcatacggaagagccagactaggaatatttggttcatactcggcatgactttcaaatgccccaacagattttcatgcaggtaaataaaacaatttgtttatctgagcctrtaactaattcttatttatctataacacaatatattttttgcccaatgttaacacaagcaaaatattttaagctcatctcctcatcttaatcatgggaagattgtactttgtttttgttcaaacttttccaagagttctctacattgtggaaatgtccctacaggcagcaccactcatggcatttgagccaatagcatatacttatatcactggcatttgtagctgatgcaaatacttctcagtaaaaaattgagacaccattaatagtaattgataggaggtcagcagttcgagaacagcctggccaacatggtgaaaccctgcctctactaaaaatacaaaattagctgggcatggtgacacatgcccataatcctagctactctggaggctgaagtaggaggcctgcttgaacctgggaa

SEQ ID NO: 28836 - DNA, 571 bp, Homo sapiens
tgaggtgctattcatgtgtgctactagatgtctcataatgcatacggaagagccagactaggaatatttggttcatactcggcatgactttcaaatgccccaacagattttcatgcaggtaaataaaacaatttgtttatctgagcctgtaactaattcttatttatctataacacaatatattttttgcccaatgttaacacaagcaaaatattttaagctcatctcctcatcttaatcatgggaagattgtactttgtttttgttcaaacttttccaagagttctctacattgtggaaatgtccctacaggcagcaccactcatggcatttgagccaatagcatatacttatatcactggcatttgtagctgatgcaaatacttctcagtaaaaaattgagacaccattaatagtaattgataggaggtcagcagttcgagaacagcctggccaacatggtgaaaccctgcctctrctaaaaatacaaaattagctgggcatggtgacacatgcccataatcctagctactctggaggctgaagtaggaggcctgcttgaacctgggaa

SEQ ID NO: 28837 - DNA, 584 bp, Homo sapiens
tgtcatctgcgtgtcctttatgtttttctgcatcagtgatgcttgtgtcacactgatcattctcaaaggcctggcccgaatctctctaacttggccacagtcaagtagtttttatgtacttcctggcaaggccagagttgatgcctacgcttgtgcttgttttgcctggggccagacatcagaagattagaaacagcacttggcagatgtgggaaatccaggctcggggaagaagcattgacagagtcagcccctaaaggtggtgagagtgtggcagggtactagcacaatccatgagtctacacagttggatttcaaagggtagcatgttgaaggtaaatatagactgtatatggagagagagakagaagacactgctttcctaaatcggattccaaatgtagtcaccagaaacattcatgaatttctcagtcacttagattgagtgactggctggtcttggagccagcctacaggagaacaatttccattcttcttagagatgacaaagcaaacttaatgtctgttccagatctcctagacatgggtgaatgataaagtcagactcctaattttccaaggta

SEQ ID NO: 28838 - DNA, 625 bp, Homo sapiens
ttatttaaaattctgtcttcctaaacaaataactttggtgttttttcagcttgaaggttcagatatccaggaaatgggagtaaaaggagaatcaaagtaacttgtgtaaataaagaaacaaaaactatatttcacttacaatatttcagaattttgttattaatgctctttgaaatattaaacctacaaatgtaagaataaaaacaatatttttcacgtaaaaaagaatgtcatacctgttattctgaagtttaagtgctttagttttagcactgatatcatagataaaatgctgttgggtaattattattctattttctgctgttgtgtttcccaagatggtgataacaggataacccatctggagtgtccactgatccattacttcttgtatatttacatatttcccatttctttttaaagccttcacaaggaaaaatgtayaaattagttttataaacatgaattatcaacattattaacattaagacatttttatttctatttttactatttacctaaatatgaaaacatttaaagtcattgaagccaatataatgtgttagtgaaattaatcttcttgccctaagttaagcttcataaatgtatataaaaatgaaagttg

SEQ ID NO: 28839 - DNA, 625 bp, Homo sapiens
ttatttaaaattctgtcttcctaaacaaataactttggtgttttttcagcttgaaggttcagatatccaggaaatgggagtaaaaggagaatcaaagtaacttgtgtaaataaagaaacaaaaactatatttcacttacaatatttcagaattttgttattaatgctctttgaaatattaaacctacaaatgtaagaataaaaacaatatttttcacgtaaaaaagaatgtcatacctgttattctgaagtttaagtgctttagttttagcactgatatcatagataaaatgctgttgggtaattattattctattttctgctgttgtgtttcccaagatggtgataacaggataacccatctggagtgtccactgatccattacttcttgtatatttacatatttcccatttctttttaaagccttcacaaggaaaaatgtacaaattagttttataaacatgaattatcaacattattaacattragacatttttatttctatttttactatttacctaaatatgaaaacatttaaagtcattgaagccaatataatgtgttagtgaaattaatcttcttgccctaagttaagcttcataaatgtatataaaaatgaaagttg

SEQ ID NO: 28840 - DNA, 521 bp, Homo sapiens
cttcctgtagatttacatgaaagagataacacacaacacagaaatattaatatttttacatgattagatgaacaaagatttttcttagcatgatgctaaattcataagccataaatgaaaaaagaaatgcttgtgcacgtaaaaatataaaacttgttacatgccataaatgaagaaaaatataaattacgcaagaaaatatttaccatttataagaccaataaatacctaaatttatttttacaataaaattttttatgaagatacaacaaaaagatgagcaacataattttataatgagtgtatyttattcctcatatgatttttctaaaatcttcattaattcttggcttgccaaaaattgagaaaagattatttcctccactcaaatgagaatccttgttctcttgatcataaaagcaggctctgtcttttaaattctaccccgtgtgtatgagtgtatgagtgtttgcatggggataatgttatagatagacatgtgaatgggtaggttgtgcaga

SEQ ID NO: 28841 - DNA, 521 bp, Homo sapiens
cttcctgtagatttacatgaaagagataacacacaacacagaaatattaatatttttacatgattagatgaacaaagatttttcttagcatgatgctaaattcataagccataaatgaaaaaagaaatgcttgtgcacgtaaaaatataaaacttgttacatgccataaatgaagaaaaatataaattacgcaagaaaatatttaccatttataagaccaataaatacctaaatttatttttacaataaaattttttatgaagatacaacaaaaagatgagcaacataattttataatgagtgtatcttattcctcatatgatttttctaaaatcttcattaattcttggcttgccaaaaattgagaaaagattatttcctccactcaaatgagaatccttgttctcttgatcataaaagcaggctctgtcttttaaattctacccygtgtgtatgagtgtatgagtgtttgcatggggataatgttatagatagacatgtgaatgggtaggttgtgcaga

SEQ ID NO: 28842 - DNA, 522 bp, Homo sapiens
tattctatataccaataatgcatcccaaaatatattttatagcatattgtcatcatatgtcccaataattatgccaataccatgctaggctggtattattgttccaataatatgctaggctatgatctccagttgtttggtcacccactaataaacattgttgtggaagtattttttcaaggtgattaatatttaaatcagtagactgagtaaaggagattaccctctatattgcgaatgcacctcattaattatctaaaggccttaacagcaaagactgaagtaccccaaagaagwacaatttctgcctccaacctgcaaataggaaacttatcttagtttccagcctttgtatacaagactgcaacatcagtctggactcaatagatttcagtcttgccagcccctacattttcatgagccaattccttaaaagaattctgagttcataaagtttttaaaacctaaatttatgagttgtaaatatgcatcttactggttctgtttctttggaaagctcta

SEQ ID NO: 28843 - DNA, 522 bp, Homo sapiens
tattctatataccaataatgcatcccaaaatatattttatagcatattgtcatcatatgtcccaataattatgccaataccatgctaggctggtattattgttccaataatatgctaggctatgatctccagttgtttggtcacccactaataaacattgttgtggaagtattttttcaaggtgattaatatttaaatcagtagactgagtaaaggagattaccctctatattgcgaatgcacctcattaattatctaaaggccttaacagcaaagactgaagtaccccaaagaagaacaatttctgcctccaacctgcaaataggaaacttatcttagtttccagcctttgtatacaagactgcaacatcastctggactcaatagatttcagtcttgccagcccctacattttcatgagccaattccttaaaagaattctgagttcataaagtttttaaaacctaaatttatgagttgtaaatatgcatcttactggttctgtttctttggaaagctcta

SEQ ID NO: 28844 - DNA, 629 bp, Homo sapiens
acagcaggtggataggtctctttttttaaaaccaatttgctattctgtgtccctaaagtggggaatgtagaccatttacattccacattaatattgatatgtgagattytgatcctatcatgatgttgttagctagttgctttgtagtttctattgtgtagttactttacagggtctgtaggctatgtacttaagtgtgttttttttttttttttggtagtaggtatcattctttagtttccatgtttagttctcttgtatctcttgtaaggctagtctagtggtaatgaattatcttcatgcttgcttgtctggaaactatttcttctttgctttatgaaacttagtttggtgggatattaatttcttggttgaaatttcttttcttgaagaatgctgaaaatatgcccacaatcactccaggcttacaaagtttttgctgagaaatccactgttagcctgatggggttccctctgtgtatgatccgacatttttatctaactgcctttaagatgttttctttaacattaagtaaatgagtaatagagtaatcagaagaaaaataattttactgagaataaatttatcactatataatagatacaactgagaagtctgtattatcaat

SEQ ID NO: 28845 - DNA, 629 bp, Homo sapiens
acagcaggtggataggtctctttttttaaaaccaatttgctattctgtgtccctaaagtggggaatgtagaccatttacattccacattaatattgatatgtgagattctgatcctatcatgatgttgttagctagttgctttgtagtttctattgtgtagttactttacagggtctgtaggctatgtacttaagtgtgttttttttttttttttggtagtaggtatcattctttagtttccatgtttagttctcttgtatctctygtaaggctagtctagtggtaatgaattatcttcatgcttgcttgtctggaaactatttcttctttgctttatgaaacttagtttggtgggatattaatttcttggttgaaatttcttttcttgaagaatgctgaaaatatgcccacaatcactccaggcttacaaagtttttgctgagaaatccactgttagcctgatggggttccctctgtgtatgatccgacatttttatctaactgcctttaagatgttttctttaacattaagtaaatgagtaatagagtaatcagaagaaaaataattttactgagaataaatttatcactatataatagatacaactgagaagtctgtattatcaat

SEQ ID NO: 28846 - DNA, 1096 bp, Homo sapiens
acccccagcccccaagctgcagatggcgattcctaggcacatggcagggtggggccaagacagcgtcaggggcgtgtgtgaaagtccagggaggtggctaggtgctgtggctcacacctgtaatcccagcactttgggaagccgaggtgtgcggatcatttgaggtcaggagttcaagaccaacctgaccaacatggtgaaacgctgtctctactaaaaatacaaaaaaattagccaggcatggttgtgcatgcctgtaatcccagctacgctgaaggctgaggcaggagaattgcgtgaactcaggaggcagaggttgcagtgagccaagattgtgctactgcacttccagcctgggcagcagagtgagactccacctcaaaaaaacacaaaaaacaaaaaacaaaacaaaaaaaaagaaaagaaaagaaaagaaaaaagtccagggagggaggccccaggggccagagtgctacttagccactactcccattgtattgatggaaaaactatgtgctgaaaaaagacaaagctctaagacaagaccaaggaaggatggggactgaggcccctcagggcagcaggcacccagtaacccgttaggggctcatctgaagcctgtcttctggggccacactgacctacctctacctcccccagccagcaccctattcctggaaactctcagtagcttagaaaggaccacctagctcaatcttgctatgattagggcaaagtgtcacaggtttcagtgactggcaagcaaggaccagccctctccttgcctcttctggttggagccaatgacagccacaggctgagttagaccggcacattttggggttagaaaacacaaggctagtgtgggggccaatgcccacttccaccaaggcagacccagaaagcaagctggttcatytcctggacagaaccccacacctcaggccagcctagagaagacacagaggggccattaggacacaggtgacagtcccaacagcagtgtcctatgatagaaacctgctatcgaggggtgaaagcccccatctcactccacagcaatgctgtgagaaggaactgtagggttttgaagtgt

SEQ ID NO: 28847 - DNA, 511 bp, Homo sapiens
tttctttttttttttttttgtatttttagtagagacagggtttcaccatgttggccaggctggtctcaaactcctgacttcaggtgatcttcctgcttcgccatcctaaagtgctggtattacaggtgtgagtcacccctccyggccaagctaaaatgtttttaatcactcactttaaatagtttaaatatttcaaaaaattctatcaatggaaagtttgaaaaaagggcctatttaaatatctgacttggaatgtatattctagttaaatattgccatgtatatctattattctgtccccccttcccccaaccaaaccaaccaaccaaccatttcattatgctcacaaattctatggtttgggagtttgtacaggacatagtggggattgtctctttccatgatgtctagggcctcaaataggatgcttccaacagctggaagcaacttgaactggtggggactggaagggctgagaatggaagatctcttaccaagagggaaataggtc

SEQ ID NO: 28848 - DNA, 511 bp, Homo sapiens
tttctttttttttttttttgtatttttagtagagacagggtttcaccatgttggccaggctggtctcaaactcctgacttcaggtgatcttcctgcttcgccatcctaaagtgctggtattacaggtgtgagtcacccctcctggccaagctaaaatgtttttaatcactcactttaaatagtttaaatatttcaaaaaattctatcaatggaaagtttgaaaaaagggcctatttamatatctgacttggaatgtatattctagttaaatattgccatgtatatctattattctgtccccccttcccccaaccaaaccaaccaaccaaccatttcattatgctcacaaattctatggtttgggagtttgtacaggacatagtggggattgtctctttccatgatgtctagggcctcaaataggatgcttccaacagctggaagcaacttgaactggtggggactggaagggctgagaatggaagatctcttaccaagagggaaataggtc

SEQ ID NO: 28849 - DNA, 620 bp, Homo sapiens
tccaaaagatgaaaaggcaagaaagaaaaaggatgaaacaatttcagatgctttcaatgcatttatcaaatcagaatgaactgcttttgactgttgatgtaataagtcagaaggcattcactaaaccaaaacgcaagaacttcttttccactgtgactaattcaacttaatgaattatttttaaaaaaaccctacatatatgagatacaagaagaaaagggaagatgatagaaaggcaagtaacagctagtacattttatgagaagacaatagccacaattttgaaccgattaaagttagaatttctctctgaccttgaatttgacaaaactcaatataaaggccaaacttataaaagaacttcaattataagacgttatctaaagagcacttaaactggttttcaagatgaaatactaactgaagtttgtatttatttcgtaaacaaccatgttaaccttgctatttgcactgccaatgacaacttccaaagactatagaatccctatgctataaatcttkactagataagcagctcattccttgtttgtcaaagcgtggtaggaagttgcaccaggaaaataatacagaaatgaatcaaatgcaatactgtatattac

SEQ ID NO: 28850 - DNA, 620 bp, Homo sapiens
tccaaaagatgaaaaggcaagaaagaaaaaggatgaaacaatttcagatgctttcaatgcatttatcaaatcagaatgaactgcttttgactgttgatgtaataagtcagaaggcattcactaaaccaaaacgcaagaacttcttttccactgtgactaattcaacttaatgaattatttttaaaaaaaccctacatatatgagatacaagaagaaaagggaagatgatagaaaggcaagtaacagctagtacattttatgagaagacaatagccacaattttgaaccgattaaagttagaatttctctctgaccttgaatttgacaaaactcaatataaaggccaaacttataaaagaacttcaattataagacgttatctaaagagcacttaaactggttttcaagatgaaatactaactgaagtttgtatttatttcgtaaacaaccatgttaaccttgctatttgcactgccaatgacaacttccaaagactatagaatccctatgctataaatcttgamtagataagcagctcattccttgtttgtcaaagcgtggtaggaagttgcaccaggaaaataatacagaaatgaatcaaatgcaatactgtatattac

SEQ ID NO: 28851 - DNA, 620 bp, Homo sapiens
tccaaaagatgaaaaggcaagaaagaaaaaggatgaaacaatttcagatgctttcaatgcatttatcaaatcagaatgaactgcttttgactgttgatgtaataagtcagaaggcattcactaaaccaaaacgcaagaacttcttttccactgtgactaattcaacttaatgaattatttttaaaaaaaccctacatatatgagatacaagaagaaaagggaagatgatagaaaggcaagtaacagctagtacattttatgagaagacaatagccacaattttgaaccgattaaagttagaatttctctctgaccttgaatttgacaaaactcaatataaaggccaaacttataaaagaacttcaattataagacgttatctaaagagcacttaaactggttttcaagatgaaatactaactgaagtttgtatttatttcgtaaacaaccatgttaaccttgctatttgcactgccaatgacaacttccaaagactatagaatccctatgctataaatcttgactagataagcagctcattccttrtttgtcaaagcgtggtaggaagttgcaccaggaaaataatacagaaatgaatcaaatgcaatactgtatattac

SEQ ID NO: 28852 - DNA, 620 bp, Homo sapiens
tccaaaagatgaaaaggcaagaaagaaaaaggatgaaacaatttcagatgctttcaatgcatttatcaaatcagaatgaactgcttttgactgttgatgtaataagtcagaaggcattcactaaaccaaaacgcaagaacttcttttccactgtgactaattcaacttaatgaattatttttaaaaaaaccctacatatatgagatacaagaagaaaagggaagatgatagaaaggcaagtaacagctagtacattttatgagaagacaatagccacaattttgaaccgattaaagttagaatttctctctgaccttgaatttgacaaaactcaatataaaggccaaacttataaaagaacttcaattataagacgttatctaaagagcacttaaactggttttcaagatgaaatactaactgaagtttgtatttatttcgtaaacaaccatgttaaccttgctatttgcactgccaatgacaacttccaaagactatagaatccctatgctataaatcttgactagataagcagctcattccttgtttgtcaaagygtggtaggaagttgcaccaggaaaataatacagaaatgaatcaaatgcaatactgtatattac

SEQ ID NO: 28853 - DNA, 444 bp, Homo sapiens
tgaagctgccctgctgcagaaccgtggctgctgtcccgagaaccagagggctgtccaggcttgggggaatatcactgtgggccaccaggaccaggggttccatcggccctagggagctattattagcagggaggttccctcccagagaggagctcacagaagtgacgtcaatagtcaggattccggagttcagagcctcatccgacccacctgcagaaccactagcattggcaggkgtgtcagagaagagtgcagcaagatccatgttagtgagctcactttggcctgggctgctgagttcactgctgggagtaagagaactcggagcttctagctgaggtaagagatctgaaaaaaaaaggaatacactctggttactttatgaccttgaagactgagtacttttgtttatgcccatgatgttaccgagtgatgccccaagga

SEQ ID NO: 28854 - DNA, 1516 bp, Homo sapiens
ttaaagaataaatggaaaacatccagcacaaaatctatgtgctcttttcactgtggaaaaacaacatggaaaggtgagcactctagtctacagtagacagcagagtcacagggctggtcattggtctccttgttaagctaaactgtaattattacatacactcactccatcagctattgtgcagctaatatagtcaattatgaaaccgacacagaaacaaagaaaagtgtttctggcaaacttacgtgaccacgacacagtacatacactgtgacctcaactatacactcaaaaaaatactacggcagaagtgctgaaatactgtggtcatggaatttttttttctttttgcaaaatcttccttattaatgtttatattatctttccaacatcactgcttgttaactatatcctcactaagactcagtttcttttttttaatttttttaaaatttttttatttttttgaatagagacaaggtctcactatatttccgggctagtctggaacttctgggcctctcaaagtgctgggatttcaggcatgagcctctgggccaggcctagactcgcttgttttcttatccaagaaacaggcgagttatacctcttgagattgttgtgaggattaaatgagattacataaagcaaacaacatatgtaaagagcagagaggaacaacagagaaaaacaacttaccccaggatgtgccctgaggtgacgggacaacaaagtctagcaccataactttctttcccaaaatggcagcttcctacaaacgaacaacaacaaaaattacgtataaagatcttgtcactttcctgacactccctcaatctttgtcttccgtaaaagactgtttttgtgtgacacacaatcttttacctgaattataccagctattacaacaaaagcttaaactgtaacattagtttgtttttttttaagtagcagaagaaatagctatggcagtcatcaggaaaattatctacgagtttcatttctatattcataccttcgcacatgaaaggcctccagaaccaccaccgatgatgatgagatcataatcatatgccaaatcttcctgaaggagcttctgtaacaaaccactctgatatgcctatggtttaattacaggagaaagaacactgcagaatttaaagttttacagctatttatgtacaccctatgttcaactggtatggatttcttttataaaaatcttaggaaaaatctataattcatctaagttggagttgtaaatttatctggatgctatttaaaaacagggtccaactagttagaacttatacyaaagtacatatgtttttgtcccttcttacacctgacagctaggaatgtgtcaaataacctagaaggttgtggctctgtacctatgtaagatgaggtcattttccttggtctaattatcaaaatattatagtcaagtgcagtggaatagccaagtatcatttttcattagctcacttgtgctagtcttcattttgaaaacaat

SEQ ID NO: 28855 - DNA, 1023 bp, Homo sapiens
ctttgtgctgaaacagatttgcagtcctgccaaaccagacgatgctgctggcaggaagatgcacatggtctgatgttaatgcaagagtgagaaaacctctgtggcacagtcatgggaggtcagcccaaatgtagagtttccttccttccttccttcctccctccctccctccctccctccctttttttactttctgtaattctaaagtggcaggaacgacttgactctttagaccatatatttttttcagaaatacatttctgaaaatatattctctgttttgtatgttttctctgttttgtctctgttttgtatgtttttcctgggtactacagatttctaaaaacattgaaagagtaaagccttttttggaagtccattcataagatgtccaagaagaattcatcacagaaacttcaacctattttttttaaaaagtagactccaacaactcccttcagatgggtattatcttgattttacagatgaagcttagaagagttaagcaatttgctcagggtcaatagccagcaaagcaacagcatcaaaacttagatccagttttgctgatgccaaaatgcatgctccaktctataccattcaactaacctagctgtagcccctaattatgtgagatcagaaagctctagttacagtctttcatttttatttattatttatttatttatttatttatttatttgcactctgtcggtcaagctagagtgcaaagcgcgatctctgctcactgcaacctccacctcctgggttcaagctattctccctgcctcagcctcctgagtagctgggattacgggcaccaccaccacgcctggctaatgtttgtatttttagtagagacagggtttcactatgttgactaggctggtctcggactcctgatctcaggtgatctgcctgccttggccttccaaagtgcagggattacaggtgtgagccactgcccccggcctctagttacagtctttaactgtgtgtgattggaaagtccatagtggatcc

SEQ ID NO: 28856 - DNA, 1023 bp, Homo sapiens
ctttgtgctgaaacagatttgcagtcctgccaaaccagacgatgctgctggcaggaagatgcacatggtctgatgttaatgcaagagtgagaaaacctctgtggcacagtcatgggaggtcagcccaaatgtagagtttccttccttccttccttcctccctccctccctccctccctccctttttttactttctgtaattctaaagtggcaggaacgacttgactctttagaccatatatttttttcagaaatacatttctgaaaatatattctctgttttgtatgttttctctgttttgtctctgttttgtatgtttttcctgggtactacagatttctaaaaacattgaaagagtaaagccttttttggaagtccattcataagatgtccaagaagaattcatcacagaaacttcaacctattttttttaaaaagtagactccaacaactcccttcagatgggtattatcttgattttacagatgaagcttagaagagttaagcaatttgctcagggtcaatagccagcaaagcaacagcatcaaaacttagatccagttttgctgatgccaaaatgcatgctccattctataccattcaactaacctagctgtagcccctaattatgtgagatcagaaagctctagttacagtctttcatttttatttattatttatttatttatttatttatttatttgcactctgtcgstcaagctagagtgcaaagcgcgatctctgctcactgcaacctccacctcctgggttcaagctattctccctgcctcagcctcctgagtagctgggattacgggcaccaccaccacgcctggctaatgtttgtatttttagtagagacagggtttcactatgttgactaggctggtctcggactcctgatctcaggtgatctgcctgccttggccttccaaagtgcagggattacaggtgtgagccactgcccccggcctctagttacagtctttaactgtgtgtgattggaaagtccatagtggatcc

SEQ ID NO: 28857 - DNA, 1023 bp, Homo sapiens
ctttgtgctgaaacagatttgcagtcctgccaaaccagacgatgctgctggcaggaagatgcacatggtctgatgttaatgcaagagtgagaaaacctctgtggcacagtcatgggaggtcagcccaaatgtagagtttccttccttccttccttcctccctccctccctccctccctccctttttttactttctgtaattctaaagtggcaggaacgacttgactctttagaccatatatttttttcagaaatacatttctgaaaatatattctctgttttgtatgttttctctgttttgtctctgttttgtatgtttttcctgggtactacagatttctaaaaacattgaaagagtaaagccttttttggaagtccattcataagatgtccaagaagaattcatcacagaaacttcaacctattttttttaaaaagtagactccaacaactcccttcagatgggtattatcttgattttacagatgaagcttagaagagttaagcaatttgctcagggtcaatagccagcaaagcaacagcatcaaaacttagatccagttttgctgatgccaaaatgcatgctccattctataccattcaactaacctagctgtagcccctaattatgtgagatcagaaagctctagttacagtctttcatttttatttattatttatttatttatttatttatttatttgcactctgtcggtcaagctagagtgcaaagcgcgatctctgctcactgcaacctccacctcctgggttcaagctattctccctgcctcagcctcctgagtagctgggattacgggcaccaccaccacgcctggctaatgtttgtatttttagtagagacagggtttcactatgttgrctaggctggtctcggactcctgatctcaggtgatctgcctgccttggccttccaaagtgcagggattacaggtgtgagccactgcccccggcctctagttacagtctttaactgtgtgtgattggaaagtccatagtggatcc

SEQ ID NO: 28858 - DNA, 1151 bp, Homo sapiens
cctcgggccagctggctgaagcttattcctgccaacttgagtataacaatggagccctcgagagactgtcttgcatgggatagccatctgagacttctggccgggactctgtaggggtctcctccaccaagcgactgggatgggtgagggggttggatttagcaagtgcttcccaagagctgctaaataattgcaaagttcctccctgggtcttgctatgggggcctcctaagacccgctgtccctaggcgatgagttcacagctttgtgggagagagagacaagagaacatgcagctaacaacctgggctaactgcaaaaagagaagcgcaaacattctcctcaccctccaccacccccgaatatggtcaaaacatttataccaggtgagagcatagtataaatatgttactgcatctgcagtgctagagaagagccattgaatttttttttttttttttttagtttttggtttcttacccttaacccgaaaggatggaaacggaacaggaggtgacctgccctgcatgactgagggtgcttgcattaggcacagggtttcactgtgggtgcaagaggaaccatggaagggctgctctctgccccatccctggattattgttgtgaggatcaagtcgaataggggttatgcttagttttgtatgttataaatcaataagtaactaaaacataatattattttcttgataattgcaggcttgagagctcaaaagatgttttcaatttattgcgtamctgtgttcccaggctatctaaggacttcccacatgttagacccaactaaaatccaagcttgatgagagcagggagttagccttctgccaggagttagccttgtgccagtcacatagtgagacttcaataatttttttttaatggtagaaaaaatgatttctaatccagactgccccctagggcattagccttgctgtacagatgggagtatggaggctcagaaaggttgagtgacctgctctaggtctcaccactagctagtcggtgagttggggtaggagctcagtccctctgtctgtgaagctcaggctcttcccatgatgcccaagctgacctggagctttactgagcttagttgtccttgacagagcaggctgctgtgccaggatcatgtg

SEQ ID NO: 28859 - DNA, 575 bp, Homo sapiens
aaaaacacgtttcaaacagcctacatacacactaatgtacttttgttgtttcctatattcatgcaactctattcagatttgttcataaattgagataaattttctggcttatttcactaccattctgatactttacaaygtaaattactatttagatacctgtaaatggtttatttagggggacgtagtggagacagtggaaaaggatcgtaaaaaaaatttacgcccttttgtccaacaaagcattggtattttctgaagagactgtttgctcgcagaagagcctgtagtcaacaatgctcttactttgtgagcaagtgcgaactagtcagaggagaaaaaatacaaaggaaatatgaaaaggggatataaaaagtaaatccttatttgcatgtttatttaaatcttaaatagaagacaatctgttacttataatttctgtgtcaaattgcttacccacaaggcattaccttgagagggaaacctgaacctttttgtaaagttgtaaatttaacaactttaattagcattgtgatgtatctcccccctttggtgaaacctactaaagagagaat

SEQ ID NO: 28860 - DNA, 644 bp, Homo sapiens
aagtactactttaggttctcaaggacgcaaagagccctcaacaactcaattcaatccctgaattattgtgaggctttaacaaaatccctagaaaacctccaggcattaccaccagccttttaaaaattaccttccaatattactagcagtgatatttttactaacactgaattccaaacaagttttcctcccaagcagactgatgaataaacaatcttcctatgcagaaaccaaattaaaaccacttaaaaccatggaagggatacagtgatttaacccttctgtaaggactggagtggtgggcaaacaggtgacaaatggaagggatgcagaaagtggaaacagaaatcagtgagactcctccccttctctgagggctaaggttcagcttgcagctccggaggcaaaacctccacggaccctctccctcagcgacaagccgaatacgaaagcttccagaaaaccacaggtmctcctccccggcctcgcactcacgccctcactcgcctggccaacgcccattgatagcagacagtccctagtccgcccgacttctcccgagaaaagggtcaacagaggacgccttccccgaggcctcctccggaactcagccagcagagactccgcaaaaatggagggaccca

SEQ ID NO: 28861 - DNA, 644 bp, Homo sapiens
aagtactactttaggttctcaaggacgcaaagagccctcaacaactcaattcaatccctgaattattgtgaggctttaacaaaatccctagaaaacctccaggcattaccaccagccttttaaaaattaccttccaatattactagcagtgatatttttactaacactgaattccaaacaagttttcctcccaagcagactgatgaataaacaatcttcctatgcagaaaccaaattaaaaccacttaaaaccatggaagggatacagtgatttaacccttctgtaaggactggagtggtgggcaaacaggtgacaaatggaagggatgcagaaagtggaaacagaaatcagtgagactcctccccttctctgagggctaaggttcagcttgcagctccggaggcaaaacctccacggaccctctccctcagcgacaagccgaatacgaaagcttccagaaaaccacaggtcctcctccccggcctcgcactcacgccctcactcgcctggccaacgcccattgatagcagacagtccctagtccgcccgacytctcccgagaaaagggtcaacagaggacgccttccccgaggcctcctccggaactcagccagcagagactccgcaaaaatggagggaccca

SEQ ID NO: 28862 - DNA, 899 bp, Homo sapiens
agtggaattaaataaataactgaatggaagggttcatgtgtgaaggattgaagtgcctgcacatgcaacttttatttaaggtttgtggtagaatgatgcagaaaatgattttaatattgaagaatttgaatactagtggagtttttttttaaagcatgaagattaaaaccacttaattcctgagtatttattaatgtcatataactctggataacataccaaaaaacatacaggaaggagaaacagctaagtgatagacaagagagagaaaattcaccttaaacaactcgagcatttcctctaggaaagaagaaagaccgaaagaaggaaggaatccagaacttgtataataccctatacaacccacttacagggtgttggctacctcctggccaggagggcaacmgacaagcccttgccaaccctaaaggcagaggcagcatggctcaccaggagcatacacttggaactcaaaagttccgggattttgaaattcacttgtattattaccagctgagacaatctgatcaaaataatcttttcggtcccatttctacgtatgaaaattagctttgaaatatgataatgccttgcaaggtaaaataatatattttctgttcaataaatgtttttttttaatctttcaagcttttatttaaatgccatgatccaggatagattttagatcttgttgaaagcagccacatccatggactgcacacagtcctcaaaagcagtgaactgctcctccagcaataaatgtttttctaagtgctgctcaataaactacacctttcctttttctcagagccgcagaaaaaaaaaaatggtacatatgaagcaaaaactacctccagttgcaaactttattttctgaactcttcaaagattgttgtcag

SEQ ID NO: 28863 - DNA, 899 bp, Homo sapiens
agtggaattaaataaataactgaatggaagggttcatgtgtgaaggattgaagtgcctgcacatgcaacttttatttaaggtttgtggtagaatgatgcagaaaatgattttaatattgaagaatttgaatactagtggagtttttttttaaagcatgaagattaaaaccacttaattcctgagtatttattaatgtcatataactctggataacataccaaaaaacatacaggaaggagaaacagctaagtgatagacaagagagagaaaattcaccttaaacaactcgagcatttcctctaggaaagaagaaagaccgaaagaaggaaggaatccagaacttgtataataccctatacaacccacttacagggtgttggctacctcctggccaggagggcaacagacaagcccttgccaaccctaaaggcagaggcagcatggctcaccaggagcatacacttggaactcaaaagttccgggattttgaaattcacttgtattattaccagctgagacaatctgatcaaaataatcttttcggtcccatttctacgtatgaaaattagctttgaaatatgataatgccttgcaaggtaaaataatatattttctgttcaataaatgtttttttttaatctttcaagcttttatttaaatgccatgatccaggatagattttagatcttgttgaaagcagccacatccatggactgcacacagtcctcaaaagcagtgaactgctcctccarcaataaatgtttttctaagtgctgctcaataaactacacctttcctttttctcagagccgcagaaaaaaaaaaatggtacatatgaagcaaaaactacctccagttgcaaactttattttctgaactcttcaaagattgttgtcag

SEQ ID NO: 28864 - DNA, 546 bp, Homo sapiens
ccttgcttgtgattgcattgagggcccactggtctaacccaagatcatcccctcatctcaaaacccttaatttaatcacatctgcaaagtgtcttctaccatccaaggtaatagtctgtcataggttccagggattaggacattgatacctttgggagccttattcagcctatcacaccaagtggtggtgtctttcttaaagtcacatttataaagtcaggtgtaactaacacaataaaattcactcccttaaagtatacagtgtacagtttgatgagttttgacaaaagtacacagttgtgtaacagttatcacgatcaagaaacagaacatttccatyacccgaaaaagtttccttctgtctctgtgtagtgatctgtctcttgccccagtaattttgccttttccagaatgtcatataaatataatcctatgtatccagttttgtgtgtctggcttttttcacttagcatgatgtttttgagatttatccatgtagccatgtgtcattcattcctttttgttgctgaatgatattccattgaa

SEQ ID NO: 28865 - DNA, 622 bp, Homo sapiens
tgggttacctggagcccaatggagggtcagagaaacagtgggaagtccttgcctcactgcccattagctagtttgtgaaaagtaaayggggtaggtccaaagcttgctctatctctcttacacacacacacacacacacacacacacacacacacgcaaaactcaaatgtggtgcaagaaatgtcacaatgtcactttcttctcatttctttcttttttttttttttattgagatggagtctcactccgtcacccaggctggagtgcagtggcacaatctcttgtcactgtagcctccacctcctgggttcaagcaatactcctgcctcagcctccccagtagctaggactacaggtgtgtgccaccaagcctggctaattttgtatttttagtagagatggggtttcaccatgttgttcagactggtctcgaattcctgacctcaggtgatttgccctcctcggcctcccaaaatgctggtattacaggtgtgagccacctcacccggccatctttcttctcatttctgtaactgagtctgtgtccctcttagtaaatgcaagctacagacacgagcaccctttccttcagaggacgctgcagtttctgacccagcatcca

SEQ ID NO: 28866 - DNA, 593 bp, Homo sapiens
attatgatgttttaggtatattaggttaaatcagctattttatcaaaatgaatctcgcctgtttgtttttgctttttttttttttttttttttttttgagatggagtctcgctctgtcgcccaggctagagtacaatggcgtggtctcagctcactgcatcactgcaacctctacctcccaggttcaagcgattctcctacctcaccctcccaagtggctgggattacaggcgtgtgccaccacacccagctaatttttgtatttttgtagagacagggtttcaccatgttggccaggctggtctcgaactgctgacctcgtgatctacctgcctcggcctcccaaagtcctgggattacaggtgtgggccactgcgccggccatgtttctcgacttctgctggcaagcatgttccagtatttgcatggctcctagccctcatctccatttctctgcacagatgttatcttccccatgaggtctgccttatacatgaggcstgtattataaagtgcaactgccaattcgccaaccccgttgtttcttctctccagaacactaggcaccatctgatctcctatgccttttcctt

SEQ ID NO: 28867 - DNA, 350 bp, Homo sapiens
aattcctctctctcatcccagtggaatatgtagcaattctgtatgactcataactgtatggctccacagatttctttgtattgaaactatttagtactaattgtctctgaattttcttaatgctgtgtattttatgttggttgcatccttgttcaggaccgtacatcatctaccaacccactcctaaatattggcttccaattactctctgaaagatgggttaatgatgatgaaagatgctagtcttaccaagagtgtgaaagaaaatgaaacatttgaaccatattcactttcyggtcttgttatatttagcatttgaaattttataacagaaatgtagaaattccaaa

SEQ ID NO: 28868 - DNA, 593 bp, Homo sapiens
tgatacaatcacatttgtctgttttcgcttttgttactgatgcttttgaagtctaacccccaaaaatctttccccagatcaaagtttttttttttttttttctagtagtttcatagtatcaggtcttacctctaagtccttaatccatttggagttgacttttgtatagggtgaaagatggggatttatctcactttttcacatccactatacttatcttccctcctatcttttttgtatacatggttataggattttcaccagtgttttattatgtttttagaaaacatgttttgcagaagagaaactcttatgaattttctgttgtgcttcaaatcgtaatcattcaaggaatatatcccaaatagctctgataggaaacactattgaacaattagtaagatatgttcataagaatcattatgaggaataaaaacaactaaggttcttaaaaagaaaaaaatacttccaactgtaaaaatatcattttttattagaatgatcttcatttacttcaacacaaataaatttaaagcagcattaraaaatgtagcatttaataaagtctttatacatcctgttctcaactgaca

SEQ ID NO: 28869 - DNA, 518 bp, Homo sapiens
aggtcaggagttcgagactagcctggccaacwtggtgaaaccccgtctctgctaaaaatacaaaaattagccaggcatggtgtcatgtgtcccggctactcgggaggctgagtcaggagaatcagttgaacccaggaggcgggggttgcagtgagccaagatcacgccactgcactccagcctgggggatagagtgagactatctccaaaaagaaaaagggaggagctcaaggaggagctgattggtttgcagcaaaaatgaaagggaatccaaggccttgcagtatggaaaagccagatgcttctcggcccagccacacaaaagcaaggttgaaaaggacttgagagacaaagacctggaaaaccttttaactaattttcactaagtcccctcgggaccaagggcagacgaatggtgctgtgcctagtaaacctttcagttggataaaatgattcatggccaaggttagtggtgagaccttcccagcaaagtccaacgactgtctgtgcagaatgcg

SEQ ID NO: 28870 - DNA, 564 bp, Homo sapiens
agaaagtgcgacaccacaggcgttttcttaagaatcaagatctgaaaccaacatgatcttactctcttactgttggcacaggaagaaaccgggcccctgccaagggcaacgtgtcagccttccagcaagtccccgaaggtcggaaccttcgagacgggtgaatttggatttcatcttaggaaaagctccgagtgtsgcaccaggacgtggtgaatattttaagtaactttacatattaaggaacccccccccaaaaacaaacaaacaaacaacaacaataaaaggagattccctagtttcaaacctccaagggtgaagaggatggggcgtgaaaaacaaaatacaagagattcctcaaaatgccatgcgtcttctctactccctgggtcttggctatactctctgctccaggcatatctgctcgacacctgtcaatgtcttatttaatccctgttatgctgtggctactgtgacaacttccttgacctcctccagtgcaaattgttgacgctcttcttttcatactcacactgactggtggcatagtatacggtgtttattatg

SEQ ID NO: 28871 - DNA, 564 bp, Homo sapiens
agaaagtgcgacaccacaggcgttttcttaagaatcaagatctgaaaccaacatgatcttactctcttactgttggcacaggaagaaaccgggcccctgccaagggcaacgtgtcagccttccagcaagtccccgaaggtcggaaccttcgagacgggtgaatttggatttcatcttaggaaaagctccgagtgtggcaccaggacgtggtgaatattttaagtaactttacatattaaggaacccccccccaaaaacaaacaaacaaacaacaacaataaaaggagattccctagtttcaaacctccamgggtgaagaggatggggcgtgaaaaacaaaatacaagagattcctcaaaatgccatgcgtcttctctactccctgggtcttggctatactctctgctccaggcatatctgctcgacacctgtcaatgtcttatttaatccctgttatgctgtggctactgtgacaacttccttgacctcctccagtgcaaattgttgacgctcttcttttcatactcacactgactggtggcatagtatacggtgtttattatg

SEQ ID NO: 28872 - DNA, 564 bp, Homo sapiens
agaaagtgcgacaccacaggcgttttcttaagaatcaagatctgaaaccaacatgatcttactctcttactgttggcacaggaagaaaccgggcccctgccaagggcaacgtgtcagccttccagcaagtccccgaaggtcggaaccttcgagacgggtgaatttggatttcatcttaggaaaagctccgagtgtggcaccaggacgtggtgaatattttaagtaactttacatattaaggaacccccccccaaaaacaaacaaacaaacaacaacaataaaaggagattccctagtttcaaacctccaagggtgaagaggatggggcgtgaaaaacaaaatacaagagattcctcaaaatgccatgcgtcttctctactccctgggtcttggctatactctctgctccaggcatatctgctcgacacctgtcaatgtcttatttaatccctgttatgytgtggctactgtgacaacttccttgacctcctccagtgcaaattgttgacgctcttcttttcatactcacactgactggtggcatagtatacggtgtttattatg

SEQ ID NO: 28873 - DNA, 564 bp, Homo sapiens
agaaagtgcgacaccacaggcgttttcttaagaatcaagatctgaaaccaacatgatcttactctcttactgttggcacaggaagaaaccgggcccctgccaagggcaacgtgtcagccttccagcaagtccccgaaggtcggaaccttcgagacgggtgaatttggatttcatcttaggaaaagctccgagtgtggcaccaggacgtggtgaatattttaagtaactttacatattaaggaacccccccccaaaaacaaacaaacaaacaacaacaataaaaggagattccctagtttcaaacctccaagggtgaagaggatggggcgtgaaaaacaaaatacaagagattcctcaaaatgccatgcgtcttctctactccctgggtcttggctatactctctgctccaggcatatctgctcgacacctgtcaatgtcttatttaatccctgttatgctgtggctactgtgacaacttccttgacctcctccagtgcaaattgttgacgctcttcttttcatactcacactgactggtggcatagtatacrgtgtttattatg

SEQ ID NO: 28874 - DNA, 1011 bp, Homo sapiens
aagcgattacttccatcagtggttaattagcaggggatacaatttcagtatgttctgaaatgtaaactgctacttaaatgtttcacccattttacatctaatattcaaaatcatggcagctggtcagtgaggtaggaattgggccctcattgttcccttccactcactatgctgtgtgggactacctgataggagaaaacaggtggctttttggtctttagttgcccaagcagataaaattacttaaaaatattatattgttaaaaggtccatataaaaaagaaatttataagtattctaaaaatggcaaaacctccttgcaataaaatatgtgtaagtcacagcacacagtatagaatctttgacacacattgctcagagcttcatgtaggaaacttgagcaagttaatatgtagcggagtgctgcctgagcggaggtcattctgtgtgaatgaccacatgttgaagtatctaccaaatcaccatgccatgttgaagcagccctcaaatcactatgccatcgcttctctgaactatgattctactaataaatgaaggtttcctttgacagctttagaaaaagaatttattgcttcagtaaatcttattcttatttgggaaagcatggtggatgtgctctaggataatacccatgatcgtcacttcttggtgttcaaatgcttgtgtagtttccttatcctaaatctggacatggcctatggcttgtctctaacctacagaacatggcaaaggtgagcttatgtaggtaattaggcatacataatcatgcacataatattgwagtgtttgccttcctggagtctctctcttttgatgaatgtgacgaagcaagtggacgttttgggaaactttatgtggcaagaagctgtgagcacctctaaaaattagagcagtatttgaccgatagccccgaagaacctggagccctctgtcttacacatgcaagaaatggaattcttataacaatttgagtaaacttgaaagtggatc

SEQ ID NO: 28875 - DNA, 700 bp, Homo sapiens
gaagggggtgggccaatggactccatgaaggttcttagctttggtggtttaatgctctatttttgtgctggttggcctcctcccaggaggtggcactttccagaacgcatcagctgtggtattatggggaggaactggtggtgggaagggccctagaacccccaagagtatatgttctgtgacttctgctaccagggtggatagggaaggaccatcaggttggggaggggctagatgtgtttgagctcagactctccttgagtgggtctttctgcagctgctgtaggggatggggtgagattccaggtcactggagttgtgtccctaggaggattatggctgcctcctcttagtcatgcaagttgtcagggaagtggggaaaagccagcagtcacaggcctcacccagcttccatgaaaaccgaagggctggtctcactcccaccctgcccccaccaacagcccccagactgtttccaggtggggagcaatatgggcttgaaaacctgccccaggctatctgcctcccacctgggaaagaaaagggcttggttcttccccattgtggagtctgcacactggatttgcaccctcccccaagttatggccaggaggcttctcaccccgttgaaattgttgcaaagttcagctagagattttcttctccctgtgyagttttacccccctgctcctctcccttt

SEQ ID NO: 28876 - DNA, 606 bp, Homo sapiens
ggtgagtaatgaatgatgtgaatactaaagtgaaatttaaaatgctgttttgtaaaatcttagaatattgtatgagtctgtgtttgtgttacaataaagaaatacctgaggctgggtaacataaagaaaagaggtttaattggctcatggttctgtagcctatacacaaagtacagtgccaacatctatttctgttaagggcctcaggaagcttacgttcatggcrgaaggcaagggggaagccggcaaatcacgtggcaagaaagggagccagagagagtggggcaggttccacatgcttttaaacaaccaaatctcatgtgaattcactcatcaccaaggagatggtgctaagccattaatgaacgatccccaccatgatccaaacacctcccacccagccccacctccaaaactgaggattatctctcaacatgagatttggagagaacaaacattcaaaccatatcaaacatcttctgaggctaaataatctattaaaaagttctgtctatggacattacaaaggctaattcatgaactagaccaagacaataatactggggccacttaaaagaaatgtatcctattatacagaaacaatgt

SEQ ID NO: 28877 - DNA, 738 bp, Homo sapiens
actaggggtcttggaacatatcccccacacataagagggcactactgcattgcttagaagcaagtcacaggtcctcctcacayttaaggggatggggtcatacaaggatgtgaaaaccaagattagaacataatggaggccaccttaagaatctattcactggcattttaaggaagtcctgggagtgatgtcaccaatatggcagagtagtagatctacaagccttaatctccccataaaaaaatatagatagccattcacaaaccagaatagccctgatagtgctcaaggatctatttaagaatctgccgcaacacactggagaaaaaaaagaagaatatccacagaaaggattgctgttgaaattggcatacttgaggcaccaggagatggttaggaacgaagaaatgcagaggatattggtatcagctgtacaggtgaactgctgtggttcccaggagcctgctttgcagaggacagtggcatcttttgcaacagaggtaaccaacagccattcctgtccaggaaccccatagagggagatgtggctgcacactcccataacccctaagaatcagttgctcttgtgctattctgggactggagctgccacatttcccatccctgtgcatgcctccaacctctgagctgtggctgttccacaagtgcccacattcctgaccccttctctgagggtttattctgtgtacccatgtctcatacaccagaaccatagca

SEQ ID NO: 28878 - DNA, 738 bp, Homo sapiens
actaggggtcttggaacatatcccccacacataagagggcactactgcattgcttagaagcaagtcacaggtcctcctcacacttaaggggatggggtcatacaaggatgtgaaaaccaagattagaacataatggaggccaccttaagaatctattcactggcattttaaggaagtcctgggagtgatgtcaccaatatggcagagtagtagatctacaagccttaatctccccataaaaaaatatagatagccattcacaaaccagaatagccctgatagtgctcaaggatctatttaagaatctrccgcaacacactggagaaaaaaaagaagaatatccacagaaaggattgctgttgaaattggcatacttgaggcaccaggagatggttaggaacgaagaaatgcagaggatattggtatcagctgtacaggtgaactgctgtggttcccaggagcctgctttgcagaggacagtggcatcttttgcaacagaggtaaccaacagccattcctgtccaggaaccccatagagggagatgtggctgcacactcccataacccctaagaatcagttgctcttgtgctattctgggactggagctgccacatttcccatccctgtgcatgcctccaacctctgagctgtggctgttccacaagtgcccacattcctgaccccttctctgagggtttattctgtgtacccatgtctcatacaccagaaccatagca

SEQ ID NO: 28879 - DNA, 738 bp, Homo sapiens
actaggggtcttggaacatatcccccacacataagagggcactactgcattgcttagaagcaagtcacaggtcctcctcacacttaaggggatggggtcatacaaggatgtgaaaaccaagattagaacataatggaggccaccttaagaatctattcactggcattttaaggaagtcctgggagtgatgtcaccaatatggcagagtagtagatctacaagccttaatctccccataaaaaaatatagatagccattcacaaaccagaatagccctgatagtgctcaaggatctatttaagaatctgccrcaacacactggagaaaaaaaagaagaatatccacagaaaggattgctgttgaaattggcatacttgaggcaccaggagatggttaggaacgaagaaatgcagaggatattggtatcagctgtacaggtgaactgctgtggttcccaggagcctgctttgcagaggacagtggcatcttttgcaacagaggtaaccaacagccattcctgtccaggaaccccatagagggagatgtggctgcacactcccataacccctaagaatcagttgctcttgtgctattctgggactggagctgccacatttcccatccctgtgcatgcctccaacctctgagctgtggctgttccacaagtgcccacattcctgaccccttctctgagggtttattctgtgtacccatgtctcatacaccagaaccatagca

SEQ ID NO: 28880 - DNA, 1162 bp, Homo sapiens
atttattatcccataaaagttaatgagtttattctgaaggttccctggcccctttcaagttttaataggggattagtgagggcctggtccctgcagacccctattatccgagaacctgagggagctgagagtgcttgggccccccagakccagagtccctccttacagtgacaattccacgggcccagccctgccctctgtactgtgaggccccagctagaggctggcagggctatatagggccgctgggatctgaggcctagttctagaggcttccaattccatgcgcaactgaaataattaccccgacagtgtccagcacctgaggcaggtttgctgctatccatctgcttgtattgacagggaaagcaatataacccccatgagacagataaggaaagcaaggccctgagcagggatgtggctcctccaaggtcacccagaagctatggctgagccagaatggacacattctgtctcctgtggttggtagccaggaaactggggctggtaagagctgccattcacttactcggtgcccactgtgtgctgaccatgcactcagtgccctcatacgtaatttctcattctccccttgctccagggaggtttgggacattatcccaagagatgaagacactgaagcccagaatggttatgtaacttgtccaaggtcacgcagctaatgatggcagagcctcggactggaacccaaagctggacagccccatagctcagctgtctactgctcttgctggctttcgtgctgtagcacctggggcctcctatctccccaccaagctggacaccactatcctagcgcactcgtgccaggagccctgcagcttggatgatggggaagggtgttctggttgtgccctggaggggcagttgttgggttggacacagagatacactcaaaaggaacttctcatcgtcagaacaggtgccttccccgttttggccccaattgctcacgcgattctctctccttgccatggcttctctactcctttgtctctgcaaaacctccccatccttcacgggtcagttcctagcctcctctggagatccatccttgcctggcccttctcttgacctcctgggggcacttcctagtgggctcctaacacatgaatggcttgtgtccctgggcaaggat

SEQ ID NO: 28881 - DNA, 532 bp, Homo sapiens
acttgatagttataatattttatacattctatagatttttacatttttaatttattttatctgtgtacatatgtgtgtctgttgagagcgatacattggaaaccaatgtttaagaggctcttgactgttaaacatttttctgtaatcttcatgtgtctttccgtccagtgattctcaccaaaaccacagagcttctactccagccttggtcctttacactgacaaaaattcatcttggggaaagtgatttgacaactgtaacaaatttaaaatgcccttcctgtgggatgattctacctcaacactttcctcatatttctacatctagaatgatatattttagccaggtgcagtgtttcaygcctgtaatcccagcactttgggaagccgaaggggtgaatcacttgaccccaggagtttgagaccagcctgggcaacagggtaaaaccttgtctctacaaaaaatacaaatattatctaggcatgatggcctgcacctgtcatcccagctacttgggaggctgaagtggga

SEQ ID NO: 28882 - DNA, 1222 bp, Homo sapiens
tcctggaactgttatggtgctggtcggtgtgtgatttagtattaatgagtgtataatgaagtccgaggagaaacctaggtcaaatccagcagcatgttgggtccagttggtcttagccagcttggcccatgccctggtttttcagagtcataaccagcccctagcttatgtgactaattcaacagttaccttytctcagtcatgtgaaactgctgcttggaatttcctattctcctgcaaccaccctatattattgctgtcttacagtgacttctgatttaactacctcgggtgaggccaaacttcacaggttaagggtacagtgctctacaggactgttctcactgcagacactagccacaaacttggggttcccagggtcatcctcacttctgaccaactgactataaagtcaaaggttcacactggtctcttgggtttcataattcactagcatgactcacagagctcaggaaagctctgtacttttgattataattttattgtcacagaaaggatactgtgactgacttactgataaaattcagtaaatccagatcccacattatgcaactctccttttggctgattctgatttcagttgaaatagttgaaagtttaaggctgattgggcttttagatggaattgctataagttgtactattggataataagaaatttagctggtctttgttgatccttagaggtagcctagaataaaaaatttggctggacttcgttcccagttccttcaaaatagcttctaaatctgtaattccctaaaagttgtgtctttgttattcatgttgagccctggtagtttatgctaataaactgactcatgatgggcttctagataatttaagctaaggagatatttcagtatggaggctagtgatgtcagaaagactaaccatgtgattagaggattgggagctcaagtcacatgacatgaacctaacctctgaagagggaaagagggactggattgagttcagtctcatggccaatcacgtattcaatcatgcctatgtcattaaactccagtaaaagctctggactccaaagcttaggggaactttcctgtttggcaatattttgttctaaacttcttattatacgatagtataacttatagcaatttcatctaaaaacccaatcagctttaaacttcgaactatttctgtaatctttaaattatttctttaactgttcttagga

SEQ ID NO: 28883 - DNA, 1222 bp, Homo sapiens
tcctggaactgttatggtgctggtcggtgtgtgatttagtattaatgagtgtataatgaagtccgaggagaaacctaggtcaaatccagcagcatgttgggtccagttggtcttagccagcttggcccatgccctggtttttcagagtcataaccagcccctagcttatgtgactaattcaacagttaccttttctcagtcatgtgaaactgctgcttggaatttcytattctcctgcaaccaccctatattattgctgtcttacagtgacttctgatttaactacctcgggtgaggccaaacttcacaggttaagggtacagtgctctacaggactgttctcactgcagacactagccacaaacttggggttcccagggtcatcctcacttctgaccaactgactataaagtcaaaggttcacactggtctcttgggtttcataattcactagcatgactcacagagctcaggaaagctctgtacttttgattataattttattgtcacagaaaggatactgtgactgacttactgataaaattcagtaaatccagatcccacattatgcaactctccttttggctgattctgatttcagttgaaatagttgaaagtttaaggctgattgggcttttagatggaattgctataagttgtactattggataataagaaatttagctggtctttgttgatccttagaggtagcctagaataaaaaatttggctggacttcgttcccagttccttcaaaatagcttctaaatctgtaattccctaaaagttgtgtctttgttattcatgttgagccctggtagtttatgctaataaactgactcatgatgggcttctagataatttaagctaaggagatatttcagtatggaggctagtgatgtcagaaagactaaccatgtgattagaggattgggagctcaagtcacatgacatgaacctaacctctgaagagggaaagagggactggattgagttcagtctcatggccaatcacgtattcaatcatgcctatgtcattaaactccagtaaaagctctggactccaaagcttaggggaactttcctgtttggcaatattttgttctaaacttcttattatacgatagtataacttatagcaatttcatctaaaaacccaatcagctttaaacttcgaactatttctgtaatctttaaattatttctttaactgttcttagga

SEQ ID NO: 28884 - DNA, 1222 bp, Homo sapiens
tcctggaactgttatggtgctggtcggtgtgtgatttagtattaatgagtgtataatgaagtccgaggagaaacctaggtcaaatccagcagcatgttgggtccagttggtcttagccagcttggcccatgccctggtttttcagagtcataaccagcccctagcttatgtgactaattcaacagttaccttttctcagtcatgtgaaactgctgcttggaatttcctattctcctgcaaccaccctatattattgctgtcttacagtgacttctgatttaactacctcgggtgaggccaaacttcacaggttaagggtacagtgctctacaggactgttctcactgcagacactagccacaaacttggggttcccagggtcatcctcacttctgaccaactgactataaagtcaaaggttcacactggtctcttgggtttcataattcactagcatgactcacagagctcaggaaagctctgtacttttgattataattttattgtcacagaaaggatactgtgactgacttactgataaaattcagtaaatccagatcccacattatgcaactctccttttggctgattctgatttcagttgaaatagttgaaagtttaaggctgattgggcttttagatggaattgctataagttgtactattggataataagaaatttagctggtctttgttgatccttagaggtagcctagaataaaaaatttggctggacttcgttcccagttccttcaaaatagcttctaaatctgtaattccctaaaagttgtgtctttgttattcatgttgagccctggtagtttatgctaataaactgactcatgatgggcttctagataatttaagctaaggagatatttcagtatggaggctagtgatgtcagaaagactaaccatgtgattagaggattgggagctcaagtcacatgacatgaacctaacctctgaagagggaaagagggactggattgagttcagtctcatggccaatcacgtattcartcatgcctatgtcattaaactccagtaaaagctctggactccaaagcttaggggaactttcctgtttggcaatattttgttctaaacttcttattatacgatagtataacttatagcaatttcatctaaaaacccaatcagctttaaacttcgaactatttctgtaatctttaaattatttctttaactgttcttagga

SEQ ID NO: 28885 - DNA, 604 bp, Homo sapiens
catctttgttaatagttcctttattaaacagtctgcaactatccaccttgagtgtgctgtgtctaagagataaccttggaagaaatgtggagttctgatttccttggaagaaattctaattgccatggtatctttaaacttaaatgtccatgatagttttcttgggaattgttcatcttaaactctaggttagaatgttggttatttattgggtaatactttcttggaytactttttctttctttccttccttctctatctctctccttccttccctccctgctctcttgtttgtatttttatattctttattgagtaggagggaaaaagagctaagttaagattagtaggtaaaataattacatgtggaaatacgttgcacaaatagatgccaaattggtgtcaggaaaaaaaagtgattgagaatgagtattagaaaataaggatactacatacttaagcatgtactaagtgctggtattgagagtggagagttgaatacctaatttatgttaagttatggcaggcattttaatagtatttaataaccacaacagtcctgcatacagtcattctgcaaatatctattgatatttgtgtgtga

SEQ ID NO: 28886 - DNA, 604 bp, Homo sapiens
catctttgttaatagttcctttattaaacagtctgcaactatccaccttgagtgtgctgtgtctaagagataaccttggaagaaatgtggagttctgatttccttggaagaaattctaattgccatggtatctttaaacttaaatgtccatgatagttttcttgggaattgttcatcttaaactctaggttagaatgttggttatttattgggtaatactttcttggactactttttctttctttccttccttctctatctctctccttccttccctccctsctctcttgtttgtatttttatattctttattgagtaggagggaaaaagagctaagttaagattagtaggtaaaataattacatgtggaaatacgttgcacaaatagatgccaaattggtgtcaggaaaaaaaagtgattgagaatgagtattagaaaataaggatactacatacttaagcatgtactaagtgctggtattgagagtggagagttgaatacctaatttatgttaagttatggcaggcattttaatagtatttaataaccacaacagtcctgcatacagtcattctgcaaatatctattgatatttgtgtgtga

SEQ ID NO: 28887 - DNA, 604 bp, Homo sapiens
catctttgttaatagttcctttattaaacagtctgcaactatccaccttgagtgtgctgtgtctaagagataaccttggaagaaatgtggagttctgatttccttggaagaaattctaattgccatggtatctttaaacttaaatgtccatgatagttttcttgggaattgttcatcttaaactctaggttagaatgttggttatttattgggtaatactttcttggactactttttctttctttccttccttctctatctctctccttccttccctccctgctctcttgtttgtatttttatattctttattgagtaggagggaaaaagrgctaagttaagattagtaggtaaaataattacatgtggaaatacgttgcacaaatagatgccaaattggtgtcaggaaaaaaaagtgattgagaatgagtattagaaaataaggatactacatacttaagcatgtactaagtgctggtattgagagtggagagttgaatacctaatttatgttaagttatggcaggcattttaatagtatttaataaccacaacagtcctgcatacagtcattctgcaaatatctattgatatttgtgtgtga

SEQ ID NO: 28888 - DNA, 604 bp, Homo sapiens
catctttgttaatagttcctttattaaacagtctgcaactatccaccttgagtgtgctgtgtctaagagataaccttggaagaaatgtggagttctgatttccttggaagaaattctaattgccatggtatctttaaacttaaatgtccatgatagttttcttgggaattgttcatcttaaactctaggttagaatgttggttatttattgggtaatactttcttggactactttttctttctttccttccttctctatctctctccttccttccctccctgctctcttgtttgtatttttatattctttattgagtaggagggaaaaagagctaagttaagattagtaggtaaaataattacatgtggaaatacgttgcacaaatagatgccaaattggtgtcaggaaaaaaaagtgattgagaatgagtattagaaaataaggatactacatacttaagcatgtactaagtgctggtattgagagtggagagttgartacctaatttatgttaagttatggcaggcattttaatagtatttaataaccacaacagtcctgcatacagtcattctgcaaatatctattgatatttgtgtgtga

SEQ ID NO: 28889 - DNA, 1153 bp, Homo sapiens
aagagttagaaatacatgtagacstcacaggaactgataaatcatagggaaaagagaggacagatattttctctagctctccctatggtctcatattcacttattcctccttctctctataatgctttctatgctttttcctctgtagaccagtctcttctgctcatagtcatcatggtcaccacaaaatagtgccctcaatccttggtcttcaggattttacctcagctttatacatttaattatctcagtatttcagggagaggaatttcattgacccaacttaggctgggtgtctacttgatgctatggtggccaagatggtaggagaatcattggtacaggtatagacacccaaccacatgaacaaggaaaggagagcacatagacctgttctttgaacagcatgtatcatagtcaagcatttagagcaccaggcactaggggcagagtaaacaaggagaaaagaaagaaacaagagcccaggtaagttttctatggggttctgactttaaactgacaccactaggcccactatggtcttaggactgttaaagctcctttggtatgactaagtccatgatagcatcatctcctgttttctgattgctcttgagtcccatgaggggatcttgttcatgttaagaagacagatcctgtggatatcccaagtaaaaacaactctcattttggaagtaattccctgctcctgaaaggttctcccagagccagcttcactctaaagtctggtatccgcaagaccaggaaatcaccagttgcaattttagcatattaaagtcaatggtaaatttacttgactagggctttcagcctccagcctcctaaagtgagcatgaaggcacaaacctgaaatatttaaggaatgttggtacaatatttcctctgactgcacatagactttcctcaggaaatgattatgtccatccttctttccccattgaaccaggaagcatatctattataaatatattttctttttgttacatttgatgaattcctcatactttcaaaaccttctgttttaattatgaaaataaagttctgtaagtcacaagacctactgggtccaggaaataattctgccttaaggcagactatacgcaattggggattatacttcaagcagggttct

SEQ ID NO: 28890 - DNA, 1153 bp, Homo sapiens
aagagttagaaatacatgtagacgtcacaggaactgataaatcatagggaaaagagaggacagatattttctctagctctccctatggtctcatattcacttattcctccttctctctataatgctttctatgctttttcctctgtagaccagtctcttctgctcatagtcatcatggtcaccacaaaatagtgccctcaatccttggtcttcaggattttacctcagctttatacatttaattatctcagtatttcagggagaggaatttcattgacccaacttaggctgggtgtctacttgatgctatggtggccaagatggtaggagaatcattggtacaggtatagacacccaaccacatgaacaaggaaaggagagcacatagacctgttctttgaacagcatgtatcatagtcaagcatttagagcaccaggcactaggggcagagtaaacaaggagaaaagaaagaaacaagagcccaggtaagttttctatggggttctgactttaaactgacaccactaggcccactatggtcttaggactgttaaagctcctttggtatgactaagtccatgatagcatcatctcctgttttctgattgctcttgagtcccatgaggggatcttgttcatgttaagaagacagatcctgtggatatcccaagtaaaaacaactctcattttggaagtaattccctgctcctgaaaggttctcccagagccagcttcactctaaagtctggtatccgcaagaccaggaaatcaccagttgcaattttagcatattaaagtcaatggtaaatttacttgactagggctttcagcctccagcctcctaaagtgagcatgaaggcacaaacctgaaatatttaaggaatgttggtacaatatttcctctgactgcacatagactttcctcaggaaatgattatgtccatccttctttccccattgaaccaggaagcatatctattataaatatattttctttttgttacatttgatgaattcctcatactttcaaaaccttctgttttaattatgaaaataaagttctgtaagtcacaagaccyactgggtccaggaaataattctgccttaaggcagactatacgcaattggggattatacttcaagcagggttct

SEQ ID NO: 28891 - DNA, 1070 bp, Homo sapiens
ttctagcctattcaatctgattccaaagtctgcacccttaaccagatgacatgttgcctcatagtttttctttctgtgcccccatctccttattgaagctatactttggatagattttcaaaaaattatgaatgatcatcagaatttactttagccaggcaggccgggcatggtggctcatgtctgttatctcagcactttgggaggccaaggcgggaggatcacttaaggtcaggagttcgagaccagcctggccaatttggtgaaaccccatctctacacaaaaattagctgggcgtggtggcacaagcctgtaatcccggctactcaggaagctgaggcaggagaaatgcttgaacctgggaggcggacattgcagtgagcctagatcatgtcactgcactccagcctgggtgacagagtaagattctgtctcaaaaaaaagaatttactttagccaggcaaactggtgttggcccatgatcaaaaataagtcatcatctaaaaaagaaaattttttaaaaaatgaattataacattattctttctttttattgatttttttccttttattgattttcacctatgccatgaacattgcttttgcctgtctagttgggagtttattagttggttccttcttcaaaagagaagaggggaaataatctaattataataaagatgatgctgataggagcaactaacttttactgagcctttaccataagctaagcactgtaccaagaacttatatatgttggttcatttactcctcatcagaaccttataatgggtacaattataktatgttacaaatgtaaaaactgaggcttagaaagattaagtaatttgcccaaggtcacatacctggcaagaaacagatatagaactccaatccagatgtaattccctaatccacatctcaataatttagtaaaagctgttactcttcatctactggaaaggctaagcactctgaaaataattcacaaccgacactatgctattttcctaaccttacagatataaccagactgatgttaaagaccaacctaataaacaattcattt

SEQ ID NO: 28892 - DNA, 1070 bp, Homo sapiens
ttctagcctattcaatctgattccaaagtctgcacccttaaccagatgacatgttgcctcatagtttttctttctgtgcccccatctccttattgaagctatactttggatagattttcaaaaaattatgaatgatcatcagaatttactttagccaggcaggccgggcatggtggctcatgtctgttatctcagcactttgggaggccaaggcgggaggatcacttaaggtcaggagttcgagaccagcctggccaatttggtgaaaccccatctctacacaaaaattagctgggcgtggtggcacaagcctgtaatcccggctactcaggaagctgaggcaggagaaatgcttgaacctgggaggcggacattgcagtgagcctagatcatgtcactgcactccagcctgggtgacagagtaagattctgtctcaaaaaaaagaatttactttagccaggcaaactggtgttggcccatgatcaaaaataagtcatcatctaaaaaagaaaattttttaaaaaatgaattataacattattctttctttttattgatttttttccttttattgattttcacctatgccatgaacattgcttttgcctgtctagttgggagtttattagttggttccttcttcaaaagagaagaggggaaataatctaattataataaagatgatgctgataggagcaactaacttttactgagcctttaccataagctaagcactgtaccaagaacttatatatgttggttcatttactcctcatcagaaccttataatgggtacaattatagtatgttacaaatgtaaaaactgaggcttagaaagattaagtaatttgcccaaggtcacatacctggcaagaaacagatatagaactccaatccagatgtaattccctaatccacatctcaataatttagtaaaagctgttactcttcatctactggaaaggctaagcactctgaaaataattcacaaccgacactatgctattttcctaaccttacagatataaccagactgatgwtaaagaccaacctaataaacaattcattt

SEQ ID NO: 28893 - DNA, 581 bp, Homo sapiens
ttcaaattatactctagggtcactggtcacttgatttcaccctgaygaaattccattagtatttatttattatttatttatatatttttgagatggagtcttgctctgttgcctgggctggagtgcagtggcatgatctcagctcactgtaatctctgccttccgcgttcaagtgattatcctgcctcagcctccttagtagctgggattaaaggcacccgccaccgcggctgcctagtttttgtattttagtaaagacgaggtttcaccatcttggccaggctggtctcaaactcctgaccttgtgagatccacctgcctcagcctcccaaagtgctgggatcacagacgtgagccactgcgcctggccagtatttattttaaggaagatatgcttgcaacaaattccctagtttgttcatgtgtttttagcttgagatacttctatatattggtttcaggtttaacagcttcatcaaatgtaacatttttgatagcctgtttttcttttctttttgaactctttgaatacattttccctgctgtcttcatatcttgatcttttctgcatcagctattaa

SEQ ID NO: 28894 - DNA, 581 bp, Homo sapiens
ttcaaattatactctagggtcactggtcacttgatttcaccctgatgaaattccattagtatttatttattatttatttatatatttttgagatggagtcttgctctgttgcctgggctggagtgcagtggcatgatctcagctcactgtaatctctgccttccgcgttcaagtgattatcctgcctcagcctccttagtagctgggattaaaggcacccgccaccgcggctgcctartttttgtattttagtaaagacgaggtttcaccatcttggccaggctggtctcaaactcctgaccttgtgagatccacctgcctcagcctcccaaagtgctgggatcacagacgtgagccactgcgcctggccagtatttattttaaggaagatatgcttgcaacaaattccctagtttgttcatgtgtttttagcttgagatacttctatatattggtttcaggtttaacagcttcatcaaatgtaacatttttgatagcctgtttttcttttctttttgaactctttgaatacattttccctgctgtcttcatatcttgatcttttctgcatcagctattaa

SEQ ID NO: 28895 - DNA, 581 bp, Homo sapiens
ttcaaattatactctagggtcactggtcacttgatttcaccctgatgaaattccattagtatttatttattatttatttatatatttttgagatggagtcttgctctgttgcctgggctggagtgcagtggcatgatctcagctcactgtaatctctgccttccgcgttcaagtgattatcctgcctcagcctccttagtagctgggattaaaggcacccgccaccgcggctgcctagtttttgtatttkagtaaagacgaggtttcaccatcttggccaggctggtctcaaactcctgaccttgtgagatccacctgcctcagcctcccaaagtgctgggatcacagacgtgagccactgcgcctggccagtatttattttaaggaagatatgcttgcaacaaattccctagtttgttcatgtgtttttagcttgagatacttctatatattggtttcaggtttaacagcttcatcaaatgtaacatttttgatagcctgtttttcttttctttttgaactctttgaatacattttccctgctgtcttcatatcttgatcttttctgcatcagctattaa

SEQ ID NO: 28896 - DNA, 581 bp, Homo sapiens
ttcaaattatactctagggtcactggtcacttgatttcaccctgatgaaattccattagtatttatttattatttatttatatatttttgagatggagtcttgctctgttgcctgggctggagtgcagtggcatgatctcagctcactgtaatctctgccttccgcgttcaagtgattatcctgcctcagcctccttagtagctgggattaaaggcacccgccaccgcggctgcctagtttttgtattttagtaaagacgrggtttcaccatcttggccaggctggtctcaaactcctgaccttgtgagatccacctgcctcagcctcccaaagtgctgggatcacagacgtgagccactgcgcctggccagtatttattttaaggaagatatgcttgcaacaaattccctagtttgttcatgtgtttttagcttgagatacttctatatattggtttcaggtttaacagcttcatcaaatgtaacatttttgatagcctgtttttcttttctttttgaactctttgaatacattttccctgctgtcttcatatcttgatcttttctgcatcagctattaa

SEQ ID NO: 28897 - DNA, 857 bp, Homo sapiens
cagacaagtctgcaaactcgggccggcctgagaaggtgacggtgacctaaggctcagactactcaggaatgagggtccgactgagccgctgggatcctgcgattcacagcgacacaaggtgggaggggctggggtgggcgccagtgatgcagaacatgagcgcccgtcgtggccctgtgtgcagcccagtggcaggggctgttggtcatcctgcaacgtccacagccatgttttcctaggcagagaggccaccagaagcctgaggagctgctccagaaccatctggaaggggtggctctgagcagcgcccaagccgggctgtgtcacctagatgtgtgaccacgacccctttccacagggactcccttcccaaggtgtgtgtagcgccgccagcagtaccccatggcagggtctgtgcctggcctggatctgccctgctcttcctctgacagcccctgcctcctccttgggtggctggaaccctttgccagcacacacacagtcagaaggccacagaggggcccttcgcccatgactgactggtgtgggtgtttgagagcccagctccctcagggcagggacctcttgaaccrcaagtgacgctccaggtcccctgaagtccgaagccactccccacaggatttccagatttctgcttgaaagccaagctctgctggcatctcccatcccgagaagggcgggggtctctcctggatgcactttctgagtaactggaccaggaatccccatctcagggcacctgtggcaccttcacacatgctgagacacagcctcggaccccagatgtcacccacagcgaggaggggcctgggaaatggagcaggcttcagtcccta

SEQ ID NO: 28898 - DNA, 950 bp, Homo sapiens
tcctggctccatgggccctgggtcaggagacctgctcgggggttgcaggtactctgccaacaccttaggcagtcacctgtctgyggcactgaggcgtggtcagcccaggttgggagcagccacagctgccagtgaccatgctgggggtgatgacgtggcctgtgtagtgagcatgcttcatggctgtggcgagacgcatgtgtgcaggggcctcagcactgtggggcagtggtgagatcatgtccgtgggcttcacagcagggaggcttatgaaatgcagcttcccaggctccaccctagaggttctacatgctcatcttggggggctcagggttctgcctatggacagccgtcacaggtggctgtgatgctgcatgtcggggccccatgcagagagacactgtgcggggcatgcttgggggcaggcaagtcgggggcgggcagagtggaggggcatcttctctcctccagcctcagcgtcggcctgcacaccccctgtcctggagagtaccgtctcaaggggcttctctccagtttccaggcatcctctgcagctgggagtgaggaggtcctggtgggtggggaaggcaacagagggagctcatggggtgagggagtatgggggcgttgtggggagacgggagttcaggggatgaagagtatggggaagagtcggggggcagggagatgggagcttatgaggtaagggtgtggggggctggggagataggagcttatggggtgagtgtgtgggggcttgagagacacaggacttaacgagtgagggtgtgggagatgggagctctggggtgcaggtgtgaggcccaggggagatgggagcttatggggtgagggtatgggggcctgagagacagggtacctaaggggtgagggtgtcgggcccggggagatgggagctctggggcacccgggggctccagcaagtgttg

SEQ ID NO: 28899 - DNA, 950 bp, Homo sapiens
tcctggctccatgggccctgggtcaggagacctgctcgggggttgcaggtactctgccaacaccttaggcagtcacctgtctgtggcactgaggcgtggtcagcccaggttgggagcagccacagctgccagtgaccatgctgggggtgatgacgtggcctgtgtagtgagcatgcttcatggctgtggcgagacgcatgtgtgcaggggcctcagcactgtggggcagtggtgagatcatgtccgtgggcttcacagcagggaggcttatgaaatgcagcttcccaggctccaccctagaggttctacatgctcatcttggggggctcagggttctgcctatggacagccgtcacaggtggctgtgatgctgcatgtcggggccccatgcagagagacactgtgcggggcatgcttgggggcaggcaagtcgggggcgggcagagtggaggggcatcttctctcctccagcctcagcgtcggcctgcacaccccctgtcctggagagtaccgtctcaaggggcttctctccagtttccaggcatcctctgcagctgggagtgaggaggtcctggtgggtggggaaggcaacagagggagctcatggggtgagggagtatgggggcrttgtggggagacgggagttcaggggatgaagagtatggggaagagtcggggggcagggagatgggagcttatgaggtaagggtgtggggggctggggagataggagcttatggggtgagtgtgtgggggcttgagagacacaggacttaacgagtgagggtgtgggagatgggagctctggggtgcaggtgtgaggcccaggggagatgggagcttatggggtgagggtatgggggcctgagagacagggtacctaaggggtgagggtgtcgggcccggggagatgggagctctggggcacccgggggctccagcaagtgttg

SEQ ID NO: 28900 - DNA, 1073 bp, Homo sapiens
cgtcaccaccacttcctcctcacttcctgtttatctcgttatttgcaaaacacctcctcaatgaagcctttctggattggctgccctaagtgtggcaggtacacaccccttctactgccctttccaccctgggctacctgcatttgtttgtttggagtcctcctttactctcacacaagcatcacgaagaagacatatctcaaaccactgtaaaggagaagagggatcaaaaagaaattctgatgcccgtgctgaaaactccctagaccttaactcaagcctcagtgtgatcaagaagcatcagactgacccatgcctcctcagtactatctttccaataattattttagaatatttaagaacccctattgatgtattacatctgcctccagctccacccctcaatcaagaatccgtttaagggtaggtgctgttttggccacatgtttttctgccattgtcttttgaaatggttttttaaagaaattaaattgtggctgggtgcagtggctcaygcctgtaatcccagaactttgggaagctgaggccagaggatcacttgagctcaggagtttgagaccagcctgggcaacatagggagatgtggattctacaaaaaattttaaaacttagctaggtgtggtgatgcgcacctgtagtcccaactactcggggggctgagtgtggggtcctgaggtgtaaggattgcttgagcccagaggtcaaggctgcagtgaaccgtgctcatgccactgtactcccgcctccacaacagaacaaggccccatctcaaaaaaaaaaaaattaaaaaaattaaattattgactcctatgaatttgtttatctgctctattctgctttagcctggtctctcaatgagccacagttgccttggaagagcatactgtacaggcggaagaaccacaaaagctaaagctaaagacagccgtaaaagcataagcctgcatctaacagtgacaggcttataaagcacactcacacaacacaaatcttggccccaaagaccaggaaattttatttgccattaaccgtgctctttccaggaattggat

SEQ ID NO: 28901 - DNA, 803 bp, Homo sapiens
actcccatgacccgaacacctcccatcaggccccatctccaacgctgaggatcaaattttgacacgagatttggaaaggacaaatatytgaaccatagcaaagaggaaggggggtatgttttaaattgtgtggtcaaggaagtcattcctgaggaggcaacatttgagctgaaaacagaatgacttgaaaaaaaaaaaaactatccacatggaaacggaaacgttggctttctctcacgaatacaagatggctactacagcttcaagcatcacatcctcacctaacagcttccaaagcaggtctggggatttccttgtatcaggaaaaaacccccagcacacttcccttcatgtcccacttgctagaactaggttgcatacctaccctccaaccagtcactggcaaaagacactgggattggctgggagtaaccagggttcctctgctgggaccaggcatgggtatcctccactgaggataggcttcccacacctaaaccagactggcctgctgtcagcaaggaaaaagcgcaaagcagctaccacaaagatcacacttgagattgtcatgtaggatttactgaacacctgaccatgttccaggcactgtgctagtgttaggaattttaaaaagacccaggcatcgcttttactatctcactctgttgcttaaaagcactcagggggggtaactccctcttccctcctcttcaccatttcaaagcccctggactgatggaggtatagttcactgccacttgcctccctatagcccccactcacctcttcagctcagaatgact

SEQ ID NO: 28902 - DNA, 720 bp, Homo sapiens
aaagatggagagtatttacccccaaggcttggtatgagctgctttagagattgtccacttcaggttgcagtaagccaagatcaggccactgcactccagcctgggcgacagagtgagactccatctcaaaaataaataaataaataaataaataaataaataaataaatagagattgtccacttcaggttttctaatgccacactggatgttccaaggaaaacctaagagagaaaaacaagtggccttattggaagatggaagaagtgagagccacaataatttgctgatgttttcttttttttgtaagttcaacccttatcaaatatagtccagggtcccagaattgggctaatccagaccaagatttatcttcttttaagtctctacctcttgattgacactcattcctcaagtcaaaggagaaggaaggaatggaagctaagagtggtacctttccagaatttaatacgaatcaacaaaagttggtagcattatktacctatcaggctacttcctttgtttctgacctgtttttgtgttgttttcttccctcctctcccctttacacccactccttacacacaaaggtgattttaaaggatgtggactcacttctctacgtggacaccgatgtcctctttctgagacctgttgatgacatctggaagcttctgaggctgtttaattccacccagcttgcagccatggcccctgagca

SEQ ID NO: 28903 - DNA, 543 bp, Homo sapiens
tgagctagttttgttgatactattattacacattttctgtaggcctgagatcagagttgctaacaaaaaccctggaagaactagtcatataaatgcccattttaaagcctgtaatcaayagacacaatctttttgacagggggtattcctttttattctttttttttttctttttaattatactttaagttctgggatacatgtgcagaacgtgcaggtttgttacataggtatacatgtgccatggtggtttgctgcacccatcaacccgtcatctatattaggtatttctcctaatgctatccctcctctagccccccacacccctggacaggccccggtgtgtgatgttccccaacatggagtattcttaacagtgtattaaattgcagtctttcttaggtttagcgttgcatattctcagtttatttccagagacataaggatggtaaagtttctcaaaattatatattaacaacagatgggtcagtgtagcgagaatgggaagagcagagtataaagaggctttggttttatttctga

SEQ ID NO: 28904 - DNA, 993 bp, Homo sapiens
ggaatgttcaccaaatgctaacataactagtgtaaaagattttgttatctttcatataccacatattgtgggcagtgaactctgaaatccatttacttttcttcattttgcactccaggatgtmataaacctaatggagctgaacaattaacccatgataagaagaggttggatgtgagatattaaaagaaaaagacatttaaaagtccaaagagagggaaaagaagacagatgttgtccaaaaaatctctgaactgcatgaatagccatttaggcatcactgggatggagaactgagctattctgatcatcattagaaattgaggaaggagagcattgccaagtaagcaagaggagaaatcaaactgttcaacttccctcctttagattagtctggaaaatacaaatggcagctatagtaaaatattttatattttttttccaagacaatgcttccttagatggacacagttcaagatttggttattagaagtaataatcttatgatatagtctaacctactagagttctgtattgaattttatgaggatgcaaacttattttactccagttacttctgttcagaacatggtgattttcagtccctttttaaaatacatatagtgattttaaccctctgtaatttacaataaaattgaaaaaaaaagaataaaatttattcgtgaatttcaaagcgttttatgtgcattttgttacactattcaaattttgaaggcaaaagcattctagagtctaaaacattttttatatgcaaactaagcatctgttaaagatgtgttaaaagaataaataaatgctttaaaaacgactcttttatgagacagcctaagaagacagattttcatagtttttgcccttctagtattctgagttgaaaacattttacttgtaatattataggtctattcatttattcataattaatatatattttgcaaactaaaagccactatatttcagtagtcctagtgc

SEQ ID NO: 28905 - DNA, 657 bp, Homo sapiens
agcatctcaattttaattttgattggcagctcaaggactgtttcaaaagtgtgaagaaactggaatgaacaaagttaataaaaatagtgggacatttccaggtcaggagaagtaaggaggtggaaatctgggccggactagaacaaaaataaaggaagaaaaggaaagatggtgctaaattattgaagactttgaaatgtaagtttagaatttgtgtttgacaccataggaaataagaataaattatatatttccaagagagttgcctgctgaaatgttttagaaatatwactatgaaagctttgtgggaaatgaactgaattgatgagaaattgaagacaaatagacatcagtttcatggaaatatgaaatacacatgttggtaaaccacaataagcatcattgaggatgtggagaaatcataacccttatgctctgctggtagaaaaagaaaatggtgaggctgccttggaaaacaatttggcagtttttcaaaatcctagacatagagttactatatgacccagaaattccattcccaggtacataccaaagggattgaatgtgtatgtctacacaaaagtttgaacatgaatgttcatagaaacattcatcataataaccaaaaatggaaataacctaatgtccattggctga

SEQ ID NO: 28906 - DNA, 657 bp, Homo sapiens
agcatctcaattttaattttgattggcagctcaaggactgtttcaaaagtgtgaagaaactggaatgaacaaagttaataaaaatagtgggacatttccaggtcaggagaagtaaggaggtggaaatctgggccggactagaacaaaaataaaggaagaaaaggaaagatggtgctaaattattgaagactttgaaatgtaagtttagaatttgtgtttgacaccataggaaataagaataaattatatatttccaagagagttgcctgctgaaatgttttagaaatattactatgaaagctttgtgggaaatgaactgaattgatgagaaattgaagacaaatagacatcagtttcatggaaatatgaaatacacatgttggtaaaccacaataagcatcattgaggatgtggagaaatcataacccttatgctctgctggtagaaaaagaaaatggtgaggctgccttggaaaacaatttggcagtttttcaaaatcctagacatagagttactatatgacccagaaattccattcccaggtacataccaaagggattgaatgygtatgtctacacaaaagtttgaacatgaatgttcatagaaacattcatcataataaccaaaaatggaaataacctaatgtccattggctga

SEQ ID NO: 28907 - DNA, 752 bp, Homo sapiens
aaaacagaattagatagtggtgatggttacatatcattgtgagtatactgaaagtcactgaactgtatactttaaaagcctgagtttatagtatgtgaattacatctcgatgaaaattatgtaatagataacctgaataatcctgtatttattcaggaaattggatttatagttaaattttttcaaaaaagaaaactctatgtacgtacggcttctctagtgaattctatcaagtatttaaagaatacattatgttactataattcaacacaaattattccaaaacaytgaagagggaaattttcccactcaatttataagtttgttattactatgatactaaaactagacaaagacttcacacacaaaaaaaaactaataaacaaaaaaactatggactgatatccctcatacacataggtgtaaaatttttaaacaaaattttagaacattgaacccaacaataaatgtataagaaagaccctgaccaagaaaaacaatgaccaaatctaattttctccagcaataaaagtgcactcaacattgaattcaccaacatattagagtggaaaaccatacaaccatttcaatagatacatagaaagtgtttgacaaaattcaacatccattgttgattaataaaacaactatcagctattagtgaaatgcctgataccaaggctgggtaggaaaaatacaaggtacactcagagtcgttccgtgttggagtcttcataacatacagtcatgca

SEQ ID NO: 28908 - DNA, 381 bp, Homo sapiens
gaatgtagggattatctttttatcattccacaaaattaaagcttaaaagttctatccaaaaacctagctgtggagaaatcctcaagggtctcccattaacgtggtagccaggaagtacacaggattttaatcaaaggccagcggctgtctatgtgacacagaactaccctcacatatagaaccaatatgtgaggttcattcctttcttcacaattctacagsctagctgcacaattgcctcttttgtctatataatctcatggaatgagttggcatacaaggcaaataagaaaccacgggaaacctctgtccaaaccttgcttcgtgcctgaagttcaaatgtgtttggttaaccttctattgattccttctctttccttc

SEQ ID NO: 28909 - DNA, 381 bp, Homo sapiens
gaatgtagggattatctttttatcattccacaaaattaaagcttaaaagttctatccaaaaacctagctgtggagaaatcctcaagggtctcccattaacgtggtagccaggaagtacacaggattttaatcaaaggccagcggctgtctatgtgacacagaactaccctcacatatagaaccaatatgtgaggttcattcctttcttcacaattctacaggctagctgcacaattgcctmttttgtctatataatctcatggaatgagttggcatacaaggcaaataagaaaccacgggaaacctctgtccaaaccttgcttcgtgcctgaagttcaaatgtgtttggttaaccttctattgattccttctctttccttc

SEQ ID NO: 28910 - DNA, 621 bp, Homo sapiens
tacaaaataacctcaaagaaattagtaacaataattagtgcattcagagattatatctttctttctttttttcctttttttttttctttcgagacggagttttgctcttgttgcccaggctggagtgcaacggcgcgatctcagctcacsgcaacctccgcctccccggttcaagtgactctcctgcctcagcctcccgagtagctgggattacaggtgtgtgccaccacgccaggctaattttgtatttttagtagagacagggtttctccatgttggttaggctaggctcaaactcctgacctcagttgatccgcccgcctcagcctcccaaagtgctgggattacagacgttagccaccgtgcccagctgagattacatctttttgaaagctaaatatatatatatataacactgagtgaaggagttatgttttcaggtaagggctactgttcttgacaatccatcatccatccatccatccatccatctgtgtattctggaaggagtgaggaactcatgcaaagacataaacaagtttactctccatagcaaagagttgccctgatacatgattgcttgcaaacttatattcaagtcctgtggtgtttattctgtag

SEQ ID NO: 28911 - DNA, 504 bp, Homo sapiens
tccaggcgtgatggcrcacacctgtaatcacagctactgaggaggctgaggcaggagaatctcttagaatccgggaagcagaggttgcagtgagccaagatcacgccactgtgccccagcctgggcaacagagtgagactctgtctcaaaaaaaaaaaaatcatagtaagactgtgtgctctaatgattaatacagttaattactgttaaacatgtgtgctatttagcagcatgtgttactatttcttattaacaggaataatttttcttctcaagtttttatcacaaagcatatgtgatttaagccttcagttatcaaaatagggtaaatattttcttaccagaagtacagaggaataattaataatcaagtatcaaggcaggagaatggtgtgaacccaggaggtggagcttgtagtgagccaagatcacgccactgcactccagcctgggcaatagagcaagactctgtctgaaaaaaaataataataatagtaatcaagt

SEQ ID NO: 28912 - DNA, 609 bp, Homo sapiens
ttaaaaaaaagcaggacaactctcccaggtggagaagacaccagctgcctctgcggtgctgagcccaggaggaagatgatcactgttcaaactgccttggcaagttgtttcaaagaaataaaacccttggcttctcagtgctttgagtcacattgcacttagtaaatgttcgttttactaatgtttttcacttccctgtatatttatattcagcattgagagacctcttcatattccaacaaaaagtgattaaaggatttgggacacctgtgattatccccatgggttattatgatcgctctgcaccgcgcagcctgcagagtyatttttctgaccgggattgcagtgctgagcctggtgtcctctgctgagttcattttccagcttccttgcattttattcatcttccctggtagcacccggaattgcaggaagcaatccctggtgctcagtgaaggtctttgaatgaatcaaggggagaggagtcagggggaggcagagggtgtgggaggagtcacatgtgccagaatcttctcttcagacatgtcacagagagtcccctccaggcactcttgttgggcctcagtgctggacattggaggacttttc

SEQ ID NO: 28913 - DNA, 1083 bp, Homo sapiens
aaaagtgggtaattgtgagtatgtggaagtgatgtctataggaaccttcatctcagagttacagtgctctagaatagcatggtagcacttttacagtttttgagatggagtttccctattgttgcccaggctgcagtgccatggtgtgatttggctcactgaaatttctgcctcctagttacatgcgattctcctgcttcagcctcctgagtagcttggattacaggcactcaccaccatgcccagctaatttttgtatttttagtagacacagggttttgccatgttggccatgctggcctcaaactcctgacctcaggagatctgcccacctcagactcccaaagtgctgggattacaggagtgagccaccgcgcccagctacagttagcatttctatacataccttccaaatgctgtggaataccatcacaccacttttacagttccagtgaattattttgttttttttctgcgatgtactctgagtgtgtcacccagactggagtgcagggccctgagctgggctccctggaaactctgcctctgggcttcaagtgattctccttcctctgcctccagagtagctaggattacagtcatgcatgaccacacctggctaacattttaattaattaatttatcagtttgtttttgtttgagtcggagtccaactctgtcacccaggctggagagcagtggtgagatcttggctcwctgcaacctctgccttctggagtcaaatgattcttaatttttttgtatttagtagagacatcgtttcattatgtaggccaggctgttctcgaactcctgacctcaagtgatctgcctgccttggtgtccagcagtgttgggattacagacatgagccacagcacctggtccatttctggtagaaaattttcaaaataaaaaataatggcatcgattttagggagtccctttagtgttcccccagcacgtttatggtgtgaactgagaatggaggctgtctggggccacaggacactctcattctcattgctttagggtggtaagtgacaagaaatttttcctcaaagaggtagagcttggctttca

SEQ ID NO: 28914 - DNA, 1083 bp, Homo sapiens
aaaagtgggtaattgtgagtatgtggaagtgatgtctataggaaccttcatctcagagttacagtgctctagaatagcatggtagcacttttacagtttttgagatggagtttccctattgttgcccaggctgcagtgccatggtgtgatttggctcactgaaatttctgcctcctagttacatgcgattctcctgcttcagcctcctgagtagcttggattacaggcactcaccaccatgcccagctaatttttgtatttttagtagacacagggttttgccatgttggccatgctggcctcaaactcctgacctcaggagatctgcccacctcagactcccaaagtgctgggattacaggagtgagccaccgcgcccagctacagttagcatttctatacataccttccaaatgctgtggaataccatcacaccacttttacagttccagtgaattattttgttttttttctgcgatgtactctgagtgtgtcacccagactggagtgcagggccctgagctgggctccctggaaactctgcctctgggcttcaagtgattctccttcctctgcctccagagtagctaggattacagtcatgcatgaccacacctggctaacattttaattaattaatttatcagtttgtttttgtttgagtcggagtccaactctgtcacccaggctggagagcagtggtgagatcttggctcactgcaacctctgccttctggagtcaaatgattcttaatttttttgtatttagtagagacatcgtttcattatgtaggccaggctgttctcgaactcctgacctcaagtgawctgcctgccttggtgtccagcagtgttgggattacagacatgagccacagcacctggtccatttctggtagaaaattttcaaaataaaaaataatggcatcgattttagggagtccctttagtgttcccccagcacgtttatggtgtgaactgagaatggaggctgtctggggccacaggacactctcattctcattgctttagggtggtaagtgacaagaaatttttcctcaaagaggtagagcttggctttca

SEQ ID NO: 28915 - DNA, 1083 bp, Homo sapiens
aaaagtgggtaattgtgagtatgtggaagtgatgtctataggaaccttcatctcagagttacagtgctctagaatagcatggtagcacttttacagtttttgagatggagtttccctattgttgcccaggctgcagtgccatggtgtgatttggctcactgaaatttctgcctcctagttacatgcgattctcctgcttcagcctcctgagtagcttggattacaggcactcaccaccatgcccagctaatttttgtatttttagtagacacagggttttgccatgttggccatgctggcctcaaactcctgacctcaggagatctgcccacctcagactcccaaagtgctgggattacaggagtgagccaccgcgcccagctacagttagcatttctatacataccttccaaatgctgtggaataccatcacaccacttttacagttccagtgaattattttgttttttttctgcgatgtactctgagtgtgtcacccagactggagtgcagggccctgagctgggctccctggaaactctgcctctgggcttcaagtgattctccttcctctgcctccagagtagctaggattacagtcatgcatgaccacacctggctaacattttaattaattaatttatcagtttgtttttgtttgagtcggagtccaactctgtcacccaggctggagagcagtggtgagatcttggctcactgcaacctctgccttctggagtcaaatgattcttaatttttttgtatttagtagagacatcgtttcattatgtaggccaggctgttctcgaactcctgacctcaagtgatctgcctgccttggtgtccagcagtgttgggattacagacatgagccacagcacctggtccatttctggtagaaaattttcaaaataaaaaataatggcatcgattttagggagtccctttagtgttcccccagcaygtttatggtgtgaactgagaatggaggctgtctggggccacaggacactctcattctcattgctttagggtggtaagtgacaagaaatttttcctcaaagaggtagagcttggctttca

SEQ ID NO: 28916 - DNA, 682 bp, Homo sapiens
tcctgcctcagcttcctaaagtgctgggattactggcatgagtgactgtgtccaggccacatgcaacttaaaggaagcacagggaagtgctcagtgtgagggaaaaaaacataacagcagggggcaaggctggaggaaaatgttgaggtgacatcaatgagaacttcagggacccgtgtcctacagagtcggaaagagaagctaaagttctacagtgatgagaatgttatccctgcaaggatggttaccaaggaatatcagaaataaagagcacctgaatgaaaayttttaacctgttgtagcaatttatccaccagaaatatctagttattgagttactgatggaaaaataatgaaatactactttgtctgtgattgagtttcagctgtagaacatcaaagcaaccaaatagaatttgatcattttaagtatttcccacccgttcttgttctttgttttgttttggagacaaaatctcagtttgtcatttaggctggagtgcagtggtgcaatctgggctcattgtaatcctttccttcagggctcaagtgattcttgtgcctcaaccactcaaatagctgggactgcaggcacgttccaccaagactggctgatttttgtatttttaatagagatggggtttttccatgttgatcagcctggtctcaagatcctggcttc

SEQ ID NO: 28917 - DNA, 682 bp, Homo sapiens
tcctgcctcagcttcctaaagtgctgggattactggcatgagtgactgtgtccaggccacatgcaacttaaaggaagcacagggaagtgctcagtgtgagggaaaaaaacataacagcagggggcaaggctggaggaaaatgttgaggtgacatcaatgagaacttcagggacccgtgtcctacagagtcggaaagagaagctaaagttctacagtgatgagaatgttatccctgcaaggatggttaccaaggaatatcagaaataaagagcacctgaatgaaaacttttaamctgttgtagcaatttatccaccagaaatatctagttattgagttactgatggaaaaataatgaaatactactttgtctgtgattgagtttcagctgtagaacatcaaagcaaccaaatagaatttgatcattttaagtatttcccacccgttcttgttctttgttttgttttggagacaaaatctcagtttgtcatttaggctggagtgcagtggtgcaatctgggctcattgtaatcctttccttcagggctcaagtgattcttgtgcctcaaccactcaaatagctgggactgcaggcacgttccaccaagactggctgatttttgtatttttaatagagatggggtttttccatgttgatcagcctggtctcaagatcctggcttc

SEQ ID NO: 28918 - DNA, 682 bp, Homo sapiens
tcctgcctcagcttcctaaagtgctgggattactggcatgagtgactgtgtccaggccacatgcaacttaaaggaagcacagggaagtgctcagtgtgagggaaaaaaacataacagcagggggcaaggctggaggaaaatgttgaggtgacatcaatgagaacttcagggacccgtgtcctacagagtcggaaagagaagctaaagttctacagtgatgagaatgttatccctgcaaggatggttaccaaggaatatcagaaataaagagcacctgaatgaaaacttttaacstgttgtagcaatttatccaccagaaatatctagttattgagttactgatggaaaaataatgaaatactactttgtctgtgattgagtttcagctgtagaacatcaaagcaaccaaatagaatttgatcattttaagtatttcccacccgttcttgttctttgttttgttttggagacaaaatctcagtttgtcatttaggctggagtgcagtggtgcaatctgggctcattgtaatcctttccttcagggctcaagtgattcttgtgcctcaaccactcaaatagctgggactgcaggcacgttccaccaagactggctgatttttgtatttttaatagagatggggtttttccatgttgatcagcctggtctcaagatcctggcttc

SEQ ID NO: 28919 - DNA, 606 bp, Homo sapiens
ctgttactaaagctcaatacatcattctgaacattattaattttcacttaacttagatttaagtattgaatttttaacttgggctccaggaaaaatcctgaaaaagaaagatcagcatctagcatccttttcctattctttcaccacaaattctcaatttgatatgacttawcatgaaatctgtattgggaagtatagatttctaagataactttttgtaactaaaaaataatttcctgtgcatcacaagggggattaaaaatcaccaaagtactgaaggaacacgtgctttgattattattcccacctgtttcttttttattataaagtggcaatttgtaccatcattagaaatgtacattaatgtataaagttttgcattcaaatctctttatttttgattacctatgactaaagaccacaaatcaaataaaaactcatataatatatccttatttcagaagcatatgtatatatacacatatatatttgtagaacaatccactgttttaaatgtaattttgacttaaaaaatgctatttacaattttatgacagagaaataacctcagccttttatggtattaaaatgagcagggaattttta

SEQ ID NO: 28920 - DNA, 1175 bp, Homo sapiens
gagagggcttcctggaggaggtgatgcttgaggagggagtcagaattattccagaggagataaataacattaaagaacgttctcaatacggtatcagcacatgcaagaatagaggataagggaacaggttggagaagctgagactaattcaggggcagtcatctggggctagggtgtcagctgggtcacatcacacaaggacctgaagagcagggacaagaggtttggacaaatgtgggaagaaggtgaaagtcacaagattcagctccaaggccatgaccactctggtttccattctctgcagagatgagagggttgctgtaaccagggaagccagcccactgcaaagggcatgtggcacattggttgtcgctctgaattttggctttgcttttttattacgaagcatgcaaagaggtttgtagaaacaaatataaacgctatgcctttcactcggctttttcaagttttgacatcttcatgtatttcagatcaccttaaaagtaaagcatcattacgtaacaaatcataacaaatagagtggaggtcccttgtaccccaccctgctcctattcccctccccaaggtaactgccctcccaaacttggtgtttatcctatttaaaataattatgcatgtacccaaggacaatattttggatttttttttttttgagaagaagtctcactctgttacccaggctggagtgcagtggtacgatctcggctcattgcaacgtctgcctcccaggttcaagcaattcttctgtctcagcctcctgaatagctgggaccacaggcacactcccccacacctggctaatttttgtatttttagtagagayggggtttcaccatattggtcaggctgatcttgaactcctgacctcaggtgatccacccacctcagcctcccaaagtgttgggattacaggcatgagctgccatgcctgacctatgctggtttgttttgcacatctgaaaactttacaggagtgttaccacatggtctatatccttccgtaacttgtttttgtcctctctacattacatttatgagatatatctattcaatacccattattcatttaaaaatgaagacaggcacaaaaactaaatgcttaataaagagagaacagaataaagctttcttaatttgagaagtggtaatttctg

SEQ ID NO: 28921 - DNA, 1175 bp, Homo sapiens
gagagggcttcctggaggaggtgatgcttgaggagggagtcagaattattccagaggagataaataacattaaagaacgttctcaatacggtatcagcacatgcaagaatagaggataagggaacaggttggagaagctgagactaattcaggggcagtcatctggggctagggtgtcagctgggtcacatcacacaaggacctgaagagcagggacaagaggtttggacaaatgtgggaagaaggtgaaagtcacaagattcagctccaaggccatgaccactctggtttccattctctgcagagatgagagggttgctgtaaccagggaagccagcccactgcaaagggcatgtggcacattggttgtcgctctgaattttggctttgcttttttattacgaagcatgcaaagaggtttgtagaaacaaatataaacgctatgcctttcactcggctttttcaagttttgacatcttcatgtatttcagatcaccttaaaagtaaagcatcattacgtaacaaatcataacaaatagagtggaggtcccttgtaccccaccctgctcctattcccctccccaaggtaactgccctcccaaacttggtgtttatcctatttaaaataattatgcatgtacccaaggacaatattttggatttttttttttttgagaagaagtctcactctgttacccaggctggagtgcagtggtacgatctcggctcattgcaacgtctgcctcccaggttcaagcaattcttctgtctcagcctcctgaatagctgggaccacaggcacactcccccacacctggctaatttttgtatttttagtagagatggggtttcaccatattggtcaggctgatcttgaactcctgacctcaggtgatccacccacctcagcctcccaaartgttgggattacaggcatgagctgccatgcctgacctatgctggtttgttttgcacatctgaaaactttacaggagtgttaccacatggtctatatccttccgtaacttgtttttgtcctctctacattacatttatgagatatatctattcaatacccattattcatttaaaaatgaagacaggcacaaaaactaaatgcttaataaagagagaacagaataaagctttcttaatttgagaagtggtaatttctg

SEQ ID NO: 28922 - DNA, 1175 bp, Homo sapiens
gagagggcttcctggaggaggtgatgcttgaggagggagtcagaattattccagaggagataaataacattaaagaacgttctcaatacggtatcagcacatgcaagaatagaggataagggaacaggttggagaagctgagactaattcaggggcagtcatctggggctagggtgtcagctgggtcacatcacacaaggacctgaagagcagggacaagaggtttggacaaatgtgggaagaaggtgaaagtcacaagattcagctccaaggccatgaccactctggtttccattctctgcagagatgagagggttgctgtaaccagggaagccagcccactgcaaagggcatgtggcacattggttgtcgctctgaattttggctttgcttttttattacgaagcatgcaaagaggtttgtagaaacaaatataaacgctatgcctttcactcggctttttcaagttttgacatcttcatgtatttcagatcaccttaaaagtaaagcatcattacgtaacaaatcataacaaatagagtggaggtcccttgtaccccaccctgctcctattcccctccccaaggtaactgccctcccaaacttggtgtttatcctatttaaaataattatgcatgtacccaaggacaatattttggatttttttttttttgagaagaagtctcactctgttacccaggctggagtgcagtggtacgatctcggctcattgcaacgtctgcctcccaggttcaagcaattcttctgtctcagcctcctgaatagctgggaccacaggcacactcccccacacctggctaatttttgtatttttagtagagatggggtttcaccatattggtcaggctgatcttgaactcctgacctcaggtgatccacccacctcagcctcccaaagtgttgggattacaggcatgagcygccatgcctgacctatgctggtttgttttgcacatctgaaaactttacaggagtgttaccacatggtctatatccttccgtaacttgtttttgtcctctctacattacatttatgagatatatctattcaatacccattattcatttaaaaatgaagacaggcacaaaaactaaatgcttaataaagagagaacagaataaagctttcttaatttgagaagtggtaatttctg

SEQ ID NO: 28923 - DNA, 629 bp, Homo sapiens
gattccctatcacagagaaatacagtatgatccctgacctcatcaacaagaatgctgcaccagctagagagaaaaagacagggtagagaagagtagtattggtaaaagagatgaaaatgggagcagtgattagcttgttcctaagacacaatctcagagataaaaccttaatgttcagtccttatctactgttcctttaaacggtatccttagatatggccaccaagaacacccattcaaaataatctggtaatctgtttaggtttggtgaattacaatcccaacaacaccaacaatcagtatcctgagaggctgacagggttcctgacagtgttctaagcatttcattttcattttctcttgggtgtcatgtagcagaaaataaccaggtatcatccatttctcttcaagctttccatttaggtgaagagaataaaataaatacaagggtagttctatgayaaaatagtccatagatcttggaaaaaccatagcccacagaaatgaagaggtttgtgttagcatccatgaaattaacaagtttgaagaaaggaccaccgcactgaagagcagaattcatagtgtcacaaaataggtcgtgacataccattccctctgttcccttaaaa

SEQ ID NO: 28924 - DNA, 891 bp, Homo sapiens
tacagttcctcagggtcccacagtcagggtgggttctgatcaatgtttgcagggcatctagtgatacagagacacaagggctaagattccctgggcaggatagtggccaacgacaggtgcacaaccagtatctcacccatcaccctagttcagatttgaggggagaatgaaagaacttccatgagctggccatcttgtgctctcccctccagaagtccccaaattgctgtggacagcagtccacctgagtgcagagaagtcctctgacaattcagcagtcagtaatatgttgcagaggtgaaggagcaaagaaacaccccacctaccttttccacgggactccaagttcctccgggtcaatctctgccagactcttgctgccttctttttctgtgtccaagccttttcccatgggttctctcacaggtacaaaccatcttctatcagctttccacttggaccatgatcattcgcctgtaactttggatcttctttctgaggagaactgatatctggcatctctagtcagccatttacaatgaccagtttgtggyaaaggatttacaaaggataccaatgaagagatacataggttgaagtgtggaggaagggacacggggcttccatgccctccctgggtgcaccacctccaggaacctccatgtgattctagcatagaaaattaagtaatataattctttacaagaatttaagtaataatattcttaatattcttcacaagaatattaagtaacataattcttcacaagtagtataattctggtcacaagcagggtgcttgtgagagtgtgctatctggtttctaacaggctattctgaaagtcctagataaggtagatttgccactaacttcacacacgtcttctgtag

SEQ ID NO: 28925 - DNA, 651 bp, Homo sapiens
ttatctccatgttcaaggaatttatgctttaacagtgagaaaacaatgaaactaaatgatttcagtatgtgtgaaaagtgattaatgggacaagtggagtaaactgaggaacactasaatctgtaaatagtcaggtattgcttcaaagaggaaatgacacttgagctagaagatgaaaaattaattgaagtttatcatgtgaaaaaggaggtggtgatatatccaggcagagggaagagtctctatgcaaaggcaacaagaatgtacaatgttgacaaagaggaatatctcactttcattggcgttgtcaggaggcctcttgggggaacaaaatcttgatgtttgaagatcagttagttaggcaaagaaggggaacaccgagaaaaaaagaggaacataaaaaatgcagaagtgtaaagcaataggtgggaaccagaagtgagaatttttatatcattggagcatttattgagcacctaccatacacttaggcatttccgctctaagggaggaaacagttaacctaacagatttccctaaggtcatgtacttaaacactaaagaagggatcggatccatggttttgtatgtcttccttctgcatcatcacacctcctaagtataattctaagtttccaggatgcacatata

SEQ ID NO: 28926 - DNA, 788 bp, Homo sapiens
ctgtctccccatcctcctgggcctgtccctgagggcagggactgttcctgttttattcacccatgtggactgtcccatcacctagggtcacgggcacagtgcatgcttaatgaagatttattgttgtggaatctaatgacttcgtcgcatctctttactactaaaaggctcttcatggatggactgatacacatgggcccaggaacagcactcctgcacaactcccacytccccgcaagccacccctgagccctcatcaccttcccagcccccgaccctccacactcaaacctcactgggcaccctcgtggctcgggagcaccccacggcgtcgctgccctggcctctgctcacgctgctccttccctcacctaggttcagagccacactccaacacctcctcctcccagacgcccgctccgtctcaccagggtccctcggcctttaggactcgcattcaatgctgagccaatggcttcatccgtatttgtttgcccgtctgcctcccaggcagaattcaacttccttaaaggctggggaaattggtcccctctgtgtgtccactgagccagtacagagcctggcatggagcaggtgcttaattgatggtattttgtattaagatttggattggtctagtgataataactgttattaactttaccactcatgaagtccaccatgggaaacaggaagaccaagccagtcacagagctgagaacagaacccacccctgggagaagcccctgaagccctgcccaaggggctgaactgagggaaggggatcc

SEQ ID NO: 28927 - DNA, 757 bp, Homo sapiens
tcctattttaagacagcacaatagacagaaacacagggcattttccttctgattaaatgacaaggcactggaactctgttttaatacagctttgtgcttcattcacagtctcaaataattttttatcccacagatatttgtggaaagccatgtatagatctggcacttagaactggacccacagaagggtaagacatggttccagccctctgagagcttacaacctagtcatataatcatgaaatgtaaagtggatgtattctgaatagcccagacaagaagtgcaataggaattaggaggtgagatctgaggactgaccttgtaggaaaagatttactgtagacagtggcccttaaattatgatgaagaatgatgatgctgatgctaatgatacttaagataygccaggcactgtgctaagccctttacaaatattgccttcattaaacagctgaattttgctgatgggtaacccagcaagggagtgtaaaaggttaagactcaagctccagttacctggacaccataactcatgctctgaaccactctcctgtactgtctcctgtgataaggatttgattcacagaaaggagtttctgggggaaggaaacaaagtcagcaaagatggagacagggatatgcagtggcagctctagaatttctctgtaggagggacttcagatgaaaatctgtttgcgggggaagggctgctcaaagatgtaattctttgcagctatgtttgcagaggaggcacac

SEQ ID NO: 28928 - DNA, 758 bp, Homo sapiens
gattgagcctcaagatgtaagcagcccaccccagtgaagtgggggaagaggcagccctccacccaccaggcatccccggagcagagcctgctgggaggtgacctctgggagaagaagaagtgccaagggaagtctgcagtggcccaagggaagggggcacagaaggaaagcatctaaaaatggaagtcttagaacataaattattcaaaaacaggattatttaactggaagttaaaaatgagagaatcattacacacccttgcccaaatgttaatgccctggagagaagkcgtattactttcctcgggtcaccataacaaactatcacaagctgggtggcttaaaacaccagacaggtattttctcacagtttggaagccagaaatctgaaatcgaagtgttggcaggactggttccttctggagcctccaaggaagaatccattccacgccctctcccagcaatagctggagttccttggcttgtcgacgcgtcgctcccatctctgccttcatctttttttttttttttttttttttgagaccgagtcttactctgtcacccaggttggagtgaagtggcatgatctcggctcgccacaacctccacctcccaggttcaagtgattctcctgcctcagcctcccaagtagttgggattacaggtgcacaccaccacacccagctaatttttgtatttttagtagagatggggttttgccatgttggccaggctggtttcaaactcctggcttcaag

SEQ ID NO: 28929 - DNA, 503 bp, Homo sapiens
ggaccaacggatccagcattgtaggatgtattttaaatatcaaagaatgggaaggagactttaataaatttattcttatctgttcaaactcattttacagatgagaatattaagcaccgagaaaagttaaagagcttacacttatacaagagcagccaatttctgatatatgtaagactagaatccaggtttactggtcccctgccttgtgcttcatccatcataatctcacatgtaacataatgataccrtaaagaacatttaaaggattctgatgcacttcaataggaagaactctgagtttaaagacagggctcatcaagtcttaaaaataacacagcaaggaccttaggaggaaagggacattcttattcaaatgaaaacaatactgttgaaatattattacttgcttttttcagtcactatattttcacctattaaaaaatgccagatgaagatattaagaacataaaatagtttattccaacgtaagttcacatctt

SEQ ID NO: 28930 - DNA, 624 bp, Homo sapiens
taatcgttttggcagaactgcattttacttttactgttgaaygtttattgtcagaatatagatacactgaaagtgtcatagatacattggatttgaagagttggtataaaattaaaaatacaaaatatcccattaataaatttttccaccaattacatgttaaaatgatattggggatatatttggttagataaaatacattattgcaagtaatttcacttttttttactttttaaaatgtggctacatgaaaatttaaagtaacatatgtggcttgcattttacttatattgggcagtgttgttcggaattacactgtcctttcgattccttgaccaatggaagaattgtgcatagaaaattaaattttgaattattgttgttgtttattacataatttgacagtgaagaatattataaaatattccctaaaataaagaaggactcaagaaaacatcaaatcagaggcaattttaactgctgagagtatgttttagtaatgttcctctgagtgcatttcacagcaaatgaacaaaaaatcctaaatcttaatcaatagctttgcagagacattctctgcgctttgatcaagttctgcttctttgtgttttttgacaaggttct

SEQ ID NO: 28931 - DNA, 568 bp, Homo sapiens
tgacaacttccaaatatatatctctagccaatcacttaatattcaactaggggtctatagtggagaagtcagtatttcaaaacggacagatccaaacagttctctataattctccatcctaatgcaaaaagaaagagaaagcaagctctctggtgtctcatcatataaatatagagagaagggggtcttgctatcttgccaggctggtcttgaactcttggactcaagtgatcctcccayctcagcctcccaaaatgctgggattacaggtatgtgccaccatgcccagccatcttatcttataaagacatgattctttcagatcagggccttacccttatgaccttatttaaacattaattatttccttagaggccccatctccaaatatagctaggggttaggacctcaacatctatattttgtagagacccaaacattcagtctataacaaatgcagtaaaatgaggcaactgaaactgaagaggaaaccagtgtttcctatgcgaagaagaactgaagggtttaaagaataaaaggtgtaaatttattttgagagattaaattg

SEQ ID NO: 28932 - DNA, 799 bp, Homo sapiens
gtctctctccttcctaggctcttgttcattctgaccaaatctttctgaaaggagaggagaaatctcctgtccacatatcagaatttcaaatcatttttaattttttaaaaatgttaattggtacagcatttttgcaatgaaattttagaaatatttataaaatgctaaactatttatacccttttcattttcacccaacgtcgatgttaatacatttcttataagaaaacattaatgtttgcccaataatwcatattcgaagatgattttattctattcatcatacagcagatgggaaacaactggtgtccattaggaagaaagagtttaattaattatggtgcatgcctactttagaattatagaaattagtttcaaaagagagatctatatatatatacacagttgtggaaagatcccatatccattttatgaagtgacaaaggctagtggcagatcaatatatacattatcattcttgtgtattaaataaaaacaatatattgttatagcttatctgtcaattaatagcctagagtcagttttaaaataatacataccagattgttaattgtggtgacctctaaggagggggataaactgtggaggagttttgtaaaggggaaaattgtgaattatatacacttctataatttttgcaataacaatatgcaaactgttacctttgaaatacaaaatatttatgcttaacagaaatggtagctatggtagttacagtaactgctagctgatgcatcagagaaatgctgaaatttgattggcatgacacaagtttatt

SEQ ID NO: 28933 - DNA, 516 bp, Homo sapiens
aatataatttattcatttaaaatatttaacttgcctctccttccactaaaatataagctcctgtgagcaagaatttttaattttattactttttagtttttattttcccagcactaagaacagtgcctgttcatagtagcatttaataaacataaatgaataaatcccacagatgaatgttggaacaagtcatggcaactgaagttcttattttccatttcatgattctcaggctattggtgacagctttggatgaaattgatgctactggagaacagaatctacattttataaaatcwcttgcatataaataaccaatacgtaagtaatactggaatagagccaattctttatatcatgttaaaattattgttggtatgcatatcagaaattaaaacaatagctagtgaattaattgccctgatgaaatttttgactctttttaagctatgtttgcacaatgtaataaaataattcttaccattatttaccatattttcaaaccgataaaattag

SEQ ID NO: 28934 - DNA, 979 bp, Homo sapiens
taacctatttgaggttagtcacatctcctagactatctctctagtaattcaattttagcacatatttttctccaagctcttaaaccattaattgcatttattcacaaaaatagaatccacctgtttctaattcatttacaccttttgtaacaaactgctgttttgtaccaagttgatgtccaaaaagccaaagatatccttatgagtgttaagatggttagaagtttttcttagggtaaacctggtgaaatgtactaaatgaattataaaatatttaagatccaagtagcaggcatattaaataatatatggacatttgaaatattagagagtaacatttacttcaggcaaagagtgaaattcaaattttcatctaaaaattaatagaaaagagataacctgttgtattaccttatgattcaccaaaggtataaatatatgggtggccaggcgcagtggttcactcctgtaatcccagcacactgggaggctgaggcaggtagatcacttgaggtcaggagtttgaaaccagcctggccaacatggtgaaaccccatctttagtaaaatacaaaaattagctgggcatggtggtgggcacatataatcccagctactcaggaggctgaggagaagaatcacttgagcctgggtggtggaggttgcagttagccaagattgcaccrctgcactccggcctggatgacagaaggagactgtctcaaaaaaaagatgtgggtgatttaaattttatttttgagaaaaatctggacaactagacaatatcttagacttttcaacacttgagattaatttttaagttggttatgctcaatataattacaactttaggaaaaaatgagtaactcttggattacaatagatgaatacattagtgagtggatgaaaggataagtagttcaacagaagaaatacccttagagtttaaaaaattcaatatatttttttcattgctccta

SEQ ID NO: 28935 - DNA, 954 bp, Homo sapiens
ttgagagtttcgtgtgattaatttgttttttagaattaagtttatakcacattcttttttgccagctaatgcccatcatttattctctatcattgccttaaatatttccaaaacgtataggtgtactcagaagcatttctctatatgatatttccactcaggaatattgaccagtaaaagtgaatggctttcttcacccaggcagttttatcatgttgttcttccctgacagtaaagaacttggccaagttaggaaacatctttaattgacagtagcttggtcattcagttaagaaaaattagaagctgttttacagtgtaaaggctgttttctcgcaatatgtgcatgcaatgttggatattatcaaacatgatttccccatcccttcttcttgtttactagggtggtattctctggattgtatagtgcagggcttgacacagagcgataattgagagtaaaacctactttggtattctctctgactctcattccaattccttttaaattaacaaatgcagtgacataactcagtttactagttccatagtaaattattttgtgccatgtgtgagggtggtatttgtttgggacgtaagggaactttggctgtctttgccggggggaataggtttgtgcatgtgtgtgtacaggactgagtgtgtgtgttggggaatgcttgggctttgtagccagatatagcacaaaccacatgtggctttaaacttttaaatttaaattaaacataatttaaaaaattaatttcctcagtcatactagctacgttcaagtttcccggtaaccacatctggctactgtattggccagtgcagatacagggaattttcatcaatgcagaaagttctatttgacaatgctggtttagcctcttaataactgtaaaatggaatacatagctgtcttgctggatcttctgagagttaaatgctttg

SEQ ID NO: 28936 - DNA, 1001 bp, Homo sapiens
tttttttaattctgtgtagctctggccaatagagagttaagagcactggtgggatggaaatactaattccagagaggtagtgggcatttccaagcatcccacagcaagtcaggggcaggacagggaagaggagcctgggtttcctagctccagcctctgcttggtgaatctccctggctactttggaataagaaagctttcatgtgtccagtgaagggtcagggcatccagtgggtaagaatggcatacttcctgcccctgttgcagggcacaggcctctgggtagagtagactggggttggggagacgggggtgggcagcttcaagtagctttggggtataaggctccagggccagaagagcccaggactcataggatggagtttggtggcaaagcctctgccacagtgagactacttggaacagcccactttggtagtgcactcactctgagccaggccccagaggcctcagggtatagtagggaatgaggacagagattgttcatccctttcttcctccaactgccatggacatgggggataactctgtaaacaagccgacatgttctagatgcatatggagcacacagccatcaggagtaagacccacaccatgtaagtgattctggtaacgtgtactgattattattcgatggcatgcagtgggggtgggtttaggcataagggatagaggtagcaacaccaactccccataccccaataaattagcttttccagagaccctgctttatcctcagagaaggctttgctccccagagcacatatcattttgagaatattgtttctttgtccattcattcaacaagcatttagcccctgctgtgtatcagagtctgcgcaggctctgagttcacagsggaaacacaacagtcagcaggttggatcccacagactgtatgagcacaacacagtctgaatatagcattgaatactgaaacagtgttgaccattggacttgtaggagctcttttcttggga

SEQ ID NO: 28937 - DNA, 734 bp, Homo sapiens
aagctgctgttggcacatcccacctgcacatgtgccattttatcaccctttgtgggtgtgcttgtgtaggggaatctgtgcatgcacaaaaaagatgtatcacagatgaagagggctgggatggtcttttctcccttagggacgctgaacaaactttgttgtgtgtctgcattttgactgcaactcttcacatgagatcaggcatggaattttccacttgtgatgtcatgtcagctctcaaaaggttcaggattttggagcatttcagatatcaaatttttggattagggatactcaacacgtgtgtgtgtgtgtgtgtgtgtgtgtgtgtktgtgtgggtgggtgtttatgtataatttgatgaaagttaaaagaggaatgtgaataagcatgaggaaaaaattaagacacatgattggaaatccactggtcaaaatgattagcttattacttttagaattgcccttaatcattcagaaagaaaggtgatgagttactactatcagagggactgtgtcctccagcaaccacaaataatatttagtggctcagtaattactttaatcaattccttaactaccgtaagatacgtgttatcaagatctgatcattggtaggtgttgacaaaagaaagttgctttctaaagtatcctattttttctttcgctaaaagcctagtaaaataaaagtggatgttaaatttataatttttttatttctgggaagaaagaac

SEQ ID NO: 28938 - DNA, 734 bp, Homo sapiens
aagctgctgttggcacatcccacctgcacatgtgccattttatcaccctttgtgggtgtgcttgtgtaggggaatctgtgcatgcacaaaaaagatgtatcacagatgaagagggctgggatggtcttttctcccttagggacgctgaacaaactttgttgtgtgtctgcattttgactgcaactcttcacatgagatcaggcatggaattttccacttgtgatgtcatgtcagctctcaaaaggttcaggattttggagcatttcagatatcaaatttttggattagggatactcaacacgtgtgtgtgtgtgtgtgtgtgtgtgtgtgtgkgtgtgggtgggtgtttatgtataatttgatgaaagttaaaagaggaatgtgaataagcatgaggaaaaaattaagacacatgattggaaatccactggtcaaaatgattagcttattacttttagaattgcccttaatcattcagaaagaaaggtgatgagttactactatcagagggactgtgtcctccagcaaccacaaataatatttagtggctcagtaattactttaatcaattccttaactaccgtaagatacgtgttatcaagatctgatcattggtaggtgttgacaaaagaaagttgctttctaaagtatcctattttttctttcgctaaaagcctagtaaaataaaagtggatgttaaatttataatttttttatttctgggaagaaagaac

SEQ ID NO: 28939 - DNA, 734 bp, Homo sapiens
aagctgctgttggcacatcccacctgcacatgtgccattttatcaccctttgtgggtgtgcttgtgtaggggaatctgtgcatgcacaaaaaagatgtatcacagatgaagagggctgggatggtcttttctcccttagggacgctgaacaaactttgttgtgtgtctgcattttgactgcaactcttcacatgagatcaggcatggaattttccacttgtgatgtcatgtcagctctcaaaaggttcaggattttggagcatttcagatatcaaatttttggattagggatactcaacacgtgtgtgtgtgtgtgtgtgtgtgtgtgtgtgtgtgtgkgtgggtgtttatgtataatttgatgaaagttaaaagaggaatgtgaataagcatgaggaaaaaattaagacacatgattggaaatccactggtcaaaatgattagcttattacttttagaattgcccttaatcattcagaaagaaaggtgatgagttactactatcagagggactgtgtcctccagcaaccacaaataatatttagtggctcagtaattactttaatcaattccttaactaccgtaagatacgtgttatcaagatctgatcattggtaggtgttgacaaaagaaagttgctttctaaagtatcctattttttctttcgctaaaagcctagtaaaataaaagtggatgttaaatttataatttttttatttctgggaagaaagaac

SEQ ID NO: 28940 - DNA, 561 bp, Homo sapiens
gcggcctcactgctttgtgacttaatrttatatccaaccctgcatctttaattgagtctcaacccggagggcacatgcagatctctcagcaccatacaatatgtgcttcctttgcaggtttatgtaggtggaagtcatacagcaacagctcatggaggaatttagtagaagttaaatagtgctcctctaagagtcagaatagatattgggacttcccacaatttaggaatatctcttgaagggtccactttggtaaaacaaccaaatcaacaacatacagcagacccccaaacactccaacaatgctaccttgacaggtgttaggaagaggccccaaatattcacctttacatggtacctgaaggagcattaggctcaaaacacaggatcatttctggggagcaatggccctcaagtcacatcttctcattctagctccagcatcactgtccaagacacaggtcaaaatccagcctggacacattgatcatggtacccacccacaatcctaagcaggcaacttctgtaacttaggaagctcttcccagccccagctgaaaa

SEQ ID NO: 28941 - DNA, 700 bp, Homo sapiens
gaaaggatgaaatcattcagatgaacaccacttaaaaaccttgaagtaatatttaaatatgagtgagactttcttattaagaataaagaataattcaaaatctgaagattagtacttaccccacctggtttatgttaacttaaatgagataatatattaacgtgatacaaatattgccagatagttctccaggtggcttcgaaacaacctagttctctccctttccttgcttgtagtctcgtaaataactgtagaagtgttgggtatgcctcatcctgaaataaggaggaagctgctggaacaacctgggttctgttccagtccctcctagaaacaggacatccttcaaggctttgtcccagcaattcatataatctcccaggatataaaaccagggcaggcttctttctagggtctctcagctgtggtgcaagcagggcatgcacagacaatactccactcagyctgggaagctttcctgagccttgggagactggctcatcatgaatccgagccttctgtggtccctttataactatctgcaagtaataaattagcttcatggaatttatagtatatttaggtgttctgtctcaccaggctgacaaattggtactcagtgcacagggtaactcttcacaaatgcctgacatatatttatatgtctggaaaataaataaattgtcttcccactctaagg

SEQ ID NO: 28942 - DNA, 618 bp, Homo sapiens
aaccaagaatttttaaagcattaataaggacaaagatggctgaggcctatggtaactttgagaccccatagacaaaatcctcatgaaatagagacaaggtgtaataacccaaagcttcccaatgtgcatgctgttgtataggtgtgtcaacaggagacaggtgatctgagatagtgtctccgcagccttggggctactggagcaagcaacctggcctgtttatccacgtataaaaatagtgccattttctatgtgtaaaaaaaagataggaaagcactaaaagaggctataaaataatattagtaaagatggacaaagaacrttattgatttcaaacagataagtggaaaagtcttgaaaaaccatttcaaattattatggagatgtagtcaattcaaaataacataatattaaaaatatgagttatagttgtgtgcatttctggacaagataatggagttaagagttaaatagtgaaataaatacattaaatgctctagtgatggtaaagtgtcagaaatactattttattataaaatatgcttctgggatacatgcacagaaaaataactaaatgctctgttttcattttgttttcttttgtctgattttcttaaa

SEQ ID NO: 28943 - DNA, 699 bp, Homo sapiens
agatttcttccactttgtggttccgttattctctaagactttgtctccctggtattcagctggcaaaagaggagagcgggggtgaggagaaggctcttctgtttaaactctattagcacaggagcaacacatctcacttctgttgatagtccaccggcaagaactagtcacatcgaccattcttaaatgcaagaaaagtcaggaaacgtagaccctaactgacagtaacttttcaataaccacttatattatggaagggaggagcaccaagtttraggatcagctagctgtctcagccatggggaactacttattcctttactcatgctgacttctcactaatcagtttaactaaagtctgaaattagggctgaggaagtgaatggaactcttggctgatagagggagcatggatagtagaaagatcgttatcctttccacccttcctgaagctcctgatttttccagagcaagtatgggtccatcaaagaaatgatggcttgagaaggtacacaaatgcggcctcttggagaggggagatatggctattgggggaacaaggttaggatgtctgaataaattgagtcctcatttagttaagccttcgaatagttaatgttcattttactatttcactgatagagatctcatgttattttgtttaggatcagtgtttattgtgaaatcatctgttccaca

SEQ ID NO: 28944 - DNA, 699 bp, Homo sapiens
agatttcttccactttgtggttccgttattctctaagactttgtctccctggtattcagctggcaaaagaggagagcgggggtgaggagaaggctcttctgtttaaactctattagcacaggagcaacacatctcacttctgttgatagtccaccggcaagaactagtcacatcgaccattcttaaatgcaagaaaagtcaggaaacgtagaccctaactgacagtaacttttcaataaccacttatattatggaagggaggagcaccaagtttaaggrtcagctagctgtctcagccatggggaactacttattcctttactcatgctgacttctcactaatcagtttaactaaagtctgaaattagggctgaggaagtgaatggaactcttggctgatagagggagcatggatagtagaaagatcgttatcctttccacccttcctgaagctcctgatttttccagagcaagtatgggtccatcaaagaaatgatggcttgagaaggtacacaaatgcggcctcttggagaggggagatatggctattgggggaacaaggttaggatgtctgaataaattgagtcctcatttagttaagccttcgaatagttaatgttcattttactatttcactgatagagatctcatgttattttgtttaggatcagtgtttattgtgaaatcatctgttccaca

SEQ ID NO: 28945 - DNA, 525 bp, Homo sapiens
ggttaatacacttatgacttccagtcttcagatatgaatggataaaacccccttctcagaccctgtttttgcctcttttagacacaggccttcattatgattaggagcgtgctcttaattaggagttttccaacaatttgtttgtaaggccctacaggatattactgtaaggagtacattaataatgaaagaatyttgacaaagacagggttgaagctttgataataactgtttagtcaaacctattaaaacattgaggacatcaattaagaggaaataatattctacacattgaacctctttcactatattattatctaaaagcaaattgttttaagaggctctattcttaatgtgttggaagactgtgtactcagttttaaaatacaaaacagaagttagtatgaaggaagtggtcttcttgatgacagggacagatgacagggtattgtgaaattttaatatgtagcatgattggttgtaaattgttcccacatagctgaagtaatttgcaaataagagatg

SEQ ID NO: 28946 - DNA, 636 bp, Homo sapiens
tactgccacagccaattacccaaggcacaagctggaaatcgggcttttcttaacttttcctacttacaaaatgttaccaaatttttccttagttattgcttgaaaaactttcatgtaaatatctcttaaatttcttcccttcatcttcattcccagttttaccacttacttgttctattactgttttggtctataacttttaggcaagttatttaaccattttctacttaagttttctcatctgtaaaatggggatagtaataggtcttactgtataggatttttgtgaatgttaaatgaattaatacatgttaattgcttaaaagggtgtctagaacagagcaggtgccacaatatgttaatttttttttttttttttttttttgagacagagtctcgcactgttgcctgggctggagtgcagtggcatgatcttggctcactgcagcctccacctgctaggttcaagcgattctccttgcctcagcctcccaagtagctgggattacaggcgcctgccaccatgcccagctaatttttttgtatttttagtagagatggggtttcactatgttggccaggctggtcttgaactcctgaccttgtgatctgccygcctcggcctcccaaagtgct

SEQ ID NO: 28947 - DNA, 513 bp, Homo sapiens
gcacctgctcatgcggtgtgcatctgtgctttgttggcggtgccactggcatcaatgtaagagatggaactaaacgtgattgttttgtatctgtagctgttagtgcatggtaagatacttctggtgataattttatttacagcttcctctcttgtgacctcatatctcccctctcaaattagttattcaaatgcgtcactatcaccatgcagcaggctaagcaattcatctattcttgaaagaaatctgctcgaaactagaagtagagattcctctttaaaggttaatartgaaatttcaattacttttccttaaatgtaatgggtagatgctttagatctgactcaactatgacaggcaagcaagcatgtggggaggtgatgacagtggagaaaagtgatgtcttcctcttgctggcaatttagtaaaaattgctgacacactgaggctatccaattaggtcctatcagtcaatttgtgtagtggcgtctaagggggaagaaggctgtggca

SEQ ID NO: 28948 - DNA, 513 bp, Homo sapiens
gcacctgctcatgcggtgtgcatctgtgctttgttggcggtgccactggcatcaatgtaagagatggaactaaacgtgattgttttgtatctgtagctgttagtgcatggtaagatacttctggtgataattttatttacagcttcctctcttgtgacctcatatctcccctctcaaattagttattcaaatgcgtcactatcaccatgcagcaggctaagcaattcatctattcttgaaagaaatctgctcgaaactagaagtagagattcctctttaaaggttaataatgaaatttcaattacttttccttaaatgtaatgggtagatgctttagatctgactcaactatgacaggcaagcaagcatgtggggaggtgatgacagtggagaaaagtgatgtcttcctyttgctggcaatttagtaaaaattgctgacacactgaggctatccaattaggtcctatcagtcaatttgtgtagtggcgtctaagggggaagaaggctgtggca

SEQ ID NO: 28949 - DNA, 564 bp, Homo sapiens
aaccgagtttgtaacccgtgggttagtatgaggaccgggttcgtgtactctctgtatctcctcttaagcttcgtccagggttctttatttttgtctgctgccaatgtcgtctcgcatgcctgcaccctcgcatgcacgctgcccgcatgccacgtgccacgctgtagccacagaccccttgctcgggcctcacccaaggccaaactccaaacacaatcagaaccagccaaagaagcacttcctgggcacggccaccagctctcccgcctccagtgtgggccggctcctgcagggtccgagggctgcatctctaccagccagcccagggctcttcccagggtctcgcattcaagggcaattacattttaaaaagaaaaacagaaaaaggttaatcacaaaaccaaccctcacttcacagggtctgtaagtcactcatagaactttgctcttcccgagacagggtcccttccccagctcaggcacaacagagtctggcaggctctggcaccctgggcctcctccgggagcctcccatytgggcagtggagccataaacggggatcc

SEQ ID NO: 28950 - DNA, 440 bp, Homo sapiens
ttttyttttcttttttttttttaatttttttttaatatactttaagttttagggtacatgtgcacattgtgcaggttagttacatatgtatacatgtgccatgctggtgcgctgcaatctaattttcttaacagtagaggactccggttttaaaaatcatctgctctcagggattatccttaccaccgtacatagaacagaatcagactgtgcttttgcaagtccagatatgacttagttgtcaaacatagactcttgtacagtaccgcgaatccaaacactgatctgagttttgtaataacacagatgagaagccacatttctgcctcaaccttctttctctgaccattgtcaccctattatattttattttaagttccgggatacatgtgcaggatatgcgggcttgttacatagataaacatgtgccatggtggttt

SEQ ID NO: 28951 - DNA, 440 bp, Homo sapiens
tttttttttyttttttttttttaatttttttttaatatactttaagttttagggtacatgtgcacattgtgcaggttagttacatatgtatacatgtgccatgctggtgcgctgcaatctaattttcttaacagtagaggactccggttttaaaaatcatctgctctcagggattatccttaccaccgtacatagaacagaatcagactgtgcttttgcaagtccagatatgacttagttgtcaaacatagactcttgtacagtaccgcgaatccaaacactgatctgagttttgtaataacacagatgagaagccacatttctgcctcaaccttctttctctgaccattgtcaccctattatattttattttaagttccgggatacatgtgcaggatatgcgggcttgttacatagataaacatgtgccatggtggttt

SEQ ID NO: 28952 - DNA, 440 bp, Homo sapiens
tttttttttcttttttttttttamtttttttttaatatactttaagttttagggtacatgtgcacattgtgcaggttagttacatatgtatacatgtgccatgctggtgcgctgcaatctaattttcttaacagtagaggactccggttttaaaaatcatctgctctcagggattatccttaccaccgtacatagaacagaatcagactgtgcttttgcaagtccagatatgacttagttgtcaaacatagactcttgtacagtaccgcgaatccaaacactgatctgagttttgtaataacacagatgagaagccacatttctgcctcaaccttctttctctgaccattgtcaccctattatattttattttaagttccgggatacatgtgcaggatatgcgggcttgttacatagataaacatgtgccatggtggttt

SEQ ID NO: 28953 - DNA, 440 bp, Homo sapiens
tttttttttcttttttttttttaatttttttttawtatactttaagttttagggtacatgtgcacattgtgcaggttagttacatatgtatacatgtgccatgctggtgcgctgcaatctaattttcttaacagtagaggactccggttttaaaaatcatctgctctcagggattatccttaccaccgtacatagaacagaatcagactgtgcttttgcaagtccagatatgacttagttgtcaaacatagactcttgtacagtaccgcgaatccaaacactgatctgagttttgtaataacacagatgagaagccacatttctgcctcaaccttctttctctgaccattgtcaccctattatattttattttaagttccgggatacatgtgcaggatatgcgggcttgttacatagataaacatgtgccatggtggttt

SEQ ID NO: 28954 - DNA, 1274 bp, Homo sapiens
tttgccaatcagtgtagtaggggatttatgttacttttaatccaatgcccatacaaggtacaaggtacacattcttattttacagatgaggaactgggactaaaattaacttgctagaccaagtctgtgtgatgccaaagcttgtgcttgttcttctacattatgcaagacagaaggcaacagatgattaactgtagttttctacattttgcactaacatgaccctccactggcttaaaacgtagaaagttgccatccttccaggcaggaccaactcagtgaaggaaatgagtacatctgttcacttgccaaatgtgctcttttggaaaaaaaaatttgaagttatacaaatatttgccattccattaacttatgtgatctagaaactaatgaacacaaaatgaatttttgctttttgggctatttgtcttgtcattagctaaaacattatgacaaacttcatctgtaacataaacaaacctgagctattttaaagtccagaaaatgtgaagctagtgccgaatctcagtggaatactaatttttacaactgtctgcctctttgcagcaggcgtcttctctatttggtttccatttcgaaatcatgaaatgaacgtaccgtcctgacctccagccatctgttggcagctgagagaaataagtaggcaatgttgtttgtatccgtcagttccagcatacgttgtttaaatctggtttcatgcctgcagaaaacaaaaacacgatgttaaccacacaacaggagaggtaataagaaacagtcacacttattactacactatttactcaacacagtgacaaactgatggcatggaatgatcagtaaatagatttctttttttttttttttttttcagatggagtctcgctctgttgcccaggctggagtgcagtggcgcgatctcggctcactgcaagctccgcctcccgggctcacaccattcttctgcctcagcctcctgagtagctgggactacaggcgcccgccaccatgcccggctaattttttgtatttttagtagagacgaggtttcaccrtgttagccagggtggtctcgatctcctgaccttgtgatccgcccaccttggcctcccaaagtgctgggattacaggcgtgtgccaccgcacccggcccagtaaatagacttctacttcaaaataaagaccagctactactgcttttgcattctaagagagatggggggccaggggttatttctttcttaccccttactagaaaagagccttctataaca

SEQ ID NO: 28955 - DNA, 822 bp, Homo sapiens
atccttttgcctgagctgcctgaatagctggaactacaggtgtgcaccacccagcccagctaattttttatttaaaaatttttattttcgtagagacaaggtcttgcctttttgcctaggttagtcttgaacttctggtttcgagcaatccttccactgcagcctcccaaagtgctacgactgtagatatgagccaccrtgcttggcctagttaatgtcacttacactcactgtcacattgcagtattgtagatttacatttccaactataaaatatgaaaatatctcctttatagtacactcttcaattttgaatatgatttttaagttttgcaatttggtaggtaaaaagtgaataatcaaacaataaaacataaaaaatcccaccaaaagctgaattgtgtttgtattttgaataaatgcaacttcttatagcattaagcaactcaattattttggacttcaaaacttacatttgtctctatgcagtagagaggacctgaaaagaagcattgaggaatgaacaaaaagtgaaccctcagtggtcgtttgtaccttttaggtggttagaaaataatgtttcttgctacttccctcaaatctcccagtccatagtagttgtggtagcttgcctgcaaaatggctgccatcaattccttcaattcctgcatgtgcttactattctcccattaagaggtggaaactatttctccaccatcttttttttcattgtacactgatgacctttaattcttttttttttactttaagttctaggatacatgtgcagaacatgcagattttttcacatagatatgtgtg

SEQ ID NO: 28956 - DNA, 596 bp, Homo sapiens
gagtgcttactatgagcctggcaaagttttagagatgtgactcatagtcaagcaggagatacagatgtagatgtgaaaaaattgaaaaatgtagagtactgcaagatgaaaaatagcttggagactttgcctattaaagaatagccactagaagtaggtattgaaggttctcatgaattgaactaagaaacacattttttaaaaaatgtacaaccagtttggtgggtttttawggactgctagccattcctttattttcagtattagactgaaaacaaaagtgtagctactttaatatccttttcctcttccctgcatagaaaatgtggttatataatctcaactgcagtgatgctgtgacctatttaatggaaactacatgcataagtgatttctctgagtcttttttcacttcaaccttgcatggacatttagcaagaaatatttatagaatatactgtatagctctttggtttatcaagtaaatacattttgtattctacaaatatgtttataatatgggcaaaaaactgattaattcagccacctctttctgcttcttttagttatcctgtgaaatttttattagtgcaaaa

SEQ ID NO: 28957 - DNA, 1381 bp, Homo sapiens
cagtgcttgagatattttgcagaccctgcacttgatggatcagctggcaccacccagatcaataaactggcccatctgaacttgtggcccccaacctaggagctgactcagtgcaagaagacagcttcgactctctgtgatttcatctctgaccagtcagcactcctggctcactggcttcccccaacccaccaagttatccttaaaaactctgttccccaaatggtcagggagactgatttgagtaataataaaattctggtctaaaactctgttctcccgcacagccagctctgcgtgaattactctttctctattgcattttccctgtcttgatgagttggctctgtctaatcagtgggcaacgtgaaccccttgggcggttatagtgttcccaaaactcttcatatcccaggcttgaagtgaagcagaaagtgttccatcttctccaccaaaagatgtagcgggcacatgtaagtggcaaacatttcctttcaaaaattctctagcaaatcttttaagtttctgatcacttcttatatcttacctgaacgagagtgcaagaatcataaaagcagttctagaccatttgcattacaaatgttgcacatgggaacctgtctacttcttcaatattaaactattgtattggcgtctcaattttaccttccctttattgatccaaagggcatactccatttccagtgttcttcattcttttgcatacatccatatttcaatttgatatcattttcttttaaataattttctttaacattagttgtagtgcaaatctgttggtgatgaattctttctacaattttatgtctgaaatggcaattatttctccttcatttttgaaaaataatttgaccttgagtagaattctaagatgatagatttttctttcagtattttatatgttctgttccactgtgttttggatatgttgcttcaaatgggaaatatactattattctttgttcatctgcacaaaatataagcttttaattttttctctgtcacatttcaagcaatttgcttatagtactcttgtttcaagtactagggatttgttgacatttttggatcagtgggtttatagctttcataaaataaggaaaaatttcggctattatttcttcaaatacttttttgtctctcacctttctctcttggacactccaattacatrtttagtagactgcctgaaattgcctcacagctcactgttgttcttttcgttttactttctgtatttctttttttctatctatgttttattttgaatactttctattgctttgtttttaggttaactaatcttcttatctgtagtgtctaatctgctgctaataccgaccaataaattttttatttc

SEQ ID NO: 28958 - DNA, 1381 bp, Homo sapiens
cagtgcttgagatattttgcagaccctgcacttgatggatcagctggcaccacccagatcaataaactggcccatctgaacttgtggcccccaacctaggagctgactcagtgcaagaagacagcttcgactctctgtgatttcatctctgaccagtcagcactcctggctcactggcttcccccaacccaccaagttatccttaaaaactctgttccccaaatggtcagggagactgatttgagtaataataaaattctggtctaaaactctgttctcccgcacagccagctctgcgtgaattactctttctctattgcattttccctgtcttgatgagttggctctgtctaatcagtgggcaacgtgaaccccttgggcggttatagtgttcccaaaactcttcatatcccaggcttgaagtgaagcagaaagtgttccatcttctccaccaaaagatgtagcgggcacatgtaagtggcaaacatttcctttcaaaaattctctagcaaatcttttaagtttctgatcacttcttatatcttacctgaacgagagtgcaagaatcataaaagcagttctagaccatttgcattacaaatgttgcacatgggaacctgtctacttcttcaatattaaactattgtattggcgtctcaattttaccttccctttattgatccaaagggcatactccatttccagtgttcttcattcttttgcatacatccatatttcaatttgatatcattttcttttaaataattttctttaacattagttgtagtgcaaatctgttggtgatgaattctttctacaattttatgtctgaaatggcaattatttctccttcatttttgaaaaataatttgaccttgagtagaattctaagatgatagatttttctttcagtattttatatgttctgttccactgtgttttggatatgttgcttcaaatgggaaatatactattattctttgttcatctgcacaaaatataagcttttaattttttctctgtcacatttcaagcaatttgcttatagtactcttgtttcaagtactagggatttgttgacatttttggatcagtgggtttatagctttcataaaataaggaaaaatttcggctattatttcttcaaatacttttttgtctctcacctttctctcttggacactccaattacatgtttagtagactgcctgaaattgcctcacagctcactgttgttcttttcgttttactttctgtatttctttttttctatctatgttttattttgaatrctttctattgctttgtttttaggttaactaatcttcttatctgtagtgtctaatctgctgctaataccgaccaataaattttttatttc

SEQ ID NO: 28959 - DNA, 1121 bp, Homo sapiens
ttatttgcatgtttgttaatttggccttatctaagaccaaccatcagggctaaggacccgcccaagcattgcatcttatctaagaccttccttgtaaggacttgcccaggcattgcttcttatctgaaaccctccatcagggctaaggacctgcccaggcattccatcttatttaagaccctccatcagggctaaggacctgcccaggcattccatcttatttaagaccctccatcagggctaaggacctgcccaggcattccatcttatttaagaccctccgtcagggggtaagaacctgcccaggcattgcatcctatctgagactctccatgagggttaaggacctgccgaggcattgcaccatatctgagacactccatgaggggtaaagacctgcccaggcattgcatcctatctgagactctccatgagggttaaggacctgccgaggcactgcatcgtatcaaagacgctcggtcaggactaaggacctgcctaggcattgctttgtatctaagactctccagcagggctaaggacctgcccaggcattccaccttatttaagaccctccatcaggggtaaggacctgcctaggcattgcatcttatctaagccctcggtcaggggtacggacctgccgaggcgttgcatcttatctgagaccctgagtcaggaataaggtatctaagaccctccgtcagggctaaggacctgcccatgcattgcattgtgttggcaagccgtgcagatctcctgccctgggcctcattccccacccctgatctgggtctggatgattttatttatttgctttctggatctttacagcttgggctctactgtctcaggatataaatggcatatgatgtgtatgaatgatgccttttggtcagtttaatgttttttaggtttttaccctcgtgttgcatttctatgcattcgaatcaaagcagctttcatcyttgcagcctgtcacactggggacttcagggataaatcagcagaaaatccaggtctgcagtttatgacgactttttttgtccatctaattcttgccttatcaacacaataaacaactattctattcttaatgtttaaacctgtaaagctacctc

SEQ ID NO: 28960 - DNA, 1418 bp, Homo sapiens
gatcctatccccaatatatcttattatgtatatacaaatattcctaaatctgaaaaaaaatccaacctccaaaatactctggttccaagtattttggataagagatactcaacstgtgtgtgtgtgtgtgtgtgtgtgtgtgtgtgtgtgtgtgtaatttacactgattcaaagagagagaggaaattaaaatttaattctatctgctattggactcaatgaacctatgtccacaaatcctcttcagatgggatcagtgagtcagatatttctcccataagtctcagtttccatacaaatttgctgaaggaagcaattttcttaggtaacatgagcccaagatttaaaactatatttctcatggaatacggttttctaatggtaaacaaaggctttctttgttggacaacattttcatgaattctcgatgacaaattatgattatatgcaactctgtaaatactaatttagaactatatacaataaaatataactattttaataataataaaaatacacattactaaaatatgctatttattgactattttaatataaataccactttattggtattaatattatcaaagtaattaaagatgtccatcttcatttcagaaaaatggctgtggctgtttatcatgcttattacagaatagaatacaaactagaatgcattcaagttagagggggcaagatggctgactagatgcagccaggaaatgccgctcacacagacagagaccaaaatactaagaaaaccaacacactttgagcatatctttgcagatgaaacaccaagagtctatagagaagtgacatagacatgaaggctgaagagagagaaaggtgggagccctgtgagtggtactcaaatgctagggatagtttccagtcctgaacagctcctgggtaacgggtgagggaagggacagagggacaacccgctcttgctgcagacctctggggtcctagctacagaggatcccatatctcccatgaacatttgaactggcaggagaatccacctggaaagtaggcagagacagggcttcagctgatgtggagcccagggacttttgtgtgcagggcatctgcagcagagcatggccataggtgcccatccccaagggttccccatctccctttaagtagctctagcctcagctgaccaatggtccaggacaaactggggccagcttcctcactagactggggcacctatgttctgcaggtacttctgtccttcagcccctcccacaaccccagcctggccaccctgcaggaacatgtacaccgcacagtctggacactttgctccacctaagtaccttcctagcatgctgggagcacttcagatcctccagcacagatggagcccaatcccaaagatccagcagtaaaagccacaggctggt

SEQ ID NO: 28961 - DNA, 617 bp, Homo sapiens
cagggtcgagtgcagtggcacctccgcctcccggattcaagtgattctcctgcctcagcctaccaagtagctggggttagaggcacctgccacaaggcttggctaattttttttttttttttttttttgkatttttagtaaaaacaggttttcaccatattggtcaggctggtcttgaactcctgacctcatgatccacccacttcatcctcccaaagtgctgggattacaggtgtgagccaccgtgcccggccctgtccttttaaatctttagtaggtttttaagtcttatttaaaagtcttgtctcttggctgggcacagtggctcatgcctgtaatctcaccactttggaaggctaaggaaggaggactgcttgagcccaaaagttcaagaccagcctaggccacataggccctgtctctccatttttttttttttttttaattagctgggcatggtggttcgtgcatgtagtcccaactattggggaagctgaggctggaggattgcttgagtcggggaggtcaagacttcagtgatctgtgattacaccactgcactccagcctgggctacagagtaagaatctgtctcaaaataagataaaataaaataaa

SEQ ID NO: 28962 - DNA, 617 bp, Homo sapiens
cagggtcgagtgcagtggcacctccgcctcccggattcaagtgattctcctgcctcagcctaccaagtagctggggttagaggcacctgccacaaggcttggctaattttttttttttttttttttttggatttttagtaaaaacaggktttcaccatattggtcaggctggtcttgaactcctgacctcatgatccacccacttcatcctcccaaagtgctgggattacaggtgtgagccaccgtgcccggccctgtccttttaaatctttagtaggtttttaagtcttatttaaaagtcttgtctcttggctgggcacagtggctcatgcctgtaatctcaccactttggaaggctaaggaaggaggactgcttgagcccaaaagttcaagaccagcctaggccacataggccctgtctctccatttttttttttttttttaattagctgggcatggtggttcgtgcatgtagtcccaactattggggaagctgaggctggaggattgcttgagtcggggaggtcaagacttcagtgatctgtgattacaccactgcactccagcctgggctacagagtaagaatctgtctcaaaataagataaaataaaataaa

SEQ ID NO: 28963 - DNA, 617 bp, Homo sapiens
cagggtcgagtgcagtggcacctccgcctcccggattcaagtgattctcctgcctcagcctaccaagtagctggggttagaggcacctgccacaaggcttggctaattttttttttttttttttttttggatttttagtaaaaacaggttttcaccatattggtcaggctggtcttgaactcctgacctcatgatccacccacttcatcctcccaaagtgctgggattacaggtgtgagccaccgtgcccggccctgtccttytaaatctttagtaggtttttaagtcttatttaaaagtcttgtctcttggctgggcacagtggctcatgcctgtaatctcaccactttggaaggctaaggaaggaggactgcttgagcccaaaagttcaagaccagcctaggccacataggccctgtctctccatttttttttttttttttaattagctgggcatggtggttcgtgcatgtagtcccaactattggggaagctgaggctggaggattgcttgagtcggggaggtcaagacttcagtgatctgtgattacaccactgcactccagcctgggctacagagtaagaatctgtctcaaaataagataaaataaaataaa

SEQ ID NO: 28964 - DNA, 752 bp, Homo sapiens
cttaggttttgtaaagatctgggtttgacatgaccaatctgatttaattttgtaagttacttgaagaagctactgattataaaattactacaagtctatcctgctgagcaaaaaatggtaggcataaataagaaaaaaattaagagggctaagagtttcattatgatacagagtcttgttttggcatctgggcacaagctgtctgtaagagttaaagaaagaggaaagaaacatgacaagtggctcaactgtcaaagacagggtttattttggagaataaatattttggagaggggcttctggctgattttkgtcaggaacattctctcttacagatttggcaccaaatataagagttaaagaaagaggaaagaaacacgaaaagtagctcaacagtcaaaggtttattttggagactaaacctgagaggggcttctggccaattttggtcaggagcattctctcttagggactaagagtatttattagttttagggtgagagagctttatcacaggcttggaatgtttctgtgtaggggagaagtttatggcagggttggaatgtctctggtcagaggggaggttatcttggggctaacatctctctggccagaggggaggttatatgagggctggcatgtctcttgccgggaaggggtttggaatgtttttggtcagagatgttatttgtggtttgtgatcaggctgaccttagccattaggctgatgtcctttggatttaggcagtttt

SEQ ID NO: 28965 - DNA, 807 bp, Homo sapiens
agtgacttcccaaggccacaaaggtagagctgggggacctgtcttgcagaactactgctggatctcaaggtcaaagtttgctcccttgacctcttctctcaactactctggtcagaggagacaggtctcagaggctcaaacagggaatgccctgaggttgctaaataaaggagagaagaatgctgcttcttttaggcatacatccaagactctgtgaccacacagtggagctatgcattgtggtgactttattccccatctggacaggtgactttcttttgttggagttttgttgtttttcttataagcactagcatcccatattcaggcagcatatacttttgcatagttttcatggaatatttccatgggcatcaagtcataaagttgagtatggttttaacatcaaacactttatatctggtgttgagaaacagatcaaggcaaatagtgtaaggaggttttcatcatcatgctgtgaggttgtaagttgacccacggaatcgctgactccatgtggaaactggccacctttggaattctgctgcatatttaagagtcacgcttgtgatttaaaatttactcactttcactcttttgtaacatgattcaaaaaatcatgagataaaaaacrtctggcattttaatagtgctgtctgattcgtgagacatatttattatggatctttcttgtatagtcattgcttctacggatttcacaaataaaggtggtggttctcttgatgtgaaactcctgtggtgttgaaggcttacagaggcaaccacactgagcctcctctggagcca

SEQ ID NO: 28966 - DNA, 550 bp, Homo sapiens
ctcccaaagtgctgggattacaggcgtgagccactacacccgaccctcagcactatttgtatagcaacattgtggcaataagcccaagtgtccaccaataagagactcactaaagaaagayagataaaagacacatccacacactgaagactaagctgatttataaaaacaaagagggacactctgataaggtactccagtatatatggttagttaaaaaaaaaaacaaaaaacaagcaacacaagtaatgaagcatgctaccacgaacgtactcatgccagagaacaaggaggttacagaggagactggaaagtcagagggagcaggtgggaaaatgggtggaaggggtgggcaggggaagcgacagtgtgtctctgcctaggtttgatttttgaaccatgtgactgtattttttttttttaatgactgtaaaacaaaataaatactctttatactagaaataaaatgttagaaaaatctggattcaaaactaggattactgttctgcactggcaaagttcactaccattcccaaaggcagttttctca

SEQ ID NO: 28967 - DNA, 1333 bp, Homo sapiens
tggaagtcacttaccacagccctagctaagttagggcagtgttcaccttcccatggtctgtctggcttttctcagccacgctggtaagccctggctttgtcacagtcatcttagaaatagcagtgtctggagacagcatccatcctagaaacagctttctcctgcagaagtgagagacagagcttccccctggggcccaggggaaactgaagcaaagggaatgtggaggtgctggtgcttgtttcaggtttccgctcttgcaaggcccgtgagggattgtggggacaggacttgctgcaaagccctgtctctgcattgactcagaggatcctcattgagatgagatttccccgacttccttggtaaagcagcatgagcacgttattttatgccatttaatttaaaatgatgcaagcacacattttgtaggagaggtgaaatctgtgtctggggacagcccctgacagacagggtggcatatggcgacatctgtgtggcaggtctggtgggagccatggaaggaccagggcagggcacgcaccctcctaactgaggtctggtgggagccatggaaggaccagggcagggcacgcaccctcctaactgaggtctggtgggagccatggaaggaccagggcagggcaggcaccctcctaactgaggtctgctgggagccatggaaggaccagggcagggcacgcaccctcctaactgaggtctggtgggagctatggaaggaccagggcagggcacrcaccctcctaactgaggtctgctgggagccatggaaggaccagggcagggcatgcaccctcctaactgaggtctgctgggagccatggaaggaccagggcagggcacacaccctcctaactgaggtctgctgggagccatggaaggaccagggcaggttacgcaccctcctaactgatctctactttggctttctcaggatgggcctcctccaggcctaggccgagtgattggtgagctgggagaggacgggtggataagagtccagtgggacacaggcagcaccaactcctacaggatggggaaagaaggaaaatacgacctcaagctggcagagctgccagcccctgcacagccctcagcagaggattcggacacagaggacgactctggtgggtgactcaggaaggtgtttagtccaaggcagcctacaaactgtccagttgctgggtgctgccactgccatctgggccttagaatgggatgtcaggacacacctgcagctggcgctctgtcctcggaacctgtaatttaaataagctcccaggcacctccgatgcaggtgtgtggagtgactgtg

SEQ ID NO: 28968 - DNA, 781 bp, Homo sapiens
  misc_feature (1)...(781): n = A,T,C or G
aagacaccagtgctcccctgctagctccagctccccccatccccagccccacgtccacaggaggacacagcaagaaggcagccacctggccgggcacggtggctcatgcctataattccaacactttgggaggccaaggcgggtagatcacgaggttaggagatcgagaccatcctggctaacatggtgaaaccccgtctctactaaaaatacaaaaaaattagctgagcatggtggcgggcacctgtagtcccagctactcaggaggctgaggcaggagaatggcaggaacccgggaggcggagcttgtagtgagctgagatcacgccactgcactccagcctgggtgacagagcgagactctgtctcaaaannnnnnnnnnnnnnnnnnnnnnnnnnnnnnnnnnnnnnnnnnnnnnnnnnnnnnnnnnnnnnnnnnnnnnnnnnnnnnnnnnnnnnnnnnnnnnnnnnnntgaaaaaaaaaacctcaggtgttttgatagaaataacagacgtgcctaggaatcatcttccttgaagggagaggagggtcttattgaacttgaaaaaactaaataagcaaarttgatacataaggacacccttctctttacccttacctattcttaacaactttaattcatttctgacactgtcaccaactgaaaaacggtccaactaaaaaaaaaatcataaaggtgagaaaaattgtgacgtgttctatcctaatccaatatatctaaaccaattttactgatagagaaaatatattaagtgaatg

SEQ ID NO: 28969 - DNA, 560 bp, Homo sapiens
agaaggtccatggattgtgggggggggtgtctgtgaatgaatgcactgaattttatgcaaaaatgtttgtttctctgtgcattttccctgggagtattcctaactttttcctakttccaactttgccacaattaaccttgtagaaacataatttaaaaaaattttttaacttaagatgagggacttaatccctagcgtcttcaagctccaaaatgtttgattctgtgcttcataacaagtttttttttttttttttttgagacggagtcttgctctgtcccaggctggagtgcagtggtgcgacctcggctcactgcagcctctgcctcccgggttcaagcgattctcctgcctcagcctcctgagtagctgggactacaggggcccgccaccacgcccggctaatttcttttttttttttttgcattttcaatagagacggaagatattcttatactatcgttttctttccttattattataacactctggggcaaactagtctagggcgttttttagggttacggtgataataacaaagggctctaacaattactatt

SEQ ID NO: 28970 - DNA, 645 bp, Homo sapiens
cgatgaggaaaacgaagtgcctaatccccgctggacgctaactgcagggcaagctccccagtgttgtagttgtgtttcggaggccgagaaccgctatcgggcttcctcggactctggccctggaggggggaaacggcgagggagaaggcgaaacgagtctccagtgtgttcttggggcctggtgcgaggcccagagaattctctgcaggcctttgcccgggcactgattaaggctgcgaagagacgcaccgggctgcgggcttagtagcttcaggcttctgaagtcagagggagggctgagagcttacacttctggagctccccgggagacggcaactacccaaccgtgtgggtgtgtttgtgtatgtgtcttttgttgagcttcggctggctgtgttattcattcaacaaatatttatcgatcttcggcagtgtgtcagacataccttcttctcaaatcttcacatcaaacctgaattatctccatttaatgatgaggaaactcgggctcaaagaagttaagtgttctagccaagactgcatagtaagtggcagataaaacctcaaagttgggccgggcgcggtggctcacgcctrtaatcccagcactttgggaggccgaaacgggtggatcacctgaggtca

SEQ ID NO: 28971 - DNA, 1136 bp, Homo sapiens
agtttgtacagctcgcaagaagtcgctgttaaatttttaagaattttgtgagccagttgttaaatatgatcataatttaaaattaaattatataaacttataattactaataattattattacattttgcaattatttacattgttgaggttactggcatctattgtttctgtttagtgggaatactatataatggcacactactccacatctcttctcaactcccccattccgtgatgtcatgtcaataacttgatattggccatggtaggagaatttacagcatggaaatcagcaaatctacaagttgttctgcttctcccactccccaggtaacctattgttaaacatttactggcacatcaccaaaccaaagaacaaatctatcacaagatttaaaagacctttatggaaaaaaattatttaaaattaatttattgagcacctactatataccagggtctattccaggaaataatcaggcagataaaactctttgttatcatttatatcaaggagaagcaacatgtaatataaggttaagaactatggtagtaaaatacaaatattctagaagagggtggcgtttctttttaaatagtctggatggtaaagatttcattgagaaggaaaaagccaattaaaaacctaaataaaaagaggaataaagctaaataaattgaaaagtataacgcattcacagattaaaaccccaaaatatttcaaatttggggaattttaatctgtgaatgtgttatacttttgcatttcataaaatcygtaactttatcacaaatttatctatacatggattgccagtcaaaatctcaaaagtttttggtagaacttcatcatctaattccaaaatttacatgaaagaacaaaagcccaagaattgtcaaagtttctgaagagcaaagttgggaactcctgccctaataattattaatatagttatatatacaataatatataagaatactatagatacaataatatatagtattaatttactataagggtatagtgattaataaaatatggtattagcaggagtacagagcccagaaacagatctcacagatttgtaaaattgatatgccagagatagcataagaaatctgtgaaagaatggg

SEQ ID NO: 28972 - DNA, 1101 bp, Homo sapiens
tttccacaagctttctcttttccttatttcttgagaatggataagacagtttttgtgaagagaggcaactttgtatgatggttaagggtgacccatgaactgctttcaattcagactgaggtcagaagcaggggttgctgcttcagactccctccattcaaatcacgactccagtattctgatactgtttagcctycttttcctcatctgtaaaataatgataacaataatgtccatttcgtaaagttgtgaagattaagtgaagttagtacagtaatgcactttagcatagtgcttgacatataatgtgtggtaaatataagttactgtatttcttgtggtcatcatcattatcatggaatttggaatagtagaactggaaggaggcttaaatagagatcatcctttgaactcacttattttacagatgagaaacataacctaaagatgtcaagtaacttgacaagttcacaaagctagctcctttcagaaacaatactagaattcagttaacacaatttgaatagtttctactatgctctgctgtgtttaccaactcctgatgcagtgggcatttcatccccaagtagagtagcgttaagtgaccccccatgtcaggctagccttgaactttttaagttccatcacacctaccatgcaattattggttggttggtttttatcactcctcaaggtctgcctcttttctctacaagagaagacagggccaaagtcagattcatacttctgtcatccacagggccctgcacatgttagacacttgatacctatttgctgcaaacaatcttgaaatactagttgtgaaatatccattaaaaataaccaacttcatttgttgcattgtttccggaaggtcaagccttcaggtacaaactaagcagatgtcatttttagaaaggtagccaatacaacatttccttgattaaacttcctgactcttttgcagccctgtggtgttccacatttactttaataactacccctcccaactcaggtgttaaaaagctctattttatgatatgattgaagatgaacagaggccatttaagaaatagttgaattctgtttgagtggtgaagg

SEQ ID NO: 28973 - DNA, 555 bp, Homo sapiens
agattccatttcctaggaacagtttgaatttgtgtgcatctaaaaatatgtaaagcaagaattgccagaaacacaaggacaaactaatccatcatcacagtgggagagkacagcacatccttgttagttattaataaaccaagcagataaaaatcagtaaggttacagaagatcttaacaacacaattaacaagctttatttatatacagaaaactgttaagtttcatgaaacataaattatcttcaagcagatagagaacctgaacaaaaagtaaccatgtagtgaggccatgaaacaaaccttaatgtcaaaggatagataacatactgatcaaattctctgaatataatgtaatcaatgacaaaaaagatgctcttcctctacctaaaaatatgtttataaaaattaagaagcacaattctaaacaactaagtaaagagatgaaagcccaataagatcatggagagaaaagagacaagctaaagttcttagcagagttatttttttgcaaggaaatttatgaaacatcaaaatgaatcaacaaagatggtta

SEQ ID NO: 28974 - DNA, 585 bp, Homo sapiens
tggagtgggaaaatcagatttaactactaaataaatcatgttatttwaaaaggagtttgtgattatgccattgtaaagtgctctatataagcatacttgatcaatatcatgatgctattcacactgggcaagctggtcacatttatattgctgtggatggtaacttagatattttcactctgctgtgttcatcattccttacaggtatgcagatcagtgagaagacctcagtttttatcactcaattgcttggaactgtaaactttgagaacatggatactttctacagaagagggatttcttattttggaactgtaggtttgactattgaatacatgcttccatttcattttcttggatcatagattgccctttgaaaatttctggtcacttttttcctacttttgtaatacattttaagcactactatgtctgaggtgctagaaagtgtcctagattgaaagaagcaatagataacagtatcattttttccatactttatattatatatctatgtatttaatagagcatctttctgtctgttggaatttaggaaaatgactagggatcacatttatgagtaga

SEQ ID NO: 28975 - DNA, 1206 bp, Homo sapiens
aaggttttagttatcacttcctatcatatagaagcttactttagatttttttccagttgcaattgattttcctgtcttttgggtctaggggtagggtggttgtcagagacatcttttaaccgtgttttttgtggtcagtttaggagttgagcctgtactgtatataatactttcactaaaaaggatcccaaacagaagaggaaatgtgatgtagttgacagtactcctgtagaaattggtgaaaggagtgctggcagtgtgaccaaaacaatccttgctgaaatacctgggaggagttcctgagactgatttttagagggatttttttttttttccttgagaaacatttgggtatattattatttaagacatcgcccagcacccaggctggagtgcagtgtggcatgctcacagctcactgcaacgtcggactcctggactcgagcaaccctcctacctcagcctttaagtagctaggagtacaggygtgcatcaccacacccagctagtttttttgtgtgtgtggatactgggtctcgctgtgttacccaggttggtctcaaactctgggcctcaagcggtcctctcaacttggcctcccaaagtactggaattacaggtgttagccaccatgcccggccttgaggctaatgtttctttaggtttaatatacttcttgtctgtgtatatagctgatgctctacaaaacagcatatgactattatgccttacttttaaaatcttctcttggcctttgactttggggcaagatctagctatgggccagtaaagcaatccgagcctgttattgattcttaaatcatgatgctgtaatgacaagtaggatctggaggcagttactggaaagatgaggtaatttagaattctctaaaaattgtcatgtcttgattgcctagtttttaacttgtcattgtggcttccactgtttttgagatgaactggattcatgtcccctctttatagacgtagaaagagtagaaagtctcccctccatcattagtttcagtgttatgaactgatgggctcagcacaaaagagggcaaaggacagagggtacaaacaagggaagagacattgcttctttctaattacagccaacagaaaataatagagagctttaaaaagacccaaactggccaggtgcgctggctcactcctgtaattccagcactttgggaggctgag

SEQ ID NO: 28976 - DNA, 1206 bp, Homo sapiens
aaggttttagttatcacttcctatcatatagaagcttactttagatttttttccagttgcaattgattttcctgtcttttgggtctaggggtagggtggttgtcagagacatcttttaaccgtgttttttgtggtcagtttaggagttgagcctgtactgtatataatactttcactaaaaaggatcccaaacagaagaggaaatgtgatgtagttgacagtactcctgtagaaattggtgaaaggagtgctggcagtgtgaccaaaacaatccttgctgaaatacctgggaggagttcctgagactgatttttagagggatttttttttttttccttgagaaacatttgggtatattattatttaagacatcgcccagcacccaggctggagtgcagtgtggcatgctcacagctcactgcaacgtcggactcctggactcgagcaaccctcctacctcagcctttaagtagctaggagtacaggcgtgcatcaccacacccagctagtttttttgtgtgtgtggatactgggtctcgctgtgttacccaggttggtctcaaactctgggcctcaagcggtcctctcaacttggcctcccaaagtactggaattacaggtgttagccaccatgcccggccttgaggctaatgtttctttaggtttaatatacttcttgtctgtgtatatagctgatgctctacaaaacagcatatgactattatgccttacttttaaaatcttctcttggcctttgactttggggcaagatctagctatgggccagtaaagcaatccgagcctgttattgattcttaaatcatgatgctgtaatgacaagtaggatctggaggcagttactggaaagatgaggtaatttagaattctctaaaaattgtcatgtcttgattgcctagtttttaacttgtcattgtggcttccactgtttttgagatgaactggattcatgtcccctctttatagacgtagaaagagtagaaagtctcccctccatcattagtttcagtgttatgaactgatgggctcagcacaaaagagggcaaaggacagagggtacaaacaagggaagagacattgcttctttctaattacagccaacagaaaataatagagagctttaaaaagacccaaactggccaggtgcgctggctcaytcctgtaattccagcactttgggaggctgag

SEQ ID NO: 28977 - DNA, 1206 bp, Homo sapiens
aaggttttagttatcacttcctatcatatagaagcttactttagatttttttccagttgcaattgattttcctgtcttttgggtctaggggtagggtggttgtcagagacatcttttaaccgtgttttttgtggtcagtttaggagttgagcctgtactgtatataatactttcactaaaaaggatcccaaacagaagaggaaatgtgatgtagttgacagtactcctgtagaaattggtgaaaggagtgctggcagtgtgaccaaaacaatccttgctgaaatacctgggaggagttcctgagactgatttttagagggatttttttttttttccttgagaaacatttgggtatattattatttaagacatcgcccagcacccaggctggagtgcagtgtggcatgctcacagctcactgcaacgtcggactcctggactcgagcaaccctcctacctcagcctttaagtagctaggagtacaggcgtgcatcaccacacccagctagtttttttgtgtgtgtggatactgggtctcgctgtgttacccaggttggtctcaaactctgggcctcaagcggtcctctcaacttggcctcccaaagtactggaattacaggtgttagccaccatgcccggccttgaggctaatgtttctttaggtttaatatacttcttgtctgtgtatatagctgatgctctacaaaacagcatatgactattatgccttacttttaaaatcttctcttggcctttgactttggggcaagatctagctatgggccagtaaagcaatccgagcctgttattgattcttaaatcatgatgctgtaatgacaagtaggatctggaggcagttactggaaagatgaggtaatttagaattctctaaaaattgtcatgtcttgattgcctagtttttaacttgtcattgtggcttccactgtttttgagatgaactggattcatgtcccctctttatagacgtagaaagagtagaaagtctcccctccatcattagtttcagtgttatgaactgatgggctcagcacaaaagagggcaaaggacagagggtacaaacaagggaagagacattgcttctttctaattacagccaacagaaaataatagagagctttaaaaagacccaaactggccaggtgcgctggctcackcctgtaattccagcactttgggaggctgag

SEQ ID NO: 28978 - DNA, 1140 bp, Homo sapiens
gtgccgggcagcaggttaccgtgccaggcgtgaggccaatgcccggtgtggggtgctgaagtcctccccattcagtcgctgccatgctgtggtgccaccggagcccttctttgccgcctgtgtgtatgacctgtgtgcctgtggccctggctcctccgctgatgcctgcctctgtgatgccctggaagcctacgccagtcactgtcgccaggcaggagtgacacctacctggcgaggccccacgctgtgtggtgagggggtgatgcccgctgcaggttgggggaggctcagcacagagaagaagggcagcccggagggctcagggcaggaccaggccgggtatggcgagtctcgcaggggtacgcacagcaactggggcagtttcaggtgccttggtaaccccgcctcccactccccctgcagtggtaggctgccccctggagcgtggcttcgtgtttgatgagtgcggcccaccctgtccccgcacctgcttcaatcagcatatccccctgggggagctggcagcccactgcgtgaggccctgcgtgcccggctgccagtgccctgcaggcctggtggagcatgaggcccactgcatcccacccgaggcctgcccccaagtcctgctcactggagaccagccacttggtgctcggcccagccccagccgggagccccaggagacaccctgagccaggacagtgcctgataagggttcatcaggccaggagtctccccttggcgagcagttcccaccctggttagggctatggagagaatgccctgcctggacactggagcctgggcccctgccctgcaaagacccccgccatgttgagtcacmagcagtaaactctaggcctgcccgaaggcttccttgtgtgtgtgtgtatttcctcctggtgctgggacagaggctgggctgccaggaacatggggtccagtgatcagtggccgcagaatcacggcaccatgcttactccttgcacctgcatgcctgggctgccccacccagccactccctggtgctgtctgggaaaccctgcagtgggtagaaggaggaccctggtgccctggtcttagccctgtgctcattctgtgtagcaggcatgacgtgtggccccatgtggtaccttctgt

SEQ ID NO: 28979 - DNA, 583 bp, Homo sapiens
gagtcagggccagggtaggaaatacataagttgaccaggaacaccttgtcacctcacaaagcaaggaatctctccatccatctgaacaaggagacagcagaaagacattcccactggccaacaacagagcttcagaatggacatttagaatgatcattagtctcctttggaatatgcaagcaaactaactcaaacggatttgaaaactggaaaaaaaygaaggaagatacagatgcccctatttttctcacatgaactctaccttggggtaagcaaagaatcagtaaaagatttttctctgtacaagtattctatctaataaatgaaaaaggagtgatggtaatggttgctagtgactgataaaaatttccaaaaaggacttcaataaagaaaagcattatgtggttcctaatggaagtaaacaagaaaatttattatgtgtttcccaggtgcggtggctcacgcctgtaatcccagcactttgggaggccgaggcgggcggatcacaaggtcaggagatcgagagcatcctggctaacacagtgaaaccgtctctactaaaaatatagaaagttagccaggc

SEQ ID NO: 28980 - DNA, 969 bp, Homo sapiens
aagcagttaagaacacacttgccttcaaagagtagaatgtgtttgctctgaaggtagtagggtatccaggagaagagatgtgtttaataaagtattgaagagttgcaatgtgggcctgtgaattaaacactagactggggagtggggcaagcatggtgttttcctggcgtcttcctaactggctcacatctgctcccttggaactcaagcatgcgtgtctgtgaatgacgcttgcaccgtgaacatctttacttcccaatgacatgagatgacatctgctttggggacttgaagccccsatatctgacaactgatgctctactgggctccatttctaagtttctgtggtgatgatggtggtggtggtggttttaactggctgatttttttgtgtgtgttactgttctttttctgtgtgcatatgtcttttcatagcggaaagaaatcaaacaatgtgaaatgatgaaacacacacatatgcaaccgtgattgattggcagacattttaatcttttacttaccactctgacctcacagttcttcagtaatttgagggctacttttgaagaatcccacatgaatgcaaggctgctagagaccttgggagctacagggtaactgtaagacacattgctgatcccaaggaatttataatttccttgggccaacaaggttaccctggataaaacgattagagaagacaagaggtgcataattaacgcatgaaagcagtcttatttctgagttgaacgttctttcctcaagcatgtcctgagctcttggctgccagctcaccccttcattatcctacaacaacctctgctcccacagggccctttgttggctccagaaatcaggattctcttttcctcttttctttccccgccccgtcttcctccagatcgcctttgtccctgatctgatggttcacaaccttggctgtaagcttttaaaaatctggatgcccag

SEQ ID NO: 28981 - DNA, 969 bp, Homo sapiens
aagcagttaagaacacacttgccttcaaagagtagaatgtgtttgctctgaaggtagtagggtatccaggagaagagatgtgtttaataaagtattgaagagttgcaatgtgggcctgtgaattaaacactagactggggagtggggcaagcatggtgttttcctggcgtcttcctaactggctcacatctgctcccttggaactcaagcatgcgtgtctgtgaatgacgcttgcaccgtgaacatctttacttcccaatgacatgagatgacatctgctttggggacttgaagcccccatatctgacaactgatgctctactgggctccatttctaagtttctgtggtgatgatggtggtggtggtggttttaactggctgatttttttgtgtgtgttactgttctttttctgtgtgcatatgtcttttcatagcggaaagaaatcaaacaatgtgaaatgatgaaacacacacatatgcaaccgtgattgattggcagacattttaatcttttacttaccactctgacctcacagttcttcagtaatttgagggctacttttgaagaatcccacatgaatgcaaggctgctagagaccttgggagctacagggtaactgtaagacacattgctgatcccaaggaatttataatttccttgggccaacaaggttaccctggataaaacgattagagaagacaagaggtgcataattaacgcatgaaagcagtcttatttctgagttgaacgttctttcctcaagcatgtcctgagctcttggctgccagctcaccccttcattatcctrcaacaacctctgctcccacagggccctttgttggctccagaaatcaggattctcttttcctcttttctttccccgccccgtcttcctccagatcgcctttgtccctgatctgatggttcacaaccttggctgtaagcttttaaaaatctggatgcccag

SEQ ID NO: 28982 - DNA, 1571 bp, Homo sapiens
  misc_feature (1)...(1571): n = A,T,C or G
cgcccagctaatttttgtatatttagtagagacagggtttcgccatgttgaccaggctggtcttgaactcctgacctcaggtcatgcacccgccttggccttccaaagtgctgggattacaggtgtgaacgacggcgcctggccgagactttctatttttatggttaattaactcattagttttgttcaaatccacaccttacctaaagtgtaatccttcaaatattataatgataacctactgcatatcatttgtatgttaagctttaaaacaatatctcccagaaaactcatctggaatttaatatctccaaacaaatctctgcaaattgtcatattctttacaaaaagataaagtgagaaaaaactttgataatatacttgatgttacatagcaagttcttaattaaagcrcagtaatcaacaaacactaatcaaaaatatcaacagaacattgtttacaatctgtcccagagaagggacttaagccttgctgtgtaatggtgaaactttccaaaatagtcaccaaaatatatcatagcagtattaataagagaaggcatctcacagctccaatgctgaaaacaaaacaaaatgaaaaaataatcctctcaaatttgtcttacacaataattcaatgtaaattaaacaattttattctgtctgttttatgcagatgctaaatttaaataagtaatcagaacagttttccaaattgtatagctttagagatagtagtcagaaatatctataatatgaaggaaggataggaaagatttaatcaaagagaggcatcatttctttgagatttactcatcacaagattttaaatgtgctctttttaaagaagcaacatgctagcactataaatatatcctaggaagacaacacagtgagattacaaatataaagcaatagaattctaaagagcctagagggataaagtccacatagatattgagcatttttcattttctgaaatcgccctgccattttaagcaacgaagtggaggtcttgtaaaatgactgtagtctgccatccctgtgcacttgatgaagagtttaggaaaaaaatcatgtgtctgaaagtggaaaaactctctttttgttttcactgtctatgtgggttcattcttaggaggaaggaatattcctaaacccgtaggtttagtaatacagtgttaaatgtttcatgataactatgcatttaacccttatcacgtgcataataaagaggttcatgagtttgaaaattgcatatagtcttttaaacaagctcaatcaacaagaatgttgtgtttcctacgctagtgattagaaaggcgtaagaactaaatatccatgccctatgtgaacaaaagctcattatccttacaactatattttttcaaatgactataagtctatattaaataagaaacacctccaagtacacgagatattttcatacctagagttttgtgtgtatacnnnnnnnnnnnnnnnnnnnnnnnnnnnnnnnnnnnnnnnnnnnnnnnnnnnnnnnnnnnnnnnnnnnnnnnnnnnnnnnnnnnnnnnnnnnnnnnnnnnnt

SEQ ID NO: 28983 - DNA, 1571 bp, Homo sapiens
  misc_feature (1)...(1571): n = A,T,C or G
cgcccagctaatttttgtatatttagtagagacagggtttcgccatgttgaccaggctggtcttgaactcctgacctcaggtcatgcacccgccttggccttccaaagtgctgggattacaggtgtgaacgacggcgcctggccgagactttctatttttatggttaattaactcattagttttgttcaaatccacaccttacctaaagtgtaatccttcaaatattataatgataacctactgcatatcatttgtatgttaagctttaaaacaatatctcccagaaaactcatctggaatttaatatctccaaacaaatctctgcaaattgtcatattctttacaaaaagataaagtgagaaaaaactttgataatatacttgatgttacatagcaagttcttaattaaagcgcagtaatcaacaaacactaatcaaaaatatcaacagaacattgtttacaatctgtcccagagaagggacttaagccttgctgtgtaatggtgaaactttccaaaatagtcaccaaaatatatcatagcagtattaataagagaaggcatctcacagctccaatgctgaaaacaaaacaaaatgaaaaaataatcctctcaaatttgtcttacacaataattcaatgtaaattaaacaattttattctgtctgttttatgcagatgctaaatttaaataagtaatcagaacagttttccaaattgtatagctttagagatagtagtcagaaatatctataatatgaaggaaggataggaaagatttaatcaaagagaggcatcatttctttgagatttactcatcacaagattttaaatgtgctctttttaaagaagcaacatgctagcactataaatatatcctaggaagacaacacagtgagattacaaatataaagcaatagaattctaaagagcctagagggataaagtccacayagatattgagcatttttcattttctgaaatcgccctgccattttaagcaacgaagtggaggtcttgtaaaatgactgtagtctgccatccctgtgcacttgatgaagagtttaggaaaaaaatcatgtgtctgaaagtggaaaaactctctttttgttttcactgtctatgtgggttcattcttaggaggaaggaatattcctaaacccgtaggtttagtaatacagtgttaaatgtttcatgataactatgcatttaacccttatcacgtgcataataaagaggttcatgagtttgaaaattgcatatagtcttttaaacaagctcaatcaacaagaatgttgtgtttcctacgctagtgattagaaaggcgtaagaactaaatatccatgccctatgtgaacaaaagctcattatccttacaactatattttttcaaatgactataagtctatattaaataagaaacacctccaagtacacgagatattttcatacctagagttttgtgtgtatacnnnnnnnnnnnnnnnnnnnnnnnnnnnnnnnnnnnnnnnnnnnnnnnnnnnnnnnnnnnnnnnnnnnnnnnnnnnnnnnnnnnnnnnnnnnnnnnnnnnnt

SEQ ID NO: 28984 - DNA, 792 bp, Homo sapiens
acacatatcagtgtgtatgcattctgatggaaagcaatgtgtgaaatgctatgacattatttgaataaacaaccttttttattaaacatgctttatccaacttaagaaaatttaagcttagttttagatacccacttctctgtccaagtaagtcatgatagctgtaggtgggacatgtgcatggaatgtgaataatcacccttctggatgattgattgcttcagttcactgaaagtgtttgtttacaagtttaagcagtctgtggaatttggcatgacaggccccctttctcttgccttcaaggaggctagagcttcactgggacaagaaatatcacaaatactgagagaattgctaaaggctatgtaaagcttccagcatagcccatctttcatagaaatattgatatagtagacataataaatattgcataaccttcataattttggcagtggaagttgaagctgataactttcactttttattatttaatttttttccctctggaatctccaagtctatacagtttgaggatttgtttaaatcatgagaatgaataaggaaggttctgtaggttttataggaacgcatatgaagtataatatatactatggagcactcgtattttttttccttaagattctgtttagaaatgatggttagcgctgcaagctttcacgttttctctcagtgctcaraatttttttttttttcttccaggcaagtttctgcagcagcgactccctccagaggctccgtgaaccgagggaagggagtaggaacaccaaatac

SEQ ID NO: 28985 - DNA, 530 bp, Homo sapiens
cattagctaaggaagaaagatggcagccaaggatattcaatgatgaaagtatcttgaatgataggaatagggaatctcaggggagaaggaatctaaaatgagcatagcaaggtggctgggggagaatcacagagggccttgagtactaggataaggaaaccatagctccattctatcgaatttgatggtttctttgagcaggtgattgacatacccagtatcttttagraagatgactgatatggtttggatctgtgtccccccctcaaatctcacgttgaaatgtaatccccaatgctggaggtggggcctggtgggaggtaattggatcgtgagggcagatttctcatgaatgtcctagtgccaccctcttggggattgtcttagtgaaagcgaatgagttttcgtgagatctgcttgtttaacagtgtgtggcacctcctgcctcgctctcttcctcctgttccggccatgtgaagtgctggctcctcattttccttccaccatgattggaagcttcctgaggcctc

SEQ ID NO: 28986 - DNA, 638 bp, Homo sapiens
tctgagaacgatatccacaaaaataatatatgtattcttatatttttgttttagctgattttttcttatgtgtttactgatttataaattattaaatgtgctaagtacattattttatttaattttcatatcaaccaggaagtaggtatgattattattctgtttgatagaaaatatcttagatgtttagagaggttaaataagatttcaaagattaccaaactagtaagtgatgtctggtggtgtctaattccaaaacttcctagccaatatgtatactgcattaaatagttcatgatgcatattttcatatacaactgtgttaaaattaaagacctataataaayatcattatacattattataaaatactatatttaagtttttgaataagaaaataagcaataataaaataatataaaataaccagaaaataaaaagaaatccttgtctacaaacgaaacaactatagtatataaaaacaaatttatattatagcaattatatgttagaaacagaaatagaaagtaccttgttaaattagaaaaaaaagagtacatggtacataaaaaatttacaggaaagaaaagtaattgtatgattcaaactgtaaggtcttattgaaaggcctcaaggga

SEQ ID NO: 28987 - DNA, 807 bp, Homo sapiens
actggttctgtccctctgaagcagcctaatacgtggtttgtgccccatattaagcagtgagcaacttgaggcaagggactacatcttattcacctgtgtgtcagttaccagtttattgcctcttaggtccaaatacatccttcaatatatgctatgataaaccacagagttcctataagcatttctccttaaaagggaacatgatgtgaagccttcttagtagagggcactggaggggcattgcaggtggaaggggctttctgtaatttctggtgagaggaaggcagaaggacatccagagttatccattgctgcctgccagagccacagacagtcaggaactaccccaccgcgtakcctgggcctggtaataacccattcacaactctctatgcagaactcaaagaccccttgctccacatcccaccatgaacagggctgcctgaatggccatgtcatagttgctgatggtctgctcccaacctgcagtaccgagggctgactgttgtttgcaattccagactaacactggactggctaaactggtgaatatctctccattttgtagctgaatataacttcaaagtgattgccaagtttattttttcttcgctactgtccctcagccctagggtactatataaagtttccttatctattatagttaataatccttatattaagcttcctctgtaaaacctacagagttttagttttatagcttaattcttatattaaacttcctctgtaaaacctacagagtgtggtttctatctcctgatcactacaatccaagaatattctttg

SEQ ID NO: 28988 - DNA, 551 bp, Homo sapiens
tttatcctcttttgcaaatgaagtaagttcctttaggaagagattaggagctgtctgttttatggcctgcttctgccttccagccagagctttgactctgggggctaggacaatggcaagcttctctcccagggacactttcatttcaggttctgaatgcccagtggaggcagggcagaagcctggggtcctcttggtccttacatctcctgatgtggaacaacttccagtcagctggagcaagggtgattatggcaccacccttctcagcatgccatgccaaggtagagtctccattccaaaagtaggggctgggtgaaagaatggagcccccattacctcatggcacttgctcagaacttggaaaggggtaacaggagaagaytgcaaggggacaaaagaaaacctttgggtgattatgtcaattgtggtgatggtttaatagaggtatactaaaacttaacaaaaatcctatacatcaataaaactgccaaaattgcagaacataacttagggggagatatttctaatataataaagagttagtataa

SEQ ID NO: 28989 - DNA, 551 bp, Homo sapiens
tttatcctcttttgcaaatgaagtaagttcctttaggaagagattaggagctgtctgttttatggcctgcttctgccttccagccagagctttgactctgggggctaggacaatggcaagcttctctcccagggacactttcatttcaggttctgaatgcccagtggaggcagggcagaagcctggggtcctcttggtccttacatctcctgatgtggaacaacttccagtcagctggagcaagggtgattatggcaccacccttctcagcatgccatgccaaggtagagtctccattccaaaagtaggggctgggtgaaagaatggagcccccattacctcatggcacttgctcagaacttggaaaggggtaacaggagaagattgcaaggggacaaragaaaacctttgggtgattatgtcaattgtggtgatggtttaatagaggtatactaaaacttaacaaaaatcctatacatcaataaaactgccaaaattgcagaacataacttagggggagatatttctaatataataaagagttagtataa

SEQ ID NO: 28990 - DNA, 605 bp, Homo sapiens
tagagcaaccatgtgagtgtgtgtatgtgcgcatatgtgtgtgtgcaagccctagcgactgtctgagatcccttggggggaggcactgttttgtccagattcccagaagtttctctgttttgtggtccatgctctgaaacattgaatgarttgatcacttgcctgaggactggaaggagactgctggtttcaggcagatgaacttgaaaattatgaagaatgatcttttttctcttctggtttggcaaataactttaattctctaatggagagctttaattggaaccttgattctatattcagaggtaatgggctttaccaaaaatggattggagcagttcataaatttttcccaaaatgttaacatactacggggccgataggggttgtttagcttggcaaaaaaaactagcattaaagattaaaataacaacttcctggattcctgtgcaggctgctaacttgtcctggtgtccttgggccctgagtggacagtcgtgacatcatcagtaatgaccataaatcagcaagaatcccaacctcttcatagttctcttgcaagaagtttgagggaacaaacaggcagagtgggtgtcaaggaataa

SEQ ID NO: 28991 - DNA, 475 bp, Homo sapiens
atttgaaagtatragataatatagtgcaaagataattccataaattatgtggtaagtacagtaaactttctgcgattatggaagataggatcttgtttcagctacctaattgaaatctattgcatcaaaaggagccacaaaatagtataacagaaaactggaaataattaattcagggcaatggagtttctgaaaaatgtaggtgaggattctaaagagaaagcaaaacataaaaaagtaagagattggatgtcatgccatccaagataaaaatatagtgtcctttactgttacttatgaggtcatagttgacctttagacagttccaatgtccacgctatttcaggtttgttctaaatctataggatttggagtagaattggccactgcaaaatattagactttctttccctctaaatctctaaatttcaggcatacttttaggaacaaacttgttatgattaaatggtgaaag

SEQ ID NO: 28992 - DNA, 595 bp, Homo sapiens
aaaggacagggaagataggtttacagcatattacacaggtttaagtgagaggatagtggctcaaactagtatcatgtcactctatatgaaaaacagacaaatttgaaaaataattcatggatggaataaagaaataaaaggtgattgtgtggagaaagagagatagcagtcactcccaaatatttgttatgagtttccgacagaagactactctttgttgagatttcaactaagttttccaggtatgtgtatcaatgacagaagatcagcagattaaattaatgggtgtcccatgaattaatttaaatattttgtttttgtatttccattgaggcccaagagtctgayagtaagcaaataattgcatatataagaatagaatttattaatagaaaagagaaaggataggagatctaaaattaagtattgttgaagcaaataagtgaatgcaagttctagatgatagagaaatttaaagcagaattttttatttaataatttttggtcctaaatagtaagcctgttaaactgctcaaattttcaaattttctttgacaaattaatcaagaaatatttacttaaaccatacaataag

SEQ ID NO: 28993 - DNA, 616 bp, Homo sapiens
taatgaaatataagctaaaatatgatttcaagaaaagaaatacagtgtctgaatgtagtgattaaatattggtgggcactcatctaagtgatggtgcacctatattacctgtaacacagcataaagaaagtgcagtttgatatatatctttaatattctttttttttttttttcagatggggtcttgcactgtcacccaggctggagtgcagtggcacaatcttggctcgctgcaacctctgccytccagactcaagcaattctcctgtctcagcctcctgagtagctgagattacaggcacctgacaccatgccgagctaatttttttttgtattttcagtagaggtggggtttcactatgttggtcaggctggtcttgaactcctgacctcgttgatccaccagccttggcctcccaaagtgctggggttacaggtgtgagccaccacgcccagcccatatctttaatattctttttactgaagtgagagacgatataaaaaaacgaaaataatttctcagaatcatgtattcccagattgttctaggtgtagacatccttgttacttgttacttttaacattccttctaacataacaactctttacttaaaac

SEQ ID NO: 28994 - DNA, 455 bp, Homo sapiens
attaactaatgtgcatagttgtgatcccataaatctttatttacaaaaacaggcagtagatcagactttgcttgcaggatgtggcttcccaaccctaattcttatgcttaaaagcagcattcaatgactaatgatttaatagaaattactatgtgcaaccttaaaaactggcaattttaggtgaacatttaagacacccaagaaggtatttctttgtctagmatcaccatatagcttatcttggtcttaaaattcatgtcaaaaatatatagttttcttagaaaggatagaggtcagcacaaagagaaaatacaatgtattaagaagttaaacaatgtcacatagcagtttgtctattttatattaagtgcatgttaataacattcatatcattccttagaattagtaaacatataagaaattagcagagaaaaacaataaaaatgtaaattttt

SEQ ID NO: 28995 - DNA, 869 bp, Homo sapiens
ccatgttggccaggctggtctcaaactcctgacctcaagtgatccacccgcctcggcctcccaaagtgctgagattacaggtgtgaaccaccacatccggctttaagtatgtatttttgataaactgtacctagaaggctttaacaactaatacctaagaaccaggtccctcatatttattcacctgtcaaaccaaaggtcatctgtcattttgttctacctgttcttaataagactttgtaatccagaaataaagtatagagccattttgttttacataggaagaacatatgatttgtcatctaaaccagaatacagatgctcctagatttacaacagggttacaccccaataaacccatcataagttgaaaatgcattgaatacacctagactgcagaacatcacagcttagcttagcctaccttgaacaaactcagaacacttacattaacctatggttggggaagatcatctaacacaaccccattttataataaagtgttgaatatctcatgaaatgaatactgtactgaaagtgaaaaaatcggtgtatggggactcacagtatggtttctactgaatgtgtatctctttcacaccatcataaggttgaaaaatcattaagtcgatccagccaaagttggggatctgtacttttgtgagcgaaagataataattgtaattatgtttagattgtccccaataaaccaggagacatgattactstagctaccagcctgcatcctctcttagaaccgcatctctttggagatggctttctaagaaaactagcaatgaaacctggaaggaaagagggaacatacagaaatgagaagagtcagctcagaggttctcaacccaggcagg

SEQ ID NO: 28996 - DNA, 902 bp, Homo sapiens
ggaaggaaagaaggaagggaaggaaagaaggaaggaaggagggagggagggagggaaagaaggaaggagagaaagagagagagagagaaaggaaggaaggagggaaagaaggaagggaggggaaaggcaaaaatataaaagtagaattgtggtatcgtattgaagcaggatttttctcaatcacttttaccagctggagacacttagctggcaacacccttgccttgccttggcccccagctttggggctggctcatccccctgccatttctgtcatgtggggcagctgccctccactggcagtgggcacaagggcacgatgttacagccttctctgtacccacatttggtggatcctgagctcttgtcctgcaaccaagaagaatgaaaatatgctgacaatmaaagaatgaagagggcggagaataattttattgaactacgaaacagttctcatgggcatggtgccccacccccacaaaagagtggtttttccttcagtgtggctgagtctggggctttcatgggctcagaatagagacatgctgattggtttatgagtatgcaaagaaaggctaaagaaaaggcaccgctcaaaggtgggcatggtagtacagaaaaaccaattaggaaagggtaggtatacgtaaaataggtgaagggtggggatcaatcagaggaattcttgccaaacaggaagacagattctcaatctggtctgtggatttgacttgtagcttggctttcaggctttaaactatctttggcttagaggtggggtttcactgggtacccgcctctatctgactaggcatttgtctatctcctgatgctatcagtattataatagagttttgagagcatatctttaatatacttaccaaactgtgtaagtcaagttg

SEQ ID NO: 28997 - DNA, 1106 bp, Homo sapiens
tcattctggaaaataggtacattttgtctgaagttttgctactgaggacaagaggcttcagaaacaaaaaatcgatattaaattgtggcaattttagacaggggacactaactatggttaagtttcaagcaactcagcagccaggtacacatacatctgcagcagaatatgaatattcaaataaacacatagcttttatcacatttcctcttttattttcatgttgaaatattctcaaatgcaaggagaagagacatggcttgaattaaagaacagccatagttgaaggcttatcacacttagagtgcatgggacaacaatatcaattatttacagtgtaagatataaggcattaatattttatttcatgtcaggaaccacatggcatgtaaaaggcagattctaaaatgagtttcataggtacttgaaggtaacgtgagaaagcgcaaaatggcaaatatgcaatttcttttaaacacaaaataagcacagtttagaagagctcgaatcaaacttacaaaagcaatttttcaaaatgattcaaagtactgttcttataatagatacttaattcacaagccttcttcttagtaccagatggcacagtgcgctgtgcaaagccatgagggtgggagcaccattgttacgacactggcaggaagagactagcccaggcctcttcattccagattaaatagaaacaccagctccaaggcagtgctggtggcctgcctgcacagactttgcctattgaaaggcagaaaaaaatattaatgaagaattaaattgatttaaaaagtaatttattggagaaaacaaaaagtaaaataaaactctaaagttaaataaattaaattaaattgatttaaaaggtatttcacacagtaattacataatttaattttacagtttcatatgtggatgctcctggacttatgatggggttatgtcccattaaaccattgaaaattgaaaatatcctaattcgaaaatccatgtaacacatctaacctaccaaacatcatagcttagcctagtgtaccataaacatgttcagaacacttatattagcctatagttggggaaaratcatctaacagaaagcc

SEQ ID NO: 28998 - DNA, 530 bp, Homo sapiens
tggaaaacatgagaaaatgggtcaagcattttctttttatttaatattttaagaaatatattartttgaatgacctttttaaacagtgatgacacagtcatacttgtttgctttgaaagtaataaacttgtgttttggctgctagttcagataacttggatagaatcttcagtgtgtcttggttttatttatatgacaactacaaaatcagttagagcttatgagatacaaattcttggatagtctcatctcttagagataagactactgccagctactctacatttataaaagctggaaggaggaaaatcaaaatcaccaacatatttgttggtttgtttctcaaagtttccgtaattcgttattattgatgccattgacttttgagtttcttgatttcttaactgtatacagtaaatgcttcttttgcttattctttatttagcatttcacaagaatatgaagagtgatgtaataagcccaatgaacaaattaacaaaaagttgatatattctgtttccatttcttcc

SEQ ID NO: 28999 - DNA, 530 bp, Homo sapiens
tggaaaacatgagaaaatgggtcaagcattttctttttatttaatattttaagaaatatattagtttgaatgacctttttaaacagtgatgacacagtcatacttgtttgctttgaawgtaataaacttgtgttttggctgctagttcagataacttggatagaatcttcagtgtgtcttggttttatttatatgacaactacaaaatcagttagagcttatgagatacaaattcttggatagtctcatctcttagagataagactactgccagctactctacatttataaaagctggaaggaggaaaatcaaaatcaccaacatatttgttggtttgtttctcaaagtttccgtaattcgttattattgatgccattgacttttgagtttcttgatttcttaactgtatacagtaaatgcttcttttgcttattctttatttagcatttcacaagaatatgaagagtgatgtaataagcccaatgaacaaattaacaaaaagttgatatattctgtttccatttcttcc

SEQ ID NO: 29000 - DNA, 586 bp, Homo sapiens
tgacttcactgccagtctttatctagctcccaaaatgtttgcaaattcttagcattgtggtttcccaatgatctcattgttttattctcttgaaatattatgtaagtattcaatatgaccttggaaggaagaaaaaaatagtagtactggctaatgacttgaaccagaaaccttagactatatttagtaatacattttcctcctgatattacctataattggtctatgtcccctgcatattatctcaccaaaacccatagaagggagaaacaataaagctgaacacaataggtatatataaatttttcagtgttatttatgaaaaactgtggcttatccagagtaacacaaaaatcacagagattttttggaaactatgtttgtattagcctctgatactttaaataaagaaacattaaataaaggtgcatgtatataagtgagagtcatgaggatagaagttattattttttaaataatatttacatgtctgtatgyttctctatttaaaactttcagctatgtaaatatgatttaatgaaaaaaatgattagacattcttgaaacttctagtttaagagggaag

SEQ ID NO: 29001 - DNA, 537 bp, Homo sapiens
tgatttgataamtgataattgtaataatgcatgtcatgtgccttgtctagtcacatagggaactgatgttcaaagaatgccagccctagcaccaactattctcatatggcacaaacctgtgctcttgtgaaaggataattgactatagttaggaattctgggttcaagtaccagcaagttcttgctttttgttaggctgttgctgtttcttctggagtatgcaaaatggctctaaggtcctttttaagttctgagattccaagaaatgaaaagctaataggtattataatagctatcatatacataaatatgcaccgtattccataaaaaacagtagcaactcctggagcctcttccaggaagagataattcccttcttttcacataaagttttttttaattcctttatttgtactgttttcagtatacagtatgcatttgaggttaaaggaatttttttaaaactttaagaaataagtcttgttctaagaaagaagataaacaatgtggtataacaaagattagaactgcccatct

SEQ ID NO: 29002 - DNA, 537 bp, Homo sapiens
tgatttgataaatgataattgtaayaatgcatgtcatgtgccttgtctagtcacatagggaactgatgttcaaagaatgccagccctagcaccaactattctcatatggcacaaacctgtgctcttgtgaaaggataattgactatagttaggaattctgggttcaagtaccagcaagttcttgctttttgttaggctgttgctgtttcttctggagtatgcaaaatggctctaaggtcctttttaagttctgagattccaagaaatgaaaagctaataggtattataatagctatcatatacataaatatgcaccgtattccataaaaaacagtagcaactcctggagcctcttccaggaagagataattcccttcttttcacataaagttttttttaattcctttatttgtactgttttcagtatacagtatgcatttgaggttaaaggaatttttttaaaactttaagaaataagtcttgttctaagaaagaagataaacaatgtggtataacaaagattagaactgcccatct

SEQ ID NO: 29003 - DNA, 537 bp, Homo sapiens
tgatttgataaatgataattgtaataatgcatgtcatgtgccttgtctagtcacatagggaactgatgttcaaagaatgccagccctagcaccaactattctcatatggcacaaacctgtgctcttgtgaaaggataattgactatagttaggaattctgggttcaagtaccagcaagktcttgctttttgttaggctgttgctgtttcttctggagtatgcaaaatggctctaaggtcctttttaagttctgagattccaagaaatgaaaagctaataggtattataatagctatcatatacataaatatgcaccgtattccataaaaaacagtagcaactcctggagcctcttccaggaagagataattcccttcttttcacataaagttttttttaattcctttatttgtactgttttcagtatacagtatgcatttgaggttaaaggaatttttttaaaactttaagaaataagtcttgttctaagaaagaagataaacaatgtggtataacaaagattagaactgcccatct

SEQ ID NO: 29004 - DNA, 537 bp, Homo sapiens
tgatttgataaatgataattgtaataatgcatgtcatgtgccttgtctagtcacatagggaactgatgttcaaagaatgccagccctagcaccaactattctcatatggcacaaacctgtgctcttgtgaaaggataattgactatagttaggaattctgggttcaagtaccagcaagttcttgctttttgttaggctgttgctgtttcttctggagtatgcaaaatggctctaaggtcctttttaagttctgagattccaagaaatgaaaagctaataggtattataatagctatcatatacataaatatgcaccgtattccataaaaaacagtagcaactcctggagcctcttccaggaagagataattcccttcttttcacataaagttttttttaattcctttatttgtactgttttcagtatacagtatgcatttgaggttaaaggaatttttttaaaactttaagaaataagtcttgttctawgaaagaagataaacaatgtggtataacaaagattagaactgcccatct

SEQ ID NO: 29005 - DNA, 1192 bp, Homo sapiens
agtttcagctttctacatatggctagccagttttcccagcagcatttattaaatagagaatcctttccccatttcttgtttttgtcaggtttgtcaaagatcagatggttgtagatgtgtggtgttatttctgaggcctctgttctactcacaatagcaaagacttggaaccaacccaaatgtccatcaacaatagactggattaagaaaatgtggcaccatggaatactatgcagccataaaaaaggatgagttcatgtcctttgcacggacatagatgaggctggaaaccatccttctcaacaaactatcacaaagacagaaaaccaaacaccacatgttctcactcataggtgggaactgagcaatgagagcacttggacaaagggtggggaacatcacacactggggcctgtcggtgggtgcgggctggaggagggatagcattaggagaaatacctaatgtaaatgacgagttgatgggtgcagcacaccaacatggcacatggcacctatgtatcaaacctgcacgttgtacacatgtaccctagaacttaaagtataataaaaaataaaataaaattatcttgagatcattatcggcccacatgtagttataagaaacaatacatagtgatcttttatactttcactggtttctcccaatggtgtcacatttataactatagtacaatgtgtggactctaaaaagtacaggaaaatgggtgggcatctcttggtatgttgggggtccccaataacaccctcaggcttattgatcactagaatgactcacaggactcataacattgttatagtttattacagtgaagagtaaagactaatatcatcaaaaggaaaggtacacaagtgaagttcaggagaatccaggtgtaagattccagatgttatctcccagtgaagccatatttagacaggattgattttcccagaaatgatgtattatcacacatgtgaaattttgcctgccagggaagcttacccgagacttggtgcttaagattttaattggagatgagtaagagaggtgtgcagtacctgtgtgactgacatcagctcttcagactctagatccccagatgtcaaactgatacagaatcatcaaaggcctcaggcacaaaaaacactcttatcaagcaggatgttccaaggactcagagatcrattccca

SEQ ID NO: 29006 - DNA, 856 bp, Homo sapiens
cccctcacctcccggacggggtggctggccaggcggggggctgacccccccacctccctcccggacggggtggctggtcgggcagaggggctcctcacttcccagtaggggcggccgggcagaggcgcccctcacctcccggaaggggcggctggcctggcggggctgacccccacctccctcctggacggggtggctgccgggtggagacgctcctcacttcccagacggggtgtcagccgggcggaggggctcctcacttctcagacggggcggctgccgggtggaggggctcctcacttctcagatggggcggttgccaggcggagggtctcctcacttctcagacggggcggccgggcagagacgctcctcacctcccagacggggtcgcggccgggcagaggcgcttctcacatcccagayggggcggcggggctgaggcgcttcccacatctcagacgatgggcggccgggcagagacgctcctcacttcctagatgtgatggtggccgggaagaggcgctcctcacttcctaggtgggatggtggccgggcagagaggctcctcactttccagactgggcagccaggcagaggggctcctcacatcccagacgatgggcggccaggcagagacgctcctcacttcccagacggggtggcggccgggcagaggctgcaatctcggcactttgggaggccaaggcaggcggctgggaggtggaggttgtagtgagccgagatcacgccactgcactccagcctgggcaccattgagcactgagttcattaaaatgcttacattaagaaaaaagaaaggtctaggccgggcatggtggctcacgcctgggat

SEQ ID NO: 29007 - DNA, 856 bp, Homo sapiens
cccctcacctcccggacggggtggctggccaggcggggggctgacccccccacctccctcccggacggggtggctggtcgggcagaggggctcctcacttcccagtaggggcggccgggcagaggcgcccctcacctcccggaaggggcggctggcctggcggggctgacccccacctccctcctggacggggtggctgccgggtggagacgctcctcacttcccagacggggtgtcagccgggcggaggggctcctcacttctcagacggggcggctgccgggtggaggggctcctcacttctcagatggggcggttgccaggcggagggtctcctcacttctcagacggggcggccgggcagagacgctcctcacctcccagacggggtcgcggccgggcagaggcgcttctcacatcccagatggggcggcggggctgaggcgcttcccacatctcagacgatgggcggccgggcagagacgctcctcacttcctagatgtgatggtggccgggaagaggcgctcctcacttcctaggtgggatggtggccgggcagagaggctcctcactttccagactgggcagccaggcagaggggctccycacatcccagacgatgggcggccaggcagagacgctcctcacttcccagacggggtggcggccgggcagaggctgcaatctcggcactttgggaggccaaggcaggcggctgggaggtggaggttgtagtgagccgagatcacgccactgcactccagcctgggcaccattgagcactgagttcattaaaatgcttacattaagaaaaaagaaaggtctaggccgggcatggtggctcacgcctgggat

SEQ ID NO: 29008 - DNA, 1027 bp, Homo sapiens
ctgtccagggagagggttctctctggccaggaggaaggatgtctctttctctgagtgcaaggaaaccaggtgggaacgagcccagatgcaggtcagcacacaggagggcaggtgggaacctgagtgggctcgccgtggagtaatattttcagtgaacacagaagccaggttgtctcctgagtggtgaagggcagacaggagaggaggctggggtgcacgtcccactgtgggtatcaagtgcgggcgtggccctgaaacccagcacctcctgacgtttctgccctaggtggcttactctctcaccctagtccacaccctgactggagacagccagctgctggccagtatcccagagggccctgctctagccagaggccgtggtttcgtagaggcacaatctgcatggatgtggggttttctgtgacagccctcagtagccagggtttaggaggagaagttcctaaagctgaattcaaaggccccaagcagttccatctctttctgtgaaggcttcatcattctcccgggctcccagactcagaacctcatactccactcccctaatccctcccagtcacaaaaccatgcctcttcccgcatgagaagattcattattccttgagcacctactaagtgctgggtgtgttacaagttaaaatcctcaaacaagagtcctgtgaagtgtttttagcctctatctatagatgacaaaacaggttgaaagagatgaagtaatttgctcaagggcacacaggtagcaagtggcagagctaagatttgaaaccttccacttccctctcgtcttttctacatacactaccaccaccctagtccaagtcctcaacatttcattcctaactcttgacatgataaatgtctcctaagttacctcccagcactgcccatttacagttcacaaatcgagacggatcttcttacagcattgcatttactaatcccggctccatgctttggctttggaggctcytcaatacaggaacattccaagctccacagccatcccttg

SEQ ID NO: 29009 - DNA, 506 bp, Homo sapiens
tgctaaagaaaaaaacaattaaaaaaattattctgtaggctcatagttcccatgcctcgctcatcatcagaataatttggttgagtattttaaaacaacagattatttcattacaattacaaagattctaattaataagtggggcttgagttccaggaatatattttkaaaaactccagacataattgtgatactcattagagttgacagtcatcccatgcggagaatgaaaagattttgaaaggcttacaggaagggagaaaatatgttataatccatgtttaattattatcaattctctaggtaagtaaataaacaaaatgcctattagaatagaggtcacaaatatgtggcccatagattggttttactggatgtacacagaatcggtatattctctctgcatgggcatgtgtgtgtatgtgtgtgcttgtatatgtttattaattagttacctctacttcataatgtaaaaattttacataataaaattattttcctagttc

SEQ ID NO: 29010 - DNA, 501 bp, Homo sapiens
cacacggccgtgggttgacatagaagggaaggctgtttatcactatggggtgcagaaggtctggtgatggagcaagggggggcatctcactcacaaatccagaaggcacttaggaccactcagggacaagtgcactgccaggttttctcccagggccagaggatgctaaaggcattcctacgtgacactcctcttccaaagtacagtggaaagaaccctggtcttagagaagaccaggtggaattytgccactttagagctgttggattcaaataatgcttgtaaagaagaaatctgaatttaaactgagcaagaaaatgttacagccaatggttgtcaggattctgatggtgggggctatctcattcagttgcttctctgctttaataggaaatgaaccctcttttgaagcagcaaatctgaggtgtcagggaatgcctttccctgggtgccttggaatgtcaaagcttcagggtaggaaacaagaagaggtgaaggcag

SEQ ID NO: 29011 - DNA, 514 bp, Homo sapiens
ttattgctattgtttttgttgagagatttttggctgatattaagagaggaagtaaatgctatgtctatgaaatctcacaggtttcaggtagcactgggaggtttcagataaatatctcttatcaaattaacagaaccctgtggtgactctyttgagcctgatatcccagtaaagagctccattcaggtaaatggtactagaaccaccccttagacccacagggcatacataagcttatgacttcagggtctagggagggacagccatggattgaatttgccagaatgtgtttcacataaatctgttattttctcttattgaactttgttcgctttcctcggaacacttatgcaatcagcaatgagataggaagccattaatgtatttatttgtttaatatctctttcattacaagattgtgagtgtaataaggtaagaattatgtctctttccctcacaattatattgtagcatctaacacagtgaccaacacgtagttgattcttgaaatata

SEQ ID NO: 29012 - DNA, 546 bp, Homo sapiens
tctaatataataccagctctgactgttctagatagaactatgtctgcaaatgtagcaagcacttttggaggtttcagacaattctaatgttttctgtttcataaatgttgatatatatgatttttgtattatgtaaattgtcaatttagaactgggcctccagtgttaaatggtaatttttaccatttcagatatgataatagaaattgggtaaggctcagccacattttctatggaaaggatagcatagagctattacccttaggcctttactataggataaagtagaaactgctgataacaataaagtcaggagtagtgcaggcattggagggataaaagtgctagcagttttgtcttggaaagaagagagaaaaacacgaccttctctttgcctgtatctccaattacattaaataatrtaatagtaactgctgaaataaattcacccccaacatttctaattgcttaaacaactagaaacttattgctcacaaaatgcccctgagcaattccagattattgaaaagtaagtgatactctgtt

SEQ ID NO: 29013 - DNA, 620 bp, Homo sapiens
tcttgcttctgggtgatgaaagaggatggttgctctgcctgtacctcccagccaattttctctttttcttttttttttctttttgtcatttttgtgcttttttgttggtttttcattttcagagctcagacaaacttggtgagggagtacaagccccacagcccttctcctggagctctttggtcacattatccatttcttctgagtccttaggagtccaatagttagacacatgatccactcggatagttcttcctttgatcttgatcccattaaaattgtcaatggccagaattgtgctcctctggccttcatagcagaggaaacagaatcctttggatttcccagtcttcttgtcccgcatgagattgatgttaacaatctcccatattgtgagaacacacagatgatgtccccttcagtcagttcataaggaagccctcccaggaagatccaggcactgtccttgtactcggaaggccaggacawcttatcggccaccccaagctggacctctcgctcattcagctagttgatcggcttcatcttaaagggttcatctctgcgggctcgcactcagcgttcaggtatcagaacaatcacttttataacctgtatga

SEQ ID NO: 29014 - DNA, 613 bp, Homo sapiens
ttccaatgtaaattctttcttataatagacacaatagctgctttagctgaataccaggttcagtactttttatagtaaaattcagtatttatatcaaccaagcagttaaactttatgcttaacatgccatcttgtgagaagtttacgtttagtttcatttgaagtctcaaaaatacaatctgaaggtatgactagaatgaaataaccaagagtctctgtgctcagcactaagattttgtcttttttttattgtaccaataataaaatttgaaagtatttggacctatgggaataaattaaagctgaagcatgagagatgcctgtggacaaccatggaatagcrtcagttactatgtgtttatgagcattgtcaggctcccatgtttctagggaaaatagtggcacaaaaattatgctcctgctcttggagaatgaaaatcacataaactgtctcctataaatcatattttgctcgtctaagtgcatcagacgagagagaaggagagggggctttccactgccagaagctttgatcattttgatcaaacacagaccacctatcagccttccaaatgccaccatgcgtcttacacattttcaatattgtgtcata

SEQ ID NO: 29015 - DNA, 673 bp, Homo sapiens
ttgaagaaataaaatgttatcaatacaactgaagacatcctccatcccttccttgcctcccacctcagaggcagcctgcacatttctatatttttattatatgtgagaatccataaacaatgaatgctattgttctgtttttctaagatatgcacaaatcgtatcccatatatgtcttttcgcaaattgccttttccacctcatattatatttttgagagttggtgatgttgctgcctataaatattgttcattattctacctgctgtacagtattctattattgtagaagccccggtctatccattctcctgctggaaaacaccagcaagtagtttccacattttttgccattatagatactgcctcagtaaacatctttatacatgtcttcytttgcacatggtcatgagtttctggagggtggacagctaattgtgaaattgctgtgtggccactttctaggcaattttcagccagttatatccgctttgctgccatttcctcaaccatgaaatgggtccccagtttatgacttgggagctccctcatagagaaaatgtgagaacctaaaattttaaataataattccagaatgtgtttccaatgacttaaaagaaaaaatcaactgttcccagtggatacagagcttagccagtgacacaatgggaatt

SEQ ID NO: 29016 - DNA, 834 bp, Homo sapiens
tgatacattgtctctccactttcaacagtaacattactccttctggttttcaatccgtattttatgattctcaattgtagtttgggcttgtatatcacatatgaaaaaacaaaaacaaaaaaaccttagttctctgatgggactggacgctatagaaaggaggaagtgctggccatgacttaccttgtgaatttctcggtgcacatggatggtattatttccaaccttcgtgtctgtgttggtctcattgtgatagctgggaggtaagtttgccaggttcacttctgatgatgctttagcagcagcttcttctgcctccatctattaaatcgatgaatttaatgagcaaaattattttctcttgttacaaatgggagtctattagaaaaaaaaaatctcttttcctcttctgcaattacaaagaatgatgatgatgataggtgctattaattgagtactcactatgataagatattatactaaacgttttacatatattacagcactgaaatttcacaatctctctgggaggtgggtgttaatgtcctcatattacaaatagggaaactgaggctcaggaagactagataaattccccagagtcccaggaaagggtggagctgggatttgaacatgtttccactagatagtcttgctccctgtgtaaacgctgttgatgccctgcccatctcctggtggcctaatctggaggtcacctgtatccagttcccatacatgccaacaaccaactctgtctytctctaagggcattctctggtcaccaaagtatgctcagtctgcagaggccccaagtgctagggagttaacatccta

SEQ ID NO: 29017 - DNA, 549 bp, Homo sapiens
gccatcgcgcctggcctaatttggggaattttcaacaaaattgttagaagggctagaagagcaaaaggttgaagaaagaatgctggagaaacaaaacaaaacaaaaaaagaaacagtgataaccaaagaccagaagctgctaatatcaccctgagtggggctctgagaccctacatctgctgccacaattttggagccaccattgcaattagttctaaatccatcaaagagatgaagagataaaaccactgaaaatgttctgcttctatctgggcttctagggcctcggaatgaccctacttctgctgcctcaacagcaactgcgaggacctgccaacaactgccagggaatgaaggccagtgtaagactctcctcccttctccctacyctctggtctcctgcctgtcctttgattggaggagcccacggatatccagttggcaaaggggcctgggaaatgtagtttgcaacctctcaaccccagtagttcagagtgtaccagggcaggaatgaagccaagaataaacaggaagtaacttgcacattat

SEQ ID NO: 29018 - DNA, 538 bp, Homo sapiens
cattttcaatagtcttttatttgatgtaaattggttatggartttataatctgtaaaaggttaatttatattttattaataacgtgcagctggtccttgaataatgtcattttcttcgatatcgtttcattataacattgatgagaaaaaacaattgattcctagcagagcattgtctgtgttaagtttgattgttccattcctgtctgcctaggttttctctgggaactcctgtttccttccacattccagagatgtgcatgttaggtgaactggtgcgtccaagtgtgggtatgtgtgtgagtgtgctctgcaatgggatggcttcccatctagagctggttcccagcttgtaccctcagctgcagtgatggcctctggttacctgtggccctgaactggaaaaattaggtaattatcttattttgtaaaattaaccttgcttaaatgtaggtatagctcacatttatttcaacattcaatattagaagcgttctagtctttattgataagtttggtgatgttttcgtgacaagaa

SEQ ID NO: 29019 - DNA, 538 bp, Homo sapiens
cattttcaatagtcttttatttgatgtaaattggttatggagtttataatctgtaaaaggttaatttatattttattaataacgtgcagctggtccttgaataatgtcattttcttckatatcgtttcattataacattgatgagaaaaaacaattgattcctagcagagcattgtctgtgttaagtttgattgttccattcctgtctgcctaggttttctctgggaactcctgtttccttccacattccagagatgtgcatgttaggtgaactggtgcgtccaagtgtgggtatgtgtgtgagtgtgctctgcaatgggatggcttcccatctagagctggttcccagcttgtaccctcagctgcagtgatggcctctggttacctgtggccctgaactggaaaaattaggtaattatcttattttgtaaaattaaccttgcttaaatgtaggtatagctcacatttatttcaacattcaatattagaagcgttctagtctttattgataagtttggtgatgttttcgtgacaagaa

SEQ ID NO: 29020 - DNA, 538 bp, Homo sapiens
cattttcaatagtcttttatttgatgtaaattggttatggagtttataatctgtaaaaggttaatttatattttattaataacgtgcagctggtccttgaataatgtcattttcttcgatatcktttcattataacattgatgagaaaaaacaattgattcctagcagagcattgtctgtgttaagtttgattgttccattcctgtctgcctaggttttctctgggaactcctgtttccttccacattccagagatgtgcatgttaggtgaactggtgcgtccaagtgtgggtatgtgtgtgagtgtgctctgcaatgggatggcttcccatctagagctggttcccagcttgtaccctcagctgcagtgatggcctctggttacctgtggccctgaactggaaaaattaggtaattatcttattttgtaaaattaaccttgcttaaatgtaggtatagctcacatttatttcaacattcaatattagaagcgttctagtctttattgataagtttggtgatgttttcgtgacaagaa

SEQ ID NO: 29021 - DNA, 527 bp, Homo sapiens
caaggaagtgaggagaagcagcagggtgacagaccaagagtgtggcctttgccaggcctccttcacttactggccatgtgagcgtgggctccttascacacctcctccacttcccctgttataaagcagaaatcatacgtgaacttcaggctgggtgcagtgggtggcccatgcctgtaatcccagcaccttgggaagccaaggcaggcagatcgcttgagcccaggagttcaagaccagcatgagcaacacagcaaaaccccatctctccaaaaaaatacaaaaattagctgggcgtggtggcatgcacctgtagtcccagctactcaggaggctgaggcaggaggactattggagcccagggaggtcaaggctgtagagggccgtgatcacaccactgcaccctagcggcagaatgagaccctgtctcaaaataaaagtgaaccctcagctgagggcattatgaagaccaaatgggcagacccatagaaagctcatggcacaaggcctagagtagaataagtgtt

SEQ ID NO: 29022 - DNA, 527 bp, Homo sapiens
caaggaagtgaggagaagcagcagggtgacagaccaagagtgtggcctttgccaggcctccttcacttactggccatgtgagcgtgggctccttagcacacctcctccacttcccctgttataaagcagaaatcatacgtgaacttcaggctgggtgcagtgggtggcccatgcctgtaatcccagcaccttgggaagccaaggcaggcagatcgcttgagcccaggagttcaagaccagcrtgagcaacacagcaaaaccccatctctccaaaaaaatacaaaaattagctgggcgtggtggcatgcacctgtagtcccagctactcaggaggctgaggcaggaggactattggagcccagggaggtcaaggctgtagagggccgtgatcacaccactgcaccctagcggcagaatgagaccctgtctcaaaataaaagtgaaccctcagctgagggcattatgaagaccaaatgggcagacccatagaaagctcatggcacaaggcctagagtagaataagtgtt

SEQ ID NO: 29023 - DNA, 527 bp, Homo sapiens
caaggaagtgaggagaagcagcagggtgacagaccaagagtgtggcctttgccaggcctccttcacttactggccatgtgagcgtgggctccttagcacacctcctccacttcccctgttataaagcagaaatcatacgtgaacttcaggctgggtgcagtgggtggcccatgcctgtaatcccagcaccttgggaagccaaggcaggcagatcgcttgagcccaggagttcaagaccagcatgrgcaacacagcaaaaccccatctctccaaaaaaatacaaaaattagctgggcgtggtggcatgcacctgtagtcccagctactcaggaggctgaggcaggaggactattggagcccagggaggtcaaggctgtagagggccgtgatcacaccactgcaccctagcggcagaatgagaccctgtctcaaaataaaagtgaaccctcagctgagggcattatgaagaccaaatgggcagacccatagaaagctcatggcacaaggcctagagtagaataagtgtt

SEQ ID NO: 29024 - DNA, 1288 bp, Homo sapiens
  misc_feature (1)...(1288): n = A,T,C or G
tgnnnnnnnnnnnnnnnnnnnnnnnnnnnnnnnnnnnnnnnnnnnnnnnnnnnnnnnnnnnnnnnnnnnnnnnnnnnnnnnnnnnnnnnnnnnnnnnnnnnncttactcatggattttcttagtgacagcgactgctgcatgtaccacatttaccttttctccagagtgatttctccatgtgtctgtctccccacgagctcctgttctcttggaggcagggagtgtcttgtacacatcatagcgtttccacaatttctggttcagtgtcttgaacttggtacattttagtaacttaattggatccatttctgacttccctgaacttgaacttttgtctgctacttttataatatccacattacacttcctggtgaatccagcctttgctcccctgaagtgaactaatttcaggttggaggaatctttgcggttccttatatccaggatgaagcctatctttgaagtttatgcaaaagacatctttgaatagatcatcaatatgtctagtaacaaaacagcattttacccagtacgattctgtcttttctctgtccatgaaaagtgttcagtggatcagaactggaacacagttccttcaagtctaaaatgctgtgaagcccaatggacaaagactggtcactggccagtgatccagaaagggtgctggagaccttccatctggagggcagggcaggcgtgtgggctggactctgstgcacagggaggcatgggaagcagggtggtgagggatgggcttgcttagacccctaaatgactgtcaatctctcttcatccttttcctctgagatccctctggatgatctgatctattcaaacatctacacactgatgatttttgagaccgtagctctcctgaattccaaacctgaatgttctttctatgggaaatagccatgtgaatgtctcacaggcatcccaaataaagtattaacaaaactgaactccttatctttcttccaaaaccttctggtcttcctgggtctctatcatggttcaagacatcactctatcttgtcctacaagaaactgcaggtaagattttagtcctccttcttttttacccacacagaagcctgtgacactacctgtgaggcacctctgtggtccatttctctgcaccccatggccatcccaccactcccagtccatgggtacttaatagtgtccaacacacctctctctctcgtttactcattactctgatcacagtgctatcttttaaaaatataaaactgttatgttacccttatgctgaaaacctttgag

SEQ ID NO: 29025 - DNA, 539 bp, Homo sapiens
tacaacttacaagatgggagaaaagatttagacaggactccaaagcactgcagtaaaccaccttgagacagctgtaacataaagtcagaaaaagctcctgtcttttattatattattaaaatttgtacaaagttttcaccagcaaatggcttgaattccgcctattagtagtagaactgtctcaaaattggaaaaatttaagtaattatactgtatatttgatgaagaggataattacttatttataacygtttacagctaatcttataaaaattcttaattgtatcaaatgtgctattttagtctatatcaaaaatcaaatattaatttattccaagtatttaaatttatcattcaattcacacacacatgcacagacacagacacacacacacacacataatttactcaaaatttcaaacaaaaattatggaataatgtctaagggtttggaagctaacgcatgctaaatatgtacaaaataatgtctgttataataacaatggagcacctgctttaaaatatgaaatgagaccaat

SEQ ID NO: 29026 - DNA, 1157 bp, Homo sapiens
ctggagggctactgtgtggctgcaggacatgaagctgaagtaaacagaagtcagattatcagggcttttaatctcttccagggaattacaagttttacttaaagtaaggtgttgggaagtcactggagggttttcatcaaggtccccagacccaaattttagcaacatttcttgggaagtgcaggaaggtaaagaaaccagtaatgaaactggtattgaaattcagacacagaatttagaaggccacatctaaagttacatgtaaagaaaaagcatttaagagatagtaaagggaatgaacatggcttgagaataaacagtgagcgccaactgtcaacgaaaagagtcaaactctgtaaaatatttgaagagatttattctgagccaaatatgagtgaccatggcctgtgacacagccctcaggaagtcctaagaacatgtgcccaaggtggttggggtatagcttagttttatatattttagggaggaggcatgagacatcaatcaaatacatttaagaaatacattgatttggctcagaaaagcrggacaactcaaagaggggggcttccaggctataaataaatttgaacattttctggttggcagttggttgagtttatctgaagagctgagattaatggaaaggaatgctcaggctaagataaaggattgtggggaccaagttttattatgcagaggaatctctcagatagcagacttcacagagagcacaggttgtaaactgtttcttatcattggacctaaaagggtgcctggttctcagttgattatctcccgggtctagagagaaaggaaggaaaacaaagagggaaggggattctctatagaatgtggatttttcccacaagagactttgcagggcaatatcaagatatggcaaggaaatatattttgggtctaaatattttttccttgtgtcacaatgttatgccagagtcagattgaaaagtaagtcacaatatatagggtcaaataaaacctatctgatgagaatgtatggtttgtagggcatgactccctagatcccttaggtaggaatttgggcaagataaaaaatcagagctcactccttaatacgaaatacccccatgagaaggttggtgggaagcagaagagacagagacttgaaatat

SEQ ID NO: 29027 - DNA, 897 bp, Homo sapiens
aaattatacactaggtggatacattaggttaaagaagacattaaaattaatttcacctgtttctctgtatttttgtaacatgtctattagacaactcaaaattacatatgtgactcacgtttttccattggatagcattggtctggagcctcatttactccattatgcttgtggctgaacctagaataatctagtaatccttacttagaaatctatagtcatgttaaagagttttggtgacaacatcagtgtctgtcatcactagcactcgctgttctaaaccctttccatgtattagctcatttagttctcaaactgacactcacaaaaccctcctcctgcccccatgataggagacccatgtccttagtatcactgttgttatttaaattctaactggaaagaaactttaggttagactccattcacctgttatcatttagataaaagtgaaattgtacttgtaattttatctcaaaataaataaataatatgaataaaactcgaggaagtaacaatcatctgtgctttttccatttgtaagtgttcatgctattttgtttagccaaaatattatttctcctgcttttttgatcaggctaactccacctagttttaaggacacctgaagaacagttagcattcttagctctttaatattagtttccctcttctgtgaggttacagcatccagggaaattgctattgcaacatgtagtgcaatataaagaaagtttgaatttaatctctcttaataaattatgcatttcttatttaaaaagcttcaggaagtaatataaactacttaaaaaataagttctttttgaagwtgttatagcaaaattaacattaactttatgactgcagatgactggctgctcatgataagggccctct

SEQ ID NO: 29028 - DNA, 484 bp, Homo sapiens
cagtggtgtgatctcggctcactgcagtctccgcccctggattctcctgcctcagcttcccgagtagctgggactacaggcatgcgctaccacgctcagctaattttttgtatttttagtagagatggggtttcaccgtgttggccaggatggtctcaatctcttgacctggtgatgcacaggcctcagcctcccaaagtgctgagattacaggcgtgagccacagagcccggcccaatttaccttttataaatgtttttcatttccataaatttctttccttcttttttttttttttgagacggagttttgcttttgttgcccaggatggagtgcagtggcgcaatcttggctcactgcaacctctgcctctcaggttcaaagcatcaaagcattctcctgcctcarccaaccgagtagctgggactacaggagtgcaccaccacatccaggtaattttttatttttagtagagatggggttt

SEQ ID NO: 29029 - DNA, 679 bp, Homo sapiens
gatactttacatttagaaaaaaaatcatacaaaacagtatttattaccatgtatgttccagtgtagaaggtagagacagacatataagcaaataactttctaaaaccaggtgttacttttttatataataaattattttataatgtattgcaattaaaaatataatggcatcagctttggaaaatacatatactacaaaagaatatatatatatatagtcccttattcttctttctaaattttagaatttaattataattacaccaaatctataataaacttgagaagaaaaacctctaaaataaatatcttcttcacaattatctaaatttattactgatggcaggcaaatataaatacgaggtacatgttttccacatttgcagaggcaggtttatttcccatttccctttgtgagaaaatgaggagaagctctaacaaaaagagggttctagaacagtcattattatggaaaaatgtaaggatttacataaaggatttacatgggctaagcagggctgggttttgaagattgtccttgggaaaatggagaggtgasatgtgtatgctctagggaagaaactagtgtataaggaaggaactgcaagactagagcttcagctgactcagtgtctgaggtggagccaaaggagatgaggctctgtatgctagtttcaga

SEQ ID NO: 29030 - DNA, 1131 bp, Homo sapiens
cagccaggccacatggcatgaatgagtacttcataggtaaagctgcagccaagtggaggtggttccacagttggaggcctgaagcagaggctaactgtactcaagttcatcagaagtcctagtactactgtgtacacaaaaaacccatcctacctatttgtagatggtattggcagctgtggaaaccctggtaagaactgtaaaatccttagaacccctttgaggtgggaatccttccctccaagtcaaggttggaggcacatctgaatcacctggaagcctttattttgttaatatatatatttttgagacgtggtctcactgtgttgcccaggctggtctcaaactcctgggctcaagtgatctgcccacctcggcctaccaaagtgctaggattacaggcaaaagccacsgtgctcgaccacctggaagcctttaaaaccaaggcgcaaccagaggctgtggaagagggaaatggagtttttagtgtgtatagagtttcagttttgcaggataaaaaagttatcaagctccattgcacaataactttgatatacttaaacttattgaactatacacttaacattattgacctatacacttaaaactggttaagatgacaaatttaatgtatgtgagtatgtgtgtgtctgtttgccacaataaaacgatacaacagtaacaaaagcataaagacccagaggcccaggaccaacctcaaaccaactgaatcagaatttctggggatgaatggcaggcatcatcatcatcacgactattttaattgtagcacaggcatcattatttttaaaagctgtcaagatcattgtcatgtgcagctaagattgagaatcacaactattaatcaatgaaagattctggctgcataaactcaagaagaatgatcaattaacaactgcctgcattaatttcatatggctacacagatgttctccaaagaagttaggttcagtaagctctttagatgagaaagtggcttttctaggcaaactctttgacttcacaaatatcagatgttttattcactgaaagtcagaactttctgaggagtaagctagcacataaggaaagggatactttttgaaattacatgaatgctgacagccagga

SEQ ID NO: 29031 - DNA, 597 bp, Homo sapiens
atgttttaataatttaagaacaactgaatgaatacatataagtaaatgtacaaagttatcatgcctcaaaaagaaggtggaatcatataaaatatatatattatttttgtttttggtagtgggaacacatgctcctaggcacacagcctgcaaggcacacctgctactatacaaagctgtggagctacaatgtgtaaccctgaggttgtacactcccttgaaaggcaccccagattctctcgggggaggacatatatttttcctcactactgtagttccacccacacattgagaatgactgccatgtttcaccagcatcagtgatgaaatgggattatgcccttgtcactatcactttcagtagaaggaacagcttgagaatcatgtgcaagaaaagcatttcacaaaaaaacagaaacagacatttaaaaatccaatttcattattaattatcccaacacttcgtgataatatttatagtacagcatgytttatgtttattttttgacagaaaacaattctggatattggtggggtacgatgatgatgtttcaaagatacacatagtgtaatgatcaagtcaagatgattaccacc

SEQ ID NO: 29032 - DNA, 1028 bp, Homo sapiens
tcactggaggtttggcattgatccccgtggcaagggtggatgggagcgaacagcacatcttgcaggttgaaaattaattccactgcgaatatgtgtcaatccttagaagtgttggtatcaaaaaaatgttgagaactactcttctaaatcccacccaaccacccagagatatgcttacagctttgtttctcttcaagcacctggcatataagtgcttagaaactactgttaaataaacaagtaagtcaatgcataaataattgaaagttttcacataatctgaaagtttaaacatttgctttacagtctaaaattcctgaagtcatcattgtggaacagatgatttcacaataaacactgatcctaaacaaaataacatgagatctctatcagtgaaatagtaaaatgaacattaactattcgaaggcttaactaaatgaggactcaatttattcagacatcctaaccttgttcccccaatagccatatctcccctctccaagaggccgcatttgtgtaccttctcaagccatcatttctttgatggacccatacttgctcyggaaaaatcaggagcttcaggaagggtggaaaggataacgatctttctactatccatgctccctctatcagccaagagttccattcacttcctcagccctaatttcagactttagttaaactgattagtgagaagtcagcatgagtaaaggaataagtagttccccatggctgagacagctagctgatccttaaacttggtgctcctcccttccataatataagtggttattgaaaagttactgtcagttagggtctacgtttcctgacttttcttgcatttaagaatggtcgatgtgactagttcttgccggtggactatcaacagaagtgagatgtgttgctcctgtgctaatagagtttaaacagaagagccttctcctcacccccgctctcctcttttgccagctgaataccagggagacaaagtcttagagaataacggaaccacaaagtggaagaaatct

SEQ ID NO: 29033 - DNA, 1028 bp, Homo sapiens
tcactggaggtttggcattgatccccgtggcaagggtggatgggagcgaacagcacatcttgcaggttgaaaattaattccactgcgaatatgtgtcaatccttagaagtgttggtatcaaaaaaatgttgagaactactcttctaaatcccacccaaccacccagagatatgcttacagctttgtttctcttcaagcacctggcatataagtgcttagaaactactgttaaataaacaagtaagtcaatgcataaataattgaaagttttcacataatctgaaagtttaaacatttgctttacagtctaaaattcctgaagtcatcattgtggaacagatgatttcacaataaacactgatcctaaacaaaataacatgagatctctatcagtgaaatagtaaaatgaacattaactattcgaaggcttaactaaatgaggactcaatttattcagacatcctaaccttgttcccccaatagccatatctcccctctccaagaggccgcatttgtgtaccttctcaagccatcatttctttgatggacccatacttgctctggaaaaatcaggagcttcaggaagggtggaaaggataacgatctttctactatccatgctccctctatcagccaagagttccattcacttcctcagccctaatttcagactttagttaaactgattagtgagaagtcagcatgagtaaaggaataagtagttccccatggctgagacagctagctgayccttaaacttggtgctcctcccttccataatataagtggttattgaaaagttactgtcagttagggtctacgtttcctgacttttcttgcatttaagaatggtcgatgtgactagttcttgccggtggactatcaacagaagtgagatgtgttgctcctgtgctaatagagtttaaacagaagagccttctcctcacccccgctctcctcttttgccagctgaataccagggagacaaagtcttagagaataacggaaccacaaagtggaagaaatct

SEQ ID NO: 29034 - DNA, 1028 bp, Homo sapiens
tcactggaggtttggcattgatccccgtggcaagggtggatgggagcgaacagcacatcttgcaggttgaaaattaattccactgcgaatatgtgtcaatccttagaagtgttggtatcaaaaaaatgttgagaactactcttctaaatcccacccaaccacccagagatatgcttacagctttgtttctcttcaagcacctggcatataagtgcttagaaactactgttaaataaacaagtaagtcaatgcataaataattgaaagttttcacataatctgaaagtttaaacatttgctttacagtctaaaattcctgaagtcatcattgtggaacagatgatttcacaataaacactgatcctaaacaaaataacatgagatctctatcagtgaaatagtaaaatgaacattaactattcgaaggcttaactaaatgaggactcaatttattcagacatcctaaccttgttcccccaatagccatatctcccctctccaagaggccgcatttgtgtaccttctcaagccatcatttctttgatggacccatacttgctctggaaaaatcaggagcttcaggaagggtggaaaggataacgatctttctactatccatgctccctctatcagccaagagttccattcacttcctcagccctaatttcagactttagttaaactgattagtgagaagtcagcatgagtaaaggaataagtagttccccatggctgagacagctagctgatcctyaaacttggtgctcctcccttccataatataagtggttattgaaaagttactgtcagttagggtctacgtttcctgacttttcttgcatttaagaatggtcgatgtgactagttcttgccggtggactatcaacagaagtgagatgtgttgctcctgtgctaatagagtttaaacagaagagccttctcctcacccccgctctcctcttttgccagctgaataccagggagacaaagtcttagagaataacggaaccacaaagtggaagaaatct

SEQ ID NO: 29035 - DNA, 547 bp, Homo sapiens
aattaatgaccttgcccttttacctttctgaaccttataggacaaacagacaactcacctcgtcccagaacccatggggcaaaaaacaagcttatctgaaatgttttgccaaagctatacctacacaggattatagcaccaccaacaaattctgtgtgatttgtagtaataaaaatctcatttgttcttatttacaccttaatttaaaataatccttttcactaaactgtgaagtagaatgaataaaactattaattgagaacatctgcccacaattataaatatatggaattcacttagttataatcagtacattaacatttgaaaagaaaatgattttttaatgcaaagatatctttcttctgacatattaaaattccaacacactaaagtagtawcgtgagtaaaaaaataataaaatcctatggcttttttattgcatgtttatttaggccaaaccggtacgaggcagctagattaattacttttatactgttaagtactgtacatagttaattatttcatctaagttgtgtgtgagccaaac

SEQ ID NO: 29036 - DNA, 547 bp, Homo sapiens
aattaatgaccttgcccttttacctttctgaaccttataggacaaacagacaactcacctcgtcccagaacccatggggcaaaaaacaagcttatctgaaatgttttgccaaagctatacctacacaggattatagcaccaccaacaaattctgtgtgatttgtagtaataaaaatctcatttgttcttatttacaccttaatttaaaataatccttttcactaaactgtgaagtagaatgaataaaactattaattgagaacatctgcccacaattataaatatatggaattcacttagttataatcagtacattaacatttgaaaagaaaatgattttttaatgcaaagatatctttcttctgacatattaaaattccaacacactaaagtagtaamgtgagtaaaaaaataataaaatcctatggcttttttattgcatgtttatttaggccaaaccggtacgaggcagctagattaattacttttatactgttaagtactgtacatagttaattatttcatctaagttgtgtgtgagccaaac

SEQ ID NO: 29037 - DNA, 584 bp, Homo sapiens
gaaaattatgaaaatgattaaaataaaatatggtaacatgcaagacaagtaaattatttttatcatggattattctttgcaaagagctcaaagcatcttccacgtgttcagtcttttgtattacttgactatgcaatgtactgacagaagatgagctttgtctactctaacatgaaggatttacataccccttaatagtgactccactggagaacaaaagccactaatgcattttttttgacttcctaattttattttaggttcacacasgttatcaaaaagtaaagggaaatgactaaacaaactcacttattatacttattgatggctatgtattgacttcacagtaaatgataactaaagtctatccaaatttttcaaaaataatgccatgtatttcaaatgactctacaaccccagtgtggatattttatgcttatttgtgcaagaggccaagaccacagattatgaacgaagaaaatttgggtagactttagttattattttccttcaagatcgcaagataaaattatctatgaattaactgttacagttaattacactgtgtcactttttcatgtttt
